(19) United States
(12) Patent Application Publication
(10) Pub. No.: US 2004/0265230 A1
(43) Pub. Date: Dec. 30, 2004

(54) Compositions and methods for diagnosing and treating colon cancers

(76) Inventors: Robert Vincent Martinez, Roslindale, MA (US); Eugene L. Brown, Newton Highlands, MA (US); Wei Liu, Sudbury, MA (US)

Correspondence Address: NIXON PEABODY, LLP, 401 9TH STREET, NW, SUITE 900, WASHINGTON, DC, 20004-2128, US

(21) Appl. No.: 10/751,736

(22) Filed: Jan. 6, 2004

Related U.S. Application Data
(60) Provisional application No. 60/438,000, filed on Jan. 6, 2003.

(51) Int. Cl. A61K 51/00; C12Q 1/68; G01N 33/574; A61K 48/00

(52) U.S. Cl. 424/1.49; 424/93.2; 435/6; 435/7.23

(57) ABSTRACT

Compositions, equipment, and methods for prognosing, diagnosing, preventing, or treating colon cancer. Colon cancer genes that are differentially expressed in colon cancer tissues relative to disease-free tissues are identified. Examples of these genes are illustrated in Tables 1-5. Colon cancer genes of the present invention and their encoded products can be used as markers or prophylactic or therapeutic agents for the detection or treatment of colon cancer.

[0001] This application incorporates by reference all materials recorded in compact discs “Copy 1” and “Copy 2.” Each of the compact discs includes the sequence listing file entitled “AM100927 Sequence Listing.ST25.txt” (8,300 KB, created on Jan. 6, 2004).

### TECHNICAL FIELD

[0002] The present invention relates generally to the diagnosis and treatment of cancer, and in particular colon cancer. The invention specifically relates to colon cancer genes that are differentially expressed in colon cancer tissues as compared to disease-free tissues. These genes can be used for prognosing, diagnosing, preventing, or treating colon cancer.

### BACKGROUND OF THE INVENTION

[0003] Cancer is a significant health problem throughout the world. Although advances have been made in detecting and treating cancer, no vaccine or other universally successful method for prevention or treatment is currently available. Current therapies, which are generally based on a combination of chemotherapy or surgery and radiation, continue to prove inadequate in many patients.

[0004] Colon cancer is the second most frequently diagnosed malignancy in the United States, as well as the second most common cause of cancer death. An estimated 135,400 new cases of colon cancer were diagnosed in 2001, with an estimated 56,700 deaths. The five-year survival rate for patients with colon cancer detected in an early localized stage is 92%; unfortunately, only 37% of colon cancer is diagnosed at this stage. The survival rate drops to 64% if the cancer is allowed to spread to adjacent organs or lymph nodes, and to 7% in patients with distant metastases.

[0005] The prognosis of colon cancer is directly related to the degree of penetration of the tumor through the bowel wall and the presence or absence of nodal involvement; consequently, early detection and treatment are especially important. Colon cancer typically originates in the colonic epithelium and is not extensively vascularized (and therefore not invasive) during the early stages of development. The transition to a highly-vascularized, invasive and ultimately metastatic cancer commonly takes ten years or longer. With early detection and diagnosis, colon cancer may be effectively treated by, for example, surgical removal of the cancerous or precancerous tissue. However, colon cancer is often detected only upon manifestation of clinical symptoms, such as pain and black tarry stool. Generally, such symptoms are present only when the disease is well established, and only after metastasis has occurred. Early detection of colon cancer is therefore important in order to significantly reduce its morbidity. Currently, the best means of preventing colon cancer is through early detection of pre-neoplastic lesions in the colon through various invasive and noninvasive screening techniques.

[0006] Most methods for colon cancer screening are invasive. Invasive diagnostic screening methods, such as endoscopic examination, allow for direct visual identification, removal, and biopsy of potentially-cancerous tissue. However, invasive cancer screening procedures are often expensive, inherently risky, and can result in severe medical complications. Invasive screening procedures also frequently result in significant patient discomfort. The discomfort associated with typical invasive screening methods reduces patient compliance with routine screening procedures. For example, flexible sigmoidoscopy is an invasive procedure for diagnosing colon cancer that enables detection of approximately 55% of all colon cancer and is estimated to have an 85% sensitivity with a near 100% specificity. However, the procedure has a complication rate of about 4.5 per 10,000 persons screened. Further, patient compliance with physicians' recommendations to undergo sigmoidoscopy is low, reportedly varying from 30 to 75%, due to discomfort and perceived embarrassment associated with this procedure.

[0007] Non-invasive methods of colon cancer screening involve assaying samples for the presence of materials that are indicative of cancer or pre-cancer. Established non-invasive methods for detection of colon cancer focus on extracellular indicia of the presence of cancer, such as the presence of fecal occult blood or elevated levels of carcinoembryonic antigen, both of which are suggestive of the presence of colon cancer. However, such extracellular indicia typically occur only after the cancer has become invasive, and therefore more difficult to treat. As a result, many non-invasive screening procedures are of limited value in the early diagnosis of cancer. For example, fecal occult blood testing (FOBT) is a non-invasive screening test for colon cancer that is highly variable in accuracy, ranging between 28% and 93%, depending upon the subject's hydration status, with a specificity of 96%. One study estimates, however, that 50 to 60% of all colorectal cancers will be missed if FOBT is the only method of screening used (Allison et al., Ann. Intern. Med., 112:328-333, 1990).

[0008] Recent developments in molecular biology provide methods of great potential for detecting the presence of a range of DNA mutations indicative of oncogenesis. Mutations and the loss of heterozygosity at the p53 tumor suppressor locus have been correlated with various types of cancer. The loss or other mutation of the APC and DCC tumor suppressor genes has also been associated with tumor development. It has been suggested that specific mutations might be a basis for molecular screening assays for the early stages of certain types of cancer. Accordingly, non-invasive screening assays that are highly sensitive and highly specific for detecting the presence of a range of DNA mutations indicative of cancer have been developed. For instance, the presence of such mutations can be detected in DNA found in stool samples during various stages of colon cancer.

[0009] Treatment regimens are determined by the type and stage of the cancer, and include surgery, radiation therapy or chemotherapy. Recurrence following surgery (the most common form of therapy) is a major problem and is often the ultimate cause of death. Current methods for prognosing, detecting and treating colon cancer have failed to provide satisfactory results for reducing the morbidity associated with the disease.

### SUMMARY OF THE INVENTION

[0010] The present invention relates to colon cancer genes that are differentially expressed in colon cancer tissues relative to disease-free colon tissues. The present invention provides compositions, equipment, and methods of using these genes for the prognosis, diagnosis, prevention, or treatment of colon cancer.

[0011] In one embodiment, the colon cancer genes are differentially expressed not only between colon cancer tissues and disease-free colon tissues, but also between colon cancer tissues and one or more other disease-free tissues. These other disease-free tissues include, but are not limited to, cervix, kidney, left atrium, left ventricle, right atrium, right ventricle, lung, ovary, prostate, rectum, skin, or stomach. Differential expression can be either over-expression or under-expression.

[0012] In another embodiment, the colon cancer genes are over-expressed in colon cancer tissues relative to disease-free colon tissues. The average expression levels of these genes in colon cancer tissues can be, for example, at least 1.5, 2, 3, 4, 5, 10, 20, or more times of those in disease-free colon tissues. In many cases, the p-value of the differential expression analysis for each selected colon cancer gene is no more than 0.1, 0.05, 0.001, 0.0005, 0.0001, or less.

[0013] In yet another embodiment, the colon cancer genes are selected from Tables 1-5. In still another embodiment, the colon cancer genes encode kinases, phosphatases, G-protein coupled receptors, ion channels, proteases, metabolic enzymes, or transcription factors.

[0014] In one aspect, the present invention provides methods useful for diagnosing or monitoring colon cancer in a subject of interest. The methods include the steps of detecting the levels of one or more polypeptides encoded by at least one colon cancer gene in a biological sample of the subject, and comparing the detected levels to control levels. The biological sample can be, for example, a blood sample, a colon tissue sample, or a bodily waste sample. In one embodiment, the control levels are average levels of the one or more polypeptides in control samples of disease-free subjects. In another embodiment, the biological sample and the control samples are prepared using the same procedure. In still another embodiment, the one or more polypeptides are selected from SEQ ID NOS:64-126, or fragments thereof. In yet another embodiment, the levels of the one or more polypeptides are determined by using antibodies specific for the polypeptides. The subject of interest may or may not have colon cancer. In one embodiment, the subject has colon cancer and is subject to a therapeutic treatment of the cancer. In another embodiment, the subject is a human, a canine, or another mammal.

[0015] In another aspect, the present invention further provides methods useful for diagnosing or monitoring colon cancer in a subject of interest. The methods include the steps of detecting the expression profile of one or more colon cancer genes in a biological sample of the subject, and comparing the expression profile to a control expression profile The expression profile and the control expression profile can be determining by measuring the levels of the polypeptides or polynucleotides encoded by the one or more colon cancer genes. In one embodiment, the control expression profile is an average expression profile of the one or more colon cancer genes in controls samples of disease-free subjects.

[0016] In yet another aspect, the present invention provides additional methods useful for diagnosing or monitoring colon cancer in a subject of interest. The methods include the steps of detecting in a biological sample of the subject the level of T cells that are activated by one or more polypeptides encoded by at least one colon cancer gene, and comparing the detected level to a control level of activated T cells.

[0017] The present invention also features pharmaceutical compositions useful for treating or preventing colon cancer. In one embodiment, the pharmaceutical compositions of the present invention include a pharmaceutically acceptable carrier and at least one polypeptide or polynucleotide encoded by a colon cancer gene that is over-expressed in colon cancer tissues relative to disease-free colon tissues. The pharmaceutical compositions can also include a variant or an allele of the encoded polypeptide or polynucleotide. In one example, the pharmaceutical compositions are vaccine formulations capable of eliciting an immune response against a colon cancer cell or a component thereof. The present invention also provides methods for administering an immunoeffective amount of a vaccine formulation into a subject in need thereof.

[0018] In another embodiment, the pharmaceutical compositions of the present invention include a pharmaceutically acceptable carrier and at least one active component selected from (i) agents capable of modulating the expression of a colon cancer gene which is over-expressed in colon cancer tissues relative to disease-free colon tissues, (ii) agents capable of binding to, or modulating the biological activity of, the polypeptide(s) encoded by the colon cancer gene, or (iii) T cells activated by the polypeptide(s) encoded by the colon cancer gene. Exemplary modulations include, but are not limited to, up-regulation, induction, stimulation, potentiation, inhibition relief of inhibition, down-regulation, and suppression.

[0019] In one example, the active component is a polynucleotide comprising or encoding an RNA that is capable of inhibiting or decreasing expression of the colon cancer gene by RNA interference or an antisense mechanism. In another example, the active component is an antibody specific for the polypeptide(s) encoded by the colon cancer gene. In yet another example, the active component is an inhibitor of a protein encoded by the colon cancer gene. Proteins encoded by colon cancer genes can be, for example, kinases, phosphatases, G-protein coupled receptors, proteases, metabolic enzymes, ion channels, or transcription factors. These proteins and genes are potential targets for drug action and development.

[0020] In still yet another aspect, the present invention provides methods for screening anti-tumor agents based on their effects on the expression or function of colon cancer genes.

[0021] In another aspect, the present invention provides nucleic acid arrays useful for diagnosing colon cancer or screening for agents that can inhibit colon cancer. The nucleic acid arrays include one or more substrate supports which are stably associated with polynucleotide probes. A substantial portion of all polynucleotide probes that are stably associated with the substrate support(s) are capable of hybridizing under reduced stringent, stringent, or highly stringent conditions to RNA transcripts of colon cancer genes, or the complements thereof. In some cases, at least 10%, 20%, 30%, 40%, 50%, or more of all polynucleotide probes that are stably associated with the substrate support(s) can hybridize under reduced stringent, stringent, or highly stringent conditions to colon cancer genes. In one example, the nucleic acid array includes mismatch probes (e.g., perfect mismatch probes) for each perfect match probe. In another example, the nucleic acid array is a bead array.

[0022] In yet another aspect, the present invention provides polypeptide arrays useful for diagnosing colon cancer or screening for agents that can inhibit colon cancer. The polypeptide arrays include one or more substrate supports which are stably associated with numerous polypeptides. A substantial portion of all polypeptides that are stably associated with the substrate support(s) are polypeptides encoded by colon cancer genes, variants of the encoded polypeptides, antibodies specific for the encoded polypeptides or variants thereof, polypeptides comprising the encoded polypeptides or variants thereof or any combination thereof. In some cases, the substantial portion of all polypeptides includes at least 10%, 20%, 30%, 40%, 50%, or more of all polypeptides that are stably associated with the substrate support(s).

[0023] In a further aspect, the present invention provides kits useful for diagnosing colon cancer. Each kit can include at least one of the following: (a) a polynucleotide probe capable of hybridizing under reduced stringent, stringent, or highly stringent conditions to a colon cancer gene (e.g., a sequence selected from SEQ ID NOS:1-63, or a complement thereof), or (ii) an antibody capable of specifically binding to a polypeptide encoded by a colon cancer gene (e.g., a sequence selected from SEQ ID NOS:64-126).

[0024] In yet another aspect, the present invention provides methods for inhibiting colon cancer in a subject. The methods comprise the steps of (a) stimulating and expanding T cells isolated from the subject with at least one of the following: (1) a polypeptide encoded by a colon cancer gene or a variant of the encoded polypeptide, (2) a polynucleotide encoded by a colon cancer gene or a variant of the encoded polynucleotide, and (3) an antigen presenting cell that expresses a polypeptide encoded by a colon cancer gene or its variant; and (b) administering to the subject an effective amount of the stimulated and expanded T cells. In one example, the stimulated and expanded cells are cloned prior to administration to the subject.

[0025] It is further intended that the inventions not be limited only to the specific structure, material or acts that are described in the preferred embodiments, but in addition, include any and all structures, materials or acts that are capable of performing the claimed function, along with any and all known or later-developed equivalent structures, materials or acts capable of performing the claimed function.

### BRIEF DESCRIPTION OF THE DRAWINGS

[0026] The inventions of this application are better understood in conjunction with the following drawings. The drawings are provided for illustration, not limitation.

[0027] FIG. 1 depicts the hydrophobicity profile of the polypeptide consisting of an amino acid sequence recited in SEQ ID NO:64.

[0028] FIG. 2 depicts the hydrophobicity profile of the polypeptide consisting of an amino acid sequence recited in SEQ ID NO:65.

[0029] FIG. 3 depicts the hydrophobicity profile of the polypeptide consisting of an amino acid sequence recited in SEQ ID NO:66.

[0030] FIG. 4 depicts the hydrophobicity profile of the polypeptide consisting of an amino acid sequence recited in SEQ ID NO:67.

[0031] FIG. 5 depicts the hydrophobicity profile of the polypeptide consisting of an amino acid sequence recited in SEQ ID NO:68.

[0032] FIG. 6 depicts the hydrophobicity profile of the polypeptide consisting of an amino acid sequence recited in SEQ ID NO:69.

[0033] FIG. 7 depicts the hydrophobicity profile of the polypeptide consisting of an amino acid sequence recited in SEQ ID NO:70.

[0034] FIG. 8 depicts the hydrophobicity profile of the polypeptide consisting of an amino acid sequence recited in SEQ ID NO:71.

[0035] FIG. 9 depicts the hydrophobicity profile of the polypeptide consisting of an amino acid sequence recited in SEQ ID NO:72.

[0036] FIG. 10 depicts the hydrophobicity profile of the polypeptide consisting of an amino acid sequence recited in SEQ ID NO:73.

[0037] FIG. 11 depicts the hydrophobicity profile of the polypeptide consisting of an amino acid sequence recited in SEQ ID NO:74.

[0038] FIG. 12 depicts the hydrophobicity profile of the polypeptide consisting of an amino acid sequence recited in SEQ ID NO:75.

[0039] FIG. 13 depicts the hydrophobicity profile of the polypeptide consisting of an amino acid sequence recited in SEQ ID NO:76.

[0040] FIG. 14 depicts the hydrophobicity profile of the polypeptide consisting of an amino acid sequence recited in SEQ ID NO:77.

[0041] FIG. 15 depicts the hydrophobicity profile of the polypeptide consisting of an amino acid sequence recited in SEQ ID NO:78.

[0042] FIG. 16 depicts the hydrophobicity profile of the polypeptide consisting of an amino acid sequence recited in SEQ ID NO:79.

[0043] FIG. 17 depicts the hydrophobicity profile of the polypeptide consisting of an amino acid sequence recited in SEQ ID NO:80.

[0044] FIG. 18 depicts the hydrophobicity profile of the polypeptide consisting of an amino acid sequence recited in SEQ ID NO:81.

[0045] FIG. 19 depicts the hydrophobicity profile of the polypeptide consisting of an amino acid sequence recited in SEQ ID NO:82.

[0046] FIG. 20 depicts the hydrophobicity profile of the polypeptide consisting of an amino acid sequence recited in SEQ ID NO:83.

[0047] FIG. 21 depicts the hydrophobicity profile of the polypeptide consisting of an amino acid sequence recited in SEQ ID NO:84.

[0048] FIG. 22 depicts the hydrophobicity profile of the polypeptide consisting of an amino acid sequence recited in SEQ ID NO:85.

[0049] FIG. 23 depicts the hydrophobicity profile of the polypeptide consisting of an amino acid sequence recited in SEQ ID NO:86.

[0050] FIG. 24 depicts the hydrophobicity profile of the polypeptide consisting of an amino acid sequence recited in SEQ ID NO:87.

[0051] FIG. 25 depicts the hydrophobicity profile of the polypeptide consisting of an amino acid sequence recited in SEQ ID NO:88.

[0052] FIG. 26 depicts the hydrophobicity profile of the polypeptide consisting of an amino acid sequence recited in SEQ ID NO:89.

[0053] FIG. 27 depicts the hydrophobicity profile of the polypeptide consisting of an amino acid sequence recited in SEQ ID NO:90.

[0054] FIG. 28 depicts the hydrophobicity profile of the polypeptide consisting of an amino acid sequence recited in SEQ ID NO:91.

[0055] FIG. 29 depicts the hydrophobicity profile of the polypeptide consisting of an amino acid sequence recited in SEQ ID NO:92.

[0056] FIG. 30 depicts the hydrophobicity profile of the polypeptide consisting of an amino acid sequence recited in SEQ ID NO:93.

[0057] FIG. 31 depicts the hydrophobicity profile of the polypeptide consisting of an amino acid sequence recited in SEQ ID NO:94.

[0058] FIG. 32 depicts the hydrophobicity profile of the polypeptide consisting of an amino acid sequence recited in SEQ ID NO:95.

[0059] FIG. 33 depicts the hydrophobicity profile of the polypeptide consisting of an amino acid sequence recited in SEQ ID NO:96.

[0060] FIG. 34 depicts the hydrophobicity profile of the polypeptide consisting of an amino acid sequence recited in SEQ ID NO:97.

[0061] FIG. 35 depicts the hydrophobicity profile of the polypeptide consisting of an amino acid sequence recited in SEQ ID NO:98.

[0062] FIG. 36 depicts the hydrophobicity profile of the polypeptide consisting of an amino acid sequence recited in SEQ ID NO:99.

[0063] FIG. 37 depicts the hydrophobicity profile of the polypeptide consisting of an amino acid sequence recited in SEQ ID NO: 100.

[0064] FIG. 38 depicts the hydrophobicity profile of the polypeptide consisting of an amino acid sequence recited in SEQ ID NO: 101.

[0065] FIG. 39 depicts the hydrophobicity profile of the polypeptide consisting of an amino acid sequence recited in SEQ ID NO: 102.

[0066] FIG. 40 depicts the hydrophobicity profile of the polypeptide consisting of an amino acid sequence recited in SEQ ID NO: 103.

[0067] FIG. 41 depicts the hydrophobicity profile of the polypeptide consisting of an amino acid sequence recited in SEQ ID NO: 104.

[0068] FIG. 42 depicts the hydrophobicity profile of the polypeptide consisting of an amino acid sequence recited in SEQ ID NO: 105.

[0069] FIG. 43 depicts the hydrophobicity profile of the polypeptide consisting of an amino acid sequence recited in SEQ ID NO: 106.

[0070] FIG. 44 depicts the hydrophobicity profile of the polypeptide consisting of an amino acid sequence recited in SEQ ID NO: 107.

[0071] FIG. 45 depicts the hydrophobicity profile of the polypeptide consisting of an amino acid sequence recited in SEQ ID NO: 108.

[0072] FIG. 46 depicts the hydrophobicity profile of the polypeptide consisting of an amino acid sequence recited in SEQ ID NO:109.

[0073] FIG. 47 depicts the hydrophobicity profile of the polypeptide consisting of an amino acid sequence recited in SEQ ID NO: 110.

[0074] FIG. 48 depicts the hydrophobicity profile of the polypeptide consisting of an amino acid sequence recited in SEQ ID NO: 111.

[0075] FIG. 49 depicts the hydrophobicity profile of the polypeptide consisting of an amino acid sequence recited in SEQ ID NO: 112.

[0076] FIG. 50 depicts the hydrophobicity profile of the polypeptide consisting of an amino acid sequence recited in SEQ ID NO: 113.

[0077] FIG. 51 depicts the hydrophobicity profile of the polypeptide consisting of an amino acid sequence recited in SEQ ID NO:114.

[0078] FIG. 52 depicts the hydrophobicity profile of the polypeptide consisting of an amino acid sequence recited in SEQ ID NO:115.

[0079] FIG. 53 depicts the hydrophobicity profile of the polypeptide consisting of an amino acid sequence recited in SEQ ID NO: 116.

[0080] FIG. 54 depicts the hydrophobicity profile of the polypeptide consisting of an amino acid sequence recited in SEQ ID NO: 117.

[0081] FIG. 55 depicts the hydrophobicity profile of the polypeptide consisting of an amino acid sequence recited in SEQ ID NO: 118.

[0082] FIG. 56 depicts the hydrophobicity profile of the polypeptide consisting of an amino acid sequence recited in SEQ ID NO: 119.

[0083] FIG. 57 depicts the hydrophobicity profile of the polypeptide consisting of an amino acid sequence recited in SEQ ID NO: 120.

[0084] FIG. 58 depicts the hydrophobicity profile of the polypeptide consisting of an amino acid sequence recited in SEQ ID NO: 121.

[0085] FIG. 59 depicts the hydrophobicity profile of the polypeptide consisting of an amino acid sequence recited in SEQ ID NO: 122.

[0086] FIG. 60 depicts the hydrophobicity profile of the polypeptide consisting of an amino acid sequence recited in SEQ ID NO: 123.

[0087] FIG. 61 depicts the hydrophobicity profile of the polypeptide consisting of an amino acid sequence recited in SEQ ID NO: 124.

[0088] FIG. 62 depicts the hydrophobicity profile of the polypeptide consisting of an amino acid sequence recited in SEQ ID NO: 125.

[0089] FIG. 63 depicts the hydrophobicity profile of the polypeptide consisting of an amino acid sequence recited in SEQ ID NO: 126.

### DETAILED DESCRIPTION OF THE INVENTION

[0090] Various aspects of the invention are described in further detail in the following subsections. The use of subsections is not meant to limit the invention; subsections may apply to any aspect of the invention. In this application, the use of “or” means “and/or” unless stated otherwise.

[0091] Colon Cancer Genes (CCGs)

[0092] The present invention provides compositions, equipment, and methods of using colon cancer genes (CCGs) for the prognosis, diagnosis, prevention, or treatment of colon cancer. The present invention also provides methods for the identification of novel therapeutic agents for colon cancer, and animal models for studying the pathogenesis of the disease. A colon cancer gene is a gene that is differentially expressed in colon cancer cells as compared to disease-free colon cells.

[0093] In one embodiment, the colon cancer genes are differentially expressed not only between colon cancer tissues and disease-free colon tissues, but also between colon cancer tissues and one or more other disease-free tissues. These other disease tissues include, for example, cervix, kidney, left atrium, left ventricle, right atrium, right ventricle, lung, ovary, prostate, rectum, skin, and stomach tissues. In many examples, the p-value of the differentiation expression analysis for each selected colon cancer gene is no more than 0.1, 0.05, 0.001, 0.0005, 0.0001, or less.

[0094] In another embodiment, the colon cancer genes are over-expressed in colon cancer tissues relative to one or more disease-free tissues. In certain cases, the average expression level of each colon cancer gene in colon cancer cells is at least 0.5, 1, 2, 3, 4, 5, 10, 20, or more times higher than that in disease-free colon cells.

[0095] In yet another embodiment, 63 colon cancer genes are provided in Tables 1-5. These genes are over-expressed in colon cancer cells by at least 2-fold as compared to disease-free colon cells. These CCGs can be classified into the following five groups according to their functional categories:

[0096] Group I. 8 Kinases;

[0097] Group II. 12 Non-kinase enzymes or their inhibitors;

[0098] Group III. 3 Receptors;

[0099] Group IV. 3 Ion channels; and

[0100] Group V. 37 Other known genes

[0101] Group I Genes

[0102] As shown in Table 1, genes in Group I include 8 protein kinases.

TABLE 1
Group I genes: Kinases

| Gene symbol | Locus link. | Nucleic acid seq. | Amino acid seq. |
|---|---|---|---|
| ZAK | 51776 | SEQ ID NO: 1 | SEQ ID NO: 64 |
| STK15 | 8465 | SEQ ID NO: 2 | SEQ ID NO: 65 |
| MAD2L1 | 4085 | SEQ ID NO: 3 | SEQ ID NO: 66 |
| CDC2 | 983 | SEQ ID NO: 4 | SEQ ID NO: 67 |
| C20orf97 | 57761 | SEQ ID NO: 5 | SEQ ID NO: 68 |
| TTK | 7272 | SEQ ID NO: 6 | SEQ ID NO: 69 |
| CKS2 | 1164 | SEQ ID NO: 7 | SEQ ID NO: 70 |
| MET | 4233 | SEQ ID NO: 8 | SEQ ID NO: 71 |

[0103] ZAK (sterile alpha motif and leucine zipper containing kinase AZK) gene encodes a mixed lineage kinase with a leucine zipper and a sterile alpha motif. ZAK proteins may form homodimers or oligomers in mammalian cells. The expression of ZAK in mammalian cells may lead to the activation of the JNK/SAPK pathway as well as the activation of transcription factor, NF-kappaB. Over-expression of the ZAK gene has been reported to induce the apoptosis of a hepatoma cell line. The hydrophobicity profile of ZAK is shown in FIG. 1.

[0104] STK15 (ser/thr kinase 15) gene has been reported to be amplified or over-expressed in three human breast cancer cell lines. STK15 encodes a centrosome-associated kinase and is involved in the induction of centrosome duplication-distribution abnormalities and aneuploidy in mammalian cells. STK15 over-expression leads to centrosome amplification, chromosomal instability, and aneuploidy seen in many cancer cell types. The hydrophobicity profile of STK15 is shown in FIG. 2.

[0105] MAD2L1 (mitotic arrest deficient-like 1 (yeast)) may be)involved in the execution of the mitotic checkpoint. Mitotic checkpoint control mechanisms check the cells preparedness to undergo division. Through these mechanisms cell cycle progression is blocked before the irreversible events associated with anaphase if either the mitotic spindle apparatus is not properly assembled or the kinetochore is not properly attached to the spindle. Dysfunction of MAD2 may lead to malignancy or degeneration of cells. The human breast tumor cell line T47D has reduced MAD2 expression, and it failed to arrest in mitosis after nocodazole treatment. It was proposed that loss of MAD2 function might also lead to aberrant chromosome segregation in mammalian cells. Deletion of one MAD2 allele results in a defective mitotic checkpoint in both human cancer cells and murine primary embryonic fibroblasts. Checkpoint-defective cells show premature sister chromatid separation in the presence of spindle inhibitors and an elevated rate of chromosome missegregation events in the absence of these agents. Furthermore, MAD2± mice develop lung tumors at high rates after long latencies, implicating defects in the mitotic checkpoint in tumorigenesis. The hydrophobicity profile of MAD2 is shown in FIG. 3.

[0106] CDC2 (cell division cycle 2, G1 to S and G2 to M) gene encodes a member of the ser/thr protein kinase family. CDC2 protein is the catalytic subunit of a highly conserved protein kinase complex known as M-phase promoting factor (MPF), which is essential for G1/S and G2/M phase transitions of eukaryotic cell cycle. Mitotic cyclins stably associate with this protein and function as regulatory subunits. The kinase activity of CDC2 is controlled by cyclin accumulation and destruction through the cell cycle. The phosphorylation and dephosphorylation of CDC2 may also play regulatory roles in cell cycle control. The hydrophobicity profile of CDC2 is shown in FIG. 4.

[0107] C20orf97 (chromosome 20 open reading frame 97) is a protein-kinase-domains-containing protein similar to human C8FW, a phosphoprotein regulated by mitogenic pathways. The hydrophobicity profile of C20orf97 is shown in FIG. 5.

[0108] TTK protein kinase (Msp1 p homolog) gene encodes a dual specificity ser/thr and tyrosine kinase. The mouse Mps1 ortholog, Esk, regulates centrosome duplication. Endogenous Esk and over-expressed GFP-Esk are localized to centrosomes and kinetochores in mouse cells. Over-expression of GFP-Esk caused reduplication of centrosomes during S-phase arrest. In contrast, a kinase-deficient mutant blocked centrosome duplication altogether. The hydrophobicity profile of TTK is shown in FIG. 6.

[0109] CKS2 (CDC28 protein kinase 2) protein binds to the catalytic subunit of the cyclin dependent kinases and is essential for their biological function. The CKS2 mRNA is found to be expressed in different patterns through the cell cycle in HeLa cells, which reflects specialized role for the encoded protein. The hydrophobicity profile of CKS2 is shown in FIG. 7.

[0110] MET (met proto-oncogene) product is the hepatocyte growth factor receptor and has tyrosine-kinase activity. The primary single chain MET precursor is post-translationally cleaved to produce the alpha and beta subunits, which are disulfide linked to form the mature receptor. Various mutations in the MET gene are associated with papillary renal carcinoma. The hydrophobicity profile of MET is shown in FIG. 8.

[0111] Group II Genes

[0112] As shown in Table 2, genes in Group II include 12 non-kinase enzymes or their inhibitors. Among them, four genes relate to matrix metalloproteinases (MMP), seven geens relate to metabolic enzymes or their inhibitors, and one gene relates to tyrosine phosphatase.

TABLE 2
Group II genes: Non-kinase enzymes

| Gene symbol | Locus link. | Nucleic acid seq. | Amino acid seq. |
|---|---|---|---|
| MMP1 | 120353 | SEQ ID NO: 9 | SEQ ID NO: 72 |
| MMP3 | 185250 | SEQ ID NO: 10 | SEQ ID NO: 73 |
| MMP11 | 185261 | SEQ ID NO: 11 | SEQ ID NO: 74 |
| MMP12 | 601046 | SEQ ID NO: 12 | SEQ ID NO: 75 |
| NES1 | 602673 | SEQ ID NO: 13 | SEQ ID NO: 76 |
| CAST | 831 | SEQ ID NO: 14 | SEQ ID NO: 77 |
| CST1 | 123855 | SEQ ID NO: 15 | SEQ ID NO: 78 |
| SQLE | 6713 | SEQ ID NO: 16 | SEQ ID NO: 79 |
| LOXL2 | 4017 | SEQ ID NO: 17 | SEQ ID NO: 80 |
| PUS1 | 80324 | SEQ ID NO: 18 | SEQ ID NO: 81 |
| TOMM34 | 10953 | SEQ ID NO: 19 | SEQ ID NO: 82 |
| CDC25B | 994 | SEQ ID NO: 20 | SEQ ID NO: 83 |

[0113] MMP1 (matrix metalloproteinase 1), also referred to as collagenase, is the only enzyme able to initiate breakdown of the interstitial collagen types I, II, and III. The fact that the collagens are abundant in the body means that MMP1 plays a key role in the remodeling that occurs constantly in both normal and diseased conditions. The identity of human skin and synovial cell collagenase and the ubiquity of this enzyme and of its substrates, collagens I, II, and III, imply that the common mechanism controlling collagenolysis throughout the body may be operative in both normal and disease states. The hydrophobicity profile of MMP 1 is shown in FIG. 9.

[0114] MMP3 (matrix metalloproteinase 3), also referred to as stromelysin 1, progelatinase or transin, is a proteoglycanase closely related to collagenase (MMP1) with a wide range of substrate specificities. It is a secreted metalloprotease produced predominantly by connective tissue cells. Together with other metalloproteases, MMP3 can synergistically degrade the major components of the extracellular matrix. MMP3 is capable of degrading proteoglycan, fibronectin, laminin, and type IV collagen, but not interstitial type I collagen. MMP3 also promotes spontaneous premalignant changes and malignant conversion in mammary glands of transgenic mice. These changes were blocked by coexpression of a TIMP1 transgene. The premalignant and malignant lesions had stereotyped genomic changes unlike those seen in other murine mammary cancer models. These data indicated that MMP3 influences tumor initiation and alters neoplastic-risk. The hydrophobicity profile of MMP3 is shown in FIG. 10.

[0115] MMP 11 (matrix metalloproteinase 11), also referred to as stromelysin 3, is a member of the MMP gene family. MMP11 is over-expressed in the stromal cells of invasive breast carcinomas but not in the stromal cells surrounding benign breast fibroadenomas. The hydrophobicity profile of MMP11 is shown in FIG. 11.

[0116] MMP12 (matrix metalloproteinase 12), also referred to as human macrophage metalloelastase (HME), has been shown to convert plasminogen into angiostatin, an essential inhibitor of tumor angiogenesis. MMP12 plays a role in the inhibition of tumor progression in patients with colorectal carcinoma. MMP12 over-expression is correlated closely with a better prognosis. The hydrophobicity profile of MMP12 is shown in FIG. 12.

[0117] NES1 (normal epithelial-cell specific-1), also referred to as Kallikreln 10, is a trypsin-like serine protease. The NES1 gene is expressed in normal mammary epithelial cells, but its expression is dramatically decreased in breast cancer cell lines. Hypermethylation may be responsible for the tumor-specific loss of NES1 gene expression. Results suggest that hypermethylation of the NES1 gene may serve as a potential marker for breast cancer. The hydrophobicity profile of NES1 is shown in FIG. 13.

[0118] CAST (calpastatin) is a specific inhibitor of calpain. Calpastatin consists of a unique N-terminal domain (domain L) and four repetitive protease inhibitor domains (domains 1-4). It has been suggested that calpains may contribute to the regulation of wild-type p53 protein levels in vivo and calpastatin enhances p53 stability by inhibiting calpain activity. The hydrophobicity profile of CAST is shown in FIG. 14.

[0119] CST1 (cystatin SN) is a cysteine-proteinase inhibitor. Salivary cystatins, known as cystatins S, SA and SN, are mainly found in saliva, tears, and seminal plasma. No reports have been made on an association with this gene and cancer. The hydrophobicity profile of CST1 is shown in FIG. 15.

[0120] SQLE (squalene epoxidase) catalyzes the first oxygenation step in sterol (like cholesterol) biosynthesis and is thought to be one of the rate-limiting enzymes in this pathway. The hydrophobicity profile of SQLE is shown in FIG. 16.

[0121] LOXL2 (lysyl oxidase-like 2) is involved in the main pathway of collagen and elastin cross-linking. It has a role in the maturation of fibrillar matrix proteins in fibrosing processes and dictates their stability against metal loproteases. Lysyl oxidase has been seen differentially expressed in renal cell carcinoma relative to normal tissue. The hydrophobicity profile of LOXL2 is shown in FIG. 17.

[0122] PUS1 (pseudouridylate synthase 1) is involved in the synthesis of pseudouridine. Numerous pseudouridine residues are present in rRNAs and tRNAs from archaea, bacteria, and eukarya and in UsnRNAs from eukarya. There are no reports linking PUS1 expression to cancer. The hydrophobicity profile of PUS1 is shown in FIG. 18.

[0123] TOMM34 encodes the 34-kDa translocase of the outer mitochondrial membrane. TOMM34 is a subunit of the translocase of the outer mitochondrial membrane and a component of the mitochondrial protein import complex. The hydrophobicity profile of TOMM34 is shown in FIG. 19.

[0124] CDC25B (cell division cycle 25B) is a member of the CDC25 family of phosphatases. CDC25B activates the cyclin dependent kinase CDC2 by removing two phosphate groups and is required for entry into mitosis. CDC25B shuttles between the nucleus and the cytoplasm due to nuclear localization and nuclear export signals. The protein is nuclear in the M and G1 phases of the cell cycle and moves to the cytoplasm during S and G2. CDC25B has oncogenic properties, although its role in tumor formation has not been determined. The hydrophobicity profile of CDC25B is shown in FIG. 20.

[0125] Group III Genes

[0126] As shown in Table 3, Group III includes 3 receptor genes:

TABLE 3
Group III genes: Receptors

| Gene symbol | Locus link. | Nucleic acid seq. | Amino acid seq. |
|---|---|---|---|
| GPR49 | 8549 | SEQ ID NO: 21 | SEQ ID NO: 84 |
| GABBR1 | 603540 | SEQ ID NO: 22 | SEQ ID NO: 85 |
| OR2L6P | 81465 | SEQ ID NO: 23 | SEQ ID NO: 86 |

[0127] GPR49 (G protein-coupled receptor 49) is an orphan-G protein-coupled receptor with an unknown ligand. Expression of GPR49 gene has been reported in brain, skeletal muscle, placenta, and spinal cord. The hydrophobicity profile of GPR49 is shown in FIG. 21.

[0128] GABBR1 (Gamma-aminobutyric acid (GABA) B receptor 1) is a member of the GABA receptor family. GABA receptors are involved in the GABAergic neurotransmission of the mammalian central nervous system. The metabotropic GABA(B) receptors are coupled to G proteins and modulate synaptic transmission through intracellular effector systems. GABA(B) receptors function by inhibiting presynaptic transmitter release or by increasing the potassium conductance responsible for long-lasting inhibitory postsynaptic potentials. Findings indicate that GABA inhibits gastric carcinogenesis via the GABA(B) receptor and that this effect may be related to its effect in decreasing the proliferation of antral mucosa. The hydrophobicity profile of GABBR1 is shown in FIG. 22.

[0129] OR2L6P (Olfactory receptor, family 2, subfamily L, member 6 pseudogene) is a member of the olfactory receptor family. Olfactory receptors are believed to be encoded by an extremely large subfamily of G-protein-coupled receptors. These receptors share a 7-transmembrane domain structure with many neurotransmitter and hormone receptors. Olfactory receptors are responsible for the recognition and G-protein-mediated transduction of odorant signals. The hydrophobicity profile of OR2L6P is shown in FIG. 23.

[0130] Group IV Genes

[0131] As shown in Table 4, Group IV includes 3 ion channel genes:

TABLE 4
Group IV genes: Ion channel

| Gene symbol | Locus link. | Nucleic acid seq. | Amino acid seq. |
|---|---|---|---|
| SLC12A2 | 6558 | SEQ ID NO: 24 | SEQ ID NO: 87 |
| SLC21A12 | 28231 | SEQ ID NO: 25 | SEQ ID NO: 88 |
| SLC7A5 | 600182 | SEQ ID NO: 26 | SEQ ID NO: 89 |

[0132] SLC12A2 (solute carrier family 12, member 2) encodes a Na⁺/K⁺/CI⁻ transporter. The Na⁺—K⁺—CI⁻ cotransporters are a family of integral membrane proteins that mediate the coupled transport of Na⁺, K⁺, and CI⁻ across the plasma membrane. The vectorial transport of chloride across epithelia is a prominent mechanism in the maintenance of water and electrolyte homeostasis. Chloride transport is involved in reabsorption of NaCl in the thick ascending limb of the loop of Henle in mammalian kidney and in secretion of NaCl in a diverse array of secretory epithelia, including the intestine, trachea, and parotid and the avian and elasmobranch salt glands. In all of these tissues, the chloride entry into the epithelia cell is mediated by a Na⁺—K⁺−CI⁻ cotransporter protein, which couples the electroneutral movement of sodium, potassium, and chloride ions. In order to carry out net salt transport, the Na⁺—K⁺—CI⁻ cotransporter functions in concert with three other membrane proteins: chloride channel, potassium channels and sodium pump. The importance of the proper functioning of these ion transport mechanisms in chloride secretory epithelia is exemplified by the disease states of cystic fibrosis and secretory diarrhea, where there are defects in the regulation of ion transport. The hydrophobicity profile of SLC12A2 is shown in FIG. 24.

[0133] SLC21A12 (solute carrier family 21, member 12) gene encodes an organic anion transporter. SLC21A12 gene has not been linked to colon cancer. The hydrophobicity profile of SLC12A12 is shown in FIG. 25.

[0134] SLC7A5 (solute carrier family 7, member 5) encodes a cationic amino acid transporter (y+system). It is also referred to as membrane protein E16 (MPE16) or L-type amino acid transporter 1 (LAT1). SLC7A5 transports large neutral amino acids across cell membrane. The hydrophobicity profile of SLC7A5 is shown in FIG. 26.

[0135] Group V Genes

[0136] As shown in Table 5, Group V includes 37 genes having a variety of functions.

TABLE 5
Group V genes

| Gene symbol | Locus link | Nucleic acid seq. | Amino acid seq. |
|---|---|---|---|
| ASCL2 | 430 | SEQ ID NO: 27 | SEQ ID NO: 90 |
| DEFA6 | 1671 | SEQ ID NO: 28 | SEQ ID NO: 91 |
| FABP6 | 2172 | SEQ ID NO: 29 | SEQ ID NO: 92 |
| SCYA20 | 6364 | SEQ ID NO: 30 | SEQ ID NO: 93 |
| HHLA1 | 10086 | SEQ ID NO: 31 | SEQ ID NO: 94 |
| REG1A | 5967 | SEQ ID NO: 32 | SEQ ID NO: 95 |
| REG1B | 5968 | SEQ ID NO: 33 | SEQ ID NO: 96 |
| LCN2 | 3934 | SEQ ID NO: 34 | SEQ ID NO: 97 |
| GTF3A | 2971 | SEQ ID NO: 35 | SEQ ID NO: 98 |
| CENPF | 1063 | SEQ ID NO: 36 | SEQ ID NO: 99 |
| CSE1L | 1434 | SEQ ID NO: 37 | SEQ ID NO: 100 |
| C20orf1 | 22974 | SEQ ID NO: 38 | SEQ ID NO: 101 |
| E1AF | 2118 | SEQ ID NO: 39 | SEQ ID NO: 102 |
| MYBL2 | 4605 | SEQ ID NO: 40 | SEQ ID NO: 103 |
| PCNA | 5111 | SEQ ID NO: 41 | SEQ ID NO: 104 |
| EDN1 | 1906 | SEQ ID NO: 42 | SEQ ID NO: 105 |
| KNSL2 | 3833 | SEQ ID NO: 43 | SEQ ID NO: 106 |
| SALL4 | 57167 | SEQ ID NO: 44 | SEQ ID NO: 107 |
| CLDN2 | 9075 | SEQ ID NO: 45 | SEQ ID NO: 108 |
| JPO1 | 83879 | SEQ ID NO: 46 | SEQ ID NO: 109 |
| CKAP2 | 26586 | SEQ ID NO: 47 | SEQ ID NO: 110 |
| D21S2056E | 8568 | SEQ ID NO: 48 | SEQ ID NO: 111 |
| BM039 | 55839 | SEQ ID NO: 49 | SEQ ID NO: 112 |
| HIG2 | 29923 | SEQ ID NO: 50 | SEQ ID NO: 113 |
| ANLN | 54443 | SEQ ID NO: 51 | SEQ ID NO: 114 |
| ICBP90 | 29128 | SEQ ID NO: 52 | SEQ ID NO: 115 |
| AXIN2 | 8313 | SEQ ID NO: 53 | SEQ ID NO: 116 |
| HSPE1 | 3336 | SEQ ID NO: 54 | SEQ ID NO: 117 |
| NPM1 | 4869 | SEQ ID NO: 55 | SEQ ID NO: 118 |
| RFC3 | 5983 | SEQ ID NO: 56 | SEQ ID NO: 119 |
| HSPBP1 | 23640 | SEQ ID NO: 57 | SEQ ID NO: 120 |
| HCAP-G | 64151 | SEQ ID NO: 58 | SEQ ID NO: 121 |
| OS4 | 10106 | SEQ ID NO: 59 | SEQ ID NO: 122 |
| EFNA3 | 1944 | SEQ ID NO: 60 | SEQ ID NO: 123 |
| TGFBI | 7045 | SEQ ID NO: 61 | SEQ ID NO: 124 |
| GRB7 | 2886 | SEQ ID NO: 62 | SEQ ID NO: 125 |
| CDKN2A | 1029 | SEQ ID NO: 63 | SEQ ID NO: 126 |

[0137] ASCL2 (achaete-scute complex) is a member of the basic helix-loop helix (BHLH) family of transcription factors. It activates transcription by binding to the E box (5′-CANNTG-3′). Dimerization with other BHLH proteins is required for efficient DNA binding. ASCL2 is involved in the determination of the neuronal precursors in the peripheral nervous system and the central nervous system. The hydrophobicity profile of ASCL2 is shown in FIG. 27.

[0138] DEFA6 (defensin, alpha, 6) is a member of the defensin family. Defensins are microbicidal and cytotoxic peptides thought to be involved in host defense. Defensins are abundant in the granules of neutrophils and also found in the epithelia of mucosal surfaces, such as those of the intestine, respiratory tract, urinary tract, and vagina. Members of the defensin family are highly similar in protein sequence and distinguished by a conserved cysteine motif. Several alpha defensin genes appear to be clustered on chromosome 8. The protein encoded by this gene, defensin, alpha 6, is highly expressed in the secretory granules of Paneth cells of the small intestine, and likely plays a role in host defense of human bowel. The hydrophobicity profile of DEFA6 is shown in FIG. 28.

[0139] FABP6 (fatty acid binding protein 6) gene encodes a fatty acid binding protein. Fatty acid binding proteins are a family of small, highly conserved, cytoplasmic proteins that bind long-chain fatty acids and other hydrophobic ligands. FABP6 and FABP1 (the liver fatty acid binding protein) are also able to bind bile acids. It is thought that FABPs roles include fatty acid uptake, transport, and metabolism. The hydrophobicity profile of FABP6 is shown in FIG. 29.

[0140] SCYA20 (small inducible cytokine subfamily A) is a chemotactic factor for lymphocytes, but not a chemotactic factor for monocytes. Chemokines are basic, heparin-binding proteins of 8 to 12 kd that have 4 cysteines conserved among all family members. SCYA20 is expressed preferentially in lymphocytes and monocytes, and its expression is markedly upregulated by mediators of inflammation such as TNF and LPS. The hydrophobicity profile of SCYA20 is shown in FIG. 30.

[0141] HHLA1 encodes HERV-H LTR-associating 1, a member of the HERV-H family. HHLA1 has been shown to play a role in the expression of a variety of adjacent genes. The hydrophobicity profile of HHLA1 is shown in FIG. 31.

[0142] REG1A (regenerating islet-derived 1 alpha) and REG1B (regenerating islet-derived 1 beta) genes belong to the type I subclass of the REG family of genes, each of which encodes a 166 amino acid protein. Mice transgenic for REG gene (REG-Tg mice) developed diabetes by apoptosis of beta-cells, as well as various malignant tumors. In addition to the decrease in beta-cells, compensatory islet regeneration and proliferation of ductal epithelial cells were observed in REG-Tg mice. Because REG1 protein was secreted primarily into pancreatic ducts from acinar cells, it may primarily stimulate the proliferation of ductal epithelial cells, and not beta-cells, and their differentiation into islets. The hydrophobicity profile of REG1A and REG1B are shown in FIGS. 32 and 33, respectively.

[0143] LCN2 encodes Lipocalin 2. Lipocalin 2, also known as NGAL, is a protein associated with neutrophil gelatinase. The 25 kD LCN2 protein is believed to bind small lipophilic substances such as bacteria-derived lipopolysaccharide (LPS) and formylpeptides and may function as a modulator of inflammation. It was reported that the LCN2 gene undergoing maximal transcriptional induction in IL3-dependent murine FL5.12 pro-B cells after cytokine withdrawal. Conditioned medium from IL3-deprived cells contained Lipocalin 2 and induced apoptosis in naive cells, even when IL3 was present. Lipocalin 2 also induced apoptosis in a wide variety of leukocytes but not other cell types. The hydrophobicity profile of Lipocalin 2 is shown in FIG. 34.

[0144] GTF3A (general transcription factor IIIA) is required for RNA polymerase III-mediated transcription of the 5 S RNA genes and binds to both DNA and RNA. The hydrophobicity profile of GTF3A is shown in FIG. 35.

[0145] CENPF (centromere protein F, 350/400 kD) CENPF is a protein that associates with the centromere-kinetochore complex. The protein is a component of the nuclear matrix during the G2 phase of interphase. In late G2 the protein associates with the kinetochore and maintains this association through early anaphase. It localizes to the spindle midzone and the intracellular bridge in late anaphase and telophase, respectively, and is thought to be subsequently degraded. The localization of this protein suggests that it may play a role in chromosome segregation during mitosis. It is thought to form either a homodimer or heterodimer. Autoantibodies against this protein have been found in patients with cancer or graft versus host disease. The hydrophobicity profile of CENPF is shown in FIG. 36.

[0146] CSE1L (chromosome segregation 1 (yeast homology)-like protein) is a cellular apoptosis susceptibility (CAS) protein. CSE1L exports importin alpha from nucleus to cytoplasm. CAS1L maps to 20q13. This region harbors amplifications that correlate with aggressive breast cancer. Elevated copy numbers of CAS are seen in a leukemia cell line, three of four colon cell lines, and three of seven breast cancer cell lines. The hydrophobicity profile of CSE1L is shown in FIG. 37.

[0147] C20Orf1 (chromosome 20 open reading frame 1) is a proliferation-associated nuclear protein. C20Orf1 associates with the spindle pole and mitotic spindle during mitosis. The full-length C20Orf1 cDNA encodes a 747 amino acid protein with a putative ATP/GTP binding site motif. RT PCR analysis demonstrated strong expression of C20Orf1 in lung carcinoma cell lines. The hydrophobicity profile of C20Orf1 is shown in FIG. 38.

[0148] E1AF (Ets variant gene 4) is a 462 amino acid protein that shows sequence similarity within the ETS domain, a region required for sequence-specific DNA binding by members of the ets oncogene family. E1AF is about 94% identical to the mouse PEA3 protein (polyomavirus enhancer activator-3). Northern blot analysis detected a 2.5 kb mRNA in HeLa cells whose levels increased during the early phase of adenovirus infection. Subsequently, studies show that E1AF can activate the promoters of various MMPs, whose expression is associated with tumor cell invasion and metastasis, by 10 to 20 fold. The hydrophobicity profile of E1AF is shown in FIG. 39.

[0149] MYBL2 (v-myb avian myeloblastosis viral oncogene homolog-like 2) is a transcription factor and a member of the oncoprotein myb family. MYBL2 may have a role in cell cycle progression. MYBL2 transcripts are detectable in a wide variety of dividing cell types. MYBL2 activates CDC2 and cyclin D1 gene expression in proliferating fibroblasts, and antisense oligonucleotides specific to MYBL2 inhibit proliferation of human hematopoietic cell lines. MYBL2 expression is also regulated at the G1/S phase transition, and its transcription relies on E2F activity in a cell cycle-dependent manner. Thus, unlike MYB and MYBL1, whose transcriptional activity is mainly restricted to hematopoietic, spermatogenic, and neural progenitor cells, MYBL2 appears to possess a broader function during cell proliferation. The hydrophobicity profile of MYBL2 is shown in FIG. 40.

[0150] PCNA (proliferating cell nuclear antigen) is a processivity factor for DNA polymerases delta and epsilon. The hydrophobicity profile of PCNA is shown in FIG. 41.

[0151] EDN1 (Endothelin 1) is a potent, 21-amino acid vasoconstrictor peptide produced by vascular endothelial cells. In addition to its vasoconstrictor action, endothelin has effects on the central nervous system and on neuronal excitability. Mice homozygous for a knockout of the EDN11 gene die of respiratory failure at birth and show morphologic abnormalities of the pharyngeal-arch-derived craniofacial tissues and organs. Heterozygous mice produce lower levels of EDN1 than wild-type mice and develop elevated blood pressure. EDN1 is present at high concentrations in ovarian cancer ascites and is over-expressed in primary and metastatic ovarian carcinoma. In these cells, EDN1 acts as an autocrine mitogenic and angiogenic factor selectively through the EDN1 receptor. Findings demonstrate that EDN1 promotes ovarian carcinoma cell invasion, acting through the EDN1 receptor by up-regulating secretion and activation of multiple tumor proteinases (MMP2, 3, 7, 9, and 13). Therefore, EDN1 may represent a key component of more aggressive ligand-induced invasiveness of ovarian carcinoma. The hydrophobicity profile of EDN1 is shown in FIG. 42.

[0152] KNSL2 (Kinesin-like 2 protein) mRNA is expressed in several human cell lines. The C-terminal 350 amino acids of the predicted KNSL2 protein share extensive homology with the ATP-binding and motor domains of kinesin heavy chain and the kinesin-related proteins CENPE and MKLP1. Although the mechanochemical domain of kinesin and kinesin-like proteins is generally located within the N-terminal region, KNSL2 contains a C-terminal mechanochemical domain. This ‘reversed’ structural organization is also found in the S. cerevisiae KAR3 and Drosophila Ncd kinesin-like proteins. Molecular motors move directionally to either the plus or the minus ends of microtubules or actin filaments. For example, kinesin moves towards the plus end, whereas the Drosophila Ned motor moves towards the minus end. The hydrophobicity profile of KNSL2 is shown in FIG. 43.

[0153] SALL4 (sal-like 4 (Drosophila)) encodes a protein that is similar to SALL1. SALL1 is a mammalian homolog of the Drosophila region-specific homeotic gene spalt (sal); heterozygous mutations in SALL1 in humans lead to Townes-Brocks syndrome. The mouse homolog of SALL1 (Sall1) has been isolated and mice deficient in Sall1 die in the perinatal period and kidney agenesis or severe dysgenesis are present. Sall1 is expressed in the metanephric mesenchyme surrounding ureteric bud. Homozygous deletion of Sall1 results in an incomplete ureteric bud outgrowth, a failure of tubule formation in the mesenchyme and an apoptosis of the mesenchyme. This phenotype is likely to be primarily caused by the absence of the inductive signal from the ureter, as the Sall1-deficient mesenchyme is competent with respect to epithelial differentiation. Sall1 is therefore essential for ureteric bud invasion, the initial key step for metanephros development. The hydrophobicity profile of SALL4 is shown in FIG. 44.

[0154] CLDN2 (Claudin 2) is a member of the claudin family. The claudins are transmembrane proteins that are part of the tight junction complex and likely form structural components of a paracellular pore. Claudin-2 mRNA and protein are found throughout the proximal tubule and in the contiguous early segment of the thin descending limb of long-looped nephrons. The level of expression reveals an axial increase from proximal to distal segments. In confocal images, the subcellular localization of claudin-2 protein coincide with that of the tight junction protein ZO-1. Claudin-2 is a component of the paracellular pathway of the most proximal segments of the nephron and may be responsible for their uniquely leaky permeability properties. The hydrophobicity profile of CLDN2 is shown in FIG. 45.

[0155] JPO1 (c-Myc target) gene encodes a 47 kDa nuclear protein. JPO1 mRNA expression is readily detectable in the thymus, small intestine and colon, whereas expression is relatively low in spleen, bone marrow, and peripheral leukocytes. Stable Rat1a fibroblasts over-expressing JPO1 were tested and compared to transformed Rat1a-Myc cells. Although JPO1 has a diminished transforming activity as compared with c-Myc, JPO1 complements a transformation-defective Myc Box II mutant in the Rat1a transformation assay. This complementation provides evidence for a genetic link between c-Myc and JPO1. Similar to c-Myc, JPO1 over-expression enhances the clonogenicity of CB33 human lymphoblastoid cells in methylcellulose assays. These observations suggest that JPO1 participates in c-Myc mediated transformation, supporting an emerging concept that c-Myc target genes constitute nodal points in a network of pathways that lead from c-Myc to various Myc-related phenotypes and ultimately to tumorigenesis. The hydrophobicity profile of JPO1 is shown in FIG. 46.

[0156] CKAP2 is a cytoskeleton associated protein. The hydrophobicity profile of CKAP2 is shown in FIG. 47.

[0157] D21S2056E (DNA segment on chromosome 21 (unique) 2056 expressed sequence) encodes a nuclear protein with a ubiquitous tissue expression. The hydrophobicity profile of D21S2056E is shown in FIG. 48.

[0158] BM039 encodes an uncharacterized bone marrow protein BM039. The hydrophobicity profile of BM309 is shown in FIG. 49.

[0159] HIG2 encodes hypoxia-inducible protein 2. Evidence is accumulating that the adverse tumor microenvironment both modifies the malignant progression of tumor cells and contributes to chemotherapy and radiation resistance. One hypothesis is that some of the effects on malignant progression are mediated through the transcriptional regulation of genes responsive to the stresses of the microenvironment, such as low oxygen or low glucose conditions. To determine epigenetic changes in gene expression that were consistent with that hypothesis, RDA was used to identify hypoxia-induced cDNAs from cultured human cervical epithelial cells. Twelve induced genes were identified: two novel genes (HIG1 and HIG2), three genes known to be hypoxia-inducible (tissue factor, GAPDH, thioredoxin), and seven genes not previously identified as hypoxia-inducible (HNRNP(a1), ribosomal L7, annexin V, lipocortin2, Ku(70), PRPP synthase, and acetoacetyl-CoA thiolase). In cultured cells, HIG1 and HIG2 expression is induced by hypoxia and by glucose deprivation, but their expression is not induced by serum deprivation, UV, or ionizing radiation. The putative HIG1 and HIG2 open reading frames are expressed in cells, as confirmed by epitope tagging. In addition, tumor xenografts derived from human cervical cancer cells display increased expression of HIG1 and HIG2 when they are deprived of oxygen. Taken together, these data suggest a coordinated transcriptional response of eukaryotic cells to microenvironmental stresses found in the solid tumor. The hydrophobicity profile of HIG2 is shown in FIG. 50.

[0160] ANLN (anillin (Drosophila Scraps homolog) or actin binding protein) interacts with cleavage furrow proteins, such as septins, and may play a role in cytokinesis. Like Drosophila anillin, the human protein localizes to the nucleus during interphase, the cortex following nuclear envelope breakdown, and the cleavage furrow during cytokinesis. Anillin also localizes to ectopic cleavage furrows generated between two spindles in fused PtK(1) cells. Microinjection of anti-anillin antibodies slows cleavage, leading to furrow regression and the generation of multinucleate cells. GFP fusions that contain the COOH-terminal 197 amino acids of anillin, which includes a pleckstrin homology (PH) domain, form ectopic cortical foci during interphase. The septin Hcdc10 localizes to these ectopic foci, whereas myosin II and actin do not, suggesting that anillin interacts with the septins at the cortex. Robust cleavage furrow localization requires both the COOH-terminal domain of anullin and additional NH(2)-terminal sequences corresponding to an actin binding domain defined by in vitro cosedimentation assays. Endogenous anillin and Hcdc10 colocalize to punctate foci associated with actin cables throughout mitosis, and the accumulation of both proteins at the cell equator requires filamentous actin. These results indicate that anillin is a conserved cleavage furrow component important for cytokinesis. Interactions with at least two other furrow proteins, actin and the septins, likely contribute to anillin function. The hydrophobicity profile of ANLN is shown in FIG. 51.

[0161] ICBP90 encodes a transcription factor, a DNA-binding protein that may regulate expression of topoisomerase 2 alpha. ICBP90 may also be useful as a new proliferation marker for cancer tissues. The hydrophobicity profile of ICBP90 is shown in FIG. 52.

[0162] AXIN2 (conductin, axin-related protein) presumably plays a role in the regulation of the stability of beta-catenin in the Wnt signaling pathway. In mouse, conductin organizes a multiprotein complex of adenomatous polyposis of the colon, beta-catenin, glycogen synthase kinase 3-beta, and conductin, which leads to the degradation of beta-catenin. The deregulation of beta-catenin is an important event in the genesis of a number of malignancies. The AXIN2 gene has been mapped to 17q23-q24, a region that shows frequent loss of heterozygosity in breast cancer, neuroblastoma, and other tumors. The hydrophobicity profile of AXIN2 is shown in FIG. 53.

[0163] HSPE7 encodes heat shock 10 kD protein 1, which is also referred to as GroES or chaperonin 10. Chaperonins are ubiquitous, indispensable proteins that facilitate protein folding in an ATP dependent manner to enhance the yield of properly folded substrate protein under conditions where spontaneous folding does not occur. Chaperonins are typified by the E. coli heat-shock proteins GroEL (cpn60) and GroES (cpn10). GroES is a heptameric ring of identical 10.4 kD subunits that binds to each end of GroEL to form a symmetric, functional heterodimer. The hydrophobicity profile of HSPE7 is shown in FIG. 54.

[0164] NPM1 (nucleophosmin, nucleolar phosphoprotein B23 or numatrin) is a nucleolar phosphoprotein that is more abundant in tumor cells than in normal resting cells. Stimulation of the growth of normal cells, e.g., mitogen activation of B lymphocytes, is accompanied by an increase in NPM1 protein level. Although the function of NPM1 has not been defined precisely, ample evidence suggests that it is involved in the assembly of ribosomal proteins into ribosomes. Electron microscopic study indicates that NPM1 is concentrated in the granular region of the nucleolus, where ribosome assembly occurs. The cDNA has a coding sequence equivalent to a protein of 294 amino acids. When protein levels were compared with Western blot immunoassays, Novikoff hepatoma showed 20 times more NPM1 than normal, and arid hypertrophic rat liver showed about 5 times more NPM1 than unstimulated normal liver. The hydrophobicity profile of NPM1 is shown in FIG. 55.

[0165] RFC3 (replication factor C, activator 1) is a multimeric primer-recognition protein consisting of 5 distinct subunits of 145, 40, 38, 37, and 36.5 kD. Human RFC3 is essential for the in vitro replication of simian virus 40 (SV40) DNA. RFC3, in the presence of ATP, assembles PCNA and DNA polymerase-delta or polymerase-epsilon on primed DNA templates. The complex of primed DNA-RFC-PCNA-DNA polymerase, when supplemented with dNTPs, results in the efficient elongation of DNA in the presence of human single-stranded DNA binding protein. Studies with the complete 5-subunit holoenzyme indicated that the large subunit binds to DNA and the 40-kD subunit binds ATP. The other subunits may play discrete roles in the elongation process catalyzed by polymerase. The subunit genes are numbered in sequence of decreasing molecular weight: RFC1, RFC2, RFC3, RFC4, and RFC5. The RFC3 gene maps to 13q12.3-q13. The hydrophobicity profile of RFC3 is shown in FIG. 56.

[0166] HSPBP7 (Hsp70-Interacting protein) binds HSP70 and HSC70 (HSPA8) and inhibits chaperone activity by preventing ATP binding. The hydrophobicity profile of HSPBP7 is shown in FIG. 57.

[0167] HCAP-G (chromosome condensation protein G) is a component of 13S condensin, which is a five subunit protein complex that plays a central role in mitotic chromosome condensation. The condensin complex has an ATP-dependent positive supercoiling activity in vitro. The human 13S complex has exactly the same composition as its Xenopus counterpart, being composed of two structural maintenance of chromosomes (human chromosome-associated polypeptide (hCAP)C and hCAP E) subunits and three non-structural maintenance of chromosomes (hCAP-D2/CNAP1, hCAP-G, and hCAP-H/BRRN) subunits. Human condensin purified from asynchronous HeLa cell cultures fails to reconfigure DNA structure in vitro. When phosphorylated by purified CDC2-cyclin B, however, it gains the ability to introduce positive supercoils into DNA in he presence of ATP and topoisomerase I. Strikingly, human condensin can induce chromosome condensation when added back into a Xenopus egg extract that has been immunodepleted of endogenous condensin. Thus, the structure and function of the condensin complex are highly conserved between Xenopus and humans, underscoring its importance in mitotic chromosome dynamics in eukaryotic cells. The hydrophobicity profile of HCAP-G is shown in FIG. 58.

[0168] OS4 (conserved gene amplified in osteosarcoma) gene consists of 4833 base pairs (bp) encoding an open reading frame (ORF) of 283 amino acids. The ORF predicts a water-soluble acidic (pl 5.50) polypeptide with a molecular weight of 32 kD. Database searches reveal highly significant similarity between OS4 and eight proteins predicted from genomic sequences of C. elegans, S. pombe, and S. cerevisiae. Thus, OS4 defines a novel evolutionarily conserved gene superfamily. Northern and database analyses revealed OS4 transcripts in numerous human tissues demonstrating its ubiquitous expression. Over-expression of OS4 is seen in three cancer cell lines with amplification of this gene. OS4 is amplified in primary sarcomas with known amplification of the closely linked marker CDK4. These results demonstrate that the highly conserved OS4 gene is frequently included in the 12q13-q15 amplicon and may contribute to the development of a subset of sarcomas. The hydrophobicity profile of OS4 is shown in FIG. 59.

[0169] EFNA3 (ephrin A3) is a member of ephrins family. Ephrins bind to members of the EPH group of receptor tyrosine kinases. The various ephrins are characterized by sequence similarities and the fact that they are attached to the cell membrane by glycosylphosphatidylinositol (GPI) anchors or by a single transmembrane domain. The hydrophobicity profile of EFNA3 is shown in FIG. 60.

[0170] TGFBI encodes a 68 kD, beta-induced transforming growth factor. The hydrophobicity profile of TGFBI is shown in FIG. 61.

[0171] GRB7 (growth factor receptor-bound protein 7) and its splice variant GRB7V were cloned from an invasive human esophageal carcinoma. Although both GRB7 isoforms share homology with the Mig10 cell migration gene of C. elegans, the GRB7V isoform lack 88 basepairs in the C terminus. The resultant frameshift led to substitution of an SH2 domain with a short hydrophobic sequence. The -wild-type GRB7 protein, but not the GRB7V isoform, is rapidly tyrosyl phosphorylated in response to EGF stimulation in esophageal carcinoma cells. Analysis of human esophageal tumor tissues and regional lymph nodes with metastases revealed that GRB7V was expressed in 40% of GRB7-positive esophageal carcinomas. GRB7V expression was enhanced after metastatic spread to lymph nodes as compared to the original tumor tissues. Transfection of an antisense GRB7RNA expression construct lowered endogenous GRB7 protein levels and suppressed the invasive phenotype exhibited by esophageal carcinoma cells. These findings suggested that GRB7 isoforms are involved in cell invasion and metastatic progression of human esophageal carcinomas. The hydrophobicity profile of GRB7 is shown in FIG. 62.

[0172] CDKN2A (cyclin-dependent kinase inhibitor 2A) inhibits CDK-cyclin complexes and is involved in G1 phase checkpoint arrest. The hydrophobicity profile of CDKN2A is shown in FIG. 63.

[0173] CCGs and CCG Products as Therapeutic Targets

[0174] CCGs, such as those listed in Tables 1-5, are expressed at abnormally levels in colon cancer tissues. These genes may be a component in the disease mechanism and therefore, can be used as markers for diagnosing and monitoring colon cancer. Furthermore, CCGs, as well as their encoded polynucleotides (CCPNs) or polypeptides (CCPPs), can be used as therapeutic targets for the treatment and prevention of colon cancer. For instance, CCGs can encode kinases, phosphatases, G-protein coupled receptors, ion channels, proteases, metabolic enzymes, or transcription factors. These proteins and genes are known targets for drug action and development.

[0175] As an example, protein kinases regulate many cellular functions, such as cell proliferation/differentiation, and signal transduction, by adding phosphate groups to proteins. Uncontrolled signaling has been implicated in a variety of disease conditions including inflammation, cancer, arteriosclerosis, and psoriasis. Reversible protein phosphorylation is the main strategy for controlling the activities of eukaryotic cells. It is estimated that more than 1,000 or the 10,000 proteins active in a typical mammalian cell are phosphorylated. The high energy phosphate, which drives activation, is generally transferred from adenosine triphosphate molecules (ATP) to a particular protein by protein kinases and removed from that protein by protein phosphatases. Phosphorylation occurs in response to extracellular signals (hormones, neurotransmitters, growth and differentiation factors, etc), cell cycle checkpoints, and environmental or nutritional stresses.

[0176] The importance of kinases in the etiology of diseases has been well established. Kinase proteins are a major target for drug action and development. A January 2002 survey of ongoing clinical trials in the USA revealed more than 100 clinical trials involving the modulation of kinases. Trials are ongoing in a wide variety of therapeutic indications including asthma, Parkinson's, inflammation, psoriasis, rheumatoid arthritis, spinal cord injuries, muscle conditions, osteoporosis, graft versus host disease, cardiovascular disorders, autoimmune disorders, retinal detachment, stroke, epilepsy, ischemia/reperfusion, breast cancer, ovarian cancer, glioblastoma, non-Hodgkin's lymphoma, colorectal cancer, non-small cell lung cancer, brain cancer, Kaposi's sarcoma, pancreatic cancer, liver cancer, and other tumors. Numerous kinds of modulators of kinase activity are currently in clinical trials including antisense molecules, antibodies, small molecules, and even gene therapy. The present invention advances the state of the art by providing new links of kinase proteins to the etiology of colon cancer.

[0177] Many therapeutic strategies are aimed at protein kinases since they are critical components in signal transduction pathways. Approaches for regulating kinase gene expression include specific antisense oligonucleotides for inhibiting post-transcriptional processing of the messenger RNA, naturally occurring products and their chemical derivatives to inhibit kinase activity and monoclonal antibodies to inhibit receptor linked kinases. In some cases, kinase inhibitors also allow other therapeutic agents additional time to become effective and act synergistically with current treatments.

[0178] The role of phosphorylation in transcriptional control, apoptosis, protein degradation, nuclear import and export, cytoskeletal regulation, and checkpoint signaling has been an important subject in pharmaceutical research. The accumulating knowledge about signaling networks and the proteins involved will be put to practical use in the development of potent and specific pharmacological modulators of phosphorylation-dependent signaling that can be used for therapeutic purposes. The rational structure-based design and development of highly specific kinase modulators is becoming routine and drugs that intercede in signaling pathways are becoming a major class of drug.

[0179] The kinases comprise the largest known protein group, a superfamily of enzymes with widely varied functions and specificities. They are usually named after their substrate, their regulatory molecules, or some aspect of a mutant phenotype. With regard to substrates, the protein kinases may be roughly divided into two groups; those that phosphorylate tyrosine residues (protein tyrosine kinases, PTK) and those that phosphorylate serine or threonine residues (ser/thr kinases, STK).

[0180] An important subfamily of the STK family is cyclic-AMP dependent protein kinases (PKA). Cyclic-AMP is an intracellular mediator of hormone action in all prokaryotic and animal cells that have been studied. Such hormone-induced cellular responses include thyroid hormone secretion, cortisol secretion, progesterone secretion, glycogen breakdown, bone resorption, and regulation of heart rate and force of heart muscle contraction. PKA is found in many animal cells and is thought to account for the effects of cyclic-AMP in most of these cells. Altered PKA expression is implicated in a variety of disorders and diseases including cancer, thyroid disorders, diabetes, atherosclerosis, and cardiovascular disease.

[0181] The mitogen-activated protein kinases (MAP) are also members of the STK family. MAP kinases also regulate intracellular signaling pathways. They mediate signal transduction from the cell surface to the nucleus via phosphorylation cascades. Several subgroups have been identified, and each manifests different substrate specificities and responds to distinct extracellular stimuli. MAP kinase signaling pathways are present in mammalian cells as well as in yeast. The extracellular stimuli that activate mammalian pathways include epidermal growth factor (EGF), ultraviolet light, hyperosmolar medium, heat shock, endotoxic lipopolysaccharide (LPS), and pro-inflammatory cytokines such as tumor necrosis factor (TNF) and interleukin-1 (IL-1).

[0182] EGF receptor is found in over half of breast tumors unresponsive to hormone. EGF is found in many tumors, and EGF may be required for tumor cell growth. Antibody to EGF blocked the growth of tumor xenografts in mice. An antisense oligonucleotide for amphiregulin inhibited growth of a pancreatic cancer cell line.

[0183] Cell proliferation and differentiation in normal cells are under the regulation and control of multiple MAP kinase cascades. Aberrant and deregulated functioning of MAP kinases can initiate and support carcinogenesis. Insulin and IGF-1 also activate a mitogenic MAP kinase pathway that may be important in acquired insulin resistance occurring in type 2 diabetes.

[0184] Many cancers become refractory to chemotherapy by developing a survival strategy involving the constitutive activation of the phosphatidylinositol 3kinase-protein kinase B/Akt signaling cascade. This survival signaling pathway thus becomes an important target for the development of specific inhibitors that would block its function. PI-3 kinase/Akt signaling is equally important in diabetes. The pathway activated by RTKs subsequently regulates glycogen synthase 3 (GSK3) and glucose uptake. Since Akt has decreased activity in type 2 diabetes, it provides a therapeutic target.

[0185] Although some protein kinases have, to date, no known system of physiological regulation, many are activated or inactivated by autophosphorylation or phosphorylation by upstream protein kinases. The regulation of protein kinases also occurs transcriptionally, post-transcriptionally, and post-translationally. The mechanism of post-transcriptional regulation is alternative splicing of precursor mRNA. Protein kinase C βI and βII are two isoforms of a single PKCβ gene derived from differences in the splicing of the exon encoding the C-terminal 50-52 amino acids. Splicing can be regulated by a kinase cascade in response to peptide hormones such as insulin and IGF-1. PKCβ1 and βII have different specificities for phosphorylating members of the MAP kinase family, for glycogen synthase 3β, for nuclear transcription factors such as TLS/Fus, and for other nuclear kinases. By inhibiting the post-transcriptional alternative splicing of PKCβII mRNA, PKCβII-dependent processes are inhibited.

[0186] Protein kinase C isoforms have been implicated in cellular changes observed in the vascular complications of diabetes. Hyperglycemia is associated with increased levels of PKCα and β isoforms in renal glomeruli of diabetic rats. Oral administration of a PKCβ inhibitor prevented the increased mRNA expression of TGF-62 1 and extracellular matrix component genes. Administration of the specific PKCβ inhibitor (LY333531) also normalized levels of cytokines, caldesmon and hemodynamics of retinal and renal blood flow. Over-expression of the PKCβ isoform in the myocardium resulted in cardiac hypertrophy and failure. The use of LY333531 to prevent adverse effects of cardiac PKCβ over-expression in diabetic subjects is under investigation. The compound is also in Phase I/II clinical trials for diabetic retinopathy and diabetic macular edema indicating that it may be pharmacodynamically active.

[0187] PRK (proliferation-related kinase) is a serum/cytokine inducible STK that is involved in regulation of the cell cycle and cell proliferation in human megakaroytic cells. PRK is related to the polo (derived from human polo gene) family of STKs implicated in cell division. PRK is downregulated in lung tumor tissue and may be a proto-oncogene whose deregulated expression in normal tissue leads to oncogenic transformation. Altered MAP kinase expression is implicated in a variety of disease conditions including cancer, inflammation, immune disorders, and disorders affecting growth and development.

[0188] Protein kinase inhibitors provide much of our knowledge about in vivo regulation and coordination of kinase functions. A pseudosubstrate sequence within PKC acts to inhibit the kinase in the absence of its lipid activator. A PKC inhibitor such as chelerythrine acts on the catalytic domain to block substrate interaction, while calphostin acts on the regulatory domain to mimic the pseudosubstrate sequence and block ATPase activity, or by inhibiting cofactor binding. The ability to inhibit specific PKC isozymes is limited.

[0189] Tamoxifen, a protein kinase C inhibitor with anti-estrogen activity, is currently a standard treatment for hormone-dependent breast cancer. The use of this compound may increase the risk of developing cancer in other tissues such as the endometrium. Raloxifene, a related compound, has been shown to protect against osteoporosis. The tissue specificity of inhibitors must be considered when identifying therapeutic targets.

[0190] The cyclin-dependent protein kinases (CDKs) are another group of STKs that control the progression of cells through the cell cycle. Cyclins are small regulatory proteins that act by binding to and activating CDKs that then trigger various phases of the cell cycle by phosphorylating and activating selected proteins involved in the mitotic process. CDKs are unique in that they require multiple inputs to become activated. In addition to the binding of cyclin, CDK activation requires the phosphorylation of a specific threonine residue and the dephosphorylation of a specific tyrosine residue.

[0191] Cellular inhibitors of CDKs also play a major role in cell cycle progression. Alterations in the expression, function, and structure of cyclin and CDK are encountered in the cancer phenotype. Therefore CDKs may be important targets for new cancer therapeutic agents.

[0192] Often chemotherapy resistant cells tend to escape apoptosis. Under certain circumstances, inappropriate CDK activation may even promote apoptosis by encouraging the progression of the cell cycle under unfavorable conditions, e.g., attempting mitosis while DNA damage is largely unrepaired.

[0193] Purines and purine analogs act as CDK inhibitors. Flavopiridol (L86-2,275) is a flavonoid that causes 50% growth inhibition of tumor cells at 60 nM (57). It also inhibits EGFR and protein kinase A. Flavopiridel induces apoptosis and inhibits lymphoid, myeloid, colon, and prostate cancer cells grown in vivo as tumor xenografts in nude mice.

[0194] Staurosporine and its derivative, UCN-O1, in addition to inhibiting protein kinase C, inhibit cyclin B/CDK (IC₅₀ 3 to 6 nM). Staurosporine is toxic, but its derivative 7-hydroxystaurosporine (UCN1) has anti-tumor properties and is in clinical trials. UCN-01 affects the phosphorylation of CDKs and alters the cell cycle checkpoint functioning. These compounds illustrate that multiple intracellular targets may be affected as the concentration of an inhibitor is increased within cells.

[0195] Protein tyrosine kinases, PTKs, specifically phosphorylate tyrosine residues on their target proteins and -may be divided into transmembrane, receptor PTKs and non-transmembrane, non-receptor PTKs. Transmembrane protein-tyrosine kinases are receptors for many growth factors. Binding of growth factor to the receptor activates the transfer of a phosphate group from ATP to selected tyrosine side chains of the receptor and other specific proteins. Growth factors (GF) associated with receptor protein-tyrosine kinases (RTK) include epidermal GF, platelet-derived GF, fibroblast GF, hepatocyte GF, insulin and insulin- like GFs, nerve GF, vascular endothelial GF, and macrophage colony stimulating factor.

[0196] Inhibitors of RTKs may inhibit the growth and proliferation of such cancers, since RTKs stimulate tumor cell proliferation. Inhibitors of RTKs are also useful in preventing tumor angiogenesis and can eliminate support from the host tissue by targeting RTKs located on vascular cells (e.g., blood vessel endothelial cells and stromal fibroblasts (FGF receptor)).

[0197] Increasing knowledge of the structure and activation mechanism of RTKs and the signaling pathways controlled by tyrosine kinases provided the possibility for the development of target-specific drugs and new anti-cancer therapies. Approaches towards the prevention or interception of deregulated RTK signaling include the development of selective components that target either the extracellular ligand-binding domain or the intracellular tyrosine kinase or substrate binding region.

[0198] One successful strategy to selectively kill tumor cells is the use of monoclonal antibodies (mAbs) that are directed against the extracellular domain of RTKs which are involved in cancer and are expressed at the surface of tumor cells. In the past years, recombinant antibody technology has made enormous progress in the design, selection and production of new engineered antibodies, and it is possible to generate humanized antibodies, human-mouse chimeric or biospecific antibodies for targeted cancer therapy. Mechanistically, anti-RTK mAbs might work by blocking the ligand-receptor interaction and therefore inhibiting ligand-induced RTK signaling. In addition, by binding of to certain epitopes on the cancer cells, the anti-RTK mAbs induce immune-mediated responses such as opsonization and complement-mediated lysis and trigger antibody-dependent cellular cytotoxicity by macrophages or natural killer cells. In recent years, it became evident that mAbs control tumor growth by altering the intracellular signaling pattern inside the targeted tumor cell, leading to growth inhibition or apoptosis. In contrast, biospecific antibodies can bridge selected surface molecules on a target cell with receptors on an effector cell triggering cytotoxic responses against the target cell. Despite the toxicity that has been seen in clinical trials of bispecific antibodies, advances in antibody engineering, characterization of tumor antigens and immunology might help to produce rationally designed bispecific antibodies for anti-cancer therapy.

[0199] Another promising approach to inhibit aberrant RTK signaling are small molecule drugs that selectively interfere with the intrinsic tyrosine kinase activity and thereby block receptor autophosphorylation and activation of downstream signal transducers. The tyrphostins, which belong to the quinazolines, are one important group of such inhibitors that compete with ATP for the ATP binding site at the receptor's tyrosine kinase domain and some members have been shown to specifically inhibit the EGFR. Potent and selective inhibitors of receptors involved in neovascularization have been developed and are now undergoing clinical evaluation. Using the advantages of structure-based drug design, crystallographic structure information, combinatorial chemistry and high-throughput screening, new structural classes of tyrosine kinase inhibitors with increased potency and selectivity, higher in vitro and in vivo efficacy and decreased toxicity have emerged.

[0200] Recombinant immunotoxins provide another possibility of target-selective drug design. They are composed of a bacterial or plant toxin either fused or chemically conjugated to a specific ligand such as the variable domains of the heavy and light chains of mAbs or to a growth factor. Immunotoxins either contain the bacterial toxins Pseudomouas exotoxin A or diphtheria toxin or the plant toxins ricin A or clavin. These recombinant molecules can selectively kill their target cells when internalized after binding to specific cell surface receptors.

[0201] The use of antisense oligonucleotides represents another strategy to inhibit the activation of RTKs. Antisense oligonucleotides are short pieces of synthetic DNA or RNA that are designed to interact with the mRNA to block the transcription and thus the expression of specific-target proteins. These compounds interact with the mRNA by Watson-Crick base-pairing and are therefore highly specific for the target protein. Several preclinical and clinical studies suggest that antisense therapy might be therapeutically useful for the treatment of solid tumors.

[0202] Non-receptor PTKs lack transmembrane regions and, instead, form complexes with the intracellular regions of cell surface receptors. Such receptors that function through non-receptor PTKs include those for cytokines, hormones (growth hormone and prolactin) and antigen-specific receptors on T and B lymphocytes.

[0203] Many of these PTKs were first identified as the products of mutant oncogenes in cancer cells where their activation was no longer subject to normal cellular controls. In fact, about one third of the known oncogenes encode PTKs, and it is well-known that cellular transformation (oncogenesis) is often accompanied by increased tyrosine phosphorylation activity.

[0204] The potential of protein kinases and their relevant signaling as selective anti-cancer targets for therapeutic intervention has been recognized. As a consequence, a variety of successful target-specific drugs such as mAbs and protein kinase inhibitors have been developed and are currently evaluated in clinical trials.

[0205] Many tyrosine kinase inhibitors are derived from natural products including flavopiridol, genistem, erbstatin, lavendustin A, staurosporine, and UCN-O1. Inhibitors directed at the ATP binding site are also available. Signals from RTKs can also be inhibited at other target sites such as: nuclear tyrosine kinases, membrane anchors (inhibition of famesylation) and transcription factors.

[0206] Targeting the signaling potential of growth promoting tyrosine kinases such as EGFR, HER2, PDGFR, src, and abl may block tumor growth, while blocking IGF-I and TRK will interfere with tumor cell survival. Inhibiting these kinases may lead to tumor shrinkage and apoptosis. FklI/KDR and src are kinases necessary for neovascularization (angiogenesis) of tumors and inhibition of these may slow tumor gowth thereby decreasing metastases.

[0207] Inhibitors of RTKs may stabilize the tumor in terms of cell proliferation, normal cell loss via apoptosis, and prevent cell migration, invasion and metastases. These drugs are likely to increase the time required for tumor progression, and may inhibit or attenuate the aggressiveness of the disease but may not initially result in measurable tumor regression.

[0208] Likewise, phosphatases, G-protein coupled receptors, ion channels, proteases, metabolic enzymes, and transcription factors are known targets for drug discovery.

[0209] CCGs and CCG Products as Markers for Colon Cancer

[0210] CCGs, CCPNs, and CCPPs can be used as markers for colon cancer. Exemplary CCGs include those listed in Tables 1-5, or homologs thereof. Examples of CCPNs include SEQ ID NOS:1-63, or the complements or fragments thereof. Examples of CCPPs include SEQ ID NOS:64-126, or the fragments thereof. In many embodiments, CCPNs or CCPPs employed in the present invention include at least 5, 6, 7, 8, 9, 10, 15, 20, 25, 30, 35, 40, 45, 50, 100, or more consequence residues.

[0211] The expression profile of CCGs can also indicate the presence of a risk of colon cancer. These markers are further useful for correlating differences in levels of expression with a poor or favorable prognosis of colon cancer. In one example, probes for CCGs can be conveniently attached on one or more substrates (e.g., biochips) for use in kits. In addition, the CCGs can be used to assess the efficacy of a treatment or therapy of colon cancer, or as targets for treatment or therapeutic agents. CCGs can also be used to generate vaccines for colon cancer, to produce antibodies specific to cancer cells, and to construct gene therapy vectors that can inhibit tumor growth. Without limitation as to mechanism, the invention is based in part on the principle that modulation of the expression of CCGs of the invention may ameliorate colon cancer when they are expressed at levels similar or substantially similar to diseased-free (i.e., normal) tissues.

[0212] In one aspect, the expression levels of CCGs employed in the present invention are correlated with the presence of colon cancer. In certain embodiments, the present invention can be performed by detecting the presence of CCPNs or CCPPs using any suitable method known in the art. In another aspect, the expression levels of the CCGs are determined in a biological sample of a particular subject for which either diagnosis or prognosis information is desired. The expression profile of one or more CCGs can be used as a “fingerprint” to represent the disease state of a cell. In some examples, relative levels of expression are indicative of the severity of colon cancer and as such, can be used for diagnostic and prognostic analyses. Moreover, by comparing relative expression profiles of CCGs from tissue samples taken at different points in time, e.g., pre- and post-therapy or at different time points within a course of therapy or during colon cancer development, information regarding which gene is important for each of these stages can be obtained. In one example, comparison of expression profiles of CCGs at different stages of the tumor progression provides a method for long-term prognosis, including survival. In another example, a particular treatment regime can be evaluated based on CCG expression profiles, including whether a particular drug will act to improve the long-term prognosis in a particular patient.

[0213] The discovery of the differential expression patterns for individual or panels of CCGs allows for screening for test compounds that modulate a particular expression pattern. For example, screening can be done for compounds that will convert an expression profile for a poor prognosis to one for a better prognosis. In certain embodiments, this can be done by making biochips comprising sets of the significant CCGs, which can then be used in these screens. These methods can also be done on the protein level. Protein expression levels of the CCGs can be evaluated for diagnostic and prognostic purposes, or used to screen test compounds. For example, in relation to these embodiments, significant CCGs can comprise CCGs which are determined to have modulated activity or expression in response to a therapy regime. Alternatively, the modulation of the activity or expression of a CCG can be correlated with the diagnosis or prognosis of colon cancer. In addition, the CCGs can be administered for therapeutic purposes, including the administration of antisense nucleic acids or proteins (including CCPPs, antibodies to CCPPs and other modulators of CCPPs).

[0214] For example, the CCG STK-15 has increased expression in colon cancer tissue samples relative to control tissue samples. The presence of increased mRNA for this gene (or any other CCGs set forth in Tables 1-5), or increased levels of the protein products of this gene (or any other CCGs set forth in Tables 1-5) serve as markers for colon cancer. Accordingly, amelioration of colon cancer can be achieved by modulating up-regulated colon cancer markers, such as STK-15, to normal levels (e.g., levels similar or substantially similar to tissue substantially free of colon cancer). In one instance, the up-regulated colon cancer marker is modulated to be similar to a control sample which is taken from a subject or tissue that is substantially free of colon cancer. Indeed, it is well established that the targets of many cancer therapeutics are kinases.

[0215] In another embodiment, a product of CCG, either in the form of a polynucleotide or a polypeptide, can be used as a therapeutic compound of the invention. In yet other embodiments, a modulator of CCG expression or the activity of a CCG product can be used as a therapeutic compound of the invention. The modulation may also be used in combination with one or more other therapeutic compositions of the invention. Formulation of such compounds into pharmaceutical compositions is described below. Administration of such a pharmaceutical composition may suppress bioactivity of CCG products and therefore can be used to ameliorate colon cancer.

[0216] Sources of CCG Products

[0217] Polynucleotides and polypeptides encoded by CCGs (i.e., CCPNs and CCPPs, respectively) can be isolated from any suitable tissue or cell of a subject of interest. In one embodiment, the cell or tissue is from colon or rectum. Other cell or tissue samples, including bodily fluids such as blood or feces, can serve as sources for isolation of CCG products. In addition, CCPNs or CCPPs can be prepared by using, without limitation, nucleic acid amplification, recombinant vectors encoding CCGs, chemical synthesis, or other methods as appreciated by those skilled in the art.

[0218] Isolated Polynucleotides

[0219] One aspect of the invention pertains to isolated polynucleotides. Another aspect of the invention pertains to isolated polynucleotide fragments sufficient for use as hybridization probes to identify a CCPN in a sample, as well as nucleotide fragments for use as PCR primers of the amplification or mutation of the nucleic acid molecules which encodes CCPPs.

[0220] The probes/primers employed in the invention can be in any desired length. For instance, the probes/primers can include at least 7, 8, 9, 10, 15, 20, 30, 40, 50, 100, or more consecutive residues. Each probe/primer can hybridize under reduced stringent, stringent, or highly stringent conditions to an RNA transcript of a CCG, or the complement thereof. In one embodiment, each probe/primer can hybridize to an RNA transcript (or its complement) of a CCG but not RNA transcripts (or their complements) of other CCGs.

[0221] As used herein, the “stringency” of a hybridization reaction refers to the difficulty with which any two nucleic acid molecules will hybridize to one another. Examples of stringency conditions are shown in Table 6 below. Highly stringent conditions are those that are at least as stringent as, for example, conditions A-F; stringent conditions are at least as stringent as, for example, conditions G-L; and reduced stringency conditions are at least as stringent as, for example, conditions M-R.

TABLE 6
Stringency Conditions

| Stringency | Polynucleotide | Hybrid | Hybridization | Wash Temp. |
|---|---|---|---|---|
| Condition | Hybrid | Length (bp)¹ | Temperature and Buffer^{H} | and Buffer^{H} |
| A | DNA:DNA | >50 | 65° C.; 1xSSC -or- | 65° C.; 0.3xSSC |
| | | | 42° C.; 1xSSC, 50% formamide | |
| B | DNA:DNA | <50 | T_{B}*; 1xSSC | T_{B}*; 1xSSC |
| C | DNA:RNA | >50 | 67° C.; 1xSSC -or- | 67° C.; 0.3xSSC |
| | | | 45° C.; 1xSSC, 50% formamide | |
| D | DNA:RNA | <50 | T_{D}*; 1xSSC | T_{D}*; 1xSSC |
| E | RNA:RNA | >50 | 70° C.; 1xSSC -or- | 70° C.; 0.3xSSC |
| | | | 50° C.; 1xSSC, 50% formamide | |
| F | RNA:RNA | <50 | T_{F}*; 1xSSC | T_{F}*; 1xSSC |
| G | DNA:DNA | >50 | 65° C.; 4xSSC -or- | 65° C.; 1xSSC |
| | | | 42° C.; 4xSSC, 50% formamide | |
| H | DNA:DNA | <50 | T_{H}*; 4xSSC | T_{H}*; 4xSSC |
| I | DNA:RNA | >50 | 67° C.; 4xSSC -or- | 67° C.; 1xSSC |
| | | | 45° C.; 4xSSC, 50% formamide | |
| J | DNA:RNA | <50 | T_{J}*; 4xSSC | T_{J}*; 4xSSC |
| K | RNA:RNA | >50 | 70° C.; 4xSSC -or- | 67° C.; 1xSSC |
| | | | 50° C.; 4xSSC, 50% formamide | |
| L | RNA:RNA | <50 | T_{L}*; 2xSSC | T_{L}*; 2xSSC |
| M | DNA:DNA | >50 | 50° C.; 4xSSC -or- | 50° C.; 2xSSC |
| | | | 40° C.; 6xSSC, 50% formamide | |
| N | DNA:DNA | <50 | T_{N}*; 6xSSC | T_{N}*; 6xSSC |
| O | DNA:RNA | >50 | 55° C.; 4xSSC -or- | 55° C.; 2xSSC |
| | | | 42° C.; 6xSSC, 50% formamide | |
| P | DNA:RNA | <50 | T_{P}*; 6xSSC | T_{P}*; 6xSSC |
| Q | RNA:RNA | >50 | 60° C.; 4xSSC -or- | 60° C.; 2xSSC |
| | | | 45° C.; 6xSSC, 50% formamide | |
| R | RNA:RNA | <50 | T_{R}*; 4xSSC | T_{R}*; 4xSSC |
| ¹The hybrid length is that anticipated for the hybridized region(s) of the hybridizing polynucleotides. When hybridizing a polynucleotide to a target polynucleotide of unknown sequence, the hybrid length is assumed to be that of the hybridizing polynucleotide. When | | | | |
| # polynucleotides of known sequence are hybridized, the hybrid length can be determined by aligning the sequences of the polynucleotides and identifying the region or regions of optimal sequence complementarity. | | | | |
| ^{H}SSPE (1xSSPE is 0.15M NaCl, 10 mM NaH₂PO₄, and 1.25 mM EDTA, pH 7.4) can be substituted for SSC (1xSSC is 0.15M NaCl and 15 mM sodium citrate) in the hybridization and wash buffers; washes are performed for 15 minutes after hybridization is complete. | | | | |
| T_{B}*-T_{R}* The hybridization temperature for hybrids anticipated to be less than 50 base pairs in length should be 5-10° C. less than the melting temperature (Tₘ) of the hybrid, where Tₘ is determined according to the following equations. For hybrids less than 18 base pairs in | | | | |
| # length, Tₘ(° C.) = 2(# of A + T bases)⁺ 4(# of G + C bases). For hybrids between 18 and 49 base pairs in length, Tₘ(° C.) = 81.5 + 16.6(log₁₀Na⁺) + 0.41(% G⁺C) − (600/N), where N is the number of bases in the hybrid, and Na⁺ is the molar concentration of sodium ions in the hybridization buffer (Na⁺ for 1xSSC = 0.165M). | | | | |

[0222] The probes based on the nucleotide sequence of a CCG or of a CCPN can be used to detect transcripts or genomic sequences of the CCG or CCPP. In certain embodiments, the probe comprises a label group attached thereto, e.g., the label group can be a radioisotope, a fluorescent compound, an enzyme, or an enzyme co-factor. Such probes can be used as part of a diagnostic test kit for identifying cells or tissue which over-express or under-express a CCG polynucleotide or polypeptide of the invention, or which have greater or fewer copies of a CCG. For example, the level of a CCG product in a sample of cells from a subject may be detected, the amount of polypeptide or mRNA transcript of a CCG may be determined, or the presence of mutations or deletions of a CCG of the invention may be assessed.

[0223] The invention further encompasses polynucleotide molecules that differ from the polynucleotide sequences of CCGs due to degeneracy of the genetic code but encode the same proteins encoded by the CCGs.

[0224] The invention also encompasses homologs of CCGs of other species. Gene homologs are well understood in the art and are available using databases or search engines such as the Pubmed-Entrez database.

[0225] In addition, the invention encompasses polynucleotide molecules which are structurally different from the molecules described above, but which have substantially the same properties as the molecules above. Such molecules include allelic variants.

[0226] DNA sequence polymorphisms leading to changes in the amino acid sequences of the proteins can exist within a population (e.g., a human population). These polymorphic DNA sequences can be used by the present invention. Such genetic polymorphism may exist among individuals within a population due to natural allelic variation. In addition, it will be appreciated that DNA polymorphisms that affect RNA expression levels can also exist and may affect the overall expression level of that gene (e.g., by affecting regulation or degradation).

[0227] Polynucleotide molecules corresponding to natural allelic variants or homologs of CCGs can be isolated based on their homology to the CCGs using standard hybridization techniques under stringent or highly stringent hybridization conditions. Polynucleotide molecules corresponding to natural allelic variants or homologs of CCGs can further be isolated by mapping to the same chromosome or locus as the original CCG.

[0228] In another embodiment, a polynucleotide molecule used in the invention is at least 15, 20, 25, 30, 50, 100, 150, 200, 250, 300, 350, 400, 450, 500, 550, 600, 650, 700, 750, 800, 850, 900, 950, 1000, 1100, 1200, 1300, 1400, 1500, 1600, 1700, 1800, 1900, 2000 or more nucleotides in length and can hybridize under reduced stringent, stringent, or highly stringent conditions to a sequence encoded by a CCG. In one example, the isolated polynucleotide molecule can hybridize under reduced stringent, stringent, or highly stringent conditions to a sequence selected from SEQ ID NOS:1-63.

[0229] In addition to naturally-occurring CCG allelic variants, the skilled artisan will further appreciate that changes can be introduced by mutation into the nucleotide sequences of the CCGs, thereby leading to changes in the amino acid sequences of the encoded proteins, without significantly altering the biological activities of these proteins. For example, nucleotide substitutions leading to amino acid substitutions at “non-essential” amino acid residues can be made. A “non-essential” amino acid residue is a residue that can be altered from the wild-type sequence of a protein without significantly altering the biological activity.

[0230] Accordingly, another aspect of the invention pertains to CCPP variants that contain changes in amino acid residues that are not essential for activity. Such variants differ in amino acid sequence from the original CCPP, yet retain biological activity of the corresponding CCPP. In one embodiment, a variant comprises an amino acid sequence with at least about 60%, 65%, 70%, 75%, 80%, 85%, 90%, 95%, 98% or more sequence identity or similarity to a CCPP.

[0231] A polynucleotide may be further modified to increase stability in vivo. Possible modifications include, but are not limited to, the addition of flanking sequences at the 5′ or 3′ ends; the use of phosphorothioate or 2-o-methyl rather than phosphodiester linkages in the backbone; and the inclusion of nontraditional bases such as inosine, queosine and wybutosine, as well as acetyl- methyl-, thio- and other modified forms of adenine, cytidine, guanine, thymine and uridine.

[0232] Another aspect of the invention pertains to isolated polynucleotide molecules that are antisense to the CCGs of the invention. An “antisense” polynucleotide comprises a nucleotide sequence which is complementary to a “sense” polynucleotide encoding a protein, e.g., complementary to the coding strand of a double-stranded cDNA molecule or complementary to an mRNA sequence. Accordingly, an antisense polynucleotide can form hydrogen bonds to a sense polynucleotide. The antisense polynucleotide can be complementary to an entire coding strand of a CCG of the invention or to only a portion thereof. In one embodiment, an antisense polynucleotide molecule is antisense to a “coding region” of the coding strand of a nucleotide sequence of the invention. The term “coding region” includes the region of the nucleotide sequence comprising codons which are translated into amino acid. In another embodiment, the antisense polynucleotide molecule is antisense to a “noncoding region” of the coding strand of a nucleotide sequence of the invention.

[0233] Antisense polynucleotides of the invention can be designed according to the rules of Watson and Crick base pairing. The antisense polynucleotide molecule can be complementary to the entire coding region of an mRNA corresponding to a gene of the invention. In one embodiment, the antisense polynucleotide molecule is an oligonucleotide which is antisense to only a portion of the coding or noncoding region. An antisense oligonucleotide can be, for example, about 5, 10, 15, 20, 25, 30, 35, 40, 45 or 50 nucleotides in length. An antisense polynucleotide of the invention can be constructed using chemical synthesis and enzymatic ligation reactions known in the art. For example, an antisense polynucleotide can be chemically synthesized using naturally occurring nucleotides or variously modified nucleotides designed to increase the biological stability of the molecules or to increase the physical stability of the duplex formed between the antisense and sense polynucleotides, e.g., phosphorothioate derivatives and acridine substituted nucleotides can be used. Examples of modified nucleotides which can be used to generate the antisense polynucleotide include 5-fluorouracil, 5-bromouracil, 5-chlorouracil, 5-iodouracil, hypoxanthine, xanthine, 4-acetylcytosine, 5-(carboxyhydroxymethyl) uracil, 5-carboxymethylaminomethyl-2-thiouridine, 5-carboxymethylaminomethyluracil, dihydrouracil, beta-D-galactosylqueosine, inosine, N6-isopentenyladenine, 1-methylguanine, 1-methylinosine, 2,2-dimethylguanine, 2-methyladenine, 2-methylguanine, 3-methylcytosine, 5-methylcytosine, N6-adenine, 7-methylguanine, 5-methylaminomethyluracil, 5-methoxyaminomethyl-2-thiouracil, beta-D-mannosylqueosine, 5′-methoxycarboxymethyluracil, 5-methoxyuracil, 2-methylthio-N6-isopentenyladen4exine, unacil-5-oxyacetic acid (v), wybutoxosine, pseudouracil, queosine, 2-thiocytosine, 5-methyl-2-thiouracil, 2-thiouracil, 4-thiouracil, 5-methyluracil, uracil-5-oxyacetic acid methylester, 3-(3-amino-3-N-2-carboxypropyl) uracil, (acp3)w, and 2,6-diaminopurine. Alternatively, the antisense polynucleotide can be produced biologically using an expression vector into which a polynucleotide has been subcloned in an antisense orientation (e.g., RNA transcribed from the inserted polynucleotide will be of an antisense orientation to a target polynucleotide of interest, described further in the following subsection).

[0234] The antisense polynucleotide molecules of the invention are typically administered to a subject or generated in situ such that they hybridize with or bind to cellular mRNA or genomic DNA encoding a CCPP of the invention to thereby inhibit expression of the protein, e.g., by inhibiting transcription or translation. The hybridization may occur based on conventional nucleotide complementarity to form a stable duplex or, in the cases of an antisense polynucleotide molecule which binds to DNA duplexes, through specific interactions in the major groove of the DNA double helix. An example of a route of administration of antisense polynucleotide molecules of the invention is direct injection at a tissue site (e.g., intestine). Alternatively, antisense polynucleotide molecules can be modified to target selected cells and then administered systemically. For systemic administration, antisense molecules can be modified such that they specifically bind to receptors or antigens expressed on a selected cell surface, e.g., by linking the antisense polynucleotide molecules to peptides or antibodies which bind to cell surface receptors or antigens. The antisense polynucleotide molecules can also be delivered to cells using the vectors described herein. To achieve sufficient intracellular concentrations of the antisense molecules, vector constructs in which the antisense polynucleotide molecule is placed under the control of a strong promoter, such as pol II or pol III promoter, may be employed.

[0235] In yet another embodiment, the antisense polynucleotide molecule of the invention is an α-anomeric polynucleotide molecule. An α-anomeric polynucleotide molecule forms specific double-stranded hybrids with complementary RNA in which, contrary to the usual β-units, the strands run parallel to each other (Gaultier et al., Polynucleotides. Res., 15:6625-6641, 1987). The antisense polynucleotide molecule can also comprise a 2′-o-methylribonucleotide or a chimeric RNA-DNA analogue.

[0236] In still another embodiment, an antisense polynucleotide of the invention is a ribozyme. Ribozymes are catalytic RNA molecules with ribonuclease activity which are capable of cleaving a single-stranded polynucleotide, such as an mRNA, to which they have a complementary region. Thus, ribozymes (e.g., hammerhead ribozymes) can be used to catalytically cleave mRNA transcripts of the CCGs to thereby inhibit translation of said mRNA. A ribozyme having specificity for a CCPN can be designed based upon the nucleotide sequence of a gene of the invention, disclosed herein. For example, a derivative of a Tetrahymena L-19 IVS RNA can be constructed in which the nucleotide sequence of the active site is complementary to the nucleotide sequence to be cleaved in a CCG protein-encoding mRNA. Alternatively, mRNA transcribed from a gene of the invention can be used to select a catalytic RNA having a specific ribonuclease activity from a pool of RNA molecules. Alternatively, expression of a CCG of the invention can be inhibited by targeting the regulatory region of these genes (e.g., the promoter or enhancers) with complementary nucleotide sequences that will form triple helical structures with the target sequence to prevent transcription of the gene in target cells.

[0237] Expression of CCGs can also be inhibited using RNA interference (“RNAi”). RNAi is a phenomenon in which the introduction of double-stranded RNA (dsRNA) into certain organisms or cell types causes degradation of the homologous mRNA. First discovered in the nematode Caenorhabditis elegans, RNAi has since been found to operate in a wide range of organisms. For example, in mammalian cells, introduction of long dsRNA can initiate a potent antiviral response, exemplified by nonspecific inhibition of protein synthesis and RNA degradation. RNA interference provides a mechanism of gene silencing at the mRNA level. In recent years, RNAi has become an endogenous and potent gene-specific silencing technique that uses double-stranded RNAs (dsRNA) to mark a particular transcript for degradation in vivo. It also offers an efficient and broadly applicable approach for gene knock-out. In addition, RNAi technology can be used for therapeutic purposes. For example, RNAi targeting Fas-mediated apoptosis has been shown to protect mice from fulminant hepatitis.

[0238] Sequences capable of inhibiting gene expression by RNA interference can have any desired length. For instance, the sequence can have at least 10, 15, 20, 25, or more consecutive nucleotides. The sequence can be dsRNA or any other type of polynucleotide, provided that the sequence can form a functional silencing complex to degrade the target mRNA transcript.

[0239] In one embodiment, the sequence comprises or consists of a short interfering RNA (siRNA). The siRNA can be, for example, dsRNA having 19-25 nucleotides. siRNAs can be produced endogenously by degradation of longer dsRNA molecules by an RNase III-related nuclease called Dicer. siRNAs can also be introduced into a cell exogenously or by transcription of an expression construct. Once formed, the siRNAs assemble with protein components into endoribonuclease-containing complexes known as RNA-induced silencing complexes (RISCs). An ATP-generated unwinding of the siRNA activates the RISCs, which in turn target the complementary mRNA transcript by Watson-Crick base-pairing, thereby cleaving and destroying the mRNA. Cleavage of the mRNA takes place near the middle of the region bound by the siRNA strand. This sequence-specific mRNA degradation results in gene silencing.

[0240] At least two ways can be employed to achieve siRNA-mediated gene silencing. First, siRNAs can be synthesized in vitro and introduced into cells to transiently suppress gene expression. Synthetic siRNA provides an easy and efficient way to achieve RNAi. siRNA are duplexes of short mixed oligonucleotides which can include, for example, 19 nucleotides with symmetric dinucleotide 3′ overhangs. Using synthetic 21 bp siRNA duplexes (e.g., 19 RNA bases followed by a UU or dTdT 3′ overhang), sequence-specific gene silencing can be achieved in mammalian cells. These siRNAs can specifically suppress targeted gene translation in mammalian cells without activation of DNA-dependent protein kinase (PKR) by longer dsRNA, which may result in nonspecific repression of translation of many proteins.

[0241] Second, siRNAs can be expressed in vivo from vectors. This approach can be used to stably express siRNAs in cells or transgenic animals. In one embodiment, siRNA expression vectors are engineered to drive siRNA transcription from polymerase III (pol III) transcription units. Pol III transcription units are suitable for hairpin siRNA expression, since they deploy a short AT rich transcription termination site that leads to the addition of 2 bp overhangs (e.g., UU) to hairpin siRNAs—a feature that is helpful for siRNA function. The Pol III expression vectors can also be used to create transgenic mice that express siRNA.

[0242] In another embodiment, siRNAs can be expressed in a tissue-specific manner. Under this approach, long double-stranded RNAs (dsRNAs) are first expressed from a promoter (such as CMV (pol II)) in the nuclei of selected cell lines or transgenic mice. The long dsRNAs are processed into siRNAs in the nuclei (e.g., by Dicer). The siRNAs exit from the nuclei and mediate gene-specific silencing. A similar approach can be used in conjunction with tissue-specific promoters to create tissue-specific knockdown mice.

[0243] Any 3′ dinucleotide overhang, such as UU, can be used for siRNA design. In some cases, G residues in the overhang are avoided because of the potential for the siRNA to be cleaved by RNase at single-stranded G residues.

[0244] With regard to the siRNA sequence itself, it has been found that siRNAs with 30-50% GC content can be more active than those with a higher G/C content in certain cases. Moreover, since a 4-6 nucleotide poly(T) tract may act as a termination signal for RNA pol III, stretches of >4 Ts or As in the target sequence may be avoided in certain cases when designing sequences to be expressed from an RNA pol III promoter. In addition, some regions of mRNA may be either highly structured or bound by regulatory proteins. Thus, it may be helpful to select siRNA target sites at different positions along the length of the gene sequence. Finally, the potential target sites can be compared to the appropriate genome database (human, mouse, rat, etc.). Any target sequences with more than 16-17 contiguous base pairs of homology to other coding sequences may be eliminated from consideration in certain cases.

[0245] In one embodiment, siRNA is designed to have two inverted repeats separated by a short spacer sequence and end with a string of Ts that serve as a transcription termination site. This design produces an RNA transcript that is predicted to fold into a short hairpin siRNA. The selection of siRNA target sequence, the length of the inverted repeats that encode the stem of a putative hairpin, the order of the inverted repeats, the length and composition of the spacer sequence that encodes the loop of the hairpin, and the presence or absence of 5′-overhangs, can vary to achieve desirable results.

[0246] The siRNA targets can be selected by scanning an mRNA sequence for AA dinucleotides and recording the 19 nucleotides immediately downstream of the AA. Other methods can also been used to select the siRNA targets. In one example, the selection of the siRNA target sequence is purely empirically determined (see e.g., Sui et al., Proc. Natl. Acad. Sci. USA 99: 5515-5520, 2002), as long as the target sequence starts with GG and does not share significant sequence homology with other genes as analyzed by BLAST search. In another example, a more elaborate method is employed to select the siRNA target sequences. This procedure exploits an observation that any accessible site in endogenous mRNA can be targeted for degradation by synthetic oligodeoxyribonucleotide /RNase H method (Lee et al., Nature Biotechnology 20:500-505, 2002).

[0247] In another embodiment, the hairpin siRNA expression cassette is constructed to contain the sense strand of the target, followed by a short spacer, the antisense strand of the target, and 5-6 Ts as transcription terminator. The order of the sense and antisense strands within the siRNA expression constructs can be altered without affecting the gene silencing activities of the hairpin siRNA. In certain instances, the reversal of the order may cause partial reduction in gene silencing activities.

[0248] The length of nucleotide sequence being used as the stem of siRNA expression cassette can range, for instance, from 19 to 29. The loop size can range from 3 to 23 nucleotides. Other lengths and/or loop sizes can also be used.

[0249] In yet another embodiment, a 5′ overhang in the hairpin siRNA construct can be used, provided that the hairpin siRNA is functional in gene silencing. In one example, the 5′ overhang includes about 6 nucleotide residues.

[0250] In still yet another embodiment, the target sequences for RNAi are 21-mer sequence fragments selected from CCG coding sequences, such as SEQ ID NOS:1-63. The target sequences can be selected from either ORF regions or non-ORF regions. The 5′ end of each target sequence has dinucleotide “NA,” where “N” can be any base and “A” represents adenine. The remaining 19-mer sequence has a GC content of between 30% and 65%. In many examples, the remaining 19-mer sequence does not include any four consecutive A or T (i.e., AAAA or TTTT), three consecutive G or C (i.e., GGG or CCC), or seven “GC” in a row. Examples of the target sequences prepared using the above-described criteria (“Relaxed Criteria”) are illustrated in Table 7. Each target sequence in Table 7 has SEQ ID NO:3n+1, and the corresponding siRNA sense and antisense strands have SEQ ID NO:3n+2 and SEQ ID NO:3(n+1), respectively, where n is an integer. Antisense strand sequences (SEQ ID NO:3(n+1)) are presented in the 3′ to 5′ direction. For each CCG coding sequence (SEQ ID NOS:1-63), multiple target sequences can be selected.

[0251] Additional criteria can be used for RNAi target sequence design. In one example, the GC content of the 19-mer sequence is limited to between 35% and 55%, and any 19-mer sequence having three consecutive A or T (i.e., AAA or TTT) or a palindrome sequence with 5 or more bases is excluded. In addition, the 19-mer sequence can be selected to have low sequence homology to other human genes. In one embodiment, potential target sequences are searched by BLASTN against NCBI's human UniGene cluster sequence database. The human UniGene database contains non-redundant sets of gene-oriented clusters. Each UniGene cluster includes sequences that represent a unique gene. 19-mer sequences producing no hit to other human genes under the BLASTN search can be selected. During the search, the e-value may be set at a stringent value (such as “1”). Furthermore, the target sequence can be selected from the ORF region, and is at least 75-bp from the start and stop codons. Examples of the target sequences prepared using these criteria (“Stringent Criteria”) are demonstrated in Table 7. siRNA sense and antisense sequences (SEQ ID NO:3n+2 and SEQ ID NO:3(n+1), respectively) for each target sequence (SEQ ID NO:3n) are also provided. Antisense strand seqeunces (SEQ ID NO:3(n+1)) are presented in the 3′ to 5′ direction.

TABLE 7
RNAi Target Sequences and siRNA Sequences for CCGs

| | Relaxed Criteria | Stringent Criteria |
|---|---|---|
| SEQ ID NO | (target seq.: SEQ ID NO: 3n + 1; | (target seq.: SEQ ID NO: 3n + 1; |
| (CCG | siRNA sense seq.: SEQ ID NO: 3n + 2; | siRNA sense seq.: SEQ ID NO: 3n + 2; |
| coding seq.) | siRNA antisense seq.: SEQ ID NO: 3(n + 1)) | siRNA antisense seq.: SEQ ID NO: 3(n + 1)) |
| 1 | SEQ ID NOS: 127-1554 | SEQ ID NOS: 1555-1788 |
| 2 | SEQ ID NOS: 1789-2625 | SEQ ID NOS: 2626-2697 |
| 3 | SEQ ID NOS: 2698-3195 | |
| 4 | SEQ ID NOS: 3196-3609 | SEQ ID NOS: 3610-3669 |
| 5 | SEQ ID NOS: 3670-4101 | SEQ ID NOS: 4102-4113 |
| 6 | SEQ ID NOS: 4114-5715 | SEQ ID NOS: 5716-6015 |
| 7 | SEQ ID NOS: 6016-6231 | |
| 8 | SEQ ID NOS: 6232-8097 | SEQ ID NOS: 8098-8571 |
| 9 | SEQ ID NOS: 8572-9321 | SEQ ID NOS: 9322-9462 |
| 10 | SEQ ID NOS: 9463-10176 | SEQ ID NOS: 10177-10356 |
| 11 | SEQ ID NOS: 10357-10695 | SEQ ID NOS: 10696-10752 |
| 12 | SEQ ID NOS: 10753-11379 | SEQ ID NOS: 11380-11484 |
| 13 | SEQ ID NOS: 11485-11811 | SEQ ID NOS: 11812-11826 |
| 14 | SEQ ID NOS: 11827-13056 | SEQ ID NOS: 13057-13272 |
| 15 | SEQ ID NOS: 13273-13479 | SEQ ID NOS: 13480-13488 |
| 16 | SEQ ID NOS: 13489-14265 | SEQ ID NOS: 14266-14364 |
| 17 | SEQ ID NOS: 14365-15303 | SEQ ID NOS: 15304-15432 |
| 18 | SEQ ID NOS: 15433-15732 | SEQ ID NOS: 15733-15741 |
| 19 | SEQ ID NOS: 15742-16488 | SEQ ID NOS: 16489-16530 |
| 20 | SEQ ID NOS: 16531-17247 | SEQ ID NOS: 17248-17337 |
| 21 | SEQ ID NOS: 17338-18255 | SEQ ID NOS: 18256-18456 |
| 22 | SEQ ID NOS: 18457-19605 | SEQ ID NOS: 19606-19800 |
| 23 | SEQ ID NOS: 19801-20016 | |
| 24 | SEQ ID NOS: 20017-21621 | SEQ ID NOS: 21622-22014 |
| 25 | SEQ ID NOS: 22015-22428 | SEQ ID NOS: 22429-22461 |
| 26 | SEQ ID NOS: 22462-23148 | SEQ ID NOS: 23149-23151 |
| 27 | SEQ ID NOS: 23152-23187 | |
| 28 | SEQ ID NOS: 23188-24174 | SEQ ID NOS: 24175-24180 |
| 29 | SEQ ID NOS: 24181-24339 | SEQ ID NOS: 24340-24366 |
| 30 | SEQ ID NOS: 24367-24567 | SEQ ID NOS: 24568-24582 |
| 31 | SEQ ID NOS: 24583-25188 | SEQ ID NOS: 25189-25206 |
| 32 | SEQ ID NOS: 25207-25515 | SEQ ID NOS: 25516-25518 |
| 33 | SEQ ID NOS: 25519-25851 | SEQ ID NOS: 25852-25857 |
| 34 | SEQ ID NOS: 25858-26070 | SEQ ID NOS: 26071-26148 |
| 35 | SEQ ID NOS: 26149-26550 | |
| 36 | SEQ ID NOS: 26551-31761 | SEQ ID NOS: 31762-32658 |
| 37 | SEQ ID NOS: 32659-34032 | SEQ ID NOS: 34033-34323 |
| 38 | SEQ ID NOS: 34324-35706 | SEQ ID NOS: 35707-35892 |
| 39 | SEQ ID NOS: 35893-36381 | SEQ ID NOS: 36382-36429 |
| 40 | SEQ ID NOS: 36430-37146 | SEQ ID NOS: 37147-37239 |
| 41 | SEQ ID NOS: 37240-37713 | SEQ ID NOS: 37714-37752 |
| 42 | SEQ ID NOS: 37753-38154 | SEQ ID NOS: 38155-38208 |
| 43 | SEQ ID NOS: 38209-38844 | SEQ ID NOS: 38845-38883 |
| 44 | SEQ ID NOS: 38884-39837 | SEQ ID NOS: 39838-39924 |
| 45 | SEQ ID NOS: 39925-40125 | |
| 46 | SEQ ID NOS: 40126-40863 | SEQ ID NOS: 40864-40902 |
| 47 | SEQ ID NOS: 40903-42051 | SEQ ID NOS: 42052-42267 |
| 48 | SEQ ID NOS: 42268-42921 | SEQ ID NOS: 42922-42996 |
| 49 | SEQ ID NOS: 42997-43470 | SEQ ID NOS: 43471-43527 |
| 50 | SEQ ID NOS: 43528-43926 | |
| 51 | SEQ ID NOS: 43927-45804 | SEQ ID NOS: 45805-46167 |
| 52 | SEQ ID NOS: 46168-46731 | SEQ ID NOS: 46732-46833 |
| 53 | SEQ ID NOS: 46834-47874 | SEQ ID NOS: 47875-48030 |
| 54 | SEQ ID NOS: 48031-48297 | SEQ ID NOS: 48298-48303 |
| 55 | SEQ ID NOS: 48304-48807 | |
| 56 | SEQ ID NOS: 48808-49608 | SEQ ID NOS: 49609-49683 |
| 57 | SEQ ID NOS: 49684-49956 | SEQ ID NOS: 49957-49971 |
| 58 | SEQ ID NOS: 49972-51438 | SEQ ID NOS: 51439-51699 |
| 59 | SEQ ID NOS: 51700-52878 | SEQ ID NOS: 52879-52926 |
| 60 | SEQ ID NOS: 52927-53196 | SEQ ID NOS: 53197-53205 |
| 61 | SEQ ID NOS: 53206-54168 | SEQ ID NOS: 54169-54306 |
| 62 | SEQ ID NOS: 54307-54708 | SEQ ID NOS: 54709-54747 |
| 63 | SEQ ID NOS: 54748-54873 | |

[0252] The effectiveness of the siRNA sequences can be evaluated using various methods known in the art. For instance, a siRNA sequence of the present invention can be introduced into a cell that expresses a CCG. The polypeptide or mRNA level of the CCG in the cell can be detected. A substantial change in the expression level of the CCG before and after the introduction of the siRNA sequence is indicative of the effectiveness of the siRNA sequence in suppressing the expression of the CCG. In one example, the expression levels of other genes are also monitored before and after the introduction of the siRNA sequence. A siRNA sequence which has inhibitory effect on the CCG expression but does not significantly affect the expression of other genes can be selected. In another example, multiple siRNA or other RNAi sequences can be introduced into the same target cell. These siRNA or RNAi sequences specifically inhibit the CCG gene expression but not the expression of other genes. In yet another example, siRNA or other RNAi sequences that inhibit the expression of both the CCG gene and other gene or genes can be used.

[0253] In yet another embodiment, the polynucleotide molecules employed in the present invention can be modified at the base moiety, sugar moiety or phosphate backbone to improve, e.g., the stability, hybridization, or solubility of the molecule. For example, the deoxyribose phosphate backbone of the polynucleotide molecules can be modified to generate peptide polynucleotides. As used herein, the terms “peptide polynucleotides” or “PNAs” refer to polynucleotide mimics, in which the deoxyribose phosphate backbone is replaced by a pseudopeptide backbone and only the four natural nucleobases are retained. The neutral backbone of PNAs has been shown to allow for specific hybridization to DNA and RNA under conditions of low ionic strength. The synthesis of PNA oligomers can be performed using standard solid phase peptide synthesis protocols.

[0254] PNAs can be used in therapeutic and diagnostic applications. For example, PNAs can be used as antisense or antigene agents for sequence-specific modulation of CCG expression by inducing transcription or translation arrest or inhibiting replication. PNAs of the polynucleotide molecules of the invention (e.g., SEQ ID NOS: 1-63, or homologs or fragments thereof) can also be used in the analysis of single base pair mutations in a gene, (e.g., by PNA-directed PCR clamping), as artificial restriction enzymes when used in combination with other enzymes (e.g., S1 nucleases) or as probes or primers for DNA sequencing or hybridization.

[0255] In another embodiment, PNAs can be modified to enhance their stability or cellular uptake by attaching lipophilic or other helper groups to PNA, by the formation of PNA-DNA chimeras, or by the use of liposomes or other techniques of drug delivery known in the art. For example, PNA-DNA chimeras of the polynucleotide molecules of the invention can be generated. Such chimeras allow DNA recognition enzymes, (e.g., RNase H and DNA polymerases), to interact with the DNA portion while the PNA portion would provide high binding affinity and specificity. PNA-DNA chimeras can be linked using linkers of appropriate lengths selected in terms of base stacking, number of bonds between the nucleobases, and orientation. The synthesis of PNA-DNA chimeras can be performed. For example, a DNA chain can be synthesized on a substrate support using standard phosphoramidite coupling chemistry and modified nucleoside analogs, e.g., 5′-(4-methoxytrityl)amino-5′-deoxy-thymidine phosphoramidite, can be used as a spacer between the PNA and the 5′ end of DNA. PNA monomers are then coupled in a stepwise manner to produce a chimeric molecule with a 5′ PNA segment and a 3′ DNA segment. Alternatively, chimeric molecules can be synthesized with a 5′ DNA segment and a 3′ PNA segment.

[0256] In other embodiments, the polynucleotide may include other appended groups such as peptides (e.g., for targeting host cell receptors in vivo), or agents facilitating transport across the cell membrane or the blood-kidney barrier (see, e.g., PCT Publication No. W089/10134). In addition, polynucleotides can be modified with hybridization-triggered cleavage agents or intercalating agents. To this end, the polynucleotide may be conjugated to another molecule (e.g., a peptide, hybridization triggered cross-linking agent, transport agent, or hybridization-triggered cleavage agent). Finally, the polynucleotide may be detectably labeled, either such that the label is detected by the addition of another reagent (e.g., a substrate for an enzymatic label), or is detectable immediately upon hybridization of the nucleotide (e.g., a radioactive label or a fluorescent label).

[0257] Isolated Polypeptides

[0258] Several aspects of the invention pertain to isolated CCPPs and biologically active portions thereof, as well as polypeptide fragments suitable for use as immunogens to raise anti-CCPP antibodies. In one embodiment, native CCPPs can be isolated from cells or tissue sources by an appropriate purification scheme using standard protein purification techniques. The degree of purification will vary depending on the use of the CCPP. In some instances, no purification will be necessary.

[0259] In one embodiment, mutated CCPPs capable of inhibiting normal CCPP activity (dominant-negative mutants) are produced by recombinant DNA techniques. Alternative to recombinant expression, mutated CCPPs can be synthesized chemically using standard peptide synthesis techniques.

[0260] In another embodiment, the invention provides CCPPs encoded by CCGs set forth in Tables 1-5, or the homologs thereof. In another embodiment, the CCPPs are substantially homologous to a CCPP selected from Tables 1-5, and retain the functional activity of the CCPP, yet differ in amino acid sequence due to allelic variation or mutagenesis. In still another embodiment, the CCPPs are variants which have at least about 60%, 65%, 70%, 75%, 80%, 85%, 90%, 95%, 98%, or more sequence identity or similarity to the original CCPPS (e.g., SEQ ID NOS:64-126, or fragments thereof).

[0261] To determine the percent identity or similarity of two amino acid sequences or two nucleotide sequences, the sequences are aligned for optimal comparison purposes (e.g., gaps can be introduced in one or both of a first and a second amino acid or polynucleotide sequence for optimal alignment and non-homologous sequences can be disregarded for comparison purposes). The percent identity or similarity between the two sequences is a function of the number of identical or similar positions shared by the sequences, taking into account the number of gaps, and the length of each gap, which need to be introduced for optimal alignment of the two sequences.

[0262] The comparison of sequences and determination of percent identity between two sequences can be accomplished using a mathematical algorithm. In one embodiment, the percent identity or similarity between two amino acid sequences is determined using the Needleman and Wunsch (J. Mol. Biol., 48:444453, 1970) algorithm which has been incorporated into the GAP program in the GCG software package, using either a Blossom 62 matrix or a PAM250 matrix, and a gap weight of 16, 14, 12, 10, 8, 6, or 4 and a length weight of 1, 2, 3, 4, 5, or 6. In another embodiment, the percent identity or similarity between two nucleotide sequences is determined using the GAP program in the GCG software package, using a NWSgapdna.CMP matrix and a gap weight of 40, 50, 60, 70, or 80 and a length weight of 1, 2, 3, 4, 5, or 6.

[0263] The polynucleotides and protein sequences of the present invention can further be used as “query sequences” to perform searches against public databases to, for example, identify other family members or related sequences. Such searches can be performed using BLAST programs available at the BLAST website maintained by the National Center of Biotechnology Information (NCBI), National Library of Medicine, Washington, D.C., USA.

[0264] The invention also provides chimeric or fusion CCPPs. A fusion CCPP may contain all or a portion of a CCPP and a fusion partner. In one embodiment, a fusion CCPP comprises at least one biologically active portion of a CCPP. The fusion partner can be fused to the N-terminus or C-terminus of the CCPP.

[0265] A peptide linker sequence may be employed to separate the CCPP from its fusion partner by a distance sufficient to ensure that each polypeptide folds into its secondary and tertiary structures. Such a peptide linker sequence is incorporated into the fusion protein using standard techniques well-known in the art. Suitable peptide linker sequences may be chosen based on the following factors: (1) their ability to adopt a flexible extended conformation; (2) their inability to adopt a secondary structure that could interact with functional epitopes on the CCPP or its fusion partner, and (3) the lack of hydrophobic or charged residues that might react with the polypeptide functional epitopes. Exemplary peptide linker sequences contain Gly, Asn and Ser residues. Other near neutral amino acids, such as Thr and Ala can also be used in the linker sequence. Amino acid sequences which may be usefully employed as linkers include those disclosed in Maratea et al., Gene, 40:39-46, 1985; Murphy et al., Proc. Natl. Acad. Sci., USA, 83:8258-8262, 1986; U.S. Pat. No. 4,935,233 and U.S. Pat. No. 4,751,180. The linker sequence may generally be from 1 to about 50 amino acids in length. Linker sequences are not required when the CCPP-related polypeptide and non-CCPP-related polypeptide have non-essential N-terminal amino acid regions that can be used to separate the functional domains and prevent steric interference.

[0266] In one embodiment, the fusion protein is a glutathione s-transferase (GST)-CCPP fusion protein in which the CCPP sequence is fused to the C-terminus of the GST sequences. Such fusion proteins can facilitate the purification of recombinant CCPPs.

[0267] In another embodiment, the fusion protein is a CCPP containing a heterologous signal sequence at its N-terminus. In certain host cells (e.g., mammalian host cells), expression or secretion of CCPPs can be increased through use of a heterologous signal sequence. Such signal sequences are well-known in the art.

[0268] The CCPP fusion proteins of the invention can be incorporated into pharmaceutical compositions and administered to a subject in vivo, as described herein. The CCPP fusion proteins can be used to affect the bioavailability of a CCPP substrate. Use of CCPP fusion proteins may be useful therapeutically for the treatment of or prevention of damage caused by, for example, (i) aberrant modification or mutation of a CCG; (ii) mis-regulation of a CCG; and (iii) aberrant post-translational modification of a CCPP.

[0269] Moreover, the CCPP fusion proteins of the invention can be used as immunogens to produce anti-CCPP antibodies in a subject, to purify CCPP ligands and in screening assays to identify molecules which inhibit the interaction of a CCPP with a CCPP substrate.

[0270] CCPP fusion proteins used as immunogens may comprise a non-CCPP immunogenic polypeptide. In one example, the immunogenic protein is capable of eliciting a recall response. In another example, a CCPP chimeric or fusion protein of the invention is produced by standard recombinant DNA techniques. For instance, DNA fragments coding for the different polypeptide sequences are ligated together in-frame in accordance with conventional techniques, for example by employing blunt-ended or stagger-ended termini for ligation, restriction enzyme digestion to provide for appropriate termini, filling in of cohesive ends as appropriate, alkaline phosphatase treatment to avoid undesirable joining, and enzymatic ligation.

[0271] In another embodiment, the fusion gene can be synthesized by conventional techniques including automated DNA synthesizers. Alternatively, PCR amplification of gene fragments can be carried out using anchor primers which give rise to complementary overhangs between two consecutive gene fragments which can subsequently be annealed and reamplified to generate a chimeric gene sequence. Moreover, many expression vectors are commercially available that already encode a fusion moiety (e.g., a GST polypeptide). A CCPP-encoding polynucleotide can be cloned into such an expression vector such that the fusion moiety is linked in-frame to the CCPP.

[0272] A signal sequence can be used to facilitate secretion and isolation of the secreted protein or other proteins of interest. Signal sequences are typically characterized by a core of hydrophobic amino acids which are generally cleaved from the mature protein during secretion in one or more cleavage events. Such signal peptides contain processing sites that allow cleavage of the signal sequence from the mature proteins as they pass through the secretory pathway. Thus, the invention pertains to the described polypeptides having a signal sequence, as well as to polypeptides from which the signal sequence has been proteolytically cleaved (i.e., the cleavage products). In one embodiment, a polynucleotide sequence encoding a signal sequence can be operably linked in an expression vector to a protein of interest, such as a protein which is ordinarily not secreted or is otherwise difficult to isolate. The signal sequence directs secretion of the protein, such as from a eukaryotic host into which the expression vector is transformed, and the signal sequence is subsequently or concurrently cleaved. The protein can then be readily purified from the extracellular medium by art recognized methods.

[0273] Alternatively, the signal sequence can be linked to the protein of interest using a sequence which facilitates purification, such as with a GST domain.

[0274] The present invention also pertains to variants of the CCPPs of the invention which function as either agonists or as antagonists to the CCPPs. In one embodiment, antagonists or agonists of CCPPs are used as therapeutic agents. For example, antagonists of an up-regulated CCG that can decrease the activity or expression of such a gene may ameliorate colon cancer in a subject wherein the CCG is abnormally increased in level or activity. In this embodiment, treatment of such a subject may comprise administering the antagonists to decrease activity or expression of the targeted CCG. Variants of the CCPPs can be generated by mutagenesis, e.g., discrete point mutation or truncation of a CCPP.

[0275] In certain embodiments, an agonist of the CCPPs can retain substantially the same, or a subset, of the biological activities of the naturally occurring form of a CCPP or may enhance an-activity of a CCPP. In certain embodiments, an antagonist of a CCPP can inhibit one or more of the activities of the naturally occurring form of the CCPP by, for example, competitively modulating an activity of a CCPP. Thus, specific biological effects can be elicited by treatment with a variant of limited function. In one embodiment, treatment of a subject with a variant having a subset of the biological activities of the naturally occurring form of the protein has fewer side effects in a subject relative to treatment with the naturally occurring form of the CCPP.

[0276] Mutants of a CCPP which function as either CCPP agonists or as CCPP antagonists can be identified by screening combinatorial libraries of mutants, e.g., truncation mutants, of a CCPP for CCPP agonist or antagonist activity. A variegated library of CCPP variants can be produced by, for example, enzymatically ligating a mixture of synthetic oligonucleotides into gene sequences such that a degenerate set of potential CCPP sequences is expressible as individual polypeptides, or alternatively, as a set of larger fusion proteins (e.g., for phage display) containing the set of CCPP sequences therein. There are a variety of methods which can be used to produce libraries of potential CCPP variants from a degenerate oligonucleotide sequence. Chemical synthesis of a degenerate gene sequence can be performed in an automatic DNA synthesizer, and the synthetic gene is then ligated into an appropriate expression vector. Use of a degenerate set of genes allows for the provision, in one mixture, of all of the sequences encoding the desired set of potential CCPP sequences. Methods for synthesizing degenerate oligonucleotides are known in the art.

[0277] In addition, libraries of fragments of a protein coding sequence corresponding to a CCPP of the invention can be used to generate a variegated population of CCPP fragments for screening and subsequent selection of variants of a CCPP. In one embodiment, a library of coding sequence fragments can be generated by treating a double-stranded PCR fragment of a CCPP coding sequence with a nuclease under conditions wherein nicking occurs only about once per molecule, denaturing the double-stranded DNA, returning the DNA to form double-stranded DNA which can include sense/antisense pairs from different nicked products, removing single-stranded portions from reformed duplexes by treatment with S1 nuclease, and ligating the resulting fragment library into an expression vector. By this method, an expression library can be derived which encodes N-terminal, C-terminal and internal fragments of various sizes of the CCPP.

[0278] Several techniques are known in the art for screening gene products of combinatorial libraries made by point mutations or truncation, and for screening cDNA libraries for gene products having a selected property. Some widely used techniques, which are amenable to high-throughput analysis, for screening large gene libraries include cloning the gene library into replicable expression vectors, transforming appropriate cells with the resulting library of vectors, and expressing the combinatorial genes under conditions in which detection of a desired activity facilitates isolation of the vector encoding the gene whose product was detected. Recursive ensemble mutagenesis (REM), a technique which enhances the frequency of functional mutants in the libraries, can be used in combination with the screening assays to identify CCPP variants (Delgrave et al. Protein Engineering, 6:327-331, 1993).

[0279] Portions of a CCPP or variants of a CCPP may also be generated by synthetic means, using techniques well-known to those of ordinary skill in the art. For example, such polypeptides may be synthesized using any of the commercially available solid-phase techniques, such as the Merrifield solid-phase synthesis method, where amino acids are sequentially added to a growing amino acid chain. Equipment for automated synthesis of polypeptides is commercially available from suppliers such as Perkin Elmer/Applied BioSystems Division (Foster City, Calif.), and may be operated according to the manufacturer's instructions.

[0280] Methods and compositions for screening for protein inhibitors or activators are known in the art (see U.S. Pat. Nos. 4,980,281, 5,266,464, 5,688,635, and 5,877,007).

[0281] In yet another embodiment, the present invention provides variants of CCPPs that have substantially the same immunogenicity as the original CCPPs. In certain examples, these variants have at least 60%, 65%, 50%, 75%, 80%, 85%, 90%, 95%, 98%, or more sequence identity or similarity to the original CCPPs. In some other examples, the variants include the same immunogenic epitopes as the original CCPPs. These variants can be used, for example, for making antibodies, vaccines, or biochips.

[0282] Antibodies

[0283] In another aspect, the invention provides antibodies that are specific to CCPPs or their variants. In one embodiment, the antibodies are monoclonal antibodies. In another embodiment, the antibodies are humanized antibodies.

[0284] In yet another aspect, the invention provides methods of making an isolated hybridoma which produces an antibody useful for diagnosing a patient or animal with colon cancer. In this method, a CCPP or its variant is isolated (e.g., by purification from a cell in which it is expressed or by transcription and translation of a polynucleotide encoding the protein in vivo or in vitro using known methods). A vertebrate, such as a mouse, rabbit, sheep, or another mammal, is immunized using the isolated polypeptide or polypeptide fragment. The vertebrate may optionally be immunized at least one additional time with the isolated polypeptide or polypeptide fragment, so that the vertebrate exhibits a robust immune response to the polypeptide or polypeptide fragment. Splenocytes are isolated from the immunized vertebrate and fused with an immortalized cell line to form hybridomas, using any of a variety of methods well-known in the art. Hybridomas formed in this manner are then screened using standard methods to identify one or more hybridomas which produce an antibody which specifically binds with the polypeptide or polypeptide fragment. The invention also includes hybridomas made by this method and antibodies made using such hybridomas.

[0285] An isolated CCPP, or a portion or fragment thereof, can be used as an immunogen to generate antibodies that bind the CCPP using standard techniques for polyclonal and monoclonal antibody preparation. A full-length CCPP can be used or, alternatively, the invention provides antigenic peptide fragments of the CCPP for use as immunogens. In one example, the antigenic peptide of a CCPP comprises at least 8 amino acid residues of an amino acid sequence encoded by a CCG set forth in Tables 1-5, and encompasses an epitope of a CCPP such that an antibody raised against the peptide forms a specific immune complex with the CCPP.

[0286] Immunogenic portions (or epitopes) may generally be identified using well-known techniques. Such techniques include screening polypeptides for the ability to react with antigen-specific antibodies, antisera or T cell lines or clones. As used herein, antisera and antibodies are “specific” for an antigen if they bind to the antigen with a substantially high binding affinity. In some examples, binding affinity between the antisera or antibodies and the antigen can be at least 10⁵ M⁻¹, 10⁶ M⁻¹, 10⁷ M⁻¹, 10⁸ M⁻¹, or more. Such antisera and antibodies may be prepared as described herein using well-known techniques.

[0287] Exemplary epitopes encompassed by the antigenic peptide are regions of the CCPP that are located on the surface of the protein, e.g., hydrophilic regions, as well as regions with high antigenicity.

[0288] A CCPP immunogen typically is used to prepare antibodies by immunizing a suitable subject (e.g., rabbit, goat, mouse or other mammal) with the immunogen. An appropriate immunogenic preparation can contain, for example, recombinantly expressed CCPP or a chemically synthesized CCPP. The preparation can further include an adjuvant, such as Freund's complete or incomplete adjuvant, or similar immumostimulatory agent. Immunization of a suitable subject with an immunogenic CCPP preparation induces a polyclonal anti-CCPP antibody response. Techniques for preparing, isolating and using antibodies are well-known in the art.

[0289] Accordingly, another aspect of the invention pertains to monoclonal or polyclonal anti-CCPP antibodies. Examples of immunologically active portions of immunoglobulin molecules include F(ab) and F(ab′)₂ fragments which can be generated by treating the antibody with an enzyme such as pepsin. The invention provides polyclonal and monoclonal antibodies that bind to CCPP.

[0290] Polyclonal anti-CCPP antibodies can be prepared as described above by immunizing a suitable subject with a CCPP. The anti-CCPP antibody titer in the immunized subject can be monitored over time by standard techniques, such as with an enzyme linked immunosorbent assay (ELISA) using immobilized CCPP. If desired, the antibody molecules directed against CCPPs can be isolated from the mammal (e.g., from the blood) and further purified by well-known techniques, such as protein A chromatography, to obtain the IgG fraction. At an appropriate time after immunization, e.g., when the anti-CCPP antibody titers are highest, antibody-producing cells can be obtained from the subject and used to prepare monoclonal antibodies by standard techniques, such as the hybridoma technique, human B cell hybridoma technique, the EBV-hybridoma technique, or trioma techniques. The technology for producing monoclonal antibody hybridomas is well-known. Briefly, an immortal cell line (typically a myeloma) is fused to lymphocytes (typically splenocytes) from a mammal immunized with a CCPP immunogen as described above, and the culture supernatants of the resulting hybridoma cells are screened to identify a hybridoma producing a monoclonal antibody that binds to a CCPP of the invention.

[0291] Numerous protocols are available for fusing lymphocytes and immortalized cell lines to generate anti-CCPP monoclonal antibodies. Moreover, the ordinarily skilled worker will appreciate that there are many variations of such methods which also would be useful. Typically, the immortal cell line (e.g., a myeloma cell line) is derived from the same mammalian species as the lymphocytes. For example, murine hybridomas can be made by fusing lymphocytes from a mouse immunized with an immunogenic preparation of the present invention with an immortalized mouse cell line. Exemplary immortal cell lines are mouse myeloma cell lines that are sensitive to culture medium containing hypoxanthine, aminopterin and thymidine (“HAT medium”). Any of a number of myeloma cell lines can be used as a fusion partner according to standard techniques, e.g., the P3-NS1/l-Ag4-1, P3-x63-Ag8.653 or Sp210-Ag14 myeloma lines. These myeloma lines are available from ATCC. Typically, HAT-sensitive mouse myeloma cells are fused to mouse splenocytes using polyethylene glycol (“PEG”). Hybridoma cells resulting from the fusion are then selected using HAT medium, which kills unfused and unproductively fused myeloma cells (unfused splenocytes die after several days because they are not transformed). Hybridoma cells producing a monoclonal antibody of the invention are detected by screening the hybridoma culture supernatants for antibodies that bind to a CCPP, e.g., using a standard ELISA assay.

[0292] Alternative to preparing monoclonal antibody-secreting hybridomas, a monoclonal anti-CCPP antibody can be identified and isolated by screening a recombinant combinatorial immunoglobulin library (e.g., an antibody phase display library) with CCPP to thereby isolate immunoglobulin library members that bind to a CCPP. Kits for generating and screening phage display libraries are commercially available (e.g., the Pharmacia Recombinant Phage Antibody System, Catalog No. 27-9400-01; and the Stratagene SurfZAP™ Phage Display Kit, Catalog No. 240612).

[0293] The anti-CCPP antibodies also include “Single-chain Fv” or “scFv” antibody fragments. The scFv fragments comprise the V_{H} and V_{L} domains of an antibody, wherein these domains are present in a single polypeptide chain. Generally, the Fv polypeptide further comprises a polypeptide linker between the V_{H} and V_{L} domains which enables the scFv to form the desired structure for antigen binding.

[0294] Additionally, recombinant anti-CCPP antibodies, such as chimeric and humanized monoclonal antibodies, comprising both human and non-human portions, which can be made using standard recombinant DNA techniques, are within the scope of the invention. Such chimeric and humanized monoclonal antibodies can be produced by recombinant DNA techniques known in the art.

[0295] Humanized antibodies are particularly desirable for therapeutic treatment of human subjects. Humanized forms of non-human (e.g., murine) antibodies are chimeric molecules of immunoglobulins, immunoglobulin chains or fragments thereof (such as Fv, Fab, Fab′, F(ab′)₂ or other antigen-binding subsequences of antibodies), which contain minimal sequence derived from non-human immunoglobulin. Humanized antibodies include human immunoglobulins (recipient antibody) in which residues forming a complementary determining region (CDR) of the recipient are replaced by residues from a CDR of a non-human species (donor antibody) such as mouse, rat or rabbit having the desired specificity, affinity and capacity. In some instances, Fv framework residues of the human immunoglobulin are replaced by corresponding non-human residues. Humanized antibodies may also comprise residues which are found neither in the recipient antibody nor in the imported CDR or framework sequences. In one embodiment, the humanized antibody comprises substantially all of at least one, and typically two, variable domains, in which all or substantially all of the CDR regions correspond to those of a non-human immunoglobulin and all or substantially all of the constant regions being those of a human immunoglobulin consensus sequence. In another embodiment, the humanized antibody can also comprise at least a portion of an immunoglobulin constant region (Fc), typically that of a human immunoglobulin.

[0296] Such humanized antibodies can be produced using transgenic mice which are incapable of expressing endogenous immunoglobulin heavy and light chain genes, but which can express human heavy and light chain genes. The transgenic mice are immunized in the normal fashion with a selected antigen, e.g., all or a portion of a polypeptide corresponding to a CCPP of the invention. Monoclonal antibodies directed against the antigen can be obtained using conventional hybridoma technology. The human immunoglobulin transgenes harbored by the transgenic mice rearrange during B cell differentiation, and subsequently undergo class switching and somatic mutation. Thus, using such a technique, it is possible to produce therapeutically useful IgG, IgA and IgE antibodies.

[0297] Humanized antibodies which recognize a selected epitope can be generated using a technique referred to as “guided selection.” In this approach a selected non-human monoclonal antibody, e.g., a murine antibody, is used to guide the selection of a humanized antibody recognizing the same epitope.

[0298] In one embodiment, the antibodies to CCPP are capable of reducing or eliminating the biological function of CCPP, as is described below. That is, the addition of anti-CCPP antibodies (either polyclonal or monoclonal) to CCPP (or cells containing CCPP) can reduce or eliminate the CCPP activity. In one example, the CCPP activity is reduced by at least 25%. In another example, the CCPP activity is reduced by at least about 50%, such as 95-100%.

[0299] An anti-CCPP antibody can be used to isolate a CCPP of the invention by standard techniques, such as affinity chromatography or immunoprecipitation. An anti-CCPP antibody can facilitate the purification of natural CCPPs from cells and of recombinantly produced CCPPs expressed in host cells. Moreover, an anti-CCPP antibody can be used to detect a CCPP (e.g., in a cellular lysate or cell supernatant on the cell surface) in order to evaluate the abundance and pattern of expression of the CCPP. Anti-CCPP antibodies can be used diagnostically to monitor protein levels in tissue as part of a clinical testing procedure, for example, to determine the efficacy of a given treatment regimen. Detection can be facilitated by coupling (e.g., physically linking) the antibody to a detectable substance. Examples of detectable substances include various enzymes, prosthetic groups, fluorescent materials, luminescent materials, bioluminescent materials, and radioactive materials. Examples of suitable enzymes include horseradish peroxidase, alkaline phosphatase, galactosidase, or acetylcholinesterase; examples of suitable prosthetic group complexes include streptavidin/biotin and avidin/biotin; examples of suitable fluorescent materials include umbelliferone, fluorescein, fluorescein isothiocyanate, rhodamine, dichlorotriazinylamine fluorescein, dansyl chloride or phycoerythrin; an example of a luminescent material includes luminol; examples of bioluminescent materials include luciferase, luciferin, and aequorin, and examples of suitable radioactive material include ¹²⁵I, ¹³¹I, ³⁵S or ³H.

[0300] Anti-CCPP antibodies of the invention are also useful for targeting a therapeutic to a cell or tissue comprising the antigen of the anti-CCPP antibody. For example, a therapeutic such as a small molecule can be linked to the anti-CCPP antibody in order to target the therapeutic to the cell or tissue comprising the CCPP antigen. The method is particularly useful in connection with CCPPs which are surface markers.

[0301] A therapeutic agent may be coupled (e.g., covalently bonded) to a suitable monoclonal antibody either directly or indirectly (e.g., via a linker group). A direct reaction between an agent and an antibody is possible when each possesses a substituent capable of reacting with the other. For example, a nucleophilic group, such as an amino or sulfhydryl group, on one may be capable of reacting with a carbonyl-containing group, such as an anhydride or an acid halide, or with an alkyl group containing a good leaving group (e.g., a halide) on the other.

[0302] Alternatively, it may be desirable to couple a therapeutic agent and an antibody via a linker group. A linker group can function as a spacer to distance an antibody from an agent in order to avoid interference with binding capabilities. A linker group can also serve to increase the chemical reactivity of a substituent on an agent or an antibody, and thus increase the coupling efficiency. An increase in chemical reactivity may also facilitate the use of agents, or functional groups on agents, which otherwise would not be possible.

[0303] It will be evident to those skilled in the art that a variety of bifunctional or polyfunctional reagents, both homo- and hetero-functional, may be employed as the linker group. Coupling may be effected, for example, through amino groups, carboxyl groups, sulflhydryl groups or oxidized carbohydrate residues. There are numerous references describing such methodology, e.g., U.S. Pat. No. 4,671,958, to Rodwell et al.

[0304] Where a therapeutic agent is more potent when free from the antibody portion of the immunoconjugates of the present invention, it may be desirable to use a linker group which is cleavable during or upon internalization into a cell. A number of different cleavable linker groups have been described. The mechanisms for the intracellular release of an agent from these linker groups include cleavage by reduction of a disulfide bond (e.g., U.S. Pat. No. 4,489,710, to Spitler), by irradiation of a photolabile bond (e.g., U.S. Pat. No. 4,625,014, to Senter et al.), by hydrolysis of derivatized amino acid side chains (e.g., U.S. Pat. No. 4,638,045, to Kohn et al.), by serum complement-mediated hydrolysis (e.g., U.S. Pat. No. 4,671,958, to Rodwell et al.), and acid-catalyzed hydrolysis (e.g., U.S. Pat. No. 4,569,789, to Blattler et al.).

[0305] It may be desirable to couple more than one agent to an antibody. In one embodiment, multiple molecules of an agent are coupled to one antibody molecule. In another embodiment, more than one type of agent may be coupled to one antibody. Regardless of the particular embodiment, immunoconjugates with more than one agent may be prepared in a variety of ways. For example, more than one agent may be coupled directly to an antibody molecule, or linkers that provide multiple sites for attachment can be used.

[0306] In a specific embodiment, antibodies to a CCPP may be used to eliminate the CCPP-containing cell population in vivo by activating the complement system, by mediating antibody-dependent cellular cytotoxicity (ADCC), or by causing uptake of the antibody coated cells by the receptor-mediated endocytosis (RE) system.

[0307] CCPP-Specific Cytotoxic lymphocytes (T Cells)

[0308] Another aspect of the invention pertains to immunotherapeutic compositions comprising T cells specific for a CCPP. Such cells may generally be prepared in vitro or ex vivo, using standard procedures. T cells may be isolated from bone marrow, peripheral blood, or a fraction of bone marrow or peripheral blood of a patient, using a commercially available cell separation system, such as the Isolex™ System, available from Nexell Therapeutics, Inc. (Irvine, Calif.). Alternatively, T cells may be derived from related or unrelated humans, non-human mammals, cell lines or cultures.

[0309] T cells may be stimulated with a CCPP or polynucleotide encoding a CCPP or an antigen presenting cell (APC) that expresses a CCPP. Such stimulation is performed under conditions and for a time sufficient to permit the generation of T cells that are specific for the polypeptide. In one example, a CCPP or polynucleotide encoding a CCPP is present within a delivery vehicle, such as a microsphere, to facilitate the generation of specific T cells.

[0310] T cells are considered to be specific for a CCPP if the T cells specifically proliferate, secrete cytokines or kill target cells coated with the polypeptide or expressing a gene encoding the polypeptide. T cell specificity may be evaluated using any of a variety of standard techniques. For example, within a chromium release assay or proliferation assay, a stimulation index of more than two-fold increase in lysis or proliferation, compared to negative controls, indicates T cell specificity. Alternatively, detection of the proliferation of T cells may be accomplished by a variety of known techniques. For example, T cell proliferation can be detected by measuring an increased rate of DNA synthesis (e.g., by pulse-labeling cultures of T cells with tritiated thymidine and measuring the amount of tritiated thymidine incorporated into DNA). Contact with a colon tumor polypeptide (e.g., 100 ng/ml -100 μg/ml, such as 200 ng/ml -25 μg/ml) for 3-7 days should result in at least a two-fold increase in proliferation of the T cells. Contact as described above for 2-3 hours should result in activation of the T cells, as measured using standard cytokine assays in which a two-fold increase in the level of cytokine release (e.g., TNF or IFNγ) is indicative of T cell activation. T cells that have been activated in response to a CCPP, a polynucleotide encoding a CCPP, or a CCPP-expressing APC, may be CD4⁺ or CD8⁺. Colon tumor protein-specific T cells may be expanded using standard techniques. Within certain embodiments, the T cells are derived from a patient, a related donor or an unrelated donor, and are administered to the patient following stimulation and expansion.

[0311] For therapeutic purposes, CD4⁺ or CD8⁺ T cells that proliferate in response to a CCPP, a polynucleotide encoding a CCPP, or an APC can be expanded in number either in vitro or in vivo. Proliferation of such T cells in vitro may be accomplished in a variety of ways. For example, the T cells can be re-exposed to a CCPP, or a short peptide corresponding to an immunogenic portion of such a polypeptide, with or without the addition of T cell growth factors, such as interleukin-2, or stimulator cells that synthesize a CCPP. Alternatively, one or more T cells that proliferate in the presence of a CCPP can be expanded in number by cloning. Methods for cloning cells are well-known in the art, and include limiting dilution.

[0312] Vaccines

[0313] Within certain aspects, CCPP, CCPN, CCPP-specific T cell, CCPP-presenting APC, and CCG-containing vectors including, but not limited to, expression vectors and gene delivery vectors, may be utilized as vaccines for colon cancer. Vaccines may comprise one or more such compounds/cells and an immunostimulant. An immunostimulant may be any substance that enhances or potentiates an immune response (antibody or cell-mediated) to an exogenous antigen. Examples of immunostimulants include adjuvants, biodegradable microspheres (e.g., polylactic galactide) and liposomes (into which the compound is incorporated). Vaccines within the scope of the present invention may also contain other compounds, which may be biologically active or inactive. For example, one or more immunogenic portions of other tumor antigens may be present, either incorporated into a fusion polypeptide or as a separate compound, within the composition of vaccine.

[0314] A vaccine may contain DNA encoding one or more CCPP or portion of CCPP, such that the polypeptide is generated in situ. As noted above, the DNA may be present within any of a variety of delivery systems known to those of ordinary skill in the art, including nucleic acid expression vectors, gene delivery vectors, and bacteria expression systems. Numerous gene delivery techniques are well-known in the art. Appropriate nucleic acid expression systems contain the necessary DNA sequences for expression in the patient (such as a suitable promoter and terminating signal). Bacterial delivery systems involve the administration of a bacterium (such as Bacillus-Calmette-Guerrin) that expresses an immunogenic portion of the polypeptide on its cell surface or secretes such an epitope. In one embodiment, the DNA may be introduced using a viral expression system (e.g., vaccinia or other pox virus, retrovirus, or adenovirus), which may involve the use of a non-pathogenic (defective), replication competent virus. Techniques for incorporating DNA into such expression systems are well-known to those of ordinary skill in the art. The DNA may also be “naked,” as described, for example, in Ulmer et al., (Science, 259:1745-1749, 1993). The uptake of naked DNA may be increased by coating the DNA onto biodegradable beads, which are efficiently transported into the cells. A vaccine may comprise both a polynucleotide and a polypeptide component. Such vaccines may provide for an enhanced immune response.

[0315] A vaccine may contain pharmaceutically acceptable salts of the polynucleotides and polypeptides provided herein. Such salts may be prepared from pharmaceutically acceptable non-toxic bases, including organic bases (e.g., salts of primary, secondary and tertiary amines and basic amino acids) and inorganic bases (e.g., sodium, potassium, lithium, ammonium, calcium and magnesium salts).

[0316] Any of a variety of immunostimulants may be employed in the vaccines of this invention. For example, an adjuvant may be included. Many adjuvants contain a substance designed to protect the antigen from rapid catabolism, such as aluminum hydroxide or mineral oil, and a stimulator of immune responses, such as lipid A, Bortadellci pertussis or Mycobacterium tuberculosis derived proteins. Suitable adjuvants are commercially available as, for example, Freund's Incomplete Adjuvant and Complete Adjuvant (Difco Laboratories, Detroit, Mich.); Merck Adjuvant 65 (Merck and Company, Inc., Rahway, N.J.); AS-2 (SmithKline Beecham, Philadelphia, Pa.); aluminum salts such as aluminum hydroxide gel (alum) or aluminum phosphate; salts of calcium, iron or zinc; an insoluble suspension of acylated tyrosine; acylated sugars; cationically or anionically derivatized polysaccharides; polyphosphazenes; biodegradable micro spheres; monophosphoryl lipid A and quil A. Cytokines, such as GM-CSF or IL-2, IL-7, or IL-12, may also be used as adjuvants.

[0317] Within the vaccines provided herein, the adjuvant composition can be, for example, designed to induce an immune response predominantly of the Th1 type or Th2-type. High levels of Th1-type cytokines (e.g., IFNγ, TNFα, IL-2 and IL-12) tend to favor the induction of cell mediated immune responses to an administered antigen. High levels of Th2-type cytokines (e.g., IL-4, IL-5, IL-6 and IL-10) tend to favor the induction of humoral immune responses. Following application of a vaccine as provided herein, a patient will support an immune response that includes Th1- or Th2-type responses. In one embodiment, a response is predominantly Th1-type, and the level of Th1-type cytokines increase to a greater extent than the level of Th2-type cytokines. The levels of these cytokines can be readily assessed using standard assays.

[0318] Adjuvants for use in eliciting a predominantly Th1-type response include, but are not limited to, a combination of monophosphoryl lipid A (e.g., 3-de-O-acylated monophosphoryl lipid A (3D-MPL)) together with an aluminum salt. MPL adjuvants are available from Corixa Corporation (Seattle, Wash.). CpG-containing oligonucleotides (in which the CpG dinucleotide is unmethylated) also induce a predominantly Th1 response. Such oligonucleotides are well-known. Immunostimulatory DNA sequences are also described, for example, by Sato et al., Science, 273:352, 1996. Another suitable adjuvant is a saponin, such as QS21 (Aquila Biopharmaceuticals Inc., Framingham, Mass.), which may be used alone or in combination with other adjuvants. For example, an enhanced system involves the combination of a monophosphoryl lipid A and saponin derivative, such as the combination of QS21 and 3D-MPL as described in WO94/00153, or a less reactogenic composition where the QS21 is quenched with cholesterol, as described in WO96/33739. In another example, the formulation of the present invention includes an oil-in-water emulsion and tocopherol. A particularly potent adjuvant formulation involving QS21, 3D-MPL and tocopherol in an oil-in-water emulsion is described in WO 95/17210.

[0319] Other suitable adjuvants include, but are not limited to, Montanide ISA 720 (Seppic, France), SAF (Chiron, Calif.), ISCOMS (CSL), MF-59 (Chiron, Calif.), the SBAS series of adjuvants (e.g., SBAS-2 or SBAS-4, available from SmithKline Beecham, Rixensart, Belgium), Detox (Ribi ImmunoChem Research Inc., Hamilton, Mont.), RC-529 (Ribi ImmunoChem Research Inc., Hamilton, Mont.) and Aminoalkyl glucosaminide 4-phosphates (AGPs).

[0320] Any vaccine provided herein may be prepared using well-known methods that result in a combination of antigen, immune response enhancer and a suitable carrier or excipient. The compositions described herein may be administered as part of a sustained release formulation (e.g., a formulation such as a capsule, sponge or gel (composed of polysaccharides, for example) that effects a slow release of compound following administration). Such formulations may generally be prepared using well-known technology and administered by, for example, oral, rectal or subcutaneous implantation, or by implantation at the desired target site. Sustained-release formulations may contain a polypeptide, polynucleotide or antibody dispersed in a carrier matrix or contained within a reservoir surrounded by a rate controlling membrane.

[0321] Carriers for use within such formulations are biocompatible, and may also be biodegradable. In one example, the formulation provides a relatively constant level of active component release. Such carriers include microparticles of poly (lactide-co-glycolide), as well as polyacrylate, latex, starch, cellulose and dextran. Other delayed-release carriers include supramolecular biovectors, which comprise a non-liquid hydrophilic core (e.g., a cross-linked polysaccharide or oligosaccharide) and, optionally, an external layer comprising an amphiphilic compound, such as a phospholipid (see e.g., U.S. Pat. No. 5,151,254). The amount of active compound contained within a sustained release formulation depends upon the site of implantation, the rate and expected duration of release and the nature of the condition to be treated or prevented.

[0322] Any of a variety of delivery vehicles may be employed within vaccines to facilitate production of an antigen-specific immune response that targets cancer cells. Delivery vehicles include antigen presenting cells (APCs), such as dendritic cells, macrophages, B cells, monocytes and other cells that may be engineered to be efficient APCs. Such cells may, but need not, be genetically modified to increase the capacity for presenting the antigen, to improve activation or maintenance of the T cell response, to have anti-tumor effects per se or to be immunologically compatible with the receiver (e.g., matched HLA haplotype). APCs may generally be isolated from any of a variety of biological fluids and organs, including tumor and peritumoral tissues, and may be autologous, allogeneic, syngeneic or xenogeneic cells.

[0323] Certain embodiments of the present invention use dendritic cells or progenitors thereof as APCs. Dendritic cells are highly potent APCs and have been shown to be effective as a physiological adjuvant for eliciting prophylactic or therapeutic antitumor immunity. Dendritic cells can be identified based on their typical shape (stellate in situ, with marked cytoplasmic processes (dendrites) visible in vitro), their ability to take up, process and present antigens with high efficiency and their ability to activate naive T cell responses. Dendritic cells may, of course, be engineered to express specific cell-surface receptors or ligands that are not commonly found on dendritic cells in vivo, and such modified dendritic cells are contemplated by the present invention. As an alternative to dendritic cells, secreted vesicles antigen-loaded dendritic cells (called exosomes) may be used within a vaccine (see Zitvogel et al., Nature Med., 4:594-600, 1998).

[0324] Dendritic cells and progenitors may be obtained from peripheral blood, bone marrow, tumor-infiltrating cells, peritumoral tissues-infiltrating cells, lymph nodes, spleen, skin, umbilical cord blood or any other suitable tissue or fluid. For example, dendritic cells may be differentiated ex vivo by adding a combination of cytokines such as GM-CSF, IL-4, IL-13 or TNFα to cultures of monocytes harvested from peripheral blood. Alternatively, CD34 positive cells harvested from peripheral blood, umbilical cord blood or bone marrow may be differentiated into dendritic cells by adding to the culture medium combinations of GM-CSF, IL-3, TNFα, CD40 ligand, LPS, flt3 ligand or other compound(s) that induce differentiation, maturation and proliferation of dendritic cells.

[0325] Dendritic cells are conveniently categorized as “immature” and “mature” cells. This categorization provides a simple way to discriminate between two well-characterized phenotypes. However, this nomenclature should not be construed to exclude all possible intermediate stages of differentiation. Immature dendritic cells are characterized as APC with a high capacity for antigen uptake and processing, which correlates with the high expression of Fcy receptor and mannose receptor. The mature phenotype is typically characterized by a lower expression of these markers, but a high expression of cell surface molecules responsible for T cell activation such as class I and class II MHC, adhesion molecules (e.g., CD54 and CD11) and costimulatory molecules (e.g., CD40, CD80, CD86 and 4-1BB).

[0326] APCs can be transfected with a polynucleotide encoding a CCPP (or portion or other variant thereof) such that the CCPP, or an immunogenic portion thereof, is expressed on the cell surface. Such transfection may take place ex vivo, and a composition or vaccine comprising such transfected cells may then be used for therapeutic purposes, as described herein. Alternatively, a gene delivery vehicle that targets a dendritic or other antigen presenting cell may be administered to a patient, resulting in transfection that occurs in vivo. In vivo and ex vivo transfection of dendritic cells, for example, can be performed using any suitable methods known in the art, such as those described in WO97/24447, or the gene gun approach described by Mahvi et al., Immunology and Cell Biology, 75:456-460, 1997. Antigen loading of dendritic cells may be achieved by incubating dendritic cells or progenitor cells with the CCPPs, DNA or RNA; or with antigen-expressing recombinant bacterium or viruses (e.g., vaccinia, fowlpox, adenovirus or lentivirus vectors). Prior to loading, the polypeptide may be covalently conjugated to an immunological partner that provides T cell help (e.g., a carrier molecule). Alternatively, a dendritic cell may be pulsed with a non-conjugated immunological partner, separately or in the presence of the polypeptide.

[0327] Vaccines may be presented in unit-dose or multi-dose containers, such as sealed ampoules or vials. Such containers can be, for example, hermetically sealed to preserve sterility of the formulation until use. Formulations can be stored as suspensions, solutions, or emulsions in oily or aqueous vehicles. Alternatively, a vaccine may be stored in a freeze-dried condition requiring only the addition of a sterile liquid carrier immediately prior to use.

[0328] Vectors

[0329] Another aspect of the invention pertains to vectors containing polynucleotides encoding CCPPs or portions thereof. Vectors can be plasmids or viral vectors.

[0330] The expression vectors of the invention can be designed for expression of CCPPs in prokaryotic or eukaryotic cells. For example, CCPPs can be expressed in bacterial cells such as E. coli, insect cells (using baculovirus expression vectors), yeast cells, or mammalian cells. In certain embodiments, such protein may be used, for example, as a therapeutic protein of the invention. Alternatively, the expression vector can be transcribed and translated in vitro, for example using T7 promoter regulatory sequences and T7 polymerase.

[0331] In another embodiment, mammalian expression vector including tissue-specific regulatory elements are used to express the polynucleotides of interest. Tissue-specific regulatory elements are known in the art and may include epithelial cell-specific promoters. Other non-limiting examples of suitable tissue-specific promoters include the liver-specific albumin promoter, lymphoid-specific promoters, promoters of T cell receptors and immunoglobulins, neuron-specific promoters (e.g., the neurofilament promoter), pancreas-specific promoters, and mammary gland-specific promoters (e.g., milk whey promoter). Developmentally-regulated promoters are also encompassed, for example the α-fetoprotein promoter.

[0332] The CCGs identified in the present invention can be used for therapeutical purposes. For example, antisense constructs of the CCGs can be delivered therapeutically to cancer cells. The goal of such therapy is to retard the growth rate of the cancer cells. Expression of the sense molecules and their translation products or expression of the antisense mRNA molecules has the effect of inhibiting the growth rate of cancer cells or inducing apoptosis (a radical reduction in the growth rate of a cell).

[0333] The invention also provides a recombinant expression vector comprising a polynucleotide encoding a CCPP cloned into the expression vector in an antisense orientation. That is, the DNA molecule is operatively linked to a regulatory sequence in a manner which allows for expression (by transcription of the DNA molecule) of an RNA molecule which is antisense to mRNA corresponding to a CCG of the invention. Regulatory sequences operatively linked to a polynucleotide cloned in the antisense orientation can be chosen to direct the continuous expression of the antisense RNA molecule in a variety of cell types. For instance viral promoters or enhancers, or regulatory sequences can be chosen to direct constitutive, tissue specific or cell type specific expression of antisense RNA. The antisense expression vector can be in the form of a recombinant plasmid, phagemid or attenuated virus in which antisense polynucleotides are produced under the control of a high efficiency regulatory region. The activity of the promoter/enhancer can be determined by the cell type into which the vector is introduced.

[0334] The invention further provides gene delivery vehicles for delivery of polynucleotides to cells, tissues, or a mammal for expression. For example, a polynucleotide sequence of the invention can be administered either locally or systemically in a gene delivery vehicle. These constructs can utilize viral or non-viral vector approaches in in vivo or ex vivo modality. Expression of such coding sequence can be induced using endogenous mammalian or heterologous promoters. Expression of the coding sequence in vivo can be either constituted or regulated. The invention includes gene delivery vehicles capable of expressing the contemplated polynucleotides. The gene delivery vehicle can be, for example, a viral vector, such as a retroviral, lentiviral, adenoviral, adeno-associated viral (AAV), herpes viral, or alphavirus vector. The viral vector can also be an astrovirus, coronavirus, orthomyxovirus, papovavirus, paramyxovirus, parvovirus, picornavirus, poxvirus, or togavirus viral vector.

[0335] Delivery of the gene therapy constructs of this invention into cells is not limited to the above mentioned viral vectors. Other delivery methods and media may be employed such as, for example, nucleic acid expression vectors, polycationic condensed DNA linked or unlinked to killed adenovirus alone, ligand linked DNA, liposome DNA complex, eukaryotic cell delivery vehicles cells, deposition of photopolymerized hydrogel materials, handheld gene transfer particle gun, ionizing radiation, nucleic charge neutralization or fusion with cell membranes. Particle mediated gene transfer may be employed. Briefly, the sequence can be inserted into conventional vectors that contain conventional control sequences for high level expression, and then be incubated with synthetic gene transfer molecules such as polymeric DNA-binding cations like polylysine, protamine, and albumin, linked to cell targeting ligands such as asialoorosomucoid, insulin, galactose, lactose or transferrin. Naked DNA may also be employed. Uptake efficiency may be improved using biodegradable latex beads. DNA coated latex beads are efficiently transported into cells after endocytosis initiation by the beads. The method may be improved further by treatment of the beads to increase hydrophobicity and thereby facilitate disruption of the endosome and release of the DNA into the cytoplasm.

[0336] Another aspect of the invention pertains to the expression of CCGs using a regulatable expression system. These systems include, but are not limited to, the Tet-on/off system, the Ecdysone system, the Progesterone-system, and the Rapamycin-system.

[0337] Another aspect of the invention pertains to the use of host cells which are transformed, transfected, or transduced with vectors encoding or comprising CCGs or portions thereof. The host cells can be prokaryotic or eukaryotic cells. These host cells can be employed to express any desired CCPP.

[0338] Transgenic and Knockout Animals

[0339] The host cells of the invention can also be used to produce non-human transgenic animals. For example, in one embodiment, a host cell of the invention is a fertilized oocyte or an embryonic stem cell into which CCPP-coding sequences have been introduced. Such host cells can then be used to create non-human transgenic animals in which exogenous sequences encoding a CCPP of the invention have been introduced into their genome or homologous recombinant animals in which endogenous sequences encoding the CCPP of the invention have been altered. Such animals are useful for studying the function or activity of a CCPP and for identifying or evaluating modulators of CCPP activity. A “transgenic animal” is a non-human animal, such as a rodent (e.g., a rat or mouse), in which one or more of the cells of the animal includes a transgene. Other examples of transgenic animals include non-human primates, sheep, dogs, cows, goats, chickens, amphibians, and the like. A transgene is exogenous DNA which is integrated into the genome of a cell from which a transgenic animal develops and which remains in the genome of the mature animal, thereby directing the expression of an encoded gene product in one or more cell types or tissues of the transgenic animal. As used herein, a “homologous recombinant animal” is a non-human animal, such a mammal (e.g., a mouse), in which an endogenous CCG of the invention (e.g., listed in Tables 1-5) has been altered by homologous recombination between the endogenous gene and an exogenous DNA molecule introduced into a cell of the animal, e.g., an embryonic cell of the animal, prior to development of the animal.

[0340] A transgenic animal of the invention can be created by introducing a CCPP-encoding polynucleotide into the mate pronuclei of a fertilized oocyte, e.g., by microinjection or retroviral infection, and allowing the oocyte to develop in a pseudopregnant female foster animal. Intronic sequences and polyadenylation signals can also be included in the transgene to increase the efficiency of expression of the transgene. A tissue-specific regulatory sequence(s) can be operably linked to a transgene to direct expression of a CCPP to particular cells. Methods for generating transgenic animals via embryo manipulation and microinjection, particularly animals such as mice, have become conventional in the art. Similar methods are used for production of other transgenic animals. A transgenic founder animal can be identified based upon the presence of a transgene of the invention in its genome or expression of mRNA corresponding to a gene of the invention in tissues or cells of the animals. A transgenic founder animal can then be used to breed additional animals carrying the transgene. Moreover, transgenic animals carrying a transgene encoding a CCPP can further be bred to other transgenic animals carrying other transgenes.

[0341] To create a homologous recombinant animal (knockout animal), a vector is prepared which contains at least a portion of a gene of the invention into which a deletion, addition or substitution has been introduced to thereby alter, e.g., functionally disrupt, the gene. The gene can be a human gene, or a non-human homolog thereof (e.g., a homolog of a CCG listed in Tables 1-5). For example, a mouse gene can be used to construct a homologous recombination polynucleotide molecule, e.g., a vector, suitable for altering an endogenous gene of the invention in the mouse genome. In one embodiment, the homologous recombination polynucleotide molecule is designed such that, upon homologous recombination, the endogenous gene of the invention is functionally disrupted (e.g., no longer encodes a functional protein; also referred to as a “knockout” vector). Alternatively, the homologous recombination polynucleotide molecule can be designed such that, upon homologous recombination, the endogenous gene is mutated or otherwise altered but still encodes functional protein (e.g., the upstream regulatory region can be altered to thereby alter the expression of the endogenous CCPP). In the homologous recombination polynucleotide molecule, the altered portion of the gene of the invention is flanked at its 5′ and 3′ ends by additional polynucleotide sequence of the gene of the invention to allow for homologous recombination to occur between the exogenous gene carried by the homologous recombination polynucleotide molecule and an endogenous gene in a cell, e.g., an embryonic stem cell. The additional flanking polynucleotide sequence is of sufficient length for successful homologous recombination with the endogenous gene.

[0342] Typically, several kilobases of flanking DNA (both at the 5′ and 3′ ends) are included in the homologous recombination polynucleotide molecule. The homologous recombination polynucleotide molecule is introduced into a cell, e.g., an embryonic stem cell line (e.g., by electroporation) and cells in which the introduced gene has homologously recombined with the endogenous gene are selected. The selected cells can then be injected into a blastocyst of an animal (e.g., a mouse) to form aggregation chimeras. A chimeric embryo can then be implanted into a suitable pseudopregnant female foster animal and the embryo brought to term. Progeny harboring the homologously recombined DNA in their germ cells can be used to breed animals in which all cells of the animal contain the homologously recombined DNA by germline transmission of the transgene. Methods for constructing homologous recombination polynucleotide molecules are well-known in the art.

[0343] In another embodiment, transgenic non-human animals can be produced which contain selected systems which allow for regulated expression of the transgene. One example of such a system is the cre/loxP recombinase system of bacteriophage P1. For a description of the cre/loxP recombinase system, see, e.g., Laksa et al., Proc. Natl. Acad. Sci., USA, 89:6232-6236, 1992. Another example of a recombinase system is the FLP recombinase system of Saccharomyces cerevisiae (O'Gorman et al., Science, 251:1351-1355, 1991). If a cre/loxP recombinase system is used to regulate expression of the transgene, animals containing transgenes encoding both the Cre recombinase and a selected protein are required. Such animals can be provided through the construction of “double” transgenic animals, e.g., by mating two transgenic animals, one containing a transgene encoding a selected protein and the other containing a transgene encoding a recombinase.

[0344] Clones of the non-human transgenic animals described herein can also be produced according to the methods described in Wilmut, I. et al., Nature, 385:810-813, 1997, and PCT International Publication Nos. WO97/07668 and WO97/07669. In brief, a cell, e.g., a somatic cell, from the transgenic animal can be isolated and induced to exit the growth cycle and enter G₀ phase. The quiescent cell can then be fused, e.g., through the use of electrical pulses, to an enucleated oocyte from an animal of the same species from which the quiescent cell is isolated. The reconstructed oocyte is then cultured such that it develops to morula or blastocyte and then transferred to pseudopregnant female foster animal. The offspring borne of this female foster animal will be a clone of the animal from which the cell, e.g., the somatic cell, is isolated.

[0345] In certain embodiments of the invention, the non-human transgenic animals comprise a CCG, such as, for example, STK15. In some other embodiments, the non-human “knock-out” transgenic animal is a STK15 knock-out.

[0346] Detection Methods

[0347] As discussed earlier, expression level of CCGs may be used as a marker for colon cancer. Detection and measurement of the relative amount of a CCG product (polynucleotide or polypeptide) of the invention can be carried out by any method known in the art.

[0348] Typical methodologies for detection of a transcribed polynucleotide include RNA extraction from a cell or tissue sample, followed by hybridization of a labeled probe (e.g., a complementary polynucleotide molecule) specific for the target RNA to the extracted RNA and detection of the probe (e.g., Northern blotting).

[0349] Typical methodologies for peptide detection include protein extraction from a cell or tissue sample, followed by binding of an antibody specific for the target protein to the protein sample, and detection of the antibody. For example, detection of STK15 may be accomplished using polyclonal anti-STK15 antibody. Antibodies can be detected by the use of a labeled secondary antibody. The label can be a radioisotope, a fluorescent compound, an enzyme, an enzyme co-factor, or ligand. Such methods are well understood in the art.

[0350] In certain embodiments, the CCGs themselves may serve as markers for colon cancer. For example, an increase of genomic copies of a CCG, such as by duplication of the gene, may also be correlated with colon cancer.

[0351] Detection of specific polynucleotide molecules may also be assessed by gel electrophoresis, column chromatography, or direct sequencing, quantitative PCR (in the case of polynucleotide molecules), RT-PCR, or nested-PCR among many other techniques well-known to those skilled in the art.

[0352] Detection of the presence or number of copies of all or a part of a CCG of the invention may be performed using any method known in the art. Typically, it is convenient to assess the presence or quantity of a DNA or cDNA by Southern analysis, in which total DNA from a cell or tissue sample is extracted, is hybridized with a labeled probe (e.g., a complementary DNA molecules), and the probe is detected. The label group can be a radioisotope, a fluorescent compound, an enzyme, or an enzyme co-factor. Other useful methods of DNA detection or quantification include direct sequencing, gel electrophoresis, column chromatography, and quantitative PCR, as is known by one skilled in the art.

[0353] In certain embodiments, the CCPPs may serve as markers for colon cancer. Detection of specific polypeptide molecules may be assessed by gel electrophoresis, Western blot, column chromatography, or direct sequencing, among many other techniques well-known to those skilled in the art.

[0354] Panels of CCGs

[0355] Expression level of each CCG may be considered individually, although it is within the scope of the invention to provide combinations of two or more CCGs for use in the methods and compositions of the invention to increase the confidence of the analysis In another aspect, the invention provides panels of the CCGs of the invention. A panel of CCGs comprises two or more CCGs. A panel may also comprise 2-5, 5-15, 15-35, 35-50, or more than 50 CCGs. In one embodiment, these panels of CCGs are selected such that the CCGs within any one panel share certain features. For example, the CCGs of a first panel may be protein kinases that exhibit at least a two-fold increase in quantity or activity in a colon cancer sample, as compared to a sample which is substantially free of colon cancer from the same subject or a sample which is substantially free of colon cancer from a different subject without colon cancer. Alternatively, CCGs of a second panel may each exhibit differential regulation as compared to a first panel. Similarly, different panels of CCGs may be composed of CCGs representing different stages of colon cancer. Panels of the CCGs of the invention may be made by independently selecting CCGs from Tables 1-5, and may further be provided on biochips, as discussed below.

[0356] Screening Methods

[0357] The invention also provides methods (also referred to herein as “screening assays”) for identifying modulators, e.g., candidate or test compounds or agents comprising therapeutic moieties (e.g., peptides, peptidomimetics, peptoids, polynucleotides, small molecules or other drugs) which (a) bind to a CCPP, or (b) have a modulatory (e.g., stimulatory or inhibitory) effect on the activity of a CCPP or, more specifically, (c) have a modulatory effect on the interactions of the CCPP with one or more of its natural substrates, or (d) have a modulatory effect on the expression of the CCPPs. Such assays typically comprise a reaction between the CCPP and one or more assay components. The other components may be either the test compound itself, or a combination of the test compound and a binding partner of the CCPP.

[0358] The test compounds of the present invention can be, for instance, small molecules or biomolecules. Small molecules include, but are not limited to, inorganic molecules and small organic molecules. Biomolecules include, but are not limited to, naturally-occurring and synthetic compounds that have a bioactivity in mammals, such as polypeptides, polysaccharides, and polynucleotides. In one embodiment the test compound is a small molecule. In another embodiment, the test compound is a biomolecule. One skilled in the art will appreciate that the nature of the test compound may vary depending on the nature of the protein encoded by the CCG of the invention. For example, if the CCG encodes an orphan receptor having an unknown ligand, the test compound may be any of a number of biomolecules which may act as cognate ligand, including but not limited to, cytokines, lipid-derived mediators, small biogenic amines, hormones, neuropeptides, or proteases.

[0359] The test compounds of the present invention may be obtained from any available source, including systematic libraries of natural or synthetic compounds. Test compounds may also be obtained by any of the numerous approaches in combinatorial library methods known in the art, including: biological libraries; peptoid libraries (libraries of molecules having the functionalities of peptides, but with a novel, non-peptide backbone which are resistant to enzymatic degradation but which nevertheless remain bioactive; see, e.g., Zuckermann et al., J. Med. Chem., 37:2678-85, 1994); spatially addressable parallel solid phase or solution phase libraries; synthetic library methods requiring deconvolution; the ‘one-bead one-compound’ library method; and synthetic library methods using affinity chromatography selection. The biological library and peptoid library approaches are limited to peptide libraries, while the other four approaches are applicable to peptide, non-peptide oligomer or small molecule libraries of compounds (Lam, Anticancer Drug Des., 12:145, 1997).

[0360] Screening for Inhibitors of CCPP

[0361] The invention provides methods of screening test compounds for inhibitors of CCPP, and to the pharmaceutical compositions comprising the test compounds. The method of screening comprises obtaining samples from subjects diagnosed with or suspected of having colon cancer, contacting each separate aliquot of the samples with one of a plurality of test compounds, and comparing expression of one or more CCGs in each of the aliquots to determine whether any of the test compounds provides a substantially decreased level of expression or activity of a CCG relative to samples with other test compounds or relative to an untreated sample or control sample. In addition, methods of screening may be devised by combining a test compound with a protein and thereby determining the effect of the test compound on the protein.

[0362] In addition, the invention is further directed to a method of screening for test compounds capable of modulating with the binding of a CCPP and a binding partner, by combining the test compound, CCPP, and binding partner together and determining whether binding of the binding partner and CCPP occurs. The test compound may be either small molecules or a biomolecule. As discussed below, test compounds may be provided from a variety of libraries well-known in the art.

[0363] Modulators of a CCG expression, activity or binding ability are useful as therapeutic compositions of the invention. Such modulators (e.g., antagonists or agonists) may be formulated as pharmaceutical compositions, as described herein below. Such modulators may also be used in the methods of the invention, for example, to diagnose, treat, or prognose colon cancer.

[0364] High-Throughput Screening Assays

[0365] The invention provides methods of conducting high-throughput screening for test compounds capable of inhibiting activity or expression of a CCPP of the present invention. In one embodiment, the method of high-throughput screening involves combining test compounds and the CCPP and detecting the effect of the test compound on the CCPP.

[0366] A variety of high-throughput functional assays well-known in the art may be used in combination to screen or study the reactivity of different types of activating test compounds. Since the coupling system is often difficult to predict, a number of assays may need to be configured to detect a wide range of coupling mechanisms. A variety of fluorescence-based techniques are well-known in the art and are capable of high-throughput and ultra high throughput screening for activity, including but not limited to BRET® or FRET® (both by Packard Instrument Co., Meriden, Conn.). The ability to screen a large volume and a variety of test compounds with great sensitivity permits for analysis of the therapeutic targets of the invention to further provide potential inhibitors of colon cancer. For example, where the CCG encodes an orphan receptor with an unidentified ligand, high-throughput assays may be utilized to identify the ligand, and to further identify test compounds which prevent binding of the receptor to the ligand. The BIACORE® system may also be manipulated to detect binding of test compounds with individual components of the therapeutic target, to detect binding to either the encoded protein or to the ligand.

[0367] By combining test compounds with CCPPs of the invention and determining the binding activity between such, diagnostic analysis can be performed to elucidate the coupling systems. Generic assays using cytosensor microphysiometer may also be used to measure metabolic activation, while changes in calcium mobilization can be detected by using the fluorescence-based techniques such as FLIPR® (Molecular Devices Corp, Sunnyvale, Calif.). In addition, the presence of apoptotic cells may be determined by TUNEL assay, which utilizes flow cytometry to detect free 3-OH termini resulting from cleavage of genomic DNA during apoptosis. As mentioned above, a variety of functional assays well-known in the art may be used in combination to screen or study the reactivity of different types of activating test compounds. In one example, the high-throughput screening assay of the present invention utilizes label-free plasmon resonance technology as provided by BIACORE® systems (Biacore International AB, Uppsala, Sweden). Plasmon free resonance occurs when surface plasmon waves are excited at a metal/liquid interface. By reflecting directed light from the surface as a result of contact with a sample, the surface plasmon resonance causes a change in the refractive index at the surface layer. The refractive index change for a given change of mass concentration at the surface layer is similar for many bioactive agents (including proteins, peptides, lipids and polynucleotides), and since the BIACORE® sensor surface can be functionalized to bind a variety of these bioactive agents, detection of a wide selection of test compounds can thus be accomplished.

[0368] Therefore, the invention provides for high-throughput screening of test compounds for the ability to inhibit activity of a protein encoded by CCGs, such as those listed in Tables 1-5, by combining the test compounds and the protein in high-throughput assays such as BIACORE®, or in fluorescence-based assays such as BRET®. In addition, high-throughput assays may be utilized to identify specific factors which bind to the encoded proteins, or alternatively, to identify test compounds which prevent binding of the receptor to the binding partner. In the case of orphan receptors, the binding partner may be the natural ligand for the receptor. Moreover, the high-throughput screening assays may be modified to determine whether test compounds can bind to either the encoded protein or to the binding partner (e.g., substrate or ligand) which binds to the protein.

[0369] In a specific embodiment, the high-throughput screening assay detects the ability of a plurality of test compounds to bind to a Group I gene product. In another specific embodiment, the high-throughput screening assay detects the ability of a plurality of a test compound to inhibit a binding partner (such as a ligand) to bind to a Group I gene product. In yet another specific embodiment, the high-throughput screening assay detects the ability of a plurality of a test compounds to modulate signaling through a Group I gene product.

[0370] Predictive Medicine

[0371] The present invention pertains to the field of predictive medicine in which diagnostic assays, prognostic assays, pharmacogenetics and monitoring clinical trials are used for prognostic (predictive) purpose to thereby treat an individual prophylactically. Accordingly, one aspect of the present invention relates to diagnostic assays for determining CCG polynucleotide or polypeptide expression or activity, in the context of a biological sample (e.g., blood, serum, cells, tissue) to thereby determine whether an individual is at risk for developing colon cancer associated with modulated CCG expression or activity. The invention also provides for prognostic (or predictive) assays for determining whether an individual is at risk of developing colon cancer associated with aberrant CCG protein or polynucleotide expression or activity.

[0372] For example, the number of copies of a CCG can be assayed in a biological sample. Such assays can be used for prognostic or predictive purposes to thereby prophylactically treat an individual prior to the onset of colon cancer associated with aberrant CCG protein, polynucleotide expression or activity.

[0373] Another aspect of the invention pertains to monitoring the influence of agents (e.g., drugs, compounds) on the expression or activity of CCGs in clinical trials.

[0374] Diagnostic Assays

[0375] An exemplary method for detecting the presence or absence of a CCPP or polynucleotide encoding a CCPP in a biological sample involves contacting a biological sample with a compound or an agent capable of detecting the CCPP or polynucleotide (e.g., mRNA, genomic DNA) that encodes the CCPP such that the presence of the CCPP or polynucleotide is detected in the biological sample. An example agent for detecting mRNA or genomic DNA corresponding to a CCG or CCPP of the invention is a labeled polynucleotide probe capable of hybridizing to an mRNA or genomic DNA of the invention. In one embodiment, the polynucleotides to be screened are arranged on a GeneChip®. Suitable probes for use in the diagnostic assays of the invention are described herein. An example agent for detecting a CCPP of the invention is an antibody which specifically recognizes the CCPP.

[0376] The diagnostic assays may also be used to quantify the amount of expression or activity of a CCG in a biological sample. Such quantification is useful, for example, to determine the progression or severity of colon cancer. Such quantification is also useful, for example, to determine the severity of colon cancer following treatment.

[0377] Determining Severity of Colon Cancer

[0378] In the field of diagnostic assays, the invention also provides methods for determining the severity of colon cancer by isolating a sample from a subject (e.g., a colon biopsy), detecting the presence, quantity or activity of one or more CCGs of the invention in the sample relative to a second sample from a normal sample or control sample. In one embodiment, the expression levels of CCGs in the two samples are compared, and a modulation in one or more CCGs in the test sample indicates colon cancer. In other embodiments, modulations of 2, 3, 4 or more CCGs indicate a severe case of colon cancer.

[0379] In another aspect, the invention provides CCGs whose quantity or activity is correlated with the severity of colon cancer. The subsequent level of expression may further be compared to different expression profiles of various stages of the cancer to confirm whether the subject has a matching profile. In yet another aspect, the invention provides CCGs whose quantity or activity is correlated with a risk in a subject for developing colon cancer.

[0380] An example agent for detecting CCPP is an antibody capable of binding to CCPP. In one example, the antibody is conjugated with a detectable label. Antibodies can be polyclonal or monoclonal. An intact antibody, or a fragment thereof (e.g., Fab or F(ab′)₂) can be used. The term “labeled,” with regard to the probe or antibody, is intended to encompass direct labeling of the probe or antibody by coupling (e.g., physically linking) a detectable substance to the probe or antibody, as well as indirect labeling of the probe or antibody by reactivity with another reagent that is directly labeled. Examples of indirect labeling include detection of a primary antibody using a fluorescently labeled secondary antibody and end-labeling of a DNA probe with biotin such that it can be detected with fluorescently labeled streptavidin. The term “biological sample” is intended to include tissues, cells and biological fluids isolated from a subject, as well as tissues, cells and fluids present within a subject. That is, the detection method of the invention can be used to detect CCG mRNA, protein or genomic DNA in a biological sample in vitro as well as in vivo. For example, in vitro techniques for detection of CCG mRNA include Northern hybridizations and in situ hybridizations. In vitro techniques for detection of CCPP include enzyme linked immunosorbent assays (ELISAs), Western blots, immunoprecipitations and immunofluorescence. In vitro techniques for detection of CCG genomic DNA include Southern hybridizations. Furthermore, in vivo techniques for detection of CCPP include introducing into a subject a labeled anti-CCPP antibody. For example, the antibody can be labeled with a radioactive marker whose presence and location in a subject can be detected by standard imaging techniques.

[0381] In one embodiment, the biological sample contains protein molecules from the test subject. Alternatively, the biological sample can contain mRNA molecules from the test subject or genomic DNA molecules from the test subject. In one example, the biological sample is a serum sample isolated by conventional means from a subject, e.g., a biopsy or blood draw.

[0382] In another embodiment, the methods further involve obtaining a control biological sample from a subject, contacting the control sample with a compound or agent capable of detecting CCG protein, mRNA, or genomic DNA, such that the presence of CCG protein, mRNA or genomic DNA is detected in the biological sample, and comparing the presence of CCG protein, mRNA or genomic DNA in the control sample with the presence of CCG protein, mRNA or genomic DNA in the test sample.

[0383] Detection of CCPP Specific T Cells

[0384] Colon cancer may also be detected based on the presence of T cells that specifically react with a CCPP in a biological sample. Within certain methods, a biological sample comprising CD4⁺ or CD8⁺ T cells isolated from a patient is incubated with a CCPP, a polynucleotide encoding such a polypeptide or an APC that expresses at least an immunogenic portion of such a polypeptide, and the presence or absence of specific activation of the T cells is detected. Suitable biological samples include, but are not limited to, isolated T cells. For example, T cells may be isolated from a patient by routine techniques (such as by Ficoll/Hypaque density gradient centrifugation of peripheral blood lymphocytes). T cells may be incubated in vitro for 2-9 days (typically 4 days) at 37° C. with polypeptide (e.g., 5-25 μg/ml). It may be desirable to incubate another aliquot of a T cell sample in the absence of colon tumor polypeptide to serve as a control. For CD4⁺ T cells, activation can be detected, for example, by evaluating proliferation of the T cells. For CD8⁺ T cells, activation can be detected, for example, by evaluating cytolytic activity. A level of proliferation that is at least two-fold greater or a level of cytolytic activity that is at least 20% greater than in disease-free patients indicates the presence of colon cancer in the patient.

[0385] Prognostic Assays

[0386] The diagnostic method described herein can furthermore be utilized to identify subjects having or at risk of developing colon cancer associated with aberrant CCG expression or activity.

[0387] The assays described herein, such as the preceding or following assays, can be utilized to identify a subject having colon cancer associated with an aberrant level of CCG activity or expression. Alternatively, the prognostic assays can be utilized to identify a subject at risk for developing colon cancer associated with aberrant levels of CCG protein activity or polynucleotide expression. Thus, the present invention provides a method for identifying colon cancer associated with aberrant CCG expression or activity in which a test sample is obtained from a subject and CCG protein or polynucleotide (e.g., mRNA or genomic DNA) is detected, wherein the presence of CCG protein or polynucleotide is diagnostic or prognostic for a subject having or at risk of developing colon cancer with aberrant CCG expression or activity.

[0388] Furthermore, the prognostic assays described herein can be used to determine whether a subject can be administered an agent (e.g., an agonist, antagonist, peptidomimetic, protein, peptide, polynucleotide, small molecule, or other drug candidate) to treat or prevent colon cancer associated with aberrant CCG expression or activity, such as, for example, a cytokine. For example, such methods can be used to determine whether a subject can be effectively treated with an agent to inhibit colon cancer. Thus, the present invention provides methods for determining whether a subject can be effectively treated with an agent for colon cancer associated with increased CCG expression or activity in which a test sample is obtained and CCG protein or polynucleotide expression or activity is detected (e.g., wherein the abundance of CCG protein or polynucleotide expression or activity is diagnostic for a subject that can be administered the agent to treat injury associated with aberrant CCG expression or activity).

[0389] Prognostic assays can be devised to determine whether a subject undergoing treatment for colon cancer has a poor outlook for long term survival or disease progression. In one embodiment, prognosis can be determined shortly after diagnosis, e.g., within a few days. By establishing expression profiles of different stages of CCGs, from onset to later stages, an expression pattern may emerge to correlate a particular expression profile to increased likelihood of a poor prognosis. The prognosis may then be used to devise a more aggressive treatment program and enhance the likelihood of long-term survival and well-being.

[0390] The methods of the invention can also be used to detect genetic alterations in a CCG, thereby determining if a subject with the altered gene is at risk for damage characterized by aberrant regulation in CCG protein activity or polynucleotide expression. In certain embodiments, the methods include detecting, in a sample of cells from the subject, the presence or absence of a genetic alteration characterized by at least one alteration affecting the integrity of a CCG, or the aberrant expression of the CCG. For example, such genetic alterations can be detected by ascertaining the existence of at least one of the following: 1) deletion of one or more nucleotides from a CCG; 2) addition of one or more nucleotides to a CCG; 3) substitution of one or more nucleotides of a CCG; 4) a chromosomal rearrangement of a CCG; 5) alteration in the level of a messenger RNA transcript of a CCG; 6) aberrant modification of a CCG, such as of the methylation pattern of the genomic DNA; 7) the presence of a non-wild-type splicing pattern of a messenger RNA transcript of a CCG; 8) non-wild-type level of a CCG protein; 9) allelic loss of a CCG; and 10) inappropriate post-translational modification of a CCG protein. As described herein, there are a large number of assays known in the art which can be used for detecting alterations in a CCG. A biological sample can be, without limitation, a blood sample isolated by conventional means from a subject.

[0391] In some other embodiments, detection of the alteration involves the use of a probe/primer in a polymerase chain reaction (PCR), such as anchor PCR or RACE PCR, or, alternatively, in a ligation chain reaction (LCR), the latter of which can be particularly useful for detecting point mutations in the CCG. This method can include the steps of collecting a cell sample of from a subject, isolating a polynucleotide sample (e.g., genomic, mRNA or both) from the cell sample, contacting the polynucleotide sample with one or more primers which specifically hybridize to a CCG under conditions such that hybridization and amplification of the CCG (if present) occur, and detecting the presence or absence of an amplification product, or detecting the size of the amplification product and comparing the length to a control sample. It is understood that PCR or LCR may be desirable to use as a preliminary amplification step in conjunction with any of the techniques used for detecting mutations described herein.

[0392] Alternative amplification methods include: self sustained sequence replication, transcriptional amplification system, Q-Beta Replicase, or any other polynucleotide amplification method, followed by the detection of the amplified molecules using techniques well-known to those of skill in the art. These detection schemes are especially useful for the detection of polynucleotide molecules if such molecules are present in very low numbers.

[0393] In an alternative embodiment, mutations in a CCG from a sample cell can be identified by alterations in restriction enzyme cleavage patterns. For example, sample and control DNA is isolated, amplified (optionally), digested with one or more restriction endonucleases, and fragment length sizes are determined by gel electrophoresis and compared. Differences in fragment length sizes between sample and control DNA indicate mutations in the sample DNA. Moreover, sequence specific ribozymes (see, for example, U.S. Pat. No. 5,498,531) can be used to score for the presence of specific mutations by development or loss of a ribozyme cleavage site.

[0394] In other embodiments, genetic mutations in a CCG can be identified by hybridizing sample and control polynucleotides, e.g., DNA or RNA, to high density arrays containing hundreds or thousands of oligonucleotide probes. For example, genetic mutations in a CCG can be identified in two dimensional arrays containing light generated DNA probes. Briefly, a first hybridization array of probes can be used to scan through long stretches of DNA in a sample and control to identify base changes between the sequences by making linear arrays of sequential overlapping probes. This step allows the identification of point mutations. This step is followed by a second hybridization array that allows the characterization of specific mutations by using smaller, specialized probe arrays complementary to all variants or mutations detected. Each mutation array is composed of parallel probe sets, one complementary to the wild-type gene and the other complementary to the mutant gene.

[0395] In yet another embodiment, any of a variety of sequencing reactions known in the art can be used to directly sequence the CCG and detect mutations by comparing the sequence of the sample CCG with the corresponding wild-type (control) sequence. It is also contemplated that any of a variety of automated sequencing procedures can be utilized when performing the diagnostic assays, including sequencing by mass spectrometry.

[0396] Other methods for detecting mutations in a CCG include methods in which protection from cleavage agents is used to detect mismatched bases in RNA/RNA or RNA/DNA heteroduplexes. The art technique of “mismatch cleavage” typically starts by providing heteroduplexes by hybridizing (labeled) RNA or DNA containing the wild-type CCG sequence with potentially mutant RNA or DNA obtained from a tissue sample. The double-stranded duplexes are treated with an agent which cleaves single-stranded regions of the duplex, which will exist due to base pair mismatches between the control and sample strands. For instance, RNA/DNA duplexes can be treated with RNase and DNA/DNA hybrids treated with S1 nuclease to enzymatically digest the mismatched regions. In other embodiments, either DNA/DNA or RNA/DNA duplexes can be treated with hydroxylamine or osmium tetroxide and with piperidine in order to digest mismatched regions. After digestion of the mismatched regions, the resulting material is then separated by size on denaturing polyacrylamide gels to determine the site of mutation. In one embodiment, the control DNA or RNA can be labeled for detection.

[0397] In still another embodiment, the mismatch cleavage reaction employs one or more proteins that recognize mismatched base pairs in double-stranded DNA (so called “DNA mismatch repair” enzymes) in defined systems for detecting and mapping point mutations in CCG cDNAs obtained from samples of cells. For example, the mutY enzyme of E. coli cleaves A at G/A mismatches and the thymidine DNA glycosylase from HeLa cells cleaves T at G/T mismatches. According to an exemplary embodiment, a probe based on a CCG sequence (e.g., a wild-type CCG sequence) is hybridized to cDNA or other DNA product from a test cell(s). The duplex is treated with a DNA mismatch repair enzyme, and the cleavage products, if any, can be detected from electrophoresis protocols or the like. See, for example, U.S. Pat. No. 5,459,039.

[0398] In other embodiments, alterations in electrophoretic mobility will be used to identify mutations in CCGs. For example, single strand conformation polymorphism (SSCP) may be used to detect differences in electrophoretic mobility between mutant and wild-type polynucleotides. Single-stranded DNA fragments of sample and control CCG polynucleotides will be denatured and allowed to renature. The secondary structure of single-stranded polynucleotides varies according to sequence. The resulting alteration in electrophoretic mobility enables the detection of even a single base change. The DNA fragments may be labeled or detected with labeled probes. The sensitivity of the assay may be enhanced by using RNA (rather than DNA) in which the secondary structure is more sensitive to a change in sequence. In one embodiment, the subject method utilizes heteroduplex analysis to separate double-stranded heteroduplex molecules on the basis of changes in electrophoretic mobility (Keen et al., Trends Genet., 7:5, 1991).

[0399] In yet another embodiment the movement of mutant or wild-type fragments in polyacrylamide gels containing a gradient of denaturant is assayed using denaturing gradient gel electrophoresis (DGGE). When DGGE is used as the method of analysis, DNA will be modified to insure that it does not completely denature, for example by adding a GC clamp of approximately 40 bp of high-melting GC-rich DNA by PCR. In a further embodiment, a temperature gradient is used in place of a denaturing gradient to identify differences in the mobility of control and sample DNA (Rosenbaum and Reissner, Biophys. Chem., 265:12753, 1987).

[0400] Examples of other techniques for detecting point mutations include, but are not limited to, selective oligonucleotide hybridization, selective amplification, or selective primer extension. For example, oligonucleotide primers may be prepared in which the known mutation is placed centrally and then hybridized to target DNA under conditions which permit hybridization only if a perfect match is found (Saiki et al., Proc. Natl. Acad. Sci., USA, 86:6230, 1989). Such allele specific oligonucleotides are hybridized to PCR amplified target or a number of different mutations when the oligonucleotides are attached to the hybridizing membrane and hybridized with labeled target DNA.

[0401] Alternatively, allele specific amplification technology which depends on selective PCR amplification may be used in conjunction with the instant invention. Oligonucleotides used as primers for specific amplification may carry the mutation of interest in the center of the molecule (so that amplification depends on differential hybridization) or at the extreme 3′ end of one primer where, under appropriate conditions, mismatch can prevent or reduce polymerase extension. In addition, it may be desirable to introduce a novel restriction site in the region of the mutation to create cleavage-based detection. It is anticipated that, in certain embodiments, amplification may also be performed using Taq ligase for amplification. In such cases, ligation will occur only if there is a perfect match at the 3′ end of the 5′ sequence making it possible to detect the presence of a known mutation at a specific site by looking for the presence or absence of amplification.

[0402] The methods described herein may be performed, for example, by utilizing prepackaged diagnostic kits comprising at least one probe polynucleotide or antibody reagent described herein, which may be conveniently used, e.g., in clinical settings to diagnose subjects exhibiting symptoms or family history of a disease or illness involving a CCG.

[0403] Furthermore, any cell type or tissue in which a CCG is expressed may be utilized in the prognostic or diagnostic assays described herein.

[0404] Monitoring Drug Effects During Clinical Trials

[0405] Monitoring the influence of agents (e.g., drugs, small molecules and biomolecule) on the expression or activity of a CCG protein can be applied not only in basic, drug screening, but also in clinical trials. For example, the effectiveness of an agent determined by a screening assay, as described herein to decrease CCG expression, protein levels, or down-regulate CCG activity, can be monitored in clinical trials of subjects exhibiting increased CCG expression, protein levels, or up-regulated CCG activity. In such clinical trials, the expression or activity of a CCG can be used as a “read out” of the phenotype of a particular tissue.

[0406] For example, and not by way of limitation, genes, including CCGs, that are modulated in tissues by treatment with an agent that modulates CCPP activity (e.g., identified in a screening assay as described herein) can be identified. Thus, to study the effect of agents on CCPP-associated damage, for example, in a clinical trial, cells can be isolated and RNA prepared and analyzed for the levels of expression of a CCG. The levels of gene expression or a gene expression pattern can be quantified by Northern blot analysis, RT-PCR or GeneChip® as described herein, or alternatively by measuring the amount of protein produced, by one of the methods as described herein, or by measuring the levels of activity of CCPP. In this way, the gene expression pattern can serve as a read-out, indicative of the physiological response of the cells to the agent. Accordingly, this response state may be determined before treatment and at various points during treatment of the individual with the agent.

[0407] In one embodiment, the present invention provides a method for monitoring the effectiveness of treatment of a subject with an agent (e.g., an agonist, antagonist, peptidomimetic, biomolecule, small molecule, or other drug candidate identified by the screening assays described herein) including the steps of (i) obtaining a pre-administration sample from a subject prior to administration of the agent; (ii) detecting the level of expression of a CCG protein or mRNA in the pre-administration sample; (iii) obtaining one or more post-administration samples from the subject; (iv) detecting the level of expression or activity of the CCG protein or mRNA in the post-administration samples; (v) comparing the level of expression or activity of the CCG protein or mRNA in the pre-administration sample with the CCG protein or mRNA the post administration sample or samples; and (vi) altering the administration of the agent to the subject accordingly. For example, decreased administration of the agent may be desirable to decrease expression or activity of CCG to lower levels than detected, e.g., to decrease the effectiveness of the agent. According to such an embodiment, CCG expression or activity may be used as an indicator of the effectiveness of an agent, even in the absence of an observable phenotypic response.

[0408] Methods of Treatment

[0409] The present invention provides for both prophylactic and therapeutic methods of treating a subject at risk for, susceptible to or diagnosed with colon cancer. With regard to both prophylactic and therapeutic methods of treatment, such treatments may be specifically tailored or modified, based on knowledge obtained from the field of pharmacogenomics. “Pharmacogenomics,” as used herein, includes the application of genomics technologies such as gene sequencing, statistical genetics, and gene expression analysis to drugs in clinical development and on the market. More specifically, the term refers the study of how a subject's genes determine his or her response to a drug (e.g., a subject's “drug response phenotype” or “drug response genotype”). Thus, another aspect of the invention provides methods for tailoring an individual's prophylactic or therapeutic treatment with either the CCPP molecules of the present invention or CCPP modulators (e.g., agonists or antagonists) according to that individual's drug response. Pharmacogenomics allows a clinician or physician to target prophylactic or therapeutic treatments to subjects who will benefit from the treatment and to avoid treatment of subjects who will experience toxic drug-related side effects.

[0410] Prophylactic Methods

[0411] In one aspect, the invention provides a method for preventing in a subject colon cancer associated with aberrant CCG expression or activity, by administering to the subject a CCG protein or an agent which modulates CCG protein expression or activity.

[0412] Subjects at risk for colon cancer which is caused or contributed to by aberrant CCG expression or activity can be identified by, for example, any or a combination of diagnostic or prognostic assays as described herein.

[0413] Administration of a prophylactic agent can occur prior to the manifestation of symptoms characteristic of the differential CCG protein expression, such that colon cancer is prevented or, alternatively, delayed in its progression. Depending on the type of CCG aberrancy (e.g., typically a modulation outside the normal standard deviation), a CCG protein, CCG agonist or antagonist agent can be used for treating the subject. The appropriate agent can be determined based on screening assays described herein.

[0414] Therapeutic Methods

[0415] Another aspect of the invention pertains to methods of modulating CCG protein expression or activity for therapeutic purposes. Accordingly, in an exemplary embodiment, the modulatory method of the invention involves contacting a cell with an agent that modulates one or more of the activities of a CCG product activity associated with the cell. An agent that modulates CCG product activity can be an agent as described herein, such as a polynucleotide (e.g., an antisense molecule) or a polypeptide (e.g., a dominant-negative mutant of a CCPP), a naturally-occurring target molecule of a CCPP (e.g., a CCPP substrate), an anti-CCPP antibody, a CCPP modulator (e.g., agonist or antagonist), a peptidomimetic of a CCG protein agonist or antagonist, or other small molecules.

[0416] The invention further provides methods of modulating a level of expression of a CCG of the invention, comprising administration to a subject having colon cancer, a variety of compositions which correspond to the CCGs of the invention (e.g., those listed in Tables 1-5), including proteins or antisense oligonucleotides. The protein may be provided by further providing a vector comprising a polynucleotide encoding the protein to the cells. Alternatively, the expression levels of the CCGs of the invention may be modulated by providing an antibody, a plurality of antibodies or an antibody conjugated to a therapeutic moiety. Treatment with the antibody may further be localized to the tissue comprising colon cancer. In another aspect, the invention provides methods for localizing a therapeutic moiety to colon cancer tissue or cells comprising exposing the tissue or cells to an antibody which is specific to a protein encoded by the CCGs of the invention. This method may therefore provide a means to inhibit expression of a specific gene corresponding to a CCG (such as one selected from Tables 1-5).

[0417] Determining Efficacy of a Test Compound or Therapy

[0418] The invention also provides methods of assessing the efficacy of a test compound or therapy for inhibiting colon cancer in a subject. These methods involve isolating samples from a subject suffering from colon cancer, who is undergoing treatment or therapy, and detecting the presence, quantity, or activity of one or more CCGs of the invention in the first sample relative to a second sample. Where the efficacy of a test compound is determined, the first and second samples can be, for example, sub-portions of a single sample taken from the subject, wherein the first portion is exposed to the test compound and the second portion is not. In one aspect of this embodiment, the CCG is expressed at a substantially decreased level in the first sample, relative to the second. In one example, the level of expression in the first sample approximates (e.g., is less than the standard deviation for normal samples) the level of expression in a third control sample, taken from a control sample of normal tissue. This result suggests that the test compound inhibits the expression of the CCG in the sample. In another aspect of this embodiment, the CCG is expressed at a substantially increased level in the first sample, relative to the second. In one embodiment, the level of expression in the first sample approximates (e.g., is less than the standard deviation for normal samples) the level of expression in a third control sample, taken from a control sample of normal tissue. This result suggests that the test compound augments the expression of the CCG in the sample.

[0419] Where the efficacy of a therapy is being assessed, the first sample obtained from the subject can be obtained, for example, prior to provision of at least a portion of the therapy, whereas the second sample is obtained following provision of the portion of the therapy. The levels of CCGs in the samples can be compared, for instance, against a third control sample, and correlated with the presence, or risk of presence, of colon cancer. In one embodiment, the level of CCGs in the second sample approximates the level of expression of a third control sample. In the present invention, a substantially decreased level of expression of a CCG indicates that the therapy is efficacious for treating colon cancer.

[0420] Pharmacogenomics

[0421] The CCG protein and polynucleotide molecules of the present invention, as well as agents, inhibitors or modulators which have a stimulatory or inhibitory effect on CCG or CCG protein as identified by a screening assay described herein, can be administered to individuals to treat (prophylactically or therapeutically) colon cancer associated with aberrant CCG activity.

[0422] In conjunction with such treatment, pharmacogenomics (e.g., the study of the relationship between an individual's genotype and that individual's response to a foreign compound or drug) may be considered. Differences in metabolism of therapeutics can lead to severe toxicity or therapeutic failure by altering the relation between dose and blood concentration of the pharmacologically active drug. Thus, a physician or clinician may consider applying knowledge obtained in relevant pharmacogenomics studies in determining whether to administer a CCG product (polynucleotide or polypeptide) or CCG modulator as well as tailoring the dosage or therapeutic regimen of treatment with a CCG product or CCG modulator.

[0423] Pharmacogenomics deals with clinically significant hereditary variations in the response to drugs due to altered drug disposition and abnormal action in affected persons. Two types of pharmacogenetic conditions can be differentiated. Genetic conditions transmitted as a single factor altering the way drugs act on the body (altered drug action) or genetic conditions transmitted as single factors altering the way the body acts on drugs (altered drug metabolism). These pharmacogenetic conditions can occur either as rare genetic defects or as naturally-occurring polymorphisms. For example, glucose-6-phosphate dehydrogenase deficiency (G6PD) is a common inherited enzymopathy in which the main clinical complication is haemolysis after ingestion of oxidant drugs (anti-malarials, sulfonamides, analgesics, nitrofurans) and consumption of fava beans.

[0424] One pharmacogenomics approach to identifying genes that predict drug response, known as a “genome-wide association,” relies primarily on a high-resolution map of the human genome consisting of already known gene-related sites (e.g., a “bi-allelic” gene marker map which consists of 60,000-100,000 polymorphic or variable sites on the human genome, each of which has two variants). Such a high-resolution genetic map can be compared to a map of the genome of each of a statistically substantial number of subjects taking part in a Phase II/III drug trial to identify genes associated with a particular observed drug response or side effect. Alternatively, such a high resolution map can be generated from a combination of some ten-million known single nucleotide polymorphisms (SNPs) in the human genome. As used herein, a “SNP” is a common alteration that occurs in a single nucleotide base in a stretch of DNA. For example, a SNP may occur once per every 1000 bases of DNA. A SNP may be involved in a disease process. However, the vast majority of SNPs may not be disease associated. Given a genetic map based on the occurrence of such SNPs, individuals can be grouped into genetic categories depending on a particular pattern of SNPs in their individual genome. In such a manner, treatment regimens can be tailored to groups of genetically similar individuals, taking into account traits that may be common among such genetically similar individuals. Thus, mapping of the CCGs of the invention to SNP maps of colon cancer patients may allow easier identification of these genes according to the genetic methods described herein.

[0425] Alternatively, a method termed the “candidate gene approach,” can be utilized to identify genes that predict drug response. According to this method, if a gene that encodes a drug target is known (e.g., a CCG of the present invention), all common variants of that gene can be fairly easily identified in the population and it can be determined if having one version of the gene versus another is associated with a particular drug response.

[0426] As an illustrative embodiment, the activity of drug metabolizing enzymes is a major determinant of both the intensity and duration of drug action. The discovery of genetic polymorphisms of drug metabolizing enzymes (e.g., N-acetyltransferase 2 (NAT 2) and cytochrome P450 enzymes CYP2D6 and CYPZC19) has provided an explanation as to why some subjects do not obtain the expected drug effects or show exaggerated drug response and serious toxicity after taking the standard and safe dose of a drug. These polymorphisms are expressed in two phenotypes in the population, the extensive metabolizer and poor metabolizer. The prevalence of poor metabolizer phenotypes is different among different populations. For example, the gene coding for CYP2D6 is highly polymorphic and several mutations have been identified in poor metabolizers, which all lead to the absence of functional CYP2D6. Poor metabolizers of CYP2D6 and CYP2C19 quite frequently experience exaggerated drug response and side effects when they receive standard doses. If a metabolite is the active therapeutic moiety, poor metabolizers show no therapeutic response, as demonstrated for the analgesic effect of codeine mediated by its CYP2D6-formed metabolite morphine. The other extreme are the so called ultra-rapid metabolizers who do not respond to standard doses. Recently, the molecular basis of ultra-rapid metabolism has been identified to be due to CYP2D6 gene amplification.

[0427] Alternatively, a method termed the “gene expression profiling” can be utilized to identify genes that predict drug response. For example, the gene expression of an animal dosed with a drug (e.g., CCG expression in response to a CCG modulator of the present invention) can give an indication whether gene pathways related to toxicity have been turned on.

[0428] Information generated from more than one of the above pharmacogenomics approaches can be used to determine appropriate dosage and treatment regimens for prophylactic or therapeutic treatment an individual. This knowledge, when applied to dosing or drug selection, can avoid adverse reactions or therapeutic failure and thus enhance therapeutic or prophylactic efficiency when treating a subject with a CCG product or CCG modulator, such as a modulator identified by one of the exemplary screening assays described herein.

[0429] Pharmaceutical Compositions

[0430] The invention is further directed to pharmaceutical compositions comprising the test compound, or bioactive agent, or a CCG modulator (e.g., agonist or antagonist), which may further include a CCG product, and can be formulated as described herein. Alternatively, these compositions may include an antibody which specifically binds to a CCG protein of the invention or an antisense polynucleotide molecule which is complementary to a CCG polynucleotide of the invention and can be formulated as described herein.

[0431] One or more of the CCGs of the invention, fragments of CCGs, CCG products, fragments of CCG products, CCG modulators, or anti-CCPP antibodies of the invention can be incorporated into pharmaceutical compositions suitable for administration.

[0432] As used herein the language “pharmaceutically acceptable carrier” is intended to include any and all solvents, solubilizers, fillers, stabilizers, binders, absorbents, bases, buffering agents, lubricants, controlled release vehicles, diluents, emulsifying agents, humectants, lubricants, dispersion media, coatings, antibacterial or antifungal agents, isotonic and absorption delaying agents, and the like, compatible with pharmaceutical administration. The use of such media and agents for pharmaceutically active substances is well-known in the art. Except insofar as any conventional media or agent is incompatible with the active compound, use thereof in the compositions is contemplated. Supplementary agents can also be incorporated into the compositions.

[0433] The invention includes methods for preparing pharmaceutical compositions for modulating the expression or activity of a polypeptide or polynucleotide corresponding to a CCG of the invention. Such methods comprise formulating a pharmaceutically acceptable carrier with an agent which modulates expression or activity of a polypeptide or polynucleotide corresponding to a CCG of the invention. Such compositions can further include additional active agents. Thus, the invention further includes methods for preparing a pharmaceutical composition by formulating a pharmaceutically acceptable carrier with an agent which modulates expression or activity of a polypeptide or polynucleotide corresponding to a CCG of the invention and one or more additional bioactive agents.

[0434] A pharmaceutical composition of the invention is formulated to be compatible with its intended route of administration. Examples of routes of administration include parenteral, e.g., intravenous, intradermal, subcutaneous, oral (e.g., inhalation), transdermal (topical), transmucosal, and rectal administration. Solutions or suspensions used for parenteral, intradermal, or subcutaneous application can include the following components: a sterile diluent such as water for injection, saline solution, fixed oils, polyethylene glycols, glycerine; propylene glycol or other synthetic solvents; antibacterial agents such as benzyl alcohol or methyl parabens; antioxidants such as ascorbic acid or sodium bisulfate; chelating agents such as ethylenediaminetetraacetic acid; buffers such as acetates, citrates or phosphates and agents for the adjustment of tonicity such as sodium chloride or dextrose. pH can be adjusted with acids or bases, such as hydrochloric acid or sodium hydroxide. The parenteral preparation can be enclosed in ampoules, disposable syringes or multiple dose vials made of glass or plastic.

[0435] Pharmaceutical compositions suitable for injectable use include sterile aqueous solutions (where water soluble) or dispersions and sterile powders for the extemporaneous preparation of sterile injectable solutions or dispersion. For intravenous administration, suitable carriers include physiological saline, bacteriostatic water, Cremophor EL™ (BASF, Parsippany, N.J.) or phosphate buffered saline (PBS). In all cases, the injectable composition should be sterile and should be fluid to the extent that easy syringability exists. It must be stable under the conditions of manufacture and storage and must be preserved against the contaminating action of microorganisms such as bacteria and fungi. The carrier can be a solvent or dispersion medium containing, for example, water, ethanol, polyol (for example, glycerol, propylene glycol, and liquid polyetheylene glycol, and the like), and suitable mixtures thereof. The proper fluidity can be maintained, for example, by the use of a coating such as lecithin, by the maintenance of the requited particle size in the case of dispersion and by the use of surfactants. Prevention of the action of microorganisms can be achieved by various antibacterial and antifungal agents, for example, parabens, chlorobutanol, phenol, ascorbic acid, thimerosal, and the like. In many cases, isotonic agents, such as sugars, polyalcohols (e.g., manitol or sorbitol), or sodium chloride, can be included in the composition. Prolonged absorption of the injectable compositions can be brought about by including in the composition an agent which delays absorption, for example, aluminum monostearate and gelatin.

[0436] Sterile injectable solutions can be prepared by incorporating the active compound (e.g., a fragment of a CCPP or an anti-CCPP antibody) in the required amount in an appropriate solvent with one or a combination of ingredients enumerated above, as required, followed by filtered sterilization. Dispersions can be prepared by incorporating the active compound into a sterile vehicle which contains a basic dispersion medium and the required other ingredients from those enumerated above. In the case of sterile powders for the preparation of sterile injectable solutions, the methods of preparation can be, for instance, vacuum drying and freeze-drying which yields a powder of the active ingredient plus any additional desired ingredient from a previously sterile-filtered solution thereof.

[0437] Oral compositions can include an inert diluent or an edible carrier. They can be enclosed in gelatin capsules or compressed into tablets. For the purpose of oral therapeutic administration, the active compound can be incorporated with excipients and used in the form of tablets, troches, or capsules. Oral compositions can also be prepared using a fluid carrier for use as a mouthwash, wherein the compound in the fluid carrier is applied orally and swished and expectorated or swallowed. Pharmaceutically compatible binding agents, or adjuvant materials can be included as part of the composition. The tablets, pills, capsules, troches and the like can contain any of the following ingredients, or compounds of a similar nature: a binder such as microcrystalline cellulose, gum tragacanth or gelatin; an excipient such as starch or lactose; a disintegrating agent such as alginic acid, Primogel, or corn starch; a lubricant such as magnesium stearate or Stertes; a glidant such as colloidal silicon dioxide; a sweetening agent such as sucrose or saccharin; or a flavoring agent such as peppermint, methyl salicylate, or orange flavoring.

[0438] For administration by inhalation, the compounds are delivered in the form of an aerosol spray from a pressured container or dispenser which contains a suitable propellant, e.g., a gas such as carbon dioxide, or a nebulizer.

[0439] Systemic administration can also be by transmucosal or transdermal means. For transmucosal or transdermal administration, penetrants appropriate to the barrier to be permeated are used in the formulation. Such penetrants are generally known in the art, and include, for example, for transmucosal administration, detergents, bile salts, and fusidic acid derivatives. Transmucosal administration can be accomplished through the use of nasal sprays or suppositories. For transdermal administraion, the bioactive compounds are formulated into ointments, salves, gels, or creams as generally known in the art.

[0440] The compounds can also be prepared in the form of suppositories (e.g., with conventional suppository bases such as cocoa butter and other glycerides) or retention enemas for rectal delivery.

[0441] In one embodiment, the therapeutic moieties, which may contain a bioactive compound, are prepared with carriers that will protect the compound against rapid elimination from the body, such as a controlled release formulation, including implants and microencapsulated delivery systems. Biodegradable, biocompatible polymers can be used, such as ethylene vinyl acetate, polyanhydrides, polyglycolic acid, collagen, polyorthoesters, and polylactic acid. Methods for preparation of such formulations will be apparent to those skilled in the art. The materials can also be obtained commercially from e.g. Alza Corporation and Nova Pharmaceuticals, Inc. Liposomal suspensions (including liposomes targeted to infected cells with monoclonal antibodies to viral antigens) can also be used as pharmaceutically acceptable carriers.

[0442] It is especially advantageous to formulate oral or parenteral compositions in dosage unit form for ease of administration and uniformity of dosage. Dosage unit form as used herein includes physically discrete units suited as unitary dosages for the subject to be treated; each unit contains a predetermined quantity of active compound calculated to produce the desired therapeutic effect in association with the required pharmaceutical carrier. The specification for the dosage unit forms of the invention are dictated by and directly dependent on the unique characteristics of the active compound and the particular therapeutic effect to be achieved, and the limitations inherent in the art of compounding such an active compound for the treatment of individuals.

[0443] Toxicity and therapeutic efficacy of such compounds can be determined by standard pharmaceutical procedures in cell cultures or experimental animals, e.g., for determining the LD50 (the dose lethal to 50% of the population) and the ED50 (the dose therapeutically effective in 50% of the population). The dose ratio between toxic and therapeutic effects is the therapeutic index and it can be expressed as the ratio LD50/ED50. Compounds which exhibit large therapeutic indices can be selected. While compounds that exhibit toxic side effects may be used, care should be taken to design a delivery system that targets such compounds to the site of affected tissue in order to minimize potential damage to uninfected cells and, thereby, reduce side effects.

[0444] The data obtained from the cell culture assays and animal studies can be used in formulating a range of dosage for use in humans. In one embodiment, the dosage of such compounds lies within a range of circulating concentrations that includes the ED50 with little or no toxicity. The dosage may vary within this range depending upon the dosage form employed and the route of administration utilized. For any compound used in the method of the invention, the therapeutically effective dose can be estimated initially from cell culture assays. A dose may be formulated in animal models to achieve a circulating plasma concentration range that includes the IC50 (i.e., the concentration of the test compound which achieves a half-maximal inhibition of symptoms) as determined in cell culture. Such information can be used to more accurately determine useful doses in humans. Levels in plasma may be measured, for example, by high performance liquid chromatography.

[0445] The CCGs of the invention can be inserted into gene delivery vectors and used as gene therapy vectors. Gene therapy vectors can be delivered to a subject by, for example, intravenous administration, intraportal administration, intrabiliary administration, intra-arterial administration, direct injection into the liver parenchyma, by intramusclular injection, by inhalation, by perfusion, or by stereotactic injection. The pharmaceutical preparation of the gene therapy vector can include the gene therapy vector in an acceptable diluent, or can comprise a slow release matrix in which the gene delivery vehicle is imbedded. Alternatively, where the complete gene delivery vector can be produced intact from recombinant cells, e.g., retroviral vectors, the pharmaceutical preparation can include one or more cells which produce the gene delivery system.

[0446] The pharmaceutical compositions can be included in a container, pack, or dispenser together with instructions for administration.

[0447] Kits

[0448] The invention also encompasses kits for detecting the presence of a CCG product in a biological sample, the kit comprising reagents for assessing expression of the CCGs of the invention. In one embodiment, the reagents include an antibody or fragment thereof, where the antibody or fragment thereof specifically binds with a protein corresponding to a CCG from Tables 1-5. For example, antibodies of interest may be prepared by methods known in the art. Optionally, the kits may comprise a polynucleotide probe wherein the probe specifically binds with a transcribed polynucleotide corresponding to a CCG. The kits may also include an array of CCGs arranged on a biochip, such as, for example, a GeneChip®. The kit may contain means for determining the amount of the CCG protein or mRNA in the sample and means for comparing the amount of the CCG protein or mRNA in the sample with a control or standard. The compound or agent can be packaged in a suitable container. The kit can further comprise instructions for using the kit to detect CCG protein or polynucleotide

[0449] The invention further provides kits for assessing the suitability of each of a plurality of compounds for inhibiting colon cancer in a subject. Such kits include a plurality of compounds to be tested, and a reagent (e.g., antibody specific to corresponding proteins, or a probe or primer specific to corresponding polynucleotides) for assessing expression of a CCG (such as one selected from Tables 1-5).

[0450] Computer Readable Means and Arrays

[0451] Computer readable media comprising CCG information of the present invention is also provided. As used herein, “computer readable media” includes a medium that can be read and accessed directly by a computer. Such media include, but are not limited to: magnetic storage media, such as floppy discs, hard disc storage medium, and magnetic tape; optical storage media such as CD-ROM; electrical storage media such as RAM and ROM; and hybrids of these categories such as magnetic/optical storage media. The skilled artisan will readily appreciate how any of the presently known computer readable mediums can be used to create a manufacture comprising computer readable medium having recorded thereon CCG information of the present invention.

[0452] As used herein, “recorded” includes a process for storing information on computer readable medium. Those skilled in the art can readily adopt any of the presently known methods for recording information on computer readable medium.

[0453] A variety of data processor programs and formats can be used to store the CCG information of the present invention on computer readable medium. For example, the polynucleotide sequence corresponding to the CCGs can be represented in a word processing text file, formatted in commercially-available software such as WordPerfect and Microsoft Word, or represented in the form of an ASCII file, stored in a database application, such as DB2, Sybase, Oracle, or the like. Any number of data processor structuring formats (e.g., text file or database) may be adapted in order to obtain computer readable medium having recorded thereon the CCG information of the present invention.

[0454] By providing the CCG information of the invention in computer readable form, one can routinely access the CCG sequence information for a variety of purposes. For example, one skilled in the art can use the nucleotide or amino acid sequences of the invention in computer readable form to compare a target sequence or target structural motif with the sequence information stored within the data storage means. Search means are used to identify fragments or regions of the sequences of the invention which match a particular target sequence or target motif.

[0455] Arrays and Biochips

[0456] The invention also includes an array comprising a panel of CCGs of the present invention. The array can be used to assay expression of one or more genes in the array.

[0457] It will be appreciated by one skilled in the art that the panels of CCGs of the invention may conveniently be provided on substrates, as a biochip. For example, polynucleotides may be coupled to an array (e.g., a biochip using GeneChip® for hybridization analysis), to a resin (e.g., a resin which can be packed into a column for column chromatography), or a matrix (e.g., a nitrocellulose matrix for northern blot analysis). The immobilization of molecules complementary to the CCG(s), either covalently or noncovalently, permits a discrete analysis of the presence or activity of each CCG in a sample. In an array, for example, polynucleotides complementary to each member of a panel of CCGs may individually be attached to different, known locations on the array. The array may be hybridized with, for example, polynucleotides extracted from a blood or colon sample from a subject. The hybridization of polynucleotides from the sample with the array at any location on the array can be detected, and thus the presence or quantity of the CCG and CCG transcripts in the sample can be ascertained. In one embodiment, an array based on a biochip is employed. Similarly, Western analyses may be performed on immobilized antibodies specific for CCPPs hybridized to a protein sample from a subject.

[0458] It will also be apparent to one skilled in the art that the entire CCG product (protein or polynucleotide) molecule need not be conjugated to the biochip support; a portion of the CCG product or sufficient length for detection purposes (e.g., for hybridization), for example a portion of the CCG product which is 7, 10, 15, 20, 25, 30, 35, 40, 45, 50, 55, 60, 65, 70, 75, 100 or more nucleotides or amino acids in length, may be sufficient for detection purposes.

[0459] In one embodiment, the array can be used to assay gene expression in a tissue to ascertain tissue specificity of genes in the array. In this manner, up to about 12,000 genes can be simultaneously assayed for expression. This allows an expression profile to be developed showing a battery of genes specifically expressed in one or more tissues at a given point in time.

[0460] In addition to such qualitative determination, the invention allows the quantitation of gene expression in the biochip. Thus, not only tissue specificity, but also the level of expression of a battery of CCGs in the tissue is ascertainable. Thus, CCGs can be grouped on the basis of their tissue expression per se and level of expression in that tissue. As used herein, a “normal level of expression” refers to the level of expression of a gene provided in a control sample, typically the control is taken from either a non-diseased animal or from a subject who has not suffered from colon cancer. The determination of normal levels of expression is useful, for example, in ascertaining the relationship of gene expression between or among tissues. Thus, one tissue or cell type can be perturbed and the effect on gene expression in a second tissue or cell type can be determined. In this context, the effect of one cell type on another cell type in response to a biological stimulus can be determined. Such a determination is useful, for example, to know the effect of cell-cell interaction at the level of gene expression. If an agent is administered therapeutically to treat one cell type but has an undesirable effect on another cell type, the invention provides an assay to determine the molecular basis of the undesirable effect and thus provides the opportunity to co-administer a counteracting agent or otherwise treat the undesired effect. Similarly, even within a single cell type, undesirable biological effects can be determined at the molecular level. Thus, the effects of an agent on expression of other than the target gene can be ascertained and counteracted.

[0461] In another embodiment, the arrays can be used to monitor the time course of expression of one or more genes in the array. This can occur in various biological contexts, such as development and differentiation, disease progression and cellular transformation and activation.

[0462] The array is also useful for ascertaining the effect of the expression of a gene on the expression of other genes in the same cell or in different cells. This provides, for example, for a selection of alternate molecular targets for therapeutic intervention if the ultimate or downstream target cannot be regulated.

[0463] Importantly, the invention provides arrays useful for ascertaining differential expression patterns of one or more genes identified in diseased tissue versus non-diseased tissue. This provides a battery of genes that serve as a molecular target for diagnosis or therapeutic intervention. In particular, biochips can be made comprising arrays not only of the CCGs listed in Tables 1-5, but of CCGs specific to subjects suffering from specific manifestations or stages of the disease (e.g., metastasized vs. non-metastasized colon cancer).

[0464] The probes can be attached to the biochip in a wide variety of ways, as will be appreciated by those in the art. As described herein, the nucleic acids can either be synthesized first, with subsequent attachment to the biochip, or can be directly synthesized on the biochip.

[0465] The biochip comprises a suitable substrate. By “substrate” or other grammatical equivalents herein is meant any material that can be modified to contain discrete individual sites appropriate for the attachment or association of the nucleic acid probes and is amenable to at least one detection method. As will be appreciated by those in the art, the number of possible substrates are very large, and include, but are not limited to, glass and modified or functionalized glass, plastics (including acrylics, polystyrene and copolymers of styrene and other materials, polypropylene, polyethylene, polybutylene, polyurethanes, Teflon, etc.), polysaccharides, nylon or nitrocellulose, resins, silica or silica-based materials including silicon and modified silicon, carbon, metals, etc. In general, the substrates allow optical detection and have low background fluorescence.

[0466] The substrate can be planar, although as will be appreciated by those in the art, other configurations of substrates may be used as well. For example, the probes may be placed on the inside surface of a tube, for flow-through sample analysis to minimize sample volume. Similarly, the substrate may be flexible, such as a flexible foam, including closed cell foams made of particular plastics.

[0467] In one embodiment, the surface of the biochip and the probe may be derivatized with chemical functional groups for subsequent attachment of the two. Thus, for example, the biochip is derivatized with a chemical functional group including, but are not limited to, amino groups, carboxy groups, oxo groups, or thiol groups. Using these functional groups, the probes can be attached using functional groups on the probes. For example, nucleic acids containing amino groups can be attached to surfaces comprising amino groups using homo-or hetero-bifunctional linkers. In addition, in some cases, additional linkers, such as alkyl groups (including substituted and heteroalkyl groups) may be used.

[0468] In an embodiment, the oligonucleotides are synthesized as is known in the art, and then attached to the surface of the substrate. As will be appreciated by those skilled in the art, either the 5′ or 3′ terminus may be attached to the substrate, or attachment may be via an internal nucleoside.

[0469] In an additional embodiment, the immobilization to the substrate may be very strong, yet non-covalent. For example, biotinylated oligonucleotides can be made, which bind to surfaces covalently coated with streptavidin, resulting in attachment.

[0470] Alternatively, the oligonucleotides may be synthesized on the surface. For example, photoactivation techniques utilizing photopolymerization compounds and techniques are used. In one embodiment, the nucleic acids can be synthesized in situ, using well-known photolithographic techniques.

[0471] Modifications to the above-described compositions and methods of the invention, according to standard techniques, will be readily apparent to one skilled in the art and are meant to be encompassed by the invention.

[0472] It should be understood that the above-described embodiments and the following examples are given by way of illustration, not limitation. Various changes and modifications within the scope of the present invention will become apparent to those skilled in the art from the present description.

### EXAMPLES

### Example 1

### Identification of Colon Cancer Genes

[0473] A query was performed to identify genes that are uniquely over-expressed in colon adenocarcinoma tissue relative to adjacent normal tissues using GeneExpress Oncology DataSuite™ and the fold change analysis function within GX2000 analytical program (Gene Logic Inc., Gaithersburg, Md.). The GeneExpress Oncology DataSuite™ is an interactive information system that provides the global gene expression profiles of human cancer types. The GeneExpress system is based on the collection of cancer and normal tissue samples, the generation of global gene expression data using high-density microarrays, and the analysis of results using a variety of sophisticated software tools, such as GX2000. The normal tissues include human colon, cervix, kidney, left atrium, left ventricle, right atrium, right ventricle, lung, ovary, prostate, rectum, skin and stomach.

[0474] Initially, a total of 495 genes were found to have a two-fold differential expression between normal and cancer tissue. Contrast analysis was then used on these 495 genes to identify those genes having a p-value equal to or lower than 0.05. The contrast analysis generated 429 genes. Upon visual inspection of these 429 genes using e-northerns, 63 genes were identified as uniquely over-expressed in colon cancer tissue relative to the panel of normal tissues described above. These 63 genes were defined as colon cancer genes (CCGs) and were classified according to their functional categories into the five gene groups shown in Tables 1-5.

### Example 2

### Hydrophobicity Analysis

[0475] The hydrophobicity profiles of the polypeptides encoded by the CCGs were generated using the TopPred II program (Claros et al., TopPred II: An Improved Software For Membrane Protein Structure Predictions., CABIOS, 10, 685-686, 1994) at the Bioweb site maintained by the Pasteur Institute (Paris, France). The hydrophobicity profile is demonstrated in both KD (Kyte and Doolittle) scale and GES (Goldman, Engelman and Steitz) scale.

[0476] Briefly, KD scale is a hydropathy scale that associated a hydropathy value to each amino acid. A moving-window approach is implemented in which the hydrophobicity scale over a number of adjacent residues in the native sequence is summed in order to identify membrane regions. A threshold value T is defined to label a segment as ‘membrane helix’: if the sum over the hydrophobicity exceeded T, the segment was predicted to be a membrane helix.

[0477] The GES scale is also used to identify nonpolar transbilayer helices. The curve is the average of a residue-specific hydrophobicity scale over a window of 20 residues. When the line is in the upper half of the frame (positive), it indicates a hydrophobic region and when it is in the lower half (negative), a hydrophilic region.

[0478] In a typical hydrophobicity profile, the X-axis represents the length of the protein in amino acids (aa), while the Y-axis represents the KD or GES score. The curve line shows the KD or GES pattern of the entire protein, while the strait line shows putative cutoffs for potential membrane spanning domains.

[0479] The foregoing description of the present invention provides illustration and description, but is not intended to be exhaustive or to limit the invention to the precise one disclosed. Modifications and variations are possible consistent with the above teachings or may be acquired from practice of the invention. Thus, it is noted that the scope of the invention is defined by the claims and their equivalents.

The application's sequence listing, which the Patent Office published only in electronic form, follows.

SEQUENCE LISTING (54873 sequences)

SEQ ID NO: 1 - DNA, 3767 bp, Homo sapiens
cctccgcgcccccggctgctgctcacgccccgcccgggagccagattttgtggaagtataatactttgtcattatgagatgtcgtctctcggtgcctcctttgtgcaaattaaatttgatgacttgcagttttttgaaaactgcggtggaggaagttttgggagtgtttatcgagccaaatggatatcacaggacaaggaggtggctgtaaagaagctcctcaaaatagagaaagaggcagaaatactcagtgtcctcagtcacagaaacatcatccagttttatggagtaattcttgaacctcccaactatggcattgtcacagaatatgcttctctgggatcactctatgattacattaacagtaacagaagtgaggagatggatatggatcacattatgacctgggccactgatgtagccaaaggaatgcattatttacatatggaggctcctgtcaaggtgattcacagagacctcaagtcaagaaacgttgttatagctgctgatggagtactgaagatctgtgactttggtgcctctcggttccataaccatacaacacacatgtccttggttggaactttcccatggatggctccagaagttatccagagtctccctgtgtcagaaacttgtgacacatattcctatggtgtggttctctgggagatgctaacaagggaggtcccctttaaaggtttggaaggattacaagtagcttggcttgtagtggaaaaaaacgagagattaaccattccaagcagttgccccagaagttttgctgaactgttacatcagtgttgggaagctgatgccaagaaacggccatcattcaagcaaatcatttcaatcctggagtccatgtcaaatgacacgagccttcctgacaagtgtaactcattcctacacaacaaggcggagtggaggtgcgaaattgaggcaactcttgagaggctaaagaaactagagcgtgatctcagctttaaggagcaggagcttaaagaacgagaaagacgtttaaagatgtgggagcaaaagctgacagagcagtccaacaccccgctgctgccttcctttgagattggtgcatggacggaagacgatgtgtattgttgggttcagcagctcgtcagaaaaggtgactcttcagcagagatgagtgtatatgcaagcttgtttaaagaaaacaacattacagggaagcggctgctgctgctggaggaagaagacctgaaagacatgggcattgtctccaaggggcatatcattcacttcaagtcagccattgagaaattaacccatgattacataaatttgtttcacttcccaccactaattaaggactcaggaggtgaacctgaagaaaatgaggaaaaaatagtgaacctggaactggtttttggttttcacttgaaaccaggaactggcccacaggattgtaagtggaaaatgtatatggagatggatggggatgaaattgcaataacctacataaaagatgtgacattcaacactaacctacctgatgcggagattttaaagatgacaaagccaccatttgtaatggagaagtggattgtaggaatagcaaaaagtcagactgtggagtgcactgtcacatatgagagtgatgttagaactccaaaaagcactaaacatgtccatttgattcagtggagtagaacaaaacctcaggatgaagtgaaagcagtccaacttgccattcagacattattcaccaattcagatggcaaccctggaagcaggtccgactcaagtgctgattgccagtggttagatactctgaggatgcggcagattgcatccaacacttctttacagcgttcccagagcaatcctattctggggtcaccgttcttctcacactttgatggccaggattcctacgctgctgctgtgagacggccccaggtgcccattaagtatcaacagattacacctgtgaaccagtccagaagctcgtctcctactcagtatggactgaccaaaaacttctcttccctacatctcaactctagggacagtggcttttccagtggcaatactgacacctcttcagagaggggtcgatactcagacagaagcaggaacaaatatggacgtggtagtatatcactcaattcttctcctagaggaagatacagtggaaagagtcagcattccactccttcaagaggaagataccctggaaagttctacagggtttctcagtcagcactcaatcctcaccagtcgcctgacttcaagagaagccccagggacctccaccaacccaacaccataccagggatgcctttgcaccctgagactgactcaagagccagtgaagaggacagcaaagtcagcgaagggggctggacaaaagtggaataccggaaaaagccccacaggccatctcccgccaaaaccaataaagagagagccagaggggaccaccgtggatggagaaacttttgatgaattgaactacatagcttttctaagcaggttaaaaaaaaaaaaaaaaaaagaaatgtaatggtttttgataatatgatcccttcagattgaattaacgaaaagacaacacttccagtttttggattgggaaataccttctaattgagactatagccaaaccagggccaaaattatggatattggtcacccagtgatcataactaggcttgaaaatcactacacatattttctgccttgagtgaacatttttagaggaaaggttatgccatctttttaccctaaccactgatattctggttagcagggccaggacaaggggaaggaaaatgaggtcaacaaaaaaatcaaatttttaggaaaagataagatgaatgttactgatttttccttttggctgaggctgcaatatggcctggcaaggcactgttactgatcttgtctttaacattttgatattttgttcatcataatttttgcatttatttttttaaatattgcattaaaatatcatttagcttgattatcgagttttttggtttgaggttttttgttgcttcttttttcttttctttctttccccctcttttttttggatgtccccttaaattttgtgcccaaggcaggtacctcactcatctcatccttggctcagccctgctggttagtatttagtatttattttagtaagatatttgtgtctgtatgatggtcagagttgaactgatctggcttgtcatttttcagtaataaaaaaagttactgaatttaattgttgaatatgatgcatatctcattcattacgatttatcagaaaccaaagatttaaattgcctagatttgtggttctttctcttcctaagttcccagcgactgctttcaaatactattttctaaatttcaccaaaggagcaaagaggataaaacaacgctccataaaggcctcttgggatgtcagaaatctaaaatctaaaagaaaacagacacagagcaagacaataacatcacaagctaaaagccagagaaatttaaaattaccaacatccttgttggagtaagacagtaaatatcagccttgcagcaagacagctctgagcagctgtgggcaaagaggtaaaccagtgggggtgcaaggagactgtctgcagcttagggcagaaatggggggatccaacttgtgaaatgcttcatgttttacaaaccaaaaagtcgggtagcaacaaacttattgtatgtcaaatcaataaatgttactttcaatatccaaaaaaaaaaaaaaaaaaaaa

SEQ ID NO: 2 - DNA, 2253 bp, Homo sapiens
ggaagacttgggtccttgggtcgcaggtgggagccgacgggtgggtagaccgtgggggatatctcagtggcggacgaggacggcggggacaaggggcggctggtcggagtggcggagcgtcaagtcccctgtcggttcctccgtccctgagtgtccttggcgctgccttgtgcccgcccagcgcctttgcatccgctcctgggcaccgaggcgccctgtaggatactgcttgttacttattacagctagaggcatcatggaccgatctaaagaaaactgcatttcaggacctgttaaggctacagctccagttggaggtccaaaacgtgttctcgtgactcagcaaattccttgtcagaatccattacctgtaaatagtggccaggctcagcgggtcttgtgtccttcaaattcttcccagcgcgttcctttgcaagcacaaaagcttgtctccagtcacaagccggttcagaatcagaagcagaagcaattgcaggcaaccagtgtacctcatcctgtctccaggccactgaataacacccaaaagagcaagcagcccctgccatcggcacctgaaaataatcctgaggaggaactggcatcaaaacagaaaaatgaagaatcaaaaaagaggcagtgggctttggaagactttgaaattggtcgccctctgggtaaaggaaagtttggtaatgtttatttggcaagagaaaagcaaagcaagtttattctggctcttaaagtgttatttaaagctcagctggagaaagccggagtggagcatcagctcagaagagaagtagaaatacagtcccaccttcggcatcctaatattcttagactgtatggttatttccatgatgctaccagagtctacctaattctggaatatgcaccacttggaacagtttatagagaacttcagaaactttcaaagtttgatgagcagagaactgctacttatataacagaattggcaaatgccctgtcttactgtcattcgaagagagttattcatagagacattaagccagagaacttacttcttggatcagctggagagcttaaaattgcagattttgggtggtcagtacatgctccatcttccaggaggaccactctctgtggcaccctggactacctgccccctgaaatgattgaaggtcggatgcatgatgagaaggtggatctctggagccttggagttctttgctatgaatttttagttgggaagcctccttttgaggcaaacacataccaagagacctacaaaagaatatcacgggttgaattcacattccctgactttgtaacagagggagccagggacctcatttcaagactgttgaagcataatcccagccagaggccaatgctcagagaagtacttgaacacccctggatcacagcaaattcatcaaaaccatcaaattgccaaaacaaagaatcagctagcaaacagtcttaggaatcgtgcagggggagaaatccttgagccagggctgccatataacctgacaggaacatgctactgaagtttattttaccattgactgctgccctcaatctagaacgctacacaagaaatatttgttttactcagcaggtgtgccttaacctccctattcagaaagctccacatcaataaacatgacactctgaagtgaaagtagccacgagaattgtgctacttatactggttcataatctggaggcaaggttcgactgcagccgccccgtcagcctgtgctaggcatggtgtcttcacaggaggcaaatccagagcctggctgtggggaaagtgaccactctgccctgaccccgatcagttaaggagctgtgcaataaccttcctagtacctgagtgagtgtgtaacttattgggttggcgaagcctggtaaagctgttggaatgagtatgtgattctttttaagtatgaaaataaagatatatgtacagacttgtattttttctctggtggcattcctttaggaatgctgtgtgtctgtccggcaccccggtaggcctgattgggtttctagtcctccttaaccacttatctcccatatgagagtgtgaaaaataggaacacgtgctctacctccatttagggatttgcttgggatacagaagaggccatgtgtctcagagctgttaagggcttatttttttaaaacattggagtcatagcatgtgtgtaaactttaaatatgcaaataaataagtatctatgtctaaaaaaaaaaaaaaaa

SEQ ID NO: 3 - DNA, 1390 bp, Homo sapiens
gggaagtgctgttggagccgctgtggttgctgtccgcggagtggaagcgcgtgcttttgtttgtgtccctggccatggcgctgcagctctcccgggagcagggaatcaccctgcgcgggagcgccgaaatcgtggccgagttcttctcattcggcatcaacagcattttatatcagcgtggcatatatccatctgaaacctttactcgagtgcagaaatacggactcaccttgcttgtaactactgatcttgagctcataaaatacctaaataatgtggtggaacaactgaaagattggttatacaagtgttcagttcagaaactggttgtagttatctcaaatattgaaagtggtgaggtcctggaaagatggcagtttgatattgagtgtgacaagactgcaaaagatgacagtgcacccagagaaaagtctcagaaagctatccaggatgaaatccgttcagtgatcagacagatcacagctacggtgacatttctgccactgttggaagtttcttgttcatttgatctgctgatttatacagacaaagatttggttgtacctgaaaaatgggaagagtcgggaccacagtttattaccaattctgaggaagtccgccttcgttcatttactactacaatccacaaagtaaatagcatggtggcctacaaaattcctgtcaatgactgaggatgacatgaggaaaataatgtaattgtaattttgaaatgtggttttcctgaaatcaggtcatctatagttgatatgttttatttcattggttaatttttacatggagaaaaccaaaatgatacttactgaactgtgtgtaattgttcctttatttttttggtacctatttgacttaccatggagttaacatcatgaatttattgcacattgttcaaaaggaaccaggaggtttttttgtcaacattgtgatgtatattcctttgaagatagtaactgtagatggaaaaacttgtgctataaagctagatgctttcctaaatcagatgttttggtcaagtagtttgactcagtataggtagggagatatttaagtataaaatacaacaaaggaagtctaaatattcagaatctttgttaaggtcctgaaagtaactcataatctataaacaatgaaatattgctgtatagctccttttgaccttcatttcatgtatagttttccctattgaatcagtttccaattatttgactttaatttatgtaacttgaacctatgaagcaatggatatttgtactgtttaatgttctgtgatacagaactcttaaaaatgttttttcatgtgttttataaaatcaagttttaagtgaaagtgaggaaataaagttaagtttgttttaaaaaaaaaaaaaaaaaa

SEQ ID NO: 4 - DNA, 1235 bp, Homo sapiens
ggggggggggggcacttggcttcaaagctggctcttggaaattgagcggagagcgacgcggttgttgtagctgccgctgcggccgccgcggaataataagccgggatctaccatacccattgactaactatggaagattataccaaaatagagaaaattggagaaggtacctatggagttgtgtataagggtagacacaaaactacaggtcaagtggtagccatgaaaaaaatcagactagaaagtgaagaggaaggggttcctagtactgcaattcgggaaatttctctattaaaggaacttcgtcatccaaatatagtcagtcttcaggatgtgcttatgcaggattccaggttatatctcatctttgagtttctttccatggatctgaagaaatacttggattctatccctcctggtcagtacatggattcttcacttgttaagagttatttataccaaatcctacaggggattgtgttttgtcactctagaagagttcttcacagagacttaaaacctcaaaatctcttgattgatgacaaaggaacaattaaactggctgattttggccttgccagagcttttggaatacctatcagagtatatacacatgaggtagtaacactctggtacagatctccagaagtattgctggggtcagctcgttactcaactccagttgacatttggagtataggcaccatatttgctgaactagcaactaagaaaccacttttccatggggattcagaaattgatcaactcttcaggattttcagagctttgggcactcccaataatgaagtgtggccagaagtggaatctttacaggactataagaatacatttcccaaatggaaaccaggaagcctagcatcccatgtcaaaaacttggatgaaaatggcttggatttgctctcgaaaatgttaatctatgatccagccaaacgaatttctggcaaaatggcactgaatcatccatattttaatgatttggacaatcagattaagaagatgtagctttctgacaaaaagtttccatatgttatgtcaacagatagttgtgtttttattgttaactcttgtctatttttgtcttatatatatttctttgttatcaaacttcagctgtacttcgtcttctaatttcaaaaatataacttaaaaatgtaaatattctatatgaatttaaatataattctgtaaatgtgaaaaaaaaaaaaaaaaaaaaa

SEQ ID NO: 5 - DNA, 2257 bp, Homo sapiens
gtgcgatcccgggcccgagggcatcagacggcggctgattagctccggtttgcatcacccggaccgggggattagctccggtttgcatcacccggaccgggggccgggcgcgcacgagactcgcagcggaagtggaggcggctccgcgcgcgtccgctgctaggacccgggcagggctggagctgggctgggatcccgagctcggcagcagcgcagcgggccggcccacctgctggtgccctggaggctctgagccccggcggcgcccgggcccacgcggaacgacggggcgagatgcgagccacccctctagctgctcctgcgggttccctgtccaggaagaagcggttggagttggatgacaacttagataccgagcgtcccgtccagaaacgagctcgaagtgggccccagcccagactgcccccctgcctgttgcccctgagcccacctactgctccagatcgtgcaactgctgtggccactgcctcccgtcttgggccctatgtcctcctggagcccgaggagggcgggcgggcctaccaggccctgcactgccctacaggcactgagtatacctgcaaggtgtaccccgtccaggaagccccggccgtgctggagccctatgcgcggctgcccccgcacaagcatgtggctcggcccactgaggtcctggctggtacccagctcctctacgcctttttcactcggacccatggggacatgcacagcctggtgcgaagccgccaccgtatccctgagcctgaggctgccgtgctcttccgccagatggccaccgccctggcgcactgtcaccagcacggtctggtcctgcgtgatctcaagctgtgtcgctttgtcttcgctgaccgtgagaggaagaagctggtgctggagaacctggaggactcctgcgtgctgactgggccagatgattccctgtgggacaagcacgcgtgcccagcctacgtgggacctgagatactcagctcacgggcctcatactcgggcaaggcagccgatgtctggagcctgggcgtggcgctcttcaccatgctggccggccactaccccttccaggactcggagcctgtcctgctcttcggcaagatccgccgcggggcctacgccttgcctgcaggcctctcggcccctgcccgctgtctggttcgctgcctccttcgtcgggagccagctgaacggctcacagccacaggcatcctcctgcacccctggctgcgacaggacccgatgcccttagccccaacccgatcccatctctgggaggctgcccaggtggtccctgatggtctggggctggacgaagccagggaagaggagggagacagagaagtggttctgtatggctaggaccaccctactacacgctcagctgccaacagtggattgagtttgggggtagctccaagccttctcctgcctctgaactgagccaaaccttcagtgccttccagaagggagaaaggcagaagcctgtgtggagtgtgctgtgtacacatctgctttgttccacacacatgcagttcctgcttgggtgcttatcaggtgccaagccctgttctcggtgctgggagtacagcagtgagcaaaggagacaatattccctgctcacagagatgacaaactggcatccttgagctgacaacacttttccatgaccataggtcactgtctacactgggtacactttgtaccagtgtcggcctccactgatgctggtgctcaggcacctctgtccaaggacaatccctttcacaaacaaaccagctgcctttgtatcttgtaccttttcagagaaagggaggtatccctgtgccaaaggctccaggcctctcccctgcaactcaggacccaagcccagctcactctgggaactgtgttcccagcatctctgtcctcttgattaagagattctccttccaggcctaagcctgggatttgggccagagataagaatccaaactatgaggctagttcttgtctaactcaagactgttctggaatgagggtccaggcctgtcaaccatggggcttctgacctgagcaccaaggttgagggacaggattaggcagggtctgtcctgtggccacctggaaagtcccaggtgggactcttctggggacacttggggtccacaatcccaggtccatactctaggttttggataccatgagtatgtatgtttacctgtgcctaataaaggagaattatgaaataaaaaaaaaaaaaaaaaaa

SEQ ID NO: 6 - DNA, 3866 bp, Homo sapiens
ggaattcctttttttttttttttgagatggagtttcactcttgttggccaggctggagtgcaatggcacaatctcagcttactgcaacctccgcctcccgggttcaagcgattctcctgcctcagcctctcaagtagctgggattacaggcatgtgccaccacccctggctaactaatttcttttctatttagtagagatggggtttcaccatgttggtcaggctggtcttgaactcctgacctcaggtgatccacttgccttggcctcccaaagtgctaggattacagccgtgaaactgtgcctggctgattctttttttgttgttggatttttgaaacagggtctcccttggtcgcccaggctggagtgcagtggtgcgatcttggctcactataacctccacctcctggtttcaagtgatcctcccactttagcctcctgagtagctgtgattacaggcgtgcaccaccacacccggctaatttttgtatttttattagagacagggtttcaccatgttggccaggctgttctcaaactcctggactcaagggatccgcctgcctccacttcccaaagtcccgagattacaggtgtgagtcaccatgcctgaccttataattcttaagtcattttttctggtccatttcttccttagggtcctcacaacaaatctgcattaggcggtacaataatccttaacttcatgattcacaaaaggaagatgaagtgattcatgatttagaaaggggaagtagtaagcccactgcacactcctggatgatgatcctaaatccagatacagtaaaaatggggtatgggaaggtagaatacaaaatttggtttaaattaattatctaaatatctaaaaacatttttggatacattgttgatgtgaatgtaagactgtacagacttcctagaaaacagtttgggttccatcttttcatttccccagtgcagttttctgtagaaatggaatccgaggatttaagtggcagagaattgacaattgattccataatgaacaaagtgagagacattaaaaataagtttaaaaatgaagaccttactgatgaactaagcttgaataaaatttctgctgatactacagataactcgggaactgttaaccaaattatgatgatggcaaacaacccagaggactggttgagtttgttgctcaaactagagaaaaacagtgttccgctaagtgatgctcttttaaataaattgattggtcgttacagtcaagcaattgaagcgcttcccccagataaatatggccaaaatgagagttttgctagaattcaagtgagatttgctgaattaaaagctattcaagagccagatgatgcacgtgactactttcaaatggccagagcaaactgcaagaaatttgcttttgttcatatatcttttgcacaatttgaactgtcacaaggtaatgtcaaaaaaagtaaacaacttcttcaaaaagctgtagaacgtggagcagtaccactagaaatgctggaaattgccctgcggaatttaaacctccaaaaaaagcagctgctttcagaggaggaaaagaagaatttatcagcatctacggtattaactgcccaagaatcattttccggttcacttgggcatttacagaataggaacaacagttgtgattccagaggacagactactaaagccaggtttttatatggagagaacatgccaccacaagatgcagaaataggttaccggaattcattgagacaaactaacaaaactaaacagtcatgcccatttggaagagtcccagttaaccttctaaatagcccagattgtgatgtgaagacagatgattcagttgtaccttgttttatgaaaagacaaacctctagatcagaatgccgagatttggttgtgcctggatctaaaccaagtggaaatgattcctgtgaattaagaaatttaaagtctgttcaaaatagtcatttcaaggaacctctggtgtcagatgaaaagagttctgaacttattattactgattcaataaccctgaagaataaaacggaatcaagtcttctagctaaattagaagaaactaaagagtatcaagaaccagaggttccagagagtaaccagaaacagtggcaagctaagagaaagtcagagtgtattaaccagaatcctgctgcatcttcaaatcactggcagattccggagttagcccgaaaagttaatacagagcagaaacataccacttttgagcaacctgtcttttcagtttcaaaacagtcaccaccaatatcaacatctaaatggtttgacccaaaatctatttgtaagacaccaagcagcaataccttggatgattacatgagctgttttagaactccagttgtaaagaatgactttccacctgcttgtcagttgtcaacaccttatggccaacctgcctgtttccagcagcaacagcatcaaatacttgccactccacttcaaaatttacaggttttagcatcttcttcagcaaatgaatgcatttcggttaaaggaagaatttattccatattaaagcagataggaagtggaggttcaagcaaggtatttcaggtgttaaatgaaaagaaacagatatatgctataaaatatgtgaacttagaagaagcagataaccaaactcttgatagttaccggaacgaaatagcttatttgaataaactacaacaacacagtgataagatcatccgactttatgattatgaaatcacggaccagtacatctacatggtaatggagtgtggaaatattgatcttaatagttggcttaaaaagaaaaaatccattgatccatgggaacgcaagagttactggaaaaatatgttagaggcagttcacacaatccatcaacatggcattgttcacagtgatcttaaaccagctaactttctgatagttgatggaatgctaaagctaattgattttgggattgcaaaccaaatgcaaccagatacaacaagtgttgttaaagattctcaggttggcacagttaattatatgccaccagaagcaatcaaagatatgtcttcctccagagagaatgggaaatctaagtcaaagataagccccaaaagtgatgtttggtccttaggatgtattttgtactatatgacttacgggaaaacaccatttcagcagataattaatcagatttctaaattacatgccataattgatcctaatcatgaaattgaatttcccgatattccagagaaagatcttcaagatgtgttaaagtgttgtttaaaaagggacccaaaacagaggatatccattcctgagctcctggctcatccatatgttcaaattcaaactcatccagttaaccaaatggccaagggaaccactgaagaaatgaaatatgttctgggccaacttgttggtctgaattctcctaactccattttgaaagctgctaaaactttatatgaacactatagtggtggtgaaagtcataattcttcatcctccaagacttttgaaaaaaaaaggggaaaaaaatgatttgcagttattcgtaatgtcagataggaggtataaaatatattggactgttatactcttgaatccctgtggaaatctacatttgaagacaacatcactctgaagtgttatcagcaaaaaaaattcagtgagattatctttaaaagaaaactgtaaaaatagcaaccacttatggcactgtatatattgtagacttgttttctctgttttatgctcttgtgtaatctacttgacatcattttactcttggaatagtgggtggatagcaagtatattctaaaaaactttgtaaataaagttttgtggctaaaatga

SEQ ID NO: 7 - DNA, 627 bp, Homo sapiens
agtctccggcgagttgttgcctgggctggacgtggttttgtctgctgcgcccgctcttcgcgctctcgtttcattttctgcagcgcgccacgaggatggcccacaagcagatctactactcggacaagtacttcgacgaacactacgagtaccggcatgttatgttacccagagaactttccaaacaagtacctaaaactcatctgatgtctgaagaggagtggaggagacttggtgtccaacagagtctaggctgggttcattacatgattcatgagccagaaccacatattcttctctttagacgacctcttccaaaagatcaacaaaaatgaagtttatctggggatcgtcaaatctttttcaaatttaatgtatatgtgtatataaggtagtattcagtgaatacttgagaaatgtacaaatctttcatccatacctgtgcatgagctgtattcttcacagcaacagagctcagttaaatgcaactgcaagtaggttactgtaagatgtttaagataaaagttcttccagtcagtttttctcttaagtgcctgtttgagtttactgaaacagtttacttttgttcaataaagtttgtatgttgcatttaaaaaaaaaaaaaaa

SEQ ID NO: 8 - DNA, 4620 bp, Homo sapiens
cgccctcgccgcccgcggcgccccgagcgctttgtgagcagatgcggagccgagtggagggcgcgagccagatgcggggcgacagctgacttgctgagaggaggcggggaggcgcggagcgcgcgtgtggtccttgcgccgctgacttctccactggttcctgggcaccgaaagataaacctctcataatgaaggcccccgctgtgcttgcacctggcatcctcgtgctcctgtttaccttggtgcagaggagcaatggggagtgtaaagaggcactagcaaagtccgagatgaatgtgaatatgaagtatcagcttcccaacttcaccgcggaaacacccatccagaatgtcattctacatgagcatcacattttccttggtgccactaactacatttatgttttaaatgaggaagaccttcagaaggttgctgagtacaagactgggcctgtgctggaacacccagattgtttcccatgtcaggactgcagcagcaaagccaatttatcaggaggtgtttggaaagataacatcaacatggctctagttgtcgacacctactatgatgatcaactcattagctgtggcagcgtcaacagagggacctgccagcgacatgtctttccccacaatcatactgctgacatacagtcggaggttcactgcatattctccccacagatagaagagcccagccagtgtcctgactgtgtggtgagcgccctgggagccaaagtcctttcatctgtaaaggaccggttcatcaacttctttgtaggcaataccataaattcttcttatttcccagatcatccattgcattcgatatcagtgagaaggctaaaggaaacgaaagatggttttatgtttttgacggaccagtcctacattgatgttttacctgagttcagagattcttaccccattaagtatgtccatgcctttgaaagcaacaattttatttacttcttgacggtccaaagggaaactctagatgctcagacttttcacacaagaataatcaggttctgttccataaactctggattgcattcctacatggaaatgcctctggagtgtattctcacagaaaagagaaaaaagagatccacaaagaaggaagtgtttaatatacttcaggctgcgtatgtcagcaagcctggggcccagcttgctagacaaataggagccagcctgaatgatgacattcttttcggggtgttcgcacaaagcaagccagattctgccgaaccaatggatcgatctgccatgtgtgcattccctatcaaatatgtcaacgacttcttcaacaagatcgtcaacaaaaacaatgtgagatgtctccagcatttttacggacccaatcatgagcactgctttaataggacacttctgagaaattcatcaggctgtgaagcgcgccgtgatgaatatcgaacagagtttaccacagctttgcagcgcgttgacttattcatgggtcaattcagcgaagtcctcttaacatctatatccaccttcattaaaggagacctcaccatagctaatcttgggacatcagagggtcgcttcatgcaggttgtggtttctcgatcaggaccatcaacccctcatgtgaattttctcctggactcccatccagtgtctccagaagtgattgtggagcatacattaaaccaaaatggctacacactggttatcactgggaagaagatcacgaagatcccattgaatggcttgggctgcagacatttccagtcctgcagtcaatgcctctctgccccaccctttgttcagtgtggctggtgccacgacaaatgtgtgcgatcggaggaatgcctgagcgggacatggactcaacagatctgtctgcctgcaatctacaaggttttcccaaatagtgcaccccttgaaggagggacaaggctgaccatatgtggctgggactttggatttcggaggaataataaatttgatttaaagaaaactagagttctccttggaaatgagagctgcaccttgactttaagtgagagcacgatgaatacattgaaatgcacagttggtcctgccatgaataagcatttcaatatgtccataattatttcaaatggccacgggacaacacaatacagtacattctcctatgtggatcctgtaataacaagtatttcgccgaaatacggtcctatggctggtggcactttacttactttaactggaaattacctaaacagtgggaattctagacacatttcaattggtggaaaaacatgtactttaaaaagtgtgtcaaacagtattcttgaatgttataccccagcccaaaccatttcaactgagtttgctgttaaattgaaaattgacttagccaaccgagagacaagcatcttcagttaccgtgaagatcccattgtctatgaaattcatccaaccaaatcttttattagtacttggtggaaagaacctctcaacattgtcagttttctattttgctttgccagtggtgggagcacaataacaggtgttgggaaaaacctgaattcagttagtgtcccgagaatggtcataaatgtgcatgaagcaggaaggaactttacagtggcatgtcaacatcgctctaattcagagataatctgttgtaccactccttccctgcaacagctgaatctgcaactccccctgaaaaccaaagcctttttcatgttagatgggatcctttccaaatactttgatctcatttatgtacataatcctgtgtttaagccttttgaaaagccagtgatgatctcaatgggcaatgaaaatgtactggaaattaagggaaatgatattgaccctgaagcagttaaaggtgaagtgttaaaagttggaaataagagctgtgagaatatacacttacattctgaagccgttttatgcacggtccccaatgacctgctgaaattgaacagcgagctaaatatagagtggaagcaagcaatttcttcaaccgtccttggaaaagtaatagttcaaccagatcagaatttcacaggattgattgctggtgttgtctcaatatcaacagcactgttattactacttgggtttttcctgtggctgaaaaagagaaagcaaattaaagatctgggcagtgaattagttcgctacgatgcaagagtacacactcctcatttggataggcttgtaagtgcccgaagtgtaagcccaactacagaaatggtttcaaatgaatctgtagactaccgagctacttttccagaagatcagtttcctaattcatctcagaacggttcatgccgacaagtgcagtatcctctgacagacatgtcccccatcctaactagtggggactctgatatatccagtccattactgcaaaatactgtccacattgacctcagtgctctaaatccagagctggtccaggcagtgcagcatgtagtgattgggcccagtagcctgattgtgcatttcaatgaagtcataggaagagggcattttggttgtgtatatcatgggactttgttggacaatgatggcaagaaaattcactgtgctgtgaaatccttgaacagaatcactgacataggagaagtttcccaatttctgaccgagggaatcatcatgaaagattttagtcatcccaatgtcctctcgctcctgggaatctgcctgcgaagtgaagggtctccgctggtggtcctaccatacatgaaacatggagatcttcgaaatttcattcgaaatgagactcataatccaactgtaaaagatcttattggctttggtcttcaagtagccaaagcgatgaaatatcttgcaagcaaaaagtttgtccacagagacttggctgcaagaaactgtatgctggatgaaaaattcacagtcaaggttgctgattttggtcttgccagagacatgtatgataaagaatactatagtgtacacaacaaaacaggtgcaaagctgccagtgaagtggatggctttggaaagtctgcaaactcaaaagtttaccaccaagtcagatgtgtggtcctttggcgtcgtcctctgggagctgatgacaagaggagccccaccttatcctgacgtaaacacctttgatataactgtttacttgttgcaagggagaagactcctacaacccgaatactgcccagaccccttatatgaagtaatgctaaaatgctggcaccctaaagccgaaatgcgcccatccttttctgaactggtgtcccggatatcagcgatcttctctactttcattggggagcactatgtccatgtgaacgctacttatgtgaacgtaaaatgtgtcgctccgtatccttctctgttgtcatcagaagataacgctgatgatgaggtggacacacgaccagcctccttctgggagacatcatagtgctagtactatgtcaaagcaacagtccacactttgtccaatggttttttcactgcctgacctttaaaaggccatcgatattctttgctccttgccataggacttgtattgttatttaaattactggattctaaggaatttcttatctgacagagcatcagaaccagaggcttggtcccacaggccagggaccaatgcgctgcag

SEQ ID NO: 9 - DNA, 1973 bp, Homo sapiens
gggatattggagtagcaagaggctgggaagccatcacttaccttgcactgagaaagaagacaaaggccagtatgcacagctttcctccactgctgctgctgctgttctggggtgtggtgtctcacagcttcccagcgactctagaaacacaagagcaagatgtggacttagtccagaaatacctggaaaaatactacaacctgaagaatgatgggaggcaagttgaaaagcggagaaatagtggcccagtggttgaaaaattgaagcaaatgcaggaattctttgggctgaaagtgactgggaaaccagatgctgaaaccctgaaggtgatgaagcagcccagatgtggagtgcctgatgtggctcagtttgtcctcactgaggggaaccctcgctgggagcaaacacatctgacctacaggattgaaaattacacgccagatttgccaagagcagatgtggaccatgccattgagaaagccttccaactctggagtaatgtcacacctctgacattcaccaaggtctctgagggtcaagcagacatcatgatatcttttgtcaggggagatcatcgggacaactctccttttgatggacctggaggaaatcttgctcatgcttttcaaccaggcccaggtattggaggggatgctcattttgatgaagatgaaaggtggaccaacaatttcagagagtacaacttacatcgtgttgcggctcatgaactcggccattctcttggactctcccattctactgatatcggggctttgatgtaccctagctacaccttcagtggtgatgttcagctagctcaggatgacattgatggcatccaagccatatatggacgttcccaaaatcctgtccagcccatcggcccacaaaccccaaaagcgtgtgacagtaagctaacctttgatgctataactacgattcggggagaagtgatgttctttaaagacagattctacatgcgcacaaatcccttctacccggaagttgagctcaatttcatttctgttttctggccacaactgccaaatgggcttgaagctgcttacgaatttgccgacagagatgaagtccggtttttcaaagggaataagtactgggctgttcagggacagaatgtgctacacggataccccaaggacatctacagctcctttggcttccctagaactgtgaagcatatcgatgctgctctttctgaggaaaacactggaaaaacctacttctttgttgctaacaaatactggaggtatgatgaatataaacgatctatggatccaggttatcccaaaatgatagcacatgactttcctggaattggccacaaagttgatgcagttttcatgaaagatggatttttctatttctttcatggaacaagacaatacaaatttgatcctaaaacgaagagaattttgactctccagaaagctaatagctggttcaactgcaggaaaaattgaacattactaatttgaatggaaaacacatggtgtgagtccaaagaaggtgttttcctgaagaactgtctattttctcagtcatttttaacctctagagtcactgatacacagaatataatcttatttatacctcagtttgcatatttttttactatttagaatgtagccctttttgtactgatataatttagttccacaaatggtgggtacaaaaagtcaagtttgtggcttatggattcatataggccagagttgcaaagatcttttccagagtatgcaactctgacgttgatcccagagagcagcttcagtgacaaacatatcctttcaagacagaaagagacaggagacatgagtctttgccggaggaaaagcagctcaagaacacatgtgcagtcactggtgtcaccctggataggcaagggataactcttctaacacaaaataagtgttttatgtttggaataaagtcaaccttgtttctactgtttt

SEQ ID NO: 10 - DNA, 1858 bp, Homo sapiens
gttgggcttaagaaggtggacctagaaggaggcagcagagaacctactgaaggtggtacagagctgtgggaagtcaatgaaaatgaagggtcttccggtcctgctgtggctgtgtgtggttgtgtgctcatcctacccattgcatgacagtgcaagggatgatgatgctggtatggagcttctgcagaaatacctagaaaactactatggccttgcaaaagatgtgaagcaatttattaagaaaaaggacagtagtcttattgtcaaaaaaattcaagaaatgcagaagttcctcgggttggagatgacagggaagctggactccaacactatggagctgatgcataagcccaggtgtggtgttcctgatgttggtggcttcagtaccttcccaggttcgccaaaatggaggaaatcccacatcacctacaggattgtgaattatacaccggatttgccaagacagagtgtggattctgccattgaaaaagctttgaaggtctgggaggaggtgaccccactcactttctccaggatctctgaaggagaggctgacataatgatctcctttgcagttggagaacatggagactttgtcccttttgatgggcctggaacagtcttggctcatgcctatgcacctggaccagggattaatggagatgctcactttgacgatgatgaacgatggacagaggatgtcactggtaccaacctattcctggttgctgctcatgaacttggccactccctgggactctaccactcagccaaggctgaagctctgatgtacccagtctacaagtcctccacagacttgtcccgtttccatctctctcaagatgatgtagatggtattcagtccctctatggaactcccacagcatcccctgatgtcctcgtggtacccaccaagtctaactctctggaacctgagacatcaccaatgtgcagctctactttgttctttgatgcagtcagcaccctccggggagaagtcctgttttttaaagacaggcacttttggcgcaaatctctcaggactcctgagcctgaattttatttgatctcttcattttggccatctcttccatccaacatggatgctgcatatgaggttactaacagagacactgttttcatttttaaaggaaatcagttctgggctatacgagggcacgaggagctagcaggttatcctaaaagcattcacaccctgggtctccctgcaaccgtgaagaagatcgatgctgccatttctaataaagagaaaaggaagacctacttctttgtagaggacaaatactggaggtttgatgagaagaaacaatccatggagccaggatttcccaggaagatagctgaggactttccaggtgttgactcaagggtggatgctgtctttgaagcatttgggtttctctacttcttcagtggatcttcgcagttggaatttgacccaaatgccaaaaaagtgacccacatattgaagagcaatagctggtttaattgttaaaaagagatccaaggaaggcatcctgtgttttaactgatgcttatagttcttcatctgagtctttgtgaaaggaagtgctttgttcagcatgtgctatggcagaaccaaacaggagctatggatgacaccagtcaacgtcaagttgtcaaaggatgttcagaagcactgtgtagcttacactgtgtcccaaggagaggagggaaggcactcctgggccacaaacaagtgtctgaactgtgtagatggtttgttttatttaataaagattgtgtgtcgtttattaaaaaaaaaaaaaaaaaaaaaaaaaaaaaaaaaaaaaaaaaaaaaaaaaaaaaaaaaaaa

SEQ ID NO: 11 - DNA, 2260 bp, Homo sapiens
aagcccagcagccccggggcggatggctccggccgcctggctccgcagcgcggccgcgcgcgccctcctgcccccgatgctgctgctgctgctccagccgccgccgctgctggcccgggctctgccgccggacgtccaccacctccatgccgagaggagggggccacagccctggcatgcagccctgcccagtagcccggcacctgcccctgccacgcaggaagccccccggcctgccagcagcctcaggcctccccgctgtggcgtgcccgacccatctgatgggctgagtgcccgcaaccgacagaagaggttcgtgctttctggcgggcgctgggagaagacggacctcacctacaggatccttcggttcccatggcagttggtgcaggagcaggtgcggcagacgatggcagaggccctaaaggtatggagcgatgtgacgccactcacctttactgaggtgcacgagggccgtgctgacatcatgatcgacttcgccaggtactggcatggggacgacctgccgtttgatgggcctgggggcatcctggcccatgccttcttccccaagactcaccgagaaggggatgtccacttcgactatgatgagacctggactatcggggatgaccagggcacagacctgctgcaggtggcagcccatgaatttggccacgtgctggggctgcagcacacaacagcagccaaggccctgatgtccgccttctacacctttcgctacccactgagtctcagcccagatgactgcaggggcgttcaacacctatatggccagccctggcccactgtcacctccaggaccccagccctgggcccccaggctgggatagacaccaatgagattgcaccgctggagccagacgccccgccagatgcctgtgaggcctcctttgacgcggtctccaccatccgaggcgagctctttttcttcaaagcgggctttgtgtggcgcctccgtgggggccagctgcagcccggctacccagcattggcctctcgccactggcagggactgcccagccctgtggacgctgccttcgaggatgcccagggccacatttggttcttccaaggtgctcagtactgggtgtacgacggtgaaaagccagtcctgggccccgcacccctcaccgagctgggcctggtgaggttcccggtccatgctgccttggtctggggtcccgagaagaacaagatctacttcttccgaggcagggactactggcgtttccaccccagcacccggcgtgtagacagtcccgtgccccgcagggccactgactggagaggggtgccctctgagatcgacgctgccttccaggatgctgatggctatgcctacttcctgcgcggccgcctctactggaagtttgaccctgtgaaggtgaaggctctggaaggcttcccccgtctcgtgggtcctgacttctttggctgtgccgagcctgccaacactttcctctgaccatggcttggatgccctcaggggtgctgacccctgccaggccacgaatatcaggctagagacccatggccatctttgtggctgtgggcaccaggcatgggactgagcccatgtctcctgcagggggatggggtggggtacaaccaccatgacaactgccgggagggccacgcaggtcgtggtcacctgccagcgactgtctcagactgggcagggaggctttggcatgacttaagaggaagggcagtcttgggacccgctatgcaggtcctggcaaacctggctgccctgtctcatccctgtccctcagggtagcaccatggcaggactgggggaactggagtgtccttgctgtatccctgttgtgaggttccttccaggggctggcactgaagcaagggtgctggggccccatggccttcagccctggctgagcaactgggctgtagggcagggccacttcctgaggtcaggtcttggtaggtgcctgcatctgtctgccttctggctgacaatcctggaaatctgttctccagaatccaggccaaaaagttcacagtcaaatggggaggggtattcttcatgcaggagaccccaggccctggaggctgcaacatacctcaatcctgtcccaggccggatcctcctgaagcccttttcgcagcactgctatcctccaaagccattgtaaatgtgtgtacagtgtgtataaaccttcttcttcttttttttttttaaactgaggattgtcattaaacacagttgttttct

SEQ ID NO: 12 - DNA, 1778 bp, Homo sapiens
tagaagtttacaatgaagtttcttctaatactgctcctgcaggccactgcttctggagctcttcccctgaacagctctacaagcctggaaaaaaataatgtgctatttggtgagagatacttagaaaaattttatggccttgagataaacaaacttccagtgacaaaaatgaaatatagtggaaacttaatgaaggaaaaaatccaagaaatgcagcacttcttgggtctgaaagtgaccgggcaactggacacatctaccctggagatgatgcacgcacctcgatgtggagtccccgatctccatcatttcagggaaatgccaggggggcccgtatggaggaaacattatatcacctacagaatcaataattacacacctgacatgaaccgtgaggatgttgactacgcaatccggaaagctttccaagtatggagtaatgttacccccttgaaattcagcaagattaacacaggcatggctgacattttggtggtttttgcccgtggagctcatggagacttccatgcttttgatggcaaaggtggaatcctagcccatgcttttggacctggatctggcattggaggggatgcacatttcgatgaggacgaattctggactacacattcaggaggcacaaacttgttcctcactgctgttcacgagattggccattccttaggtcttggccattctagtgatccaaaggctgtaatgttccccacctacaaatatgtcgacatcaacacatttcgcctctctgctgatgacatacgtggcattcagtccctgtatggagacccaaaagagaaccaacgcttgccaaatcctgacaattcagaaccagctctctgtgaccccaatttgagttttgatgctgtcactaccgtgggaaataagatctttttcttcaaagacaggttcttctggctgaaggtttctgagagaccaaagaccagtgttaatttaatttcttccttatggccaaccttgccatctggcattgaagctgcttatgaaattgaagccagaaatcaagtttttctttttaaagatgacaaatactggttaattagcaatttaagaccagagccaaattatcccaagagcatacattcttttggttttcctaactttgtgaaaaaaattgatgcagctgtttttaacccacgtttttataggacctacttctttgtagataaccagtattggaggtatgatgaaaggagacagatgatggaccctggttatcccaaactgattaccaagaacttccaaggaatcgggcctaaaattgatgcagtcttctattctaaaaacaaatactactatttcttccaaggatctaaccaatttgaatatgacttcctactccaacgtatcaccaaaacactgaaaagcaatagctggtttggttgttagaaatggtgtaattaatggtttttgttagttcacttcagcttaataagtatttattgcatatttgctatgtcctcagtgtaccactacttagagatatgtatcataaaaataaaatctgtaaaccataggtaatgattatataaaatacataatatttttcaattttgaaaactctaattgtccattcttgcttgactctactattaagtttgaaaatagttaccttcaaagcaagataattctatttgaagcatgctctgtaagttgcttcctaacatccttggactgagaaattatacttacttctggcataactaaaattaagtatatatattttggctcaaataaaattg

SEQ ID NO: 13 - DNA, 1454 bp, Homo sapiens
accagcggcagaccacaggcagggcagaggcacgtctgggtcccctccctccttcctatcggcgactcccagatcctggccatgagagctccgcacctccacctctccgccgcctctggcgcccgggctctggcgaagctgctgccgctgctgatggcgcaactctgggccgcagaggcggcgctgctcccccaaaacgacacgcgcttggaccccgaagcctatggcgccccgtgcgcgcgcggctcgcagccctggcaggtctcgctcttcaacggcctctcgttccactgcgcgggtgtcctggtggaccagagttgggtgctgacggccgcgcactgcggaaacaagccactgtgggctcgagtaggggatgatcacctgctgcttcttcagggcgagcagctccgccggacgactcgctctgttgtccatcccaagtaccaccagggctcaggccccatcctgccaaggcgaacggatgagcacgatctcatgttgctaaagctggccaggcccgtagtgccggggccccgcgtccgggccctgcagcttccctaccgctgtgctcagcccggagaccagtgccaggttgctggctggggcaccacggccgcccggagagtgaagtacaacaagggcctgacctgctccagcatcactatcctgagccctaaagagtgtgaggtcttctaccctggcgtggtcaccaacaacatgatatgtgctggactggaccggggccaggacccttgccagagtgactctggaggccccctggtctgtgacgagaccctccaaggcatcctctcgtggggtgtttacccctgtggctctgcccagcatccagctgtctacacccagatctgcaaatacatgtcctggatcaataaagtcatacgctccaactgatccagatgctacgctccagctgatccagatgttatgctcctgctgatccagatgcccagaggctccatcgtccatcctcttcctccccagtcggctgaactctccccttgtctgcactgttcaaacctctgccgccctccacacctctaaacatctcccctctcacctcattcccccacctatccccattctctgcctgtactgaagctgaaatgcaggaagtggtggcaaaggtttattccagagaagccaggaagccggtcatcacccagcctctgagagcagttactggggtcacccaacctgacttcctctgccactccccgctgtgtgactttgggcaagccaagtgccctctctgaacctcagtttcctcatctgcaaaatgggaacaatgacgtgcctacctcttagacatgttgtgaggagactatgatataacatgtgtatgtaaatcttcatgtgattgtcatgtaaggcttaacacagtgggtggtgagttctgactaaaggttacctgttgtcgtgaaaaaaaaaaaaaa

SEQ ID NO: 14 - DNA, 2493 bp, Homo sapiens
acattggtaaggtgttttcccccattgaaactaatattttctattttcaagaaaaaagcagcaagcctcggcagcagtcaatcctccagaacctatgctggtggaacagcctcggccaccaaggtgtcagcttcctctggtgcaaccagcaagtcttccagtatgaatcccacagaaaccaaggccattccagtcagccaacagatggaaggaccacatcttcctaacaagaaaaaacacaaaaaacaggctgtaaaaacagaacctgagaagaagtcacagtcaaccaagctgtctgtggttcatgagaaaaaatcccaagaaggaaagccaaaagaacacacagagccaaaaagcctacccaagcaggcatcagatacaggaagtaacgatgctcacaataaaaaagcagtttccagatcagctgaacagcagccatcagagaaatcaacagaaccaaagactaaaccacaagacatgatttctgctggtggagagagtgttgctggtatcactgcaatatctggcaagccgggtgacaagaaaaaagaaaagaaatcattaaccccagctgtgccagttgaatctaaaccggataaaccatcgggaaagtcaggcatggatgctgctttggatgacttaatagatactttaggaggacctgaagaaactgaagaagaaaatacaacgtatactggaccagaagtttcagatccaatgagttccacctacatagaggaattgggtaaaagagaagtcacaattcctccaaaatatagggaactattggctaaaaaggaagggatcacagggcctcctgcagactcttcaaaacccatagggccagatgatgctatagacgccttgtcatctgacttcacctgtgggtcgcctacagctgctggaaagaaaactgaaaaagaggaatctacagaagttttaaaagctcagtcagcagggacagtcagaagtgctgctccaccccaagagaagaaaagaaaggtggagaaggatacaatgagtgatcaagcactcgaggctctgtcggcttcactgggcacccggcaagcagaacctgagctcgacctccgctcaattaaggaagtcgatgaggcaaaagctaaagaagaaaaactagagaagtgtggtgaggatgatgaaacaatcccatctgagtacagattaaaaccagccacggataaagatggaaaaccactattgccagagcctgaagaaaaacccaagcctcggagtgaatcagaactcattgatgaactttcagaagattttgaccggtctgaatgtaaagagaaaccatctaagccaactgaaaagacagaagaatctaaggccgctgctccagctcctgtgtcggaggctgtgtctcggacctccatgtgtagtatacagtcagcaccccctgagccggctaccttgaagggcacagtgccagatgatgctgtagaagccttggctgatagcctggggaaaaaggaagcagatccagaagatggaaaacctgtgatggataaagtcaaggagaaggccaaagaagaagaccgtgaaaagcttggtgaaaaagaagaaacaattcctcctgattatagattagaagaggtcaaggataaagatggaaagccactcctgccaaaagagtctaaggaacagcttccacccatgagtgaagacttccttctggatgctttgtctgaggacttctctggtccacaaaatgcttcatctcttaaatttgaagatgctaaacttgctgctgccatctctgaagtggtttcccaaaccccagcttcaacgacccaagctggagccccaccccgtgatacctcgcagagtgacaaagacctcgatgatgccttggataaactctctgacagtctaggacaaaggcagcctgacccagatgagaacaaaccaatgggagataaagtaaaggaaaaagctaaagctgaacatagagacaagcttggagaaagagatgacactatcccacctgaatacagacatctcctggatgataatggacaggacaaaccagtgaagccacctacaaagaaatcagaggattcaaagaaacctgcagatgaccaagaccccattgatgctctctcaggagatctggacagctgtccctccactacagaaacctcacagaacacagcaaaggataagtgcaagaaggctgcttccagctccaaagcacctaagaatggaggtaaagcgaaggattcagcaaagacaacagaggaaacttccaagccaaaagatgactaaagaaatacaagttaaggtatctggtatctgcatgtaaaatcttcagctggtggatggtgacttttgaagaacaaaaggctttggcaacagaaaacaattgttctgggtgatttctagaatggtttttgttgagtctctgaacatcctaaatattggtttgttattctttccagaaagaaaatgaatttgactggttcggaattc

SEQ ID NO: 15 - DNA, 782 bp, Homo sapiens
gggctccctgcctcgggctctcaccctcctctcctgcagctccagctttgtgctctgcctctgaggagaccatggcccagtatctgagtaccctgctgctcctgctggccaccctagctgtggccctggcctggagccccaaggaggaggataggataatcccgggtggcatctataacgcagacctcaatgatgagtgggtacagcgtgcccttcacttcgccatcagcgagtataacaaggccaccaaagatgactactacagacgtccgctgcgggtactaagagccaggcaacagaccgttgggggggtgaattacttcttcgacgtagaggtgggccgcaccatatgtaccaagtcccagcccaacttggacacctgtgccttccatgaacagccagaactgcagaagaaacagttgtgctctttcgagatctacgaagttccctgggagaacagaaggtccctggtgaaatccaggtgtcaagaatcctagggatctgtgccaggccattcgcaccagccaccacccactcccaccccctgtagtgctcccacccctggactggtggcccccaccctgcgggaggcctccccatgtgcctgcgccaagagacagacagagaaggctgcaggagtcctttgttgctcagcagggcgctctgccctccctccttccttcttgcttctaatagccctggtacatggtacacacccccccacctcctgcaattaaacagtagcatcgcctccctctgaaaaaaaaaaaaaaaaaaaaaaa

SEQ ID NO: 16 - DNA, 2326 bp, Homo sapiens
ccatcctaatacgactcactatagggctcgagcggccgcccgggcaggtacgccctatacaacttggcttcacatacttttacactaactttatatgatttttaaaaactggtctgatcggacttctcgtcctgggacactgtttactggagtctggccggctctccgtgctcctcttggtacctcattttggggagaaccttaaacccactcgagcagataatctccgccttgaccggtgccaccaaagaagggttggaaccatgtggacttttctgggcattgccactttcacctatttttataagaagttcggggacttcatcactttggccaacagggaggtcctgttgtgcgtgctggtgttcctctcgctgggcctggtgctctcctaccgctgtcgccaccgaaacgggggtctcctcgggcgccagcggagcggctcccagttcgccctcttctcggatattctctcaggcctgcctttcattggcttcttctgggccaaatccccccctgaatcagaaaataaggagcagctcggggccaggaggcgcagaaaaggaaccaatatttcagaaacaagcttaataggaacagctgcctgtacatcaacatcttctcagaatgacccagaagttatcatcgtgggagctggcgtgcttggctctgctttggtagctgtgctttccagagatggaagaaaggtgacagtcattgagagagacttaaaagagcctgacagaatagttggagaattcctgcagccgggtggttatcatgttctcaaagaccttggtcttggagatacagtggaaggtcttgatgcccaggttgtaaatggttacatgattcatgatcaggaaagcaaatcagaggttcagattccttaccctctgtcagaaaacaatcaagtgcagagtggaagagctttccatcacggaagattcatcatgagtctccggaaagcagctatggcagagcccaatgcaaagtttattgaaggtgttgtgttacagttattagaggaagatgatgttgtgatgggagttcagtacaaggataaagagactggagatatcaaggaactccatgctccactgactgttgttgcagatgggcttttctccaagttcaggaaaagcctggtctccaataaagtttctgtatcatctcattttgttggctttcttatgaagaatgcaccacagtttaaagcaaatcatgctgaacttattttagctaacccgagtccagttctcatctaccggatttcatccagtgaaactcgagtacttgttgacattagaggagaaatgccaaggaatttaagagaatacatggttgaaaaaatttacccacaaatacctgatcacctgaaagaaccattcttagaagccactgacaattctcatctgaggtccatgctagcaagcttccttcctccttcatcagtgaagaaacgaggtgttcttcttttgggagacgcatataatatgaggcatccacttactggtggaggaatgactgttgcttttaaagatataaaactatggagaaaactgctaaagggtatccctgacctttatgatgatgcagctattttcgaggccaacaaatcattttactgggcaagaaaaacatctcattcctttgtcgtgaatatccttgctcaggctctttatgaattattttctgccacagatgattccctgcatcaactaagaaaagcctgttttctttatttcaaacttggtggcgaatgtgttgcgggtcctgttgggctgctttctgtattgtctcctaaccctctagctttaattggacacttctttgctgttgcaatctatgccgtgtatttttgctttaagtcagaaccttggattacaaaacctcgagcccttctcagtagtagtgctgtattgtacaaagcgtgttctgtaatatttcctctaatttactcagaaatgaagtatatggttcattaagcttaaaggggaaccatttgtgaatgaatatttggaacttaccaagtcctaagagacttttggaagaggatatatatagcatagtaccataccacttataaagtggaaactcttggaccaagatttggattaatttgtttttgaagttttttgtatataaatatgtaaatacatgctttaatttgcaatttaaaatgaaggggttaaataagttagacatttgaaagaaatgattgttaccataaattagtgctaatgctgaggagaactacagtttttcttttgaatttagtatttgagatgagttgttgggacatgcaaataaaatgaagaatgac

SEQ ID NO: 17 - DNA, 3432 bp, Homo sapiens
actccagcgcgcggctacctacgcttggtgcttgctttctccagccatcggagaccagagccgccccctctgctcgagaaaggggctcagcggcggcggaagcggagggggaccaccgtggagagcgcggtcccagcccggccactgcggatccctgaaaccaaaaagctcctgctgcttctgtaccccgcctgtccctcccagctgcgcagggccccttcgtgggatcatcagcccgaagacagggatggagaggcctctgtgctcccacctctgcagctgcctggctatgctggccctcctgtcccccctgagcctggcacagtatgacagctggccccattaccccgagtacttccagcaaccggctcctgagtatcaccagccccaggcccccgccaacgtggccaagattcagctgcgcctggctgggcagaagaggaagcacagcgagggccgggtggaggtgtactatgatggccagtggggcaccgtgtgcgatgacgacttctccatccacgctgcccacgtcgtctgccgggagctgggctatgtggaggccaagtcctggactgccagctcctcctacggcaagggagaagggcccatctggttagacaatctccactgtactggcaacgaggcgacccttgcagcatgcacctccaatggctggggcgtcactgactgcaagcacacggaggatgtcggtgtggtgtgcagcgacaaaaggattcctgggttcaaatttgacaattcgttgatcaaccagatagagaacctgaatatccaggtggaggacattcggattcgagccatcctctcaacctaccgcaagcgcaccccagtgatggagggctacgtggaggtgaaggagggcaagacctggaagcagatctgtgacaagcactggacggccaagaattcccgcgtggtctgcggcatgtttggcttccctggggagaggacatacaataccaaagtgtacaaaatgtttgcctcacggaggaagcagcgctactggccattctccatggactgcaccggcacagaggcccacatctccagctgcaagctgggcccccaggtgtcactggaccccatgaagaatgtcacctgcgagaatgggctgccggccgtggtgagttgtgtgcctgggcaggtcttcagccctgacggaccctcgagattccggaaagcatacaagccagagcaacccctggtgcgactgagaggcggtgcctacatcggggagggccgcgtggaggtgctcaaaaatggagaatgggggaccgtctgcgacgacaagtgggacctggtgtcggccagtgtggtctgcagagagctgggctttgggagtgccaaagaggcagtcactggctcccgactggggcaagggatcggacccatccacctcaacgagatccagtgcacaggcaatgagaagtccattatagactgcaagttcaatgccgagtctcagggctgcaaccacgaggaggatgctggtgtgagatgcaacacccctgccatgggcttgcagaagaagctgcgcctgaacggcggccgcaatccctacgagggccgagtggaggtgctggtggagagaaacgggtcccttgtgtgggggatggtgtgtggccaaaactggggcatcgtggaggccatggtggtctgccgccagctgggcctgggattcgccagcaacgccttccaggagacctggtattggcacggagatgtcaacagcaacaaagtggtcatgagtggagtgaagtgctcgggaacggagctgtccctggcgcactgccgccacgacggggaggacgtggcctgcccccagggcggagtgcagtacggggccggagttgcctgctcagaaaccgcccctgacctggtcctcaatgcggagatggtgcagcagaccacctacctggaggaccggcccatgttcatgctgcagtgtgccatggaggagaactgcctctcggcctcagccgcgcagaccgaccccaccacgggctaccgccggctcctgcgcttctcctcccagatccacaacaatggccagtccgacttccggcccaagaacggccgccacgcgtggatctggcacgactgtcacaggcactaccacagcatggaggtgttcacccactatgacctgctgaacctcaatggcaccaaggtggcagagggccacaaggccagcttctgcttggaggacacagaatgtgaaggagacatccagaagaattacgagtgtgccaacttcggcgatcagggcatcaccatgggctgctgggacatgtaccgccatgacatcgactgccagtgggttgacatcactgacgtgccccctggagactacctgttccaggttgttattaaccccaacttcgaggttgcagaatccgattactccaacaacatcatgaaatgcaggagccgctatgacggccaccgcatctggatgtacaactgccacataggtggttccttcagcgaagagacggaaaaaaagtttgagcacttcagcgggctcttaaacaaccagctgtccccgcagtaaagaagcctgcgtggtcaactcctgtcttcaggccacaccacatcttccatgggacttccccccaacaactgagtctgaacgaatgccacgtgccctcacccagcccggcccccaccctgtccagacccctacagctgtgtctaagctcaggaggaaagggaccctcccatcattcatggggggctgctacctgacccttggggcctgagaaggccttgggggggtggggtttgtccacagagctgctggagcagcaccaagagccagtcttgaccgggatgaggcccacagacaggttgtcatcagcttgtcccattcaagccaccgagctcaccacagacacagtggagccgcgctcttctccagtgacacgtggacaaatgcgggctcatcagcccccccagagagggtcaggccgaaccccatttctcctcctcttaggtcattttcagcaaacttgaatatctagacctctcttccaatgaaaccctccagtctattatagtcacatagataatggtgccacgtgttttctgatttggtgagctcagacttggtgcttccctctccacaacccccaccccttgtttttcaagatactattattatattttcacagacttttgaagcacaaatttattggcatttaatattggacatctgggcccttggaagtacaaatctaaggaaaaaccaacccactgtgtaagtgactcatcttcctgttgttccaattctgtgggtttttgattcaacggtgctataaccagggtcctgggtgacagggcgctcactgagcaccatgtgtcatcacagacacttacacatacttgaaacttggaataaaagaaagatttatg

SEQ ID NO: 18 - DNA, 1382 bp, Homo sapiens
agaacatccggcgaagaagctcaggagcggtggcgacgaggagcggcgcgagaagccgcccaagcggaagatcgtgctgctcatggcctattcgggcaagggctaccacggcatgcagaggaatgtcgggtcctcacaattcaaaacaattgaagatgacttggtgtccgccctcgtccggtcaggctgtattcctgaaaatcatggtgaggacatgaggaaaatgtccttccagcgctgcgcccggacagacaagggtgtgtccgcagccggccaggtggtatccctgaaggtgtggctgattgacgacattctagaaaagatcaacagccaccttccctctcacattcggattctgggactgaagcgggtcacgggcgggtttaactccaagaacagatgtgatgccaggacctattgctacctgctgcccacgtttgcctttgcgcacaaggaccgggacgttcaggatgagacctaccgcctgagcgccgagacgctgcagcaggtcaacaggctcctggcctgctacaagggcacgcacaacttccacaatttcacctcgcagaaggggccgcaggatcccagtgcctgccgctacatcctggagatgtactgcgaggaaccctttgtgcgggagggcctggagtttgcggtgatcagggtgaagggccagagcttcatgatgcatcagatccggaagatggtcggcctggtggtggccattgtgaagggttatgcccctgagagcgtgctggagcgcagctggggcacagagaaggtggacgtgcccaaggcgcccggactcggcctggtcctggagagggtgcacttcgagaagtacaaccagcgctttggcaacgatgggctgcatgagccgctggactgggcgcaggaggaaggaaaggtcgcagccttcaaggaggagcacatctaccccaccatcatcggcaccgagcgggacgaacgctccatggcccagtggctgagcaccttgcccatccacaacttcagtgccaccgctctcacggcaggtggcacgggcgccaaggtgcccagtcccctggaaggcagtgaaggggacggagacactgactgaggcgatgggagctgcccaccagagtgcctctgagcagctcacagtgtgtgcccagatgtgccacccctgtgggcagcaagaagctgggatcgctgcagccatgttttccggccatgccggcgttgtaacctcaggaccttcccttgtaggaacagcctttctcgaatctgttttcagctcttgcattgcatagatgaacctcagcatgtaaagaactatttttttaaagaagtgattttcttattaaacaagtacaaattttgcttagtcaaaaaaaaaaaaa

SEQ ID NO: 19 - DNA, 1867 bp, Homo sapiens
gaagctcccaactcgccggcctggccacgggatggcccccaaattcccagactctgtggaggagctccgcgccgccggcaatgagagtttccgcaacggccagtacgccgaggcctccgcgctctacggccgcgcgctgcgggtgctgcaggcgcaaggttcttcagacccagaagaagaaagtgttctctactccaaccgagcagcatgtcactggaagaatggaaactgcagagactgcatcaaagattgcacttcagcactggccttggttcccttcagcattaagcccctgctgcggcgagcatctgcttatgaggctctggagaagtaccctatggcctatgttgactataagactgtgctgcagattgatgataatgtgacgtcagccgtagaaggcatcaacagaatgaccagagctctcatggactcgcttgggcctgagtggcgcctgaagctgccctcattccccttggtgcctgtgtcagctcagaagaggtggaatttcttgccttcggagaaccacaaagagatggctaaaagcaaatccaaagaaaccacagctacaaagaacagagtgccttctgctggggatgtggagaaagccagagttctgaaggaagaaggcaatgagcttgtaaagaagggaaaccataagaaagctattgagaagtacagtgaaagcctcttgtgtagtaacctggaatctgccacgtacagcaacagagcactctgctatttggtcctgaagcagtacacagaagcagtgaaggactgcacagaagccctcaagctggatggaaagaacgtgaaggcattctacagacgggctcaagcccacaaagcactcaaggactataaatccagctttgcagacatcagcaacctcctacagattgagcctaggaatggtcctgcacagaagttgcggcaggaagtgaagcagaacctacactaaaaacccaacagggcaactggaacccctgcctgaccttacccagagaagccatgggccacctgctctgtgcccgctcctgaaacccagcatgccccaagtgagctctgaagccccctcctcaatcccttgatggcctcccaccctgtaagaggctttgcttgttcaaattaaactcagtgtagtcaaacacagacatggttgttgcaccagaaaggtccccactagagctaagcgtgaagctgaagctctgtccctattcccccagcccagctagctgatcacaccaacagatcctcatcagcaaagcatttggctttgtcctgcccaagtgggctgcagactgagtgctgcccttgtagcttccccagaccccaactcactgcagttcatctgaacaacctgagctcctgggccggggtggaaggagggggataaacctaaggccctgatccaaagcagcctgttgagctggttctccagggctgcagtctctccaggtgtacagctgtccctgccctgtcctgtccttgcacagtctcctatgtctgagccccagtgccttctgttcgggccctcctttggtgggaaaggcagagccctgacccttgaatggttgtccttgactctgtgctgctgccttctgcagagaggcacctaagctgtttaaagagcccagtgattgtggctgctcctcctagaggtgggagggggcaagaggcctccttggtcagtgtccatgctttctgggcagggacttggttttttgttccaacagtggccttctccgggcttcatagttctttgtaatatgttgaagttaatttgaattgactgattttgttgaactgtgtgtttaagctgttgcattaaaaagctttcttctacatcaaaaaaaaaaaaaaaaaa

SEQ ID NO: 20 - DNA, 3195 bp, Homo sapiens
agaggcttccctggctggtgcctgagcccggcgtccctcgccccccgccctccccgcatccctctcctccctcgcgcctggccctgtggctcttcctccctccctccttccccccccccccacccctcgcccgctgcctccctcggcccagccagctgtgccggcgtttgttggctgccctgcgcccggccctccagccagccttctgccggccccgccgcgatggaggtgccccagccggagcccgcgccaggctcggctctcagtccagcaggcgtgtgcggtggcgcccagcgtccgggccacctcccgggcctcctgctgggatctcatggcctcctggggtccccggtgcgggcggccgcttcctcgccggtcaccaccctcacccagaccatgcacgacctcgccgggctcggcagccgcagccgcctgacgcacctatccctgtctcgacgggcatccgaatcctccctgtcgtctgaatcctccgaatcttctgatgcaggtctctgcatggattcccccagccctatggacccccacatggcggagcagacgtttgaacaggccatccaggcagccagccggatcattcgaaacgagcagtttgccatcagacgcttccagtctatgccggtgaggctgctgggccacagccccgtgcttcggaacatcaccaactcccaggcgcccgacggccggaggaagagcgaggcgggcagtggagctgccagcagctctggggaagacaaggagaatgtgcgcttctggaaggccggggtgggagctctccgggaagaggagggggcatgctggggtggttccctggcatgtgaggaccctcctctcccatcttggctgcaggatggatttgtcttcaagatgccatggaagcccacacatcccagctccacccatgctctggcagagtgggccagccgcagggaagcctttgcccagagacccagctcggcccccgacctgatgtgtctcagtcctgaccggaagatggaagtggaggagctcagccccctggccctaggtcgcttctctctgacccctgcagagggggatactgaggaagatgatggatttgtggacatcctagagagtgacttaaaggatgatgatgcagttcccccaggcatggagagtctcattagtgccccactggtcaagaccttggaaaaggaagaggaaaaggacctcgtcatgtacagcaagtgccagcggctcttccgctctccgtccatgccctgcagcgtgatccggcccatcctcaagaggctggagcggccccaggacagggacacgcccgtgcagaataagcggaggcggagcgtgacccctcctgaggagcagcaggaggctgaggaacctaaagcccgcgtcctccgctcaaaatcactgtgtcacgatgagatcgagaacctcctggacagtgaccaccgagagctgattggagattactctaaggccttcctcctacagacagtagacggaaagcaccaagacctcaagtacatctcaccagaaacgatggtggccctattgacgggcaagttcagcaacatcgtggataagtttgtgattgtagactgcagatacccctatgaatatgaaggcgggcacatcaagactgcggtgaacttgcccctggaacgcgacgccgagagcttcctactgaagagccccatcgcgccctgtagcctggacaagagagtcatcctcattttccactgtgaattctcatctgagcgtgggccccgcatgtgccgtttcatcagggaacgagaccgtgctgtcaacgactaccccagcctctactaccctgagatgtatatcctgaaaggcggctacaaggagttcttccctcagcacccgaacttctgtgaaccccaggactaccggcccatgaaccacgaggccttcaaggatgagctaaagaccttccgcctcaagactcgcagctgggctggggagcggagccggcgggagctctgtagccggctgcaggaccagtgaggggcctgcgccagtcctgctacctcccttgcctttcgaggcctgaagccagctgccctatgggcctgccgggctgagggcctgctggaggcctcaggtgctgtccatgggaaagatggtgtggtgtcctgcctgtctgccccagcccagattcccctgtgtcatcccatcattttccatatcctggtgccccccacccctggaagagcccagtctgttgagttagttaagttgggttaataccagcttaaaggcagtattttgtgtcctccaggagcttcttgtttccttgttagggttaacccttcatcttcctgtgtcctgaaacgctcctttgtgtgtgtgtcagctgaggctggggagagccgtggtccctgaggatgggtcagagctaaactccttcctggcctgagagtcagctctctgccctgtgtacttcccgggccagggctgcccctaatctctgtaggaaccgtggtatgtctgccatgttgcccctttctcttttcccctttcctgtcccaccatacgagcacctccagcctgaacagaagctcttactctttcctatttcagtgttacctgtgtgcttggtctgtttgactttacgcccatctcaggacacttccgtagactgtttaggttcccctgtcaaatatcagttacccactcggtcccagttttgttgccccagaaagggatgttattatccttgggggctcccagggcaagggttaaggcctgaatcatgagcctgctggaagcccagcccctactgctgtgaaccctggggcctgactgctcagaacttgctgctgtcttgttgcggatggatggaaggttggatggatgggtggatggccgtggatggccgtggatgcgcagtgccttgcatacccaaaccaggtgggagcgttttgttgagcatgacacctgcagcaggaatatatgtgtgcctatttgtgtggacaaaaatatttacacttagggtttggagctattcaagaggaaatgtcacagaagcagctaaaccaaggactgagcaccctctggattctgaatctcaagatgggggcagggctgtgcttgaaggccctgctgagtcatctgttagggccttggttcaataaagcactgagcaagttgagaaaaaaaaaaaaaaaaaaa

SEQ ID NO: 21 - DNA, 2724 bp, Homo sapiens
atggacacctcccggctcggtgtgctcctgtccttgcctgtgctgctgcagctggcgaccgggggcagctctcccaggtctggtgtgttgctgaggggctgccccacacactgtcattgcgagcccgacggcaggatgttgctcagggtggactgctccgacctggggctctcggagctgccttccaacctcagcgtcttcacctcctacctagacctcagtatgaacaacatcagtcagctgctcccgaatcccctgcccagtctccgcttcctggaggagttacgtcttgcgggaaacgctctgacatacattcccaagggagcattcactggcctttacagtcttaaagttcttatgctgcagaataatcagctaagacacgtacccacagaagctctgcagaatttgcgaagccttcaatccctgcgtctggatgctaaccacatcagctatgtgcccccaagctgtttcagtggcctgcattccctgaggcacctgtggctggatgacaatgcgttaacagaaatccccgtccaggcttttagaagtttatcggcattgcaagccatgaccttggccctgaacaaaatacaccacataccagactatgcctttggaaacctctccagcttggtagttctacatctccataacaatagaatccactccctgggaaagaaatgctttgatgggctccacagcctagagactttagatttaaattacaataaccttgatgaattccccactgcaattaggacactctccaaccttaaagaactaggatttcatagcaacaatatcaggtcgatacctgagaaagcatttgtaggcaacccttctcttattacaatacatttctatgacaatcccatccaatttgttgggagatctgcttttcaacatttacctgaactaagaacactgactctgaatggtgcctcacaaataactgaatttcctgatttaactggaactgcaaacctggagagtctgactttaactggagcacagatctcatctcttcctcaaaccgtctgcaatcagttacctaatctccaagtgctagatctgtcttacaacctattagaagatttacccagtttttcagtctgccaaaagcttcagaaaattgacctaagacataatgaaatctacgaaattaaagttgacactttccagcagttgcttagcctccgatcgctgaatttggcttggaacaaaattgctattattcaccccaatgcattttccactttgccatccctaataaagctggacctatcgtccaacctcctgtcgtcttttcctataactgggttacatggtttaactcacttaaaattaacaggaaatcatgccttacagagcttgatatcatctgaaaactttccagaactcaaggttatagaaatgccttatgcttaccagtgctgtgcatttggagtgtgtgagaatgcctataagatttctaatcaatggaataaaggtgacaacagcagtatggacgaccttcataagaaagatgctggaatgtttcaggctcaagatgaacgtgaccttgaagatttcctgcttgactttgaggaagacctgaaagcccttcattcagtgcagtgttcaccttccccaggccccttcaaaccctgtgaacacctgcttgatggctggctgatcagaattggagtgtggaccatagcagttctggcacttacttgtaatgctttggtgacttcaacagttttcagatcccctctgtacatttcccccattaaactgttaattggggtcatcgcagcagtgaacatgctcacgggagtctccagtgccgtgctggctggtgtggatgcgttcacttttggcagctttgcacgacatggtgcctggtgggagaatggggttggttgccatgtcattggttttttgtccatttttgcttcagaatcatctgttttcctgcttactctggcagccctggagcgtgggttctctgtgaaatattctgcaaaatttgaaacgaaagctccattttctagcctgaaagtaatcattttgctctgtgccctgctggccttgaccatggccgcagttcccctgctgggtggcagcaagtatggcgcctcccctctctgcctgcctttgccttttggggagcccagcaccatgggctacatggtcgctctcatcttgctcaattccctttgcttcctcatgatgaccattgcctacaccaagctctactgcaatttggacaagggagacctggagaatatttgggactgctctatggtaaaacacattgccctgttgctcttcaccaactgcatcctaaactgccctgtggctttcttgtccttctcctctttaataaaccttacatttatcagtcctgaagtaattaagtttatccttctggtggtagtcccacttcctgcatgtctcaatccccttctctacatcttgttcaatcctcactttaaggaggatctggtgagcctgagaaagcaaacctacgtctggacaagatcaaaacacccaagcttgatgtcaattaactctgatgatgtcgaaaaacagtcctgtgactcaactcaagccttggtaacctttaccagctccagcatcacttatgacctgcctcccagttccgtgccatcaccagcttatccagtgactgagagctgccatctttcctctgtggcatttgtcccatgtctctaa

SEQ ID NO: 22 - DNA, 4445 bp, Homo sapiens
cgctccccgctcccgtggctgccgccgccccggggaagaagagacaggggtggggtttgggggaagcgagagaggaggggagagaccctggccaggctggagcctggattcgaggggaggagggacgggaggaggagaaaggtggaggagaagggaggggggagcggggaggagcggccgggcctggggccttgaggcccggggagagccggggagccgggcccgcgcgccgagatgttgctgctgctgttactggcgccactcttcctccgccccccgggcgcgggcggggcgcagacccccaacgccacctcagaaggttgccagatcatacacccgccctgggaagggggcatcaggtaccggggcctgactcgggaccaggtgaaggctatcaacttcctgccagtggactatgagattgagtatgtgtgccggggggagcgcgaggtggtggggcccaaggtccgcaagtgcctggccaacggctcctggacagatatggacacacccagccgctgtgtccgaatctgctccaagtcttatttgaccctggaaaatgggaaggttttcctgacgggtggggacctcccagctctggacggagcccgggtggatttccggtgtgaccccgacttccatctggtgggcagctcccggagcatctgtagtcagggccagtggagcacccccaagccccactgccaggtgaatcgaacgccacactcagaacggcgcgcagtgtacatcggggcactgtttcccatgagcgggggctggccagggggccaggcctgccagcccgcggtggagatggcgctggaggacgtgaatagccgcagggacatcctgccggactatgagctcaagctcatccaccacgacagcaagtgtgatccaggccaagccaccaagtacctatatgagctgctctacaacgaccctatcaagatcatccttatgcctggctgcagctctgtctccacgctggtggctgaggctgctaggatgtggaacctcattgtgctttcctatggctccagctcaccagccctgtcaaaccggcagcgtttccccactttcttccgaacgcacccatcagccacactccacaaccctacccgcgtgaaactctttgaaaagtggggctggaagaagattgctaccatccagcagaccactgaggtcttcacttcgactctggacgacctggaggaacgagtgaaggaggctggaattgagattactttccgccagagtttcttctcagatccagctgtgcccgtcaaaaacctgaagcgccaggatgcccgaatcatcgtgggacttttctatgagactgaagcccggaaagttttttgtgaggtgtacaaggagcgtctctttgggaagaagtacgtctggttcctcattgggtggtatgctgacaattggttcaagatctacgacccttctatcaactgcacagtggatgagatgactgaggcggtggagggccacatcacaactgagattgtcatgctgaatcctgccaatacccgcagcatttccaacatgacatcccaggaatttgtggagaaactaaccaagcgactgaaaagacaccctgaggagacaggaggcttccaggaggcaccgctggcctatgatgccatctgggccttggcactggccctgaacaagacatctggaggaggcggccgttctggtgtgcgcctggaggacttcaactacaacaaccagaccattaccgaccaaatctaccgggcaatgaactcttcgtcctttgagggtgtctctggccatgtggtgtttgatgccagcggctctcggatggcatggacgcttatcgagcagcttcagggtggcagctacaagaagattggctactatgacagcaccaaggatgatctttcctggtccaaaacagataaatggattggagggtcccccccagctgaccagaccctggtcatcaagacattccgcttcctgtcacagaaactctttatctccgtctcagttctctccagcctgggcattgtcctagctgttgtctgtctgtcctttaacatctacaactcacatgtccgttatatccagaactcacagcccaacctgaacaacctgactgctgtgggctgctcactggctttagctgctgtcttccccctggggctcgatggttaccacattgggaggaaccagtttcctttcgtctgccaggcccgcctctggctcctgggcctgggctttagtctgggctacggttccatgttcaccaagatttggtgggtccacacggtcttcacaaagaaggaagaaaagaaggagtggaggaagactctggaaccctggaagctgtatgccacagtgggcctgctggtgggcatggatgtcctcactctcgccatctggcagatcgtggaccctctgcaccggaccattgagacatttgccaaggaggaacctaaggaagatattgacgtctctattctgccccagctggagcattgcagctccaggaagatgaatacatggcttggcattttctatggttacaaggggctgctgctgctgctgggaatcttccttgcttatgagaccaagagtgtgtccactgagaagatcaatgatcaccgggctgtgggcatggctatctacaatgtggcagtcctgtgcctcatcactgctcctgtcaccatgattctgtccagccagcaggatgcagcctttgcctttgcctctcttgccatagttttctcctcctatatcactcttgttgtgctctttgtgcccaagatgcgcaggctgatcacccgaggggaatggcagtcggaggcgcaggacaccatgaagacagggtcatcgaccaacaacaacgaggaggagaagtcccggctgttggagaaggagaaccgtgaactggaaaagatcattgctgagaaagaggagcgtgtctctgaactgcgccatcaactccagtctcggcagcagctccgctcccggcgccacccaccgacacccccagaaccctctgggggcctgcccaggggaccccctgagccccccgaccggcttagctgtgatgggagtcgagtgcatttgctttataagtgagggtagggtgagggaggacaggccagtagggggagggaaagggagaggggaagggcaggggactcaggaagcagggggtccccatccccagctgggaagaacatgctatccaatctcatctcttgtaaatacatgtccccctgtgagttctgggctgatttgggtctctcatacctctgggaaacagacctttttctctcttactgcttcatgtaattttgtatcacctcttcacaatttagttcgtacctggcttgaagctgctcactgctcacacgctgcctcctcagcagcctcactgcatctttctcttcccatgcaacaccctcttctagttaccacggcaacccctgcagctcctctgcctttgtgctctgttcctgtccagcaggggtctcccaacaagtgctctttccaccccaaaggggcctctccttttctccactgtcataatctctttccatcttacttgcccttctatactttctcacatgtggctccccctgaattttgcttcctttgggagctcattcttttcgccaaggctcacatgctccttgcctctgctctgtgcactcacgctcagcacacatgcatcctcccctctcctgcgtgtgcccactgaacatgctcatgtgtacacacgcttttcccgtatgctttcttcatgttcagtcacatgtgctctcgggtgccctgcattcacagctacgtgtgcccctctcatggtcatgggtctgcccttgagcgtgtttgggtaggcatgtgcaatttgtctagcatgctgagtcatgtctttcctatttgcacacgtccatgtttatccatgtactttccctgtgtaccctccatgtaccttgtgtactttcttcccttaaatcatggtattcttctgacagagccatatgtaccctaccctgcacattgttatgcacttttccccaattcatgtttggtggggccatccacaccctctccttgtcacagaatctccatttctgctcagattccccccatctccattgcattcatgtactaccctcagtctacactcacaatcatcttctcccaagactgctcccttttgttttgtgtttttttgaggggaattaaggaaaaataagtgggggcaggtttggagagctgcttccagtggatagttgatgagaatcctgaccaaaggaaggcacccttgactgttgggatagacagatggacctatggggtgggaggtggtgtccctttcacactgtggtgtctcttggggaaggatctccccgaatctcaataaaccagtgaacagtgtgactcggcaaaaaaaaaaa

SEQ ID NO: 23 - DNA, 1843 bp, Homo sapiens
ttcccctcctggtgttgccccaaagcctaggagcttggcagggtcccacacaggatggtccttgtaggagacaggtttgacaagttgctgaggtgcctgatgggccaggcacttgtcatgaaatgagtttgcatcctgggggagcctcttcttcactggaaacctggcaaggatccaatttcccctttgcctgatccccacaggagcatagcagatagggaggggggtcacccaggtggctcttcctgcttggcccccactttccagaccattccaggcagggagagctgctgagctgactgcatgagctgcccacatggaggacccagccaccccttatgttcggcaggcagcccttgggctgttgcaggaccgtggccagttcttggtattgctcaagtcccctgggccttcagactggcgggtgacttcaagggagcaaccatcctgggcctctcctgggacaaacacttgccttcacccactatcgatgtcttgctcagccctcagaggagcgtggttggcgtggattacttcatgccttgattctgccttcccggaaaccacggtggcagcaggcttggatgtcaccaagtcaccgtgtttcatgctatttctggaggttctcgcctttgtggcctcggaaaggaaggcgatctggtgctttggggaaagccctcgggatgctcctccagatggtcttcttcaggccttttgctcagcattggtctgatcagttctgccagctctgggccatgatctcttggcactggcgcggctttccttcaataattccataaactccagacttcgtgtcttttgcatggaaagcacgcggtgcccatttcatcgacaccgcaccccggagtccaaacgtcagccctgcgggtgttgggtttgttagggacaatttcgggctcaggtgcagggggcgcttccccagcgcgggcgcttcctgggccccatctgaggccgtgggctcctggcaggaggacctggagttttcagatccccgggaaggatgcatttcccccactctcgggcacaagctgccctttgctggcgttgggcacggatcatggcctcgcagaagcccgcgacagcgtggagcaggtggtgcccccgcccgggactcctggtgggtgatggctccgggaggccttggctgggacagagtggggcctccgggtcggtcagcggcccgagcccggctgcggctctcggaggcttgggtttggaagacaccgcctgccatcccgcggcgcctctcggggtccgctcccccggactggccctgcccaccgcgcgcgagtagtagcgggcggccaggagtcagtggcaggcgcggccggtgggatgccgggtaggaggctgcgctggagcccgctgggcagcgccgacccctaaggcagccgggcgggtgagcgagcagaggcgtgggcggctgaggggctgaggggctgaggcggctgaggcggctgaggggctgaggaggctgaggggctgaggggctgaggcggctgaggggctgaggggctgaggggcgggcagcctggccggtccctgccgcagggtccaccgcacgtcacgtggccgaatccctcgggctgctttctctctgggctgttttcttactgtgaacctcgtgggctcctgctcggtgtcctttcttactctgtctctgtttttgcattctattggcaagtattttatttaggatattttactgatataactgaggatgaactgtgttttgcagcattttgttttattacgcgttttctcctagattttggtatcatttttatgctgacttgattaaacattttggaaactttcctgg

SEQ ID NO: 24 - DNA, 4018 bp, Homo sapiens
tggccaccgccggccaggggtgtggagggcgtgctgccggagacgtccgccgggctctgcagttccgccgggggtcgggcagctatggagccgcggcccacggcgccctcctccggcgccccgggactggccggggtcggggagacgccgtcagccgctgcgctggccgcagccagggtggaactgcccggcacggctgtgccctcggtgccggaggatgctgcgcccgcgagccgggacggcggcggggtccgcgatgagggccccgcggcggccggggacgggctgggcagacccttggggcccaccccgagccagagccgtttccaggtggacctggtttccgagaacgccgggcgggccgctgctgcggcggcggcggcggcggcggcagcggcggcggctggtgctggggcgggggccaagcagacccccgcggacggggaagccagcggcgagagcgagccagctaaaggcagcgaggaagccaagggccgcttccgcgtgaacttcgtggacccagctgcctcctcgtcggctgaagacagcctgtcagatgctgccggggtcggagtcgacgggcccaacgtgagcttccagaacggcggggacacggtgctgagcgagggcagcagcctgcactccggcggcggcggcggcagtgggcaccaccagcactactattatgatacccacaccaacacctactacctgcgcaccttcggccacaacaccatggacgctgtgcccaggatcgatcactaccggcacacagccgcgcagctgggcgagaagctgctccggcctagcctggcggagctccacgacgagctggaaaaggaaccttttgaggatggctttgcaaatggggaagaaagtactccaaccagagatgctgtggtcacgtatactgcagaaagtaaaggagtcgtgaagtttggctggatcaagggtgtattagtacgttgtatgttaaacatttggggtgtgatgcttttcattagattgtcatggattgtgggtcaagctggaataggtctatcagtccttgtaataatgatggccactgttgtgacaactatcacaggattgtctacttcagcaatagcaactaatggatttgtaagaggaggaggagcatattatttaatatctagaagtctagggccagaatttggtggtgcaattggtctaatcttcgcctttgccaacgctgttgcagttgctatgtatgtggttggatttgcagaaaccgtggtggagttgcttaaggaacattccatacttatgatagatgaaatcaatgatatccgaattattggagccattacagtcgtgattcttttaggtatctcagtagctggaatggagtgggaagcaaaagctcagattgttcttttggtgatcctacttcttgctattggtgatttcgtcataggaacatttatcccactggagagcaagaagccaaaagggttttttggttataaatctgaaatatttaatgagaactttgggcccgattttcgagaggaagagactttcttttctgtatttgccatcttttttcctgctgcaactggtattctggctggagcaaatatctcaggtgatcttgcagatcctcagtcagccatacccaaaggaacactcctagccattttaattactacattggtttacgtaggaattgcagtatctgtaggttcttgtgttgttcgagatgccactggaaacgttaatgacactatcgtaacagagctaacaaactgtacttctgcagcctgcaaattaaactttgatttttcatcttgtgaaagcagtccttgttcctatggcctaatgaacaacttccaggtaatgagtatggtgtcaggatttacaccactaatttctgcaggtatattttcagccactctttcttcagcattagcatccctagtgagtgctcccaaaatatttcaggctctatgtaaggacaacatctacccagctttccagatgtttgctaaaggttatgggaaaaataatgaacctcttcgtggctacatcttaacattcttaattgcacttggattcatcttaattgctgaactgaatgttattgcaccaattatctcaaacttcttccttgcatcatatgcattgatcaatttttcagtattccatgcatcacttgcaaaatctccaggatggcgtcctgcattcaaatactacaacatgtggatatcacttcttggagcaattctttgttgcatagtaatgttcgtcattaactggtgggctgcattgctaacatatgtgatagtccttgggctgtatatttatgttacctacaaaaaaccagatgtgaattggggatcctctacacaagccctgacttacctgaatgcactgcagcattcaattcgtctttctggagtggaagaccacgtgaaaaactttaggccacagtgtcttgttatgacaggtgctccaaactcacgtccagctttacttcatcttgttcatgatttcacaaaaaatgttggtttgatgatctgtggccatgtacatatgggtcctcgaagacaagccatgaaagagatgtccatcgatcaagccaaatatcagcgatggcttattaagaacaaaatgaaggcattttatgctccagtacatgcagatgacttgagagaaggtgcacagtatttgatgcaggctgctggtcttggtcgtatgaagccaaacacacttgtccttggatttaagaaagattggttgcaagcagatatgagggatgtggatatgtatataaacttatttcatgatgcttttgacatacaatatggagtagtggttattcgcctaaaagaaggtctggatatatctcatcttcaaggacaagaagaattattgtcatcacaagagaaatctcctggcaccaaggatgtggtagtaagtgtggaatatagtaaaaagtccgatttagatacttccaaaccactcagtgaaaaaccaattacacacaaagttgaggaagaggatggcaagactgcaactcaaccactgttgaaaaaagaatccaaaggccctattgtgcctttaaatgtagctgaccaaaagcttcttgaagctagtacacagtttcagaaaaaacaaggaaagaatactattgatgtctggtggctttttgatgatggaggtttgaccttattgataccttaccttctgacgaccaagaaaaaatggaaagactgtaagatcagagtattcattggtggaaagataaacagaatagaccatgaccggagagcgatggctactttgcttagcaagttccggatagacttttctgatatcatggttctaggagatatcaataccaaaccaaagaaagaaaatattatagcttttgaggaaatcattgagccatacagacttcatgaagatgataaagagcaagatattgcagataaaatgaaagaagatgaaccatggcgaataacagataatgagcttgaactttataagaccaagacataccggcagatcaggttaaatgagttattaaaggaacattcaagcacagctaatattattgtcatgagtctcccagttgcacgaaaaggtgctgtgtctagtgctctctacatggcatggttagaagctctatctaaggacctaccaccaatcctcctagttcgtgggaatcatcagagtgtccttaccttctattcataaatgttctatacagtggacagccctccagaatggtacttcagtgcctagtgtagtaacctgaaatcttcaatgacacattaacatcacaatggcgaatggtgacttttctttcacgatttcattaatttgaaagcacacaggaaagcttgctccattgataacgtgtatggagacttcggttttagtcaattccatatctcaatcttaatggtgattcttctctgttgaactgaagtttgtgagagtagttttcctttgctacttgaatagcaataaaagcgtgttaactttttgg

SEQ ID NO: 25 - DNA, 2580 bp, Homo sapiens
gaggcgcggagatgcccctgcatcagctgggggacaagccgctcaccttccccagccccaactcagccatggaaaacgggcttgaccacaccccacccagcaggagggcatccccgggcacacccctgagccccggctccctccgctccgctgcccatagccccctggacaccagcaagcagcccctctgccagctctgggccgagaagcatggcgcccgggggacccatgaggtgcggtacgtctcggccgggcagagcgtggcgtgcggctggtgggccttcgcaccgccgtgcctgcaggtcctcaacacgcccaagggcatcctgttcttcctgtgtgcggccgcattcctgcaggggatgactgtgaatggcttcatcaacacagtcatcacctccctggagcgccgctatgacctgcacagctaccagagcgggctcatcgccagctcctacgacattgccgcctgcctctgcctcaccttcgtcagctacttcgggggctcagggcacaagccgcgctggctgggctggggcgtgctgcttatgggcacggggtcgctggtgttcgcgctgccccacttcacggctggccgctatgaggtggagttggacgcgggtgtcaggacgtgccctgccaaccccggcgcggtgtgtgcggacagcacctcgggcctgtcccgctaccagctggtcttcatgctgggccagttcctgcatggcgtgggtgccacacccctctacacgctgggcgtcacctacctggatgagaacgtcaagtccagctgctcgcccgtctacattgccatcttctacacagcggccatcctgggcccagctgccggctacctgattggaggtgccctgctgaatatctacacggaaatgggccgacggacggagctgaccaccgagagcccactgtgggtcggcgcctggtgggtcggcttcctgggctctggggccgctgctttcttcaccgccgttcccatccttggttaccctcggcagctgccaggctcccagcgctacgcggtcatgagagcggcggaaatgcaccagttgaaggacagcagccgtggggaggcgagcaacccggactttgggaaaaccatcagagacctgcctctctccatctggctcctgctgaagaaccccacgttcatcctgctctgcctggccggggccaccgaggccactctcatcaccggcatgtccacgttcagccccaagttcttggagtcccagttcagcctgagtgcctcagaagctgccaccttgtttgggtacctggtggtgccagcgggtggtggcggcaccttcctgggcggcttctttgtgaacaagctcaggctccggggctccgcggtcatcaagttctgcctgttctgcaccgttgtcagcctgctgggcatcctcgtcttctcactgcactgccccagtgtgcccatggcgggcgtcacagccagctacggcgggagcctcctgcccgaaggccacctgaacctaacggctccctgcaacgctgcctgcagctgccagccagaacactacagccctgtgtgcggctcggacggcctcatgtacttctcactgtgccacgcagggtgccctgcagccacggagacgaatgtggacggccagaaggtgtaccgagactgtagctgtatccctcagaatctttcctctggttttggccatgccactgcagggaaatgcacttcaacttgtcagagaaagcccctccttctggttttcatattcgttgtaattttctttacattcctcagcagcattcctgcactaacggcaactctacgatgtgtccgtgaccctcagagatcctttgccctgggaatccagtggattgtagttagaatactagggggcatcccggggcccatcgccttcggctgggtgatcgacaaggcctgtctgctgtggcaggaccagtgtggccagcagggctcctgcttggtgtaccagaattcggccatgagccgctacatactcatcatggggctcctgtacaaggtgctgggcgtcctcttctttgccatagcctgcttcttatacaagcccctgtcggagtcttcagatggcctggaaacttgtctgcccagccagtcctcagcccctgacagtgccacagatagccagctccagagcagcgtctgaccaccgcccgcgcccacccggccacggcgggcactcagcatttcctgatgacagaacagtgccgttgggtgatgcaatcacacgggaacttctatttgacctgcaaccttctacttaacctgtggtttaaagtcggctgtgacctcctgtccccagagctgtacggccctgcagtgggtgggaggaacttgcataaatatatatttatggacacacagtttgcatcagaacgtgtttatagaatgtgttttatacccgatcgtgtgtggtgtgcgtgaggacaaactccgcaggggctgtgaatcccactgggagggcggtgggcctgcagcccgaggaaggcttgtgtgtcctcagttaaaactgtgcatatcgaaatatattttgttatttaagcctg

SEQ ID NO: 26 - DNA, 4539 bp, Homo sapiens
cggcgcgcacactgctcgctgggccgcggctcccgggtgtcccaggcccggccggtgcgcagagcatggcgggtgcgggcccgaagcggcgcgcgctagcggcgccggcggccgaggagaaggaagaggcgcgggagaagatgctggccgccaagagcgcggacggctcggcgccggcaggcgagggcgagggcgtgaccctgcagcggaacatcacgctgctcaacggcgtggccatcatcgtggggaccattatcggctcgggcatcttcgtgacgcccacgggcgtgctcaaggaggcaggctcgccggggctggcgctggtggtgtgggccgcgtgcggcgtcttctccatcgtgggcgcgctctgctacgcggagctcggcaccaccatctccaaatcgggcggcgactacgcctacatgctggaggtctacggctcgctgcccgccttcctcaagctctggatcgagctgctcatcatccggccttcatcgcagtacatcgtggccctggtcttcgccacctacctgctcaagccgctcttccccacctgcccggtgcccgaggaggcagccaagctcgtggcctgcctctgcgtgctgctgctcacggccgtgaactgctacagcgtgaaggccgccacccgggtccaggatgcctttgccgccgccaagctcctggccctggccctgatcatcctgctgggcttcgtccagatcgggaagggtgatgtgtccaatctagatcccaacttctcatttgaaggcaccaaactggatgtggggaacattgtgctggcattatacagcggcctctttgcctatggaggatggaattacttgaatttcgtcacagaggaaatgatcaacccctacagaaacctgcccctggccatcatcatctccctgcccatcgtgacgctggtgtacgtgctgaccaacctggcctacttcaccaccctgtccaccgagcagatgctgtcgtccgaggccgtggccgtggacttcgggaactatcacctgggcgtcatgtcctggatcatccccgtcttcgtgggcctgtcctgcttcggctccgtcaatgggtccctgttcacatcctccaggctcttcttcgtggggtcccgggaaggccacctgccctccatcctctccatgatccacccacagctcctcacccccgtgccgtccctcgtgttcacgtgtgtgatgacgctgctctacgccttctccaaggacatcttctccgtcatcaacttcttcagcttcttcaactggctctgcgtggccctggccatcatcggcatgatctggctgcgccacagaaagcctgagcttgagcggcccatcaaggtgaacctggccctgcctgtgttcttcatcctggcctgcctcttcctgatcgccgtctccttctggaagacacccgtggagtgtggcatcggcttcaccatcatcctcagcgggctgcccgtctacttcttcggggtctggtggaaaaacaagcccaagtggctcctccagggcatcttctccacgaccgtcctgtgtcagaagctcatgcaggtggtcccccaggagacatagccaggaggccgagtggctgccggaggagcatgcgcagaggccagttaaagtagatcacctcctcgaacccactccggttccccgcaacccacagctcagctgcccatcccagtccctcgccgtccctcccaggtcgggcagtggaggctgctgtgaaaactctggtacgaatctcatccctcaactgagggccagggacccaggtgtgcctgtgctcctgcccaggagcagcttttggtctccttgggccctttttcccttccctcctttgtttacttatatatatattttttttaaacttaaattttgggtcaacttgacaccactaagatgattttttaaggagctgggggaaggcaggagccttcctttctcctgccccaagggcccagaccctgggcaaacagagctactgagacttggaacctcattgctacgacagacttgcactgaagccggacagctgcccagacacatgggcttgtgacattcgtgaaaaccaaccctgtgggcttatgtctctgccttagggtttgcagagtggaaactcagccgtagggtggcactgggagggggtgggggatctgggcaaggtgggtgattcctcccaggaggtgcttgaggccccgatggactcctgaccataatcctagccccgagacaccatcctgagccagggaacagccccagggttggggggtgccggcatctcccctagctcaccaggcctggcctctgggcagtgtggcctcttggctatttctgttccagttttggaggctgagttctggttcatgcagacaaagccctgtccttcagtcttctagaaacagagacaagaaaggcagacacaccgcggccaggcacccatgtgggcgcccaccctgggctccacacagcagtgtcccctgccccagaggtcgcagctaccctcagcctccaatgcattggcctctgtaccgcccggcagccccttctggccggtgctgggttcccactcccggcctaggcacctccccgctctccctgtcacgctcatgtcctgtcctggtcctgatgcccgttgtctaggagacagagccaagcactgctcacgtctctgccgcctgcgtttggaggcccctgggctctcacccagtccccacccgcctgcagagagggaactagggcaccccttgtttctgttgttcccgtgaatttttttcgctatgggaggcagccgaggcctggccaatgcggcccactttcctgagctgtcgctgcctccatggcagcagccaaggacccccagaacaagaagacccccccgcaggatccctcctgagctcggggggctctgccttctcaggccccgggcttcccttctccccagccagaggtggagccaagtggtccagcgtcactccagtgctcagctgtggctggaggagctggcctgtggcacagccctgagtgtcccaagccgggagccaacgaagccggacacggcttcactgaccagcggctgctcaagccgcaagctctcagcaagtgcccagtggagcctgccgcccccacctgggcaccgggaccccctcaccatccagtgggcccggagaaacctgatgaacagtttggggactcaggaccagatgtccgtctctcttgcttgaggaatgaagacctttattcacccctgccccgttgcttcccgctgcacatggacagacttcacagcgtctgctcataggacctgcatccttcctggggacgaattccactcgtccaagggacagcccacggtctggaggccgaggaccaccagcaggcaggtggactgactgtgttgggcaagacctcttccctctgggcctgttctcttggctgcaaataaggacagcagctggtgccccacctgcctggtgcattgctgtgtgaatccaggaggcagtggacatcgtaggcagccacggccccgggtccaggagaagtgctccctggaggcacgcaccactgcttcccactggggccggcggggcccacgcacgacgtcagcctcttaccttcccgcctcggctaggggtcctcgggatgccgttctgttccaacctcctgctctgggaggtggacatgcctcaaggatacagggagccggcggcctctcgacggcacgcacttgcctgttggctgctgcggctgtgggcgagcatgggggctgccagcgtctgttgtggaaagtagctgctagtgaaatggctggggccgctggggtccgtcttcacactgcgcaggtctcttctgggcgtctgagctggggtgggagctcctccgcagaaggttggtggggggtccagtctgtgatccttggtgctgtgtgccccactccagcctggggaccccacttcagaaggtaggggccgtgtcccgcggtgctgactgaggcctgcttccccctccccctcctgctgtgctggaattccacagggaccagggccaccgcaggggactgtctcagaagacttgatttttccgtccctttttctccacactccactgacaaacgtccccagcggtttccacttgtgggcttcaggtgttttcaagcacaacccaccacaacaagcaagtgcattttcagtcgttgtgcttttttgttttgtgctaacgtcttactaatttaaagatgctgtcggcaccatgtttatttatttccagtggtcatgctcagccttgctgctctgcgtggcgcaggtgccatgcctgctccctgtctgtgtcccagccacgcagggccatccactgtgacgtcggccgaccaggctggacaccctctgccgagtaatgacgtgtgtggctgggaccttctttattctgtgttaatggctaacctgttacactgggctgggttgggtagggtgttctggcttttttgtggggtttttatttttaaagaaacactcaatcatcctag

SEQ ID NO: 27 - DNA, 1060 bp, Homo sapiens
gcactggggatctgtggactgcgtccgggggatgggctagggggacatgcgcacgctttgggccttacagaatgtgatcgcgcgagggggagggcgaagcgtggcgggagggcgaggcgaaggaaggagggcgtgagaaaggcgacggcggcggcgcggaggagggttatctatacatttaaaaaccagccgcctgcgccgcgcctgcggagacctgggagagtccggccgcacgcgcgggacacgagcgtcccacgctccctggcgcgtacggcctgccaccactaggcctcctatccccgggctccagacgacctaggacgcgtgccctggggagttgcctggcggcgccgtgccagaagcccccttggggcgccacagttttccccgtcgcctccggttcctctgcctgcaccttcctgcggcgcgccgggacctggagcgggcgggtggatgcaggcgcgatggacggcggcacactgcccaggtccgcgccccctgcgccccccgtccctgtcggctgcgctgcccggcggagacccgcgtccccggaactgttgcgctgcagccggcggcggcgaccggccaccgcagagaccggaggcggcgcagcggccgtagcgcggcgcaatgagcgcgagcgcaaccgcgtgaagctggtgaacttgggcttccaggcgctgcggcagcacgtgccgcacggcggcgccagcaagaagctgagcaaggtggagacgctgcgctcagccgtggagtacatccgcgcgctgcagcgcctgctggccgagcacgacgccgtgcgcaacgcgctggcgggagggctgaggccgcaggccgtgcggccgtctgcgccccgcgggccgccagggaccaccccggtcgccgcctcgccctcccgcgcttcttcgtccccgggccgcgggggcagctcggagcccggctccccgcgttccgcctactcgtcggacgacagcggctgcgaaggcgcgctgagtcctgcggagcgcgagctactcgacttctccagctggttagggggctactgagcgccctcgaccta

SEQ ID NO: 28 - DNA, 3060 bp, Homo sapiens
attcagcacaattcctatcaaaatccccatggcattctttacagaaataaaaaaaaaatcctaaaatttgtatgaaatggtgaaagaacccaaatagacaaaacaattctgagaaaaaaaaacaaagttgaagacatcacaattcctggttttaaattatattacaaagctacggtaatcaaaacaatatggtattggcataaaaccagacacataccagtgaaataaaattgagagtccagaaacacatcgaaacacatatggtcaagtaacttttgacaatggcatgaagaagacacaatagggacaggagagtctcttcaataaatggtggtgggaatactatttccatatgcaaaacaataaaactggacccttctcttttggcatatacaaaacttaactcaaaatggataaaatacctgatagaagaccagaaacaagagactatgaaaataatggtagagttctatatgttttgagctacaaagtattcaaattacagcattagggagaaaaaacaaagcacaaaccaatgtttaatttttaagtggagatttcctggagcagagctgcagggctggggcaaggatggaggctcattactccttttaccctttgaatggtccttgtgggcaattcaacattttctaaaattaaaaataaaataaaatttcagagggggattgtgggcatgtcaattgtttcgatatttctcaaagtggagagaaatacctagtacatattttacttgatacattcagatcacatgggtttcttgaaataaatcttttggctttagttttactaactctttacctagtatcccactgagttcttttcccttataggctgataaggtcattatcttctccacactgtgccccacaagagcctattcaccccataatctcaaagcctccttcatgagggcagaaatgccccctgaatcctgcaatgaattaactctctactctagcgggatccagctctggcctcaaggtctacacctccagagagtggccagccccaccttcagaaaataagaggcatttgattcctgaaattattcattgaaagcactgttcttttcttttttgaatattaacaagtaaatattccagcagatggaaaacaggacaatgtaacactgttcttatcatcactatcagctgggaccagaacagacactcaataaacagcctcacactacaatgaagcttggagaacaaaggagcatcaaagggacatggagggcaagggtagctcttctgctccccaatcacatgcactccccgtctcaccgcaacatctgtccctgagccttctccaagcagacctataaatccaggctggctcctcactccccacacatctgctcctgctctctctcctccagcgaccctagccatgagaaccctcaccatcctcactgctgttctcctcgtggccctccaggccaaggctgagccactccaagctgaggatgatccactgcaggcaaaagcttatgaggctgatgcccaggagcagcgtggggcaaatgaccaggactttgccgtctcctttgcagaggatgcaagctcaagtcttagagctttgggtaagagacaccagcattgcagagctaggagtgtagagaggaaaaccaagcacttctagaattagatccaacagctggctctttctcttaggtgatcacctccccaggcctcaattactttatgtttgtactgaaaaggaagaatcagtgatattcaaggcatgacttttctctaaagattttttaattctatgataagtctatgaaattttctaattttttgccatgtagaaatgtattgaggagtctctacttcaaggaagagagcctaattttaaaggaatgttttgttttgctttgttttgttttgttttgtttgatggagtctcgctctgtcacccaggctggagtgcagtggcactatctcagatcactgcaacctctgcctcctgggttcaagcaattctctccctcagcctcccaagtcactaggattacaggcaccagacaccaagcctggctaaattttgtattttttttttttcagtagagacggggtttcaccatcttggccaggctagtcttgaactcctgaccttgtgataaacccaccttggcctcccaaagtgctgggattacaggcgtaagccaccacatccagctgctaaaggaatgttttttaatctgacttttataggaaccgttggaaactggagacagtcatatgggtgcattcagatgtgtgtgtgacagggaaggagcagataagtacagcatatcagaatgggtctctaatcctgtgtgtgaccaacactgctctgcgtatttattcctattgatggtgtgatcatgctattggctgtaatgcagccagcattacatgtcagcaagcatgcaacttcctgaagattctctttactgcccgctgctgaccctggtgctcaatttctgatgctctctctctctgtccccaggctcaacaagggctttcacttgccattgcagaaggtcctgttattcaacagaatattcctatgggacctgcactgtcatgggtattaaccacagattctgctgcctctgagggatgagaacagagagaaatatattcataatttactttatgacctagaaggaaactgtcgtgtgtcctatacattgccatcaactttgtttcctcatctcaaataaagtcctttcagcaagttcttttgtgtttgtgcttttctggtgtttgataattcaggattcttcagatgcaaaaacaaaaacccaagtcgtatctcagaacactagctcttcgaaagagttttctatgtagaccagagaagtggtagagaggatgttgagagaagagaggatttgggttttttgtttttttgttttttgctttctgagatggagtctcgctctgttgcccaggctgcagtgcagtggcacaatcttggctcactgaaacctttacctcctgggttcaagtgattctcctgcctcagcctcccaagtagctgggatta

SEQ ID NO: 29 - DNA, 459 bp, Homo sapiens
atccattctcctcatccctctgctctctggcctccagcctcccagcagcatggctttcaccggcaagttcgagatggagagtgagaagaattatgatgagttcatgaagctccttgggatctccagcgatgtaatcgaaaaggcccgcaacttcaagatcgtcacggaggtgcagcaggatgggcaggacttcacttggtcccagcactactccgggggccacaccatgaccaacaagttcactgttggcaaggaaagcaacatacagacaatggggggcaagacgttcaaggccactgtgcagatggagggcgggaagctggtggtgaatttccccaactatcaccagacctcagagatcgtgggtgacaagctggtggaggtctccaccatcggaggcgtgacctatgagcgcgtgagcaagagactggcctaagcagccaggcccggcccagggag

SEQ ID NO: 30 - DNA, 860 bp, Homo sapiens
agaatataacagcactcccaaagaactgggtactcaacactgagcagatctgttctttgagctaaaaaccatgtgctgtaccaagagtttgctcctggctgctttgatgtcagtgctgctactccacctctgcggcgaatcagaagcaagcaactttgactgctgtcttggatacacagaccgtattcttcatcctaaatttattgtgggcttcacacggcagctggccaatgaaggctgtgacatcaatgctatcatctttcacacaaagaaaaagttgtctgtgtgcgcaaatccaaaacagacttgggtgaaatatattgtgcgtctcctcagtaaaaaagtcaagaacatgtaaaaactgtggcttttctggaatggaattggacatagcccaagaacagaaagaaccttgctggggttggaggtttcacttgcacatcatggagggtttagtgcttatctaatttgtgcctcactggacttgtccaattaatgaagttgattcatattgcatcatagtttgctttgtttaagcatcacattaaagttaaactgtattttatgttatttatagctgtaggttttctgtgtttagctatttaatactaattttccataagctattttggtttagtgcaaagtataaaattatatttgggggggaataagattatatggactttcttgcaagcaacaagctattttttaaaaaaactatttaacattcttttgtttatattgttttgtctcctaaattgttgtaattgcattataaaataagaaaaatattaataagacaaatattgaaaataaagaaacaaaaagctaaaaaaaaaaaaaaaaaaaaaaaaaaaaaa

SEQ ID NO: 31 - DNA, 2290 bp, Homo sapiens
gaattccctcttaactcttgaagtaaataaataatctttgctggcaggactatgctgaatctccttaggcactctctaattagatgtcctaggtcctcccaattcttagtccttttatacctgtttttctccttctcttattccatttagtttttcaattcatacaaaactgtatccaggccatcacctatcattctatacaacaaatgtttcttctaacatccccacaatatcaccccttaccacaagacctcccttcagcttaatctctcccactctaggttcccacgctgcccctaatcccgcttgaagcagccctgagaaacatcgcccattctctctccataccaccccccaaaaattttcgccaccccaacacttcaacactattttatttttcttattaatataagaaggcaggcatgtcaggcctctgagcccaagccaagccatcgcaacccctgtgacttgcacctatacgcccagatggcctgaagtaactgaagaatcacaaaagaagtgaatatgccttgccccaccttaactgatgacattccaccacaaaagaagtgtaaatggccggtccttgccttaactgatgacattaccttgtgaaagtcctcttcctggctcatcctggctcaaaaagcacccccactgagcaccttgagacccccactcctgcccgccagagaacaaaccccctttgactgtaattttcctttacctacccaaatcctataaaacggccccacccttatctcccttcactgactctcttttcggactcagcccgcctgcacccaggtgaaataaacagctttattgctcacacaaagcctgtttggtggtctcttcacacggacgcacatgaaatttagttgtatccataaggcatatggaggagactaattcctcttccaaagacatgtaccagagtcctggagaggctgagggctggaggtggaagaaaggctctgacaggggtcagaatctgttcaggaaacatagcaaatgcctgatacttttaattagagaaaggtttgaatctccacattcatatatttgcagtccagtgacctttcagtttttttatgcccaaagtgtcaagcatgttaatgttaccattgactgcctccctgaaggtgcagctaccaggggaactgccaggacttcaaagcccacaaccaaaagccagaaaacactaccaagtacaagccccggacactggacccagagcacaccctgggcatctgctctgagatcctctccctggacagagacagctgctccttcagaaacagaggagaccctgaacacaggcaggcctcctgagcttccagccagggccacagccacatggttcagtgcctcccacactctcccagccttggctaccaggagggtggccagaactcagtggttgacagctgacagacagacgtgggcttccatatcgtccgtgccctgggctcagaccatcagtgagaaaaaacctggagggtctctctgggaaactcgttcttccccaccgactactgcagggaccgaggaagccatgaacactacaagccttttggcgcctgctgctgagataatggccacacctggcagcccatcccaggccagccctacctcgggagcattcacccatggcacacagactccgagtccaaccaaggcaacagcccccagatatccacaaacaggtgatctctctgcagagtggccattcactgctggtgaagagccagtcctggtcccaagaccccatcaagtttcaaggtgtcctcagccactcttcaaggtgggagctatggcagctgctcctctcaccctggctattcagaggctcaacccatgcctgatggagctgtgccaattcttccagcaatgcctctgcatgagccagaggagtcccaggacagaggacatgagatactgtcttgaatactattcctggtttctgaagaatgcaacatatatctgtcagagggtgaaaagggtgtcccactcgcacaccttaaagcaaaagtgccttgagaatatctgcaagtctgtgtgaggccttgaaaataacactagggcataacaattacttcaggggatacgccatccaccctggctcttgtcccaagtgggctacatttgaagaattcacccaggctccagctagatcatcagttaatttaaagtggttattcttggaagtagcattttttttccctctcctgtgaatctgtgcaaaacattgaaggtagaagttttcttgttaaaaaaaaaggaattc

SEQ ID NO: 32 - DNA, 784 bp, Homo sapiens
agactcagccaacagagattgttgatttgcctcttaagcaagagattcattgcagctcagcatggctcagaccagctcatacttcatgctgatctcctgcctgatgtttctgtctcagagccaaggccaagaggcccagacagagttgccccaggcccggatcagctgcccagaaggcaccaatgcctatcgctcctactgctactactttaatgaagaccgtgagacctgggttgatgcagatctctattgccagaacatgaattcgggcaacctggtgtctgtgctcacccaggccgagggtgcctttgtggcctcactgattaaggagagtggcactgatgacttcaatgtctggattggcctccatgaccccaaaaagaaccgccgctggcactggagcagtgggtccctggtctcctacaagtcctggggcattggagccccaagcagtgttaatcctggctactgtgtgagcctgacctcaagcacaggattccagaaatggaaggatgtgccttgtgaagacaagttctcctttgtctgcaagttcaaaaactagaggcagctggaaaatacatgtctagaactgatccagcaattacaacggagtcaaaaattaaaccggaccatctctccaactcaactcaacctggacactctcttctctgctgagtttgccttgttaatcttcaatagttttacctaccccagtctttggaaccctaaataataaaaataaacatgtttccacgaaaaaaaaaaaaaaaaaaaaaaaaaaaaa

SEQ ID NO: 33 - DNA, 767 bp, Homo sapiens
aagccacctcaagtggacaaggcacttaccaacagagattgctgatttgctccttaagcaagagattcactgccgctaagcatggctcagaccaactcgttcttcatgctgatctcctccctgatgttcctgtctctgagccaaggccaggagtcccagacagagctgcctaatccccgaatcagctgcccagaaggcaccaatgcctatcgctcctactgctactactttaatgaagaccctgagacctgggttgatgcagatctctattgccagaacatgaattcaggcaacctggtgtctgtgctcacccaggcggagggtgccttcgtggcctcactgattaaggagagtagcactgatgacagcaatgtctggattggcctccatgacccaaaaaagaaccgccgctggcactggagtagtgggtccctggtctcctacaagtcctgggacactggatccccgagcagtgctaatgctggctactgtgcaagcctgacttcatgctcaggattcaagaaatggaaggatgaatcttgtgagaagaagttctcctttgtttgcaagttcaaaaactagaggaagctgaaaaatggatgtctagaactggtcctgcaattactatgaagtcaaaaattaaactagactatgtctccaactcagttcagaccatctcctccctaatgagtttgcatcgctgatcttcagtaccttcacctgtctcagtctctagagccctgaaaaataaaaacaaacttattttt

SEQ ID NO: 34 - DNA, 663 bp, Homo sapiens
cacgagtccacccctgccaggcccagcagccaccacagcgcctgcttcctcggccctgaaatcatgcccctaggtctcctgtggctgggcctagccctgttgggggctctgcatgcccaggcccaggactccacctcagacctgatcccagccccacctctgagcaaggtccctctgcagcagaacttccaggacaaccaattccaggggaagtggtatgtggtaggcctggcagggaatgcaattctcagagaagacaaagacccgcaaaagatgtatgccaccatctatgagctgaaagaagacaagagctacaatgtcacctccgtcctgtttaggaaaaagaagtgtgactactggatcaggacttttgttccaggttgccagcccggcgagttcacgctgggcaacattaagagttaccctggattaacgagttacctcgtccgagtggtgagcaccaactacaaccagcatgctatggtgttctttaagaaagtttctcaaaacagggagtacttcaagatcaccctctacgggagaaccaaggagctgacttcggaactaaaggagaacttcatccgcttctccaaatctctgggcctccctgaaaaccacatcgtcttccctgtcccaatcgaccagtgtatcgacggctgagtg

SEQ ID NO: 35 - DNA, 1381 bp, Homo sapiens
atgcgcgatctcccggagcatgcgcagcagcggcgccgacgcggggcggtgcctggtgaccgcgcgcgctcccggaagtgtgccggcgtcgcgcgaaggttcagcagggagccgtgggccgggcgcgcggttcccggcacgtgtctcggcacgtggcagcgcgcctggccctgggcttggaggcgccggcgccctggatccgccggccgtggtcgccgagtcggtgtcgtccttgaccatcgccgacgcgttcattgcagccggcgagagctcagctccgaccccgccgcgccccgcgcttcccaggaggttcatctgctccttccctgactgcagcgccaattacagcaaagcctggaagcttgacgcgcacctgtgcaagcacacgggggagagaccatttgtttgtgactatgaagggtgtggcaaggccttcatcagggactaccatctgagccgccacattctgactcacacaggagaaaagccgtttgtttgtgcagccaatggctgtgatcaaaaattcaacacaaaatcaaacttgaagaaacattttgaacgcaaacatgaaaatcaacaaaaacaatatatatgcagttttgaagactgtaagaagacctttaagaaacatcagcagctgaaaatccatcagtgccagaataccaatgaacctctattcaagtgtacccaggaaggatgtgggaaacactttgcatcacccagcaagctgaaacgacatgccaaggcccacgagggctatgtatgtcaaaaaggatgttcctttgtggcaaaaacatggacggaacttctgaaacatgtgagagaaacccataaagaggaaatactatgtgaagtatgccggaaaacatttaaacgcaaagattaccttaagcaacacatgaaaactcatgccccagaaagggatgtatgtcgctgtccaagagaaggctgtggaagaacctatacaactgtgtttaatctccaaagccatatcctctccttccatgaggaaagccgcccttttgtgtgtgaacatgctggctgtggcaaaacatttgcaatgaaacaaagtctcactaggcatgctgttgtacatgatcctgacaagaagaaaatgaagctcaaagtcaaaaaatctcgtgaaaaacgggagtttggcctctcatctcagtggatatatcctcccaaaaggaaacaagggcaaggcttatctttgtgtcaaaacggagagtcacccaactgtgtggaagacaagatgctctcgacagttgcagtacttacccttggctaagaactgcactgctttgtttaaaggactgcagaccaaggagtcgagctttctctcagagcatgcttttctttattaaaattactgatgcag

SEQ ID NO: 36 - DNA, 10326 bp, Homo sapiens
gaccgaactggagaatccgccccgggatgtggttcgtaggggtgtctgcgcccttctgctcgggttcaaactggtctcggattagtgtcccagaccctactcggtcacggactcacactttaggggatcattttcttcctccgtaaaagaattggagatgactagtttatttacaaatgttggagtaataaagaaggcagaacaaaatgagctgggctttggaagaatggaaagaagggctgcctacaagagctcttcagaaaattcaagagcttgaaggacagcttgacaaactgaagaaggaaaagcagcaaaggcagtttcagcttgacagtctcgaggctgcgctgcagaagcaaaaacagaaggttgaaaatgaaaaaaccgagggtacaaacctgaaaagggagaatcaaagattgatggaaatatgtgaaagtctggagaaaactaagcagaagatttctcatgaacttcaagtcaaggagtcacaagtgaatttccaggaaggacaactgaattcaggcaaaaaacaaatagaaaaactggaacaggaacttaaaaggtgtaaatctgagcttgaaagaagccaacaagctgcgcagtctgcagatgtctctctgaatccatgcaatacaccacaaaaaatttttacaactccactaacaccaagtcaatattatagtggttccaagtatgaagatctaaaagaaaaatataataaagaggttgaagaacgaaaaagattagaggcagaggttaaagccttgcaggctaaaaaagcaagccagactcttccacaagccaccatgaatcaccgcgacattgcccggcatcaggcttcatcatctgtgttctcatggcagcaagagaagaccccaagtcatctttcatctaattctcaaagaactccaattaggagagatttctctgcatcttacttttctggggaacaagaggtgactccaagtcgatcaactttgcaaatagggaaaagagatgctaatagcagtttctttgacaattctagcagtcctcatcttttggatcaattaaaagcgcagaatcaagagctaagaaacaagattaatgagttggaactacgcctgcaaggacatgaaaaagaaatgaaaggccaagtgaataagtttcaagaactccaactccaactggagaaagcaaaagtggaattaattgaaaaagagaaagttttgaacaaatgtagggatgaactagtgagaacaacagcacaatacgaccaggcgtcaaccaagtatactgcattggaacaaaaactgaaaaaattgacggaagatttgagttgtcagcgacaaaatgcagaaagtgccagatgttctctggaacagaaaattaaggaaaaagaaaaggagtttcaagaggagctctcccgtcaacagcgttctttccaaacactggaccaggagtgcatccagatgaaggccagactcacccaggagttacagcaagccaagaatatgcacaacgtcctgcaggctgaactggataaactcacatcagtaaagcaacagctagaaaacaatttggaagagtttaagcaaaagttgtgcagagctgaacaggcgttccaggcgagtcagatcaaggagaatgagctgaggagaagcatggaggaaatgaagaaggaaaacaacctccttaagagtcactctgagcaaaaggccagagaagtctgccacctggaggcagaactcaagaacatcaaacagtgtttaaatcagagccagaattttgcagaagaaatgaaagcgaagaatacctctcaggaaaccatgttaagagatcttcaagaaaaaataaatcagcaagaaaactccttgactttagaaaaactgaagcttgctgtggctgatctggaaaagcagcgagattgttctcaagaccttttgaagaaaagagaacatcacattgaacaacttaatgataagttaagcaagacagagaaagagtccaaagccttgctgagtgctttagagttaaaaaagaaagaatatgaagaattgaaagaagagaaaactctgttttcttgttggaaaagtgaaaacgaaaaacttttaactcagatggaatcagaaaaggaaaacttgcagagtaaaattaatcacttggaaacttgtctgaagacacagcaaataaaaagtcatgaatacaacgagagagtaagaacgctggagatggacagagaaaacctaagtgtcgagatcagaaaccttcacaacgtgttagacagtaagtcagtggaggtagagacccagaaactagcttatatggagctacagcagaaagctgagttctcagatcagaaacatcagaaggaaatagaaaatatgtgtttgaagacttctcagcttactgggcaagttgaagatctagaacacaagcttcagttactgtcaaatgaaataatggacaaagaccggtgttaccaagacttgcatgccgaatatgagagcctcagggatctgctaaaatccaaagatgcttctctggtgacaaatgaagatcatcagagaagtcttttggcttttgatcagcagcctgccatgcatcattcctttgcaaatataattggagaacaaggaagcatgccttcagagaggagtgaatgtcgtttagaagcagaccaaagtccgaaaaattctgccatcctacaaaatagagttgattcacttgaattttcattagagtctcaaaaacagatgaactcagacctgcaaaagcagtgtgaagagttggtgcaaatcaaaggagaaatagaagaaaatctcatgaaagcagaacagatgcatcaaagttttgtggctgaaacaagtcagcgcattagtaagttacaggaagacacttctgctcaccagaatgttgttgctgaaaccttaagtgcccttgagaacaaggaaaaagagctgcaacttttaaatgataaggtagaaactgagcaggcagagattcaagaattaaaaaagagcaaccatctacttgaagactctctaaaggagctacaacttttatccgaaaccctaagcttggagaagaaagaaatgagttccatcatttctctaaataaaagggaaattgaagagctgacccaagagaatgggactcttaaggaaattaatgcatccttaaatcaagagaagatgaacttaatccagaaaagtgagagttttgcaaactatatagatgaaagggagaaaagcatttcagagttatctgatcagtacaagcaagaaaaacttattttactacaaagatgtgaagaaaccggaaatgcatatgaggatcttagtcaaaaatacaaagcagcacaggaaaagaattctaaattagaatgcttgctaaatgaatgcactagtctttgtgaaaataggaaaaatgagttggaacagctaaaggaagcatttgcaaaggaacaccaagaattcttaacaaaattagcatttgctgaagaaagaaatcagaatctgatgctagagttggagacagtgcagcaagctctgagatctgagatgacagataaccaaaacaattctaagagcgaggctggtggtttaaagcaagaaatcatgactttaaaggaagaacaaaacaaaatgcaaaaggaagttaatgacttattacaagagaatgaacagctgatgaaggtaatgaagactaaacatgaatgtcaaaatctagaatcagaaccaattaggaactctgtgaaagaaagagagagtgagagaaatcaatgtaattttaaacctcagatggatcttgaagttaaagaaatttctctagatagttataatgcgcagttggtgcaattagaagctatgctaagaaataaggaattaaaacttcaggaaagtgagaaggagaaggagtgcctgcagcatgaattacagacaattagaggagatcttgaaaccagcaatttgcaagacatgcagtcacaagaaattagtggccttaaagactgtgaaatagatgcggaagaaaagtatatttcagggcctcatgagttgtcaacaagtcaaaacgacaatgcacaccttcagtgctctctgcaaacaacaatgaacaagctgaatgagctagagaaaatatgtgaaatactgcaggctgaaaagtatgaactcgtaactgagctgaatgattcaaggtcagaatgtatcacagcaactaggaaaatggcagaagaggtagggaaactactaaatgaagttaaaatattaaatgatgacagtggtcttctccatggtgagttagtggaagacataccaggaggtgaatttggtgaacaaccaaatgaacagcaccctgtgtctttggctccattggacgagagtaattcctacgagcacttgacattgtcagacaaagaagttcaaatgcactttgccgaattgcaagagaaattcttatctttacaaagtgaacacaaaattttacatgatcagcactgtcagatgagctctaaaatgtcagagctgcagacctatgttgactcattaaaggccgaaaatttggtcttgtcaacgaatctgagaaactttcaaggtgacttggtgaaggagatgcagctgggcttggaggaggggctcgttccatccctgtcatcctcttgtgtgcctgacagctctagtcttagcagtttgggagactcctccttttacagagctcttttagaacagacaggagatatgtctcttttgagtaatttagaaggggctgtttcagcaaaccagtgcagtgtagatgaagtattttgcagcagtctgcaggaggagaatctgaccaggaaagaaaccccttcggccccagcgaagggtgttgaagagcttgagtccctctgtgaggtgtaccggcagtccctcgagaagctagaagagaaaatggaaagtcaagggattatgaaaaataaggaaattcaagagctcgagcagttattaagttctgaaaggcaagagcttgactgccttaggaagcagtatttgtcagaaaatgaacagtggcaacagaagctgacaagcgtgactctggagatggagtccaagttggcggcagaaaagaaacagacggaacaactgtcacttgagctggaagtagcacgactccagctacaaggtctggacttaagttctcggtctttgcttggcatcgacacagaagatgctattcaaggccgaaatgagagctgtgacatatcaaaagaacatacttcagaaactacagaaagaacaccaaagcatgatgttcatcagatttgtgataaagatgctcagcaggacctcaatctagacattgagaaaataactgagactggtgcagtgaaacccacaggagagtgctctggggaacagtccccagataccaattatgagcctccaggggaagataaaacccagggctcttcagaatgcatttctgaattgtcattttctggtcctaatgctttggtacctatggatttcctggggaatcaggaagatatccataatcttcaactgcgggtaaaagagacatcaaatgagaatttgagattacttcatgtgatagaggaccgtgacagaaaagttgaaagtttgctaaatgaaatgaaagaattagactcaaaactccatttacaggaggtacaactaatgaccaaaattgaagcatgcatagaattggaaaaaatagttggggaacttaagaaagaaaactcagatttaagtgaaaaattggaatatttttcttgtgatcaccaggagttactccagagagtagaaacttctgaaggcctcaattctgatttagaaatgcatgcagataaatcatcacgtgaagatattggagataatgtggccaaggtgaatgacagctggaaggagagatttcttgatgtggaaaatgagctgagtaggatcagatcggagaaagctagcattgagcatgaagccctctacctggaggctgacttagaggtagttcaaacagagaagctatgtttagaaaaagacaatgaaaataagcagaaggttattgtctgccttgaagaagaactctcagtggtcacaagtgagagaaaccagcttcgtggagaattagatactatgtcaaaaaaaaccacggcactggatcagttgtctgaaaaaatgaaggagaaaacacaagagcttgagtctcatcaaagtgagtgtctccattgcattcaggtggcagaggcagaggtgaaggaaaagacggaactccttcagactttgtcctctgatgtgagtgagctgttaaaagacaaaactcatctccaggaaaagctgcagagtttggaaaaggactcacaggcactgtctttgacaaaatgtgagctggaaaaccaaattgcacaactgaataaagagaaagaattgcttgtcaaggaatctgaaagcctgcaggccagactgagtgaatcagattatgaaaagctgaatgtctccaaggccttggaggccgcactggtggagaaaggtgagttcgcattgaggctgagctcaacacaggaggaagtgcatcagctgagaagaggcatcgagaaactgagagttcgcattgaggccgatgaaaagaagcagctgcacatcgcagagaaactgaaagaacgcgagcgggagaatgattcacttaaggataaagttgagaaccttgaaagggaattgcagatgtcagaagaaaaccaggagctagtgattcttgatgccgagaattccaaagcagaagtagagactctaaaaacacaaatagaagagatggccagaagcctgaaagtttttgaattagaccttgtcacgttaaggtctgaaaaagaaaatctgacaaaacaaatacaagaaaaacaaggtcagttgtcagaactagacaagttactctcttcatttaaaagtctgttagaagaaaaggagcaagcagagatacagatcaaagaagaatctaaaactgcagtggagatgcttcagaatcagttaaaggagctaaatgaggcagtagcagccttgtgtggtgaccaagaaattatgaaggccacagaacagagtctagacccaccaatagaggaagagcatcagctgagaaatagcattgaaaagctgagagcccgcctagaagctgatgaaaagaagcagctctgtgtcttacaacaactgaaggaaagtgagcatcatgcagatttacttaagggtagagtggagaaccttgaaagagagctagagatagccaggacaaaccaagagcatgcagctcttgaggcagagaattccaaaggagaggtagagaccctaaaagcaaaaatagaagggatgacccaaagtctgagaggtctggaattagatgttgttactataaggtcagaaaaagaaaatctgacaaatgaattacaaaaagagcaagagcgaatatctgaattagaaataataaattcatcatttgaaaatattttgcaagaaaaagagcaagagaaagtacagatgaaagaaaaatcaagcactgccatggagatgcttcaaacacaattaaaagagctcaatgagagagtggcagccctgcataatgaccaagaagcctgtaaggccaaagagcagaatcttagtagtcaagtagagtgtcttgaacttgagaaggctcagttgctacaaggccttgatgaggccaaaaataattatattgttttgcaatcttcagtgaatggcctcattcaagaagtagaagatggcaagcagaaactggagaagaaggatgaagaaatcagtagactgaaaaatcaaattcaagaccaagagcagcttgtctctaaactgtcccaggtggaaggagagcaccaactttggaaggagcaaaacttagaactgagaaatctgacagtggaattggagcagaagatccaagtgctacaatccaaaaatgcctctttgcaggacacattagaagtgctgcagagttcttacaagaatctagagaatgagcttgaattgacaaaaatggacaaaatgtcctttgttgaaaaagtaaacaaaatgactgcaaaggaaactgagctgcagagggaaatgcatgagatggcacagaaaacagcagagctgcaagaagaactcagtggagagaaaaataggctagctggagagttgcagttactgttggaagaaataaagagcagcaaagatcaattgaaggagctcacactagaaaatagtgaattgaagaagagcctagattgcatgcacaaagaccaggtggaaaaggaagggaaagtgagagaggaaatagctgaatatcagctacggcttcatgaagctgaaaagaaacaccaggctttgcttttggacacaaacaaacagtatgaagtagaaatccagacataccaagagaaattgacttctaaagaagaatgtctcagttcacagaagctggagatagaccttttaaagtctagtaaagaagagctcaataattcattgaaagctactactcagattttggaagaattgaagaaaaccaagatggacaatctaaaatatgtaaatcagttgaagaaggaaaatgaacgtgcccaggggaaaatgaagttgttgatcaaatcctgtaaacagctggaagaggaaaaggagatactgcagaaagaactctctcaacttcaagctgcacaggagaagcagaaaacaggtactgttatggataccaaggtcgatgaattaacaactgagatcaaagaactgaaagaaactcttgaagaaaaaaccaaggaggcagatgaatacttggataagtactgttccttgcttataagccatgaaaagttagagaaagctaaagagatgttagagacacaagtggcccatctgtgttcacagcaatctaaacaagattcccgagggtctcctttgctaggtccagttgttccaggaccatctccaatcccttctgttactgaaaagaggttatcatctggccaaaataaagcttcaggcaagaggcaaagatccagtggaatatgggagaatggtagaggaccaacacctgctaccccagagagcttttctaaaaaaagcaagaaagcagtcatgagtggtattcaccctgcagaagacacggaaggtactgagtttgagccagagggacttccagaagttgtaaagaaagggtttgctgacatcccgacaggaaagactagcccatatatcctgcgaagaacaaccatggcaactcggaccagcccccgcctggctgcacagaagttagcgctatccccactgagtctcggcaaagaaaatcttgcagagtcctccaaaccaacagctggtggcagcagatcacaaaaggtcaaagttgctcagcggagcccagtagattcaggcaccatcctccgagaacccaccacgaaatccgtcccagtcaataatcttcctgagagaagtccgactgacagccccagagagggcctgagggtcaagcgaggccgacttgtccccagccccaaagctggactggagtccaacggcagtgagaactgtaaggtccagtgaaggcactttgtgtgtcagtacccctgggaggtgccagtcattgaatagataaggctgtgcctacaggacttctctttagtcagggcatgctttattagtgaggagaaaacaattccttagaagtcttaaatatattgtactctttagatctcccatgtgtaggtattgaaaaagtttggaagcactgatcacctgttagcattgccattcctctactgcaatgtaaatagtataaagctatgtatataaagctttttggtaatatgttacaattaaaatgacaagcactatatcacaatctctgtttgtatgtgggttttacactaaaaaaatgcaaaacacattttattcttctaattaacagctcctaggaaaatgtagacttttgctttatgatattctatctgtagtatgaggcatggaatagttttgtatcgggaatttctcagagctgagtaaaatgaaggaaaagcatgttatgtgtttttaaggaaaatgtgcacacatatacatgtaggagtgtttatctttctcttacaatctgttttagacatctttgcttatgaaacctgtacatatgtgtgtgtgggtatgtgtttatttccagtgagggctgcaggcttcctagaggtgtgctataccatgcgtctgtcgttgtgcttttttctgtttttagaccaattttttacagttctttggtaagcattgtcgtatctggtgatggattaacatatagcctttgttttctaataaaatagtcgccttcgttttctgt

SEQ ID NO: 37 - DNA, 3147 bp, Homo sapiens
gtcgcgccattttgccggggtttgaatgtgaggcggagcggcggcaggagcggatagtgccagctacggtccgcggctggggttccctcctccgtttctgtatccccacgagatcctatagcaatggaactcagcgatgcaaatctgcaaacactaacagaatatttaaagaaaacacttgatcctgatcctgccatccgacgtccagctgagaaatttcttgaatctgttgaaggaaatcagaattatccactgttgcttttgacattactggagaagtcccaggataatgttatcaaagtatgtgcttcagtaacattcaaaaactatattaaaaggaactggagaattgttgaagatgaaccaaacaaaatttgtgaagccgatcgagtggccattaaagccaacatagtgcacttgatgcttagcagcccagagcaaattcagaagcagttaagtgatgcaattagcattattggcagagaagattttccacagaaatggcctgacttgctgacagaaatggtgaatcgctttcagagtggagatttccatgttattaatggagtcctccgtacagcacattcattatttaaaagataccgtcatgaatttaagtcaaacgagttatggactgaaattaagcttgttctggatgcctttgctttgcctttgactaatctttttaaggccactattgaactctgcagtacccatgcaaatgatgcctctgccctgaggattctgttttcttccctgatcctgatctcaaaattgttctatagtttaaactttcaggatctccctgaattttgggaaggtaatatggaaacttggatgaataatttccatactctcttaacattggataataagcttttacaaactgatgatgaagaggaagccggcttattggagctcttaaaatcccagatttgtgataatgccgcactctatgcacaaaagtacgatgaagaattccagcgatacctgcctcgttttgttacagccatctggaatttactagttacaacgggtcaagaggttaaatatgatttgttggtaagtaatgcaattcaatttctggcttcagtttgtgagagacctcattataagaatctatttgaggaccagaacacgctgacaagtatctgtgaaaaggttattgtgcctaacatggaatttagagctgctgatgaagaagcatttgaagataattctgaggagtacataaggagagatttggaaggatctgatattgatactagacgcagggctgcttgtgatctggtacgaggattatgcaagttttttgagggacctgtgacaggaatcttctctggttatgttaattccatgctgcaggaatacgcaaaaaatccatctgtcaactggaaacacaaagatgcagccatctacctagtgacatctttggcatcaaaagcccaaacacagaagcatggaattacacaagcaaatgaacttgtaaacctaactgagttctttgtgaatcacatcctccctgatttaaaatcagctaatgtgaatgaatttcctgtccttaaagctgacggtatcaaatatattatgatttttagaaatcaagtgccaaaagaacatcttttagtctcgattcctctcttgattaatcatcttcaagctggaagtattgttgttcatacttacgcagctcatgctcttgaacggctctttactatgcgagggcctaacaatgccactctctttacagctgcagaaatcgcaccgtttgttgagattctgctaacaaaccttttcaaagctctcacacttcctggctcttcagaaaatgaatatattatgaaagctatcatgagaagtttttctctcctacaagaagccataatcccctacatccctactctcatcactcagcttacacagaagctattagctgttagtaagaacccaagcaaacctcactttaatcactacatgtttgaagcaatatgtttatccataagaataacttgcaaagctaaccctgctgctgttgtaaattttgaggaggctttgtttttggtgtttactgaaatcttacaaaatgatgtgcaagaatttattccatacgtctttcaagtgatgtctttgcttctggaaacacacaaaaatgacatcccgtcttcctatatggccttatttcctcatctccttcagccagtgctttgggaaagaacaggaaatattcctgctctagtgaggcttcttcaagcattcttagaacgcggttcaaacacaatagcaagtgctgcagctgacaaaattcctgggttactaggtgtctttcagaagctgattgcatccaaagcaaatgaccaccaaggtttttatcttctaaacagtataatagagcacatgcctcctgaatcagttgaccaatataggaaacaaatcttcattctgctattccagagacttcagaattccaaaacaaccaagtttatcaagagttttttagtctttattaatttgtattgcataaaatatggggcactagcactacaagaaatatttgatggtatacaaccaaaaatgtttggaatggttttggaaaaaattattattcctgaaattcagaaggtatctggaaatgtagagaaaaagatctgtgcggttggcataaccaacttactaacagaatgtcccccaatgatggacactgagtataccaaactgtggactccattattacagtctttgattggtctttttgagttacccgaagatgataccattcctgatgaggaacattttattgacatagaagatacaccaggatatcagactgccttctcacagttggcatttgctgggaaaaaagagcatgatcctgtaggtcaaatggtgaataaccccaaaattcacctggcacagtcacttcacatgttgtctaccgcctgtccaggaagggttccatcaatggtgagcaccagcctgaatgcagaagcgctccagtatctccaagggtaccttcaggcagccagtgtgacactgctttaaactgcatttttctaatgggctaaacccagatggtttcctaggaaatcacaggcttctgagcacagctgcattaaaacaaaggaagttttccttttgaacttgtcacga

SEQ ID NO: 38 - DNA, 3415 bp, Homo sapiens
gggagcagctagggcgcgggtctccctcctcccggagtttggaacggctgaagttcaccttccagcccctagcgccgttcgcgccgctaggcctggcttctgaggcggttgcggtgctcggtcgccgcctaggcggggcagggtgcgagcaggggcttcgggccacgcttctcttggcgacaggattttgctgaagtccgtccgggaaacggaggaaaaaaagagttgcgggaggctgtcggctaataacggttcttgatacatatttgccagacttcaagatttcagaaaaggggtgaaagagaagattgcaactttgagtcagacctgtaggcctgatagactgattaaaccacagaaggtgacctgctgagaaaagtggtacaaatactgggaaaaacctgctcttctgcgttaagtgggagacaatgtcacaagttaaaagctcttattcctatgatgccccctcggatttcatcaatttttcatccttggatgatgaaggagatactcaaaacatagattcatggtttgaggagaaggccaatttggagaataagttactggggaagaatggaactggagggctttttcagggcaaaactcctttgagaaaggctaatcttcagcaagctattgtcacacctttgaaaccagttgacaacacttactacaaagaggcagaaaaagaaaatcttgtggaacaatccattccgtcaaatgcttgttcttccctggaagttgaggcagccatatcaagaaaaactccagcccagcctcagagaagatctcttaggctttctgctcagaaggatttggaacagaaagaaaagcatcatgtaaaaatgaaagccaagagatgtgccactcctgtaatcatcgatgaaattctaccctctaagaaaatgaaagtttctaacaacaaaaagaagccagaggaagaaggcagtgctcatcaagatactgctgaaaagaatgcatcttccccagagaaagccaagggtagacatactgtgccttgtatgccacctgcaaagcagaagtttctaaaaagtactgaggagcaagagctggagaagagtatgaaaatgcagcaagaggtggtggagatgcggaaaaagaatgaagaattcaagaaacttgctctggctggaatagggcaacctgtgaagaaatcagtgagccaggtcaccaaatcagttgacttccacttccgcacagatgagcgaatcaaacaacatcctaagaaccaggaggaatataaggaagtgaactttacatctgaactacgaaagcatccttcatctcctgcccgagtgactaagggatgtaccattgttaagcctttcaacctgtcccaaggaaagaaaagaacatttgatgaaacagtttctacatatgtgccccttgcacagcaagttgaagacttccataaacgaacccctaacagatatcatttgaggagcaagaaggatgatattaacctgttaccctccaaatcttctgtgaccaagatttgcagagacccacagactcctgtactgcaaaccaaacaccgtgcacgggctgtgacctgcaaaagtacagcagagctggaggctgaggagctcgagaaattgcaacaatacaaattcaaagcacgtgaacttgatcccagaatacttgaaggtgggcccatcttgcccaagaaaccacctgtgaaaccacccaccgagcctattggctttgatttggaaattgagaaaagaatccaggagcgagaatcaaagaagaaaacagaggatgaacactttgaatttcattccagaccttgccctactaagattttggaagatgttgtgggtgttcctgaaaagaaggtacttccaatcaccgtccccaagtcaccagcctttgcattgaagaacagaattcgaatgcccaccaaagaagatgaggaagaggacgaaccggtagtgataaaagctcaacctgtgccacattatggggtgccttttaagccccaaatcccagaggcaagaactgtggaaatatgccctttctcgtttgattctcgagacaaagaacgtcagttacagaaggagaagaaaataaaagaactgcagaaaggggaggtgcccaagttcaaggcacttcccttgcctcattttgacaccattaacctgccagagaagaaggtaaagaatgtgacccagattgaacctttctgcttggagactgacagaagaggtgctctgaaggcacagacttggaagcaccagctggaagaagaactgagacagcagaaagaagcagcttgtttcaaggctcgtccaaacaccgtcatctctcaggagccctttgttcccaagaaagagaagaaatcagttgctgagggcctttctggttctctagttcaggaaccttttcagctggctactgagaagagagccaaagagcggcaggagctggagaagagaatggctgaggtagaagcccagaaagcccagcagttggaggaggccagactacaggaggaagagcagaaaaaagaggagctggccaggctacggagagaactggtgcataaggcaaatccaatacgcaagtaccagggtctggagataaagtcaagtgaccagcctctgactgtgcctgtatctcccaaattctccactcgattccactgctaaactcagctgtgagctgcggataccgcccggcaatgggacctgctcttaacctcaaacctaggaccgtcttgctttgtcattgggcatggagagaacccatttctccagacttttacctacccgtgcctgagaaagcatacttgacaactgtggactccagttttgttgagaattgttttcttacattactaaggctaataatgagatgtaactcatgaatgtctcgattagactccatgtagttacttcctttaaaccatcagccggccttttatatgggtcttcactctgactagaatttagtctctgtgtcagcacagtgtaatctctattgctattgccccttacgactctcaccctctccccactttttttaaaaattttaaccagaaaataaagatagttaaatcctaagatagagattaagtcatggtttaaatgaggaacaatcagtaaatcagattctgtcctcttctctgcataccgtgaatttatagttaaggatccctttgctgtgagggtagaaaacctcaccaactgcaccagtgaggaagaagactgcgtggattcatggggagcctcacagcagccacgcagcaggctctgggtggggctgccgttaaggcacgttctttccttactggtgctgataacaacagggaaccgtgcagtgtgcattttaagacctggcctggaataaatacgttttgtctttccctcaaaaaaaaaaaaaaaaaaaaaaa

SEQ ID NO: 39 - DNA, 2212 bp, Homo sapiens
gcccggctcctgggagcaggtctcggcccccgcttggggccccggccgtgcggccggagggagcggccggatggagcggaggatgaaagccggatacttggaccagcaagtgccctacaccttcagcagcaaatcgcccggaaatgggagcttgcgcgaagcgctgatcggcccgctggggaagctcatggacccgggctccctgccgcccctcgactctgaagatctcttccaggatctaagtcacttccaggagacgtggctcgctgaagctcaggtaccagacagtgatgagcagtttgttcctgatttccattcagaaaacctagctttccacagccccaccaccaggatcaagaaggagccccagagtccccgcacagacccggccctgtcctgcagcaggaagccgccactcccctaccaccatggcgagcagtgcctttactccagtgcctatgacccccccagacaaatcgccatcaagtcccctgcccctggtgcccttggacagtcgcccctacagccctttccccgggcagagcaacggaatttcctgagatcctctggcacctcccagccccaccctggccatgggtacctcggggaacatagctccgtcttccagcagcccctggacatttgccactccttcacatctcagggagggggccgggaacccctcccagccccctaccaacaccagctgtcggagccctgcccaccctatccccagcagagctttaagcaagaataccatgatcccctgtatgaacaggcgggccagccagccgtggaccagggtggggtcaatgggcacaggtacccaggggcgggggtggtgatcaaacaggaacagacggacttcgcctacgactcagatgtcaccgggtgcgcatcaatgtacctccacacagagggcttctctgggccctctccaggtgacggggccatgggctatggctatgagaaacctctgcgaccattcccagatgatgtctgcgttgtccctgagaaatttgaaggagacatcaagcaggaaggggtcggtgcatttcgagaggggccgccctaccagcgccggggtgccctgcagctgtggcaatttctggtggccttgctggatgacccaacaaatgcccatttcattgcctggacgggccggggaatggagttcaagctcattgagcctgaggaggtcgccaggctctggggcatccagaagaaccggccagccatgaattacgacaagctgagccgctcgctccgatactattatgagaaaggcatcatgcagaaggtggctggtgagcgttacgtgtacaagtttgtgtgtgagcccgaggccctcttctctttggccttcccggacaatcagcgtccagctctcaaggctgagtttgaccggcctgtcagtgaggaggacacagtccctttgtcccacttggatgagagccccgcctacctcccagagctggctggccccgcccagccatttggccccaagggtggctactcttactagcccccagcggctgttccccctgccgcaggtgggtgctgccctgtgtacatataaatgaatctggtgttggggaaaccttcatctgaaacccacagatgtctctggggcagatccccactgtcctaccagttgccctagcccagactctgagctgctcaccggagtcattgggaaggaaaagtggagaaatggcaagtctagagtctcagaaactcccctgggggtttcacctgggccctggaggaattcagctcagcttcttcctaggtccaagccccccacaccttttccccaaccacagagaacaagagtttgttctgttctgggggacagagaaggcgcttcccaacttcatactggcaggagggtgaggaggttcactgagctccccagatctcccactgcggggagacagaagcctggactctgccccacgctgtggccctggagggtaccggtttgtcagttcttggtgctctgtgttcccagaggcaggcggaggttgaagaaaggaacctgggatgaggggtgctgggtataagcagagagggatgggttcctgctccaagggaccctttgcctttcttctgccctttcctaggcccaggcctgggtttgtacttccacctccaccacatctgccagaccttaataaaggcccccacttctcccaaaaaaaaaaaaaaa

SEQ ID NO: 40 - DNA, 2706 bp, Homo sapiens
cttcaacccgcgccggcggcgactgcagttcctgcgagcgaggagcgcgggacctgctgacacgctgacgccttcgagcgcggcccggggcccggagcggccggagcagcccgggtcctgaccccggcccggctcccgctccgggctctgccggcgggcgggcgagcgcggcgcggtccgggccggggggatgtctcggcggacgcgctgcgaggatctggatgagctgcactaccaggacacagattcagatgtgccggagcagagggatagcaagtgcaaggtcaaatggacccatgaggaggacgagcagctgagggccctggtgaggcagtttggacagcaggactggaagttcctggccagccacttccctaaccgcactgaccagcaatgccagtacaggtggctgagagttttgaatccagaccttgtcaaggggccatggaccaaagaggaagaccaaaaagtcatcgagctggttaagaagtatggcacaaagcagtggacactgattgccaagcacctgaagggccggctggggaagcagtgccgtgaacgctggcacaaccacctcaaccctgaggtgaagaagtcttgctggaccgaggaggaggaccgcatcatctgcgaggcccacaaggtgctgggcaaccgctgggccgagatcgccaagatgttgccagggaggacagacaatgctgtgaagaatcactggaactctaccatcaaaaggaaggtggacacaggaggcttcttgagcgagtccaaagactgcaagcccccagtgtacttgctgctggagctcgaggacaaggacggcctccagagtgcccagcccacggaaggccagggaagtcttctgaccaactggccctccgtccctcctaccataaaggaggaggaaaacagtgaggaggaacttgcagcagccaccacatcgaaggaacaggagcccatcggtacagatctggacgcagtgcgaacaccagagcccttggaggaattcccgaagcgtgaggaccaggaaggctccccaccagaaacgagcctgccttacaagtgggtggtggaggcagctaacctcctcatccccgctgtgggttctagcctctctgaagccctggacttgatcgagtcggaccctgatgcttggtgtgacctgagtaaatttgacctccctgaggaaccatctgcagaggacagtatcaacaacagcctagtgcagctgcaagcgtcacatcagcagcaagtcctgccaccccgccagccttccgccctggtgcccagtgtgaccgagtaccgcctggatggccacaccatctcagacctgagccggagcagccggggcgagctgatccccatctcccccagcactgaagtcgggggctctggcattggcacaccgccctctgtgctcaagcggcagaggaagaggcgtgtggctctgtcccctgtcactgagaatagcaccagtctgtccttcctggattcctgtaacagcctcacgcccaagagcacacctgttaagaccctgcccttctcgccctcccagtttctgaacttctggaacaaacaggacacattggagctggagagcccctcgctgacatccaccccagtgtgcagccagaaggtggtggtcaccacaccactgcaccgggacaagacacccctgcaccagaaacatgctgcgtttgtaaccccagatcagaagtactccatggacaacactccccacacgccaaccccgttcaagaacgccctggagaagtacggacccctgaagcccctgccacagaccccgcacctggaggaggacttgaaggaggtgctgcgttctgaggctggcatcgaactcatcatcgaggacgacatcaggcccgagaagcagaagaggaagcctgggctgcggcggagccccatcaagaaagtccggaagtctctggctcttgacattgtggatgaggatgtgaagctgatgatgtccacactgcccaagtctctatccttgccgacaactgccccttcaaactcttccagcctcaccctgtcaggtatcaaagaagacaacagcttgctcaaccagggcttcttgcaggccaagcccgagaaggcagcagtggcccagaagccccgaagccacttcacgacacctgcccctatgtccagtgcctggaagacggtggcctgcggggggaccagggaccagcttttcatgcaggagaaagcccggcagctcctgggccgcctgaagcccagccacacatctcggaccctcatcttgtcctgaggtgttgagggtgtcacgagcccattctcatgtttacaggggttgtgggggcagagggggtctgtgaatctgagagtcattcaggtgacctcctgcagggagccttctgccaccagcccctccccagactctcaggtggaggcaacagggccatgtgctgccctgttgccgagcccagctgtgggcggctcctggtgctaacaacaaagttccacttccaggtctgcctggttccctccccaaggccacagggagctccgtcagcttctcccaagcccacgtcaggcctggcctcatctcagaccctgcttaggatgggggatgtggccaggggtgctcctgtgctcaccctctcttggtgcatttttttggaagaataaaattgcctctctcttaaaaaaaaaaaaaaaaaa

SEQ ID NO: 41 - DNA, 1280 bp, Homo sapiens
ggcacgagggcgtagcagagtggtcgttgtctttctaggtctcagccggtcgtcgcgacgttcgcccgctcgctctgaggctcctgaagccgaaaccagctagactttcctccttcccgcctgcctgtagcggcgttgttgccactccgccaccatgttcgaggcgcgcctggtccagggctccatcctcaagaaggtgttggaggcactcaaggacctcatcaacgaggcctgctgggatattagctccagcggtgtaaacctgcagagcatggactcgtcccacgtctctttggtgcagctcaccctgcggtctgagggcttcgacacctaccgctgcgaccgcaacctggccatgggcgtgaacctcaccagtatgtccaaaatactaaaatgcgccggcaatgaagatatcattacactaagggccgaagataacgcggataccttggcgctagtatttgaagcaccaaaccaggagaaagtttcagactatgaaatgaagttgatggatttagatgttgaacaacttggaattccagaacaggagtacagctgtgtagtaaagatgccttctggtgaatttgcacgtatatgccgagatctcagccatattggagatgctgttgtaatttcctgtgcaaaagacggagtgaaattttctgcaagtggagaacttggaaatggaaacattaaattgtcacagacaagtaatgtcgataaagaggaggaagctgttaccatagagatgaatgaaccagttcaactaacttttgcactgaggtacctgaacttctttacaaaagccactccactctcttcaacggtgacactcagtatgtctgcagatgtaccccttgttgtagagtataaaattgcggatatgggacacttaaaatactacttggctcccaagatcgaggatgaagaaggatcttaggcattcttaaaattcaagaaaataaaactaagctctttgagaactgcttctaagatgccagcatatactgaagtcttttctgtcaccaaatttgtacctctaagtacatatgtagatattgttttctgtaaataacctatttttttctctattctctgcaatttgtttaaagaataaagtccaaagtcagatctggtctagttaacctagaagtatttttgtctcttagaaatacttgtgatttttataatacaaaagggtcttgactctaaatgcagttttaagaattgtttttgaatttaaataaagttacttgaatttcaaaaaaaaaaaaaaaaaa

SEQ ID NO: 42 - DNA, 1334 bp, Homo sapiens
cgccgcgtgcgcctgcagacgctccgctcgctgccttctctcctggcaggcgctgccttttctccccgttaaagggcacttgggctgaaggatcgctttgagatctgaggaacccgcagcgctttgagggacctgaagctgtttttcttcgttttcctttgggttcagtttgaacgggaggtttttgatccctttttttcagaatggattatttgctcatgattttctctctgctgtttgtggcttgccaaggagctccagaaacagcagtcttaggcgctgagctcagcgcggtgggtgagaacggcggggagaaacccactcccagtccaccctggcggctccgccggtccaagcgctgctcctgctcgtccctgatggataaagagtgtgtctacttctgccacctggacatcatttgggtcaacactcccgagcacgttgttccgtatggacttggaagccctaggtccaagagagccttggagaatttacttcccacaaaggcaacagaccgtgagaatagatgccaatgtgctagccaaaaagacaagaagtgctggaatttttgccaagcaggaaaagaactcagggctgaagacattatggagaaagactggaataatcataagaaaggaaaagactgttccaagcttgggaaaaagtgtatttatcagcagttagtgagaggaagaaaaatcagaagaagttcagaggaacacctaagacaaaccaggtcggagaccatgagaaacagcgtcaaatcatcttttcatgatcccaagctgaaaggcaatccctccagagagcgttatgtgacccacaaccgagcacattggtgacagaccttcggggcctgtctgaagccatagcctccacggagagccctgtggccgactctgcactctccaccctggctgggatcagagcaggagcatcctctgctggttcctgactggcaaaggaccagcgtcctcgttcaaaacattccaagaaaggttaaggagttcccccaaccatcttcactggcttccatcagtggtaactgctttggtctcttctttcatctggggatgacaatggacctctcagcagaaacacacagtcacattcgaattcgggtggcatcctccggagagagagagaggaaggagattccacacaggggtggagtttctgacgaaggtcctaagggagtgtttgtgtctgactcaggcgcctggcacatttcagggagaaactccaaagtccacacaaagattttctaaggaatgcacaaattgaaaacacactcaaaagacaaacatgcaagtaaagaaaaaaaaaaaaaaaaa

SEQ ID NO: 43 - DNA, 2400 bp, Homo sapiens
ggcacgaggtcaaaagtggcgggtgtggcgcggggctggtagcggccggagccgtgcgagttctctaccctgcttcgcgagcgggcgagagaacgcgagtcccaggatccccggcacccagttctcttccactgcattcccccggcgcgtgtgggaccgaggtggacatggatccgcagaggtcccccctattggaagtaaaggggaacatagaactgaagagacctctgattaaggccccttcccagctgcctctctcaggaagcagactcaagaggaggcctgaccagatggaagatggcctggagcctgagaagaaacggacaagaggcctgggtgcaacgaccaaaattaccacatcccacccaagagttccatccctcactacagtgccacagacacaaggccagaccacagctcaaaaagtttccaagaagacaggaccccggtgttccacagctattgccacagggttgaagaaccagaagccagttcctgctgttcctgtccagaagtctggcacatcaggtgttcctcccatggcaggagggaagaaacccagcaaacgtccagcctgggacttaaagggtcagttatgtgacctaaatgcagaactaaaacggtgccgtgagaggactcaaacgttggaccaagagaaccagcagcttcaggaccagctcagagatgcccagcagcaggtcaaggccctggggacagagcgcacaacactggaggggcatttagccaaggtacaggcccaggctgagcagggccaacaggagctgaagaacttgcgtgcttgtgtcctggagctggaagagcggctgagcacgcaggagggcttggtgcaagagcttcagaaaaaacaggtggaattgcaggaagaacggaggggactgatgtcccaactagaggagaaggagaggaggctgcagacatcagaagcagccctgtcaagcagccaagcagaggtggcatctctgcggcaggagactgtggcccaggcagccttactgactgagcgggaagaacgtcttcatgggctagaaatggagcgccggcgactgcacaaccagctgcaggaactcaagggcaacatccgtgtattctgccgggtccgccctgtcctgccgggggagcccactccaccccctggcctcctcctgtttccctctggccctggtgggccctctgatcctccaacccgccttagcctctcccggtctgacgagcggcgtgggaccctgagtggggcaccagctcccccacctcgccatgatttttcctttgaccgggtattcccaccaggaagtggacaggatgaagtgtttgaagagattgccatgcttgtccagtcagccctggatggctatccagtatgcatctttgcctatggccagacaggcagtggcaagaccttcacaatggagggtgggcctgggggagacccccagttggaggggctgatccctcgggccctgcggcacctcttctctgtggctcaggagctgagtggtcagggctggacctacagctttgtagcaagctacgtagagatctacaatgagactgtccgggacctgctggccactggaacccggaagggtcaagggggcgagtgtgagattcgccgtgcagggccagggagtgaggagctcactgtcaccaatgctcgatatgtccctgtctcctgtgagaaagaagtggacgccctgcttcatctggcccgccagaatcgggctgtggcccgcacagcccagaatgaacggtcatcacgcagccacagtgtattccagctacagatttctggggagcactccagccgaggcctgcagtgtggggcccccctcagtcttgtggacctggccgggagtgagcgacttgaccccggcttagccctcggccccggggagcgggaacgccttcgggaaacacaggccattaacagcagcctgtccacgctggggctggttatcatggccctgagcaacaaggagtcccacgtgccttaccggaacagcaaactgacctacctgctgcagaactctctgggtggtagtgctaagatgctcatgtttgtgaacatttctccactggaagagaacgtctccgagtccctcaactctctacgctttgcctccaaggtgaaccagtgtgttattggtactgctcaggccaacaggaagtgaagacggatccagatctgtgtgtgtgtgtgtgtgtgtgtgtgtgtgtgtgtgtgtgtgtgtgtgtgtgtccctatgtctatgtatcgggtgaggggtgggagggttgctggagggtgctttattgggtggagggcaccatgtcccagggctatcaaataaagaatagtttggttttttttttaaaaaaaaaaaaaaaaaaaaaaaaaaaaaa

SEQ ID NO: 44 - DNA, 3162 bp, Homo sapiens
atgtcgaggcgcaagcaggcgaaaccccagcacatcaactcggaggaggaccagggcgagcagcagccgcagcagcagaccccggagtttgcagatgcggccccagcggcgcccgcggcgggggagctgggtgctccagtgaaccacccagggaatgacgaggtggcgagtgaggatgaagccacagtaaagcggcttcgtcgggaggagacgcacgtctgtgagaaatgctgtgcggagttcttcagcatctctgagttcctggaacataagaaaaattgcactaaaaatccacctgtcctcatcatgaatgacagcgaggggcctgtgccttcagaagacttctccggagctgtactgagccaccagcccaccagtcccggcagtaaggactgtcacagggagaatggcggcagctcagaggacatgaaggagaagccggatgcggagtctgtggtgtacctaaagacagagacagccctgccacccaccccccaggacataagctatttagccaaaggcaaagtggccaacactaatgtgaccttgcaggcactacggggcaccaaggtggcggtgaatcagcggagcgcggatgcactccctgcccccgtgcctggtgccaacagcatcccgtgggtcctcgagcagatcttgtgtctgcagcagcagcagctacagcagatccagctcaccgagcagatccgcatccaggtgaacatgtgggcctcccacgccctccactcaagcggggcaggggccgacactctgaagaccttgggcagccacatgtctcagcaggtttctgcagctgtggctttgctcagccagaaagctggaagccaaggtctgtctctggatgccttgaaacaagccaagctacctcacgccaacatcccttctgccaccagctccctgtccccagggctggcacccttcactctgaagccggatgggacccgggtgctcccgaacgtcatgtcccgcctcccgagcgctttgcttcctcaggccccgggctcggtgctcttccagagccctttctccactgtggcgctagacacatccaagaaagggaaggggaagccaccgaacatctccgcggtggatgtcaaacccaaagacgaggcggccctctacaagcacaagtgtaagtactgtagcaaggtttttgggactgatagctccttgcagatccacctccgctcccacactggagagagacccttcgtgtgctctgtctgtggtcatcgcttcaccaccaagggcaacctcaaggtgcactttcaccgacatccccaggtgaaggcaaacccccagctgtttgccgagttccaggacaaagtggcggccggcaatggcatcccctatgcactctctgtacctgaccccatagatgaaccgagtctttctttagacagcaaacctgtccttgtaaccacctctgtagggctacctcagaatctttcttcggggactaatcccaaggacctcacgggtggctccttgcccggtgacctgcagcctgggccttctccagaaagtgagggtggacccacactccctggggtgggaccaaactataattccccaagggctggtggcttccaagggagtgggacccctgagccagggtcagagaccctgaaattgcagcagttggtggagaacattgacaaggccaccactgatcccaacgaatgtctcatttgccaccgagtcttaagctgtcagagctccctcaagatgcattatcgcacccacaccggggagagaccgttccagtgtaagatctgtggccgagccttttctaccaaaggtaacctgaagacacaccttggggttcaccgaaccaacacatccattaagacgcagcattcgtgccccatctgccagaagaagttcactaatgccgtgatgctgcagcaacatattcggatgcacatgggcggtcagattcccaacacgcccctgccagagaatccctgtgactttacgggttctgagccaatgaccgtgggtgagaacggcagcaccggcgctatctgccatgatgatgtcatcgaaagcatcgatgtagaggaagtcagctcccaggaggctcccagcagctcctccaaggtccccacgcctcttcccagcatccactcggcatcacccacgctagggtttgccatgatggcttccttagatgccccagggaaagtgggtcctgccccttttaacctgcagcgccagggcagcagagaaaacggttccgtggagagcgatggcttgaccaacgactcatcctcgctgatgggagaccaggagtatcagagccgaagcccagatatcctggaaaccacatccttccaggcactctccccggccaatagtcaagccgaaagcatcaagtcaaagtctcccgatgctgggagcaaagcagagagctccgagaacagccgcactgagatggaaggtcggagcagtctcccttccacgtttatccgagccccgccgacctatgtcaaggttgaagttcctggcacatttgtgggaccctcgacattgtccccagggatgacccctttgttagcagcccagccacgccgacaggccaagcaacatggctgcacacggtgtgggaagaacttctcgtctgctagcgctcttcagatccacgagcggactcacactggagagaagccttttgtgtgcaacatttgtgggcgagcttttaccaccaaaggcaacttaaaggttcactacatgacacacggggcgaacaataactcagcccgccgtggaaggaagttggccatcgagaacaccatggctctgttaggtacggacggaaaaagagtctcagaaatctttcccaaggaaatcctggccccttcagtgaatgtggaccctgttgtgtggaaccagtacaccagcatgctcaatggcggtctggccgtgaagaccaatgagatctctgtgatccagagtgggggggttcctaccctcccggtttccttgggggccacctccgttgtgaataacgccactgtctccaagatggatggctcccagtcgggtatcagtgcagatgtggaaaaaccaagtgctactgacggcgttcccaaacaccagtttcctcacttcctggaagaaaacaagattgcggtcagctaa

SEQ ID NO: 45 - DNA, 693 bp, Homo sapiens
atggcctctcttggcctccaacttgtgggctacatcctaggccttctggggcttttgggcacactggttgccatgctgctccccagctggaaaacaagttcttatgtcggtgccagcattgtgacagcagttggcttctccaagggcctctggatggaatgtgccacacacagcacaggcatcacccagtgtgacatctatagcacccttctgggcctgcccgctgacatccaggctgcccaggccatgatggtgacatccagtgcaatctcctccctggcctgcattatctctgtggtgggcatgagatgcacagtcttctgccaggaatcccgagccaaagacagagtggcggtagcaggtggagtctttttcatccttggaggcctcctgggattcattcctgttgcctggaatcttcatgggatcctacgggacttctactcaccactggtgcctgacagcatgaaatttgagattggagaggctctttacttgggcattatttcttccctgttctccctgatagctggaatcatcctctgcttttcctgctcatcccagagaaatcgctccaactactacgatgcctaccaagcccaacctcttgccacaaggagctctccaaggcctggtcaacctcccaaagtcaagagtgagttcaattcctacagcctgacagggtatgtgtga

SEQ ID NO: 46 - DNA, 2510 bp, Homo sapiens
cccgagccccgcccctccgggcccgggtcggcgcgcccagcctgccagccgcgctgctgctgctcctcctgctgtgggaccgctgaccgcgcggctgctccgctctccccgctccaagcgccgatctgggcacccgccaccagcatggacgctcgccgcgtgccgcagaaagatctcagagtaaagaagaacttaaagaaattcagatatgtgaagttgatttccatggaaacctcgtcatcctctgatgacagttgtgacagctttgcttctgataattttgcaaacacgaggctgcagtcagttcgggaaggctgtaggacccgcagccagtgcaggcactctggacctctcagggtggcgatgaagtttccagcgcggagtaccaggggagcaaccaacaaaaaagcagagtcccgccagccctcagagaattctgtgactgattccaactccgattcagaagatgaaagtggaatgaattttttggagaaaagggctttaaatataaagcaaaacaaagcaatgcttgcaaaactcatgtctgaattagaaagcttccctggctcgttccgtggaagacatcccctcccaggctccgactcacaatcaaggagaccgcgaaggcgtacattcccgggtgttgcttccaggagaaaccctgaacggagagctcgtcctcttaccaggtcaaggtcccggatcctcgggtcccttgacgctctacccatggaggaggaggaggaagaggataagtacatgttggtgagaaagaggaagaccgtggatggctacatgaatgaagatgacctgcccagaagccgtcgctccagatcatccgtgacccttccgcatataattcgcccagtggaagaaattacagaggaggagttggagaacgtctgcagcaattctcgagagaagatatataaccgttcactgggctctacttgtcatcaatgccgtcagaagactattgataccaaaacaaactgcagaaacccagactgctggggcgttcgaggccagttctgtggcccctgccttcgaaaccgttatggtgaagaggtcagggatgctctgctggatccgaactggcattgcccgccttgtcgaggaatctgcaactgcagtttctgccggcagcgagatggacggtgtgcgactggggtccttgtgtatttagccaaatatcatggctttgggaatgtgcatgcctacttgaaaagcctgaaacaggaatttgaaatgcaagcataatatctggaaaatttgctgcctgccttctacttctcaaatctttcttgtaaaagtttccaattttttcactgaaacctgagttaaaaatcttgatgatcagcctgtttcataagaaactccaatcaagttaatcttagcagacatgtgtttctggagcatcacagaaggtatattgctagttacactttgccctcctgcagtttcttctctgctcccaacccccatctcatagcatccccctctatttccaatgctcctctccaaccgcttagtttctgaatttcttttaaattacagttttatgaaagcatattttatttacttggtgttgaaatagccctcataaaacctaagcacttggaaacacaataatagtattaactaactagatctattgaatttcagagaagagccttctaacttgtttacacaaaaacgagtatgatttagcactcatactagttgaaatttttaatagaatcaaggcacaaaagtcttaaaaccatgtggaaaaattaggtaattattgcagattgatgtctctcaatcccatgtattgcgcttatgttacaagttgttgtcacagttgagacttaatttctcctaatttcttctgcccgaagggtaagtggtgcgtccagcttacacgatcataattcaaaggttggtgggcaatgtaatacttaattaaaataatgatggaagagctatctggagattatgagtaagctgatttgaattttcagtataaaactttagtataattgtagtttgcaaagtttatttcagttcacatgtaaggtattgcaaataaattcttggacaattttgtatggaaacttgatattaaaaactagtctgtggttctttgcagtttcttgtaaatttataaaccaggcacaaggttcaagtttagattttaagcacttttataacaatgataagtgcctttttggagatgtaacttttagcagtttgttaacctgacatctctgccagtctagtttctgggcaggtttcctgtgtcagtattccccctcctctttgcattaatcaaggtatttggtagaggtggaatctaagtgtttgtatgtccaatttacttgcatatgtaaaccattgctgtgccattcaatgtttgatgcataattggaccttgaatcgataagtgtaaatacagcttttgatctgtaatgcttttatacaaaagtttattttaataataaaatgtttgttctaaaaaaaaaaaa

SEQ ID NO: 47 - DNA, 3626 bp, Homo sapiens
gacggcttagccgcggtgcagactgcggcggcggtggtctgaggaagttctatcttggcgctaaagcggagacgcatcccccgacccgaggctacgatgagcacaccggccgtgccccaggacctgcagctgcccccgagtcagagggcgcagtccgcattcaaagagcaaagaagacaaaaactcaaggaacatctgttgagaagaaaaacgctttttgcatacaagcaggaaaatgagatgttatccagtagagatcagagagttgtgacatctgaggaccaagttcaagaagggactaaagtgctgaaacttaaaacaaaaatggctgataaagaaaacatgaagagacctgcagagagcaaaaataatacagtggtggggaaacattgtattcctttaaaaccttcaaatgaactaaccaattcaactgtagtaattgacacacataaacctaaggatagtaatcaaactccgcatttgttactaactgaagatgatccccaaagtcaacatatgacattaagccaggcatttcaccttaaaaacaatagtaaaaagaaacaaatgactacagaaaaacaaaagcaagatgctaacatgcccaagaaacctgtgcttggatcttatcgtggccagattgttcagtctaagattaattcatttagaaaacctctacaagtcaaagatgagagttctgcagcaacaaagaaactttcagccactatacctaaagccacaaaacctcagcctgtaaacaccagcagtgtaacagtgaaaagtaatagatcctccaatatgactgccactactaaatttgtgagcactacatctcagaacacacaacttgtgcgacctcctattagaagtcatcacagtaatacccgggacactgtgaaacaaggcatcagtagaacctctgccaatgttacaatccggaaagggcctcatgaaaaagaactattacaatcaaaaacagctttatctagtgtcaaaaccagttcttctcaaggtataataagaaataagactctatcaagatccatagcatctgaagttgtagccaggcctgcttcattgtctaatgataaactgatggaaaagtcagagcccgttgaccagcgaagacatactgcaggaaaagcaattgttgatagtagatcagctcagcccaaagaaacctcggaagagagaaaagctcgtctgagtgagtggaaagctggcaaaggaagagtgctaaaaaggccccctaattcagtagttactcagcatgagcctgcaggacaaaatgaaaaaccagttgggtctttttggactaccatggcagaagaagatgaacaaagattatttactgaaaaagtaaacaacacattttctgaatgcctgaacttgattaatgagggatgtccaaaagaagatatactggtcacactgaatgacctgattaaaaatattccagatgccaaaaagcttgttaagtattggatatgtcttgcacttattgaaccaatcacaagtcctattgaaaatattattgcaatctatgagaaagccattctggcaggggctcagcctattgaagagatgcgacacacgattgtagatattctaacaatgaagagtcaagaaaaagctaatttaggagaaaatatggagaagtcttgtgcaagcaaggaagaagtcagagaagtcagtattgaagatacaggtgttgatgtagatccagaaaaactggaaatggagagtaaacttcatagaaatttgctacttcaagattgtgaaaaagagcaagacaacaaaacaaaagatccaacccatgatgctaaaacccccaatacagaaacgaggacaagttgcttaattaaatataatgtgtctactacgccatacttgcaaagtgtgaaaaaaaaggtgcagtttgatggaacaaattccgcatttaaagagctgaagtttttaacaccagtgagacgttctcgacgtcttcaagagaaaacttctaaattgccagatatgttaaaagatcattatccttgtgtgtcttcattggaacagctaacggagttgggaagagaaactgatgcttttgtatgccgccctaatgcagcactgtgccgggtgtactatgaggctgatacaacataagggaaataaagctctgttagggaatggggtttttattatttgtggggtgttttgttttgagtagctttatattgctcttaggtctggagttggccatgtacctatgtatcctaagcattcacggcagtgagctcctttactaacattcatgttatggcaagagttgtcctctacattggaaagctaatcctaccttgtcagtttcaaccaactgagttttttctttaagaaaggtaaattttgtcagctagtttactatgttccttgaatataaacaggttataatactaccctgttcactttactaaatataagtacagtaatgatgcataattagaaaatgaggtattctaggtaaaatgtatgtttgccttgacatgtttttaaaagttatgatgtacctccctgcctttaaacagaatacttttttcttttttttggcctttctcagattagtcaaaaattctatagaatgactcacttcgaatactaagacacaggaggtttagcctgctttcttaccaaattcatgttacccagacttgtgttctcttgcgtcccttggactgcctgttgattgatggaaagtgtctgcactgacacttttcgtcagtagtctgtagtttcgtggcctcttttgattataactggggtcaccaagaaggtttacttaattaaataccgcatttctaagagaagatactttgtgtaagaaaagatgccacatttagtggtttaacttttgtaacttcacttgatagtttttaagcaattagaatggagttagggaaagaacatatcatactgaacaaatgtcattctagtttagatagcatttctaagataactgatactaatacttgttttcttccctataacataaaaaacttcactgttaagtcatgtcccttgaaacatgatagttacatacacagttttctctccacacataaataacaccactaaagttgttttgtaaggttccaaactaatatggcatatatcaactctacagtttcaaataaatgactttttaattgtaaaagattagttgaaaaactgtatgaatgtgaagatcacatgcttagtcatttctatgttcattccactttgtatatcttttctatttattgacttctcatgttctagagagtaggacttttattccgtgtacctgatatatatacaattaaaatatctgtataattatgttttaatgaggtttatttcaacagatattttatgaaatgcagtttaaccacagtgaatgaattttagctttgcttttgaaatacattgtaagatttgacttgaggtttttgacacttaagtacatgcttaatgatatattttcaaaagtcatcagtctacttacataaactttacctaatttttttcactttaacaaaaacataactatgcccttgttttttcatactttgacccaaaatatgccattttgaaataaaatttaagctttg

SEQ ID NO: 48 - DNA, 2956 bp, Homo sapiens
ggcacgaggccaggcgactccgggacagggggtctcggccgtcggcgtcatggtttcgcgcgtgcagctcccgcctgagatccagctggctcagcgcctggcggggaatgagcaggtgacccgggaccgggcggtgaggaagctccggaaatacatcgtcgccaggactcagcgggccgcaggtggttttacgcacgacgagctgctgaaggtgtggaaaggactgttttattgcatgtggatgcaggacaagccactcctccaggaagaattaggaaggactatttcccagctcgttcatgcttttcagaccacggaggcgcagcacctgttccttcaggccttctggcagaccatgaatcgcgagtggacgggcattgacaggctgcgcctggataaattctacatgctcatgcggatggtcctgaacgagtccttgaaggttctgaagatgcaaggctgggaagaaagacagatcgaggagctgctagagctgctgatgactgagatcctgcaccccagcagccaggcccccaacggtgtgaagagccacttcatcgagatcttcctggaggagctgaccaaagtgggcgccgaggagcttacggcagaccagaacctgaagttcatcgaccccttctgcagaatcgctgcccggaccaaggattccttggttttgaacaacatcactcgaggcatctttgagacgattgtggagcaggccccgcttgccattgaagacctcctgaatgaactggacacacaggatgaggaggtggcgtcggacagtgatgagtcctctgagggtggtgagcgtggagacgcgctgtcccagaagaggtctgagaagccgcccgcaggctccatctgcagggctgaacctgaggctggtgaggagcaggcaggtgacgacagggacagtggcggccccgttctccagtttgactacgaggcagttgctaacagactgtttgaaatggccagccgccagagcaccccttctcagaacagaaagcgtctctacaaagtgatccggaagctgcaggacctggcaggaggcattttccctgaagatgagatcccagagaaggcctgcaggcgcctgcttgaagggaggcggcagaagaagacgaagaagcagaagcgtctgctcaggttgcagcaggagagagggaaaggtgagaaggagcccccgagcccgggcatggagaggaagaggagcaggaggaggggtgtaggggccgaccccgaggcgcgggcagaggctggtgagcagccaggcacagctgagcgggccctgctccgagatcagcccaggggccgtggccagagaggggctcgccagagaaggaggacacctcggcccctgaccagtgcccgagcaaaggcggccaatgtccaggagccggagaagaagaagaaacgcagggagtgatgtggccgggccaaggacaggcagggagggaggccaggcctcgcttgcaccgcgggacgaggctgaccgggctgttctgtagactcaggaccgtggctccagaactcctgtgccaggcgggagggaagggcggcactggagagatgggcccatcattaggggccagcatcccaggaactggacctttccccagagcctccgcctgtggctgtgatgaccttgggccagaaggtcaaactccgaagactgaaactctgcctgcagcaggactggctgcccctgctgtggggggttcagaaaataaaatgccgcgcagcccttgccagggaagtgtcgcttcgggtgtgtcctacggacgtgtgggaggtggcaggcgccagcctccgagcagtgtggtggtttatattcatgtttgtggaaaaatcttgcaagacatttctcctttcacagaactgcccaggtgttaacagggctgtctggacggggctcttttgcttccccctcaatctggggtctagagttgtgcagggaattcagctccagtaaggcctggattgcccggggtgagcgtgtgtgtggtgggaagacctggcttccgcgagagccttgttcctggaggcaggagcgccccgccatcctgggtacccgcgggtccgcaggctgcgcacctctttccctcagccaggtcaccctcagcgtcctccctgcccctctccccttcacacctgctggagcctgtgagggaggtggcgggtccccactgtggcgacggagagctgacagtagcccagggctttctacctgcatggaacaagggcctgtctgccgccagcgctgtggccacagcctgcataggtgacaaggggccgctgcgttgggttttgcccgcatcttctgttccatgggtgcccagccagccaggccgtgtgggatccagcgagaggccagggcttggagtgggcctgggaccaggaaggacctctaggctgtggctggccttgtgcagaccctggactgcatccggttccccaaagccctgctgcattcgagtgtcccccaaccccgggcaggtggcacctggtgacacctccttcagtcccactcagctgggcggccggggcaggcttagggcacagttaggggccaaggagagggaaggccagggcccctgttctaggggttagggttctttccccaaaggaacttaaaaagacaagcgtggccaggcacagtggctcacacctgtaatcccagcactttgggaggccgaggtggccagatcacctgaggtcaggagtttgagaccagactgaccaacatggagaaaccccatctctactaaaatacaaaattagccaggcgtggtggcacatgcctgtaatcccagctactcgggaggctgaggcaggagaattgcttgaacctgggaggcagaggttgtggtgagctaagatcacgccattgcactccagcctgggcaacgagagggaaactctgtttcaaaaaaaaaaaaaaaaaaaa

SEQ ID NO: 49 - DNA, 1414 bp, Homo sapiens
ggcacgaggcacctcgctcgcagcctccccagcgcagcagcccggctgtgggcctgcggcagccgggtcttcctggtccccacctcctggggccgacgggcggcaggaaggggctcggcgggacgcgccgtcagggacctgaggaggaacaacggaacgcgttcggaacggcctggactcccgagactcacccgactcgtggccacaccgggagaactgaagcggcagtagccggcggagacgcccgacccgaaggccggctgctagggagcagacagctgaaccgcttgccagacgccgaaacccagtgacgccctccaccgctccaccgtgctcccggctccccgcccccgccgcccgcgggccccaaggcgcatgcgccgcctgtcctggaggggcccatttccgtccgtcgtggggggaggcacagtgagtccactggggcacggcagcgtctaagccacaagccgagcacataagccaggtcctaacggagcctatgtgtaagtccactactggtgcaaggttgcacacttctaagaagagcggcgtggggggctcggcgaccttcgcttcagtcgctcccccgtgcagtcccctgtgcccaagacacagcctgatgcttgtgctccggtgggcggagcttggaggcggcgggaactgcaattggtggctttgaaggcgcggcgagcgggaacagctcttgaggagtgagactgcaggagatgtgggccgtgccaaagagatggatgagactgttgctgagttcatcaagaggaccatcttgaaaatccccatgaatgaactgacaacaatcctgaaggcctgggattttttgtctgaaaatcaactgcagactgtaaatttccgacagagaaaggaatctgtagttcagcacttgatccatctgtgtgaggaaaagcgtgcaagtatcagtgatgctgccctgttagacatcatttatatgcaatttcatcagcaccagaaagtttgggatgtttttcagatgagtaaaggaccaggtgaagatgttgacctttttgatatgaaacaatttaaaaattcgttcaagaaaattcttcagagagcattaaaaaatgtgacagtcagcttcagagaaactgaggagaatgcagtctggattcgaattgcctggggaacacagtacacaaagccaaaccagtacaaacctacctacgtggtgtactactcccagactccgtacgccttcacgtcctcctccatgctgaggcgcaatacaccgcttctgggtcaggagttagaagctactgggaaaatctacctccgacaagaggagatcattttagatattaccgaaatgaagaaagcttgcaattagtgaacatgaaaggaaaataaaaattcctcacagtcaaaaaaaaaaaaaaaaaaa

SEQ ID NO: 50 - DNA, 1372 bp, Homo sapiens
gcacgagggcgcttttgtctccggtgagttttgtggcgggaagcttctgcgctggtgcttagtaaccgactttcctccggactcctgcacgacctgctcctacagccggcgatccactcccggctgttcccccggagggtccagaggcctttcagaaggagaaggcagctctgtttctctgcagaggagtagggtcctttcagccatgaagcatgtgttgaacctctacctgttaggtgtggtactgaccctactctccatcttcgttagagtgatggagtccctagaaggcttactagagagcccatcgcctgggacctcctggaccaccagaagccaactagccaacacagagcccaccaagggccttccagaccatccatccagaagcatgtgataagacctccttccatactggccatattttggaacactgacctagacatgtccagatgggagtcccattcctagcagacaagctgagcaccgttgtaaccagagaactattactaggccttgaagaacctgtctaactggatgctcattgcctgggcaaggcctgtttaggccggttgcggtggctcatgcctgtaatcctagcactttgggaggctgaggtgggtggatcacctgaggtcaggagttcgagaccagcctcgccaacatggcgaaaccccatctctactaaaaatacaaaagttagctgggtgtggtggcagaggcctgtaatcccagttccttgggaggctgaggcgggagaattgcttgaacccggggacggaggttgcagtgaaccgagatcgcactgctgtacccagcctgggccacagtgcaagactccatctcaaaaaaaaaaagaaaagaaaaagcctgtttaatgcacaggtgtgagtggattgcttatggctatgagataggttgatctcgcccttaccccggggtctggtgtatgctgtgctttcctcagcagtatggctctgacatctcttagatgtcccaacttcagctgttgggagatggtgatattttcaaccctacttcctaaacatctgtctggggttcctttagtcttgaatgtcttatgctcaattatttggtgttgagcctctcttccacaagagctcctccatgtttggatagcagttgaagaggttgtgtgggtgggctgttgggagtgaggatggagtgttcagtgcccatttctcattttacattttaaagtcgttcctccaacatagtgtgtattggtctgaagggggtggtgggatgccaaagcctgctcaagttatggacattgtggccaccatgtggcttaaatgattttttctaactaataaagtggaatatatatttcaaaaaaaaaaaaaaaaaa

SEQ ID NO: 51 - DNA, 4050 bp, Homo sapiens
gctggaagccgagaggagaagacagctggttgtgggagagttcccccgcctcagactcctggttttttccaggagacacactgagctgagactcacttttctcttcctgaatttgaaccaccgtttccatcgtctcgtagtccgacgcctggggcgatggatccgtttacggagaaactgctggagcgaacccgtgccaggcgagagaatcttcagagaaaaatggctgagaggcccacagcagctccaaggtctatgactcatgctaagcgagctagacagccactttcagaagcaagtaaccagcagcccttctctggtggtgaagagaaatcttgttcaaaaccatcgccatcaaaaaaacgctgttctgacaacactgaagtagaagtttctaacttggaaaataaacaaccagttgagtcgacatctgcaaaatcttgttctccaagtcctgtgtctcctcaggtgcagccacaagcagcagataccatcagtgattctgttgctgtcccggcatcactgctgggcatgaggagagggctgaactcaagattggaagcaactgcagcctcctcagttaaaacacgtatgcaaaaacttgcagagcaacggcgccgttgggataatgatgatatgacagatgacattcctgaaagctcactcttctcaccaatgccatcagaggaaaaggctgcttcccctcccaaacctctgctttcaaatgcctcggcaactccagttggcagaaggggccgtctggccaatcttgccgcaactatttgctcctgggaagatgatgtaaatcactcatttgcaaaacaaaacagtgtacaagaacagcctggtaccgcttgtttatccaaattttcctctgcaagtggagcatctgctaggatcaatagcagcagtgttaagcaggaagctacattctgttcccaaagggatggcgatgcctctttgaataaagccctgtcctcaagtgctgatgatgcgtctttggttaatgcctcaatttccagctctgtgaaagctacttcttctccagtgaaatctactacatctatcactgatgctaaaagttgtgagggacaaaatcctgagctacttccaaaaactcctattagtcctctgaaaacgggggtatcgaaaccaattgtgaagtcaactttatcccagacagttccatccaagggagaattaagtagagaaatttgtctgcaatctcaatctaaagacaaatctacgacaccaggaggaacaggaattaagcctttcctggaacgctttggagagcgttgtcaagaacatagcaaagaaagtccagctcgtagcacaccccacagaacccccattattactccaaatacaaaggccatccaagaaagattattcaagcaagacacatcttcatctactacccatttagcacaacagctcaagcaggaacgtcaaaaagaactagcatgtcttcgtggccgatttgacaagggcaatatatggagtgcagaaaaaggcggaaactcaaaaagcaaacaactagaaaccaaacaggaaactcactgtcagagcactcccctcaaaaaacaccaaggtgtttcaaaaactcagtcacttccagtaacagaaaaggtgaccgaaaaccagataccagccaaaaattccagtacagaacctaaaggtttcactgaatgcgaaatgacgaaatctagccctttgaaaataacattgtttttagaagaggacaaatccttaaaagtaacatcagacccaaaggttgagcagaaaattgaagtgatacgtgaaattgagatgagtgtggatgatgatgatatcaatagttcgaaagtaattaatgacctcttcagtgatgtcctagaggaaggtgaactagatatggagaagagccaagaggagatggatcaagcattagcagaaagcagcgaagaacaggaagatgcactgaatatctcctcaatgtctttacttgcaccattggcacaaacagttggtgtggtaagtccagagagtttagtgtccacacctagactggaattgaaagacaccagcagaagtgatgaaagtccaaaaccaggaaaattccaaagaactcgtgtccctcgagctgaatctggtgatagccttggttctgaagatcgtgatcttctttacagcattgatgcatatagatctcaaagattcaaagaaacagaacgtccatcaataaagcaggtgattgttcggaaggaagatgttacttcaaaactggatgaaaaaaataatgcctttccttgtcaagttaatatcaaacagaaaatgcaggaactcaataacgaaataaatatgcaacagacagtgatctatcaagctagccaggctcttaactgctgtgttgatgaagaacatggaaaagggtccctagaagaagctgaagcagaaagacttcttctaattgcaactgggaagagaacacttttgattgatgaattgaataaattgaagaacgaaggacctcagaggaagaataaggctagtccccaaagtgaatttatgccatccaaaggatcagttactttgtcagaaatccgcttgcctctaaaagcagattttgtctgcagtacggttcagaaaccagatgcagcaaattactattacttaattatactaaaagcaggagctgaaaatatggtagccacaccattagcaagtacttcaaactctcttaacggtgatgctctgacattcactactacatttactctgcaagatgtatccaatgactttgaaataaatattgaagtttacagcttggtgcaaaagaaagatccctcaggccttgataagaagaaaaaaacatccaagtccaaggctattactccaaagcgactcctcacatctataaccacaaaaagcaacattcattcttcagtcatggccagtccaggaggtcttagtgctgtgcgaaccagcaacttcgcccttgttggatcttacacattatcattgtcttcagtaggaaatactaagtttgttctggacaaggtcccctttttatcttctttggaaggtcatatttatttaaaaataaaatgtcaagtgaattccagtgttgaagaaagaggttttctaaccatatttgaagatgttagtggttttggtgcctggcatcgaagatggtgtgttctttctggaaactgtatatcttattggacttatccagatgatgagaaacgcaagaatcccataggaaggataaatctggctaattgtaccagtcgtcagatagaaccagccaacagagaattttgtgcaagacgcaacacttttgaattaattactgtccgaccacaaagagaagatgaccgagagactcttgtcagccaatgcagggacacactctgtgttaccaagaactggctgtctgcagatactaaagaagagcgggatctctggatgcaaaaactcaatcaagttcttgttgatattcgcctctggcaacctgatgcttgctacaaacctattggaaagccttaaactgggaaatttccatgctatctagaggtttttgatgtcatcttaagaaacacacttaagagcatcagatttactgattgcattttatgctttaagtacgaaagggtttgtgccaatattcactacgtattatgcagtatttatatcttttgtatgtaaaactttaactgatttctgtcattcatcaatgagtagaagtaaatacattatagttgattttgctaaatcttaatttaaaagcctcattttcctagaaatctaattattcagttattcatgacaatatttttttaaaagtaagaaattctgagttgtcttcttggagctgtaggtcttgaagcagcaacgtctttcaggggttggagacagaaacccattctccaatctcagtagttttttcgaaaggctgtgatcatttattgatcgtgatatgacttgttactagggtactgaaaaaaatgtctaaggcctttacagaaacatttttagtaatgaggatgagaactttttcaaata

SEQ ID NO: 52 - DNA, 2382 bp, Homo sapiens
atgtggatccaggttcggaccatggatgggaggcagacccacacggtggactcgctgtccaggctgaccaaggtggaggagctgaggcggaagatccaggagctgttccacgtggagccaggcctgcagaggctgttctacaggggcaaacagatggaggacggccataccctcttcgactacgaggtccgcctgaatgacaccatccagctcctggtccgccagagcctcgtgctcccccacagcaccaaggagcgggactccgagctctccgacaccgactccggctgctgcctgggccagagtgagtcagacaagtcctccacccacggtgaggcggccgccgagactgacagcaggccagccgatgaggacatgtgggatgagacggaattggggctgtacaaggtcaatgagtacgtcgatgctcgggacacgaacatgggggcgtggtttgaggcgcaggtggtcagggtgacgcggaaggccccctcccgggacgagccctgcagctccacgtccaggccggcgctggaggaggacgtcatttaccacgtgaaatacgacgactacccggagaacggcgtggtccagatgaactccagggacgtccgagcgcgcgcccgcaccatcatcaagtggcaggacctggaggtgggccaggtggtcatgctcaactacaaccccgacaaccccaaggagcggggcttctggtacgacgcggagatctccaggaagcgcgagaccaggacggcgcgggaactctacgccaacgtggtgctgggggatgattctctgaacgactgtcggatcatcttcgtggacgaagtcttcaagattgagcggccgggtgaagggagccccatggttgacaaccccatgagacggaagagcgggccgtcctgcaagcactgcaaggacgacgtgaacagactctgcagggtctgcgcctgccacctgtgcgggggccggcaggaccccgacaagcagctcatgtgcgatgagtgcgacatggccttccacatctactgcctggacccgcccctcagcagtgttcccagcgaggacgagtggtactgccctgagtgccggaatgatgccagcgaggtggtactggcgggagagcggctgagagagagcaagaagaatgcgaagatggcctcggccacatcgtcctcacagcgggactggggcaagggcatggcctgtgtgggccgcaccaaggaatgtaccatcgtcccgtccaaccactacggacccatcccggggatccccgtgggcaccatgtggcggttccgagtccaggtcagcgagtcgggtgtccatcggccccacgtggctggcatccatggccggagcaacgacggatcgtactccctagtcctggcggggggctatgaggatgatgtggaccatgggaattttttcacatacacgggtagtggtggtcgagatctttccggcaacaagaggaccgcggaacagtcttgtgatcagaaactcaccaacaccaacagggcgctggctctcaactgctttgctcccatcaatgaccaagaaggggccgaggccaaggactggcggtcggggaagccggtcagggtggtgcgcaatgtcaagggtggcaagaatagcaagtacgcccccgctgagggcaaccgctacgatggcatctacaaggttgtgaaatactggcccgagaaggggaagtccgggtttctcgtgtggcgctaccttctgcggagggacgatgatgagcctggcccttggacgaaggaggggaaggaccggatcaagaagctggggctgaccatgcagtatccagaaggctacctggaagccctggccaaccgagagcgagagaaggagaacagcaagagggaggaggaggagcagcaggaggggggcttcgcgtcccccaggacgggcaagggcaagtggaagcggaagtcggcaggaggtggcccgagcagggccgggtccccgcgccggacatccaagaaaaccaaggtggagccctacagtctcacggcccagcagagcagcctcatcagagaggacaagagcaacgccaagctgtggaatgaggtcctggcgtcactcaaggaccggccggcgagcggcagcccgttccagttgttcctgagtaaagtggaggagacgttccagtgtatctgctgtcaggagctggtgttccggcccatcacgaccgtgtgccagcacaacgtgtgcaaggactgcctggacagatcctttcgggcacaggtgttcagctgccctgcctgccgctacgacctgggccgcagctatgccatgcaggtgaaccagcctctgcagaccgtcctcaaccagctcttccccggctacggcaatggccggtga

SEQ ID NO: 53 - DNA, 3072 bp, Homo sapiens
acttgagagagacagagagaccacgccgattgctgagaggaactggaagaagaaaaattcccagactcagtgggaagagctccctcaccatgagtagcgctatgttggtgacttgcctcccggaccccagcagcagcttccgtgaggatgccccgcggcccccagtgccaggggaagaaggggagaccccaccgtgtcagccaggggtgggcaagggccaggtcaccaaacccatgtctgtctcttccaacaccaggcggaacgaagatgggttgggggagccggaggggcgggcatctccggattcccctctgacccggtggaccaagtccttacactccttattgggcgatcaagacggtgcttacctgttccgaactttcctggagagggagaaatgcgtggataccttagacttctggtttgcctgcaatggattcaggcagatgaacctgaaggataccaaaactttacgagtagccaaagcgatctacaaaaggtacattgagaacaacagcattgtctccaagcagctgaagcctgccaccaagacctacataagagatggcatcaagaagcagcagattgattccatcatgtttgaccaggcgcagaccgagatccagtcggtgatggaggaaaatgcctaccagatgtttttgacttctgatatatacctcgaatatgtgaggagtgggggagaaaacacagcttacatgagtaatgggggactcgggagcctaaaggtcgtgtgtggctatctccccaccttgaatgaagaagaggagtggacttgtgccgacttcaagtgcaaactttcgccaaccgtggttggcttgtccagcaaaactctgagggccacggcgagtgtgaggtccacggaaactgttgacagtggatacaggtccttcaagaggagcgatcctgttaatccttatcacataggttctggctatgtctttgcaccagccaccagcgccaacgacagtgagatatccagtgatgcgctgacggatgattccatgtccatgacggacagcagtgtagatggaattcctccttatcgtgtgggcagtaagaaacagctccagagagaaatgcatcgcagtgtgaaggccaatggccaagtgtctctacctcatttcccgagaacccaccgcctgcccaaggagatgacccccgtggaacccgccacctttgcagctgagctgatctcgaggctggaaaagctgaagctggagttggagagccgccacagcctggaggagcgcctgcagcagatccgagaggatgaagagagagagggctccgagctcacactcaattcgcgggagggggcgcccacgcagcaccccctctccctactgccctccggcagctacgaggaagacccgcagacgatactggacgatcacctgtccagggtcctcaagacccctggctgccagtctccgggcgtaggccgctatagccctcgctcccgctccccggaccaccaccaccaccaccattcgcagtaccactccctgctcccgcccggtggcaagctgcctcccgcggccgcctcgccgggcgcctgccccctcctcgggggcaaaggctttgtgaccaagcagacgacgaagcatgtccaccaccactacatccaccaccatgccgtccccaagaccaaggaggagatcgaggcggaggccacgcagcgggtgcactgcttctgccctgggggcagcgagtattactgctactcgaaatgcaaaagccactccaaggctccggaaaccatgcccagcgagcagtttggcggcagcagaggcagtaccttgcccaaacgcaatgggaaaggcacggagccgggcctggccctgcccgccagggaaggaggggcccccggcggagctggggccctgcagcttccccgggaggaaggagacaggtcgcaggatgtctggcagtggatgctggagagtgagcggcagagcaagcccaagccccatagtgcccaaagcacaaaaaaggcctaccccttggagtctgcccgctcgtctccaggcgaacgagccagccggcaccatctgtgggggggcaacagcgggcacccccgcaccaccccccgtgcccacctgttcacccaggaccctgcgatgcctcccctgaccccacccaacacgctggctcagctggaggaggcctgtcgcaggctagctgaggtgtcgaagcccccaaagcagcggtgctgtgtggccagtcagcagagggacaggaatcattcggccactgttcagacgggagccacacccttctccaatccaagcctggctccagaagatcacaaagagccaaagaaactggcaggtgtccacgcgctccaggccagtgagttggttgtcacttactttttctgtggggaagaaattccataccggaggatgctgaaggctcagagcttgaccctgggccactttaaagagcagctcagcaaaaagggaaattataggtattacttcaaaaaagcaagcgatgagtttgcctgtggagcggtgtttgaggagatctgggaggatgagacggtgctcccgatgtatgaaggccggattctgggcaaagtggagcggatcgattgagccctggggtctggctttggtgaactgttggagcccgaagctcttgtgaactgtcttggctgtgagcaactgcgacaaaacattttgaaggaaaattaaaccaatgaagaagacaaagtctaaggaagaatcggccagtgggcttcgggagggcggggggaggttgattttcatgattcatgagctgggtactgactgagataagaaaagcctgaactatttattaaaaacatgaccactcttggctattgaagatgctgcctgtatttgagagactgccatacataatatatgacttcctagggatctgaaatccataaactaagagaaactgtgtatagcttacctgaacaggaatccttactgatatttatagaacagttgatttcccccatccccagtttatggatatgctgctttaaacttgggaagggggagacaggtaagtttt

SEQ ID NO: 54 - DNA, 538 bp, Homo sapiens
gctacactagagcagagtacgagtctgaggcggagggagtaatggcaggacaagcgtttagaaagtttcttccactctttgaccgagtattggttgaaaggagtgctgctgaaactgtaaccaaaggaggcattatgcttccagaaaaatctcaaggaaaagtattgcaagcaacagtagtcgctgttggatcgggttctaaaggaaagggtggagagattcaaccagttagcgtgaaagttggagataaagttcttctcccagaatatggaggcaccaaagtagttctagatgacaaggattatttcctatttagagatggtgacattcttggaaagtacgtagactgaaataagtcactattgaaatggcatcaacatgatgctgcccattccactgaagttctgaaatctttcgtcatgtaaataatttccatatttctcttttataataaactaatgataactaatgacatccagtgtctccaaaattgtttccttgtactgatataaacacttccaaataaaaatatgtaaat

SEQ ID NO: 55 - DNA, 1347 bp, Homo sapiens
ggggcctggtgtgattccgtcctgcgcggttgttctctggagcagcgttcttttatctccgtccgccttctctcctacctaagtgcgtgccgccacccgatggaagattcgatggacatggacatgagccccctgaggccccagaactatcttttcggttgtgaactaaaggccgacaaagattatcactttaaggtggataatgatgaaaatgagcaccagttatctttaagaacggtcagtttaggggctggtgcaaaggatgagttgcacattgttgaagcagaggcaatgaattacgaaggcagtccaattaaagtaacactggcaactttgaaaatgtctgtacagccaacggtttcccttgggggctttgaaataacaccaccagtggtcttaaggttgaagtgtggttcagggccagtgcatattagtggacagcacttagtagctgtggaggaagatgcagagtcagaagatgaagaggaggaggatgtgaaactcttaagtatatctggaaagcggtctgcccctggaggtggtagcaaggttccacagaaaaaagtaaaacttgctgctgatgaagatgatgacgatgatgatgaagaggatgatgatgaagatgatgatgatgatgattttgatgatgaggaagctgaagaaaaagcgccagtgaagaaatctatacgagatactccagccaaaaatgcacaaaagtcaaatcagaatggaaaagactcaaaaccatcatcaacaccaagatcaaaaggacaagaatccttcaagaaacaggaaaaaactcctaaaacaccaaaaggacctagttctgtagaagacattaaagcaaaaatgcaagcaagtatagaaaaaggtggttctcttcccaaagtggaagccaaattcatcaattatgtgaagaattgcttccggatgactgaccaagaggctattcaagatctctggcagtggaggaagtctctttaagaaaatagtttaaacaatttgttaaaaaattttccgtcttatttcatttctgtaacagttgatatctggctgtcctttttataatgcagagtgagaactttccctaccgtgtttgataaatgttgtccaggttctattgccaagaatgtgttgtccaaaatgcctgtttagtttttaaagatggaactccaccctttgcttggttttaagtatgtatggaatgttatgataggacatagtagtagcggtggtcagacatggaaatggtggggagacaaaaatacacatgtgaaataaaactcagtattttaataaagtaaaaaaaaaaaaaaccaaaaaaaaaaaaaaaaaaaaaaaaaaaaa

SEQ ID NO: 56 - DNA, 2331 bp, Homo sapiens
gcgggattttcaagcgtaggcccccgggaactcgagctgccatgagcctctgggtggacaagtatcggccctgctccttgggacggctggactatcacaaggagcaggcggcccagctgcggaacctggtgcagtgtggtgactttcctcatctgttagtgtacggaccatcaggtgctggaaaaaagacaagaattatgtgtattctacgtgaactttatggtgttggagtggaaaaattgagaattgaacatcagaccatcacaactccatctaaaaaaaaaattgaaattagcaccattgcaagtaactaccaccttgaagttaatcctagtgatgctggaaatagtgaccgagtagtcattcaggagatgttgaaaacagtggcacaatcacaacaacttgaaacaaactctcaaagggattttaaagtggtattattgacagaagttgacaaactcaccaaagatgctcagcatgccttgcgaagaaccatggaaaaatatatgtctacctgcagattgatcttgtgctgcaattctacatctaaagtgatcccacctattcgtagtaggtgcttggcggttcgtgtgcctgctcccagcattgaagatatttgccacgtgttatctactgtgtgtaagaaggaaggtctgaatcttccttcacaactggctcatagacttgcagagaagtcttgtagaaatctcagaaaagccctgcttatgtgtgaagcctgcagagtgcaacaatatccttttactgcagatcaagaaatccctgagacagattgggaggtgtatctgagggagactgcaaatgctattgtcagtcagcaaactccacaaaggctccttgaagttcgtggaaggctgtatgagcttctaactcattgtattcctcctgagataataatgaagggccttctctcagaactgttacataattgtgatggacaactgaaaggggaggtggcacaaatggcagcttactatgagcatcgtctacagctgggtagcaaagccatttatcacttggaagcgtttgtggccaaattcatggcactttataagaagttcatggaggatggattggaaggcatgatgttctgacttctgtcagttattcttgcaaagatttctcagtatcagtatttacatacagcttatattaaaagagctgtgggtaaattaactgaacttaatcatgtcgtatttgcgtttttttggtaataacttctctgtgaactattaatcatcctctgagttaaataattgctcctatactattgaagtatgtagttttgtacataacttagagactttagagtctaagaaaatgatcttaatttactttaagcattggttattcaagtattcattgttgatcctcctattctcttccgtctaatctctcacctgctaaaggagatttacacattagaaagcaaagattattttcatttatccagatgaccattttctgccacaggtaacatgattgtttgacacaccattatatttaattctagtttctctcaatgaataattgtatttttgtaggaaatgtaagatttcattctgaaacataattattggtatggacaaaattgcagataccatttctgttgaggctgcagatttccaacttttatttcagtggttcagattagtattaggtcggtactaagaaataagcatgttttcactaatttaagtacttgagactcttgaagaaaattcagaatgaagttctggagaaaggtatgttactgtagtaattactctttgaacaggttttgtgttttgtcattagctctgccctttttaattaaatattttggttcatggaccaaagggtttacttgacaaatttgtgtgacagactccgaacaattcctttactacgaagtataatttataaaataaaatatacccattttaagggtacagtttgatttttgaccagtgaaactatgatcccaatcaaggtatagatgccgtcaccccaaaaagttccctccatatccctttgcagtcagttcatccctaccctggcccagatgatcactgatcttgtcattatagatgagttttgccagttcaagaatttaatggaatcagatattgtaagcattcttgtgtaatacttcattctctctcattattgagattcatccatattgttgaatgtttcactagttaatgtttattgttcaatatttttgtatatacttttaaagcctattcacttgctgatggatctttggtttgtttccaggtttggttattatgaataaagttgctgtgaataaaaaaaaaaaaaaaaaaa

SEQ ID NO: 57 - DNA, 1548 bp, Homo sapiens
ggcacgagggcagagtcaggtgcggacgactttgtctgtaggagcagcggcggcttgaggacccggggagaccctcaagaatcgacccatcaggacgccagagctgcttcagcggtgaccaccttctccctctaacacattcttcccttcttcacaaacggcccatgtcagacgaaggctcaagggggagccgcctgcccctggcgctgcccccggcctcccagggttgctcttcagggggcggcggcggcggctcctcggctgggggctcgggcaattcccggcccccacgcaacctccaaggcttgctgcagatggccatcaccgcgggctctgaagagccagaccctcctccagaaccgatgagtgaggagaggcgtcagtggctgcaggaggccatgtcggctgccttccgaggccagcgggaggaggtggagcagatgaagagctgcctccgagtgctgtcacagcccatgccccccactgctggggaggccgagcaggcggccgaccagcaagagcgagagggggccctggagctgctggccgacctgtgtgagaacatggacaatgccgcagacttctgccagctgtctggcatgcacctgctggtgggccggtacctggaggcgggggctgcgggactgcggtggcgggcggcacagctcatcggcacgtgcagtcagaacgtggcagccatccaggagcaggtgctgggcctgggtgccctgcgtaagctgctgcggctgctggaccgcgacgcctgcgacacggtgcgcgtcaaggccctcttcgccatctcctgtctggtccgagagcaggaggctgggctgctgcagttcctccgcctggacggcttctctgtgttgatgagggccatgcagcagcaggtgcagaagctcaaggtcaaatcagcattcctgctgcagaacctgctggtgggccaccctgaacacaaagggaccctgtgctccatggggatggtccagcagctggtggccctggtgcggacagagcacagccccttccacgagcacgtgcttggagccctgtgcagcctggtgacagactttccgcagggtgtgcgcgagtgtcgggagccggaactgggcctggaggagctcctccgccaccgctgtcagctgctgcagcagcatgaggagtaccaggaggagctggagttctgtgaaaagctgctacagacctgtttctccagcccagcggacgacagcatggatcggtgaaaccaggtggcttcttgcccccttctccgtgggaaccccaggcctcttgcctccctccccacctacaaggccctctcccaagggatcgcagggcctaggtgcctggacccagggtgtgccagcccgtctctgtgcagtccctggaaggggcgctgagaaaggcaccagctccttggaccccacctcccatgctctcactctcatccccgttctcttgtccacacagctcttccaataaaggtgtttctcttcaaaaaaaaaaaaaaaaaaaaaaaaaaaaaaaaaaaaaaaaaaaaaaaaaaaa

SEQ ID NO: 58 - DNA, 3198 bp, Homo sapiens
  misc_feature (3038)..(3038): A, T, G or C
  misc_feature (3062)..(3062): A, T, G or C
  misc_feature (3066)..(3066): A, T, G or C
  misc_feature (3082)..(3082): A, T, G or C
  misc_feature (3121)..(3121): A, T, G or C
  misc_feature (3132)..(3132): A, T, G or C
  misc_feature (3174)..(3174): A, T, G or C
  misc_feature (3177)..(3177): A, T, G or C
ctgggttggcgggctggcaggctgtagccgagcgcgggcaggactcgtcccggcagggttccagagccatgggagcggaaaggaggctgctgtcgattaaggaggcctttcggctggcgcagcagccgcaccagaaccaggcgaagctggtggtggcgctgagccgcacctaccgcacgatggatgataagacagtttttcatgaggagttcattcattaccttaaatatgttatggtggtctataaacgtgaaccagctgtggagagggtaatagaatttgcagcaaagtttgttacctcatttcaccaatcagatatggaagatgatgaggaagaggaagatggtggccttttaaattatttgtttacttttctcttaaagtctcatgaagcaaacagcaatgcagtgagatttagagtgtgcctgctcataaacaagcttttgggaagtatgccagaaaatgctcagattgatgatgatgtgtttgataaaattaataaagccatgcttattagattgaaagataagattccaaatgtgagaatacaggcagttctggcgctttcacgacttcaggatcccaaggatgatgaatgcccagtggttaatgcatatgctactttgattgaaaatgattcaaatccagaagttagacgggcagtgttatcatgtattgcaccatcagcaaagactttgccaaaaattgtagggcgcaccaaggatgtgaaagaggctgtcagaaagctggcttatcaggttttagctgaaaaggttcatatgagagctatgtccattgctcagagagtaatgctccttcaacaaggtcttaatgacagatcagatgctgtgaaacaagctatgcagaagcatcttcttcaaggctggttacgggtctctgaaggaaatatcttagagttgctccatcggttggatgtagaaaattcttctgaagtggcagtctctgttctcaatgccttgttttcaataactcctctcagtgaactggtgggactctgtaaaaacaatgatggcaggaaattgattccagtggaaacattaactcctgaaattgctttgtattggtgtgccctttgtgaatatttgaaatcaaaaggagatgaaggtgaagaatttttagagcagattttgccagagcctgtagtatatgcagactatttattgagttacatccagagcattccagttgttaatgaagaacacagaggtgatttttcctatattggaaatttgatgacaaaagaattcataggtcaacaattgattctaattattaagtctttggataccagtgaagaaggaggaagaaaaaaactgctggctgttttacaggagattcttattttacccacaatcccaatatccctggtttcttttcttgttgaaagactactccacatcattatagatgataataagagaacacaaattgttacagaaattatctcagagattcgggcgcccattgttactgttggtgttaataacgatccagctgatgtaagaaagaaagaactcaagatggctgaaataaaagttaagcttatcgaagccaaagaagctttggaaaattgcattaccttacaggattttaatcgggcatcagaattaaaagaagaaataaaagcattagaagatgccagaataaaccttttgaaagagacagagcaacttgaaattaaagaagtccacatagagaagaatgatgctgaaacattgcagaaatgtcttattttatgctatgaactgttgaagcagatgtccatttcaacaggcttaagtgcaaccatcaatggaatcatcgaatctttgattcttcctggaataataagtattcatcctgttgtaagaaacctggctgttttatgcttgggatgctgtggactacagaatcaggattttgcaaggaaacacttcgtattactattgcaggttttgcaaattgatgatgtcacaataaaaataagtgctttaaaggcaatctttgaccaactgatgacgttcgggattgaaccatttaaaactaaaaaaatcaaaacacttcattgtgaaggtacagaaataaacagtgatgatgagcaagaatcaaaagaagttgaagagactgctacagctaagaatgttctgaaactcctttctgatttcttagatagtgaggtatctgaacttaggactggagctgcagaaggactagccaagctgatgttctctgggcttttggtcagcagcaggattctttctcgtcttattttgttatggtacaatcctgtgactgaagaggatgttcaacttcgacattgcctaggcgtgttcttccccgtgtttgcttatgcaagcaggactaatcaggaatgctttgaagaagcttttcttccaaccctgcaaacactggccaatgcccctgcatcttctcctttagctgaaattgatatcacaaatgttgctgagttacttgtagatttgacaagaccaagtggattaaatcctcaggccaagacttcccaagattatcaggccttaacagtacatgacaatttggctatgaaaatttgcaatgagatcttaacaagtccgtgctcgccagaaattcgagtctatacaaaagccttgagttctttagaactcagtagccatcttgcaaaagatcttctggttctattgaatgagattctggagcaagtaaaagataggacatgtctgagagctttggagaaaatcaagattcagttagaaaaaggaaataaagaatttggtgaccaagctgaagcagcacaggatgccaccttgactacaactactttccaaaatgaagatgaaaagaataaagaagtatatatgactccactcaggggtgtaaaagcaacccaagcatcaaagtctactcagctaaagactaacagaggacagagaaaagtgacagtttcagctaggacgaacaggaggtgtcagactgctgaagccgactctgaaagtgatcatgaagttccagaaccagaatcagaaatgaagatgagactnccaagacgagccaaaaccgcagcnctanaaaaaagtaaacttanccttgcccaatttttcaatgaagatttaagttaggaaanacgatggaggnggaatcctttaagattatgtccagttatttgctttaataaanaanaagttacccttgtcaaaatca

SEQ ID NO: 59 - DNA, 4833 bp, Homo sapiens
gccatttcctcctcttgttttcactccggattctccatgttggacccaaactgaggagcccggagctgccgctgggggatcggggccgggggcacccgggggagccgctgcccgggccgcccgccctttgtacaggccgcctcccttcccggtccggggaggaaacgagaggggggatgtgaacagctgtggaagtcggagtctcgggagccggagcgggcccccgcccaggccccccagcccagcccagcccgcgcgcccgcccgtcctcccgtccagccagcccgggcccgcgggattgttagatggaacacggctccatcatcacccaggcgcggagggaagacgccctggtgctcaccaagcaaggcctggtctccaagtcctctcctaagaagcctcgtggacgtaacatcttcaaggcccttttctgctgttttcgcgcccagcatgttggccagtcaagttcctccactgagctcgctgcgtataaggaggaagcaaacaccattgctaagtcggatctgctccagtgtctccagtaccagttctaccagatcccagggacctgcctgctcccagaggtgacagaggaagatcaaggaaggatctgtgtggtcattgacctcgatgaaacccttgtgcatagctcctttaagccaatcaacaatgctgacttcatagtgcctatagagattgaggggaccactcaccaggtgtatgtgctcaagaggccttatgtggatgagttcctgagacgcatgggggaactctttgaatgtgttctcttcactgccagcctggccaagtatgccgaccctgtgacagacctgctggaccggtgtggggtgttccgggcccgcctattccgtgagtcttgcgtgttccaccagggctgctacgtcaaggacctcagccgcctggggagggacctgagaaagaccctcatcctggacaactcgcctgcttcttacatattccaccccgagaatgcagtgcctgtgcagtcctggtttgatgacatggcagacactgagttgctgaacctgatcccaatctttgaggagctgagcggagcagaggacgtctacaccagccttggggcagctgcgggccccttagcctgccctgcttccaagcgacggccatcccagtaggggactttcccacactgtgcctttacgatcagcgtgacagagtagaagctggagtgcctcaccacacggcccggaaacagcgggaagtaactggaaagagctttaggacagcttagatgccgagtgggcgaatgccagaccaatgatacccagagctacctgccgccaacttgttgagatgtgtgtttgactgtgagagagtgtgtgtttgtgtgtgtgttttgccatgaactgtggccccagtgtatagtgtttcagtgggggagaagctgaaagaccaagactcttcccaagttagcttgtctcctctcctgtcaccctaagagccactgagttgtgtagggatgaaractattgaagactccattgccaaaccatggcctttcctcagtgttgtaaggcctatgccaaggataaaggaagggtatgcctttgggtactccaggcatacacctttctgaaatccttctccagccagctgctgcagacaaaagatcacatttctgggaagatgagaacttgtttccagaccagcatccagtggccatcaggtcttgtggcccaaaggctatgcttgcctccggctgagtgcctgggataggccttttctatgtctccccaaggctggggtgctgagcctgccttcctcaccacctagccatagtctcaaacctgtggggaaggaggttttctccctgcccgggaagaggacagataactgatttccgttcttttgactgtgttttaaaattctctttctaaacacagagtgttgggcctggtttgtttctgacaaagttacagtcctgggcctgtaatgaatgtcggcggcgctggggttgcagggaaaagacaaatcctcaaagcgtggacgtgtgtccccatggcttgtggatcagctaagctcgggatcatttccataagtctgcttttcagggattctctgctggtgctggtgcaaggacttctgttccaaaggctgggaaaaactaagctgtcccagcccctcccatttcttgggcagggctcttttcctgttgtgtcttcccccagggcctgtcctgtaccgagctctgtctgttccagcctacatccttcctgggtgttgcttttcctcttaagggcctcagaactcttgctcttcctggggtgagggggaatgagtgttcttgacatgtgacagcctaatgcgcatgctttctgcctctggtaacaggagtgagtgagcccctcagacctgcactctgggtgtctcctgcttacaaaggttcttaatagtgaatgctttaaaattaaagtcatcacgaaatggaagttttcccagggtggaaaataagaggaagtgctgctgtaattgggagcacaaggggcctcccaaaaaggagccccacctcagcatcactgccttaatcgtggcctccctggggtgggtggggttctctcctccctccctccctcctcctggggtgggagggcgctcctgttcccatctctgtgttccctggaggcaggtatcacaaagcatttgtgaattgctttaggtgcagggacaccacccactcaggactcttccccatcatcccttccattgccacaccctagatccagcctcaggaactaacaagttktgagaaaagcaggtggtagagcagcagcttcgtgctctcagcggtggctggctggcatttttctctagcgttgtggtgccaccttcccttcttgtcccaaggttataaggccttgtctttctctttggaatcataaagtggaacagagtccccagaactcatgtgghcatttccgacagcatcactccccggtgcctatggggtcccggtgtacctaaagggagaaggaccccatgtgctagccagaaatatactgtctcttgaaggaaagcaggagctcagactcttagagccagctgtggcttcggacccaaggcctgacctaggctgctatcctaatattggaggaggggcctctcttccaagccccaccctaagggttagcccttggacaaatcttgtgccgtctaggcccagccaggcttttctgactaaataagcaataagaggctctaagctgactgagttgcaaggaccctttccgccctcccttggatctccatgtttctccagatggcggaagagcatgtgccaccccctttcctaacagacttgtccaagtgcttggcgtgggacccatgaccaaagcccaggatggcttggtgggagtgtccctgctgcatctgcatgaagcccctgctttttaggcctcactcccatcagaaccctgcctgcccacctgcaactcccccccaacaatgccattcccacttgccccagagaagctactcggccaaacctagccagggtctgttcttgtggaccagagccagcctagtcattatttgctgtcgggtttccagtttcaccgtgtgttagggtgagggatgattgtaaaatttgctcctcaaaggaatcaggccagactcaattttgggagggcaagacagggaggaggccgcttcatcccagactctcttctagggcttcccaccatcagcccctcccacttgagactggtctttgggaggcaataggccaccatgcctggtcagcaccaattcaagccatgccaggaatctgcctacctgccaggttcagttcttttaaggtgcctcttcagggacacagtgtgtctctctgattgggcttctaaatcaaaagcctgatgttcgtgtccctctcatagggggagctttggacacaggaccagtttggaaaagggtcaggtaagggtttccactctgcacattgtagagggaacactctgtaggcccatgggtcccttactagagaggttgagtgaatttgccttcagttaacatgggaccttctgtttagcttcctcttgcttcccaaagattttaagcattttgtaaatgtataaactcacctctggtaacagtggcccagacgctgctttgtgctaaaagcatgggaaatgtaaaggcagtctttctctgggaaatggatgctattctattctgctgcccctacctgttcctgaggcctcatttagaaagaaaatcccctcagaaggctgtctggcacccagtgtcctagccaggccaagtatatgagaaaggtaagtccattttccccttcaggtcctcagtggattacttaaccactgctgtccctcggtccctttttcctaaacgggtttagttctgtcttttttctccttttttctaaatgctggtaaatatttacattcagccagggaagaggaggccagaggtcgggccagctgccccattcttttaacgttgtagggcctgcccatggagcggaccctcctctttgggcctcgtgagcttttttgcttatcatgttccatttcgtgccgctttcccccttcaagatgccatttggagggtaggggatctgcttcccactgtgactgggctatgggattctgactaccttgcttacagattcatggtttgataaatttgttgtattccaaaacttgaaatgcaggacgccattaagtgtctgtttatatttttggaatatttgtattacttacaattaattaataaaagtgggtttaaaaaacctttccaggaaaaaaaaaaaaaaaaaaaaaaaaaaaaaaaaaaaaa

SEQ ID NO: 60 - DNA, 1769 bp, Homo sapiens
ggagctgggaagcggagaagccgggagcgcggggctcagtcggggggcggcggcggcggcggctccggggatggcggcggctccgctgctgctgctgctgctgctcgtgcccgtgccgctgctgccgctgctggcccaagggcccggaggggcgctgggaaaccggcatgcggtgtactggaacagctccaaccagcacctgcggcgagagggctacaccgtgcaggtgaacgtgaacgactatctggatatttactgcccgcactacaacagctcgggggtgggccccggggcgggaccggggcccggaggcggggcagagcagtacgtgctgtacatggtgagccgcaacggctaccgcacctgcaacgccagccagggcttcaagcgctgggagtgcaaccggccgcacgccccgcacagccccatcaagttctcggagaagttccagcgctacagcgccttctctctgggctacgagttccacgccggccacgagtactactacatctccacgcccactcacaacctgcactggaagtgtctgaggatgaaggtgttcgtctgctgcgcctccacatcgcactccggggagaagccggtccccactctcccccagttcaccatgggccccaatgtgaagatcaacgtgctggaagactttgagggagagaaccctcaggtgcccaagcttgagaagagcatcagcgggaccagccccaaacgggaacacctgcccctggccgtgggcatcgccttcttcctcatgacgttcttggcctcctagctctgccccctcccctggggggggagagatggggcggggcttggaaggagcagggagcctttggcctctccaagggaagcctagtgggcctagacccctcctcccatggctagaagtggggcctgcaccatacatctgtgtccgccccctctaccccttccccccacgtagggcactgtagtggaccaagcacggggacagccatgggtcccgggcggccttgtggctctggtaatgtttggtaccaaacttgggggccaaaaagggcagtgctcaggactccctggcccctggtacctttccctgactcctggtgccctctccctttgtccccccagagagacatatgcccccagagagagcaaatcgaagcgtgggaggcacccccattgctctcctccaggggcagaacatggggaggggactagatgggcaaggggcagcactgcctgctgcttccttcccctgtttacagcaataagcacgtcctcctcccccactcccacttccaggattgtggtttggattgaaaccaagtttacaagtagacacccctgggggggcgggcagtggacaaggatggcaaggggtgggcattggggtgccaggcaggcatgtacagactctatatctctatatataatgtacagacagacagagtcccttccctctttaaccccctgacctttcttgacttccccttcagcttcagaccccttccccaccaggctaggccccccacacctgggggaccccctggcccctcttttgtcttctgtgaagacaggacctatgcaacgcacagacacttttggagaccgtaaaacaacagcgccccctcccttccagccctgagccgggaaccatctcccaggaccttgccctgctcaccctatgtggtcccacctatcctcctgggcctttttcaagtgctttggctgtgactttcatactctgctcttagtctaaaaaaaaaaaaaaa

SEQ ID NO: 61 - DNA, 2725 bp, Homo sapiens
ggcacgagggccgcccgcttgcccgtcggtcgctagctcgctcggtgcgcgtcgtcccgctccatggcgctcttcgtgcggctgctggctctcgccctggctctggccctgggccccgccgcgaccctggcgggtcccgccaagtcgccctaccagctggtgctgcagcacagcaggctccggggccgccagcacggccccaacgtgtgtgctgtgcagaaggttattggcactaataggaagtacttcaccaactgcaagcagtggtaccaaaggaaaatctgtggcaaatcaacagtcatcagctacgagtgctgtcctggatatgaaaaggtccctggggagaagggctgtccagcagccctaccactctcaaacctttacgagaccctgggagtcgttggatccaccaccactcagctgtacacggaccgcacggagaagctgaggcctgagatggaggggcccggcagcttcaccatcttcgcccctagcaacgaggcctgggcctccttgccagctgaagtgctggactccctggtcagcaatgtcaacattgagctgctcaatgccctccgctaccatatggtgggcaggcgagtcctgactgatgagctgaaacacggcatgaccctcacctctatgtaccagaattccaacatccagatccaccactatcctaatgggattgtaactgtgaactgtgcccggctgctgaaagccgaccaccatgcaaccaacggggtggtgcacctcatcgataaggtcatctccaccatcaccaacaacatccagcagatcattgagatcgaggacacctttgagacccttcgggctgctgtggctgcatcagggctcaacacgatgcttgaaggtaacggccagtacacgcttttggccccgaccaatgaggccttcgagaagatccctagtgagactttgaaccgtatcctgggcgacccagaagccctgagagacctgctgaacaaccacatcttgaagtcagctatgtgtgctgaagccatcgttgcggggctgtctgtggagaccctggagggcacgacactggaggtgggctgcagcggggacatgctcactatcaacgggaaggcgatcatctccaataaagacatcctagccaccaacggggtgatccactacattgatgagctactcatcccagactcagccaagacactatttgaattggctgcagagtctgatgtgtccacagccattgaccttttcagacaagccggcctcggcaatcatctctctggaagtgagcggttgaccctcctggctcccctgaattctgtattcaaagatggaacccctccaattgatgcccatacaaggaatttgcttcggaaccacataattaaagaccagctggcctctaagtatctgtaccatggacagaccctggaaactctgggcggcaaaaaactgagagtttttgtttatcgtaatagcctttgcattgagaacagctgcatcgcggcccacgacaagagggggaggtacgggaccctgttcacgatggaccgggtgctgacccccccaatggggactgtcatggatgtcctgaagggagacaatcgctttagcatgctggtagctgccatccagtctgcaggactgacggagaccctcaaccgggaaggagtctacacagtcttcgctcccacaaatgaagccttccgagccctgccaccaagagaacggagcagactcttgggagatgccaaggaacttgccaacatcctgaaataccacattggtgatgaaatcctggttagcggaggcatcggggccctggtgcggctaaagtctctccaaggtgacaagctggaagtcagcttgaaaaacaatgtggtgagtgtcaacaaggagcctgttgccgagcctgacatcatggccacaaatggcgtggtccatgtcatcaccaatgttctgcagcctccagccaacagacctcaggaaagaggggatgaacttgcagactctgcgcttgagatcttcaaacaagcatcagcgttttccagggcttcccagaggtctgtgcgactagcccctgtctatcaaaagttattagagaggatgaagcattagcttgaagcactacaggaggaatgcaccacggcagctctccgccaatttctctcagatttccacagagactgtttgaatgttttcaaaaccaagtatcacactttaatgtacatgggccgcaccataatgagatgtgagccttgtgcatgtgggggaggagggagagagatgtactttttaaatcatgttccccctaaacatggctgttaacccactgcatgcagaaacttggatgtcactgcctgacattcacttccagagaggacctatcccaaatgtggaattgactgcctatgccaagtccctggaaaaggagcttcagtattgtggggctcataaaacatgaatcaagcaatccagcctcatgggaagtcctggcacagtttttgtaaagcccttgcacagctggagaaatggcatcattataagctatgagttgaaatgttctgtcaaatgtgtctcacatctacacgtggcttggaggcttttatggggccctgtccaggtagaaaagaaatggtatgtagagcttagatgtccctattgtgacagagccatggtgtgtttgtaataataaaaccaaagaaacataaaaaaaaaaaaaaaaaaa

SEQ ID NO: 62 - DNA, 2205 bp, Homo sapiens
cacagggctcccccccgcctctgacttctctgtccgaagtcgggacaccctcctaccacctgtagagaagcgggagtggatctgaaataaaatccaggaatctgggggttcctagacggagccagacttcggaacgggtgtcctgctactcctgctggggctcctccaggacaagggcacacaactggttccgttaagcccctctctcgctcagacgccatggagctggatctgtctccacctcatcttagcagctctccggaagacctttggccagcccctgggacccctcctgggactccccggccccctgatacccctctgcctgaggaggtaaagaggtcccagcctctcctcatcccaaccaccggcaggaaacttcgagaggaggagaggcgtgccacctccctcccctctatccccaaccccttccctgagctctgcagtcctccctcacagagcccaattctcgggggcccctccagtgcaagggggctgctcccccgcgatgccagccgcccccatgtagtaaaggtgtacagtgaggatggggcctgcaggtctgtggaggtggcagcaggtgccacagctcgccacgtgtgtgaaatgctggtgcagcgagctcacgccttgagcgacgagacctgggggctggtggagtgccacccccacctagcactggagcggggtttggaggaccacgagtccgtggtggaagtgcaggctgcctggcccgtgggcggagatagccgcttcgtcttccggaaaaacttcgccaagtacgaactgttcaagagctccccacactccctgttcccagaaaaaatggtctccagctgtctcgatgcacacactggtatatcccatgaagacctcatccagaacttcctgaatgctggcagctttcctgagatccagggctttctgcagctgcggggttcaggacggaagctttggaaacgctttttctgtttcttgcgccgatctggcctctattactccaccaagggcacctctaaggatccgaggcacctgcagtacgtggcagatgtgaacgagtccaacgtgtacgtggtgacgcagggccgcaagctctacgggatgcccactgacttcggtttctgtgtcaagcccaacaagcttcgaaatggacacaaggggcttcggatcttctgcagtgaagatgagcagagccgcacctgctggctggctgccttccgcctcttcaagtacggggtgcagctgtacaagaattaccagcaggcacagtctcgccatctgcatccatcttgtttgggctccccacccttgagaagtgcctcagataataccctggtggccatggacttctctggccatgctgggcgtgtcattgagaacccccgggaggctctgagtgtggccctggaggaggcccaggcctggaggaagaagacaaaccaccgcctcagcctgcccatgccagcctccggcacgagcctcagtgcagccatccaccgcacccaactctggttccacgggcgcatttcccgtgaggagagccagcggcttattggacagcagggcttggtagacggcctgttcctggtccgggagagtcagcggaacccccagggctttgtcctctctttgtgccacctgcagaaagtgaagcattatctcatcctgccgagcgaggaggagggtcgcctgtacttcagcatggatgatggccagacccgcttcactgacctgctgcagctcgtggagttccaccagctgaaccgcggcatcctgccgtgcttgctgcgccattgctgcacgcgggtggccctctgaccaggccgtggactggctcatgcctcagcccgccttcaggctgcccgccgcccctccacccatccagtggactctggggcgcggccacaggggacgggatgaggagcgggagggttccgccactccagttttctcctctgcttctttgcctccctcagatagaaaacagcccccactccagtccactcctgacccctctcctcaagggaaggccttgggtggccccctctccttctcctagctctggaggtgctgctctagggcagggaattatgggagaagtgggggcagcccaggcggtttcacgccccacactttgtacagaccgagaggccagttgatctgctctgttttatactagtgacaataaagattattttttgatac

SEQ ID NO: 63 - DNA, 1017 bp, Homo sapiens
gagctcggccctggaggcggcgagaacatggtgcgcaggttcttggtgaccctccggattcggcgcgcgtgcggcccgccgcgagtgagggttttcgtggttcacatcccgcggctcacgggggagtgggcagcgccaggggcgcccgccgctgtggccctcgtgctgatgctactgaggagccagcgtctagggcagcagccgcttcctagaagaccaggtcatgatgatgggcagcgcccgagtggcggagctgctgctgctccacggcgcggagcccaactgcgccgaccccgccactctcacccgacccgtgcacgacgctgcccgggagggcttcctggacacgctggtggtgctgcaccgggccggggcgcggctggacgtgcgcgatgcctggggccgtctgcccgtggacctggctgaggagctgggccatcgcgatgtcgcacggtacctgcgcgcggctgcggggggcaccagaggcagtaaccatgcccgcatagatgccgcggaaggtccctcagacatccccgattgaaagaaccagagaggctctgagaaacctcgggaaacttagatcatcagtcaccgaaggtcctacagggccacaactgcccccgccacaacccaccccgctttcgtagttttcatttagaaaatagagcttttaaaaatgtcctgccttttaacgtagatataagccttcccccactaccgtaaatgtccatttatatcattttttatatattcttataaaaatgtaaaaaagaaaaacaccgcttctgccttttcactgtgttggagttttctggagtgagcactcacgccctaagcgcacattcatgtgggcatttcttgcgagcctcgcagcctccggaagctgtcgacttcatgacaagcattttgtgaactagggaagctcaggggggttactggcttctcttgagtcacactgctagcaaatggcagaaccaaagctcaaataaaaataaaattattttcattcattcactc

SEQ ID NO: 64 - protein, 800 aa, Homo sapiens [sequence omitted]

SEQ ID NO: 65 - protein, 403 aa, Homo sapiens
MDRSKENCISGPVKATAPVGGPKRVLVTQQIPCQNPLPVNSGQAQRVLCPSNSSQRVPLQAQKLVSSHKPVQNQKQKQLQATSVPHPVSRPLNNTQKSKQPLPSAPENNPEEELASKQKNEESKKRQWALEDFEIGRPLGKGKFGNVYLAREKQSKFILALKVLFKAQLEKAGVEHQLRREVEIQSHLRHPNILRLYGYFHDATRVYLILEYAPLGTVYRELQKLSKFDEQRTATYITELANALSYCHSKRVIHRDIKPENLLLGSAGELKIADFGWSVHAPSSRRTTLCGTLDYLPPEMIEGRMHDEKVDLWSLGVLCYEFLVGKPPFEANTYQETYKRISRVEFTFPDFVTEGARDLISRLLKHNPSQRPMLREVLEHPWITANSSKPSNCQNKESASKQS

SEQ ID NO: 66 - protein, 205 aa, Homo sapiens
MALQLSREQGITLRGSAEIVAEFFSFGINSILYQRGIYPSETFTRVQKYGLTLLVTTDLELIKYLNNVVEQLKDWLYKCSVQKLVVVISNIESGEVLERWQFDIECDKTAKDDSAPREKSQKAIQDEIRSVIRQITATVTFLPLLEVSCSFDLLIYTDKDLVVPEKWEESGPQFITNSEEVRLRSFTTTIHKVNSMVAYKIPVND

SEQ ID NO: 67 - protein, 297 aa, Homo sapiens
MEDYTKIEKIGEGTYGVVYKGRHKTTGQVVAMKKIRLESEEEGVPSTAIREISLLKELRHPNIVSLQDVLMQDSRLYLIFEFLSMDLKKYLDSIPPGQYMDSSLVKSYLYQILQGIVFCHSRRVLHRDLKPQNLLIDDKGTIKLADFGLARAFGIPIRVYTHEVVTLWYRSPEVLLGSARYSTPVDIWSIGTIFAELATKKPLFHGDSEIDQLFRIFRALGTPNNEVWPEVESLQDYKNTFPKWKPGSLASHVKNLDENGLDLLSKMLIYDPAKRISGKMALNHPYFNDLDNQIKKM

SEQ ID NO: 68 - protein, 358 aa, Homo sapiens
MRATPLAAPAGSLSRKKRLELDDNLDTERPVQKRARSGPQPRLPPCLLPLSPPTAPDRATAVATASRLGPYVLLEPEEGGRAYQALHCPTGTEYTCKVYPVQEAPAVLEPYARLPPHKHVARPTEVLAGTQLLYAFFTRTHGDMHSLVRSRHRIPEPEAAVLFRQMATALAHCHQHGLVLRDLKLCRFVFADRERKKLVLENLEDSCVLTGPDDSLWDKHACPAYVGPEILSSRASYSGKAADVWSLGVALFTMLAGHYPFQDSEPVLLFGKIRRGAYALPAGLSAPARCLVRCLLRREPAERLTATGILLHPWLRQDPMPLAPTRSHLWEAAQVVPDGLGLDEAREEEGDREVVLYG

SEQ ID NO: 69 - protein, 791 aa, Homo sapiens
SLLLKLEKNSVPLSDALLNKLIGRYSQAIEALPPDKYGQNESFARIQVRFAELKAIQEPDDARDYFQMARANCKKFAFVHISFAQFELSQGNVKKSKQLLQKAVERGAVPLEMLEIALRNLNLQKKQLLSEEEKKNLSASTVLTAQESFSGSLGHLQNRNNSCDSRGQTTKARFLYGENMPPQDAEIGYRNSLRQTNKTKQSCPFGRVPVNLLNSPDCDVKTDDSVVPCFMKRQTSRSECRDLVVPGSKPSGNDSCELRNLKSVQNSHFKEPLVSDEKSSELIITDSITLKNKTESSLLAKLEETKEYQEPEVPESNQKQWQAKRKSECINQNPAASSNHWQIPELARKVNTEQKHTTFEQPVFSVSKQSPPISTSKWFDPKSICKTPSSNTLDDYMSCFRTPVVKNDFPPACQLSTPYGQPACFQQQQHQILATPLQNLQVLASSSANECISVKGRIYSILKQIGSGGSSKVFQVLNEKKQIYAIKYVNLEEADNQTLDSYRNEIAYLNKLQQHSDKIIRLYDYEITDQYIYMVMECGNIDLNSWLKKKKSIDPWERKSYWKNMLEAVHTIHQHGIVHSDLKPANFLIVDGMLKLIDFGIANQMQPDTTSVVKDSQVGTVNYMPPEAIKDMSSSRENGKSKSKISPKSDVWSLGCILYYMTYGKTPFQQIINQISKLHAIIDPNHEIEFPDIPEKDLQDVLKCCLKRDPKQRISIPELLAHPYVQIQTHPVNQMAKGTTEEMKYVLGQLVGLNSPNSILKAAKTLYEHYSGGESHNSSSSKTFEKKRGKK

SEQ ID NO: 70 - protein, 79 aa, Homo sapiens
MAHKQIYYSDKYFDEHYEYRHVMLPRELSKQVPKTHLMSEEEWRRLGVQQSLGWVHYMIHEPEPHILLFRRPLPKDQQK

SEQ ID NO: 71 - protein, 1408 aa, Homo sapiens
MKAPAVLAPGILVLLFTLVQRSNGECKEALAKSEMNVNMKYQLPNFTAETPIQNVILHEHHIFLGATNYIYVLNEEDLQKVAEYKTGPVLEHPDCFPCQDCSSKANLSGGVWKDNINMALVVDTYYDDQLISCGSVNRGTCQRHVFPHNHTADIQSEVHCIFSPQIEEPSQCPDCVVSALGAKVLSSVKDRFINFFVGNTINSSYFPDHPLHSISVRRLKETKDGFMFLTDQSYIDVLPEFRDSYPIKYVHAFESNNFIYFLTVQRETLDAQTFHTRIIRFCSINSGLHSYMEMPLECILTEKRKKRSTKKEVFNILQAAYVSKPGAQLARQIGASLNDDILFGVFAQSKPDSAEPMDRSAMCAFPIKYVNDFFNKIVNKNNVRCLQHFYGPNHEHCFNRTLLRNSSGCEARRDEYRTEFTTALQRVDLFMGQFSEVLLTSISTFIKGDLTIANLGTSEGRFMQVVVSRSGPSTPHVNFLLDSHPVSPEVIVEHTLNQNGYTLVITGKKITKIPLNGLGCRHFQSCSQCLSAPPFVQCGWCHDKCVRSEECLSGTWTQQICLPAIYKVFPNSAPLEGGTRLTICGWDFGFRRNNKFDLKKTRVLLGNESCTLTLSESTMNTLKCTVGPAMNKHFNMSIIISNGHGTTQYSTFSYVDPVITSISPKYGPMAGGTLLTLTGNYLNSGNSRHISIGGKTCTLKSVSNSILECYTPAQTISTEFAVKLKIDLANRETSIFSYREDPIVYEIHPTKSFISTWWKEPLNIVSFLFCFASGGSTITGVGKNLNSVSVPRMVINVHEAGRNFTVACQHRSNSEIICCTTPSLQQLNLQLPLKTKAFFMLDGILSKYFDLIYVHNPVFKPFEKPVMISMGNENVLEIKGNDIDPEAVKGEVLKVGNKSCENIHLHSEAVLCTVPNDLLKLNSELNIEWKQAISSTVLGKVIVQPDQNFTGLIAGVVSISTALLLLLGFFLWLKKRKQIKDLGSELVRYDARVHTPHLDRLVSARSVSPTTEMVSNESVDYRATFPEDQFPNSSQNGSCRQVQYPLTDMSPILTSGDSDISSPLLQNTVHIDLSALNPELVQAVQHVVIGPSSLIVHFNEVIGRGHFGCVYHGTLLDNDGKKIHCAVKSLNRITDIGEVSQFLTEGIIMKDFSHPNVLSLLGICLRSEGSPLVVLPYMKHGDLRNFIRNETHNPTVKDLIGFGLQVAKAMKYLASKKFVHRDLAARNCMLDEKFTVKVADFGLARDMYDKEYYSVHNKTGAKLPVKWMALESLQTQKFTTKSDVWSFGVVLWELMTRGAPPYPDVNTFDITVYLLQGRRLLQPEYCPDPLYEVMLKCWHPKAEMRPSFSELVSRISAIFSTFIGEHYVHVNATYVNVKCVAPYPSLLSSEDNADDEVDTRPASFWETS

SEQ ID NO: 72 - protein, 469 aa, Homo sapiens
MHSFPPLLLLLFWGVVSHSFPATLETQEQDVDLVQKYLEKYYNLKNDGRQVEKRRNSGPVVEKLKQMQEFFGLKVTGKPDAETLKVMKQPRCGVPDVAQFVLTEGNPRWEQTHLTYRIENYTPDLPRADVDHAIEKAFQLWSNVTPLTFTKVSEGQADIMISFVRGDHRDNSPFDGPGGNLAHAFQPGPGIGGDAHFDEDERWTNNFREYNLHRVAAHELGHSLGLSHSTDIGALMYPSYTFSGDVQLAQDDIDGIQAIYGRSQNPVQPIGPQTPKACDSKLTFDAITTIRGEVMFFKDRFYMRTNPFYPEVELNFISVFWPQLPNGLEAAYEFADRDEVRFFKGNKYWAVQGQNVLHGYPKDIYSSFGFPRTVKHIDAALSEENTGKTYFFVANKYWRYDEYKRSMDPGYPKMIAHDFPGIGHKVDAVFMKDGFFYFFHGTRQYKFDPKTKRILTLQKANSWFNCRKN

SEQ ID NO: 73 - protein, 479 aa, Homo sapiens
MKMKGLPVLLWLCVVVCSSYPLHDSARDDDAGMELLQKYLENYYGLAKDVKQFIKKKDSSLIVKKIQEMQKFLGLEMTGKLDSNTMELMHKPRCGVPDVGGFSTFPGSPKWRKSHITYRIVNYTPDLPRQSVDSAIEKALKVWEEVTPLTFSRISEGEADIMISFAVGEHGDFVPFDGPGTVLAHAYAPGPGINGDAHFDDDERWTEDVTGTNLFLVAAHELGHSLGLYHSAKAEALMYPVYKSSTDLSRFHLSQDDVDGIQSLYGTPTASPDVLVVPTKSNSLEPETSPMCSSTLFFDAVSTLRGEVLFFKDRHFWRKSLRTPEPEFYLISSFWPSLPSNMDAAYEVTNRDTVFIFKGNQFWAIRGHEELAGYPKSIHTLGLPATVKKIDAAISNKEKRKTYFFVEDKYWRFDEKKQSMEPGFPRKIAEDFPGVDSRVDAVFEAFGFLYFFSGSSQLEFDPNAKKVTHILKSNSWFNC

SEQ ID NO: 74 - protein, 488 aa, Homo sapiens
MAPAAWLRSAAARALLPPMLLLLLQPPPLLARALPPDVHHLHAERRGPQPWHAALPSSPAPAPATQEAPRPASSLRPPRCGVPDPSDGLSARNRQKRFVLSGGRWEKTDLTYRILRFPWQLVQEQVRQTMAEALKVWSDVTPLTFTEVHEGRADIMIDFARYWHGDDLPFDGPGGILAHAFFPKTHREGDVHFDYDETWTIGDDQGTDLLQVAAHEFGHVLGLQHTTAAKALMSAFYTFRYPLSLSPDDCRGVQHLYGQPWPTVTSRTPALGPQAGIDTNEIAPLEPDAPPDACEASFDAVSTIRGELFFFKAGFVWRLRGGQLQPGYPALASRHWQGLPSPVDAAFEDAQGHIWFFQGAQYWVYDGEKPVLGPAPLTELGLVRFPVHAALVWGPEKNKIYFFRGRDYWRFHPSTRRVDSPVPRRATDWRGVPSEIDAAFQDADGYAYFLRGRLYWKFDPVKVKALEGFPRLVGPDFFGCAEPANTFL

SEQ ID NO: 75 - protein, 470 aa, Homo sapiens
MKFLLILLLQATASGALPLNSSTSLEKNNVLFGERYLEKFYGLEINKLPVTKMKYSGNLMKEKIQEMQHFLGLKVTGQLDTSTLEMMHAPRCGVPDLHHFREMPGGPVWRKHYITYRINNYTPDMNREDVDYAIRKAFQVWSNVTPLKFSKINTGMADILVVFARGAHGDFHAFDGKGGILAHAFGPGSGIGGDAHFDEDEFWTTHSGGTNLFLTAVHEIGHSLGLGHSSDPKAVMFPTYKYVDINTFRLSADDIRGIQSLYGDPKENQRLPNPDNSEPALCDPNLSFDAVTTVGNKIFFFKDRFFWLKVSERPKTSVNLISSLWPTLPSGIEAAYEIEARNQVFLFKDDKYWLISNLRPEPNYPKSIHSFGFPNFVKKIDAAVFNPRFYRTYFFVDNQYWRYDERRQMMDPGYPKLITKNFQGIGPKIDAVFYSKNKYYYFFQGSNQFEYDFLLQRITKTLKSNSWFGC

SEQ ID NO: 76 - protein, 276 aa, Homo sapiens
MRAPHLHLSAASGARALAKLLPLLMAQLWAAEAALLPQNDTRLDPEAYGAPCARGSQPWQVSLFNGLSFHCAGVLVDQSWVLTAAHCGNKPLWARVGDDHLLLLQGEQLRRTTRSVVHPKYHQGSGPILPRRTDEHDLMLLKLARPVVPGPRVRALQLPYRCAQPGDQCQVAGWGTTAARRVKYNKGLTCSSITILSPKECEVFYPGVVTNNMICAGLDRGQDPCQSDSGGPLVCDETLQGILSWGVYPCGSAQHPAVYTQICKYMSWINKVIRSN

SEQ ID NO: 77 - protein, 708 aa, Homo sapiens [sequence omitted]

SEQ ID NO: 78 - protein, 141 aa, Homo sapiens
MAQYLSTLLLLLATLAVALAWSPKEEDRIIPGGIYNADLNDEWVQRALHFAISEYNKATKDDYYRRPLRVLRARQQTVGGVNYFFDVEVGRTICTKSQPNLDTCAFHEQPELQKKQLCSFEIYEVPWENRRSLVKSRCQES

SEQ ID NO: 79 - protein, 574 aa, Homo sapiens
MWTFLGIATFTYFYKKFGDFITLANREVLLCVLVFLSLGLVLSYRCRHRNGGLLGRQRSGSQFALFSDILSGLPFIGFFWAKSPPESENKEQLGARRRRKGTNISETSLIGTAACTSTSSQNDPEVIIVGAGVLGSALVAVLSRDGRKVTVIERDLKEPDRIVGEFLQPGGYHVLKDLGLGDTVEGLDAQVVNGYMIHDQESKSEVQIPYPLSENNQVQSGRAFHHGRFIMSLRKAAMAEPNAKFIEGVVLQLLEEDDVVMGVQYKDKETGDIKELHAPLTVVADGLFSKFRKSLVSNKVSVSSHFVGFLMKNAPQFKANHAELILANPSPVLIYRISSSETRVLVDIRGEMPRNLREYMVEKIYPQIPDHLKEPFLEATDNSHLRSMLASFLPPSSVKKRGVLLLGDAYNMRHPLTGGGMTVAFKDIKLWRKLLKGIPDLYDDAAIFEANKSFYWARKTSHSFVVNILAQALYELFSATDDSLHQLRKACFLYFKLGGECVAGPVGLLSVLSPNPLALIGHFFAVAIYAVYFCFKSEPWITKPRALLSSSAVLYKACSVIFPLIYSEMKYMVH

SEQ ID NO: 80 - protein, 774 aa, Homo sapiens
MERPLCSHLCSCLAMLALLSPLSLAQYDSWPHYPEYFQQPAPEYHQPQAPANVAKIQLRLAGQKRKHSEGRVEVYYDGQWGTVCDDDFSIHAAHVVCRELGYVEAKSWTASSSYGKGEGPIWLDNLHCTGNEATLAACTSNGWGVTDCKHTEDVGVVCSDKRIPGFKFDNSLINQIENLNIQVEDIRIRAILSTYRKRTPVMEGYVEVKEGKTWKQICDKHWTAKNSRVVCGMFGFPGERTYNTKVYKMFASRRKQRYWPFSMDCTGTEAHISSCKLGPQVSLDPMKNVTCENGLPAVVSCVPGQVFSPDGPSRFRKAYKPEQPLVRLRGGAYIGEGRVEVLKNGEWGTVCDDKWDLVSASVVCRELGFGSAKEAVTGSRLGQGIGPIHLNEIQCTGNEKSIIDCKFNAESQGCNHEEDAGVRCNTPAMGLQKKLRLNGGRNPYEGRVEVLVERNGSLVWGMVCGQNWGIVEAMVVCRQLGLGFASNAFQETWYWHGDVNSNKVVMSGVKCSGTELSLAHCRHDGEDVACPQGGVQYGAGVACSETAPDLVLNAEMVQQTTYLEDRPMFMLQCAMEENCLSASAAQTDPTTGYRRLLRFSSQIHNNGQSDFRPKNGRHAWIWHDCHRHYHSMEVFTHYDLLNLNGTKVAEGHKASFCLEDTECEGDIQKNYECANFGDQGITMGCWDMYRHDIDCQWVDITDVPPGDYLFQVVINPNFEVAESDYSNNIMKCRSRYDGHRIWMYNCHIGGSFSEETEKKFEHFSGLLNNQLSPQ

SEQ ID NO: 81 - protein, 365 aa, Homo sapiens
EHPAKKLRSGGDEERREKPPKRKIVLLMAYSGKGYHGMQRNVGSSQFKTIEDDLVSALVRSGCIPENHGEDMRKMSFQRCARTDKGVSAAGQVVSLKVWLIDDILEKINSHLPSHIRILGLKRVTGGFNSKNRCDARTYCYLLPTFAFAHKDRDVQDETYRLSAETLQQVNRLLACYKGTHNFHNFTSQKGPQDPSACRYILEMYCEEPFVREGLEFAVIRVKGQSFMMHQIRKMVGLVVAIVKGYAPESVLERSWGTEKVDVPKAPGLGLVLERVHFEKYNQRFGNDGLHEPLDWAQEEGKVAAFKEEHIYPTIIGTERDERSMAQWLSTLPIHNFSATALTAGGTGAKVPSPLEGSEGDGDTD

SEQ ID NO: 82 - protein, 309 aa, Homo sapiens
MAPKFPDSVEELRAAGNESFRNGQYAEASALYGRALRVLQAQGSSDPEEESVLYSNRAACHWKNGNCRDCIKDCTSALALVPFSIKPLLRRASAYEALEKYPMAYVDYKTVLQIDDNVTSAVEGINRMTRALMDSLGPEWRLKLPSFPLVPVSAQKRWNFLPSENHKEMAKSKSKETTATKNRVPSAGDVEKARVLKEEGNELVKKGNHKKAIEKYSESLLCSNLESATYSNRALCYLVLKQYTEAVKDCTEALKLDGKNVKAFYRRAQAHKALKDYKSSFADISNLLQIEPRNGPAQKLRQEVKQNLH

SEQ ID NO: 83 - protein, 601 aa, Homo sapiens
MEVPQPEPAPGSALSPAGVCGGAQRPGHLPGLLLGSHGLLGSPVRAAASSPVTTLTQTMHDLAGLGSRSRLTHLSLSRRASESSLSSESSESSDAGLCMDSPSPMDPHMAEQTFEQAIQAASRIIRNEQFAIRRFQSMPVRLLGHSPVLRNITNSQAPDGRRKSEAGSGAASSSGEDKENVRFWKAGVGALREEEGACWGGSLACEDPPLPSWLQDGFVFKMPWKPTHPSSTHALAEWASRREAFAQRPSSAPDLMCLSPDRKMEVEELSPLALGRFSLTPAEGDTEEDDGFVDILESDLKDDDAVPPGMESLISAPLVKTLEKEEEKDLVMYSKCQRLFRSPSMPCSVIRPILKRLERPQDRDTPVQNKRRRSVTPPEEQQEAEEPKARVLRSKSLCHDEIENLLDSDHRELIGDYSKAFLLQTVDGKHQDLKYISPETMVALLTGKFSNIVDKFVIVDCRYPYEYEGGHIKTAVNLPLERDAESFLLKSPIAPCSLDKRVILIFHCEFSSERGPRMCRFIRERDRAVNDYPSLYYPEMYILKGGYKEFFPQHPNFCEPQDYRPMNHEAFKDELKTFRLKTRSWAGERSRRELCSRLQDQ

SEQ ID NO: 84 - protein, 907 aa, Homo sapiens
MDTSRLGVLLSLPVLLQLATGGSSPRSGVLLRGCPTHCHCEPDGRMLLRVDCSDLGLSELPSNLSVFTSYLDLSMNNISQLLPNPLPSLRFLEELRLAGNALTYIPKGAFTGLYSLKVLMLQNNQLRHVPTEALQNLRSLQSLRLDANHISYVPPSCFSGLHSLRHLWLDDNALTEIPVQAFRSLSALQAMTLALNKIHHIPDYAFGNLSSLVVLHLHNNRIHSLGKKCFDGLHSLETLDLNYNNLDEFPTAIRTLSNLKELGFHSNNIRSIPEKAFVGNPSLITIHFYDNPIQFVGRSAFQHLPELRTLTLNGASQITEFPDLTGTANLESLTLTGAQISSLPQTVCNQLPNLQVLDLSYNLLEDLPSFSVCQKLQKIDLRHNEIYEIKVDTFQQLLSLRSLNLAWNKIAIIHPNAFSTLPSLIKLDLSSNLLSSFPITGLHGLTHLKLTGNHALQSLISSENFPELKVIEMPYAYQCCAFGVCENAYKISNQWNKGDNSSMDDLHKKDAGMFQAQDERDLEDFLLDFEEDLKALHSVQCSPSPGPFKPCEHLLDGWLIRIGVWTIAVLALTCNALVTSTVFRSPLYISPIKLLIGVIAAVNMLTGVSSAVLAGVDAFTFGSFARHGAWWENGVGCHVIGFLSIFASESSVFLLTLAALERGFSVKYSAKFETKAPFSSLKVIILLCALLALTMAAVPLLGGSKYGASPLCLPLPFGEPSTMGYMVALILLNSLCFLMMTIAYTKLYCNLDKGDLENIWDCSMVKHIALLLFTNCILNCPVAFLSFSSLINLTFISPEVIKFILLVVVPLPACLNPLLYILFNPHFKEDLVSLRKQTYVWTRSKHPSLMSINSDDVEKQSCDSTQALVTFTSSSITYDLPPSSVPSPAYPVTESCHLSSVAFVPCL

SEQ ID NO: 85 - protein, 961 aa, Homo sapiens
MLLLLLLAPLFLRPPGAGGAQTPNATSEGCQIIHPPWEGGIRYRGLTRDQVKAINFLPVDYEIEYVCRGEREVVGPKVRKCLANGSWTDMDTPSRCVRICSKSYLTLENGKVFLTGGDLPALDGARVDFRCDPDFHLVGSSRSICSQGQWSTPKPHCQVNRTPHSERRAVYIGALFPMSGGWPGGQACQPAVEMALEDVNSRRDILPDYELKLIHHDSKCDPGQATKYLYELLYNDPIKIILMPGCSSVSTLVAEAARMWNLIVLSYGSSSPALSNRQRFPTFFRTHPSATLHNPTRVKLFEKWGWKKIATIQQTTEVFTSTLDDLEERVKEAGIEITFRQSFFSDPAVPVKNLKRQDARIIVGLFYETEARKVFCEVYKERLFGKKYVWFLIGWYADNWFKIYDPSINCTVDEMTEAVEGHITTEIVMLNPANTRSISNMTSQEFVEKLTKRLKRHPEETGGFQEAPLAYDAIWALALALNKTSGGGGRSGVRLEDFNYNNQTITDQIYRAMNSSSFEGVSGHVVFDASGSRMAWTLIEQLQGGSYKKIGYYDSTKDDLSWSKTDKWIGGSPPADQTLVIKTFRFLSQKLFISVSVLSSLGIVLAVVCLSFNIYNSHVRYIQNSQPNLNNLTAVGCSLALAAVFPLGLDGYHIGRNQFPFVCQARLWLLGLGFSLGYGSMFTKIWWVHTVFTKKEEKKEWRKTLEPWKLYATVGLLVGMDVLTLAIWQIVDPLHRTIETFAKEEPKEDIDVSILPQLEHCSSRKMNTWLGIFYGYKGLLLLLGIFLAYETKSVSTEKINDHRAVGMAIYNVAVLCLITAPVTMILSSQQDAAFAFASLAIVFSSYITLVVLFVPKMRRLITRGEWQSEAQDTMKTGSSTNNNEEEKSRLLEKENRELEKIIAEKEERVSELRHQLQSRQQLRSRRHPPTPPEPSGGLPRGPPEPPDRLSCDGSRVHLLYK

SEQ ID NO: 86 - protein, 138 aa, Homo sapiens [sequence omitted]

SEQ ID NO: 87 - protein, 1212 aa, Homo sapiens
MEPRPTAPSSGAPGLAGVGETPSAAALAAARVELPGTAVPSVPEDAAPASRDGGGVRDEGPAAAGDGLGRPLGPTPSQSRFQVDLVSENAGRAAAAAAAAAAAAAAAGAGAGAKQTPADGEASGESEPAKGSEEAKGRFRVNFVDPAASSSAEDSLSDAAGVGVDGPNVSFQNGGDTVLSEGSSLHSGGGGGSGHHQHYYYDTHTNTYYLRTFGHNTMDAVPRIDHYRHTAAQLGEKLLRPSLAELHDELEKEPFEDGFANGEESTPTRDAVVTYTAESKGVVKFGWIKGVLVRCMLNIWGVMLFIRLSWIVGQAGIGLSVLVIMMATVVTTITGLSTSAIATNGFVRGGGAYYLISRSLGPEFGGAIGLIFAFANAVAVAMYVVGFAETVVELLKEHSILMIDEINDIRIIGAITVVILLGISVAGMEWEAKAQIVLLVILLLAIGDFVIGTFIPLESKKPKGFFGYKSEIFNENFGPDFREEETFFSVFAIFFPAATGILAGANISGDLADPQSAIPKGTLLAILITTLVYVGIAVSVGSCVVRDATGNVNDTIVTELTNCTSAACKLNFDFSSCESSPCSYGLMNNFQVMSMVSGFTPLISAGIFSATLSSALASLVSAPKIFQALCKDNIYPAFQMFAKGYGKNNEPLRGYILTFLIALGFILIAELNVIAPIISNFFLASYALINFSVFHASLAKSPGWRPAFKYYNMWISLLGAILCCIVMFVINWWAALLTYVIVLGLYIYVTYKKPDVNWGSSTQALTYLNALQHSIRLSGVEDHVKNFRPQCLVMTGAPNSRPALLHLVHDFTKNVGLMICGHVHMGPRRQAMKEMSIDQAKYQRWLIKNKMKAFYAPVHADDLREGAQYLMQAAGLGRMKPNTLVLGFKKDWLQADMRDVDMYINLFHDAFDIQYGVVVIRLKEGLDISHLQGQEELLSSQEKSPGTKDVVVSVEYSKKSDLDTSKPLSEKPITHKVEEEDGKTATQPLLKKESKGPIVPLNVADQKLLEASTQFQKKQGKNTIDVWWLFDDGGLTLLIPYLLTTKKKWKDCKIRVFIGGKINRIDHDRRAMATLLSKFRIDFSDIMVLGDINTKPKKENIIAFEEIIEPYRLHEDDKEQDIADKMKEDEPWRITDNELELYKTKTYRQIRLNELLKEHSSTANIIVMSLPVARKGAVSSALYMAWLEALSKDLPPILLVRGNHQSVLTFYS

SEQ ID NO: 88 - protein, 722 aa, Homo sapiens
MPLHQLGDKPLTFPSPNSAMENGLDHTPPSRRASPGTPLSPGSLRSAAHSPLDTSKQPLCQLWAEKHGARGTHEVRYVSAGQSVACGWWAFAPPCLQVLNTPKGILFFLCAAAFLQGMTVNGFINTVITSLERRYDLHSYQSGLIASSYDIAACLCLTFVSYFGGSGHKPRWLGWGVLLMGTGSLVFALPHFTAGRYEVELDAGVRTCPANPGAVCADSTSGLSRYQLVFMLGQFLHGVGATPLYTLGVTYLDENVKSSCSPVYIAIFYTAAILGPAAGYLIGGALLNIYTEMGRRTELTTESPLWVGAWWVGFLGSGAAAFFTAVPILGYPRQLPGSQRYAVMRAAEMHQLKDSSRGEASNPDFGKTIRDLPLSIWLLLKNPTFILLCLAGATEATLITGMSTFSPKFLESQFSLSASEAATLFGYLVVPAGGGGTFLGGFFVNKLRLRGSAVIKFCLFCTVVSLLGILVFSLHCPSVPMAGVTASYGGSLLPEGHLNLTAPCNAACSCQPEHYSPVCGSDGLMYFSLCHAGCPAATETNVDGQKVYRDCSCIPQNLSSGFGHATAGKCTSTCQRKPLLLVFIFVVIFFTFLSSIPALTATLRCVRDPQRSFALGIQWIVVRILGGIPGPIAFGWVIDKACLLWQDQCGQQGSCLVYQNSAMSRYILIMGLLYKVLGVLFFAIACFLYKPLSESSDGLETCLPSQSSAPDSATDSQLQSSV

SEQ ID NO: 89 - protein, 507 aa, Homo sapiens
MAGAGPKRRALAAPAAEEKEEAREKMLAAKSADGSAPAGEGEGVTLQRNITLLNGVAIIVGTIIGSGIFVTPTGVLKEAGSPGLALVVWAACGVFSIVGALCYAELGTTISKSGGDYAYMLEVYGSLPAFLKLWIELLIIRPSSQYIVALVFATYLLKPLFPTCPVPEEAAKLVACLCVLLLTAVNCYSVKAATRVQDAFAAAKLLALALIILLGFVQIGKGDVSNLDPNFSFEGTKLDVGNIVLALYSGLFAYGGWNYLNFVTEEMINPYRNLPLAIIISLPIVTLVYVLTNLAYFTTLSTEQMLSSEAVAVDFGNYHLGVMSWIIPVFVGLSCFGSVNGSLFTSSRLFFVGSREGHLPSILSMIHPQLLTPVPSLVFTCVMTLLYAFSKDIFSVINFFSFFNWLCVALAIIGMIWLRHRKPELERPIKVNLALPVFFILACLFLIAVSFWKTPVECGIGFTIILSGLPVYFFGVWWKNKPKWLLQGIFSTTVLCQKLMQVVPQET

SEQ ID NO: 90 - protein, 193 aa, Homo sapiens
MDGGTLPRSAPPAPPVPVGCAARRRPASPELLRCSRRRRPATAETGGGAAAVARRNERERNRVKLVNLGFQALRQHVPHGGASKKLSKVETLRSAVEYIRALQRLLAEHDAVRNALAGGLRPQAVRPSAPRGPPGTTPVAASPSRASSSPGRGGSSEPGSPRSAYSSDDSGCEGALSPAERELLDFSSWLGGY

SEQ ID NO: 91 - protein, 100 aa, Homo sapiens
MRTLTILTAVLLVALQAKAEPLQAEDDPLQAKAYEADAQEQRGANDQDFAVSFAEDASSSLRALGSTRAFTCHCRRSCYSTEYSYGTCTVMGINHRFCCL

SEQ ID NO: 92 - protein, 128 aa, Homo sapiens
MAFTGKFEMESEKNYDEFMKLLGISSDVIEKARNFKIVTEVQQDGQDFTWSQHYSGGHTMTNKFTVGKESNIQTMGGKTFKATVQMEGGKLVVNFPNYHQTSEIVGDKLVEVSTIGGVTYERVSKRLA

SEQ ID NO: 93 - protein, 95 aa, Homo sapiens
MCCTKSLLLAALMSVLLLHLCGESEASNFDCCLGYTDRILHPKFIVGFTRQLANEGCDINAIIFHTKKKLSVCANPKQTWVKYIVRLLSKKVKNM

SEQ ID NO: 94 - protein, 388 aa, Homo sapiens
MEETNSSSKDMYQSPGEAEGWRWKKGSDRGQNLFRKHSKCLILLIRERFESPHSYICSPVTFQFFYAQSVKHVNVTIDCLPEGAATRGTARTSKPTTKSQKTLPSTSPGHWTQSTPWASALRSSPWTETAAPSETEETLNTGRPPELPARATATWFSASHTLPALATRRVARTQWLTADRQTWASISSVPWAQTISEKKPGGSLWETRSSPPTTAGTEEAMNTTSLLAPAAEIMATPGSPSQASPTSGAFTHGTQTPSPTKATAPRYPQTGDLSAEWPFTAGEEPVLVPRPHQVSRCPQPLFKVGAMAAAPLTLAIQRLNPCLMELCQFFQQCLCMSQRSPRTEDMRYCLEYYSWFLKNATYICQRVKRVSHSHTLKQKCLENICKSV

SEQ ID NO: 95 - protein, 166 aa, Homo sapiens
MAQTSSYFMLISCLMFLSQSQGQEAQTELPQARISCPEGTNAYRSYCYYFNEDRETWVDADLYCQNMNSGNLVSVLTQAEGAFVASLIKESGTDDFNVWIGLHDPKKNRRWHWSSGSLVSYKSWGIGAPSSVNPGYCVSLTSSTGFQKWKDVPCEDKFSFVCKFKN

SEQ ID NO: 96 - protein, 166 aa, Homo sapiens
MAQTNSFFMLISSLMFLSLSQGQESQTELPNPRISCPEGTNAYRSYCYYFNEDPETWVDADLYCQNMNSGNLVSVLTQAEGAFVASLIKESSTDDSNVWIGLHDPKKNRRWHWSSGSLVSYKSWDTGSPSSANAGYCASLTSCSGFKKWKDESCEKKFSFVCKFKN

SEQ ID NO: 97 - protein, 198 aa, Homo sapiens
MPLGLLWLGLALLGALHAQAQDSTSDLIPAPPLSKVPLQQNFQDNQFQGKWYVVGLAGNAILREDKDPQKMYATIYELKEDKSYNVTSVLFRKKKCDYWIRTFVPGCQPGEFTLGNIKSYPGLTSYLVRVVSTNYNQHAMVFFKKVSQNREYFKITLYGRTKELTSELKENFIRFSKSLGLPENHIVFPVPIDQCIDG

SEQ ID NO: 98 - protein, 423 aa, Homo sapiens
MRSSGADAGRCLVTARAPGSVPASREGSAGSRGPGARFPARVSARGSAPGPGLGGAGALDPPAVVAESVSSLTIADAFIAAGESSAPTPPRPALPRRFICSFPDCSANYSKAWKLDAHLCKHTGERPFVCDYEGCGKAFIRDYHLSRHILTHTGEKPFVCAANGCDQKFNTKSNLKKHFERKHENQQKQYICSFEDCKKTFKKHQQLKIHQCQNTNEPLFKCTQEGCGKHFASPSKLKRHAKAHEGYVCQKGCSFVAKTWTELLKHVRETHKEEILCEVCRKTFKRKDYLKQHMKTHAPERDVCRCPREGCGRTYTTVFNLQSHILSFHEESRPFVCEHAGCGKTFAMKQSLTRHAVVHDPDKKKMKLKVKKSREKREFGLSSQWIYPPKRKQGQGLSLCQNGESPNCVEDKMLSTVAVLTLG

SEQ ID NO: 99 - protein, 3114 aa, Homo sapiens [sequence omitted]

SEQ ID NO: 100 - protein, 971 aa, Homo sapiens
MELSDANLQTLTEYLKKTLDPDPAIRRPAEKFLESVEGNQNYPLLLLTLLEKSQDNVIKVCASVTFKNYIKRNWRIVEDEPNKICEADRVAIKANIVHLMLSSPEQIQKQLSDAISIIGREDFPQKWPDLLTEMVNRFQSGDFHVINGVLRTAHSLFKRYRHEFKSNELWTEIKLVLDAFALPLTNLFKATIELCSTHANDASALRILFSSLILISKLFYSLNFQDLPEFWEGNMETWMNNFHTLLTLDNKLLQTDDEEEAGLLELLKSQICDNAALYAQKYDEEFQRYLPRFVTAIWNLLVTTGQEVKYDLLVSNAIQFLASVCERPHYKNLFEDQNTLTSICEKVIVPNMEFRAADEEAFEDNSEEYIRRDLEGSDIDTRRRAACDLVRGLCKFFEGPVTGIFSGYVNSMLQEYAKNPSVNWKHKDAAIYLVTSLASKAQTQKHGITQANELVNLTEFFVNHILPDLKSANVNEFPVLKADGIKYIMIFRNQVPKEHLLVSIPLLINHLQAGSIVVHTYAAHALERLFTMRGPNNATLFTAAEIAPFVEILLTNLFKALTLPGSSENEYIMKAIMRSFSLLQEAIIPYIPTLITQLTQKLLAVSKNPSKPHFNHYMFEAICLSIRITCKANPAAVVNFEEALFLVFTEILQNDVQEFIPYVFQVMSLLLETHKNDIPSSYMALFPHLLQPVLWERTGNIPALVRLLQAFLERGSNTIASAAADKIPGLLGVFQKLIASKANDHQGFYLLNSIIEHMPPESVDQYRKQIFILLFQRLQNSKTTKFIKSFLVFINLYCIKYGALALQEIFDGIQPKMFGMVLEKIIIPEIQKVSGNVEKKICAVGITNLLTECPPMMDTEYTKLWTPLLQSLIGLFELPEDDTIPDEEHFIDIEDTPGYQTAFSQLAFAGKKEHDPVGQMVNNPKIHLAQSLHMLSTACPGRVPSMVSTSLNAEALQYLQGYLQAASVTLL

SEQ ID NO: 101 - protein, 747 aa, Homo sapiens
MSQVKSSYSYDAPSDFINFSSLDDEGDTQNIDSWFEEKANLENKLLGKNGTGGLFQGKTPLRKANLQQAIVTPLKPVDNTYYKEAEKENLVEQSIPSNACSSLEVEAAISRKTPAQPQRRSLRLSAQKDLEQKEKHHVKMKAKRCATPVIIDEILPSKKMKVSNNKKKPEEEGSAHQDTAEKNASSPEKAKGRHTVPCMPPAKQKFLKSTEEQELEKSMKMQQEVVEMRKKNEEFKKLALAGIGQPVKKSVSQVTKSVDFHFRTDERIKQHPKNQEEYKEVNFTSELRKHPSSPARVTKGCTIVKPFNLSQGKKRTFDETVSTYVPLAQQVEDFHKRTPNRYHLRSKKDDINLLPSKSSVTKICRDPQTPVLQTKHRARAVTCKSTAELEAEELEKLQQYKFKARELDPRILEGGPILPKKPPVKPPTEPIGFDLEIEKRIQERESKKKTEDEHFEFHSRPCPTKILEDVVGVPEKKVLPITVPKSPAFALKNRIRMPTKEDEEEDEPVVIKAQPVPHYGVPFKPQIPEARTVEICPFSFDSRDKERQLQKEKKIKELQKGEVPKFKALPLPHFDTINLPEKKVKNVTQIEPFCLETDRRGALKAQTWKHQLEEELRQQKEAACFKARPNTVISQEPFVPKKEKKSVAEGLSGSLVQEPFQLATEKRAKERQELEKRMAEVEAQKAQQLEEARLQEEEQKKEELARLRRELVHKANPIRKYQGLEIKSSDQPLTVPVSPKFSTRFHC

SEQ ID NO: 102 - protein, 484 aa, Homo sapiens
MERRMKAGYLDQQVPYTFSSKSPGNGSLREALIGPLGKLMDPGSLPPLDSEDLFQDLSHFQETWLAEAQVPDSDEQFVPDFHSENLAFHSPTTRIKKEPQSPRTDPALSCSRKPPLPYHHGEQCLYSSAYDPPRQIAIKSPAPGALGQSPLQPFPRAEQRNFLRSSGTSQPHPGHGYLGEHSSVFQQPLDICHSFTSQGGGREPLPAPYQHQLSEPCPPYPQQSFKQEYHDPLYEQAGQPAVDQGGVNGHRYPGAGVVIKQEQTDFAYDSDVTGCASMYLHTEGFSGPSPGDGAMGYGYEKPLRPFPDDVCVVPEKFEGDIKQEGVGAFREGPPYQRRGALQLWQFLVALLDDPTNAHFIAWTGRGMEFKLIEPEEVARLWGIQKNRPAMNYDKLSRSLRYYYEKGIMQKVAGERYVYKFVCEPEALFSLAFPDNQRPALKAEFDRPVSEEDTVPLSHLDESPAYLPELAGPAQPFGPKGGYSY

SEQ ID NO: 103 - protein, 700 aa, Homo sapiens
MSRRTRCEDLDELHYQDTDSDVPEQRDSKCKVKWTHEEDEQLRALVRQFGQQDWKFLASHFPNRTDQQCQYRWLRVLNPDLVKGPWTKEEDQKVIELVKKYGTKQWTLIAKHLKGRLGKQCRERWHNHLNPEVKKSCWTEEEDRIICEAHKVLGNRWAEIAKMLPGRTDNAVKNHWNSTIKRKVDTGGFLSESKDCKPPVYLLLELEDKDGLQSAQPTEGQGSLLTNWPSVPPTIKEEENSEEELAAATTSKEQEPIGTDLDAVRTPEPLEEFPKREDQEGSPPETSLPYKWVVEAANLLIPAVGSSLSEALDLIESDPDAWCDLSKFDLPEEPSAEDSINNSLVQLQASHQQQVLPPRQPSALVPSVTEYRLDGHTISDLSRSSRGELIPISPSTEVGGSGIGTPPSVLKRQRKRRVALSPVTENSTSLSFLDSCNSLTPKSTPVKTLPFSPSQFLNFWNKQDTLELESPSLTSTPVCSQKVVVTTPLHRDKTPLHQKHAAFVTPDQKYSMDNTPHTPTPFKNALEKYGPLKPLPQTPHLEEDLKEVLRSEAGIELIIEDDIRPEKQKRKPGLRRSPIKKVRKSLALDIVDEDVKLMMSTLPKSLSLPTTAPSNSSSLTLSGIKEDNSLLNQGFLQAKPEKAAVAQKPRSHFTTPAPMSSAWKTVACGGTRDQLFMQEKARQLLGRLKPSHTSRTLILS

SEQ ID NO: 104 - protein, 261 aa, Homo sapiens
MFEARLVQGSILKKVLEALKDLINEACWDISSSGVNLQSMDSSHVSLVQLTLRSEGFDTYRCDRNLAMGVNLTSMSKILKCAGNEDIITLRAEDNADTLALVFEAPNQEKVSDYEMKLMDLDVEQLGIPEQEYSCVVKMPSGEFARICRDLSHIGDAVVISCAKDGVKFSASGELGNGNIKLSQTSNVDKEEEAVTIEMNEPVQLTFALRYLNFFTKATPLSSTVTLSMSADVPLVVEYKIADMGHLKYYLAPKIEDEEGS

SEQ ID NO: 105 - protein, 212 aa, Homo sapiens
MDYLLMIFSLLFVACQGAPETAVLGAELSAVGENGGEKPTPSPPWRLRRSKRCSCSSLMDKECVYFCHLDIIWVNTPEHVVPYGLGSPRSKRALENLLPTKATDRENRCQCASQKDKKCWNFCQAGKELRAEDIMEKDWNNHKKGKDCSKLGKKCIYQQLVRGRKIRRSSEEHLRQTRSETMRNSVKSSFHDPKLKGNPSRERYVTHNRAHW

SEQ ID NO: 106 - protein, 673 aa, Homo sapiens
MDPQRSPLLEVKGNIELKRPLIKAPSQLPLSGSRLKRRPDQMEDGLEPEKKRTRGLGATTKITTSHPRVPSLTTVPQTQGQTTAQKVSKKTGPRCSTAIATGLKNQKPVPAVPVQKSGTSGVPPMAGGKKPSKRPAWDLKGQLCDLNAELKRCRERTQTLDQENQQLQDQLRDAQQQVKALGTERTTLEGHLAKVQAQAEQGQQELKNLRACVLELEERLSTQEGLVQELQKKQVELQEERRGLMSQLEEKERRLQTSEAALSSSQAEVASLRQETVAQAALLTEREERLHGLEMERRRLHNQLQELKGNIRVFCRVRPVLPGEPTPPPGLLLFPSGPGGPSDPPTRLSLSRSDERRGTLSGAPAPPPRHDFSFDRVFPPGSGQDEVFEEIAMLVQSALDGYPVCIFAYGQTGSGKTFTMEGGPGGDPQLEGLIPRALRHLFSVAQELSGQGWTYSFVASYVEIYNETVRDLLATGTRKGQGGECEIRRAGPGSEELTVTNARYVPVSCEKEVDALLHLARQNRAVARTAQNERSSRSHSVFQLQISGEHSSRGLQCGAPLSLVDLAGSERLDPGLALGPGERERLRETQAINSSLSTLGLVIMALSNKESHVPYRNSKLTYLLQNSLGGSAKMLMFVNISPLEENVSESLNSLRFASKVNQCVIGTAQANRK

SEQ ID NO: 107 - protein, 1053 aa, Homo sapiens
MSRRKQAKPQHINSEEDQGEQQPQQQTPEFADAAPAAPAAGELGAPVNHPGNDEVASEDEATVKRLRREETHVCEKCCAEFFSISEFLEHKKNCTKNPPVLIMNDSEGPVPSEDFSGAVLSHQPTSPGSKDCHRENGGSSEDMKEKPDAESVVYLKTETALPPTPQDISYLAKGKVANTNVTLQALRGTKVAVNQRSADALPAPVPGANSIPWVLEQILCLQQQQLQQIQLTEQIRIQVNMWASHALHSSGAGADTLKTLGSHMSQQVSAAVALLSQKAGSQGLSLDALKQAKLPHANIPSATSSLSPGLAPFTLKPDGTRVLPNVMSRLPSALLPQAPGSVLFQSPFSTVALDTSKKGKGKPPNISAVDVKPKDEAALYKHKCKYCSKVFGTDSSLQIHLRSHTGERPFVCSVCGHRFTTKGNLKVHFHRHPQVKANPQLFAEFQDKVAAGNGIPYALSVPDPIDEPSLSLDSKPVLVTTSVGLPQNLSSGTNPKDLTGGSLPGDLQPGPSPESEGGPTLPGVGPNYNSPRAGGFQGSGTPEPGSETLKLQQLVENIDKATTDPNECLICHRVLSCQSSLKMHYRTHTGERPFQCKICGRAFSTKGNLKTHLGVHRTNTSIKTQHSCPICQKKFTNAVMLQQHIRMHMGGQIPNTPLPENPCDFTGSEPMTVGENGSTGAICHDDVIESIDVEEVSSQEAPSSSSKVPTPLPSIHSASPTLGFAMMASLDAPGKVGPAPFNLQRQGSRENGSVESDGLTNDSSSLMGDQEYQSRSPDILETTSFQALSPANSQAESIKSKSPDAGSKAESSENSRTEMEGRSSLPSTFIRAPPTYVKVEVPGTFVGPSTLSPGMTPLLAAQPRRQAKQHGCTRCGKNFSSASALQIHERTHTGEKPFVCNICGRAFTTKGNLKVHYMTHGANNNSARRGRKLAIENTMALLGTDGKRVSEIFPKEILAPSVNVDPVVWNQYTSMLNGGLAVKTNEISVIQSGGVPTLPVSLGATSVVNNATVSKMDGSQSGISADVEKPSATDGVPKHQFPHFLEENKIAVS

SEQ ID NO: 108 - protein, 230 aa, Homo sapiens
MASLGLQLVGYILGLLGLLGTLVAMLLPSWKTSSYVGASIVTAVGFSKGLWMECATHSTGITQCDIYSTLLGLPADIQAAQAMMVTSSAISSLACIISVVGMRCTVFCQESRAKDRVAVAGGVFFILGGLLGFIPVAWNLHGILRDFYSPLVPDSMKFEIGEALYLGIISSLFSLIAGIILCFSCSSQRNRSNYYDAYQAQPLATRSSPRPGQPPKVKSEFNSYSLTGYV

SEQ ID NO: 109 - protein, 371 aa, Homo sapiens
MDARRVPQKDLRVKKNLKKFRYVKLISMETSSSSDDSCDSFASDNFANTRLQSVREGCRTRSQCRHSGPLRVAMKFPARSTRGATNKKAESRQPSENSVTDSNSDSEDESGMNFLEKRALNIKQNKAMLAKLMSELESFPGSFRGRHPLPGSDSQSRRPRRRTFPGVASRRNPERRARPLTRSRSRILGSLDALPMEEEEEEDKYMLVRKRKTVDGYMNEDDLPRSRRSRSSVTLPHIIRPVEEITEEELENVCSNSREKIYNRSLGSTCHQCRQKTIDTKTNCRNPDCWGVRGQFCGPCLRNRYGEEVRDALLDPNWHCPPCRGICNCSFCRQRDGRCATGVLVYLAKYHGFGNVHAYLKSLKQEFEMQA

SEQ ID NO: 110 - protein, 682 aa, Homo sapiens
MSTPAVPQDLQLPPSQRAQSAFKEQRRQKLKEHLLRRKTLFAYKQENEMLSSRDQRVVTSEDQVQEGTKVLKLKTKMADKENMKRPAESKNNTVVGKHCIPLKPSNELTNSTVVIDTHKPKDSNQTPHLLLTEDDPQSQHMTLSQAFHLKNNSKKKQMTTEKQKQDANMPKKPVLGSYRGQIVQSKINSFRKPLQVKDESSAATKKLSATIPKATKPQPVNTSSVTVKSNRSSNMTATTKFVSTTSQNTQLVRPPIRSHHSNTRDTVKQGISRTSANVTIRKGPHEKELLQSKTALSSVKTSSSQGIIRNKTLSRSIASEVVARPASLSNDKLMEKSEPVDQRRHTAGKAIVDSRSAQPKETSEERKARLSEWKAGKGRVLKRPPNSVVTQHEPAGQNEKPVGSFWTTMAEEDEQRLFTEKVNNTFSECLNLINEGCPKEDILVTLNDLIKNIPDAKKLVKYWICLALIEPITSPIENIIAIYEKAILAGAQPIEEMRHTIVDILTMKSQEKANLGENMEKSCASKEEVREVSIEDTGVDVDPEKLEMESKLHRNLLLQDCEKEQDNKTKDPTHDAKTPNTETRTSCLIKYNVSTTPYLQSVKKKVQFDGTNSAFKELKFLTPVRRSRRLQEKTSKLPDMLKDHYPCVSSLEQLTELGRETDAFVCRPNAALCRVYYEADTT

SEQ ID NO: 111 - protein, 450 aa, Homo sapiens
MVSRVQLPPEIQLAQRLAGNEQVTRDRAVRKLRKYIVARTQRAAGGFTHDELLKVWKGLFYCMWMQDKPLLQEELGRTISQLVHAFQTTEAQHLFLQAFWQTMNREWTGIDRLRLDKFYMLMRMVLNESLKVLKMQGWEERQIEELLELLMTEILHPSSQAPNGVKSHFIEIFLEELTKVGAEELTADQNLKFIDPFCRIAARTKDSLVLNNITRGIFETIVEQAPLAIEDLLNELDTQDEEVASDSDESSEGGERGDALSQKRSEKPPAGSICRAEPEAGEEQAGDDRDSGGPVLQFDYEAVANRLFEMASRQSTPSQNRKRLYKVIRKLQDLAGGIFPEDEIPEKACRRLLEGRRQKKTKKQKRLLRLQQERGKGEKEPPSPGMERKRSRRRGVGADPEARAEAGEQPGTAERALLRDQPRGRGQRGARQRRRTPRPLTSARAKAANV

SEQ ID NO: 112 - protein, 204 aa, Homo sapiens
MDETVAEFIKRTILKIPMNELTTILKAWDFLSENQLQTVNFRQRKESVVQHLIHLCEEKRASISDAALLDIIYMQFHQHQKVWDVFQMSKGPGEDVDLFDMKQFKNSFKKILQRALKNVTVSFRETEENAVWIRIAWGTQYTKPNQYKPTYVVYYSQTPYAFTSSSMLRRNTPLLGQELEATGKIYLRQEEIILDITEMKKACN

SEQ ID NO: 113 - protein, 63 aa, Homo sapiens
MKHVLNLYLLGVVLTLLSIFVRVMESLEGLLESPSPGTSWTTRSQLANTEPTKGLPDHPSRSM

SEQ ID NO: 114 - protein, 1125 aa, Homo sapiens
MDPFTEKLLERTRARRENLQRKMAERPTAAPRSMTHAKRARQPLSEASNQQPFSGGEEKSCSKPSPSKKRCSDNTEVEVSNLENKQPVESTSAKSCSPSPVSPQVQPQAADTISDSVAVPASLLGMRRGLNSRLEATAASSVKTRMQKLAEQRRRWDNDDMTDDIPESSLFSPMPSEEKAASPPKPLLSNASATPVGRRGRLANLAATICSWEDDVNHSFAKQNSVQEQPGTACLSKFSSASGASARINSSSVKQEATFCSQRDGDASLNKALSSSADDASLVNASISSSVKATSSPVKSTTSITDAKSCEGQNPELLPKTPISPLKTGVSKPIVKSTLSQTVPSKGELSREICLQSQSKDKSTTPGGTGIKPFLERFGERCQEHSKESPARSTPHRTPIITPNTKAIQERLFKQDTSSSTTHLAQQLKQERQKELACLRGRFDKGNIWSAEKGGNSKSKQLETKQETHCQSTPLKKHQGVSKTQSLPVTEKVTENQIPAKNSSTEPKGFTECEMTKSSPLKITLFLEEDKSLKVTSDPKVEQKIEVIREIEMSVDDDDINSSKVINDLFSDVLEEGELDMEKSQEEMDQALAESSEEQEDALNISSMSLLAPLAQTVGVVSPESLVSTPRLELKDTSRSDESPKPGKFQRTRVPRAESGDSLGSEDRDLLYSIDAYRSQRFKETERPSIKQVIVRKEDVTSKLDEKNNAFPCQVNIKQKMQELNNEINMQQTVIYQASQALNCCVDEEHGKGSLEEAEAERLLLIATGKRTLLIDELNKLKNEGPQRKNKASPQSEFMPSKGSVTLSEIRLPLKADFVCSTVQKPDAANYYYLIILKAGAENMVATPLASTSNSLNGDALTFTTTFTLQDVSNDFEINIEVYSLVQKKDPSGLDKKKKTSKSKAITPKRLLTSITTKSNIHSSVMASPGGLSAVRTSNFALVGSYTLSLSSVGNTKFVLDKVPFLSSLEGHIYLKIKCQVNSSVEERGFLTIFEDVSGFGAWHRRWCVLSGNCISYWTYPDDEKRKNPIGRINLANCTSRQIEPANREFCARRNTFELITVRPQREDDRETLVSQCRDTLCVTKNWLSADTKEERDLWMQKLNQVLVDIRLWQPDACYKPIGKP

SEQ ID NO: 115 - protein, 793 aa, Homo sapiens
MWIQVRTMDGRQTHTVDSLSRLTKVEELRRKIQELFHVEPGLQRLFYRGKQMEDGHTLFDYEVRLNDTIQLLVRQSLVLPHSTKERDSELSDTDSGCCLGQSESDKSSTHGEAAAETDSRPADEDMWDETELGLYKVNEYVDARDTNMGAWFEAQVVRVTRKAPSRDEPCSSTSRPALEEDVIYHVKYDDYPENGVVQMNSRDVRARARTIIKWQDLEVGQVVMLNYNPDNPKERGFWYDAEISRKRETRTARELYANVVLGDDSLNDCRIIFVDEVFKIERPGEGSPMVDNPMRRKSGPSCKHCKDDVNRLCRVCACHLCGGRQDPDKQLMCDECDMAFHIYCLDPPLSSVPSEDEWYCPECRNDASEVVLAGERLRESKKNAKMASATSSSQRDWGKGMACVGRTKECTIVPSNHYGPIPGIPVGTMWRFRVQVSESGVHRPHVAGIHGRSNDGSYSLVLAGGYEDDVDHGNFFTYTGSGGRDLSGNKRTAEQSCDQKLTNTNRALALNCFAPINDQEGAEAKDWRSGKPVRVVRNVKGGKNSKYAPAEGNRYDGIYKVVKYWPEKGKSGFLVWRYLLRRDDDEPGPWTKEGKDRIKKLGLTMQYPEGYLEALANREREKENSKREEEEQQEGGFASPRTGKGKWKRKSAGGGPSRAGSPRRTSKKTKVEPYSLTAQQSSLIREDKSNAKLWNEVLASLKDRPASGSPFQLFLSKVEETFQCICCQELVFRPITTVCQHNVCKDCLDRSFRAQVFSCPACRYDLGRSYAMQVNQPLQTVLNQLFPGYGNGR

SEQ ID NO: 116 - protein, 843 aa, Homo sapiens
MSSAMLVTCLPDPSSSFREDAPRPPVPGEEGETPPCQPGVGKGQVTKPMSVSSNTRRNEDGLGEPEGRASPDSPLTRWTKSLHSLLGDQDGAYLFRTFLEREKCVDTLDFWFACNGFRQMNLKDTKTLRVAKAIYKRYIENNSIVSKQLKPATKTYIRDGIKKQQIDSIMFDQAQTEIQSVMEENAYQMFLTSDIYLEYVRSGGENTAYMSNGGLGSLKVVCGYLPTLNEEEEWTCADFKCKLSPTVVGLSSKTLRATASVRSTETVDSGYRSFKRSDPVNPYHIGSGYVFAPATSANDSEISSDALTDDSMSMTDSSVDGIPPYRVGSKKQLQREMHRSVKANGQVSLPHFPRTHRLPKEMTPVEPATFAAELISRLEKLKLELESRHSLEERLQQIREDEEREGSELTLNSREGAPTQHPLSLLPSGSYEEDPQTILDDHLSRVLKTPGCQSPGVGRYSPRSRSPDHHHHHHSQYHSLLPPGGKLPPAAASPGACPLLGGKGFVTKQTTKHVHHHYIHHHAVPKTKEEIEAEATQRVHCFCPGGSEYYCYSKCKSHSKAPETMPSEQFGGSRGSTLPKRNGKGTEPGLALPAREGGAPGGAGALQLPREEGDRSQDVWQWMLESERQSKPKPHSAQSTKKAYPLESARSSPGERASRHHLWGGNSGHPRTTPRAHLFTQDPAMPPLTPPNTLAQLEEACRRLAEVSKPPKQRCCVASQQRDRNHSATVQTGATPFSNPSLAPEDHKEPKKLAGVHALQASELVVTYFFCGEEIPYRRMLKAQSLTLGHFKEQLSKKGNYRYYFKKASDEFACGAVFEEIWEDETVLPMYEGRILGKVERID

SEQ ID NO: 117 - protein, 102 aa, Homo sapiens
MAGQAFRKFLPLFDRVLVERSAAETVTKGGIMLPEKSQGKVLQATVVAVGSGSKGKGGEIQPVSVKVGDKVLLPEYGGTKVVLDDKDYFLFRDGDILGKYVD

SEQ ID NO: 118 - protein, 276 aa, Homo sapiens
MEDSMDMDMSPLRPQNYLFGCELKADKDYHFKVDNDENEHQLSLRTVSLGAGAKDELHIVEAEAMNYEGSPIKVTLATLKMSVQPTVSLGGFEITPPVVLRLKCGSGPVHISGQHLVAVEEDAESEDEEEEDVKLLSISGKRSAPGGGSKVPQKKVKLAADEDDDDDDEEDDDEDDDDDDFDDEEAEEKAPVKKSIRDTPAKNAQKSNQNGKDSKPSSTPRSKGQESFKKQEKTPKTPKGPSSVEDIKAKMQASIEKGGSLPKVEAKFINYVKNCF

SEQ ID NO: 119 - protein, 356 aa, Homo sapiens
MSLWVDKYRPCSLGRLDYHKEQAAQLRNLVQCGDFPHLLVYGPSGAGKKTRIMCILRELYGVGVEKLRIEHQTITTPSKKKIEISTIASNYHLEVNPSDAGNSDRVVIQEMLKTVAQSQQLETNSQRDFKVVLLTEVDKLTKDAQHALRRTMEKYMSTCRLILCCNSTSKVIPPIRSRCLAVRVPAPSIEDICHVLSTVCKKEGLNLPSQLAHRLAEKSCRNLRKALLMCEACRVQQYPFTADQEIPETDWEVYLRETANAIVSQQTPQRLLEVRGRLYELLTHCIPPEIIMKGLLSELLHNCDGQLKGEVAQMAAYYEHRLQLGSKAIYHLEAFVAKFMALYKKFMEDGLEGMMF

SEQ ID NO: 120 - protein, 359 aa, Homo sapiens
MSDEGSRGSRLPLALPPASQGCSSGGGGGGSSAGGSGNSRPPRNLQGLLQMAITAGSEEPDPPPEPMSEERRQWLQEAMSAAFRGQREEVEQMKSCLRVLSQPMPPTAGEAEQAADQQEREGALELLADLCENMDNAADFCQLSGMHLLVGRYLEAGAAGLRWRAAQLIGTCSQNVAAIQEQVLGLGALRKLLRLLDRDACDTVRVKALFAISCLVREQEAGLLQFLRLDGFSVLMRAMQQQVQKLKVKSAFLLQNLLVGHPEHKGTLCSMGMVQQLVALVRTEHSPFHEHVLGALCSLVTDFPQGVRECREPELGLEELLRHRCQLLQQHEEYQEELEFCEKLLQTCFSSPADDSMDR

SEQ ID NO: 121 - protein, 1015 aa, Homo sapiens
  MISC_FEATURE (1000)..(1000): can be any amino acid
  MISC_FEATURE (1005)..(1005): can be any amino acid
MGAERRLLSIKEAFRLAQQPHQNQAKLVVALSRTYRTMDDKTVFHEEFIHYLKYVMVVYKREPAVERVIEFAAKFVTSFHQSDMEDDEEEEDGGLLNYLFTFLLKSHEANSNAVRFRVCLLINKLLGSMPENAQIDDDVFDKINKAMLIRLKDKIPNVRIQAVLALSRLQDPKDDECPVVNAYATLIENDSNPEVRRAVLSCIAPSAKTLPKIVGRTKDVKEAVRKLAYQVLAEKVHMRAMSIAQRVMLLQQGLNDRSDAVKQAMQKHLLQGWLRVSEGNILELLHRLDVENSSEVAVSVLNALFSITPLSELVGLCKNNDGRKLIPVETLTPEIALYWCALCEYLKSKGDEGEEFLEQILPEPVVYADYLLSYIQSIPVVNEEHRGDFSYIGNLMTKEFIGQQLILIIKSLDTSEEGGRKKLLAVLQEILILPTIPISLVSFLVERLLHIIIDDNKRTQIVTEIISEIRAPIVTVGVNNDPADVRKKELKMAEIKVKLIEAKEALENCITLQDFNRASELKEEIKALEDARINLLKETEQLEIKEVHIEKNDAETLQKCLILCYELLKQMSISTGLSATINGIIESLILPGIISIHPVVRNLAVLCLGCCGLQNQDFARKHFVLLLQVLQIDDVTIKISALKAIFDQLMTFGIEPFKTKKIKTLHCEGTEINSDDEQESKEVEETATAKNVLKLLSDFLDSEVSELRTGAAEGLAKLMFSGLLVSSRILSRLILLWYNPVTEEDVQLRHCLGVFFPVFAYASRTNQECFEEAFLPTLQTLANAPASSPLAEIDITNVAELLVDLTRPSGLNPQAKTSQDYQALTVHDNLAMKICNEILTSPCSPEIRVYTKALSSLELSSHLAKDLLVLLNEILEQVKDRTCLRALEKIKIQLEKGNKEFGDQAEAAQDATLTTTTFQNEDEKNKEVYMTPLRGVKATQASKSTQLKTNRGQRKVTVSARTNRRCQTAEADSESDHEVPEPESEMKMRLPRRAKTAALXKSKLXLAQFFNEDLS

SEQ ID NO: 122 - protein, 283 aa, Homo sapiens
MEHGSIITQARREDALVLTKQGLVSKSSPKKPRGRNIFKALFCCFRAQHVGQSSSSTELAAYKEEANTIAKSDLLQCLQYQFYQIPGTCLLPEVTEEDQGRICVVIDLDETLVHSSFKPINNADFIVPIEIEGTTHQVYVLKRPYVDEFLRRMGELFECVLFTASLAKYADPVTDLLDRCGVFRARLFRESCVFHQGCYVKDLSRLGRDLRKTLILDNSPASYIFHPENAVPVQSWFDDMADTELLNLIPIFEELSGAEDVYTSLGAAAGPLACPASKRRPSQ

SEQ ID NO: 123 - protein, 238 aa, Homo sapiens
MAAAPLLLLLLLVPVPLLPLLAQGPGGALGNRHAVYWNSSNQHLRREGYTVQVNVNDYLDIYCPHYNSSGVGPGAGPGPGGGAEQYVLYMVSRNGYRTCNASQGFKRWECNRPHAPHSPIKFSEKFQRYSAFSLGYEFHAGHEYYYISTPTHNLHWKCLRMKVFVCCASTSHSGEKPVPTLPQFTMGPNVKINVLEDFEGENPQVPKLEKSISGTSPKREHLPLAVGIAFFLMTFLAS

SEQ ID NO: 124 - protein, 683 aa, Homo sapiens
MALFVRLLALALALALGPAATLAGPAKSPYQLVLQHSRLRGRQHGPNVCAVQKVIGTNRKYFTNCKQWYQRKICGKSTVISYECCPGYEKVPGEKGCPAALPLSNLYETLGVVGSTTTQLYTDRTEKLRPEMEGPGSFTIFAPSNEAWASLPAEVLDSLVSNVNIELLNALRYHMVGRRVLTDELKHGMTLTSMYQNSNIQIHHYPNGIVTVNCARLLKADHHATNGVVHLIDKVISTITNNIQQIIEIEDTFETLRAAVAASGLNTMLEGNGQYTLLAPTNEAFEKIPSETLNRILGDPEALRDLLNNHILKSAMCAEAIVAGLSVETLEGTTLEVGCSGDMLTINGKAIISNKDILATNGVIHYIDELLIPDSAKTLFELAAESDVSTAIDLFRQAGLGNHLSGSERLTLLAPLNSVFKDGTPPIDAHTRNLLRNHIIKDQLASKYLYHGQTLETLGGKKLRVFVYRNSLCIENSCIAAHDKRGRYGTLFTMDRVLTPPMGTVMDVLKGDNRFSMLVAAIQSAGLTETLNREGVYTVFAPTNEAFRALPPRERSRLLGDAKELANILKYHIGDEILVSGGIGALVRLKSLQGDKLEVSLKNNVVSVNKEPVAEPDIMATNGVVHVITNVLQPPANRPQERGDELADSALEIFKQASAFSRASQRSVRLAPVYQKLLERMKH

SEQ ID NO: 125 - protein, 683 aa, Homo sapiens; identical to SEQ ID NO: 124

SEQ ID NO: 126 - protein, 132 aa, Homo sapiens
MVRRFLVTLRIRRACGPPRVRVFVVHIPRLTGEWAAPGAPAAVALVLMLLRSQRLGQQPLPRRPGHDDGQRPSGGAAAAPRRGAQLRRPRHSHPTRARRCPGGLPGHAGGAAPGRGAAGRARCLGPSARGPG

SEQ ID NO: 127 - DNA, 21 bp, homo sapiens
aaactgcggtggaggaagttt

SEQ ID NO: 128 - RNA, 21 nt, RNAi
acugcgguggaggaaguuuuu

SEQ ID NO: 129 - RNA, 21 nt, RNAi
uuugacgccaccuccuucaaa

SEQ ID NO: 130 - DNA, 21 bp, homo sapiens
aaatggatatcacaggacaag

SEQ ID NO: 131 - RNA, 21 nt, RNAi
auggauaucacaggacaaguu

SEQ ID NO: 132 - RNA, 21 nt, RNAi
uuuaccuauaguguccuguuc

SEQ ID NO: 133 - DNA, 21 bp, homo sapiens
aatggatatcacaggacaagg

SEQ ID NO: 134 - RNA, 21 nt, RNAi
uggauaucacaggacaagguu

SEQ ID NO: 135 - RNA, 21 nt, RNAi
uuaccuauaguguccuguucc

SEQ ID NO: 136 - DNA, 21 bp, homo sapiens
aaggaggtggctgtaaagaag

SEQ ID NO: 137 - RNA, 21 nt, RNAi
ggagguggcuguaaagaaguu

SEQ ID NO: 138 - RNA, 21 nt, RNAi
uuccuccaccgacauuucuuc

SEQ ID NO: 139 - DNA, 21 bp, homo sapiens
aaatagagaaagaggcagaaa

SEQ ID NO: 140 - RNA, 21 nt, RNAi
auagagaaagaggcagaaauu

SEQ ID NO: 141 - RNA, 21 nt, RNAi
uuuaucucuuucuccgucuuu

SEQ ID NO: 142 - DNA, 21 bp, homo sapiens
aatagagaaagaggcagaaat

SEQ ID NO: 143 - RNA, 21 nt, RNAi
uagagaaagaggcagaaauuu

SEQ ID NO: 144 - RNA, 21 nt, RNAi
uuaucucuuucuccgucuuua

SEQ ID NO: 145 - DNA, 21 bp, homo sapiens
aaagaggcagaaatactcagt

SEQ ID NO: 146 - RNA, 21 nt, RNAi
agaggcagaaauacucaguuu

SEQ ID NO: 147 - RNA, 21 nt, RNAi
uuucuccgucuuuaugaguca

SEQ ID NO: 148 - DNA, 21 bp, homo sapiens
aagaggcagaaatactcagtg

SEQ ID NO: 149 - RNA, 21 nt, RNAi
gaggcagaaauacucaguguu

SEQ ID NO: 150 - RNA, 21 nt, RNAi
uucuccgucuuuaugagucac

SEQ ID NO: 151 - DNA, 21 bp, homo sapiens
aaatactcagtgtcctcagtc

SEQ ID NO: 152 - RNA, 21 nt, RNAi
auacucaguguccucagucuu

SEQ ID NO: 153 - RNA, 21 nt, RNAi
uuuaugagucacaggagucag

SEQ ID NO: 154 - DNA, 21 bp, homo sapiens
aatactcagtgtcctcagtca

SEQ ID NO: 155 - RNA, 21 nt, RNAi
uacucaguguccucagucauu

SEQ ID NO: 156 - RNA, 21 nt, RNAi
uuaugagucacaggagucagu

SEQ ID NO: 157 - DNA, 21 bp, homo sapiens
aactatggcattgtcacagaa

SEQ ID NO: 158 - RNA, 21 nt, RNAi
cuauggcauugucacagaauu

SEQ ID NO: 159 - RNA, 21 nt, RNAi
uugauaccguaacagugucuu

SEQ ID NO: 160 - DNA, 21 bp, homo sapiens
aacagtaacagaagtgaggag

SEQ ID NO: 161 - RNA, 21 nt, RNAi
caguaacagaagugaggaguu

SEQ ID NO: 162 - RNA, 21 nt, RNAi
uugucauugucuucacuccuc

SEQ ID NO: 163 - DNA, 21 bp, homo sapiens
aacagaagtgaggagatggat

SEQ ID NO: 164 - RNA, 21 nt, RNAi
cagaagugaggagauggauuu

SEQ ID NO: 165 - RNA, 21 nt, RNAi
uugucuucacuccucuaccua

SEQ ID NO: 166 - DNA, 21 bp, homo sapiens
aagtgaggagatggatatgga

SEQ ID NO: 167 - RNA, 21 nt, RNAi
gugaggagauggauauggauu

SEQ ID NO: 168 - RNA, 21 nt, RNAi
uucacuccucuaccuauaccu

SEQ ID NO: 169 - DNA, 21 bp, homo sapiens
aaggtgattcacagagacctc

SEQ ID NO: 170 - RNA, 21 nt, RNAi
ggugauucacagagaccucuu

SEQ ID NO: 171 - RNA, 21 nt, RNAi
uuccacuaagugucucuggag

SEQ ID NO: 172 - DNA, 21 bp, homo sapiens
aagaaacgttgttatagctgc

SEQ ID NO: 173 - RNA, 21 nt, RNAi
gaaacguuguuauagcugcuu

SEQ ID NO: 174 - RNA, 21 nt, RNAi
uucuuugcaacaauaucgacg

SEQ ID NO: 175 - DNA, 21 bp, homo sapiens
aaacgttgttatagctgctga

SEQ ID NO: 176 - RNA, 21 nt, RNAi
acguuguuauagcugcugauu

SEQ ID NO: 177 - RNA, 21 nt, RNAi
uuugcaacaauaucgacgacu

SEQ ID NO: 178 - DNA, 21 bp, homo sapiens
aacgttgttatagctgctgat

SEQ ID NO: 179 - RNA, 21 nt, RNAi
cguuguuauagcugcugauuu

SEQ ID NO: 180 - RNA, 21 nt, RNAi
uugcaacaauaucgacgacua

SEQ ID NO: 181 - DNA, 21 bp, homo sapiens
aagatctgtgactttggtgcc

SEQ ID NO: 182 - RNA, 21 nt, RNAi
gaucugugacuuuggugccuu

SEQ ID NO: 183 - RNA, 21 nt, RNAi
uucuagacacugaaaccacgg

SEQ ID NO: 184 - DNA, 21 bp, homo sapiens
aaccatacaacacacatgtcc

SEQ ID NO: 185 - RNA, 21 nt, RNAi
ccauacaacacacauguccuu

SEQ ID NO: 186 - RNA, 21 nt, RNAi
uugguauguuguguguacagg

SEQ ID NO: 187 - DNA, 21 bp, homo sapiens
aacacacatgtccttggttgg

SEQ ID NO: 188 - RNA, 21 nt, RNAi
cacacauguccuugguugguu

SEQ ID NO: 189 - RNA, 21 nt, RNAi
uuguguguacaggaaccaacc

SEQ ID NO: 190 - DNA, 21 bp, homo sapiens
aaacttgtgacacatattcct

SEQ ID NO: 191 - RNA, 21 nt, RNAi
acuugugacacauauuccuuu

SEQ ID NO: 192 - RNA, 21 nt, RNAi
uuugaacacuguguauaagga

SEQ ID NO: 193 - DNA, 21 bp, homo sapiens
aacttgtgacacatattccta

SEQ ID NO: 194 - RNA, 21 nt, RNAi
cuugugacacauauuccuauu

SEQ ID NO: 195 - RNA, 21 nt, RNAi
uugaacacuguguauaaggau

SEQ ID NO: 196 - DNA, 21 bp, homo sapiens
aaaggtttggaaggattacaa

SEQ ID NO: 197 - RNA, 21 nt, RNAi
agguuuggaaggauuacaauu

SEQ ID NO: 198 - RNA, 21 nt, RNAi
uuuccaaaccuuccuaauguu

SEQ ID NO: 199 - DNA, 21 bp, homo sapiens
aaggtttggaaggattacaag

SEQ ID NO: 200 - RNA, 21 nt, RNAi
gguuuggaaggauuacaaguu

SEQ ID NO: 201 - RNA, 21 nt, RNAi
uuccaaaccuuccuaauguuc

SEQ ID NO: 202 - DNA, 21 bp, homo sapiens
aaggattacaagtagcttggc

SEQ ID NO: 203 - RNA, 21 nt, RNAi
ggauuacaaguagcuuggcuu

SEQ ID NO: 204 - RNA, 21 nt, RNAi
uuccuaauguucaucgaaccg

SEQ ID NO: 205 - DNA, 21 bp, homo sapiens
aagtagcttggcttgtagtgg

SEQ ID NO: 206 - RNA, 21 nt, RNAi
guagcuuggcuuguagugguu

SEQ ID NO: 207 - RNA, 21 nt, RNAi
uucaucgaaccgaacaucacc

SEQ ID NO: 208 - DNA, 21 bp, homo sapiens
aaacgagagattaaccattcc

SEQ ID NO: 209 - RNA, 21 nt, RNAi
acgagagauuaaccauuccuu

SEQ ID NO: 210 - RNA, 21 nt, RNAi
uuugcucucuaauugguaagg

SEQ ID NO: 211 - DNA, 21 bp, homo sapiens
aacgagagattaaccattcca

SEQ ID NO: 212 - RNA, 21 nt, RNAi
cgagagauuaaccauuccauu

SEQ ID NO: 213 - RNA, 21 nt, RNAi
uugcucucuaauugguaaggu

SEQ ID NO: 214 - DNA, 21 bp, homo sapiens
aagctgatgccaagaaacggc

SEQ ID NO: 215 - RNA, 21 nt, RNAi
gcugaugccaagaaacggcuu

SEQ ID NO: 216 - RNA, 21 nt, RNAi
uucgacuacgguucuuugccg

SEQ ID NO: 217 - DNA, 21 bp, homo sapiens
aagaaacggccatcattcaag

SEQ ID NO: 218 - RNA, 21 nt, RNAi
gaaacggccaucauucaaguu

SEQ ID NO: 219 - RNA, 21 nt, RNAi
uucuuugccgguaguaaguuc

SEQ ID NO: 220 - DNA, 21 bp, homo sapiens
aaacggccatcattcaagcaa

SEQ ID NO: 221 - RNA, 21 nt, RNAi
acggccaucauucaagcaauu

SEQ ID NO: 222 - RNA, 21 nt, RNAi
uuugccgguaguaaguucguu

SEQ ID NO: 223 - DNA, 21 bp, homo sapiens
aacggccatcattcaagcaaa

SEQ ID NO: 224 - RNA, 21 nt, RNAi
cggccaucauucaagcaaauu

SEQ ID NO: 225 - RNA, 21 nt, RNAi
uugccgguaguaaguucguuu

SEQ ID NO: 226 - DNA, 21 bp, homo sapiens
aagcaaatcatttcaatcctg

SEQ ID NO: 227 - RNA, 21 nt, RNAi
gcaaaucauuucaauccuguu

SEQ ID NO: 228 - RNA, 21 nt, RNAi
uucguuuaguaaaguuaggac

SEQ ID NO: 229 - DNA, 21 bp, homo sapiens
aaatcatttcaatcctggagt

SEQ ID NO: 230 - RNA, 21 nt, RNAi
aucauuucaauccuggaguuu

SEQ ID NO: 231 - RNA, 21 nt, RNAi
uuuaguaaaguuaggaccuca

SEQ ID NO: 232 - DNA, 21 bp, homo sapiens
aatcatttcaatcctggagtc

SEQ ID NO: 233 - RNA, 21 nt, RNAi
ucauuucaauccuggagucuu

SEQ ID NO: 234 - RNA, 21 nt, RNAi
uuaguaaaguuaggaccucag

SEQ ID NO: 235 - DNA, 21 bp, homo sapiens
aatcctggagtccatgtcaaa

SEQ ID NO: 236 - RNA, 21 nt, RNAi
uccuggaguccaugucaaauu

SEQ ID NO: 237 - RNA, 21 nt, RNAi
uuaggaccucagguacaguuu

SEQ ID NO: 238 - DNA, 21 bp, homo sapiens
aaatgacacgagccttcctga

SEQ ID NO: 239 - RNA, 21 nt, RNAi
augacacgagccuuccugauu

SEQ ID NO: 240 - RNA, 21 nt, RNAi
uuuacugugcucggaaggacu

SEQ ID NO: 241 - DNA, 21 bp, homo sapiens
aatgacacgagccttcctgac

SEQ ID NO: 242 - RNA, 21 nt, RNAi
ugacacgagccuuccugacuu

SEQ ID NO: 243 - RNA, 21 nt, RNAi
uuacugugcucggaaggacug

SEQ ID NO: 244 - DNA, 21 bp, homo sapiens
aagtgtaactcattcctacac

SEQ ID NO: 245 - RNA, 21 nt, RNAi
guguaacucauuccuacacuu

SEQ ID NO: 246 - RNA, 21 nt, RNAi
uucacauugaguaaggaugug

SEQ ID NO: 247 - DNA, 21 bp, homo sapiens
aactcattcctacacaacaag

SEQ ID NO: 248 - RNA, 21 nt, RNAi
cucauuccuacacaacaaguu

SEQ ID NO: 249 - RNA, 21 nt, RNAi
uugaguaaggauguguuguuc

SEQ ID NO: 250 - DNA, 21 bp, homo sapiens
aacaaggcggagtggaggtgc

SEQ ID NO: 251 - RNA, 21 nt, RNAi
caaggcggaguggaggugcuu

SEQ ID NO: 252 - RNA, 21 nt, RNAi
uuguuccgccucaccuccacg

SEQ ID NO: 253 - DNA, 21 bp, homo sapiens
aaggcggagtggaggtgcgaa

SEQ ID NO: 254 - RNA, 21 nt, RNAi
ggcggaguggaggugcgaauu

SEQ ID NO: 255 - RNA, 21 nt, RNAi
uuccgccucaccuccacgcuu

SEQ ID NO: 256 - DNA, 21 bp, homo sapiens
aaattgaggcaactcttgaga

SEQ ID NO: 257 - RNA, 21 nt, RNAi
auugaggcaacucuugagauu

SEQ ID NO: 258 - RNA, 21 nt, RNAi
uuuaacuccguugagaacucu

SEQ ID NO: 259 - DNA, 21 bp, homo sapiens
aattgaggcaactcttgagag

SEQ ID NO: 260 - RNA, 21 nt, RNAi
uugaggcaacucuugagaguu

SEQ ID NO: 261 - RNA, 21 nt, RNAi
uuaacuccguugagaacucuc

SEQ ID NO: 262 - DNA, 21 bp, homo sapiens
aactcttgagaggctaaagaa

SEQ ID NO: 263 - RNA, 21 nt, RNAi
cucuugagaggcuaaagaauu

SEQ ID NO: 264 - RNA, 21 nt, RNAi
uugagaacucuccgauuucuu

SEQ ID NO: 265 - DNA, 21 bp, homo sapiens
aaagaaactagagcgtgatct

SEQ ID NO: 266 - RNA, 21 nt, RNAi
agaaacuagagcgugaucuuu

SEQ ID NO: 267 - RNA, 21 nt, RNAi
uuucuuugaucucgcacuaga

SEQ ID NO: 268 - DNA, 21 bp, homo sapiens
aagaaactagagcgtgatctc

SEQ ID NO: 269 - RNA, 21 nt, RNAi
gaaacuagagcgugaucucuu

SEQ ID NO: 270 - RNA, 21 nt, RNAi
uucuuugaucucgcacuagag

SEQ ID NO: 271 - DNA, 21 bp, homo sapiens
aaactagagcgtgatctcagc

SEQ ID NO: 272 - RNA, 21 nt, RNAi
acuagagcgugaucucagcuu

SEQ ID NO: 273 - RNA, 21 nt, RNAi
uuugaucucgcacuagagucg

SEQ ID NO: 274 - DNA, 21 bp, homo sapiens
aactagagcgtgatctcagct

SEQ ID NO: 275 - RNA, 21 nt, RNAi
cuagagcgugaucucagcuuu

SEQ ID NO: 276 - RNA, 21 nt, RNAi
uugaucucgcacuagagucga

SEQ ID NO: 277 - DNA, 21 bp, homo sapiens
aaggagcaggagcttaaagaa

SEQ ID NO: 278 - RNA, 21 nt, RNAi
ggagcaggagcuuaaagaauu

SEQ ID NO: 279 - RNA, 21 nt, RNAi
uuccucguccucgaauuucuu

SEQ ID NO: 280 - DNA, 21 bp, homo sapiens
aaagaacgagaaagacgttta

SEQ ID NO: 281 - RNA, 21 nt, RNAi
agaacgagaaagacguuuauu

SEQ ID NO: 282 - RNA, 21 nt, RNAi
uuucuugcucuuucugcaaau

SEQ ID NO: 283 - DNA, 21 bp, homo sapiens
aagaacgagaaagacgtttaa

SEQ ID NO: 284 - RNA, 21 nt, RNAi
gaacgagaaagacguuuaauu

SEQ ID NO: 285 - RNA, 21 nt, RNAi
uucuugcucuuucugcaaauu

SEQ ID NO: 286 - DNA, 21 bp, homo sapiens
aacgagaaagacgtttaaaga

SEQ ID NO: 287 - RNA, 21 nt, RNAi
cgagaaagacguuuaaagauu

SEQ ID NO: 288 - RNA, 21 nt, RNAi
uugcucuuucugcaaauuucu

SEQ ID NO: 289 - DNA, 21 bp, homo sapiens
aaagctgacagagcagtccaa

SEQ ID NO: 290 - RNA, 21 nt, RNAi
agcugacagagcaguccaauu

SEQ ID NO: 291 - RNA, 21 nt, RNAi
uuucgacugucucgucagguu

SEQ ID NO: 292 - DNA, 21 bp, homo sapiens
aagctgacagagcagtccaac

SEQ ID NO: 293 - RNA, 21 nt, RNAi
gcugacagagcaguccaacuu

SEQ ID NO: 294 - RNA, 21 nt, RNAi
uucgacugucucgucagguug

SEQ ID NO: 295 - DNA, 21 bp, homo sapiens
aaaggtgactcttcagcagag

SEQ ID NO: 296 - RNA, 21 nt, RNAi
aggugacucuucagcagaguu

SEQ ID NO: 297 - RNA, 21 nt, RNAi
uuuccacugagaagucgucuc

SEQ ID NO: 298 - DNA, 21 bp, homo sapiens
aaggtgactcttcagcagaga

SEQ ID NO: 299 - RNA, 21 nt, RNAi
ggugacucuucagcagagauu

SEQ ID NO: 300 - RNA, 21 nt, RNAi
uuccacugagaagucgucucu

SEQ ID NO: 301 - DNA, 21 bp, homo sapiens
aagaagacctgaaagacatgg

SEQ ID NO: 302 - RNA, 21 nt, RNAi
gaagaccugaaagacaugguu

SEQ ID NO: 303 - RNA, 21 nt, RNAi
uucuucuggacuuucuguacc

SEQ ID NO: 304 - DNA, 21 bp, homo sapiens
aagtcagccattgagaaatta

SEQ ID NO: 305 - RNA, 21 nt, RNAi
gucagccauugagaaauuauu

SEQ ID NO: 306 - RNA, 21 nt, RNAi
uucagucgguaacucuuuaau

SEQ ID NO: 307 - DNA, 21 bp, homo sapiens
aattaaggactcaggaggtga

SEQ ID NO: 308 - RNA, 21 nt, RNAi
uuaaggacucaggaggugauu

SEQ ID NO: 309 - RNA, 21 nt, RNAi
uuaauuccugaguccuccacu

SEQ ID NO: 310 - DNA, 21 bp, homo sapiens
aaggactcaggaggtgaacct

SEQ ID NO: 311 - RNA, 21 nt, RNAi
ggacucaggaggugaaccuuu

SEQ ID NO: 312 - RNA, 21 nt, RNAi
uuccugaguccuccacuugga

SEQ ID NO: 313 - DNA, 21 bp, homo sapiens
aaatagtgaacctggaactgg

SEQ ID NO: 314 - RNA, 21 nt, RNAi
auagugaaccuggaacugguu

SEQ ID NO: 315 - RNA, 21 nt, RNAi
uuuaucacuuggaccuugacc

SEQ ID NO: 316 - DNA, 21 bp, homo sapiens
aatagtgaacctggaactggt

SEQ ID NO: 317 - RNA, 21 nt, RNAi
uagugaaccuggaacugguuu

SEQ ID NO: 318 - RNA, 21 nt, RNAi
uuaucacuuggaccuugacca

SEQ ID NO: 319 - DNA, 21 bp, homo sapiens
aaatgtatatggagatggatg

SEQ ID NO: 320 - RNA, 21 nt, RNAi
auguauauggagauggauguu

SEQ ID NO: 321 - RNA, 21 nt, RNAi
uuuacauauaccucuaccuac

SEQ ID NO: 322 - DNA, 21 bp, homo sapiens
aatgtatatggagatggatgg

SEQ ID NO: 323 - RNA, 21 nt, RNAi
uguauauggagauggaugguu

SEQ ID NO: 324 - RNA, 21 nt, RNAi
uuacauauaccucuaccuacc

SEQ ID NO: 325 - DNA, 21 bp, homo sapiens
aaagatgtgacattcaacact

SEQ ID NO: 326 - RNA, 21 nt, RNAi
agaugugacauucaacacuuu

SEQ ID NO: 327 - RNA, 21 nt, RNAi
uuucuacacuguaaguuguga

SEQ ID NO: 328 - DNA, 21 bp, homo sapiens
aagatgtgacattcaacacta

SEQ ID NO: 329 - RNA, 21 nt, RNAi
gaugugacauucaacacuauu

SEQ ID NO: 330 - RNA, 21 nt, RNAi
uucuacacuguaaguugugau

SEQ ID NO: 331 - DNA, 21 bp, homo sapiens
aacactaacctacctgatgcg

SEQ ID NO: 332 - RNA, 21 nt, RNAi
cacuaaccuaccugaugcguu

SEQ ID NO: 333 - RNA, 21 nt, RNAi
uugugauuggauggacuacgc

SEQ ID NO: 334 - DNA, 21 bp, homo sapiens
aacctacctgatgcggagatt

SEQ ID NO: 335 - RNA, 21 nt, RNAi
ccuaccugaugcggagauuuu

SEQ ID NO: 336 - RNA, 21 nt, RNAi
uuggauggacuacgccucuaa

SEQ ID NO: 337 - DNA, 21 bp, homo sapiens
aaagatgacaaagccaccatt

SEQ ID NO: 338 - RNA, 21 nt, RNAi
agaugacaaagccaccauuuu

SEQ ID NO: 339 - RNA, 21 nt, RNAi
uuucuacuguuucggugguaa

SEQ ID NO: 340 - DNA, 21 bp, homo sapiens
aagatgacaaagccaccattt

SEQ ID NO: 341 - RNA, 21 nt, RNAi
gaugacaaagccaccauuuuu

SEQ ID NO: 342 - RNA, 21 nt, RNAi
uucuacuguuucggugguaaa

SEQ ID NO: 343 - DNA, 21 bp, homo sapiens
aaagccaccatttgtaatgga

SEQ ID NO: 344 - RNA, 21 nt, RNAi
agccaccauuuguaauggauu

SEQ ID NO: 345 - RNA, 21 nt, RNAi
uuucggugguaaacauuaccu

SEQ ID NO: 346 - DNA, 21 bp, homo sapiens
aagccaccatttgtaatggag

SEQ ID NO: 347 - RNA, 21 nt, RNAi
gccaccauuuguaauggaguu

SEQ ID NO: 348 - RNA, 21 nt, RNAi
uucggugguaaacauuaccuc

SEQ ID NO: 349 - DNA, 21 bp, homo sapiens
aatggagaagtggattgtagg

SEQ ID NO: 350 - RNA, 21 nt, RNAi
uggagaaguggauuguagguu

SEQ ID NO: 351 - RNA, 21 nt, RNAi
uuaccucuucaccuaacaucc

SEQ ID NO: 352 - DNA, 21 bp, homo sapiens
aagtggattgtaggaatagca

SEQ ID NO: 353 - RNA, 21 nt, RNAi
guggauuguaggaauagcauu

SEQ ID NO: 354 - RNA, 21 nt, RNAi
uucaccuaacauccuuaucgu

SEQ ID NO: 355 - DNA, 21 bp, homo sapiens
aaagtcagactgtggagtgca

SEQ ID NO: 356 - RNA, 21 nt, RNAi
agucagacuguggagugcauu

SEQ ID NO: 357 - RNA, 21 nt, RNAi
uuucagucugacaccucacgu

SEQ ID NO: 358 - DNA, 21 bp, homo sapiens
aagtcagactgtggagtgcac

SEQ ID NO: 359 - RNA, 21 nt, RNAi
gucagacuguggagugcacuu

SEQ ID NO: 360 - RNA, 21 nt, RNAi
uucagucugacaccucacgug

SEQ ID NO: 361 - DNA, 21 bp, homo sapiens
aaagcactaaacatgtccatt

SEQ ID NO: 362 - RNA, 21 nt, RNAi
agcacuaaacauguccauuuu

SEQ ID NO: 363 - RNA, 21 nt, RNAi
uuucgugauuuguacagguaa

SEQ ID NO: 364 - DNA, 21 bp, homo sapiens
aagcactaaacatgtccattt

SEQ ID NO: 365 - RNA, 21 nt, RNAi
gcacuaaacauguccauuuuu

SEQ ID NO: 366 - RNA, 21 nt, RNAi
uucgugauuuguacagguaaa

SEQ ID NO: 367 - DNA, 21 bp, homo sapiens
aaacatgtccatttgattcag

SEQ ID NO: 368 - RNA, 21 nt, RNAi
acauguccauuugauucaguu

SEQ ID NO: 369 - RNA, 21 nt, RNAi
uuuguacagguaaacuaaguc

SEQ ID NO: 370 - DNA, 21 bp, homo sapiens
aacatgtccatttgattcagt

SEQ ID NO: 371 - RNA, 21 nt, RNAi
cauguccauuugauucaguuu

SEQ ID NO: 372 - RNA, 21 nt, RNAi
uuguacagguaaacuaaguca

SEQ ID NO: 373 - DNA, 21 bp, homo sapiens
aaacctcaggatgaagtgaaa

SEQ ID NO: 374 - RNA, 21 nt, RNAi
accucaggaugaagugaaauu

SEQ ID NO: 375 - RNA, 21 nt, RNAi
uuuggaguccuacuucacuuu

SEQ ID NO: 376 - DNA, 21 bp, homo sapiens
aacctcaggatgaagtgaaag

SEQ ID NO: 377 - RNA, 21 nt, RNAi
ccucaggaugaagugaaaguu

SEQ ID NO: 378 - RNA, 21 nt, RNAi
uuggaguccuacuucacuuuc

SEQ ID NO: 379 - DNA, 21 bp, homo sapiens
aagtgaaagcagtccaacttg

SEQ ID NO: 380 - RNA, 21 nt, RNAi
gugaaagcaguccaacuuguu

SEQ ID NO: 381 - RNA, 21 nt, RNAi
uucacuuucgucagguugaac

SEQ ID NO: 382 - DNA, 21 bp, homo sapiens
aaagcagtccaacttgccatt

SEQ ID NO: 383 - RNA, 21 nt, RNAi
agcaguccaacuugccauuuu

SEQ ID NO: 384 - RNA, 21 nt, RNAi
uuucgucagguugaacgguaa

SEQ ID NO: 385 - DNA, 21 bp, homo sapiens
aagcagtccaacttgccattc

SEQ ID NO: 386 - RNA, 21 nt, RNAi
gcaguccaacuugccauucuu

SEQ ID NO: 387 - RNA, 21 nt, RNAi
uucgucagguugaacgguaag

SEQ ID NO: 388 - DNA, 21 bp, homo sapiens
aacttgccattcagacattat

SEQ ID NO: 389 - RNA, 21 nt, RNAi
cuugccauucagacauuauuu

SEQ ID NO: 390 - RNA, 21 nt, RNAi
uugaacgguaagucuguaaua

SEQ ID NO: 391 - DNA, 21 bp, homo sapiens
aagcaggtccgactcaagtgc

SEQ ID NO: 392 - RNA, 21 nt, RNAi
gcagguccgacucaagugcuu

SEQ ID NO: 393 - RNA, 21 nt, RNAi
uucguccaggcugaguucacg

SEQ ID NO: 394 - DNA, 21 bp, homo sapiens
aagtgctgattgccagtggtt

SEQ ID NO: 395 - RNA, 21 nt, RNAi
gugcugauugccagugguuuu

SEQ ID NO: 396 - RNA, 21 nt, RNAi
uucacgacuaacggucaccaa

SEQ ID NO: 397 - DNA, 21 bp, homo sapiens
aacacttctttacagcgttcc

SEQ ID NO: 398 - RNA, 21 nt, RNAi
cacuucuuuacagcguuccuu

SEQ ID NO: 399 - RNA, 21 nt, RNAi
uugugaagaaaugucgcaagg

SEQ ID NO: 400 - DNA, 21 bp, homo sapiens
aagtatcaacagattacacct

SEQ ID NO: 401 - RNA, 21 nt, RNAi
guaucaacagauuacaccuuu

SEQ ID NO: 402 - RNA, 21 nt, RNAi
uucauaguugucuaaugugga

SEQ ID NO: 403 - DNA, 21 bp, homo sapiens
aacagattacacctgtgaacc

SEQ ID NO: 404 - RNA, 21 nt, RNAi
cagauuacaccugugaaccuu

SEQ ID NO: 405 - RNA, 21 nt, RNAi
uugucuaauguggacacuugg

SEQ ID NO: 406 - DNA, 21 bp, homo sapiens
aaccagtccagaagctcgtct

SEQ ID NO: 407 - RNA, 21 nt, RNAi
ccaguccagaagcucgucuuu

SEQ ID NO: 408 - RNA, 21 nt, RNAi
uuggucaggucuucgagcaga

SEQ ID NO: 409 - DNA, 21 bp, homo sapiens
aagctcgtctcctactcagta

SEQ ID NO: 410 - RNA, 21 nt, RNAi
gcucgucuccuacucaguauu

SEQ ID NO: 411 - RNA, 21 nt, RNAi
uucgagcagaggaugagucau

SEQ ID NO: 412 - DNA, 21 bp, homo sapiens
aatactgacacctcttcagag

SEQ ID NO: 413 - RNA, 21 nt, RNAi
uacugacaccucuucagaguu

SEQ ID NO: 414 - RNA, 21 nt, RNAi
uuaugacuguggagaagucuc

SEQ ID NO: 415 - DNA, 21 bp, homo sapiens
aagcaggaacaaatatggacg

SEQ ID NO: 416 - RNA, 21 nt, RNAi
gcaggaacaaauauggacguu

SEQ ID NO: 417 - RNA, 21 nt, RNAi
uucguccuuguuuauaccugc

SEQ ID NO: 418 - DNA, 21 bp, homo sapiens
aacaaatatggacgtggtagt

SEQ ID NO: 419 - RNA, 21 nt, RNAi
caaauauggacgugguaguuu

SEQ ID NO: 420 - RNA, 21 nt, RNAi
uuguuuauaccugcaccauca

SEQ ID NO: 421 - DNA, 21 bp, homo sapiens
aaatatggacgtggtagtata

SEQ ID NO: 422 - RNA, 21 nt, RNAi
auauggacgugguaguauauu

SEQ ID NO: 423 - RNA, 21 nt, RNAi
uuuauaccugcaccaucauau

SEQ ID NO: 424 - DNA, 21 bp, homo sapiens
aatatggacgtggtagtatat

SEQ ID NO: 425 - RNA, 21 nt, RNAi
uauggacgugguaguauauuu

SEQ ID NO: 426 - RNA, 21 nt, RNAi
uuauaccugcaccaucauaua

SEQ ID NO: 427 - DNA, 21 bp, homo sapiens
aattcttctcctagaggaaga

SEQ ID NO: 428 - RNA, 21 nt, RNAi
uucuucuccuagaggaagauu

SEQ ID NO: 429 - RNA, 21 nt, RNAi
uuaagaagaggaucuccuucu

SEQ ID NO: 430 - DNA, 21 bp, homo sapiens
aagatacagtggaaagagtca

SEQ ID NO: 431 - RNA, 21 nt, RNAi
gauacaguggaaagagucauu

SEQ ID NO: 432 - RNA, 21 nt, RNAi
uucuaugucaccuuucucagu

SEQ ID NO: 433 - DNA, 21 bp, homo sapiens
aaagagtcagcattccactcc

SEQ ID NO: 434 - RNA, 21 nt, RNAi
agagucagcauuccacuccuu

SEQ ID NO: 435 - RNA, 21 nt, RNAi
uuucucagucguaaggugagg

SEQ ID NO: 436 - DNA, 21 bp, homo sapiens
aagagtcagcattccactcct

SEQ ID NO: 437 - RNA, 21 nt, RNAi
gagucagcauuccacuccuuu

SEQ ID NO: 438 - RNA, 21 nt, RNAi
uucucagucguaaggugagga

SEQ ID NO: 439 - DNA, 21 bp, homo sapiens
aatcctcaccagtcgcctgac

SEQ ID NO: 440 - RNA, 21 nt, RNAi
uccucaccagucgccugacuu

SEQ ID NO: 441 - RNA, 21 nt, RNAi
uuaggaguggucagcggacug

SEQ ID NO: 442 - DNA, 21 bp, homo sapiens
aagagccagtgaagaggacag

SEQ ID NO: 443 - RNA, 21 nt, RNAi
gagccagugaagaggacaguu

SEQ ID NO: 444 - RNA, 21 nt, RNAi
uucucggucacuucuccuguc

SEQ ID NO: 445 - DNA, 21 bp, homo sapiens
aagaggacagcaaagtcagcg

SEQ ID NO: 446 - RNA, 21 nt, RNAi
gaggacagcaaagucagcguu

SEQ ID NO: 447 - RNA, 21 nt, RNAi
uucuccugucguuucagucgc

SEQ ID NO: 448 - DNA, 21 bp, homo sapiens
aaaccaataaagagagagcca

SEQ ID NO: 449 - RNA, 21 nt, RNAi
accaauaaagagagagccauu

SEQ ID NO: 450 - RNA, 21 nt, RNAi
uuugguuauuucucucucggu

SEQ ID NO: 451 - DNA, 21 bp, homo sapiens
aaccaataaagagagagccag

SEQ ID NO: 452 - RNA, 21 nt, RNAi
ccaauaaagagagagccaguu

SEQ ID NO: 453 - RNA, 21 nt, RNAi
uugguuauuucucucucgguc

SEQ ID NO: 454 - DNA, 21 bp, homo sapiens
aattgagactatagccaaacc

SEQ ID NO: 455 - RNA, 21 nt, RNAi
uugagacuauagccaaaccuu

SEQ ID NO: 456 - RNA, 21 nt, RNAi
uuaacucugauaucgguuugg

SEQ ID NO: 457 - DNA, 21 bp, homo sapiens
aaattatggatattggtcacc

SEQ ID NO: 458 - RNA, 21 nt, RNAi
auuauggauauuggucaccuu

SEQ ID NO: 459 - RNA, 21 nt, RNAi
uuuaauaccuauaaccagugg

SEQ ID NO: 460 - DNA, 21 bp, homo sapiens
aaccactgatattctggttag

SEQ ID NO: 461 - RNA, 21 nt, RNAi
ccacugauauucugguuaguu

SEQ ID NO: 462 - RNA, 21 nt, RNAi
uuggugacuauaagaccaauc

SEQ ID NO: 463 - DNA, 21 bp, homo sapiens
aatatggcctggcaaggcact

SEQ ID NO: 464 - RNA, 21 nt, RNAi
uauggccuggcaaggcacuuu

SEQ ID NO: 465 - RNA, 21 nt, RNAi
uuauaccggaccguuccguga

SEQ ID NO: 466 - DNA, 21 bp, homo sapiens
aaggcactgttactgatcttg

SEQ ID NO: 467 - RNA, 21 nt, RNAi
ggcacuguuacugaucuuguu

SEQ ID NO: 468 - RNA, 21 nt, RNAi
uuccgugacaaugacuagaac

SEQ ID NO: 469 - DNA, 21 bp, homo sapiens
aaggcaggtacctcactcatc

SEQ ID NO: 470 - RNA, 21 nt, RNAi
ggcagguaccucacucaucuu

SEQ ID NO: 471 - RNA, 21 nt, RNAi
uuccguccauggagugaguag

SEQ ID NO: 472 - DNA, 21 bp, homo sapiens
aactgatctggcttgtcattt

SEQ ID NO: 473 - RNA, 21 nt, RNAi
cugaucuggcuugucauuuuu

SEQ ID NO: 474 - RNA, 21 nt, RNAi
uugacuagaccgaacaguaaa

SEQ ID NO: 475 - DNA, 21 bp, homo sapiens
aaattgcctagatttgtggtt

SEQ ID NO: 476 - RNA, 21 nt, RNAi
auugccuagauuugugguuuu

SEQ ID NO: 477 - RNA, 21 nt, RNAi
uuuaacggaucuaaacaccaa

SEQ ID NO: 478 - DNA, 21 bp, homo sapiens
aattgcctagatttgtggttc

SEQ ID NO: 479 - RNA, 21 nt, RNAi
uugccuagauuugugguucuu

SEQ ID NO: 480 - RNA, 21 nt, RNAi
uuaacggaucuaaacaccaag

SEQ ID NO: 481 - DNA, 21 bp, homo sapiens
aaatttcaccaaaggagcaaa

SEQ ID NO: 482 - RNA, 21 nt, RNAi
auuucaccaaaggagcaaauu

SEQ ID NO: 483 - RNA, 21 nt, RNAi
uuuaaagugguuuccucguuu

SEQ ID NO: 484 - DNA, 21 bp, homo sapiens
aatttcaccaaaggagcaaag

SEQ ID NO: 485 - RNA, 21 nt, RNAi
uuucaccaaaggagcaaaguu

SEQ ID NO: 486 - RNA, 21 nt, RNAi
uuaaagugguuuccucguuuc

SEQ ID NO: 487 - DNA, 21 bp, homo sapiens
aaacaacgctccataaaggcc

SEQ ID NO: 488 - RNA, 21 nt, RNAi
acaacgcuccauaaaggccuu

SEQ ID NO: 489 - RNA, 21 nt, RNAi
uuuguugcgagguauuuccgg

SEQ ID NO: 490 - DNA, 21 bp, homo sapiens
aacaacgctccataaaggcct

SEQ ID NO: 491 - RNA, 21 nt, RNAi
caacgcuccauaaaggccuuu

SEQ ID NO: 492 - RNA, 21 nt, RNAi
uuguugcgagguauuuccgga

SEQ ID NO: 493 - DNA, 21 bp, homo sapiens
aacgctccataaaggcctctt

SEQ ID NO: 494 - RNA, 21 nt, RNAi
cgcuccauaaaggccucuuuu

SEQ ID NO: 495 - RNA, 21 nt, RNAi
uugcgagguauuuccggagaa

SEQ ID NO: 496 - DNA, 21 bp, homo sapiens
aaacagacacagagcaagaca

SEQ ID NO: 497 - RNA, 21 nt, RNAi
acagacacagagcaagacauu

SEQ ID NO: 498 - RNA, 21 nt, RNAi
uuugucugugucucguucugu

SEQ ID NO: 499 - DNA, 21 bp, homo sapiens
aacagacacagagcaagacaa

SEQ ID NO: 500 - RNA, 21 nt, RNAi
cagacacagagcaagacaauu

SEQ ID NO: 501 - RNA, 21 nt, RNAi
uugucugugucucguucuguu

SEQ ID NO: 502 - DNA, 21 bp, homo sapiens
aagacaataacatcacaagct

SEQ ID NO: 503 - RNA, 21 nt, RNAi
gacaauaacaucacaagcuuu

SEQ ID NO: 504 - RNA, 21 nt, RNAi
uucuguuauuguaguguucga

SEQ ID NO: 505 - DNA, 21 bp, homo sapiens
aaattaccaacatccttgttg

SEQ ID NO: 506 - RNA, 21 nt, RNAi
auuaccaacauccuuguuguu

SEQ ID NO: 507 - RNA, 21 nt, RNAi
uuuaaugguuguaggaacaac

SEQ ID NO: 508 - DNA, 21 bp, homo sapiens
aattaccaacatccttgttgg

SEQ ID NO: 509 - RNA, 21 nt, RNAi
uuaccaacauccuuguugguu

SEQ ID NO: 510 - RNA, 21 nt, RNAi
uuaaugguuguaggaacaacc

SEQ ID NO: 511 - DNA, 21 bp, homo sapiens
aacatccttgttggagtaaga

SEQ ID NO: 512 - RNA, 21 nt, RNAi
cauccuuguuggaguaagauu

SEQ ID NO: 513 - RNA, 21 nt, RNAi
uuguaggaacaaccucauucu

SEQ ID NO: 514 - DNA, 21 bp, homo sapiens
aagacagtaaatatcagcctt

SEQ ID NO: 515 - RNA, 21 nt, RNAi
gacaguaaauaucagccuuuu

SEQ ID NO: 516 - RNA, 21 nt, RNAi
uucugucauuuauagucggaa

SEQ ID NO: 517 - DNA, 21 bp, homo sapiens
aaatatcagccttgcagcaag

SEQ ID NO: 518 - RNA, 21 nt, RNAi
auaucagccuugcagcaaguu

SEQ ID NO: 519 - RNA, 21 nt, RNAi
uuuauagucggaacgucguuc

SEQ ID NO: 520 - DNA, 21 bp, homo sapiens
aatatcagccttgcagcaaga

SEQ ID NO: 521 - RNA, 21 nt, RNAi
uaucagccuugcagcaagauu

SEQ ID NO: 522 - RNA, 21 nt, RNAi
uuauagucggaacgucguucu

SEQ ID NO: 523 - DNA, 21 bp, homo sapiens
aagacagctctgagcagctgt

SEQ ID NO: 524 - RNA, 21 nt, RNAi
gacagcucugagcagcuguuu

SEQ ID NO: 525 - RNA, 21 nt, RNAi
uucugucgagacucgucgaca

SEQ ID NO: 526 - DNA, 21 bp, homo sapiens
aaggagactgtctgcagctta

SEQ ID NO: 527 - RNA, 21 nt, RNAi
ggagacugucugcagcuuauu

SEQ ID NO: 528 - RNA, 21 nt, RNAi
uuccucugacagacgucgaau

SEQ ID NO: 529 - DNA, 21 bp, homo sapiens
aacttgtgaaatgcttcatgt

SEQ ID NO: 530 - RNA, 21 nt, RNAi
cuugugaaaugcuucauguuu

SEQ ID NO: 531 - RNA, 21 nt, RNAi
uugaacacuuuacgaaguaca

SEQ ID NO: 532 - DNA, 21 bp, homo sapiens
cattatgagatgtcgtctctc

SEQ ID NO: 533 - RNA, 21 nt, RNAi
uuaugagaugucgucucucuu

SEQ ID NO: 534 - RNA, 21 nt, RNAi
uuaauacucuacagcagagag

SEQ ID NO: 535 - DNA, 21 bp, homo sapiens
caaatggatatcacaggacaa

SEQ ID NO: 536 - RNA, 21 nt, RNAi
aauggauaucacaggacaauu

SEQ ID NO: 537 - RNA, 21 nt, RNAi
uuuuaccuauaguguccuguu

SEQ ID NO: 538 - DNA, 21 bp, homo sapiens
cacaggacaaggaggtggctg

SEQ ID NO: 539 - RNA, 21 nt, RNAi
caggacaaggagguggcuguu

SEQ ID NO: 540 - RNA, 21 nt, RNAi
uuguccuguuccuccaccgac

SEQ ID NO: 541 - DNA, 21 bp, homo sapiens
caggacaaggaggtggctgta

SEQ ID NO: 542 - RNA, 21 nt, RNAi
ggacaaggagguggcuguauu

SEQ ID NO: 543 - RNA, 21 nt, RNAi
uuccuguuccuccaccgacau

SEQ ID NO: 544 - DNA, 21 bp, homo sapiens
caaggaggtggctgtaaagaa

SEQ ID NO: 545 - RNA, 21 nt, RNAi
aggagguggcuguaaagaauu

SEQ ID NO: 546 - RNA, 21 nt, RNAi
uuuccuccaccgacauuucuu

SEQ ID NO: 547 - DNA, 21 bp, homo sapiens
cagaaatactcagtgtcctca

SEQ ID NO: 548 - RNA, 21 nt, RNAi
gaaauacucaguguccucauu

SEQ ID NO: 549 - RNA, 21 nt, RNAi
uucuuuaugagucacaggagu

SEQ ID NO: 550 - DNA, 21 bp, homo sapiens
cagtgtcctcagtcacagaaa

SEQ ID NO: 551 - RNA, 21 nt, RNAi
guguccucagucacagaaauu

SEQ ID NO: 552 - RNA, 21 nt, RNAi
uucacaggagucagugucuuu

SEQ ID NO: 553 - DNA, 21 bp, homo sapiens
cagtcacagaaacatcatcca

SEQ ID NO: 554 - RNA, 21 nt, RNAi
gucacagaaacaucauccauu

SEQ ID NO: 555 - RNA, 21 nt, RNAi
uucagugucuuuguaguaggu

SEQ ID NO: 556 - DNA, 21 bp, homo sapiens
cacagaaacatcatccagttt

SEQ ID NO: 557 - RNA, 21 nt, RNAi
cagaaacaucauccaguuuuu

SEQ ID NO: 558 - RNA, 21 nt, RNAi
uugucuuuguaguaggucaaa

SEQ ID NO: 559 - DNA, 21 bp, homo sapiens
caactatggcattgtcacaga

SEQ ID NO: 560 - RNA, 21 nt, RNAi
acuauggcauugucacagauu

SEQ ID NO: 561 - RNA, 21 nt, RNAi
uuugauaccguaacagugucu

SEQ ID NO: 562 - DNA, 21 bp, homo sapiens
cattgtcacagaatatgcttc

SEQ ID NO: 563 - RNA, 21 nt, RNAi
uugucacagaauaugcuucuu

SEQ ID NO: 564 - RNA, 21 nt, RNAi
uuaacagugucuuauacgaag

SEQ ID NO: 565 - DNA, 21 bp, homo sapiens
cattaacagtaacagaagtga

SEQ ID NO: 566 - RNA, 21 nt, RNAi
uuaacaguaacagaagugauu

SEQ ID NO: 567 - RNA, 21 nt, RNAi
uuaauugucauugucuucacu

SEQ ID NO: 568 - DNA, 21 bp, homo sapiens
cagtaacagaagtgaggagat

SEQ ID NO: 569 - RNA, 21 nt, RNAi
guaacagaagugaggagauuu

SEQ ID NO: 570 - RNA, 21 nt, RNAi
uucauugucuucacuccucua

SEQ ID NO: 571 - DNA, 21 bp, homo sapiens
cagaagtgaggagatggatat

SEQ ID NO: 572 - RNA, 21 nt, RNAi
gaagugaggagauggauauuu

SEQ ID NO: 573 - RNA, 21 nt, RNAi
uucuucacuccucuaccuaua

SEQ ID NO: 574 - DNA, 21 bp, homo sapiens
cactgatgtagccaaaggaat

SEQ ID NO: 575 - RNA, 21 nt, RNAi
cugauguagccaaaggaauuu

SEQ ID NO: 576 - RNA, 21 nt, RNAi
uugacuacaucgguuuccuua

SEQ ID NO: 577 - DNA, 21 bp, homo sapiens
cattatttacatatggaggct

SEQ ID NO: 578 - RNA, 21 nt, RNAi
uuauuuacauauggaggcuuu

SEQ ID NO: 579 - RNA, 21 nt, RNAi
uuaauaaauguauaccuccga

SEQ ID NO: 580 - DNA, 21 bp, homo sapiens
catatggaggctcctgtcaag

SEQ ID NO: 581 - RNA, 21 nt, RNAi
uauggaggcuccugucaaguu

SEQ ID NO: 582 - RNA, 21 nt, RNAi
uuauaccuccgaggacaguuc

SEQ ID NO: 583 - DNA, 21 bp, homo sapiens
caaggtgattcacagagacct

SEQ ID NO: 584 - RNA, 21 nt, RNAi
aggugauucacagagaccuuu

SEQ ID NO: 585 - RNA, 21 nt, RNAi
uuuccacuaagugucucugga

SEQ ID NO: 586 - DNA, 21 bp, homo sapiens
cacagagacctcaagtcaaga

SEQ ID NO: 587 - RNA, 21 nt, RNAi
cagagaccucaagucaagauu

SEQ ID NO: 588 - RNA, 21 nt, RNAi
uugucucuggaguucaguucu

SEQ ID NO: 589 - DNA, 21 bp, homo sapiens
cagagacctcaagtcaagaaa

SEQ ID NO: 590 - RNA, 21 nt, RNAi
gagaccucaagucaagaaauu

SEQ ID NO: 591 - RNA, 21 nt, RNAi
uucucuggaguucaguucuuu

SEQ ID NO: 592 - DNA, 21 bp, homo sapiens
caagtcaagaaacgttgttat

SEQ ID NO: 593 - RNA, 21 nt, RNAi
agucaagaaacguuguuauuu

SEQ ID NO: 594 - RNA, 21 nt, RNAi
uuucaguucuuugcaacaaua

SEQ ID NO: 595 - DNA, 21 bp, homo sapiens
caagaaacgttgttatagctg

SEQ ID NO: 596 - RNA, 21 nt, RNAi
agaaacguuguuauagcuguu

SEQ ID NO: 597 - RNA, 21 nt, RNAi
uuucuuugcaacaauaucgac

SEQ ID NO: 598 - DNA, 21 bp, homo sapiens
cataaccatacaacacacatg

SEQ ID NO: 599 - RNA, 21 nt, RNAi
uaaccauacaacacacauguu

SEQ ID NO: 600 - RNA, 21 nt, RNAi
uuauugguauguuguguguac

SEQ ID NO: 601 - DNA, 21 bp, homo sapiens
catacaacacacatgtccttg

SEQ ID NO: 602 - RNA, 21 nt, RNAi
uacaacacacauguccuuguu

SEQ ID NO: 603 - RNA, 21 nt, RNAi
uuauguuguguguacaggaac

SEQ ID NO: 604 - DNA, 21 bp, homo sapiens
caacacacatgtccttggttg

SEQ ID NO: 605 - RNA, 21 nt, RNAi
acacacauguccuugguuguu

SEQ ID NO: 606 - RNA, 21 nt, RNAi
uuuguguguacaggaaccaac

SEQ ID NO: 607 - DNA, 21 bp, homo sapiens
cacacatgtccttggttggaa

SEQ ID NO: 608 - RNA, 21 nt, RNAi
cacauguccuugguuggaauu

SEQ ID NO: 609 - RNA, 21 nt, RNAi
uuguguacaggaaccaaccuu

SEQ ID NO: 610 - DNA, 21 bp, homo sapiens
cacatgtccttggttggaact

SEQ ID NO: 611 - RNA, 21 nt, RNAi
cauguccuugguuggaacuuu

SEQ ID NO: 612 - RNA, 21 nt, RNAi
uuguacaggaaccaaccuuga

SEQ ID NO: 613 - DNA, 21 bp, homo sapiens
catgtccttggttggaacttt

SEQ ID NO: 614 - RNA, 21 nt, RNAi
uguccuugguuggaacuuuuu

SEQ ID NO: 615 - RNA, 21 nt, RNAi
uuacaggaaccaaccuugaaa

SEQ ID NO: 616 - DNA, 21 bp, homo sapiens
catggatggctccagaagtta

SEQ ID NO: 617 - RNA, 21 nt, RNAi
uggauggcuccagaaguuauu

SEQ ID NO: 618 - RNA, 21 nt, RNAi
uuaccuaccgaggucuucaau

SEQ ID NO: 619 - DNA, 21 bp, homo sapiens
cagaagttatccagagtctcc

SEQ ID NO: 620 - RNA, 21 nt, RNAi
gaaguuauccagagucuccuu

SEQ ID NO: 621 - RNA, 21 nt, RNAi
uucuucaauaggucucagagg

SEQ ID NO: 622 - DNA, 21 bp, homo sapiens
cagaaacttgtgacacatatt

SEQ ID NO: 623 - RNA, 21 nt, RNAi
gaaacuugugacacauauuuu

SEQ ID NO: 624 - RNA, 21 nt, RNAi
uucuuugaacacuguguauaa

SEQ ID NO: 625 - DNA, 21 bp, homo sapiens
cacatattcctatggtgtggt

SEQ ID NO: 626 - RNA, 21 nt, RNAi
cauauuccuauggugugguuu

SEQ ID NO: 627 - RNA, 21 nt, RNAi
uuguauaaggauaccacacca

SEQ ID NO: 628 - DNA, 21 bp, homo sapiens
catattcctatggtgtggttc

SEQ ID NO: 629 - RNA, 21 nt, RNAi
uauuccuauggugugguucuu

SEQ ID NO: 630 - RNA, 21 nt, RNAi
uuauaaggauaccacaccaag

SEQ ID NO: 631 - DNA, 21 bp, homo sapiens
caagtagcttggcttgtagtg

SEQ ID NO: 632 - RNA, 21 nt, RNAi
aguagcuuggcuuguaguguu

SEQ ID NO: 633 - RNA, 21 nt, RNAi
uuucaucgaaccgaacaucac

SEQ ID NO: 634 - DNA, 21 bp, homo sapiens
caagaaacggccatcattcaa

SEQ ID NO: 635 - RNA, 21 nt, RNAi
agaaacggccaucauucaauu

SEQ ID NO: 636 - RNA, 21 nt, RNAi
uuucuuugccgguaguaaguu

SEQ ID NO: 637 - DNA, 21 bp, homo sapiens
caagcaaatcatttcaatcct

SEQ ID NO: 638 - RNA, 21 nt, RNAi
agcaaaucauuucaauccuuu

SEQ ID NO: 639 - RNA, 21 nt, RNAi
uuucguuuaguaaaguuagga

SEQ ID NO: 640 - DNA, 21 bp, homo sapiens
caaatcatttcaatcctggag

SEQ ID NO: 641 - RNA, 21 nt, RNAi
aaucauuucaauccuggaguu

SEQ ID NO: 642 - RNA, 21 nt, RNAi
uuuuaguaaaguuaggaccuc

SEQ ID NO: 643 - DNA, 21 bp, homo sapiens
catttcaatcctggagtccat

SEQ ID NO: 644 - RNA, 21 nt, RNAi
uuucaauccuggaguccauuu

SEQ ID NO: 645 - RNA, 21 nt, RNAi
uuaaaguuaggaccucaggua

SEQ ID NO: 646 - DNA, 21 bp, homo sapiens
caatcctggagtccatgtcaa

SEQ ID NO: 647 - RNA, 21 nt, RNAi
auccuggaguccaugucaauu

SEQ ID NO: 648 - RNA, 21 nt, RNAi
uuuaggaccucagguacaguu

SEQ ID NO: 649 - DNA, 21 bp, homo sapiens
catgtcaaatgacacgagcct

SEQ ID NO: 650 - RNA, 21 nt, RNAi
ugucaaaugacacgagccuuu

SEQ ID NO: 651 - RNA, 21 nt, RNAi
uuacaguuuacugugcucgga

SEQ ID NO: 652 - DNA, 21 bp, homo sapiens
caaatgacacgagccttcctg

SEQ ID NO: 653 - RNA, 21 nt, RNAi
aaugacacgagccuuccuguu

SEQ ID NO: 654 - RNA, 21 nt, RNAi
uuuuacugugcucggaaggac

SEQ ID NO: 655 - DNA, 21 bp, homo sapiens
cacgagccttcctgacaagtg

SEQ ID NO: 656 - RNA, 21 nt, RNAi
cgagccuuccugacaaguguu

SEQ ID NO: 657 - RNA, 21 nt, RNAi
uugcucggaaggacuguucac

SEQ ID NO: 658 - DNA, 21 bp, homo sapiens
caagtgtaactcattcctaca

SEQ ID NO: 659 - RNA, 21 nt, RNAi
aguguaacucauuccuacauu

SEQ ID NO: 660 - RNA, 21 nt, RNAi
uuucacauugaguaaggaugu

SEQ ID NO: 661 - DNA, 21 bp, homo sapiens
cattcctacacaacaaggcgg

SEQ ID NO: 662 - RNA, 21 nt, RNAi
uuccuacacaacaaggcgguu

SEQ ID NO: 663 - RNA, 21 nt, RNAi
uuaaggauguguuguuccgcc

SEQ ID NO: 664 - DNA, 21 bp, homo sapiens
cacaacaaggcggagtggagg

SEQ ID NO: 665 - RNA, 21 nt, RNAi
caacaaggcggaguggagguu

SEQ ID NO: 666 - RNA, 21 nt, RNAi
uuguuguuccgccucaccucc

SEQ ID NO: 667 - DNA, 21 bp, homo sapiens
caacaaggcggagtggaggtg

SEQ ID NO: 668 - RNA, 21 nt, RNAi
acaaggcggaguggagguguu

SEQ ID NO: 669 - RNA, 21 nt, RNAi
uuuguuccgccucaccuccac

SEQ ID NO: 670 - DNA, 21 bp, homo sapiens
caactcttgagaggctaaaga

SEQ ID NO: 671 - RNA, 21 nt, RNAi
acucuugagaggcuaaagauu

SEQ ID NO: 672 - RNA, 21 nt, RNAi
uuugagaacucuccgauuucu

SEQ ID NO: 673 - DNA, 21 bp, homo sapiens
cagctttaaggagcaggagct

SEQ ID NO: 674 - RNA, 21 nt, RNAi
gcuuuaaggagcaggagcuuu

SEQ ID NO: 675 - RNA, 21 nt, RNAi
uucgaaauuccucguccucga

SEQ ID NO: 676 - DNA, 21 bp, homo sapiens
caggagcttaaagaacgagaa

SEQ ID NO: 677 - RNA, 21 nt, RNAi
ggagcuuaaagaacgagaauu

SEQ ID NO: 678 - RNA, 21 nt, RNAi
uuccucgaauuucuugcucuu

SEQ ID NO: 679 - DNA, 21 bp, homo sapiens
catggacggaagacgatgtgt

SEQ ID NO: 680 - RNA, 21 nt, RNAi
uggacggaagacgauguguuu

SEQ ID NO: 681 - RNA, 21 nt, RNAi
uuaccugccuucugcuacaca

SEQ ID NO: 682 - DNA, 21 bp, homo sapiens
cagcagagatgagtgtatatg

SEQ ID NO: 683 - RNA, 21 nt, RNAi
gcagagaugaguguauauguu

SEQ ID NO: 684 - RNA, 21 nt, RNAi
uucgucucuacucacauauac

SEQ ID NO: 685 - DNA, 21 bp, homo sapiens
cagagatgagtgtatatgcaa

SEQ ID NO: 686 - RNA, 21 nt, RNAi
gagaugaguguauaugcaauu

SEQ ID NO: 687 - RNA, 21 nt, RNAi
uucucuacucacauauacguu

SEQ ID NO: 688 - DNA, 21 bp, homo sapiens
catatcattcacttcaagtca

SEQ ID NO: 689 - RNA, 21 nt, RNAi
uaucauucacuucaagucauu

SEQ ID NO: 690 - RNA, 21 nt, RNAi
uuauaguaagugaaguucagu

SEQ ID NO: 691 - DNA, 21 bp, homo sapiens
cattcacttcaagtcagccat

SEQ ID NO: 692 - RNA, 21 nt, RNAi
uucacuucaagucagccauuu

SEQ ID NO: 693 - RNA, 21 nt, RNAi
uuaagugaaguucagucggua

SEQ ID NO: 694 - DNA, 21 bp, homo sapiens
cacttcaagtcagccattgag

SEQ ID NO: 695 - RNA, 21 nt, RNAi
cuucaagucagccauugaguu

SEQ ID NO: 696 - RNA, 21 nt, RNAi
uugaaguucagucgguaacuc

SEQ ID NO: 697 - DNA, 21 bp, homo sapiens
caagtcagccattgagaaatt

SEQ ID NO: 698 - RNA, 21 nt, RNAi
agucagccauugagaaauuuu

SEQ ID NO: 699 - RNA, 21 nt, RNAi
uuucagucgguaacucuuuaa

SEQ ID NO: 700 - DNA, 21 bp, homo sapiens
caccactaattaaggactcag

SEQ ID NO: 701 - RNA, 21 nt, RNAi
ccacuaauuaaggacucaguu

SEQ ID NO: 702 - RNA, 21 nt, RNAi
uuggugauuaauuccugaguc

SEQ ID NO: 703 - DNA, 21 bp, homo sapiens
cactaattaaggactcaggag

SEQ ID NO: 704 - RNA, 21 nt, RNAi
cuaauuaaggacucaggaguu

SEQ ID NO: 705 - RNA, 21 nt, RNAi
uugauuaauuccugaguccuc

SEQ ID NO: 706 - DNA, 21 bp, homo sapiens
caggaggtgaacctgaagaaa

SEQ ID NO: 707 - RNA, 21 nt, RNAi
ggaggugaaccugaagaaauu

SEQ ID NO: 708 - RNA, 21 nt, RNAi
uuccuccacuuggacuucuuu

SEQ ID NO: 709 - DNA, 21 bp, homo sapiens
cacttgaaaccaggaactggc

SEQ ID NO: 710 - RNA, 21 nt, RNAi
cuugaaaccaggaacuggcuu

SEQ ID NO: 711 - RNA, 21 nt, RNAi
uugaacuuugguccuugaccg

SEQ ID NO: 712 - DNA, 21 bp, homo sapiens
cattcaacactaacctacctg

SEQ ID NO: 713 - RNA, 21 nt, RNAi
uucaacacuaaccuaccuguu

SEQ ID NO: 714 - RNA, 21 nt, RNAi
uuaaguugugauuggauggac

SEQ ID NO: 715 - DNA, 21 bp, homo sapiens
caacactaacctacctgatgc

SEQ ID NO: 716 - RNA, 21 nt, RNAi
acacuaaccuaccugaugcuu

SEQ ID NO: 717 - RNA, 21 nt, RNAi
uuugugauuggauggacuacg

SEQ ID NO: 718 - DNA, 21 bp, homo sapiens
cactaacctacctgatgcgga

SEQ ID NO: 719 - RNA, 21 nt, RNAi
cuaaccuaccugaugcggauu

SEQ ID NO: 720 - RNA, 21 nt, RNAi
uugauuggauggacuacgccu

SEQ ID NO: 721 - DNA, 21 bp, homo sapiens
caaagccaccatttgtaatgg

SEQ ID NO: 722 - RNA, 21 nt, RNAi
aagccaccauuuguaaugguu

SEQ ID NO: 723 - RNA, 21 nt, RNAi
uuuucggugguaaacauuacc

SEQ ID NO: 724 - DNA, 21 bp, homo sapiens
caccatttgtaatggagaagt

SEQ ID NO: 725 - RNA, 21 nt, RNAi
ccauuuguaauggagaaguuu

SEQ ID NO: 726 - RNA, 21 nt, RNAi
uugguaaacauuaccucuuca

SEQ ID NO: 727 - DNA, 21 bp, homo sapiens
catttgtaatggagaagtgga

SEQ ID NO: 728 - RNA, 21 nt, RNAi
uuuguaauggagaaguggauu

SEQ ID NO: 729 - RNA, 21 nt, RNAi
uuaaacauuaccucuucaccu

SEQ ID NO: 730 - DNA, 21 bp, homo sapiens
cagactgtggagtgcactgtc

SEQ ID NO: 731 - RNA, 21 nt, RNAi
gacuguggagugcacugucuu

SEQ ID NO: 732 - RNA, 21 nt, RNAi
uucugacaccucacgugacag

SEQ ID NO: 733 - DNA, 21 bp, homo sapiens
cactgtcacatatgagagtga

SEQ ID NO: 734 - RNA, 21 nt, RNAi
cugucacauaugagagugauu

SEQ ID NO: 735 - RNA, 21 nt, RNAi
uugacaguguauacucucacu

SEQ ID NO: 736 - DNA, 21 bp, homo sapiens
cacatatgagagtgatgttag

SEQ ID NO: 737 - RNA, 21 nt, RNAi
cauaugagagugauguuaguu

SEQ ID NO: 738 - RNA, 21 nt, RNAi
uuguauacucucacuacaauc

SEQ ID NO: 739 - DNA, 21 bp, homo sapiens
catatgagagtgatgttagaa

SEQ ID NO: 740 - RNA, 21 nt, RNAi
uaugagagugauguuagaauu

SEQ ID NO: 741 - RNA, 21 nt, RNAi
uuauacucucacuacaaucuu

SEQ ID NO: 742 - DNA, 21 bp, homo sapiens
cactaaacatgtccatttgat

SEQ ID NO: 743 - RNA, 21 nt, RNAi
cuaaacauguccauuugauuu

SEQ ID NO: 744 - RNA, 21 nt, RNAi
uugauuuguacagguaaacua

SEQ ID NO: 745 - DNA, 21 bp, homo sapiens
catgtccatttgattcagtgg

SEQ ID NO: 746 - RNA, 21 nt, RNAi
uguccauuugauucagugguu

SEQ ID NO: 747 - RNA, 21 nt, RNAi
uuacagguaaacuaagucacc

SEQ ID NO: 748 - DNA, 21 bp, homo sapiens
catttgattcagtggagtaga

SEQ ID NO: 749 - RNA, 21 nt, RNAi
uuugauucaguggaguagauu

SEQ ID NO: 750 - RNA, 21 nt, RNAi
uuaaacuaagucaccucaucu

SEQ ID NO: 751 - DNA, 21 bp, homo sapiens
caggatgaagtgaaagcagtc

SEQ ID NO: 752 - RNA, 21 nt, RNAi
ggaugaagugaaagcagucuu

SEQ ID NO: 753 - RNA, 21 nt, RNAi
uuccuacuucacuuucgucag

SEQ ID NO: 754 - DNA, 21 bp, homo sapiens
cagtccaacttgccattcaga

SEQ ID NO: 755 - RNA, 21 nt, RNAi
guccaacuugccauucagauu

SEQ ID NO: 756 - RNA, 21 nt, RNAi
uucagguugaacgguaagucu

SEQ ID NO: 757 - DNA, 21 bp, homo sapiens
caacttgccattcagacatta

SEQ ID NO: 758 - RNA, 21 nt, RNAi
acuugccauucagacauuauu

SEQ ID NO: 759 - RNA, 21 nt, RNAi
uuugaacgguaagucuguaau

SEQ ID NO: 760 - DNA, 21 bp, homo sapiens
cattcagacattattcaccaa

SEQ ID NO: 761 - RNA, 21 nt, RNAi
uucagacauuauucaccaauu

SEQ ID NO: 762 - RNA, 21 nt, RNAi
uuaagucuguaauaagugguu

SEQ ID NO: 763 - DNA, 21 bp, homo sapiens
cagacattattcaccaattca

SEQ ID NO: 764 - RNA, 21 nt, RNAi
gacauuauucaccaauucauu

SEQ ID NO: 765 - RNA, 21 nt, RNAi
uucuguaauaagugguuaagu

SEQ ID NO: 766 - DNA, 21 bp, homo sapiens
cattattcaccaattcagatg

SEQ ID NO: 767 - RNA, 21 nt, RNAi
uuauucaccaauucagauguu

SEQ ID NO: 768 - RNA, 21 nt, RNAi
uuaauaagugguuaagucuac

SEQ ID NO: 769 - DNA, 21 bp, homo sapiens
caggtccgactcaagtgctga

SEQ ID NO: 770 - RNA, 21 nt, RNAi
gguccgacucaagugcugauu

SEQ ID NO: 771 - RNA, 21 nt, RNAi
uuccaggcugaguucacgacu

SEQ ID NO: 772 - DNA, 21 bp, homo sapiens
caagtgctgattgccagtggt

SEQ ID NO: 773 - RNA, 21 nt, RNAi
agugcugauugccagugguuu

SEQ ID NO: 774 - RNA, 21 nt, RNAi
uuucacgacuaacggucacca

SEQ ID NO: 775 - DNA, 21 bp, homo sapiens
cagtggttagatactctgagg

SEQ ID NO: 776 - RNA, 21 nt, RNAi
gugguuagauacucugagguu

SEQ ID NO: 777 - RNA, 21 nt, RNAi
uucaccaaucuaugagacucc

SEQ ID NO: 778 - DNA, 21 bp, homo sapiens
cagattgcatccaacacttct

SEQ ID NO: 779 - RNA, 21 nt, RNAi
gauugcauccaacacuucuuu

SEQ ID NO: 780 - RNA, 21 nt, RNAi
uucuaacguagguugugaaga

SEQ ID NO: 781 - DNA, 21 bp, homo sapiens
catccaacacttctttacagc

SEQ ID NO: 782 - RNA, 21 nt, RNAi
uccaacacuucuuuacagcuu

SEQ ID NO: 783 - RNA, 21 nt, RNAi
uuagguugugaagaaaugucg

SEQ ID NO: 784 - DNA, 21 bp, homo sapiens
caacacttctttacagcgttc

SEQ ID NO: 785 - RNA, 21 nt, RNAi
acacuucuuuacagcguucuu

SEQ ID NO: 786 - RNA, 21 nt, RNAi
uuugugaagaaaugucgcaag

SEQ ID NO: 787 - DNA, 21 bp, homo sapiens
caccgttcttctcacactttg

SEQ ID NO: 788 - RNA, 21 nt, RNAi
ccguucuucucacacuuuguu

SEQ ID NO: 789 - RNA, 21 nt, RNAi
uuggcaagaagagugugaaac

SEQ ID NO: 790 - DNA, 21 bp, homo sapiens
cacactttgatggccaggatt

SEQ ID NO: 791 - RNA, 21 nt, RNAi
cacuuugauggccaggauuuu

SEQ ID NO: 792 - RNA, 21 nt, RNAi
uugugaaacuaccgguccuaa

SEQ ID NO: 793 - DNA, 21 bp, homo sapiens
cactttgatggccaggattcc

SEQ ID NO: 794 - RNA, 21 nt, RNAi
cuuugauggccaggauuccuu

SEQ ID NO: 795 - RNA, 21 nt, RNAi
uugaaacuaccgguccuaagg

SEQ ID NO: 796 - DNA, 21 bp, homo sapiens
caggattcctacgctgctgct

SEQ ID NO: 797 - RNA, 21 nt, RNAi
ggauuccuacgcugcugcuuu

SEQ ID NO: 798 - RNA, 21 nt, RNAi
uuccuaaggaugcgacgacga

SEQ ID NO: 799 - DNA, 21 bp, homo sapiens
caacagattacacctgtgaac

SEQ ID NO: 800 - RNA, 21 nt, RNAi
acagauuacaccugugaacuu

SEQ ID NO: 801 - RNA, 21 nt, RNAi
uuugucuaauguggacacuug

SEQ ID NO: 802 - DNA, 21 bp, homo sapiens
cagattacacctgtgaaccag

SEQ ID NO: 803 - RNA, 21 nt, RNAi
gauuacaccugugaaccaguu

SEQ ID NO: 804 - RNA, 21 nt, RNAi
uucuaauguggacacuugguc

SEQ ID NO: 805 - DNA, 21 bp, homo sapiens
cacctgtgaaccagtccagaa

SEQ ID NO: 806 - RNA, 21 nt, RNAi
ccugugaaccaguccagaauu

SEQ ID NO: 807 - RNA, 21 nt, RNAi
uuggacacuuggucaggucuu

SEQ ID NO: 808 - DNA, 21 bp, homo sapiens
cagtccagaagctcgtctcct

SEQ ID NO: 809 - RNA, 21 nt, RNAi
guccagaagcucgucuccuuu

SEQ ID NO: 810 - RNA, 21 nt, RNAi
uucaggucuucgagcagagga

SEQ ID NO: 811 - DNA, 21 bp, homo sapiens
cagaagctcgtctcctactca

SEQ ID NO: 812 - RNA, 21 nt, RNAi
gaagcucgucuccuacucauu

SEQ ID NO: 813 - RNA, 21 nt, RNAi
uucuucgagcagaggaugagu

SEQ ID NO: 814 - DNA, 21 bp, homo sapiens
cagtggcaatactgacacctc

SEQ ID NO: 815 - RNA, 21 nt, RNAi
guggcaauacugacaccucuu

SEQ ID NO: 816 - RNA, 21 nt, RNAi
uucaccguuaugacuguggag

SEQ ID NO: 817 - DNA, 21 bp, homo sapiens
caatactgacacctcttcaga

SEQ ID NO: 818 - RNA, 21 nt, RNAi
auacugacaccucuucagauu

SEQ ID NO: 819 - RNA, 21 nt, RNAi
uuuaugacuguggagaagucu

SEQ ID NO: 820 - DNA, 21 bp, homo sapiens
cagacagaagcaggaacaaat

SEQ ID NO: 821 - RNA, 21 nt, RNAi
gacagaagcaggaacaaauuu

SEQ ID NO: 822 - RNA, 21 nt, RNAi
uucugucuucguccuuguuua

SEQ ID NO: 823 - DNA, 21 bp, homo sapiens
cagaagcaggaacaaatatgg

SEQ ID NO: 824 - RNA, 21 nt, RNAi
gaagcaggaacaaauaugguu

SEQ ID NO: 825 - RNA, 21 nt, RNAi
uucuucguccuuguuuauacc

SEQ ID NO: 826 - DNA, 21 bp, homo sapiens
caggaacaaatatggacgtgg

SEQ ID NO: 827 - RNA, 21 nt, RNAi
ggaacaaauauggacgugguu

SEQ ID NO: 828 - RNA, 21 nt, RNAi
uuccuuguuuauaccugcacc

SEQ ID NO: 829 - DNA, 21 bp, homo sapiens
caaatatggacgtggtagtat

SEQ ID NO: 830 - RNA, 21 nt, RNAi
aauauggacgugguaguauuu

SEQ ID NO: 831 - RNA, 21 nt, RNAi
uuuuauaccugcaccaucaua

SEQ ID NO: 832 - DNA, 21 bp, homo sapiens
cactcaattcttctcctagag

SEQ ID NO: 833 - RNA, 21 nt, RNAi
cucaauucuucuccuagaguu

SEQ ID NO: 834 - RNA, 21 nt, RNAi
uugaguuaagaagaggaucuc

SEQ ID NO: 835 - DNA, 21 bp, homo sapiens
caattcttctcctagaggaag

SEQ ID NO: 836 - RNA, 21 nt, RNAi
auucuucuccuagaggaaguu

SEQ ID NO: 837 - RNA, 21 nt, RNAi
uuuaagaagaggaucuccuuc

SEQ ID NO: 838 - DNA, 21 bp, homo sapiens
cagtggaaagagtcagcattc

SEQ ID NO: 839 - RNA, 21 nt, RNAi
guggaaagagucagcauucuu

SEQ ID NO: 840 - RNA, 21 nt, RNAi
uucaccuuucucagucguaag

SEQ ID NO: 841 - DNA, 21 bp, homo sapiens
cagcattccactccttcaaga

SEQ ID NO: 842 - RNA, 21 nt, RNAi
gcauuccacuccuucaagauu

SEQ ID NO: 843 - RNA, 21 nt, RNAi
uucguaaggugaggaaguucu

SEQ ID NO: 844 - DNA, 21 bp, homo sapiens
cattccactccttcaagagga

SEQ ID NO: 845 - RNA, 21 nt, RNAi
uuccacuccuucaagaggauu

SEQ ID NO: 846 - RNA, 21 nt, RNAi
uuaaggugaggaaguucuccu

SEQ ID NO: 847 - DNA, 21 bp, homo sapiens
cactccttcaagaggaagata

SEQ ID NO: 848 - RNA, 21 nt, RNAi
cuccuucaagaggaagauauu

SEQ ID NO: 849 - RNA, 21 nt, RNAi
uugaggaaguucuccuucuau

SEQ ID NO: 850 - DNA, 21 bp, homo sapiens
cagtcagcactcaatcctcac

SEQ ID NO: 851 - RNA, 21 nt, RNAi
gucagcacucaauccucacuu

SEQ ID NO: 852 - RNA, 21 nt, RNAi
uucagucgugaguuaggagug

SEQ ID NO: 853 - DNA, 21 bp, homo sapiens
cagcactcaatcctcaccagt

SEQ ID NO: 854 - RNA, 21 nt, RNAi
gcacucaauccucaccaguuu

SEQ ID NO: 855 - RNA, 21 nt, RNAi
uucgugaguuaggagugguca

SEQ ID NO: 856 - DNA, 21 bp, homo sapiens
cactcaatcctcaccagtcgc

SEQ ID NO: 857 - RNA, 21 nt, RNAi
cucaauccucaccagucgcuu

SEQ ID NO: 858 - RNA, 21 nt, RNAi
uugaguuaggaguggucagcg

SEQ ID NO: 859 - DNA, 21 bp, homo sapiens
caatcctcaccagtcgcctga

SEQ ID NO: 860 - RNA, 21 nt, RNAi
auccucaccagucgccugauu

SEQ ID NO: 861 - RNA, 21 nt, RNAi
uuuaggaguggucagcggacu

SEQ ID NO: 862 - DNA, 21 bp, homo sapiens
caccagtcgcctgacttcaag

SEQ ID NO: 863 - RNA, 21 nt, RNAi
ccagucgccugacuucaaguu

SEQ ID NO: 864 - RNA, 21 nt, RNAi
uuggucagcggacugaaguuc

SEQ ID NO: 865 - DNA, 21 bp, homo sapiens
cagtcgcctgacttcaagaga

SEQ ID NO: 866 - RNA, 21 nt, RNAi
gucgccugacuucaagagauu

SEQ ID NO: 867 - RNA, 21 nt, RNAi
uucagcggacugaaguucucu

SEQ ID NO: 868 - DNA, 21 bp, homo sapiens
caagagccagtgaagaggaca

SEQ ID NO: 869 - RNA, 21 nt, RNAi
agagccagugaagaggacauu

SEQ ID NO: 870 - RNA, 21 nt, RNAi
uuucucggucacuucuccugu

SEQ ID NO: 871 - DNA, 21 bp, homo sapiens
cagtgaagaggacagcaaagt

SEQ ID NO: 872 - RNA, 21 nt, RNAi
gugaagaggacagcaaaguuu

SEQ ID NO: 873 - RNA, 21 nt, RNAi
uucacuucuccugucguuuca

SEQ ID NO: 874 - DNA, 21 bp, homo sapiens
caataaagagagagccagagg

SEQ ID NO: 875 - RNA, 21 nt, RNAi
auaaagagagagccagagguu

SEQ ID NO: 876 - RNA, 21 nt, RNAi
uuuauuucucucucggucucc

SEQ ID NO: 877 - DNA, 21 bp, homo sapiens
caccgtggatggagaaacttt

SEQ ID NO: 878 - RNA, 21 nt, RNAi
ccguggauggagaaacuuuuu

SEQ ID NO: 879 - RNA, 21 nt, RNAi
uuggcaccuaccucuuugaaa

SEQ ID NO: 880 - DNA, 21 bp, homo sapiens
cagtgatcataactaggcttg

SEQ ID NO: 881 - RNA, 21 nt, RNAi
gugaucauaacuaggcuuguu

SEQ ID NO: 882 - RNA, 21 nt, RNAi
uucacuaguauugauccgaac

SEQ ID NO: 883 - DNA, 21 bp, homo sapiens
cactgatattctggttagcag

SEQ ID NO: 884 - RNA, 21 nt, RNAi
cugauauucugguuagcaguu

SEQ ID NO: 885 - RNA, 21 nt, RNAi
uugacuauaagaccaaucguc

SEQ ID NO: 886 - DNA, 21 bp, homo sapiens
caatatggcctggcaaggcac

SEQ ID NO: 887 - RNA, 21 nt, RNAi
auauggccuggcaaggcacuu

SEQ ID NO: 888 - RNA, 21 nt, RNAi
uuuauaccggaccguuccgug

SEQ ID NO: 889 - DNA, 21 bp, homo sapiens
caaggcactgttactgatctt

SEQ ID NO: 890 - RNA, 21 nt, RNAi
aggcacuguuacugaucuuuu

SEQ ID NO: 891 - RNA, 21 nt, RNAi
uuuccgugacaaugacuagaa

SEQ ID NO: 892 - DNA, 21 bp, homo sapiens
cactgttactgatcttgtctt

SEQ ID NO: 893 - RNA, 21 nt, RNAi
cuguuacugaucuugucuuuu

SEQ ID NO: 894 - RNA, 21 nt, RNAi
uugacaaugacuagaacagaa

SEQ ID NO: 895 - DNA, 21 bp, homo sapiens
catttagcttgattatcgagt

SEQ ID NO: 896 - RNA, 21 nt, RNAi
uuuagcuugauuaucgaguuu

SEQ ID NO: 897 - RNA, 21 nt, RNAi
uuaaaucgaacuaauagcuca

SEQ ID NO: 898 - DNA, 21 bp, homo sapiens
caaggcaggtacctcactcat

SEQ ID NO: 899 - RNA, 21 nt, RNAi
aggcagguaccucacucauuu

SEQ ID NO: 900 - RNA, 21 nt, RNAi
uuuccguccauggagugagua

SEQ ID NO: 901 - DNA, 21 bp, homo sapiens
caggtacctcactcatctcat

SEQ ID NO: 902 - RNA, 21 nt, RNAi
gguaccucacucaucucauuu

SEQ ID NO: 903 - RNA, 21 nt, RNAi
uuccauggagugaguagagua

SEQ ID NO: 904 - DNA, 21 bp, homo sapiens
cactcatctcatccttggctc

SEQ ID NO: 905 - RNA, 21 nt, RNAi
cucaucucauccuuggcucuu

SEQ ID NO: 906 - RNA, 21 nt, RNAi
uugaguagaguaggaaccgag

SEQ ID NO: 907 - DNA, 21 bp, homo sapiens
catctcatccttggctcagcc

SEQ ID NO: 908 - RNA, 21 nt, RNAi
ucucauccuuggcucagccuu

SEQ ID NO: 909 - RNA, 21 nt, RNAi
uuagaguaggaaccgagucgg

SEQ ID NO: 910 - DNA, 21 bp, homo sapiens
cagagttgaactgatctggct

SEQ ID NO: 911 - RNA, 21 nt, RNAi
gaguugaacugaucuggcuuu

SEQ ID NO: 912 - RNA, 21 nt, RNAi
uucucaacuugacuagaccga

SEQ ID NO: 913 - DNA, 21 bp, homo sapiens
cattacgatttatcagaaacc

SEQ ID NO: 914 - RNA, 21 nt, RNAi
uuacgauuuaucagaaaccuu

SEQ ID NO: 915 - RNA, 21 nt, RNAi
uuaaugcuaaauagucuuugg

SEQ ID NO: 916 - DNA, 21 bp, homo sapiens
cagcgactgctttcaaatact

SEQ ID NO: 917 - RNA, 21 nt, RNAi
gcgacugcuuucaaauacuuu

SEQ ID NO: 918 - RNA, 21 nt, RNAi
uucgcugacgaaaguuuauga

SEQ ID NO: 919 - DNA, 21 bp, homo sapiens
caccaaaggagcaaagaggat

SEQ ID NO: 920 - RNA, 21 nt, RNAi
ccaaaggagcaaagaggauuu

SEQ ID NO: 921 - RNA, 21 nt, RNAi
uugguuuccucguuucuccua

SEQ ID NO: 922 - DNA, 21 bp, homo sapiens
caaaggagcaaagaggataaa

SEQ ID NO: 923 - RNA, 21 nt, RNAi
aaggagcaaagaggauaaauu

SEQ ID NO: 924 - RNA, 21 nt, RNAi
uuuuccucguuucuccuauuu

SEQ ID NO: 925 - DNA, 21 bp, homo sapiens
caacgctccataaaggcctct

SEQ ID NO: 926 - RNA, 21 nt, RNAi
acgcuccauaaaggccucuuu

SEQ ID NO: 927 - RNA, 21 nt, RNAi
uuugcgagguauuuccggaga

SEQ ID NO: 928 - DNA, 21 bp, homo sapiens
cagacacagagcaagacaata

SEQ ID NO: 929 - RNA, 21 nt, RNAi
gacacagagcaagacaauauu

SEQ ID NO: 930 - RNA, 21 nt, RNAi
uucugugucucguucuguuau

SEQ ID NO: 931 - DNA, 21 bp, homo sapiens
cacagagcaagacaataacat

SEQ ID NO: 932 - RNA, 21 nt, RNAi
cagagcaagacaauaacauuu

SEQ ID NO: 933 - RNA, 21 nt, RNAi
uugucucguucuguuauugua

SEQ ID NO: 934 - DNA, 21 bp, homo sapiens
cagagcaagacaataacatca

SEQ ID NO: 935 - RNA, 21 nt, RNAi
gagcaagacaauaacaucauu

SEQ ID NO: 936 - RNA, 21 nt, RNAi
uucucguucuguuauuguagu

SEQ ID NO: 937 - DNA, 21 bp, homo sapiens
caagacaataacatcacaagc

SEQ ID NO: 938 - RNA, 21 nt, RNAi
agacaauaacaucacaagcuu

SEQ ID NO: 939 - RNA, 21 nt, RNAi
uuucuguuauuguaguguucg

SEQ ID NO: 940 - DNA, 21 bp, homo sapiens
caacatccttgttggagtaag

SEQ ID NO: 941 - RNA, 21 nt, RNAi
acauccuuguuggaguaaguu

SEQ ID NO: 942 - RNA, 21 nt, RNAi
uuuguaggaacaaccucauuc

SEQ ID NO: 943 - DNA, 21 bp, homo sapiens
catccttgttggagtaagaca

SEQ ID NO: 944 - RNA, 21 nt, RNAi
uccuuguuggaguaagacauu

SEQ ID NO: 945 - RNA, 21 nt, RNAi
uuaggaacaaccucauucugu

SEQ ID NO: 946 - DNA, 21 bp, homo sapiens
cagtaaatatcagccttgcag

SEQ ID NO: 947 - RNA, 21 nt, RNAi
guaaauaucagccuugcaguu

SEQ ID NO: 948 - RNA, 21 nt, RNAi
uucauuuauagucggaacguc

SEQ ID NO: 949 - DNA, 21 bp, homo sapiens
cagccttgcagcaagacagct

SEQ ID NO: 950 - RNA, 21 nt, RNAi
gccuugcagcaagacagcuuu

SEQ ID NO: 951 - RNA, 21 nt, RNAi
uucggaacgucguucugucga

SEQ ID NO: 952 - DNA, 21 bp, homo sapiens
cagcaagacagctctgagcag

SEQ ID NO: 953 - RNA, 21 nt, RNAi
gcaagacagcucugagcaguu

SEQ ID NO: 954 - RNA, 21 nt, RNAi
uucguucugucgagacucguc

SEQ ID NO: 955 - DNA, 21 bp, homo sapiens
caagacagctctgagcagctg

SEQ ID NO: 956 - RNA, 21 nt, RNAi
agacagcucugagcagcuguu

SEQ ID NO: 957 - RNA, 21 nt, RNAi
uuucugucgagacucgucgac

SEQ ID NO: 958 - DNA, 21 bp, homo sapiens
caaggagactgtctgcagctt

SEQ ID NO: 959 - RNA, 21 nt, RNAi
aggagacugucugcagcuuuu

SEQ ID NO: 960 - RNA, 21 nt, RNAi
uuuccucugacagacgucgaa

SEQ ID NO: 961 - DNA, 21 bp, homo sapiens
caacttgtgaaatgcttcatg

SEQ ID NO: 962 - RNA, 21 nt, RNAi
acuugugaaaugcuucauguu

SEQ ID NO: 963 - RNA, 21 nt, RNAi
uuugaacacuuuacgaaguac

SEQ ID NO: 964 - DNA, 21 bp, homo sapiens
gagatgtcgtctctcggtgcc

SEQ ID NO: 965 - RNA, 21 nt, RNAi
gaugucgucucucggugccuu

SEQ ID NO: 966 - RNA, 21 nt, RNAi
uucuacagcagagagccacgg

SEQ ID NO: 967 - DNA, 21 bp, homo sapiens
gatgtcgtctctcggtgcctc

SEQ ID NO: 968 - RNA, 21 nt, RNAi
ugucgucucucggugccucuu

SEQ ID NO: 969 - RNA, 21 nt, RNAi
uuacagcagagagccacggag

SEQ ID NO: 970 - DNA, 21 bp, homo sapiens
gagtgtttatcgagccaaatg

SEQ ID NO: 971 - RNA, 21 nt, RNAi
guguuuaucgagccaaauguu

SEQ ID NO: 972 - RNA, 21 nt, RNAi
uucacaaauagcucgguuuac

SEQ ID NO: 973 - DNA, 21 bp, homo sapiens
gagccaaatggatatcacagg

SEQ ID NO: 974 - RNA, 21 nt, RNAi
gccaaauggauaucacagguu

SEQ ID NO: 975 - RNA, 21 nt, RNAi
uucgguuuaccuauagugucc

SEQ ID NO: 976 - DNA, 21 bp, homo sapiens
gatatcacaggacaaggaggt

SEQ ID NO: 977 - RNA, 21 nt, RNAi
uaucacaggacaaggagguuu

SEQ ID NO: 978 - RNA, 21 nt, RNAi
uuauaguguccuguuccucca

SEQ ID NO: 979 - DNA, 21 bp, homo sapiens
gacaaggaggtggctgtaaag

SEQ ID NO: 980 - RNA, 21 nt, RNAi
caaggagguggcuguaaaguu

SEQ ID NO: 981 - RNA, 21 nt, RNAi
uuguuccuccaccgacauuuc

SEQ ID NO: 982 - DNA, 21 bp, homo sapiens
gaggtggctgtaaagaagctc

SEQ ID NO: 983 - RNA, 21 nt, RNAi
gguggcuguaaagaagcucuu

SEQ ID NO: 984 - RNA, 21 nt, RNAi
uuccaccgacauuucuucgag

SEQ ID NO: 985 - DNA, 21 bp, homo sapiens
gagaaagaggcagaaatactc

SEQ ID NO: 986 - RNA, 21 nt, RNAi
gaaagaggcagaaauacucuu

SEQ ID NO: 987 - RNA, 21 nt, RNAi
uucuuucuccgucuuuaugag

SEQ ID NO: 988 - DNA, 21 bp, homo sapiens
gaaagaggcagaaatactcag

SEQ ID NO: 989 - RNA, 21 nt, RNAi
aagaggcagaaauacucaguu

SEQ ID NO: 990 - RNA, 21 nt, RNAi
uuuucuccgucuuuaugaguc

SEQ ID NO: 991 - DNA, 21 bp, homo sapiens
gaggcagaaatactcagtgtc

SEQ ID NO: 992 - RNA, 21 nt, RNAi
ggcagaaauacucagugucuu

SEQ ID NO: 993 - RNA, 21 nt, RNAi
uuccgucuuuaugagucacag

SEQ ID NO: 994 - DNA, 21 bp, homo sapiens
gaaatactcagtgtcctcagt

SEQ ID NO: 995 - RNA, 21 nt, RNAi
aauacucaguguccucaguuu

SEQ ID NO: 996 - RNA, 21 nt, RNAi
uuuuaugagucacaggaguca

SEQ ID NO: 997 - DNA, 21 bp, homo sapiens
gaagtgaggagatggatatgg

SEQ ID NO: 998 - RNA, 21 nt, RNAi
agugaggagauggauaugguu

SEQ ID NO: 999 - RNA, 21 nt, RNAi
uuucacuccucuaccuauacc

SEQ ID NO: 1000 - DNA, 21 bp, homo sapiens
gaggagatggatatggatcac

SEQ ID NO: 1001 - RNA, 21 nt, RNAi
ggagauggauauggaucacuu

SEQ ID NO: 1002 - RNA, 21 nt, RNAi
uuccucuaccuauaccuagug

SEQ ID NO: 1003 - DNA, 21 bp, homo sapiens
gagatggatatggatcacatt

SEQ ID NO: 1004 - RNA, 21 nt, RNAi
gauggauauggaucacauuuu

SEQ ID NO: 1005 - RNA, 21 nt, RNAi
uucuaccuauaccuaguguaa

SEQ ID NO: 1006 - DNA, 21 bp, homo sapiens
gatggatatggatcacattat

SEQ ID NO: 1007 - RNA, 21 nt, RNAi
uggauauggaucacauuauuu

SEQ ID NO: 1008 - RNA, 21 nt, RNAi
uuaccuauaccuaguguaaua

SEQ ID NO: 1009 - DNA, 21 bp, homo sapiens
gatatggatcacattatgacc

SEQ ID NO: 1010 - RNA, 21 nt, RNAi
uauggaucacauuaugaccuu

SEQ ID NO: 1011 - RNA, 21 nt, RNAi
uuauaccuaguguaauacugg

SEQ ID NO: 1012 - DNA, 21 bp, homo sapiens
gatgtagccaaaggaatgcat

SEQ ID NO: 1013 - RNA, 21 nt, RNAi
uguagccaaaggaaugcauuu

SEQ ID NO: 1014 - RNA, 21 nt, RNAi
uuacaucgguuuccuuacgua

SEQ ID NO: 1015 - DNA, 21 bp, homo sapiens
gaggctcctgtcaaggtgatt

SEQ ID NO: 1016 - RNA, 21 nt, RNAi
ggcuccugucaaggugauuuu

SEQ ID NO: 1017 - RNA, 21 nt, RNAi
uuccgaggacaguuccacuaa

SEQ ID NO: 1018 - DNA, 21 bp, homo sapiens
gattcacagagacctcaagtc

SEQ ID NO: 1019 - RNA, 21 nt, RNAi
uucacagagaccucaagucuu

SEQ ID NO: 1020 - RNA, 21 nt, RNAi
uuaagugucucuggaguucag

SEQ ID NO: 1021 - DNA, 21 bp, homo sapiens
gagacctcaagtcaagaaacg

SEQ ID NO: 1022 - RNA, 21 nt, RNAi
gaccucaagucaagaaacguu

SEQ ID NO: 1023 - RNA, 21 nt, RNAi
uucuggaguucaguucuuugc

SEQ ID NO: 1024 - DNA, 21 bp, homo sapiens
gacctcaagtcaagaaacgtt

SEQ ID NO: 1025 - RNA, 21 nt, RNAi
ccucaagucaagaaacguuuu

SEQ ID NO: 1026 - RNA, 21 nt, RNAi
uuggaguucaguucuuugcaa

SEQ ID NO: 1027 - DNA, 21 bp, homo sapiens
gaaacgttgttatagctgctg

SEQ ID NO: 1028 - RNA, 21 nt, RNAi
aacguuguuauagcugcuguu

SEQ ID NO: 1029 - RNA, 21 nt, RNAi
uuuugcaacaauaucgacgac

SEQ ID NO: 1030 - DNA, 21 bp, homo sapiens
gatggagtactgaagatctgt

SEQ ID NO: 1031 - RNA, 21 nt, RNAi
uggaguacugaagaucuguuu

SEQ ID NO: 1032 - RNA, 21 nt, RNAi
uuaccucaugacuucuagaca

SEQ ID NO: 1033 - DNA, 21 bp, homo sapiens
gagtactgaagatctgtgact

SEQ ID NO: 1034 - RNA, 21 nt, RNAi
guacugaagaucugugacuuu

SEQ ID NO: 1035 - RNA, 21 nt, RNAi
uucaugacuucuagacacuga

SEQ ID NO: 1036 - DNA, 21 bp, homo sapiens
gaagatctgtgactttggtgc

SEQ ID NO: 1037 - RNA, 21 nt, RNAi
agaucugugacuuuggugcuu

SEQ ID NO: 1038 - RNA, 21 nt, RNAi
uuucuagacacugaaaccacg

SEQ ID NO: 1039 - DNA, 21 bp, homo sapiens
gatctgtgactttggtgcctc

SEQ ID NO: 1040 - RNA, 21 nt, RNAi
ucugugacuuuggugccucuu

SEQ ID NO: 1041 - RNA, 21 nt, RNAi
uuagacacugaaaccacggag

SEQ ID NO: 1042 - DNA, 21 bp, homo sapiens
gactttggtgcctctcggttc

SEQ ID NO: 1043 - RNA, 21 nt, RNAi
cuuuggugccucucgguucuu

SEQ ID NO: 1044 - RNA, 21 nt, RNAi
uugaaaccacggagagccaag

SEQ ID NO: 1045 - DNA, 21 bp, homo sapiens
gatggctccagaagttatcca

SEQ ID NO: 1046 - RNA, 21 nt, RNAi
uggcuccagaaguuauccauu

SEQ ID NO: 1047 - RNA, 21 nt, RNAi
uuaccgaggucuucaauaggu

SEQ ID NO: 1048 - DNA, 21 bp, homo sapiens
gaaacttgtgacacatattcc

SEQ ID NO: 1049 - RNA, 21 nt, RNAi
aacuugugacacauauuccuu

SEQ ID NO: 1050 - RNA, 21 nt, RNAi
uuuugaacacuguguauaagg

SEQ ID NO: 1051 - DNA, 21 bp, homo sapiens
gacacatattcctatggtgtg

SEQ ID NO: 1052 - RNA, 21 nt, RNAi
cacauauuccuaugguguguu

SEQ ID NO: 1053 - RNA, 21 nt, RNAi
uuguguauaaggauaccacac

SEQ ID NO: 1054 - DNA, 21 bp, homo sapiens
gaaggattacaagtagcttgg

SEQ ID NO: 1055 - RNA, 21 nt, RNAi
aggauuacaaguagcuugguu

SEQ ID NO: 1056 - RNA, 21 nt, RNAi
uuuccuaauguucaucgaacc

SEQ ID NO: 1057 - DNA, 21 bp, homo sapiens
gattacaagtagcttggcttg

SEQ ID NO: 1058 - RNA, 21 nt, RNAi
uuacaaguagcuuggcuuguu

SEQ ID NO: 1059 - RNA, 21 nt, RNAi
uuaauguucaucgaaccgaac

SEQ ID NO: 1060 - DNA, 21 bp, homo sapiens
gagagattaaccattccaagc

SEQ ID NO: 1061 - RNA, 21 nt, RNAi
gagauuaaccauuccaagcuu

SEQ ID NO: 1062 - RNA, 21 nt, RNAi
uucucuaauugguaagguucg

SEQ ID NO: 1063 - DNA, 21 bp, homo sapiens
gagattaaccattccaagcag

SEQ ID NO: 1064 - RNA, 21 nt, RNAi
gauuaaccauuccaagcaguu

SEQ ID NO: 1065 - RNA, 21 nt, RNAi
uucuaauugguaagguucguc

SEQ ID NO: 1066 - DNA, 21 bp, homo sapiens
gattaaccattccaagcagtt

SEQ ID NO: 1067 - RNA, 21 nt, RNAi
uuaaccauuccaagcaguuuu

SEQ ID NO: 1068 - RNA, 21 nt, RNAi
uuaauugguaagguucgucaa

SEQ ID NO: 1069 - DNA, 21 bp, homo sapiens
gaactgttacatcagtgttgg

SEQ ID NO: 1070 - RNA, 21 nt, RNAi
acuguuacaucaguguugguu

SEQ ID NO: 1071 - RNA, 21 nt, RNAi
uuugacaauguagucacaacc

SEQ ID NO: 1072 - DNA, 21 bp, homo sapiens
gaagctgatgccaagaaacgg

SEQ ID NO: 1073 - RNA, 21 nt, RNAi
agcugaugccaagaaacgguu

SEQ ID NO: 1074 - RNA, 21 nt, RNAi
uuucgacuacgguucuuugcc

SEQ ID NO: 1075 - DNA, 21 bp, homo sapiens
gatgccaagaaacggccatca

SEQ ID NO: 1076 - RNA, 21 nt, RNAi
ugccaagaaacggccaucauu

SEQ ID NO: 1077 - RNA, 21 nt, RNAi
uuacgguucuuugccgguagu

SEQ ID NO: 1078 - DNA, 21 bp, homo sapiens
gaaacggccatcattcaagca

SEQ ID NO: 1079 - RNA, 21 nt, RNAi
aacggccaucauucaagcauu

SEQ ID NO: 1080 - RNA, 21 nt, RNAi
uuuugccgguaguaaguucgu

SEQ ID NO: 1081 - DNA, 21 bp, homo sapiens
gagtccatgtcaaatgacacg

SEQ ID NO: 1082 - RNA, 21 nt, RNAi
guccaugucaaaugacacguu

SEQ ID NO: 1083 - RNA, 21 nt, RNAi
uucagguacaguuuacugugc

SEQ ID NO: 1084 - DNA, 21 bp, homo sapiens
gacacgagccttcctgacaag

SEQ ID NO: 1085 - RNA, 21 nt, RNAi
cacgagccuuccugacaaguu

SEQ ID NO: 1086 - RNA, 21 nt, RNAi
uugugcucggaaggacuguuc

SEQ ID NO: 1087 - DNA, 21 bp, homo sapiens
gagccttcctgacaagtgtaa

SEQ ID NO: 1088 - RNA, 21 nt, RNAi
gccuuccugacaaguguaauu

SEQ ID NO: 1089 - RNA, 21 nt, RNAi
uucggaaggacuguucacauu

SEQ ID NO: 1090 - DNA, 21 bp, homo sapiens
gacaagtgtaactcattccta

SEQ ID NO: 1091 - RNA, 21 nt, RNAi
caaguguaacucauuccuauu

SEQ ID NO: 1092 - RNA, 21 nt, RNAi
uuguucacauugaguaaggau

SEQ ID NO: 1093 - DNA, 21 bp, homo sapiens
gagtggaggtgcgaaattgag

SEQ ID NO: 1094 - RNA, 21 nt, RNAi
guggaggugcgaaauugaguu

SEQ ID NO: 1095 - RNA, 21 nt, RNAi
uucaccuccacgcuuuaacuc

SEQ ID NO: 1096 - DNA, 21 bp, homo sapiens
gaggtgcgaaattgaggcaac

SEQ ID NO: 1097 - RNA, 21 nt, RNAi
ggugcgaaauugaggcaacuu

SEQ ID NO: 1098 - RNA, 21 nt, RNAi
uuccacgcuuuaacuccguug

SEQ ID NO: 1099 - DNA, 21 bp, homo sapiens
gaaattgaggcaactcttgag

SEQ ID NO: 1100 - RNA, 21 nt, RNAi
aauugaggcaacucuugaguu

SEQ ID NO: 1101 - RNA, 21 nt, RNAi
uuuuaacuccguugagaacuc

SEQ ID NO: 1102 - DNA, 21 bp, homo sapiens
gaggcaactcttgagaggcta

SEQ ID NO: 1103 - RNA, 21 nt, RNAi
ggcaacucuugagaggcuauu

SEQ ID NO: 1104 - RNA, 21 nt, RNAi
uuccguugagaacucuccgau

SEQ ID NO: 1105 - DNA, 21 bp, homo sapiens
gagaggctaaagaaactagag

SEQ ID NO: 1106 - RNA, 21 nt, RNAi
gaggcuaaagaaacuagaguu

SEQ ID NO: 1107 - RNA, 21 nt, RNAi
uucuccgauuucuuugaucuc

SEQ ID NO: 1108 - DNA, 21 bp, homo sapiens
gaggctaaagaaactagagcg

SEQ ID NO: 1109 - RNA, 21 nt, RNAi
ggcuaaagaaacuagagcguu

SEQ ID NO: 1110 - RNA, 21 nt, RNAi
uuccgauuucuuugaucucgc

SEQ ID NO: 1111 - DNA, 21 bp, homo sapiens
gaaactagagcgtgatctcag

SEQ ID NO: 1112 - RNA, 21 nt, RNAi
aacuagagcgugaucucaguu

SEQ ID NO: 1113 - RNA, 21 nt, RNAi
uuuugaucucgcacuagaguc

SEQ ID NO: 1114 - DNA, 21 bp, homo sapiens
gagcgtgatctcagctttaag

SEQ ID NO: 1115 - RNA, 21 nt, RNAi
gcgugaucucagcuuuaaguu

SEQ ID NO: 1116 - RNA, 21 nt, RNAi
uucgcacuagagucgaaauuc

SEQ ID NO: 1117 - DNA, 21 bp, homo sapiens
gatctcagctttaaggagcag

SEQ ID NO: 1118 - RNA, 21 nt, RNAi
ucucagcuuuaaggagcaguu

SEQ ID NO: 1119 - RNA, 21 nt, RNAi
uuagagucgaaauuccucguc

SEQ ID NO: 1120 - DNA, 21 bp, homo sapiens
gagcaggagcttaaagaacga

SEQ ID NO: 1121 - RNA, 21 nt, RNAi
gcaggagcuuaaagaacgauu

SEQ ID NO: 1122 - RNA, 21 nt, RNAi
uucguccucgaauuucuugcu

SEQ ID NO: 1123 - DNA, 21 bp, homo sapiens
gagcttaaagaacgagaaaga

SEQ ID NO: 1124 - RNA, 21 nt, RNAi
gcuuaaagaacgagaaagauu

SEQ ID NO: 1125 - RNA, 21 nt, RNAi
uucgaauuucuugcucuuucu

SEQ ID NO: 1126 - DNA, 21 bp, homo sapiens
gaacgagaaagacgtttaaag

SEQ ID NO: 1127 - RNA, 21 nt, RNAi
acgagaaagacguuuaaaguu

SEQ ID NO: 1128 - RNA, 21 nt, RNAi
uuugcucuuucugcaaauuuc

SEQ ID NO: 1129 - DNA, 21 bp, homo sapiens
gagaaagacgtttaaagatgt

SEQ ID NO: 1130 - RNA, 21 nt, RNAi
gaaagacguuuaaagauguuu

SEQ ID NO: 1131 - RNA, 21 nt, RNAi
uucuuucugcaaauuucuaca

SEQ ID NO: 1132 - DNA, 21 bp, homo sapiens
gaaagacgtttaaagatgtgg

SEQ ID NO: 1133 - RNA, 21 nt, RNAi
aagacguuuaaagaugugguu

SEQ ID NO: 1134 - RNA, 21 nt, RNAi
uuuucugcaaauuucuacacc

SEQ ID NO: 1135 - DNA, 21 bp, homo sapiens
gagattggtgcatggacggaa

SEQ ID NO: 1136 - RNA, 21 nt, RNAi
gauuggugcauggacggaauu

SEQ ID NO: 1137 - RNA, 21 nt, RNAi
uucuaaccacguaccugccuu

SEQ ID NO: 1138 - DNA, 21 bp, homo sapiens
gattggtgcatggacggaaga

SEQ ID NO: 1139 - RNA, 21 nt, RNAi
uuggugcauggacggaagauu

SEQ ID NO: 1140 - RNA, 21 nt, RNAi
uuaaccacguaccugccuucu

SEQ ID NO: 1141 - DNA, 21 bp, homo sapiens
gacggaagacgatgtgtattg

SEQ ID NO: 1142 - RNA, 21 nt, RNAi
cggaagacgauguguauuguu

SEQ ID NO: 1143 - RNA, 21 nt, RNAi
uugccuucugcuacacauaac

SEQ ID NO: 1144 - DNA, 21 bp, homo sapiens
gaagacgatgtgtattgttgg

SEQ ID NO: 1145 - RNA, 21 nt, RNAi
agacgauguguauuguugguu

SEQ ID NO: 1146 - RNA, 21 nt, RNAi
uuucugcuacacauaacaacc

SEQ ID NO: 1147 - DNA, 21 bp, homo sapiens
gactcttcagcagagatgagt

SEQ ID NO: 1148 - RNA, 21 nt, RNAi
cucuucagcagagaugaguuu

SEQ ID NO: 1149 - RNA, 21 nt, RNAi
uugagaagucgucucuacuca

SEQ ID NO: 1150 - DNA, 21 bp, homo sapiens
gagatgagtgtatatgcaagc

SEQ ID NO: 1151 - RNA, 21 nt, RNAi
gaugaguguauaugcaagcuu

SEQ ID NO: 1152 - RNA, 21 nt, RNAi
uucuacucacauauacguucg

SEQ ID NO: 1153 - DNA, 21 bp, homo sapiens
gatgagtgtatatgcaagctt

SEQ ID NO: 1154 - RNA, 21 nt, RNAi
ugaguguauaugcaagcuuuu

SEQ ID NO: 1155 - RNA, 21 nt, RNAi
uuacucacauauacguucgaa

SEQ ID NO: 1156 - DNA, 21 bp, homo sapiens
gagtgtatatgcaagcttgtt

SEQ ID NO: 1157 - RNA, 21 nt, RNAi
guguauaugcaagcuuguuuu

SEQ ID NO: 1158 - RNA, 21 nt, RNAi
uucacauauacguucgaacaa

SEQ ID NO: 1159 - DNA, 21 bp, homo sapiens
gaggaagaagacctgaaagac

SEQ ID NO: 1160 - RNA, 21 nt, RNAi
ggaagaagaccugaaagacuu

SEQ ID NO: 1161 - RNA, 21 nt, RNAi
uuccuucuucuggacuuucug

SEQ ID NO: 1162 - DNA, 21 bp, homo sapiens
gaagaagacctgaaagacatg

SEQ ID NO: 1163 - RNA, 21 nt, RNAi
agaagaccugaaagacauguu

SEQ ID NO: 1164 - RNA, 21 nt, RNAi
uuucuucuggacuuucuguac

SEQ ID NO: 1165 - DNA, 21 bp, homo sapiens
gactcaggaggtgaacctgaa

SEQ ID NO: 1166 - RNA, 21 nt, RNAi
cucaggaggugaaccugaauu

SEQ ID NO: 1167 - RNA, 21 nt, RNAi
uugaguccuccacuuggacuu

SEQ ID NO: 1168 - DNA, 21 bp, homo sapiens
gatgaaattgcaataacctac

SEQ ID NO: 1169 - RNA, 21 nt, RNAi
ugaaauugcaauaaccuacuu

SEQ ID NO: 1170 - RNA, 21 nt, RNAi
uuacuuuaacguuauuggaug

SEQ ID NO: 1171 - DNA, 21 bp, homo sapiens
gatgtgacattcaacactaac

SEQ ID NO: 1172 - RNA, 21 nt, RNAi
ugugacauucaacacuaacuu

SEQ ID NO: 1173 - RNA, 21 nt, RNAi
uuacacuguaaguugugauug

SEQ ID NO: 1174 - DNA, 21 bp, homo sapiens
gacattcaacactaacctacc

SEQ ID NO: 1175 - RNA, 21 nt, RNAi
cauucaacacuaaccuaccuu

SEQ ID NO: 1176 - RNA, 21 nt, RNAi
uuguaaguugugauuggaugg

SEQ ID NO: 1177 - DNA, 21 bp, homo sapiens
gatgacaaagccaccatttgt

SEQ ID NO: 1178 - RNA, 21 nt, RNAi
ugacaaagccaccauuuguuu

SEQ ID NO: 1179 - RNA, 21 nt, RNAi
uuacuguuucggugguaaaca

SEQ ID NO: 1180 - DNA, 21 bp, homo sapiens
gacaaagccaccatttgtaat

SEQ ID NO: 1181 - RNA, 21 nt, RNAi
caaagccaccauuuguaauuu

SEQ ID NO: 1182 - RNA, 21 nt, RNAi
uuguuucggugguaaacauua

SEQ ID NO: 1183 - DNA, 21 bp, homo sapiens
gagaagtggattgtaggaata

SEQ ID NO: 1184 - RNA, 21 nt, RNAi
gaaguggauuguaggaauauu

SEQ ID NO: 1185 - RNA, 21 nt, RNAi
uucuucaccuaacauccuuau

SEQ ID NO: 1186 - DNA, 21 bp, homo sapiens
gaagtggattgtaggaatagc

SEQ ID NO: 1187 - RNA, 21 nt, RNAi
aguggauuguaggaauagcuu

SEQ ID NO: 1188 - RNA, 21 nt, RNAi
uuucaccuaacauccuuaucg

SEQ ID NO: 1189 - DNA, 21 bp, homo sapiens
gactgtggagtgcactgtcac

SEQ ID NO: 1190 - RNA, 21 nt, RNAi
cuguggagugcacugucacuu

SEQ ID NO: 1191 - RNA, 21 nt, RNAi
uugacaccucacgugacagug

SEQ ID NO: 1192 - DNA, 21 bp, homo sapiens
gagtgcactgtcacatatgag

SEQ ID NO: 1193 - RNA, 21 nt, RNAi
gugcacugucacauaugaguu

SEQ ID NO: 1194 - RNA, 21 nt, RNAi
uucacgugacaguguauacuc

SEQ ID NO: 1195 - DNA, 21 bp, homo sapiens
gagagtgatgttagaactcca

SEQ ID NO: 1196 - RNA, 21 nt, RNAi
gagugauguuagaacuccauu

SEQ ID NO: 1197 - RNA, 21 nt, RNAi
uucucacuacaaucuugaggu

SEQ ID NO: 1198 - DNA, 21 bp, homo sapiens
gagtgatgttagaactccaaa

SEQ ID NO: 1199 - RNA, 21 nt, RNAi
gugauguuagaacuccaaauu

SEQ ID NO: 1200 - RNA, 21 nt, RNAi
uucacuacaaucuugagguuu

SEQ ID NO: 1201 - DNA, 21 bp, homo sapiens
gattcagtggagtagaacaaa

SEQ ID NO: 1202 - RNA, 21 nt, RNAi
uucaguggaguagaacaaauu

SEQ ID NO: 1203 - RNA, 21 nt, RNAi
uuaagucaccucaucuuguuu

SEQ ID NO: 1204 - DNA, 21 bp, homo sapiens
gatgaagtgaaagcagtccaa

SEQ ID NO: 1205 - RNA, 21 nt, RNAi
ugaagugaaagcaguccaauu

SEQ ID NO: 1206 - RNA, 21 nt, RNAi
uuacuucacuuucgucagguu

SEQ ID NO: 1207 - DNA, 21 bp, homo sapiens
gaagtgaaagcagtccaactt

SEQ ID NO: 1208 - RNA, 21 nt, RNAi
agugaaagcaguccaacuuuu

SEQ ID NO: 1209 - RNA, 21 nt, RNAi
uuucacuuucgucagguugaa

SEQ ID NO: 1210 - DNA, 21 bp, homo sapiens
gaaagcagtccaacttgccat

SEQ ID NO: 1211 - RNA, 21 nt, RNAi
aagcaguccaacuugccauuu

SEQ ID NO: 1212 - RNA, 21 nt, RNAi
uuuucgucagguugaacggua

SEQ ID NO: 1213 - DNA, 21 bp, homo sapiens
gacattattcaccaattcaga

SEQ ID NO: 1214 - RNA, 21 nt, RNAi
cauuauucaccaauucagauu

SEQ ID NO: 1215 - RNA, 21 nt, RNAi
uuguaauaagugguuaagucu

SEQ ID NO: 1216 - DNA, 21 bp, homo sapiens
gaagcaggtccgactcaagtg

SEQ ID NO: 1217 - RNA, 21 nt, RNAi
agcagguccgacucaaguguu

SEQ ID NO: 1218 - RNA, 21 nt, RNAi
uuucguccaggcugaguucac

SEQ ID NO: 1219 - DNA, 21 bp, homo sapiens
gactcaagtgctgattgccag

SEQ ID NO: 1220 - RNA, 21 nt, RNAi
cucaagugcugauugccaguu

SEQ ID NO: 1221 - RNA, 21 nt, RNAi
uugaguucacgacuaacgguc

SEQ ID NO: 1222 - DNA, 21 bp, homo sapiens
gattgccagtggttagatact

SEQ ID NO: 1223 - RNA, 21 nt, RNAi
uugccagugguuagauacuuu

SEQ ID NO: 1224 - RNA, 21 nt, RNAi
uuaacggucaccaaucuauga

SEQ ID NO: 1225 - DNA, 21 bp, homo sapiens
gatactctgaggatgcggcag

SEQ ID NO: 1226 - RNA, 21 nt, RNAi
uacucugaggaugcggcaguu

SEQ ID NO: 1227 - RNA, 21 nt, RNAi
uuaugagacuccuacgccguc

SEQ ID NO: 1228 - DNA, 21 bp, homo sapiens
gaggatgcggcagattgcatc

SEQ ID NO: 1229 - RNA, 21 nt, RNAi
ggaugcggcagauugcaucuu

SEQ ID NO: 1230 - RNA, 21 nt, RNAi
uuccuacgccgucuaacguag

SEQ ID NO: 1231 - DNA, 21 bp, homo sapiens
gatgcggcagattgcatccaa

SEQ ID NO: 1232 - RNA, 21 nt, RNAi
ugcggcagauugcauccaauu

SEQ ID NO: 1233 - RNA, 21 nt, RNAi
uuacgccgucuaacguagguu

SEQ ID NO: 1234 - DNA, 21 bp, homo sapiens
gattgcatccaacacttcttt

SEQ ID NO: 1235 - RNA, 21 nt, RNAi
uugcauccaacacuucuuuuu

SEQ ID NO: 1236 - RNA, 21 nt, RNAi
uuaacguagguugugaagaaa

SEQ ID NO: 1237 - DNA, 21 bp, homo sapiens
gatggccaggattcctacgct

SEQ ID NO: 1238 - RNA, 21 nt, RNAi
uggccaggauuccuacgcuuu

SEQ ID NO: 1239 - RNA, 21 nt, RNAi
uuaccgguccuaaggaugcga

SEQ ID NO: 1240 - DNA, 21 bp, homo sapiens
gattcctacgctgctgctgtg

SEQ ID NO: 1241 - RNA, 21 nt, RNAi
uuccuacgcugcugcuguguu

SEQ ID NO: 1242 - RNA, 21 nt, RNAi
uuaaggaugcgacgacgacac

SEQ ID NO: 1243 - DNA, 21 bp, homo sapiens
gattacacctgtgaaccagtc

SEQ ID NO: 1244 - RNA, 21 nt, RNAi
uuacaccugugaaccagucuu

SEQ ID NO: 1245 - RNA, 21 nt, RNAi
uuaauguggacacuuggucag

SEQ ID NO: 1246 - DNA, 21 bp, homo sapiens
gaaccagtccagaagctcgtc

SEQ ID NO: 1247 - RNA, 21 nt, RNAi
accaguccagaagcucgucuu

SEQ ID NO: 1248 - RNA, 21 nt, RNAi
uuuggucaggucuucgagcag

SEQ ID NO: 1249 - DNA, 21 bp, homo sapiens
gaagctcgtctcctactcagt

SEQ ID NO: 1250 - RNA, 21 nt, RNAi
agcucgucuccuacucaguuu

SEQ ID NO: 1251 - RNA, 21 nt, RNAi
uuucgagcagaggaugaguca

SEQ ID NO: 1252 - DNA, 21 bp, homo sapiens
gatactcagacagaagcagga

SEQ ID NO: 1253 - RNA, 21 nt, RNAi
uacucagacagaagcaggauu

SEQ ID NO: 1254 - RNA, 21 nt, RNAi
uuaugagucugucuucguccu

SEQ ID NO: 1255 - DNA, 21 bp, homo sapiens
gacagaagcaggaacaaatat

SEQ ID NO: 1256 - RNA, 21 nt, RNAi
cagaagcaggaacaaauauuu

SEQ ID NO: 1257 - RNA, 21 nt, RNAi
uugucuucguccuuguuuaua

SEQ ID NO: 1258 - DNA, 21 bp, homo sapiens
gaagcaggaacaaatatggac

SEQ ID NO: 1259 - RNA, 21 nt, RNAi
agcaggaacaaauauggacuu

SEQ ID NO: 1260 - RNA, 21 nt, RNAi
uuucguccuuguuuauaccug

SEQ ID NO: 1261 - DNA, 21 bp, homo sapiens
gaacaaatatggacgtggtag

SEQ ID NO: 1262 - RNA, 21 nt, RNAi
acaaauauggacgugguaguu

SEQ ID NO: 1263 - RNA, 21 nt, RNAi
uuuguuuauaccugcaccauc

SEQ ID NO: 1264 - DNA, 21 bp, homo sapiens
gacgtggtagtatatcactca

SEQ ID NO: 1265 - RNA, 21 nt, RNAi
cgugguaguauaucacucauu

SEQ ID NO: 1266 - RNA, 21 nt, RNAi
uugcaccaucauauagugagu

SEQ ID NO: 1267 - DNA, 21 bp, homo sapiens
gaggaagatacagtggaaaga

SEQ ID NO: 1268 - RNA, 21 nt, RNAi
ggaagauacaguggaaagauu

SEQ ID NO: 1269 - RNA, 21 nt, RNAi
uuccuucuaugucaccuuucu

SEQ ID NO: 1270 - DNA, 21 bp, homo sapiens
gaagatacagtggaaagagtc

SEQ ID NO: 1271 - RNA, 21 nt, RNAi
agauacaguggaaagagucuu

SEQ ID NO: 1272 - RNA, 21 nt, RNAi
uuucuaugucaccuuucucag

SEQ ID NO: 1273 - DNA, 21 bp, homo sapiens
gatacagtggaaagagtcagc

SEQ ID NO: 1274 - RNA, 21 nt, RNAi
uacaguggaaagagucagcuu

SEQ ID NO: 1275 - RNA, 21 nt, RNAi
uuaugucaccuuucucagucg

SEQ ID NO: 1276 - DNA, 21 bp, homo sapiens
gaaagagtcagcattccactc

SEQ ID NO: 1277 - RNA, 21 nt, RNAi
aagagucagcauuccacucuu

SEQ ID NO: 1278 - RNA, 21 nt, RNAi
uuuucucagucguaaggugag

SEQ ID NO: 1279 - DNA, 21 bp, homo sapiens
gagtcagcattccactccttc

SEQ ID NO: 1280 - RNA, 21 nt, RNAi
gucagcauuccacuccuucuu

SEQ ID NO: 1281 - RNA, 21 nt, RNAi
uucagucguaaggugaggaag

SEQ ID NO: 1282 - DNA, 21 bp, homo sapiens
gagactgactcaagagccagt

SEQ ID NO: 1283 - RNA, 21 nt, RNAi
gacugacucaagagccaguuu

SEQ ID NO: 1284 - RNA, 21 nt, RNAi
uucugacugaguucucgguca

SEQ ID NO: 1285 - DNA, 21 bp, homo sapiens
gactgactcaagagccagtga

SEQ ID NO: 1286 - RNA, 21 nt, RNAi
cugacucaagagccagugauu

SEQ ID NO: 1287 - RNA, 21 nt, RNAi
uugacugaguucucggucacu

SEQ ID NO: 1288 - DNA, 21 bp, homo sapiens
gactcaagagccagtgaagag

SEQ ID NO: 1289 - RNA, 21 nt, RNAi
cucaagagccagugaagaguu

SEQ ID NO: 1290 - RNA, 21 nt, RNAi
uugaguucucggucacuucuc

SEQ ID NO: 1291 - DNA, 21 bp, homo sapiens
gagccagtgaagaggacagca

SEQ ID NO: 1292 - RNA, 21 nt, RNAi
gccagugaagaggacagcauu

SEQ ID NO: 1293 - RNA, 21 nt, RNAi
uucggucacuucuccugucgu

SEQ ID NO: 1294 - DNA, 21 bp, homo sapiens
gaagaggacagcaaagtcagc

SEQ ID NO: 1295 - RNA, 21 nt, RNAi
agaggacagcaaagucagcuu

SEQ ID NO: 1296 - RNA, 21 nt, RNAi
uuucuccugucguuucagucg

SEQ ID NO: 1297 - DNA, 21 bp, homo sapiens
gaggacagcaaagtcagcgaa

SEQ ID NO: 1298 - RNA, 21 nt, RNAi
ggacagcaaagucagcgaauu

SEQ ID NO: 1299 - RNA, 21 nt, RNAi
uuccugucguuucagucgcuu

SEQ ID NO: 1300 - DNA, 21 bp, homo sapiens
gaccaccgtggatggagaaac

SEQ ID NO: 1301 - RNA, 21 nt, RNAi
ccaccguggauggagaaacuu

SEQ ID NO: 1302 - RNA, 21 nt, RNAi
uugguggcaccuaccucuuug

SEQ ID NO: 1303 - DNA, 21 bp, homo sapiens
gatgaattgaactacatagct

SEQ ID NO: 1304 - RNA, 21 nt, RNAi
ugaauugaacuacauagcuuu

SEQ ID NO: 1305 - RNA, 21 nt, RNAi
uuacuuaacuugauguaucga

SEQ ID NO: 1306 - DNA, 21 bp, homo sapiens
gaaataccttctaattgagac

SEQ ID NO: 1307 - RNA, 21 nt, RNAi
aauaccuucuaauugagacuu

SEQ ID NO: 1308 - RNA, 21 nt, RNAi
uuuuauggaagauuaacucug

SEQ ID NO: 1309 - DNA, 21 bp, homo sapiens
gaggaaaggttatgccatctt

SEQ ID NO: 1310 - RNA, 21 nt, RNAi
ggaaagguuaugccaucuuuu

SEQ ID NO: 1311 - RNA, 21 nt, RNAi
uuccuuuccaauacgguagaa

SEQ ID NO: 1312 - DNA, 21 bp, homo sapiens
gaggctgcaatatggcctggc

SEQ ID NO: 1313 - RNA, 21 nt, RNAi
ggcugcaauauggccuggcuu

SEQ ID NO: 1314 - RNA, 21 nt, RNAi
uuccgacguuauaccggaccg

SEQ ID NO: 1315 - DNA, 21 bp, homo sapiens
gatatttgtgtctgtatgatg

SEQ ID NO: 1316 - RNA, 21 nt, RNAi
uauuugugucuguaugauguu

SEQ ID NO: 1317 - RNA, 21 nt, RNAi
uuauaaacacagacauacuac

SEQ ID NO: 1318 - DNA, 21 bp, homo sapiens
gatggtcagagttgaactgat

SEQ ID NO: 1319 - RNA, 21 nt, RNAi
uggucagaguugaacugauuu

SEQ ID NO: 1320 - RNA, 21 nt, RNAi
uuaccagucucaacuugacua

SEQ ID NO: 1321 - DNA, 21 bp, homo sapiens
gagttgaactgatctggcttg

SEQ ID NO: 1322 - RNA, 21 nt, RNAi
guugaacugaucuggcuuguu

SEQ ID NO: 1323 - RNA, 21 nt, RNAi
uucaacuugacuagaccgaac

SEQ ID NO: 1324 - DNA, 21 bp, homo sapiens
gaactgatctggcttgtcatt

SEQ ID NO: 1325 - RNA, 21 nt, RNAi
acugaucuggcuugucauuuu

SEQ ID NO: 1326 - RNA, 21 nt, RNAi
uuugacuagaccgaacaguaa

SEQ ID NO: 1327 - DNA, 21 bp, homo sapiens
gatgcatatctcattcattac

SEQ ID NO: 1328 - RNA, 21 nt, RNAi
ugcauaucucauucauuacuu

SEQ ID NO: 1329 - RNA, 21 nt, RNAi
uuacguauagaguaaguaaug

SEQ ID NO: 1330 - DNA, 21 bp, homo sapiens
gatttgtggttctttctcttc

SEQ ID NO: 1331 - RNA, 21 nt, RNAi
uuugugguucuuucucuucuu

SEQ ID NO: 1332 - RNA, 21 nt, RNAi
uuaaacaccaagaaagagaag

SEQ ID NO: 1333 - DNA, 21 bp, homo sapiens
gacacagagcaagacaataac

SEQ ID NO: 1334 - RNA, 21 nt, RNAi
cacagagcaagacaauaacuu

SEQ ID NO: 1335 - RNA, 21 nt, RNAi
uugugucucguucuguuauug

SEQ ID NO: 1336 - DNA, 21 bp, homo sapiens
gagcaagacaataacatcaca

SEQ ID NO: 1337 - RNA, 21 nt, RNAi
gcaagacaauaacaucacauu

SEQ ID NO: 1338 - RNA, 21 nt, RNAi
uucguucuguuauuguagugu

SEQ ID NO: 1339 - DNA, 21 bp, homo sapiens
gacaataacatcacaagctaa

SEQ ID NO: 1340 - RNA, 21 nt, RNAi
caauaacaucacaagcuaauu

SEQ ID NO: 1341 - RNA, 21 nt, RNAi
uuguuauuguaguguucgauu

SEQ ID NO: 1342 - DNA, 21 bp, homo sapiens
gagtaagacagtaaatatcag

SEQ ID NO: 1343 - RNA, 21 nt, RNAi
guaagacaguaaauaucaguu

SEQ ID NO: 1344 - RNA, 21 nt, RNAi
uucauucugucauuuauaguc

SEQ ID NO: 1345 - DNA, 21 bp, homo sapiens
gacagtaaatatcagccttgc

SEQ ID NO: 1346 - RNA, 21 nt, RNAi
caguaaauaucagccuugcuu

SEQ ID NO: 1347 - RNA, 21 nt, RNAi
uugucauuuauagucggaacg

SEQ ID NO: 1348 - DNA, 21 bp, homo sapiens
gacagctctgagcagctgtgg

SEQ ID NO: 1349 - RNA, 21 nt, RNAi
cagcucugagcagcugugguu

SEQ ID NO: 1350 - RNA, 21 nt, RNAi
uugucgagacucgucgacacc

SEQ ID NO: 1351 - DNA, 21 bp, homo sapiens
gatccaacttgtgaaatgctt

SEQ ID NO: 1352 - RNA, 21 nt, RNAi
uccaacuugugaaaugcuuuu

SEQ ID NO: 1353 - RNA, 21 nt, RNAi
uuagguugaacacuuuacgaa

SEQ ID NO: 1354 - DNA, 21 bp, homo sapiens
tatgagatgtcgtctctcggt

SEQ ID NO: 1355 - RNA, 21 nt, RNAi
ugagaugucgucucucgguuu

SEQ ID NO: 1356 - RNA, 21 nt, RNAi
uuacucuacagcagagagcca

SEQ ID NO: 1357 - DNA, 21 bp, homo sapiens
tatcgagccaaatggatatca

SEQ ID NO: 1358 - RNA, 21 nt, RNAi
ucgagccaaauggauaucauu

SEQ ID NO: 1359 - RNA, 21 nt, RNAi
uuagcucgguuuaccuauagu

SEQ ID NO: 1360 - DNA, 21 bp, homo sapiens
tatcacaggacaaggaggtgg

SEQ ID NO: 1361 - RNA, 21 nt, RNAi
ucacaggacaaggaggugguu

SEQ ID NO: 1362 - RNA, 21 nt, RNAi
uuaguguccuguuccuccacc

SEQ ID NO: 1363 - DNA, 21 bp, homo sapiens
tagagaaagaggcagaaatac

SEQ ID NO: 1364 - RNA, 21 nt, RNAi
gagaaagaggcagaaauacuu

SEQ ID NO: 1365 - RNA, 21 nt, RNAi
uucucuuucuccgucuuuaug

SEQ ID NO: 1366 - DNA, 21 bp, homo sapiens
tactcagtgtcctcagtcaca

SEQ ID NO: 1367 - RNA, 21 nt, RNAi
cucaguguccucagucacauu

SEQ ID NO: 1368 - RNA, 21 nt, RNAi
uugagucacaggagucagugu

SEQ ID NO: 1369 - DNA, 21 bp, homo sapiens
tatggagtaattcttgaacct

SEQ ID NO: 1370 - RNA, 21 nt, RNAi
uggaguaauucuugaaccuuu

SEQ ID NO: 1371 - RNA, 21 nt, RNAi
uuaccucauuaagaacuugga

SEQ ID NO: 1372 - DNA, 21 bp, homo sapiens
tatggcattgtcacagaatat

SEQ ID NO: 1373 - RNA, 21 nt, RNAi
uggcauugucacagaauauuu

SEQ ID NO: 1374 - RNA, 21 nt, RNAi
uuaccguaacagugucuuaua

SEQ ID NO: 1375 - DNA, 21 bp, homo sapiens
taacagtaacagaagtgagga

SEQ ID NO: 1376 - RNA, 21 nt, RNAi
acaguaacagaagugaggauu

SEQ ID NO: 1377 - RNA, 21 nt, RNAi
uuugucauugucuucacuccu

SEQ ID NO: 1378 - DNA, 21 bp, homo sapiens
taacagaagtgaggagatgga

SEQ ID NO: 1379 - RNA, 21 nt, RNAi
acagaagugaggagauggauu

SEQ ID NO: 1380 - RNA, 21 nt, RNAi
uuugucuucacuccucuaccu

SEQ ID NO: 1381 - DNA, 21 bp, homo sapiens
tatggatcacattatgacctg

SEQ ID NO: 1382 - RNA, 21 nt, RNAi
uggaucacauuaugaccuguu

SEQ ID NO: 1383 - RNA, 21 nt, RNAi
uuaccuaguguaauacuggac

SEQ ID NO: 1384 - DNA, 21 bp, homo sapiens
tagccaaaggaatgcattatt

SEQ ID NO: 1385 - RNA, 21 nt, RNAi
gccaaaggaaugcauuauuuu

SEQ ID NO: 1386 - RNA, 21 nt, RNAi
uucgguuuccuuacguaauaa

SEQ ID NO: 1387 - DNA, 21 bp, homo sapiens
tatttacatatggaggctcct

SEQ ID NO: 1388 - RNA, 21 nt, RNAi
uuuacauauggaggcuccuuu

SEQ ID NO: 1389 - RNA, 21 nt, RNAi
uuaaauguauaccuccgagga

SEQ ID NO: 1390 - DNA, 21 bp, homo sapiens
tacatatggaggctcctgtca

SEQ ID NO: 1391 - RNA, 21 nt, RNAi
cauauggaggcuccugucauu

SEQ ID NO: 1392 - RNA, 21 nt, RNAi
uuguauaccuccgaggacagu

SEQ ID NO: 1393 - DNA, 21 bp, homo sapiens
tatggaggctcctgtcaaggt

SEQ ID NO: 1394 - RNA, 21 nt, RNAi
uggaggcuccugucaagguuu

SEQ ID NO: 1395 - RNA, 21 nt, RNAi
uuaccuccgaggacaguucca

SEQ ID NO: 1396 - DNA, 21 bp, homo sapiens
tatagctgctgatggagtact

SEQ ID NO: 1397 - RNA, 21 nt, RNAi
uagcugcugauggaguacuuu

SEQ ID NO: 1398 - RNA, 21 nt, RNAi
uuaucgacgacuaccucauga

SEQ ID NO: 1399 - DNA, 21 bp, homo sapiens
tagctgctgatggagtactga

SEQ ID NO: 1400 - RNA, 21 nt, RNAi
gcugcugauggaguacugauu

SEQ ID NO: 1401 - RNA, 21 nt, RNAi
uucgacgacuaccucaugacu

SEQ ID NO: 1402 - DNA, 21 bp, homo sapiens
tactgaagatctgtgactttg

SEQ ID NO: 1403 - RNA, 21 nt, RNAi
cugaagaucugugacuuuguu

SEQ ID NO: 1404 - RNA, 21 nt, RNAi
uugacuucuagacacugaaac

SEQ ID NO: 1405 - DNA, 21 bp, homo sapiens
taaccatacaacacacatgtc

SEQ ID NO: 1406 - RNA, 21 nt, RNAi
accauacaacacacaugucuu

SEQ ID NO: 1407 - RNA, 21 nt, RNAi
uuugguauguuguguguacag

SEQ ID NO: 1408 - DNA, 21 bp, homo sapiens
tacaacacacatgtccttggt

SEQ ID NO: 1409 - RNA, 21 nt, RNAi
caacacacauguccuugguuu

SEQ ID NO: 1410 - RNA, 21 nt, RNAi
uuguuguguguacaggaacca

SEQ ID NO: 1411 - DNA, 21 bp, homo sapiens
tattcctatggtgtggttctc

SEQ ID NO: 1412 - RNA, 21 nt, RNAi
uuccuauggugugguucucuu

SEQ ID NO: 1413 - RNA, 21 nt, RNAi
uuaaggauaccacaccaagag

SEQ ID NO: 1414 - DNA, 21 bp, homo sapiens
taaaggtttggaaggattaca

SEQ ID NO: 1415 - RNA, 21 nt, RNAi
aagguuuggaaggauuacauu

SEQ ID NO: 1416 - RNA, 21 nt, RNAi
uuuuccaaaccuuccuaaugu

SEQ ID NO: 1417 - DNA, 21 bp, homo sapiens
tacaagtagcttggcttgtag

SEQ ID NO: 1418 - RNA, 21 nt, RNAi
caaguagcuuggcuuguaguu

SEQ ID NO: 1419 - RNA, 21 nt, RNAi
uuguucaucgaaccgaacauc

SEQ ID NO: 1420 - DNA, 21 bp, homo sapiens
tagcttggcttgtagtggaaa

SEQ ID NO: 1421 - RNA, 21 nt, RNAi
gcuuggcuuguaguggaaauu

SEQ ID NO: 1422 - RNA, 21 nt, RNAi
uucgaaccgaacaucaccuuu

SEQ ID NO: 1423 - DNA, 21 bp, homo sapiens
taaccattccaagcagttgcc

SEQ ID NO: 1424 - RNA, 21 nt, RNAi
accauuccaagcaguugccuu

SEQ ID NO: 1425 - RNA, 21 nt, RNAi
uuugguaagguucgucaacgg

SEQ ID NO: 1426 - DNA, 21 bp, homo sapiens
taactcattcctacacaacaa

SEQ ID NO: 1427 - RNA, 21 nt, RNAi
acucauuccuacacaacaauu

SEQ ID NO: 1428 - RNA, 21 nt, RNAi
uuugaguaaggauguguuguu

SEQ ID NO: 1429 - DNA, 21 bp, homo sapiens
tacacaacaaggcggagtgga

SEQ ID NO: 1430 - RNA, 21 nt, RNAi
cacaacaaggcggaguggauu

SEQ ID NO: 1431 - RNA, 21 nt, RNAi
uuguguuguuccgccucaccu

SEQ ID NO: 1432 - DNA, 21 bp, homo sapiens
taaagaaactagagcgtgatc

SEQ ID NO: 1433 - RNA, 21 nt, RNAi
aagaaacuagagcgugaucuu

SEQ ID NO: 1434 - RNA, 21 nt, RNAi
uuuucuuugaucucgcacuag

SEQ ID NO: 1435 - DNA, 21 bp, homo sapiens
tagagcgtgatctcagcttta

SEQ ID NO: 1436 - RNA, 21 nt, RNAi
gagcgugaucucagcuuuauu

SEQ ID NO: 1437 - RNA, 21 nt, RNAi
uucucgcacuagagucgaaau

SEQ ID NO: 1438 - DNA, 21 bp, homo sapiens
taaggagcaggagcttaaaga

SEQ ID NO: 1439 - RNA, 21 nt, RNAi
aggagcaggagcuuaaagauu

SEQ ID NO: 1440 - RNA, 21 nt, RNAi
uuuccucguccucgaauuucu

SEQ ID NO: 1441 - DNA, 21 bp, homo sapiens
taaagaacgagaaagacgttt

SEQ ID NO: 1442 - RNA, 21 nt, RNAi
aagaacgagaaagacguuuuu

SEQ ID NO: 1443 - RNA, 21 nt, RNAi
uuuucuugcucuuucugcaaa

SEQ ID NO: 1444 - DNA, 21 bp, homo sapiens
tatcattcacttcaagtcagc

SEQ ID NO: 1445 - RNA, 21 nt, RNAi
ucauucacuucaagucagcuu

SEQ ID NO: 1446 - RNA, 21 nt, RNAi
uuaguaagugaaguucagucg

SEQ ID NO: 1447 - DNA, 21 bp, homo sapiens
taattaaggactcaggaggtg

SEQ ID NO: 1448 - RNA, 21 nt, RNAi
auuaaggacucaggagguguu

SEQ ID NO: 1449 - RNA, 21 nt, RNAi
uuuaauuccugaguccuccac

SEQ ID NO: 1450 - DNA, 21 bp, homo sapiens
taaggactcaggaggtgaacc

SEQ ID NO: 1451 - RNA, 21 nt, RNAi
aggacucaggaggugaaccuu

SEQ ID NO: 1452 - RNA, 21 nt, RNAi
uuuccugaguccuccacuugg

SEQ ID NO: 1453 - DNA, 21 bp, homo sapiens
tagtgaacctggaactggttt

SEQ ID NO: 1454 - RNA, 21 nt, RNAi
gugaaccuggaacugguuuuu

SEQ ID NO: 1455 - RNA, 21 nt, RNAi
uucacuuggaccuugaccaaa

SEQ ID NO: 1456 - DNA, 21 bp, homo sapiens
taacctacctgatgcggagat

SEQ ID NO: 1457 - RNA, 21 nt, RNAi
accuaccugaugcggagauuu

SEQ ID NO: 1458 - RNA, 21 nt, RNAi
uuuggauggacuacgccucua

SEQ ID NO: 1459 - DNA, 21 bp, homo sapiens
taaagatgacaaagccaccat

SEQ ID NO: 1460 - RNA, 21 nt, RNAi
aagaugacaaagccaccauuu

SEQ ID NO: 1461 - RNA, 21 nt, RNAi
uuuucuacuguuucgguggua

SEQ ID NO: 1462 - DNA, 21 bp, homo sapiens
taatggagaagtggattgtag

SEQ ID NO: 1463 - RNA, 21 nt, RNAi
auggagaaguggauuguaguu

SEQ ID NO: 1464 - RNA, 21 nt, RNAi
uuuaccucuucaccuaacauc

SEQ ID NO: 1465 - DNA, 21 bp, homo sapiens
tatgagagtgatgttagaact

SEQ ID NO: 1466 - RNA, 21 nt, RNAi
ugagagugauguuagaacuuu

SEQ ID NO: 1467 - RNA, 21 nt, RNAi
uuacucucacuacaaucuuga

SEQ ID NO: 1468 - DNA, 21 bp, homo sapiens
tattcaccaattcagatggca

SEQ ID NO: 1469 - RNA, 21 nt, RNAi
uucaccaauucagauggcauu

SEQ ID NO: 1470 - RNA, 21 nt, RNAi
uuaagugguuaagucuaccgu

SEQ ID NO: 1471 - DNA, 21 bp, homo sapiens
tagatactctgaggatgcggc

SEQ ID NO: 1472 - RNA, 21 nt, RNAi
gauacucugaggaugcggcuu

SEQ ID NO: 1473 - RNA, 21 nt, RNAi
uucuaugagacuccuacgccg

SEQ ID NO: 1474 - DNA, 21 bp, homo sapiens
tactctgaggatgcggcagat

SEQ ID NO: 1475 - RNA, 21 nt, RNAi
cucugaggaugcggcagauuu

SEQ ID NO: 1476 - RNA, 21 nt, RNAi
uugagacuccuacgccgucua

SEQ ID NO: 1477 - DNA, 21 bp, homo sapiens
tacgctgctgctgtgagacgg

SEQ ID NO: 1478 - RNA, 21 nt, RNAi
cgcugcugcugugagacgguu

SEQ ID NO: 1479 - RNA, 21 nt, RNAi
uugcgacgacgacacucugcc

SEQ ID NO: 1480 - DNA, 21 bp, homo sapiens
taagtatcaacagattacacc

SEQ ID NO: 1481 - RNA, 21 nt, RNAi
aguaucaacagauuacaccuu

SEQ ID NO: 1482 - RNA, 21 nt, RNAi
uuucauaguugucuaaugugg

SEQ ID NO: 1483 - DNA, 21 bp, homo sapiens
tatcaacagattacacctgtg

SEQ ID NO: 1484 - RNA, 21 nt, RNAi
ucaacagauuacaccuguguu

SEQ ID NO: 1485 - RNA, 21 nt, RNAi
uuaguugucuaauguggacac

SEQ ID NO: 1486 - DNA, 21 bp, homo sapiens
tacacctgtgaaccagtccag

SEQ ID NO: 1487 - RNA, 21 nt, RNAi
caccugugaaccaguccaguu

SEQ ID NO: 1488 - RNA, 21 nt, RNAi
uuguggacacuuggucagguc

SEQ ID NO: 1489 - DNA, 21 bp, homo sapiens
tactcagtatggactgaccaa

SEQ ID NO: 1490 - RNA, 21 nt, RNAi
cucaguauggacugaccaauu

SEQ ID NO: 1491 - RNA, 21 nt, RNAi
uugagucauaccugacugguu

SEQ ID NO: 1492 - DNA, 21 bp, homo sapiens
tactgacacctcttcagagag

SEQ ID NO: 1493 - RNA, 21 nt, RNAi
cugacaccucuucagagaguu

SEQ ID NO: 1494 - RNA, 21 nt, RNAi
uugacuguggagaagucucuc

SEQ ID NO: 1495 - DNA, 21 bp, homo sapiens
tactcagacagaagcaggaac

SEQ ID NO: 1496 - RNA, 21 nt, RNAi
cucagacagaagcaggaacuu

SEQ ID NO: 1497 - RNA, 21 nt, RNAi
uugagucugucuucguccuug

SEQ ID NO: 1498 - DNA, 21 bp, homo sapiens
tatggacgtggtagtatatca

SEQ ID NO: 1499 - RNA, 21 nt, RNAi
uggacgugguaguauaucauu

SEQ ID NO: 1500 - RNA, 21 nt, RNAi
uuaccugcaccaucauauagu

SEQ ID NO: 1501 - DNA, 21 bp, homo sapiens
tatatcactcaattcttctcc

SEQ ID NO: 1502 - RNA, 21 nt, RNAi
uaucacucaauucuucuccuu

SEQ ID NO: 1503 - RNA, 21 nt, RNAi
uuauagugaguuaagaagagg

SEQ ID NO: 1504 - DNA, 21 bp, homo sapiens
tatcactcaattcttctccta

SEQ ID NO: 1505 - RNA, 21 nt, RNAi
ucacucaauucuucuccuauu

SEQ ID NO: 1506 - RNA, 21 nt, RNAi
uuagugaguuaagaagaggau

SEQ ID NO: 1507 - DNA, 21 bp, homo sapiens
tagaggaagatacagtggaaa

SEQ ID NO: 1508 - RNA, 21 nt, RNAi
gaggaagauacaguggaaauu

SEQ ID NO: 1509 - RNA, 21 nt, RNAi
uucuccuucuaugucaccuuu

SEQ ID NO: 1510 - DNA, 21 bp, homo sapiens
tacagtggaaagagtcagcat

SEQ ID NO: 1511 - RNA, 21 nt, RNAi
caguggaaagagucagcauuu

SEQ ID NO: 1512 - RNA, 21 nt, RNAi
uugucaccuuucucagucgua

SEQ ID NO: 1513 - DNA, 21 bp, homo sapiens
taattgagactatagccaaac

SEQ ID NO: 1514 - RNA, 21 nt, RNAi
auugagacuauagccaaacuu

SEQ ID NO: 1515 - RNA, 21 nt, RNAi
uuuaacucugauaucgguuug

SEQ ID NO: 1516 - DNA, 21 bp, homo sapiens
tagaggaaaggttatgccatc

SEQ ID NO: 1517 - RNA, 21 nt, RNAi
gaggaaagguuaugccaucuu

SEQ ID NO: 1518 - RNA, 21 nt, RNAi
uucuccuuuccaauacgguag

SEQ ID NO: 1519 - DNA, 21 bp, homo sapiens
taaccactgatattctggtta

SEQ ID NO: 1520 - RNA, 21 nt, RNAi
accacugauauucugguuauu

SEQ ID NO: 1521 - RNA, 21 nt, RNAi
uuuggugacuauaagaccaau

SEQ ID NO: 1522 - DNA, 21 bp, homo sapiens
tatggcctggcaaggcactgt

SEQ ID NO: 1523 - RNA, 21 nt, RNAi
uggccuggcaaggcacuguuu

SEQ ID NO: 1524 - RNA, 21 nt, RNAi
uuaccggaccguuccgugaca

SEQ ID NO: 1525 - DNA, 21 bp, homo sapiens
tacctcactcatctcatcctt

SEQ ID NO: 1526 - RNA, 21 nt, RNAi
ccucacucaucucauccuuuu

SEQ ID NO: 1527 - RNA, 21 nt, RNAi
uuggagugaguagaguaggaa

SEQ ID NO: 1528 - DNA, 21 bp, homo sapiens
tatttgtgtctgtatgatggt

SEQ ID NO: 1529 - RNA, 21 nt, RNAi
uuugugucuguaugaugguuu

SEQ ID NO: 1530 - RNA, 21 nt, RNAi
uuaaacacagacauacuacca

SEQ ID NO: 1531 - DNA, 21 bp, homo sapiens
tatgatggtcagagttgaact

SEQ ID NO: 1532 - RNA, 21 nt, RNAi
ugauggucagaguugaacuuu

SEQ ID NO: 1533 - RNA, 21 nt, RNAi
uuacuaccagucucaacuuga

SEQ ID NO: 1534 - DNA, 21 bp, homo sapiens
taaattgcctagatttgtggt

SEQ ID NO: 1535 - RNA, 21 nt, RNAi
aauugccuagauuugugguuu

SEQ ID NO: 1536 - RNA, 21 nt, RNAi
uuuuaacggaucuaaacacca

SEQ ID NO: 1537 - DNA, 21 bp, homo sapiens
tagatttgtggttctttctct

SEQ ID NO: 1538 - RNA, 21 nt, RNAi
gauuugugguucuuucucuuu

SEQ ID NO: 1539 - RNA, 21 nt, RNAi
uucuaaacaccaagaaagaga

SEQ ID NO: 1540 - DNA, 21 bp, homo sapiens
taaatttcaccaaaggagcaa

SEQ ID NO: 1541 - RNA, 21 nt, RNAi
aauuucaccaaaggagcaauu

SEQ ID NO: 1542 - RNA, 21 nt, RNAi
uuuuaaagugguuuccucguu

SEQ ID NO: 1543 - DNA, 21 bp, homo sapiens
taccaacatccttgttggagt

SEQ ID NO: 1544 - RNA, 21 nt, RNAi
ccaacauccuuguuggaguuu

SEQ ID NO: 1545 - RNA, 21 nt, RNAi
uugguuguaggaacaaccuca

SEQ ID NO: 1546 - DNA, 21 bp, homo sapiens
taagacagtaaatatcagcct

SEQ ID NO: 1547 - RNA, 21 nt, RNAi
agacaguaaauaucagccuuu

SEQ ID NO: 1548 - RNA, 21 nt, RNAi
uuucugucauuuauagucgga

SEQ ID NO: 1549 - DNA, 21 bp, homo sapiens
taaatatcagccttgcagcaa

SEQ ID NO: 1550 - RNA, 21 nt, RNAi
aauaucagccuugcagcaauu

SEQ ID NO: 1551 - RNA, 21 nt, RNAi
uuuuauagucggaacgucguu

SEQ ID NO: 1552 - DNA, 21 bp, homo sapiens
tatcagccttgcagcaagaca

SEQ ID NO: 1553 - RNA, 21 nt, RNAi
ucagccuugcagcaagacauu

SEQ ID NO: 1554 - RNA, 21 nt, RNAi
uuagucggaacgucguucugu

SEQ ID NO: 1555 - DNA, 21 bp, homo sapiens
aacgagagattaaccattcca

SEQ ID NO: 1556 - RNA, 21 nt, RNAi
cgagagauuaaccauuccauu

SEQ ID NO: 1557 - RNA, 21 nt, RNAi
uugcucucuaauugguaaggu

SEQ ID NO: 1558 - DNA, 21 bp, homo sapiens
aagtcagccattgagaaatta

SEQ ID NO: 1559 - RNA, 21 nt, RNAi
gucagccauugagaaauuauu

SEQ ID NO: 1560 - RNA, 21 nt, RNAi
uucagucgguaacucuuuaau

SEQ ID NO: 1561 - DNA, 21 bp, homo sapiens
aattaaggactcaggaggtga

SEQ ID NO: 1562 - RNA, 21 nt, RNAi
uuaaggacucaggaggugauu

SEQ ID NO: 1563 - RNA, 21 nt, RNAi
uuaauuccugaguccuccacu

SEQ ID NO: 1564 - DNA, 21 bp, homo sapiens
aacactaacctacctgatgcg

SEQ ID NO: 1565 - RNA, 21 nt, RNAi
cacuaaccuaccugaugcguu

SEQ ID NO: 1566 - RNA, 21 nt, RNAi
uugugauuggauggacuacgc

SEQ ID NO: 1567 - DNA, 21 bp, homo sapiens
aacctacctgatgcggagatt

SEQ ID NO: 1568 - RNA, 21 nt, RNAi
ccuaccugaugcggagauuuu

SEQ ID NO: 1569 - RNA, 21 nt, RNAi
uuggauggacuacgccucuaa

SEQ ID NO: 1570 - DNA, 21 bp, homo sapiens
aaagatgacaaagccaccatt

SEQ ID NO: 1571 - RNA, 21 nt, RNAi
agaugacaaagccaccauuuu

SEQ ID NO: 1572 - RNA, 21 nt, RNAi
uuucuacuguuucggugguaa

SEQ ID NO: 1573 - DNA, 21 bp, homo sapiens
aatggagaagtggattgtagg

SEQ ID NO: 1574 - RNA, 21 nt, RNAi
uggagaaguggauuguagguu

SEQ ID NO: 1575 - RNA, 21 nt, RNAi
uuaccucuucaccuaacaucc

SEQ ID NO: 1576 - DNA, 21 bp, homo sapiens
aagtggattgtaggaatagca

SEQ ID NO: 1577 - RNA, 21 nt, RNAi
guggauuguaggaauagcauu

SEQ ID NO: 1578 - RNA, 21 nt, RNAi
uucaccuaacauccuuaucgu

SEQ ID NO: 1579 - DNA, 21 bp, homo sapiens
aaagcactaaacatgtccatt

SEQ ID NO: 1580 - RNA, 21 nt, RNAi
agcacuaaacauguccauuuu

SEQ ID NO: 1581 - RNA, 21 nt, RNAi
uuucgugauuuguacagguaa

SEQ ID NO: 1582 - DNA, 21 bp, homo sapiens
aagcactaaacatgtccattt

SEQ ID NO: 1583 - RNA, 21 nt, RNAi
gcacuaaacauguccauuuuu

SEQ ID NO: 1584 - RNA, 21 nt, RNAi
uucgugauuuguacagguaaa

SEQ ID NO: 1585 - DNA, 21 bp, homo sapiens
aaagcagtccaacttgccatt

SEQ ID NO: 1586 - RNA, 21 nt, RNAi
agcaguccaacuugccauuuu

SEQ ID NO: 1587 - RNA, 21 nt, RNAi
uuucgucagguugaacgguaa

SEQ ID NO: 1588 - DNA, 21 bp, homo sapiens
aagcagtccaacttgccattc

SEQ ID NO: 1589 - RNA, 21 nt, RNAi
gcaguccaacuugccauucuu

SEQ ID NO: 1590 - RNA, 21 nt, RNAi
uucgucagguugaacgguaag

SEQ ID NO: 1591 - DNA, 21 bp, homo sapiens
aacacttctttacagcgttcc

SEQ ID NO: 1592 - RNA, 21 nt, RNAi
cacuucuuuacagcguuccuu

SEQ ID NO: 1593 - RNA, 21 nt, RNAi
uugugaagaaaugucgcaagg

SEQ ID NO: 1594 - DNA, 21 bp, homo sapiens
aagtatcaacagattacacct

SEQ ID NO: 1595 - RNA, 21 nt, RNAi
guaucaacagauuacaccuuu

SEQ ID NO: 1596 - RNA, 21 nt, RNAi
uucauaguugucuaaugugga

SEQ ID NO: 1597 - DNA, 21 bp, homo sapiens
aacagattacacctgtgaacc

SEQ ID NO: 1598 - RNA, 21 nt, RNAi
cagauuacaccugugaaccuu

SEQ ID NO: 1599 - RNA, 21 nt, RNAi
uugucuaauguggacacuugg

SEQ ID NO: 1600 - DNA, 21 bp, homo sapiens
aagctcgtctcctactcagta

SEQ ID NO: 1601 - RNA, 21 nt, RNAi
gcucgucuccuacucaguauu

SEQ ID NO: 1602 - RNA, 21 nt, RNAi
uucgagcagaggaugagucau

SEQ ID NO: 1603 - DNA, 21 bp, homo sapiens
aagcaggaacaaatatggacg

SEQ ID NO: 1604 - RNA, 21 nt, RNAi
gcaggaacaaauauggacguu

SEQ ID NO: 1605 - RNA, 21 nt, RNAi
uucguccuuguuuauaccugc

SEQ ID NO: 1606 - DNA, 21 bp, homo sapiens
aacaaatatggacgtggtagt

SEQ ID NO: 1607 - RNA, 21 nt, RNAi
caaauauggacgugguaguuu

SEQ ID NO: 1608 - RNA, 21 nt, RNAi
uuguuuauaccugcaccauca

SEQ ID NO: 1609 - DNA, 21 bp, homo sapiens
aaatatggacgtggtagtata

SEQ ID NO: 1610 - RNA, 21 nt, RNAi
auauggacgugguaguauauu

SEQ ID NO: 1611 - RNA, 21 nt, RNAi
uuuauaccugcaccaucauau

SEQ ID NO: 1612 - DNA, 21 bp, homo sapiens
aatatggacgtggtagtatat

SEQ ID NO: 1613 - RNA, 21 nt, RNAi
uauggacgugguaguauauuu

SEQ ID NO: 1614 - RNA, 21 nt, RNAi
uuauaccugcaccaucauaua

SEQ ID NO: 1615 - DNA, 21 bp, homo sapiens
aaagagtcagcattccactcc

SEQ ID NO: 1616 - RNA, 21 nt, RNAi
agagucagcauuccacuccuu

SEQ ID NO: 1617 - RNA, 21 nt, RNAi
uuucucagucguaaggugagg

SEQ ID NO: 1618 - DNA, 21 bp, homo sapiens
aagagtcagcattccactcct

SEQ ID NO: 1619 - RNA, 21 nt, RNAi
gagucagcauuccacuccuuu

SEQ ID NO: 1620 - RNA, 21 nt, RNAi
uucucagucguaaggugagga

SEQ ID NO: 1621 - DNA, 21 bp, homo sapiens
catggacggaagacgatgtgt

SEQ ID NO: 1622 - RNA, 21 nt, RNAi
uggacggaagacgauguguuu

SEQ ID NO: 1623 - RNA, 21 nt, RNAi
uuaccugccuucugcuacaca

SEQ ID NO: 1624 - DNA, 21 bp, homo sapiens
cagcagagatgagtgtatatg

SEQ ID NO: 1625 - RNA, 21 nt, RNAi
gcagagaugaguguauauguu

SEQ ID NO: 1626 - RNA, 21 nt, RNAi
uucgucucuacucacauauac

SEQ ID NO: 1627 - DNA, 21 bp, homo sapiens
cagagatgagtgtatatgcaa

SEQ ID NO: 1628 - RNA, 21 nt, RNAi
gagaugaguguauaugcaauu

SEQ ID NO: 1629 - RNA, 21 nt, RNAi
uucucuacucacauauacguu

SEQ ID NO: 1630 - DNA, 21 bp, homo sapiens
caccactaattaaggactcag

SEQ ID NO: 1631 - RNA, 21 nt, RNAi
ccacuaauuaaggacucaguu

SEQ ID NO: 1632 - RNA, 21 nt, RNAi
uuggugauuaauuccugaguc

SEQ ID NO: 1633 - DNA, 21 bp, homo sapiens
caacactaacctacctgatgc

SEQ ID NO: 1634 - RNA, 21 nt, RNAi
acacuaaccuaccugaugcuu

SEQ ID NO: 1635 - RNA, 21 nt, RNAi
uuugugauuggauggacuacg

SEQ ID NO: 1636 - DNA, 21 bp, homo sapiens
cactaacctacctgatgcgga

SEQ ID NO: 1637 - RNA, 21 nt, RNAi
cuaaccuaccugaugcggauu

SEQ ID NO: 1638 - RNA, 21 nt, RNAi
uugauuggauggacuacgccu

SEQ ID NO: 1639 - DNA, 21 bp, homo sapiens
cactgtcacatatgagagtga

SEQ ID NO: 1640 - RNA, 21 nt, RNAi
cugucacauaugagagugauu

SEQ ID NO: 1641 - RNA, 21 nt, RNAi
uugacaguguauacucucacu

SEQ ID NO: 1642 - DNA, 21 bp, homo sapiens
caggatgaagtgaaagcagtc

SEQ ID NO: 1643 - RNA, 21 nt, RNAi
ggaugaagugaaagcagucuu

SEQ ID NO: 1644 - RNA, 21 nt, RNAi
uuccuacuucacuuucgucag

SEQ ID NO: 1645 - DNA, 21 bp, homo sapiens
cagtggttagatactctgagg

SEQ ID NO: 1646 - RNA, 21 nt, RNAi
gugguuagauacucugagguu

SEQ ID NO: 1647 - RNA, 21 nt, RNAi
uucaccaaucuaugagacucc

SEQ ID NO: 1648 - DNA, 21 bp, homo sapiens
cagattgcatccaacacttct

SEQ ID NO: 1649 - RNA, 21 nt, RNAi
gauugcauccaacacuucuuu

SEQ ID NO: 1650 - RNA, 21 nt, RNAi
uucuaacguagguugugaaga

SEQ ID NO: 1651 - DNA, 21 bp, homo sapiens
catccaacacttctttacagc

SEQ ID NO: 1652 - RNA, 21 nt, RNAi
uccaacacuucuuuacagcuu

SEQ ID NO: 1653 - RNA, 21 nt, RNAi
uuagguugugaagaaaugucg

SEQ ID NO: 1654 - DNA, 21 bp, homo sapiens
caacacttctttacagcgttc

SEQ ID NO: 1655 - RNA, 21 nt, RNAi
acacuucuuuacagcguucuu

SEQ ID NO: 1656 - RNA, 21 nt, RNAi
uuugugaagaaaugucgcaag

SEQ ID NO: 1657 - DNA, 21 bp, homo sapiens
cactttgatggccaggattcc

SEQ ID NO: 1658 - RNA, 21 nt, RNAi
cuuugauggccaggauuccuu

SEQ ID NO: 1659 - RNA, 21 nt, RNAi
uugaaacuaccgguccuaagg

SEQ ID NO: 1660 - DNA, 21 bp, homo sapiens
caacagattacacctgtgaac

SEQ ID NO: 1661 - RNA, 21 nt, RNAi
acagauuacaccugugaacuu

SEQ ID NO: 1662 - RNA, 21 nt, RNAi
uuugucuaauguggacacuug

SEQ ID NO: 1663 - DNA, 21 bp, homo sapiens
cagattacacctgtgaaccag

SEQ ID NO: 1664 - RNA, 21 nt, RNAi
gauuacaccugugaaccaguu

SEQ ID NO: 1665 - RNA, 21 nt, RNAi
uucuaauguggacacuugguc

SEQ ID NO: 1666 - DNA, 21 bp, homo sapiens
cacctgtgaaccagtccagaa

SEQ ID NO: 1667 - RNA, 21 nt, RNAi
ccugugaaccaguccagaauu

SEQ ID NO: 1668 - RNA, 21 nt, RNAi
uuggacacuuggucaggucuu

SEQ ID NO: 1669 - DNA, 21 bp, homo sapiens
cagaagctcgtctcctactca

SEQ ID NO: 1670 - RNA, 21 nt, RNAi
gaagcucgucuccuacucauu

SEQ ID NO: 1671 - RNA, 21 nt, RNAi
uucuucgagcagaggaugagu

SEQ ID NO: 1672 - DNA, 21 bp, homo sapiens
cagtggcaatactgacacctc

SEQ ID NO: 1673 - RNA, 21 nt, RNAi
guggcaauacugacaccucuu

SEQ ID NO: 1674 - RNA, 21 nt, RNAi
uucaccguuaugacuguggag

SEQ ID NO: 1675 - DNA, 21 bp, homo sapiens
caggaacaaatatggacgtgg

SEQ ID NO: 1676 - RNA, 21 nt, RNAi
ggaacaaauauggacgugguu

SEQ ID NO: 1677 - RNA, 21 nt, RNAi
uuccuuguuuauaccugcacc

SEQ ID NO: 1678 - DNA, 21 bp, homo sapiens
caaatatggacgtggtagtat

SEQ ID NO: 1679 - RNA, 21 nt, RNAi
aauauggacgugguaguauuu

SEQ ID NO: 1680 - RNA, 21 nt, RNAi
uuuuauaccugcaccaucaua

SEQ ID NO: 1681 - DNA, 21 bp, homo sapiens
cagtcagcactcaatcctcac

SEQ ID NO: 1682 - RNA, 21 nt, RNAi
gucagcacucaauccucacuu

SEQ ID NO: 1683 - RNA, 21 nt, RNAi
uucagucgugaguuaggagug

SEQ ID NO: 1684 - DNA, 21 bp, homo sapiens
gagtggaggtgcgaaattgag

SEQ ID NO: 1685 - RNA, 21 nt, RNAi
guggaggugcgaaauugaguu

SEQ ID NO: 1686 - RNA, 21 nt, RNAi
uucaccuccacgcuuuaacuc

SEQ ID NO: 1687 - DNA, 21 bp, homo sapiens
gaggtgcgaaattgaggcaac

SEQ ID NO: 1688 - RNA, 21 nt, RNAi
ggugcgaaauugaggcaacuu

SEQ ID NO: 1689 - RNA, 21 nt, RNAi
uuccacgcuuuaacuccguug

SEQ ID NO: 1690 - DNA, 21 bp, homo sapiens
gagattggtgcatggacggaa

SEQ ID NO: 1691 - RNA, 21 nt, RNAi
gauuggugcauggacggaauu

SEQ ID NO: 1692 - RNA, 21 nt, RNAi
uucuaaccacguaccugccuu

SEQ ID NO: 1693 - DNA, 21 bp, homo sapiens
gattggtgcatggacggaaga

SEQ ID NO: 1694 - RNA, 21 nt, RNAi
uuggugcauggacggaagauu

SEQ ID NO: 1695 - RNA, 21 nt, RNAi
uuaaccacguaccugccuucu

SEQ ID NO: 1696 - DNA, 21 bp, homo sapiens
gacggaagacgatgtgtattg

SEQ ID NO: 1697 - RNA, 21 nt, RNAi
cggaagacgauguguauuguu

SEQ ID NO: 1698 - RNA, 21 nt, RNAi
uugccuucugcuacacauaac

SEQ ID NO: 1699 - DNA, 21 bp, homo sapiens
gaagacgatgtgtattgttgg

SEQ ID NO: 1700 - RNA, 21 nt, RNAi
agacgauguguauuguugguu

SEQ ID NO: 1701 - RNA, 21 nt, RNAi
uuucugcuacacauaacaacc

SEQ ID NO: 1702 - DNA, 21 bp, homo sapiens
gagatgagtgtatatgcaagc

SEQ ID NO: 1703 - RNA, 21 nt, RNAi
gaugaguguauaugcaagcuu

SEQ ID NO: 1704 - RNA, 21 nt, RNAi
uucuacucacauauacguucg

SEQ ID NO: 1705 - DNA, 21 bp, homo sapiens
gatgagtgtatatgcaagctt

SEQ ID NO: 1706 - RNA, 21 nt, RNAi
ugaguguauaugcaagcuuuu

SEQ ID NO: 1707 - RNA, 21 nt, RNAi
uuacucacauauacguucgaa

SEQ ID NO: 1708 - DNA, 21 bp, homo sapiens
gagtgtatatgcaagcttgtt

SEQ ID NO: 1709 - RNA, 21 nt, RNAi
guguauaugcaagcuuguuuu

SEQ ID NO: 1710 - RNA, 21 nt, RNAi
uucacauauacguucgaacaa

SEQ ID NO: 1711 - DNA, 21 bp, homo sapiens
gatgtgacattcaacactaac

SEQ ID NO: 1712 - RNA, 21 nt, RNAi
ugugacauucaacacuaacuu

SEQ ID NO: 1713 - RNA, 21 nt, RNAi
uuacacuguaaguugugauug

SEQ ID NO: 1714 - DNA, 21 bp, homo sapiens
gacattcaacactaacctacc

SEQ ID NO: 1715 - RNA, 21 nt, RNAi
cauucaacacuaaccuaccuu

SEQ ID NO: 1716 - RNA, 21 nt, RNAi
uuguaaguugugauuggaugg

SEQ ID NO: 1717 - DNA, 21 bp, homo sapiens
gagaagtggattgtaggaata

SEQ ID NO: 1718 - RNA, 21 nt, RNAi
gaaguggauuguaggaauauu

SEQ ID NO: 1719 - RNA, 21 nt, RNAi
uucuucaccuaacauccuuau

SEQ ID NO: 1720 - DNA, 21 bp, homo sapiens
gaagtggattgtaggaatagc

SEQ ID NO: 1721 - RNA, 21 nt, RNAi
aguggauuguaggaauagcuu

SEQ ID NO: 1722 - RNA, 21 nt, RNAi
uuucaccuaacauccuuaucg

SEQ ID NO: 1723 - DNA, 21 bp, homo sapiens
gaagtgaaagcagtccaactt

SEQ ID NO: 1724 - RNA, 21 nt, RNAi
agugaaagcaguccaacuuuu

SEQ ID NO: 1725 - RNA, 21 nt, RNAi
uuucacuuucgucagguugaa

SEQ ID NO: 1726 - DNA, 21 bp, homo sapiens
gactcaagtgctgattgccag

SEQ ID NO: 1727 - RNA, 21 nt, RNAi
cucaagugcugauugccaguu

SEQ ID NO: 1728 - RNA, 21 nt, RNAi
uugaguucacgacuaacgguc

SEQ ID NO: 1729 - DNA, 21 bp, homo sapiens
gatgcggcagattgcatccaa

SEQ ID NO: 1730 - RNA, 21 nt, RNAi
ugcggcagauugcauccaauu

SEQ ID NO: 1731 - RNA, 21 nt, RNAi
uuacgccgucuaacguagguu

SEQ ID NO: 1732 - DNA, 21 bp, homo sapiens
gattacacctgtgaaccagtc

SEQ ID NO: 1733 - RNA, 21 nt, RNAi
uuacaccugugaaccagucuu

SEQ ID NO: 1734 - RNA, 21 nt, RNAi
uuaauguggacacuuggucag

SEQ ID NO: 1735 - DNA, 21 bp, homo sapiens
gaagctcgtctcctactcagt

SEQ ID NO: 1736 - RNA, 21 nt, RNAi
agcucgucuccuacucaguuu

SEQ ID NO: 1737 - RNA, 21 nt, RNAi
uuucgagcagaggaugaguca

SEQ ID NO: 1738 - DNA, 21 bp, homo sapiens
gaagcaggaacaaatatggac

SEQ ID NO: 1739 - RNA, 21 nt, RNAi
agcaggaacaaauauggacuu

SEQ ID NO: 1740 - RNA, 21 nt, RNAi
uuucguccuuguuuauaccug

SEQ ID NO: 1741 - DNA, 21 bp, homo sapiens
gaacaaatatggacgtggtag

SEQ ID NO: 1742 - RNA, 21 nt, RNAi
acaaauauggacgugguaguu

SEQ ID NO: 1743 - RNA, 21 nt, RNAi
uuuguuuauaccugcaccauc

SEQ ID NO: 1744 - DNA, 21 bp, homo sapiens
gacgtggtagtatatcactca

SEQ ID NO: 1745 - RNA, 21 nt, RNAi
cgugguaguauaucacucauu

SEQ ID NO: 1746 - RNA, 21 nt, RNAi
uugcaccaucauauagugagu

SEQ ID NO: 1747 - DNA, 21 bp, homo sapiens
gaggaagatacagtggaaaga

SEQ ID NO: 1748 - RNA, 21 nt, RNAi
ggaagauacaguggaaagauu

SEQ ID NO: 1749 - RNA, 21 nt, RNAi
uuccuucuaugucaccuuucu

SEQ ID NO: 1750 - DNA, 21 bp, homo sapiens
gaaagagtcagcattccactc

SEQ ID NO: 1751 - RNA, 21 nt, RNAi
aagagucagcauuccacucuu

SEQ ID NO: 1752 - RNA, 21 nt, RNAi
uuuucucagucguaaggugag

SEQ ID NO: 1753 - DNA, 21 bp, homo sapiens
gagtcagcattccactccttc

SEQ ID NO: 1754 - RNA, 21 nt, RNAi
gucagcauuccacuccuucuu

SEQ ID NO: 1755 - RNA, 21 nt, RNAi
uucagucguaaggugaggaag

SEQ ID NO: 1756 - DNA, 21 bp, homo sapiens
gagactgactcaagagccagt

SEQ ID NO: 1757 - RNA, 21 nt, RNAi
gacugacucaagagccaguuu

SEQ ID NO: 1758 - RNA, 21 nt, RNAi
uucugacugaguucucgguca

SEQ ID NO: 1759 - DNA, 21 bp, homo sapiens
tattcctatggtgtggttctc

SEQ ID NO: 1760 - RNA, 21 nt, RNAi
uuccuauggugugguucucuu

SEQ ID NO: 1761 - RNA, 21 nt, RNAi
uuaaggauaccacaccaagag

SEQ ID NO: 1762 - DNA, 21 bp, homo sapiens
tatcattcacttcaagtcagc

SEQ ID NO: 1763 - RNA, 21 nt, RNAi
ucauucacuucaagucagcuu

SEQ ID NO: 1764 - RNA, 21 nt, RNAi
uuaguaagugaaguucagucg

SEQ ID NO: 1765 - DNA, 21 bp, homo sapiens
taattaaggactcaggaggtg

SEQ ID NO: 1766 - RNA, 21 nt, RNAi
auuaaggacucaggagguguu

SEQ ID NO: 1767 - RNA, 21 nt, RNAi
uuuaauuccugaguccuccac

SEQ ID NO: 1768 - DNA, 21 bp, homo sapiens
taacctacctgatgcggagat

SEQ ID NO: 1769 - RNA, 21 nt, RNAi
accuaccugaugcggagauuu

SEQ ID NO: 1770 - RNA, 21 nt, RNAi
uuuggauggacuacgccucua

SEQ ID NO: 1771 - DNA, 21 bp, homo sapiens
taatggagaagtggattgtag

SEQ ID NO: 1772 - RNA, 21 nt, RNAi
auggagaaguggauuguaguu

SEQ ID NO: 1773 - RNA, 21 nt, RNAi
uuuaccucuucaccuaacauc

SEQ ID NO: 1774 - DNA, 21 bp, homo sapiens
tattcaccaattcagatggca

SEQ ID NO: 1775 - RNA, 21 nt, RNAi
uucaccaauucagauggcauu

SEQ ID NO: 1776 - RNA, 21 nt, RNAi
uuaagugguuaagucuaccgu

SEQ ID NO: 1777 - DNA, 21 bp, homo sapiens
taagtatcaacagattacacc

SEQ ID NO: 1778 - RNA, 21 nt, RNAi
aguaucaacagauuacaccuu

SEQ ID NO: 1779 - RNA, 21 nt, RNAi
uuucauaguugucuaaugugg

SEQ ID NO: 1780 - DNA, 21 bp, homo sapiens
tatcaacagattacacctgtg

SEQ ID NO: 1781 - RNA, 21 nt, RNAi
ucaacagauuacaccuguguu

SEQ ID NO: 1782 - RNA, 21 nt, RNAi
uuaguugucuaauguggacac

SEQ ID NO: 1783 - DNA, 21 bp, homo sapiens
tatggacgtggtagtatatca

SEQ ID NO: 1784 - RNA, 21 nt, RNAi
uggacgugguaguauaucauu

SEQ ID NO: 1785 - RNA, 21 nt, RNAi
uuaccugcaccaucauauagu

SEQ ID NO: 1786 - DNA, 21 bp, homo sapiens
tagaggaagatacagtggaaa

SEQ ID NO: 1787 - RNA, 21 nt, RNAi
gaggaagauacaguggaaauu

SEQ ID NO: 1788 - RNA, 21 nt, RNAi
uucuccuucuaugucaccuuu

SEQ ID NO: 1789 - DNA, 21 bp, homo sapiens
aaactgcatttcaggacctgt

SEQ ID NO: 1790 - RNA, 21 nt, RNAi
acugcauuucaggaccuguuu

SEQ ID NO: 1791 - RNA, 21 nt, RNAi
uuugacguaaaguccuggaca

SEQ ID NO: 1792 - DNA, 21 bp, homo sapiens
aactgcatttcaggacctgtt

SEQ ID NO: 1793 - RNA, 21 nt, RNAi
cugcauuucaggaccuguuuu

SEQ ID NO: 1794 - RNA, 21 nt, RNAi
uugacguaaaguccuggacaa

SEQ ID NO: 1795 - DNA, 21 bp, homo sapiens
aaggctacagctccagttgga

SEQ ID NO: 1796 - RNA, 21 nt, RNAi
ggcuacagcuccaguuggauu

SEQ ID NO: 1797 - RNA, 21 nt, RNAi
uuccgaugucgaggucaaccu

SEQ ID NO: 1798 - DNA, 21 bp, homo sapiens
aaacgtgttctcgtgactcag

SEQ ID NO: 1799 - RNA, 21 nt, RNAi
acguguucucgugacucaguu

SEQ ID NO: 1800 - RNA, 21 nt, RNAi
uuugcacaagagcacugaguc

SEQ ID NO: 1801 - DNA, 21 bp, homo sapiens
aacgtgttctcgtgactcagc

SEQ ID NO: 1802 - RNA, 21 nt, RNAi
cguguucucgugacucagcuu

SEQ ID NO: 1803 - RNA, 21 nt, RNAi
uugcacaagagcacugagucg

SEQ ID NO: 1804 - DNA, 21 bp, homo sapiens
aaattccttgtcagaatccat

SEQ ID NO: 1805 - RNA, 21 nt, RNAi
auuccuugucagaauccauuu

SEQ ID NO: 1806 - RNA, 21 nt, RNAi
uuuaaggaacagucuuaggua

SEQ ID NO: 1807 - DNA, 21 bp, homo sapiens
aattccttgtcagaatccatt

SEQ ID NO: 1808 - RNA, 21 nt, RNAi
uuccuugucagaauccauuuu

SEQ ID NO: 1809 - RNA, 21 nt, RNAi
uuaaggaacagucuuagguaa

SEQ ID NO: 1810 - DNA, 21 bp, homo sapiens
aaatagtggccaggctcagcg

SEQ ID NO: 1811 - RNA, 21 nt, RNAi
auaguggccaggcucagcguu

SEQ ID NO: 1812 - RNA, 21 nt, RNAi
uuuaucaccgguccgagucgc

SEQ ID NO: 1813 - DNA, 21 bp, homo sapiens
aatagtggccaggctcagcgg

SEQ ID NO: 1814 - RNA, 21 nt, RNAi
uaguggccaggcucagcgguu

SEQ ID NO: 1815 - RNA, 21 nt, RNAi
uuaucaccgguccgagucgcc

SEQ ID NO: 1816 - DNA, 21 bp, homo sapiens
aaagcttgtctccagtcacaa

SEQ ID NO: 1817 - RNA, 21 nt, RNAi
agcuugucuccagucacaauu

SEQ ID NO: 1818 - RNA, 21 nt, RNAi
uuucgaacagaggucaguguu

SEQ ID NO: 1819 - DNA, 21 bp, homo sapiens
aagcttgtctccagtcacaag

SEQ ID NO: 1820 - RNA, 21 nt, RNAi
gcuugucuccagucacaaguu

SEQ ID NO: 1821 - RNA, 21 nt, RNAi
uucgaacagaggucaguguuc

SEQ ID NO: 1822 - DNA, 21 bp, homo sapiens
aagccggttcagaatcagaag

SEQ ID NO: 1823 - RNA, 21 nt, RNAi
gccgguucagaaucagaaguu

SEQ ID NO: 1824 - RNA, 21 nt, RNAi
uucggccaagucuuagucuuc

SEQ ID NO: 1825 - DNA, 21 bp, homo sapiens
aatcagaagcagaagcaattg

SEQ ID NO: 1826 - RNA, 21 nt, RNAi
ucagaagcagaagcaauuguu

SEQ ID NO: 1827 - RNA, 21 nt, RNAi
uuagucuucgucuucguuaac

SEQ ID NO: 1828 - DNA, 21 bp, homo sapiens
aagcagaagcaattgcaggca

SEQ ID NO: 1829 - RNA, 21 nt, RNAi
gcagaagcaauugcaggcauu

SEQ ID NO: 1830 - RNA, 21 nt, RNAi
uucgucuucguuaacguccgu

SEQ ID NO: 1831 - DNA, 21 bp, homo sapiens
aagcaattgcaggcaaccagt

SEQ ID NO: 1832 - RNA, 21 nt, RNAi
gcaauugcaggcaaccaguuu

SEQ ID NO: 1833 - RNA, 21 nt, RNAi
uucguuaacguccguugguca

SEQ ID NO: 1834 - DNA, 21 bp, homo sapiens
aattgcaggcaaccagtgtac

SEQ ID NO: 1835 - RNA, 21 nt, RNAi
uugcaggcaaccaguguacuu

SEQ ID NO: 1836 - RNA, 21 nt, RNAi
uuaacguccguuggucacaug

SEQ ID NO: 1837 - DNA, 21 bp, homo sapiens
aaccagtgtacctcatcctgt

SEQ ID NO: 1838 - RNA, 21 nt, RNAi
ccaguguaccucauccuguuu

SEQ ID NO: 1839 - RNA, 21 nt, RNAi
uuggucacauggaguaggaca

SEQ ID NO: 1840 - DNA, 21 bp, homo sapiens
aaataatcctgaggaggaact

SEQ ID NO: 1841 - RNA, 21 nt, RNAi
auaauccugaggaggaacuuu

SEQ ID NO: 1842 - RNA, 21 nt, RNAi
uuuauuaggacuccuccuuga

SEQ ID NO: 1843 - DNA, 21 bp, homo sapiens
aataatcctgaggaggaactg

SEQ ID NO: 1844 - RNA, 21 nt, RNAi
uaauccugaggaggaacuguu

SEQ ID NO: 1845 - RNA, 21 nt, RNAi
uuauuaggacuccuccuugac

SEQ ID NO: 1846 - DNA, 21 bp, homo sapiens
aatcctgaggaggaactggca

SEQ ID NO: 1847 - RNA, 21 nt, RNAi
uccugaggaggaacuggcauu

SEQ ID NO: 1848 - RNA, 21 nt, RNAi
uuaggacuccuccuugaccgu

SEQ ID NO: 1849 - DNA, 21 bp, homo sapiens
aagactttgaaattggtcgcc

SEQ ID NO: 1850 - RNA, 21 nt, RNAi
gacuuugaaauuggucgccuu

SEQ ID NO: 1851 - RNA, 21 nt, RNAi
uucugaaacuuuaaccagcgg

SEQ ID NO: 1852 - DNA, 21 bp, homo sapiens
aagcaaagcaagtttattctg

SEQ ID NO: 1853 - RNA, 21 nt, RNAi
gcaaagcaaguuuauucuguu

SEQ ID NO: 1854 - RNA, 21 nt, RNAi
uucguuucguucaaauaagac

SEQ ID NO: 1855 - DNA, 21 bp, homo sapiens
aaagcaagtttattctggctc

SEQ ID NO: 1856 - RNA, 21 nt, RNAi
agcaaguuuauucuggcucuu

SEQ ID NO: 1857 - RNA, 21 nt, RNAi
uuucguucaaauaagaccgag

SEQ ID NO: 1858 - DNA, 21 bp, homo sapiens
aagcaagtttattctggctct

SEQ ID NO: 1859 - RNA, 21 nt, RNAi
gcaaguuuauucuggcucuuu

SEQ ID NO: 1860 - RNA, 21 nt, RNAi
uucguucaaauaagaccgaga

SEQ ID NO: 1861 - DNA, 21 bp, homo sapiens
aagtgttatttaaagctcagc

SEQ ID NO: 1862 - RNA, 21 nt, RNAi
guguuauuuaaagcucagcuu

SEQ ID NO: 1863 - RNA, 21 nt, RNAi
uucacaauaaauuucgagucg

SEQ ID NO: 1864 - DNA, 21 bp, homo sapiens
aaagctcagctggagaaagcc

SEQ ID NO: 1865 - RNA, 21 nt, RNAi
agcucagcuggagaaagccuu

SEQ ID NO: 1866 - RNA, 21 nt, RNAi
uuucgagucgaccucuuucgg

SEQ ID NO: 1867 - DNA, 21 bp, homo sapiens
aagctcagctggagaaagccg

SEQ ID NO: 1868 - RNA, 21 nt, RNAi
gcucagcuggagaaagccguu

SEQ ID NO: 1869 - RNA, 21 nt, RNAi
uucgagucgaccucuuucggc

SEQ ID NO: 1870 - DNA, 21 bp, homo sapiens
aaagccggagtggagcatcag

SEQ ID NO: 1871 - RNA, 21 nt, RNAi
agccggaguggagcaucaguu

SEQ ID NO: 1872 - RNA, 21 nt, RNAi
uuucggccucaccucguaguc

SEQ ID NO: 1873 - DNA, 21 bp, homo sapiens
aagccggagtggagcatcagc

SEQ ID NO: 1874 - RNA, 21 nt, RNAi
gccggaguggagcaucagcuu

SEQ ID NO: 1875 - RNA, 21 nt, RNAi
uucggccucaccucguagucg

SEQ ID NO: 1876 - DNA, 21 bp, homo sapiens
aagagaagtagaaatacagtc

SEQ ID NO: 1877 - RNA, 21 nt, RNAi
gagaaguagaaauacagucuu

SEQ ID NO: 1878 - RNA, 21 nt, RNAi
uucucuucaucuuuaugucag

SEQ ID NO: 1879 - DNA, 21 bp, homo sapiens
aattctggaatatgcaccact

SEQ ID NO: 1880 - RNA, 21 nt, RNAi
uucuggaauaugcaccacuuu

SEQ ID NO: 1881 - RNA, 21 nt, RNAi
uuaagaccuuauacgugguga

SEQ ID NO: 1882 - DNA, 21 bp, homo sapiens
aatatgcaccacttggaacag

SEQ ID NO: 1883 - RNA, 21 nt, RNAi
uaugcaccacuuggaacaguu

SEQ ID NO: 1884 - RNA, 21 nt, RNAi
uuauacguggugaaccuuguc

SEQ ID NO: 1885 - DNA, 21 bp, homo sapiens
aactttcaaagtttgatgagc

SEQ ID NO: 1886 - RNA, 21 nt, RNAi
cuuucaaaguuugaugagcuu

SEQ ID NO: 1887 - RNA, 21 nt, RNAi
uugaaaguuucaaacuacucg

SEQ ID NO: 1888 - DNA, 21 bp, homo sapiens
aaagtttgatgagcagagaac

SEQ ID NO: 1889 - RNA, 21 nt, RNAi
aguuugaugagcagagaacuu

SEQ ID NO: 1890 - RNA, 21 nt, RNAi
uuucaaacuacucgucucuug

SEQ ID NO: 1891 - DNA, 21 bp, homo sapiens
aagtttgatgagcagagaact

SEQ ID NO: 1892 - RNA, 21 nt, RNAi
guuugaugagcagagaacuuu

SEQ ID NO: 1893 - RNA, 21 nt, RNAi
uucaaacuacucgucucuuga

SEQ ID NO: 1894 - DNA, 21 bp, homo sapiens
aagagagttattcatagagac

SEQ ID NO: 1895 - RNA, 21 nt, RNAi
gagaguuauucauagagacuu

SEQ ID NO: 1896 - RNA, 21 nt, RNAi
uucucucaauaaguaucucug

SEQ ID NO: 1897 - DNA, 21 bp, homo sapiens
aagccagagaacttacttctt

SEQ ID NO: 1898 - RNA, 21 nt, RNAi
gccagagaacuuacuucuuuu

SEQ ID NO: 1899 - RNA, 21 nt, RNAi
uucggucucuugaaugaagaa

SEQ ID NO: 1900 - DNA, 21 bp, homo sapiens
aacttacttcttggatcagct

SEQ ID NO: 1901 - RNA, 21 nt, RNAi
cuuacuucuuggaucagcuuu

SEQ ID NO: 1902 - RNA, 21 nt, RNAi
uugaaugaagaaccuagucga

SEQ ID NO: 1903 - DNA, 21 bp, homo sapiens
aaatgattgaaggtcggatgc

SEQ ID NO: 1904 - RNA, 21 nt, RNAi
augauugaaggucggaugcuu

SEQ ID NO: 1905 - RNA, 21 nt, RNAi
uuuacuaacuuccagccuacg

SEQ ID NO: 1906 - DNA, 21 bp, homo sapiens
aatgattgaaggtcggatgca

SEQ ID NO: 1907 - RNA, 21 nt, RNAi
ugauugaaggucggaugcauu

SEQ ID NO: 1908 - RNA, 21 nt, RNAi
uuacuaacuuccagccuacgu

SEQ ID NO: 1909 - DNA, 21 bp, homo sapiens
aaggtcggatgcatgatgaga

SEQ ID NO: 1910 - RNA, 21 nt, RNAi
ggucggaugcaugaugagauu

SEQ ID NO: 1911 - RNA, 21 nt, RNAi
uuccagccuacguacuacucu

SEQ ID NO: 1912 - DNA, 21 bp, homo sapiens
aaggtggatctctggagcctt

SEQ ID NO: 1913 - RNA, 21 nt, RNAi
gguggaucucuggagccuuuu

SEQ ID NO: 1914 - RNA, 21 nt, RNAi
uuccaccuagagaccucggaa

SEQ ID NO: 1915 - DNA, 21 bp, homo sapiens
aaacacataccaagagaccta

SEQ ID NO: 1916 - RNA, 21 nt, RNAi
acacauaccaagagaccuauu

SEQ ID NO: 1917 - RNA, 21 nt, RNAi
uuuguguaugguucucuggau

SEQ ID NO: 1918 - DNA, 21 bp, homo sapiens
aacacataccaagagacctac

SEQ ID NO: 1919 - RNA, 21 nt, RNAi
cacauaccaagagaccuacuu

SEQ ID NO: 1920 - RNA, 21 nt, RNAi
uuguguaugguucucuggaug

SEQ ID NO: 1921 - DNA, 21 bp, homo sapiens
aagactgttgaagcataatcc

SEQ ID NO: 1922 - RNA, 21 nt, RNAi
gacuguugaagcauaauccuu

SEQ ID NO: 1923 - RNA, 21 nt, RNAi
uucugacaacuucguauuagg

SEQ ID NO: 1924 - DNA, 21 bp, homo sapiens
aatgctcagagaagtacttga

SEQ ID NO: 1925 - RNA, 21 nt, RNAi
ugcucagagaaguacuugauu

SEQ ID NO: 1926 - RNA, 21 nt, RNAi
uuacgagucucuucaugaacu

SEQ ID NO: 1927 - DNA, 21 bp, homo sapiens
aaacaaagaatcagctagcaa

SEQ ID NO: 1928 - RNA, 21 nt, RNAi
acaaagaaucagcuagcaauu

SEQ ID NO: 1929 - RNA, 21 nt, RNAi
uuuguuucuuagucgaucguu

SEQ ID NO: 1930 - DNA, 21 bp, homo sapiens
aacaaagaatcagctagcaaa

SEQ ID NO: 1931 - RNA, 21 nt, RNAi
caaagaaucagcuagcaaauu

SEQ ID NO: 1932 - RNA, 21 nt, RNAi
uuguuucuuagucgaucguuu

SEQ ID NO: 1933 - DNA, 21 bp, homo sapiens
aaagaatcagctagcaaacag

SEQ ID NO: 1934 - RNA, 21 nt, RNAi
agaaucagcuagcaaacaguu

SEQ ID NO: 1935 - RNA, 21 nt, RNAi
uuucuuagucgaucguuuguc

SEQ ID NO: 1936 - DNA, 21 bp, homo sapiens
aagaatcagctagcaaacagt

SEQ ID NO: 1937 - RNA, 21 nt, RNAi
gaaucagcuagcaaacaguuu

SEQ ID NO: 1938 - RNA, 21 nt, RNAi
uucuuagucgaucguuuguca

SEQ ID NO: 1939 - DNA, 21 bp, homo sapiens
aatcagctagcaaacagtctt

SEQ ID NO: 1940 - RNA, 21 nt, RNAi
ucagcuagcaaacagucuuuu

SEQ ID NO: 1941 - RNA, 21 nt, RNAi
uuagucgaucguuugucagaa

SEQ ID NO: 1942 - DNA, 21 bp, homo sapiens
aaacagtcttaggaatcgtgc

SEQ ID NO: 1943 - RNA, 21 nt, RNAi
acagucuuaggaaucgugcuu

SEQ ID NO: 1944 - RNA, 21 nt, RNAi
uuugucagaauccuuagcacg

SEQ ID NO: 1945 - DNA, 21 bp, homo sapiens
aacagtcttaggaatcgtgca

SEQ ID NO: 1946 - RNA, 21 nt, RNAi
cagucuuaggaaucgugcauu

SEQ ID NO: 1947 - RNA, 21 nt, RNAi
uugucagaauccuuagcacgu

SEQ ID NO: 1948 - DNA, 21 bp, homo sapiens
aacctgacaggaacatgctac

SEQ ID NO: 1949 - RNA, 21 nt, RNAi
ccugacaggaacaugcuacuu

SEQ ID NO: 1950 - RNA, 21 nt, RNAi
uuggacuguccuuguacgaug

SEQ ID NO: 1951 - DNA, 21 bp, homo sapiens
aatctagaacgctacacaaga

SEQ ID NO: 1952 - RNA, 21 nt, RNAi
ucuagaacgcuacacaagauu

SEQ ID NO: 1953 - RNA, 21 nt, RNAi
uuagaucuugcgauguguucu

SEQ ID NO: 1954 - DNA, 21 bp, homo sapiens
aaagctccacatcaataaaca

SEQ ID NO: 1955 - RNA, 21 nt, RNAi
agcuccacaucaauaaacauu

SEQ ID NO: 1956 - RNA, 21 nt, RNAi
uuucgagguguaguuauuugu

SEQ ID NO: 1957 - DNA, 21 bp, homo sapiens
aagctccacatcaataaacat

SEQ ID NO: 1958 - RNA, 21 nt, RNAi
gcuccacaucaauaaacauuu

SEQ ID NO: 1959 - RNA, 21 nt, RNAi
uucgagguguaguuauuugua

SEQ ID NO: 1960 - DNA, 21 bp, homo sapiens
aataaacatgacactctgaag

SEQ ID NO: 1961 - RNA, 21 nt, RNAi
uaaacaugacacucugaaguu

SEQ ID NO: 1962 - RNA, 21 nt, RNAi
uuauuuguacugugagacuuc

SEQ ID NO: 1963 - DNA, 21 bp, homo sapiens
aaacatgacactctgaagtga

SEQ ID NO: 1964 - RNA, 21 nt, RNAi
acaugacacucugaagugauu

SEQ ID NO: 1965 - RNA, 21 nt, RNAi
uuuguacugugagacuucacu

SEQ ID NO: 1966 - DNA, 21 bp, homo sapiens
aacatgacactctgaagtgaa

SEQ ID NO: 1967 - RNA, 21 nt, RNAi
caugacacucugaagugaauu

SEQ ID NO: 1968 - RNA, 21 nt, RNAi
uuguacugugagacuucacuu

SEQ ID NO: 1969 - DNA, 21 bp, homo sapiens
aagtgaaagtagccacgagaa

SEQ ID NO: 1970 - RNA, 21 nt, RNAi
gugaaaguagccacgagaauu

SEQ ID NO: 1971 - RNA, 21 nt, RNAi
uucacuuucaucggugcucuu

SEQ ID NO: 1972 - DNA, 21 bp, homo sapiens
aaagtagccacgagaattgtg

SEQ ID NO: 1973 - RNA, 21 nt, RNAi
aguagccacgagaauuguguu

SEQ ID NO: 1974 - RNA, 21 nt, RNAi
uuucaucggugcucuuaacac

SEQ ID NO: 1975 - DNA, 21 bp, homo sapiens
aagtagccacgagaattgtgc

SEQ ID NO: 1976 - RNA, 21 nt, RNAi
guagccacgagaauugugcuu

SEQ ID NO: 1977 - RNA, 21 nt, RNAi
uucaucggugcucuuaacacg

SEQ ID NO: 1978 - DNA, 21 bp, homo sapiens
aattgtgctacttatactggt

SEQ ID NO: 1979 - RNA, 21 nt, RNAi
uugugcuacuuauacugguuu

SEQ ID NO: 1980 - RNA, 21 nt, RNAi
uuaacacgaugaauaugacca

SEQ ID NO: 1981 - DNA, 21 bp, homo sapiens
aatctggaggcaaggttcgac

SEQ ID NO: 1982 - RNA, 21 nt, RNAi
ucuggaggcaagguucgacuu

SEQ ID NO: 1983 - RNA, 21 nt, RNAi
uuagaccuccguuccaagcug

SEQ ID NO: 1984 - DNA, 21 bp, homo sapiens
aaatccagagcctggctgtgg

SEQ ID NO: 1985 - RNA, 21 nt, RNAi
auccagagccuggcugugguu

SEQ ID NO: 1986 - RNA, 21 nt, RNAi
uuuaggucucggaccgacacc

SEQ ID NO: 1987 - DNA, 21 bp, homo sapiens
aaggagctgtgcaataacctt

SEQ ID NO: 1988 - RNA, 21 nt, RNAi
ggagcugugcaauaaccuuuu

SEQ ID NO: 1989 - RNA, 21 nt, RNAi
uuccucgacacguuauuggaa

SEQ ID NO: 1990 - DNA, 21 bp, homo sapiens
aataaccttcctagtacctga

SEQ ID NO: 1991 - RNA, 21 nt, RNAi
uaaccuuccuaguaccugauu

SEQ ID NO: 1992 - RNA, 21 nt, RNAi
uuauuggaaggaucauggacu

SEQ ID NO: 1993 - DNA, 21 bp, homo sapiens
aaccttcctagtacctgagtg

SEQ ID NO: 1994 - RNA, 21 nt, RNAi
ccuuccuaguaccugaguguu

SEQ ID NO: 1995 - RNA, 21 nt, RNAi
uuggaaggaucauggacucac

SEQ ID NO: 1996 - DNA, 21 bp, homo sapiens
aagcctggtaaagctgttgga

SEQ ID NO: 1997 - RNA, 21 nt, RNAi
gccugguaaagcuguuggauu

SEQ ID NO: 1998 - RNA, 21 nt, RNAi
uucggaccauuucgacaaccu

SEQ ID NO: 1999 - DNA, 21 bp, homo sapiens
aaagctgttggaatgagtatg

SEQ ID NO: 2000 - RNA, 21 nt, RNAi
agcuguuggaaugaguauguu

SEQ ID NO: 2001 - RNA, 21 nt, RNAi
uuucgacaaccuuacucauac

SEQ ID NO: 2002 - DNA, 21 bp, homo sapiens
aagctgttggaatgagtatgt

SEQ ID NO: 2003 - RNA, 21 nt, RNAi
gcuguuggaaugaguauguuu

SEQ ID NO: 2004 - RNA, 21 nt, RNAi
uucgacaaccuuacucauaca

SEQ ID NO: 2005 - DNA, 21 bp, homo sapiens
aatgctgtgtgtctgtccggc

SEQ ID NO: 2006 - RNA, 21 nt, RNAi
ugcugugugucuguccggcuu

SEQ ID NO: 2007 - RNA, 21 nt, RNAi
uuacgacacacagacaggccg

SEQ ID NO: 2008 - DNA, 21 bp, homo sapiens
aaataggaacacgtgctctac

SEQ ID NO: 2009 - RNA, 21 nt, RNAi
auaggaacacgugcucuacuu

SEQ ID NO: 2010 - RNA, 21 nt, RNAi
uuuauccuugugcacgagaug

SEQ ID NO: 2011 - DNA, 21 bp, homo sapiens
aataggaacacgtgctctacc

SEQ ID NO: 2012 - RNA, 21 nt, RNAi
uaggaacacgugcucuaccuu

SEQ ID NO: 2013 - RNA, 21 nt, RNAi
uuauccuugugcacgagaugg

SEQ ID NO: 2014 - DNA, 21 bp, homo sapiens
aacacgtgctctacctccatt

SEQ ID NO: 2015 - RNA, 21 nt, RNAi
cacgugcucuaccuccauuuu

SEQ ID NO: 2016 - RNA, 21 nt, RNAi
uugugcacgagauggagguaa

SEQ ID NO: 2017 - DNA, 21 bp, homo sapiens
aagaggccatgtgtctcagag

SEQ ID NO: 2018 - RNA, 21 nt, RNAi
gaggccaugugucucagaguu

SEQ ID NO: 2019 - RNA, 21 nt, RNAi
uucuccgguacacagagucuc

SEQ ID NO: 2020 - DNA, 21 bp, homo sapiens
aaacattggagtcatagcatg

SEQ ID NO: 2021 - RNA, 21 nt, RNAi
acauuggagucauagcauguu

SEQ ID NO: 2022 - RNA, 21 nt, RNAi
uuuguaaccucaguaucguac

SEQ ID NO: 2023 - DNA, 21 bp, homo sapiens
aacattggagtcatagcatgt

SEQ ID NO: 2024 - RNA, 21 nt, RNAi
cauuggagucauagcauguuu

SEQ ID NO: 2025 - RNA, 21 nt, RNAi
uuguaaccucaguaucguaca

SEQ ID NO: 2026 - DNA, 21 bp, homo sapiens
cagctagaggcatcatggacc

SEQ ID NO: 2027 - RNA, 21 nt, RNAi
gcuagaggcaucauggaccuu

SEQ ID NO: 2028 - RNA, 21 nt, RNAi
uucgaucuccguaguaccugg

SEQ ID NO: 2029 - DNA, 21 bp, homo sapiens
catcatggaccgatctaaaga

SEQ ID NO: 2030 - RNA, 21 nt, RNAi
ucauggaccgaucuaaagauu

SEQ ID NO: 2031 - RNA, 21 nt, RNAi
uuaguaccuggcuagauuucu

SEQ ID NO: 2032 - DNA, 21 bp, homo sapiens
catttcaggacctgttaaggc

SEQ ID NO: 2033 - RNA, 21 nt, RNAi
uuucaggaccuguuaaggcuu

SEQ ID NO: 2034 - RNA, 21 nt, RNAi
uuaaaguccuggacaauuccg

SEQ ID NO: 2035 - DNA, 21 bp, homo sapiens
caggacctgttaaggctacag

SEQ ID NO: 2036 - RNA, 21 nt, RNAi
ggaccuguuaaggcuacaguu

SEQ ID NO: 2037 - RNA, 21 nt, RNAi
uuccuggacaauuccgauguc

SEQ ID NO: 2038 - DNA, 21 bp, homo sapiens
cagctccagttggaggtccaa

SEQ ID NO: 2039 - RNA, 21 nt, RNAi
gcuccaguuggagguccaauu

SEQ ID NO: 2040 - RNA, 21 nt, RNAi
uucgaggucaaccuccagguu

SEQ ID NO: 2041 - DNA, 21 bp, homo sapiens
cagcaaattccttgtcagaat

SEQ ID NO: 2042 - RNA, 21 nt, RNAi
gcaaauuccuugucagaauuu

SEQ ID NO: 2043 - RNA, 21 nt, RNAi
uucguuuaaggaacagucuua

SEQ ID NO: 2044 - DNA, 21 bp, homo sapiens
caaattccttgtcagaatcca

SEQ ID NO: 2045 - RNA, 21 nt, RNAi
aauuccuugucagaauccauu

SEQ ID NO: 2046 - RNA, 21 nt, RNAi
uuuuaaggaacagucuuaggu

SEQ ID NO: 2047 - DNA, 21 bp, homo sapiens
cagaatccattacctgtaaat

SEQ ID NO: 2048 - RNA, 21 nt, RNAi
gaauccauuaccuguaaauuu

SEQ ID NO: 2049 - RNA, 21 nt, RNAi
uucuuagguaauggacauuua

SEQ ID NO: 2050 - DNA, 21 bp, homo sapiens
cattacctgtaaatagtggcc

SEQ ID NO: 2051 - RNA, 21 nt, RNAi
uuaccuguaaauaguggccuu

SEQ ID NO: 2052 - RNA, 21 nt, RNAi
uuaauggacauuuaucaccgg

SEQ ID NO: 2053 - DNA, 21 bp, homo sapiens
cagcgcgttcctttgcaagca

SEQ ID NO: 2054 - RNA, 21 nt, RNAi
gcgcguuccuuugcaagcauu

SEQ ID NO: 2055 - RNA, 21 nt, RNAi
uucgcgcaaggaaacguucgu

SEQ ID NO: 2056 - DNA, 21 bp, homo sapiens
cagtcacaagccggttcagaa

SEQ ID NO: 2057 - RNA, 21 nt, RNAi
gucacaagccgguucagaauu

SEQ ID NO: 2058 - RNA, 21 nt, RNAi
uucaguguucggccaagucuu

SEQ ID NO: 2059 - DNA, 21 bp, homo sapiens
cacaagccggttcagaatcag

SEQ ID NO: 2060 - RNA, 21 nt, RNAi
caagccgguucagaaucaguu

SEQ ID NO: 2061 - RNA, 21 nt, RNAi
uuguucggccaagucuuaguc

SEQ ID NO: 2062 - DNA, 21 bp, homo sapiens
caagccggttcagaatcagaa

SEQ ID NO: 2063 - RNA, 21 nt, RNAi
agccgguucagaaucagaauu

SEQ ID NO: 2064 - RNA, 21 nt, RNAi
uuucggccaagucuuagucuu

SEQ ID NO: 2065 - DNA, 21 bp, homo sapiens
cagaatcagaagcagaagcaa

SEQ ID NO: 2066 - RNA, 21 nt, RNAi
gaaucagaagcagaagcaauu

SEQ ID NO: 2067 - RNA, 21 nt, RNAi
uucuuagucuucgucuucguu

SEQ ID NO: 2068 - DNA, 21 bp, homo sapiens
cagaagcagaagcaattgcag

SEQ ID NO: 2069 - RNA, 21 nt, RNAi
gaagcagaagcaauugcaguu

SEQ ID NO: 2070 - RNA, 21 nt, RNAi
uucuucgucuucguuaacguc

SEQ ID NO: 2071 - DNA, 21 bp, homo sapiens
cagaagcaattgcaggcaacc

SEQ ID NO: 2072 - RNA, 21 nt, RNAi
gaagcaauugcaggcaaccuu

SEQ ID NO: 2073 - RNA, 21 nt, RNAi
uucuucguuaacguccguugg

SEQ ID NO: 2074 - DNA, 21 bp, homo sapiens
caattgcaggcaaccagtgta

SEQ ID NO: 2075 - RNA, 21 nt, RNAi
auugcaggcaaccaguguauu

SEQ ID NO: 2076 - RNA, 21 nt, RNAi
uuuaacguccguuggucacau

SEQ ID NO: 2077 - DNA, 21 bp, homo sapiens
caggcaaccagtgtacctcat

SEQ ID NO: 2078 - RNA, 21 nt, RNAi
ggcaaccaguguaccucauuu

SEQ ID NO: 2079 - RNA, 21 nt, RNAi
uuccguuggucacauggagua

SEQ ID NO: 2080 - DNA, 21 bp, homo sapiens
caaccagtgtacctcatcctg

SEQ ID NO: 2081 - RNA, 21 nt, RNAi
accaguguaccucauccuguu

SEQ ID NO: 2082 - RNA, 21 nt, RNAi
uuuggucacauggaguaggac

SEQ ID NO: 2083 - DNA, 21 bp, homo sapiens
cagtgtacctcatcctgtctc

SEQ ID NO: 2084 - RNA, 21 nt, RNAi
guguaccucauccugucucuu

SEQ ID NO: 2085 - RNA, 21 nt, RNAi
uucacauggaguaggacagag

SEQ ID NO: 2086 - DNA, 21 bp, homo sapiens
catcctgtctccaggccactg

SEQ ID NO: 2087 - RNA, 21 nt, RNAi
uccugucuccaggccacuguu

SEQ ID NO: 2088 - RNA, 21 nt, RNAi
uuaggacagagguccggugac

SEQ ID NO: 2089 - DNA, 21 bp, homo sapiens
caaagcaagtttattctggct

SEQ ID NO: 2090 - RNA, 21 nt, RNAi
aagcaaguuuauucuggcuuu

SEQ ID NO: 2091 - RNA, 21 nt, RNAi
uuuucguucaaauaagaccga

SEQ ID NO: 2092 - DNA, 21 bp, homo sapiens
caagtttattctggctcttaa

SEQ ID NO: 2093 - RNA, 21 nt, RNAi
aguuuauucuggcucuuaauu

SEQ ID NO: 2094 - RNA, 21 nt, RNAi
uuucaaauaagaccgagaauu

SEQ ID NO: 2095 - DNA, 21 bp, homo sapiens
cagctggagaaagccggagtg

SEQ ID NO: 2096 - RNA, 21 nt, RNAi
gcuggagaaagccggaguguu

SEQ ID NO: 2097 - RNA, 21 nt, RNAi
uucgaccucuuucggccucac

SEQ ID NO: 2098 - DNA, 21 bp, homo sapiens
catcagctcagaagagaagta

SEQ ID NO: 2099 - RNA, 21 nt, RNAi
ucagcucagaagagaaguauu

SEQ ID NO: 2100 - RNA, 21 nt, RNAi
uuagucgagucuucucuucau

SEQ ID NO: 2101 - DNA, 21 bp, homo sapiens
cagctcagaagagaagtagaa

SEQ ID NO: 2102 - RNA, 21 nt, RNAi
gcucagaagagaaguagaauu

SEQ ID NO: 2103 - RNA, 21 nt, RNAi
uucgagucuucucuucaucuu

SEQ ID NO: 2104 - DNA, 21 bp, homo sapiens
cagaagagaagtagaaataca

SEQ ID NO: 2105 - RNA, 21 nt, RNAi
gaagagaaguagaaauacauu

SEQ ID NO: 2106 - RNA, 21 nt, RNAi
uucuucucuucaucuuuaugu

SEQ ID NO: 2107 - DNA, 21 bp, homo sapiens
caccttcggcatcctaatatt

SEQ ID NO: 2108 - RNA, 21 nt, RNAi
ccuucggcauccuaauauuuu

SEQ ID NO: 2109 - RNA, 21 nt, RNAi
uuggaagccguaggauuauaa

SEQ ID NO: 2110 - DNA, 21 bp, homo sapiens
catcctaatattcttagactg

SEQ ID NO: 2111 - RNA, 21 nt, RNAi
uccuaauauucuuagacuguu

SEQ ID NO: 2112 - RNA, 21 nt, RNAi
uuaggauuauaagaaucugac

SEQ ID NO: 2113 - DNA, 21 bp, homo sapiens
catgatgctaccagagtctac

SEQ ID NO: 2114 - RNA, 21 nt, RNAi
ugaugcuaccagagucuacuu

SEQ ID NO: 2115 - RNA, 21 nt, RNAi
uuacuacgauggucucagaug

SEQ ID NO: 2116 - DNA, 21 bp, homo sapiens
cagagtctacctaattctgga

SEQ ID NO: 2117 - RNA, 21 nt, RNAi
gagucuaccuaauucuggauu

SEQ ID NO: 2118 - RNA, 21 nt, RNAi
uucucagauggauuaagaccu

SEQ ID NO: 2119 - DNA, 21 bp, homo sapiens
caccacttggaacagtttata

SEQ ID NO: 2120 - RNA, 21 nt, RNAi
ccacuuggaacaguuuauauu

SEQ ID NO: 2121 - RNA, 21 nt, RNAi
uuggugaaccuugucaaauau

SEQ ID NO: 2122 - DNA, 21 bp, homo sapiens
cacttggaacagtttatagag

SEQ ID NO: 2123 - RNA, 21 nt, RNAi
cuuggaacaguuuauagaguu

SEQ ID NO: 2124 - RNA, 21 nt, RNAi
uugaaccuugucaaauaucuc

SEQ ID NO: 2125 - DNA, 21 bp, homo sapiens
cagtttatagagaacttcaga

SEQ ID NO: 2126 - RNA, 21 nt, RNAi
guuuauagagaacuucagauu

SEQ ID NO: 2127 - RNA, 21 nt, RNAi
uucaaauaucucuugaagucu

SEQ ID NO: 2128 - DNA, 21 bp, homo sapiens
caaagtttgatgagcagagaa

SEQ ID NO: 2129 - RNA, 21 nt, RNAi
aaguuugaugagcagagaauu

SEQ ID NO: 2130 - RNA, 21 nt, RNAi
uuuucaaacuacucgucucuu

SEQ ID NO: 2131 - DNA, 21 bp, homo sapiens
cagagaactgctacttatata

SEQ ID NO: 2132 - RNA, 21 nt, RNAi
gagaacugcuacuuauauauu

SEQ ID NO: 2133 - RNA, 21 nt, RNAi
uucucuugacgaugaauauau

SEQ ID NO: 2134 - DNA, 21 bp, homo sapiens
cattcgaagagagttattcat

SEQ ID NO: 2135 - RNA, 21 nt, RNAi
uucgaagagaguuauucauuu

SEQ ID NO: 2136 - RNA, 21 nt, RNAi
uuaagcuucucucaauaagua

SEQ ID NO: 2137 - DNA, 21 bp, homo sapiens
catagagacattaagccagag

SEQ ID NO: 2138 - RNA, 21 nt, RNAi
uagagacauuaagccagaguu

SEQ ID NO: 2139 - RNA, 21 nt, RNAi
uuaucucuguaauucggucuc

SEQ ID NO: 2140 - DNA, 21 bp, homo sapiens
cattaagccagagaacttact

SEQ ID NO: 2141 - RNA, 21 nt, RNAi
uuaagccagagaacuuacuuu

SEQ ID NO: 2142 - RNA, 21 nt, RNAi
uuaauucggucucuugaauga

SEQ ID NO: 2143 - DNA, 21 bp, homo sapiens
cagagaacttacttcttggat

SEQ ID NO: 2144 - RNA, 21 nt, RNAi
gagaacuuacuucuuggauuu

SEQ ID NO: 2145 - RNA, 21 nt, RNAi
uucucuugaaugaagaaccua

SEQ ID NO: 2146 - DNA, 21 bp, homo sapiens
cagtacatgctccatcttcca

SEQ ID NO: 2147 - RNA, 21 nt, RNAi
guacaugcuccaucuuccauu

SEQ ID NO: 2148 - RNA, 21 nt, RNAi
uucauguacgagguagaaggu

SEQ ID NO: 2149 - DNA, 21 bp, homo sapiens
catgctccatcttccaggagg

SEQ ID NO: 2150 - RNA, 21 nt, RNAi
ugcuccaucuuccaggagguu

SEQ ID NO: 2151 - RNA, 21 nt, RNAi
uuacgagguagaagguccucc

SEQ ID NO: 2152 - DNA, 21 bp, homo sapiens
catcttccaggaggaccactc

SEQ ID NO: 2153 - RNA, 21 nt, RNAi
ucuuccaggaggaccacucuu

SEQ ID NO: 2154 - RNA, 21 nt, RNAi
uuagaagguccuccuggugag

SEQ ID NO: 2155 - DNA, 21 bp, homo sapiens
caggaggaccactctctgtgg

SEQ ID NO: 2156 - RNA, 21 nt, RNAi
ggaggaccacucucugugguu

SEQ ID NO: 2157 - RNA, 21 nt, RNAi
uuccuccuggugagagacacc

SEQ ID NO: 2158 - DNA, 21 bp, homo sapiens
catgatgagaaggtggatctc

SEQ ID NO: 2159 - RNA, 21 nt, RNAi
ugaugagaagguggaucucuu

SEQ ID NO: 2160 - RNA, 21 nt, RNAi
uuacuacucuuccaccuagag

SEQ ID NO: 2161 - DNA, 21 bp, homo sapiens
caaacacataccaagagacct

SEQ ID NO: 2162 - RNA, 21 nt, RNAi
aacacauaccaagagaccuuu

SEQ ID NO: 2163 - RNA, 21 nt, RNAi
uuuuguguaugguucucugga

SEQ ID NO: 2164 - DNA, 21 bp, homo sapiens
cacataccaagagacctacaa

SEQ ID NO: 2165 - RNA, 21 nt, RNAi
cauaccaagagaccuacaauu

SEQ ID NO: 2166 - RNA, 21 nt, RNAi
uuguaugguucucuggauguu

SEQ ID NO: 2167 - DNA, 21 bp, homo sapiens
catttcaagactgttgaagca

SEQ ID NO: 2168 - RNA, 21 nt, RNAi
uuucaagacuguugaagcauu

SEQ ID NO: 2169 - RNA, 21 nt, RNAi
uuaaaguucugacaacuucgu

SEQ ID NO: 2170 - DNA, 21 bp, homo sapiens
caagactgttgaagcataatc

SEQ ID NO: 2171 - RNA, 21 nt, RNAi
agacuguugaagcauaaucuu

SEQ ID NO: 2172 - RNA, 21 nt, RNAi
uuucugacaacuucguauuag

SEQ ID NO: 2173 - DNA, 21 bp, homo sapiens
cagccagaggccaatgctcag

SEQ ID NO: 2174 - RNA, 21 nt, RNAi
gccagaggccaaugcucaguu

SEQ ID NO: 2175 - RNA, 21 nt, RNAi
uucggucuccgguuacgaguc

SEQ ID NO: 2176 - DNA, 21 bp, homo sapiens
cagaggccaatgctcagagaa

SEQ ID NO: 2177 - RNA, 21 nt, RNAi
gaggccaaugcucagagaauu

SEQ ID NO: 2178 - RNA, 21 nt, RNAi
uucuccgguuacgagucucuu

SEQ ID NO: 2179 - DNA, 21 bp, homo sapiens
caatgctcagagaagtacttg

SEQ ID NO: 2180 - RNA, 21 nt, RNAi
augcucagagaaguacuuguu

SEQ ID NO: 2181 - RNA, 21 nt, RNAi
uuuacgagucucuucaugaac

SEQ ID NO: 2182 - DNA, 21 bp, homo sapiens
caaagaatcagctagcaaaca

SEQ ID NO: 2183 - RNA, 21 nt, RNAi
aagaaucagcuagcaaacauu

SEQ ID NO: 2184 - RNA, 21 nt, RNAi
uuuucuuagucgaucguuugu

SEQ ID NO: 2185 - DNA, 21 bp, homo sapiens
cagctagcaaacagtcttagg

SEQ ID NO: 2186 - RNA, 21 nt, RNAi
gcuagcaaacagucuuagguu

SEQ ID NO: 2187 - RNA, 21 nt, RNAi
uucgaucguuugucagaaucc

SEQ ID NO: 2188 - DNA, 21 bp, homo sapiens
caaacagtcttaggaatcgtg

SEQ ID NO: 2189 - RNA, 21 nt, RNAi
aacagucuuaggaaucguguu

SEQ ID NO: 2190 - RNA, 21 nt, RNAi
uuuugucagaauccuuagcac

SEQ ID NO: 2191 - DNA, 21 bp, homo sapiens
cagtcttaggaatcgtgcagg

SEQ ID NO: 2192 - RNA, 21 nt, RNAi
gucuuaggaaucgugcagguu

SEQ ID NO: 2193 - RNA, 21 nt, RNAi
uucagaauccuuagcacgucc

SEQ ID NO: 2194 - DNA, 21 bp, homo sapiens
catataacctgacaggaacat

SEQ ID NO: 2195 - RNA, 21 nt, RNAi
uauaaccugacaggaacauuu

SEQ ID NO: 2196 - RNA, 21 nt, RNAi
uuauauuggacuguccuugua

SEQ ID NO: 2197 - DNA, 21 bp, homo sapiens
caggaacatgctactgaagtt

SEQ ID NO: 2198 - RNA, 21 nt, RNAi
ggaacaugcuacugaaguuuu

SEQ ID NO: 2199 - RNA, 21 nt, RNAi
uuccuuguacgaugacuucaa

SEQ ID NO: 2200 - DNA, 21 bp, homo sapiens
caatctagaacgctacacaag

SEQ ID NO: 2201 - RNA, 21 nt, RNAi
aucuagaacgcuacacaaguu

SEQ ID NO: 2202 - RNA, 21 nt, RNAi
uuuagaucuugcgauguguuc

SEQ ID NO: 2203 - DNA, 21 bp, homo sapiens
cagcaggtgtgccttaacctc

SEQ ID NO: 2204 - RNA, 21 nt, RNAi
gcaggugugccuuaaccucuu

SEQ ID NO: 2205 - RNA, 21 nt, RNAi
uucguccacacggaauuggag

SEQ ID NO: 2206 - DNA, 21 bp, homo sapiens
cagaaagctccacatcaataa

SEQ ID NO: 2207 - RNA, 21 nt, RNAi
gaaagcuccacaucaauaauu

SEQ ID NO: 2208 - RNA, 21 nt, RNAi
uucuuucgagguguaguuauu

SEQ ID NO: 2209 - DNA, 21 bp, homo sapiens
cacatcaataaacatgacact

SEQ ID NO: 2210 - RNA, 21 nt, RNAi
caucaauaaacaugacacuuu

SEQ ID NO: 2211 - RNA, 21 nt, RNAi
uuguaguuauuuguacuguga

SEQ ID NO: 2212 - DNA, 21 bp, homo sapiens
catcaataaacatgacactct

SEQ ID NO: 2213 - RNA, 21 nt, RNAi
ucaauaaacaugacacucuuu

SEQ ID NO: 2214 - RNA, 21 nt, RNAi
uuaguuauuuguacugugaga

SEQ ID NO: 2215 - DNA, 21 bp, homo sapiens
caataaacatgacactctgaa

SEQ ID NO: 2216 - RNA, 21 nt, RNAi
auaaacaugacacucugaauu

SEQ ID NO: 2217 - RNA, 21 nt, RNAi
uuuauuuguacugugagacuu

SEQ ID NO: 2218 - DNA, 21 bp, homo sapiens
catgacactctgaagtgaaag

SEQ ID NO: 2219 - RNA, 21 nt, RNAi
ugacacucugaagugaaaguu

SEQ ID NO: 2220 - RNA, 21 nt, RNAi
uuacugugagacuucacuuuc

SEQ ID NO: 2221 - DNA, 21 bp, homo sapiens
cactctgaagtgaaagtagcc

SEQ ID NO: 2222 - RNA, 21 nt, RNAi
cucugaagugaaaguagccuu

SEQ ID NO: 2223 - RNA, 21 nt, RNAi
uugagacuucacuuucaucgg

SEQ ID NO: 2224 - DNA, 21 bp, homo sapiens
cacgagaattgtgctacttat

SEQ ID NO: 2225 - RNA, 21 nt, RNAi
cgagaauugugcuacuuauuu

SEQ ID NO: 2226 - RNA, 21 nt, RNAi
uugcucuuaacacgaugaaua

SEQ ID NO: 2227 - DNA, 21 bp, homo sapiens
cataatctggaggcaaggttc

SEQ ID NO: 2228 - RNA, 21 nt, RNAi
uaaucuggaggcaagguucuu

SEQ ID NO: 2229 - RNA, 21 nt, RNAi
uuauuagaccuccguuccaag

SEQ ID NO: 2230 - DNA, 21 bp, homo sapiens
cagcctgtgctaggcatggtg

SEQ ID NO: 2231 - RNA, 21 nt, RNAi
gccugugcuaggcaugguguu

SEQ ID NO: 2232 - RNA, 21 nt, RNAi
uucggacacgauccguaccac

SEQ ID NO: 2233 - DNA, 21 bp, homo sapiens
catggtgtcttcacaggaggc

SEQ ID NO: 2234 - RNA, 21 nt, RNAi
uggugucuucacaggaggcuu

SEQ ID NO: 2235 - RNA, 21 nt, RNAi
uuaccacagaaguguccuccg

SEQ ID NO: 2236 - DNA, 21 bp, homo sapiens
cacaggaggcaaatccagagc

SEQ ID NO: 2237 - RNA, 21 nt, RNAi
caggaggcaaauccagagcuu

SEQ ID NO: 2238 - RNA, 21 nt, RNAi
uuguccuccguuuaggucucg

SEQ ID NO: 2239 - DNA, 21 bp, homo sapiens
caggaggcaaatccagagcct

SEQ ID NO: 2240 - RNA, 21 nt, RNAi
ggaggcaaauccagagccuuu

SEQ ID NO: 2241 - RNA, 21 nt, RNAi
uuccuccguuuaggucucgga

SEQ ID NO: 2242 - DNA, 21 bp, homo sapiens
caaatccagagcctggctgtg

SEQ ID NO: 2243 - RNA, 21 nt, RNAi
aauccagagccuggcuguguu

SEQ ID NO: 2244 - RNA, 21 nt, RNAi
uuuuaggucucggaccgacac

SEQ ID NO: 2245 - DNA, 21 bp, homo sapiens
cagttaaggagctgtgcaata

SEQ ID NO: 2246 - RNA, 21 nt, RNAi
guuaaggagcugugcaauauu

SEQ ID NO: 2247 - RNA, 21 nt, RNAi
uucaauuccucgacacguuau

SEQ ID NO: 2248 - DNA, 21 bp, homo sapiens
caataaccttcctagtacctg

SEQ ID NO: 2249 - RNA, 21 nt, RNAi
auaaccuuccuaguaccuguu

SEQ ID NO: 2250 - RNA, 21 nt, RNAi
uuuauuggaaggaucauggac

SEQ ID NO: 2251 - DNA, 21 bp, homo sapiens
cattcctttaggaatgctgtg

SEQ ID NO: 2252 - RNA, 21 nt, RNAi
uuccuuuaggaaugcuguguu

SEQ ID NO: 2253 - RNA, 21 nt, RNAi
uuaaggaaauccuuacgacac

SEQ ID NO: 2254 - DNA, 21 bp, homo sapiens
cacgtgctctacctccattta

SEQ ID NO: 2255 - RNA, 21 nt, RNAi
cgugcucuaccuccauuuauu

SEQ ID NO: 2256 - RNA, 21 nt, RNAi
uugcacgagauggagguaaau

SEQ ID NO: 2257 - DNA, 21 bp, homo sapiens
cagaagaggccatgtgtctca

SEQ ID NO: 2258 - RNA, 21 nt, RNAi
gaagaggccaugugucucauu

SEQ ID NO: 2259 - RNA, 21 nt, RNAi
uucuucuccgguacacagagu

SEQ ID NO: 2260 - DNA, 21 bp, homo sapiens
catgtgtctcagagctgttaa

SEQ ID NO: 2261 - RNA, 21 nt, RNAi
ugugucucagagcuguuaauu

SEQ ID NO: 2262 - RNA, 21 nt, RNAi
uuacacagagucucgacaauu

SEQ ID NO: 2263 - DNA, 21 bp, homo sapiens
cattggagtcatagcatgtgt

SEQ ID NO: 2264 - RNA, 21 nt, RNAi
uuggagucauagcauguguuu

SEQ ID NO: 2265 - RNA, 21 nt, RNAi
uuaaccucaguaucguacaca

SEQ ID NO: 2266 - DNA, 21 bp, homo sapiens
catagcatgtgtgtaaacttt

SEQ ID NO: 2267 - RNA, 21 nt, RNAi
uagcauguguguaaacuuuuu

SEQ ID NO: 2268 - RNA, 21 nt, RNAi
uuaucguacacacauuugaaa

SEQ ID NO: 2269 - DNA, 21 bp, homo sapiens
gatatctcagtggcggacgag

SEQ ID NO: 2270 - RNA, 21 nt, RNAi
uaucucaguggcggacgaguu

SEQ ID NO: 2271 - RNA, 21 nt, RNAi
uuauagagucaccgccugcuc

SEQ ID NO: 2272 - DNA, 21 bp, homo sapiens
gagtgtccttggcgctgcctt

SEQ ID NO: 2273 - RNA, 21 nt, RNAi
guguccuuggcgcugccuuuu

SEQ ID NO: 2274 - RNA, 21 nt, RNAi
uucacaggaaccgcgacggaa

SEQ ID NO: 2275 - DNA, 21 bp, homo sapiens
gaggcatcatggaccgatcta

SEQ ID NO: 2276 - RNA, 21 nt, RNAi
ggcaucauggaccgaucuauu

SEQ ID NO: 2277 - RNA, 21 nt, RNAi
uuccguaguaccuggcuagau

SEQ ID NO: 2278 - DNA, 21 bp, homo sapiens
gacctgttaaggctacagctc

SEQ ID NO: 2279 - RNA, 21 nt, RNAi
ccuguuaaggcuacagcucuu

SEQ ID NO: 2280 - RNA, 21 nt, RNAi
uuggacaauuccgaugucgag

SEQ ID NO: 2281 - DNA, 21 bp, homo sapiens
gactcagcaaattccttgtca

SEQ ID NO: 2282 - RNA, 21 nt, RNAi
cucagcaaauuccuugucauu

SEQ ID NO: 2283 - RNA, 21 nt, RNAi
uugagucguuuaaggaacagu

SEQ ID NO: 2284 - DNA, 21 bp, homo sapiens
gaatccattacctgtaaatag

SEQ ID NO: 2285 - RNA, 21 nt, RNAi
auccauuaccuguaaauaguu

SEQ ID NO: 2286 - RNA, 21 nt, RNAi
uuuagguaauggacauuuauc

SEQ ID NO: 2287 - DNA, 21 bp, homo sapiens
gaatcagaagcagaagcaatt

SEQ ID NO: 2288 - RNA, 21 nt, RNAi
aucagaagcagaagcaauuuu

SEQ ID NO: 2289 - RNA, 21 nt, RNAi
uuuagucuucgucuucguuaa

SEQ ID NO: 2290 - DNA, 21 bp, homo sapiens
gaagcagaagcaattgcaggc

SEQ ID NO: 2291 - RNA, 21 nt, RNAi
agcagaagcaauugcaggcuu

SEQ ID NO: 2292 - RNA, 21 nt, RNAi
uuucgucuucguuaacguccg

SEQ ID NO: 2293 - DNA, 21 bp, homo sapiens
gaagcaattgcaggcaaccag

SEQ ID NO: 2294 - RNA, 21 nt, RNAi
agcaauugcaggcaaccaguu

SEQ ID NO: 2295 - RNA, 21 nt, RNAi
uuucguuaacguccguugguc

SEQ ID NO: 2296 - DNA, 21 bp, homo sapiens
gaagactttgaaattggtcgc

SEQ ID NO: 2297 - RNA, 21 nt, RNAi
agacuuugaaauuggucgcuu

SEQ ID NO: 2298 - RNA, 21 nt, RNAi
uuucugaaacuuuaaccagcg

SEQ ID NO: 2299 - DNA, 21 bp, homo sapiens
gagaaagccggagtggagcat

SEQ ID NO: 2300 - RNA, 21 nt, RNAi
gaaagccggaguggagcauuu

SEQ ID NO: 2301 - RNA, 21 nt, RNAi
uucuuucggccucaccucgua

SEQ ID NO: 2302 - DNA, 21 bp, homo sapiens
gaaagccggagtggagcatca

SEQ ID NO: 2303 - RNA, 21 nt, RNAi
aagccggaguggagcaucauu

SEQ ID NO: 2304 - RNA, 21 nt, RNAi
uuuucggccucaccucguagu

SEQ ID NO: 2305 - DNA, 21 bp, homo sapiens
gagtggagcatcagctcagaa

SEQ ID NO: 2306 - RNA, 21 nt, RNAi
guggagcaucagcucagaauu

SEQ ID NO: 2307 - RNA, 21 nt, RNAi
uucaccucguagucgagucuu

SEQ ID NO: 2308 - DNA, 21 bp, homo sapiens
gagcatcagctcagaagagaa

SEQ ID NO: 2309 - RNA, 21 nt, RNAi
gcaucagcucagaagagaauu

SEQ ID NO: 2310 - RNA, 21 nt, RNAi
uucguagucgagucuucucuu

SEQ ID NO: 2311 - DNA, 21 bp, homo sapiens
gaagagaagtagaaatacagt

SEQ ID NO: 2312 - RNA, 21 nt, RNAi
agagaaguagaaauacaguuu

SEQ ID NO: 2313 - RNA, 21 nt, RNAi
uuucucuucaucuuuauguca

SEQ ID NO: 2314 - DNA, 21 bp, homo sapiens
gactgtatggttatttccatg

SEQ ID NO: 2315 - RNA, 21 nt, RNAi
cuguaugguuauuuccauguu

SEQ ID NO: 2316 - RNA, 21 nt, RNAi
uugacauaccaauaaagguac

SEQ ID NO: 2317 - DNA, 21 bp, homo sapiens
gatgctaccagagtctaccta

SEQ ID NO: 2318 - RNA, 21 nt, RNAi
ugcuaccagagucuaccuauu

SEQ ID NO: 2319 - RNA, 21 nt, RNAi
uuacgauggucucagauggau

SEQ ID NO: 2320 - DNA, 21 bp, homo sapiens
gagtctacctaattctggaat

SEQ ID NO: 2321 - RNA, 21 nt, RNAi
gucuaccuaauucuggaauuu

SEQ ID NO: 2322 - RNA, 21 nt, RNAi
uucagauggauuaagaccuua

SEQ ID NO: 2323 - DNA, 21 bp, homo sapiens
gaatatgcaccacttggaaca

SEQ ID NO: 2324 - RNA, 21 nt, RNAi
auaugcaccacuuggaacauu

SEQ ID NO: 2325 - RNA, 21 nt, RNAi
uuuauacguggugaaccuugu

SEQ ID NO: 2326 - DNA, 21 bp, homo sapiens
gaacagtttatagagaacttc

SEQ ID NO: 2327 - RNA, 21 nt, RNAi
acaguuuauagagaacuucuu

SEQ ID NO: 2328 - RNA, 21 nt, RNAi
uuugucaaauaucucuugaag

SEQ ID NO: 2329 - DNA, 21 bp, homo sapiens
gagaacttcagaaactttcaa

SEQ ID NO: 2330 - RNA, 21 nt, RNAi
gaacuucagaaacuuucaauu

SEQ ID NO: 2331 - RNA, 21 nt, RNAi
uucuugaagucuuugaaaguu

SEQ ID NO: 2332 - DNA, 21 bp, homo sapiens
gaacttcagaaactttcaaag

SEQ ID NO: 2333 - RNA, 21 nt, RNAi
acuucagaaacuuucaaaguu

SEQ ID NO: 2334 - RNA, 21 nt, RNAi
uuugaagucuuugaaaguuuc

SEQ ID NO: 2335 - DNA, 21 bp, homo sapiens
gatgagcagagaactgctact

SEQ ID NO: 2336 - RNA, 21 nt, RNAi
ugagcagagaacugcuacuuu

SEQ ID NO: 2337 - RNA, 21 nt, RNAi
uuacucgucucuugacgauga

SEQ ID NO: 2338 - DNA, 21 bp, homo sapiens
gagcagagaactgctacttat

SEQ ID NO: 2339 - RNA, 21 nt, RNAi
gcagagaacugcuacuuauuu

SEQ ID NO: 2340 - RNA, 21 nt, RNAi
uucgucucuugacgaugaaua

SEQ ID NO: 2341 - DNA, 21 bp, homo sapiens
gagaactgctacttatataac

SEQ ID NO: 2342 - RNA, 21 nt, RNAi
gaacugcuacuuauauaacuu

SEQ ID NO: 2343 - RNA, 21 nt, RNAi
uucuugacgaugaauauauug

SEQ ID NO: 2344 - DNA, 21 bp, homo sapiens
gaactgctacttatataacag

SEQ ID NO: 2345 - RNA, 21 nt, RNAi
acugcuacuuauauaacaguu

SEQ ID NO: 2346 - RNA, 21 nt, RNAi
uuugacgaugaauauauuguc

SEQ ID NO: 2347 - DNA, 21 bp, homo sapiens
gaagagagttattcatagaga

SEQ ID NO: 2348 - RNA, 21 nt, RNAi
agagaguuauucauagagauu

SEQ ID NO: 2349 - RNA, 21 nt, RNAi
uuucucucaauaaguaucucu

SEQ ID NO: 2350 - DNA, 21 bp, homo sapiens
gagagttattcatagagacat

SEQ ID NO: 2351 - RNA, 21 nt, RNAi
gaguuauucauagagacauuu

SEQ ID NO: 2352 - RNA, 21 nt, RNAi
uucucaauaaguaucucugua

SEQ ID NO: 2353 - DNA, 21 bp, homo sapiens
gagacattaagccagagaact

SEQ ID NO: 2354 - RNA, 21 nt, RNAi
gacauuaagccagagaacuuu

SEQ ID NO: 2355 - RNA, 21 nt, RNAi
uucuguaauucggucucuuga

SEQ ID NO: 2356 - DNA, 21 bp, homo sapiens
gacattaagccagagaactta

SEQ ID NO: 2357 - RNA, 21 nt, RNAi
cauuaagccagagaacuuauu

SEQ ID NO: 2358 - RNA, 21 nt, RNAi
uuguaauucggucucuugaau

SEQ ID NO: 2359 - DNA, 21 bp, homo sapiens
gagaacttacttcttggatca

SEQ ID NO: 2360 - RNA, 21 nt, RNAi
gaacuuacuucuuggaucauu

SEQ ID NO: 2361 - RNA, 21 nt, RNAi
uucuugaaugaagaaccuagu

SEQ ID NO: 2362 - DNA, 21 bp, homo sapiens
gaacttacttcttggatcagc

SEQ ID NO: 2363 - RNA, 21 nt, RNAi
acuuacuucuuggaucagcuu

SEQ ID NO: 2364 - RNA, 21 nt, RNAi
uuugaaugaagaaccuagucg

SEQ ID NO: 2365 - DNA, 21 bp, homo sapiens
gaggaccactctctgtggcac

SEQ ID NO: 2366 - RNA, 21 nt, RNAi
ggaccacucucuguggcacuu

SEQ ID NO: 2367 - RNA, 21 nt, RNAi
uuccuggugagagacaccgug

SEQ ID NO: 2368 - DNA, 21 bp, homo sapiens
gaaatgattgaaggtcggatg

SEQ ID NO: 2369 - RNA, 21 nt, RNAi
aaugauugaaggucggauguu

SEQ ID NO: 2370 - RNA, 21 nt, RNAi
uuuuacuaacuuccagccuac

SEQ ID NO: 2371 - DNA, 21 bp, homo sapiens
gattgaaggtcggatgcatga

SEQ ID NO: 2372 - RNA, 21 nt, RNAi
uugaaggucggaugcaugauu

SEQ ID NO: 2373 - RNA, 21 nt, RNAi
uuaacuuccagccuacguacu

SEQ ID NO: 2374 - DNA, 21 bp, homo sapiens
gaaggtcggatgcatgatgag

SEQ ID NO: 2375 - RNA, 21 nt, RNAi
aggucggaugcaugaugaguu

SEQ ID NO: 2376 - RNA, 21 nt, RNAi
uuuccagccuacguacuacuc

SEQ ID NO: 2377 - DNA, 21 bp, homo sapiens
gatgcatgatgagaaggtgga

SEQ ID NO: 2378 - RNA, 21 nt, RNAi
ugcaugaugagaagguggauu

SEQ ID NO: 2379 - RNA, 21 nt, RNAi
uuacguacuacucuuccaccu

SEQ ID NO: 2380 - DNA, 21 bp, homo sapiens
gatgagaaggtggatctctgg

SEQ ID NO: 2381 - RNA, 21 nt, RNAi
ugagaagguggaucucugguu

SEQ ID NO: 2382 - RNA, 21 nt, RNAi
uuacucuuccaccuagagacc

SEQ ID NO: 2383 - DNA, 21 bp, homo sapiens
gagaaggtggatctctggagc

SEQ ID NO: 2384 - RNA, 21 nt, RNAi
gaagguggaucucuggagcuu

SEQ ID NO: 2385 - RNA, 21 nt, RNAi
uucuuccaccuagagaccucg

SEQ ID NO: 2386 - DNA, 21 bp, homo sapiens
gaaggtggatctctggagcct

SEQ ID NO: 2387 - RNA, 21 nt, RNAi
agguggaucucuggagccuuu

SEQ ID NO: 2388 - RNA, 21 nt, RNAi
uuuccaccuagagaccucgga

SEQ ID NO: 2389 - DNA, 21 bp, homo sapiens
gatctctggagccttggagtt

SEQ ID NO: 2390 - RNA, 21 nt, RNAi
ucucuggagccuuggaguuuu

SEQ ID NO: 2391 - RNA, 21 nt, RNAi
uuagagaccucggaaccucaa

SEQ ID NO: 2392 - DNA, 21 bp, homo sapiens
gagccttggagttctttgcta

SEQ ID NO: 2393 - RNA, 21 nt, RNAi
gccuuggaguucuuugcuauu

SEQ ID NO: 2394 - RNA, 21 nt, RNAi
uucggaaccucaagaaacgau

SEQ ID NO: 2395 - DNA, 21 bp, homo sapiens
gaggcaaacacataccaagag

SEQ ID NO: 2396 - RNA, 21 nt, RNAi
ggcaaacacauaccaagaguu

SEQ ID NO: 2397 - RNA, 21 nt, RNAi
uuccguuuguguaugguucuc

SEQ ID NO: 2398 - DNA, 21 bp, homo sapiens
gacctcatttcaagactgttg

SEQ ID NO: 2399 - RNA, 21 nt, RNAi
ccucauuucaagacuguuguu

SEQ ID NO: 2400 - RNA, 21 nt, RNAi
uuggaguaaaguucugacaac

SEQ ID NO: 2401 - DNA, 21 bp, homo sapiens
gaggccaatgctcagagaagt

SEQ ID NO: 2402 - RNA, 21 nt, RNAi
ggccaaugcucagagaaguuu

SEQ ID NO: 2403 - RNA, 21 nt, RNAi
uuccgguuacgagucucuuca

SEQ ID NO: 2404 - DNA, 21 bp, homo sapiens
gatcacagcaaattcatcaaa

SEQ ID NO: 2405 - RNA, 21 nt, RNAi
ucacagcaaauucaucaaauu

SEQ ID NO: 2406 - RNA, 21 nt, RNAi
uuagugucguuuaaguaguuu

SEQ ID NO: 2407 - DNA, 21 bp, homo sapiens
gaatcagctagcaaacagtct

SEQ ID NO: 2408 - RNA, 21 nt, RNAi
aucagcuagcaaacagucuuu

SEQ ID NO: 2409 - RNA, 21 nt, RNAi
uuuagucgaucguuugucaga

SEQ ID NO: 2410 - DNA, 21 bp, homo sapiens
gacaggaacatgctactgaag

SEQ ID NO: 2411 - RNA, 21 nt, RNAi
caggaacaugcuacugaaguu

SEQ ID NO: 2412 - RNA, 21 nt, RNAi
uuguccuuguacgaugacuuc

SEQ ID NO: 2413 - DNA, 21 bp, homo sapiens
gaacatgctactgaagtttat

SEQ ID NO: 2414 - RNA, 21 nt, RNAi
acaugcuacugaaguuuauuu

SEQ ID NO: 2415 - RNA, 21 nt, RNAi
uuuguacgaugacuucaaaua

SEQ ID NO: 2416 - DNA, 21 bp, homo sapiens
gaacgctacacaagaaatatt

SEQ ID NO: 2417 - RNA, 21 nt, RNAi
acgcuacacaagaaauauuuu

SEQ ID NO: 2418 - RNA, 21 nt, RNAi
uuugcgauguguucuuuauaa

SEQ ID NO: 2419 - DNA, 21 bp, homo sapiens
gaaagctccacatcaataaac

SEQ ID NO: 2420 - RNA, 21 nt, RNAi
aagcuccacaucaauaaacuu

SEQ ID NO: 2421 - RNA, 21 nt, RNAi
uuuucgagguguaguuauuug

SEQ ID NO: 2422 - DNA, 21 bp, homo sapiens
gacactctgaagtgaaagtag

SEQ ID NO: 2423 - RNA, 21 nt, RNAi
cacucugaagugaaaguaguu

SEQ ID NO: 2424 - RNA, 21 nt, RNAi
uugugagacuucacuuucauc

SEQ ID NO: 2425 - DNA, 21 bp, homo sapiens
gaagtgaaagtagccacgaga

SEQ ID NO: 2426 - RNA, 21 nt, RNAi
agugaaaguagccacgagauu

SEQ ID NO: 2427 - RNA, 21 nt, RNAi
uuucacuuucaucggugcucu

SEQ ID NO: 2428 - DNA, 21 bp, homo sapiens
gaaagtagccacgagaattgt

SEQ ID NO: 2429 - RNA, 21 nt, RNAi
aaguagccacgagaauuguuu

SEQ ID NO: 2430 - RNA, 21 nt, RNAi
uuuucaucggugcucuuaaca

SEQ ID NO: 2431 - DNA, 21 bp, homo sapiens
gagaattgtgctacttatact

SEQ ID NO: 2432 - RNA, 21 nt, RNAi
gaauugugcuacuuauacuuu

SEQ ID NO: 2433 - RNA, 21 nt, RNAi
uucuuaacacgaugaauauga

SEQ ID NO: 2434 - DNA, 21 bp, homo sapiens
gaattgtgctacttatactgg

SEQ ID NO: 2435 - RNA, 21 nt, RNAi
auugugcuacuuauacugguu

SEQ ID NO: 2436 - RNA, 21 nt, RNAi
uuuaacacgaugaauaugacc

SEQ ID NO: 2437 - DNA, 21 bp, homo sapiens
gaggcaaggttcgactgcagc

SEQ ID NO: 2438 - RNA, 21 nt, RNAi
ggcaagguucgacugcagcuu

SEQ ID NO: 2439 - RNA, 21 nt, RNAi
uuccguuccaagcugacgucg

SEQ ID NO: 2440 - DNA, 21 bp, homo sapiens
gaggcaaatccagagcctggc

SEQ ID NO: 2441 - RNA, 21 nt, RNAi
ggcaaauccagagccuggcuu

SEQ ID NO: 2442 - RNA, 21 nt, RNAi
uuccguuuaggucucggaccg

SEQ ID NO: 2443 - DNA, 21 bp, homo sapiens
gatcagttaaggagctgtgca

SEQ ID NO: 2444 - RNA, 21 nt, RNAi
ucaguuaaggagcugugcauu

SEQ ID NO: 2445 - RNA, 21 nt, RNAi
uuagucaauuccucgacacgu

SEQ ID NO: 2446 - DNA, 21 bp, homo sapiens
gagctgtgcaataaccttcct

SEQ ID NO: 2447 - RNA, 21 nt, RNAi
gcugugcaauaaccuuccuuu

SEQ ID NO: 2448 - RNA, 21 nt, RNAi
uucgacacguuauuggaagga

SEQ ID NO: 2449 - DNA, 21 bp, homo sapiens
gagtgagtgtgtaacttattg

SEQ ID NO: 2450 - RNA, 21 nt, RNAi
gugaguguguaacuuauuguu

SEQ ID NO: 2451 - RNA, 21 nt, RNAi
uucacucacacauugaauaac

SEQ ID NO: 2452 - DNA, 21 bp, homo sapiens
gaagcctggtaaagctgttgg

SEQ ID NO: 2453 - RNA, 21 nt, RNAi
agccugguaaagcuguugguu

SEQ ID NO: 2454 - RNA, 21 nt, RNAi
uuucggaccauuucgacaacc

SEQ ID NO: 2455 - DNA, 21 bp, homo sapiens
gaatgctgtgtgtctgtccgg

SEQ ID NO: 2456 - RNA, 21 nt, RNAi
augcugugugucuguccgguu

SEQ ID NO: 2457 - RNA, 21 nt, RNAi
uuuacgacacacagacaggcc

SEQ ID NO: 2458 - DNA, 21 bp, homo sapiens
gaacacgtgctctacctccat

SEQ ID NO: 2459 - RNA, 21 nt, RNAi
acacgugcucuaccuccauuu

SEQ ID NO: 2460 - RNA, 21 nt, RNAi
uuugugcacgagauggaggua

SEQ ID NO: 2461 - DNA, 21 bp, homo sapiens
gatacagaagaggccatgtgt

SEQ ID NO: 2462 - RNA, 21 nt, RNAi
uacagaagaggccauguguuu

SEQ ID NO: 2463 - RNA, 21 nt, RNAi
uuaugucuucuccgguacaca

SEQ ID NO: 2464 - DNA, 21 bp, homo sapiens
gaagaggccatgtgtctcaga

SEQ ID NO: 2465 - RNA, 21 nt, RNAi
agaggccaugugucucagauu

SEQ ID NO: 2466 - RNA, 21 nt, RNAi
uuucuccgguacacagagucu

SEQ ID NO: 2467 - DNA, 21 bp, homo sapiens
gaggccatgtgtctcagagct

SEQ ID NO: 2468 - RNA, 21 nt, RNAi
ggccaugugucucagagcuuu

SEQ ID NO: 2469 - RNA, 21 nt, RNAi
uuccgguacacagagucucga

SEQ ID NO: 2470 - DNA, 21 bp, homo sapiens
gagtcatagcatgtgtgtaaa

SEQ ID NO: 2471 - RNA, 21 nt, RNAi
gucauagcauguguguaaauu

SEQ ID NO: 2472 - RNA, 21 nt, RNAi
uucaguaucguacacacauuu

SEQ ID NO: 2473 - DNA, 21 bp, homo sapiens
tatctcagtggcggacgagga

SEQ ID NO: 2474 - RNA, 21 nt, RNAi
ucucaguggcggacgaggauu

SEQ ID NO: 2475 - RNA, 21 nt, RNAi
uuagagucaccgccugcuccu

SEQ ID NO: 2476 - DNA, 21 bp, homo sapiens
taggatactgcttgttactta

SEQ ID NO: 2477 - RNA, 21 nt, RNAi
ggauacugcuuguuacuuauu

SEQ ID NO: 2478 - RNA, 21 nt, RNAi
uuccuaugacgaacaaugaau

SEQ ID NO: 2479 - DNA, 21 bp, homo sapiens
tacttattacagctagaggca

SEQ ID NO: 2480 - RNA, 21 nt, RNAi
cuuauuacagcuagaggcauu

SEQ ID NO: 2481 - RNA, 21 nt, RNAi
uugaauaaugucgaucuccgu

SEQ ID NO: 2482 - DNA, 21 bp, homo sapiens
tattacagctagaggcatcat

SEQ ID NO: 2483 - RNA, 21 nt, RNAi
uuacagcuagaggcaucauuu

SEQ ID NO: 2484 - RNA, 21 nt, RNAi
uuaaugucgaucuccguagua

SEQ ID NO: 2485 - DNA, 21 bp, homo sapiens
tacagctagaggcatcatgga

SEQ ID NO: 2486 - RNA, 21 nt, RNAi
cagcuagaggcaucauggauu

SEQ ID NO: 2487 - RNA, 21 nt, RNAi
uugucgaucuccguaguaccu

SEQ ID NO: 2488 - DNA, 21 bp, homo sapiens
tagaggcatcatggaccgatc

SEQ ID NO: 2489 - RNA, 21 nt, RNAi
gaggcaucauggaccgaucuu

SEQ ID NO: 2490 - RNA, 21 nt, RNAi
uucuccguaguaccuggcuag

SEQ ID NO: 2491 - DNA, 21 bp, homo sapiens
taaggctacagctccagttgg

SEQ ID NO: 2492 - RNA, 21 nt, RNAi
aggcuacagcuccaguugguu

SEQ ID NO: 2493 - RNA, 21 nt, RNAi
uuuccgaugucgaggucaacc

SEQ ID NO: 2494 - DNA, 21 bp, homo sapiens
tacagctccagttggaggtcc

SEQ ID NO: 2495 - RNA, 21 nt, RNAi
cagcuccaguuggagguccuu

SEQ ID NO: 2496 - RNA, 21 nt, RNAi
uugucgaggucaaccuccagg

SEQ ID NO: 2497 - DNA, 21 bp, homo sapiens
tacctgtaaatagtggccagg

SEQ ID NO: 2498 - RNA, 21 nt, RNAi
ccuguaaauaguggccagguu

SEQ ID NO: 2499 - RNA, 21 nt, RNAi
uuggacauuuaucaccggucc

SEQ ID NO: 2500 - DNA, 21 bp, homo sapiens
taaatagtggccaggctcagc

SEQ ID NO: 2501 - RNA, 21 nt, RNAi
aauaguggccaggcucagcuu

SEQ ID NO: 2502 - RNA, 21 nt, RNAi
uuuuaucaccgguccgagucg

SEQ ID NO: 2503 - DNA, 21 bp, homo sapiens
tacctcatcctgtctccaggc

SEQ ID NO: 2504 - RNA, 21 nt, RNAi
ccucauccugucuccaggcuu

SEQ ID NO: 2505 - RNA, 21 nt, RNAi
uuggaguaggacagagguccg

SEQ ID NO: 2506 - DNA, 21 bp, homo sapiens
taatcctgaggaggaactggc

SEQ ID NO: 2507 - RNA, 21 nt, RNAi
auccugaggaggaacuggcuu

SEQ ID NO: 2508 - RNA, 21 nt, RNAi
uuuaggacuccuccuugaccg

SEQ ID NO: 2509 - DNA, 21 bp, homo sapiens
tattctggctcttaaagtgtt

SEQ ID NO: 2510 - RNA, 21 nt, RNAi
uucuggcucuuaaaguguuuu

SEQ ID NO: 2511 - RNA, 21 nt, RNAi
uuaagaccgagaauuucacaa

SEQ ID NO: 2512 - DNA, 21 bp, homo sapiens
tatttaaagctcagctggaga

SEQ ID NO: 2513 - RNA, 21 nt, RNAi
uuuaaagcucagcuggagauu

SEQ ID NO: 2514 - RNA, 21 nt, RNAi
uuaaauuucgagucgaccucu

SEQ ID NO: 2515 - DNA, 21 bp, homo sapiens
taaagctcagctggagaaagc

SEQ ID NO: 2516 - RNA, 21 nt, RNAi
aagcucagcuggagaaagcuu

SEQ ID NO: 2517 - RNA, 21 nt, RNAi
uuuucgagucgaccucuuucg

SEQ ID NO: 2518 - DNA, 21 bp, homo sapiens
tagactgtatggttatttcca

SEQ ID NO: 2519 - RNA, 21 nt, RNAi
gacuguaugguuauuuccauu

SEQ ID NO: 2520 - RNA, 21 nt, RNAi
uucugacauaccaauaaaggu

SEQ ID NO: 2521 - DNA, 21 bp, homo sapiens
tatggttatttccatgatgct

SEQ ID NO: 2522 - RNA, 21 nt, RNAi
ugguuauuuccaugaugcuuu

SEQ ID NO: 2523 - RNA, 21 nt, RNAi
uuaccaauaaagguacuacga

SEQ ID NO: 2524 - DNA, 21 bp, homo sapiens
tatttccatgatgctaccaga

SEQ ID NO: 2525 - RNA, 21 nt, RNAi
uuuccaugaugcuaccagauu

SEQ ID NO: 2526 - RNA, 21 nt, RNAi
uuaaagguacuacgauggucu

SEQ ID NO: 2527 - DNA, 21 bp, homo sapiens
taccagagtctacctaattct

SEQ ID NO: 2528 - RNA, 21 nt, RNAi
ccagagucuaccuaauucuuu

SEQ ID NO: 2529 - RNA, 21 nt, RNAi
uuggucucagauggauuaaga

SEQ ID NO: 2530 - DNA, 21 bp, homo sapiens
tacctaattctggaatatgca

SEQ ID NO: 2531 - RNA, 21 nt, RNAi
ccuaauucuggaauaugcauu

SEQ ID NO: 2532 - RNA, 21 nt, RNAi
uuggauuaagaccuuauacgu

SEQ ID NO: 2533 - DNA, 21 bp, homo sapiens
taattctggaatatgcaccac

SEQ ID NO: 2534 - RNA, 21 nt, RNAi
auucuggaauaugcaccacuu

SEQ ID NO: 2535 - RNA, 21 nt, RNAi
uuuaagaccuuauacguggug

SEQ ID NO: 2536 - DNA, 21 bp, homo sapiens
tatgcaccacttggaacagtt

SEQ ID NO: 2537 - RNA, 21 nt, RNAi
ugcaccacuuggaacaguuuu

SEQ ID NO: 2538 - RNA, 21 nt, RNAi
uuacguggugaaccuugucaa

SEQ ID NO: 2539 - DNA, 21 bp, homo sapiens
tagagaacttcagaaactttc

SEQ ID NO: 2540 - RNA, 21 nt, RNAi
gagaacuucagaaacuuucuu

SEQ ID NO: 2541 - RNA, 21 nt, RNAi
uucucuugaagucuuugaaag

SEQ ID NO: 2542 - DNA, 21 bp, homo sapiens
tataacagaattggcaaatgc

SEQ ID NO: 2543 - RNA, 21 nt, RNAi
uaacagaauuggcaaaugcuu

SEQ ID NO: 2544 - RNA, 21 nt, RNAi
uuauugucuuaaccguuuacg

SEQ ID NO: 2545 - DNA, 21 bp, homo sapiens
tactgtcattcgaagagagtt

SEQ ID NO: 2546 - RNA, 21 nt, RNAi
cugucauucgaagagaguuuu

SEQ ID NO: 2547 - RNA, 21 nt, RNAi
uugacaguaagcuucucucaa

SEQ ID NO: 2548 - DNA, 21 bp, homo sapiens
tattcatagagacattaagcc

SEQ ID NO: 2549 - RNA, 21 nt, RNAi
uucauagagacauuaagccuu

SEQ ID NO: 2550 - RNA, 21 nt, RNAi
uuaaguaucucuguaauucgg

SEQ ID NO: 2551 - DNA, 21 bp, homo sapiens
tagagacattaagccagagaa

SEQ ID NO: 2552 - RNA, 21 nt, RNAi
gagacauuaagccagagaauu

SEQ ID NO: 2553 - RNA, 21 nt, RNAi
uucucuguaauucggucucuu

SEQ ID NO: 2554 - DNA, 21 bp, homo sapiens
taagccagagaacttacttct

SEQ ID NO: 2555 - RNA, 21 nt, RNAi
agccagagaacuuacuucuuu

SEQ ID NO: 2556 - RNA, 21 nt, RNAi
uuucggucucuugaaugaaga

SEQ ID NO: 2557 - DNA, 21 bp, homo sapiens
tacttcttggatcagctggag

SEQ ID NO: 2558 - RNA, 21 nt, RNAi
cuucuuggaucagcuggaguu

SEQ ID NO: 2559 - RNA, 21 nt, RNAi
uugaagaaccuagucgaccuc

SEQ ID NO: 2560 - DNA, 21 bp, homo sapiens
tacatgctccatcttccagga

SEQ ID NO: 2561 - RNA, 21 nt, RNAi
caugcuccaucuuccaggauu

SEQ ID NO: 2562 - RNA, 21 nt, RNAi
uuguacgagguagaagguccu

SEQ ID NO: 2563 - DNA, 21 bp, homo sapiens
tagcaaacagtcttaggaatc

SEQ ID NO: 2564 - RNA, 21 nt, RNAi
gcaaacagucuuaggaaucuu

SEQ ID NO: 2565 - RNA, 21 nt, RNAi
uucguuugucagaauccuuag

SEQ ID NO: 2566 - DNA, 21 bp, homo sapiens
tataacctgacaggaacatgc

SEQ ID NO: 2567 - RNA, 21 nt, RNAi
uaaccugacaggaacaugcuu

SEQ ID NO: 2568 - RNA, 21 nt, RNAi
uuauuggacuguccuuguacg

SEQ ID NO: 2569 - DNA, 21 bp, homo sapiens
taacctgacaggaacatgcta

SEQ ID NO: 2570 - RNA, 21 nt, RNAi
accugacaggaacaugcuauu

SEQ ID NO: 2571 - RNA, 21 nt, RNAi
uuuggacuguccuuguacgau

SEQ ID NO: 2572 - DNA, 21 bp, homo sapiens
tagaacgctacacaagaaata

SEQ ID NO: 2573 - RNA, 21 nt, RNAi
gaacgcuacacaagaaauauu

SEQ ID NO: 2574 - RNA, 21 nt, RNAi
uucuugcgauguguucuuuau

SEQ ID NO: 2575 - DNA, 21 bp, homo sapiens
tactcagcaggtgtgccttaa

SEQ ID NO: 2576 - RNA, 21 nt, RNAi
cucagcaggugugccuuaauu

SEQ ID NO: 2577 - RNA, 21 nt, RNAi
uugagucguccacacggaauu

SEQ ID NO: 2578 - DNA, 21 bp, homo sapiens
tattcagaaagctccacatca

SEQ ID NO: 2579 - RNA, 21 nt, RNAi
uucagaaagcuccacaucauu

SEQ ID NO: 2580 - RNA, 21 nt, RNAi
uuaagucuuucgagguguagu

SEQ ID NO: 2581 - DNA, 21 bp, homo sapiens
taaacatgacactctgaagtg

SEQ ID NO: 2582 - RNA, 21 nt, RNAi
aacaugacacucugaaguguu

SEQ ID NO: 2583 - RNA, 21 nt, RNAi
uuuuguacugugagacuucac

SEQ ID NO: 2584 - DNA, 21 bp, homo sapiens
tagccacgagaattgtgctac

SEQ ID NO: 2585 - RNA, 21 nt, RNAi
gccacgagaauugugcuacuu

SEQ ID NO: 2586 - RNA, 21 nt, RNAi
uucggugcucuuaacacgaug

SEQ ID NO: 2587 - DNA, 21 bp, homo sapiens
tatactggttcataatctgga

SEQ ID NO: 2588 - RNA, 21 nt, RNAi
uacugguucauaaucuggauu

SEQ ID NO: 2589 - RNA, 21 nt, RNAi
uuaugaccaaguauuagaccu

SEQ ID NO: 2590 - DNA, 21 bp, homo sapiens
tactggttcataatctggagg

SEQ ID NO: 2591 - RNA, 21 nt, RNAi
cugguucauaaucuggagguu

SEQ ID NO: 2592 - RNA, 21 nt, RNAi
uugaccaaguauuagaccucc

SEQ ID NO: 2593 - DNA, 21 bp, homo sapiens
taatctggaggcaaggttcga

SEQ ID NO: 2594 - RNA, 21 nt, RNAi
aucuggaggcaagguucgauu

SEQ ID NO: 2595 - RNA, 21 nt, RNAi
uuuagaccuccguuccaagcu

SEQ ID NO: 2596 - DNA, 21 bp, homo sapiens
taggcatggtgtcttcacagg

SEQ ID NO: 2597 - RNA, 21 nt, RNAi
ggcauggugucuucacagguu

SEQ ID NO: 2598 - RNA, 21 nt, RNAi
uuccguaccacagaagugucc

SEQ ID NO: 2599 - DNA, 21 bp, homo sapiens
taaggagctgtgcaataacct

SEQ ID NO: 2600 - RNA, 21 nt, RNAi
aggagcugugcaauaaccuuu

SEQ ID NO: 2601 - RNA, 21 nt, RNAi
uuuccucgacacguuauugga

SEQ ID NO: 2602 - DNA, 21 bp, homo sapiens
taaccttcctagtacctgagt

SEQ ID NO: 2603 - RNA, 21 nt, RNAi
accuuccuaguaccugaguuu

SEQ ID NO: 2604 - RNA, 21 nt, RNAi
uuuggaaggaucauggacuca

SEQ ID NO: 2605 - DNA, 21 bp, homo sapiens
tagtacctgagtgagtgtgta

SEQ ID NO: 2606 - RNA, 21 nt, RNAi
guaccugagugaguguguauu

SEQ ID NO: 2607 - RNA, 21 nt, RNAi
uucauggacucacucacacau

SEQ ID NO: 2608 - DNA, 21 bp, homo sapiens
tacctgagtgagtgtgtaact

SEQ ID NO: 2609 - RNA, 21 nt, RNAi
ccugagugaguguguaacuuu

SEQ ID NO: 2610 - RNA, 21 nt, RNAi
uuggacucacucacacauuga

SEQ ID NO: 2611 - DNA, 21 bp, homo sapiens
taaagctgttggaatgagtat

SEQ ID NO: 2612 - RNA, 21 nt, RNAi
aagcuguuggaaugaguauuu

SEQ ID NO: 2613 - RNA, 21 nt, RNAi
uuuucgacaaccuuacucaua

SEQ ID NO: 2614 - DNA, 21 bp, homo sapiens
taggaatgctgtgtgtctgtc

SEQ ID NO: 2615 - RNA, 21 nt, RNAi
ggaaugcugugugucugucuu

SEQ ID NO: 2616 - RNA, 21 nt, RNAi
uuccuuacgacacacagacag

SEQ ID NO: 2617 - DNA, 21 bp, homo sapiens
tagtcctccttaaccacttat

SEQ ID NO: 2618 - RNA, 21 nt, RNAi
guccuccuuaaccacuuauuu

SEQ ID NO: 2619 - RNA, 21 nt, RNAi
uucaggaggaauuggugaaua

SEQ ID NO: 2620 - DNA, 21 bp, homo sapiens
taggaacacgtgctctacctc

SEQ ID NO: 2621 - RNA, 21 nt, RNAi
ggaacacgugcucuaccucuu

SEQ ID NO: 2622 - RNA, 21 nt, RNAi
uuccuugugcacgagauggag

SEQ ID NO: 2623 - DNA, 21 bp, homo sapiens
tacagaagaggccatgtgtct

SEQ ID NO: 2624 - RNA, 21 nt, RNAi
cagaagaggccaugugucuuu

SEQ ID NO: 2625 - RNA, 21 nt, RNAi
uugucuucuccgguacacaga

SEQ ID NO: 2626 - DNA, 21 bp, homo sapiens
aagactttgaaattggtcgcc

SEQ ID NO: 2627 - RNA, 21 nt, RNAi
gacuuugaaauuggucgccuu

SEQ ID NO: 2628 - RNA, 21 nt, RNAi
uucugaaacuuuaaccagcgg

SEQ ID NO: 2629 - DNA, 21 bp, homo sapiens
aagccagagaacttacttctt

SEQ ID NO: 2630 - RNA, 21 nt, RNAi
gccagagaacuuacuucuuuu

SEQ ID NO: 2631 - RNA, 21 nt, RNAi
uucggucucuugaaugaagaa

SEQ ID NO: 2632 - DNA, 21 bp, homo sapiens
aaatgattgaaggtcggatgc

SEQ ID NO: 2633 - RNA, 21 nt, RNAi
augauugaaggucggaugcuu

SEQ ID NO: 2634 - RNA, 21 nt, RNAi
uuuacuaacuuccagccuacg

SEQ ID NO: 2635 - DNA, 21 bp, homo sapiens
aatgattgaaggtcggatgca

SEQ ID NO: 2636 - RNA, 21 nt, RNAi
ugauugaaggucggaugcauu

SEQ ID NO: 2637 - RNA, 21 nt, RNAi
uuacuaacuuccagccuacgu

SEQ ID NO: 2638 - DNA, 21 bp, homo sapiens
aaggtcggatgcatgatgaga

SEQ ID NO: 2639 - RNA, 21 nt, RNAi
ggucggaugcaugaugagauu

SEQ ID NO: 2640 - RNA, 21 nt, RNAi
uuccagccuacguacuacucu

SEQ ID NO: 2641 - DNA, 21 bp, homo sapiens
aacacataccaagagacctac

SEQ ID NO: 2642 - RNA, 21 nt, RNAi
cacauaccaagagaccuacuu

SEQ ID NO: 2643 - RNA, 21 nt, RNAi
uuguguaugguucucuggaug

SEQ ID NO: 2644 - DNA, 21 bp, homo sapiens
aagactgttgaagcataatcc

SEQ ID NO: 2645 - RNA, 21 nt, RNAi
gacuguugaagcauaauccuu

SEQ ID NO: 2646 - RNA, 21 nt, RNAi
uucugacaacuucguauuagg

SEQ ID NO: 2647 - DNA, 21 bp, homo sapiens
cagtcacaagccggttcagaa

SEQ ID NO: 2648 - RNA, 21 nt, RNAi
gucacaagccgguucagaauu

SEQ ID NO: 2649 - RNA, 21 nt, RNAi
uucaguguucggccaagucuu

SEQ ID NO: 2650 - DNA, 21 bp, homo sapiens
caggcaaccagtgtacctcat

SEQ ID NO: 2651 - RNA, 21 nt, RNAi
ggcaaccaguguaccucauuu

SEQ ID NO: 2652 - RNA, 21 nt, RNAi
uuccguuggucacauggagua

SEQ ID NO: 2653 - DNA, 21 bp, homo sapiens
caccttcggcatcctaatatt

SEQ ID NO: 2654 - RNA, 21 nt, RNAi
ccuucggcauccuaauauuuu

SEQ ID NO: 2655 - RNA, 21 nt, RNAi
uuggaagccguaggauuauaa

SEQ ID NO: 2656 - DNA, 21 bp, homo sapiens
caccacttggaacagtttata

SEQ ID NO: 2657 - RNA, 21 nt, RNAi
ccacuuggaacaguuuauauu

SEQ ID NO: 2658 - RNA, 21 nt, RNAi
uuggugaaccuugucaaauau

SEQ ID NO: 2659 - DNA, 21 bp, homo sapiens
cacttggaacagtttatagag

SEQ ID NO: 2660 - RNA, 21 nt, RNAi
cuuggaacaguuuauagaguu

SEQ ID NO: 2661 - RNA, 21 nt, RNAi
uugaaccuugucaaauaucuc

SEQ ID NO: 2662 - DNA, 21 bp, homo sapiens
cagagaacttacttcttggat

SEQ ID NO: 2663 - RNA, 21 nt, RNAi
gagaacuuacuucuuggauuu

SEQ ID NO: 2664 - RNA, 21 nt, RNAi
uucucuugaaugaagaaccua

SEQ ID NO: 2665 - DNA, 21 bp, homo sapiens
cagtacatgctccatcttcca

SEQ ID NO: 2666 - RNA, 21 nt, RNAi
guacaugcuccaucuuccauu

SEQ ID NO: 2667 - RNA, 21 nt, RNAi
uucauguacgagguagaaggu

SEQ ID NO: 2668 - DNA, 21 bp, homo sapiens
cacataccaagagacctacaa

SEQ ID NO: 2669 - RNA, 21 nt, RNAi
cauaccaagagaccuacaauu

SEQ ID NO: 2670 - RNA, 21 nt, RNAi
uuguaugguucucuggauguu

SEQ ID NO: 2671 - DNA, 21 bp, homo sapiens
gaaatgattgaaggtcggatg

SEQ ID NO: 2672 - RNA, 21 nt, RNAi
aaugauugaaggucggauguu

SEQ ID NO: 2673 - RNA, 21 nt, RNAi
uuuuacuaacuuccagccuac

SEQ ID NO: 2674 - DNA, 21 bp, homo sapiens
gattgaaggtcggatgcatga

SEQ ID NO: 2675 - RNA, 21 nt, RNAi
uugaaggucggaugcaugauu

SEQ ID NO: 2676 - RNA, 21 nt, RNAi
uuaacuuccagccuacguacu

SEQ ID NO: 2677 - DNA, 21 bp, homo sapiens
gaaggtcggatgcatgatgag

SEQ ID NO: 2678 - RNA, 21 nt, RNAi
aggucggaugcaugaugaguu

SEQ ID NO: 2679 - RNA, 21 nt, RNAi
uuuccagccuacguacuacuc

SEQ ID NO: 2680 - DNA, 21 bp, homo sapiens
gaggcaaacacataccaagag

SEQ ID NO: 2681 - RNA, 21 nt, RNAi
ggcaaacacauaccaagaguu

SEQ ID NO: 2682 - RNA, 21 nt, RNAi
uuccguuuguguaugguucuc

SEQ ID NO: 2683 - DNA, 21 bp, homo sapiens
tacctgtaaatagtggccagg

SEQ ID NO: 2684 - RNA, 21 nt, RNAi
ccuguaaauaguggccagguu

SEQ ID NO: 2685 - RNA, 21 nt, RNAi
uuggacauuuaucaccggucc

SEQ ID NO: 2686 - DNA, 21 bp, homo sapiens
tatttaaagctcagctggaga

SEQ ID NO: 2687 - RNA, 21 nt, RNAi
uuuaaagcucagcuggagauu

SEQ ID NO: 2688 - RNA, 21 nt, RNAi
uuaaauuucgagucgaccucu

SEQ ID NO: 2689 - DNA, 21 bp, homo sapiens
tagactgtatggttatttcca

SEQ ID NO: 2690 - RNA, 21 nt, RNAi
gacuguaugguuauuuccauu

SEQ ID NO: 2691 - RNA, 21 nt, RNAi
uucugacauaccaauaaaggu

SEQ ID NO: 2692 - DNA, 21 bp, homo sapiens
taccagagtctacctaattct

SEQ ID NO: 2693 - RNA, 21 nt, RNAi
ccagagucuaccuaauucuuu

SEQ ID NO: 2694 - RNA, 21 nt, RNAi
uuggucucagauggauuaaga

SEQ ID NO: 2695 - DNA, 21 bp, homo sapiens
tattcatagagacattaagcc

SEQ ID NO: 2696 - RNA, 21 nt, RNAi
uucauagagacauuaagccuu

SEQ ID NO: 2697 - RNA, 21 nt, RNAi
uuaaguaucucuguaauucgg

SEQ ID NO: 2698 - DNA, 21 bp, homo sapiens
aagtgctgttggagccgctgt

SEQ ID NO: 2699 - RNA, 21 nt, RNAi
gugcuguuggagccgcuguuu

SEQ ID NO: 2700 - RNA, 21 nt, RNAi
uucacgacaaccucggcgaca

SEQ ID NO: 2701 - DNA, 21 bp, homo sapiens
aaatcgtggccgagttcttct

SEQ ID NO: 2702 - RNA, 21 nt, RNAi
aucguggccgaguucuucuuu

SEQ ID NO: 2703 - RNA, 21 nt, RNAi
uuuagcaccggcucaagaaga

SEQ ID NO: 2704 - DNA, 21 bp, homo sapiens
aatcgtggccgagttcttctc

SEQ ID NO: 2705 - RNA, 21 nt, RNAi
ucguggccgaguucuucucuu

SEQ ID NO: 2706 - RNA, 21 nt, RNAi
uuagcaccggcucaagaagag

SEQ ID NO: 2707 - DNA, 21 bp, homo sapiens
aaacctttactcgagtgcaga

SEQ ID NO: 2708 - RNA, 21 nt, RNAi
accuuuacucgagugcagauu

SEQ ID NO: 2709 - RNA, 21 nt, RNAi
uuuggaaaugagcucacgucu

SEQ ID NO: 2710 - DNA, 21 bp, homo sapiens
aacctttactcgagtgcagaa

SEQ ID NO: 2711 - RNA, 21 nt, RNAi
ccuuuacucgagugcagaauu

SEQ ID NO: 2712 - RNA, 21 nt, RNAi
uuggaaaugagcucacgucuu

SEQ ID NO: 2713 - DNA, 21 bp, homo sapiens
aaatacggactcaccttgctt

SEQ ID NO: 2714 - RNA, 21 nt, RNAi
auacggacucaccuugcuuuu

SEQ ID NO: 2715 - RNA, 21 nt, RNAi
uuuaugccugaguggaacgaa

SEQ ID NO: 2716 - DNA, 21 bp, homo sapiens
aatacggactcaccttgcttg

SEQ ID NO: 2717 - RNA, 21 nt, RNAi
uacggacucaccuugcuuguu

SEQ ID NO: 2718 - RNA, 21 nt, RNAi
uuaugccugaguggaacgaac

SEQ ID NO: 2719 - DNA, 21 bp, homo sapiens
aactactgatcttgagctcat

SEQ ID NO: 2720 - RNA, 21 nt, RNAi
cuacugaucuugagcucauuu

SEQ ID NO: 2721 - RNA, 21 nt, RNAi
uugaugacuagaacucgagua

SEQ ID NO: 2722 - DNA, 21 bp, homo sapiens
aatacctaaataatgtggtgg

SEQ ID NO: 2723 - RNA, 21 nt, RNAi
uaccuaaauaauguggugguu

SEQ ID NO: 2724 - RNA, 21 nt, RNAi
uuauggauuuauuacaccacc

SEQ ID NO: 2725 - DNA, 21 bp, homo sapiens
aaataatgtggtggaacaact

SEQ ID NO: 2726 - RNA, 21 nt, RNAi
auaaugugguggaacaacuuu

SEQ ID NO: 2727 - RNA, 21 nt, RNAi
uuuauuacaccaccuuguuga

SEQ ID NO: 2728 - DNA, 21 bp, homo sapiens
aataatgtggtggaacaactg

SEQ ID NO: 2729 - RNA, 21 nt, RNAi
uaaugugguggaacaacuguu

SEQ ID NO: 2730 - RNA, 21 nt, RNAi
uuauuacaccaccuuguugac

SEQ ID NO: 2731 - DNA, 21 bp, homo sapiens
aatgtggtggaacaactgaaa

SEQ ID NO: 2732 - RNA, 21 nt, RNAi
ugugguggaacaacugaaauu

SEQ ID NO: 2733 - RNA, 21 nt, RNAi
uuacaccaccuuguugacuuu

SEQ ID NO: 2734 - DNA, 21 bp, homo sapiens
aagtgttcagttcagaaactg

SEQ ID NO: 2735 - RNA, 21 nt, RNAi
guguucaguucagaaacuguu

SEQ ID NO: 2736 - RNA, 21 nt, RNAi
uucacaagucaagucuuugac

SEQ ID NO: 2737 - DNA, 21 bp, homo sapiens
aaactggttgtagttatctca

SEQ ID NO: 2738 - RNA, 21 nt, RNAi
acugguuguaguuaucucauu

SEQ ID NO: 2739 - RNA, 21 nt, RNAi
uuugaccaacaucaauagagu

SEQ ID NO: 2740 - DNA, 21 bp, homo sapiens
aactggttgtagttatctcaa

SEQ ID NO: 2741 - RNA, 21 nt, RNAi
cugguuguaguuaucucaauu

SEQ ID NO: 2742 - RNA, 21 nt, RNAi
uugaccaacaucaauagaguu

SEQ ID NO: 2743 - DNA, 21 bp, homo sapiens
aaatattgaaagtggtgaggt

SEQ ID NO: 2744 - RNA, 21 nt, RNAi
auauugaaaguggugagguuu

SEQ ID NO: 2745 - RNA, 21 nt, RNAi
uuuauaacuuucaccacucca

SEQ ID NO: 2746 - DNA, 21 bp, homo sapiens
aatattgaaagtggtgaggtc

SEQ ID NO: 2747 - RNA, 21 nt, RNAi
uauugaaaguggugaggucuu

SEQ ID NO: 2748 - RNA, 21 nt, RNAi
uuauaacuuucaccacuccag

SEQ ID NO: 2749 - DNA, 21 bp, homo sapiens
aaagtggtgaggtcctggaaa

SEQ ID NO: 2750 - RNA, 21 nt, RNAi
aguggugagguccuggaaauu

SEQ ID NO: 2751 - RNA, 21 nt, RNAi
uuucaccacuccaggaccuuu

SEQ ID NO: 2752 - DNA, 21 bp, homo sapiens
aagtggtgaggtcctggaaag

SEQ ID NO: 2753 - RNA, 21 nt, RNAi
guggugagguccuggaaaguu

SEQ ID NO: 2754 - RNA, 21 nt, RNAi
uucaccacuccaggaccuuuc

SEQ ID NO: 2755 - DNA, 21 bp, homo sapiens
aaagatggcagtttgatattg

SEQ ID NO: 2756 - RNA, 21 nt, RNAi
agauggcaguuugauauuguu

SEQ ID NO: 2757 - RNA, 21 nt, RNAi
uuucuaccgucaaacuauaac

SEQ ID NO: 2758 - DNA, 21 bp, homo sapiens
aagatggcagtttgatattga

SEQ ID NO: 2759 - RNA, 21 nt, RNAi
gauggcaguuugauauugauu

SEQ ID NO: 2760 - RNA, 21 nt, RNAi
uucuaccgucaaacuauaacu

SEQ ID NO: 2761 - DNA, 21 bp, homo sapiens
aaagtctcagaaagctatcca

SEQ ID NO: 2762 - RNA, 21 nt, RNAi
agucucagaaagcuauccauu

SEQ ID NO: 2763 - RNA, 21 nt, RNAi
uuucagagucuuucgauaggu

SEQ ID NO: 2764 - DNA, 21 bp, homo sapiens
aagtctcagaaagctatccag

SEQ ID NO: 2765 - RNA, 21 nt, RNAi
gucucagaaagcuauccaguu

SEQ ID NO: 2766 - RNA, 21 nt, RNAi
uucagagucuuucgauagguc

SEQ ID NO: 2767 - DNA, 21 bp, homo sapiens
aaagctatccaggatgaaatc

SEQ ID NO: 2768 - RNA, 21 nt, RNAi
agcuauccaggaugaaaucuu

SEQ ID NO: 2769 - RNA, 21 nt, RNAi
uuucgauagguccuacuuuag

SEQ ID NO: 2770 - DNA, 21 bp, homo sapiens
aagctatccaggatgaaatcc

SEQ ID NO: 2771 - RNA, 21 nt, RNAi
gcuauccaggaugaaauccuu

SEQ ID NO: 2772 - RNA, 21 nt, RNAi
uucgauagguccuacuuuagg

SEQ ID NO: 2773 - DNA, 21 bp, homo sapiens
aaatccgttcagtgatcagac

SEQ ID NO: 2774 - RNA, 21 nt, RNAi
auccguucagugaucagacuu

SEQ ID NO: 2775 - RNA, 21 nt, RNAi
uuuaggcaagucacuagucug

SEQ ID NO: 2776 - DNA, 21 bp, homo sapiens
aatccgttcagtgatcagaca

SEQ ID NO: 2777 - RNA, 21 nt, RNAi
uccguucagugaucagacauu

SEQ ID NO: 2778 - RNA, 21 nt, RNAi
uuaggcaagucacuagucugu

SEQ ID NO: 2779 - DNA, 21 bp, homo sapiens
aaagatttggttgtacctgaa

SEQ ID NO: 2780 - RNA, 21 nt, RNAi
agauuugguuguaccugaauu

SEQ ID NO: 2781 - RNA, 21 nt, RNAi
uuucuaaaccaacauggacuu

SEQ ID NO: 2782 - DNA, 21 bp, homo sapiens
aagatttggttgtacctgaaa

SEQ ID NO: 2783 - RNA, 21 nt, RNAi
gauuugguuguaccugaaauu

SEQ ID NO: 2784 - RNA, 21 nt, RNAi
uucuaaaccaacauggacuuu

SEQ ID NO: 2785 - DNA, 21 bp, homo sapiens
aattctgaggaagtccgcctt

SEQ ID NO: 2786 - RNA, 21 nt, RNAi
uucugaggaaguccgccuuuu

SEQ ID NO: 2787 - RNA, 21 nt, RNAi
uuaagacuccuucaggcggaa

SEQ ID NO: 2788 - DNA, 21 bp, homo sapiens
aagtccgccttcgttcattta

SEQ ID NO: 2789 - RNA, 21 nt, RNAi
guccgccuucguucauuuauu

SEQ ID NO: 2790 - RNA, 21 nt, RNAi
uucaggcggaagcaaguaaau

SEQ ID NO: 2791 - DNA, 21 bp, homo sapiens
aaagtaaatagcatggtggcc

SEQ ID NO: 2792 - RNA, 21 nt, RNAi
aguaaauagcaugguggccuu

SEQ ID NO: 2793 - RNA, 21 nt, RNAi
uuucauuuaucguaccaccgg

SEQ ID NO: 2794 - DNA, 21 bp, homo sapiens
aagtaaatagcatggtggcct

SEQ ID NO: 2795 - RNA, 21 nt, RNAi
guaaauagcaugguggccuuu

SEQ ID NO: 2796 - RNA, 21 nt, RNAi
uucauuuaucguaccaccgga

SEQ ID NO: 2797 - DNA, 21 bp, homo sapiens
aaatagcatggtggcctacaa

SEQ ID NO: 2798 - RNA, 21 nt, RNAi
auagcaugguggccuacaauu

SEQ ID NO: 2799 - RNA, 21 nt, RNAi
uuuaucguaccaccggauguu

SEQ ID NO: 2800 - DNA, 21 bp, homo sapiens
aatagcatggtggcctacaaa

SEQ ID NO: 2801 - RNA, 21 nt, RNAi
uagcaugguggccuacaaauu

SEQ ID NO: 2802 - RNA, 21 nt, RNAi
uuaucguaccaccggauguuu

SEQ ID NO: 2803 - DNA, 21 bp, homo sapiens
aaattcctgtcaatgactgag

SEQ ID NO: 2804 - RNA, 21 nt, RNAi
auuccugucaaugacugaguu

SEQ ID NO: 2805 - RNA, 21 nt, RNAi
uuuaaggacaguuacugacuc

SEQ ID NO: 2806 - DNA, 21 bp, homo sapiens
aattcctgtcaatgactgagg

SEQ ID NO: 2807 - RNA, 21 nt, RNAi
uuccugucaaugacugagguu

SEQ ID NO: 2808 - RNA, 21 nt, RNAi
uuaaggacaguuacugacucc

SEQ ID NO: 2809 - DNA, 21 bp, homo sapiens
aatgactgaggatgacatgag

SEQ ID NO: 2810 - RNA, 21 nt, RNAi
ugacugaggaugacaugaguu

SEQ ID NO: 2811 - RNA, 21 nt, RNAi
uuacugacuccuacuguacuc

SEQ ID NO: 2812 - DNA, 21 bp, homo sapiens
aaatcaggtcatctatagttg

SEQ ID NO: 2813 - RNA, 21 nt, RNAi
aucaggucaucuauaguuguu

SEQ ID NO: 2814 - RNA, 21 nt, RNAi
uuuaguccaguagauaucaac

SEQ ID NO: 2815 - DNA, 21 bp, homo sapiens
aatcaggtcatctatagttga

SEQ ID NO: 2816 - RNA, 21 nt, RNAi
ucaggucaucuauaguugauu

SEQ ID NO: 2817 - RNA, 21 nt, RNAi
uuaguccaguagauaucaacu

SEQ ID NO: 2818 - DNA, 21 bp, homo sapiens
aatgatacttactgaactgtg

SEQ ID NO: 2819 - RNA, 21 nt, RNAi
ugauacuuacugaacuguguu

SEQ ID NO: 2820 - RNA, 21 nt, RNAi
uuacuaugaaugacuugacac

SEQ ID NO: 2821 - DNA, 21 bp, homo sapiens
aactgtgtgtaattgttcctt

SEQ ID NO: 2822 - RNA, 21 nt, RNAi
cuguguguaauuguuccuuuu

SEQ ID NO: 2823 - RNA, 21 nt, RNAi
uugacacacauuaacaaggaa

SEQ ID NO: 2824 - DNA, 21 bp, homo sapiens
aagatagtaactgtagatgga

SEQ ID NO: 2825 - RNA, 21 nt, RNAi
gauaguaacuguagauggauu

SEQ ID NO: 2826 - RNA, 21 nt, RNAi
uucuaucauugacaucuaccu

SEQ ID NO: 2827 - DNA, 21 bp, homo sapiens
aaacttgtgctataaagctag

SEQ ID NO: 2828 - RNA, 21 nt, RNAi
acuugugcuauaaagcuaguu

SEQ ID NO: 2829 - RNA, 21 nt, RNAi
uuugaacacgauauuucgauc

SEQ ID NO: 2830 - DNA, 21 bp, homo sapiens
aacttgtgctataaagctaga

SEQ ID NO: 2831 - RNA, 21 nt, RNAi
cuugugcuauaaagcuagauu

SEQ ID NO: 2832 - RNA, 21 nt, RNAi
uugaacacgauauuucgaucu

SEQ ID NO: 2833 - DNA, 21 bp, homo sapiens
aaagctagatgctttcctaaa

SEQ ID NO: 2834 - RNA, 21 nt, RNAi
agcuagaugcuuuccuaaauu

SEQ ID NO: 2835 - RNA, 21 nt, RNAi
uuucgaucuacgaaaggauuu

SEQ ID NO: 2836 - DNA, 21 bp, homo sapiens
aagctagatgctttcctaaat

SEQ ID NO: 2837 - RNA, 21 nt, RNAi
gcuagaugcuuuccuaaauuu

SEQ ID NO: 2838 - RNA, 21 nt, RNAi
uucgaucuacgaaaggauuua

SEQ ID NO: 2839 - DNA, 21 bp, homo sapiens
aagtagtttgactcagtatag

SEQ ID NO: 2840 - RNA, 21 nt, RNAi
guaguuugacucaguauaguu

SEQ ID NO: 2841 - RNA, 21 nt, RNAi
uucaucaaacugagucauauc

SEQ ID NO: 2842 - DNA, 21 bp, homo sapiens
aatctttgttaaggtcctgaa

SEQ ID NO: 2843 - RNA, 21 nt, RNAi
ucuuuguuaagguccugaauu

SEQ ID NO: 2844 - RNA, 21 nt, RNAi
uuagaaacaauuccaggacuu

SEQ ID NO: 2845 - DNA, 21 bp, homo sapiens
aaggtcctgaaagtaactcat

SEQ ID NO: 2846 - RNA, 21 nt, RNAi
gguccugaaaguaacucauuu

SEQ ID NO: 2847 - RNA, 21 nt, RNAi
uuccaggacuuucauugagua

SEQ ID NO: 2848 - DNA, 21 bp, homo sapiens
aaatattgctgtatagctcct

SEQ ID NO: 2849 - RNA, 21 nt, RNAi
auauugcuguauagcuccuuu

SEQ ID NO: 2850 - RNA, 21 nt, RNAi
uuuauaacgacauaucgagga

SEQ ID NO: 2851 - DNA, 21 bp, homo sapiens
aatattgctgtatagctcctt

SEQ ID NO: 2852 - RNA, 21 nt, RNAi
uauugcuguauagcuccuuuu

SEQ ID NO: 2853 - RNA, 21 nt, RNAi
uuauaacgacauaucgaggaa

SEQ ID NO: 2854 - DNA, 21 bp, homo sapiens
aacttgaacctatgaagcaat

SEQ ID NO: 2855 - RNA, 21 nt, RNAi
cuugaaccuaugaagcaauuu

SEQ ID NO: 2856 - RNA, 21 nt, RNAi
uugaacuuggauacuucguua

SEQ ID NO: 2857 - DNA, 21 bp, homo sapiens
aacctatgaagcaatggatat

SEQ ID NO: 2858 - RNA, 21 nt, RNAi
ccuaugaagcaauggauauuu

SEQ ID NO: 2859 - RNA, 21 nt, RNAi
uuggauacuucguuaccuaua

SEQ ID NO: 2860 - DNA, 21 bp, homo sapiens
aagcaatggatatttgtactg

SEQ ID NO: 2861 - RNA, 21 nt, RNAi
gcaauggauauuuguacuguu

SEQ ID NO: 2862 - RNA, 21 nt, RNAi
uucguuaccuauaaacaugac

SEQ ID NO: 2863 - DNA, 21 bp, homo sapiens
aatgttctgtgatacagaact

SEQ ID NO: 2864 - RNA, 21 nt, RNAi
uguucugugauacagaacuuu

SEQ ID NO: 2865 - RNA, 21 nt, RNAi
uuacaagacacuaugucuuga

SEQ ID NO: 2866 - DNA, 21 bp, homo sapiens
cattcggcatcaacagcattt

SEQ ID NO: 2867 - RNA, 21 nt, RNAi
uucggcaucaacagcauuuuu

SEQ ID NO: 2868 - RNA, 21 nt, RNAi
uuaagccguaguugucguaaa

SEQ ID NO: 2869 - DNA, 21 bp, homo sapiens
cagcgtggcatatatccatct

SEQ ID NO: 2870 - RNA, 21 nt, RNAi
gcguggcauauauccaucuuu

SEQ ID NO: 2871 - RNA, 21 nt, RNAi
uucgcaccguauauagguaga

SEQ ID NO: 2872 - DNA, 21 bp, homo sapiens
catatatccatctgaaacctt

SEQ ID NO: 2873 - RNA, 21 nt, RNAi
uauauccaucugaaaccuuuu

SEQ ID NO: 2874 - RNA, 21 nt, RNAi
uuauauagguagacuuuggaa

SEQ ID NO: 2875 - DNA, 21 bp, homo sapiens
catctgaaacctttactcgag

SEQ ID NO: 2876 - RNA, 21 nt, RNAi
ucugaaaccuuuacucgaguu

SEQ ID NO: 2877 - RNA, 21 nt, RNAi
uuagacuuuggaaaugagcuc

SEQ ID NO: 2878 - DNA, 21 bp, homo sapiens
cagaaatacggactcaccttg

SEQ ID NO: 2879 - RNA, 21 nt, RNAi
gaaauacggacucaccuuguu

SEQ ID NO: 2880 - RNA, 21 nt, RNAi
uucuuuaugccugaguggaac

SEQ ID NO: 2881 - DNA, 21 bp, homo sapiens
caccttgcttgtaactactga

SEQ ID NO: 2882 - RNA, 21 nt, RNAi
ccuugcuuguaacuacugauu

SEQ ID NO: 2883 - RNA, 21 nt, RNAi
uuggaacgaacauugaugacu

SEQ ID NO: 2884 - DNA, 21 bp, homo sapiens
caactgaaagattggttatac

SEQ ID NO: 2885 - RNA, 21 nt, RNAi
acugaaagauugguuauacuu

SEQ ID NO: 2886 - RNA, 21 nt, RNAi
uuugacuuucuaaccaauaug

SEQ ID NO: 2887 - DNA, 21 bp, homo sapiens
caagtgttcagttcagaaact

SEQ ID NO: 2888 - RNA, 21 nt, RNAi
aguguucaguucagaaacuuu

SEQ ID NO: 2889 - RNA, 21 nt, RNAi
uuucacaagucaagucuuuga

SEQ ID NO: 2890 - DNA, 21 bp, homo sapiens
cagttcagaaactggttgtag

SEQ ID NO: 2891 - RNA, 21 nt, RNAi
guucagaaacugguuguaguu

SEQ ID NO: 2892 - RNA, 21 nt, RNAi
uucaagucuuugaccaacauc

SEQ ID NO: 2893 - DNA, 21 bp, homo sapiens
cagaaactggttgtagttatc

SEQ ID NO: 2894 - RNA, 21 nt, RNAi
gaaacugguuguaguuaucuu

SEQ ID NO: 2895 - RNA, 21 nt, RNAi
uucuuugaccaacaucaauag

SEQ ID NO: 2896 - DNA, 21 bp, homo sapiens
caaatattgaaagtggtgagg

SEQ ID NO: 2897 - RNA, 21 nt, RNAi
aauauugaaaguggugagguu

SEQ ID NO: 2898 - RNA, 21 nt, RNAi
uuuuauaacuuucaccacucc

SEQ ID NO: 2899 - DNA, 21 bp, homo sapiens
cagtttgatattgagtgtgac

SEQ ID NO: 2900 - RNA, 21 nt, RNAi
guuugauauugagugugacuu

SEQ ID NO: 2901 - RNA, 21 nt, RNAi
uucaaacuauaacucacacug

SEQ ID NO: 2902 - DNA, 21 bp, homo sapiens
cagaaagctatccaggatgaa

SEQ ID NO: 2903 - RNA, 21 nt, RNAi
gaaagcuauccaggaugaauu

SEQ ID NO: 2904 - RNA, 21 nt, RNAi
uucuuucgauagguccuacuu

SEQ ID NO: 2905 - DNA, 21 bp, homo sapiens
caggatgaaatccgttcagtg

SEQ ID NO: 2906 - RNA, 21 nt, RNAi
ggaugaaauccguucaguguu

SEQ ID NO: 2907 - RNA, 21 nt, RNAi
uuccuacuuuaggcaagucac

SEQ ID NO: 2908 - DNA, 21 bp, homo sapiens
cagtgatcagacagatcacag

SEQ ID NO: 2909 - RNA, 21 nt, RNAi
gugaucagacagaucacaguu

SEQ ID NO: 2910 - RNA, 21 nt, RNAi
uucacuagucugucuaguguc

SEQ ID NO: 2911 - DNA, 21 bp, homo sapiens
cagacagatcacagctacggt

SEQ ID NO: 2912 - RNA, 21 nt, RNAi
gacagaucacagcuacgguuu

SEQ ID NO: 2913 - RNA, 21 nt, RNAi
uucugucuagugucgaugcca

SEQ ID NO: 2914 - DNA, 21 bp, homo sapiens
cagatcacagctacggtgaca

SEQ ID NO: 2915 - RNA, 21 nt, RNAi
gaucacagcuacggugacauu

SEQ ID NO: 2916 - RNA, 21 nt, RNAi
uucuagugucgaugccacugu

SEQ ID NO: 2917 - DNA, 21 bp, homo sapiens
cacagctacggtgacatttct

SEQ ID NO: 2918 - RNA, 21 nt, RNAi
cagcuacggugacauuucuuu

SEQ ID NO: 2919 - RNA, 21 nt, RNAi
uugucgaugccacuguaaaga

SEQ ID NO: 2920 - DNA, 21 bp, homo sapiens
cagctacggtgacatttctgc

SEQ ID NO: 2921 - RNA, 21 nt, RNAi
gcuacggugacauuucugcuu

SEQ ID NO: 2922 - RNA, 21 nt, RNAi
uucgaugccacuguaaagacg

SEQ ID NO: 2923 - DNA, 21 bp, homo sapiens
catttctgccactgttggaag

SEQ ID NO: 2924 - RNA, 21 nt, RNAi
uuucugccacuguuggaaguu

SEQ ID NO: 2925 - RNA, 21 nt, RNAi
uuaaagacggugacaaccuuc

SEQ ID NO: 2926 - DNA, 21 bp, homo sapiens
cactgttggaagtttcttgtt

SEQ ID NO: 2927 - RNA, 21 nt, RNAi
cuguuggaaguuucuuguuuu

SEQ ID NO: 2928 - RNA, 21 nt, RNAi
uugacaaccuucaaagaacaa

SEQ ID NO: 2929 - DNA, 21 bp, homo sapiens
cagacaaagatttggttgtac

SEQ ID NO: 2930 - RNA, 21 nt, RNAi
gacaaagauuugguuguacuu

SEQ ID NO: 2931 - RNA, 21 nt, RNAi
uucuguuucuaaaccaacaug

SEQ ID NO: 2932 - DNA, 21 bp, homo sapiens
caaagatttggttgtacctga

SEQ ID NO: 2933 - RNA, 21 nt, RNAi
aagauuugguuguaccugauu

SEQ ID NO: 2934 - RNA, 21 nt, RNAi
uuuucuaaaccaacauggacu

SEQ ID NO: 2935 - DNA, 21 bp, homo sapiens
cacagtttattaccaattctg

SEQ ID NO: 2936 - RNA, 21 nt, RNAi
caguuuauuaccaauucuguu

SEQ ID NO: 2937 - RNA, 21 nt, RNAi
uugucaaauaaugguuaagac

SEQ ID NO: 2938 - DNA, 21 bp, homo sapiens
cagtttattaccaattctgag

SEQ ID NO: 2939 - RNA, 21 nt, RNAi
guuuauuaccaauucugaguu

SEQ ID NO: 2940 - RNA, 21 nt, RNAi
uucaaauaaugguuaagacuc

SEQ ID NO: 2941 - DNA, 21 bp, homo sapiens
caattctgaggaagtccgcct

SEQ ID NO: 2942 - RNA, 21 nt, RNAi
auucugaggaaguccgccuuu

SEQ ID NO: 2943 - RNA, 21 nt, RNAi
uuuaagacuccuucaggcgga

SEQ ID NO: 2944 - DNA, 21 bp, homo sapiens
catttactactacaatccaca

SEQ ID NO: 2945 - RNA, 21 nt, RNAi
uuuacuacuacaauccacauu

SEQ ID NO: 2946 - RNA, 21 nt, RNAi
uuaaaugaugauguuaggugu

SEQ ID NO: 2947 - DNA, 21 bp, homo sapiens
caatccacaaagtaaatagca

SEQ ID NO: 2948 - RNA, 21 nt, RNAi
auccacaaaguaaauagcauu

SEQ ID NO: 2949 - RNA, 21 nt, RNAi
uuuagguguuucauuuaucgu

SEQ ID NO: 2950 - DNA, 21 bp, homo sapiens
cacaaagtaaatagcatggtg

SEQ ID NO: 2951 - RNA, 21 nt, RNAi
caaaguaaauagcaugguguu

SEQ ID NO: 2952 - RNA, 21 nt, RNAi
uuguuucauuuaucguaccac

SEQ ID NO: 2953 - DNA, 21 bp, homo sapiens
caaagtaaatagcatggtggc

SEQ ID NO: 2954 - RNA, 21 nt, RNAi
aaguaaauagcaugguggcuu

SEQ ID NO: 2955 - RNA, 21 nt, RNAi
uuuucauuuaucguaccaccg

SEQ ID NO: 2956 - DNA, 21 bp, homo sapiens
caatgactgaggatgacatga

SEQ ID NO: 2957 - RNA, 21 nt, RNAi
augacugaggaugacaugauu

SEQ ID NO: 2958 - RNA, 21 nt, RNAi
uuuacugacuccuacuguacu

SEQ ID NO: 2959 - DNA, 21 bp, homo sapiens
caggtcatctatagttgatat

SEQ ID NO: 2960 - RNA, 21 nt, RNAi
ggucaucuauaguugauauuu

SEQ ID NO: 2961 - RNA, 21 nt, RNAi
uuccaguagauaucaacuaua

SEQ ID NO: 2962 - DNA, 21 bp, homo sapiens
catggagttaacatcatgaat

SEQ ID NO: 2963 - RNA, 21 nt, RNAi
uggaguuaacaucaugaauuu

SEQ ID NO: 2964 - RNA, 21 nt, RNAi
uuaccucaauuguaguacuua

SEQ ID NO: 2965 - DNA, 21 bp, homo sapiens
caacattgtgatgtatattcc

SEQ ID NO: 2966 - RNA, 21 nt, RNAi
acauugugauguauauuccuu

SEQ ID NO: 2967 - RNA, 21 nt, RNAi
uuuguaacacuacauauaagg

SEQ ID NO: 2968 - DNA, 21 bp, homo sapiens
caagtagtttgactcagtata

SEQ ID NO: 2969 - RNA, 21 nt, RNAi
aguaguuugacucaguauauu

SEQ ID NO: 2970 - RNA, 21 nt, RNAi
uuucaucaaacugagucauau

SEQ ID NO: 2971 - DNA, 21 bp, homo sapiens
cagaatctttgttaaggtcct

SEQ ID NO: 2972 - RNA, 21 nt, RNAi
gaaucuuuguuaagguccuuu

SEQ ID NO: 2973 - RNA, 21 nt, RNAi
uucuuagaaacaauuccagga

SEQ ID NO: 2974 - DNA, 21 bp, homo sapiens
gaagtgctgttggagccgctg

SEQ ID NO: 2975 - RNA, 21 nt, RNAi
agugcuguuggagccgcuguu

SEQ ID NO: 2976 - RNA, 21 nt, RNAi
uuucacgacaaccucggcgac

SEQ ID NO: 2977 - DNA, 21 bp, homo sapiens
gaaatcgtggccgagttcttc

SEQ ID NO: 2978 - RNA, 21 nt, RNAi
aaucguggccgaguucuucuu

SEQ ID NO: 2979 - RNA, 21 nt, RNAi
uuuuagcaccggcucaagaag

SEQ ID NO: 2980 - DNA, 21 bp, homo sapiens
gagttcttctcattcggcatc

SEQ ID NO: 2981 - RNA, 21 nt, RNAi
guucuucucauucggcaucuu

SEQ ID NO: 2982 - RNA, 21 nt, RNAi
uucaagaagaguaagccguag

SEQ ID NO: 2983 - DNA, 21 bp, homo sapiens
gaaacctttactcgagtgcag

SEQ ID NO: 2984 - RNA, 21 nt, RNAi
aaccuuuacucgagugcaguu

SEQ ID NO: 2985 - RNA, 21 nt, RNAi
uuuuggaaaugagcucacguc

SEQ ID NO: 2986 - DNA, 21 bp, homo sapiens
gagtgcagaaatacggactca

SEQ ID NO: 2987 - RNA, 21 nt, RNAi
gugcagaaauacggacucauu

SEQ ID NO: 2988 - RNA, 21 nt, RNAi
uucacgucuuuaugccugagu

SEQ ID NO: 2989 - DNA, 21 bp, homo sapiens
gaaatacggactcaccttgct

SEQ ID NO: 2990 - RNA, 21 nt, RNAi
aauacggacucaccuugcuuu

SEQ ID NO: 2991 - RNA, 21 nt, RNAi
uuuuaugccugaguggaacga

SEQ ID NO: 2992 - DNA, 21 bp, homo sapiens
gactcaccttgcttgtaacta

SEQ ID NO: 2993 - RNA, 21 nt, RNAi
cucaccuugcuuguaacuauu

SEQ ID NO: 2994 - RNA, 21 nt, RNAi
uugaguggaacgaacauugau

SEQ ID NO: 2995 - DNA, 21 bp, homo sapiens
gaacaactgaaagattggtta

SEQ ID NO: 2996 - RNA, 21 nt, RNAi
acaacugaaagauugguuauu

SEQ ID NO: 2997 - RNA, 21 nt, RNAi
uuuguugacuuucuaaccaau

SEQ ID NO: 2998 - DNA, 21 bp, homo sapiens
gaaagattggttatacaagtg

SEQ ID NO: 2999 - RNA, 21 nt, RNAi
aagauugguuauacaaguguu

SEQ ID NO: 3000 - RNA, 21 nt, RNAi
uuuucuaaccaauauguucac

SEQ ID NO: 3001 - DNA, 21 bp, homo sapiens
gattggttatacaagtgttca

SEQ ID NO: 3002 - RNA, 21 nt, RNAi
uugguuauacaaguguucauu

SEQ ID NO: 3003 - RNA, 21 nt, RNAi
uuaaccaauauguucacaagu

SEQ ID NO: 3004 - DNA, 21 bp, homo sapiens
gaaactggttgtagttatctc

SEQ ID NO: 3005 - RNA, 21 nt, RNAi
aacugguuguaguuaucucuu

SEQ ID NO: 3006 - RNA, 21 nt, RNAi
uuuugaccaacaucaauagag

SEQ ID NO: 3007 - DNA, 21 bp, homo sapiens
gaaagtggtgaggtcctggaa

SEQ ID NO: 3008 - RNA, 21 nt, RNAi
aaguggugagguccuggaauu

SEQ ID NO: 3009 - RNA, 21 nt, RNAi
uuuucaccacuccaggaccuu

SEQ ID NO: 3010 - DNA, 21 bp, homo sapiens
gaggtcctggaaagatggcag

SEQ ID NO: 3011 - RNA, 21 nt, RNAi
gguccuggaaagauggcaguu

SEQ ID NO: 3012 - RNA, 21 nt, RNAi
uuccaggaccuuucuaccguc

SEQ ID NO: 3013 - DNA, 21 bp, homo sapiens
gaaagatggcagtttgatatt

SEQ ID NO: 3014 - RNA, 21 nt, RNAi
aagauggcaguuugauauuuu

SEQ ID NO: 3015 - RNA, 21 nt, RNAi
uuuucuaccgucaaacuauaa

SEQ ID NO: 3016 - DNA, 21 bp, homo sapiens
gatggcagtttgatattgagt

SEQ ID NO: 3017 - RNA, 21 nt, RNAi
uggcaguuugauauugaguuu

SEQ ID NO: 3018 - RNA, 21 nt, RNAi
uuaccgucaaacuauaacuca

SEQ ID NO: 3019 - DNA, 21 bp, homo sapiens
gatattgagtgtgacaagact

SEQ ID NO: 3020 - RNA, 21 nt, RNAi
uauugagugugacaagacuuu

SEQ ID NO: 3021 - RNA, 21 nt, RNAi
uuauaacucacacuguucuga

SEQ ID NO: 3022 - DNA, 21 bp, homo sapiens
gaaagctatccaggatgaaat

SEQ ID NO: 3023 - RNA, 21 nt, RNAi
aagcuauccaggaugaaauuu

SEQ ID NO: 3024 - RNA, 21 nt, RNAi
uuuucgauagguccuacuuua

SEQ ID NO: 3025 - DNA, 21 bp, homo sapiens
gatgaaatccgttcagtgatc

SEQ ID NO: 3026 - RNA, 21 nt, RNAi
ugaaauccguucagugaucuu

SEQ ID NO: 3027 - RNA, 21 nt, RNAi
uuacuuuaggcaagucacuag

SEQ ID NO: 3028 - DNA, 21 bp, homo sapiens
gaaatccgttcagtgatcaga

SEQ ID NO: 3029 - RNA, 21 nt, RNAi
aauccguucagugaucagauu

SEQ ID NO: 3030 - RNA, 21 nt, RNAi
uuuuaggcaagucacuagucu

SEQ ID NO: 3031 - DNA, 21 bp, homo sapiens
gatcagacagatcacagctac

SEQ ID NO: 3032 - RNA, 21 nt, RNAi
ucagacagaucacagcuacuu

SEQ ID NO: 3033 - RNA, 21 nt, RNAi
uuagucugucuagugucgaug

SEQ ID NO: 3034 - DNA, 21 bp, homo sapiens
gacagatcacagctacggtga

SEQ ID NO: 3035 - RNA, 21 nt, RNAi
cagaucacagcuacggugauu

SEQ ID NO: 3036 - RNA, 21 nt, RNAi
uugucuagugucgaugccacu

SEQ ID NO: 3037 - DNA, 21 bp, homo sapiens
gatcacagctacggtgacatt

SEQ ID NO: 3038 - RNA, 21 nt, RNAi
ucacagcuacggugacauuuu

SEQ ID NO: 3039 - RNA, 21 nt, RNAi
uuagugucgaugccacuguaa

SEQ ID NO: 3040 - DNA, 21 bp, homo sapiens
gacatttctgccactgttgga

SEQ ID NO: 3041 - RNA, 21 nt, RNAi
cauuucugccacuguuggauu

SEQ ID NO: 3042 - RNA, 21 nt, RNAi
uuguaaagacggugacaaccu

SEQ ID NO: 3043 - DNA, 21 bp, homo sapiens
gatctgctgatttatacagac

SEQ ID NO: 3044 - RNA, 21 nt, RNAi
ucugcugauuuauacagacuu

SEQ ID NO: 3045 - RNA, 21 nt, RNAi
uuagacgacuaaauaugucug

SEQ ID NO: 3046 - DNA, 21 bp, homo sapiens
gacaaagatttggttgtacct

SEQ ID NO: 3047 - RNA, 21 nt, RNAi
caaagauuugguuguaccuuu

SEQ ID NO: 3048 - RNA, 21 nt, RNAi
uuguuucuaaaccaacaugga

SEQ ID NO: 3049 - DNA, 21 bp, homo sapiens
gaccacagtttattaccaatt

SEQ ID NO: 3050 - RNA, 21 nt, RNAi
ccacaguuuauuaccaauuuu

SEQ ID NO: 3051 - RNA, 21 nt, RNAi
uuggugucaaauaaugguuaa

SEQ ID NO: 3052 - DNA, 21 bp, homo sapiens
gaggaagtccgccttcgttca

SEQ ID NO: 3053 - RNA, 21 nt, RNAi
ggaaguccgccuucguucauu

SEQ ID NO: 3054 - RNA, 21 nt, RNAi
uuccuucaggcggaagcaagu

SEQ ID NO: 3055 - DNA, 21 bp, homo sapiens
gaagtccgccttcgttcattt

SEQ ID NO: 3056 - RNA, 21 nt, RNAi
aguccgccuucguucauuuuu

SEQ ID NO: 3057 - RNA, 21 nt, RNAi
uuucaggcggaagcaaguaaa

SEQ ID NO: 3058 - DNA, 21 bp, homo sapiens
gactgaggatgacatgaggaa

SEQ ID NO: 3059 - RNA, 21 nt, RNAi
cugaggaugacaugaggaauu

SEQ ID NO: 3060 - RNA, 21 nt, RNAi
uugacuccuacuguacuccuu

SEQ ID NO: 3061 - DNA, 21 bp, homo sapiens
gaaatcaggtcatctatagtt

SEQ ID NO: 3062 - RNA, 21 nt, RNAi
aaucaggucaucuauaguuuu

SEQ ID NO: 3063 - RNA, 21 nt, RNAi
uuuuaguccaguagauaucaa

SEQ ID NO: 3064 - DNA, 21 bp, homo sapiens
gatacttactgaactgtgtgt

SEQ ID NO: 3065 - RNA, 21 nt, RNAi
uacuuacugaacuguguguuu

SEQ ID NO: 3066 - RNA, 21 nt, RNAi
uuaugaaugacuugacacaca

SEQ ID NO: 3067 - DNA, 21 bp, homo sapiens
gaactgtgtgtaattgttcct

SEQ ID NO: 3068 - RNA, 21 nt, RNAi
acuguguguaauuguuccuuu

SEQ ID NO: 3069 - RNA, 21 nt, RNAi
uuugacacacauuaacaagga

SEQ ID NO: 3070 - DNA, 21 bp, homo sapiens
gacttaccatggagttaacat

SEQ ID NO: 3071 - RNA, 21 nt, RNAi
cuuaccauggaguuaacauuu

SEQ ID NO: 3072 - RNA, 21 nt, RNAi
uugaaugguaccucaauugua

SEQ ID NO: 3073 - DNA, 21 bp, homo sapiens
gaagatagtaactgtagatgg

SEQ ID NO: 3074 - RNA, 21 nt, RNAi
agauaguaacuguagaugguu

SEQ ID NO: 3075 - RNA, 21 nt, RNAi
uuucuaucauugacaucuacc

SEQ ID NO: 3076 - DNA, 21 bp, homo sapiens
gatagtaactgtagatggaaa

SEQ ID NO: 3077 - RNA, 21 nt, RNAi
uaguaacuguagauggaaauu

SEQ ID NO: 3078 - RNA, 21 nt, RNAi
uuaucauugacaucuaccuuu

SEQ ID NO: 3079 - DNA, 21 bp, homo sapiens
gatgctttcctaaatcagatg

SEQ ID NO: 3080 - RNA, 21 nt, RNAi
ugcuuuccuaaaucagauguu

SEQ ID NO: 3081 - RNA, 21 nt, RNAi
uuacgaaaggauuuagucuac

SEQ ID NO: 3082 - DNA, 21 bp, homo sapiens
gaatctttgttaaggtcctga

SEQ ID NO: 3083 - RNA, 21 nt, RNAi
aucuuuguuaagguccugauu

SEQ ID NO: 3084 - RNA, 21 nt, RNAi
uuuagaaacaauuccaggacu

SEQ ID NO: 3085 - DNA, 21 bp, homo sapiens
gaaatattgctgtatagctcc

SEQ ID NO: 3086 - RNA, 21 nt, RNAi
aauauugcuguauagcuccuu

SEQ ID NO: 3087 - RNA, 21 nt, RNAi
uuuuauaacgacauaucgagg

SEQ ID NO: 3088 - DNA, 21 bp, homo sapiens
gaccttcatttcatgtatagt

SEQ ID NO: 3089 - RNA, 21 nt, RNAi
ccuucauuucauguauaguuu

SEQ ID NO: 3090 - RNA, 21 nt, RNAi
uuggaaguaaaguacauauca

SEQ ID NO: 3091 - DNA, 21 bp, homo sapiens
gaacctatgaagcaatggata

SEQ ID NO: 3092 - RNA, 21 nt, RNAi
accuaugaagcaauggauauu

SEQ ID NO: 3093 - RNA, 21 nt, RNAi
uuuggauacuucguuaccuau

SEQ ID NO: 3094 - DNA, 21 bp, homo sapiens
gaagcaatggatatttgtact

SEQ ID NO: 3095 - RNA, 21 nt, RNAi
agcaauggauauuuguacuuu

SEQ ID NO: 3096 - RNA, 21 nt, RNAi
uuucguuaccuauaaacauga

SEQ ID NO: 3097 - DNA, 21 bp, homo sapiens
tatatcagcgtggcatatatc

SEQ ID NO: 3098 - RNA, 21 nt, RNAi
uaucagcguggcauauaucuu

SEQ ID NO: 3099 - RNA, 21 nt, RNAi
uuauagucgcaccguauauag

SEQ ID NO: 3100 - DNA, 21 bp, homo sapiens
tatcagcgtggcatatatcca

SEQ ID NO: 3101 - RNA, 21 nt, RNAi
ucagcguggcauauauccauu

SEQ ID NO: 3102 - RNA, 21 nt, RNAi
uuagucgcaccguauauaggu

SEQ ID NO: 3103 - DNA, 21 bp, homo sapiens
tatccatctgaaacctttact

SEQ ID NO: 3104 - RNA, 21 nt, RNAi
uccaucugaaaccuuuacuuu

SEQ ID NO: 3105 - RNA, 21 nt, RNAi
uuagguagacuuuggaaauga

SEQ ID NO: 3106 - DNA, 21 bp, homo sapiens
tactcgagtgcagaaatacgg

SEQ ID NO: 3107 - RNA, 21 nt, RNAi
cucgagugcagaaauacgguu

SEQ ID NO: 3108 - RNA, 21 nt, RNAi
uugagcucacgucuuuaugcc

SEQ ID NO: 3109 - DNA, 21 bp, homo sapiens
tacggactcaccttgcttgta

SEQ ID NO: 3110 - RNA, 21 nt, RNAi
cggacucaccuugcuuguauu

SEQ ID NO: 3111 - RNA, 21 nt, RNAi
uugccugaguggaacgaacau

SEQ ID NO: 3112 - DNA, 21 bp, homo sapiens
taactactgatcttgagctca

SEQ ID NO: 3113 - RNA, 21 nt, RNAi
acuacugaucuugagcucauu

SEQ ID NO: 3114 - RNA, 21 nt, RNAi
uuugaugacuagaacucgagu

SEQ ID NO: 3115 - DNA, 21 bp, homo sapiens
tactgatcttgagctcataaa

SEQ ID NO: 3116 - RNA, 21 nt, RNAi
cugaucuugagcucauaaauu

SEQ ID NO: 3117 - RNA, 21 nt, RNAi
uugacuagaacucgaguauuu

SEQ ID NO: 3118 - DNA, 21 bp, homo sapiens
tacctaaataatgtggtggaa

SEQ ID NO: 3119 - RNA, 21 nt, RNAi
ccuaaauaaugugguggaauu

SEQ ID NO: 3120 - RNA, 21 nt, RNAi
uuggauuuauuacaccaccuu

SEQ ID NO: 3121 - DNA, 21 bp, homo sapiens
taaataatgtggtggaacaac

SEQ ID NO: 3122 - RNA, 21 nt, RNAi
aauaaugugguggaacaacuu

SEQ ID NO: 3123 - RNA, 21 nt, RNAi
uuuuauuacaccaccuuguug

SEQ ID NO: 3124 - DNA, 21 bp, homo sapiens
taatgtggtggaacaactgaa

SEQ ID NO: 3125 - RNA, 21 nt, RNAi
augugguggaacaacugaauu

SEQ ID NO: 3126 - RNA, 21 nt, RNAi
uuuacaccaccuuguugacuu

SEQ ID NO: 3127 - DNA, 21 bp, homo sapiens
tatacaagtgttcagttcaga

SEQ ID NO: 3128 - RNA, 21 nt, RNAi
uacaaguguucaguucagauu

SEQ ID NO: 3129 - RNA, 21 nt, RNAi
uuauguucacaagucaagucu

SEQ ID NO: 3130 - DNA, 21 bp, homo sapiens
tacaagtgttcagttcagaaa

SEQ ID NO: 3131 - RNA, 21 nt, RNAi
caaguguucaguucagaaauu

SEQ ID NO: 3132 - RNA, 21 nt, RNAi
uuguucacaagucaagucuuu

SEQ ID NO: 3133 - DNA, 21 bp, homo sapiens
tattgaaagtggtgaggtcct

SEQ ID NO: 3134 - RNA, 21 nt, RNAi
uugaaaguggugagguccuuu

SEQ ID NO: 3135 - RNA, 21 nt, RNAi
uuaacuuucaccacuccagga

SEQ ID NO: 3136 - DNA, 21 bp, homo sapiens
tattgagtgtgacaagactgc

SEQ ID NO: 3137 - RNA, 21 nt, RNAi
uugagugugacaagacugcuu

SEQ ID NO: 3138 - RNA, 21 nt, RNAi
uuaacucacacuguucugacg

SEQ ID NO: 3139 - DNA, 21 bp, homo sapiens
tatccaggatgaaatccgttc

SEQ ID NO: 3140 - RNA, 21 nt, RNAi
uccaggaugaaauccguucuu

SEQ ID NO: 3141 - RNA, 21 nt, RNAi
uuagguccuacuuuaggcaag

SEQ ID NO: 3142 - DNA, 21 bp, homo sapiens
tacggtgacatttctgccact

SEQ ID NO: 3143 - RNA, 21 nt, RNAi
cggugacauuucugccacuuu

SEQ ID NO: 3144 - RNA, 21 nt, RNAi
uugccacuguaaagacgguga

SEQ ID NO: 3145 - DNA, 21 bp, homo sapiens
tacagacaaagatttggttgt

SEQ ID NO: 3146 - RNA, 21 nt, RNAi
cagacaaagauuugguuguuu

SEQ ID NO: 3147 - RNA, 21 nt, RNAi
uugucuguuucuaaaccaaca

SEQ ID NO: 3148 - DNA, 21 bp, homo sapiens
tattaccaattctgaggaagt

SEQ ID NO: 3149 - RNA, 21 nt, RNAi
uuaccaauucugaggaaguuu

SEQ ID NO: 3150 - RNA, 21 nt, RNAi
uuaaugguuaagacuccuuca

SEQ ID NO: 3151 - DNA, 21 bp, homo sapiens
taccaattctgaggaagtccg

SEQ ID NO: 3152 - RNA, 21 nt, RNAi
ccaauucugaggaaguccguu

SEQ ID NO: 3153 - RNA, 21 nt, RNAi
uugguuaagacuccuucaggc

SEQ ID NO: 3154 - DNA, 21 bp, homo sapiens
tactactacaatccacaaagt

SEQ ID NO: 3155 - RNA, 21 nt, RNAi
cuacuacaauccacaaaguuu

SEQ ID NO: 3156 - RNA, 21 nt, RNAi
uugaugauguuagguguuuca

SEQ ID NO: 3157 - DNA, 21 bp, homo sapiens
taaatagcatggtggcctaca

SEQ ID NO: 3158 - RNA, 21 nt, RNAi
aauagcaugguggccuacauu

SEQ ID NO: 3159 - RNA, 21 nt, RNAi
uuuuaucguaccaccggaugu

SEQ ID NO: 3160 - DNA, 21 bp, homo sapiens
tacttactgaactgtgtgtaa

SEQ ID NO: 3161 - RNA, 21 nt, RNAi
cuuacugaacuguguguaauu

SEQ ID NO: 3162 - RNA, 21 nt, RNAi
uugaaugacuugacacacauu

SEQ ID NO: 3163 - DNA, 21 bp, homo sapiens
tactgaactgtgtgtaattgt

SEQ ID NO: 3164 - RNA, 21 nt, RNAi
cugaacuguguguaauuguuu

SEQ ID NO: 3165 - RNA, 21 nt, RNAi
uugacuugacacacauuaaca

SEQ ID NO: 3166 - DNA, 21 bp, homo sapiens
tacctatttgacttaccatgg

SEQ ID NO: 3167 - RNA, 21 nt, RNAi
ccuauuugacuuaccaugguu

SEQ ID NO: 3168 - RNA, 21 nt, RNAi
uuggauaaacugaaugguacc

SEQ ID NO: 3169 - DNA, 21 bp, homo sapiens
tatttgacttaccatggagtt

SEQ ID NO: 3170 - RNA, 21 nt, RNAi
uuugacuuaccauggaguuuu

SEQ ID NO: 3171 - RNA, 21 nt, RNAi
uuaaacugaaugguaccucaa

SEQ ID NO: 3172 - DNA, 21 bp, homo sapiens
taccatggagttaacatcatg

SEQ ID NO: 3173 - RNA, 21 nt, RNAi
ccauggaguuaacaucauguu

SEQ ID NO: 3174 - RNA, 21 nt, RNAi
uugguaccucaauuguaguac

SEQ ID NO: 3175 - DNA, 21 bp, homo sapiens
tataaagctagatgctttcct

SEQ ID NO: 3176 - RNA, 21 nt, RNAi
uaaagcuagaugcuuuccuuu

SEQ ID NO: 3177 - RNA, 21 nt, RNAi
uuauuucgaucuacgaaagga

SEQ ID NO: 3178 - DNA, 21 bp, homo sapiens
taaagctagatgctttcctaa

SEQ ID NO: 3179 - RNA, 21 nt, RNAi
aagcuagaugcuuuccuaauu

SEQ ID NO: 3180 - RNA, 21 nt, RNAi
uuuucgaucuacgaaaggauu

SEQ ID NO: 3181 - DNA, 21 bp, homo sapiens
tagatgctttcctaaatcaga

SEQ ID NO: 3182 - RNA, 21 nt, RNAi
gaugcuuuccuaaaucagauu

SEQ ID NO: 3183 - RNA, 21 nt, RNAi
uucuacgaaaggauuuagucu

SEQ ID NO: 3184 - DNA, 21 bp, homo sapiens
tagtttgactcagtataggta

SEQ ID NO: 3185 - RNA, 21 nt, RNAi
guuugacucaguauagguauu

SEQ ID NO: 3186 - RNA, 21 nt, RNAi
uucaaacugagucauauccau

SEQ ID NO: 3187 - DNA, 21 bp, homo sapiens
taaggtcctgaaagtaactca

SEQ ID NO: 3188 - RNA, 21 nt, RNAi
agguccugaaaguaacucauu

SEQ ID NO: 3189 - RNA, 21 nt, RNAi
uuuccaggacuuucauugagu

SEQ ID NO: 3190 - DNA, 21 bp, homo sapiens
taacttgaacctatgaagcaa

SEQ ID NO: 3191 - RNA, 21 nt, RNAi
acuugaaccuaugaagcaauu

SEQ ID NO: 3192 - RNA, 21 nt, RNAi
uuugaacuuggauacuucguu

SEQ ID NO: 3193 - DNA, 21 bp, homo sapiens
taatgttctgtgatacagaac

SEQ ID NO: 3194 - RNA, 21 nt, RNAi
auguucugugauacagaacuu

SEQ ID NO: 3195 - RNA, 21 nt, RNAi
uuuacaagacacuaugucuug

SEQ ID NO: 3196 - DNA, 21 bp, homo sapiens
aaagctggctcttggaaattg

SEQ ID NO: 3197 - RNA, 21 nt, RNAi
agcuggcucuuggaaauuguu

SEQ ID NO: 3198 - RNA, 21 nt, RNAi
uuucgaccgagaaccuuuaac

SEQ ID NO: 3199 - DNA, 21 bp, homo sapiens
aagctggctcttggaaattga

SEQ ID NO: 3200 - RNA, 21 nt, RNAi
gcuggcucuuggaaauugauu

SEQ ID NO: 3201 - RNA, 21 nt, RNAi
uucgaccgagaaccuuuaacu

SEQ ID NO: 3202 - DNA, 21 bp, homo sapiens
aaattgagcggagagcgacgc

SEQ ID NO: 3203 - RNA, 21 nt, RNAi
auugagcggagagcgacgcuu

SEQ ID NO: 3204 - RNA, 21 nt, RNAi
uuuaacucgccucucgcugcg

SEQ ID NO: 3205 - DNA, 21 bp, homo sapiens
aattgagcggagagcgacgcg

SEQ ID NO: 3206 - RNA, 21 nt, RNAi
uugagcggagagcgacgcguu

SEQ ID NO: 3207 - RNA, 21 nt, RNAi
uuaacucgccucucgcugcgc

SEQ ID NO: 3208 - DNA, 21 bp, homo sapiens
aaattggagaaggtacctatg

SEQ ID NO: 3209 - RNA, 21 nt, RNAi
auuggagaagguaccuauguu

SEQ ID NO: 3210 - RNA, 21 nt, RNAi
uuuaaccucuuccauggauac

SEQ ID NO: 3211 - DNA, 21 bp, homo sapiens
aattggagaaggtacctatgg

SEQ ID NO: 3212 - RNA, 21 nt, RNAi
uuggagaagguaccuaugguu

SEQ ID NO: 3213 - RNA, 21 nt, RNAi
uuaaccucuuccauggauacc

SEQ ID NO: 3214 - DNA, 21 bp, homo sapiens
aaggtacctatggagttgtgt

SEQ ID NO: 3215 - RNA, 21 nt, RNAi
gguaccuauggaguuguguuu

SEQ ID NO: 3216 - RNA, 21 nt, RNAi
uuccauggauaccucaacaca

SEQ ID NO: 3217 - DNA, 21 bp, homo sapiens
aaactacaggtcaagtggtag

SEQ ID NO: 3218 - RNA, 21 nt, RNAi
acuacaggucaagugguaguu

SEQ ID NO: 3219 - RNA, 21 nt, RNAi
uuugauguccaguucaccauc

SEQ ID NO: 3220 - DNA, 21 bp, homo sapiens
aactacaggtcaagtggtagc

SEQ ID NO: 3221 - RNA, 21 nt, RNAi
cuacaggucaagugguagcuu

SEQ ID NO: 3222 - RNA, 21 nt, RNAi
uugauguccaguucaccaucg

SEQ ID NO: 3223 - DNA, 21 bp, homo sapiens
aaatcagactagaaagtgaag

SEQ ID NO: 3224 - RNA, 21 nt, RNAi
aucagacuagaaagugaaguu

SEQ ID NO: 3225 - RNA, 21 nt, RNAi
uuuagucugaucuuucacuuc

SEQ ID NO: 3226 - DNA, 21 bp, homo sapiens
aatcagactagaaagtgaaga

SEQ ID NO: 3227 - RNA, 21 nt, RNAi
ucagacuagaaagugaagauu

SEQ ID NO: 3228 - RNA, 21 nt, RNAi
uuagucugaucuuucacuucu

SEQ ID NO: 3229 - DNA, 21 bp, homo sapiens
aaaggaacttcgtcatccaaa

SEQ ID NO: 3230 - RNA, 21 nt, RNAi
aggaacuucgucauccaaauu

SEQ ID NO: 3231 - RNA, 21 nt, RNAi
uuuccuugaagcaguagguuu

SEQ ID NO: 3232 - DNA, 21 bp, homo sapiens
aaggaacttcgtcatccaaat

SEQ ID NO: 3233 - RNA, 21 nt, RNAi
ggaacuucgucauccaaauuu

SEQ ID NO: 3234 - RNA, 21 nt, RNAi
uuccuugaagcaguagguuua

SEQ ID NO: 3235 - DNA, 21 bp, homo sapiens
aacttcgtcatccaaatatag

SEQ ID NO: 3236 - RNA, 21 nt, RNAi
cuucgucauccaaauauaguu

SEQ ID NO: 3237 - RNA, 21 nt, RNAi
uugaagcaguagguuuauauc

SEQ ID NO: 3238 - DNA, 21 bp, homo sapiens
aaatatagtcagtcttcagga

SEQ ID NO: 3239 - RNA, 21 nt, RNAi
auauagucagucuucaggauu

SEQ ID NO: 3240 - RNA, 21 nt, RNAi
uuuauaucagucagaaguccu

SEQ ID NO: 3241 - DNA, 21 bp, homo sapiens
aatatagtcagtcttcaggat

SEQ ID NO: 3242 - RNA, 21 nt, RNAi
uauagucagucuucaggauuu

SEQ ID NO: 3243 - RNA, 21 nt, RNAi
uuauaucagucagaaguccua

SEQ ID NO: 3244 - DNA, 21 bp, homo sapiens
aagagttcttcacagagactt

SEQ ID NO: 3245 - RNA, 21 nt, RNAi
gaguucuucacagagacuuuu

SEQ ID NO: 3246 - RNA, 21 nt, RNAi
uucucaagaagugucucugaa

SEQ ID NO: 3247 - DNA, 21 bp, homo sapiens
aaaggaacaattaaactggct

SEQ ID NO: 3248 - RNA, 21 nt, RNAi
aggaacaauuaaacuggcuuu

SEQ ID NO: 3249 - RNA, 21 nt, RNAi
uuuccuuguuaauuugaccga

SEQ ID NO: 3250 - DNA, 21 bp, homo sapiens
aaggaacaattaaactggctg

SEQ ID NO: 3251 - RNA, 21 nt, RNAi
ggaacaauuaaacuggcuguu

SEQ ID NO: 3252 - RNA, 21 nt, RNAi
uuccuuguuaauuugaccgac

SEQ ID NO: 3253 - DNA, 21 bp, homo sapiens
aacactctggtacagatctcc

SEQ ID NO: 3254 - RNA, 21 nt, RNAi
cacucugguacagaucuccuu

SEQ ID NO: 3255 - RNA, 21 nt, RNAi
uugugagaccaugucuagagg

SEQ ID NO: 3256 - DNA, 21 bp, homo sapiens
aactccagttgacatttggag

SEQ ID NO: 3257 - RNA, 21 nt, RNAi
cuccaguugacauuuggaguu

SEQ ID NO: 3258 - RNA, 21 nt, RNAi
uugaggucaacuguaaaccuc

SEQ ID NO: 3259 - DNA, 21 bp, homo sapiens
aactagcaactaagaaaccac

SEQ ID NO: 3260 - RNA, 21 nt, RNAi
cuagcaacuaagaaaccacuu

SEQ ID NO: 3261 - RNA, 21 nt, RNAi
uugaucguugauucuuuggug

SEQ ID NO: 3262 - DNA, 21 bp, homo sapiens
aaattgatcaactcttcagga

SEQ ID NO: 3263 - RNA, 21 nt, RNAi
auugaucaacucuucaggauu

SEQ ID NO: 3264 - RNA, 21 nt, RNAi
uuuaacuaguugagaaguccu

SEQ ID NO: 3265 - DNA, 21 bp, homo sapiens
aattgatcaactcttcaggat

SEQ ID NO: 3266 - RNA, 21 nt, RNAi
uugaucaacucuucaggauuu

SEQ ID NO: 3267 - RNA, 21 nt, RNAi
uuaacuaguugagaaguccua

SEQ ID NO: 3268 - DNA, 21 bp, homo sapiens
aataatgaagtgtggccagaa

SEQ ID NO: 3269 - RNA, 21 nt, RNAi
uaaugaaguguggccagaauu

SEQ ID NO: 3270 - RNA, 21 nt, RNAi
uuauuacuucacaccggucuu

SEQ ID NO: 3271 - DNA, 21 bp, homo sapiens
aatgaagtgtggccagaagtg

SEQ ID NO: 3272 - RNA, 21 nt, RNAi
ugaaguguggccagaaguguu

SEQ ID NO: 3273 - RNA, 21 nt, RNAi
uuacuucacaccggucuucac

SEQ ID NO: 3274 - DNA, 21 bp, homo sapiens
aagtgtggccagaagtggaat

SEQ ID NO: 3275 - RNA, 21 nt, RNAi
guguggccagaaguggaauuu

SEQ ID NO: 3276 - RNA, 21 nt, RNAi
uucacaccggucuucaccuua

SEQ ID NO: 3277 - DNA, 21 bp, homo sapiens
aagtggaatctttacaggact

SEQ ID NO: 3278 - RNA, 21 nt, RNAi
guggaaucuuuacaggacuuu

SEQ ID NO: 3279 - RNA, 21 nt, RNAi
uucaccuuagaaauguccuga

SEQ ID NO: 3280 - DNA, 21 bp, homo sapiens
aaatggaaaccaggaagccta

SEQ ID NO: 3281 - RNA, 21 nt, RNAi
auggaaaccaggaagccuauu

SEQ ID NO: 3282 - RNA, 21 nt, RNAi
uuuaccuuugguccuucggau

SEQ ID NO: 3283 - DNA, 21 bp, homo sapiens
aatggaaaccaggaagcctag

SEQ ID NO: 3284 - RNA, 21 nt, RNAi
uggaaaccaggaagccuaguu

SEQ ID NO: 3285 - RNA, 21 nt, RNAi
uuaccuuugguccuucggauc

SEQ ID NO: 3286 - DNA, 21 bp, homo sapiens
aaaccaggaagcctagcatcc

SEQ ID NO: 3287 - RNA, 21 nt, RNAi
accaggaagccuagcauccuu

SEQ ID NO: 3288 - RNA, 21 nt, RNAi
uuugguccuucggaucguagg

SEQ ID NO: 3289 - DNA, 21 bp, homo sapiens
aaatggcttggatttgctctc

SEQ ID NO: 3290 - RNA, 21 nt, RNAi
auggcuuggauuugcucucuu

SEQ ID NO: 3291 - RNA, 21 nt, RNAi
uuuaccgaaccuaaacgagag

SEQ ID NO: 3292 - DNA, 21 bp, homo sapiens
aatggcttggatttgctctcg

SEQ ID NO: 3293 - RNA, 21 nt, RNAi
uggcuuggauuugcucucguu

SEQ ID NO: 3294 - RNA, 21 nt, RNAi
uuaccgaaccuaaacgagagc

SEQ ID NO: 3295 - DNA, 21 bp, homo sapiens
aatgttaatctatgatccagc

SEQ ID NO: 3296 - RNA, 21 nt, RNAi
uguuaaucuaugauccagcuu

SEQ ID NO: 3297 - RNA, 21 nt, RNAi
uuacaauuagauacuaggucg

SEQ ID NO: 3298 - DNA, 21 bp, homo sapiens
aatctatgatccagccaaacg

SEQ ID NO: 3299 - RNA, 21 nt, RNAi
ucuaugauccagccaaacguu

SEQ ID NO: 3300 - RNA, 21 nt, RNAi
uuagauacuaggucgguuugc

SEQ ID NO: 3301 - DNA, 21 bp, homo sapiens
aaatggcactgaatcatccat

SEQ ID NO: 3302 - RNA, 21 nt, RNAi
auggcacugaaucauccauuu

SEQ ID NO: 3303 - RNA, 21 nt, RNAi
uuuaccgugacuuaguaggua

SEQ ID NO: 3304 - DNA, 21 bp, homo sapiens
aatggcactgaatcatccata

SEQ ID NO: 3305 - RNA, 21 nt, RNAi
uggcacugaaucauccauauu

SEQ ID NO: 3306 - RNA, 21 nt, RNAi
uuaccgugacuuaguagguau

SEQ ID NO: 3307 - DNA, 21 bp, homo sapiens
aagaagatgtagctttctgac

SEQ ID NO: 3308 - RNA, 21 nt, RNAi
gaagauguagcuuucugacuu

SEQ ID NO: 3309 - RNA, 21 nt, RNAi
uucuucuacaucgaaagacug

SEQ ID NO: 3310 - DNA, 21 bp, homo sapiens
aagatgtagctttctgacaaa

SEQ ID NO: 3311 - RNA, 21 nt, RNAi
gauguagcuuucugacaaauu

SEQ ID NO: 3312 - RNA, 21 nt, RNAi
uucuacaucgaaagacuguuu

SEQ ID NO: 3313 - DNA, 21 bp, homo sapiens
aaacttcagctgtacttcgtc

SEQ ID NO: 3314 - RNA, 21 nt, RNAi
acuucagcuguacuucgucuu

SEQ ID NO: 3315 - RNA, 21 nt, RNAi
uuugaagucgacaugaagcag

SEQ ID NO: 3316 - DNA, 21 bp, homo sapiens
aacttcagctgtacttcgtct

SEQ ID NO: 3317 - RNA, 21 nt, RNAi
cuucagcuguacuucgucuuu

SEQ ID NO: 3318 - RNA, 21 nt, RNAi
uugaagucgacaugaagcaga

SEQ ID NO: 3319 - DNA, 21 bp, homo sapiens
cacttggcttcaaagctggct

SEQ ID NO: 3320 - RNA, 21 nt, RNAi
cuuggcuucaaagcuggcuuu

SEQ ID NO: 3321 - RNA, 21 nt, RNAi
uugaaccgaaguuucgaccga

SEQ ID NO: 3322 - DNA, 21 bp, homo sapiens
caaagctggctcttggaaatt

SEQ ID NO: 3323 - RNA, 21 nt, RNAi
aagcuggcucuuggaaauuuu

SEQ ID NO: 3324 - RNA, 21 nt, RNAi
uuuucgaccgagaaccuuuaa

SEQ ID NO: 3325 - DNA, 21 bp, homo sapiens
cattgactaactatggaagat

SEQ ID NO: 3326 - RNA, 21 nt, RNAi
uugacuaacuauggaagauuu

SEQ ID NO: 3327 - RNA, 21 nt, RNAi
uuaacugauugauaccuucua

SEQ ID NO: 3328 - DNA, 21 bp, homo sapiens
caggtcaagtggtagccatga

SEQ ID NO: 3329 - RNA, 21 nt, RNAi
ggucaagugguagccaugauu

SEQ ID NO: 3330 - RNA, 21 nt, RNAi
uuccaguucaccaucgguacu

SEQ ID NO: 3331 - DNA, 21 bp, homo sapiens
cagactagaaagtgaagagga

SEQ ID NO: 3332 - RNA, 21 nt, RNAi
gacuagaaagugaagaggauu

SEQ ID NO: 3333 - RNA, 21 nt, RNAi
uucugaucuuucacuucuccu

SEQ ID NO: 3334 - DNA, 21 bp, homo sapiens
catccaaatatagtcagtctt

SEQ ID NO: 3335 - RNA, 21 nt, RNAi
uccaaauauagucagucuuuu

SEQ ID NO: 3336 - RNA, 21 nt, RNAi
uuagguuuauaucagucagaa

SEQ ID NO: 3337 - DNA, 21 bp, homo sapiens
caaatatagtcagtcttcagg

SEQ ID NO: 3338 - RNA, 21 nt, RNAi
aauauagucagucuucagguu

SEQ ID NO: 3339 - RNA, 21 nt, RNAi
uuuuauaucagucagaagucc

SEQ ID NO: 3340 - DNA, 21 bp, homo sapiens
cagtcttcaggatgtgcttat

SEQ ID NO: 3341 - RNA, 21 nt, RNAi
gucuucaggaugugcuuauuu

SEQ ID NO: 3342 - RNA, 21 nt, RNAi
uucagaaguccuacacgaaua

SEQ ID NO: 3343 - DNA, 21 bp, homo sapiens
caggatgtgcttatgcaggat

SEQ ID NO: 3344 - RNA, 21 nt, RNAi
ggaugugcuuaugcaggauuu

SEQ ID NO: 3345 - RNA, 21 nt, RNAi
uuccuacacgaauacguccua

SEQ ID NO: 3346 - DNA, 21 bp, homo sapiens
caggattccaggttatatctc

SEQ ID NO: 3347 - RNA, 21 nt, RNAi
ggauuccagguuauaucucuu

SEQ ID NO: 3348 - RNA, 21 nt, RNAi
uuccuaagguccaauauagag

SEQ ID NO: 3349 - DNA, 21 bp, homo sapiens
caggttatatctcatctttga

SEQ ID NO: 3350 - RNA, 21 nt, RNAi
gguuauaucucaucuuugauu

SEQ ID NO: 3351 - RNA, 21 nt, RNAi
uuccaauauagaguagaaacu

SEQ ID NO: 3352 - DNA, 21 bp, homo sapiens
catctttgagtttctttccat

SEQ ID NO: 3353 - RNA, 21 nt, RNAi
ucuuugaguuucuuuccauuu

SEQ ID NO: 3354 - RNA, 21 nt, RNAi
uuagaaacucaaagaaaggua

SEQ ID NO: 3355 - DNA, 21 bp, homo sapiens
catggatctgaagaaatactt

SEQ ID NO: 3356 - RNA, 21 nt, RNAi
uggaucugaagaaauacuuuu

SEQ ID NO: 3357 - RNA, 21 nt, RNAi
uuaccuagacuucuuuaugaa

SEQ ID NO: 3358 - DNA, 21 bp, homo sapiens
cagtacatggattcttcactt

SEQ ID NO: 3359 - RNA, 21 nt, RNAi
guacauggauucuucacuuuu

SEQ ID NO: 3360 - RNA, 21 nt, RNAi
uucauguaccuaagaagugaa

SEQ ID NO: 3361 - DNA, 21 bp, homo sapiens
catggattcttcacttgttaa

SEQ ID NO: 3362 - RNA, 21 nt, RNAi
uggauucuucacuuguuaauu

SEQ ID NO: 3363 - RNA, 21 nt, RNAi
uuaccuaagaagugaacaauu

SEQ ID NO: 3364 - DNA, 21 bp, homo sapiens
cactctagaagagttcttcac

SEQ ID NO: 3365 - RNA, 21 nt, RNAi
cucuagaagaguucuucacuu

SEQ ID NO: 3366 - RNA, 21 nt, RNAi
uugagaucuucucaagaagug

SEQ ID NO: 3367 - DNA, 21 bp, homo sapiens
caaaggaacaattaaactggc

SEQ ID NO: 3368 - RNA, 21 nt, RNAi
aaggaacaauuaaacuggcuu

SEQ ID NO: 3369 - RNA, 21 nt, RNAi
uuuuccuuguuaauuugaccg

SEQ ID NO: 3370 - DNA, 21 bp, homo sapiens
cagagtatatacacatgaggt

SEQ ID NO: 3371 - RNA, 21 nt, RNAi
gaguauauacacaugagguuu

SEQ ID NO: 3372 - RNA, 21 nt, RNAi
uucucauauauguguacucca

SEQ ID NO: 3373 - DNA, 21 bp, homo sapiens
cacatgaggtagtaacactct

SEQ ID NO: 3374 - RNA, 21 nt, RNAi
caugagguaguaacacucuuu

SEQ ID NO: 3375 - RNA, 21 nt, RNAi
uuguacuccaucauugugaga

SEQ ID NO: 3376 - DNA, 21 bp, homo sapiens
catgaggtagtaacactctgg

SEQ ID NO: 3377 - RNA, 21 nt, RNAi
ugagguaguaacacucugguu

SEQ ID NO: 3378 - RNA, 21 nt, RNAi
uuacuccaucauugugagacc

SEQ ID NO: 3379 - DNA, 21 bp, homo sapiens
cactctggtacagatctccag

SEQ ID NO: 3380 - RNA, 21 nt, RNAi
cucugguacagaucuccaguu

SEQ ID NO: 3381 - RNA, 21 nt, RNAi
uugagaccaugucuagagguc

SEQ ID NO: 3382 - DNA, 21 bp, homo sapiens
cagatctccagaagtattgct

SEQ ID NO: 3383 - RNA, 21 nt, RNAi
gaucuccagaaguauugcuuu

SEQ ID NO: 3384 - RNA, 21 nt, RNAi
uucuagaggucuucauaacga

SEQ ID NO: 3385 - DNA, 21 bp, homo sapiens
cagctcgttactcaactccag

SEQ ID NO: 3386 - RNA, 21 nt, RNAi
gcucguuacucaacuccaguu

SEQ ID NO: 3387 - RNA, 21 nt, RNAi
uucgagcaaugaguugagguc

SEQ ID NO: 3388 - DNA, 21 bp, homo sapiens
caactccagttgacatttgga

SEQ ID NO: 3389 - RNA, 21 nt, RNAi
acuccaguugacauuuggauu

SEQ ID NO: 3390 - RNA, 21 nt, RNAi
uuugaggucaacuguaaaccu

SEQ ID NO: 3391 - DNA, 21 bp, homo sapiens
cagttgacatttggagtatag

SEQ ID NO: 3392 - RNA, 21 nt, RNAi
guugacauuuggaguauaguu

SEQ ID NO: 3393 - RNA, 21 nt, RNAi
uucaacuguaaaccucauauc

SEQ ID NO: 3394 - DNA, 21 bp, homo sapiens
catttggagtataggcaccat

SEQ ID NO: 3395 - RNA, 21 nt, RNAi
uuuggaguauaggcaccauuu

SEQ ID NO: 3396 - RNA, 21 nt, RNAi
uuaaaccucauauccguggua

SEQ ID NO: 3397 - DNA, 21 bp, homo sapiens
caccatatttgctgaactagc

SEQ ID NO: 3398 - RNA, 21 nt, RNAi
ccauauuugcugaacuagcuu

SEQ ID NO: 3399 - RNA, 21 nt, RNAi
uugguauaaacgacuugaucg

SEQ ID NO: 3400 - DNA, 21 bp, homo sapiens
catatttgctgaactagcaac

SEQ ID NO: 3401 - RNA, 21 nt, RNAi
uauuugcugaacuagcaacuu

SEQ ID NO: 3402 - RNA, 21 nt, RNAi
uuauaaacgacuugaucguug

SEQ ID NO: 3403 - DNA, 21 bp, homo sapiens
cagaaattgatcaactcttca

SEQ ID NO: 3404 - RNA, 21 nt, RNAi
gaaauugaucaacucuucauu

SEQ ID NO: 3405 - RNA, 21 nt, RNAi
uucuuuaacuaguugagaagu

SEQ ID NO: 3406 - DNA, 21 bp, homo sapiens
caataatgaagtgtggccaga

SEQ ID NO: 3407 - RNA, 21 nt, RNAi
auaaugaaguguggccagauu

SEQ ID NO: 3408 - RNA, 21 nt, RNAi
uuuauuacuucacaccggucu

SEQ ID NO: 3409 - DNA, 21 bp, homo sapiens
cagaagtggaatctttacagg

SEQ ID NO: 3410 - RNA, 21 nt, RNAi
gaaguggaaucuuuacagguu

SEQ ID NO: 3411 - RNA, 21 nt, RNAi
uucuucaccuuagaaaugucc

SEQ ID NO: 3412 - DNA, 21 bp, homo sapiens
caaatggaaaccaggaagcct

SEQ ID NO: 3413 - RNA, 21 nt, RNAi
aauggaaaccaggaagccuuu

SEQ ID NO: 3414 - RNA, 21 nt, RNAi
uuuuaccuuugguccuucgga

SEQ ID NO: 3415 - DNA, 21 bp, homo sapiens
cagccaaacgaatttctggca

SEQ ID NO: 3416 - RNA, 21 nt, RNAi
gccaaacgaauuucuggcauu

SEQ ID NO: 3417 - RNA, 21 nt, RNAi
uucgguuugcuuaaagaccgu

SEQ ID NO: 3418 - DNA, 21 bp, homo sapiens
cagattaagaagatgtagctt

SEQ ID NO: 3419 - RNA, 21 nt, RNAi
gauuaagaagauguagcuuuu

SEQ ID NO: 3420 - RNA, 21 nt, RNAi
uucuaauucuucuacaucgaa

SEQ ID NO: 3421 - DNA, 21 bp, homo sapiens
caaacttcagctgtacttcgt

SEQ ID NO: 3422 - RNA, 21 nt, RNAi
aacuucagcuguacuucguuu

SEQ ID NO: 3423 - RNA, 21 nt, RNAi
uuuugaagucgacaugaagca

SEQ ID NO: 3424 - DNA, 21 bp, homo sapiens
cagctgtacttcgtcttctaa

SEQ ID NO: 3425 - RNA, 21 nt, RNAi
gcuguacuucgucuucuaauu

SEQ ID NO: 3426 - RNA, 21 nt, RNAi
uucgacaugaagcagaagauu

SEQ ID NO: 3427 - DNA, 21 bp, homo sapiens
gaaattgagcggagagcgacg

SEQ ID NO: 3428 - RNA, 21 nt, RNAi
aauugagcggagagcgacguu

SEQ ID NO: 3429 - RNA, 21 nt, RNAi
uuuuaacucgccucucgcugc

SEQ ID NO: 3430 - DNA, 21 bp, homo sapiens
gagagcgacgcggttgttgta

SEQ ID NO: 3431 - RNA, 21 nt, RNAi
gagcgacgcgguuguuguauu

SEQ ID NO: 3432 - RNA, 21 nt, RNAi
uucucgcugcgccaacaacau

SEQ ID NO: 3433 - DNA, 21 bp, homo sapiens
gagcgacgcggttgttgtagc

SEQ ID NO: 3434 - RNA, 21 nt, RNAi
gcgacgcgguuguuguagcuu

SEQ ID NO: 3435 - RNA, 21 nt, RNAi
uucgcugcgccaacaacaucg

SEQ ID NO: 3436 - DNA, 21 bp, homo sapiens
gacgcggttgttgtagctgcc

SEQ ID NO: 3437 - RNA, 21 nt, RNAi
cgcgguuguuguagcugccuu

SEQ ID NO: 3438 - RNA, 21 nt, RNAi
uugcgccaacaacaucgacgg

SEQ ID NO: 3439 - DNA, 21 bp, homo sapiens
gagaaggtacctatggagttg

SEQ ID NO: 3440 - RNA, 21 nt, RNAi
gaagguaccuauggaguuguu

SEQ ID NO: 3441 - RNA, 21 nt, RNAi
uucuuccauggauaccucaac

SEQ ID NO: 3442 - DNA, 21 bp, homo sapiens
gaaggtacctatggagttgtg

SEQ ID NO: 3443 - RNA, 21 nt, RNAi
agguaccuauggaguuguguu

SEQ ID NO: 3444 - RNA, 21 nt, RNAi
uuuccauggauaccucaacac

SEQ ID NO: 3445 - DNA, 21 bp, homo sapiens
gactagaaagtgaagaggaag

SEQ ID NO: 3446 - RNA, 21 nt, RNAi
cuagaaagugaagaggaaguu

SEQ ID NO: 3447 - RNA, 21 nt, RNAi
uugaucuuucacuucuccuuc

SEQ ID NO: 3448 - DNA, 21 bp, homo sapiens
gaacttcgtcatccaaatata

SEQ ID NO: 3449 - RNA, 21 nt, RNAi
acuucgucauccaaauauauu

SEQ ID NO: 3450 - RNA, 21 nt, RNAi
uuugaagcaguagguuuauau

SEQ ID NO: 3451 - DNA, 21 bp, homo sapiens
gatgtgcttatgcaggattcc

SEQ ID NO: 3452 - RNA, 21 nt, RNAi
ugugcuuaugcaggauuccuu

SEQ ID NO: 3453 - RNA, 21 nt, RNAi
uuacacgaauacguccuaagg

SEQ ID NO: 3454 - DNA, 21 bp, homo sapiens
gattccaggttatatctcatc

SEQ ID NO: 3455 - RNA, 21 nt, RNAi
uuccagguuauaucucaucuu

SEQ ID NO: 3456 - RNA, 21 nt, RNAi
uuaagguccaauauagaguag

SEQ ID NO: 3457 - DNA, 21 bp, homo sapiens
gagtttctttccatggatctg

SEQ ID NO: 3458 - RNA, 21 nt, RNAi
guuucuuuccauggaucuguu

SEQ ID NO: 3459 - RNA, 21 nt, RNAi
uucaaagaaagguaccuagac

SEQ ID NO: 3460 - DNA, 21 bp, homo sapiens
gatctgaagaaatacttggat

SEQ ID NO: 3461 - RNA, 21 nt, RNAi
ucugaagaaauacuuggauuu

SEQ ID NO: 3462 - RNA, 21 nt, RNAi
uuagacuucuuuaugaaccua

SEQ ID NO: 3463 - DNA, 21 bp, homo sapiens
gattcttcacttgttaagagt

SEQ ID NO: 3464 - RNA, 21 nt, RNAi
uucuucacuuguuaagaguuu

SEQ ID NO: 3465 - RNA, 21 nt, RNAi
uuaagaagugaacaauucuca

SEQ ID NO: 3466 - DNA, 21 bp, homo sapiens
gaagagttcttcacagagact

SEQ ID NO: 3467 - RNA, 21 nt, RNAi
agaguucuucacagagacuuu

SEQ ID NO: 3468 - RNA, 21 nt, RNAi
uuucucaagaagugucucuga

SEQ ID NO: 3469 - DNA, 21 bp, homo sapiens
gagttcttcacagagacttaa

SEQ ID NO: 3470 - RNA, 21 nt, RNAi
guucuucacagagacuuaauu

SEQ ID NO: 3471 - RNA, 21 nt, RNAi
uucaagaagugucucugaauu

SEQ ID NO: 3472 - DNA, 21 bp, homo sapiens
gattgatgacaaaggaacaat

SEQ ID NO: 3473 - RNA, 21 nt, RNAi
uugaugacaaaggaacaauuu

SEQ ID NO: 3474 - RNA, 21 nt, RNAi
uuaacuacuguuuccuuguua

SEQ ID NO: 3475 - DNA, 21 bp, homo sapiens
gacaaaggaacaattaaactg

SEQ ID NO: 3476 - RNA, 21 nt, RNAi
caaaggaacaauuaaacuguu

SEQ ID NO: 3477 - RNA, 21 nt, RNAi
uuguuuccuuguuaauuugac

SEQ ID NO: 3478 - DNA, 21 bp, homo sapiens
gaacaattaaactggctgatt

SEQ ID NO: 3479 - RNA, 21 nt, RNAi
acaauuaaacuggcugauuuu

SEQ ID NO: 3480 - RNA, 21 nt, RNAi
uuuguuaauuugaccgacuaa

SEQ ID NO: 3481 - DNA, 21 bp, homo sapiens
gagtatatacacatgaggtag

SEQ ID NO: 3482 - RNA, 21 nt, RNAi
guauauacacaugagguaguu

SEQ ID NO: 3483 - RNA, 21 nt, RNAi
uucauauauguguacuccauc

SEQ ID NO: 3484 - DNA, 21 bp, homo sapiens
gaggtagtaacactctggtac

SEQ ID NO: 3485 - RNA, 21 nt, RNAi
gguaguaacacucugguacuu

SEQ ID NO: 3486 - RNA, 21 nt, RNAi
uuccaucauugugagaccaug

SEQ ID NO: 3487 - DNA, 21 bp, homo sapiens
gatctccagaagtattgctgg

SEQ ID NO: 3488 - RNA, 21 nt, RNAi
ucuccagaaguauugcugguu

SEQ ID NO: 3489 - RNA, 21 nt, RNAi
uuagaggucuucauaacgacc

SEQ ID NO: 3490 - DNA, 21 bp, homo sapiens
gacatttggagtataggcacc

SEQ ID NO: 3491 - RNA, 21 nt, RNAi
cauuuggaguauaggcaccuu

SEQ ID NO: 3492 - RNA, 21 nt, RNAi
uuguaaaccucauauccgugg

SEQ ID NO: 3493 - DNA, 21 bp, homo sapiens
gagtataggcaccatatttgc

SEQ ID NO: 3494 - RNA, 21 nt, RNAi
guauaggcaccauauuugcuu

SEQ ID NO: 3495 - RNA, 21 nt, RNAi
uucauauccgugguauaaacg

SEQ ID NO: 3496 - DNA, 21 bp, homo sapiens
gaactagcaactaagaaacca

SEQ ID NO: 3497 - RNA, 21 nt, RNAi
acuagcaacuaagaaaccauu

SEQ ID NO: 3498 - RNA, 21 nt, RNAi
uuugaucguugauucuuuggu

SEQ ID NO: 3499 - DNA, 21 bp, homo sapiens
gattcagaaattgatcaactc

SEQ ID NO: 3500 - RNA, 21 nt, RNAi
uucagaaauugaucaacucuu

SEQ ID NO: 3501 - RNA, 21 nt, RNAi
uuaagucuuuaacuaguugag

SEQ ID NO: 3502 - DNA, 21 bp, homo sapiens
gaaattgatcaactcttcagg

SEQ ID NO: 3503 - RNA, 21 nt, RNAi
aauugaucaacucuucagguu

SEQ ID NO: 3504 - RNA, 21 nt, RNAi
uuuuaacuaguugagaagucc

SEQ ID NO: 3505 - DNA, 21 bp, homo sapiens
gaagtgtggccagaagtggaa

SEQ ID NO: 3506 - RNA, 21 nt, RNAi
aguguggccagaaguggaauu

SEQ ID NO: 3507 - RNA, 21 nt, RNAi
uuucacaccggucuucaccuu

SEQ ID NO: 3508 - DNA, 21 bp, homo sapiens
gaagtggaatctttacaggac

SEQ ID NO: 3509 - RNA, 21 nt, RNAi
aguggaaucuuuacaggacuu

SEQ ID NO: 3510 - RNA, 21 nt, RNAi
uuucaccuuagaaauguccug

SEQ ID NO: 3511 - DNA, 21 bp, homo sapiens
gaatctttacaggactataag

SEQ ID NO: 3512 - RNA, 21 nt, RNAi
aucuuuacaggacuauaaguu

SEQ ID NO: 3513 - RNA, 21 nt, RNAi
uuuagaaauguccugauauuc

SEQ ID NO: 3514 - DNA, 21 bp, homo sapiens
gaaaccaggaagcctagcatc

SEQ ID NO: 3515 - RNA, 21 nt, RNAi
aaccaggaagccuagcaucuu

SEQ ID NO: 3516 - RNA, 21 nt, RNAi
uuuugguccuucggaucguag

SEQ ID NO: 3517 - DNA, 21 bp, homo sapiens
gatccagccaaacgaatttct

SEQ ID NO: 3518 - RNA, 21 nt, RNAi
uccagccaaacgaauuucuuu

SEQ ID NO: 3519 - RNA, 21 nt, RNAi
uuaggucgguuugcuuaaaga

SEQ ID NO: 3520 - DNA, 21 bp, homo sapiens
gatttggacaatcagattaag

SEQ ID NO: 3521 - RNA, 21 nt, RNAi
uuuggacaaucagauuaaguu

SEQ ID NO: 3522 - RNA, 21 nt, RNAi
uuaaaccuguuagucuaauuc

SEQ ID NO: 3523 - DNA, 21 bp, homo sapiens
gacaatcagattaagaagatg

SEQ ID NO: 3524 - RNA, 21 nt, RNAi
caaucagauuaagaagauguu

SEQ ID NO: 3525 - RNA, 21 nt, RNAi
uuguuagucuaauucuucuac

SEQ ID NO: 3526 - DNA, 21 bp, homo sapiens
gattaagaagatgtagctttc

SEQ ID NO: 3527 - RNA, 21 nt, RNAi
uuaagaagauguagcuuucuu

SEQ ID NO: 3528 - RNA, 21 nt, RNAi
uuaauucuucuacaucgaaag

SEQ ID NO: 3529 - DNA, 21 bp, homo sapiens
gaagatgtagctttctgacaa

SEQ ID NO: 3530 - RNA, 21 nt, RNAi
agauguagcuuucugacaauu

SEQ ID NO: 3531 - RNA, 21 nt, RNAi
uuucuacaucgaaagacuguu

SEQ ID NO: 3532 - DNA, 21 bp, homo sapiens
tacctatggagttgtgtataa

SEQ ID NO: 3533 - RNA, 21 nt, RNAi
ccuauggaguuguguauaauu

SEQ ID NO: 3534 - RNA, 21 nt, RNAi
uuggauaccucaacacauauu

SEQ ID NO: 3535 - DNA, 21 bp, homo sapiens
tacaggtcaagtggtagccat

SEQ ID NO: 3536 - RNA, 21 nt, RNAi
caggucaagugguagccauuu

SEQ ID NO: 3537 - RNA, 21 nt, RNAi
uuguccaguucaccaucggua

SEQ ID NO: 3538 - DNA, 21 bp, homo sapiens
tattaaaggaacttcgtcatc

SEQ ID NO: 3539 - RNA, 21 nt, RNAi
uuaaaggaacuucgucaucuu

SEQ ID NO: 3540 - RNA, 21 nt, RNAi
uuaauuuccuugaagcaguag

SEQ ID NO: 3541 - DNA, 21 bp, homo sapiens
taaaggaacttcgtcatccaa

SEQ ID NO: 3542 - RNA, 21 nt, RNAi
aaggaacuucgucauccaauu

SEQ ID NO: 3543 - RNA, 21 nt, RNAi
uuuuccuugaagcaguagguu

SEQ ID NO: 3544 - DNA, 21 bp, homo sapiens
tatagtcagtcttcaggatgt

SEQ ID NO: 3545 - RNA, 21 nt, RNAi
uagucagucuucaggauguuu

SEQ ID NO: 3546 - RNA, 21 nt, RNAi
uuaucagucagaaguccuaca

SEQ ID NO: 3547 - DNA, 21 bp, homo sapiens
tagtcagtcttcaggatgtgc

SEQ ID NO: 3548 - RNA, 21 nt, RNAi
gucagucuucaggaugugcuu

SEQ ID NO: 3549 - RNA, 21 nt, RNAi
uucagucagaaguccuacacg

SEQ ID NO: 3550 - DNA, 21 bp, homo sapiens
tatgcaggattccaggttata

SEQ ID NO: 3551 - RNA, 21 nt, RNAi
ugcaggauuccagguuauauu

SEQ ID NO: 3552 - RNA, 21 nt, RNAi
uuacguccuaagguccaauau

SEQ ID NO: 3553 - DNA, 21 bp, homo sapiens
tacatggattcttcacttgtt

SEQ ID NO: 3554 - RNA, 21 nt, RNAi
cauggauucuucacuuguuuu

SEQ ID NO: 3555 - RNA, 21 nt, RNAi
uuguaccuaagaagugaacaa

SEQ ID NO: 3556 - DNA, 21 bp, homo sapiens
tagaagagttcttcacagaga

SEQ ID NO: 3557 - RNA, 21 nt, RNAi
gaagaguucuucacagagauu

SEQ ID NO: 3558 - RNA, 21 nt, RNAi
uucuucucaagaagugucucu

SEQ ID NO: 3559 - DNA, 21 bp, homo sapiens
tacctatcagagtatatacac

SEQ ID NO: 3560 - RNA, 21 nt, RNAi
ccuaucagaguauauacacuu

SEQ ID NO: 3561 - RNA, 21 nt, RNAi
uuggauagucucauauaugug

SEQ ID NO: 3562 - DNA, 21 bp, homo sapiens
tatacacatgaggtagtaaca

SEQ ID NO: 3563 - RNA, 21 nt, RNAi
uacacaugagguaguaacauu

SEQ ID NO: 3564 - RNA, 21 nt, RNAi
uuauguguacuccaucauugu

SEQ ID NO: 3565 - DNA, 21 bp, homo sapiens
tacacatgaggtagtaacact

SEQ ID NO: 3566 - RNA, 21 nt, RNAi
cacaugagguaguaacacuuu

SEQ ID NO: 3567 - RNA, 21 nt, RNAi
uuguguacuccaucauuguga

SEQ ID NO: 3568 - DNA, 21 bp, homo sapiens
tagtaacactctggtacagat

SEQ ID NO: 3569 - RNA, 21 nt, RNAi
guaacacucugguacagauuu

SEQ ID NO: 3570 - RNA, 21 nt, RNAi
uucauugugagaccaugucua

SEQ ID NO: 3571 - DNA, 21 bp, homo sapiens
taacactctggtacagatctc

SEQ ID NO: 3572 - RNA, 21 nt, RNAi
acacucugguacagaucucuu

SEQ ID NO: 3573 - RNA, 21 nt, RNAi
uuugugagaccaugucuagag

SEQ ID NO: 3574 - DNA, 21 bp, homo sapiens
tacagatctccagaagtattg

SEQ ID NO: 3575 - RNA, 21 nt, RNAi
cagaucuccagaaguauuguu

SEQ ID NO: 3576 - RNA, 21 nt, RNAi
uugucuagaggucuucauaac

SEQ ID NO: 3577 - DNA, 21 bp, homo sapiens
tactcaactccagttgacatt

SEQ ID NO: 3578 - RNA, 21 nt, RNAi
cucaacuccaguugacauuuu

SEQ ID NO: 3579 - RNA, 21 nt, RNAi
uugaguugaggucaacuguaa

SEQ ID NO: 3580 - DNA, 21 bp, homo sapiens
tataggcaccatatttgctga

SEQ ID NO: 3581 - RNA, 21 nt, RNAi
uaggcaccauauuugcugauu

SEQ ID NO: 3582 - RNA, 21 nt, RNAi
uuauccgugguauaaacgacu

SEQ ID NO: 3583 - DNA, 21 bp, homo sapiens
taggcaccatatttgctgaac

SEQ ID NO: 3584 - RNA, 21 nt, RNAi
ggcaccauauuugcugaacuu

SEQ ID NO: 3585 - RNA, 21 nt, RNAi
uuccgugguauaaacgacuug

SEQ ID NO: 3586 - DNA, 21 bp, homo sapiens
tatttgctgaactagcaacta

SEQ ID NO: 3587 - RNA, 21 nt, RNAi
uuugcugaacuagcaacuauu

SEQ ID NO: 3588 - RNA, 21 nt, RNAi
uuaaacgacuugaucguugau

SEQ ID NO: 3589 - DNA, 21 bp, homo sapiens
tagcaactaagaaaccacttt

SEQ ID NO: 3590 - RNA, 21 nt, RNAi
gcaacuaagaaaccacuuuuu

SEQ ID NO: 3591 - RNA, 21 nt, RNAi
uucguugauucuuuggugaaa

SEQ ID NO: 3592 - DNA, 21 bp, homo sapiens
taatgaagtgtggccagaagt

SEQ ID NO: 3593 - RNA, 21 nt, RNAi
augaaguguggccagaaguuu

SEQ ID NO: 3594 - RNA, 21 nt, RNAi
uuuacuucacaccggucuuca

SEQ ID NO: 3595 - DNA, 21 bp, homo sapiens
taatctatgatccagccaaac

SEQ ID NO: 3596 - RNA, 21 nt, RNAi
aucuaugauccagccaaacuu

SEQ ID NO: 3597 - RNA, 21 nt, RNAi
uuuagauacuaggucgguuug

SEQ ID NO: 3598 - DNA, 21 bp, homo sapiens
tatgatccagccaaacgaatt

SEQ ID NO: 3599 - RNA, 21 nt, RNAi
ugauccagccaaacgaauuuu

SEQ ID NO: 3600 - RNA, 21 nt, RNAi
uuacuaggucgguuugcuuaa

SEQ ID NO: 3601 - DNA, 21 bp, homo sapiens
taagaagatgtagctttctga

SEQ ID NO: 3602 - RNA, 21 nt, RNAi
agaagauguagcuuucugauu

SEQ ID NO: 3603 - RNA, 21 nt, RNAi
uuucuucuacaucgaaagacu

SEQ ID NO: 3604 - DNA, 21 bp, homo sapiens
tatgtcaacagatagttgtgt

SEQ ID NO: 3605 - RNA, 21 nt, RNAi
ugucaacagauaguuguguuu

SEQ ID NO: 3606 - RNA, 21 nt, RNAi
uuacaguugucuaucaacaca

SEQ ID NO: 3607 - DNA, 21 bp, homo sapiens
tatcaaacttcagctgtactt

SEQ ID NO: 3608 - RNA, 21 nt, RNAi
ucaaacuucagcuguacuuuu

SEQ ID NO: 3609 - RNA, 21 nt, RNAi
uuaguuugaagucgacaugaa

SEQ ID NO: 3610 - DNA, 21 bp, homo sapiens
aaaggaacttcgtcatccaaa

SEQ ID NO: 3611 - RNA, 21 nt, RNAi
aggaacuucgucauccaaauu

SEQ ID NO: 3612 - RNA, 21 nt, RNAi
uuuccuugaagcaguagguuu

SEQ ID NO: 3613 - DNA, 21 bp, homo sapiens
aaggaacttcgtcatccaaat

SEQ ID NO: 3614 - RNA, 21 nt, RNAi
ggaacuucgucauccaaauuu

SEQ ID NO: 3615 - RNA, 21 nt, RNAi
uuccuugaagcaguagguuua

SEQ ID NO: 3616 - DNA, 21 bp, homo sapiens
aacttcgtcatccaaatatag

SEQ ID NO: 3617 - RNA, 21 nt, RNAi
cuucgucauccaaauauaguu

SEQ ID NO: 3618 - RNA, 21 nt, RNAi
uugaagcaguagguuuauauc

SEQ ID NO: 3619 - DNA, 21 bp, homo sapiens
aacactctggtacagatctcc

SEQ ID NO: 3620 - RNA, 21 nt, RNAi
cacucugguacagaucuccuu

SEQ ID NO: 3621 - RNA, 21 nt, RNAi
uugugagaccaugucuagagg

SEQ ID NO: 3622 - DNA, 21 bp, homo sapiens
aactagcaactaagaaaccac

SEQ ID NO: 3623 - RNA, 21 nt, RNAi
cuagcaacuaagaaaccacuu

SEQ ID NO: 3624 - RNA, 21 nt, RNAi
uugaucguugauucuuuggug

SEQ ID NO: 3625 - DNA, 21 bp, homo sapiens
aatgttaatctatgatccagc

SEQ ID NO: 3626 - RNA, 21 nt, RNAi
uguuaaucuaugauccagcuu

SEQ ID NO: 3627 - RNA, 21 nt, RNAi
uuacaauuagauacuaggucg

SEQ ID NO: 3628 - DNA, 21 bp, homo sapiens
caggtcaagtggtagccatga

SEQ ID NO: 3629 - RNA, 21 nt, RNAi
ggucaagugguagccaugauu

SEQ ID NO: 3630 - RNA, 21 nt, RNAi
uuccaguucaccaucgguacu

SEQ ID NO: 3631 - DNA, 21 bp, homo sapiens
cagagtatatacacatgaggt

SEQ ID NO: 3632 - RNA, 21 nt, RNAi
gaguauauacacaugagguuu

SEQ ID NO: 3633 - RNA, 21 nt, RNAi
uucucauauauguguacucca

SEQ ID NO: 3634 - DNA, 21 bp, homo sapiens
cagttgacatttggagtatag

SEQ ID NO: 3635 - RNA, 21 nt, RNAi
guugacauuuggaguauaguu

SEQ ID NO: 3636 - RNA, 21 nt, RNAi
uucaacuguaaaccucauauc

SEQ ID NO: 3637 - DNA, 21 bp, homo sapiens
catttggagtataggcaccat

SEQ ID NO: 3638 - RNA, 21 nt, RNAi
uuuggaguauaggcaccauuu

SEQ ID NO: 3639 - RNA, 21 nt, RNAi
uuaaaccucauauccguggua

SEQ ID NO: 3640 - DNA, 21 bp, homo sapiens
gatgtgcttatgcaggattcc

SEQ ID NO: 3641 - RNA, 21 nt, RNAi
ugugcuuaugcaggauuccuu

SEQ ID NO: 3642 - RNA, 21 nt, RNAi
uuacacgaauacguccuaagg

SEQ ID NO: 3643 - DNA, 21 bp, homo sapiens
gagtatatacacatgaggtag

SEQ ID NO: 3644 - RNA, 21 nt, RNAi
guauauacacaugagguaguu

SEQ ID NO: 3645 - RNA, 21 nt, RNAi
uucauauauguguacuccauc

SEQ ID NO: 3646 - DNA, 21 bp, homo sapiens
gaggtagtaacactctggtac

SEQ ID NO: 3647 - RNA, 21 nt, RNAi
gguaguaacacucugguacuu

SEQ ID NO: 3648 - RNA, 21 nt, RNAi
uuccaucauugugagaccaug

SEQ ID NO: 3649 - DNA, 21 bp, homo sapiens
gacatttggagtataggcacc

SEQ ID NO: 3650 - RNA, 21 nt, RNAi
cauuuggaguauaggcaccuu

SEQ ID NO: 3651 - RNA, 21 nt, RNAi
uuguaaaccucauauccgugg

SEQ ID NO: 3652 - DNA, 21 bp, homo sapiens
gaactagcaactaagaaacca

SEQ ID NO: 3653 - RNA, 21 nt, RNAi
acuagcaacuaagaaaccauu

SEQ ID NO: 3654 - RNA, 21 nt, RNAi
uuugaucguugauucuuuggu

SEQ ID NO: 3655 - DNA, 21 bp, homo sapiens
tatacacatgaggtagtaaca

SEQ ID NO: 3656 - RNA, 21 nt, RNAi
uacacaugagguaguaacauu

SEQ ID NO: 3657 - RNA, 21 nt, RNAi
uuauguguacuccaucauugu

SEQ ID NO: 3658 - DNA, 21 bp, homo sapiens
tacacatgaggtagtaacact

SEQ ID NO: 3659 - RNA, 21 nt, RNAi
cacaugagguaguaacacuuu

SEQ ID NO: 3660 - RNA, 21 nt, RNAi
uuguguacuccaucauuguga

SEQ ID NO: 3661 - DNA, 21 bp, homo sapiens
tagtaacactctggtacagat

SEQ ID NO: 3662 - RNA, 21 nt, RNAi
guaacacucugguacagauuu

SEQ ID NO: 3663 - RNA, 21 nt, RNAi
uucauugugagaccaugucua

SEQ ID NO: 3664 - DNA, 21 bp, homo sapiens
taacactctggtacagatctc

SEQ ID NO: 3665 - RNA, 21 nt, RNAi
acacucugguacagaucucuu

SEQ ID NO: 3666 - RNA, 21 nt, RNAi
uuugugagaccaugucuagag

SEQ ID NO: 3667 - DNA, 21 bp, homo sapiens
taggcaccatatttgctgaac

SEQ ID NO: 3668 - RNA, 21 nt, RNAi
ggcaccauauuugcugaacuu

SEQ ID NO: 3669 - RNA, 21 nt, RNAi
uuccgugguauaaacgacuug

SEQ ID NO: 3670 - DNA, 21 bp, homo sapiens
aagaagcggttggagttggat

SEQ ID NO: 3671 - RNA, 21 nt, RNAi
gaagcgguuggaguuggauuu

SEQ ID NO: 3672 - RNA, 21 nt, RNAi
uucuucgccaaccucaaccua

SEQ ID NO: 3673 - DNA, 21 bp, homo sapiens
aagcggttggagttggatgac

SEQ ID NO: 3674 - RNA, 21 nt, RNAi
gcgguuggaguuggaugacuu

SEQ ID NO: 3675 - RNA, 21 nt, RNAi
uucgccaaccucaaccuacug

SEQ ID NO: 3676 - DNA, 21 bp, homo sapiens
aactgctgtggccactgcctc

SEQ ID NO: 3677 - RNA, 21 nt, RNAi
cugcuguggccacugccucuu

SEQ ID NO: 3678 - RNA, 21 nt, RNAi
uugacgacaccggugacggag

SEQ ID NO: 3679 - DNA, 21 bp, homo sapiens
aagctgtgtcgctttgtcttc

SEQ ID NO: 3680 - RNA, 21 nt, RNAi
gcugugucgcuuugucuucuu

SEQ ID NO: 3681 - RNA, 21 nt, RNAi
uucgacacagcgaaacagaag

SEQ ID NO: 3682 - DNA, 21 bp, homo sapiens
aagaagctggtgctggagaac

SEQ ID NO: 3683 - RNA, 21 nt, RNAi
gaagcuggugcuggagaacuu

SEQ ID NO: 3684 - RNA, 21 nt, RNAi
uucuucgaccacgaccucuug

SEQ ID NO: 3685 - DNA, 21 bp, homo sapiens
aagctggtgctggagaacctg

SEQ ID NO: 3686 - RNA, 21 nt, RNAi
gcuggugcuggagaaccuguu

SEQ ID NO: 3687 - RNA, 21 nt, RNAi
uucgaccacgaccucuuggac

SEQ ID NO: 3688 - DNA, 21 bp, homo sapiens
aacctggaggactcctgcgtg

SEQ ID NO: 3689 - RNA, 21 nt, RNAi
ccuggaggacuccugcguguu

SEQ ID NO: 3690 - RNA, 21 nt, RNAi
uuggaccuccugaggacgcac

SEQ ID NO: 3691 - DNA, 21 bp, homo sapiens
aaggcagccgatgtctggagc

SEQ ID NO: 3692 - RNA, 21 nt, RNAi
ggcagccgaugucuggagcuu

SEQ ID NO: 3693 - RNA, 21 nt, RNAi
uuccgucggcuacagaccucg

SEQ ID NO: 3694 - DNA, 21 bp, homo sapiens
aacggctcacagccacaggca

SEQ ID NO: 3695 - RNA, 21 nt, RNAi
cggcucacagccacaggcauu

SEQ ID NO: 3696 - RNA, 21 nt, RNAi
uugccgagugucgguguccgu

SEQ ID NO: 3697 - DNA, 21 bp, homo sapiens
aagtggttctgtatggctagg

SEQ ID NO: 3698 - RNA, 21 nt, RNAi
gugguucuguauggcuagguu

SEQ ID NO: 3699 - RNA, 21 nt, RNAi
uucaccaagacauaccgaucc

SEQ ID NO: 3700 - DNA, 21 bp, homo sapiens
aagccttctcctgcctctgaa

SEQ ID NO: 3701 - RNA, 21 nt, RNAi
gccuucuccugccucugaauu

SEQ ID NO: 3702 - RNA, 21 nt, RNAi
uucggaagaggacggagacuu

SEQ ID NO: 3703 - DNA, 21 bp, homo sapiens
aactgagccaaaccttcagtg

SEQ ID NO: 3704 - RNA, 21 nt, RNAi
cugagccaaaccuucaguguu

SEQ ID NO: 3705 - RNA, 21 nt, RNAi
uugacucgguuuggaagucac

SEQ ID NO: 3706 - DNA, 21 bp, homo sapiens
aaaccttcagtgccttccaga

SEQ ID NO: 3707 - RNA, 21 nt, RNAi
accuucagugccuuccagauu

SEQ ID NO: 3708 - RNA, 21 nt, RNAi
uuuggaagucacggaaggucu

SEQ ID NO: 3709 - DNA, 21 bp, homo sapiens
aaccttcagtgccttccagaa

SEQ ID NO: 3710 - RNA, 21 nt, RNAi
ccuucagugccuuccagaauu

SEQ ID NO: 3711 - RNA, 21 nt, RNAi
uuggaagucacggaaggucuu

SEQ ID NO: 3712 - DNA, 21 bp, homo sapiens
aaaggcagaagcctgtgtgga

SEQ ID NO: 3713 - RNA, 21 nt, RNAi
aggcagaagccuguguggauu

SEQ ID NO: 3714 - RNA, 21 nt, RNAi
uuuccgucuucggacacaccu

SEQ ID NO: 3715 - DNA, 21 bp, homo sapiens
aaggcagaagcctgtgtggag

SEQ ID NO: 3716 - RNA, 21 nt, RNAi
ggcagaagccuguguggaguu

SEQ ID NO: 3717 - RNA, 21 nt, RNAi
uuccgucuucggacacaccuc

SEQ ID NO: 3718 - DNA, 21 bp, homo sapiens
aagcctgtgtggagtgtgctg

SEQ ID NO: 3719 - RNA, 21 nt, RNAi
gccuguguggagugugcuguu

SEQ ID NO: 3720 - RNA, 21 nt, RNAi
uucggacacaccucacacgac

SEQ ID NO: 3721 - DNA, 21 bp, homo sapiens
aaactggcatccttgagctga

SEQ ID NO: 3722 - RNA, 21 nt, RNAi
acuggcauccuugagcugauu

SEQ ID NO: 3723 - RNA, 21 nt, RNAi
uuugaccguaggaacucgacu

SEQ ID NO: 3724 - DNA, 21 bp, homo sapiens
aactggcatccttgagctgac

SEQ ID NO: 3725 - RNA, 21 nt, RNAi
cuggcauccuugagcugacuu

SEQ ID NO: 3726 - RNA, 21 nt, RNAi
uugaccguaggaacucgacug

SEQ ID NO: 3727 - DNA, 21 bp, homo sapiens
aaacaaaccagctgcctttgt

SEQ ID NO: 3728 - RNA, 21 nt, RNAi
acaaaccagcugccuuuguuu

SEQ ID NO: 3729 - RNA, 21 nt, RNAi
uuuguuuggucgacggaaaca

SEQ ID NO: 3730 - DNA, 21 bp, homo sapiens
aacaaaccagctgcctttgta

SEQ ID NO: 3731 - RNA, 21 nt, RNAi
caaaccagcugccuuuguauu

SEQ ID NO: 3732 - RNA, 21 nt, RNAi
uuguuuggucgacggaaacau

SEQ ID NO: 3733 - DNA, 21 bp, homo sapiens
aaaccagctgcctttgtatct

SEQ ID NO: 3734 - RNA, 21 nt, RNAi
accagcugccuuuguaucuuu

SEQ ID NO: 3735 - RNA, 21 nt, RNAi
uuuggucgacggaaacauaga

SEQ ID NO: 3736 - DNA, 21 bp, homo sapiens
aaccagctgcctttgtatctt

SEQ ID NO: 3737 - RNA, 21 nt, RNAi
ccagcugccuuuguaucuuuu

SEQ ID NO: 3738 - RNA, 21 nt, RNAi
uuggucgacggaaacauagaa

SEQ ID NO: 3739 - DNA, 21 bp, homo sapiens
aagagattctccttccaggcc

SEQ ID NO: 3740 - RNA, 21 nt, RNAi
gagauucuccuuccaggccuu

SEQ ID NO: 3741 - RNA, 21 nt, RNAi
uucucuaagaggaagguccgg

SEQ ID NO: 3742 - DNA, 21 bp, homo sapiens
aagaatccaaactatgaggct

SEQ ID NO: 3743 - RNA, 21 nt, RNAi
gaauccaaacuaugaggcuuu

SEQ ID NO: 3744 - RNA, 21 nt, RNAi
uucuuagguuugauacuccga

SEQ ID NO: 3745 - DNA, 21 bp, homo sapiens
aatccaaactatgaggctagt

SEQ ID NO: 3746 - RNA, 21 nt, RNAi
uccaaacuaugaggcuaguuu

SEQ ID NO: 3747 - RNA, 21 nt, RNAi
uuagguuugauacuccgauca

SEQ ID NO: 3748 - DNA, 21 bp, homo sapiens
aaactatgaggctagttcttg

SEQ ID NO: 3749 - RNA, 21 nt, RNAi
acuaugaggcuaguucuuguu

SEQ ID NO: 3750 - RNA, 21 nt, RNAi
uuugauacuccgaucaagaac

SEQ ID NO: 3751 - DNA, 21 bp, homo sapiens
aactatgaggctagttcttgt

SEQ ID NO: 3752 - RNA, 21 nt, RNAi
cuaugaggcuaguucuuguuu

SEQ ID NO: 3753 - RNA, 21 nt, RNAi
uugauacuccgaucaagaaca

SEQ ID NO: 3754 - DNA, 21 bp, homo sapiens
aactcaagactgttctggaat

SEQ ID NO: 3755 - RNA, 21 nt, RNAi
cucaagacuguucuggaauuu

SEQ ID NO: 3756 - RNA, 21 nt, RNAi
uugaguucugacaagaccuua

SEQ ID NO: 3757 - DNA, 21 bp, homo sapiens
cacgagactcgcagcggaagt

SEQ ID NO: 3758 - RNA, 21 nt, RNAi
cgagacucgcagcggaaguuu

SEQ ID NO: 3759 - RNA, 21 nt, RNAi
uugcucugagcgucgccuuca

SEQ ID NO: 3760 - DNA, 21 bp, homo sapiens
caggaagaagcggttggagtt

SEQ ID NO: 3761 - RNA, 21 nt, RNAi
ggaagaagcgguuggaguuuu

SEQ ID NO: 3762 - RNA, 21 nt, RNAi
uuccuucuucgccaaccucaa

SEQ ID NO: 3763 - DNA, 21 bp, homo sapiens
caacttagataccgagcgtcc

SEQ ID NO: 3764 - RNA, 21 nt, RNAi
acuuagauaccgagcguccuu

SEQ ID NO: 3765 - RNA, 21 nt, RNAi
uuugaaucuauggcucgcagg

SEQ ID NO: 3766 - DNA, 21 bp, homo sapiens
cacctactgctccagatcgtg

SEQ ID NO: 3767 - RNA, 21 nt, RNAi
ccuacugcuccagaucguguu

SEQ ID NO: 3768 - RNA, 21 nt, RNAi
uuggaugacgaggucuagcac

SEQ ID NO: 3769 - DNA, 21 bp, homo sapiens
cagatcgtgcaactgctgtgg

SEQ ID NO: 3770 - RNA, 21 nt, RNAi
gaucgugcaacugcugugguu

SEQ ID NO: 3771 - RNA, 21 nt, RNAi
uucuagcacguugacgacacc

SEQ ID NO: 3772 - DNA, 21 bp, homo sapiens
caactgctgtggccactgcct

SEQ ID NO: 3773 - RNA, 21 nt, RNAi
acugcuguggccacugccuuu

SEQ ID NO: 3774 - RNA, 21 nt, RNAi
uuugacgacaccggugacgga

SEQ ID NO: 3775 - DNA, 21 bp, homo sapiens
caggcactgagtatacctgca

SEQ ID NO: 3776 - RNA, 21 nt, RNAi
ggcacugaguauaccugcauu

SEQ ID NO: 3777 - RNA, 21 nt, RNAi
uuccgugacucauauggacgu

SEQ ID NO: 3778 - DNA, 21 bp, homo sapiens
cactgagtatacctgcaaggt

SEQ ID NO: 3779 - RNA, 21 nt, RNAi
cugaguauaccugcaagguuu

SEQ ID NO: 3780 - RNA, 21 nt, RNAi
uugacucauauggacguucca

SEQ ID NO: 3781 - DNA, 21 bp, homo sapiens
cactgaggtcctggctggtac

SEQ ID NO: 3782 - RNA, 21 nt, RNAi
cugagguccuggcugguacuu

SEQ ID NO: 3783 - RNA, 21 nt, RNAi
uugacuccaggaccgaccaug

SEQ ID NO: 3784 - DNA, 21 bp, homo sapiens
catgcacagcctggtgcgaag

SEQ ID NO: 3785 - RNA, 21 nt, RNAi
ugcacagccuggugcgaaguu

SEQ ID NO: 3786 - RNA, 21 nt, RNAi
uuacgugucggaccacgcuuc

SEQ ID NO: 3787 - DNA, 21 bp, homo sapiens
cactgtcaccagcacggtctg

SEQ ID NO: 3788 - RNA, 21 nt, RNAi
cugucaccagcacggucuguu

SEQ ID NO: 3789 - RNA, 21 nt, RNAi
uugacaguggucgugccagac

SEQ ID NO: 3790 - DNA, 21 bp, homo sapiens
cacggtctggtcctgcgtgat

SEQ ID NO: 3791 - RNA, 21 nt, RNAi
cggucugguccugcgugauuu

SEQ ID NO: 3792 - RNA, 21 nt, RNAi
uugccagaccaggacgcacua

SEQ ID NO: 3793 - DNA, 21 bp, homo sapiens
caagctgtgtcgctttgtctt

SEQ ID NO: 3794 - RNA, 21 nt, RNAi
agcugugucgcuuugucuuuu

SEQ ID NO: 3795 - RNA, 21 nt, RNAi
uuucgacacagcgaaacagaa

SEQ ID NO: 3796 - DNA, 21 bp, homo sapiens
caaggcagccgatgtctggag

SEQ ID NO: 3797 - RNA, 21 nt, RNAi
aggcagccgaugucuggaguu

SEQ ID NO: 3798 - RNA, 21 nt, RNAi
uuuccgucggcuacagaccuc

SEQ ID NO: 3799 - DNA, 21 bp, homo sapiens
cagctgaacggctcacagcca

SEQ ID NO: 3800 - RNA, 21 nt, RNAi
gcugaacggcucacagccauu

SEQ ID NO: 3801 - RNA, 21 nt, RNAi
uucgacuugccgagugucggu

SEQ ID NO: 3802 - DNA, 21 bp, homo sapiens
cacagccacaggcatcctcct

SEQ ID NO: 3803 - RNA, 21 nt, RNAi
cagccacaggcauccuccuuu

SEQ ID NO: 3804 - RNA, 21 nt, RNAi
uugucgguguccguaggagga

SEQ ID NO: 3805 - DNA, 21 bp, homo sapiens
cagagaagtggttctgtatgg

SEQ ID NO: 3806 - RNA, 21 nt, RNAi
gagaagugguucuguaugguu

SEQ ID NO: 3807 - RNA, 21 nt, RNAi
uucucuucaccaagacauacc

SEQ ID NO: 3808 - DNA, 21 bp, homo sapiens
cacgctcagctgccaacagtg

SEQ ID NO: 3809 - RNA, 21 nt, RNAi
cgcucagcugccaacaguguu

SEQ ID NO: 3810 - RNA, 21 nt, RNAi
uugcgagucgacgguugucac

SEQ ID NO: 3811 - DNA, 21 bp, homo sapiens
cagctgccaacagtggattga

SEQ ID NO: 3812 - RNA, 21 nt, RNAi
gcugccaacaguggauugauu

SEQ ID NO: 3813 - RNA, 21 nt, RNAi
uucgacgguugucaccuaacu

SEQ ID NO: 3814 - DNA, 21 bp, homo sapiens
caagccttctcctgcctctga

SEQ ID NO: 3815 - RNA, 21 nt, RNAi
agccuucuccugccucugauu

SEQ ID NO: 3816 - RNA, 21 nt, RNAi
uuucggaagaggacggagacu

SEQ ID NO: 3817 - DNA, 21 bp, homo sapiens
caaaccttcagtgccttccag

SEQ ID NO: 3818 - RNA, 21 nt, RNAi
aaccuucagugccuuccaguu

SEQ ID NO: 3819 - RNA, 21 nt, RNAi
uuuuggaagucacggaagguc

SEQ ID NO: 3820 - DNA, 21 bp, homo sapiens
cagaagcctgtgtggagtgtg

SEQ ID NO: 3821 - RNA, 21 nt, RNAi
gaagccuguguggaguguguu

SEQ ID NO: 3822 - RNA, 21 nt, RNAi
uucuucggacacaccucacac

SEQ ID NO: 3823 - DNA, 21 bp, homo sapiens
cacatctgctttgttccacac

SEQ ID NO: 3824 - RNA, 21 nt, RNAi
caucugcuuuguuccacacuu

SEQ ID NO: 3825 - RNA, 21 nt, RNAi
uuguagacgaaacaaggugug

SEQ ID NO: 3826 - DNA, 21 bp, homo sapiens
catctgctttgttccacacac

SEQ ID NO: 3827 - RNA, 21 nt, RNAi
ucugcuuuguuccacacacuu

SEQ ID NO: 3828 - RNA, 21 nt, RNAi
uuagacgaaacaaggugugug

SEQ ID NO: 3829 - DNA, 21 bp, homo sapiens
cacacacatgcagttcctgct

SEQ ID NO: 3830 - RNA, 21 nt, RNAi
cacacaugcaguuccugcuuu

SEQ ID NO: 3831 - RNA, 21 nt, RNAi
uuguguguacgucaaggacga

SEQ ID NO: 3832 - DNA, 21 bp, homo sapiens
cacacatgcagttcctgcttg

SEQ ID NO: 3833 - RNA, 21 nt, RNAi
cacaugcaguuccugcuuguu

SEQ ID NO: 3834 - RNA, 21 nt, RNAi
uuguguacgucaaggacgaac

SEQ ID NO: 3835 - DNA, 21 bp, homo sapiens
cagcagtgagcaaaggagaca

SEQ ID NO: 3836 - RNA, 21 nt, RNAi
gcagugagcaaaggagacauu

SEQ ID NO: 3837 - RNA, 21 nt, RNAi
uucgucacucguuuccucugu

SEQ ID NO: 3838 - DNA, 21 bp, homo sapiens
cagtgagcaaaggagacaata

SEQ ID NO: 3839 - RNA, 21 nt, RNAi
gugagcaaaggagacaauauu

SEQ ID NO: 3840 - RNA, 21 nt, RNAi
uucacucguuuccucuguuau

SEQ ID NO: 3841 - DNA, 21 bp, homo sapiens
cacagagatgacaaactggca

SEQ ID NO: 3842 - RNA, 21 nt, RNAi
cagagaugacaaacuggcauu

SEQ ID NO: 3843 - RNA, 21 nt, RNAi
uugucucuacuguuugaccgu

SEQ ID NO: 3844 - DNA, 21 bp, homo sapiens
cagagatgacaaactggcatc

SEQ ID NO: 3845 - RNA, 21 nt, RNAi
gagaugacaaacuggcaucuu

SEQ ID NO: 3846 - RNA, 21 nt, RNAi
uucucuacuguuugaccguag

SEQ ID NO: 3847 - DNA, 21 bp, homo sapiens
caaactggcatccttgagctg

SEQ ID NO: 3848 - RNA, 21 nt, RNAi
aacuggcauccuugagcuguu

SEQ ID NO: 3849 - RNA, 21 nt, RNAi
uuuugaccguaggaacucgac

SEQ ID NO: 3850 - DNA, 21 bp, homo sapiens
catccttgagctgacaacact

SEQ ID NO: 3851 - RNA, 21 nt, RNAi
uccuugagcugacaacacuuu

SEQ ID NO: 3852 - RNA, 21 nt, RNAi
uuaggaacucgacuguuguga

SEQ ID NO: 3853 - DNA, 21 bp, homo sapiens
catgaccataggtcactgtct

SEQ ID NO: 3854 - RNA, 21 nt, RNAi
ugaccauaggucacugucuuu

SEQ ID NO: 3855 - RNA, 21 nt, RNAi
uuacugguauccagugacaga

SEQ ID NO: 3856 - DNA, 21 bp, homo sapiens
cataggtcactgtctacactg

SEQ ID NO: 3857 - RNA, 21 nt, RNAi
uaggucacugucuacacuguu

SEQ ID NO: 3858 - RNA, 21 nt, RNAi
uuauccagugacagaugugac

SEQ ID NO: 3859 - DNA, 21 bp, homo sapiens
cactttgtaccagtgtcggcc

SEQ ID NO: 3860 - RNA, 21 nt, RNAi
cuuuguaccagugucggccuu

SEQ ID NO: 3861 - RNA, 21 nt, RNAi
uugaaacauggucacagccgg

SEQ ID NO: 3862 - DNA, 21 bp, homo sapiens
cagtgtcggcctccactgatg

SEQ ID NO: 3863 - RNA, 21 nt, RNAi
gugucggccuccacugauguu

SEQ ID NO: 3864 - RNA, 21 nt, RNAi
uucacagccggaggugacuac

SEQ ID NO: 3865 - DNA, 21 bp, homo sapiens
cactgatgctggtgctcaggc

SEQ ID NO: 3866 - RNA, 21 nt, RNAi
cugaugcuggugcucaggcuu

SEQ ID NO: 3867 - RNA, 21 nt, RNAi
uugacuacgaccacgaguccg

SEQ ID NO: 3868 - DNA, 21 bp, homo sapiens
caggcacctctgtccaaggac

SEQ ID NO: 3869 - RNA, 21 nt, RNAi
ggcaccucuguccaaggacuu

SEQ ID NO: 3870 - RNA, 21 nt, RNAi
uuccguggagacagguuccug

SEQ ID NO: 3871 - DNA, 21 bp, homo sapiens
cacctctgtccaaggacaatc

SEQ ID NO: 3872 - RNA, 21 nt, RNAi
ccucuguccaaggacaaucuu

SEQ ID NO: 3873 - RNA, 21 nt, RNAi
uuggagacagguuccuguuag

SEQ ID NO: 3874 - DNA, 21 bp, homo sapiens
cacaaacaaaccagctgcctt

SEQ ID NO: 3875 - RNA, 21 nt, RNAi
caaacaaaccagcugccuuuu

SEQ ID NO: 3876 - RNA, 21 nt, RNAi
uuguuuguuuggucgacggaa

SEQ ID NO: 3877 - DNA, 21 bp, homo sapiens
caaacaaaccagctgcctttg

SEQ ID NO: 3878 - RNA, 21 nt, RNAi
aacaaaccagcugccuuuguu

SEQ ID NO: 3879 - RNA, 21 nt, RNAi
uuuuguuuggucgacggaaac

SEQ ID NO: 3880 - DNA, 21 bp, homo sapiens
caaaccagctgcctttgtatc

SEQ ID NO: 3881 - RNA, 21 nt, RNAi
aaccagcugccuuuguaucuu

SEQ ID NO: 3882 - RNA, 21 nt, RNAi
uuuuggucgacggaaacauag

SEQ ID NO: 3883 - DNA, 21 bp, homo sapiens
cagctgcctttgtatcttgta

SEQ ID NO: 3884 - RNA, 21 nt, RNAi
gcugccuuuguaucuuguauu

SEQ ID NO: 3885 - RNA, 21 nt, RNAi
uucgacggaaacauagaacau

SEQ ID NO: 3886 - DNA, 21 bp, homo sapiens
cagcatctctgtcctcttgat

SEQ ID NO: 3887 - RNA, 21 nt, RNAi
gcaucucuguccucuugauuu

SEQ ID NO: 3888 - RNA, 21 nt, RNAi
uucguagagacaggagaacua

SEQ ID NO: 3889 - DNA, 21 bp, homo sapiens
catctctgtcctcttgattaa

SEQ ID NO: 3890 - RNA, 21 nt, RNAi
ucucuguccucuugauuaauu

SEQ ID NO: 3891 - RNA, 21 nt, RNAi
uuagagacaggagaacuaauu

SEQ ID NO: 3892 - DNA, 21 bp, homo sapiens
cagagataagaatccaaacta

SEQ ID NO: 3893 - RNA, 21 nt, RNAi
gagauaagaauccaaacuauu

SEQ ID NO: 3894 - RNA, 21 nt, RNAi
uucucuauucuuagguuugau

SEQ ID NO: 3895 - DNA, 21 bp, homo sapiens
caaactatgaggctagttctt

SEQ ID NO: 3896 - RNA, 21 nt, RNAi
aacuaugaggcuaguucuuuu

SEQ ID NO: 3897 - RNA, 21 nt, RNAi
uuuugauacuccgaucaagaa

SEQ ID NO: 3898 - DNA, 21 bp, homo sapiens
caagactgttctggaatgagg

SEQ ID NO: 3899 - RNA, 21 nt, RNAi
agacuguucuggaaugagguu

SEQ ID NO: 3900 - RNA, 21 nt, RNAi
uuucugacaagaccuuacucc

SEQ ID NO: 3901 - DNA, 21 bp, homo sapiens
catgagtatgtatgtttacct

SEQ ID NO: 3902 - RNA, 21 nt, RNAi
ugaguauguauguuuaccuuu

SEQ ID NO: 3903 - RNA, 21 nt, RNAi
uuacucauacauacaaaugga

SEQ ID NO: 3904 - DNA, 21 bp, homo sapiens
gattagctccggtttgcatca

SEQ ID NO: 3905 - RNA, 21 nt, RNAi
uuagcuccgguuugcaucauu

SEQ ID NO: 3906 - RNA, 21 nt, RNAi
uuaaucgaggccaaacguagu

SEQ ID NO: 3907 - DNA, 21 bp, homo sapiens
gattagctccggtttgcatca

SEQ ID NO: 3908 - RNA, 21 nt, RNAi
uuagcuccgguuugcaucauu

SEQ ID NO: 3909 - RNA, 21 nt, RNAi
uuaaucgaggccaaacguagu

SEQ ID NO: 3910 - DNA, 21 bp, homo sapiens
gagactcgcagcggaagtgga

SEQ ID NO: 3911 - RNA, 21 nt, RNAi
gacucgcagcggaaguggauu

SEQ ID NO: 3912 - RNA, 21 nt, RNAi
uucugagcgucgccuucaccu

SEQ ID NO: 3913 - DNA, 21 bp, homo sapiens
gaagaagcggttggagttgga

SEQ ID NO: 3914 - RNA, 21 nt, RNAi
agaagcgguuggaguuggauu

SEQ ID NO: 3915 - RNA, 21 nt, RNAi
uuucuucgccaaccucaaccu

SEQ ID NO: 3916 - DNA, 21 bp, homo sapiens
gaagcggttggagttggatga

SEQ ID NO: 3917 - RNA, 21 nt, RNAi
agcgguuggaguuggaugauu

SEQ ID NO: 3918 - RNA, 21 nt, RNAi
uuucgccaaccucaaccuacu

SEQ ID NO: 3919 - DNA, 21 bp, homo sapiens
gagttggatgacaacttagat

SEQ ID NO: 3920 - RNA, 21 nt, RNAi
guuggaugacaacuuagauuu

SEQ ID NO: 3921 - RNA, 21 nt, RNAi
uucaaccuacuguugaaucua

SEQ ID NO: 3922 - DNA, 21 bp, homo sapiens
gatgacaacttagataccgag

SEQ ID NO: 3923 - RNA, 21 nt, RNAi
ugacaacuuagauaccgaguu

SEQ ID NO: 3924 - RNA, 21 nt, RNAi
uuacuguugaaucuauggcuc

SEQ ID NO: 3925 - DNA, 21 bp, homo sapiens
gacaacttagataccgagcgt

SEQ ID NO: 3926 - RNA, 21 nt, RNAi
caacuuagauaccgagcguuu

SEQ ID NO: 3927 - RNA, 21 nt, RNAi
uuguugaaucuauggcucgca

SEQ ID NO: 3928 - DNA, 21 bp, homo sapiens
gatcgtgcaactgctgtggcc

SEQ ID NO: 3929 - RNA, 21 nt, RNAi
ucgugcaacugcuguggccuu

SEQ ID NO: 3930 - RNA, 21 nt, RNAi
uuagcacguugacgacaccgg

SEQ ID NO: 3931 - DNA, 21 bp, homo sapiens
gagtatacctgcaaggtgtac

SEQ ID NO: 3932 - RNA, 21 nt, RNAi
guauaccugcaagguguacuu

SEQ ID NO: 3933 - RNA, 21 nt, RNAi
uucauauggacguuccacaug

SEQ ID NO: 3934 - DNA, 21 bp, homo sapiens
gacatgcacagcctggtgcga

SEQ ID NO: 3935 - RNA, 21 nt, RNAi
caugcacagccuggugcgauu

SEQ ID NO: 3936 - RNA, 21 nt, RNAi
uuguacgugucggaccacgcu

SEQ ID NO: 3937 - DNA, 21 bp, homo sapiens
gatctcaagctgtgtcgcttt

SEQ ID NO: 3938 - RNA, 21 nt, RNAi
ucucaagcugugucgcuuuuu

SEQ ID NO: 3939 - RNA, 21 nt, RNAi
uuagaguucgacacagcgaaa

SEQ ID NO: 3940 - DNA, 21 bp, homo sapiens
gaccgtgagaggaagaagctg

SEQ ID NO: 3941 - RNA, 21 nt, RNAi
ccgugagaggaagaagcuguu

SEQ ID NO: 3942 - RNA, 21 nt, RNAi
uuggcacucuccuucuucgac

SEQ ID NO: 3943 - DNA, 21 bp, homo sapiens
gagaggaagaagctggtgctg

SEQ ID NO: 3944 - RNA, 21 nt, RNAi
gaggaagaagcuggugcuguu

SEQ ID NO: 3945 - RNA, 21 nt, RNAi
uucuccuucuucgaccacgac

SEQ ID NO: 3946 - DNA, 21 bp, homo sapiens
gaggaagaagctggtgctgga

SEQ ID NO: 3947 - RNA, 21 nt, RNAi
ggaagaagcuggugcuggauu

SEQ ID NO: 3948 - RNA, 21 nt, RNAi
uuccuucuucgaccacgaccu

SEQ ID NO: 3949 - DNA, 21 bp, homo sapiens
gaagaagctggtgctggagaa

SEQ ID NO: 3950 - RNA, 21 nt, RNAi
agaagcuggugcuggagaauu

SEQ ID NO: 3951 - RNA, 21 nt, RNAi
uuucuucgaccacgaccucuu

SEQ ID NO: 3952 - DNA, 21 bp, homo sapiens
gaagctggtgctggagaacct

SEQ ID NO: 3953 - RNA, 21 nt, RNAi
agcuggugcuggagaaccuuu

SEQ ID NO: 3954 - RNA, 21 nt, RNAi
uuucgaccacgaccucuugga

SEQ ID NO: 3955 - DNA, 21 bp, homo sapiens
gagaacctggaggactcctgc

SEQ ID NO: 3956 - RNA, 21 nt, RNAi
gaaccuggaggacuccugcuu

SEQ ID NO: 3957 - RNA, 21 nt, RNAi
uucuuggaccuccugaggacg

SEQ ID NO: 3958 - DNA, 21 bp, homo sapiens
gaacctggaggactcctgcgt

SEQ ID NO: 3959 - RNA, 21 nt, RNAi
accuggaggacuccugcguuu

SEQ ID NO: 3960 - RNA, 21 nt, RNAi
uuuggaccuccugaggacgca

SEQ ID NO: 3961 - DNA, 21 bp, homo sapiens
gaggactcctgcgtgctgact

SEQ ID NO: 3962 - RNA, 21 nt, RNAi
ggacuccugcgugcugacuuu

SEQ ID NO: 3963 - RNA, 21 nt, RNAi
uuccugaggacgcacgacuga

SEQ ID NO: 3964 - DNA, 21 bp, homo sapiens
gacctgagatactcagctcac

SEQ ID NO: 3965 - RNA, 21 nt, RNAi
ccugagauacucagcucacuu

SEQ ID NO: 3966 - RNA, 21 nt, RNAi
uuggacucuaugagucgagug

SEQ ID NO: 3967 - DNA, 21 bp, homo sapiens
gagccagctgaacggctcaca

SEQ ID NO: 3968 - RNA, 21 nt, RNAi
gccagcugaacggcucacauu

SEQ ID NO: 3969 - RNA, 21 nt, RNAi
uucggucgacuugccgagugu

SEQ ID NO: 3970 - DNA, 21 bp, homo sapiens
gagacagagaagtggttctgt

SEQ ID NO: 3971 - RNA, 21 nt, RNAi
gacagagaagugguucuguuu

SEQ ID NO: 3972 - RNA, 21 nt, RNAi
uucugucucuucaccaagaca

SEQ ID NO: 3973 - DNA, 21 bp, homo sapiens
gacagagaagtggttctgtat

SEQ ID NO: 3974 - RNA, 21 nt, RNAi
cagagaagugguucuguauuu

SEQ ID NO: 3975 - RNA, 21 nt, RNAi
uugucucuucaccaagacaua

SEQ ID NO: 3976 - DNA, 21 bp, homo sapiens
gagaagtggttctgtatggct

SEQ ID NO: 3977 - RNA, 21 nt, RNAi
gaagugguucuguauggcuuu

SEQ ID NO: 3978 - RNA, 21 nt, RNAi
uucuucaccaagacauaccga

SEQ ID NO: 3979 - DNA, 21 bp, homo sapiens
gaagtggttctgtatggctag

SEQ ID NO: 3980 - RNA, 21 nt, RNAi
agugguucuguauggcuaguu

SEQ ID NO: 3981 - RNA, 21 nt, RNAi
uuucaccaagacauaccgauc

SEQ ID NO: 3982 - DNA, 21 bp, homo sapiens
gaactgagccaaaccttcagt

SEQ ID NO: 3983 - RNA, 21 nt, RNAi
acugagccaaaccuucaguuu

SEQ ID NO: 3984 - RNA, 21 nt, RNAi
uuugacucgguuuggaaguca

SEQ ID NO: 3985 - DNA, 21 bp, homo sapiens
gagccaaaccttcagtgcctt

SEQ ID NO: 3986 - RNA, 21 nt, RNAi
gccaaaccuucagugccuuuu

SEQ ID NO: 3987 - RNA, 21 nt, RNAi
uucgguuuggaagucacggaa

SEQ ID NO: 3988 - DNA, 21 bp, homo sapiens
gagaaaggcagaagcctgtgt

SEQ ID NO: 3989 - RNA, 21 nt, RNAi
gaaaggcagaagccuguguuu

SEQ ID NO: 3990 - RNA, 21 nt, RNAi
uucuuuccgucuucggacaca

SEQ ID NO: 3991 - DNA, 21 bp, homo sapiens
gaaaggcagaagcctgtgtgg

SEQ ID NO: 3992 - RNA, 21 nt, RNAi
aaggcagaagccugugugguu

SEQ ID NO: 3993 - RNA, 21 nt, RNAi
uuuuccgucuucggacacacc

SEQ ID NO: 3994 - DNA, 21 bp, homo sapiens
gaagcctgtgtggagtgtgct

SEQ ID NO: 3995 - RNA, 21 nt, RNAi
agccuguguggagugugcuuu

SEQ ID NO: 3996 - RNA, 21 nt, RNAi
uuucggacacaccucacacga

SEQ ID NO: 3997 - DNA, 21 bp, homo sapiens
gagtgtgctgtgtacacatct

SEQ ID NO: 3998 - RNA, 21 nt, RNAi
gugugcuguguacacaucuuu

SEQ ID NO: 3999 - RNA, 21 nt, RNAi
uucacacgacacauguguaga

SEQ ID NO: 4000 - DNA, 21 bp, homo sapiens
gagtacagcagtgagcaaagg

SEQ ID NO: 4001 - RNA, 21 nt, RNAi
guacagcagugagcaaagguu

SEQ ID NO: 4002 - RNA, 21 nt, RNAi
uucaugucgucacucguuucc

SEQ ID NO: 4003 - DNA, 21 bp, homo sapiens
gagcaaaggagacaatattcc

SEQ ID NO: 4004 - RNA, 21 nt, RNAi
gcaaaggagacaauauuccuu

SEQ ID NO: 4005 - RNA, 21 nt, RNAi
uucguuuccucuguuauaagg

SEQ ID NO: 4006 - DNA, 21 bp, homo sapiens
gagatgacaaactggcatcct

SEQ ID NO: 4007 - RNA, 21 nt, RNAi
gaugacaaacuggcauccuuu

SEQ ID NO: 4008 - RNA, 21 nt, RNAi
uucuacuguuugaccguagga

SEQ ID NO: 4009 - DNA, 21 bp, homo sapiens
gatgacaaactggcatccttg

SEQ ID NO: 4010 - RNA, 21 nt, RNAi
ugacaaacuggcauccuuguu

SEQ ID NO: 4011 - RNA, 21 nt, RNAi
uuacuguuugaccguaggaac

SEQ ID NO: 4012 - DNA, 21 bp, homo sapiens
gacaaactggcatccttgagc

SEQ ID NO: 4013 - RNA, 21 nt, RNAi
caaacuggcauccuugagcuu

SEQ ID NO: 4014 - RNA, 21 nt, RNAi
uuguuugaccguaggaacucg

SEQ ID NO: 4015 - DNA, 21 bp, homo sapiens
gaccataggtcactgtctaca

SEQ ID NO: 4016 - RNA, 21 nt, RNAi
ccauaggucacugucuacauu

SEQ ID NO: 4017 - RNA, 21 nt, RNAi
uugguauccagugacagaugu

SEQ ID NO: 4018 - DNA, 21 bp, homo sapiens
gatgctggtgctcaggcacct

SEQ ID NO: 4019 - RNA, 21 nt, RNAi
ugcuggugcucaggcaccuuu

SEQ ID NO: 4020 - RNA, 21 nt, RNAi
uuacgaccacgaguccgugga

SEQ ID NO: 4021 - DNA, 21 bp, homo sapiens
gattaagagattctccttcca

SEQ ID NO: 4022 - RNA, 21 nt, RNAi
uuaagagauucuccuuccauu

SEQ ID NO: 4023 - RNA, 21 nt, RNAi
uuaauucucuaagaggaaggu

SEQ ID NO: 4024 - DNA, 21 bp, homo sapiens
gagattctccttccaggccta

SEQ ID NO: 4025 - RNA, 21 nt, RNAi
gauucuccuuccaggccuauu

SEQ ID NO: 4026 - RNA, 21 nt, RNAi
uucuaagaggaagguccggau

SEQ ID NO: 4027 - DNA, 21 bp, homo sapiens
gattctccttccaggcctaag

SEQ ID NO: 4028 - RNA, 21 nt, RNAi
uucuccuuccaggccuaaguu

SEQ ID NO: 4029 - RNA, 21 nt, RNAi
uuaagaggaagguccggauuc

SEQ ID NO: 4030 - DNA, 21 bp, homo sapiens
gagataagaatccaaactatg

SEQ ID NO: 4031 - RNA, 21 nt, RNAi
gauaagaauccaaacuauguu

SEQ ID NO: 4032 - RNA, 21 nt, RNAi
uucuauucuuagguuugauac

SEQ ID NO: 4033 - DNA, 21 bp, homo sapiens
gataagaatccaaactatgag

SEQ ID NO: 4034 - RNA, 21 nt, RNAi
uaagaauccaaacuaugaguu

SEQ ID NO: 4035 - RNA, 21 nt, RNAi
uuauucuuagguuugauacuc

SEQ ID NO: 4036 - DNA, 21 bp, homo sapiens
gaatccaaactatgaggctag

SEQ ID NO: 4037 - RNA, 21 nt, RNAi
auccaaacuaugaggcuaguu

SEQ ID NO: 4038 - RNA, 21 nt, RNAi
uuuagguuugauacuccgauc

SEQ ID NO: 4039 - DNA, 21 bp, homo sapiens
gaggctagttcttgtctaact

SEQ ID NO: 4040 - RNA, 21 nt, RNAi
ggcuaguucuugucuaacuuu

SEQ ID NO: 4041 - RNA, 21 nt, RNAi
uuccgaucaagaacagauuga

SEQ ID NO: 4042 - DNA, 21 bp, homo sapiens
gacctgagcaccaaggttgag

SEQ ID NO: 4043 - RNA, 21 nt, RNAi
ccugagcaccaagguugaguu

SEQ ID NO: 4044 - RNA, 21 nt, RNAi
uuggacucgugguuccaacuc

SEQ ID NO: 4045 - DNA, 21 bp, homo sapiens
gataccatgagtatgtatgtt

SEQ ID NO: 4046 - RNA, 21 nt, RNAi
uaccaugaguauguauguuuu

SEQ ID NO: 4047 - RNA, 21 nt, RNAi
uuaugguacucauacauacaa

SEQ ID NO: 4048 - DNA, 21 bp, homo sapiens
gagtatgtatgtttacctgtg

SEQ ID NO: 4049 - RNA, 21 nt, RNAi
guauguauguuuaccuguguu

SEQ ID NO: 4050 - RNA, 21 nt, RNAi
uucauacauacaaauggacac

SEQ ID NO: 4051 - DNA, 21 bp, homo sapiens
tactgctccagatcgtgcaac

SEQ ID NO: 4052 - RNA, 21 nt, RNAi
cugcuccagaucgugcaacuu

SEQ ID NO: 4053 - RNA, 21 nt, RNAi
uugacgaggucuagcacguug

SEQ ID NO: 4054 - DNA, 21 bp, homo sapiens
tacaggcactgagtatacctg

SEQ ID NO: 4055 - RNA, 21 nt, RNAi
caggcacugaguauaccuguu

SEQ ID NO: 4056 - RNA, 21 nt, RNAi
uuguccgugacucauauggac

SEQ ID NO: 4057 - DNA, 21 bp, homo sapiens
tactacacgctcagctgccaa

SEQ ID NO: 4058 - RNA, 21 nt, RNAi
cuacacgcucagcugccaauu

SEQ ID NO: 4059 - RNA, 21 nt, RNAi
uugaugugcgagucgacgguu

SEQ ID NO: 4060 - DNA, 21 bp, homo sapiens
tacacgctcagctgccaacag

SEQ ID NO: 4061 - RNA, 21 nt, RNAi
cacgcucagcugccaacaguu

SEQ ID NO: 4062 - RNA, 21 nt, RNAi
uugugcgagucgacgguuguc

SEQ ID NO: 4063 - DNA, 21 bp, homo sapiens
tagctccaagccttctcctgc

SEQ ID NO: 4064 - RNA, 21 nt, RNAi
gcuccaagccuucuccugcuu

SEQ ID NO: 4065 - RNA, 21 nt, RNAi
uucgagguucggaagaggacg

SEQ ID NO: 4066 - DNA, 21 bp, homo sapiens
tacacatctgctttgttccac

SEQ ID NO: 4067 - RNA, 21 nt, RNAi
cacaucugcuuuguuccacuu

SEQ ID NO: 4068 - RNA, 21 nt, RNAi
uuguguagacgaaacaaggug

SEQ ID NO: 4069 - DNA, 21 bp, homo sapiens
tacagcagtgagcaaaggaga

SEQ ID NO: 4070 - RNA, 21 nt, RNAi
cagcagugagcaaaggagauu

SEQ ID NO: 4071 - RNA, 21 nt, RNAi
uugucgucacucguuuccucu

SEQ ID NO: 4072 - DNA, 21 bp, homo sapiens
tacactttgtaccagtgtcgg

SEQ ID NO: 4073 - RNA, 21 nt, RNAi
cacuuuguaccagugucgguu

SEQ ID NO: 4074 - RNA, 21 nt, RNAi
uugugaaacauggucacagcc

SEQ ID NO: 4075 - DNA, 21 bp, homo sapiens
taccagtgtcggcctccactg

SEQ ID NO: 4076 - RNA, 21 nt, RNAi
ccagugucggccuccacuguu

SEQ ID NO: 4077 - RNA, 21 nt, RNAi
uuggucacagccggaggugac

SEQ ID NO: 4078 - DNA, 21 bp, homo sapiens
taagagattctccttccaggc

SEQ ID NO: 4079 - RNA, 21 nt, RNAi
agagauucuccuuccaggcuu

SEQ ID NO: 4080 - RNA, 21 nt, RNAi
uuucucuaagaggaagguccg

SEQ ID NO: 4081 - DNA, 21 bp, homo sapiens
taagaatccaaactatgaggc

SEQ ID NO: 4082 - RNA, 21 nt, RNAi
agaauccaaacuaugaggcuu

SEQ ID NO: 4083 - RNA, 21 nt, RNAi
uuucuuagguuugauacuccg

SEQ ID NO: 4084 - DNA, 21 bp, homo sapiens
tatgaggctagttcttgtcta

SEQ ID NO: 4085 - RNA, 21 nt, RNAi
ugaggcuaguucuugucuauu

SEQ ID NO: 4086 - RNA, 21 nt, RNAi
uuacuccgaucaagaacagau

SEQ ID NO: 4087 - DNA, 21 bp, homo sapiens
tagttcttgtctaactcaaga

SEQ ID NO: 4088 - RNA, 21 nt, RNAi
guucuugucuaacucaagauu

SEQ ID NO: 4089 - RNA, 21 nt, RNAi
uucaagaacagauugaguucu

SEQ ID NO: 4090 - DNA, 21 bp, homo sapiens
taactcaagactgttctggaa

SEQ ID NO: 4091 - RNA, 21 nt, RNAi
acucaagacuguucuggaauu

SEQ ID NO: 4092 - RNA, 21 nt, RNAi
uuugaguucugacaagaccuu

SEQ ID NO: 4093 - DNA, 21 bp, homo sapiens
tatgtatgtttacctgtgcct

SEQ ID NO: 4094 - RNA, 21 nt, RNAi
uguauguuuaccugugccuuu

SEQ ID NO: 4095 - RNA, 21 nt, RNAi
uuacauacaaauggacacgga

SEQ ID NO: 4096 - DNA, 21 bp, homo sapiens
tatgtttacctgtgcctaata

SEQ ID NO: 4097 - RNA, 21 nt, RNAi
uguuuaccugugccuaauauu

SEQ ID NO: 4098 - RNA, 21 nt, RNAi
uuacaaauggacacggauuau

SEQ ID NO: 4099 - DNA, 21 bp, homo sapiens
tacctgtgcctaataaaggag

SEQ ID NO: 4100 - RNA, 21 nt, RNAi
ccugugccuaauaaaggaguu

SEQ ID NO: 4101 - RNA, 21 nt, RNAi
uuggacacggauuauuuccuc

SEQ ID NO: 4102 - DNA, 21 bp, homo sapiens
aagctgtgtcgctttgtcttc

SEQ ID NO: 4103 - RNA, 21 nt, RNAi
gcugugucgcuuugucuucuu

SEQ ID NO: 4104 - RNA, 21 nt, RNAi
uucgacacagcgaaacagaag

SEQ ID NO: 4105 - DNA, 21 bp, homo sapiens
caggcactgagtatacctgca

SEQ ID NO: 4106 - RNA, 21 nt, RNAi
ggcacugaguauaccugcauu

SEQ ID NO: 4107 - RNA, 21 nt, RNAi
uuccgugacucauauggacgu

SEQ ID NO: 4108 - DNA, 21 bp, homo sapiens
gagtatacctgcaaggtgtac

SEQ ID NO: 4109 - RNA, 21 nt, RNAi
guauaccugcaagguguacuu

SEQ ID NO: 4110 - RNA, 21 nt, RNAi
uucauauggacguuccacaug

SEQ ID NO: 4111 - DNA, 21 bp, homo sapiens
gatctcaagctgtgtcgcttt

SEQ ID NO: 4112 - RNA, 21 nt, RNAi
ucucaagcugugucgcuuuuu

SEQ ID NO: 4113 - RNA, 21 nt, RNAi
uuagaguucgacacagcgaaa

SEQ ID NO: 4114 - DNA, 21 bp, homo sapiens
aatggcacaatctcagcttac

SEQ ID NO: 4115 - RNA, 21 nt, RNAi
uggcacaaucucagcuuacuu

SEQ ID NO: 4116 - RNA, 21 nt, RNAi
uuaccguguuagagucgaaug

SEQ ID NO: 4117 - DNA, 21 bp, homo sapiens
aatctcagcttactgcaacct

SEQ ID NO: 4118 - RNA, 21 nt, RNAi
ucucagcuuacugcaaccuuu

SEQ ID NO: 4119 - RNA, 21 nt, RNAi
uuagagucgaaugacguugga

SEQ ID NO: 4120 - DNA, 21 bp, homo sapiens
aagcgattctcctgcctcagc

SEQ ID NO: 4121 - RNA, 21 nt, RNAi
gcgauucuccugccucagcuu

SEQ ID NO: 4122 - RNA, 21 nt, RNAi
uucgcuaagaggacggagucg

SEQ ID NO: 4123 - DNA, 21 bp, homo sapiens
aactcctgacctcaggtgatc

SEQ ID NO: 4124 - RNA, 21 nt, RNAi
cuccugaccucaggugaucuu

SEQ ID NO: 4125 - RNA, 21 nt, RNAi
uugaggacuggaguccacuag

SEQ ID NO: 4126 - DNA, 21 bp, homo sapiens
aaagtgctaggattacagccg

SEQ ID NO: 4127 - RNA, 21 nt, RNAi
agugcuaggauuacagccguu

SEQ ID NO: 4128 - RNA, 21 nt, RNAi
uuucacgauccuaaugucggc

SEQ ID NO: 4129 - DNA, 21 bp, homo sapiens
aagtgctaggattacagccgt

SEQ ID NO: 4130 - RNA, 21 nt, RNAi
gugcuaggauuacagccguuu

SEQ ID NO: 4131 - RNA, 21 nt, RNAi
uucacgauccuaaugucggca

SEQ ID NO: 4132 - DNA, 21 bp, homo sapiens
aaactgtgcctggctgattct

SEQ ID NO: 4133 - RNA, 21 nt, RNAi
acugugccuggcugauucuuu

SEQ ID NO: 4134 - RNA, 21 nt, RNAi
uuugacacggaccgacuaaga

SEQ ID NO: 4135 - DNA, 21 bp, homo sapiens
aactgtgcctggctgattctt

SEQ ID NO: 4136 - RNA, 21 nt, RNAi
cugugccuggcugauucuuuu

SEQ ID NO: 4137 - RNA, 21 nt, RNAi
uugacacggaccgacuaagaa

SEQ ID NO: 4138 - DNA, 21 bp, homo sapiens
aacctccacctcctggtttca

SEQ ID NO: 4139 - RNA, 21 nt, RNAi
ccuccaccuccugguuucauu

SEQ ID NO: 4140 - RNA, 21 nt, RNAi
uuggagguggaggaccaaagu

SEQ ID NO: 4141 - DNA, 21 bp, homo sapiens
aacaaatctgcattaggcggt

SEQ ID NO: 4142 - RNA, 21 nt, RNAi
caaaucugcauuaggcgguuu

SEQ ID NO: 4143 - RNA, 21 nt, RNAi
uuguuuagacguaauccgcca

SEQ ID NO: 4144 - DNA, 21 bp, homo sapiens
aaatctgcattaggcggtaca

SEQ ID NO: 4145 - RNA, 21 nt, RNAi
aucugcauuaggcgguacauu

SEQ ID NO: 4146 - RNA, 21 nt, RNAi
uuuagacguaauccgccaugu

SEQ ID NO: 4147 - DNA, 21 bp, homo sapiens
aatctgcattaggcggtacaa

SEQ ID NO: 4148 - RNA, 21 nt, RNAi
ucugcauuaggcgguacaauu

SEQ ID NO: 4149 - RNA, 21 nt, RNAi
uuagacguaauccgccauguu

SEQ ID NO: 4150 - DNA, 21 bp, homo sapiens
aaaggaagatgaagtgattca

SEQ ID NO: 4151 - RNA, 21 nt, RNAi
aggaagaugaagugauucauu

SEQ ID NO: 4152 - RNA, 21 nt, RNAi
uuuccuucuacuucacuaagu

SEQ ID NO: 4153 - DNA, 21 bp, homo sapiens
aaggaagatgaagtgattcat

SEQ ID NO: 4154 - RNA, 21 nt, RNAi
ggaagaugaagugauucauuu

SEQ ID NO: 4155 - RNA, 21 nt, RNAi
uuccuucuacuucacuaagua

SEQ ID NO: 4156 - DNA, 21 bp, homo sapiens
aatgtaagactgtacagactt

SEQ ID NO: 4157 - RNA, 21 nt, RNAi
uguaagacuguacagacuuuu

SEQ ID NO: 4158 - RNA, 21 nt, RNAi
uuacauucugacaugucugaa

SEQ ID NO: 4159 - DNA, 21 bp, homo sapiens
aagactgtacagacttcctag

SEQ ID NO: 4160 - RNA, 21 nt, RNAi
gacuguacagacuuccuaguu

SEQ ID NO: 4161 - RNA, 21 nt, RNAi
uucugacaugucugaaggauc

SEQ ID NO: 4162 - DNA, 21 bp, homo sapiens
aaatggaatccgaggatttaa

SEQ ID NO: 4163 - RNA, 21 nt, RNAi
auggaauccgaggauuuaauu

SEQ ID NO: 4164 - RNA, 21 nt, RNAi
uuuaccuuaggcuccuaaauu

SEQ ID NO: 4165 - DNA, 21 bp, homo sapiens
aatggaatccgaggatttaag

SEQ ID NO: 4166 - RNA, 21 nt, RNAi
uggaauccgaggauuuaaguu

SEQ ID NO: 4167 - RNA, 21 nt, RNAi
uuaccuuaggcuccuaaauuc

SEQ ID NO: 4168 - DNA, 21 bp, homo sapiens
aatccgaggatttaagtggca

SEQ ID NO: 4169 - RNA, 21 nt, RNAi
uccgaggauuuaaguggcauu

SEQ ID NO: 4170 - RNA, 21 nt, RNAi
uuaggcuccuaaauucaccgu

SEQ ID NO: 4171 - DNA, 21 bp, homo sapiens
aagtggcagagaattgacaat

SEQ ID NO: 4172 - RNA, 21 nt, RNAi
guggcagagaauugacaauuu

SEQ ID NO: 4173 - RNA, 21 nt, RNAi
uucaccgucucuuaacuguua

SEQ ID NO: 4174 - DNA, 21 bp, homo sapiens
aatgaacaaagtgagagacat

SEQ ID NO: 4175 - RNA, 21 nt, RNAi
ugaacaaagugagagacauuu

SEQ ID NO: 4176 - RNA, 21 nt, RNAi
uuacuuguuucacucucugua

SEQ ID NO: 4177 - DNA, 21 bp, homo sapiens
aaatgaagaccttactgatga

SEQ ID NO: 4178 - RNA, 21 nt, RNAi
augaagaccuuacugaugauu

SEQ ID NO: 4179 - RNA, 21 nt, RNAi
uuuacuucuggaaugacuacu

SEQ ID NO: 4180 - DNA, 21 bp, homo sapiens
aatgaagaccttactgatgaa

SEQ ID NO: 4181 - RNA, 21 nt, RNAi
ugaagaccuuacugaugaauu

SEQ ID NO: 4182 - RNA, 21 nt, RNAi
uuacuucuggaaugacuacuu

SEQ ID NO: 4183 - DNA, 21 bp, homo sapiens
aagaccttactgatgaactaa

SEQ ID NO: 4184 - RNA, 21 nt, RNAi
gaccuuacugaugaacuaauu

SEQ ID NO: 4185 - RNA, 21 nt, RNAi
uucuggaaugacuacuugauu

SEQ ID NO: 4186 - DNA, 21 bp, homo sapiens
aaatttctgctgatactacag

SEQ ID NO: 4187 - RNA, 21 nt, RNAi
auuucugcugauacuacaguu

SEQ ID NO: 4188 - RNA, 21 nt, RNAi
uuuaaagacgacuaugauguc

SEQ ID NO: 4189 - DNA, 21 bp, homo sapiens
aatttctgctgatactacaga

SEQ ID NO: 4190 - RNA, 21 nt, RNAi
uuucugcugauacuacagauu

SEQ ID NO: 4191 - RNA, 21 nt, RNAi
uuaaagacgacuaugaugucu

SEQ ID NO: 4192 - DNA, 21 bp, homo sapiens
aaccaaattatgatgatggca

SEQ ID NO: 4193 - RNA, 21 nt, RNAi
ccaaauuaugaugauggcauu

SEQ ID NO: 4194 - RNA, 21 nt, RNAi
uugguuuaauacuacuaccgu

SEQ ID NO: 4195 - DNA, 21 bp, homo sapiens
aaacagtgttccgctaagtga

SEQ ID NO: 4196 - RNA, 21 nt, RNAi
acaguguuccgcuaagugauu

SEQ ID NO: 4197 - RNA, 21 nt, RNAi
uuugucacaaggcgauucacu

SEQ ID NO: 4198 - DNA, 21 bp, homo sapiens
aacagtgttccgctaagtgat

SEQ ID NO: 4199 - RNA, 21 nt, RNAi
caguguuccgcuaagugauuu

SEQ ID NO: 4200 - RNA, 21 nt, RNAi
uugucacaaggcgauucacua

SEQ ID NO: 4201 - DNA, 21 bp, homo sapiens
aaattgattggtcgttacagt

SEQ ID NO: 4202 - RNA, 21 nt, RNAi
auugauuggucguuacaguuu

SEQ ID NO: 4203 - RNA, 21 nt, RNAi
uuuaacuaaccagcaauguca

SEQ ID NO: 4204 - DNA, 21 bp, homo sapiens
aattgattggtcgttacagtc

SEQ ID NO: 4205 - RNA, 21 nt, RNAi
uugauuggucguuacagucuu

SEQ ID NO: 4206 - RNA, 21 nt, RNAi
uuaacuaaccagcaaugucag

SEQ ID NO: 4207 - DNA, 21 bp, homo sapiens
aattcaagtgagatttgctga

SEQ ID NO: 4208 - RNA, 21 nt, RNAi
uucaagugagauuugcugauu

SEQ ID NO: 4209 - RNA, 21 nt, RNAi
uuaaguucacucuaaacgacu

SEQ ID NO: 4210 - DNA, 21 bp, homo sapiens
aaagctattcaagagccagat

SEQ ID NO: 4211 - RNA, 21 nt, RNAi
agcuauucaagagccagauuu

SEQ ID NO: 4212 - RNA, 21 nt, RNAi
uuucgauaaguucucggucua

SEQ ID NO: 4213 - DNA, 21 bp, homo sapiens
aagctattcaagagccagatg

SEQ ID NO: 4214 - RNA, 21 nt, RNAi
gcuauucaagagccagauguu

SEQ ID NO: 4215 - RNA, 21 nt, RNAi
uucgauaaguucucggucuac

SEQ ID NO: 4216 - DNA, 21 bp, homo sapiens
aagagccagatgatgcacgtg

SEQ ID NO: 4217 - RNA, 21 nt, RNAi
gagccagaugaugcacguguu

SEQ ID NO: 4218 - RNA, 21 nt, RNAi
uucucggucuacuacgugcac

SEQ ID NO: 4219 - DNA, 21 bp, homo sapiens
aaatggccagagcaaactgca

SEQ ID NO: 4220 - RNA, 21 nt, RNAi
auggccagagcaaacugcauu

SEQ ID NO: 4221 - RNA, 21 nt, RNAi
uuuaccggucucguuugacgu

SEQ ID NO: 4222 - DNA, 21 bp, homo sapiens
aatggccagagcaaactgcaa

SEQ ID NO: 4223 - RNA, 21 nt, RNAi
uggccagagcaaacugcaauu

SEQ ID NO: 4224 - RNA, 21 nt, RNAi
uuaccggucucguuugacguu

SEQ ID NO: 4225 - DNA, 21 bp, homo sapiens
aatttgaactgtcacaaggta

SEQ ID NO: 4226 - RNA, 21 nt, RNAi
uuugaacugucacaagguauu

SEQ ID NO: 4227 - RNA, 21 nt, RNAi
uuaaacuugacaguguuccau

SEQ ID NO: 4228 - DNA, 21 bp, homo sapiens
aactgtcacaaggtaatgtca

SEQ ID NO: 4229 - RNA, 21 nt, RNAi
cugucacaagguaaugucauu

SEQ ID NO: 4230 - RNA, 21 nt, RNAi
uugacaguguuccauuacagu

SEQ ID NO: 4231 - DNA, 21 bp, homo sapiens
aaagctgtagaacgtggagca

SEQ ID NO: 4232 - RNA, 21 nt, RNAi
agcuguagaacguggagcauu

SEQ ID NO: 4233 - RNA, 21 nt, RNAi
uuucgacaucuugcaccucgu

SEQ ID NO: 4234 - DNA, 21 bp, homo sapiens
aagctgtagaacgtggagcag

SEQ ID NO: 4235 - RNA, 21 nt, RNAi
gcuguagaacguggagcaguu

SEQ ID NO: 4236 - RNA, 21 nt, RNAi
uucgacaucuugcaccucguc

SEQ ID NO: 4237 - DNA, 21 bp, homo sapiens
aacgtggagcagtaccactag

SEQ ID NO: 4238 - RNA, 21 nt, RNAi
cguggagcaguaccacuaguu

SEQ ID NO: 4239 - RNA, 21 nt, RNAi
uugcaccucgucauggugauc

SEQ ID NO: 4240 - DNA, 21 bp, homo sapiens
aaagcagctgctttcagagga

SEQ ID NO: 4241 - RNA, 21 nt, RNAi
agcagcugcuuucagaggauu

SEQ ID NO: 4242 - RNA, 21 nt, RNAi
uuucgucgacgaaagucuccu

SEQ ID NO: 4243 - DNA, 21 bp, homo sapiens
aagcagctgctttcagaggag

SEQ ID NO: 4244 - RNA, 21 nt, RNAi
gcagcugcuuucagaggaguu

SEQ ID NO: 4245 - RNA, 21 nt, RNAi
uucgucgacgaaagucuccuc

SEQ ID NO: 4246 - DNA, 21 bp, homo sapiens
aagaatttatcagcatctacg

SEQ ID NO: 4247 - RNA, 21 nt, RNAi
gaauuuaucagcaucuacguu

SEQ ID NO: 4248 - RNA, 21 nt, RNAi
uucuuaaauagucguagaugc

SEQ ID NO: 4249 - DNA, 21 bp, homo sapiens
aatttatcagcatctacggta

SEQ ID NO: 4250 - RNA, 21 nt, RNAi
uuuaucagcaucuacgguauu

SEQ ID NO: 4251 - RNA, 21 nt, RNAi
uuaaauagucguagaugccau

SEQ ID NO: 4252 - DNA, 21 bp, homo sapiens
aataggaacaacagttgtgat

SEQ ID NO: 4253 - RNA, 21 nt, RNAi
uaggaacaacaguugugauuu

SEQ ID NO: 4254 - RNA, 21 nt, RNAi
uuauccuuguugucaacacua

SEQ ID NO: 4255 - DNA, 21 bp, homo sapiens
aacaacagttgtgattccaga

SEQ ID NO: 4256 - RNA, 21 nt, RNAi
caacaguugugauuccagauu

SEQ ID NO: 4257 - RNA, 21 nt, RNAi
uuguugucaacacuaaggucu

SEQ ID NO: 4258 - DNA, 21 bp, homo sapiens
aacagttgtgattccagagga

SEQ ID NO: 4259 - RNA, 21 nt, RNAi
caguugugauuccagaggauu

SEQ ID NO: 4260 - RNA, 21 nt, RNAi
uugucaacacuaaggucuccu

SEQ ID NO: 4261 - DNA, 21 bp, homo sapiens
aacatgccaccacaagatgca

SEQ ID NO: 4262 - RNA, 21 nt, RNAi
caugccaccacaagaugcauu

SEQ ID NO: 4263 - RNA, 21 nt, RNAi
uuguacggugguguucuacgu

SEQ ID NO: 4264 - DNA, 21 bp, homo sapiens
aagatgcagaaataggttacc

SEQ ID NO: 4265 - RNA, 21 nt, RNAi
gaugcagaaauagguuaccuu

SEQ ID NO: 4266 - RNA, 21 nt, RNAi
uucuacgucuuuauccaaugg

SEQ ID NO: 4267 - DNA, 21 bp, homo sapiens
aaataggttaccggaattcat

SEQ ID NO: 4268 - RNA, 21 nt, RNAi
auagguuaccggaauucauuu

SEQ ID NO: 4269 - RNA, 21 nt, RNAi
uuuauccaauggccuuaagua

SEQ ID NO: 4270 - DNA, 21 bp, homo sapiens
aataggttaccggaattcatt

SEQ ID NO: 4271 - RNA, 21 nt, RNAi
uagguuaccggaauucauuuu

SEQ ID NO: 4272 - RNA, 21 nt, RNAi
uuauccaauggccuuaaguaa

SEQ ID NO: 4273 - DNA, 21 bp, homo sapiens
aagacagatgattcagttgta

SEQ ID NO: 4274 - RNA, 21 nt, RNAi
gacagaugauucaguuguauu

SEQ ID NO: 4275 - RNA, 21 nt, RNAi
uucugucuacuaagucaacau

SEQ ID NO: 4276 - DNA, 21 bp, homo sapiens
aaagacaaacctctagatcag

SEQ ID NO: 4277 - RNA, 21 nt, RNAi
agacaaaccucuagaucaguu

SEQ ID NO: 4278 - RNA, 21 nt, RNAi
uuucuguuuggagaucuaguc

SEQ ID NO: 4279 - DNA, 21 bp, homo sapiens
aagacaaacctctagatcaga

SEQ ID NO: 4280 - RNA, 21 nt, RNAi
gacaaaccucuagaucagauu

SEQ ID NO: 4281 - RNA, 21 nt, RNAi
uucuguuuggagaucuagucu

SEQ ID NO: 4282 - DNA, 21 bp, homo sapiens
aaacctctagatcagaatgcc

SEQ ID NO: 4283 - RNA, 21 nt, RNAi
accucuagaucagaaugccuu

SEQ ID NO: 4284 - RNA, 21 nt, RNAi
uuuggagaucuagucuuacgg

SEQ ID NO: 4285 - DNA, 21 bp, homo sapiens
aacctctagatcagaatgccg

SEQ ID NO: 4286 - RNA, 21 nt, RNAi
ccucuagaucagaaugccguu

SEQ ID NO: 4287 - RNA, 21 nt, RNAi
uuggagaucuagucuuacggc

SEQ ID NO: 4288 - DNA, 21 bp, homo sapiens
aatgccgagatttggttgtgc

SEQ ID NO: 4289 - RNA, 21 nt, RNAi
ugccgagauuugguugugcuu

SEQ ID NO: 4290 - RNA, 21 nt, RNAi
uuacggcucuaaaccaacacg

SEQ ID NO: 4291 - DNA, 21 bp, homo sapiens
aaaccaagtggaaatgattcc

SEQ ID NO: 4292 - RNA, 21 nt, RNAi
accaaguggaaaugauuccuu

SEQ ID NO: 4293 - RNA, 21 nt, RNAi
uuugguucaccuuuacuaagg

SEQ ID NO: 4294 - DNA, 21 bp, homo sapiens
aaccaagtggaaatgattcct

SEQ ID NO: 4295 - RNA, 21 nt, RNAi
ccaaguggaaaugauuccuuu

SEQ ID NO: 4296 - RNA, 21 nt, RNAi
uugguucaccuuuacuaagga

SEQ ID NO: 4297 - DNA, 21 bp, homo sapiens
aagtggaaatgattcctgtga

SEQ ID NO: 4298 - RNA, 21 nt, RNAi
guggaaaugauuccugugauu

SEQ ID NO: 4299 - RNA, 21 nt, RNAi
uucaccuuuacuaaggacacu

SEQ ID NO: 4300 - DNA, 21 bp, homo sapiens
aaatagtcatttcaaggaacc

SEQ ID NO: 4301 - RNA, 21 nt, RNAi
auagucauuucaaggaaccuu

SEQ ID NO: 4302 - RNA, 21 nt, RNAi
uuuaucaguaaaguuccuugg

SEQ ID NO: 4303 - DNA, 21 bp, homo sapiens
aatagtcatttcaaggaacct

SEQ ID NO: 4304 - RNA, 21 nt, RNAi
uagucauuucaaggaaccuuu

SEQ ID NO: 4305 - RNA, 21 nt, RNAi
uuaucaguaaaguuccuugga

SEQ ID NO: 4306 - DNA, 21 bp, homo sapiens
aaggaacctctggtgtcagat

SEQ ID NO: 4307 - RNA, 21 nt, RNAi
ggaaccucuggugucagauuu

SEQ ID NO: 4308 - RNA, 21 nt, RNAi
uuccuuggagaccacagucua

SEQ ID NO: 4309 - DNA, 21 bp, homo sapiens
aacctctggtgtcagatgaaa

SEQ ID NO: 4310 - RNA, 21 nt, RNAi
ccucuggugucagaugaaauu

SEQ ID NO: 4311 - RNA, 21 nt, RNAi
uuggagaccacagucuacuuu

SEQ ID NO: 4312 - DNA, 21 bp, homo sapiens
aaacggaatcaagtcttctag

SEQ ID NO: 4313 - RNA, 21 nt, RNAi
acggaaucaagucuucuaguu

SEQ ID NO: 4314 - RNA, 21 nt, RNAi
uuugccuuaguucagaagauc

SEQ ID NO: 4315 - DNA, 21 bp, homo sapiens
aacggaatcaagtcttctagc

SEQ ID NO: 4316 - RNA, 21 nt, RNAi
cggaaucaagucuucuagcuu

SEQ ID NO: 4317 - RNA, 21 nt, RNAi
uugccuuaguucagaagaucg

SEQ ID NO: 4318 - DNA, 21 bp, homo sapiens
aactaaagagtatcaagaacc

SEQ ID NO: 4319 - RNA, 21 nt, RNAi
cuaaagaguaucaagaaccuu

SEQ ID NO: 4320 - RNA, 21 nt, RNAi
uugauuucucauaguucuugg

SEQ ID NO: 4321 - DNA, 21 bp, homo sapiens
aaagagtatcaagaaccagag

SEQ ID NO: 4322 - RNA, 21 nt, RNAi
agaguaucaagaaccagaguu

SEQ ID NO: 4323 - RNA, 21 nt, RNAi
uuucucauaguucuuggucuc

SEQ ID NO: 4324 - DNA, 21 bp, homo sapiens
aagagtatcaagaaccagagg

SEQ ID NO: 4325 - RNA, 21 nt, RNAi
gaguaucaagaaccagagguu

SEQ ID NO: 4326 - RNA, 21 nt, RNAi
uucucauaguucuuggucucc

SEQ ID NO: 4327 - DNA, 21 bp, homo sapiens
aagaaccagaggttccagaga

SEQ ID NO: 4328 - RNA, 21 nt, RNAi
gaaccagagguuccagagauu

SEQ ID NO: 4329 - RNA, 21 nt, RNAi
uucuuggucuccaaggucucu

SEQ ID NO: 4330 - DNA, 21 bp, homo sapiens
aaccagaggttccagagagta

SEQ ID NO: 4331 - RNA, 21 nt, RNAi
ccagagguuccagagaguauu

SEQ ID NO: 4332 - RNA, 21 nt, RNAi
uuggucuccaaggucucucau

SEQ ID NO: 4333 - DNA, 21 bp, homo sapiens
aaccagaaacagtggcaagct

SEQ ID NO: 4334 - RNA, 21 nt, RNAi
ccagaaacaguggcaagcuuu

SEQ ID NO: 4335 - RNA, 21 nt, RNAi
uuggucuuugucaccguucga

SEQ ID NO: 4336 - DNA, 21 bp, homo sapiens
aaacagtggcaagctaagaga

SEQ ID NO: 4337 - RNA, 21 nt, RNAi
acaguggcaagcuaagagauu

SEQ ID NO: 4338 - RNA, 21 nt, RNAi
uuugucaccguucgauucucu

SEQ ID NO: 4339 - DNA, 21 bp, homo sapiens
aacagtggcaagctaagagaa

SEQ ID NO: 4340 - RNA, 21 nt, RNAi
caguggcaagcuaagagaauu

SEQ ID NO: 4341 - RNA, 21 nt, RNAi
uugucaccguucgauucucuu

SEQ ID NO: 4342 - DNA, 21 bp, homo sapiens
aagctaagagaaagtcagagt

SEQ ID NO: 4343 - RNA, 21 nt, RNAi
gcuaagagaaagucagaguuu

SEQ ID NO: 4344 - RNA, 21 nt, RNAi
uucgauucucuuucagucuca

SEQ ID NO: 4345 - DNA, 21 bp, homo sapiens
aagagaaagtcagagtgtatt

SEQ ID NO: 4346 - RNA, 21 nt, RNAi
gagaaagucagaguguauuuu

SEQ ID NO: 4347 - RNA, 21 nt, RNAi
uucucuuucagucucacauaa

SEQ ID NO: 4348 - DNA, 21 bp, homo sapiens
aaagtcagagtgtattaacca

SEQ ID NO: 4349 - RNA, 21 nt, RNAi
agucagaguguauuaaccauu

SEQ ID NO: 4350 - RNA, 21 nt, RNAi
uuucagucucacauaauuggu

SEQ ID NO: 4351 - DNA, 21 bp, homo sapiens
aagtcagagtgtattaaccag

SEQ ID NO: 4352 - RNA, 21 nt, RNAi
gucagaguguauuaaccaguu

SEQ ID NO: 4353 - RNA, 21 nt, RNAi
uucagucucacauaauugguc

SEQ ID NO: 4354 - DNA, 21 bp, homo sapiens
aaccagaatcctgctgcatct

SEQ ID NO: 4355 - RNA, 21 nt, RNAi
ccagaauccugcugcaucuuu

SEQ ID NO: 4356 - RNA, 21 nt, RNAi
uuggucuuaggacgacguaga

SEQ ID NO: 4357 - DNA, 21 bp, homo sapiens
aatcctgctgcatcttcaaat

SEQ ID NO: 4358 - RNA, 21 nt, RNAi
uccugcugcaucuucaaauuu

SEQ ID NO: 4359 - RNA, 21 nt, RNAi
uuaggacgacguagaaguuua

SEQ ID NO: 4360 - DNA, 21 bp, homo sapiens
aaatcactggcagattccgga

SEQ ID NO: 4361 - RNA, 21 nt, RNAi
aucacuggcagauuccggauu

SEQ ID NO: 4362 - RNA, 21 nt, RNAi
uuuagugaccgucuaaggccu

SEQ ID NO: 4363 - DNA, 21 bp, homo sapiens
aatcactggcagattccggag

SEQ ID NO: 4364 - RNA, 21 nt, RNAi
ucacuggcagauuccggaguu

SEQ ID NO: 4365 - RNA, 21 nt, RNAi
uuagugaccgucuaaggccuc

SEQ ID NO: 4366 - DNA, 21 bp, homo sapiens
aagttaatacagagcagaaac

SEQ ID NO: 4367 - RNA, 21 nt, RNAi
guuaauacagagcagaaacuu

SEQ ID NO: 4368 - RNA, 21 nt, RNAi
uucaauuaugucucgucuuug

SEQ ID NO: 4369 - DNA, 21 bp, homo sapiens
aatacagagcagaaacatacc

SEQ ID NO: 4370 - RNA, 21 nt, RNAi
uacagagcagaaacauaccuu

SEQ ID NO: 4371 - RNA, 21 nt, RNAi
uuaugucucgucuuuguaugg

SEQ ID NO: 4372 - DNA, 21 bp, homo sapiens
aaacagtcaccaccaatatca

SEQ ID NO: 4373 - RNA, 21 nt, RNAi
acagucaccaccaauaucauu

SEQ ID NO: 4374 - RNA, 21 nt, RNAi
uuugucaguggugguuauagu

SEQ ID NO: 4375 - DNA, 21 bp, homo sapiens
aacagtcaccaccaatatcaa

SEQ ID NO: 4376 - RNA, 21 nt, RNAi
cagucaccaccaauaucaauu

SEQ ID NO: 4377 - RNA, 21 nt, RNAi
uugucaguggugguuauaguu

SEQ ID NO: 4378 - DNA, 21 bp, homo sapiens
aagacaccaagcagcaatacc

SEQ ID NO: 4379 - RNA, 21 nt, RNAi
gacaccaagcagcaauaccuu

SEQ ID NO: 4380 - RNA, 21 nt, RNAi
uucugugguucgucguuaugg

SEQ ID NO: 4381 - DNA, 21 bp, homo sapiens
aagcagcaataccttggatga

SEQ ID NO: 4382 - RNA, 21 nt, RNAi
gcagcaauaccuuggaugauu

SEQ ID NO: 4383 - RNA, 21 nt, RNAi
uucgucguuauggaaccuacu

SEQ ID NO: 4384 - DNA, 21 bp, homo sapiens
aataccttggatgattacatg

SEQ ID NO: 4385 - RNA, 21 nt, RNAi
uaccuuggaugauuacauguu

SEQ ID NO: 4386 - RNA, 21 nt, RNAi
uuauggaaccuacuaauguac

SEQ ID NO: 4387 - DNA, 21 bp, homo sapiens
aactccagttgtaaagaatga

SEQ ID NO: 4388 - RNA, 21 nt, RNAi
cuccaguuguaaagaaugauu

SEQ ID NO: 4389 - RNA, 21 nt, RNAi
uugaggucaacauuucuuacu

SEQ ID NO: 4390 - DNA, 21 bp, homo sapiens
aaagaatgactttccacctgc

SEQ ID NO: 4391 - RNA, 21 nt, RNAi
agaaugacuuuccaccugcuu

SEQ ID NO: 4392 - RNA, 21 nt, RNAi
uuucuuacugaaagguggacg

SEQ ID NO: 4393 - DNA, 21 bp, homo sapiens
aagaatgactttccacctgct

SEQ ID NO: 4394 - RNA, 21 nt, RNAi
gaaugacuuuccaccugcuuu

SEQ ID NO: 4395 - RNA, 21 nt, RNAi
uucuuacugaaagguggacga

SEQ ID NO: 4396 - DNA, 21 bp, homo sapiens
aatgactttccacctgcttgt

SEQ ID NO: 4397 - RNA, 21 nt, RNAi
ugacuuuccaccugcuuguuu

SEQ ID NO: 4398 - RNA, 21 nt, RNAi
uuacugaaagguggacgaaca

SEQ ID NO: 4399 - DNA, 21 bp, homo sapiens
aacaccttatggccaacctgc

SEQ ID NO: 4400 - RNA, 21 nt, RNAi
caccuuauggccaaccugcuu

SEQ ID NO: 4401 - RNA, 21 nt, RNAi
uuguggaauaccgguuggacg

SEQ ID NO: 4402 - DNA, 21 bp, homo sapiens
aacctgcctgtttccagcagc

SEQ ID NO: 4403 - RNA, 21 nt, RNAi
ccugccuguuuccagcagcuu

SEQ ID NO: 4404 - RNA, 21 nt, RNAi
uuggacggacaaaggucgucg

SEQ ID NO: 4405 - DNA, 21 bp, homo sapiens
aacagcatcaaatacttgcca

SEQ ID NO: 4406 - RNA, 21 nt, RNAi
cagcaucaaauacuugccauu

SEQ ID NO: 4407 - RNA, 21 nt, RNAi
uugucguaguuuaugaacggu

SEQ ID NO: 4408 - DNA, 21 bp, homo sapiens
aaatacttgccactccacttc

SEQ ID NO: 4409 - RNA, 21 nt, RNAi
auacuugccacuccacuucuu

SEQ ID NO: 4410 - RNA, 21 nt, RNAi
uuuaugaacggugaggugaag

SEQ ID NO: 4411 - DNA, 21 bp, homo sapiens
aatacttgccactccacttca

SEQ ID NO: 4412 - RNA, 21 nt, RNAi
uacuugccacuccacuucauu

SEQ ID NO: 4413 - RNA, 21 nt, RNAi
uuaugaacggugaggugaagu

SEQ ID NO: 4414 - DNA, 21 bp, homo sapiens
aatgcatttcggttaaaggaa

SEQ ID NO: 4415 - RNA, 21 nt, RNAi
ugcauuucgguuaaaggaauu

SEQ ID NO: 4416 - RNA, 21 nt, RNAi
uuacguaaagccaauuuccuu

SEQ ID NO: 4417 - DNA, 21 bp, homo sapiens
aaagcagataggaagtggagg

SEQ ID NO: 4418 - RNA, 21 nt, RNAi
agcagauaggaaguggagguu

SEQ ID NO: 4419 - RNA, 21 nt, RNAi
uuucgucuauccuucaccucc

SEQ ID NO: 4420 - DNA, 21 bp, homo sapiens
aagcagataggaagtggaggt

SEQ ID NO: 4421 - RNA, 21 nt, RNAi
gcagauaggaaguggagguuu

SEQ ID NO: 4422 - RNA, 21 nt, RNAi
uucgucuauccuucaccucca

SEQ ID NO: 4423 - DNA, 21 bp, homo sapiens
aagtggaggttcaagcaaggt

SEQ ID NO: 4424 - RNA, 21 nt, RNAi
guggagguucaagcaagguuu

SEQ ID NO: 4425 - RNA, 21 nt, RNAi
uucaccuccaaguucguucca

SEQ ID NO: 4426 - DNA, 21 bp, homo sapiens
aagcaaggtatttcaggtgtt

SEQ ID NO: 4427 - RNA, 21 nt, RNAi
gcaagguauuucagguguuuu

SEQ ID NO: 4428 - RNA, 21 nt, RNAi
uucguuccauaaaguccacaa

SEQ ID NO: 4429 - DNA, 21 bp, homo sapiens
aacttagaagaagcagataac

SEQ ID NO: 4430 - RNA, 21 nt, RNAi
cuuagaagaagcagauaacuu

SEQ ID NO: 4431 - RNA, 21 nt, RNAi
uugaaucuucuucgucuauug

SEQ ID NO: 4432 - DNA, 21 bp, homo sapiens
aagaagcagataaccaaactc

SEQ ID NO: 4433 - RNA, 21 nt, RNAi
gaagcagauaaccaaacucuu

SEQ ID NO: 4434 - RNA, 21 nt, RNAi
uucuucgucuauugguuugag

SEQ ID NO: 4435 - DNA, 21 bp, homo sapiens
aagcagataaccaaactcttg

SEQ ID NO: 4436 - RNA, 21 nt, RNAi
gcagauaaccaaacucuuguu

SEQ ID NO: 4437 - RNA, 21 nt, RNAi
uucgucuauugguuugagaac

SEQ ID NO: 4438 - DNA, 21 bp, homo sapiens
aaccaaactcttgatagttac

SEQ ID NO: 4439 - RNA, 21 nt, RNAi
ccaaacucuugauaguuacuu

SEQ ID NO: 4440 - RNA, 21 nt, RNAi
uugguuugagaacuaucaaug

SEQ ID NO: 4441 - DNA, 21 bp, homo sapiens
aaactcttgatagttaccgga

SEQ ID NO: 4442 - RNA, 21 nt, RNAi
acucuugauaguuaccggauu

SEQ ID NO: 4443 - RNA, 21 nt, RNAi
uuugagaacuaucaauggccu

SEQ ID NO: 4444 - DNA, 21 bp, homo sapiens
aactcttgatagttaccggaa

SEQ ID NO: 4445 - RNA, 21 nt, RNAi
cucuugauaguuaccggaauu

SEQ ID NO: 4446 - RNA, 21 nt, RNAi
uugagaacuaucaauggccuu

SEQ ID NO: 4447 - DNA, 21 bp, homo sapiens
aaactacaacaacacagtgat

SEQ ID NO: 4448 - RNA, 21 nt, RNAi
acuacaacaacacagugauuu

SEQ ID NO: 4449 - RNA, 21 nt, RNAi
uuugauguuguugugucacua

SEQ ID NO: 4450 - DNA, 21 bp, homo sapiens
aactacaacaacacagtgata

SEQ ID NO: 4451 - RNA, 21 nt, RNAi
cuacaacaacacagugauauu

SEQ ID NO: 4452 - RNA, 21 nt, RNAi
uugauguuguugugucacuau

SEQ ID NO: 4453 - DNA, 21 bp, homo sapiens
aacaacacagtgataagatca

SEQ ID NO: 4454 - RNA, 21 nt, RNAi
caacacagugauaagaucauu

SEQ ID NO: 4455 - RNA, 21 nt, RNAi
uuguugugucacuauucuagu

SEQ ID NO: 4456 - DNA, 21 bp, homo sapiens
aacacagtgataagatcatcc

SEQ ID NO: 4457 - RNA, 21 nt, RNAi
cacagugauaagaucauccuu

SEQ ID NO: 4458 - RNA, 21 nt, RNAi
uugugucacuauucuaguagg

SEQ ID NO: 4459 - DNA, 21 bp, homo sapiens
aagatcatccgactttatgat

SEQ ID NO: 4460 - RNA, 21 nt, RNAi
gaucauccgacuuuaugauuu

SEQ ID NO: 4461 - RNA, 21 nt, RNAi
uucuaguaggcugaaauacua

SEQ ID NO: 4462 - DNA, 21 bp, homo sapiens
aaatcacggaccagtacatct

SEQ ID NO: 4463 - RNA, 21 nt, RNAi
aucacggaccaguacaucuuu

SEQ ID NO: 4464 - RNA, 21 nt, RNAi
uuuagugccuggucauguaga

SEQ ID NO: 4465 - DNA, 21 bp, homo sapiens
aatcacggaccagtacatcta

SEQ ID NO: 4466 - RNA, 21 nt, RNAi
ucacggaccaguacaucuauu

SEQ ID NO: 4467 - RNA, 21 nt, RNAi
uuagugccuggucauguagau

SEQ ID NO: 4468 - DNA, 21 bp, homo sapiens
aatggagtgtggaaatattga

SEQ ID NO: 4469 - RNA, 21 nt, RNAi
uggaguguggaaauauugauu

SEQ ID NO: 4470 - RNA, 21 nt, RNAi
uuaccucacaccuuuauaacu

SEQ ID NO: 4471 - DNA, 21 bp, homo sapiens
aaatatgttagaggcagttca

SEQ ID NO: 4472 - RNA, 21 nt, RNAi
auauguuagaggcaguucauu

SEQ ID NO: 4473 - RNA, 21 nt, RNAi
uuuauacaaucuccgucaagu

SEQ ID NO: 4474 - DNA, 21 bp, homo sapiens
aatatgttagaggcagttcac

SEQ ID NO: 4475 - RNA, 21 nt, RNAi
uauguuagaggcaguucacuu

SEQ ID NO: 4476 - RNA, 21 nt, RNAi
uuauacaaucuccgucaagug

SEQ ID NO: 4477 - DNA, 21 bp, homo sapiens
aatccatcaacatggcattgt

SEQ ID NO: 4478 - RNA, 21 nt, RNAi
uccaucaacauggcauuguuu

SEQ ID NO: 4479 - RNA, 21 nt, RNAi
uuagguaguuguaccguaaca

SEQ ID NO: 4480 - DNA, 21 bp, homo sapiens
aacatggcattgttcacagtg

SEQ ID NO: 4481 - RNA, 21 nt, RNAi
cauggcauuguucacaguguu

SEQ ID NO: 4482 - RNA, 21 nt, RNAi
uuguaccguaacaagugucac

SEQ ID NO: 4483 - DNA, 21 bp, homo sapiens
aaaccagctaactttctgata

SEQ ID NO: 4484 - RNA, 21 nt, RNAi
accagcuaacuuucugauauu

SEQ ID NO: 4485 - RNA, 21 nt, RNAi
uuuggucgauugaaagacuau

SEQ ID NO: 4486 - DNA, 21 bp, homo sapiens
aaccagctaactttctgatag

SEQ ID NO: 4487 - RNA, 21 nt, RNAi
ccagcuaacuuucugauaguu

SEQ ID NO: 4488 - RNA, 21 nt, RNAi
uuggucgauugaaagacuauc

SEQ ID NO: 4489 - DNA, 21 bp, homo sapiens
aactttctgatagttgatgga

SEQ ID NO: 4490 - RNA, 21 nt, RNAi
cuuucugauaguugauggauu

SEQ ID NO: 4491 - RNA, 21 nt, RNAi
uugaaagacuaucaacuaccu

SEQ ID NO: 4492 - DNA, 21 bp, homo sapiens
aaaccaaatgcaaccagatac

SEQ ID NO: 4493 - RNA, 21 nt, RNAi
accaaaugcaaccagauacuu

SEQ ID NO: 4494 - RNA, 21 nt, RNAi
uuugguuuacguuggucuaug

SEQ ID NO: 4495 - DNA, 21 bp, homo sapiens
aaccaaatgcaaccagataca

SEQ ID NO: 4496 - RNA, 21 nt, RNAi
ccaaaugcaaccagauacauu

SEQ ID NO: 4497 - RNA, 21 nt, RNAi
uugguuuacguuggucuaugu

SEQ ID NO: 4498 - DNA, 21 bp, homo sapiens
aaatgcaaccagatacaacaa

SEQ ID NO: 4499 - RNA, 21 nt, RNAi
augcaaccagauacaacaauu

SEQ ID NO: 4500 - RNA, 21 nt, RNAi
uuuacguuggucuauguuguu

SEQ ID NO: 4501 - DNA, 21 bp, homo sapiens
aatgcaaccagatacaacaag

SEQ ID NO: 4502 - RNA, 21 nt, RNAi
ugcaaccagauacaacaaguu

SEQ ID NO: 4503 - RNA, 21 nt, RNAi
uuacguuggucuauguuguuc

SEQ ID NO: 4504 - DNA, 21 bp, homo sapiens
aaccagatacaacaagtgttg

SEQ ID NO: 4505 - RNA, 21 nt, RNAi
ccagauacaacaaguguuguu

SEQ ID NO: 4506 - RNA, 21 nt, RNAi
uuggucuauguuguucacaac

SEQ ID NO: 4507 - DNA, 21 bp, homo sapiens
aaagattctcaggttggcaca

SEQ ID NO: 4508 - RNA, 21 nt, RNAi
agauucucagguuggcacauu

SEQ ID NO: 4509 - RNA, 21 nt, RNAi
uuucuaagaguccaaccgugu

SEQ ID NO: 4510 - DNA, 21 bp, homo sapiens
aagattctcaggttggcacag

SEQ ID NO: 4511 - RNA, 21 nt, RNAi
gauucucagguuggcacaguu

SEQ ID NO: 4512 - RNA, 21 nt, RNAi
uucuaagaguccaaccguguc

SEQ ID NO: 4513 - DNA, 21 bp, homo sapiens
aattatatgccaccagaagca

SEQ ID NO: 4514 - RNA, 21 nt, RNAi
uuauaugccaccagaagcauu

SEQ ID NO: 4515 - RNA, 21 nt, RNAi
uuaauauacgguggucuucgu

SEQ ID NO: 4516 - DNA, 21 bp, homo sapiens
aatcaaagatatgtcttcctc

SEQ ID NO: 4517 - RNA, 21 nt, RNAi
ucaaagauaugucuuccucuu

SEQ ID NO: 4518 - RNA, 21 nt, RNAi
uuaguuucuauacagaaggag

SEQ ID NO: 4519 - DNA, 21 bp, homo sapiens
aaagatatgtcttcctccaga

SEQ ID NO: 4520 - RNA, 21 nt, RNAi
agauaugucuuccuccagauu

SEQ ID NO: 4521 - RNA, 21 nt, RNAi
uuucuauacagaaggaggucu

SEQ ID NO: 4522 - DNA, 21 bp, homo sapiens
aagatatgtcttcctccagag

SEQ ID NO: 4523 - RNA, 21 nt, RNAi
gauaugucuuccuccagaguu

SEQ ID NO: 4524 - RNA, 21 nt, RNAi
uucuauacagaaggaggucuc

SEQ ID NO: 4525 - DNA, 21 bp, homo sapiens
aatctaagtcaaagataagcc

SEQ ID NO: 4526 - RNA, 21 nt, RNAi
ucuaagucaaagauaagccuu

SEQ ID NO: 4527 - RNA, 21 nt, RNAi
uuagauucaguuucuauucgg

SEQ ID NO: 4528 - DNA, 21 bp, homo sapiens
aaagtgatgtttggtccttag

SEQ ID NO: 4529 - RNA, 21 nt, RNAi
agugauguuugguccuuaguu

SEQ ID NO: 4530 - RNA, 21 nt, RNAi
uuucacuacaaaccaggaauc

SEQ ID NO: 4531 - DNA, 21 bp, homo sapiens
aagtgatgtttggtccttagg

SEQ ID NO: 4532 - RNA, 21 nt, RNAi
gugauguuugguccuuagguu

SEQ ID NO: 4533 - RNA, 21 nt, RNAi
uucacuacaaaccaggaaucc

SEQ ID NO: 4534 - DNA, 21 bp, homo sapiens
aaacaccatttcagcagataa

SEQ ID NO: 4535 - RNA, 21 nt, RNAi
acaccauuucagcagauaauu

SEQ ID NO: 4536 - RNA, 21 nt, RNAi
uuugugguaaagucgucuauu

SEQ ID NO: 4537 - DNA, 21 bp, homo sapiens
aacaccatttcagcagataat

SEQ ID NO: 4538 - RNA, 21 nt, RNAi
caccauuucagcagauaauuu

SEQ ID NO: 4539 - RNA, 21 nt, RNAi
uugugguaaagucgucuauua

SEQ ID NO: 4540 - DNA, 21 bp, homo sapiens
aaacagaggatatccattcct

SEQ ID NO: 4541 - RNA, 21 nt, RNAi
acagaggauauccauuccuuu

SEQ ID NO: 4542 - RNA, 21 nt, RNAi
uuugucuccuauagguaagga

SEQ ID NO: 4543 - DNA, 21 bp, homo sapiens
aacagaggatatccattcctg

SEQ ID NO: 4544 - RNA, 21 nt, RNAi
cagaggauauccauuccuguu

SEQ ID NO: 4545 - RNA, 21 nt, RNAi
uugucuccuauagguaaggac

SEQ ID NO: 4546 - DNA, 21 bp, homo sapiens
aaactcatccagttaaccaaa

SEQ ID NO: 4547 - RNA, 21 nt, RNAi
acucauccaguuaaccaaauu

SEQ ID NO: 4548 - RNA, 21 nt, RNAi
uuugaguaggucaauugguuu

SEQ ID NO: 4549 - DNA, 21 bp, homo sapiens
aactcatccagttaaccaaat

SEQ ID NO: 4550 - RNA, 21 nt, RNAi
cucauccaguuaaccaaauuu

SEQ ID NO: 4551 - RNA, 21 nt, RNAi
uugaguaggucaauugguuua

SEQ ID NO: 4552 - DNA, 21 bp, homo sapiens
aacttgttggtctgaattctc

SEQ ID NO: 4553 - RNA, 21 nt, RNAi
cuuguuggucugaauucucuu

SEQ ID NO: 4554 - RNA, 21 nt, RNAi
uugaacaaccagacuuaagag

SEQ ID NO: 4555 - DNA, 21 bp, homo sapiens
aacactatagtggtggtgaaa

SEQ ID NO: 4556 - RNA, 21 nt, RNAi
cacuauagugguggugaaauu

SEQ ID NO: 4557 - RNA, 21 nt, RNAi
uugugauaucaccaccacuuu

SEQ ID NO: 4558 - DNA, 21 bp, homo sapiens
aagtcataattcttcatcctc

SEQ ID NO: 4559 - RNA, 21 nt, RNAi
gucauaauucuucauccucuu

SEQ ID NO: 4560 - RNA, 21 nt, RNAi
uucaguauuaagaaguaggag

SEQ ID NO: 4561 - DNA, 21 bp, homo sapiens
aattcttcatcctccaagact

SEQ ID NO: 4562 - RNA, 21 nt, RNAi
uucuucauccuccaagacuuu

SEQ ID NO: 4563 - RNA, 21 nt, RNAi
uuaagaaguaggagguucuga

SEQ ID NO: 4564 - DNA, 21 bp, homo sapiens
aatgtcagataggaggtataa

SEQ ID NO: 4565 - RNA, 21 nt, RNAi
ugucagauaggagguauaauu

SEQ ID NO: 4566 - RNA, 21 nt, RNAi
uuacagucuauccuccauauu

SEQ ID NO: 4567 - DNA, 21 bp, homo sapiens
aagacaacatcactctgaagt

SEQ ID NO: 4568 - RNA, 21 nt, RNAi
gacaacaucacucugaaguuu

SEQ ID NO: 4569 - RNA, 21 nt, RNAi
uucuguuguagugagacuuca

SEQ ID NO: 4570 - DNA, 21 bp, homo sapiens
aacatcactctgaagtgttat

SEQ ID NO: 4571 - RNA, 21 nt, RNAi
caucacucugaaguguuauuu

SEQ ID NO: 4572 - RNA, 21 nt, RNAi
uuguagugagacuucacaaua

SEQ ID NO: 4573 - DNA, 21 bp, homo sapiens
aaatagcaaccacttatggca

SEQ ID NO: 4574 - RNA, 21 nt, RNAi
auagcaaccacuuauggcauu

SEQ ID NO: 4575 - RNA, 21 nt, RNAi
uuuaucguuggugaauaccgu

SEQ ID NO: 4576 - DNA, 21 bp, homo sapiens
aatagcaaccacttatggcac

SEQ ID NO: 4577 - RNA, 21 nt, RNAi
uagcaaccacuuauggcacuu

SEQ ID NO: 4578 - RNA, 21 nt, RNAi
uuaucguuggugaauaccgug

SEQ ID NO: 4579 - DNA, 21 bp, homo sapiens
aaccacttatggcactgtata

SEQ ID NO: 4580 - RNA, 21 nt, RNAi
ccacuuauggcacuguauauu

SEQ ID NO: 4581 - RNA, 21 nt, RNAi
uuggugaauaccgugacauau

SEQ ID NO: 4582 - DNA, 21 bp, homo sapiens
cactcttgttggccaggctgg

SEQ ID NO: 4583 - RNA, 21 nt, RNAi
cucuuguuggccaggcugguu

SEQ ID NO: 4584 - RNA, 21 nt, RNAi
uugagaacaaccgguccgacc

SEQ ID NO: 4585 - DNA, 21 bp, homo sapiens
caggctggagtgcaatggcac

SEQ ID NO: 4586 - RNA, 21 nt, RNAi
ggcuggagugcaauggcacuu

SEQ ID NO: 4587 - RNA, 21 nt, RNAi
uuccgaccucacguuaccgug

SEQ ID NO: 4588 - DNA, 21 bp, homo sapiens
caatggcacaatctcagctta

SEQ ID NO: 4589 - RNA, 21 nt, RNAi
auggcacaaucucagcuuauu

SEQ ID NO: 4590 - RNA, 21 nt, RNAi
uuuaccguguuagagucgaau

SEQ ID NO: 4591 - DNA, 21 bp, homo sapiens
cacaatctcagcttactgcaa

SEQ ID NO: 4592 - RNA, 21 nt, RNAi
caaucucagcuuacugcaauu

SEQ ID NO: 4593 - RNA, 21 nt, RNAi
uuguuagagucgaaugacguu

SEQ ID NO: 4594 - DNA, 21 bp, homo sapiens
caatctcagcttactgcaacc

SEQ ID NO: 4595 - RNA, 21 nt, RNAi
aucucagcuuacugcaaccuu

SEQ ID NO: 4596 - RNA, 21 nt, RNAi
uuuagagucgaaugacguugg

SEQ ID NO: 4597 - DNA, 21 bp, homo sapiens
cagcttactgcaacctccgcc

SEQ ID NO: 4598 - RNA, 21 nt, RNAi
gcuuacugcaaccuccgccuu

SEQ ID NO: 4599 - RNA, 21 nt, RNAi
uucgaaugacguuggaggcgg

SEQ ID NO: 4600 - DNA, 21 bp, homo sapiens
caagcgattctcctgcctcag

SEQ ID NO: 4601 - RNA, 21 nt, RNAi
agcgauucuccugccucaguu

SEQ ID NO: 4602 - RNA, 21 nt, RNAi
uuucgcuaagaggacggaguc

SEQ ID NO: 4603 - DNA, 21 bp, homo sapiens
caccatgttggtcaggctggt

SEQ ID NO: 4604 - RNA, 21 nt, RNAi
ccauguuggucaggcugguuu

SEQ ID NO: 4605 - RNA, 21 nt, RNAi
uugguacaaccaguccgacca

SEQ ID NO: 4606 - DNA, 21 bp, homo sapiens
catgttggtcaggctggtctt

SEQ ID NO: 4607 - RNA, 21 nt, RNAi
uguuggucaggcuggucuuuu

SEQ ID NO: 4608 - RNA, 21 nt, RNAi
uuacaaccaguccgaccagaa

SEQ ID NO: 4609 - DNA, 21 bp, homo sapiens
caggctggtcttgaactcctg

SEQ ID NO: 4610 - RNA, 21 nt, RNAi
ggcuggucuugaacuccuguu

SEQ ID NO: 4611 - RNA, 21 nt, RNAi
uuccgaccagaacuugaggac

SEQ ID NO: 4612 - DNA, 21 bp, homo sapiens
caggtgatccacttgccttgg

SEQ ID NO: 4613 - RNA, 21 nt, RNAi
ggugauccacuugccuugguu

SEQ ID NO: 4614 - RNA, 21 nt, RNAi
uuccacuaggugaacggaacc

SEQ ID NO: 4615 - DNA, 21 bp, homo sapiens
caaagtgctaggattacagcc

SEQ ID NO: 4616 - RNA, 21 nt, RNAi
aagugcuaggauuacagccuu

SEQ ID NO: 4617 - RNA, 21 nt, RNAi
uuuucacgauccuaaugucgg

SEQ ID NO: 4618 - DNA, 21 bp, homo sapiens
cagccgtgaaactgtgcctgg

SEQ ID NO: 4619 - RNA, 21 nt, RNAi
gccgugaaacugugccugguu

SEQ ID NO: 4620 - RNA, 21 nt, RNAi
uucggcacuuugacacggacc

SEQ ID NO: 4621 - DNA, 21 bp, homo sapiens
cagtggtgcgatcttggctca

SEQ ID NO: 4622 - RNA, 21 nt, RNAi
guggugcgaucuuggcucauu

SEQ ID NO: 4623 - RNA, 21 nt, RNAi
uucaccacgcuagaaccgagu

SEQ ID NO: 4624 - DNA, 21 bp, homo sapiens
cactataacctccacctcctg

SEQ ID NO: 4625 - RNA, 21 nt, RNAi
cuauaaccuccaccuccuguu

SEQ ID NO: 4626 - RNA, 21 nt, RNAi
uugauauuggagguggaggac

SEQ ID NO: 4627 - DNA, 21 bp, homo sapiens
cacctcctggtttcaagtgat

SEQ ID NO: 4628 - RNA, 21 nt, RNAi
ccuccugguuucaagugauuu

SEQ ID NO: 4629 - RNA, 21 nt, RNAi
uuggaggaccaaaguucacua

SEQ ID NO: 4630 - DNA, 21 bp, homo sapiens
cactttagcctcctgagtagc

SEQ ID NO: 4631 - RNA, 21 nt, RNAi
cuuuagccuccugaguagcuu

SEQ ID NO: 4632 - RNA, 21 nt, RNAi
uugaaaucggaggacucaucg

SEQ ID NO: 4633 - DNA, 21 bp, homo sapiens
caccatgttggccaggctgtt

SEQ ID NO: 4634 - RNA, 21 nt, RNAi
ccauguuggccaggcuguuuu

SEQ ID NO: 4635 - RNA, 21 nt, RNAi
uugguacaaccgguccgacaa

SEQ ID NO: 4636 - DNA, 21 bp, homo sapiens
catgttggccaggctgttctc

SEQ ID NO: 4637 - RNA, 21 nt, RNAi
uguuggccaggcuguucucuu

SEQ ID NO: 4638 - RNA, 21 nt, RNAi
uuacaaccgguccgacaagag

SEQ ID NO: 4639 - DNA, 21 bp, homo sapiens
caggctgttctcaaactcctg

SEQ ID NO: 4640 - RNA, 21 nt, RNAi
ggcuguucucaaacuccuguu

SEQ ID NO: 4641 - RNA, 21 nt, RNAi
uuccgacaagaguuugaggac

SEQ ID NO: 4642 - DNA, 21 bp, homo sapiens
caggtgtgagtcaccatgcct

SEQ ID NO: 4643 - RNA, 21 nt, RNAi
ggugugagucaccaugccuuu

SEQ ID NO: 4644 - RNA, 21 nt, RNAi
uuccacacucagugguacgga

SEQ ID NO: 4645 - DNA, 21 bp, homo sapiens
caccatgcctgaccttataat

SEQ ID NO: 4646 - RNA, 21 nt, RNAi
ccaugccugaccuuauaauuu

SEQ ID NO: 4647 - RNA, 21 nt, RNAi
uugguacggacuggaauauua

SEQ ID NO: 4648 - DNA, 21 bp, homo sapiens
catgcctgaccttataattct

SEQ ID NO: 4649 - RNA, 21 nt, RNAi
ugccugaccuuauaauucuuu

SEQ ID NO: 4650 - RNA, 21 nt, RNAi
uuacggacuggaauauuaaga

SEQ ID NO: 4651 - DNA, 21 bp, homo sapiens
cacaacaaatctgcattaggc

SEQ ID NO: 4652 - RNA, 21 nt, RNAi
caacaaaucugcauuaggcuu

SEQ ID NO: 4653 - RNA, 21 nt, RNAi
uuguuguuuagacguaauccg

SEQ ID NO: 4654 - DNA, 21 bp, homo sapiens
caacaaatctgcattaggcgg

SEQ ID NO: 4655 - RNA, 21 nt, RNAi
acaaaucugcauuaggcgguu

SEQ ID NO: 4656 - RNA, 21 nt, RNAi
uuuguuuagacguaauccgcc

SEQ ID NO: 4657 - DNA, 21 bp, homo sapiens
caaatctgcattaggcggtac

SEQ ID NO: 4658 - RNA, 21 nt, RNAi
aaucugcauuaggcgguacuu

SEQ ID NO: 4659 - RNA, 21 nt, RNAi
uuuuagacguaauccgccaug

SEQ ID NO: 4660 - DNA, 21 bp, homo sapiens
cattaggcggtacaataatcc

SEQ ID NO: 4661 - RNA, 21 nt, RNAi
uuaggcgguacaauaauccuu

SEQ ID NO: 4662 - RNA, 21 nt, RNAi
uuaauccgccauguuauuagg

SEQ ID NO: 4663 - DNA, 21 bp, homo sapiens
cactgcacactcctggatgat

SEQ ID NO: 4664 - RNA, 21 nt, RNAi
cugcacacuccuggaugauuu

SEQ ID NO: 4665 - RNA, 21 nt, RNAi
uugacgugugaggaccuacua

SEQ ID NO: 4666 - DNA, 21 bp, homo sapiens
cacactcctggatgatgatcc

SEQ ID NO: 4667 - RNA, 21 nt, RNAi
cacuccuggaugaugauccuu

SEQ ID NO: 4668 - RNA, 21 nt, RNAi
uugugaggaccuacuacuagg

SEQ ID NO: 4669 - DNA, 21 bp, homo sapiens
cactcctggatgatgatccta

SEQ ID NO: 4670 - RNA, 21 nt, RNAi
cuccuggaugaugauccuauu

SEQ ID NO: 4671 - RNA, 21 nt, RNAi
uugaggaccuacuacuaggau

SEQ ID NO: 4672 - DNA, 21 bp, homo sapiens
cattgttgatgtgaatgtaag

SEQ ID NO: 4673 - RNA, 21 nt, RNAi
uuguugaugugaauguaaguu

SEQ ID NO: 4674 - RNA, 21 nt, RNAi
uuaacaacuacacuuacauuc

SEQ ID NO: 4675 - DNA, 21 bp, homo sapiens
cagagaattgacaattgattc

SEQ ID NO: 4676 - RNA, 21 nt, RNAi
gagaauugacaauugauucuu

SEQ ID NO: 4677 - RNA, 21 nt, RNAi
uucucuuaacuguuaacuaag

SEQ ID NO: 4678 - DNA, 21 bp, homo sapiens
cataatgaacaaagtgagaga

SEQ ID NO: 4679 - RNA, 21 nt, RNAi
uaaugaacaaagugagagauu

SEQ ID NO: 4680 - RNA, 21 nt, RNAi
uuauuacuuguuucacucucu

SEQ ID NO: 4681 - DNA, 21 bp, homo sapiens
caaattatgatgatggcaaac

SEQ ID NO: 4682 - RNA, 21 nt, RNAi
aauuaugaugauggcaaacuu

SEQ ID NO: 4683 - RNA, 21 nt, RNAi
uuuuaauacuacuaccguuug

SEQ ID NO: 4684 - DNA, 21 bp, homo sapiens
cagaggactggttgagtttgt

SEQ ID NO: 4685 - RNA, 21 nt, RNAi
gaggacugguugaguuuguuu

SEQ ID NO: 4686 - RNA, 21 nt, RNAi
uucuccugaccaacucaaaca

SEQ ID NO: 4687 - DNA, 21 bp, homo sapiens
cagtgttccgctaagtgatgc

SEQ ID NO: 4688 - RNA, 21 nt, RNAi
guguuccgcuaagugaugcuu

SEQ ID NO: 4689 - RNA, 21 nt, RNAi
uucacaaggcgauucacuacg

SEQ ID NO: 4690 - DNA, 21 bp, homo sapiens
cagtcaagcaattgaagcgct

SEQ ID NO: 4691 - RNA, 21 nt, RNAi
gucaagcaauugaagcgcuuu

SEQ ID NO: 4692 - RNA, 21 nt, RNAi
uucaguucguuaacuucgcga

SEQ ID NO: 4693 - DNA, 21 bp, homo sapiens
caagtgagatttgctgaatta

SEQ ID NO: 4694 - RNA, 21 nt, RNAi
agugagauuugcugaauuauu

SEQ ID NO: 4695 - RNA, 21 nt, RNAi
uuucacucuaaacgacuuaau

SEQ ID NO: 4696 - DNA, 21 bp, homo sapiens
caagagccagatgatgcacgt

SEQ ID NO: 4697 - RNA, 21 nt, RNAi
agagccagaugaugcacguuu

SEQ ID NO: 4698 - RNA, 21 nt, RNAi
uuucucggucuacuacgugca

SEQ ID NO: 4699 - DNA, 21 bp, homo sapiens
cagatgatgcacgtgactact

SEQ ID NO: 4700 - RNA, 21 nt, RNAi
gaugaugcacgugacuacuuu

SEQ ID NO: 4701 - RNA, 21 nt, RNAi
uucuacuacgugcacugauga

SEQ ID NO: 4702 - DNA, 21 bp, homo sapiens
cacgtgactactttcaaatgg

SEQ ID NO: 4703 - RNA, 21 nt, RNAi
cgugacuacuuucaaaugguu

SEQ ID NO: 4704 - RNA, 21 nt, RNAi
uugcacugaugaaaguuuacc

SEQ ID NO: 4705 - DNA, 21 bp, homo sapiens
caaatggccagagcaaactgc

SEQ ID NO: 4706 - RNA, 21 nt, RNAi
aauggccagagcaaacugcuu

SEQ ID NO: 4707 - RNA, 21 nt, RNAi
uuuuaccggucucguuugacg

SEQ ID NO: 4708 - DNA, 21 bp, homo sapiens
cagagcaaactgcaagaaatt

SEQ ID NO: 4709 - RNA, 21 nt, RNAi
gagcaaacugcaagaaauuuu

SEQ ID NO: 4710 - RNA, 21 nt, RNAi
uucucguuugacguucuuuaa

SEQ ID NO: 4711 - DNA, 21 bp, homo sapiens
caaactgcaagaaatttgctt

SEQ ID NO: 4712 - RNA, 21 nt, RNAi
aacugcaagaaauuugcuuuu

SEQ ID NO: 4713 - RNA, 21 nt, RNAi
uuuugacguucuuuaaacgaa

SEQ ID NO: 4714 - DNA, 21 bp, homo sapiens
cacaatttgaactgtcacaag

SEQ ID NO: 4715 - RNA, 21 nt, RNAi
caauuugaacugucacaaguu

SEQ ID NO: 4716 - RNA, 21 nt, RNAi
uuguuaaacuugacaguguuc

SEQ ID NO: 4717 - DNA, 21 bp, homo sapiens
caatttgaactgtcacaaggt

SEQ ID NO: 4718 - RNA, 21 nt, RNAi
auuugaacugucacaagguuu

SEQ ID NO: 4719 - RNA, 21 nt, RNAi
uuuaaacuugacaguguucca

SEQ ID NO: 4720 - DNA, 21 bp, homo sapiens
cagtaccactagaaatgctgg

SEQ ID NO: 4721 - RNA, 21 nt, RNAi
guaccacuagaaaugcugguu

SEQ ID NO: 4722 - RNA, 21 nt, RNAi
uucauggugaucuuuacgacc

SEQ ID NO: 4723 - DNA, 21 bp, homo sapiens
cactagaaatgctggaaattg

SEQ ID NO: 4724 - RNA, 21 nt, RNAi
cuagaaaugcuggaaauuguu

SEQ ID NO: 4725 - RNA, 21 nt, RNAi
uugaucuuuacgaccuuuaac

SEQ ID NO: 4726 - DNA, 21 bp, homo sapiens
cagctgctttcagaggaggaa

SEQ ID NO: 4727 - RNA, 21 nt, RNAi
gcugcuuucagaggaggaauu

SEQ ID NO: 4728 - RNA, 21 nt, RNAi
uucgacgaaagucuccuccuu

SEQ ID NO: 4729 - DNA, 21 bp, homo sapiens
cagcatctacggtattaactg

SEQ ID NO: 4730 - RNA, 21 nt, RNAi
gcaucuacgguauuaacuguu

SEQ ID NO: 4731 - RNA, 21 nt, RNAi
uucguagaugccauaauugac

SEQ ID NO: 4732 - DNA, 21 bp, homo sapiens
catttacagaataggaacaac

SEQ ID NO: 4733 - RNA, 21 nt, RNAi
uuuacagaauaggaacaacuu

SEQ ID NO: 4734 - RNA, 21 nt, RNAi
uuaaaugucuuauccuuguug

SEQ ID NO: 4735 - DNA, 21 bp, homo sapiens
cagaataggaacaacagttgt

SEQ ID NO: 4736 - RNA, 21 nt, RNAi
gaauaggaacaacaguuguuu

SEQ ID NO: 4737 - RNA, 21 nt, RNAi
uucuuauccuuguugucaaca

SEQ ID NO: 4738 - DNA, 21 bp, homo sapiens
caacagttgtgattccagagg

SEQ ID NO: 4739 - RNA, 21 nt, RNAi
acaguugugauuccagagguu

SEQ ID NO: 4740 - RNA, 21 nt, RNAi
uuugucaacacuaaggucucc

SEQ ID NO: 4741 - DNA, 21 bp, homo sapiens
cagttgtgattccagaggaca

SEQ ID NO: 4742 - RNA, 21 nt, RNAi
guugugauuccagaggacauu

SEQ ID NO: 4743 - RNA, 21 nt, RNAi
uucaacacuaaggucuccugu

SEQ ID NO: 4744 - DNA, 21 bp, homo sapiens
cagaggacagactactaaagc

SEQ ID NO: 4745 - RNA, 21 nt, RNAi
gaggacagacuacuaaagcuu

SEQ ID NO: 4746 - RNA, 21 nt, RNAi
uucuccugucugaugauuucg

SEQ ID NO: 4747 - DNA, 21 bp, homo sapiens
cagactactaaagccaggttt

SEQ ID NO: 4748 - RNA, 21 nt, RNAi
gacuacuaaagccagguuuuu

SEQ ID NO: 4749 - RNA, 21 nt, RNAi
uucugaugauuucgguccaaa

SEQ ID NO: 4750 - DNA, 21 bp, homo sapiens
catgccaccacaagatgcaga

SEQ ID NO: 4751 - RNA, 21 nt, RNAi
ugccaccacaagaugcagauu

SEQ ID NO: 4752 - RNA, 21 nt, RNAi
uuacggugguguucuacgucu

SEQ ID NO: 4753 - DNA, 21 bp, homo sapiens
caccacaagatgcagaaatag

SEQ ID NO: 4754 - RNA, 21 nt, RNAi
ccacaagaugcagaaauaguu

SEQ ID NO: 4755 - RNA, 21 nt, RNAi
uugguguucuacgucuuuauc

SEQ ID NO: 4756 - DNA, 21 bp, homo sapiens
cacaagatgcagaaataggtt

SEQ ID NO: 4757 - RNA, 21 nt, RNAi
caagaugcagaaauagguuuu

SEQ ID NO: 4758 - RNA, 21 nt, RNAi
uuguucuacgucuuuauccaa

SEQ ID NO: 4759 - DNA, 21 bp, homo sapiens
caagatgcagaaataggttac

SEQ ID NO: 4760 - RNA, 21 nt, RNAi
agaugcagaaauagguuacuu

SEQ ID NO: 4761 - RNA, 21 nt, RNAi
uuucuacgucuuuauccaaug

SEQ ID NO: 4762 - DNA, 21 bp, homo sapiens
cagaaataggttaccggaatt

SEQ ID NO: 4763 - RNA, 21 nt, RNAi
gaaauagguuaccggaauuuu

SEQ ID NO: 4764 - RNA, 21 nt, RNAi
uucuuuauccaauggccuuaa

SEQ ID NO: 4765 - DNA, 21 bp, homo sapiens
cagttaaccttctaaatagcc

SEQ ID NO: 4766 - RNA, 21 nt, RNAi
guuaaccuucuaaauagccuu

SEQ ID NO: 4767 - RNA, 21 nt, RNAi
uucaauuggaagauuuaucgg

SEQ ID NO: 4768 - DNA, 21 bp, homo sapiens
cagattgtgatgtgaagacag

SEQ ID NO: 4769 - RNA, 21 nt, RNAi
gauugugaugugaagacaguu

SEQ ID NO: 4770 - RNA, 21 nt, RNAi
uucuaacacuacacuucuguc

SEQ ID NO: 4771 - DNA, 21 bp, homo sapiens
cagatgattcagttgtacctt

SEQ ID NO: 4772 - RNA, 21 nt, RNAi
gaugauucaguuguaccuuuu

SEQ ID NO: 4773 - RNA, 21 nt, RNAi
uucuacuaagucaacauggaa

SEQ ID NO: 4774 - DNA, 21 bp, homo sapiens
caaacctctagatcagaatgc

SEQ ID NO: 4775 - RNA, 21 nt, RNAi
aaccucuagaucagaaugcuu

SEQ ID NO: 4776 - RNA, 21 nt, RNAi
uuuuggagaucuagucuuacg

SEQ ID NO: 4777 - DNA, 21 bp, homo sapiens
cagaatgccgagatttggttg

SEQ ID NO: 4778 - RNA, 21 nt, RNAi
gaaugccgagauuugguuguu

SEQ ID NO: 4779 - RNA, 21 nt, RNAi
uucuuacggcucuaaaccaac

SEQ ID NO: 4780 - DNA, 21 bp, homo sapiens
caagtggaaatgattcctgtg

SEQ ID NO: 4781 - RNA, 21 nt, RNAi
aguggaaaugauuccuguguu

SEQ ID NO: 4782 - RNA, 21 nt, RNAi
uuucaccuuuacuaaggacac

SEQ ID NO: 4783 - DNA, 21 bp, homo sapiens
catttcaaggaacctctggtg

SEQ ID NO: 4784 - RNA, 21 nt, RNAi
uuucaaggaaccucugguguu

SEQ ID NO: 4785 - RNA, 21 nt, RNAi
uuaaaguuccuuggagaccac

SEQ ID NO: 4786 - DNA, 21 bp, homo sapiens
caaggaacctctggtgtcaga

SEQ ID NO: 4787 - RNA, 21 nt, RNAi
aggaaccucuggugucagauu

SEQ ID NO: 4788 - RNA, 21 nt, RNAi
uuuccuuggagaccacagucu

SEQ ID NO: 4789 - DNA, 21 bp, homo sapiens
caagtcttctagctaaattag

SEQ ID NO: 4790 - RNA, 21 nt, RNAi
agucuucuagcuaaauuaguu

SEQ ID NO: 4791 - RNA, 21 nt, RNAi
uuucagaagaucgauuuaauc

SEQ ID NO: 4792 - DNA, 21 bp, homo sapiens
caagaaccagaggttccagag

SEQ ID NO: 4793 - RNA, 21 nt, RNAi
agaaccagagguuccagaguu

SEQ ID NO: 4794 - RNA, 21 nt, RNAi
uuucuuggucuccaaggucuc

SEQ ID NO: 4795 - DNA, 21 bp, homo sapiens
cagaggttccagagagtaacc

SEQ ID NO: 4796 - RNA, 21 nt, RNAi
gagguuccagagaguaaccuu

SEQ ID NO: 4797 - RNA, 21 nt, RNAi
uucuccaaggucucucauugg

SEQ ID NO: 4798 - DNA, 21 bp, homo sapiens
cagagagtaaccagaaacagt

SEQ ID NO: 4799 - RNA, 21 nt, RNAi
gagaguaaccagaaacaguuu

SEQ ID NO: 4800 - RNA, 21 nt, RNAi
uucucucauuggucuuuguca

SEQ ID NO: 4801 - DNA, 21 bp, homo sapiens
cagaaacagtggcaagctaag

SEQ ID NO: 4802 - RNA, 21 nt, RNAi
gaaacaguggcaagcuaaguu

SEQ ID NO: 4803 - RNA, 21 nt, RNAi
uucuuugucaccguucgauuc

SEQ ID NO: 4804 - DNA, 21 bp, homo sapiens
cagtggcaagctaagagaaag

SEQ ID NO: 4805 - RNA, 21 nt, RNAi
guggcaagcuaagagaaaguu

SEQ ID NO: 4806 - RNA, 21 nt, RNAi
uucaccguucgauucucuuuc

SEQ ID NO: 4807 - DNA, 21 bp, homo sapiens
caagctaagagaaagtcagag

SEQ ID NO: 4808 - RNA, 21 nt, RNAi
agcuaagagaaagucagaguu

SEQ ID NO: 4809 - RNA, 21 nt, RNAi
uuucgauucucuuucagucuc

SEQ ID NO: 4810 - DNA, 21 bp, homo sapiens
cagagtgtattaaccagaatc

SEQ ID NO: 4811 - RNA, 21 nt, RNAi
gaguguauuaaccagaaucuu

SEQ ID NO: 4812 - RNA, 21 nt, RNAi
uucucacauaauuggucuuag

SEQ ID NO: 4813 - DNA, 21 bp, homo sapiens
cagaatcctgctgcatcttca

SEQ ID NO: 4814 - RNA, 21 nt, RNAi
gaauccugcugcaucuucauu

SEQ ID NO: 4815 - RNA, 21 nt, RNAi
uucuuaggacgacguagaagu

SEQ ID NO: 4816 - DNA, 21 bp, homo sapiens
catcttcaaatcactggcaga

SEQ ID NO: 4817 - RNA, 21 nt, RNAi
ucuucaaaucacuggcagauu

SEQ ID NO: 4818 - RNA, 21 nt, RNAi
uuagaaguuuagugaccgucu

SEQ ID NO: 4819 - DNA, 21 bp, homo sapiens
caaatcactggcagattccgg

SEQ ID NO: 4820 - RNA, 21 nt, RNAi
aaucacuggcagauuccgguu

SEQ ID NO: 4821 - RNA, 21 nt, RNAi
uuuuagugaccgucuaaggcc

SEQ ID NO: 4822 - DNA, 21 bp, homo sapiens
cactggcagattccggagtta

SEQ ID NO: 4823 - RNA, 21 nt, RNAi
cuggcagauuccggaguuauu

SEQ ID NO: 4824 - RNA, 21 nt, RNAi
uugaccgucuaaggccucaau

SEQ ID NO: 4825 - DNA, 21 bp, homo sapiens
cagagcagaaacataccactt

SEQ ID NO: 4826 - RNA, 21 nt, RNAi
gagcagaaacauaccacuuuu

SEQ ID NO: 4827 - RNA, 21 nt, RNAi
uucucgucuuuguauggugaa

SEQ ID NO: 4828 - DNA, 21 bp, homo sapiens
cagtcaccaccaatatcaaca

SEQ ID NO: 4829 - RNA, 21 nt, RNAi
gucaccaccaauaucaacauu

SEQ ID NO: 4830 - RNA, 21 nt, RNAi
uucaguggugguuauaguugu

SEQ ID NO: 4831 - DNA, 21 bp, homo sapiens
caccaccaatatcaacatcta

SEQ ID NO: 4832 - RNA, 21 nt, RNAi
ccaccaauaucaacaucuauu

SEQ ID NO: 4833 - RNA, 21 nt, RNAi
uuggugguuauaguuguagau

SEQ ID NO: 4834 - DNA, 21 bp, homo sapiens
caacatctaaatggtttgacc

SEQ ID NO: 4835 - RNA, 21 nt, RNAi
acaucuaaaugguuugaccuu

SEQ ID NO: 4836 - RNA, 21 nt, RNAi
uuuguagauuuaccaaacugg

SEQ ID NO: 4837 - DNA, 21 bp, homo sapiens
caccaagcagcaataccttgg

SEQ ID NO: 4838 - RNA, 21 nt, RNAi
ccaagcagcaauaccuugguu

SEQ ID NO: 4839 - RNA, 21 nt, RNAi
uugguucgucguuauggaacc

SEQ ID NO: 4840 - DNA, 21 bp, homo sapiens
caagcagcaataccttggatg

SEQ ID NO: 4841 - RNA, 21 nt, RNAi
agcagcaauaccuuggauguu

SEQ ID NO: 4842 - RNA, 21 nt, RNAi
uuucgucguuauggaaccuac

SEQ ID NO: 4843 - DNA, 21 bp, homo sapiens
cagcaataccttggatgatta

SEQ ID NO: 4844 - RNA, 21 nt, RNAi
gcaauaccuuggaugauuauu

SEQ ID NO: 4845 - RNA, 21 nt, RNAi
uucguuauggaaccuacuaau

SEQ ID NO: 4846 - DNA, 21 bp, homo sapiens
caataccttggatgattacat

SEQ ID NO: 4847 - RNA, 21 nt, RNAi
auaccuuggaugauuacauuu

SEQ ID NO: 4848 - RNA, 21 nt, RNAi
uuuauggaaccuacuaaugua

SEQ ID NO: 4849 - DNA, 21 bp, homo sapiens
cagttgtaaagaatgactttc

SEQ ID NO: 4850 - RNA, 21 nt, RNAi
guuguaaagaaugacuuucuu

SEQ ID NO: 4851 - RNA, 21 nt, RNAi
uucaacauuucuuacugaaag

SEQ ID NO: 4852 - DNA, 21 bp, homo sapiens
cacctgcttgtcagttgtcaa

SEQ ID NO: 4853 - RNA, 21 nt, RNAi
ccugcuugucaguugucaauu

SEQ ID NO: 4854 - RNA, 21 nt, RNAi
uuggacgaacagucaacaguu

SEQ ID NO: 4855 - DNA, 21 bp, homo sapiens
cagttgtcaacaccttatggc

SEQ ID NO: 4856 - RNA, 21 nt, RNAi
guugucaacaccuuauggcuu

SEQ ID NO: 4857 - RNA, 21 nt, RNAi
uucaacaguuguggaauaccg

SEQ ID NO: 4858 - DNA, 21 bp, homo sapiens
caacaccttatggccaacctg

SEQ ID NO: 4859 - RNA, 21 nt, RNAi
acaccuuauggccaaccuguu

SEQ ID NO: 4860 - RNA, 21 nt, RNAi
uuuguggaauaccgguuggac

SEQ ID NO: 4861 - DNA, 21 bp, homo sapiens
caccttatggccaacctgcct

SEQ ID NO: 4862 - RNA, 21 nt, RNAi
ccuuauggccaaccugccuuu

SEQ ID NO: 4863 - RNA, 21 nt, RNAi
uuggaauaccgguuggacgga

SEQ ID NO: 4864 - DNA, 21 bp, homo sapiens
caacctgcctgtttccagcag

SEQ ID NO: 4865 - RNA, 21 nt, RNAi
accugccuguuuccagcaguu

SEQ ID NO: 4866 - RNA, 21 nt, RNAi
uuuggacggacaaaggucguc

SEQ ID NO: 4867 - DNA, 21 bp, homo sapiens
cagcagcaacagcatcaaata

SEQ ID NO: 4868 - RNA, 21 nt, RNAi
gcagcaacagcaucaaauauu

SEQ ID NO: 4869 - RNA, 21 nt, RNAi
uucgucguugucguaguuuau

SEQ ID NO: 4870 - DNA, 21 bp, homo sapiens
cagcaacagcatcaaatactt

SEQ ID NO: 4871 - RNA, 21 nt, RNAi
gcaacagcaucaaauacuuuu

SEQ ID NO: 4872 - RNA, 21 nt, RNAi
uucguugucguaguuuaugaa

SEQ ID NO: 4873 - DNA, 21 bp, homo sapiens
caacagcatcaaatacttgcc

SEQ ID NO: 4874 - RNA, 21 nt, RNAi
acagcaucaaauacuugccuu

SEQ ID NO: 4875 - RNA, 21 nt, RNAi
uuugucguaguuuaugaacgg

SEQ ID NO: 4876 - DNA, 21 bp, homo sapiens
cagcatcaaatacttgccact

SEQ ID NO: 4877 - RNA, 21 nt, RNAi
gcaucaaauacuugccacuuu

SEQ ID NO: 4878 - RNA, 21 nt, RNAi
uucguaguuuaugaacgguga

SEQ ID NO: 4879 - DNA, 21 bp, homo sapiens
catcaaatacttgccactcca

SEQ ID NO: 4880 - RNA, 21 nt, RNAi
ucaaauacuugccacuccauu

SEQ ID NO: 4881 - RNA, 21 nt, RNAi
uuaguuuaugaacggugaggu

SEQ ID NO: 4882 - DNA, 21 bp, homo sapiens
caaatacttgccactccactt

SEQ ID NO: 4883 - RNA, 21 nt, RNAi
aauacuugccacuccacuuuu

SEQ ID NO: 4884 - RNA, 21 nt, RNAi
uuuuaugaacggugaggugaa

SEQ ID NO: 4885 - DNA, 21 bp, homo sapiens
catcttcttcagcaaatgaat

SEQ ID NO: 4886 - RNA, 21 nt, RNAi
ucuucuucagcaaaugaauuu

SEQ ID NO: 4887 - RNA, 21 nt, RNAi
uuagaagaagucguuuacuua

SEQ ID NO: 4888 - DNA, 21 bp, homo sapiens
cagcaaatgaatgcatttcgg

SEQ ID NO: 4889 - RNA, 21 nt, RNAi
gcaaaugaaugcauuucgguu

SEQ ID NO: 4890 - RNA, 21 nt, RNAi
uucguuuacuuacguaaagcc

SEQ ID NO: 4891 - DNA, 21 bp, homo sapiens
caaatgaatgcatttcggtta

SEQ ID NO: 4892 - RNA, 21 nt, RNAi
aaugaaugcauuucgguuauu

SEQ ID NO: 4893 - RNA, 21 nt, RNAi
uuuuacuuacguaaagccaau

SEQ ID NO: 4894 - DNA, 21 bp, homo sapiens
catttcggttaaaggaagaat

SEQ ID NO: 4895 - RNA, 21 nt, RNAi
uuucgguuaaaggaagaauuu

SEQ ID NO: 4896 - RNA, 21 nt, RNAi
uuaaagccaauuuccuucuua

SEQ ID NO: 4897 - DNA, 21 bp, homo sapiens
catattaaagcagataggaag

SEQ ID NO: 4898 - RNA, 21 nt, RNAi
uauuaaagcagauaggaaguu

SEQ ID NO: 4899 - RNA, 21 nt, RNAi
uuauaauuucgucuauccuuc

SEQ ID NO: 4900 - DNA, 21 bp, homo sapiens
cagataggaagtggaggttca

SEQ ID NO: 4901 - RNA, 21 nt, RNAi
gauaggaaguggagguucauu

SEQ ID NO: 4902 - RNA, 21 nt, RNAi
uucuauccuucaccuccaagu

SEQ ID NO: 4903 - DNA, 21 bp, homo sapiens
caagcaaggtatttcaggtgt

SEQ ID NO: 4904 - RNA, 21 nt, RNAi
agcaagguauuucagguguuu

SEQ ID NO: 4905 - RNA, 21 nt, RNAi
uuucguuccauaaaguccaca

SEQ ID NO: 4906 - DNA, 21 bp, homo sapiens
caaggtatttcaggtgttaaa

SEQ ID NO: 4907 - RNA, 21 nt, RNAi
agguauuucagguguuaaauu

SEQ ID NO: 4908 - RNA, 21 nt, RNAi
uuuccauaaaguccacaauuu

SEQ ID NO: 4909 - DNA, 21 bp, homo sapiens
cagataaccaaactcttgata

SEQ ID NO: 4910 - RNA, 21 nt, RNAi
gauaaccaaacucuugauauu

SEQ ID NO: 4911 - RNA, 21 nt, RNAi
uucuauugguuugagaacuau

SEQ ID NO: 4912 - DNA, 21 bp, homo sapiens
caaactcttgatagttaccgg

SEQ ID NO: 4913 - RNA, 21 nt, RNAi
aacucuugauaguuaccgguu

SEQ ID NO: 4914 - RNA, 21 nt, RNAi
uuuugagaacuaucaauggcc

SEQ ID NO: 4915 - DNA, 21 bp, homo sapiens
caacaacacagtgataagatc

SEQ ID NO: 4916 - RNA, 21 nt, RNAi
acaacacagugauaagaucuu

SEQ ID NO: 4917 - RNA, 21 nt, RNAi
uuuguugugucacuauucuag

SEQ ID NO: 4918 - DNA, 21 bp, homo sapiens
caacacagtgataagatcatc

SEQ ID NO: 4919 - RNA, 21 nt, RNAi
acacagugauaagaucaucuu

SEQ ID NO: 4920 - RNA, 21 nt, RNAi
uuugugucacuauucuaguag

SEQ ID NO: 4921 - DNA, 21 bp, homo sapiens
cacagtgataagatcatccga

SEQ ID NO: 4922 - RNA, 21 nt, RNAi
cagugauaagaucauccgauu

SEQ ID NO: 4923 - RNA, 21 nt, RNAi
uugucacuauucuaguaggcu

SEQ ID NO: 4924 - DNA, 21 bp, homo sapiens
cagtgataagatcatccgact

SEQ ID NO: 4925 - RNA, 21 nt, RNAi
gugauaagaucauccgacuuu

SEQ ID NO: 4926 - RNA, 21 nt, RNAi
uucacuauucuaguaggcuga

SEQ ID NO: 4927 - DNA, 21 bp, homo sapiens
catccgactttatgattatga

SEQ ID NO: 4928 - RNA, 21 nt, RNAi
uccgacuuuaugauuaugauu

SEQ ID NO: 4929 - RNA, 21 nt, RNAi
uuaggcugaaauacuaauacu

SEQ ID NO: 4930 - DNA, 21 bp, homo sapiens
cacggaccagtacatctacat

SEQ ID NO: 4931 - RNA, 21 nt, RNAi
cggaccaguacaucuacauuu

SEQ ID NO: 4932 - RNA, 21 nt, RNAi
uugccuggucauguagaugua

SEQ ID NO: 4933 - DNA, 21 bp, homo sapiens
cagtacatctacatggtaatg

SEQ ID NO: 4934 - RNA, 21 nt, RNAi
guacaucuacaugguaauguu

SEQ ID NO: 4935 - RNA, 21 nt, RNAi
uucauguagauguaccauuac

SEQ ID NO: 4936 - DNA, 21 bp, homo sapiens
catctacatggtaatggagtg

SEQ ID NO: 4937 - RNA, 21 nt, RNAi
ucuacaugguaauggaguguu

SEQ ID NO: 4938 - RNA, 21 nt, RNAi
uuagauguaccauuaccucac

SEQ ID NO: 4939 - DNA, 21 bp, homo sapiens
catggtaatggagtgtggaaa

SEQ ID NO: 4940 - RNA, 21 nt, RNAi
ugguaauggaguguggaaauu

SEQ ID NO: 4941 - RNA, 21 nt, RNAi
uuaccauuaccucacaccuuu

SEQ ID NO: 4942 - DNA, 21 bp, homo sapiens
cagttcacacaatccatcaac

SEQ ID NO: 4943 - RNA, 21 nt, RNAi
guucacacaauccaucaacuu

SEQ ID NO: 4944 - RNA, 21 nt, RNAi
uucaaguguguuagguaguug

SEQ ID NO: 4945 - DNA, 21 bp, homo sapiens
cacacaatccatcaacatggc

SEQ ID NO: 4946 - RNA, 21 nt, RNAi
cacaauccaucaacauggcuu

SEQ ID NO: 4947 - RNA, 21 nt, RNAi
uuguguuagguaguuguaccg

SEQ ID NO: 4948 - DNA, 21 bp, homo sapiens
cacaatccatcaacatggcat

SEQ ID NO: 4949 - RNA, 21 nt, RNAi
caauccaucaacauggcauuu

SEQ ID NO: 4950 - RNA, 21 nt, RNAi
uuguuagguaguuguaccgua

SEQ ID NO: 4951 - DNA, 21 bp, homo sapiens
caatccatcaacatggcattg

SEQ ID NO: 4952 - RNA, 21 nt, RNAi
auccaucaacauggcauuguu

SEQ ID NO: 4953 - RNA, 21 nt, RNAi
uuuagguaguuguaccguaac

SEQ ID NO: 4954 - DNA, 21 bp, homo sapiens
catcaacatggcattgttcac

SEQ ID NO: 4955 - RNA, 21 nt, RNAi
ucaacauggcauuguucacuu

SEQ ID NO: 4956 - RNA, 21 nt, RNAi
uuaguuguaccguaacaagug

SEQ ID NO: 4957 - DNA, 21 bp, homo sapiens
caacatggcattgttcacagt

SEQ ID NO: 4958 - RNA, 21 nt, RNAi
acauggcauuguucacaguuu

SEQ ID NO: 4959 - RNA, 21 nt, RNAi
uuuguaccguaacaaguguca

SEQ ID NO: 4960 - DNA, 21 bp, homo sapiens
catggcattgttcacagtgat

SEQ ID NO: 4961 - RNA, 21 nt, RNAi
uggcauuguucacagugauuu

SEQ ID NO: 4962 - RNA, 21 nt, RNAi
uuaccguaacaagugucacua

SEQ ID NO: 4963 - DNA, 21 bp, homo sapiens
cattgttcacagtgatcttaa

SEQ ID NO: 4964 - RNA, 21 nt, RNAi
uuguucacagugaucuuaauu

SEQ ID NO: 4965 - RNA, 21 nt, RNAi
uuaacaagugucacuagaauu

SEQ ID NO: 4966 - DNA, 21 bp, homo sapiens
cacagtgatcttaaaccagct

SEQ ID NO: 4967 - RNA, 21 nt, RNAi
cagugaucuuaaaccagcuuu

SEQ ID NO: 4968 - RNA, 21 nt, RNAi
uugucacuagaauuuggucga

SEQ ID NO: 4969 - DNA, 21 bp, homo sapiens
cagtgatcttaaaccagctaa

SEQ ID NO: 4970 - RNA, 21 nt, RNAi
gugaucuuaaaccagcuaauu

SEQ ID NO: 4971 - RNA, 21 nt, RNAi
uucacuagaauuuggucgauu

SEQ ID NO: 4972 - DNA, 21 bp, homo sapiens
cagctaactttctgatagttg

SEQ ID NO: 4973 - RNA, 21 nt, RNAi
gcuaacuuucugauaguuguu

SEQ ID NO: 4974 - RNA, 21 nt, RNAi
uucgauugaaagacuaucaac

SEQ ID NO: 4975 - DNA, 21 bp, homo sapiens
caaaccaaatgcaaccagata

SEQ ID NO: 4976 - RNA, 21 nt, RNAi
aaccaaaugcaaccagauauu

SEQ ID NO: 4977 - RNA, 21 nt, RNAi
uuuugguuuacguuggucuau

SEQ ID NO: 4978 - DNA, 21 bp, homo sapiens
caaatgcaaccagatacaaca

SEQ ID NO: 4979 - RNA, 21 nt, RNAi
aaugcaaccagauacaacauu

SEQ ID NO: 4980 - RNA, 21 nt, RNAi
uuuuacguuggucuauguugu

SEQ ID NO: 4981 - DNA, 21 bp, homo sapiens
caaccagatacaacaagtgtt

SEQ ID NO: 4982 - RNA, 21 nt, RNAi
accagauacaacaaguguuuu

SEQ ID NO: 4983 - RNA, 21 nt, RNAi
uuuggucuauguuguucacaa

SEQ ID NO: 4984 - DNA, 21 bp, homo sapiens
cagatacaacaagtgttgtta

SEQ ID NO: 4985 - RNA, 21 nt, RNAi
gauacaacaaguguuguuauu

SEQ ID NO: 4986 - RNA, 21 nt, RNAi
uucuauguuguucacaacaau

SEQ ID NO: 4987 - DNA, 21 bp, homo sapiens
caagtgttgttaaagattctc

SEQ ID NO: 4988 - RNA, 21 nt, RNAi
aguguuguuaaagauucucuu

SEQ ID NO: 4989 - RNA, 21 nt, RNAi
uuucacaacaauuucuaagag

SEQ ID NO: 4990 - DNA, 21 bp, homo sapiens
caggttggcacagttaattat

SEQ ID NO: 4991 - RNA, 21 nt, RNAi
gguuggcacaguuaauuauuu

SEQ ID NO: 4992 - RNA, 21 nt, RNAi
uuccaaccgugucaauuaaua

SEQ ID NO: 4993 - DNA, 21 bp, homo sapiens
cacagttaattatatgccacc

SEQ ID NO: 4994 - RNA, 21 nt, RNAi
caguuaauuauaugccaccuu

SEQ ID NO: 4995 - RNA, 21 nt, RNAi
uugucaauuaauauacggugg

SEQ ID NO: 4996 - DNA, 21 bp, homo sapiens
cagttaattatatgccaccag

SEQ ID NO: 4997 - RNA, 21 nt, RNAi
guuaauuauaugccaccaguu

SEQ ID NO: 4998 - RNA, 21 nt, RNAi
uucaauuaauauacggugguc

SEQ ID NO: 4999 - DNA, 21 bp, homo sapiens
caccagaagcaatcaaagata

SEQ ID NO: 5000 - RNA, 21 nt, RNAi
ccagaagcaaucaaagauauu

SEQ ID NO: 5001 - RNA, 21 nt, RNAi
uuggucuucguuaguuucuau

SEQ ID NO: 5002 - DNA, 21 bp, homo sapiens
cagaagcaatcaaagatatgt

SEQ ID NO: 5003 - RNA, 21 nt, RNAi
gaagcaaucaaagauauguuu

SEQ ID NO: 5004 - RNA, 21 nt, RNAi
uucuucguuaguuucuauaca

SEQ ID NO: 5005 - DNA, 21 bp, homo sapiens
caatcaaagatatgtcttcct

SEQ ID NO: 5006 - RNA, 21 nt, RNAi
aucaaagauaugucuuccuuu

SEQ ID NO: 5007 - RNA, 21 nt, RNAi
uuuaguuucuauacagaagga

SEQ ID NO: 5008 - DNA, 21 bp, homo sapiens
caaagatatgtcttcctccag

SEQ ID NO: 5009 - RNA, 21 nt, RNAi
aagauaugucuuccuccaguu

SEQ ID NO: 5010 - RNA, 21 nt, RNAi
uuuucuauacagaaggagguc

SEQ ID NO: 5011 - DNA, 21 bp, homo sapiens
caccatttcagcagataatta

SEQ ID NO: 5012 - RNA, 21 nt, RNAi
ccauuucagcagauaauuauu

SEQ ID NO: 5013 - RNA, 21 nt, RNAi
uugguaaagucgucuauuaau

SEQ ID NO: 5014 - DNA, 21 bp, homo sapiens
cagatttctaaattacatgcc

SEQ ID NO: 5015 - RNA, 21 nt, RNAi
gauuucuaaauuacaugccuu

SEQ ID NO: 5016 - RNA, 21 nt, RNAi
uucuaaagauuuaauguacgg

SEQ ID NO: 5017 - DNA, 21 bp, homo sapiens
catgccataattgatcctaat

SEQ ID NO: 5018 - RNA, 21 nt, RNAi
ugccauaauugauccuaauuu

SEQ ID NO: 5019 - RNA, 21 nt, RNAi
uuacgguauuaacuaggauua

SEQ ID NO: 5020 - DNA, 21 bp, homo sapiens
cagagaaagatcttcaagatg

SEQ ID NO: 5021 - RNA, 21 nt, RNAi
gagaaagaucuucaagauguu

SEQ ID NO: 5022 - RNA, 21 nt, RNAi
uucucuuucuagaaguucuac

SEQ ID NO: 5023 - DNA, 21 bp, homo sapiens
caagatgtgttaaagtgttgt

SEQ ID NO: 5024 - RNA, 21 nt, RNAi
agauguguuaaaguguuguuu

SEQ ID NO: 5025 - RNA, 21 nt, RNAi
uuucuacacaauuucacaaca

SEQ ID NO: 5026 - DNA, 21 bp, homo sapiens
cagaggatatccattcctgag

SEQ ID NO: 5027 - RNA, 21 nt, RNAi
gaggauauccauuccugaguu

SEQ ID NO: 5028 - RNA, 21 nt, RNAi
uucuccuauagguaaggacuc

SEQ ID NO: 5029 - DNA, 21 bp, homo sapiens
cattcctgagctcctggctca

SEQ ID NO: 5030 - RNA, 21 nt, RNAi
uuccugagcuccuggcucauu

SEQ ID NO: 5031 - RNA, 21 nt, RNAi
uuaaggacucgaggaccgagu

SEQ ID NO: 5032 - DNA, 21 bp, homo sapiens
caaattcaaactcatccagtt

SEQ ID NO: 5033 - RNA, 21 nt, RNAi
aauucaaacucauccaguuuu

SEQ ID NO: 5034 - RNA, 21 nt, RNAi
uuuuaaguuugaguaggucaa

SEQ ID NO: 5035 - DNA, 21 bp, homo sapiens
caaactcatccagttaaccaa

SEQ ID NO: 5036 - RNA, 21 nt, RNAi
aacucauccaguuaaccaauu

SEQ ID NO: 5037 - RNA, 21 nt, RNAi
uuuugaguaggucaauugguu

SEQ ID NO: 5038 - DNA, 21 bp, homo sapiens
catccagttaaccaaatggcc

SEQ ID NO: 5039 - RNA, 21 nt, RNAi
uccaguuaaccaaauggccuu

SEQ ID NO: 5040 - RNA, 21 nt, RNAi
uuaggucaauugguuuaccgg

SEQ ID NO: 5041 - DNA, 21 bp, homo sapiens
cagttaaccaaatggccaagg

SEQ ID NO: 5042 - RNA, 21 nt, RNAi
guuaaccaaauggccaagguu

SEQ ID NO: 5043 - RNA, 21 nt, RNAi
uucaauugguuuaccgguucc

SEQ ID NO: 5044 - DNA, 21 bp, homo sapiens
caacttgttggtctgaattct

SEQ ID NO: 5045 - RNA, 21 nt, RNAi
acuuguuggucugaauucuuu

SEQ ID NO: 5046 - RNA, 21 nt, RNAi
uuugaacaaccagacuuaaga

SEQ ID NO: 5047 - DNA, 21 bp, homo sapiens
cactatagtggtggtgaaagt

SEQ ID NO: 5048 - RNA, 21 nt, RNAi
cuauagugguggugaaaguuu

SEQ ID NO: 5049 - RNA, 21 nt, RNAi
uugauaucaccaccacuuuca

SEQ ID NO: 5050 - DNA, 21 bp, homo sapiens
cataattcttcatcctccaag

SEQ ID NO: 5051 - RNA, 21 nt, RNAi
uaauucuucauccuccaaguu

SEQ ID NO: 5052 - RNA, 21 nt, RNAi
uuauuaagaaguaggagguuc

SEQ ID NO: 5053 - DNA, 21 bp, homo sapiens
cagttattcgtaatgtcagat

SEQ ID NO: 5054 - RNA, 21 nt, RNAi
guuauucguaaugucagauuu

SEQ ID NO: 5055 - RNA, 21 nt, RNAi
uucaauaagcauuacagucua

SEQ ID NO: 5056 - DNA, 21 bp, homo sapiens
catttgaagacaacatcactc

SEQ ID NO: 5057 - RNA, 21 nt, RNAi
uuugaagacaacaucacucuu

SEQ ID NO: 5058 - RNA, 21 nt, RNAi
uuaaacuucuguuguagugag

SEQ ID NO: 5059 - DNA, 21 bp, homo sapiens
caacatcactctgaagtgtta

SEQ ID NO: 5060 - RNA, 21 nt, RNAi
acaucacucugaaguguuauu

SEQ ID NO: 5061 - RNA, 21 nt, RNAi
uuuguagugagacuucacaau

SEQ ID NO: 5062 - DNA, 21 bp, homo sapiens
catcactctgaagtgttatca

SEQ ID NO: 5063 - RNA, 21 nt, RNAi
ucacucugaaguguuaucauu

SEQ ID NO: 5064 - RNA, 21 nt, RNAi
uuagugagacuucacaauagu

SEQ ID NO: 5065 - DNA, 21 bp, homo sapiens
cactctgaagtgttatcagca

SEQ ID NO: 5066 - RNA, 21 nt, RNAi
cucugaaguguuaucagcauu

SEQ ID NO: 5067 - RNA, 21 nt, RNAi
uugagacuucacaauagucgu

SEQ ID NO: 5068 - DNA, 21 bp, homo sapiens
caaccacttatggcactgtat

SEQ ID NO: 5069 - RNA, 21 nt, RNAi
accacuuauggcacuguauuu

SEQ ID NO: 5070 - RNA, 21 nt, RNAi
uuuggugaauaccgugacaua

SEQ ID NO: 5071 - DNA, 21 bp, homo sapiens
cacttatggcactgtatatat

SEQ ID NO: 5072 - RNA, 21 nt, RNAi
cuuauggcacuguauauauuu

SEQ ID NO: 5073 - RNA, 21 nt, RNAi
uugaauaccgugacauauaua

SEQ ID NO: 5074 - DNA, 21 bp, homo sapiens
gagatggagtttcactcttgt

SEQ ID NO: 5075 - RNA, 21 nt, RNAi
gauggaguuucacucuuguuu

SEQ ID NO: 5076 - RNA, 21 nt, RNAi
uucuaccucaaagugagaaca

SEQ ID NO: 5077 - DNA, 21 bp, homo sapiens
gatggagtttcactcttgttg

SEQ ID NO: 5078 - RNA, 21 nt, RNAi
uggaguuucacucuuguuguu

SEQ ID NO: 5079 - RNA, 21 nt, RNAi
uuaccucaaagugagaacaac

SEQ ID NO: 5080 - DNA, 21 bp, homo sapiens
gagtttcactcttgttggcca

SEQ ID NO: 5081 - RNA, 21 nt, RNAi
guuucacucuuguuggccauu

SEQ ID NO: 5082 - RNA, 21 nt, RNAi
uucaaagugagaacaaccggu

SEQ ID NO: 5083 - DNA, 21 bp, homo sapiens
gagtgcaatggcacaatctca

SEQ ID NO: 5084 - RNA, 21 nt, RNAi
gugcaauggcacaaucucauu

SEQ ID NO: 5085 - RNA, 21 nt, RNAi
uucacguuaccguguuagagu

SEQ ID NO: 5086 - DNA, 21 bp, homo sapiens
gattctcctgcctcagcctct

SEQ ID NO: 5087 - RNA, 21 nt, RNAi
uucuccugccucagccucuuu

SEQ ID NO: 5088 - RNA, 21 nt, RNAi
uuaagaggacggagucggaga

SEQ ID NO: 5089 - DNA, 21 bp, homo sapiens
gattacaggcatgtgccacca

SEQ ID NO: 5090 - RNA, 21 nt, RNAi
uuacaggcaugugccaccauu

SEQ ID NO: 5091 - RNA, 21 nt, RNAi
uuaauguccguacacgguggu

SEQ ID NO: 5092 - DNA, 21 bp, homo sapiens
gaactcctgacctcaggtgat

SEQ ID NO: 5093 - RNA, 21 nt, RNAi
acuccugaccucaggugauuu

SEQ ID NO: 5094 - RNA, 21 nt, RNAi
uuugaggacuggaguccacua

SEQ ID NO: 5095 - DNA, 21 bp, homo sapiens
gacctcaggtgatccacttgc

SEQ ID NO: 5096 - RNA, 21 nt, RNAi
ccucaggugauccacuugcuu

SEQ ID NO: 5097 - RNA, 21 nt, RNAi
uuggaguccacuaggugaacg

SEQ ID NO: 5098 - DNA, 21 bp, homo sapiens
gatccacttgccttggcctcc

SEQ ID NO: 5099 - RNA, 21 nt, RNAi
uccacuugccuuggccuccuu

SEQ ID NO: 5100 - RNA, 21 nt, RNAi
uuaggugaacggaaccggagg

SEQ ID NO: 5101 - DNA, 21 bp, homo sapiens
gattacagccgtgaaactgtg

SEQ ID NO: 5102 - RNA, 21 nt, RNAi
uuacagccgugaaacuguguu

SEQ ID NO: 5103 - RNA, 21 nt, RNAi
uuaaugucggcacuuugacac

SEQ ID NO: 5104 - DNA, 21 bp, homo sapiens
gaaactgtgcctggctgattc

SEQ ID NO: 5105 - RNA, 21 nt, RNAi
aacugugccuggcugauucuu

SEQ ID NO: 5106 - RNA, 21 nt, RNAi
uuuugacacggaccgacuaag

SEQ ID NO: 5107 - DNA, 21 bp, homo sapiens
gagtgcagtggtgcgatcttg

SEQ ID NO: 5108 - RNA, 21 nt, RNAi
gugcaguggugcgaucuuguu

SEQ ID NO: 5109 - RNA, 21 nt, RNAi
uucacgucaccacgcuagaac

SEQ ID NO: 5110 - DNA, 21 bp, homo sapiens
gatcttggctcactataacct

SEQ ID NO: 5111 - RNA, 21 nt, RNAi
ucuuggcucacuauaaccuuu

SEQ ID NO: 5112 - RNA, 21 nt, RNAi
uuagaaccgagugauauugga

SEQ ID NO: 5113 - DNA, 21 bp, homo sapiens
gagtagctgtgattacaggcg

SEQ ID NO: 5114 - RNA, 21 nt, RNAi
guagcugugauuacaggcguu

SEQ ID NO: 5115 - RNA, 21 nt, RNAi
uucaucgacacuaauguccgc

SEQ ID NO: 5116 - DNA, 21 bp, homo sapiens
gattacaggcgtgcaccacca

SEQ ID NO: 5117 - RNA, 21 nt, RNAi
uuacaggcgugcaccaccauu

SEQ ID NO: 5118 - RNA, 21 nt, RNAi
uuaauguccgcacgugguggu

SEQ ID NO: 5119 - DNA, 21 bp, homo sapiens
gagattacaggtgtgagtcac

SEQ ID NO: 5120 - RNA, 21 nt, RNAi
gauuacaggugugagucacuu

SEQ ID NO: 5121 - RNA, 21 nt, RNAi
uucuaauguccacacucagug

SEQ ID NO: 5122 - DNA, 21 bp, homo sapiens
gattacaggtgtgagtcacca

SEQ ID NO: 5123 - RNA, 21 nt, RNAi
uuacaggugugagucaccauu

SEQ ID NO: 5124 - RNA, 21 nt, RNAi
uuaauguccacacucaguggu

SEQ ID NO: 5125 - DNA, 21 bp, homo sapiens
gagtcaccatgcctgacctta

SEQ ID NO: 5126 - RNA, 21 nt, RNAi
gucaccaugccugaccuuauu

SEQ ID NO: 5127 - RNA, 21 nt, RNAi
uucagugguacggacuggaau

SEQ ID NO: 5128 - DNA, 21 bp, homo sapiens
gaagatgaagtgattcatgat

SEQ ID NO: 5129 - RNA, 21 nt, RNAi
agaugaagugauucaugauuu

SEQ ID NO: 5130 - RNA, 21 nt, RNAi
uuucuacuucacuaaguacua

SEQ ID NO: 5131 - DNA, 21 bp, homo sapiens
gatgatgatcctaaatccaga

SEQ ID NO: 5132 - RNA, 21 nt, RNAi
ugaugauccuaaauccagauu

SEQ ID NO: 5133 - RNA, 21 nt, RNAi
uuacuacuaggauuuaggucu

SEQ ID NO: 5134 - DNA, 21 bp, homo sapiens
gatgatcctaaatccagatac

SEQ ID NO: 5135 - RNA, 21 nt, RNAi
ugauccuaaauccagauacuu

SEQ ID NO: 5136 - RNA, 21 nt, RNAi
uuacuaggauuuaggucuaug

SEQ ID NO: 5137 - DNA, 21 bp, homo sapiens
gatcctaaatccagatacagt

SEQ ID NO: 5138 - RNA, 21 nt, RNAi
uccuaaauccagauacaguuu

SEQ ID NO: 5139 - RNA, 21 nt, RNAi
uuaggauuuaggucuauguca

SEQ ID NO: 5140 - DNA, 21 bp, homo sapiens
gatacattgttgatgtgaatg

SEQ ID NO: 5141 - RNA, 21 nt, RNAi
uacauuguugaugugaauguu

SEQ ID NO: 5142 - RNA, 21 nt, RNAi
uuauguaacaacuacacuuac

SEQ ID NO: 5143 - DNA, 21 bp, homo sapiens
gatgtgaatgtaagactgtac

SEQ ID NO: 5144 - RNA, 21 nt, RNAi
ugugaauguaagacuguacuu

SEQ ID NO: 5145 - RNA, 21 nt, RNAi
uuacacuuacauucugacaug

SEQ ID NO: 5146 - DNA, 21 bp, homo sapiens
gaatgtaagactgtacagact

SEQ ID NO: 5147 - RNA, 21 nt, RNAi
auguaagacuguacagacuuu

SEQ ID NO: 5148 - RNA, 21 nt, RNAi
uuuacauucugacaugucuga

SEQ ID NO: 5149 - DNA, 21 bp, homo sapiens
gactgtacagacttcctagaa

SEQ ID NO: 5150 - RNA, 21 nt, RNAi
cuguacagacuuccuagaauu

SEQ ID NO: 5151 - RNA, 21 nt, RNAi
uugacaugucugaaggaucuu

SEQ ID NO: 5152 - DNA, 21 bp, homo sapiens
gaaatggaatccgaggattta

SEQ ID NO: 5153 - RNA, 21 nt, RNAi
aauggaauccgaggauuuauu

SEQ ID NO: 5154 - RNA, 21 nt, RNAi
uuuuaccuuaggcuccuaaau

SEQ ID NO: 5155 - DNA, 21 bp, homo sapiens
gaatccgaggatttaagtggc

SEQ ID NO: 5156 - RNA, 21 nt, RNAi
auccgaggauuuaaguggcuu

SEQ ID NO: 5157 - RNA, 21 nt, RNAi
uuuaggcuccuaaauucaccg

SEQ ID NO: 5158 - DNA, 21 bp, homo sapiens
gaggatttaagtggcagagaa

SEQ ID NO: 5159 - RNA, 21 nt, RNAi
ggauuuaaguggcagagaauu

SEQ ID NO: 5160 - RNA, 21 nt, RNAi
uuccuaaauucaccgucucuu

SEQ ID NO: 5161 - DNA, 21 bp, homo sapiens
gatttaagtggcagagaattg

SEQ ID NO: 5162 - RNA, 21 nt, RNAi
uuuaaguggcagagaauuguu

SEQ ID NO: 5163 - RNA, 21 nt, RNAi
uuaaauucaccgucucuuaac

SEQ ID NO: 5164 - DNA, 21 bp, homo sapiens
gagaattgacaattgattcca

SEQ ID NO: 5165 - RNA, 21 nt, RNAi
gaauugacaauugauuccauu

SEQ ID NO: 5166 - RNA, 21 nt, RNAi
uucuuaacuguuaacuaaggu

SEQ ID NO: 5167 - DNA, 21 bp, homo sapiens
gattccataatgaacaaagtg

SEQ ID NO: 5168 - RNA, 21 nt, RNAi
uuccauaaugaacaaaguguu

SEQ ID NO: 5169 - RNA, 21 nt, RNAi
uuaagguauuacuuguuucac

SEQ ID NO: 5170 - DNA, 21 bp, homo sapiens
gaacaaagtgagagacattaa

SEQ ID NO: 5171 - RNA, 21 nt, RNAi
acaaagugagagacauuaauu

SEQ ID NO: 5172 - RNA, 21 nt, RNAi
uuuguuucacucucuguaauu

SEQ ID NO: 5173 - DNA, 21 bp, homo sapiens
gaagaccttactgatgaacta

SEQ ID NO: 5174 - RNA, 21 nt, RNAi
agaccuuacugaugaacuauu

SEQ ID NO: 5175 - RNA, 21 nt, RNAi
uuucuggaaugacuacuugau

SEQ ID NO: 5176 - DNA, 21 bp, homo sapiens
gaccttactgatgaactaagc

SEQ ID NO: 5177 - RNA, 21 nt, RNAi
ccuuacugaugaacuaagcuu

SEQ ID NO: 5178 - RNA, 21 nt, RNAi
uuggaaugacuacuugauucg

SEQ ID NO: 5179 - DNA, 21 bp, homo sapiens
gaggactggttgagtttgttg

SEQ ID NO: 5180 - RNA, 21 nt, RNAi
ggacugguugaguuuguuguu

SEQ ID NO: 5181 - RNA, 21 nt, RNAi
uuccugaccaacucaaacaac

SEQ ID NO: 5182 - DNA, 21 bp, homo sapiens
gactggttgagtttgttgctc

SEQ ID NO: 5183 - RNA, 21 nt, RNAi
cugguugaguuuguugcucuu

SEQ ID NO: 5184 - RNA, 21 nt, RNAi
uugaccaacucaaacaacgag

SEQ ID NO: 5185 - DNA, 21 bp, homo sapiens
gagtttgttgctcaaactaga

SEQ ID NO: 5186 - RNA, 21 nt, RNAi
guuuguugcucaaacuagauu

SEQ ID NO: 5187 - RNA, 21 nt, RNAi
uucaaacaacgaguuugaucu

SEQ ID NO: 5188 - DNA, 21 bp, homo sapiens
gattggtcgttacagtcaagc

SEQ ID NO: 5189 - RNA, 21 nt, RNAi
uuggucguuacagucaagcuu

SEQ ID NO: 5190 - RNA, 21 nt, RNAi
uuaaccagcaaugucaguucg

SEQ ID NO: 5191 - DNA, 21 bp, homo sapiens
gaattcaagtgagatttgctg

SEQ ID NO: 5192 - RNA, 21 nt, RNAi
auucaagugagauuugcuguu

SEQ ID NO: 5193 - RNA, 21 nt, RNAi
uuuaaguucacucuaaacgac

SEQ ID NO: 5194 - DNA, 21 bp, homo sapiens
gagccagatgatgcacgtgac

SEQ ID NO: 5195 - RNA, 21 nt, RNAi
gccagaugaugcacgugacuu

SEQ ID NO: 5196 - RNA, 21 nt, RNAi
uucggucuacuacgugcacug

SEQ ID NO: 5197 - DNA, 21 bp, homo sapiens
gatgatgcacgtgactacttt

SEQ ID NO: 5198 - RNA, 21 nt, RNAi
ugaugcacgugacuacuuuuu

SEQ ID NO: 5199 - RNA, 21 nt, RNAi
uuacuacgugcacugaugaaa

SEQ ID NO: 5200 - DNA, 21 bp, homo sapiens
gatgcacgtgactactttcaa

SEQ ID NO: 5201 - RNA, 21 nt, RNAi
ugcacgugacuacuuucaauu

SEQ ID NO: 5202 - RNA, 21 nt, RNAi
uuacgugcacugaugaaaguu

SEQ ID NO: 5203 - DNA, 21 bp, homo sapiens
gactactttcaaatggccaga

SEQ ID NO: 5204 - RNA, 21 nt, RNAi
cuacuuucaaauggccagauu

SEQ ID NO: 5205 - RNA, 21 nt, RNAi
uugaugaaaguuuaccggucu

SEQ ID NO: 5206 - DNA, 21 bp, homo sapiens
gagcaaactgcaagaaatttg

SEQ ID NO: 5207 - RNA, 21 nt, RNAi
gcaaacugcaagaaauuuguu

SEQ ID NO: 5208 - RNA, 21 nt, RNAi
uucguuugacguucuuuaaac

SEQ ID NO: 5209 - DNA, 21 bp, homo sapiens
gaactgtcacaaggtaatgtc

SEQ ID NO: 5210 - RNA, 21 nt, RNAi
acugucacaagguaaugucuu

SEQ ID NO: 5211 - RNA, 21 nt, RNAi
uuugacaguguuccauuacag

SEQ ID NO: 5212 - DNA, 21 bp, homo sapiens
gaacgtggagcagtaccacta

SEQ ID NO: 5213 - RNA, 21 nt, RNAi
acguggagcaguaccacuauu

SEQ ID NO: 5214 - RNA, 21 nt, RNAi
uuugcaccucgucauggugau

SEQ ID NO: 5215 - DNA, 21 bp, homo sapiens
gagcagtaccactagaaatgc

SEQ ID NO: 5216 - RNA, 21 nt, RNAi
gcaguaccacuagaaaugcuu

SEQ ID NO: 5217 - RNA, 21 nt, RNAi
uucgucauggugaucuuuacg

SEQ ID NO: 5218 - DNA, 21 bp, homo sapiens
gaagaatttatcagcatctac

SEQ ID NO: 5219 - RNA, 21 nt, RNAi
agaauuuaucagcaucuacuu

SEQ ID NO: 5220 - RNA, 21 nt, RNAi
uuucuuaaauagucguagaug

SEQ ID NO: 5221 - DNA, 21 bp, homo sapiens
gaatttatcagcatctacggt

SEQ ID NO: 5222 - RNA, 21 nt, RNAi
auuuaucagcaucuacgguuu

SEQ ID NO: 5223 - RNA, 21 nt, RNAi
uuuaaauagucguagaugcca

SEQ ID NO: 5224 - DNA, 21 bp, homo sapiens
gaataggaacaacagttgtga

SEQ ID NO: 5225 - RNA, 21 nt, RNAi
auaggaacaacaguugugauu

SEQ ID NO: 5226 - RNA, 21 nt, RNAi
uuuauccuuguugucaacacu

SEQ ID NO: 5227 - DNA, 21 bp, homo sapiens
gaacaacagttgtgattccag

SEQ ID NO: 5228 - RNA, 21 nt, RNAi
acaacaguugugauuccaguu

SEQ ID NO: 5229 - RNA, 21 nt, RNAi
uuuguugucaacacuaagguc

SEQ ID NO: 5230 - DNA, 21 bp, homo sapiens
gattccagaggacagactact

SEQ ID NO: 5231 - RNA, 21 nt, RNAi
uuccagaggacagacuacuuu

SEQ ID NO: 5232 - RNA, 21 nt, RNAi
uuaaggucuccugucugauga

SEQ ID NO: 5233 - DNA, 21 bp, homo sapiens
gaggacagactactaaagcca

SEQ ID NO: 5234 - RNA, 21 nt, RNAi
ggacagacuacuaaagccauu

SEQ ID NO: 5235 - RNA, 21 nt, RNAi
uuccugucugaugauuucggu

SEQ ID NO: 5236 - DNA, 21 bp, homo sapiens
gacagactactaaagccaggt

SEQ ID NO: 5237 - RNA, 21 nt, RNAi
cagacuacuaaagccagguuu

SEQ ID NO: 5238 - RNA, 21 nt, RNAi
uugucugaugauuucggucca

SEQ ID NO: 5239 - DNA, 21 bp, homo sapiens
gagagaacatgccaccacaag

SEQ ID NO: 5240 - RNA, 21 nt, RNAi
gagaacaugccaccacaaguu

SEQ ID NO: 5241 - RNA, 21 nt, RNAi
uucucuuguacggugguguuc

SEQ ID NO: 5242 - DNA, 21 bp, homo sapiens
gagaacatgccaccacaagat

SEQ ID NO: 5243 - RNA, 21 nt, RNAi
gaacaugccaccacaagauuu

SEQ ID NO: 5244 - RNA, 21 nt, RNAi
uucuuguacggugguguucua

SEQ ID NO: 5245 - DNA, 21 bp, homo sapiens
gaacatgccaccacaagatgc

SEQ ID NO: 5246 - RNA, 21 nt, RNAi
acaugccaccacaagaugcuu

SEQ ID NO: 5247 - RNA, 21 nt, RNAi
uuuguacggugguguucuacg

SEQ ID NO: 5248 - DNA, 21 bp, homo sapiens
gatgcagaaataggttaccgg

SEQ ID NO: 5249 - RNA, 21 nt, RNAi
ugcagaaauagguuaccgguu

SEQ ID NO: 5250 - RNA, 21 nt, RNAi
uuacgucuuuauccaauggcc

SEQ ID NO: 5251 - DNA, 21 bp, homo sapiens
gaaataggttaccggaattca

SEQ ID NO: 5252 - RNA, 21 nt, RNAi
aauagguuaccggaauucauu

SEQ ID NO: 5253 - RNA, 21 nt, RNAi
uuuuauccaauggccuuaagu

SEQ ID NO: 5254 - DNA, 21 bp, homo sapiens
gattgtgatgtgaagacagat

SEQ ID NO: 5255 - RNA, 21 nt, RNAi
uugugaugugaagacagauuu

SEQ ID NO: 5256 - RNA, 21 nt, RNAi
uuaacacuacacuucugucua

SEQ ID NO: 5257 - DNA, 21 bp, homo sapiens
gatgtgaagacagatgattca

SEQ ID NO: 5258 - RNA, 21 nt, RNAi
ugugaagacagaugauucauu

SEQ ID NO: 5259 - RNA, 21 nt, RNAi
uuacacuucugucuacuaagu

SEQ ID NO: 5260 - DNA, 21 bp, homo sapiens
gaagacagatgattcagttgt

SEQ ID NO: 5261 - RNA, 21 nt, RNAi
agacagaugauucaguuguuu

SEQ ID NO: 5262 - RNA, 21 nt, RNAi
uuucugucuacuaagucaaca

SEQ ID NO: 5263 - DNA, 21 bp, homo sapiens
gacagatgattcagttgtacc

SEQ ID NO: 5264 - RNA, 21 nt, RNAi
cagaugauucaguuguaccuu

SEQ ID NO: 5265 - RNA, 21 nt, RNAi
uugucuacuaagucaacaugg

SEQ ID NO: 5266 - DNA, 21 bp, homo sapiens
gatgattcagttgtaccttgt

SEQ ID NO: 5267 - RNA, 21 nt, RNAi
ugauucaguuguaccuuguuu

SEQ ID NO: 5268 - RNA, 21 nt, RNAi
uuacuaagucaacauggaaca

SEQ ID NO: 5269 - DNA, 21 bp, homo sapiens
gacaaacctctagatcagaat

SEQ ID NO: 5270 - RNA, 21 nt, RNAi
caaaccucuagaucagaauuu

SEQ ID NO: 5271 - RNA, 21 nt, RNAi
uuguuuggagaucuagucuua

SEQ ID NO: 5272 - DNA, 21 bp, homo sapiens
gatcagaatgccgagatttgg

SEQ ID NO: 5273 - RNA, 21 nt, RNAi
ucagaaugccgagauuugguu

SEQ ID NO: 5274 - RNA, 21 nt, RNAi
uuagucuuacggcucuaaacc

SEQ ID NO: 5275 - DNA, 21 bp, homo sapiens
gaatgccgagatttggttgtg

SEQ ID NO: 5276 - RNA, 21 nt, RNAi
augccgagauuugguuguguu

SEQ ID NO: 5277 - RNA, 21 nt, RNAi
uuuacggcucuaaaccaacac

SEQ ID NO: 5278 - DNA, 21 bp, homo sapiens
gagatttggttgtgcctggat

SEQ ID NO: 5279 - RNA, 21 nt, RNAi
gauuugguugugccuggauuu

SEQ ID NO: 5280 - RNA, 21 nt, RNAi
uucuaaaccaacacggaccua

SEQ ID NO: 5281 - DNA, 21 bp, homo sapiens
gatttggttgtgcctggatct

SEQ ID NO: 5282 - RNA, 21 nt, RNAi
uuugguugugccuggaucuuu

SEQ ID NO: 5283 - RNA, 21 nt, RNAi
uuaaaccaacacggaccuaga

SEQ ID NO: 5284 - DNA, 21 bp, homo sapiens
gatctaaaccaagtggaaatg

SEQ ID NO: 5285 - RNA, 21 nt, RNAi
ucuaaaccaaguggaaauguu

SEQ ID NO: 5286 - RNA, 21 nt, RNAi
uuagauuugguucaccuuuac

SEQ ID NO: 5287 - DNA, 21 bp, homo sapiens
gaacctctggtgtcagatgaa

SEQ ID NO: 5288 - RNA, 21 nt, RNAi
accucuggugucagaugaauu

SEQ ID NO: 5289 - RNA, 21 nt, RNAi
uuuggagaccacagucuacuu

SEQ ID NO: 5290 - DNA, 21 bp, homo sapiens
gaatcaagtcttctagctaaa

SEQ ID NO: 5291 - RNA, 21 nt, RNAi
aucaagucuucuagcuaaauu

SEQ ID NO: 5292 - RNA, 21 nt, RNAi
uuuaguucagaagaucgauuu

SEQ ID NO: 5293 - DNA, 21 bp, homo sapiens
gagtatcaagaaccagaggtt

SEQ ID NO: 5294 - RNA, 21 nt, RNAi
guaucaagaaccagagguuuu

SEQ ID NO: 5295 - RNA, 21 nt, RNAi
uucauaguucuuggucuccaa

SEQ ID NO: 5296 - DNA, 21 bp, homo sapiens
gaaccagaggttccagagagt

SEQ ID NO: 5297 - RNA, 21 nt, RNAi
accagagguuccagagaguuu

SEQ ID NO: 5298 - RNA, 21 nt, RNAi
uuuggucuccaaggucucuca

SEQ ID NO: 5299 - DNA, 21 bp, homo sapiens
gaggttccagagagtaaccag

SEQ ID NO: 5300 - RNA, 21 nt, RNAi
gguuccagagaguaaccaguu

SEQ ID NO: 5301 - RNA, 21 nt, RNAi
uuccaaggucucucauugguc

SEQ ID NO: 5302 - DNA, 21 bp, homo sapiens
gagagtaaccagaaacagtgg

SEQ ID NO: 5303 - RNA, 21 nt, RNAi
gaguaaccagaaacagugguu

SEQ ID NO: 5304 - RNA, 21 nt, RNAi
uucucauuggucuuugucacc

SEQ ID NO: 5305 - DNA, 21 bp, homo sapiens
gagtaaccagaaacagtggca

SEQ ID NO: 5306 - RNA, 21 nt, RNAi
guaaccagaaacaguggcauu

SEQ ID NO: 5307 - RNA, 21 nt, RNAi
uucauuggucuuugucaccgu

SEQ ID NO: 5308 - DNA, 21 bp, homo sapiens
gaaacagtggcaagctaagag

SEQ ID NO: 5309 - RNA, 21 nt, RNAi
aacaguggcaagcuaagaguu

SEQ ID NO: 5310 - RNA, 21 nt, RNAi
uuuugucaccguucgauucuc

SEQ ID NO: 5311 - DNA, 21 bp, homo sapiens
gagaaagtcagagtgtattaa

SEQ ID NO: 5312 - RNA, 21 nt, RNAi
gaaagucagaguguauuaauu

SEQ ID NO: 5313 - RNA, 21 nt, RNAi
uucuuucagucucacauaauu

SEQ ID NO: 5314 - DNA, 21 bp, homo sapiens
gaaagtcagagtgtattaacc

SEQ ID NO: 5315 - RNA, 21 nt, RNAi
aagucagaguguauuaaccuu

SEQ ID NO: 5316 - RNA, 21 nt, RNAi
uuuucagucucacauaauugg

SEQ ID NO: 5317 - DNA, 21 bp, homo sapiens
gagtgtattaaccagaatcct

SEQ ID NO: 5318 - RNA, 21 nt, RNAi
guguauuaaccagaauccuuu

SEQ ID NO: 5319 - RNA, 21 nt, RNAi
uucacauaauuggucuuagga

SEQ ID NO: 5320 - DNA, 21 bp, homo sapiens
gaatcctgctgcatcttcaaa

SEQ ID NO: 5321 - RNA, 21 nt, RNAi
auccugcugcaucuucaaauu

SEQ ID NO: 5322 - RNA, 21 nt, RNAi
uuuaggacgacguagaaguuu

SEQ ID NO: 5323 - DNA, 21 bp, homo sapiens
gacaccaagcagcaatacctt

SEQ ID NO: 5324 - RNA, 21 nt, RNAi
caccaagcagcaauaccuuuu

SEQ ID NO: 5325 - RNA, 21 nt, RNAi
uugugguucgucguuauggaa

SEQ ID NO: 5326 - DNA, 21 bp, homo sapiens
gaactccagttgtaaagaatg

SEQ ID NO: 5327 - RNA, 21 nt, RNAi
acuccaguuguaaagaauguu

SEQ ID NO: 5328 - RNA, 21 nt, RNAi
uuugaggucaacauuucuuac

SEQ ID NO: 5329 - DNA, 21 bp, homo sapiens
gaatgactttccacctgcttg

SEQ ID NO: 5330 - RNA, 21 nt, RNAi
augacuuuccaccugcuuguu

SEQ ID NO: 5331 - RNA, 21 nt, RNAi
uuuacugaaagguggacgaac

SEQ ID NO: 5332 - DNA, 21 bp, homo sapiens
gactttccacctgcttgtcag

SEQ ID NO: 5333 - RNA, 21 nt, RNAi
cuuuccaccugcuugucaguu

SEQ ID NO: 5334 - RNA, 21 nt, RNAi
uugaaagguggacgaacaguc

SEQ ID NO: 5335 - DNA, 21 bp, homo sapiens
gaatgcatttcggttaaagga

SEQ ID NO: 5336 - RNA, 21 nt, RNAi
augcauuucgguuaaaggauu

SEQ ID NO: 5337 - RNA, 21 nt, RNAi
uuuacguaaagccaauuuccu

SEQ ID NO: 5338 - DNA, 21 bp, homo sapiens
gataggaagtggaggttcaag

SEQ ID NO: 5339 - RNA, 21 nt, RNAi
uaggaaguggagguucaaguu

SEQ ID NO: 5340 - RNA, 21 nt, RNAi
uuauccuucaccuccaaguuc

SEQ ID NO: 5341 - DNA, 21 bp, homo sapiens
gaagtggaggttcaagcaagg

SEQ ID NO: 5342 - RNA, 21 nt, RNAi
aguggagguucaagcaagguu

SEQ ID NO: 5343 - RNA, 21 nt, RNAi
uuucaccuccaaguucguucc

SEQ ID NO: 5344 - DNA, 21 bp, homo sapiens
gaggttcaagcaaggtatttc

SEQ ID NO: 5345 - RNA, 21 nt, RNAi
gguucaagcaagguauuucuu

SEQ ID NO: 5346 - RNA, 21 nt, RNAi
uuccaaguucguuccauaaag

SEQ ID NO: 5347 - DNA, 21 bp, homo sapiens
gaacttagaagaagcagataa

SEQ ID NO: 5348 - RNA, 21 nt, RNAi
acuuagaagaagcagauaauu

SEQ ID NO: 5349 - RNA, 21 nt, RNAi
uuugaaucuucuucgucuauu

SEQ ID NO: 5350 - DNA, 21 bp, homo sapiens
gaagaagcagataaccaaact

SEQ ID NO: 5351 - RNA, 21 nt, RNAi
agaagcagauaaccaaacuuu

SEQ ID NO: 5352 - RNA, 21 nt, RNAi
uuucuucgucuauugguuuga

SEQ ID NO: 5353 - DNA, 21 bp, homo sapiens
gaagcagataaccaaactctt

SEQ ID NO: 5354 - RNA, 21 nt, RNAi
agcagauaaccaaacucuuuu

SEQ ID NO: 5355 - RNA, 21 nt, RNAi
uuucgucuauugguuugagaa

SEQ ID NO: 5356 - DNA, 21 bp, homo sapiens
gataaccaaactcttgatagt

SEQ ID NO: 5357 - RNA, 21 nt, RNAi
uaaccaaacucuugauaguuu

SEQ ID NO: 5358 - RNA, 21 nt, RNAi
uuauugguuugagaacuauca

SEQ ID NO: 5359 - DNA, 21 bp, homo sapiens
gatagttaccggaacgaaata

SEQ ID NO: 5360 - RNA, 21 nt, RNAi
uaguuaccggaacgaaauauu

SEQ ID NO: 5361 - RNA, 21 nt, RNAi
uuaucaauggccuugcuuuau

SEQ ID NO: 5362 - DNA, 21 bp, homo sapiens
gaataaactacaacaacacag

SEQ ID NO: 5363 - RNA, 21 nt, RNAi
auaaacuacaacaacacaguu

SEQ ID NO: 5364 - RNA, 21 nt, RNAi
uuuauuugauguuguuguguc

SEQ ID NO: 5365 - DNA, 21 bp, homo sapiens
gataagatcatccgactttat

SEQ ID NO: 5366 - RNA, 21 nt, RNAi
uaagaucauccgacuuuauuu

SEQ ID NO: 5367 - RNA, 21 nt, RNAi
uuauucuaguaggcugaaaua

SEQ ID NO: 5368 - DNA, 21 bp, homo sapiens
gatcatccgactttatgatta

SEQ ID NO: 5369 - RNA, 21 nt, RNAi
ucauccgacuuuaugauuauu

SEQ ID NO: 5370 - RNA, 21 nt, RNAi
uuaguaggcugaaauacuaau

SEQ ID NO: 5371 - DNA, 21 bp, homo sapiens
gattatgaaatcacggaccag

SEQ ID NO: 5372 - RNA, 21 nt, RNAi
uuaugaaaucacggaccaguu

SEQ ID NO: 5373 - RNA, 21 nt, RNAi
uuaauacuuuagugccugguc

SEQ ID NO: 5374 - DNA, 21 bp, homo sapiens
gaaatcacggaccagtacatc

SEQ ID NO: 5375 - RNA, 21 nt, RNAi
aaucacggaccaguacaucuu

SEQ ID NO: 5376 - RNA, 21 nt, RNAi
uuuuagugccuggucauguag

SEQ ID NO: 5377 - DNA, 21 bp, homo sapiens
gaccagtacatctacatggta

SEQ ID NO: 5378 - RNA, 21 nt, RNAi
ccaguacaucuacaugguauu

SEQ ID NO: 5379 - RNA, 21 nt, RNAi
uuggucauguagauguaccau

SEQ ID NO: 5380 - DNA, 21 bp, homo sapiens
gagtgtggaaatattgatctt

SEQ ID NO: 5381 - RNA, 21 nt, RNAi
guguggaaauauugaucuuuu

SEQ ID NO: 5382 - RNA, 21 nt, RNAi
uucacaccuuuauaacuagaa

SEQ ID NO: 5383 - DNA, 21 bp, homo sapiens
gaacgcaagagttactggaaa

SEQ ID NO: 5384 - RNA, 21 nt, RNAi
acgcaagaguuacuggaaauu

SEQ ID NO: 5385 - RNA, 21 nt, RNAi
uuugcguucucaaugaccuuu

SEQ ID NO: 5386 - DNA, 21 bp, homo sapiens
gaggcagttcacacaatccat

SEQ ID NO: 5387 - RNA, 21 nt, RNAi
ggcaguucacacaauccauuu

SEQ ID NO: 5388 - RNA, 21 nt, RNAi
uuccgucaaguguguuaggua

SEQ ID NO: 5389 - DNA, 21 bp, homo sapiens
gatcttaaaccagctaacttt

SEQ ID NO: 5390 - RNA, 21 nt, RNAi
ucuuaaaccagcuaacuuuuu

SEQ ID NO: 5391 - RNA, 21 nt, RNAi
uuagaauuuggucgauugaaa

SEQ ID NO: 5392 - DNA, 21 bp, homo sapiens
gatagttgatggaatgctaaa

SEQ ID NO: 5393 - RNA, 21 nt, RNAi
uaguugauggaaugcuaaauu

SEQ ID NO: 5394 - RNA, 21 nt, RNAi
uuaucaacuaccuuacgauuu

SEQ ID NO: 5395 - DNA, 21 bp, homo sapiens
gatggaatgctaaagctaatt

SEQ ID NO: 5396 - RNA, 21 nt, RNAi
uggaaugcuaaagcuaauuuu

SEQ ID NO: 5397 - RNA, 21 nt, RNAi
uuaccuuacgauuucgauuaa

SEQ ID NO: 5398 - DNA, 21 bp, homo sapiens
gattgcaaaccaaatgcaacc

SEQ ID NO: 5399 - RNA, 21 nt, RNAi
uugcaaaccaaaugcaaccuu

SEQ ID NO: 5400 - RNA, 21 nt, RNAi
uuaacguuugguuuacguugg

SEQ ID NO: 5401 - DNA, 21 bp, homo sapiens
gattctcaggttggcacagtt

SEQ ID NO: 5402 - RNA, 21 nt, RNAi
uucucagguuggcacaguuuu

SEQ ID NO: 5403 - RNA, 21 nt, RNAi
uuaagaguccaaccgugucaa

SEQ ID NO: 5404 - DNA, 21 bp, homo sapiens
gaagcaatcaaagatatgtct

SEQ ID NO: 5405 - RNA, 21 nt, RNAi
agcaaucaaagauaugucuuu

SEQ ID NO: 5406 - RNA, 21 nt, RNAi
uuucguuaguuucuauacaga

SEQ ID NO: 5407 - DNA, 21 bp, homo sapiens
gatatgtcttcctccagagag

SEQ ID NO: 5408 - RNA, 21 nt, RNAi
uaugucuuccuccagagaguu

SEQ ID NO: 5409 - RNA, 21 nt, RNAi
uuauacagaaggaggucucuc

SEQ ID NO: 5410 - DNA, 21 bp, homo sapiens
gatgtttggtccttaggatgt

SEQ ID NO: 5411 - RNA, 21 nt, RNAi
uguuugguccuuaggauguuu

SEQ ID NO: 5412 - RNA, 21 nt, RNAi
uuacaaaccaggaauccuaca

SEQ ID NO: 5413 - DNA, 21 bp, homo sapiens
gatattccagagaaagatctt

SEQ ID NO: 5414 - RNA, 21 nt, RNAi
uauuccagagaaagaucuuuu

SEQ ID NO: 5415 - RNA, 21 nt, RNAi
uuauaaggucucuuucuagaa

SEQ ID NO: 5416 - DNA, 21 bp, homo sapiens
gagaaagatcttcaagatgtg

SEQ ID NO: 5417 - RNA, 21 nt, RNAi
gaaagaucuucaagauguguu

SEQ ID NO: 5418 - RNA, 21 nt, RNAi
uucuuucuagaaguucuacac

SEQ ID NO: 5419 - DNA, 21 bp, homo sapiens
gaaagatcttcaagatgtgtt

SEQ ID NO: 5420 - RNA, 21 nt, RNAi
aagaucuucaagauguguuuu

SEQ ID NO: 5421 - RNA, 21 nt, RNAi
uuuucuagaaguucuacacaa

SEQ ID NO: 5422 - DNA, 21 bp, homo sapiens
gatcttcaagatgtgttaaag

SEQ ID NO: 5423 - RNA, 21 nt, RNAi
ucuucaagauguguuaaaguu

SEQ ID NO: 5424 - RNA, 21 nt, RNAi
uuagaaguucuacacaauuuc

SEQ ID NO: 5425 - DNA, 21 bp, homo sapiens
gaggatatccattcctgagct

SEQ ID NO: 5426 - RNA, 21 nt, RNAi
ggauauccauuccugagcuuu

SEQ ID NO: 5427 - RNA, 21 nt, RNAi
uuccuauagguaaggacucga

SEQ ID NO: 5428 - DNA, 21 bp, homo sapiens
gatatccattcctgagctcct

SEQ ID NO: 5429 - RNA, 21 nt, RNAi
uauccauuccugagcuccuuu

SEQ ID NO: 5430 - RNA, 21 nt, RNAi
uuauagguaaggacucgagga

SEQ ID NO: 5431 - DNA, 21 bp, homo sapiens
gagctcctggctcatccatat

SEQ ID NO: 5432 - RNA, 21 nt, RNAi
gcuccuggcucauccauauuu

SEQ ID NO: 5433 - RNA, 21 nt, RNAi
uucgaggaccgaguagguaua

SEQ ID NO: 5434 - DNA, 21 bp, homo sapiens
gaaccactgaagaaatgaaat

SEQ ID NO: 5435 - RNA, 21 nt, RNAi
accacugaagaaaugaaauuu

SEQ ID NO: 5436 - RNA, 21 nt, RNAi
uuuggugacuucuuuacuuua

SEQ ID NO: 5437 - DNA, 21 bp, homo sapiens
gaacactatagtggtggtgaa

SEQ ID NO: 5438 - RNA, 21 nt, RNAi
acacuauagugguggugaauu

SEQ ID NO: 5439 - RNA, 21 nt, RNAi
uuugugauaucaccaccacuu

SEQ ID NO: 5440 - DNA, 21 bp, homo sapiens
gaaagtcataattcttcatcc

SEQ ID NO: 5441 - RNA, 21 nt, RNAi
aagucauaauucuucauccuu

SEQ ID NO: 5442 - RNA, 21 nt, RNAi
uuuucaguauuaagaaguagg

SEQ ID NO: 5443 - DNA, 21 bp, homo sapiens
gatttgcagttattcgtaatg

SEQ ID NO: 5444 - RNA, 21 nt, RNAi
uuugcaguuauucguaauguu

SEQ ID NO: 5445 - RNA, 21 nt, RNAi
uuaaacgucaauaagcauuac

SEQ ID NO: 5446 - DNA, 21 bp, homo sapiens
gactgttatactcttgaatcc

SEQ ID NO: 5447 - RNA, 21 nt, RNAi
cuguuauacucuugaauccuu

SEQ ID NO: 5448 - RNA, 21 nt, RNAi
uugacaauaugagaacuuagg

SEQ ID NO: 5449 - DNA, 21 bp, homo sapiens
gaagacaacatcactctgaag

SEQ ID NO: 5450 - RNA, 21 nt, RNAi
agacaacaucacucugaaguu

SEQ ID NO: 5451 - RNA, 21 nt, RNAi
uuucuguuguagugagacuuc

SEQ ID NO: 5452 - DNA, 21 bp, homo sapiens
gacaacatcactctgaagtgt

SEQ ID NO: 5453 - RNA, 21 nt, RNAi
caacaucacucugaaguguuu

SEQ ID NO: 5454 - RNA, 21 nt, RNAi
uuguuguagugagacuucaca

SEQ ID NO: 5455 - DNA, 21 bp, homo sapiens
taggattacagccgtgaaact

SEQ ID NO: 5456 - RNA, 21 nt, RNAi
ggauuacagccgugaaacuuu

SEQ ID NO: 5457 - RNA, 21 nt, RNAi
uuccuaaugucggcacuuuga

SEQ ID NO: 5458 - DNA, 21 bp, homo sapiens
tacagccgtgaaactgtgcct

SEQ ID NO: 5459 - RNA, 21 nt, RNAi
cagccgugaaacugugccuuu

SEQ ID NO: 5460 - RNA, 21 nt, RNAi
uugucggcacuuugacacgga

SEQ ID NO: 5461 - DNA, 21 bp, homo sapiens
tataacctccacctcctggtt

SEQ ID NO: 5462 - RNA, 21 nt, RNAi
uaaccuccaccuccugguuuu

SEQ ID NO: 5463 - RNA, 21 nt, RNAi
uuauuggagguggaggaccaa

SEQ ID NO: 5464 - DNA, 21 bp, homo sapiens
taacctccacctcctggtttc

SEQ ID NO: 5465 - RNA, 21 nt, RNAi
accuccaccuccugguuucuu

SEQ ID NO: 5466 - RNA, 21 nt, RNAi
uuuggagguggaggaccaaag

SEQ ID NO: 5467 - DNA, 21 bp, homo sapiens
tagcctcctgagtagctgtga

SEQ ID NO: 5468 - RNA, 21 nt, RNAi
gccuccugaguagcugugauu

SEQ ID NO: 5469 - RNA, 21 nt, RNAi
uucggaggacucaucgacacu

SEQ ID NO: 5470 - DNA, 21 bp, homo sapiens
tagctgtgattacaggcgtgc

SEQ ID NO: 5471 - RNA, 21 nt, RNAi
gcugugauuacaggcgugcuu

SEQ ID NO: 5472 - RNA, 21 nt, RNAi
uucgacacuaauguccgcacg

SEQ ID NO: 5473 - DNA, 21 bp, homo sapiens
tacaggcgtgcaccaccacac

SEQ ID NO: 5474 - RNA, 21 nt, RNAi
caggcgugcaccaccacacuu

SEQ ID NO: 5475 - RNA, 21 nt, RNAi
uuguccgcacgugguggugug

SEQ ID NO: 5476 - DNA, 21 bp, homo sapiens
tacaggtgtgagtcaccatgc

SEQ ID NO: 5477 - RNA, 21 nt, RNAi
caggugugagucaccaugcuu

SEQ ID NO: 5478 - RNA, 21 nt, RNAi
uuguccacacucagugguacg

SEQ ID NO: 5479 - DNA, 21 bp, homo sapiens
taggcggtacaataatcctta

SEQ ID NO: 5480 - RNA, 21 nt, RNAi
ggcgguacaauaauccuuauu

SEQ ID NO: 5481 - RNA, 21 nt, RNAi
uuccgccauguuauuaggaau

SEQ ID NO: 5482 - DNA, 21 bp, homo sapiens
taagactgtacagacttccta

SEQ ID NO: 5483 - RNA, 21 nt, RNAi
agacuguacagacuuccuauu

SEQ ID NO: 5484 - RNA, 21 nt, RNAi
uuucugacaugucugaaggau

SEQ ID NO: 5485 - DNA, 21 bp, homo sapiens
tagaaatggaatccgaggatt

SEQ ID NO: 5486 - RNA, 21 nt, RNAi
gaaauggaauccgaggauuuu

SEQ ID NO: 5487 - RNA, 21 nt, RNAi
uucuuuaccuuaggcuccuaa

SEQ ID NO: 5488 - DNA, 21 bp, homo sapiens
taagtggcagagaattgacaa

SEQ ID NO: 5489 - RNA, 21 nt, RNAi
aguggcagagaauugacaauu

SEQ ID NO: 5490 - RNA, 21 nt, RNAi
uuucaccgucucuuaacuguu

SEQ ID NO: 5491 - DNA, 21 bp, homo sapiens
taatgaacaaagtgagagaca

SEQ ID NO: 5492 - RNA, 21 nt, RNAi
augaacaaagugagagacauu

SEQ ID NO: 5493 - RNA, 21 nt, RNAi
uuuacuuguuucacucucugu

SEQ ID NO: 5494 - DNA, 21 bp, homo sapiens
tactgatgaactaagcttgaa

SEQ ID NO: 5495 - RNA, 21 nt, RNAi
cugaugaacuaagcuugaauu

SEQ ID NO: 5496 - RNA, 21 nt, RNAi
uugacuacuugauucgaacuu

SEQ ID NO: 5497 - DNA, 21 bp, homo sapiens
taaccaaattatgatgatggc

SEQ ID NO: 5498 - RNA, 21 nt, RNAi
accaaauuaugaugauggcuu

SEQ ID NO: 5499 - RNA, 21 nt, RNAi
uuugguuuaauacuacuaccg

SEQ ID NO: 5500 - DNA, 21 bp, homo sapiens
taaattgattggtcgttacag

SEQ ID NO: 5501 - RNA, 21 nt, RNAi
aauugauuggucguuacaguu

SEQ ID NO: 5502 - RNA, 21 nt, RNAi
uuuuaacuaaccagcaauguc

SEQ ID NO: 5503 - DNA, 21 bp, homo sapiens
tacagtcaagcaattgaagcg

SEQ ID NO: 5504 - RNA, 21 nt, RNAi
cagucaagcaauugaagcguu

SEQ ID NO: 5505 - RNA, 21 nt, RNAi
uugucaguucguuaacuucgc

SEQ ID NO: 5506 - DNA, 21 bp, homo sapiens
tagaattcaagtgagatttgc

SEQ ID NO: 5507 - RNA, 21 nt, RNAi
gaauucaagugagauuugcuu

SEQ ID NO: 5508 - RNA, 21 nt, RNAi
uucuuaaguucacucuaaacg

SEQ ID NO: 5509 - DNA, 21 bp, homo sapiens
tattcaagagccagatgatgc

SEQ ID NO: 5510 - RNA, 21 nt, RNAi
uucaagagccagaugaugcuu

SEQ ID NO: 5511 - RNA, 21 nt, RNAi
uuaaguucucggucuacuacg

SEQ ID NO: 5512 - DNA, 21 bp, homo sapiens
tactttcaaatggccagagca

SEQ ID NO: 5513 - RNA, 21 nt, RNAi
cuuucaaauggccagagcauu

SEQ ID NO: 5514 - RNA, 21 nt, RNAi
uugaaaguuuaccggucucgu

SEQ ID NO: 5515 - DNA, 21 bp, homo sapiens
tagaacgtggagcagtaccac

SEQ ID NO: 5516 - RNA, 21 nt, RNAi
gaacguggagcaguaccacuu

SEQ ID NO: 5517 - RNA, 21 nt, RNAi
uucuugcaccucgucauggug

SEQ ID NO: 5518 - DNA, 21 bp, homo sapiens
taccactagaaatgctggaaa

SEQ ID NO: 5519 - RNA, 21 nt, RNAi
ccacuagaaaugcuggaaauu

SEQ ID NO: 5520 - RNA, 21 nt, RNAi
uuggugaucuuuacgaccuuu

SEQ ID NO: 5521 - DNA, 21 bp, homo sapiens
tatcagcatctacggtattaa

SEQ ID NO: 5522 - RNA, 21 nt, RNAi
ucagcaucuacgguauuaauu

SEQ ID NO: 5523 - RNA, 21 nt, RNAi
uuagucguagaugccauaauu

SEQ ID NO: 5524 - DNA, 21 bp, homo sapiens
tacagaataggaacaacagtt

SEQ ID NO: 5525 - RNA, 21 nt, RNAi
cagaauaggaacaacaguuuu

SEQ ID NO: 5526 - RNA, 21 nt, RNAi
uugucuuauccuuguugucaa

SEQ ID NO: 5527 - DNA, 21 bp, homo sapiens
taggaacaacagttgtgattc

SEQ ID NO: 5528 - RNA, 21 nt, RNAi
ggaacaacaguugugauucuu

SEQ ID NO: 5529 - RNA, 21 nt, RNAi
uuccuuguugucaacacuaag

SEQ ID NO: 5530 - DNA, 21 bp, homo sapiens
tatatggagagaacatgccac

SEQ ID NO: 5531 - RNA, 21 nt, RNAi
uauggagagaacaugccacuu

SEQ ID NO: 5532 - RNA, 21 nt, RNAi
uuauaccucucuuguacggug

SEQ ID NO: 5533 - DNA, 21 bp, homo sapiens
tatggagagaacatgccacca

SEQ ID NO: 5534 - RNA, 21 nt, RNAi
uggagagaacaugccaccauu

SEQ ID NO: 5535 - RNA, 21 nt, RNAi
uuaccucucuuguacgguggu

SEQ ID NO: 5536 - DNA, 21 bp, homo sapiens
taggttaccggaattcattga

SEQ ID NO: 5537 - RNA, 21 nt, RNAi
gguuaccggaauucauugauu

SEQ ID NO: 5538 - RNA, 21 nt, RNAi
uuccaauggccuuaaguaacu

SEQ ID NO: 5539 - DNA, 21 bp, homo sapiens
taccggaattcattgagacaa

SEQ ID NO: 5540 - RNA, 21 nt, RNAi
ccggaauucauugagacaauu

SEQ ID NO: 5541 - RNA, 21 nt, RNAi
uuggccuuaaguaacucuguu

SEQ ID NO: 5542 - DNA, 21 bp, homo sapiens
tagatcagaatgccgagattt

SEQ ID NO: 5543 - RNA, 21 nt, RNAi
gaucagaaugccgagauuuuu

SEQ ID NO: 5544 - RNA, 21 nt, RNAi
uucuagucuuacggcucuaaa

SEQ ID NO: 5545 - DNA, 21 bp, homo sapiens
taaaccaagtggaaatgattc

SEQ ID NO: 5546 - RNA, 21 nt, RNAi
aaccaaguggaaaugauucuu

SEQ ID NO: 5547 - RNA, 21 nt, RNAi
uuuugguucaccuuuacuaag

SEQ ID NO: 5548 - DNA, 21 bp, homo sapiens
tagtcatttcaaggaacctct

SEQ ID NO: 5549 - RNA, 21 nt, RNAi
gucauuucaaggaaccucuuu

SEQ ID NO: 5550 - RNA, 21 nt, RNAi
uucaguaaaguuccuuggaga

SEQ ID NO: 5551 - DNA, 21 bp, homo sapiens
taaagagtatcaagaaccaga

SEQ ID NO: 5552 - RNA, 21 nt, RNAi
aagaguaucaagaaccagauu

SEQ ID NO: 5553 - RNA, 21 nt, RNAi
uuuucucauaguucuuggucu

SEQ ID NO: 5554 - DNA, 21 bp, homo sapiens
tatcaagaaccagaggttcca

SEQ ID NO: 5555 - RNA, 21 nt, RNAi
ucaagaaccagagguuccauu

SEQ ID NO: 5556 - RNA, 21 nt, RNAi
uuaguucuuggucuccaaggu

SEQ ID NO: 5557 - DNA, 21 bp, homo sapiens
taaccagaaacagtggcaagc

SEQ ID NO: 5558 - RNA, 21 nt, RNAi
accagaaacaguggcaagcuu

SEQ ID NO: 5559 - RNA, 21 nt, RNAi
uuuggucuuugucaccguucg

SEQ ID NO: 5560 - DNA, 21 bp, homo sapiens
taagagaaagtcagagtgtat

SEQ ID NO: 5561 - RNA, 21 nt, RNAi
agagaaagucagaguguauuu

SEQ ID NO: 5562 - RNA, 21 nt, RNAi
uuucucuuucagucucacaua

SEQ ID NO: 5563 - DNA, 21 bp, homo sapiens
tattaaccagaatcctgctgc

SEQ ID NO: 5564 - RNA, 21 nt, RNAi
uuaaccagaauccugcugcuu

SEQ ID NO: 5565 - RNA, 21 nt, RNAi
uuaauuggucuuaggacgacg

SEQ ID NO: 5566 - DNA, 21 bp, homo sapiens
taaccagaatcctgctgcatc

SEQ ID NO: 5567 - RNA, 21 nt, RNAi
accagaauccugcugcaucuu

SEQ ID NO: 5568 - RNA, 21 nt, RNAi
uuuggucuuaggacgacguag

SEQ ID NO: 5569 - DNA, 21 bp, homo sapiens
taatacagagcagaaacatac

SEQ ID NO: 5570 - RNA, 21 nt, RNAi
auacagagcagaaacauacuu

SEQ ID NO: 5571 - RNA, 21 nt, RNAi
uuuaugucucgucuuuguaug

SEQ ID NO: 5572 - DNA, 21 bp, homo sapiens
tacagagcagaaacataccac

SEQ ID NO: 5573 - RNA, 21 nt, RNAi
cagagcagaaacauaccacuu

SEQ ID NO: 5574 - RNA, 21 nt, RNAi
uugucucgucuuuguauggug

SEQ ID NO: 5575 - DNA, 21 bp, homo sapiens
tatttgtaagacaccaagcag

SEQ ID NO: 5576 - RNA, 21 nt, RNAi
uuuguaagacaccaagcaguu

SEQ ID NO: 5577 - RNA, 21 nt, RNAi
uuaaacauucugugguucguc

SEQ ID NO: 5578 - DNA, 21 bp, homo sapiens
taagacaccaagcagcaatac

SEQ ID NO: 5579 - RNA, 21 nt, RNAi
agacaccaagcagcaauacuu

SEQ ID NO: 5580 - RNA, 21 nt, RNAi
uuucugugguucgucguuaug

SEQ ID NO: 5581 - DNA, 21 bp, homo sapiens
taccttggatgattacatgag

SEQ ID NO: 5582 - RNA, 21 nt, RNAi
ccuuggaugauuacaugaguu

SEQ ID NO: 5583 - RNA, 21 nt, RNAi
uuggaaccuacuaauguacuc

SEQ ID NO: 5584 - DNA, 21 bp, homo sapiens
tagaactccagttgtaaagaa

SEQ ID NO: 5585 - RNA, 21 nt, RNAi
gaacuccaguuguaaagaauu

SEQ ID NO: 5586 - RNA, 21 nt, RNAi
uucuugaggucaacauuucuu

SEQ ID NO: 5587 - DNA, 21 bp, homo sapiens
taaagaatgactttccacctg

SEQ ID NO: 5588 - RNA, 21 nt, RNAi
aagaaugacuuuccaccuguu

SEQ ID NO: 5589 - RNA, 21 nt, RNAi
uuuucuuacugaaagguggac

SEQ ID NO: 5590 - DNA, 21 bp, homo sapiens
tatggccaacctgcctgtttc

SEQ ID NO: 5591 - RNA, 21 nt, RNAi
uggccaaccugccuguuucuu

SEQ ID NO: 5592 - RNA, 21 nt, RNAi
uuaccgguuggacggacaaag

SEQ ID NO: 5593 - DNA, 21 bp, homo sapiens
tacttgccactccacttcaaa

SEQ ID NO: 5594 - RNA, 21 nt, RNAi
cuugccacuccacuucaaauu

SEQ ID NO: 5595 - RNA, 21 nt, RNAi
uugaacggugaggugaaguuu

SEQ ID NO: 5596 - DNA, 21 bp, homo sapiens
tagcatcttcttcagcaaatg

SEQ ID NO: 5597 - RNA, 21 nt, RNAi
gcaucuucuucagcaaauguu

SEQ ID NO: 5598 - RNA, 21 nt, RNAi
uucguagaagaagucguuuac

SEQ ID NO: 5599 - DNA, 21 bp, homo sapiens
tattaaagcagataggaagtg

SEQ ID NO: 5600 - RNA, 21 nt, RNAi
uuaaagcagauaggaaguguu

SEQ ID NO: 5601 - RNA, 21 nt, RNAi
uuaauuucgucuauccuucac

SEQ ID NO: 5602 - DNA, 21 bp, homo sapiens
taaagcagataggaagtggag

SEQ ID NO: 5603 - RNA, 21 nt, RNAi
aagcagauaggaaguggaguu

SEQ ID NO: 5604 - RNA, 21 nt, RNAi
uuuucgucuauccuucaccuc

SEQ ID NO: 5605 - DNA, 21 bp, homo sapiens
taggaagtggaggttcaagca

SEQ ID NO: 5606 - RNA, 21 nt, RNAi
ggaaguggagguucaagcauu

SEQ ID NO: 5607 - RNA, 21 nt, RNAi
uuccuucaccuccaaguucgu

SEQ ID NO: 5608 - DNA, 21 bp, homo sapiens
tatgtgaacttagaagaagca

SEQ ID NO: 5609 - RNA, 21 nt, RNAi
ugugaacuuagaagaagcauu

SEQ ID NO: 5610 - RNA, 21 nt, RNAi
uuacacuugaaucuucuucgu

SEQ ID NO: 5611 - DNA, 21 bp, homo sapiens
tagaagaagcagataaccaaa

SEQ ID NO: 5612 - RNA, 21 nt, RNAi
gaagaagcagauaaccaaauu

SEQ ID NO: 5613 - RNA, 21 nt, RNAi
uucuucuucgucuauugguuu

SEQ ID NO: 5614 - DNA, 21 bp, homo sapiens
tagttaccggaacgaaatagc

SEQ ID NO: 5615 - RNA, 21 nt, RNAi
guuaccggaacgaaauagcuu

SEQ ID NO: 5616 - RNA, 21 nt, RNAi
uucaauggccuugcuuuaucg

SEQ ID NO: 5617 - DNA, 21 bp, homo sapiens
taccggaacgaaatagcttat

SEQ ID NO: 5618 - RNA, 21 nt, RNAi
ccggaacgaaauagcuuauuu

SEQ ID NO: 5619 - RNA, 21 nt, RNAi
uuggccuugcuuuaucgaaua

SEQ ID NO: 5620 - DNA, 21 bp, homo sapiens
taaactacaacaacacagtga

SEQ ID NO: 5621 - RNA, 21 nt, RNAi
aacuacaacaacacagugauu

SEQ ID NO: 5622 - RNA, 21 nt, RNAi
uuuugauguuguugugucacu

SEQ ID NO: 5623 - DNA, 21 bp, homo sapiens
tacaacaacacagtgataaga

SEQ ID NO: 5624 - RNA, 21 nt, RNAi
caacaacacagugauaagauu

SEQ ID NO: 5625 - RNA, 21 nt, RNAi
uuguuguugugucacuauucu

SEQ ID NO: 5626 - DNA, 21 bp, homo sapiens
taagatcatccgactttatga

SEQ ID NO: 5627 - RNA, 21 nt, RNAi
agaucauccgacuuuaugauu

SEQ ID NO: 5628 - RNA, 21 nt, RNAi
uuucuaguaggcugaaauacu

SEQ ID NO: 5629 - DNA, 21 bp, homo sapiens
tatgattatgaaatcacggac

SEQ ID NO: 5630 - RNA, 21 nt, RNAi
ugauuaugaaaucacggacuu

SEQ ID NO: 5631 - RNA, 21 nt, RNAi
uuacuaauacuuuagugccug

SEQ ID NO: 5632 - DNA, 21 bp, homo sapiens
tatgaaatcacggaccagtac

SEQ ID NO: 5633 - RNA, 21 nt, RNAi
ugaaaucacggaccaguacuu

SEQ ID NO: 5634 - RNA, 21 nt, RNAi
uuacuuuagugccuggucaug

SEQ ID NO: 5635 - DNA, 21 bp, homo sapiens
tacatctacatggtaatggag

SEQ ID NO: 5636 - RNA, 21 nt, RNAi
caucuacaugguaauggaguu

SEQ ID NO: 5637 - RNA, 21 nt, RNAi
uuguagauguaccauuaccuc

SEQ ID NO: 5638 - DNA, 21 bp, homo sapiens
tacatggtaatggagtgtgga

SEQ ID NO: 5639 - RNA, 21 nt, RNAi
caugguaauggaguguggauu

SEQ ID NO: 5640 - RNA, 21 nt, RNAi
uuguaccauuaccucacaccu

SEQ ID NO: 5641 - DNA, 21 bp, homo sapiens
taatggagtgtggaaatattg

SEQ ID NO: 5642 - RNA, 21 nt, RNAi
auggaguguggaaauauuguu

SEQ ID NO: 5643 - RNA, 21 nt, RNAi
uuuaccucacaccuuuauaac

SEQ ID NO: 5644 - DNA, 21 bp, homo sapiens
tatgttagaggcagttcacac

SEQ ID NO: 5645 - RNA, 21 nt, RNAi
uguuagaggcaguucacacuu

SEQ ID NO: 5646 - RNA, 21 nt, RNAi
uuacaaucuccgucaagugug

SEQ ID NO: 5647 - DNA, 21 bp, homo sapiens
tagaggcagttcacacaatcc

SEQ ID NO: 5648 - RNA, 21 nt, RNAi
gaggcaguucacacaauccuu

SEQ ID NO: 5649 - RNA, 21 nt, RNAi
uucuccgucaaguguguuagg

SEQ ID NO: 5650 - DNA, 21 bp, homo sapiens
taaaccagctaactttctgat

SEQ ID NO: 5651 - RNA, 21 nt, RNAi
aaccagcuaacuuucugauuu

SEQ ID NO: 5652 - RNA, 21 nt, RNAi
uuuuggucgauugaaagacua

SEQ ID NO: 5653 - DNA, 21 bp, homo sapiens
taactttctgatagttgatgg

SEQ ID NO: 5654 - RNA, 21 nt, RNAi
acuuucugauaguugaugguu

SEQ ID NO: 5655 - RNA, 21 nt, RNAi
uuugaaagacuaucaacuacc

SEQ ID NO: 5656 - DNA, 21 bp, homo sapiens
tagttgatggaatgctaaagc

SEQ ID NO: 5657 - RNA, 21 nt, RNAi
guugauggaaugcuaaagcuu

SEQ ID NO: 5658 - RNA, 21 nt, RNAi
uucaacuaccuuacgauuucg

SEQ ID NO: 5659 - DNA, 21 bp, homo sapiens
taaagattctcaggttggcac

SEQ ID NO: 5660 - RNA, 21 nt, RNAi
aagauucucagguuggcacuu

SEQ ID NO: 5661 - RNA, 21 nt, RNAi
uuuucuaagaguccaaccgug

SEQ ID NO: 5662 - DNA, 21 bp, homo sapiens
taattatatgccaccagaagc

SEQ ID NO: 5663 - RNA, 21 nt, RNAi
auuauaugccaccagaagcuu

SEQ ID NO: 5664 - RNA, 21 nt, RNAi
uuuaauauacgguggucuucg

SEQ ID NO: 5665 - DNA, 21 bp, homo sapiens
tatatgccaccagaagcaatc

SEQ ID NO: 5666 - RNA, 21 nt, RNAi
uaugccaccagaagcaaucuu

SEQ ID NO: 5667 - RNA, 21 nt, RNAi
uuauacgguggucuucguuag

SEQ ID NO: 5668 - DNA, 21 bp, homo sapiens
tatgccaccagaagcaatcaa

SEQ ID NO: 5669 - RNA, 21 nt, RNAi
ugccaccagaagcaaucaauu

SEQ ID NO: 5670 - RNA, 21 nt, RNAi
uuacgguggucuucguuaguu

SEQ ID NO: 5671 - DNA, 21 bp, homo sapiens
tatgtcttcctccagagagaa

SEQ ID NO: 5672 - RNA, 21 nt, RNAi
ugucuuccuccagagagaauu

SEQ ID NO: 5673 - RNA, 21 nt, RNAi
uuacagaaggaggucucucuu

SEQ ID NO: 5674 - DNA, 21 bp, homo sapiens
tacatgccataattgatccta

SEQ ID NO: 5675 - RNA, 21 nt, RNAi
caugccauaauugauccuauu

SEQ ID NO: 5676 - RNA, 21 nt, RNAi
uuguacgguauuaacuaggau

SEQ ID NO: 5677 - DNA, 21 bp, homo sapiens
tattccagagaaagatcttca

SEQ ID NO: 5678 - RNA, 21 nt, RNAi
uuccagagaaagaucuucauu

SEQ ID NO: 5679 - RNA, 21 nt, RNAi
uuaaggucucuuucuagaagu

SEQ ID NO: 5680 - DNA, 21 bp, homo sapiens
tatccattcctgagctcctgg

SEQ ID NO: 5681 - RNA, 21 nt, RNAi
uccauuccugagcuccugguu

SEQ ID NO: 5682 - RNA, 21 nt, RNAi
uuagguaaggacucgaggacc

SEQ ID NO: 5683 - DNA, 21 bp, homo sapiens
tatatgaacactatagtggtg

SEQ ID NO: 5684 - RNA, 21 nt, RNAi
uaugaacacuauagugguguu

SEQ ID NO: 5685 - RNA, 21 nt, RNAi
uuauacuugugauaucaccac

SEQ ID NO: 5686 - DNA, 21 bp, homo sapiens
tatgaacactatagtggtggt

SEQ ID NO: 5687 - RNA, 21 nt, RNAi
ugaacacuauaguggugguuu

SEQ ID NO: 5688 - RNA, 21 nt, RNAi
uuacuugugauaucaccacca

SEQ ID NO: 5689 - DNA, 21 bp, homo sapiens
tatagtggtggtgaaagtcat

SEQ ID NO: 5690 - RNA, 21 nt, RNAi
uagugguggugaaagucauuu

SEQ ID NO: 5691 - RNA, 21 nt, RNAi
uuaucaccaccacuuucagua

SEQ ID NO: 5692 - DNA, 21 bp, homo sapiens
tagtggtggtgaaagtcataa

SEQ ID NO: 5693 - RNA, 21 nt, RNAi
gugguggugaaagucauaauu

SEQ ID NO: 5694 - RNA, 21 nt, RNAi
uucaccaccacuuucaguauu

SEQ ID NO: 5695 - DNA, 21 bp, homo sapiens
taattcttcatcctccaagac

SEQ ID NO: 5696 - RNA, 21 nt, RNAi
auucuucauccuccaagacuu

SEQ ID NO: 5697 - RNA, 21 nt, RNAi
uuuaagaaguaggagguucug

SEQ ID NO: 5698 - DNA, 21 bp, homo sapiens
tattcgtaatgtcagatagga

SEQ ID NO: 5699 - RNA, 21 nt, RNAi
uucguaaugucagauaggauu

SEQ ID NO: 5700 - RNA, 21 nt, RNAi
uuaagcauuacagucuauccu

SEQ ID NO: 5701 - DNA, 21 bp, homo sapiens
taatgtcagataggaggtata

SEQ ID NO: 5702 - RNA, 21 nt, RNAi
augucagauaggagguauauu

SEQ ID NO: 5703 - RNA, 21 nt, RNAi
uuuacagucuauccuccauau

SEQ ID NO: 5704 - DNA, 21 bp, homo sapiens
tattggactgttatactcttg

SEQ ID NO: 5705 - RNA, 21 nt, RNAi
uuggacuguuauacucuuguu

SEQ ID NO: 5706 - RNA, 21 nt, RNAi
uuaaccugacaauaugagaac

SEQ ID NO: 5707 - DNA, 21 bp, homo sapiens
tacatttgaagacaacatcac

SEQ ID NO: 5708 - RNA, 21 nt, RNAi
cauuugaagacaacaucacuu

SEQ ID NO: 5709 - RNA, 21 nt, RNAi
uuguaaacuucuguuguagug

SEQ ID NO: 5710 - DNA, 21 bp, homo sapiens
tagcaaccacttatggcactg

SEQ ID NO: 5711 - RNA, 21 nt, RNAi
gcaaccacuuauggcacuguu

SEQ ID NO: 5712 - RNA, 21 nt, RNAi
uucguuggugaauaccgugac

SEQ ID NO: 5713 - DNA, 21 bp, homo sapiens
tatgctcttgtgtaatctact

SEQ ID NO: 5714 - RNA, 21 nt, RNAi
ugcucuuguguaaucuacuuu

SEQ ID NO: 5715 - RNA, 21 nt, RNAi
uuacgagaacacauuagauga

SEQ ID NO: 5716 - DNA, 21 bp, homo sapiens
aagaccttactgatgaactaa

SEQ ID NO: 5717 - RNA, 21 nt, RNAi
gaccuuacugaugaacuaauu

SEQ ID NO: 5718 - RNA, 21 nt, RNAi
uucuggaaugacuacuugauu

SEQ ID NO: 5719 - DNA, 21 bp, homo sapiens
aaacagtgttccgctaagtga

SEQ ID NO: 5720 - RNA, 21 nt, RNAi
acaguguuccgcuaagugauu

SEQ ID NO: 5721 - RNA, 21 nt, RNAi
uuugucacaaggcgauucacu

SEQ ID NO: 5722 - DNA, 21 bp, homo sapiens
aacagtgttccgctaagtgat

SEQ ID NO: 5723 - RNA, 21 nt, RNAi
caguguuccgcuaagugauuu

SEQ ID NO: 5724 - RNA, 21 nt, RNAi
uugucacaaggcgauucacua

SEQ ID NO: 5725 - DNA, 21 bp, homo sapiens
aaattgattggtcgttacagt

SEQ ID NO: 5726 - RNA, 21 nt, RNAi
auugauuggucguuacaguuu

SEQ ID NO: 5727 - RNA, 21 nt, RNAi
uuuaacuaaccagcaauguca

SEQ ID NO: 5728 - DNA, 21 bp, homo sapiens
aattgattggtcgttacagtc

SEQ ID NO: 5729 - RNA, 21 nt, RNAi
uugauuggucguuacagucuu

SEQ ID NO: 5730 - RNA, 21 nt, RNAi
uuaacuaaccagcaaugucag

SEQ ID NO: 5731 - DNA, 21 bp, homo sapiens
aattcaagtgagatttgctga

SEQ ID NO: 5732 - RNA, 21 nt, RNAi
uucaagugagauuugcugauu

SEQ ID NO: 5733 - RNA, 21 nt, RNAi
uuaaguucacucuaaacgacu

SEQ ID NO: 5734 - DNA, 21 bp, homo sapiens
aatttgaactgtcacaaggta

SEQ ID NO: 5735 - RNA, 21 nt, RNAi
uuugaacugucacaagguauu

SEQ ID NO: 5736 - RNA, 21 nt, RNAi
uuaaacuugacaguguuccau

SEQ ID NO: 5737 - DNA, 21 bp, homo sapiens
aaagctgtagaacgtggagca

SEQ ID NO: 5738 - RNA, 21 nt, RNAi
agcuguagaacguggagcauu

SEQ ID NO: 5739 - RNA, 21 nt, RNAi
uuucgacaucuugcaccucgu

SEQ ID NO: 5740 - DNA, 21 bp, homo sapiens
aaataggttaccggaattcat

SEQ ID NO: 5741 - RNA, 21 nt, RNAi
auagguuaccggaauucauuu

SEQ ID NO: 5742 - RNA, 21 nt, RNAi
uuuauccaauggccuuaagua

SEQ ID NO: 5743 - DNA, 21 bp, homo sapiens
aataggttaccggaattcatt

SEQ ID NO: 5744 - RNA, 21 nt, RNAi
uagguuaccggaauucauuuu

SEQ ID NO: 5745 - RNA, 21 nt, RNAi
uuauccaauggccuuaaguaa

SEQ ID NO: 5746 - DNA, 21 bp, homo sapiens
aatgccgagatttggttgtgc

SEQ ID NO: 5747 - RNA, 21 nt, RNAi
ugccgagauuugguugugcuu

SEQ ID NO: 5748 - RNA, 21 nt, RNAi
uuacggcucuaaaccaacacg

SEQ ID NO: 5749 - DNA, 21 bp, homo sapiens
aaacggaatcaagtcttctag

SEQ ID NO: 5750 - RNA, 21 nt, RNAi
acggaaucaagucuucuaguu

SEQ ID NO: 5751 - RNA, 21 nt, RNAi
uuugccuuaguucagaagauc

SEQ ID NO: 5752 - DNA, 21 bp, homo sapiens
aacggaatcaagtcttctagc

SEQ ID NO: 5753 - RNA, 21 nt, RNAi
cggaaucaagucuucuagcuu

SEQ ID NO: 5754 - RNA, 21 nt, RNAi
uugccuuaguucagaagaucg

SEQ ID NO: 5755 - DNA, 21 bp, homo sapiens
aaacagtggcaagctaagaga

SEQ ID NO: 5756 - RNA, 21 nt, RNAi
acaguggcaagcuaagagauu

SEQ ID NO: 5757 - RNA, 21 nt, RNAi
uuugucaccguucgauucucu

SEQ ID NO: 5758 - DNA, 21 bp, homo sapiens
aacagtggcaagctaagagaa

SEQ ID NO: 5759 - RNA, 21 nt, RNAi
caguggcaagcuaagagaauu

SEQ ID NO: 5760 - RNA, 21 nt, RNAi
uugucaccguucgauucucuu

SEQ ID NO: 5761 - DNA, 21 bp, homo sapiens
aaagtcagagtgtattaacca

SEQ ID NO: 5762 - RNA, 21 nt, RNAi
agucagaguguauuaaccauu

SEQ ID NO: 5763 - RNA, 21 nt, RNAi
uuucagucucacauaauuggu

SEQ ID NO: 5764 - DNA, 21 bp, homo sapiens
aagtcagagtgtattaaccag

SEQ ID NO: 5765 - RNA, 21 nt, RNAi
gucagaguguauuaaccaguu

SEQ ID NO: 5766 - RNA, 21 nt, RNAi
uucagucucacauaauugguc

SEQ ID NO: 5767 - DNA, 21 bp, homo sapiens
aatacagagcagaaacatacc

SEQ ID NO: 5768 - RNA, 21 nt, RNAi
uacagagcagaaacauaccuu

SEQ ID NO: 5769 - RNA, 21 nt, RNAi
uuaugucucgucuuuguaugg

SEQ ID NO: 5770 - DNA, 21 bp, homo sapiens
aataccttggatgattacatg

SEQ ID NO: 5771 - RNA, 21 nt, RNAi
uaccuuggaugauuacauguu

SEQ ID NO: 5772 - RNA, 21 nt, RNAi
uuauggaaccuacuaauguac

SEQ ID NO: 5773 - DNA, 21 bp, homo sapiens
aaagaatgactttccacctgc

SEQ ID NO: 5774 - RNA, 21 nt, RNAi
agaaugacuuuccaccugcuu

SEQ ID NO: 5775 - RNA, 21 nt, RNAi
uuucuuacugaaagguggacg

SEQ ID NO: 5776 - DNA, 21 bp, homo sapiens
aagaatgactttccacctgct

SEQ ID NO: 5777 - RNA, 21 nt, RNAi
gaaugacuuuccaccugcuuu

SEQ ID NO: 5778 - RNA, 21 nt, RNAi
uucuuacugaaagguggacga

SEQ ID NO: 5779 - DNA, 21 bp, homo sapiens
aacagcatcaaatacttgcca

SEQ ID NO: 5780 - RNA, 21 nt, RNAi
cagcaucaaauacuugccauu

SEQ ID NO: 5781 - RNA, 21 nt, RNAi
uugucguaguuuaugaacggu

SEQ ID NO: 5782 - DNA, 21 bp, homo sapiens
aactcttgatagttaccggaa

SEQ ID NO: 5783 - RNA, 21 nt, RNAi
cucuugauaguuaccggaauu

SEQ ID NO: 5784 - RNA, 21 nt, RNAi
uugagaacuaucaauggccuu

SEQ ID NO: 5785 - DNA, 21 bp, homo sapiens
aaatcacggaccagtacatct

SEQ ID NO: 5786 - RNA, 21 nt, RNAi
aucacggaccaguacaucuuu

SEQ ID NO: 5787 - RNA, 21 nt, RNAi
uuuagugccuggucauguaga

SEQ ID NO: 5788 - DNA, 21 bp, homo sapiens
aatcacggaccagtacatcta

SEQ ID NO: 5789 - RNA, 21 nt, RNAi
ucacggaccaguacaucuauu

SEQ ID NO: 5790 - RNA, 21 nt, RNAi
uuagugccuggucauguagau

SEQ ID NO: 5791 - DNA, 21 bp, homo sapiens
aactttctgatagttgatgga

SEQ ID NO: 5792 - RNA, 21 nt, RNAi
cuuucugauaguugauggauu

SEQ ID NO: 5793 - RNA, 21 nt, RNAi
uugaaagacuaucaacuaccu

SEQ ID NO: 5794 - DNA, 21 bp, homo sapiens
aaagattctcaggttggcaca

SEQ ID NO: 5795 - RNA, 21 nt, RNAi
agauucucagguuggcacauu

SEQ ID NO: 5796 - RNA, 21 nt, RNAi
uuucuaagaguccaaccgugu

SEQ ID NO: 5797 - DNA, 21 bp, homo sapiens
aagattctcaggttggcacag

SEQ ID NO: 5798 - RNA, 21 nt, RNAi
gauucucagguuggcacaguu

SEQ ID NO: 5799 - RNA, 21 nt, RNAi
uucuaagaguccaaccguguc

SEQ ID NO: 5800 - DNA, 21 bp, homo sapiens
aatctaagtcaaagataagcc

SEQ ID NO: 5801 - RNA, 21 nt, RNAi
ucuaagucaaagauaagccuu

SEQ ID NO: 5802 - RNA, 21 nt, RNAi
uuagauucaguuucuauucgg

SEQ ID NO: 5803 - DNA, 21 bp, homo sapiens
aaacaccatttcagcagataa

SEQ ID NO: 5804 - RNA, 21 nt, RNAi
acaccauuucagcagauaauu

SEQ ID NO: 5805 - RNA, 21 nt, RNAi
uuugugguaaagucgucuauu

SEQ ID NO: 5806 - DNA, 21 bp, homo sapiens
aacaccatttcagcagataat

SEQ ID NO: 5807 - RNA, 21 nt, RNAi
caccauuucagcagauaauuu

SEQ ID NO: 5808 - RNA, 21 nt, RNAi
uugugguaaagucgucuauua

SEQ ID NO: 5809 - DNA, 21 bp, homo sapiens
aaacagaggatatccattcct

SEQ ID NO: 5810 - RNA, 21 nt, RNAi
acagaggauauccauuccuuu

SEQ ID NO: 5811 - RNA, 21 nt, RNAi
uuugucuccuauagguaagga

SEQ ID NO: 5812 - DNA, 21 bp, homo sapiens
aacagaggatatccattcctg

SEQ ID NO: 5813 - RNA, 21 nt, RNAi
cagaggauauccauuccuguu

SEQ ID NO: 5814 - RNA, 21 nt, RNAi
uugucuccuauagguaaggac

SEQ ID NO: 5815 - DNA, 21 bp, homo sapiens
cagtgttccgctaagtgatgc

SEQ ID NO: 5816 - RNA, 21 nt, RNAi
guguuccgcuaagugaugcuu

SEQ ID NO: 5817 - RNA, 21 nt, RNAi
uucacaaggcgauucacuacg

SEQ ID NO: 5818 - DNA, 21 bp, homo sapiens
cagatgatgcacgtgactact

SEQ ID NO: 5819 - RNA, 21 nt, RNAi
gaugaugcacgugacuacuuu

SEQ ID NO: 5820 - RNA, 21 nt, RNAi
uucuacuacgugcacugauga

SEQ ID NO: 5821 - DNA, 21 bp, homo sapiens
cagcatctacggtattaactg

SEQ ID NO: 5822 - RNA, 21 nt, RNAi
gcaucuacgguauuaacuguu

SEQ ID NO: 5823 - RNA, 21 nt, RNAi
uucguagaugccauaauugac

SEQ ID NO: 5824 - DNA, 21 bp, homo sapiens
cagaaataggttaccggaatt

SEQ ID NO: 5825 - RNA, 21 nt, RNAi
gaaauagguuaccggaauuuu

SEQ ID NO: 5826 - RNA, 21 nt, RNAi
uucuuuauccaauggccuuaa

SEQ ID NO: 5827 - DNA, 21 bp, homo sapiens
cagttaaccttctaaatagcc

SEQ ID NO: 5828 - RNA, 21 nt, RNAi
guuaaccuucuaaauagccuu

SEQ ID NO: 5829 - RNA, 21 nt, RNAi
uucaauuggaagauuuaucgg

SEQ ID NO: 5830 - DNA, 21 bp, homo sapiens
cagatgattcagttgtacctt

SEQ ID NO: 5831 - RNA, 21 nt, RNAi
gaugauucaguuguaccuuuu

SEQ ID NO: 5832 - RNA, 21 nt, RNAi
uucuacuaagucaacauggaa

SEQ ID NO: 5833 - DNA, 21 bp, homo sapiens
cagaatgccgagatttggttg

SEQ ID NO: 5834 - RNA, 21 nt, RNAi
gaaugccgagauuugguuguu

SEQ ID NO: 5835 - RNA, 21 nt, RNAi
uucuuacggcucuaaaccaac

SEQ ID NO: 5836 - DNA, 21 bp, homo sapiens
cagaggttccagagagtaacc

SEQ ID NO: 5837 - RNA, 21 nt, RNAi
gagguuccagagaguaaccuu

SEQ ID NO: 5838 - RNA, 21 nt, RNAi
uucuccaaggucucucauugg

SEQ ID NO: 5839 - DNA, 21 bp, homo sapiens
catcttcaaatcactggcaga

SEQ ID NO: 5840 - RNA, 21 nt, RNAi
ucuucaaaucacuggcagauu

SEQ ID NO: 5841 - RNA, 21 nt, RNAi
uuagaaguuuagugaccgucu

SEQ ID NO: 5842 - DNA, 21 bp, homo sapiens
cactggcagattccggagtta

SEQ ID NO: 5843 - RNA, 21 nt, RNAi
cuggcagauuccggaguuauu

SEQ ID NO: 5844 - RNA, 21 nt, RNAi
uugaccgucuaaggccucaau

SEQ ID NO: 5845 - DNA, 21 bp, homo sapiens
cagagcagaaacataccactt

SEQ ID NO: 5846 - RNA, 21 nt, RNAi
gagcagaaacauaccacuuuu

SEQ ID NO: 5847 - RNA, 21 nt, RNAi
uucucgucuuuguauggugaa

SEQ ID NO: 5848 - DNA, 21 bp, homo sapiens
caacatctaaatggtttgacc

SEQ ID NO: 5849 - RNA, 21 nt, RNAi
acaucuaaaugguuugaccuu

SEQ ID NO: 5850 - RNA, 21 nt, RNAi
uuuguagauuuaccaaacugg

SEQ ID NO: 5851 - DNA, 21 bp, homo sapiens
caccaagcagcaataccttgg

SEQ ID NO: 5852 - RNA, 21 nt, RNAi
ccaagcagcaauaccuugguu

SEQ ID NO: 5853 - RNA, 21 nt, RNAi
uugguucgucguuauggaacc

SEQ ID NO: 5854 - DNA, 21 bp, homo sapiens
cacctgcttgtcagttgtcaa

SEQ ID NO: 5855 - RNA, 21 nt, RNAi
ccugcuugucaguugucaauu

SEQ ID NO: 5856 - RNA, 21 nt, RNAi
uuggacgaacagucaacaguu

SEQ ID NO: 5857 - DNA, 21 bp, homo sapiens
cagttgtcaacaccttatggc

SEQ ID NO: 5858 - RNA, 21 nt, RNAi
guugucaacaccuuauggcuu

SEQ ID NO: 5859 - RNA, 21 nt, RNAi
uucaacaguuguggaauaccg

SEQ ID NO: 5860 - DNA, 21 bp, homo sapiens
cacagtgataagatcatccga

SEQ ID NO: 5861 - RNA, 21 nt, RNAi
cagugauaagaucauccgauu

SEQ ID NO: 5862 - RNA, 21 nt, RNAi
uugucacuauucuaguaggcu

SEQ ID NO: 5863 - DNA, 21 bp, homo sapiens
cagtgataagatcatccgact

SEQ ID NO: 5864 - RNA, 21 nt, RNAi
gugauaagaucauccgacuuu

SEQ ID NO: 5865 - RNA, 21 nt, RNAi
uucacuauucuaguaggcuga

SEQ ID NO: 5866 - DNA, 21 bp, homo sapiens
cacggaccagtacatctacat

SEQ ID NO: 5867 - RNA, 21 nt, RNAi
cggaccaguacaucuacauuu

SEQ ID NO: 5868 - RNA, 21 nt, RNAi
uugccuggucauguagaugua

SEQ ID NO: 5869 - DNA, 21 bp, homo sapiens
cagtacatctacatggtaatg

SEQ ID NO: 5870 - RNA, 21 nt, RNAi
guacaucuacaugguaauguu

SEQ ID NO: 5871 - RNA, 21 nt, RNAi
uucauguagauguaccauuac

SEQ ID NO: 5872 - DNA, 21 bp, homo sapiens
catggtaatggagtgtggaaa

SEQ ID NO: 5873 - RNA, 21 nt, RNAi
ugguaauggaguguggaaauu

SEQ ID NO: 5874 - RNA, 21 nt, RNAi
uuaccauuaccucacaccuuu

SEQ ID NO: 5875 - DNA, 21 bp, homo sapiens
cagttcacacaatccatcaac

SEQ ID NO: 5876 - RNA, 21 nt, RNAi
guucacacaauccaucaacuu

SEQ ID NO: 5877 - RNA, 21 nt, RNAi
uucaaguguguuagguaguug

SEQ ID NO: 5878 - DNA, 21 bp, homo sapiens
cacaatccatcaacatggcat

SEQ ID NO: 5879 - RNA, 21 nt, RNAi
caauccaucaacauggcauuu

SEQ ID NO: 5880 - RNA, 21 nt, RNAi
uuguuagguaguuguaccgua

SEQ ID NO: 5881 - DNA, 21 bp, homo sapiens
caatccatcaacatggcattg

SEQ ID NO: 5882 - RNA, 21 nt, RNAi
auccaucaacauggcauuguu

SEQ ID NO: 5883 - RNA, 21 nt, RNAi
uuuagguaguuguaccguaac

SEQ ID NO: 5884 - DNA, 21 bp, homo sapiens
cagaggatatccattcctgag

SEQ ID NO: 5885 - RNA, 21 nt, RNAi
gaggauauccauuccugaguu

SEQ ID NO: 5886 - RNA, 21 nt, RNAi
uucuccuauagguaaggacuc

SEQ ID NO: 5887 - DNA, 21 bp, homo sapiens
catccagttaaccaaatggcc

SEQ ID NO: 5888 - RNA, 21 nt, RNAi
uccaguuaaccaaauggccuu

SEQ ID NO: 5889 - RNA, 21 nt, RNAi
uuaggucaauugguuuaccgg

SEQ ID NO: 5890 - DNA, 21 bp, homo sapiens
caacttgttggtctgaattct

SEQ ID NO: 5891 - RNA, 21 nt, RNAi
acuuguuggucugaauucuuu

SEQ ID NO: 5892 - RNA, 21 nt, RNAi
uuugaacaaccagacuuaaga

SEQ ID NO: 5893 - DNA, 21 bp, homo sapiens
gaagaccttactgatgaacta

SEQ ID NO: 5894 - RNA, 21 nt, RNAi
agaccuuacugaugaacuauu

SEQ ID NO: 5895 - RNA, 21 nt, RNAi
uuucuggaaugacuacuugau

SEQ ID NO: 5896 - DNA, 21 bp, homo sapiens
gaccttactgatgaactaagc

SEQ ID NO: 5897 - RNA, 21 nt, RNAi
ccuuacugaugaacuaagcuu

SEQ ID NO: 5898 - RNA, 21 nt, RNAi
uuggaaugacuacuugauucg

SEQ ID NO: 5899 - DNA, 21 bp, homo sapiens
gaggactggttgagtttgttg

SEQ ID NO: 5900 - RNA, 21 nt, RNAi
ggacugguugaguuuguuguu

SEQ ID NO: 5901 - RNA, 21 nt, RNAi
uuccugaccaacucaaacaac

SEQ ID NO: 5902 - DNA, 21 bp, homo sapiens
gactggttgagtttgttgctc

SEQ ID NO: 5903 - RNA, 21 nt, RNAi
cugguugaguuuguugcucuu

SEQ ID NO: 5904 - RNA, 21 nt, RNAi
uugaccaacucaaacaacgag

SEQ ID NO: 5905 - DNA, 21 bp, homo sapiens
gattggtcgttacagtcaagc

SEQ ID NO: 5906 - RNA, 21 nt, RNAi
uuggucguuacagucaagcuu

SEQ ID NO: 5907 - RNA, 21 nt, RNAi
uuaaccagcaaugucaguucg

SEQ ID NO: 5908 - DNA, 21 bp, homo sapiens
gatgatgcacgtgactacttt

SEQ ID NO: 5909 - RNA, 21 nt, RNAi
ugaugcacgugacuacuuuuu

SEQ ID NO: 5910 - RNA, 21 nt, RNAi
uuacuacgugcacugaugaaa

SEQ ID NO: 5911 - DNA, 21 bp, homo sapiens
gatgcacgtgactactttcaa

SEQ ID NO: 5912 - RNA, 21 nt, RNAi
ugcacgugacuacuuucaauu

SEQ ID NO: 5913 - RNA, 21 nt, RNAi
uuacgugcacugaugaaaguu

SEQ ID NO: 5914 - DNA, 21 bp, homo sapiens
gactactttcaaatggccaga

SEQ ID NO: 5915 - RNA, 21 nt, RNAi
cuacuuucaaauggccagauu

SEQ ID NO: 5916 - RNA, 21 nt, RNAi
uugaugaaaguuuaccggucu

SEQ ID NO: 5917 - DNA, 21 bp, homo sapiens
gattccagaggacagactact

SEQ ID NO: 5918 - RNA, 21 nt, RNAi
uuccagaggacagacuacuuu

SEQ ID NO: 5919 - RNA, 21 nt, RNAi
uuaaggucuccugucugauga

SEQ ID NO: 5920 - DNA, 21 bp, homo sapiens
gaaataggttaccggaattca

SEQ ID NO: 5921 - RNA, 21 nt, RNAi
aauagguuaccggaauucauu

SEQ ID NO: 5922 - RNA, 21 nt, RNAi
uuuuauccaauggccuuaagu

SEQ ID NO: 5923 - DNA, 21 bp, homo sapiens
gatgattcagttgtaccttgt

SEQ ID NO: 5924 - RNA, 21 nt, RNAi
ugauucaguuguaccuuguuu

SEQ ID NO: 5925 - RNA, 21 nt, RNAi
uuacuaagucaacauggaaca

SEQ ID NO: 5926 - DNA, 21 bp, homo sapiens
gaatgccgagatttggttgtg

SEQ ID NO: 5927 - RNA, 21 nt, RNAi
augccgagauuugguuguguu

SEQ ID NO: 5928 - RNA, 21 nt, RNAi
uuuacggcucuaaaccaacac

SEQ ID NO: 5929 - DNA, 21 bp, homo sapiens
gatttggttgtgcctggatct

SEQ ID NO: 5930 - RNA, 21 nt, RNAi
uuugguugugccuggaucuuu

SEQ ID NO: 5931 - RNA, 21 nt, RNAi
uuaaaccaacacggaccuaga

SEQ ID NO: 5932 - DNA, 21 bp, homo sapiens
gaggttccagagagtaaccag

SEQ ID NO: 5933 - RNA, 21 nt, RNAi
gguuccagagaguaaccaguu

SEQ ID NO: 5934 - RNA, 21 nt, RNAi
uuccaaggucucucauugguc

SEQ ID NO: 5935 - DNA, 21 bp, homo sapiens
gaaagtcagagtgtattaacc

SEQ ID NO: 5936 - RNA, 21 nt, RNAi
aagucagaguguauuaaccuu

SEQ ID NO: 5937 - RNA, 21 nt, RNAi
uuuucagucucacauaauugg

SEQ ID NO: 5938 - DNA, 21 bp, homo sapiens
gaagtggaggttcaagcaagg

SEQ ID NO: 5939 - RNA, 21 nt, RNAi
aguggagguucaagcaagguu

SEQ ID NO: 5940 - RNA, 21 nt, RNAi
uuucaccuccaaguucguucc

SEQ ID NO: 5941 - DNA, 21 bp, homo sapiens
gaggttcaagcaaggtatttc

SEQ ID NO: 5942 - RNA, 21 nt, RNAi
gguucaagcaagguauuucuu

SEQ ID NO: 5943 - RNA, 21 nt, RNAi
uuccaaguucguuccauaaag

SEQ ID NO: 5944 - DNA, 21 bp, homo sapiens
gatagttaccggaacgaaata

SEQ ID NO: 5945 - RNA, 21 nt, RNAi
uaguuaccggaacgaaauauu

SEQ ID NO: 5946 - RNA, 21 nt, RNAi
uuaucaauggccuugcuuuau

SEQ ID NO: 5947 - DNA, 21 bp, homo sapiens
gattatgaaatcacggaccag

SEQ ID NO: 5948 - RNA, 21 nt, RNAi
uuaugaaaucacggaccaguu

SEQ ID NO: 5949 - RNA, 21 nt, RNAi
uuaauacuuuagugccugguc

SEQ ID NO: 5950 - DNA, 21 bp, homo sapiens
gaaatcacggaccagtacatc

SEQ ID NO: 5951 - RNA, 21 nt, RNAi
aaucacggaccaguacaucuu

SEQ ID NO: 5952 - RNA, 21 nt, RNAi
uuuuagugccuggucauguag

SEQ ID NO: 5953 - DNA, 21 bp, homo sapiens
gaccagtacatctacatggta

SEQ ID NO: 5954 - RNA, 21 nt, RNAi
ccaguacaucuacaugguauu

SEQ ID NO: 5955 - RNA, 21 nt, RNAi
uuggucauguagauguaccau

SEQ ID NO: 5956 - DNA, 21 bp, homo sapiens
gaggcagttcacacaatccat

SEQ ID NO: 5957 - RNA, 21 nt, RNAi
ggcaguucacacaauccauuu

SEQ ID NO: 5958 - RNA, 21 nt, RNAi
uuccgucaaguguguuaggua

SEQ ID NO: 5959 - DNA, 21 bp, homo sapiens
gattctcaggttggcacagtt

SEQ ID NO: 5960 - RNA, 21 nt, RNAi
uucucagguuggcacaguuuu

SEQ ID NO: 5961 - RNA, 21 nt, RNAi
uuaagaguccaaccgugucaa

SEQ ID NO: 5962 - DNA, 21 bp, homo sapiens
tactgatgaactaagcttgaa

SEQ ID NO: 5963 - RNA, 21 nt, RNAi
cugaugaacuaagcuugaauu

SEQ ID NO: 5964 - RNA, 21 nt, RNAi
uugacuacuugauucgaacuu

SEQ ID NO: 5965 - DNA, 21 bp, homo sapiens
taaattgattggtcgttacag

SEQ ID NO: 5966 - RNA, 21 nt, RNAi
aauugauuggucguuacaguu

SEQ ID NO: 5967 - RNA, 21 nt, RNAi
uuuuaacuaaccagcaauguc

SEQ ID NO: 5968 - DNA, 21 bp, homo sapiens
tatcagcatctacggtattaa

SEQ ID NO: 5969 - RNA, 21 nt, RNAi
ucagcaucuacgguauuaauu

SEQ ID NO: 5970 - RNA, 21 nt, RNAi
uuagucguagaugccauaauu

SEQ ID NO: 5971 - DNA, 21 bp, homo sapiens
tatggagagaacatgccacca

SEQ ID NO: 5972 - RNA, 21 nt, RNAi
uggagagaacaugccaccauu

SEQ ID NO: 5973 - RNA, 21 nt, RNAi
uuaccucucuuguacgguggu

SEQ ID NO: 5974 - DNA, 21 bp, homo sapiens
taccggaattcattgagacaa

SEQ ID NO: 5975 - RNA, 21 nt, RNAi
ccggaauucauugagacaauu

SEQ ID NO: 5976 - RNA, 21 nt, RNAi
uuggccuuaaguaacucuguu

SEQ ID NO: 5977 - DNA, 21 bp, homo sapiens
taatacagagcagaaacatac

SEQ ID NO: 5978 - RNA, 21 nt, RNAi
auacagagcagaaacauacuu

SEQ ID NO: 5979 - RNA, 21 nt, RNAi
uuuaugucucgucuuuguaug

SEQ ID NO: 5980 - DNA, 21 bp, homo sapiens
tacagagcagaaacataccac

SEQ ID NO: 5981 - RNA, 21 nt, RNAi
cagagcagaaacauaccacuu

SEQ ID NO: 5982 - RNA, 21 nt, RNAi
uugucucgucuuuguauggug

SEQ ID NO: 5983 - DNA, 21 bp, homo sapiens
taccttggatgattacatgag

SEQ ID NO: 5984 - RNA, 21 nt, RNAi
ccuuggaugauuacaugaguu

SEQ ID NO: 5985 - RNA, 21 nt, RNAi
uuggaaccuacuaauguacuc

SEQ ID NO: 5986 - DNA, 21 bp, homo sapiens
tagaactccagttgtaaagaa

SEQ ID NO: 5987 - RNA, 21 nt, RNAi
gaacuccaguuguaaagaauu

SEQ ID NO: 5988 - RNA, 21 nt, RNAi
uucuugaggucaacauuucuu

SEQ ID NO: 5989 - DNA, 21 bp, homo sapiens
tagttaccggaacgaaatagc

SEQ ID NO: 5990 - RNA, 21 nt, RNAi
guuaccggaacgaaauagcuu

SEQ ID NO: 5991 - RNA, 21 nt, RNAi
uucaauggccuugcuuuaucg

SEQ ID NO: 5992 - DNA, 21 bp, homo sapiens
taccggaacgaaatagcttat

SEQ ID NO: 5993 - RNA, 21 nt, RNAi
ccggaacgaaauagcuuauuu

SEQ ID NO: 5994 - RNA, 21 nt, RNAi
uuggccuugcuuuaucgaaua

SEQ ID NO: 5995 - DNA, 21 bp, homo sapiens
taagatcatccgactttatga

SEQ ID NO: 5996 - RNA, 21 nt, RNAi
agaucauccgacuuuaugauu

SEQ ID NO: 5997 - RNA, 21 nt, RNAi
uuucuaguaggcugaaauacu

SEQ ID NO: 5998 - DNA, 21 bp, homo sapiens
tatgaaatcacggaccagtac

SEQ ID NO: 5999 - RNA, 21 nt, RNAi
ugaaaucacggaccaguacuu

SEQ ID NO: 6000 - RNA, 21 nt, RNAi
uuacuuuagugccuggucaug

SEQ ID NO: 6001 - DNA, 21 bp, homo sapiens
tacatggtaatggagtgtgga

SEQ ID NO: 6002 - RNA, 21 nt, RNAi
caugguaauggaguguggauu

SEQ ID NO: 6003 - RNA, 21 nt, RNAi
uuguaccauuaccucacaccu

SEQ ID NO: 6004 - DNA, 21 bp, homo sapiens
taatggagtgtggaaatattg

SEQ ID NO: 6005 - RNA, 21 nt, RNAi
auggaguguggaaauauuguu

SEQ ID NO: 6006 - RNA, 21 nt, RNAi
uuuaccucacaccuuuauaac

SEQ ID NO: 6007 - DNA, 21 bp, homo sapiens
taaaccagctaactttctgat

SEQ ID NO: 6008 - RNA, 21 nt, RNAi
aaccagcuaacuuucugauuu

SEQ ID NO: 6009 - RNA, 21 nt, RNAi
uuuuggucgauugaaagacua

SEQ ID NO: 6010 - DNA, 21 bp, homo sapiens
taactttctgatagttgatgg

SEQ ID NO: 6011 - RNA, 21 nt, RNAi
acuuucugauaguugaugguu

SEQ ID NO: 6012 - RNA, 21 nt, RNAi
uuugaaagacuaucaacuacc

SEQ ID NO: 6013 - DNA, 21 bp, homo sapiens
taaagattctcaggttggcac

SEQ ID NO: 6014 - RNA, 21 nt, RNAi
aagauucucagguuggcacuu

SEQ ID NO: 6015 - RNA, 21 nt, RNAi
uuuucuaagaguccaaccgug

SEQ ID NO: 6016 - DNA, 21 bp, homo sapiens
aagcagatctactactcggac

SEQ ID NO: 6017 - RNA, 21 nt, RNAi
gcagaucuacuacucggacuu

SEQ ID NO: 6018 - RNA, 21 nt, RNAi
uucgucuagaugaugagccug

SEQ ID NO: 6019 - DNA, 21 bp, homo sapiens
aagtacttcgacgaacactac

SEQ ID NO: 6020 - RNA, 21 nt, RNAi
guacuucgacgaacacuacuu

SEQ ID NO: 6021 - RNA, 21 nt, RNAi
uucaugaagcugcuugugaug

SEQ ID NO: 6022 - DNA, 21 bp, homo sapiens
aacactacgagtaccggcatg

SEQ ID NO: 6023 - RNA, 21 nt, RNAi
cacuacgaguaccggcauguu

SEQ ID NO: 6024 - RNA, 21 nt, RNAi
uugugaugcucauggccguac

SEQ ID NO: 6025 - DNA, 21 bp, homo sapiens
aactttccaaacaagtaccta

SEQ ID NO: 6026 - RNA, 21 nt, RNAi
cuuuccaaacaaguaccuauu

SEQ ID NO: 6027 - RNA, 21 nt, RNAi
uugaaagguuuguucauggau

SEQ ID NO: 6028 - DNA, 21 bp, homo sapiens
aaactcatctgatgtctgaag

SEQ ID NO: 6029 - RNA, 21 nt, RNAi
acucaucugaugucugaaguu

SEQ ID NO: 6030 - RNA, 21 nt, RNAi
uuugaguagacuacagacuuc

SEQ ID NO: 6031 - DNA, 21 bp, homo sapiens
aactcatctgatgtctgaaga

SEQ ID NO: 6032 - RNA, 21 nt, RNAi
cucaucugaugucugaagauu

SEQ ID NO: 6033 - RNA, 21 nt, RNAi
uugaguagacuacagacuucu

SEQ ID NO: 6034 - DNA, 21 bp, homo sapiens
aagaggagtggaggagacttg

SEQ ID NO: 6035 - RNA, 21 nt, RNAi
gaggaguggaggagacuuguu

SEQ ID NO: 6036 - RNA, 21 nt, RNAi
uucuccucaccuccucugaac

SEQ ID NO: 6037 - DNA, 21 bp, homo sapiens
aaggtagtattcagtgaatac

SEQ ID NO: 6038 - RNA, 21 nt, RNAi
gguaguauucagugaauacuu

SEQ ID NO: 6039 - RNA, 21 nt, RNAi
uuccaucauaagucacuuaug

SEQ ID NO: 6040 - DNA, 21 bp, homo sapiens
aaatctttcatccatacctgt

SEQ ID NO: 6041 - RNA, 21 nt, RNAi
aucuuucauccauaccuguuu

SEQ ID NO: 6042 - RNA, 21 nt, RNAi
uuuagaaaguagguauggaca

SEQ ID NO: 6043 - DNA, 21 bp, homo sapiens
aatctttcatccatacctgtg

SEQ ID NO: 6044 - RNA, 21 nt, RNAi
ucuuucauccauaccuguguu

SEQ ID NO: 6045 - RNA, 21 nt, RNAi
uuagaaaguagguauggacac

SEQ ID NO: 6046 - DNA, 21 bp, homo sapiens
aacagagctcagttaaatgca

SEQ ID NO: 6047 - RNA, 21 nt, RNAi
cagagcucaguuaaaugcauu

SEQ ID NO: 6048 - RNA, 21 nt, RNAi
uugucucgagucaauuuacgu

SEQ ID NO: 6049 - DNA, 21 bp, homo sapiens
aaatgcaactgcaagtaggtt

SEQ ID NO: 6050 - RNA, 21 nt, RNAi
augcaacugcaaguagguuuu

SEQ ID NO: 6051 - RNA, 21 nt, RNAi
uuuacguugacguucauccaa

SEQ ID NO: 6052 - DNA, 21 bp, homo sapiens
aatgcaactgcaagtaggtta

SEQ ID NO: 6053 - RNA, 21 nt, RNAi
ugcaacugcaaguagguuauu

SEQ ID NO: 6054 - RNA, 21 nt, RNAi
uuacguugacguucauccaau

SEQ ID NO: 6055 - DNA, 21 bp, homo sapiens
aactgcaagtaggttactgta

SEQ ID NO: 6056 - RNA, 21 nt, RNAi
cugcaaguagguuacuguauu

SEQ ID NO: 6057 - RNA, 21 nt, RNAi
uugacguucauccaaugacau

SEQ ID NO: 6058 - DNA, 21 bp, homo sapiens
aagtaggttactgtaagatgt

SEQ ID NO: 6059 - RNA, 21 nt, RNAi
guagguuacuguaagauguuu

SEQ ID NO: 6060 - RNA, 21 nt, RNAi
uucauccaaugacauucuaca

SEQ ID NO: 6061 - DNA, 21 bp, homo sapiens
aagtgcctgtttgagtttact

SEQ ID NO: 6062 - RNA, 21 nt, RNAi
gugccuguuugaguuuacuuu

SEQ ID NO: 6063 - RNA, 21 nt, RNAi
uucacggacaaacucaaauga

SEQ ID NO: 6064 - DNA, 21 bp, homo sapiens
cacaagcagatctactactcg

SEQ ID NO: 6065 - RNA, 21 nt, RNAi
caagcagaucuacuacucguu

SEQ ID NO: 6066 - RNA, 21 nt, RNAi
uuguucgucuagaugaugagc

SEQ ID NO: 6067 - DNA, 21 bp, homo sapiens
caagcagatctactactcgga

SEQ ID NO: 6068 - RNA, 21 nt, RNAi
agcagaucuacuacucggauu

SEQ ID NO: 6069 - RNA, 21 nt, RNAi
uuucgucuagaugaugagccu

SEQ ID NO: 6070 - DNA, 21 bp, homo sapiens
cagatctactactcggacaag

SEQ ID NO: 6071 - RNA, 21 nt, RNAi
gaucuacuacucggacaaguu

SEQ ID NO: 6072 - RNA, 21 nt, RNAi
uucuagaugaugagccuguuc

SEQ ID NO: 6073 - DNA, 21 bp, homo sapiens
caagtacttcgacgaacacta

SEQ ID NO: 6074 - RNA, 21 nt, RNAi
aguacuucgacgaacacuauu

SEQ ID NO: 6075 - RNA, 21 nt, RNAi
uuucaugaagcugcuugugau

SEQ ID NO: 6076 - DNA, 21 bp, homo sapiens
cactacgagtaccggcatgtt

SEQ ID NO: 6077 - RNA, 21 nt, RNAi
cuacgaguaccggcauguuuu

SEQ ID NO: 6078 - RNA, 21 nt, RNAi
uugaugcucauggccguacaa

SEQ ID NO: 6079 - DNA, 21 bp, homo sapiens
cagagaactttccaaacaagt

SEQ ID NO: 6080 - RNA, 21 nt, RNAi
gagaacuuuccaaacaaguuu

SEQ ID NO: 6081 - RNA, 21 nt, RNAi
uucucuugaaagguuuguuca

SEQ ID NO: 6082 - DNA, 21 bp, homo sapiens
catctgatgtctgaagaggag

SEQ ID NO: 6083 - RNA, 21 nt, RNAi
ucugaugucugaagaggaguu

SEQ ID NO: 6084 - RNA, 21 nt, RNAi
uuagacuacagacuucuccuc

SEQ ID NO: 6085 - DNA, 21 bp, homo sapiens
cattacatgattcatgagcca

SEQ ID NO: 6086 - RNA, 21 nt, RNAi
uuacaugauucaugagccauu

SEQ ID NO: 6087 - RNA, 21 nt, RNAi
uuaauguacuaaguacucggu

SEQ ID NO: 6088 - DNA, 21 bp, homo sapiens
catgattcatgagccagaacc

SEQ ID NO: 6089 - RNA, 21 nt, RNAi
ugauucaugagccagaaccuu

SEQ ID NO: 6090 - RNA, 21 nt, RNAi
uuacuaaguacucggucuugg

SEQ ID NO: 6091 - DNA, 21 bp, homo sapiens
catgagccagaaccacatatt

SEQ ID NO: 6092 - RNA, 21 nt, RNAi
ugagccagaaccacauauuuu

SEQ ID NO: 6093 - RNA, 21 nt, RNAi
uuacucggucuugguguauaa

SEQ ID NO: 6094 - DNA, 21 bp, homo sapiens
cagaaccacatattcttctct

SEQ ID NO: 6095 - RNA, 21 nt, RNAi
gaaccacauauucuucucuuu

SEQ ID NO: 6096 - RNA, 21 nt, RNAi
uucuugguguauaagaagaga

SEQ ID NO: 6097 - DNA, 21 bp, homo sapiens
cacatattcttctctttagac

SEQ ID NO: 6098 - RNA, 21 nt, RNAi
cauauucuucucuuuagacuu

SEQ ID NO: 6099 - RNA, 21 nt, RNAi
uuguauaagaagagaaaucug

SEQ ID NO: 6100 - DNA, 21 bp, homo sapiens
catattcttctctttagacga

SEQ ID NO: 6101 - RNA, 21 nt, RNAi
uauucuucucuuuagacgauu

SEQ ID NO: 6102 - RNA, 21 nt, RNAi
uuauaagaagagaaaucugcu

SEQ ID NO: 6103 - DNA, 21 bp, homo sapiens
cagtgaatacttgagaaatgt

SEQ ID NO: 6104 - RNA, 21 nt, RNAi
gugaauacuugagaaauguuu

SEQ ID NO: 6105 - RNA, 21 nt, RNAi
uucacuuaugaacucuuuaca

SEQ ID NO: 6106 - DNA, 21 bp, homo sapiens
caaatctttcatccatacctg

SEQ ID NO: 6107 - RNA, 21 nt, RNAi
aaucuuucauccauaccuguu

SEQ ID NO: 6108 - RNA, 21 nt, RNAi
uuuuagaaaguagguauggac

SEQ ID NO: 6109 - DNA, 21 bp, homo sapiens
catccatacctgtgcatgagc

SEQ ID NO: 6110 - RNA, 21 nt, RNAi
uccauaccugugcaugagcuu

SEQ ID NO: 6111 - RNA, 21 nt, RNAi
uuagguauggacacguacucg

SEQ ID NO: 6112 - DNA, 21 bp, homo sapiens
catacctgtgcatgagctgta

SEQ ID NO: 6113 - RNA, 21 nt, RNAi
uaccugugcaugagcuguauu

SEQ ID NO: 6114 - RNA, 21 nt, RNAi
uuauggacacguacucgacau

SEQ ID NO: 6115 - DNA, 21 bp, homo sapiens
catgagctgtattcttcacag

SEQ ID NO: 6116 - RNA, 21 nt, RNAi
ugagcuguauucuucacaguu

SEQ ID NO: 6117 - RNA, 21 nt, RNAi
uuacucgacauaagaaguguc

SEQ ID NO: 6118 - DNA, 21 bp, homo sapiens
cacagcaacagagctcagtta

SEQ ID NO: 6119 - RNA, 21 nt, RNAi
cagcaacagagcucaguuauu

SEQ ID NO: 6120 - RNA, 21 nt, RNAi
uugucguugucucgagucaau

SEQ ID NO: 6121 - DNA, 21 bp, homo sapiens
cagcaacagagctcagttaaa

SEQ ID NO: 6122 - RNA, 21 nt, RNAi
gcaacagagcucaguuaaauu

SEQ ID NO: 6123 - RNA, 21 nt, RNAi
uucguugucucgagucaauuu

SEQ ID NO: 6124 - DNA, 21 bp, homo sapiens
caacagagctcagttaaatgc

SEQ ID NO: 6125 - RNA, 21 nt, RNAi
acagagcucaguuaaaugcuu

SEQ ID NO: 6126 - RNA, 21 nt, RNAi
uuugucucgagucaauuuacg

SEQ ID NO: 6127 - DNA, 21 bp, homo sapiens
cagagctcagttaaatgcaac

SEQ ID NO: 6128 - RNA, 21 nt, RNAi
gagcucaguuaaaugcaacuu

SEQ ID NO: 6129 - RNA, 21 nt, RNAi
uucucgagucaauuuacguug

SEQ ID NO: 6130 - DNA, 21 bp, homo sapiens
cagttaaatgcaactgcaagt

SEQ ID NO: 6131 - RNA, 21 nt, RNAi
guuaaaugcaacugcaaguuu

SEQ ID NO: 6132 - RNA, 21 nt, RNAi
uucaauuuacguugacguuca

SEQ ID NO: 6133 - DNA, 21 bp, homo sapiens
caactgcaagtaggttactgt

SEQ ID NO: 6134 - RNA, 21 nt, RNAi
acugcaaguagguuacuguuu

SEQ ID NO: 6135 - RNA, 21 nt, RNAi
uuugacguucauccaaugaca

SEQ ID NO: 6136 - DNA, 21 bp, homo sapiens
caagtaggttactgtaagatg

SEQ ID NO: 6137 - RNA, 21 nt, RNAi
aguagguuacuguaagauguu

SEQ ID NO: 6138 - RNA, 21 nt, RNAi
uuucauccaaugacauucuac

SEQ ID NO: 6139 - DNA, 21 bp, homo sapiens
gatctactactcggacaagta

SEQ ID NO: 6140 - RNA, 21 nt, RNAi
ucuacuacucggacaaguauu

SEQ ID NO: 6141 - RNA, 21 nt, RNAi
uuagaugaugagccuguucau

SEQ ID NO: 6142 - DNA, 21 bp, homo sapiens
gacaagtacttcgacgaacac

SEQ ID NO: 6143 - RNA, 21 nt, RNAi
caaguacuucgacgaacacuu

SEQ ID NO: 6144 - RNA, 21 nt, RNAi
uuguucaugaagcugcuugug

SEQ ID NO: 6145 - DNA, 21 bp, homo sapiens
gacgaacactacgagtaccgg

SEQ ID NO: 6146 - RNA, 21 nt, RNAi
cgaacacuacgaguaccgguu

SEQ ID NO: 6147 - RNA, 21 nt, RNAi
uugcuugugaugcucauggcc

SEQ ID NO: 6148 - DNA, 21 bp, homo sapiens
gaacactacgagtaccggcat

SEQ ID NO: 6149 - RNA, 21 nt, RNAi
acacuacgaguaccggcauuu

SEQ ID NO: 6150 - RNA, 21 nt, RNAi
uuugugaugcucauggccgua

SEQ ID NO: 6151 - DNA, 21 bp, homo sapiens
gagtaccggcatgttatgtta

SEQ ID NO: 6152 - RNA, 21 nt, RNAi
guaccggcauguuauguuauu

SEQ ID NO: 6153 - RNA, 21 nt, RNAi
uucauggccguacaauacaau

SEQ ID NO: 6154 - DNA, 21 bp, homo sapiens
gagaactttccaaacaagtac

SEQ ID NO: 6155 - RNA, 21 nt, RNAi
gaacuuuccaaacaaguacuu

SEQ ID NO: 6156 - RNA, 21 nt, RNAi
uucuugaaagguuuguucaug

SEQ ID NO: 6157 - DNA, 21 bp, homo sapiens
gaactttccaaacaagtacct

SEQ ID NO: 6158 - RNA, 21 nt, RNAi
acuuuccaaacaaguaccuuu

SEQ ID NO: 6159 - RNA, 21 nt, RNAi
uuugaaagguuuguucaugga

SEQ ID NO: 6160 - DNA, 21 bp, homo sapiens
gatgtctgaagaggagtggag

SEQ ID NO: 6161 - RNA, 21 nt, RNAi
ugucugaagaggaguggaguu

SEQ ID NO: 6162 - RNA, 21 nt, RNAi
uuacagacuucuccucaccuc

SEQ ID NO: 6163 - DNA, 21 bp, homo sapiens
gaagaggagtggaggagactt

SEQ ID NO: 6164 - RNA, 21 nt, RNAi
agaggaguggaggagacuuuu

SEQ ID NO: 6165 - RNA, 21 nt, RNAi
uuucuccucaccuccucugaa

SEQ ID NO: 6166 - DNA, 21 bp, homo sapiens
gaggagtggaggagacttggt

SEQ ID NO: 6167 - RNA, 21 nt, RNAi
ggaguggaggagacuugguuu

SEQ ID NO: 6168 - RNA, 21 nt, RNAi
uuccucaccuccucugaacca

SEQ ID NO: 6169 - DNA, 21 bp, homo sapiens
gagtggaggagacttggtgtc

SEQ ID NO: 6170 - RNA, 21 nt, RNAi
guggaggagacuuggugucuu

SEQ ID NO: 6171 - RNA, 21 nt, RNAi
uucaccuccucugaaccacag

SEQ ID NO: 6172 - DNA, 21 bp, homo sapiens
gaggagacttggtgtccaaca

SEQ ID NO: 6173 - RNA, 21 nt, RNAi
ggagacuugguguccaacauu

SEQ ID NO: 6174 - RNA, 21 nt, RNAi
uuccucugaaccacagguugu

SEQ ID NO: 6175 - DNA, 21 bp, homo sapiens
gagacttggtgtccaacagag

SEQ ID NO: 6176 - RNA, 21 nt, RNAi
gacuugguguccaacagaguu

SEQ ID NO: 6177 - RNA, 21 nt, RNAi
uucugaaccacagguugucuc

SEQ ID NO: 6178 - DNA, 21 bp, homo sapiens
gacttggtgtccaacagagtc

SEQ ID NO: 6179 - RNA, 21 nt, RNAi
cuugguguccaacagagucuu

SEQ ID NO: 6180 - RNA, 21 nt, RNAi
uugaaccacagguugucucag

SEQ ID NO: 6181 - DNA, 21 bp, homo sapiens
gattcatgagccagaaccaca

SEQ ID NO: 6182 - RNA, 21 nt, RNAi
uucaugagccagaaccacauu

SEQ ID NO: 6183 - RNA, 21 nt, RNAi
uuaaguacucggucuuggugu

SEQ ID NO: 6184 - DNA, 21 bp, homo sapiens
gagccagaaccacatattctt

SEQ ID NO: 6185 - RNA, 21 nt, RNAi
gccagaaccacauauucuuuu

SEQ ID NO: 6186 - RNA, 21 nt, RNAi
uucggucuugguguauaagaa

SEQ ID NO: 6187 - DNA, 21 bp, homo sapiens
gaaccacatattcttctcttt

SEQ ID NO: 6188 - RNA, 21 nt, RNAi
accacauauucuucucuuuuu

SEQ ID NO: 6189 - RNA, 21 nt, RNAi
uuugguguauaagaagagaaa

SEQ ID NO: 6190 - DNA, 21 bp, homo sapiens
gagctgtattcttcacagcaa

SEQ ID NO: 6191 - RNA, 21 nt, RNAi
gcuguauucuucacagcaauu

SEQ ID NO: 6192 - RNA, 21 nt, RNAi
uucgacauaagaagugucguu

SEQ ID NO: 6193 - DNA, 21 bp, homo sapiens
gagctcagttaaatgcaactg

SEQ ID NO: 6194 - RNA, 21 nt, RNAi
gcucaguuaaaugcaacuguu

SEQ ID NO: 6195 - RNA, 21 nt, RNAi
uucgagucaauuuacguugac

SEQ ID NO: 6196 - DNA, 21 bp, homo sapiens
gagtttactgaaacagtttac

SEQ ID NO: 6197 - RNA, 21 nt, RNAi
guuuacugaaacaguuuacuu

SEQ ID NO: 6198 - RNA, 21 nt, RNAi
uucaaaugacuuugucaaaug

SEQ ID NO: 6199 - DNA, 21 bp, homo sapiens
tactactcggacaagtacttc

SEQ ID NO: 6200 - RNA, 21 nt, RNAi
cuacucggacaaguacuucuu

SEQ ID NO: 6201 - RNA, 21 nt, RNAi
uugaugagccuguucaugaag

SEQ ID NO: 6202 - DNA, 21 bp, homo sapiens
tactcggacaagtacttcgac

SEQ ID NO: 6203 - RNA, 21 nt, RNAi
cucggacaaguacuucgacuu

SEQ ID NO: 6204 - RNA, 21 nt, RNAi
uugagccuguucaugaagcug

SEQ ID NO: 6205 - DNA, 21 bp, homo sapiens
tacttcgacgaacactacgag

SEQ ID NO: 6206 - RNA, 21 nt, RNAi
cuucgacgaacacuacgaguu

SEQ ID NO: 6207 - RNA, 21 nt, RNAi
uugaagcugcuugugaugcuc

SEQ ID NO: 6208 - DNA, 21 bp, homo sapiens
tacgagtaccggcatgttatg

SEQ ID NO: 6209 - RNA, 21 nt, RNAi
cgaguaccggcauguuauguu

SEQ ID NO: 6210 - RNA, 21 nt, RNAi
uugcucauggccguacaauac

SEQ ID NO: 6211 - DNA, 21 bp, homo sapiens
tacatgattcatgagccagaa

SEQ ID NO: 6212 - RNA, 21 nt, RNAi
caugauucaugagccagaauu

SEQ ID NO: 6213 - RNA, 21 nt, RNAi
uuguacuaaguacucggucuu

SEQ ID NO: 6214 - DNA, 21 bp, homo sapiens
tattcttctctttagacgacc

SEQ ID NO: 6215 - RNA, 21 nt, RNAi
uucuucucuuuagacgaccuu

SEQ ID NO: 6216 - RNA, 21 nt, RNAi
uuaagaagagaaaucugcugg

SEQ ID NO: 6217 - DNA, 21 bp, homo sapiens
tacaaatctttcatccatacc

SEQ ID NO: 6218 - RNA, 21 nt, RNAi
caaaucuuucauccauaccuu

SEQ ID NO: 6219 - RNA, 21 nt, RNAi
uuguuuagaaaguagguaugg

SEQ ID NO: 6220 - DNA, 21 bp, homo sapiens
tacctgtgcatgagctgtatt

SEQ ID NO: 6221 - RNA, 21 nt, RNAi
ccugugcaugagcuguauuuu

SEQ ID NO: 6222 - RNA, 21 nt, RNAi
uuggacacguacucgacauaa

SEQ ID NO: 6223 - DNA, 21 bp, homo sapiens
tattcttcacagcaacagagc

SEQ ID NO: 6224 - RNA, 21 nt, RNAi
uucuucacagcaacagagcuu

SEQ ID NO: 6225 - RNA, 21 nt, RNAi
uuaagaagugucguugucucg

SEQ ID NO: 6226 - DNA, 21 bp, homo sapiens
taaatgcaactgcaagtaggt

SEQ ID NO: 6227 - RNA, 21 nt, RNAi
aaugcaacugcaaguagguuu

SEQ ID NO: 6228 - RNA, 21 nt, RNAi
uuuuacguugacguucaucca

SEQ ID NO: 6229 - DNA, 21 bp, homo sapiens
taagtgcctgtttgagtttac

SEQ ID NO: 6230 - RNA, 21 nt, RNAi
agugccuguuugaguuuacuu

SEQ ID NO: 6231 - RNA, 21 nt, RNAi
uuucacggacaaacucaaaug

SEQ ID NO: 6232 - DNA, 21 bp, homo sapiens
aaacctctcataatgaaggcc

SEQ ID NO: 6233 - RNA, 21 nt, RNAi
accucucauaaugaaggccuu

SEQ ID NO: 6234 - RNA, 21 nt, RNAi
uuuggagaguauuacuuccgg

SEQ ID NO: 6235 - DNA, 21 bp, homo sapiens
aaagaggcactagcaaagtcc

SEQ ID NO: 6236 - RNA, 21 nt, RNAi
agaggcacuagcaaaguccuu

SEQ ID NO: 6237 - RNA, 21 nt, RNAi
uuucuccgugaucguuucagg

SEQ ID NO: 6238 - DNA, 21 bp, homo sapiens
aagaggcactagcaaagtccg

SEQ ID NO: 6239 - RNA, 21 nt, RNAi
gaggcacuagcaaaguccguu

SEQ ID NO: 6240 - RNA, 21 nt, RNAi
uucuccgugaucguuucaggc

SEQ ID NO: 6241 - DNA, 21 bp, homo sapiens
aaagtccgagatgaatgtgaa

SEQ ID NO: 6242 - RNA, 21 nt, RNAi
aguccgagaugaaugugaauu

SEQ ID NO: 6243 - RNA, 21 nt, RNAi
uuucaggcucuacuuacacuu

SEQ ID NO: 6244 - DNA, 21 bp, homo sapiens
aagtccgagatgaatgtgaat

SEQ ID NO: 6245 - RNA, 21 nt, RNAi
guccgagaugaaugugaauuu

SEQ ID NO: 6246 - RNA, 21 nt, RNAi
uucaggcucuacuuacacuua

SEQ ID NO: 6247 - DNA, 21 bp, homo sapiens
aatgtcattctacatgagcat

SEQ ID NO: 6248 - RNA, 21 nt, RNAi
ugucauucuacaugagcauuu

SEQ ID NO: 6249 - RNA, 21 nt, RNAi
uuacaguaagauguacucgua

SEQ ID NO: 6250 - DNA, 21 bp, homo sapiens
aaatgaggaagaccttcagaa

SEQ ID NO: 6251 - RNA, 21 nt, RNAi
augaggaagaccuucagaauu

SEQ ID NO: 6252 - RNA, 21 nt, RNAi
uuuacuccuucuggaagucuu

SEQ ID NO: 6253 - DNA, 21 bp, homo sapiens
aatgaggaagaccttcagaag

SEQ ID NO: 6254 - RNA, 21 nt, RNAi
ugaggaagaccuucagaaguu

SEQ ID NO: 6255 - RNA, 21 nt, RNAi
uuacuccuucuggaagucuuc

SEQ ID NO: 6256 - DNA, 21 bp, homo sapiens
aagaccttcagaaggttgctg

SEQ ID NO: 6257 - RNA, 21 nt, RNAi
gaccuucagaagguugcuguu

SEQ ID NO: 6258 - RNA, 21 nt, RNAi
uucuggaagucuuccaacgac

SEQ ID NO: 6259 - DNA, 21 bp, homo sapiens
aaggttgctgagtacaagact

SEQ ID NO: 6260 - RNA, 21 nt, RNAi
gguugcugaguacaagacuuu

SEQ ID NO: 6261 - RNA, 21 nt, RNAi
uuccaacgacucauguucuga

SEQ ID NO: 6262 - DNA, 21 bp, homo sapiens
aaagccaatttatcaggaggt

SEQ ID NO: 6263 - RNA, 21 nt, RNAi
agccaauuuaucaggagguuu

SEQ ID NO: 6264 - RNA, 21 nt, RNAi
uuucgguuaaauaguccucca

SEQ ID NO: 6265 - DNA, 21 bp, homo sapiens
aagccaatttatcaggaggtg

SEQ ID NO: 6266 - RNA, 21 nt, RNAi
gccaauuuaucaggagguguu

SEQ ID NO: 6267 - RNA, 21 nt, RNAi
uucgguuaaauaguccuccac

SEQ ID NO: 6268 - DNA, 21 bp, homo sapiens
aatttatcaggaggtgtttgg

SEQ ID NO: 6269 - RNA, 21 nt, RNAi
uuuaucaggagguguuugguu

SEQ ID NO: 6270 - RNA, 21 nt, RNAi
uuaaauaguccuccacaaacc

SEQ ID NO: 6271 - DNA, 21 bp, homo sapiens
aaagataacatcaacatggct

SEQ ID NO: 6272 - RNA, 21 nt, RNAi
agauaacaucaacauggcuuu

SEQ ID NO: 6273 - RNA, 21 nt, RNAi
uuucuauuguaguuguaccga

SEQ ID NO: 6274 - DNA, 21 bp, homo sapiens
aagataacatcaacatggctc

SEQ ID NO: 6275 - RNA, 21 nt, RNAi
gauaacaucaacauggcucuu

SEQ ID NO: 6276 - RNA, 21 nt, RNAi
uucuauuguaguuguaccgag

SEQ ID NO: 6277 - DNA, 21 bp, homo sapiens
aacatcaacatggctctagtt

SEQ ID NO: 6278 - RNA, 21 nt, RNAi
caucaacauggcucuaguuuu

SEQ ID NO: 6279 - RNA, 21 nt, RNAi
uuguaguuguaccgagaucaa

SEQ ID NO: 6280 - DNA, 21 bp, homo sapiens
aacatggctctagttgtcgac

SEQ ID NO: 6281 - RNA, 21 nt, RNAi
cauggcucuaguugucgacuu

SEQ ID NO: 6282 - RNA, 21 nt, RNAi
uuguaccgagaucaacagcug

SEQ ID NO: 6283 - DNA, 21 bp, homo sapiens
aactcattagctgtggcagcg

SEQ ID NO: 6284 - RNA, 21 nt, RNAi
cucauuagcuguggcagcguu

SEQ ID NO: 6285 - RNA, 21 nt, RNAi
uugaguaaucgacaccgucgc

SEQ ID NO: 6286 - DNA, 21 bp, homo sapiens
aatcatactgctgacatacag

SEQ ID NO: 6287 - RNA, 21 nt, RNAi
ucauacugcugacauacaguu

SEQ ID NO: 6288 - RNA, 21 nt, RNAi
uuaguaugacgacuguauguc

SEQ ID NO: 6289 - DNA, 21 bp, homo sapiens
aaagtcctttcatctgtaaag

SEQ ID NO: 6290 - RNA, 21 nt, RNAi
aguccuuucaucuguaaaguu

SEQ ID NO: 6291 - RNA, 21 nt, RNAi
uuucaggaaaguagacauuuc

SEQ ID NO: 6292 - DNA, 21 bp, homo sapiens
aagtcctttcatctgtaaagg

SEQ ID NO: 6293 - RNA, 21 nt, RNAi
guccuuucaucuguaaagguu

SEQ ID NO: 6294 - RNA, 21 nt, RNAi
uucaggaaaguagacauuucc

SEQ ID NO: 6295 - DNA, 21 bp, homo sapiens
aaaggaccggttcatcaactt

SEQ ID NO: 6296 - RNA, 21 nt, RNAi
aggaccgguucaucaacuuuu

SEQ ID NO: 6297 - RNA, 21 nt, RNAi
uuuccuggccaaguaguugaa

SEQ ID NO: 6298 - DNA, 21 bp, homo sapiens
aaggaccggttcatcaacttc

SEQ ID NO: 6299 - RNA, 21 nt, RNAi
ggaccgguucaucaacuucuu

SEQ ID NO: 6300 - RNA, 21 nt, RNAi
uuccuggccaaguaguugaag

SEQ ID NO: 6301 - DNA, 21 bp, homo sapiens
aacttctttgtaggcaatacc

SEQ ID NO: 6302 - RNA, 21 nt, RNAi
cuucuuuguaggcaauaccuu

SEQ ID NO: 6303 - RNA, 21 nt, RNAi
uugaagaaacauccguuaugg

SEQ ID NO: 6304 - DNA, 21 bp, homo sapiens
aaggctaaaggaaacgaaaga

SEQ ID NO: 6305 - RNA, 21 nt, RNAi
ggcuaaaggaaacgaaagauu

SEQ ID NO: 6306 - RNA, 21 nt, RNAi
uuccgauuuccuuugcuuucu

SEQ ID NO: 6307 - DNA, 21 bp, homo sapiens
aaaggaaacgaaagatggttt

SEQ ID NO: 6308 - RNA, 21 nt, RNAi
aggaaacgaaagaugguuuuu

SEQ ID NO: 6309 - RNA, 21 nt, RNAi
uuuccuuugcuuucuaccaaa

SEQ ID NO: 6310 - DNA, 21 bp, homo sapiens
aagtatgtccatgcctttgaa

SEQ ID NO: 6311 - RNA, 21 nt, RNAi
guauguccaugccuuugaauu

SEQ ID NO: 6312 - RNA, 21 nt, RNAi
uucauacagguacggaaacuu

SEQ ID NO: 6313 - DNA, 21 bp, homo sapiens
aaactctagatgctcagactt

SEQ ID NO: 6314 - RNA, 21 nt, RNAi
acucuagaugcucagacuuuu

SEQ ID NO: 6315 - RNA, 21 nt, RNAi
uuugagaucuacgagucugaa

SEQ ID NO: 6316 - DNA, 21 bp, homo sapiens
aactctagatgctcagacttt

SEQ ID NO: 6317 - RNA, 21 nt, RNAi
cucuagaugcucagacuuuuu

SEQ ID NO: 6318 - RNA, 21 nt, RNAi
uugagaucuacgagucugaaa

SEQ ID NO: 6319 - DNA, 21 bp, homo sapiens
aagaataatcaggttctgttc

SEQ ID NO: 6320 - RNA, 21 nt, RNAi
gaauaaucagguucuguucuu

SEQ ID NO: 6321 - RNA, 21 nt, RNAi
uucuuauuaguccaagacaag

SEQ ID NO: 6322 - DNA, 21 bp, homo sapiens
aataatcaggttctgttccat

SEQ ID NO: 6323 - RNA, 21 nt, RNAi
uaaucagguucuguuccauuu

SEQ ID NO: 6324 - RNA, 21 nt, RNAi
uuauuaguccaagacaaggua

SEQ ID NO: 6325 - DNA, 21 bp, homo sapiens
aatcaggttctgttccataaa

SEQ ID NO: 6326 - RNA, 21 nt, RNAi
ucagguucuguuccauaaauu

SEQ ID NO: 6327 - RNA, 21 nt, RNAi
uuaguccaagacaagguauuu

SEQ ID NO: 6328 - DNA, 21 bp, homo sapiens
aaactctggattgcattccta

SEQ ID NO: 6329 - RNA, 21 nt, RNAi
acucuggauugcauuccuauu

SEQ ID NO: 6330 - RNA, 21 nt, RNAi
uuugagaccuaacguaaggau

SEQ ID NO: 6331 - DNA, 21 bp, homo sapiens
aactctggattgcattcctac

SEQ ID NO: 6332 - RNA, 21 nt, RNAi
cucuggauugcauuccuacuu

SEQ ID NO: 6333 - RNA, 21 nt, RNAi
uugagaccuaacguaaggaug

SEQ ID NO: 6334 - DNA, 21 bp, homo sapiens
aaatgcctctggagtgtattc

SEQ ID NO: 6335 - RNA, 21 nt, RNAi
augccucuggaguguauucuu

SEQ ID NO: 6336 - RNA, 21 nt, RNAi
uuuacggagaccucacauaag

SEQ ID NO: 6337 - DNA, 21 bp, homo sapiens
aatgcctctggagtgtattct

SEQ ID NO: 6338 - RNA, 21 nt, RNAi
ugccucuggaguguauucuuu

SEQ ID NO: 6339 - RNA, 21 nt, RNAi
uuacggagaccucacauaaga

SEQ ID NO: 6340 - DNA, 21 bp, homo sapiens
aaagagatccacaaagaagga

SEQ ID NO: 6341 - RNA, 21 nt, RNAi
agagauccacaaagaaggauu

SEQ ID NO: 6342 - RNA, 21 nt, RNAi
uuucucuagguguuucuuccu

SEQ ID NO: 6343 - DNA, 21 bp, homo sapiens
aagagatccacaaagaaggaa

SEQ ID NO: 6344 - RNA, 21 nt, RNAi
gagauccacaaagaaggaauu

SEQ ID NO: 6345 - RNA, 21 nt, RNAi
uucucuagguguuucuuccuu

SEQ ID NO: 6346 - DNA, 21 bp, homo sapiens
aatatacttcaggctgcgtat

SEQ ID NO: 6347 - RNA, 21 nt, RNAi
uauacuucaggcugcguauuu

SEQ ID NO: 6348 - RNA, 21 nt, RNAi
uuauaugaaguccgacgcaua

SEQ ID NO: 6349 - DNA, 21 bp, homo sapiens
aaataggagccagcctgaatg

SEQ ID NO: 6350 - RNA, 21 nt, RNAi
auaggagccagccugaauguu

SEQ ID NO: 6351 - RNA, 21 nt, RNAi
uuuauccucggucggacuuac

SEQ ID NO: 6352 - DNA, 21 bp, homo sapiens
aataggagccagcctgaatga

SEQ ID NO: 6353 - RNA, 21 nt, RNAi
uaggagccagccugaaugauu

SEQ ID NO: 6354 - RNA, 21 nt, RNAi
uuauccucggucggacuuacu

SEQ ID NO: 6355 - DNA, 21 bp, homo sapiens
aaagcaagccagattctgccg

SEQ ID NO: 6356 - RNA, 21 nt, RNAi
agcaagccagauucugccguu

SEQ ID NO: 6357 - RNA, 21 nt, RNAi
uuucguucggucuaagacggc

SEQ ID NO: 6358 - DNA, 21 bp, homo sapiens
aagcaagccagattctgccga

SEQ ID NO: 6359 - RNA, 21 nt, RNAi
gcaagccagauucugccgauu

SEQ ID NO: 6360 - RNA, 21 nt, RNAi
uucguucggucuaagacggcu

SEQ ID NO: 6361 - DNA, 21 bp, homo sapiens
aagccagattctgccgaacca

SEQ ID NO: 6362 - RNA, 21 nt, RNAi
gccagauucugccgaaccauu

SEQ ID NO: 6363 - RNA, 21 nt, RNAi
uucggucuaagacggcuuggu

SEQ ID NO: 6364 - DNA, 21 bp, homo sapiens
aaccaatggatcgatctgcca

SEQ ID NO: 6365 - RNA, 21 nt, RNAi
ccaauggaucgaucugccauu

SEQ ID NO: 6366 - RNA, 21 nt, RNAi
uugguuaccuagcuagacggu

SEQ ID NO: 6367 - DNA, 21 bp, homo sapiens
aatggatcgatctgccatgtg

SEQ ID NO: 6368 - RNA, 21 nt, RNAi
uggaucgaucugccauguguu

SEQ ID NO: 6369 - RNA, 21 nt, RNAi
uuaccuagcuagacgguacac

SEQ ID NO: 6370 - DNA, 21 bp, homo sapiens
aaatatgtcaacgacttcttc

SEQ ID NO: 6371 - RNA, 21 nt, RNAi
auaugucaacgacuucuucuu

SEQ ID NO: 6372 - RNA, 21 nt, RNAi
uuuauacaguugcugaagaag

SEQ ID NO: 6373 - DNA, 21 bp, homo sapiens
aatatgtcaacgacttcttca

SEQ ID NO: 6374 - RNA, 21 nt, RNAi
uaugucaacgacuucuucauu

SEQ ID NO: 6375 - RNA, 21 nt, RNAi
uuauacaguugcugaagaagu

SEQ ID NO: 6376 - DNA, 21 bp, homo sapiens
aacgacttcttcaacaagatc

SEQ ID NO: 6377 - RNA, 21 nt, RNAi
cgacuucuucaacaagaucuu

SEQ ID NO: 6378 - RNA, 21 nt, RNAi
uugcugaagaaguuguucuag

SEQ ID NO: 6379 - DNA, 21 bp, homo sapiens
aaacaatgtgagatgtctcca

SEQ ID NO: 6380 - RNA, 21 nt, RNAi
acaaugugagaugucuccauu

SEQ ID NO: 6381 - RNA, 21 nt, RNAi
uuuguuacacucuacagaggu

SEQ ID NO: 6382 - DNA, 21 bp, homo sapiens
aacaatgtgagatgtctccag

SEQ ID NO: 6383 - RNA, 21 nt, RNAi
caaugugagaugucuccaguu

SEQ ID NO: 6384 - RNA, 21 nt, RNAi
uuguuacacucuacagagguc

SEQ ID NO: 6385 - DNA, 21 bp, homo sapiens
aatgtgagatgtctccagcat

SEQ ID NO: 6386 - RNA, 21 nt, RNAi
ugugagaugucuccagcauuu

SEQ ID NO: 6387 - RNA, 21 nt, RNAi
uuacacucuacagaggucgua

SEQ ID NO: 6388 - DNA, 21 bp, homo sapiens
aatcatgagcactgctttaat

SEQ ID NO: 6389 - RNA, 21 nt, RNAi
ucaugagcacugcuuuaauuu

SEQ ID NO: 6390 - RNA, 21 nt, RNAi
uuaguacucgugacgaaauua

SEQ ID NO: 6391 - DNA, 21 bp, homo sapiens
aataggacacttctgagaaat

SEQ ID NO: 6392 - RNA, 21 nt, RNAi
uaggacacuucugagaaauuu

SEQ ID NO: 6393 - RNA, 21 nt, RNAi
uuauccugugaagacucuuua

SEQ ID NO: 6394 - DNA, 21 bp, homo sapiens
aaattcatcaggctgtgaagc

SEQ ID NO: 6395 - RNA, 21 nt, RNAi
auucaucaggcugugaagcuu

SEQ ID NO: 6396 - RNA, 21 nt, RNAi
uuuaaguaguccgacacuucg

SEQ ID NO: 6397 - DNA, 21 bp, homo sapiens
aattcatcaggctgtgaagcg

SEQ ID NO: 6398 - RNA, 21 nt, RNAi
uucaucaggcugugaagcguu

SEQ ID NO: 6399 - RNA, 21 nt, RNAi
uuaaguaguccgacacuucgc

SEQ ID NO: 6400 - DNA, 21 bp, homo sapiens
aatatcgaacagagtttacca

SEQ ID NO: 6401 - RNA, 21 nt, RNAi
uaucgaacagaguuuaccauu

SEQ ID NO: 6402 - RNA, 21 nt, RNAi
uuauagcuugucucaaauggu

SEQ ID NO: 6403 - DNA, 21 bp, homo sapiens
aacagagtttaccacagcttt

SEQ ID NO: 6404 - RNA, 21 nt, RNAi
cagaguuuaccacagcuuuuu

SEQ ID NO: 6405 - RNA, 21 nt, RNAi
uugucucaaauggugucgaaa

SEQ ID NO: 6406 - DNA, 21 bp, homo sapiens
aattcagcgaagtcctcttaa

SEQ ID NO: 6407 - RNA, 21 nt, RNAi
uucagcgaaguccucuuaauu

SEQ ID NO: 6408 - RNA, 21 nt, RNAi
uuaagucgcuucaggagaauu

SEQ ID NO: 6409 - DNA, 21 bp, homo sapiens
aacatctatatccaccttcat

SEQ ID NO: 6410 - RNA, 21 nt, RNAi
caucuauauccaccuucauuu

SEQ ID NO: 6411 - RNA, 21 nt, RNAi
uuguagauauagguggaagua

SEQ ID NO: 6412 - DNA, 21 bp, homo sapiens
aaaggagacctcaccatagct

SEQ ID NO: 6413 - RNA, 21 nt, RNAi
aggagaccucaccauagcuuu

SEQ ID NO: 6414 - RNA, 21 nt, RNAi
uuuccucuggagugguaucga

SEQ ID NO: 6415 - DNA, 21 bp, homo sapiens
aaggagacctcaccatagcta

SEQ ID NO: 6416 - RNA, 21 nt, RNAi
ggagaccucaccauagcuauu

SEQ ID NO: 6417 - RNA, 21 nt, RNAi
uuccucuggagugguaucgau

SEQ ID NO: 6418 - DNA, 21 bp, homo sapiens
aagtgattgtggagcatacat

SEQ ID NO: 6419 - RNA, 21 nt, RNAi
gugauuguggagcauacauuu

SEQ ID NO: 6420 - RNA, 21 nt, RNAi
uucacuaacaccucguaugua

SEQ ID NO: 6421 - DNA, 21 bp, homo sapiens
aaatggctacacactggttat

SEQ ID NO: 6422 - RNA, 21 nt, RNAi
auggcuacacacugguuauuu

SEQ ID NO: 6423 - RNA, 21 nt, RNAi
uuuaccgaugugugaccaaua

SEQ ID NO: 6424 - DNA, 21 bp, homo sapiens
aatggctacacactggttatc

SEQ ID NO: 6425 - RNA, 21 nt, RNAi
uggcuacacacugguuaucuu

SEQ ID NO: 6426 - RNA, 21 nt, RNAi
uuaccgaugugugaccaauag

SEQ ID NO: 6427 - DNA, 21 bp, homo sapiens
aaatgtgtgcgatcggaggaa

SEQ ID NO: 6428 - RNA, 21 nt, RNAi
augugugcgaucggaggaauu

SEQ ID NO: 6429 - RNA, 21 nt, RNAi
uuuacacacgcuagccuccuu

SEQ ID NO: 6430 - DNA, 21 bp, homo sapiens
aatgtgtgcgatcggaggaat

SEQ ID NO: 6431 - RNA, 21 nt, RNAi
ugugugcgaucggaggaauuu

SEQ ID NO: 6432 - RNA, 21 nt, RNAi
uuacacacgcuagccuccuua

SEQ ID NO: 6433 - DNA, 21 bp, homo sapiens
aacagatctgtctgcctgcaa

SEQ ID NO: 6434 - RNA, 21 nt, RNAi
cagaucugucugccugcaauu

SEQ ID NO: 6435 - RNA, 21 nt, RNAi
uugucuagacagacggacguu

SEQ ID NO: 6436 - DNA, 21 bp, homo sapiens
aaggctgaccatatgtggctg

SEQ ID NO: 6437 - RNA, 21 nt, RNAi
ggcugaccauauguggcuguu

SEQ ID NO: 6438 - RNA, 21 nt, RNAi
uuccgacugguauacaccgac

SEQ ID NO: 6439 - DNA, 21 bp, homo sapiens
aaactagagttctccttggaa

SEQ ID NO: 6440 - RNA, 21 nt, RNAi
acuagaguucuccuuggaauu

SEQ ID NO: 6441 - RNA, 21 nt, RNAi
uuugaucucaagaggaaccuu

SEQ ID NO: 6442 - DNA, 21 bp, homo sapiens
aactagagttctccttggaaa

SEQ ID NO: 6443 - RNA, 21 nt, RNAi
cuagaguucuccuuggaaauu

SEQ ID NO: 6444 - RNA, 21 nt, RNAi
uugaucucaagaggaaccuuu

SEQ ID NO: 6445 - DNA, 21 bp, homo sapiens
aaatgagagctgcaccttgac

SEQ ID NO: 6446 - RNA, 21 nt, RNAi
augagagcugcaccuugacuu

SEQ ID NO: 6447 - RNA, 21 nt, RNAi
uuuacucucgacguggaacug

SEQ ID NO: 6448 - DNA, 21 bp, homo sapiens
aatgagagctgcaccttgact

SEQ ID NO: 6449 - RNA, 21 nt, RNAi
ugagagcugcaccuugacuuu

SEQ ID NO: 6450 - RNA, 21 nt, RNAi
uuacucucgacguggaacuga

SEQ ID NO: 6451 - DNA, 21 bp, homo sapiens
aagtgagagcacgatgaatac

SEQ ID NO: 6452 - RNA, 21 nt, RNAi
gugagagcacgaugaauacuu

SEQ ID NO: 6453 - RNA, 21 nt, RNAi
uucacucucgugcuacuuaug

SEQ ID NO: 6454 - DNA, 21 bp, homo sapiens
aaatgcacagttggtcctgcc

SEQ ID NO: 6455 - RNA, 21 nt, RNAi
augcacaguugguccugccuu

SEQ ID NO: 6456 - RNA, 21 nt, RNAi
uuuacgugucaaccaggacgg

SEQ ID NO: 6457 - DNA, 21 bp, homo sapiens
aatgcacagttggtcctgcca

SEQ ID NO: 6458 - RNA, 21 nt, RNAi
ugcacaguugguccugccauu

SEQ ID NO: 6459 - RNA, 21 nt, RNAi
uuacgugucaaccaggacggu

SEQ ID NO: 6460 - DNA, 21 bp, homo sapiens
aattatttcaaatggccacgg

SEQ ID NO: 6461 - RNA, 21 nt, RNAi
uuauuucaaauggccacgguu

SEQ ID NO: 6462 - RNA, 21 nt, RNAi
uuaauaaaguuuaccggugcc

SEQ ID NO: 6463 - DNA, 21 bp, homo sapiens
aacacaatacagtacattctc

SEQ ID NO: 6464 - RNA, 21 nt, RNAi
cacaauacaguacauucucuu

SEQ ID NO: 6465 - RNA, 21 nt, RNAi
uuguguuaugucauguaagag

SEQ ID NO: 6466 - DNA, 21 bp, homo sapiens
aatacagtacattctcctatg

SEQ ID NO: 6467 - RNA, 21 nt, RNAi
uacaguacauucuccuauguu

SEQ ID NO: 6468 - RNA, 21 nt, RNAi
uuaugucauguaagaggauac

SEQ ID NO: 6469 - DNA, 21 bp, homo sapiens
aataacaagtatttcgccgaa

SEQ ID NO: 6470 - RNA, 21 nt, RNAi
uaacaaguauuucgccgaauu

SEQ ID NO: 6471 - RNA, 21 nt, RNAi
uuauuguucauaaagcggcuu

SEQ ID NO: 6472 - DNA, 21 bp, homo sapiens
aacaagtatttcgccgaaata

SEQ ID NO: 6473 - RNA, 21 nt, RNAi
caaguauuucgccgaaauauu

SEQ ID NO: 6474 - RNA, 21 nt, RNAi
uuguucauaaagcggcuuuau

SEQ ID NO: 6475 - DNA, 21 bp, homo sapiens
aagtatttcgccgaaatacgg

SEQ ID NO: 6476 - RNA, 21 nt, RNAi
guauuucgccgaaauacgguu

SEQ ID NO: 6477 - RNA, 21 nt, RNAi
uucauaaagcggcuuuaugcc

SEQ ID NO: 6478 - DNA, 21 bp, homo sapiens
aaatacggtcctatggctggt

SEQ ID NO: 6479 - RNA, 21 nt, RNAi
auacgguccuauggcugguuu

SEQ ID NO: 6480 - RNA, 21 nt, RNAi
uuuaugccaggauaccgacca

SEQ ID NO: 6481 - DNA, 21 bp, homo sapiens
aatacggtcctatggctggtg

SEQ ID NO: 6482 - RNA, 21 nt, RNAi
uacgguccuauggcugguguu

SEQ ID NO: 6483 - RNA, 21 nt, RNAi
uuaugccaggauaccgaccac

SEQ ID NO: 6484 - DNA, 21 bp, homo sapiens
aactggaaattacctaaacag

SEQ ID NO: 6485 - RNA, 21 nt, RNAi
cuggaaauuaccuaaacaguu

SEQ ID NO: 6486 - RNA, 21 nt, RNAi
uugaccuuuaauggauuuguc

SEQ ID NO: 6487 - DNA, 21 bp, homo sapiens
aaagtgtgtcaaacagtattc

SEQ ID NO: 6488 - RNA, 21 nt, RNAi
agugugucaaacaguauucuu

SEQ ID NO: 6489 - RNA, 21 nt, RNAi
uuucacacaguuugucauaag

SEQ ID NO: 6490 - DNA, 21 bp, homo sapiens
aagtgtgtcaaacagtattct

SEQ ID NO: 6491 - RNA, 21 nt, RNAi
gugugucaaacaguauucuuu

SEQ ID NO: 6492 - RNA, 21 nt, RNAi
uucacacaguuugucauaaga

SEQ ID NO: 6493 - DNA, 21 bp, homo sapiens
aaaccatttcaactgagtttg

SEQ ID NO: 6494 - RNA, 21 nt, RNAi
accauuucaacugaguuuguu

SEQ ID NO: 6495 - RNA, 21 nt, RNAi
uuugguaaaguugacucaaac

SEQ ID NO: 6496 - DNA, 21 bp, homo sapiens
aaccatttcaactgagtttgc

SEQ ID NO: 6497 - RNA, 21 nt, RNAi
ccauuucaacugaguuugcuu

SEQ ID NO: 6498 - RNA, 21 nt, RNAi
uugguaaaguugacucaaacg

SEQ ID NO: 6499 - DNA, 21 bp, homo sapiens
aaattgacttagccaaccgag

SEQ ID NO: 6500 - RNA, 21 nt, RNAi
auugacuuagccaaccgaguu

SEQ ID NO: 6501 - RNA, 21 nt, RNAi
uuuaacugaaucgguuggcuc

SEQ ID NO: 6502 - DNA, 21 bp, homo sapiens
aattgacttagccaaccgaga

SEQ ID NO: 6503 - RNA, 21 nt, RNAi
uugacuuagccaaccgagauu

SEQ ID NO: 6504 - RNA, 21 nt, RNAi
uuaacugaaucgguuggcucu

SEQ ID NO: 6505 - DNA, 21 bp, homo sapiens
aaccgagagacaagcatcttc

SEQ ID NO: 6506 - RNA, 21 nt, RNAi
ccgagagacaagcaucuucuu

SEQ ID NO: 6507 - RNA, 21 nt, RNAi
uuggcucucuguucguagaag

SEQ ID NO: 6508 - DNA, 21 bp, homo sapiens
aagcatcttcagttaccgtga

SEQ ID NO: 6509 - RNA, 21 nt, RNAi
gcaucuucaguuaccgugauu

SEQ ID NO: 6510 - RNA, 21 nt, RNAi
uucguagaagucaauggcacu

SEQ ID NO: 6511 - DNA, 21 bp, homo sapiens
aaagaacctctcaacattgtc

SEQ ID NO: 6512 - RNA, 21 nt, RNAi
agaaccucucaacauugucuu

SEQ ID NO: 6513 - RNA, 21 nt, RNAi
uuucuuggagaguuguaacag

SEQ ID NO: 6514 - DNA, 21 bp, homo sapiens
aagaacctctcaacattgtca

SEQ ID NO: 6515 - RNA, 21 nt, RNAi
gaaccucucaacauugucauu

SEQ ID NO: 6516 - RNA, 21 nt, RNAi
uucuuggagaguuguaacagu

SEQ ID NO: 6517 - DNA, 21 bp, homo sapiens
aacctctcaacattgtcagtt

SEQ ID NO: 6518 - RNA, 21 nt, RNAi
ccucucaacauugucaguuuu

SEQ ID NO: 6519 - RNA, 21 nt, RNAi
uuggagaguuguaacagucaa

SEQ ID NO: 6520 - DNA, 21 bp, homo sapiens
aaacctgaattcagttagtgt

SEQ ID NO: 6521 - RNA, 21 nt, RNAi
accugaauucaguuaguguuu

SEQ ID NO: 6522 - RNA, 21 nt, RNAi
uuuggacuuaagucaaucaca

SEQ ID NO: 6523 - DNA, 21 bp, homo sapiens
aacctgaattcagttagtgtc

SEQ ID NO: 6524 - RNA, 21 nt, RNAi
ccugaauucaguuagugucuu

SEQ ID NO: 6525 - RNA, 21 nt, RNAi
uuggacuuaagucaaucacag

SEQ ID NO: 6526 - DNA, 21 bp, homo sapiens
aatggtcataaatgtgcatga

SEQ ID NO: 6527 - RNA, 21 nt, RNAi
uggucauaaaugugcaugauu

SEQ ID NO: 6528 - RNA, 21 nt, RNAi
uuaccaguauuuacacguacu

SEQ ID NO: 6529 - DNA, 21 bp, homo sapiens
aaatgtgcatgaagcaggaag

SEQ ID NO: 6530 - RNA, 21 nt, RNAi
augugcaugaagcaggaaguu

SEQ ID NO: 6531 - RNA, 21 nt, RNAi
uuuacacguacuucguccuuc

SEQ ID NO: 6532 - DNA, 21 bp, homo sapiens
aatgtgcatgaagcaggaagg

SEQ ID NO: 6533 - RNA, 21 nt, RNAi
ugugcaugaagcaggaagguu

SEQ ID NO: 6534 - RNA, 21 nt, RNAi
uuacacguacuucguccuucc

SEQ ID NO: 6535 - DNA, 21 bp, homo sapiens
aagcaggaaggaactttacag

SEQ ID NO: 6536 - RNA, 21 nt, RNAi
gcaggaaggaacuuuacaguu

SEQ ID NO: 6537 - RNA, 21 nt, RNAi
uucguccuuccuugaaauguc

SEQ ID NO: 6538 - DNA, 21 bp, homo sapiens
aaggaactttacagtggcatg

SEQ ID NO: 6539 - RNA, 21 nt, RNAi
ggaacuuuacaguggcauguu

SEQ ID NO: 6540 - RNA, 21 nt, RNAi
uuccuugaaaugucaccguac

SEQ ID NO: 6541 - DNA, 21 bp, homo sapiens
aactttacagtggcatgtcaa

SEQ ID NO: 6542 - RNA, 21 nt, RNAi
cuuuacaguggcaugucaauu

SEQ ID NO: 6543 - RNA, 21 nt, RNAi
uugaaaugucaccguacaguu

SEQ ID NO: 6544 - DNA, 21 bp, homo sapiens
aacatcgctctaattcagaga

SEQ ID NO: 6545 - RNA, 21 nt, RNAi
caucgcucuaauucagagauu

SEQ ID NO: 6546 - RNA, 21 nt, RNAi
uuguagcgagauuaagucucu

SEQ ID NO: 6547 - DNA, 21 bp, homo sapiens
aatctgttgtaccactccttc

SEQ ID NO: 6548 - RNA, 21 nt, RNAi
ucuguuguaccacuccuucuu

SEQ ID NO: 6549 - RNA, 21 nt, RNAi
uuagacaacauggugaggaag

SEQ ID NO: 6550 - DNA, 21 bp, homo sapiens
aacagctgaatctgcaactcc

SEQ ID NO: 6551 - RNA, 21 nt, RNAi
cagcugaaucugcaacuccuu

SEQ ID NO: 6552 - RNA, 21 nt, RNAi
uugucgacuuagacguugagg

SEQ ID NO: 6553 - DNA, 21 bp, homo sapiens
aaagccagtgatgatctcaat

SEQ ID NO: 6554 - RNA, 21 nt, RNAi
agccagugaugaucucaauuu

SEQ ID NO: 6555 - RNA, 21 nt, RNAi
uuucggucacuacuagaguua

SEQ ID NO: 6556 - DNA, 21 bp, homo sapiens
aagccagtgatgatctcaatg

SEQ ID NO: 6557 - RNA, 21 nt, RNAi
gccagugaugaucucaauguu

SEQ ID NO: 6558 - RNA, 21 nt, RNAi
uucggucacuacuagaguuac

SEQ ID NO: 6559 - DNA, 21 bp, homo sapiens
aagcagttaaaggtgaagtgt

SEQ ID NO: 6560 - RNA, 21 nt, RNAi
gcaguuaaaggugaaguguuu

SEQ ID NO: 6561 - RNA, 21 nt, RNAi
uucgucaauuuccacuucaca

SEQ ID NO: 6562 - DNA, 21 bp, homo sapiens
aaagttggaaataagagctgt

SEQ ID NO: 6563 - RNA, 21 nt, RNAi
aguuggaaauaagagcuguuu

SEQ ID NO: 6564 - RNA, 21 nt, RNAi
uuucaaccuuuauucucgaca

SEQ ID NO: 6565 - DNA, 21 bp, homo sapiens
aagttggaaataagagctgtg

SEQ ID NO: 6566 - RNA, 21 nt, RNAi
guuggaaauaagagcuguguu

SEQ ID NO: 6567 - RNA, 21 nt, RNAi
uucaaccuuuauucucgacac

SEQ ID NO: 6568 - DNA, 21 bp, homo sapiens
aagagctgtgagaatatacac

SEQ ID NO: 6569 - RNA, 21 nt, RNAi
gagcugugagaauauacacuu

SEQ ID NO: 6570 - RNA, 21 nt, RNAi
uucucgacacucuuauaugug

SEQ ID NO: 6571 - DNA, 21 bp, homo sapiens
aatgacctgctgaaattgaac

SEQ ID NO: 6572 - RNA, 21 nt, RNAi
ugaccugcugaaauugaacuu

SEQ ID NO: 6573 - RNA, 21 nt, RNAi
uuacuggacgacuuuaacuug

SEQ ID NO: 6574 - DNA, 21 bp, homo sapiens
aaattgaacagcgagctaaat

SEQ ID NO: 6575 - RNA, 21 nt, RNAi
auugaacagcgagcuaaauuu

SEQ ID NO: 6576 - RNA, 21 nt, RNAi
uuuaacuugucgcucgauuua

SEQ ID NO: 6577 - DNA, 21 bp, homo sapiens
aattgaacagcgagctaaata

SEQ ID NO: 6578 - RNA, 21 nt, RNAi
uugaacagcgagcuaaauauu

SEQ ID NO: 6579 - RNA, 21 nt, RNAi
uuaacuugucgcucgauuuau

SEQ ID NO: 6580 - DNA, 21 bp, homo sapiens
aacagcgagctaaatatagag

SEQ ID NO: 6581 - RNA, 21 nt, RNAi
cagcgagcuaaauauagaguu

SEQ ID NO: 6582 - RNA, 21 nt, RNAi
uugucgcucgauuuauaucuc

SEQ ID NO: 6583 - DNA, 21 bp, homo sapiens
aaatatagagtggaagcaagc

SEQ ID NO: 6584 - RNA, 21 nt, RNAi
auauagaguggaagcaagcuu

SEQ ID NO: 6585 - RNA, 21 nt, RNAi
uuuauaucucaccuucguucg

SEQ ID NO: 6586 - DNA, 21 bp, homo sapiens
aatatagagtggaagcaagca

SEQ ID NO: 6587 - RNA, 21 nt, RNAi
uauagaguggaagcaagcauu

SEQ ID NO: 6588 - RNA, 21 nt, RNAi
uuauaucucaccuucguucgu

SEQ ID NO: 6589 - DNA, 21 bp, homo sapiens
aagcaagcaatttcttcaacc

SEQ ID NO: 6590 - RNA, 21 nt, RNAi
gcaagcaauuucuucaaccuu

SEQ ID NO: 6591 - RNA, 21 nt, RNAi
uucguucguuaaagaaguugg

SEQ ID NO: 6592 - DNA, 21 bp, homo sapiens
aagcaatttcttcaaccgtcc

SEQ ID NO: 6593 - RNA, 21 nt, RNAi
gcaauuucuucaaccguccuu

SEQ ID NO: 6594 - RNA, 21 nt, RNAi
uucguuaaagaaguuggcagg

SEQ ID NO: 6595 - DNA, 21 bp, homo sapiens
aatttcttcaaccgtccttgg

SEQ ID NO: 6596 - RNA, 21 nt, RNAi
uuucuucaaccguccuugguu

SEQ ID NO: 6597 - RNA, 21 nt, RNAi
uuaaagaaguuggcaggaacc

SEQ ID NO: 6598 - DNA, 21 bp, homo sapiens
aagtaatagttcaaccagatc

SEQ ID NO: 6599 - RNA, 21 nt, RNAi
guaauaguucaaccagaucuu

SEQ ID NO: 6600 - RNA, 21 nt, RNAi
uucauuaucaaguuggucuag

SEQ ID NO: 6601 - DNA, 21 bp, homo sapiens
aatagttcaaccagatcagaa

SEQ ID NO: 6602 - RNA, 21 nt, RNAi
uaguucaaccagaucagaauu

SEQ ID NO: 6603 - RNA, 21 nt, RNAi
uuaucaaguuggucuagucuu

SEQ ID NO: 6604 - DNA, 21 bp, homo sapiens
aaccagatcagaatttcacag

SEQ ID NO: 6605 - RNA, 21 nt, RNAi
ccagaucagaauuucacaguu

SEQ ID NO: 6606 - RNA, 21 nt, RNAi
uuggucuagucuuaaaguguc

SEQ ID NO: 6607 - DNA, 21 bp, homo sapiens
aatttcacaggattgattgct

SEQ ID NO: 6608 - RNA, 21 nt, RNAi
uuucacaggauugauugcuuu

SEQ ID NO: 6609 - RNA, 21 nt, RNAi
uuaaaguguccuaacuaacga

SEQ ID NO: 6610 - DNA, 21 bp, homo sapiens
aacagcactgttattactact

SEQ ID NO: 6611 - RNA, 21 nt, RNAi
cagcacuguuauuacuacuuu

SEQ ID NO: 6612 - RNA, 21 nt, RNAi
uugucgugacaauaaugauga

SEQ ID NO: 6613 - DNA, 21 bp, homo sapiens
aattagttcgctacgatgcaa

SEQ ID NO: 6614 - RNA, 21 nt, RNAi
uuaguucgcuacgaugcaauu

SEQ ID NO: 6615 - RNA, 21 nt, RNAi
uuaaucaagcgaugcuacguu

SEQ ID NO: 6616 - DNA, 21 bp, homo sapiens
aagagtacacactcctcattt

SEQ ID NO: 6617 - RNA, 21 nt, RNAi
gaguacacacuccucauuuuu

SEQ ID NO: 6618 - RNA, 21 nt, RNAi
uucucaugugugaggaguaaa

SEQ ID NO: 6619 - DNA, 21 bp, homo sapiens
aaatgaatctgtagactaccg

SEQ ID NO: 6620 - RNA, 21 nt, RNAi
augaaucuguagacuaccguu

SEQ ID NO: 6621 - RNA, 21 nt, RNAi
uuuacuuagacaucugauggc

SEQ ID NO: 6622 - DNA, 21 bp, homo sapiens
aatgaatctgtagactaccga

SEQ ID NO: 6623 - RNA, 21 nt, RNAi
ugaaucuguagacuaccgauu

SEQ ID NO: 6624 - RNA, 21 nt, RNAi
uuacuuagacaucugauggcu

SEQ ID NO: 6625 - DNA, 21 bp, homo sapiens
aatctgtagactaccgagcta

SEQ ID NO: 6626 - RNA, 21 nt, RNAi
ucuguagacuaccgagcuauu

SEQ ID NO: 6627 - RNA, 21 nt, RNAi
uuagacaucugauggcucgau

SEQ ID NO: 6628 - DNA, 21 bp, homo sapiens
aattcatctcagaacggttca

SEQ ID NO: 6629 - RNA, 21 nt, RNAi
uucaucucagaacgguucauu

SEQ ID NO: 6630 - RNA, 21 nt, RNAi
uuaaguagagucuugccaagu

SEQ ID NO: 6631 - DNA, 21 bp, homo sapiens
aacggttcatgccgacaagtg

SEQ ID NO: 6632 - RNA, 21 nt, RNAi
cgguucaugccgacaaguguu

SEQ ID NO: 6633 - RNA, 21 nt, RNAi
uugccaaguacggcuguucac

SEQ ID NO: 6634 - DNA, 21 bp, homo sapiens
aagtgcagtatcctctgacag

SEQ ID NO: 6635 - RNA, 21 nt, RNAi
gugcaguauccucugacaguu

SEQ ID NO: 6636 - RNA, 21 nt, RNAi
uucacgucauaggagacuguc

SEQ ID NO: 6637 - DNA, 21 bp, homo sapiens
aaatactgtccacattgacct

SEQ ID NO: 6638 - RNA, 21 nt, RNAi
auacuguccacauugaccuuu

SEQ ID NO: 6639 - RNA, 21 nt, RNAi
uuuaugacagguguaacugga

SEQ ID NO: 6640 - DNA, 21 bp, homo sapiens
aatactgtccacattgacctc

SEQ ID NO: 6641 - RNA, 21 nt, RNAi
uacuguccacauugaccucuu

SEQ ID NO: 6642 - RNA, 21 nt, RNAi
uuaugacagguguaacuggag

SEQ ID NO: 6643 - DNA, 21 bp, homo sapiens
aaatccagagctggtccaggc

SEQ ID NO: 6644 - RNA, 21 nt, RNAi
auccagagcugguccaggcuu

SEQ ID NO: 6645 - RNA, 21 nt, RNAi
uuuaggucucgaccagguccg

SEQ ID NO: 6646 - DNA, 21 bp, homo sapiens
aatccagagctggtccaggca

SEQ ID NO: 6647 - RNA, 21 nt, RNAi
uccagagcugguccaggcauu

SEQ ID NO: 6648 - RNA, 21 nt, RNAi
uuaggucucgaccagguccgu

SEQ ID NO: 6649 - DNA, 21 bp, homo sapiens
aaattcactgtgctgtgaaat

SEQ ID NO: 6650 - RNA, 21 nt, RNAi
auucacugugcugugaaauuu

SEQ ID NO: 6651 - RNA, 21 nt, RNAi
uuuaagugacacgacacuuua

SEQ ID NO: 6652 - DNA, 21 bp, homo sapiens
aattcactgtgctgtgaaatc

SEQ ID NO: 6653 - RNA, 21 nt, RNAi
uucacugugcugugaaaucuu

SEQ ID NO: 6654 - RNA, 21 nt, RNAi
uuaagugacacgacacuuuag

SEQ ID NO: 6655 - DNA, 21 bp, homo sapiens
aaatccttgaacagaatcact

SEQ ID NO: 6656 - RNA, 21 nt, RNAi
auccuugaacagaaucacuuu

SEQ ID NO: 6657 - RNA, 21 nt, RNAi
uuuaggaacuugucuuaguga

SEQ ID NO: 6658 - DNA, 21 bp, homo sapiens
aatccttgaacagaatcactg

SEQ ID NO: 6659 - RNA, 21 nt, RNAi
uccuugaacagaaucacuguu

SEQ ID NO: 6660 - RNA, 21 nt, RNAi
uuaggaacuugucuuagugac

SEQ ID NO: 6661 - DNA, 21 bp, homo sapiens
aacagaatcactgacatagga

SEQ ID NO: 6662 - RNA, 21 nt, RNAi
cagaaucacugacauaggauu

SEQ ID NO: 6663 - RNA, 21 nt, RNAi
uugucuuagugacuguauccu

SEQ ID NO: 6664 - DNA, 21 bp, homo sapiens
aatcactgacataggagaagt

SEQ ID NO: 6665 - RNA, 21 nt, RNAi
ucacugacauaggagaaguuu

SEQ ID NO: 6666 - RNA, 21 nt, RNAi
uuagugacuguauccucuuca

SEQ ID NO: 6667 - DNA, 21 bp, homo sapiens
aatctgcctgcgaagtgaagg

SEQ ID NO: 6668 - RNA, 21 nt, RNAi
ucugccugcgaagugaagguu

SEQ ID NO: 6669 - RNA, 21 nt, RNAi
uuagacggacgcuucacuucc

SEQ ID NO: 6670 - DNA, 21 bp, homo sapiens
aaacatggagatcttcgaaat

SEQ ID NO: 6671 - RNA, 21 nt, RNAi
acauggagaucuucgaaauuu

SEQ ID NO: 6672 - RNA, 21 nt, RNAi
uuuguaccucuagaagcuuua

SEQ ID NO: 6673 - DNA, 21 bp, homo sapiens
aacatggagatcttcgaaatt

SEQ ID NO: 6674 - RNA, 21 nt, RNAi
cauggagaucuucgaaauuuu

SEQ ID NO: 6675 - RNA, 21 nt, RNAi
uuguaccucuagaagcuuuaa

SEQ ID NO: 6676 - DNA, 21 bp, homo sapiens
aaatgagactcataatccaac

SEQ ID NO: 6677 - RNA, 21 nt, RNAi
augagacucauaauccaacuu

SEQ ID NO: 6678 - RNA, 21 nt, RNAi
uuuacucugaguauuagguug

SEQ ID NO: 6679 - DNA, 21 bp, homo sapiens
aatgagactcataatccaact

SEQ ID NO: 6680 - RNA, 21 nt, RNAi
ugagacucauaauccaacuuu

SEQ ID NO: 6681 - RNA, 21 nt, RNAi
uuacucugaguauuagguuga

SEQ ID NO: 6682 - DNA, 21 bp, homo sapiens
aaagatcttattggctttggt

SEQ ID NO: 6683 - RNA, 21 nt, RNAi
agaucuuauuggcuuugguuu

SEQ ID NO: 6684 - RNA, 21 nt, RNAi
uuucuagaauaaccgaaacca

SEQ ID NO: 6685 - DNA, 21 bp, homo sapiens
aagatcttattggctttggtc

SEQ ID NO: 6686 - RNA, 21 nt, RNAi
gaucuuauuggcuuuggucuu

SEQ ID NO: 6687 - RNA, 21 nt, RNAi
uucuagaauaaccgaaaccag

SEQ ID NO: 6688 - DNA, 21 bp, homo sapiens
aagtagccaaagcgatgaaat

SEQ ID NO: 6689 - RNA, 21 nt, RNAi
guagccaaagcgaugaaauuu

SEQ ID NO: 6690 - RNA, 21 nt, RNAi
uucaucgguuucgcuacuuua

SEQ ID NO: 6691 - DNA, 21 bp, homo sapiens
aaagcgatgaaatatcttgca

SEQ ID NO: 6692 - RNA, 21 nt, RNAi
agcgaugaaauaucuugcauu

SEQ ID NO: 6693 - RNA, 21 nt, RNAi
uuucgcuacuuuauagaacgu

SEQ ID NO: 6694 - DNA, 21 bp, homo sapiens
aagcgatgaaatatcttgcaa

SEQ ID NO: 6695 - RNA, 21 nt, RNAi
gcgaugaaauaucuugcaauu

SEQ ID NO: 6696 - RNA, 21 nt, RNAi
uucgcuacuuuauagaacguu

SEQ ID NO: 6697 - DNA, 21 bp, homo sapiens
aaagtttgtccacagagactt

SEQ ID NO: 6698 - RNA, 21 nt, RNAi
aguuuguccacagagacuuuu

SEQ ID NO: 6699 - RNA, 21 nt, RNAi
uuucaaacaggugucucugaa

SEQ ID NO: 6700 - DNA, 21 bp, homo sapiens
aagtttgtccacagagacttg

SEQ ID NO: 6701 - RNA, 21 nt, RNAi
guuuguccacagagacuuguu

SEQ ID NO: 6702 - RNA, 21 nt, RNAi
uucaaacaggugucucugaac

SEQ ID NO: 6703 - DNA, 21 bp, homo sapiens
aagaaactgtatgctggatga

SEQ ID NO: 6704 - RNA, 21 nt, RNAi
gaaacuguaugcuggaugauu

SEQ ID NO: 6705 - RNA, 21 nt, RNAi
uucuuugacauacgaccuacu

SEQ ID NO: 6706 - DNA, 21 bp, homo sapiens
aaattcacagtcaaggttgct

SEQ ID NO: 6707 - RNA, 21 nt, RNAi
auucacagucaagguugcuuu

SEQ ID NO: 6708 - RNA, 21 nt, RNAi
uuuaagugucaguuccaacga

SEQ ID NO: 6709 - DNA, 21 bp, homo sapiens
aattcacagtcaaggttgctg

SEQ ID NO: 6710 - RNA, 21 nt, RNAi
uucacagucaagguugcuguu

SEQ ID NO: 6711 - RNA, 21 nt, RNAi
uuaagugucaguuccaacgac

SEQ ID NO: 6712 - DNA, 21 bp, homo sapiens
aaacaggtgcaaagctgccag

SEQ ID NO: 6713 - RNA, 21 nt, RNAi
acaggugcaaagcugccaguu

SEQ ID NO: 6714 - RNA, 21 nt, RNAi
uuuguccacguuucgacgguc

SEQ ID NO: 6715 - DNA, 21 bp, homo sapiens
aacaggtgcaaagctgccagt

SEQ ID NO: 6716 - RNA, 21 nt, RNAi
caggugcaaagcugccaguuu

SEQ ID NO: 6717 - RNA, 21 nt, RNAi
uuguccacguuucgacgguca

SEQ ID NO: 6718 - DNA, 21 bp, homo sapiens
aaagctgccagtgaagtggat

SEQ ID NO: 6719 - RNA, 21 nt, RNAi
agcugccagugaaguggauuu

SEQ ID NO: 6720 - RNA, 21 nt, RNAi
uuucgacggucacuucaccua

SEQ ID NO: 6721 - DNA, 21 bp, homo sapiens
aagctgccagtgaagtggatg

SEQ ID NO: 6722 - RNA, 21 nt, RNAi
gcugccagugaaguggauguu

SEQ ID NO: 6723 - RNA, 21 nt, RNAi
uucgacggucacuucaccuac

SEQ ID NO: 6724 - DNA, 21 bp, homo sapiens
aagtggatggctttggaaagt

SEQ ID NO: 6725 - RNA, 21 nt, RNAi
guggauggcuuuggaaaguuu

SEQ ID NO: 6726 - RNA, 21 nt, RNAi
uucaccuaccgaaaccuuuca

SEQ ID NO: 6727 - DNA, 21 bp, homo sapiens
aaagtttaccaccaagtcaga

SEQ ID NO: 6728 - RNA, 21 nt, RNAi
aguuuaccaccaagucagauu

SEQ ID NO: 6729 - RNA, 21 nt, RNAi
uuucaaauggugguucagucu

SEQ ID NO: 6730 - DNA, 21 bp, homo sapiens
aagtttaccaccaagtcagat

SEQ ID NO: 6731 - RNA, 21 nt, RNAi
guuuaccaccaagucagauuu

SEQ ID NO: 6732 - RNA, 21 nt, RNAi
uucaaauggugguucagucua

SEQ ID NO: 6733 - DNA, 21 bp, homo sapiens
aagtcagatgtgtggtccttt

SEQ ID NO: 6734 - RNA, 21 nt, RNAi
gucagaugugugguccuuuuu

SEQ ID NO: 6735 - RNA, 21 nt, RNAi
uucagucuacacaccaggaaa

SEQ ID NO: 6736 - DNA, 21 bp, homo sapiens
aactgtttacttgttgcaagg

SEQ ID NO: 6737 - RNA, 21 nt, RNAi
cuguuuacuuguugcaagguu

SEQ ID NO: 6738 - RNA, 21 nt, RNAi
uugacaaaugaacaacguucc

SEQ ID NO: 6739 - DNA, 21 bp, homo sapiens
aacgctacttatgtgaacgta

SEQ ID NO: 6740 - RNA, 21 nt, RNAi
cgcuacuuaugugaacguauu

SEQ ID NO: 6741 - RNA, 21 nt, RNAi
uugcgaugaauacacuugcau

SEQ ID NO: 6742 - DNA, 21 bp, homo sapiens
aaatgtgtcgctccgtatcct

SEQ ID NO: 6743 - RNA, 21 nt, RNAi
augugucgcuccguauccuuu

SEQ ID NO: 6744 - RNA, 21 nt, RNAi
uuuacacagcgaggcauagga

SEQ ID NO: 6745 - DNA, 21 bp, homo sapiens
aatgtgtcgctccgtatcctt

SEQ ID NO: 6746 - RNA, 21 nt, RNAi
ugugucgcuccguauccuuuu

SEQ ID NO: 6747 - RNA, 21 nt, RNAi
uuacacagcgaggcauaggaa

SEQ ID NO: 6748 - DNA, 21 bp, homo sapiens
aagataacgctgatgatgagg

SEQ ID NO: 6749 - RNA, 21 nt, RNAi
gauaacgcugaugaugagguu

SEQ ID NO: 6750 - RNA, 21 nt, RNAi
uucuauugcgacuacuacucc

SEQ ID NO: 6751 - DNA, 21 bp, homo sapiens
aacgctgatgatgaggtggac

SEQ ID NO: 6752 - RNA, 21 nt, RNAi
cgcugaugaugagguggacuu

SEQ ID NO: 6753 - RNA, 21 nt, RNAi
uugcgacuacuacuccaccug

SEQ ID NO: 6754 - DNA, 21 bp, homo sapiens
aaagcaacagtccacactttg

SEQ ID NO: 6755 - RNA, 21 nt, RNAi
agcaacaguccacacuuuguu

SEQ ID NO: 6756 - RNA, 21 nt, RNAi
uuucguugucaggugugaaac

SEQ ID NO: 6757 - DNA, 21 bp, homo sapiens
aagcaacagtccacactttgt

SEQ ID NO: 6758 - RNA, 21 nt, RNAi
gcaacaguccacacuuuguuu

SEQ ID NO: 6759 - RNA, 21 nt, RNAi
uucguugucaggugugaaaca

SEQ ID NO: 6760 - DNA, 21 bp, homo sapiens
aacagtccacactttgtccaa

SEQ ID NO: 6761 - RNA, 21 nt, RNAi
caguccacacuuuguccaauu

SEQ ID NO: 6762 - RNA, 21 nt, RNAi
uugucaggugugaaacagguu

SEQ ID NO: 6763 - DNA, 21 bp, homo sapiens
aaaggccatcgatattctttg

SEQ ID NO: 6764 - RNA, 21 nt, RNAi
aggccaucgauauucuuuguu

SEQ ID NO: 6765 - RNA, 21 nt, RNAi
uuuccgguagcuauaagaaac

SEQ ID NO: 6766 - DNA, 21 bp, homo sapiens
aaggccatcgatattctttgc

SEQ ID NO: 6767 - RNA, 21 nt, RNAi
ggccaucgauauucuuugcuu

SEQ ID NO: 6768 - RNA, 21 nt, RNAi
uuccgguagcuauaagaaacg

SEQ ID NO: 6769 - DNA, 21 bp, homo sapiens
aaggaatttcttatctgacag

SEQ ID NO: 6770 - RNA, 21 nt, RNAi
ggaauuucuuaucugacaguu

SEQ ID NO: 6771 - RNA, 21 nt, RNAi
uuccuuaaagaauagacuguc

SEQ ID NO: 6772 - DNA, 21 bp, homo sapiens
aatttcttatctgacagagca

SEQ ID NO: 6773 - RNA, 21 nt, RNAi
uuucuuaucugacagagcauu

SEQ ID NO: 6774 - RNA, 21 nt, RNAi
uuaaagaauagacugucucgu

SEQ ID NO: 6775 - DNA, 21 bp, homo sapiens
cagctgacttgctgagaggag

SEQ ID NO: 6776 - RNA, 21 nt, RNAi
gcugacuugcugagaggaguu

SEQ ID NO: 6777 - RNA, 21 nt, RNAi
uucgacugaacgacucuccuc

SEQ ID NO: 6778 - DNA, 21 bp, homo sapiens
caccgaaagataaacctctca

SEQ ID NO: 6779 - RNA, 21 nt, RNAi
ccgaaagauaaaccucucauu

SEQ ID NO: 6780 - RNA, 21 nt, RNAi
uuggcuuucuauuuggagagu

SEQ ID NO: 6781 - DNA, 21 bp, homo sapiens
catcctcgtgctcctgtttac

SEQ ID NO: 6782 - RNA, 21 nt, RNAi
uccucgugcuccuguuuacuu

SEQ ID NO: 6783 - RNA, 21 nt, RNAi
uuaggagcacgaggacaaaug

SEQ ID NO: 6784 - DNA, 21 bp, homo sapiens
cactagcaaagtccgagatga

SEQ ID NO: 6785 - RNA, 21 nt, RNAi
cuagcaaaguccgagaugauu

SEQ ID NO: 6786 - RNA, 21 nt, RNAi
uugaucguuucaggcucuacu

SEQ ID NO: 6787 - DNA, 21 bp, homo sapiens
caaagtccgagatgaatgtga

SEQ ID NO: 6788 - RNA, 21 nt, RNAi
aaguccgagaugaaugugauu

SEQ ID NO: 6789 - RNA, 21 nt, RNAi
uuuucaggcucuacuuacacu

SEQ ID NO: 6790 - DNA, 21 bp, homo sapiens
caacttcaccgcggaaacacc

SEQ ID NO: 6791 - RNA, 21 nt, RNAi
acuucaccgcggaaacaccuu

SEQ ID NO: 6792 - RNA, 21 nt, RNAi
uuugaaguggcgccuuugugg

SEQ ID NO: 6793 - DNA, 21 bp, homo sapiens
catccagaatgtcattctaca

SEQ ID NO: 6794 - RNA, 21 nt, RNAi
uccagaaugucauucuacauu

SEQ ID NO: 6795 - RNA, 21 nt, RNAi
uuaggucuuacaguaagaugu

SEQ ID NO: 6796 - DNA, 21 bp, homo sapiens
cagaatgtcattctacatgag

SEQ ID NO: 6797 - RNA, 21 nt, RNAi
gaaugucauucuacaugaguu

SEQ ID NO: 6798 - RNA, 21 nt, RNAi
uucuuacaguaagauguacuc

SEQ ID NO: 6799 - DNA, 21 bp, homo sapiens
cattctacatgagcatcacat

SEQ ID NO: 6800 - RNA, 21 nt, RNAi
uucuacaugagcaucacauuu

SEQ ID NO: 6801 - RNA, 21 nt, RNAi
uuaagauguacucguagugua

SEQ ID NO: 6802 - DNA, 21 bp, homo sapiens
cagaaggttgctgagtacaag

SEQ ID NO: 6803 - RNA, 21 nt, RNAi
gaagguugcugaguacaaguu

SEQ ID NO: 6804 - RNA, 21 nt, RNAi
uucuuccaacgacucauguuc

SEQ ID NO: 6805 - DNA, 21 bp, homo sapiens
catgtcaggactgcagcagca

SEQ ID NO: 6806 - RNA, 21 nt, RNAi
ugucaggacugcagcagcauu

SEQ ID NO: 6807 - RNA, 21 nt, RNAi
uuacaguccugacgucgucgu

SEQ ID NO: 6808 - DNA, 21 bp, homo sapiens
caggactgcagcagcaaagcc

SEQ ID NO: 6809 - RNA, 21 nt, RNAi
ggacugcagcagcaaagccuu

SEQ ID NO: 6810 - RNA, 21 nt, RNAi
uuccugacgucgucguuucgg

SEQ ID NO: 6811 - DNA, 21 bp, homo sapiens
cagcagcaaagccaatttatc

SEQ ID NO: 6812 - RNA, 21 nt, RNAi
gcagcaaagccaauuuaucuu

SEQ ID NO: 6813 - RNA, 21 nt, RNAi
uucgucguuucgguuaaauag

SEQ ID NO: 6814 - DNA, 21 bp, homo sapiens
cagcaaagccaatttatcagg

SEQ ID NO: 6815 - RNA, 21 nt, RNAi
gcaaagccaauuuaucagguu

SEQ ID NO: 6816 - RNA, 21 nt, RNAi
uucguuucgguuaaauagucc

SEQ ID NO: 6817 - DNA, 21 bp, homo sapiens
caaagccaatttatcaggagg

SEQ ID NO: 6818 - RNA, 21 nt, RNAi
aagccaauuuaucaggagguu

SEQ ID NO: 6819 - RNA, 21 nt, RNAi
uuuucgguuaaauaguccucc

SEQ ID NO: 6820 - DNA, 21 bp, homo sapiens
caatttatcaggaggtgtttg

SEQ ID NO: 6821 - RNA, 21 nt, RNAi
auuuaucaggagguguuuguu

SEQ ID NO: 6822 - RNA, 21 nt, RNAi
uuuaaauaguccuccacaaac

SEQ ID NO: 6823 - DNA, 21 bp, homo sapiens
caggaggtgtttggaaagata

SEQ ID NO: 6824 - RNA, 21 nt, RNAi
ggagguguuuggaaagauauu

SEQ ID NO: 6825 - RNA, 21 nt, RNAi
uuccuccacaaaccuuucuau

SEQ ID NO: 6826 - DNA, 21 bp, homo sapiens
catcaacatggctctagttgt

SEQ ID NO: 6827 - RNA, 21 nt, RNAi
ucaacauggcucuaguuguuu

SEQ ID NO: 6828 - RNA, 21 nt, RNAi
uuaguuguaccgagaucaaca

SEQ ID NO: 6829 - DNA, 21 bp, homo sapiens
caacatggctctagttgtcga

SEQ ID NO: 6830 - RNA, 21 nt, RNAi
acauggcucuaguugucgauu

SEQ ID NO: 6831 - RNA, 21 nt, RNAi
uuuguaccgagaucaacagcu

SEQ ID NO: 6832 - DNA, 21 bp, homo sapiens
catggctctagttgtcgacac

SEQ ID NO: 6833 - RNA, 21 nt, RNAi
uggcucuaguugucgacacuu

SEQ ID NO: 6834 - RNA, 21 nt, RNAi
uuaccgagaucaacagcugug

SEQ ID NO: 6835 - DNA, 21 bp, homo sapiens
cacctactatgatgatcaact

SEQ ID NO: 6836 - RNA, 21 nt, RNAi
ccuacuaugaugaucaacuuu

SEQ ID NO: 6837 - RNA, 21 nt, RNAi
uuggaugauacuacuaguuga

SEQ ID NO: 6838 - DNA, 21 bp, homo sapiens
caactcattagctgtggcagc

SEQ ID NO: 6839 - RNA, 21 nt, RNAi
acucauuagcuguggcagcuu

SEQ ID NO: 6840 - RNA, 21 nt, RNAi
uuugaguaaucgacaccgucg

SEQ ID NO: 6841 - DNA, 21 bp, homo sapiens
cattagctgtggcagcgtcaa

SEQ ID NO: 6842 - RNA, 21 nt, RNAi
uuagcuguggcagcgucaauu

SEQ ID NO: 6843 - RNA, 21 nt, RNAi
uuaaucgacaccgucgcaguu

SEQ ID NO: 6844 - DNA, 21 bp, homo sapiens
cacaatcatactgctgacata

SEQ ID NO: 6845 - RNA, 21 nt, RNAi
caaucauacugcugacauauu

SEQ ID NO: 6846 - RNA, 21 nt, RNAi
uuguuaguaugacgacuguau

SEQ ID NO: 6847 - DNA, 21 bp, homo sapiens
caatcatactgctgacataca

SEQ ID NO: 6848 - RNA, 21 nt, RNAi
aucauacugcugacauacauu

SEQ ID NO: 6849 - RNA, 21 nt, RNAi
uuuaguaugacgacuguaugu

SEQ ID NO: 6850 - DNA, 21 bp, homo sapiens
catactgctgacatacagtcg

SEQ ID NO: 6851 - RNA, 21 nt, RNAi
uacugcugacauacagucguu

SEQ ID NO: 6852 - RNA, 21 nt, RNAi
uuaugacgacuguaugucagc

SEQ ID NO: 6853 - DNA, 21 bp, homo sapiens
catacagtcggaggttcactg

SEQ ID NO: 6854 - RNA, 21 nt, RNAi
uacagucggagguucacuguu

SEQ ID NO: 6855 - RNA, 21 nt, RNAi
uuaugucagccuccaagugac

SEQ ID NO: 6856 - DNA, 21 bp, homo sapiens
cagtcggaggttcactgcata

SEQ ID NO: 6857 - RNA, 21 nt, RNAi
gucggagguucacugcauauu

SEQ ID NO: 6858 - RNA, 21 nt, RNAi
uucagccuccaagugacguau

SEQ ID NO: 6859 - DNA, 21 bp, homo sapiens
cagccagtgtcctgactgtgt

SEQ ID NO: 6860 - RNA, 21 nt, RNAi
gccaguguccugacuguguuu

SEQ ID NO: 6861 - RNA, 21 nt, RNAi
uucggucacaggacugacaca

SEQ ID NO: 6862 - DNA, 21 bp, homo sapiens
cagtgtcctgactgtgtggtg

SEQ ID NO: 6863 - RNA, 21 nt, RNAi
guguccugacugugugguguu

SEQ ID NO: 6864 - RNA, 21 nt, RNAi
uucacaggacugacacaccac

SEQ ID NO: 6865 - DNA, 21 bp, homo sapiens
caaagtcctttcatctgtaaa

SEQ ID NO: 6866 - RNA, 21 nt, RNAi
aaguccuuucaucuguaaauu

SEQ ID NO: 6867 - RNA, 21 nt, RNAi
uuuucaggaaaguagacauuu

SEQ ID NO: 6868 - DNA, 21 bp, homo sapiens
catctgtaaaggaccggttca

SEQ ID NO: 6869 - RNA, 21 nt, RNAi
ucuguaaaggaccgguucauu

SEQ ID NO: 6870 - RNA, 21 nt, RNAi
uuagacauuuccuggccaagu

SEQ ID NO: 6871 - DNA, 21 bp, homo sapiens
catcaacttctttgtaggcaa

SEQ ID NO: 6872 - RNA, 21 nt, RNAi
ucaacuucuuuguaggcaauu

SEQ ID NO: 6873 - RNA, 21 nt, RNAi
uuaguugaagaaacauccguu

SEQ ID NO: 6874 - DNA, 21 bp, homo sapiens
caacttctttgtaggcaatac

SEQ ID NO: 6875 - RNA, 21 nt, RNAi
acuucuuuguaggcaauacuu

SEQ ID NO: 6876 - RNA, 21 nt, RNAi
uuugaagaaacauccguuaug

SEQ ID NO: 6877 - DNA, 21 bp, homo sapiens
cagatcatccattgcattcga

SEQ ID NO: 6878 - RNA, 21 nt, RNAi
gaucauccauugcauucgauu

SEQ ID NO: 6879 - RNA, 21 nt, RNAi
uucuaguagguaacguaagcu

SEQ ID NO: 6880 - DNA, 21 bp, homo sapiens
catccattgcattcgatatca

SEQ ID NO: 6881 - RNA, 21 nt, RNAi
uccauugcauucgauaucauu

SEQ ID NO: 6882 - RNA, 21 nt, RNAi
uuagguaacguaagcuauagu

SEQ ID NO: 6883 - DNA, 21 bp, homo sapiens
cattgcattcgatatcagtga

SEQ ID NO: 6884 - RNA, 21 nt, RNAi
uugcauucgauaucagugauu

SEQ ID NO: 6885 - RNA, 21 nt, RNAi
uuaacguaagcuauagucacu

SEQ ID NO: 6886 - DNA, 21 bp, homo sapiens
cattcgatatcagtgagaagg

SEQ ID NO: 6887 - RNA, 21 nt, RNAi
uucgauaucagugagaagguu

SEQ ID NO: 6888 - RNA, 21 nt, RNAi
uuaagcuauagucacucuucc

SEQ ID NO: 6889 - DNA, 21 bp, homo sapiens
cagtgagaaggctaaaggaaa

SEQ ID NO: 6890 - RNA, 21 nt, RNAi
gugagaaggcuaaaggaaauu

SEQ ID NO: 6891 - RNA, 21 nt, RNAi
uucacucuuccgauuuccuuu

SEQ ID NO: 6892 - DNA, 21 bp, homo sapiens
cattaagtatgtccatgcctt

SEQ ID NO: 6893 - RNA, 21 nt, RNAi
uuaaguauguccaugccuuuu

SEQ ID NO: 6894 - RNA, 21 nt, RNAi
uuaauucauacagguacggaa

SEQ ID NO: 6895 - DNA, 21 bp, homo sapiens
catgcctttgaaagcaacaat

SEQ ID NO: 6896 - RNA, 21 nt, RNAi
ugccuuugaaagcaacaauuu

SEQ ID NO: 6897 - RNA, 21 nt, RNAi
uuacggaaacuuucguuguua

SEQ ID NO: 6898 - DNA, 21 bp, homo sapiens
cacacaagaataatcaggttc

SEQ ID NO: 6899 - RNA, 21 nt, RNAi
cacaagaauaaucagguucuu

SEQ ID NO: 6900 - RNA, 21 nt, RNAi
uuguguucuuauuaguccaag

SEQ ID NO: 6901 - DNA, 21 bp, homo sapiens
cacaagaataatcaggttctg

SEQ ID NO: 6902 - RNA, 21 nt, RNAi
caagaauaaucagguucuguu

SEQ ID NO: 6903 - RNA, 21 nt, RNAi
uuguucuuauuaguccaagac

SEQ ID NO: 6904 - DNA, 21 bp, homo sapiens
caagaataatcaggttctgtt

SEQ ID NO: 6905 - RNA, 21 nt, RNAi
agaauaaucagguucuguuuu

SEQ ID NO: 6906 - RNA, 21 nt, RNAi
uuucuuauuaguccaagacaa

SEQ ID NO: 6907 - DNA, 21 bp, homo sapiens
caggttctgttccataaactc

SEQ ID NO: 6908 - RNA, 21 nt, RNAi
gguucuguuccauaaacucuu

SEQ ID NO: 6909 - RNA, 21 nt, RNAi
uuccaagacaagguauuugag

SEQ ID NO: 6910 - DNA, 21 bp, homo sapiens
cataaactctggattgcattc

SEQ ID NO: 6911 - RNA, 21 nt, RNAi
uaaacucuggauugcauucuu

SEQ ID NO: 6912 - RNA, 21 nt, RNAi
uuauuugagaccuaacguaag

SEQ ID NO: 6913 - DNA, 21 bp, homo sapiens
cattcctacatggaaatgcct

SEQ ID NO: 6914 - RNA, 21 nt, RNAi
uuccuacauggaaaugccuuu

SEQ ID NO: 6915 - RNA, 21 nt, RNAi
uuaaggauguaccuuuacgga

SEQ ID NO: 6916 - DNA, 21 bp, homo sapiens
catggaaatgcctctggagtg

SEQ ID NO: 6917 - RNA, 21 nt, RNAi
uggaaaugccucuggaguguu

SEQ ID NO: 6918 - RNA, 21 nt, RNAi
uuaccuuuacggagaccucac

SEQ ID NO: 6919 - DNA, 21 bp, homo sapiens
cacaaagaaggaagtgtttaa

SEQ ID NO: 6920 - RNA, 21 nt, RNAi
caaagaaggaaguguuuaauu

SEQ ID NO: 6921 - RNA, 21 nt, RNAi
uuguuucuuccuucacaaauu

SEQ ID NO: 6922 - DNA, 21 bp, homo sapiens
caggctgcgtatgtcagcaag

SEQ ID NO: 6923 - RNA, 21 nt, RNAi
ggcugcguaugucagcaaguu

SEQ ID NO: 6924 - RNA, 21 nt, RNAi
uuccgacgcauacagucguuc

SEQ ID NO: 6925 - DNA, 21 bp, homo sapiens
cagcttgctagacaaatagga

SEQ ID NO: 6926 - RNA, 21 nt, RNAi
gcuugcuagacaaauaggauu

SEQ ID NO: 6927 - RNA, 21 nt, RNAi
uucgaacgaucuguuuauccu

SEQ ID NO: 6928 - DNA, 21 bp, homo sapiens
caaataggagccagcctgaat

SEQ ID NO: 6929 - RNA, 21 nt, RNAi
aauaggagccagccugaauuu

SEQ ID NO: 6930 - RNA, 21 nt, RNAi
uuuuauccucggucggacuua

SEQ ID NO: 6931 - DNA, 21 bp, homo sapiens
cagcctgaatgatgacattct

SEQ ID NO: 6932 - RNA, 21 nt, RNAi
gccugaaugaugacauucuuu

SEQ ID NO: 6933 - RNA, 21 nt, RNAi
uucggacuuacuacuguaaga

SEQ ID NO: 6934 - DNA, 21 bp, homo sapiens
cacaaagcaagccagattctg

SEQ ID NO: 6935 - RNA, 21 nt, RNAi
caaagcaagccagauucuguu

SEQ ID NO: 6936 - RNA, 21 nt, RNAi
uuguuucguucggucuaagac

SEQ ID NO: 6937 - DNA, 21 bp, homo sapiens
caaagcaagccagattctgcc

SEQ ID NO: 6938 - RNA, 21 nt, RNAi
aagcaagccagauucugccuu

SEQ ID NO: 6939 - RNA, 21 nt, RNAi
uuuucguucggucuaagacgg

SEQ ID NO: 6940 - DNA, 21 bp, homo sapiens
caagccagattctgccgaacc

SEQ ID NO: 6941 - RNA, 21 nt, RNAi
agccagauucugccgaaccuu

SEQ ID NO: 6942 - RNA, 21 nt, RNAi
uuucggucuaagacggcuugg

SEQ ID NO: 6943 - DNA, 21 bp, homo sapiens
cagattctgccgaaccaatgg

SEQ ID NO: 6944 - RNA, 21 nt, RNAi
gauucugccgaaccaaugguu

SEQ ID NO: 6945 - RNA, 21 nt, RNAi
uucuaagacggcuugguuacc

SEQ ID NO: 6946 - DNA, 21 bp, homo sapiens
caatggatcgatctgccatgt

SEQ ID NO: 6947 - RNA, 21 nt, RNAi
auggaucgaucugccauguuu

SEQ ID NO: 6948 - RNA, 21 nt, RNAi
uuuaccuagcuagacgguaca

SEQ ID NO: 6949 - DNA, 21 bp, homo sapiens
caaatatgtcaacgacttctt

SEQ ID NO: 6950 - RNA, 21 nt, RNAi
aauaugucaacgacuucuuuu

SEQ ID NO: 6951 - RNA, 21 nt, RNAi
uuuuauacaguugcugaagaa

SEQ ID NO: 6952 - DNA, 21 bp, homo sapiens
caacgacttcttcaacaagat

SEQ ID NO: 6953 - RNA, 21 nt, RNAi
acgacuucuucaacaagauuu

SEQ ID NO: 6954 - RNA, 21 nt, RNAi
uuugcugaagaaguuguucua

SEQ ID NO: 6955 - DNA, 21 bp, homo sapiens
caatgtgagatgtctccagca

SEQ ID NO: 6956 - RNA, 21 nt, RNAi
augugagaugucuccagcauu

SEQ ID NO: 6957 - RNA, 21 nt, RNAi
uuuacacucuacagaggucgu

SEQ ID NO: 6958 - DNA, 21 bp, homo sapiens
caatcatgagcactgctttaa

SEQ ID NO: 6959 - RNA, 21 nt, RNAi
aucaugagcacugcuuuaauu

SEQ ID NO: 6960 - RNA, 21 nt, RNAi
uuuaguacucgugacgaaauu

SEQ ID NO: 6961 - DNA, 21 bp, homo sapiens
catgagcactgctttaatagg

SEQ ID NO: 6962 - RNA, 21 nt, RNAi
ugagcacugcuuuaauagguu

SEQ ID NO: 6963 - RNA, 21 nt, RNAi
uuacucgugacgaaauuaucc

SEQ ID NO: 6964 - DNA, 21 bp, homo sapiens
cactgctttaataggacactt

SEQ ID NO: 6965 - RNA, 21 nt, RNAi
cugcuuuaauaggacacuuuu

SEQ ID NO: 6966 - RNA, 21 nt, RNAi
uugacgaaauuauccugugaa

SEQ ID NO: 6967 - DNA, 21 bp, homo sapiens
cacttctgagaaattcatcag

SEQ ID NO: 6968 - RNA, 21 nt, RNAi
cuucugagaaauucaucaguu

SEQ ID NO: 6969 - RNA, 21 nt, RNAi
uugaagacucuuuaaguaguc

SEQ ID NO: 6970 - DNA, 21 bp, homo sapiens
cagagtttaccacagctttgc

SEQ ID NO: 6971 - RNA, 21 nt, RNAi
gaguuuaccacagcuuugcuu

SEQ ID NO: 6972 - RNA, 21 nt, RNAi
uucucaaauggugucgaaacg

SEQ ID NO: 6973 - DNA, 21 bp, homo sapiens
cacagctttgcagcgcgttga

SEQ ID NO: 6974 - RNA, 21 nt, RNAi
cagcuuugcagcgcguugauu

SEQ ID NO: 6975 - RNA, 21 nt, RNAi
uugucgaaacgucgcgcaacu

SEQ ID NO: 6976 - DNA, 21 bp, homo sapiens
cagctttgcagcgcgttgact

SEQ ID NO: 6977 - RNA, 21 nt, RNAi
gcuuugcagcgcguugacuuu

SEQ ID NO: 6978 - RNA, 21 nt, RNAi
uucgaaacgucgcgcaacuga

SEQ ID NO: 6979 - DNA, 21 bp, homo sapiens
cagcgcgttgacttattcatg

SEQ ID NO: 6980 - RNA, 21 nt, RNAi
gcgcguugacuuauucauguu

SEQ ID NO: 6981 - RNA, 21 nt, RNAi
uucgcgcaacugaauaaguac

SEQ ID NO: 6982 - DNA, 21 bp, homo sapiens
caattcagcgaagtcctctta

SEQ ID NO: 6983 - RNA, 21 nt, RNAi
auucagcgaaguccucuuauu

SEQ ID NO: 6984 - RNA, 21 nt, RNAi
uuuaagucgcuucaggagaau

SEQ ID NO: 6985 - DNA, 21 bp, homo sapiens
cagcgaagtcctcttaacatc

SEQ ID NO: 6986 - RNA, 21 nt, RNAi
gcgaaguccucuuaacaucuu

SEQ ID NO: 6987 - RNA, 21 nt, RNAi
uucgcuucaggagaauuguag

SEQ ID NO: 6988 - DNA, 21 bp, homo sapiens
catctatatccaccttcatta

SEQ ID NO: 6989 - RNA, 21 nt, RNAi
ucuauauccaccuucauuauu

SEQ ID NO: 6990 - RNA, 21 nt, RNAi
uuagauauagguggaaguaau

SEQ ID NO: 6991 - DNA, 21 bp, homo sapiens
caccttcattaaaggagacct

SEQ ID NO: 6992 - RNA, 21 nt, RNAi
ccuucauuaaaggagaccuuu

SEQ ID NO: 6993 - RNA, 21 nt, RNAi
uuggaaguaauuuccucugga

SEQ ID NO: 6994 - DNA, 21 bp, homo sapiens
cattaaaggagacctcaccat

SEQ ID NO: 6995 - RNA, 21 nt, RNAi
uuaaaggagaccucaccauuu

SEQ ID NO: 6996 - RNA, 21 nt, RNAi
uuaauuuccucuggaguggua

SEQ ID NO: 6997 - DNA, 21 bp, homo sapiens
catgcaggttgtggtttctcg

SEQ ID NO: 6998 - RNA, 21 nt, RNAi
ugcagguugugguuucucguu

SEQ ID NO: 6999 - RNA, 21 nt, RNAi
uuacguccaacaccaaagagc

SEQ ID NO: 7000 - DNA, 21 bp, homo sapiens
caggttgtggtttctcgatca

SEQ ID NO: 7001 - RNA, 21 nt, RNAi
gguugugguuucucgaucauu

SEQ ID NO: 7002 - RNA, 21 nt, RNAi
uuccaacaccaaagagcuagu

SEQ ID NO: 7003 - DNA, 21 bp, homo sapiens
catccagtgtctccagaagtg

SEQ ID NO: 7004 - RNA, 21 nt, RNAi
uccagugucuccagaaguguu

SEQ ID NO: 7005 - RNA, 21 nt, RNAi
uuaggucacagaggucuucac

SEQ ID NO: 7006 - DNA, 21 bp, homo sapiens
cagtgtctccagaagtgattg

SEQ ID NO: 7007 - RNA, 21 nt, RNAi
gugucuccagaagugauuguu

SEQ ID NO: 7008 - RNA, 21 nt, RNAi
uucacagaggucuucacuaac

SEQ ID NO: 7009 - DNA, 21 bp, homo sapiens
cagaagtgattgtggagcata

SEQ ID NO: 7010 - RNA, 21 nt, RNAi
gaagugauuguggagcauauu

SEQ ID NO: 7011 - RNA, 21 nt, RNAi
uucuucacuaacaccucguau

SEQ ID NO: 7012 - DNA, 21 bp, homo sapiens
cagacatttccagtcctgcag

SEQ ID NO: 7013 - RNA, 21 nt, RNAi
gacauuuccaguccugcaguu

SEQ ID NO: 7014 - RNA, 21 nt, RNAi
uucuguaaaggucaggacguc

SEQ ID NO: 7015 - DNA, 21 bp, homo sapiens
catttccagtcctgcagtcaa

SEQ ID NO: 7016 - RNA, 21 nt, RNAi
uuuccaguccugcagucaauu

SEQ ID NO: 7017 - RNA, 21 nt, RNAi
uuaaaggucaggacgucaguu

SEQ ID NO: 7018 - DNA, 21 bp, homo sapiens
cagtcctgcagtcaatgcctc

SEQ ID NO: 7019 - RNA, 21 nt, RNAi
guccugcagucaaugccucuu

SEQ ID NO: 7020 - RNA, 21 nt, RNAi
uucaggacgucaguuacggag

SEQ ID NO: 7021 - DNA, 21 bp, homo sapiens
cacgacaaatgtgtgcgatcg

SEQ ID NO: 7022 - RNA, 21 nt, RNAi
cgacaaaugugugcgaucguu

SEQ ID NO: 7023 - RNA, 21 nt, RNAi
uugcuguuuacacacgcuagc

SEQ ID NO: 7024 - DNA, 21 bp, homo sapiens
caaatgtgtgcgatcggagga

SEQ ID NO: 7025 - RNA, 21 nt, RNAi
aaugugugcgaucggaggauu

SEQ ID NO: 7026 - RNA, 21 nt, RNAi
uuuuacacacgcuagccuccu

SEQ ID NO: 7027 - DNA, 21 bp, homo sapiens
catggactcaacagatctgtc

SEQ ID NO: 7028 - RNA, 21 nt, RNAi
uggacucaacagaucugucuu

SEQ ID NO: 7029 - RNA, 21 nt, RNAi
uuaccugaguugucuagacag

SEQ ID NO: 7030 - DNA, 21 bp, homo sapiens
caacagatctgtctgcctgca

SEQ ID NO: 7031 - RNA, 21 nt, RNAi
acagaucugucugccugcauu

SEQ ID NO: 7032 - RNA, 21 nt, RNAi
uuugucuagacagacggacgu

SEQ ID NO: 7033 - DNA, 21 bp, homo sapiens
cagatctgtctgcctgcaatc

SEQ ID NO: 7034 - RNA, 21 nt, RNAi
gaucugucugccugcaaucuu

SEQ ID NO: 7035 - RNA, 21 nt, RNAi
uucuagacagacggacguuag

SEQ ID NO: 7036 - DNA, 21 bp, homo sapiens
caaggctgaccatatgtggct

SEQ ID NO: 7037 - RNA, 21 nt, RNAi
aggcugaccauauguggcuuu

SEQ ID NO: 7038 - RNA, 21 nt, RNAi
uuuccgacugguauacaccga

SEQ ID NO: 7039 - DNA, 21 bp, homo sapiens
caccttgactttaagtgagag

SEQ ID NO: 7040 - RNA, 21 nt, RNAi
ccuugacuuuaagugagaguu

SEQ ID NO: 7041 - RNA, 21 nt, RNAi
uuggaacugaaauucacucuc

SEQ ID NO: 7042 - DNA, 21 bp, homo sapiens
cacgatgaatacattgaaatg

SEQ ID NO: 7043 - RNA, 21 nt, RNAi
cgaugaauacauugaaauguu

SEQ ID NO: 7044 - RNA, 21 nt, RNAi
uugcuacuuauguaacuuuac

SEQ ID NO: 7045 - DNA, 21 bp, homo sapiens
cattgaaatgcacagttggtc

SEQ ID NO: 7046 - RNA, 21 nt, RNAi
uugaaaugcacaguuggucuu

SEQ ID NO: 7047 - RNA, 21 nt, RNAi
uuaacuuuacgugucaaccag

SEQ ID NO: 7048 - DNA, 21 bp, homo sapiens
cacagttggtcctgccatgaa

SEQ ID NO: 7049 - RNA, 21 nt, RNAi
caguugguccugccaugaauu

SEQ ID NO: 7050 - RNA, 21 nt, RNAi
uugucaaccaggacgguacuu

SEQ ID NO: 7051 - DNA, 21 bp, homo sapiens
cagttggtcctgccatgaata

SEQ ID NO: 7052 - RNA, 21 nt, RNAi
guugguccugccaugaauauu

SEQ ID NO: 7053 - RNA, 21 nt, RNAi
uucaaccaggacgguacuuau

SEQ ID NO: 7054 - DNA, 21 bp, homo sapiens
caacacaatacagtacattct

SEQ ID NO: 7055 - RNA, 21 nt, RNAi
acacaauacaguacauucuuu

SEQ ID NO: 7056 - RNA, 21 nt, RNAi
uuuguguuaugucauguaaga

SEQ ID NO: 7057 - DNA, 21 bp, homo sapiens
cacaatacagtacattctcct

SEQ ID NO: 7058 - RNA, 21 nt, RNAi
caauacaguacauucuccuuu

SEQ ID NO: 7059 - RNA, 21 nt, RNAi
uuguuaugucauguaagagga

SEQ ID NO: 7060 - DNA, 21 bp, homo sapiens
caatacagtacattctcctat

SEQ ID NO: 7061 - RNA, 21 nt, RNAi
auacaguacauucuccuauuu

SEQ ID NO: 7062 - RNA, 21 nt, RNAi
uuuaugucauguaagaggaua

SEQ ID NO: 7063 - DNA, 21 bp, homo sapiens
cagtacattctcctatgtgga

SEQ ID NO: 7064 - RNA, 21 nt, RNAi
guacauucuccuauguggauu

SEQ ID NO: 7065 - RNA, 21 nt, RNAi
uucauguaagaggauacaccu

SEQ ID NO: 7066 - DNA, 21 bp, homo sapiens
cattctcctatgtggatcctg

SEQ ID NO: 7067 - RNA, 21 nt, RNAi
uucuccuauguggauccuguu

SEQ ID NO: 7068 - RNA, 21 nt, RNAi
uuaagaggauacaccuaggac

SEQ ID NO: 7069 - DNA, 21 bp, homo sapiens
caagtatttcgccgaaatacg

SEQ ID NO: 7070 - RNA, 21 nt, RNAi
aguauuucgccgaaauacguu

SEQ ID NO: 7071 - RNA, 21 nt, RNAi
uuucauaaagcggcuuuaugc

SEQ ID NO: 7072 - DNA, 21 bp, homo sapiens
cactttacttactttaactgg

SEQ ID NO: 7073 - RNA, 21 nt, RNAi
cuuuacuuacuuuaacugguu

SEQ ID NO: 7074 - RNA, 21 nt, RNAi
uugaaaugaaugaaauugacc

SEQ ID NO: 7075 - DNA, 21 bp, homo sapiens
caaaccatttcaactgagttt

SEQ ID NO: 7076 - RNA, 21 nt, RNAi
aaccauuucaacugaguuuuu

SEQ ID NO: 7077 - RNA, 21 nt, RNAi
uuuugguaaaguugacucaaa

SEQ ID NO: 7078 - DNA, 21 bp, homo sapiens
catttcaactgagtttgctgt

SEQ ID NO: 7079 - RNA, 21 nt, RNAi
uuucaacugaguuugcuguuu

SEQ ID NO: 7080 - RNA, 21 nt, RNAi
uuaaaguugacucaaacgaca

SEQ ID NO: 7081 - DNA, 21 bp, homo sapiens
caactgagtttgctgttaaat

SEQ ID NO: 7082 - RNA, 21 nt, RNAi
acugaguuugcuguuaaauuu

SEQ ID NO: 7083 - RNA, 21 nt, RNAi
uuugacucaaacgacaauuua

SEQ ID NO: 7084 - DNA, 21 bp, homo sapiens
caaccgagagacaagcatctt

SEQ ID NO: 7085 - RNA, 21 nt, RNAi
accgagagacaagcaucuuuu

SEQ ID NO: 7086 - RNA, 21 nt, RNAi
uuuggcucucuguucguagaa

SEQ ID NO: 7087 - DNA, 21 bp, homo sapiens
caagcatcttcagttaccgtg

SEQ ID NO: 7088 - RNA, 21 nt, RNAi
agcaucuucaguuaccguguu

SEQ ID NO: 7089 - RNA, 21 nt, RNAi
uuucguagaagucaauggcac

SEQ ID NO: 7090 - DNA, 21 bp, homo sapiens
catcttcagttaccgtgaaga

SEQ ID NO: 7091 - RNA, 21 nt, RNAi
ucuucaguuaccgugaagauu

SEQ ID NO: 7092 - RNA, 21 nt, RNAi
uuagaagucaauggcacuucu

SEQ ID NO: 7093 - DNA, 21 bp, homo sapiens
cattgtctatgaaattcatcc

SEQ ID NO: 7094 - RNA, 21 nt, RNAi
uugucuaugaaauucauccuu

SEQ ID NO: 7095 - RNA, 21 nt, RNAi
uuaacagauacuuuaaguagg

SEQ ID NO: 7096 - DNA, 21 bp, homo sapiens
cataaatgtgcatgaagcagg

SEQ ID NO: 7097 - RNA, 21 nt, RNAi
uaaaugugcaugaagcagguu

SEQ ID NO: 7098 - RNA, 21 nt, RNAi
uuauuuacacguacuucgucc

SEQ ID NO: 7099 - DNA, 21 bp, homo sapiens
catgaagcaggaaggaacttt

SEQ ID NO: 7100 - RNA, 21 nt, RNAi
ugaagcaggaaggaacuuuuu

SEQ ID NO: 7101 - RNA, 21 nt, RNAi
uuacuucguccuuccuugaaa

SEQ ID NO: 7102 - DNA, 21 bp, homo sapiens
caggaaggaactttacagtgg

SEQ ID NO: 7103 - RNA, 21 nt, RNAi
ggaaggaacuuuacagugguu

SEQ ID NO: 7104 - RNA, 21 nt, RNAi
uuccuuccuugaaaugucacc

SEQ ID NO: 7105 - DNA, 21 bp, homo sapiens
cagtggcatgtcaacatcgct

SEQ ID NO: 7106 - RNA, 21 nt, RNAi
guggcaugucaacaucgcuuu

SEQ ID NO: 7107 - RNA, 21 nt, RNAi
uucaccguacaguuguagcga

SEQ ID NO: 7108 - DNA, 21 bp, homo sapiens
catgtcaacatcgctctaatt

SEQ ID NO: 7109 - RNA, 21 nt, RNAi
ugucaacaucgcucuaauuuu

SEQ ID NO: 7110 - RNA, 21 nt, RNAi
uuacaguuguagcgagauuaa

SEQ ID NO: 7111 - DNA, 21 bp, homo sapiens
caacatcgctctaattcagag

SEQ ID NO: 7112 - RNA, 21 nt, RNAi
acaucgcucuaauucagaguu

SEQ ID NO: 7113 - RNA, 21 nt, RNAi
uuuguagcgagauuaagucuc

SEQ ID NO: 7114 - DNA, 21 bp, homo sapiens
catcgctctaattcagagata

SEQ ID NO: 7115 - RNA, 21 nt, RNAi
ucgcucuaauucagagauauu

SEQ ID NO: 7116 - RNA, 21 nt, RNAi
uuagcgagauuaagucucuau

SEQ ID NO: 7117 - DNA, 21 bp, homo sapiens
cagagataatctgttgtacca

SEQ ID NO: 7118 - RNA, 21 nt, RNAi
gagauaaucuguuguaccauu

SEQ ID NO: 7119 - RNA, 21 nt, RNAi
uucucuauuagacaacauggu

SEQ ID NO: 7120 - DNA, 21 bp, homo sapiens
caacagctgaatctgcaactc

SEQ ID NO: 7121 - RNA, 21 nt, RNAi
acagcugaaucugcaacucuu

SEQ ID NO: 7122 - RNA, 21 nt, RNAi
uuugucgacuuagacguugag

SEQ ID NO: 7123 - DNA, 21 bp, homo sapiens
cataatcctgtgtttaagcct

SEQ ID NO: 7124 - RNA, 21 nt, RNAi
uaauccuguguuuaagccuuu

SEQ ID NO: 7125 - RNA, 21 nt, RNAi
uuauuaggacacaaauucgga

SEQ ID NO: 7126 - DNA, 21 bp, homo sapiens
cagttaaaggtgaagtgttaa

SEQ ID NO: 7127 - RNA, 21 nt, RNAi
guuaaaggugaaguguuaauu

SEQ ID NO: 7128 - RNA, 21 nt, RNAi
uucaauuuccacuucacaauu

SEQ ID NO: 7129 - DNA, 21 bp, homo sapiens
cacttacattctgaagccgtt

SEQ ID NO: 7130 - RNA, 21 nt, RNAi
cuuacauucugaagccguuuu

SEQ ID NO: 7131 - RNA, 21 nt, RNAi
uugaauguaagacuucggcaa

SEQ ID NO: 7132 - DNA, 21 bp, homo sapiens
caatgacctgctgaaattgaa

SEQ ID NO: 7133 - RNA, 21 nt, RNAi
augaccugcugaaauugaauu

SEQ ID NO: 7134 - RNA, 21 nt, RNAi
uuuacuggacgacuuuaacuu

SEQ ID NO: 7135 - DNA, 21 bp, homo sapiens
cagcgagctaaatatagagtg

SEQ ID NO: 7136 - RNA, 21 nt, RNAi
gcgagcuaaauauagaguguu

SEQ ID NO: 7137 - RNA, 21 nt, RNAi
uucgcucgauuuauaucucac

SEQ ID NO: 7138 - DNA, 21 bp, homo sapiens
caagcaatttcttcaaccgtc

SEQ ID NO: 7139 - RNA, 21 nt, RNAi
agcaauuucuucaaccgucuu

SEQ ID NO: 7140 - RNA, 21 nt, RNAi
uuucguuaaagaaguuggcag

SEQ ID NO: 7141 - DNA, 21 bp, homo sapiens
caatttcttcaaccgtccttg

SEQ ID NO: 7142 - RNA, 21 nt, RNAi
auuucuucaaccguccuuguu

SEQ ID NO: 7143 - RNA, 21 nt, RNAi
uuuaaagaaguuggcaggaac

SEQ ID NO: 7144 - DNA, 21 bp, homo sapiens
caaccagatcagaatttcaca

SEQ ID NO: 7145 - RNA, 21 nt, RNAi
accagaucagaauuucacauu

SEQ ID NO: 7146 - RNA, 21 nt, RNAi
uuuggucuagucuuaaagugu

SEQ ID NO: 7147 - DNA, 21 bp, homo sapiens
cagatcagaatttcacaggat

SEQ ID NO: 7148 - RNA, 21 nt, RNAi
gaucagaauuucacaggauuu

SEQ ID NO: 7149 - RNA, 21 nt, RNAi
uucuagucuuaaaguguccua

SEQ ID NO: 7150 - DNA, 21 bp, homo sapiens
cagaatttcacaggattgatt

SEQ ID NO: 7151 - RNA, 21 nt, RNAi
gaauuucacaggauugauuuu

SEQ ID NO: 7152 - RNA, 21 nt, RNAi
uucuuaaaguguccuaacuaa

SEQ ID NO: 7153 - DNA, 21 bp, homo sapiens
cacaggattgattgctggtgt

SEQ ID NO: 7154 - RNA, 21 nt, RNAi
caggauugauugcugguguuu

SEQ ID NO: 7155 - RNA, 21 nt, RNAi
uuguccuaacuaacgaccaca

SEQ ID NO: 7156 - DNA, 21 bp, homo sapiens
caggattgattgctggtgttg

SEQ ID NO: 7157 - RNA, 21 nt, RNAi
ggauugauugcugguguuguu

SEQ ID NO: 7158 - RNA, 21 nt, RNAi
uuccuaacuaacgaccacaac

SEQ ID NO: 7159 - DNA, 21 bp, homo sapiens
caatatcaacagcactgttat

SEQ ID NO: 7160 - RNA, 21 nt, RNAi
auaucaacagcacuguuauuu

SEQ ID NO: 7161 - RNA, 21 nt, RNAi
uuuauaguugucgugacaaua

SEQ ID NO: 7162 - DNA, 21 bp, homo sapiens
caacagcactgttattactac

SEQ ID NO: 7163 - RNA, 21 nt, RNAi
acagcacuguuauuacuacuu

SEQ ID NO: 7164 - RNA, 21 nt, RNAi
uuugucgugacaauaaugaug

SEQ ID NO: 7165 - DNA, 21 bp, homo sapiens
cagcactgttattactacttg

SEQ ID NO: 7166 - RNA, 21 nt, RNAi
gcacuguuauuacuacuuguu

SEQ ID NO: 7167 - RNA, 21 nt, RNAi
uucgugacaauaaugaugaac

SEQ ID NO: 7168 - DNA, 21 bp, homo sapiens
cagtgaattagttcgctacga

SEQ ID NO: 7169 - RNA, 21 nt, RNAi
gugaauuaguucgcuacgauu

SEQ ID NO: 7170 - RNA, 21 nt, RNAi
uucacuuaaucaagcgaugcu

SEQ ID NO: 7171 - DNA, 21 bp, homo sapiens
caagagtacacactcctcatt

SEQ ID NO: 7172 - RNA, 21 nt, RNAi
agaguacacacuccucauuuu

SEQ ID NO: 7173 - RNA, 21 nt, RNAi
uuucucaugugugaggaguaa

SEQ ID NO: 7174 - DNA, 21 bp, homo sapiens
cacactcctcatttggatagg

SEQ ID NO: 7175 - RNA, 21 nt, RNAi
cacuccucauuuggauagguu

SEQ ID NO: 7176 - RNA, 21 nt, RNAi
uugugaggaguaaaccuaucc

SEQ ID NO: 7177 - DNA, 21 bp, homo sapiens
cactcctcatttggataggct

SEQ ID NO: 7178 - RNA, 21 nt, RNAi
cuccucauuuggauaggcuuu

SEQ ID NO: 7179 - RNA, 21 nt, RNAi
uugaggaguaaaccuauccga

SEQ ID NO: 7180 - DNA, 21 bp, homo sapiens
catttggataggcttgtaagt

SEQ ID NO: 7181 - RNA, 21 nt, RNAi
uuuggauaggcuuguaaguuu

SEQ ID NO: 7182 - RNA, 21 nt, RNAi
uuaaaccuauccgaacauuca

SEQ ID NO: 7183 - DNA, 21 bp, homo sapiens
caactacagaaatggtttcaa

SEQ ID NO: 7184 - RNA, 21 nt, RNAi
acuacagaaaugguuucaauu

SEQ ID NO: 7185 - RNA, 21 nt, RNAi
uuugaugucuuuaccaaaguu

SEQ ID NO: 7186 - DNA, 21 bp, homo sapiens
caaatgaatctgtagactacc

SEQ ID NO: 7187 - RNA, 21 nt, RNAi
aaugaaucuguagacuaccuu

SEQ ID NO: 7188 - RNA, 21 nt, RNAi
uuuuacuuagacaucugaugg

SEQ ID NO: 7189 - DNA, 21 bp, homo sapiens
cagaagatcagtttcctaatt

SEQ ID NO: 7190 - RNA, 21 nt, RNAi
gaagaucaguuuccuaauuuu

SEQ ID NO: 7191 - RNA, 21 nt, RNAi
uucuucuagucaaaggauuaa

SEQ ID NO: 7192 - DNA, 21 bp, homo sapiens
cagtttcctaattcatctcag

SEQ ID NO: 7193 - RNA, 21 nt, RNAi
guuuccuaauucaucucaguu

SEQ ID NO: 7194 - RNA, 21 nt, RNAi
uucaaaggauuaaguagaguc

SEQ ID NO: 7195 - DNA, 21 bp, homo sapiens
catctcagaacggttcatgcc

SEQ ID NO: 7196 - RNA, 21 nt, RNAi
ucucagaacgguucaugccuu

SEQ ID NO: 7197 - RNA, 21 nt, RNAi
uuagagucuugccaaguacgg

SEQ ID NO: 7198 - DNA, 21 bp, homo sapiens
cagaacggttcatgccgacaa

SEQ ID NO: 7199 - RNA, 21 nt, RNAi
gaacgguucaugccgacaauu

SEQ ID NO: 7200 - RNA, 21 nt, RNAi
uucuugccaaguacggcuguu

SEQ ID NO: 7201 - DNA, 21 bp, homo sapiens
catgccgacaagtgcagtatc

SEQ ID NO: 7202 - RNA, 21 nt, RNAi
ugccgacaagugcaguaucuu

SEQ ID NO: 7203 - RNA, 21 nt, RNAi
uuacggcuguucacgucauag

SEQ ID NO: 7204 - DNA, 21 bp, homo sapiens
caagtgcagtatcctctgaca

SEQ ID NO: 7205 - RNA, 21 nt, RNAi
agugcaguauccucugacauu

SEQ ID NO: 7206 - RNA, 21 nt, RNAi
uuucacgucauaggagacugu

SEQ ID NO: 7207 - DNA, 21 bp, homo sapiens
cagtatcctctgacagacatg

SEQ ID NO: 7208 - RNA, 21 nt, RNAi
guauccucugacagacauguu

SEQ ID NO: 7209 - RNA, 21 nt, RNAi
uucauaggagacugucuguac

SEQ ID NO: 7210 - DNA, 21 bp, homo sapiens
cacattgacctcagtgctcta

SEQ ID NO: 7211 - RNA, 21 nt, RNAi
cauugaccucagugcucuauu

SEQ ID NO: 7212 - RNA, 21 nt, RNAi
uuguaacuggagucacgagau

SEQ ID NO: 7213 - DNA, 21 bp, homo sapiens
cattgacctcagtgctctaaa

SEQ ID NO: 7214 - RNA, 21 nt, RNAi
uugaccucagugcucuaaauu

SEQ ID NO: 7215 - RNA, 21 nt, RNAi
uuaacuggagucacgagauuu

SEQ ID NO: 7216 - DNA, 21 bp, homo sapiens
cagtgctctaaatccagagct

SEQ ID NO: 7217 - RNA, 21 nt, RNAi
gugcucuaaauccagagcuuu

SEQ ID NO: 7218 - RNA, 21 nt, RNAi
uucacgagauuuaggucucga

SEQ ID NO: 7219 - DNA, 21 bp, homo sapiens
caggcagtgcagcatgtagtg

SEQ ID NO: 7220 - RNA, 21 nt, RNAi
ggcagugcagcauguaguguu

SEQ ID NO: 7221 - RNA, 21 nt, RNAi
uuccgucacgucguacaucac

SEQ ID NO: 7222 - DNA, 21 bp, homo sapiens
cagtgcagcatgtagtgattg

SEQ ID NO: 7223 - RNA, 21 nt, RNAi
gugcagcauguagugauuguu

SEQ ID NO: 7224 - RNA, 21 nt, RNAi
uucacgucguacaucacuaac

SEQ ID NO: 7225 - DNA, 21 bp, homo sapiens
cagtagcctgattgtgcattt

SEQ ID NO: 7226 - RNA, 21 nt, RNAi
guagccugauugugcauuuuu

SEQ ID NO: 7227 - RNA, 21 nt, RNAi
uucaucggacuaacacguaaa

SEQ ID NO: 7228 - DNA, 21 bp, homo sapiens
catttcaatgaagtcatagga

SEQ ID NO: 7229 - RNA, 21 nt, RNAi
uuucaaugaagucauaggauu

SEQ ID NO: 7230 - RNA, 21 nt, RNAi
uuaaaguuacuucaguauccu

SEQ ID NO: 7231 - DNA, 21 bp, homo sapiens
caatgaagtcataggaagagg

SEQ ID NO: 7232 - RNA, 21 nt, RNAi
augaagucauaggaagagguu

SEQ ID NO: 7233 - RNA, 21 nt, RNAi
uuuacuucaguauccuucucc

SEQ ID NO: 7234 - DNA, 21 bp, homo sapiens
cactgtgctgtgaaatccttg

SEQ ID NO: 7235 - RNA, 21 nt, RNAi
cugugcugugaaauccuuguu

SEQ ID NO: 7236 - RNA, 21 nt, RNAi
uugacacgacacuuuaggaac

SEQ ID NO: 7237 - DNA, 21 bp, homo sapiens
cagaatcactgacataggaga

SEQ ID NO: 7238 - RNA, 21 nt, RNAi
gaaucacugacauaggagauu

SEQ ID NO: 7239 - RNA, 21 nt, RNAi
uucuuagugacuguauccucu

SEQ ID NO: 7240 - DNA, 21 bp, homo sapiens
cactgacataggagaagtttc

SEQ ID NO: 7241 - RNA, 21 nt, RNAi
cugacauaggagaaguuucuu

SEQ ID NO: 7242 - RNA, 21 nt, RNAi
uugacuguauccucuucaaag

SEQ ID NO: 7243 - DNA, 21 bp, homo sapiens
catacatgaaacatggagatc

SEQ ID NO: 7244 - RNA, 21 nt, RNAi
uacaugaaacauggagaucuu

SEQ ID NO: 7245 - RNA, 21 nt, RNAi
uuauguacuuuguaccucuag

SEQ ID NO: 7246 - DNA, 21 bp, homo sapiens
catgaaacatggagatcttcg

SEQ ID NO: 7247 - RNA, 21 nt, RNAi
ugaaacauggagaucuucguu

SEQ ID NO: 7248 - RNA, 21 nt, RNAi
uuacuuuguaccucuagaagc

SEQ ID NO: 7249 - DNA, 21 bp, homo sapiens
catggagatcttcgaaatttc

SEQ ID NO: 7250 - RNA, 21 nt, RNAi
uggagaucuucgaaauuucuu

SEQ ID NO: 7251 - RNA, 21 nt, RNAi
uuaccucuagaagcuuuaaag

SEQ ID NO: 7252 - DNA, 21 bp, homo sapiens
cattcgaaatgagactcataa

SEQ ID NO: 7253 - RNA, 21 nt, RNAi
uucgaaaugagacucauaauu

SEQ ID NO: 7254 - RNA, 21 nt, RNAi
uuaagcuuuacucugaguauu

SEQ ID NO: 7255 - DNA, 21 bp, homo sapiens
caagtagccaaagcgatgaaa

SEQ ID NO: 7256 - RNA, 21 nt, RNAi
aguagccaaagcgaugaaauu

SEQ ID NO: 7257 - RNA, 21 nt, RNAi
uuucaucgguuucgcuacuuu

SEQ ID NO: 7258 - DNA, 21 bp, homo sapiens
caaagcgatgaaatatcttgc

SEQ ID NO: 7259 - RNA, 21 nt, RNAi
aagcgaugaaauaucuugcuu

SEQ ID NO: 7260 - RNA, 21 nt, RNAi
uuuucgcuacuuuauagaacg

SEQ ID NO: 7261 - DNA, 21 bp, homo sapiens
cacagagacttggctgcaaga

SEQ ID NO: 7262 - RNA, 21 nt, RNAi
cagagacuuggcugcaagauu

SEQ ID NO: 7263 - RNA, 21 nt, RNAi
uugucucugaaccgacguucu

SEQ ID NO: 7264 - DNA, 21 bp, homo sapiens
cagagacttggctgcaagaaa

SEQ ID NO: 7265 - RNA, 21 nt, RNAi
gagacuuggcugcaagaaauu

SEQ ID NO: 7266 - RNA, 21 nt, RNAi
uucucugaaccgacguucuuu

SEQ ID NO: 7267 - DNA, 21 bp, homo sapiens
caagaaactgtatgctggatg

SEQ ID NO: 7268 - RNA, 21 nt, RNAi
agaaacuguaugcuggauguu

SEQ ID NO: 7269 - RNA, 21 nt, RNAi
uuucuuugacauacgaccuac

SEQ ID NO: 7270 - DNA, 21 bp, homo sapiens
cacagtcaaggttgctgattt

SEQ ID NO: 7271 - RNA, 21 nt, RNAi
cagucaagguugcugauuuuu

SEQ ID NO: 7272 - RNA, 21 nt, RNAi
uugucaguuccaacgacuaaa

SEQ ID NO: 7273 - DNA, 21 bp, homo sapiens
cagagacatgtatgataaaga

SEQ ID NO: 7274 - RNA, 21 nt, RNAi
gagacauguaugauaaagauu

SEQ ID NO: 7275 - RNA, 21 nt, RNAi
uucucuguacauacuauuucu

SEQ ID NO: 7276 - DNA, 21 bp, homo sapiens
caggtgcaaagctgccagtga

SEQ ID NO: 7277 - RNA, 21 nt, RNAi
ggugcaaagcugccagugauu

SEQ ID NO: 7278 - RNA, 21 nt, RNAi
uuccacguuucgacggucacu

SEQ ID NO: 7279 - DNA, 21 bp, homo sapiens
caaagctgccagtgaagtgga

SEQ ID NO: 7280 - RNA, 21 nt, RNAi
aagcugccagugaaguggauu

SEQ ID NO: 7281 - RNA, 21 nt, RNAi
uuuucgacggucacuucaccu

SEQ ID NO: 7282 - DNA, 21 bp, homo sapiens
cagtgaagtggatggctttgg

SEQ ID NO: 7283 - RNA, 21 nt, RNAi
gugaaguggauggcuuugguu

SEQ ID NO: 7284 - RNA, 21 nt, RNAi
uucacuucaccuaccgaaacc

SEQ ID NO: 7285 - DNA, 21 bp, homo sapiens
caccaagtcagatgtgtggtc

SEQ ID NO: 7286 - RNA, 21 nt, RNAi
ccaagucagauguguggucuu

SEQ ID NO: 7287 - RNA, 21 nt, RNAi
uugguucagucuacacaccag

SEQ ID NO: 7288 - DNA, 21 bp, homo sapiens
caagtcagatgtgtggtcctt

SEQ ID NO: 7289 - RNA, 21 nt, RNAi
agucagaugugugguccuuuu

SEQ ID NO: 7290 - RNA, 21 nt, RNAi
uuucagucuacacaccaggaa

SEQ ID NO: 7291 - DNA, 21 bp, homo sapiens
cagatgtgtggtcctttggcg

SEQ ID NO: 7292 - RNA, 21 nt, RNAi
gaugugugguccuuuggcguu

SEQ ID NO: 7293 - RNA, 21 nt, RNAi
uucuacacaccaggaaaccgc

SEQ ID NO: 7294 - DNA, 21 bp, homo sapiens
caccttatcctgacgtaaaca

SEQ ID NO: 7295 - RNA, 21 nt, RNAi
ccuuauccugacguaaacauu

SEQ ID NO: 7296 - RNA, 21 nt, RNAi
uuggaauaggacugcauuugu

SEQ ID NO: 7297 - DNA, 21 bp, homo sapiens
cagcgatcttctctactttca

SEQ ID NO: 7298 - RNA, 21 nt, RNAi
gcgaucuucucuacuuucauu

SEQ ID NO: 7299 - RNA, 21 nt, RNAi
uucgcuagaagagaugaaagu

SEQ ID NO: 7300 - DNA, 21 bp, homo sapiens
cactatgtccatgtgaacgct

SEQ ID NO: 7301 - RNA, 21 nt, RNAi
cuauguccaugugaacgcuuu

SEQ ID NO: 7302 - RNA, 21 nt, RNAi
uugauacagguacacuugcga

SEQ ID NO: 7303 - DNA, 21 bp, homo sapiens
catgtgaacgctacttatgtg

SEQ ID NO: 7304 - RNA, 21 nt, RNAi
ugugaacgcuacuuauguguu

SEQ ID NO: 7305 - RNA, 21 nt, RNAi
uuacacuugcgaugaauacac

SEQ ID NO: 7306 - DNA, 21 bp, homo sapiens
catcagaagataacgctgatg

SEQ ID NO: 7307 - RNA, 21 nt, RNAi
ucagaagauaacgcugauguu

SEQ ID NO: 7308 - RNA, 21 nt, RNAi
uuagucuucuauugcgacuac

SEQ ID NO: 7309 - DNA, 21 bp, homo sapiens
cagaagataacgctgatgatg

SEQ ID NO: 7310 - RNA, 21 nt, RNAi
gaagauaacgcugaugauguu

SEQ ID NO: 7311 - RNA, 21 nt, RNAi
uucuucuauugcgacuacuac

SEQ ID NO: 7312 - DNA, 21 bp, homo sapiens
cacacgaccagcctccttctg

SEQ ID NO: 7313 - RNA, 21 nt, RNAi
cacgaccagccuccuucuguu

SEQ ID NO: 7314 - RNA, 21 nt, RNAi
uugugcuggucggaggaagac

SEQ ID NO: 7315 - DNA, 21 bp, homo sapiens
catcatagtgctagtactatg

SEQ ID NO: 7316 - RNA, 21 nt, RNAi
ucauagugcuaguacuauguu

SEQ ID NO: 7317 - RNA, 21 nt, RNAi
uuaguaucacgaucaugauac

SEQ ID NO: 7318 - DNA, 21 bp, homo sapiens
catagtgctagtactatgtca

SEQ ID NO: 7319 - RNA, 21 nt, RNAi
uagugcuaguacuaugucauu

SEQ ID NO: 7320 - RNA, 21 nt, RNAi
uuaucacgaucaugauacagu

SEQ ID NO: 7321 - DNA, 21 bp, homo sapiens
caaagcaacagtccacacttt

SEQ ID NO: 7322 - RNA, 21 nt, RNAi
aagcaacaguccacacuuuuu

SEQ ID NO: 7323 - RNA, 21 nt, RNAi
uuuucguugucaggugugaaa

SEQ ID NO: 7324 - DNA, 21 bp, homo sapiens
caacagtccacactttgtcca

SEQ ID NO: 7325 - RNA, 21 nt, RNAi
acaguccacacuuuguccauu

SEQ ID NO: 7326 - RNA, 21 nt, RNAi
uuugucaggugugaaacaggu

SEQ ID NO: 7327 - DNA, 21 bp, homo sapiens
cagtccacactttgtccaatg

SEQ ID NO: 7328 - RNA, 21 nt, RNAi
guccacacuuuguccaauguu

SEQ ID NO: 7329 - RNA, 21 nt, RNAi
uucaggugugaaacagguuac

SEQ ID NO: 7330 - DNA, 21 bp, homo sapiens
catcgatattctttgctcctt

SEQ ID NO: 7331 - RNA, 21 nt, RNAi
ucgauauucuuugcuccuuuu

SEQ ID NO: 7332 - RNA, 21 nt, RNAi
uuagcuauaagaaacgaggaa

SEQ ID NO: 7333 - DNA, 21 bp, homo sapiens
cagagcatcagaaccagaggc

SEQ ID NO: 7334 - RNA, 21 nt, RNAi
gagcaucagaaccagaggcuu

SEQ ID NO: 7335 - RNA, 21 nt, RNAi
uucucguagucuuggucuccg

SEQ ID NO: 7336 - DNA, 21 bp, homo sapiens
catcagaaccagaggcttggt

SEQ ID NO: 7337 - RNA, 21 nt, RNAi
ucagaaccagaggcuugguuu

SEQ ID NO: 7338 - RNA, 21 nt, RNAi
uuagucuuggucuccgaacca

SEQ ID NO: 7339 - DNA, 21 bp, homo sapiens
gagcgctttgtgagcagatgc

SEQ ID NO: 7340 - RNA, 21 nt, RNAi
gcgcuuugugagcagaugcuu

SEQ ID NO: 7341 - RNA, 21 nt, RNAi
uucgcgaaacacucgucuacg

SEQ ID NO: 7342 - DNA, 21 bp, homo sapiens
gacagctgacttgctgagagg

SEQ ID NO: 7343 - RNA, 21 nt, RNAi
cagcugacuugcugagagguu

SEQ ID NO: 7344 - RNA, 21 nt, RNAi
uugucgacugaacgacucucc

SEQ ID NO: 7345 - DNA, 21 bp, homo sapiens
gacttctccactggttcctgg

SEQ ID NO: 7346 - RNA, 21 nt, RNAi
cuucuccacugguuccugguu

SEQ ID NO: 7347 - RNA, 21 nt, RNAi
uugaagaggugaccaaggacc

SEQ ID NO: 7348 - DNA, 21 bp, homo sapiens
gataaacctctcataatgaag

SEQ ID NO: 7349 - RNA, 21 nt, RNAi
uaaaccucucauaaugaaguu

SEQ ID NO: 7350 - RNA, 21 nt, RNAi
uuauuuggagaguauuacuuc

SEQ ID NO: 7351 - DNA, 21 bp, homo sapiens
gagtgtaaagaggcactagca

SEQ ID NO: 7352 - RNA, 21 nt, RNAi
guguaaagaggcacuagcauu

SEQ ID NO: 7353 - RNA, 21 nt, RNAi
uucacauuucuccgugaucgu

SEQ ID NO: 7354 - DNA, 21 bp, homo sapiens
gaggcactagcaaagtccgag

SEQ ID NO: 7355 - RNA, 21 nt, RNAi
ggcacuagcaaaguccgaguu

SEQ ID NO: 7356 - RNA, 21 nt, RNAi
uuccgugaucguuucaggcuc

SEQ ID NO: 7357 - DNA, 21 bp, homo sapiens
gagatgaatgtgaatatgaag

SEQ ID NO: 7358 - RNA, 21 nt, RNAi
gaugaaugugaauaugaaguu

SEQ ID NO: 7359 - RNA, 21 nt, RNAi
uucuacuuacacuuauacuuc

SEQ ID NO: 7360 - DNA, 21 bp, homo sapiens
gaatatgaagtatcagcttcc

SEQ ID NO: 7361 - RNA, 21 nt, RNAi
auaugaaguaucagcuuccuu

SEQ ID NO: 7362 - RNA, 21 nt, RNAi
uuuauacuucauagucgaagg

SEQ ID NO: 7363 - DNA, 21 bp, homo sapiens
gaatgtcattctacatgagca

SEQ ID NO: 7364 - RNA, 21 nt, RNAi
augucauucuacaugagcauu

SEQ ID NO: 7365 - RNA, 21 nt, RNAi
uuuacaguaagauguacucgu

SEQ ID NO: 7366 - DNA, 21 bp, homo sapiens
gaggaagaccttcagaaggtt

SEQ ID NO: 7367 - RNA, 21 nt, RNAi
ggaagaccuucagaagguuuu

SEQ ID NO: 7368 - RNA, 21 nt, RNAi
uuccuucuggaagucuuccaa

SEQ ID NO: 7369 - DNA, 21 bp, homo sapiens
gaagaccttcagaaggttgct

SEQ ID NO: 7370 - RNA, 21 nt, RNAi
agaccuucagaagguugcuuu

SEQ ID NO: 7371 - RNA, 21 nt, RNAi
uuucuggaagucuuccaacga

SEQ ID NO: 7372 - DNA, 21 bp, homo sapiens
gaccttcagaaggttgctgag

SEQ ID NO: 7373 - RNA, 21 nt, RNAi
ccuucagaagguugcugaguu

SEQ ID NO: 7374 - RNA, 21 nt, RNAi
uuggaagucuuccaacgacuc

SEQ ID NO: 7375 - DNA, 21 bp, homo sapiens
gaaggttgctgagtacaagac

SEQ ID NO: 7376 - RNA, 21 nt, RNAi
agguugcugaguacaagacuu

SEQ ID NO: 7377 - RNA, 21 nt, RNAi
uuuccaacgacucauguucug

SEQ ID NO: 7378 - DNA, 21 bp, homo sapiens
gactgcagcagcaaagccaat

SEQ ID NO: 7379 - RNA, 21 nt, RNAi
cugcagcagcaaagccaauuu

SEQ ID NO: 7380 - RNA, 21 nt, RNAi
uugacgucgucguuucgguua

SEQ ID NO: 7381 - DNA, 21 bp, homo sapiens
gaggtgtttggaaagataaca

SEQ ID NO: 7382 - RNA, 21 nt, RNAi
gguguuuggaaagauaacauu

SEQ ID NO: 7383 - RNA, 21 nt, RNAi
uuccacaaaccuuucuauugu

SEQ ID NO: 7384 - DNA, 21 bp, homo sapiens
gaaagataacatcaacatggc

SEQ ID NO: 7385 - RNA, 21 nt, RNAi
aagauaacaucaacauggcuu

SEQ ID NO: 7386 - RNA, 21 nt, RNAi
uuuucuauuguaguuguaccg

SEQ ID NO: 7387 - DNA, 21 bp, homo sapiens
gataacatcaacatggctcta

SEQ ID NO: 7388 - RNA, 21 nt, RNAi
uaacaucaacauggcucuauu

SEQ ID NO: 7389 - RNA, 21 nt, RNAi
uuauuguaguuguaccgagau

SEQ ID NO: 7390 - DNA, 21 bp, homo sapiens
gacacctactatgatgatcaa

SEQ ID NO: 7391 - RNA, 21 nt, RNAi
caccuacuaugaugaucaauu

SEQ ID NO: 7392 - RNA, 21 nt, RNAi
uuguggaugauacuacuaguu

SEQ ID NO: 7393 - DNA, 21 bp, homo sapiens
gatgatcaactcattagctgt

SEQ ID NO: 7394 - RNA, 21 nt, RNAi
ugaucaacucauuagcuguuu

SEQ ID NO: 7395 - RNA, 21 nt, RNAi
uuacuaguugaguaaucgaca

SEQ ID NO: 7396 - DNA, 21 bp, homo sapiens
gatcaactcattagctgtggc

SEQ ID NO: 7397 - RNA, 21 nt, RNAi
ucaacucauuagcuguggcuu

SEQ ID NO: 7398 - RNA, 21 nt, RNAi
uuaguugaguaaucgacaccg

SEQ ID NO: 7399 - DNA, 21 bp, homo sapiens
gacctgccagcgacatgtctt

SEQ ID NO: 7400 - RNA, 21 nt, RNAi
ccugccagcgacaugucuuuu

SEQ ID NO: 7401 - RNA, 21 nt, RNAi
uuggacggucgcuguacagaa

SEQ ID NO: 7402 - DNA, 21 bp, homo sapiens
gacatacagtcggaggttcac

SEQ ID NO: 7403 - RNA, 21 nt, RNAi
cauacagucggagguucacuu

SEQ ID NO: 7404 - RNA, 21 nt, RNAi
uuguaugucagccuccaagug

SEQ ID NO: 7405 - DNA, 21 bp, homo sapiens
gaggttcactgcatattctcc

SEQ ID NO: 7406 - RNA, 21 nt, RNAi
gguucacugcauauucuccuu

SEQ ID NO: 7407 - RNA, 21 nt, RNAi
uuccaagugacguauaagagg

SEQ ID NO: 7408 - DNA, 21 bp, homo sapiens
gagccaaagtcctttcatctg

SEQ ID NO: 7409 - RNA, 21 nt, RNAi
gccaaaguccuuucaucuguu

SEQ ID NO: 7410 - RNA, 21 nt, RNAi
uucgguuucaggaaaguagac

SEQ ID NO: 7411 - DNA, 21 bp, homo sapiens
gaccggttcatcaacttcttt

SEQ ID NO: 7412 - RNA, 21 nt, RNAi
ccgguucaucaacuucuuuuu

SEQ ID NO: 7413 - RNA, 21 nt, RNAi
uuggccaaguaguugaagaaa

SEQ ID NO: 7414 - DNA, 21 bp, homo sapiens
gatcatccattgcattcgata

SEQ ID NO: 7415 - RNA, 21 nt, RNAi
ucauccauugcauucgauauu

SEQ ID NO: 7416 - RNA, 21 nt, RNAi
uuaguagguaacguaagcuau

SEQ ID NO: 7417 - DNA, 21 bp, homo sapiens
gatatcagtgagaaggctaaa

SEQ ID NO: 7418 - RNA, 21 nt, RNAi
uaucagugagaaggcuaaauu

SEQ ID NO: 7419 - RNA, 21 nt, RNAi
uuauagucacucuuccgauuu

SEQ ID NO: 7420 - DNA, 21 bp, homo sapiens
gagaaggctaaaggaaacgaa

SEQ ID NO: 7421 - RNA, 21 nt, RNAi
gaaggcuaaaggaaacgaauu

SEQ ID NO: 7422 - RNA, 21 nt, RNAi
uucuuccgauuuccuuugcuu

SEQ ID NO: 7423 - DNA, 21 bp, homo sapiens
gaaggctaaaggaaacgaaag

SEQ ID NO: 7424 - RNA, 21 nt, RNAi
aggcuaaaggaaacgaaaguu

SEQ ID NO: 7425 - RNA, 21 nt, RNAi
uuuccgauuuccuuugcuuuc

SEQ ID NO: 7426 - DNA, 21 bp, homo sapiens
gacggaccagtcctacattga

SEQ ID NO: 7427 - RNA, 21 nt, RNAi
cggaccaguccuacauugauu

SEQ ID NO: 7428 - RNA, 21 nt, RNAi
uugccuggucaggauguaacu

SEQ ID NO: 7429 - DNA, 21 bp, homo sapiens
gaccagtcctacattgatgtt

SEQ ID NO: 7430 - RNA, 21 nt, RNAi
ccaguccuacauugauguuuu

SEQ ID NO: 7431 - RNA, 21 nt, RNAi
uuggucaggauguaacuacaa

SEQ ID NO: 7432 - DNA, 21 bp, homo sapiens
gaaactctagatgctcagact

SEQ ID NO: 7433 - RNA, 21 nt, RNAi
aacucuagaugcucagacuuu

SEQ ID NO: 7434 - RNA, 21 nt, RNAi
uuuugagaucuacgagucuga

SEQ ID NO: 7435 - DNA, 21 bp, homo sapiens
gaataatcaggttctgttcca

SEQ ID NO: 7436 - RNA, 21 nt, RNAi
auaaucagguucuguuccauu

SEQ ID NO: 7437 - RNA, 21 nt, RNAi
uuuauuaguccaagacaaggu

SEQ ID NO: 7438 - DNA, 21 bp, homo sapiens
gattgcattcctacatggaaa

SEQ ID NO: 7439 - RNA, 21 nt, RNAi
uugcauuccuacauggaaauu

SEQ ID NO: 7440 - RNA, 21 nt, RNAi
uuaacguaaggauguaccuuu

SEQ ID NO: 7441 - DNA, 21 bp, homo sapiens
gaaatgcctctggagtgtatt

SEQ ID NO: 7442 - RNA, 21 nt, RNAi
aaugccucuggaguguauuuu

SEQ ID NO: 7443 - RNA, 21 nt, RNAi
uuuuacggagaccucacauaa

SEQ ID NO: 7444 - DNA, 21 bp, homo sapiens
gagatccacaaagaaggaagt

SEQ ID NO: 7445 - RNA, 21 nt, RNAi
gauccacaaagaaggaaguuu

SEQ ID NO: 7446 - RNA, 21 nt, RNAi
uucuagguguuucuuccuuca

SEQ ID NO: 7447 - DNA, 21 bp, homo sapiens
gatccacaaagaaggaagtgt

SEQ ID NO: 7448 - RNA, 21 nt, RNAi
uccacaaagaaggaaguguuu

SEQ ID NO: 7449 - RNA, 21 nt, RNAi
uuagguguuucuuccuucaca

SEQ ID NO: 7450 - DNA, 21 bp, homo sapiens
gacaaataggagccagcctga

SEQ ID NO: 7451 - RNA, 21 nt, RNAi
caaauaggagccagccugauu

SEQ ID NO: 7452 - RNA, 21 nt, RNAi
uuguuuauccucggucggacu

SEQ ID NO: 7453 - DNA, 21 bp, homo sapiens
gagccagcctgaatgatgaca

SEQ ID NO: 7454 - RNA, 21 nt, RNAi
gccagccugaaugaugacauu

SEQ ID NO: 7455 - RNA, 21 nt, RNAi
uucggucggacuuacuacugu

SEQ ID NO: 7456 - DNA, 21 bp, homo sapiens
gattctgccgaaccaatggat

SEQ ID NO: 7457 - RNA, 21 nt, RNAi
uucugccgaaccaauggauuu

SEQ ID NO: 7458 - RNA, 21 nt, RNAi
uuaagacggcuugguuaccua

SEQ ID NO: 7459 - DNA, 21 bp, homo sapiens
gaaccaatggatcgatctgcc

SEQ ID NO: 7460 - RNA, 21 nt, RNAi
accaauggaucgaucugccuu

SEQ ID NO: 7461 - RNA, 21 nt, RNAi
uuugguuaccuagcuagacgg

SEQ ID NO: 7462 - DNA, 21 bp, homo sapiens
gatcgatctgccatgtgtgca

SEQ ID NO: 7463 - RNA, 21 nt, RNAi
ucgaucugccaugugugcauu

SEQ ID NO: 7464 - RNA, 21 nt, RNAi
uuagcuagacgguacacacgu

SEQ ID NO: 7465 - DNA, 21 bp, homo sapiens
gatctgccatgtgtgcattcc

SEQ ID NO: 7466 - RNA, 21 nt, RNAi
ucugccaugugugcauuccuu

SEQ ID NO: 7467 - RNA, 21 nt, RNAi
uuagacgguacacacguaagg

SEQ ID NO: 7468 - DNA, 21 bp, homo sapiens
gacttcttcaacaagatcgtc

SEQ ID NO: 7469 - RNA, 21 nt, RNAi
cuucuucaacaagaucgucuu

SEQ ID NO: 7470 - RNA, 21 nt, RNAi
uugaagaaguuguucuagcag

SEQ ID NO: 7471 - DNA, 21 bp, homo sapiens
gagcactgctttaataggaca

SEQ ID NO: 7472 - RNA, 21 nt, RNAi
gcacugcuuuaauaggacauu

SEQ ID NO: 7473 - RNA, 21 nt, RNAi
uucgugacgaaauuauccugu

SEQ ID NO: 7474 - DNA, 21 bp, homo sapiens
gacacttctgagaaattcatc

SEQ ID NO: 7475 - RNA, 21 nt, RNAi
cacuucugagaaauucaucuu

SEQ ID NO: 7476 - RNA, 21 nt, RNAi
uugugaagacucuuuaaguag

SEQ ID NO: 7477 - DNA, 21 bp, homo sapiens
gagaaattcatcaggctgtga

SEQ ID NO: 7478 - RNA, 21 nt, RNAi
gaaauucaucaggcugugauu

SEQ ID NO: 7479 - RNA, 21 nt, RNAi
uucuuuaaguaguccgacacu

SEQ ID NO: 7480 - DNA, 21 bp, homo sapiens
gaaattcatcaggctgtgaag

SEQ ID NO: 7481 - RNA, 21 nt, RNAi
aauucaucaggcugugaaguu

SEQ ID NO: 7482 - RNA, 21 nt, RNAi
uuuuaaguaguccgacacuuc

SEQ ID NO: 7483 - DNA, 21 bp, homo sapiens
gatgaatatcgaacagagttt

SEQ ID NO: 7484 - RNA, 21 nt, RNAi
ugaauaucgaacagaguuuuu

SEQ ID NO: 7485 - RNA, 21 nt, RNAi
uuacuuauagcuugucucaaa

SEQ ID NO: 7486 - DNA, 21 bp, homo sapiens
gaatatcgaacagagtttacc

SEQ ID NO: 7487 - RNA, 21 nt, RNAi
auaucgaacagaguuuaccuu

SEQ ID NO: 7488 - RNA, 21 nt, RNAi
uuuauagcuugucucaaaugg

SEQ ID NO: 7489 - DNA, 21 bp, homo sapiens
gaacagagtttaccacagctt

SEQ ID NO: 7490 - RNA, 21 nt, RNAi
acagaguuuaccacagcuuuu

SEQ ID NO: 7491 - RNA, 21 nt, RNAi
uuugucucaaauggugucgaa

SEQ ID NO: 7492 - DNA, 21 bp, homo sapiens
gagtttaccacagctttgcag

SEQ ID NO: 7493 - RNA, 21 nt, RNAi
guuuaccacagcuuugcaguu

SEQ ID NO: 7494 - RNA, 21 nt, RNAi
uucaaauggugucgaaacguc

SEQ ID NO: 7495 - DNA, 21 bp, homo sapiens
gaagtcctcttaacatctata

SEQ ID NO: 7496 - RNA, 21 nt, RNAi
aguccucuuaacaucuauauu

SEQ ID NO: 7497 - RNA, 21 nt, RNAi
uuucaggagaauuguagauau

SEQ ID NO: 7498 - DNA, 21 bp, homo sapiens
gagacctcaccatagctaatc

SEQ ID NO: 7499 - RNA, 21 nt, RNAi
gaccucaccauagcuaaucuu

SEQ ID NO: 7500 - RNA, 21 nt, RNAi
uucuggagugguaucgauuag

SEQ ID NO: 7501 - DNA, 21 bp, homo sapiens
gacctcaccatagctaatctt

SEQ ID NO: 7502 - RNA, 21 nt, RNAi
ccucaccauagcuaaucuuuu

SEQ ID NO: 7503 - RNA, 21 nt, RNAi
uuggagugguaucgauuagaa

SEQ ID NO: 7504 - DNA, 21 bp, homo sapiens
gaagtgattgtggagcataca

SEQ ID NO: 7505 - RNA, 21 nt, RNAi
agugauuguggagcauacauu

SEQ ID NO: 7506 - RNA, 21 nt, RNAi
uuucacuaacaccucguaugu

SEQ ID NO: 7507 - DNA, 21 bp, homo sapiens
gattgtggagcatacattaaa

SEQ ID NO: 7508 - RNA, 21 nt, RNAi
uuguggagcauacauuaaauu

SEQ ID NO: 7509 - RNA, 21 nt, RNAi
uuaacaccucguauguaauuu

SEQ ID NO: 7510 - DNA, 21 bp, homo sapiens
gacatttccagtcctgcagtc

SEQ ID NO: 7511 - RNA, 21 nt, RNAi
cauuuccaguccugcagucuu

SEQ ID NO: 7512 - RNA, 21 nt, RNAi
uuguaaaggucaggacgucag

SEQ ID NO: 7513 - DNA, 21 bp, homo sapiens
gacaaatgtgtgcgatcggag

SEQ ID NO: 7514 - RNA, 21 nt, RNAi
caaaugugugcgaucggaguu

SEQ ID NO: 7515 - RNA, 21 nt, RNAi
uuguuuacacacgcuagccuc

SEQ ID NO: 7516 - DNA, 21 bp, homo sapiens
gatcggaggaatgcctgagcg

SEQ ID NO: 7517 - RNA, 21 nt, RNAi
ucggaggaaugccugagcguu

SEQ ID NO: 7518 - RNA, 21 nt, RNAi
uuagccuccuuacggacucgc

SEQ ID NO: 7519 - DNA, 21 bp, homo sapiens
gacatggactcaacagatctg

SEQ ID NO: 7520 - RNA, 21 nt, RNAi
cauggacucaacagaucuguu

SEQ ID NO: 7521 - RNA, 21 nt, RNAi
uuguaccugaguugucuagac

SEQ ID NO: 7522 - DNA, 21 bp, homo sapiens
gactcaacagatctgtctgcc

SEQ ID NO: 7523 - RNA, 21 nt, RNAi
cucaacagaucugucugccuu

SEQ ID NO: 7524 - RNA, 21 nt, RNAi
uugaguugucuagacagacgg

SEQ ID NO: 7525 - DNA, 21 bp, homo sapiens
gatctgtctgcctgcaatcta

SEQ ID NO: 7526 - RNA, 21 nt, RNAi
ucugucugccugcaaucuauu

SEQ ID NO: 7527 - RNA, 21 nt, RNAi
uuagacagacggacguuagau

SEQ ID NO: 7528 - DNA, 21 bp, homo sapiens
gacaaggctgaccatatgtgg

SEQ ID NO: 7529 - RNA, 21 nt, RNAi
caaggcugaccauaugugguu

SEQ ID NO: 7530 - RNA, 21 nt, RNAi
uuguuccgacugguauacacc

SEQ ID NO: 7531 - DNA, 21 bp, homo sapiens
gactttggatttcggaggaat

SEQ ID NO: 7532 - RNA, 21 nt, RNAi
cuuuggauuucggaggaauuu

SEQ ID NO: 7533 - RNA, 21 nt, RNAi
uugaaaccuaaagccuccuua

SEQ ID NO: 7534 - DNA, 21 bp, homo sapiens
gagttctccttggaaatgaga

SEQ ID NO: 7535 - RNA, 21 nt, RNAi
guucuccuuggaaaugagauu

SEQ ID NO: 7536 - RNA, 21 nt, RNAi
uucaagaggaaccuuuacucu

SEQ ID NO: 7537 - DNA, 21 bp, homo sapiens
gaaatgagagctgcaccttga

SEQ ID NO: 7538 - RNA, 21 nt, RNAi
aaugagagcugcaccuugauu

SEQ ID NO: 7539 - RNA, 21 nt, RNAi
uuuuacucucgacguggaacu

SEQ ID NO: 7540 - DNA, 21 bp, homo sapiens
gagagctgcaccttgacttta

SEQ ID NO: 7541 - RNA, 21 nt, RNAi
gagcugcaccuugacuuuauu

SEQ ID NO: 7542 - RNA, 21 nt, RNAi
uucucgacguggaacugaaau

SEQ ID NO: 7543 - DNA, 21 bp, homo sapiens
gagctgcaccttgactttaag

SEQ ID NO: 7544 - RNA, 21 nt, RNAi
gcugcaccuugacuuuaaguu

SEQ ID NO: 7545 - RNA, 21 nt, RNAi
uucgacguggaacugaaauuc

SEQ ID NO: 7546 - DNA, 21 bp, homo sapiens
gactttaagtgagagcacgat

SEQ ID NO: 7547 - RNA, 21 nt, RNAi
cuuuaagugagagcacgauuu

SEQ ID NO: 7548 - RNA, 21 nt, RNAi
uugaaauucacucucgugcua

SEQ ID NO: 7549 - DNA, 21 bp, homo sapiens
gagagcacgatgaatacattg

SEQ ID NO: 7550 - RNA, 21 nt, RNAi
gagcacgaugaauacauuguu

SEQ ID NO: 7551 - RNA, 21 nt, RNAi
uucucgugcuacuuauguaac

SEQ ID NO: 7552 - DNA, 21 bp, homo sapiens
gagcacgatgaatacattgaa

SEQ ID NO: 7553 - RNA, 21 nt, RNAi
gcacgaugaauacauugaauu

SEQ ID NO: 7554 - RNA, 21 nt, RNAi
uucgugcuacuuauguaacuu

SEQ ID NO: 7555 - DNA, 21 bp, homo sapiens
gatgaatacattgaaatgcac

SEQ ID NO: 7556 - RNA, 21 nt, RNAi
ugaauacauugaaaugcacuu

SEQ ID NO: 7557 - RNA, 21 nt, RNAi
uuacuuauguaacuuuacgug

SEQ ID NO: 7558 - DNA, 21 bp, homo sapiens
gaatacattgaaatgcacagt

SEQ ID NO: 7559 - RNA, 21 nt, RNAi
auacauugaaaugcacaguuu

SEQ ID NO: 7560 - RNA, 21 nt, RNAi
uuuauguaacuuuacguguca

SEQ ID NO: 7561 - DNA, 21 bp, homo sapiens
gaaatgcacagttggtcctgc

SEQ ID NO: 7562 - RNA, 21 nt, RNAi
aaugcacaguugguccugcuu

SEQ ID NO: 7563 - RNA, 21 nt, RNAi
uuuuacgugucaaccaggacg

SEQ ID NO: 7564 - DNA, 21 bp, homo sapiens
gacaacacaatacagtacatt

SEQ ID NO: 7565 - RNA, 21 nt, RNAi
caacacaauacaguacauuuu

SEQ ID NO: 7566 - RNA, 21 nt, RNAi
uuguuguguuaugucauguaa

SEQ ID NO: 7567 - DNA, 21 bp, homo sapiens
gaaatacggtcctatggctgg

SEQ ID NO: 7568 - RNA, 21 nt, RNAi
aauacgguccuauggcugguu

SEQ ID NO: 7569 - RNA, 21 nt, RNAi
uuuuaugccaggauaccgacc

SEQ ID NO: 7570 - DNA, 21 bp, homo sapiens
gacacatttcaattggtggaa

SEQ ID NO: 7571 - RNA, 21 nt, RNAi
cacauuucaauugguggaauu

SEQ ID NO: 7572 - RNA, 21 nt, RNAi
uuguguaaaguuaaccaccuu

SEQ ID NO: 7573 - DNA, 21 bp, homo sapiens
gacttagccaaccgagagaca

SEQ ID NO: 7574 - RNA, 21 nt, RNAi
cuuagccaaccgagagacauu

SEQ ID NO: 7575 - RNA, 21 nt, RNAi
uugaaucgguuggcucucugu

SEQ ID NO: 7576 - DNA, 21 bp, homo sapiens
gagagacaagcatcttcagtt

SEQ ID NO: 7577 - RNA, 21 nt, RNAi
gagacaagcaucuucaguuuu

SEQ ID NO: 7578 - RNA, 21 nt, RNAi
uucucuguucguagaagucaa

SEQ ID NO: 7579 - DNA, 21 bp, homo sapiens
gagacaagcatcttcagttac

SEQ ID NO: 7580 - RNA, 21 nt, RNAi
gacaagcaucuucaguuacuu

SEQ ID NO: 7581 - RNA, 21 nt, RNAi
uucuguucguagaagucaaug

SEQ ID NO: 7582 - DNA, 21 bp, homo sapiens
gacaagcatcttcagttaccg

SEQ ID NO: 7583 - RNA, 21 nt, RNAi
caagcaucuucaguuaccguu

SEQ ID NO: 7584 - RNA, 21 nt, RNAi
uuguucguagaagucaauggc

SEQ ID NO: 7585 - DNA, 21 bp, homo sapiens
gaaattcatccaaccaaatct

SEQ ID NO: 7586 - RNA, 21 nt, RNAi
aauucauccaaccaaaucuuu

SEQ ID NO: 7587 - RNA, 21 nt, RNAi
uuuuaaguagguugguuuaga

SEQ ID NO: 7588 - DNA, 21 bp, homo sapiens
gaaagaacctctcaacattgt

SEQ ID NO: 7589 - RNA, 21 nt, RNAi
aagaaccucucaacauuguuu

SEQ ID NO: 7590 - RNA, 21 nt, RNAi
uuuucuuggagaguuguaaca

SEQ ID NO: 7591 - DNA, 21 bp, homo sapiens
gaacctctcaacattgtcagt

SEQ ID NO: 7592 - RNA, 21 nt, RNAi
accucucaacauugucaguuu

SEQ ID NO: 7593 - RNA, 21 nt, RNAi
uuuggagaguuguaacaguca

SEQ ID NO: 7594 - DNA, 21 bp, homo sapiens
gagcacaataacaggtgttgg

SEQ ID NO: 7595 - RNA, 21 nt, RNAi
gcacaauaacagguguugguu

SEQ ID NO: 7596 - RNA, 21 nt, RNAi
uucguguuauuguccacaacc

SEQ ID NO: 7597 - DNA, 21 bp, homo sapiens
gagaatggtcataaatgtgca

SEQ ID NO: 7598 - RNA, 21 nt, RNAi
gaauggucauaaaugugcauu

SEQ ID NO: 7599 - RNA, 21 nt, RNAi
uucuuaccaguauuuacacgu

SEQ ID NO: 7600 - DNA, 21 bp, homo sapiens
gaatggtcataaatgtgcatg

SEQ ID NO: 7601 - RNA, 21 nt, RNAi
auggucauaaaugugcauguu

SEQ ID NO: 7602 - RNA, 21 nt, RNAi
uuuaccaguauuuacacguac

SEQ ID NO: 7603 - DNA, 21 bp, homo sapiens
gaagcaggaaggaactttaca

SEQ ID NO: 7604 - RNA, 21 nt, RNAi
agcaggaaggaacuuuacauu

SEQ ID NO: 7605 - RNA, 21 nt, RNAi
uuucguccuuccuugaaaugu

SEQ ID NO: 7606 - DNA, 21 bp, homo sapiens
gaaggaactttacagtggcat

SEQ ID NO: 7607 - RNA, 21 nt, RNAi
aggaacuuuacaguggcauuu

SEQ ID NO: 7608 - RNA, 21 nt, RNAi
uuuccuugaaaugucaccgua

SEQ ID NO: 7609 - DNA, 21 bp, homo sapiens
gaactttacagtggcatgtca

SEQ ID NO: 7610 - RNA, 21 nt, RNAi
acuuuacaguggcaugucauu

SEQ ID NO: 7611 - RNA, 21 nt, RNAi
uuugaaaugucaccguacagu

SEQ ID NO: 7612 - DNA, 21 bp, homo sapiens
gagataatctgttgtaccact

SEQ ID NO: 7613 - RNA, 21 nt, RNAi
gauaaucuguuguaccacuuu

SEQ ID NO: 7614 - RNA, 21 nt, RNAi
uucuauuagacaacaugguga

SEQ ID NO: 7615 - DNA, 21 bp, homo sapiens
gataatctgttgtaccactcc

SEQ ID NO: 7616 - RNA, 21 nt, RNAi
uaaucuguuguaccacuccuu

SEQ ID NO: 7617 - RNA, 21 nt, RNAi
uuauuagacaacauggugagg

SEQ ID NO: 7618 - DNA, 21 bp, homo sapiens
gatcctttccaaatactttga

SEQ ID NO: 7619 - RNA, 21 nt, RNAi
uccuuuccaaauacuuugauu

SEQ ID NO: 7620 - RNA, 21 nt, RNAi
uuaggaaagguuuaugaaacu

SEQ ID NO: 7621 - DNA, 21 bp, homo sapiens
gaagcagttaaaggtgaagtg

SEQ ID NO: 7622 - RNA, 21 nt, RNAi
agcaguuaaaggugaaguguu

SEQ ID NO: 7623 - RNA, 21 nt, RNAi
uuucgucaauuuccacuucac

SEQ ID NO: 7624 - DNA, 21 bp, homo sapiens
gaaataagagctgtgagaata

SEQ ID NO: 7625 - RNA, 21 nt, RNAi
aauaagagcugugagaauauu

SEQ ID NO: 7626 - RNA, 21 nt, RNAi
uuuuauucucgacacucuuau

SEQ ID NO: 7627 - DNA, 21 bp, homo sapiens
gagctgtgagaatatacactt

SEQ ID NO: 7628 - RNA, 21 nt, RNAi
gcugugagaauauacacuuuu

SEQ ID NO: 7629 - RNA, 21 nt, RNAi
uucgacacucuuauaugugaa

SEQ ID NO: 7630 - DNA, 21 bp, homo sapiens
gacctgctgaaattgaacagc

SEQ ID NO: 7631 - RNA, 21 nt, RNAi
ccugcugaaauugaacagcuu

SEQ ID NO: 7632 - RNA, 21 nt, RNAi
uuggacgacuuuaacuugucg

SEQ ID NO: 7633 - DNA, 21 bp, homo sapiens
gaaattgaacagcgagctaaa

SEQ ID NO: 7634 - RNA, 21 nt, RNAi
aauugaacagcgagcuaaauu

SEQ ID NO: 7635 - RNA, 21 nt, RNAi
uuuuaacuugucgcucgauuu

SEQ ID NO: 7636 - DNA, 21 bp, homo sapiens
gaacagcgagctaaatataga

SEQ ID NO: 7637 - RNA, 21 nt, RNAi
acagcgagcuaaauauagauu

SEQ ID NO: 7638 - RNA, 21 nt, RNAi
uuugucgcucgauuuauaucu

SEQ ID NO: 7639 - DNA, 21 bp, homo sapiens
gagctaaatatagagtggaag

SEQ ID NO: 7640 - RNA, 21 nt, RNAi
gcuaaauauagaguggaaguu

SEQ ID NO: 7641 - RNA, 21 nt, RNAi
uucgauuuauaucucaccuuc

SEQ ID NO: 7642 - DNA, 21 bp, homo sapiens
gagtggaagcaagcaatttct

SEQ ID NO: 7643 - RNA, 21 nt, RNAi
guggaagcaagcaauuucuuu

SEQ ID NO: 7644 - RNA, 21 nt, RNAi
uucaccuucguucguuaaaga

SEQ ID NO: 7645 - DNA, 21 bp, homo sapiens
gaagcaagcaatttcttcaac

SEQ ID NO: 7646 - RNA, 21 nt, RNAi
agcaagcaauuucuucaacuu

SEQ ID NO: 7647 - RNA, 21 nt, RNAi
uuucguucguuaaagaaguug

SEQ ID NO: 7648 - DNA, 21 bp, homo sapiens
gatcagaatttcacaggattg

SEQ ID NO: 7649 - RNA, 21 nt, RNAi
ucagaauuucacaggauuguu

SEQ ID NO: 7650 - RNA, 21 nt, RNAi
uuagucuuaaaguguccuaac

SEQ ID NO: 7651 - DNA, 21 bp, homo sapiens
gaatttcacaggattgattgc

SEQ ID NO: 7652 - RNA, 21 nt, RNAi
auuucacaggauugauugcuu

SEQ ID NO: 7653 - RNA, 21 nt, RNAi
uuuaaaguguccuaacuaacg

SEQ ID NO: 7654 - DNA, 21 bp, homo sapiens
gattgattgctggtgttgtct

SEQ ID NO: 7655 - RNA, 21 nt, RNAi
uugauugcugguguugucuuu

SEQ ID NO: 7656 - RNA, 21 nt, RNAi
uuaacuaacgaccacaacaga

SEQ ID NO: 7657 - DNA, 21 bp, homo sapiens
gattgctggtgttgtctcaat

SEQ ID NO: 7658 - RNA, 21 nt, RNAi
uugcugguguugucucaauuu

SEQ ID NO: 7659 - RNA, 21 nt, RNAi
uuaacgaccacaacagaguua

SEQ ID NO: 7660 - DNA, 21 bp, homo sapiens
gaaagcaaattaaagatctgg

SEQ ID NO: 7661 - RNA, 21 nt, RNAi
aagcaaauuaaagaucugguu

SEQ ID NO: 7662 - RNA, 21 nt, RNAi
uuuucguuuaauuucuagacc

SEQ ID NO: 7663 - DNA, 21 bp, homo sapiens
gaattagttcgctacgatgca

SEQ ID NO: 7664 - RNA, 21 nt, RNAi
auuaguucgcuacgaugcauu

SEQ ID NO: 7665 - RNA, 21 nt, RNAi
uuuaaucaagcgaugcuacgu

SEQ ID NO: 7666 - DNA, 21 bp, homo sapiens
gatgcaagagtacacactcct

SEQ ID NO: 7667 - RNA, 21 nt, RNAi
ugcaagaguacacacuccuuu

SEQ ID NO: 7668 - RNA, 21 nt, RNAi
uuacguucucaugugugagga

SEQ ID NO: 7669 - DNA, 21 bp, homo sapiens
gagtacacactcctcatttgg

SEQ ID NO: 7670 - RNA, 21 nt, RNAi
guacacacuccucauuugguu

SEQ ID NO: 7671 - RNA, 21 nt, RNAi
uucaugugugaggaguaaacc

SEQ ID NO: 7672 - DNA, 21 bp, homo sapiens
gaatctgtagactaccgagct

SEQ ID NO: 7673 - RNA, 21 nt, RNAi
aucuguagacuaccgagcuuu

SEQ ID NO: 7674 - RNA, 21 nt, RNAi
uuuagacaucugauggcucga

SEQ ID NO: 7675 - DNA, 21 bp, homo sapiens
gaagatcagtttcctaattca

SEQ ID NO: 7676 - RNA, 21 nt, RNAi
agaucaguuuccuaauucauu

SEQ ID NO: 7677 - RNA, 21 nt, RNAi
uuucuagucaaaggauuaagu

SEQ ID NO: 7678 - DNA, 21 bp, homo sapiens
gatcagtttcctaattcatct

SEQ ID NO: 7679 - RNA, 21 nt, RNAi
ucaguuuccuaauucaucuuu

SEQ ID NO: 7680 - RNA, 21 nt, RNAi
uuagucaaaggauuaaguaga

SEQ ID NO: 7681 - DNA, 21 bp, homo sapiens
gaacggttcatgccgacaagt

SEQ ID NO: 7682 - RNA, 21 nt, RNAi
acgguucaugccgacaaguuu

SEQ ID NO: 7683 - RNA, 21 nt, RNAi
uuugccaaguacggcuguuca

SEQ ID NO: 7684 - DNA, 21 bp, homo sapiens
gacaagtgcagtatcctctga

SEQ ID NO: 7685 - RNA, 21 nt, RNAi
caagugcaguauccucugauu

SEQ ID NO: 7686 - RNA, 21 nt, RNAi
uuguucacgucauaggagacu

SEQ ID NO: 7687 - DNA, 21 bp, homo sapiens
gactctgatatatccagtcca

SEQ ID NO: 7688 - RNA, 21 nt, RNAi
cucugauauauccaguccauu

SEQ ID NO: 7689 - RNA, 21 nt, RNAi
uugagacuauauaggucaggu

SEQ ID NO: 7690 - DNA, 21 bp, homo sapiens
gatatatccagtccattactg

SEQ ID NO: 7691 - RNA, 21 nt, RNAi
uauauccaguccauuacuguu

SEQ ID NO: 7692 - RNA, 21 nt, RNAi
uuauauaggucagguaaugac

SEQ ID NO: 7693 - DNA, 21 bp, homo sapiens
gacctcagtgctctaaatcca

SEQ ID NO: 7694 - RNA, 21 nt, RNAi
ccucagugcucuaaauccauu

SEQ ID NO: 7695 - RNA, 21 nt, RNAi
uuggagucacgagauuuaggu

SEQ ID NO: 7696 - DNA, 21 bp, homo sapiens
gattgtgcatttcaatgaagt

SEQ ID NO: 7697 - RNA, 21 nt, RNAi
uugugcauuucaaugaaguuu

SEQ ID NO: 7698 - RNA, 21 nt, RNAi
uuaacacguaaaguuacuuca

SEQ ID NO: 7699 - DNA, 21 bp, homo sapiens
gactttgttggacaatgatgg

SEQ ID NO: 7700 - RNA, 21 nt, RNAi
cuuuguuggacaaugaugguu

SEQ ID NO: 7701 - RNA, 21 nt, RNAi
uugaaacaaccuguuacuacc

SEQ ID NO: 7702 - DNA, 21 bp, homo sapiens
gaaatccttgaacagaatcac

SEQ ID NO: 7703 - RNA, 21 nt, RNAi
aauccuugaacagaaucacuu

SEQ ID NO: 7704 - RNA, 21 nt, RNAi
uuuuaggaacuugucuuagug

SEQ ID NO: 7705 - DNA, 21 bp, homo sapiens
gaacagaatcactgacatagg

SEQ ID NO: 7706 - RNA, 21 nt, RNAi
acagaaucacugacauagguu

SEQ ID NO: 7707 - RNA, 21 nt, RNAi
uuugucuuagugacuguaucc

SEQ ID NO: 7708 - DNA, 21 bp, homo sapiens
gaatcactgacataggagaag

SEQ ID NO: 7709 - RNA, 21 nt, RNAi
aucacugacauaggagaaguu

SEQ ID NO: 7710 - RNA, 21 nt, RNAi
uuuagugacuguauccucuuc

SEQ ID NO: 7711 - DNA, 21 bp, homo sapiens
gaatctgcctgcgaagtgaag

SEQ ID NO: 7712 - RNA, 21 nt, RNAi
aucugccugcgaagugaaguu

SEQ ID NO: 7713 - RNA, 21 nt, RNAi
uuuagacggacgcuucacuuc

SEQ ID NO: 7714 - DNA, 21 bp, homo sapiens
gaaacatggagatcttcgaaa

SEQ ID NO: 7715 - RNA, 21 nt, RNAi
aacauggagaucuucgaaauu

SEQ ID NO: 7716 - RNA, 21 nt, RNAi
uuuuguaccucuagaagcuuu

SEQ ID NO: 7717 - DNA, 21 bp, homo sapiens
gagatcttcgaaatttcattc

SEQ ID NO: 7718 - RNA, 21 nt, RNAi
gaucuucgaaauuucauucuu

SEQ ID NO: 7719 - RNA, 21 nt, RNAi
uucuagaagcuuuaaaguaag

SEQ ID NO: 7720 - DNA, 21 bp, homo sapiens
gatcttcgaaatttcattcga

SEQ ID NO: 7721 - RNA, 21 nt, RNAi
ucuucgaaauuucauucgauu

SEQ ID NO: 7722 - RNA, 21 nt, RNAi
uuagaagcuuuaaaguaagcu

SEQ ID NO: 7723 - DNA, 21 bp, homo sapiens
gaaatgagactcataatccaa

SEQ ID NO: 7724 - RNA, 21 nt, RNAi
aaugagacucauaauccaauu

SEQ ID NO: 7725 - RNA, 21 nt, RNAi
uuuuacucugaguauuagguu

SEQ ID NO: 7726 - DNA, 21 bp, homo sapiens
gagactcataatccaactgta

SEQ ID NO: 7727 - RNA, 21 nt, RNAi
gacucauaauccaacuguauu

SEQ ID NO: 7728 - RNA, 21 nt, RNAi
uucugaguauuagguugacau

SEQ ID NO: 7729 - DNA, 21 bp, homo sapiens
gactcataatccaactgtaaa

SEQ ID NO: 7730 - RNA, 21 nt, RNAi
cucauaauccaacuguaaauu

SEQ ID NO: 7731 - RNA, 21 nt, RNAi
uugaguauuagguugacauuu

SEQ ID NO: 7732 - DNA, 21 bp, homo sapiens
gatcttattggctttggtctt

SEQ ID NO: 7733 - RNA, 21 nt, RNAi
ucuuauuggcuuuggucuuuu

SEQ ID NO: 7734 - RNA, 21 nt, RNAi
uuagaauaaccgaaaccagaa

SEQ ID NO: 7735 - DNA, 21 bp, homo sapiens
gatgaaatatcttgcaagcaa

SEQ ID NO: 7736 - RNA, 21 nt, RNAi
ugaaauaucuugcaagcaauu

SEQ ID NO: 7737 - RNA, 21 nt, RNAi
uuacuuuauagaacguucguu

SEQ ID NO: 7738 - DNA, 21 bp, homo sapiens
gagacttggctgcaagaaact

SEQ ID NO: 7739 - RNA, 21 nt, RNAi
gacuuggcugcaagaaacuuu

SEQ ID NO: 7740 - RNA, 21 nt, RNAi
uucugaaccgacguucuuuga

SEQ ID NO: 7741 - DNA, 21 bp, homo sapiens
gacttggctgcaagaaactgt

SEQ ID NO: 7742 - RNA, 21 nt, RNAi
cuuggcugcaagaaacuguuu

SEQ ID NO: 7743 - RNA, 21 nt, RNAi
uugaaccgacguucuuugaca

SEQ ID NO: 7744 - DNA, 21 bp, homo sapiens
gaaactgtatgctggatgaaa

SEQ ID NO: 7745 - RNA, 21 nt, RNAi
aacuguaugcuggaugaaauu

SEQ ID NO: 7746 - RNA, 21 nt, RNAi
uuuugacauacgaccuacuuu

SEQ ID NO: 7747 - DNA, 21 bp, homo sapiens
gaatactatagtgtacacaac

SEQ ID NO: 7748 - RNA, 21 nt, RNAi
auacuauaguguacacaacuu

SEQ ID NO: 7749 - RNA, 21 nt, RNAi
uuuaugauaucacauguguug

SEQ ID NO: 7750 - DNA, 21 bp, homo sapiens
gaagtggatggctttggaaag

SEQ ID NO: 7751 - RNA, 21 nt, RNAi
aguggauggcuuuggaaaguu

SEQ ID NO: 7752 - RNA, 21 nt, RNAi
uuucaccuaccgaaaccuuuc

SEQ ID NO: 7753 - DNA, 21 bp, homo sapiens
gatggctttggaaagtctgca

SEQ ID NO: 7754 - RNA, 21 nt, RNAi
uggcuuuggaaagucugcauu

SEQ ID NO: 7755 - RNA, 21 nt, RNAi
uuaccgaaaccuuucagacgu

SEQ ID NO: 7756 - DNA, 21 bp, homo sapiens
gatgtgtggtcctttggcgtc

SEQ ID NO: 7757 - RNA, 21 nt, RNAi
ugugugguccuuuggcgucuu

SEQ ID NO: 7758 - RNA, 21 nt, RNAi
uuacacaccaggaaaccgcag

SEQ ID NO: 7759 - DNA, 21 bp, homo sapiens
gagctgatgacaagaggagcc

SEQ ID NO: 7760 - RNA, 21 nt, RNAi
gcugaugacaagaggagccuu

SEQ ID NO: 7761 - RNA, 21 nt, RNAi
uucgacuacuguucuccucgg

SEQ ID NO: 7762 - DNA, 21 bp, homo sapiens
gacgtaaacacctttgatata

SEQ ID NO: 7763 - RNA, 21 nt, RNAi
cguaaacaccuuugauauauu

SEQ ID NO: 7764 - RNA, 21 nt, RNAi
uugcauuuguggaaacuauau

SEQ ID NO: 7765 - DNA, 21 bp, homo sapiens
gatatcagcgatcttctctac

SEQ ID NO: 7766 - RNA, 21 nt, RNAi
uaucagcgaucuucucuacuu

SEQ ID NO: 7767 - RNA, 21 nt, RNAi
uuauagucgcuagaagagaug

SEQ ID NO: 7768 - DNA, 21 bp, homo sapiens
gatcttctctactttcattgg

SEQ ID NO: 7769 - RNA, 21 nt, RNAi
ucuucucuacuuucauugguu

SEQ ID NO: 7770 - RNA, 21 nt, RNAi
uuagaagagaugaaaguaacc

SEQ ID NO: 7771 - DNA, 21 bp, homo sapiens
gagcactatgtccatgtgaac

SEQ ID NO: 7772 - RNA, 21 nt, RNAi
gcacuauguccaugugaacuu

SEQ ID NO: 7773 - RNA, 21 nt, RNAi
uucgugauacagguacacuug

SEQ ID NO: 7774 - DNA, 21 bp, homo sapiens
gaacgctacttatgtgaacgt

SEQ ID NO: 7775 - RNA, 21 nt, RNAi
acgcuacuuaugugaacguuu

SEQ ID NO: 7776 - RNA, 21 nt, RNAi
uuugcgaugaauacacuugca

SEQ ID NO: 7777 - DNA, 21 bp, homo sapiens
gaagataacgctgatgatgag

SEQ ID NO: 7778 - RNA, 21 nt, RNAi
agauaacgcugaugaugaguu

SEQ ID NO: 7779 - RNA, 21 nt, RNAi
uuucuauugcgacuacuacuc

SEQ ID NO: 7780 - DNA, 21 bp, homo sapiens
gataacgctgatgatgaggtg

SEQ ID NO: 7781 - RNA, 21 nt, RNAi
uaacgcugaugaugagguguu

SEQ ID NO: 7782 - RNA, 21 nt, RNAi
uuauugcgacuacuacuccac

SEQ ID NO: 7783 - DNA, 21 bp, homo sapiens
gatgatgaggtggacacacga

SEQ ID NO: 7784 - RNA, 21 nt, RNAi
ugaugagguggacacacgauu

SEQ ID NO: 7785 - RNA, 21 nt, RNAi
uuacuacuccaccugugugcu

SEQ ID NO: 7786 - DNA, 21 bp, homo sapiens
gatgaggtggacacacgacca

SEQ ID NO: 7787 - RNA, 21 nt, RNAi
ugagguggacacacgaccauu

SEQ ID NO: 7788 - RNA, 21 nt, RNAi
uuacuccaccugugugcuggu

SEQ ID NO: 7789 - DNA, 21 bp, homo sapiens
gacacacgaccagcctccttc

SEQ ID NO: 7790 - RNA, 21 nt, RNAi
cacacgaccagccuccuucuu

SEQ ID NO: 7791 - RNA, 21 nt, RNAi
uugugugcuggucggaggaag

SEQ ID NO: 7792 - DNA, 21 bp, homo sapiens
gagacatcatagtgctagtac

SEQ ID NO: 7793 - RNA, 21 nt, RNAi
gacaucauagugcuaguacuu

SEQ ID NO: 7794 - RNA, 21 nt, RNAi
uucuguaguaucacgaucaug

SEQ ID NO: 7795 - DNA, 21 bp, homo sapiens
gacatcatagtgctagtacta

SEQ ID NO: 7796 - RNA, 21 nt, RNAi
caucauagugcuaguacuauu

SEQ ID NO: 7797 - RNA, 21 nt, RNAi
uuguaguaucacgaucaugau

SEQ ID NO: 7798 - DNA, 21 bp, homo sapiens
gatattctttgctccttgcca

SEQ ID NO: 7799 - RNA, 21 nt, RNAi
uauucuuugcuccuugccauu

SEQ ID NO: 7800 - RNA, 21 nt, RNAi
uuauaagaaacgaggaacggu

SEQ ID NO: 7801 - DNA, 21 bp, homo sapiens
gaatttcttatctgacagagc

SEQ ID NO: 7802 - RNA, 21 nt, RNAi
auuucuuaucugacagagcuu

SEQ ID NO: 7803 - RNA, 21 nt, RNAi
uuuaaagaauagacugucucg

SEQ ID NO: 7804 - DNA, 21 bp, homo sapiens
gacagagcatcagaaccagag

SEQ ID NO: 7805 - RNA, 21 nt, RNAi
cagagcaucagaaccagaguu

SEQ ID NO: 7806 - RNA, 21 nt, RNAi
uugucucguagucuuggucuc

SEQ ID NO: 7807 - DNA, 21 bp, homo sapiens
gagcatcagaaccagaggctt

SEQ ID NO: 7808 - RNA, 21 nt, RNAi
gcaucagaaccagaggcuuuu

SEQ ID NO: 7809 - RNA, 21 nt, RNAi
uucguagucuuggucuccgaa

SEQ ID NO: 7810 - DNA, 21 bp, homo sapiens
taaacctctcataatgaaggc

SEQ ID NO: 7811 - RNA, 21 nt, RNAi
aaccucucauaaugaaggcuu

SEQ ID NO: 7812 - RNA, 21 nt, RNAi
uuuuggagaguauuacuuccg

SEQ ID NO: 7813 - DNA, 21 bp, homo sapiens
taccttggtgcagaggagcaa

SEQ ID NO: 7814 - RNA, 21 nt, RNAi
ccuuggugcagaggagcaauu

SEQ ID NO: 7815 - RNA, 21 nt, RNAi
uuggaaccacgucuccucguu

SEQ ID NO: 7816 - DNA, 21 bp, homo sapiens
taaagaggcactagcaaagtc

SEQ ID NO: 7817 - RNA, 21 nt, RNAi
aagaggcacuagcaaagucuu

SEQ ID NO: 7818 - RNA, 21 nt, RNAi
uuuucuccgugaucguuucag

SEQ ID NO: 7819 - DNA, 21 bp, homo sapiens
tagcaaagtccgagatgaatg

SEQ ID NO: 7820 - RNA, 21 nt, RNAi
gcaaaguccgagaugaauguu

SEQ ID NO: 7821 - RNA, 21 nt, RNAi
uucguuucaggcucuacuuac

SEQ ID NO: 7822 - DNA, 21 bp, homo sapiens
taaatgaggaagaccttcaga

SEQ ID NO: 7823 - RNA, 21 nt, RNAi
aaugaggaagaccuucagauu

SEQ ID NO: 7824 - RNA, 21 nt, RNAi
uuuuacuccuucuggaagucu

SEQ ID NO: 7825 - DNA, 21 bp, homo sapiens
tatcaggaggtgtttggaaag

SEQ ID NO: 7826 - RNA, 21 nt, RNAi
ucaggagguguuuggaaaguu

SEQ ID NO: 7827 - RNA, 21 nt, RNAi
uuaguccuccacaaaccuuuc

SEQ ID NO: 7828 - DNA, 21 bp, homo sapiens
taacatcaacatggctctagt

SEQ ID NO: 7829 - RNA, 21 nt, RNAi
acaucaacauggcucuaguuu

SEQ ID NO: 7830 - RNA, 21 nt, RNAi
uuuguaguuguaccgagauca

SEQ ID NO: 7831 - DNA, 21 bp, homo sapiens
tagttgtcgacacctactatg

SEQ ID NO: 7832 - RNA, 21 nt, RNAi
guugucgacaccuacuauguu

SEQ ID NO: 7833 - RNA, 21 nt, RNAi
uucaacagcuguggaugauac

SEQ ID NO: 7834 - DNA, 21 bp, homo sapiens
tatgatgatcaactcattagc

SEQ ID NO: 7835 - RNA, 21 nt, RNAi
ugaugaucaacucauuagcuu

SEQ ID NO: 7836 - RNA, 21 nt, RNAi
uuacuacuaguugaguaaucg

SEQ ID NO: 7837 - DNA, 21 bp, homo sapiens
tagctgtggcagcgtcaacag

SEQ ID NO: 7838 - RNA, 21 nt, RNAi
gcuguggcagcgucaacaguu

SEQ ID NO: 7839 - RNA, 21 nt, RNAi
uucgacaccgucgcaguuguc

SEQ ID NO: 7840 - DNA, 21 bp, homo sapiens
tactgctgacatacagtcgga

SEQ ID NO: 7841 - RNA, 21 nt, RNAi
cugcugacauacagucggauu

SEQ ID NO: 7842 - RNA, 21 nt, RNAi
uugacgacuguaugucagccu

SEQ ID NO: 7843 - DNA, 21 bp, homo sapiens
tacagtcggaggttcactgca

SEQ ID NO: 7844 - RNA, 21 nt, RNAi
cagucggagguucacugcauu

SEQ ID NO: 7845 - RNA, 21 nt, RNAi
uugucagccuccaagugacgu

SEQ ID NO: 7846 - DNA, 21 bp, homo sapiens
taaaggaccggttcatcaact

SEQ ID NO: 7847 - RNA, 21 nt, RNAi
aaggaccgguucaucaacuuu

SEQ ID NO: 7848 - RNA, 21 nt, RNAi
uuuuccuggccaaguaguuga

SEQ ID NO: 7849 - DNA, 21 bp, homo sapiens
tatcagtgagaaggctaaagg

SEQ ID NO: 7850 - RNA, 21 nt, RNAi
ucagugagaaggcuaaagguu

SEQ ID NO: 7851 - RNA, 21 nt, RNAi
uuagucacucuuccgauuucc

SEQ ID NO: 7852 - DNA, 21 bp, homo sapiens
taaaggaaacgaaagatggtt

SEQ ID NO: 7853 - RNA, 21 nt, RNAi
aaggaaacgaaagaugguuuu

SEQ ID NO: 7854 - RNA, 21 nt, RNAi
uuuuccuuugcuuucuaccaa

SEQ ID NO: 7855 - DNA, 21 bp, homo sapiens
tacctgagttcagagattctt

SEQ ID NO: 7856 - RNA, 21 nt, RNAi
ccugaguucagagauucuuuu

SEQ ID NO: 7857 - RNA, 21 nt, RNAi
uuggacucaagucucuaagaa

SEQ ID NO: 7858 - DNA, 21 bp, homo sapiens
taagtatgtccatgcctttga

SEQ ID NO: 7859 - RNA, 21 nt, RNAi
aguauguccaugccuuugauu

SEQ ID NO: 7860 - RNA, 21 nt, RNAi
uuucauacagguacggaaacu

SEQ ID NO: 7861 - DNA, 21 bp, homo sapiens
tatgtccatgcctttgaaagc

SEQ ID NO: 7862 - RNA, 21 nt, RNAi
uguccaugccuuugaaagcuu

SEQ ID NO: 7863 - RNA, 21 nt, RNAi
uuacagguacggaaacuuucg

SEQ ID NO: 7864 - DNA, 21 bp, homo sapiens
tatttacttcttgacggtcca

SEQ ID NO: 7865 - RNA, 21 nt, RNAi
uuuacuucuugacgguccauu

SEQ ID NO: 7866 - RNA, 21 nt, RNAi
uuaaaugaagaacugccaggu

SEQ ID NO: 7867 - DNA, 21 bp, homo sapiens
tacttcttgacggtccaaagg

SEQ ID NO: 7868 - RNA, 21 nt, RNAi
cuucuugacgguccaaagguu

SEQ ID NO: 7869 - RNA, 21 nt, RNAi
uugaagaacugccagguuucc

SEQ ID NO: 7870 - DNA, 21 bp, homo sapiens
taatcaggttctgttccataa

SEQ ID NO: 7871 - RNA, 21 nt, RNAi
aucagguucuguuccauaauu

SEQ ID NO: 7872 - RNA, 21 nt, RNAi
uuuaguccaagacaagguauu

SEQ ID NO: 7873 - DNA, 21 bp, homo sapiens
taaactctggattgcattcct

SEQ ID NO: 7874 - RNA, 21 nt, RNAi
aacucuggauugcauuccuuu

SEQ ID NO: 7875 - RNA, 21 nt, RNAi
uuuugagaccuaacguaagga

SEQ ID NO: 7876 - DNA, 21 bp, homo sapiens
tacatggaaatgcctctggag

SEQ ID NO: 7877 - RNA, 21 nt, RNAi
cauggaaaugccucuggaguu

SEQ ID NO: 7878 - RNA, 21 nt, RNAi
uuguaccuuuacggagaccuc

SEQ ID NO: 7879 - DNA, 21 bp, homo sapiens
taatatacttcaggctgcgta

SEQ ID NO: 7880 - RNA, 21 nt, RNAi
auauacuucaggcugcguauu

SEQ ID NO: 7881 - RNA, 21 nt, RNAi
uuuauaugaaguccgacgcau

SEQ ID NO: 7882 - DNA, 21 bp, homo sapiens
tatacttcaggctgcgtatgt

SEQ ID NO: 7883 - RNA, 21 nt, RNAi
uacuucaggcugcguauguuu

SEQ ID NO: 7884 - RNA, 21 nt, RNAi
uuaugaaguccgacgcauaca

SEQ ID NO: 7885 - DNA, 21 bp, homo sapiens
tacttcaggctgcgtatgtca

SEQ ID NO: 7886 - RNA, 21 nt, RNAi
cuucaggcugcguaugucauu

SEQ ID NO: 7887 - RNA, 21 nt, RNAi
uugaaguccgacgcauacagu

SEQ ID NO: 7888 - DNA, 21 bp, homo sapiens
tagacaaataggagccagcct

SEQ ID NO: 7889 - RNA, 21 nt, RNAi
gacaaauaggagccagccuuu

SEQ ID NO: 7890 - RNA, 21 nt, RNAi
uucuguuuauccucggucgga

SEQ ID NO: 7891 - DNA, 21 bp, homo sapiens
taggagccagcctgaatgatg

SEQ ID NO: 7892 - RNA, 21 nt, RNAi
ggagccagccugaaugauguu

SEQ ID NO: 7893 - RNA, 21 nt, RNAi
uuccucggucggacuuacuac

SEQ ID NO: 7894 - DNA, 21 bp, homo sapiens
tatgtcaacgacttcttcaac

SEQ ID NO: 7895 - RNA, 21 nt, RNAi
ugucaacgacuucuucaacuu

SEQ ID NO: 7896 - RNA, 21 nt, RNAi
uuacaguugcugaagaaguug

SEQ ID NO: 7897 - DNA, 21 bp, homo sapiens
taataggacacttctgagaaa

SEQ ID NO: 7898 - RNA, 21 nt, RNAi
auaggacacuucugagaaauu

SEQ ID NO: 7899 - RNA, 21 nt, RNAi
uuuauccugugaagacucuuu

SEQ ID NO: 7900 - DNA, 21 bp, homo sapiens
taggacacttctgagaaattc

SEQ ID NO: 7901 - RNA, 21 nt, RNAi
ggacacuucugagaaauucuu

SEQ ID NO: 7902 - RNA, 21 nt, RNAi
uuccugugaagacucuuuaag

SEQ ID NO: 7903 - DNA, 21 bp, homo sapiens
tatcgaacagagtttaccaca

SEQ ID NO: 7904 - RNA, 21 nt, RNAi
ucgaacagaguuuaccacauu

SEQ ID NO: 7905 - RNA, 21 nt, RNAi
uuagcuugucucaaauggugu

SEQ ID NO: 7906 - DNA, 21 bp, homo sapiens
taccacagctttgcagcgcgt

SEQ ID NO: 7907 - RNA, 21 nt, RNAi
ccacagcuuugcagcgcguuu

SEQ ID NO: 7908 - RNA, 21 nt, RNAi
uuggugucgaaacgucgcgca

SEQ ID NO: 7909 - DNA, 21 bp, homo sapiens
taacatctatatccaccttca

SEQ ID NO: 7910 - RNA, 21 nt, RNAi
acaucuauauccaccuucauu

SEQ ID NO: 7911 - RNA, 21 nt, RNAi
uuuguagauauagguggaagu

SEQ ID NO: 7912 - DNA, 21 bp, homo sapiens
tatatccaccttcattaaagg

SEQ ID NO: 7913 - RNA, 21 nt, RNAi
uauccaccuucauuaaagguu

SEQ ID NO: 7914 - RNA, 21 nt, RNAi
uuauagguggaaguaauuucc

SEQ ID NO: 7915 - DNA, 21 bp, homo sapiens
tatccaccttcattaaaggag

SEQ ID NO: 7916 - RNA, 21 nt, RNAi
uccaccuucauuaaaggaguu

SEQ ID NO: 7917 - RNA, 21 nt, RNAi
uuagguggaaguaauuuccuc

SEQ ID NO: 7918 - DNA, 21 bp, homo sapiens
taaaggagacctcaccatagc

SEQ ID NO: 7919 - RNA, 21 nt, RNAi
aaggagaccucaccauagcuu

SEQ ID NO: 7920 - RNA, 21 nt, RNAi
uuuuccucuggagugguaucg

SEQ ID NO: 7921 - DNA, 21 bp, homo sapiens
tagagttctccttggaaatga

SEQ ID NO: 7922 - RNA, 21 nt, RNAi
gaguucuccuuggaaaugauu

SEQ ID NO: 7923 - RNA, 21 nt, RNAi
uucucaagaggaaccuuuacu

SEQ ID NO: 7924 - DNA, 21 bp, homo sapiens
taagtgagagcacgatgaata

SEQ ID NO: 7925 - RNA, 21 nt, RNAi
agugagagcacgaugaauauu

SEQ ID NO: 7926 - RNA, 21 nt, RNAi
uuucacucucgugcuacuuau

SEQ ID NO: 7927 - DNA, 21 bp, homo sapiens
tacattgaaatgcacagttgg

SEQ ID NO: 7928 - RNA, 21 nt, RNAi
cauugaaaugcacaguugguu

SEQ ID NO: 7929 - RNA, 21 nt, RNAi
uuguaacuuuacgugucaacc

SEQ ID NO: 7930 - DNA, 21 bp, homo sapiens
taattatttcaaatggccacg

SEQ ID NO: 7931 - RNA, 21 nt, RNAi
auuauuucaaauggccacguu

SEQ ID NO: 7932 - RNA, 21 nt, RNAi
uuuaauaaaguuuaccggugc

SEQ ID NO: 7933 - DNA, 21 bp, homo sapiens
tacagtacattctcctatgtg

SEQ ID NO: 7934 - RNA, 21 nt, RNAi
caguacauucuccuauguguu

SEQ ID NO: 7935 - RNA, 21 nt, RNAi
uugucauguaagaggauacac

SEQ ID NO: 7936 - DNA, 21 bp, homo sapiens
tacattctcctatgtggatcc

SEQ ID NO: 7937 - RNA, 21 nt, RNAi
cauucuccuauguggauccuu

SEQ ID NO: 7938 - RNA, 21 nt, RNAi
uuguaagaggauacaccuagg

SEQ ID NO: 7939 - DNA, 21 bp, homo sapiens
tatgtggatcctgtaataaca

SEQ ID NO: 7940 - RNA, 21 nt, RNAi
uguggauccuguaauaacauu

SEQ ID NO: 7941 - RNA, 21 nt, RNAi
uuacaccuaggacauuauugu

SEQ ID NO: 7942 - DNA, 21 bp, homo sapiens
taataacaagtatttcgccga

SEQ ID NO: 7943 - RNA, 21 nt, RNAi
auaacaaguauuucgccgauu

SEQ ID NO: 7944 - RNA, 21 nt, RNAi
uuuauuguucauaaagcggcu

SEQ ID NO: 7945 - DNA, 21 bp, homo sapiens
taacaagtatttcgccgaaat

SEQ ID NO: 7946 - RNA, 21 nt, RNAi
acaaguauuucgccgaaauuu

SEQ ID NO: 7947 - RNA, 21 nt, RNAi
uuuguucauaaagcggcuuua

SEQ ID NO: 7948 - DNA, 21 bp, homo sapiens
tatttcgccgaaatacggtcc

SEQ ID NO: 7949 - RNA, 21 nt, RNAi
uuucgccgaaauacgguccuu

SEQ ID NO: 7950 - RNA, 21 nt, RNAi
uuaaagcggcuuuaugccagg

SEQ ID NO: 7951 - DNA, 21 bp, homo sapiens
tacggtcctatggctggtggc

SEQ ID NO: 7952 - RNA, 21 nt, RNAi
cgguccuauggcugguggcuu

SEQ ID NO: 7953 - RNA, 21 nt, RNAi
uugccaggauaccgaccaccg

SEQ ID NO: 7954 - DNA, 21 bp, homo sapiens
tatggctggtggcactttact

SEQ ID NO: 7955 - RNA, 21 nt, RNAi
uggcugguggcacuuuacuuu

SEQ ID NO: 7956 - RNA, 21 nt, RNAi
uuaccgaccaccgugaaauga

SEQ ID NO: 7957 - DNA, 21 bp, homo sapiens
tagacacatttcaattggtgg

SEQ ID NO: 7958 - RNA, 21 nt, RNAi
gacacauuucaauuggugguu

SEQ ID NO: 7959 - RNA, 21 nt, RNAi
uucuguguaaaguuaaccacc

SEQ ID NO: 7960 - DNA, 21 bp, homo sapiens
tagccaaccgagagacaagca

SEQ ID NO: 7961 - RNA, 21 nt, RNAi
gccaaccgagagacaagcauu

SEQ ID NO: 7962 - RNA, 21 nt, RNAi
uucgguuggcucucuguucgu

SEQ ID NO: 7963 - DNA, 21 bp, homo sapiens
tattagtacttggtggaaaga

SEQ ID NO: 7964 - RNA, 21 nt, RNAi
uuaguacuugguggaaagauu

SEQ ID NO: 7965 - RNA, 21 nt, RNAi
uuaaucaugaaccaccuuucu

SEQ ID NO: 7966 - DNA, 21 bp, homo sapiens
tagtacttggtggaaagaacc

SEQ ID NO: 7967 - RNA, 21 nt, RNAi
guacuugguggaaagaaccuu

SEQ ID NO: 7968 - RNA, 21 nt, RNAi
uucaugaaccaccuuucuugg

SEQ ID NO: 7969 - DNA, 21 bp, homo sapiens
tacttggtggaaagaacctct

SEQ ID NO: 7970 - RNA, 21 nt, RNAi
cuugguggaaagaaccucuuu

SEQ ID NO: 7971 - RNA, 21 nt, RNAi
uugaaccaccuuucuuggaga

SEQ ID NO: 7972 - DNA, 21 bp, homo sapiens
taaatgtgcatgaagcaggaa

SEQ ID NO: 7973 - RNA, 21 nt, RNAi
aaugugcaugaagcaggaauu

SEQ ID NO: 7974 - RNA, 21 nt, RNAi
uuuuacacguacuucguccuu

SEQ ID NO: 7975 - DNA, 21 bp, homo sapiens
tacagtggcatgtcaacatcg

SEQ ID NO: 7976 - RNA, 21 nt, RNAi
caguggcaugucaacaucguu

SEQ ID NO: 7977 - RNA, 21 nt, RNAi
uugucaccguacaguuguagc

SEQ ID NO: 7978 - DNA, 21 bp, homo sapiens
taatctgttgtaccactcctt

SEQ ID NO: 7979 - RNA, 21 nt, RNAi
aucuguuguaccacuccuuuu

SEQ ID NO: 7980 - RNA, 21 nt, RNAi
uuuagacaacauggugaggaa

SEQ ID NO: 7981 - DNA, 21 bp, homo sapiens
tacataatcctgtgtttaagc

SEQ ID NO: 7982 - RNA, 21 nt, RNAi
cauaauccuguguuuaagcuu

SEQ ID NO: 7983 - RNA, 21 nt, RNAi
uuguauuaggacacaaauucg

SEQ ID NO: 7984 - DNA, 21 bp, homo sapiens
taatcctgtgtttaagccttt

SEQ ID NO: 7985 - RNA, 21 nt, RNAi
auccuguguuuaagccuuuuu

SEQ ID NO: 7986 - RNA, 21 nt, RNAi
uuuaggacacaaauucggaaa

SEQ ID NO: 7987 - DNA, 21 bp, homo sapiens
taagagctgtgagaatataca

SEQ ID NO: 7988 - RNA, 21 nt, RNAi
agagcugugagaauauacauu

SEQ ID NO: 7989 - RNA, 21 nt, RNAi
uuucucgacacucuuauaugu

SEQ ID NO: 7990 - DNA, 21 bp, homo sapiens
tatacacttacattctgaagc

SEQ ID NO: 7991 - RNA, 21 nt, RNAi
uacacuuacauucugaagcuu

SEQ ID NO: 7992 - RNA, 21 nt, RNAi
uuaugugaauguaagacuucg

SEQ ID NO: 7993 - DNA, 21 bp, homo sapiens
tacacttacattctgaagccg

SEQ ID NO: 7994 - RNA, 21 nt, RNAi
cacuuacauucugaagccguu

SEQ ID NO: 7995 - RNA, 21 nt, RNAi
uugugaauguaagacuucggc

SEQ ID NO: 7996 - DNA, 21 bp, homo sapiens
taaatatagagtggaagcaag

SEQ ID NO: 7997 - RNA, 21 nt, RNAi
aauauagaguggaagcaaguu

SEQ ID NO: 7998 - RNA, 21 nt, RNAi
uuuuauaucucaccuucguuc

SEQ ID NO: 7999 - DNA, 21 bp, homo sapiens
tatagagtggaagcaagcaat

SEQ ID NO: 8000 - RNA, 21 nt, RNAi
uagaguggaagcaagcaauuu

SEQ ID NO: 8001 - RNA, 21 nt, RNAi
uuaucucaccuucguucguua

SEQ ID NO: 8002 - DNA, 21 bp, homo sapiens
tagagtggaagcaagcaattt

SEQ ID NO: 8003 - RNA, 21 nt, RNAi
gaguggaagcaagcaauuuuu

SEQ ID NO: 8004 - RNA, 21 nt, RNAi
uucucaccuucguucguuaaa

SEQ ID NO: 8005 - DNA, 21 bp, homo sapiens
taatagttcaaccagatcaga

SEQ ID NO: 8006 - RNA, 21 nt, RNAi
auaguucaaccagaucagauu

SEQ ID NO: 8007 - RNA, 21 nt, RNAi
uuuaucaaguuggucuagucu

SEQ ID NO: 8008 - DNA, 21 bp, homo sapiens
tagttcaaccagatcagaatt

SEQ ID NO: 8009 - RNA, 21 nt, RNAi
guucaaccagaucagaauuuu

SEQ ID NO: 8010 - RNA, 21 nt, RNAi
uucaaguuggucuagucuuaa

SEQ ID NO: 8011 - DNA, 21 bp, homo sapiens
tatcaacagcactgttattac

SEQ ID NO: 8012 - RNA, 21 nt, RNAi
ucaacagcacuguuauuacuu

SEQ ID NO: 8013 - RNA, 21 nt, RNAi
uuaguugucgugacaauaaug

SEQ ID NO: 8014 - DNA, 21 bp, homo sapiens
tagttcgctacgatgcaagag

SEQ ID NO: 8015 - RNA, 21 nt, RNAi
guucgcuacgaugcaagaguu

SEQ ID NO: 8016 - RNA, 21 nt, RNAi
uucaagcgaugcuacguucuc

SEQ ID NO: 8017 - DNA, 21 bp, homo sapiens
tacgatgcaagagtacacact

SEQ ID NO: 8018 - RNA, 21 nt, RNAi
cgaugcaagaguacacacuuu

SEQ ID NO: 8019 - RNA, 21 nt, RNAi
uugcuacguucucauguguga

SEQ ID NO: 8020 - DNA, 21 bp, homo sapiens
tacacactcctcatttggata

SEQ ID NO: 8021 - RNA, 21 nt, RNAi
cacacuccucauuuggauauu

SEQ ID NO: 8022 - RNA, 21 nt, RNAi
uugugugaggaguaaaccuau

SEQ ID NO: 8023 - DNA, 21 bp, homo sapiens
taattcatctcagaacggttc

SEQ ID NO: 8024 - RNA, 21 nt, RNAi
auucaucucagaacgguucuu

SEQ ID NO: 8025 - RNA, 21 nt, RNAi
uuuaaguagagucuugccaag

SEQ ID NO: 8026 - DNA, 21 bp, homo sapiens
tatcctctgacagacatgtcc

SEQ ID NO: 8027 - RNA, 21 nt, RNAi
uccucugacagacauguccuu

SEQ ID NO: 8028 - RNA, 21 nt, RNAi
uuaggagacugucuguacagg

SEQ ID NO: 8029 - DNA, 21 bp, homo sapiens
tatatccagtccattactgca

SEQ ID NO: 8030 - RNA, 21 nt, RNAi
uauccaguccauuacugcauu

SEQ ID NO: 8031 - RNA, 21 nt, RNAi
uuauaggucagguaaugacgu

SEQ ID NO: 8032 - DNA, 21 bp, homo sapiens
tatccagtccattactgcaaa

SEQ ID NO: 8033 - RNA, 21 nt, RNAi
uccaguccauuacugcaaauu

SEQ ID NO: 8034 - RNA, 21 nt, RNAi
uuaggucagguaaugacguuu

SEQ ID NO: 8035 - DNA, 21 bp, homo sapiens
tactgtccacattgacctcag

SEQ ID NO: 8036 - RNA, 21 nt, RNAi
cuguccacauugaccucaguu

SEQ ID NO: 8037 - RNA, 21 nt, RNAi
uugacagguguaacuggaguc

SEQ ID NO: 8038 - DNA, 21 bp, homo sapiens
taaatccagagctggtccagg

SEQ ID NO: 8039 - RNA, 21 nt, RNAi
aauccagagcugguccagguu

SEQ ID NO: 8040 - RNA, 21 nt, RNAi
uuuuaggucucgaccaggucc

SEQ ID NO: 8041 - DNA, 21 bp, homo sapiens
tagcctgattgtgcatttcaa

SEQ ID NO: 8042 - RNA, 21 nt, RNAi
gccugauugugcauuucaauu

SEQ ID NO: 8043 - RNA, 21 nt, RNAi
uucggacuaacacguaaaguu

SEQ ID NO: 8044 - DNA, 21 bp, homo sapiens
taccatacatgaaacatggag

SEQ ID NO: 8045 - RNA, 21 nt, RNAi
ccauacaugaaacauggaguu

SEQ ID NO: 8046 - RNA, 21 nt, RNAi
uugguauguacuuuguaccuc

SEQ ID NO: 8047 - DNA, 21 bp, homo sapiens
tacatgaaacatggagatctt

SEQ ID NO: 8048 - RNA, 21 nt, RNAi
caugaaacauggagaucuuuu

SEQ ID NO: 8049 - RNA, 21 nt, RNAi
uuguacuuuguaccucuagaa

SEQ ID NO: 8050 - DNA, 21 bp, homo sapiens
tattggctttggtcttcaagt

SEQ ID NO: 8051 - RNA, 21 nt, RNAi
uuggcuuuggucuucaaguuu

SEQ ID NO: 8052 - RNA, 21 nt, RNAi
uuaaccgaaaccagaaguuca

SEQ ID NO: 8053 - DNA, 21 bp, homo sapiens
tagccaaagcgatgaaatatc

SEQ ID NO: 8054 - RNA, 21 nt, RNAi
gccaaagcgaugaaauaucuu

SEQ ID NO: 8055 - RNA, 21 nt, RNAi
uucgguuucgcuacuuuauag

SEQ ID NO: 8056 - DNA, 21 bp, homo sapiens
taccaccaagtcagatgtgtg

SEQ ID NO: 8057 - RNA, 21 nt, RNAi
ccaccaagucagauguguguu

SEQ ID NO: 8058 - RNA, 21 nt, RNAi
uuggugguucagucuacacac

SEQ ID NO: 8059 - DNA, 21 bp, homo sapiens
tatcctgacgtaaacaccttt

SEQ ID NO: 8060 - RNA, 21 nt, RNAi
uccugacguaaacaccuuuuu

SEQ ID NO: 8061 - RNA, 21 nt, RNAi
uuaggacugcauuuguggaaa

SEQ ID NO: 8062 - DNA, 21 bp, homo sapiens
taactgtttacttgttgcaag

SEQ ID NO: 8063 - RNA, 21 nt, RNAi
acuguuuacuuguugcaaguu

SEQ ID NO: 8064 - RNA, 21 nt, RNAi
uuugacaaaugaacaacguuc

SEQ ID NO: 8065 - DNA, 21 bp, homo sapiens
tatcagcgatcttctctactt

SEQ ID NO: 8066 - RNA, 21 nt, RNAi
ucagcgaucuucucuacuuuu

SEQ ID NO: 8067 - RNA, 21 nt, RNAi
uuagucgcuagaagagaugaa

SEQ ID NO: 8068 - DNA, 21 bp, homo sapiens
tatgtccatgtgaacgctact

SEQ ID NO: 8069 - RNA, 21 nt, RNAi
uguccaugugaacgcuacuuu

SEQ ID NO: 8070 - RNA, 21 nt, RNAi
uuacagguacacuugcgauga

SEQ ID NO: 8071 - DNA, 21 bp, homo sapiens
tatccttctctgttgtcatca

SEQ ID NO: 8072 - RNA, 21 nt, RNAi
uccuucucuguugucaucauu

SEQ ID NO: 8073 - RNA, 21 nt, RNAi
uuaggaagagacaacaguagu

SEQ ID NO: 8074 - DNA, 21 bp, homo sapiens
taacgctgatgatgaggtgga

SEQ ID NO: 8075 - RNA, 21 nt, RNAi
acgcugaugaugagguggauu

SEQ ID NO: 8076 - RNA, 21 nt, RNAi
uuugcgacuacuacuccaccu

SEQ ID NO: 8077 - DNA, 21 bp, homo sapiens
tagtgctagtactatgtcaaa

SEQ ID NO: 8078 - RNA, 21 nt, RNAi
gugcuaguacuaugucaaauu

SEQ ID NO: 8079 - RNA, 21 nt, RNAi
uucacgaucaugauacaguuu

SEQ ID NO: 8080 - DNA, 21 bp, homo sapiens
tagtactatgtcaaagcaaca

SEQ ID NO: 8081 - RNA, 21 nt, RNAi
guacuaugucaaagcaacauu

SEQ ID NO: 8082 - RNA, 21 nt, RNAi
uucaugauacaguuucguugu

SEQ ID NO: 8083 - DNA, 21 bp, homo sapiens
tactatgtcaaagcaacagtc

SEQ ID NO: 8084 - RNA, 21 nt, RNAi
cuaugucaaagcaacagucuu

SEQ ID NO: 8085 - RNA, 21 nt, RNAi
uugauacaguuucguugucag

SEQ ID NO: 8086 - DNA, 21 bp, homo sapiens
tatgtcaaagcaacagtccac

SEQ ID NO: 8087 - RNA, 21 nt, RNAi
ugucaaagcaacaguccacuu

SEQ ID NO: 8088 - RNA, 21 nt, RNAi
uuacaguuucguugucaggug

SEQ ID NO: 8089 - DNA, 21 bp, homo sapiens
tattctttgctccttgccata

SEQ ID NO: 8090 - RNA, 21 nt, RNAi
uucuuugcuccuugccauauu

SEQ ID NO: 8091 - RNA, 21 nt, RNAi
uuaagaaacgaggaacgguau

SEQ ID NO: 8092 - DNA, 21 bp, homo sapiens
tactggattctaaggaatttc

SEQ ID NO: 8093 - RNA, 21 nt, RNAi
cuggauucuaaggaauuucuu

SEQ ID NO: 8094 - RNA, 21 nt, RNAi
uugaccuaagauuccuuaaag

SEQ ID NO: 8095 - DNA, 21 bp, homo sapiens
tatctgacagagcatcagaac

SEQ ID NO: 8096 - RNA, 21 nt, RNAi
ucugacagagcaucagaacuu

SEQ ID NO: 8097 - RNA, 21 nt, RNAi
uuagacugucucguagucuug

SEQ ID NO: 8098 - DNA, 21 bp, homo sapiens
aaggttgctgagtacaagact

SEQ ID NO: 8099 - RNA, 21 nt, RNAi
gguugcugaguacaagacuuu

SEQ ID NO: 8100 - RNA, 21 nt, RNAi
uuccaacgacucauguucuga

SEQ ID NO: 8101 - DNA, 21 bp, homo sapiens
aaagccaatttatcaggaggt

SEQ ID NO: 8102 - RNA, 21 nt, RNAi
agccaauuuaucaggagguuu

SEQ ID NO: 8103 - RNA, 21 nt, RNAi
uuucgguuaaauaguccucca

SEQ ID NO: 8104 - DNA, 21 bp, homo sapiens
aatttatcaggaggtgtttgg

SEQ ID NO: 8105 - RNA, 21 nt, RNAi
uuuaucaggagguguuugguu

SEQ ID NO: 8106 - RNA, 21 nt, RNAi
uuaaauaguccuccacaaacc

SEQ ID NO: 8107 - DNA, 21 bp, homo sapiens
aacatcaacatggctctagtt

SEQ ID NO: 8108 - RNA, 21 nt, RNAi
caucaacauggcucuaguuuu

SEQ ID NO: 8109 - RNA, 21 nt, RNAi
uuguaguuguaccgagaucaa

SEQ ID NO: 8110 - DNA, 21 bp, homo sapiens
aacatggctctagttgtcgac

SEQ ID NO: 8111 - RNA, 21 nt, RNAi
cauggcucuaguugucgacuu

SEQ ID NO: 8112 - RNA, 21 nt, RNAi
uuguaccgagaucaacagcug

SEQ ID NO: 8113 - DNA, 21 bp, homo sapiens
aaaggaccggttcatcaactt

SEQ ID NO: 8114 - RNA, 21 nt, RNAi
aggaccgguucaucaacuuuu

SEQ ID NO: 8115 - RNA, 21 nt, RNAi
uuuccuggccaaguaguugaa

SEQ ID NO: 8116 - DNA, 21 bp, homo sapiens
aaggaccggttcatcaacttc

SEQ ID NO: 8117 - RNA, 21 nt, RNAi
ggaccgguucaucaacuucuu

SEQ ID NO: 8118 - RNA, 21 nt, RNAi
uuccuggccaaguaguugaag

SEQ ID NO: 8119 - DNA, 21 bp, homo sapiens
aaaggaaacgaaagatggttt

SEQ ID NO: 8120 - RNA, 21 nt, RNAi
aggaaacgaaagaugguuuuu

SEQ ID NO: 8121 - RNA, 21 nt, RNAi
uuuccuuugcuuucuaccaaa

SEQ ID NO: 8122 - DNA, 21 bp, homo sapiens
aactctagatgctcagacttt

SEQ ID NO: 8123 - RNA, 21 nt, RNAi
cucuagaugcucagacuuuuu

SEQ ID NO: 8124 - RNA, 21 nt, RNAi
uugagaucuacgagucugaaa

SEQ ID NO: 8125 - DNA, 21 bp, homo sapiens
aaactctggattgcattccta

SEQ ID NO: 8126 - RNA, 21 nt, RNAi
acucuggauugcauuccuauu

SEQ ID NO: 8127 - RNA, 21 nt, RNAi
uuugagaccuaacguaaggau

SEQ ID NO: 8128 - DNA, 21 bp, homo sapiens
aactctggattgcattcctac

SEQ ID NO: 8129 - RNA, 21 nt, RNAi
cucuggauugcauuccuacuu

SEQ ID NO: 8130 - RNA, 21 nt, RNAi
uugagaccuaacguaaggaug

SEQ ID NO: 8131 - DNA, 21 bp, homo sapiens
aatatacttcaggctgcgtat

SEQ ID NO: 8132 - RNA, 21 nt, RNAi
uauacuucaggcugcguauuu

SEQ ID NO: 8133 - RNA, 21 nt, RNAi
uuauaugaaguccgacgcaua

SEQ ID NO: 8134 - DNA, 21 bp, homo sapiens
aaccaatggatcgatctgcca

SEQ ID NO: 8135 - RNA, 21 nt, RNAi
ccaauggaucgaucugccauu

SEQ ID NO: 8136 - RNA, 21 nt, RNAi
uugguuaccuagcuagacggu

SEQ ID NO: 8137 - DNA, 21 bp, homo sapiens
aatggatcgatctgccatgtg

SEQ ID NO: 8138 - RNA, 21 nt, RNAi
uggaucgaucugccauguguu

SEQ ID NO: 8139 - RNA, 21 nt, RNAi
uuaccuagcuagacgguacac

SEQ ID NO: 8140 - DNA, 21 bp, homo sapiens
aatcatgagcactgctttaat

SEQ ID NO: 8141 - RNA, 21 nt, RNAi
ucaugagcacugcuuuaauuu

SEQ ID NO: 8142 - RNA, 21 nt, RNAi
uuaguacucgugacgaaauua

SEQ ID NO: 8143 - DNA, 21 bp, homo sapiens
aatatcgaacagagtttacca

SEQ ID NO: 8144 - RNA, 21 nt, RNAi
uaucgaacagaguuuaccauu

SEQ ID NO: 8145 - RNA, 21 nt, RNAi
uuauagcuugucucaaauggu

SEQ ID NO: 8146 - DNA, 21 bp, homo sapiens
aattcagcgaagtcctcttaa

SEQ ID NO: 8147 - RNA, 21 nt, RNAi
uucagcgaaguccucuuaauu

SEQ ID NO: 8148 - RNA, 21 nt, RNAi
uuaagucgcuucaggagaauu

SEQ ID NO: 8149 - DNA, 21 bp, homo sapiens
aacatctatatccaccttcat

SEQ ID NO: 8150 - RNA, 21 nt, RNAi
caucuauauccaccuucauuu

SEQ ID NO: 8151 - RNA, 21 nt, RNAi
uuguagauauagguggaagua

SEQ ID NO: 8152 - DNA, 21 bp, homo sapiens
aagtgattgtggagcatacat

SEQ ID NO: 8153 - RNA, 21 nt, RNAi
gugauuguggagcauacauuu

SEQ ID NO: 8154 - RNA, 21 nt, RNAi
uucacuaacaccucguaugua

SEQ ID NO: 8155 - DNA, 21 bp, homo sapiens
aaatggctacacactggttat

SEQ ID NO: 8156 - RNA, 21 nt, RNAi
auggcuacacacugguuauuu

SEQ ID NO: 8157 - RNA, 21 nt, RNAi
uuuaccgaugugugaccaaua

SEQ ID NO: 8158 - DNA, 21 bp, homo sapiens
aatggctacacactggttatc

SEQ ID NO: 8159 - RNA, 21 nt, RNAi
uggcuacacacugguuaucuu

SEQ ID NO: 8160 - RNA, 21 nt, RNAi
uuaccgaugugugaccaauag

SEQ ID NO: 8161 - DNA, 21 bp, homo sapiens
aaatgtgtgcgatcggaggaa

SEQ ID NO: 8162 - RNA, 21 nt, RNAi
augugugcgaucggaggaauu

SEQ ID NO: 8163 - RNA, 21 nt, RNAi
uuuacacacgcuagccuccuu

SEQ ID NO: 8164 - DNA, 21 bp, homo sapiens
aatgtgtgcgatcggaggaat

SEQ ID NO: 8165 - RNA, 21 nt, RNAi
ugugugcgaucggaggaauuu

SEQ ID NO: 8166 - RNA, 21 nt, RNAi
uuacacacgcuagccuccuua

SEQ ID NO: 8167 - DNA, 21 bp, homo sapiens
aaactagagttctccttggaa

SEQ ID NO: 8168 - RNA, 21 nt, RNAi
acuagaguucuccuuggaauu

SEQ ID NO: 8169 - RNA, 21 nt, RNAi
uuugaucucaagaggaaccuu

SEQ ID NO: 8170 - DNA, 21 bp, homo sapiens
aactagagttctccttggaaa

SEQ ID NO: 8171 - RNA, 21 nt, RNAi
cuagaguucuccuuggaaauu

SEQ ID NO: 8172 - RNA, 21 nt, RNAi
uugaucucaagaggaaccuuu

SEQ ID NO: 8173 - DNA, 21 bp, homo sapiens
aagtgagagcacgatgaatac

SEQ ID NO: 8174 - RNA, 21 nt, RNAi
gugagagcacgaugaauacuu

SEQ ID NO: 8175 - RNA, 21 nt, RNAi
uucacucucgugcuacuuaug

SEQ ID NO: 8176 - DNA, 21 bp, homo sapiens
aatacagtacattctcctatg

SEQ ID NO: 8177 - RNA, 21 nt, RNAi
uacaguacauucuccuauguu

SEQ ID NO: 8178 - RNA, 21 nt, RNAi
uuaugucauguaagaggauac

SEQ ID NO: 8179 - DNA, 21 bp, homo sapiens
aataacaagtatttcgccgaa

SEQ ID NO: 8180 - RNA, 21 nt, RNAi
uaacaaguauuucgccgaauu

SEQ ID NO: 8181 - RNA, 21 nt, RNAi
uuauuguucauaaagcggcuu

SEQ ID NO: 8182 - DNA, 21 bp, homo sapiens
aaatacggtcctatggctggt

SEQ ID NO: 8183 - RNA, 21 nt, RNAi
auacgguccuauggcugguuu

SEQ ID NO: 8184 - RNA, 21 nt, RNAi
uuuaugccaggauaccgacca

SEQ ID NO: 8185 - DNA, 21 bp, homo sapiens
aaagtgtgtcaaacagtattc

SEQ ID NO: 8186 - RNA, 21 nt, RNAi
agugugucaaacaguauucuu

SEQ ID NO: 8187 - RNA, 21 nt, RNAi
uuucacacaguuugucauaag

SEQ ID NO: 8188 - DNA, 21 bp, homo sapiens
aagtgtgtcaaacagtattct

SEQ ID NO: 8189 - RNA, 21 nt, RNAi
gugugucaaacaguauucuuu

SEQ ID NO: 8190 - RNA, 21 nt, RNAi
uucacacaguuugucauaaga

SEQ ID NO: 8191 - DNA, 21 bp, homo sapiens
aaattgacttagccaaccgag

SEQ ID NO: 8192 - RNA, 21 nt, RNAi
auugacuuagccaaccgaguu

SEQ ID NO: 8193 - RNA, 21 nt, RNAi
uuuaacugaaucgguuggcuc

SEQ ID NO: 8194 - DNA, 21 bp, homo sapiens
aattgacttagccaaccgaga

SEQ ID NO: 8195 - RNA, 21 nt, RNAi
uugacuuagccaaccgagauu

SEQ ID NO: 8196 - RNA, 21 nt, RNAi
uuaacugaaucgguuggcucu

SEQ ID NO: 8197 - DNA, 21 bp, homo sapiens
aaatgtgcatgaagcaggaag

SEQ ID NO: 8198 - RNA, 21 nt, RNAi
augugcaugaagcaggaaguu

SEQ ID NO: 8199 - RNA, 21 nt, RNAi
uuuacacguacuucguccuuc

SEQ ID NO: 8200 - DNA, 21 bp, homo sapiens
aacatcgctctaattcagaga

SEQ ID NO: 8201 - RNA, 21 nt, RNAi
caucgcucuaauucagagauu

SEQ ID NO: 8202 - RNA, 21 nt, RNAi
uuguagcgagauuaagucucu

SEQ ID NO: 8203 - DNA, 21 bp, homo sapiens
aatctgttgtaccactccttc

SEQ ID NO: 8204 - RNA, 21 nt, RNAi
ucuguuguaccacuccuucuu

SEQ ID NO: 8205 - RNA, 21 nt, RNAi
uuagacaacauggugaggaag

SEQ ID NO: 8206 - DNA, 21 bp, homo sapiens
aaattgaacagcgagctaaat

SEQ ID NO: 8207 - RNA, 21 nt, RNAi
auugaacagcgagcuaaauuu

SEQ ID NO: 8208 - RNA, 21 nt, RNAi
uuuaacuugucgcucgauuua

SEQ ID NO: 8209 - DNA, 21 bp, homo sapiens
aattgaacagcgagctaaata

SEQ ID NO: 8210 - RNA, 21 nt, RNAi
uugaacagcgagcuaaauauu

SEQ ID NO: 8211 - RNA, 21 nt, RNAi
uuaacuugucgcucgauuuau

SEQ ID NO: 8212 - DNA, 21 bp, homo sapiens
aacagcgagctaaatatagag

SEQ ID NO: 8213 - RNA, 21 nt, RNAi
cagcgagcuaaauauagaguu

SEQ ID NO: 8214 - RNA, 21 nt, RNAi
uugucgcucgauuuauaucuc

SEQ ID NO: 8215 - DNA, 21 bp, homo sapiens
aagtaatagttcaaccagatc

SEQ ID NO: 8216 - RNA, 21 nt, RNAi
guaauaguucaaccagaucuu

SEQ ID NO: 8217 - RNA, 21 nt, RNAi
uucauuaucaaguuggucuag

SEQ ID NO: 8218 - DNA, 21 bp, homo sapiens
aattagttcgctacgatgcaa

SEQ ID NO: 8219 - RNA, 21 nt, RNAi
uuaguucgcuacgaugcaauu

SEQ ID NO: 8220 - RNA, 21 nt, RNAi
uuaaucaagcgaugcuacguu

SEQ ID NO: 8221 - DNA, 21 bp, homo sapiens
aatctgtagactaccgagcta

SEQ ID NO: 8222 - RNA, 21 nt, RNAi
ucuguagacuaccgagcuauu

SEQ ID NO: 8223 - RNA, 21 nt, RNAi
uuagacaucugauggcucgau

SEQ ID NO: 8224 - DNA, 21 bp, homo sapiens
aaacatggagatcttcgaaat

SEQ ID NO: 8225 - RNA, 21 nt, RNAi
acauggagaucuucgaaauuu

SEQ ID NO: 8226 - RNA, 21 nt, RNAi
uuuguaccucuagaagcuuua

SEQ ID NO: 8227 - DNA, 21 bp, homo sapiens
aacatggagatcttcgaaatt

SEQ ID NO: 8228 - RNA, 21 nt, RNAi
cauggagaucuucgaaauuuu

SEQ ID NO: 8229 - RNA, 21 nt, RNAi
uuguaccucuagaagcuuuaa

SEQ ID NO: 8230 - DNA, 21 bp, homo sapiens
aatgagactcataatccaact

SEQ ID NO: 8231 - RNA, 21 nt, RNAi
ugagacucauaauccaacuuu

SEQ ID NO: 8232 - RNA, 21 nt, RNAi
uuacucugaguauuagguuga

SEQ ID NO: 8233 - DNA, 21 bp, homo sapiens
aaagcgatgaaatatcttgca

SEQ ID NO: 8234 - RNA, 21 nt, RNAi
agcgaugaaauaucuugcauu

SEQ ID NO: 8235 - RNA, 21 nt, RNAi
uuucgcuacuuuauagaacgu

SEQ ID NO: 8236 - DNA, 21 bp, homo sapiens
aagcgatgaaatatcttgcaa

SEQ ID NO: 8237 - RNA, 21 nt, RNAi
gcgaugaaauaucuugcaauu

SEQ ID NO: 8238 - RNA, 21 nt, RNAi
uucgcuacuuuauagaacguu

SEQ ID NO: 8239 - DNA, 21 bp, homo sapiens
aactgtttacttgttgcaagg

SEQ ID NO: 8240 - RNA, 21 nt, RNAi
cuguuuacuuguugcaagguu

SEQ ID NO: 8241 - RNA, 21 nt, RNAi
uugacaaaugaacaacguucc

SEQ ID NO: 8242 - DNA, 21 bp, homo sapiens
aacgctacttatgtgaacgta

SEQ ID NO: 8243 - RNA, 21 nt, RNAi
cgcuacuuaugugaacguauu

SEQ ID NO: 8244 - RNA, 21 nt, RNAi
uugcgaugaauacacuugcau

SEQ ID NO: 8245 - DNA, 21 bp, homo sapiens
aaatgtgtcgctccgtatcct

SEQ ID NO: 8246 - RNA, 21 nt, RNAi
augugucgcuccguauccuuu

SEQ ID NO: 8247 - RNA, 21 nt, RNAi
uuuacacagcgaggcauagga

SEQ ID NO: 8248 - DNA, 21 bp, homo sapiens
cagcagcaaagccaatttatc

SEQ ID NO: 8249 - RNA, 21 nt, RNAi
gcagcaaagccaauuuaucuu

SEQ ID NO: 8250 - RNA, 21 nt, RNAi
uucgucguuucgguuaaauag

SEQ ID NO: 8251 - DNA, 21 bp, homo sapiens
catcaacatggctctagttgt

SEQ ID NO: 8252 - RNA, 21 nt, RNAi
ucaacauggcucuaguuguuu

SEQ ID NO: 8253 - RNA, 21 nt, RNAi
uuaguuguaccgagaucaaca

SEQ ID NO: 8254 - DNA, 21 bp, homo sapiens
caacatggctctagttgtcga

SEQ ID NO: 8255 - RNA, 21 nt, RNAi
acauggcucuaguugucgauu

SEQ ID NO: 8256 - RNA, 21 nt, RNAi
uuuguaccgagaucaacagcu

SEQ ID NO: 8257 - DNA, 21 bp, homo sapiens
catggctctagttgtcgacac

SEQ ID NO: 8258 - RNA, 21 nt, RNAi
uggcucuaguugucgacacuu

SEQ ID NO: 8259 - RNA, 21 nt, RNAi
uuaccgagaucaacagcugug

SEQ ID NO: 8260 - DNA, 21 bp, homo sapiens
caatcatactgctgacataca

SEQ ID NO: 8261 - RNA, 21 nt, RNAi
aucauacugcugacauacauu

SEQ ID NO: 8262 - RNA, 21 nt, RNAi
uuuaguaugacgacuguaugu

SEQ ID NO: 8263 - DNA, 21 bp, homo sapiens
catacagtcggaggttcactg

SEQ ID NO: 8264 - RNA, 21 nt, RNAi
uacagucggagguucacuguu

SEQ ID NO: 8265 - RNA, 21 nt, RNAi
uuaugucagccuccaagugac

SEQ ID NO: 8266 - DNA, 21 bp, homo sapiens
cagtcggaggttcactgcata

SEQ ID NO: 8267 - RNA, 21 nt, RNAi
gucggagguucacugcauauu

SEQ ID NO: 8268 - RNA, 21 nt, RNAi
uucagccuccaagugacguau

SEQ ID NO: 8269 - DNA, 21 bp, homo sapiens
catctgtaaaggaccggttca

SEQ ID NO: 8270 - RNA, 21 nt, RNAi
ucuguaaaggaccgguucauu

SEQ ID NO: 8271 - RNA, 21 nt, RNAi
uuagacauuuccuggccaagu

SEQ ID NO: 8272 - DNA, 21 bp, homo sapiens
cagatcatccattgcattcga

SEQ ID NO: 8273 - RNA, 21 nt, RNAi
gaucauccauugcauucgauu

SEQ ID NO: 8274 - RNA, 21 nt, RNAi
uucuaguagguaacguaagcu

SEQ ID NO: 8275 - DNA, 21 bp, homo sapiens
cacacaagaataatcaggttc

SEQ ID NO: 8276 - RNA, 21 nt, RNAi
cacaagaauaaucagguucuu

SEQ ID NO: 8277 - RNA, 21 nt, RNAi
uuguguucuuauuaguccaag

SEQ ID NO: 8278 - DNA, 21 bp, homo sapiens
cacaagaataatcaggttctg

SEQ ID NO: 8279 - RNA, 21 nt, RNAi
caagaauaaucagguucuguu

SEQ ID NO: 8280 - RNA, 21 nt, RNAi
uuguucuuauuaguccaagac

SEQ ID NO: 8281 - DNA, 21 bp, homo sapiens
cataaactctggattgcattc

SEQ ID NO: 8282 - RNA, 21 nt, RNAi
uaaacucuggauugcauucuu

SEQ ID NO: 8283 - RNA, 21 nt, RNAi
uuauuugagaccuaacguaag

SEQ ID NO: 8284 - DNA, 21 bp, homo sapiens
cattcctacatggaaatgcct

SEQ ID NO: 8285 - RNA, 21 nt, RNAi
uuccuacauggaaaugccuuu

SEQ ID NO: 8286 - RNA, 21 nt, RNAi
uuaaggauguaccuuuacgga

SEQ ID NO: 8287 - DNA, 21 bp, homo sapiens
caaagcaagccagattctgcc

SEQ ID NO: 8288 - RNA, 21 nt, RNAi
aagcaagccagauucugccuu

SEQ ID NO: 8289 - RNA, 21 nt, RNAi
uuuucguucggucuaagacgg

SEQ ID NO: 8290 - DNA, 21 bp, homo sapiens
cagattctgccgaaccaatgg

SEQ ID NO: 8291 - RNA, 21 nt, RNAi
gauucugccgaaccaaugguu

SEQ ID NO: 8292 - RNA, 21 nt, RNAi
uucuaagacggcuugguuacc

SEQ ID NO: 8293 - DNA, 21 bp, homo sapiens
caatggatcgatctgccatgt

SEQ ID NO: 8294 - RNA, 21 nt, RNAi
auggaucgaucugccauguuu

SEQ ID NO: 8295 - RNA, 21 nt, RNAi
uuuaccuagcuagacgguaca

SEQ ID NO: 8296 - DNA, 21 bp, homo sapiens
caatcatgagcactgctttaa

SEQ ID NO: 8297 - RNA, 21 nt, RNAi
aucaugagcacugcuuuaauu

SEQ ID NO: 8298 - RNA, 21 nt, RNAi
uuuaguacucgugacgaaauu

SEQ ID NO: 8299 - DNA, 21 bp, homo sapiens
catgagcactgctttaatagg

SEQ ID NO: 8300 - RNA, 21 nt, RNAi
ugagcacugcuuuaauagguu

SEQ ID NO: 8301 - RNA, 21 nt, RNAi
uuacucgugacgaaauuaucc

SEQ ID NO: 8302 - DNA, 21 bp, homo sapiens
cactgctttaataggacactt

SEQ ID NO: 8303 - RNA, 21 nt, RNAi
cugcuuuaauaggacacuuuu

SEQ ID NO: 8304 - RNA, 21 nt, RNAi
uugacgaaauuauccugugaa

SEQ ID NO: 8305 - DNA, 21 bp, homo sapiens
caattcagcgaagtcctctta

SEQ ID NO: 8306 - RNA, 21 nt, RNAi
auucagcgaaguccucuuauu

SEQ ID NO: 8307 - RNA, 21 nt, RNAi
uuuaagucgcuucaggagaau

SEQ ID NO: 8308 - DNA, 21 bp, homo sapiens
cagcgaagtcctcttaacatc

SEQ ID NO: 8309 - RNA, 21 nt, RNAi
gcgaaguccucuuaacaucuu

SEQ ID NO: 8310 - RNA, 21 nt, RNAi
uucgcuucaggagaauuguag

SEQ ID NO: 8311 - DNA, 21 bp, homo sapiens
caggttgtggtttctcgatca

SEQ ID NO: 8312 - RNA, 21 nt, RNAi
gguugugguuucucgaucauu

SEQ ID NO: 8313 - RNA, 21 nt, RNAi
uuccaacaccaaagagcuagu

SEQ ID NO: 8314 - DNA, 21 bp, homo sapiens
caaatgtgtgcgatcggagga

SEQ ID NO: 8315 - RNA, 21 nt, RNAi
aaugugugcgaucggaggauu

SEQ ID NO: 8316 - RNA, 21 nt, RNAi
uuuuacacacgcuagccuccu

SEQ ID NO: 8317 - DNA, 21 bp, homo sapiens
cacagttggtcctgccatgaa

SEQ ID NO: 8318 - RNA, 21 nt, RNAi
caguugguccugccaugaauu

SEQ ID NO: 8319 - RNA, 21 nt, RNAi
uugucaaccaggacgguacuu

SEQ ID NO: 8320 - DNA, 21 bp, homo sapiens
cagttggtcctgccatgaata

SEQ ID NO: 8321 - RNA, 21 nt, RNAi
guugguccugccaugaauauu

SEQ ID NO: 8322 - RNA, 21 nt, RNAi
uucaaccaggacgguacuuau

SEQ ID NO: 8323 - DNA, 21 bp, homo sapiens
cagtggcatgtcaacatcgct

SEQ ID NO: 8324 - RNA, 21 nt, RNAi
guggcaugucaacaucgcuuu

SEQ ID NO: 8325 - RNA, 21 nt, RNAi
uucaccguacaguuguagcga

SEQ ID NO: 8326 - DNA, 21 bp, homo sapiens
catgtcaacatcgctctaatt

SEQ ID NO: 8327 - RNA, 21 nt, RNAi
ugucaacaucgcucuaauuuu

SEQ ID NO: 8328 - RNA, 21 nt, RNAi
uuacaguuguagcgagauuaa

SEQ ID NO: 8329 - DNA, 21 bp, homo sapiens
caacatcgctctaattcagag

SEQ ID NO: 8330 - RNA, 21 nt, RNAi
acaucgcucuaauucagaguu

SEQ ID NO: 8331 - RNA, 21 nt, RNAi
uuuguagcgagauuaagucuc

SEQ ID NO: 8332 - DNA, 21 bp, homo sapiens
cagagataatctgttgtacca

SEQ ID NO: 8333 - RNA, 21 nt, RNAi
gagauaaucuguuguaccauu

SEQ ID NO: 8334 - RNA, 21 nt, RNAi
uucucuauuagacaacauggu

SEQ ID NO: 8335 - DNA, 21 bp, homo sapiens
caagcaatttcttcaaccgtc

SEQ ID NO: 8336 - RNA, 21 nt, RNAi
agcaauuucuucaaccgucuu

SEQ ID NO: 8337 - RNA, 21 nt, RNAi
uuucguuaaagaaguuggcag

SEQ ID NO: 8338 - DNA, 21 bp, homo sapiens
cacaggattgattgctggtgt

SEQ ID NO: 8339 - RNA, 21 nt, RNAi
caggauugauugcugguguuu

SEQ ID NO: 8340 - RNA, 21 nt, RNAi
uuguccuaacuaacgaccaca

SEQ ID NO: 8341 - DNA, 21 bp, homo sapiens
caggattgattgctggtgttg

SEQ ID NO: 8342 - RNA, 21 nt, RNAi
ggauugauugcugguguuguu

SEQ ID NO: 8343 - RNA, 21 nt, RNAi
uuccuaacuaacgaccacaac

SEQ ID NO: 8344 - DNA, 21 bp, homo sapiens
caacagcactgttattactac

SEQ ID NO: 8345 - RNA, 21 nt, RNAi
acagcacuguuauuacuacuu

SEQ ID NO: 8346 - RNA, 21 nt, RNAi
uuugucgugacaauaaugaug

SEQ ID NO: 8347 - DNA, 21 bp, homo sapiens
cagtgaattagttcgctacga

SEQ ID NO: 8348 - RNA, 21 nt, RNAi
gugaauuaguucgcuacgauu

SEQ ID NO: 8349 - RNA, 21 nt, RNAi
uucacuuaaucaagcgaugcu

SEQ ID NO: 8350 - DNA, 21 bp, homo sapiens
catttggataggcttgtaagt

SEQ ID NO: 8351 - RNA, 21 nt, RNAi
uuuggauaggcuuguaaguuu

SEQ ID NO: 8352 - RNA, 21 nt, RNAi
uuaaaccuauccgaacauuca

SEQ ID NO: 8353 - DNA, 21 bp, homo sapiens
cagtttcctaattcatctcag

SEQ ID NO: 8354 - RNA, 21 nt, RNAi
guuuccuaauucaucucaguu

SEQ ID NO: 8355 - RNA, 21 nt, RNAi
uucaaaggauuaaguagaguc

SEQ ID NO: 8356 - DNA, 21 bp, homo sapiens
catctcagaacggttcatgcc

SEQ ID NO: 8357 - RNA, 21 nt, RNAi
ucucagaacgguucaugccuu

SEQ ID NO: 8358 - RNA, 21 nt, RNAi
uuagagucuugccaaguacgg

SEQ ID NO: 8359 - DNA, 21 bp, homo sapiens
cagaacggttcatgccgacaa

SEQ ID NO: 8360 - RNA, 21 nt, RNAi
gaacgguucaugccgacaauu

SEQ ID NO: 8361 - RNA, 21 nt, RNAi
uucuugccaaguacggcuguu

SEQ ID NO: 8362 - DNA, 21 bp, homo sapiens
catgccgacaagtgcagtatc

SEQ ID NO: 8363 - RNA, 21 nt, RNAi
ugccgacaagugcaguaucuu

SEQ ID NO: 8364 - RNA, 21 nt, RNAi
uuacggcuguucacgucauag

SEQ ID NO: 8365 - DNA, 21 bp, homo sapiens
cacattgacctcagtgctcta

SEQ ID NO: 8366 - RNA, 21 nt, RNAi
cauugaccucagugcucuauu

SEQ ID NO: 8367 - RNA, 21 nt, RNAi
uuguaacuggagucacgagau

SEQ ID NO: 8368 - DNA, 21 bp, homo sapiens
cagtagcctgattgtgcattt

SEQ ID NO: 8369 - RNA, 21 nt, RNAi
guagccugauugugcauuuuu

SEQ ID NO: 8370 - RNA, 21 nt, RNAi
uucaucggacuaacacguaaa

SEQ ID NO: 8371 - DNA, 21 bp, homo sapiens
catgaaacatggagatcttcg

SEQ ID NO: 8372 - RNA, 21 nt, RNAi
ugaaacauggagaucuucguu

SEQ ID NO: 8373 - RNA, 21 nt, RNAi
uuacuuuguaccucuagaagc

SEQ ID NO: 8374 - DNA, 21 bp, homo sapiens
catggagatcttcgaaatttc

SEQ ID NO: 8375 - RNA, 21 nt, RNAi
uggagaucuucgaaauuucuu

SEQ ID NO: 8376 - RNA, 21 nt, RNAi
uuaccucuagaagcuuuaaag

SEQ ID NO: 8377 - DNA, 21 bp, homo sapiens
caaagcgatgaaatatcttgc

SEQ ID NO: 8378 - RNA, 21 nt, RNAi
aagcgaugaaauaucuugcuu

SEQ ID NO: 8379 - RNA, 21 nt, RNAi
uuuucgcuacuuuauagaacg

SEQ ID NO: 8380 - DNA, 21 bp, homo sapiens
cactatgtccatgtgaacgct

SEQ ID NO: 8381 - RNA, 21 nt, RNAi
cuauguccaugugaacgcuuu

SEQ ID NO: 8382 - RNA, 21 nt, RNAi
uugauacagguacacuugcga

SEQ ID NO: 8383 - DNA, 21 bp, homo sapiens
catgtgaacgctacttatgtg

SEQ ID NO: 8384 - RNA, 21 nt, RNAi
ugugaacgcuacuuauguguu

SEQ ID NO: 8385 - RNA, 21 nt, RNAi
uuacacuugcgaugaauacac

SEQ ID NO: 8386 - DNA, 21 bp, homo sapiens
gaaggttgctgagtacaagac

SEQ ID NO: 8387 - RNA, 21 nt, RNAi
agguugcugaguacaagacuu

SEQ ID NO: 8388 - RNA, 21 nt, RNAi
uuuccaacgacucauguucug

SEQ ID NO: 8389 - DNA, 21 bp, homo sapiens
gatgatcaactcattagctgt

SEQ ID NO: 8390 - RNA, 21 nt, RNAi
ugaucaacucauuagcuguuu

SEQ ID NO: 8391 - RNA, 21 nt, RNAi
uuacuaguugaguaaucgaca

SEQ ID NO: 8392 - DNA, 21 bp, homo sapiens
gacatacagtcggaggttcac

SEQ ID NO: 8393 - RNA, 21 nt, RNAi
cauacagucggagguucacuu

SEQ ID NO: 8394 - RNA, 21 nt, RNAi
uuguaugucagccuccaagug

SEQ ID NO: 8395 - DNA, 21 bp, homo sapiens
gaggttcactgcatattctcc

SEQ ID NO: 8396 - RNA, 21 nt, RNAi
gguucacugcauauucuccuu

SEQ ID NO: 8397 - RNA, 21 nt, RNAi
uuccaagugacguauaagagg

SEQ ID NO: 8398 - DNA, 21 bp, homo sapiens
gaaggctaaaggaaacgaaag

SEQ ID NO: 8399 - RNA, 21 nt, RNAi
aggcuaaaggaaacgaaaguu

SEQ ID NO: 8400 - RNA, 21 nt, RNAi
uuuccgauuuccuuugcuuuc

SEQ ID NO: 8401 - DNA, 21 bp, homo sapiens
gattgcattcctacatggaaa

SEQ ID NO: 8402 - RNA, 21 nt, RNAi
uugcauuccuacauggaaauu

SEQ ID NO: 8403 - RNA, 21 nt, RNAi
uuaacguaaggauguaccuuu

SEQ ID NO: 8404 - DNA, 21 bp, homo sapiens
gaaatgcctctggagtgtatt

SEQ ID NO: 8405 - RNA, 21 nt, RNAi
aaugccucuggaguguauuuu

SEQ ID NO: 8406 - RNA, 21 nt, RNAi
uuuuacggagaccucacauaa

SEQ ID NO: 8407 - DNA, 21 bp, homo sapiens
gattctgccgaaccaatggat

SEQ ID NO: 8408 - RNA, 21 nt, RNAi
uucugccgaaccaauggauuu

SEQ ID NO: 8409 - RNA, 21 nt, RNAi
uuaagacggcuugguuaccua

SEQ ID NO: 8410 - DNA, 21 bp, homo sapiens
gaaccaatggatcgatctgcc

SEQ ID NO: 8411 - RNA, 21 nt, RNAi
accaauggaucgaucugccuu

SEQ ID NO: 8412 - RNA, 21 nt, RNAi
uuugguuaccuagcuagacgg

SEQ ID NO: 8413 - DNA, 21 bp, homo sapiens
gagcactgctttaataggaca

SEQ ID NO: 8414 - RNA, 21 nt, RNAi
gcacugcuuuaauaggacauu

SEQ ID NO: 8415 - RNA, 21 nt, RNAi
uucgugacgaaauuauccugu

SEQ ID NO: 8416 - DNA, 21 bp, homo sapiens
gaatatcgaacagagtttacc

SEQ ID NO: 8417 - RNA, 21 nt, RNAi
auaucgaacagaguuuaccuu

SEQ ID NO: 8418 - RNA, 21 nt, RNAi
uuuauagcuugucucaaaugg

SEQ ID NO: 8419 - DNA, 21 bp, homo sapiens
gaacagagtttaccacagctt

SEQ ID NO: 8420 - RNA, 21 nt, RNAi
acagaguuuaccacagcuuuu

SEQ ID NO: 8421 - RNA, 21 nt, RNAi
uuugucucaaauggugucgaa

SEQ ID NO: 8422 - DNA, 21 bp, homo sapiens
gagacctcaccatagctaatc

SEQ ID NO: 8423 - RNA, 21 nt, RNAi
gaccucaccauagcuaaucuu

SEQ ID NO: 8424 - RNA, 21 nt, RNAi
uucuggagugguaucgauuag

SEQ ID NO: 8425 - DNA, 21 bp, homo sapiens
gacctcaccatagctaatctt

SEQ ID NO: 8426 - RNA, 21 nt, RNAi
ccucaccauagcuaaucuuuu

SEQ ID NO: 8427 - RNA, 21 nt, RNAi
uuggagugguaucgauuagaa

SEQ ID NO: 8428 - DNA, 21 bp, homo sapiens
gaagtgattgtggagcataca

SEQ ID NO: 8429 - RNA, 21 nt, RNAi
agugauuguggagcauacauu

SEQ ID NO: 8430 - RNA, 21 nt, RNAi
uuucacuaacaccucguaugu

SEQ ID NO: 8431 - DNA, 21 bp, homo sapiens
gacaaatgtgtgcgatcggag

SEQ ID NO: 8432 - RNA, 21 nt, RNAi
caaaugugugcgaucggaguu

SEQ ID NO: 8433 - RNA, 21 nt, RNAi
uuguuuacacacgcuagccuc

SEQ ID NO: 8434 - DNA, 21 bp, homo sapiens
gacatggactcaacagatctg

SEQ ID NO: 8435 - RNA, 21 nt, RNAi
cauggacucaacagaucuguu

SEQ ID NO: 8436 - RNA, 21 nt, RNAi
uuguaccugaguugucuagac

SEQ ID NO: 8437 - DNA, 21 bp, homo sapiens
gagagcacgatgaatacattg

SEQ ID NO: 8438 - RNA, 21 nt, RNAi
gagcacgaugaauacauuguu

SEQ ID NO: 8439 - RNA, 21 nt, RNAi
uucucgugcuacuuauguaac

SEQ ID NO: 8440 - DNA, 21 bp, homo sapiens
gaaatacggtcctatggctgg

SEQ ID NO: 8441 - RNA, 21 nt, RNAi
aauacgguccuauggcugguu

SEQ ID NO: 8442 - RNA, 21 nt, RNAi
uuuuaugccaggauaccgacc

SEQ ID NO: 8443 - DNA, 21 bp, homo sapiens
gacttagccaaccgagagaca

SEQ ID NO: 8444 - RNA, 21 nt, RNAi
cuuagccaaccgagagacauu

SEQ ID NO: 8445 - RNA, 21 nt, RNAi
uugaaucgguuggcucucugu

SEQ ID NO: 8446 - DNA, 21 bp, homo sapiens
gagcacaataacaggtgttgg

SEQ ID NO: 8447 - RNA, 21 nt, RNAi
gcacaauaacagguguugguu

SEQ ID NO: 8448 - RNA, 21 nt, RNAi
uucguguuauuguccacaacc

SEQ ID NO: 8449 - DNA, 21 bp, homo sapiens
gagaatggtcataaatgtgca

SEQ ID NO: 8450 - RNA, 21 nt, RNAi
gaauggucauaaaugugcauu

SEQ ID NO: 8451 - RNA, 21 nt, RNAi
uucuuaccaguauuuacacgu

SEQ ID NO: 8452 - DNA, 21 bp, homo sapiens
gaatggtcataaatgtgcatg

SEQ ID NO: 8453 - RNA, 21 nt, RNAi
auggucauaaaugugcauguu

SEQ ID NO: 8454 - RNA, 21 nt, RNAi
uuuaccaguauuuacacguac

SEQ ID NO: 8455 - DNA, 21 bp, homo sapiens
gagataatctgttgtaccact

SEQ ID NO: 8456 - RNA, 21 nt, RNAi
gauaaucuguuguaccacuuu

SEQ ID NO: 8457 - RNA, 21 nt, RNAi
uucuauuagacaacaugguga

SEQ ID NO: 8458 - DNA, 21 bp, homo sapiens
gataatctgttgtaccactcc

SEQ ID NO: 8459 - RNA, 21 nt, RNAi
uaaucuguuguaccacuccuu

SEQ ID NO: 8460 - RNA, 21 nt, RNAi
uuauuagacaacauggugagg

SEQ ID NO: 8461 - DNA, 21 bp, homo sapiens
gaagcagttaaaggtgaagtg

SEQ ID NO: 8462 - RNA, 21 nt, RNAi
agcaguuaaaggugaaguguu

SEQ ID NO: 8463 - RNA, 21 nt, RNAi
uuucgucaauuuccacuucac

SEQ ID NO: 8464 - DNA, 21 bp, homo sapiens
gaaattgaacagcgagctaaa

SEQ ID NO: 8465 - RNA, 21 nt, RNAi
aauugaacagcgagcuaaauu

SEQ ID NO: 8466 - RNA, 21 nt, RNAi
uuuuaacuugucgcucgauuu

SEQ ID NO: 8467 - DNA, 21 bp, homo sapiens
gaacagcgagctaaatataga

SEQ ID NO: 8468 - RNA, 21 nt, RNAi
acagcgagcuaaauauagauu

SEQ ID NO: 8469 - RNA, 21 nt, RNAi
uuugucgcucgauuuauaucu

SEQ ID NO: 8470 - DNA, 21 bp, homo sapiens
gagctaaatatagagtggaag

SEQ ID NO: 8471 - RNA, 21 nt, RNAi
gcuaaauauagaguggaaguu

SEQ ID NO: 8472 - RNA, 21 nt, RNAi
uucgauuuauaucucaccuuc

SEQ ID NO: 8473 - DNA, 21 bp, homo sapiens
gattgattgctggtgttgtct

SEQ ID NO: 8474 - RNA, 21 nt, RNAi
uugauugcugguguugucuuu

SEQ ID NO: 8475 - RNA, 21 nt, RNAi
uuaacuaacgaccacaacaga

SEQ ID NO: 8476 - DNA, 21 bp, homo sapiens
gaattagttcgctacgatgca

SEQ ID NO: 8477 - RNA, 21 nt, RNAi
auuaguucgcuacgaugcauu

SEQ ID NO: 8478 - RNA, 21 nt, RNAi
uuuaaucaagcgaugcuacgu

SEQ ID NO: 8479 - DNA, 21 bp, homo sapiens
gagtacacactcctcatttgg

SEQ ID NO: 8480 - RNA, 21 nt, RNAi
guacacacuccucauuugguu

SEQ ID NO: 8481 - RNA, 21 nt, RNAi
uucaugugugaggaguaaacc

SEQ ID NO: 8482 - DNA, 21 bp, homo sapiens
gaatctgtagactaccgagct

SEQ ID NO: 8483 - RNA, 21 nt, RNAi
aucuguagacuaccgagcuuu

SEQ ID NO: 8484 - RNA, 21 nt, RNAi
uuuagacaucugauggcucga

SEQ ID NO: 8485 - DNA, 21 bp, homo sapiens
gaacggttcatgccgacaagt

SEQ ID NO: 8486 - RNA, 21 nt, RNAi
acgguucaugccgacaaguuu

SEQ ID NO: 8487 - RNA, 21 nt, RNAi
uuugccaaguacggcuguuca

SEQ ID NO: 8488 - DNA, 21 bp, homo sapiens
gaaatccttgaacagaatcac

SEQ ID NO: 8489 - RNA, 21 nt, RNAi
aauccuugaacagaaucacuu

SEQ ID NO: 8490 - RNA, 21 nt, RNAi
uuuuaggaacuugucuuagug

SEQ ID NO: 8491 - DNA, 21 bp, homo sapiens
gaatctgcctgcgaagtgaag

SEQ ID NO: 8492 - RNA, 21 nt, RNAi
aucugccugcgaagugaaguu

SEQ ID NO: 8493 - RNA, 21 nt, RNAi
uuuagacggacgcuucacuuc

SEQ ID NO: 8494 - DNA, 21 bp, homo sapiens
gaaacatggagatcttcgaaa

SEQ ID NO: 8495 - RNA, 21 nt, RNAi
aacauggagaucuucgaaauu

SEQ ID NO: 8496 - RNA, 21 nt, RNAi
uuuuguaccucuagaagcuuu

SEQ ID NO: 8497 - DNA, 21 bp, homo sapiens
gaacgctacttatgtgaacgt

SEQ ID NO: 8498 - RNA, 21 nt, RNAi
acgcuacuuaugugaacguuu

SEQ ID NO: 8499 - RNA, 21 nt, RNAi
uuugcgaugaauacacuugca

SEQ ID NO: 8500 - DNA, 21 bp, homo sapiens
taacatcaacatggctctagt

SEQ ID NO: 8501 - RNA, 21 nt, RNAi
acaucaacauggcucuaguuu

SEQ ID NO: 8502 - RNA, 21 nt, RNAi
uuuguaguuguaccgagauca

SEQ ID NO: 8503 - DNA, 21 bp, homo sapiens
tagttgtcgacacctactatg

SEQ ID NO: 8504 - RNA, 21 nt, RNAi
guugucgacaccuacuauguu

SEQ ID NO: 8505 - RNA, 21 nt, RNAi
uucaacagcuguggaugauac

SEQ ID NO: 8506 - DNA, 21 bp, homo sapiens
tatgatgatcaactcattagc

SEQ ID NO: 8507 - RNA, 21 nt, RNAi
ugaugaucaacucauuagcuu

SEQ ID NO: 8508 - RNA, 21 nt, RNAi
uuacuacuaguugaguaaucg

SEQ ID NO: 8509 - DNA, 21 bp, homo sapiens
tactgctgacatacagtcgga

SEQ ID NO: 8510 - RNA, 21 nt, RNAi
cugcugacauacagucggauu

SEQ ID NO: 8511 - RNA, 21 nt, RNAi
uugacgacuguaugucagccu

SEQ ID NO: 8512 - DNA, 21 bp, homo sapiens
taaaggaccggttcatcaact

SEQ ID NO: 8513 - RNA, 21 nt, RNAi
aaggaccgguucaucaacuuu

SEQ ID NO: 8514 - RNA, 21 nt, RNAi
uuuuccuggccaaguaguuga

SEQ ID NO: 8515 - DNA, 21 bp, homo sapiens
taaaggaaacgaaagatggtt

SEQ ID NO: 8516 - RNA, 21 nt, RNAi
aaggaaacgaaagaugguuuu

SEQ ID NO: 8517 - RNA, 21 nt, RNAi
uuuuccuuugcuuucuaccaa

SEQ ID NO: 8518 - DNA, 21 bp, homo sapiens
tacttcttgacggtccaaagg

SEQ ID NO: 8519 - RNA, 21 nt, RNAi
cuucuugacgguccaaagguu

SEQ ID NO: 8520 - RNA, 21 nt, RNAi
uugaagaacugccagguuucc

SEQ ID NO: 8521 - DNA, 21 bp, homo sapiens
taaactctggattgcattcct

SEQ ID NO: 8522 - RNA, 21 nt, RNAi
aacucuggauugcauuccuuu

SEQ ID NO: 8523 - RNA, 21 nt, RNAi
uuuugagaccuaacguaagga

SEQ ID NO: 8524 - DNA, 21 bp, homo sapiens
taatatacttcaggctgcgta

SEQ ID NO: 8525 - RNA, 21 nt, RNAi
auauacuucaggcugcguauu

SEQ ID NO: 8526 - RNA, 21 nt, RNAi
uuuauaugaaguccgacgcau

SEQ ID NO: 8527 - DNA, 21 bp, homo sapiens
tatacttcaggctgcgtatgt

SEQ ID NO: 8528 - RNA, 21 nt, RNAi
uacuucaggcugcguauguuu

SEQ ID NO: 8529 - RNA, 21 nt, RNAi
uuaugaaguccgacgcauaca

SEQ ID NO: 8530 - DNA, 21 bp, homo sapiens
tacttcaggctgcgtatgtca

SEQ ID NO: 8531 - RNA, 21 nt, RNAi
cuucaggcugcguaugucauu

SEQ ID NO: 8532 - RNA, 21 nt, RNAi
uugaaguccgacgcauacagu

SEQ ID NO: 8533 - DNA, 21 bp, homo sapiens
tatcgaacagagtttaccaca

SEQ ID NO: 8534 - RNA, 21 nt, RNAi
ucgaacagaguuuaccacauu

SEQ ID NO: 8535 - RNA, 21 nt, RNAi
uuagcuugucucaaauggugu

SEQ ID NO: 8536 - DNA, 21 bp, homo sapiens
taacatctatatccaccttca

SEQ ID NO: 8537 - RNA, 21 nt, RNAi
acaucuauauccaccuucauu

SEQ ID NO: 8538 - RNA, 21 nt, RNAi
uuuguagauauagguggaagu

SEQ ID NO: 8539 - DNA, 21 bp, homo sapiens
taagtgagagcacgatgaata

SEQ ID NO: 8540 - RNA, 21 nt, RNAi
agugagagcacgaugaauauu

SEQ ID NO: 8541 - RNA, 21 nt, RNAi
uuucacucucgugcuacuuau

SEQ ID NO: 8542 - DNA, 21 bp, homo sapiens
tacattctcctatgtggatcc

SEQ ID NO: 8543 - RNA, 21 nt, RNAi
cauucuccuauguggauccuu

SEQ ID NO: 8544 - RNA, 21 nt, RNAi
uuguaagaggauacaccuagg

SEQ ID NO: 8545 - DNA, 21 bp, homo sapiens
taataacaagtatttcgccga

SEQ ID NO: 8546 - RNA, 21 nt, RNAi
auaacaaguauuucgccgauu

SEQ ID NO: 8547 - RNA, 21 nt, RNAi
uuuauuguucauaaagcggcu

SEQ ID NO: 8548 - DNA, 21 bp, homo sapiens
taaatgtgcatgaagcaggaa

SEQ ID NO: 8549 - RNA, 21 nt, RNAi
aaugugcaugaagcaggaauu

SEQ ID NO: 8550 - RNA, 21 nt, RNAi
uuuuacacguacuucguccuu

SEQ ID NO: 8551 - DNA, 21 bp, homo sapiens
tacagtggcatgtcaacatcg

SEQ ID NO: 8552 - RNA, 21 nt, RNAi
caguggcaugucaacaucguu

SEQ ID NO: 8553 - RNA, 21 nt, RNAi
uugucaccguacaguuguagc

SEQ ID NO: 8554 - DNA, 21 bp, homo sapiens
taatctgttgtaccactcctt

SEQ ID NO: 8555 - RNA, 21 nt, RNAi
aucuguuguaccacuccuuuu

SEQ ID NO: 8556 - RNA, 21 nt, RNAi
uuuagacaacauggugaggaa

SEQ ID NO: 8557 - DNA, 21 bp, homo sapiens
taaatatagagtggaagcaag

SEQ ID NO: 8558 - RNA, 21 nt, RNAi
aauauagaguggaagcaaguu

SEQ ID NO: 8559 - RNA, 21 nt, RNAi
uuuuauaucucaccuucguuc

SEQ ID NO: 8560 - DNA, 21 bp, homo sapiens
tagttcgctacgatgcaagag

SEQ ID NO: 8561 - RNA, 21 nt, RNAi
guucgcuacgaugcaagaguu

SEQ ID NO: 8562 - RNA, 21 nt, RNAi
uucaagcgaugcuacguucuc

SEQ ID NO: 8563 - DNA, 21 bp, homo sapiens
tacgatgcaagagtacacact

SEQ ID NO: 8564 - RNA, 21 nt, RNAi
cgaugcaagaguacacacuuu

SEQ ID NO: 8565 - RNA, 21 nt, RNAi
uugcuacguucucauguguga

SEQ ID NO: 8566 - DNA, 21 bp, homo sapiens
tagcctgattgtgcatttcaa

SEQ ID NO: 8567 - RNA, 21 nt, RNAi
gccugauugugcauuucaauu

SEQ ID NO: 8568 - RNA, 21 nt, RNAi
uucggacuaacacguaaaguu

SEQ ID NO: 8569 - DNA, 21 bp, homo sapiens
taccatacatgaaacatggag

SEQ ID NO: 8570 - RNA, 21 nt, RNAi
ccauacaugaaacauggaguu

SEQ ID NO: 8571 - RNA, 21 nt, RNAi
uugguauguacuuuguaccuc

SEQ ID NO: 8572 - DNA, 21 bp, homo sapiens
aagccatcacttaccttgcac

SEQ ID NO: 8573 - RNA, 21 nt, RNAi
gccaucacuuaccuugcacuu

SEQ ID NO: 8574 - RNA, 21 nt, RNAi
uucgguagugaauggaacgug

SEQ ID NO: 8575 - DNA, 21 bp, homo sapiens
aaagaagacaaaggccagtat

SEQ ID NO: 8576 - RNA, 21 nt, RNAi
agaagacaaaggccaguauuu

SEQ ID NO: 8577 - RNA, 21 nt, RNAi
uuucuucuguuuccggucaua

SEQ ID NO: 8578 - DNA, 21 bp, homo sapiens
aagaagacaaaggccagtatg

SEQ ID NO: 8579 - RNA, 21 nt, RNAi
gaagacaaaggccaguauguu

SEQ ID NO: 8580 - RNA, 21 nt, RNAi
uucuucuguuuccggucauac

SEQ ID NO: 8581 - DNA, 21 bp, homo sapiens
aagacaaaggccagtatgcac

SEQ ID NO: 8582 - RNA, 21 nt, RNAi
gacaaaggccaguaugcacuu

SEQ ID NO: 8583 - RNA, 21 nt, RNAi
uucuguuuccggucauacgug

SEQ ID NO: 8584 - DNA, 21 bp, homo sapiens
aaaggccagtatgcacagctt

SEQ ID NO: 8585 - RNA, 21 nt, RNAi
aggccaguaugcacagcuuuu

SEQ ID NO: 8586 - RNA, 21 nt, RNAi
uuuccggucauacgugucgaa

SEQ ID NO: 8587 - DNA, 21 bp, homo sapiens
aaggccagtatgcacagcttt

SEQ ID NO: 8588 - RNA, 21 nt, RNAi
ggccaguaugcacagcuuuuu

SEQ ID NO: 8589 - RNA, 21 nt, RNAi
uuccggucauacgugucgaaa

SEQ ID NO: 8590 - DNA, 21 bp, homo sapiens
aaacacaagagcaagatgtgg

SEQ ID NO: 8591 - RNA, 21 nt, RNAi
acacaagagcaagaugugguu

SEQ ID NO: 8592 - RNA, 21 nt, RNAi
uuuguguucucguucuacacc

SEQ ID NO: 8593 - DNA, 21 bp, homo sapiens
aacacaagagcaagatgtgga

SEQ ID NO: 8594 - RNA, 21 nt, RNAi
cacaagagcaagauguggauu

SEQ ID NO: 8595 - RNA, 21 nt, RNAi
uuguguucucguucuacaccu

SEQ ID NO: 8596 - DNA, 21 bp, homo sapiens
aagagcaagatgtggacttag

SEQ ID NO: 8597 - RNA, 21 nt, RNAi
gagcaagauguggacuuaguu

SEQ ID NO: 8598 - RNA, 21 nt, RNAi
uucucguucuacaccugaauc

SEQ ID NO: 8599 - DNA, 21 bp, homo sapiens
aagatgtggacttagtccaga

SEQ ID NO: 8600 - RNA, 21 nt, RNAi
gauguggacuuaguccagauu

SEQ ID NO: 8601 - RNA, 21 nt, RNAi
uucuacaccugaaucaggucu

SEQ ID NO: 8602 - DNA, 21 bp, homo sapiens
aatactacaacctgaagaatg

SEQ ID NO: 8603 - RNA, 21 nt, RNAi
uacuacaaccugaagaauguu

SEQ ID NO: 8604 - RNA, 21 nt, RNAi
uuaugauguuggacuucuuac

SEQ ID NO: 8605 - DNA, 21 bp, homo sapiens
aaattgaagcaaatgcaggaa

SEQ ID NO: 8606 - RNA, 21 nt, RNAi
auugaagcaaaugcaggaauu

SEQ ID NO: 8607 - RNA, 21 nt, RNAi
uuuaacuucguuuacguccuu

SEQ ID NO: 8608 - DNA, 21 bp, homo sapiens
aattgaagcaaatgcaggaat

SEQ ID NO: 8609 - RNA, 21 nt, RNAi
uugaagcaaaugcaggaauuu

SEQ ID NO: 8610 - RNA, 21 nt, RNAi
uuaacuucguuuacguccuua

SEQ ID NO: 8611 - DNA, 21 bp, homo sapiens
aagcaaatgcaggaattcttt

SEQ ID NO: 8612 - RNA, 21 nt, RNAi
gcaaaugcaggaauucuuuuu

SEQ ID NO: 8613 - RNA, 21 nt, RNAi
uucguuuacguccuuaagaaa

SEQ ID NO: 8614 - DNA, 21 bp, homo sapiens
aaacacatctgacctacagga

SEQ ID NO: 8615 - RNA, 21 nt, RNAi
acacaucugaccuacaggauu

SEQ ID NO: 8616 - RNA, 21 nt, RNAi
uuuguguagacuggauguccu

SEQ ID NO: 8617 - DNA, 21 bp, homo sapiens
aacacatctgacctacaggat

SEQ ID NO: 8618 - RNA, 21 nt, RNAi
cacaucugaccuacaggauuu

SEQ ID NO: 8619 - RNA, 21 nt, RNAi
uuguguagacuggauguccua

SEQ ID NO: 8620 - DNA, 21 bp, homo sapiens
aaattacacgccagatttgcc

SEQ ID NO: 8621 - RNA, 21 nt, RNAi
auuacacgccagauuugccuu

SEQ ID NO: 8622 - RNA, 21 nt, RNAi
uuuaaugugcggucuaaacgg

SEQ ID NO: 8623 - DNA, 21 bp, homo sapiens
aattacacgccagatttgcca

SEQ ID NO: 8624 - RNA, 21 nt, RNAi
uuacacgccagauuugccauu

SEQ ID NO: 8625 - RNA, 21 nt, RNAi
uuaaugugcggucuaaacggu

SEQ ID NO: 8626 - DNA, 21 bp, homo sapiens
aagagcagatgtggaccatgc

SEQ ID NO: 8627 - RNA, 21 nt, RNAi
gagcagauguggaccaugcuu

SEQ ID NO: 8628 - RNA, 21 nt, RNAi
uucucgucuacaccugguacg

SEQ ID NO: 8629 - DNA, 21 bp, homo sapiens
aaagccttccaactctggagt

SEQ ID NO: 8630 - RNA, 21 nt, RNAi
agccuuccaacucuggaguuu

SEQ ID NO: 8631 - RNA, 21 nt, RNAi
uuucggaagguugagaccuca

SEQ ID NO: 8632 - DNA, 21 bp, homo sapiens
aagccttccaactctggagta

SEQ ID NO: 8633 - RNA, 21 nt, RNAi
gccuuccaacucuggaguauu

SEQ ID NO: 8634 - RNA, 21 nt, RNAi
uucggaagguugagaccucau

SEQ ID NO: 8635 - DNA, 21 bp, homo sapiens
aactctggagtaatgtcacac

SEQ ID NO: 8636 - RNA, 21 nt, RNAi
cucuggaguaaugucacacuu

SEQ ID NO: 8637 - RNA, 21 nt, RNAi
uugagaccucauuacagugug

SEQ ID NO: 8638 - DNA, 21 bp, homo sapiens
aatgtcacacctctgacattc

SEQ ID NO: 8639 - RNA, 21 nt, RNAi
ugucacaccucugacauucuu

SEQ ID NO: 8640 - RNA, 21 nt, RNAi
uuacaguguggagacuguaag

SEQ ID NO: 8641 - DNA, 21 bp, homo sapiens
aagcagacatcatgatatctt

SEQ ID NO: 8642 - RNA, 21 nt, RNAi
gcagacaucaugauaucuuuu

SEQ ID NO: 8643 - RNA, 21 nt, RNAi
uucgucuguaguacuauagaa

SEQ ID NO: 8644 - DNA, 21 bp, homo sapiens
aagatgaaaggtggaccaaca

SEQ ID NO: 8645 - RNA, 21 nt, RNAi
gaugaaagguggaccaacauu

SEQ ID NO: 8646 - RNA, 21 nt, RNAi
uucuacuuuccaccugguugu

SEQ ID NO: 8647 - DNA, 21 bp, homo sapiens
aaaggtggaccaacaatttca

SEQ ID NO: 8648 - RNA, 21 nt, RNAi
agguggaccaacaauuucauu

SEQ ID NO: 8649 - RNA, 21 nt, RNAi
uuuccaccugguuguuaaagu

SEQ ID NO: 8650 - DNA, 21 bp, homo sapiens
aaggtggaccaacaatttcag

SEQ ID NO: 8651 - RNA, 21 nt, RNAi
gguggaccaacaauuucaguu

SEQ ID NO: 8652 - RNA, 21 nt, RNAi
uuccaccugguuguuaaaguc

SEQ ID NO: 8653 - DNA, 21 bp, homo sapiens
aacaatttcagagagtacaac

SEQ ID NO: 8654 - RNA, 21 nt, RNAi
caauuucagagaguacaacuu

SEQ ID NO: 8655 - RNA, 21 nt, RNAi
uuguuaaagucucucauguug

SEQ ID NO: 8656 - DNA, 21 bp, homo sapiens
aacttacatcgtgttgcggct

SEQ ID NO: 8657 - RNA, 21 nt, RNAi
cuuacaucguguugcggcuuu

SEQ ID NO: 8658 - RNA, 21 nt, RNAi
uugaauguagcacaacgccga

SEQ ID NO: 8659 - DNA, 21 bp, homo sapiens
aactcggccattctcttggac

SEQ ID NO: 8660 - RNA, 21 nt, RNAi
cucggccauucucuuggacuu

SEQ ID NO: 8661 - RNA, 21 nt, RNAi
uugagccgguaagagaaccug

SEQ ID NO: 8662 - DNA, 21 bp, homo sapiens
aaagcgtgtgacagtaagcta

SEQ ID NO: 8663 - RNA, 21 nt, RNAi
agcgugugacaguaagcuauu

SEQ ID NO: 8664 - RNA, 21 nt, RNAi
uuucgcacacugucauucgau

SEQ ID NO: 8665 - DNA, 21 bp, homo sapiens
aagcgtgtgacagtaagctaa

SEQ ID NO: 8666 - RNA, 21 nt, RNAi
gcgugugacaguaagcuaauu

SEQ ID NO: 8667 - RNA, 21 nt, RNAi
uucgcacacugucauucgauu

SEQ ID NO: 8668 - DNA, 21 bp, homo sapiens
aagctaacctttgatgctata

SEQ ID NO: 8669 - RNA, 21 nt, RNAi
gcuaaccuuugaugcuauauu

SEQ ID NO: 8670 - RNA, 21 nt, RNAi
uucgauuggaaacuacgauau

SEQ ID NO: 8671 - DNA, 21 bp, homo sapiens
aacctttgatgctataactac

SEQ ID NO: 8672 - RNA, 21 nt, RNAi
ccuuugaugcuauaacuacuu

SEQ ID NO: 8673 - RNA, 21 nt, RNAi
uuggaaacuacgauauugaug

SEQ ID NO: 8674 - DNA, 21 bp, homo sapiens
aaagacagattctacatgcgc

SEQ ID NO: 8675 - RNA, 21 nt, RNAi
agacagauucuacaugcgcuu

SEQ ID NO: 8676 - RNA, 21 nt, RNAi
uuucugucuaagauguacgcg

SEQ ID NO: 8677 - DNA, 21 bp, homo sapiens
aagacagattctacatgcgca

SEQ ID NO: 8678 - RNA, 21 nt, RNAi
gacagauucuacaugcgcauu

SEQ ID NO: 8679 - RNA, 21 nt, RNAi
uucugucuaagauguacgcgu

SEQ ID NO: 8680 - DNA, 21 bp, homo sapiens
aagctgcttacgaatttgccg

SEQ ID NO: 8681 - RNA, 21 nt, RNAi
gcugcuuacgaauuugccguu

SEQ ID NO: 8682 - RNA, 21 nt, RNAi
uucgacgaaugcuuaaacggc

SEQ ID NO: 8683 - DNA, 21 bp, homo sapiens
aatttgccgacagagatgaag

SEQ ID NO: 8684 - RNA, 21 nt, RNAi
uuugccgacagagaugaaguu

SEQ ID NO: 8685 - RNA, 21 nt, RNAi
uuaaacggcugucucuacuuc

SEQ ID NO: 8686 - DNA, 21 bp, homo sapiens
aaggacatctacagctccttt

SEQ ID NO: 8687 - RNA, 21 nt, RNAi
ggacaucuacagcuccuuuuu

SEQ ID NO: 8688 - RNA, 21 nt, RNAi
uuccuguagaugucgaggaaa

SEQ ID NO: 8689 - DNA, 21 bp, homo sapiens
aactgtgaagcatatcgatgc

SEQ ID NO: 8690 - RNA, 21 nt, RNAi
cugugaagcauaucgaugcuu

SEQ ID NO: 8691 - RNA, 21 nt, RNAi
uugacacuucguauagcuacg

SEQ ID NO: 8692 - DNA, 21 bp, homo sapiens
aagcatatcgatgctgctctt

SEQ ID NO: 8693 - RNA, 21 nt, RNAi
gcauaucgaugcugcucuuuu

SEQ ID NO: 8694 - RNA, 21 nt, RNAi
uucguauagcuacgacgagaa

SEQ ID NO: 8695 - DNA, 21 bp, homo sapiens
aaacctacttctttgttgcta

SEQ ID NO: 8696 - RNA, 21 nt, RNAi
accuacuucuuuguugcuauu

SEQ ID NO: 8697 - RNA, 21 nt, RNAi
uuuggaugaagaaacaacgau

SEQ ID NO: 8698 - DNA, 21 bp, homo sapiens
aacctacttctttgttgctaa

SEQ ID NO: 8699 - RNA, 21 nt, RNAi
ccuacuucuuuguugcuaauu

SEQ ID NO: 8700 - RNA, 21 nt, RNAi
uuggaugaagaaacaacgauu

SEQ ID NO: 8701 - DNA, 21 bp, homo sapiens
aacaaatactggaggtatgat

SEQ ID NO: 8702 - RNA, 21 nt, RNAi
caaauacuggagguaugauuu

SEQ ID NO: 8703 - RNA, 21 nt, RNAi
uuguuuaugaccuccauacua

SEQ ID NO: 8704 - DNA, 21 bp, homo sapiens
aaatactggaggtatgatgaa

SEQ ID NO: 8705 - RNA, 21 nt, RNAi
auacuggagguaugaugaauu

SEQ ID NO: 8706 - RNA, 21 nt, RNAi
uuuaugaccuccauacuacuu

SEQ ID NO: 8707 - DNA, 21 bp, homo sapiens
aatactggaggtatgatgaat

SEQ ID NO: 8708 - RNA, 21 nt, RNAi
uacuggagguaugaugaauuu

SEQ ID NO: 8709 - RNA, 21 nt, RNAi
uuaugaccuccauacuacuua

SEQ ID NO: 8710 - DNA, 21 bp, homo sapiens
aaacgatctatggatccaggt

SEQ ID NO: 8711 - RNA, 21 nt, RNAi
acgaucuauggauccagguuu

SEQ ID NO: 8712 - RNA, 21 nt, RNAi
uuugcuagauaccuaggucca

SEQ ID NO: 8713 - DNA, 21 bp, homo sapiens
aacgatctatggatccaggtt

SEQ ID NO: 8714 - RNA, 21 nt, RNAi
cgaucuauggauccagguuuu

SEQ ID NO: 8715 - RNA, 21 nt, RNAi
uugcuagauaccuagguccaa

SEQ ID NO: 8716 - DNA, 21 bp, homo sapiens
aaatgatagcacatgactttc

SEQ ID NO: 8717 - RNA, 21 nt, RNAi
augauagcacaugacuuucuu

SEQ ID NO: 8718 - RNA, 21 nt, RNAi
uuuacuaucguguacugaaag

SEQ ID NO: 8719 - DNA, 21 bp, homo sapiens
aatgatagcacatgactttcc

SEQ ID NO: 8720 - RNA, 21 nt, RNAi
ugauagcacaugacuuuccuu

SEQ ID NO: 8721 - RNA, 21 nt, RNAi
uuacuaucguguacugaaagg

SEQ ID NO: 8722 - DNA, 21 bp, homo sapiens
aattggccacaaagttgatgc

SEQ ID NO: 8723 - RNA, 21 nt, RNAi
uuggccacaaaguugaugcuu

SEQ ID NO: 8724 - RNA, 21 nt, RNAi
uuaaccgguguuucaacuacg

SEQ ID NO: 8725 - DNA, 21 bp, homo sapiens
aaagctaatagctggttcaac

SEQ ID NO: 8726 - RNA, 21 nt, RNAi
agcuaauagcugguucaacuu

SEQ ID NO: 8727 - RNA, 21 nt, RNAi
uuucgauuaucgaccaaguug

SEQ ID NO: 8728 - DNA, 21 bp, homo sapiens
aagctaatagctggttcaact

SEQ ID NO: 8729 - RNA, 21 nt, RNAi
gcuaauagcugguucaacuuu

SEQ ID NO: 8730 - RNA, 21 nt, RNAi
uucgauuaucgaccaaguuga

SEQ ID NO: 8731 - DNA, 21 bp, homo sapiens
aatagctggttcaactgcagg

SEQ ID NO: 8732 - RNA, 21 nt, RNAi
uagcugguucaacugcagguu

SEQ ID NO: 8733 - RNA, 21 nt, RNAi
uuaucgaccaaguugacgucc

SEQ ID NO: 8734 - DNA, 21 bp, homo sapiens
aaacacatggtgtgagtccaa

SEQ ID NO: 8735 - RNA, 21 nt, RNAi
acacauggugugaguccaauu

SEQ ID NO: 8736 - RNA, 21 nt, RNAi
uuuguguaccacacucagguu

SEQ ID NO: 8737 - DNA, 21 bp, homo sapiens
aacacatggtgtgagtccaaa

SEQ ID NO: 8738 - RNA, 21 nt, RNAi
cacauggugugaguccaaauu

SEQ ID NO: 8739 - RNA, 21 nt, RNAi
uuguguaccacacucagguuu

SEQ ID NO: 8740 - DNA, 21 bp, homo sapiens
aacctctagagtcactgatac

SEQ ID NO: 8741 - RNA, 21 nt, RNAi
ccucuagagucacugauacuu

SEQ ID NO: 8742 - RNA, 21 nt, RNAi
uuggagaucucagugacuaug

SEQ ID NO: 8743 - DNA, 21 bp, homo sapiens
aatttagttccacaaatggtg

SEQ ID NO: 8744 - RNA, 21 nt, RNAi
uuuaguuccacaaaugguguu

SEQ ID NO: 8745 - RNA, 21 nt, RNAi
uuaaaucaagguguuuaccac

SEQ ID NO: 8746 - DNA, 21 bp, homo sapiens
aaagtcaagtttgtggcttat

SEQ ID NO: 8747 - RNA, 21 nt, RNAi
agucaaguuuguggcuuauuu

SEQ ID NO: 8748 - RNA, 21 nt, RNAi
uuucaguucaaacaccgaaua

SEQ ID NO: 8749 - DNA, 21 bp, homo sapiens
aagtcaagtttgtggcttatg

SEQ ID NO: 8750 - RNA, 21 nt, RNAi
gucaaguuuguggcuuauguu

SEQ ID NO: 8751 - RNA, 21 nt, RNAi
uucaguucaaacaccgaauac

SEQ ID NO: 8752 - DNA, 21 bp, homo sapiens
aagtttgtggcttatggattc

SEQ ID NO: 8753 - RNA, 21 nt, RNAi
guuuguggcuuauggauucuu

SEQ ID NO: 8754 - RNA, 21 nt, RNAi
uucaaacaccgaauaccuaag

SEQ ID NO: 8755 - DNA, 21 bp, homo sapiens
aaacatatcctttcaagacag

SEQ ID NO: 8756 - RNA, 21 nt, RNAi
acauauccuuucaagacaguu

SEQ ID NO: 8757 - RNA, 21 nt, RNAi
uuuguauaggaaaguucuguc

SEQ ID NO: 8758 - DNA, 21 bp, homo sapiens
aacatatcctttcaagacaga

SEQ ID NO: 8759 - RNA, 21 nt, RNAi
cauauccuuucaagacagauu

SEQ ID NO: 8760 - RNA, 21 nt, RNAi
uuguauaggaaaguucugucu

SEQ ID NO: 8761 - DNA, 21 bp, homo sapiens
aagacagaaagagacaggaga

SEQ ID NO: 8762 - RNA, 21 nt, RNAi
gacagaaagagacaggagauu

SEQ ID NO: 8763 - RNA, 21 nt, RNAi
uucugucuuucucuguccucu

SEQ ID NO: 8764 - DNA, 21 bp, homo sapiens
aaagagacaggagacatgagt

SEQ ID NO: 8765 - RNA, 21 nt, RNAi
agagacaggagacaugaguuu

SEQ ID NO: 8766 - RNA, 21 nt, RNAi
uuucucuguccucuguacuca

SEQ ID NO: 8767 - DNA, 21 bp, homo sapiens
aagagacaggagacatgagtc

SEQ ID NO: 8768 - RNA, 21 nt, RNAi
gagacaggagacaugagucuu

SEQ ID NO: 8769 - RNA, 21 nt, RNAi
uucucuguccucuguacucag

SEQ ID NO: 8770 - DNA, 21 bp, homo sapiens
aaagcagctcaagaacacatg

SEQ ID NO: 8771 - RNA, 21 nt, RNAi
agcagcucaagaacacauguu

SEQ ID NO: 8772 - RNA, 21 nt, RNAi
uuucgucgaguucuuguguac

SEQ ID NO: 8773 - DNA, 21 bp, homo sapiens
aagcagctcaagaacacatgt

SEQ ID NO: 8774 - RNA, 21 nt, RNAi
gcagcucaagaacacauguuu

SEQ ID NO: 8775 - RNA, 21 nt, RNAi
uucgucgaguucuuguguaca

SEQ ID NO: 8776 - DNA, 21 bp, homo sapiens
aagaacacatgtgcagtcact

SEQ ID NO: 8777 - RNA, 21 nt, RNAi
gaacacaugugcagucacuuu

SEQ ID NO: 8778 - RNA, 21 nt, RNAi
uucuuguguacacgucaguga

SEQ ID NO: 8779 - DNA, 21 bp, homo sapiens
aacacatgtgcagtcactggt

SEQ ID NO: 8780 - RNA, 21 nt, RNAi
cacaugugcagucacugguuu

SEQ ID NO: 8781 - RNA, 21 nt, RNAi
uuguguacacgucagugacca

SEQ ID NO: 8782 - DNA, 21 bp, homo sapiens
aaagtcaaccttgtttctact

SEQ ID NO: 8783 - RNA, 21 nt, RNAi
agucaaccuuguuucuacuuu

SEQ ID NO: 8784 - RNA, 21 nt, RNAi
uuucaguuggaacaaagauga

SEQ ID NO: 8785 - DNA, 21 bp, homo sapiens
aagtcaaccttgtttctactg

SEQ ID NO: 8786 - RNA, 21 nt, RNAi
gucaaccuuguuucuacuguu

SEQ ID NO: 8787 - RNA, 21 nt, RNAi
uucaguuggaacaaagaugac

SEQ ID NO: 8788 - DNA, 21 bp, homo sapiens
catcacttaccttgcactgag

SEQ ID NO: 8789 - RNA, 21 nt, RNAi
ucacuuaccuugcacugaguu

SEQ ID NO: 8790 - RNA, 21 nt, RNAi
uuagugaauggaacgugacuc

SEQ ID NO: 8791 - DNA, 21 bp, homo sapiens
cacttaccttgcactgagaaa

SEQ ID NO: 8792 - RNA, 21 nt, RNAi
cuuaccuugcacugagaaauu

SEQ ID NO: 8793 - RNA, 21 nt, RNAi
uugaauggaacgugacucuuu

SEQ ID NO: 8794 - DNA, 21 bp, homo sapiens
cactgagaaagaagacaaagg

SEQ ID NO: 8795 - RNA, 21 nt, RNAi
cugagaaagaagacaaagguu

SEQ ID NO: 8796 - RNA, 21 nt, RNAi
uugacucuuucuucuguuucc

SEQ ID NO: 8797 - DNA, 21 bp, homo sapiens
caaaggccagtatgcacagct

SEQ ID NO: 8798 - RNA, 21 nt, RNAi
aaggccaguaugcacagcuuu

SEQ ID NO: 8799 - RNA, 21 nt, RNAi
uuuuccggucauacgugucga

SEQ ID NO: 8800 - DNA, 21 bp, homo sapiens
cagtatgcacagctttcctcc

SEQ ID NO: 8801 - RNA, 21 nt, RNAi
guaugcacagcuuuccuccuu

SEQ ID NO: 8802 - RNA, 21 nt, RNAi
uucauacgugucgaaaggagg

SEQ ID NO: 8803 - DNA, 21 bp, homo sapiens
cacagctttcctccactgctg

SEQ ID NO: 8804 - RNA, 21 nt, RNAi
cagcuuuccuccacugcuguu

SEQ ID NO: 8805 - RNA, 21 nt, RNAi
uugucgaaaggaggugacgac

SEQ ID NO: 8806 - DNA, 21 bp, homo sapiens
cagctttcctccactgctgct

SEQ ID NO: 8807 - RNA, 21 nt, RNAi
gcuuuccuccacugcugcuuu

SEQ ID NO: 8808 - RNA, 21 nt, RNAi
uucgaaaggaggugacgacga

SEQ ID NO: 8809 - DNA, 21 bp, homo sapiens
cactgctgctgctgctgttct

SEQ ID NO: 8810 - RNA, 21 nt, RNAi
cugcugcugcugcuguucuuu

SEQ ID NO: 8811 - RNA, 21 nt, RNAi
uugacgacgacgacgacaaga

SEQ ID NO: 8812 - DNA, 21 bp, homo sapiens
cagcgactctagaaacacaag

SEQ ID NO: 8813 - RNA, 21 nt, RNAi
gcgacucuagaaacacaaguu

SEQ ID NO: 8814 - RNA, 21 nt, RNAi
uucgcugagaucuuuguguuc

SEQ ID NO: 8815 - DNA, 21 bp, homo sapiens
cacaagagcaagatgtggact

SEQ ID NO: 8816 - RNA, 21 nt, RNAi
caagagcaagauguggacuuu

SEQ ID NO: 8817 - RNA, 21 nt, RNAi
uuguucucguucuacaccuga

SEQ ID NO: 8818 - DNA, 21 bp, homo sapiens
caagagcaagatgtggactta

SEQ ID NO: 8819 - RNA, 21 nt, RNAi
agagcaagauguggacuuauu

SEQ ID NO: 8820 - RNA, 21 nt, RNAi
uuucucguucuacaccugaau

SEQ ID NO: 8821 - DNA, 21 bp, homo sapiens
caagatgtggacttagtccag

SEQ ID NO: 8822 - RNA, 21 nt, RNAi
agauguggacuuaguccaguu

SEQ ID NO: 8823 - RNA, 21 nt, RNAi
uuucuacaccugaaucagguc

SEQ ID NO: 8824 - DNA, 21 bp, homo sapiens
cagatgtggagtgcctgatgt

SEQ ID NO: 8825 - RNA, 21 nt, RNAi
gauguggagugccugauguuu

SEQ ID NO: 8826 - RNA, 21 nt, RNAi
uucuacaccucacggacuaca

SEQ ID NO: 8827 - DNA, 21 bp, homo sapiens
caaacacatctgacctacagg

SEQ ID NO: 8828 - RNA, 21 nt, RNAi
aacacaucugaccuacagguu

SEQ ID NO: 8829 - RNA, 21 nt, RNAi
uuuuguguagacuggaugucc

SEQ ID NO: 8830 - DNA, 21 bp, homo sapiens
cacatctgacctacaggattg

SEQ ID NO: 8831 - RNA, 21 nt, RNAi
caucugaccuacaggauuguu

SEQ ID NO: 8832 - RNA, 21 nt, RNAi
uuguagacuggauguccuaac

SEQ ID NO: 8833 - DNA, 21 bp, homo sapiens
catctgacctacaggattgaa

SEQ ID NO: 8834 - RNA, 21 nt, RNAi
ucugaccuacaggauugaauu

SEQ ID NO: 8835 - RNA, 21 nt, RNAi
uuagacuggauguccuaacuu

SEQ ID NO: 8836 - DNA, 21 bp, homo sapiens
cacgccagatttgccaagagc

SEQ ID NO: 8837 - RNA, 21 nt, RNAi
cgccagauuugccaagagcuu

SEQ ID NO: 8838 - RNA, 21 nt, RNAi
uugcggucuaaacgguucucg

SEQ ID NO: 8839 - DNA, 21 bp, homo sapiens
cagatttgccaagagcagatg

SEQ ID NO: 8840 - RNA, 21 nt, RNAi
gauuugccaagagcagauguu

SEQ ID NO: 8841 - RNA, 21 nt, RNAi
uucuaaacgguucucgucuac

SEQ ID NO: 8842 - DNA, 21 bp, homo sapiens
caagagcagatgtggaccatg

SEQ ID NO: 8843 - RNA, 21 nt, RNAi
agagcagauguggaccauguu

SEQ ID NO: 8844 - RNA, 21 nt, RNAi
uuucucgucuacaccugguac

SEQ ID NO: 8845 - DNA, 21 bp, homo sapiens
cagatgtggaccatgccattg

SEQ ID NO: 8846 - RNA, 21 nt, RNAi
gauguggaccaugccauuguu

SEQ ID NO: 8847 - RNA, 21 nt, RNAi
uucuacaccugguacgguaac

SEQ ID NO: 8848 - DNA, 21 bp, homo sapiens
catgccattgagaaagccttc

SEQ ID NO: 8849 - RNA, 21 nt, RNAi
ugccauugagaaagccuucuu

SEQ ID NO: 8850 - RNA, 21 nt, RNAi
uuacgguaacucuuucggaag

SEQ ID NO: 8851 - DNA, 21 bp, homo sapiens
cattgagaaagccttccaact

SEQ ID NO: 8852 - RNA, 21 nt, RNAi
uugagaaagccuuccaacuuu

SEQ ID NO: 8853 - RNA, 21 nt, RNAi
uuaacucuuucggaagguuga

SEQ ID NO: 8854 - DNA, 21 bp, homo sapiens
caactctggagtaatgtcaca

SEQ ID NO: 8855 - RNA, 21 nt, RNAi
acucuggaguaaugucacauu

SEQ ID NO: 8856 - RNA, 21 nt, RNAi
uuugagaccucauuacagugu

SEQ ID NO: 8857 - DNA, 21 bp, homo sapiens
cacacctctgacattcaccaa

SEQ ID NO: 8858 - RNA, 21 nt, RNAi
caccucugacauucaccaauu

SEQ ID NO: 8859 - RNA, 21 nt, RNAi
uuguggagacuguaagugguu

SEQ ID NO: 8860 - DNA, 21 bp, homo sapiens
cacctctgacattcaccaagg

SEQ ID NO: 8861 - RNA, 21 nt, RNAi
ccucugacauucaccaagguu

SEQ ID NO: 8862 - RNA, 21 nt, RNAi
uuggagacuguaagugguucc

SEQ ID NO: 8863 - DNA, 21 bp, homo sapiens
cattcaccaaggtctctgagg

SEQ ID NO: 8864 - RNA, 21 nt, RNAi
uucaccaaggucucugagguu

SEQ ID NO: 8865 - RNA, 21 nt, RNAi
uuaagugguuccagagacucc

SEQ ID NO: 8866 - DNA, 21 bp, homo sapiens
caagcagacatcatgatatct

SEQ ID NO: 8867 - RNA, 21 nt, RNAi
agcagacaucaugauaucuuu

SEQ ID NO: 8868 - RNA, 21 nt, RNAi
uuucgucuguaguacuauaga

SEQ ID NO: 8869 - DNA, 21 bp, homo sapiens
caacaatttcagagagtacaa

SEQ ID NO: 8870 - RNA, 21 nt, RNAi
acaauuucagagaguacaauu

SEQ ID NO: 8871 - RNA, 21 nt, RNAi
uuuguuaaagucucucauguu

SEQ ID NO: 8872 - DNA, 21 bp, homo sapiens
caatttcagagagtacaactt

SEQ ID NO: 8873 - RNA, 21 nt, RNAi
auuucagagaguacaacuuuu

SEQ ID NO: 8874 - RNA, 21 nt, RNAi
uuuaaagucucucauguugaa

SEQ ID NO: 8875 - DNA, 21 bp, homo sapiens
cagagagtacaacttacatcg

SEQ ID NO: 8876 - RNA, 21 nt, RNAi
gagaguacaacuuacaucguu

SEQ ID NO: 8877 - RNA, 21 nt, RNAi
uucucucauguugaauguagc

SEQ ID NO: 8878 - DNA, 21 bp, homo sapiens
caacttacatcgtgttgcggc

SEQ ID NO: 8879 - RNA, 21 nt, RNAi
acuuacaucguguugcggcuu

SEQ ID NO: 8880 - RNA, 21 nt, RNAi
uuugaauguagcacaacgccg

SEQ ID NO: 8881 - DNA, 21 bp, homo sapiens
catcgtgttgcggctcatgaa

SEQ ID NO: 8882 - RNA, 21 nt, RNAi
ucguguugcggcucaugaauu

SEQ ID NO: 8883 - RNA, 21 nt, RNAi
uuagcacaacgccgaguacuu

SEQ ID NO: 8884 - DNA, 21 bp, homo sapiens
catgaactcggccattctctt

SEQ ID NO: 8885 - RNA, 21 nt, RNAi
ugaacucggccauucucuuuu

SEQ ID NO: 8886 - RNA, 21 nt, RNAi
uuacuugagccgguaagagaa

SEQ ID NO: 8887 - DNA, 21 bp, homo sapiens
caccttcagtggtgatgttca

SEQ ID NO: 8888 - RNA, 21 nt, RNAi
ccuucaguggugauguucauu

SEQ ID NO: 8889 - RNA, 21 nt, RNAi
uuggaagucaccacuacaagu

SEQ ID NO: 8890 - DNA, 21 bp, homo sapiens
cagtggtgatgttcagctagc

SEQ ID NO: 8891 - RNA, 21 nt, RNAi
guggugauguucagcuagcuu

SEQ ID NO: 8892 - RNA, 21 nt, RNAi
uucaccacuacaagucgaucg

SEQ ID NO: 8893 - DNA, 21 bp, homo sapiens
cagctagctcaggatgacatt

SEQ ID NO: 8894 - RNA, 21 nt, RNAi
gcuagcucaggaugacauuuu

SEQ ID NO: 8895 - RNA, 21 nt, RNAi
uucgaucgaguccuacuguaa

SEQ ID NO: 8896 - DNA, 21 bp, homo sapiens
caggatgacattgatggcatc

SEQ ID NO: 8897 - RNA, 21 nt, RNAi
ggaugacauugauggcaucuu

SEQ ID NO: 8898 - RNA, 21 nt, RNAi
uuccuacuguaacuaccguag

SEQ ID NO: 8899 - DNA, 21 bp, homo sapiens
cattgatggcatccaagccat

SEQ ID NO: 8900 - RNA, 21 nt, RNAi
uugauggcauccaagccauuu

SEQ ID NO: 8901 - RNA, 21 nt, RNAi
uuaacuaccguagguucggua

SEQ ID NO: 8902 - DNA, 21 bp, homo sapiens
catccaagccatatatggacg

SEQ ID NO: 8903 - RNA, 21 nt, RNAi
uccaagccauauauggacguu

SEQ ID NO: 8904 - RNA, 21 nt, RNAi
uuagguucgguauauaccugc

SEQ ID NO: 8905 - DNA, 21 bp, homo sapiens
caagccatatatggacgttcc

SEQ ID NO: 8906 - RNA, 21 nt, RNAi
agccauauauggacguuccuu

SEQ ID NO: 8907 - RNA, 21 nt, RNAi
uuucgguauauaccugcaagg

SEQ ID NO: 8908 - DNA, 21 bp, homo sapiens
cagtaagctaacctttgatgc

SEQ ID NO: 8909 - RNA, 21 nt, RNAi
guaagcuaaccuuugaugcuu

SEQ ID NO: 8910 - RNA, 21 nt, RNAi
uucauucgauuggaaacuacg

SEQ ID NO: 8911 - DNA, 21 bp, homo sapiens
cagattctacatgcgcacaaa

SEQ ID NO: 8912 - RNA, 21 nt, RNAi
gauucuacaugcgcacaaauu

SEQ ID NO: 8913 - RNA, 21 nt, RNAi
uucuaagauguacgcguguuu

SEQ ID NO: 8914 - DNA, 21 bp, homo sapiens
cagaatgtgctacacggatac

SEQ ID NO: 8915 - RNA, 21 nt, RNAi
gaaugugcuacacggauacuu

SEQ ID NO: 8916 - RNA, 21 nt, RNAi
uucuuacacgaugugccuaug

SEQ ID NO: 8917 - DNA, 21 bp, homo sapiens
caaggacatctacagctcctt

SEQ ID NO: 8918 - RNA, 21 nt, RNAi
aggacaucuacagcuccuuuu

SEQ ID NO: 8919 - RNA, 21 nt, RNAi
uuuccuguagaugucgaggaa

SEQ ID NO: 8920 - DNA, 21 bp, homo sapiens
catctacagctcctttggctt

SEQ ID NO: 8921 - RNA, 21 nt, RNAi
ucuacagcuccuuuggcuuuu

SEQ ID NO: 8922 - RNA, 21 nt, RNAi
uuagaugucgaggaaaccgaa

SEQ ID NO: 8923 - DNA, 21 bp, homo sapiens
catatcgatgctgctctttct

SEQ ID NO: 8924 - RNA, 21 nt, RNAi
uaucgaugcugcucuuucuuu

SEQ ID NO: 8925 - RNA, 21 nt, RNAi
uuauagcuacgacgagaaaga

SEQ ID NO: 8926 - DNA, 21 bp, homo sapiens
caaatactggaggtatgatga

SEQ ID NO: 8927 - RNA, 21 nt, RNAi
aauacuggagguaugaugauu

SEQ ID NO: 8928 - RNA, 21 nt, RNAi
uuuuaugaccuccauacuacu

SEQ ID NO: 8929 - DNA, 21 bp, homo sapiens
cacatgactttcctggaattg

SEQ ID NO: 8930 - RNA, 21 nt, RNAi
caugacuuuccuggaauuguu

SEQ ID NO: 8931 - RNA, 21 nt, RNAi
uuguacugaaaggaccuuaac

SEQ ID NO: 8932 - DNA, 21 bp, homo sapiens
catgactttcctggaattggc

SEQ ID NO: 8933 - RNA, 21 nt, RNAi
ugacuuuccuggaauuggcuu

SEQ ID NO: 8934 - RNA, 21 nt, RNAi
uuacugaaaggaccuuaaccg

SEQ ID NO: 8935 - DNA, 21 bp, homo sapiens
catggaacaagacaatacaaa

SEQ ID NO: 8936 - RNA, 21 nt, RNAi
uggaacaagacaauacaaauu

SEQ ID NO: 8937 - RNA, 21 nt, RNAi
uuaccuuguucuguuauguuu

SEQ ID NO: 8938 - DNA, 21 bp, homo sapiens
cagaaagctaatagctggttc

SEQ ID NO: 8939 - RNA, 21 nt, RNAi
gaaagcuaauagcugguucuu

SEQ ID NO: 8940 - RNA, 21 nt, RNAi
uucuuucgauuaucgaccaag

SEQ ID NO: 8941 - DNA, 21 bp, homo sapiens
cacatggtgtgagtccaaaga

SEQ ID NO: 8942 - RNA, 21 nt, RNAi
cauggugugaguccaaagauu

SEQ ID NO: 8943 - RNA, 21 nt, RNAi
uuguaccacacucagguuucu

SEQ ID NO: 8944 - DNA, 21 bp, homo sapiens
catggtgtgagtccaaagaag

SEQ ID NO: 8945 - RNA, 21 nt, RNAi
uggugugaguccaaagaaguu

SEQ ID NO: 8946 - RNA, 21 nt, RNAi
uuaccacacucagguuucuuc

SEQ ID NO: 8947 - DNA, 21 bp, homo sapiens
caagtttgtggcttatggatt

SEQ ID NO: 8948 - RNA, 21 nt, RNAi
aguuuguggcuuauggauuuu

SEQ ID NO: 8949 - RNA, 21 nt, RNAi
uuucaaacaccgaauaccuaa

SEQ ID NO: 8950 - DNA, 21 bp, homo sapiens
catataggccagagttgcaaa

SEQ ID NO: 8951 - RNA, 21 nt, RNAi
uauaggccagaguugcaaauu

SEQ ID NO: 8952 - RNA, 21 nt, RNAi
uuauauccggucucaacguuu

SEQ ID NO: 8953 - DNA, 21 bp, homo sapiens
cagagtatgcaactctgacgt

SEQ ID NO: 8954 - RNA, 21 nt, RNAi
gaguaugcaacucugacguuu

SEQ ID NO: 8955 - RNA, 21 nt, RNAi
uucucauacguugagacugca

SEQ ID NO: 8956 - DNA, 21 bp, homo sapiens
cagagagcagcttcagtgaca

SEQ ID NO: 8957 - RNA, 21 nt, RNAi
gagagcagcuucagugacauu

SEQ ID NO: 8958 - RNA, 21 nt, RNAi
uucucucgucgaagucacugu

SEQ ID NO: 8959 - DNA, 21 bp, homo sapiens
cagcttcagtgacaaacatat

SEQ ID NO: 8960 - RNA, 21 nt, RNAi
gcuucagugacaaacauauuu

SEQ ID NO: 8961 - RNA, 21 nt, RNAi
uucgaagucacuguuuguaua

SEQ ID NO: 8962 - DNA, 21 bp, homo sapiens
cagtgacaaacatatcctttc

SEQ ID NO: 8963 - RNA, 21 nt, RNAi
gugacaaacauauccuuucuu

SEQ ID NO: 8964 - RNA, 21 nt, RNAi
uucacuguuuguauaggaaag

SEQ ID NO: 8965 - DNA, 21 bp, homo sapiens
caaacatatcctttcaagaca

SEQ ID NO: 8966 - RNA, 21 nt, RNAi
aacauauccuuucaagacauu

SEQ ID NO: 8967 - RNA, 21 nt, RNAi
uuuuguauaggaaaguucugu

SEQ ID NO: 8968 - DNA, 21 bp, homo sapiens
catatcctttcaagacagaaa

SEQ ID NO: 8969 - RNA, 21 nt, RNAi
uauccuuucaagacagaaauu

SEQ ID NO: 8970 - RNA, 21 nt, RNAi
uuauaggaaaguucugucuuu

SEQ ID NO: 8971 - DNA, 21 bp, homo sapiens
caagacagaaagagacaggag

SEQ ID NO: 8972 - RNA, 21 nt, RNAi
agacagaaagagacaggaguu

SEQ ID NO: 8973 - RNA, 21 nt, RNAi
uuucugucuuucucuguccuc

SEQ ID NO: 8974 - DNA, 21 bp, homo sapiens
cagaaagagacaggagacatg

SEQ ID NO: 8975 - RNA, 21 nt, RNAi
gaaagagacaggagacauguu

SEQ ID NO: 8976 - RNA, 21 nt, RNAi
uucuuucucuguccucuguac

SEQ ID NO: 8977 - DNA, 21 bp, homo sapiens
caggagacatgagtctttgcc

SEQ ID NO: 8978 - RNA, 21 nt, RNAi
ggagacaugagucuuugccuu

SEQ ID NO: 8979 - RNA, 21 nt, RNAi
uuccucuguacucagaaacgg

SEQ ID NO: 8980 - DNA, 21 bp, homo sapiens
catgagtctttgccggaggaa

SEQ ID NO: 8981 - RNA, 21 nt, RNAi
ugagucuuugccggaggaauu

SEQ ID NO: 8982 - RNA, 21 nt, RNAi
uuacucagaaacggccuccuu

SEQ ID NO: 8983 - DNA, 21 bp, homo sapiens
cagctcaagaacacatgtgca

SEQ ID NO: 8984 - RNA, 21 nt, RNAi
gcucaagaacacaugugcauu

SEQ ID NO: 8985 - RNA, 21 nt, RNAi
uucgaguucuuguguacacgu

SEQ ID NO: 8986 - DNA, 21 bp, homo sapiens
caagaacacatgtgcagtcac

SEQ ID NO: 8987 - RNA, 21 nt, RNAi
agaacacaugugcagucacuu

SEQ ID NO: 8988 - RNA, 21 nt, RNAi
uuucuuguguacacgucagug

SEQ ID NO: 8989 - DNA, 21 bp, homo sapiens
cacatgtgcagtcactggtgt

SEQ ID NO: 8990 - RNA, 21 nt, RNAi
caugugcagucacugguguuu

SEQ ID NO: 8991 - RNA, 21 nt, RNAi
uuguacacgucagugaccaca

SEQ ID NO: 8992 - DNA, 21 bp, homo sapiens
catgtgcagtcactggtgtca

SEQ ID NO: 8993 - RNA, 21 nt, RNAi
ugugcagucacuggugucauu

SEQ ID NO: 8994 - RNA, 21 nt, RNAi
uuacacgucagugaccacagu

SEQ ID NO: 8995 - DNA, 21 bp, homo sapiens
gatattggagtagcaagaggc

SEQ ID NO: 8996 - RNA, 21 nt, RNAi
uauuggaguagcaagaggcuu

SEQ ID NO: 8997 - RNA, 21 nt, RNAi
uuauaaccucaucguucuccg

SEQ ID NO: 8998 - DNA, 21 bp, homo sapiens
gaagccatcacttaccttgca

SEQ ID NO: 8999 - RNA, 21 nt, RNAi
agccaucacuuaccuugcauu

SEQ ID NO: 9000 - RNA, 21 nt, RNAi
uuucgguagugaauggaacgu

SEQ ID NO: 9001 - DNA, 21 bp, homo sapiens
gagaaagaagacaaaggccag

SEQ ID NO: 9002 - RNA, 21 nt, RNAi
gaaagaagacaaaggccaguu

SEQ ID NO: 9003 - RNA, 21 nt, RNAi
uucuuucuucuguuuccgguc

SEQ ID NO: 9004 - DNA, 21 bp, homo sapiens
gaaagaagacaaaggccagta

SEQ ID NO: 9005 - RNA, 21 nt, RNAi
aagaagacaaaggccaguauu

SEQ ID NO: 9006 - RNA, 21 nt, RNAi
uuuucuucuguuuccggucau

SEQ ID NO: 9007 - DNA, 21 bp, homo sapiens
gaagacaaaggccagtatgca

SEQ ID NO: 9008 - RNA, 21 nt, RNAi
agacaaaggccaguaugcauu

SEQ ID NO: 9009 - RNA, 21 nt, RNAi
uuucuguuuccggucauacgu

SEQ ID NO: 9010 - DNA, 21 bp, homo sapiens
gacaaaggccagtatgcacag

SEQ ID NO: 9011 - RNA, 21 nt, RNAi
caaaggccaguaugcacaguu

SEQ ID NO: 9012 - RNA, 21 nt, RNAi
uuguuuccggucauacguguc

SEQ ID NO: 9013 - DNA, 21 bp, homo sapiens
gactctagaaacacaagagca

SEQ ID NO: 9014 - RNA, 21 nt, RNAi
cucuagaaacacaagagcauu

SEQ ID NO: 9015 - RNA, 21 nt, RNAi
uugagaucuuuguguucucgu

SEQ ID NO: 9016 - DNA, 21 bp, homo sapiens
gaaacacaagagcaagatgtg

SEQ ID NO: 9017 - RNA, 21 nt, RNAi
aacacaagagcaagauguguu

SEQ ID NO: 9018 - RNA, 21 nt, RNAi
uuuuguguucucguucuacac

SEQ ID NO: 9019 - DNA, 21 bp, homo sapiens
gagcaagatgtggacttagtc

SEQ ID NO: 9020 - RNA, 21 nt, RNAi
gcaagauguggacuuagucuu

SEQ ID NO: 9021 - RNA, 21 nt, RNAi
uucguucuacaccugaaucag

SEQ ID NO: 9022 - DNA, 21 bp, homo sapiens
gatgtggacttagtccagaaa

SEQ ID NO: 9023 - RNA, 21 nt, RNAi
uguggacuuaguccagaaauu

SEQ ID NO: 9024 - RNA, 21 nt, RNAi
uuacaccugaaucaggucuuu

SEQ ID NO: 9025 - DNA, 21 bp, homo sapiens
gacttagtccagaaatacctg

SEQ ID NO: 9026 - RNA, 21 nt, RNAi
cuuaguccagaaauaccuguu

SEQ ID NO: 9027 - RNA, 21 nt, RNAi
uugaaucaggucuuuauggac

SEQ ID NO: 9028 - DNA, 21 bp, homo sapiens
gaagcaaatgcaggaattctt

SEQ ID NO: 9029 - RNA, 21 nt, RNAi
agcaaaugcaggaauucuuuu

SEQ ID NO: 9030 - RNA, 21 nt, RNAi
uuucguuuacguccuuaagaa

SEQ ID NO: 9031 - DNA, 21 bp, homo sapiens
gatgtggagtgcctgatgtgg

SEQ ID NO: 9032 - RNA, 21 nt, RNAi
uguggagugccugaugugguu

SEQ ID NO: 9033 - RNA, 21 nt, RNAi
uuacaccucacggacuacacc

SEQ ID NO: 9034 - DNA, 21 bp, homo sapiens
gagtgcctgatgtggctcagt

SEQ ID NO: 9035 - RNA, 21 nt, RNAi
gugccugauguggcucaguuu

SEQ ID NO: 9036 - RNA, 21 nt, RNAi
uucacggacuacaccgaguca

SEQ ID NO: 9037 - DNA, 21 bp, homo sapiens
gatgtggctcagtttgtcctc

SEQ ID NO: 9038 - RNA, 21 nt, RNAi
uguggcucaguuuguccucuu

SEQ ID NO: 9039 - RNA, 21 nt, RNAi
uuacaccgagucaaacaggag

SEQ ID NO: 9040 - DNA, 21 bp, homo sapiens
gagcaaacacatctgacctac

SEQ ID NO: 9041 - RNA, 21 nt, RNAi
gcaaacacaucugaccuacuu

SEQ ID NO: 9042 - RNA, 21 nt, RNAi
uucguuuguguagacuggaug

SEQ ID NO: 9043 - DNA, 21 bp, homo sapiens
gatttgccaagagcagatgtg

SEQ ID NO: 9044 - RNA, 21 nt, RNAi
uuugccaagagcagauguguu

SEQ ID NO: 9045 - RNA, 21 nt, RNAi
uuaaacgguucucgucuacac

SEQ ID NO: 9046 - DNA, 21 bp, homo sapiens
gagcagatgtggaccatgcca

SEQ ID NO: 9047 - RNA, 21 nt, RNAi
gcagauguggaccaugccauu

SEQ ID NO: 9048 - RNA, 21 nt, RNAi
uucgucuacaccugguacggu

SEQ ID NO: 9049 - DNA, 21 bp, homo sapiens
gatgtggaccatgccattgag

SEQ ID NO: 9050 - RNA, 21 nt, RNAi
uguggaccaugccauugaguu

SEQ ID NO: 9051 - RNA, 21 nt, RNAi
uuacaccugguacgguaacuc

SEQ ID NO: 9052 - DNA, 21 bp, homo sapiens
gaccatgccattgagaaagcc

SEQ ID NO: 9053 - RNA, 21 nt, RNAi
ccaugccauugagaaagccuu

SEQ ID NO: 9054 - RNA, 21 nt, RNAi
uugguacgguaacucuuucgg

SEQ ID NO: 9055 - DNA, 21 bp, homo sapiens
gagaaagccttccaactctgg

SEQ ID NO: 9056 - RNA, 21 nt, RNAi
gaaagccuuccaacucugguu

SEQ ID NO: 9057 - RNA, 21 nt, RNAi
uucuuucggaagguugagacc

SEQ ID NO: 9058 - DNA, 21 bp, homo sapiens
gaaagccttccaactctggag

SEQ ID NO: 9059 - RNA, 21 nt, RNAi
aagccuuccaacucuggaguu

SEQ ID NO: 9060 - RNA, 21 nt, RNAi
uuuucggaagguugagaccuc

SEQ ID NO: 9061 - DNA, 21 bp, homo sapiens
gagtaatgtcacacctctgac

SEQ ID NO: 9062 - RNA, 21 nt, RNAi
guaaugucacaccucugacuu

SEQ ID NO: 9063 - RNA, 21 nt, RNAi
uucauuacaguguggagacug

SEQ ID NO: 9064 - DNA, 21 bp, homo sapiens
gacattcaccaaggtctctga

SEQ ID NO: 9065 - RNA, 21 nt, RNAi
cauucaccaaggucucugauu

SEQ ID NO: 9066 - RNA, 21 nt, RNAi
uuguaagugguuccagagacu

SEQ ID NO: 9067 - DNA, 21 bp, homo sapiens
gatggacctggaggaaatctt

SEQ ID NO: 9068 - RNA, 21 nt, RNAi
uggaccuggaggaaaucuuuu

SEQ ID NO: 9069 - RNA, 21 nt, RNAi
uuaccuggaccuccuuuagaa

SEQ ID NO: 9070 - DNA, 21 bp, homo sapiens
gacctggaggaaatcttgctc

SEQ ID NO: 9071 - RNA, 21 nt, RNAi
ccuggaggaaaucuugcucuu

SEQ ID NO: 9072 - RNA, 21 nt, RNAi
uuggaccuccuuuagaacgag

SEQ ID NO: 9073 - DNA, 21 bp, homo sapiens
gaggaaatcttgctcatgctt

SEQ ID NO: 9074 - RNA, 21 nt, RNAi
ggaaaucuugcucaugcuuuu

SEQ ID NO: 9075 - RNA, 21 nt, RNAi
uuccuuuagaacgaguacgaa

SEQ ID NO: 9076 - DNA, 21 bp, homo sapiens
gatgaagatgaaaggtggacc

SEQ ID NO: 9077 - RNA, 21 nt, RNAi
ugaagaugaaagguggaccuu

SEQ ID NO: 9078 - RNA, 21 nt, RNAi
uuacuucuacuuuccaccugg

SEQ ID NO: 9079 - DNA, 21 bp, homo sapiens
gaagatgaaaggtggaccaac

SEQ ID NO: 9080 - RNA, 21 nt, RNAi
agaugaaagguggaccaacuu

SEQ ID NO: 9081 - RNA, 21 nt, RNAi
uuucuacuuuccaccugguug

SEQ ID NO: 9082 - DNA, 21 bp, homo sapiens
gatgaaaggtggaccaacaat

SEQ ID NO: 9083 - RNA, 21 nt, RNAi
ugaaagguggaccaacaauuu

SEQ ID NO: 9084 - RNA, 21 nt, RNAi
uuacuuuccaccugguuguua

SEQ ID NO: 9085 - DNA, 21 bp, homo sapiens
gaaaggtggaccaacaatttc

SEQ ID NO: 9086 - RNA, 21 nt, RNAi
aagguggaccaacaauuucuu

SEQ ID NO: 9087 - RNA, 21 nt, RNAi
uuuuccaccugguuguuaaag

SEQ ID NO: 9088 - DNA, 21 bp, homo sapiens
gaccaacaatttcagagagta

SEQ ID NO: 9089 - RNA, 21 nt, RNAi
ccaacaauuucagagaguauu

SEQ ID NO: 9090 - RNA, 21 nt, RNAi
uugguuguuaaagucucucau

SEQ ID NO: 9091 - DNA, 21 bp, homo sapiens
gagagtacaacttacatcgtg

SEQ ID NO: 9092 - RNA, 21 nt, RNAi
gaguacaacuuacaucguguu

SEQ ID NO: 9093 - RNA, 21 nt, RNAi
uucucauguugaauguagcac

SEQ ID NO: 9094 - DNA, 21 bp, homo sapiens
gagtacaacttacatcgtgtt

SEQ ID NO: 9095 - RNA, 21 nt, RNAi
guacaacuuacaucguguuuu

SEQ ID NO: 9096 - RNA, 21 nt, RNAi
uucauguugaauguagcacaa

SEQ ID NO: 9097 - DNA, 21 bp, homo sapiens
gaactcggccattctcttgga

SEQ ID NO: 9098 - RNA, 21 nt, RNAi
acucggccauucucuuggauu

SEQ ID NO: 9099 - RNA, 21 nt, RNAi
uuugagccgguaagagaaccu

SEQ ID NO: 9100 - DNA, 21 bp, homo sapiens
gatgttcagctagctcaggat

SEQ ID NO: 9101 - RNA, 21 nt, RNAi
uguucagcuagcucaggauuu

SEQ ID NO: 9102 - RNA, 21 nt, RNAi
uuacaagucgaucgaguccua

SEQ ID NO: 9103 - DNA, 21 bp, homo sapiens
gatgacattgatggcatccaa

SEQ ID NO: 9104 - RNA, 21 nt, RNAi
ugacauugauggcauccaauu

SEQ ID NO: 9105 - RNA, 21 nt, RNAi
uuacuguaacuaccguagguu

SEQ ID NO: 9106 - DNA, 21 bp, homo sapiens
gacattgatggcatccaagcc

SEQ ID NO: 9107 - RNA, 21 nt, RNAi
cauugauggcauccaagccuu

SEQ ID NO: 9108 - RNA, 21 nt, RNAi
uuguaacuaccguagguucgg

SEQ ID NO: 9109 - DNA, 21 bp, homo sapiens
gatggcatccaagccatatat

SEQ ID NO: 9110 - RNA, 21 nt, RNAi
uggcauccaagccauauauuu

SEQ ID NO: 9111 - RNA, 21 nt, RNAi
uuaccguagguucgguauaua

SEQ ID NO: 9112 - DNA, 21 bp, homo sapiens
gacagtaagctaacctttgat

SEQ ID NO: 9113 - RNA, 21 nt, RNAi
caguaagcuaaccuuugauuu

SEQ ID NO: 9114 - RNA, 21 nt, RNAi
uugucauucgauuggaaacua

SEQ ID NO: 9115 - DNA, 21 bp, homo sapiens
gatgctataactacgattcgg

SEQ ID NO: 9116 - RNA, 21 nt, RNAi
ugcuauaacuacgauucgguu

SEQ ID NO: 9117 - RNA, 21 nt, RNAi
uuacgauauugaugcuaagcc

SEQ ID NO: 9118 - DNA, 21 bp, homo sapiens
gagaagtgatgttctttaaag

SEQ ID NO: 9119 - RNA, 21 nt, RNAi
gaagugauguucuuuaaaguu

SEQ ID NO: 9120 - RNA, 21 nt, RNAi
uucuucacuacaagaaauuuc

SEQ ID NO: 9121 - DNA, 21 bp, homo sapiens
gaagtgatgttctttaaagac

SEQ ID NO: 9122 - RNA, 21 nt, RNAi
agugauguucuuuaaagacuu

SEQ ID NO: 9123 - RNA, 21 nt, RNAi
uuucacuacaagaaauuucug

SEQ ID NO: 9124 - DNA, 21 bp, homo sapiens
gacagattctacatgcgcaca

SEQ ID NO: 9125 - RNA, 21 nt, RNAi
cagauucuacaugcgcacauu

SEQ ID NO: 9126 - RNA, 21 nt, RNAi
uugucuaagauguacgcgugu

SEQ ID NO: 9127 - DNA, 21 bp, homo sapiens
gattctacatgcgcacaaatc

SEQ ID NO: 9128 - RNA, 21 nt, RNAi
uucuacaugcgcacaaaucuu

SEQ ID NO: 9129 - RNA, 21 nt, RNAi
uuaagauguacgcguguuuag

SEQ ID NO: 9130 - DNA, 21 bp, homo sapiens
gaagttgagctcaatttcatt

SEQ ID NO: 9131 - RNA, 21 nt, RNAi
aguugagcucaauuucauuuu

SEQ ID NO: 9132 - RNA, 21 nt, RNAi
uuucaacucgaguuaaaguaa

SEQ ID NO: 9133 - DNA, 21 bp, homo sapiens
gagctcaatttcatttctgtt

SEQ ID NO: 9134 - RNA, 21 nt, RNAi
gcucaauuucauuucuguuuu

SEQ ID NO: 9135 - RNA, 21 nt, RNAi
uucgaguuaaaguaaagacaa

SEQ ID NO: 9136 - DNA, 21 bp, homo sapiens
gaagctgcttacgaatttgcc

SEQ ID NO: 9137 - RNA, 21 nt, RNAi
agcugcuuacgaauuugccuu

SEQ ID NO: 9138 - RNA, 21 nt, RNAi
uuucgacgaaugcuuaaacgg

SEQ ID NO: 9139 - DNA, 21 bp, homo sapiens
gaatttgccgacagagatgaa

SEQ ID NO: 9140 - RNA, 21 nt, RNAi
auuugccgacagagaugaauu

SEQ ID NO: 9141 - RNA, 21 nt, RNAi
uuuaaacggcugucucuacuu

SEQ ID NO: 9142 - DNA, 21 bp, homo sapiens
gacagagatgaagtccggttt

SEQ ID NO: 9143 - RNA, 21 nt, RNAi
cagagaugaaguccgguuuuu

SEQ ID NO: 9144 - RNA, 21 nt, RNAi
uugucucuacuucaggccaaa

SEQ ID NO: 9145 - DNA, 21 bp, homo sapiens
gacagaatgtgctacacggat

SEQ ID NO: 9146 - RNA, 21 nt, RNAi
cagaaugugcuacacggauuu

SEQ ID NO: 9147 - RNA, 21 nt, RNAi
uugucuuacacgaugugccua

SEQ ID NO: 9148 - DNA, 21 bp, homo sapiens
gacatctacagctcctttggc

SEQ ID NO: 9149 - RNA, 21 nt, RNAi
caucuacagcuccuuuggcuu

SEQ ID NO: 9150 - RNA, 21 nt, RNAi
uuguagaugucgaggaaaccg

SEQ ID NO: 9151 - DNA, 21 bp, homo sapiens
gaactgtgaagcatatcgatg

SEQ ID NO: 9152 - RNA, 21 nt, RNAi
acugugaagcauaucgauguu

SEQ ID NO: 9153 - RNA, 21 nt, RNAi
uuugacacuucguauagcuac

SEQ ID NO: 9154 - DNA, 21 bp, homo sapiens
gaagcatatcgatgctgctct

SEQ ID NO: 9155 - RNA, 21 nt, RNAi
agcauaucgaugcugcucuuu

SEQ ID NO: 9156 - RNA, 21 nt, RNAi
uuucguauagcuacgacgaga

SEQ ID NO: 9157 - DNA, 21 bp, homo sapiens
gatgctgctctttctgaggaa

SEQ ID NO: 9158 - RNA, 21 nt, RNAi
ugcugcucuuucugaggaauu

SEQ ID NO: 9159 - RNA, 21 nt, RNAi
uuacgacgagaaagacuccuu

SEQ ID NO: 9160 - DNA, 21 bp, homo sapiens
gaggtatgatgaatataaacg

SEQ ID NO: 9161 - RNA, 21 nt, RNAi
gguaugaugaauauaaacguu

SEQ ID NO: 9162 - RNA, 21 nt, RNAi
uuccauacuacuuauauuugc

SEQ ID NO: 9163 - DNA, 21 bp, homo sapiens
gatctatggatccaggttatc

SEQ ID NO: 9164 - RNA, 21 nt, RNAi
ucuauggauccagguuaucuu

SEQ ID NO: 9165 - RNA, 21 nt, RNAi
uuagauaccuagguccaauag

SEQ ID NO: 9166 - DNA, 21 bp, homo sapiens
gatagcacatgactttcctgg

SEQ ID NO: 9167 - RNA, 21 nt, RNAi
uagcacaugacuuuccugguu

SEQ ID NO: 9168 - RNA, 21 nt, RNAi
uuaucguguacugaaaggacc

SEQ ID NO: 9169 - DNA, 21 bp, homo sapiens
gactttcctggaattggccac

SEQ ID NO: 9170 - RNA, 21 nt, RNAi
cuuuccuggaauuggccacuu

SEQ ID NO: 9171 - RNA, 21 nt, RNAi
uugaaaggaccuuaaccggug

SEQ ID NO: 9172 - DNA, 21 bp, homo sapiens
gaattggccacaaagttgatg

SEQ ID NO: 9173 - RNA, 21 nt, RNAi
auuggccacaaaguugauguu

SEQ ID NO: 9174 - RNA, 21 nt, RNAi
uuuaaccgguguuucaacuac

SEQ ID NO: 9175 - DNA, 21 bp, homo sapiens
gactctccagaaagctaatag

SEQ ID NO: 9176 - RNA, 21 nt, RNAi
cucuccagaaagcuaauaguu

SEQ ID NO: 9177 - RNA, 21 nt, RNAi
uugagaggucuuucgauuauc

SEQ ID NO: 9178 - DNA, 21 bp, homo sapiens
gaaagctaatagctggttcaa

SEQ ID NO: 9179 - RNA, 21 nt, RNAi
aagcuaauagcugguucaauu

SEQ ID NO: 9180 - RNA, 21 nt, RNAi
uuuucgauuaucgaccaaguu

SEQ ID NO: 9181 - DNA, 21 bp, homo sapiens
gagtcactgatacacagaata

SEQ ID NO: 9182 - RNA, 21 nt, RNAi
gucacugauacacagaauauu

SEQ ID NO: 9183 - RNA, 21 nt, RNAi
uucagugacuaugugucuuau

SEQ ID NO: 9184 - DNA, 21 bp, homo sapiens
gattcatataggccagagttg

SEQ ID NO: 9185 - RNA, 21 nt, RNAi
uucauauaggccagaguuguu

SEQ ID NO: 9186 - RNA, 21 nt, RNAi
uuaaguauauccggucucaac

SEQ ID NO: 9187 - DNA, 21 bp, homo sapiens
gagtatgcaactctgacgttg

SEQ ID NO: 9188 - RNA, 21 nt, RNAi
guaugcaacucugacguuguu

SEQ ID NO: 9189 - RNA, 21 nt, RNAi
uucauacguugagacugcaac

SEQ ID NO: 9190 - DNA, 21 bp, homo sapiens
gagagcagcttcagtgacaaa

SEQ ID NO: 9191 - RNA, 21 nt, RNAi
gagcagcuucagugacaaauu

SEQ ID NO: 9192 - RNA, 21 nt, RNAi
uucucgucgaagucacuguuu

SEQ ID NO: 9193 - DNA, 21 bp, homo sapiens
gagcagcttcagtgacaaaca

SEQ ID NO: 9194 - RNA, 21 nt, RNAi
gcagcuucagugacaaacauu

SEQ ID NO: 9195 - RNA, 21 nt, RNAi
uucgucgaagucacuguuugu

SEQ ID NO: 9196 - DNA, 21 bp, homo sapiens
gacaaacatatcctttcaaga

SEQ ID NO: 9197 - RNA, 21 nt, RNAi
caaacauauccuuucaagauu

SEQ ID NO: 9198 - RNA, 21 nt, RNAi
uuguuuguauaggaaaguucu

SEQ ID NO: 9199 - DNA, 21 bp, homo sapiens
gacagaaagagacaggagaca

SEQ ID NO: 9200 - RNA, 21 nt, RNAi
cagaaagagacaggagacauu

SEQ ID NO: 9201 - RNA, 21 nt, RNAi
uugucuuucucuguccucugu

SEQ ID NO: 9202 - DNA, 21 bp, homo sapiens
gaaagagacaggagacatgag

SEQ ID NO: 9203 - RNA, 21 nt, RNAi
aagagacaggagacaugaguu

SEQ ID NO: 9204 - RNA, 21 nt, RNAi
uuuucucuguccucuguacuc

SEQ ID NO: 9205 - DNA, 21 bp, homo sapiens
gagacaggagacatgagtctt

SEQ ID NO: 9206 - RNA, 21 nt, RNAi
gacaggagacaugagucuuuu

SEQ ID NO: 9207 - RNA, 21 nt, RNAi
uucuguccucuguacucagaa

SEQ ID NO: 9208 - DNA, 21 bp, homo sapiens
gacaggagacatgagtctttg

SEQ ID NO: 9209 - RNA, 21 nt, RNAi
caggagacaugagucuuuguu

SEQ ID NO: 9210 - RNA, 21 nt, RNAi
uuguccucuguacucagaaac

SEQ ID NO: 9211 - DNA, 21 bp, homo sapiens
gagacatgagtctttgccgga

SEQ ID NO: 9212 - RNA, 21 nt, RNAi
gacaugagucuuugccggauu

SEQ ID NO: 9213 - RNA, 21 nt, RNAi
uucuguacucagaaacggccu

SEQ ID NO: 9214 - DNA, 21 bp, homo sapiens
gacatgagtctttgccggagg

SEQ ID NO: 9215 - RNA, 21 nt, RNAi
caugagucuuugccggagguu

SEQ ID NO: 9216 - RNA, 21 nt, RNAi
uuguacucagaaacggccucc

SEQ ID NO: 9217 - DNA, 21 bp, homo sapiens
gaacacatgtgcagtcactgg

SEQ ID NO: 9218 - RNA, 21 nt, RNAi
acacaugugcagucacugguu

SEQ ID NO: 9219 - RNA, 21 nt, RNAi
uuuguguacacgucagugacc

SEQ ID NO: 9220 - DNA, 21 bp, homo sapiens
gaataaagtcaaccttgtttc

SEQ ID NO: 9221 - RNA, 21 nt, RNAi
auaaagucaaccuuguuucuu

SEQ ID NO: 9222 - RNA, 21 nt, RNAi
uuuauuucaguuggaacaaag

SEQ ID NO: 9223 - DNA, 21 bp, homo sapiens
tattggagtagcaagaggctg

SEQ ID NO: 9224 - RNA, 21 nt, RNAi
uuggaguagcaagaggcuguu

SEQ ID NO: 9225 - RNA, 21 nt, RNAi
uuaaccucaucguucuccgac

SEQ ID NO: 9226 - DNA, 21 bp, homo sapiens
taccttgcactgagaaagaag

SEQ ID NO: 9227 - RNA, 21 nt, RNAi
ccuugcacugagaaagaaguu

SEQ ID NO: 9228 - RNA, 21 nt, RNAi
uuggaacgugacucuuucuuc

SEQ ID NO: 9229 - DNA, 21 bp, homo sapiens
tatgcacagctttcctccact

SEQ ID NO: 9230 - RNA, 21 nt, RNAi
ugcacagcuuuccuccacuuu

SEQ ID NO: 9231 - RNA, 21 nt, RNAi
uuacgugucgaaaggagguga

SEQ ID NO: 9232 - DNA, 21 bp, homo sapiens
tagaaacacaagagcaagatg

SEQ ID NO: 9233 - RNA, 21 nt, RNAi
gaaacacaagagcaagauguu

SEQ ID NO: 9234 - RNA, 21 nt, RNAi
uucuuuguguucucguucuac

SEQ ID NO: 9235 - DNA, 21 bp, homo sapiens
tagtccagaaatacctggaaa

SEQ ID NO: 9236 - RNA, 21 nt, RNAi
guccagaaauaccuggaaauu

SEQ ID NO: 9237 - RNA, 21 nt, RNAi
uucaggucuuuauggaccuuu

SEQ ID NO: 9238 - DNA, 21 bp, homo sapiens
tactacaacctgaagaatgat

SEQ ID NO: 9239 - RNA, 21 nt, RNAi
cuacaaccugaagaaugauuu

SEQ ID NO: 9240 - RNA, 21 nt, RNAi
uugauguuggacuucuuacua

SEQ ID NO: 9241 - DNA, 21 bp, homo sapiens
tacacgccagatttgccaaga

SEQ ID NO: 9242 - RNA, 21 nt, RNAi
cacgccagauuugccaagauu

SEQ ID NO: 9243 - RNA, 21 nt, RNAi
uugugcggucuaaacgguucu

SEQ ID NO: 9244 - DNA, 21 bp, homo sapiens
taatgtcacacctctgacatt

SEQ ID NO: 9245 - RNA, 21 nt, RNAi
augucacaccucugacauuuu

SEQ ID NO: 9246 - RNA, 21 nt, RNAi
uuuacaguguggagacuguaa

SEQ ID NO: 9247 - DNA, 21 bp, homo sapiens
tacaacttacatcgtgttgcg

SEQ ID NO: 9248 - RNA, 21 nt, RNAi
caacuuacaucguguugcguu

SEQ ID NO: 9249 - RNA, 21 nt, RNAi
uuguugaauguagcacaacgc

SEQ ID NO: 9250 - DNA, 21 bp, homo sapiens
tacatcgtgttgcggctcatg

SEQ ID NO: 9251 - RNA, 21 nt, RNAi
caucguguugcggcucauguu

SEQ ID NO: 9252 - RNA, 21 nt, RNAi
uuguagcacaacgccgaguac

SEQ ID NO: 9253 - DNA, 21 bp, homo sapiens
tagctacaccttcagtggtga

SEQ ID NO: 9254 - RNA, 21 nt, RNAi
gcuacaccuucaguggugauu

SEQ ID NO: 9255 - RNA, 21 nt, RNAi
uucgauguggaagucaccacu

SEQ ID NO: 9256 - DNA, 21 bp, homo sapiens
tacaccttcagtggtgatgtt

SEQ ID NO: 9257 - RNA, 21 nt, RNAi
caccuucaguggugauguuuu

SEQ ID NO: 9258 - RNA, 21 nt, RNAi
uuguggaagucaccacuacaa

SEQ ID NO: 9259 - DNA, 21 bp, homo sapiens
tagctcaggatgacattgatg

SEQ ID NO: 9260 - RNA, 21 nt, RNAi
gcucaggaugacauugauguu

SEQ ID NO: 9261 - RNA, 21 nt, RNAi
uucgaguccuacuguaacuac

SEQ ID NO: 9262 - DNA, 21 bp, homo sapiens
taagctaacctttgatgctat

SEQ ID NO: 9263 - RNA, 21 nt, RNAi
agcuaaccuuugaugcuauuu

SEQ ID NO: 9264 - RNA, 21 nt, RNAi
uuucgauuggaaacuacgaua

SEQ ID NO: 9265 - DNA, 21 bp, homo sapiens
taaagacagattctacatgcg

SEQ ID NO: 9266 - RNA, 21 nt, RNAi
aagacagauucuacaugcguu

SEQ ID NO: 9267 - RNA, 21 nt, RNAi
uuuucugucuaagauguacgc

SEQ ID NO: 9268 - DNA, 21 bp, homo sapiens
tacgaatttgccgacagagat

SEQ ID NO: 9269 - RNA, 21 nt, RNAi
cgaauuugccgacagagauuu

SEQ ID NO: 9270 - RNA, 21 nt, RNAi
uugcuuaaacggcugucucua

SEQ ID NO: 9271 - DNA, 21 bp, homo sapiens
tagaactgtgaagcatatcga

SEQ ID NO: 9272 - RNA, 21 nt, RNAi
gaacugugaagcauaucgauu

SEQ ID NO: 9273 - RNA, 21 nt, RNAi
uucuugacacuucguauagcu

SEQ ID NO: 9274 - DNA, 21 bp, homo sapiens
tatcgatgctgctctttctga

SEQ ID NO: 9275 - RNA, 21 nt, RNAi
ucgaugcugcucuuucugauu

SEQ ID NO: 9276 - RNA, 21 nt, RNAi
uuagcuacgacgagaaagacu

SEQ ID NO: 9277 - DNA, 21 bp, homo sapiens
taacaaatactggaggtatga

SEQ ID NO: 9278 - RNA, 21 nt, RNAi
acaaauacuggagguaugauu

SEQ ID NO: 9279 - RNA, 21 nt, RNAi
uuuguuuaugaccuccauacu

SEQ ID NO: 9280 - DNA, 21 bp, homo sapiens
tactggaggtatgatgaatat

SEQ ID NO: 9281 - RNA, 21 nt, RNAi
cuggagguaugaugaauauuu

SEQ ID NO: 9282 - RNA, 21 nt, RNAi
uugaccuccauacuacuuaua

SEQ ID NO: 9283 - DNA, 21 bp, homo sapiens
tataaacgatctatggatcca

SEQ ID NO: 9284 - RNA, 21 nt, RNAi
uaaacgaucuauggauccauu

SEQ ID NO: 9285 - RNA, 21 nt, RNAi
uuauuugcuagauaccuaggu

SEQ ID NO: 9286 - DNA, 21 bp, homo sapiens
taaacgatctatggatccagg

SEQ ID NO: 9287 - RNA, 21 nt, RNAi
aacgaucuauggauccagguu

SEQ ID NO: 9288 - RNA, 21 nt, RNAi
uuuugcuagauaccuaggucc

SEQ ID NO: 9289 - DNA, 21 bp, homo sapiens
tagcacatgactttcctggaa

SEQ ID NO: 9290 - RNA, 21 nt, RNAi
gcacaugacuuuccuggaauu

SEQ ID NO: 9291 - RNA, 21 nt, RNAi
uucguguacugaaaggaccuu

SEQ ID NO: 9292 - DNA, 21 bp, homo sapiens
taatagctggttcaactgcag

SEQ ID NO: 9293 - RNA, 21 nt, RNAi
auagcugguucaacugcaguu

SEQ ID NO: 9294 - RNA, 21 nt, RNAi
uuuaucgaccaaguugacguc

SEQ ID NO: 9295 - DNA, 21 bp, homo sapiens
tagctggttcaactgcaggaa

SEQ ID NO: 9296 - RNA, 21 nt, RNAi
gcugguucaacugcaggaauu

SEQ ID NO: 9297 - RNA, 21 nt, RNAi
uucgaccaaguugacguccuu

SEQ ID NO: 9298 - DNA, 21 bp, homo sapiens
taacctctagagtcactgata

SEQ ID NO: 9299 - RNA, 21 nt, RNAi
accucuagagucacugauauu

SEQ ID NO: 9300 - RNA, 21 nt, RNAi
uuuggagaucucagugacuau

SEQ ID NO: 9301 - DNA, 21 bp, homo sapiens
tagagtcactgatacacagaa

SEQ ID NO: 9302 - RNA, 21 nt, RNAi
gagucacugauacacagaauu

SEQ ID NO: 9303 - RNA, 21 nt, RNAi
uucucagugacuaugugucuu

SEQ ID NO: 9304 - DNA, 21 bp, homo sapiens
tatggattcatataggccaga

SEQ ID NO: 9305 - RNA, 21 nt, RNAi
uggauucauauaggccagauu

SEQ ID NO: 9306 - RNA, 21 nt, RNAi
uuaccuaaguauauccggucu

SEQ ID NO: 9307 - DNA, 21 bp, homo sapiens
tataggccagagttgcaaaga

SEQ ID NO: 9308 - RNA, 21 nt, RNAi
uaggccagaguugcaaagauu

SEQ ID NO: 9309 - RNA, 21 nt, RNAi
uuauccggucucaacguuucu

SEQ ID NO: 9310 - DNA, 21 bp, homo sapiens
taggccagagttgcaaagatc

SEQ ID NO: 9311 - RNA, 21 nt, RNAi
ggccagaguugcaaagaucuu

SEQ ID NO: 9312 - RNA, 21 nt, RNAi
uuccggucucaacguuucuag

SEQ ID NO: 9313 - DNA, 21 bp, homo sapiens
tatgcaactctgacgttgatc

SEQ ID NO: 9314 - RNA, 21 nt, RNAi
ugcaacucugacguugaucuu

SEQ ID NO: 9315 - RNA, 21 nt, RNAi
uuacguugagacugcaacuag

SEQ ID NO: 9316 - DNA, 21 bp, homo sapiens
tatcctttcaagacagaaaga

SEQ ID NO: 9317 - RNA, 21 nt, RNAi
uccuuucaagacagaaagauu

SEQ ID NO: 9318 - RNA, 21 nt, RNAi
uuaggaaaguucugucuuucu

SEQ ID NO: 9319 - DNA, 21 bp, homo sapiens
taaagtcaaccttgtttctac

SEQ ID NO: 9320 - RNA, 21 nt, RNAi
aagucaaccuuguuucuacuu

SEQ ID NO: 9321 - RNA, 21 nt, RNAi
uuuucaguuggaacaaagaug

SEQ ID NO: 9322 - DNA, 21 bp, homo sapiens
aacacatctgacctacaggat

SEQ ID NO: 9323 - RNA, 21 nt, RNAi
cacaucugaccuacaggauuu

SEQ ID NO: 9324 - RNA, 21 nt, RNAi
uuguguagacuggauguccua

SEQ ID NO: 9325 - DNA, 21 bp, homo sapiens
aaattacacgccagatttgcc

SEQ ID NO: 9326 - RNA, 21 nt, RNAi
auuacacgccagauuugccuu

SEQ ID NO: 9327 - RNA, 21 nt, RNAi
uuuaaugugcggucuaaacgg

SEQ ID NO: 9328 - DNA, 21 bp, homo sapiens
aattacacgccagatttgcca

SEQ ID NO: 9329 - RNA, 21 nt, RNAi
uuacacgccagauuugccauu

SEQ ID NO: 9330 - RNA, 21 nt, RNAi
uuaaugugcggucuaaacggu

SEQ ID NO: 9331 - DNA, 21 bp, homo sapiens
aagcagacatcatgatatctt

SEQ ID NO: 9332 - RNA, 21 nt, RNAi
gcagacaucaugauaucuuuu

SEQ ID NO: 9333 - RNA, 21 nt, RNAi
uucgucuguaguacuauagaa

SEQ ID NO: 9334 - DNA, 21 bp, homo sapiens
aagatgaaaggtggaccaaca

SEQ ID NO: 9335 - RNA, 21 nt, RNAi
gaugaaagguggaccaacauu

SEQ ID NO: 9336 - RNA, 21 nt, RNAi
uucuacuuuccaccugguugu

SEQ ID NO: 9337 - DNA, 21 bp, homo sapiens
aacttacatcgtgttgcggct

SEQ ID NO: 9338 - RNA, 21 nt, RNAi
cuuacaucguguugcggcuuu

SEQ ID NO: 9339 - RNA, 21 nt, RNAi
uugaauguagcacaacgccga

SEQ ID NO: 9340 - DNA, 21 bp, homo sapiens
aaagcgtgtgacagtaagcta

SEQ ID NO: 9341 - RNA, 21 nt, RNAi
agcgugugacaguaagcuauu

SEQ ID NO: 9342 - RNA, 21 nt, RNAi
uuucgcacacugucauucgau

SEQ ID NO: 9343 - DNA, 21 bp, homo sapiens
aagcgtgtgacagtaagctaa

SEQ ID NO: 9344 - RNA, 21 nt, RNAi
gcgugugacaguaagcuaauu

SEQ ID NO: 9345 - RNA, 21 nt, RNAi
uucgcacacugucauucgauu

SEQ ID NO: 9346 - DNA, 21 bp, homo sapiens
aagctaacctttgatgctata

SEQ ID NO: 9347 - RNA, 21 nt, RNAi
gcuaaccuuugaugcuauauu

SEQ ID NO: 9348 - RNA, 21 nt, RNAi
uucgauuggaaacuacgauau

SEQ ID NO: 9349 - DNA, 21 bp, homo sapiens
aaagacagattctacatgcgc

SEQ ID NO: 9350 - RNA, 21 nt, RNAi
agacagauucuacaugcgcuu

SEQ ID NO: 9351 - RNA, 21 nt, RNAi
uuucugucuaagauguacgcg

SEQ ID NO: 9352 - DNA, 21 bp, homo sapiens
aagacagattctacatgcgca

SEQ ID NO: 9353 - RNA, 21 nt, RNAi
gacagauucuacaugcgcauu

SEQ ID NO: 9354 - RNA, 21 nt, RNAi
uucugucuaagauguacgcgu

SEQ ID NO: 9355 - DNA, 21 bp, homo sapiens
aagctgcttacgaatttgccg

SEQ ID NO: 9356 - RNA, 21 nt, RNAi
gcugcuuacgaauuugccguu

SEQ ID NO: 9357 - RNA, 21 nt, RNAi
uucgacgaaugcuuaaacggc

SEQ ID NO: 9358 - DNA, 21 bp, homo sapiens
aatttgccgacagagatgaag

SEQ ID NO: 9359 - RNA, 21 nt, RNAi
uuugccgacagagaugaaguu

SEQ ID NO: 9360 - RNA, 21 nt, RNAi
uuaaacggcugucucuacuuc

SEQ ID NO: 9361 - DNA, 21 bp, homo sapiens
aactgtgaagcatatcgatgc

SEQ ID NO: 9362 - RNA, 21 nt, RNAi
cugugaagcauaucgaugcuu

SEQ ID NO: 9363 - RNA, 21 nt, RNAi
uugacacuucguauagcuacg

SEQ ID NO: 9364 - DNA, 21 bp, homo sapiens
aagcatatcgatgctgctctt

SEQ ID NO: 9365 - RNA, 21 nt, RNAi
gcauaucgaugcugcucuuuu

SEQ ID NO: 9366 - RNA, 21 nt, RNAi
uucguauagcuacgacgagaa

SEQ ID NO: 9367 - DNA, 21 bp, homo sapiens
aaacgatctatggatccaggt

SEQ ID NO: 9368 - RNA, 21 nt, RNAi
acgaucuauggauccagguuu

SEQ ID NO: 9369 - RNA, 21 nt, RNAi
uuugcuagauaccuaggucca

SEQ ID NO: 9370 - DNA, 21 bp, homo sapiens
aacgatctatggatccaggtt

SEQ ID NO: 9371 - RNA, 21 nt, RNAi
cgaucuauggauccagguuuu

SEQ ID NO: 9372 - RNA, 21 nt, RNAi
uugcuagauaccuagguccaa

SEQ ID NO: 9373 - DNA, 21 bp, homo sapiens
caaacacatctgacctacagg

SEQ ID NO: 9374 - RNA, 21 nt, RNAi
aacacaucugaccuacagguu

SEQ ID NO: 9375 - RNA, 21 nt, RNAi
uuuuguguagacuggaugucc

SEQ ID NO: 9376 - DNA, 21 bp, homo sapiens
cacatctgacctacaggattg

SEQ ID NO: 9377 - RNA, 21 nt, RNAi
caucugaccuacaggauuguu

SEQ ID NO: 9378 - RNA, 21 nt, RNAi
uuguagacuggauguccuaac

SEQ ID NO: 9379 - DNA, 21 bp, homo sapiens
catctgacctacaggattgaa

SEQ ID NO: 9380 - RNA, 21 nt, RNAi
ucugaccuacaggauugaauu

SEQ ID NO: 9381 - RNA, 21 nt, RNAi
uuagacuggauguccuaacuu

SEQ ID NO: 9382 - DNA, 21 bp, homo sapiens
caagcagacatcatgatatct

SEQ ID NO: 9383 - RNA, 21 nt, RNAi
agcagacaucaugauaucuuu

SEQ ID NO: 9384 - RNA, 21 nt, RNAi
uuucgucuguaguacuauaga

SEQ ID NO: 9385 - DNA, 21 bp, homo sapiens
cagagagtacaacttacatcg

SEQ ID NO: 9386 - RNA, 21 nt, RNAi
gagaguacaacuuacaucguu

SEQ ID NO: 9387 - RNA, 21 nt, RNAi
uucucucauguugaauguagc

SEQ ID NO: 9388 - DNA, 21 bp, homo sapiens
caacttacatcgtgttgcggc

SEQ ID NO: 9389 - RNA, 21 nt, RNAi
acuuacaucguguugcggcuu

SEQ ID NO: 9390 - RNA, 21 nt, RNAi
uuugaauguagcacaacgccg

SEQ ID NO: 9391 - DNA, 21 bp, homo sapiens
catcgtgttgcggctcatgaa

SEQ ID NO: 9392 - RNA, 21 nt, RNAi
ucguguugcggcucaugaauu

SEQ ID NO: 9393 - RNA, 21 nt, RNAi
uuagcacaacgccgaguacuu

SEQ ID NO: 9394 - DNA, 21 bp, homo sapiens
catgaactcggccattctctt

SEQ ID NO: 9395 - RNA, 21 nt, RNAi
ugaacucggccauucucuuuu

SEQ ID NO: 9396 - RNA, 21 nt, RNAi
uuacuugagccgguaagagaa

SEQ ID NO: 9397 - DNA, 21 bp, homo sapiens
cagctagctcaggatgacatt

SEQ ID NO: 9398 - RNA, 21 nt, RNAi
gcuagcucaggaugacauuuu

SEQ ID NO: 9399 - RNA, 21 nt, RNAi
uucgaucgaguccuacuguaa

SEQ ID NO: 9400 - DNA, 21 bp, homo sapiens
cagattctacatgcgcacaaa

SEQ ID NO: 9401 - RNA, 21 nt, RNAi
gauucuacaugcgcacaaauu

SEQ ID NO: 9402 - RNA, 21 nt, RNAi
uucuaagauguacgcguguuu

SEQ ID NO: 9403 - DNA, 21 bp, homo sapiens
cagaatgtgctacacggatac

SEQ ID NO: 9404 - RNA, 21 nt, RNAi
gaaugugcuacacggauacuu

SEQ ID NO: 9405 - RNA, 21 nt, RNAi
uucuuacacgaugugccuaug

SEQ ID NO: 9406 - DNA, 21 bp, homo sapiens
catatcgatgctgctctttct

SEQ ID NO: 9407 - RNA, 21 nt, RNAi
uaucgaugcugcucuuucuuu

SEQ ID NO: 9408 - RNA, 21 nt, RNAi
uuauagcuacgacgagaaaga

SEQ ID NO: 9409 - DNA, 21 bp, homo sapiens
gacttagtccagaaatacctg

SEQ ID NO: 9410 - RNA, 21 nt, RNAi
cuuaguccagaaauaccuguu

SEQ ID NO: 9411 - RNA, 21 nt, RNAi
uugaaucaggucuuuauggac

SEQ ID NO: 9412 - DNA, 21 bp, homo sapiens
gatttgccaagagcagatgtg

SEQ ID NO: 9413 - RNA, 21 nt, RNAi
uuugccaagagcagauguguu

SEQ ID NO: 9414 - RNA, 21 nt, RNAi
uuaaacgguucucgucuacac

SEQ ID NO: 9415 - DNA, 21 bp, homo sapiens
gaggaaatcttgctcatgctt

SEQ ID NO: 9416 - RNA, 21 nt, RNAi
ggaaaucuugcucaugcuuuu

SEQ ID NO: 9417 - RNA, 21 nt, RNAi
uuccuuuagaacgaguacgaa

SEQ ID NO: 9418 - DNA, 21 bp, homo sapiens
gatgaaaggtggaccaacaat

SEQ ID NO: 9419 - RNA, 21 nt, RNAi
ugaaagguggaccaacaauuu

SEQ ID NO: 9420 - RNA, 21 nt, RNAi
uuacuuuccaccugguuguua

SEQ ID NO: 9421 - DNA, 21 bp, homo sapiens
gaaaggtggaccaacaatttc

SEQ ID NO: 9422 - RNA, 21 nt, RNAi
aagguggaccaacaauuucuu

SEQ ID NO: 9423 - RNA, 21 nt, RNAi
uuuuccaccugguuguuaaag

SEQ ID NO: 9424 - DNA, 21 bp, homo sapiens
gagagtacaacttacatcgtg

SEQ ID NO: 9425 - RNA, 21 nt, RNAi
gaguacaacuuacaucguguu

SEQ ID NO: 9426 - RNA, 21 nt, RNAi
uucucauguugaauguagcac

SEQ ID NO: 9427 - DNA, 21 bp, homo sapiens
gagtacaacttacatcgtgtt

SEQ ID NO: 9428 - RNA, 21 nt, RNAi
guacaacuuacaucguguuuu

SEQ ID NO: 9429 - RNA, 21 nt, RNAi
uucauguugaauguagcacaa

SEQ ID NO: 9430 - DNA, 21 bp, homo sapiens
gatggcatccaagccatatat

SEQ ID NO: 9431 - RNA, 21 nt, RNAi
uggcauccaagccauauauuu

SEQ ID NO: 9432 - RNA, 21 nt, RNAi
uuaccguagguucgguauaua

SEQ ID NO: 9433 - DNA, 21 bp, homo sapiens
gacagattctacatgcgcaca

SEQ ID NO: 9434 - RNA, 21 nt, RNAi
cagauucuacaugcgcacauu

SEQ ID NO: 9435 - RNA, 21 nt, RNAi
uugucuaagauguacgcgugu

SEQ ID NO: 9436 - DNA, 21 bp, homo sapiens
gattctacatgcgcacaaatc

SEQ ID NO: 9437 - RNA, 21 nt, RNAi
uucuacaugcgcacaaaucuu

SEQ ID NO: 9438 - RNA, 21 nt, RNAi
uuaagauguacgcguguuuag

SEQ ID NO: 9439 - DNA, 21 bp, homo sapiens
gaagctgcttacgaatttgcc

SEQ ID NO: 9440 - RNA, 21 nt, RNAi
agcugcuuacgaauuugccuu

SEQ ID NO: 9441 - RNA, 21 nt, RNAi
uuucgacgaaugcuuaaacgg

SEQ ID NO: 9442 - DNA, 21 bp, homo sapiens
gacagaatgtgctacacggat

SEQ ID NO: 9443 - RNA, 21 nt, RNAi
cagaaugugcuacacggauuu

SEQ ID NO: 9444 - RNA, 21 nt, RNAi
uugucuuacacgaugugccua

SEQ ID NO: 9445 - DNA, 21 bp, homo sapiens
gatctatggatccaggttatc

SEQ ID NO: 9446 - RNA, 21 nt, RNAi
ucuauggauccagguuaucuu

SEQ ID NO: 9447 - RNA, 21 nt, RNAi
uuagauaccuagguccaauag

SEQ ID NO: 9448 - DNA, 21 bp, homo sapiens
tacaacttacatcgtgttgcg

SEQ ID NO: 9449 - RNA, 21 nt, RNAi
caacuuacaucguguugcguu

SEQ ID NO: 9450 - RNA, 21 nt, RNAi
uuguugaauguagcacaacgc

SEQ ID NO: 9451 - DNA, 21 bp, homo sapiens
taagctaacctttgatgctat

SEQ ID NO: 9452 - RNA, 21 nt, RNAi
agcuaaccuuugaugcuauuu

SEQ ID NO: 9453 - RNA, 21 nt, RNAi
uuucgauuggaaacuacgaua

SEQ ID NO: 9454 - DNA, 21 bp, homo sapiens
tataaacgatctatggatcca

SEQ ID NO: 9455 - RNA, 21 nt, RNAi
uaaacgaucuauggauccauu

SEQ ID NO: 9456 - RNA, 21 nt, RNAi
uuauuugcuagauaccuaggu

SEQ ID NO: 9457 - DNA, 21 bp, homo sapiens
taaacgatctatggatccagg

SEQ ID NO: 9458 - RNA, 21 nt, RNAi
aacgaucuauggauccagguu

SEQ ID NO: 9459 - RNA, 21 nt, RNAi
uuuugcuagauaccuaggucc

SEQ ID NO: 9460 - DNA, 21 bp, homo sapiens
tagcacatgactttcctggaa

SEQ ID NO: 9461 - RNA, 21 nt, RNAi
gcacaugacuuuccuggaauu

SEQ ID NO: 9462 - RNA, 21 nt, RNAi
uucguguacugaaaggaccuu

SEQ ID NO: 9463 - DNA, 21 bp, homo sapiens
aagaaggtggacctagaagga

SEQ ID NO: 9464 - RNA, 21 nt, RNAi
gaagguggaccuagaaggauu

SEQ ID NO: 9465 - RNA, 21 nt, RNAi
uucuuccaccuggaucuuccu

SEQ ID NO: 9466 - DNA, 21 bp, homo sapiens
aaggtggacctagaaggaggc

SEQ ID NO: 9467 - RNA, 21 nt, RNAi
gguggaccuagaaggaggcuu

SEQ ID NO: 9468 - RNA, 21 nt, RNAi
uuccaccuggaucuuccuccg

SEQ ID NO: 9469 - DNA, 21 bp, homo sapiens
aaggaggcagcagagaaccta

SEQ ID NO: 9470 - RNA, 21 nt, RNAi
ggaggcagcagagaaccuauu

SEQ ID NO: 9471 - RNA, 21 nt, RNAi
uuccuccgucgucucuuggau

SEQ ID NO: 9472 - DNA, 21 bp, homo sapiens
aacctactgaaggtggtacag

SEQ ID NO: 9473 - RNA, 21 nt, RNAi
ccuacugaaggugguacaguu

SEQ ID NO: 9474 - RNA, 21 nt, RNAi
uuggaugacuuccaccauguc

SEQ ID NO: 9475 - DNA, 21 bp, homo sapiens
aaactactatggccttgcaaa

SEQ ID NO: 9476 - RNA, 21 nt, RNAi
acuacuauggccuugcaaauu

SEQ ID NO: 9477 - RNA, 21 nt, RNAi
uuugaugauaccggaacguuu

SEQ ID NO: 9478 - DNA, 21 bp, homo sapiens
aaaggacagtagtcttattgt

SEQ ID NO: 9479 - RNA, 21 nt, RNAi
aggacaguagucuuauuguuu

SEQ ID NO: 9480 - RNA, 21 nt, RNAi
uuuccugucaucagaauaaca

SEQ ID NO: 9481 - DNA, 21 bp, homo sapiens
aaggacagtagtcttattgtc

SEQ ID NO: 9482 - RNA, 21 nt, RNAi
ggacaguagucuuauugucuu

SEQ ID NO: 9483 - RNA, 21 nt, RNAi
uuccugucaucagaauaacag

SEQ ID NO: 9484 - DNA, 21 bp, homo sapiens
aagaaatgcagaagttcctcg

SEQ ID NO: 9485 - RNA, 21 nt, RNAi
gaaaugcagaaguuccucguu

SEQ ID NO: 9486 - RNA, 21 nt, RNAi
uucuuuacgucuucaaggagc

SEQ ID NO: 9487 - DNA, 21 bp, homo sapiens
aagctggactccaacactatg

SEQ ID NO: 9488 - RNA, 21 nt, RNAi
gcuggacuccaacacuauguu

SEQ ID NO: 9489 - RNA, 21 nt, RNAi
uucgaccugagguugugauac

SEQ ID NO: 9490 - DNA, 21 bp, homo sapiens
aacactatggagctgatgcat

SEQ ID NO: 9491 - RNA, 21 nt, RNAi
cacuauggagcugaugcauuu

SEQ ID NO: 9492 - RNA, 21 nt, RNAi
uugugauaccucgacuacgua

SEQ ID NO: 9493 - DNA, 21 bp, homo sapiens
aattatacaccggatttgcca

SEQ ID NO: 9494 - RNA, 21 nt, RNAi
uuauacaccggauuugccauu

SEQ ID NO: 9495 - RNA, 21 nt, RNAi
uuaauauguggccuaaacggu

SEQ ID NO: 9496 - DNA, 21 bp, homo sapiens
aagacagagtgtggattctgc

SEQ ID NO: 9497 - RNA, 21 nt, RNAi
gacagaguguggauucugcuu

SEQ ID NO: 9498 - RNA, 21 nt, RNAi
uucugucucacaccuaagacg

SEQ ID NO: 9499 - DNA, 21 bp, homo sapiens
aaggagaggctgacataatga

SEQ ID NO: 9500 - RNA, 21 nt, RNAi
ggagaggcugacauaaugauu

SEQ ID NO: 9501 - RNA, 21 nt, RNAi
uuccucuccgacuguauuacu

SEQ ID NO: 9502 - DNA, 21 bp, homo sapiens
aatgatctcctttgcagttgg

SEQ ID NO: 9503 - RNA, 21 nt, RNAi
ugaucuccuuugcaguugguu

SEQ ID NO: 9504 - RNA, 21 nt, RNAi
uuacuagaggaaacgucaacc

SEQ ID NO: 9505 - DNA, 21 bp, homo sapiens
aacagtcttggctcatgccta

SEQ ID NO: 9506 - RNA, 21 nt, RNAi
cagucuuggcucaugccuauu

SEQ ID NO: 9507 - RNA, 21 nt, RNAi
uugucagaaccgaguacggau

SEQ ID NO: 9508 - DNA, 21 bp, homo sapiens
aatggagatgctcactttgac

SEQ ID NO: 9509 - RNA, 21 nt, RNAi
uggagaugcucacuuugacuu

SEQ ID NO: 9510 - RNA, 21 nt, RNAi
uuaccucuacgagugaaacug

SEQ ID NO: 9511 - DNA, 21 bp, homo sapiens
aacgatggacagaggatgtca

SEQ ID NO: 9512 - RNA, 21 nt, RNAi
cgauggacagaggaugucauu

SEQ ID NO: 9513 - RNA, 21 nt, RNAi
uugcuaccugucuccuacagu

SEQ ID NO: 9514 - DNA, 21 bp, homo sapiens
aacctattcctggttgctgct

SEQ ID NO: 9515 - RNA, 21 nt, RNAi
ccuauuccugguugcugcuuu

SEQ ID NO: 9516 - RNA, 21 nt, RNAi
uuggauaaggaccaacgacga

SEQ ID NO: 9517 - DNA, 21 bp, homo sapiens
aaggctgaagctctgatgtac

SEQ ID NO: 9518 - RNA, 21 nt, RNAi
ggcugaagcucugauguacuu

SEQ ID NO: 9519 - RNA, 21 nt, RNAi
uuccgacuucgagacuacaug

SEQ ID NO: 9520 - DNA, 21 bp, homo sapiens
aagtcctccacagacttgtcc

SEQ ID NO: 9521 - RNA, 21 nt, RNAi
guccuccacagacuuguccuu

SEQ ID NO: 9522 - RNA, 21 nt, RNAi
uucaggaggugucugaacagg

SEQ ID NO: 9523 - DNA, 21 bp, homo sapiens
aagatgatgtagatggtattc

SEQ ID NO: 9524 - RNA, 21 nt, RNAi
gaugauguagaugguauucuu

SEQ ID NO: 9525 - RNA, 21 nt, RNAi
uucuacuacaucuaccauaag

SEQ ID NO: 9526 - DNA, 21 bp, homo sapiens
aagtctaactctctggaacct

SEQ ID NO: 9527 - RNA, 21 nt, RNAi
gucuaacucucuggaaccuuu

SEQ ID NO: 9528 - RNA, 21 nt, RNAi
uucagauugagagaccuugga

SEQ ID NO: 9529 - DNA, 21 bp, homo sapiens
aactctctggaacctgagaca

SEQ ID NO: 9530 - RNA, 21 nt, RNAi
cucucuggaaccugagacauu

SEQ ID NO: 9531 - RNA, 21 nt, RNAi
uugagagaccuuggacucugu

SEQ ID NO: 9532 - DNA, 21 bp, homo sapiens
aacctgagacatcaccaatgt

SEQ ID NO: 9533 - RNA, 21 nt, RNAi
ccugagacaucaccaauguuu

SEQ ID NO: 9534 - RNA, 21 nt, RNAi
uuggacucuguagugguuaca

SEQ ID NO: 9535 - DNA, 21 bp, homo sapiens
aatgtgcagctctactttgtt

SEQ ID NO: 9536 - RNA, 21 nt, RNAi
ugugcagcucuacuuuguuuu

SEQ ID NO: 9537 - RNA, 21 nt, RNAi
uuacacgucgagaugaaacaa

SEQ ID NO: 9538 - DNA, 21 bp, homo sapiens
aaatctctcaggactcctgag

SEQ ID NO: 9539 - RNA, 21 nt, RNAi
aucucucaggacuccugaguu

SEQ ID NO: 9540 - RNA, 21 nt, RNAi
uuuagagaguccugaggacuc

SEQ ID NO: 9541 - DNA, 21 bp, homo sapiens
aatctctcaggactcctgagc

SEQ ID NO: 9542 - RNA, 21 nt, RNAi
ucucucaggacuccugagcuu

SEQ ID NO: 9543 - RNA, 21 nt, RNAi
uuagagaguccugaggacucg

SEQ ID NO: 9544 - DNA, 21 bp, homo sapiens
aacatggatgctgcatatgag

SEQ ID NO: 9545 - RNA, 21 nt, RNAi
cauggaugcugcauaugaguu

SEQ ID NO: 9546 - RNA, 21 nt, RNAi
uuguaccuacgacguauacuc

SEQ ID NO: 9547 - DNA, 21 bp, homo sapiens
aaccgtgaagaagatcgatgc

SEQ ID NO: 9548 - RNA, 21 nt, RNAi
ccgugaagaagaucgaugcuu

SEQ ID NO: 9549 - RNA, 21 nt, RNAi
uuggcacuucuucuagcuacg

SEQ ID NO: 9550 - DNA, 21 bp, homo sapiens
aagaagatcgatgctgccatt

SEQ ID NO: 9551 - RNA, 21 nt, RNAi
gaagaucgaugcugccauuuu

SEQ ID NO: 9552 - RNA, 21 nt, RNAi
uucuucuagcuacgacgguaa

SEQ ID NO: 9553 - DNA, 21 bp, homo sapiens
aagatcgatgctgccatttct

SEQ ID NO: 9554 - RNA, 21 nt, RNAi
gaucgaugcugccauuucuuu

SEQ ID NO: 9555 - RNA, 21 nt, RNAi
uucuagcuacgacgguaaaga

SEQ ID NO: 9556 - DNA, 21 bp, homo sapiens
aaaggaagacctacttctttg

SEQ ID NO: 9557 - RNA, 21 nt, RNAi
aggaagaccuacuucuuuguu

SEQ ID NO: 9558 - RNA, 21 nt, RNAi
uuuccuucuggaugaagaaac

SEQ ID NO: 9559 - DNA, 21 bp, homo sapiens
aaggaagacctacttctttgt

SEQ ID NO: 9560 - RNA, 21 nt, RNAi
ggaagaccuacuucuuuguuu

SEQ ID NO: 9561 - RNA, 21 nt, RNAi
uuccuucuggaugaagaaaca

SEQ ID NO: 9562 - DNA, 21 bp, homo sapiens
aagacctacttctttgtagag

SEQ ID NO: 9563 - RNA, 21 nt, RNAi
gaccuacuucuuuguagaguu

SEQ ID NO: 9564 - RNA, 21 nt, RNAi
uucuggaugaagaaacaucuc

SEQ ID NO: 9565 - DNA, 21 bp, homo sapiens
aaatactggaggtttgatgag

SEQ ID NO: 9566 - RNA, 21 nt, RNAi
auacuggagguuugaugaguu

SEQ ID NO: 9567 - RNA, 21 nt, RNAi
uuuaugaccuccaaacuacuc

SEQ ID NO: 9568 - DNA, 21 bp, homo sapiens
aatactggaggtttgatgaga

SEQ ID NO: 9569 - RNA, 21 nt, RNAi
uacuggagguuugaugagauu

SEQ ID NO: 9570 - RNA, 21 nt, RNAi
uuaugaccuccaaacuacucu

SEQ ID NO: 9571 - DNA, 21 bp, homo sapiens
aagaaacaatccatggagcca

SEQ ID NO: 9572 - RNA, 21 nt, RNAi
gaaacaauccauggagccauu

SEQ ID NO: 9573 - RNA, 21 nt, RNAi
uucuuuguuagguaccucggu

SEQ ID NO: 9574 - DNA, 21 bp, homo sapiens
aaacaatccatggagccagga

SEQ ID NO: 9575 - RNA, 21 nt, RNAi
acaauccauggagccaggauu

SEQ ID NO: 9576 - RNA, 21 nt, RNAi
uuuguuagguaccucgguccu

SEQ ID NO: 9577 - DNA, 21 bp, homo sapiens
aacaatccatggagccaggat

SEQ ID NO: 9578 - RNA, 21 nt, RNAi
caauccauggagccaggauuu

SEQ ID NO: 9579 - RNA, 21 nt, RNAi
uuguuagguaccucgguccua

SEQ ID NO: 9580 - DNA, 21 bp, homo sapiens
aatccatggagccaggatttc

SEQ ID NO: 9581 - RNA, 21 nt, RNAi
uccauggagccaggauuucuu

SEQ ID NO: 9582 - RNA, 21 nt, RNAi
uuagguaccucgguccuaaag

SEQ ID NO: 9583 - DNA, 21 bp, homo sapiens
aagatagctgaggactttcca

SEQ ID NO: 9584 - RNA, 21 nt, RNAi
gauagcugaggacuuuccauu

SEQ ID NO: 9585 - RNA, 21 nt, RNAi
uucuaucgacuccugaaaggu

SEQ ID NO: 9586 - DNA, 21 bp, homo sapiens
aagagcaatagctggtttaat

SEQ ID NO: 9587 - RNA, 21 nt, RNAi
gagcaauagcugguuuaauuu

SEQ ID NO: 9588 - RNA, 21 nt, RNAi
uucucguuaucgaccaaauua

SEQ ID NO: 9589 - DNA, 21 bp, homo sapiens
aaagagatccaaggaaggcat

SEQ ID NO: 9590 - RNA, 21 nt, RNAi
agagauccaaggaaggcauuu

SEQ ID NO: 9591 - RNA, 21 nt, RNAi
uuucucuagguuccuuccgua

SEQ ID NO: 9592 - DNA, 21 bp, homo sapiens
aagagatccaaggaaggcatc

SEQ ID NO: 9593 - RNA, 21 nt, RNAi
gagauccaaggaaggcaucuu

SEQ ID NO: 9594 - RNA, 21 nt, RNAi
uucucuagguuccuuccguag

SEQ ID NO: 9595 - DNA, 21 bp, homo sapiens
aactgatgcttatagttcttc

SEQ ID NO: 9596 - RNA, 21 nt, RNAi
cugaugcuuauaguucuucuu

SEQ ID NO: 9597 - RNA, 21 nt, RNAi
uugacuacgaauaucaagaag

SEQ ID NO: 9598 - DNA, 21 bp, homo sapiens
aaaggaagtgctttgttcagc

SEQ ID NO: 9599 - RNA, 21 nt, RNAi
aggaagugcuuuguucagcuu

SEQ ID NO: 9600 - RNA, 21 nt, RNAi
uuuccuucacgaaacaagucg

SEQ ID NO: 9601 - DNA, 21 bp, homo sapiens
aaggaagtgctttgttcagca

SEQ ID NO: 9602 - RNA, 21 nt, RNAi
ggaagugcuuuguucagcauu

SEQ ID NO: 9603 - RNA, 21 nt, RNAi
uuccuucacgaaacaagucgu

SEQ ID NO: 9604 - DNA, 21 bp, homo sapiens
aagtgctttgttcagcatgtg

SEQ ID NO: 9605 - RNA, 21 nt, RNAi
gugcuuuguucagcauguguu

SEQ ID NO: 9606 - RNA, 21 nt, RNAi
uucacgaaacaagucguacac

SEQ ID NO: 9607 - DNA, 21 bp, homo sapiens
aaccaaacaggagctatggat

SEQ ID NO: 9608 - RNA, 21 nt, RNAi
ccaaacaggagcuauggauuu

SEQ ID NO: 9609 - RNA, 21 nt, RNAi
uugguuuguccucgauaccua

SEQ ID NO: 9610 - DNA, 21 bp, homo sapiens
aaacaggagctatggatgaca

SEQ ID NO: 9611 - RNA, 21 nt, RNAi
acaggagcuauggaugacauu

SEQ ID NO: 9612 - RNA, 21 nt, RNAi
uuuguccucgauaccuacugu

SEQ ID NO: 9613 - DNA, 21 bp, homo sapiens
aacaggagctatggatgacac

SEQ ID NO: 9614 - RNA, 21 nt, RNAi
caggagcuauggaugacacuu

SEQ ID NO: 9615 - RNA, 21 nt, RNAi
uuguccucgauaccuacugug

SEQ ID NO: 9616 - DNA, 21 bp, homo sapiens
aacgtcaagttgtcaaaggat

SEQ ID NO: 9617 - RNA, 21 nt, RNAi
cgucaaguugucaaaggauuu

SEQ ID NO: 9618 - RNA, 21 nt, RNAi
uugcaguucaacaguuuccua

SEQ ID NO: 9619 - DNA, 21 bp, homo sapiens
aagttgtcaaaggatgttcag

SEQ ID NO: 9620 - RNA, 21 nt, RNAi
guugucaaaggauguucaguu

SEQ ID NO: 9621 - RNA, 21 nt, RNAi
uucaacaguuuccuacaaguc

SEQ ID NO: 9622 - DNA, 21 bp, homo sapiens
aaaggatgttcagaagcactg

SEQ ID NO: 9623 - RNA, 21 nt, RNAi
aggauguucagaagcacuguu

SEQ ID NO: 9624 - RNA, 21 nt, RNAi
uuuccuacaagucuucgugac

SEQ ID NO: 9625 - DNA, 21 bp, homo sapiens
aaggatgttcagaagcactgt

SEQ ID NO: 9626 - RNA, 21 nt, RNAi
ggauguucagaagcacuguuu

SEQ ID NO: 9627 - RNA, 21 nt, RNAi
uuccuacaagucuucgugaca

SEQ ID NO: 9628 - DNA, 21 bp, homo sapiens
aagcactgtgtagcttacact

SEQ ID NO: 9629 - RNA, 21 nt, RNAi
gcacuguguagcuuacacuuu

SEQ ID NO: 9630 - RNA, 21 nt, RNAi
uucgugacacaucgaauguga

SEQ ID NO: 9631 - DNA, 21 bp, homo sapiens
aaacaagtgtctgaactgtgt

SEQ ID NO: 9632 - RNA, 21 nt, RNAi
acaagugucugaacuguguuu

SEQ ID NO: 9633 - RNA, 21 nt, RNAi
uuuguucacagacuugacaca

SEQ ID NO: 9634 - DNA, 21 bp, homo sapiens
aacaagtgtctgaactgtgta

SEQ ID NO: 9635 - RNA, 21 nt, RNAi
caagugucugaacuguguauu

SEQ ID NO: 9636 - RNA, 21 nt, RNAi
uuguucacagacuugacacau

SEQ ID NO: 9637 - DNA, 21 bp, homo sapiens
aagtgtctgaactgtgtagat

SEQ ID NO: 9638 - RNA, 21 nt, RNAi
gugucugaacuguguagauuu

SEQ ID NO: 9639 - RNA, 21 nt, RNAi
uucacagacuugacacaucua

SEQ ID NO: 9640 - DNA, 21 bp, homo sapiens
aactgtgtagatggtttgttt

SEQ ID NO: 9641 - RNA, 21 nt, RNAi
cuguguagaugguuuguuuuu

SEQ ID NO: 9642 - RNA, 21 nt, RNAi
uugacacaucuaccaaacaaa

SEQ ID NO: 9643 - DNA, 21 bp, homo sapiens
cagcagagaacctactgaagg

SEQ ID NO: 9644 - RNA, 21 nt, RNAi
gcagagaaccuacugaagguu

SEQ ID NO: 9645 - RNA, 21 nt, RNAi
uucgucucuuggaugacuucc

SEQ ID NO: 9646 - DNA, 21 bp, homo sapiens
cagagaacctactgaaggtgg

SEQ ID NO: 9647 - RNA, 21 nt, RNAi
gagaaccuacugaaggugguu

SEQ ID NO: 9648 - RNA, 21 nt, RNAi
uucucuuggaugacuuccacc

SEQ ID NO: 9649 - DNA, 21 bp, homo sapiens
caagaaatgcagaagttcctc

SEQ ID NO: 9650 - RNA, 21 nt, RNAi
agaaaugcagaaguuccucuu

SEQ ID NO: 9651 - RNA, 21 nt, RNAi
uuucuuuacgucuucaaggag

SEQ ID NO: 9652 - DNA, 21 bp, homo sapiens
caacactatggagctgatgca

SEQ ID NO: 9653 - RNA, 21 nt, RNAi
acacuauggagcugaugcauu

SEQ ID NO: 9654 - RNA, 21 nt, RNAi
uuugugauaccucgacuacgu

SEQ ID NO: 9655 - DNA, 21 bp, homo sapiens
cactatggagctgatgcataa

SEQ ID NO: 9656 - RNA, 21 nt, RNAi
cuauggagcugaugcauaauu

SEQ ID NO: 9657 - RNA, 21 nt, RNAi
uugauaccucgacuacguauu

SEQ ID NO: 9658 - DNA, 21 bp, homo sapiens
caggtgtggtgttcctgatgt

SEQ ID NO: 9659 - RNA, 21 nt, RNAi
ggugugguguuccugauguuu

SEQ ID NO: 9660 - RNA, 21 nt, RNAi
uuccacaccacaaggacuaca

SEQ ID NO: 9661 - DNA, 21 bp, homo sapiens
cacatcacctacaggattgtg

SEQ ID NO: 9662 - RNA, 21 nt, RNAi
caucaccuacaggauuguguu

SEQ ID NO: 9663 - RNA, 21 nt, RNAi
uuguaguggauguccuaacac

SEQ ID NO: 9664 - DNA, 21 bp, homo sapiens
catcacctacaggattgtgaa

SEQ ID NO: 9665 - RNA, 21 nt, RNAi
ucaccuacaggauugugaauu

SEQ ID NO: 9666 - RNA, 21 nt, RNAi
uuaguggauguccuaacacuu

SEQ ID NO: 9667 - DNA, 21 bp, homo sapiens
cacctacaggattgtgaatta

SEQ ID NO: 9668 - RNA, 21 nt, RNAi
ccuacaggauugugaauuauu

SEQ ID NO: 9669 - RNA, 21 nt, RNAi
uuggauguccuaacacuuaau

SEQ ID NO: 9670 - DNA, 21 bp, homo sapiens
caggattgtgaattatacacc

SEQ ID NO: 9671 - RNA, 21 nt, RNAi
ggauugugaauuauacaccuu

SEQ ID NO: 9672 - RNA, 21 nt, RNAi
uuccuaacacuuaauaugugg

SEQ ID NO: 9673 - DNA, 21 bp, homo sapiens
caccggatttgccaagacaga

SEQ ID NO: 9674 - RNA, 21 nt, RNAi
ccggauuugccaagacagauu

SEQ ID NO: 9675 - RNA, 21 nt, RNAi
uuggccuaaacgguucugucu

SEQ ID NO: 9676 - DNA, 21 bp, homo sapiens
caagacagagtgtggattctg

SEQ ID NO: 9677 - RNA, 21 nt, RNAi
agacagaguguggauucuguu

SEQ ID NO: 9678 - RNA, 21 nt, RNAi
uuucugucucacaccuaagac

SEQ ID NO: 9679 - DNA, 21 bp, homo sapiens
cagagtgtggattctgccatt

SEQ ID NO: 9680 - RNA, 21 nt, RNAi
gaguguggauucugccauuuu

SEQ ID NO: 9681 - RNA, 21 nt, RNAi
uucucacaccuaagacgguaa

SEQ ID NO: 9682 - DNA, 21 bp, homo sapiens
cactcactttctccaggatct

SEQ ID NO: 9683 - RNA, 21 nt, RNAi
cucacuuucuccaggaucuuu

SEQ ID NO: 9684 - RNA, 21 nt, RNAi
uugagugaaagagguccuaga

SEQ ID NO: 9685 - DNA, 21 bp, homo sapiens
cactttctccaggatctctga

SEQ ID NO: 9686 - RNA, 21 nt, RNAi
cuuucuccaggaucucugauu

SEQ ID NO: 9687 - RNA, 21 nt, RNAi
uugaaagagguccuagagacu

SEQ ID NO: 9688 - DNA, 21 bp, homo sapiens
caggatctctgaaggagaggc

SEQ ID NO: 9689 - RNA, 21 nt, RNAi
ggaucucugaaggagaggcuu

SEQ ID NO: 9690 - RNA, 21 nt, RNAi
uuccuagagacuuccucuccg

SEQ ID NO: 9691 - DNA, 21 bp, homo sapiens
cataatgatctcctttgcagt

SEQ ID NO: 9692 - RNA, 21 nt, RNAi
uaaugaucuccuuugcaguuu

SEQ ID NO: 9693 - RNA, 21 nt, RNAi
uuauuacuagaggaaacguca

SEQ ID NO: 9694 - DNA, 21 bp, homo sapiens
cagttggagaacatggagact

SEQ ID NO: 9695 - RNA, 21 nt, RNAi
guuggagaacauggagacuuu

SEQ ID NO: 9696 - RNA, 21 nt, RNAi
uucaaccucuuguaccucuga

SEQ ID NO: 9697 - DNA, 21 bp, homo sapiens
cagtcttggctcatgcctatg

SEQ ID NO: 9698 - RNA, 21 nt, RNAi
gucuuggcucaugccuauguu

SEQ ID NO: 9699 - RNA, 21 nt, RNAi
uucagaaccgaguacggauac

SEQ ID NO: 9700 - DNA, 21 bp, homo sapiens
catgcctatgcacctggacca

SEQ ID NO: 9701 - RNA, 21 nt, RNAi
ugccuaugcaccuggaccauu

SEQ ID NO: 9702 - RNA, 21 nt, RNAi
uuacggauacguggaccuggu

SEQ ID NO: 9703 - DNA, 21 bp, homo sapiens
cactttgacgatgatgaacga

SEQ ID NO: 9704 - RNA, 21 nt, RNAi
cuuugacgaugaugaacgauu

SEQ ID NO: 9705 - RNA, 21 nt, RNAi
uugaaacugcuacuacuugcu

SEQ ID NO: 9706 - DNA, 21 bp, homo sapiens
cagaggatgtcactggtacca

SEQ ID NO: 9707 - RNA, 21 nt, RNAi
gaggaugucacugguaccauu

SEQ ID NO: 9708 - RNA, 21 nt, RNAi
uucuccuacagugaccauggu

SEQ ID NO: 9709 - DNA, 21 bp, homo sapiens
cactggtaccaacctattcct

SEQ ID NO: 9710 - RNA, 21 nt, RNAi
cugguaccaaccuauuccuuu

SEQ ID NO: 9711 - RNA, 21 nt, RNAi
uugaccaugguuggauaagga

SEQ ID NO: 9712 - DNA, 21 bp, homo sapiens
caacctattcctggttgctgc

SEQ ID NO: 9713 - RNA, 21 nt, RNAi
accuauuccugguugcugcuu

SEQ ID NO: 9714 - RNA, 21 nt, RNAi
uuuggauaaggaccaacgacg

SEQ ID NO: 9715 - DNA, 21 bp, homo sapiens
cactcagccaaggctgaagct

SEQ ID NO: 9716 - RNA, 21 nt, RNAi
cucagccaaggcugaagcuuu

SEQ ID NO: 9717 - RNA, 21 nt, RNAi
uugagucgguuccgacuucga

SEQ ID NO: 9718 - DNA, 21 bp, homo sapiens
cagccaaggctgaagctctga

SEQ ID NO: 9719 - RNA, 21 nt, RNAi
gccaaggcugaagcucugauu

SEQ ID NO: 9720 - RNA, 21 nt, RNAi
uucgguuccgacuucgagacu

SEQ ID NO: 9721 - DNA, 21 bp, homo sapiens
caaggctgaagctctgatgta

SEQ ID NO: 9722 - RNA, 21 nt, RNAi
aggcugaagcucugauguauu

SEQ ID NO: 9723 - RNA, 21 nt, RNAi
uuuccgacuucgagacuacau

SEQ ID NO: 9724 - DNA, 21 bp, homo sapiens
cagtctacaagtcctccacag

SEQ ID NO: 9725 - RNA, 21 nt, RNAi
gucuacaaguccuccacaguu

SEQ ID NO: 9726 - RNA, 21 nt, RNAi
uucagauguucaggagguguc

SEQ ID NO: 9727 - DNA, 21 bp, homo sapiens
caagtcctccacagacttgtc

SEQ ID NO: 9728 - RNA, 21 nt, RNAi
aguccuccacagacuugucuu

SEQ ID NO: 9729 - RNA, 21 nt, RNAi
uuucaggaggugucugaacag

SEQ ID NO: 9730 - DNA, 21 bp, homo sapiens
catctctctcaagatgatgta

SEQ ID NO: 9731 - RNA, 21 nt, RNAi
ucucucucaagaugauguauu

SEQ ID NO: 9732 - RNA, 21 nt, RNAi
uuagagagaguucuacuacau

SEQ ID NO: 9733 - DNA, 21 bp, homo sapiens
caagatgatgtagatggtatt

SEQ ID NO: 9734 - RNA, 21 nt, RNAi
agaugauguagaugguauuuu

SEQ ID NO: 9735 - RNA, 21 nt, RNAi
uuucuacuacaucuaccauaa

SEQ ID NO: 9736 - DNA, 21 bp, homo sapiens
caccaagtctaactctctgga

SEQ ID NO: 9737 - RNA, 21 nt, RNAi
ccaagucuaacucucuggauu

SEQ ID NO: 9738 - RNA, 21 nt, RNAi
uugguucagauugagagaccu

SEQ ID NO: 9739 - DNA, 21 bp, homo sapiens
caagtctaactctctggaacc

SEQ ID NO: 9740 - RNA, 21 nt, RNAi
agucuaacucucuggaaccuu

SEQ ID NO: 9741 - RNA, 21 nt, RNAi
uuucagauugagagaccuugg

SEQ ID NO: 9742 - DNA, 21 bp, homo sapiens
catcaccaatgtgcagctcta

SEQ ID NO: 9743 - RNA, 21 nt, RNAi
ucaccaaugugcagcucuauu

SEQ ID NO: 9744 - RNA, 21 nt, RNAi
uuagugguuacacgucgagau

SEQ ID NO: 9745 - DNA, 21 bp, homo sapiens
caccaatgtgcagctctactt

SEQ ID NO: 9746 - RNA, 21 nt, RNAi
ccaaugugcagcucuacuuuu

SEQ ID NO: 9747 - RNA, 21 nt, RNAi
uugguuacacgucgagaugaa

SEQ ID NO: 9748 - DNA, 21 bp, homo sapiens
caatgtgcagctctactttgt

SEQ ID NO: 9749 - RNA, 21 nt, RNAi
augugcagcucuacuuuguuu

SEQ ID NO: 9750 - RNA, 21 nt, RNAi
uuuacacgucgagaugaaaca

SEQ ID NO: 9751 - DNA, 21 bp, homo sapiens
cagctctactttgttctttga

SEQ ID NO: 9752 - RNA, 21 nt, RNAi
gcucuacuuuguucuuugauu

SEQ ID NO: 9753 - RNA, 21 nt, RNAi
uucgagaugaaacaagaaacu

SEQ ID NO: 9754 - DNA, 21 bp, homo sapiens
caaatctctcaggactcctga

SEQ ID NO: 9755 - RNA, 21 nt, RNAi
aaucucucaggacuccugauu

SEQ ID NO: 9756 - RNA, 21 nt, RNAi
uuuuagagaguccugaggacu

SEQ ID NO: 9757 - DNA, 21 bp, homo sapiens
caggactcctgagcctgaatt

SEQ ID NO: 9758 - RNA, 21 nt, RNAi
ggacuccugagccugaauuuu

SEQ ID NO: 9759 - RNA, 21 nt, RNAi
uuccugaggacucggacuuaa

SEQ ID NO: 9760 - DNA, 21 bp, homo sapiens
catctcttccatccaacatgg

SEQ ID NO: 9761 - RNA, 21 nt, RNAi
ucucuuccauccaacaugguu

SEQ ID NO: 9762 - RNA, 21 nt, RNAi
uuagagaagguagguuguacc

SEQ ID NO: 9763 - DNA, 21 bp, homo sapiens
catccaacatggatgctgcat

SEQ ID NO: 9764 - RNA, 21 nt, RNAi
uccaacauggaugcugcauuu

SEQ ID NO: 9765 - RNA, 21 nt, RNAi
uuagguuguaccuacgacgua

SEQ ID NO: 9766 - DNA, 21 bp, homo sapiens
caacatggatgctgcatatga

SEQ ID NO: 9767 - RNA, 21 nt, RNAi
acauggaugcugcauaugauu

SEQ ID NO: 9768 - RNA, 21 nt, RNAi
uuuguaccuacgacguauacu

SEQ ID NO: 9769 - DNA, 21 bp, homo sapiens
catggatgctgcatatgaggt

SEQ ID NO: 9770 - RNA, 21 nt, RNAi
uggaugcugcauaugagguuu

SEQ ID NO: 9771 - RNA, 21 nt, RNAi
uuaccuacgacguauacucca

SEQ ID NO: 9772 - DNA, 21 bp, homo sapiens
catatgaggttactaacagag

SEQ ID NO: 9773 - RNA, 21 nt, RNAi
uaugagguuacuaacagaguu

SEQ ID NO: 9774 - RNA, 21 nt, RNAi
uuauacuccaaugauugucuc

SEQ ID NO: 9775 - DNA, 21 bp, homo sapiens
cacgaggagctagcaggttat

SEQ ID NO: 9776 - RNA, 21 nt, RNAi
cgaggagcuagcagguuauuu

SEQ ID NO: 9777 - RNA, 21 nt, RNAi
uugcuccucgaucguccaaua

SEQ ID NO: 9778 - DNA, 21 bp, homo sapiens
caaccgtgaagaagatcgatg

SEQ ID NO: 9779 - RNA, 21 nt, RNAi
accgugaagaagaucgauguu

SEQ ID NO: 9780 - RNA, 21 nt, RNAi
uuuggcacuucuucuagcuac

SEQ ID NO: 9781 - DNA, 21 bp, homo sapiens
caaatactggaggtttgatga

SEQ ID NO: 9782 - RNA, 21 nt, RNAi
aauacuggagguuugaugauu

SEQ ID NO: 9783 - RNA, 21 nt, RNAi
uuuuaugaccuccaaacuacu

SEQ ID NO: 9784 - DNA, 21 bp, homo sapiens
caatccatggagccaggattt

SEQ ID NO: 9785 - RNA, 21 nt, RNAi
auccauggagccaggauuuuu

SEQ ID NO: 9786 - RNA, 21 nt, RNAi
uuuagguaccucgguccuaaa

SEQ ID NO: 9787 - DNA, 21 bp, homo sapiens
caggaagatagctgaggactt

SEQ ID NO: 9788 - RNA, 21 nt, RNAi
ggaagauagcugaggacuuuu

SEQ ID NO: 9789 - RNA, 21 nt, RNAi
uuccuucuaucgacuccugaa

SEQ ID NO: 9790 - DNA, 21 bp, homo sapiens
cagtggatcttcgcagttgga

SEQ ID NO: 9791 - RNA, 21 nt, RNAi
guggaucuucgcaguuggauu

SEQ ID NO: 9792 - RNA, 21 nt, RNAi
uucaccuagaagcgucaaccu

SEQ ID NO: 9793 - DNA, 21 bp, homo sapiens
cacatattgaagagcaatagc

SEQ ID NO: 9794 - RNA, 21 nt, RNAi
cauauugaagagcaauagcuu

SEQ ID NO: 9795 - RNA, 21 nt, RNAi
uuguauaacuucucguuaucg

SEQ ID NO: 9796 - DNA, 21 bp, homo sapiens
catattgaagagcaatagctg

SEQ ID NO: 9797 - RNA, 21 nt, RNAi
uauugaagagcaauagcuguu

SEQ ID NO: 9798 - RNA, 21 nt, RNAi
uuauaacuucucguuaucgac

SEQ ID NO: 9799 - DNA, 21 bp, homo sapiens
caaggaaggcatcctgtgttt

SEQ ID NO: 9800 - RNA, 21 nt, RNAi
aggaaggcauccuguguuuuu

SEQ ID NO: 9801 - RNA, 21 nt, RNAi
uuuccuuccguaggacacaaa

SEQ ID NO: 9802 - DNA, 21 bp, homo sapiens
catctgagtctttgtgaaagg

SEQ ID NO: 9803 - RNA, 21 nt, RNAi
ucugagucuuugugaaagguu

SEQ ID NO: 9804 - RNA, 21 nt, RNAi
uuagacucagaaacacuuucc

SEQ ID NO: 9805 - DNA, 21 bp, homo sapiens
cagcatgtgctatggcagaac

SEQ ID NO: 9806 - RNA, 21 nt, RNAi
gcaugugcuauggcagaacuu

SEQ ID NO: 9807 - RNA, 21 nt, RNAi
uucguacacgauaccgucuug

SEQ ID NO: 9808 - DNA, 21 bp, homo sapiens
catgtgctatggcagaaccaa

SEQ ID NO: 9809 - RNA, 21 nt, RNAi
ugugcuauggcagaaccaauu

SEQ ID NO: 9810 - RNA, 21 nt, RNAi
uuacacgauaccgucuugguu

SEQ ID NO: 9811 - DNA, 21 bp, homo sapiens
cagaaccaaacaggagctatg

SEQ ID NO: 9812 - RNA, 21 nt, RNAi
gaaccaaacaggagcuauguu

SEQ ID NO: 9813 - RNA, 21 nt, RNAi
uucuugguuuguccucgauac

SEQ ID NO: 9814 - DNA, 21 bp, homo sapiens
caaacaggagctatggatgac

SEQ ID NO: 9815 - RNA, 21 nt, RNAi
aacaggagcuauggaugacuu

SEQ ID NO: 9816 - RNA, 21 nt, RNAi
uuuuguccucgauaccuacug

SEQ ID NO: 9817 - DNA, 21 bp, homo sapiens
caggagctatggatgacacca

SEQ ID NO: 9818 - RNA, 21 nt, RNAi
ggagcuauggaugacaccauu

SEQ ID NO: 9819 - RNA, 21 nt, RNAi
uuccucgauaccuacuguggu

SEQ ID NO: 9820 - DNA, 21 bp, homo sapiens
caccagtcaacgtcaagttgt

SEQ ID NO: 9821 - RNA, 21 nt, RNAi
ccagucaacgucaaguuguuu

SEQ ID NO: 9822 - RNA, 21 nt, RNAi
uuggucaguugcaguucaaca

SEQ ID NO: 9823 - DNA, 21 bp, homo sapiens
cagtcaacgtcaagttgtcaa

SEQ ID NO: 9824 - RNA, 21 nt, RNAi
gucaacgucaaguugucaauu

SEQ ID NO: 9825 - RNA, 21 nt, RNAi
uucaguugcaguucaacaguu

SEQ ID NO: 9826 - DNA, 21 bp, homo sapiens
caacgtcaagttgtcaaagga

SEQ ID NO: 9827 - RNA, 21 nt, RNAi
acgucaaguugucaaaggauu

SEQ ID NO: 9828 - RNA, 21 nt, RNAi
uuugcaguucaacaguuuccu

SEQ ID NO: 9829 - DNA, 21 bp, homo sapiens
caagttgtcaaaggatgttca

SEQ ID NO: 9830 - RNA, 21 nt, RNAi
aguugucaaaggauguucauu

SEQ ID NO: 9831 - RNA, 21 nt, RNAi
uuucaacaguuuccuacaagu

SEQ ID NO: 9832 - DNA, 21 bp, homo sapiens
caaaggatgttcagaagcact

SEQ ID NO: 9833 - RNA, 21 nt, RNAi
aaggauguucagaagcacuuu

SEQ ID NO: 9834 - RNA, 21 nt, RNAi
uuuuccuacaagucuucguga

SEQ ID NO: 9835 - DNA, 21 bp, homo sapiens
cagaagcactgtgtagcttac

SEQ ID NO: 9836 - RNA, 21 nt, RNAi
gaagcacuguguagcuuacuu

SEQ ID NO: 9837 - RNA, 21 nt, RNAi
uucuucgugacacaucgaaug

SEQ ID NO: 9838 - DNA, 21 bp, homo sapiens
cactgtgtagcttacactgtg

SEQ ID NO: 9839 - RNA, 21 nt, RNAi
cuguguagcuuacacuguguu

SEQ ID NO: 9840 - RNA, 21 nt, RNAi
uugacacaucgaaugugacac

SEQ ID NO: 9841 - DNA, 21 bp, homo sapiens
cacaaacaagtgtctgaactg

SEQ ID NO: 9842 - RNA, 21 nt, RNAi
caaacaagugucugaacuguu

SEQ ID NO: 9843 - RNA, 21 nt, RNAi
uuguuuguucacagacuugac

SEQ ID NO: 9844 - DNA, 21 bp, homo sapiens
caaacaagtgtctgaactgtg

SEQ ID NO: 9845 - RNA, 21 nt, RNAi
aacaagugucugaacuguguu

SEQ ID NO: 9846 - RNA, 21 nt, RNAi
uuuuguucacagacuugacac

SEQ ID NO: 9847 - DNA, 21 bp, homo sapiens
caagtgtctgaactgtgtaga

SEQ ID NO: 9848 - RNA, 21 nt, RNAi
agugucugaacuguguagauu

SEQ ID NO: 9849 - RNA, 21 nt, RNAi
uuucacagacuugacacaucu

SEQ ID NO: 9850 - DNA, 21 bp, homo sapiens
gaaggtggacctagaaggagg

SEQ ID NO: 9851 - RNA, 21 nt, RNAi
agguggaccuagaaggagguu

SEQ ID NO: 9852 - RNA, 21 nt, RNAi
uuuccaccuggaucuuccucc

SEQ ID NO: 9853 - DNA, 21 bp, homo sapiens
gacctagaaggaggcagcaga

SEQ ID NO: 9854 - RNA, 21 nt, RNAi
ccuagaaggaggcagcagauu

SEQ ID NO: 9855 - RNA, 21 nt, RNAi
uuggaucuuccuccgucgucu

SEQ ID NO: 9856 - DNA, 21 bp, homo sapiens
gaaggaggcagcagagaacct

SEQ ID NO: 9857 - RNA, 21 nt, RNAi
aggaggcagcagagaaccuuu

SEQ ID NO: 9858 - RNA, 21 nt, RNAi
uuuccuccgucgucucuugga

SEQ ID NO: 9859 - DNA, 21 bp, homo sapiens
gaggcagcagagaacctactg

SEQ ID NO: 9860 - RNA, 21 nt, RNAi
ggcagcagagaaccuacuguu

SEQ ID NO: 9861 - RNA, 21 nt, RNAi
uuccgucgucucuuggaugac

SEQ ID NO: 9862 - DNA, 21 bp, homo sapiens
gagaacctactgaaggtggta

SEQ ID NO: 9863 - RNA, 21 nt, RNAi
gaaccuacugaaggugguauu

SEQ ID NO: 9864 - RNA, 21 nt, RNAi
uucuuggaugacuuccaccau

SEQ ID NO: 9865 - DNA, 21 bp, homo sapiens
gaacctactgaaggtggtaca

SEQ ID NO: 9866 - RNA, 21 nt, RNAi
accuacugaaggugguacauu

SEQ ID NO: 9867 - RNA, 21 nt, RNAi
uuuggaugacuuccaccaugu

SEQ ID NO: 9868 - DNA, 21 bp, homo sapiens
gaaggtggtacagagctgtgg

SEQ ID NO: 9869 - RNA, 21 nt, RNAi
aggugguacagagcugugguu

SEQ ID NO: 9870 - RNA, 21 nt, RNAi
uuuccaccaugucucgacacc

SEQ ID NO: 9871 - DNA, 21 bp, homo sapiens
gatgatgatgctggtatggag

SEQ ID NO: 9872 - RNA, 21 nt, RNAi
ugaugaugcugguauggaguu

SEQ ID NO: 9873 - RNA, 21 nt, RNAi
uuacuacuacgaccauaccuc

SEQ ID NO: 9874 - DNA, 21 bp, homo sapiens
gatgatgctggtatggagctt

SEQ ID NO: 9875 - RNA, 21 nt, RNAi
ugaugcugguauggagcuuuu

SEQ ID NO: 9876 - RNA, 21 nt, RNAi
uuacuacgaccauaccucgaa

SEQ ID NO: 9877 - DNA, 21 bp, homo sapiens
gatgctggtatggagcttctg

SEQ ID NO: 9878 - RNA, 21 nt, RNAi
ugcugguauggagcuucuguu

SEQ ID NO: 9879 - RNA, 21 nt, RNAi
uuacgaccauaccucgaagac

SEQ ID NO: 9880 - DNA, 21 bp, homo sapiens
gagcttctgcagaaataccta

SEQ ID NO: 9881 - RNA, 21 nt, RNAi
gcuucugcagaaauaccuauu

SEQ ID NO: 9882 - RNA, 21 nt, RNAi
uucgaagacgucuuuauggau

SEQ ID NO: 9883 - DNA, 21 bp, homo sapiens
gacagtagtcttattgtcaaa

SEQ ID NO: 9884 - RNA, 21 nt, RNAi
caguagucuuauugucaaauu

SEQ ID NO: 9885 - RNA, 21 nt, RNAi
uugucaucagaauaacaguuu

SEQ ID NO: 9886 - DNA, 21 bp, homo sapiens
gaagctggactccaacactat

SEQ ID NO: 9887 - RNA, 21 nt, RNAi
agcuggacuccaacacuauuu

SEQ ID NO: 9888 - RNA, 21 nt, RNAi
uuucgaccugagguugugaua

SEQ ID NO: 9889 - DNA, 21 bp, homo sapiens
gactccaacactatggagctg

SEQ ID NO: 9890 - RNA, 21 nt, RNAi
cuccaacacuauggagcuguu

SEQ ID NO: 9891 - RNA, 21 nt, RNAi
uugagguugugauaccucgac

SEQ ID NO: 9892 - DNA, 21 bp, homo sapiens
gatgttggtggcttcagtacc

SEQ ID NO: 9893 - RNA, 21 nt, RNAi
uguugguggcuucaguaccuu

SEQ ID NO: 9894 - RNA, 21 nt, RNAi
uuacaaccaccgaagucaugg

SEQ ID NO: 9895 - DNA, 21 bp, homo sapiens
gattgtgaattatacaccgga

SEQ ID NO: 9896 - RNA, 21 nt, RNAi
uugugaauuauacaccggauu

SEQ ID NO: 9897 - RNA, 21 nt, RNAi
uuaacacuuaauauguggccu

SEQ ID NO: 9898 - DNA, 21 bp, homo sapiens
gaattatacaccggatttgcc

SEQ ID NO: 9899 - RNA, 21 nt, RNAi
auuauacaccggauuugccuu

SEQ ID NO: 9900 - RNA, 21 nt, RNAi
uuuaauauguggccuaaacgg

SEQ ID NO: 9901 - DNA, 21 bp, homo sapiens
gatttgccaagacagagtgtg

SEQ ID NO: 9902 - RNA, 21 nt, RNAi
uuugccaagacagaguguguu

SEQ ID NO: 9903 - RNA, 21 nt, RNAi
uuaaacgguucugucucacac

SEQ ID NO: 9904 - DNA, 21 bp, homo sapiens
gacagagtgtggattctgcca

SEQ ID NO: 9905 - RNA, 21 nt, RNAi
cagaguguggauucugccauu

SEQ ID NO: 9906 - RNA, 21 nt, RNAi
uugucucacaccuaagacggu

SEQ ID NO: 9907 - DNA, 21 bp, homo sapiens
gagtgtggattctgccattga

SEQ ID NO: 9908 - RNA, 21 nt, RNAi
guguggauucugccauugauu

SEQ ID NO: 9909 - RNA, 21 nt, RNAi
uucacaccuaagacgguaacu

SEQ ID NO: 9910 - DNA, 21 bp, homo sapiens
gatctctgaaggagaggctga

SEQ ID NO: 9911 - RNA, 21 nt, RNAi
ucucugaaggagaggcugauu

SEQ ID NO: 9912 - RNA, 21 nt, RNAi
uuagagacuuccucuccgacu

SEQ ID NO: 9913 - DNA, 21 bp, homo sapiens
gaaggagaggctgacataatg

SEQ ID NO: 9914 - RNA, 21 nt, RNAi
aggagaggcugacauaauguu

SEQ ID NO: 9915 - RNA, 21 nt, RNAi
uuuccucuccgacuguauuac

SEQ ID NO: 9916 - DNA, 21 bp, homo sapiens
gagaggctgacataatgatct

SEQ ID NO: 9917 - RNA, 21 nt, RNAi
gaggcugacauaaugaucuuu

SEQ ID NO: 9918 - RNA, 21 nt, RNAi
uucuccgacuguauuacuaga

SEQ ID NO: 9919 - DNA, 21 bp, homo sapiens
gaggctgacataatgatctcc

SEQ ID NO: 9920 - RNA, 21 nt, RNAi
ggcugacauaaugaucuccuu

SEQ ID NO: 9921 - RNA, 21 nt, RNAi
uuccgacuguauuacuagagg

SEQ ID NO: 9922 - DNA, 21 bp, homo sapiens
gacataatgatctcctttgca

SEQ ID NO: 9923 - RNA, 21 nt, RNAi
cauaaugaucuccuuugcauu

SEQ ID NO: 9924 - RNA, 21 nt, RNAi
uuguauuacuagaggaaacgu

SEQ ID NO: 9925 - DNA, 21 bp, homo sapiens
gatctcctttgcagttggaga

SEQ ID NO: 9926 - RNA, 21 nt, RNAi
ucuccuuugcaguuggagauu

SEQ ID NO: 9927 - RNA, 21 nt, RNAi
uuagaggaaacgucaaccucu

SEQ ID NO: 9928 - DNA, 21 bp, homo sapiens
gagaacatggagactttgtcc

SEQ ID NO: 9929 - RNA, 21 nt, RNAi
gaacauggagacuuuguccuu

SEQ ID NO: 9930 - RNA, 21 nt, RNAi
uucuuguaccucugaaacagg

SEQ ID NO: 9931 - DNA, 21 bp, homo sapiens
gaacagtcttggctcatgcct

SEQ ID NO: 9932 - RNA, 21 nt, RNAi
acagucuuggcucaugccuuu

SEQ ID NO: 9933 - RNA, 21 nt, RNAi
uuugucagaaccgaguacgga

SEQ ID NO: 9934 - DNA, 21 bp, homo sapiens
gattaatggagatgctcactt

SEQ ID NO: 9935 - RNA, 21 nt, RNAi
uuaauggagaugcucacuuuu

SEQ ID NO: 9936 - RNA, 21 nt, RNAi
uuaauuaccucuacgagugaa

SEQ ID NO: 9937 - DNA, 21 bp, homo sapiens
gagatgctcactttgacgatg

SEQ ID NO: 9938 - RNA, 21 nt, RNAi
gaugcucacuuugacgauguu

SEQ ID NO: 9939 - RNA, 21 nt, RNAi
uucuacgagugaaacugcuac

SEQ ID NO: 9940 - DNA, 21 bp, homo sapiens
gatgctcactttgacgatgat

SEQ ID NO: 9941 - RNA, 21 nt, RNAi
ugcucacuuugacgaugauuu

SEQ ID NO: 9942 - RNA, 21 nt, RNAi
uuacgagugaaacugcuacua

SEQ ID NO: 9943 - DNA, 21 bp, homo sapiens
gacgatgatgaacgatggaca

SEQ ID NO: 9944 - RNA, 21 nt, RNAi
cgaugaugaacgauggacauu

SEQ ID NO: 9945 - RNA, 21 nt, RNAi
uugcuacuacuugcuaccugu

SEQ ID NO: 9946 - DNA, 21 bp, homo sapiens
gatgatgaacgatggacagag

SEQ ID NO: 9947 - RNA, 21 nt, RNAi
ugaugaacgauggacagaguu

SEQ ID NO: 9948 - RNA, 21 nt, RNAi
uuacuacuugcuaccugucuc

SEQ ID NO: 9949 - DNA, 21 bp, homo sapiens
gatgaacgatggacagaggat

SEQ ID NO: 9950 - RNA, 21 nt, RNAi
ugaacgauggacagaggauuu

SEQ ID NO: 9951 - RNA, 21 nt, RNAi
uuacuugcuaccugucuccua

SEQ ID NO: 9952 - DNA, 21 bp, homo sapiens
gaacgatggacagaggatgtc

SEQ ID NO: 9953 - RNA, 21 nt, RNAi
acgauggacagaggaugucuu

SEQ ID NO: 9954 - RNA, 21 nt, RNAi
uuugcuaccugucuccuacag

SEQ ID NO: 9955 - DNA, 21 bp, homo sapiens
gatggacagaggatgtcactg

SEQ ID NO: 9956 - RNA, 21 nt, RNAi
uggacagaggaugucacuguu

SEQ ID NO: 9957 - RNA, 21 nt, RNAi
uuaccugucuccuacagugac

SEQ ID NO: 9958 - DNA, 21 bp, homo sapiens
gacagaggatgtcactggtac

SEQ ID NO: 9959 - RNA, 21 nt, RNAi
cagaggaugucacugguacuu

SEQ ID NO: 9960 - RNA, 21 nt, RNAi
uugucuccuacagugaccaug

SEQ ID NO: 9961 - DNA, 21 bp, homo sapiens
gaggatgtcactggtaccaac

SEQ ID NO: 9962 - RNA, 21 nt, RNAi
ggaugucacugguaccaacuu

SEQ ID NO: 9963 - RNA, 21 nt, RNAi
uuccuacagugaccaugguug

SEQ ID NO: 9964 - DNA, 21 bp, homo sapiens
gatgtcactggtaccaaccta

SEQ ID NO: 9965 - RNA, 21 nt, RNAi
ugucacugguaccaaccuauu

SEQ ID NO: 9966 - RNA, 21 nt, RNAi
uuacagugaccaugguuggau

SEQ ID NO: 9967 - DNA, 21 bp, homo sapiens
gactctaccactcagccaagg

SEQ ID NO: 9968 - RNA, 21 nt, RNAi
cucuaccacucagccaagguu

SEQ ID NO: 9969 - RNA, 21 nt, RNAi
uugagauggugagucgguucc

SEQ ID NO: 9970 - DNA, 21 bp, homo sapiens
gatgatgtagatggtattcag

SEQ ID NO: 9971 - RNA, 21 nt, RNAi
ugauguagaugguauucaguu

SEQ ID NO: 9972 - RNA, 21 nt, RNAi
uuacuacaucuaccauaaguc

SEQ ID NO: 9973 - DNA, 21 bp, homo sapiens
gatgtagatggtattcagtcc

SEQ ID NO: 9974 - RNA, 21 nt, RNAi
uguagaugguauucaguccuu

SEQ ID NO: 9975 - RNA, 21 nt, RNAi
uuacaucuaccauaagucagg

SEQ ID NO: 9976 - DNA, 21 bp, homo sapiens
gaacctgagacatcaccaatg

SEQ ID NO: 9977 - RNA, 21 nt, RNAi
accugagacaucaccaauguu

SEQ ID NO: 9978 - RNA, 21 nt, RNAi
uuuggacucuguagugguuac

SEQ ID NO: 9979 - DNA, 21 bp, homo sapiens
gagacatcaccaatgtgcagc

SEQ ID NO: 9980 - RNA, 21 nt, RNAi
gacaucaccaaugugcagcuu

SEQ ID NO: 9981 - RNA, 21 nt, RNAi
uucuguagugguuacacgucg

SEQ ID NO: 9982 - DNA, 21 bp, homo sapiens
gacatcaccaatgtgcagctc

SEQ ID NO: 9983 - RNA, 21 nt, RNAi
caucaccaaugugcagcucuu

SEQ ID NO: 9984 - RNA, 21 nt, RNAi
uuguagugguuacacgucgag

SEQ ID NO: 9985 - DNA, 21 bp, homo sapiens
gatgctgcatatgaggttact

SEQ ID NO: 9986 - RNA, 21 nt, RNAi
ugcugcauaugagguuacuuu

SEQ ID NO: 9987 - RNA, 21 nt, RNAi
uuacgacguauacuccaauga

SEQ ID NO: 9988 - DNA, 21 bp, homo sapiens
gaggttactaacagagacact

SEQ ID NO: 9989 - RNA, 21 nt, RNAi
gguuacuaacagagacacuuu

SEQ ID NO: 9990 - RNA, 21 nt, RNAi
uuccaaugauugucucuguga

SEQ ID NO: 9991 - DNA, 21 bp, homo sapiens
gaggagctagcaggttatcct

SEQ ID NO: 9992 - RNA, 21 nt, RNAi
ggagcuagcagguuauccuuu

SEQ ID NO: 9993 - RNA, 21 nt, RNAi
uuccucgaucguccaauagga

SEQ ID NO: 9994 - DNA, 21 bp, homo sapiens
gagctagcaggttatcctaaa

SEQ ID NO: 9995 - RNA, 21 nt, RNAi
gcuagcagguuauccuaaauu

SEQ ID NO: 9996 - RNA, 21 nt, RNAi
uucgaucguccaauaggauuu

SEQ ID NO: 9997 - DNA, 21 bp, homo sapiens
gaagaagatcgatgctgccat

SEQ ID NO: 9998 - RNA, 21 nt, RNAi
agaagaucgaugcugccauuu

SEQ ID NO: 9999 - RNA, 21 nt, RNAi
uuucuucuagcuacgacggua

SEQ ID NO: 10000 - DNA, 21 bp, homo sapiens
gaagatcgatgctgccatttc

SEQ ID NO: 10001 - RNA, 21 nt, RNAi
agaucgaugcugccauuucuu

SEQ ID NO: 10002 - RNA, 21 nt, RNAi
uuucuagcuacgacgguaaag

SEQ ID NO: 10003 - DNA, 21 bp, homo sapiens
gatcgatgctgccatttctaa

SEQ ID NO: 10004 - RNA, 21 nt, RNAi
ucgaugcugccauuucuaauu

SEQ ID NO: 10005 - RNA, 21 nt, RNAi
uuagcuacgacgguaaagauu

SEQ ID NO: 10006 - DNA, 21 bp, homo sapiens
gatgctgccatttctaataaa

SEQ ID NO: 10007 - RNA, 21 nt, RNAi
ugcugccauuucuaauaaauu

SEQ ID NO: 10008 - RNA, 21 nt, RNAi
uuacgacgguaaagauuauuu

SEQ ID NO: 10009 - DNA, 21 bp, homo sapiens
gaagacctacttctttgtaga

SEQ ID NO: 10010 - RNA, 21 nt, RNAi
agaccuacuucuuuguagauu

SEQ ID NO: 10011 - RNA, 21 nt, RNAi
uuucuggaugaagaaacaucu

SEQ ID NO: 10012 - DNA, 21 bp, homo sapiens
gacctacttctttgtagagga

SEQ ID NO: 10013 - RNA, 21 nt, RNAi
ccuacuucuuuguagaggauu

SEQ ID NO: 10014 - RNA, 21 nt, RNAi
uuggaugaagaaacaucuccu

SEQ ID NO: 10015 - DNA, 21 bp, homo sapiens
gaggacaaatactggaggttt

SEQ ID NO: 10016 - RNA, 21 nt, RNAi
ggacaaauacuggagguuuuu

SEQ ID NO: 10017 - RNA, 21 nt, RNAi
uuccuguuuaugaccuccaaa

SEQ ID NO: 10018 - DNA, 21 bp, homo sapiens
gacaaatactggaggtttgat

SEQ ID NO: 10019 - RNA, 21 nt, RNAi
caaauacuggagguuugauuu

SEQ ID NO: 10020 - RNA, 21 nt, RNAi
uuguuuaugaccuccaaacua

SEQ ID NO: 10021 - DNA, 21 bp, homo sapiens
gaggtttgatgagaagaaaca

SEQ ID NO: 10022 - RNA, 21 nt, RNAi
gguuugaugagaagaaacauu

SEQ ID NO: 10023 - RNA, 21 nt, RNAi
uuccaaacuacucuucuuugu

SEQ ID NO: 10024 - DNA, 21 bp, homo sapiens
gatgagaagaaacaatccatg

SEQ ID NO: 10025 - RNA, 21 nt, RNAi
ugagaagaaacaauccauguu

SEQ ID NO: 10026 - RNA, 21 nt, RNAi
uuacucuucuuuguuagguac

SEQ ID NO: 10027 - DNA, 21 bp, homo sapiens
gagaagaaacaatccatggag

SEQ ID NO: 10028 - RNA, 21 nt, RNAi
gaagaaacaauccauggaguu

SEQ ID NO: 10029 - RNA, 21 nt, RNAi
uucuucuuuguuagguaccuc

SEQ ID NO: 10030 - DNA, 21 bp, homo sapiens
gaagaaacaatccatggagcc

SEQ ID NO: 10031 - RNA, 21 nt, RNAi
agaaacaauccauggagccuu

SEQ ID NO: 10032 - RNA, 21 nt, RNAi
uuucuuuguuagguaccucgg

SEQ ID NO: 10033 - DNA, 21 bp, homo sapiens
gaaacaatccatggagccagg

SEQ ID NO: 10034 - RNA, 21 nt, RNAi
aacaauccauggagccagguu

SEQ ID NO: 10035 - RNA, 21 nt, RNAi
uuuuguuagguaccucggucc

SEQ ID NO: 10036 - DNA, 21 bp, homo sapiens
gaagatagctgaggactttcc

SEQ ID NO: 10037 - RNA, 21 nt, RNAi
agauagcugaggacuuuccuu

SEQ ID NO: 10038 - RNA, 21 nt, RNAi
uuucuaucgacuccugaaagg

SEQ ID NO: 10039 - DNA, 21 bp, homo sapiens
gatagctgaggactttccagg

SEQ ID NO: 10040 - RNA, 21 nt, RNAi
uagcugaggacuuuccagguu

SEQ ID NO: 10041 - RNA, 21 nt, RNAi
uuaucgacuccugaaaggucc

SEQ ID NO: 10042 - DNA, 21 bp, homo sapiens
gaggactttccaggtgttgac

SEQ ID NO: 10043 - RNA, 21 nt, RNAi
ggacuuuccagguguugacuu

SEQ ID NO: 10044 - RNA, 21 nt, RNAi
uuccugaaagguccacaacug

SEQ ID NO: 10045 - DNA, 21 bp, homo sapiens
gactttccaggtgttgactca

SEQ ID NO: 10046 - RNA, 21 nt, RNAi
cuuuccagguguugacucauu

SEQ ID NO: 10047 - RNA, 21 nt, RNAi
uugaaagguccacaacugagu

SEQ ID NO: 10048 - DNA, 21 bp, homo sapiens
gatgctgtctttgaagcattt

SEQ ID NO: 10049 - RNA, 21 nt, RNAi
ugcugucuuugaagcauuuuu

SEQ ID NO: 10050 - RNA, 21 nt, RNAi
uuacgacagaaacuucguaaa

SEQ ID NO: 10051 - DNA, 21 bp, homo sapiens
gatcttcgcagttggaatttg

SEQ ID NO: 10052 - RNA, 21 nt, RNAi
ucuucgcaguuggaauuuguu

SEQ ID NO: 10053 - RNA, 21 nt, RNAi
uuagaagcgucaaccuuaaac

SEQ ID NO: 10054 - DNA, 21 bp, homo sapiens
gaagagcaatagctggtttaa

SEQ ID NO: 10055 - RNA, 21 nt, RNAi
agagcaauagcugguuuaauu

SEQ ID NO: 10056 - RNA, 21 nt, RNAi
uuucucguuaucgaccaaauu

SEQ ID NO: 10057 - DNA, 21 bp, homo sapiens
gagcaatagctggtttaattg

SEQ ID NO: 10058 - RNA, 21 nt, RNAi
gcaauagcugguuuaauuguu

SEQ ID NO: 10059 - RNA, 21 nt, RNAi
uucguuaucgaccaaauuaac

SEQ ID NO: 10060 - DNA, 21 bp, homo sapiens
gagatccaaggaaggcatcct

SEQ ID NO: 10061 - RNA, 21 nt, RNAi
gauccaaggaaggcauccuuu

SEQ ID NO: 10062 - RNA, 21 nt, RNAi
uucuagguuccuuccguagga

SEQ ID NO: 10063 - DNA, 21 bp, homo sapiens
gatccaaggaaggcatcctgt

SEQ ID NO: 10064 - RNA, 21 nt, RNAi
uccaaggaaggcauccuguuu

SEQ ID NO: 10065 - RNA, 21 nt, RNAi
uuagguuccuuccguaggaca

SEQ ID NO: 10066 - DNA, 21 bp, homo sapiens
gatgcttatagttcttcatct

SEQ ID NO: 10067 - RNA, 21 nt, RNAi
ugcuuauaguucuucaucuuu

SEQ ID NO: 10068 - RNA, 21 nt, RNAi
uuacgaauaucaagaaguaga

SEQ ID NO: 10069 - DNA, 21 bp, homo sapiens
gagtctttgtgaaaggaagtg

SEQ ID NO: 10070 - RNA, 21 nt, RNAi
gucuuugugaaaggaaguguu

SEQ ID NO: 10071 - RNA, 21 nt, RNAi
uucagaaacacuuuccuucac

SEQ ID NO: 10072 - DNA, 21 bp, homo sapiens
gaaaggaagtgctttgttcag

SEQ ID NO: 10073 - RNA, 21 nt, RNAi
aaggaagugcuuuguucaguu

SEQ ID NO: 10074 - RNA, 21 nt, RNAi
uuuuccuucacgaaacaaguc

SEQ ID NO: 10075 - DNA, 21 bp, homo sapiens
gaagtgctttgttcagcatgt

SEQ ID NO: 10076 - RNA, 21 nt, RNAi
agugcuuuguucagcauguuu

SEQ ID NO: 10077 - RNA, 21 nt, RNAi
uuucacgaaacaagucguaca

SEQ ID NO: 10078 - DNA, 21 bp, homo sapiens
gaaccaaacaggagctatgga

SEQ ID NO: 10079 - RNA, 21 nt, RNAi
accaaacaggagcuauggauu

SEQ ID NO: 10080 - RNA, 21 nt, RNAi
uuugguuuguccucgauaccu

SEQ ID NO: 10081 - DNA, 21 bp, homo sapiens
gagctatggatgacaccagtc

SEQ ID NO: 10082 - RNA, 21 nt, RNAi
gcuauggaugacaccagucuu

SEQ ID NO: 10083 - RNA, 21 nt, RNAi
uucgauaccuacuguggucag

SEQ ID NO: 10084 - DNA, 21 bp, homo sapiens
gatgacaccagtcaacgtcaa

SEQ ID NO: 10085 - RNA, 21 nt, RNAi
ugacaccagucaacgucaauu

SEQ ID NO: 10086 - RNA, 21 nt, RNAi
uuacuguggucaguugcaguu

SEQ ID NO: 10087 - DNA, 21 bp, homo sapiens
gacaccagtcaacgtcaagtt

SEQ ID NO: 10088 - RNA, 21 nt, RNAi
caccagucaacgucaaguuuu

SEQ ID NO: 10089 - RNA, 21 nt, RNAi
uuguggucaguugcaguucaa

SEQ ID NO: 10090 - DNA, 21 bp, homo sapiens
gatgttcagaagcactgtgta

SEQ ID NO: 10091 - RNA, 21 nt, RNAi
uguucagaagcacuguguauu

SEQ ID NO: 10092 - RNA, 21 nt, RNAi
uuacaagucuucgugacacau

SEQ ID NO: 10093 - DNA, 21 bp, homo sapiens
gaagcactgtgtagcttacac

SEQ ID NO: 10094 - RNA, 21 nt, RNAi
agcacuguguagcuuacacuu

SEQ ID NO: 10095 - RNA, 21 nt, RNAi
uuucgugacacaucgaaugug

SEQ ID NO: 10096 - DNA, 21 bp, homo sapiens
gaactgtgtagatggtttgtt

SEQ ID NO: 10097 - RNA, 21 nt, RNAi
acuguguagaugguuuguuuu

SEQ ID NO: 10098 - RNA, 21 nt, RNAi
uuugacacaucuaccaaacaa

SEQ ID NO: 10099 - DNA, 21 bp, homo sapiens
taagaaggtggacctagaagg

SEQ ID NO: 10100 - RNA, 21 nt, RNAi
agaagguggaccuagaagguu

SEQ ID NO: 10101 - RNA, 21 nt, RNAi
uuucuuccaccuggaucuucc

SEQ ID NO: 10102 - DNA, 21 bp, homo sapiens
tagaaggaggcagcagagaac

SEQ ID NO: 10103 - RNA, 21 nt, RNAi
gaaggaggcagcagagaacuu

SEQ ID NO: 10104 - RNA, 21 nt, RNAi
uucuuccuccgucgucucuug

SEQ ID NO: 10105 - DNA, 21 bp, homo sapiens
tactgaaggtggtacagagct

SEQ ID NO: 10106 - RNA, 21 nt, RNAi
cugaaggugguacagagcuuu

SEQ ID NO: 10107 - RNA, 21 nt, RNAi
uugacuuccaccaugucucga

SEQ ID NO: 10108 - DNA, 21 bp, homo sapiens
tatggagcttctgcagaaata

SEQ ID NO: 10109 - RNA, 21 nt, RNAi
uggagcuucugcagaaauauu

SEQ ID NO: 10110 - RNA, 21 nt, RNAi
uuaccucgaagacgucuuuau

SEQ ID NO: 10111 - DNA, 21 bp, homo sapiens
tatggagctgatgcataagcc

SEQ ID NO: 10112 - RNA, 21 nt, RNAi
uggagcugaugcauaagccuu

SEQ ID NO: 10113 - RNA, 21 nt, RNAi
uuaccucgacuacguauucgg

SEQ ID NO: 10114 - DNA, 21 bp, homo sapiens
tatacaccggatttgccaaga

SEQ ID NO: 10115 - RNA, 21 nt, RNAi
uacaccggauuugccaagauu

SEQ ID NO: 10116 - RNA, 21 nt, RNAi
uuauguggccuaaacgguucu

SEQ ID NO: 10117 - DNA, 21 bp, homo sapiens
tacaccggatttgccaagaca

SEQ ID NO: 10118 - RNA, 21 nt, RNAi
caccggauuugccaagacauu

SEQ ID NO: 10119 - RNA, 21 nt, RNAi
uuguggccuaaacgguucugu

SEQ ID NO: 10120 - DNA, 21 bp, homo sapiens
taatgatctcctttgcagttg

SEQ ID NO: 10121 - RNA, 21 nt, RNAi
augaucuccuuugcaguuguu

SEQ ID NO: 10122 - RNA, 21 nt, RNAi
uuuacuagaggaaacgucaac

SEQ ID NO: 10123 - DNA, 21 bp, homo sapiens
taatggagatgctcactttga

SEQ ID NO: 10124 - RNA, 21 nt, RNAi
auggagaugcucacuuugauu

SEQ ID NO: 10125 - RNA, 21 nt, RNAi
uuuaccucuacgagugaaacu

SEQ ID NO: 10126 - DNA, 21 bp, homo sapiens
taccaacctattcctggttgc

SEQ ID NO: 10127 - RNA, 21 nt, RNAi
ccaaccuauuccugguugcuu

SEQ ID NO: 10128 - RNA, 21 nt, RNAi
uugguuggauaaggaccaacg

SEQ ID NO: 10129 - DNA, 21 bp, homo sapiens
tattcctggttgctgctcatg

SEQ ID NO: 10130 - RNA, 21 nt, RNAi
uuccugguugcugcucauguu

SEQ ID NO: 10131 - RNA, 21 nt, RNAi
uuaaggaccaacgacgaguac

SEQ ID NO: 10132 - DNA, 21 bp, homo sapiens
taccactcagccaaggctgaa

SEQ ID NO: 10133 - RNA, 21 nt, RNAi
ccacucagccaaggcugaauu

SEQ ID NO: 10134 - RNA, 21 nt, RNAi
uuggugagucgguuccgacuu

SEQ ID NO: 10135 - DNA, 21 bp, homo sapiens
tacaagtcctccacagacttg

SEQ ID NO: 10136 - RNA, 21 nt, RNAi
caaguccuccacagacuuguu

SEQ ID NO: 10137 - RNA, 21 nt, RNAi
uuguucaggaggugucugaac

SEQ ID NO: 10138 - DNA, 21 bp, homo sapiens
taactctctggaacctgagac

SEQ ID NO: 10139 - RNA, 21 nt, RNAi
acucucuggaaccugagacuu

SEQ ID NO: 10140 - RNA, 21 nt, RNAi
uuugagagaccuuggacucug

SEQ ID NO: 10141 - DNA, 21 bp, homo sapiens
tactttgttctttgatgcagt

SEQ ID NO: 10142 - RNA, 21 nt, RNAi
cuuuguucuuugaugcaguuu

SEQ ID NO: 10143 - RNA, 21 nt, RNAi
uugaaacaagaaacuacguca

SEQ ID NO: 10144 - DNA, 21 bp, homo sapiens
tatgaggttactaacagagac

SEQ ID NO: 10145 - RNA, 21 nt, RNAi
ugagguuacuaacagagacuu

SEQ ID NO: 10146 - RNA, 21 nt, RNAi
uuacuccaaugauugucucug

SEQ ID NO: 10147 - DNA, 21 bp, homo sapiens
tacttctttgtagaggacaaa

SEQ ID NO: 10148 - RNA, 21 nt, RNAi
cuucuuuguagaggacaaauu

SEQ ID NO: 10149 - RNA, 21 nt, RNAi
uugaagaaacaucuccuguuu

SEQ ID NO: 10150 - DNA, 21 bp, homo sapiens
tagaggacaaatactggaggt

SEQ ID NO: 10151 - RNA, 21 nt, RNAi
gaggacaaauacuggagguuu

SEQ ID NO: 10152 - RNA, 21 nt, RNAi
uucuccuguuuaugaccucca

SEQ ID NO: 10153 - DNA, 21 bp, homo sapiens
tactggaggtttgatgagaag

SEQ ID NO: 10154 - RNA, 21 nt, RNAi
cuggagguuugaugagaaguu

SEQ ID NO: 10155 - RNA, 21 nt, RNAi
uugaccuccaaacuacucuuc

SEQ ID NO: 10156 - DNA, 21 bp, homo sapiens
tagctgaggactttccaggtg

SEQ ID NO: 10157 - RNA, 21 nt, RNAi
gcugaggacuuuccagguguu

SEQ ID NO: 10158 - RNA, 21 nt, RNAi
uucgacuccugaaagguccac

SEQ ID NO: 10159 - DNA, 21 bp, homo sapiens
tacttcttcagtggatcttcg

SEQ ID NO: 10160 - RNA, 21 nt, RNAi
cuucuucaguggaucuucguu

SEQ ID NO: 10161 - RNA, 21 nt, RNAi
uugaagaagucaccuagaagc

SEQ ID NO: 10162 - DNA, 21 bp, homo sapiens
tattgaagagcaatagctggt

SEQ ID NO: 10163 - RNA, 21 nt, RNAi
uugaagagcaauagcugguuu

SEQ ID NO: 10164 - RNA, 21 nt, RNAi
uuaacuucucguuaucgacca

SEQ ID NO: 10165 - DNA, 21 bp, homo sapiens
tatagttcttcatctgagtct

SEQ ID NO: 10166 - RNA, 21 nt, RNAi
uaguucuucaucugagucuuu

SEQ ID NO: 10167 - RNA, 21 nt, RNAi
uuaucaagaaguagacucaga

SEQ ID NO: 10168 - DNA, 21 bp, homo sapiens
tagttcttcatctgagtcttt

SEQ ID NO: 10169 - RNA, 21 nt, RNAi
guucuucaucugagucuuuuu

SEQ ID NO: 10170 - RNA, 21 nt, RNAi
uucaagaaguagacucagaaa

SEQ ID NO: 10171 - DNA, 21 bp, homo sapiens
tatggcagaaccaaacaggag

SEQ ID NO: 10172 - RNA, 21 nt, RNAi
uggcagaaccaaacaggaguu

SEQ ID NO: 10173 - RNA, 21 nt, RNAi
uuaccgucuugguuuguccuc

SEQ ID NO: 10174 - DNA, 21 bp, homo sapiens
tatggatgacaccagtcaacg

SEQ ID NO: 10175 - RNA, 21 nt, RNAi
uggaugacaccagucaacguu

SEQ ID NO: 10176 - RNA, 21 nt, RNAi
uuaccuacuguggucaguugc

SEQ ID NO: 10177 - DNA, 21 bp, homo sapiens
aaactactatggccttgcaaa

SEQ ID NO: 10178 - RNA, 21 nt, RNAi
acuacuauggccuugcaaauu

SEQ ID NO: 10179 - RNA, 21 nt, RNAi
uuugaugauaccggaacguuu

SEQ ID NO: 10180 - DNA, 21 bp, homo sapiens
aaaggacagtagtcttattgt

SEQ ID NO: 10181 - RNA, 21 nt, RNAi
aggacaguagucuuauuguuu

SEQ ID NO: 10182 - RNA, 21 nt, RNAi
uuuccugucaucagaauaaca

SEQ ID NO: 10183 - DNA, 21 bp, homo sapiens
aaggacagtagtcttattgtc

SEQ ID NO: 10184 - RNA, 21 nt, RNAi
ggacaguagucuuauugucuu

SEQ ID NO: 10185 - RNA, 21 nt, RNAi
uuccugucaucagaauaacag

SEQ ID NO: 10186 - DNA, 21 bp, homo sapiens
aacactatggagctgatgcat

SEQ ID NO: 10187 - RNA, 21 nt, RNAi
cacuauggagcugaugcauuu

SEQ ID NO: 10188 - RNA, 21 nt, RNAi
uugugauaccucgacuacgua

SEQ ID NO: 10189 - DNA, 21 bp, homo sapiens
aattatacaccggatttgcca

SEQ ID NO: 10190 - RNA, 21 nt, RNAi
uuauacaccggauuugccauu

SEQ ID NO: 10191 - RNA, 21 nt, RNAi
uuaauauguggccuaaacggu

SEQ ID NO: 10192 - DNA, 21 bp, homo sapiens
aaggctgaagctctgatgtac

SEQ ID NO: 10193 - RNA, 21 nt, RNAi
ggcugaagcucugauguacuu

SEQ ID NO: 10194 - RNA, 21 nt, RNAi
uuccgacuucgagacuacaug

SEQ ID NO: 10195 - DNA, 21 bp, homo sapiens
aagatgatgtagatggtattc

SEQ ID NO: 10196 - RNA, 21 nt, RNAi
gaugauguagaugguauucuu

SEQ ID NO: 10197 - RNA, 21 nt, RNAi
uucuacuacaucuaccauaag

SEQ ID NO: 10198 - DNA, 21 bp, homo sapiens
aagtctaactctctggaacct

SEQ ID NO: 10199 - RNA, 21 nt, RNAi
gucuaacucucuggaaccuuu

SEQ ID NO: 10200 - RNA, 21 nt, RNAi
uucagauugagagaccuugga

SEQ ID NO: 10201 - DNA, 21 bp, homo sapiens
aactctctggaacctgagaca

SEQ ID NO: 10202 - RNA, 21 nt, RNAi
cucucuggaaccugagacauu

SEQ ID NO: 10203 - RNA, 21 nt, RNAi
uugagagaccuuggacucugu

SEQ ID NO: 10204 - DNA, 21 bp, homo sapiens
aacctgagacatcaccaatgt

SEQ ID NO: 10205 - RNA, 21 nt, RNAi
ccugagacaucaccaauguuu

SEQ ID NO: 10206 - RNA, 21 nt, RNAi
uuggacucuguagugguuaca

SEQ ID NO: 10207 - DNA, 21 bp, homo sapiens
aatgtgcagctctactttgtt

SEQ ID NO: 10208 - RNA, 21 nt, RNAi
ugugcagcucuacuuuguuuu

SEQ ID NO: 10209 - RNA, 21 nt, RNAi
uuacacgucgagaugaaacaa

SEQ ID NO: 10210 - DNA, 21 bp, homo sapiens
aaccgtgaagaagatcgatgc

SEQ ID NO: 10211 - RNA, 21 nt, RNAi
ccgugaagaagaucgaugcuu

SEQ ID NO: 10212 - RNA, 21 nt, RNAi
uuggcacuucuucuagcuacg

SEQ ID NO: 10213 - DNA, 21 bp, homo sapiens
aagaaacaatccatggagcca

SEQ ID NO: 10214 - RNA, 21 nt, RNAi
gaaacaauccauggagccauu

SEQ ID NO: 10215 - RNA, 21 nt, RNAi
uucuuuguuagguaccucggu

SEQ ID NO: 10216 - DNA, 21 bp, homo sapiens
aagatagctgaggactttcca

SEQ ID NO: 10217 - RNA, 21 nt, RNAi
gauagcugaggacuuuccauu

SEQ ID NO: 10218 - RNA, 21 nt, RNAi
uucuaucgacuccugaaaggu

SEQ ID NO: 10219 - DNA, 21 bp, homo sapiens
caacactatggagctgatgca

SEQ ID NO: 10220 - RNA, 21 nt, RNAi
acacuauggagcugaugcauu

SEQ ID NO: 10221 - RNA, 21 nt, RNAi
uuugugauaccucgacuacgu

SEQ ID NO: 10222 - DNA, 21 bp, homo sapiens
cactatggagctgatgcataa

SEQ ID NO: 10223 - RNA, 21 nt, RNAi
cuauggagcugaugcauaauu

SEQ ID NO: 10224 - RNA, 21 nt, RNAi
uugauaccucgacuacguauu

SEQ ID NO: 10225 - DNA, 21 bp, homo sapiens
cacatcacctacaggattgtg

SEQ ID NO: 10226 - RNA, 21 nt, RNAi
caucaccuacaggauuguguu

SEQ ID NO: 10227 - RNA, 21 nt, RNAi
uuguaguggauguccuaacac

SEQ ID NO: 10228 - DNA, 21 bp, homo sapiens
catcacctacaggattgtgaa

SEQ ID NO: 10229 - RNA, 21 nt, RNAi
ucaccuacaggauugugaauu

SEQ ID NO: 10230 - RNA, 21 nt, RNAi
uuaguggauguccuaacacuu

SEQ ID NO: 10231 - DNA, 21 bp, homo sapiens
caccggatttgccaagacaga

SEQ ID NO: 10232 - RNA, 21 nt, RNAi
ccggauuugccaagacagauu

SEQ ID NO: 10233 - RNA, 21 nt, RNAi
uuggccuaaacgguucugucu

SEQ ID NO: 10234 - DNA, 21 bp, homo sapiens
cagaggatgtcactggtacca

SEQ ID NO: 10235 - RNA, 21 nt, RNAi
gaggaugucacugguaccauu

SEQ ID NO: 10236 - RNA, 21 nt, RNAi
uucuccuacagugaccauggu

SEQ ID NO: 10237 - DNA, 21 bp, homo sapiens
cactggtaccaacctattcct

SEQ ID NO: 10238 - RNA, 21 nt, RNAi
cugguaccaaccuauuccuuu

SEQ ID NO: 10239 - RNA, 21 nt, RNAi
uugaccaugguuggauaagga

SEQ ID NO: 10240 - DNA, 21 bp, homo sapiens
caaggctgaagctctgatgta

SEQ ID NO: 10241 - RNA, 21 nt, RNAi
aggcugaagcucugauguauu

SEQ ID NO: 10242 - RNA, 21 nt, RNAi
uuuccgacuucgagacuacau

SEQ ID NO: 10243 - DNA, 21 bp, homo sapiens
cagtctacaagtcctccacag

SEQ ID NO: 10244 - RNA, 21 nt, RNAi
gucuacaaguccuccacaguu

SEQ ID NO: 10245 - RNA, 21 nt, RNAi
uucagauguucaggagguguc

SEQ ID NO: 10246 - DNA, 21 bp, homo sapiens
catcaccaatgtgcagctcta

SEQ ID NO: 10247 - RNA, 21 nt, RNAi
ucaccaaugugcagcucuauu

SEQ ID NO: 10248 - RNA, 21 nt, RNAi
uuagugguuacacgucgagau

SEQ ID NO: 10249 - DNA, 21 bp, homo sapiens
cacgaggagctagcaggttat

SEQ ID NO: 10250 - RNA, 21 nt, RNAi
cgaggagcuagcagguuauuu

SEQ ID NO: 10251 - RNA, 21 nt, RNAi
uugcuccucgaucguccaaua

SEQ ID NO: 10252 - DNA, 21 bp, homo sapiens
caaccgtgaagaagatcgatg

SEQ ID NO: 10253 - RNA, 21 nt, RNAi
accgugaagaagaucgauguu

SEQ ID NO: 10254 - RNA, 21 nt, RNAi
uuuggcacuucuucuagcuac

SEQ ID NO: 10255 - DNA, 21 bp, homo sapiens
caggaagatagctgaggactt

SEQ ID NO: 10256 - RNA, 21 nt, RNAi
ggaagauagcugaggacuuuu

SEQ ID NO: 10257 - RNA, 21 nt, RNAi
uuccuucuaucgacuccugaa

SEQ ID NO: 10258 - DNA, 21 bp, homo sapiens
gatgatgctggtatggagctt

SEQ ID NO: 10259 - RNA, 21 nt, RNAi
ugaugcugguauggagcuuuu

SEQ ID NO: 10260 - RNA, 21 nt, RNAi
uuacuacgaccauaccucgaa

SEQ ID NO: 10261 - DNA, 21 bp, homo sapiens
gatgctggtatggagcttctg

SEQ ID NO: 10262 - RNA, 21 nt, RNAi
ugcugguauggagcuucuguu

SEQ ID NO: 10263 - RNA, 21 nt, RNAi
uuacgaccauaccucgaagac

SEQ ID NO: 10264 - DNA, 21 bp, homo sapiens
gaattatacaccggatttgcc

SEQ ID NO: 10265 - RNA, 21 nt, RNAi
auuauacaccggauuugccuu

SEQ ID NO: 10266 - RNA, 21 nt, RNAi
uuuaauauguggccuaaacgg

SEQ ID NO: 10267 - DNA, 21 bp, homo sapiens
gagaggctgacataatgatct

SEQ ID NO: 10268 - RNA, 21 nt, RNAi
gaggcugacauaaugaucuuu

SEQ ID NO: 10269 - RNA, 21 nt, RNAi
uucuccgacuguauuacuaga

SEQ ID NO: 10270 - DNA, 21 bp, homo sapiens
gaggctgacataatgatctcc

SEQ ID NO: 10271 - RNA, 21 nt, RNAi
ggcugacauaaugaucuccuu

SEQ ID NO: 10272 - RNA, 21 nt, RNAi
uuccgacuguauuacuagagg

SEQ ID NO: 10273 - DNA, 21 bp, homo sapiens
gagatgctcactttgacgatg

SEQ ID NO: 10274 - RNA, 21 nt, RNAi
gaugcucacuuugacgauguu

SEQ ID NO: 10275 - RNA, 21 nt, RNAi
uucuacgagugaaacugcuac

SEQ ID NO: 10276 - DNA, 21 bp, homo sapiens
gatgctcactttgacgatgat

SEQ ID NO: 10277 - RNA, 21 nt, RNAi
ugcucacuuugacgaugauuu

SEQ ID NO: 10278 - RNA, 21 nt, RNAi
uuacgagugaaacugcuacua

SEQ ID NO: 10279 - DNA, 21 bp, homo sapiens
gacgatgatgaacgatggaca

SEQ ID NO: 10280 - RNA, 21 nt, RNAi
cgaugaugaacgauggacauu

SEQ ID NO: 10281 - RNA, 21 nt, RNAi
uugcuacuacuugcuaccugu

SEQ ID NO: 10282 - DNA, 21 bp, homo sapiens
gatgatgaacgatggacagag

SEQ ID NO: 10283 - RNA, 21 nt, RNAi
ugaugaacgauggacagaguu

SEQ ID NO: 10284 - RNA, 21 nt, RNAi
uuacuacuugcuaccugucuc

SEQ ID NO: 10285 - DNA, 21 bp, homo sapiens
gatgaacgatggacagaggat

SEQ ID NO: 10286 - RNA, 21 nt, RNAi
ugaacgauggacagaggauuu

SEQ ID NO: 10287 - RNA, 21 nt, RNAi
uuacuugcuaccugucuccua

SEQ ID NO: 10288 - DNA, 21 bp, homo sapiens
gatggacagaggatgtcactg

SEQ ID NO: 10289 - RNA, 21 nt, RNAi
uggacagaggaugucacuguu

SEQ ID NO: 10290 - RNA, 21 nt, RNAi
uuaccugucuccuacagugac

SEQ ID NO: 10291 - DNA, 21 bp, homo sapiens
gacagaggatgtcactggtac

SEQ ID NO: 10292 - RNA, 21 nt, RNAi
cagaggaugucacugguacuu

SEQ ID NO: 10293 - RNA, 21 nt, RNAi
uugucuccuacagugaccaug

SEQ ID NO: 10294 - DNA, 21 bp, homo sapiens
gaggatgtcactggtaccaac

SEQ ID NO: 10295 - RNA, 21 nt, RNAi
ggaugucacugguaccaacuu

SEQ ID NO: 10296 - RNA, 21 nt, RNAi
uuccuacagugaccaugguug

SEQ ID NO: 10297 - DNA, 21 bp, homo sapiens
gatgatgtagatggtattcag

SEQ ID NO: 10298 - RNA, 21 nt, RNAi
ugauguagaugguauucaguu

SEQ ID NO: 10299 - RNA, 21 nt, RNAi
uuacuacaucuaccauaaguc

SEQ ID NO: 10300 - DNA, 21 bp, homo sapiens
gatgtagatggtattcagtcc

SEQ ID NO: 10301 - RNA, 21 nt, RNAi
uguagaugguauucaguccuu

SEQ ID NO: 10302 - RNA, 21 nt, RNAi
uuacaucuaccauaagucagg

SEQ ID NO: 10303 - DNA, 21 bp, homo sapiens
gaacctgagacatcaccaatg

SEQ ID NO: 10304 - RNA, 21 nt, RNAi
accugagacaucaccaauguu

SEQ ID NO: 10305 - RNA, 21 nt, RNAi
uuuggacucuguagugguuac

SEQ ID NO: 10306 - DNA, 21 bp, homo sapiens
gagacatcaccaatgtgcagc

SEQ ID NO: 10307 - RNA, 21 nt, RNAi
gacaucaccaaugugcagcuu

SEQ ID NO: 10308 - RNA, 21 nt, RNAi
uucuguagugguuacacgucg

SEQ ID NO: 10309 - DNA, 21 bp, homo sapiens
gacatcaccaatgtgcagctc

SEQ ID NO: 10310 - RNA, 21 nt, RNAi
caucaccaaugugcagcucuu

SEQ ID NO: 10311 - RNA, 21 nt, RNAi
uuguagugguuacacgucgag

SEQ ID NO: 10312 - DNA, 21 bp, homo sapiens
gatgctgcatatgaggttact

SEQ ID NO: 10313 - RNA, 21 nt, RNAi
ugcugcauaugagguuacuuu

SEQ ID NO: 10314 - RNA, 21 nt, RNAi
uuacgacguauacuccaauga

SEQ ID NO: 10315 - DNA, 21 bp, homo sapiens
gaggttactaacagagacact

SEQ ID NO: 10316 - RNA, 21 nt, RNAi
gguuacuaacagagacacuuu

SEQ ID NO: 10317 - RNA, 21 nt, RNAi
uuccaaugauugucucuguga

SEQ ID NO: 10318 - DNA, 21 bp, homo sapiens
gaggagctagcaggttatcct

SEQ ID NO: 10319 - RNA, 21 nt, RNAi
ggagcuagcagguuauccuuu

SEQ ID NO: 10320 - RNA, 21 nt, RNAi
uuccucgaucguccaauagga

SEQ ID NO: 10321 - DNA, 21 bp, homo sapiens
gagctagcaggttatcctaaa

SEQ ID NO: 10322 - RNA, 21 nt, RNAi
gcuagcagguuauccuaaauu

SEQ ID NO: 10323 - RNA, 21 nt, RNAi
uucgaucguccaauaggauuu

SEQ ID NO: 10324 - DNA, 21 bp, homo sapiens
gaagatcgatgctgccatttc

SEQ ID NO: 10325 - RNA, 21 nt, RNAi
agaucgaugcugccauuucuu

SEQ ID NO: 10326 - RNA, 21 nt, RNAi
uuucuagcuacgacgguaaag

SEQ ID NO: 10327 - DNA, 21 bp, homo sapiens
gaagaaacaatccatggagcc

SEQ ID NO: 10328 - RNA, 21 nt, RNAi
agaaacaauccauggagccuu

SEQ ID NO: 10329 - RNA, 21 nt, RNAi
uuucuuuguuagguaccucgg

SEQ ID NO: 10330 - DNA, 21 bp, homo sapiens
gaagatagctgaggactttcc

SEQ ID NO: 10331 - RNA, 21 nt, RNAi
agauagcugaggacuuuccuu

SEQ ID NO: 10332 - RNA, 21 nt, RNAi
uuucuaucgacuccugaaagg

SEQ ID NO: 10333 - DNA, 21 bp, homo sapiens
gaggactttccaggtgttgac

SEQ ID NO: 10334 - RNA, 21 nt, RNAi
ggacuuuccagguguugacuu

SEQ ID NO: 10335 - RNA, 21 nt, RNAi
uuccugaaagguccacaacug

SEQ ID NO: 10336 - DNA, 21 bp, homo sapiens
gactttccaggtgttgactca

SEQ ID NO: 10337 - RNA, 21 nt, RNAi
cuuuccagguguugacucauu

SEQ ID NO: 10338 - RNA, 21 nt, RNAi
uugaaagguccacaacugagu

SEQ ID NO: 10339 - DNA, 21 bp, homo sapiens
tatggagctgatgcataagcc

SEQ ID NO: 10340 - RNA, 21 nt, RNAi
uggagcugaugcauaagccuu

SEQ ID NO: 10341 - RNA, 21 nt, RNAi
uuaccucgacuacguauucgg

SEQ ID NO: 10342 - DNA, 21 bp, homo sapiens
tatacaccggatttgccaaga

SEQ ID NO: 10343 - RNA, 21 nt, RNAi
uacaccggauuugccaagauu

SEQ ID NO: 10344 - RNA, 21 nt, RNAi
uuauguggccuaaacgguucu

SEQ ID NO: 10345 - DNA, 21 bp, homo sapiens
tacaccggatttgccaagaca

SEQ ID NO: 10346 - RNA, 21 nt, RNAi
caccggauuugccaagacauu

SEQ ID NO: 10347 - RNA, 21 nt, RNAi
uuguggccuaaacgguucugu

SEQ ID NO: 10348 - DNA, 21 bp, homo sapiens
taatgatctcctttgcagttg

SEQ ID NO: 10349 - RNA, 21 nt, RNAi
augaucuccuuugcaguuguu

SEQ ID NO: 10350 - RNA, 21 nt, RNAi
uuuacuagaggaaacgucaac

SEQ ID NO: 10351 - DNA, 21 bp, homo sapiens
taactctctggaacctgagac

SEQ ID NO: 10352 - RNA, 21 nt, RNAi
acucucuggaaccugagacuu

SEQ ID NO: 10353 - RNA, 21 nt, RNAi
uuugagagaccuuggacucug

SEQ ID NO: 10354 - DNA, 21 bp, homo sapiens
tatgaggttactaacagagac

SEQ ID NO: 10355 - RNA, 21 nt, RNAi
ugagguuacuaacagagacuu

SEQ ID NO: 10356 - RNA, 21 nt, RNAi
uuacuccaaugauugucucug

SEQ ID NO: 10357 - DNA, 21 bp, homo sapiens
aaccgacagaagaggttcgtg

SEQ ID NO: 10358 - RNA, 21 nt, RNAi
ccgacagaagagguucguguu

SEQ ID NO: 10359 - RNA, 21 nt, RNAi
uuggcugucuucuccaagcac

SEQ ID NO: 10360 - DNA, 21 bp, homo sapiens
aagaggttcgtgctttctggc

SEQ ID NO: 10361 - RNA, 21 nt, RNAi
gagguucgugcuuucuggcuu

SEQ ID NO: 10362 - RNA, 21 nt, RNAi
uucuccaagcacgaaagaccg

SEQ ID NO: 10363 - DNA, 21 bp, homo sapiens
aagacggacctcacctacagg

SEQ ID NO: 10364 - RNA, 21 nt, RNAi
gacggaccucaccuacagguu

SEQ ID NO: 10365 - RNA, 21 nt, RNAi
uucugccuggaguggaugucc

SEQ ID NO: 10366 - DNA, 21 bp, homo sapiens
aaaggtatggagcgatgtgac

SEQ ID NO: 10367 - RNA, 21 nt, RNAi
agguauggagcgaugugacuu

SEQ ID NO: 10368 - RNA, 21 nt, RNAi
uuuccauaccucgcuacacug

SEQ ID NO: 10369 - DNA, 21 bp, homo sapiens
aaggtatggagcgatgtgacg

SEQ ID NO: 10370 - RNA, 21 nt, RNAi
gguauggagcgaugugacguu

SEQ ID NO: 10371 - RNA, 21 nt, RNAi
uuccauaccucgcuacacugc

SEQ ID NO: 10372 - DNA, 21 bp, homo sapiens
aatgagattgcaccgctggag

SEQ ID NO: 10373 - RNA, 21 nt, RNAi
ugagauugcaccgcuggaguu

SEQ ID NO: 10374 - RNA, 21 nt, RNAi
uuacucuaacguggcgaccuc

SEQ ID NO: 10375 - DNA, 21 bp, homo sapiens
aagaacaagatctacttcttc

SEQ ID NO: 10376 - RNA, 21 nt, RNAi
gaacaagaucuacuucuucuu

SEQ ID NO: 10377 - RNA, 21 nt, RNAi
uucuuguucuagaugaagaag

SEQ ID NO: 10378 - DNA, 21 bp, homo sapiens
aacaagatctacttcttccga

SEQ ID NO: 10379 - RNA, 21 nt, RNAi
caagaucuacuucuuccgauu

SEQ ID NO: 10380 - RNA, 21 nt, RNAi
uuguucuagaugaagaaggcu

SEQ ID NO: 10381 - DNA, 21 bp, homo sapiens
aagatctacttcttccgaggc

SEQ ID NO: 10382 - RNA, 21 nt, RNAi
gaucuacuucuuccgaggcuu

SEQ ID NO: 10383 - RNA, 21 nt, RNAi
uucuagaugaagaaggcuccg

SEQ ID NO: 10384 - DNA, 21 bp, homo sapiens
aaggtgaaggctctggaaggc

SEQ ID NO: 10385 - RNA, 21 nt, RNAi
ggugaaggcucuggaaggcuu

SEQ ID NO: 10386 - RNA, 21 nt, RNAi
uuccacuuccgagaccuuccg

SEQ ID NO: 10387 - DNA, 21 bp, homo sapiens
aacactttcctctgaccatgg

SEQ ID NO: 10388 - RNA, 21 nt, RNAi
cacuuuccucugaccaugguu

SEQ ID NO: 10389 - RNA, 21 nt, RNAi
uugugaaaggagacugguacc

SEQ ID NO: 10390 - DNA, 21 bp, homo sapiens
aaccaccatgacaactgccgg

SEQ ID NO: 10391 - RNA, 21 nt, RNAi
ccaccaugacaacugccgguu

SEQ ID NO: 10392 - RNA, 21 nt, RNAi
uuggugguacuguugacggcc

SEQ ID NO: 10393 - DNA, 21 bp, homo sapiens
aactggagtgtccttgctgta

SEQ ID NO: 10394 - RNA, 21 nt, RNAi
cuggaguguccuugcuguauu

SEQ ID NO: 10395 - RNA, 21 nt, RNAi
uugaccucacaggaacgacau

SEQ ID NO: 10396 - DNA, 21 bp, homo sapiens
aatcctggaaatctgttctcc

SEQ ID NO: 10397 - RNA, 21 nt, RNAi
uccuggaaaucuguucuccuu

SEQ ID NO: 10398 - RNA, 21 nt, RNAi
uuaggaccuuuagacaagagg

SEQ ID NO: 10399 - DNA, 21 bp, homo sapiens
aaatctgttctccagaatcca

SEQ ID NO: 10400 - RNA, 21 nt, RNAi
aucuguucuccagaauccauu

SEQ ID NO: 10401 - RNA, 21 nt, RNAi
uuuagacaagaggucuuaggu

SEQ ID NO: 10402 - DNA, 21 bp, homo sapiens
aatctgttctccagaatccag

SEQ ID NO: 10403 - RNA, 21 nt, RNAi
ucuguucuccagaauccaguu

SEQ ID NO: 10404 - RNA, 21 nt, RNAi
uuagacaagaggucuuagguc

SEQ ID NO: 10405 - DNA, 21 bp, homo sapiens
aaagccattgtaaatgtgtgt

SEQ ID NO: 10406 - RNA, 21 nt, RNAi
agccauuguaaauguguguuu

SEQ ID NO: 10407 - RNA, 21 nt, RNAi
uuucgguaacauuuacacaca

SEQ ID NO: 10408 - DNA, 21 bp, homo sapiens
aagccattgtaaatgtgtgta

SEQ ID NO: 10409 - RNA, 21 nt, RNAi
gccauuguaaauguguguauu

SEQ ID NO: 10410 - RNA, 21 nt, RNAi
uucgguaacauuuacacacau

SEQ ID NO: 10411 - DNA, 21 bp, homo sapiens
aaatgtgtgtacagtgtgtat

SEQ ID NO: 10412 - RNA, 21 nt, RNAi
auguguguacaguguguauuu

SEQ ID NO: 10413 - RNA, 21 nt, RNAi
uuuacacacaugucacacaua

SEQ ID NO: 10414 - DNA, 21 bp, homo sapiens
aatgtgtgtacagtgtgtata

SEQ ID NO: 10415 - RNA, 21 nt, RNAi
uguguguacaguguguauauu

SEQ ID NO: 10416 - RNA, 21 nt, RNAi
uuacacacaugucacacauau

SEQ ID NO: 10417 - DNA, 21 bp, homo sapiens
aactgaggattgtcattaaac

SEQ ID NO: 10418 - RNA, 21 nt, RNAi
cugaggauugucauuaaacuu

SEQ ID NO: 10419 - RNA, 21 nt, RNAi
uugacuccuaacaguaauuug

SEQ ID NO: 10420 - DNA, 21 bp, homo sapiens
caaccgacagaagaggttcgt

SEQ ID NO: 10421 - RNA, 21 nt, RNAi
accgacagaagagguucguuu

SEQ ID NO: 10422 - RNA, 21 nt, RNAi
uuuggcugucuucuccaagca

SEQ ID NO: 10423 - DNA, 21 bp, homo sapiens
cagaagaggttcgtgctttct

SEQ ID NO: 10424 - RNA, 21 nt, RNAi
gaagagguucgugcuuucuuu

SEQ ID NO: 10425 - RNA, 21 nt, RNAi
uucuucuccaagcacgaaaga

SEQ ID NO: 10426 - DNA, 21 bp, homo sapiens
cacctacaggatccttcggtt

SEQ ID NO: 10427 - RNA, 21 nt, RNAi
ccuacaggauccuucgguuuu

SEQ ID NO: 10428 - RNA, 21 nt, RNAi
uuggauguccuaggaagccaa

SEQ ID NO: 10429 - DNA, 21 bp, homo sapiens
catggcagttggtgcaggagc

SEQ ID NO: 10430 - RNA, 21 nt, RNAi
uggcaguuggugcaggagcuu

SEQ ID NO: 10431 - RNA, 21 nt, RNAi
uuaccgucaaccacguccucg

SEQ ID NO: 10432 - DNA, 21 bp, homo sapiens
cagttggtgcaggagcaggtg

SEQ ID NO: 10433 - RNA, 21 nt, RNAi
guuggugcaggagcagguguu

SEQ ID NO: 10434 - RNA, 21 nt, RNAi
uucaaccacguccucguccac

SEQ ID NO: 10435 - DNA, 21 bp, homo sapiens
cactcacctttactgaggtgc

SEQ ID NO: 10436 - RNA, 21 nt, RNAi
cucaccuuuacugaggugcuu

SEQ ID NO: 10437 - RNA, 21 nt, RNAi
uugaguggaaaugacuccacg

SEQ ID NO: 10438 - DNA, 21 bp, homo sapiens
cacctttactgaggtgcacga

SEQ ID NO: 10439 - RNA, 21 nt, RNAi
ccuuuacugaggugcacgauu

SEQ ID NO: 10440 - RNA, 21 nt, RNAi
uuggaaaugacuccacgugcu

SEQ ID NO: 10441 - DNA, 21 bp, homo sapiens
catcatgatcgacttcgccag

SEQ ID NO: 10442 - RNA, 21 nt, RNAi
ucaugaucgacuucgccaguu

SEQ ID NO: 10443 - RNA, 21 nt, RNAi
uuaguacuagcugaagcgguc

SEQ ID NO: 10444 - DNA, 21 bp, homo sapiens
catgatcgacttcgccaggta

SEQ ID NO: 10445 - RNA, 21 nt, RNAi
ugaucgacuucgccagguauu

SEQ ID NO: 10446 - RNA, 21 nt, RNAi
uuacuagcugaagcgguccau

SEQ ID NO: 10447 - DNA, 21 bp, homo sapiens
cacttcgactatgatgagacc

SEQ ID NO: 10448 - RNA, 21 nt, RNAi
cuucgacuaugaugagaccuu

SEQ ID NO: 10449 - RNA, 21 nt, RNAi
uugaagcugauacuacucugg

SEQ ID NO: 10450 - DNA, 21 bp, homo sapiens
catgaatttggccacgtgctg

SEQ ID NO: 10451 - RNA, 21 nt, RNAi
ugaauuuggccacgugcuguu

SEQ ID NO: 10452 - RNA, 21 nt, RNAi
uuacuuaaaccggugcacgac

SEQ ID NO: 10453 - DNA, 21 bp, homo sapiens
cagcacacaacagcagccaag

SEQ ID NO: 10454 - RNA, 21 nt, RNAi
gcacacaacagcagccaaguu

SEQ ID NO: 10455 - RNA, 21 nt, RNAi
uucguguguugucgucgguuc

SEQ ID NO: 10456 - DNA, 21 bp, homo sapiens
cacacaacagcagccaaggcc

SEQ ID NO: 10457 - RNA, 21 nt, RNAi
cacaacagcagccaaggccuu

SEQ ID NO: 10458 - RNA, 21 nt, RNAi
uuguguugucgucgguuccgg

SEQ ID NO: 10459 - DNA, 21 bp, homo sapiens
caccaatgagattgcaccgct

SEQ ID NO: 10460 - RNA, 21 nt, RNAi
ccaaugagauugcaccgcuuu

SEQ ID NO: 10461 - RNA, 21 nt, RNAi
uugguuacucuaacguggcga

SEQ ID NO: 10462 - DNA, 21 bp, homo sapiens
caatgagattgcaccgctgga

SEQ ID NO: 10463 - RNA, 21 nt, RNAi
augagauugcaccgcuggauu

SEQ ID NO: 10464 - RNA, 21 nt, RNAi
uuuacucuaacguggcgaccu

SEQ ID NO: 10465 - DNA, 21 bp, homo sapiens
cagatgcctgtgaggcctcct

SEQ ID NO: 10466 - RNA, 21 nt, RNAi
gaugccugugaggccuccuuu

SEQ ID NO: 10467 - RNA, 21 nt, RNAi
uucuacggacacuccggagga

SEQ ID NO: 10468 - DNA, 21 bp, homo sapiens
caccatccgaggcgagctctt

SEQ ID NO: 10469 - RNA, 21 nt, RNAi
ccauccgaggcgagcucuuuu

SEQ ID NO: 10470 - RNA, 21 nt, RNAi
uugguaggcuccgcucgagaa

SEQ ID NO: 10471 - DNA, 21 bp, homo sapiens
cagcattggcctctcgccact

SEQ ID NO: 10472 - RNA, 21 nt, RNAi
gcauuggccucucgccacuuu

SEQ ID NO: 10473 - RNA, 21 nt, RNAi
uucguaaccggagagcgguga

SEQ ID NO: 10474 - DNA, 21 bp, homo sapiens
cacatttggttcttccaaggt

SEQ ID NO: 10475 - RNA, 21 nt, RNAi
cauuugguucuuccaagguuu

SEQ ID NO: 10476 - RNA, 21 nt, RNAi
uuguaaaccaagaagguucca

SEQ ID NO: 10477 - DNA, 21 bp, homo sapiens
catttggttcttccaaggtgc

SEQ ID NO: 10478 - RNA, 21 nt, RNAi
uuugguucuuccaaggugcuu

SEQ ID NO: 10479 - RNA, 21 nt, RNAi
uuaaaccaagaagguuccacg

SEQ ID NO: 10480 - DNA, 21 bp, homo sapiens
caagatctacttcttccgagg

SEQ ID NO: 10481 - RNA, 21 nt, RNAi
agaucuacuucuuccgagguu

SEQ ID NO: 10482 - RNA, 21 nt, RNAi
uuucuagaugaagaaggcucc

SEQ ID NO: 10483 - DNA, 21 bp, homo sapiens
caggatgctgatggctatgcc

SEQ ID NO: 10484 - RNA, 21 nt, RNAi
ggaugcugauggcuaugccuu

SEQ ID NO: 10485 - RNA, 21 nt, RNAi
uuccuacgacuaccgauacgg

SEQ ID NO: 10486 - DNA, 21 bp, homo sapiens
caacactttcctctgaccatg

SEQ ID NO: 10487 - RNA, 21 nt, RNAi
acacuuuccucugaccauguu

SEQ ID NO: 10488 - RNA, 21 nt, RNAi
uuugugaaaggagacugguac

SEQ ID NO: 10489 - DNA, 21 bp, homo sapiens
cactttcctctgaccatggct

SEQ ID NO: 10490 - RNA, 21 nt, RNAi
cuuuccucugaccauggcuuu

SEQ ID NO: 10491 - RNA, 21 nt, RNAi
uugaaaggagacugguaccga

SEQ ID NO: 10492 - DNA, 21 bp, homo sapiens
caggccacgaatatcaggcta

SEQ ID NO: 10493 - RNA, 21 nt, RNAi
ggccacgaauaucaggcuauu

SEQ ID NO: 10494 - RNA, 21 nt, RNAi
uuccggugcuuauaguccgau

SEQ ID NO: 10495 - DNA, 21 bp, homo sapiens
cacgaatatcaggctagagac

SEQ ID NO: 10496 - RNA, 21 nt, RNAi
cgaauaucaggcuagagacuu

SEQ ID NO: 10497 - RNA, 21 nt, RNAi
uugcuuauaguccgaucucug

SEQ ID NO: 10498 - DNA, 21 bp, homo sapiens
catggccatctttgtggctgt

SEQ ID NO: 10499 - RNA, 21 nt, RNAi
uggccaucuuuguggcuguuu

SEQ ID NO: 10500 - RNA, 21 nt, RNAi
uuaccgguagaaacaccgaca

SEQ ID NO: 10501 - DNA, 21 bp, homo sapiens
caaccaccatgacaactgccg

SEQ ID NO: 10502 - RNA, 21 nt, RNAi
accaccaugacaacugccguu

SEQ ID NO: 10503 - RNA, 21 nt, RNAi
uuuggugguacuguugacggc

SEQ ID NO: 10504 - DNA, 21 bp, homo sapiens
cacctgccagcgactgtctca

SEQ ID NO: 10505 - RNA, 21 nt, RNAi
ccugccagcgacugucucauu

SEQ ID NO: 10506 - RNA, 21 nt, RNAi
uuggacggucgcugacagagu

SEQ ID NO: 10507 - DNA, 21 bp, homo sapiens
caggtcctggcaaacctggct

SEQ ID NO: 10508 - RNA, 21 nt, RNAi
gguccuggcaaaccuggcuuu

SEQ ID NO: 10509 - RNA, 21 nt, RNAi
uuccaggaccguuuggaccga

SEQ ID NO: 10510 - DNA, 21 bp, homo sapiens
cacttcctgaggtcaggtctt

SEQ ID NO: 10511 - RNA, 21 nt, RNAi
cuuccugaggucaggucuuuu

SEQ ID NO: 10512 - RNA, 21 nt, RNAi
uugaaggacuccaguccagaa

SEQ ID NO: 10513 - DNA, 21 bp, homo sapiens
caggtcttggtaggtgcctgc

SEQ ID NO: 10514 - RNA, 21 nt, RNAi
ggucuugguaggugccugcuu

SEQ ID NO: 10515 - RNA, 21 nt, RNAi
uuccagaaccauccacggacg

SEQ ID NO: 10516 - DNA, 21 bp, homo sapiens
catctgtctgccttctggctg

SEQ ID NO: 10517 - RNA, 21 nt, RNAi
ucugucugccuucuggcuguu

SEQ ID NO: 10518 - RNA, 21 nt, RNAi
uuagacagacggaagaccgac

SEQ ID NO: 10519 - DNA, 21 bp, homo sapiens
caatcctggaaatctgttctc

SEQ ID NO: 10520 - RNA, 21 nt, RNAi
auccuggaaaucuguucucuu

SEQ ID NO: 10521 - RNA, 21 nt, RNAi
uuuaggaccuuuagacaagag

SEQ ID NO: 10522 - DNA, 21 bp, homo sapiens
caacatacctcaatcctgtcc

SEQ ID NO: 10523 - RNA, 21 nt, RNAi
acauaccucaauccuguccuu

SEQ ID NO: 10524 - RNA, 21 nt, RNAi
uuuguauggaguuaggacagg

SEQ ID NO: 10525 - DNA, 21 bp, homo sapiens
cagcactgctatcctccaaag

SEQ ID NO: 10526 - RNA, 21 nt, RNAi
gcacugcuauccuccaaaguu

SEQ ID NO: 10527 - RNA, 21 nt, RNAi
uucgugacgauaggagguuuc

SEQ ID NO: 10528 - DNA, 21 bp, homo sapiens
cactgctatcctccaaagcca

SEQ ID NO: 10529 - RNA, 21 nt, RNAi
cugcuauccuccaaagccauu

SEQ ID NO: 10530 - RNA, 21 nt, RNAi
uugacgauaggagguuucggu

SEQ ID NO: 10531 - DNA, 21 bp, homo sapiens
caaagccattgtaaatgtgtg

SEQ ID NO: 10532 - RNA, 21 nt, RNAi
aagccauuguaaauguguguu

SEQ ID NO: 10533 - RNA, 21 nt, RNAi
uuuucgguaacauuuacacac

SEQ ID NO: 10534 - DNA, 21 bp, homo sapiens
cattgtaaatgtgtgtacagt

SEQ ID NO: 10535 - RNA, 21 nt, RNAi
uuguaaauguguguacaguuu

SEQ ID NO: 10536 - RNA, 21 nt, RNAi
uuaacauuuacacacauguca

SEQ ID NO: 10537 - DNA, 21 bp, homo sapiens
cagtgtgtataaaccttcttc

SEQ ID NO: 10538 - RNA, 21 nt, RNAi
guguguauaaaccuucuucuu

SEQ ID NO: 10539 - RNA, 21 nt, RNAi
uucacacauauuuggaagaag

SEQ ID NO: 10540 - DNA, 21 bp, homo sapiens
gatgctgctgctgctgctcca

SEQ ID NO: 10541 - RNA, 21 nt, RNAi
ugcugcugcugcugcuccauu

SEQ ID NO: 10542 - RNA, 21 nt, RNAi
uuacgacgacgacgacgaggu

SEQ ID NO: 10543 - DNA, 21 bp, homo sapiens
gacagaagaggttcgtgcttt

SEQ ID NO: 10544 - RNA, 21 nt, RNAi
cagaagagguucgugcuuuuu

SEQ ID NO: 10545 - RNA, 21 nt, RNAi
uugucuucuccaagcacgaaa

SEQ ID NO: 10546 - DNA, 21 bp, homo sapiens
gaagaggttcgtgctttctgg

SEQ ID NO: 10547 - RNA, 21 nt, RNAi
agagguucgugcuuucugguu

SEQ ID NO: 10548 - RNA, 21 nt, RNAi
uuucuccaagcacgaaagacc

SEQ ID NO: 10549 - DNA, 21 bp, homo sapiens
gaggttcgtgctttctggcgg

SEQ ID NO: 10550 - RNA, 21 nt, RNAi
gguucgugcuuucuggcgguu

SEQ ID NO: 10551 - RNA, 21 nt, RNAi
uuccaagcacgaaagaccgcc

SEQ ID NO: 10552 - DNA, 21 bp, homo sapiens
gagaagacggacctcacctac

SEQ ID NO: 10553 - RNA, 21 nt, RNAi
gaagacggaccucaccuacuu

SEQ ID NO: 10554 - RNA, 21 nt, RNAi
uucuucugccuggaguggaug

SEQ ID NO: 10555 - DNA, 21 bp, homo sapiens
gaagacggacctcacctacag

SEQ ID NO: 10556 - RNA, 21 nt, RNAi
agacggaccucaccuacaguu

SEQ ID NO: 10557 - RNA, 21 nt, RNAi
uuucugccuggaguggauguc

SEQ ID NO: 10558 - DNA, 21 bp, homo sapiens
gacggacctcacctacaggat

SEQ ID NO: 10559 - RNA, 21 nt, RNAi
cggaccucaccuacaggauuu

SEQ ID NO: 10560 - RNA, 21 nt, RNAi
uugccuggaguggauguccua

SEQ ID NO: 10561 - DNA, 21 bp, homo sapiens
gacctcacctacaggatcctt

SEQ ID NO: 10562 - RNA, 21 nt, RNAi
ccucaccuacaggauccuuuu

SEQ ID NO: 10563 - RNA, 21 nt, RNAi
uuggaguggauguccuaggaa

SEQ ID NO: 10564 - DNA, 21 bp, homo sapiens
gagcgatgtgacgccactcac

SEQ ID NO: 10565 - RNA, 21 nt, RNAi
gcgaugugacgccacucacuu

SEQ ID NO: 10566 - RNA, 21 nt, RNAi
uucgcuacacugcggugagug

SEQ ID NO: 10567 - DNA, 21 bp, homo sapiens
gatgtgacgccactcaccttt

SEQ ID NO: 10568 - RNA, 21 nt, RNAi
ugugacgccacucaccuuuuu

SEQ ID NO: 10569 - RNA, 21 nt, RNAi
uuacacugcggugaguggaaa

SEQ ID NO: 10570 - DNA, 21 bp, homo sapiens
gacgccactcacctttactga

SEQ ID NO: 10571 - RNA, 21 nt, RNAi
cgccacucaccuuuacugauu

SEQ ID NO: 10572 - RNA, 21 nt, RNAi
uugcggugaguggaaaugacu

SEQ ID NO: 10573 - DNA, 21 bp, homo sapiens
gacatcatgatcgacttcgcc

SEQ ID NO: 10574 - RNA, 21 nt, RNAi
caucaugaucgacuucgccuu

SEQ ID NO: 10575 - RNA, 21 nt, RNAi
uuguaguacuagcugaagcgg

SEQ ID NO: 10576 - DNA, 21 bp, homo sapiens
gatcgacttcgccaggtactg

SEQ ID NO: 10577 - RNA, 21 nt, RNAi
ucgacuucgccagguacuguu

SEQ ID NO: 10578 - RNA, 21 nt, RNAi
uuagcugaagcgguccaugac

SEQ ID NO: 10579 - DNA, 21 bp, homo sapiens
gacttcgccaggtactggcat

SEQ ID NO: 10580 - RNA, 21 nt, RNAi
cuucgccagguacuggcauuu

SEQ ID NO: 10581 - RNA, 21 nt, RNAi
uugaagcgguccaugaccgua

SEQ ID NO: 10582 - DNA, 21 bp, homo sapiens
gatgtccacttcgactatgat

SEQ ID NO: 10583 - RNA, 21 nt, RNAi
uguccacuucgacuaugauuu

SEQ ID NO: 10584 - RNA, 21 nt, RNAi
uuacaggugaagcugauacua

SEQ ID NO: 10585 - DNA, 21 bp, homo sapiens
gactatgatgagacctggact

SEQ ID NO: 10586 - RNA, 21 nt, RNAi
cuaugaugagaccuggacuuu

SEQ ID NO: 10587 - RNA, 21 nt, RNAi
uugauacuacucuggaccuga

SEQ ID NO: 10588 - DNA, 21 bp, homo sapiens
gatgtccgccttctacacctt

SEQ ID NO: 10589 - RNA, 21 nt, RNAi
uguccgccuucuacaccuuuu

SEQ ID NO: 10590 - RNA, 21 nt, RNAi
uuacaggcggaagauguggaa

SEQ ID NO: 10591 - DNA, 21 bp, homo sapiens
gatagacaccaatgagattgc

SEQ ID NO: 10592 - RNA, 21 nt, RNAi
uagacaccaaugagauugcuu

SEQ ID NO: 10593 - RNA, 21 nt, RNAi
uuaucugugguuacucuaacg

SEQ ID NO: 10594 - DNA, 21 bp, homo sapiens
gacaccaatgagattgcaccg

SEQ ID NO: 10595 - RNA, 21 nt, RNAi
caccaaugagauugcaccguu

SEQ ID NO: 10596 - RNA, 21 nt, RNAi
uugugguuacucuaacguggc

SEQ ID NO: 10597 - DNA, 21 bp, homo sapiens
gagattgcaccgctggagcca

SEQ ID NO: 10598 - RNA, 21 nt, RNAi
gauugcaccgcuggagccauu

SEQ ID NO: 10599 - RNA, 21 nt, RNAi
uucuaacguggcgaccucggu

SEQ ID NO: 10600 - DNA, 21 bp, homo sapiens
gattgcaccgctggagccaga

SEQ ID NO: 10601 - RNA, 21 nt, RNAi
uugcaccgcuggagccagauu

SEQ ID NO: 10602 - RNA, 21 nt, RNAi
uuaacguggcgaccucggucu

SEQ ID NO: 10603 - DNA, 21 bp, homo sapiens
gatgcctgtgaggcctccttt

SEQ ID NO: 10604 - RNA, 21 nt, RNAi
ugccugugaggccuccuuuuu

SEQ ID NO: 10605 - RNA, 21 nt, RNAi
uuacggacacuccggaggaaa

SEQ ID NO: 10606 - DNA, 21 bp, homo sapiens
gagaagaacaagatctacttc

SEQ ID NO: 10607 - RNA, 21 nt, RNAi
gaagaacaagaucuacuucuu

SEQ ID NO: 10608 - RNA, 21 nt, RNAi
uucuucuuguucuagaugaag

SEQ ID NO: 10609 - DNA, 21 bp, homo sapiens
gaagaacaagatctacttctt

SEQ ID NO: 10610 - RNA, 21 nt, RNAi
agaacaagaucuacuucuuuu

SEQ ID NO: 10611 - RNA, 21 nt, RNAi
uuucuuguucuagaugaagaa

SEQ ID NO: 10612 - DNA, 21 bp, homo sapiens
gaacaagatctacttcttccg

SEQ ID NO: 10613 - RNA, 21 nt, RNAi
acaagaucuacuucuuccguu

SEQ ID NO: 10614 - RNA, 21 nt, RNAi
uuuguucuagaugaagaaggc

SEQ ID NO: 10615 - DNA, 21 bp, homo sapiens
gatctacttcttccgaggcag

SEQ ID NO: 10616 - RNA, 21 nt, RNAi
ucuacuucuuccgaggcaguu

SEQ ID NO: 10617 - RNA, 21 nt, RNAi
uuagaugaagaaggcuccguc

SEQ ID NO: 10618 - DNA, 21 bp, homo sapiens
gagatcgacgctgccttccag

SEQ ID NO: 10619 - RNA, 21 nt, RNAi
gaucgacgcugccuuccaguu

SEQ ID NO: 10620 - RNA, 21 nt, RNAi
uucuagcugcgacggaagguc

SEQ ID NO: 10621 - DNA, 21 bp, homo sapiens
gatcgacgctgccttccagga

SEQ ID NO: 10622 - RNA, 21 nt, RNAi
ucgacgcugccuuccaggauu

SEQ ID NO: 10623 - RNA, 21 nt, RNAi
uuagcugcgacggaagguccu

SEQ ID NO: 10624 - DNA, 21 bp, homo sapiens
gacgctgccttccaggatgct

SEQ ID NO: 10625 - RNA, 21 nt, RNAi
cgcugccuuccaggaugcuuu

SEQ ID NO: 10626 - RNA, 21 nt, RNAi
uugcgacggaagguccuacga

SEQ ID NO: 10627 - DNA, 21 bp, homo sapiens
gatgctgatggctatgcctac

SEQ ID NO: 10628 - RNA, 21 nt, RNAi
ugcugauggcuaugccuacuu

SEQ ID NO: 10629 - RNA, 21 nt, RNAi
uuacgacuaccgauacggaug

SEQ ID NO: 10630 - DNA, 21 bp, homo sapiens
gatggctatgcctacttcctg

SEQ ID NO: 10631 - RNA, 21 nt, RNAi
uggcuaugccuacuuccuguu

SEQ ID NO: 10632 - RNA, 21 nt, RNAi
uuaccgauacggaugaaggac

SEQ ID NO: 10633 - DNA, 21 bp, homo sapiens
gaaggtgaaggctctggaagg

SEQ ID NO: 10634 - RNA, 21 nt, RNAi
aggugaaggcucuggaagguu

SEQ ID NO: 10635 - RNA, 21 nt, RNAi
uuuccacuuccgagaccuucc

SEQ ID NO: 10636 - DNA, 21 bp, homo sapiens
gacttctttggctgtgccgag

SEQ ID NO: 10637 - RNA, 21 nt, RNAi
cuucuuuggcugugccgaguu

SEQ ID NO: 10638 - RNA, 21 nt, RNAi
uugaagaaaccgacacggcuc

SEQ ID NO: 10639 - DNA, 21 bp, homo sapiens
gagcctgccaacactttcctc

SEQ ID NO: 10640 - RNA, 21 nt, RNAi
gccugccaacacuuuccucuu

SEQ ID NO: 10641 - RNA, 21 nt, RNAi
uucggacgguugugaaaggag

SEQ ID NO: 10642 - DNA, 21 bp, homo sapiens
gaggctttggcatgacttaag

SEQ ID NO: 10643 - RNA, 21 nt, RNAi
ggcuuuggcaugacuuaaguu

SEQ ID NO: 10644 - RNA, 21 nt, RNAi
uuccgaaaccguacugaauuc

SEQ ID NO: 10645 - DNA, 21 bp, homo sapiens
gaactggagtgtccttgctgt

SEQ ID NO: 10646 - RNA, 21 nt, RNAi
acuggaguguccuugcuguuu

SEQ ID NO: 10647 - RNA, 21 nt, RNAi
uuugaccucacaggaacgaca

SEQ ID NO: 10648 - DNA, 21 bp, homo sapiens
gaggtcaggtcttggtaggtg

SEQ ID NO: 10649 - RNA, 21 nt, RNAi
ggucaggucuugguagguguu

SEQ ID NO: 10650 - RNA, 21 nt, RNAi
uuccaguccagaaccauccac

SEQ ID NO: 10651 - DNA, 21 bp, homo sapiens
gacaatcctggaaatctgttc

SEQ ID NO: 10652 - RNA, 21 nt, RNAi
caauccuggaaaucuguucuu

SEQ ID NO: 10653 - RNA, 21 nt, RNAi
uuguuaggaccuuuagacaag

SEQ ID NO: 10654 - DNA, 21 bp, homo sapiens
gaaatctgttctccagaatcc

SEQ ID NO: 10655 - RNA, 21 nt, RNAi
aaucuguucuccagaauccuu

SEQ ID NO: 10656 - RNA, 21 nt, RNAi
uuuuagacaagaggucuuagg

SEQ ID NO: 10657 - DNA, 21 bp, homo sapiens
gaggctgcaacatacctcaat

SEQ ID NO: 10658 - RNA, 21 nt, RNAi
ggcugcaacauaccucaauuu

SEQ ID NO: 10659 - RNA, 21 nt, RNAi
uuccgacguuguauggaguua

SEQ ID NO: 10660 - DNA, 21 bp, homo sapiens
gaggattgtcattaaacacag

SEQ ID NO: 10661 - RNA, 21 nt, RNAi
ggauugucauuaaacacaguu

SEQ ID NO: 10662 - RNA, 21 nt, RNAi
uuccuaacaguaauuuguguc

SEQ ID NO: 10663 - DNA, 21 bp, homo sapiens
gattgtcattaaacacagttg

SEQ ID NO: 10664 - RNA, 21 nt, RNAi
uugucauuaaacacaguuguu

SEQ ID NO: 10665 - RNA, 21 nt, RNAi
uuaacaguaauuugugucaac

SEQ ID NO: 10666 - DNA, 21 bp, homo sapiens
taaaggtatggagcgatgtga

SEQ ID NO: 10667 - RNA, 21 nt, RNAi
aagguauggagcgaugugauu

SEQ ID NO: 10668 - RNA, 21 nt, RNAi
uuuuccauaccucgcuacacu

SEQ ID NO: 10669 - DNA, 21 bp, homo sapiens
tatggagcgatgtgacgccac

SEQ ID NO: 10670 - RNA, 21 nt, RNAi
uggagcgaugugacgccacuu

SEQ ID NO: 10671 - RNA, 21 nt, RNAi
uuaccucgcuacacugcggug

SEQ ID NO: 10672 - DNA, 21 bp, homo sapiens
tatgatgagacctggactatc

SEQ ID NO: 10673 - RNA, 21 nt, RNAi
ugaugagaccuggacuaucuu

SEQ ID NO: 10674 - RNA, 21 nt, RNAi
uuacuacucuggaccugauag

SEQ ID NO: 10675 - DNA, 21 bp, homo sapiens
tagacaccaatgagattgcac

SEQ ID NO: 10676 - RNA, 21 nt, RNAi
gacaccaaugagauugcacuu

SEQ ID NO: 10677 - RNA, 21 nt, RNAi
uucugugguuacucuaacgug

SEQ ID NO: 10678 - DNA, 21 bp, homo sapiens
tacaaccaccatgacaactgc

SEQ ID NO: 10679 - RNA, 21 nt, RNAi
caaccaccaugacaacugcuu

SEQ ID NO: 10680 - RNA, 21 nt, RNAi
uuguuggugguacuguugacg

SEQ ID NO: 10681 - DNA, 21 bp, homo sapiens
tatgcaggtcctggcaaacct

SEQ ID NO: 10682 - RNA, 21 nt, RNAi
ugcagguccuggcaaaccuuu

SEQ ID NO: 10683 - RNA, 21 nt, RNAi
uuacguccaggaccguuugga

SEQ ID NO: 10684 - DNA, 21 bp, homo sapiens
taggtgcctgcatctgtctgc

SEQ ID NO: 10685 - RNA, 21 nt, RNAi
ggugccugcaucugucugcuu

SEQ ID NO: 10686 - RNA, 21 nt, RNAi
uuccacggacguagacagacg

SEQ ID NO: 10687 - DNA, 21 bp, homo sapiens
tatcctccaaagccattgtaa

SEQ ID NO: 10688 - RNA, 21 nt, RNAi
uccuccaaagccauuguaauu

SEQ ID NO: 10689 - RNA, 21 nt, RNAi
uuaggagguuucgguaacauu

SEQ ID NO: 10690 - DNA, 21 bp, homo sapiens
taaatgtgtgtacagtgtgta

SEQ ID NO: 10691 - RNA, 21 nt, RNAi
aauguguguacaguguguauu

SEQ ID NO: 10692 - RNA, 21 nt, RNAi
uuuuacacacaugucacacau

SEQ ID NO: 10693 - DNA, 21 bp, homo sapiens
tacagtgtgtataaaccttct

SEQ ID NO: 10694 - RNA, 21 nt, RNAi
caguguguauaaaccuucuuu

SEQ ID NO: 10695 - RNA, 21 nt, RNAi
uugucacacauauuuggaaga

SEQ ID NO: 10696 - DNA, 21 bp, homo sapiens
aaaggtatggagcgatgtgac

SEQ ID NO: 10697 - RNA, 21 nt, RNAi
agguauggagcgaugugacuu

SEQ ID NO: 10698 - RNA, 21 nt, RNAi
uuuccauaccucgcuacacug

SEQ ID NO: 10699 - DNA, 21 bp, homo sapiens
aagatctacttcttccgaggc

SEQ ID NO: 10700 - RNA, 21 nt, RNAi
gaucuacuucuuccgaggcuu

SEQ ID NO: 10701 - RNA, 21 nt, RNAi
uucuagaugaagaaggcuccg

SEQ ID NO: 10702 - DNA, 21 bp, homo sapiens
cagaagaggttcgtgctttct

SEQ ID NO: 10703 - RNA, 21 nt, RNAi
gaagagguucgugcuuucuuu

SEQ ID NO: 10704 - RNA, 21 nt, RNAi
uucuucuccaagcacgaaaga

SEQ ID NO: 10705 - DNA, 21 bp, homo sapiens
cacctttactgaggtgcacga

SEQ ID NO: 10706 - RNA, 21 nt, RNAi
ccuuuacugaggugcacgauu

SEQ ID NO: 10707 - RNA, 21 nt, RNAi
uuggaaaugacuccacgugcu

SEQ ID NO: 10708 - DNA, 21 bp, homo sapiens
catcatgatcgacttcgccag

SEQ ID NO: 10709 - RNA, 21 nt, RNAi
ucaugaucgacuucgccaguu

SEQ ID NO: 10710 - RNA, 21 nt, RNAi
uuaguacuagcugaagcgguc

SEQ ID NO: 10711 - DNA, 21 bp, homo sapiens
catgatcgacttcgccaggta

SEQ ID NO: 10712 - RNA, 21 nt, RNAi
ugaucgacuucgccagguauu

SEQ ID NO: 10713 - RNA, 21 nt, RNAi
uuacuagcugaagcgguccau

SEQ ID NO: 10714 - DNA, 21 bp, homo sapiens
cacatttggttcttccaaggt

SEQ ID NO: 10715 - RNA, 21 nt, RNAi
cauuugguucuuccaagguuu

SEQ ID NO: 10716 - RNA, 21 nt, RNAi
uuguaaaccaagaagguucca

SEQ ID NO: 10717 - DNA, 21 bp, homo sapiens
catttggttcttccaaggtgc

SEQ ID NO: 10718 - RNA, 21 nt, RNAi
uuugguucuuccaaggugcuu

SEQ ID NO: 10719 - RNA, 21 nt, RNAi
uuaaaccaagaagguuccacg

SEQ ID NO: 10720 - DNA, 21 bp, homo sapiens
caagatctacttcttccgagg

SEQ ID NO: 10721 - RNA, 21 nt, RNAi
agaucuacuucuuccgagguu

SEQ ID NO: 10722 - RNA, 21 nt, RNAi
uuucuagaugaagaaggcucc

SEQ ID NO: 10723 - DNA, 21 bp, homo sapiens
gaagaggttcgtgctttctgg

SEQ ID NO: 10724 - RNA, 21 nt, RNAi
agagguucgugcuuucugguu

SEQ ID NO: 10725 - RNA, 21 nt, RNAi
uuucuccaagcacgaaagacc

SEQ ID NO: 10726 - DNA, 21 bp, homo sapiens
gatgtgacgccactcaccttt

SEQ ID NO: 10727 - RNA, 21 nt, RNAi
ugugacgccacucaccuuuuu

SEQ ID NO: 10728 - RNA, 21 nt, RNAi
uuacacugcggugaguggaaa

SEQ ID NO: 10729 - DNA, 21 bp, homo sapiens
gacatcatgatcgacttcgcc

SEQ ID NO: 10730 - RNA, 21 nt, RNAi
caucaugaucgacuucgccuu

SEQ ID NO: 10731 - RNA, 21 nt, RNAi
uuguaguacuagcugaagcgg

SEQ ID NO: 10732 - DNA, 21 bp, homo sapiens
gactatgatgagacctggact

SEQ ID NO: 10733 - RNA, 21 nt, RNAi
cuaugaugagaccuggacuuu

SEQ ID NO: 10734 - RNA, 21 nt, RNAi
uugauacuacucuggaccuga

SEQ ID NO: 10735 - DNA, 21 bp, homo sapiens
gatgtccgccttctacacctt

SEQ ID NO: 10736 - RNA, 21 nt, RNAi
uguccgccuucuacaccuuuu

SEQ ID NO: 10737 - RNA, 21 nt, RNAi
uuacaggcggaagauguggaa

SEQ ID NO: 10738 - DNA, 21 bp, homo sapiens
gatctacttcttccgaggcag

SEQ ID NO: 10739 - RNA, 21 nt, RNAi
ucuacuucuuccgaggcaguu

SEQ ID NO: 10740 - RNA, 21 nt, RNAi
uuagaugaagaaggcuccguc

SEQ ID NO: 10741 - DNA, 21 bp, homo sapiens
gatgctgatggctatgcctac

SEQ ID NO: 10742 - RNA, 21 nt, RNAi
ugcugauggcuaugccuacuu

SEQ ID NO: 10743 - RNA, 21 nt, RNAi
uuacgacuaccgauacggaug

SEQ ID NO: 10744 - DNA, 21 bp, homo sapiens
gatggctatgcctacttcctg

SEQ ID NO: 10745 - RNA, 21 nt, RNAi
uggcuaugccuacuuccuguu

SEQ ID NO: 10746 - RNA, 21 nt, RNAi
uuaccgauacggaugaaggac

SEQ ID NO: 10747 - DNA, 21 bp, homo sapiens
taaaggtatggagcgatgtga

SEQ ID NO: 10748 - RNA, 21 nt, RNAi
aagguauggagcgaugugauu

SEQ ID NO: 10749 - RNA, 21 nt, RNAi
uuuuccauaccucgcuacacu

SEQ ID NO: 10750 - DNA, 21 bp, homo sapiens
tatgatgagacctggactatc

SEQ ID NO: 10751 - RNA, 21 nt, RNAi
ugaugagaccuggacuaucuu

SEQ ID NO: 10752 - RNA, 21 nt, RNAi
uuacuacucuggaccugauag

SEQ ID NO: 10753 - DNA, 21 bp, homo sapiens
aagtttcttctaatactgctc

SEQ ID NO: 10754 - RNA, 21 nt, RNAi
guuucuucuaauacugcucuu

SEQ ID NO: 10755 - RNA, 21 nt, RNAi
uucaaagaagauuaugacgag

SEQ ID NO: 10756 - DNA, 21 bp, homo sapiens
aatactgctcctgcaggccac

SEQ ID NO: 10757 - RNA, 21 nt, RNAi
uacugcuccugcaggccacuu

SEQ ID NO: 10758 - RNA, 21 nt, RNAi
uuaugacgaggacguccggug

SEQ ID NO: 10759 - DNA, 21 bp, homo sapiens
aacagctctacaagcctggaa

SEQ ID NO: 10760 - RNA, 21 nt, RNAi
cagcucuacaagccuggaauu

SEQ ID NO: 10761 - RNA, 21 nt, RNAi
uugucgagauguucggaccuu

SEQ ID NO: 10762 - DNA, 21 bp, homo sapiens
aataatgtgctatttggtgag

SEQ ID NO: 10763 - RNA, 21 nt, RNAi
uaaugugcuauuuggugaguu

SEQ ID NO: 10764 - RNA, 21 nt, RNAi
uuauuacacgauaaaccacuc

SEQ ID NO: 10765 - DNA, 21 bp, homo sapiens
aatgtgctatttggtgagaga

SEQ ID NO: 10766 - RNA, 21 nt, RNAi
ugugcuauuuggugagagauu

SEQ ID NO: 10767 - RNA, 21 nt, RNAi
uuacacgauaaaccacucucu

SEQ ID NO: 10768 - DNA, 21 bp, homo sapiens
aaacaaacttccagtgacaaa

SEQ ID NO: 10769 - RNA, 21 nt, RNAi
acaaacuuccagugacaaauu

SEQ ID NO: 10770 - RNA, 21 nt, RNAi
uuuguuugaaggucacuguuu

SEQ ID NO: 10771 - DNA, 21 bp, homo sapiens
aaatccaagaaatgcagcact

SEQ ID NO: 10772 - RNA, 21 nt, RNAi
auccaagaaaugcagcacuuu

SEQ ID NO: 10773 - RNA, 21 nt, RNAi
uuuagguucuuuacgucguga

SEQ ID NO: 10774 - DNA, 21 bp, homo sapiens
aatccaagaaatgcagcactt

SEQ ID NO: 10775 - RNA, 21 nt, RNAi
uccaagaaaugcagcacuuuu

SEQ ID NO: 10776 - RNA, 21 nt, RNAi
uuagguucuuuacgucgugaa

SEQ ID NO: 10777 - DNA, 21 bp, homo sapiens
aagaaatgcagcacttcttgg

SEQ ID NO: 10778 - RNA, 21 nt, RNAi
gaaaugcagcacuucuugguu

SEQ ID NO: 10779 - RNA, 21 nt, RNAi
uucuuuacgucgugaagaacc

SEQ ID NO: 10780 - DNA, 21 bp, homo sapiens
aataattacacacctgacatg

SEQ ID NO: 10781 - RNA, 21 nt, RNAi
uaauuacacaccugacauguu

SEQ ID NO: 10782 - RNA, 21 nt, RNAi
uuauuaauguguggacuguac

SEQ ID NO: 10783 - DNA, 21 bp, homo sapiens
aattacacacctgacatgaac

SEQ ID NO: 10784 - RNA, 21 nt, RNAi
uuacacaccugacaugaacuu

SEQ ID NO: 10785 - RNA, 21 nt, RNAi
uuaauguguggacuguacuug

SEQ ID NO: 10786 - DNA, 21 bp, homo sapiens
aaccgtgaggatgttgactac

SEQ ID NO: 10787 - RNA, 21 nt, RNAi
ccgugaggauguugacuacuu

SEQ ID NO: 10788 - RNA, 21 nt, RNAi
uuggcacuccuacaacugaug

SEQ ID NO: 10789 - DNA, 21 bp, homo sapiens
aatccggaaagctttccaagt

SEQ ID NO: 10790 - RNA, 21 nt, RNAi
uccggaaagcuuuccaaguuu

SEQ ID NO: 10791 - RNA, 21 nt, RNAi
uuaggccuuucgaaagguuca

SEQ ID NO: 10792 - DNA, 21 bp, homo sapiens
aaagctttccaagtatggagt

SEQ ID NO: 10793 - RNA, 21 nt, RNAi
agcuuuccaaguauggaguuu

SEQ ID NO: 10794 - RNA, 21 nt, RNAi
uuucgaaagguucauaccuca

SEQ ID NO: 10795 - DNA, 21 bp, homo sapiens
aagctttccaagtatggagta

SEQ ID NO: 10796 - RNA, 21 nt, RNAi
gcuuuccaaguauggaguauu

SEQ ID NO: 10797 - RNA, 21 nt, RNAi
uucgaaagguucauaccucau

SEQ ID NO: 10798 - DNA, 21 bp, homo sapiens
aattcagcaagattaacacag

SEQ ID NO: 10799 - RNA, 21 nt, RNAi
uucagcaagauuaacacaguu

SEQ ID NO: 10800 - RNA, 21 nt, RNAi
uuaagucguucuaauuguguc

SEQ ID NO: 10801 - DNA, 21 bp, homo sapiens
aagattaacacaggcatggct

SEQ ID NO: 10802 - RNA, 21 nt, RNAi
gauuaacacaggcauggcuuu

SEQ ID NO: 10803 - RNA, 21 nt, RNAi
uucuaauuguguccguaccga

SEQ ID NO: 10804 - DNA, 21 bp, homo sapiens
aacacaggcatggctgacatt

SEQ ID NO: 10805 - RNA, 21 nt, RNAi
cacaggcauggcugacauuuu

SEQ ID NO: 10806 - RNA, 21 nt, RNAi
uuguguccguaccgacuguaa

SEQ ID NO: 10807 - DNA, 21 bp, homo sapiens
aattctggactacacattcag

SEQ ID NO: 10808 - RNA, 21 nt, RNAi
uucuggacuacacauucaguu

SEQ ID NO: 10809 - RNA, 21 nt, RNAi
uuaagaccugauguguaaguc

SEQ ID NO: 10810 - DNA, 21 bp, homo sapiens
aaacttgttcctcactgctgt

SEQ ID NO: 10811 - RNA, 21 nt, RNAi
acuuguuccucacugcuguuu

SEQ ID NO: 10812 - RNA, 21 nt, RNAi
uuugaacaaggagugacgaca

SEQ ID NO: 10813 - DNA, 21 bp, homo sapiens
aacttgttcctcactgctgtt

SEQ ID NO: 10814 - RNA, 21 nt, RNAi
cuuguuccucacugcuguuuu

SEQ ID NO: 10815 - RNA, 21 nt, RNAi
uugaacaaggagugacgacaa

SEQ ID NO: 10816 - DNA, 21 bp, homo sapiens
aaatatgtcgacatcaacaca

SEQ ID NO: 10817 - RNA, 21 nt, RNAi
auaugucgacaucaacacauu

SEQ ID NO: 10818 - RNA, 21 nt, RNAi
uuuauacagcuguaguugugu

SEQ ID NO: 10819 - DNA, 21 bp, homo sapiens
aatatgtcgacatcaacacat

SEQ ID NO: 10820 - RNA, 21 nt, RNAi
uaugucgacaucaacacauuu

SEQ ID NO: 10821 - RNA, 21 nt, RNAi
uuauacagcuguaguugugua

SEQ ID NO: 10822 - DNA, 21 bp, homo sapiens
aacacatttcgcctctctgct

SEQ ID NO: 10823 - RNA, 21 nt, RNAi
cacauuucgccucucugcuuu

SEQ ID NO: 10824 - RNA, 21 nt, RNAi
uuguguaaagcggagagacga

SEQ ID NO: 10825 - DNA, 21 bp, homo sapiens
aaagagaaccaacgcttgcca

SEQ ID NO: 10826 - RNA, 21 nt, RNAi
agagaaccaacgcuugccauu

SEQ ID NO: 10827 - RNA, 21 nt, RNAi
uuucucuugguugcgaacggu

SEQ ID NO: 10828 - DNA, 21 bp, homo sapiens
aagagaaccaacgcttgccaa

SEQ ID NO: 10829 - RNA, 21 nt, RNAi
gagaaccaacgcuugccaauu

SEQ ID NO: 10830 - RNA, 21 nt, RNAi
uucucuugguugcgaacgguu

SEQ ID NO: 10831 - DNA, 21 bp, homo sapiens
aaccaacgcttgccaaatcct

SEQ ID NO: 10832 - RNA, 21 nt, RNAi
ccaacgcuugccaaauccuuu

SEQ ID NO: 10833 - RNA, 21 nt, RNAi
uugguugcgaacgguuuagga

SEQ ID NO: 10834 - DNA, 21 bp, homo sapiens
aacgcttgccaaatcctgaca

SEQ ID NO: 10835 - RNA, 21 nt, RNAi
cgcuugccaaauccugacauu

SEQ ID NO: 10836 - RNA, 21 nt, RNAi
uugcgaacgguuuaggacugu

SEQ ID NO: 10837 - DNA, 21 bp, homo sapiens
aaatcctgacaattcagaacc

SEQ ID NO: 10838 - RNA, 21 nt, RNAi
auccugacaauucagaaccuu

SEQ ID NO: 10839 - RNA, 21 nt, RNAi
uuuaggacuguuaagucuugg

SEQ ID NO: 10840 - DNA, 21 bp, homo sapiens
aatcctgacaattcagaacca

SEQ ID NO: 10841 - RNA, 21 nt, RNAi
uccugacaauucagaaccauu

SEQ ID NO: 10842 - RNA, 21 nt, RNAi
uuaggacuguuaagucuuggu

SEQ ID NO: 10843 - DNA, 21 bp, homo sapiens
aattcagaaccagctctctgt

SEQ ID NO: 10844 - RNA, 21 nt, RNAi
uucagaaccagcucucuguuu

SEQ ID NO: 10845 - RNA, 21 nt, RNAi
uuaagucuuggucgagagaca

SEQ ID NO: 10846 - DNA, 21 bp, homo sapiens
aaagacaggttcttctggctg

SEQ ID NO: 10847 - RNA, 21 nt, RNAi
agacagguucuucuggcuguu

SEQ ID NO: 10848 - RNA, 21 nt, RNAi
uuucuguccaagaagaccgac

SEQ ID NO: 10849 - DNA, 21 bp, homo sapiens
aagacaggttcttctggctga

SEQ ID NO: 10850 - RNA, 21 nt, RNAi
gacagguucuucuggcugauu

SEQ ID NO: 10851 - RNA, 21 nt, RNAi
uucuguccaagaagaccgacu

SEQ ID NO: 10852 - DNA, 21 bp, homo sapiens
aaggtttctgagagaccaaag

SEQ ID NO: 10853 - RNA, 21 nt, RNAi
gguuucugagagaccaaaguu

SEQ ID NO: 10854 - RNA, 21 nt, RNAi
uuccaaagacucucugguuuc

SEQ ID NO: 10855 - DNA, 21 bp, homo sapiens
aatttcttccttatggccaac

SEQ ID NO: 10856 - RNA, 21 nt, RNAi
uuucuuccuuauggccaacuu

SEQ ID NO: 10857 - RNA, 21 nt, RNAi
uuaaagaaggaauaccgguug

SEQ ID NO: 10858 - DNA, 21 bp, homo sapiens
aaccttgccatctggcattga

SEQ ID NO: 10859 - RNA, 21 nt, RNAi
ccuugccaucuggcauugauu

SEQ ID NO: 10860 - RNA, 21 nt, RNAi
uuggaacgguagaccguaacu

SEQ ID NO: 10861 - DNA, 21 bp, homo sapiens
aagctgcttatgaaattgaag

SEQ ID NO: 10862 - RNA, 21 nt, RNAi
gcugcuuaugaaauugaaguu

SEQ ID NO: 10863 - RNA, 21 nt, RNAi
uucgacgaauacuuuaacuuc

SEQ ID NO: 10864 - DNA, 21 bp, homo sapiens
aaattgaagccagaaatcaag

SEQ ID NO: 10865 - RNA, 21 nt, RNAi
auugaagccagaaaucaaguu

SEQ ID NO: 10866 - RNA, 21 nt, RNAi
uuuaacuucggucuuuaguuc

SEQ ID NO: 10867 - DNA, 21 bp, homo sapiens
aattgaagccagaaatcaagt

SEQ ID NO: 10868 - RNA, 21 nt, RNAi
uugaagccagaaaucaaguuu

SEQ ID NO: 10869 - RNA, 21 nt, RNAi
uuaacuucggucuuuaguuca

SEQ ID NO: 10870 - DNA, 21 bp, homo sapiens
aatttaagaccagagccaaat

SEQ ID NO: 10871 - RNA, 21 nt, RNAi
uuuaagaccagagccaaauuu

SEQ ID NO: 10872 - RNA, 21 nt, RNAi
uuaaauucuggucucgguuua

SEQ ID NO: 10873 - DNA, 21 bp, homo sapiens
aagaccagagccaaattatcc

SEQ ID NO: 10874 - RNA, 21 nt, RNAi
gaccagagccaaauuauccuu

SEQ ID NO: 10875 - RNA, 21 nt, RNAi
uucuggucucgguuuaauagg

SEQ ID NO: 10876 - DNA, 21 bp, homo sapiens
aaccagtattggaggtatgat

SEQ ID NO: 10877 - RNA, 21 nt, RNAi
ccaguauuggagguaugauuu

SEQ ID NO: 10878 - RNA, 21 nt, RNAi
uuggucauaaccuccauacua

SEQ ID NO: 10879 - DNA, 21 bp, homo sapiens
aaaggagacagatgatggacc

SEQ ID NO: 10880 - RNA, 21 nt, RNAi
aggagacagaugauggaccuu

SEQ ID NO: 10881 - RNA, 21 nt, RNAi
uuuccucugucuacuaccugg

SEQ ID NO: 10882 - DNA, 21 bp, homo sapiens
aaactgattaccaagaacttc

SEQ ID NO: 10883 - RNA, 21 nt, RNAi
acugauuaccaagaacuucuu

SEQ ID NO: 10884 - RNA, 21 nt, RNAi
uuugacuaaugguucuugaag

SEQ ID NO: 10885 - DNA, 21 bp, homo sapiens
aactgattaccaagaacttcc

SEQ ID NO: 10886 - RNA, 21 nt, RNAi
cugauuaccaagaacuuccuu

SEQ ID NO: 10887 - RNA, 21 nt, RNAi
uugacuaaugguucuugaagg

SEQ ID NO: 10888 - DNA, 21 bp, homo sapiens
aattgatgcagtcttctattc

SEQ ID NO: 10889 - RNA, 21 nt, RNAi
uugaugcagucuucuauucuu

SEQ ID NO: 10890 - RNA, 21 nt, RNAi
uuaacuacgucagaagauaag

SEQ ID NO: 10891 - DNA, 21 bp, homo sapiens
aatatgacttcctactccaac

SEQ ID NO: 10892 - RNA, 21 nt, RNAi
uaugacuuccuacuccaacuu

SEQ ID NO: 10893 - RNA, 21 nt, RNAi
uuauacugaaggaugagguug

SEQ ID NO: 10894 - DNA, 21 bp, homo sapiens
aaagcaatagctggtttggtt

SEQ ID NO: 10895 - RNA, 21 nt, RNAi
agcaauagcugguuugguuuu

SEQ ID NO: 10896 - RNA, 21 nt, RNAi
uuucguuaucgaccaaaccaa

SEQ ID NO: 10897 - DNA, 21 bp, homo sapiens
aagcaatagctggtttggttg

SEQ ID NO: 10898 - RNA, 21 nt, RNAi
gcaauagcugguuugguuguu

SEQ ID NO: 10899 - RNA, 21 nt, RNAi
uucguuaucgaccaaaccaac

SEQ ID NO: 10900 - DNA, 21 bp, homo sapiens
aatagctggtttggttgttag

SEQ ID NO: 10901 - RNA, 21 nt, RNAi
uagcugguuugguuguuaguu

SEQ ID NO: 10902 - RNA, 21 nt, RNAi
uuaucgaccaaaccaacaauc

SEQ ID NO: 10903 - DNA, 21 bp, homo sapiens
aactctaattgtccattcttg

SEQ ID NO: 10904 - RNA, 21 nt, RNAi
cucuaauuguccauucuuguu

SEQ ID NO: 10905 - RNA, 21 nt, RNAi
uugagauuaacagguaagaac

SEQ ID NO: 10906 - DNA, 21 bp, homo sapiens
aattgtccattcttgcttgac

SEQ ID NO: 10907 - RNA, 21 nt, RNAi
uuguccauucuugcuugacuu

SEQ ID NO: 10908 - RNA, 21 nt, RNAi
uuaacagguaagaacgaacug

SEQ ID NO: 10909 - DNA, 21 bp, homo sapiens
aatagttaccttcaaagcaag

SEQ ID NO: 10910 - RNA, 21 nt, RNAi
uaguuaccuucaaagcaaguu

SEQ ID NO: 10911 - RNA, 21 nt, RNAi
uuaucaauggaaguuucguuc

SEQ ID NO: 10912 - DNA, 21 bp, homo sapiens
aattctatttgaagcatgctc

SEQ ID NO: 10913 - RNA, 21 nt, RNAi
uucuauuugaagcaugcucuu

SEQ ID NO: 10914 - RNA, 21 nt, RNAi
uuaagauaaacuucguacgag

SEQ ID NO: 10915 - DNA, 21 bp, homo sapiens
aagcatgctctgtaagttgct

SEQ ID NO: 10916 - RNA, 21 nt, RNAi
gcaugcucuguaaguugcuuu

SEQ ID NO: 10917 - RNA, 21 nt, RNAi
uucguacgagacauucaacga

SEQ ID NO: 10918 - DNA, 21 bp, homo sapiens
aagttgcttcctaacatcctt

SEQ ID NO: 10919 - RNA, 21 nt, RNAi
guugcuuccuaacauccuuuu

SEQ ID NO: 10920 - RNA, 21 nt, RNAi
uucaacgaaggauuguaggaa

SEQ ID NO: 10921 - DNA, 21 bp, homo sapiens
aacatccttggactgagaaat

SEQ ID NO: 10922 - RNA, 21 nt, RNAi
cauccuuggacugagaaauuu

SEQ ID NO: 10923 - RNA, 21 nt, RNAi
uuguaggaaccugacucuuua

SEQ ID NO: 10924 - DNA, 21 bp, homo sapiens
caggccactgcttctggagct

SEQ ID NO: 10925 - RNA, 21 nt, RNAi
ggccacugcuucuggagcuuu

SEQ ID NO: 10926 - RNA, 21 nt, RNAi
uuccggugacgaagaccucga

SEQ ID NO: 10927 - DNA, 21 bp, homo sapiens
cactgcttctggagctcttcc

SEQ ID NO: 10928 - RNA, 21 nt, RNAi
cugcuucuggagcucuuccuu

SEQ ID NO: 10929 - RNA, 21 nt, RNAi
uugacgaagaccucgagaagg

SEQ ID NO: 10930 - DNA, 21 bp, homo sapiens
caagaaatgcagcacttcttg

SEQ ID NO: 10931 - RNA, 21 nt, RNAi
agaaaugcagcacuucuuguu

SEQ ID NO: 10932 - RNA, 21 nt, RNAi
uuucuuuacgucgugaagaac

SEQ ID NO: 10933 - DNA, 21 bp, homo sapiens
cacgcacctcgatgtggagtc

SEQ ID NO: 10934 - RNA, 21 nt, RNAi
cgcaccucgauguggagucuu

SEQ ID NO: 10935 - RNA, 21 nt, RNAi
uugcguggagcuacaccucag

SEQ ID NO: 10936 - DNA, 21 bp, homo sapiens
cattatatcacctacagaatc

SEQ ID NO: 10937 - RNA, 21 nt, RNAi
uuauaucaccuacagaaucuu

SEQ ID NO: 10938 - RNA, 21 nt, RNAi
uuaauauaguggaugucuuag

SEQ ID NO: 10939 - DNA, 21 bp, homo sapiens
cagaatcaataattacacacc

SEQ ID NO: 10940 - RNA, 21 nt, RNAi
gaaucaauaauuacacaccuu

SEQ ID NO: 10941 - RNA, 21 nt, RNAi
uucuuaguuauuaaugugugg

SEQ ID NO: 10942 - DNA, 21 bp, homo sapiens
caataattacacacctgacat

SEQ ID NO: 10943 - RNA, 21 nt, RNAi
auaauuacacaccugacauuu

SEQ ID NO: 10944 - RNA, 21 nt, RNAi
uuuauuaauguguggacugua

SEQ ID NO: 10945 - DNA, 21 bp, homo sapiens
cacacctgacatgaaccgtga

SEQ ID NO: 10946 - RNA, 21 nt, RNAi
caccugacaugaaccgugauu

SEQ ID NO: 10947 - RNA, 21 nt, RNAi
uuguggacuguacuuggcacu

SEQ ID NO: 10948 - DNA, 21 bp, homo sapiens
cacctgacatgaaccgtgagg

SEQ ID NO: 10949 - RNA, 21 nt, RNAi
ccugacaugaaccgugagguu

SEQ ID NO: 10950 - RNA, 21 nt, RNAi
uuggacuguacuuggcacucc

SEQ ID NO: 10951 - DNA, 21 bp, homo sapiens
catgaaccgtgaggatgttga

SEQ ID NO: 10952 - RNA, 21 nt, RNAi
ugaaccgugaggauguugauu

SEQ ID NO: 10953 - RNA, 21 nt, RNAi
uuacuuggcacuccuacaacu

SEQ ID NO: 10954 - DNA, 21 bp, homo sapiens
caatccggaaagctttccaag

SEQ ID NO: 10955 - RNA, 21 nt, RNAi
auccggaaagcuuuccaaguu

SEQ ID NO: 10956 - RNA, 21 nt, RNAi
uuuaggccuuucgaaagguuc

SEQ ID NO: 10957 - DNA, 21 bp, homo sapiens
caagtatggagtaatgttacc

SEQ ID NO: 10958 - RNA, 21 nt, RNAi
aguauggaguaauguuaccuu

SEQ ID NO: 10959 - RNA, 21 nt, RNAi
uuucauaccucauuacaaugg

SEQ ID NO: 10960 - DNA, 21 bp, homo sapiens
cagcaagattaacacaggcat

SEQ ID NO: 10961 - RNA, 21 nt, RNAi
gcaagauuaacacaggcauuu

SEQ ID NO: 10962 - RNA, 21 nt, RNAi
uucguucuaauuguguccgua

SEQ ID NO: 10963 - DNA, 21 bp, homo sapiens
caagattaacacaggcatggc

SEQ ID NO: 10964 - RNA, 21 nt, RNAi
agauuaacacaggcauggcuu

SEQ ID NO: 10965 - RNA, 21 nt, RNAi
uuucuaauuguguccguaccg

SEQ ID NO: 10966 - DNA, 21 bp, homo sapiens
cacatttcgatgaggacgaat

SEQ ID NO: 10967 - RNA, 21 nt, RNAi
cauuucgaugaggacgaauuu

SEQ ID NO: 10968 - RNA, 21 nt, RNAi
uuguaaagcuacuccugcuua

SEQ ID NO: 10969 - DNA, 21 bp, homo sapiens
catttcgatgaggacgaattc

SEQ ID NO: 10970 - RNA, 21 nt, RNAi
uuucgaugaggacgaauucuu

SEQ ID NO: 10971 - RNA, 21 nt, RNAi
uuaaagcuacuccugcuuaag

SEQ ID NO: 10972 - DNA, 21 bp, homo sapiens
cacattcaggaggcacaaact

SEQ ID NO: 10973 - RNA, 21 nt, RNAi
cauucaggaggcacaaacuuu

SEQ ID NO: 10974 - RNA, 21 nt, RNAi
uuguaaguccuccguguuuga

SEQ ID NO: 10975 - DNA, 21 bp, homo sapiens
cattcaggaggcacaaacttg

SEQ ID NO: 10976 - RNA, 21 nt, RNAi
uucaggaggcacaaacuuguu

SEQ ID NO: 10977 - RNA, 21 nt, RNAi
uuaaguccuccguguuugaac

SEQ ID NO: 10978 - DNA, 21 bp, homo sapiens
caggaggcacaaacttgttcc

SEQ ID NO: 10979 - RNA, 21 nt, RNAi
ggaggcacaaacuuguuccuu

SEQ ID NO: 10980 - RNA, 21 nt, RNAi
uuccuccguguuugaacaagg

SEQ ID NO: 10981 - DNA, 21 bp, homo sapiens
cacaaacttgttcctcactgc

SEQ ID NO: 10982 - RNA, 21 nt, RNAi
caaacuuguuccucacugcuu

SEQ ID NO: 10983 - RNA, 21 nt, RNAi
uuguuugaacaaggagugacg

SEQ ID NO: 10984 - DNA, 21 bp, homo sapiens
caaacttgttcctcactgctg

SEQ ID NO: 10985 - RNA, 21 nt, RNAi
aacuuguuccucacugcuguu

SEQ ID NO: 10986 - RNA, 21 nt, RNAi
uuuugaacaaggagugacgac

SEQ ID NO: 10987 - DNA, 21 bp, homo sapiens
cactgctgttcacgagattgg

SEQ ID NO: 10988 - RNA, 21 nt, RNAi
cugcuguucacgagauugguu

SEQ ID NO: 10989 - RNA, 21 nt, RNAi
uugacgacaagugcucuaacc

SEQ ID NO: 10990 - DNA, 21 bp, homo sapiens
cacgagattggccattcctta

SEQ ID NO: 10991 - RNA, 21 nt, RNAi
cgagauuggccauuccuuauu

SEQ ID NO: 10992 - RNA, 21 nt, RNAi
uugcucuaaccgguaaggaau

SEQ ID NO: 10993 - DNA, 21 bp, homo sapiens
cattccttaggtcttggccat

SEQ ID NO: 10994 - RNA, 21 nt, RNAi
uuccuuaggucuuggccauuu

SEQ ID NO: 10995 - RNA, 21 nt, RNAi
uuaaggaauccagaaccggua

SEQ ID NO: 10996 - DNA, 21 bp, homo sapiens
cattctagtgatccaaaggct

SEQ ID NO: 10997 - RNA, 21 nt, RNAi
uucuagugauccaaaggcuuu

SEQ ID NO: 10998 - RNA, 21 nt, RNAi
uuaagaucacuagguuuccga

SEQ ID NO: 10999 - DNA, 21 bp, homo sapiens
cacctacaaatatgtcgacat

SEQ ID NO: 11000 - RNA, 21 nt, RNAi
ccuacaaauaugucgacauuu

SEQ ID NO: 11001 - RNA, 21 nt, RNAi
uuggauguuuauacagcugua

SEQ ID NO: 11002 - DNA, 21 bp, homo sapiens
caaatatgtcgacatcaacac

SEQ ID NO: 11003 - RNA, 21 nt, RNAi
aauaugucgacaucaacacuu

SEQ ID NO: 11004 - RNA, 21 nt, RNAi
uuuuauacagcuguaguugug

SEQ ID NO: 11005 - DNA, 21 bp, homo sapiens
catcaacacatttcgcctctc

SEQ ID NO: 11006 - RNA, 21 nt, RNAi
ucaacacauuucgccucucuu

SEQ ID NO: 11007 - RNA, 21 nt, RNAi
uuaguuguguaaagcggagag

SEQ ID NO: 11008 - DNA, 21 bp, homo sapiens
caacacatttcgcctctctgc

SEQ ID NO: 11009 - RNA, 21 nt, RNAi
acacauuucgccucucugcuu

SEQ ID NO: 11010 - RNA, 21 nt, RNAi
uuuguguaaagcggagagacg

SEQ ID NO: 11011 - DNA, 21 bp, homo sapiens
cacatttcgcctctctgctga

SEQ ID NO: 11012 - RNA, 21 nt, RNAi
cauuucgccucucugcugauu

SEQ ID NO: 11013 - RNA, 21 nt, RNAi
uuguaaagcggagagacgacu

SEQ ID NO: 11014 - DNA, 21 bp, homo sapiens
catttcgcctctctgctgatg

SEQ ID NO: 11015 - RNA, 21 nt, RNAi
uuucgccucucugcugauguu

SEQ ID NO: 11016 - RNA, 21 nt, RNAi
uuaaagcggagagacgacuac

SEQ ID NO: 11017 - DNA, 21 bp, homo sapiens
caacgcttgccaaatcctgac

SEQ ID NO: 11018 - RNA, 21 nt, RNAi
acgcuugccaaauccugacuu

SEQ ID NO: 11019 - RNA, 21 nt, RNAi
uuugcgaacgguuuaggacug

SEQ ID NO: 11020 - DNA, 21 bp, homo sapiens
caaatcctgacaattcagaac

SEQ ID NO: 11021 - RNA, 21 nt, RNAi
aauccugacaauucagaacuu

SEQ ID NO: 11022 - RNA, 21 nt, RNAi
uuuuaggacuguuaagucuug

SEQ ID NO: 11023 - DNA, 21 bp, homo sapiens
caattcagaaccagctctctg

SEQ ID NO: 11024 - RNA, 21 nt, RNAi
auucagaaccagcucucuguu

SEQ ID NO: 11025 - RNA, 21 nt, RNAi
uuuaagucuuggucgagagac

SEQ ID NO: 11026 - DNA, 21 bp, homo sapiens
cagaaccagctctctgtgacc

SEQ ID NO: 11027 - RNA, 21 nt, RNAi
gaaccagcucucugugaccuu

SEQ ID NO: 11028 - RNA, 21 nt, RNAi
uucuuggucgagagacacugg

SEQ ID NO: 11029 - DNA, 21 bp, homo sapiens
caaagacaggttcttctggct

SEQ ID NO: 11030 - RNA, 21 nt, RNAi
aagacagguucuucuggcuuu

SEQ ID NO: 11031 - RNA, 21 nt, RNAi
uuuucuguccaagaagaccga

SEQ ID NO: 11032 - DNA, 21 bp, homo sapiens
caggttcttctggctgaaggt

SEQ ID NO: 11033 - RNA, 21 nt, RNAi
gguucuucuggcugaagguuu

SEQ ID NO: 11034 - RNA, 21 nt, RNAi
uuccaagaagaccgacuucca

SEQ ID NO: 11035 - DNA, 21 bp, homo sapiens
caaccttgccatctggcattg

SEQ ID NO: 11036 - RNA, 21 nt, RNAi
accuugccaucuggcauuguu

SEQ ID NO: 11037 - RNA, 21 nt, RNAi
uuuggaacgguagaccguaac

SEQ ID NO: 11038 - DNA, 21 bp, homo sapiens
catctggcattgaagctgctt

SEQ ID NO: 11039 - RNA, 21 nt, RNAi
ucuggcauugaagcugcuuuu

SEQ ID NO: 11040 - RNA, 21 nt, RNAi
uuagaccguaacuucgacgaa

SEQ ID NO: 11041 - DNA, 21 bp, homo sapiens
cattgaagctgcttatgaaat

SEQ ID NO: 11042 - RNA, 21 nt, RNAi
uugaagcugcuuaugaaauuu

SEQ ID NO: 11043 - RNA, 21 nt, RNAi
uuaacuucgacgaauacuuua

SEQ ID NO: 11044 - DNA, 21 bp, homo sapiens
caatttaagaccagagccaaa

SEQ ID NO: 11045 - RNA, 21 nt, RNAi
auuuaagaccagagccaaauu

SEQ ID NO: 11046 - RNA, 21 nt, RNAi
uuuaaauucuggucucgguuu

SEQ ID NO: 11047 - DNA, 21 bp, homo sapiens
cagtattggaggtatgatgaa

SEQ ID NO: 11048 - RNA, 21 nt, RNAi
guauuggagguaugaugaauu

SEQ ID NO: 11049 - RNA, 21 nt, RNAi
uucauaaccuccauacuacuu

SEQ ID NO: 11050 - DNA, 21 bp, homo sapiens
caaactgattaccaagaactt

SEQ ID NO: 11051 - RNA, 21 nt, RNAi
aacugauuaccaagaacuuuu

SEQ ID NO: 11052 - RNA, 21 nt, RNAi
uuuugacuaaugguucuugaa

SEQ ID NO: 11053 - DNA, 21 bp, homo sapiens
caagaacttccaaggaatcgg

SEQ ID NO: 11054 - RNA, 21 nt, RNAi
agaacuuccaaggaaucgguu

SEQ ID NO: 11055 - RNA, 21 nt, RNAi
uuucuugaagguuccuuagcc

SEQ ID NO: 11056 - DNA, 21 bp, homo sapiens
caaggatctaaccaatttgaa

SEQ ID NO: 11057 - RNA, 21 nt, RNAi
aggaucuaaccaauuugaauu

SEQ ID NO: 11058 - RNA, 21 nt, RNAi
uuuccuagauugguuaaacuu

SEQ ID NO: 11059 - DNA, 21 bp, homo sapiens
caatagctggtttggttgtta

SEQ ID NO: 11060 - RNA, 21 nt, RNAi
auagcugguuugguuguuauu

SEQ ID NO: 11061 - RNA, 21 nt, RNAi
uuuaucgaccaaaccaacaau

SEQ ID NO: 11062 - DNA, 21 bp, homo sapiens
catatttgctatgtcctcagt

SEQ ID NO: 11063 - RNA, 21 nt, RNAi
uauuugcuauguccucaguuu

SEQ ID NO: 11064 - RNA, 21 nt, RNAi
uuauaaacgauacaggaguca

SEQ ID NO: 11065 - DNA, 21 bp, homo sapiens
cagtgtaccactacttagaga

SEQ ID NO: 11066 - RNA, 21 nt, RNAi
guguaccacuacuuagagauu

SEQ ID NO: 11067 - RNA, 21 nt, RNAi
uucacauggugaugaaucucu

SEQ ID NO: 11068 - DNA, 21 bp, homo sapiens
cactacttagagatatgtatc

SEQ ID NO: 11069 - RNA, 21 nt, RNAi
cuacuuagagauauguaucuu

SEQ ID NO: 11070 - RNA, 21 nt, RNAi
uugaugaaucucuauacauag

SEQ ID NO: 11071 - DNA, 21 bp, homo sapiens
cattcttgcttgactctacta

SEQ ID NO: 11072 - RNA, 21 nt, RNAi
uucuugcuugacucuacuauu

SEQ ID NO: 11073 - RNA, 21 nt, RNAi
uuaagaacgaacugagaugau

SEQ ID NO: 11074 - DNA, 21 bp, homo sapiens
catgctctgtaagttgcttcc

SEQ ID NO: 11075 - RNA, 21 nt, RNAi
ugcucuguaaguugcuuccuu

SEQ ID NO: 11076 - RNA, 21 nt, RNAi
uuacgagacauucaacgaagg

SEQ ID NO: 11077 - DNA, 21 bp, homo sapiens
catccttggactgagaaatta

SEQ ID NO: 11078 - RNA, 21 nt, RNAi
uccuuggacugagaaauuauu

SEQ ID NO: 11079 - RNA, 21 nt, RNAi
uuaggaaccugacucuuuaau

SEQ ID NO: 11080 - DNA, 21 bp, homo sapiens
gaagtttcttctaatactgct

SEQ ID NO: 11081 - RNA, 21 nt, RNAi
aguuucuucuaauacugcuuu

SEQ ID NO: 11082 - RNA, 21 nt, RNAi
uuucaaagaagauuaugacga

SEQ ID NO: 11083 - DNA, 21 bp, homo sapiens
gaacagctctacaagcctgga

SEQ ID NO: 11084 - RNA, 21 nt, RNAi
acagcucuacaagccuggauu

SEQ ID NO: 11085 - RNA, 21 nt, RNAi
uuugucgagauguucggaccu

SEQ ID NO: 11086 - DNA, 21 bp, homo sapiens
gagataaacaaacttccagtg

SEQ ID NO: 11087 - RNA, 21 nt, RNAi
gauaaacaaacuuccaguguu

SEQ ID NO: 11088 - RNA, 21 nt, RNAi
uucuauuuguuugaaggucac

SEQ ID NO: 11089 - DNA, 21 bp, homo sapiens
gataaacaaacttccagtgac

SEQ ID NO: 11090 - RNA, 21 nt, RNAi
uaaacaaacuuccagugacuu

SEQ ID NO: 11091 - RNA, 21 nt, RNAi
uuauuuguuugaaggucacug

SEQ ID NO: 11092 - DNA, 21 bp, homo sapiens
gagatgatgcacgcacctcga

SEQ ID NO: 11093 - RNA, 21 nt, RNAi
gaugaugcacgcaccucgauu

SEQ ID NO: 11094 - RNA, 21 nt, RNAi
uucuacuacgugcguggagcu

SEQ ID NO: 11095 - DNA, 21 bp, homo sapiens
gatgatgcacgcacctcgatg

SEQ ID NO: 11096 - RNA, 21 nt, RNAi
ugaugcacgcaccucgauguu

SEQ ID NO: 11097 - RNA, 21 nt, RNAi
uuacuacgugcguggagcuac

SEQ ID NO: 11098 - DNA, 21 bp, homo sapiens
gatgcacgcacctcgatgtgg

SEQ ID NO: 11099 - RNA, 21 nt, RNAi
ugcacgcaccucgaugugguu

SEQ ID NO: 11100 - RNA, 21 nt, RNAi
uuacgugcguggagcuacacc

SEQ ID NO: 11101 - DNA, 21 bp, homo sapiens
gaggaaacattatatcaccta

SEQ ID NO: 11102 - RNA, 21 nt, RNAi
ggaaacauuauaucaccuauu

SEQ ID NO: 11103 - RNA, 21 nt, RNAi
uuccuuuguaauauaguggau

SEQ ID NO: 11104 - DNA, 21 bp, homo sapiens
gaaacattatatcacctacag

SEQ ID NO: 11105 - RNA, 21 nt, RNAi
aacauuauaucaccuacaguu

SEQ ID NO: 11106 - RNA, 21 nt, RNAi
uuuuguaauauaguggauguc

SEQ ID NO: 11107 - DNA, 21 bp, homo sapiens
gaatcaataattacacacctg

SEQ ID NO: 11108 - RNA, 21 nt, RNAi
aucaauaauuacacaccuguu

SEQ ID NO: 11109 - RNA, 21 nt, RNAi
uuuaguuauuaauguguggac

SEQ ID NO: 11110 - DNA, 21 bp, homo sapiens
gacatgaaccgtgaggatgtt

SEQ ID NO: 11111 - RNA, 21 nt, RNAi
caugaaccgugaggauguuuu

SEQ ID NO: 11112 - RNA, 21 nt, RNAi
uuguacuuggcacuccuacaa

SEQ ID NO: 11113 - DNA, 21 bp, homo sapiens
gaaccgtgaggatgttgacta

SEQ ID NO: 11114 - RNA, 21 nt, RNAi
accgugaggauguugacuauu

SEQ ID NO: 11115 - RNA, 21 nt, RNAi
uuuggcacuccuacaacugau

SEQ ID NO: 11116 - DNA, 21 bp, homo sapiens
gaggatgttgactacgcaatc

SEQ ID NO: 11117 - RNA, 21 nt, RNAi
ggauguugacuacgcaaucuu

SEQ ID NO: 11118 - RNA, 21 nt, RNAi
uuccuacaacugaugcguuag

SEQ ID NO: 11119 - DNA, 21 bp, homo sapiens
gatgttgactacgcaatccgg

SEQ ID NO: 11120 - RNA, 21 nt, RNAi
uguugacuacgcaauccgguu

SEQ ID NO: 11121 - RNA, 21 nt, RNAi
uuacaacugaugcguuaggcc

SEQ ID NO: 11122 - DNA, 21 bp, homo sapiens
gactacgcaatccggaaagct

SEQ ID NO: 11123 - RNA, 21 nt, RNAi
cuacgcaauccggaaagcuuu

SEQ ID NO: 11124 - RNA, 21 nt, RNAi
uugaugcguuaggccuuucga

SEQ ID NO: 11125 - DNA, 21 bp, homo sapiens
gaaagctttccaagtatggag

SEQ ID NO: 11126 - RNA, 21 nt, RNAi
aagcuuuccaaguauggaguu

SEQ ID NO: 11127 - RNA, 21 nt, RNAi
uuuucgaaagguucauaccuc

SEQ ID NO: 11128 - DNA, 21 bp, homo sapiens
gaaattcagcaagattaacac

SEQ ID NO: 11129 - RNA, 21 nt, RNAi
aauucagcaagauuaacacuu

SEQ ID NO: 11130 - RNA, 21 nt, RNAi
uuuuaagucguucuaauugug

SEQ ID NO: 11131 - DNA, 21 bp, homo sapiens
gattaacacaggcatggctga

SEQ ID NO: 11132 - RNA, 21 nt, RNAi
uuaacacaggcauggcugauu

SEQ ID NO: 11133 - RNA, 21 nt, RNAi
uuaauuguguccguaccgacu

SEQ ID NO: 11134 - DNA, 21 bp, homo sapiens
gagctcatggagacttccatg

SEQ ID NO: 11135 - RNA, 21 nt, RNAi
gcucauggagacuuccauguu

SEQ ID NO: 11136 - RNA, 21 nt, RNAi
uucgaguaccucugaagguac

SEQ ID NO: 11137 - DNA, 21 bp, homo sapiens
gatggcaaaggtggaatccta

SEQ ID NO: 11138 - RNA, 21 nt, RNAi
uggcaaagguggaauccuauu

SEQ ID NO: 11139 - RNA, 21 nt, RNAi
uuaccguuuccaccuuaggau

SEQ ID NO: 11140 - DNA, 21 bp, homo sapiens
gacctggatctggcattggag

SEQ ID NO: 11141 - RNA, 21 nt, RNAi
ccuggaucuggcauuggaguu

SEQ ID NO: 11142 - RNA, 21 nt, RNAi
uuggaccuagaccguaaccuc

SEQ ID NO: 11143 - DNA, 21 bp, homo sapiens
gatgcacatttcgatgaggac

SEQ ID NO: 11144 - RNA, 21 nt, RNAi
ugcacauuucgaugaggacuu

SEQ ID NO: 11145 - RNA, 21 nt, RNAi
uuacguguaaagcuacuccug

SEQ ID NO: 11146 - DNA, 21 bp, homo sapiens
gatgaggacgaattctggact

SEQ ID NO: 11147 - RNA, 21 nt, RNAi
ugaggacgaauucuggacuuu

SEQ ID NO: 11148 - RNA, 21 nt, RNAi
uuacuccugcuuaagaccuga

SEQ ID NO: 11149 - DNA, 21 bp, homo sapiens
gaggacgaattctggactaca

SEQ ID NO: 11150 - RNA, 21 nt, RNAi
ggacgaauucuggacuacauu

SEQ ID NO: 11151 - RNA, 21 nt, RNAi
uuccugcuuaagaccugaugu

SEQ ID NO: 11152 - DNA, 21 bp, homo sapiens
gacgaattctggactacacat

SEQ ID NO: 11153 - RNA, 21 nt, RNAi
cgaauucuggacuacacauuu

SEQ ID NO: 11154 - RNA, 21 nt, RNAi
uugcuuaagaccugaugugua

SEQ ID NO: 11155 - DNA, 21 bp, homo sapiens
gaattctggactacacattca

SEQ ID NO: 11156 - RNA, 21 nt, RNAi
auucuggacuacacauucauu

SEQ ID NO: 11157 - RNA, 21 nt, RNAi
uuuaagaccugauguguaagu

SEQ ID NO: 11158 - DNA, 21 bp, homo sapiens
gactacacattcaggaggcac

SEQ ID NO: 11159 - RNA, 21 nt, RNAi
cuacacauucaggaggcacuu

SEQ ID NO: 11160 - RNA, 21 nt, RNAi
uugauguguaaguccuccgug

SEQ ID NO: 11161 - DNA, 21 bp, homo sapiens
gaggcacaaacttgttcctca

SEQ ID NO: 11162 - RNA, 21 nt, RNAi
ggcacaaacuuguuccucauu

SEQ ID NO: 11163 - RNA, 21 nt, RNAi
uuccguguuugaacaaggagu

SEQ ID NO: 11164 - DNA, 21 bp, homo sapiens
gagattggccattccttaggt

SEQ ID NO: 11165 - RNA, 21 nt, RNAi
gauuggccauuccuuagguuu

SEQ ID NO: 11166 - RNA, 21 nt, RNAi
uucuaaccgguaaggaaucca

SEQ ID NO: 11167 - DNA, 21 bp, homo sapiens
gattggccattccttaggtct

SEQ ID NO: 11168 - RNA, 21 nt, RNAi
uuggccauuccuuaggucuuu

SEQ ID NO: 11169 - RNA, 21 nt, RNAi
uuaaccgguaaggaauccaga

SEQ ID NO: 11170 - DNA, 21 bp, homo sapiens
gatccaaaggctgtaatgttc

SEQ ID NO: 11171 - RNA, 21 nt, RNAi
uccaaaggcuguaauguucuu

SEQ ID NO: 11172 - RNA, 21 nt, RNAi
uuagguuuccgacauuacaag

SEQ ID NO: 11173 - DNA, 21 bp, homo sapiens
gacatcaacacatttcgcctc

SEQ ID NO: 11174 - RNA, 21 nt, RNAi
caucaacacauuucgccucuu

SEQ ID NO: 11175 - RNA, 21 nt, RNAi
uuguaguuguguaaagcggag

SEQ ID NO: 11176 - DNA, 21 bp, homo sapiens
gatgacatacgtggcattcag

SEQ ID NO: 11177 - RNA, 21 nt, RNAi
ugacauacguggcauucaguu

SEQ ID NO: 11178 - RNA, 21 nt, RNAi
uuacuguaugcaccguaaguc

SEQ ID NO: 11179 - DNA, 21 bp, homo sapiens
gacatacgtggcattcagtcc

SEQ ID NO: 11180 - RNA, 21 nt, RNAi
cauacguggcauucaguccuu

SEQ ID NO: 11181 - RNA, 21 nt, RNAi
uuguaugcaccguaagucagg

SEQ ID NO: 11182 - DNA, 21 bp, homo sapiens
gagaaccaacgcttgccaaat

SEQ ID NO: 11183 - RNA, 21 nt, RNAi
gaaccaacgcuugccaaauuu

SEQ ID NO: 11184 - RNA, 21 nt, RNAi
uucuugguugcgaacgguuua

SEQ ID NO: 11185 - DNA, 21 bp, homo sapiens
gaaccaacgcttgccaaatcc

SEQ ID NO: 11186 - RNA, 21 nt, RNAi
accaacgcuugccaaauccuu

SEQ ID NO: 11187 - RNA, 21 nt, RNAi
uuugguugcgaacgguuuagg

SEQ ID NO: 11188 - DNA, 21 bp, homo sapiens
gacaattcagaaccagctctc

SEQ ID NO: 11189 - RNA, 21 nt, RNAi
caauucagaaccagcucucuu

SEQ ID NO: 11190 - RNA, 21 nt, RNAi
uuguuaagucuuggucgagag

SEQ ID NO: 11191 - DNA, 21 bp, homo sapiens
gacaggttcttctggctgaag

SEQ ID NO: 11192 - RNA, 21 nt, RNAi
cagguucuucuggcugaaguu

SEQ ID NO: 11193 - RNA, 21 nt, RNAi
uuguccaagaagaccgacuuc

SEQ ID NO: 11194 - DNA, 21 bp, homo sapiens
gaaggtttctgagagaccaaa

SEQ ID NO: 11195 - RNA, 21 nt, RNAi
agguuucugagagaccaaauu

SEQ ID NO: 11196 - RNA, 21 nt, RNAi
uuuccaaagacucucugguuu

SEQ ID NO: 11197 - DNA, 21 bp, homo sapiens
gagagaccaaagaccagtgtt

SEQ ID NO: 11198 - RNA, 21 nt, RNAi
gagaccaaagaccaguguuuu

SEQ ID NO: 11199 - RNA, 21 nt, RNAi
uucucugguuucuggucacaa

SEQ ID NO: 11200 - DNA, 21 bp, homo sapiens
gagaccaaagaccagtgttaa

SEQ ID NO: 11201 - RNA, 21 nt, RNAi
gaccaaagaccaguguuaauu

SEQ ID NO: 11202 - RNA, 21 nt, RNAi
uucugguuucuggucacaauu

SEQ ID NO: 11203 - DNA, 21 bp, homo sapiens
gaccaaagaccagtgttaatt

SEQ ID NO: 11204 - RNA, 21 nt, RNAi
ccaaagaccaguguuaauuuu

SEQ ID NO: 11205 - RNA, 21 nt, RNAi
uugguuucuggucacaauuaa

SEQ ID NO: 11206 - DNA, 21 bp, homo sapiens
gaagctgcttatgaaattgaa

SEQ ID NO: 11207 - RNA, 21 nt, RNAi
agcugcuuaugaaauugaauu

SEQ ID NO: 11208 - RNA, 21 nt, RNAi
uuucgacgaauacuuuaacuu

SEQ ID NO: 11209 - DNA, 21 bp, homo sapiens
gaaattgaagccagaaatcaa

SEQ ID NO: 11210 - RNA, 21 nt, RNAi
aauugaagccagaaaucaauu

SEQ ID NO: 11211 - RNA, 21 nt, RNAi
uuuuaacuucggucuuuaguu

SEQ ID NO: 11212 - DNA, 21 bp, homo sapiens
gacaaatactggttaattagc

SEQ ID NO: 11213 - RNA, 21 nt, RNAi
caaauacugguuaauuagcuu

SEQ ID NO: 11214 - RNA, 21 nt, RNAi
uuguuuaugaccaauuaaucg

SEQ ID NO: 11215 - DNA, 21 bp, homo sapiens
gacctacttctttgtagataa

SEQ ID NO: 11216 - RNA, 21 nt, RNAi
ccuacuucuuuguagauaauu

SEQ ID NO: 11217 - RNA, 21 nt, RNAi
uuggaugaagaaacaucuauu

SEQ ID NO: 11218 - DNA, 21 bp, homo sapiens
gataaccagtattggaggtat

SEQ ID NO: 11219 - RNA, 21 nt, RNAi
uaaccaguauuggagguauuu

SEQ ID NO: 11220 - RNA, 21 nt, RNAi
uuauuggucauaaccuccaua

SEQ ID NO: 11221 - DNA, 21 bp, homo sapiens
gaggtatgatgaaaggagaca

SEQ ID NO: 11222 - RNA, 21 nt, RNAi
gguaugaugaaaggagacauu

SEQ ID NO: 11223 - RNA, 21 nt, RNAi
uuccauacuacuuuccucugu

SEQ ID NO: 11224 - DNA, 21 bp, homo sapiens
gatgaaaggagacagatgatg

SEQ ID NO: 11225 - RNA, 21 nt, RNAi
ugaaaggagacagaugauguu

SEQ ID NO: 11226 - RNA, 21 nt, RNAi
uuacuuuccucugucuacuac

SEQ ID NO: 11227 - DNA, 21 bp, homo sapiens
gaaaggagacagatgatggac

SEQ ID NO: 11228 - RNA, 21 nt, RNAi
aaggagacagaugauggacuu

SEQ ID NO: 11229 - RNA, 21 nt, RNAi
uuuuccucugucuacuaccug

SEQ ID NO: 11230 - DNA, 21 bp, homo sapiens
gattaccaagaacttccaagg

SEQ ID NO: 11231 - RNA, 21 nt, RNAi
uuaccaagaacuuccaagguu

SEQ ID NO: 11232 - RNA, 21 nt, RNAi
uuaaugguucuugaagguucc

SEQ ID NO: 11233 - DNA, 21 bp, homo sapiens
gatgcagtcttctattctaaa

SEQ ID NO: 11234 - RNA, 21 nt, RNAi
ugcagucuucuauucuaaauu

SEQ ID NO: 11235 - RNA, 21 nt, RNAi
uuacgucagaagauaagauuu

SEQ ID NO: 11236 - DNA, 21 bp, homo sapiens
gaatatgacttcctactccaa

SEQ ID NO: 11237 - RNA, 21 nt, RNAi
auaugacuuccuacuccaauu

SEQ ID NO: 11238 - RNA, 21 nt, RNAi
uuuauacugaaggaugagguu

SEQ ID NO: 11239 - DNA, 21 bp, homo sapiens
gacttcctactccaacgtatc

SEQ ID NO: 11240 - RNA, 21 nt, RNAi
cuuccuacuccaacguaucuu

SEQ ID NO: 11241 - RNA, 21 nt, RNAi
uugaaggaugagguugcauag

SEQ ID NO: 11242 - DNA, 21 bp, homo sapiens
gaagcatgctctgtaagttgc

SEQ ID NO: 11243 - RNA, 21 nt, RNAi
agcaugcucuguaaguugcuu

SEQ ID NO: 11244 - RNA, 21 nt, RNAi
uuucguacgagacauucaacg

SEQ ID NO: 11245 - DNA, 21 bp, homo sapiens
gaaattatacttacttctggc

SEQ ID NO: 11246 - RNA, 21 nt, RNAi
aauuauacuuacuucuggcuu

SEQ ID NO: 11247 - RNA, 21 nt, RNAi
uuuuaauaugaaugaagaccg

SEQ ID NO: 11248 - DNA, 21 bp, homo sapiens
taatactgctcctgcaggcca

SEQ ID NO: 11249 - RNA, 21 nt, RNAi
auacugcuccugcaggccauu

SEQ ID NO: 11250 - RNA, 21 nt, RNAi
uuuaugacgaggacguccggu

SEQ ID NO: 11251 - DNA, 21 bp, homo sapiens
tactgctcctgcaggccactg

SEQ ID NO: 11252 - RNA, 21 nt, RNAi
cugcuccugcaggccacuguu

SEQ ID NO: 11253 - RNA, 21 nt, RNAi
uugacgaggacguccggugac

SEQ ID NO: 11254 - DNA, 21 bp, homo sapiens
taatgtgctatttggtgagag

SEQ ID NO: 11255 - RNA, 21 nt, RNAi
augugcuauuuggugagaguu

SEQ ID NO: 11256 - RNA, 21 nt, RNAi
uuuacacgauaaaccacucuc

SEQ ID NO: 11257 - DNA, 21 bp, homo sapiens
tatttggtgagagatacttag

SEQ ID NO: 11258 - RNA, 21 nt, RNAi
uuuggugagagauacuuaguu

SEQ ID NO: 11259 - RNA, 21 nt, RNAi
uuaaaccacucucuaugaauc

SEQ ID NO: 11260 - DNA, 21 bp, homo sapiens
tatggccttgagataaacaaa

SEQ ID NO: 11261 - RNA, 21 nt, RNAi
uggccuugagauaaacaaauu

SEQ ID NO: 11262 - RNA, 21 nt, RNAi
uuaccggaacucuauuuguuu

SEQ ID NO: 11263 - DNA, 21 bp, homo sapiens
taaacaaacttccagtgacaa

SEQ ID NO: 11264 - RNA, 21 nt, RNAi
aacaaacuuccagugacaauu

SEQ ID NO: 11265 - RNA, 21 nt, RNAi
uuuuguuugaaggucacuguu

SEQ ID NO: 11266 - DNA, 21 bp, homo sapiens
tagtggaaacttaatgaagga

SEQ ID NO: 11267 - RNA, 21 nt, RNAi
guggaaacuuaaugaaggauu

SEQ ID NO: 11268 - RNA, 21 nt, RNAi
uucaccuuugaauuacuuccu

SEQ ID NO: 11269 - DNA, 21 bp, homo sapiens
taattacacacctgacatgaa

SEQ ID NO: 11270 - RNA, 21 nt, RNAi
auuacacaccugacaugaauu

SEQ ID NO: 11271 - RNA, 21 nt, RNAi
uuuaauguguggacuguacuu

SEQ ID NO: 11272 - DNA, 21 bp, homo sapiens
tacacacctgacatgaaccgt

SEQ ID NO: 11273 - RNA, 21 nt, RNAi
cacaccugacaugaaccguuu

SEQ ID NO: 11274 - RNA, 21 nt, RNAi
uuguguggacuguacuuggca

SEQ ID NO: 11275 - DNA, 21 bp, homo sapiens
tacgcaatccggaaagctttc

SEQ ID NO: 11276 - RNA, 21 nt, RNAi
cgcaauccggaaagcuuucuu

SEQ ID NO: 11277 - RNA, 21 nt, RNAi
uugcguuaggccuuucgaaag

SEQ ID NO: 11278 - DNA, 21 bp, homo sapiens
taacacaggcatggctgacat

SEQ ID NO: 11279 - RNA, 21 nt, RNAi
acacaggcauggcugacauuu

SEQ ID NO: 11280 - RNA, 21 nt, RNAi
uuuguguccguaccgacugua

SEQ ID NO: 11281 - DNA, 21 bp, homo sapiens
tacacattcaggaggcacaaa

SEQ ID NO: 11282 - RNA, 21 nt, RNAi
cacauucaggaggcacaaauu

SEQ ID NO: 11283 - RNA, 21 nt, RNAi
uuguguaaguccuccguguuu

SEQ ID NO: 11284 - DNA, 21 bp, homo sapiens
taggtcttggccattctagtg

SEQ ID NO: 11285 - RNA, 21 nt, RNAi
ggucuuggccauucuaguguu

SEQ ID NO: 11286 - RNA, 21 nt, RNAi
uuccagaaccgguaagaucac

SEQ ID NO: 11287 - DNA, 21 bp, homo sapiens
tagtgatccaaaggctgtaat

SEQ ID NO: 11288 - RNA, 21 nt, RNAi
gugauccaaaggcuguaauuu

SEQ ID NO: 11289 - RNA, 21 nt, RNAi
uucacuagguuuccgacauua

SEQ ID NO: 11290 - DNA, 21 bp, homo sapiens
tacaaatatgtcgacatcaac

SEQ ID NO: 11291 - RNA, 21 nt, RNAi
caaauaugucgacaucaacuu

SEQ ID NO: 11292 - RNA, 21 nt, RNAi
uuguuuauacagcuguaguug

SEQ ID NO: 11293 - DNA, 21 bp, homo sapiens
tatgtcgacatcaacacattt

SEQ ID NO: 11294 - RNA, 21 nt, RNAi
ugucgacaucaacacauuuuu

SEQ ID NO: 11295 - RNA, 21 nt, RNAi
uuacagcuguaguuguguaaa

SEQ ID NO: 11296 - DNA, 21 bp, homo sapiens
taatttcttccttatggccaa

SEQ ID NO: 11297 - RNA, 21 nt, RNAi
auuucuuccuuauggccaauu

SEQ ID NO: 11298 - RNA, 21 nt, RNAi
uuuaaagaaggaauaccgguu

SEQ ID NO: 11299 - DNA, 21 bp, homo sapiens
tatggccaaccttgccatctg

SEQ ID NO: 11300 - RNA, 21 nt, RNAi
uggccaaccuugccaucuguu

SEQ ID NO: 11301 - RNA, 21 nt, RNAi
uuaccgguuggaacgguagac

SEQ ID NO: 11302 - DNA, 21 bp, homo sapiens
tagcaatttaagaccagagcc

SEQ ID NO: 11303 - RNA, 21 nt, RNAi
gcaauuuaagaccagagccuu

SEQ ID NO: 11304 - RNA, 21 nt, RNAi
uucguuaaauucuggucucgg

SEQ ID NO: 11305 - DNA, 21 bp, homo sapiens
taagaccagagccaaattatc

SEQ ID NO: 11306 - RNA, 21 nt, RNAi
agaccagagccaaauuaucuu

SEQ ID NO: 11307 - RNA, 21 nt, RNAi
uuucuggucucgguuuaauag

SEQ ID NO: 11308 - DNA, 21 bp, homo sapiens
tataggacctacttctttgta

SEQ ID NO: 11309 - RNA, 21 nt, RNAi
uaggaccuacuucuuuguauu

SEQ ID NO: 11310 - RNA, 21 nt, RNAi
uuauccuggaugaagaaacau

SEQ ID NO: 11311 - DNA, 21 bp, homo sapiens
taggacctacttctttgtaga

SEQ ID NO: 11312 - RNA, 21 nt, RNAi
ggaccuacuucuuuguagauu

SEQ ID NO: 11313 - RNA, 21 nt, RNAi
uuccuggaugaagaaacaucu

SEQ ID NO: 11314 - DNA, 21 bp, homo sapiens
tacttctttgtagataaccag

SEQ ID NO: 11315 - RNA, 21 nt, RNAi
cuucuuuguagauaaccaguu

SEQ ID NO: 11316 - RNA, 21 nt, RNAi
uugaagaaacaucuauugguc

SEQ ID NO: 11317 - DNA, 21 bp, homo sapiens
tagataaccagtattggaggt

SEQ ID NO: 11318 - RNA, 21 nt, RNAi
gauaaccaguauuggagguuu

SEQ ID NO: 11319 - RNA, 21 nt, RNAi
uucuauuggucauaaccucca

SEQ ID NO: 11320 - DNA, 21 bp, homo sapiens
taaccagtattggaggtatga

SEQ ID NO: 11321 - RNA, 21 nt, RNAi
accaguauuggagguaugauu

SEQ ID NO: 11322 - RNA, 21 nt, RNAi
uuuggucauaaccuccauacu

SEQ ID NO: 11323 - DNA, 21 bp, homo sapiens
tattggaggtatgatgaaagg

SEQ ID NO: 11324 - RNA, 21 nt, RNAi
uuggagguaugaugaaagguu

SEQ ID NO: 11325 - RNA, 21 nt, RNAi
uuaaccuccauacuacuuucc

SEQ ID NO: 11326 - DNA, 21 bp, homo sapiens
tatgatgaaaggagacagatg

SEQ ID NO: 11327 - RNA, 21 nt, RNAi
ugaugaaaggagacagauguu

SEQ ID NO: 11328 - RNA, 21 nt, RNAi
uuacuacuuuccucugucuac

SEQ ID NO: 11329 - DNA, 21 bp, homo sapiens
taccaagaacttccaaggaat

SEQ ID NO: 11330 - RNA, 21 nt, RNAi
ccaagaacuuccaaggaauuu

SEQ ID NO: 11331 - RNA, 21 nt, RNAi
uugguucuugaagguuccuua

SEQ ID NO: 11332 - DNA, 21 bp, homo sapiens
tactactatttcttccaagga

SEQ ID NO: 11333 - RNA, 21 nt, RNAi
cuacuauuucuuccaaggauu

SEQ ID NO: 11334 - RNA, 21 nt, RNAi
uugaugauaaagaagguuccu

SEQ ID NO: 11335 - DNA, 21 bp, homo sapiens
tactatttcttccaaggatct

SEQ ID NO: 11336 - RNA, 21 nt, RNAi
cuauuucuuccaaggaucuuu

SEQ ID NO: 11337 - RNA, 21 nt, RNAi
uugauaaagaagguuccuaga

SEQ ID NO: 11338 - DNA, 21 bp, homo sapiens
tatttcttccaaggatctaac

SEQ ID NO: 11339 - RNA, 21 nt, RNAi
uuucuuccaaggaucuaacuu

SEQ ID NO: 11340 - RNA, 21 nt, RNAi
uuaaagaagguuccuagauug

SEQ ID NO: 11341 - DNA, 21 bp, homo sapiens
tatgacttcctactccaacgt

SEQ ID NO: 11342 - RNA, 21 nt, RNAi
ugacuuccuacuccaacguuu

SEQ ID NO: 11343 - RNA, 21 nt, RNAi
uuacugaaggaugagguugca

SEQ ID NO: 11344 - DNA, 21 bp, homo sapiens
tagctggtttggttgttagaa

SEQ ID NO: 11345 - RNA, 21 nt, RNAi
gcugguuugguuguuagaauu

SEQ ID NO: 11346 - RNA, 21 nt, RNAi
uucgaccaaaccaacaaucuu

SEQ ID NO: 11347 - DNA, 21 bp, homo sapiens
tattgcatatttgctatgtcc

SEQ ID NO: 11348 - RNA, 21 nt, RNAi
uugcauauuugcuauguccuu

SEQ ID NO: 11349 - RNA, 21 nt, RNAi
uuaacguauaaacgauacagg

SEQ ID NO: 11350 - DNA, 21 bp, homo sapiens
tatttgctatgtcctcagtgt

SEQ ID NO: 11351 - RNA, 21 nt, RNAi
uuugcuauguccucaguguuu

SEQ ID NO: 11352 - RNA, 21 nt, RNAi
uuaaacgauacaggagucaca

SEQ ID NO: 11353 - DNA, 21 bp, homo sapiens
tatgtcctcagtgtaccacta

SEQ ID NO: 11354 - RNA, 21 nt, RNAi
uguccucaguguaccacuauu

SEQ ID NO: 11355 - RNA, 21 nt, RNAi
uuacaggagucacauggugau

SEQ ID NO: 11356 - DNA, 21 bp, homo sapiens
taccactacttagagatatgt

SEQ ID NO: 11357 - RNA, 21 nt, RNAi
ccacuacuuagagauauguuu

SEQ ID NO: 11358 - RNA, 21 nt, RNAi
uuggugaugaaucucuauaca

SEQ ID NO: 11359 - DNA, 21 bp, homo sapiens
taattgtccattcttgcttga

SEQ ID NO: 11360 - RNA, 21 nt, RNAi
auuguccauucuugcuugauu

SEQ ID NO: 11361 - RNA, 21 nt, RNAi
uuuaacagguaagaacgaacu

SEQ ID NO: 11362 - DNA, 21 bp, homo sapiens
tagttaccttcaaagcaagat

SEQ ID NO: 11363 - RNA, 21 nt, RNAi
guuaccuucaaagcaagauuu

SEQ ID NO: 11364 - RNA, 21 nt, RNAi
uucaauggaaguuucguucua

SEQ ID NO: 11365 - DNA, 21 bp, homo sapiens
tatttgaagcatgctctgtaa

SEQ ID NO: 11366 - RNA, 21 nt, RNAi
uuugaagcaugcucuguaauu

SEQ ID NO: 11367 - RNA, 21 nt, RNAi
uuaaacuucguacgagacauu

SEQ ID NO: 11368 - DNA, 21 bp, homo sapiens
taagttgcttcctaacatcct

SEQ ID NO: 11369 - RNA, 21 nt, RNAi
aguugcuuccuaacauccuuu

SEQ ID NO: 11370 - RNA, 21 nt, RNAi
uuucaacgaaggauuguagga

SEQ ID NO: 11371 - DNA, 21 bp, homo sapiens
taacatccttggactgagaaa

SEQ ID NO: 11372 - RNA, 21 nt, RNAi
acauccuuggacugagaaauu

SEQ ID NO: 11373 - RNA, 21 nt, RNAi
uuuguaggaaccugacucuuu

SEQ ID NO: 11374 - DNA, 21 bp, homo sapiens
tatacttacttctggcataac

SEQ ID NO: 11375 - RNA, 21 nt, RNAi
uacuuacuucuggcauaacuu

SEQ ID NO: 11376 - RNA, 21 nt, RNAi
uuaugaaugaagaccguauug

SEQ ID NO: 11377 - DNA, 21 bp, homo sapiens
tacttacttctggcataacta

SEQ ID NO: 11378 - RNA, 21 nt, RNAi
cuuacuucuggcauaacuauu

SEQ ID NO: 11379 - RNA, 21 nt, RNAi
uugaaugaagaccguauugau

SEQ ID NO: 11380 - DNA, 21 bp, homo sapiens
aaccgtgaggatgttgactac

SEQ ID NO: 11381 - RNA, 21 nt, RNAi
ccgugaggauguugacuacuu

SEQ ID NO: 11382 - RNA, 21 nt, RNAi
uuggcacuccuacaacugaug

SEQ ID NO: 11383 - DNA, 21 bp, homo sapiens
aagctttccaagtatggagta

SEQ ID NO: 11384 - RNA, 21 nt, RNAi
gcuuuccaaguauggaguauu

SEQ ID NO: 11385 - RNA, 21 nt, RNAi
uucgaaagguucauaccucau

SEQ ID NO: 11386 - DNA, 21 bp, homo sapiens
aattcagcaagattaacacag

SEQ ID NO: 11387 - RNA, 21 nt, RNAi
uucagcaagauuaacacaguu

SEQ ID NO: 11388 - RNA, 21 nt, RNAi
uuaagucguucuaauuguguc

SEQ ID NO: 11389 - DNA, 21 bp, homo sapiens
aaacttgttcctcactgctgt

SEQ ID NO: 11390 - RNA, 21 nt, RNAi
acuuguuccucacugcuguuu

SEQ ID NO: 11391 - RNA, 21 nt, RNAi
uuugaacaaggagugacgaca

SEQ ID NO: 11392 - DNA, 21 bp, homo sapiens
aaagagaaccaacgcttgcca

SEQ ID NO: 11393 - RNA, 21 nt, RNAi
agagaaccaacgcuugccauu

SEQ ID NO: 11394 - RNA, 21 nt, RNAi
uuucucuugguugcgaacggu

SEQ ID NO: 11395 - DNA, 21 bp, homo sapiens
aagagaaccaacgcttgccaa

SEQ ID NO: 11396 - RNA, 21 nt, RNAi
gagaaccaacgcuugccaauu

SEQ ID NO: 11397 - RNA, 21 nt, RNAi
uucucuugguugcgaacgguu

SEQ ID NO: 11398 - DNA, 21 bp, homo sapiens
aaccaacgcttgccaaatcct

SEQ ID NO: 11399 - RNA, 21 nt, RNAi
ccaacgcuugccaaauccuuu

SEQ ID NO: 11400 - RNA, 21 nt, RNAi
uugguugcgaacgguuuagga

SEQ ID NO: 11401 - DNA, 21 bp, homo sapiens
cacacctgacatgaaccgtga

SEQ ID NO: 11402 - RNA, 21 nt, RNAi
caccugacaugaaccgugauu

SEQ ID NO: 11403 - RNA, 21 nt, RNAi
uuguggacuguacuuggcacu

SEQ ID NO: 11404 - DNA, 21 bp, homo sapiens
catgaaccgtgaggatgttga

SEQ ID NO: 11405 - RNA, 21 nt, RNAi
ugaaccgugaggauguugauu

SEQ ID NO: 11406 - RNA, 21 nt, RNAi
uuacuuggcacuccuacaacu

SEQ ID NO: 11407 - DNA, 21 bp, homo sapiens
caagtatggagtaatgttacc

SEQ ID NO: 11408 - RNA, 21 nt, RNAi
aguauggaguaauguuaccuu

SEQ ID NO: 11409 - RNA, 21 nt, RNAi
uuucauaccucauuacaaugg

SEQ ID NO: 11410 - DNA, 21 bp, homo sapiens
cagcaagattaacacaggcat

SEQ ID NO: 11411 - RNA, 21 nt, RNAi
gcaagauuaacacaggcauuu

SEQ ID NO: 11412 - RNA, 21 nt, RNAi
uucguucuaauuguguccgua

SEQ ID NO: 11413 - DNA, 21 bp, homo sapiens
caagattaacacaggcatggc

SEQ ID NO: 11414 - RNA, 21 nt, RNAi
agauuaacacaggcauggcuu

SEQ ID NO: 11415 - RNA, 21 nt, RNAi
uuucuaauuguguccguaccg

SEQ ID NO: 11416 - DNA, 21 bp, homo sapiens
cacatttcgatgaggacgaat

SEQ ID NO: 11417 - RNA, 21 nt, RNAi
cauuucgaugaggacgaauuu

SEQ ID NO: 11418 - RNA, 21 nt, RNAi
uuguaaagcuacuccugcuua

SEQ ID NO: 11419 - DNA, 21 bp, homo sapiens
catttcgatgaggacgaattc

SEQ ID NO: 11420 - RNA, 21 nt, RNAi
uuucgaugaggacgaauucuu

SEQ ID NO: 11421 - RNA, 21 nt, RNAi
uuaaagcuacuccugcuuaag

SEQ ID NO: 11422 - DNA, 21 bp, homo sapiens
caaacttgttcctcactgctg

SEQ ID NO: 11423 - RNA, 21 nt, RNAi
aacuuguuccucacugcuguu

SEQ ID NO: 11424 - RNA, 21 nt, RNAi
uuuugaacaaggagugacgac

SEQ ID NO: 11425 - DNA, 21 bp, homo sapiens
cactgctgttcacgagattgg

SEQ ID NO: 11426 - RNA, 21 nt, RNAi
cugcuguucacgagauugguu

SEQ ID NO: 11427 - RNA, 21 nt, RNAi
uugacgacaagugcucuaacc

SEQ ID NO: 11428 - DNA, 21 bp, homo sapiens
cattctagtgatccaaaggct

SEQ ID NO: 11429 - RNA, 21 nt, RNAi
uucuagugauccaaaggcuuu

SEQ ID NO: 11430 - RNA, 21 nt, RNAi
uuaagaucacuagguuuccga

SEQ ID NO: 11431 - DNA, 21 bp, homo sapiens
catcaacacatttcgcctctc

SEQ ID NO: 11432 - RNA, 21 nt, RNAi
ucaacacauuucgccucucuu

SEQ ID NO: 11433 - RNA, 21 nt, RNAi
uuaguuguguaaagcggagag

SEQ ID NO: 11434 - DNA, 21 bp, homo sapiens
gacatgaaccgtgaggatgtt

SEQ ID NO: 11435 - RNA, 21 nt, RNAi
caugaaccgugaggauguuuu

SEQ ID NO: 11436 - RNA, 21 nt, RNAi
uuguacuuggcacuccuacaa

SEQ ID NO: 11437 - DNA, 21 bp, homo sapiens
gaaccgtgaggatgttgacta

SEQ ID NO: 11438 - RNA, 21 nt, RNAi
accgugaggauguugacuauu

SEQ ID NO: 11439 - RNA, 21 nt, RNAi
uuuggcacuccuacaacugau

SEQ ID NO: 11440 - DNA, 21 bp, homo sapiens
gaggatgttgactacgcaatc

SEQ ID NO: 11441 - RNA, 21 nt, RNAi
ggauguugacuacgcaaucuu

SEQ ID NO: 11442 - RNA, 21 nt, RNAi
uuccuacaacugaugcguuag

SEQ ID NO: 11443 - DNA, 21 bp, homo sapiens
gatgttgactacgcaatccgg

SEQ ID NO: 11444 - RNA, 21 nt, RNAi
uguugacuacgcaauccgguu

SEQ ID NO: 11445 - RNA, 21 nt, RNAi
uuacaacugaugcguuaggcc

SEQ ID NO: 11446 - DNA, 21 bp, homo sapiens
gactacgcaatccggaaagct

SEQ ID NO: 11447 - RNA, 21 nt, RNAi
cuacgcaauccggaaagcuuu

SEQ ID NO: 11448 - RNA, 21 nt, RNAi
uugaugcguuaggccuuucga

SEQ ID NO: 11449 - DNA, 21 bp, homo sapiens
gatgcacatttcgatgaggac

SEQ ID NO: 11450 - RNA, 21 nt, RNAi
ugcacauuucgaugaggacuu

SEQ ID NO: 11451 - RNA, 21 nt, RNAi
uuacguguaaagcuacuccug

SEQ ID NO: 11452 - DNA, 21 bp, homo sapiens
gatgaggacgaattctggact

SEQ ID NO: 11453 - RNA, 21 nt, RNAi
ugaggacgaauucuggacuuu

SEQ ID NO: 11454 - RNA, 21 nt, RNAi
uuacuccugcuuaagaccuga

SEQ ID NO: 11455 - DNA, 21 bp, homo sapiens
gaggacgaattctggactaca

SEQ ID NO: 11456 - RNA, 21 nt, RNAi
ggacgaauucuggacuacauu

SEQ ID NO: 11457 - RNA, 21 nt, RNAi
uuccugcuuaagaccugaugu

SEQ ID NO: 11458 - DNA, 21 bp, homo sapiens
gattggccattccttaggtct

SEQ ID NO: 11459 - RNA, 21 nt, RNAi
uuggccauuccuuaggucuuu

SEQ ID NO: 11460 - RNA, 21 nt, RNAi
uuaaccgguaaggaauccaga

SEQ ID NO: 11461 - DNA, 21 bp, homo sapiens
gacatcaacacatttcgcctc

SEQ ID NO: 11462 - RNA, 21 nt, RNAi
caucaacacauuucgccucuu

SEQ ID NO: 11463 - RNA, 21 nt, RNAi
uuguaguuguguaaagcggag

SEQ ID NO: 11464 - DNA, 21 bp, homo sapiens
gacatacgtggcattcagtcc

SEQ ID NO: 11465 - RNA, 21 nt, RNAi
cauacguggcauucaguccuu

SEQ ID NO: 11466 - RNA, 21 nt, RNAi
uuguaugcaccguaagucagg

SEQ ID NO: 11467 - DNA, 21 bp, homo sapiens
gagaaccaacgcttgccaaat

SEQ ID NO: 11468 - RNA, 21 nt, RNAi
gaaccaacgcuugccaaauuu

SEQ ID NO: 11469 - RNA, 21 nt, RNAi
uucuugguugcgaacgguuua

SEQ ID NO: 11470 - DNA, 21 bp, homo sapiens
gaaccaacgcttgccaaatcc

SEQ ID NO: 11471 - RNA, 21 nt, RNAi
accaacgcuugccaaauccuu

SEQ ID NO: 11472 - RNA, 21 nt, RNAi
uuugguugcgaacgguuuagg

SEQ ID NO: 11473 - DNA, 21 bp, homo sapiens
gagaccaaagaccagtgttaa

SEQ ID NO: 11474 - RNA, 21 nt, RNAi
gaccaaagaccaguguuaauu

SEQ ID NO: 11475 - RNA, 21 nt, RNAi
uucugguuucuggucacaauu

SEQ ID NO: 11476 - DNA, 21 bp, homo sapiens
gaccaaagaccagtgttaatt

SEQ ID NO: 11477 - RNA, 21 nt, RNAi
ccaaagaccaguguuaauuuu

SEQ ID NO: 11478 - RNA, 21 nt, RNAi
uugguuucuggucacaauuaa

SEQ ID NO: 11479 - DNA, 21 bp, homo sapiens
tacacacctgacatgaaccgt

SEQ ID NO: 11480 - RNA, 21 nt, RNAi
cacaccugacaugaaccguuu

SEQ ID NO: 11481 - RNA, 21 nt, RNAi
uuguguggacuguacuuggca

SEQ ID NO: 11482 - DNA, 21 bp, homo sapiens
tataggacctacttctttgta

SEQ ID NO: 11483 - RNA, 21 nt, RNAi
uaggaccuacuucuuuguauu

SEQ ID NO: 11484 - RNA, 21 nt, RNAi
uuauccuggaugaagaaacau

SEQ ID NO: 11485 - DNA, 21 bp, homo sapiens
aagctgctgccgctgctgatg

SEQ ID NO: 11486 - RNA, 21 nt, RNAi
gcugcugccgcugcugauguu

SEQ ID NO: 11487 - RNA, 21 nt, RNAi
uucgacgacggcgacgacuac

SEQ ID NO: 11488 - DNA, 21 bp, homo sapiens
aacggcctctcgttccactgc

SEQ ID NO: 11489 - RNA, 21 nt, RNAi
cggccucucguuccacugcuu

SEQ ID NO: 11490 - RNA, 21 nt, RNAi
uugccggagagcaaggugacg

SEQ ID NO: 11491 - DNA, 21 bp, homo sapiens
aaggcgaacggatgagcacga

SEQ ID NO: 11492 - RNA, 21 nt, RNAi
ggcgaacggaugagcacgauu

SEQ ID NO: 11493 - RNA, 21 nt, RNAi
uuccgcuugccuacucgugcu

SEQ ID NO: 11494 - DNA, 21 bp, homo sapiens
aacggatgagcacgatctcat

SEQ ID NO: 11495 - RNA, 21 nt, RNAi
cggaugagcacgaucucauuu

SEQ ID NO: 11496 - RNA, 21 nt, RNAi
uugccuacucgugcuagagua

SEQ ID NO: 11497 - DNA, 21 bp, homo sapiens
aaagagtgtgaggtcttctac

SEQ ID NO: 11498 - RNA, 21 nt, RNAi
agagugugaggucuucuacuu

SEQ ID NO: 11499 - RNA, 21 nt, RNAi
uuucucacacuccagaagaug

SEQ ID NO: 11500 - DNA, 21 bp, homo sapiens
aagagtgtgaggtcttctacc

SEQ ID NO: 11501 - RNA, 21 nt, RNAi
gagugugaggucuucuaccuu

SEQ ID NO: 11502 - RNA, 21 nt, RNAi
uucucacacuccagaagaugg

SEQ ID NO: 11503 - DNA, 21 bp, homo sapiens
aacaacatgatatgtgctgga

SEQ ID NO: 11504 - RNA, 21 nt, RNAi
caacaugauaugugcuggauu

SEQ ID NO: 11505 - RNA, 21 nt, RNAi
uuguuguacuauacacgaccu

SEQ ID NO: 11506 - DNA, 21 bp, homo sapiens
aacatgatatgtgctggactg

SEQ ID NO: 11507 - RNA, 21 nt, RNAi
caugauaugugcuggacuguu

SEQ ID NO: 11508 - RNA, 21 nt, RNAi
uuguacuauacacgaccugac

SEQ ID NO: 11509 - DNA, 21 bp, homo sapiens
aaatacatgtcctggatcaat

SEQ ID NO: 11510 - RNA, 21 nt, RNAi
auacauguccuggaucaauuu

SEQ ID NO: 11511 - RNA, 21 nt, RNAi
uuuauguacaggaccuaguua

SEQ ID NO: 11512 - DNA, 21 bp, homo sapiens
aatacatgtcctggatcaata

SEQ ID NO: 11513 - RNA, 21 nt, RNAi
uacauguccuggaucaauauu

SEQ ID NO: 11514 - RNA, 21 nt, RNAi
uuauguacaggaccuaguuau

SEQ ID NO: 11515 - DNA, 21 bp, homo sapiens
aataaagtcatacgctccaac

SEQ ID NO: 11516 - RNA, 21 nt, RNAi
uaaagucauacgcuccaacuu

SEQ ID NO: 11517 - RNA, 21 nt, RNAi
uuauuucaguaugcgagguug

SEQ ID NO: 11518 - DNA, 21 bp, homo sapiens
aaagtcatacgctccaactga

SEQ ID NO: 11519 - RNA, 21 nt, RNAi
agucauacgcuccaacugauu

SEQ ID NO: 11520 - RNA, 21 nt, RNAi
uuucaguaugcgagguugacu

SEQ ID NO: 11521 - DNA, 21 bp, homo sapiens
aagtcatacgctccaactgat

SEQ ID NO: 11522 - RNA, 21 nt, RNAi
gucauacgcuccaacugauuu

SEQ ID NO: 11523 - RNA, 21 nt, RNAi
uucaguaugcgagguugacua

SEQ ID NO: 11524 - DNA, 21 bp, homo sapiens
aactgatccagatgctacgct

SEQ ID NO: 11525 - RNA, 21 nt, RNAi
cugauccagaugcuacgcuuu

SEQ ID NO: 11526 - RNA, 21 nt, RNAi
uugacuaggucuacgaugcga

SEQ ID NO: 11527 - DNA, 21 bp, homo sapiens
aagctgaaatgcaggaagtgg

SEQ ID NO: 11528 - RNA, 21 nt, RNAi
gcugaaaugcaggaagugguu

SEQ ID NO: 11529 - RNA, 21 nt, RNAi
uucgacuuuacguccuucacc

SEQ ID NO: 11530 - DNA, 21 bp, homo sapiens
aaatgcaggaagtggtggcaa

SEQ ID NO: 11531 - RNA, 21 nt, RNAi
augcaggaagugguggcaauu

SEQ ID NO: 11532 - RNA, 21 nt, RNAi
uuuacguccuucaccaccguu

SEQ ID NO: 11533 - DNA, 21 bp, homo sapiens
aatgcaggaagtggtggcaaa

SEQ ID NO: 11534 - RNA, 21 nt, RNAi
ugcaggaagugguggcaaauu

SEQ ID NO: 11535 - RNA, 21 nt, RNAi
uuacguccuucaccaccguuu

SEQ ID NO: 11536 - DNA, 21 bp, homo sapiens
aagtggtggcaaaggtttatt

SEQ ID NO: 11537 - RNA, 21 nt, RNAi
gugguggcaaagguuuauuuu

SEQ ID NO: 11538 - RNA, 21 nt, RNAi
uucaccaccguuuccaaauaa

SEQ ID NO: 11539 - DNA, 21 bp, homo sapiens
aaaggtttattccagagaagc

SEQ ID NO: 11540 - RNA, 21 nt, RNAi
agguuuauuccagagaagcuu

SEQ ID NO: 11541 - RNA, 21 nt, RNAi
uuuccaaauaaggucucuucg

SEQ ID NO: 11542 - DNA, 21 bp, homo sapiens
aaggtttattccagagaagcc

SEQ ID NO: 11543 - RNA, 21 nt, RNAi
gguuuauuccagagaagccuu

SEQ ID NO: 11544 - RNA, 21 nt, RNAi
uuccaaauaaggucucuucgg

SEQ ID NO: 11545 - DNA, 21 bp, homo sapiens
aagccaggaagccggtcatca

SEQ ID NO: 11546 - RNA, 21 nt, RNAi
gccaggaagccggucaucauu

SEQ ID NO: 11547 - RNA, 21 nt, RNAi
uucgguccuucggccaguagu

SEQ ID NO: 11548 - DNA, 21 bp, homo sapiens
aacctgacttcctctgccact

SEQ ID NO: 11549 - RNA, 21 nt, RNAi
ccugacuuccucugccacuuu

SEQ ID NO: 11550 - RNA, 21 nt, RNAi
uuggacugaaggagacgguga

SEQ ID NO: 11551 - DNA, 21 bp, homo sapiens
aacctcagtttcctcatctgc

SEQ ID NO: 11552 - RNA, 21 nt, RNAi
ccucaguuuccucaucugcuu

SEQ ID NO: 11553 - RNA, 21 nt, RNAi
uuggagucaaaggaguagacg

SEQ ID NO: 11554 - DNA, 21 bp, homo sapiens
aacaatgacgtgcctacctct

SEQ ID NO: 11555 - RNA, 21 nt, RNAi
caaugacgugccuaccucuuu

SEQ ID NO: 11556 - RNA, 21 nt, RNAi
uuguuacugcacggauggaga

SEQ ID NO: 11557 - DNA, 21 bp, homo sapiens
aatgacgtgcctacctcttag

SEQ ID NO: 11558 - RNA, 21 nt, RNAi
ugacgugccuaccucuuaguu

SEQ ID NO: 11559 - RNA, 21 nt, RNAi
uuacugcacggauggagaauc

SEQ ID NO: 11560 - DNA, 21 bp, homo sapiens
aatcttcatgtgattgtcatg

SEQ ID NO: 11561 - RNA, 21 nt, RNAi
ucuucaugugauugucauguu

SEQ ID NO: 11562 - RNA, 21 nt, RNAi
uuagaaguacacuaacaguac

SEQ ID NO: 11563 - DNA, 21 bp, homo sapiens
aaaggttacctgttgtcgtga

SEQ ID NO: 11564 - RNA, 21 nt, RNAi
agguuaccuguugucgugauu

SEQ ID NO: 11565 - RNA, 21 nt, RNAi
uuuccaauggacaacagcacu

SEQ ID NO: 11566 - DNA, 21 bp, homo sapiens
aaggttacctgttgtcgtgaa

SEQ ID NO: 11567 - RNA, 21 nt, RNAi
gguuaccuguugucgugaauu

SEQ ID NO: 11568 - RNA, 21 nt, RNAi
uuccaauggacaacagcacuu

SEQ ID NO: 11569 - DNA, 21 bp, homo sapiens
cagatcctggccatgagagct

SEQ ID NO: 11570 - RNA, 21 nt, RNAi
gauccuggccaugagagcuuu

SEQ ID NO: 11571 - RNA, 21 nt, RNAi
uucuaggaccgguacucucga

SEQ ID NO: 11572 - DNA, 21 bp, homo sapiens
catgagagctccgcacctcca

SEQ ID NO: 11573 - RNA, 21 nt, RNAi
ugagagcuccgcaccuccauu

SEQ ID NO: 11574 - RNA, 21 nt, RNAi
uuacucucgaggcguggaggu

SEQ ID NO: 11575 - DNA, 21 bp, homo sapiens
caggtctcgctcttcaacggc

SEQ ID NO: 11576 - RNA, 21 nt, RNAi
ggucucgcucuucaacggcuu

SEQ ID NO: 11577 - RNA, 21 nt, RNAi
uuccagagcgagaaguugccg

SEQ ID NO: 11578 - DNA, 21 bp, homo sapiens
caacggcctctcgttccactg

SEQ ID NO: 11579 - RNA, 21 nt, RNAi
acggccucucguuccacuguu

SEQ ID NO: 11580 - RNA, 21 nt, RNAi
uuugccggagagcaaggugac

SEQ ID NO: 11581 - DNA, 21 bp, homo sapiens
cactgcggaaacaagccactg

SEQ ID NO: 11582 - RNA, 21 nt, RNAi
cugcggaaacaagccacuguu

SEQ ID NO: 11583 - RNA, 21 nt, RNAi
uugacgccuuuguucggugac

SEQ ID NO: 11584 - DNA, 21 bp, homo sapiens
catcctgccaaggcgaacgga

SEQ ID NO: 11585 - RNA, 21 nt, RNAi
uccugccaaggcgaacggauu

SEQ ID NO: 11586 - RNA, 21 nt, RNAi
uuaggacgguuccgcuugccu

SEQ ID NO: 11587 - DNA, 21 bp, homo sapiens
caaggcgaacggatgagcacg

SEQ ID NO: 11588 - RNA, 21 nt, RNAi
aggcgaacggaugagcacguu

SEQ ID NO: 11589 - RNA, 21 nt, RNAi
uuuccgcuugccuacucgugc

SEQ ID NO: 11590 - DNA, 21 bp, homo sapiens
cacgatctcatgttgctaaag

SEQ ID NO: 11591 - RNA, 21 nt, RNAi
cgaucucauguugcuaaaguu

SEQ ID NO: 11592 - RNA, 21 nt, RNAi
uugcuagaguacaacgauuuc

SEQ ID NO: 11593 - DNA, 21 bp, homo sapiens
catgttgctaaagctggccag

SEQ ID NO: 11594 - RNA, 21 nt, RNAi
uguugcuaaagcuggccaguu

SEQ ID NO: 11595 - RNA, 21 nt, RNAi
uuacaacgauuucgaccgguc

SEQ ID NO: 11596 - DNA, 21 bp, homo sapiens
caccaacaacatgatatgtgc

SEQ ID NO: 11597 - RNA, 21 nt, RNAi
ccaacaacaugauaugugcuu

SEQ ID NO: 11598 - RNA, 21 nt, RNAi
uugguuguuguacuauacacg

SEQ ID NO: 11599 - DNA, 21 bp, homo sapiens
caacaacatgatatgtgctgg

SEQ ID NO: 11600 - RNA, 21 nt, RNAi
acaacaugauaugugcugguu

SEQ ID NO: 11601 - RNA, 21 nt, RNAi
uuuguuguacuauacacgacc

SEQ ID NO: 11602 - DNA, 21 bp, homo sapiens
caacatgatatgtgctggact

SEQ ID NO: 11603 - RNA, 21 nt, RNAi
acaugauaugugcuggacuuu

SEQ ID NO: 11604 - RNA, 21 nt, RNAi
uuuguacuauacacgaccuga

SEQ ID NO: 11605 - DNA, 21 bp, homo sapiens
catgatatgtgctggactgga

SEQ ID NO: 11606 - RNA, 21 nt, RNAi
ugauaugugcuggacuggauu

SEQ ID NO: 11607 - RNA, 21 nt, RNAi
uuacuauacacgaccugaccu

SEQ ID NO: 11608 - DNA, 21 bp, homo sapiens
cagcatccagctgtctacacc

SEQ ID NO: 11609 - RNA, 21 nt, RNAi
gcauccagcugucuacaccuu

SEQ ID NO: 11610 - RNA, 21 nt, RNAi
uucguaggucgacagaugugg

SEQ ID NO: 11611 - DNA, 21 bp, homo sapiens
cagatctgcaaatacatgtcc

SEQ ID NO: 11612 - RNA, 21 nt, RNAi
gaucugcaaauacauguccuu

SEQ ID NO: 11613 - RNA, 21 nt, RNAi
uucuagacguuuauguacagg

SEQ ID NO: 11614 - DNA, 21 bp, homo sapiens
caaatacatgtcctggatcaa

SEQ ID NO: 11615 - RNA, 21 nt, RNAi
aauacauguccuggaucaauu

SEQ ID NO: 11616 - RNA, 21 nt, RNAi
uuuuauguacaggaccuaguu

SEQ ID NO: 11617 - DNA, 21 bp, homo sapiens
catgtcctggatcaataaagt

SEQ ID NO: 11618 - RNA, 21 nt, RNAi
uguccuggaucaauaaaguuu

SEQ ID NO: 11619 - RNA, 21 nt, RNAi
uuacaggaccuaguuauuuca

SEQ ID NO: 11620 - DNA, 21 bp, homo sapiens
caataaagtcatacgctccaa

SEQ ID NO: 11621 - RNA, 21 nt, RNAi
auaaagucauacgcuccaauu

SEQ ID NO: 11622 - RNA, 21 nt, RNAi
uuuauuucaguaugcgagguu

SEQ ID NO: 11623 - DNA, 21 bp, homo sapiens
catacgctccaactgatccag

SEQ ID NO: 11624 - RNA, 21 nt, RNAi
uacgcuccaacugauccaguu

SEQ ID NO: 11625 - RNA, 21 nt, RNAi
uuaugcgagguugacuagguc

SEQ ID NO: 11626 - DNA, 21 bp, homo sapiens
caactgatccagatgctacgc

SEQ ID NO: 11627 - RNA, 21 nt, RNAi
acugauccagaugcuacgcuu

SEQ ID NO: 11628 - RNA, 21 nt, RNAi
uuugacuaggucuacgaugcg

SEQ ID NO: 11629 - DNA, 21 bp, homo sapiens
cagatgctacgctccagctga

SEQ ID NO: 11630 - RNA, 21 nt, RNAi
gaugcuacgcuccagcugauu

SEQ ID NO: 11631 - RNA, 21 nt, RNAi
uucuacgaugcgaggucgacu

SEQ ID NO: 11632 - DNA, 21 bp, homo sapiens
cagctgatccagatgttatgc

SEQ ID NO: 11633 - RNA, 21 nt, RNAi
gcugauccagauguuaugcuu

SEQ ID NO: 11634 - RNA, 21 nt, RNAi
uucgacuaggucuacaauacg

SEQ ID NO: 11635 - DNA, 21 bp, homo sapiens
cagatgttatgctcctgctga

SEQ ID NO: 11636 - RNA, 21 nt, RNAi
gauguuaugcuccugcugauu

SEQ ID NO: 11637 - RNA, 21 nt, RNAi
uucuacaauacgaggacgacu

SEQ ID NO: 11638 - DNA, 21 bp, homo sapiens
cagaggctccatcgtccatcc

SEQ ID NO: 11639 - RNA, 21 nt, RNAi
gaggcuccaucguccauccuu

SEQ ID NO: 11640 - RNA, 21 nt, RNAi
uucuccgagguagcagguagg

SEQ ID NO: 11641 - DNA, 21 bp, homo sapiens
catcgtccatcctcttcctcc

SEQ ID NO: 11642 - RNA, 21 nt, RNAi
ucguccauccucuuccuccuu

SEQ ID NO: 11643 - RNA, 21 nt, RNAi
uuagcagguaggagaaggagg

SEQ ID NO: 11644 - DNA, 21 bp, homo sapiens
cactgttcaaacctctgccgc

SEQ ID NO: 11645 - RNA, 21 nt, RNAi
cuguucaaaccucugccgcuu

SEQ ID NO: 11646 - RNA, 21 nt, RNAi
uugacaaguuuggagacggcg

SEQ ID NO: 11647 - DNA, 21 bp, homo sapiens
cattctctgcctgtactgaag

SEQ ID NO: 11648 - RNA, 21 nt, RNAi
uucucugccuguacugaaguu

SEQ ID NO: 11649 - RNA, 21 nt, RNAi
uuaagagacggacaugacuuc

SEQ ID NO: 11650 - DNA, 21 bp, homo sapiens
caggaagtggtggcaaaggtt

SEQ ID NO: 11651 - RNA, 21 nt, RNAi
ggaagugguggcaaagguuuu

SEQ ID NO: 11652 - RNA, 21 nt, RNAi
uuccuucaccaccguuuccaa

SEQ ID NO: 11653 - DNA, 21 bp, homo sapiens
caaaggtttattccagagaag

SEQ ID NO: 11654 - RNA, 21 nt, RNAi
aagguuuauuccagagaaguu

SEQ ID NO: 11655 - RNA, 21 nt, RNAi
uuuuccaaauaaggucucuuc

SEQ ID NO: 11656 - DNA, 21 bp, homo sapiens
cagagaagccaggaagccggt

SEQ ID NO: 11657 - RNA, 21 nt, RNAi
gagaagccaggaagccgguuu

SEQ ID NO: 11658 - RNA, 21 nt, RNAi
uucucuucgguccuucggcca

SEQ ID NO: 11659 - DNA, 21 bp, homo sapiens
cagcctctgagagcagttact

SEQ ID NO: 11660 - RNA, 21 nt, RNAi
gccucugagagcaguuacuuu

SEQ ID NO: 11661 - RNA, 21 nt, RNAi
uucggagacucucgucaauga

SEQ ID NO: 11662 - DNA, 21 bp, homo sapiens
caacctgacttcctctgccac

SEQ ID NO: 11663 - RNA, 21 nt, RNAi
accugacuuccucugccacuu

SEQ ID NO: 11664 - RNA, 21 nt, RNAi
uuuggacugaaggagacggug

SEQ ID NO: 11665 - DNA, 21 bp, homo sapiens
caatgacgtgcctacctctta

SEQ ID NO: 11666 - RNA, 21 nt, RNAi
augacgugccuaccucuuauu

SEQ ID NO: 11667 - RNA, 21 nt, RNAi
uuuacugcacggauggagaau

SEQ ID NO: 11668 - DNA, 21 bp, homo sapiens
catgttgtgaggagactatga

SEQ ID NO: 11669 - RNA, 21 nt, RNAi
uguugugaggagacuaugauu

SEQ ID NO: 11670 - RNA, 21 nt, RNAi
uuacaacacuccucugauacu

SEQ ID NO: 11671 - DNA, 21 bp, homo sapiens
catgtgattgtcatgtaaggc

SEQ ID NO: 11672 - RNA, 21 nt, RNAi
ugugauugucauguaaggcuu

SEQ ID NO: 11673 - RNA, 21 nt, RNAi
uuacacuaacaguacauuccg

SEQ ID NO: 11674 - DNA, 21 bp, homo sapiens
catgtaaggcttaacacagtg

SEQ ID NO: 11675 - RNA, 21 nt, RNAi
uguaaggcuuaacacaguguu

SEQ ID NO: 11676 - RNA, 21 nt, RNAi
uuacauuccgaauugugucac

SEQ ID NO: 11677 - DNA, 21 bp, homo sapiens
gatcctggccatgagagctcc

SEQ ID NO: 11678 - RNA, 21 nt, RNAi
uccuggccaugagagcuccuu

SEQ ID NO: 11679 - RNA, 21 nt, RNAi
uuaggaccgguacucucgagg

SEQ ID NO: 11680 - DNA, 21 bp, homo sapiens
gaagctgctgccgctgctgat

SEQ ID NO: 11681 - RNA, 21 nt, RNAi
agcugcugccgcugcugauuu

SEQ ID NO: 11682 - RNA, 21 nt, RNAi
uuucgacgacggcgacgacua

SEQ ID NO: 11683 - DNA, 21 bp, homo sapiens
gatgatcacctgctgcttctt

SEQ ID NO: 11684 - RNA, 21 nt, RNAi
ugaucaccugcugcuucuuuu

SEQ ID NO: 11685 - RNA, 21 nt, RNAi
uuacuaguggacgacgaagaa

SEQ ID NO: 11686 - DNA, 21 bp, homo sapiens
gatcacctgctgcttcttcag

SEQ ID NO: 11687 - RNA, 21 nt, RNAi
ucaccugcugcuucuucaguu

SEQ ID NO: 11688 - RNA, 21 nt, RNAi
uuaguggacgacgaagaaguc

SEQ ID NO: 11689 - DNA, 21 bp, homo sapiens
gacgactcgctctgttgtcca

SEQ ID NO: 11690 - RNA, 21 nt, RNAi
cgacucgcucuguuguccauu

SEQ ID NO: 11691 - RNA, 21 nt, RNAi
uugcugagcgagacaacaggu

SEQ ID NO: 11692 - DNA, 21 bp, homo sapiens
gactcgctctgttgtccatcc

SEQ ID NO: 11693 - RNA, 21 nt, RNAi
cucgcucuguuguccauccuu

SEQ ID NO: 11694 - RNA, 21 nt, RNAi
uugagcgagacaacagguagg

SEQ ID NO: 11695 - DNA, 21 bp, homo sapiens
gaacggatgagcacgatctca

SEQ ID NO: 11696 - RNA, 21 nt, RNAi
acggaugagcacgaucucauu

SEQ ID NO: 11697 - RNA, 21 nt, RNAi
uuugccuacucgugcuagagu

SEQ ID NO: 11698 - DNA, 21 bp, homo sapiens
gatgagcacgatctcatgttg

SEQ ID NO: 11699 - RNA, 21 nt, RNAi
ugagcacgaucucauguuguu

SEQ ID NO: 11700 - RNA, 21 nt, RNAi
uuacucgugcuagaguacaac

SEQ ID NO: 11701 - DNA, 21 bp, homo sapiens
gagcacgatctcatgttgcta

SEQ ID NO: 11702 - RNA, 21 nt, RNAi
gcacgaucucauguugcuauu

SEQ ID NO: 11703 - RNA, 21 nt, RNAi
uucgugcuagaguacaacgau

SEQ ID NO: 11704 - DNA, 21 bp, homo sapiens
gatctcatgttgctaaagctg

SEQ ID NO: 11705 - RNA, 21 nt, RNAi
ucucauguugcuaaagcuguu

SEQ ID NO: 11706 - RNA, 21 nt, RNAi
uuagaguacaacgauuucgac

SEQ ID NO: 11707 - DNA, 21 bp, homo sapiens
gagaccagtgccaggttgctg

SEQ ID NO: 11708 - RNA, 21 nt, RNAi
gaccagugccagguugcuguu

SEQ ID NO: 11709 - RNA, 21 nt, RNAi
uucuggucacgguccaacgac

SEQ ID NO: 11710 - DNA, 21 bp, homo sapiens
gacctgctccagcatcactat

SEQ ID NO: 11711 - RNA, 21 nt, RNAi
ccugcuccagcaucacuauuu

SEQ ID NO: 11712 - RNA, 21 nt, RNAi
uuggacgaggucguagugaua

SEQ ID NO: 11713 - DNA, 21 bp, homo sapiens
gatatgtgctggactggaccg

SEQ ID NO: 11714 - RNA, 21 nt, RNAi
uaugugcuggacuggaccguu

SEQ ID NO: 11715 - RNA, 21 nt, RNAi
uuauacacgaccugaccuggc

SEQ ID NO: 11716 - DNA, 21 bp, homo sapiens
gatctgcaaatacatgtcctg

SEQ ID NO: 11717 - RNA, 21 nt, RNAi
ucugcaaauacauguccuguu

SEQ ID NO: 11718 - RNA, 21 nt, RNAi
uuagacguuuauguacaggac

SEQ ID NO: 11719 - DNA, 21 bp, homo sapiens
gatcaataaagtcatacgctc

SEQ ID NO: 11720 - RNA, 21 nt, RNAi
ucaauaaagucauacgcucuu

SEQ ID NO: 11721 - RNA, 21 nt, RNAi
uuaguuauuucaguaugcgag

SEQ ID NO: 11722 - DNA, 21 bp, homo sapiens
gatccagatgctacgctccag

SEQ ID NO: 11723 - RNA, 21 nt, RNAi
uccagaugcuacgcuccaguu

SEQ ID NO: 11724 - RNA, 21 nt, RNAi
uuaggucuacgaugcgagguc

SEQ ID NO: 11725 - DNA, 21 bp, homo sapiens
gatgctacgctccagctgatc

SEQ ID NO: 11726 - RNA, 21 nt, RNAi
ugcuacgcuccagcugaucuu

SEQ ID NO: 11727 - RNA, 21 nt, RNAi
uuacgaugcgaggucgacuag

SEQ ID NO: 11728 - DNA, 21 bp, homo sapiens
gatccagatgttatgctcctg

SEQ ID NO: 11729 - RNA, 21 nt, RNAi
uccagauguuaugcuccuguu

SEQ ID NO: 11730 - RNA, 21 nt, RNAi
uuaggucuacaauacgaggac

SEQ ID NO: 11731 - DNA, 21 bp, homo sapiens
gatgttatgctcctgctgatc

SEQ ID NO: 11732 - RNA, 21 nt, RNAi
uguuaugcuccugcugaucuu

SEQ ID NO: 11733 - RNA, 21 nt, RNAi
uuacaauacgaggacgacuag

SEQ ID NO: 11734 - DNA, 21 bp, homo sapiens
gaggctccatcgtccatcctc

SEQ ID NO: 11735 - RNA, 21 nt, RNAi
ggcuccaucguccauccucuu

SEQ ID NO: 11736 - RNA, 21 nt, RNAi
uuccgagguagcagguaggag

SEQ ID NO: 11737 - DNA, 21 bp, homo sapiens
gaagctgaaatgcaggaagtg

SEQ ID NO: 11738 - RNA, 21 nt, RNAi
agcugaaaugcaggaaguguu

SEQ ID NO: 11739 - RNA, 21 nt, RNAi
uuucgacuuuacguccuucac

SEQ ID NO: 11740 - DNA, 21 bp, homo sapiens
gaaatgcaggaagtggtggca

SEQ ID NO: 11741 - RNA, 21 nt, RNAi
aaugcaggaagugguggcauu

SEQ ID NO: 11742 - RNA, 21 nt, RNAi
uuuuacguccuucaccaccgu

SEQ ID NO: 11743 - DNA, 21 bp, homo sapiens
gaagtggtggcaaaggtttat

SEQ ID NO: 11744 - RNA, 21 nt, RNAi
agugguggcaaagguuuauuu

SEQ ID NO: 11745 - RNA, 21 nt, RNAi
uuucaccaccguuuccaaaua

SEQ ID NO: 11746 - DNA, 21 bp, homo sapiens
gagaagccaggaagccggtca

SEQ ID NO: 11747 - RNA, 21 nt, RNAi
gaagccaggaagccggucauu

SEQ ID NO: 11748 - RNA, 21 nt, RNAi
uucuucgguccuucggccagu

SEQ ID NO: 11749 - DNA, 21 bp, homo sapiens
gaagccaggaagccggtcatc

SEQ ID NO: 11750 - RNA, 21 nt, RNAi
agccaggaagccggucaucuu

SEQ ID NO: 11751 - RNA, 21 nt, RNAi
uuucgguccuucggccaguag

SEQ ID NO: 11752 - DNA, 21 bp, homo sapiens
gaacctcagtttcctcatctg

SEQ ID NO: 11753 - RNA, 21 nt, RNAi
accucaguuuccucaucuguu

SEQ ID NO: 11754 - RNA, 21 nt, RNAi
uuuggagucaaaggaguagac

SEQ ID NO: 11755 - DNA, 21 bp, homo sapiens
gaacaatgacgtgcctacctc

SEQ ID NO: 11756 - RNA, 21 nt, RNAi
acaaugacgugccuaccucuu

SEQ ID NO: 11757 - RNA, 21 nt, RNAi
uuuguuacugcacggauggag

SEQ ID NO: 11758 - DNA, 21 bp, homo sapiens
gacgtgcctacctcttagaca

SEQ ID NO: 11759 - RNA, 21 nt, RNAi
cgugccuaccucuuagacauu

SEQ ID NO: 11760 - RNA, 21 nt, RNAi
uugcacggauggagaaucugu

SEQ ID NO: 11761 - DNA, 21 bp, homo sapiens
gacatgttgtgaggagactat

SEQ ID NO: 11762 - RNA, 21 nt, RNAi
cauguugugaggagacuauuu

SEQ ID NO: 11763 - RNA, 21 nt, RNAi
uuguacaacacuccucugaua

SEQ ID NO: 11764 - DNA, 21 bp, homo sapiens
gaggagactatgatataacat

SEQ ID NO: 11765 - RNA, 21 nt, RNAi
ggagacuaugauauaacauuu

SEQ ID NO: 11766 - RNA, 21 nt, RNAi
uuccucugauacuauauugua

SEQ ID NO: 11767 - DNA, 21 bp, homo sapiens
gagactatgatataacatgtg

SEQ ID NO: 11768 - RNA, 21 nt, RNAi
gacuaugauauaacauguguu

SEQ ID NO: 11769 - RNA, 21 nt, RNAi
uucugauacuauauuguacac

SEQ ID NO: 11770 - DNA, 21 bp, homo sapiens
gattgtcatgtaaggcttaac

SEQ ID NO: 11771 - RNA, 21 nt, RNAi
uugucauguaaggcuuaacuu

SEQ ID NO: 11772 - RNA, 21 nt, RNAi
uuaacaguacauuccgaauug

SEQ ID NO: 11773 - DNA, 21 bp, homo sapiens
gagttctgactaaaggttacc

SEQ ID NO: 11774 - RNA, 21 nt, RNAi
guucugacuaaagguuaccuu

SEQ ID NO: 11775 - RNA, 21 nt, RNAi
uucaagacugauuuccaaugg

SEQ ID NO: 11776 - DNA, 21 bp, homo sapiens
gactaaaggttacctgttgtc

SEQ ID NO: 11777 - RNA, 21 nt, RNAi
cuaaagguuaccuguugucuu

SEQ ID NO: 11778 - RNA, 21 nt, RNAi
uugauuuccaauggacaacag

SEQ ID NO: 11779 - DNA, 21 bp, homo sapiens
taaagagtgtgaggtcttcta

SEQ ID NO: 11780 - RNA, 21 nt, RNAi
aagagugugaggucuucuauu

SEQ ID NO: 11781 - RNA, 21 nt, RNAi
uuuucucacacuccagaagau

SEQ ID NO: 11782 - DNA, 21 bp, homo sapiens
tacatgtcctggatcaataaa

SEQ ID NO: 11783 - RNA, 21 nt, RNAi
cauguccuggaucaauaaauu

SEQ ID NO: 11784 - RNA, 21 nt, RNAi
uuguacaggaccuaguuauuu

SEQ ID NO: 11785 - DNA, 21 bp, homo sapiens
taaagtcatacgctccaactg

SEQ ID NO: 11786 - RNA, 21 nt, RNAi
aagucauacgcuccaacuguu

SEQ ID NO: 11787 - RNA, 21 nt, RNAi
uuuucaguaugcgagguugac

SEQ ID NO: 11788 - DNA, 21 bp, homo sapiens
tacgctccaactgatccagat

SEQ ID NO: 11789 - RNA, 21 nt, RNAi
cgcuccaacugauccagauuu

SEQ ID NO: 11790 - RNA, 21 nt, RNAi
uugcgagguugacuaggucua

SEQ ID NO: 11791 - DNA, 21 bp, homo sapiens
tacgctccagctgatccagat

SEQ ID NO: 11792 - RNA, 21 nt, RNAi
cgcuccagcugauccagauuu

SEQ ID NO: 11793 - RNA, 21 nt, RNAi
uugcgaggucgacuaggucua

SEQ ID NO: 11794 - DNA, 21 bp, homo sapiens
tatgctcctgctgatccagat

SEQ ID NO: 11795 - RNA, 21 nt, RNAi
ugcuccugcugauccagauuu

SEQ ID NO: 11796 - RNA, 21 nt, RNAi
uuacgaggacgacuaggucua

SEQ ID NO: 11797 - DNA, 21 bp, homo sapiens
tactgaagctgaaatgcagga

SEQ ID NO: 11798 - RNA, 21 nt, RNAi
cugaagcugaaaugcaggauu

SEQ ID NO: 11799 - RNA, 21 nt, RNAi
uugacuucgacuuuacguccu

SEQ ID NO: 11800 - DNA, 21 bp, homo sapiens
tattccagagaagccaggaag

SEQ ID NO: 11801 - RNA, 21 nt, RNAi
uuccagagaagccaggaaguu

SEQ ID NO: 11802 - RNA, 21 nt, RNAi
uuaaggucucuucgguccuuc

SEQ ID NO: 11803 - DNA, 21 bp, homo sapiens
tacctcttagacatgttgtga

SEQ ID NO: 11804 - RNA, 21 nt, RNAi
ccucuuagacauguugugauu

SEQ ID NO: 11805 - RNA, 21 nt, RNAi
uuggagaaucuguacaacacu

SEQ ID NO: 11806 - DNA, 21 bp, homo sapiens
tagacatgttgtgaggagact

SEQ ID NO: 11807 - RNA, 21 nt, RNAi
gacauguugugaggagacuuu

SEQ ID NO: 11808 - RNA, 21 nt, RNAi
uucuguacaacacuccucuga

SEQ ID NO: 11809 - DNA, 21 bp, homo sapiens
taaaggttacctgttgtcgtg

SEQ ID NO: 11810 - RNA, 21 nt, RNAi
aagguuaccuguugucguguu

SEQ ID NO: 11811 - RNA, 21 nt, RNAi
uuuuccaauggacaacagcac

SEQ ID NO: 11812 - DNA, 21 bp, homo sapiens
caccaacaacatgatatgtgc

SEQ ID NO: 11813 - RNA, 21 nt, RNAi
ccaacaacaugauaugugcuu

SEQ ID NO: 11814 - RNA, 21 nt, RNAi
uugguuguuguacuauacacg

SEQ ID NO: 11815 - DNA, 21 bp, homo sapiens
caacaacatgatatgtgctgg

SEQ ID NO: 11816 - RNA, 21 nt, RNAi
acaacaugauaugugcugguu

SEQ ID NO: 11817 - RNA, 21 nt, RNAi
uuuguuguacuauacacgacc

SEQ ID NO: 11818 - DNA, 21 bp, homo sapiens
gaacggatgagcacgatctca

SEQ ID NO: 11819 - RNA, 21 nt, RNAi
acggaugagcacgaucucauu

SEQ ID NO: 11820 - RNA, 21 nt, RNAi
uuugccuacucgugcuagagu

SEQ ID NO: 11821 - DNA, 21 bp, homo sapiens
gatgagcacgatctcatgttg

SEQ ID NO: 11822 - RNA, 21 nt, RNAi
ugagcacgaucucauguuguu

SEQ ID NO: 11823 - RNA, 21 nt, RNAi
uuacucgugcuagaguacaac

SEQ ID NO: 11824 - DNA, 21 bp, homo sapiens
gagcacgatctcatgttgcta

SEQ ID NO: 11825 - RNA, 21 nt, RNAi
gcacgaucucauguugcuauu

SEQ ID NO: 11826 - RNA, 21 nt, RNAi
uucgugcuagaguacaacgau

SEQ ID NO: 11827 - DNA, 21 bp, homo sapiens
aaagcagcaagcctcggcagc

SEQ ID NO: 11828 - RNA, 21 nt, RNAi
agcagcaagccucggcagcuu

SEQ ID NO: 11829 - RNA, 21 nt, RNAi
uuucgucguucggagccgucg

SEQ ID NO: 11830 - DNA, 21 bp, homo sapiens
aagcagcaagcctcggcagca

SEQ ID NO: 11831 - RNA, 21 nt, RNAi
gcagcaagccucggcagcauu

SEQ ID NO: 11832 - RNA, 21 nt, RNAi
uucgucguucggagccgucgu

SEQ ID NO: 11833 - DNA, 21 bp, homo sapiens
aagcctcggcagcagtcaatc

SEQ ID NO: 11834 - RNA, 21 nt, RNAi
gccucggcagcagucaaucuu

SEQ ID NO: 11835 - RNA, 21 nt, RNAi
uucggagccgucgucaguuag

SEQ ID NO: 11836 - DNA, 21 bp, homo sapiens
aatcctccagaacctatgctg

SEQ ID NO: 11837 - RNA, 21 nt, RNAi
uccuccagaaccuaugcuguu

SEQ ID NO: 11838 - RNA, 21 nt, RNAi
uuaggaggucuuggauacgac

SEQ ID NO: 11839 - DNA, 21 bp, homo sapiens
aacctatgctggtggaacagc

SEQ ID NO: 11840 - RNA, 21 nt, RNAi
ccuaugcugguggaacagcuu

SEQ ID NO: 11841 - RNA, 21 nt, RNAi
uuggauacgaccaccuugucg

SEQ ID NO: 11842 - DNA, 21 bp, homo sapiens
aacagcctcggccaccaaggt

SEQ ID NO: 11843 - RNA, 21 nt, RNAi
cagccucggccaccaagguuu

SEQ ID NO: 11844 - RNA, 21 nt, RNAi
uugucggagccggugguucca

SEQ ID NO: 11845 - DNA, 21 bp, homo sapiens
aaggtgtcagcttcctctggt

SEQ ID NO: 11846 - RNA, 21 nt, RNAi
ggugucagcuuccucugguuu

SEQ ID NO: 11847 - RNA, 21 nt, RNAi
uuccacagucgaaggagacca

SEQ ID NO: 11848 - DNA, 21 bp, homo sapiens
aaccagcaagtcttccagtat

SEQ ID NO: 11849 - RNA, 21 nt, RNAi
ccagcaagucuuccaguauuu

SEQ ID NO: 11850 - RNA, 21 nt, RNAi
uuggucguucagaaggucaua

SEQ ID NO: 11851 - DNA, 21 bp, homo sapiens
aaaccaaggccattccagtca

SEQ ID NO: 11852 - RNA, 21 nt, RNAi
accaaggccauuccagucauu

SEQ ID NO: 11853 - RNA, 21 nt, RNAi
uuugguuccgguaaggucagu

SEQ ID NO: 11854 - DNA, 21 bp, homo sapiens
aaccaaggccattccagtcag

SEQ ID NO: 11855 - RNA, 21 nt, RNAi
ccaaggccauuccagucaguu

SEQ ID NO: 11856 - RNA, 21 nt, RNAi
uugguuccgguaaggucaguc

SEQ ID NO: 11857 - DNA, 21 bp, homo sapiens
aaggccattccagtcagccaa

SEQ ID NO: 11858 - RNA, 21 nt, RNAi
ggccauuccagucagccaauu

SEQ ID NO: 11859 - RNA, 21 nt, RNAi
uuccgguaaggucagucgguu

SEQ ID NO: 11860 - DNA, 21 bp, homo sapiens
aacagatggaaggaccacatc

SEQ ID NO: 11861 - RNA, 21 nt, RNAi
cagauggaaggaccacaucuu

SEQ ID NO: 11862 - RNA, 21 nt, RNAi
uugucuaccuuccugguguag

SEQ ID NO: 11863 - DNA, 21 bp, homo sapiens
aaggaccacatcttcctaaca

SEQ ID NO: 11864 - RNA, 21 nt, RNAi
ggaccacaucuuccuaacauu

SEQ ID NO: 11865 - RNA, 21 nt, RNAi
uuccugguguagaaggauugu

SEQ ID NO: 11866 - DNA, 21 bp, homo sapiens
aaacagaacctgagaagaagt

SEQ ID NO: 11867 - RNA, 21 nt, RNAi
acagaaccugagaagaaguuu

SEQ ID NO: 11868 - RNA, 21 nt, RNAi
uuugucuuggacucuucuuca

SEQ ID NO: 11869 - DNA, 21 bp, homo sapiens
aacagaacctgagaagaagtc

SEQ ID NO: 11870 - RNA, 21 nt, RNAi
cagaaccugagaagaagucuu

SEQ ID NO: 11871 - RNA, 21 nt, RNAi
uugucuuggacucuucuucag

SEQ ID NO: 11872 - DNA, 21 bp, homo sapiens
aacctgagaagaagtcacagt

SEQ ID NO: 11873 - RNA, 21 nt, RNAi
ccugagaagaagucacaguuu

SEQ ID NO: 11874 - RNA, 21 nt, RNAi
uuggacucuucuucaguguca

SEQ ID NO: 11875 - DNA, 21 bp, homo sapiens
aagaagtcacagtcaaccaag

SEQ ID NO: 11876 - RNA, 21 nt, RNAi
gaagucacagucaaccaaguu

SEQ ID NO: 11877 - RNA, 21 nt, RNAi
uucuucagugucaguugguuc

SEQ ID NO: 11878 - DNA, 21 bp, homo sapiens
aagtcacagtcaaccaagctg

SEQ ID NO: 11879 - RNA, 21 nt, RNAi
gucacagucaaccaagcuguu

SEQ ID NO: 11880 - RNA, 21 nt, RNAi
uucagugucaguugguucgac

SEQ ID NO: 11881 - DNA, 21 bp, homo sapiens
aaccaagctgtctgtggttca

SEQ ID NO: 11882 - RNA, 21 nt, RNAi
ccaagcugucugugguucauu

SEQ ID NO: 11883 - RNA, 21 nt, RNAi
uugguucgacagacaccaagu

SEQ ID NO: 11884 - DNA, 21 bp, homo sapiens
aagctgtctgtggttcatgag

SEQ ID NO: 11885 - RNA, 21 nt, RNAi
gcugucugugguucaugaguu

SEQ ID NO: 11886 - RNA, 21 nt, RNAi
uucgacagacaccaaguacuc

SEQ ID NO: 11887 - DNA, 21 bp, homo sapiens
aagcaggcatcagatacagga

SEQ ID NO: 11888 - RNA, 21 nt, RNAi
gcaggcaucagauacaggauu

SEQ ID NO: 11889 - RNA, 21 nt, RNAi
uucguccguagucuauguccu

SEQ ID NO: 11890 - DNA, 21 bp, homo sapiens
aagtaacgatgctcacaataa

SEQ ID NO: 11891 - RNA, 21 nt, RNAi
guaacgaugcucacaauaauu

SEQ ID NO: 11892 - RNA, 21 nt, RNAi
uucauugcuacgaguguuauu

SEQ ID NO: 11893 - DNA, 21 bp, homo sapiens
aaagcagtttccagatcagct

SEQ ID NO: 11894 - RNA, 21 nt, RNAi
agcaguuuccagaucagcuuu

SEQ ID NO: 11895 - RNA, 21 nt, RNAi
uuucgucaaaggucuagucga

SEQ ID NO: 11896 - DNA, 21 bp, homo sapiens
aagcagtttccagatcagctg

SEQ ID NO: 11897 - RNA, 21 nt, RNAi
gcaguuuccagaucagcuguu

SEQ ID NO: 11898 - RNA, 21 nt, RNAi
uucgucaaaggucuagucgac

SEQ ID NO: 11899 - DNA, 21 bp, homo sapiens
aacagcagccatcagagaaat

SEQ ID NO: 11900 - RNA, 21 nt, RNAi
cagcagccaucagagaaauuu

SEQ ID NO: 11901 - RNA, 21 nt, RNAi
uugucgucgguagucucuuua

SEQ ID NO: 11902 - DNA, 21 bp, homo sapiens
aaatcaacagaaccaaagact

SEQ ID NO: 11903 - RNA, 21 nt, RNAi
aucaacagaaccaaagacuuu

SEQ ID NO: 11904 - RNA, 21 nt, RNAi
uuuaguugucuugguuucuga

SEQ ID NO: 11905 - DNA, 21 bp, homo sapiens
aatcaacagaaccaaagacta

SEQ ID NO: 11906 - RNA, 21 nt, RNAi
ucaacagaaccaaagacuauu

SEQ ID NO: 11907 - RNA, 21 nt, RNAi
uuaguugucuugguuucugau

SEQ ID NO: 11908 - DNA, 21 bp, homo sapiens
aacagaaccaaagactaaacc

SEQ ID NO: 11909 - RNA, 21 nt, RNAi
cagaaccaaagacuaaaccuu

SEQ ID NO: 11910 - RNA, 21 nt, RNAi
uugucuugguuucugauuugg

SEQ ID NO: 11911 - DNA, 21 bp, homo sapiens
aaccaaagactaaaccacaag

SEQ ID NO: 11912 - RNA, 21 nt, RNAi
ccaaagacuaaaccacaaguu

SEQ ID NO: 11913 - RNA, 21 nt, RNAi
uugguuucugauuugguguuc

SEQ ID NO: 11914 - DNA, 21 bp, homo sapiens
aaagactaaaccacaagacat

SEQ ID NO: 11915 - RNA, 21 nt, RNAi
agacuaaaccacaagacauuu

SEQ ID NO: 11916 - RNA, 21 nt, RNAi
uuucugauuugguguucugua

SEQ ID NO: 11917 - DNA, 21 bp, homo sapiens
aagactaaaccacaagacatg

SEQ ID NO: 11918 - RNA, 21 nt, RNAi
gacuaaaccacaagacauguu

SEQ ID NO: 11919 - RNA, 21 nt, RNAi
uucugauuugguguucuguac

SEQ ID NO: 11920 - DNA, 21 bp, homo sapiens
aaaccacaagacatgatttct

SEQ ID NO: 11921 - RNA, 21 nt, RNAi
accacaagacaugauuucuuu

SEQ ID NO: 11922 - RNA, 21 nt, RNAi
uuugguguucuguacuaaaga

SEQ ID NO: 11923 - DNA, 21 bp, homo sapiens
aaccacaagacatgatttctg

SEQ ID NO: 11924 - RNA, 21 nt, RNAi
ccacaagacaugauuucuguu

SEQ ID NO: 11925 - RNA, 21 nt, RNAi
uugguguucuguacuaaagac

SEQ ID NO: 11926 - DNA, 21 bp, homo sapiens
aagacatgatttctgctggtg

SEQ ID NO: 11927 - RNA, 21 nt, RNAi
gacaugauuucugcugguguu

SEQ ID NO: 11928 - RNA, 21 nt, RNAi
uucuguacuaaagacgaccac

SEQ ID NO: 11929 - DNA, 21 bp, homo sapiens
aatctaaaccggataaaccat

SEQ ID NO: 11930 - RNA, 21 nt, RNAi
ucuaaaccggauaaaccauuu

SEQ ID NO: 11931 - RNA, 21 nt, RNAi
uuagauuuggccuauuuggua

SEQ ID NO: 11932 - DNA, 21 bp, homo sapiens
aaagtcaggcatggatgctgc

SEQ ID NO: 11933 - RNA, 21 nt, RNAi
agucaggcauggaugcugcuu

SEQ ID NO: 11934 - RNA, 21 nt, RNAi
uuucaguccguaccuacgacg

SEQ ID NO: 11935 - DNA, 21 bp, homo sapiens
aagtcaggcatggatgctgct

SEQ ID NO: 11936 - RNA, 21 nt, RNAi
gucaggcauggaugcugcuuu

SEQ ID NO: 11937 - RNA, 21 nt, RNAi
uucaguccguaccuacgacga

SEQ ID NO: 11938 - DNA, 21 bp, homo sapiens
aatagatactttaggaggacc

SEQ ID NO: 11939 - RNA, 21 nt, RNAi
uagauacuuuaggaggaccuu

SEQ ID NO: 11940 - RNA, 21 nt, RNAi
uuaucuaugaaauccuccugg

SEQ ID NO: 11941 - DNA, 21 bp, homo sapiens
aaatacaacgtatactggacc

SEQ ID NO: 11942 - RNA, 21 nt, RNAi
auacaacguauacuggaccuu

SEQ ID NO: 11943 - RNA, 21 nt, RNAi
uuuauguugcauaugaccugg

SEQ ID NO: 11944 - DNA, 21 bp, homo sapiens
aatacaacgtatactggacca

SEQ ID NO: 11945 - RNA, 21 nt, RNAi
uacaacguauacuggaccauu

SEQ ID NO: 11946 - RNA, 21 nt, RNAi
uuauguugcauaugaccuggu

SEQ ID NO: 11947 - DNA, 21 bp, homo sapiens
aacgtatactggaccagaagt

SEQ ID NO: 11948 - RNA, 21 nt, RNAi
cguauacuggaccagaaguuu

SEQ ID NO: 11949 - RNA, 21 nt, RNAi
uugcauaugaccuggucuuca

SEQ ID NO: 11950 - DNA, 21 bp, homo sapiens
aagtttcagatccaatgagtt

SEQ ID NO: 11951 - RNA, 21 nt, RNAi
guuucagauccaaugaguuuu

SEQ ID NO: 11952 - RNA, 21 nt, RNAi
uucaaagucuagguuacucaa

SEQ ID NO: 11953 - DNA, 21 bp, homo sapiens
aatgagttccacctacataga

SEQ ID NO: 11954 - RNA, 21 nt, RNAi
ugaguuccaccuacauagauu

SEQ ID NO: 11955 - RNA, 21 nt, RNAi
uuacucaagguggauguaucu

SEQ ID NO: 11956 - DNA, 21 bp, homo sapiens
aaagagaagtcacaattcctc

SEQ ID NO: 11957 - RNA, 21 nt, RNAi
agagaagucacaauuccucuu

SEQ ID NO: 11958 - RNA, 21 nt, RNAi
uuucucuucaguguuaaggag

SEQ ID NO: 11959 - DNA, 21 bp, homo sapiens
aagagaagtcacaattcctcc

SEQ ID NO: 11960 - RNA, 21 nt, RNAi
gagaagucacaauuccuccuu

SEQ ID NO: 11961 - RNA, 21 nt, RNAi
uucucuucaguguuaaggagg

SEQ ID NO: 11962 - DNA, 21 bp, homo sapiens
aaagaggaatctacagaagtt

SEQ ID NO: 11963 - RNA, 21 nt, RNAi
agaggaaucuacagaaguuuu

SEQ ID NO: 11964 - RNA, 21 nt, RNAi
uuucuccuuagaugucuucaa

SEQ ID NO: 11965 - DNA, 21 bp, homo sapiens
aagaggaatctacagaagttt

SEQ ID NO: 11966 - RNA, 21 nt, RNAi
gaggaaucuacagaaguuuuu

SEQ ID NO: 11967 - RNA, 21 nt, RNAi
uucuccuuagaugucuucaaa

SEQ ID NO: 11968 - DNA, 21 bp, homo sapiens
aaagaaaggtggagaaggata

SEQ ID NO: 11969 - RNA, 21 nt, RNAi
agaaagguggagaaggauauu

SEQ ID NO: 11970 - RNA, 21 nt, RNAi
uuucuuuccaccucuuccuau

SEQ ID NO: 11971 - DNA, 21 bp, homo sapiens
aagaaaggtggagaaggatac

SEQ ID NO: 11972 - RNA, 21 nt, RNAi
gaaagguggagaaggauacuu

SEQ ID NO: 11973 - RNA, 21 nt, RNAi
uucuuuccaccucuuccuaug

SEQ ID NO: 11974 - DNA, 21 bp, homo sapiens
aaaggtggagaaggatacaat

SEQ ID NO: 11975 - RNA, 21 nt, RNAi
agguggagaaggauacaauuu

SEQ ID NO: 11976 - RNA, 21 nt, RNAi
uuuccaccucuuccuauguua

SEQ ID NO: 11977 - DNA, 21 bp, homo sapiens
aaggtggagaaggatacaatg

SEQ ID NO: 11978 - RNA, 21 nt, RNAi
gguggagaaggauacaauguu

SEQ ID NO: 11979 - RNA, 21 nt, RNAi
uuccaccucuuccuauguuac

SEQ ID NO: 11980 - DNA, 21 bp, homo sapiens
aaggatacaatgagtgatcaa

SEQ ID NO: 11981 - RNA, 21 nt, RNAi
ggauacaaugagugaucaauu

SEQ ID NO: 11982 - RNA, 21 nt, RNAi
uuccuauguuacucacuaguu

SEQ ID NO: 11983 - DNA, 21 bp, homo sapiens
aatgagtgatcaagcactcga

SEQ ID NO: 11984 - RNA, 21 nt, RNAi
ugagugaucaagcacucgauu

SEQ ID NO: 11985 - RNA, 21 nt, RNAi
uuacucacuaguucgugagcu

SEQ ID NO: 11986 - DNA, 21 bp, homo sapiens
aagcactcgaggctctgtcgg

SEQ ID NO: 11987 - RNA, 21 nt, RNAi
gcacucgaggcucugucgguu

SEQ ID NO: 11988 - RNA, 21 nt, RNAi
uucgugagcuccgagacagcc

SEQ ID NO: 11989 - DNA, 21 bp, homo sapiens
aagcagaacctgagctcgacc

SEQ ID NO: 11990 - RNA, 21 nt, RNAi
gcagaaccugagcucgaccuu

SEQ ID NO: 11991 - RNA, 21 nt, RNAi
uucgucuuggacucgagcugg

SEQ ID NO: 11992 - DNA, 21 bp, homo sapiens
aacctgagctcgacctccgct

SEQ ID NO: 11993 - RNA, 21 nt, RNAi
ccugagcucgaccuccgcuuu

SEQ ID NO: 11994 - RNA, 21 nt, RNAi
uuggacucgagcuggaggcga

SEQ ID NO: 11995 - DNA, 21 bp, homo sapiens
aattaaggaagtcgatgaggc

SEQ ID NO: 11996 - RNA, 21 nt, RNAi
uuaaggaagucgaugaggcuu

SEQ ID NO: 11997 - RNA, 21 nt, RNAi
uuaauuccuucagcuacuccg

SEQ ID NO: 11998 - DNA, 21 bp, homo sapiens
aaactagagaagtgtggtgag

SEQ ID NO: 11999 - RNA, 21 nt, RNAi
acuagagaaguguggugaguu

SEQ ID NO: 12000 - RNA, 21 nt, RNAi
uuugaucucuucacaccacuc

SEQ ID NO: 12001 - DNA, 21 bp, homo sapiens
aactagagaagtgtggtgagg

SEQ ID NO: 12002 - RNA, 21 nt, RNAi
cuagagaaguguggugagguu

SEQ ID NO: 12003 - RNA, 21 nt, RNAi
uugaucucuucacaccacucc

SEQ ID NO: 12004 - DNA, 21 bp, homo sapiens
aagtgtggtgaggatgatgaa

SEQ ID NO: 12005 - RNA, 21 nt, RNAi
guguggugaggaugaugaauu

SEQ ID NO: 12006 - RNA, 21 nt, RNAi
uucacaccacuccuacuacuu

SEQ ID NO: 12007 - DNA, 21 bp, homo sapiens
aaaccagccacggataaagat

SEQ ID NO: 12008 - RNA, 21 nt, RNAi
accagccacggauaaagauuu

SEQ ID NO: 12009 - RNA, 21 nt, RNAi
uuuggucggugccuauuucua

SEQ ID NO: 12010 - DNA, 21 bp, homo sapiens
aaccagccacggataaagatg

SEQ ID NO: 12011 - RNA, 21 nt, RNAi
ccagccacggauaaagauguu

SEQ ID NO: 12012 - RNA, 21 nt, RNAi
uuggucggugccuauuucuac

SEQ ID NO: 12013 - DNA, 21 bp, homo sapiens
aaaccactattgccagagcct

SEQ ID NO: 12014 - RNA, 21 nt, RNAi
accacuauugccagagccuuu

SEQ ID NO: 12015 - RNA, 21 nt, RNAi
uuuggugauaacggucucgga

SEQ ID NO: 12016 - DNA, 21 bp, homo sapiens
aaccactattgccagagcctg

SEQ ID NO: 12017 - RNA, 21 nt, RNAi
ccacuauugccagagccuguu

SEQ ID NO: 12018 - RNA, 21 nt, RNAi
uuggugauaacggucucggac

SEQ ID NO: 12019 - DNA, 21 bp, homo sapiens
aagcctcggagtgaatcagaa

SEQ ID NO: 12020 - RNA, 21 nt, RNAi
gccucggagugaaucagaauu

SEQ ID NO: 12021 - RNA, 21 nt, RNAi
uucggagccucacuuagucuu

SEQ ID NO: 12022 - DNA, 21 bp, homo sapiens
aatcagaactcattgatgaac

SEQ ID NO: 12023 - RNA, 21 nt, RNAi
ucagaacucauugaugaacuu

SEQ ID NO: 12024 - RNA, 21 nt, RNAi
uuagucuugaguaacuacuug

SEQ ID NO: 12025 - DNA, 21 bp, homo sapiens
aactcattgatgaactttcag

SEQ ID NO: 12026 - RNA, 21 nt, RNAi
cucauugaugaacuuucaguu

SEQ ID NO: 12027 - RNA, 21 nt, RNAi
uugaguaacuacuugaaaguc

SEQ ID NO: 12028 - DNA, 21 bp, homo sapiens
aaagagaaaccatctaagcca

SEQ ID NO: 12029 - RNA, 21 nt, RNAi
agagaaaccaucuaagccauu

SEQ ID NO: 12030 - RNA, 21 nt, RNAi
uuucucuuugguagauucggu

SEQ ID NO: 12031 - DNA, 21 bp, homo sapiens
aagagaaaccatctaagccaa

SEQ ID NO: 12032 - RNA, 21 nt, RNAi
gagaaaccaucuaagccaauu

SEQ ID NO: 12033 - RNA, 21 nt, RNAi
uucucuuugguagauucgguu

SEQ ID NO: 12034 - DNA, 21 bp, homo sapiens
aaaccatctaagccaactgaa

SEQ ID NO: 12035 - RNA, 21 nt, RNAi
accaucuaagccaacugaauu

SEQ ID NO: 12036 - RNA, 21 nt, RNAi
uuugguagauucgguugacuu

SEQ ID NO: 12037 - DNA, 21 bp, homo sapiens
aaccatctaagccaactgaaa

SEQ ID NO: 12038 - RNA, 21 nt, RNAi
ccaucuaagccaacugaaauu

SEQ ID NO: 12039 - RNA, 21 nt, RNAi
uugguagauucgguugacuuu

SEQ ID NO: 12040 - DNA, 21 bp, homo sapiens
aaagacagaagaatctaaggc

SEQ ID NO: 12041 - RNA, 21 nt, RNAi
agacagaagaaucuaaggcuu

SEQ ID NO: 12042 - RNA, 21 nt, RNAi
uuucugucuucuuagauuccg

SEQ ID NO: 12043 - DNA, 21 bp, homo sapiens
aagacagaagaatctaaggcc

SEQ ID NO: 12044 - RNA, 21 nt, RNAi
gacagaagaaucuaaggccuu

SEQ ID NO: 12045 - RNA, 21 nt, RNAi
uucugucuucuuagauuccgg

SEQ ID NO: 12046 - DNA, 21 bp, homo sapiens
aagaatctaaggccgctgctc

SEQ ID NO: 12047 - RNA, 21 nt, RNAi
gaaucuaaggccgcugcucuu

SEQ ID NO: 12048 - RNA, 21 nt, RNAi
uucuuagauuccggcgacgag

SEQ ID NO: 12049 - DNA, 21 bp, homo sapiens
aatctaaggccgctgctccag

SEQ ID NO: 12050 - RNA, 21 nt, RNAi
ucuaaggccgcugcuccaguu

SEQ ID NO: 12051 - RNA, 21 nt, RNAi
uuagauuccggcgacgagguc

SEQ ID NO: 12052 - DNA, 21 bp, homo sapiens
aagccttggctgatagcctgg

SEQ ID NO: 12053 - RNA, 21 nt, RNAi
gccuuggcugauagccugguu

SEQ ID NO: 12054 - RNA, 21 nt, RNAi
uucggaaccgacuaucggacc

SEQ ID NO: 12055 - DNA, 21 bp, homo sapiens
aaaggaagcagatccagaaga

SEQ ID NO: 12056 - RNA, 21 nt, RNAi
aggaagcagauccagaagauu

SEQ ID NO: 12057 - RNA, 21 nt, RNAi
uuuccuucgucuaggucuucu

SEQ ID NO: 12058 - DNA, 21 bp, homo sapiens
aaggaagcagatccagaagat

SEQ ID NO: 12059 - RNA, 21 nt, RNAi
ggaagcagauccagaagauuu

SEQ ID NO: 12060 - RNA, 21 nt, RNAi
uuccuucgucuaggucuucua

SEQ ID NO: 12061 - DNA, 21 bp, homo sapiens
aagcagatccagaagatggaa

SEQ ID NO: 12062 - RNA, 21 nt, RNAi
gcagauccagaagauggaauu

SEQ ID NO: 12063 - RNA, 21 nt, RNAi
uucgucuaggucuucuaccuu

SEQ ID NO: 12064 - DNA, 21 bp, homo sapiens
aaacctgtgatggataaagtc

SEQ ID NO: 12065 - RNA, 21 nt, RNAi
accugugauggauaaagucuu

SEQ ID NO: 12066 - RNA, 21 nt, RNAi
uuuggacacuaccuauuucag

SEQ ID NO: 12067 - DNA, 21 bp, homo sapiens
aacctgtgatggataaagtca

SEQ ID NO: 12068 - RNA, 21 nt, RNAi
ccugugauggauaaagucauu

SEQ ID NO: 12069 - RNA, 21 nt, RNAi
uuggacacuaccuauuucagu

SEQ ID NO: 12070 - DNA, 21 bp, homo sapiens
aaagtcaaggagaaggccaaa

SEQ ID NO: 12071 - RNA, 21 nt, RNAi
agucaaggagaaggccaaauu

SEQ ID NO: 12072 - RNA, 21 nt, RNAi
uuucaguuccucuuccgguuu

SEQ ID NO: 12073 - DNA, 21 bp, homo sapiens
aagtcaaggagaaggccaaag

SEQ ID NO: 12074 - RNA, 21 nt, RNAi
gucaaggagaaggccaaaguu

SEQ ID NO: 12075 - RNA, 21 nt, RNAi
uucaguuccucuuccgguuuc

SEQ ID NO: 12076 - DNA, 21 bp, homo sapiens
aaggagaaggccaaagaagaa

SEQ ID NO: 12077 - RNA, 21 nt, RNAi
ggagaaggccaaagaagaauu

SEQ ID NO: 12078 - RNA, 21 nt, RNAi
uuccucuuccgguuucuucuu

SEQ ID NO: 12079 - DNA, 21 bp, homo sapiens
aaggccaaagaagaagaccgt

SEQ ID NO: 12080 - RNA, 21 nt, RNAi
ggccaaagaagaagaccguuu

SEQ ID NO: 12081 - RNA, 21 nt, RNAi
uuccgguuucuucuucuggca

SEQ ID NO: 12082 - DNA, 21 bp, homo sapiens
aaagaagaaacaattcctcct

SEQ ID NO: 12083 - RNA, 21 nt, RNAi
agaagaaacaauuccuccuuu

SEQ ID NO: 12084 - RNA, 21 nt, RNAi
uuucuucuuuguuaaggagga

SEQ ID NO: 12085 - DNA, 21 bp, homo sapiens
aagaagaaacaattcctcctg

SEQ ID NO: 12086 - RNA, 21 nt, RNAi
gaagaaacaauuccuccuguu

SEQ ID NO: 12087 - RNA, 21 nt, RNAi
uucuucuuuguuaaggaggac

SEQ ID NO: 12088 - DNA, 21 bp, homo sapiens
aagaaacaattcctcctgatt

SEQ ID NO: 12089 - RNA, 21 nt, RNAi
gaaacaauuccuccugauuuu

SEQ ID NO: 12090 - RNA, 21 nt, RNAi
uucuuuguuaaggaggacuaa

SEQ ID NO: 12091 - DNA, 21 bp, homo sapiens
aacaattcctcctgattatag

SEQ ID NO: 12092 - RNA, 21 nt, RNAi
caauuccuccugauuauaguu

SEQ ID NO: 12093 - RNA, 21 nt, RNAi
uuguuaaggaggacuaauauc

SEQ ID NO: 12094 - DNA, 21 bp, homo sapiens
aagaggtcaaggataaagatg

SEQ ID NO: 12095 - RNA, 21 nt, RNAi
gaggucaaggauaaagauguu

SEQ ID NO: 12096 - RNA, 21 nt, RNAi
uucuccaguuccuauuucuac

SEQ ID NO: 12097 - DNA, 21 bp, homo sapiens
aaggataaagatggaaagcca

SEQ ID NO: 12098 - RNA, 21 nt, RNAi
ggauaaagauggaaagccauu

SEQ ID NO: 12099 - RNA, 21 nt, RNAi
uuccuauuucuaccuuucggu

SEQ ID NO: 12100 - DNA, 21 bp, homo sapiens
aaagatggaaagccactcctg

SEQ ID NO: 12101 - RNA, 21 nt, RNAi
agauggaaagccacuccuguu

SEQ ID NO: 12102 - RNA, 21 nt, RNAi
uuucuaccuuucggugaggac

SEQ ID NO: 12103 - DNA, 21 bp, homo sapiens
aagatggaaagccactcctgc

SEQ ID NO: 12104 - RNA, 21 nt, RNAi
gauggaaagccacuccugcuu

SEQ ID NO: 12105 - RNA, 21 nt, RNAi
uucuaccuuucggugaggacg

SEQ ID NO: 12106 - DNA, 21 bp, homo sapiens
aaagagtctaaggaacagctt

SEQ ID NO: 12107 - RNA, 21 nt, RNAi
agagucuaaggaacagcuuuu

SEQ ID NO: 12108 - RNA, 21 nt, RNAi
uuucucagauuccuugucgaa

SEQ ID NO: 12109 - DNA, 21 bp, homo sapiens
aagagtctaaggaacagcttc

SEQ ID NO: 12110 - RNA, 21 nt, RNAi
gagucuaaggaacagcuucuu

SEQ ID NO: 12111 - RNA, 21 nt, RNAi
uucucagauuccuugucgaag

SEQ ID NO: 12112 - DNA, 21 bp, homo sapiens
aagacttccttctggatgctt

SEQ ID NO: 12113 - RNA, 21 nt, RNAi
gacuuccuucuggaugcuuuu

SEQ ID NO: 12114 - RNA, 21 nt, RNAi
uucugaaggaagaccuacgaa

SEQ ID NO: 12115 - DNA, 21 bp, homo sapiens
aagatgctaaacttgctgctg

SEQ ID NO: 12116 - RNA, 21 nt, RNAi
gaugcuaaacuugcugcuguu

SEQ ID NO: 12117 - RNA, 21 nt, RNAi
uucuacgauuugaacgacgac

SEQ ID NO: 12118 - DNA, 21 bp, homo sapiens
aaacttgctgctgccatctct

SEQ ID NO: 12119 - RNA, 21 nt, RNAi
acuugcugcugccaucucuuu

SEQ ID NO: 12120 - RNA, 21 nt, RNAi
uuugaacgacgacgguagaga

SEQ ID NO: 12121 - DNA, 21 bp, homo sapiens
aacttgctgctgccatctctg

SEQ ID NO: 12122 - RNA, 21 nt, RNAi
cuugcugcugccaucucuguu

SEQ ID NO: 12123 - RNA, 21 nt, RNAi
uugaacgacgacgguagagac

SEQ ID NO: 12124 - DNA, 21 bp, homo sapiens
aaagacctcgatgatgccttg

SEQ ID NO: 12125 - RNA, 21 nt, RNAi
agaccucgaugaugccuuguu

SEQ ID NO: 12126 - RNA, 21 nt, RNAi
uuucuggagcuacuacggaac

SEQ ID NO: 12127 - DNA, 21 bp, homo sapiens
aagacctcgatgatgccttgg

SEQ ID NO: 12128 - RNA, 21 nt, RNAi
gaccucgaugaugccuugguu

SEQ ID NO: 12129 - RNA, 21 nt, RNAi
uucuggagcuacuacggaacc

SEQ ID NO: 12130 - DNA, 21 bp, homo sapiens
aaactctctgacagtctagga

SEQ ID NO: 12131 - RNA, 21 nt, RNAi
acucucugacagucuaggauu

SEQ ID NO: 12132 - RNA, 21 nt, RNAi
uuugagagacugucagauccu

SEQ ID NO: 12133 - DNA, 21 bp, homo sapiens
aactctctgacagtctaggac

SEQ ID NO: 12134 - RNA, 21 nt, RNAi
cucucugacagucuaggacuu

SEQ ID NO: 12135 - RNA, 21 nt, RNAi
uugagagacugucagauccug

SEQ ID NO: 12136 - DNA, 21 bp, homo sapiens
aaagctaaagctgaacataga

SEQ ID NO: 12137 - RNA, 21 nt, RNAi
agcuaaagcugaacauagauu

SEQ ID NO: 12138 - RNA, 21 nt, RNAi
uuucgauuucgacuuguaucu

SEQ ID NO: 12139 - DNA, 21 bp, homo sapiens
aagctaaagctgaacatagag

SEQ ID NO: 12140 - RNA, 21 nt, RNAi
gcuaaagcugaacauagaguu

SEQ ID NO: 12141 - RNA, 21 nt, RNAi
uucgauuucgacuuguaucuc

SEQ ID NO: 12142 - DNA, 21 bp, homo sapiens
aaagctgaacatagagacaag

SEQ ID NO: 12143 - RNA, 21 nt, RNAi
agcugaacauagagacaaguu

SEQ ID NO: 12144 - RNA, 21 nt, RNAi
uuucgacuuguaucucuguuc

SEQ ID NO: 12145 - DNA, 21 bp, homo sapiens
aagctgaacatagagacaagc

SEQ ID NO: 12146 - RNA, 21 nt, RNAi
gcugaacauagagacaagcuu

SEQ ID NO: 12147 - RNA, 21 nt, RNAi
uucgacuuguaucucuguucg

SEQ ID NO: 12148 - DNA, 21 bp, homo sapiens
aacatagagacaagcttggag

SEQ ID NO: 12149 - RNA, 21 nt, RNAi
cauagagacaagcuuggaguu

SEQ ID NO: 12150 - RNA, 21 nt, RNAi
uuguaucucuguucgaaccuc

SEQ ID NO: 12151 - DNA, 21 bp, homo sapiens
aagcttggagaaagagatgac

SEQ ID NO: 12152 - RNA, 21 nt, RNAi
gcuuggagaaagagaugacuu

SEQ ID NO: 12153 - RNA, 21 nt, RNAi
uucgaaccucuuucucuacug

SEQ ID NO: 12154 - DNA, 21 bp, homo sapiens
aatacagacatctcctggatg

SEQ ID NO: 12155 - RNA, 21 nt, RNAi
uacagacaucuccuggauguu

SEQ ID NO: 12156 - RNA, 21 nt, RNAi
uuaugucuguagaggaccuac

SEQ ID NO: 12157 - DNA, 21 bp, homo sapiens
aatggacaggacaaaccagtg

SEQ ID NO: 12158 - RNA, 21 nt, RNAi
uggacaggacaaaccaguguu

SEQ ID NO: 12159 - RNA, 21 nt, RNAi
uuaccuguccuguuuggucac

SEQ ID NO: 12160 - DNA, 21 bp, homo sapiens
aaaccagtgaagccacctaca

SEQ ID NO: 12161 - RNA, 21 nt, RNAi
accagugaagccaccuacauu

SEQ ID NO: 12162 - RNA, 21 nt, RNAi
uuuggucacuucgguggaugu

SEQ ID NO: 12163 - DNA, 21 bp, homo sapiens
aaccagtgaagccacctacaa

SEQ ID NO: 12164 - RNA, 21 nt, RNAi
ccagugaagccaccuacaauu

SEQ ID NO: 12165 - RNA, 21 nt, RNAi
uuggucacuucgguggauguu

SEQ ID NO: 12166 - DNA, 21 bp, homo sapiens
aagccacctacaaagaaatca

SEQ ID NO: 12167 - RNA, 21 nt, RNAi
gccaccuacaaagaaaucauu

SEQ ID NO: 12168 - RNA, 21 nt, RNAi
uucgguggauguuucuuuagu

SEQ ID NO: 12169 - DNA, 21 bp, homo sapiens
aagaaatcagaggattcaaag

SEQ ID NO: 12170 - RNA, 21 nt, RNAi
gaaaucagaggauucaaaguu

SEQ ID NO: 12171 - RNA, 21 nt, RNAi
uucuuuagucuccuaaguuuc

SEQ ID NO: 12172 - DNA, 21 bp, homo sapiens
aatcagaggattcaaagaaac

SEQ ID NO: 12173 - RNA, 21 nt, RNAi
ucagaggauucaaagaaacuu

SEQ ID NO: 12174 - RNA, 21 nt, RNAi
uuagucuccuaaguuucuuug

SEQ ID NO: 12175 - DNA, 21 bp, homo sapiens
aaagaaacctgcagatgacca

SEQ ID NO: 12176 - RNA, 21 nt, RNAi
agaaaccugcagaugaccauu

SEQ ID NO: 12177 - RNA, 21 nt, RNAi
uuucuuuggacgucuacuggu

SEQ ID NO: 12178 - DNA, 21 bp, homo sapiens
aagaaacctgcagatgaccaa

SEQ ID NO: 12179 - RNA, 21 nt, RNAi
gaaaccugcagaugaccaauu

SEQ ID NO: 12180 - RNA, 21 nt, RNAi
uucuuuggacgucuacugguu

SEQ ID NO: 12181 - DNA, 21 bp, homo sapiens
aaacctgcagatgaccaagac

SEQ ID NO: 12182 - RNA, 21 nt, RNAi
accugcagaugaccaagacuu

SEQ ID NO: 12183 - RNA, 21 nt, RNAi
uuuggacgucuacugguucug

SEQ ID NO: 12184 - DNA, 21 bp, homo sapiens
aacctgcagatgaccaagacc

SEQ ID NO: 12185 - RNA, 21 nt, RNAi
ccugcagaugaccaagaccuu

SEQ ID NO: 12186 - RNA, 21 nt, RNAi
uuggacgucuacugguucugg

SEQ ID NO: 12187 - DNA, 21 bp, homo sapiens
aaacctcacagaacacagcaa

SEQ ID NO: 12188 - RNA, 21 nt, RNAi
accucacagaacacagcaauu

SEQ ID NO: 12189 - RNA, 21 nt, RNAi
uuuggagugucuugugucguu

SEQ ID NO: 12190 - DNA, 21 bp, homo sapiens
aacctcacagaacacagcaaa

SEQ ID NO: 12191 - RNA, 21 nt, RNAi
ccucacagaacacagcaaauu

SEQ ID NO: 12192 - RNA, 21 nt, RNAi
uuggagugucuugugucguuu

SEQ ID NO: 12193 - DNA, 21 bp, homo sapiens
aacacagcaaaggataagtgc

SEQ ID NO: 12194 - RNA, 21 nt, RNAi
cacagcaaaggauaagugcuu

SEQ ID NO: 12195 - RNA, 21 nt, RNAi
uugugucguuuccuauucacg

SEQ ID NO: 12196 - DNA, 21 bp, homo sapiens
aaaggataagtgcaagaaggc

SEQ ID NO: 12197 - RNA, 21 nt, RNAi
aggauaagugcaagaaggcuu

SEQ ID NO: 12198 - RNA, 21 nt, RNAi
uuuccuauucacguucuuccg

SEQ ID NO: 12199 - DNA, 21 bp, homo sapiens
aaggataagtgcaagaaggct

SEQ ID NO: 12200 - RNA, 21 nt, RNAi
ggauaagugcaagaaggcuuu

SEQ ID NO: 12201 - RNA, 21 nt, RNAi
uuccuauucacguucuuccga

SEQ ID NO: 12202 - DNA, 21 bp, homo sapiens
aagtgcaagaaggctgcttcc

SEQ ID NO: 12203 - RNA, 21 nt, RNAi
gugcaagaaggcugcuuccuu

SEQ ID NO: 12204 - RNA, 21 nt, RNAi
uucacguucuuccgacgaagg

SEQ ID NO: 12205 - DNA, 21 bp, homo sapiens
aagaaggctgcttccagctcc

SEQ ID NO: 12206 - RNA, 21 nt, RNAi
gaaggcugcuuccagcuccuu

SEQ ID NO: 12207 - RNA, 21 nt, RNAi
uucuuccgacgaaggucgagg

SEQ ID NO: 12208 - DNA, 21 bp, homo sapiens
aaggctgcttccagctccaaa

SEQ ID NO: 12209 - RNA, 21 nt, RNAi
ggcugcuuccagcuccaaauu

SEQ ID NO: 12210 - RNA, 21 nt, RNAi
uuccgacgaaggucgagguuu

SEQ ID NO: 12211 - DNA, 21 bp, homo sapiens
aaagcacctaagaatggaggt

SEQ ID NO: 12212 - RNA, 21 nt, RNAi
agcaccuaagaauggagguuu

SEQ ID NO: 12213 - RNA, 21 nt, RNAi
uuucguggauucuuaccucca

SEQ ID NO: 12214 - DNA, 21 bp, homo sapiens
aagcacctaagaatggaggta

SEQ ID NO: 12215 - RNA, 21 nt, RNAi
gcaccuaagaauggagguauu

SEQ ID NO: 12216 - RNA, 21 nt, RNAi
uucguggauucuuaccuccau

SEQ ID NO: 12217 - DNA, 21 bp, homo sapiens
aagaatggaggtaaagcgaag

SEQ ID NO: 12218 - RNA, 21 nt, RNAi
gaauggagguaaagcgaaguu

SEQ ID NO: 12219 - RNA, 21 nt, RNAi
uucuuaccuccauuucgcuuc

SEQ ID NO: 12220 - DNA, 21 bp, homo sapiens
aatggaggtaaagcgaaggat

SEQ ID NO: 12221 - RNA, 21 nt, RNAi
uggagguaaagcgaaggauuu

SEQ ID NO: 12222 - RNA, 21 nt, RNAi
uuaccuccauuucgcuuccua

SEQ ID NO: 12223 - DNA, 21 bp, homo sapiens
aaagcgaaggattcagcaaag

SEQ ID NO: 12224 - RNA, 21 nt, RNAi
agcgaaggauucagcaaaguu

SEQ ID NO: 12225 - RNA, 21 nt, RNAi
uuucgcuuccuaagucguuuc

SEQ ID NO: 12226 - DNA, 21 bp, homo sapiens
aagcgaaggattcagcaaaga

SEQ ID NO: 12227 - RNA, 21 nt, RNAi
gcgaaggauucagcaaagauu

SEQ ID NO: 12228 - RNA, 21 nt, RNAi
uucgcuuccuaagucguuucu

SEQ ID NO: 12229 - DNA, 21 bp, homo sapiens
aaggattcagcaaagacaaca

SEQ ID NO: 12230 - RNA, 21 nt, RNAi
ggauucagcaaagacaacauu

SEQ ID NO: 12231 - RNA, 21 nt, RNAi
uuccuaagucguuucuguugu

SEQ ID NO: 12232 - DNA, 21 bp, homo sapiens
aaagacaacagaggaaacttc

SEQ ID NO: 12233 - RNA, 21 nt, RNAi
agacaacagaggaaacuucuu

SEQ ID NO: 12234 - RNA, 21 nt, RNAi
uuucuguugucuccuuugaag

SEQ ID NO: 12235 - DNA, 21 bp, homo sapiens
aagacaacagaggaaacttcc

SEQ ID NO: 12236 - RNA, 21 nt, RNAi
gacaacagaggaaacuuccuu

SEQ ID NO: 12237 - RNA, 21 nt, RNAi
uucuguugucuccuuugaagg

SEQ ID NO: 12238 - DNA, 21 bp, homo sapiens
aacagaggaaacttccaagcc

SEQ ID NO: 12239 - RNA, 21 nt, RNAi
cagaggaaacuuccaagccuu

SEQ ID NO: 12240 - RNA, 21 nt, RNAi
uugucuccuuugaagguucgg

SEQ ID NO: 12241 - DNA, 21 bp, homo sapiens
aatacaagttaaggtatctgg

SEQ ID NO: 12242 - RNA, 21 nt, RNAi
uacaaguuaagguaucugguu

SEQ ID NO: 12243 - RNA, 21 nt, RNAi
uuauguucaauuccauagacc

SEQ ID NO: 12244 - DNA, 21 bp, homo sapiens
aagttaaggtatctggtatct

SEQ ID NO: 12245 - RNA, 21 nt, RNAi
guuaagguaucugguaucuuu

SEQ ID NO: 12246 - RNA, 21 nt, RNAi
uucaauuccauagaccauaga

SEQ ID NO: 12247 - DNA, 21 bp, homo sapiens
aaggtatctggtatctgcatg

SEQ ID NO: 12248 - RNA, 21 nt, RNAi
gguaucugguaucugcauguu

SEQ ID NO: 12249 - RNA, 21 nt, RNAi
uuccauagaccauagacguac

SEQ ID NO: 12250 - DNA, 21 bp, homo sapiens
aaatcttcagctggtggatgg

SEQ ID NO: 12251 - RNA, 21 nt, RNAi
aucuucagcugguggaugguu

SEQ ID NO: 12252 - RNA, 21 nt, RNAi
uuuagaagucgaccaccuacc

SEQ ID NO: 12253 - DNA, 21 bp, homo sapiens
aatcttcagctggtggatggt

SEQ ID NO: 12254 - RNA, 21 nt, RNAi
ucuucagcugguggaugguuu

SEQ ID NO: 12255 - RNA, 21 nt, RNAi
uuagaagucgaccaccuacca

SEQ ID NO: 12256 - DNA, 21 bp, homo sapiens
aaatgaatttgactggttcgg

SEQ ID NO: 12257 - RNA, 21 nt, RNAi
augaauuugacugguucgguu

SEQ ID NO: 12258 - RNA, 21 nt, RNAi
uuuacuuaaacugaccaagcc

SEQ ID NO: 12259 - DNA, 21 bp, homo sapiens
aatgaatttgactggttcgga

SEQ ID NO: 12260 - RNA, 21 nt, RNAi
ugaauuugacugguucggauu

SEQ ID NO: 12261 - RNA, 21 nt, RNAi
uuacuuaaacugaccaagccu

SEQ ID NO: 12262 - DNA, 21 bp, homo sapiens
caagcctcggcagcagtcaat

SEQ ID NO: 12263 - RNA, 21 nt, RNAi
agccucggcagcagucaauuu

SEQ ID NO: 12264 - RNA, 21 nt, RNAi
uuucggagccgucgucaguua

SEQ ID NO: 12265 - DNA, 21 bp, homo sapiens
cagcagtcaatcctccagaac

SEQ ID NO: 12266 - RNA, 21 nt, RNAi
gcagucaauccuccagaacuu

SEQ ID NO: 12267 - RNA, 21 nt, RNAi
uucgucaguuaggaggucuug

SEQ ID NO: 12268 - DNA, 21 bp, homo sapiens
cagtcaatcctccagaaccta

SEQ ID NO: 12269 - RNA, 21 nt, RNAi
gucaauccuccagaaccuauu

SEQ ID NO: 12270 - RNA, 21 nt, RNAi
uucaguuaggaggucuuggau

SEQ ID NO: 12271 - DNA, 21 bp, homo sapiens
caatcctccagaacctatgct

SEQ ID NO: 12272 - RNA, 21 nt, RNAi
auccuccagaaccuaugcuuu

SEQ ID NO: 12273 - RNA, 21 nt, RNAi
uuuaggaggucuuggauacga

SEQ ID NO: 12274 - DNA, 21 bp, homo sapiens
cagaacctatgctggtggaac

SEQ ID NO: 12275 - RNA, 21 nt, RNAi
gaaccuaugcugguggaacuu

SEQ ID NO: 12276 - RNA, 21 nt, RNAi
uucuuggauacgaccaccuug

SEQ ID NO: 12277 - DNA, 21 bp, homo sapiens
caccaaggtgtcagcttcctc

SEQ ID NO: 12278 - RNA, 21 nt, RNAi
ccaaggugucagcuuccucuu

SEQ ID NO: 12279 - RNA, 21 nt, RNAi
uugguuccacagucgaaggag

SEQ ID NO: 12280 - DNA, 21 bp, homo sapiens
caaggtgtcagcttcctctgg

SEQ ID NO: 12281 - RNA, 21 nt, RNAi
aggugucagcuuccucugguu

SEQ ID NO: 12282 - RNA, 21 nt, RNAi
uuuccacagucgaaggagacc

SEQ ID NO: 12283 - DNA, 21 bp, homo sapiens
cagcttcctctggtgcaacca

SEQ ID NO: 12284 - RNA, 21 nt, RNAi
gcuuccucuggugcaaccauu

SEQ ID NO: 12285 - RNA, 21 nt, RNAi
uucgaaggagaccacguuggu

SEQ ID NO: 12286 - DNA, 21 bp, homo sapiens
caaccagcaagtcttccagta

SEQ ID NO: 12287 - RNA, 21 nt, RNAi
accagcaagucuuccaguauu

SEQ ID NO: 12288 - RNA, 21 nt, RNAi
uuuggucguucagaaggucau

SEQ ID NO: 12289 - DNA, 21 bp, homo sapiens
cagcaagtcttccagtatgaa

SEQ ID NO: 12290 - RNA, 21 nt, RNAi
gcaagucuuccaguaugaauu

SEQ ID NO: 12291 - RNA, 21 nt, RNAi
uucguucagaaggucauacuu

SEQ ID NO: 12292 - DNA, 21 bp, homo sapiens
caagtcttccagtatgaatcc

SEQ ID NO: 12293 - RNA, 21 nt, RNAi
agucuuccaguaugaauccuu

SEQ ID NO: 12294 - RNA, 21 nt, RNAi
uuucagaaggucauacuuagg

SEQ ID NO: 12295 - DNA, 21 bp, homo sapiens
cacagaaaccaaggccattcc

SEQ ID NO: 12296 - RNA, 21 nt, RNAi
cagaaaccaaggccauuccuu

SEQ ID NO: 12297 - RNA, 21 nt, RNAi
uugucuuugguuccgguaagg

SEQ ID NO: 12298 - DNA, 21 bp, homo sapiens
cagaaaccaaggccattccag

SEQ ID NO: 12299 - RNA, 21 nt, RNAi
gaaaccaaggccauuccaguu

SEQ ID NO: 12300 - RNA, 21 nt, RNAi
uucuuugguuccgguaagguc

SEQ ID NO: 12301 - DNA, 21 bp, homo sapiens
caaggccattccagtcagcca

SEQ ID NO: 12302 - RNA, 21 nt, RNAi
aggccauuccagucagccauu

SEQ ID NO: 12303 - RNA, 21 nt, RNAi
uuuccgguaaggucagucggu

SEQ ID NO: 12304 - DNA, 21 bp, homo sapiens
cattccagtcagccaacagat

SEQ ID NO: 12305 - RNA, 21 nt, RNAi
uuccagucagccaacagauuu

SEQ ID NO: 12306 - RNA, 21 nt, RNAi
uuaaggucagucgguugucua

SEQ ID NO: 12307 - DNA, 21 bp, homo sapiens
cagtcagccaacagatggaag

SEQ ID NO: 12308 - RNA, 21 nt, RNAi
gucagccaacagauggaaguu

SEQ ID NO: 12309 - RNA, 21 nt, RNAi
uucagucgguugucuaccuuc

SEQ ID NO: 12310 - DNA, 21 bp, homo sapiens
cagccaacagatggaaggacc

SEQ ID NO: 12311 - RNA, 21 nt, RNAi
gccaacagauggaaggaccuu

SEQ ID NO: 12312 - RNA, 21 nt, RNAi
uucgguugucuaccuuccugg

SEQ ID NO: 12313 - DNA, 21 bp, homo sapiens
caacagatggaaggaccacat

SEQ ID NO: 12314 - RNA, 21 nt, RNAi
acagauggaaggaccacauuu

SEQ ID NO: 12315 - RNA, 21 nt, RNAi
uuugucuaccuuccuggugua

SEQ ID NO: 12316 - DNA, 21 bp, homo sapiens
cagatggaaggaccacatctt

SEQ ID NO: 12317 - RNA, 21 nt, RNAi
gauggaaggaccacaucuuuu

SEQ ID NO: 12318 - RNA, 21 nt, RNAi
uucuaccuuccugguguagaa

SEQ ID NO: 12319 - DNA, 21 bp, homo sapiens
cagaacctgagaagaagtcac

SEQ ID NO: 12320 - RNA, 21 nt, RNAi
gaaccugagaagaagucacuu

SEQ ID NO: 12321 - RNA, 21 nt, RNAi
uucuuggacucuucuucagug

SEQ ID NO: 12322 - DNA, 21 bp, homo sapiens
cacagtcaaccaagctgtctg

SEQ ID NO: 12323 - RNA, 21 nt, RNAi
cagucaaccaagcugucuguu

SEQ ID NO: 12324 - RNA, 21 nt, RNAi
uugucaguugguucgacagac

SEQ ID NO: 12325 - DNA, 21 bp, homo sapiens
cagtcaaccaagctgtctgtg

SEQ ID NO: 12326 - RNA, 21 nt, RNAi
gucaaccaagcugucuguguu

SEQ ID NO: 12327 - RNA, 21 nt, RNAi
uucaguugguucgacagacac

SEQ ID NO: 12328 - DNA, 21 bp, homo sapiens
caaccaagctgtctgtggttc

SEQ ID NO: 12329 - RNA, 21 nt, RNAi
accaagcugucugugguucuu

SEQ ID NO: 12330 - RNA, 21 nt, RNAi
uuugguucgacagacaccaag

SEQ ID NO: 12331 - DNA, 21 bp, homo sapiens
caagctgtctgtggttcatga

SEQ ID NO: 12332 - RNA, 21 nt, RNAi
agcugucugugguucaugauu

SEQ ID NO: 12333 - RNA, 21 nt, RNAi
uuucgacagacaccaaguacu

SEQ ID NO: 12334 - DNA, 21 bp, homo sapiens
caagcaggcatcagatacagg

SEQ ID NO: 12335 - RNA, 21 nt, RNAi
agcaggcaucagauacagguu

SEQ ID NO: 12336 - RNA, 21 nt, RNAi
uuucguccguagucuaugucc

SEQ ID NO: 12337 - DNA, 21 bp, homo sapiens
caggcatcagatacaggaagt

SEQ ID NO: 12338 - RNA, 21 nt, RNAi
ggcaucagauacaggaaguuu

SEQ ID NO: 12339 - RNA, 21 nt, RNAi
uuccguagucuauguccuuca

SEQ ID NO: 12340 - DNA, 21 bp, homo sapiens
catcagatacaggaagtaacg

SEQ ID NO: 12341 - RNA, 21 nt, RNAi
ucagauacaggaaguaacguu

SEQ ID NO: 12342 - RNA, 21 nt, RNAi
uuagucuauguccuucauugc

SEQ ID NO: 12343 - DNA, 21 bp, homo sapiens
cagatacaggaagtaacgatg

SEQ ID NO: 12344 - RNA, 21 nt, RNAi
gauacaggaaguaacgauguu

SEQ ID NO: 12345 - RNA, 21 nt, RNAi
uucuauguccuucauugcuac

SEQ ID NO: 12346 - DNA, 21 bp, homo sapiens
caggaagtaacgatgctcaca

SEQ ID NO: 12347 - RNA, 21 nt, RNAi
ggaaguaacgaugcucacauu

SEQ ID NO: 12348 - RNA, 21 nt, RNAi
uuccuucauugcuacgagugu

SEQ ID NO: 12349 - DNA, 21 bp, homo sapiens
cagtttccagatcagctgaac

SEQ ID NO: 12350 - RNA, 21 nt, RNAi
guuuccagaucagcugaacuu

SEQ ID NO: 12351 - RNA, 21 nt, RNAi
uucaaaggucuagucgacuug

SEQ ID NO: 12352 - DNA, 21 bp, homo sapiens
cagatcagctgaacagcagcc

SEQ ID NO: 12353 - RNA, 21 nt, RNAi
gaucagcugaacagcagccuu

SEQ ID NO: 12354 - RNA, 21 nt, RNAi
uucuagucgacuugucgucgg

SEQ ID NO: 12355 - DNA, 21 bp, homo sapiens
cagctgaacagcagccatcag

SEQ ID NO: 12356 - RNA, 21 nt, RNAi
gcugaacagcagccaucaguu

SEQ ID NO: 12357 - RNA, 21 nt, RNAi
uucgacuugucgucgguaguc

SEQ ID NO: 12358 - DNA, 21 bp, homo sapiens
cagcagccatcagagaaatca

SEQ ID NO: 12359 - RNA, 21 nt, RNAi
gcagccaucagagaaaucauu

SEQ ID NO: 12360 - RNA, 21 nt, RNAi
uucgucgguagucucuuuagu

SEQ ID NO: 12361 - DNA, 21 bp, homo sapiens
cagccatcagagaaatcaaca

SEQ ID NO: 12362 - RNA, 21 nt, RNAi
gccaucagagaaaucaacauu

SEQ ID NO: 12363 - RNA, 21 nt, RNAi
uucgguagucucuuuaguugu

SEQ ID NO: 12364 - DNA, 21 bp, homo sapiens
catcagagaaatcaacagaac

SEQ ID NO: 12365 - RNA, 21 nt, RNAi
ucagagaaaucaacagaacuu

SEQ ID NO: 12366 - RNA, 21 nt, RNAi
uuagucucuuuaguugucuug

SEQ ID NO: 12367 - DNA, 21 bp, homo sapiens
cagagaaatcaacagaaccaa

SEQ ID NO: 12368 - RNA, 21 nt, RNAi
gagaaaucaacagaaccaauu

SEQ ID NO: 12369 - RNA, 21 nt, RNAi
uucucuuuaguugucuugguu

SEQ ID NO: 12370 - DNA, 21 bp, homo sapiens
caacagaaccaaagactaaac

SEQ ID NO: 12371 - RNA, 21 nt, RNAi
acagaaccaaagacuaaacuu

SEQ ID NO: 12372 - RNA, 21 nt, RNAi
uuugucuugguuucugauuug

SEQ ID NO: 12373 - DNA, 21 bp, homo sapiens
cagaaccaaagactaaaccac

SEQ ID NO: 12374 - RNA, 21 nt, RNAi
gaaccaaagacuaaaccacuu

SEQ ID NO: 12375 - RNA, 21 nt, RNAi
uucuugguuucugauuuggug

SEQ ID NO: 12376 - DNA, 21 bp, homo sapiens
caaagactaaaccacaagaca

SEQ ID NO: 12377 - RNA, 21 nt, RNAi
aagacuaaaccacaagacauu

SEQ ID NO: 12378 - RNA, 21 nt, RNAi
uuuucugauuugguguucugu

SEQ ID NO: 12379 - DNA, 21 bp, homo sapiens
cacaagacatgatttctgctg

SEQ ID NO: 12380 - RNA, 21 nt, RNAi
caagacaugauuucugcuguu

SEQ ID NO: 12381 - RNA, 21 nt, RNAi
uuguucuguacuaaagacgac

SEQ ID NO: 12382 - DNA, 21 bp, homo sapiens
caagacatgatttctgctggt

SEQ ID NO: 12383 - RNA, 21 nt, RNAi
agacaugauuucugcugguuu

SEQ ID NO: 12384 - RNA, 21 nt, RNAi
uuucuguacuaaagacgacca

SEQ ID NO: 12385 - DNA, 21 bp, homo sapiens
catgatttctgctggtggaga

SEQ ID NO: 12386 - RNA, 21 nt, RNAi
ugauuucugcugguggagauu

SEQ ID NO: 12387 - RNA, 21 nt, RNAi
uuacuaaagacgaccaccucu

SEQ ID NO: 12388 - DNA, 21 bp, homo sapiens
cactgcaatatctggcaagcc

SEQ ID NO: 12389 - RNA, 21 nt, RNAi
cugcaauaucuggcaagccuu

SEQ ID NO: 12390 - RNA, 21 nt, RNAi
uugacguuauagaccguucgg

SEQ ID NO: 12391 - DNA, 21 bp, homo sapiens
cagctgtgccagttgaatcta

SEQ ID NO: 12392 - RNA, 21 nt, RNAi
gcugugccaguugaaucuauu

SEQ ID NO: 12393 - RNA, 21 nt, RNAi
uucgacacggucaacuuagau

SEQ ID NO: 12394 - DNA, 21 bp, homo sapiens
cagttgaatctaaaccggata

SEQ ID NO: 12395 - RNA, 21 nt, RNAi
guugaaucuaaaccggauauu

SEQ ID NO: 12396 - RNA, 21 nt, RNAi
uucaacuuagauuuggccuau

SEQ ID NO: 12397 - DNA, 21 bp, homo sapiens
caggcatggatgctgctttgg

SEQ ID NO: 12398 - RNA, 21 nt, RNAi
ggcauggaugcugcuuugguu

SEQ ID NO: 12399 - RNA, 21 nt, RNAi
uuccguaccuacgacgaaacc

SEQ ID NO: 12400 - DNA, 21 bp, homo sapiens
catggatgctgctttggatga

SEQ ID NO: 12401 - RNA, 21 nt, RNAi
uggaugcugcuuuggaugauu

SEQ ID NO: 12402 - RNA, 21 nt, RNAi
uuaccuacgacgaaaccuacu

SEQ ID NO: 12403 - DNA, 21 bp, homo sapiens
caacgtatactggaccagaag

SEQ ID NO: 12404 - RNA, 21 nt, RNAi
acguauacuggaccagaaguu

SEQ ID NO: 12405 - RNA, 21 nt, RNAi
uuugcauaugaccuggucuuc

SEQ ID NO: 12406 - DNA, 21 bp, homo sapiens
cagaagtttcagatccaatga

SEQ ID NO: 12407 - RNA, 21 nt, RNAi
gaaguuucagauccaaugauu

SEQ ID NO: 12408 - RNA, 21 nt, RNAi
uucuucaaagucuagguuacu

SEQ ID NO: 12409 - DNA, 21 bp, homo sapiens
cagatccaatgagttccacct

SEQ ID NO: 12410 - RNA, 21 nt, RNAi
gauccaaugaguuccaccuuu

SEQ ID NO: 12411 - RNA, 21 nt, RNAi
uucuagguuacucaaggugga

SEQ ID NO: 12412 - DNA, 21 bp, homo sapiens
caatgagttccacctacatag

SEQ ID NO: 12413 - RNA, 21 nt, RNAi
augaguuccaccuacauaguu

SEQ ID NO: 12414 - RNA, 21 nt, RNAi
uuuacucaagguggauguauc

SEQ ID NO: 12415 - DNA, 21 bp, homo sapiens
cagatgatgctatagacgcct

SEQ ID NO: 12416 - RNA, 21 nt, RNAi
gaugaugcuauagacgccuuu

SEQ ID NO: 12417 - RNA, 21 nt, RNAi
uucuacuacgauaucugcgga

SEQ ID NO: 12418 - DNA, 21 bp, homo sapiens
cagtcagaagtgctgctccac

SEQ ID NO: 12419 - RNA, 21 nt, RNAi
gucagaagugcugcuccacuu

SEQ ID NO: 12420 - RNA, 21 nt, RNAi
uucagucuucacgacgaggug

SEQ ID NO: 12421 - DNA, 21 bp, homo sapiens
caatgagtgatcaagcactcg

SEQ ID NO: 12422 - RNA, 21 nt, RNAi
augagugaucaagcacucguu

SEQ ID NO: 12423 - RNA, 21 nt, RNAi
uuuacucacuaguucgugagc

SEQ ID NO: 12424 - DNA, 21 bp, homo sapiens
caagcactcgaggctctgtcg

SEQ ID NO: 12425 - RNA, 21 nt, RNAi
agcacucgaggcucugucguu

SEQ ID NO: 12426 - RNA, 21 nt, RNAi
uuucgugagcuccgagacagc

SEQ ID NO: 12427 - DNA, 21 bp, homo sapiens
cactcgaggctctgtcggctt

SEQ ID NO: 12428 - RNA, 21 nt, RNAi
cucgaggcucugucggcuuuu

SEQ ID NO: 12429 - RNA, 21 nt, RNAi
uugagcuccgagacagccgaa

SEQ ID NO: 12430 - DNA, 21 bp, homo sapiens
caagcagaacctgagctcgac

SEQ ID NO: 12431 - RNA, 21 nt, RNAi
agcagaaccugagcucgacuu

SEQ ID NO: 12432 - RNA, 21 nt, RNAi
uuucgucuuggacucgagcug

SEQ ID NO: 12433 - DNA, 21 bp, homo sapiens
cagaacctgagctcgacctcc

SEQ ID NO: 12434 - RNA, 21 nt, RNAi
gaaccugagcucgaccuccuu

SEQ ID NO: 12435 - RNA, 21 nt, RNAi
uucuuggacucgagcuggagg

SEQ ID NO: 12436 - DNA, 21 bp, homo sapiens
caattaaggaagtcgatgagg

SEQ ID NO: 12437 - RNA, 21 nt, RNAi
auuaaggaagucgaugagguu

SEQ ID NO: 12438 - RNA, 21 nt, RNAi
uuuaauuccuucagcuacucc

SEQ ID NO: 12439 - DNA, 21 bp, homo sapiens
cagccacggataaagatggaa

SEQ ID NO: 12440 - RNA, 21 nt, RNAi
gccacggauaaagauggaauu

SEQ ID NO: 12441 - RNA, 21 nt, RNAi
uucggugccuauuucuaccuu

SEQ ID NO: 12442 - DNA, 21 bp, homo sapiens
cactattgccagagcctgaag

SEQ ID NO: 12443 - RNA, 21 nt, RNAi
cuauugccagagccugaaguu

SEQ ID NO: 12444 - RNA, 21 nt, RNAi
uugauaacggucucggacuuc

SEQ ID NO: 12445 - DNA, 21 bp, homo sapiens
caagcctcggagtgaatcaga

SEQ ID NO: 12446 - RNA, 21 nt, RNAi
agccucggagugaaucagauu

SEQ ID NO: 12447 - RNA, 21 nt, RNAi
uuucggagccucacuuagucu

SEQ ID NO: 12448 - DNA, 21 bp, homo sapiens
cagaactcattgatgaacttt

SEQ ID NO: 12449 - RNA, 21 nt, RNAi
gaacucauugaugaacuuuuu

SEQ ID NO: 12450 - RNA, 21 nt, RNAi
uucuugaguaacuacuugaaa

SEQ ID NO: 12451 - DNA, 21 bp, homo sapiens
cattgatgaactttcagaaga

SEQ ID NO: 12452 - RNA, 21 nt, RNAi
uugaugaacuuucagaagauu

SEQ ID NO: 12453 - RNA, 21 nt, RNAi
uuaacuacuugaaagucuucu

SEQ ID NO: 12454 - DNA, 21 bp, homo sapiens
cagaagaatctaaggccgctg

SEQ ID NO: 12455 - RNA, 21 nt, RNAi
gaagaaucuaaggccgcuguu

SEQ ID NO: 12456 - RNA, 21 nt, RNAi
uucuucuuagauuccggcgac

SEQ ID NO: 12457 - DNA, 21 bp, homo sapiens
catgtgtagtatacagtcagc

SEQ ID NO: 12458 - RNA, 21 nt, RNAi
uguguaguauacagucagcuu

SEQ ID NO: 12459 - RNA, 21 nt, RNAi
uuacacaucauaugucagucg

SEQ ID NO: 12460 - DNA, 21 bp, homo sapiens
cacagtgccagatgatgctgt

SEQ ID NO: 12461 - RNA, 21 nt, RNAi
cagugccagaugaugcuguuu

SEQ ID NO: 12462 - RNA, 21 nt, RNAi
uugucacggucuacuacgaca

SEQ ID NO: 12463 - DNA, 21 bp, homo sapiens
cagtgccagatgatgctgtag

SEQ ID NO: 12464 - RNA, 21 nt, RNAi
gugccagaugaugcuguaguu

SEQ ID NO: 12465 - RNA, 21 nt, RNAi
uucacggucuacuacgacauc

SEQ ID NO: 12466 - DNA, 21 bp, homo sapiens
cagatgatgctgtagaagcct

SEQ ID NO: 12467 - RNA, 21 nt, RNAi
gaugaugcuguagaagccuuu

SEQ ID NO: 12468 - RNA, 21 nt, RNAi
uucuacuacgacaucuucgga

SEQ ID NO: 12469 - DNA, 21 bp, homo sapiens
caaggagaaggccaaagaaga

SEQ ID NO: 12470 - RNA, 21 nt, RNAi
aggagaaggccaaagaagauu

SEQ ID NO: 12471 - RNA, 21 nt, RNAi
uuuccucuuccgguuucuucu

SEQ ID NO: 12472 - DNA, 21 bp, homo sapiens
caattcctcctgattatagat

SEQ ID NO: 12473 - RNA, 21 nt, RNAi
auuccuccugauuauagauuu

SEQ ID NO: 12474 - RNA, 21 nt, RNAi
uuuaaggaggacuaauaucua

SEQ ID NO: 12475 - DNA, 21 bp, homo sapiens
caaggataaagatggaaagcc

SEQ ID NO: 12476 - RNA, 21 nt, RNAi
aggauaaagauggaaagccuu

SEQ ID NO: 12477 - RNA, 21 nt, RNAi
uuuccuauuucuaccuuucgg

SEQ ID NO: 12478 - DNA, 21 bp, homo sapiens
catgagtgaagacttccttct

SEQ ID NO: 12479 - RNA, 21 nt, RNAi
ugagugaagacuuccuucuuu

SEQ ID NO: 12480 - RNA, 21 nt, RNAi
uuacucacuucugaaggaaga

SEQ ID NO: 12481 - DNA, 21 bp, homo sapiens
cagagtgacaaagacctcgat

SEQ ID NO: 12482 - RNA, 21 nt, RNAi
gagugacaaagaccucgauuu

SEQ ID NO: 12483 - RNA, 21 nt, RNAi
uucucacuguuucuggagcua

SEQ ID NO: 12484 - DNA, 21 bp, homo sapiens
caaagacctcgatgatgcctt

SEQ ID NO: 12485 - RNA, 21 nt, RNAi
aagaccucgaugaugccuuuu

SEQ ID NO: 12486 - RNA, 21 nt, RNAi
uuuucuggagcuacuacggaa

SEQ ID NO: 12487 - DNA, 21 bp, homo sapiens
cagtctaggacaaaggcagcc

SEQ ID NO: 12488 - RNA, 21 nt, RNAi
gucuaggacaaaggcagccuu

SEQ ID NO: 12489 - RNA, 21 nt, RNAi
uucagauccuguuuccgucgg

SEQ ID NO: 12490 - DNA, 21 bp, homo sapiens
cagatgagaacaaaccaatgg

SEQ ID NO: 12491 - RNA, 21 nt, RNAi
gaugagaacaaaccaaugguu

SEQ ID NO: 12492 - RNA, 21 nt, RNAi
uucuacucuuguuugguuacc

SEQ ID NO: 12493 - DNA, 21 bp, homo sapiens
catagagacaagcttggagaa

SEQ ID NO: 12494 - RNA, 21 nt, RNAi
uagagacaagcuuggagaauu

SEQ ID NO: 12495 - RNA, 21 nt, RNAi
uuaucucuguucgaaccucuu

SEQ ID NO: 12496 - DNA, 21 bp, homo sapiens
caagcttggagaaagagatga

SEQ ID NO: 12497 - RNA, 21 nt, RNAi
agcuuggagaaagagaugauu

SEQ ID NO: 12498 - RNA, 21 nt, RNAi
uuucgaaccucuuucucuacu

SEQ ID NO: 12499 - DNA, 21 bp, homo sapiens
cacctgaatacagacatctcc

SEQ ID NO: 12500 - RNA, 21 nt, RNAi
ccugaauacagacaucuccuu

SEQ ID NO: 12501 - RNA, 21 nt, RNAi
uuggacuuaugucuguagagg

SEQ ID NO: 12502 - DNA, 21 bp, homo sapiens
cagacatctcctggatgataa

SEQ ID NO: 12503 - RNA, 21 nt, RNAi
gacaucuccuggaugauaauu

SEQ ID NO: 12504 - RNA, 21 nt, RNAi
uucuguagaggaccuacuauu

SEQ ID NO: 12505 - DNA, 21 bp, homo sapiens
catctcctggatgataatgga

SEQ ID NO: 12506 - RNA, 21 nt, RNAi
ucuccuggaugauaauggauu

SEQ ID NO: 12507 - RNA, 21 nt, RNAi
uuagaggaccuacuauuaccu

SEQ ID NO: 12508 - DNA, 21 bp, homo sapiens
caggacaaaccagtgaagcca

SEQ ID NO: 12509 - RNA, 21 nt, RNAi
ggacaaaccagugaagccauu

SEQ ID NO: 12510 - RNA, 21 nt, RNAi
uuccuguuuggucacuucggu

SEQ ID NO: 12511 - DNA, 21 bp, homo sapiens
caaaccagtgaagccacctac

SEQ ID NO: 12512 - RNA, 21 nt, RNAi
aaccagugaagccaccuacuu

SEQ ID NO: 12513 - RNA, 21 nt, RNAi
uuuuggucacuucgguggaug

SEQ ID NO: 12514 - DNA, 21 bp, homo sapiens
cagtgaagccacctacaaaga

SEQ ID NO: 12515 - RNA, 21 nt, RNAi
gugaagccaccuacaaagauu

SEQ ID NO: 12516 - RNA, 21 nt, RNAi
uucacuucgguggauguuucu

SEQ ID NO: 12517 - DNA, 21 bp, homo sapiens
cacctacaaagaaatcagagg

SEQ ID NO: 12518 - RNA, 21 nt, RNAi
ccuacaaagaaaucagagguu

SEQ ID NO: 12519 - RNA, 21 nt, RNAi
uuggauguuucuuuagucucc

SEQ ID NO: 12520 - DNA, 21 bp, homo sapiens
caaagaaatcagaggattcaa

SEQ ID NO: 12521 - RNA, 21 nt, RNAi
aagaaaucagaggauucaauu

SEQ ID NO: 12522 - RNA, 21 nt, RNAi
uuuucuuuagucuccuaaguu

SEQ ID NO: 12523 - DNA, 21 bp, homo sapiens
cagaggattcaaagaaacctg

SEQ ID NO: 12524 - RNA, 21 nt, RNAi
gaggauucaaagaaaccuguu

SEQ ID NO: 12525 - RNA, 21 nt, RNAi
uucuccuaaguuucuuuggac

SEQ ID NO: 12526 - DNA, 21 bp, homo sapiens
caaagaaacctgcagatgacc

SEQ ID NO: 12527 - RNA, 21 nt, RNAi
aagaaaccugcagaugaccuu

SEQ ID NO: 12528 - RNA, 21 nt, RNAi
uuuucuuuggacgucuacugg

SEQ ID NO: 12529 - DNA, 21 bp, homo sapiens
cattgatgctctctcaggaga

SEQ ID NO: 12530 - RNA, 21 nt, RNAi
uugaugcucucucaggagauu

SEQ ID NO: 12531 - RNA, 21 nt, RNAi
uuaacuacgagagaguccucu

SEQ ID NO: 12532 - DNA, 21 bp, homo sapiens
caggagatctggacagctgtc

SEQ ID NO: 12533 - RNA, 21 nt, RNAi
ggagaucuggacagcugucuu

SEQ ID NO: 12534 - RNA, 21 nt, RNAi
uuccucuagaccugucgacag

SEQ ID NO: 12535 - DNA, 21 bp, homo sapiens
cactacagaaacctcacagaa

SEQ ID NO: 12536 - RNA, 21 nt, RNAi
cuacagaaaccucacagaauu

SEQ ID NO: 12537 - RNA, 21 nt, RNAi
uugaugucuuuggagugucuu

SEQ ID NO: 12538 - DNA, 21 bp, homo sapiens
cagaaacctcacagaacacag

SEQ ID NO: 12539 - RNA, 21 nt, RNAi
gaaaccucacagaacacaguu

SEQ ID NO: 12540 - RNA, 21 nt, RNAi
uucuuuggagugucuuguguc

SEQ ID NO: 12541 - DNA, 21 bp, homo sapiens
cacagaacacagcaaaggata

SEQ ID NO: 12542 - RNA, 21 nt, RNAi
cagaacacagcaaaggauauu

SEQ ID NO: 12543 - RNA, 21 nt, RNAi
uugucuugugucguuuccuau

SEQ ID NO: 12544 - DNA, 21 bp, homo sapiens
cagaacacagcaaaggataag

SEQ ID NO: 12545 - RNA, 21 nt, RNAi
gaacacagcaaaggauaaguu

SEQ ID NO: 12546 - RNA, 21 nt, RNAi
uucuugugucguuuccuauuc

SEQ ID NO: 12547 - DNA, 21 bp, homo sapiens
cacagcaaaggataagtgcaa

SEQ ID NO: 12548 - RNA, 21 nt, RNAi
cagcaaaggauaagugcaauu

SEQ ID NO: 12549 - RNA, 21 nt, RNAi
uugucguuuccuauucacguu

SEQ ID NO: 12550 - DNA, 21 bp, homo sapiens
cagcaaaggataagtgcaaga

SEQ ID NO: 12551 - RNA, 21 nt, RNAi
gcaaaggauaagugcaagauu

SEQ ID NO: 12552 - RNA, 21 nt, RNAi
uucguuuccuauucacguucu

SEQ ID NO: 12553 - DNA, 21 bp, homo sapiens
caaaggataagtgcaagaagg

SEQ ID NO: 12554 - RNA, 21 nt, RNAi
aaggauaagugcaagaagguu

SEQ ID NO: 12555 - RNA, 21 nt, RNAi
uuuuccuauucacguucuucc

SEQ ID NO: 12556 - DNA, 21 bp, homo sapiens
caagaaggctgcttccagctc

SEQ ID NO: 12557 - RNA, 21 nt, RNAi
agaaggcugcuuccagcucuu

SEQ ID NO: 12558 - RNA, 21 nt, RNAi
uuucuuccgacgaaggucgag

SEQ ID NO: 12559 - DNA, 21 bp, homo sapiens
cagctccaaagcacctaagaa

SEQ ID NO: 12560 - RNA, 21 nt, RNAi
gcuccaaagcaccuaagaauu

SEQ ID NO: 12561 - RNA, 21 nt, RNAi
uucgagguuucguggauucuu

SEQ ID NO: 12562 - DNA, 21 bp, homo sapiens
caaagcacctaagaatggagg

SEQ ID NO: 12563 - RNA, 21 nt, RNAi
aagcaccuaagaauggagguu

SEQ ID NO: 12564 - RNA, 21 nt, RNAi
uuuucguggauucuuaccucc

SEQ ID NO: 12565 - DNA, 21 bp, homo sapiens
cacctaagaatggaggtaaag

SEQ ID NO: 12566 - RNA, 21 nt, RNAi
ccuaagaauggagguaaaguu

SEQ ID NO: 12567 - RNA, 21 nt, RNAi
uuggauucuuaccuccauuuc

SEQ ID NO: 12568 - DNA, 21 bp, homo sapiens
cagcaaagacaacagaggaaa

SEQ ID NO: 12569 - RNA, 21 nt, RNAi
gcaaagacaacagaggaaauu

SEQ ID NO: 12570 - RNA, 21 nt, RNAi
uucguuucuguugucuccuuu

SEQ ID NO: 12571 - DNA, 21 bp, homo sapiens
caaagacaacagaggaaactt

SEQ ID NO: 12572 - RNA, 21 nt, RNAi
aagacaacagaggaaacuuuu

SEQ ID NO: 12573 - RNA, 21 nt, RNAi
uuuucuguugucuccuuugaa

SEQ ID NO: 12574 - DNA, 21 bp, homo sapiens
caacagaggaaacttccaagc

SEQ ID NO: 12575 - RNA, 21 nt, RNAi
acagaggaaacuuccaagcuu

SEQ ID NO: 12576 - RNA, 21 nt, RNAi
uuugucuccuuugaagguucg

SEQ ID NO: 12577 - DNA, 21 bp, homo sapiens
cagaggaaacttccaagccaa

SEQ ID NO: 12578 - RNA, 21 nt, RNAi
gaggaaacuuccaagccaauu

SEQ ID NO: 12579 - RNA, 21 nt, RNAi
uucuccuuugaagguucgguu

SEQ ID NO: 12580 - DNA, 21 bp, homo sapiens
caagttaaggtatctggtatc

SEQ ID NO: 12581 - RNA, 21 nt, RNAi
aguuaagguaucugguaucuu

SEQ ID NO: 12582 - RNA, 21 nt, RNAi
uuucaauuccauagaccauag

SEQ ID NO: 12583 - DNA, 21 bp, homo sapiens
cagctggtggatggtgacttt

SEQ ID NO: 12584 - RNA, 21 nt, RNAi
gcugguggauggugacuuuuu

SEQ ID NO: 12585 - RNA, 21 nt, RNAi
uucgaccaccuaccacugaaa

SEQ ID NO: 12586 - DNA, 21 bp, homo sapiens
gaacctatgctggtggaacag

SEQ ID NO: 12587 - RNA, 21 nt, RNAi
accuaugcugguggaacaguu

SEQ ID NO: 12588 - RNA, 21 nt, RNAi
uuuggauacgaccaccuuguc

SEQ ID NO: 12589 - DNA, 21 bp, homo sapiens
gaaaccaaggccattccagtc

SEQ ID NO: 12590 - RNA, 21 nt, RNAi
aaccaaggccauuccagucuu

SEQ ID NO: 12591 - RNA, 21 nt, RNAi
uuuugguuccgguaaggucag

SEQ ID NO: 12592 - DNA, 21 bp, homo sapiens
gatggaaggaccacatcttcc

SEQ ID NO: 12593 - RNA, 21 nt, RNAi
uggaaggaccacaucuuccuu

SEQ ID NO: 12594 - RNA, 21 nt, RNAi
uuaccuuccugguguagaagg

SEQ ID NO: 12595 - DNA, 21 bp, homo sapiens
gaaggaccacatcttcctaac

SEQ ID NO: 12596 - RNA, 21 nt, RNAi
aggaccacaucuuccuaacuu

SEQ ID NO: 12597 - RNA, 21 nt, RNAi
uuuccugguguagaaggauug

SEQ ID NO: 12598 - DNA, 21 bp, homo sapiens
gaccacatcttcctaacaaga

SEQ ID NO: 12599 - RNA, 21 nt, RNAi
ccacaucuuccuaacaagauu

SEQ ID NO: 12600 - RNA, 21 nt, RNAi
uugguguagaaggauuguucu

SEQ ID NO: 12601 - DNA, 21 bp, homo sapiens
gaacctgagaagaagtcacag

SEQ ID NO: 12602 - RNA, 21 nt, RNAi
accugagaagaagucacaguu

SEQ ID NO: 12603 - RNA, 21 nt, RNAi
uuuggacucuucuucaguguc

SEQ ID NO: 12604 - DNA, 21 bp, homo sapiens
gagaagaagtcacagtcaacc

SEQ ID NO: 12605 - RNA, 21 nt, RNAi
gaagaagucacagucaaccuu

SEQ ID NO: 12606 - RNA, 21 nt, RNAi
uucuucuucagugucaguugg

SEQ ID NO: 12607 - DNA, 21 bp, homo sapiens
gaagaagtcacagtcaaccaa

SEQ ID NO: 12608 - RNA, 21 nt, RNAi
agaagucacagucaaccaauu

SEQ ID NO: 12609 - RNA, 21 nt, RNAi
uuucuucagugucaguugguu

SEQ ID NO: 12610 - DNA, 21 bp, homo sapiens
gaagtcacagtcaaccaagct

SEQ ID NO: 12611 - RNA, 21 nt, RNAi
agucacagucaaccaagcuuu

SEQ ID NO: 12612 - RNA, 21 nt, RNAi
uuucagugucaguugguucga

SEQ ID NO: 12613 - DNA, 21 bp, homo sapiens
gatacaggaagtaacgatgct

SEQ ID NO: 12614 - RNA, 21 nt, RNAi
uacaggaaguaacgaugcuuu

SEQ ID NO: 12615 - RNA, 21 nt, RNAi
uuauguccuucauugcuacga

SEQ ID NO: 12616 - DNA, 21 bp, homo sapiens
gaagtaacgatgctcacaata

SEQ ID NO: 12617 - RNA, 21 nt, RNAi
aguaacgaugcucacaauauu

SEQ ID NO: 12618 - RNA, 21 nt, RNAi
uuucauugcuacgaguguuau

SEQ ID NO: 12619 - DNA, 21 bp, homo sapiens
gatcagctgaacagcagccat

SEQ ID NO: 12620 - RNA, 21 nt, RNAi
ucagcugaacagcagccauuu

SEQ ID NO: 12621 - RNA, 21 nt, RNAi
uuagucgacuugucgucggua

SEQ ID NO: 12622 - DNA, 21 bp, homo sapiens
gaacagcagccatcagagaaa

SEQ ID NO: 12623 - RNA, 21 nt, RNAi
acagcagccaucagagaaauu

SEQ ID NO: 12624 - RNA, 21 nt, RNAi
uuugucgucgguagucucuuu

SEQ ID NO: 12625 - DNA, 21 bp, homo sapiens
gagaaatcaacagaaccaaag

SEQ ID NO: 12626 - RNA, 21 nt, RNAi
gaaaucaacagaaccaaaguu

SEQ ID NO: 12627 - RNA, 21 nt, RNAi
uucuuuaguugucuugguuuc

SEQ ID NO: 12628 - DNA, 21 bp, homo sapiens
gaaatcaacagaaccaaagac

SEQ ID NO: 12629 - RNA, 21 nt, RNAi
aaucaacagaaccaaagacuu

SEQ ID NO: 12630 - RNA, 21 nt, RNAi
uuuuaguugucuugguuucug

SEQ ID NO: 12631 - DNA, 21 bp, homo sapiens
gaaccaaagactaaaccacaa

SEQ ID NO: 12632 - RNA, 21 nt, RNAi
accaaagacuaaaccacaauu

SEQ ID NO: 12633 - RNA, 21 nt, RNAi
uuugguuucugauuugguguu

SEQ ID NO: 12634 - DNA, 21 bp, homo sapiens
gactaaaccacaagacatgat

SEQ ID NO: 12635 - RNA, 21 nt, RNAi
cuaaaccacaagacaugauuu

SEQ ID NO: 12636 - RNA, 21 nt, RNAi
uugauuugguguucuguacua

SEQ ID NO: 12637 - DNA, 21 bp, homo sapiens
gacatgatttctgctggtgga

SEQ ID NO: 12638 - RNA, 21 nt, RNAi
caugauuucugcugguggauu

SEQ ID NO: 12639 - RNA, 21 nt, RNAi
uuguacuaaagacgaccaccu

SEQ ID NO: 12640 - DNA, 21 bp, homo sapiens
gatttctgctggtggagagag

SEQ ID NO: 12641 - RNA, 21 nt, RNAi
uuucugcugguggagagaguu

SEQ ID NO: 12642 - RNA, 21 nt, RNAi
uuaaagacgaccaccucucuc

SEQ ID NO: 12643 - DNA, 21 bp, homo sapiens
gagagagtgttgctggtatca

SEQ ID NO: 12644 - RNA, 21 nt, RNAi
gagaguguugcugguaucauu

SEQ ID NO: 12645 - RNA, 21 nt, RNAi
uucucucacaacgaccauagu

SEQ ID NO: 12646 - DNA, 21 bp, homo sapiens
gagagtgttgctggtatcact

SEQ ID NO: 12647 - RNA, 21 nt, RNAi
gaguguugcugguaucacuuu

SEQ ID NO: 12648 - RNA, 21 nt, RNAi
uucucacaacgaccauaguga

SEQ ID NO: 12649 - DNA, 21 bp, homo sapiens
gagtgttgctggtatcactgc

SEQ ID NO: 12650 - RNA, 21 nt, RNAi
guguugcugguaucacugcuu

SEQ ID NO: 12651 - RNA, 21 nt, RNAi
uucacaacgaccauagugacg

SEQ ID NO: 12652 - DNA, 21 bp, homo sapiens
gaatctaaaccggataaacca

SEQ ID NO: 12653 - RNA, 21 nt, RNAi
aucuaaaccggauaaaccauu

SEQ ID NO: 12654 - RNA, 21 nt, RNAi
uuuagauuuggccuauuuggu

SEQ ID NO: 12655 - DNA, 21 bp, homo sapiens
gaaagtcaggcatggatgctg

SEQ ID NO: 12656 - RNA, 21 nt, RNAi
aagucaggcauggaugcuguu

SEQ ID NO: 12657 - RNA, 21 nt, RNAi
uuuucaguccguaccuacgac

SEQ ID NO: 12658 - DNA, 21 bp, homo sapiens
gatgctgctttggatgactta

SEQ ID NO: 12659 - RNA, 21 nt, RNAi
ugcugcuuuggaugacuuauu

SEQ ID NO: 12660 - RNA, 21 nt, RNAi
uuacgacgaaaccuacugaau

SEQ ID NO: 12661 - DNA, 21 bp, homo sapiens
gatactttaggaggacctgaa

SEQ ID NO: 12662 - RNA, 21 nt, RNAi
uacuuuaggaggaccugaauu

SEQ ID NO: 12663 - RNA, 21 nt, RNAi
uuaugaaauccuccuggacuu

SEQ ID NO: 12664 - DNA, 21 bp, homo sapiens
gaggacctgaagaaactgaag

SEQ ID NO: 12665 - RNA, 21 nt, RNAi
ggaccugaagaaacugaaguu

SEQ ID NO: 12666 - RNA, 21 nt, RNAi
uuccuggacuucuuugacuuc

SEQ ID NO: 12667 - DNA, 21 bp, homo sapiens
gacctgaagaaactgaagaag

SEQ ID NO: 12668 - RNA, 21 nt, RNAi
ccugaagaaacugaagaaguu

SEQ ID NO: 12669 - RNA, 21 nt, RNAi
uuggacuucuuugacuucuuc

SEQ ID NO: 12670 - DNA, 21 bp, homo sapiens
gaccagaagtttcagatccaa

SEQ ID NO: 12671 - RNA, 21 nt, RNAi
ccagaaguuucagauccaauu

SEQ ID NO: 12672 - RNA, 21 nt, RNAi
uuggucuucaaagucuagguu

SEQ ID NO: 12673 - DNA, 21 bp, homo sapiens
gaagtttcagatccaatgagt

SEQ ID NO: 12674 - RNA, 21 nt, RNAi
aguuucagauccaaugaguuu

SEQ ID NO: 12675 - RNA, 21 nt, RNAi
uuucaaagucuagguuacuca

SEQ ID NO: 12676 - DNA, 21 bp, homo sapiens
gatccaatgagttccacctac

SEQ ID NO: 12677 - RNA, 21 nt, RNAi
uccaaugaguuccaccuacuu

SEQ ID NO: 12678 - RNA, 21 nt, RNAi
uuagguuacucaagguggaug

SEQ ID NO: 12679 - DNA, 21 bp, homo sapiens
gagttccacctacatagagga

SEQ ID NO: 12680 - RNA, 21 nt, RNAi
guuccaccuacauagaggauu

SEQ ID NO: 12681 - RNA, 21 nt, RNAi
uucaagguggauguaucuccu

SEQ ID NO: 12682 - DNA, 21 bp, homo sapiens
gagaagtcacaattcctccaa

SEQ ID NO: 12683 - RNA, 21 nt, RNAi
gaagucacaauuccuccaauu

SEQ ID NO: 12684 - RNA, 21 nt, RNAi
uucuucaguguuaaggagguu

SEQ ID NO: 12685 - DNA, 21 bp, homo sapiens
gatgatgctatagacgccttg

SEQ ID NO: 12686 - RNA, 21 nt, RNAi
ugaugcuauagacgccuuguu

SEQ ID NO: 12687 - RNA, 21 nt, RNAi
uuacuacgauaucugcggaac

SEQ ID NO: 12688 - DNA, 21 bp, homo sapiens
gatgctatagacgccttgtca

SEQ ID NO: 12689 - RNA, 21 nt, RNAi
ugcuauagacgccuugucauu

SEQ ID NO: 12690 - RNA, 21 nt, RNAi
uuacgauaucugcggaacagu

SEQ ID NO: 12691 - DNA, 21 bp, homo sapiens
gacgccttgtcatctgacttc

SEQ ID NO: 12692 - RNA, 21 nt, RNAi
cgccuugucaucugacuucuu

SEQ ID NO: 12693 - RNA, 21 nt, RNAi
uugcggaacaguagacugaag

SEQ ID NO: 12694 - DNA, 21 bp, homo sapiens
gacagtcagaagtgctgctcc

SEQ ID NO: 12695 - RNA, 21 nt, RNAi
cagucagaagugcugcuccuu

SEQ ID NO: 12696 - RNA, 21 nt, RNAi
uugucagucuucacgacgagg

SEQ ID NO: 12697 - DNA, 21 bp, homo sapiens
gaaaggtggagaaggatacaa

SEQ ID NO: 12698 - RNA, 21 nt, RNAi
aagguggagaaggauacaauu

SEQ ID NO: 12699 - RNA, 21 nt, RNAi
uuuuccaccucuuccuauguu

SEQ ID NO: 12700 - DNA, 21 bp, homo sapiens
gagaaggatacaatgagtgat

SEQ ID NO: 12701 - RNA, 21 nt, RNAi
gaaggauacaaugagugauuu

SEQ ID NO: 12702 - RNA, 21 nt, RNAi
uucuuccuauguuacucacua

SEQ ID NO: 12703 - DNA, 21 bp, homo sapiens
gaaggatacaatgagtgatca

SEQ ID NO: 12704 - RNA, 21 nt, RNAi
aggauacaaugagugaucauu

SEQ ID NO: 12705 - RNA, 21 nt, RNAi
uuuccuauguuacucacuagu

SEQ ID NO: 12706 - DNA, 21 bp, homo sapiens
gatacaatgagtgatcaagca

SEQ ID NO: 12707 - RNA, 21 nt, RNAi
uacaaugagugaucaagcauu

SEQ ID NO: 12708 - RNA, 21 nt, RNAi
uuauguuacucacuaguucgu

SEQ ID NO: 12709 - DNA, 21 bp, homo sapiens
gagtgatcaagcactcgaggc

SEQ ID NO: 12710 - RNA, 21 nt, RNAi
gugaucaagcacucgaggcuu

SEQ ID NO: 12711 - RNA, 21 nt, RNAi
uucacuaguucgugagcuccg

SEQ ID NO: 12712 - DNA, 21 bp, homo sapiens
gatcaagcactcgaggctctg

SEQ ID NO: 12713 - RNA, 21 nt, RNAi
ucaagcacucgaggcucuguu

SEQ ID NO: 12714 - RNA, 21 nt, RNAi
uuaguucgugagcuccgagac

SEQ ID NO: 12715 - DNA, 21 bp, homo sapiens
gaggctctgtcggcttcactg

SEQ ID NO: 12716 - RNA, 21 nt, RNAi
ggcucugucggcuucacuguu

SEQ ID NO: 12717 - RNA, 21 nt, RNAi
uuccgagacagccgaagugac

SEQ ID NO: 12718 - DNA, 21 bp, homo sapiens
gagctcgacctccgctcaatt

SEQ ID NO: 12719 - RNA, 21 nt, RNAi
gcucgaccuccgcucaauuuu

SEQ ID NO: 12720 - RNA, 21 nt, RNAi
uucgagcuggaggcgaguuaa

SEQ ID NO: 12721 - DNA, 21 bp, homo sapiens
gacctccgctcaattaaggaa

SEQ ID NO: 12722 - RNA, 21 nt, RNAi
ccuccgcucaauuaaggaauu

SEQ ID NO: 12723 - RNA, 21 nt, RNAi
uuggaggcgaguuaauuccuu

SEQ ID NO: 12724 - DNA, 21 bp, homo sapiens
gagaagtgtggtgaggatgat

SEQ ID NO: 12725 - RNA, 21 nt, RNAi
gaaguguggugaggaugauuu

SEQ ID NO: 12726 - RNA, 21 nt, RNAi
uucuucacaccacuccuacua

SEQ ID NO: 12727 - DNA, 21 bp, homo sapiens
gaagtgtggtgaggatgatga

SEQ ID NO: 12728 - RNA, 21 nt, RNAi
aguguggugaggaugaugauu

SEQ ID NO: 12729 - RNA, 21 nt, RNAi
uuucacaccacuccuacuacu

SEQ ID NO: 12730 - DNA, 21 bp, homo sapiens
gagtgaatcagaactcattga

SEQ ID NO: 12731 - RNA, 21 nt, RNAi
gugaaucagaacucauugauu

SEQ ID NO: 12732 - RNA, 21 nt, RNAi
uucacuuagucuugaguaacu

SEQ ID NO: 12733 - DNA, 21 bp, homo sapiens
gaatcagaactcattgatgaa

SEQ ID NO: 12734 - RNA, 21 nt, RNAi
aucagaacucauugaugaauu

SEQ ID NO: 12735 - RNA, 21 nt, RNAi
uuuagucuugaguaacuacuu

SEQ ID NO: 12736 - DNA, 21 bp, homo sapiens
gaactcattgatgaactttca

SEQ ID NO: 12737 - RNA, 21 nt, RNAi
acucauugaugaacuuucauu

SEQ ID NO: 12738 - RNA, 21 nt, RNAi
uuugaguaacuacuugaaagu

SEQ ID NO: 12739 - DNA, 21 bp, homo sapiens
gaccggtctgaatgtaaagag

SEQ ID NO: 12740 - RNA, 21 nt, RNAi
ccggucugaauguaaagaguu

SEQ ID NO: 12741 - RNA, 21 nt, RNAi
uuggccagacuuacauuucuc

SEQ ID NO: 12742 - DNA, 21 bp, homo sapiens
gaatgtaaagagaaaccatct

SEQ ID NO: 12743 - RNA, 21 nt, RNAi
auguaaagagaaaccaucuuu

SEQ ID NO: 12744 - RNA, 21 nt, RNAi
uuuacauuucucuuugguaga

SEQ ID NO: 12745 - DNA, 21 bp, homo sapiens
gagaaaccatctaagccaact

SEQ ID NO: 12746 - RNA, 21 nt, RNAi
gaaaccaucuaagccaacuuu

SEQ ID NO: 12747 - RNA, 21 nt, RNAi
uucuuugguagauucgguuga

SEQ ID NO: 12748 - DNA, 21 bp, homo sapiens
gaaaccatctaagccaactga

SEQ ID NO: 12749 - RNA, 21 nt, RNAi
aaccaucuaagccaacugauu

SEQ ID NO: 12750 - RNA, 21 nt, RNAi
uuuugguagauucgguugacu

SEQ ID NO: 12751 - DNA, 21 bp, homo sapiens
gacagaagaatctaaggccgc

SEQ ID NO: 12752 - RNA, 21 nt, RNAi
cagaagaaucuaaggccgcuu

SEQ ID NO: 12753 - RNA, 21 nt, RNAi
uugucuucuuagauuccggcg

SEQ ID NO: 12754 - DNA, 21 bp, homo sapiens
gaagaatctaaggccgctgct

SEQ ID NO: 12755 - RNA, 21 nt, RNAi
agaaucuaaggccgcugcuuu

SEQ ID NO: 12756 - RNA, 21 nt, RNAi
uuucuuagauuccggcgacga

SEQ ID NO: 12757 - DNA, 21 bp, homo sapiens
gaatctaaggccgctgctcca

SEQ ID NO: 12758 - RNA, 21 nt, RNAi
aucuaaggccgcugcuccauu

SEQ ID NO: 12759 - RNA, 21 nt, RNAi
uuuagauuccggcgacgaggu

SEQ ID NO: 12760 - DNA, 21 bp, homo sapiens
gacctccatgtgtagtataca

SEQ ID NO: 12761 - RNA, 21 nt, RNAi
ccuccauguguaguauacauu

SEQ ID NO: 12762 - RNA, 21 nt, RNAi
uuggagguacacaucauaugu

SEQ ID NO: 12763 - DNA, 21 bp, homo sapiens
gatgatgctgtagaagccttg

SEQ ID NO: 12764 - RNA, 21 nt, RNAi
ugaugcuguagaagccuuguu

SEQ ID NO: 12765 - RNA, 21 nt, RNAi
uuacuacgacaucuucggaac

SEQ ID NO: 12766 - DNA, 21 bp, homo sapiens
gatgctgtagaagccttggct

SEQ ID NO: 12767 - RNA, 21 nt, RNAi
ugcuguagaagccuuggcuuu

SEQ ID NO: 12768 - RNA, 21 nt, RNAi
uuacgacaucuucggaaccga

SEQ ID NO: 12769 - DNA, 21 bp, homo sapiens
gaagccttggctgatagcctg

SEQ ID NO: 12770 - RNA, 21 nt, RNAi
agccuuggcugauagccuguu

SEQ ID NO: 12771 - RNA, 21 nt, RNAi
uuucggaaccgacuaucggac

SEQ ID NO: 12772 - DNA, 21 bp, homo sapiens
gaagcagatccagaagatgga

SEQ ID NO: 12773 - RNA, 21 nt, RNAi
agcagauccagaagauggauu

SEQ ID NO: 12774 - RNA, 21 nt, RNAi
uuucgucuaggucuucuaccu

SEQ ID NO: 12775 - DNA, 21 bp, homo sapiens
gatggataaagtcaaggagaa

SEQ ID NO: 12776 - RNA, 21 nt, RNAi
uggauaaagucaaggagaauu

SEQ ID NO: 12777 - RNA, 21 nt, RNAi
uuaccuauuucaguuccucuu

SEQ ID NO: 12778 - DNA, 21 bp, homo sapiens
gataaagtcaaggagaaggcc

SEQ ID NO: 12779 - RNA, 21 nt, RNAi
uaaagucaaggagaaggccuu

SEQ ID NO: 12780 - RNA, 21 nt, RNAi
uuauuucaguuccucuuccgg

SEQ ID NO: 12781 - DNA, 21 bp, homo sapiens
gagaaggccaaagaagaagac

SEQ ID NO: 12782 - RNA, 21 nt, RNAi
gaaggccaaagaagaagacuu

SEQ ID NO: 12783 - RNA, 21 nt, RNAi
uucuuccgguuucuucuucug

SEQ ID NO: 12784 - DNA, 21 bp, homo sapiens
gaaggccaaagaagaagaccg

SEQ ID NO: 12785 - RNA, 21 nt, RNAi
aggccaaagaagaagaccguu

SEQ ID NO: 12786 - RNA, 21 nt, RNAi
uuuccgguuucuucuucuggc

SEQ ID NO: 12787 - DNA, 21 bp, homo sapiens
gaagaaacaattcctcctgat

SEQ ID NO: 12788 - RNA, 21 nt, RNAi
agaaacaauuccuccugauuu

SEQ ID NO: 12789 - RNA, 21 nt, RNAi
uuucuuuguuaaggaggacua

SEQ ID NO: 12790 - DNA, 21 bp, homo sapiens
gaaacaattcctcctgattat

SEQ ID NO: 12791 - RNA, 21 nt, RNAi
aacaauuccuccugauuauuu

SEQ ID NO: 12792 - RNA, 21 nt, RNAi
uuuuguuaaggaggacuaaua

SEQ ID NO: 12793 - DNA, 21 bp, homo sapiens
gattatagattagaagaggtc

SEQ ID NO: 12794 - RNA, 21 nt, RNAi
uuauagauuagaagaggucuu

SEQ ID NO: 12795 - RNA, 21 nt, RNAi
uuaauaucuaaucuucuccag

SEQ ID NO: 12796 - DNA, 21 bp, homo sapiens
gattagaagaggtcaaggata

SEQ ID NO: 12797 - RNA, 21 nt, RNAi
uuagaagaggucaaggauauu

SEQ ID NO: 12798 - RNA, 21 nt, RNAi
uuaaucuucuccaguuccuau

SEQ ID NO: 12799 - DNA, 21 bp, homo sapiens
gaagaggtcaaggataaagat

SEQ ID NO: 12800 - RNA, 21 nt, RNAi
agaggucaaggauaaagauuu

SEQ ID NO: 12801 - RNA, 21 nt, RNAi
uuucuccaguuccuauuucua

SEQ ID NO: 12802 - DNA, 21 bp, homo sapiens
gaggtcaaggataaagatgga

SEQ ID NO: 12803 - RNA, 21 nt, RNAi
ggucaaggauaaagauggauu

SEQ ID NO: 12804 - RNA, 21 nt, RNAi
uuccaguuccuauuucuaccu

SEQ ID NO: 12805 - DNA, 21 bp, homo sapiens
gataaagatggaaagccactc

SEQ ID NO: 12806 - RNA, 21 nt, RNAi
uaaagauggaaagccacucuu

SEQ ID NO: 12807 - RNA, 21 nt, RNAi
uuauuucuaccuuucggugag

SEQ ID NO: 12808 - DNA, 21 bp, homo sapiens
gatggaaagccactcctgcca

SEQ ID NO: 12809 - RNA, 21 nt, RNAi
uggaaagccacuccugccauu

SEQ ID NO: 12810 - RNA, 21 nt, RNAi
uuaccuuucggugaggacggu

SEQ ID NO: 12811 - DNA, 21 bp, homo sapiens
gagtctaaggaacagcttcca

SEQ ID NO: 12812 - RNA, 21 nt, RNAi
gucuaaggaacagcuuccauu

SEQ ID NO: 12813 - RNA, 21 nt, RNAi
uucagauuccuugucgaaggu

SEQ ID NO: 12814 - DNA, 21 bp, homo sapiens
gagtgaagacttccttctgga

SEQ ID NO: 12815 - RNA, 21 nt, RNAi
gugaagacuuccuucuggauu

SEQ ID NO: 12816 - RNA, 21 nt, RNAi
uucacuucugaaggaagaccu

SEQ ID NO: 12817 - DNA, 21 bp, homo sapiens
gaagacttccttctggatgct

SEQ ID NO: 12818 - RNA, 21 nt, RNAi
agacuuccuucuggaugcuuu

SEQ ID NO: 12819 - RNA, 21 nt, RNAi
uuucugaaggaagaccuacga

SEQ ID NO: 12820 - DNA, 21 bp, homo sapiens
gacttccttctggatgctttg

SEQ ID NO: 12821 - RNA, 21 nt, RNAi
cuuccuucuggaugcuuuguu

SEQ ID NO: 12822 - RNA, 21 nt, RNAi
uugaaggaagaccuacgaaac

SEQ ID NO: 12823 - DNA, 21 bp, homo sapiens
gatgctttgtctgaggacttc

SEQ ID NO: 12824 - RNA, 21 nt, RNAi
ugcuuugucugaggacuucuu

SEQ ID NO: 12825 - RNA, 21 nt, RNAi
uuacgaaacagacuccugaag

SEQ ID NO: 12826 - DNA, 21 bp, homo sapiens
gaggacttctctggtccacaa

SEQ ID NO: 12827 - RNA, 21 nt, RNAi
ggacuucucugguccacaauu

SEQ ID NO: 12828 - RNA, 21 nt, RNAi
uuccugaagagaccagguguu

SEQ ID NO: 12829 - DNA, 21 bp, homo sapiens
gaagatgctaaacttgctgct

SEQ ID NO: 12830 - RNA, 21 nt, RNAi
agaugcuaaacuugcugcuuu

SEQ ID NO: 12831 - RNA, 21 nt, RNAi
uuucuacgauuugaacgacga

SEQ ID NO: 12832 - DNA, 21 bp, homo sapiens
gatgctaaacttgctgctgcc

SEQ ID NO: 12833 - RNA, 21 nt, RNAi
ugcuaaacuugcugcugccuu

SEQ ID NO: 12834 - RNA, 21 nt, RNAi
uuacgauuugaacgacgacgg

SEQ ID NO: 12835 - DNA, 21 bp, homo sapiens
gatacctcgcagagtgacaaa

SEQ ID NO: 12836 - RNA, 21 nt, RNAi
uaccucgcagagugacaaauu

SEQ ID NO: 12837 - RNA, 21 nt, RNAi
uuauggagcgucucacuguuu

SEQ ID NO: 12838 - DNA, 21 bp, homo sapiens
gagtgacaaagacctcgatga

SEQ ID NO: 12839 - RNA, 21 nt, RNAi
gugacaaagaccucgaugauu

SEQ ID NO: 12840 - RNA, 21 nt, RNAi
uucacuguuucuggagcuacu

SEQ ID NO: 12841 - DNA, 21 bp, homo sapiens
gacaaagacctcgatgatgcc

SEQ ID NO: 12842 - RNA, 21 nt, RNAi
caaagaccucgaugaugccuu

SEQ ID NO: 12843 - RNA, 21 nt, RNAi
uuguuucuggagcuacuacgg

SEQ ID NO: 12844 - DNA, 21 bp, homo sapiens
gacctcgatgatgccttggat

SEQ ID NO: 12845 - RNA, 21 nt, RNAi
ccucgaugaugccuuggauuu

SEQ ID NO: 12846 - RNA, 21 nt, RNAi
uuggagcuacuacggaaccua

SEQ ID NO: 12847 - DNA, 21 bp, homo sapiens
gatgatgccttggataaactc

SEQ ID NO: 12848 - RNA, 21 nt, RNAi
ugaugccuuggauaaacucuu

SEQ ID NO: 12849 - RNA, 21 nt, RNAi
uuacuacggaaccuauuugag

SEQ ID NO: 12850 - DNA, 21 bp, homo sapiens
gatgccttggataaactctct

SEQ ID NO: 12851 - RNA, 21 nt, RNAi
ugccuuggauaaacucucuuu

SEQ ID NO: 12852 - RNA, 21 nt, RNAi
uuacggaaccuauuugagaga

SEQ ID NO: 12853 - DNA, 21 bp, homo sapiens
gataaactctctgacagtcta

SEQ ID NO: 12854 - RNA, 21 nt, RNAi
uaaacucucugacagucuauu

SEQ ID NO: 12855 - RNA, 21 nt, RNAi
uuauuugagagacugucagau

SEQ ID NO: 12856 - DNA, 21 bp, homo sapiens
gacagtctaggacaaaggcag

SEQ ID NO: 12857 - RNA, 21 nt, RNAi
cagucuaggacaaaggcaguu

SEQ ID NO: 12858 - RNA, 21 nt, RNAi
uugucagauccuguuuccguc

SEQ ID NO: 12859 - DNA, 21 bp, homo sapiens
gaacatagagacaagcttgga

SEQ ID NO: 12860 - RNA, 21 nt, RNAi
acauagagacaagcuuggauu

SEQ ID NO: 12861 - RNA, 21 nt, RNAi
uuuguaucucuguucgaaccu

SEQ ID NO: 12862 - DNA, 21 bp, homo sapiens
gagacaagcttggagaaagag

SEQ ID NO: 12863 - RNA, 21 nt, RNAi
gacaagcuuggagaaagaguu

SEQ ID NO: 12864 - RNA, 21 nt, RNAi
uucuguucgaaccucuuucuc

SEQ ID NO: 12865 - DNA, 21 bp, homo sapiens
gacaagcttggagaaagagat

SEQ ID NO: 12866 - RNA, 21 nt, RNAi
caagcuuggagaaagagauuu

SEQ ID NO: 12867 - RNA, 21 nt, RNAi
uuguucgaaccucuuucucua

SEQ ID NO: 12868 - DNA, 21 bp, homo sapiens
gagaaagagatgacactatcc

SEQ ID NO: 12869 - RNA, 21 nt, RNAi
gaaagagaugacacuauccuu

SEQ ID NO: 12870 - RNA, 21 nt, RNAi
uucuuucucuacugugauagg

SEQ ID NO: 12871 - DNA, 21 bp, homo sapiens
gaatacagacatctcctggat

SEQ ID NO: 12872 - RNA, 21 nt, RNAi
auacagacaucuccuggauuu

SEQ ID NO: 12873 - RNA, 21 nt, RNAi
uuuaugucuguagaggaccua

SEQ ID NO: 12874 - DNA, 21 bp, homo sapiens
gacatctcctggatgataatg

SEQ ID NO: 12875 - RNA, 21 nt, RNAi
caucuccuggaugauaauguu

SEQ ID NO: 12876 - RNA, 21 nt, RNAi
uuguagaggaccuacuauuac

SEQ ID NO: 12877 - DNA, 21 bp, homo sapiens
gatgataatggacaggacaaa

SEQ ID NO: 12878 - RNA, 21 nt, RNAi
ugauaauggacaggacaaauu

SEQ ID NO: 12879 - RNA, 21 nt, RNAi
uuacuauuaccuguccuguuu

SEQ ID NO: 12880 - DNA, 21 bp, homo sapiens
gataatggacaggacaaacca

SEQ ID NO: 12881 - RNA, 21 nt, RNAi
uaauggacaggacaaaccauu

SEQ ID NO: 12882 - RNA, 21 nt, RNAi
uuauuaccuguccuguuuggu

SEQ ID NO: 12883 - DNA, 21 bp, homo sapiens
gacaggacaaaccagtgaagc

SEQ ID NO: 12884 - RNA, 21 nt, RNAi
caggacaaaccagugaagcuu

SEQ ID NO: 12885 - RNA, 21 nt, RNAi
uuguccuguuuggucacuucg

SEQ ID NO: 12886 - DNA, 21 bp, homo sapiens
gacaaaccagtgaagccacct

SEQ ID NO: 12887 - RNA, 21 nt, RNAi
caaaccagugaagccaccuuu

SEQ ID NO: 12888 - RNA, 21 nt, RNAi
uuguuuggucacuucggugga

SEQ ID NO: 12889 - DNA, 21 bp, homo sapiens
gaagccacctacaaagaaatc

SEQ ID NO: 12890 - RNA, 21 nt, RNAi
agccaccuacaaagaaaucuu

SEQ ID NO: 12891 - RNA, 21 nt, RNAi
uuucgguggauguuucuuuag

SEQ ID NO: 12892 - DNA, 21 bp, homo sapiens
gaaatcagaggattcaaagaa

SEQ ID NO: 12893 - RNA, 21 nt, RNAi
aaucagaggauucaaagaauu

SEQ ID NO: 12894 - RNA, 21 nt, RNAi
uuuuagucuccuaaguuucuu

SEQ ID NO: 12895 - DNA, 21 bp, homo sapiens
gaggattcaaagaaacctgca

SEQ ID NO: 12896 - RNA, 21 nt, RNAi
ggauucaaagaaaccugcauu

SEQ ID NO: 12897 - RNA, 21 nt, RNAi
uuccuaaguuucuuuggacgu

SEQ ID NO: 12898 - DNA, 21 bp, homo sapiens
gattcaaagaaacctgcagat

SEQ ID NO: 12899 - RNA, 21 nt, RNAi
uucaaagaaaccugcagauuu

SEQ ID NO: 12900 - RNA, 21 nt, RNAi
uuaaguuucuuuggacgucua

SEQ ID NO: 12901 - DNA, 21 bp, homo sapiens
gaaacctgcagatgaccaaga

SEQ ID NO: 12902 - RNA, 21 nt, RNAi
aaccugcagaugaccaagauu

SEQ ID NO: 12903 - RNA, 21 nt, RNAi
uuuuggacgucuacugguucu

SEQ ID NO: 12904 - DNA, 21 bp, homo sapiens
gatgctctctcaggagatctg

SEQ ID NO: 12905 - RNA, 21 nt, RNAi
ugcucucucaggagaucuguu

SEQ ID NO: 12906 - RNA, 21 nt, RNAi
uuacgagagaguccucuagac

SEQ ID NO: 12907 - DNA, 21 bp, homo sapiens
gaaacctcacagaacacagca

SEQ ID NO: 12908 - RNA, 21 nt, RNAi
aaccucacagaacacagcauu

SEQ ID NO: 12909 - RNA, 21 nt, RNAi
uuuuggagugucuugugucgu

SEQ ID NO: 12910 - DNA, 21 bp, homo sapiens
gaacacagcaaaggataagtg

SEQ ID NO: 12911 - RNA, 21 nt, RNAi
acacagcaaaggauaaguguu

SEQ ID NO: 12912 - RNA, 21 nt, RNAi
uuugugucguuuccuauucac

SEQ ID NO: 12913 - DNA, 21 bp, homo sapiens
gataagtgcaagaaggctgct

SEQ ID NO: 12914 - RNA, 21 nt, RNAi
uaagugcaagaaggcugcuuu

SEQ ID NO: 12915 - RNA, 21 nt, RNAi
uuauucacguucuuccgacga

SEQ ID NO: 12916 - DNA, 21 bp, homo sapiens
gaaggctgcttccagctccaa

SEQ ID NO: 12917 - RNA, 21 nt, RNAi
aggcugcuuccagcuccaauu

SEQ ID NO: 12918 - RNA, 21 nt, RNAi
uuuccgacgaaggucgagguu

SEQ ID NO: 12919 - DNA, 21 bp, homo sapiens
gaatggaggtaaagcgaagga

SEQ ID NO: 12920 - RNA, 21 nt, RNAi
auggagguaaagcgaaggauu

SEQ ID NO: 12921 - RNA, 21 nt, RNAi
uuuaccuccauuucgcuuccu

SEQ ID NO: 12922 - DNA, 21 bp, homo sapiens
gaggtaaagcgaaggattcag

SEQ ID NO: 12923 - RNA, 21 nt, RNAi
gguaaagcgaaggauucaguu

SEQ ID NO: 12924 - RNA, 21 nt, RNAi
uuccauuucgcuuccuaaguc

SEQ ID NO: 12925 - DNA, 21 bp, homo sapiens
gaaggattcagcaaagacaac

SEQ ID NO: 12926 - RNA, 21 nt, RNAi
aggauucagcaaagacaacuu

SEQ ID NO: 12927 - RNA, 21 nt, RNAi
uuuccuaagucguuucuguug

SEQ ID NO: 12928 - DNA, 21 bp, homo sapiens
gattcagcaaagacaacagag

SEQ ID NO: 12929 - RNA, 21 nt, RNAi
uucagcaaagacaacagaguu

SEQ ID NO: 12930 - RNA, 21 nt, RNAi
uuaagucguuucuguugucuc

SEQ ID NO: 12931 - DNA, 21 bp, homo sapiens
gacaacagaggaaacttccaa

SEQ ID NO: 12932 - RNA, 21 nt, RNAi
caacagaggaaacuuccaauu

SEQ ID NO: 12933 - RNA, 21 nt, RNAi
uuguugucuccuuugaagguu

SEQ ID NO: 12934 - DNA, 21 bp, homo sapiens
gagtctctgaacatcctaaat

SEQ ID NO: 12935 - RNA, 21 nt, RNAi
gucucugaacauccuaaauuu

SEQ ID NO: 12936 - RNA, 21 nt, RNAi
uucagagacuuguaggauuua

SEQ ID NO: 12937 - DNA, 21 bp, homo sapiens
tatgctggtggaacagcctcg

SEQ ID NO: 12938 - RNA, 21 nt, RNAi
ugcugguggaacagccucguu

SEQ ID NO: 12939 - RNA, 21 nt, RNAi
uuacgaccaccuugucggagc

SEQ ID NO: 12940 - DNA, 21 bp, homo sapiens
tacaggaagtaacgatgctca

SEQ ID NO: 12941 - RNA, 21 nt, RNAi
caggaaguaacgaugcucauu

SEQ ID NO: 12942 - RNA, 21 nt, RNAi
uuguccuucauugcuacgagu

SEQ ID NO: 12943 - DNA, 21 bp, homo sapiens
taaaccacaagacatgatttc

SEQ ID NO: 12944 - RNA, 21 nt, RNAi
aaccacaagacaugauuucuu

SEQ ID NO: 12945 - RNA, 21 nt, RNAi
uuuugguguucuguacuaaag

SEQ ID NO: 12946 - DNA, 21 bp, homo sapiens
tatcactgcaatatctggcaa

SEQ ID NO: 12947 - RNA, 21 nt, RNAi
ucacugcaauaucuggcaauu

SEQ ID NO: 12948 - RNA, 21 nt, RNAi
uuagugacguuauagaccguu

SEQ ID NO: 12949 - DNA, 21 bp, homo sapiens
taatagatactttaggaggac

SEQ ID NO: 12950 - RNA, 21 nt, RNAi
auagauacuuuaggaggacuu

SEQ ID NO: 12951 - RNA, 21 nt, RNAi
uuuaucuaugaaauccuccug

SEQ ID NO: 12952 - DNA, 21 bp, homo sapiens
tagatactttaggaggacctg

SEQ ID NO: 12953 - RNA, 21 nt, RNAi
gauacuuuaggaggaccuguu

SEQ ID NO: 12954 - RNA, 21 nt, RNAi
uucuaugaaauccuccuggac

SEQ ID NO: 12955 - DNA, 21 bp, homo sapiens
tactttaggaggacctgaaga

SEQ ID NO: 12956 - RNA, 21 nt, RNAi
cuuuaggaggaccugaagauu

SEQ ID NO: 12957 - RNA, 21 nt, RNAi
uugaaauccuccuggacuucu

SEQ ID NO: 12958 - DNA, 21 bp, homo sapiens
taggaggacctgaagaaactg

SEQ ID NO: 12959 - RNA, 21 nt, RNAi
ggaggaccugaagaaacuguu

SEQ ID NO: 12960 - RNA, 21 nt, RNAi
uuccuccuggacuucuuugac

SEQ ID NO: 12961 - DNA, 21 bp, homo sapiens
tacaacgtatactggaccaga

SEQ ID NO: 12962 - RNA, 21 nt, RNAi
caacguauacuggaccagauu

SEQ ID NO: 12963 - RNA, 21 nt, RNAi
uuguugcauaugaccuggucu

SEQ ID NO: 12964 - DNA, 21 bp, homo sapiens
tatactggaccagaagtttca

SEQ ID NO: 12965 - RNA, 21 nt, RNAi
uacuggaccagaaguuucauu

SEQ ID NO: 12966 - RNA, 21 nt, RNAi
uuaugaccuggucuucaaagu

SEQ ID NO: 12967 - DNA, 21 bp, homo sapiens
tactggaccagaagtttcaga

SEQ ID NO: 12968 - RNA, 21 nt, RNAi
cuggaccagaaguuucagauu

SEQ ID NO: 12969 - RNA, 21 nt, RNAi
uugaccuggucuucaaagucu

SEQ ID NO: 12970 - DNA, 21 bp, homo sapiens
tatagacgccttgtcatctga

SEQ ID NO: 12971 - RNA, 21 nt, RNAi
uagacgccuugucaucugauu

SEQ ID NO: 12972 - RNA, 21 nt, RNAi
uuaucugcggaacaguagacu

SEQ ID NO: 12973 - DNA, 21 bp, homo sapiens
tagacgccttgtcatctgact

SEQ ID NO: 12974 - RNA, 21 nt, RNAi
gacgccuugucaucugacuuu

SEQ ID NO: 12975 - RNA, 21 nt, RNAi
uucugcggaacaguagacuga

SEQ ID NO: 12976 - DNA, 21 bp, homo sapiens
tacaatgagtgatcaagcact

SEQ ID NO: 12977 - RNA, 21 nt, RNAi
caaugagugaucaagcacuuu

SEQ ID NO: 12978 - RNA, 21 nt, RNAi
uuguuacucacuaguucguga

SEQ ID NO: 12979 - DNA, 21 bp, homo sapiens
taaggaagtcgatgaggcaaa

SEQ ID NO: 12980 - RNA, 21 nt, RNAi
aggaagucgaugaggcaaauu

SEQ ID NO: 12981 - RNA, 21 nt, RNAi
uuuccuucagcuacuccguuu

SEQ ID NO: 12982 - DNA, 21 bp, homo sapiens
tagagaagtgtggtgaggatg

SEQ ID NO: 12983 - RNA, 21 nt, RNAi
gagaaguguggugaggauguu

SEQ ID NO: 12984 - RNA, 21 nt, RNAi
uucucuucacaccacuccuac

SEQ ID NO: 12985 - DNA, 21 bp, homo sapiens
tattgccagagcctgaagaaa

SEQ ID NO: 12986 - RNA, 21 nt, RNAi
uugccagagccugaagaaauu

SEQ ID NO: 12987 - RNA, 21 nt, RNAi
uuaacggucucggacuucuuu

SEQ ID NO: 12988 - DNA, 21 bp, homo sapiens
taaagagaaaccatctaagcc

SEQ ID NO: 12989 - RNA, 21 nt, RNAi
aagagaaaccaucuaagccuu

SEQ ID NO: 12990 - RNA, 21 nt, RNAi
uuuucucuuugguagauucgg

SEQ ID NO: 12991 - DNA, 21 bp, homo sapiens
tagaagccttggctgatagcc

SEQ ID NO: 12992 - RNA, 21 nt, RNAi
gaagccuuggcugauagccuu

SEQ ID NO: 12993 - RNA, 21 nt, RNAi
uucuucggaaccgacuaucgg

SEQ ID NO: 12994 - DNA, 21 bp, homo sapiens
taaagtcaaggagaaggccaa

SEQ ID NO: 12995 - RNA, 21 nt, RNAi
aagucaaggagaaggccaauu

SEQ ID NO: 12996 - RNA, 21 nt, RNAi
uuuucaguuccucuuccgguu

SEQ ID NO: 12997 - DNA, 21 bp, homo sapiens
tatagattagaagaggtcaag

SEQ ID NO: 12998 - RNA, 21 nt, RNAi
uagauuagaagaggucaaguu

SEQ ID NO: 12999 - RNA, 21 nt, RNAi
uuaucuaaucuucuccaguuc

SEQ ID NO: 13000 - DNA, 21 bp, homo sapiens
tagattagaagaggtcaagga

SEQ ID NO: 13001 - RNA, 21 nt, RNAi
gauuagaagaggucaaggauu

SEQ ID NO: 13002 - RNA, 21 nt, RNAi
uucuaaucuucuccaguuccu

SEQ ID NO: 13003 - DNA, 21 bp, homo sapiens
tagaagaggtcaaggataaag

SEQ ID NO: 13004 - RNA, 21 nt, RNAi
gaagaggucaaggauaaaguu

SEQ ID NO: 13005 - RNA, 21 nt, RNAi
uucuucuccaguuccuauuuc

SEQ ID NO: 13006 - DNA, 21 bp, homo sapiens
taaagatggaaagccactcct

SEQ ID NO: 13007 - RNA, 21 nt, RNAi
aagauggaaagccacuccuuu

SEQ ID NO: 13008 - RNA, 21 nt, RNAi
uuuucuaccuuucggugagga

SEQ ID NO: 13009 - DNA, 21 bp, homo sapiens
taaacttgctgctgccatctc

SEQ ID NO: 13010 - RNA, 21 nt, RNAi
aacuugcugcugccaucucuu

SEQ ID NO: 13011 - RNA, 21 nt, RNAi
uuuugaacgacgacgguagag

SEQ ID NO: 13012 - DNA, 21 bp, homo sapiens
tacctcgcagagtgacaaaga

SEQ ID NO: 13013 - RNA, 21 nt, RNAi
ccucgcagagugacaaagauu

SEQ ID NO: 13014 - RNA, 21 nt, RNAi
uuggagcgucucacuguuucu

SEQ ID NO: 13015 - DNA, 21 bp, homo sapiens
taaactctctgacagtctagg

SEQ ID NO: 13016 - RNA, 21 nt, RNAi
aacucucugacagucuagguu

SEQ ID NO: 13017 - RNA, 21 nt, RNAi
uuuugagagacugucagaucc

SEQ ID NO: 13018 - DNA, 21 bp, homo sapiens
taggacaaaggcagcctgacc

SEQ ID NO: 13019 - RNA, 21 nt, RNAi
ggacaaaggcagccugaccuu

SEQ ID NO: 13020 - RNA, 21 nt, RNAi
uuccuguuuccgucggacugg

SEQ ID NO: 13021 - DNA, 21 bp, homo sapiens
taaagctgaacatagagacaa

SEQ ID NO: 13022 - RNA, 21 nt, RNAi
aagcugaacauagagacaauu

SEQ ID NO: 13023 - RNA, 21 nt, RNAi
uuuucgacuuguaucucuguu

SEQ ID NO: 13024 - DNA, 21 bp, homo sapiens
tagagacaagcttggagaaag

SEQ ID NO: 13025 - RNA, 21 nt, RNAi
gagacaagcuuggagaaaguu

SEQ ID NO: 13026 - RNA, 21 nt, RNAi
uucucuguucgaaccucuuuc

SEQ ID NO: 13027 - DNA, 21 bp, homo sapiens
tacagacatctcctggatgat

SEQ ID NO: 13028 - RNA, 21 nt, RNAi
cagacaucuccuggaugauuu

SEQ ID NO: 13029 - RNA, 21 nt, RNAi
uugucuguagaggaccuacua

SEQ ID NO: 13030 - DNA, 21 bp, homo sapiens
taatggacaggacaaaccagt

SEQ ID NO: 13031 - RNA, 21 nt, RNAi
auggacaggacaaaccaguuu

SEQ ID NO: 13032 - RNA, 21 nt, RNAi
uuuaccuguccuguuugguca

SEQ ID NO: 13033 - DNA, 21 bp, homo sapiens
tacaaagaaatcagaggattc

SEQ ID NO: 13034 - RNA, 21 nt, RNAi
caaagaaaucagaggauucuu

SEQ ID NO: 13035 - RNA, 21 nt, RNAi
uuguuucuuuagucuccuaag

SEQ ID NO: 13036 - DNA, 21 bp, homo sapiens
tacagaaacctcacagaacac

SEQ ID NO: 13037 - RNA, 21 nt, RNAi
cagaaaccucacagaacacuu

SEQ ID NO: 13038 - RNA, 21 nt, RNAi
uugucuuuggagugucuugug

SEQ ID NO: 13039 - DNA, 21 bp, homo sapiens
taagtgcaagaaggctgcttc

SEQ ID NO: 13040 - RNA, 21 nt, RNAi
agugcaagaaggcugcuucuu

SEQ ID NO: 13041 - RNA, 21 nt, RNAi
uuucacguucuuccgacgaag

SEQ ID NO: 13042 - DNA, 21 bp, homo sapiens
taagaatggaggtaaagcgaa

SEQ ID NO: 13043 - RNA, 21 nt, RNAi
agaauggagguaaagcgaauu

SEQ ID NO: 13044 - RNA, 21 nt, RNAi
uuucuuaccuccauuucgcuu

SEQ ID NO: 13045 - DNA, 21 bp, homo sapiens
taaagcgaaggattcagcaaa

SEQ ID NO: 13046 - RNA, 21 nt, RNAi
aagcgaaggauucagcaaauu

SEQ ID NO: 13047 - RNA, 21 nt, RNAi
uuuucgcuuccuaagucguuu

SEQ ID NO: 13048 - DNA, 21 bp, homo sapiens
tacaagttaaggtatctggta

SEQ ID NO: 13049 - RNA, 21 nt, RNAi
caaguuaagguaucugguauu

SEQ ID NO: 13050 - RNA, 21 nt, RNAi
uuguucaauuccauagaccau

SEQ ID NO: 13051 - DNA, 21 bp, homo sapiens
taaggtatctggtatctgcat

SEQ ID NO: 13052 - RNA, 21 nt, RNAi
agguaucugguaucugcauuu

SEQ ID NO: 13053 - RNA, 21 nt, RNAi
uuuccauagaccauagacgua

SEQ ID NO: 13054 - DNA, 21 bp, homo sapiens
tatctggtatctgcatgtaaa

SEQ ID NO: 13055 - RNA, 21 nt, RNAi
ucugguaucugcauguaaauu

SEQ ID NO: 13056 - RNA, 21 nt, RNAi
uuagaccauagacguacauuu

SEQ ID NO: 13057 - DNA, 21 bp, homo sapiens
aagtaacgatgctcacaataa

SEQ ID NO: 13058 - RNA, 21 nt, RNAi
guaacgaugcucacaauaauu

SEQ ID NO: 13059 - RNA, 21 nt, RNAi
uucauugcuacgaguguuauu

SEQ ID NO: 13060 - DNA, 21 bp, homo sapiens
aaagcagtttccagatcagct

SEQ ID NO: 13061 - RNA, 21 nt, RNAi
agcaguuuccagaucagcuuu

SEQ ID NO: 13062 - RNA, 21 nt, RNAi
uuucgucaaaggucuagucga

SEQ ID NO: 13063 - DNA, 21 bp, homo sapiens
aagactaaaccacaagacatg

SEQ ID NO: 13064 - RNA, 21 nt, RNAi
gacuaaaccacaagacauguu

SEQ ID NO: 13065 - RNA, 21 nt, RNAi
uucugauuugguguucuguac

SEQ ID NO: 13066 - DNA, 21 bp, homo sapiens
aatctaaaccggataaaccat

SEQ ID NO: 13067 - RNA, 21 nt, RNAi
ucuaaaccggauaaaccauuu

SEQ ID NO: 13068 - RNA, 21 nt, RNAi
uuagauuuggccuauuuggua

SEQ ID NO: 13069 - DNA, 21 bp, homo sapiens
aaatacaacgtatactggacc

SEQ ID NO: 13070 - RNA, 21 nt, RNAi
auacaacguauacuggaccuu

SEQ ID NO: 13071 - RNA, 21 nt, RNAi
uuuauguugcauaugaccugg

SEQ ID NO: 13072 - DNA, 21 bp, homo sapiens
aatacaacgtatactggacca

SEQ ID NO: 13073 - RNA, 21 nt, RNAi
uacaacguauacuggaccauu

SEQ ID NO: 13074 - RNA, 21 nt, RNAi
uuauguugcauaugaccuggu

SEQ ID NO: 13075 - DNA, 21 bp, homo sapiens
aacgtatactggaccagaagt

SEQ ID NO: 13076 - RNA, 21 nt, RNAi
cguauacuggaccagaaguuu

SEQ ID NO: 13077 - RNA, 21 nt, RNAi
uugcauaugaccuggucuuca

SEQ ID NO: 13078 - DNA, 21 bp, homo sapiens
aagtttcagatccaatgagtt

SEQ ID NO: 13079 - RNA, 21 nt, RNAi
guuucagauccaaugaguuuu

SEQ ID NO: 13080 - RNA, 21 nt, RNAi
uucaaagucuagguuacucaa

SEQ ID NO: 13081 - DNA, 21 bp, homo sapiens
aattaaggaagtcgatgaggc

SEQ ID NO: 13082 - RNA, 21 nt, RNAi
uuaaggaagucgaugaggcuu

SEQ ID NO: 13083 - RNA, 21 nt, RNAi
uuaauuccuucagcuacuccg

SEQ ID NO: 13084 - DNA, 21 bp, homo sapiens
aaaccagccacggataaagat

SEQ ID NO: 13085 - RNA, 21 nt, RNAi
accagccacggauaaagauuu

SEQ ID NO: 13086 - RNA, 21 nt, RNAi
uuuggucggugccuauuucua

SEQ ID NO: 13087 - DNA, 21 bp, homo sapiens
aaccagccacggataaagatg

SEQ ID NO: 13088 - RNA, 21 nt, RNAi
ccagccacggauaaagauguu

SEQ ID NO: 13089 - RNA, 21 nt, RNAi
uuggucggugccuauuucuac

SEQ ID NO: 13090 - DNA, 21 bp, homo sapiens
aagcctcggagtgaatcagaa

SEQ ID NO: 13091 - RNA, 21 nt, RNAi
gccucggagugaaucagaauu

SEQ ID NO: 13092 - RNA, 21 nt, RNAi
uucggagccucacuuagucuu

SEQ ID NO: 13093 - DNA, 21 bp, homo sapiens
aagagaaaccatctaagccaa

SEQ ID NO: 13094 - RNA, 21 nt, RNAi
gagaaaccaucuaagccaauu

SEQ ID NO: 13095 - RNA, 21 nt, RNAi
uucucuuugguagauucgguu

SEQ ID NO: 13096 - DNA, 21 bp, homo sapiens
aaaccatctaagccaactgaa

SEQ ID NO: 13097 - RNA, 21 nt, RNAi
accaucuaagccaacugaauu

SEQ ID NO: 13098 - RNA, 21 nt, RNAi
uuugguagauucgguugacuu

SEQ ID NO: 13099 - DNA, 21 bp, homo sapiens
aaccatctaagccaactgaaa

SEQ ID NO: 13100 - RNA, 21 nt, RNAi
ccaucuaagccaacugaaauu

SEQ ID NO: 13101 - RNA, 21 nt, RNAi
uugguagauucgguugacuuu

SEQ ID NO: 13102 - DNA, 21 bp, homo sapiens
aaagagtctaaggaacagctt

SEQ ID NO: 13103 - RNA, 21 nt, RNAi
agagucuaaggaacagcuuuu

SEQ ID NO: 13104 - RNA, 21 nt, RNAi
uuucucagauuccuugucgaa

SEQ ID NO: 13105 - DNA, 21 bp, homo sapiens
aaactctctgacagtctagga

SEQ ID NO: 13106 - RNA, 21 nt, RNAi
acucucugacagucuaggauu

SEQ ID NO: 13107 - RNA, 21 nt, RNAi
uuugagagacugucagauccu

SEQ ID NO: 13108 - DNA, 21 bp, homo sapiens
aactctctgacagtctaggac

SEQ ID NO: 13109 - RNA, 21 nt, RNAi
cucucugacagucuaggacuu

SEQ ID NO: 13110 - RNA, 21 nt, RNAi
uugagagacugucagauccug

SEQ ID NO: 13111 - DNA, 21 bp, homo sapiens
aaagctgaacatagagacaag

SEQ ID NO: 13112 - RNA, 21 nt, RNAi
agcugaacauagagacaaguu

SEQ ID NO: 13113 - RNA, 21 nt, RNAi
uuucgacuuguaucucuguuc

SEQ ID NO: 13114 - DNA, 21 bp, homo sapiens
aagctgaacatagagacaagc

SEQ ID NO: 13115 - RNA, 21 nt, RNAi
gcugaacauagagacaagcuu

SEQ ID NO: 13116 - RNA, 21 nt, RNAi
uucgacuuguaucucuguucg

SEQ ID NO: 13117 - DNA, 21 bp, homo sapiens
aaaccagtgaagccacctaca

SEQ ID NO: 13118 - RNA, 21 nt, RNAi
accagugaagccaccuacauu

SEQ ID NO: 13119 - RNA, 21 nt, RNAi
uuuggucacuucgguggaugu

SEQ ID NO: 13120 - DNA, 21 bp, homo sapiens
aaagaaacctgcagatgacca

SEQ ID NO: 13121 - RNA, 21 nt, RNAi
agaaaccugcagaugaccauu

SEQ ID NO: 13122 - RNA, 21 nt, RNAi
uuucuuuggacgucuacuggu

SEQ ID NO: 13123 - DNA, 21 bp, homo sapiens
aagaaacctgcagatgaccaa

SEQ ID NO: 13124 - RNA, 21 nt, RNAi
gaaaccugcagaugaccaauu

SEQ ID NO: 13125 - RNA, 21 nt, RNAi
uucuuuggacgucuacugguu

SEQ ID NO: 13126 - DNA, 21 bp, homo sapiens
cagatacaggaagtaacgatg

SEQ ID NO: 13127 - RNA, 21 nt, RNAi
gauacaggaaguaacgauguu

SEQ ID NO: 13128 - RNA, 21 nt, RNAi
uucuauguccuucauugcuac

SEQ ID NO: 13129 - DNA, 21 bp, homo sapiens
caggaagtaacgatgctcaca

SEQ ID NO: 13130 - RNA, 21 nt, RNAi
ggaaguaacgaugcucacauu

SEQ ID NO: 13131 - RNA, 21 nt, RNAi
uuccuucauugcuacgagugu

SEQ ID NO: 13132 - DNA, 21 bp, homo sapiens
cagctgtgccagttgaatcta

SEQ ID NO: 13133 - RNA, 21 nt, RNAi
gcugugccaguugaaucuauu

SEQ ID NO: 13134 - RNA, 21 nt, RNAi
uucgacacggucaacuuagau

SEQ ID NO: 13135 - DNA, 21 bp, homo sapiens
cagttgaatctaaaccggata

SEQ ID NO: 13136 - RNA, 21 nt, RNAi
guugaaucuaaaccggauauu

SEQ ID NO: 13137 - RNA, 21 nt, RNAi
uucaacuuagauuuggccuau

SEQ ID NO: 13138 - DNA, 21 bp, homo sapiens
caacgtatactggaccagaag

SEQ ID NO: 13139 - RNA, 21 nt, RNAi
acguauacuggaccagaaguu

SEQ ID NO: 13140 - RNA, 21 nt, RNAi
uuugcauaugaccuggucuuc

SEQ ID NO: 13141 - DNA, 21 bp, homo sapiens
cagatccaatgagttccacct

SEQ ID NO: 13142 - RNA, 21 nt, RNAi
gauccaaugaguuccaccuuu

SEQ ID NO: 13143 - RNA, 21 nt, RNAi
uucuagguuacucaaggugga

SEQ ID NO: 13144 - DNA, 21 bp, homo sapiens
caattaaggaagtcgatgagg

SEQ ID NO: 13145 - RNA, 21 nt, RNAi
auuaaggaagucgaugagguu

SEQ ID NO: 13146 - RNA, 21 nt, RNAi
uuuaauuccuucagcuacucc

SEQ ID NO: 13147 - DNA, 21 bp, homo sapiens
cagccacggataaagatggaa

SEQ ID NO: 13148 - RNA, 21 nt, RNAi
gccacggauaaagauggaauu

SEQ ID NO: 13149 - RNA, 21 nt, RNAi
uucggugccuauuucuaccuu

SEQ ID NO: 13150 - DNA, 21 bp, homo sapiens
caagcctcggagtgaatcaga

SEQ ID NO: 13151 - RNA, 21 nt, RNAi
agccucggagugaaucagauu

SEQ ID NO: 13152 - RNA, 21 nt, RNAi
uuucggagccucacuuagucu

SEQ ID NO: 13153 - DNA, 21 bp, homo sapiens
cagaagaatctaaggccgctg

SEQ ID NO: 13154 - RNA, 21 nt, RNAi
gaagaaucuaaggccgcuguu

SEQ ID NO: 13155 - RNA, 21 nt, RNAi
uucuucuuagauuccggcgac

SEQ ID NO: 13156 - DNA, 21 bp, homo sapiens
caggacaaaccagtgaagcca

SEQ ID NO: 13157 - RNA, 21 nt, RNAi
ggacaaaccagugaagccauu

SEQ ID NO: 13158 - RNA, 21 nt, RNAi
uuccuguuuggucacuucggu

SEQ ID NO: 13159 - DNA, 21 bp, homo sapiens
caaaccagtgaagccacctac

SEQ ID NO: 13160 - RNA, 21 nt, RNAi
aaccagugaagccaccuacuu

SEQ ID NO: 13161 - RNA, 21 nt, RNAi
uuuuggucacuucgguggaug

SEQ ID NO: 13162 - DNA, 21 bp, homo sapiens
caaagaaacctgcagatgacc

SEQ ID NO: 13163 - RNA, 21 nt, RNAi
aagaaaccugcagaugaccuu

SEQ ID NO: 13164 - RNA, 21 nt, RNAi
uuuucuuuggacgucuacugg

SEQ ID NO: 13165 - DNA, 21 bp, homo sapiens
cattgatgctctctcaggaga

SEQ ID NO: 13166 - RNA, 21 nt, RNAi
uugaugcucucucaggagauu

SEQ ID NO: 13167 - RNA, 21 nt, RNAi
uuaacuacgagagaguccucu

SEQ ID NO: 13168 - DNA, 21 bp, homo sapiens
cacagcaaaggataagtgcaa

SEQ ID NO: 13169 - RNA, 21 nt, RNAi
cagcaaaggauaagugcaauu

SEQ ID NO: 13170 - RNA, 21 nt, RNAi
uugucguuuccuauucacguu

SEQ ID NO: 13171 - DNA, 21 bp, homo sapiens
gatacaggaagtaacgatgct

SEQ ID NO: 13172 - RNA, 21 nt, RNAi
uacaggaaguaacgaugcuuu

SEQ ID NO: 13173 - RNA, 21 nt, RNAi
uuauguccuucauugcuacga

SEQ ID NO: 13174 - DNA, 21 bp, homo sapiens
gaagtaacgatgctcacaata

SEQ ID NO: 13175 - RNA, 21 nt, RNAi
aguaacgaugcucacaauauu

SEQ ID NO: 13176 - RNA, 21 nt, RNAi
uuucauugcuacgaguguuau

SEQ ID NO: 13177 - DNA, 21 bp, homo sapiens
gactaaaccacaagacatgat

SEQ ID NO: 13178 - RNA, 21 nt, RNAi
cuaaaccacaagacaugauuu

SEQ ID NO: 13179 - RNA, 21 nt, RNAi
uugauuugguguucuguacua

SEQ ID NO: 13180 - DNA, 21 bp, homo sapiens
gagagagtgttgctggtatca

SEQ ID NO: 13181 - RNA, 21 nt, RNAi
gagaguguugcugguaucauu

SEQ ID NO: 13182 - RNA, 21 nt, RNAi
uucucucacaacgaccauagu

SEQ ID NO: 13183 - DNA, 21 bp, homo sapiens
gagagtgttgctggtatcact

SEQ ID NO: 13184 - RNA, 21 nt, RNAi
gaguguugcugguaucacuuu

SEQ ID NO: 13185 - RNA, 21 nt, RNAi
uucucacaacgaccauaguga

SEQ ID NO: 13186 - DNA, 21 bp, homo sapiens
gagtgttgctggtatcactgc

SEQ ID NO: 13187 - RNA, 21 nt, RNAi
guguugcugguaucacugcuu

SEQ ID NO: 13188 - RNA, 21 nt, RNAi
uucacaacgaccauagugacg

SEQ ID NO: 13189 - DNA, 21 bp, homo sapiens
gaatctaaaccggataaacca

SEQ ID NO: 13190 - RNA, 21 nt, RNAi
aucuaaaccggauaaaccauu

SEQ ID NO: 13191 - RNA, 21 nt, RNAi
uuuagauuuggccuauuuggu

SEQ ID NO: 13192 - DNA, 21 bp, homo sapiens
gaagtttcagatccaatgagt

SEQ ID NO: 13193 - RNA, 21 nt, RNAi
aguuucagauccaaugaguuu

SEQ ID NO: 13194 - RNA, 21 nt, RNAi
uuucaaagucuagguuacuca

SEQ ID NO: 13195 - DNA, 21 bp, homo sapiens
gatccaatgagttccacctac

SEQ ID NO: 13196 - RNA, 21 nt, RNAi
uccaaugaguuccaccuacuu

SEQ ID NO: 13197 - RNA, 21 nt, RNAi
uuagguuacucaagguggaug

SEQ ID NO: 13198 - DNA, 21 bp, homo sapiens
gatgatgctatagacgccttg

SEQ ID NO: 13199 - RNA, 21 nt, RNAi
ugaugcuauagacgccuuguu

SEQ ID NO: 13200 - RNA, 21 nt, RNAi
uuacuacgauaucugcggaac

SEQ ID NO: 13201 - DNA, 21 bp, homo sapiens
gatgctatagacgccttgtca

SEQ ID NO: 13202 - RNA, 21 nt, RNAi
ugcuauagacgccuugucauu

SEQ ID NO: 13203 - RNA, 21 nt, RNAi
uuacgauaucugcggaacagu

SEQ ID NO: 13204 - DNA, 21 bp, homo sapiens
gatacaatgagtgatcaagca

SEQ ID NO: 13205 - RNA, 21 nt, RNAi
uacaaugagugaucaagcauu

SEQ ID NO: 13206 - RNA, 21 nt, RNAi
uuauguuacucacuaguucgu

SEQ ID NO: 13207 - DNA, 21 bp, homo sapiens
gacctccgctcaattaaggaa

SEQ ID NO: 13208 - RNA, 21 nt, RNAi
ccuccgcucaauuaaggaauu

SEQ ID NO: 13209 - RNA, 21 nt, RNAi
uuggaggcgaguuaauuccuu

SEQ ID NO: 13210 - DNA, 21 bp, homo sapiens
gagaaaccatctaagccaact

SEQ ID NO: 13211 - RNA, 21 nt, RNAi
gaaaccaucuaagccaacuuu

SEQ ID NO: 13212 - RNA, 21 nt, RNAi
uucuuugguagauucgguuga

SEQ ID NO: 13213 - DNA, 21 bp, homo sapiens
gaaaccatctaagccaactga

SEQ ID NO: 13214 - RNA, 21 nt, RNAi
aaccaucuaagccaacugauu

SEQ ID NO: 13215 - RNA, 21 nt, RNAi
uuuugguagauucgguugacu

SEQ ID NO: 13216 - DNA, 21 bp, homo sapiens
gacagaagaatctaaggccgc

SEQ ID NO: 13217 - RNA, 21 nt, RNAi
cagaagaaucuaaggccgcuu

SEQ ID NO: 13218 - RNA, 21 nt, RNAi
uugucuucuuagauuccggcg

SEQ ID NO: 13219 - DNA, 21 bp, homo sapiens
gaagaatctaaggccgctgct

SEQ ID NO: 13220 - RNA, 21 nt, RNAi
agaaucuaaggccgcugcuuu

SEQ ID NO: 13221 - RNA, 21 nt, RNAi
uuucuuagauuccggcgacga

SEQ ID NO: 13222 - DNA, 21 bp, homo sapiens
gacctccatgtgtagtataca

SEQ ID NO: 13223 - RNA, 21 nt, RNAi
ccuccauguguaguauacauu

SEQ ID NO: 13224 - RNA, 21 nt, RNAi
uuggagguacacaucauaugu

SEQ ID NO: 13225 - DNA, 21 bp, homo sapiens
gatacctcgcagagtgacaaa

SEQ ID NO: 13226 - RNA, 21 nt, RNAi
uaccucgcagagugacaaauu

SEQ ID NO: 13227 - RNA, 21 nt, RNAi
uuauggagcgucucacuguuu

SEQ ID NO: 13228 - DNA, 21 bp, homo sapiens
gagtgacaaagacctcgatga

SEQ ID NO: 13229 - RNA, 21 nt, RNAi
gugacaaagaccucgaugauu

SEQ ID NO: 13230 - RNA, 21 nt, RNAi
uucacuguuucuggagcuacu

SEQ ID NO: 13231 - DNA, 21 bp, homo sapiens
gataaactctctgacagtcta

SEQ ID NO: 13232 - RNA, 21 nt, RNAi
uaaacucucugacagucuauu

SEQ ID NO: 13233 - RNA, 21 nt, RNAi
uuauuugagagacugucagau

SEQ ID NO: 13234 - DNA, 21 bp, homo sapiens
gaacatagagacaagcttgga

SEQ ID NO: 13235 - RNA, 21 nt, RNAi
acauagagacaagcuuggauu

SEQ ID NO: 13236 - RNA, 21 nt, RNAi
uuuguaucucuguucgaaccu

SEQ ID NO: 13237 - DNA, 21 bp, homo sapiens
gataatggacaggacaaacca

SEQ ID NO: 13238 - RNA, 21 nt, RNAi
uaauggacaggacaaaccauu

SEQ ID NO: 13239 - RNA, 21 nt, RNAi
uuauuaccuguccuguuuggu

SEQ ID NO: 13240 - DNA, 21 bp, homo sapiens
gacaggacaaaccagtgaagc

SEQ ID NO: 13241 - RNA, 21 nt, RNAi
caggacaaaccagugaagcuu

SEQ ID NO: 13242 - RNA, 21 nt, RNAi
uuguccuguuuggucacuucg

SEQ ID NO: 13243 - DNA, 21 bp, homo sapiens
gacaaaccagtgaagccacct

SEQ ID NO: 13244 - RNA, 21 nt, RNAi
caaaccagugaagccaccuuu

SEQ ID NO: 13245 - RNA, 21 nt, RNAi
uuguuuggucacuucggugga

SEQ ID NO: 13246 - DNA, 21 bp, homo sapiens
tacaggaagtaacgatgctca

SEQ ID NO: 13247 - RNA, 21 nt, RNAi
caggaaguaacgaugcucauu

SEQ ID NO: 13248 - RNA, 21 nt, RNAi
uuguccuucauugcuacgagu

SEQ ID NO: 13249 - DNA, 21 bp, homo sapiens
taatagatactttaggaggac

SEQ ID NO: 13250 - RNA, 21 nt, RNAi
auagauacuuuaggaggacuu

SEQ ID NO: 13251 - RNA, 21 nt, RNAi
uuuaucuaugaaauccuccug

SEQ ID NO: 13252 - DNA, 21 bp, homo sapiens
tacaacgtatactggaccaga

SEQ ID NO: 13253 - RNA, 21 nt, RNAi
caacguauacuggaccagauu

SEQ ID NO: 13254 - RNA, 21 nt, RNAi
uuguugcauaugaccuggucu

SEQ ID NO: 13255 - DNA, 21 bp, homo sapiens
tatagacgccttgtcatctga

SEQ ID NO: 13256 - RNA, 21 nt, RNAi
uagacgccuugucaucugauu

SEQ ID NO: 13257 - RNA, 21 nt, RNAi
uuaucugcggaacaguagacu

SEQ ID NO: 13258 - DNA, 21 bp, homo sapiens
tacaatgagtgatcaagcact

SEQ ID NO: 13259 - RNA, 21 nt, RNAi
caaugagugaucaagcacuuu

SEQ ID NO: 13260 - RNA, 21 nt, RNAi
uuguuacucacuaguucguga

SEQ ID NO: 13261 - DNA, 21 bp, homo sapiens
taaggaagtcgatgaggcaaa

SEQ ID NO: 13262 - RNA, 21 nt, RNAi
aggaagucgaugaggcaaauu

SEQ ID NO: 13263 - RNA, 21 nt, RNAi
uuuccuucagcuacuccguuu

SEQ ID NO: 13264 - DNA, 21 bp, homo sapiens
tacctcgcagagtgacaaaga

SEQ ID NO: 13265 - RNA, 21 nt, RNAi
ccucgcagagugacaaagauu

SEQ ID NO: 13266 - RNA, 21 nt, RNAi
uuggagcgucucacuguuucu

SEQ ID NO: 13267 - DNA, 21 bp, homo sapiens
taaactctctgacagtctagg

SEQ ID NO: 13268 - RNA, 21 nt, RNAi
aacucucugacagucuagguu

SEQ ID NO: 13269 - RNA, 21 nt, RNAi
uuuugagagacugucagaucc

SEQ ID NO: 13270 - DNA, 21 bp, homo sapiens
taaagctgaacatagagacaa

SEQ ID NO: 13271 - RNA, 21 nt, RNAi
aagcugaacauagagacaauu

SEQ ID NO: 13272 - RNA, 21 nt, RNAi
uuuucgacuuguaucucuguu

SEQ ID NO: 13273 - DNA, 21 bp, homo sapiens
aaggaggaggataggataatc

SEQ ID NO: 13274 - RNA, 21 nt, RNAi
ggaggaggauaggauaaucuu

SEQ ID NO: 13275 - RNA, 21 nt, RNAi
uuccuccuccuauccuauuag

SEQ ID NO: 13276 - DNA, 21 bp, homo sapiens
aacgcagacctcaatgatgag

SEQ ID NO: 13277 - RNA, 21 nt, RNAi
cgcagaccucaaugaugaguu

SEQ ID NO: 13278 - RNA, 21 nt, RNAi
uugcgucuggaguuacuacuc

SEQ ID NO: 13279 - DNA, 21 bp, homo sapiens
aacaaggccaccaaagatgac

SEQ ID NO: 13280 - RNA, 21 nt, RNAi
caaggccaccaaagaugacuu

SEQ ID NO: 13281 - RNA, 21 nt, RNAi
uuguuccggugguuucuacug

SEQ ID NO: 13282 - DNA, 21 bp, homo sapiens
aaggccaccaaagatgactac

SEQ ID NO: 13283 - RNA, 21 nt, RNAi
ggccaccaaagaugacuacuu

SEQ ID NO: 13284 - RNA, 21 nt, RNAi
uuccggugguuucuacugaug

SEQ ID NO: 13285 - DNA, 21 bp, homo sapiens
aaagatgactactacagacgt

SEQ ID NO: 13286 - RNA, 21 nt, RNAi
agaugacuacuacagacguuu

SEQ ID NO: 13287 - RNA, 21 nt, RNAi
uuucuacugaugaugucugca

SEQ ID NO: 13288 - DNA, 21 bp, homo sapiens
aagatgactactacagacgtc

SEQ ID NO: 13289 - RNA, 21 nt, RNAi
gaugacuacuacagacgucuu

SEQ ID NO: 13290 - RNA, 21 nt, RNAi
uucuacugaugaugucugcag

SEQ ID NO: 13291 - DNA, 21 bp, homo sapiens
aagagccaggcaacagaccgt

SEQ ID NO: 13292 - RNA, 21 nt, RNAi
gagccaggcaacagaccguuu

SEQ ID NO: 13293 - RNA, 21 nt, RNAi
uucucgguccguugucuggca

SEQ ID NO: 13294 - DNA, 21 bp, homo sapiens
aattacttcttcgacgtagag

SEQ ID NO: 13295 - RNA, 21 nt, RNAi
uuacuucuucgacguagaguu

SEQ ID NO: 13296 - RNA, 21 nt, RNAi
uuaaugaagaagcugcaucuc

SEQ ID NO: 13297 - DNA, 21 bp, homo sapiens
aacttggacacctgtgccttc

SEQ ID NO: 13298 - RNA, 21 nt, RNAi
cuuggacaccugugccuucuu

SEQ ID NO: 13299 - RNA, 21 nt, RNAi
uugaaccuguggacacggaag

SEQ ID NO: 13300 - DNA, 21 bp, homo sapiens
aacagccagaactgcagaaga

SEQ ID NO: 13301 - RNA, 21 nt, RNAi
cagccagaacugcagaagauu

SEQ ID NO: 13302 - RNA, 21 nt, RNAi
uugucggucuugacgucuucu

SEQ ID NO: 13303 - DNA, 21 bp, homo sapiens
aactgcagaagaaacagttgt

SEQ ID NO: 13304 - RNA, 21 nt, RNAi
cugcagaagaaacaguuguuu

SEQ ID NO: 13305 - RNA, 21 nt, RNAi
uugacgucuucuuugucaaca

SEQ ID NO: 13306 - DNA, 21 bp, homo sapiens
aagaaacagttgtgctctttc

SEQ ID NO: 13307 - RNA, 21 nt, RNAi
gaaacaguugugcucuuucuu

SEQ ID NO: 13308 - RNA, 21 nt, RNAi
uucuuugucaacacgagaaag

SEQ ID NO: 13309 - DNA, 21 bp, homo sapiens
aaacagttgtgctctttcgag

SEQ ID NO: 13310 - RNA, 21 nt, RNAi
acaguugugcucuuucgaguu

SEQ ID NO: 13311 - RNA, 21 nt, RNAi
uuugucaacacgagaaagcuc

SEQ ID NO: 13312 - DNA, 21 bp, homo sapiens
aacagttgtgctctttcgaga

SEQ ID NO: 13313 - RNA, 21 nt, RNAi
caguugugcucuuucgagauu

SEQ ID NO: 13314 - RNA, 21 nt, RNAi
uugucaacacgagaaagcucu

SEQ ID NO: 13315 - DNA, 21 bp, homo sapiens
aaatccaggtgtcaagaatcc

SEQ ID NO: 13316 - RNA, 21 nt, RNAi
auccaggugucaagaauccuu

SEQ ID NO: 13317 - RNA, 21 nt, RNAi
uuuagguccacaguucuuagg

SEQ ID NO: 13318 - DNA, 21 bp, homo sapiens
aatccaggtgtcaagaatcct

SEQ ID NO: 13319 - RNA, 21 nt, RNAi
uccaggugucaagaauccuuu

SEQ ID NO: 13320 - RNA, 21 nt, RNAi
uuagguccacaguucuuagga

SEQ ID NO: 13321 - DNA, 21 bp, homo sapiens
aagagacagacagagaaggct

SEQ ID NO: 13322 - RNA, 21 nt, RNAi
gagacagacagagaaggcuuu

SEQ ID NO: 13323 - RNA, 21 nt, RNAi
uucucugucugucucuuccga

SEQ ID NO: 13324 - DNA, 21 bp, homo sapiens
aaggctgcaggagtcctttgt

SEQ ID NO: 13325 - RNA, 21 nt, RNAi
ggcugcaggaguccuuuguuu

SEQ ID NO: 13326 - RNA, 21 nt, RNAi
uuccgacguccucaggaaaca

SEQ ID NO: 13327 - DNA, 21 bp, homo sapiens
aattaaacagtagcatcgcct

SEQ ID NO: 13328 - RNA, 21 nt, RNAi
uuaaacaguagcaucgccuuu

SEQ ID NO: 13329 - RNA, 21 nt, RNAi
uuaauuugucaucguagcgga

SEQ ID NO: 13330 - DNA, 21 bp, homo sapiens
cagctccagctttgtgctctg

SEQ ID NO: 13331 - RNA, 21 nt, RNAi
gcuccagcuuugugcucuguu

SEQ ID NO: 13332 - RNA, 21 nt, RNAi
uucgaggucgaaacacgagac

SEQ ID NO: 13333 - DNA, 21 bp, homo sapiens
cagctttgtgctctgcctctg

SEQ ID NO: 13334 - RNA, 21 nt, RNAi
gcuuugugcucugccucuguu

SEQ ID NO: 13335 - RNA, 21 nt, RNAi
uucgaaacacgagacggagac

SEQ ID NO: 13336 - DNA, 21 bp, homo sapiens
caaggaggaggataggataat

SEQ ID NO: 13337 - RNA, 21 nt, RNAi
aggaggaggauaggauaauuu

SEQ ID NO: 13338 - RNA, 21 nt, RNAi
uuuccuccuccuauccuauua

SEQ ID NO: 13339 - DNA, 21 bp, homo sapiens
catctataacgcagacctcaa

SEQ ID NO: 13340 - RNA, 21 nt, RNAi
ucuauaacgcagaccucaauu

SEQ ID NO: 13341 - RNA, 21 nt, RNAi
uuagauauugcgucuggaguu

SEQ ID NO: 13342 - DNA, 21 bp, homo sapiens
cacttcgccatcagcgagtat

SEQ ID NO: 13343 - RNA, 21 nt, RNAi
cuucgccaucagcgaguauuu

SEQ ID NO: 13344 - RNA, 21 nt, RNAi
uugaagcgguagucgcucaua

SEQ ID NO: 13345 - DNA, 21 bp, homo sapiens
catcagcgagtataacaaggc

SEQ ID NO: 13346 - RNA, 21 nt, RNAi
ucagcgaguauaacaaggcuu

SEQ ID NO: 13347 - RNA, 21 nt, RNAi
uuagucgcucauauuguuccg

SEQ ID NO: 13348 - DNA, 21 bp, homo sapiens
cagcgagtataacaaggccac

SEQ ID NO: 13349 - RNA, 21 nt, RNAi
gcgaguauaacaaggccacuu

SEQ ID NO: 13350 - RNA, 21 nt, RNAi
uucgcucauauuguuccggug

SEQ ID NO: 13351 - DNA, 21 bp, homo sapiens
caaggccaccaaagatgacta

SEQ ID NO: 13352 - RNA, 21 nt, RNAi
aggccaccaaagaugacuauu

SEQ ID NO: 13353 - RNA, 21 nt, RNAi
uuuccggugguuucuacugau

SEQ ID NO: 13354 - DNA, 21 bp, homo sapiens
caccaaagatgactactacag

SEQ ID NO: 13355 - RNA, 21 nt, RNAi
ccaaagaugacuacuacaguu

SEQ ID NO: 13356 - RNA, 21 nt, RNAi
uugguuucuacugaugauguc

SEQ ID NO: 13357 - DNA, 21 bp, homo sapiens
caaagatgactactacagacg

SEQ ID NO: 13358 - RNA, 21 nt, RNAi
aagaugacuacuacagacguu

SEQ ID NO: 13359 - RNA, 21 nt, RNAi
uuuucuacugaugaugucugc

SEQ ID NO: 13360 - DNA, 21 bp, homo sapiens
caacttggacacctgtgcctt

SEQ ID NO: 13361 - RNA, 21 nt, RNAi
acuuggacaccugugccuuuu

SEQ ID NO: 13362 - RNA, 21 nt, RNAi
uuugaaccuguggacacggaa

SEQ ID NO: 13363 - DNA, 21 bp, homo sapiens
cacctgtgccttccatgaaca

SEQ ID NO: 13364 - RNA, 21 nt, RNAi
ccugugccuuccaugaacauu

SEQ ID NO: 13365 - RNA, 21 nt, RNAi
uuggacacggaagguacuugu

SEQ ID NO: 13366 - DNA, 21 bp, homo sapiens
catgaacagccagaactgcag

SEQ ID NO: 13367 - RNA, 21 nt, RNAi
ugaacagccagaacugcaguu

SEQ ID NO: 13368 - RNA, 21 nt, RNAi
uuacuugucggucuugacguc

SEQ ID NO: 13369 - DNA, 21 bp, homo sapiens
cagccagaactgcagaagaaa

SEQ ID NO: 13370 - RNA, 21 nt, RNAi
gccagaacugcagaagaaauu

SEQ ID NO: 13371 - RNA, 21 nt, RNAi
uucggucuugacgucuucuuu

SEQ ID NO: 13372 - DNA, 21 bp, homo sapiens
cagaactgcagaagaaacagt

SEQ ID NO: 13373 - RNA, 21 nt, RNAi
gaacugcagaagaaacaguuu

SEQ ID NO: 13374 - RNA, 21 nt, RNAi
uucuugacgucuucuuuguca

SEQ ID NO: 13375 - DNA, 21 bp, homo sapiens
cagaagaaacagttgtgctct

SEQ ID NO: 13376 - RNA, 21 nt, RNAi
gaagaaacaguugugcucuuu

SEQ ID NO: 13377 - RNA, 21 nt, RNAi
uucuucuuugucaacacgaga

SEQ ID NO: 13378 - DNA, 21 bp, homo sapiens
cagttgtgctctttcgagatc

SEQ ID NO: 13379 - RNA, 21 nt, RNAi
guugugcucuuucgagaucuu

SEQ ID NO: 13380 - RNA, 21 nt, RNAi
uucaacacgagaaagcucuag

SEQ ID NO: 13381 - DNA, 21 bp, homo sapiens
catgtgcctgcgccaagagac

SEQ ID NO: 13382 - RNA, 21 nt, RNAi
ugugccugcgccaagagacuu

SEQ ID NO: 13383 - RNA, 21 nt, RNAi
uuacacggacgcgguucucug

SEQ ID NO: 13384 - DNA, 21 bp, homo sapiens
caagagacagacagagaaggc

SEQ ID NO: 13385 - RNA, 21 nt, RNAi
agagacagacagagaaggcuu

SEQ ID NO: 13386 - RNA, 21 nt, RNAi
uuucucugucugucucuuccg

SEQ ID NO: 13387 - DNA, 21 bp, homo sapiens
cagacagagaaggctgcagga

SEQ ID NO: 13388 - RNA, 21 nt, RNAi
gacagagaaggcugcaggauu

SEQ ID NO: 13389 - RNA, 21 nt, RNAi
uucugucucuuccgacguccu

SEQ ID NO: 13390 - DNA, 21 bp, homo sapiens
cagagaaggctgcaggagtcc

SEQ ID NO: 13391 - RNA, 21 nt, RNAi
gagaaggcugcaggaguccuu

SEQ ID NO: 13392 - RNA, 21 nt, RNAi
uucucuuccgacguccucagg

SEQ ID NO: 13393 - DNA, 21 bp, homo sapiens
caggagtcctttgttgctcag

SEQ ID NO: 13394 - RNA, 21 nt, RNAi
ggaguccuuuguugcucaguu

SEQ ID NO: 13395 - RNA, 21 nt, RNAi
uuccucaggaaacaacgaguc

SEQ ID NO: 13396 - DNA, 21 bp, homo sapiens
cacctcctgcaattaaacagt

SEQ ID NO: 13397 - RNA, 21 nt, RNAi
ccuccugcaauuaaacaguuu

SEQ ID NO: 13398 - RNA, 21 nt, RNAi
uuggaggacguuaauuuguca

SEQ ID NO: 13399 - DNA, 21 bp, homo sapiens
caattaaacagtagcatcgcc

SEQ ID NO: 13400 - RNA, 21 nt, RNAi
auuaaacaguagcaucgccuu

SEQ ID NO: 13401 - RNA, 21 nt, RNAi
uuuaauuugucaucguagcgg

SEQ ID NO: 13402 - DNA, 21 bp, homo sapiens
gagtataacaaggccaccaaa

SEQ ID NO: 13403 - RNA, 21 nt, RNAi
guauaacaaggccaccaaauu

SEQ ID NO: 13404 - RNA, 21 nt, RNAi
uucauauuguuccggugguuu

SEQ ID NO: 13405 - DNA, 21 bp, homo sapiens
gatgactactacagacgtccg

SEQ ID NO: 13406 - RNA, 21 nt, RNAi
ugacuacuacagacguccguu

SEQ ID NO: 13407 - RNA, 21 nt, RNAi
uuacugaugaugucugcaggc

SEQ ID NO: 13408 - DNA, 21 bp, homo sapiens
gactactacagacgtccgctg

SEQ ID NO: 13409 - RNA, 21 nt, RNAi
cuacuacagacguccgcuguu

SEQ ID NO: 13410 - RNA, 21 nt, RNAi
uugaugaugucugcaggcgac

SEQ ID NO: 13411 - DNA, 21 bp, homo sapiens
gagccaggcaacagaccgttg

SEQ ID NO: 13412 - RNA, 21 nt, RNAi
gccaggcaacagaccguuguu

SEQ ID NO: 13413 - RNA, 21 nt, RNAi
uucgguccguugucuggcaac

SEQ ID NO: 13414 - DNA, 21 bp, homo sapiens
gaattacttcttcgacgtaga

SEQ ID NO: 13415 - RNA, 21 nt, RNAi
auuacuucuucgacguagauu

SEQ ID NO: 13416 - RNA, 21 nt, RNAi
uuuaaugaagaagcugcaucu

SEQ ID NO: 13417 - DNA, 21 bp, homo sapiens
gacacctgtgccttccatgaa

SEQ ID NO: 13418 - RNA, 21 nt, RNAi
caccugugccuuccaugaauu

SEQ ID NO: 13419 - RNA, 21 nt, RNAi
uuguggacacggaagguacuu

SEQ ID NO: 13420 - DNA, 21 bp, homo sapiens
gaacagccagaactgcagaag

SEQ ID NO: 13421 - RNA, 21 nt, RNAi
acagccagaacugcagaaguu

SEQ ID NO: 13422 - RNA, 21 nt, RNAi
uuugucggucuugacgucuuc

SEQ ID NO: 13423 - DNA, 21 bp, homo sapiens
gaactgcagaagaaacagttg

SEQ ID NO: 13424 - RNA, 21 nt, RNAi
acugcagaagaaacaguuguu

SEQ ID NO: 13425 - RNA, 21 nt, RNAi
uuugacgucuucuuugucaac

SEQ ID NO: 13426 - DNA, 21 bp, homo sapiens
gaagaaacagttgtgctcttt

SEQ ID NO: 13427 - RNA, 21 nt, RNAi
agaaacaguugugcucuuuuu

SEQ ID NO: 13428 - RNA, 21 nt, RNAi
uuucuuugucaacacgagaaa

SEQ ID NO: 13429 - DNA, 21 bp, homo sapiens
gaaacagttgtgctctttcga

SEQ ID NO: 13430 - RNA, 21 nt, RNAi
aacaguugugcucuuucgauu

SEQ ID NO: 13431 - RNA, 21 nt, RNAi
uuuugucaacacgagaaagcu

SEQ ID NO: 13432 - DNA, 21 bp, homo sapiens
gaaatccaggtgtcaagaatc

SEQ ID NO: 13433 - RNA, 21 nt, RNAi
aauccaggugucaagaaucuu

SEQ ID NO: 13434 - RNA, 21 nt, RNAi
uuuuagguccacaguucuuag

SEQ ID NO: 13435 - DNA, 21 bp, homo sapiens
gatctgtgccaggccattcgc

SEQ ID NO: 13436 - RNA, 21 nt, RNAi
ucugugccaggccauucgcuu

SEQ ID NO: 13437 - RNA, 21 nt, RNAi
uuagacacgguccgguaagcg

SEQ ID NO: 13438 - DNA, 21 bp, homo sapiens
gagacagacagagaaggctgc

SEQ ID NO: 13439 - RNA, 21 nt, RNAi
gacagacagagaaggcugcuu

SEQ ID NO: 13440 - RNA, 21 nt, RNAi
uucugucugucucuuccgacg

SEQ ID NO: 13441 - DNA, 21 bp, homo sapiens
gacagacagagaaggctgcag

SEQ ID NO: 13442 - RNA, 21 nt, RNAi
cagacagagaaggcugcaguu

SEQ ID NO: 13443 - RNA, 21 nt, RNAi
uugucugucucuuccgacguc

SEQ ID NO: 13444 - DNA, 21 bp, homo sapiens
gacagagaaggctgcaggagt

SEQ ID NO: 13445 - RNA, 21 nt, RNAi
cagagaaggcugcaggaguuu

SEQ ID NO: 13446 - RNA, 21 nt, RNAi
uugucucuuccgacguccuca

SEQ ID NO: 13447 - DNA, 21 bp, homo sapiens
gagaaggctgcaggagtcctt

SEQ ID NO: 13448 - RNA, 21 nt, RNAi
gaaggcugcaggaguccuuuu

SEQ ID NO: 13449 - RNA, 21 nt, RNAi
uucuuccgacguccucaggaa

SEQ ID NO: 13450 - DNA, 21 bp, homo sapiens
gaaggctgcaggagtcctttg

SEQ ID NO: 13451 - RNA, 21 nt, RNAi
aggcugcaggaguccuuuguu

SEQ ID NO: 13452 - RNA, 21 nt, RNAi
uuuccgacguccucaggaaac

SEQ ID NO: 13453 - DNA, 21 bp, homo sapiens
gagtcctttgttgctcagcag

SEQ ID NO: 13454 - RNA, 21 nt, RNAi
guccuuuguugcucagcaguu

SEQ ID NO: 13455 - RNA, 21 nt, RNAi
uucaggaaacaacgagucguc

SEQ ID NO: 13456 - DNA, 21 bp, homo sapiens
tataacgcagacctcaatgat

SEQ ID NO: 13457 - RNA, 21 nt, RNAi
uaacgcagaccucaaugauuu

SEQ ID NO: 13458 - RNA, 21 nt, RNAi
uuauugcgucuggaguuacua

SEQ ID NO: 13459 - DNA, 21 bp, homo sapiens
taacgcagacctcaatgatga

SEQ ID NO: 13460 - RNA, 21 nt, RNAi
acgcagaccucaaugaugauu

SEQ ID NO: 13461 - RNA, 21 nt, RNAi
uuugcgucuggaguuacuacu

SEQ ID NO: 13462 - DNA, 21 bp, homo sapiens
tataacaaggccaccaaagat

SEQ ID NO: 13463 - RNA, 21 nt, RNAi
uaacaaggccaccaaagauuu

SEQ ID NO: 13464 - RNA, 21 nt, RNAi
uuauuguuccggugguuucua

SEQ ID NO: 13465 - DNA, 21 bp, homo sapiens
taacaaggccaccaaagatga

SEQ ID NO: 13466 - RNA, 21 nt, RNAi
acaaggccaccaaagaugauu

SEQ ID NO: 13467 - RNA, 21 nt, RNAi
uuuguuccggugguuucuacu

SEQ ID NO: 13468 - DNA, 21 bp, homo sapiens
tactacagacgtccgctgcgg

SEQ ID NO: 13469 - RNA, 21 nt, RNAi
cuacagacguccgcugcgguu

SEQ ID NO: 13470 - RNA, 21 nt, RNAi
uugaugucugcaggcgacgcc

SEQ ID NO: 13471 - DNA, 21 bp, homo sapiens
tactaagagccaggcaacaga

SEQ ID NO: 13472 - RNA, 21 nt, RNAi
cuaagagccaggcaacagauu

SEQ ID NO: 13473 - RNA, 21 nt, RNAi
uugauucucgguccguugucu

SEQ ID NO: 13474 - DNA, 21 bp, homo sapiens
taagagccaggcaacagaccg

SEQ ID NO: 13475 - RNA, 21 nt, RNAi
agagccaggcaacagaccguu

SEQ ID NO: 13476 - RNA, 21 nt, RNAi
uuucucgguccguugucuggc

SEQ ID NO: 13477 - DNA, 21 bp, homo sapiens
tacttcttcgacgtagaggtg

SEQ ID NO: 13478 - RNA, 21 nt, RNAi
cuucuucgacguagagguguu

SEQ ID NO: 13479 - RNA, 21 nt, RNAi
uugaagaagcugcaucuccac

SEQ ID NO: 13480 - DNA, 21 bp, homo sapiens
aaagatgactactacagacgt

SEQ ID NO: 13481 - RNA, 21 nt, RNAi
agaugacuacuacagacguuu

SEQ ID NO: 13482 - RNA, 21 nt, RNAi
uuucuacugaugaugucugca

SEQ ID NO: 13483 - DNA, 21 bp, homo sapiens
aagatgactactacagacgtc

SEQ ID NO: 13484 - RNA, 21 nt, RNAi
gaugacuacuacagacgucuu

SEQ ID NO: 13485 - RNA, 21 nt, RNAi
uucuacugaugaugucugcag

SEQ ID NO: 13486 - DNA, 21 bp, homo sapiens
gatgactactacagacgtccg

SEQ ID NO: 13487 - RNA, 21 nt, RNAi
ugacuacuacagacguccguu

SEQ ID NO: 13488 - RNA, 21 nt, RNAi
uuacugaugaugucugcaggc

SEQ ID NO: 13489 - DNA, 21 bp, homo sapiens
aaactggtctgatcggacttc

SEQ ID NO: 13490 - RNA, 21 nt, RNAi
acuggucugaucggacuucuu

SEQ ID NO: 13491 - RNA, 21 nt, RNAi
uuugaccagacuagccugaag

SEQ ID NO: 13492 - DNA, 21 bp, homo sapiens
aactggtctgatcggacttct

SEQ ID NO: 13493 - RNA, 21 nt, RNAi
cuggucugaucggacuucuuu

SEQ ID NO: 13494 - RNA, 21 nt, RNAi
uugaccagacuagccugaaga

SEQ ID NO: 13495 - DNA, 21 bp, homo sapiens
aatctccgccttgaccggtgc

SEQ ID NO: 13496 - RNA, 21 nt, RNAi
ucuccgccuugaccggugcuu

SEQ ID NO: 13497 - RNA, 21 nt, RNAi
uuagaggcggaacuggccacg

SEQ ID NO: 13498 - DNA, 21 bp, homo sapiens
aaacaagcttaataggaacag

SEQ ID NO: 13499 - RNA, 21 nt, RNAi
acaagcuuaauaggaacaguu

SEQ ID NO: 13500 - RNA, 21 nt, RNAi
uuuguucgaauuauccuuguc

SEQ ID NO: 13501 - DNA, 21 bp, homo sapiens
aacaagcttaataggaacagc

SEQ ID NO: 13502 - RNA, 21 nt, RNAi
caagcuuaauaggaacagcuu

SEQ ID NO: 13503 - RNA, 21 nt, RNAi
uuguucgaauuauccuugucg

SEQ ID NO: 13504 - DNA, 21 bp, homo sapiens
aagcttaataggaacagctgc

SEQ ID NO: 13505 - RNA, 21 nt, RNAi
gcuuaauaggaacagcugcuu

SEQ ID NO: 13506 - RNA, 21 nt, RNAi
uucgaauuauccuugucgacg

SEQ ID NO: 13507 - DNA, 21 bp, homo sapiens
aataggaacagctgcctgtac

SEQ ID NO: 13508 - RNA, 21 nt, RNAi
uaggaacagcugccuguacuu

SEQ ID NO: 13509 - RNA, 21 nt, RNAi
uuauccuugucgacggacaug

SEQ ID NO: 13510 - DNA, 21 bp, homo sapiens
aacagctgcctgtacatcaac

SEQ ID NO: 13511 - RNA, 21 nt, RNAi
cagcugccuguacaucaacuu

SEQ ID NO: 13512 - RNA, 21 nt, RNAi
uugucgacggacauguaguug

SEQ ID NO: 13513 - DNA, 21 bp, homo sapiens
aagaaaggtgacagtcattga

SEQ ID NO: 13514 - RNA, 21 nt, RNAi
gaaaggugacagucauugauu

SEQ ID NO: 13515 - RNA, 21 nt, RNAi
uucuuuccacugucaguaacu

SEQ ID NO: 13516 - DNA, 21 bp, homo sapiens
aaaggtgacagtcattgagag

SEQ ID NO: 13517 - RNA, 21 nt, RNAi
aggugacagucauugagaguu

SEQ ID NO: 13518 - RNA, 21 nt, RNAi
uuuccacugucaguaacucuc

SEQ ID NO: 13519 - DNA, 21 bp, homo sapiens
aaggtgacagtcattgagaga

SEQ ID NO: 13520 - RNA, 21 nt, RNAi
ggugacagucauugagagauu

SEQ ID NO: 13521 - RNA, 21 nt, RNAi
uuccacugucaguaacucucu

SEQ ID NO: 13522 - DNA, 21 bp, homo sapiens
aaagagcctgacagaatagtt

SEQ ID NO: 13523 - RNA, 21 nt, RNAi
agagccugacagaauaguuuu

SEQ ID NO: 13524 - RNA, 21 nt, RNAi
uuucucggacugucuuaucaa

SEQ ID NO: 13525 - DNA, 21 bp, homo sapiens
aagagcctgacagaatagttg

SEQ ID NO: 13526 - RNA, 21 nt, RNAi
gagccugacagaauaguuguu

SEQ ID NO: 13527 - RNA, 21 nt, RNAi
uucucggacugucuuaucaac

SEQ ID NO: 13528 - DNA, 21 bp, homo sapiens
aatagttggagaattcctgca

SEQ ID NO: 13529 - RNA, 21 nt, RNAi
uaguuggagaauuccugcauu

SEQ ID NO: 13530 - RNA, 21 nt, RNAi
uuaucaaccucuuaaggacgu

SEQ ID NO: 13531 - DNA, 21 bp, homo sapiens
aaagaccttggtcttggagat

SEQ ID NO: 13532 - RNA, 21 nt, RNAi
agaccuuggucuuggagauuu

SEQ ID NO: 13533 - RNA, 21 nt, RNAi
uuucuggaaccagaaccucua

SEQ ID NO: 13534 - DNA, 21 bp, homo sapiens
aagaccttggtcttggagata

SEQ ID NO: 13535 - RNA, 21 nt, RNAi
gaccuuggucuuggagauauu

SEQ ID NO: 13536 - RNA, 21 nt, RNAi
uucuggaaccagaaccucuau

SEQ ID NO: 13537 - DNA, 21 bp, homo sapiens
aaagcaaatcagaggttcaga

SEQ ID NO: 13538 - RNA, 21 nt, RNAi
agcaaaucagagguucagauu

SEQ ID NO: 13539 - RNA, 21 nt, RNAi
uuucguuuagucuccaagucu

SEQ ID NO: 13540 - DNA, 21 bp, homo sapiens
aagcaaatcagaggttcagat

SEQ ID NO: 13541 - RNA, 21 nt, RNAi
gcaaaucagagguucagauuu

SEQ ID NO: 13542 - RNA, 21 nt, RNAi
uucguuuagucuccaagucua

SEQ ID NO: 13543 - DNA, 21 bp, homo sapiens
aaatcagaggttcagattcct

SEQ ID NO: 13544 - RNA, 21 nt, RNAi
aucagagguucagauuccuuu

SEQ ID NO: 13545 - RNA, 21 nt, RNAi
uuuagucuccaagucuaagga

SEQ ID NO: 13546 - DNA, 21 bp, homo sapiens
aatcagaggttcagattcctt

SEQ ID NO: 13547 - RNA, 21 nt, RNAi
ucagagguucagauuccuuuu

SEQ ID NO: 13548 - RNA, 21 nt, RNAi
uuagucuccaagucuaaggaa

SEQ ID NO: 13549 - DNA, 21 bp, homo sapiens
aaacaatcaagtgcagagtgg

SEQ ID NO: 13550 - RNA, 21 nt, RNAi
acaaucaagugcagagugguu

SEQ ID NO: 13551 - RNA, 21 nt, RNAi
uuuguuaguucacgucucacc

SEQ ID NO: 13552 - DNA, 21 bp, homo sapiens
aacaatcaagtgcagagtgga

SEQ ID NO: 13553 - RNA, 21 nt, RNAi
caaucaagugcagaguggauu

SEQ ID NO: 13554 - RNA, 21 nt, RNAi
uuguuaguucacgucucaccu

SEQ ID NO: 13555 - DNA, 21 bp, homo sapiens
aatcaagtgcagagtggaaga

SEQ ID NO: 13556 - RNA, 21 nt, RNAi
ucaagugcagaguggaagauu

SEQ ID NO: 13557 - RNA, 21 nt, RNAi
uuaguucacgucucaccuucu

SEQ ID NO: 13558 - DNA, 21 bp, homo sapiens
aagtgcagagtggaagagctt

SEQ ID NO: 13559 - RNA, 21 nt, RNAi
gugcagaguggaagagcuuuu

SEQ ID NO: 13560 - RNA, 21 nt, RNAi
uucacgucucaccuucucgaa

SEQ ID NO: 13561 - DNA, 21 bp, homo sapiens
aagagctttccatcacggaag

SEQ ID NO: 13562 - RNA, 21 nt, RNAi
gagcuuuccaucacggaaguu

SEQ ID NO: 13563 - RNA, 21 nt, RNAi
uucucgaaagguagugccuuc

SEQ ID NO: 13564 - DNA, 21 bp, homo sapiens
aagattcatcatgagtctccg

SEQ ID NO: 13565 - RNA, 21 nt, RNAi
gauucaucaugagucuccguu

SEQ ID NO: 13566 - RNA, 21 nt, RNAi
uucuaaguaguacucagaggc

SEQ ID NO: 13567 - DNA, 21 bp, homo sapiens
aagtttattgaaggtgttgtg

SEQ ID NO: 13568 - RNA, 21 nt, RNAi
guuuauugaagguguuguguu

SEQ ID NO: 13569 - RNA, 21 nt, RNAi
uucaaauaacuuccacaacac

SEQ ID NO: 13570 - DNA, 21 bp, homo sapiens
aaggtgttgtgttacagttat

SEQ ID NO: 13571 - RNA, 21 nt, RNAi
gguguuguguuacaguuauuu

SEQ ID NO: 13572 - RNA, 21 nt, RNAi
uuccacaacacaaugucaaua

SEQ ID NO: 13573 - DNA, 21 bp, homo sapiens
aaggataaagagactggagat

SEQ ID NO: 13574 - RNA, 21 nt, RNAi
ggauaaagagacuggagauuu

SEQ ID NO: 13575 - RNA, 21 nt, RNAi
uuccuauuucucugaccucua

SEQ ID NO: 13576 - DNA, 21 bp, homo sapiens
aaagagactggagatatcaag

SEQ ID NO: 13577 - RNA, 21 nt, RNAi
agagacuggagauaucaaguu

SEQ ID NO: 13578 - RNA, 21 nt, RNAi
uuucucugaccucuauaguuc

SEQ ID NO: 13579 - DNA, 21 bp, homo sapiens
aagagactggagatatcaagg

SEQ ID NO: 13580 - RNA, 21 nt, RNAi
gagacuggagauaucaagguu

SEQ ID NO: 13581 - RNA, 21 nt, RNAi
uucucugaccucuauaguucc

SEQ ID NO: 13582 - DNA, 21 bp, homo sapiens
aaggaactccatgctccactg

SEQ ID NO: 13583 - RNA, 21 nt, RNAi
ggaacuccaugcuccacuguu

SEQ ID NO: 13584 - RNA, 21 nt, RNAi
uuccuugagguacgaggugac

SEQ ID NO: 13585 - DNA, 21 bp, homo sapiens
aactccatgctccactgactg

SEQ ID NO: 13586 - RNA, 21 nt, RNAi
cuccaugcuccacugacuguu

SEQ ID NO: 13587 - RNA, 21 nt, RNAi
uugagguacgaggugacugac

SEQ ID NO: 13588 - DNA, 21 bp, homo sapiens
aaagcctggtctccaataaag

SEQ ID NO: 13589 - RNA, 21 nt, RNAi
agccuggucuccaauaaaguu

SEQ ID NO: 13590 - RNA, 21 nt, RNAi
uuucggaccagagguuauuuc

SEQ ID NO: 13591 - DNA, 21 bp, homo sapiens
aagcctggtctccaataaagt

SEQ ID NO: 13592 - RNA, 21 nt, RNAi
gccuggucuccaauaaaguuu

SEQ ID NO: 13593 - RNA, 21 nt, RNAi
uucggaccagagguuauuuca

SEQ ID NO: 13594 - DNA, 21 bp, homo sapiens
aagaatgcaccacagtttaaa

SEQ ID NO: 13595 - RNA, 21 nt, RNAi
gaaugcaccacaguuuaaauu

SEQ ID NO: 13596 - RNA, 21 nt, RNAi
uucuuacguggugucaaauuu

SEQ ID NO: 13597 - DNA, 21 bp, homo sapiens
aatgcaccacagtttaaagca

SEQ ID NO: 13598 - RNA, 21 nt, RNAi
ugcaccacaguuuaaagcauu

SEQ ID NO: 13599 - RNA, 21 nt, RNAi
uuacguggugucaaauuucgu

SEQ ID NO: 13600 - DNA, 21 bp, homo sapiens
aaagcaaatcatgctgaactt

SEQ ID NO: 13601 - RNA, 21 nt, RNAi
agcaaaucaugcugaacuuuu

SEQ ID NO: 13602 - RNA, 21 nt, RNAi
uuucguuuaguacgacuugaa

SEQ ID NO: 13603 - DNA, 21 bp, homo sapiens
aagcaaatcatgctgaactta

SEQ ID NO: 13604 - RNA, 21 nt, RNAi
gcaaaucaugcugaacuuauu

SEQ ID NO: 13605 - RNA, 21 nt, RNAi
uucguuuaguacgacuugaau

SEQ ID NO: 13606 - DNA, 21 bp, homo sapiens
aaactcgagtacttgttgaca

SEQ ID NO: 13607 - RNA, 21 nt, RNAi
acucgaguacuuguugacauu

SEQ ID NO: 13608 - RNA, 21 nt, RNAi
uuugagcucaugaacaacugu

SEQ ID NO: 13609 - DNA, 21 bp, homo sapiens
aactcgagtacttgttgacat

SEQ ID NO: 13610 - RNA, 21 nt, RNAi
cucgaguacuuguugacauuu

SEQ ID NO: 13611 - RNA, 21 nt, RNAi
uugagcucaugaacaacugua

SEQ ID NO: 13612 - DNA, 21 bp, homo sapiens
aaatgccaaggaatttaagag

SEQ ID NO: 13613 - RNA, 21 nt, RNAi
augccaaggaauuuaagaguu

SEQ ID NO: 13614 - RNA, 21 nt, RNAi
uuuacgguuccuuaaauucuc

SEQ ID NO: 13615 - DNA, 21 bp, homo sapiens
aatgccaaggaatttaagaga

SEQ ID NO: 13616 - RNA, 21 nt, RNAi
ugccaaggaauuuaagagauu

SEQ ID NO: 13617 - RNA, 21 nt, RNAi
uuacgguuccuuaaauucucu

SEQ ID NO: 13618 - DNA, 21 bp, homo sapiens
aaatacctgatcacctgaaag

SEQ ID NO: 13619 - RNA, 21 nt, RNAi
auaccugaucaccugaaaguu

SEQ ID NO: 13620 - RNA, 21 nt, RNAi
uuuauggacuaguggacuuuc

SEQ ID NO: 13621 - DNA, 21 bp, homo sapiens
aatacctgatcacctgaaaga

SEQ ID NO: 13622 - RNA, 21 nt, RNAi
uaccugaucaccugaaagauu

SEQ ID NO: 13623 - RNA, 21 nt, RNAi
uuauggacuaguggacuuucu

SEQ ID NO: 13624 - DNA, 21 bp, homo sapiens
aaagaaccattcttagaagcc

SEQ ID NO: 13625 - RNA, 21 nt, RNAi
agaaccauucuuagaagccuu

SEQ ID NO: 13626 - RNA, 21 nt, RNAi
uuucuugguaagaaucuucgg

SEQ ID NO: 13627 - DNA, 21 bp, homo sapiens
aagaaccattcttagaagcca

SEQ ID NO: 13628 - RNA, 21 nt, RNAi
gaaccauucuuagaagccauu

SEQ ID NO: 13629 - RNA, 21 nt, RNAi
uucuugguaagaaucuucggu

SEQ ID NO: 13630 - DNA, 21 bp, homo sapiens
aaccattcttagaagccactg

SEQ ID NO: 13631 - RNA, 21 nt, RNAi
ccauucuuagaagccacuguu

SEQ ID NO: 13632 - RNA, 21 nt, RNAi
uugguaagaaucuucggugac

SEQ ID NO: 13633 - DNA, 21 bp, homo sapiens
aagccactgacaattctcatc

SEQ ID NO: 13634 - RNA, 21 nt, RNAi
gccacugacaauucucaucuu

SEQ ID NO: 13635 - RNA, 21 nt, RNAi
uucggugacuguuaagaguag

SEQ ID NO: 13636 - DNA, 21 bp, homo sapiens
aattctcatctgaggtccatg

SEQ ID NO: 13637 - RNA, 21 nt, RNAi
uucucaucugagguccauguu

SEQ ID NO: 13638 - RNA, 21 nt, RNAi
uuaagaguagacuccagguac

SEQ ID NO: 13639 - DNA, 21 bp, homo sapiens
aagcttccttcctccttcatc

SEQ ID NO: 13640 - RNA, 21 nt, RNAi
gcuuccuuccuccuucaucuu

SEQ ID NO: 13641 - RNA, 21 nt, RNAi
uucgaaggaaggaggaaguag

SEQ ID NO: 13642 - DNA, 21 bp, homo sapiens
aagaaacgaggtgttcttctt

SEQ ID NO: 13643 - RNA, 21 nt, RNAi
gaaacgagguguucuucuuuu

SEQ ID NO: 13644 - RNA, 21 nt, RNAi
uucuuugcuccacaagaagaa

SEQ ID NO: 13645 - DNA, 21 bp, homo sapiens
aatatgaggcatccacttact

SEQ ID NO: 13646 - RNA, 21 nt, RNAi
uaugaggcauccacuuacuuu

SEQ ID NO: 13647 - RNA, 21 nt, RNAi
uuauacuccguaggugaauga

SEQ ID NO: 13648 - DNA, 21 bp, homo sapiens
aaacatctcattcctttgtcg

SEQ ID NO: 13649 - RNA, 21 nt, RNAi
acaucucauuccuuugucguu

SEQ ID NO: 13650 - RNA, 21 nt, RNAi
uuuguagaguaaggaaacagc

SEQ ID NO: 13651 - DNA, 21 bp, homo sapiens
aacatctcattcctttgtcgt

SEQ ID NO: 13652 - RNA, 21 nt, RNAi
caucucauuccuuugucguuu

SEQ ID NO: 13653 - RNA, 21 nt, RNAi
uuguagaguaaggaaacagca

SEQ ID NO: 13654 - DNA, 21 bp, homo sapiens
aatatccttgctcaggctctt

SEQ ID NO: 13655 - RNA, 21 nt, RNAi
uauccuugcucaggcucuuuu

SEQ ID NO: 13656 - RNA, 21 nt, RNAi
uuauaggaacgaguccgagaa

SEQ ID NO: 13657 - DNA, 21 bp, homo sapiens
aaacttggtggcgaatgtgtt

SEQ ID NO: 13658 - RNA, 21 nt, RNAi
acuugguggcgaauguguuuu

SEQ ID NO: 13659 - RNA, 21 nt, RNAi
uuugaaccaccgcuuacacaa

SEQ ID NO: 13660 - DNA, 21 bp, homo sapiens
aacttggtggcgaatgtgttg

SEQ ID NO: 13661 - RNA, 21 nt, RNAi
cuugguggcgaauguguuguu

SEQ ID NO: 13662 - RNA, 21 nt, RNAi
uugaaccaccgcuuacacaac

SEQ ID NO: 13663 - DNA, 21 bp, homo sapiens
aattggacacttctttgctgt

SEQ ID NO: 13664 - RNA, 21 nt, RNAi
uuggacacuucuuugcuguuu

SEQ ID NO: 13665 - RNA, 21 nt, RNAi
uuaaccugugaagaaacgaca

SEQ ID NO: 13666 - DNA, 21 bp, homo sapiens
aagtcagaaccttggattaca

SEQ ID NO: 13667 - RNA, 21 nt, RNAi
gucagaaccuuggauuacauu

SEQ ID NO: 13668 - RNA, 21 nt, RNAi
uucagucuuggaaccuaaugu

SEQ ID NO: 13669 - DNA, 21 bp, homo sapiens
aagcgtgttctgtaatatttc

SEQ ID NO: 13670 - RNA, 21 nt, RNAi
gcguguucuguaauauuucuu

SEQ ID NO: 13671 - RNA, 21 nt, RNAi
uucgcacaagacauuauaaag

SEQ ID NO: 13672 - DNA, 21 bp, homo sapiens
aacttaccaagtcctaagaga

SEQ ID NO: 13673 - RNA, 21 nt, RNAi
cuuaccaaguccuaagagauu

SEQ ID NO: 13674 - RNA, 21 nt, RNAi
uugaaugguucaggauucucu

SEQ ID NO: 13675 - DNA, 21 bp, homo sapiens
aaagtggaaactcttggacca

SEQ ID NO: 13676 - RNA, 21 nt, RNAi
aguggaaacucuuggaccauu

SEQ ID NO: 13677 - RNA, 21 nt, RNAi
uuucaccuuugagaaccuggu

SEQ ID NO: 13678 - DNA, 21 bp, homo sapiens
aagtggaaactcttggaccaa

SEQ ID NO: 13679 - RNA, 21 nt, RNAi
guggaaacucuuggaccaauu

SEQ ID NO: 13680 - RNA, 21 nt, RNAi
uucaccuuugagaaccugguu

SEQ ID NO: 13681 - DNA, 21 bp, homo sapiens
aaactcttggaccaagatttg

SEQ ID NO: 13682 - RNA, 21 nt, RNAi
acucuuggaccaagauuuguu

SEQ ID NO: 13683 - RNA, 21 nt, RNAi
uuugagaaccugguucuaaac

SEQ ID NO: 13684 - DNA, 21 bp, homo sapiens
aactcttggaccaagatttgg

SEQ ID NO: 13685 - RNA, 21 nt, RNAi
cucuuggaccaagauuugguu

SEQ ID NO: 13686 - RNA, 21 nt, RNAi
uugagaaccugguucuaaacc

SEQ ID NO: 13687 - DNA, 21 bp, homo sapiens
aaattagtgctaatgctgagg

SEQ ID NO: 13688 - RNA, 21 nt, RNAi
auuagugcuaaugcugagguu

SEQ ID NO: 13689 - RNA, 21 nt, RNAi
uuuaaucacgauuacgacucc

SEQ ID NO: 13690 - DNA, 21 bp, homo sapiens
aattagtgctaatgctgagga

SEQ ID NO: 13691 - RNA, 21 nt, RNAi
uuagugcuaaugcugaggauu

SEQ ID NO: 13692 - RNA, 21 nt, RNAi
uuaaucacgauuacgacuccu

SEQ ID NO: 13693 - DNA, 21 bp, homo sapiens
aatgctgaggagaactacagt

SEQ ID NO: 13694 - RNA, 21 nt, RNAi
ugcugaggagaacuacaguuu

SEQ ID NO: 13695 - RNA, 21 nt, RNAi
uuacgacuccucuugauguca

SEQ ID NO: 13696 - DNA, 21 bp, homo sapiens
catcctaatacgactcactat

SEQ ID NO: 13697 - RNA, 21 nt, RNAi
uccuaauacgacucacuauuu

SEQ ID NO: 13698 - RNA, 21 nt, RNAi
uuaggauuaugcugagugaua

SEQ ID NO: 13699 - DNA, 21 bp, homo sapiens
caacttggcttcacatacttt

SEQ ID NO: 13700 - RNA, 21 nt, RNAi
acuuggcuucacauacuuuuu

SEQ ID NO: 13701 - RNA, 21 nt, RNAi
uuugaaccgaaguguaugaaa

SEQ ID NO: 13702 - DNA, 21 bp, homo sapiens
cactgtttactggagtctggc

SEQ ID NO: 13703 - RNA, 21 nt, RNAi
cuguuuacuggagucuggcuu

SEQ ID NO: 13704 - RNA, 21 nt, RNAi
uugacaaaugaccucagaccg

SEQ ID NO: 13705 - DNA, 21 bp, homo sapiens
cactcgagcagataatctccg

SEQ ID NO: 13706 - RNA, 21 nt, RNAi
cucgagcagauaaucuccguu

SEQ ID NO: 13707 - RNA, 21 nt, RNAi
uugagcucgucuauuagaggc

SEQ ID NO: 13708 - DNA, 21 bp, homo sapiens
cagataatctccgccttgacc

SEQ ID NO: 13709 - RNA, 21 nt, RNAi
gauaaucuccgccuugaccuu

SEQ ID NO: 13710 - RNA, 21 nt, RNAi
uucuauuagaggcggaacugg

SEQ ID NO: 13711 - DNA, 21 bp, homo sapiens
cattgccactttcacctattt

SEQ ID NO: 13712 - RNA, 21 nt, RNAi
uugccacuuucaccuauuuuu

SEQ ID NO: 13713 - RNA, 21 nt, RNAi
uuaacggugaaaguggauaaa

SEQ ID NO: 13714 - DNA, 21 bp, homo sapiens
caggcctgcctttcattggct

SEQ ID NO: 13715 - RNA, 21 nt, RNAi
ggccugccuuucauuggcuuu

SEQ ID NO: 13716 - RNA, 21 nt, RNAi
uuccggacggaaaguaaccga

SEQ ID NO: 13717 - DNA, 21 bp, homo sapiens
cagaaacaagcttaataggaa

SEQ ID NO: 13718 - RNA, 21 nt, RNAi
gaaacaagcuuaauaggaauu

SEQ ID NO: 13719 - RNA, 21 nt, RNAi
uucuuuguucgaauuauccuu

SEQ ID NO: 13720 - DNA, 21 bp, homo sapiens
caagcttaataggaacagctg

SEQ ID NO: 13721 - RNA, 21 nt, RNAi
agcuuaauaggaacagcuguu

SEQ ID NO: 13722 - RNA, 21 nt, RNAi
uuucgaauuauccuugucgac

SEQ ID NO: 13723 - DNA, 21 bp, homo sapiens
cagctgcctgtacatcaacat

SEQ ID NO: 13724 - RNA, 21 nt, RNAi
gcugccuguacaucaacauuu

SEQ ID NO: 13725 - RNA, 21 nt, RNAi
uucgacggacauguaguugua

SEQ ID NO: 13726 - DNA, 21 bp, homo sapiens
catcaacatcttctcagaatg

SEQ ID NO: 13727 - RNA, 21 nt, RNAi
ucaacaucuucucagaauguu

SEQ ID NO: 13728 - RNA, 21 nt, RNAi
uuaguuguagaagagucuuac

SEQ ID NO: 13729 - DNA, 21 bp, homo sapiens
caacatcttctcagaatgacc

SEQ ID NO: 13730 - RNA, 21 nt, RNAi
acaucuucucagaaugaccuu

SEQ ID NO: 13731 - RNA, 21 nt, RNAi
uuuguagaagagucuuacugg

SEQ ID NO: 13732 - DNA, 21 bp, homo sapiens
cagagatggaagaaaggtgac

SEQ ID NO: 13733 - RNA, 21 nt, RNAi
gagauggaagaaaggugacuu

SEQ ID NO: 13734 - RNA, 21 nt, RNAi
uucucuaccuucuuuccacug

SEQ ID NO: 13735 - DNA, 21 bp, homo sapiens
cagtcattgagagagacttaa

SEQ ID NO: 13736 - RNA, 21 nt, RNAi
gucauugagagagacuuaauu

SEQ ID NO: 13737 - RNA, 21 nt, RNAi
uucaguaacucucucugaauu

SEQ ID NO: 13738 - DNA, 21 bp, homo sapiens
cagaatagttggagaattcct

SEQ ID NO: 13739 - RNA, 21 nt, RNAi
gaauaguuggagaauuccuuu

SEQ ID NO: 13740 - RNA, 21 nt, RNAi
uucuuaucaaccucuuaagga

SEQ ID NO: 13741 - DNA, 21 bp, homo sapiens
catgttctcaaagaccttggt

SEQ ID NO: 13742 - RNA, 21 nt, RNAi
uguucucaaagaccuugguuu

SEQ ID NO: 13743 - RNA, 21 nt, RNAi
uuacaagaguuucuggaacca

SEQ ID NO: 13744 - DNA, 21 bp, homo sapiens
caaagaccttggtcttggaga

SEQ ID NO: 13745 - RNA, 21 nt, RNAi
aagaccuuggucuuggagauu

SEQ ID NO: 13746 - RNA, 21 nt, RNAi
uuuucuggaaccagaaccucu

SEQ ID NO: 13747 - DNA, 21 bp, homo sapiens
caggttgtaaatggttacatg

SEQ ID NO: 13748 - RNA, 21 nt, RNAi
gguuguaaaugguuacauguu

SEQ ID NO: 13749 - RNA, 21 nt, RNAi
uuccaacauuuaccaauguac

SEQ ID NO: 13750 - DNA, 21 bp, homo sapiens
catgattcatgatcaggaaag

SEQ ID NO: 13751 - RNA, 21 nt, RNAi
ugauucaugaucaggaaaguu

SEQ ID NO: 13752 - RNA, 21 nt, RNAi
uuacuaaguacuaguccuuuc

SEQ ID NO: 13753 - DNA, 21 bp, homo sapiens
catgatcaggaaagcaaatca

SEQ ID NO: 13754 - RNA, 21 nt, RNAi
ugaucaggaaagcaaaucauu

SEQ ID NO: 13755 - RNA, 21 nt, RNAi
uuacuaguccuuucguuuagu

SEQ ID NO: 13756 - DNA, 21 bp, homo sapiens
caggaaagcaaatcagaggtt

SEQ ID NO: 13757 - RNA, 21 nt, RNAi
ggaaagcaaaucagagguuuu

SEQ ID NO: 13758 - RNA, 21 nt, RNAi
uuccuuucguuuagucuccaa

SEQ ID NO: 13759 - DNA, 21 bp, homo sapiens
caaatcagaggttcagattcc

SEQ ID NO: 13760 - RNA, 21 nt, RNAi
aaucagagguucagauuccuu

SEQ ID NO: 13761 - RNA, 21 nt, RNAi
uuuuagucuccaagucuaagg

SEQ ID NO: 13762 - DNA, 21 bp, homo sapiens
cagaggttcagattccttacc

SEQ ID NO: 13763 - RNA, 21 nt, RNAi
gagguucagauuccuuaccuu

SEQ ID NO: 13764 - RNA, 21 nt, RNAi
uucuccaagucuaaggaaugg

SEQ ID NO: 13765 - DNA, 21 bp, homo sapiens
caatcaagtgcagagtggaag

SEQ ID NO: 13766 - RNA, 21 nt, RNAi
aucaagugcagaguggaaguu

SEQ ID NO: 13767 - RNA, 21 nt, RNAi
uuuaguucacgucucaccuuc

SEQ ID NO: 13768 - DNA, 21 bp, homo sapiens
caagtgcagagtggaagagct

SEQ ID NO: 13769 - RNA, 21 nt, RNAi
agugcagaguggaagagcuuu

SEQ ID NO: 13770 - RNA, 21 nt, RNAi
uuucacgucucaccuucucga

SEQ ID NO: 13771 - DNA, 21 bp, homo sapiens
cagagtggaagagctttccat

SEQ ID NO: 13772 - RNA, 21 nt, RNAi
gaguggaagagcuuuccauuu

SEQ ID NO: 13773 - RNA, 21 nt, RNAi
uucucaccuucucgaaaggua

SEQ ID NO: 13774 - DNA, 21 bp, homo sapiens
catcacggaagattcatcatg

SEQ ID NO: 13775 - RNA, 21 nt, RNAi
ucacggaagauucaucauguu

SEQ ID NO: 13776 - RNA, 21 nt, RNAi
uuagugccuucuaaguaguac

SEQ ID NO: 13777 - DNA, 21 bp, homo sapiens
cacggaagattcatcatgagt

SEQ ID NO: 13778 - RNA, 21 nt, RNAi
cggaagauucaucaugaguuu

SEQ ID NO: 13779 - RNA, 21 nt, RNAi
uugccuucuaaguaguacuca

SEQ ID NO: 13780 - DNA, 21 bp, homo sapiens
catcatgagtctccggaaagc

SEQ ID NO: 13781 - RNA, 21 nt, RNAi
ucaugagucuccggaaagcuu

SEQ ID NO: 13782 - RNA, 21 nt, RNAi
uuaguacucagaggccuuucg

SEQ ID NO: 13783 - DNA, 21 bp, homo sapiens
catgagtctccggaaagcagc

SEQ ID NO: 13784 - RNA, 21 nt, RNAi
ugagucuccggaaagcagcuu

SEQ ID NO: 13785 - RNA, 21 nt, RNAi
uuacucagaggccuuucgucg

SEQ ID NO: 13786 - DNA, 21 bp, homo sapiens
caatgcaaagtttattgaagg

SEQ ID NO: 13787 - RNA, 21 nt, RNAi
augcaaaguuuauugaagguu

SEQ ID NO: 13788 - RNA, 21 nt, RNAi
uuuacguuucaaauaacuucc

SEQ ID NO: 13789 - DNA, 21 bp, homo sapiens
caaagtttattgaaggtgttg

SEQ ID NO: 13790 - RNA, 21 nt, RNAi
aaguuuauugaagguguuguu

SEQ ID NO: 13791 - RNA, 21 nt, RNAi
uuuucaaauaacuuccacaac

SEQ ID NO: 13792 - DNA, 21 bp, homo sapiens
cagttattagaggaagatgat

SEQ ID NO: 13793 - RNA, 21 nt, RNAi
guuauuagaggaagaugauuu

SEQ ID NO: 13794 - RNA, 21 nt, RNAi
uucaauaaucuccuucuacua

SEQ ID NO: 13795 - DNA, 21 bp, homo sapiens
cagtacaaggataaagagact

SEQ ID NO: 13796 - RNA, 21 nt, RNAi
guacaaggauaaagagacuuu

SEQ ID NO: 13797 - RNA, 21 nt, RNAi
uucauguuccuauuucucuga

SEQ ID NO: 13798 - DNA, 21 bp, homo sapiens
caaggataaagagactggaga

SEQ ID NO: 13799 - RNA, 21 nt, RNAi
aggauaaagagacuggagauu

SEQ ID NO: 13800 - RNA, 21 nt, RNAi
uuuccuauuucucugaccucu

SEQ ID NO: 13801 - DNA, 21 bp, homo sapiens
caaggaactccatgctccact

SEQ ID NO: 13802 - RNA, 21 nt, RNAi
aggaacuccaugcuccacuuu

SEQ ID NO: 13803 - RNA, 21 nt, RNAi
uuuccuugagguacgagguga

SEQ ID NO: 13804 - DNA, 21 bp, homo sapiens
catgctccactgactgttgtt

SEQ ID NO: 13805 - RNA, 21 nt, RNAi
ugcuccacugacuguuguuuu

SEQ ID NO: 13806 - RNA, 21 nt, RNAi
uuacgaggugacugacaacaa

SEQ ID NO: 13807 - DNA, 21 bp, homo sapiens
cactgactgttgttgcagatg

SEQ ID NO: 13808 - RNA, 21 nt, RNAi
cugacuguuguugcagauguu

SEQ ID NO: 13809 - RNA, 21 nt, RNAi
uugacugacaacaacgucuac

SEQ ID NO: 13810 - DNA, 21 bp, homo sapiens
caccacagtttaaagcaaatc

SEQ ID NO: 13811 - RNA, 21 nt, RNAi
ccacaguuuaaagcaaaucuu

SEQ ID NO: 13812 - RNA, 21 nt, RNAi
uuggugucaaauuucguuuag

SEQ ID NO: 13813 - DNA, 21 bp, homo sapiens
cacagtttaaagcaaatcatg

SEQ ID NO: 13814 - RNA, 21 nt, RNAi
caguuuaaagcaaaucauguu

SEQ ID NO: 13815 - RNA, 21 nt, RNAi
uugucaaauuucguuuaguac

SEQ ID NO: 13816 - DNA, 21 bp, homo sapiens
cagtttaaagcaaatcatgct

SEQ ID NO: 13817 - RNA, 21 nt, RNAi
guuuaaagcaaaucaugcuuu

SEQ ID NO: 13818 - RNA, 21 nt, RNAi
uucaaauuucguuuaguacga

SEQ ID NO: 13819 - DNA, 21 bp, homo sapiens
cagttctcatctaccggattt

SEQ ID NO: 13820 - RNA, 21 nt, RNAi
guucucaucuaccggauuuuu

SEQ ID NO: 13821 - RNA, 21 nt, RNAi
uucaagaguagauggccuaaa

SEQ ID NO: 13822 - DNA, 21 bp, homo sapiens
catctaccggatttcatccag

SEQ ID NO: 13823 - RNA, 21 nt, RNAi
ucuaccggauuucauccaguu

SEQ ID NO: 13824 - RNA, 21 nt, RNAi
uuagauggccuaaaguagguc

SEQ ID NO: 13825 - DNA, 21 bp, homo sapiens
catccagtgaaactcgagtac

SEQ ID NO: 13826 - RNA, 21 nt, RNAi
uccagugaaacucgaguacuu

SEQ ID NO: 13827 - RNA, 21 nt, RNAi
uuaggucacuuugagcucaug

SEQ ID NO: 13828 - DNA, 21 bp, homo sapiens
cagtgaaactcgagtacttgt

SEQ ID NO: 13829 - RNA, 21 nt, RNAi
gugaaacucgaguacuuguuu

SEQ ID NO: 13830 - RNA, 21 nt, RNAi
uucacuuugagcucaugaaca

SEQ ID NO: 13831 - DNA, 21 bp, homo sapiens
cattagaggagaaatgccaag

SEQ ID NO: 13832 - RNA, 21 nt, RNAi
uuagaggagaaaugccaaguu

SEQ ID NO: 13833 - RNA, 21 nt, RNAi
uuaaucuccucuuuacgguuc

SEQ ID NO: 13834 - DNA, 21 bp, homo sapiens
cacaaatacctgatcacctga

SEQ ID NO: 13835 - RNA, 21 nt, RNAi
caaauaccugaucaccugauu

SEQ ID NO: 13836 - RNA, 21 nt, RNAi
uuguuuauggacuaguggacu

SEQ ID NO: 13837 - DNA, 21 bp, homo sapiens
caaatacctgatcacctgaaa

SEQ ID NO: 13838 - RNA, 21 nt, RNAi
aauaccugaucaccugaaauu

SEQ ID NO: 13839 - RNA, 21 nt, RNAi
uuuuauggacuaguggacuuu

SEQ ID NO: 13840 - DNA, 21 bp, homo sapiens
cacctgaaagaaccattctta

SEQ ID NO: 13841 - RNA, 21 nt, RNAi
ccugaaagaaccauucuuauu

SEQ ID NO: 13842 - RNA, 21 nt, RNAi
uuggacuuucuugguaagaau

SEQ ID NO: 13843 - DNA, 21 bp, homo sapiens
cattcttagaagccactgaca

SEQ ID NO: 13844 - RNA, 21 nt, RNAi
uucuuagaagccacugacauu

SEQ ID NO: 13845 - RNA, 21 nt, RNAi
uuaagaaucuucggugacugu

SEQ ID NO: 13846 - DNA, 21 bp, homo sapiens
cactgacaattctcatctgag

SEQ ID NO: 13847 - RNA, 21 nt, RNAi
cugacaauucucaucugaguu

SEQ ID NO: 13848 - RNA, 21 nt, RNAi
uugacuguuaagaguagacuc

SEQ ID NO: 13849 - DNA, 21 bp, homo sapiens
caattctcatctgaggtccat

SEQ ID NO: 13850 - RNA, 21 nt, RNAi
auucucaucugagguccauuu

SEQ ID NO: 13851 - RNA, 21 nt, RNAi
uuuaagaguagacuccaggua

SEQ ID NO: 13852 - DNA, 21 bp, homo sapiens
catctgaggtccatgctagca

SEQ ID NO: 13853 - RNA, 21 nt, RNAi
ucugagguccaugcuagcauu

SEQ ID NO: 13854 - RNA, 21 nt, RNAi
uuagacuccagguacgaucgu

SEQ ID NO: 13855 - DNA, 21 bp, homo sapiens
catgctagcaagcttccttcc

SEQ ID NO: 13856 - RNA, 21 nt, RNAi
ugcuagcaagcuuccuuccuu

SEQ ID NO: 13857 - RNA, 21 nt, RNAi
uuacgaucguucgaaggaagg

SEQ ID NO: 13858 - DNA, 21 bp, homo sapiens
caagcttccttcctccttcat

SEQ ID NO: 13859 - RNA, 21 nt, RNAi
agcuuccuuccuccuucauuu

SEQ ID NO: 13860 - RNA, 21 nt, RNAi
uuucgaaggaaggaggaagua

SEQ ID NO: 13861 - DNA, 21 bp, homo sapiens
catcagtgaagaaacgaggtg

SEQ ID NO: 13862 - RNA, 21 nt, RNAi
ucagugaagaaacgagguguu

SEQ ID NO: 13863 - RNA, 21 nt, RNAi
uuagucacuucuuugcuccac

SEQ ID NO: 13864 - DNA, 21 bp, homo sapiens
cagtgaagaaacgaggtgttc

SEQ ID NO: 13865 - RNA, 21 nt, RNAi
gugaagaaacgagguguucuu

SEQ ID NO: 13866 - RNA, 21 nt, RNAi
uucacuucuuugcuccacaag

SEQ ID NO: 13867 - DNA, 21 bp, homo sapiens
catataatatgaggcatccac

SEQ ID NO: 13868 - RNA, 21 nt, RNAi
uauaauaugaggcauccacuu

SEQ ID NO: 13869 - RNA, 21 nt, RNAi
uuauauuauacuccguaggug

SEQ ID NO: 13870 - DNA, 21 bp, homo sapiens
catccacttactggtggagga

SEQ ID NO: 13871 - RNA, 21 nt, RNAi
uccacuuacugguggaggauu

SEQ ID NO: 13872 - RNA, 21 nt, RNAi
uuaggugaaugaccaccuccu

SEQ ID NO: 13873 - DNA, 21 bp, homo sapiens
cacttactggtggaggaatga

SEQ ID NO: 13874 - RNA, 21 nt, RNAi
cuuacugguggaggaaugauu

SEQ ID NO: 13875 - RNA, 21 nt, RNAi
uugaaugaccaccuccuuacu

SEQ ID NO: 13876 - DNA, 21 bp, homo sapiens
catctcattcctttgtcgtga

SEQ ID NO: 13877 - RNA, 21 nt, RNAi
ucucauuccuuugucgugauu

SEQ ID NO: 13878 - RNA, 21 nt, RNAi
uuagaguaaggaaacagcacu

SEQ ID NO: 13879 - DNA, 21 bp, homo sapiens
cattcctttgtcgtgaatatc

SEQ ID NO: 13880 - RNA, 21 nt, RNAi
uuccuuugucgugaauaucuu

SEQ ID NO: 13881 - RNA, 21 nt, RNAi
uuaaggaaacagcacuuauag

SEQ ID NO: 13882 - DNA, 21 bp, homo sapiens
caaacttggtggcgaatgtgt

SEQ ID NO: 13883 - RNA, 21 nt, RNAi
aacuugguggcgaauguguuu

SEQ ID NO: 13884 - RNA, 21 nt, RNAi
uuuugaaccaccgcuuacaca

SEQ ID NO: 13885 - DNA, 21 bp, homo sapiens
cacttctttgctgttgcaatc

SEQ ID NO: 13886 - RNA, 21 nt, RNAi
cuucuuugcuguugcaaucuu

SEQ ID NO: 13887 - RNA, 21 nt, RNAi
uugaagaaacgacaacguuag

SEQ ID NO: 13888 - DNA, 21 bp, homo sapiens
cagtagtagtgctgtattgta

SEQ ID NO: 13889 - RNA, 21 nt, RNAi
guaguagugcuguauuguauu

SEQ ID NO: 13890 - RNA, 21 nt, RNAi
uucaucaucacgacauaacau

SEQ ID NO: 13891 - DNA, 21 bp, homo sapiens
caaagcgtgttctgtaatatt

SEQ ID NO: 13892 - RNA, 21 nt, RNAi
aagcguguucuguaauauuuu

SEQ ID NO: 13893 - RNA, 21 nt, RNAi
uuuucgcacaagacauuauaa

SEQ ID NO: 13894 - DNA, 21 bp, homo sapiens
cagaaatgaagtatatggttc

SEQ ID NO: 13895 - RNA, 21 nt, RNAi
gaaaugaaguauaugguucuu

SEQ ID NO: 13896 - RNA, 21 nt, RNAi
uucuuuacuucauauaccaag

SEQ ID NO: 13897 - DNA, 21 bp, homo sapiens
catagtaccataccacttata

SEQ ID NO: 13898 - RNA, 21 nt, RNAi
uaguaccauaccacuuauauu

SEQ ID NO: 13899 - RNA, 21 nt, RNAi
uuaucaugguauggugaauau

SEQ ID NO: 13900 - DNA, 21 bp, homo sapiens
cataccacttataaagtggaa

SEQ ID NO: 13901 - RNA, 21 nt, RNAi
uaccacuuauaaaguggaauu

SEQ ID NO: 13902 - RNA, 21 nt, RNAi
uuauggugaauauuucaccuu

SEQ ID NO: 13903 - DNA, 21 bp, homo sapiens
cacttataaagtggaaactct

SEQ ID NO: 13904 - RNA, 21 nt, RNAi
cuuauaaaguggaaacucuuu

SEQ ID NO: 13905 - RNA, 21 nt, RNAi
uugaauauuucaccuuugaga

SEQ ID NO: 13906 - DNA, 21 bp, homo sapiens
cataaattagtgctaatgctg

SEQ ID NO: 13907 - RNA, 21 nt, RNAi
uaaauuagugcuaaugcuguu

SEQ ID NO: 13908 - RNA, 21 nt, RNAi
uuauuuaaucacgauuacgac

SEQ ID NO: 13909 - DNA, 21 bp, homo sapiens
gacactgtttactggagtctg

SEQ ID NO: 13910 - RNA, 21 nt, RNAi
cacuguuuacuggagucuguu

SEQ ID NO: 13911 - RNA, 21 nt, RNAi
uugugacaaaugaccucagac

SEQ ID NO: 13912 - DNA, 21 bp, homo sapiens
gagcagataatctccgccttg

SEQ ID NO: 13913 - RNA, 21 nt, RNAi
gcagauaaucuccgccuuguu

SEQ ID NO: 13914 - RNA, 21 nt, RNAi
uucgucuauuagaggcggaac

SEQ ID NO: 13915 - DNA, 21 bp, homo sapiens
gataatctccgccttgaccgg

SEQ ID NO: 13916 - RNA, 21 nt, RNAi
uaaucuccgccuugaccgguu

SEQ ID NO: 13917 - RNA, 21 nt, RNAi
uuauuagaggcggaacuggcc

SEQ ID NO: 13918 - DNA, 21 bp, homo sapiens
gaccggtgccaccaaagaagg

SEQ ID NO: 13919 - RNA, 21 nt, RNAi
ccggugccaccaaagaagguu

SEQ ID NO: 13920 - RNA, 21 nt, RNAi
uuggccacggugguuucuucc

SEQ ID NO: 13921 - DNA, 21 bp, homo sapiens
gacttcatcactttggccaac

SEQ ID NO: 13922 - RNA, 21 nt, RNAi
cuucaucacuuuggccaacuu

SEQ ID NO: 13923 - RNA, 21 nt, RNAi
uugaaguagugaaaccgguug

SEQ ID NO: 13924 - DNA, 21 bp, homo sapiens
gaggtcctgttgtgcgtgctg

SEQ ID NO: 13925 - RNA, 21 nt, RNAi
gguccuguugugcgugcuguu

SEQ ID NO: 13926 - RNA, 21 nt, RNAi
uuccaggacaacacgcacgac

SEQ ID NO: 13927 - DNA, 21 bp, homo sapiens
gatattctctcaggcctgcct

SEQ ID NO: 13928 - RNA, 21 nt, RNAi
uauucucucaggccugccuuu

SEQ ID NO: 13929 - RNA, 21 nt, RNAi
uuauaagagaguccggacgga

SEQ ID NO: 13930 - DNA, 21 bp, homo sapiens
gaaacaagcttaataggaaca

SEQ ID NO: 13931 - RNA, 21 nt, RNAi
aacaagcuuaauaggaacauu

SEQ ID NO: 13932 - RNA, 21 nt, RNAi
uuuuguucgaauuauccuugu

SEQ ID NO: 13933 - DNA, 21 bp, homo sapiens
gaacagctgcctgtacatcaa

SEQ ID NO: 13934 - RNA, 21 nt, RNAi
acagcugccuguacaucaauu

SEQ ID NO: 13935 - RNA, 21 nt, RNAi
uuugucgacggacauguaguu

SEQ ID NO: 13936 - DNA, 21 bp, homo sapiens
gagatggaagaaaggtgacag

SEQ ID NO: 13937 - RNA, 21 nt, RNAi
gauggaagaaaggugacaguu

SEQ ID NO: 13938 - RNA, 21 nt, RNAi
uucuaccuucuuuccacuguc

SEQ ID NO: 13939 - DNA, 21 bp, homo sapiens
gatggaagaaaggtgacagtc

SEQ ID NO: 13940 - RNA, 21 nt, RNAi
uggaagaaaggugacagucuu

SEQ ID NO: 13941 - RNA, 21 nt, RNAi
uuaccuucuuuccacugucag

SEQ ID NO: 13942 - DNA, 21 bp, homo sapiens
gaagaaaggtgacagtcattg

SEQ ID NO: 13943 - RNA, 21 nt, RNAi
agaaaggugacagucauuguu

SEQ ID NO: 13944 - RNA, 21 nt, RNAi
uuucuuuccacugucaguaac

SEQ ID NO: 13945 - DNA, 21 bp, homo sapiens
gaaaggtgacagtcattgaga

SEQ ID NO: 13946 - RNA, 21 nt, RNAi
aaggugacagucauugagauu

SEQ ID NO: 13947 - RNA, 21 nt, RNAi
uuuuccacugucaguaacucu

SEQ ID NO: 13948 - DNA, 21 bp, homo sapiens
gacagtcattgagagagactt

SEQ ID NO: 13949 - RNA, 21 nt, RNAi
cagucauugagagagacuuuu

SEQ ID NO: 13950 - RNA, 21 nt, RNAi
uugucaguaacucucucugaa

SEQ ID NO: 13951 - DNA, 21 bp, homo sapiens
gagcctgacagaatagttgga

SEQ ID NO: 13952 - RNA, 21 nt, RNAi
gccugacagaauaguuggauu

SEQ ID NO: 13953 - RNA, 21 nt, RNAi
uucggacugucuuaucaaccu

SEQ ID NO: 13954 - DNA, 21 bp, homo sapiens
gacagaatagttggagaattc

SEQ ID NO: 13955 - RNA, 21 nt, RNAi
cagaauaguuggagaauucuu

SEQ ID NO: 13956 - RNA, 21 nt, RNAi
uugucuuaucaaccucuuaag

SEQ ID NO: 13957 - DNA, 21 bp, homo sapiens
gaatagttggagaattcctgc

SEQ ID NO: 13958 - RNA, 21 nt, RNAi
auaguuggagaauuccugcuu

SEQ ID NO: 13959 - RNA, 21 nt, RNAi
uuuaucaaccucuuaaggacg

SEQ ID NO: 13960 - DNA, 21 bp, homo sapiens
gaccttggtcttggagataca

SEQ ID NO: 13961 - RNA, 21 nt, RNAi
ccuuggucuuggagauacauu

SEQ ID NO: 13962 - RNA, 21 nt, RNAi
uuggaaccagaaccucuaugu

SEQ ID NO: 13963 - DNA, 21 bp, homo sapiens
gagatacagtggaaggtcttg

SEQ ID NO: 13964 - RNA, 21 nt, RNAi
gauacaguggaaggucuuguu

SEQ ID NO: 13965 - RNA, 21 nt, RNAi
uucuaugucaccuuccagaac

SEQ ID NO: 13966 - DNA, 21 bp, homo sapiens
gatacagtggaaggtcttgat

SEQ ID NO: 13967 - RNA, 21 nt, RNAi
uacaguggaaggucuugauuu

SEQ ID NO: 13968 - RNA, 21 nt, RNAi
uuaugucaccuuccagaacua

SEQ ID NO: 13969 - DNA, 21 bp, homo sapiens
gattcatgatcaggaaagcaa

SEQ ID NO: 13970 - RNA, 21 nt, RNAi
uucaugaucaggaaagcaauu

SEQ ID NO: 13971 - RNA, 21 nt, RNAi
uuaaguacuaguccuuucguu

SEQ ID NO: 13972 - DNA, 21 bp, homo sapiens
gatcaggaaagcaaatcagag

SEQ ID NO: 13973 - RNA, 21 nt, RNAi
ucaggaaagcaaaucagaguu

SEQ ID NO: 13974 - RNA, 21 nt, RNAi
uuaguccuuucguuuagucuc

SEQ ID NO: 13975 - DNA, 21 bp, homo sapiens
gaaagcaaatcagaggttcag

SEQ ID NO: 13976 - RNA, 21 nt, RNAi
aagcaaaucagagguucaguu

SEQ ID NO: 13977 - RNA, 21 nt, RNAi
uuuucguuuagucuccaaguc

SEQ ID NO: 13978 - DNA, 21 bp, homo sapiens
gagtggaagagctttccatca

SEQ ID NO: 13979 - RNA, 21 nt, RNAi
guggaagagcuuuccaucauu

SEQ ID NO: 13980 - RNA, 21 nt, RNAi
uucaccuucucgaaagguagu

SEQ ID NO: 13981 - DNA, 21 bp, homo sapiens
gaagagctttccatcacggaa

SEQ ID NO: 13982 - RNA, 21 nt, RNAi
agagcuuuccaucacggaauu

SEQ ID NO: 13983 - RNA, 21 nt, RNAi
uuucucgaaagguagugccuu

SEQ ID NO: 13984 - DNA, 21 bp, homo sapiens
gagctttccatcacggaagat

SEQ ID NO: 13985 - RNA, 21 nt, RNAi
gcuuuccaucacggaagauuu

SEQ ID NO: 13986 - RNA, 21 nt, RNAi
uucgaaagguagugccuucua

SEQ ID NO: 13987 - DNA, 21 bp, homo sapiens
gaagattcatcatgagtctcc

SEQ ID NO: 13988 - RNA, 21 nt, RNAi
agauucaucaugagucuccuu

SEQ ID NO: 13989 - RNA, 21 nt, RNAi
uuucuaaguaguacucagagg

SEQ ID NO: 13990 - DNA, 21 bp, homo sapiens
gattcatcatgagtctccgga

SEQ ID NO: 13991 - RNA, 21 nt, RNAi
uucaucaugagucuccggauu

SEQ ID NO: 13992 - RNA, 21 nt, RNAi
uuaaguaguacucagaggccu

SEQ ID NO: 13993 - DNA, 21 bp, homo sapiens
gagtctccggaaagcagctat

SEQ ID NO: 13994 - RNA, 21 nt, RNAi
gucuccggaaagcagcuauuu

SEQ ID NO: 13995 - RNA, 21 nt, RNAi
uucagaggccuuucgucgaua

SEQ ID NO: 13996 - DNA, 21 bp, homo sapiens
gaaagcagctatggcagagcc

SEQ ID NO: 13997 - RNA, 21 nt, RNAi
aagcagcuauggcagagccuu

SEQ ID NO: 13998 - RNA, 21 nt, RNAi
uuuucgucgauaccgucucgg

SEQ ID NO: 13999 - DNA, 21 bp, homo sapiens
gaaggtgttgtgttacagtta

SEQ ID NO: 14000 - RNA, 21 nt, RNAi
agguguuguguuacaguuauu

SEQ ID NO: 14001 - RNA, 21 nt, RNAi
uuuccacaacacaaugucaau

SEQ ID NO: 14002 - DNA, 21 bp, homo sapiens
gaggaagatgatgttgtgatg

SEQ ID NO: 14003 - RNA, 21 nt, RNAi
ggaagaugauguugugauguu

SEQ ID NO: 14004 - RNA, 21 nt, RNAi
uuccuucuacuacaacacuac

SEQ ID NO: 14005 - DNA, 21 bp, homo sapiens
gagttcagtacaaggataaag

SEQ ID NO: 14006 - RNA, 21 nt, RNAi
guucaguacaaggauaaaguu

SEQ ID NO: 14007 - RNA, 21 nt, RNAi
uucaagucauguuccuauuuc

SEQ ID NO: 14008 - DNA, 21 bp, homo sapiens
gataaagagactggagatatc

SEQ ID NO: 14009 - RNA, 21 nt, RNAi
uaaagagacuggagauaucuu

SEQ ID NO: 14010 - RNA, 21 nt, RNAi
uuauuucucugaccucuauag

SEQ ID NO: 14011 - DNA, 21 bp, homo sapiens
gagactggagatatcaaggaa

SEQ ID NO: 14012 - RNA, 21 nt, RNAi
gacuggagauaucaaggaauu

SEQ ID NO: 14013 - RNA, 21 nt, RNAi
uucugaccucuauaguuccuu

SEQ ID NO: 14014 - DNA, 21 bp, homo sapiens
gactggagatatcaaggaact

SEQ ID NO: 14015 - RNA, 21 nt, RNAi
cuggagauaucaaggaacuuu

SEQ ID NO: 14016 - RNA, 21 nt, RNAi
uugaccucuauaguuccuuga

SEQ ID NO: 14017 - DNA, 21 bp, homo sapiens
gagatatcaaggaactccatg

SEQ ID NO: 14018 - RNA, 21 nt, RNAi
gauaucaaggaacuccauguu

SEQ ID NO: 14019 - RNA, 21 nt, RNAi
uucuauaguuccuugagguac

SEQ ID NO: 14020 - DNA, 21 bp, homo sapiens
gatatcaaggaactccatgct

SEQ ID NO: 14021 - RNA, 21 nt, RNAi
uaucaaggaacuccaugcuuu

SEQ ID NO: 14022 - RNA, 21 nt, RNAi
uuauaguuccuugagguacga

SEQ ID NO: 14023 - DNA, 21 bp, homo sapiens
gaactccatgctccactgact

SEQ ID NO: 14024 - RNA, 21 nt, RNAi
acuccaugcuccacugacuuu

SEQ ID NO: 14025 - RNA, 21 nt, RNAi
uuugagguacgaggugacuga

SEQ ID NO: 14026 - DNA, 21 bp, homo sapiens
gaagaatgcaccacagtttaa

SEQ ID NO: 14027 - RNA, 21 nt, RNAi
agaaugcaccacaguuuaauu

SEQ ID NO: 14028 - RNA, 21 nt, RNAi
uuucuuacguggugucaaauu

SEQ ID NO: 14029 - DNA, 21 bp, homo sapiens
gaatgcaccacagtttaaagc

SEQ ID NO: 14030 - RNA, 21 nt, RNAi
augcaccacaguuuaaagcuu

SEQ ID NO: 14031 - RNA, 21 nt, RNAi
uuuacguggugucaaauuucg

SEQ ID NO: 14032 - DNA, 21 bp, homo sapiens
gagtccagttctcatctaccg

SEQ ID NO: 14033 - RNA, 21 nt, RNAi
guccaguucucaucuaccguu

SEQ ID NO: 14034 - RNA, 21 nt, RNAi
uucaggucaagaguagauggc

SEQ ID NO: 14035 - DNA, 21 bp, homo sapiens
gatttcatccagtgaaactcg

SEQ ID NO: 14036 - RNA, 21 nt, RNAi
uuucauccagugaaacucguu

SEQ ID NO: 14037 - RNA, 21 nt, RNAi
uuaaaguaggucacuuugagc

SEQ ID NO: 14038 - DNA, 21 bp, homo sapiens
gaaactcgagtacttgttgac

SEQ ID NO: 14039 - RNA, 21 nt, RNAi
aacucgaguacuuguugacuu

SEQ ID NO: 14040 - RNA, 21 nt, RNAi
uuuugagcucaugaacaacug

SEQ ID NO: 14041 - DNA, 21 bp, homo sapiens
gagtacttgttgacattagag

SEQ ID NO: 14042 - RNA, 21 nt, RNAi
guacuuguugacauuagaguu

SEQ ID NO: 14043 - RNA, 21 nt, RNAi
uucaugaacaacuguaaucuc

SEQ ID NO: 14044 - DNA, 21 bp, homo sapiens
gacattagaggagaaatgcca

SEQ ID NO: 14045 - RNA, 21 nt, RNAi
cauuagaggagaaaugccauu

SEQ ID NO: 14046 - RNA, 21 nt, RNAi
uuguaaucuccucuuuacggu

SEQ ID NO: 14047 - DNA, 21 bp, homo sapiens
gaggagaaatgccaaggaatt

SEQ ID NO: 14048 - RNA, 21 nt, RNAi
ggagaaaugccaaggaauuuu

SEQ ID NO: 14049 - RNA, 21 nt, RNAi
uuccucuuuacgguuccuuaa

SEQ ID NO: 14050 - DNA, 21 bp, homo sapiens
gagaaatgccaaggaatttaa

SEQ ID NO: 14051 - RNA, 21 nt, RNAi
gaaaugccaaggaauuuaauu

SEQ ID NO: 14052 - RNA, 21 nt, RNAi
uucuuuacgguuccuuaaauu

SEQ ID NO: 14053 - DNA, 21 bp, homo sapiens
gaaatgccaaggaatttaaga

SEQ ID NO: 14054 - RNA, 21 nt, RNAi
aaugccaaggaauuuaagauu

SEQ ID NO: 14055 - RNA, 21 nt, RNAi
uuuuacgguuccuuaaauucu

SEQ ID NO: 14056 - DNA, 21 bp, homo sapiens
gatcacctgaaagaaccattc

SEQ ID NO: 14057 - RNA, 21 nt, RNAi
ucaccugaaagaaccauucuu

SEQ ID NO: 14058 - RNA, 21 nt, RNAi
uuaguggacuuucuugguaag

SEQ ID NO: 14059 - DNA, 21 bp, homo sapiens
gaaagaaccattcttagaagc

SEQ ID NO: 14060 - RNA, 21 nt, RNAi
aagaaccauucuuagaagcuu

SEQ ID NO: 14061 - RNA, 21 nt, RNAi
uuuucuugguaagaaucuucg

SEQ ID NO: 14062 - DNA, 21 bp, homo sapiens
gaaccattcttagaagccact

SEQ ID NO: 14063 - RNA, 21 nt, RNAi
accauucuuagaagccacuuu

SEQ ID NO: 14064 - RNA, 21 nt, RNAi
uuugguaagaaucuucgguga

SEQ ID NO: 14065 - DNA, 21 bp, homo sapiens
gaagccactgacaattctcat

SEQ ID NO: 14066 - RNA, 21 nt, RNAi
agccacugacaauucucauuu

SEQ ID NO: 14067 - RNA, 21 nt, RNAi
uuucggugacuguuaagagua

SEQ ID NO: 14068 - DNA, 21 bp, homo sapiens
gacaattctcatctgaggtcc

SEQ ID NO: 14069 - RNA, 21 nt, RNAi
caauucucaucugagguccuu

SEQ ID NO: 14070 - RNA, 21 nt, RNAi
uuguuaagaguagacuccagg

SEQ ID NO: 14071 - DNA, 21 bp, homo sapiens
gaggtccatgctagcaagctt

SEQ ID NO: 14072 - RNA, 21 nt, RNAi
gguccaugcuagcaagcuuuu

SEQ ID NO: 14073 - RNA, 21 nt, RNAi
uuccagguacgaucguucgaa

SEQ ID NO: 14074 - DNA, 21 bp, homo sapiens
gaagaaacgaggtgttcttct

SEQ ID NO: 14075 - RNA, 21 nt, RNAi
agaaacgagguguucuucuuu

SEQ ID NO: 14076 - RNA, 21 nt, RNAi
uuucuuugcuccacaagaaga

SEQ ID NO: 14077 - DNA, 21 bp, homo sapiens
gagacgcatataatatgaggc

SEQ ID NO: 14078 - RNA, 21 nt, RNAi
gacgcauauaauaugaggcuu

SEQ ID NO: 14079 - RNA, 21 nt, RNAi
uucugcguauauuauacuccg

SEQ ID NO: 14080 - DNA, 21 bp, homo sapiens
gacgcatataatatgaggcat

SEQ ID NO: 14081 - RNA, 21 nt, RNAi
cgcauauaauaugaggcauuu

SEQ ID NO: 14082 - RNA, 21 nt, RNAi
uugcguauauuauacuccgua

SEQ ID NO: 14083 - DNA, 21 bp, homo sapiens
gaggcatccacttactggtgg

SEQ ID NO: 14084 - RNA, 21 nt, RNAi
ggcauccacuuacuggugguu

SEQ ID NO: 14085 - RNA, 21 nt, RNAi
uuccguaggugaaugaccacc

SEQ ID NO: 14086 - DNA, 21 bp, homo sapiens
gacctttatgatgatgcagct

SEQ ID NO: 14087 - RNA, 21 nt, RNAi
ccuuuaugaugaugcagcuuu

SEQ ID NO: 14088 - RNA, 21 nt, RNAi
uuggaaauacuacuacgucga

SEQ ID NO: 14089 - DNA, 21 bp, homo sapiens
gaatatccttgctcaggctct

SEQ ID NO: 14090 - RNA, 21 nt, RNAi
auauccuugcucaggcucuuu

SEQ ID NO: 14091 - RNA, 21 nt, RNAi
uuuauaggaacgaguccgaga

SEQ ID NO: 14092 - DNA, 21 bp, homo sapiens
gacacttctttgctgttgcaa

SEQ ID NO: 14093 - RNA, 21 nt, RNAi
cacuucuuugcuguugcaauu

SEQ ID NO: 14094 - RNA, 21 nt, RNAi
uugugaagaaacgacaacguu

SEQ ID NO: 14095 - DNA, 21 bp, homo sapiens
gaagtatatggttcattaagc

SEQ ID NO: 14096 - RNA, 21 nt, RNAi
aguauaugguucauuaagcuu

SEQ ID NO: 14097 - RNA, 21 nt, RNAi
uuucauauaccaaguaauucg

SEQ ID NO: 14098 - DNA, 21 bp, homo sapiens
gaatatttggaacttaccaag

SEQ ID NO: 14099 - RNA, 21 nt, RNAi
auauuuggaacuuaccaaguu

SEQ ID NO: 14100 - RNA, 21 nt, RNAi
uuuauaaaccuugaaugguuc

SEQ ID NO: 14101 - DNA, 21 bp, homo sapiens
gaacttaccaagtcctaagag

SEQ ID NO: 14102 - RNA, 21 nt, RNAi
acuuaccaaguccuaagaguu

SEQ ID NO: 14103 - RNA, 21 nt, RNAi
uuugaaugguucaggauucuc

SEQ ID NO: 14104 - DNA, 21 bp, homo sapiens
gaaactcttggaccaagattt

SEQ ID NO: 14105 - RNA, 21 nt, RNAi
aacucuuggaccaagauuuuu

SEQ ID NO: 14106 - RNA, 21 nt, RNAi
uuuugagaaccugguucuaaa

SEQ ID NO: 14107 - DNA, 21 bp, homo sapiens
tatacaacttggcttcacata

SEQ ID NO: 14108 - RNA, 21 nt, RNAi
uacaacuuggcuucacauauu

SEQ ID NO: 14109 - RNA, 21 nt, RNAi
uuauguugaaccgaaguguau

SEQ ID NO: 14110 - DNA, 21 bp, homo sapiens
tacaacttggcttcacatact

SEQ ID NO: 14111 - RNA, 21 nt, RNAi
caacuuggcuucacauacuuu

SEQ ID NO: 14112 - RNA, 21 nt, RNAi
uuguugaaccgaaguguauga

SEQ ID NO: 14113 - DNA, 21 bp, homo sapiens
taatctccgccttgaccggtg

SEQ ID NO: 14114 - RNA, 21 nt, RNAi
aucuccgccuugaccgguguu

SEQ ID NO: 14115 - RNA, 21 nt, RNAi
uuuagaggcggaacuggccac

SEQ ID NO: 14116 - DNA, 21 bp, homo sapiens
taccgctgtcgccaccgaaac

SEQ ID NO: 14117 - RNA, 21 nt, RNAi
ccgcugucgccaccgaaacuu

SEQ ID NO: 14118 - RNA, 21 nt, RNAi
uuggcgacagcgguggcuuug

SEQ ID NO: 14119 - DNA, 21 bp, homo sapiens
tattctctcaggcctgccttt

SEQ ID NO: 14120 - RNA, 21 nt, RNAi
uucucucaggccugccuuuuu

SEQ ID NO: 14121 - RNA, 21 nt, RNAi
uuaagagaguccggacggaaa

SEQ ID NO: 14122 - DNA, 21 bp, homo sapiens
taataggaacagctgcctgta

SEQ ID NO: 14123 - RNA, 21 nt, RNAi
auaggaacagcugccuguauu

SEQ ID NO: 14124 - RNA, 21 nt, RNAi
uuuauccuugucgacggacau

SEQ ID NO: 14125 - DNA, 21 bp, homo sapiens
taggaacagctgcctgtacat

SEQ ID NO: 14126 - RNA, 21 nt, RNAi
ggaacagcugccuguacauuu

SEQ ID NO: 14127 - RNA, 21 nt, RNAi
uuccuugucgacggacaugua

SEQ ID NO: 14128 - DNA, 21 bp, homo sapiens
tacatcaacatcttctcagaa

SEQ ID NO: 14129 - RNA, 21 nt, RNAi
caucaacaucuucucagaauu

SEQ ID NO: 14130 - RNA, 21 nt, RNAi
uuguaguuguagaagagucuu

SEQ ID NO: 14131 - DNA, 21 bp, homo sapiens
tagctgtgctttccagagatg

SEQ ID NO: 14132 - RNA, 21 nt, RNAi
gcugugcuuuccagagauguu

SEQ ID NO: 14133 - RNA, 21 nt, RNAi
uucgacacgaaaggucucuac

SEQ ID NO: 14134 - DNA, 21 bp, homo sapiens
tagttggagaattcctgcagc

SEQ ID NO: 14135 - RNA, 21 nt, RNAi
guuggagaauuccugcagcuu

SEQ ID NO: 14136 - RNA, 21 nt, RNAi
uucaaccucuuaaggacgucg

SEQ ID NO: 14137 - DNA, 21 bp, homo sapiens
tatcatgttctcaaagacctt

SEQ ID NO: 14138 - RNA, 21 nt, RNAi
ucauguucucaaagaccuuuu

SEQ ID NO: 14139 - RNA, 21 nt, RNAi
uuaguacaagaguuucuggaa

SEQ ID NO: 14140 - DNA, 21 bp, homo sapiens
tacagtggaaggtcttgatgc

SEQ ID NO: 14141 - RNA, 21 nt, RNAi
caguggaaggucuugaugcuu

SEQ ID NO: 14142 - RNA, 21 nt, RNAi
uugucaccuuccagaacuacg

SEQ ID NO: 14143 - DNA, 21 bp, homo sapiens
tacatgattcatgatcaggaa

SEQ ID NO: 14144 - RNA, 21 nt, RNAi
caugauucaugaucaggaauu

SEQ ID NO: 14145 - RNA, 21 nt, RNAi
uuguacuaaguacuaguccuu

SEQ ID NO: 14146 - DNA, 21 bp, homo sapiens
tattgaaggtgttgtgttaca

SEQ ID NO: 14147 - RNA, 21 nt, RNAi
uugaagguguuguguuacauu

SEQ ID NO: 14148 - RNA, 21 nt, RNAi
uuaacuuccacaacacaaugu

SEQ ID NO: 14149 - DNA, 21 bp, homo sapiens
tacagttattagaggaagatg

SEQ ID NO: 14150 - RNA, 21 nt, RNAi
caguuauuagaggaagauguu

SEQ ID NO: 14151 - RNA, 21 nt, RNAi
uugucaauaaucuccuucuac

SEQ ID NO: 14152 - DNA, 21 bp, homo sapiens
tattagaggaagatgatgttg

SEQ ID NO: 14153 - RNA, 21 nt, RNAi
uuagaggaagaugauguuguu

SEQ ID NO: 14154 - RNA, 21 nt, RNAi
uuaaucuccuucuacuacaac

SEQ ID NO: 14155 - DNA, 21 bp, homo sapiens
tagaggaagatgatgttgtga

SEQ ID NO: 14156 - RNA, 21 nt, RNAi
gaggaagaugauguugugauu

SEQ ID NO: 14157 - RNA, 21 nt, RNAi
uucuccuucuacuacaacacu

SEQ ID NO: 14158 - DNA, 21 bp, homo sapiens
tacaaggataaagagactgga

SEQ ID NO: 14159 - RNA, 21 nt, RNAi
caaggauaaagagacuggauu

SEQ ID NO: 14160 - RNA, 21 nt, RNAi
uuguuccuauuucucugaccu

SEQ ID NO: 14161 - DNA, 21 bp, homo sapiens
taaagagactggagatatcaa

SEQ ID NO: 14162 - RNA, 21 nt, RNAi
aagagacuggagauaucaauu

SEQ ID NO: 14163 - RNA, 21 nt, RNAi
uuuucucugaccucuauaguu

SEQ ID NO: 14164 - DNA, 21 bp, homo sapiens
tatcaaggaactccatgctcc

SEQ ID NO: 14165 - RNA, 21 nt, RNAi
ucaaggaacuccaugcuccuu

SEQ ID NO: 14166 - RNA, 21 nt, RNAi
uuaguuccuugagguacgagg

SEQ ID NO: 14167 - DNA, 21 bp, homo sapiens
tatgaagaatgcaccacagtt

SEQ ID NO: 14168 - RNA, 21 nt, RNAi
ugaagaaugcaccacaguuuu

SEQ ID NO: 14169 - RNA, 21 nt, RNAi
uuacuucuuacguggugucaa

SEQ ID NO: 14170 - DNA, 21 bp, homo sapiens
taaagcaaatcatgctgaact

SEQ ID NO: 14171 - RNA, 21 nt, RNAi
aagcaaaucaugcugaacuuu

SEQ ID NO: 14172 - RNA, 21 nt, RNAi
uuuucguuuaguacgacuuga

SEQ ID NO: 14173 - DNA, 21 bp, homo sapiens
taccggatttcatccagtgaa

SEQ ID NO: 14174 - RNA, 21 nt, RNAi
ccggauuucauccagugaauu

SEQ ID NO: 14175 - RNA, 21 nt, RNAi
uuggccuaaaguaggucacuu

SEQ ID NO: 14176 - DNA, 21 bp, homo sapiens
tacttgttgacattagaggag

SEQ ID NO: 14177 - RNA, 21 nt, RNAi
cuuguugacauuagaggaguu

SEQ ID NO: 14178 - RNA, 21 nt, RNAi
uugaacaacuguaaucuccuc

SEQ ID NO: 14179 - DNA, 21 bp, homo sapiens
tagaggagaaatgccaaggaa

SEQ ID NO: 14180 - RNA, 21 nt, RNAi
gaggagaaaugccaaggaauu

SEQ ID NO: 14181 - RNA, 21 nt, RNAi
uucuccucuuuacgguuccuu

SEQ ID NO: 14182 - DNA, 21 bp, homo sapiens
tacctgatcacctgaaagaac

SEQ ID NO: 14183 - RNA, 21 nt, RNAi
ccugaucaccugaaagaacuu

SEQ ID NO: 14184 - RNA, 21 nt, RNAi
uuggacuaguggacuuucuug

SEQ ID NO: 14185 - DNA, 21 bp, homo sapiens
tagaagccactgacaattctc

SEQ ID NO: 14186 - RNA, 21 nt, RNAi
gaagccacugacaauucucuu

SEQ ID NO: 14187 - RNA, 21 nt, RNAi
uucuucggugacuguuaagag

SEQ ID NO: 14188 - DNA, 21 bp, homo sapiens
tagcaagcttccttcctcctt

SEQ ID NO: 14189 - RNA, 21 nt, RNAi
gcaagcuuccuuccuccuuuu

SEQ ID NO: 14190 - RNA, 21 nt, RNAi
uucguucgaaggaaggaggaa

SEQ ID NO: 14191 - DNA, 21 bp, homo sapiens
tataatatgaggcatccactt

SEQ ID NO: 14192 - RNA, 21 nt, RNAi
uaauaugaggcauccacuuuu

SEQ ID NO: 14193 - RNA, 21 nt, RNAi
uuauuauacuccguaggugaa

SEQ ID NO: 14194 - DNA, 21 bp, homo sapiens
taatatgaggcatccacttac

SEQ ID NO: 14195 - RNA, 21 nt, RNAi
auaugaggcauccacuuacuu

SEQ ID NO: 14196 - RNA, 21 nt, RNAi
uuuauacuccguaggugaaug

SEQ ID NO: 14197 - DNA, 21 bp, homo sapiens
tatgaggcatccacttactgg

SEQ ID NO: 14198 - RNA, 21 nt, RNAi
ugaggcauccacuuacugguu

SEQ ID NO: 14199 - RNA, 21 nt, RNAi
uuacuccguaggugaaugacc

SEQ ID NO: 14200 - DNA, 21 bp, homo sapiens
tactggtggaggaatgactgt

SEQ ID NO: 14201 - RNA, 21 nt, RNAi
cugguggaggaaugacuguuu

SEQ ID NO: 14202 - RNA, 21 nt, RNAi
uugaccaccuccuuacugaca

SEQ ID NO: 14203 - DNA, 21 bp, homo sapiens
tatccttgctcaggctcttta

SEQ ID NO: 14204 - RNA, 21 nt, RNAi
uccuugcucaggcucuuuauu

SEQ ID NO: 14205 - RNA, 21 nt, RNAi
uuaggaacgaguccgagaaau

SEQ ID NO: 14206 - DNA, 21 bp, homo sapiens
tatttcaaacttggtggcgaa

SEQ ID NO: 14207 - RNA, 21 nt, RNAi
uuucaaacuugguggcgaauu

SEQ ID NO: 14208 - RNA, 21 nt, RNAi
uuaaaguuugaaccaccgcuu

SEQ ID NO: 14209 - DNA, 21 bp, homo sapiens
tagctttaattggacacttct

SEQ ID NO: 14210 - RNA, 21 nt, RNAi
gcuuuaauuggacacuucuuu

SEQ ID NO: 14211 - RNA, 21 nt, RNAi
uucgaaauuaaccugugaaga

SEQ ID NO: 14212 - DNA, 21 bp, homo sapiens
taattggacacttctttgctg

SEQ ID NO: 14213 - RNA, 21 nt, RNAi
auuggacacuucuuugcuguu

SEQ ID NO: 14214 - RNA, 21 nt, RNAi
uuuaaccugugaagaaacgac

SEQ ID NO: 14215 - DNA, 21 bp, homo sapiens
taagtcagaaccttggattac

SEQ ID NO: 14216 - RNA, 21 nt, RNAi
agucagaaccuuggauuacuu

SEQ ID NO: 14217 - RNA, 21 nt, RNAi
uuucagucuuggaaccuaaug

SEQ ID NO: 14218 - DNA, 21 bp, homo sapiens
tagtagtgctgtattgtacaa

SEQ ID NO: 14219 - RNA, 21 nt, RNAi
guagugcuguauuguacaauu

SEQ ID NO: 14220 - RNA, 21 nt, RNAi
uucaucacgacauaacauguu

SEQ ID NO: 14221 - DNA, 21 bp, homo sapiens
tagtgctgtattgtacaaagc

SEQ ID NO: 14222 - RNA, 21 nt, RNAi
gugcuguauuguacaaagcuu

SEQ ID NO: 14223 - RNA, 21 nt, RNAi
uucacgacauaacauguuucg

SEQ ID NO: 14224 - DNA, 21 bp, homo sapiens
tattgtacaaagcgtgttctg

SEQ ID NO: 14225 - RNA, 21 nt, RNAi
uuguacaaagcguguucuguu

SEQ ID NO: 14226 - RNA, 21 nt, RNAi
uuaacauguuucgcacaagac

SEQ ID NO: 14227 - DNA, 21 bp, homo sapiens
tacaaagcgtgttctgtaata

SEQ ID NO: 14228 - RNA, 21 nt, RNAi
caaagcguguucuguaauauu

SEQ ID NO: 14229 - RNA, 21 nt, RNAi
uuguuucgcacaagacauuau

SEQ ID NO: 14230 - DNA, 21 bp, homo sapiens
tatttggaacttaccaagtcc

SEQ ID NO: 14231 - RNA, 21 nt, RNAi
uuuggaacuuaccaaguccuu

SEQ ID NO: 14232 - RNA, 21 nt, RNAi
uuaaaccuugaaugguucagg

SEQ ID NO: 14233 - DNA, 21 bp, homo sapiens
taccaagtcctaagagacttt

SEQ ID NO: 14234 - RNA, 21 nt, RNAi
ccaaguccuaagagacuuuuu

SEQ ID NO: 14235 - RNA, 21 nt, RNAi
uugguucaggauucucugaaa

SEQ ID NO: 14236 - DNA, 21 bp, homo sapiens
tatatagcatagtaccatacc

SEQ ID NO: 14237 - RNA, 21 nt, RNAi
uauagcauaguaccauaccuu

SEQ ID NO: 14238 - RNA, 21 nt, RNAi
uuauaucguaucaugguaugg

SEQ ID NO: 14239 - DNA, 21 bp, homo sapiens
tatagcatagtaccataccac

SEQ ID NO: 14240 - RNA, 21 nt, RNAi
uagcauaguaccauaccacuu

SEQ ID NO: 14241 - RNA, 21 nt, RNAi
uuaucguaucaugguauggug

SEQ ID NO: 14242 - DNA, 21 bp, homo sapiens
tagcatagtaccataccactt

SEQ ID NO: 14243 - RNA, 21 nt, RNAi
gcauaguaccauaccacuuuu

SEQ ID NO: 14244 - RNA, 21 nt, RNAi
uucguaucaugguauggugaa

SEQ ID NO: 14245 - DNA, 21 bp, homo sapiens
taccataccacttataaagtg

SEQ ID NO: 14246 - RNA, 21 nt, RNAi
ccauaccacuuauaaaguguu

SEQ ID NO: 14247 - RNA, 21 nt, RNAi
uugguauggugaauauuucac

SEQ ID NO: 14248 - DNA, 21 bp, homo sapiens
taccacttataaagtggaaac

SEQ ID NO: 14249 - RNA, 21 nt, RNAi
ccacuuauaaaguggaaacuu

SEQ ID NO: 14250 - RNA, 21 nt, RNAi
uuggugaauauuucaccuuug

SEQ ID NO: 14251 - DNA, 21 bp, homo sapiens
tataaagtggaaactcttgga

SEQ ID NO: 14252 - RNA, 21 nt, RNAi
uaaaguggaaacucuuggauu

SEQ ID NO: 14253 - RNA, 21 nt, RNAi
uuauuucaccuuugagaaccu

SEQ ID NO: 14254 - DNA, 21 bp, homo sapiens
taaagtggaaactcttggacc

SEQ ID NO: 14255 - RNA, 21 nt, RNAi
aaguggaaacucuuggaccuu

SEQ ID NO: 14256 - RNA, 21 nt, RNAi
uuuucaccuuugagaaccugg

SEQ ID NO: 14257 - DNA, 21 bp, homo sapiens
taaattagtgctaatgctgag

SEQ ID NO: 14258 - RNA, 21 nt, RNAi
aauuagugcuaaugcugaguu

SEQ ID NO: 14259 - RNA, 21 nt, RNAi
uuuuaaucacgauuacgacuc

SEQ ID NO: 14260 - DNA, 21 bp, homo sapiens
tagtgctaatgctgaggagaa

SEQ ID NO: 14261 - RNA, 21 nt, RNAi
gugcuaaugcugaggagaauu

SEQ ID NO: 14262 - RNA, 21 nt, RNAi
uucacgauuacgacuccucuu

SEQ ID NO: 14263 - DNA, 21 bp, homo sapiens
taatgctgaggagaactacag

SEQ ID NO: 14264 - RNA, 21 nt, RNAi
augcugaggagaacuacaguu

SEQ ID NO: 14265 - RNA, 21 nt, RNAi
uuuacgacuccucuugauguc

SEQ ID NO: 14266 - DNA, 21 bp, homo sapiens
aagcttaataggaacagctgc

SEQ ID NO: 14267 - RNA, 21 nt, RNAi
gcuuaauaggaacagcugcuu

SEQ ID NO: 14268 - RNA, 21 nt, RNAi
uucgaauuauccuugucgacg

SEQ ID NO: 14269 - DNA, 21 bp, homo sapiens
aaaggtgacagtcattgagag

SEQ ID NO: 14270 - RNA, 21 nt, RNAi
aggugacagucauugagaguu

SEQ ID NO: 14271 - RNA, 21 nt, RNAi
uuuccacugucaguaacucuc

SEQ ID NO: 14272 - DNA, 21 bp, homo sapiens
aaggtgacagtcattgagaga

SEQ ID NO: 14273 - RNA, 21 nt, RNAi
ggugacagucauugagagauu

SEQ ID NO: 14274 - RNA, 21 nt, RNAi
uuccacugucaguaacucucu

SEQ ID NO: 14275 - DNA, 21 bp, homo sapiens
aaacaatcaagtgcagagtgg

SEQ ID NO: 14276 - RNA, 21 nt, RNAi
acaaucaagugcagagugguu

SEQ ID NO: 14277 - RNA, 21 nt, RNAi
uuuguuaguucacgucucacc

SEQ ID NO: 14278 - DNA, 21 bp, homo sapiens
aagattcatcatgagtctccg

SEQ ID NO: 14279 - RNA, 21 nt, RNAi
gauucaucaugagucuccguu

SEQ ID NO: 14280 - RNA, 21 nt, RNAi
uucuaaguaguacucagaggc

SEQ ID NO: 14281 - DNA, 21 bp, homo sapiens
aatgcaccacagtttaaagca

SEQ ID NO: 14282 - RNA, 21 nt, RNAi
ugcaccacaguuuaaagcauu

SEQ ID NO: 14283 - RNA, 21 nt, RNAi
uuacguggugucaaauuucgu

SEQ ID NO: 14284 - DNA, 21 bp, homo sapiens
aaactcgagtacttgttgaca

SEQ ID NO: 14285 - RNA, 21 nt, RNAi
acucgaguacuuguugacauu

SEQ ID NO: 14286 - RNA, 21 nt, RNAi
uuugagcucaugaacaacugu

SEQ ID NO: 14287 - DNA, 21 bp, homo sapiens
aaacttggtggcgaatgtgtt

SEQ ID NO: 14288 - RNA, 21 nt, RNAi
acuugguggcgaauguguuuu

SEQ ID NO: 14289 - RNA, 21 nt, RNAi
uuugaaccaccgcuuacacaa

SEQ ID NO: 14290 - DNA, 21 bp, homo sapiens
aagtcagaaccttggattaca

SEQ ID NO: 14291 - RNA, 21 nt, RNAi
gucagaaccuuggauuacauu

SEQ ID NO: 14292 - RNA, 21 nt, RNAi
uucagucuuggaaccuaaugu

SEQ ID NO: 14293 - DNA, 21 bp, homo sapiens
caagcttaataggaacagctg

SEQ ID NO: 14294 - RNA, 21 nt, RNAi
agcuuaauaggaacagcuguu

SEQ ID NO: 14295 - RNA, 21 nt, RNAi
uuucgaauuauccuugucgac

SEQ ID NO: 14296 - DNA, 21 bp, homo sapiens
cagtcattgagagagacttaa

SEQ ID NO: 14297 - RNA, 21 nt, RNAi
gucauugagagagacuuaauu

SEQ ID NO: 14298 - RNA, 21 nt, RNAi
uucaguaacucucucugaauu

SEQ ID NO: 14299 - DNA, 21 bp, homo sapiens
caaggaactccatgctccact

SEQ ID NO: 14300 - RNA, 21 nt, RNAi
aggaacuccaugcuccacuuu

SEQ ID NO: 14301 - RNA, 21 nt, RNAi
uuuccuugagguacgagguga

SEQ ID NO: 14302 - DNA, 21 bp, homo sapiens
catctaccggatttcatccag

SEQ ID NO: 14303 - RNA, 21 nt, RNAi
ucuaccggauuucauccaguu

SEQ ID NO: 14304 - RNA, 21 nt, RNAi
uuagauggccuaaaguagguc

SEQ ID NO: 14305 - DNA, 21 bp, homo sapiens
catccagtgaaactcgagtac

SEQ ID NO: 14306 - RNA, 21 nt, RNAi
uccagugaaacucgaguacuu

SEQ ID NO: 14307 - RNA, 21 nt, RNAi
uuaggucacuuugagcucaug

SEQ ID NO: 14308 - DNA, 21 bp, homo sapiens
cagtgaaactcgagtacttgt

SEQ ID NO: 14309 - RNA, 21 nt, RNAi
gugaaacucgaguacuuguuu

SEQ ID NO: 14310 - RNA, 21 nt, RNAi
uucacuuugagcucaugaaca

SEQ ID NO: 14311 - DNA, 21 bp, homo sapiens
cactgacaattctcatctgag

SEQ ID NO: 14312 - RNA, 21 nt, RNAi
cugacaauucucaucugaguu

SEQ ID NO: 14313 - RNA, 21 nt, RNAi
uugacuguuaagaguagacuc

SEQ ID NO: 14314 - DNA, 21 bp, homo sapiens
catataatatgaggcatccac

SEQ ID NO: 14315 - RNA, 21 nt, RNAi
uauaauaugaggcauccacuu

SEQ ID NO: 14316 - RNA, 21 nt, RNAi
uuauauuauacuccguaggug

SEQ ID NO: 14317 - DNA, 21 bp, homo sapiens
cattcctttgtcgtgaatatc

SEQ ID NO: 14318 - RNA, 21 nt, RNAi
uuccuuugucgugaauaucuu

SEQ ID NO: 14319 - RNA, 21 nt, RNAi
uuaaggaaacagcacuuauag

SEQ ID NO: 14320 - DNA, 21 bp, homo sapiens
caaacttggtggcgaatgtgt

SEQ ID NO: 14321 - RNA, 21 nt, RNAi
aacuugguggcgaauguguuu

SEQ ID NO: 14322 - RNA, 21 nt, RNAi
uuuugaaccaccgcuuacaca

SEQ ID NO: 14323 - DNA, 21 bp, homo sapiens
gaccttggtcttggagataca

SEQ ID NO: 14324 - RNA, 21 nt, RNAi
ccuuggucuuggagauacauu

SEQ ID NO: 14325 - RNA, 21 nt, RNAi
uuggaaccagaaccucuaugu

SEQ ID NO: 14326 - DNA, 21 bp, homo sapiens
gaagattcatcatgagtctcc

SEQ ID NO: 14327 - RNA, 21 nt, RNAi
agauucaucaugagucuccuu

SEQ ID NO: 14328 - RNA, 21 nt, RNAi
uuucuaaguaguacucagagg

SEQ ID NO: 14329 - DNA, 21 bp, homo sapiens
gattcatcatgagtctccgga

SEQ ID NO: 14330 - RNA, 21 nt, RNAi
uucaucaugagucuccggauu

SEQ ID NO: 14331 - RNA, 21 nt, RNAi
uuaaguaguacucagaggccu

SEQ ID NO: 14332 - DNA, 21 bp, homo sapiens
gagttcagtacaaggataaag

SEQ ID NO: 14333 - RNA, 21 nt, RNAi
guucaguacaaggauaaaguu

SEQ ID NO: 14334 - RNA, 21 nt, RNAi
uucaagucauguuccuauuuc

SEQ ID NO: 14335 - DNA, 21 bp, homo sapiens
gatatcaaggaactccatgct

SEQ ID NO: 14336 - RNA, 21 nt, RNAi
uaucaaggaacuccaugcuuu

SEQ ID NO: 14337 - RNA, 21 nt, RNAi
uuauaguuccuugagguacga

SEQ ID NO: 14338 - DNA, 21 bp, homo sapiens
gaaactcgagtacttgttgac

SEQ ID NO: 14339 - RNA, 21 nt, RNAi
aacucgaguacuuguugacuu

SEQ ID NO: 14340 - RNA, 21 nt, RNAi
uuuugagcucaugaacaacug

SEQ ID NO: 14341 - DNA, 21 bp, homo sapiens
gatcacctgaaagaaccattc

SEQ ID NO: 14342 - RNA, 21 nt, RNAi
ucaccugaaagaaccauucuu

SEQ ID NO: 14343 - RNA, 21 nt, RNAi
uuaguggacuuucuugguaag

SEQ ID NO: 14344 - DNA, 21 bp, homo sapiens
gacaattctcatctgaggtcc

SEQ ID NO: 14345 - RNA, 21 nt, RNAi
caauucucaucugagguccuu

SEQ ID NO: 14346 - RNA, 21 nt, RNAi
uuguuaagaguagacuccagg

SEQ ID NO: 14347 - DNA, 21 bp, homo sapiens
gaggtccatgctagcaagctt

SEQ ID NO: 14348 - RNA, 21 nt, RNAi
gguccaugcuagcaagcuuuu

SEQ ID NO: 14349 - RNA, 21 nt, RNAi
uuccagguacgaucguucgaa

SEQ ID NO: 14350 - DNA, 21 bp, homo sapiens
tattgaaggtgttgtgttaca

SEQ ID NO: 14351 - RNA, 21 nt, RNAi
uugaagguguuguguuacauu

SEQ ID NO: 14352 - RNA, 21 nt, RNAi
uuaacuuccacaacacaaugu

SEQ ID NO: 14353 - DNA, 21 bp, homo sapiens
tacaaggataaagagactgga

SEQ ID NO: 14354 - RNA, 21 nt, RNAi
caaggauaaagagacuggauu

SEQ ID NO: 14355 - RNA, 21 nt, RNAi
uuguuccuauuucucugaccu

SEQ ID NO: 14356 - DNA, 21 bp, homo sapiens
tatcaaggaactccatgctcc

SEQ ID NO: 14357 - RNA, 21 nt, RNAi
ucaaggaacuccaugcuccuu

SEQ ID NO: 14358 - RNA, 21 nt, RNAi
uuaguuccuugagguacgagg

SEQ ID NO: 14359 - DNA, 21 bp, homo sapiens
tagctttaattggacacttct

SEQ ID NO: 14360 - RNA, 21 nt, RNAi
gcuuuaauuggacacuucuuu

SEQ ID NO: 14361 - RNA, 21 nt, RNAi
uucgaaauuaaccugugaaga

SEQ ID NO: 14362 - DNA, 21 bp, homo sapiens
taagtcagaaccttggattac

SEQ ID NO: 14363 - RNA, 21 nt, RNAi
agucagaaccuuggauuacuu

SEQ ID NO: 14364 - RNA, 21 nt, RNAi
uuucagucuuggaaccuaaug

SEQ ID NO: 14365 - DNA, 21 bp, homo sapiens
aaagctcctgctgcttctgta

SEQ ID NO: 14366 - RNA, 21 nt, RNAi
agcuccugcugcuucuguauu

SEQ ID NO: 14367 - RNA, 21 nt, RNAi
uuucgaggacgacgaagacau

SEQ ID NO: 14368 - DNA, 21 bp, homo sapiens
aagctcctgctgcttctgtac

SEQ ID NO: 14369 - RNA, 21 nt, RNAi
gcuccugcugcuucuguacuu

SEQ ID NO: 14370 - RNA, 21 nt, RNAi
uucgaggacgacgaagacaug

SEQ ID NO: 14371 - DNA, 21 bp, homo sapiens
aaccggctcctgagtatcacc

SEQ ID NO: 14372 - RNA, 21 nt, RNAi
ccggcuccugaguaucaccuu

SEQ ID NO: 14373 - RNA, 21 nt, RNAi
uuggccgaggacucauagugg

SEQ ID NO: 14374 - DNA, 21 bp, homo sapiens
aacgtggccaagattcagctg

SEQ ID NO: 14375 - RNA, 21 nt, RNAi
cguggccaagauucagcuguu

SEQ ID NO: 14376 - RNA, 21 nt, RNAi
uugcaccgguucuaagucgac

SEQ ID NO: 14377 - DNA, 21 bp, homo sapiens
aagattcagctgcgcctggct

SEQ ID NO: 14378 - RNA, 21 nt, RNAi
gauucagcugcgccuggcuuu

SEQ ID NO: 14379 - RNA, 21 nt, RNAi
uucuaagucgacgcggaccga

SEQ ID NO: 14380 - DNA, 21 bp, homo sapiens
aagtcctggactgccagctcc

SEQ ID NO: 14381 - RNA, 21 nt, RNAi
guccuggacugccagcuccuu

SEQ ID NO: 14382 - RNA, 21 nt, RNAi
uucaggaccugacggucgagg

SEQ ID NO: 14383 - DNA, 21 bp, homo sapiens
aatctccactgtactggcaac

SEQ ID NO: 14384 - RNA, 21 nt, RNAi
ucuccacuguacuggcaacuu

SEQ ID NO: 14385 - RNA, 21 nt, RNAi
uuagaggugacaugaccguug

SEQ ID NO: 14386 - DNA, 21 bp, homo sapiens
aagcacacggaggatgtcggt

SEQ ID NO: 14387 - RNA, 21 nt, RNAi
gcacacggaggaugucgguuu

SEQ ID NO: 14388 - RNA, 21 nt, RNAi
uucgugugccuccuacagcca

SEQ ID NO: 14389 - DNA, 21 bp, homo sapiens
aattcgttgatcaaccagata

SEQ ID NO: 14390 - RNA, 21 nt, RNAi
uucguugaucaaccagauauu

SEQ ID NO: 14391 - RNA, 21 nt, RNAi
uuaagcaacuaguuggucuau

SEQ ID NO: 14392 - DNA, 21 bp, homo sapiens
aaccagatagagaacctgaat

SEQ ID NO: 14393 - RNA, 21 nt, RNAi
ccagauagagaaccugaauuu

SEQ ID NO: 14394 - RNA, 21 nt, RNAi
uuggucuaucucuuggacuua

SEQ ID NO: 14395 - DNA, 21 bp, homo sapiens
aacctgaatatccaggtggag

SEQ ID NO: 14396 - RNA, 21 nt, RNAi
ccugaauauccagguggaguu

SEQ ID NO: 14397 - RNA, 21 nt, RNAi
uuggacuuauagguccaccuc

SEQ ID NO: 14398 - DNA, 21 bp, homo sapiens
aatatccaggtggaggacatt

SEQ ID NO: 14399 - RNA, 21 nt, RNAi
uauccagguggaggacauuuu

SEQ ID NO: 14400 - RNA, 21 nt, RNAi
uuauagguccaccuccuguaa

SEQ ID NO: 14401 - DNA, 21 bp, homo sapiens
aagacctggaagcagatctgt

SEQ ID NO: 14402 - RNA, 21 nt, RNAi
gaccuggaagcagaucuguuu

SEQ ID NO: 14403 - RNA, 21 nt, RNAi
uucuggaccuucgucuagaca

SEQ ID NO: 14404 - DNA, 21 bp, homo sapiens
aagcagatctgtgacaagcac

SEQ ID NO: 14405 - RNA, 21 nt, RNAi
gcagaucugugacaagcacuu

SEQ ID NO: 14406 - RNA, 21 nt, RNAi
uucgucuagacacuguucgug

SEQ ID NO: 14407 - DNA, 21 bp, homo sapiens
aagcactggacggccaagaat

SEQ ID NO: 14408 - RNA, 21 nt, RNAi
gcacuggacggccaagaauuu

SEQ ID NO: 14409 - RNA, 21 nt, RNAi
uucgugaccugccgguucuua

SEQ ID NO: 14410 - DNA, 21 bp, homo sapiens
aaatgtttgcctcacggagga

SEQ ID NO: 14411 - RNA, 21 nt, RNAi
auguuugccucacggaggauu

SEQ ID NO: 14412 - RNA, 21 nt, RNAi
uuuacaaacggagugccuccu

SEQ ID NO: 14413 - DNA, 21 bp, homo sapiens
aatgtttgcctcacggaggaa

SEQ ID NO: 14414 - RNA, 21 nt, RNAi
uguuugccucacggaggaauu

SEQ ID NO: 14415 - RNA, 21 nt, RNAi
uuacaaacggagugccuccuu

SEQ ID NO: 14416 - DNA, 21 bp, homo sapiens
aagcagcgctactggccattc

SEQ ID NO: 14417 - RNA, 21 nt, RNAi
gcagcgcuacuggccauucuu

SEQ ID NO: 14418 - RNA, 21 nt, RNAi
uucgucgcgaugaccgguaag

SEQ ID NO: 14419 - DNA, 21 bp, homo sapiens
aagaatgtcacctgcgagaat

SEQ ID NO: 14420 - RNA, 21 nt, RNAi
gaaugucaccugcgagaauuu

SEQ ID NO: 14421 - RNA, 21 nt, RNAi
uucuuacaguggacgcucuua

SEQ ID NO: 14422 - DNA, 21 bp, homo sapiens
aaagcatacaagccagagcaa

SEQ ID NO: 14423 - RNA, 21 nt, RNAi
agcauacaagccagagcaauu

SEQ ID NO: 14424 - RNA, 21 nt, RNAi
uuucguauguucggucucguu

SEQ ID NO: 14425 - DNA, 21 bp, homo sapiens
aagcatacaagccagagcaac

SEQ ID NO: 14426 - RNA, 21 nt, RNAi
gcauacaagccagagcaacuu

SEQ ID NO: 14427 - RNA, 21 nt, RNAi
uucguauguucggucucguug

SEQ ID NO: 14428 - DNA, 21 bp, homo sapiens
aaagaggcagtcactggctcc

SEQ ID NO: 14429 - RNA, 21 nt, RNAi
agaggcagucacuggcuccuu

SEQ ID NO: 14430 - RNA, 21 nt, RNAi
uuucuccgucagugaccgagg

SEQ ID NO: 14431 - DNA, 21 bp, homo sapiens
aacgagatccagtgcacaggc

SEQ ID NO: 14432 - RNA, 21 nt, RNAi
cgagauccagugcacaggcuu

SEQ ID NO: 14433 - RNA, 21 nt, RNAi
uugcucuaggucacguguccg

SEQ ID NO: 14434 - DNA, 21 bp, homo sapiens
aatgagaagtccattatagac

SEQ ID NO: 14435 - RNA, 21 nt, RNAi
ugagaaguccauuauagacuu

SEQ ID NO: 14436 - RNA, 21 nt, RNAi
uuacucuucagguaauaucug

SEQ ID NO: 14437 - DNA, 21 bp, homo sapiens
aagtccattatagactgcaag

SEQ ID NO: 14438 - RNA, 21 nt, RNAi
guccauuauagacugcaaguu

SEQ ID NO: 14439 - RNA, 21 nt, RNAi
uucagguaauaucugacguuc

SEQ ID NO: 14440 - DNA, 21 bp, homo sapiens
aagttcaatgccgagtctcag

SEQ ID NO: 14441 - RNA, 21 nt, RNAi
guucaaugccgagucucaguu

SEQ ID NO: 14442 - RNA, 21 nt, RNAi
uucaaguuacggcucagaguc

SEQ ID NO: 14443 - DNA, 21 bp, homo sapiens
aaccacgaggaggatgctggt

SEQ ID NO: 14444 - RNA, 21 nt, RNAi
ccacgaggaggaugcugguuu

SEQ ID NO: 14445 - RNA, 21 nt, RNAi
uuggugcuccuccuacgacca

SEQ ID NO: 14446 - DNA, 21 bp, homo sapiens
aagaagctgcgcctgaacggc

SEQ ID NO: 14447 - RNA, 21 nt, RNAi
gaagcugcgccugaacggcuu

SEQ ID NO: 14448 - RNA, 21 nt, RNAi
uucuucgacgcggacuugccg

SEQ ID NO: 14449 - DNA, 21 bp, homo sapiens
aacgccttccaggagacctgg

SEQ ID NO: 14450 - RNA, 21 nt, RNAi
cgccuuccaggagaccugguu

SEQ ID NO: 14451 - RNA, 21 nt, RNAi
uugcggaagguccucuggacc

SEQ ID NO: 14452 - DNA, 21 bp, homo sapiens
aacagcaacaaagtggtcatg

SEQ ID NO: 14453 - RNA, 21 nt, RNAi
cagcaacaaaguggucauguu

SEQ ID NO: 14454 - RNA, 21 nt, RNAi
uugucguuguuucaccaguac

SEQ ID NO: 14455 - DNA, 21 bp, homo sapiens
aacaaagtggtcatgagtgga

SEQ ID NO: 14456 - RNA, 21 nt, RNAi
caaaguggucaugaguggauu

SEQ ID NO: 14457 - RNA, 21 nt, RNAi
uuguuucaccaguacucaccu

SEQ ID NO: 14458 - DNA, 21 bp, homo sapiens
aaagtggtcatgagtggagtg

SEQ ID NO: 14459 - RNA, 21 nt, RNAi
aguggucaugaguggaguguu

SEQ ID NO: 14460 - RNA, 21 nt, RNAi
uuucaccaguacucaccucac

SEQ ID NO: 14461 - DNA, 21 bp, homo sapiens
aagtggtcatgagtggagtga

SEQ ID NO: 14462 - RNA, 21 nt, RNAi
guggucaugaguggagugauu

SEQ ID NO: 14463 - RNA, 21 nt, RNAi
uucaccaguacucaccucacu

SEQ ID NO: 14464 - DNA, 21 bp, homo sapiens
aatgcggagatggtgcagcag

SEQ ID NO: 14465 - RNA, 21 nt, RNAi
ugcggagauggugcagcaguu

SEQ ID NO: 14466 - RNA, 21 nt, RNAi
uuacgccucuaccacgucguc

SEQ ID NO: 14467 - DNA, 21 bp, homo sapiens
aacaatggccagtccgacttc

SEQ ID NO: 14468 - RNA, 21 nt, RNAi
caauggccaguccgacuucuu

SEQ ID NO: 14469 - RNA, 21 nt, RNAi
uuguuaccggucaggcugaag

SEQ ID NO: 14470 - DNA, 21 bp, homo sapiens
aatggccagtccgacttccgg

SEQ ID NO: 14471 - RNA, 21 nt, RNAi
uggccaguccgacuuccgguu

SEQ ID NO: 14472 - RNA, 21 nt, RNAi
uuaccggucaggcugaaggcc

SEQ ID NO: 14473 - DNA, 21 bp, homo sapiens
aacctcaatggcaccaaggtg

SEQ ID NO: 14474 - RNA, 21 nt, RNAi
ccucaauggcaccaagguguu

SEQ ID NO: 14475 - RNA, 21 nt, RNAi
uuggaguuaccgugguuccac

SEQ ID NO: 14476 - DNA, 21 bp, homo sapiens
aatggcaccaaggtggcagag

SEQ ID NO: 14477 - RNA, 21 nt, RNAi
uggcaccaagguggcagaguu

SEQ ID NO: 14478 - RNA, 21 nt, RNAi
uuaccgugguuccaccgucuc

SEQ ID NO: 14479 - DNA, 21 bp, homo sapiens
aaggccagcttctgcttggag

SEQ ID NO: 14480 - RNA, 21 nt, RNAi
ggccagcuucugcuuggaguu

SEQ ID NO: 14481 - RNA, 21 nt, RNAi
uuccggucgaagacgaaccuc

SEQ ID NO: 14482 - DNA, 21 bp, homo sapiens
aatgtgaaggagacatccaga

SEQ ID NO: 14483 - RNA, 21 nt, RNAi
ugugaaggagacauccagauu

SEQ ID NO: 14484 - RNA, 21 nt, RNAi
uuacacuuccucuguaggucu

SEQ ID NO: 14485 - DNA, 21 bp, homo sapiens
aaggagacatccagaagaatt

SEQ ID NO: 14486 - RNA, 21 nt, RNAi
ggagacauccagaagaauuuu

SEQ ID NO: 14487 - RNA, 21 nt, RNAi
uuccucuguaggucuucuuaa

SEQ ID NO: 14488 - DNA, 21 bp, homo sapiens
aagaattacgagtgtgccaac

SEQ ID NO: 14489 - RNA, 21 nt, RNAi
gaauuacgagugugccaacuu

SEQ ID NO: 14490 - RNA, 21 nt, RNAi
uucuuaaugcucacacgguug

SEQ ID NO: 14491 - DNA, 21 bp, homo sapiens
aattacgagtgtgccaacttc

SEQ ID NO: 14492 - RNA, 21 nt, RNAi
uuacgagugugccaacuucuu

SEQ ID NO: 14493 - RNA, 21 nt, RNAi
uuaaugcucacacgguugaag

SEQ ID NO: 14494 - DNA, 21 bp, homo sapiens
aacttcgaggttgcagaatcc

SEQ ID NO: 14495 - RNA, 21 nt, RNAi
cuucgagguugcagaauccuu

SEQ ID NO: 14496 - RNA, 21 nt, RNAi
uugaagcuccaacgucuuagg

SEQ ID NO: 14497 - DNA, 21 bp, homo sapiens
aatccgattactccaacaaca

SEQ ID NO: 14498 - RNA, 21 nt, RNAi
uccgauuacuccaacaacauu

SEQ ID NO: 14499 - RNA, 21 nt, RNAi
uuaggcuaaugagguuguugu

SEQ ID NO: 14500 - DNA, 21 bp, homo sapiens
aacaacatcatgaaatgcagg

SEQ ID NO: 14501 - RNA, 21 nt, RNAi
caacaucaugaaaugcagguu

SEQ ID NO: 14502 - RNA, 21 nt, RNAi
uuguuguaguacuuuacgucc

SEQ ID NO: 14503 - DNA, 21 bp, homo sapiens
aacatcatgaaatgcaggagc

SEQ ID NO: 14504 - RNA, 21 nt, RNAi
caucaugaaaugcaggagcuu

SEQ ID NO: 14505 - RNA, 21 nt, RNAi
uuguaguacuuuacguccucg

SEQ ID NO: 14506 - DNA, 21 bp, homo sapiens
aaatgcaggagccgctatgac

SEQ ID NO: 14507 - RNA, 21 nt, RNAi
augcaggagccgcuaugacuu

SEQ ID NO: 14508 - RNA, 21 nt, RNAi
uuuacguccucggcgauacug

SEQ ID NO: 14509 - DNA, 21 bp, homo sapiens
aatgcaggagccgctatgacg

SEQ ID NO: 14510 - RNA, 21 nt, RNAi
ugcaggagccgcuaugacguu

SEQ ID NO: 14511 - RNA, 21 nt, RNAi
uuacguccucggcgauacugc

SEQ ID NO: 14512 - DNA, 21 bp, homo sapiens
aactgccacataggtggttcc

SEQ ID NO: 14513 - RNA, 21 nt, RNAi
cugccacauaggugguuccuu

SEQ ID NO: 14514 - RNA, 21 nt, RNAi
uugacgguguauccaccaagg

SEQ ID NO: 14515 - DNA, 21 bp, homo sapiens
aaagtttgagcacttcagcgg

SEQ ID NO: 14516 - RNA, 21 nt, RNAi
aguuugagcacuucagcgguu

SEQ ID NO: 14517 - RNA, 21 nt, RNAi
uuucaaacucgugaagucgcc

SEQ ID NO: 14518 - DNA, 21 bp, homo sapiens
aaagaagcctgcgtggtcaac

SEQ ID NO: 14519 - RNA, 21 nt, RNAi
agaagccugcguggucaacuu

SEQ ID NO: 14520 - RNA, 21 nt, RNAi
uuucuucggacgcaccaguug

SEQ ID NO: 14521 - DNA, 21 bp, homo sapiens
aagaagcctgcgtggtcaact

SEQ ID NO: 14522 - RNA, 21 nt, RNAi
gaagccugcguggucaacuuu

SEQ ID NO: 14523 - RNA, 21 nt, RNAi
uucuucggacgcaccaguuga

SEQ ID NO: 14524 - DNA, 21 bp, homo sapiens
aagcctgcgtggtcaactcct

SEQ ID NO: 14525 - RNA, 21 nt, RNAi
gccugcguggucaacuccuuu

SEQ ID NO: 14526 - RNA, 21 nt, RNAi
uucggacgcaccaguugagga

SEQ ID NO: 14527 - DNA, 21 bp, homo sapiens
aactcctgtcttcaggccaca

SEQ ID NO: 14528 - RNA, 21 nt, RNAi
cuccugucuucaggccacauu

SEQ ID NO: 14529 - RNA, 21 nt, RNAi
uugaggacagaaguccggugu

SEQ ID NO: 14530 - DNA, 21 bp, homo sapiens
aacaactgagtctgaacgaat

SEQ ID NO: 14531 - RNA, 21 nt, RNAi
caacugagucugaacgaauuu

SEQ ID NO: 14532 - RNA, 21 nt, RNAi
uuguugacucagacuugcuua

SEQ ID NO: 14533 - DNA, 21 bp, homo sapiens
aactgagtctgaacgaatgcc

SEQ ID NO: 14534 - RNA, 21 nt, RNAi
cugagucugaacgaaugccuu

SEQ ID NO: 14535 - RNA, 21 nt, RNAi
uugacucagacuugcuuacgg

SEQ ID NO: 14536 - DNA, 21 bp, homo sapiens
aagccaccgagctcaccacag

SEQ ID NO: 14537 - RNA, 21 nt, RNAi
gccaccgagcucaccacaguu

SEQ ID NO: 14538 - RNA, 21 nt, RNAi
uucgguggcucgagugguguc

SEQ ID NO: 14539 - DNA, 21 bp, homo sapiens
aaacttgaatatctagacctc

SEQ ID NO: 14540 - RNA, 21 nt, RNAi
acuugaauaucuagaccucuu

SEQ ID NO: 14541 - RNA, 21 nt, RNAi
uuugaacuuauagaucuggag

SEQ ID NO: 14542 - DNA, 21 bp, homo sapiens
aacttgaatatctagacctct

SEQ ID NO: 14543 - RNA, 21 nt, RNAi
cuugaauaucuagaccucuuu

SEQ ID NO: 14544 - RNA, 21 nt, RNAi
uugaacuuauagaucuggaga

SEQ ID NO: 14545 - DNA, 21 bp, homo sapiens
aatatctagacctctcttcca

SEQ ID NO: 14546 - RNA, 21 nt, RNAi
uaucuagaccucucuuccauu

SEQ ID NO: 14547 - RNA, 21 nt, RNAi
uuauagaucuggagagaaggu

SEQ ID NO: 14548 - DNA, 21 bp, homo sapiens
aagtgactcatcttcctgttg

SEQ ID NO: 14549 - RNA, 21 nt, RNAi
gugacucaucuuccuguuguu

SEQ ID NO: 14550 - RNA, 21 nt, RNAi
uucacugaguagaaggacaac

SEQ ID NO: 14551 - DNA, 21 bp, homo sapiens
cagcaaccggctcctgagtat

SEQ ID NO: 14552 - RNA, 21 nt, RNAi
gcaaccggcuccugaguauuu

SEQ ID NO: 14553 - RNA, 21 nt, RNAi
uucguuggccgaggacucaua

SEQ ID NO: 14554 - DNA, 21 bp, homo sapiens
caaccggctcctgagtatcac

SEQ ID NO: 14555 - RNA, 21 nt, RNAi
accggcuccugaguaucacuu

SEQ ID NO: 14556 - RNA, 21 nt, RNAi
uuuggccgaggacucauagug

SEQ ID NO: 14557 - DNA, 21 bp, homo sapiens
caacgtggccaagattcagct

SEQ ID NO: 14558 - RNA, 21 nt, RNAi
acguggccaagauucagcuuu

SEQ ID NO: 14559 - RNA, 21 nt, RNAi
uuugcaccgguucuaagucga

SEQ ID NO: 14560 - DNA, 21 bp, homo sapiens
caagattcagctgcgcctggc

SEQ ID NO: 14561 - RNA, 21 nt, RNAi
agauucagcugcgccuggcuu

SEQ ID NO: 14562 - RNA, 21 nt, RNAi
uuucuaagucgacgcggaccg

SEQ ID NO: 14563 - DNA, 21 bp, homo sapiens
cagaagaggaagcacagcgag

SEQ ID NO: 14564 - RNA, 21 nt, RNAi
gaagaggaagcacagcgaguu

SEQ ID NO: 14565 - RNA, 21 nt, RNAi
uucuucuccuucgugucgcuc

SEQ ID NO: 14566 - DNA, 21 bp, homo sapiens
caccgtgtgcgatgacgactt

SEQ ID NO: 14567 - RNA, 21 nt, RNAi
ccgugugcgaugacgacuuuu

SEQ ID NO: 14568 - RNA, 21 nt, RNAi
uuggcacacgcuacugcugaa

SEQ ID NO: 14569 - DNA, 21 bp, homo sapiens
caagtcctggactgccagctc

SEQ ID NO: 14570 - RNA, 21 nt, RNAi
aguccuggacugccagcucuu

SEQ ID NO: 14571 - RNA, 21 nt, RNAi
uuucaggaccugacggucgag

SEQ ID NO: 14572 - DNA, 21 bp, homo sapiens
catctggttagacaatctcca

SEQ ID NO: 14573 - RNA, 21 nt, RNAi
ucugguuagacaaucuccauu

SEQ ID NO: 14574 - RNA, 21 nt, RNAi
uuagaccaaucuguuagaggu

SEQ ID NO: 14575 - DNA, 21 bp, homo sapiens
caatctccactgtactggcaa

SEQ ID NO: 14576 - RNA, 21 nt, RNAi
aucuccacuguacuggcaauu

SEQ ID NO: 14577 - RNA, 21 nt, RNAi
uuuagaggugacaugaccguu

SEQ ID NO: 14578 - DNA, 21 bp, homo sapiens
cactgtactggcaacgaggcg

SEQ ID NO: 14579 - RNA, 21 nt, RNAi
cuguacuggcaacgaggcguu

SEQ ID NO: 14580 - RNA, 21 nt, RNAi
uugacaugaccguugcuccgc

SEQ ID NO: 14581 - DNA, 21 bp, homo sapiens
cagcatgcacctccaatggct

SEQ ID NO: 14582 - RNA, 21 nt, RNAi
gcaugcaccuccaauggcuuu

SEQ ID NO: 14583 - RNA, 21 nt, RNAi
uucguacguggagguuaccga

SEQ ID NO: 14584 - DNA, 21 bp, homo sapiens
cactgactgcaagcacacgga

SEQ ID NO: 14585 - RNA, 21 nt, RNAi
cugacugcaagcacacggauu

SEQ ID NO: 14586 - RNA, 21 nt, RNAi
uugacugacguucgugugccu

SEQ ID NO: 14587 - DNA, 21 bp, homo sapiens
caagcacacggaggatgtcgg

SEQ ID NO: 14588 - RNA, 21 nt, RNAi
agcacacggaggaugucgguu

SEQ ID NO: 14589 - RNA, 21 nt, RNAi
uuucgugugccuccuacagcc

SEQ ID NO: 14590 - DNA, 21 bp, homo sapiens
cacacggaggatgtcggtgtg

SEQ ID NO: 14591 - RNA, 21 nt, RNAi
cacggaggaugucgguguguu

SEQ ID NO: 14592 - RNA, 21 nt, RNAi
uugugccuccuacagccacac

SEQ ID NO: 14593 - DNA, 21 bp, homo sapiens
cacggaggatgtcggtgtggt

SEQ ID NO: 14594 - RNA, 21 nt, RNAi
cggaggaugucggugugguuu

SEQ ID NO: 14595 - RNA, 21 nt, RNAi
uugccuccuacagccacacca

SEQ ID NO: 14596 - DNA, 21 bp, homo sapiens
caattcgttgatcaaccagat

SEQ ID NO: 14597 - RNA, 21 nt, RNAi
auucguugaucaaccagauuu

SEQ ID NO: 14598 - RNA, 21 nt, RNAi
uuuaagcaacuaguuggucua

SEQ ID NO: 14599 - DNA, 21 bp, homo sapiens
caaccagatagagaacctgaa

SEQ ID NO: 14600 - RNA, 21 nt, RNAi
accagauagagaaccugaauu

SEQ ID NO: 14601 - RNA, 21 nt, RNAi
uuuggucuaucucuuggacuu

SEQ ID NO: 14602 - DNA, 21 bp, homo sapiens
cagatagagaacctgaatatc

SEQ ID NO: 14603 - RNA, 21 nt, RNAi
gauagagaaccugaauaucuu

SEQ ID NO: 14604 - RNA, 21 nt, RNAi
uucuaucucuuggacuuauag

SEQ ID NO: 14605 - DNA, 21 bp, homo sapiens
caggtggaggacattcggatt

SEQ ID NO: 14606 - RNA, 21 nt, RNAi
gguggaggacauucggauuuu

SEQ ID NO: 14607 - RNA, 21 nt, RNAi
uuccaccuccuguaagccuaa

SEQ ID NO: 14608 - DNA, 21 bp, homo sapiens
cattcggattcgagccatcct

SEQ ID NO: 14609 - RNA, 21 nt, RNAi
uucggauucgagccauccuuu

SEQ ID NO: 14610 - RNA, 21 nt, RNAi
uuaagccuaagcucgguagga

SEQ ID NO: 14611 - DNA, 21 bp, homo sapiens
catcctctcaacctaccgcaa

SEQ ID NO: 14612 - RNA, 21 nt, RNAi
uccucucaaccuaccgcaauu

SEQ ID NO: 14613 - RNA, 21 nt, RNAi
uuaggagaguuggauggcguu

SEQ ID NO: 14614 - DNA, 21 bp, homo sapiens
caagacctggaagcagatctg

SEQ ID NO: 14615 - RNA, 21 nt, RNAi
agaccuggaagcagaucuguu

SEQ ID NO: 14616 - RNA, 21 nt, RNAi
uuucuggaccuucgucuagac

SEQ ID NO: 14617 - DNA, 21 bp, homo sapiens
cagatctgtgacaagcactgg

SEQ ID NO: 14618 - RNA, 21 nt, RNAi
gaucugugacaagcacugguu

SEQ ID NO: 14619 - RNA, 21 nt, RNAi
uucuagacacuguucgugacc

SEQ ID NO: 14620 - DNA, 21 bp, homo sapiens
caagcactggacggccaagaa

SEQ ID NO: 14621 - RNA, 21 nt, RNAi
agcacuggacggccaagaauu

SEQ ID NO: 14622 - RNA, 21 nt, RNAi
uuucgugaccugccgguucuu

SEQ ID NO: 14623 - DNA, 21 bp, homo sapiens
cactggacggccaagaattcc

SEQ ID NO: 14624 - RNA, 21 nt, RNAi
cuggacggccaagaauuccuu

SEQ ID NO: 14625 - RNA, 21 nt, RNAi
uugaccugccgguucuuaagg

SEQ ID NO: 14626 - DNA, 21 bp, homo sapiens
catacaataccaaagtgtaca

SEQ ID NO: 14627 - RNA, 21 nt, RNAi
uacaauaccaaaguguacauu

SEQ ID NO: 14628 - RNA, 21 nt, RNAi
uuauguuaugguuucacaugu

SEQ ID NO: 14629 - DNA, 21 bp, homo sapiens
cacggaggaagcagcgctact

SEQ ID NO: 14630 - RNA, 21 nt, RNAi
cggaggaagcagcgcuacuuu

SEQ ID NO: 14631 - RNA, 21 nt, RNAi
uugccuccuucgucgcgauga

SEQ ID NO: 14632 - DNA, 21 bp, homo sapiens
cagcgctactggccattctcc

SEQ ID NO: 14633 - RNA, 21 nt, RNAi
gcgcuacuggccauucuccuu

SEQ ID NO: 14634 - RNA, 21 nt, RNAi
uucgcgaugaccgguaagagg

SEQ ID NO: 14635 - DNA, 21 bp, homo sapiens
cattctccatggactgcaccg

SEQ ID NO: 14636 - RNA, 21 nt, RNAi
uucuccauggacugcaccguu

SEQ ID NO: 14637 - RNA, 21 nt, RNAi
uuaagagguaccugacguggc

SEQ ID NO: 14638 - DNA, 21 bp, homo sapiens
catggactgcaccggcacaga

SEQ ID NO: 14639 - RNA, 21 nt, RNAi
uggacugcaccggcacagauu

SEQ ID NO: 14640 - RNA, 21 nt, RNAi
uuaccugacguggccgugucu

SEQ ID NO: 14641 - DNA, 21 bp, homo sapiens
cacatctccagctgcaagctg

SEQ ID NO: 14642 - RNA, 21 nt, RNAi
caucuccagcugcaagcuguu

SEQ ID NO: 14643 - RNA, 21 nt, RNAi
uuguagaggucgacguucgac

SEQ ID NO: 14644 - DNA, 21 bp, homo sapiens
catgaagaatgtcacctgcga

SEQ ID NO: 14645 - RNA, 21 nt, RNAi
ugaagaaugucaccugcgauu

SEQ ID NO: 14646 - RNA, 21 nt, RNAi
uuacuucuuacaguggacgcu

SEQ ID NO: 14647 - DNA, 21 bp, homo sapiens
cagtgtggtctgcagagagct

SEQ ID NO: 14648 - RNA, 21 nt, RNAi
guguggucugcagagagcuuu

SEQ ID NO: 14649 - RNA, 21 nt, RNAi
uucacaccagacgucucucga

SEQ ID NO: 14650 - DNA, 21 bp, homo sapiens
caaagaggcagtcactggctc

SEQ ID NO: 14651 - RNA, 21 nt, RNAi
aagaggcagucacuggcucuu

SEQ ID NO: 14652 - RNA, 21 nt, RNAi
uuuucuccgucagugaccgag

SEQ ID NO: 14653 - DNA, 21 bp, homo sapiens
catccacctcaacgagatcca

SEQ ID NO: 14654 - RNA, 21 nt, RNAi
uccaccucaacgagauccauu

SEQ ID NO: 14655 - RNA, 21 nt, RNAi
uuagguggaguugcucuaggu

SEQ ID NO: 14656 - DNA, 21 bp, homo sapiens
cacctcaacgagatccagtgc

SEQ ID NO: 14657 - RNA, 21 nt, RNAi
ccucaacgagauccagugcuu

SEQ ID NO: 14658 - RNA, 21 nt, RNAi
uuggaguugcucuaggucacg

SEQ ID NO: 14659 - DNA, 21 bp, homo sapiens
caacgagatccagtgcacagg

SEQ ID NO: 14660 - RNA, 21 nt, RNAi
acgagauccagugcacagguu

SEQ ID NO: 14661 - RNA, 21 nt, RNAi
uuugcucuaggucacgugucc

SEQ ID NO: 14662 - DNA, 21 bp, homo sapiens
cagtgcacaggcaatgagaag

SEQ ID NO: 14663 - RNA, 21 nt, RNAi
gugcacaggcaaugagaaguu

SEQ ID NO: 14664 - RNA, 21 nt, RNAi
uucacguguccguuacucuuc

SEQ ID NO: 14665 - DNA, 21 bp, homo sapiens
cacaggcaatgagaagtccat

SEQ ID NO: 14666 - RNA, 21 nt, RNAi
caggcaaugagaaguccauuu

SEQ ID NO: 14667 - RNA, 21 nt, RNAi
uuguccguuacucuucaggua

SEQ ID NO: 14668 - DNA, 21 bp, homo sapiens
caggcaatgagaagtccatta

SEQ ID NO: 14669 - RNA, 21 nt, RNAi
ggcaaugagaaguccauuauu

SEQ ID NO: 14670 - RNA, 21 nt, RNAi
uuccguuacucuucagguaau

SEQ ID NO: 14671 - DNA, 21 bp, homo sapiens
caatgagaagtccattataga

SEQ ID NO: 14672 - RNA, 21 nt, RNAi
augagaaguccauuauagauu

SEQ ID NO: 14673 - RNA, 21 nt, RNAi
uuuacucuucagguaauaucu

SEQ ID NO: 14674 - DNA, 21 bp, homo sapiens
cattatagactgcaagttcaa

SEQ ID NO: 14675 - RNA, 21 nt, RNAi
uuauagacugcaaguucaauu

SEQ ID NO: 14676 - RNA, 21 nt, RNAi
uuaauaucugacguucaaguu

SEQ ID NO: 14677 - DNA, 21 bp, homo sapiens
caagttcaatgccgagtctca

SEQ ID NO: 14678 - RNA, 21 nt, RNAi
aguucaaugccgagucucauu

SEQ ID NO: 14679 - RNA, 21 nt, RNAi
uuucaaguuacggcucagagu

SEQ ID NO: 14680 - DNA, 21 bp, homo sapiens
caaccacgaggaggatgctgg

SEQ ID NO: 14681 - RNA, 21 nt, RNAi
accacgaggaggaugcugguu

SEQ ID NO: 14682 - RNA, 21 nt, RNAi
uuuggugcuccuccuacgacc

SEQ ID NO: 14683 - DNA, 21 bp, homo sapiens
cacgaggaggatgctggtgtg

SEQ ID NO: 14684 - RNA, 21 nt, RNAi
cgaggaggaugcugguguguu

SEQ ID NO: 14685 - RNA, 21 nt, RNAi
uugcuccuccuacgaccacac

SEQ ID NO: 14686 - DNA, 21 bp, homo sapiens
cagaagaagctgcgcctgaac

SEQ ID NO: 14687 - RNA, 21 nt, RNAi
gaagaagcugcgccugaacuu

SEQ ID NO: 14688 - RNA, 21 nt, RNAi
uucuucuucgacgcggacuug

SEQ ID NO: 14689 - DNA, 21 bp, homo sapiens
catcgtggaggccatggtggt

SEQ ID NO: 14690 - RNA, 21 nt, RNAi
ucguggaggccauggugguuu

SEQ ID NO: 14691 - RNA, 21 nt, RNAi
uuagcaccuccgguaccacca

SEQ ID NO: 14692 - DNA, 21 bp, homo sapiens
cagcaacgccttccaggagac

SEQ ID NO: 14693 - RNA, 21 nt, RNAi
gcaacgccuuccaggagacuu

SEQ ID NO: 14694 - RNA, 21 nt, RNAi
uucguugcggaagguccucug

SEQ ID NO: 14695 - DNA, 21 bp, homo sapiens
caacgccttccaggagacctg

SEQ ID NO: 14696 - RNA, 21 nt, RNAi
acgccuuccaggagaccuguu

SEQ ID NO: 14697 - RNA, 21 nt, RNAi
uuugcggaagguccucuggac

SEQ ID NO: 14698 - DNA, 21 bp, homo sapiens
caggagacctggtattggcac

SEQ ID NO: 14699 - RNA, 21 nt, RNAi
ggagaccugguauuggcacuu

SEQ ID NO: 14700 - RNA, 21 nt, RNAi
uuccucuggaccauaaccgug

SEQ ID NO: 14701 - DNA, 21 bp, homo sapiens
cacggagatgtcaacagcaac

SEQ ID NO: 14702 - RNA, 21 nt, RNAi
cggagaugucaacagcaacuu

SEQ ID NO: 14703 - RNA, 21 nt, RNAi
uugccucuacaguugucguug

SEQ ID NO: 14704 - DNA, 21 bp, homo sapiens
caacagcaacaaagtggtcat

SEQ ID NO: 14705 - RNA, 21 nt, RNAi
acagcaacaaaguggucauuu

SEQ ID NO: 14706 - RNA, 21 nt, RNAi
uuugucguuguuucaccagua

SEQ ID NO: 14707 - DNA, 21 bp, homo sapiens
cagcaacaaagtggtcatgag

SEQ ID NO: 14708 - RNA, 21 nt, RNAi
gcaacaaaguggucaugaguu

SEQ ID NO: 14709 - RNA, 21 nt, RNAi
uucguuguuucaccaguacuc

SEQ ID NO: 14710 - DNA, 21 bp, homo sapiens
caacaaagtggtcatgagtgg

SEQ ID NO: 14711 - RNA, 21 nt, RNAi
acaaaguggucaugagugguu

SEQ ID NO: 14712 - RNA, 21 nt, RNAi
uuuguuucaccaguacucacc

SEQ ID NO: 14713 - DNA, 21 bp, homo sapiens
caaagtggtcatgagtggagt

SEQ ID NO: 14714 - RNA, 21 nt, RNAi
aaguggucaugaguggaguuu

SEQ ID NO: 14715 - RNA, 21 nt, RNAi
uuuucaccaguacucaccuca

SEQ ID NO: 14716 - DNA, 21 bp, homo sapiens
catgagtggagtgaagtgctc

SEQ ID NO: 14717 - RNA, 21 nt, RNAi
ugaguggagugaagugcucuu

SEQ ID NO: 14718 - RNA, 21 nt, RNAi
uuacucaccucacuucacgag

SEQ ID NO: 14719 - DNA, 21 bp, homo sapiens
caatgcggagatggtgcagca

SEQ ID NO: 14720 - RNA, 21 nt, RNAi
augcggagauggugcagcauu

SEQ ID NO: 14721 - RNA, 21 nt, RNAi
uuuacgccucuaccacgucgu

SEQ ID NO: 14722 - DNA, 21 bp, homo sapiens
cagcagaccacctacctggag

SEQ ID NO: 14723 - RNA, 21 nt, RNAi
gcagaccaccuaccuggaguu

SEQ ID NO: 14724 - RNA, 21 nt, RNAi
uucgucugguggauggaccuc

SEQ ID NO: 14725 - DNA, 21 bp, homo sapiens
cagaccacctacctggaggac

SEQ ID NO: 14726 - RNA, 21 nt, RNAi
gaccaccuaccuggaggacuu

SEQ ID NO: 14727 - RNA, 21 nt, RNAi
uucugguggauggaccuccug

SEQ ID NO: 14728 - DNA, 21 bp, homo sapiens
catgttcatgctgcagtgtgc

SEQ ID NO: 14729 - RNA, 21 nt, RNAi
uguucaugcugcagugugcuu

SEQ ID NO: 14730 - RNA, 21 nt, RNAi
uuacaaguacgacgucacacg

SEQ ID NO: 14731 - DNA, 21 bp, homo sapiens
catgctgcagtgtgccatgga

SEQ ID NO: 14732 - RNA, 21 nt, RNAi
ugcugcagugugccauggauu

SEQ ID NO: 14733 - RNA, 21 nt, RNAi
uuacgacgucacacgguaccu

SEQ ID NO: 14734 - DNA, 21 bp, homo sapiens
cagtgtgccatggaggagaac

SEQ ID NO: 14735 - RNA, 21 nt, RNAi
gugugccauggaggagaacuu

SEQ ID NO: 14736 - RNA, 21 nt, RNAi
uucacacgguaccuccucuug

SEQ ID NO: 14737 - DNA, 21 bp, homo sapiens
catggaggagaactgcctctc

SEQ ID NO: 14738 - RNA, 21 nt, RNAi
uggaggagaacugccucucuu

SEQ ID NO: 14739 - RNA, 21 nt, RNAi
uuaccuccucuugacggagag

SEQ ID NO: 14740 - DNA, 21 bp, homo sapiens
cagatccacaacaatggccag

SEQ ID NO: 14741 - RNA, 21 nt, RNAi
gauccacaacaauggccaguu

SEQ ID NO: 14742 - RNA, 21 nt, RNAi
uucuagguguuguuaccgguc

SEQ ID NO: 14743 - DNA, 21 bp, homo sapiens
cacaacaatggccagtccgac

SEQ ID NO: 14744 - RNA, 21 nt, RNAi
caacaauggccaguccgacuu

SEQ ID NO: 14745 - RNA, 21 nt, RNAi
uuguuguuaccggucaggcug

SEQ ID NO: 14746 - DNA, 21 bp, homo sapiens
caacaatggccagtccgactt

SEQ ID NO: 14747 - RNA, 21 nt, RNAi
acaauggccaguccgacuuuu

SEQ ID NO: 14748 - RNA, 21 nt, RNAi
uuuguuaccggucaggcugaa

SEQ ID NO: 14749 - DNA, 21 bp, homo sapiens
caatggccagtccgacttccg

SEQ ID NO: 14750 - RNA, 21 nt, RNAi
auggccaguccgacuuccguu

SEQ ID NO: 14751 - RNA, 21 nt, RNAi
uuuaccggucaggcugaaggc

SEQ ID NO: 14752 - DNA, 21 bp, homo sapiens
cacgactgtcacaggcactac

SEQ ID NO: 14753 - RNA, 21 nt, RNAi
cgacugucacaggcacuacuu

SEQ ID NO: 14754 - RNA, 21 nt, RNAi
uugcugacaguguccgugaug

SEQ ID NO: 14755 - DNA, 21 bp, homo sapiens
cacaggcactaccacagcatg

SEQ ID NO: 14756 - RNA, 21 nt, RNAi
caggcacuaccacagcauguu

SEQ ID NO: 14757 - RNA, 21 nt, RNAi
uuguccgugauggugucguac

SEQ ID NO: 14758 - DNA, 21 bp, homo sapiens
caggcactaccacagcatgga

SEQ ID NO: 14759 - RNA, 21 nt, RNAi
ggcacuaccacagcauggauu

SEQ ID NO: 14760 - RNA, 21 nt, RNAi
uuccgugauggugucguaccu

SEQ ID NO: 14761 - DNA, 21 bp, homo sapiens
cactaccacagcatggaggtg

SEQ ID NO: 14762 - RNA, 21 nt, RNAi
cuaccacagcauggagguguu

SEQ ID NO: 14763 - RNA, 21 nt, RNAi
uugauggugucguaccuccac

SEQ ID NO: 14764 - DNA, 21 bp, homo sapiens
cacagcatggaggtgttcacc

SEQ ID NO: 14765 - RNA, 21 nt, RNAi
cagcauggagguguucaccuu

SEQ ID NO: 14766 - RNA, 21 nt, RNAi
uugucguaccuccacaagugg

SEQ ID NO: 14767 - DNA, 21 bp, homo sapiens
cactatgacctgctgaacctc

SEQ ID NO: 14768 - RNA, 21 nt, RNAi
cuaugaccugcugaaccucuu

SEQ ID NO: 14769 - RNA, 21 nt, RNAi
uugauacuggacgacuuggag

SEQ ID NO: 14770 - DNA, 21 bp, homo sapiens
caatggcaccaaggtggcaga

SEQ ID NO: 14771 - RNA, 21 nt, RNAi
auggcaccaagguggcagauu

SEQ ID NO: 14772 - RNA, 21 nt, RNAi
uuuaccgugguuccaccgucu

SEQ ID NO: 14773 - DNA, 21 bp, homo sapiens
cacaaggccagcttctgcttg

SEQ ID NO: 14774 - RNA, 21 nt, RNAi
caaggccagcuucugcuuguu

SEQ ID NO: 14775 - RNA, 21 nt, RNAi
uuguuccggucgaagacgaac

SEQ ID NO: 14776 - DNA, 21 bp, homo sapiens
caaggccagcttctgcttgga

SEQ ID NO: 14777 - RNA, 21 nt, RNAi
aggccagcuucugcuuggauu

SEQ ID NO: 14778 - RNA, 21 nt, RNAi
uuuccggucgaagacgaaccu

SEQ ID NO: 14779 - DNA, 21 bp, homo sapiens
cagcttctgcttggaggacac

SEQ ID NO: 14780 - RNA, 21 nt, RNAi
gcuucugcuuggaggacacuu

SEQ ID NO: 14781 - RNA, 21 nt, RNAi
uucgaagacgaaccuccugug

SEQ ID NO: 14782 - DNA, 21 bp, homo sapiens
cacagaatgtgaaggagacat

SEQ ID NO: 14783 - RNA, 21 nt, RNAi
cagaaugugaaggagacauuu

SEQ ID NO: 14784 - RNA, 21 nt, RNAi
uugucuuacacuuccucugua

SEQ ID NO: 14785 - DNA, 21 bp, homo sapiens
cagaatgtgaaggagacatcc

SEQ ID NO: 14786 - RNA, 21 nt, RNAi
gaaugugaaggagacauccuu

SEQ ID NO: 14787 - RNA, 21 nt, RNAi
uucuuacacuuccucuguagg

SEQ ID NO: 14788 - DNA, 21 bp, homo sapiens
catccagaagaattacgagtg

SEQ ID NO: 14789 - RNA, 21 nt, RNAi
uccagaagaauuacgaguguu

SEQ ID NO: 14790 - RNA, 21 nt, RNAi
uuaggucuucuuaaugcucac

SEQ ID NO: 14791 - DNA, 21 bp, homo sapiens
cagaagaattacgagtgtgcc

SEQ ID NO: 14792 - RNA, 21 nt, RNAi
gaagaauuacgagugugccuu

SEQ ID NO: 14793 - RNA, 21 nt, RNAi
uucuucuuaaugcucacacgg

SEQ ID NO: 14794 - DNA, 21 bp, homo sapiens
catgtaccgccatgacatcga

SEQ ID NO: 14795 - RNA, 21 nt, RNAi
uguaccgccaugacaucgauu

SEQ ID NO: 14796 - RNA, 21 nt, RNAi
uuacauggcgguacuguagcu

SEQ ID NO: 14797 - DNA, 21 bp, homo sapiens
catgacatcgactgccagtgg

SEQ ID NO: 14798 - RNA, 21 nt, RNAi
ugacaucgacugccagugguu

SEQ ID NO: 14799 - RNA, 21 nt, RNAi
uuacuguagcugacggucacc

SEQ ID NO: 14800 - DNA, 21 bp, homo sapiens
caacttcgaggttgcagaatc

SEQ ID NO: 14801 - RNA, 21 nt, RNAi
acuucgagguugcagaaucuu

SEQ ID NO: 14802 - RNA, 21 nt, RNAi
uuugaagcuccaacgucuuag

SEQ ID NO: 14803 - DNA, 21 bp, homo sapiens
cagaatccgattactccaaca

SEQ ID NO: 14804 - RNA, 21 nt, RNAi
gaauccgauuacuccaacauu

SEQ ID NO: 14805 - RNA, 21 nt, RNAi
uucuuaggcuaaugagguugu

SEQ ID NO: 14806 - DNA, 21 bp, homo sapiens
caacaacatcatgaaatgcag

SEQ ID NO: 14807 - RNA, 21 nt, RNAi
acaacaucaugaaaugcaguu

SEQ ID NO: 14808 - RNA, 21 nt, RNAi
uuuguuguaguacuuuacguc

SEQ ID NO: 14809 - DNA, 21 bp, homo sapiens
caacatcatgaaatgcaggag

SEQ ID NO: 14810 - RNA, 21 nt, RNAi
acaucaugaaaugcaggaguu

SEQ ID NO: 14811 - RNA, 21 nt, RNAi
uuuguaguacuuuacguccuc

SEQ ID NO: 14812 - DNA, 21 bp, homo sapiens
catcatgaaatgcaggagccg

SEQ ID NO: 14813 - RNA, 21 nt, RNAi
ucaugaaaugcaggagccguu

SEQ ID NO: 14814 - RNA, 21 nt, RNAi
uuaguacuuuacguccucggc

SEQ ID NO: 14815 - DNA, 21 bp, homo sapiens
catgaaatgcaggagccgcta

SEQ ID NO: 14816 - RNA, 21 nt, RNAi
ugaaaugcaggagccgcuauu

SEQ ID NO: 14817 - RNA, 21 nt, RNAi
uuacuuuacguccucggcgau

SEQ ID NO: 14818 - DNA, 21 bp, homo sapiens
caccgcatctggatgtacaac

SEQ ID NO: 14819 - RNA, 21 nt, RNAi
ccgcaucuggauguacaacuu

SEQ ID NO: 14820 - RNA, 21 nt, RNAi
uuggcguagaccuacauguug

SEQ ID NO: 14821 - DNA, 21 bp, homo sapiens
catctggatgtacaactgcca

SEQ ID NO: 14822 - RNA, 21 nt, RNAi
ucuggauguacaacugccauu

SEQ ID NO: 14823 - RNA, 21 nt, RNAi
uuagaccuacauguugacggu

SEQ ID NO: 14824 - DNA, 21 bp, homo sapiens
caactgccacataggtggttc

SEQ ID NO: 14825 - RNA, 21 nt, RNAi
acugccacauaggugguucuu

SEQ ID NO: 14826 - RNA, 21 nt, RNAi
uuugacgguguauccaccaag

SEQ ID NO: 14827 - DNA, 21 bp, homo sapiens
cacataggtggttccttcagc

SEQ ID NO: 14828 - RNA, 21 nt, RNAi
cauaggugguuccuucagcuu

SEQ ID NO: 14829 - RNA, 21 nt, RNAi
uuguauccaccaaggaagucg

SEQ ID NO: 14830 - DNA, 21 bp, homo sapiens
cataggtggttccttcagcga

SEQ ID NO: 14831 - RNA, 21 nt, RNAi
uaggugguuccuucagcgauu

SEQ ID NO: 14832 - RNA, 21 nt, RNAi
uuauccaccaaggaagucgcu

SEQ ID NO: 14833 - DNA, 21 bp, homo sapiens
cagtaaagaagcctgcgtggt

SEQ ID NO: 14834 - RNA, 21 nt, RNAi
guaaagaagccugcgugguuu

SEQ ID NO: 14835 - RNA, 21 nt, RNAi
uucauuucuucggacgcacca

SEQ ID NO: 14836 - DNA, 21 bp, homo sapiens
caactcctgtcttcaggccac

SEQ ID NO: 14837 - RNA, 21 nt, RNAi
acuccugucuucaggccacuu

SEQ ID NO: 14838 - RNA, 21 nt, RNAi
uuugaggacagaaguccggug

SEQ ID NO: 14839 - DNA, 21 bp, homo sapiens
caggccacaccacatcttcca

SEQ ID NO: 14840 - RNA, 21 nt, RNAi
ggccacaccacaucuuccauu

SEQ ID NO: 14841 - RNA, 21 nt, RNAi
uuccggugugguguagaaggu

SEQ ID NO: 14842 - DNA, 21 bp, homo sapiens
caacaactgagtctgaacgaa

SEQ ID NO: 14843 - RNA, 21 nt, RNAi
acaacugagucugaacgaauu

SEQ ID NO: 14844 - RNA, 21 nt, RNAi
uuuguugacucagacuugcuu

SEQ ID NO: 14845 - DNA, 21 bp, homo sapiens
caactgagtctgaacgaatgc

SEQ ID NO: 14846 - RNA, 21 nt, RNAi
acugagucugaacgaaugcuu

SEQ ID NO: 14847 - RNA, 21 nt, RNAi
uuugacucagacuugcuuacg

SEQ ID NO: 14848 - DNA, 21 bp, homo sapiens
cagctgtgtctaagctcagga

SEQ ID NO: 14849 - RNA, 21 nt, RNAi
gcugugucuaagcucaggauu

SEQ ID NO: 14850 - RNA, 21 nt, RNAi
uucgacacagauucgaguccu

SEQ ID NO: 14851 - DNA, 21 bp, homo sapiens
cacagagctgctggagcagca

SEQ ID NO: 14852 - RNA, 21 nt, RNAi
cagagcugcuggagcagcauu

SEQ ID NO: 14853 - RNA, 21 nt, RNAi
uugucucgacgaccucgucgu

SEQ ID NO: 14854 - DNA, 21 bp, homo sapiens
cagcaccaagagccagtcttg

SEQ ID NO: 14855 - RNA, 21 nt, RNAi
gcaccaagagccagucuuguu

SEQ ID NO: 14856 - RNA, 21 nt, RNAi
uucgugguucucggucagaac

SEQ ID NO: 14857 - DNA, 21 bp, homo sapiens
caccaagagccagtcttgacc

SEQ ID NO: 14858 - RNA, 21 nt, RNAi
ccaagagccagucuugaccuu

SEQ ID NO: 14859 - RNA, 21 nt, RNAi
uugguucucggucagaacugg

SEQ ID NO: 14860 - DNA, 21 bp, homo sapiens
cacagacaggttgtcatcagc

SEQ ID NO: 14861 - RNA, 21 nt, RNAi
cagacagguugucaucagcuu

SEQ ID NO: 14862 - RNA, 21 nt, RNAi
uugucuguccaacaguagucg

SEQ ID NO: 14863 - DNA, 21 bp, homo sapiens
cagacaggttgtcatcagctt

SEQ ID NO: 14864 - RNA, 21 nt, RNAi
gacagguugucaucagcuuuu

SEQ ID NO: 14865 - RNA, 21 nt, RNAi
uucuguccaacaguagucgaa

SEQ ID NO: 14866 - DNA, 21 bp, homo sapiens
caggttgtcatcagcttgtcc

SEQ ID NO: 14867 - RNA, 21 nt, RNAi
gguugucaucagcuuguccuu

SEQ ID NO: 14868 - RNA, 21 nt, RNAi
uuccaacaguagucgaacagg

SEQ ID NO: 14869 - DNA, 21 bp, homo sapiens
cattcaagccaccgagctcac

SEQ ID NO: 14870 - RNA, 21 nt, RNAi
uucaagccaccgagcucacuu

SEQ ID NO: 14871 - RNA, 21 nt, RNAi
uuaaguucgguggcucgagug

SEQ ID NO: 14872 - DNA, 21 bp, homo sapiens
caagccaccgagctcaccaca

SEQ ID NO: 14873 - RNA, 21 nt, RNAi
agccaccgagcucaccacauu

SEQ ID NO: 14874 - RNA, 21 nt, RNAi
uuucgguggcucgaguggugu

SEQ ID NO: 14875 - DNA, 21 bp, homo sapiens
caccgagctcaccacagacac

SEQ ID NO: 14876 - RNA, 21 nt, RNAi
ccgagcucaccacagacacuu

SEQ ID NO: 14877 - RNA, 21 nt, RNAi
uuggcucgaguggugucugug

SEQ ID NO: 14878 - DNA, 21 bp, homo sapiens
caccacagacacagtggagcc

SEQ ID NO: 14879 - RNA, 21 nt, RNAi
ccacagacacaguggagccuu

SEQ ID NO: 14880 - RNA, 21 nt, RNAi
uuggugucugugucaccucgg

SEQ ID NO: 14881 - DNA, 21 bp, homo sapiens
cagtgacacgtggacaaatgc

SEQ ID NO: 14882 - RNA, 21 nt, RNAi
gugacacguggacaaaugcuu

SEQ ID NO: 14883 - RNA, 21 nt, RNAi
uucacugugcaccuguuuacg

SEQ ID NO: 14884 - DNA, 21 bp, homo sapiens
catttctcctcctcttaggtc

SEQ ID NO: 14885 - RNA, 21 nt, RNAi
uuucuccuccucuuaggucuu

SEQ ID NO: 14886 - RNA, 21 nt, RNAi
uuaaagaggaggagaauccag

SEQ ID NO: 14887 - DNA, 21 bp, homo sapiens
cagcaaacttgaatatctaga

SEQ ID NO: 14888 - RNA, 21 nt, RNAi
gcaaacuugaauaucuagauu

SEQ ID NO: 14889 - RNA, 21 nt, RNAi
uucguuugaacuuauagaucu

SEQ ID NO: 14890 - DNA, 21 bp, homo sapiens
caaacttgaatatctagacct

SEQ ID NO: 14891 - RNA, 21 nt, RNAi
aacuugaauaucuagaccuuu

SEQ ID NO: 14892 - RNA, 21 nt, RNAi
uuuugaacuuauagaucugga

SEQ ID NO: 14893 - DNA, 21 bp, homo sapiens
cagtctattatagtcacatag

SEQ ID NO: 14894 - RNA, 21 nt, RNAi
gucuauuauagucacauaguu

SEQ ID NO: 14895 - RNA, 21 nt, RNAi
uucagauaauaucaguguauc

SEQ ID NO: 14896 - DNA, 21 bp, homo sapiens
cacatagataatggtgccacg

SEQ ID NO: 14897 - RNA, 21 nt, RNAi
cauagauaauggugccacguu

SEQ ID NO: 14898 - RNA, 21 nt, RNAi
uuguaucuauuaccacggugc

SEQ ID NO: 14899 - DNA, 21 bp, homo sapiens
catagataatggtgccacgtg

SEQ ID NO: 14900 - RNA, 21 nt, RNAi
uagauaauggugccacguguu

SEQ ID NO: 14901 - RNA, 21 nt, RNAi
uuaucuauuaccacggugcac

SEQ ID NO: 14902 - DNA, 21 bp, homo sapiens
catttaatattggacatctgg

SEQ ID NO: 14903 - RNA, 21 nt, RNAi
uuuaauauuggacaucugguu

SEQ ID NO: 14904 - RNA, 21 nt, RNAi
uuaaauuauaaccuguagacc

SEQ ID NO: 14905 - DNA, 21 bp, homo sapiens
cactgtgtaagtgactcatct

SEQ ID NO: 14906 - RNA, 21 nt, RNAi
cuguguaagugacucaucuuu

SEQ ID NO: 14907 - RNA, 21 nt, RNAi
uugacacauucacugaguaga

SEQ ID NO: 14908 - DNA, 21 bp, homo sapiens
catcttcctgttgttccaatt

SEQ ID NO: 14909 - RNA, 21 nt, RNAi
ucuuccuguuguuccaauuuu

SEQ ID NO: 14910 - RNA, 21 nt, RNAi
uuagaaggacaacaagguuaa

SEQ ID NO: 14911 - DNA, 21 bp, homo sapiens
cactgagcaccatgtgtcatc

SEQ ID NO: 14912 - RNA, 21 nt, RNAi
cugagcaccaugugucaucuu

SEQ ID NO: 14913 - RNA, 21 nt, RNAi
uugacucgugguacacaguag

SEQ ID NO: 14914 - DNA, 21 bp, homo sapiens
caccatgtgtcatcacagaca

SEQ ID NO: 14915 - RNA, 21 nt, RNAi
ccaugugucaucacagacauu

SEQ ID NO: 14916 - RNA, 21 nt, RNAi
uugguacacaguagugucugu

SEQ ID NO: 14917 - DNA, 21 bp, homo sapiens
catgtgtcatcacagacactt

SEQ ID NO: 14918 - RNA, 21 nt, RNAi
ugugucaucacagacacuuuu

SEQ ID NO: 14919 - RNA, 21 nt, RNAi
uuacacaguagugucugugaa

SEQ ID NO: 14920 - DNA, 21 bp, homo sapiens
catcacagacacttacacata

SEQ ID NO: 14921 - RNA, 21 nt, RNAi
ucacagacacuuacacauauu

SEQ ID NO: 14922 - RNA, 21 nt, RNAi
uuagugucugugaauguguau

SEQ ID NO: 14923 - DNA, 21 bp, homo sapiens
cacagacacttacacatactt

SEQ ID NO: 14924 - RNA, 21 nt, RNAi
cagacacuuacacauacuuuu

SEQ ID NO: 14925 - RNA, 21 nt, RNAi
uugucugugaauguguaugaa

SEQ ID NO: 14926 - DNA, 21 bp, homo sapiens
cagacacttacacatacttga

SEQ ID NO: 14927 - RNA, 21 nt, RNAi
gacacuuacacauacuugauu

SEQ ID NO: 14928 - RNA, 21 nt, RNAi
uucugugaauguguaugaacu

SEQ ID NO: 14929 - DNA, 21 bp, homo sapiens
cacttacacatacttgaaact

SEQ ID NO: 14930 - RNA, 21 nt, RNAi
cuuacacauacuugaaacuuu

SEQ ID NO: 14931 - RNA, 21 nt, RNAi
uugaauguguaugaacuuuga

SEQ ID NO: 14932 - DNA, 21 bp, homo sapiens
cacatacttgaaacttggaat

SEQ ID NO: 14933 - RNA, 21 nt, RNAi
cauacuugaaacuuggaauuu

SEQ ID NO: 14934 - RNA, 21 nt, RNAi
uuguaugaacuuugaaccuua

SEQ ID NO: 14935 - DNA, 21 bp, homo sapiens
gatggagaggcctctgtgctc

SEQ ID NO: 14936 - RNA, 21 nt, RNAi
uggagaggccucugugcucuu

SEQ ID NO: 14937 - RNA, 21 nt, RNAi
uuaccucuccggagacacgag

SEQ ID NO: 14938 - DNA, 21 bp, homo sapiens
gagcctggcacagtatgacag

SEQ ID NO: 14939 - RNA, 21 nt, RNAi
gccuggcacaguaugacaguu

SEQ ID NO: 14940 - RNA, 21 nt, RNAi
uucggaccgugucauacuguc

SEQ ID NO: 14941 - DNA, 21 bp, homo sapiens
gagtacttccagcaaccggct

SEQ ID NO: 14942 - RNA, 21 nt, RNAi
guacuuccagcaaccggcuuu

SEQ ID NO: 14943 - RNA, 21 nt, RNAi
uucaugaaggucguuggccga

SEQ ID NO: 14944 - DNA, 21 bp, homo sapiens
gaggtgtactatgatggccag

SEQ ID NO: 14945 - RNA, 21 nt, RNAi
gguguacuaugauggccaguu

SEQ ID NO: 14946 - RNA, 21 nt, RNAi
uuccacaugauacuaccgguc

SEQ ID NO: 14947 - DNA, 21 bp, homo sapiens
gatgacgacttctccatccac

SEQ ID NO: 14948 - RNA, 21 nt, RNAi
ugacgacuucuccauccacuu

SEQ ID NO: 14949 - RNA, 21 nt, RNAi
uuacugcugaagagguaggug

SEQ ID NO: 14950 - DNA, 21 bp, homo sapiens
gacgacttctccatccacgct

SEQ ID NO: 14951 - RNA, 21 nt, RNAi
cgacuucuccauccacgcuuu

SEQ ID NO: 14952 - RNA, 21 nt, RNAi
uugcugaagagguaggugcga

SEQ ID NO: 14953 - DNA, 21 bp, homo sapiens
gacttctccatccacgctgcc

SEQ ID NO: 14954 - RNA, 21 nt, RNAi
cuucuccauccacgcugccuu

SEQ ID NO: 14955 - RNA, 21 nt, RNAi
uugaagagguaggugcgacgg

SEQ ID NO: 14956 - DNA, 21 bp, homo sapiens
gacaatctccactgtactggc

SEQ ID NO: 14957 - RNA, 21 nt, RNAi
caaucuccacuguacuggcuu

SEQ ID NO: 14958 - RNA, 21 nt, RNAi
uuguuagaggugacaugaccg

SEQ ID NO: 14959 - DNA, 21 bp, homo sapiens
gactgcaagcacacggaggat

SEQ ID NO: 14960 - RNA, 21 nt, RNAi
cugcaagcacacggaggauuu

SEQ ID NO: 14961 - RNA, 21 nt, RNAi
uugacguucgugugccuccua

SEQ ID NO: 14962 - DNA, 21 bp, homo sapiens
gaggatgtcggtgtggtgtgc

SEQ ID NO: 14963 - RNA, 21 nt, RNAi
ggaugucgguguggugugcuu

SEQ ID NO: 14964 - RNA, 21 nt, RNAi
uuccuacagccacaccacacg

SEQ ID NO: 14965 - DNA, 21 bp, homo sapiens
gatgtcggtgtggtgtgcagc

SEQ ID NO: 14966 - RNA, 21 nt, RNAi
ugucgguguggugugcagcuu

SEQ ID NO: 14967 - RNA, 21 nt, RNAi
uuacagccacaccacacgucg

SEQ ID NO: 14968 - DNA, 21 bp, homo sapiens
gacaattcgttgatcaaccag

SEQ ID NO: 14969 - RNA, 21 nt, RNAi
caauucguugaucaaccaguu

SEQ ID NO: 14970 - RNA, 21 nt, RNAi
uuguuaagcaacuaguugguc

SEQ ID NO: 14971 - DNA, 21 bp, homo sapiens
gatcaaccagatagagaacct

SEQ ID NO: 14972 - RNA, 21 nt, RNAi
ucaaccagauagagaaccuuu

SEQ ID NO: 14973 - RNA, 21 nt, RNAi
uuaguuggucuaucucuugga

SEQ ID NO: 14974 - DNA, 21 bp, homo sapiens
gatagagaacctgaatatcca

SEQ ID NO: 14975 - RNA, 21 nt, RNAi
uagagaaccugaauauccauu

SEQ ID NO: 14976 - RNA, 21 nt, RNAi
uuaucucuuggacuuauaggu

SEQ ID NO: 14977 - DNA, 21 bp, homo sapiens
gagaacctgaatatccaggtg

SEQ ID NO: 14978 - RNA, 21 nt, RNAi
gaaccugaauauccagguguu

SEQ ID NO: 14979 - RNA, 21 nt, RNAi
uucuuggacuuauagguccac

SEQ ID NO: 14980 - DNA, 21 bp, homo sapiens
gaacctgaatatccaggtgga

SEQ ID NO: 14981 - RNA, 21 nt, RNAi
accugaauauccagguggauu

SEQ ID NO: 14982 - RNA, 21 nt, RNAi
uuuggacuuauagguccaccu

SEQ ID NO: 14983 - DNA, 21 bp, homo sapiens
gaatatccaggtggaggacat

SEQ ID NO: 14984 - RNA, 21 nt, RNAi
auauccagguggaggacauuu

SEQ ID NO: 14985 - RNA, 21 nt, RNAi
uuuauagguccaccuccugua

SEQ ID NO: 14986 - DNA, 21 bp, homo sapiens
gaggacattcggattcgagcc

SEQ ID NO: 14987 - RNA, 21 nt, RNAi
ggacauucggauucgagccuu

SEQ ID NO: 14988 - RNA, 21 nt, RNAi
uuccuguaagccuaagcucgg

SEQ ID NO: 14989 - DNA, 21 bp, homo sapiens
gacattcggattcgagccatc

SEQ ID NO: 14990 - RNA, 21 nt, RNAi
cauucggauucgagccaucuu

SEQ ID NO: 14991 - RNA, 21 nt, RNAi
uuguaagccuaagcucgguag

SEQ ID NO: 14992 - DNA, 21 bp, homo sapiens
gattcgagccatcctctcaac

SEQ ID NO: 14993 - RNA, 21 nt, RNAi
uucgagccauccucucaacuu

SEQ ID NO: 14994 - RNA, 21 nt, RNAi
uuaagcucgguaggagaguug

SEQ ID NO: 14995 - DNA, 21 bp, homo sapiens
gagccatcctctcaacctacc

SEQ ID NO: 14996 - RNA, 21 nt, RNAi
gccauccucucaaccuaccuu

SEQ ID NO: 14997 - RNA, 21 nt, RNAi
uucgguaggagaguuggaugg

SEQ ID NO: 14998 - DNA, 21 bp, homo sapiens
gacctggaagcagatctgtga

SEQ ID NO: 14999 - RNA, 21 nt, RNAi
ccuggaagcagaucugugauu

SEQ ID NO: 15000 - RNA, 21 nt, RNAi
uuggaccuucgucuagacacu

SEQ ID NO: 15001 - DNA, 21 bp, homo sapiens
gaagcagatctgtgacaagca

SEQ ID NO: 15002 - RNA, 21 nt, RNAi
agcagaucugugacaagcauu

SEQ ID NO: 15003 - RNA, 21 nt, RNAi
uuucgucuagacacuguucgu

SEQ ID NO: 15004 - DNA, 21 bp, homo sapiens
gatctgtgacaagcactggac

SEQ ID NO: 15005 - RNA, 21 nt, RNAi
ucugugacaagcacuggacuu

SEQ ID NO: 15006 - RNA, 21 nt, RNAi
uuagacacuguucgugaccug

SEQ ID NO: 15007 - DNA, 21 bp, homo sapiens
gacaagcactggacggccaag

SEQ ID NO: 15008 - RNA, 21 nt, RNAi
caagcacuggacggccaaguu

SEQ ID NO: 15009 - RNA, 21 nt, RNAi
uuguucgugaccugccgguuc

SEQ ID NO: 15010 - DNA, 21 bp, homo sapiens
gagaggacatacaataccaaa

SEQ ID NO: 15011 - RNA, 21 nt, RNAi
gaggacauacaauaccaaauu

SEQ ID NO: 15012 - RNA, 21 nt, RNAi
uucuccuguauguuaugguuu

SEQ ID NO: 15013 - DNA, 21 bp, homo sapiens
gaggacatacaataccaaagt

SEQ ID NO: 15014 - RNA, 21 nt, RNAi
ggacauacaauaccaaaguuu

SEQ ID NO: 15015 - RNA, 21 nt, RNAi
uuccuguauguuaugguuuca

SEQ ID NO: 15016 - DNA, 21 bp, homo sapiens
gacatacaataccaaagtgta

SEQ ID NO: 15017 - RNA, 21 nt, RNAi
cauacaauaccaaaguguauu

SEQ ID NO: 15018 - RNA, 21 nt, RNAi
uuguauguuaugguuucacau

SEQ ID NO: 15019 - DNA, 21 bp, homo sapiens
gaagcagcgctactggccatt

SEQ ID NO: 15020 - RNA, 21 nt, RNAi
agcagcgcuacuggccauuuu

SEQ ID NO: 15021 - RNA, 21 nt, RNAi
uuucgucgcgaugaccgguaa

SEQ ID NO: 15022 - DNA, 21 bp, homo sapiens
gaagaatgtcacctgcgagaa

SEQ ID NO: 15023 - RNA, 21 nt, RNAi
agaaugucaccugcgagaauu

SEQ ID NO: 15024 - RNA, 21 nt, RNAi
uuucuuacaguggacgcucuu

SEQ ID NO: 15025 - DNA, 21 bp, homo sapiens
gaatgtcacctgcgagaatgg

SEQ ID NO: 15026 - RNA, 21 nt, RNAi
augucaccugcgagaaugguu

SEQ ID NO: 15027 - RNA, 21 nt, RNAi
uuuacaguggacgcucuuacc

SEQ ID NO: 15028 - DNA, 21 bp, homo sapiens
gagattccggaaagcatacaa

SEQ ID NO: 15029 - RNA, 21 nt, RNAi
gauuccggaaagcauacaauu

SEQ ID NO: 15030 - RNA, 21 nt, RNAi
uucuaaggccuuucguauguu

SEQ ID NO: 15031 - DNA, 21 bp, homo sapiens
gattccggaaagcatacaagc

SEQ ID NO: 15032 - RNA, 21 nt, RNAi
uuccggaaagcauacaagcuu

SEQ ID NO: 15033 - RNA, 21 nt, RNAi
uuaaggccuuucguauguucg

SEQ ID NO: 15034 - DNA, 21 bp, homo sapiens
gaaagcatacaagccagagca

SEQ ID NO: 15035 - RNA, 21 nt, RNAi
aagcauacaagccagagcauu

SEQ ID NO: 15036 - RNA, 21 nt, RNAi
uuuucguauguucggucucgu

SEQ ID NO: 15037 - DNA, 21 bp, homo sapiens
gactgagaggcggtgcctaca

SEQ ID NO: 15038 - RNA, 21 nt, RNAi
cugagaggcggugccuacauu

SEQ ID NO: 15039 - RNA, 21 nt, RNAi
uugacucuccgccacggaugu

SEQ ID NO: 15040 - DNA, 21 bp, homo sapiens
gaccgtctgcgacgacaagtg

SEQ ID NO: 15041 - RNA, 21 nt, RNAi
ccgucugcgacgacaaguguu

SEQ ID NO: 15042 - RNA, 21 nt, RNAi
uuggcagacgcugcuguucac

SEQ ID NO: 15043 - DNA, 21 bp, homo sapiens
gagtgccaaagaggcagtcac

SEQ ID NO: 15044 - RNA, 21 nt, RNAi
gugccaaagaggcagucacuu

SEQ ID NO: 15045 - RNA, 21 nt, RNAi
uucacgguuucuccgucagug

SEQ ID NO: 15046 - DNA, 21 bp, homo sapiens
gagatccagtgcacaggcaat

SEQ ID NO: 15047 - RNA, 21 nt, RNAi
gauccagugcacaggcaauuu

SEQ ID NO: 15048 - RNA, 21 nt, RNAi
uucuaggucacguguccguua

SEQ ID NO: 15049 - DNA, 21 bp, homo sapiens
gatccagtgcacaggcaatga

SEQ ID NO: 15050 - RNA, 21 nt, RNAi
uccagugcacaggcaaugauu

SEQ ID NO: 15051 - RNA, 21 nt, RNAi
uuaggucacguguccguuacu

SEQ ID NO: 15052 - DNA, 21 bp, homo sapiens
gagaagtccattatagactgc

SEQ ID NO: 15053 - RNA, 21 nt, RNAi
gaaguccauuauagacugcuu

SEQ ID NO: 15054 - RNA, 21 nt, RNAi
uucuucagguaauaucugacg

SEQ ID NO: 15055 - DNA, 21 bp, homo sapiens
gaagtccattatagactgcaa

SEQ ID NO: 15056 - RNA, 21 nt, RNAi
aguccauuauagacugcaauu

SEQ ID NO: 15057 - RNA, 21 nt, RNAi
uuucagguaauaucugacguu

SEQ ID NO: 15058 - DNA, 21 bp, homo sapiens
gactgcaagttcaatgccgag

SEQ ID NO: 15059 - RNA, 21 nt, RNAi
cugcaaguucaaugccgaguu

SEQ ID NO: 15060 - RNA, 21 nt, RNAi
uugacguucaaguuacggcuc

SEQ ID NO: 15061 - DNA, 21 bp, homo sapiens
gaggaggatgctggtgtgaga

SEQ ID NO: 15062 - RNA, 21 nt, RNAi
ggaggaugcuggugugagauu

SEQ ID NO: 15063 - RNA, 21 nt, RNAi
uuccuccuacgaccacacucu

SEQ ID NO: 15064 - DNA, 21 bp, homo sapiens
gaggatgctggtgtgagatgc

SEQ ID NO: 15065 - RNA, 21 nt, RNAi
ggaugcuggugugagaugcuu

SEQ ID NO: 15066 - RNA, 21 nt, RNAi
uuccuacgaccacacucuacg

SEQ ID NO: 15067 - DNA, 21 bp, homo sapiens
gatgctggtgtgagatgcaac

SEQ ID NO: 15068 - RNA, 21 nt, RNAi
ugcuggugugagaugcaacuu

SEQ ID NO: 15069 - RNA, 21 nt, RNAi
uuacgaccacacucuacguug

SEQ ID NO: 15070 - DNA, 21 bp, homo sapiens
gaagaagctgcgcctgaacgg

SEQ ID NO: 15071 - RNA, 21 nt, RNAi
agaagcugcgccugaacgguu

SEQ ID NO: 15072 - RNA, 21 nt, RNAi
uuucuucgacgcggacuugcc

SEQ ID NO: 15073 - DNA, 21 bp, homo sapiens
gagtggaggtgctggtggaga

SEQ ID NO: 15074 - RNA, 21 nt, RNAi
guggaggugcugguggagauu

SEQ ID NO: 15075 - RNA, 21 nt, RNAi
uucaccuccacgaccaccucu

SEQ ID NO: 15076 - DNA, 21 bp, homo sapiens
gaggtgctggtggagagaaac

SEQ ID NO: 15077 - RNA, 21 nt, RNAi
ggugcugguggagagaaacuu

SEQ ID NO: 15078 - RNA, 21 nt, RNAi
uuccacgaccaccucucuuug

SEQ ID NO: 15079 - DNA, 21 bp, homo sapiens
gattcgccagcaacgccttcc

SEQ ID NO: 15080 - RNA, 21 nt, RNAi
uucgccagcaacgccuuccuu

SEQ ID NO: 15081 - RNA, 21 nt, RNAi
uuaagcggucguugcggaagg

SEQ ID NO: 15082 - DNA, 21 bp, homo sapiens
gagacctggtattggcacgga

SEQ ID NO: 15083 - RNA, 21 nt, RNAi
gaccugguauuggcacggauu

SEQ ID NO: 15084 - RNA, 21 nt, RNAi
uucuggaccauaaccgugccu

SEQ ID NO: 15085 - DNA, 21 bp, homo sapiens
gacctggtattggcacggaga

SEQ ID NO: 15086 - RNA, 21 nt, RNAi
ccugguauuggcacggagauu

SEQ ID NO: 15087 - RNA, 21 nt, RNAi
uuggaccauaaccgugccucu

SEQ ID NO: 15088 - DNA, 21 bp, homo sapiens
gagatgtcaacagcaacaaag

SEQ ID NO: 15089 - RNA, 21 nt, RNAi
gaugucaacagcaacaaaguu

SEQ ID NO: 15090 - RNA, 21 nt, RNAi
uucuacaguugucguuguuuc

SEQ ID NO: 15091 - DNA, 21 bp, homo sapiens
gatgtcaacagcaacaaagtg

SEQ ID NO: 15092 - RNA, 21 nt, RNAi
ugucaacagcaacaaaguguu

SEQ ID NO: 15093 - RNA, 21 nt, RNAi
uuacaguugucguuguuucac

SEQ ID NO: 15094 - DNA, 21 bp, homo sapiens
gagttgcctgctcagaaaccg

SEQ ID NO: 15095 - RNA, 21 nt, RNAi
guugccugcucagaaaccguu

SEQ ID NO: 15096 - RNA, 21 nt, RNAi
uucaacggacgagucuuuggc

SEQ ID NO: 15097 - DNA, 21 bp, homo sapiens
gacctggtcctcaatgcggag

SEQ ID NO: 15098 - RNA, 21 nt, RNAi
ccugguccucaaugcggaguu

SEQ ID NO: 15099 - RNA, 21 nt, RNAi
uuggaccaggaguuacgccuc

SEQ ID NO: 15100 - DNA, 21 bp, homo sapiens
gagatggtgcagcagaccacc

SEQ ID NO: 15101 - RNA, 21 nt, RNAi
gauggugcagcagaccaccuu

SEQ ID NO: 15102 - RNA, 21 nt, RNAi
uucuaccacgucgucuggugg

SEQ ID NO: 15103 - DNA, 21 bp, homo sapiens
gatggtgcagcagaccaccta

SEQ ID NO: 15104 - RNA, 21 nt, RNAi
uggugcagcagaccaccuauu

SEQ ID NO: 15105 - RNA, 21 nt, RNAi
uuaccacgucgucugguggau

SEQ ID NO: 15106 - DNA, 21 bp, homo sapiens
gagaactgcctctcggcctca

SEQ ID NO: 15107 - RNA, 21 nt, RNAi
gaacugccucucggccucauu

SEQ ID NO: 15108 - RNA, 21 nt, RNAi
uucuugacggagagccggagu

SEQ ID NO: 15109 - DNA, 21 bp, homo sapiens
gatccacaacaatggccagtc

SEQ ID NO: 15110 - RNA, 21 nt, RNAi
uccacaacaauggccagucuu

SEQ ID NO: 15111 - RNA, 21 nt, RNAi
uuagguguuguuaccggucag

SEQ ID NO: 15112 - DNA, 21 bp, homo sapiens
gatctggcacgactgtcacag

SEQ ID NO: 15113 - RNA, 21 nt, RNAi
ucuggcacgacugucacaguu

SEQ ID NO: 15114 - RNA, 21 nt, RNAi
uuagaccgugcugacaguguc

SEQ ID NO: 15115 - DNA, 21 bp, homo sapiens
gactgtcacaggcactaccac

SEQ ID NO: 15116 - RNA, 21 nt, RNAi
cugucacaggcacuaccacuu

SEQ ID NO: 15117 - RNA, 21 nt, RNAi
uugacaguguccgugauggug

SEQ ID NO: 15118 - DNA, 21 bp, homo sapiens
gacctgctgaacctcaatggc

SEQ ID NO: 15119 - RNA, 21 nt, RNAi
ccugcugaaccucaauggcuu

SEQ ID NO: 15120 - RNA, 21 nt, RNAi
uuggacgacuuggaguuaccg

SEQ ID NO: 15121 - DNA, 21 bp, homo sapiens
gaacctcaatggcaccaaggt

SEQ ID NO: 15122 - RNA, 21 nt, RNAi
accucaauggcaccaagguuu

SEQ ID NO: 15123 - RNA, 21 nt, RNAi
uuuggaguuaccgugguucca

SEQ ID NO: 15124 - DNA, 21 bp, homo sapiens
gaggacacagaatgtgaagga

SEQ ID NO: 15125 - RNA, 21 nt, RNAi
ggacacagaaugugaaggauu

SEQ ID NO: 15126 - RNA, 21 nt, RNAi
uuccugugucuuacacuuccu

SEQ ID NO: 15127 - DNA, 21 bp, homo sapiens
gacacagaatgtgaaggagac

SEQ ID NO: 15128 - RNA, 21 nt, RNAi
cacagaaugugaaggagacuu

SEQ ID NO: 15129 - RNA, 21 nt, RNAi
uugugucuuacacuuccucug

SEQ ID NO: 15130 - DNA, 21 bp, homo sapiens
gaatgtgaaggagacatccag

SEQ ID NO: 15131 - RNA, 21 nt, RNAi
augugaaggagacauccaguu

SEQ ID NO: 15132 - RNA, 21 nt, RNAi
uuuacacuuccucuguagguc

SEQ ID NO: 15133 - DNA, 21 bp, homo sapiens
gaaggagacatccagaagaat

SEQ ID NO: 15134 - RNA, 21 nt, RNAi
aggagacauccagaagaauuu

SEQ ID NO: 15135 - RNA, 21 nt, RNAi
uuuccucuguaggucuucuua

SEQ ID NO: 15136 - DNA, 21 bp, homo sapiens
gagacatccagaagaattacg

SEQ ID NO: 15137 - RNA, 21 nt, RNAi
gacauccagaagaauuacguu

SEQ ID NO: 15138 - RNA, 21 nt, RNAi
uucuguaggucuucuuaaugc

SEQ ID NO: 15139 - DNA, 21 bp, homo sapiens
gacatccagaagaattacgag

SEQ ID NO: 15140 - RNA, 21 nt, RNAi
cauccagaagaauuacgaguu

SEQ ID NO: 15141 - RNA, 21 nt, RNAi
uuguaggucuucuuaaugcuc

SEQ ID NO: 15142 - DNA, 21 bp, homo sapiens
gaagaattacgagtgtgccaa

SEQ ID NO: 15143 - RNA, 21 nt, RNAi
agaauuacgagugugccaauu

SEQ ID NO: 15144 - RNA, 21 nt, RNAi
uuucuuaaugcucacacgguu

SEQ ID NO: 15145 - DNA, 21 bp, homo sapiens
gaattacgagtgtgccaactt

SEQ ID NO: 15146 - RNA, 21 nt, RNAi
auuacgagugugccaacuuuu

SEQ ID NO: 15147 - RNA, 21 nt, RNAi
uuuaaugcucacacgguugaa

SEQ ID NO: 15148 - DNA, 21 bp, homo sapiens
gagtgtgccaacttcggcgat

SEQ ID NO: 15149 - RNA, 21 nt, RNAi
gugugccaacuucggcgauuu

SEQ ID NO: 15150 - RNA, 21 nt, RNAi
uucacacgguugaagccgcua

SEQ ID NO: 15151 - DNA, 21 bp, homo sapiens
gacatgtaccgccatgacatc

SEQ ID NO: 15152 - RNA, 21 nt, RNAi
cauguaccgccaugacaucuu

SEQ ID NO: 15153 - RNA, 21 nt, RNAi
uuguacauggcgguacuguag

SEQ ID NO: 15154 - DNA, 21 bp, homo sapiens
gagactacctgttccaggttg

SEQ ID NO: 15155 - RNA, 21 nt, RNAi
gacuaccuguuccagguuguu

SEQ ID NO: 15156 - RNA, 21 nt, RNAi
uucugauggacaagguccaac

SEQ ID NO: 15157 - DNA, 21 bp, homo sapiens
gactacctgttccaggttgtt

SEQ ID NO: 15158 - RNA, 21 nt, RNAi
cuaccuguuccagguuguuuu

SEQ ID NO: 15159 - RNA, 21 nt, RNAi
uugauggacaagguccaacaa

SEQ ID NO: 15160 - DNA, 21 bp, homo sapiens
gaggttgcagaatccgattac

SEQ ID NO: 15161 - RNA, 21 nt, RNAi
gguugcagaauccgauuacuu

SEQ ID NO: 15162 - RNA, 21 nt, RNAi
uuccaacgucuuaggcuaaug

SEQ ID NO: 15163 - DNA, 21 bp, homo sapiens
gaatccgattactccaacaac

SEQ ID NO: 15164 - RNA, 21 nt, RNAi
auccgauuacuccaacaacuu

SEQ ID NO: 15165 - RNA, 21 nt, RNAi
uuuaggcuaaugagguuguug

SEQ ID NO: 15166 - DNA, 21 bp, homo sapiens
gattactccaacaacatcatg

SEQ ID NO: 15167 - RNA, 21 nt, RNAi
uuacuccaacaacaucauguu

SEQ ID NO: 15168 - RNA, 21 nt, RNAi
uuaaugagguuguuguaguac

SEQ ID NO: 15169 - DNA, 21 bp, homo sapiens
gaaatgcaggagccgctatga

SEQ ID NO: 15170 - RNA, 21 nt, RNAi
aaugcaggagccgcuaugauu

SEQ ID NO: 15171 - RNA, 21 nt, RNAi
uuuuacguccucggcgauacu

SEQ ID NO: 15172 - DNA, 21 bp, homo sapiens
gatgtacaactgccacatagg

SEQ ID NO: 15173 - RNA, 21 nt, RNAi
uguacaacugccacauagguu

SEQ ID NO: 15174 - RNA, 21 nt, RNAi
uuacauguugacgguguaucc

SEQ ID NO: 15175 - DNA, 21 bp, homo sapiens
gaagcctgcgtggtcaactcc

SEQ ID NO: 15176 - RNA, 21 nt, RNAi
agccugcguggucaacuccuu

SEQ ID NO: 15177 - RNA, 21 nt, RNAi
uuucggacgcaccaguugagg

SEQ ID NO: 15178 - DNA, 21 bp, homo sapiens
gagtctgaacgaatgccacgt

SEQ ID NO: 15179 - RNA, 21 nt, RNAi
gucugaacgaaugccacguuu

SEQ ID NO: 15180 - RNA, 21 nt, RNAi
uucagacuugcuuacggugca

SEQ ID NO: 15181 - DNA, 21 bp, homo sapiens
gagctgctggagcagcaccaa

SEQ ID NO: 15182 - RNA, 21 nt, RNAi
gcugcuggagcagcaccaauu

SEQ ID NO: 15183 - RNA, 21 nt, RNAi
uucgacgaccucgucgugguu

SEQ ID NO: 15184 - DNA, 21 bp, homo sapiens
gagcagcaccaagagccagtc

SEQ ID NO: 15185 - RNA, 21 nt, RNAi
gcagcaccaagagccagucuu

SEQ ID NO: 15186 - RNA, 21 nt, RNAi
uucgucgugguucucggucag

SEQ ID NO: 15187 - DNA, 21 bp, homo sapiens
gacaggttgtcatcagcttgt

SEQ ID NO: 15188 - RNA, 21 nt, RNAi
cagguugucaucagcuuguuu

SEQ ID NO: 15189 - RNA, 21 nt, RNAi
uuguccaacaguagucgaaca

SEQ ID NO: 15190 - DNA, 21 bp, homo sapiens
gagctcaccacagacacagtg

SEQ ID NO: 15191 - RNA, 21 nt, RNAi
gcucaccacagacacaguguu

SEQ ID NO: 15192 - RNA, 21 nt, RNAi
uucgaguggugucugugucac

SEQ ID NO: 15193 - DNA, 21 bp, homo sapiens
gaatatctagacctctcttcc

SEQ ID NO: 15194 - RNA, 21 nt, RNAi
auaucuagaccucucuuccuu

SEQ ID NO: 15195 - RNA, 21 nt, RNAi
uuuauagaucuggagagaagg

SEQ ID NO: 15196 - DNA, 21 bp, homo sapiens
gacctctcttccaatgaaacc

SEQ ID NO: 15197 - RNA, 21 nt, RNAi
ccucucuuccaaugaaaccuu

SEQ ID NO: 15198 - RNA, 21 nt, RNAi
uuggagagaagguuacuuugg

SEQ ID NO: 15199 - DNA, 21 bp, homo sapiens
gatttggtgagctcagacttg

SEQ ID NO: 15200 - RNA, 21 nt, RNAi
uuuggugagcucagacuuguu

SEQ ID NO: 15201 - RNA, 21 nt, RNAi
uuaaaccacucgagucugaac

SEQ ID NO: 15202 - DNA, 21 bp, homo sapiens
gagctcagacttggtgcttcc

SEQ ID NO: 15203 - RNA, 21 nt, RNAi
gcucagacuuggugcuuccuu

SEQ ID NO: 15204 - RNA, 21 nt, RNAi
uucgagucugaaccacgaagg

SEQ ID NO: 15205 - DNA, 21 bp, homo sapiens
gaagcacaaatttattggcat

SEQ ID NO: 15206 - RNA, 21 nt, RNAi
agcacaaauuuauuggcauuu

SEQ ID NO: 15207 - RNA, 21 nt, RNAi
uuucguguuuaaauaaccgua

SEQ ID NO: 15208 - DNA, 21 bp, homo sapiens
gactcatcttcctgttgttcc

SEQ ID NO: 15209 - RNA, 21 nt, RNAi
cucaucuuccuguuguuccuu

SEQ ID NO: 15210 - RNA, 21 nt, RNAi
uugaguagaaggacaacaagg

SEQ ID NO: 15211 - DNA, 21 bp, homo sapiens
gattcaacggtgctataacca

SEQ ID NO: 15212 - RNA, 21 nt, RNAi
uucaacggugcuauaaccauu

SEQ ID NO: 15213 - RNA, 21 nt, RNAi
uuaaguugccacgauauuggu

SEQ ID NO: 15214 - DNA, 21 bp, homo sapiens
gagcaccatgtgtcatcacag

SEQ ID NO: 15215 - RNA, 21 nt, RNAi
gcaccaugugucaucacaguu

SEQ ID NO: 15216 - RNA, 21 nt, RNAi
uucgugguacacaguaguguc

SEQ ID NO: 15217 - DNA, 21 bp, homo sapiens
gacacttacacatacttgaaa

SEQ ID NO: 15218 - RNA, 21 nt, RNAi
cacuuacacauacuugaaauu

SEQ ID NO: 15219 - RNA, 21 nt, RNAi
uugugaauguguaugaacuuu

SEQ ID NO: 15220 - DNA, 21 bp, homo sapiens
tacctacgcttggtgcttgct

SEQ ID NO: 15221 - RNA, 21 nt, RNAi
ccuacgcuuggugcuugcuuu

SEQ ID NO: 15222 - RNA, 21 nt, RNAi
uuggaugcgaaccacgaacga

SEQ ID NO: 15223 - DNA, 21 bp, homo sapiens
tacgcttggtgcttgctttct

SEQ ID NO: 15224 - RNA, 21 nt, RNAi
cgcuuggugcuugcuuucuuu

SEQ ID NO: 15225 - RNA, 21 nt, RNAi
uugcgaaccacgaacgaaaga

SEQ ID NO: 15226 - DNA, 21 bp, homo sapiens
tacttccagcaaccggctcct

SEQ ID NO: 15227 - RNA, 21 nt, RNAi
cuuccagcaaccggcuccuuu

SEQ ID NO: 15228 - RNA, 21 nt, RNAi
uugaaggucguuggccgagga

SEQ ID NO: 15229 - DNA, 21 bp, homo sapiens
tatgtggaggccaagtcctgg

SEQ ID NO: 15230 - RNA, 21 nt, RNAi
uguggaggccaaguccugguu

SEQ ID NO: 15231 - RNA, 21 nt, RNAi
uuacaccuccgguucaggacc

SEQ ID NO: 15232 - DNA, 21 bp, homo sapiens
tagacaatctccactgtactg

SEQ ID NO: 15233 - RNA, 21 nt, RNAi
gacaaucuccacuguacuguu

SEQ ID NO: 15234 - RNA, 21 nt, RNAi
uucuguuagaggugacaugac

SEQ ID NO: 15235 - DNA, 21 bp, homo sapiens
tagagaacctgaatatccagg

SEQ ID NO: 15236 - RNA, 21 nt, RNAi
gagaaccugaauauccagguu

SEQ ID NO: 15237 - RNA, 21 nt, RNAi
uucucuuggacuuauaggucc

SEQ ID NO: 15238 - DNA, 21 bp, homo sapiens
tatccaggtggaggacattcg

SEQ ID NO: 15239 - RNA, 21 nt, RNAi
uccagguggaggacauucguu

SEQ ID NO: 15240 - RNA, 21 nt, RNAi
uuagguccaccuccuguaagc

SEQ ID NO: 15241 - DNA, 21 bp, homo sapiens
tactggccattctccatggac

SEQ ID NO: 15242 - RNA, 21 nt, RNAi
cuggccauucuccauggacuu

SEQ ID NO: 15243 - RNA, 21 nt, RNAi
uugaccgguaagagguaccug

SEQ ID NO: 15244 - DNA, 21 bp, homo sapiens
tatagactgcaagttcaatgc

SEQ ID NO: 15245 - RNA, 21 nt, RNAi
uagacugcaaguucaaugcuu

SEQ ID NO: 15246 - RNA, 21 nt, RNAi
uuaucugacguucaaguuacg

SEQ ID NO: 15247 - DNA, 21 bp, homo sapiens
tagactgcaagttcaatgccg

SEQ ID NO: 15248 - RNA, 21 nt, RNAi
gacugcaaguucaaugccguu

SEQ ID NO: 15249 - RNA, 21 nt, RNAi
uucugacguucaaguuacggc

SEQ ID NO: 15250 - DNA, 21 bp, homo sapiens
tattggcacggagatgtcaac

SEQ ID NO: 15251 - RNA, 21 nt, RNAi
uuggcacggagaugucaacuu

SEQ ID NO: 15252 - RNA, 21 nt, RNAi
uuaaccgugccucuacaguug

SEQ ID NO: 15253 - DNA, 21 bp, homo sapiens
taccacagcatggaggtgttc

SEQ ID NO: 15254 - RNA, 21 nt, RNAi
ccacagcauggagguguucuu

SEQ ID NO: 15255 - RNA, 21 nt, RNAi
uuggugucguaccuccacaag

SEQ ID NO: 15256 - DNA, 21 bp, homo sapiens
tatgacctgctgaacctcaat

SEQ ID NO: 15257 - RNA, 21 nt, RNAi
ugaccugcugaaccucaauuu

SEQ ID NO: 15258 - RNA, 21 nt, RNAi
uuacuggacgacuuggaguua

SEQ ID NO: 15259 - DNA, 21 bp, homo sapiens
tacgagtgtgccaacttcggc

SEQ ID NO: 15260 - RNA, 21 nt, RNAi
cgagugugccaacuucggcuu

SEQ ID NO: 15261 - RNA, 21 nt, RNAi
uugcucacacgguugaagccg

SEQ ID NO: 15262 - DNA, 21 bp, homo sapiens
taccgccatgacatcgactgc

SEQ ID NO: 15263 - RNA, 21 nt, RNAi
ccgccaugacaucgacugcuu

SEQ ID NO: 15264 - RNA, 21 nt, RNAi
uuggcgguacuguagcugacg

SEQ ID NO: 15265 - DNA, 21 bp, homo sapiens
tacctgttccaggttgttatt

SEQ ID NO: 15266 - RNA, 21 nt, RNAi
ccuguuccagguuguuauuuu

SEQ ID NO: 15267 - RNA, 21 nt, RNAi
uuggacaagguccaacaauaa

SEQ ID NO: 15268 - DNA, 21 bp, homo sapiens
tactccaacaacatcatgaaa

SEQ ID NO: 15269 - RNA, 21 nt, RNAi
cuccaacaacaucaugaaauu

SEQ ID NO: 15270 - RNA, 21 nt, RNAi
uugagguuguuguaguacuuu

SEQ ID NO: 15271 - DNA, 21 bp, homo sapiens
tatgacggccaccgcatctgg

SEQ ID NO: 15272 - RNA, 21 nt, RNAi
ugacggccaccgcaucugguu

SEQ ID NO: 15273 - RNA, 21 nt, RNAi
uuacugccgguggcguagacc

SEQ ID NO: 15274 - DNA, 21 bp, homo sapiens
tacaactgccacataggtggt

SEQ ID NO: 15275 - RNA, 21 nt, RNAi
caacugccacauaggugguuu

SEQ ID NO: 15276 - RNA, 21 nt, RNAi
uuguugacgguguauccacca

SEQ ID NO: 15277 - DNA, 21 bp, homo sapiens
taggtggttccttcagcgaag

SEQ ID NO: 15278 - RNA, 21 nt, RNAi
ggugguuccuucagcgaaguu

SEQ ID NO: 15279 - RNA, 21 nt, RNAi
uuccaccaaggaagucgcuuc

SEQ ID NO: 15280 - DNA, 21 bp, homo sapiens
taaagaagcctgcgtggtcaa

SEQ ID NO: 15281 - RNA, 21 nt, RNAi
aagaagccugcguggucaauu

SEQ ID NO: 15282 - RNA, 21 nt, RNAi
uuuucuucggacgcaccaguu

SEQ ID NO: 15283 - DNA, 21 bp, homo sapiens
tacagctgtgtctaagctcag

SEQ ID NO: 15284 - RNA, 21 nt, RNAi
cagcugugucuaagcucaguu

SEQ ID NO: 15285 - RNA, 21 nt, RNAi
uugucgacacagauucgaguc

SEQ ID NO: 15286 - DNA, 21 bp, homo sapiens
tatctagacctctcttccaat

SEQ ID NO: 15287 - RNA, 21 nt, RNAi
ucuagaccucucuuccaauuu

SEQ ID NO: 15288 - RNA, 21 nt, RNAi
uuagaucuggagagaagguua

SEQ ID NO: 15289 - DNA, 21 bp, homo sapiens
tagacctctcttccaatgaaa

SEQ ID NO: 15290 - RNA, 21 nt, RNAi
gaccucucuuccaaugaaauu

SEQ ID NO: 15291 - RNA, 21 nt, RNAi
uucuggagagaagguuacuuu

SEQ ID NO: 15292 - DNA, 21 bp, homo sapiens
tagtcacatagataatggtgc

SEQ ID NO: 15293 - RNA, 21 nt, RNAi
gucacauagauaauggugcuu

SEQ ID NO: 15294 - RNA, 21 nt, RNAi
uucaguguaucuauuaccacg

SEQ ID NO: 15295 - DNA, 21 bp, homo sapiens
tagataatggtgccacgtgtt

SEQ ID NO: 15296 - RNA, 21 nt, RNAi
gauaauggugccacguguuuu

SEQ ID NO: 15297 - RNA, 21 nt, RNAi
uucuauuaccacggugcacaa

SEQ ID NO: 15298 - DNA, 21 bp, homo sapiens
taagtgactcatcttcctgtt

SEQ ID NO: 15299 - RNA, 21 nt, RNAi
agugacucaucuuccuguuuu

SEQ ID NO: 15300 - RNA, 21 nt, RNAi
uuucacugaguagaaggacaa

SEQ ID NO: 15301 - DNA, 21 bp, homo sapiens
tacacatacttgaaacttgga

SEQ ID NO: 15302 - RNA, 21 nt, RNAi
cacauacuugaaacuuggauu

SEQ ID NO: 15303 - RNA, 21 nt, RNAi
uuguguaugaacuuugaaccu

SEQ ID NO: 15304 - DNA, 21 bp, homo sapiens
aaatgtttgcctcacggagga

SEQ ID NO: 15305 - RNA, 21 nt, RNAi
auguuugccucacggaggauu

SEQ ID NO: 15306 - RNA, 21 nt, RNAi
uuuacaaacggagugccuccu

SEQ ID NO: 15307 - DNA, 21 bp, homo sapiens
aatgtttgcctcacggaggaa

SEQ ID NO: 15308 - RNA, 21 nt, RNAi
uguuugccucacggaggaauu

SEQ ID NO: 15309 - RNA, 21 nt, RNAi
uuacaaacggagugccuccuu

SEQ ID NO: 15310 - DNA, 21 bp, homo sapiens
aagaatgtcacctgcgagaat

SEQ ID NO: 15311 - RNA, 21 nt, RNAi
gaaugucaccugcgagaauuu

SEQ ID NO: 15312 - RNA, 21 nt, RNAi
uucuuacaguggacgcucuua

SEQ ID NO: 15313 - DNA, 21 bp, homo sapiens
aagcatacaagccagagcaac

SEQ ID NO: 15314 - RNA, 21 nt, RNAi
gcauacaagccagagcaacuu

SEQ ID NO: 15315 - RNA, 21 nt, RNAi
uucguauguucggucucguug

SEQ ID NO: 15316 - DNA, 21 bp, homo sapiens
aagtccattatagactgcaag

SEQ ID NO: 15317 - RNA, 21 nt, RNAi
guccauuauagacugcaaguu

SEQ ID NO: 15318 - RNA, 21 nt, RNAi
uucagguaauaucugacguuc

SEQ ID NO: 15319 - DNA, 21 bp, homo sapiens
aagttcaatgccgagtctcag

SEQ ID NO: 15320 - RNA, 21 nt, RNAi
guucaaugccgagucucaguu

SEQ ID NO: 15321 - RNA, 21 nt, RNAi
uucaaguuacggcucagaguc

SEQ ID NO: 15322 - DNA, 21 bp, homo sapiens
aacaaagtggtcatgagtgga

SEQ ID NO: 15323 - RNA, 21 nt, RNAi
caaaguggucaugaguggauu

SEQ ID NO: 15324 - RNA, 21 nt, RNAi
uuguuucaccaguacucaccu

SEQ ID NO: 15325 - DNA, 21 bp, homo sapiens
aaagtggtcatgagtggagtg

SEQ ID NO: 15326 - RNA, 21 nt, RNAi
aguggucaugaguggaguguu

SEQ ID NO: 15327 - RNA, 21 nt, RNAi
uuucaccaguacucaccucac

SEQ ID NO: 15328 - DNA, 21 bp, homo sapiens
aagtggtcatgagtggagtga

SEQ ID NO: 15329 - RNA, 21 nt, RNAi
guggucaugaguggagugauu

SEQ ID NO: 15330 - RNA, 21 nt, RNAi
uucaccaguacucaccucacu

SEQ ID NO: 15331 - DNA, 21 bp, homo sapiens
aagaattacgagtgtgccaac

SEQ ID NO: 15332 - RNA, 21 nt, RNAi
gaauuacgagugugccaacuu

SEQ ID NO: 15333 - RNA, 21 nt, RNAi
uucuuaaugcucacacgguug

SEQ ID NO: 15334 - DNA, 21 bp, homo sapiens
caacgtggccaagattcagct

SEQ ID NO: 15335 - RNA, 21 nt, RNAi
acguggccaagauucagcuuu

SEQ ID NO: 15336 - RNA, 21 nt, RNAi
uuugcaccgguucuaagucga

SEQ ID NO: 15337 - DNA, 21 bp, homo sapiens
catctggttagacaatctcca

SEQ ID NO: 15338 - RNA, 21 nt, RNAi
ucugguuagacaaucuccauu

SEQ ID NO: 15339 - RNA, 21 nt, RNAi
uuagaccaaucuguuagaggu

SEQ ID NO: 15340 - DNA, 21 bp, homo sapiens
caaccagatagagaacctgaa

SEQ ID NO: 15341 - RNA, 21 nt, RNAi
accagauagagaaccugaauu

SEQ ID NO: 15342 - RNA, 21 nt, RNAi
uuuggucuaucucuuggacuu

SEQ ID NO: 15343 - DNA, 21 bp, homo sapiens
cattcggattcgagccatcct

SEQ ID NO: 15344 - RNA, 21 nt, RNAi
uucggauucgagccauccuuu

SEQ ID NO: 15345 - RNA, 21 nt, RNAi
uuaagccuaagcucgguagga

SEQ ID NO: 15346 - DNA, 21 bp, homo sapiens
catcctctcaacctaccgcaa

SEQ ID NO: 15347 - RNA, 21 nt, RNAi
uccucucaaccuaccgcaauu

SEQ ID NO: 15348 - RNA, 21 nt, RNAi
uuaggagaguuggauggcguu

SEQ ID NO: 15349 - DNA, 21 bp, homo sapiens
catccacctcaacgagatcca

SEQ ID NO: 15350 - RNA, 21 nt, RNAi
uccaccucaacgagauccauu

SEQ ID NO: 15351 - RNA, 21 nt, RNAi
uuagguggaguugcucuaggu

SEQ ID NO: 15352 - DNA, 21 bp, homo sapiens
cacaggcaatgagaagtccat

SEQ ID NO: 15353 - RNA, 21 nt, RNAi
caggcaaugagaaguccauuu

SEQ ID NO: 15354 - RNA, 21 nt, RNAi
uuguccguuacucuucaggua

SEQ ID NO: 15355 - DNA, 21 bp, homo sapiens
caagttcaatgccgagtctca

SEQ ID NO: 15356 - RNA, 21 nt, RNAi
aguucaaugccgagucucauu

SEQ ID NO: 15357 - RNA, 21 nt, RNAi
uuucaaguuacggcucagagu

SEQ ID NO: 15358 - DNA, 21 bp, homo sapiens
caacagcaacaaagtggtcat

SEQ ID NO: 15359 - RNA, 21 nt, RNAi
acagcaacaaaguggucauuu

SEQ ID NO: 15360 - RNA, 21 nt, RNAi
uuugucguuguuucaccagua

SEQ ID NO: 15361 - DNA, 21 bp, homo sapiens
caacaaagtggtcatgagtgg

SEQ ID NO: 15362 - RNA, 21 nt, RNAi
acaaaguggucaugagugguu

SEQ ID NO: 15363 - RNA, 21 nt, RNAi
uuuguuucaccaguacucacc

SEQ ID NO: 15364 - DNA, 21 bp, homo sapiens
caaagtggtcatgagtggagt

SEQ ID NO: 15365 - RNA, 21 nt, RNAi
aaguggucaugaguggaguuu

SEQ ID NO: 15366 - RNA, 21 nt, RNAi
uuuucaccaguacucaccuca

SEQ ID NO: 15367 - DNA, 21 bp, homo sapiens
catccagaagaattacgagtg

SEQ ID NO: 15368 - RNA, 21 nt, RNAi
uccagaagaauuacgaguguu

SEQ ID NO: 15369 - RNA, 21 nt, RNAi
uuaggucuucuuaaugcucac

SEQ ID NO: 15370 - DNA, 21 bp, homo sapiens
cagaagaattacgagtgtgcc

SEQ ID NO: 15371 - RNA, 21 nt, RNAi
gaagaauuacgagugugccuu

SEQ ID NO: 15372 - RNA, 21 nt, RNAi
uucuucuuaaugcucacacgg

SEQ ID NO: 15373 - DNA, 21 bp, homo sapiens
catgtaccgccatgacatcga

SEQ ID NO: 15374 - RNA, 21 nt, RNAi
uguaccgccaugacaucgauu

SEQ ID NO: 15375 - RNA, 21 nt, RNAi
uuacauggcgguacuguagcu

SEQ ID NO: 15376 - DNA, 21 bp, homo sapiens
caacttcgaggttgcagaatc

SEQ ID NO: 15377 - RNA, 21 nt, RNAi
acuucgagguugcagaaucuu

SEQ ID NO: 15378 - RNA, 21 nt, RNAi
uuugaagcuccaacgucuuag

SEQ ID NO: 15379 - DNA, 21 bp, homo sapiens
cagaatccgattactccaaca

SEQ ID NO: 15380 - RNA, 21 nt, RNAi
gaauccgauuacuccaacauu

SEQ ID NO: 15381 - RNA, 21 nt, RNAi
uucuuaggcuaaugagguugu

SEQ ID NO: 15382 - DNA, 21 bp, homo sapiens
gaggtgtactatgatggccag

SEQ ID NO: 15383 - RNA, 21 nt, RNAi
gguguacuaugauggccaguu

SEQ ID NO: 15384 - RNA, 21 nt, RNAi
uuccacaugauacuaccgguc

SEQ ID NO: 15385 - DNA, 21 bp, homo sapiens
gatgacgacttctccatccac

SEQ ID NO: 15386 - RNA, 21 nt, RNAi
ugacgacuucuccauccacuu

SEQ ID NO: 15387 - RNA, 21 nt, RNAi
uuacugcugaagagguaggug

SEQ ID NO: 15388 - DNA, 21 bp, homo sapiens
gacaatctccactgtactggc

SEQ ID NO: 15389 - RNA, 21 nt, RNAi
caaucuccacuguacuggcuu

SEQ ID NO: 15390 - RNA, 21 nt, RNAi
uuguuagaggugacaugaccg

SEQ ID NO: 15391 - DNA, 21 bp, homo sapiens
gacattcggattcgagccatc

SEQ ID NO: 15392 - RNA, 21 nt, RNAi
cauucggauucgagccaucuu

SEQ ID NO: 15393 - RNA, 21 nt, RNAi
uuguaagccuaagcucgguag

SEQ ID NO: 15394 - DNA, 21 bp, homo sapiens
gattcgagccatcctctcaac

SEQ ID NO: 15395 - RNA, 21 nt, RNAi
uucgagccauccucucaacuu

SEQ ID NO: 15396 - RNA, 21 nt, RNAi
uuaagcucgguaggagaguug

SEQ ID NO: 15397 - DNA, 21 bp, homo sapiens
gaagaatgtcacctgcgagaa

SEQ ID NO: 15398 - RNA, 21 nt, RNAi
agaaugucaccugcgagaauu

SEQ ID NO: 15399 - RNA, 21 nt, RNAi
uuucuuacaguggacgcucuu

SEQ ID NO: 15400 - DNA, 21 bp, homo sapiens
gaatgtcacctgcgagaatgg

SEQ ID NO: 15401 - RNA, 21 nt, RNAi
augucaccugcgagaaugguu

SEQ ID NO: 15402 - RNA, 21 nt, RNAi
uuuacaguggacgcucuuacc

SEQ ID NO: 15403 - DNA, 21 bp, homo sapiens
gagaagtccattatagactgc

SEQ ID NO: 15404 - RNA, 21 nt, RNAi
gaaguccauuauagacugcuu

SEQ ID NO: 15405 - RNA, 21 nt, RNAi
uucuucagguaauaucugacg

SEQ ID NO: 15406 - DNA, 21 bp, homo sapiens
gaagtccattatagactgcaa

SEQ ID NO: 15407 - RNA, 21 nt, RNAi
aguccauuauagacugcaauu

SEQ ID NO: 15408 - RNA, 21 nt, RNAi
uuucagguaauaucugacguu

SEQ ID NO: 15409 - DNA, 21 bp, homo sapiens
gactgcaagttcaatgccgag

SEQ ID NO: 15410 - RNA, 21 nt, RNAi
cugcaaguucaaugccgaguu

SEQ ID NO: 15411 - RNA, 21 nt, RNAi
uugacguucaaguuacggcuc

SEQ ID NO: 15412 - DNA, 21 bp, homo sapiens
gaagaattacgagtgtgccaa

SEQ ID NO: 15413 - RNA, 21 nt, RNAi
agaauuacgagugugccaauu

SEQ ID NO: 15414 - RNA, 21 nt, RNAi
uuucuuaaugcucacacgguu

SEQ ID NO: 15415 - DNA, 21 bp, homo sapiens
gacatgtaccgccatgacatc

SEQ ID NO: 15416 - RNA, 21 nt, RNAi
cauguaccgccaugacaucuu

SEQ ID NO: 15417 - RNA, 21 nt, RNAi
uuguacauggcgguacuguag

SEQ ID NO: 15418 - DNA, 21 bp, homo sapiens
gaaatgcaggagccgctatga

SEQ ID NO: 15419 - RNA, 21 nt, RNAi
aaugcaggagccgcuaugauu

SEQ ID NO: 15420 - RNA, 21 nt, RNAi
uuuuacguccucggcgauacu

SEQ ID NO: 15421 - DNA, 21 bp, homo sapiens
tatagactgcaagttcaatgc

SEQ ID NO: 15422 - RNA, 21 nt, RNAi
uagacugcaaguucaaugcuu

SEQ ID NO: 15423 - RNA, 21 nt, RNAi
uuaucugacguucaaguuacg

SEQ ID NO: 15424 - DNA, 21 bp, homo sapiens
tagactgcaagttcaatgccg

SEQ ID NO: 15425 - RNA, 21 nt, RNAi
gacugcaaguucaaugccguu

SEQ ID NO: 15426 - RNA, 21 nt, RNAi
uucugacguucaaguuacggc

SEQ ID NO: 15427 - DNA, 21 bp, homo sapiens
tattggcacggagatgtcaac

SEQ ID NO: 15428 - RNA, 21 nt, RNAi
uuggcacggagaugucaacuu

SEQ ID NO: 15429 - RNA, 21 nt, RNAi
uuaaccgugccucuacaguug

SEQ ID NO: 15430 - DNA, 21 bp, homo sapiens
tacaactgccacataggtggt

SEQ ID NO: 15431 - RNA, 21 nt, RNAi
caacugccacauaggugguuu

SEQ ID NO: 15432 - RNA, 21 nt, RNAi
uuguugacgguguauccacca

SEQ ID NO: 15433 - DNA, 21 bp, homo sapiens
aacatccggcgaagaagctca

SEQ ID NO: 15434 - RNA, 21 nt, RNAi
cauccggcgaagaagcucauu

SEQ ID NO: 15435 - RNA, 21 nt, RNAi
uuguaggccgcuucuucgagu

SEQ ID NO: 15436 - DNA, 21 bp, homo sapiens
aagaagctcaggagcggtggc

SEQ ID NO: 15437 - RNA, 21 nt, RNAi
gaagcucaggagcgguggcuu

SEQ ID NO: 15438 - RNA, 21 nt, RNAi
uucuucgaguccucgccaccg

SEQ ID NO: 15439 - DNA, 21 bp, homo sapiens
aagcggaagatcgtgctgctc

SEQ ID NO: 15440 - RNA, 21 nt, RNAi
gcggaagaucgugcugcucuu

SEQ ID NO: 15441 - RNA, 21 nt, RNAi
uucgccuucuagcacgacgag

SEQ ID NO: 15442 - DNA, 21 bp, homo sapiens
aagatcgtgctgctcatggcc

SEQ ID NO: 15443 - RNA, 21 nt, RNAi
gaucgugcugcucauggccuu

SEQ ID NO: 15444 - RNA, 21 nt, RNAi
uucuagcacgacgaguaccgg

SEQ ID NO: 15445 - DNA, 21 bp, homo sapiens
aaacaattgaagatgacttgg

SEQ ID NO: 15446 - RNA, 21 nt, RNAi
acaauugaagaugacuugguu

SEQ ID NO: 15447 - RNA, 21 nt, RNAi
uuuguuaacuucuacugaacc

SEQ ID NO: 15448 - DNA, 21 bp, homo sapiens
aacaattgaagatgacttggt

SEQ ID NO: 15449 - RNA, 21 nt, RNAi
caauugaagaugacuugguuu

SEQ ID NO: 15450 - RNA, 21 nt, RNAi
uuguuaacuucuacugaacca

SEQ ID NO: 15451 - DNA, 21 bp, homo sapiens
aattgaagatgacttggtgtc

SEQ ID NO: 15452 - RNA, 21 nt, RNAi
uugaagaugacuuggugucuu

SEQ ID NO: 15453 - RNA, 21 nt, RNAi
uuaacuucuacugaaccacag

SEQ ID NO: 15454 - DNA, 21 bp, homo sapiens
aaatcatggtgaggacatgag

SEQ ID NO: 15455 - RNA, 21 nt, RNAi
aucauggugaggacaugaguu

SEQ ID NO: 15456 - RNA, 21 nt, RNAi
uuuaguaccacuccuguacuc

SEQ ID NO: 15457 - DNA, 21 bp, homo sapiens
aatcatggtgaggacatgagg

SEQ ID NO: 15458 - RNA, 21 nt, RNAi
ucauggugaggacaugagguu

SEQ ID NO: 15459 - RNA, 21 nt, RNAi
uuaguaccacuccuguacucc

SEQ ID NO: 15460 - DNA, 21 bp, homo sapiens
aaatgtccttccagcgctgcg

SEQ ID NO: 15461 - RNA, 21 nt, RNAi
auguccuuccagcgcugcguu

SEQ ID NO: 15462 - RNA, 21 nt, RNAi
uuuacaggaaggucgcgacgc

SEQ ID NO: 15463 - DNA, 21 bp, homo sapiens
aatgtccttccagcgctgcgc

SEQ ID NO: 15464 - RNA, 21 nt, RNAi
uguccuuccagcgcugcgcuu

SEQ ID NO: 15465 - RNA, 21 nt, RNAi
uuacaggaaggucgcgacgcg

SEQ ID NO: 15466 - DNA, 21 bp, homo sapiens
aaggtgtggctgattgacgac

SEQ ID NO: 15467 - RNA, 21 nt, RNAi
gguguggcugauugacgacuu

SEQ ID NO: 15468 - RNA, 21 nt, RNAi
uuccacaccgacuaacugcug

SEQ ID NO: 15469 - DNA, 21 bp, homo sapiens
aaagatcaacagccaccttcc

SEQ ID NO: 15470 - RNA, 21 nt, RNAi
agaucaacagccaccuuccuu

SEQ ID NO: 15471 - RNA, 21 nt, RNAi
uuucuaguugucgguggaagg

SEQ ID NO: 15472 - DNA, 21 bp, homo sapiens
aactccaagaacagatgtgat

SEQ ID NO: 15473 - RNA, 21 nt, RNAi
cuccaagaacagaugugauuu

SEQ ID NO: 15474 - RNA, 21 nt, RNAi
uugagguucuugucuacacua

SEQ ID NO: 15475 - DNA, 21 bp, homo sapiens
aagaacagatgtgatgccagg

SEQ ID NO: 15476 - RNA, 21 nt, RNAi
gaacagaugugaugccagguu

SEQ ID NO: 15477 - RNA, 21 nt, RNAi
uucuugucuacacuacggucc

SEQ ID NO: 15478 - DNA, 21 bp, homo sapiens
aacagatgtgatgccaggacc

SEQ ID NO: 15479 - RNA, 21 nt, RNAi
cagaugugaugccaggaccuu

SEQ ID NO: 15480 - RNA, 21 nt, RNAi
uugucuacacuacgguccugg

SEQ ID NO: 15481 - DNA, 21 bp, homo sapiens
aacaggctcctggcctgctac

SEQ ID NO: 15482 - RNA, 21 nt, RNAi
caggcuccuggccugcuacuu

SEQ ID NO: 15483 - RNA, 21 nt, RNAi
uuguccgaggaccggacgaug

SEQ ID NO: 15484 - DNA, 21 bp, homo sapiens
aacttccacaatttcacctcg

SEQ ID NO: 15485 - RNA, 21 nt, RNAi
cuuccacaauuucaccucguu

SEQ ID NO: 15486 - RNA, 21 nt, RNAi
uugaagguguuaaaguggagc

SEQ ID NO: 15487 - DNA, 21 bp, homo sapiens
aagatggtcggcctggtggtg

SEQ ID NO: 15488 - RNA, 21 nt, RNAi
gauggucggccuggugguguu

SEQ ID NO: 15489 - RNA, 21 nt, RNAi
uucuaccagccggaccaccac

SEQ ID NO: 15490 - DNA, 21 bp, homo sapiens
aagtacaaccagcgctttggc

SEQ ID NO: 15491 - RNA, 21 nt, RNAi
guacaaccagcgcuuuggcuu

SEQ ID NO: 15492 - RNA, 21 nt, RNAi
uucauguuggucgcgaaaccg

SEQ ID NO: 15493 - DNA, 21 bp, homo sapiens
aaccagcgctttggcaacgat

SEQ ID NO: 15494 - RNA, 21 nt, RNAi
ccagcgcuuuggcaacgauuu

SEQ ID NO: 15495 - RNA, 21 nt, RNAi
uuggucgcgaaaccguugcua

SEQ ID NO: 15496 - DNA, 21 bp, homo sapiens
aaggaaaggtcgcagccttca

SEQ ID NO: 15497 - RNA, 21 nt, RNAi
ggaaaggucgcagccuucauu

SEQ ID NO: 15498 - RNA, 21 nt, RNAi
uuccuuuccagcgucggaagu

SEQ ID NO: 15499 - DNA, 21 bp, homo sapiens
aaaggtcgcagccttcaagga

SEQ ID NO: 15500 - RNA, 21 nt, RNAi
aggucgcagccuucaaggauu

SEQ ID NO: 15501 - RNA, 21 nt, RNAi
uuuccagcgucggaaguuccu

SEQ ID NO: 15502 - DNA, 21 bp, homo sapiens
aaggtcgcagccttcaaggag

SEQ ID NO: 15503 - RNA, 21 nt, RNAi
ggucgcagccuucaaggaguu

SEQ ID NO: 15504 - RNA, 21 nt, RNAi
uuccagcgucggaaguuccuc

SEQ ID NO: 15505 - DNA, 21 bp, homo sapiens
aacttcagtgccaccgctctc

SEQ ID NO: 15506 - RNA, 21 nt, RNAi
cuucagugccaccgcucucuu

SEQ ID NO: 15507 - RNA, 21 nt, RNAi
uugaagucacgguggcgagag

SEQ ID NO: 15508 - DNA, 21 bp, homo sapiens
aacagcctttctcgaatctgt

SEQ ID NO: 15509 - RNA, 21 nt, RNAi
cagccuuucucgaaucuguuu

SEQ ID NO: 15510 - RNA, 21 nt, RNAi
uugucggaaagagcuuagaca

SEQ ID NO: 15511 - DNA, 21 bp, homo sapiens
aacctcagcatgtaaagaact

SEQ ID NO: 15512 - RNA, 21 nt, RNAi
ccucagcauguaaagaacuuu

SEQ ID NO: 15513 - RNA, 21 nt, RNAi
uuggagucguacauuucuuga

SEQ ID NO: 15514 - DNA, 21 bp, homo sapiens
catccggcgaagaagctcagg

SEQ ID NO: 15515 - RNA, 21 nt, RNAi
uccggcgaagaagcucagguu

SEQ ID NO: 15516 - RNA, 21 nt, RNAi
uuaggccgcuucuucgagucc

SEQ ID NO: 15517 - DNA, 21 bp, homo sapiens
caagcggaagatcgtgctgct

SEQ ID NO: 15518 - RNA, 21 nt, RNAi
agcggaagaucgugcugcuuu

SEQ ID NO: 15519 - RNA, 21 nt, RNAi
uuucgccuucuagcacgacga

SEQ ID NO: 15520 - DNA, 21 bp, homo sapiens
cacggcatgcagaggaatgtc

SEQ ID NO: 15521 - RNA, 21 nt, RNAi
cggcaugcagaggaaugucuu

SEQ ID NO: 15522 - RNA, 21 nt, RNAi
uugccguacgucuccuuacag

SEQ ID NO: 15523 - DNA, 21 bp, homo sapiens
caattgaagatgacttggtgt

SEQ ID NO: 15524 - RNA, 21 nt, RNAi
auugaagaugacuugguguuu

SEQ ID NO: 15525 - RNA, 21 nt, RNAi
uuuaacuucuacugaaccaca

SEQ ID NO: 15526 - DNA, 21 bp, homo sapiens
catggtgaggacatgaggaaa

SEQ ID NO: 15527 - RNA, 21 nt, RNAi
uggugaggacaugaggaaauu

SEQ ID NO: 15528 - RNA, 21 nt, RNAi
uuaccacuccuguacuccuuu

SEQ ID NO: 15529 - DNA, 21 bp, homo sapiens
caagaacagatgtgatgccag

SEQ ID NO: 15530 - RNA, 21 nt, RNAi
agaacagaugugaugccaguu

SEQ ID NO: 15531 - RNA, 21 nt, RNAi
uuucuugucuacacuacgguc

SEQ ID NO: 15532 - DNA, 21 bp, homo sapiens
cagatgtgatgccaggaccta

SEQ ID NO: 15533 - RNA, 21 nt, RNAi
gaugugaugccaggaccuauu

SEQ ID NO: 15534 - RNA, 21 nt, RNAi
uucuacacuacgguccuggau

SEQ ID NO: 15535 - DNA, 21 bp, homo sapiens
caggacctattgctacctgct

SEQ ID NO: 15536 - RNA, 21 nt, RNAi
ggaccuauugcuaccugcuuu

SEQ ID NO: 15537 - RNA, 21 nt, RNAi
uuccuggauaacgauggacga

SEQ ID NO: 15538 - DNA, 21 bp, homo sapiens
cacgtttgcctttgcgcacaa

SEQ ID NO: 15539 - RNA, 21 nt, RNAi
cguuugccuuugcgcacaauu

SEQ ID NO: 15540 - RNA, 21 nt, RNAi
uugcaaacggaaacgcguguu

SEQ ID NO: 15541 - DNA, 21 bp, homo sapiens
caggatgagacctaccgcctg

SEQ ID NO: 15542 - RNA, 21 nt, RNAi
ggaugagaccuaccgccuguu

SEQ ID NO: 15543 - RNA, 21 nt, RNAi
uuccuacucuggauggcggac

SEQ ID NO: 15544 - DNA, 21 bp, homo sapiens
cagcaggtcaacaggctcctg

SEQ ID NO: 15545 - RNA, 21 nt, RNAi
gcaggucaacaggcuccuguu

SEQ ID NO: 15546 - RNA, 21 nt, RNAi
uucguccaguuguccgaggac

SEQ ID NO: 15547 - DNA, 21 bp, homo sapiens
caacaggctcctggcctgcta

SEQ ID NO: 15548 - RNA, 21 nt, RNAi
acaggcuccuggccugcuauu

SEQ ID NO: 15549 - RNA, 21 nt, RNAi
uuuguccgaggaccggacgau

SEQ ID NO: 15550 - DNA, 21 bp, homo sapiens
caggctcctggcctgctacaa

SEQ ID NO: 15551 - RNA, 21 nt, RNAi
ggcuccuggccugcuacaauu

SEQ ID NO: 15552 - RNA, 21 nt, RNAi
uuccgaggaccggacgauguu

SEQ ID NO: 15553 - DNA, 21 bp, homo sapiens
cacgcacaacttccacaattt

SEQ ID NO: 15554 - RNA, 21 nt, RNAi
cgcacaacuuccacaauuuuu

SEQ ID NO: 15555 - RNA, 21 nt, RNAi
uugcguguugaagguguuaaa

SEQ ID NO: 15556 - DNA, 21 bp, homo sapiens
cacaacttccacaatttcacc

SEQ ID NO: 15557 - RNA, 21 nt, RNAi
caacuuccacaauuucaccuu

SEQ ID NO: 15558 - RNA, 21 nt, RNAi
uuguugaagguguuaaagugg

SEQ ID NO: 15559 - DNA, 21 bp, homo sapiens
caacttccacaatttcacctc

SEQ ID NO: 15560 - RNA, 21 nt, RNAi
acuuccacaauuucaccucuu

SEQ ID NO: 15561 - RNA, 21 nt, RNAi
uuugaagguguuaaaguggag

SEQ ID NO: 15562 - DNA, 21 bp, homo sapiens
cacaatttcacctcgcagaag

SEQ ID NO: 15563 - RNA, 21 nt, RNAi
caauuucaccucgcagaaguu

SEQ ID NO: 15564 - RNA, 21 nt, RNAi
uuguuaaaguggagcgucuuc

SEQ ID NO: 15565 - DNA, 21 bp, homo sapiens
cagtgcctgccgctacatcct

SEQ ID NO: 15566 - RNA, 21 nt, RNAi
gugccugccgcuacauccuuu

SEQ ID NO: 15567 - RNA, 21 nt, RNAi
uucacggacggcgauguagga

SEQ ID NO: 15568 - DNA, 21 bp, homo sapiens
catcctggagatgtactgcga

SEQ ID NO: 15569 - RNA, 21 nt, RNAi
uccuggagauguacugcgauu

SEQ ID NO: 15570 - RNA, 21 nt, RNAi
uuaggaccucuacaugacgcu

SEQ ID NO: 15571 - DNA, 21 bp, homo sapiens
cagagcttcatgatgcatcag

SEQ ID NO: 15572 - RNA, 21 nt, RNAi
gagcuucaugaugcaucaguu

SEQ ID NO: 15573 - RNA, 21 nt, RNAi
uucucgaaguacuacguaguc

SEQ ID NO: 15574 - DNA, 21 bp, homo sapiens
catgatgcatcagatccggaa

SEQ ID NO: 15575 - RNA, 21 nt, RNAi
ugaugcaucagauccggaauu

SEQ ID NO: 15576 - RNA, 21 nt, RNAi
uuacuacguagucuaggccuu

SEQ ID NO: 15577 - DNA, 21 bp, homo sapiens
catcagatccggaagatggtc

SEQ ID NO: 15578 - RNA, 21 nt, RNAi
ucagauccggaagauggucuu

SEQ ID NO: 15579 - RNA, 21 nt, RNAi
uuagucuaggccuucuaccag

SEQ ID NO: 15580 - DNA, 21 bp, homo sapiens
cagatccggaagatggtcggc

SEQ ID NO: 15581 - RNA, 21 nt, RNAi
gauccggaagauggucggcuu

SEQ ID NO: 15582 - RNA, 21 nt, RNAi
uucuaggccuucuaccagccg

SEQ ID NO: 15583 - DNA, 21 bp, homo sapiens
cacagagaaggtggacgtgcc

SEQ ID NO: 15584 - RNA, 21 nt, RNAi
cagagaagguggacgugccuu

SEQ ID NO: 15585 - RNA, 21 nt, RNAi
uugucucuuccaccugcacgg

SEQ ID NO: 15586 - DNA, 21 bp, homo sapiens
cacttcgagaagtacaaccag

SEQ ID NO: 15587 - RNA, 21 nt, RNAi
cuucgagaaguacaaccaguu

SEQ ID NO: 15588 - RNA, 21 nt, RNAi
uugaagcucuucauguugguc

SEQ ID NO: 15589 - DNA, 21 bp, homo sapiens
caaccagcgctttggcaacga

SEQ ID NO: 15590 - RNA, 21 nt, RNAi
accagcgcuuuggcaacgauu

SEQ ID NO: 15591 - RNA, 21 nt, RNAi
uuuggucgcgaaaccguugcu

SEQ ID NO: 15592 - DNA, 21 bp, homo sapiens
caggaggaaggaaaggtcgca

SEQ ID NO: 15593 - RNA, 21 nt, RNAi
ggaggaaggaaaggucgcauu

SEQ ID NO: 15594 - RNA, 21 nt, RNAi
uuccuccuuccuuuccagcgu

SEQ ID NO: 15595 - DNA, 21 bp, homo sapiens
cagccttcaaggaggagcaca

SEQ ID NO: 15596 - RNA, 21 nt, RNAi
gccuucaaggaggagcacauu

SEQ ID NO: 15597 - RNA, 21 nt, RNAi
uucggaaguuccuccucgugu

SEQ ID NO: 15598 - DNA, 21 bp, homo sapiens
catccacaacttcagtgccac

SEQ ID NO: 15599 - RNA, 21 nt, RNAi
uccacaacuucagugccacuu

SEQ ID NO: 15600 - RNA, 21 nt, RNAi
uuagguguugaagucacggug

SEQ ID NO: 15601 - DNA, 21 bp, homo sapiens
cacaacttcagtgccaccgct

SEQ ID NO: 15602 - RNA, 21 nt, RNAi
caacuucagugccaccgcuuu

SEQ ID NO: 15603 - RNA, 21 nt, RNAi
uuguugaagucacgguggcga

SEQ ID NO: 15604 - DNA, 21 bp, homo sapiens
caacttcagtgccaccgctct

SEQ ID NO: 15605 - RNA, 21 nt, RNAi
acuucagugccaccgcucuuu

SEQ ID NO: 15606 - RNA, 21 nt, RNAi
uuugaagucacgguggcgaga

SEQ ID NO: 15607 - DNA, 21 bp, homo sapiens
caccagagtgcctctgagcag

SEQ ID NO: 15608 - RNA, 21 nt, RNAi
ccagagugccucugagcaguu

SEQ ID NO: 15609 - RNA, 21 nt, RNAi
uuggucucacggagacucguc

SEQ ID NO: 15610 - DNA, 21 bp, homo sapiens
cagagtgcctctgagcagctc

SEQ ID NO: 15611 - RNA, 21 nt, RNAi
gagugccucugagcagcucuu

SEQ ID NO: 15612 - RNA, 21 nt, RNAi
uucucacggagacucgucgag

SEQ ID NO: 15613 - DNA, 21 bp, homo sapiens
cagcctttctcgaatctgttt

SEQ ID NO: 15614 - RNA, 21 nt, RNAi
gccuuucucgaaucuguuuuu

SEQ ID NO: 15615 - RNA, 21 nt, RNAi
uucggaaagagcuuagacaaa

SEQ ID NO: 15616 - DNA, 21 bp, homo sapiens
cagctcttgcattgcatagat

SEQ ID NO: 15617 - RNA, 21 nt, RNAi
gcucuugcauugcauagauuu

SEQ ID NO: 15618 - RNA, 21 nt, RNAi
uucgagaacguaacguaucua

SEQ ID NO: 15619 - DNA, 21 bp, homo sapiens
cattgcatagatgaacctcag

SEQ ID NO: 15620 - RNA, 21 nt, RNAi
uugcauagaugaaccucaguu

SEQ ID NO: 15621 - RNA, 21 nt, RNAi
uuaacguaucuacuuggaguc

SEQ ID NO: 15622 - DNA, 21 bp, homo sapiens
catagatgaacctcagcatgt

SEQ ID NO: 15623 - RNA, 21 nt, RNAi
uagaugaaccucagcauguuu

SEQ ID NO: 15624 - RNA, 21 nt, RNAi
uuaucuacuuggagucguaca

SEQ ID NO: 15625 - DNA, 21 bp, homo sapiens
gaacatccggcgaagaagctc

SEQ ID NO: 15626 - RNA, 21 nt, RNAi
acauccggcgaagaagcucuu

SEQ ID NO: 15627 - RNA, 21 nt, RNAi
uuuguaggccgcuucuucgag

SEQ ID NO: 15628 - DNA, 21 bp, homo sapiens
gaagaagctcaggagcggtgg

SEQ ID NO: 15629 - RNA, 21 nt, RNAi
agaagcucaggagcggugguu

SEQ ID NO: 15630 - RNA, 21 nt, RNAi
uuucuucgaguccucgccacc

SEQ ID NO: 15631 - DNA, 21 bp, homo sapiens
gaagatcgtgctgctcatggc

SEQ ID NO: 15632 - RNA, 21 nt, RNAi
agaucgugcugcucauggcuu

SEQ ID NO: 15633 - RNA, 21 nt, RNAi
uuucuagcacgacgaguaccg

SEQ ID NO: 15634 - DNA, 21 bp, homo sapiens
gatcgtgctgctcatggccta

SEQ ID NO: 15635 - RNA, 21 nt, RNAi
ucgugcugcucauggccuauu

SEQ ID NO: 15636 - RNA, 21 nt, RNAi
uuagcacgacgaguaccggau

SEQ ID NO: 15637 - DNA, 21 bp, homo sapiens
gaagatgacttggtgtccgcc

SEQ ID NO: 15638 - RNA, 21 nt, RNAi
agaugacuugguguccgccuu

SEQ ID NO: 15639 - RNA, 21 nt, RNAi
uuucuacugaaccacaggcgg

SEQ ID NO: 15640 - DNA, 21 bp, homo sapiens
gaaggtgtggctgattgacga

SEQ ID NO: 15641 - RNA, 21 nt, RNAi
agguguggcugauugacgauu

SEQ ID NO: 15642 - RNA, 21 nt, RNAi
uuuccacaccgacuaacugcu

SEQ ID NO: 15643 - DNA, 21 bp, homo sapiens
gaacagatgtgatgccaggac

SEQ ID NO: 15644 - RNA, 21 nt, RNAi
acagaugugaugccaggacuu

SEQ ID NO: 15645 - RNA, 21 nt, RNAi
uuugucuacacuacgguccug

SEQ ID NO: 15646 - DNA, 21 bp, homo sapiens
gatgtgatgccaggacctatt

SEQ ID NO: 15647 - RNA, 21 nt, RNAi
ugugaugccaggaccuauuuu

SEQ ID NO: 15648 - RNA, 21 nt, RNAi
uuacacuacgguccuggauaa

SEQ ID NO: 15649 - DNA, 21 bp, homo sapiens
gatgccaggacctattgctac

SEQ ID NO: 15650 - RNA, 21 nt, RNAi
ugccaggaccuauugcuacuu

SEQ ID NO: 15651 - RNA, 21 nt, RNAi
uuacgguccuggauaacgaug

SEQ ID NO: 15652 - DNA, 21 bp, homo sapiens
gacctattgctacctgctgcc

SEQ ID NO: 15653 - RNA, 21 nt, RNAi
ccuauugcuaccugcugccuu

SEQ ID NO: 15654 - RNA, 21 nt, RNAi
uuggauaacgauggacgacgg

SEQ ID NO: 15655 - DNA, 21 bp, homo sapiens
gacgttcaggatgagacctac

SEQ ID NO: 15656 - RNA, 21 nt, RNAi
cguucaggaugagaccuacuu

SEQ ID NO: 15657 - RNA, 21 nt, RNAi
uugcaaguccuacucuggaug

SEQ ID NO: 15658 - DNA, 21 bp, homo sapiens
gatgagacctaccgcctgagc

SEQ ID NO: 15659 - RNA, 21 nt, RNAi
ugagaccuaccgccugagcuu

SEQ ID NO: 15660 - RNA, 21 nt, RNAi
uuacucuggauggcggacucg

SEQ ID NO: 15661 - DNA, 21 bp, homo sapiens
gagacgctgcagcaggtcaac

SEQ ID NO: 15662 - RNA, 21 nt, RNAi
gacgcugcagcaggucaacuu

SEQ ID NO: 15663 - RNA, 21 nt, RNAi
uucugcgacgucguccaguug

SEQ ID NO: 15664 - DNA, 21 bp, homo sapiens
gacgctgcagcaggtcaacag

SEQ ID NO: 15665 - RNA, 21 nt, RNAi
cgcugcagcaggucaacaguu

SEQ ID NO: 15666 - RNA, 21 nt, RNAi
uugcgacgucguccaguuguc

SEQ ID NO: 15667 - DNA, 21 bp, homo sapiens
gagcttcatgatgcatcagat

SEQ ID NO: 15668 - RNA, 21 nt, RNAi
gcuucaugaugcaucagauuu

SEQ ID NO: 15669 - RNA, 21 nt, RNAi
uucgaaguacuacguagucua

SEQ ID NO: 15670 - DNA, 21 bp, homo sapiens
gatgcatcagatccggaagat

SEQ ID NO: 15671 - RNA, 21 nt, RNAi
ugcaucagauccggaagauuu

SEQ ID NO: 15672 - RNA, 21 nt, RNAi
uuacguagucuaggccuucua

SEQ ID NO: 15673 - DNA, 21 bp, homo sapiens
gatccggaagatggtcggcct

SEQ ID NO: 15674 - RNA, 21 nt, RNAi
uccggaagauggucggccuuu

SEQ ID NO: 15675 - RNA, 21 nt, RNAi
uuaggccuucuaccagccgga

SEQ ID NO: 15676 - DNA, 21 bp, homo sapiens
gaagatggtcggcctggtggt

SEQ ID NO: 15677 - RNA, 21 nt, RNAi
agauggucggccuggugguuu

SEQ ID NO: 15678 - RNA, 21 nt, RNAi
uuucuaccagccggaccacca

SEQ ID NO: 15679 - DNA, 21 bp, homo sapiens
gagaagtacaaccagcgcttt

SEQ ID NO: 15680 - RNA, 21 nt, RNAi
gaaguacaaccagcgcuuuuu

SEQ ID NO: 15681 - RNA, 21 nt, RNAi
uucuucauguuggucgcgaaa

SEQ ID NO: 15682 - DNA, 21 bp, homo sapiens
gaagtacaaccagcgctttgg

SEQ ID NO: 15683 - RNA, 21 nt, RNAi
aguacaaccagcgcuuugguu

SEQ ID NO: 15684 - RNA, 21 nt, RNAi
uuucauguuggucgcgaaacc

SEQ ID NO: 15685 - DNA, 21 bp, homo sapiens
gaggaaggaaaggtcgcagcc

SEQ ID NO: 15686 - RNA, 21 nt, RNAi
ggaaggaaaggucgcagccuu

SEQ ID NO: 15687 - RNA, 21 nt, RNAi
uuccuuccuuuccagcgucgg

SEQ ID NO: 15688 - DNA, 21 bp, homo sapiens
gaaggaaaggtcgcagccttc

SEQ ID NO: 15689 - RNA, 21 nt, RNAi
aggaaaggucgcagccuucuu

SEQ ID NO: 15690 - RNA, 21 nt, RNAi
uuuccuuuccagcgucggaag

SEQ ID NO: 15691 - DNA, 21 bp, homo sapiens
gaaaggtcgcagccttcaagg

SEQ ID NO: 15692 - RNA, 21 nt, RNAi
aaggucgcagccuucaagguu

SEQ ID NO: 15693 - RNA, 21 nt, RNAi
uuuuccagcgucggaaguucc

SEQ ID NO: 15694 - DNA, 21 bp, homo sapiens
gacggagacactgactgaggc

SEQ ID NO: 15695 - RNA, 21 nt, RNAi
cggagacacugacugaggcuu

SEQ ID NO: 15696 - RNA, 21 nt, RNAi
uugccucugugacugacuccg

SEQ ID NO: 15697 - DNA, 21 bp, homo sapiens
gagacactgactgaggcgatg

SEQ ID NO: 15698 - RNA, 21 nt, RNAi
gacacugacugaggcgauguu

SEQ ID NO: 15699 - RNA, 21 nt, RNAi
uucugugacugacuccgcuac

SEQ ID NO: 15700 - DNA, 21 bp, homo sapiens
gagtgcctctgagcagctcac

SEQ ID NO: 15701 - RNA, 21 nt, RNAi
gugccucugagcagcucacuu

SEQ ID NO: 15702 - RNA, 21 nt, RNAi
uucacggagacucgucgagug

SEQ ID NO: 15703 - DNA, 21 bp, homo sapiens
gagcagctcacagtgtgtgcc

SEQ ID NO: 15704 - RNA, 21 nt, RNAi
gcagcucacagugugugccuu

SEQ ID NO: 15705 - RNA, 21 nt, RNAi
uucgucgagugucacacacgg

SEQ ID NO: 15706 - DNA, 21 bp, homo sapiens
gaacagcctttctcgaatctg

SEQ ID NO: 15707 - RNA, 21 nt, RNAi
acagccuuucucgaaucuguu

SEQ ID NO: 15708 - RNA, 21 nt, RNAi
uuugucggaaagagcuuagac

SEQ ID NO: 15709 - DNA, 21 bp, homo sapiens
gatgaacctcagcatgtaaag

SEQ ID NO: 15710 - RNA, 21 nt, RNAi
ugaaccucagcauguaaaguu

SEQ ID NO: 15711 - RNA, 21 nt, RNAi
uuacuuggagucguacauuuc

SEQ ID NO: 15712 - DNA, 21 bp, homo sapiens
gaacctcagcatgtaaagaac

SEQ ID NO: 15713 - RNA, 21 nt, RNAi
accucagcauguaaagaacuu

SEQ ID NO: 15714 - RNA, 21 nt, RNAi
uuuggagucguacauuucuug

SEQ ID NO: 15715 - DNA, 21 bp, homo sapiens
taccacggcatgcagaggaat

SEQ ID NO: 15716 - RNA, 21 nt, RNAi
ccacggcaugcagaggaauuu

SEQ ID NO: 15717 - RNA, 21 nt, RNAi
uuggugccguacgucuccuua

SEQ ID NO: 15718 - DNA, 21 bp, homo sapiens
taactccaagaacagatgtga

SEQ ID NO: 15719 - RNA, 21 nt, RNAi
acuccaagaacagaugugauu

SEQ ID NO: 15720 - RNA, 21 nt, RNAi
uuugagguucuugucuacacu

SEQ ID NO: 15721 - DNA, 21 bp, homo sapiens
tacatcctggagatgtactgc

SEQ ID NO: 15722 - RNA, 21 nt, RNAi
cauccuggagauguacugcuu

SEQ ID NO: 15723 - RNA, 21 nt, RNAi
uuguaggaccucuacaugacg

SEQ ID NO: 15724 - DNA, 21 bp, homo sapiens
tacaaccagcgctttggcaac

SEQ ID NO: 15725 - RNA, 21 nt, RNAi
caaccagcgcuuuggcaacuu

SEQ ID NO: 15726 - RNA, 21 nt, RNAi
uuguuggucgcgaaaccguug

SEQ ID NO: 15727 - DNA, 21 bp, homo sapiens
taggaacagcctttctcgaat

SEQ ID NO: 15728 - RNA, 21 nt, RNAi
ggaacagccuuucucgaauuu

SEQ ID NO: 15729 - RNA, 21 nt, RNAi
uuccuugucggaaagagcuua

SEQ ID NO: 15730 - DNA, 21 bp, homo sapiens
tagatgaacctcagcatgtaa

SEQ ID NO: 15731 - RNA, 21 nt, RNAi
gaugaaccucagcauguaauu

SEQ ID NO: 15732 - RNA, 21 nt, RNAi
uucuacuuggagucguacauu

SEQ ID NO: 15733 - DNA, 21 bp, homo sapiens
gatgcatcagatccggaagat

SEQ ID NO: 15734 - RNA, 21 nt, RNAi
ugcaucagauccggaagauuu

SEQ ID NO: 15735 - RNA, 21 nt, RNAi
uuacguagucuaggccuucua

SEQ ID NO: 15736 - DNA, 21 bp, homo sapiens
gagaagtacaaccagcgcttt

SEQ ID NO: 15737 - RNA, 21 nt, RNAi
gaaguacaaccagcgcuuuuu

SEQ ID NO: 15738 - RNA, 21 nt, RNAi
uucuucauguuggucgcgaaa

SEQ ID NO: 15739 - DNA, 21 bp, homo sapiens
gaagtacaaccagcgctttgg

SEQ ID NO: 15740 - RNA, 21 nt, RNAi
aguacaaccagcgcuuugguu

SEQ ID NO: 15741 - RNA, 21 nt, RNAi
uuucauguuggucgcgaaacc

SEQ ID NO: 15742 - DNA, 21 bp, homo sapiens
aatgagagtttccgcaacggc

SEQ ID NO: 15743 - RNA, 21 nt, RNAi
ugagaguuuccgcaacggcuu

SEQ ID NO: 15744 - RNA, 21 nt, RNAi
uuacucucaaaggcguugccg

SEQ ID NO: 15745 - DNA, 21 bp, homo sapiens
aagaagaaagtgttctctact

SEQ ID NO: 15746 - RNA, 21 nt, RNAi
gaagaaaguguucucuacuuu

SEQ ID NO: 15747 - RNA, 21 nt, RNAi
uucuucuuucacaagagauga

SEQ ID NO: 15748 - DNA, 21 bp, homo sapiens
aagaaagtgttctctactcca

SEQ ID NO: 15749 - RNA, 21 nt, RNAi
gaaaguguucucuacuccauu

SEQ ID NO: 15750 - RNA, 21 nt, RNAi
uucuuucacaagagaugaggu

SEQ ID NO: 15751 - DNA, 21 bp, homo sapiens
aaagtgttctctactccaacc

SEQ ID NO: 15752 - RNA, 21 nt, RNAi
aguguucucuacuccaaccuu

SEQ ID NO: 15753 - RNA, 21 nt, RNAi
uuucacaagagaugagguugg

SEQ ID NO: 15754 - DNA, 21 bp, homo sapiens
aagtgttctctactccaaccg

SEQ ID NO: 15755 - RNA, 21 nt, RNAi
guguucucuacuccaaccguu

SEQ ID NO: 15756 - RNA, 21 nt, RNAi
uucacaagagaugagguuggc

SEQ ID NO: 15757 - DNA, 21 bp, homo sapiens
aaccgagcagcatgtcactgg

SEQ ID NO: 15758 - RNA, 21 nt, RNAi
ccgagcagcaugucacugguu

SEQ ID NO: 15759 - RNA, 21 nt, RNAi
uuggcucgucguacagugacc

SEQ ID NO: 15760 - DNA, 21 bp, homo sapiens
aagaatggaaactgcagagac

SEQ ID NO: 15761 - RNA, 21 nt, RNAi
gaauggaaacugcagagacuu

SEQ ID NO: 15762 - RNA, 21 nt, RNAi
uucuuaccuuugacgucucug

SEQ ID NO: 15763 - DNA, 21 bp, homo sapiens
aatggaaactgcagagactgc

SEQ ID NO: 15764 - RNA, 21 nt, RNAi
uggaaacugcagagacugcuu

SEQ ID NO: 15765 - RNA, 21 nt, RNAi
uuaccuuugacgucucugacg

SEQ ID NO: 15766 - DNA, 21 bp, homo sapiens
aaactgcagagactgcatcaa

SEQ ID NO: 15767 - RNA, 21 nt, RNAi
acugcagagacugcaucaauu

SEQ ID NO: 15768 - RNA, 21 nt, RNAi
uuugacgucucugacguaguu

SEQ ID NO: 15769 - DNA, 21 bp, homo sapiens
aactgcagagactgcatcaaa

SEQ ID NO: 15770 - RNA, 21 nt, RNAi
cugcagagacugcaucaaauu

SEQ ID NO: 15771 - RNA, 21 nt, RNAi
uugacgucucugacguaguuu

SEQ ID NO: 15772 - DNA, 21 bp, homo sapiens
aaagattgcacttcagcactg

SEQ ID NO: 15773 - RNA, 21 nt, RNAi
agauugcacuucagcacuguu

SEQ ID NO: 15774 - RNA, 21 nt, RNAi
uuucuaacgugaagucgugac

SEQ ID NO: 15775 - DNA, 21 bp, homo sapiens
aagattgcacttcagcactgg

SEQ ID NO: 15776 - RNA, 21 nt, RNAi
gauugcacuucagcacugguu

SEQ ID NO: 15777 - RNA, 21 nt, RNAi
uucuaacgugaagucgugacc

SEQ ID NO: 15778 - DNA, 21 bp, homo sapiens
aagactgtgctgcagattgat

SEQ ID NO: 15779 - RNA, 21 nt, RNAi
gacugugcugcagauugauuu

SEQ ID NO: 15780 - RNA, 21 nt, RNAi
uucugacacgacgucuaacua

SEQ ID NO: 15781 - DNA, 21 bp, homo sapiens
aatgtgacgtcagccgtagaa

SEQ ID NO: 15782 - RNA, 21 nt, RNAi
ugugacgucagccguagaauu

SEQ ID NO: 15783 - RNA, 21 nt, RNAi
uuacacugcagucggcaucuu

SEQ ID NO: 15784 - DNA, 21 bp, homo sapiens
aaggcatcaacagaatgacca

SEQ ID NO: 15785 - RNA, 21 nt, RNAi
ggcaucaacagaaugaccauu

SEQ ID NO: 15786 - RNA, 21 nt, RNAi
uuccguaguugucuuacuggu

SEQ ID NO: 15787 - DNA, 21 bp, homo sapiens
aacagaatgaccagagctctc

SEQ ID NO: 15788 - RNA, 21 nt, RNAi
cagaaugaccagagcucucuu

SEQ ID NO: 15789 - RNA, 21 nt, RNAi
uugucuuacuggucucgagag

SEQ ID NO: 15790 - DNA, 21 bp, homo sapiens
aatgaccagagctctcatgga

SEQ ID NO: 15791 - RNA, 21 nt, RNAi
ugaccagagcucucauggauu

SEQ ID NO: 15792 - RNA, 21 nt, RNAi
uuacuggucucgagaguaccu

SEQ ID NO: 15793 - DNA, 21 bp, homo sapiens
aagaggtggaatttcttgcct

SEQ ID NO: 15794 - RNA, 21 nt, RNAi
gagguggaauuucuugccuuu

SEQ ID NO: 15795 - RNA, 21 nt, RNAi
uucuccaccuuaaagaacgga

SEQ ID NO: 15796 - DNA, 21 bp, homo sapiens
aatttcttgccttcggagaac

SEQ ID NO: 15797 - RNA, 21 nt, RNAi
uuucuugccuucggagaacuu

SEQ ID NO: 15798 - RNA, 21 nt, RNAi
uuaaagaacggaagccucuug

SEQ ID NO: 15799 - DNA, 21 bp, homo sapiens
aaccacaaagagatggctaaa

SEQ ID NO: 15800 - RNA, 21 nt, RNAi
ccacaaagagauggcuaaauu

SEQ ID NO: 15801 - RNA, 21 nt, RNAi
uugguguuucucuaccgauuu

SEQ ID NO: 15802 - DNA, 21 bp, homo sapiens
aaagcaaatccaaagaaacca

SEQ ID NO: 15803 - RNA, 21 nt, RNAi
agcaaauccaaagaaaccauu

SEQ ID NO: 15804 - RNA, 21 nt, RNAi
uuucguuuagguuucuuuggu

SEQ ID NO: 15805 - DNA, 21 bp, homo sapiens
aagcaaatccaaagaaaccac

SEQ ID NO: 15806 - RNA, 21 nt, RNAi
gcaaauccaaagaaaccacuu

SEQ ID NO: 15807 - RNA, 21 nt, RNAi
uucguuuagguuucuuuggug

SEQ ID NO: 15808 - DNA, 21 bp, homo sapiens
aaatccaaagaaaccacagct

SEQ ID NO: 15809 - RNA, 21 nt, RNAi
auccaaagaaaccacagcuuu

SEQ ID NO: 15810 - RNA, 21 nt, RNAi
uuuagguuucuuuggugucga

SEQ ID NO: 15811 - DNA, 21 bp, homo sapiens
aatccaaagaaaccacagcta

SEQ ID NO: 15812 - RNA, 21 nt, RNAi
uccaaagaaaccacagcuauu

SEQ ID NO: 15813 - RNA, 21 nt, RNAi
uuagguuucuuuggugucgau

SEQ ID NO: 15814 - DNA, 21 bp, homo sapiens
aaagaaaccacagctacaaag

SEQ ID NO: 15815 - RNA, 21 nt, RNAi
agaaaccacagcuacaaaguu

SEQ ID NO: 15816 - RNA, 21 nt, RNAi
uuucuuuggugucgauguuuc

SEQ ID NO: 15817 - DNA, 21 bp, homo sapiens
aagaaaccacagctacaaaga

SEQ ID NO: 15818 - RNA, 21 nt, RNAi
gaaaccacagcuacaaagauu

SEQ ID NO: 15819 - RNA, 21 nt, RNAi
uucuuuggugucgauguuucu

SEQ ID NO: 15820 - DNA, 21 bp, homo sapiens
aaaccacagctacaaagaaca

SEQ ID NO: 15821 - RNA, 21 nt, RNAi
accacagcuacaaagaacauu

SEQ ID NO: 15822 - RNA, 21 nt, RNAi
uuuggugucgauguuucuugu

SEQ ID NO: 15823 - DNA, 21 bp, homo sapiens
aaccacagctacaaagaacag

SEQ ID NO: 15824 - RNA, 21 nt, RNAi
ccacagcuacaaagaacaguu

SEQ ID NO: 15825 - RNA, 21 nt, RNAi
uuggugucgauguuucuuguc

SEQ ID NO: 15826 - DNA, 21 bp, homo sapiens
aaagaacagagtgccttctgc

SEQ ID NO: 15827 - RNA, 21 nt, RNAi
agaacagagugccuucugcuu

SEQ ID NO: 15828 - RNA, 21 nt, RNAi
uuucuugucucacggaagacg

SEQ ID NO: 15829 - DNA, 21 bp, homo sapiens
aagaacagagtgccttctgct

SEQ ID NO: 15830 - RNA, 21 nt, RNAi
gaacagagugccuucugcuuu

SEQ ID NO: 15831 - RNA, 21 nt, RNAi
uucuugucucacggaagacga

SEQ ID NO: 15832 - DNA, 21 bp, homo sapiens
aaagccagagttctgaaggaa

SEQ ID NO: 15833 - RNA, 21 nt, RNAi
agccagaguucugaaggaauu

SEQ ID NO: 15834 - RNA, 21 nt, RNAi
uuucggucucaagacuuccuu

SEQ ID NO: 15835 - DNA, 21 bp, homo sapiens
aagccagagttctgaaggaag

SEQ ID NO: 15836 - RNA, 21 nt, RNAi
gccagaguucugaaggaaguu

SEQ ID NO: 15837 - RNA, 21 nt, RNAi
uucggucucaagacuuccuuc

SEQ ID NO: 15838 - DNA, 21 bp, homo sapiens
aaggaagaaggcaatgagctt

SEQ ID NO: 15839 - RNA, 21 nt, RNAi
ggaagaaggcaaugagcuuuu

SEQ ID NO: 15840 - RNA, 21 nt, RNAi
uuccuucuuccguuacucgaa

SEQ ID NO: 15841 - DNA, 21 bp, homo sapiens
aagaaggcaatgagcttgtaa

SEQ ID NO: 15842 - RNA, 21 nt, RNAi
gaaggcaaugagcuuguaauu

SEQ ID NO: 15843 - RNA, 21 nt, RNAi
uucuuccguuacucgaacauu

SEQ ID NO: 15844 - DNA, 21 bp, homo sapiens
aaggcaatgagcttgtaaaga

SEQ ID NO: 15845 - RNA, 21 nt, RNAi
ggcaaugagcuuguaaagauu

SEQ ID NO: 15846 - RNA, 21 nt, RNAi
uuccguuacucgaacauuucu

SEQ ID NO: 15847 - DNA, 21 bp, homo sapiens
aaccataagaaagctattgag

SEQ ID NO: 15848 - RNA, 21 nt, RNAi
ccauaagaaagcuauugaguu

SEQ ID NO: 15849 - RNA, 21 nt, RNAi
uugguauucuuucgauaacuc

SEQ ID NO: 15850 - DNA, 21 bp, homo sapiens
aagaaagctattgagaagtac

SEQ ID NO: 15851 - RNA, 21 nt, RNAi
gaaagcuauugagaaguacuu

SEQ ID NO: 15852 - RNA, 21 nt, RNAi
uucuuucgauaacucuucaug

SEQ ID NO: 15853 - DNA, 21 bp, homo sapiens
aaagctattgagaagtacagt

SEQ ID NO: 15854 - RNA, 21 nt, RNAi
agcuauugagaaguacaguuu

SEQ ID NO: 15855 - RNA, 21 nt, RNAi
uuucgauaacucuucauguca

SEQ ID NO: 15856 - DNA, 21 bp, homo sapiens
aagctattgagaagtacagtg

SEQ ID NO: 15857 - RNA, 21 nt, RNAi
gcuauugagaaguacaguguu

SEQ ID NO: 15858 - RNA, 21 nt, RNAi
uucgauaacucuucaugucac

SEQ ID NO: 15859 - DNA, 21 bp, homo sapiens
aagtacagtgaaagcctcttg

SEQ ID NO: 15860 - RNA, 21 nt, RNAi
guacagugaaagccucuuguu

SEQ ID NO: 15861 - RNA, 21 nt, RNAi
uucaugucacuuucggagaac

SEQ ID NO: 15862 - DNA, 21 bp, homo sapiens
aaagcctcttgtgtagtaacc

SEQ ID NO: 15863 - RNA, 21 nt, RNAi
agccucuuguguaguaaccuu

SEQ ID NO: 15864 - RNA, 21 nt, RNAi
uuucggagaacacaucauugg

SEQ ID NO: 15865 - DNA, 21 bp, homo sapiens
aagcctcttgtgtagtaacct

SEQ ID NO: 15866 - RNA, 21 nt, RNAi
gccucuuguguaguaaccuuu

SEQ ID NO: 15867 - RNA, 21 nt, RNAi
uucggagaacacaucauugga

SEQ ID NO: 15868 - DNA, 21 bp, homo sapiens
aacctggaatctgccacgtac

SEQ ID NO: 15869 - RNA, 21 nt, RNAi
ccuggaaucugccacguacuu

SEQ ID NO: 15870 - RNA, 21 nt, RNAi
uuggaccuuagacggugcaug

SEQ ID NO: 15871 - DNA, 21 bp, homo sapiens
aatctgccacgtacagcaaca

SEQ ID NO: 15872 - RNA, 21 nt, RNAi
ucugccacguacagcaacauu

SEQ ID NO: 15873 - RNA, 21 nt, RNAi
uuagacggugcaugucguugu

SEQ ID NO: 15874 - DNA, 21 bp, homo sapiens
aacagagcactctgctatttg

SEQ ID NO: 15875 - RNA, 21 nt, RNAi
cagagcacucugcuauuuguu

SEQ ID NO: 15876 - RNA, 21 nt, RNAi
uugucucgugagacgauaaac

SEQ ID NO: 15877 - DNA, 21 bp, homo sapiens
aagcagtacacagaagcagtg

SEQ ID NO: 15878 - RNA, 21 nt, RNAi
gcaguacacagaagcaguguu

SEQ ID NO: 15879 - RNA, 21 nt, RNAi
uucgucaugugucuucgucac

SEQ ID NO: 15880 - DNA, 21 bp, homo sapiens
aagcagtgaaggactgcacag

SEQ ID NO: 15881 - RNA, 21 nt, RNAi
gcagugaaggacugcacaguu

SEQ ID NO: 15882 - RNA, 21 nt, RNAi
uucgucacuuccugacguguc

SEQ ID NO: 15883 - DNA, 21 bp, homo sapiens
aagctggatggaaagaacgtg

SEQ ID NO: 15884 - RNA, 21 nt, RNAi
gcuggauggaaagaacguguu

SEQ ID NO: 15885 - RNA, 21 nt, RNAi
uucgaccuaccuuucuugcac

SEQ ID NO: 15886 - DNA, 21 bp, homo sapiens
aaagaacgtgaaggcattcta

SEQ ID NO: 15887 - RNA, 21 nt, RNAi
agaacgugaaggcauucuauu

SEQ ID NO: 15888 - RNA, 21 nt, RNAi
uuucuugcacuuccguaagau

SEQ ID NO: 15889 - DNA, 21 bp, homo sapiens
aagaacgtgaaggcattctac

SEQ ID NO: 15890 - RNA, 21 nt, RNAi
gaacgugaaggcauucuacuu

SEQ ID NO: 15891 - RNA, 21 nt, RNAi
uucuugcacuuccguaagaug

SEQ ID NO: 15892 - DNA, 21 bp, homo sapiens
aacgtgaaggcattctacaga

SEQ ID NO: 15893 - RNA, 21 nt, RNAi
cgugaaggcauucuacagauu

SEQ ID NO: 15894 - RNA, 21 nt, RNAi
uugcacuuccguaagaugucu

SEQ ID NO: 15895 - DNA, 21 bp, homo sapiens
aaagcactcaaggactataaa

SEQ ID NO: 15896 - RNA, 21 nt, RNAi
agcacucaaggacuauaaauu

SEQ ID NO: 15897 - RNA, 21 nt, RNAi
uuucgugaguuccugauauuu

SEQ ID NO: 15898 - DNA, 21 bp, homo sapiens
aagcactcaaggactataaat

SEQ ID NO: 15899 - RNA, 21 nt, RNAi
gcacucaaggacuauaaauuu

SEQ ID NO: 15900 - RNA, 21 nt, RNAi
uucgugaguuccugauauuua

SEQ ID NO: 15901 - DNA, 21 bp, homo sapiens
aaggactataaatccagcttt

SEQ ID NO: 15902 - RNA, 21 nt, RNAi
ggacuauaaauccagcuuuuu

SEQ ID NO: 15903 - RNA, 21 nt, RNAi
uuccugauauuuaggucgaaa

SEQ ID NO: 15904 - DNA, 21 bp, homo sapiens
aaatccagctttgcagacatc

SEQ ID NO: 15905 - RNA, 21 nt, RNAi
auccagcuuugcagacaucuu

SEQ ID NO: 15906 - RNA, 21 nt, RNAi
uuuaggucgaaacgucuguag

SEQ ID NO: 15907 - DNA, 21 bp, homo sapiens
aatccagctttgcagacatca

SEQ ID NO: 15908 - RNA, 21 nt, RNAi
uccagcuuugcagacaucauu

SEQ ID NO: 15909 - RNA, 21 nt, RNAi
uuaggucgaaacgucuguagu

SEQ ID NO: 15910 - DNA, 21 bp, homo sapiens
aacctcctacagattgagcct

SEQ ID NO: 15911 - RNA, 21 nt, RNAi
ccuccuacagauugagccuuu

SEQ ID NO: 15912 - RNA, 21 nt, RNAi
uuggaggaugucuaacucgga

SEQ ID NO: 15913 - DNA, 21 bp, homo sapiens
aatggtcctgcacagaagttg

SEQ ID NO: 15914 - RNA, 21 nt, RNAi
ugguccugcacagaaguuguu

SEQ ID NO: 15915 - RNA, 21 nt, RNAi
uuaccaggacgugucuucaac

SEQ ID NO: 15916 - DNA, 21 bp, homo sapiens
aagttgcggcaggaagtgaag

SEQ ID NO: 15917 - RNA, 21 nt, RNAi
guugcggcaggaagugaaguu

SEQ ID NO: 15918 - RNA, 21 nt, RNAi
uucaacgccguccuucacuuc

SEQ ID NO: 15919 - DNA, 21 bp, homo sapiens
aagtgaagcagaacctacact

SEQ ID NO: 15920 - RNA, 21 nt, RNAi
gugaagcagaaccuacacuuu

SEQ ID NO: 15921 - RNA, 21 nt, RNAi
uucacuucgucuuggauguga

SEQ ID NO: 15922 - DNA, 21 bp, homo sapiens
aagaggctttgcttgttcaaa

SEQ ID NO: 15923 - RNA, 21 nt, RNAi
gaggcuuugcuuguucaaauu

SEQ ID NO: 15924 - RNA, 21 nt, RNAi
uucuccgaaacgaacaaguuu

SEQ ID NO: 15925 - DNA, 21 bp, homo sapiens
aaactcagtgtagtcaaacac

SEQ ID NO: 15926 - RNA, 21 nt, RNAi
acucaguguagucaaacacuu

SEQ ID NO: 15927 - RNA, 21 nt, RNAi
uuugagucacaucaguuugug

SEQ ID NO: 15928 - DNA, 21 bp, homo sapiens
aactcagtgtagtcaaacaca

SEQ ID NO: 15929 - RNA, 21 nt, RNAi
cucaguguagucaaacacauu

SEQ ID NO: 15930 - RNA, 21 nt, RNAi
uugagucacaucaguuugugu

SEQ ID NO: 15931 - DNA, 21 bp, homo sapiens
aaacacagacatggttgttgc

SEQ ID NO: 15932 - RNA, 21 nt, RNAi
acacagacaugguuguugcuu

SEQ ID NO: 15933 - RNA, 21 nt, RNAi
uuugugucuguaccaacaacg

SEQ ID NO: 15934 - DNA, 21 bp, homo sapiens
aacacagacatggttgttgca

SEQ ID NO: 15935 - RNA, 21 nt, RNAi
cacagacaugguuguugcauu

SEQ ID NO: 15936 - RNA, 21 nt, RNAi
uugugucuguaccaacaacgu

SEQ ID NO: 15937 - DNA, 21 bp, homo sapiens
aagcgtgaagctgaagctctg

SEQ ID NO: 15938 - RNA, 21 nt, RNAi
gcgugaagcugaagcucuguu

SEQ ID NO: 15939 - RNA, 21 nt, RNAi
uucgcacuucgacuucgagac

SEQ ID NO: 15940 - DNA, 21 bp, homo sapiens
aacagatcctcatcagcaaag

SEQ ID NO: 15941 - RNA, 21 nt, RNAi
cagauccucaucagcaaaguu

SEQ ID NO: 15942 - RNA, 21 nt, RNAi
uugucuaggaguagucguuuc

SEQ ID NO: 15943 - DNA, 21 bp, homo sapiens
aaagcatttggctttgtcctg

SEQ ID NO: 15944 - RNA, 21 nt, RNAi
agcauuuggcuuuguccuguu

SEQ ID NO: 15945 - RNA, 21 nt, RNAi
uuucguaaaccgaaacaggac

SEQ ID NO: 15946 - DNA, 21 bp, homo sapiens
aagcatttggctttgtcctgc

SEQ ID NO: 15947 - RNA, 21 nt, RNAi
gcauuuggcuuuguccugcuu

SEQ ID NO: 15948 - RNA, 21 nt, RNAi
uucguaaaccgaaacaggacg

SEQ ID NO: 15949 - DNA, 21 bp, homo sapiens
aactcactgcagttcatctga

SEQ ID NO: 15950 - RNA, 21 nt, RNAi
cucacugcaguucaucugauu

SEQ ID NO: 15951 - RNA, 21 nt, RNAi
uugagugacgucaaguagacu

SEQ ID NO: 15952 - DNA, 21 bp, homo sapiens
aaagcagcctgttgagctggt

SEQ ID NO: 15953 - RNA, 21 nt, RNAi
agcagccuguugagcugguuu

SEQ ID NO: 15954 - RNA, 21 nt, RNAi
uuucgucggacaacucgacca

SEQ ID NO: 15955 - DNA, 21 bp, homo sapiens
aagcagcctgttgagctggtt

SEQ ID NO: 15956 - RNA, 21 nt, RNAi
gcagccuguugagcugguuuu

SEQ ID NO: 15957 - RNA, 21 nt, RNAi
uucgucggacaacucgaccaa

SEQ ID NO: 15958 - DNA, 21 bp, homo sapiens
aatggttgtccttgactctgt

SEQ ID NO: 15959 - RNA, 21 nt, RNAi
ugguuguccuugacucuguuu

SEQ ID NO: 15960 - RNA, 21 nt, RNAi
uuaccaacaggaacugagaca

SEQ ID NO: 15961 - DNA, 21 bp, homo sapiens
aagaggcctccttggtcagtg

SEQ ID NO: 15962 - RNA, 21 nt, RNAi
gaggccuccuuggucaguguu

SEQ ID NO: 15963 - RNA, 21 nt, RNAi
uucuccggaggaaccagucac

SEQ ID NO: 15964 - DNA, 21 bp, homo sapiens
aactgtgtgtttaagctgttg

SEQ ID NO: 15965 - RNA, 21 nt, RNAi
cuguguguuuaagcuguuguu

SEQ ID NO: 15966 - RNA, 21 nt, RNAi
uugacacacaaauucgacaac

SEQ ID NO: 15967 - DNA, 21 bp, homo sapiens
cagactctgtggaggagctcc

SEQ ID NO: 15968 - RNA, 21 nt, RNAi
gacucuguggaggagcuccuu

SEQ ID NO: 15969 - RNA, 21 nt, RNAi
uucugagacaccuccucgagg

SEQ ID NO: 15970 - DNA, 21 bp, homo sapiens
caatgagagtttccgcaacgg

SEQ ID NO: 15971 - RNA, 21 nt, RNAi
augagaguuuccgcaacgguu

SEQ ID NO: 15972 - RNA, 21 nt, RNAi
uuuacucucaaaggcguugcc

SEQ ID NO: 15973 - DNA, 21 bp, homo sapiens
caggcgcaaggttcttcagac

SEQ ID NO: 15974 - RNA, 21 nt, RNAi
ggcgcaagguucuucagacuu

SEQ ID NO: 15975 - RNA, 21 nt, RNAi
uuccgcguuccaagaagucug

SEQ ID NO: 15976 - DNA, 21 bp, homo sapiens
cagaagaagaaagtgttctct

SEQ ID NO: 15977 - RNA, 21 nt, RNAi
gaagaagaaaguguucucuuu

SEQ ID NO: 15978 - RNA, 21 nt, RNAi
uucuucuucuuucacaagaga

SEQ ID NO: 15979 - DNA, 21 bp, homo sapiens
caaccgagcagcatgtcactg

SEQ ID NO: 15980 - RNA, 21 nt, RNAi
accgagcagcaugucacuguu

SEQ ID NO: 15981 - RNA, 21 nt, RNAi
uuuggcucgucguacagugac

SEQ ID NO: 15982 - DNA, 21 bp, homo sapiens
cagcatgtcactggaagaatg

SEQ ID NO: 15983 - RNA, 21 nt, RNAi
gcaugucacuggaagaauguu

SEQ ID NO: 15984 - RNA, 21 nt, RNAi
uucguacagugaccuucuuac

SEQ ID NO: 15985 - DNA, 21 bp, homo sapiens
catgtcactggaagaatggaa

SEQ ID NO: 15986 - RNA, 21 nt, RNAi
ugucacuggaagaauggaauu

SEQ ID NO: 15987 - RNA, 21 nt, RNAi
uuacagugaccuucuuaccuu

SEQ ID NO: 15988 - DNA, 21 bp, homo sapiens
cactggaagaatggaaactgc

SEQ ID NO: 15989 - RNA, 21 nt, RNAi
cuggaagaauggaaacugcuu

SEQ ID NO: 15990 - RNA, 21 nt, RNAi
uugaccuucuuaccuuugacg

SEQ ID NO: 15991 - DNA, 21 bp, homo sapiens
cagagactgcatcaaagattg

SEQ ID NO: 15992 - RNA, 21 nt, RNAi
gagacugcaucaaagauuguu

SEQ ID NO: 15993 - RNA, 21 nt, RNAi
uucucugacguaguuucuaac

SEQ ID NO: 15994 - DNA, 21 bp, homo sapiens
catcaaagattgcacttcagc

SEQ ID NO: 15995 - RNA, 21 nt, RNAi
ucaaagauugcacuucagcuu

SEQ ID NO: 15996 - RNA, 21 nt, RNAi
uuaguuucuaacgugaagucg

SEQ ID NO: 15997 - DNA, 21 bp, homo sapiens
caaagattgcacttcagcact

SEQ ID NO: 15998 - RNA, 21 nt, RNAi
aagauugcacuucagcacuuu

SEQ ID NO: 15999 - RNA, 21 nt, RNAi
uuuucuaacgugaagucguga

SEQ ID NO: 16000 - DNA, 21 bp, homo sapiens
cacttcagcactggccttggt

SEQ ID NO: 16001 - RNA, 21 nt, RNAi
cuucagcacuggccuugguuu

SEQ ID NO: 16002 - RNA, 21 nt, RNAi
uugaagucgugaccggaacca

SEQ ID NO: 16003 - DNA, 21 bp, homo sapiens
catctgcttatgaggctctgg

SEQ ID NO: 16004 - RNA, 21 nt, RNAi
ucugcuuaugaggcucugguu

SEQ ID NO: 16005 - RNA, 21 nt, RNAi
uuagacgaauacuccgagacc

SEQ ID NO: 16006 - DNA, 21 bp, homo sapiens
cagattgatgataatgtgacg

SEQ ID NO: 16007 - RNA, 21 nt, RNAi
gauugaugauaaugugacguu

SEQ ID NO: 16008 - RNA, 21 nt, RNAi
uucuaacuacuauuacacugc

SEQ ID NO: 16009 - DNA, 21 bp, homo sapiens
cagccgtagaaggcatcaaca

SEQ ID NO: 16010 - RNA, 21 nt, RNAi
gccguagaaggcaucaacauu

SEQ ID NO: 16011 - RNA, 21 nt, RNAi
uucggcaucuuccguaguugu

SEQ ID NO: 16012 - DNA, 21 bp, homo sapiens
catcaacagaatgaccagagc

SEQ ID NO: 16013 - RNA, 21 nt, RNAi
ucaacagaaugaccagagcuu

SEQ ID NO: 16014 - RNA, 21 nt, RNAi
uuaguugucuuacuggucucg

SEQ ID NO: 16015 - DNA, 21 bp, homo sapiens
caacagaatgaccagagctct

SEQ ID NO: 16016 - RNA, 21 nt, RNAi
acagaaugaccagagcucuuu

SEQ ID NO: 16017 - RNA, 21 nt, RNAi
uuugucuuacuggucucgaga

SEQ ID NO: 16018 - DNA, 21 bp, homo sapiens
cagaatgaccagagctctcat

SEQ ID NO: 16019 - RNA, 21 nt, RNAi
gaaugaccagagcucucauuu

SEQ ID NO: 16020 - RNA, 21 nt, RNAi
uucuuacuggucucgagagua

SEQ ID NO: 16021 - DNA, 21 bp, homo sapiens
cagagctctcatggactcgct

SEQ ID NO: 16022 - RNA, 21 nt, RNAi
gagcucucauggacucgcuuu

SEQ ID NO: 16023 - RNA, 21 nt, RNAi
uucucgagaguaccugagcga

SEQ ID NO: 16024 - DNA, 21 bp, homo sapiens
cagctcagaagaggtggaatt

SEQ ID NO: 16025 - RNA, 21 nt, RNAi
gcucagaagagguggaauuuu

SEQ ID NO: 16026 - RNA, 21 nt, RNAi
uucgagucuucuccaccuuaa

SEQ ID NO: 16027 - DNA, 21 bp, homo sapiens
cagaagaggtggaatttcttg

SEQ ID NO: 16028 - RNA, 21 nt, RNAi
gaagagguggaauuucuuguu

SEQ ID NO: 16029 - RNA, 21 nt, RNAi
uucuucuccaccuuaaagaac

SEQ ID NO: 16030 - DNA, 21 bp, homo sapiens
caaatccaaagaaaccacagc

SEQ ID NO: 16031 - RNA, 21 nt, RNAi
aauccaaagaaaccacagcuu

SEQ ID NO: 16032 - RNA, 21 nt, RNAi
uuuuagguuucuuuggugucg

SEQ ID NO: 16033 - DNA, 21 bp, homo sapiens
caaagaaaccacagctacaaa

SEQ ID NO: 16034 - RNA, 21 nt, RNAi
aagaaaccacagcuacaaauu

SEQ ID NO: 16035 - RNA, 21 nt, RNAi
uuuucuuuggugucgauguuu

SEQ ID NO: 16036 - DNA, 21 bp, homo sapiens
cacagctacaaagaacagagt

SEQ ID NO: 16037 - RNA, 21 nt, RNAi
cagcuacaaagaacagaguuu

SEQ ID NO: 16038 - RNA, 21 nt, RNAi
uugucgauguuucuugucuca

SEQ ID NO: 16039 - DNA, 21 bp, homo sapiens
cagctacaaagaacagagtgc

SEQ ID NO: 16040 - RNA, 21 nt, RNAi
gcuacaaagaacagagugcuu

SEQ ID NO: 16041 - RNA, 21 nt, RNAi
uucgauguuucuugucucacg

SEQ ID NO: 16042 - DNA, 21 bp, homo sapiens
caaagaacagagtgccttctg

SEQ ID NO: 16043 - RNA, 21 nt, RNAi
aagaacagagugccuucuguu

SEQ ID NO: 16044 - RNA, 21 nt, RNAi
uuuucuugucucacggaagac

SEQ ID NO: 16045 - DNA, 21 bp, homo sapiens
cagagttctgaaggaagaagg

SEQ ID NO: 16046 - RNA, 21 nt, RNAi
gaguucugaaggaagaagguu

SEQ ID NO: 16047 - RNA, 21 nt, RNAi
uucucaagacuuccuucuucc

SEQ ID NO: 16048 - DNA, 21 bp, homo sapiens
cataagaaagctattgagaag

SEQ ID NO: 16049 - RNA, 21 nt, RNAi
uaagaaagcuauugagaaguu

SEQ ID NO: 16050 - RNA, 21 nt, RNAi
uuauucuuucgauaacucuuc

SEQ ID NO: 16051 - DNA, 21 bp, homo sapiens
cagtgaaagcctcttgtgtag

SEQ ID NO: 16052 - RNA, 21 nt, RNAi
gugaaagccucuuguguaguu

SEQ ID NO: 16053 - RNA, 21 nt, RNAi
uucacuuucggagaacacauc

SEQ ID NO: 16054 - DNA, 21 bp, homo sapiens
cacgtacagcaacagagcact

SEQ ID NO: 16055 - RNA, 21 nt, RNAi
cguacagcaacagagcacuuu

SEQ ID NO: 16056 - RNA, 21 nt, RNAi
uugcaugucguugucucguga

SEQ ID NO: 16057 - DNA, 21 bp, homo sapiens
cagcaacagagcactctgcta

SEQ ID NO: 16058 - RNA, 21 nt, RNAi
gcaacagagcacucugcuauu

SEQ ID NO: 16059 - RNA, 21 nt, RNAi
uucguugucucgugagacgau

SEQ ID NO: 16060 - DNA, 21 bp, homo sapiens
caacagagcactctgctattt

SEQ ID NO: 16061 - RNA, 21 nt, RNAi
acagagcacucugcuauuuuu

SEQ ID NO: 16062 - RNA, 21 nt, RNAi
uuugucucgugagacgauaaa

SEQ ID NO: 16063 - DNA, 21 bp, homo sapiens
cagagcactctgctatttggt

SEQ ID NO: 16064 - RNA, 21 nt, RNAi
gagcacucugcuauuugguuu

SEQ ID NO: 16065 - RNA, 21 nt, RNAi
uucucgugagacgauaaacca

SEQ ID NO: 16066 - DNA, 21 bp, homo sapiens
cactctgctatttggtcctga

SEQ ID NO: 16067 - RNA, 21 nt, RNAi
cucugcuauuugguccugauu

SEQ ID NO: 16068 - RNA, 21 nt, RNAi
uugagacgauaaaccaggacu

SEQ ID NO: 16069 - DNA, 21 bp, homo sapiens
cagtacacagaagcagtgaag

SEQ ID NO: 16070 - RNA, 21 nt, RNAi
guacacagaagcagugaaguu

SEQ ID NO: 16071 - RNA, 21 nt, RNAi
uucaugugucuucgucacuuc

SEQ ID NO: 16072 - DNA, 21 bp, homo sapiens
cacagaagcagtgaaggactg

SEQ ID NO: 16073 - RNA, 21 nt, RNAi
cagaagcagugaaggacuguu

SEQ ID NO: 16074 - RNA, 21 nt, RNAi
uugucuucgucacuuccugac

SEQ ID NO: 16075 - DNA, 21 bp, homo sapiens
cagaagcagtgaaggactgca

SEQ ID NO: 16076 - RNA, 21 nt, RNAi
gaagcagugaaggacugcauu

SEQ ID NO: 16077 - RNA, 21 nt, RNAi
uucuucgucacuuccugacgu

SEQ ID NO: 16078 - DNA, 21 bp, homo sapiens
cagtgaaggactgcacagaag

SEQ ID NO: 16079 - RNA, 21 nt, RNAi
gugaaggacugcacagaaguu

SEQ ID NO: 16080 - RNA, 21 nt, RNAi
uucacuuccugacgugucuuc

SEQ ID NO: 16081 - DNA, 21 bp, homo sapiens
caagctggatggaaagaacgt

SEQ ID NO: 16082 - RNA, 21 nt, RNAi
agcuggauggaaagaacguuu

SEQ ID NO: 16083 - RNA, 21 nt, RNAi
uuucgaccuaccuuucuugca

SEQ ID NO: 16084 - DNA, 21 bp, homo sapiens
cacaaagcactcaaggactat

SEQ ID NO: 16085 - RNA, 21 nt, RNAi
caaagcacucaaggacuauuu

SEQ ID NO: 16086 - RNA, 21 nt, RNAi
uuguuucgugaguuccugaua

SEQ ID NO: 16087 - DNA, 21 bp, homo sapiens
caaagcactcaaggactataa

SEQ ID NO: 16088 - RNA, 21 nt, RNAi
aagcacucaaggacuauaauu

SEQ ID NO: 16089 - RNA, 21 nt, RNAi
uuuucgugaguuccugauauu

SEQ ID NO: 16090 - DNA, 21 bp, homo sapiens
cactcaaggactataaatcca

SEQ ID NO: 16091 - RNA, 21 nt, RNAi
cucaaggacuauaaauccauu

SEQ ID NO: 16092 - RNA, 21 nt, RNAi
uugaguuccugauauuuaggu

SEQ ID NO: 16093 - DNA, 21 bp, homo sapiens
caaggactataaatccagctt

SEQ ID NO: 16094 - RNA, 21 nt, RNAi
aggacuauaaauccagcuuuu

SEQ ID NO: 16095 - RNA, 21 nt, RNAi
uuuccugauauuuaggucgaa

SEQ ID NO: 16096 - DNA, 21 bp, homo sapiens
cagctttgcagacatcagcaa

SEQ ID NO: 16097 - RNA, 21 nt, RNAi
gcuuugcagacaucagcaauu

SEQ ID NO: 16098 - RNA, 21 nt, RNAi
uucgaaacgucuguagucguu

SEQ ID NO: 16099 - DNA, 21 bp, homo sapiens
cagacatcagcaacctcctac

SEQ ID NO: 16100 - RNA, 21 nt, RNAi
gacaucagcaaccuccuacuu

SEQ ID NO: 16101 - RNA, 21 nt, RNAi
uucuguagucguuggaggaug

SEQ ID NO: 16102 - DNA, 21 bp, homo sapiens
catcagcaacctcctacagat

SEQ ID NO: 16103 - RNA, 21 nt, RNAi
ucagcaaccuccuacagauuu

SEQ ID NO: 16104 - RNA, 21 nt, RNAi
uuagucguuggaggaugucua

SEQ ID NO: 16105 - DNA, 21 bp, homo sapiens
cagcaacctcctacagattga

SEQ ID NO: 16106 - RNA, 21 nt, RNAi
gcaaccuccuacagauugauu

SEQ ID NO: 16107 - RNA, 21 nt, RNAi
uucguuggaggaugucuaacu

SEQ ID NO: 16108 - DNA, 21 bp, homo sapiens
caacctcctacagattgagcc

SEQ ID NO: 16109 - RNA, 21 nt, RNAi
accuccuacagauugagccuu

SEQ ID NO: 16110 - RNA, 21 nt, RNAi
uuuggaggaugucuaacucgg

SEQ ID NO: 16111 - DNA, 21 bp, homo sapiens
cagattgagcctaggaatggt

SEQ ID NO: 16112 - RNA, 21 nt, RNAi
gauugagccuaggaaugguuu

SEQ ID NO: 16113 - RNA, 21 nt, RNAi
uucuaacucggauccuuacca

SEQ ID NO: 16114 - DNA, 21 bp, homo sapiens
cacagaagttgcggcaggaag

SEQ ID NO: 16115 - RNA, 21 nt, RNAi
cagaaguugcggcaggaaguu

SEQ ID NO: 16116 - RNA, 21 nt, RNAi
uugucuucaacgccguccuuc

SEQ ID NO: 16117 - DNA, 21 bp, homo sapiens
cagaagttgcggcaggaagtg

SEQ ID NO: 16118 - RNA, 21 nt, RNAi
gaaguugcggcaggaaguguu

SEQ ID NO: 16119 - RNA, 21 nt, RNAi
uucuucaacgccguccuucac

SEQ ID NO: 16120 - DNA, 21 bp, homo sapiens
caggaagtgaagcagaaccta

SEQ ID NO: 16121 - RNA, 21 nt, RNAi
ggaagugaagcagaaccuauu

SEQ ID NO: 16122 - RNA, 21 nt, RNAi
uuccuucacuucgucuuggau

SEQ ID NO: 16123 - DNA, 21 bp, homo sapiens
caaattaaactcagtgtagtc

SEQ ID NO: 16124 - RNA, 21 nt, RNAi
aauuaaacucaguguagucuu

SEQ ID NO: 16125 - RNA, 21 nt, RNAi
uuuuaauuugagucacaucag

SEQ ID NO: 16126 - DNA, 21 bp, homo sapiens
cagtgtagtcaaacacagaca

SEQ ID NO: 16127 - RNA, 21 nt, RNAi
guguagucaaacacagacauu

SEQ ID NO: 16128 - RNA, 21 nt, RNAi
uucacaucaguuugugucugu

SEQ ID NO: 16129 - DNA, 21 bp, homo sapiens
caaacacagacatggttgttg

SEQ ID NO: 16130 - RNA, 21 nt, RNAi
aacacagacaugguuguuguu

SEQ ID NO: 16131 - RNA, 21 nt, RNAi
uuuugugucuguaccaacaac

SEQ ID NO: 16132 - DNA, 21 bp, homo sapiens
cacagacatggttgttgcacc

SEQ ID NO: 16133 - RNA, 21 nt, RNAi
cagacaugguuguugcaccuu

SEQ ID NO: 16134 - RNA, 21 nt, RNAi
uugucuguaccaacaacgugg

SEQ ID NO: 16135 - DNA, 21 bp, homo sapiens
cagacatggttgttgcaccag

SEQ ID NO: 16136 - RNA, 21 nt, RNAi
gacaugguuguugcaccaguu

SEQ ID NO: 16137 - RNA, 21 nt, RNAi
uucuguaccaacaacgugguc

SEQ ID NO: 16138 - DNA, 21 bp, homo sapiens
catggttgttgcaccagaaag

SEQ ID NO: 16139 - RNA, 21 nt, RNAi
ugguuguugcaccagaaaguu

SEQ ID NO: 16140 - RNA, 21 nt, RNAi
uuaccaacaacguggucuuuc

SEQ ID NO: 16141 - DNA, 21 bp, homo sapiens
cactagagctaagcgtgaagc

SEQ ID NO: 16142 - RNA, 21 nt, RNAi
cuagagcuaagcgugaagcuu

SEQ ID NO: 16143 - RNA, 21 nt, RNAi
uugaucucgauucgcacuucg

SEQ ID NO: 16144 - DNA, 21 bp, homo sapiens
cagctagctgatcacaccaac

SEQ ID NO: 16145 - RNA, 21 nt, RNAi
gcuagcugaucacaccaacuu

SEQ ID NO: 16146 - RNA, 21 nt, RNAi
uucgaucgacuagugugguug

SEQ ID NO: 16147 - DNA, 21 bp, homo sapiens
cacaccaacagatcctcatca

SEQ ID NO: 16148 - RNA, 21 nt, RNAi
caccaacagauccucaucauu

SEQ ID NO: 16149 - RNA, 21 nt, RNAi
uugugguugucuaggaguagu

SEQ ID NO: 16150 - DNA, 21 bp, homo sapiens
caccaacagatcctcatcagc

SEQ ID NO: 16151 - RNA, 21 nt, RNAi
ccaacagauccucaucagcuu

SEQ ID NO: 16152 - RNA, 21 nt, RNAi
uugguugucuaggaguagucg

SEQ ID NO: 16153 - DNA, 21 bp, homo sapiens
caacagatcctcatcagcaaa

SEQ ID NO: 16154 - RNA, 21 nt, RNAi
acagauccucaucagcaaauu

SEQ ID NO: 16155 - RNA, 21 nt, RNAi
uuugucuaggaguagucguuu

SEQ ID NO: 16156 - DNA, 21 bp, homo sapiens
cagatcctcatcagcaaagca

SEQ ID NO: 16157 - RNA, 21 nt, RNAi
gauccucaucagcaaagcauu

SEQ ID NO: 16158 - RNA, 21 nt, RNAi
uucuaggaguagucguuucgu

SEQ ID NO: 16159 - DNA, 21 bp, homo sapiens
catcagcaaagcatttggctt

SEQ ID NO: 16160 - RNA, 21 nt, RNAi
ucagcaaagcauuuggcuuuu

SEQ ID NO: 16161 - RNA, 21 nt, RNAi
uuagucguuucguaaaccgaa

SEQ ID NO: 16162 - DNA, 21 bp, homo sapiens
cagcaaagcatttggctttgt

SEQ ID NO: 16163 - RNA, 21 nt, RNAi
gcaaagcauuuggcuuuguuu

SEQ ID NO: 16164 - RNA, 21 nt, RNAi
uucguuucguaaaccgaaaca

SEQ ID NO: 16165 - DNA, 21 bp, homo sapiens
caaagcatttggctttgtcct

SEQ ID NO: 16166 - RNA, 21 nt, RNAi
aagcauuuggcuuuguccuuu

SEQ ID NO: 16167 - RNA, 21 nt, RNAi
uuuucguaaaccgaaacagga

SEQ ID NO: 16168 - DNA, 21 bp, homo sapiens
caactcactgcagttcatctg

SEQ ID NO: 16169 - RNA, 21 nt, RNAi
acucacugcaguucaucuguu

SEQ ID NO: 16170 - RNA, 21 nt, RNAi
uuugagugacgucaaguagac

SEQ ID NO: 16171 - DNA, 21 bp, homo sapiens
cactgcagttcatctgaacaa

SEQ ID NO: 16172 - RNA, 21 nt, RNAi
cugcaguucaucugaacaauu

SEQ ID NO: 16173 - RNA, 21 nt, RNAi
uugacgucaaguagacuuguu

SEQ ID NO: 16174 - DNA, 21 bp, homo sapiens
cagttcatctgaacaacctga

SEQ ID NO: 16175 - RNA, 21 nt, RNAi
guucaucugaacaaccugauu

SEQ ID NO: 16176 - RNA, 21 nt, RNAi
uucaaguagacuuguuggacu

SEQ ID NO: 16177 - DNA, 21 bp, homo sapiens
catctgaacaacctgagctcc

SEQ ID NO: 16178 - RNA, 21 nt, RNAi
ucugaacaaccugagcuccuu

SEQ ID NO: 16179 - RNA, 21 nt, RNAi
uuagacuuguuggacucgagg

SEQ ID NO: 16180 - DNA, 21 bp, homo sapiens
caaagcagcctgttgagctgg

SEQ ID NO: 16181 - RNA, 21 nt, RNAi
aagcagccuguugagcugguu

SEQ ID NO: 16182 - RNA, 21 nt, RNAi
uuuucgucggacaacucgacc

SEQ ID NO: 16183 - DNA, 21 bp, homo sapiens
cagcctgttgagctggttctc

SEQ ID NO: 16184 - RNA, 21 nt, RNAi
gccuguugagcugguucucuu

SEQ ID NO: 16185 - RNA, 21 nt, RNAi
uucggacaacucgaccaagag

SEQ ID NO: 16186 - DNA, 21 bp, homo sapiens
cagtctctccaggtgtacagc

SEQ ID NO: 16187 - RNA, 21 nt, RNAi
gucucuccagguguacagcuu

SEQ ID NO: 16188 - RNA, 21 nt, RNAi
uucagagagguccacaugucg

SEQ ID NO: 16189 - DNA, 21 bp, homo sapiens
cacagtctcctatgtctgagc

SEQ ID NO: 16190 - RNA, 21 nt, RNAi
cagucuccuaugucugagcuu

SEQ ID NO: 16191 - RNA, 21 nt, RNAi
uugucagaggauacagacucg

SEQ ID NO: 16192 - DNA, 21 bp, homo sapiens
cagagaggcacctaagctgtt

SEQ ID NO: 16193 - RNA, 21 nt, RNAi
gagaggcaccuaagcuguuuu

SEQ ID NO: 16194 - RNA, 21 nt, RNAi
uucucuccguggauucgacaa

SEQ ID NO: 16195 - DNA, 21 bp, homo sapiens
cacctaagctgtttaaagagc

SEQ ID NO: 16196 - RNA, 21 nt, RNAi
ccuaagcuguuuaaagagcuu

SEQ ID NO: 16197 - RNA, 21 nt, RNAi
uuggauucgacaaauuucucg

SEQ ID NO: 16198 - DNA, 21 bp, homo sapiens
cagtgattgtggctgctcctc

SEQ ID NO: 16199 - RNA, 21 nt, RNAi
gugauuguggcugcuccucuu

SEQ ID NO: 16200 - RNA, 21 nt, RNAi
uucacuaacaccgacgaggag

SEQ ID NO: 16201 - DNA, 21 bp, homo sapiens
caagaggcctccttggtcagt

SEQ ID NO: 16202 - RNA, 21 nt, RNAi
agaggccuccuuggucaguuu

SEQ ID NO: 16203 - RNA, 21 nt, RNAi
uuucuccggaggaaccaguca

SEQ ID NO: 16204 - DNA, 21 bp, homo sapiens
gagagtttccgcaacggccag

SEQ ID NO: 16205 - RNA, 21 nt, RNAi
gaguuuccgcaacggccaguu

SEQ ID NO: 16206 - RNA, 21 nt, RNAi
uucucaaaggcguugccgguc

SEQ ID NO: 16207 - DNA, 21 bp, homo sapiens
gagtttccgcaacggccagta

SEQ ID NO: 16208 - RNA, 21 nt, RNAi
guuuccgcaacggccaguauu

SEQ ID NO: 16209 - RNA, 21 nt, RNAi
uucaaaggcguugccggucau

SEQ ID NO: 16210 - DNA, 21 bp, homo sapiens
gaagaagaaagtgttctctac

SEQ ID NO: 16211 - RNA, 21 nt, RNAi
agaagaaaguguucucuacuu

SEQ ID NO: 16212 - RNA, 21 nt, RNAi
uuucuucuuucacaagagaug

SEQ ID NO: 16213 - DNA, 21 bp, homo sapiens
gaagaaagtgttctctactcc

SEQ ID NO: 16214 - RNA, 21 nt, RNAi
agaaaguguucucuacuccuu

SEQ ID NO: 16215 - RNA, 21 nt, RNAi
uuucuuucacaagagaugagg

SEQ ID NO: 16216 - DNA, 21 bp, homo sapiens
gaaagtgttctctactccaac

SEQ ID NO: 16217 - RNA, 21 nt, RNAi
aaguguucucuacuccaacuu

SEQ ID NO: 16218 - RNA, 21 nt, RNAi
uuuucacaagagaugagguug

SEQ ID NO: 16219 - DNA, 21 bp, homo sapiens
gagcagcatgtcactggaaga

SEQ ID NO: 16220 - RNA, 21 nt, RNAi
gcagcaugucacuggaagauu

SEQ ID NO: 16221 - RNA, 21 nt, RNAi
uucgucguacagugaccuucu

SEQ ID NO: 16222 - DNA, 21 bp, homo sapiens
gaagaatggaaactgcagaga

SEQ ID NO: 16223 - RNA, 21 nt, RNAi
agaauggaaacugcagagauu

SEQ ID NO: 16224 - RNA, 21 nt, RNAi
uuucuuaccuuugacgucucu

SEQ ID NO: 16225 - DNA, 21 bp, homo sapiens
gaatggaaactgcagagactg

SEQ ID NO: 16226 - RNA, 21 nt, RNAi
auggaaacugcagagacuguu

SEQ ID NO: 16227 - RNA, 21 nt, RNAi
uuuaccuuugacgucucugac

SEQ ID NO: 16228 - DNA, 21 bp, homo sapiens
gaaactgcagagactgcatca

SEQ ID NO: 16229 - RNA, 21 nt, RNAi
aacugcagagacugcaucauu

SEQ ID NO: 16230 - RNA, 21 nt, RNAi
uuuugacgucucugacguagu

SEQ ID NO: 16231 - DNA, 21 bp, homo sapiens
gagactgcatcaaagattgca

SEQ ID NO: 16232 - RNA, 21 nt, RNAi
gacugcaucaaagauugcauu

SEQ ID NO: 16233 - RNA, 21 nt, RNAi
uucugacguaguuucuaacgu

SEQ ID NO: 16234 - DNA, 21 bp, homo sapiens
gactgcatcaaagattgcact

SEQ ID NO: 16235 - RNA, 21 nt, RNAi
cugcaucaaagauugcacuuu

SEQ ID NO: 16236 - RNA, 21 nt, RNAi
uugacguaguuucuaacguga

SEQ ID NO: 16237 - DNA, 21 bp, homo sapiens
gattgcacttcagcactggcc

SEQ ID NO: 16238 - RNA, 21 nt, RNAi
uugcacuucagcacuggccuu

SEQ ID NO: 16239 - RNA, 21 nt, RNAi
uuaacgugaagucgugaccgg

SEQ ID NO: 16240 - DNA, 21 bp, homo sapiens
gagcatctgcttatgaggctc

SEQ ID NO: 16241 - RNA, 21 nt, RNAi
gcaucugcuuaugaggcucuu

SEQ ID NO: 16242 - RNA, 21 nt, RNAi
uucguagacgaauacuccgag

SEQ ID NO: 16243 - DNA, 21 bp, homo sapiens
gactataagactgtgctgcag

SEQ ID NO: 16244 - RNA, 21 nt, RNAi
cuauaagacugugcugcaguu

SEQ ID NO: 16245 - RNA, 21 nt, RNAi
uugauauucugacacgacguc

SEQ ID NO: 16246 - DNA, 21 bp, homo sapiens
gactgtgctgcagattgatga

SEQ ID NO: 16247 - RNA, 21 nt, RNAi
cugugcugcagauugaugauu

SEQ ID NO: 16248 - RNA, 21 nt, RNAi
uugacacgacgucuaacuacu

SEQ ID NO: 16249 - DNA, 21 bp, homo sapiens
gattgatgataatgtgacgtc

SEQ ID NO: 16250 - RNA, 21 nt, RNAi
uugaugauaaugugacgucuu

SEQ ID NO: 16251 - RNA, 21 nt, RNAi
uuaacuacuauuacacugcag

SEQ ID NO: 16252 - DNA, 21 bp, homo sapiens
gatgataatgtgacgtcagcc

SEQ ID NO: 16253 - RNA, 21 nt, RNAi
ugauaaugugacgucagccuu

SEQ ID NO: 16254 - RNA, 21 nt, RNAi
uuacuauuacacugcagucgg

SEQ ID NO: 16255 - DNA, 21 bp, homo sapiens
gataatgtgacgtcagccgta

SEQ ID NO: 16256 - RNA, 21 nt, RNAi
uaaugugacgucagccguauu

SEQ ID NO: 16257 - RNA, 21 nt, RNAi
uuauuacacugcagucggcau

SEQ ID NO: 16258 - DNA, 21 bp, homo sapiens
gacgtcagccgtagaaggcat

SEQ ID NO: 16259 - RNA, 21 nt, RNAi
cgucagccguagaaggcauuu

SEQ ID NO: 16260 - RNA, 21 nt, RNAi
uugcagucggcaucuuccgua

SEQ ID NO: 16261 - DNA, 21 bp, homo sapiens
gaaggcatcaacagaatgacc

SEQ ID NO: 16262 - RNA, 21 nt, RNAi
aggcaucaacagaaugaccuu

SEQ ID NO: 16263 - RNA, 21 nt, RNAi
uuuccguaguugucuuacugg

SEQ ID NO: 16264 - DNA, 21 bp, homo sapiens
gaatgaccagagctctcatgg

SEQ ID NO: 16265 - RNA, 21 nt, RNAi
augaccagagcucucaugguu

SEQ ID NO: 16266 - RNA, 21 nt, RNAi
uuuacuggucucgagaguacc

SEQ ID NO: 16267 - DNA, 21 bp, homo sapiens
gaccagagctctcatggactc

SEQ ID NO: 16268 - RNA, 21 nt, RNAi
ccagagcucucauggacucuu

SEQ ID NO: 16269 - RNA, 21 nt, RNAi
uuggucucgagaguaccugag

SEQ ID NO: 16270 - DNA, 21 bp, homo sapiens
gagctctcatggactcgcttg

SEQ ID NO: 16271 - RNA, 21 nt, RNAi
gcucucauggacucgcuuguu

SEQ ID NO: 16272 - RNA, 21 nt, RNAi
uucgagaguaccugagcgaac

SEQ ID NO: 16273 - DNA, 21 bp, homo sapiens
gaagaggtggaatttcttgcc

SEQ ID NO: 16274 - RNA, 21 nt, RNAi
agagguggaauuucuugccuu

SEQ ID NO: 16275 - RNA, 21 nt, RNAi
uuucuccaccuuaaagaacgg

SEQ ID NO: 16276 - DNA, 21 bp, homo sapiens
gaggtggaatttcttgccttc

SEQ ID NO: 16277 - RNA, 21 nt, RNAi
gguggaauuucuugccuucuu

SEQ ID NO: 16278 - RNA, 21 nt, RNAi
uuccaccuuaaagaacggaag

SEQ ID NO: 16279 - DNA, 21 bp, homo sapiens
gaatttcttgccttcggagaa

SEQ ID NO: 16280 - RNA, 21 nt, RNAi
auuucuugccuucggagaauu

SEQ ID NO: 16281 - RNA, 21 nt, RNAi
uuuaaagaacggaagccucuu

SEQ ID NO: 16282 - DNA, 21 bp, homo sapiens
gagaaccacaaagagatggct

SEQ ID NO: 16283 - RNA, 21 nt, RNAi
gaaccacaaagagauggcuuu

SEQ ID NO: 16284 - RNA, 21 nt, RNAi
uucuugguguuucucuaccga

SEQ ID NO: 16285 - DNA, 21 bp, homo sapiens
gaaccacaaagagatggctaa

SEQ ID NO: 16286 - RNA, 21 nt, RNAi
accacaaagagauggcuaauu

SEQ ID NO: 16287 - RNA, 21 nt, RNAi
uuugguguuucucuaccgauu

SEQ ID NO: 16288 - DNA, 21 bp, homo sapiens
gaaaccacagctacaaagaac

SEQ ID NO: 16289 - RNA, 21 nt, RNAi
aaccacagcuacaaagaacuu

SEQ ID NO: 16290 - RNA, 21 nt, RNAi
uuuuggugucgauguuucuug

SEQ ID NO: 16291 - DNA, 21 bp, homo sapiens
gaacagagtgccttctgctgg

SEQ ID NO: 16292 - RNA, 21 nt, RNAi
acagagugccuucugcugguu

SEQ ID NO: 16293 - RNA, 21 nt, RNAi
uuugucucacggaagacgacc

SEQ ID NO: 16294 - DNA, 21 bp, homo sapiens
gatgtggagaaagccagagtt

SEQ ID NO: 16295 - RNA, 21 nt, RNAi
uguggagaaagccagaguuuu

SEQ ID NO: 16296 - RNA, 21 nt, RNAi
uuacaccucuuucggucucaa

SEQ ID NO: 16297 - DNA, 21 bp, homo sapiens
gagaaagccagagttctgaag

SEQ ID NO: 16298 - RNA, 21 nt, RNAi
gaaagccagaguucugaaguu

SEQ ID NO: 16299 - RNA, 21 nt, RNAi
uucuuucggucucaagacuuc

SEQ ID NO: 16300 - DNA, 21 bp, homo sapiens
gaaagccagagttctgaagga

SEQ ID NO: 16301 - RNA, 21 nt, RNAi
aagccagaguucugaaggauu

SEQ ID NO: 16302 - RNA, 21 nt, RNAi
uuuucggucucaagacuuccu

SEQ ID NO: 16303 - DNA, 21 bp, homo sapiens
gagttctgaaggaagaaggca

SEQ ID NO: 16304 - RNA, 21 nt, RNAi
guucugaaggaagaaggcauu

SEQ ID NO: 16305 - RNA, 21 nt, RNAi
uucaagacuuccuucuuccgu

SEQ ID NO: 16306 - DNA, 21 bp, homo sapiens
gaaggaagaaggcaatgagct

SEQ ID NO: 16307 - RNA, 21 nt, RNAi
aggaagaaggcaaugagcuuu

SEQ ID NO: 16308 - RNA, 21 nt, RNAi
uuuccuucuuccguuacucga

SEQ ID NO: 16309 - DNA, 21 bp, homo sapiens
gaagaaggcaatgagcttgta

SEQ ID NO: 16310 - RNA, 21 nt, RNAi
agaaggcaaugagcuuguauu

SEQ ID NO: 16311 - RNA, 21 nt, RNAi
uuucuuccguuacucgaacau

SEQ ID NO: 16312 - DNA, 21 bp, homo sapiens
gaaggcaatgagcttgtaaag

SEQ ID NO: 16313 - RNA, 21 nt, RNAi
aggcaaugagcuuguaaaguu

SEQ ID NO: 16314 - RNA, 21 nt, RNAi
uuuccguuacucgaacauuuc

SEQ ID NO: 16315 - DNA, 21 bp, homo sapiens
gaaaccataagaaagctattg

SEQ ID NO: 16316 - RNA, 21 nt, RNAi
aaccauaagaaagcuauuguu

SEQ ID NO: 16317 - RNA, 21 nt, RNAi
uuuugguauucuuucgauaac

SEQ ID NO: 16318 - DNA, 21 bp, homo sapiens
gaaagctattgagaagtacag

SEQ ID NO: 16319 - RNA, 21 nt, RNAi
aagcuauugagaaguacaguu

SEQ ID NO: 16320 - RNA, 21 nt, RNAi
uuuucgauaacucuucauguc

SEQ ID NO: 16321 - DNA, 21 bp, homo sapiens
gagaagtacagtgaaagcctc

SEQ ID NO: 16322 - RNA, 21 nt, RNAi
gaaguacagugaaagccucuu

SEQ ID NO: 16323 - RNA, 21 nt, RNAi
uucuucaugucacuuucggag

SEQ ID NO: 16324 - DNA, 21 bp, homo sapiens
gaagtacagtgaaagcctctt

SEQ ID NO: 16325 - RNA, 21 nt, RNAi
aguacagugaaagccucuuuu

SEQ ID NO: 16326 - RNA, 21 nt, RNAi
uuucaugucacuuucggagaa

SEQ ID NO: 16327 - DNA, 21 bp, homo sapiens
gaaagcctcttgtgtagtaac

SEQ ID NO: 16328 - RNA, 21 nt, RNAi
aagccucuuguguaguaacuu

SEQ ID NO: 16329 - RNA, 21 nt, RNAi
uuuucggagaacacaucauug

SEQ ID NO: 16330 - DNA, 21 bp, homo sapiens
gaatctgccacgtacagcaac

SEQ ID NO: 16331 - RNA, 21 nt, RNAi
aucugccacguacagcaacuu

SEQ ID NO: 16332 - RNA, 21 nt, RNAi
uuuagacggugcaugucguug

SEQ ID NO: 16333 - DNA, 21 bp, homo sapiens
gagcactctgctatttggtcc

SEQ ID NO: 16334 - RNA, 21 nt, RNAi
gcacucugcuauuugguccuu

SEQ ID NO: 16335 - RNA, 21 nt, RNAi
uucgugagacgauaaaccagg

SEQ ID NO: 16336 - DNA, 21 bp, homo sapiens
gaagcagtacacagaagcagt

SEQ ID NO: 16337 - RNA, 21 nt, RNAi
agcaguacacagaagcaguuu

SEQ ID NO: 16338 - RNA, 21 nt, RNAi
uuucgucaugugucuucguca

SEQ ID NO: 16339 - DNA, 21 bp, homo sapiens
gaagcagtgaaggactgcaca

SEQ ID NO: 16340 - RNA, 21 nt, RNAi
agcagugaaggacugcacauu

SEQ ID NO: 16341 - RNA, 21 nt, RNAi
uuucgucacuuccugacgugu

SEQ ID NO: 16342 - DNA, 21 bp, homo sapiens
gatggaaagaacgtgaaggca

SEQ ID NO: 16343 - RNA, 21 nt, RNAi
uggaaagaacgugaaggcauu

SEQ ID NO: 16344 - RNA, 21 nt, RNAi
uuaccuuucuugcacuuccgu

SEQ ID NO: 16345 - DNA, 21 bp, homo sapiens
gaaagaacgtgaaggcattct

SEQ ID NO: 16346 - RNA, 21 nt, RNAi
aagaacgugaaggcauucuuu

SEQ ID NO: 16347 - RNA, 21 nt, RNAi
uuuucuugcacuuccguaaga

SEQ ID NO: 16348 - DNA, 21 bp, homo sapiens
gaacgtgaaggcattctacag

SEQ ID NO: 16349 - RNA, 21 nt, RNAi
acgugaaggcauucuacaguu

SEQ ID NO: 16350 - RNA, 21 nt, RNAi
uuugcacuuccguaagauguc

SEQ ID NO: 16351 - DNA, 21 bp, homo sapiens
gactataaatccagctttgca

SEQ ID NO: 16352 - RNA, 21 nt, RNAi
cuauaaauccagcuuugcauu

SEQ ID NO: 16353 - RNA, 21 nt, RNAi
uugauauuuaggucgaaacgu

SEQ ID NO: 16354 - DNA, 21 bp, homo sapiens
gacatcagcaacctcctacag

SEQ ID NO: 16355 - RNA, 21 nt, RNAi
caucagcaaccuccuacaguu

SEQ ID NO: 16356 - RNA, 21 nt, RNAi
uuguagucguuggaggauguc

SEQ ID NO: 16357 - DNA, 21 bp, homo sapiens
gattgagcctaggaatggtcc

SEQ ID NO: 16358 - RNA, 21 nt, RNAi
uugagccuaggaaugguccuu

SEQ ID NO: 16359 - RNA, 21 nt, RNAi
uuaacucggauccuuaccagg

SEQ ID NO: 16360 - DNA, 21 bp, homo sapiens
gagcctaggaatggtcctgca

SEQ ID NO: 16361 - RNA, 21 nt, RNAi
gccuaggaaugguccugcauu

SEQ ID NO: 16362 - RNA, 21 nt, RNAi
uucggauccuuaccaggacgu

SEQ ID NO: 16363 - DNA, 21 bp, homo sapiens
gaatggtcctgcacagaagtt

SEQ ID NO: 16364 - RNA, 21 nt, RNAi
augguccugcacagaaguuuu

SEQ ID NO: 16365 - RNA, 21 nt, RNAi
uuuaccaggacgugucuucaa

SEQ ID NO: 16366 - DNA, 21 bp, homo sapiens
gaagttgcggcaggaagtgaa

SEQ ID NO: 16367 - RNA, 21 nt, RNAi
aguugcggcaggaagugaauu

SEQ ID NO: 16368 - RNA, 21 nt, RNAi
uuucaacgccguccuucacuu

SEQ ID NO: 16369 - DNA, 21 bp, homo sapiens
gaagtgaagcagaacctacac

SEQ ID NO: 16370 - RNA, 21 nt, RNAi
agugaagcagaaccuacacuu

SEQ ID NO: 16371 - RNA, 21 nt, RNAi
uuucacuucgucuuggaugug

SEQ ID NO: 16372 - DNA, 21 bp, homo sapiens
gaggctttgcttgttcaaatt

SEQ ID NO: 16373 - RNA, 21 nt, RNAi
ggcuuugcuuguucaaauuuu

SEQ ID NO: 16374 - RNA, 21 nt, RNAi
uuccgaaacgaacaaguuuaa

SEQ ID NO: 16375 - DNA, 21 bp, homo sapiens
gacatggttgttgcaccagaa

SEQ ID NO: 16376 - RNA, 21 nt, RNAi
caugguuguugcaccagaauu

SEQ ID NO: 16377 - RNA, 21 nt, RNAi
uuguaccaacaacguggucuu

SEQ ID NO: 16378 - DNA, 21 bp, homo sapiens
gagctaagcgtgaagctgaag

SEQ ID NO: 16379 - RNA, 21 nt, RNAi
gcuaagcgugaagcugaaguu

SEQ ID NO: 16380 - RNA, 21 nt, RNAi
uucgauucgcacuucgacuuc

SEQ ID NO: 16381 - DNA, 21 bp, homo sapiens
gatcacaccaacagatcctca

SEQ ID NO: 16382 - RNA, 21 nt, RNAi
ucacaccaacagauccucauu

SEQ ID NO: 16383 - RNA, 21 nt, RNAi
uuagugugguugucuaggagu

SEQ ID NO: 16384 - DNA, 21 bp, homo sapiens
gatcctcatcagcaaagcatt

SEQ ID NO: 16385 - RNA, 21 nt, RNAi
uccucaucagcaaagcauuuu

SEQ ID NO: 16386 - RNA, 21 nt, RNAi
uuaggaguagucguuucguaa

SEQ ID NO: 16387 - DNA, 21 bp, homo sapiens
gatccaaagcagcctgttgag

SEQ ID NO: 16388 - RNA, 21 nt, RNAi
uccaaagcagccuguugaguu

SEQ ID NO: 16389 - RNA, 21 nt, RNAi
uuagguuucgucggacaacuc

SEQ ID NO: 16390 - DNA, 21 bp, homo sapiens
gaatggttgtccttgactctg

SEQ ID NO: 16391 - RNA, 21 nt, RNAi
augguuguccuugacucuguu

SEQ ID NO: 16392 - RNA, 21 nt, RNAi
uuuaccaacaggaacugagac

SEQ ID NO: 16393 - DNA, 21 bp, homo sapiens
gactctgtgctgctgccttct

SEQ ID NO: 16394 - RNA, 21 nt, RNAi
cucugugcugcugccuucuuu

SEQ ID NO: 16395 - RNA, 21 nt, RNAi
uugagacacgacgacggaaga

SEQ ID NO: 16396 - DNA, 21 bp, homo sapiens
gagaggcacctaagctgttta

SEQ ID NO: 16397 - RNA, 21 nt, RNAi
gaggcaccuaagcuguuuauu

SEQ ID NO: 16398 - RNA, 21 nt, RNAi
uucuccguggauucgacaaau

SEQ ID NO: 16399 - DNA, 21 bp, homo sapiens
gaggcacctaagctgtttaaa

SEQ ID NO: 16400 - RNA, 21 nt, RNAi
ggcaccuaagcuguuuaaauu

SEQ ID NO: 16401 - RNA, 21 nt, RNAi
uuccguggauucgacaaauuu

SEQ ID NO: 16402 - DNA, 21 bp, homo sapiens
gattgtggctgctcctcctag

SEQ ID NO: 16403 - RNA, 21 nt, RNAi
uuguggcugcuccuccuaguu

SEQ ID NO: 16404 - RNA, 21 nt, RNAi
uuaacaccgacgaggaggauc

SEQ ID NO: 16405 - DNA, 21 bp, homo sapiens
gaggcctccttggtcagtgtc

SEQ ID NO: 16406 - RNA, 21 nt, RNAi
ggccuccuuggucagugucuu

SEQ ID NO: 16407 - RNA, 21 nt, RNAi
uuccggaggaaccagucacag

SEQ ID NO: 16408 - DNA, 21 bp, homo sapiens
gaactgtgtgtttaagctgtt

SEQ ID NO: 16409 - RNA, 21 nt, RNAi
acuguguguuuaagcuguuuu

SEQ ID NO: 16410 - RNA, 21 nt, RNAi
uuugacacacaaauucgacaa

SEQ ID NO: 16411 - DNA, 21 bp, homo sapiens
tactccaaccgagcagcatgt

SEQ ID NO: 16412 - RNA, 21 nt, RNAi
cuccaaccgagcagcauguuu

SEQ ID NO: 16413 - RNA, 21 nt, RNAi
uugagguuggcucgucguaca

SEQ ID NO: 16414 - DNA, 21 bp, homo sapiens
tatgaggctctggagaagtac

SEQ ID NO: 16415 - RNA, 21 nt, RNAi
ugaggcucuggagaaguacuu

SEQ ID NO: 16416 - RNA, 21 nt, RNAi
uuacuccgagaccucuucaug

SEQ ID NO: 16417 - DNA, 21 bp, homo sapiens
tatggcctatgttgactataa

SEQ ID NO: 16418 - RNA, 21 nt, RNAi
uggccuauguugacuauaauu

SEQ ID NO: 16419 - RNA, 21 nt, RNAi
uuaccggauacaacugauauu

SEQ ID NO: 16420 - DNA, 21 bp, homo sapiens
tatgttgactataagactgtg

SEQ ID NO: 16421 - RNA, 21 nt, RNAi
uguugacuauaagacuguguu

SEQ ID NO: 16422 - RNA, 21 nt, RNAi
uuacaacugauauucugacac

SEQ ID NO: 16423 - DNA, 21 bp, homo sapiens
tataagactgtgctgcagatt

SEQ ID NO: 16424 - RNA, 21 nt, RNAi
uaagacugugcugcagauuuu

SEQ ID NO: 16425 - RNA, 21 nt, RNAi
uuauucugacacgacgucuaa

SEQ ID NO: 16426 - DNA, 21 bp, homo sapiens
taagactgtgctgcagattga

SEQ ID NO: 16427 - RNA, 21 nt, RNAi
agacugugcugcagauugauu

SEQ ID NO: 16428 - RNA, 21 nt, RNAi
uuucugacacgacgucuaacu

SEQ ID NO: 16429 - DNA, 21 bp, homo sapiens
taatgtgacgtcagccgtaga

SEQ ID NO: 16430 - RNA, 21 nt, RNAi
augugacgucagccguagauu

SEQ ID NO: 16431 - RNA, 21 nt, RNAi
uuuacacugcagucggcaucu

SEQ ID NO: 16432 - DNA, 21 bp, homo sapiens
tagaaggcatcaacagaatga

SEQ ID NO: 16433 - RNA, 21 nt, RNAi
gaaggcaucaacagaaugauu

SEQ ID NO: 16434 - RNA, 21 nt, RNAi
uucuuccguaguugucuuacu

SEQ ID NO: 16435 - DNA, 21 bp, homo sapiens
tacaaagaacagagtgccttc

SEQ ID NO: 16436 - RNA, 21 nt, RNAi
caaagaacagagugccuucuu

SEQ ID NO: 16437 - RNA, 21 nt, RNAi
uuguuucuugucucacggaag

SEQ ID NO: 16438 - DNA, 21 bp, homo sapiens
tattgagaagtacagtgaaag

SEQ ID NO: 16439 - RNA, 21 nt, RNAi
uugagaaguacagugaaaguu

SEQ ID NO: 16440 - RNA, 21 nt, RNAi
uuaacucuucaugucacuuuc

SEQ ID NO: 16441 - DNA, 21 bp, homo sapiens
tacagtgaaagcctcttgtgt

SEQ ID NO: 16442 - RNA, 21 nt, RNAi
cagugaaagccucuuguguuu

SEQ ID NO: 16443 - RNA, 21 nt, RNAi
uugucacuuucggagaacaca

SEQ ID NO: 16444 - DNA, 21 bp, homo sapiens
tagtaacctggaatctgccac

SEQ ID NO: 16445 - RNA, 21 nt, RNAi
guaaccuggaaucugccacuu

SEQ ID NO: 16446 - RNA, 21 nt, RNAi
uucauuggaccuuagacggug

SEQ ID NO: 16447 - DNA, 21 bp, homo sapiens
taacctggaatctgccacgta

SEQ ID NO: 16448 - RNA, 21 nt, RNAi
accuggaaucugccacguauu

SEQ ID NO: 16449 - RNA, 21 nt, RNAi
uuuggaccuuagacggugcau

SEQ ID NO: 16450 - DNA, 21 bp, homo sapiens
tacagcaacagagcactctgc

SEQ ID NO: 16451 - RNA, 21 nt, RNAi
cagcaacagagcacucugcuu

SEQ ID NO: 16452 - RNA, 21 nt, RNAi
uugucguugucucgugagacg

SEQ ID NO: 16453 - DNA, 21 bp, homo sapiens
tatttggtcctgaagcagtac

SEQ ID NO: 16454 - RNA, 21 nt, RNAi
uuugguccugaagcaguacuu

SEQ ID NO: 16455 - RNA, 21 nt, RNAi
uuaaaccaggacuucgucaug

SEQ ID NO: 16456 - DNA, 21 bp, homo sapiens
tacacagaagcagtgaaggac

SEQ ID NO: 16457 - RNA, 21 nt, RNAi
cacagaagcagugaaggacuu

SEQ ID NO: 16458 - RNA, 21 nt, RNAi
uugugucuucgucacuuccug

SEQ ID NO: 16459 - DNA, 21 bp, homo sapiens
tataaatccagctttgcagac

SEQ ID NO: 16460 - RNA, 21 nt, RNAi
uaaauccagcuuugcagacuu

SEQ ID NO: 16461 - RNA, 21 nt, RNAi
uuauuuaggucgaaacgucug

SEQ ID NO: 16462 - DNA, 21 bp, homo sapiens
taaatccagctttgcagacat

SEQ ID NO: 16463 - RNA, 21 nt, RNAi
aauccagcuuugcagacauuu

SEQ ID NO: 16464 - RNA, 21 nt, RNAi
uuuuaggucgaaacgucugua

SEQ ID NO: 16465 - DNA, 21 bp, homo sapiens
tacagattgagcctaggaatg

SEQ ID NO: 16466 - RNA, 21 nt, RNAi
cagauugagccuaggaauguu

SEQ ID NO: 16467 - RNA, 21 nt, RNAi
uugucuaacucggauccuuac

SEQ ID NO: 16468 - DNA, 21 bp, homo sapiens
taggaatggtcctgcacagaa

SEQ ID NO: 16469 - RNA, 21 nt, RNAi
ggaaugguccugcacagaauu

SEQ ID NO: 16470 - RNA, 21 nt, RNAi
uuccuuaccaggacgugucuu

SEQ ID NO: 16471 - DNA, 21 bp, homo sapiens
taagaggctttgcttgttcaa

SEQ ID NO: 16472 - RNA, 21 nt, RNAi
agaggcuuugcuuguucaauu

SEQ ID NO: 16473 - RNA, 21 nt, RNAi
uuucuccgaaacgaacaaguu

SEQ ID NO: 16474 - DNA, 21 bp, homo sapiens
taaactcagtgtagtcaaaca

SEQ ID NO: 16475 - RNA, 21 nt, RNAi
aacucaguguagucaaacauu

SEQ ID NO: 16476 - RNA, 21 nt, RNAi
uuuugagucacaucaguuugu

SEQ ID NO: 16477 - DNA, 21 bp, homo sapiens
tagtcaaacacagacatggtt

SEQ ID NO: 16478 - RNA, 21 nt, RNAi
gucaaacacagacaugguuuu

SEQ ID NO: 16479 - RNA, 21 nt, RNAi
uucaguuugugucuguaccaa

SEQ ID NO: 16480 - DNA, 21 bp, homo sapiens
tagagctaagcgtgaagctga

SEQ ID NO: 16481 - RNA, 21 nt, RNAi
gagcuaagcgugaagcugauu

SEQ ID NO: 16482 - RNA, 21 nt, RNAi
uucucgauucgcacuucgacu

SEQ ID NO: 16483 - DNA, 21 bp, homo sapiens
taagcgtgaagctgaagctct

SEQ ID NO: 16484 - RNA, 21 nt, RNAi
agcgugaagcugaagcucuuu

SEQ ID NO: 16485 - RNA, 21 nt, RNAi
uuucgcacuucgacuucgaga

SEQ ID NO: 16486 - DNA, 21 bp, homo sapiens
tagctgatcacaccaacagat

SEQ ID NO: 16487 - RNA, 21 nt, RNAi
gcugaucacaccaacagauuu

SEQ ID NO: 16488 - RNA, 21 nt, RNAi
uucgacuagugugguugucua

SEQ ID NO: 16489 - DNA, 21 bp, homo sapiens
aaagcctcttgtgtagtaacc

SEQ ID NO: 16490 - RNA, 21 nt, RNAi
agccucuuguguaguaaccuu

SEQ ID NO: 16491 - RNA, 21 nt, RNAi
uuucggagaacacaucauugg

SEQ ID NO: 16492 - DNA, 21 bp, homo sapiens
aagcctcttgtgtagtaacct

SEQ ID NO: 16493 - RNA, 21 nt, RNAi
gccucuuguguaguaaccuuu

SEQ ID NO: 16494 - RNA, 21 nt, RNAi
uucggagaacacaucauugga

SEQ ID NO: 16495 - DNA, 21 bp, homo sapiens
aatctgccacgtacagcaaca

SEQ ID NO: 16496 - RNA, 21 nt, RNAi
ucugccacguacagcaacauu

SEQ ID NO: 16497 - RNA, 21 nt, RNAi
uuagacggugcaugucguugu

SEQ ID NO: 16498 - DNA, 21 bp, homo sapiens
aaagcactcaaggactataaa

SEQ ID NO: 16499 - RNA, 21 nt, RNAi
agcacucaaggacuauaaauu

SEQ ID NO: 16500 - RNA, 21 nt, RNAi
uuucgugaguuccugauauuu

SEQ ID NO: 16501 - DNA, 21 bp, homo sapiens
aagcactcaaggactataaat

SEQ ID NO: 16502 - RNA, 21 nt, RNAi
gcacucaaggacuauaaauuu

SEQ ID NO: 16503 - RNA, 21 nt, RNAi
uucgugaguuccugauauuua

SEQ ID NO: 16504 - DNA, 21 bp, homo sapiens
aaggactataaatccagcttt

SEQ ID NO: 16505 - RNA, 21 nt, RNAi
ggacuauaaauccagcuuuuu

SEQ ID NO: 16506 - RNA, 21 nt, RNAi
uuccugauauuuaggucgaaa

SEQ ID NO: 16507 - DNA, 21 bp, homo sapiens
cactctgctatttggtcctga

SEQ ID NO: 16508 - RNA, 21 nt, RNAi
cucugcuauuugguccugauu

SEQ ID NO: 16509 - RNA, 21 nt, RNAi
uugagacgauaaaccaggacu

SEQ ID NO: 16510 - DNA, 21 bp, homo sapiens
cacaaagcactcaaggactat

SEQ ID NO: 16511 - RNA, 21 nt, RNAi
caaagcacucaaggacuauuu

SEQ ID NO: 16512 - RNA, 21 nt, RNAi
uuguuucgugaguuccugaua

SEQ ID NO: 16513 - DNA, 21 bp, homo sapiens
caaagcactcaaggactataa

SEQ ID NO: 16514 - RNA, 21 nt, RNAi
aagcacucaaggacuauaauu

SEQ ID NO: 16515 - RNA, 21 nt, RNAi
uuuucgugaguuccugauauu

SEQ ID NO: 16516 - DNA, 21 bp, homo sapiens
caaggactataaatccagctt

SEQ ID NO: 16517 - RNA, 21 nt, RNAi
aggacuauaaauccagcuuuu

SEQ ID NO: 16518 - RNA, 21 nt, RNAi
uuuccugauauuuaggucgaa

SEQ ID NO: 16519 - DNA, 21 bp, homo sapiens
gaggtggaatttcttgccttc

SEQ ID NO: 16520 - RNA, 21 nt, RNAi
gguggaauuucuugccuucuu

SEQ ID NO: 16521 - RNA, 21 nt, RNAi
uuccaccuuaaagaacggaag

SEQ ID NO: 16522 - DNA, 21 bp, homo sapiens
gaatctgccacgtacagcaac

SEQ ID NO: 16523 - RNA, 21 nt, RNAi
aucugccacguacagcaacuu

SEQ ID NO: 16524 - RNA, 21 nt, RNAi
uuuagacggugcaugucguug

SEQ ID NO: 16525 - DNA, 21 bp, homo sapiens
gagcactctgctatttggtcc

SEQ ID NO: 16526 - RNA, 21 nt, RNAi
gcacucugcuauuugguccuu

SEQ ID NO: 16527 - RNA, 21 nt, RNAi
uucgugagacgauaaaccagg

SEQ ID NO: 16528 - DNA, 21 bp, homo sapiens
gatggaaagaacgtgaaggca

SEQ ID NO: 16529 - RNA, 21 nt, RNAi
uggaaagaacgugaaggcauu

SEQ ID NO: 16530 - RNA, 21 nt, RNAi
uuaccuuucuugcacuuccgu

SEQ ID NO: 16531 - DNA, 21 bp, homo sapiens
aatcctccgaatcttctgatg

SEQ ID NO: 16532 - RNA, 21 nt, RNAi
uccuccgaaucuucugauguu

SEQ ID NO: 16533 - RNA, 21 nt, RNAi
uuaggaggcuuagaagacuac

SEQ ID NO: 16534 - DNA, 21 bp, homo sapiens
aatcttctgatgcaggtctct

SEQ ID NO: 16535 - RNA, 21 nt, RNAi
ucuucugaugcaggucucuuu

SEQ ID NO: 16536 - RNA, 21 nt, RNAi
uuagaagacuacguccagaga

SEQ ID NO: 16537 - DNA, 21 bp, homo sapiens
aacaggccatccaggcagcca

SEQ ID NO: 16538 - RNA, 21 nt, RNAi
caggccauccaggcagccauu

SEQ ID NO: 16539 - RNA, 21 nt, RNAi
uuguccgguagguccgucggu

SEQ ID NO: 16540 - DNA, 21 bp, homo sapiens
aaacgagcagtttgccatcag

SEQ ID NO: 16541 - RNA, 21 nt, RNAi
acgagcaguuugccaucaguu

SEQ ID NO: 16542 - RNA, 21 nt, RNAi
uuugcucgucaaacgguaguc

SEQ ID NO: 16543 - DNA, 21 bp, homo sapiens
aacgagcagtttgccatcaga

SEQ ID NO: 16544 - RNA, 21 nt, RNAi
cgagcaguuugccaucagauu

SEQ ID NO: 16545 - RNA, 21 nt, RNAi
uugcucgucaaacgguagucu

SEQ ID NO: 16546 - DNA, 21 bp, homo sapiens
aagacaaggagaatgtgcgct

SEQ ID NO: 16547 - RNA, 21 nt, RNAi
gacaaggagaaugugcgcuuu

SEQ ID NO: 16548 - RNA, 21 nt, RNAi
uucuguuccucuuacacgcga

SEQ ID NO: 16549 - DNA, 21 bp, homo sapiens
aaggagaatgtgcgcttctgg

SEQ ID NO: 16550 - RNA, 21 nt, RNAi
ggagaaugugcgcuucugguu

SEQ ID NO: 16551 - RNA, 21 nt, RNAi
uuccucuuacacgcgaagacc

SEQ ID NO: 16552 - DNA, 21 bp, homo sapiens
aatgtgcgcttctggaaggcc

SEQ ID NO: 16553 - RNA, 21 nt, RNAi
ugugcgcuucuggaaggccuu

SEQ ID NO: 16554 - RNA, 21 nt, RNAi
uuacacgcgaagaccuuccgg

SEQ ID NO: 16555 - DNA, 21 bp, homo sapiens
aagatggaagtggaggagctc

SEQ ID NO: 16556 - RNA, 21 nt, RNAi
gauggaaguggaggagcucuu

SEQ ID NO: 16557 - RNA, 21 nt, RNAi
uucuaccuucaccuccucgag

SEQ ID NO: 16558 - DNA, 21 bp, homo sapiens
aagatgatggatttgtggaca

SEQ ID NO: 16559 - RNA, 21 nt, RNAi
gaugauggauuuguggacauu

SEQ ID NO: 16560 - RNA, 21 nt, RNAi
uucuacuaccuaaacaccugu

SEQ ID NO: 16561 - DNA, 21 bp, homo sapiens
aaaggatgatgatgcagttcc

SEQ ID NO: 16562 - RNA, 21 nt, RNAi
aggaugaugaugcaguuccuu

SEQ ID NO: 16563 - RNA, 21 nt, RNAi
uuuccuacuacuacgucaagg

SEQ ID NO: 16564 - DNA, 21 bp, homo sapiens
aaaggacctcgtcatgtacag

SEQ ID NO: 16565 - RNA, 21 nt, RNAi
aggaccucgucauguacaguu

SEQ ID NO: 16566 - RNA, 21 nt, RNAi
uuuccuggagcaguacauguc

SEQ ID NO: 16567 - DNA, 21 bp, homo sapiens
aaggacctcgtcatgtacagc

SEQ ID NO: 16568 - RNA, 21 nt, RNAi
ggaccucgucauguacagcuu

SEQ ID NO: 16569 - RNA, 21 nt, RNAi
uuccuggagcaguacaugucg

SEQ ID NO: 16570 - DNA, 21 bp, homo sapiens
aataagcggaggcggagcgtg

SEQ ID NO: 16571 - RNA, 21 nt, RNAi
uaagcggaggcggagcguguu

SEQ ID NO: 16572 - RNA, 21 nt, RNAi
uuauucgccuccgccucgcac

SEQ ID NO: 16573 - DNA, 21 bp, homo sapiens
aaatcactgtgtcacgatgag

SEQ ID NO: 16574 - RNA, 21 nt, RNAi
aucacugugucacgaugaguu

SEQ ID NO: 16575 - RNA, 21 nt, RNAi
uuuagugacacagugcuacuc

SEQ ID NO: 16576 - DNA, 21 bp, homo sapiens
aatcactgtgtcacgatgaga

SEQ ID NO: 16577 - RNA, 21 nt, RNAi
ucacugugucacgaugagauu

SEQ ID NO: 16578 - RNA, 21 nt, RNAi
uuagugacacagugcuacucu

SEQ ID NO: 16579 - DNA, 21 bp, homo sapiens
aacctcctggacagtgaccac

SEQ ID NO: 16580 - RNA, 21 nt, RNAi
ccuccuggacagugaccacuu

SEQ ID NO: 16581 - RNA, 21 nt, RNAi
uuggaggaccugucacuggug

SEQ ID NO: 16582 - DNA, 21 bp, homo sapiens
aaggccttcctcctacagaca

SEQ ID NO: 16583 - RNA, 21 nt, RNAi
ggccuuccuccuacagacauu

SEQ ID NO: 16584 - RNA, 21 nt, RNAi
uuccggaaggaggaugucugu

SEQ ID NO: 16585 - DNA, 21 bp, homo sapiens
aaagcaccaagacctcaagta

SEQ ID NO: 16586 - RNA, 21 nt, RNAi
agcaccaagaccucaaguauu

SEQ ID NO: 16587 - RNA, 21 nt, RNAi
uuucgugguucuggaguucau

SEQ ID NO: 16588 - DNA, 21 bp, homo sapiens
aagcaccaagacctcaagtac

SEQ ID NO: 16589 - RNA, 21 nt, RNAi
gcaccaagaccucaaguacuu

SEQ ID NO: 16590 - RNA, 21 nt, RNAi
uucgugguucuggaguucaug

SEQ ID NO: 16591 - DNA, 21 bp, homo sapiens
aagacctcaagtacatctcac

SEQ ID NO: 16592 - RNA, 21 nt, RNAi
gaccucaaguacaucucacuu

SEQ ID NO: 16593 - RNA, 21 nt, RNAi
uucuggaguucauguagagug

SEQ ID NO: 16594 - DNA, 21 bp, homo sapiens
aagtacatctcaccagaaacg

SEQ ID NO: 16595 - RNA, 21 nt, RNAi
guacaucucaccagaaacguu

SEQ ID NO: 16596 - RNA, 21 nt, RNAi
uucauguagaguggucuuugc

SEQ ID NO: 16597 - DNA, 21 bp, homo sapiens
aagttcagcaacatcgtggat

SEQ ID NO: 16598 - RNA, 21 nt, RNAi
guucagcaacaucguggauuu

SEQ ID NO: 16599 - RNA, 21 nt, RNAi
uucaagucguuguagcaccua

SEQ ID NO: 16600 - DNA, 21 bp, homo sapiens
aacatcgtggataagtttgtg

SEQ ID NO: 16601 - RNA, 21 nt, RNAi
caucguggauaaguuuguguu

SEQ ID NO: 16602 - RNA, 21 nt, RNAi
uuguagcaccuauucaaacac

SEQ ID NO: 16603 - DNA, 21 bp, homo sapiens
aagtttgtgattgtagactgc

SEQ ID NO: 16604 - RNA, 21 nt, RNAi
guuugugauuguagacugcuu

SEQ ID NO: 16605 - RNA, 21 nt, RNAi
uucaaacacuaacaucugacg

SEQ ID NO: 16606 - DNA, 21 bp, homo sapiens
aacgagaccgtgctgtcaacg

SEQ ID NO: 16607 - RNA, 21 nt, RNAi
cgagaccgugcugucaacguu

SEQ ID NO: 16608 - RNA, 21 nt, RNAi
uugcucuggcacgacaguugc

SEQ ID NO: 16609 - DNA, 21 bp, homo sapiens
aaaggcggctacaaggagttc

SEQ ID NO: 16610 - RNA, 21 nt, RNAi
aggcggcuacaaggaguucuu

SEQ ID NO: 16611 - RNA, 21 nt, RNAi
uuuccgccgauguuccucaag

SEQ ID NO: 16612 - DNA, 21 bp, homo sapiens
aaggcggctacaaggagttct

SEQ ID NO: 16613 - RNA, 21 nt, RNAi
ggcggcuacaaggaguucuuu

SEQ ID NO: 16614 - RNA, 21 nt, RNAi
uuccgccgauguuccucaaga

SEQ ID NO: 16615 - DNA, 21 bp, homo sapiens
aaccacgaggccttcaaggat

SEQ ID NO: 16616 - RNA, 21 nt, RNAi
ccacgaggccuucaaggauuu

SEQ ID NO: 16617 - RNA, 21 nt, RNAi
uuggugcuccggaaguuccua

SEQ ID NO: 16618 - DNA, 21 bp, homo sapiens
aaggatgagctaaagaccttc

SEQ ID NO: 16619 - RNA, 21 nt, RNAi
ggaugagcuaaagaccuucuu

SEQ ID NO: 16620 - RNA, 21 nt, RNAi
uuccuacucgauuucuggaag

SEQ ID NO: 16621 - DNA, 21 bp, homo sapiens
aaagaccttccgcctcaagac

SEQ ID NO: 16622 - RNA, 21 nt, RNAi
agaccuuccgccucaagacuu

SEQ ID NO: 16623 - RNA, 21 nt, RNAi
uuucuggaaggcggaguucug

SEQ ID NO: 16624 - DNA, 21 bp, homo sapiens
aagaccttccgcctcaagact

SEQ ID NO: 16625 - RNA, 21 nt, RNAi
gaccuuccgccucaagacuuu

SEQ ID NO: 16626 - RNA, 21 nt, RNAi
uucuggaaggcggaguucuga

SEQ ID NO: 16627 - DNA, 21 bp, homo sapiens
aaagatggtgtggtgtcctgc

SEQ ID NO: 16628 - RNA, 21 nt, RNAi
agauggugugguguccugcuu

SEQ ID NO: 16629 - RNA, 21 nt, RNAi
uuucuaccacaccacaggacg

SEQ ID NO: 16630 - DNA, 21 bp, homo sapiens
aagatggtgtggtgtcctgcc

SEQ ID NO: 16631 - RNA, 21 nt, RNAi
gauggugugguguccugccuu

SEQ ID NO: 16632 - RNA, 21 nt, RNAi
uucuaccacaccacaggacgg

SEQ ID NO: 16633 - DNA, 21 bp, homo sapiens
aataccagcttaaaggcagta

SEQ ID NO: 16634 - RNA, 21 nt, RNAi
uaccagcuuaaaggcaguauu

SEQ ID NO: 16635 - RNA, 21 nt, RNAi
uuauggucgaauuuccgucau

SEQ ID NO: 16636 - DNA, 21 bp, homo sapiens
aaacgctcctttgtgtgtgtg

SEQ ID NO: 16637 - RNA, 21 nt, RNAi
acgcuccuuuguguguguguu

SEQ ID NO: 16638 - RNA, 21 nt, RNAi
uuugcgaggaaacacacacac

SEQ ID NO: 16639 - DNA, 21 bp, homo sapiens
aacgctcctttgtgtgtgtgt

SEQ ID NO: 16640 - RNA, 21 nt, RNAi
cgcuccuuuguguguguguuu

SEQ ID NO: 16641 - RNA, 21 nt, RNAi
uugcgaggaaacacacacaca

SEQ ID NO: 16642 - DNA, 21 bp, homo sapiens
aaactccttcctggcctgaga

SEQ ID NO: 16643 - RNA, 21 nt, RNAi
acuccuuccuggccugagauu

SEQ ID NO: 16644 - RNA, 21 nt, RNAi
uuugaggaaggaccggacucu

SEQ ID NO: 16645 - DNA, 21 bp, homo sapiens
aactccttcctggcctgagag

SEQ ID NO: 16646 - RNA, 21 nt, RNAi
cuccuuccuggccugagaguu

SEQ ID NO: 16647 - RNA, 21 nt, RNAi
uugaggaaggaccggacucuc

SEQ ID NO: 16648 - DNA, 21 bp, homo sapiens
aatctctgtaggaaccgtggt

SEQ ID NO: 16649 - RNA, 21 nt, RNAi
ucucuguaggaaccgugguuu

SEQ ID NO: 16650 - RNA, 21 nt, RNAi
uuagagacauccuuggcacca

SEQ ID NO: 16651 - DNA, 21 bp, homo sapiens
aaccgtggtatgtctgccatg

SEQ ID NO: 16652 - RNA, 21 nt, RNAi
ccgugguaugucugccauguu

SEQ ID NO: 16653 - RNA, 21 nt, RNAi
uuggcaccauacagacgguac

SEQ ID NO: 16654 - DNA, 21 bp, homo sapiens
aacagaagctcttactctttc

SEQ ID NO: 16655 - RNA, 21 nt, RNAi
cagaagcucuuacucuuucuu

SEQ ID NO: 16656 - RNA, 21 nt, RNAi
uugucuucgagaaugagaaag

SEQ ID NO: 16657 - DNA, 21 bp, homo sapiens
aagctcttactctttcctatt

SEQ ID NO: 16658 - RNA, 21 nt, RNAi
gcucuuacucuuuccuauuuu

SEQ ID NO: 16659 - RNA, 21 nt, RNAi
uucgagaaugagaaaggauaa

SEQ ID NO: 16660 - DNA, 21 bp, homo sapiens
aaggcctgaatcatgagcctg

SEQ ID NO: 16661 - RNA, 21 nt, RNAi
ggccugaaucaugagccuguu

SEQ ID NO: 16662 - RNA, 21 nt, RNAi
uuccggacuuaguacucggac

SEQ ID NO: 16663 - DNA, 21 bp, homo sapiens
aatcatgagcctgctggaagc

SEQ ID NO: 16664 - RNA, 21 nt, RNAi
ucaugagccugcuggaagcuu

SEQ ID NO: 16665 - RNA, 21 nt, RNAi
uuaguacucggacgaccuucg

SEQ ID NO: 16666 - DNA, 21 bp, homo sapiens
aacttgctgctgtcttgttgc

SEQ ID NO: 16667 - RNA, 21 nt, RNAi
cuugcugcugucuuguugcuu

SEQ ID NO: 16668 - RNA, 21 nt, RNAi
uugaacgacgacagaacaacg

SEQ ID NO: 16669 - DNA, 21 bp, homo sapiens
aagaggaaatgtcacagaagc

SEQ ID NO: 16670 - RNA, 21 nt, RNAi
gaggaaaugucacagaagcuu

SEQ ID NO: 16671 - RNA, 21 nt, RNAi
uucuccuuuacagugucuucg

SEQ ID NO: 16672 - DNA, 21 bp, homo sapiens
aaatgtcacagaagcagctaa

SEQ ID NO: 16673 - RNA, 21 nt, RNAi
augucacagaagcagcuaauu

SEQ ID NO: 16674 - RNA, 21 nt, RNAi
uuuacagugucuucgucgauu

SEQ ID NO: 16675 - DNA, 21 bp, homo sapiens
aatgtcacagaagcagctaaa

SEQ ID NO: 16676 - RNA, 21 nt, RNAi
ugucacagaagcagcuaaauu

SEQ ID NO: 16677 - RNA, 21 nt, RNAi
uuacagugucuucgucgauuu

SEQ ID NO: 16678 - DNA, 21 bp, homo sapiens
aagcagctaaaccaaggactg

SEQ ID NO: 16679 - RNA, 21 nt, RNAi
gcagcuaaaccaaggacuguu

SEQ ID NO: 16680 - RNA, 21 nt, RNAi
uucgucgauuugguuccugac

SEQ ID NO: 16681 - DNA, 21 bp, homo sapiens
aataaagcactgagcaagttg

SEQ ID NO: 16682 - RNA, 21 nt, RNAi
uaaagcacugagcaaguuguu

SEQ ID NO: 16683 - RNA, 21 nt, RNAi
uuauuucgugacucguucaac

SEQ ID NO: 16684 - DNA, 21 bp, homo sapiens
aaagcactgagcaagttgaga

SEQ ID NO: 16685 - RNA, 21 nt, RNAi
agcacugagcaaguugagauu

SEQ ID NO: 16686 - RNA, 21 nt, RNAi
uuucgugacucguucaacucu

SEQ ID NO: 16687 - DNA, 21 bp, homo sapiens
aagcactgagcaagttgagaa

SEQ ID NO: 16688 - RNA, 21 nt, RNAi
gcacugagcaaguugagaauu

SEQ ID NO: 16689 - RNA, 21 nt, RNAi
uucgugacucguucaacucuu

SEQ ID NO: 16690 - DNA, 21 bp, homo sapiens
cacatggcggagcagacgttt

SEQ ID NO: 16691 - RNA, 21 nt, RNAi
cauggcggagcagacguuuuu

SEQ ID NO: 16692 - RNA, 21 nt, RNAi
uuguaccgccucgucugcaaa

SEQ ID NO: 16693 - DNA, 21 bp, homo sapiens
catggcggagcagacgtttga

SEQ ID NO: 16694 - RNA, 21 nt, RNAi
uggcggagcagacguuugauu

SEQ ID NO: 16695 - RNA, 21 nt, RNAi
uuaccgccucgucugcaaacu

SEQ ID NO: 16696 - DNA, 21 bp, homo sapiens
cagacgtttgaacaggccatc

SEQ ID NO: 16697 - RNA, 21 nt, RNAi
gacguuugaacaggccaucuu

SEQ ID NO: 16698 - RNA, 21 nt, RNAi
uucugcaaacuuguccgguag

SEQ ID NO: 16699 - DNA, 21 bp, homo sapiens
caggcagccagccggatcatt

SEQ ID NO: 16700 - RNA, 21 nt, RNAi
ggcagccagccggaucauuuu

SEQ ID NO: 16701 - RNA, 21 nt, RNAi
uuccgucggucggccuaguaa

SEQ ID NO: 16702 - DNA, 21 bp, homo sapiens
cagccagccggatcattcgaa

SEQ ID NO: 16703 - RNA, 21 nt, RNAi
gccagccggaucauucgaauu

SEQ ID NO: 16704 - RNA, 21 nt, RNAi
uucggucggccuaguaagcuu

SEQ ID NO: 16705 - DNA, 21 bp, homo sapiens
cagccggatcattcgaaacga

SEQ ID NO: 16706 - RNA, 21 nt, RNAi
gccggaucauucgaaacgauu

SEQ ID NO: 16707 - RNA, 21 nt, RNAi
uucggccuaguaagcuuugcu

SEQ ID NO: 16708 - DNA, 21 bp, homo sapiens
cattcgaaacgagcagtttgc

SEQ ID NO: 16709 - RNA, 21 nt, RNAi
uucgaaacgagcaguuugcuu

SEQ ID NO: 16710 - RNA, 21 nt, RNAi
uuaagcuuugcucgucaaacg

SEQ ID NO: 16711 - DNA, 21 bp, homo sapiens
cagtttgccatcagacgcttc

SEQ ID NO: 16712 - RNA, 21 nt, RNAi
guuugccaucagacgcuucuu

SEQ ID NO: 16713 - RNA, 21 nt, RNAi
uucaaacgguagucugcgaag

SEQ ID NO: 16714 - DNA, 21 bp, homo sapiens
catcagacgcttccagtctat

SEQ ID NO: 16715 - RNA, 21 nt, RNAi
ucagacgcuuccagucuauuu

SEQ ID NO: 16716 - RNA, 21 nt, RNAi
uuagucugcgaaggucagaua

SEQ ID NO: 16717 - DNA, 21 bp, homo sapiens
cagacgcttccagtctatgcc

SEQ ID NO: 16718 - RNA, 21 nt, RNAi
gacgcuuccagucuaugccuu

SEQ ID NO: 16719 - RNA, 21 nt, RNAi
uucugcgaaggucagauacgg

SEQ ID NO: 16720 - DNA, 21 bp, homo sapiens
cagtctatgccggtgaggctg

SEQ ID NO: 16721 - RNA, 21 nt, RNAi
gucuaugccggugaggcuguu

SEQ ID NO: 16722 - RNA, 21 nt, RNAi
uucagauacggccacuccgac

SEQ ID NO: 16723 - DNA, 21 bp, homo sapiens
caaggagaatgtgcgcttctg

SEQ ID NO: 16724 - RNA, 21 nt, RNAi
aggagaaugugcgcuucuguu

SEQ ID NO: 16725 - RNA, 21 nt, RNAi
uuuccucuuacacgcgaagac

SEQ ID NO: 16726 - DNA, 21 bp, homo sapiens
catcttggctgcaggatggat

SEQ ID NO: 16727 - RNA, 21 nt, RNAi
ucuuggcugcaggauggauuu

SEQ ID NO: 16728 - RNA, 21 nt, RNAi
uuagaaccgacguccuaccua

SEQ ID NO: 16729 - DNA, 21 bp, homo sapiens
caggatggatttgtcttcaag

SEQ ID NO: 16730 - RNA, 21 nt, RNAi
ggauggauuugucuucaaguu

SEQ ID NO: 16731 - RNA, 21 nt, RNAi
uuccuaccuaaacagaaguuc

SEQ ID NO: 16732 - DNA, 21 bp, homo sapiens
cagtcctgaccggaagatgga

SEQ ID NO: 16733 - RNA, 21 nt, RNAi
guccugaccggaagauggauu

SEQ ID NO: 16734 - RNA, 21 nt, RNAi
uucaggacuggccuucuaccu

SEQ ID NO: 16735 - DNA, 21 bp, homo sapiens
catcctagagagtgacttaaa

SEQ ID NO: 16736 - RNA, 21 nt, RNAi
uccuagagagugacuuaaauu

SEQ ID NO: 16737 - RNA, 21 nt, RNAi
uuaggaucucucacugaauuu

SEQ ID NO: 16738 - DNA, 21 bp, homo sapiens
caggcatggagagtctcatta

SEQ ID NO: 16739 - RNA, 21 nt, RNAi
ggcauggagagucucauuauu

SEQ ID NO: 16740 - RNA, 21 nt, RNAi
uuccguaccucucagaguaau

SEQ ID NO: 16741 - DNA, 21 bp, homo sapiens
catggagagtctcattagtgc

SEQ ID NO: 16742 - RNA, 21 nt, RNAi
uggagagucucauuagugcuu

SEQ ID NO: 16743 - RNA, 21 nt, RNAi
uuaccucucagaguaaucacg

SEQ ID NO: 16744 - DNA, 21 bp, homo sapiens
cactggtcaagaccttggaaa

SEQ ID NO: 16745 - RNA, 21 nt, RNAi
cuggucaagaccuuggaaauu

SEQ ID NO: 16746 - RNA, 21 nt, RNAi
uugaccaguucuggaaccuuu

SEQ ID NO: 16747 - DNA, 21 bp, homo sapiens
catgtacagcaagtgccagcg

SEQ ID NO: 16748 - RNA, 21 nt, RNAi
uguacagcaagugccagcguu

SEQ ID NO: 16749 - RNA, 21 nt, RNAi
uuacaugucguucacggucgc

SEQ ID NO: 16750 - DNA, 21 bp, homo sapiens
cagcaagtgccagcggctctt

SEQ ID NO: 16751 - RNA, 21 nt, RNAi
gcaagugccagcggcucuuuu

SEQ ID NO: 16752 - RNA, 21 nt, RNAi
uucguucacggucgccgagaa

SEQ ID NO: 16753 - DNA, 21 bp, homo sapiens
catcctcaagaggctggagcg

SEQ ID NO: 16754 - RNA, 21 nt, RNAi
uccucaagaggcuggagcguu

SEQ ID NO: 16755 - RNA, 21 nt, RNAi
uuaggaguucuccgaccucgc

SEQ ID NO: 16756 - DNA, 21 bp, homo sapiens
cagaataagcggaggcggagc

SEQ ID NO: 16757 - RNA, 21 nt, RNAi
gaauaagcggaggcggagcuu

SEQ ID NO: 16758 - RNA, 21 nt, RNAi
uucuuauucgccuccgccucg

SEQ ID NO: 16759 - DNA, 21 bp, homo sapiens
cagcaggaggctgaggaacct

SEQ ID NO: 16760 - RNA, 21 nt, RNAi
gcaggaggcugaggaaccuuu

SEQ ID NO: 16761 - RNA, 21 nt, RNAi
uucguccuccgacuccuugga

SEQ ID NO: 16762 - DNA, 21 bp, homo sapiens
caggaggctgaggaacctaaa

SEQ ID NO: 16763 - RNA, 21 nt, RNAi
ggaggcugaggaaccuaaauu

SEQ ID NO: 16764 - RNA, 21 nt, RNAi
uuccuccgacuccuuggauuu

SEQ ID NO: 16765 - DNA, 21 bp, homo sapiens
cactgtgtcacgatgagatcg

SEQ ID NO: 16766 - RNA, 21 nt, RNAi
cugugucacgaugagaucguu

SEQ ID NO: 16767 - RNA, 21 nt, RNAi
uugacacagugcuacucuagc

SEQ ID NO: 16768 - DNA, 21 bp, homo sapiens
cacgatgagatcgagaacctc

SEQ ID NO: 16769 - RNA, 21 nt, RNAi
cgaugagaucgagaaccucuu

SEQ ID NO: 16770 - RNA, 21 nt, RNAi
uugcuacucuagcucuuggag

SEQ ID NO: 16771 - DNA, 21 bp, homo sapiens
cagtgaccaccgagagctgat

SEQ ID NO: 16772 - RNA, 21 nt, RNAi
gugaccaccgagagcugauuu

SEQ ID NO: 16773 - RNA, 21 nt, RNAi
uucacugguggcucucgacua

SEQ ID NO: 16774 - DNA, 21 bp, homo sapiens
caccgagagctgattggagat

SEQ ID NO: 16775 - RNA, 21 nt, RNAi
ccgagagcugauuggagauuu

SEQ ID NO: 16776 - RNA, 21 nt, RNAi
uuggcucucgacuaaccucua

SEQ ID NO: 16777 - DNA, 21 bp, homo sapiens
cagacagtagacggaaagcac

SEQ ID NO: 16778 - RNA, 21 nt, RNAi
gacaguagacggaaagcacuu

SEQ ID NO: 16779 - RNA, 21 nt, RNAi
uucugucaucugccuuucgug

SEQ ID NO: 16780 - DNA, 21 bp, homo sapiens
cagtagacggaaagcaccaag

SEQ ID NO: 16781 - RNA, 21 nt, RNAi
guagacggaaagcaccaaguu

SEQ ID NO: 16782 - RNA, 21 nt, RNAi
uucaucugccuuucgugguuc

SEQ ID NO: 16783 - DNA, 21 bp, homo sapiens
caccaagacctcaagtacatc

SEQ ID NO: 16784 - RNA, 21 nt, RNAi
ccaagaccucaaguacaucuu

SEQ ID NO: 16785 - RNA, 21 nt, RNAi
uugguucuggaguucauguag

SEQ ID NO: 16786 - DNA, 21 bp, homo sapiens
caagacctcaagtacatctca

SEQ ID NO: 16787 - RNA, 21 nt, RNAi
agaccucaaguacaucucauu

SEQ ID NO: 16788 - RNA, 21 nt, RNAi
uuucuggaguucauguagagu

SEQ ID NO: 16789 - DNA, 21 bp, homo sapiens
caagtacatctcaccagaaac

SEQ ID NO: 16790 - RNA, 21 nt, RNAi
aguacaucucaccagaaacuu

SEQ ID NO: 16791 - RNA, 21 nt, RNAi
uuucauguagaguggucuuug

SEQ ID NO: 16792 - DNA, 21 bp, homo sapiens
catctcaccagaaacgatggt

SEQ ID NO: 16793 - RNA, 21 nt, RNAi
ucucaccagaaacgaugguuu

SEQ ID NO: 16794 - RNA, 21 nt, RNAi
uuagaguggucuuugcuacca

SEQ ID NO: 16795 - DNA, 21 bp, homo sapiens
caagttcagcaacatcgtgga

SEQ ID NO: 16796 - RNA, 21 nt, RNAi
aguucagcaacaucguggauu

SEQ ID NO: 16797 - RNA, 21 nt, RNAi
uuucaagucguuguagcaccu

SEQ ID NO: 16798 - DNA, 21 bp, homo sapiens
cagcaacatcgtggataagtt

SEQ ID NO: 16799 - RNA, 21 nt, RNAi
gcaacaucguggauaaguuuu

SEQ ID NO: 16800 - RNA, 21 nt, RNAi
uucguuguagcaccuauucaa

SEQ ID NO: 16801 - DNA, 21 bp, homo sapiens
caacatcgtggataagtttgt

SEQ ID NO: 16802 - RNA, 21 nt, RNAi
acaucguggauaaguuuguuu

SEQ ID NO: 16803 - RNA, 21 nt, RNAi
uuuguagcaccuauucaaaca

SEQ ID NO: 16804 - DNA, 21 bp, homo sapiens
catcgtggataagtttgtgat

SEQ ID NO: 16805 - RNA, 21 nt, RNAi
ucguggauaaguuugugauuu

SEQ ID NO: 16806 - RNA, 21 nt, RNAi
uuagcaccuauucaaacacua

SEQ ID NO: 16807 - DNA, 21 bp, homo sapiens
cacatcaagactgcggtgaac

SEQ ID NO: 16808 - RNA, 21 nt, RNAi
caucaagacugcggugaacuu

SEQ ID NO: 16809 - RNA, 21 nt, RNAi
uuguaguucugacgccacuug

SEQ ID NO: 16810 - DNA, 21 bp, homo sapiens
catcaagactgcggtgaactt

SEQ ID NO: 16811 - RNA, 21 nt, RNAi
ucaagacugcggugaacuuuu

SEQ ID NO: 16812 - RNA, 21 nt, RNAi
uuaguucugacgccacuugaa

SEQ ID NO: 16813 - DNA, 21 bp, homo sapiens
caagactgcggtgaacttgcc

SEQ ID NO: 16814 - RNA, 21 nt, RNAi
agacugcggugaacuugccuu

SEQ ID NO: 16815 - RNA, 21 nt, RNAi
uuucugacgccacuugaacgg

SEQ ID NO: 16816 - DNA, 21 bp, homo sapiens
cactgtgaattctcatctgag

SEQ ID NO: 16817 - RNA, 21 nt, RNAi
cugugaauucucaucugaguu

SEQ ID NO: 16818 - RNA, 21 nt, RNAi
uugacacuuaagaguagacuc

SEQ ID NO: 16819 - DNA, 21 bp, homo sapiens
catgaaccacgaggccttcaa

SEQ ID NO: 16820 - RNA, 21 nt, RNAi
ugaaccacgaggccuucaauu

SEQ ID NO: 16821 - RNA, 21 nt, RNAi
uuacuuggugcuccggaaguu

SEQ ID NO: 16822 - DNA, 21 bp, homo sapiens
cacgaggccttcaaggatgag

SEQ ID NO: 16823 - RNA, 21 nt, RNAi
cgaggccuucaaggaugaguu

SEQ ID NO: 16824 - RNA, 21 nt, RNAi
uugcuccggaaguuccuacuc

SEQ ID NO: 16825 - DNA, 21 bp, homo sapiens
caaggatgagctaaagacctt

SEQ ID NO: 16826 - RNA, 21 nt, RNAi
aggaugagcuaaagaccuuuu

SEQ ID NO: 16827 - RNA, 21 nt, RNAi
uuuccuacucgauuucuggaa

SEQ ID NO: 16828 - DNA, 21 bp, homo sapiens
cagtctgttgagttagttaag

SEQ ID NO: 16829 - RNA, 21 nt, RNAi
gucuguugaguuaguuaaguu

SEQ ID NO: 16830 - RNA, 21 nt, RNAi
uucagacaacucaaucaauuc

SEQ ID NO: 16831 - DNA, 21 bp, homo sapiens
caggagcttcttgtttccttg

SEQ ID NO: 16832 - RNA, 21 nt, RNAi
ggagcuucuuguuuccuuguu

SEQ ID NO: 16833 - RNA, 21 nt, RNAi
uuccucgaagaacaaaggaac

SEQ ID NO: 16834 - DNA, 21 bp, homo sapiens
catcttcctgtgtcctgaaac

SEQ ID NO: 16835 - RNA, 21 nt, RNAi
ucuuccuguguccugaaacuu

SEQ ID NO: 16836 - RNA, 21 nt, RNAi
uuagaaggacacaggacuuug

SEQ ID NO: 16837 - DNA, 21 bp, homo sapiens
cagagctaaactccttcctgg

SEQ ID NO: 16838 - RNA, 21 nt, RNAi
gagcuaaacuccuuccugguu

SEQ ID NO: 16839 - RNA, 21 nt, RNAi
uucucgauuugaggaaggacc

SEQ ID NO: 16840 - DNA, 21 bp, homo sapiens
caccatacgagcacctccagc

SEQ ID NO: 16841 - RNA, 21 nt, RNAi
ccauacgagcaccuccagcuu

SEQ ID NO: 16842 - RNA, 21 nt, RNAi
uugguaugcucguggaggucg

SEQ ID NO: 16843 - DNA, 21 bp, homo sapiens
catacgagcacctccagcctg

SEQ ID NO: 16844 - RNA, 21 nt, RNAi
uacgagcaccuccagccuguu

SEQ ID NO: 16845 - RNA, 21 nt, RNAi
uuaugcucguggaggucggac

SEQ ID NO: 16846 - DNA, 21 bp, homo sapiens
cacctccagcctgaacagaag

SEQ ID NO: 16847 - RNA, 21 nt, RNAi
ccuccagccugaacagaaguu

SEQ ID NO: 16848 - RNA, 21 nt, RNAi
uuggaggucggacuugucuuc

SEQ ID NO: 16849 - DNA, 21 bp, homo sapiens
cagcctgaacagaagctctta

SEQ ID NO: 16850 - RNA, 21 nt, RNAi
gccugaacagaagcucuuauu

SEQ ID NO: 16851 - RNA, 21 nt, RNAi
uucggacuugucuucgagaau

SEQ ID NO: 16852 - DNA, 21 bp, homo sapiens
cagaagctcttactctttcct

SEQ ID NO: 16853 - RNA, 21 nt, RNAi
gaagcucuuacucuuuccuuu

SEQ ID NO: 16854 - RNA, 21 nt, RNAi
uucuucgagaaugagaaagga

SEQ ID NO: 16855 - DNA, 21 bp, homo sapiens
cagtgttacctgtgtgcttgg

SEQ ID NO: 16856 - RNA, 21 nt, RNAi
guguuaccugugugcuugguu

SEQ ID NO: 16857 - RNA, 21 nt, RNAi
uucacaauggacacacgaacc

SEQ ID NO: 16858 - DNA, 21 bp, homo sapiens
catctcaggacacttccgtag

SEQ ID NO: 16859 - RNA, 21 nt, RNAi
ucucaggacacuuccguaguu

SEQ ID NO: 16860 - RNA, 21 nt, RNAi
uuagaguccugugaaggcauc

SEQ ID NO: 16861 - DNA, 21 bp, homo sapiens
caggacacttccgtagactgt

SEQ ID NO: 16862 - RNA, 21 nt, RNAi
ggacacuuccguagacuguuu

SEQ ID NO: 16863 - RNA, 21 nt, RNAi
uuccugugaaggcaucugaca

SEQ ID NO: 16864 - DNA, 21 bp, homo sapiens
cacttccgtagactgtttagg

SEQ ID NO: 16865 - RNA, 21 nt, RNAi
cuuccguagacuguuuagguu

SEQ ID NO: 16866 - RNA, 21 nt, RNAi
uugaaggcaucugacaaaucc

SEQ ID NO: 16867 - DNA, 21 bp, homo sapiens
cagaacttgctgctgtcttgt

SEQ ID NO: 16868 - RNA, 21 nt, RNAi
gaacuugcugcugucuuguuu

SEQ ID NO: 16869 - RNA, 21 nt, RNAi
uucuugaacgacgacagaaca

SEQ ID NO: 16870 - DNA, 21 bp, homo sapiens
catgacacctgcagcaggaat

SEQ ID NO: 16871 - RNA, 21 nt, RNAi
ugacaccugcagcaggaauuu

SEQ ID NO: 16872 - RNA, 21 nt, RNAi
uuacuguggacgucguccuua

SEQ ID NO: 16873 - DNA, 21 bp, homo sapiens
cacctgcagcaggaatatatg

SEQ ID NO: 16874 - RNA, 21 nt, RNAi
ccugcagcaggaauauauguu

SEQ ID NO: 16875 - RNA, 21 nt, RNAi
uuggacgucguccuuauauac

SEQ ID NO: 16876 - DNA, 21 bp, homo sapiens
cagcaggaatatatgtgtgcc

SEQ ID NO: 16877 - RNA, 21 nt, RNAi
gcaggaauauaugugugccuu

SEQ ID NO: 16878 - RNA, 21 nt, RNAi
uucguccuuauauacacacgg

SEQ ID NO: 16879 - DNA, 21 bp, homo sapiens
caggaatatatgtgtgcctat

SEQ ID NO: 16880 - RNA, 21 nt, RNAi
ggaauauaugugugccuauuu

SEQ ID NO: 16881 - RNA, 21 nt, RNAi
uuccuuauauacacacggaua

SEQ ID NO: 16882 - DNA, 21 bp, homo sapiens
caagaggaaatgtcacagaag

SEQ ID NO: 16883 - RNA, 21 nt, RNAi
agaggaaaugucacagaaguu

SEQ ID NO: 16884 - RNA, 21 nt, RNAi
uuucuccuuuacagugucuuc

SEQ ID NO: 16885 - DNA, 21 bp, homo sapiens
cacagaagcagctaaaccaag

SEQ ID NO: 16886 - RNA, 21 nt, RNAi
cagaagcagcuaaaccaaguu

SEQ ID NO: 16887 - RNA, 21 nt, RNAi
uugucuucgucgauuugguuc

SEQ ID NO: 16888 - DNA, 21 bp, homo sapiens
cagaagcagctaaaccaagga

SEQ ID NO: 16889 - RNA, 21 nt, RNAi
gaagcagcuaaaccaaggauu

SEQ ID NO: 16890 - RNA, 21 nt, RNAi
uucuucgucgauuugguuccu

SEQ ID NO: 16891 - DNA, 21 bp, homo sapiens
cagctaaaccaaggactgagc

SEQ ID NO: 16892 - RNA, 21 nt, RNAi
gcuaaaccaaggacugagcuu

SEQ ID NO: 16893 - RNA, 21 nt, RNAi
uucgauuugguuccugacucg

SEQ ID NO: 16894 - DNA, 21 bp, homo sapiens
caataaagcactgagcaagtt

SEQ ID NO: 16895 - RNA, 21 nt, RNAi
auaaagcacugagcaaguuuu

SEQ ID NO: 16896 - RNA, 21 nt, RNAi
uuuauuucgugacucguucaa

SEQ ID NO: 16897 - DNA, 21 bp, homo sapiens
gaatcctccgaatcttctgat

SEQ ID NO: 16898 - RNA, 21 nt, RNAi
auccuccgaaucuucugauuu

SEQ ID NO: 16899 - RNA, 21 nt, RNAi
uuuaggaggcuuagaagacua

SEQ ID NO: 16900 - DNA, 21 bp, homo sapiens
gaatcttctgatgcaggtctc

SEQ ID NO: 16901 - RNA, 21 nt, RNAi
aucuucugaugcaggucucuu

SEQ ID NO: 16902 - RNA, 21 nt, RNAi
uuuagaagacuacguccagag

SEQ ID NO: 16903 - DNA, 21 bp, homo sapiens
gatgcaggtctctgcatggat

SEQ ID NO: 16904 - RNA, 21 nt, RNAi
ugcaggucucugcauggauuu

SEQ ID NO: 16905 - RNA, 21 nt, RNAi
uuacguccagagacguaccua

SEQ ID NO: 16906 - DNA, 21 bp, homo sapiens
gagcagacgtttgaacaggcc

SEQ ID NO: 16907 - RNA, 21 nt, RNAi
gcagacguuugaacaggccuu

SEQ ID NO: 16908 - RNA, 21 nt, RNAi
uucgucugcaaacuuguccgg

SEQ ID NO: 16909 - DNA, 21 bp, homo sapiens
gacgtttgaacaggccatcca

SEQ ID NO: 16910 - RNA, 21 nt, RNAi
cguuugaacaggccauccauu

SEQ ID NO: 16911 - RNA, 21 nt, RNAi
uugcaaacuuguccgguaggu

SEQ ID NO: 16912 - DNA, 21 bp, homo sapiens
gatcattcgaaacgagcagtt

SEQ ID NO: 16913 - RNA, 21 nt, RNAi
ucauucgaaacgagcaguuuu

SEQ ID NO: 16914 - RNA, 21 nt, RNAi
uuaguaagcuuugcucgucaa

SEQ ID NO: 16915 - DNA, 21 bp, homo sapiens
gaaacgagcagtttgccatca

SEQ ID NO: 16916 - RNA, 21 nt, RNAi
aacgagcaguuugccaucauu

SEQ ID NO: 16917 - RNA, 21 nt, RNAi
uuuugcucgucaaacgguagu

SEQ ID NO: 16918 - DNA, 21 bp, homo sapiens
gagcagtttgccatcagacgc

SEQ ID NO: 16919 - RNA, 21 nt, RNAi
gcaguuugccaucagacgcuu

SEQ ID NO: 16920 - RNA, 21 nt, RNAi
uucgucaaacgguagucugcg

SEQ ID NO: 16921 - DNA, 21 bp, homo sapiens
gacgcttccagtctatgccgg

SEQ ID NO: 16922 - RNA, 21 nt, RNAi
cgcuuccagucuaugccgguu

SEQ ID NO: 16923 - RNA, 21 nt, RNAi
uugcgaaggucagauacggcc

SEQ ID NO: 16924 - DNA, 21 bp, homo sapiens
gaagacaaggagaatgtgcgc

SEQ ID NO: 16925 - RNA, 21 nt, RNAi
agacaaggagaaugugcgcuu

SEQ ID NO: 16926 - RNA, 21 nt, RNAi
uuucuguuccucuuacacgcg

SEQ ID NO: 16927 - DNA, 21 bp, homo sapiens
gacaaggagaatgtgcgcttc

SEQ ID NO: 16928 - RNA, 21 nt, RNAi
caaggagaaugugcgcuucuu

SEQ ID NO: 16929 - RNA, 21 nt, RNAi
uuguuccucuuacacgcgaag

SEQ ID NO: 16930 - DNA, 21 bp, homo sapiens
gagaatgtgcgcttctggaag

SEQ ID NO: 16931 - RNA, 21 nt, RNAi
gaaugugcgcuucuggaaguu

SEQ ID NO: 16932 - RNA, 21 nt, RNAi
uucuuacacgcgaagaccuuc

SEQ ID NO: 16933 - DNA, 21 bp, homo sapiens
gaatgtgcgcttctggaaggc

SEQ ID NO: 16934 - RNA, 21 nt, RNAi
augugcgcuucuggaaggcuu

SEQ ID NO: 16935 - RNA, 21 nt, RNAi
uuuacacgcgaagaccuuccg

SEQ ID NO: 16936 - DNA, 21 bp, homo sapiens
gatggatttgtcttcaagatg

SEQ ID NO: 16937 - RNA, 21 nt, RNAi
uggauuugucuucaagauguu

SEQ ID NO: 16938 - RNA, 21 nt, RNAi
uuaccuaaacagaaguucuac

SEQ ID NO: 16939 - DNA, 21 bp, homo sapiens
gatttgtcttcaagatgccat

SEQ ID NO: 16940 - RNA, 21 nt, RNAi
uuugucuucaagaugccauuu

SEQ ID NO: 16941 - RNA, 21 nt, RNAi
uuaaacagaaguucuacggua

SEQ ID NO: 16942 - DNA, 21 bp, homo sapiens
gacctgatgtgtctcagtcct

SEQ ID NO: 16943 - RNA, 21 nt, RNAi
ccugaugugucucaguccuuu

SEQ ID NO: 16944 - RNA, 21 nt, RNAi
uuggacuacacagagucagga

SEQ ID NO: 16945 - DNA, 21 bp, homo sapiens
gatgtgtctcagtcctgaccg

SEQ ID NO: 16946 - RNA, 21 nt, RNAi
ugugucucaguccugaccguu

SEQ ID NO: 16947 - RNA, 21 nt, RNAi
uuacacagagucaggacuggc

SEQ ID NO: 16948 - DNA, 21 bp, homo sapiens
gaccggaagatggaagtggag

SEQ ID NO: 16949 - RNA, 21 nt, RNAi
ccggaagauggaaguggaguu

SEQ ID NO: 16950 - RNA, 21 nt, RNAi
uuggccuucuaccuucaccuc

SEQ ID NO: 16951 - DNA, 21 bp, homo sapiens
gaagatggaagtggaggagct

SEQ ID NO: 16952 - RNA, 21 nt, RNAi
agauggaaguggaggagcuuu

SEQ ID NO: 16953 - RNA, 21 nt, RNAi
uuucuaccuucaccuccucga

SEQ ID NO: 16954 - DNA, 21 bp, homo sapiens
gatggaagtggaggagctcag

SEQ ID NO: 16955 - RNA, 21 nt, RNAi
uggaaguggaggagcucaguu

SEQ ID NO: 16956 - RNA, 21 nt, RNAi
uuaccuucaccuccucgaguc

SEQ ID NO: 16957 - DNA, 21 bp, homo sapiens
gatactgaggaagatgatgga

SEQ ID NO: 16958 - RNA, 21 nt, RNAi
uacugaggaagaugauggauu

SEQ ID NO: 16959 - RNA, 21 nt, RNAi
uuaugacuccuucuacuaccu

SEQ ID NO: 16960 - DNA, 21 bp, homo sapiens
gaggaagatgatggatttgtg

SEQ ID NO: 16961 - RNA, 21 nt, RNAi
ggaagaugauggauuuguguu

SEQ ID NO: 16962 - RNA, 21 nt, RNAi
uuccuucuacuaccuaaacac

SEQ ID NO: 16963 - DNA, 21 bp, homo sapiens
gaagatgatggatttgtggac

SEQ ID NO: 16964 - RNA, 21 nt, RNAi
agaugauggauuuguggacuu

SEQ ID NO: 16965 - RNA, 21 nt, RNAi
uuucuacuaccuaaacaccug

SEQ ID NO: 16966 - DNA, 21 bp, homo sapiens
gatgatggatttgtggacatc

SEQ ID NO: 16967 - RNA, 21 nt, RNAi
ugauggauuuguggacaucuu

SEQ ID NO: 16968 - RNA, 21 nt, RNAi
uuacuaccuaaacaccuguag

SEQ ID NO: 16969 - DNA, 21 bp, homo sapiens
gatggatttgtggacatccta

SEQ ID NO: 16970 - RNA, 21 nt, RNAi
uggauuuguggacauccuauu

SEQ ID NO: 16971 - RNA, 21 nt, RNAi
uuaccuaaacaccuguaggau

SEQ ID NO: 16972 - DNA, 21 bp, homo sapiens
gatttgtggacatcctagaga

SEQ ID NO: 16973 - RNA, 21 nt, RNAi
uuuguggacauccuagagauu

SEQ ID NO: 16974 - RNA, 21 nt, RNAi
uuaaacaccuguaggaucucu

SEQ ID NO: 16975 - DNA, 21 bp, homo sapiens
gacatcctagagagtgactta

SEQ ID NO: 16976 - RNA, 21 nt, RNAi
cauccuagagagugacuuauu

SEQ ID NO: 16977 - RNA, 21 nt, RNAi
uuguaggaucucucacugaau

SEQ ID NO: 16978 - DNA, 21 bp, homo sapiens
gagagtgacttaaaggatgat

SEQ ID NO: 16979 - RNA, 21 nt, RNAi
gagugacuuaaaggaugauuu

SEQ ID NO: 16980 - RNA, 21 nt, RNAi
uucucacugaauuuccuacua

SEQ ID NO: 16981 - DNA, 21 bp, homo sapiens
gagtgacttaaaggatgatga

SEQ ID NO: 16982 - RNA, 21 nt, RNAi
gugacuuaaaggaugaugauu

SEQ ID NO: 16983 - RNA, 21 nt, RNAi
uucacugaauuuccuacuacu

SEQ ID NO: 16984 - DNA, 21 bp, homo sapiens
gacttaaaggatgatgatgca

SEQ ID NO: 16985 - RNA, 21 nt, RNAi
cuuaaaggaugaugaugcauu

SEQ ID NO: 16986 - RNA, 21 nt, RNAi
uugaauuuccuacuacuacgu

SEQ ID NO: 16987 - DNA, 21 bp, homo sapiens
gacctcgtcatgtacagcaag

SEQ ID NO: 16988 - RNA, 21 nt, RNAi
ccucgucauguacagcaaguu

SEQ ID NO: 16989 - RNA, 21 nt, RNAi
uuggagcaguacaugucguuc

SEQ ID NO: 16990 - DNA, 21 bp, homo sapiens
gaataagcggaggcggagcgt

SEQ ID NO: 16991 - RNA, 21 nt, RNAi
auaagcggaggcggagcguuu

SEQ ID NO: 16992 - RNA, 21 nt, RNAi
uuuauucgccuccgccucgca

SEQ ID NO: 16993 - DNA, 21 bp, homo sapiens
gagcagcaggaggctgaggaa

SEQ ID NO: 16994 - RNA, 21 nt, RNAi
gcagcaggaggcugaggaauu

SEQ ID NO: 16995 - RNA, 21 nt, RNAi
uucgucguccuccgacuccuu

SEQ ID NO: 16996 - DNA, 21 bp, homo sapiens
gaggctgaggaacctaaagcc

SEQ ID NO: 16997 - RNA, 21 nt, RNAi
ggcugaggaaccuaaagccuu

SEQ ID NO: 16998 - RNA, 21 nt, RNAi
uuccgacuccuuggauuucgg

SEQ ID NO: 16999 - DNA, 21 bp, homo sapiens
gatgagatcgagaacctcctg

SEQ ID NO: 17000 - RNA, 21 nt, RNAi
ugagaucgagaaccuccuguu

SEQ ID NO: 17001 - RNA, 21 nt, RNAi
uuacucuagcucuuggaggac

SEQ ID NO: 17002 - DNA, 21 bp, homo sapiens
gagatcgagaacctcctggac

SEQ ID NO: 17003 - RNA, 21 nt, RNAi
gaucgagaaccuccuggacuu

SEQ ID NO: 17004 - RNA, 21 nt, RNAi
uucuagcucuuggaggaccug

SEQ ID NO: 17005 - DNA, 21 bp, homo sapiens
gatcgagaacctcctggacag

SEQ ID NO: 17006 - RNA, 21 nt, RNAi
ucgagaaccuccuggacaguu

SEQ ID NO: 17007 - RNA, 21 nt, RNAi
uuagcucuuggaggaccuguc

SEQ ID NO: 17008 - DNA, 21 bp, homo sapiens
gagaacctcctggacagtgac

SEQ ID NO: 17009 - RNA, 21 nt, RNAi
gaaccuccuggacagugacuu

SEQ ID NO: 17010 - RNA, 21 nt, RNAi
uucuuggaggaccugucacug

SEQ ID NO: 17011 - DNA, 21 bp, homo sapiens
gaacctcctggacagtgacca

SEQ ID NO: 17012 - RNA, 21 nt, RNAi
accuccuggacagugaccauu

SEQ ID NO: 17013 - RNA, 21 nt, RNAi
uuuggaggaccugucacuggu

SEQ ID NO: 17014 - DNA, 21 bp, homo sapiens
gacagtgaccaccgagagctg

SEQ ID NO: 17015 - RNA, 21 nt, RNAi
cagugaccaccgagagcuguu

SEQ ID NO: 17016 - RNA, 21 nt, RNAi
uugucacugguggcucucgac

SEQ ID NO: 17017 - DNA, 21 bp, homo sapiens
gaccaccgagagctgattgga

SEQ ID NO: 17018 - RNA, 21 nt, RNAi
ccaccgagagcugauuggauu

SEQ ID NO: 17019 - RNA, 21 nt, RNAi
uugguggcucucgacuaaccu

SEQ ID NO: 17020 - DNA, 21 bp, homo sapiens
gagagctgattggagattact

SEQ ID NO: 17021 - RNA, 21 nt, RNAi
gagcugauuggagauuacuuu

SEQ ID NO: 17022 - RNA, 21 nt, RNAi
uucucgacuaaccucuaauga

SEQ ID NO: 17023 - DNA, 21 bp, homo sapiens
gagctgattggagattactct

SEQ ID NO: 17024 - RNA, 21 nt, RNAi
gcugauuggagauuacucuuu

SEQ ID NO: 17025 - RNA, 21 nt, RNAi
uucgacuaaccucuaaugaga

SEQ ID NO: 17026 - DNA, 21 bp, homo sapiens
gattggagattactctaaggc

SEQ ID NO: 17027 - RNA, 21 nt, RNAi
uuggagauuacucuaaggcuu

SEQ ID NO: 17028 - RNA, 21 nt, RNAi
uuaaccucuaaugagauuccg

SEQ ID NO: 17029 - DNA, 21 bp, homo sapiens
gagattactctaaggccttcc

SEQ ID NO: 17030 - RNA, 21 nt, RNAi
gauuacucuaaggccuuccuu

SEQ ID NO: 17031 - RNA, 21 nt, RNAi
uucuaaugagauuccggaagg

SEQ ID NO: 17032 - DNA, 21 bp, homo sapiens
gattactctaaggccttcctc

SEQ ID NO: 17033 - RNA, 21 nt, RNAi
uuacucuaaggccuuccucuu

SEQ ID NO: 17034 - RNA, 21 nt, RNAi
uuaaugagauuccggaaggag

SEQ ID NO: 17035 - DNA, 21 bp, homo sapiens
gacagtagacggaaagcacca

SEQ ID NO: 17036 - RNA, 21 nt, RNAi
caguagacggaaagcaccauu

SEQ ID NO: 17037 - RNA, 21 nt, RNAi
uugucaucugccuuucguggu

SEQ ID NO: 17038 - DNA, 21 bp, homo sapiens
gacggaaagcaccaagacctc

SEQ ID NO: 17039 - RNA, 21 nt, RNAi
cggaaagcaccaagaccucuu

SEQ ID NO: 17040 - RNA, 21 nt, RNAi
uugccuuucgugguucuggag

SEQ ID NO: 17041 - DNA, 21 bp, homo sapiens
gaaagcaccaagacctcaagt

SEQ ID NO: 17042 - RNA, 21 nt, RNAi
aagcaccaagaccucaaguuu

SEQ ID NO: 17043 - RNA, 21 nt, RNAi
uuuucgugguucuggaguuca

SEQ ID NO: 17044 - DNA, 21 bp, homo sapiens
gacctcaagtacatctcacca

SEQ ID NO: 17045 - RNA, 21 nt, RNAi
ccucaaguacaucucaccauu

SEQ ID NO: 17046 - RNA, 21 nt, RNAi
uuggaguucauguagaguggu

SEQ ID NO: 17047 - DNA, 21 bp, homo sapiens
gataagtttgtgattgtagac

SEQ ID NO: 17048 - RNA, 21 nt, RNAi
uaaguuugugauuguagacuu

SEQ ID NO: 17049 - RNA, 21 nt, RNAi
uuauucaaacacuaacaucug

SEQ ID NO: 17050 - DNA, 21 bp, homo sapiens
gacgccgagagcttcctactg

SEQ ID NO: 17051 - RNA, 21 nt, RNAi
cgccgagagcuuccuacuguu

SEQ ID NO: 17052 - RNA, 21 nt, RNAi
uugcggcucucgaaggaugac

SEQ ID NO: 17053 - DNA, 21 bp, homo sapiens
gagagcttcctactgaagagc

SEQ ID NO: 17054 - RNA, 21 nt, RNAi
gagcuuccuacugaagagcuu

SEQ ID NO: 17055 - RNA, 21 nt, RNAi
uucucgaaggaugacuucucg

SEQ ID NO: 17056 - DNA, 21 bp, homo sapiens
gacaagagagtcatcctcatt

SEQ ID NO: 17057 - RNA, 21 nt, RNAi
caagagagucauccucauuuu

SEQ ID NO: 17058 - RNA, 21 nt, RNAi
uuguucucucaguaggaguaa

SEQ ID NO: 17059 - DNA, 21 bp, homo sapiens
gaacgagaccgtgctgtcaac

SEQ ID NO: 17060 - RNA, 21 nt, RNAi
acgagaccgugcugucaacuu

SEQ ID NO: 17061 - RNA, 21 nt, RNAi
uuugcucuggcacgacaguug

SEQ ID NO: 17062 - DNA, 21 bp, homo sapiens
gagaccgtgctgtcaacgact

SEQ ID NO: 17063 - RNA, 21 nt, RNAi
gaccgugcugucaacgacuuu

SEQ ID NO: 17064 - RNA, 21 nt, RNAi
uucuggcacgacaguugcuga

SEQ ID NO: 17065 - DNA, 21 bp, homo sapiens
gaccgtgctgtcaacgactac

SEQ ID NO: 17066 - RNA, 21 nt, RNAi
ccgugcugucaacgacuacuu

SEQ ID NO: 17067 - RNA, 21 nt, RNAi
uuggcacgacaguugcugaug

SEQ ID NO: 17068 - DNA, 21 bp, homo sapiens
gagatgtatatcctgaaaggc

SEQ ID NO: 17069 - RNA, 21 nt, RNAi
gauguauauccugaaaggcuu

SEQ ID NO: 17070 - RNA, 21 nt, RNAi
uucuacauauaggacuuuccg

SEQ ID NO: 17071 - DNA, 21 bp, homo sapiens
gatgtatatcctgaaaggcgg

SEQ ID NO: 17072 - RNA, 21 nt, RNAi
uguauauccugaaaggcgguu

SEQ ID NO: 17073 - RNA, 21 nt, RNAi
uuacauauaggacuuuccgcc

SEQ ID NO: 17074 - DNA, 21 bp, homo sapiens
gaaaggcggctacaaggagtt

SEQ ID NO: 17075 - RNA, 21 nt, RNAi
aaggcggcuacaaggaguuuu

SEQ ID NO: 17076 - RNA, 21 nt, RNAi
uuuuccgccgauguuccucaa

SEQ ID NO: 17077 - DNA, 21 bp, homo sapiens
gaaccacgaggccttcaagga

SEQ ID NO: 17078 - RNA, 21 nt, RNAi
accacgaggccuucaaggauu

SEQ ID NO: 17079 - RNA, 21 nt, RNAi
uuuggugcuccggaaguuccu

SEQ ID NO: 17080 - DNA, 21 bp, homo sapiens
gaggccttcaaggatgagcta

SEQ ID NO: 17081 - RNA, 21 nt, RNAi
ggccuucaaggaugagcuauu

SEQ ID NO: 17082 - RNA, 21 nt, RNAi
uuccggaaguuccuacucgau

SEQ ID NO: 17083 - DNA, 21 bp, homo sapiens
gatgagctaaagaccttccgc

SEQ ID NO: 17084 - RNA, 21 nt, RNAi
ugagcuaaagaccuuccgcuu

SEQ ID NO: 17085 - RNA, 21 nt, RNAi
uuacucgauuucuggaaggcg

SEQ ID NO: 17086 - DNA, 21 bp, homo sapiens
gagctaaagaccttccgcctc

SEQ ID NO: 17087 - RNA, 21 nt, RNAi
gcuaaagaccuuccgccucuu

SEQ ID NO: 17088 - RNA, 21 nt, RNAi
uucgauuucuggaaggcggag

SEQ ID NO: 17089 - DNA, 21 bp, homo sapiens
gaccttccgcctcaagactcg

SEQ ID NO: 17090 - RNA, 21 nt, RNAi
ccuuccgccucaagacucguu

SEQ ID NO: 17091 - RNA, 21 nt, RNAi
uuggaaggcggaguucugagc

SEQ ID NO: 17092 - DNA, 21 bp, homo sapiens
gaggcctcaggtgctgtccat

SEQ ID NO: 17093 - RNA, 21 nt, RNAi
ggccucaggugcuguccauuu

SEQ ID NO: 17094 - RNA, 21 nt, RNAi
uuccggaguccacgacaggua

SEQ ID NO: 17095 - DNA, 21 bp, homo sapiens
gaaagatggtgtggtgtcctg

SEQ ID NO: 17096 - RNA, 21 nt, RNAi
aagauggugugguguccuguu

SEQ ID NO: 17097 - RNA, 21 nt, RNAi
uuuucuaccacaccacaggac

SEQ ID NO: 17098 - DNA, 21 bp, homo sapiens
gatggtgtggtgtcctgcctg

SEQ ID NO: 17099 - RNA, 21 nt, RNAi
uggugugguguccugccuguu

SEQ ID NO: 17100 - RNA, 21 nt, RNAi
uuaccacaccacaggacggac

SEQ ID NO: 17101 - DNA, 21 bp, homo sapiens
gagcttcttgtttccttgtta

SEQ ID NO: 17102 - RNA, 21 nt, RNAi
gcuucuuguuuccuuguuauu

SEQ ID NO: 17103 - RNA, 21 nt, RNAi
uucgaagaacaaaggaacaau

SEQ ID NO: 17104 - DNA, 21 bp, homo sapiens
gaaacgctcctttgtgtgtgt

SEQ ID NO: 17105 - RNA, 21 nt, RNAi
aacgcuccuuuguguguguuu

SEQ ID NO: 17106 - RNA, 21 nt, RNAi
uuuugcgaggaaacacacaca

SEQ ID NO: 17107 - DNA, 21 bp, homo sapiens
gagctaaactccttcctggcc

SEQ ID NO: 17108 - RNA, 21 nt, RNAi
gcuaaacuccuuccuggccuu

SEQ ID NO: 17109 - RNA, 21 nt, RNAi
uucgauuugaggaaggaccgg

SEQ ID NO: 17110 - DNA, 21 bp, homo sapiens
gaaccgtggtatgtctgccat

SEQ ID NO: 17111 - RNA, 21 nt, RNAi
accgugguaugucugccauuu

SEQ ID NO: 17112 - RNA, 21 nt, RNAi
uuuggcaccauacagacggua

SEQ ID NO: 17113 - DNA, 21 bp, homo sapiens
gagcacctccagcctgaacag

SEQ ID NO: 17114 - RNA, 21 nt, RNAi
gcaccuccagccugaacaguu

SEQ ID NO: 17115 - RNA, 21 nt, RNAi
uucguggaggucggacuuguc

SEQ ID NO: 17116 - DNA, 21 bp, homo sapiens
gaacagaagctcttactcttt

SEQ ID NO: 17117 - RNA, 21 nt, RNAi
acagaagcucuuacucuuuuu

SEQ ID NO: 17118 - RNA, 21 nt, RNAi
uuugucuucgagaaugagaaa

SEQ ID NO: 17119 - DNA, 21 bp, homo sapiens
gaagctcttactctttcctat

SEQ ID NO: 17120 - RNA, 21 nt, RNAi
agcucuuacucuuuccuauuu

SEQ ID NO: 17121 - RNA, 21 nt, RNAi
uuucgagaaugagaaaggaua

SEQ ID NO: 17122 - DNA, 21 bp, homo sapiens
gacacttccgtagactgttta

SEQ ID NO: 17123 - RNA, 21 nt, RNAi
cacuuccguagacuguuuauu

SEQ ID NO: 17124 - RNA, 21 nt, RNAi
uugugaaggcaucugacaaau

SEQ ID NO: 17125 - DNA, 21 bp, homo sapiens
gaatcatgagcctgctggaag

SEQ ID NO: 17126 - RNA, 21 nt, RNAi
aucaugagccugcuggaaguu

SEQ ID NO: 17127 - RNA, 21 nt, RNAi
uuuaguacucggacgaccuuc

SEQ ID NO: 17128 - DNA, 21 bp, homo sapiens
gactgctcagaacttgctgct

SEQ ID NO: 17129 - RNA, 21 nt, RNAi
cugcucagaacuugcugcuuu

SEQ ID NO: 17130 - RNA, 21 nt, RNAi
uugacgagucuugaacgacga

SEQ ID NO: 17131 - DNA, 21 bp, homo sapiens
gaacttgctgctgtcttgttg

SEQ ID NO: 17132 - RNA, 21 nt, RNAi
acuugcugcugucuuguuguu

SEQ ID NO: 17133 - RNA, 21 nt, RNAi
uuugaacgacgacagaacaac

SEQ ID NO: 17134 - DNA, 21 bp, homo sapiens
gatggatggaaggttggatgg

SEQ ID NO: 17135 - RNA, 21 nt, RNAi
uggauggaagguuggaugguu

SEQ ID NO: 17136 - RNA, 21 nt, RNAi
uuaccuaccuuccaaccuacc

SEQ ID NO: 17137 - DNA, 21 bp, homo sapiens
gatggaaggttggatggatgg

SEQ ID NO: 17138 - RNA, 21 nt, RNAi
uggaagguuggauggaugguu

SEQ ID NO: 17139 - RNA, 21 nt, RNAi
uuaccuuccaaccuaccuacc

SEQ ID NO: 17140 - DNA, 21 bp, homo sapiens
gatgcgcagtgccttgcatac

SEQ ID NO: 17141 - RNA, 21 nt, RNAi
ugcgcagugccuugcauacuu

SEQ ID NO: 17142 - RNA, 21 nt, RNAi
uuacgcgucacggaacguaug

SEQ ID NO: 17143 - DNA, 21 bp, homo sapiens
gagcatgacacctgcagcagg

SEQ ID NO: 17144 - RNA, 21 nt, RNAi
gcaugacaccugcagcagguu

SEQ ID NO: 17145 - RNA, 21 nt, RNAi
uucguacuguggacgucgucc

SEQ ID NO: 17146 - DNA, 21 bp, homo sapiens
gacacctgcagcaggaatata

SEQ ID NO: 17147 - RNA, 21 nt, RNAi
caccugcagcaggaauauauu

SEQ ID NO: 17148 - RNA, 21 nt, RNAi
uuguggacgucguccuuauau

SEQ ID NO: 17149 - DNA, 21 bp, homo sapiens
gaatatatgtgtgcctatttg

SEQ ID NO: 17150 - RNA, 21 nt, RNAi
auauaugugugccuauuuguu

SEQ ID NO: 17151 - RNA, 21 nt, RNAi
uuuauauacacacggauaaac

SEQ ID NO: 17152 - DNA, 21 bp, homo sapiens
gagctattcaagaggaaatgt

SEQ ID NO: 17153 - RNA, 21 nt, RNAi
gcuauucaagaggaaauguuu

SEQ ID NO: 17154 - RNA, 21 nt, RNAi
uucgauaaguucuccuuuaca

SEQ ID NO: 17155 - DNA, 21 bp, homo sapiens
gaggaaatgtcacagaagcag

SEQ ID NO: 17156 - RNA, 21 nt, RNAi
ggaaaugucacagaagcaguu

SEQ ID NO: 17157 - RNA, 21 nt, RNAi
uuccuuuacagugucuucguc

SEQ ID NO: 17158 - DNA, 21 bp, homo sapiens
gaaatgtcacagaagcagcta

SEQ ID NO: 17159 - RNA, 21 nt, RNAi
aaugucacagaagcagcuauu

SEQ ID NO: 17160 - RNA, 21 nt, RNAi
uuuuacagugucuucgucgau

SEQ ID NO: 17161 - DNA, 21 bp, homo sapiens
gaagcagctaaaccaaggact

SEQ ID NO: 17162 - RNA, 21 nt, RNAi
agcagcuaaaccaaggacuuu

SEQ ID NO: 17163 - RNA, 21 nt, RNAi
uuucgucgauuugguuccuga

SEQ ID NO: 17164 - DNA, 21 bp, homo sapiens
tactgaggaagatgatggatt

SEQ ID NO: 17165 - RNA, 21 nt, RNAi
cugaggaagaugauggauuuu

SEQ ID NO: 17166 - RNA, 21 nt, RNAi
uugacuccuucuacuaccuaa

SEQ ID NO: 17167 - DNA, 21 bp, homo sapiens
tagagagtgacttaaaggatg

SEQ ID NO: 17168 - RNA, 21 nt, RNAi
gagagugacuuaaaggauguu

SEQ ID NO: 17169 - RNA, 21 nt, RNAi
uucucucacugaauuuccuac

SEQ ID NO: 17170 - DNA, 21 bp, homo sapiens
taaaggatgatgatgcagttc

SEQ ID NO: 17171 - RNA, 21 nt, RNAi
aaggaugaugaugcaguucuu

SEQ ID NO: 17172 - RNA, 21 nt, RNAi
uuuuccuacuacuacgucaag

SEQ ID NO: 17173 - DNA, 21 bp, homo sapiens
tacagcaagtgccagcggctc

SEQ ID NO: 17174 - RNA, 21 nt, RNAi
cagcaagugccagcggcucuu

SEQ ID NO: 17175 - RNA, 21 nt, RNAi
uugucguucacggucgccgag

SEQ ID NO: 17176 - DNA, 21 bp, homo sapiens
tactctaaggccttcctccta

SEQ ID NO: 17177 - RNA, 21 nt, RNAi
cucuaaggccuuccuccuauu

SEQ ID NO: 17178 - RNA, 21 nt, RNAi
uugagauuccggaaggaggau

SEQ ID NO: 17179 - DNA, 21 bp, homo sapiens
taaggccttcctcctacagac

SEQ ID NO: 17180 - RNA, 21 nt, RNAi
aggccuuccuccuacagacuu

SEQ ID NO: 17181 - RNA, 21 nt, RNAi
uuuccggaaggaggaugucug

SEQ ID NO: 17182 - DNA, 21 bp, homo sapiens
tacagacagtagacggaaagc

SEQ ID NO: 17183 - RNA, 21 nt, RNAi
cagacaguagacggaaagcuu

SEQ ID NO: 17184 - RNA, 21 nt, RNAi
uugucugucaucugccuuucg

SEQ ID NO: 17185 - DNA, 21 bp, homo sapiens
tagacggaaagcaccaagacc

SEQ ID NO: 17186 - RNA, 21 nt, RNAi
gacggaaagcaccaagaccuu

SEQ ID NO: 17187 - RNA, 21 nt, RNAi
uucugccuuucgugguucugg

SEQ ID NO: 17188 - DNA, 21 bp, homo sapiens
tacatctcaccagaaacgatg

SEQ ID NO: 17189 - RNA, 21 nt, RNAi
caucucaccagaaacgauguu

SEQ ID NO: 17190 - RNA, 21 nt, RNAi
uuguagaguggucuuugcuac

SEQ ID NO: 17191 - DNA, 21 bp, homo sapiens
taagtttgtgattgtagactg

SEQ ID NO: 17192 - RNA, 21 nt, RNAi
aguuugugauuguagacuguu

SEQ ID NO: 17193 - RNA, 21 nt, RNAi
uuucaaacacuaacaucugac

SEQ ID NO: 17194 - DNA, 21 bp, homo sapiens
tagcctggacaagagagtcat

SEQ ID NO: 17195 - RNA, 21 nt, RNAi
gccuggacaagagagucauuu

SEQ ID NO: 17196 - RNA, 21 nt, RNAi
uucggaccuguucucucagua

SEQ ID NO: 17197 - DNA, 21 bp, homo sapiens
tatatcctgaaaggcggctac

SEQ ID NO: 17198 - RNA, 21 nt, RNAi
uauccugaaaggcggcuacuu

SEQ ID NO: 17199 - RNA, 21 nt, RNAi
uuauaggacuuuccgccgaug

SEQ ID NO: 17200 - DNA, 21 bp, homo sapiens
tatcctgaaaggcggctacaa

SEQ ID NO: 17201 - RNA, 21 nt, RNAi
uccugaaaggcggcuacaauu

SEQ ID NO: 17202 - RNA, 21 nt, RNAi
uuaggacuuuccgccgauguu

SEQ ID NO: 17203 - DNA, 21 bp, homo sapiens
taaagaccttccgcctcaaga

SEQ ID NO: 17204 - RNA, 21 nt, RNAi
aagaccuuccgccucaagauu

SEQ ID NO: 17205 - RNA, 21 nt, RNAi
uuuucuggaaggcggaguucu

SEQ ID NO: 17206 - DNA, 21 bp, homo sapiens
taataccagcttaaaggcagt

SEQ ID NO: 17207 - RNA, 21 nt, RNAi
auaccagcuuaaaggcaguuu

SEQ ID NO: 17208 - RNA, 21 nt, RNAi
uuuauggucgaauuuccguca

SEQ ID NO: 17209 - DNA, 21 bp, homo sapiens
taccagcttaaaggcagtatt

SEQ ID NO: 17210 - RNA, 21 nt, RNAi
ccagcuuaaaggcaguauuuu

SEQ ID NO: 17211 - RNA, 21 nt, RNAi
uuggucgaauuuccgucauaa

SEQ ID NO: 17212 - DNA, 21 bp, homo sapiens
taaactccttcctggcctgag

SEQ ID NO: 17213 - RNA, 21 nt, RNAi
aacuccuuccuggccugaguu

SEQ ID NO: 17214 - RNA, 21 nt, RNAi
uuuugaggaaggaccggacuc

SEQ ID NO: 17215 - DNA, 21 bp, homo sapiens
taatctctgtaggaaccgtgg

SEQ ID NO: 17216 - RNA, 21 nt, RNAi
aucucuguaggaaccgugguu

SEQ ID NO: 17217 - RNA, 21 nt, RNAi
uuuagagacauccuuggcacc

SEQ ID NO: 17218 - DNA, 21 bp, homo sapiens
taggaaccgtggtatgtctgc

SEQ ID NO: 17219 - RNA, 21 nt, RNAi
ggaaccgugguaugucugcuu

SEQ ID NO: 17220 - RNA, 21 nt, RNAi
uuccuuggcaccauacagacg

SEQ ID NO: 17221 - DNA, 21 bp, homo sapiens
tacgagcacctccagcctgaa

SEQ ID NO: 17222 - RNA, 21 nt, RNAi
cgagcaccuccagccugaauu

SEQ ID NO: 17223 - RNA, 21 nt, RNAi
uugcucguggaggucggacuu

SEQ ID NO: 17224 - DNA, 21 bp, homo sapiens
tactctttcctatttcagtgt

SEQ ID NO: 17225 - RNA, 21 nt, RNAi
cucuuuccuauuucaguguuu

SEQ ID NO: 17226 - RNA, 21 nt, RNAi
uugagaaaggauaaagucaca

SEQ ID NO: 17227 - DNA, 21 bp, homo sapiens
tatttcagtgttacctgtgtg

SEQ ID NO: 17228 - RNA, 21 nt, RNAi
uuucaguguuaccuguguguu

SEQ ID NO: 17229 - RNA, 21 nt, RNAi
uuaaagucacaauggacacac

SEQ ID NO: 17230 - DNA, 21 bp, homo sapiens
tacctgtgtgcttggtctgtt

SEQ ID NO: 17231 - RNA, 21 nt, RNAi
ccugugugcuuggucuguuuu

SEQ ID NO: 17232 - RNA, 21 nt, RNAi
uuggacacacgaaccagacaa

SEQ ID NO: 17233 - DNA, 21 bp, homo sapiens
taaggcctgaatcatgagcct

SEQ ID NO: 17234 - RNA, 21 nt, RNAi
aggccugaaucaugagccuuu

SEQ ID NO: 17235 - RNA, 21 nt, RNAi
uuuccggacuuaguacucgga

SEQ ID NO: 17236 - DNA, 21 bp, homo sapiens
tatatgtgtgcctatttgtgt

SEQ ID NO: 17237 - RNA, 21 nt, RNAi
uaugugugccuauuuguguuu

SEQ ID NO: 17238 - RNA, 21 nt, RNAi
uuauacacacggauaaacaca

SEQ ID NO: 17239 - DNA, 21 bp, homo sapiens
tatgtgtgcctatttgtgtgg

SEQ ID NO: 17240 - RNA, 21 nt, RNAi
ugugugccuauuugugugguu

SEQ ID NO: 17241 - RNA, 21 nt, RNAi
uuacacacggauaaacacacc

SEQ ID NO: 17242 - DNA, 21 bp, homo sapiens
tattcaagaggaaatgtcaca

SEQ ID NO: 17243 - RNA, 21 nt, RNAi
uucaagaggaaaugucacauu

SEQ ID NO: 17244 - RNA, 21 nt, RNAi
uuaaguucuccuuuacagugu

SEQ ID NO: 17245 - DNA, 21 bp, homo sapiens
taaagcactgagcaagttgag

SEQ ID NO: 17246 - RNA, 21 nt, RNAi
aagcacugagcaaguugaguu

SEQ ID NO: 17247 - RNA, 21 nt, RNAi
uuuucgugacucguucaacuc

SEQ ID NO: 17248 - DNA, 21 bp, homo sapiens
aatcctccgaatcttctgatg

SEQ ID NO: 17249 - RNA, 21 nt, RNAi
uccuccgaaucuucugauguu

SEQ ID NO: 17250 - RNA, 21 nt, RNAi
uuaggaggcuuagaagacuac

SEQ ID NO: 17251 - DNA, 21 bp, homo sapiens
aatcttctgatgcaggtctct

SEQ ID NO: 17252 - RNA, 21 nt, RNAi
ucuucugaugcaggucucuuu

SEQ ID NO: 17253 - RNA, 21 nt, RNAi
uuagaagacuacguccagaga

SEQ ID NO: 17254 - DNA, 21 bp, homo sapiens
aaatcactgtgtcacgatgag

SEQ ID NO: 17255 - RNA, 21 nt, RNAi
aucacugugucacgaugaguu

SEQ ID NO: 17256 - RNA, 21 nt, RNAi
uuuagugacacagugcuacuc

SEQ ID NO: 17257 - DNA, 21 bp, homo sapiens
aatcactgtgtcacgatgaga

SEQ ID NO: 17258 - RNA, 21 nt, RNAi
ucacugugucacgaugagauu

SEQ ID NO: 17259 - RNA, 21 nt, RNAi
uuagugacacagugcuacucu

SEQ ID NO: 17260 - DNA, 21 bp, homo sapiens
aagtacatctcaccagaaacg

SEQ ID NO: 17261 - RNA, 21 nt, RNAi
guacaucucaccagaaacguu

SEQ ID NO: 17262 - RNA, 21 nt, RNAi
uucauguagaguggucuuugc

SEQ ID NO: 17263 - DNA, 21 bp, homo sapiens
cagacgtttgaacaggccatc

SEQ ID NO: 17264 - RNA, 21 nt, RNAi
gacguuugaacaggccaucuu

SEQ ID NO: 17265 - RNA, 21 nt, RNAi
uucugcaaacuuguccgguag

SEQ ID NO: 17266 - DNA, 21 bp, homo sapiens
cagccggatcattcgaaacga

SEQ ID NO: 17267 - RNA, 21 nt, RNAi
gccggaucauucgaaacgauu

SEQ ID NO: 17268 - RNA, 21 nt, RNAi
uucggccuaguaagcuuugcu

SEQ ID NO: 17269 - DNA, 21 bp, homo sapiens
cagtttgccatcagacgcttc

SEQ ID NO: 17270 - RNA, 21 nt, RNAi
guuugccaucagacgcuucuu

SEQ ID NO: 17271 - RNA, 21 nt, RNAi
uucaaacgguagucugcgaag

SEQ ID NO: 17272 - DNA, 21 bp, homo sapiens
catcagacgcttccagtctat

SEQ ID NO: 17273 - RNA, 21 nt, RNAi
ucagacgcuuccagucuauuu

SEQ ID NO: 17274 - RNA, 21 nt, RNAi
uuagucugcgaaggucagaua

SEQ ID NO: 17275 - DNA, 21 bp, homo sapiens
catcctagagagtgacttaaa

SEQ ID NO: 17276 - RNA, 21 nt, RNAi
uccuagagagugacuuaaauu

SEQ ID NO: 17277 - RNA, 21 nt, RNAi
uuaggaucucucacugaauuu

SEQ ID NO: 17278 - DNA, 21 bp, homo sapiens
catggagagtctcattagtgc

SEQ ID NO: 17279 - RNA, 21 nt, RNAi
uggagagucucauuagugcuu

SEQ ID NO: 17280 - RNA, 21 nt, RNAi
uuaccucucagaguaaucacg

SEQ ID NO: 17281 - DNA, 21 bp, homo sapiens
cactgtgtcacgatgagatcg

SEQ ID NO: 17282 - RNA, 21 nt, RNAi
cugugucacgaugagaucguu

SEQ ID NO: 17283 - RNA, 21 nt, RNAi
uugacacagugcuacucuagc

SEQ ID NO: 17284 - DNA, 21 bp, homo sapiens
caccgagagctgattggagat

SEQ ID NO: 17285 - RNA, 21 nt, RNAi
ccgagagcugauuggagauuu

SEQ ID NO: 17286 - RNA, 21 nt, RNAi
uuggcucucgacuaaccucua

SEQ ID NO: 17287 - DNA, 21 bp, homo sapiens
cagacagtagacggaaagcac

SEQ ID NO: 17288 - RNA, 21 nt, RNAi
gacaguagacggaaagcacuu

SEQ ID NO: 17289 - RNA, 21 nt, RNAi
uucugucaucugccuuucgug

SEQ ID NO: 17290 - DNA, 21 bp, homo sapiens
cagtagacggaaagcaccaag

SEQ ID NO: 17291 - RNA, 21 nt, RNAi
guagacggaaagcaccaaguu

SEQ ID NO: 17292 - RNA, 21 nt, RNAi
uucaucugccuuucgugguuc

SEQ ID NO: 17293 - DNA, 21 bp, homo sapiens
caagtacatctcaccagaaac

SEQ ID NO: 17294 - RNA, 21 nt, RNAi
aguacaucucaccagaaacuu

SEQ ID NO: 17295 - RNA, 21 nt, RNAi
uuucauguagaguggucuuug

SEQ ID NO: 17296 - DNA, 21 bp, homo sapiens
cagcaacatcgtggataagtt

SEQ ID NO: 17297 - RNA, 21 nt, RNAi
gcaacaucguggauaaguuuu

SEQ ID NO: 17298 - RNA, 21 nt, RNAi
uucguuguagcaccuauucaa

SEQ ID NO: 17299 - DNA, 21 bp, homo sapiens
caacatcgtggataagtttgt

SEQ ID NO: 17300 - RNA, 21 nt, RNAi
acaucguggauaaguuuguuu

SEQ ID NO: 17301 - RNA, 21 nt, RNAi
uuuguagcaccuauucaaaca

SEQ ID NO: 17302 - DNA, 21 bp, homo sapiens
gaatcctccgaatcttctgat

SEQ ID NO: 17303 - RNA, 21 nt, RNAi
auccuccgaaucuucugauuu

SEQ ID NO: 17304 - RNA, 21 nt, RNAi
uuuaggaggcuuagaagacua

SEQ ID NO: 17305 - DNA, 21 bp, homo sapiens
gacgtttgaacaggccatcca

SEQ ID NO: 17306 - RNA, 21 nt, RNAi
cguuugaacaggccauccauu

SEQ ID NO: 17307 - RNA, 21 nt, RNAi
uugcaaacuuguccgguaggu

SEQ ID NO: 17308 - DNA, 21 bp, homo sapiens
gatcattcgaaacgagcagtt

SEQ ID NO: 17309 - RNA, 21 nt, RNAi
ucauucgaaacgagcaguuuu

SEQ ID NO: 17310 - RNA, 21 nt, RNAi
uuaguaagcuuugcucgucaa

SEQ ID NO: 17311 - DNA, 21 bp, homo sapiens
gagaatgtgcgcttctggaag

SEQ ID NO: 17312 - RNA, 21 nt, RNAi
gaaugugcgcuucuggaaguu

SEQ ID NO: 17313 - RNA, 21 nt, RNAi
uucuuacacgcgaagaccuuc

SEQ ID NO: 17314 - DNA, 21 bp, homo sapiens
gacatcctagagagtgactta

SEQ ID NO: 17315 - RNA, 21 nt, RNAi
cauccuagagagugacuuauu

SEQ ID NO: 17316 - RNA, 21 nt, RNAi
uuguaggaucucucacugaau

SEQ ID NO: 17317 - DNA, 21 bp, homo sapiens
gagctgattggagattactct

SEQ ID NO: 17318 - RNA, 21 nt, RNAi
gcugauuggagauuacucuuu

SEQ ID NO: 17319 - RNA, 21 nt, RNAi
uucgacuaaccucuaaugaga

SEQ ID NO: 17320 - DNA, 21 bp, homo sapiens
gagattactctaaggccttcc

SEQ ID NO: 17321 - RNA, 21 nt, RNAi
gauuacucuaaggccuuccuu

SEQ ID NO: 17322 - RNA, 21 nt, RNAi
uucuaaugagauuccggaagg

SEQ ID NO: 17323 - DNA, 21 bp, homo sapiens
gattactctaaggccttcctc

SEQ ID NO: 17324 - RNA, 21 nt, RNAi
uuacucuaaggccuuccucuu

SEQ ID NO: 17325 - RNA, 21 nt, RNAi
uuaaugagauuccggaaggag

SEQ ID NO: 17326 - DNA, 21 bp, homo sapiens
gacagtagacggaaagcacca

SEQ ID NO: 17327 - RNA, 21 nt, RNAi
caguagacggaaagcaccauu

SEQ ID NO: 17328 - RNA, 21 nt, RNAi
uugucaucugccuuucguggu

SEQ ID NO: 17329 - DNA, 21 bp, homo sapiens
gatgtatatcctgaaaggcgg

SEQ ID NO: 17330 - RNA, 21 nt, RNAi
uguauauccugaaaggcgguu

SEQ ID NO: 17331 - RNA, 21 nt, RNAi
uuacauauaggacuuuccgcc

SEQ ID NO: 17332 - DNA, 21 bp, homo sapiens
gaaaggcggctacaaggagtt

SEQ ID NO: 17333 - RNA, 21 nt, RNAi
aaggcggcuacaaggaguuuu

SEQ ID NO: 17334 - RNA, 21 nt, RNAi
uuuuccgccgauguuccucaa

SEQ ID NO: 17335 - DNA, 21 bp, homo sapiens
tacagacagtagacggaaagc

SEQ ID NO: 17336 - RNA, 21 nt, RNAi
cagacaguagacggaaagcuu

SEQ ID NO: 17337 - RNA, 21 nt, RNAi
uugucugucaucugccuuucg

SEQ ID NO: 17338 - DNA, 21 bp, homo sapiens
aacctcagcgtcttcacctcc

SEQ ID NO: 17339 - RNA, 21 nt, RNAi
ccucagcgucuucaccuccuu

SEQ ID NO: 17340 - RNA, 21 nt, RNAi
uuggagucgcagaaguggagg

SEQ ID NO: 17341 - DNA, 21 bp, homo sapiens
aacaacatcagtcagctgctc

SEQ ID NO: 17342 - RNA, 21 nt, RNAi
caacaucagucagcugcucuu

SEQ ID NO: 17343 - RNA, 21 nt, RNAi
uuguuguagucagucgacgag

SEQ ID NO: 17344 - DNA, 21 bp, homo sapiens
aaacgctctgacatacattcc

SEQ ID NO: 17345 - RNA, 21 nt, RNAi
acgcucugacauacauuccuu

SEQ ID NO: 17346 - RNA, 21 nt, RNAi
uuugcgagacuguauguaagg

SEQ ID NO: 17347 - DNA, 21 bp, homo sapiens
aaagttcttatgctgcagaat

SEQ ID NO: 17348 - RNA, 21 nt, RNAi
aguucuuaugcugcagaauuu

SEQ ID NO: 17349 - RNA, 21 nt, RNAi
uuucaagaauacgacgucuua

SEQ ID NO: 17350 - DNA, 21 bp, homo sapiens
aagttcttatgctgcagaata

SEQ ID NO: 17351 - RNA, 21 nt, RNAi
guucuuaugcugcagaauauu

SEQ ID NO: 17352 - RNA, 21 nt, RNAi
uucaagaauacgacgucuuau

SEQ ID NO: 17353 - DNA, 21 bp, homo sapiens
aataatcagctaagacacgta

SEQ ID NO: 17354 - RNA, 21 nt, RNAi
uaaucagcuaagacacguauu

SEQ ID NO: 17355 - RNA, 21 nt, RNAi
uuauuagucgauucugugcau

SEQ ID NO: 17356 - DNA, 21 bp, homo sapiens
aagctctgcagaatttgcgaa

SEQ ID NO: 17357 - RNA, 21 nt, RNAi
gcucugcagaauuugcgaauu

SEQ ID NO: 17358 - RNA, 21 nt, RNAi
uucgagacgucuuaaacgcuu

SEQ ID NO: 17359 - DNA, 21 bp, homo sapiens
aatttgcgaagccttcaatcc

SEQ ID NO: 17360 - RNA, 21 nt, RNAi
uuugcgaagccuucaauccuu

SEQ ID NO: 17361 - RNA, 21 nt, RNAi
uuaaacgcuucggaaguuagg

SEQ ID NO: 17362 - DNA, 21 bp, homo sapiens
aagctgtttcagtggcctgca

SEQ ID NO: 17363 - RNA, 21 nt, RNAi
gcuguuucaguggccugcauu

SEQ ID NO: 17364 - RNA, 21 nt, RNAi
uucgacaaagucaccggacgu

SEQ ID NO: 17365 - DNA, 21 bp, homo sapiens
aagtttatcggcattgcaagc

SEQ ID NO: 17366 - RNA, 21 nt, RNAi
guuuaucggcauugcaagcuu

SEQ ID NO: 17367 - RNA, 21 nt, RNAi
uucaaauagccguaacguucg

SEQ ID NO: 17368 - DNA, 21 bp, homo sapiens
aaatacaccacataccagact

SEQ ID NO: 17369 - RNA, 21 nt, RNAi
auacaccacauaccagacuuu

SEQ ID NO: 17370 - RNA, 21 nt, RNAi
uuuaugugguguauggucuga

SEQ ID NO: 17371 - DNA, 21 bp, homo sapiens
aatacaccacataccagacta

SEQ ID NO: 17372 - RNA, 21 nt, RNAi
uacaccacauaccagacuauu

SEQ ID NO: 17373 - RNA, 21 nt, RNAi
uuaugugguguauggucugau

SEQ ID NO: 17374 - DNA, 21 bp, homo sapiens
aaacctctccagcttggtagt

SEQ ID NO: 17375 - RNA, 21 nt, RNAi
accucuccagcuugguaguuu

SEQ ID NO: 17376 - RNA, 21 nt, RNAi
uuuggagaggucgaaccauca

SEQ ID NO: 17377 - DNA, 21 bp, homo sapiens
aacctctccagcttggtagtt

SEQ ID NO: 17378 - RNA, 21 nt, RNAi
ccucuccagcuugguaguuuu

SEQ ID NO: 17379 - RNA, 21 nt, RNAi
uuggagaggucgaaccaucaa

SEQ ID NO: 17380 - DNA, 21 bp, homo sapiens
aattaggacactctccaacct

SEQ ID NO: 17381 - RNA, 21 nt, RNAi
uuaggacacucuccaaccuuu

SEQ ID NO: 17382 - RNA, 21 nt, RNAi
uuaauccugugagagguugga

SEQ ID NO: 17383 - DNA, 21 bp, homo sapiens
aaagaactaggatttcatagc

SEQ ID NO: 17384 - RNA, 21 nt, RNAi
agaacuaggauuucauagcuu

SEQ ID NO: 17385 - RNA, 21 nt, RNAi
uuucuugauccuaaaguaucg

SEQ ID NO: 17386 - DNA, 21 bp, homo sapiens
aagaactaggatttcatagca

SEQ ID NO: 17387 - RNA, 21 nt, RNAi
gaacuaggauuucauagcauu

SEQ ID NO: 17388 - RNA, 21 nt, RNAi
uucuugauccuaaaguaucgu

SEQ ID NO: 17389 - DNA, 21 bp, homo sapiens
aactaggatttcatagcaaca

SEQ ID NO: 17390 - RNA, 21 nt, RNAi
cuaggauuucauagcaacauu

SEQ ID NO: 17391 - RNA, 21 nt, RNAi
uugauccuaaaguaucguugu

SEQ ID NO: 17392 - DNA, 21 bp, homo sapiens
aacaatatcaggtcgatacct

SEQ ID NO: 17393 - RNA, 21 nt, RNAi
caauaucaggucgauaccuuu

SEQ ID NO: 17394 - RNA, 21 nt, RNAi
uuguuauaguccagcuaugga

SEQ ID NO: 17395 - DNA, 21 bp, homo sapiens
aatatcaggtcgatacctgag

SEQ ID NO: 17396 - RNA, 21 nt, RNAi
uaucaggucgauaccugaguu

SEQ ID NO: 17397 - RNA, 21 nt, RNAi
uuauaguccagcuauggacuc

SEQ ID NO: 17398 - DNA, 21 bp, homo sapiens
aactaagaacactgactctga

SEQ ID NO: 17399 - RNA, 21 nt, RNAi
cuaagaacacugacucugauu

SEQ ID NO: 17400 - RNA, 21 nt, RNAi
uugauucuugugacugagacu

SEQ ID NO: 17401 - DNA, 21 bp, homo sapiens
aagaacactgactctgaatgg

SEQ ID NO: 17402 - RNA, 21 nt, RNAi
gaacacugacucugaaugguu

SEQ ID NO: 17403 - RNA, 21 nt, RNAi
uucuugugacugagacuuacc

SEQ ID NO: 17404 - DNA, 21 bp, homo sapiens
aacactgactctgaatggtgc

SEQ ID NO: 17405 - RNA, 21 nt, RNAi
cacugacucugaauggugcuu

SEQ ID NO: 17406 - RNA, 21 nt, RNAi
uugugacugagacuuaccacg

SEQ ID NO: 17407 - DNA, 21 bp, homo sapiens
aatggtgcctcacaaataact

SEQ ID NO: 17408 - RNA, 21 nt, RNAi
uggugccucacaaauaacuuu

SEQ ID NO: 17409 - RNA, 21 nt, RNAi
uuaccacggaguguuuauuga

SEQ ID NO: 17410 - DNA, 21 bp, homo sapiens
aactggaactgcaaacctgga

SEQ ID NO: 17411 - RNA, 21 nt, RNAi
cuggaacugcaaaccuggauu

SEQ ID NO: 17412 - RNA, 21 nt, RNAi
uugaccuugacguuuggaccu

SEQ ID NO: 17413 - DNA, 21 bp, homo sapiens
aactgcaaacctggagagtct

SEQ ID NO: 17414 - RNA, 21 nt, RNAi
cugcaaaccuggagagucuuu

SEQ ID NO: 17415 - RNA, 21 nt, RNAi
uugacguuuggaccucucaga

SEQ ID NO: 17416 - DNA, 21 bp, homo sapiens
aaacctggagagtctgacttt

SEQ ID NO: 17417 - RNA, 21 nt, RNAi
accuggagagucugacuuuuu

SEQ ID NO: 17418 - RNA, 21 nt, RNAi
uuuggaccucucagacugaaa

SEQ ID NO: 17419 - DNA, 21 bp, homo sapiens
aacctggagagtctgacttta

SEQ ID NO: 17420 - RNA, 21 nt, RNAi
ccuggagagucugacuuuauu

SEQ ID NO: 17421 - RNA, 21 nt, RNAi
uuggaccucucagacugaaau

SEQ ID NO: 17422 - DNA, 21 bp, homo sapiens
aactggagcacagatctcatc

SEQ ID NO: 17423 - RNA, 21 nt, RNAi
cuggagcacagaucucaucuu

SEQ ID NO: 17424 - RNA, 21 nt, RNAi
uugaccucgugucuagaguag

SEQ ID NO: 17425 - DNA, 21 bp, homo sapiens
aaaccgtctgcaatcagttac

SEQ ID NO: 17426 - RNA, 21 nt, RNAi
accgucugcaaucaguuacuu

SEQ ID NO: 17427 - RNA, 21 nt, RNAi
uuuggcagacguuagucaaug

SEQ ID NO: 17428 - DNA, 21 bp, homo sapiens
aaccgtctgcaatcagttacc

SEQ ID NO: 17429 - RNA, 21 nt, RNAi
ccgucugcaaucaguuaccuu

SEQ ID NO: 17430 - RNA, 21 nt, RNAi
uuggcagacguuagucaaugg

SEQ ID NO: 17431 - DNA, 21 bp, homo sapiens
aatcagttacctaatctccaa

SEQ ID NO: 17432 - RNA, 21 nt, RNAi
ucaguuaccuaaucuccaauu

SEQ ID NO: 17433 - RNA, 21 nt, RNAi
uuagucaauggauuagagguu

SEQ ID NO: 17434 - DNA, 21 bp, homo sapiens
aatctccaagtgctagatctg

SEQ ID NO: 17435 - RNA, 21 nt, RNAi
ucuccaagugcuagaucuguu

SEQ ID NO: 17436 - RNA, 21 nt, RNAi
uuagagguucacgaucuagac

SEQ ID NO: 17437 - DNA, 21 bp, homo sapiens
aagtgctagatctgtcttaca

SEQ ID NO: 17438 - RNA, 21 nt, RNAi
gugcuagaucugucuuacauu

SEQ ID NO: 17439 - RNA, 21 nt, RNAi
uucacgaucuagacagaaugu

SEQ ID NO: 17440 - DNA, 21 bp, homo sapiens
aaagttgacactttccagcag

SEQ ID NO: 17441 - RNA, 21 nt, RNAi
aguugacacuuuccagcaguu

SEQ ID NO: 17442 - RNA, 21 nt, RNAi
uuucaacugugaaaggucguc

SEQ ID NO: 17443 - DNA, 21 bp, homo sapiens
aagttgacactttccagcagt

SEQ ID NO: 17444 - RNA, 21 nt, RNAi
guugacacuuuccagcaguuu

SEQ ID NO: 17445 - RNA, 21 nt, RNAi
uucaacugugaaaggucguca

SEQ ID NO: 17446 - DNA, 21 bp, homo sapiens
aataaagctggacctatcgtc

SEQ ID NO: 17447 - RNA, 21 nt, RNAi
uaaagcuggaccuaucgucuu

SEQ ID NO: 17448 - RNA, 21 nt, RNAi
uuauuucgaccuggauagcag

SEQ ID NO: 17449 - DNA, 21 bp, homo sapiens
aaagctggacctatcgtccaa

SEQ ID NO: 17450 - RNA, 21 nt, RNAi
agcuggaccuaucguccaauu

SEQ ID NO: 17451 - RNA, 21 nt, RNAi
uuucgaccuggauagcagguu

SEQ ID NO: 17452 - DNA, 21 bp, homo sapiens
aagctggacctatcgtccaac

SEQ ID NO: 17453 - RNA, 21 nt, RNAi
gcuggaccuaucguccaacuu

SEQ ID NO: 17454 - RNA, 21 nt, RNAi
uucgaccuggauagcagguug

SEQ ID NO: 17455 - DNA, 21 bp, homo sapiens
aaattaacaggaaatcatgcc

SEQ ID NO: 17456 - RNA, 21 nt, RNAi
auuaacaggaaaucaugccuu

SEQ ID NO: 17457 - RNA, 21 nt, RNAi
uuuaauuguccuuuaguacgg

SEQ ID NO: 17458 - DNA, 21 bp, homo sapiens
aattaacaggaaatcatgcct

SEQ ID NO: 17459 - RNA, 21 nt, RNAi
uuaacaggaaaucaugccuuu

SEQ ID NO: 17460 - RNA, 21 nt, RNAi
uuaauuguccuuuaguacgga

SEQ ID NO: 17461 - DNA, 21 bp, homo sapiens
aacaggaaatcatgccttaca

SEQ ID NO: 17462 - RNA, 21 nt, RNAi
caggaaaucaugccuuacauu

SEQ ID NO: 17463 - RNA, 21 nt, RNAi
uuguccuuuaguacggaaugu

SEQ ID NO: 17464 - DNA, 21 bp, homo sapiens
aaatcatgccttacagagctt

SEQ ID NO: 17465 - RNA, 21 nt, RNAi
aucaugccuuacagagcuuuu

SEQ ID NO: 17466 - RNA, 21 nt, RNAi
uuuaguacggaaugucucgaa

SEQ ID NO: 17467 - DNA, 21 bp, homo sapiens
aatcatgccttacagagcttg

SEQ ID NO: 17468 - RNA, 21 nt, RNAi
ucaugccuuacagagcuuguu

SEQ ID NO: 17469 - RNA, 21 nt, RNAi
uuaguacggaaugucucgaac

SEQ ID NO: 17470 - DNA, 21 bp, homo sapiens
aaactttccagaactcaaggt

SEQ ID NO: 17471 - RNA, 21 nt, RNAi
acuuuccagaacucaagguuu

SEQ ID NO: 17472 - RNA, 21 nt, RNAi
uuugaaaggucuugaguucca

SEQ ID NO: 17473 - DNA, 21 bp, homo sapiens
aactttccagaactcaaggtt

SEQ ID NO: 17474 - RNA, 21 nt, RNAi
cuuuccagaacucaagguuuu

SEQ ID NO: 17475 - RNA, 21 nt, RNAi
uugaaaggucuugaguuccaa

SEQ ID NO: 17476 - DNA, 21 bp, homo sapiens
aactcaaggttatagaaatgc

SEQ ID NO: 17477 - RNA, 21 nt, RNAi
cucaagguuauagaaaugcuu

SEQ ID NO: 17478 - RNA, 21 nt, RNAi
uugaguuccaauaucuuuacg

SEQ ID NO: 17479 - DNA, 21 bp, homo sapiens
aaatgccttatgcttaccagt

SEQ ID NO: 17480 - RNA, 21 nt, RNAi
augccuuaugcuuaccaguuu

SEQ ID NO: 17481 - RNA, 21 nt, RNAi
uuuacggaauacgaaugguca

SEQ ID NO: 17482 - DNA, 21 bp, homo sapiens
aatgccttatgcttaccagtg

SEQ ID NO: 17483 - RNA, 21 nt, RNAi
ugccuuaugcuuaccaguguu

SEQ ID NO: 17484 - RNA, 21 nt, RNAi
uuacggaauacgaauggucac

SEQ ID NO: 17485 - DNA, 21 bp, homo sapiens
aatcaatggaataaaggtgac

SEQ ID NO: 17486 - RNA, 21 nt, RNAi
ucaauggaauaaaggugacuu

SEQ ID NO: 17487 - RNA, 21 nt, RNAi
uuaguuaccuuauuuccacug

SEQ ID NO: 17488 - DNA, 21 bp, homo sapiens
aatggaataaaggtgacaaca

SEQ ID NO: 17489 - RNA, 21 nt, RNAi
uggaauaaaggugacaacauu

SEQ ID NO: 17490 - RNA, 21 nt, RNAi
uuaccuuauuuccacuguugu

SEQ ID NO: 17491 - DNA, 21 bp, homo sapiens
aataaaggtgacaacagcagt

SEQ ID NO: 17492 - RNA, 21 nt, RNAi
uaaaggugacaacagcaguuu

SEQ ID NO: 17493 - RNA, 21 nt, RNAi
uuauuuccacuguugucguca

SEQ ID NO: 17494 - DNA, 21 bp, homo sapiens
aaaggtgacaacagcagtatg

SEQ ID NO: 17495 - RNA, 21 nt, RNAi
aggugacaacagcaguauguu

SEQ ID NO: 17496 - RNA, 21 nt, RNAi
uuuccacuguugucgucauac

SEQ ID NO: 17497 - DNA, 21 bp, homo sapiens
aaggtgacaacagcagtatgg

SEQ ID NO: 17498 - RNA, 21 nt, RNAi
ggugacaacagcaguaugguu

SEQ ID NO: 17499 - RNA, 21 nt, RNAi
uuccacuguugucgucauacc

SEQ ID NO: 17500 - DNA, 21 bp, homo sapiens
aacagcagtatggacgacctt

SEQ ID NO: 17501 - RNA, 21 nt, RNAi
cagcaguauggacgaccuuuu

SEQ ID NO: 17502 - RNA, 21 nt, RNAi
uugucgucauaccugcuggaa

SEQ ID NO: 17503 - DNA, 21 bp, homo sapiens
aagaaagatgctggaatgttt

SEQ ID NO: 17504 - RNA, 21 nt, RNAi
gaaagaugcuggaauguuuuu

SEQ ID NO: 17505 - RNA, 21 nt, RNAi
uucuuucuacgaccuuacaaa

SEQ ID NO: 17506 - DNA, 21 bp, homo sapiens
aaagatgctggaatgtttcag

SEQ ID NO: 17507 - RNA, 21 nt, RNAi
agaugcuggaauguuucaguu

SEQ ID NO: 17508 - RNA, 21 nt, RNAi
uuucuacgaccuuacaaaguc

SEQ ID NO: 17509 - DNA, 21 bp, homo sapiens
aagatgctggaatgtttcagg

SEQ ID NO: 17510 - RNA, 21 nt, RNAi
gaugcuggaauguuucagguu

SEQ ID NO: 17511 - RNA, 21 nt, RNAi
uucuacgaccuuacaaagucc

SEQ ID NO: 17512 - DNA, 21 bp, homo sapiens
aatgtttcaggctcaagatga

SEQ ID NO: 17513 - RNA, 21 nt, RNAi
uguuucaggcucaagaugauu

SEQ ID NO: 17514 - RNA, 21 nt, RNAi
uuacaaaguccgaguucuacu

SEQ ID NO: 17515 - DNA, 21 bp, homo sapiens
aagatgaacgtgaccttgaag

SEQ ID NO: 17516 - RNA, 21 nt, RNAi
gaugaacgugaccuugaaguu

SEQ ID NO: 17517 - RNA, 21 nt, RNAi
uucuacuugcacuggaacuuc

SEQ ID NO: 17518 - DNA, 21 bp, homo sapiens
aacgtgaccttgaagatttcc

SEQ ID NO: 17519 - RNA, 21 nt, RNAi
cgugaccuugaagauuuccuu

SEQ ID NO: 17520 - RNA, 21 nt, RNAi
uugcacuggaacuucuaaagg

SEQ ID NO: 17521 - DNA, 21 bp, homo sapiens
aagatttcctgcttgactttg

SEQ ID NO: 17522 - RNA, 21 nt, RNAi
gauuuccugcuugacuuuguu

SEQ ID NO: 17523 - RNA, 21 nt, RNAi
uucuaaaggacgaacugaaac

SEQ ID NO: 17524 - DNA, 21 bp, homo sapiens
aacacctgcttgatggctggc

SEQ ID NO: 17525 - RNA, 21 nt, RNAi
caccugcuugauggcuggcuu

SEQ ID NO: 17526 - RNA, 21 nt, RNAi
uuguggacgaacuaccgaccg

SEQ ID NO: 17527 - DNA, 21 bp, homo sapiens
aattggagtgtggaccatagc

SEQ ID NO: 17528 - RNA, 21 nt, RNAi
uuggaguguggaccauagcuu

SEQ ID NO: 17529 - RNA, 21 nt, RNAi
uuaaccucacaccugguaucg

SEQ ID NO: 17530 - DNA, 21 bp, homo sapiens
aatgctttggtgacttcaaca

SEQ ID NO: 17531 - RNA, 21 nt, RNAi
ugcuuuggugacuucaacauu

SEQ ID NO: 17532 - RNA, 21 nt, RNAi
uuacgaaaccacugaaguugu

SEQ ID NO: 17533 - DNA, 21 bp, homo sapiens
aaatttgaaacgaaagctcca

SEQ ID NO: 17534 - RNA, 21 nt, RNAi
auuugaaacgaaagcuccauu

SEQ ID NO: 17535 - RNA, 21 nt, RNAi
uuuaaacuuugcuuucgaggu

SEQ ID NO: 17536 - DNA, 21 bp, homo sapiens
aatttgaaacgaaagctccat

SEQ ID NO: 17537 - RNA, 21 nt, RNAi
uuugaaacgaaagcuccauuu

SEQ ID NO: 17538 - RNA, 21 nt, RNAi
uuaaacuuugcuuucgaggua

SEQ ID NO: 17539 - DNA, 21 bp, homo sapiens
aagctctactgcaatttggac

SEQ ID NO: 17540 - RNA, 21 nt, RNAi
gcucuacugcaauuuggacuu

SEQ ID NO: 17541 - RNA, 21 nt, RNAi
uucgagaugacguuaaaccug

SEQ ID NO: 17542 - DNA, 21 bp, homo sapiens
aaaccttacatttatcagtcc

SEQ ID NO: 17543 - RNA, 21 nt, RNAi
accuuacauuuaucaguccuu

SEQ ID NO: 17544 - RNA, 21 nt, RNAi
uuuggaauguaaauagucagg

SEQ ID NO: 17545 - DNA, 21 bp, homo sapiens
aaccttacatttatcagtcct

SEQ ID NO: 17546 - RNA, 21 nt, RNAi
ccuuacauuuaucaguccuuu

SEQ ID NO: 17547 - RNA, 21 nt, RNAi
uuggaauguaaauagucagga

SEQ ID NO: 17548 - DNA, 21 bp, homo sapiens
aagtttatccttctggtggta

SEQ ID NO: 17549 - RNA, 21 nt, RNAi
guuuauccuucuggugguauu

SEQ ID NO: 17550 - RNA, 21 nt, RNAi
uucaaauaggaagaccaccau

SEQ ID NO: 17551 - DNA, 21 bp, homo sapiens
aatcctcactttaaggaggat

SEQ ID NO: 17552 - RNA, 21 nt, RNAi
uccucacuuuaaggaggauuu

SEQ ID NO: 17553 - RNA, 21 nt, RNAi
uuaggagugaaauuccuccua

SEQ ID NO: 17554 - DNA, 21 bp, homo sapiens
aaggaggatctggtgagcctg

SEQ ID NO: 17555 - RNA, 21 nt, RNAi
ggaggaucuggugagccuguu

SEQ ID NO: 17556 - RNA, 21 nt, RNAi
uuccuccuagaccacucggac

SEQ ID NO: 17557 - DNA, 21 bp, homo sapiens
aaagcaaacctacgtctggac

SEQ ID NO: 17558 - RNA, 21 nt, RNAi
agcaaaccuacgucuggacuu

SEQ ID NO: 17559 - RNA, 21 nt, RNAi
uuucguuuggaugcagaccug

SEQ ID NO: 17560 - DNA, 21 bp, homo sapiens
aagcaaacctacgtctggaca

SEQ ID NO: 17561 - RNA, 21 nt, RNAi
gcaaaccuacgucuggacauu

SEQ ID NO: 17562 - RNA, 21 nt, RNAi
uucguuuggaugcagaccugu

SEQ ID NO: 17563 - DNA, 21 bp, homo sapiens
aaacctacgtctggacaagat

SEQ ID NO: 17564 - RNA, 21 nt, RNAi
accuacgucuggacaagauuu

SEQ ID NO: 17565 - RNA, 21 nt, RNAi
uuuggaugcagaccuguucua

SEQ ID NO: 17566 - DNA, 21 bp, homo sapiens
aacctacgtctggacaagatc

SEQ ID NO: 17567 - RNA, 21 nt, RNAi
ccuacgucuggacaagaucuu

SEQ ID NO: 17568 - RNA, 21 nt, RNAi
uuggaugcagaccuguucuag

SEQ ID NO: 17569 - DNA, 21 bp, homo sapiens
aagcttgatgtcaattaactc

SEQ ID NO: 17570 - RNA, 21 nt, RNAi
gcuugaugucaauuaacucuu

SEQ ID NO: 17571 - RNA, 21 nt, RNAi
uucgaacuacaguuaauugag

SEQ ID NO: 17572 - DNA, 21 bp, homo sapiens
aattaactctgatgatgtcga

SEQ ID NO: 17573 - RNA, 21 nt, RNAi
uuaacucugaugaugucgauu

SEQ ID NO: 17574 - RNA, 21 nt, RNAi
uuaauugagacuacuacagcu

SEQ ID NO: 17575 - DNA, 21 bp, homo sapiens
aaacagtcctgtgactcaact

SEQ ID NO: 17576 - RNA, 21 nt, RNAi
acaguccugugacucaacuuu

SEQ ID NO: 17577 - RNA, 21 nt, RNAi
uuugucaggacacugaguuga

SEQ ID NO: 17578 - DNA, 21 bp, homo sapiens
aacagtcctgtgactcaactc

SEQ ID NO: 17579 - RNA, 21 nt, RNAi
caguccugugacucaacucuu

SEQ ID NO: 17580 - RNA, 21 nt, RNAi
uugucaggacacugaguugag

SEQ ID NO: 17581 - DNA, 21 bp, homo sapiens
aactcaagccttggtaacctt

SEQ ID NO: 17582 - RNA, 21 nt, RNAi
cucaagccuugguaaccuuuu

SEQ ID NO: 17583 - RNA, 21 nt, RNAi
uugaguucggaaccauuggaa

SEQ ID NO: 17584 - DNA, 21 bp, homo sapiens
aagccttggtaacctttacca

SEQ ID NO: 17585 - RNA, 21 nt, RNAi
gccuugguaaccuuuaccauu

SEQ ID NO: 17586 - RNA, 21 nt, RNAi
uucggaaccauuggaaauggu

SEQ ID NO: 17587 - DNA, 21 bp, homo sapiens
aacctttaccagctccagcat

SEQ ID NO: 17588 - RNA, 21 nt, RNAi
ccuuuaccagcuccagcauuu

SEQ ID NO: 17589 - RNA, 21 nt, RNAi
uuggaaauggucgaggucgua

SEQ ID NO: 17590 - DNA, 21 bp, homo sapiens
caggtctggtgtgttgctgag

SEQ ID NO: 17591 - RNA, 21 nt, RNAi
ggucugguguguugcugaguu

SEQ ID NO: 17592 - RNA, 21 nt, RNAi
uuccagaccacacaacgacuc

SEQ ID NO: 17593 - DNA, 21 bp, homo sapiens
cacacactgtcattgcgagcc

SEQ ID NO: 17594 - RNA, 21 nt, RNAi
cacacugucauugcgagccuu

SEQ ID NO: 17595 - RNA, 21 nt, RNAi
uugugugacaguaacgcucgg

SEQ ID NO: 17596 - DNA, 21 bp, homo sapiens
caacctcagcgtcttcacctc

SEQ ID NO: 17597 - RNA, 21 nt, RNAi
accucagcgucuucaccucuu

SEQ ID NO: 17598 - RNA, 21 nt, RNAi
uuuggagucgcagaaguggag

SEQ ID NO: 17599 - DNA, 21 bp, homo sapiens
cagcgtcttcacctcctacct

SEQ ID NO: 17600 - RNA, 21 nt, RNAi
gcgucuucaccuccuaccuuu

SEQ ID NO: 17601 - RNA, 21 nt, RNAi
uucgcagaaguggaggaugga

SEQ ID NO: 17602 - DNA, 21 bp, homo sapiens
cacctcctacctagacctcag

SEQ ID NO: 17603 - RNA, 21 nt, RNAi
ccuccuaccuagaccucaguu

SEQ ID NO: 17604 - RNA, 21 nt, RNAi
uuggaggauggaucuggaguc

SEQ ID NO: 17605 - DNA, 21 bp, homo sapiens
cagtatgaacaacatcagtca

SEQ ID NO: 17606 - RNA, 21 nt, RNAi
guaugaacaacaucagucauu

SEQ ID NO: 17607 - RNA, 21 nt, RNAi
uucauacuuguuguagucagu

SEQ ID NO: 17608 - DNA, 21 bp, homo sapiens
cagtctccgcttcctggagga

SEQ ID NO: 17609 - RNA, 21 nt, RNAi
gucuccgcuuccuggaggauu

SEQ ID NO: 17610 - RNA, 21 nt, RNAi
uucagaggcgaaggaccuccu

SEQ ID NO: 17611 - DNA, 21 bp, homo sapiens
cattcactggcctttacagtc

SEQ ID NO: 17612 - RNA, 21 nt, RNAi
uucacuggccuuuacagucuu

SEQ ID NO: 17613 - RNA, 21 nt, RNAi
uuaagugaccggaaaugucag

SEQ ID NO: 17614 - DNA, 21 bp, homo sapiens
cactggcctttacagtcttaa

SEQ ID NO: 17615 - RNA, 21 nt, RNAi
cuggccuuuacagucuuaauu

SEQ ID NO: 17616 - RNA, 21 nt, RNAi
uugaccggaaaugucagaauu

SEQ ID NO: 17617 - DNA, 21 bp, homo sapiens
cagtcttaaagttcttatgct

SEQ ID NO: 17618 - RNA, 21 nt, RNAi
gucuuaaaguucuuaugcuuu

SEQ ID NO: 17619 - RNA, 21 nt, RNAi
uucagaauuucaagaauacga

SEQ ID NO: 17620 - DNA, 21 bp, homo sapiens
cagaataatcagctaagacac

SEQ ID NO: 17621 - RNA, 21 nt, RNAi
gaauaaucagcuaagacacuu

SEQ ID NO: 17622 - RNA, 21 nt, RNAi
uucuuauuagucgauucugug

SEQ ID NO: 17623 - DNA, 21 bp, homo sapiens
cacagaagctctgcagaattt

SEQ ID NO: 17624 - RNA, 21 nt, RNAi
cagaagcucugcagaauuuuu

SEQ ID NO: 17625 - RNA, 21 nt, RNAi
uugucuucgagacgucuuaaa

SEQ ID NO: 17626 - DNA, 21 bp, homo sapiens
cagaagctctgcagaatttgc

SEQ ID NO: 17627 - RNA, 21 nt, RNAi
gaagcucugcagaauuugcuu

SEQ ID NO: 17628 - RNA, 21 nt, RNAi
uucuucgagacgucuuaaacg

SEQ ID NO: 17629 - DNA, 21 bp, homo sapiens
cagaatttgcgaagccttcaa

SEQ ID NO: 17630 - RNA, 21 nt, RNAi
gaauuugcgaagccuucaauu

SEQ ID NO: 17631 - RNA, 21 nt, RNAi
uucuuaaacgcuucggaaguu

SEQ ID NO: 17632 - DNA, 21 bp, homo sapiens
caagctgtttcagtggcctgc

SEQ ID NO: 17633 - RNA, 21 nt, RNAi
agcuguuucaguggccugcuu

SEQ ID NO: 17634 - RNA, 21 nt, RNAi
uuucgacaaagucaccggacg

SEQ ID NO: 17635 - DNA, 21 bp, homo sapiens
cacctgtggctggatgacaat

SEQ ID NO: 17636 - RNA, 21 nt, RNAi
ccuguggcuggaugacaauuu

SEQ ID NO: 17637 - RNA, 21 nt, RNAi
uuggacaccgaccuacuguua

SEQ ID NO: 17638 - DNA, 21 bp, homo sapiens
cattgcaagccatgaccttgg

SEQ ID NO: 17639 - RNA, 21 nt, RNAi
uugcaagccaugaccuugguu

SEQ ID NO: 17640 - RNA, 21 nt, RNAi
uuaacguucgguacuggaacc

SEQ ID NO: 17641 - DNA, 21 bp, homo sapiens
caccacataccagactatgcc

SEQ ID NO: 17642 - RNA, 21 nt, RNAi
ccacauaccagacuaugccuu

SEQ ID NO: 17643 - RNA, 21 nt, RNAi
uugguguauggucugauacgg

SEQ ID NO: 17644 - DNA, 21 bp, homo sapiens
cacataccagactatgccttt

SEQ ID NO: 17645 - RNA, 21 nt, RNAi
cauaccagacuaugccuuuuu

SEQ ID NO: 17646 - RNA, 21 nt, RNAi
uuguauggucugauacggaaa

SEQ ID NO: 17647 - DNA, 21 bp, homo sapiens
cataccagactatgcctttgg

SEQ ID NO: 17648 - RNA, 21 nt, RNAi
uaccagacuaugccuuugguu

SEQ ID NO: 17649 - RNA, 21 nt, RNAi
uuauggucugauacggaaacc

SEQ ID NO: 17650 - DNA, 21 bp, homo sapiens
cagactatgcctttggaaacc

SEQ ID NO: 17651 - RNA, 21 nt, RNAi
gacuaugccuuuggaaaccuu

SEQ ID NO: 17652 - RNA, 21 nt, RNAi
uucugauacggaaaccuuugg

SEQ ID NO: 17653 - DNA, 21 bp, homo sapiens
cagcttggtagttctacatct

SEQ ID NO: 17654 - RNA, 21 nt, RNAi
gcuugguaguucuacaucuuu

SEQ ID NO: 17655 - RNA, 21 nt, RNAi
uucgaaccaucaagauguaga

SEQ ID NO: 17656 - DNA, 21 bp, homo sapiens
catctccataacaatagaatc

SEQ ID NO: 17657 - RNA, 21 nt, RNAi
ucuccauaacaauagaaucuu

SEQ ID NO: 17658 - RNA, 21 nt, RNAi
uuagagguauuguuaucuuag

SEQ ID NO: 17659 - DNA, 21 bp, homo sapiens
cataacaatagaatccactcc

SEQ ID NO: 17660 - RNA, 21 nt, RNAi
uaacaauagaauccacuccuu

SEQ ID NO: 17661 - RNA, 21 nt, RNAi
uuauuguuaucuuaggugagg

SEQ ID NO: 17662 - DNA, 21 bp, homo sapiens
cacagcctagagactttagat

SEQ ID NO: 17663 - RNA, 21 nt, RNAi
cagccuagagacuuuagauuu

SEQ ID NO: 17664 - RNA, 21 nt, RNAi
uugucggaucucugaaaucua

SEQ ID NO: 17665 - DNA, 21 bp, homo sapiens
cagcctagagactttagattt

SEQ ID NO: 17666 - RNA, 21 nt, RNAi
gccuagagacuuuagauuuuu

SEQ ID NO: 17667 - RNA, 21 nt, RNAi
uucggaucucugaaaucuaaa

SEQ ID NO: 17668 - DNA, 21 bp, homo sapiens
cactgcaattaggacactctc

SEQ ID NO: 17669 - RNA, 21 nt, RNAi
cugcaauuaggacacucucuu

SEQ ID NO: 17670 - RNA, 21 nt, RNAi
uugacguuaauccugugagag

SEQ ID NO: 17671 - DNA, 21 bp, homo sapiens
caattaggacactctccaacc

SEQ ID NO: 17672 - RNA, 21 nt, RNAi
auuaggacacucuccaaccuu

SEQ ID NO: 17673 - RNA, 21 nt, RNAi
uuuaauccugugagagguugg

SEQ ID NO: 17674 - DNA, 21 bp, homo sapiens
cactctccaaccttaaagaac

SEQ ID NO: 17675 - RNA, 21 nt, RNAi
cucuccaaccuuaaagaacuu

SEQ ID NO: 17676 - RNA, 21 nt, RNAi
uugagagguuggaauuucuug

SEQ ID NO: 17677 - DNA, 21 bp, homo sapiens
caaccttaaagaactaggatt

SEQ ID NO: 17678 - RNA, 21 nt, RNAi
accuuaaagaacuaggauuuu

SEQ ID NO: 17679 - RNA, 21 nt, RNAi
uuuggaauuucuugauccuaa

SEQ ID NO: 17680 - DNA, 21 bp, homo sapiens
catagcaacaatatcaggtcg

SEQ ID NO: 17681 - RNA, 21 nt, RNAi
uagcaacaauaucaggucguu

SEQ ID NO: 17682 - RNA, 21 nt, RNAi
uuaucguuguuauaguccagc

SEQ ID NO: 17683 - DNA, 21 bp, homo sapiens
caacaatatcaggtcgatacc

SEQ ID NO: 17684 - RNA, 21 nt, RNAi
acaauaucaggucgauaccuu

SEQ ID NO: 17685 - RNA, 21 nt, RNAi
uuuguuauaguccagcuaugg

SEQ ID NO: 17686 - DNA, 21 bp, homo sapiens
caatatcaggtcgatacctga

SEQ ID NO: 17687 - RNA, 21 nt, RNAi
auaucaggucgauaccugauu

SEQ ID NO: 17688 - RNA, 21 nt, RNAi
uuuauaguccagcuauggacu

SEQ ID NO: 17689 - DNA, 21 bp, homo sapiens
caggtcgatacctgagaaagc

SEQ ID NO: 17690 - RNA, 21 nt, RNAi
ggucgauaccugagaaagcuu

SEQ ID NO: 17691 - RNA, 21 nt, RNAi
uuccagcuauggacucuuucg

SEQ ID NO: 17692 - DNA, 21 bp, homo sapiens
caacatttacctgaactaaga

SEQ ID NO: 17693 - RNA, 21 nt, RNAi
acauuuaccugaacuaagauu

SEQ ID NO: 17694 - RNA, 21 nt, RNAi
uuuguaaauggacuugauucu

SEQ ID NO: 17695 - DNA, 21 bp, homo sapiens
catttacctgaactaagaaca

SEQ ID NO: 17696 - RNA, 21 nt, RNAi
uuuaccugaacuaagaacauu

SEQ ID NO: 17697 - RNA, 21 nt, RNAi
uuaaauggacuugauucuugu

SEQ ID NO: 17698 - DNA, 21 bp, homo sapiens
cactgactctgaatggtgcct

SEQ ID NO: 17699 - RNA, 21 nt, RNAi
cugacucugaauggugccuuu

SEQ ID NO: 17700 - RNA, 21 nt, RNAi
uugacugagacuuaccacgga

SEQ ID NO: 17701 - DNA, 21 bp, homo sapiens
cacaaataactgaatttcctg

SEQ ID NO: 17702 - RNA, 21 nt, RNAi
caaauaacugaauuuccuguu

SEQ ID NO: 17703 - RNA, 21 nt, RNAi
uuguuuauugacuuaaaggac

SEQ ID NO: 17704 - DNA, 21 bp, homo sapiens
caaacctggagagtctgactt

SEQ ID NO: 17705 - RNA, 21 nt, RNAi
aaccuggagagucugacuuuu

SEQ ID NO: 17706 - RNA, 21 nt, RNAi
uuuuggaccucucagacugaa

SEQ ID NO: 17707 - DNA, 21 bp, homo sapiens
cacagatctcatctcttcctc

SEQ ID NO: 17708 - RNA, 21 nt, RNAi
cagaucucaucucuuccucuu

SEQ ID NO: 17709 - RNA, 21 nt, RNAi
uugucuagaguagagaaggag

SEQ ID NO: 17710 - DNA, 21 bp, homo sapiens
cagatctcatctcttcctcaa

SEQ ID NO: 17711 - RNA, 21 nt, RNAi
gaucucaucucuuccucaauu

SEQ ID NO: 17712 - RNA, 21 nt, RNAi
uucuagaguagagaaggaguu

SEQ ID NO: 17713 - DNA, 21 bp, homo sapiens
catctcttcctcaaaccgtct

SEQ ID NO: 17714 - RNA, 21 nt, RNAi
ucucuuccucaaaccgucuuu

SEQ ID NO: 17715 - RNA, 21 nt, RNAi
uuagagaaggaguuuggcaga

SEQ ID NO: 17716 - DNA, 21 bp, homo sapiens
caaaccgtctgcaatcagtta

SEQ ID NO: 17717 - RNA, 21 nt, RNAi
aaccgucugcaaucaguuauu

SEQ ID NO: 17718 - RNA, 21 nt, RNAi
uuuuggcagacguuagucaau

SEQ ID NO: 17719 - DNA, 21 bp, homo sapiens
caatcagttacctaatctcca

SEQ ID NO: 17720 - RNA, 21 nt, RNAi
aucaguuaccuaaucuccauu

SEQ ID NO: 17721 - RNA, 21 nt, RNAi
uuuagucaauggauuagaggu

SEQ ID NO: 17722 - DNA, 21 bp, homo sapiens
cagttacctaatctccaagtg

SEQ ID NO: 17723 - RNA, 21 nt, RNAi
guuaccuaaucuccaaguguu

SEQ ID NO: 17724 - RNA, 21 nt, RNAi
uucaauggauuagagguucac

SEQ ID NO: 17725 - DNA, 21 bp, homo sapiens
caagtgctagatctgtcttac

SEQ ID NO: 17726 - RNA, 21 nt, RNAi
agugcuagaucugucuuacuu

SEQ ID NO: 17727 - RNA, 21 nt, RNAi
uuucacgaucuagacagaaug

SEQ ID NO: 17728 - DNA, 21 bp, homo sapiens
caacctattagaagatttacc

SEQ ID NO: 17729 - RNA, 21 nt, RNAi
accuauuagaagauuuaccuu

SEQ ID NO: 17730 - RNA, 21 nt, RNAi
uuuggauaaucuucuaaaugg

SEQ ID NO: 17731 - DNA, 21 bp, homo sapiens
cactttccagcagttgcttag

SEQ ID NO: 17732 - RNA, 21 nt, RNAi
cuuuccagcaguugcuuaguu

SEQ ID NO: 17733 - RNA, 21 nt, RNAi
uugaaaggucgucaacgaauc

SEQ ID NO: 17734 - DNA, 21 bp, homo sapiens
cagcagttgcttagcctccga

SEQ ID NO: 17735 - RNA, 21 nt, RNAi
gcaguugcuuagccuccgauu

SEQ ID NO: 17736 - RNA, 21 nt, RNAi
uucgucaacgaaucggaggcu

SEQ ID NO: 17737 - DNA, 21 bp, homo sapiens
cagttgcttagcctccgatcg

SEQ ID NO: 17738 - RNA, 21 nt, RNAi
guugcuuagccuccgaucguu

SEQ ID NO: 17739 - RNA, 21 nt, RNAi
uucaacgaaucggaggcuagc

SEQ ID NO: 17740 - DNA, 21 bp, homo sapiens
caggaaatcatgccttacaga

SEQ ID NO: 17741 - RNA, 21 nt, RNAi
ggaaaucaugccuuacagauu

SEQ ID NO: 17742 - RNA, 21 nt, RNAi
uuccuuuaguacggaaugucu

SEQ ID NO: 17743 - DNA, 21 bp, homo sapiens
catgccttacagagcttgata

SEQ ID NO: 17744 - RNA, 21 nt, RNAi
ugccuuacagagcuugauauu

SEQ ID NO: 17745 - RNA, 21 nt, RNAi
uuacggaaugucucgaacuau

SEQ ID NO: 17746 - DNA, 21 bp, homo sapiens
cagagcttgatatcatctgaa

SEQ ID NO: 17747 - RNA, 21 nt, RNAi
gagcuugauaucaucugaauu

SEQ ID NO: 17748 - RNA, 21 nt, RNAi
uucucgaacuauaguagacuu

SEQ ID NO: 17749 - DNA, 21 bp, homo sapiens
cagaactcaaggttatagaaa

SEQ ID NO: 17750 - RNA, 21 nt, RNAi
gaacucaagguuauagaaauu

SEQ ID NO: 17751 - RNA, 21 nt, RNAi
uucuugaguuccaauaucuuu

SEQ ID NO: 17752 - DNA, 21 bp, homo sapiens
caaggttatagaaatgcctta

SEQ ID NO: 17753 - RNA, 21 nt, RNAi
agguuauagaaaugccuuauu

SEQ ID NO: 17754 - RNA, 21 nt, RNAi
uuuccaauaucuuuacggaau

SEQ ID NO: 17755 - DNA, 21 bp, homo sapiens
cagtgctgtgcatttggagtg

SEQ ID NO: 17756 - RNA, 21 nt, RNAi
gugcugugcauuuggaguguu

SEQ ID NO: 17757 - RNA, 21 nt, RNAi
uucacgacacguaaaccucac

SEQ ID NO: 17758 - DNA, 21 bp, homo sapiens
catttggagtgtgtgagaatg

SEQ ID NO: 17759 - RNA, 21 nt, RNAi
uuuggagugugugagaauguu

SEQ ID NO: 17760 - RNA, 21 nt, RNAi
uuaaaccucacacacucuuac

SEQ ID NO: 17761 - DNA, 21 bp, homo sapiens
caatggaataaaggtgacaac

SEQ ID NO: 17762 - RNA, 21 nt, RNAi
auggaauaaaggugacaacuu

SEQ ID NO: 17763 - RNA, 21 nt, RNAi
uuuaccuuauuuccacuguug

SEQ ID NO: 17764 - DNA, 21 bp, homo sapiens
caacagcagtatggacgacct

SEQ ID NO: 17765 - RNA, 21 nt, RNAi
acagcaguauggacgaccuuu

SEQ ID NO: 17766 - RNA, 21 nt, RNAi
uuugucgucauaccugcugga

SEQ ID NO: 17767 - DNA, 21 bp, homo sapiens
cagcagtatggacgaccttca

SEQ ID NO: 17768 - RNA, 21 nt, RNAi
gcaguauggacgaccuucauu

SEQ ID NO: 17769 - RNA, 21 nt, RNAi
uucgucauaccugcuggaagu

SEQ ID NO: 17770 - DNA, 21 bp, homo sapiens
cagtatggacgaccttcataa

SEQ ID NO: 17771 - RNA, 21 nt, RNAi
guauggacgaccuucauaauu

SEQ ID NO: 17772 - RNA, 21 nt, RNAi
uucauaccugcuggaaguauu

SEQ ID NO: 17773 - DNA, 21 bp, homo sapiens
cataagaaagatgctggaatg

SEQ ID NO: 17774 - RNA, 21 nt, RNAi
uaagaaagaugcuggaauguu

SEQ ID NO: 17775 - RNA, 21 nt, RNAi
uuauucuuucuacgaccuuac

SEQ ID NO: 17776 - DNA, 21 bp, homo sapiens
caggctcaagatgaacgtgac

SEQ ID NO: 17777 - RNA, 21 nt, RNAi
ggcucaagaugaacgugacuu

SEQ ID NO: 17778 - RNA, 21 nt, RNAi
uuccgaguucuacuugcacug

SEQ ID NO: 17779 - DNA, 21 bp, homo sapiens
caagatgaacgtgaccttgaa

SEQ ID NO: 17780 - RNA, 21 nt, RNAi
agaugaacgugaccuugaauu

SEQ ID NO: 17781 - RNA, 21 nt, RNAi
uuucuacuugcacuggaacuu

SEQ ID NO: 17782 - DNA, 21 bp, homo sapiens
cattcagtgcagtgttcacct

SEQ ID NO: 17783 - RNA, 21 nt, RNAi
uucagugcaguguucaccuuu

SEQ ID NO: 17784 - RNA, 21 nt, RNAi
uuaagucacgucacaagugga

SEQ ID NO: 17785 - DNA, 21 bp, homo sapiens
cacctgcttgatggctggctg

SEQ ID NO: 17786 - RNA, 21 nt, RNAi
ccugcuugauggcuggcuguu

SEQ ID NO: 17787 - RNA, 21 nt, RNAi
uuggacgaacuaccgaccgac

SEQ ID NO: 17788 - DNA, 21 bp, homo sapiens
cagaattggagtgtggaccat

SEQ ID NO: 17789 - RNA, 21 nt, RNAi
gaauuggaguguggaccauuu

SEQ ID NO: 17790 - RNA, 21 nt, RNAi
uucuuaaccucacaccuggua

SEQ ID NO: 17791 - DNA, 21 bp, homo sapiens
catagcagttctggcacttac

SEQ ID NO: 17792 - RNA, 21 nt, RNAi
uagcaguucuggcacuuacuu

SEQ ID NO: 17793 - RNA, 21 nt, RNAi
uuaucgucaagaccgugaaug

SEQ ID NO: 17794 - DNA, 21 bp, homo sapiens
cagttctggcacttacttgta

SEQ ID NO: 17795 - RNA, 21 nt, RNAi
guucuggcacuuacuuguauu

SEQ ID NO: 17796 - RNA, 21 nt, RNAi
uucaagaccgugaaugaacau

SEQ ID NO: 17797 - DNA, 21 bp, homo sapiens
cacttacttgtaatgctttgg

SEQ ID NO: 17798 - RNA, 21 nt, RNAi
cuuacuuguaaugcuuugguu

SEQ ID NO: 17799 - RNA, 21 nt, RNAi
uugaaugaacauuacgaaacc

SEQ ID NO: 17800 - DNA, 21 bp, homo sapiens
catcgcagcagtgaacatgct

SEQ ID NO: 17801 - RNA, 21 nt, RNAi
ucgcagcagugaacaugcuuu

SEQ ID NO: 17802 - RNA, 21 nt, RNAi
uuagcgucgucacuuguacga

SEQ ID NO: 17803 - DNA, 21 bp, homo sapiens
cagcagtgaacatgctcacgg

SEQ ID NO: 17804 - RNA, 21 nt, RNAi
gcagugaacaugcucacgguu

SEQ ID NO: 17805 - RNA, 21 nt, RNAi
uucgucacuuguacgagugcc

SEQ ID NO: 17806 - DNA, 21 bp, homo sapiens
cagctttgcacgacatggtgc

SEQ ID NO: 17807 - RNA, 21 nt, RNAi
gcuuugcacgacauggugcuu

SEQ ID NO: 17808 - RNA, 21 nt, RNAi
uucgaaacgugcuguaccacg

SEQ ID NO: 17809 - DNA, 21 bp, homo sapiens
catggtcgctctcatcttgct

SEQ ID NO: 17810 - RNA, 21 nt, RNAi
uggucgcucucaucuugcuuu

SEQ ID NO: 17811 - RNA, 21 nt, RNAi
uuaccagcgagaguagaacga

SEQ ID NO: 17812 - DNA, 21 bp, homo sapiens
catgatgaccattgcctacac

SEQ ID NO: 17813 - RNA, 21 nt, RNAi
ugaugaccauugccuacacuu

SEQ ID NO: 17814 - RNA, 21 nt, RNAi
uuacuacugguaacggaugug

SEQ ID NO: 17815 - DNA, 21 bp, homo sapiens
cattgcctacaccaagctcta

SEQ ID NO: 17816 - RNA, 21 nt, RNAi
uugccuacaccaagcucuauu

SEQ ID NO: 17817 - RNA, 21 nt, RNAi
uuaacggaugugguucgagau

SEQ ID NO: 17818 - DNA, 21 bp, homo sapiens
caccaagctctactgcaattt

SEQ ID NO: 17819 - RNA, 21 nt, RNAi
ccaagcucuacugcaauuuuu

SEQ ID NO: 17820 - RNA, 21 nt, RNAi
uugguucgagaugacguuaaa

SEQ ID NO: 17821 - DNA, 21 bp, homo sapiens
caagctctactgcaatttgga

SEQ ID NO: 17822 - RNA, 21 nt, RNAi
agcucuacugcaauuuggauu

SEQ ID NO: 17823 - RNA, 21 nt, RNAi
uuucgagaugacguuaaaccu

SEQ ID NO: 17824 - DNA, 21 bp, homo sapiens
caccaactgcatcctaaactg

SEQ ID NO: 17825 - RNA, 21 nt, RNAi
ccaacugcauccuaaacuguu

SEQ ID NO: 17826 - RNA, 21 nt, RNAi
uugguugacguaggauuugac

SEQ ID NO: 17827 - DNA, 21 bp, homo sapiens
catttatcagtcctgaagtaa

SEQ ID NO: 17828 - RNA, 21 nt, RNAi
uuuaucaguccugaaguaauu

SEQ ID NO: 17829 - RNA, 21 nt, RNAi
uuaaauagucaggacuucauu

SEQ ID NO: 17830 - DNA, 21 bp, homo sapiens
cagtcctgaagtaattaagtt

SEQ ID NO: 17831 - RNA, 21 nt, RNAi
guccugaaguaauuaaguuuu

SEQ ID NO: 17832 - RNA, 21 nt, RNAi
uucaggacuucauuaauucaa

SEQ ID NO: 17833 - DNA, 21 bp, homo sapiens
cacttcctgcatgtctcaatc

SEQ ID NO: 17834 - RNA, 21 nt, RNAi
cuuccugcaugucucaaucuu

SEQ ID NO: 17835 - RNA, 21 nt, RNAi
uugaaggacguacagaguuag

SEQ ID NO: 17836 - DNA, 21 bp, homo sapiens
catcttgttcaatcctcactt

SEQ ID NO: 17837 - RNA, 21 nt, RNAi
ucuuguucaauccucacuuuu

SEQ ID NO: 17838 - RNA, 21 nt, RNAi
uuagaacaaguuaggagugaa

SEQ ID NO: 17839 - DNA, 21 bp, homo sapiens
caatcctcactttaaggagga

SEQ ID NO: 17840 - RNA, 21 nt, RNAi
auccucacuuuaaggaggauu

SEQ ID NO: 17841 - RNA, 21 nt, RNAi
uuuaggagugaaauuccuccu

SEQ ID NO: 17842 - DNA, 21 bp, homo sapiens
cactttaaggaggatctggtg

SEQ ID NO: 17843 - RNA, 21 nt, RNAi
cuuuaaggaggaucugguguu

SEQ ID NO: 17844 - RNA, 21 nt, RNAi
uugaaauuccuccuagaccac

SEQ ID NO: 17845 - DNA, 21 bp, homo sapiens
caaacctacgtctggacaaga

SEQ ID NO: 17846 - RNA, 21 nt, RNAi
aaccuacgucuggacaagauu

SEQ ID NO: 17847 - RNA, 21 nt, RNAi
uuuuggaugcagaccuguucu

SEQ ID NO: 17848 - DNA, 21 bp, homo sapiens
caagcttgatgtcaattaact

SEQ ID NO: 17849 - RNA, 21 nt, RNAi
agcuugaugucaauuaacuuu

SEQ ID NO: 17850 - RNA, 21 nt, RNAi
uuucgaacuacaguuaauuga

SEQ ID NO: 17851 - DNA, 21 bp, homo sapiens
caattaactctgatgatgtcg

SEQ ID NO: 17852 - RNA, 21 nt, RNAi
auuaacucugaugaugucguu

SEQ ID NO: 17853 - RNA, 21 nt, RNAi
uuuaauugagacuacuacagc

SEQ ID NO: 17854 - DNA, 21 bp, homo sapiens
cagtcctgtgactcaactcaa

SEQ ID NO: 17855 - RNA, 21 nt, RNAi
guccugugacucaacucaauu

SEQ ID NO: 17856 - RNA, 21 nt, RNAi
uucaggacacugaguugaguu

SEQ ID NO: 17857 - DNA, 21 bp, homo sapiens
caactcaagccttggtaacct

SEQ ID NO: 17858 - RNA, 21 nt, RNAi
acucaagccuugguaaccuuu

SEQ ID NO: 17859 - RNA, 21 nt, RNAi
uuugaguucggaaccauugga

SEQ ID NO: 17860 - DNA, 21 bp, homo sapiens
caagccttggtaacctttacc

SEQ ID NO: 17861 - RNA, 21 nt, RNAi
agccuugguaaccuuuaccuu

SEQ ID NO: 17862 - RNA, 21 nt, RNAi
uuucggaaccauuggaaaugg

SEQ ID NO: 17863 - DNA, 21 bp, homo sapiens
cagctccagcatcacttatga

SEQ ID NO: 17864 - RNA, 21 nt, RNAi
gcuccagcaucacuuaugauu

SEQ ID NO: 17865 - RNA, 21 nt, RNAi
uucgaggucguagugaauacu

SEQ ID NO: 17866 - DNA, 21 bp, homo sapiens
cagcatcacttatgacctgcc

SEQ ID NO: 17867 - RNA, 21 nt, RNAi
gcaucacuuaugaccugccuu

SEQ ID NO: 17868 - RNA, 21 nt, RNAi
uucguagugaauacuggacgg

SEQ ID NO: 17869 - DNA, 21 bp, homo sapiens
catcacttatgacctgcctcc

SEQ ID NO: 17870 - RNA, 21 nt, RNAi
ucacuuaugaccugccuccuu

SEQ ID NO: 17871 - RNA, 21 nt, RNAi
uuagugaauacuggacggagg

SEQ ID NO: 17872 - DNA, 21 bp, homo sapiens
cagttccgtgccatcaccagc

SEQ ID NO: 17873 - RNA, 21 nt, RNAi
guuccgugccaucaccagcuu

SEQ ID NO: 17874 - RNA, 21 nt, RNAi
uucaaggcacgguaguggucg

SEQ ID NO: 17875 - DNA, 21 bp, homo sapiens
catcaccagcttatccagtga

SEQ ID NO: 17876 - RNA, 21 nt, RNAi
ucaccagcuuauccagugauu

SEQ ID NO: 17877 - RNA, 21 nt, RNAi
uuaguggucgaauaggucacu

SEQ ID NO: 17878 - DNA, 21 bp, homo sapiens
caccagcttatccagtgactg

SEQ ID NO: 17879 - RNA, 21 nt, RNAi
ccagcuuauccagugacuguu

SEQ ID NO: 17880 - RNA, 21 nt, RNAi
uuggucgaauaggucacugac

SEQ ID NO: 17881 - DNA, 21 bp, homo sapiens
cagcttatccagtgactgaga

SEQ ID NO: 17882 - RNA, 21 nt, RNAi
gcuuauccagugacugagauu

SEQ ID NO: 17883 - RNA, 21 nt, RNAi
uucgaauaggucacugacucu

SEQ ID NO: 17884 - DNA, 21 bp, homo sapiens
cagtgactgagagctgccatc

SEQ ID NO: 17885 - RNA, 21 nt, RNAi
gugacugagagcugccaucuu

SEQ ID NO: 17886 - RNA, 21 nt, RNAi
uucacugacucucgacgguag

SEQ ID NO: 17887 - DNA, 21 bp, homo sapiens
catctttcctctgtggcattt

SEQ ID NO: 17888 - RNA, 21 nt, RNAi
ucuuuccucuguggcauuuuu

SEQ ID NO: 17889 - RNA, 21 nt, RNAi
uuagaaaggagacaccguaaa

SEQ ID NO: 17890 - DNA, 21 bp, homo sapiens
gacggcaggatgttgctcagg

SEQ ID NO: 17891 - RNA, 21 nt, RNAi
cggcaggauguugcucagguu

SEQ ID NO: 17892 - RNA, 21 nt, RNAi
uugccguccuacaacgagucc

SEQ ID NO: 17893 - DNA, 21 bp, homo sapiens
gagctgccttccaacctcagc

SEQ ID NO: 17894 - RNA, 21 nt, RNAi
gcugccuuccaaccucagcuu

SEQ ID NO: 17895 - RNA, 21 nt, RNAi
uucgacggaagguuggagucg

SEQ ID NO: 17896 - DNA, 21 bp, homo sapiens
gacctcagtatgaacaacatc

SEQ ID NO: 17897 - RNA, 21 nt, RNAi
ccucaguaugaacaacaucuu

SEQ ID NO: 17898 - RNA, 21 nt, RNAi
uuggagucauacuuguuguag

SEQ ID NO: 17899 - DNA, 21 bp, homo sapiens
gaacaacatcagtcagctgct

SEQ ID NO: 17900 - RNA, 21 nt, RNAi
acaacaucagucagcugcuuu

SEQ ID NO: 17901 - RNA, 21 nt, RNAi
uuuguuguagucagucgacga

SEQ ID NO: 17902 - DNA, 21 bp, homo sapiens
gaaacgctctgacatacattc

SEQ ID NO: 17903 - RNA, 21 nt, RNAi
aacgcucugacauacauucuu

SEQ ID NO: 17904 - RNA, 21 nt, RNAi
uuuugcgagacuguauguaag

SEQ ID NO: 17905 - DNA, 21 bp, homo sapiens
gagcattcactggcctttaca

SEQ ID NO: 17906 - RNA, 21 nt, RNAi
gcauucacuggccuuuacauu

SEQ ID NO: 17907 - RNA, 21 nt, RNAi
uucguaagugaccggaaaugu

SEQ ID NO: 17908 - DNA, 21 bp, homo sapiens
gaataatcagctaagacacgt

SEQ ID NO: 17909 - RNA, 21 nt, RNAi
auaaucagcuaagacacguuu

SEQ ID NO: 17910 - RNA, 21 nt, RNAi
uuuauuagucgauucugugca

SEQ ID NO: 17911 - DNA, 21 bp, homo sapiens
gaagctctgcagaatttgcga

SEQ ID NO: 17912 - RNA, 21 nt, RNAi
agcucugcagaauuugcgauu

SEQ ID NO: 17913 - RNA, 21 nt, RNAi
uuucgagacgucuuaaacgcu

SEQ ID NO: 17914 - DNA, 21 bp, homo sapiens
gaatttgcgaagccttcaatc

SEQ ID NO: 17915 - RNA, 21 nt, RNAi
auuugcgaagccuucaaucuu

SEQ ID NO: 17916 - RNA, 21 nt, RNAi
uuuaaacgcuucggaaguuag

SEQ ID NO: 17917 - DNA, 21 bp, homo sapiens
gatgctaaccacatcagctat

SEQ ID NO: 17918 - RNA, 21 nt, RNAi
ugcuaaccacaucagcuauuu

SEQ ID NO: 17919 - RNA, 21 nt, RNAi
uuacgauugguguagucgaua

SEQ ID NO: 17920 - DNA, 21 bp, homo sapiens
gaggcacctgtggctggatga

SEQ ID NO: 17921 - RNA, 21 nt, RNAi
ggcaccuguggcuggaugauu

SEQ ID NO: 17922 - RNA, 21 nt, RNAi
uuccguggacaccgaccuacu

SEQ ID NO: 17923 - DNA, 21 bp, homo sapiens
gatgacaatgcgttaacagaa

SEQ ID NO: 17924 - RNA, 21 nt, RNAi
ugacaaugcguuaacagaauu

SEQ ID NO: 17925 - RNA, 21 nt, RNAi
uuacuguuacgcaauugucuu

SEQ ID NO: 17926 - DNA, 21 bp, homo sapiens
gacaatgcgttaacagaaatc

SEQ ID NO: 17927 - RNA, 21 nt, RNAi
caaugcguuaacagaaaucuu

SEQ ID NO: 17928 - RNA, 21 nt, RNAi
uuguuacgcaauugucuuuag

SEQ ID NO: 17929 - DNA, 21 bp, homo sapiens
gaagtttatcggcattgcaag

SEQ ID NO: 17930 - RNA, 21 nt, RNAi
aguuuaucggcauugcaaguu

SEQ ID NO: 17931 - RNA, 21 nt, RNAi
uuucaaauagccguaacguuc

SEQ ID NO: 17932 - DNA, 21 bp, homo sapiens
gactatgcctttggaaacctc

SEQ ID NO: 17933 - RNA, 21 nt, RNAi
cuaugccuuuggaaaccucuu

SEQ ID NO: 17934 - RNA, 21 nt, RNAi
uugauacggaaaccuuuggag

SEQ ID NO: 17935 - DNA, 21 bp, homo sapiens
gaaacctctccagcttggtag

SEQ ID NO: 17936 - RNA, 21 nt, RNAi
aaccucuccagcuugguaguu

SEQ ID NO: 17937 - RNA, 21 nt, RNAi
uuuuggagaggucgaaccauc

SEQ ID NO: 17938 - DNA, 21 bp, homo sapiens
gacactctccaaccttaaaga

SEQ ID NO: 17939 - RNA, 21 nt, RNAi
cacucuccaaccuuaaagauu

SEQ ID NO: 17940 - RNA, 21 nt, RNAi
uugugagagguuggaauuucu

SEQ ID NO: 17941 - DNA, 21 bp, homo sapiens
gaactaggatttcatagcaac

SEQ ID NO: 17942 - RNA, 21 nt, RNAi
acuaggauuucauagcaacuu

SEQ ID NO: 17943 - RNA, 21 nt, RNAi
uuugauccuaaaguaucguug

SEQ ID NO: 17944 - DNA, 21 bp, homo sapiens
gatacctgagaaagcatttgt

SEQ ID NO: 17945 - RNA, 21 nt, RNAi
uaccugagaaagcauuuguuu

SEQ ID NO: 17946 - RNA, 21 nt, RNAi
uuauggacucuuucguaaaca

SEQ ID NO: 17947 - DNA, 21 bp, homo sapiens
gagaaagcatttgtaggcaac

SEQ ID NO: 17948 - RNA, 21 nt, RNAi
gaaagcauuuguaggcaacuu

SEQ ID NO: 17949 - RNA, 21 nt, RNAi
uucuuucguaaacauccguug

SEQ ID NO: 17950 - DNA, 21 bp, homo sapiens
gaactaagaacactgactctg

SEQ ID NO: 17951 - RNA, 21 nt, RNAi
acuaagaacacugacucuguu

SEQ ID NO: 17952 - RNA, 21 nt, RNAi
uuugauucuugugacugagac

SEQ ID NO: 17953 - DNA, 21 bp, homo sapiens
gaacactgactctgaatggtg

SEQ ID NO: 17954 - RNA, 21 nt, RNAi
acacugacucugaaugguguu

SEQ ID NO: 17955 - RNA, 21 nt, RNAi
uuugugacugagacuuaccac

SEQ ID NO: 17956 - DNA, 21 bp, homo sapiens
gactctgaatggtgcctcaca

SEQ ID NO: 17957 - RNA, 21 nt, RNAi
cucugaauggugccucacauu

SEQ ID NO: 17958 - RNA, 21 nt, RNAi
uugagacuuaccacggagugu

SEQ ID NO: 17959 - DNA, 21 bp, homo sapiens
gaatggtgcctcacaaataac

SEQ ID NO: 17960 - RNA, 21 nt, RNAi
auggugccucacaaauaacuu

SEQ ID NO: 17961 - RNA, 21 nt, RNAi
uuuaccacggaguguuuauug

SEQ ID NO: 17962 - DNA, 21 bp, homo sapiens
gaatttcctgatttaactgga

SEQ ID NO: 17963 - RNA, 21 nt, RNAi
auuuccugauuuaacuggauu

SEQ ID NO: 17964 - RNA, 21 nt, RNAi
uuuaaaggacuaaauugaccu

SEQ ID NO: 17965 - DNA, 21 bp, homo sapiens
gatttaactggaactgcaaac

SEQ ID NO: 17966 - RNA, 21 nt, RNAi
uuuaacuggaacugcaaacuu

SEQ ID NO: 17967 - RNA, 21 nt, RNAi
uuaaauugaccuugacguuug

SEQ ID NO: 17968 - DNA, 21 bp, homo sapiens
gaactgcaaacctggagagtc

SEQ ID NO: 17969 - RNA, 21 nt, RNAi
acugcaaaccuggagagucuu

SEQ ID NO: 17970 - RNA, 21 nt, RNAi
uuugacguuuggaccucucag

SEQ ID NO: 17971 - DNA, 21 bp, homo sapiens
gagagtctgactttaactgga

SEQ ID NO: 17972 - RNA, 21 nt, RNAi
gagucugacuuuaacuggauu

SEQ ID NO: 17973 - RNA, 21 nt, RNAi
uucucagacugaaauugaccu

SEQ ID NO: 17974 - DNA, 21 bp, homo sapiens
gagtctgactttaactggagc

SEQ ID NO: 17975 - RNA, 21 nt, RNAi
gucugacuuuaacuggagcuu

SEQ ID NO: 17976 - RNA, 21 nt, RNAi
uucagacugaaauugaccucg

SEQ ID NO: 17977 - DNA, 21 bp, homo sapiens
gactttaactggagcacagat

SEQ ID NO: 17978 - RNA, 21 nt, RNAi
cuuuaacuggagcacagauuu

SEQ ID NO: 17979 - RNA, 21 nt, RNAi
uugaaauugaccucgugucua

SEQ ID NO: 17980 - DNA, 21 bp, homo sapiens
gagcacagatctcatctcttc

SEQ ID NO: 17981 - RNA, 21 nt, RNAi
gcacagaucucaucucuucuu

SEQ ID NO: 17982 - RNA, 21 nt, RNAi
uucgugucuagaguagagaag

SEQ ID NO: 17983 - DNA, 21 bp, homo sapiens
gatctcatctcttcctcaaac

SEQ ID NO: 17984 - RNA, 21 nt, RNAi
ucucaucucuuccucaaacuu

SEQ ID NO: 17985 - RNA, 21 nt, RNAi
uuagaguagagaaggaguuug

SEQ ID NO: 17986 - DNA, 21 bp, homo sapiens
gatctgtcttacaacctatta

SEQ ID NO: 17987 - RNA, 21 nt, RNAi
ucugucuuacaaccuauuauu

SEQ ID NO: 17988 - RNA, 21 nt, RNAi
uuagacagaauguuggauaau

SEQ ID NO: 17989 - DNA, 21 bp, homo sapiens
gacctaagacataatgaaatc

SEQ ID NO: 17990 - RNA, 21 nt, RNAi
ccuaagacauaaugaaaucuu

SEQ ID NO: 17991 - RNA, 21 nt, RNAi
uuggauucuguauuacuuuag

SEQ ID NO: 17992 - DNA, 21 bp, homo sapiens
gacactttccagcagttgctt

SEQ ID NO: 17993 - RNA, 21 nt, RNAi
cacuuuccagcaguugcuuuu

SEQ ID NO: 17994 - RNA, 21 nt, RNAi
uugugaaaggucgucaacgaa

SEQ ID NO: 17995 - DNA, 21 bp, homo sapiens
gatcgctgaatttggcttgga

SEQ ID NO: 17996 - RNA, 21 nt, RNAi
ucgcugaauuuggcuuggauu

SEQ ID NO: 17997 - RNA, 21 nt, RNAi
uuagcgacuuaaaccgaaccu

SEQ ID NO: 17998 - DNA, 21 bp, homo sapiens
gacctatcgtccaacctcctg

SEQ ID NO: 17999 - RNA, 21 nt, RNAi
ccuaucguccaaccuccuguu

SEQ ID NO: 18000 - RNA, 21 nt, RNAi
uuggauagcagguuggaggac

SEQ ID NO: 18001 - DNA, 21 bp, homo sapiens
gaaatcatgccttacagagct

SEQ ID NO: 18002 - RNA, 21 nt, RNAi
aaucaugccuuacagagcuuu

SEQ ID NO: 18003 - RNA, 21 nt, RNAi
uuuuaguacggaaugucucga

SEQ ID NO: 18004 - DNA, 21 bp, homo sapiens
gaactcaaggttatagaaatg

SEQ ID NO: 18005 - RNA, 21 nt, RNAi
acucaagguuauagaaauguu

SEQ ID NO: 18006 - RNA, 21 nt, RNAi
uuugaguuccaauaucuuuac

SEQ ID NO: 18007 - DNA, 21 bp, homo sapiens
gaaatgccttatgcttaccag

SEQ ID NO: 18008 - RNA, 21 nt, RNAi
aaugccuuaugcuuaccaguu

SEQ ID NO: 18009 - RNA, 21 nt, RNAi
uuuuacggaauacgaaugguc

SEQ ID NO: 18010 - DNA, 21 bp, homo sapiens
gagtgtgtgagaatgcctata

SEQ ID NO: 18011 - RNA, 21 nt, RNAi
gugugugagaaugccuauauu

SEQ ID NO: 18012 - RNA, 21 nt, RNAi
uucacacacucuuacggauau

SEQ ID NO: 18013 - DNA, 21 bp, homo sapiens
gagaatgcctataagatttct

SEQ ID NO: 18014 - RNA, 21 nt, RNAi
gaaugccuauaagauuucuuu

SEQ ID NO: 18015 - RNA, 21 nt, RNAi
uucuuacggauauucuaaaga

SEQ ID NO: 18016 - DNA, 21 bp, homo sapiens
gaataaaggtgacaacagcag

SEQ ID NO: 18017 - RNA, 21 nt, RNAi
auaaaggugacaacagcaguu

SEQ ID NO: 18018 - RNA, 21 nt, RNAi
uuuauuuccacuguugucguc

SEQ ID NO: 18019 - DNA, 21 bp, homo sapiens
gacaacagcagtatggacgac

SEQ ID NO: 18020 - RNA, 21 nt, RNAi
caacagcaguauggacgacuu

SEQ ID NO: 18021 - RNA, 21 nt, RNAi
uuguugucgucauaccugcug

SEQ ID NO: 18022 - DNA, 21 bp, homo sapiens
gacgaccttcataagaaagat

SEQ ID NO: 18023 - RNA, 21 nt, RNAi
cgaccuucauaagaaagauuu

SEQ ID NO: 18024 - RNA, 21 nt, RNAi
uugcuggaaguauucuuucua

SEQ ID NO: 18025 - DNA, 21 bp, homo sapiens
gaccttcataagaaagatgct

SEQ ID NO: 18026 - RNA, 21 nt, RNAi
ccuucauaagaaagaugcuuu

SEQ ID NO: 18027 - RNA, 21 nt, RNAi
uuggaaguauucuuucuacga

SEQ ID NO: 18028 - DNA, 21 bp, homo sapiens
gaaagatgctggaatgtttca

SEQ ID NO: 18029 - RNA, 21 nt, RNAi
aagaugcuggaauguuucauu

SEQ ID NO: 18030 - RNA, 21 nt, RNAi
uuuucuacgaccuuacaaagu

SEQ ID NO: 18031 - DNA, 21 bp, homo sapiens
gatgctggaatgtttcaggct

SEQ ID NO: 18032 - RNA, 21 nt, RNAi
ugcuggaauguuucaggcuuu

SEQ ID NO: 18033 - RNA, 21 nt, RNAi
uuacgaccuuacaaaguccga

SEQ ID NO: 18034 - DNA, 21 bp, homo sapiens
gaatgtttcaggctcaagatg

SEQ ID NO: 18035 - RNA, 21 nt, RNAi
auguuucaggcucaagauguu

SEQ ID NO: 18036 - RNA, 21 nt, RNAi
uuuacaaaguccgaguucuac

SEQ ID NO: 18037 - DNA, 21 bp, homo sapiens
gatgaacgtgaccttgaagat

SEQ ID NO: 18038 - RNA, 21 nt, RNAi
ugaacgugaccuugaagauuu

SEQ ID NO: 18039 - RNA, 21 nt, RNAi
uuacuugcacuggaacuucua

SEQ ID NO: 18040 - DNA, 21 bp, homo sapiens
gaacgtgaccttgaagatttc

SEQ ID NO: 18041 - RNA, 21 nt, RNAi
acgugaccuugaagauuucuu

SEQ ID NO: 18042 - RNA, 21 nt, RNAi
uuugcacuggaacuucuaaag

SEQ ID NO: 18043 - DNA, 21 bp, homo sapiens
gaccttgaagatttcctgctt

SEQ ID NO: 18044 - RNA, 21 nt, RNAi
ccuugaagauuuccugcuuuu

SEQ ID NO: 18045 - RNA, 21 nt, RNAi
uuggaacuucuaaaggacgaa

SEQ ID NO: 18046 - DNA, 21 bp, homo sapiens
gaagatttcctgcttgacttt

SEQ ID NO: 18047 - RNA, 21 nt, RNAi
agauuuccugcuugacuuuuu

SEQ ID NO: 18048 - RNA, 21 nt, RNAi
uuucuaaaggacgaacugaaa

SEQ ID NO: 18049 - DNA, 21 bp, homo sapiens
gatttcctgcttgactttgag

SEQ ID NO: 18050 - RNA, 21 nt, RNAi
uuuccugcuugacuuugaguu

SEQ ID NO: 18051 - RNA, 21 nt, RNAi
uuaaaggacgaacugaaacuc

SEQ ID NO: 18052 - DNA, 21 bp, homo sapiens
gactttgaggaagacctgaaa

SEQ ID NO: 18053 - RNA, 21 nt, RNAi
cuuugaggaagaccugaaauu

SEQ ID NO: 18054 - RNA, 21 nt, RNAi
uugaaacuccuucuggacuuu

SEQ ID NO: 18055 - DNA, 21 bp, homo sapiens
gaacacctgcttgatggctgg

SEQ ID NO: 18056 - RNA, 21 nt, RNAi
acaccugcuugauggcugguu

SEQ ID NO: 18057 - RNA, 21 nt, RNAi
uuuguggacgaacuaccgacc

SEQ ID NO: 18058 - DNA, 21 bp, homo sapiens
gatggctggctgatcagaatt

SEQ ID NO: 18059 - RNA, 21 nt, RNAi
uggcuggcugaucagaauuuu

SEQ ID NO: 18060 - RNA, 21 nt, RNAi
uuaccgaccgacuagucuuaa

SEQ ID NO: 18061 - DNA, 21 bp, homo sapiens
gatcagaattggagtgtggac

SEQ ID NO: 18062 - RNA, 21 nt, RNAi
ucagaauuggaguguggacuu

SEQ ID NO: 18063 - RNA, 21 nt, RNAi
uuagucuuaaccucacaccug

SEQ ID NO: 18064 - DNA, 21 bp, homo sapiens
gaattggagtgtggaccatag

SEQ ID NO: 18065 - RNA, 21 nt, RNAi
auuggaguguggaccauaguu

SEQ ID NO: 18066 - RNA, 21 nt, RNAi
uuuaaccucacaccugguauc

SEQ ID NO: 18067 - DNA, 21 bp, homo sapiens
gagtgtggaccatagcagttc

SEQ ID NO: 18068 - RNA, 21 nt, RNAi
guguggaccauagcaguucuu

SEQ ID NO: 18069 - RNA, 21 nt, RNAi
uucacaccugguaucgucaag

SEQ ID NO: 18070 - DNA, 21 bp, homo sapiens
gaccatagcagttctggcact

SEQ ID NO: 18071 - RNA, 21 nt, RNAi
ccauagcaguucuggcacuuu

SEQ ID NO: 18072 - RNA, 21 nt, RNAi
uugguaucgucaagaccguga

SEQ ID NO: 18073 - DNA, 21 bp, homo sapiens
gatgaccattgcctacaccaa

SEQ ID NO: 18074 - RNA, 21 nt, RNAi
ugaccauugccuacaccaauu

SEQ ID NO: 18075 - RNA, 21 nt, RNAi
uuacugguaacggaugugguu

SEQ ID NO: 18076 - DNA, 21 bp, homo sapiens
gaccattgcctacaccaagct

SEQ ID NO: 18077 - RNA, 21 nt, RNAi
ccauugccuacaccaagcuuu

SEQ ID NO: 18078 - RNA, 21 nt, RNAi
uugguaacggaugugguucga

SEQ ID NO: 18079 - DNA, 21 bp, homo sapiens
gaggatctggtgagcctgaga

SEQ ID NO: 18080 - RNA, 21 nt, RNAi
ggaucuggugagccugagauu

SEQ ID NO: 18081 - RNA, 21 nt, RNAi
uuccuagaccacucggacucu

SEQ ID NO: 18082 - DNA, 21 bp, homo sapiens
gatctggtgagcctgagaaag

SEQ ID NO: 18083 - RNA, 21 nt, RNAi
ucuggugagccugagaaaguu

SEQ ID NO: 18084 - RNA, 21 nt, RNAi
uuagaccacucggacucuuuc

SEQ ID NO: 18085 - DNA, 21 bp, homo sapiens
gagcctgagaaagcaaaccta

SEQ ID NO: 18086 - RNA, 21 nt, RNAi
gccugagaaagcaaaccuauu

SEQ ID NO: 18087 - RNA, 21 nt, RNAi
uucggacucuuucguuuggau

SEQ ID NO: 18088 - DNA, 21 bp, homo sapiens
gagaaagcaaacctacgtctg

SEQ ID NO: 18089 - RNA, 21 nt, RNAi
gaaagcaaaccuacgucuguu

SEQ ID NO: 18090 - RNA, 21 nt, RNAi
uucuuucguuuggaugcagac

SEQ ID NO: 18091 - DNA, 21 bp, homo sapiens
gaaagcaaacctacgtctgga

SEQ ID NO: 18092 - RNA, 21 nt, RNAi
aagcaaaccuacgucuggauu

SEQ ID NO: 18093 - RNA, 21 nt, RNAi
uuuucguuuggaugcagaccu

SEQ ID NO: 18094 - DNA, 21 bp, homo sapiens
gatgtcaattaactctgatga

SEQ ID NO: 18095 - RNA, 21 nt, RNAi
ugucaauuaacucugaugauu

SEQ ID NO: 18096 - RNA, 21 nt, RNAi
uuacaguuaauugagacuacu

SEQ ID NO: 18097 - DNA, 21 bp, homo sapiens
gactcaactcaagccttggta

SEQ ID NO: 18098 - RNA, 21 nt, RNAi
cucaacucaagccuugguauu

SEQ ID NO: 18099 - RNA, 21 nt, RNAi
uugaguugaguucggaaccau

SEQ ID NO: 18100 - DNA, 21 bp, homo sapiens
gactgagagctgccatctttc

SEQ ID NO: 18101 - RNA, 21 nt, RNAi
cugagagcugccaucuuucuu

SEQ ID NO: 18102 - RNA, 21 nt, RNAi
uugacucucgacgguagaaag

SEQ ID NO: 18103 - DNA, 21 bp, homo sapiens
gagagctgccatctttcctct

SEQ ID NO: 18104 - RNA, 21 nt, RNAi
gagcugccaucuuuccucuuu

SEQ ID NO: 18105 - RNA, 21 nt, RNAi
uucucgacgguagaaaggaga

SEQ ID NO: 18106 - DNA, 21 bp, homo sapiens
gagctgccatctttcctctgt

SEQ ID NO: 18107 - RNA, 21 nt, RNAi
gcugccaucuuuccucuguuu

SEQ ID NO: 18108 - RNA, 21 nt, RNAi
uucgacgguagaaaggagaca

SEQ ID NO: 18109 - DNA, 21 bp, homo sapiens
tacctagacctcagtatgaac

SEQ ID NO: 18110 - RNA, 21 nt, RNAi
ccuagaccucaguaugaacuu

SEQ ID NO: 18111 - RNA, 21 nt, RNAi
uuggaucuggagucauacuug

SEQ ID NO: 18112 - DNA, 21 bp, homo sapiens
tagacctcagtatgaacaaca

SEQ ID NO: 18113 - RNA, 21 nt, RNAi
gaccucaguaugaacaacauu

SEQ ID NO: 18114 - RNA, 21 nt, RNAi
uucuggagucauacuuguugu

SEQ ID NO: 18115 - DNA, 21 bp, homo sapiens
tatgaacaacatcagtcagct

SEQ ID NO: 18116 - RNA, 21 nt, RNAi
ugaacaacaucagucagcuuu

SEQ ID NO: 18117 - RNA, 21 nt, RNAi
uuacuuguuguagucagucga

SEQ ID NO: 18118 - DNA, 21 bp, homo sapiens
taaagttcttatgctgcagaa

SEQ ID NO: 18119 - RNA, 21 nt, RNAi
aaguucuuaugcugcagaauu

SEQ ID NO: 18120 - RNA, 21 nt, RNAi
uuuucaagaauacgacgucuu

SEQ ID NO: 18121 - DNA, 21 bp, homo sapiens
tatgctgcagaataatcagct

SEQ ID NO: 18122 - RNA, 21 nt, RNAi
ugcugcagaauaaucagcuuu

SEQ ID NO: 18123 - RNA, 21 nt, RNAi
uuacgacgucuuauuagucga

SEQ ID NO: 18124 - DNA, 21 bp, homo sapiens
taatcagctaagacacgtacc

SEQ ID NO: 18125 - RNA, 21 nt, RNAi
aucagcuaagacacguaccuu

SEQ ID NO: 18126 - RNA, 21 nt, RNAi
uuuagucgauucugugcaugg

SEQ ID NO: 18127 - DNA, 21 bp, homo sapiens
taaccacatcagctatgtgcc

SEQ ID NO: 18128 - RNA, 21 nt, RNAi
accacaucagcuaugugccuu

SEQ ID NO: 18129 - RNA, 21 nt, RNAi
uuugguguagucgauacacgg

SEQ ID NO: 18130 - DNA, 21 bp, homo sapiens
tagaagtttatcggcattgca

SEQ ID NO: 18131 - RNA, 21 nt, RNAi
gaaguuuaucggcauugcauu

SEQ ID NO: 18132 - RNA, 21 nt, RNAi
uucuucaaauagccguaacgu

SEQ ID NO: 18133 - DNA, 21 bp, homo sapiens
tatcggcattgcaagccatga

SEQ ID NO: 18134 - RNA, 21 nt, RNAi
ucggcauugcaagccaugauu

SEQ ID NO: 18135 - RNA, 21 nt, RNAi
uuagccguaacguucgguacu

SEQ ID NO: 18136 - DNA, 21 bp, homo sapiens
tacaccacataccagactatg

SEQ ID NO: 18137 - RNA, 21 nt, RNAi
caccacauaccagacuauguu

SEQ ID NO: 18138 - RNA, 21 nt, RNAi
uugugguguauggucugauac

SEQ ID NO: 18139 - DNA, 21 bp, homo sapiens
taccagactatgcctttggaa

SEQ ID NO: 18140 - RNA, 21 nt, RNAi
ccagacuaugccuuuggaauu

SEQ ID NO: 18141 - RNA, 21 nt, RNAi
uuggucugauacggaaaccuu

SEQ ID NO: 18142 - DNA, 21 bp, homo sapiens
tatgcctttggaaacctctcc

SEQ ID NO: 18143 - RNA, 21 nt, RNAi
ugccuuuggaaaccucuccuu

SEQ ID NO: 18144 - RNA, 21 nt, RNAi
uuacggaaaccuuuggagagg

SEQ ID NO: 18145 - DNA, 21 bp, homo sapiens
tagttctacatctccataaca

SEQ ID NO: 18146 - RNA, 21 nt, RNAi
guucuacaucuccauaacauu

SEQ ID NO: 18147 - RNA, 21 nt, RNAi
uucaagauguagagguauugu

SEQ ID NO: 18148 - DNA, 21 bp, homo sapiens
taggacactctccaaccttaa

SEQ ID NO: 18149 - RNA, 21 nt, RNAi
ggacacucuccaaccuuaauu

SEQ ID NO: 18150 - RNA, 21 nt, RNAi
uuccugugagagguuggaauu

SEQ ID NO: 18151 - DNA, 21 bp, homo sapiens
tagcaacaatatcaggtcgat

SEQ ID NO: 18152 - RNA, 21 nt, RNAi
gcaacaauaucaggucgauuu

SEQ ID NO: 18153 - RNA, 21 nt, RNAi
uucguuguuauaguccagcua

SEQ ID NO: 18154 - DNA, 21 bp, homo sapiens
tatcaggtcgatacctgagaa

SEQ ID NO: 18155 - RNA, 21 nt, RNAi
ucaggucgauaccugagaauu

SEQ ID NO: 18156 - RNA, 21 nt, RNAi
uuaguccagcuauggacucuu

SEQ ID NO: 18157 - DNA, 21 bp, homo sapiens
tacctgagaaagcatttgtag

SEQ ID NO: 18158 - RNA, 21 nt, RNAi
ccugagaaagcauuuguaguu

SEQ ID NO: 18159 - RNA, 21 nt, RNAi
uuggacucuuucguaaacauc

SEQ ID NO: 18160 - DNA, 21 bp, homo sapiens
tacctgaactaagaacactga

SEQ ID NO: 18161 - RNA, 21 nt, RNAi
ccugaacuaagaacacugauu

SEQ ID NO: 18162 - RNA, 21 nt, RNAi
uuggacuugauucuugugacu

SEQ ID NO: 18163 - DNA, 21 bp, homo sapiens
taagaacactgactctgaatg

SEQ ID NO: 18164 - RNA, 21 nt, RNAi
agaacacugacucugaauguu

SEQ ID NO: 18165 - RNA, 21 nt, RNAi
uuucuugugacugagacuuac

SEQ ID NO: 18166 - DNA, 21 bp, homo sapiens
taactggaactgcaaacctgg

SEQ ID NO: 18167 - RNA, 21 nt, RNAi
acuggaacugcaaaccugguu

SEQ ID NO: 18168 - RNA, 21 nt, RNAi
uuugaccuugacguuuggacc

SEQ ID NO: 18169 - DNA, 21 bp, homo sapiens
taactggagcacagatctcat

SEQ ID NO: 18170 - RNA, 21 nt, RNAi
acuggagcacagaucucauuu

SEQ ID NO: 18171 - RNA, 21 nt, RNAi
uuugaccucgugucuagagua

SEQ ID NO: 18172 - DNA, 21 bp, homo sapiens
tacctaatctccaagtgctag

SEQ ID NO: 18173 - RNA, 21 nt, RNAi
ccuaaucuccaagugcuaguu

SEQ ID NO: 18174 - RNA, 21 nt, RNAi
uuggauuagagguucacgauc

SEQ ID NO: 18175 - DNA, 21 bp, homo sapiens
taatctccaagtgctagatct

SEQ ID NO: 18176 - RNA, 21 nt, RNAi
aucuccaagugcuagaucuuu

SEQ ID NO: 18177 - RNA, 21 nt, RNAi
uuuagagguucacgaucuaga

SEQ ID NO: 18178 - DNA, 21 bp, homo sapiens
tagatctgtcttacaacctat

SEQ ID NO: 18179 - RNA, 21 nt, RNAi
gaucugucuuacaaccuauuu

SEQ ID NO: 18180 - RNA, 21 nt, RNAi
uucuagacagaauguuggaua

SEQ ID NO: 18181 - DNA, 21 bp, homo sapiens
taaagttgacactttccagca

SEQ ID NO: 18182 - RNA, 21 nt, RNAi
aaguugacacuuuccagcauu

SEQ ID NO: 18183 - RNA, 21 nt, RNAi
uuuucaacugugaaaggucgu

SEQ ID NO: 18184 - DNA, 21 bp, homo sapiens
tagcctccgatcgctgaattt

SEQ ID NO: 18185 - RNA, 21 nt, RNAi
gccuccgaucgcugaauuuuu

SEQ ID NO: 18186 - RNA, 21 nt, RNAi
uucggaggcuagcgacuuaaa

SEQ ID NO: 18187 - DNA, 21 bp, homo sapiens
taataaagctggacctatcgt

SEQ ID NO: 18188 - RNA, 21 nt, RNAi
auaaagcuggaccuaucguuu

SEQ ID NO: 18189 - RNA, 21 nt, RNAi
uuuauuucgaccuggauagca

SEQ ID NO: 18190 - DNA, 21 bp, homo sapiens
taaagctggacctatcgtcca

SEQ ID NO: 18191 - RNA, 21 nt, RNAi
aagcuggaccuaucguccauu

SEQ ID NO: 18192 - RNA, 21 nt, RNAi
uuuucgaccuggauagcaggu

SEQ ID NO: 18193 - DNA, 21 bp, homo sapiens
tatcgtccaacctcctgtcgt

SEQ ID NO: 18194 - RNA, 21 nt, RNAi
ucguccaaccuccugucguuu

SEQ ID NO: 18195 - RNA, 21 nt, RNAi
uuagcagguuggaggacagca

SEQ ID NO: 18196 - DNA, 21 bp, homo sapiens
taacaggaaatcatgccttac

SEQ ID NO: 18197 - RNA, 21 nt, RNAi
acaggaaaucaugccuuacuu

SEQ ID NO: 18198 - RNA, 21 nt, RNAi
uuuguccuuuaguacggaaug

SEQ ID NO: 18199 - DNA, 21 bp, homo sapiens
tacagagcttgatatcatctg

SEQ ID NO: 18200 - RNA, 21 nt, RNAi
cagagcuugauaucaucuguu

SEQ ID NO: 18201 - RNA, 21 nt, RNAi
uugucucgaacuauaguagac

SEQ ID NO: 18202 - DNA, 21 bp, homo sapiens
tagaaatgccttatgcttacc

SEQ ID NO: 18203 - RNA, 21 nt, RNAi
gaaaugccuuaugcuuaccuu

SEQ ID NO: 18204 - RNA, 21 nt, RNAi
uucuuuacggaauacgaaugg

SEQ ID NO: 18205 - DNA, 21 bp, homo sapiens
tatgcttaccagtgctgtgca

SEQ ID NO: 18206 - RNA, 21 nt, RNAi
ugcuuaccagugcugugcauu

SEQ ID NO: 18207 - RNA, 21 nt, RNAi
uuacgaauggucacgacacgu

SEQ ID NO: 18208 - DNA, 21 bp, homo sapiens
taccagtgctgtgcatttgga

SEQ ID NO: 18209 - RNA, 21 nt, RNAi
ccagugcugugcauuuggauu

SEQ ID NO: 18210 - RNA, 21 nt, RNAi
uuggucacgacacguaaaccu

SEQ ID NO: 18211 - DNA, 21 bp, homo sapiens
taaaggtgacaacagcagtat

SEQ ID NO: 18212 - RNA, 21 nt, RNAi
aaggugacaacagcaguauuu

SEQ ID NO: 18213 - RNA, 21 nt, RNAi
uuuuccacuguugucgucaua

SEQ ID NO: 18214 - DNA, 21 bp, homo sapiens
tatggacgaccttcataagaa

SEQ ID NO: 18215 - RNA, 21 nt, RNAi
uggacgaccuucauaagaauu

SEQ ID NO: 18216 - RNA, 21 nt, RNAi
uuaccugcuggaaguauucuu

SEQ ID NO: 18217 - DNA, 21 bp, homo sapiens
taagaaagatgctggaatgtt

SEQ ID NO: 18218 - RNA, 21 nt, RNAi
agaaagaugcuggaauguuuu

SEQ ID NO: 18219 - RNA, 21 nt, RNAi
uuucuuucuacgaccuuacaa

SEQ ID NO: 18220 - DNA, 21 bp, homo sapiens
tagcagttctggcacttactt

SEQ ID NO: 18221 - RNA, 21 nt, RNAi
gcaguucuggcacuuacuuuu

SEQ ID NO: 18222 - RNA, 21 nt, RNAi
uucgucaagaccgugaaugaa

SEQ ID NO: 18223 - DNA, 21 bp, homo sapiens
tacttgtaatgctttggtgac

SEQ ID NO: 18224 - RNA, 21 nt, RNAi
cuuguaaugcuuuggugacuu

SEQ ID NO: 18225 - RNA, 21 nt, RNAi
uugaacauuacgaaaccacug

SEQ ID NO: 18226 - DNA, 21 bp, homo sapiens
taatgctttggtgacttcaac

SEQ ID NO: 18227 - RNA, 21 nt, RNAi
augcuuuggugacuucaacuu

SEQ ID NO: 18228 - RNA, 21 nt, RNAi
uuuacgaaaccacugaaguug

SEQ ID NO: 18229 - DNA, 21 bp, homo sapiens
tacatggtcgctctcatcttg

SEQ ID NO: 18230 - RNA, 21 nt, RNAi
cauggucgcucucaucuuguu

SEQ ID NO: 18231 - RNA, 21 nt, RNAi
uuguaccagcgagaguagaac

SEQ ID NO: 18232 - DNA, 21 bp, homo sapiens
tacaccaagctctactgcaat

SEQ ID NO: 18233 - RNA, 21 nt, RNAi
caccaagcucuacugcaauuu

SEQ ID NO: 18234 - RNA, 21 nt, RNAi
uugugguucgagaugacguua

SEQ ID NO: 18235 - DNA, 21 bp, homo sapiens
tacatttatcagtcctgaagt

SEQ ID NO: 18236 - RNA, 21 nt, RNAi
cauuuaucaguccugaaguuu

SEQ ID NO: 18237 - RNA, 21 nt, RNAi
uuguaaauagucaggacuuca

SEQ ID NO: 18238 - DNA, 21 bp, homo sapiens
taagtttatccttctggtggt

SEQ ID NO: 18239 - RNA, 21 nt, RNAi
aguuuauccuucuggugguuu

SEQ ID NO: 18240 - RNA, 21 nt, RNAi
uuucaaauaggaagaccacca

SEQ ID NO: 18241 - DNA, 21 bp, homo sapiens
tacatcttgttcaatcctcac

SEQ ID NO: 18242 - RNA, 21 nt, RNAi
caucuuguucaauccucacuu

SEQ ID NO: 18243 - RNA, 21 nt, RNAi
uuguagaacaaguuaggagug

SEQ ID NO: 18244 - DNA, 21 bp, homo sapiens
taaggaggatctggtgagcct

SEQ ID NO: 18245 - RNA, 21 nt, RNAi
aggaggaucuggugagccuuu

SEQ ID NO: 18246 - RNA, 21 nt, RNAi
uuuccuccuagaccacucgga

SEQ ID NO: 18247 - DNA, 21 bp, homo sapiens
taacctttaccagctccagca

SEQ ID NO: 18248 - RNA, 21 nt, RNAi
accuuuaccagcuccagcauu

SEQ ID NO: 18249 - RNA, 21 nt, RNAi
uuuggaaauggucgaggucgu

SEQ ID NO: 18250 - DNA, 21 bp, homo sapiens
taccagctccagcatcactta

SEQ ID NO: 18251 - RNA, 21 nt, RNAi
ccagcuccagcaucacuuauu

SEQ ID NO: 18252 - RNA, 21 nt, RNAi
uuggucgaggucguagugaau

SEQ ID NO: 18253 - DNA, 21 bp, homo sapiens
tatccagtgactgagagctgc

SEQ ID NO: 18254 - RNA, 21 nt, RNAi
uccagugacugagagcugcuu

SEQ ID NO: 18255 - RNA, 21 nt, RNAi
uuaggucacugacucucgacg

SEQ ID NO: 18256 - DNA, 21 bp, homo sapiens
aacctctccagcttggtagtt

SEQ ID NO: 18257 - RNA, 21 nt, RNAi
ccucuccagcuugguaguuuu

SEQ ID NO: 18258 - RNA, 21 nt, RNAi
uuggagaggucgaaccaucaa

SEQ ID NO: 18259 - DNA, 21 bp, homo sapiens
aacaatatcaggtcgatacct

SEQ ID NO: 18260 - RNA, 21 nt, RNAi
caauaucaggucgauaccuuu

SEQ ID NO: 18261 - RNA, 21 nt, RNAi
uuguuauaguccagcuaugga

SEQ ID NO: 18262 - DNA, 21 bp, homo sapiens
aagaacactgactctgaatgg

SEQ ID NO: 18263 - RNA, 21 nt, RNAi
gaacacugacucugaaugguu

SEQ ID NO: 18264 - RNA, 21 nt, RNAi
uucuugugacugagacuuacc

SEQ ID NO: 18265 - DNA, 21 bp, homo sapiens
aatctccaagtgctagatctg

SEQ ID NO: 18266 - RNA, 21 nt, RNAi
ucuccaagugcuagaucuguu

SEQ ID NO: 18267 - RNA, 21 nt, RNAi
uuagagguucacgaucuagac

SEQ ID NO: 18268 - DNA, 21 bp, homo sapiens
aagtgctagatctgtcttaca

SEQ ID NO: 18269 - RNA, 21 nt, RNAi
gugcuagaucugucuuacauu

SEQ ID NO: 18270 - RNA, 21 nt, RNAi
uucacgaucuagacagaaugu

SEQ ID NO: 18271 - DNA, 21 bp, homo sapiens
aataaagctggacctatcgtc

SEQ ID NO: 18272 - RNA, 21 nt, RNAi
uaaagcuggaccuaucgucuu

SEQ ID NO: 18273 - RNA, 21 nt, RNAi
uuauuucgaccuggauagcag

SEQ ID NO: 18274 - DNA, 21 bp, homo sapiens
aaatgccttatgcttaccagt

SEQ ID NO: 18275 - RNA, 21 nt, RNAi
augccuuaugcuuaccaguuu

SEQ ID NO: 18276 - RNA, 21 nt, RNAi
uuuacggaauacgaaugguca

SEQ ID NO: 18277 - DNA, 21 bp, homo sapiens
aatgccttatgcttaccagtg

SEQ ID NO: 18278 - RNA, 21 nt, RNAi
ugccuuaugcuuaccaguguu

SEQ ID NO: 18279 - RNA, 21 nt, RNAi
uuacggaauacgaauggucac

SEQ ID NO: 18280 - DNA, 21 bp, homo sapiens
aataaaggtgacaacagcagt

SEQ ID NO: 18281 - RNA, 21 nt, RNAi
uaaaggugacaacagcaguuu

SEQ ID NO: 18282 - RNA, 21 nt, RNAi
uuauuuccacuguugucguca

SEQ ID NO: 18283 - DNA, 21 bp, homo sapiens
aacagcagtatggacgacctt

SEQ ID NO: 18284 - RNA, 21 nt, RNAi
cagcaguauggacgaccuuuu

SEQ ID NO: 18285 - RNA, 21 nt, RNAi
uugucgucauaccugcuggaa

SEQ ID NO: 18286 - DNA, 21 bp, homo sapiens
aattggagtgtggaccatagc

SEQ ID NO: 18287 - RNA, 21 nt, RNAi
uuggaguguggaccauagcuu

SEQ ID NO: 18288 - RNA, 21 nt, RNAi
uuaaccucacaccugguaucg

SEQ ID NO: 18289 - DNA, 21 bp, homo sapiens
aatttgaaacgaaagctccat

SEQ ID NO: 18290 - RNA, 21 nt, RNAi
uuugaaacgaaagcuccauuu

SEQ ID NO: 18291 - RNA, 21 nt, RNAi
uuaaacuuugcuuucgaggua

SEQ ID NO: 18292 - DNA, 21 bp, homo sapiens
aagctctactgcaatttggac

SEQ ID NO: 18293 - RNA, 21 nt, RNAi
gcucuacugcaauuuggacuu

SEQ ID NO: 18294 - RNA, 21 nt, RNAi
uucgagaugacguuaaaccug

SEQ ID NO: 18295 - DNA, 21 bp, homo sapiens
aaagcaaacctacgtctggac

SEQ ID NO: 18296 - RNA, 21 nt, RNAi
agcaaaccuacgucuggacuu

SEQ ID NO: 18297 - RNA, 21 nt, RNAi
uuucguuuggaugcagaccug

SEQ ID NO: 18298 - DNA, 21 bp, homo sapiens
aagcaaacctacgtctggaca

SEQ ID NO: 18299 - RNA, 21 nt, RNAi
gcaaaccuacgucuggacauu

SEQ ID NO: 18300 - RNA, 21 nt, RNAi
uucguuuggaugcagaccugu

SEQ ID NO: 18301 - DNA, 21 bp, homo sapiens
aaacctacgtctggacaagat

SEQ ID NO: 18302 - RNA, 21 nt, RNAi
accuacgucuggacaagauuu

SEQ ID NO: 18303 - RNA, 21 nt, RNAi
uuuggaugcagaccuguucua

SEQ ID NO: 18304 - DNA, 21 bp, homo sapiens
aacctacgtctggacaagatc

SEQ ID NO: 18305 - RNA, 21 nt, RNAi
ccuacgucuggacaagaucuu

SEQ ID NO: 18306 - RNA, 21 nt, RNAi
uuggaugcagaccuguucuag

SEQ ID NO: 18307 - DNA, 21 bp, homo sapiens
aagcttgatgtcaattaactc

SEQ ID NO: 18308 - RNA, 21 nt, RNAi
gcuugaugucaauuaacucuu

SEQ ID NO: 18309 - RNA, 21 nt, RNAi
uucgaacuacaguuaauugag

SEQ ID NO: 18310 - DNA, 21 bp, homo sapiens
aattaactctgatgatgtcga

SEQ ID NO: 18311 - RNA, 21 nt, RNAi
uuaacucugaugaugucgauu

SEQ ID NO: 18312 - RNA, 21 nt, RNAi
uuaauugagacuacuacagcu

SEQ ID NO: 18313 - DNA, 21 bp, homo sapiens
aaacagtcctgtgactcaact

SEQ ID NO: 18314 - RNA, 21 nt, RNAi
acaguccugugacucaacuuu

SEQ ID NO: 18315 - RNA, 21 nt, RNAi
uuugucaggacacugaguuga

SEQ ID NO: 18316 - DNA, 21 bp, homo sapiens
cacataccagactatgccttt

SEQ ID NO: 18317 - RNA, 21 nt, RNAi
cauaccagacuaugccuuuuu

SEQ ID NO: 18318 - RNA, 21 nt, RNAi
uuguauggucugauacggaaa

SEQ ID NO: 18319 - DNA, 21 bp, homo sapiens
cataacaatagaatccactcc

SEQ ID NO: 18320 - RNA, 21 nt, RNAi
uaacaauagaauccacuccuu

SEQ ID NO: 18321 - RNA, 21 nt, RNAi
uuauuguuaucuuaggugagg

SEQ ID NO: 18322 - DNA, 21 bp, homo sapiens
cacagcctagagactttagat

SEQ ID NO: 18323 - RNA, 21 nt, RNAi
cagccuagagacuuuagauuu

SEQ ID NO: 18324 - RNA, 21 nt, RNAi
uugucggaucucugaaaucua

SEQ ID NO: 18325 - DNA, 21 bp, homo sapiens
cactgcaattaggacactctc

SEQ ID NO: 18326 - RNA, 21 nt, RNAi
cugcaauuaggacacucucuu

SEQ ID NO: 18327 - RNA, 21 nt, RNAi
uugacguuaauccugugagag

SEQ ID NO: 18328 - DNA, 21 bp, homo sapiens
caattaggacactctccaacc

SEQ ID NO: 18329 - RNA, 21 nt, RNAi
auuaggacacucuccaaccuu

SEQ ID NO: 18330 - RNA, 21 nt, RNAi
uuuaauccugugagagguugg

SEQ ID NO: 18331 - DNA, 21 bp, homo sapiens
cactctccaaccttaaagaac

SEQ ID NO: 18332 - RNA, 21 nt, RNAi
cucuccaaccuuaaagaacuu

SEQ ID NO: 18333 - RNA, 21 nt, RNAi
uugagagguuggaauuucuug

SEQ ID NO: 18334 - DNA, 21 bp, homo sapiens
caacaatatcaggtcgatacc

SEQ ID NO: 18335 - RNA, 21 nt, RNAi
acaauaucaggucgauaccuu

SEQ ID NO: 18336 - RNA, 21 nt, RNAi
uuuguuauaguccagcuaugg

SEQ ID NO: 18337 - DNA, 21 bp, homo sapiens
catctcttcctcaaaccgtct

SEQ ID NO: 18338 - RNA, 21 nt, RNAi
ucucuuccucaaaccgucuuu

SEQ ID NO: 18339 - RNA, 21 nt, RNAi
uuagagaaggaguuuggcaga

SEQ ID NO: 18340 - DNA, 21 bp, homo sapiens
caaaccgtctgcaatcagtta

SEQ ID NO: 18341 - RNA, 21 nt, RNAi
aaccgucugcaaucaguuauu

SEQ ID NO: 18342 - RNA, 21 nt, RNAi
uuuuggcagacguuagucaau

SEQ ID NO: 18343 - DNA, 21 bp, homo sapiens
cagttacctaatctccaagtg

SEQ ID NO: 18344 - RNA, 21 nt, RNAi
guuaccuaaucuccaaguguu

SEQ ID NO: 18345 - RNA, 21 nt, RNAi
uucaauggauuagagguucac

SEQ ID NO: 18346 - DNA, 21 bp, homo sapiens
caagtgctagatctgtcttac

SEQ ID NO: 18347 - RNA, 21 nt, RNAi
agugcuagaucugucuuacuu

SEQ ID NO: 18348 - RNA, 21 nt, RNAi
uuucacgaucuagacagaaug

SEQ ID NO: 18349 - DNA, 21 bp, homo sapiens
cagagcttgatatcatctgaa

SEQ ID NO: 18350 - RNA, 21 nt, RNAi
gagcuugauaucaucugaauu

SEQ ID NO: 18351 - RNA, 21 nt, RNAi
uucucgaacuauaguagacuu

SEQ ID NO: 18352 - DNA, 21 bp, homo sapiens
caacagcagtatggacgacct

SEQ ID NO: 18353 - RNA, 21 nt, RNAi
acagcaguauggacgaccuuu

SEQ ID NO: 18354 - RNA, 21 nt, RNAi
uuugucgucauaccugcugga

SEQ ID NO: 18355 - DNA, 21 bp, homo sapiens
cagcagtatggacgaccttca

SEQ ID NO: 18356 - RNA, 21 nt, RNAi
gcaguauggacgaccuucauu

SEQ ID NO: 18357 - RNA, 21 nt, RNAi
uucgucauaccugcuggaagu

SEQ ID NO: 18358 - DNA, 21 bp, homo sapiens
cagtatggacgaccttcataa

SEQ ID NO: 18359 - RNA, 21 nt, RNAi
guauggacgaccuucauaauu

SEQ ID NO: 18360 - RNA, 21 nt, RNAi
uucauaccugcuggaaguauu

SEQ ID NO: 18361 - DNA, 21 bp, homo sapiens
caggctcaagatgaacgtgac

SEQ ID NO: 18362 - RNA, 21 nt, RNAi
ggcucaagaugaacgugacuu

SEQ ID NO: 18363 - RNA, 21 nt, RNAi
uuccgaguucuacuugcacug

SEQ ID NO: 18364 - DNA, 21 bp, homo sapiens
cagaattggagtgtggaccat

SEQ ID NO: 18365 - RNA, 21 nt, RNAi
gaauuggaguguggaccauuu

SEQ ID NO: 18366 - RNA, 21 nt, RNAi
uucuuaaccucacaccuggua

SEQ ID NO: 18367 - DNA, 21 bp, homo sapiens
catgatgaccattgcctacac

SEQ ID NO: 18368 - RNA, 21 nt, RNAi
ugaugaccauugccuacacuu

SEQ ID NO: 18369 - RNA, 21 nt, RNAi
uuacuacugguaacggaugug

SEQ ID NO: 18370 - DNA, 21 bp, homo sapiens
caagctctactgcaatttgga

SEQ ID NO: 18371 - RNA, 21 nt, RNAi
agcucuacugcaauuuggauu

SEQ ID NO: 18372 - RNA, 21 nt, RNAi
uuucgagaugacguuaaaccu

SEQ ID NO: 18373 - DNA, 21 bp, homo sapiens
caccaactgcatcctaaactg

SEQ ID NO: 18374 - RNA, 21 nt, RNAi
ccaacugcauccuaaacuguu

SEQ ID NO: 18375 - RNA, 21 nt, RNAi
uugguugacguaggauuugac

SEQ ID NO: 18376 - DNA, 21 bp, homo sapiens
cacttcctgcatgtctcaatc

SEQ ID NO: 18377 - RNA, 21 nt, RNAi
cuuccugcaugucucaaucuu

SEQ ID NO: 18378 - RNA, 21 nt, RNAi
uugaaggacguacagaguuag

SEQ ID NO: 18379 - DNA, 21 bp, homo sapiens
caaacctacgtctggacaaga

SEQ ID NO: 18380 - RNA, 21 nt, RNAi
aaccuacgucuggacaagauu

SEQ ID NO: 18381 - RNA, 21 nt, RNAi
uuuuggaugcagaccuguucu

SEQ ID NO: 18382 - DNA, 21 bp, homo sapiens
caattaactctgatgatgtcg

SEQ ID NO: 18383 - RNA, 21 nt, RNAi
auuaacucugaugaugucguu

SEQ ID NO: 18384 - RNA, 21 nt, RNAi
uuuaauugagacuacuacagc

SEQ ID NO: 18385 - DNA, 21 bp, homo sapiens
catcacttatgacctgcctcc

SEQ ID NO: 18386 - RNA, 21 nt, RNAi
ucacuuaugaccugccuccuu

SEQ ID NO: 18387 - RNA, 21 nt, RNAi
uuagugaauacuggacggagg

SEQ ID NO: 18388 - DNA, 21 bp, homo sapiens
gagcattcactggcctttaca

SEQ ID NO: 18389 - RNA, 21 nt, RNAi
gcauucacuggccuuuacauu

SEQ ID NO: 18390 - RNA, 21 nt, RNAi
uucguaagugaccggaaaugu

SEQ ID NO: 18391 - DNA, 21 bp, homo sapiens
gatgctaaccacatcagctat

SEQ ID NO: 18392 - RNA, 21 nt, RNAi
ugcuaaccacaucagcuauuu

SEQ ID NO: 18393 - RNA, 21 nt, RNAi
uuacgauugguguagucgaua

SEQ ID NO: 18394 - DNA, 21 bp, homo sapiens
gagagtctgactttaactgga

SEQ ID NO: 18395 - RNA, 21 nt, RNAi
gagucugacuuuaacuggauu

SEQ ID NO: 18396 - RNA, 21 nt, RNAi
uucucagacugaaauugaccu

SEQ ID NO: 18397 - DNA, 21 bp, homo sapiens
gactttaactggagcacagat

SEQ ID NO: 18398 - RNA, 21 nt, RNAi
cuuuaacuggagcacagauuu

SEQ ID NO: 18399 - RNA, 21 nt, RNAi
uugaaauugaccucgugucua

SEQ ID NO: 18400 - DNA, 21 bp, homo sapiens
gaaatgccttatgcttaccag

SEQ ID NO: 18401 - RNA, 21 nt, RNAi
aaugccuuaugcuuaccaguu

SEQ ID NO: 18402 - RNA, 21 nt, RNAi
uuuuacggaauacgaaugguc

SEQ ID NO: 18403 - DNA, 21 bp, homo sapiens
gagtgtgtgagaatgcctata

SEQ ID NO: 18404 - RNA, 21 nt, RNAi
gugugugagaaugccuauauu

SEQ ID NO: 18405 - RNA, 21 nt, RNAi
uucacacacucuuacggauau

SEQ ID NO: 18406 - DNA, 21 bp, homo sapiens
gaatgtttcaggctcaagatg

SEQ ID NO: 18407 - RNA, 21 nt, RNAi
auguuucaggcucaagauguu

SEQ ID NO: 18408 - RNA, 21 nt, RNAi
uuuacaaaguccgaguucuac

SEQ ID NO: 18409 - DNA, 21 bp, homo sapiens
gatcagaattggagtgtggac

SEQ ID NO: 18410 - RNA, 21 nt, RNAi
ucagaauuggaguguggacuu

SEQ ID NO: 18411 - RNA, 21 nt, RNAi
uuagucuuaaccucacaccug

SEQ ID NO: 18412 - DNA, 21 bp, homo sapiens
gaattggagtgtggaccatag

SEQ ID NO: 18413 - RNA, 21 nt, RNAi
auuggaguguggaccauaguu

SEQ ID NO: 18414 - RNA, 21 nt, RNAi
uuuaaccucacaccugguauc

SEQ ID NO: 18415 - DNA, 21 bp, homo sapiens
gatgaccattgcctacaccaa

SEQ ID NO: 18416 - RNA, 21 nt, RNAi
ugaccauugccuacaccaauu

SEQ ID NO: 18417 - RNA, 21 nt, RNAi
uuacugguaacggaugugguu

SEQ ID NO: 18418 - DNA, 21 bp, homo sapiens
gagaaagcaaacctacgtctg

SEQ ID NO: 18419 - RNA, 21 nt, RNAi
gaaagcaaaccuacgucuguu

SEQ ID NO: 18420 - RNA, 21 nt, RNAi
uucuuucguuuggaugcagac

SEQ ID NO: 18421 - DNA, 21 bp, homo sapiens
gaaagcaaacctacgtctgga

SEQ ID NO: 18422 - RNA, 21 nt, RNAi
aagcaaaccuacgucuggauu

SEQ ID NO: 18423 - RNA, 21 nt, RNAi
uuuucguuuggaugcagaccu

SEQ ID NO: 18424 - DNA, 21 bp, homo sapiens
tatgaacaacatcagtcagct

SEQ ID NO: 18425 - RNA, 21 nt, RNAi
ugaacaacaucagucagcuuu

SEQ ID NO: 18426 - RNA, 21 nt, RNAi
uuacuuguuguagucagucga

SEQ ID NO: 18427 - DNA, 21 bp, homo sapiens
tagttctacatctccataaca

SEQ ID NO: 18428 - RNA, 21 nt, RNAi
guucuacaucuccauaacauu

SEQ ID NO: 18429 - RNA, 21 nt, RNAi
uucaagauguagagguauugu

SEQ ID NO: 18430 - DNA, 21 bp, homo sapiens
taagaacactgactctgaatg

SEQ ID NO: 18431 - RNA, 21 nt, RNAi
agaacacugacucugaauguu

SEQ ID NO: 18432 - RNA, 21 nt, RNAi
uuucuugugacugagacuuac

SEQ ID NO: 18433 - DNA, 21 bp, homo sapiens
taactggagcacagatctcat

SEQ ID NO: 18434 - RNA, 21 nt, RNAi
acuggagcacagaucucauuu

SEQ ID NO: 18435 - RNA, 21 nt, RNAi
uuugaccucgugucuagagua

SEQ ID NO: 18436 - DNA, 21 bp, homo sapiens
tacctaatctccaagtgctag

SEQ ID NO: 18437 - RNA, 21 nt, RNAi
ccuaaucuccaagugcuaguu

SEQ ID NO: 18438 - RNA, 21 nt, RNAi
uuggauuagagguucacgauc

SEQ ID NO: 18439 - DNA, 21 bp, homo sapiens
taatctccaagtgctagatct

SEQ ID NO: 18440 - RNA, 21 nt, RNAi
aucuccaagugcuagaucuuu

SEQ ID NO: 18441 - RNA, 21 nt, RNAi
uuuagagguucacgaucuaga

SEQ ID NO: 18442 - DNA, 21 bp, homo sapiens
tagcctccgatcgctgaattt

SEQ ID NO: 18443 - RNA, 21 nt, RNAi
gccuccgaucgcugaauuuuu

SEQ ID NO: 18444 - RNA, 21 nt, RNAi
uucggaggcuagcgacuuaaa

SEQ ID NO: 18445 - DNA, 21 bp, homo sapiens
taataaagctggacctatcgt

SEQ ID NO: 18446 - RNA, 21 nt, RNAi
auaaagcuggaccuaucguuu

SEQ ID NO: 18447 - RNA, 21 nt, RNAi
uuuauuucgaccuggauagca

SEQ ID NO: 18448 - DNA, 21 bp, homo sapiens
tacagagcttgatatcatctg

SEQ ID NO: 18449 - RNA, 21 nt, RNAi
cagagcuugauaucaucuguu

SEQ ID NO: 18450 - RNA, 21 nt, RNAi
uugucucgaacuauaguagac

SEQ ID NO: 18451 - DNA, 21 bp, homo sapiens
tagaaatgccttatgcttacc

SEQ ID NO: 18452 - RNA, 21 nt, RNAi
gaaaugccuuaugcuuaccuu

SEQ ID NO: 18453 - RNA, 21 nt, RNAi
uucuuuacggaauacgaaugg

SEQ ID NO: 18454 - DNA, 21 bp, homo sapiens
tatggacgaccttcataagaa

SEQ ID NO: 18455 - RNA, 21 nt, RNAi
uggacgaccuucauaagaauu

SEQ ID NO: 18456 - RNA, 21 nt, RNAi
uuaccugcuggaaguauucuu

SEQ ID NO: 18457 - DNA, 21 bp, homo sapiens
aacgccacctcagaaggttgc

SEQ ID NO: 18458 - RNA, 21 nt, RNAi
cgccaccucagaagguugcuu

SEQ ID NO: 18459 - RNA, 21 nt, RNAi
uugcgguggagucuuccaacg

SEQ ID NO: 18460 - DNA, 21 bp, homo sapiens
aaggttgccagatcatacacc

SEQ ID NO: 18461 - RNA, 21 nt, RNAi
gguugccagaucauacaccuu

SEQ ID NO: 18462 - RNA, 21 nt, RNAi
uuccaacggucuaguaugugg

SEQ ID NO: 18463 - DNA, 21 bp, homo sapiens
aaggctatcaacttcctgcca

SEQ ID NO: 18464 - RNA, 21 nt, RNAi
ggcuaucaacuuccugccauu

SEQ ID NO: 18465 - RNA, 21 nt, RNAi
uuccgauaguugaaggacggu

SEQ ID NO: 18466 - DNA, 21 bp, homo sapiens
aacttcctgccagtggactat

SEQ ID NO: 18467 - RNA, 21 nt, RNAi
cuuccugccaguggacuauuu

SEQ ID NO: 18468 - RNA, 21 nt, RNAi
uugaaggacggucaccugaua

SEQ ID NO: 18469 - DNA, 21 bp, homo sapiens
aacggctcctggacagatatg

SEQ ID NO: 18470 - RNA, 21 nt, RNAi
cggcuccuggacagauauguu

SEQ ID NO: 18471 - RNA, 21 nt, RNAi
uugccgaggaccugucuauac

SEQ ID NO: 18472 - DNA, 21 bp, homo sapiens
aatctgctccaagtcttattt

SEQ ID NO: 18473 - RNA, 21 nt, RNAi
ucugcuccaagucuuauuuuu

SEQ ID NO: 18474 - RNA, 21 nt, RNAi
uuagacgagguucagaauaaa

SEQ ID NO: 18475 - DNA, 21 bp, homo sapiens
aatcgaacgccacactcagaa

SEQ ID NO: 18476 - RNA, 21 nt, RNAi
ucgaacgccacacucagaauu

SEQ ID NO: 18477 - RNA, 21 nt, RNAi
uuagcuugcggugugagucuu

SEQ ID NO: 18478 - DNA, 21 bp, homo sapiens
aacgccacactcagaacggcg

SEQ ID NO: 18479 - RNA, 21 nt, RNAi
cgccacacucagaacggcguu

SEQ ID NO: 18480 - RNA, 21 nt, RNAi
uugcggugugagucuugccgc

SEQ ID NO: 18481 - DNA, 21 bp, homo sapiens
aagctcatccaccacgacagc

SEQ ID NO: 18482 - RNA, 21 nt, RNAi
gcucauccaccacgacagcuu

SEQ ID NO: 18483 - RNA, 21 nt, RNAi
uucgaguagguggugcugucg

SEQ ID NO: 18484 - DNA, 21 bp, homo sapiens
aagtgtgatccaggccaagcc

SEQ ID NO: 18485 - RNA, 21 nt, RNAi
gugugauccaggccaagccuu

SEQ ID NO: 18486 - RNA, 21 nt, RNAi
uucacacuagguccgguucgg

SEQ ID NO: 18487 - DNA, 21 bp, homo sapiens
aagccaccaagtacctatatg

SEQ ID NO: 18488 - RNA, 21 nt, RNAi
gccaccaaguaccuauauguu

SEQ ID NO: 18489 - RNA, 21 nt, RNAi
uucggugguucauggauauac

SEQ ID NO: 18490 - DNA, 21 bp, homo sapiens
aagtacctatatgagctgctc

SEQ ID NO: 18491 - RNA, 21 nt, RNAi
guaccuauaugagcugcucuu

SEQ ID NO: 18492 - RNA, 21 nt, RNAi
uucauggauauacucgacgag

SEQ ID NO: 18493 - DNA, 21 bp, homo sapiens
aagatcatccttatgcctggc

SEQ ID NO: 18494 - RNA, 21 nt, RNAi
gaucauccuuaugccuggcuu

SEQ ID NO: 18495 - RNA, 21 nt, RNAi
uucuaguaggaauacggaccg

SEQ ID NO: 18496 - DNA, 21 bp, homo sapiens
aacctcattgtgctttcctat

SEQ ID NO: 18497 - RNA, 21 nt, RNAi
ccucauugugcuuuccuauuu

SEQ ID NO: 18498 - RNA, 21 nt, RNAi
uuggaguaacacgaaaggaua

SEQ ID NO: 18499 - DNA, 21 bp, homo sapiens
aagaagattgctaccatccag

SEQ ID NO: 18500 - RNA, 21 nt, RNAi
gaagauugcuaccauccaguu

SEQ ID NO: 18501 - RNA, 21 nt, RNAi
uucuucuaacgaugguagguc

SEQ ID NO: 18502 - DNA, 21 bp, homo sapiens
aagattgctaccatccagcag

SEQ ID NO: 18503 - RNA, 21 nt, RNAi
gauugcuaccauccagcaguu

SEQ ID NO: 18504 - RNA, 21 nt, RNAi
uucuaacgaugguaggucguc

SEQ ID NO: 18505 - DNA, 21 bp, homo sapiens
aacgagtgaaggaggctggaa

SEQ ID NO: 18506 - RNA, 21 nt, RNAi
cgagugaaggaggcuggaauu

SEQ ID NO: 18507 - RNA, 21 nt, RNAi
uugcucacuuccuccgaccuu

SEQ ID NO: 18508 - DNA, 21 bp, homo sapiens
aaggaggctggaattgagatt

SEQ ID NO: 18509 - RNA, 21 nt, RNAi
ggaggcuggaauugagauuuu

SEQ ID NO: 18510 - RNA, 21 nt, RNAi
uuccuccgaccuuaacucuaa

SEQ ID NO: 18511 - DNA, 21 bp, homo sapiens
aattgagattactttccgcca

SEQ ID NO: 18512 - RNA, 21 nt, RNAi
uugagauuacuuuccgccauu

SEQ ID NO: 18513 - RNA, 21 nt, RNAi
uuaacucuaaugaaaggcggu

SEQ ID NO: 18514 - DNA, 21 bp, homo sapiens
aaacctgaagcgccaggatgc

SEQ ID NO: 18515 - RNA, 21 nt, RNAi
accugaagcgccaggaugcuu

SEQ ID NO: 18516 - RNA, 21 nt, RNAi
uuuggacuucgcgguccuacg

SEQ ID NO: 18517 - DNA, 21 bp, homo sapiens
aacctgaagcgccaggatgcc

SEQ ID NO: 18518 - RNA, 21 nt, RNAi
ccugaagcgccaggaugccuu

SEQ ID NO: 18519 - RNA, 21 nt, RNAi
uuggacuucgcgguccuacgg

SEQ ID NO: 18520 - DNA, 21 bp, homo sapiens
aagaagtacgtctggttcctc

SEQ ID NO: 18521 - RNA, 21 nt, RNAi
gaaguacgucugguuccucuu

SEQ ID NO: 18522 - RNA, 21 nt, RNAi
uucuucaugcagaccaaggag

SEQ ID NO: 18523 - DNA, 21 bp, homo sapiens
aagtacgtctggttcctcatt

SEQ ID NO: 18524 - RNA, 21 nt, RNAi
guacgucugguuccucauuuu

SEQ ID NO: 18525 - RNA, 21 nt, RNAi
uucaugcagaccaaggaguaa

SEQ ID NO: 18526 - DNA, 21 bp, homo sapiens
aattggttcaagatctacgac

SEQ ID NO: 18527 - RNA, 21 nt, RNAi
uugguucaagaucuacgacuu

SEQ ID NO: 18528 - RNA, 21 nt, RNAi
uuaaccaaguucuagaugcug

SEQ ID NO: 18529 - DNA, 21 bp, homo sapiens
aactgcacagtggatgagatg

SEQ ID NO: 18530 - RNA, 21 nt, RNAi
cugcacaguggaugagauguu

SEQ ID NO: 18531 - RNA, 21 nt, RNAi
uugacgugucaccuacucuac

SEQ ID NO: 18532 - DNA, 21 bp, homo sapiens
aactgagattgtcatgctgaa

SEQ ID NO: 18533 - RNA, 21 nt, RNAi
cugagauugucaugcugaauu

SEQ ID NO: 18534 - RNA, 21 nt, RNAi
uugacucuaacaguacgacuu

SEQ ID NO: 18535 - DNA, 21 bp, homo sapiens
aatttgtggagaaactaacca

SEQ ID NO: 18536 - RNA, 21 nt, RNAi
uuuguggagaaacuaaccauu

SEQ ID NO: 18537 - RNA, 21 nt, RNAi
uuaaacaccucuuugauuggu

SEQ ID NO: 18538 - DNA, 21 bp, homo sapiens
aaactaaccaagcgactgaaa

SEQ ID NO: 18539 - RNA, 21 nt, RNAi
acuaaccaagcgacugaaauu

SEQ ID NO: 18540 - RNA, 21 nt, RNAi
uuugauugguucgcugacuuu

SEQ ID NO: 18541 - DNA, 21 bp, homo sapiens
aacaagacatctggaggaggc

SEQ ID NO: 18542 - RNA, 21 nt, RNAi
caagacaucuggaggaggcuu

SEQ ID NO: 18543 - RNA, 21 nt, RNAi
uuguucuguagaccuccuccg

SEQ ID NO: 18544 - DNA, 21 bp, homo sapiens
aagacatctggaggaggcggc

SEQ ID NO: 18545 - RNA, 21 nt, RNAi
gacaucuggaggaggcggcuu

SEQ ID NO: 18546 - RNA, 21 nt, RNAi
uucuguagaccuccuccgccg

SEQ ID NO: 18547 - DNA, 21 bp, homo sapiens
aactacaacaaccagaccatt

SEQ ID NO: 18548 - RNA, 21 nt, RNAi
cuacaacaaccagaccauuuu

SEQ ID NO: 18549 - RNA, 21 nt, RNAi
uugauguuguuggucugguaa

SEQ ID NO: 18550 - DNA, 21 bp, homo sapiens
aacaaccagaccattaccgac

SEQ ID NO: 18551 - RNA, 21 nt, RNAi
caaccagaccauuaccgacuu

SEQ ID NO: 18552 - RNA, 21 nt, RNAi
uuguuggucugguaauggcug

SEQ ID NO: 18553 - DNA, 21 bp, homo sapiens
aaccagaccattaccgaccaa

SEQ ID NO: 18554 - RNA, 21 nt, RNAi
ccagaccauuaccgaccaauu

SEQ ID NO: 18555 - RNA, 21 nt, RNAi
uuggucugguaauggcugguu

SEQ ID NO: 18556 - DNA, 21 bp, homo sapiens
aatgaactcttcgtcctttga

SEQ ID NO: 18557 - RNA, 21 nt, RNAi
ugaacucuucguccuuugauu

SEQ ID NO: 18558 - RNA, 21 nt, RNAi
uuacuugagaagcaggaaacu

SEQ ID NO: 18559 - DNA, 21 bp, homo sapiens
aagaagattggctactatgac

SEQ ID NO: 18560 - RNA, 21 nt, RNAi
gaagauuggcuacuaugacuu

SEQ ID NO: 18561 - RNA, 21 nt, RNAi
uucuucuaaccgaugauacug

SEQ ID NO: 18562 - DNA, 21 bp, homo sapiens
aagattggctactatgacagc

SEQ ID NO: 18563 - RNA, 21 nt, RNAi
gauuggcuacuaugacagcuu

SEQ ID NO: 18564 - RNA, 21 nt, RNAi
uucuaaccgaugauacugucg

SEQ ID NO: 18565 - DNA, 21 bp, homo sapiens
aaggatgatctttcctggtcc

SEQ ID NO: 18566 - RNA, 21 nt, RNAi
ggaugaucuuuccugguccuu

SEQ ID NO: 18567 - RNA, 21 nt, RNAi
uuccuacuagaaaggaccagg

SEQ ID NO: 18568 - DNA, 21 bp, homo sapiens
aaacagataaatggattggag

SEQ ID NO: 18569 - RNA, 21 nt, RNAi
acagauaaauggauuggaguu

SEQ ID NO: 18570 - RNA, 21 nt, RNAi
uuugucuauuuaccuaaccuc

SEQ ID NO: 18571 - DNA, 21 bp, homo sapiens
aacagataaatggattggagg

SEQ ID NO: 18572 - RNA, 21 nt, RNAi
cagauaaauggauuggagguu

SEQ ID NO: 18573 - RNA, 21 nt, RNAi
uugucuauuuaccuaaccucc

SEQ ID NO: 18574 - DNA, 21 bp, homo sapiens
aagacattccgcttcctgtca

SEQ ID NO: 18575 - RNA, 21 nt, RNAi
gacauuccgcuuccugucauu

SEQ ID NO: 18576 - RNA, 21 nt, RNAi
uucuguaaggcgaaggacagu

SEQ ID NO: 18577 - DNA, 21 bp, homo sapiens
aaactctttatctccgtctca

SEQ ID NO: 18578 - RNA, 21 nt, RNAi
acucuuuaucuccgucucauu

SEQ ID NO: 18579 - RNA, 21 nt, RNAi
uuugagaaauagaggcagagu

SEQ ID NO: 18580 - DNA, 21 bp, homo sapiens
aactctttatctccgtctcag

SEQ ID NO: 18581 - RNA, 21 nt, RNAi
cucuuuaucuccgucucaguu

SEQ ID NO: 18582 - RNA, 21 nt, RNAi
uugagaaauagaggcagaguc

SEQ ID NO: 18583 - DNA, 21 bp, homo sapiens
aacatctacaactcacatgtc

SEQ ID NO: 18584 - RNA, 21 nt, RNAi
caucuacaacucacaugucuu

SEQ ID NO: 18585 - RNA, 21 nt, RNAi
uuguagauguugaguguacag

SEQ ID NO: 18586 - DNA, 21 bp, homo sapiens
aactcacatgtccgttatatc

SEQ ID NO: 18587 - RNA, 21 nt, RNAi
cucacauguccguuauaucuu

SEQ ID NO: 18588 - RNA, 21 nt, RNAi
uugaguguacaggcaauauag

SEQ ID NO: 18589 - DNA, 21 bp, homo sapiens
aacctgaacaacctgactgct

SEQ ID NO: 18590 - RNA, 21 nt, RNAi
ccugaacaaccugacugcuuu

SEQ ID NO: 18591 - RNA, 21 nt, RNAi
uuggacuuguuggacugacga

SEQ ID NO: 18592 - DNA, 21 bp, homo sapiens
aaccagtttcctttcgtctgc

SEQ ID NO: 18593 - RNA, 21 nt, RNAi
ccaguuuccuuucgucugcuu

SEQ ID NO: 18594 - RNA, 21 nt, RNAi
uuggucaaaggaaagcagacg

SEQ ID NO: 18595 - DNA, 21 bp, homo sapiens
aaagaaggagtggaggaagac

SEQ ID NO: 18596 - RNA, 21 nt, RNAi
agaaggaguggaggaagacuu

SEQ ID NO: 18597 - RNA, 21 nt, RNAi
uuucuuccucaccuccuucug

SEQ ID NO: 18598 - DNA, 21 bp, homo sapiens
aagaaggagtggaggaagact

SEQ ID NO: 18599 - RNA, 21 nt, RNAi
gaaggaguggaggaagacuuu

SEQ ID NO: 18600 - RNA, 21 nt, RNAi
uucuuccucaccuccuucuga

SEQ ID NO: 18601 - DNA, 21 bp, homo sapiens
aaggagtggaggaagactctg

SEQ ID NO: 18602 - RNA, 21 nt, RNAi
ggaguggaggaagacucuguu

SEQ ID NO: 18603 - RNA, 21 nt, RNAi
uuccucaccuccuucugagac

SEQ ID NO: 18604 - DNA, 21 bp, homo sapiens
aaggaggaacctaaggaagat

SEQ ID NO: 18605 - RNA, 21 nt, RNAi
ggaggaaccuaaggaagauuu

SEQ ID NO: 18606 - RNA, 21 nt, RNAi
uuccuccuuggauuccuucua

SEQ ID NO: 18607 - DNA, 21 bp, homo sapiens
aacctaaggaagatattgacg

SEQ ID NO: 18608 - RNA, 21 nt, RNAi
ccuaaggaagauauugacguu

SEQ ID NO: 18609 - RNA, 21 nt, RNAi
uuggauuccuucuauaacugc

SEQ ID NO: 18610 - DNA, 21 bp, homo sapiens
aaggaagatattgacgtctct

SEQ ID NO: 18611 - RNA, 21 nt, RNAi
ggaagauauugacgucucuuu

SEQ ID NO: 18612 - RNA, 21 nt, RNAi
uuccuucuauaacugcagaga

SEQ ID NO: 18613 - DNA, 21 bp, homo sapiens
aagatattgacgtctctattc

SEQ ID NO: 18614 - RNA, 21 nt, RNAi
gauauugacgucucuauucuu

SEQ ID NO: 18615 - RNA, 21 nt, RNAi
uucuauaacugcagagauaag

SEQ ID NO: 18616 - DNA, 21 bp, homo sapiens
aagatgaatacatggcttggc

SEQ ID NO: 18617 - RNA, 21 nt, RNAi
gaugaauacauggcuuggcuu

SEQ ID NO: 18618 - RNA, 21 nt, RNAi
uucuacuuauguaccgaaccg

SEQ ID NO: 18619 - DNA, 21 bp, homo sapiens
aatcttccttgcttatgagac

SEQ ID NO: 18620 - RNA, 21 nt, RNAi
ucuuccuugcuuaugagacuu

SEQ ID NO: 18621 - RNA, 21 nt, RNAi
uuagaaggaacgaauacucug

SEQ ID NO: 18622 - DNA, 21 bp, homo sapiens
aagagtgtgtccactgagaag

SEQ ID NO: 18623 - RNA, 21 nt, RNAi
gaguguguccacugagaaguu

SEQ ID NO: 18624 - RNA, 21 nt, RNAi
uucucacacaggugacucuuc

SEQ ID NO: 18625 - DNA, 21 bp, homo sapiens
aatgtggcagtcctgtgcctc

SEQ ID NO: 18626 - RNA, 21 nt, RNAi
uguggcaguccugugccucuu

SEQ ID NO: 18627 - RNA, 21 nt, RNAi
uuacaccgucaggacacggag

SEQ ID NO: 18628 - DNA, 21 bp, homo sapiens
aagatgcgcaggctgatcacc

SEQ ID NO: 18629 - RNA, 21 nt, RNAi
gaugcgcaggcugaucaccuu

SEQ ID NO: 18630 - RNA, 21 nt, RNAi
uucuacgcguccgacuagugg

SEQ ID NO: 18631 - DNA, 21 bp, homo sapiens
aacaacaacgaggaggagaag

SEQ ID NO: 18632 - RNA, 21 nt, RNAi
caacaacgaggaggagaaguu

SEQ ID NO: 18633 - RNA, 21 nt, RNAi
uuguuguugcuccuccucuuc

SEQ ID NO: 18634 - DNA, 21 bp, homo sapiens
aacaacgaggaggagaagtcc

SEQ ID NO: 18635 - RNA, 21 nt, RNAi
caacgaggaggagaaguccuu

SEQ ID NO: 18636 - RNA, 21 nt, RNAi
uuguugcuccuccucuucagg

SEQ ID NO: 18637 - DNA, 21 bp, homo sapiens
aaggagaaccgtgaactggaa

SEQ ID NO: 18638 - RNA, 21 nt, RNAi
ggagaaccgugaacuggaauu

SEQ ID NO: 18639 - RNA, 21 nt, RNAi
uuccucuuggcacuugaccuu

SEQ ID NO: 18640 - DNA, 21 bp, homo sapiens
aaagatcattgctgagaaaga

SEQ ID NO: 18641 - RNA, 21 nt, RNAi
agaucauugcugagaaagauu

SEQ ID NO: 18642 - RNA, 21 nt, RNAi
uuucuaguaacgacucuuucu

SEQ ID NO: 18643 - DNA, 21 bp, homo sapiens
aagatcattgctgagaaagag

SEQ ID NO: 18644 - RNA, 21 nt, RNAi
gaucauugcugagaaagaguu

SEQ ID NO: 18645 - RNA, 21 nt, RNAi
uucuaguaacgacucuuucuc

SEQ ID NO: 18646 - DNA, 21 bp, homo sapiens
aaagaggagcgtgtctctgaa

SEQ ID NO: 18647 - RNA, 21 nt, RNAi
agaggagcgugucucugaauu

SEQ ID NO: 18648 - RNA, 21 nt, RNAi
uuucuccucgcacagagacuu

SEQ ID NO: 18649 - DNA, 21 bp, homo sapiens
aagaggagcgtgtctctgaac

SEQ ID NO: 18650 - RNA, 21 nt, RNAi
gaggagcgugucucugaacuu

SEQ ID NO: 18651 - RNA, 21 nt, RNAi
uucuccucgcacagagacuug

SEQ ID NO: 18652 - DNA, 21 bp, homo sapiens
aactgcgccatcaactccagt

SEQ ID NO: 18653 - RNA, 21 nt, RNAi
cugcgccaucaacuccaguuu

SEQ ID NO: 18654 - RNA, 21 nt, RNAi
uugacgcgguaguugagguca

SEQ ID NO: 18655 - DNA, 21 bp, homo sapiens
aactccagtctcggcagcagc

SEQ ID NO: 18656 - RNA, 21 nt, RNAi
cuccagucucggcagcagcuu

SEQ ID NO: 18657 - RNA, 21 nt, RNAi
uugaggucagagccgucgucg

SEQ ID NO: 18658 - DNA, 21 bp, homo sapiens
aagaacatgctatccaatctc

SEQ ID NO: 18659 - RNA, 21 nt, RNAi
gaacaugcuauccaaucucuu

SEQ ID NO: 18660 - RNA, 21 nt, RNAi
uucuuguacgauagguuagag

SEQ ID NO: 18661 - DNA, 21 bp, homo sapiens
aacatgctatccaatctcatc

SEQ ID NO: 18662 - RNA, 21 nt, RNAi
caugcuauccaaucucaucuu

SEQ ID NO: 18663 - RNA, 21 nt, RNAi
uuguacgauagguuagaguag

SEQ ID NO: 18664 - DNA, 21 bp, homo sapiens
aatttagttcgtacctggctt

SEQ ID NO: 18665 - RNA, 21 nt, RNAi
uuuaguucguaccuggcuuuu

SEQ ID NO: 18666 - RNA, 21 nt, RNAi
uuaaaucaagcauggaccgaa

SEQ ID NO: 18667 - DNA, 21 bp, homo sapiens
aagctgctcactgctcacacg

SEQ ID NO: 18668 - RNA, 21 nt, RNAi
gcugcucacugcucacacguu

SEQ ID NO: 18669 - RNA, 21 nt, RNAi
uucgacgagugacgagugugc

SEQ ID NO: 18670 - DNA, 21 bp, homo sapiens
aatctctttccatcttacttg

SEQ ID NO: 18671 - RNA, 21 nt, RNAi
ucucuuuccaucuuacuuguu

SEQ ID NO: 18672 - RNA, 21 nt, RNAi
uuagagaaagguagaaugaac

SEQ ID NO: 18673 - DNA, 21 bp, homo sapiens
aaggctcacatgctccttgcc

SEQ ID NO: 18674 - RNA, 21 nt, RNAi
ggcucacaugcuccuugccuu

SEQ ID NO: 18675 - RNA, 21 nt, RNAi
uuccgaguguacgaggaacgg

SEQ ID NO: 18676 - DNA, 21 bp, homo sapiens
aacatgctcatgtgtacacac

SEQ ID NO: 18677 - RNA, 21 nt, RNAi
caugcucauguguacacacuu

SEQ ID NO: 18678 - RNA, 21 nt, RNAi
uuguacgaguacacaugugug

SEQ ID NO: 18679 - DNA, 21 bp, homo sapiens
aatttgtctagcatgctgagt

SEQ ID NO: 18680 - RNA, 21 nt, RNAi
uuugucuagcaugcugaguuu

SEQ ID NO: 18681 - RNA, 21 nt, RNAi
uuaaacagaucguacgacuca

SEQ ID NO: 18682 - DNA, 21 bp, homo sapiens
aaatcatggtattcttctgac

SEQ ID NO: 18683 - RNA, 21 nt, RNAi
aucaugguauucuucugacuu

SEQ ID NO: 18684 - RNA, 21 nt, RNAi
uuuaguaccauaagaagacug

SEQ ID NO: 18685 - DNA, 21 bp, homo sapiens
aatcatggtattcttctgaca

SEQ ID NO: 18686 - RNA, 21 nt, RNAi
ucaugguauucuucugacauu

SEQ ID NO: 18687 - RNA, 21 nt, RNAi
uuaguaccauaagaagacugu

SEQ ID NO: 18688 - DNA, 21 bp, homo sapiens
aatctccatttctgctcagat

SEQ ID NO: 18689 - RNA, 21 nt, RNAi
ucuccauuucugcucagauuu

SEQ ID NO: 18690 - RNA, 21 nt, RNAi
uuagagguaaagacgagucua

SEQ ID NO: 18691 - DNA, 21 bp, homo sapiens
aatcctgaccaaaggaaggca

SEQ ID NO: 18692 - RNA, 21 nt, RNAi
uccugaccaaaggaaggcauu

SEQ ID NO: 18693 - RNA, 21 nt, RNAi
uuaggacugguuuccuuccgu

SEQ ID NO: 18694 - DNA, 21 bp, homo sapiens
aatctcaataaaccagtgaac

SEQ ID NO: 18695 - RNA, 21 nt, RNAi
ucucaauaaaccagugaacuu

SEQ ID NO: 18696 - RNA, 21 nt, RNAi
uuagaguuauuuggucacuug

SEQ ID NO: 18697 - DNA, 21 bp, homo sapiens
aataaaccagtgaacagtgtg

SEQ ID NO: 18698 - RNA, 21 nt, RNAi
uaaaccagugaacaguguguu

SEQ ID NO: 18699 - RNA, 21 nt, RNAi
uuauuuggucacuugucacac

SEQ ID NO: 18700 - DNA, 21 bp, homo sapiens
aaaccagtgaacagtgtgact

SEQ ID NO: 18701 - RNA, 21 nt, RNAi
accagugaacagugugacuuu

SEQ ID NO: 18702 - RNA, 21 nt, RNAi
uuuggucacuugucacacuga

SEQ ID NO: 18703 - DNA, 21 bp, homo sapiens
aaccagtgaacagtgtgactc

SEQ ID NO: 18704 - RNA, 21 nt, RNAi
ccagugaacagugugacucuu

SEQ ID NO: 18705 - RNA, 21 nt, RNAi
uuggucacuugucacacugag

SEQ ID NO: 18706 - DNA, 21 bp, homo sapiens
caggctggagcctggattcga

SEQ ID NO: 18707 - RNA, 21 nt, RNAi
ggcuggagccuggauucgauu

SEQ ID NO: 18708 - RNA, 21 nt, RNAi
uuccgaccucggaccuaagcu

SEQ ID NO: 18709 - DNA, 21 bp, homo sapiens
caacgccacctcagaaggttg

SEQ ID NO: 18710 - RNA, 21 nt, RNAi
acgccaccucagaagguuguu

SEQ ID NO: 18711 - RNA, 21 nt, RNAi
uuugcgguggagucuuccaac

SEQ ID NO: 18712 - DNA, 21 bp, homo sapiens
cacctcagaaggttgccagat

SEQ ID NO: 18713 - RNA, 21 nt, RNAi
ccucagaagguugccagauuu

SEQ ID NO: 18714 - RNA, 21 nt, RNAi
uuggagucuuccaacggucua

SEQ ID NO: 18715 - DNA, 21 bp, homo sapiens
cagaaggttgccagatcatac

SEQ ID NO: 18716 - RNA, 21 nt, RNAi
gaagguugccagaucauacuu

SEQ ID NO: 18717 - RNA, 21 nt, RNAi
uucuuccaacggucuaguaug

SEQ ID NO: 18718 - DNA, 21 bp, homo sapiens
caggtgaaggctatcaacttc

SEQ ID NO: 18719 - RNA, 21 nt, RNAi
ggugaaggcuaucaacuucuu

SEQ ID NO: 18720 - RNA, 21 nt, RNAi
uuccacuuccgauaguugaag

SEQ ID NO: 18721 - DNA, 21 bp, homo sapiens
caacttcctgccagtggacta

SEQ ID NO: 18722 - RNA, 21 nt, RNAi
acuuccugccaguggacuauu

SEQ ID NO: 18723 - RNA, 21 nt, RNAi
uuugaaggacggucaccugau

SEQ ID NO: 18724 - DNA, 21 bp, homo sapiens
cagtggactatgagattgagt

SEQ ID NO: 18725 - RNA, 21 nt, RNAi
guggacuaugagauugaguuu

SEQ ID NO: 18726 - RNA, 21 nt, RNAi
uucaccugauacucuaacuca

SEQ ID NO: 18727 - DNA, 21 bp, homo sapiens
caacggctcctggacagatat

SEQ ID NO: 18728 - RNA, 21 nt, RNAi
acggcuccuggacagauauuu

SEQ ID NO: 18729 - RNA, 21 nt, RNAi
uuugccgaggaccugucuaua

SEQ ID NO: 18730 - DNA, 21 bp, homo sapiens
cagccgctgtgtccgaatctg

SEQ ID NO: 18731 - RNA, 21 nt, RNAi
gccgcuguguccgaaucuguu

SEQ ID NO: 18732 - RNA, 21 nt, RNAi
uucggcgacacaggcuuagac

SEQ ID NO: 18733 - DNA, 21 bp, homo sapiens
cactgccaggtgaatcgaacg

SEQ ID NO: 18734 - RNA, 21 nt, RNAi
cugccaggugaaucgaacguu

SEQ ID NO: 18735 - RNA, 21 nt, RNAi
uugacgguccacuuagcuugc

SEQ ID NO: 18736 - DNA, 21 bp, homo sapiens
caggtgaatcgaacgccacac

SEQ ID NO: 18737 - RNA, 21 nt, RNAi
ggugaaucgaacgccacacuu

SEQ ID NO: 18738 - RNA, 21 nt, RNAi
uuccacuuagcuugcggugug

SEQ ID NO: 18739 - DNA, 21 bp, homo sapiens
catcctgccggactatgagct

SEQ ID NO: 18740 - RNA, 21 nt, RNAi
uccugccggacuaugagcuuu

SEQ ID NO: 18741 - RNA, 21 nt, RNAi
uuaggacggccugauacucga

SEQ ID NO: 18742 - DNA, 21 bp, homo sapiens
caagctcatccaccacgacag

SEQ ID NO: 18743 - RNA, 21 nt, RNAi
agcucauccaccacgacaguu

SEQ ID NO: 18744 - RNA, 21 nt, RNAi
uuucgaguagguggugcuguc

SEQ ID NO: 18745 - DNA, 21 bp, homo sapiens
catccaccacgacagcaagtg

SEQ ID NO: 18746 - RNA, 21 nt, RNAi
uccaccacgacagcaaguguu

SEQ ID NO: 18747 - RNA, 21 nt, RNAi
uuagguggugcugucguucac

SEQ ID NO: 18748 - DNA, 21 bp, homo sapiens
caccacgacagcaagtgtgat

SEQ ID NO: 18749 - RNA, 21 nt, RNAi
ccacgacagcaagugugauuu

SEQ ID NO: 18750 - RNA, 21 nt, RNAi
uuggugcugucguucacacua

SEQ ID NO: 18751 - DNA, 21 bp, homo sapiens
cacgacagcaagtgtgatcca

SEQ ID NO: 18752 - RNA, 21 nt, RNAi
cgacagcaagugugauccauu

SEQ ID NO: 18753 - RNA, 21 nt, RNAi
uugcugucguucacacuaggu

SEQ ID NO: 18754 - DNA, 21 bp, homo sapiens
cagcaagtgtgatccaggcca

SEQ ID NO: 18755 - RNA, 21 nt, RNAi
gcaagugugauccaggccauu

SEQ ID NO: 18756 - RNA, 21 nt, RNAi
uucguucacacuagguccggu

SEQ ID NO: 18757 - DNA, 21 bp, homo sapiens
caagtgtgatccaggccaagc

SEQ ID NO: 18758 - RNA, 21 nt, RNAi
agugugauccaggccaagcuu

SEQ ID NO: 18759 - RNA, 21 nt, RNAi
uuucacacuagguccgguucg

SEQ ID NO: 18760 - DNA, 21 bp, homo sapiens
caggccaagccaccaagtacc

SEQ ID NO: 18761 - RNA, 21 nt, RNAi
ggccaagccaccaaguaccuu

SEQ ID NO: 18762 - RNA, 21 nt, RNAi
uuccgguucggugguucaugg

SEQ ID NO: 18763 - DNA, 21 bp, homo sapiens
caagccaccaagtacctatat

SEQ ID NO: 18764 - RNA, 21 nt, RNAi
agccaccaaguaccuauauuu

SEQ ID NO: 18765 - RNA, 21 nt, RNAi
uuucggugguucauggauaua

SEQ ID NO: 18766 - DNA, 21 bp, homo sapiens
caccaagtacctatatgagct

SEQ ID NO: 18767 - RNA, 21 nt, RNAi
ccaaguaccuauaugagcuuu

SEQ ID NO: 18768 - RNA, 21 nt, RNAi
uugguucauggauauacucga

SEQ ID NO: 18769 - DNA, 21 bp, homo sapiens
caagtacctatatgagctgct

SEQ ID NO: 18770 - RNA, 21 nt, RNAi
aguaccuauaugagcugcuuu

SEQ ID NO: 18771 - RNA, 21 nt, RNAi
uuucauggauauacucgacga

SEQ ID NO: 18772 - DNA, 21 bp, homo sapiens
caagatcatccttatgcctgg

SEQ ID NO: 18773 - RNA, 21 nt, RNAi
agaucauccuuaugccugguu

SEQ ID NO: 18774 - RNA, 21 nt, RNAi
uuucuaguaggaauacggacc

SEQ ID NO: 18775 - DNA, 21 bp, homo sapiens
catccttatgcctggctgcag

SEQ ID NO: 18776 - RNA, 21 nt, RNAi
uccuuaugccuggcugcaguu

SEQ ID NO: 18777 - RNA, 21 nt, RNAi
uuaggaauacggaccgacguc

SEQ ID NO: 18778 - DNA, 21 bp, homo sapiens
cagctctgtctccacgctggt

SEQ ID NO: 18779 - RNA, 21 nt, RNAi
gcucugucuccacgcugguuu

SEQ ID NO: 18780 - RNA, 21 nt, RNAi
uucgagacagaggugcgacca

SEQ ID NO: 18781 - DNA, 21 bp, homo sapiens
cattgtgctttcctatggctc

SEQ ID NO: 18782 - RNA, 21 nt, RNAi
uugugcuuuccuauggcucuu

SEQ ID NO: 18783 - RNA, 21 nt, RNAi
uuaacacgaaaggauaccgag

SEQ ID NO: 18784 - DNA, 21 bp, homo sapiens
catcagccacactccacaacc

SEQ ID NO: 18785 - RNA, 21 nt, RNAi
ucagccacacuccacaaccuu

SEQ ID NO: 18786 - RNA, 21 nt, RNAi
uuagucggugugagguguugg

SEQ ID NO: 18787 - DNA, 21 bp, homo sapiens
catccagcagaccactgaggt

SEQ ID NO: 18788 - RNA, 21 nt, RNAi
uccagcagaccacugagguuu

SEQ ID NO: 18789 - RNA, 21 nt, RNAi
uuaggucgucuggugacucca

SEQ ID NO: 18790 - DNA, 21 bp, homo sapiens
cagcagaccactgaggtcttc

SEQ ID NO: 18791 - RNA, 21 nt, RNAi
gcagaccacugaggucuucuu

SEQ ID NO: 18792 - RNA, 21 nt, RNAi
uucgucuggugacuccagaag

SEQ ID NO: 18793 - DNA, 21 bp, homo sapiens
cagaccactgaggtcttcact

SEQ ID NO: 18794 - RNA, 21 nt, RNAi
gaccacugaggucuucacuuu

SEQ ID NO: 18795 - RNA, 21 nt, RNAi
uucuggugacuccagaaguga

SEQ ID NO: 18796 - DNA, 21 bp, homo sapiens
cactgaggtcttcacttcgac

SEQ ID NO: 18797 - RNA, 21 nt, RNAi
cugaggucuucacuucgacuu

SEQ ID NO: 18798 - RNA, 21 nt, RNAi
uugacuccagaagugaagcug

SEQ ID NO: 18799 - DNA, 21 bp, homo sapiens
cacttcgactctggacgacct

SEQ ID NO: 18800 - RNA, 21 nt, RNAi
cuucgacucuggacgaccuuu

SEQ ID NO: 18801 - RNA, 21 nt, RNAi
uugaagcugagaccugcugga

SEQ ID NO: 18802 - DNA, 21 bp, homo sapiens
cagagtttcttctcagatcca

SEQ ID NO: 18803 - RNA, 21 nt, RNAi
gaguuucuucucagauccauu

SEQ ID NO: 18804 - RNA, 21 nt, RNAi
uucucaaagaagagucuaggu

SEQ ID NO: 18805 - DNA, 21 bp, homo sapiens
caattggttcaagatctacga

SEQ ID NO: 18806 - RNA, 21 nt, RNAi
auugguucaagaucuacgauu

SEQ ID NO: 18807 - RNA, 21 nt, RNAi
uuuaaccaaguucuagaugcu

SEQ ID NO: 18808 - DNA, 21 bp, homo sapiens
caactgcacagtggatgagat

SEQ ID NO: 18809 - RNA, 21 nt, RNAi
acugcacaguggaugagauuu

SEQ ID NO: 18810 - RNA, 21 nt, RNAi
uuugacgugucaccuacucua

SEQ ID NO: 18811 - DNA, 21 bp, homo sapiens
cacagtggatgagatgactga

SEQ ID NO: 18812 - RNA, 21 nt, RNAi
caguggaugagaugacugauu

SEQ ID NO: 18813 - RNA, 21 nt, RNAi
uugucaccuacucuacugacu

SEQ ID NO: 18814 - DNA, 21 bp, homo sapiens
cagtggatgagatgactgagg

SEQ ID NO: 18815 - RNA, 21 nt, RNAi
guggaugagaugacugagguu

SEQ ID NO: 18816 - RNA, 21 nt, RNAi
uucaccuacucuacugacucc

SEQ ID NO: 18817 - DNA, 21 bp, homo sapiens
cacatcacaactgagattgtc

SEQ ID NO: 18818 - RNA, 21 nt, RNAi
caucacaacugagauugucuu

SEQ ID NO: 18819 - RNA, 21 nt, RNAi
uuguaguguugacucuaacag

SEQ ID NO: 18820 - DNA, 21 bp, homo sapiens
catcacaactgagattgtcat

SEQ ID NO: 18821 - RNA, 21 nt, RNAi
ucacaacugagauugucauuu

SEQ ID NO: 18822 - RNA, 21 nt, RNAi
uuaguguugacucuaacagua

SEQ ID NO: 18823 - DNA, 21 bp, homo sapiens
cacaactgagattgtcatgct

SEQ ID NO: 18824 - RNA, 21 nt, RNAi
caacugagauugucaugcuuu

SEQ ID NO: 18825 - RNA, 21 nt, RNAi
uuguugacucuaacaguacga

SEQ ID NO: 18826 - DNA, 21 bp, homo sapiens
caactgagattgtcatgctga

SEQ ID NO: 18827 - RNA, 21 nt, RNAi
acugagauugucaugcugauu

SEQ ID NO: 18828 - RNA, 21 nt, RNAi
uuugacucuaacaguacgacu

SEQ ID NO: 18829 - DNA, 21 bp, homo sapiens
catgctgaatcctgccaatac

SEQ ID NO: 18830 - RNA, 21 nt, RNAi
ugcugaauccugccaauacuu

SEQ ID NO: 18831 - RNA, 21 nt, RNAi
uuacgacuuaggacgguuaug

SEQ ID NO: 18832 - DNA, 21 bp, homo sapiens
cagcatttccaacatgacatc

SEQ ID NO: 18833 - RNA, 21 nt, RNAi
gcauuuccaacaugacaucuu

SEQ ID NO: 18834 - RNA, 21 nt, RNAi
uucguaaagguuguacuguag

SEQ ID NO: 18835 - DNA, 21 bp, homo sapiens
caggaatttgtggagaaacta

SEQ ID NO: 18836 - RNA, 21 nt, RNAi
ggaauuuguggagaaacuauu

SEQ ID NO: 18837 - RNA, 21 nt, RNAi
uuccuuaaacaccucuuugau

SEQ ID NO: 18838 - DNA, 21 bp, homo sapiens
caccgctggcctatgatgcca

SEQ ID NO: 18839 - RNA, 21 nt, RNAi
ccgcuggccuaugaugccauu

SEQ ID NO: 18840 - RNA, 21 nt, RNAi
uuggcgaccggauacuacggu

SEQ ID NO: 18841 - DNA, 21 bp, homo sapiens
caagacatctggaggaggcgg

SEQ ID NO: 18842 - RNA, 21 nt, RNAi
agacaucuggaggaggcgguu

SEQ ID NO: 18843 - RNA, 21 nt, RNAi
uuucuguagaccuccuccgcc

SEQ ID NO: 18844 - DNA, 21 bp, homo sapiens
caactacaacaaccagaccat

SEQ ID NO: 18845 - RNA, 21 nt, RNAi
acuacaacaaccagaccauuu

SEQ ID NO: 18846 - RNA, 21 nt, RNAi
uuugauguuguuggucuggua

SEQ ID NO: 18847 - DNA, 21 bp, homo sapiens
caacaaccagaccattaccga

SEQ ID NO: 18848 - RNA, 21 nt, RNAi
acaaccagaccauuaccgauu

SEQ ID NO: 18849 - RNA, 21 nt, RNAi
uuuguuggucugguaauggcu

SEQ ID NO: 18850 - DNA, 21 bp, homo sapiens
caaccagaccattaccgacca

SEQ ID NO: 18851 - RNA, 21 nt, RNAi
accagaccauuaccgaccauu

SEQ ID NO: 18852 - RNA, 21 nt, RNAi
uuuggucugguaauggcuggu

SEQ ID NO: 18853 - DNA, 21 bp, homo sapiens
cagaccattaccgaccaaatc

SEQ ID NO: 18854 - RNA, 21 nt, RNAi
gaccauuaccgaccaaaucuu

SEQ ID NO: 18855 - RNA, 21 nt, RNAi
uucugguaauggcugguuuag

SEQ ID NO: 18856 - DNA, 21 bp, homo sapiens
cattaccgaccaaatctaccg

SEQ ID NO: 18857 - RNA, 21 nt, RNAi
uuaccgaccaaaucuaccguu

SEQ ID NO: 18858 - RNA, 21 nt, RNAi
uuaauggcugguuuagauggc

SEQ ID NO: 18859 - DNA, 21 bp, homo sapiens
caatgaactcttcgtcctttg

SEQ ID NO: 18860 - RNA, 21 nt, RNAi
augaacucuucguccuuuguu

SEQ ID NO: 18861 - RNA, 21 nt, RNAi
uuuacuugagaagcaggaaac

SEQ ID NO: 18862 - DNA, 21 bp, homo sapiens
catgtggtgtttgatgccagc

SEQ ID NO: 18863 - RNA, 21 nt, RNAi
ugugguguuugaugccagcuu

SEQ ID NO: 18864 - RNA, 21 nt, RNAi
uuacaccacaaacuacggucg

SEQ ID NO: 18865 - DNA, 21 bp, homo sapiens
catggacgcttatcgagcagc

SEQ ID NO: 18866 - RNA, 21 nt, RNAi
uggacgcuuaucgagcagcuu

SEQ ID NO: 18867 - RNA, 21 nt, RNAi
uuaccugcgaauagcucgucg

SEQ ID NO: 18868 - DNA, 21 bp, homo sapiens
cagctacaagaagattggcta

SEQ ID NO: 18869 - RNA, 21 nt, RNAi
gcuacaagaagauuggcuauu

SEQ ID NO: 18870 - RNA, 21 nt, RNAi
uucgauguucuucuaaccgau

SEQ ID NO: 18871 - DNA, 21 bp, homo sapiens
caagaagattggctactatga

SEQ ID NO: 18872 - RNA, 21 nt, RNAi
agaagauuggcuacuaugauu

SEQ ID NO: 18873 - RNA, 21 nt, RNAi
uuucuucuaaccgaugauacu

SEQ ID NO: 18874 - DNA, 21 bp, homo sapiens
cagcaccaaggatgatctttc

SEQ ID NO: 18875 - RNA, 21 nt, RNAi
gcaccaaggaugaucuuucuu

SEQ ID NO: 18876 - RNA, 21 nt, RNAi
uucgugguuccuacuagaaag

SEQ ID NO: 18877 - DNA, 21 bp, homo sapiens
caccaaggatgatctttcctg

SEQ ID NO: 18878 - RNA, 21 nt, RNAi
ccaaggaugaucuuuccuguu

SEQ ID NO: 18879 - RNA, 21 nt, RNAi
uugguuccuacuagaaaggac

SEQ ID NO: 18880 - DNA, 21 bp, homo sapiens
caaggatgatctttcctggtc

SEQ ID NO: 18881 - RNA, 21 nt, RNAi
aggaugaucuuuccuggucuu

SEQ ID NO: 18882 - RNA, 21 nt, RNAi
uuuccuacuagaaaggaccag

SEQ ID NO: 18883 - DNA, 21 bp, homo sapiens
catcaagacattccgcttcct

SEQ ID NO: 18884 - RNA, 21 nt, RNAi
ucaagacauuccgcuuccuuu

SEQ ID NO: 18885 - RNA, 21 nt, RNAi
uuaguucuguaaggcgaagga

SEQ ID NO: 18886 - DNA, 21 bp, homo sapiens
caagacattccgcttcctgtc

SEQ ID NO: 18887 - RNA, 21 nt, RNAi
agacauuccgcuuccugucuu

SEQ ID NO: 18888 - RNA, 21 nt, RNAi
uuucuguaaggcgaaggacag

SEQ ID NO: 18889 - DNA, 21 bp, homo sapiens
cattccgcttcctgtcacaga

SEQ ID NO: 18890 - RNA, 21 nt, RNAi
uuccgcuuccugucacagauu

SEQ ID NO: 18891 - RNA, 21 nt, RNAi
uuaaggcgaaggacagugucu

SEQ ID NO: 18892 - DNA, 21 bp, homo sapiens
cacagaaactctttatctccg

SEQ ID NO: 18893 - RNA, 21 nt, RNAi
cagaaacucuuuaucuccguu

SEQ ID NO: 18894 - RNA, 21 nt, RNAi
uugucuuugagaaauagaggc

SEQ ID NO: 18895 - DNA, 21 bp, homo sapiens
cagaaactctttatctccgtc

SEQ ID NO: 18896 - RNA, 21 nt, RNAi
gaaacucuuuaucuccgucuu

SEQ ID NO: 18897 - RNA, 21 nt, RNAi
uucuuugagaaauagaggcag

SEQ ID NO: 18898 - DNA, 21 bp, homo sapiens
cattgtcctagctgttgtctg

SEQ ID NO: 18899 - RNA, 21 nt, RNAi
uuguccuagcuguugucuguu

SEQ ID NO: 18900 - RNA, 21 nt, RNAi
uuaacaggaucgacaacagac

SEQ ID NO: 18901 - DNA, 21 bp, homo sapiens
catctacaactcacatgtccg

SEQ ID NO: 18902 - RNA, 21 nt, RNAi
ucuacaacucacauguccguu

SEQ ID NO: 18903 - RNA, 21 nt, RNAi
uuagauguugaguguacaggc

SEQ ID NO: 18904 - DNA, 21 bp, homo sapiens
caactcacatgtccgttatat

SEQ ID NO: 18905 - RNA, 21 nt, RNAi
acucacauguccguuauauuu

SEQ ID NO: 18906 - RNA, 21 nt, RNAi
uuugaguguacaggcaauaua

SEQ ID NO: 18907 - DNA, 21 bp, homo sapiens
cacatgtccgttatatccaga

SEQ ID NO: 18908 - RNA, 21 nt, RNAi
cauguccguuauauccagauu

SEQ ID NO: 18909 - RNA, 21 nt, RNAi
uuguacaggcaauauaggucu

SEQ ID NO: 18910 - DNA, 21 bp, homo sapiens
catgtccgttatatccagaac

SEQ ID NO: 18911 - RNA, 21 nt, RNAi
uguccguuauauccagaacuu

SEQ ID NO: 18912 - RNA, 21 nt, RNAi
uuacaggcaauauaggucuug

SEQ ID NO: 18913 - DNA, 21 bp, homo sapiens
caacctgaacaacctgactgc

SEQ ID NO: 18914 - RNA, 21 nt, RNAi
accugaacaaccugacugcuu

SEQ ID NO: 18915 - RNA, 21 nt, RNAi
uuuggacuuguuggacugacg

SEQ ID NO: 18916 - DNA, 21 bp, homo sapiens
cactggctttagctgctgtct

SEQ ID NO: 18917 - RNA, 21 nt, RNAi
cuggcuuuagcugcugucuuu

SEQ ID NO: 18918 - RNA, 21 nt, RNAi
uugaccgaaaucgacgacaga

SEQ ID NO: 18919 - DNA, 21 bp, homo sapiens
cagtttcctttcgtctgccag

SEQ ID NO: 18920 - RNA, 21 nt, RNAi
guuuccuuucgucugccaguu

SEQ ID NO: 18921 - RNA, 21 nt, RNAi
uucaaaggaaagcagacgguc

SEQ ID NO: 18922 - DNA, 21 bp, homo sapiens
catgttcaccaagatttggtg

SEQ ID NO: 18923 - RNA, 21 nt, RNAi
uguucaccaagauuugguguu

SEQ ID NO: 18924 - RNA, 21 nt, RNAi
uuacaagugguucuaaaccac

SEQ ID NO: 18925 - DNA, 21 bp, homo sapiens
cacacggtcttcacaaagaag

SEQ ID NO: 18926 - RNA, 21 nt, RNAi
cacggucuucacaaagaaguu

SEQ ID NO: 18927 - RNA, 21 nt, RNAi
uugugccagaaguguuucuuc

SEQ ID NO: 18928 - DNA, 21 bp, homo sapiens
cacggtcttcacaaagaagga

SEQ ID NO: 18929 - RNA, 21 nt, RNAi
cggucuucacaaagaaggauu

SEQ ID NO: 18930 - RNA, 21 nt, RNAi
uugccagaaguguuucuuccu

SEQ ID NO: 18931 - DNA, 21 bp, homo sapiens
catggatgtcctcactctcgc

SEQ ID NO: 18932 - RNA, 21 nt, RNAi
uggauguccucacucucgcuu

SEQ ID NO: 18933 - RNA, 21 nt, RNAi
uuaccuacaggagugagagcg

SEQ ID NO: 18934 - DNA, 21 bp, homo sapiens
cactctcgccatctggcagat

SEQ ID NO: 18935 - RNA, 21 nt, RNAi
cucucgccaucuggcagauuu

SEQ ID NO: 18936 - RNA, 21 nt, RNAi
uugagagcgguagaccgucua

SEQ ID NO: 18937 - DNA, 21 bp, homo sapiens
caccggaccattgagacattt

SEQ ID NO: 18938 - RNA, 21 nt, RNAi
ccggaccauugagacauuuuu

SEQ ID NO: 18939 - RNA, 21 nt, RNAi
uuggccugguaacucuguaaa

SEQ ID NO: 18940 - DNA, 21 bp, homo sapiens
cattgagacatttgccaagga

SEQ ID NO: 18941 - RNA, 21 nt, RNAi
uugagacauuugccaaggauu

SEQ ID NO: 18942 - RNA, 21 nt, RNAi
uuaacucuguaaacgguuccu

SEQ ID NO: 18943 - DNA, 21 bp, homo sapiens
catttgccaaggaggaaccta

SEQ ID NO: 18944 - RNA, 21 nt, RNAi
uuugccaaggaggaaccuauu

SEQ ID NO: 18945 - RNA, 21 nt, RNAi
uuaaacgguuccuccuuggau

SEQ ID NO: 18946 - DNA, 21 bp, homo sapiens
caaggaggaacctaaggaaga

SEQ ID NO: 18947 - RNA, 21 nt, RNAi
aggaggaaccuaaggaagauu

SEQ ID NO: 18948 - RNA, 21 nt, RNAi
uuuccuccuuggauuccuucu

SEQ ID NO: 18949 - DNA, 21 bp, homo sapiens
cagctggagcattgcagctcc

SEQ ID NO: 18950 - RNA, 21 nt, RNAi
gcuggagcauugcagcuccuu

SEQ ID NO: 18951 - RNA, 21 nt, RNAi
uucgaccucguaacgucgagg

SEQ ID NO: 18952 - DNA, 21 bp, homo sapiens
cattgcagctccaggaagatg

SEQ ID NO: 18953 - RNA, 21 nt, RNAi
uugcagcuccaggaagauguu

SEQ ID NO: 18954 - RNA, 21 nt, RNAi
uuaacgucgagguccuucuac

SEQ ID NO: 18955 - DNA, 21 bp, homo sapiens
cagctccaggaagatgaatac

SEQ ID NO: 18956 - RNA, 21 nt, RNAi
gcuccaggaagaugaauacuu

SEQ ID NO: 18957 - RNA, 21 nt, RNAi
uucgagguccuucuacuuaug

SEQ ID NO: 18958 - DNA, 21 bp, homo sapiens
caggaagatgaatacatggct

SEQ ID NO: 18959 - RNA, 21 nt, RNAi
ggaagaugaauacauggcuuu

SEQ ID NO: 18960 - RNA, 21 nt, RNAi
uuccuucuacuuauguaccga

SEQ ID NO: 18961 - DNA, 21 bp, homo sapiens
caagagtgtgtccactgagaa

SEQ ID NO: 18962 - RNA, 21 nt, RNAi
agaguguguccacugagaauu

SEQ ID NO: 18963 - RNA, 21 nt, RNAi
uuucucacacaggugacucuu

SEQ ID NO: 18964 - DNA, 21 bp, homo sapiens
cactgagaagatcaatgatca

SEQ ID NO: 18965 - RNA, 21 nt, RNAi
cugagaagaucaaugaucauu

SEQ ID NO: 18966 - RNA, 21 nt, RNAi
uugacucuucuaguuacuagu

SEQ ID NO: 18967 - DNA, 21 bp, homo sapiens
catggctatctacaatgtggc

SEQ ID NO: 18968 - RNA, 21 nt, RNAi
uggcuaucuacaauguggcuu

SEQ ID NO: 18969 - RNA, 21 nt, RNAi
uuaccgauagauguuacaccg

SEQ ID NO: 18970 - DNA, 21 bp, homo sapiens
caatgtggcagtcctgtgcct

SEQ ID NO: 18971 - RNA, 21 nt, RNAi
auguggcaguccugugccuuu

SEQ ID NO: 18972 - RNA, 21 nt, RNAi
uuuacaccgucaggacacgga

SEQ ID NO: 18973 - DNA, 21 bp, homo sapiens
cagtcctgtgcctcatcactg

SEQ ID NO: 18974 - RNA, 21 nt, RNAi
guccugugccucaucacuguu

SEQ ID NO: 18975 - RNA, 21 nt, RNAi
uucaggacacggaguagugac

SEQ ID NO: 18976 - DNA, 21 bp, homo sapiens
catcactgctcctgtcaccat

SEQ ID NO: 18977 - RNA, 21 nt, RNAi
ucacugcuccugucaccauuu

SEQ ID NO: 18978 - RNA, 21 nt, RNAi
uuagugacgaggacaguggua

SEQ ID NO: 18979 - DNA, 21 bp, homo sapiens
cactgctcctgtcaccatgat

SEQ ID NO: 18980 - RNA, 21 nt, RNAi
cugcuccugucaccaugauuu

SEQ ID NO: 18981 - RNA, 21 nt, RNAi
uugacgaggacagugguacua

SEQ ID NO: 18982 - DNA, 21 bp, homo sapiens
caccatgattctgtccagcca

SEQ ID NO: 18983 - RNA, 21 nt, RNAi
ccaugauucuguccagccauu

SEQ ID NO: 18984 - RNA, 21 nt, RNAi
uugguacuaagacaggucggu

SEQ ID NO: 18985 - DNA, 21 bp, homo sapiens
catgattctgtccagccagca

SEQ ID NO: 18986 - RNA, 21 nt, RNAi
ugauucuguccagccagcauu

SEQ ID NO: 18987 - RNA, 21 nt, RNAi
uuacuaagacaggucggucgu

SEQ ID NO: 18988 - DNA, 21 bp, homo sapiens
cagccagcaggatgcagcctt

SEQ ID NO: 18989 - RNA, 21 nt, RNAi
gccagcaggaugcagccuuuu

SEQ ID NO: 18990 - RNA, 21 nt, RNAi
uucggucguccuacgucggaa

SEQ ID NO: 18991 - DNA, 21 bp, homo sapiens
cagcaggatgcagcctttgcc

SEQ ID NO: 18992 - RNA, 21 nt, RNAi
gcaggaugcagccuuugccuu

SEQ ID NO: 18993 - RNA, 21 nt, RNAi
uucguccuacgucggaaacgg

SEQ ID NO: 18994 - DNA, 21 bp, homo sapiens
caggatgcagcctttgccttt

SEQ ID NO: 18995 - RNA, 21 nt, RNAi
ggaugcagccuuugccuuuuu

SEQ ID NO: 18996 - RNA, 21 nt, RNAi
uuccuacgucggaaacggaaa

SEQ ID NO: 18997 - DNA, 21 bp, homo sapiens
cagcctttgcctttgcctctc

SEQ ID NO: 18998 - RNA, 21 nt, RNAi
gccuuugccuuugccucucuu

SEQ ID NO: 18999 - RNA, 21 nt, RNAi
uucggaaacggaaacggagag

SEQ ID NO: 19000 - DNA, 21 bp, homo sapiens
cactcttgttgtgctctttgt

SEQ ID NO: 19001 - RNA, 21 nt, RNAi
cucuuguugugcucuuuguuu

SEQ ID NO: 19002 - RNA, 21 nt, RNAi
uugagaacaacacgagaaaca

SEQ ID NO: 19003 - DNA, 21 bp, homo sapiens
caagatgcgcaggctgatcac

SEQ ID NO: 19004 - RNA, 21 nt, RNAi
agaugcgcaggcugaucacuu

SEQ ID NO: 19005 - RNA, 21 nt, RNAi
uuucuacgcguccgacuagug

SEQ ID NO: 19006 - DNA, 21 bp, homo sapiens
catcgaccaacaacaacgagg

SEQ ID NO: 19007 - RNA, 21 nt, RNAi
ucgaccaacaacaacgagguu

SEQ ID NO: 19008 - RNA, 21 nt, RNAi
uuagcugguuguuguugcucc

SEQ ID NO: 19009 - DNA, 21 bp, homo sapiens
caacaacaacgaggaggagaa

SEQ ID NO: 19010 - RNA, 21 nt, RNAi
acaacaacgaggaggagaauu

SEQ ID NO: 19011 - RNA, 21 nt, RNAi
uuuguuguugcuccuccucuu

SEQ ID NO: 19012 - DNA, 21 bp, homo sapiens
caacaacgaggaggagaagtc

SEQ ID NO: 19013 - RNA, 21 nt, RNAi
acaacgaggaggagaagucuu

SEQ ID NO: 19014 - RNA, 21 nt, RNAi
uuuguugcuccuccucuucag

SEQ ID NO: 19015 - DNA, 21 bp, homo sapiens
cattgctgagaaagaggagcg

SEQ ID NO: 19016 - RNA, 21 nt, RNAi
uugcugagaaagaggagcguu

SEQ ID NO: 19017 - RNA, 21 nt, RNAi
uuaacgacucuuucuccucgc

SEQ ID NO: 19018 - DNA, 21 bp, homo sapiens
catcaactccagtctcggcag

SEQ ID NO: 19019 - RNA, 21 nt, RNAi
ucaacuccagucucggcaguu

SEQ ID NO: 19020 - RNA, 21 nt, RNAi
uuaguugaggucagagccguc

SEQ ID NO: 19021 - DNA, 21 bp, homo sapiens
caactccagtctcggcagcag

SEQ ID NO: 19022 - RNA, 21 nt, RNAi
acuccagucucggcagcaguu

SEQ ID NO: 19023 - RNA, 21 nt, RNAi
uuugaggucagagccgucguc

SEQ ID NO: 19024 - DNA, 21 bp, homo sapiens
catgctatccaatctcatctc

SEQ ID NO: 19025 - RNA, 21 nt, RNAi
ugcuauccaaucucaucucuu

SEQ ID NO: 19026 - RNA, 21 nt, RNAi
uuacgauagguuagaguagag

SEQ ID NO: 19027 - DNA, 21 bp, homo sapiens
catctcttgtaaatacatgtc

SEQ ID NO: 19028 - RNA, 21 nt, RNAi
ucucuuguaaauacaugucuu

SEQ ID NO: 19029 - RNA, 21 nt, RNAi
uuagagaacauuuauguacag

SEQ ID NO: 19030 - DNA, 21 bp, homo sapiens
cacctcttcacaatttagttc

SEQ ID NO: 19031 - RNA, 21 nt, RNAi
ccucuucacaauuuaguucuu

SEQ ID NO: 19032 - RNA, 21 nt, RNAi
uuggagaaguguuaaaucaag

SEQ ID NO: 19033 - DNA, 21 bp, homo sapiens
cacaatttagttcgtacctgg

SEQ ID NO: 19034 - RNA, 21 nt, RNAi
caauuuaguucguaccugguu

SEQ ID NO: 19035 - RNA, 21 nt, RNAi
uuguuaaaucaagcauggacc

SEQ ID NO: 19036 - DNA, 21 bp, homo sapiens
caatttagttcgtacctggct

SEQ ID NO: 19037 - RNA, 21 nt, RNAi
auuuaguucguaccuggcuuu

SEQ ID NO: 19038 - RNA, 21 nt, RNAi
uuuaaaucaagcauggaccga

SEQ ID NO: 19039 - DNA, 21 bp, homo sapiens
cagcagcctcactgcatcttt

SEQ ID NO: 19040 - RNA, 21 nt, RNAi
gcagccucacugcaucuuuuu

SEQ ID NO: 19041 - RNA, 21 nt, RNAi
uucgucggagugacguagaaa

SEQ ID NO: 19042 - DNA, 21 bp, homo sapiens
cagcctcactgcatctttctc

SEQ ID NO: 19043 - RNA, 21 nt, RNAi
gccucacugcaucuuucucuu

SEQ ID NO: 19044 - RNA, 21 nt, RNAi
uucggagugacguagaaagag

SEQ ID NO: 19045 - DNA, 21 bp, homo sapiens
cagctcctctgcctttgtgct

SEQ ID NO: 19046 - RNA, 21 nt, RNAi
gcuccucugccuuugugcuuu

SEQ ID NO: 19047 - RNA, 21 nt, RNAi
uucgaggagacggaaacacga

SEQ ID NO: 19048 - DNA, 21 bp, homo sapiens
cactgtcataatctctttcca

SEQ ID NO: 19049 - RNA, 21 nt, RNAi
cugucauaaucucuuuccauu

SEQ ID NO: 19050 - RNA, 21 nt, RNAi
uugacaguauuagagaaaggu

SEQ ID NO: 19051 - DNA, 21 bp, homo sapiens
cataatctctttccatcttac

SEQ ID NO: 19052 - RNA, 21 nt, RNAi
uaaucucuuuccaucuuacuu

SEQ ID NO: 19053 - RNA, 21 nt, RNAi
uuauuagagaaagguagaaug

SEQ ID NO: 19054 - DNA, 21 bp, homo sapiens
caaggctcacatgctccttgc

SEQ ID NO: 19055 - RNA, 21 nt, RNAi
aggcucacaugcuccuugcuu

SEQ ID NO: 19056 - RNA, 21 nt, RNAi
uuuccgaguguacgaggaacg

SEQ ID NO: 19057 - DNA, 21 bp, homo sapiens
cacatgctccttgcctctgct

SEQ ID NO: 19058 - RNA, 21 nt, RNAi
caugcuccuugccucugcuuu

SEQ ID NO: 19059 - RNA, 21 nt, RNAi
uuguacgaggaacggagacga

SEQ ID NO: 19060 - DNA, 21 bp, homo sapiens
catgctccttgcctctgctct

SEQ ID NO: 19061 - RNA, 21 nt, RNAi
ugcuccuugccucugcucuuu

SEQ ID NO: 19062 - RNA, 21 nt, RNAi
uuacgaggaacggagacgaga

SEQ ID NO: 19063 - DNA, 21 bp, homo sapiens
cactcacgctcagcacacatg

SEQ ID NO: 19064 - RNA, 21 nt, RNAi
cucacgcucagcacacauguu

SEQ ID NO: 19065 - RNA, 21 nt, RNAi
uugagugcgagucguguguac

SEQ ID NO: 19066 - DNA, 21 bp, homo sapiens
cacgctcagcacacatgcatc

SEQ ID NO: 19067 - RNA, 21 nt, RNAi
cgcucagcacacaugcaucuu

SEQ ID NO: 19068 - RNA, 21 nt, RNAi
uugcgagucguguguacguag

SEQ ID NO: 19069 - DNA, 21 bp, homo sapiens
cactgaacatgctcatgtgta

SEQ ID NO: 19070 - RNA, 21 nt, RNAi
cugaacaugcucauguguauu

SEQ ID NO: 19071 - RNA, 21 nt, RNAi
uugacuuguacgaguacacau

SEQ ID NO: 19072 - DNA, 21 bp, homo sapiens
catgctcatgtgtacacacgc

SEQ ID NO: 19073 - RNA, 21 nt, RNAi
ugcucauguguacacacgcuu

SEQ ID NO: 19074 - RNA, 21 nt, RNAi
uuacgaguacacaugugugcg

SEQ ID NO: 19075 - DNA, 21 bp, homo sapiens
catgttcagtcacatgtgctc

SEQ ID NO: 19076 - RNA, 21 nt, RNAi
uguucagucacaugugcucuu

SEQ ID NO: 19077 - RNA, 21 nt, RNAi
uuacaagucaguguacacgag

SEQ ID NO: 19078 - DNA, 21 bp, homo sapiens
catgtgcaatttgtctagcat

SEQ ID NO: 19079 - RNA, 21 nt, RNAi
ugugcaauuugucuagcauuu

SEQ ID NO: 19080 - RNA, 21 nt, RNAi
uuacacguuaaacagaucgua

SEQ ID NO: 19081 - DNA, 21 bp, homo sapiens
caatttgtctagcatgctgag

SEQ ID NO: 19082 - RNA, 21 nt, RNAi
auuugucuagcaugcugaguu

SEQ ID NO: 19083 - RNA, 21 nt, RNAi
uuuaaacagaucguacgacuc

SEQ ID NO: 19084 - DNA, 21 bp, homo sapiens
catgctgagtcatgtctttcc

SEQ ID NO: 19085 - RNA, 21 nt, RNAi
ugcugagucaugucuuuccuu

SEQ ID NO: 19086 - RNA, 21 nt, RNAi
uuacgacucaguacagaaagg

SEQ ID NO: 19087 - DNA, 21 bp, homo sapiens
catgtctttcctatttgcaca

SEQ ID NO: 19088 - RNA, 21 nt, RNAi
ugucuuuccuauuugcacauu

SEQ ID NO: 19089 - RNA, 21 nt, RNAi
uuacagaaaggauaaacgugu

SEQ ID NO: 19090 - DNA, 21 bp, homo sapiens
cacacgtccatgtttatccat

SEQ ID NO: 19091 - RNA, 21 nt, RNAi
cacguccauguuuauccauuu

SEQ ID NO: 19092 - RNA, 21 nt, RNAi
uugugcagguacaaauaggua

SEQ ID NO: 19093 - DNA, 21 bp, homo sapiens
cacgtccatgtttatccatgt

SEQ ID NO: 19094 - RNA, 21 nt, RNAi
cguccauguuuauccauguuu

SEQ ID NO: 19095 - RNA, 21 nt, RNAi
uugcagguacaaauagguaca

SEQ ID NO: 19096 - DNA, 21 bp, homo sapiens
catgtttatccatgtactttc

SEQ ID NO: 19097 - RNA, 21 nt, RNAi
uguuuauccauguacuuucuu

SEQ ID NO: 19098 - RNA, 21 nt, RNAi
uuacaaauagguacaugaaag

SEQ ID NO: 19099 - DNA, 21 bp, homo sapiens
catgtaccttgtgtactttct

SEQ ID NO: 19100 - RNA, 21 nt, RNAi
uguaccuuguguacuuucuuu

SEQ ID NO: 19101 - RNA, 21 nt, RNAi
uuacauggaacacaugaaaga

SEQ ID NO: 19102 - DNA, 21 bp, homo sapiens
catggtattcttctgacagag

SEQ ID NO: 19103 - RNA, 21 nt, RNAi
ugguauucuucugacagaguu

SEQ ID NO: 19104 - RNA, 21 nt, RNAi
uuaccauaagaagacugucuc

SEQ ID NO: 19105 - DNA, 21 bp, homo sapiens
cacagaatctccatttctgct

SEQ ID NO: 19106 - RNA, 21 nt, RNAi
cagaaucuccauuucugcuuu

SEQ ID NO: 19107 - RNA, 21 nt, RNAi
uugucuuagagguaaagacga

SEQ ID NO: 19108 - DNA, 21 bp, homo sapiens
cagaatctccatttctgctca

SEQ ID NO: 19109 - RNA, 21 nt, RNAi
gaaucuccauuucugcucauu

SEQ ID NO: 19110 - RNA, 21 nt, RNAi
uucuuagagguaaagacgagu

SEQ ID NO: 19111 - DNA, 21 bp, homo sapiens
catctccattgcattcatgta

SEQ ID NO: 19112 - RNA, 21 nt, RNAi
ucuccauugcauucauguauu

SEQ ID NO: 19113 - RNA, 21 nt, RNAi
uuagagguaacguaaguacau

SEQ ID NO: 19114 - DNA, 21 bp, homo sapiens
cagtctacactcacaatcatc

SEQ ID NO: 19115 - RNA, 21 nt, RNAi
gucuacacucacaaucaucuu

SEQ ID NO: 19116 - RNA, 21 nt, RNAi
uucagaugugaguguuaguag

SEQ ID NO: 19117 - DNA, 21 bp, homo sapiens
caggtttggagagctgcttcc

SEQ ID NO: 19118 - RNA, 21 nt, RNAi
gguuuggagagcugcuuccuu

SEQ ID NO: 19119 - RNA, 21 nt, RNAi
uuccaaaccucucgacgaagg

SEQ ID NO: 19120 - DNA, 21 bp, homo sapiens
cagtggatagttgatgagaat

SEQ ID NO: 19121 - RNA, 21 nt, RNAi
guggauaguugaugagaauuu

SEQ ID NO: 19122 - RNA, 21 nt, RNAi
uucaccuaucaacuacucuua

SEQ ID NO: 19123 - DNA, 21 bp, homo sapiens
caataaaccagtgaacagtgt

SEQ ID NO: 19124 - RNA, 21 nt, RNAi
auaaaccagugaacaguguuu

SEQ ID NO: 19125 - RNA, 21 nt, RNAi
uuuauuuggucacuugucaca

SEQ ID NO: 19126 - DNA, 21 bp, homo sapiens
cagtgaacagtgtgactcggc

SEQ ID NO: 19127 - RNA, 21 nt, RNAi
gugaacagugugacucggcuu

SEQ ID NO: 19128 - RNA, 21 nt, RNAi
uucacuugucacacugagccg

SEQ ID NO: 19129 - DNA, 21 bp, homo sapiens
gaggaggagaaaggtggagga

SEQ ID NO: 19130 - RNA, 21 nt, RNAi
ggaggagaaagguggaggauu

SEQ ID NO: 19131 - RNA, 21 nt, RNAi
uuccuccucuuuccaccuccu

SEQ ID NO: 19132 - DNA, 21 bp, homo sapiens
gaggagaaaggtggaggagaa

SEQ ID NO: 19133 - RNA, 21 nt, RNAi
ggagaaagguggaggagaauu

SEQ ID NO: 19134 - RNA, 21 nt, RNAi
uuccucuuuccaccuccucuu

SEQ ID NO: 19135 - DNA, 21 bp, homo sapiens
gagatgttgctgctgctgtta

SEQ ID NO: 19136 - RNA, 21 nt, RNAi
gauguugcugcugcuguuauu

SEQ ID NO: 19137 - RNA, 21 nt, RNAi
uucuacaacgacgacgacaau

SEQ ID NO: 19138 - DNA, 21 bp, homo sapiens
gatgttgctgctgctgttact

SEQ ID NO: 19139 - RNA, 21 nt, RNAi
uguugcugcugcuguuacuuu

SEQ ID NO: 19140 - RNA, 21 nt, RNAi
uuacaacgacgacgacaauga

SEQ ID NO: 19141 - DNA, 21 bp, homo sapiens
gaaggttgccagatcatacac

SEQ ID NO: 19142 - RNA, 21 nt, RNAi
agguugccagaucauacacuu

SEQ ID NO: 19143 - RNA, 21 nt, RNAi
uuuccaacggucuaguaugug

SEQ ID NO: 19144 - DNA, 21 bp, homo sapiens
gaccaggtgaaggctatcaac

SEQ ID NO: 19145 - RNA, 21 nt, RNAi
ccaggugaaggcuaucaacuu

SEQ ID NO: 19146 - RNA, 21 nt, RNAi
uugguccacuuccgauaguug

SEQ ID NO: 19147 - DNA, 21 bp, homo sapiens
gaaggctatcaacttcctgcc

SEQ ID NO: 19148 - RNA, 21 nt, RNAi
aggcuaucaacuuccugccuu

SEQ ID NO: 19149 - RNA, 21 nt, RNAi
uuuccgauaguugaaggacgg

SEQ ID NO: 19150 - DNA, 21 bp, homo sapiens
gactatgagattgagtatgtg

SEQ ID NO: 19151 - RNA, 21 nt, RNAi
cuaugagauugaguauguguu

SEQ ID NO: 19152 - RNA, 21 nt, RNAi
uugauacucuaacucauacac

SEQ ID NO: 19153 - DNA, 21 bp, homo sapiens
gagattgagtatgtgtgccgg

SEQ ID NO: 19154 - RNA, 21 nt, RNAi
gauugaguaugugugccgguu

SEQ ID NO: 19155 - RNA, 21 nt, RNAi
uucuaacucauacacacggcc

SEQ ID NO: 19156 - DNA, 21 bp, homo sapiens
gaatctgctccaagtcttatt

SEQ ID NO: 19157 - RNA, 21 nt, RNAi
aucugcuccaagucuuauuuu

SEQ ID NO: 19158 - RNA, 21 nt, RNAi
uuuagacgagguucagaauaa

SEQ ID NO: 19159 - DNA, 21 bp, homo sapiens
gaatcgaacgccacactcaga

SEQ ID NO: 19160 - RNA, 21 nt, RNAi
aucgaacgccacacucagauu

SEQ ID NO: 19161 - RNA, 21 nt, RNAi
uuuagcuugcggugugagucu

SEQ ID NO: 19162 - DNA, 21 bp, homo sapiens
gaacgccacactcagaacggc

SEQ ID NO: 19163 - RNA, 21 nt, RNAi
acgccacacucagaacggcuu

SEQ ID NO: 19164 - RNA, 21 nt, RNAi
uuugcggugugagucuugccg

SEQ ID NO: 19165 - DNA, 21 bp, homo sapiens
gatggcgctggaggacgtgaa

SEQ ID NO: 19166 - RNA, 21 nt, RNAi
uggcgcuggaggacgugaauu

SEQ ID NO: 19167 - RNA, 21 nt, RNAi
uuaccgcgaccuccugcacuu

SEQ ID NO: 19168 - DNA, 21 bp, homo sapiens
gaggacgtgaatagccgcagg

SEQ ID NO: 19169 - RNA, 21 nt, RNAi
ggacgugaauagccgcagguu

SEQ ID NO: 19170 - RNA, 21 nt, RNAi
uuccugcacuuaucggcgucc

SEQ ID NO: 19171 - DNA, 21 bp, homo sapiens
gacatcctgccggactatgag

SEQ ID NO: 19172 - RNA, 21 nt, RNAi
cauccugccggacuaugaguu

SEQ ID NO: 19173 - RNA, 21 nt, RNAi
uuguaggacggccugauacuc

SEQ ID NO: 19174 - DNA, 21 bp, homo sapiens
gactatgagctcaagctcatc

SEQ ID NO: 19175 - RNA, 21 nt, RNAi
cuaugagcucaagcucaucuu

SEQ ID NO: 19176 - RNA, 21 nt, RNAi
uugauacucgaguucgaguag

SEQ ID NO: 19177 - DNA, 21 bp, homo sapiens
gagctcaagctcatccaccac

SEQ ID NO: 19178 - RNA, 21 nt, RNAi
gcucaagcucauccaccacuu

SEQ ID NO: 19179 - RNA, 21 nt, RNAi
uucgaguucgaguagguggug

SEQ ID NO: 19180 - DNA, 21 bp, homo sapiens
gacagcaagtgtgatccaggc

SEQ ID NO: 19181 - RNA, 21 nt, RNAi
cagcaagugugauccaggcuu

SEQ ID NO: 19182 - RNA, 21 nt, RNAi
uugucguucacacuagguccg

SEQ ID NO: 19183 - DNA, 21 bp, homo sapiens
gatccaggccaagccaccaag

SEQ ID NO: 19184 - RNA, 21 nt, RNAi
uccaggccaagccaccaaguu

SEQ ID NO: 19185 - RNA, 21 nt, RNAi
uuagguccgguucggugguuc

SEQ ID NO: 19186 - DNA, 21 bp, homo sapiens
gatcatccttatgcctggctg

SEQ ID NO: 19187 - RNA, 21 nt, RNAi
ucauccuuaugccuggcuguu

SEQ ID NO: 19188 - RNA, 21 nt, RNAi
uuaguaggaauacggaccgac

SEQ ID NO: 19189 - DNA, 21 bp, homo sapiens
gaggctgctaggatgtggaac

SEQ ID NO: 19190 - RNA, 21 nt, RNAi
ggcugcuaggauguggaacuu

SEQ ID NO: 19191 - RNA, 21 nt, RNAi
uuccgacgauccuacaccuug

SEQ ID NO: 19192 - DNA, 21 bp, homo sapiens
gatgtggaacctcattgtgct

SEQ ID NO: 19193 - RNA, 21 nt, RNAi
uguggaaccucauugugcuuu

SEQ ID NO: 19194 - RNA, 21 nt, RNAi
uuacaccuuggaguaacacga

SEQ ID NO: 19195 - DNA, 21 bp, homo sapiens
gaacctcattgtgctttccta

SEQ ID NO: 19196 - RNA, 21 nt, RNAi
accucauugugcuuuccuauu

SEQ ID NO: 19197 - RNA, 21 nt, RNAi
uuuggaguaacacgaaaggau

SEQ ID NO: 19198 - DNA, 21 bp, homo sapiens
gaagaagattgctaccatcca

SEQ ID NO: 19199 - RNA, 21 nt, RNAi
agaagauugcuaccauccauu

SEQ ID NO: 19200 - RNA, 21 nt, RNAi
uuucuucuaacgaugguaggu

SEQ ID NO: 19201 - DNA, 21 bp, homo sapiens
gaagattgctaccatccagca

SEQ ID NO: 19202 - RNA, 21 nt, RNAi
agauugcuaccauccagcauu

SEQ ID NO: 19203 - RNA, 21 nt, RNAi
uuucuaacgaugguaggucgu

SEQ ID NO: 19204 - DNA, 21 bp, homo sapiens
gattgctaccatccagcagac

SEQ ID NO: 19205 - RNA, 21 nt, RNAi
uugcuaccauccagcagacuu

SEQ ID NO: 19206 - RNA, 21 nt, RNAi
uuaacgaugguaggucgucug

SEQ ID NO: 19207 - DNA, 21 bp, homo sapiens
gaccactgaggtcttcacttc

SEQ ID NO: 19208 - RNA, 21 nt, RNAi
ccacugaggucuucacuucuu

SEQ ID NO: 19209 - RNA, 21 nt, RNAi
uuggugacuccagaagugaag

SEQ ID NO: 19210 - DNA, 21 bp, homo sapiens
gaggtcttcacttcgactctg

SEQ ID NO: 19211 - RNA, 21 nt, RNAi
ggucuucacuucgacucuguu

SEQ ID NO: 19212 - RNA, 21 nt, RNAi
uuccagaagugaagcugagac

SEQ ID NO: 19213 - DNA, 21 bp, homo sapiens
gactctggacgacctggagga

SEQ ID NO: 19214 - RNA, 21 nt, RNAi
cucuggacgaccuggaggauu

SEQ ID NO: 19215 - RNA, 21 nt, RNAi
uugagaccugcuggaccuccu

SEQ ID NO: 19216 - DNA, 21 bp, homo sapiens
gacgacctggaggaacgagtg

SEQ ID NO: 19217 - RNA, 21 nt, RNAi
cgaccuggaggaacgaguguu

SEQ ID NO: 19218 - RNA, 21 nt, RNAi
uugcuggaccuccuugcucac

SEQ ID NO: 19219 - DNA, 21 bp, homo sapiens
gacctggaggaacgagtgaag

SEQ ID NO: 19220 - RNA, 21 nt, RNAi
ccuggaggaacgagugaaguu

SEQ ID NO: 19221 - RNA, 21 nt, RNAi
uuggaccuccuugcucacuuc

SEQ ID NO: 19222 - DNA, 21 bp, homo sapiens
gaggaacgagtgaaggaggct

SEQ ID NO: 19223 - RNA, 21 nt, RNAi
ggaacgagugaaggaggcuuu

SEQ ID NO: 19224 - RNA, 21 nt, RNAi
uuccuugcucacuuccuccga

SEQ ID NO: 19225 - DNA, 21 bp, homo sapiens
gaacgagtgaaggaggctgga

SEQ ID NO: 19226 - RNA, 21 nt, RNAi
acgagugaaggaggcuggauu

SEQ ID NO: 19227 - RNA, 21 nt, RNAi
uuugcucacuuccuccgaccu

SEQ ID NO: 19228 - DNA, 21 bp, homo sapiens
gagtgaaggaggctggaattg

SEQ ID NO: 19229 - RNA, 21 nt, RNAi
gugaaggaggcuggaauuguu

SEQ ID NO: 19230 - RNA, 21 nt, RNAi
uucacuuccuccgaccuuaac

SEQ ID NO: 19231 - DNA, 21 bp, homo sapiens
gaaggaggctggaattgagat

SEQ ID NO: 19232 - RNA, 21 nt, RNAi
aggaggcuggaauugagauuu

SEQ ID NO: 19233 - RNA, 21 nt, RNAi
uuuccuccgaccuuaacucua

SEQ ID NO: 19234 - DNA, 21 bp, homo sapiens
gaggctggaattgagattact

SEQ ID NO: 19235 - RNA, 21 nt, RNAi
ggcuggaauugagauuacuuu

SEQ ID NO: 19236 - RNA, 21 nt, RNAi
uuccgaccuuaacucuaauga

SEQ ID NO: 19237 - DNA, 21 bp, homo sapiens
gaattgagattactttccgcc

SEQ ID NO: 19238 - RNA, 21 nt, RNAi
auugagauuacuuuccgccuu

SEQ ID NO: 19239 - RNA, 21 nt, RNAi
uuuaacucuaaugaaaggcgg

SEQ ID NO: 19240 - DNA, 21 bp, homo sapiens
gagattactttccgccagagt

SEQ ID NO: 19241 - RNA, 21 nt, RNAi
gauuacuuuccgccagaguuu

SEQ ID NO: 19242 - RNA, 21 nt, RNAi
uucuaaugaaaggcggucuca

SEQ ID NO: 19243 - DNA, 21 bp, homo sapiens
gattactttccgccagagttt

SEQ ID NO: 19244 - RNA, 21 nt, RNAi
uuacuuuccgccagaguuuuu

SEQ ID NO: 19245 - RNA, 21 nt, RNAi
uuaaugaaaggcggucucaaa

SEQ ID NO: 19246 - DNA, 21 bp, homo sapiens
gagtttcttctcagatccagc

SEQ ID NO: 19247 - RNA, 21 nt, RNAi
guuucuucucagauccagcuu

SEQ ID NO: 19248 - RNA, 21 nt, RNAi
uucaaagaagagucuaggucg

SEQ ID NO: 19249 - DNA, 21 bp, homo sapiens
gaggtgtacaaggagcgtctc

SEQ ID NO: 19250 - RNA, 21 nt, RNAi
gguguacaaggagcgucucuu

SEQ ID NO: 19251 - RNA, 21 nt, RNAi
uuccacauguuccucgcagag

SEQ ID NO: 19252 - DNA, 21 bp, homo sapiens
gaagaagtacgtctggttcct

SEQ ID NO: 19253 - RNA, 21 nt, RNAi
agaaguacgucugguuccuuu

SEQ ID NO: 19254 - RNA, 21 nt, RNAi
uuucuucaugcagaccaagga

SEQ ID NO: 19255 - DNA, 21 bp, homo sapiens
gaagtacgtctggttcctcat

SEQ ID NO: 19256 - RNA, 21 nt, RNAi
aguacgucugguuccucauuu

SEQ ID NO: 19257 - RNA, 21 nt, RNAi
uuucaugcagaccaaggagua

SEQ ID NO: 19258 - DNA, 21 bp, homo sapiens
gacaattggttcaagatctac

SEQ ID NO: 19259 - RNA, 21 nt, RNAi
caauugguucaagaucuacuu

SEQ ID NO: 19260 - RNA, 21 nt, RNAi
uuguuaaccaaguucuagaug

SEQ ID NO: 19261 - DNA, 21 bp, homo sapiens
gatgagatgactgaggcggtg

SEQ ID NO: 19262 - RNA, 21 nt, RNAi
ugagaugacugaggcgguguu

SEQ ID NO: 19263 - RNA, 21 nt, RNAi
uuacucuacugacuccgccac

SEQ ID NO: 19264 - DNA, 21 bp, homo sapiens
gagatgactgaggcggtggag

SEQ ID NO: 19265 - RNA, 21 nt, RNAi
gaugacugaggcgguggaguu

SEQ ID NO: 19266 - RNA, 21 nt, RNAi
uucuacugacuccgccaccuc

SEQ ID NO: 19267 - DNA, 21 bp, homo sapiens
gagattgtcatgctgaatcct

SEQ ID NO: 19268 - RNA, 21 nt, RNAi
gauugucaugcugaauccuuu

SEQ ID NO: 19269 - RNA, 21 nt, RNAi
uucuaacaguacgacuuagga

SEQ ID NO: 19270 - DNA, 21 bp, homo sapiens
gattgtcatgctgaatcctgc

SEQ ID NO: 19271 - RNA, 21 nt, RNAi
uugucaugcugaauccugcuu

SEQ ID NO: 19272 - RNA, 21 nt, RNAi
uuaacaguacgacuuaggacg

SEQ ID NO: 19273 - DNA, 21 bp, homo sapiens
gaatttgtggagaaactaacc

SEQ ID NO: 19274 - RNA, 21 nt, RNAi
auuuguggagaaacuaaccuu

SEQ ID NO: 19275 - RNA, 21 nt, RNAi
uuuaaacaccucuuugauugg

SEQ ID NO: 19276 - DNA, 21 bp, homo sapiens
gagaaactaaccaagcgactg

SEQ ID NO: 19277 - RNA, 21 nt, RNAi
gaaacuaaccaagcgacuguu

SEQ ID NO: 19278 - RNA, 21 nt, RNAi
uucuuugauugguucgcugac

SEQ ID NO: 19279 - DNA, 21 bp, homo sapiens
gaaactaaccaagcgactgaa

SEQ ID NO: 19280 - RNA, 21 nt, RNAi
aacuaaccaagcgacugaauu

SEQ ID NO: 19281 - RNA, 21 nt, RNAi
uuuugauugguucgcugacuu

SEQ ID NO: 19282 - DNA, 21 bp, homo sapiens
gaggagacaggaggcttccag

SEQ ID NO: 19283 - RNA, 21 nt, RNAi
ggagacaggaggcuuccaguu

SEQ ID NO: 19284 - RNA, 21 nt, RNAi
uuccucuguccuccgaagguc

SEQ ID NO: 19285 - DNA, 21 bp, homo sapiens
gagacaggaggcttccaggag

SEQ ID NO: 19286 - RNA, 21 nt, RNAi
gacaggaggcuuccaggaguu

SEQ ID NO: 19287 - RNA, 21 nt, RNAi
uucuguccuccgaagguccuc

SEQ ID NO: 19288 - DNA, 21 bp, homo sapiens
gaggcaccgctggcctatgat

SEQ ID NO: 19289 - RNA, 21 nt, RNAi
ggcaccgcuggccuaugauuu

SEQ ID NO: 19290 - RNA, 21 nt, RNAi
uuccguggcgaccggauacua

SEQ ID NO: 19291 - DNA, 21 bp, homo sapiens
gaacaagacatctggaggagg

SEQ ID NO: 19292 - RNA, 21 nt, RNAi
acaagacaucuggaggagguu

SEQ ID NO: 19293 - RNA, 21 nt, RNAi
uuuguucuguagaccuccucc

SEQ ID NO: 19294 - DNA, 21 bp, homo sapiens
gaggacttcaactacaacaac

SEQ ID NO: 19295 - RNA, 21 nt, RNAi
ggacuucaacuacaacaacuu

SEQ ID NO: 19296 - RNA, 21 nt, RNAi
uuccugaaguugauguuguug

SEQ ID NO: 19297 - DNA, 21 bp, homo sapiens
gacttcaactacaacaaccag

SEQ ID NO: 19298 - RNA, 21 nt, RNAi
cuucaacuacaacaaccaguu

SEQ ID NO: 19299 - RNA, 21 nt, RNAi
uugaaguugauguuguugguc

SEQ ID NO: 19300 - DNA, 21 bp, homo sapiens
gaccattaccgaccaaatcta

SEQ ID NO: 19301 - RNA, 21 nt, RNAi
ccauuaccgaccaaaucuauu

SEQ ID NO: 19302 - RNA, 21 nt, RNAi
uugguaauggcugguuuagau

SEQ ID NO: 19303 - DNA, 21 bp, homo sapiens
gatggcatggacgcttatcga

SEQ ID NO: 19304 - RNA, 21 nt, RNAi
uggcauggacgcuuaucgauu

SEQ ID NO: 19305 - RNA, 21 nt, RNAi
uuaccguaccugcgaauagcu

SEQ ID NO: 19306 - DNA, 21 bp, homo sapiens
gacgcttatcgagcagcttca

SEQ ID NO: 19307 - RNA, 21 nt, RNAi
cgcuuaucgagcagcuucauu

SEQ ID NO: 19308 - RNA, 21 nt, RNAi
uugcgaauagcucgucgaagu

SEQ ID NO: 19309 - DNA, 21 bp, homo sapiens
gaagattggctactatgacag

SEQ ID NO: 19310 - RNA, 21 nt, RNAi
agauuggcuacuaugacaguu

SEQ ID NO: 19311 - RNA, 21 nt, RNAi
uuucuaaccgaugauacuguc

SEQ ID NO: 19312 - DNA, 21 bp, homo sapiens
gattggctactatgacagcac

SEQ ID NO: 19313 - RNA, 21 nt, RNAi
uuggcuacuaugacagcacuu

SEQ ID NO: 19314 - RNA, 21 nt, RNAi
uuaaccgaugauacugucgug

SEQ ID NO: 19315 - DNA, 21 bp, homo sapiens
gacagcaccaaggatgatctt

SEQ ID NO: 19316 - RNA, 21 nt, RNAi
cagcaccaaggaugaucuuuu

SEQ ID NO: 19317 - RNA, 21 nt, RNAi
uugucgugguuccuacuagaa

SEQ ID NO: 19318 - DNA, 21 bp, homo sapiens
gatgatctttcctggtccaaa

SEQ ID NO: 19319 - RNA, 21 nt, RNAi
ugaucuuuccugguccaaauu

SEQ ID NO: 19320 - RNA, 21 nt, RNAi
uuacuagaaaggaccagguuu

SEQ ID NO: 19321 - DNA, 21 bp, homo sapiens
gacattccgcttcctgtcaca

SEQ ID NO: 19322 - RNA, 21 nt, RNAi
cauuccgcuuccugucacauu

SEQ ID NO: 19323 - RNA, 21 nt, RNAi
uuguaaggcgaaggacagugu

SEQ ID NO: 19324 - DNA, 21 bp, homo sapiens
gaaactctttatctccgtctc

SEQ ID NO: 19325 - RNA, 21 nt, RNAi
aacucuuuaucuccgucucuu

SEQ ID NO: 19326 - RNA, 21 nt, RNAi
uuuugagaaauagaggcagag

SEQ ID NO: 19327 - DNA, 21 bp, homo sapiens
gaggaaccagtttcctttcgt

SEQ ID NO: 19328 - RNA, 21 nt, RNAi
ggaaccaguuuccuuucguuu

SEQ ID NO: 19329 - RNA, 21 nt, RNAi
uuccuuggucaaaggaaagca

SEQ ID NO: 19330 - DNA, 21 bp, homo sapiens
gaaccagtttcctttcgtctg

SEQ ID NO: 19331 - RNA, 21 nt, RNAi
accaguuuccuuucgucuguu

SEQ ID NO: 19332 - RNA, 21 nt, RNAi
uuuggucaaaggaaagcagac

SEQ ID NO: 19333 - DNA, 21 bp, homo sapiens
gaaggagtggaggaagactct

SEQ ID NO: 19334 - RNA, 21 nt, RNAi
aggaguggaggaagacucuuu

SEQ ID NO: 19335 - RNA, 21 nt, RNAi
uuuccucaccuccuucugaga

SEQ ID NO: 19336 - DNA, 21 bp, homo sapiens
gagtggaggaagactctggaa

SEQ ID NO: 19337 - RNA, 21 nt, RNAi
guggaggaagacucuggaauu

SEQ ID NO: 19338 - RNA, 21 nt, RNAi
uucaccuccuucugagaccuu

SEQ ID NO: 19339 - DNA, 21 bp, homo sapiens
gatgtcctcactctcgccatc

SEQ ID NO: 19340 - RNA, 21 nt, RNAi
uguccucacucucgccaucuu

SEQ ID NO: 19341 - RNA, 21 nt, RNAi
uuacaggagugagagcgguag

SEQ ID NO: 19342 - DNA, 21 bp, homo sapiens
gaccattgagacatttgccaa

SEQ ID NO: 19343 - RNA, 21 nt, RNAi
ccauugagacauuugccaauu

SEQ ID NO: 19344 - RNA, 21 nt, RNAi
uugguaacucuguaaacgguu

SEQ ID NO: 19345 - DNA, 21 bp, homo sapiens
gagacatttgccaaggaggaa

SEQ ID NO: 19346 - RNA, 21 nt, RNAi
gacauuugccaaggaggaauu

SEQ ID NO: 19347 - RNA, 21 nt, RNAi
uucuguaaacgguuccuccuu

SEQ ID NO: 19348 - DNA, 21 bp, homo sapiens
gacatttgccaaggaggaacc

SEQ ID NO: 19349 - RNA, 21 nt, RNAi
cauuugccaaggaggaaccuu

SEQ ID NO: 19350 - RNA, 21 nt, RNAi
uuguaaacgguuccuccuugg

SEQ ID NO: 19351 - DNA, 21 bp, homo sapiens
gaggaacctaaggaagatatt

SEQ ID NO: 19352 - RNA, 21 nt, RNAi
ggaaccuaaggaagauauuuu

SEQ ID NO: 19353 - RNA, 21 nt, RNAi
uuccuuggauuccuucuauaa

SEQ ID NO: 19354 - DNA, 21 bp, homo sapiens
gaacctaaggaagatattgac

SEQ ID NO: 19355 - RNA, 21 nt, RNAi
accuaaggaagauauugacuu

SEQ ID NO: 19356 - RNA, 21 nt, RNAi
uuuggauuccuucuauaacug

SEQ ID NO: 19357 - DNA, 21 bp, homo sapiens
gaagatattgacgtctctatt

SEQ ID NO: 19358 - RNA, 21 nt, RNAi
agauauugacgucucuauuuu

SEQ ID NO: 19359 - RNA, 21 nt, RNAi
uuucuauaacugcagagauaa

SEQ ID NO: 19360 - DNA, 21 bp, homo sapiens
gatattgacgtctctattctg

SEQ ID NO: 19361 - RNA, 21 nt, RNAi
uauugacgucucuauucuguu

SEQ ID NO: 19362 - RNA, 21 nt, RNAi
uuauaacugcagagauaagac

SEQ ID NO: 19363 - DNA, 21 bp, homo sapiens
gagcattgcagctccaggaag

SEQ ID NO: 19364 - RNA, 21 nt, RNAi
gcauugcagcuccaggaaguu

SEQ ID NO: 19365 - RNA, 21 nt, RNAi
uucguaacgucgagguccuuc

SEQ ID NO: 19366 - DNA, 21 bp, homo sapiens
gaagatgaatacatggcttgg

SEQ ID NO: 19367 - RNA, 21 nt, RNAi
agaugaauacauggcuugguu

SEQ ID NO: 19368 - RNA, 21 nt, RNAi
uuucuacuuauguaccgaacc

SEQ ID NO: 19369 - DNA, 21 bp, homo sapiens
gatgaatacatggcttggcat

SEQ ID NO: 19370 - RNA, 21 nt, RNAi
ugaauacauggcuuggcauuu

SEQ ID NO: 19371 - RNA, 21 nt, RNAi
uuacuuauguaccgaaccgua

SEQ ID NO: 19372 - DNA, 21 bp, homo sapiens
gaatcttccttgcttatgaga

SEQ ID NO: 19373 - RNA, 21 nt, RNAi
aucuuccuugcuuaugagauu

SEQ ID NO: 19374 - RNA, 21 nt, RNAi
uuuagaaggaacgaauacucu

SEQ ID NO: 19375 - DNA, 21 bp, homo sapiens
gagaccaagagtgtgtccact

SEQ ID NO: 19376 - RNA, 21 nt, RNAi
gaccaagaguguguccacuuu

SEQ ID NO: 19377 - RNA, 21 nt, RNAi
uucugguucucacacagguga

SEQ ID NO: 19378 - DNA, 21 bp, homo sapiens
gaccaagagtgtgtccactga

SEQ ID NO: 19379 - RNA, 21 nt, RNAi
ccaagaguguguccacugauu

SEQ ID NO: 19380 - RNA, 21 nt, RNAi
uugguucucacacaggugacu

SEQ ID NO: 19381 - DNA, 21 bp, homo sapiens
gagtgtgtccactgagaagat

SEQ ID NO: 19382 - RNA, 21 nt, RNAi
guguguccacugagaagauuu

SEQ ID NO: 19383 - RNA, 21 nt, RNAi
uucacacaggugacucuucua

SEQ ID NO: 19384 - DNA, 21 bp, homo sapiens
gagaagatcaatgatcaccgg

SEQ ID NO: 19385 - RNA, 21 nt, RNAi
gaagaucaaugaucaccgguu

SEQ ID NO: 19386 - RNA, 21 nt, RNAi
uucuucuaguuacuaguggcc

SEQ ID NO: 19387 - DNA, 21 bp, homo sapiens
gattctgtccagccagcagga

SEQ ID NO: 19388 - RNA, 21 nt, RNAi
uucuguccagccagcaggauu

SEQ ID NO: 19389 - RNA, 21 nt, RNAi
uuaagacaggucggucguccu

SEQ ID NO: 19390 - DNA, 21 bp, homo sapiens
gatgcagcctttgcctttgcc

SEQ ID NO: 19391 - RNA, 21 nt, RNAi
ugcagccuuugccuuugccuu

SEQ ID NO: 19392 - RNA, 21 nt, RNAi
uuacgucggaaacggaaacgg

SEQ ID NO: 19393 - DNA, 21 bp, homo sapiens
gaggcgcaggacaccatgaag

SEQ ID NO: 19394 - RNA, 21 nt, RNAi
ggcgcaggacaccaugaaguu

SEQ ID NO: 19395 - RNA, 21 nt, RNAi
uuccgcguccugugguacuuc

SEQ ID NO: 19396 - DNA, 21 bp, homo sapiens
gaccaacaacaacgaggagga

SEQ ID NO: 19397 - RNA, 21 nt, RNAi
ccaacaacaacgaggaggauu

SEQ ID NO: 19398 - RNA, 21 nt, RNAi
uugguuguuguugcuccuccu

SEQ ID NO: 19399 - DNA, 21 bp, homo sapiens
gagaaggagaaccgtgaactg

SEQ ID NO: 19400 - RNA, 21 nt, RNAi
gaaggagaaccgugaacuguu

SEQ ID NO: 19401 - RNA, 21 nt, RNAi
uucuuccucuuggcacuugac

SEQ ID NO: 19402 - DNA, 21 bp, homo sapiens
gaaggagaaccgtgaactgga

SEQ ID NO: 19403 - RNA, 21 nt, RNAi
aggagaaccgugaacuggauu

SEQ ID NO: 19404 - RNA, 21 nt, RNAi
uuuccucuuggcacuugaccu

SEQ ID NO: 19405 - DNA, 21 bp, homo sapiens
gatcattgctgagaaagagga

SEQ ID NO: 19406 - RNA, 21 nt, RNAi
ucauugcugagaaagaggauu

SEQ ID NO: 19407 - RNA, 21 nt, RNAi
uuaguaacgacucuuucuccu

SEQ ID NO: 19408 - DNA, 21 bp, homo sapiens
gagaaagaggagcgtgtctct

SEQ ID NO: 19409 - RNA, 21 nt, RNAi
gaaagaggagcgugucucuuu

SEQ ID NO: 19410 - RNA, 21 nt, RNAi
uucuuucuccucgcacagaga

SEQ ID NO: 19411 - DNA, 21 bp, homo sapiens
gaaagaggagcgtgtctctga

SEQ ID NO: 19412 - RNA, 21 nt, RNAi
aagaggagcgugucucugauu

SEQ ID NO: 19413 - RNA, 21 nt, RNAi
uuuucuccucgcacagagacu

SEQ ID NO: 19414 - DNA, 21 bp, homo sapiens
gaggagcgtgtctctgaactg

SEQ ID NO: 19415 - RNA, 21 nt, RNAi
ggagcgugucucugaacuguu

SEQ ID NO: 19416 - RNA, 21 nt, RNAi
uuccucgcacagagacuugac

SEQ ID NO: 19417 - DNA, 21 bp, homo sapiens
gagcgtgtctctgaactgcgc

SEQ ID NO: 19418 - RNA, 21 nt, RNAi
gcgugucucugaacugcgcuu

SEQ ID NO: 19419 - RNA, 21 nt, RNAi
uucgcacagagacuugacgcg

SEQ ID NO: 19420 - DNA, 21 bp, homo sapiens
gaactgcgccatcaactccag

SEQ ID NO: 19421 - RNA, 21 nt, RNAi
acugcgccaucaacuccaguu

SEQ ID NO: 19422 - RNA, 21 nt, RNAi
uuugacgcgguaguugagguc

SEQ ID NO: 19423 - DNA, 21 bp, homo sapiens
gagtcgagtgcatttgcttta

SEQ ID NO: 19424 - RNA, 21 nt, RNAi
gucgagugcauuugcuuuauu

SEQ ID NO: 19425 - RNA, 21 nt, RNAi
uucagcucacguaaacgaaau

SEQ ID NO: 19426 - DNA, 21 bp, homo sapiens
gagtgcatttgctttataagt

SEQ ID NO: 19427 - RNA, 21 nt, RNAi
gugcauuugcuuuauaaguuu

SEQ ID NO: 19428 - RNA, 21 nt, RNAi
uucacguaaacgaaauauuca

SEQ ID NO: 19429 - DNA, 21 bp, homo sapiens
gaagaacatgctatccaatct

SEQ ID NO: 19430 - RNA, 21 nt, RNAi
agaacaugcuauccaaucuuu

SEQ ID NO: 19431 - RNA, 21 nt, RNAi
uuucuuguacgauagguuaga

SEQ ID NO: 19432 - DNA, 21 bp, homo sapiens
gaacatgctatccaatctcat

SEQ ID NO: 19433 - RNA, 21 nt, RNAi
acaugcuauccaaucucauuu

SEQ ID NO: 19434 - RNA, 21 nt, RNAi
uuuguacgauagguuagagua

SEQ ID NO: 19435 - DNA, 21 bp, homo sapiens
gaagctgctcactgctcacac

SEQ ID NO: 19436 - RNA, 21 nt, RNAi
agcugcucacugcucacacuu

SEQ ID NO: 19437 - RNA, 21 nt, RNAi
uuucgacgagugacgagugug

SEQ ID NO: 19438 - DNA, 21 bp, homo sapiens
gaacatgctcatgtgtacaca

SEQ ID NO: 19439 - RNA, 21 nt, RNAi
acaugcucauguguacacauu

SEQ ID NO: 19440 - RNA, 21 nt, RNAi
uuuguacgaguacacaugugu

SEQ ID NO: 19441 - DNA, 21 bp, homo sapiens
gagtcatgtctttcctatttg

SEQ ID NO: 19442 - RNA, 21 nt, RNAi
gucaugucuuuccuauuuguu

SEQ ID NO: 19443 - RNA, 21 nt, RNAi
uucaguacagaaaggauaaac

SEQ ID NO: 19444 - DNA, 21 bp, homo sapiens
gaatctccatttctgctcaga

SEQ ID NO: 19445 - RNA, 21 nt, RNAi
aucuccauuucugcucagauu

SEQ ID NO: 19446 - RNA, 21 nt, RNAi
uuuagagguaaagacgagucu

SEQ ID NO: 19447 - DNA, 21 bp, homo sapiens
gagagctgcttccagtggata

SEQ ID NO: 19448 - RNA, 21 nt, RNAi
gagcugcuuccaguggauauu

SEQ ID NO: 19449 - RNA, 21 nt, RNAi
uucucgacgaaggucaccuau

SEQ ID NO: 19450 - DNA, 21 bp, homo sapiens
gagctgcttccagtggatagt

SEQ ID NO: 19451 - RNA, 21 nt, RNAi
gcugcuuccaguggauaguuu

SEQ ID NO: 19452 - RNA, 21 nt, RNAi
uucgacgaaggucaccuauca

SEQ ID NO: 19453 - DNA, 21 bp, homo sapiens
gatagttgatgagaatcctga

SEQ ID NO: 19454 - RNA, 21 nt, RNAi
uaguugaugagaauccugauu

SEQ ID NO: 19455 - RNA, 21 nt, RNAi
uuaucaacuacucuuaggacu

SEQ ID NO: 19456 - DNA, 21 bp, homo sapiens
gatgagaatcctgaccaaagg

SEQ ID NO: 19457 - RNA, 21 nt, RNAi
ugagaauccugaccaaagguu

SEQ ID NO: 19458 - RNA, 21 nt, RNAi
uuacucuuaggacugguuucc

SEQ ID NO: 19459 - DNA, 21 bp, homo sapiens
gagaatcctgaccaaaggaag

SEQ ID NO: 19460 - RNA, 21 nt, RNAi
gaauccugaccaaaggaaguu

SEQ ID NO: 19461 - RNA, 21 nt, RNAi
uucuuaggacugguuuccuuc

SEQ ID NO: 19462 - DNA, 21 bp, homo sapiens
gaatcctgaccaaaggaaggc

SEQ ID NO: 19463 - RNA, 21 nt, RNAi
auccugaccaaaggaaggcuu

SEQ ID NO: 19464 - RNA, 21 nt, RNAi
uuuaggacugguuuccuuccg

SEQ ID NO: 19465 - DNA, 21 bp, homo sapiens
gatagacagatggacctatgg

SEQ ID NO: 19466 - RNA, 21 nt, RNAi
uagacagauggaccuaugguu

SEQ ID NO: 19467 - RNA, 21 nt, RNAi
uuaucugucuaccuggauacc

SEQ ID NO: 19468 - DNA, 21 bp, homo sapiens
gaatctcaataaaccagtgaa

SEQ ID NO: 19469 - RNA, 21 nt, RNAi
aucucaauaaaccagugaauu

SEQ ID NO: 19470 - RNA, 21 nt, RNAi
uuuagaguuauuuggucacuu

SEQ ID NO: 19471 - DNA, 21 bp, homo sapiens
tactggcgccactcttcctcc

SEQ ID NO: 19472 - RNA, 21 nt, RNAi
cuggcgccacucuuccuccuu

SEQ ID NO: 19473 - RNA, 21 nt, RNAi
uugaccgcggugagaaggagg

SEQ ID NO: 19474 - DNA, 21 bp, homo sapiens
tatcaacttcctgccagtgga

SEQ ID NO: 19475 - RNA, 21 nt, RNAi
ucaacuuccugccaguggauu

SEQ ID NO: 19476 - RNA, 21 nt, RNAi
uuaguugaaggacggucaccu

SEQ ID NO: 19477 - DNA, 21 bp, homo sapiens
tatgagattgagtatgtgtgc

SEQ ID NO: 19478 - RNA, 21 nt, RNAi
ugagauugaguaugugugcuu

SEQ ID NO: 19479 - RNA, 21 nt, RNAi
uuacucuaacucauacacacg

SEQ ID NO: 19480 - DNA, 21 bp, homo sapiens
tatgagctcaagctcatccac

SEQ ID NO: 19481 - RNA, 21 nt, RNAi
ugagcucaagcucauccacuu

SEQ ID NO: 19482 - RNA, 21 nt, RNAi
uuacucgaguucgaguaggug

SEQ ID NO: 19483 - DNA, 21 bp, homo sapiens
tacctatatgagctgctctac

SEQ ID NO: 19484 - RNA, 21 nt, RNAi
ccuauaugagcugcucuacuu

SEQ ID NO: 19485 - RNA, 21 nt, RNAi
uuggauauacucgacgagaug

SEQ ID NO: 19486 - DNA, 21 bp, homo sapiens
tatatgagctgctctacaacg

SEQ ID NO: 19487 - RNA, 21 nt, RNAi
uaugagcugcucuacaacguu

SEQ ID NO: 19488 - RNA, 21 nt, RNAi
uuauacucgacgagauguugc

SEQ ID NO: 19489 - DNA, 21 bp, homo sapiens
tatgagctgctctacaacgac

SEQ ID NO: 19490 - RNA, 21 nt, RNAi
ugagcugcucuacaacgacuu

SEQ ID NO: 19491 - RNA, 21 nt, RNAi
uuacucgacgagauguugcug

SEQ ID NO: 19492 - DNA, 21 bp, homo sapiens
tatcaagatcatccttatgcc

SEQ ID NO: 19493 - RNA, 21 nt, RNAi
ucaagaucauccuuaugccuu

SEQ ID NO: 19494 - RNA, 21 nt, RNAi
uuaguucuaguaggaauacgg

SEQ ID NO: 19495 - DNA, 21 bp, homo sapiens
tatgcctggctgcagctctgt

SEQ ID NO: 19496 - RNA, 21 nt, RNAi
ugccuggcugcagcucuguuu

SEQ ID NO: 19497 - RNA, 21 nt, RNAi
uuacggaccgacgucgagaca

SEQ ID NO: 19498 - DNA, 21 bp, homo sapiens
taggatgtggaacctcattgt

SEQ ID NO: 19499 - RNA, 21 nt, RNAi
ggauguggaaccucauuguuu

SEQ ID NO: 19500 - RNA, 21 nt, RNAi
uuccuacaccuuggaguaaca

SEQ ID NO: 19501 - DNA, 21 bp, homo sapiens
tatggctccagctcaccagcc

SEQ ID NO: 19502 - RNA, 21 nt, RNAi
uggcuccagcucaccagccuu

SEQ ID NO: 19503 - RNA, 21 nt, RNAi
uuaccgaggucgaguggucgg

SEQ ID NO: 19504 - DNA, 21 bp, homo sapiens
taccatccagcagaccactga

SEQ ID NO: 19505 - RNA, 21 nt, RNAi
ccauccagcagaccacugauu

SEQ ID NO: 19506 - RNA, 21 nt, RNAi
uugguaggucgucuggugacu

SEQ ID NO: 19507 - DNA, 21 bp, homo sapiens
tactttccgccagagtttctt

SEQ ID NO: 19508 - RNA, 21 nt, RNAi
cuuuccgccagaguuucuuuu

SEQ ID NO: 19509 - RNA, 21 nt, RNAi
uugaaaggcggucucaaagaa

SEQ ID NO: 19510 - DNA, 21 bp, homo sapiens
tatgctgacaattggttcaag

SEQ ID NO: 19511 - RNA, 21 nt, RNAi
ugcugacaauugguucaaguu

SEQ ID NO: 19512 - RNA, 21 nt, RNAi
uuacgacuguuaaccaaguuc

SEQ ID NO: 19513 - DNA, 21 bp, homo sapiens
tatcaactgcacagtggatga

SEQ ID NO: 19514 - RNA, 21 nt, RNAi
ucaacugcacaguggaugauu

SEQ ID NO: 19515 - RNA, 21 nt, RNAi
uuaguugacgugucaccuacu

SEQ ID NO: 19516 - DNA, 21 bp, homo sapiens
tacaacaaccagaccattacc

SEQ ID NO: 19517 - RNA, 21 nt, RNAi
caacaaccagaccauuaccuu

SEQ ID NO: 19518 - RNA, 21 nt, RNAi
uuguuguuggucugguaaugg

SEQ ID NO: 19519 - DNA, 21 bp, homo sapiens
tacaagaagattggctactat

SEQ ID NO: 19520 - RNA, 21 nt, RNAi
caagaagauuggcuacuauuu

SEQ ID NO: 19521 - RNA, 21 nt, RNAi
uuguucuucuaaccgaugaua

SEQ ID NO: 19522 - DNA, 21 bp, homo sapiens
tactatgacagcaccaaggat

SEQ ID NO: 19523 - RNA, 21 nt, RNAi
cuaugacagcaccaaggauuu

SEQ ID NO: 19524 - RNA, 21 nt, RNAi
uugauacugucgugguuccua

SEQ ID NO: 19525 - DNA, 21 bp, homo sapiens
tatgacagcaccaaggatgat

SEQ ID NO: 19526 - RNA, 21 nt, RNAi
ugacagcaccaaggaugauuu

SEQ ID NO: 19527 - RNA, 21 nt, RNAi
uuacugucgugguuccuacua

SEQ ID NO: 19528 - DNA, 21 bp, homo sapiens
tatctccgtctcagttctctc

SEQ ID NO: 19529 - RNA, 21 nt, RNAi
ucuccgucucaguucucucuu

SEQ ID NO: 19530 - RNA, 21 nt, RNAi
uuagaggcagagucaagagag

SEQ ID NO: 19531 - DNA, 21 bp, homo sapiens
tagctgttgtctgtctgtcct

SEQ ID NO: 19532 - RNA, 21 nt, RNAi
gcuguugucugucuguccuuu

SEQ ID NO: 19533 - RNA, 21 nt, RNAi
uucgacaacagacagacagga

SEQ ID NO: 19534 - DNA, 21 bp, homo sapiens
taacatctacaactcacatgt

SEQ ID NO: 19535 - RNA, 21 nt, RNAi
acaucuacaacucacauguuu

SEQ ID NO: 19536 - RNA, 21 nt, RNAi
uuuguagauguugaguguaca

SEQ ID NO: 19537 - DNA, 21 bp, homo sapiens
tacaactcacatgtccgttat

SEQ ID NO: 19538 - RNA, 21 nt, RNAi
caacucacauguccguuauuu

SEQ ID NO: 19539 - RNA, 21 nt, RNAi
uuguugaguguacaggcaaua

SEQ ID NO: 19540 - DNA, 21 bp, homo sapiens
tacggttccatgttcaccaag

SEQ ID NO: 19541 - RNA, 21 nt, RNAi
cgguuccauguucaccaaguu

SEQ ID NO: 19542 - RNA, 21 nt, RNAi
uugccaagguacaagugguuc

SEQ ID NO: 19543 - DNA, 21 bp, homo sapiens
taaggaagatattgacgtctc

SEQ ID NO: 19544 - RNA, 21 nt, RNAi
aggaagauauugacgucucuu

SEQ ID NO: 19545 - RNA, 21 nt, RNAi
uuuccuucuauaacugcagag

SEQ ID NO: 19546 - DNA, 21 bp, homo sapiens
tattgacgtctctattctgcc

SEQ ID NO: 19547 - RNA, 21 nt, RNAi
uugacgucucuauucugccuu

SEQ ID NO: 19548 - RNA, 21 nt, RNAi
uuaacugcagagauaagacgg

SEQ ID NO: 19549 - DNA, 21 bp, homo sapiens
tatgagaccaagagtgtgtcc

SEQ ID NO: 19550 - RNA, 21 nt, RNAi
ugagaccaagaguguguccuu

SEQ ID NO: 19551 - RNA, 21 nt, RNAi
uuacucugguucucacacagg

SEQ ID NO: 19552 - DNA, 21 bp, homo sapiens
tatctacaatgtggcagtcct

SEQ ID NO: 19553 - RNA, 21 nt, RNAi
ucuacaauguggcaguccuuu

SEQ ID NO: 19554 - RNA, 21 nt, RNAi
uuagauguuacaccgucagga

SEQ ID NO: 19555 - DNA, 21 bp, homo sapiens
tacaatgtggcagtcctgtgc

SEQ ID NO: 19556 - RNA, 21 nt, RNAi
caauguggcaguccugugcuu

SEQ ID NO: 19557 - RNA, 21 nt, RNAi
uuguuacaccgucaggacacg

SEQ ID NO: 19558 - DNA, 21 bp, homo sapiens
tatatcactcttgttgtgctc

SEQ ID NO: 19559 - RNA, 21 nt, RNAi
uaucacucuuguugugcucuu

SEQ ID NO: 19560 - RNA, 21 nt, RNAi
uuauagugagaacaacacgag

SEQ ID NO: 19561 - DNA, 21 bp, homo sapiens
tatcactcttgttgtgctctt

SEQ ID NO: 19562 - RNA, 21 nt, RNAi
ucacucuuguugugcucuuuu

SEQ ID NO: 19563 - RNA, 21 nt, RNAi
uuagugagaacaacacgagaa

SEQ ID NO: 19564 - DNA, 21 bp, homo sapiens
tatccaatctcatctcttgta

SEQ ID NO: 19565 - RNA, 21 nt, RNAi
uccaaucucaucucuuguauu

SEQ ID NO: 19566 - RNA, 21 nt, RNAi
uuagguuagaguagagaacau

SEQ ID NO: 19567 - DNA, 21 bp, homo sapiens
tatcacctcttcacaatttag

SEQ ID NO: 19568 - RNA, 21 nt, RNAi
ucaccucuucacaauuuaguu

SEQ ID NO: 19569 - RNA, 21 nt, RNAi
uuaguggagaaguguuaaauc

SEQ ID NO: 19570 - DNA, 21 bp, homo sapiens
tagttcgtacctggcttgaag

SEQ ID NO: 19571 - RNA, 21 nt, RNAi
guucguaccuggcuugaaguu

SEQ ID NO: 19572 - RNA, 21 nt, RNAi
uucaagcauggaccgaacuuc

SEQ ID NO: 19573 - DNA, 21 bp, homo sapiens
tacctggcttgaagctgctca

SEQ ID NO: 19574 - RNA, 21 nt, RNAi
ccuggcuugaagcugcucauu

SEQ ID NO: 19575 - RNA, 21 nt, RNAi
uuggaccgaacuucgacgagu

SEQ ID NO: 19576 - DNA, 21 bp, homo sapiens
tatactttctcacatgtggct

SEQ ID NO: 19577 - RNA, 21 nt, RNAi
uacuuucucacauguggcuuu

SEQ ID NO: 19578 - RNA, 21 nt, RNAi
uuaugaaagaguguacaccga

SEQ ID NO: 19579 - DNA, 21 bp, homo sapiens
tactttctcacatgtggctcc

SEQ ID NO: 19580 - RNA, 21 nt, RNAi
cuuucucacauguggcuccuu

SEQ ID NO: 19581 - RNA, 21 nt, RNAi
uugaaagaguguacaccgagg

SEQ ID NO: 19582 - DNA, 21 bp, homo sapiens
tatgctttcttcatgttcagt

SEQ ID NO: 19583 - RNA, 21 nt, RNAi
ugcuuucuucauguucaguuu

SEQ ID NO: 19584 - RNA, 21 nt, RNAi
uuacgaaagaaguacaaguca

SEQ ID NO: 19585 - DNA, 21 bp, homo sapiens
taggcatgtgcaatttgtcta

SEQ ID NO: 19586 - RNA, 21 nt, RNAi
ggcaugugcaauuugucuauu

SEQ ID NO: 19587 - RNA, 21 nt, RNAi
uuccguacacguuaaacagau

SEQ ID NO: 19588 - DNA, 21 bp, homo sapiens
tagcatgctgagtcatgtctt

SEQ ID NO: 19589 - RNA, 21 nt, RNAi
gcaugcugagucaugucuuuu

SEQ ID NO: 19590 - RNA, 21 nt, RNAi
uucguacgacucaguacagaa

SEQ ID NO: 19591 - DNA, 21 bp, homo sapiens
tatttgcacacgtccatgttt

SEQ ID NO: 19592 - RNA, 21 nt, RNAi
uuugcacacguccauguuuuu

SEQ ID NO: 19593 - RNA, 21 nt, RNAi
uuaaacgugugcagguacaaa

SEQ ID NO: 19594 - DNA, 21 bp, homo sapiens
tattcttctgacagagccata

SEQ ID NO: 19595 - RNA, 21 nt, RNAi
uucuucugacagagccauauu

SEQ ID NO: 19596 - RNA, 21 nt, RNAi
uuaagaagacugucucgguau

SEQ ID NO: 19597 - DNA, 21 bp, homo sapiens
tacactcacaatcatcttctc

SEQ ID NO: 19598 - RNA, 21 nt, RNAi
cacucacaaucaucuucucuu

SEQ ID NO: 19599 - RNA, 21 nt, RNAi
uugugaguguuaguagaagag

SEQ ID NO: 19600 - DNA, 21 bp, homo sapiens
tagttgatgagaatcctgacc

SEQ ID NO: 19601 - RNA, 21 nt, RNAi
guugaugagaauccugaccuu

SEQ ID NO: 19602 - RNA, 21 nt, RNAi
uucaacuacucuuaggacugg

SEQ ID NO: 19603 - DNA, 21 bp, homo sapiens
taaaccagtgaacagtgtgac

SEQ ID NO: 19604 - RNA, 21 nt, RNAi
aaccagugaacagugugacuu

SEQ ID NO: 19605 - RNA, 21 nt, RNAi
uuuuggucacuugucacacug

SEQ ID NO: 19606 - DNA, 21 bp, homo sapiens
aaggttgccagatcatacacc

SEQ ID NO: 19607 - RNA, 21 nt, RNAi
gguugccagaucauacaccuu

SEQ ID NO: 19608 - RNA, 21 nt, RNAi
uuccaacggucuaguaugugg

SEQ ID NO: 19609 - DNA, 21 bp, homo sapiens
aaggctatcaacttcctgcca

SEQ ID NO: 19610 - RNA, 21 nt, RNAi
ggcuaucaacuuccugccauu

SEQ ID NO: 19611 - RNA, 21 nt, RNAi
uuccgauaguugaaggacggu

SEQ ID NO: 19612 - DNA, 21 bp, homo sapiens
aatcgaacgccacactcagaa

SEQ ID NO: 19613 - RNA, 21 nt, RNAi
ucgaacgccacacucagaauu

SEQ ID NO: 19614 - RNA, 21 nt, RNAi
uuagcuugcggugugagucuu

SEQ ID NO: 19615 - DNA, 21 bp, homo sapiens
aagtacctatatgagctgctc

SEQ ID NO: 19616 - RNA, 21 nt, RNAi
guaccuauaugagcugcucuu

SEQ ID NO: 19617 - RNA, 21 nt, RNAi
uucauggauauacucgacgag

SEQ ID NO: 19618 - DNA, 21 bp, homo sapiens
aagaagattgctaccatccag

SEQ ID NO: 19619 - RNA, 21 nt, RNAi
gaagauugcuaccauccaguu

SEQ ID NO: 19620 - RNA, 21 nt, RNAi
uucuucuaacgaugguagguc

SEQ ID NO: 19621 - DNA, 21 bp, homo sapiens
aattgagattactttccgcca

SEQ ID NO: 19622 - RNA, 21 nt, RNAi
uugagauuacuuuccgccauu

SEQ ID NO: 19623 - RNA, 21 nt, RNAi
uuaacucuaaugaaaggcggu

SEQ ID NO: 19624 - DNA, 21 bp, homo sapiens
aagaagtacgtctggttcctc

SEQ ID NO: 19625 - RNA, 21 nt, RNAi
gaaguacgucugguuccucuu

SEQ ID NO: 19626 - RNA, 21 nt, RNAi
uucuucaugcagaccaaggag

SEQ ID NO: 19627 - DNA, 21 bp, homo sapiens
aattggttcaagatctacgac

SEQ ID NO: 19628 - RNA, 21 nt, RNAi
uugguucaagaucuacgacuu

SEQ ID NO: 19629 - RNA, 21 nt, RNAi
uuaaccaaguucuagaugcug

SEQ ID NO: 19630 - DNA, 21 bp, homo sapiens
aaactaaccaagcgactgaaa

SEQ ID NO: 19631 - RNA, 21 nt, RNAi
acuaaccaagcgacugaaauu

SEQ ID NO: 19632 - RNA, 21 nt, RNAi
uuugauugguucgcugacuuu

SEQ ID NO: 19633 - DNA, 21 bp, homo sapiens
aacaaccagaccattaccgac

SEQ ID NO: 19634 - RNA, 21 nt, RNAi
caaccagaccauuaccgacuu

SEQ ID NO: 19635 - RNA, 21 nt, RNAi
uuguuggucugguaauggcug

SEQ ID NO: 19636 - DNA, 21 bp, homo sapiens
aaccagaccattaccgaccaa

SEQ ID NO: 19637 - RNA, 21 nt, RNAi
ccagaccauuaccgaccaauu

SEQ ID NO: 19638 - RNA, 21 nt, RNAi
uuggucugguaauggcugguu

SEQ ID NO: 19639 - DNA, 21 bp, homo sapiens
aagattggctactatgacagc

SEQ ID NO: 19640 - RNA, 21 nt, RNAi
gauuggcuacuaugacagcuu

SEQ ID NO: 19641 - RNA, 21 nt, RNAi
uucuaaccgaugauacugucg

SEQ ID NO: 19642 - DNA, 21 bp, homo sapiens
aaactctttatctccgtctca

SEQ ID NO: 19643 - RNA, 21 nt, RNAi
acucuuuaucuccgucucauu

SEQ ID NO: 19644 - RNA, 21 nt, RNAi
uuugagaaauagaggcagagu

SEQ ID NO: 19645 - DNA, 21 bp, homo sapiens
aactctttatctccgtctcag

SEQ ID NO: 19646 - RNA, 21 nt, RNAi
cucuuuaucuccgucucaguu

SEQ ID NO: 19647 - RNA, 21 nt, RNAi
uugagaaauagaggcagaguc

SEQ ID NO: 19648 - DNA, 21 bp, homo sapiens
aactcacatgtccgttatatc

SEQ ID NO: 19649 - RNA, 21 nt, RNAi
cucacauguccguuauaucuu

SEQ ID NO: 19650 - RNA, 21 nt, RNAi
uugaguguacaggcaauauag

SEQ ID NO: 19651 - DNA, 21 bp, homo sapiens
aaggaagatattgacgtctct

SEQ ID NO: 19652 - RNA, 21 nt, RNAi
ggaagauauugacgucucuuu

SEQ ID NO: 19653 - RNA, 21 nt, RNAi
uuccuucuauaacugcagaga

SEQ ID NO: 19654 - DNA, 21 bp, homo sapiens
aagatattgacgtctctattc

SEQ ID NO: 19655 - RNA, 21 nt, RNAi
gauauugacgucucuauucuu

SEQ ID NO: 19656 - RNA, 21 nt, RNAi
uucuauaacugcagagauaag

SEQ ID NO: 19657 - DNA, 21 bp, homo sapiens
aagatgaatacatggcttggc

SEQ ID NO: 19658 - RNA, 21 nt, RNAi
gaugaauacauggcuuggcuu

SEQ ID NO: 19659 - RNA, 21 nt, RNAi
uucuacuuauguaccgaaccg

SEQ ID NO: 19660 - DNA, 21 bp, homo sapiens
cagaaggttgccagatcatac

SEQ ID NO: 19661 - RNA, 21 nt, RNAi
gaagguugccagaucauacuu

SEQ ID NO: 19662 - RNA, 21 nt, RNAi
uucuuccaacggucuaguaug

SEQ ID NO: 19663 - DNA, 21 bp, homo sapiens
caccacgacagcaagtgtgat

SEQ ID NO: 19664 - RNA, 21 nt, RNAi
ccacgacagcaagugugauuu

SEQ ID NO: 19665 - RNA, 21 nt, RNAi
uuggugcugucguucacacua

SEQ ID NO: 19666 - DNA, 21 bp, homo sapiens
cacgacagcaagtgtgatcca

SEQ ID NO: 19667 - RNA, 21 nt, RNAi
cgacagcaagugugauccauu

SEQ ID NO: 19668 - RNA, 21 nt, RNAi
uugcugucguucacacuaggu

SEQ ID NO: 19669 - DNA, 21 bp, homo sapiens
caagtacctatatgagctgct

SEQ ID NO: 19670 - RNA, 21 nt, RNAi
aguaccuauaugagcugcuuu

SEQ ID NO: 19671 - RNA, 21 nt, RNAi
uuucauggauauacucgacga

SEQ ID NO: 19672 - DNA, 21 bp, homo sapiens
caattggttcaagatctacga

SEQ ID NO: 19673 - RNA, 21 nt, RNAi
auugguucaagaucuacgauu

SEQ ID NO: 19674 - RNA, 21 nt, RNAi
uuuaaccaaguucuagaugcu

SEQ ID NO: 19675 - DNA, 21 bp, homo sapiens
caaccagaccattaccgacca

SEQ ID NO: 19676 - RNA, 21 nt, RNAi
accagaccauuaccgaccauu

SEQ ID NO: 19677 - RNA, 21 nt, RNAi
uuuggucugguaauggcuggu

SEQ ID NO: 19678 - DNA, 21 bp, homo sapiens
cagaccattaccgaccaaatc

SEQ ID NO: 19679 - RNA, 21 nt, RNAi
gaccauuaccgaccaaaucuu

SEQ ID NO: 19680 - RNA, 21 nt, RNAi
uucugguaauggcugguuuag

SEQ ID NO: 19681 - DNA, 21 bp, homo sapiens
cattaccgaccaaatctaccg

SEQ ID NO: 19682 - RNA, 21 nt, RNAi
uuaccgaccaaaucuaccguu

SEQ ID NO: 19683 - RNA, 21 nt, RNAi
uuaauggcugguuuagauggc

SEQ ID NO: 19684 - DNA, 21 bp, homo sapiens
cagctacaagaagattggcta

SEQ ID NO: 19685 - RNA, 21 nt, RNAi
gcuacaagaagauuggcuauu

SEQ ID NO: 19686 - RNA, 21 nt, RNAi
uucgauguucuucuaaccgau

SEQ ID NO: 19687 - DNA, 21 bp, homo sapiens
cagcaccaaggatgatctttc

SEQ ID NO: 19688 - RNA, 21 nt, RNAi
gcaccaaggaugaucuuucuu

SEQ ID NO: 19689 - RNA, 21 nt, RNAi
uucgugguuccuacuagaaag

SEQ ID NO: 19690 - DNA, 21 bp, homo sapiens
catcaagacattccgcttcct

SEQ ID NO: 19691 - RNA, 21 nt, RNAi
ucaagacauuccgcuuccuuu

SEQ ID NO: 19692 - RNA, 21 nt, RNAi
uuaguucuguaaggcgaagga

SEQ ID NO: 19693 - DNA, 21 bp, homo sapiens
cattgtcctagctgttgtctg

SEQ ID NO: 19694 - RNA, 21 nt, RNAi
uuguccuagcuguugucuguu

SEQ ID NO: 19695 - RNA, 21 nt, RNAi
uuaacaggaucgacaacagac

SEQ ID NO: 19696 - DNA, 21 bp, homo sapiens
caactcacatgtccgttatat

SEQ ID NO: 19697 - RNA, 21 nt, RNAi
acucacauguccguuauauuu

SEQ ID NO: 19698 - RNA, 21 nt, RNAi
uuugaguguacaggcaauaua

SEQ ID NO: 19699 - DNA, 21 bp, homo sapiens
cacatgtccgttatatccaga

SEQ ID NO: 19700 - RNA, 21 nt, RNAi
cauguccguuauauccagauu

SEQ ID NO: 19701 - RNA, 21 nt, RNAi
uuguacaggcaauauaggucu

SEQ ID NO: 19702 - DNA, 21 bp, homo sapiens
catgtccgttatatccagaac

SEQ ID NO: 19703 - RNA, 21 nt, RNAi
uguccguuauauccagaacuu

SEQ ID NO: 19704 - RNA, 21 nt, RNAi
uuacaggcaauauaggucuug

SEQ ID NO: 19705 - DNA, 21 bp, homo sapiens
cattgagacatttgccaagga

SEQ ID NO: 19706 - RNA, 21 nt, RNAi
uugagacauuugccaaggauu

SEQ ID NO: 19707 - RNA, 21 nt, RNAi
uuaacucuguaaacgguuccu

SEQ ID NO: 19708 - DNA, 21 bp, homo sapiens
catggctatctacaatgtggc

SEQ ID NO: 19709 - RNA, 21 nt, RNAi
uggcuaucuacaauguggcuu

SEQ ID NO: 19710 - RNA, 21 nt, RNAi
uuaccgauagauguuacaccg

SEQ ID NO: 19711 - DNA, 21 bp, homo sapiens
gaaggttgccagatcatacac

SEQ ID NO: 19712 - RNA, 21 nt, RNAi
agguugccagaucauacacuu

SEQ ID NO: 19713 - RNA, 21 nt, RNAi
uuuccaacggucuaguaugug

SEQ ID NO: 19714 - DNA, 21 bp, homo sapiens
gaaggctatcaacttcctgcc

SEQ ID NO: 19715 - RNA, 21 nt, RNAi
aggcuaucaacuuccugccuu

SEQ ID NO: 19716 - RNA, 21 nt, RNAi
uuuccgauaguugaaggacgg

SEQ ID NO: 19717 - DNA, 21 bp, homo sapiens
gaatcgaacgccacactcaga

SEQ ID NO: 19718 - RNA, 21 nt, RNAi
aucgaacgccacacucagauu

SEQ ID NO: 19719 - RNA, 21 nt, RNAi
uuuagcuugcggugugagucu

SEQ ID NO: 19720 - DNA, 21 bp, homo sapiens
gaagaagattgctaccatcca

SEQ ID NO: 19721 - RNA, 21 nt, RNAi
agaagauugcuaccauccauu

SEQ ID NO: 19722 - RNA, 21 nt, RNAi
uuucuucuaacgaugguaggu

SEQ ID NO: 19723 - DNA, 21 bp, homo sapiens
gaattgagattactttccgcc

SEQ ID NO: 19724 - RNA, 21 nt, RNAi
auugagauuacuuuccgccuu

SEQ ID NO: 19725 - RNA, 21 nt, RNAi
uuuaacucuaaugaaaggcgg

SEQ ID NO: 19726 - DNA, 21 bp, homo sapiens
gattactttccgccagagttt

SEQ ID NO: 19727 - RNA, 21 nt, RNAi
uuacuuuccgccagaguuuuu

SEQ ID NO: 19728 - RNA, 21 nt, RNAi
uuaaugaaaggcggucucaaa

SEQ ID NO: 19729 - DNA, 21 bp, homo sapiens
gaagaagtacgtctggttcct

SEQ ID NO: 19730 - RNA, 21 nt, RNAi
agaaguacgucugguuccuuu

SEQ ID NO: 19731 - RNA, 21 nt, RNAi
uuucuucaugcagaccaagga

SEQ ID NO: 19732 - DNA, 21 bp, homo sapiens
gaagtacgtctggttcctcat

SEQ ID NO: 19733 - RNA, 21 nt, RNAi
aguacgucugguuccucauuu

SEQ ID NO: 19734 - RNA, 21 nt, RNAi
uuucaugcagaccaaggagua

SEQ ID NO: 19735 - DNA, 21 bp, homo sapiens
gacaattggttcaagatctac

SEQ ID NO: 19736 - RNA, 21 nt, RNAi
caauugguucaagaucuacuu

SEQ ID NO: 19737 - RNA, 21 nt, RNAi
uuguuaaccaaguucuagaug

SEQ ID NO: 19738 - DNA, 21 bp, homo sapiens
gagaaactaaccaagcgactg

SEQ ID NO: 19739 - RNA, 21 nt, RNAi
gaaacuaaccaagcgacuguu

SEQ ID NO: 19740 - RNA, 21 nt, RNAi
uucuuugauugguucgcugac

SEQ ID NO: 19741 - DNA, 21 bp, homo sapiens
gaaactaaccaagcgactgaa

SEQ ID NO: 19742 - RNA, 21 nt, RNAi
aacuaaccaagcgacugaauu

SEQ ID NO: 19743 - RNA, 21 nt, RNAi
uuuugauugguucgcugacuu

SEQ ID NO: 19744 - DNA, 21 bp, homo sapiens
gaccattaccgaccaaatcta

SEQ ID NO: 19745 - RNA, 21 nt, RNAi
ccauuaccgaccaaaucuauu

SEQ ID NO: 19746 - RNA, 21 nt, RNAi
uugguaauggcugguuuagau

SEQ ID NO: 19747 - DNA, 21 bp, homo sapiens
gatggcatggacgcttatcga

SEQ ID NO: 19748 - RNA, 21 nt, RNAi
uggcauggacgcuuaucgauu

SEQ ID NO: 19749 - RNA, 21 nt, RNAi
uuaccguaccugcgaauagcu

SEQ ID NO: 19750 - DNA, 21 bp, homo sapiens
gacgcttatcgagcagcttca

SEQ ID NO: 19751 - RNA, 21 nt, RNAi
cgcuuaucgagcagcuucauu

SEQ ID NO: 19752 - RNA, 21 nt, RNAi
uugcgaauagcucgucgaagu

SEQ ID NO: 19753 - DNA, 21 bp, homo sapiens
gaagattggctactatgacag

SEQ ID NO: 19754 - RNA, 21 nt, RNAi
agauuggcuacuaugacaguu

SEQ ID NO: 19755 - RNA, 21 nt, RNAi
uuucuaaccgaugauacuguc

SEQ ID NO: 19756 - DNA, 21 bp, homo sapiens
gaaactctttatctccgtctc

SEQ ID NO: 19757 - RNA, 21 nt, RNAi
aacucuuuaucuccgucucuu

SEQ ID NO: 19758 - RNA, 21 nt, RNAi
uuuugagaaauagaggcagag

SEQ ID NO: 19759 - DNA, 21 bp, homo sapiens
gaaccagtttcctttcgtctg

SEQ ID NO: 19760 - RNA, 21 nt, RNAi
accaguuuccuuucgucuguu

SEQ ID NO: 19761 - RNA, 21 nt, RNAi
uuuggucaaaggaaagcagac

SEQ ID NO: 19762 - DNA, 21 bp, homo sapiens
gatattgacgtctctattctg

SEQ ID NO: 19763 - RNA, 21 nt, RNAi
uauugacgucucuauucuguu

SEQ ID NO: 19764 - RNA, 21 nt, RNAi
uuauaacugcagagauaagac

SEQ ID NO: 19765 - DNA, 21 bp, homo sapiens
gaagatgaatacatggcttgg

SEQ ID NO: 19766 - RNA, 21 nt, RNAi
agaugaauacauggcuugguu

SEQ ID NO: 19767 - RNA, 21 nt, RNAi
uuucuacuuauguaccgaacc

SEQ ID NO: 19768 - DNA, 21 bp, homo sapiens
gagaaagaggagcgtgtctct

SEQ ID NO: 19769 - RNA, 21 nt, RNAi
gaaagaggagcgugucucuuu

SEQ ID NO: 19770 - RNA, 21 nt, RNAi
uucuuucuccucgcacagaga

SEQ ID NO: 19771 - DNA, 21 bp, homo sapiens
tacctatatgagctgctctac

SEQ ID NO: 19772 - RNA, 21 nt, RNAi
ccuauaugagcugcucuacuu

SEQ ID NO: 19773 - RNA, 21 nt, RNAi
uuggauauacucgacgagaug

SEQ ID NO: 19774 - DNA, 21 bp, homo sapiens
taggatgtggaacctcattgt

SEQ ID NO: 19775 - RNA, 21 nt, RNAi
ggauguggaaccucauuguuu

SEQ ID NO: 19776 - RNA, 21 nt, RNAi
uuccuacaccuuggaguaaca

SEQ ID NO: 19777 - DNA, 21 bp, homo sapiens
tactttccgccagagtttctt

SEQ ID NO: 19778 - RNA, 21 nt, RNAi
cuuuccgccagaguuucuuuu

SEQ ID NO: 19779 - RNA, 21 nt, RNAi
uugaaaggcggucucaaagaa

SEQ ID NO: 19780 - DNA, 21 bp, homo sapiens
tatgctgacaattggttcaag

SEQ ID NO: 19781 - RNA, 21 nt, RNAi
ugcugacaauugguucaaguu

SEQ ID NO: 19782 - RNA, 21 nt, RNAi
uuacgacuguuaaccaaguuc

SEQ ID NO: 19783 - DNA, 21 bp, homo sapiens
taacatctacaactcacatgt

SEQ ID NO: 19784 - RNA, 21 nt, RNAi
acaucuacaacucacauguuu

SEQ ID NO: 19785 - RNA, 21 nt, RNAi
uuuguagauguugaguguaca

SEQ ID NO: 19786 - DNA, 21 bp, homo sapiens
tacaactcacatgtccgttat

SEQ ID NO: 19787 - RNA, 21 nt, RNAi
caacucacauguccguuauuu

SEQ ID NO: 19788 - RNA, 21 nt, RNAi
uuguugaguguacaggcaaua

SEQ ID NO: 19789 - DNA, 21 bp, homo sapiens
taaggaagatattgacgtctc

SEQ ID NO: 19790 - RNA, 21 nt, RNAi
aggaagauauugacgucucuu

SEQ ID NO: 19791 - RNA, 21 nt, RNAi
uuuccuucuauaacugcagag

SEQ ID NO: 19792 - DNA, 21 bp, homo sapiens
tattgacgtctctattctgcc

SEQ ID NO: 19793 - RNA, 21 nt, RNAi
uugacgucucuauucugccuu

SEQ ID NO: 19794 - RNA, 21 nt, RNAi
uuaacugcagagauaagacgg

SEQ ID NO: 19795 - DNA, 21 bp, homo sapiens
tatatcactcttgttgtgctc

SEQ ID NO: 19796 - RNA, 21 nt, RNAi
uaucacucuuguugugcucuu

SEQ ID NO: 19797 - RNA, 21 nt, RNAi
uuauagugagaacaacacgag

SEQ ID NO: 19798 - DNA, 21 bp, homo sapiens
tatcactcttgttgtgctctt

SEQ ID NO: 19799 - RNA, 21 nt, RNAi
ucacucuuguugugcucuuuu

SEQ ID NO: 19800 - RNA, 21 nt, RNAi
uuagugagaacaacacgagaa

SEQ ID NO: 19801 - DNA, 21 bp, homo sapiens
aaagcctaggagcttggcagg

SEQ ID NO: 19802 - RNA, 21 nt, RNAi
agccuaggagcuuggcagguu

SEQ ID NO: 19803 - RNA, 21 nt, RNAi
uuucggauccucgaaccgucc

SEQ ID NO: 19804 - DNA, 21 bp, homo sapiens
aagttgctgaggtgcctgatg

SEQ ID NO: 19805 - RNA, 21 nt, RNAi
guugcugaggugccugauguu

SEQ ID NO: 19806 - RNA, 21 nt, RNAi
uucaacgacuccacggacuac

SEQ ID NO: 19807 - DNA, 21 bp, homo sapiens
aaacctggcaaggatccaatt

SEQ ID NO: 19808 - RNA, 21 nt, RNAi
accuggcaaggauccaauuuu

SEQ ID NO: 19809 - RNA, 21 nt, RNAi
uuuggaccguuccuagguuaa

SEQ ID NO: 19810 - DNA, 21 bp, homo sapiens
aacctggcaaggatccaattt

SEQ ID NO: 19811 - RNA, 21 nt, RNAi
ccuggcaaggauccaauuuuu

SEQ ID NO: 19812 - RNA, 21 nt, RNAi
uuggaccguuccuagguuaaa

SEQ ID NO: 19813 - DNA, 21 bp, homo sapiens
aaaccacggtggcagcaggct

SEQ ID NO: 19814 - RNA, 21 nt, RNAi
accacgguggcagcaggcuuu

SEQ ID NO: 19815 - RNA, 21 nt, RNAi
uuuggugccaccgucguccga

SEQ ID NO: 19816 - DNA, 21 bp, homo sapiens
aaccacggtggcagcaggctt

SEQ ID NO: 19817 - RNA, 21 nt, RNAi
ccacgguggcagcaggcuuuu

SEQ ID NO: 19818 - RNA, 21 nt, RNAi
uuggugccaccgucguccgaa

SEQ ID NO: 19819 - DNA, 21 bp, homo sapiens
aagtcaccgtgtttcatgcta

SEQ ID NO: 19820 - RNA, 21 nt, RNAi
gucaccguguuucaugcuauu

SEQ ID NO: 19821 - RNA, 21 nt, RNAi
uucaguggcacaaaguacgau

SEQ ID NO: 19822 - DNA, 21 bp, homo sapiens
aaaggaaggcgatctggtgct

SEQ ID NO: 19823 - RNA, 21 nt, RNAi
aggaaggcgaucuggugcuuu

SEQ ID NO: 19824 - RNA, 21 nt, RNAi
uuuccuuccgcuagaccacga

SEQ ID NO: 19825 - DNA, 21 bp, homo sapiens
aaggaaggcgatctggtgctt

SEQ ID NO: 19826 - RNA, 21 nt, RNAi
ggaaggcgaucuggugcuuuu

SEQ ID NO: 19827 - RNA, 21 nt, RNAi
uuccuuccgcuagaccacgaa

SEQ ID NO: 19828 - DNA, 21 bp, homo sapiens
aattccataaactccagactt

SEQ ID NO: 19829 - RNA, 21 nt, RNAi
uuccauaaacuccagacuuuu

SEQ ID NO: 19830 - RNA, 21 nt, RNAi
uuaagguauuugaggucugaa

SEQ ID NO: 19831 - DNA, 21 bp, homo sapiens
aaactccagacttcgtgtctt

SEQ ID NO: 19832 - RNA, 21 nt, RNAi
acuccagacuucgugucuuuu

SEQ ID NO: 19833 - RNA, 21 nt, RNAi
uuugaggucugaagcacagaa

SEQ ID NO: 19834 - DNA, 21 bp, homo sapiens
aactccagacttcgtgtcttt

SEQ ID NO: 19835 - RNA, 21 nt, RNAi
cuccagacuucgugucuuuuu

SEQ ID NO: 19836 - RNA, 21 nt, RNAi
uugaggucugaagcacagaaa

SEQ ID NO: 19837 - DNA, 21 bp, homo sapiens
aactgaggatgaactgtgttt

SEQ ID NO: 19838 - RNA, 21 nt, RNAi
cugaggaugaacuguguuuuu

SEQ ID NO: 19839 - RNA, 21 nt, RNAi
uugacuccuacuugacacaaa

SEQ ID NO: 19840 - DNA, 21 bp, homo sapiens
caaagcctaggagcttggcag

SEQ ID NO: 19841 - RNA, 21 nt, RNAi
aagccuaggagcuuggcaguu

SEQ ID NO: 19842 - RNA, 21 nt, RNAi
uuuucggauccucgaaccguc

SEQ ID NO: 19843 - DNA, 21 bp, homo sapiens
cacacaggatggtccttgtag

SEQ ID NO: 19844 - RNA, 21 nt, RNAi
cacaggaugguccuuguaguu

SEQ ID NO: 19845 - RNA, 21 nt, RNAi
uuguguccuaccaggaacauc

SEQ ID NO: 19846 - DNA, 21 bp, homo sapiens
cacaggatggtccttgtagga

SEQ ID NO: 19847 - RNA, 21 nt, RNAi
caggaugguccuuguaggauu

SEQ ID NO: 19848 - RNA, 21 nt, RNAi
uuguccuaccaggaacauccu

SEQ ID NO: 19849 - DNA, 21 bp, homo sapiens
caggatggtccttgtaggaga

SEQ ID NO: 19850 - RNA, 21 nt, RNAi
ggaugguccuuguaggagauu

SEQ ID NO: 19851 - RNA, 21 nt, RNAi
uuccuaccaggaacauccucu

SEQ ID NO: 19852 - DNA, 21 bp, homo sapiens
caggtttgacaagttgctgag

SEQ ID NO: 19853 - RNA, 21 nt, RNAi
gguuugacaaguugcugaguu

SEQ ID NO: 19854 - RNA, 21 nt, RNAi
uuccaaacuguucaacgacuc

SEQ ID NO: 19855 - DNA, 21 bp, homo sapiens
caagttgctgaggtgcctgat

SEQ ID NO: 19856 - RNA, 21 nt, RNAi
aguugcugaggugccugauuu

SEQ ID NO: 19857 - RNA, 21 nt, RNAi
uuucaacgacuccacggacua

SEQ ID NO: 19858 - DNA, 21 bp, homo sapiens
caggcacttgtcatgaaatga

SEQ ID NO: 19859 - RNA, 21 nt, RNAi
ggcacuugucaugaaaugauu

SEQ ID NO: 19860 - RNA, 21 nt, RNAi
uuccgugaacaguacuuuacu

SEQ ID NO: 19861 - DNA, 21 bp, homo sapiens
cacttgtcatgaaatgagttt

SEQ ID NO: 19862 - RNA, 21 nt, RNAi
cuugucaugaaaugaguuuuu

SEQ ID NO: 19863 - RNA, 21 nt, RNAi
uugaacaguacuuuacucaaa

SEQ ID NO: 19864 - DNA, 21 bp, homo sapiens
catgaaatgagtttgcatcct

SEQ ID NO: 19865 - RNA, 21 nt, RNAi
ugaaaugaguuugcauccuuu

SEQ ID NO: 19866 - RNA, 21 nt, RNAi
uuacuuuacucaaacguagga

SEQ ID NO: 19867 - DNA, 21 bp, homo sapiens
cactggaaacctggcaaggat

SEQ ID NO: 19868 - RNA, 21 nt, RNAi
cuggaaaccuggcaaggauuu

SEQ ID NO: 19869 - RNA, 21 nt, RNAi
uugaccuuuggaccguuccua

SEQ ID NO: 19870 - DNA, 21 bp, homo sapiens
cacaggagcatagcagatagg

SEQ ID NO: 19871 - RNA, 21 nt, RNAi
caggagcauagcagauagguu

SEQ ID NO: 19872 - RNA, 21 nt, RNAi
uuguccucguaucgucuaucc

SEQ ID NO: 19873 - DNA, 21 bp, homo sapiens
caggtggctcttcctgcttgg

SEQ ID NO: 19874 - RNA, 21 nt, RNAi
gguggcucuuccugcuugguu

SEQ ID NO: 19875 - RNA, 21 nt, RNAi
uuccaccgagaaggacgaacc

SEQ ID NO: 19876 - DNA, 21 bp, homo sapiens
cactttccagaccattccagg

SEQ ID NO: 19877 - RNA, 21 nt, RNAi
cuuuccagaccauuccagguu

SEQ ID NO: 19878 - RNA, 21 nt, RNAi
uugaaaggucugguaaggucc

SEQ ID NO: 19879 - DNA, 21 bp, homo sapiens
caggaccgtggccagttcttg

SEQ ID NO: 19880 - RNA, 21 nt, RNAi
ggaccguggccaguucuuguu

SEQ ID NO: 19881 - RNA, 21 nt, RNAi
uuccuggcaccggucaagaac

SEQ ID NO: 19882 - DNA, 21 bp, homo sapiens
cagttcttggtattgctcaag

SEQ ID NO: 19883 - RNA, 21 nt, RNAi
guucuugguauugcucaaguu

SEQ ID NO: 19884 - RNA, 21 nt, RNAi
uucaagaaccauaacgaguuc

SEQ ID NO: 19885 - DNA, 21 bp, homo sapiens
cactatcgatgtcttgctcag

SEQ ID NO: 19886 - RNA, 21 nt, RNAi
cuaucgaugucuugcucaguu

SEQ ID NO: 19887 - RNA, 21 nt, RNAi
uugauagcuacagaacgaguc

SEQ ID NO: 19888 - DNA, 21 bp, homo sapiens
catgccttgattctgccttcc

SEQ ID NO: 19889 - RNA, 21 nt, RNAi
ugccuugauucugccuuccuu

SEQ ID NO: 19890 - RNA, 21 nt, RNAi
uuacggaacuaagacggaagg

SEQ ID NO: 19891 - DNA, 21 bp, homo sapiens
cagcaggcttggatgtcacca

SEQ ID NO: 19892 - RNA, 21 nt, RNAi
gcaggcuuggaugucaccauu

SEQ ID NO: 19893 - RNA, 21 nt, RNAi
uucguccgaaccuacaguggu

SEQ ID NO: 19894 - DNA, 21 bp, homo sapiens
caggcttggatgtcaccaagt

SEQ ID NO: 19895 - RNA, 21 nt, RNAi
ggcuuggaugucaccaaguuu

SEQ ID NO: 19896 - RNA, 21 nt, RNAi
uuccgaaccuacagugguuca

SEQ ID NO: 19897 - DNA, 21 bp, homo sapiens
caccaagtcaccgtgtttcat

SEQ ID NO: 19898 - RNA, 21 nt, RNAi
ccaagucaccguguuucauuu

SEQ ID NO: 19899 - RNA, 21 nt, RNAi
uugguucaguggcacaaagua

SEQ ID NO: 19900 - DNA, 21 bp, homo sapiens
caagtcaccgtgtttcatgct

SEQ ID NO: 19901 - RNA, 21 nt, RNAi
agucaccguguuucaugcuuu

SEQ ID NO: 19902 - RNA, 21 nt, RNAi
uuucaguggcacaaaguacga

SEQ ID NO: 19903 - DNA, 21 bp, homo sapiens
caccgtgtttcatgctatttc

SEQ ID NO: 19904 - RNA, 21 nt, RNAi
ccguguuucaugcuauuucuu

SEQ ID NO: 19905 - RNA, 21 nt, RNAi
uuggcacaaaguacgauaaag

SEQ ID NO: 19906 - DNA, 21 bp, homo sapiens
catgctatttctggaggttct

SEQ ID NO: 19907 - RNA, 21 nt, RNAi
ugcuauuucuggagguucuuu

SEQ ID NO: 19908 - RNA, 21 nt, RNAi
uuacgauaaagaccuccaaga

SEQ ID NO: 19909 - DNA, 21 bp, homo sapiens
cagatggtcttcttcaggcct

SEQ ID NO: 19910 - RNA, 21 nt, RNAi
gauggucuucuucaggccuuu

SEQ ID NO: 19911 - RNA, 21 nt, RNAi
uucuaccagaagaaguccgga

SEQ ID NO: 19912 - DNA, 21 bp, homo sapiens
cagcattggtctgatcagttc

SEQ ID NO: 19913 - RNA, 21 nt, RNAi
gcauuggucugaucaguucuu

SEQ ID NO: 19914 - RNA, 21 nt, RNAi
uucguaaccagacuagucaag

SEQ ID NO: 19915 - DNA, 21 bp, homo sapiens
cattggtctgatcagttctgc

SEQ ID NO: 19916 - RNA, 21 nt, RNAi
uuggucugaucaguucugcuu

SEQ ID NO: 19917 - RNA, 21 nt, RNAi
uuaaccagacuagucaagacg

SEQ ID NO: 19918 - DNA, 21 bp, homo sapiens
catgatctcttggcactggcg

SEQ ID NO: 19919 - RNA, 21 nt, RNAi
ugaucucuuggcacuggcguu

SEQ ID NO: 19920 - RNA, 21 nt, RNAi
uuacuagagaaccgugaccgc

SEQ ID NO: 19921 - DNA, 21 bp, homo sapiens
caataattccataaactccag

SEQ ID NO: 19922 - RNA, 21 nt, RNAi
auaauuccauaaacuccaguu

SEQ ID NO: 19923 - RNA, 21 nt, RNAi
uuuauuaagguauuugagguc

SEQ ID NO: 19924 - DNA, 21 bp, homo sapiens
cataaactccagacttcgtgt

SEQ ID NO: 19925 - RNA, 21 nt, RNAi
uaaacuccagacuucguguuu

SEQ ID NO: 19926 - RNA, 21 nt, RNAi
uuauuugaggucugaagcaca

SEQ ID NO: 19927 - DNA, 21 bp, homo sapiens
cacggatcatggcctcgcaga

SEQ ID NO: 19928 - RNA, 21 nt, RNAi
cggaucauggccucgcagauu

SEQ ID NO: 19929 - RNA, 21 nt, RNAi
uugccuaguaccggagcgucu

SEQ ID NO: 19930 - DNA, 21 bp, homo sapiens
gatggtccttgtaggagacag

SEQ ID NO: 19931 - RNA, 21 nt, RNAi
ugguccuuguaggagacaguu

SEQ ID NO: 19932 - RNA, 21 nt, RNAi
uuaccaggaacauccucuguc

SEQ ID NO: 19933 - DNA, 21 bp, homo sapiens
gagacaggtttgacaagttgc

SEQ ID NO: 19934 - RNA, 21 nt, RNAi
gacagguuugacaaguugcuu

SEQ ID NO: 19935 - RNA, 21 nt, RNAi
uucuguccaaacuguucaacg

SEQ ID NO: 19936 - DNA, 21 bp, homo sapiens
gacaggtttgacaagttgctg

SEQ ID NO: 19937 - RNA, 21 nt, RNAi
cagguuugacaaguugcuguu

SEQ ID NO: 19938 - RNA, 21 nt, RNAi
uuguccaaacuguucaacgac

SEQ ID NO: 19939 - DNA, 21 bp, homo sapiens
gacaagttgctgaggtgcctg

SEQ ID NO: 19940 - RNA, 21 nt, RNAi
caaguugcugaggugccuguu

SEQ ID NO: 19941 - RNA, 21 nt, RNAi
uuguucaacgacuccacggac

SEQ ID NO: 19942 - DNA, 21 bp, homo sapiens
gagcctcttcttcactggaaa

SEQ ID NO: 19943 - RNA, 21 nt, RNAi
gccucuucuucacuggaaauu

SEQ ID NO: 19944 - RNA, 21 nt, RNAi
uucggagaagaagugaccuuu

SEQ ID NO: 19945 - DNA, 21 bp, homo sapiens
gaaacctggcaaggatccaat

SEQ ID NO: 19946 - RNA, 21 nt, RNAi
aaccuggcaaggauccaauuu

SEQ ID NO: 19947 - RNA, 21 nt, RNAi
uuuuggaccguuccuagguua

SEQ ID NO: 19948 - DNA, 21 bp, homo sapiens
gagagctgctgagctgactgc

SEQ ID NO: 19949 - RNA, 21 nt, RNAi
gagcugcugagcugacugcuu

SEQ ID NO: 19950 - RNA, 21 nt, RNAi
uucucgacgacucgacugacg

SEQ ID NO: 19951 - DNA, 21 bp, homo sapiens
gagctgctgagctgactgcat

SEQ ID NO: 19952 - RNA, 21 nt, RNAi
gcugcugagcugacugcauuu

SEQ ID NO: 19953 - RNA, 21 nt, RNAi
uucgacgacucgacugacgua

SEQ ID NO: 19954 - DNA, 21 bp, homo sapiens
gagctgactgcatgagctgcc

SEQ ID NO: 19955 - RNA, 21 nt, RNAi
gcugacugcaugagcugccuu

SEQ ID NO: 19956 - RNA, 21 nt, RNAi
uucgacugacguacucgacgg

SEQ ID NO: 19957 - DNA, 21 bp, homo sapiens
gaccgtggccagttcttggta

SEQ ID NO: 19958 - RNA, 21 nt, RNAi
ccguggccaguucuugguauu

SEQ ID NO: 19959 - RNA, 21 nt, RNAi
uuggcaccggucaagaaccau

SEQ ID NO: 19960 - DNA, 21 bp, homo sapiens
gagcgtggttggcgtggatta

SEQ ID NO: 19961 - RNA, 21 nt, RNAi
gcgugguuggcguggauuauu

SEQ ID NO: 19962 - RNA, 21 nt, RNAi
uucgcaccaaccgcaccuaau

SEQ ID NO: 19963 - DNA, 21 bp, homo sapiens
gattacttcatgccttgattc

SEQ ID NO: 19964 - RNA, 21 nt, RNAi
uuacuucaugccuugauucuu

SEQ ID NO: 19965 - RNA, 21 nt, RNAi
uuaaugaaguacggaacuaag

SEQ ID NO: 19966 - DNA, 21 bp, homo sapiens
gatgtcaccaagtcaccgtgt

SEQ ID NO: 19967 - RNA, 21 nt, RNAi
ugucaccaagucaccguguuu

SEQ ID NO: 19968 - RNA, 21 nt, RNAi
uuacagugguucaguggcaca

SEQ ID NO: 19969 - DNA, 21 bp, homo sapiens
gaggttctcgcctttgtggcc

SEQ ID NO: 19970 - RNA, 21 nt, RNAi
gguucucgccuuuguggccuu

SEQ ID NO: 19971 - RNA, 21 nt, RNAi
uuccaagagcggaaacaccgg

SEQ ID NO: 19972 - DNA, 21 bp, homo sapiens
gaaaggaaggcgatctggtgc

SEQ ID NO: 19973 - RNA, 21 nt, RNAi
aaggaaggcgaucuggugcuu

SEQ ID NO: 19974 - RNA, 21 nt, RNAi
uuuuccuuccgcuagaccacg

SEQ ID NO: 19975 - DNA, 21 bp, homo sapiens
gaaggcgatctggtgctttgg

SEQ ID NO: 19976 - RNA, 21 nt, RNAi
aggcgaucuggugcuuugguu

SEQ ID NO: 19977 - RNA, 21 nt, RNAi
uuuccgcuagaccacgaaacc

SEQ ID NO: 19978 - DNA, 21 bp, homo sapiens
gatgctcctccagatggtctt

SEQ ID NO: 19979 - RNA, 21 nt, RNAi
ugcuccuccagauggucuuuu

SEQ ID NO: 19980 - RNA, 21 nt, RNAi
uuacgaggaggucuaccagaa

SEQ ID NO: 19981 - DNA, 21 bp, homo sapiens
gatggtcttcttcaggccttt

SEQ ID NO: 19982 - RNA, 21 nt, RNAi
uggucuucuucaggccuuuuu

SEQ ID NO: 19983 - RNA, 21 nt, RNAi
uuaccagaagaaguccggaaa

SEQ ID NO: 19984 - DNA, 21 bp, homo sapiens
gatcagttctgccagctctgg

SEQ ID NO: 19985 - RNA, 21 nt, RNAi
ucaguucugccagcucugguu

SEQ ID NO: 19986 - RNA, 21 nt, RNAi
uuagucaagacggucgagacc

SEQ ID NO: 19987 - DNA, 21 bp, homo sapiens
gatcatggcctcgcagaagcc

SEQ ID NO: 19988 - RNA, 21 nt, RNAi
ucauggccucgcagaagccuu

SEQ ID NO: 19989 - RNA, 21 nt, RNAi
uuaguaccggagcgucuucgg

SEQ ID NO: 19990 - DNA, 21 bp, homo sapiens
gatataactgaggatgaactg

SEQ ID NO: 19991 - RNA, 21 nt, RNAi
uauaacugaggaugaacuguu

SEQ ID NO: 19992 - RNA, 21 nt, RNAi
uuauauugacuccuacuugac

SEQ ID NO: 19993 - DNA, 21 bp, homo sapiens
taggagacaggtttgacaagt

SEQ ID NO: 19994 - RNA, 21 nt, RNAi
ggagacagguuugacaaguuu

SEQ ID NO: 19995 - RNA, 21 nt, RNAi
uuccucuguccaaacuguuca

SEQ ID NO: 19996 - DNA, 21 bp, homo sapiens
tacttcatgccttgattctgc

SEQ ID NO: 19997 - RNA, 21 nt, RNAi
cuucaugccuugauucugcuu

SEQ ID NO: 19998 - RNA, 21 nt, RNAi
uugaaguacggaacuaagacg

SEQ ID NO: 19999 - DNA, 21 bp, homo sapiens
tatttctggaggttctcgcct

SEQ ID NO: 20000 - RNA, 21 nt, RNAi
uuucuggagguucucgccuuu

SEQ ID NO: 20001 - RNA, 21 nt, RNAi
uuaaagaccuccaagagcgga

SEQ ID NO: 20002 - DNA, 21 bp, homo sapiens
taattccataaactccagact

SEQ ID NO: 20003 - RNA, 21 nt, RNAi
auuccauaaacuccagacuuu

SEQ ID NO: 20004 - RNA, 21 nt, RNAi
uuuaagguauuugaggucuga

SEQ ID NO: 20005 - DNA, 21 bp, homo sapiens
taaactccagacttcgtgtct

SEQ ID NO: 20006 - RNA, 21 nt, RNAi
aacuccagacuucgugucuuu

SEQ ID NO: 20007 - RNA, 21 nt, RNAi
uuuugaggucugaagcacaga

SEQ ID NO: 20008 - DNA, 21 bp, homo sapiens
tactgatataactgaggatga

SEQ ID NO: 20009 - RNA, 21 nt, RNAi
cugauauaacugaggaugauu

SEQ ID NO: 20010 - RNA, 21 nt, RNAi
uugacuauauugacuccuacu

SEQ ID NO: 20011 - DNA, 21 bp, homo sapiens
tataactgaggatgaactgtg

SEQ ID NO: 20012 - RNA, 21 nt, RNAi
uaacugaggaugaacuguguu

SEQ ID NO: 20013 - RNA, 21 nt, RNAi
uuauugacuccuacuugacac

SEQ ID NO: 20014 - DNA, 21 bp, homo sapiens
taactgaggatgaactgtgtt

SEQ ID NO: 20015 - RNA, 21 nt, RNAi
acugaggaugaacuguguuuu

SEQ ID NO: 20016 - RNA, 21 nt, RNAi
uuugacuccuacuugacacaa

SEQ ID NO: 20017 - DNA, 21 bp, homo sapiens
aaaggcagcgaggaagccaag

SEQ ID NO: 20018 - RNA, 21 nt, RNAi
aggcagcgaggaagccaaguu

SEQ ID NO: 20019 - RNA, 21 nt, RNAi
uuuccgucgcuccuucgguuc

SEQ ID NO: 20020 - DNA, 21 bp, homo sapiens
aaggcagcgaggaagccaagg

SEQ ID NO: 20021 - RNA, 21 nt, RNAi
ggcagcgaggaagccaagguu

SEQ ID NO: 20022 - RNA, 21 nt, RNAi
uuccgucgcuccuucgguucc

SEQ ID NO: 20023 - DNA, 21 bp, homo sapiens
aagacagcctgtcagatgctg

SEQ ID NO: 20024 - RNA, 21 nt, RNAi
gacagccugucagaugcuguu

SEQ ID NO: 20025 - RNA, 21 nt, RNAi
uucugucggacagucuacgac

SEQ ID NO: 20026 - DNA, 21 bp, homo sapiens
aacgtgagcttccagaacggc

SEQ ID NO: 20027 - RNA, 21 nt, RNAi
cgugagcuuccagaacggcuu

SEQ ID NO: 20028 - RNA, 21 nt, RNAi
uugcacucgaaggucuugccg

SEQ ID NO: 20029 - DNA, 21 bp, homo sapiens
aacacctactacctgcgcacc

SEQ ID NO: 20030 - RNA, 21 nt, RNAi
caccuacuaccugcgcaccuu

SEQ ID NO: 20031 - RNA, 21 nt, RNAi
uuguggaugauggacgcgugg

SEQ ID NO: 20032 - DNA, 21 bp, homo sapiens
aagaaagtactccaaccagag

SEQ ID NO: 20033 - RNA, 21 nt, RNAi
gaaaguacuccaaccagaguu

SEQ ID NO: 20034 - RNA, 21 nt, RNAi
uucuuucaugagguuggucuc

SEQ ID NO: 20035 - DNA, 21 bp, homo sapiens
aaagtactccaaccagagatg

SEQ ID NO: 20036 - RNA, 21 nt, RNAi
aguacuccaaccagagauguu

SEQ ID NO: 20037 - RNA, 21 nt, RNAi
uuucaugagguuggucucuac

SEQ ID NO: 20038 - DNA, 21 bp, homo sapiens
aagtactccaaccagagatgc

SEQ ID NO: 20039 - RNA, 21 nt, RNAi
guacuccaaccagagaugcuu

SEQ ID NO: 20040 - RNA, 21 nt, RNAi
uucaugagguuggucucuacg

SEQ ID NO: 20041 - DNA, 21 bp, homo sapiens
aaccagagatgctgtggtcac

SEQ ID NO: 20042 - RNA, 21 nt, RNAi
ccagagaugcuguggucacuu

SEQ ID NO: 20043 - RNA, 21 nt, RNAi
uuggucucuacgacaccagug

SEQ ID NO: 20044 - DNA, 21 bp, homo sapiens
aaagtaaaggagtcgtgaagt

SEQ ID NO: 20045 - RNA, 21 nt, RNAi
aguaaaggagucgugaaguuu

SEQ ID NO: 20046 - RNA, 21 nt, RNAi
uuucauuuccucagcacuuca

SEQ ID NO: 20047 - DNA, 21 bp, homo sapiens
aagtaaaggagtcgtgaagtt

SEQ ID NO: 20048 - RNA, 21 nt, RNAi
guaaaggagucgugaaguuuu

SEQ ID NO: 20049 - RNA, 21 nt, RNAi
uucauuuccucagcacuucaa

SEQ ID NO: 20050 - DNA, 21 bp, homo sapiens
aaaggagtcgtgaagtttggc

SEQ ID NO: 20051 - RNA, 21 nt, RNAi
aggagucgugaaguuuggcuu

SEQ ID NO: 20052 - RNA, 21 nt, RNAi
uuuccucagcacuucaaaccg

SEQ ID NO: 20053 - DNA, 21 bp, homo sapiens
aaggagtcgtgaagtttggct

SEQ ID NO: 20054 - RNA, 21 nt, RNAi
ggagucgugaaguuuggcuuu

SEQ ID NO: 20055 - RNA, 21 nt, RNAi
uuccucagcacuucaaaccga

SEQ ID NO: 20056 - DNA, 21 bp, homo sapiens
aagctggaataggtctatcag

SEQ ID NO: 20057 - RNA, 21 nt, RNAi
gcuggaauaggucuaucaguu

SEQ ID NO: 20058 - RNA, 21 nt, RNAi
uucgaccuuauccagauaguc

SEQ ID NO: 20059 - DNA, 21 bp, homo sapiens
aataggtctatcagtccttgt

SEQ ID NO: 20060 - RNA, 21 nt, RNAi
uaggucuaucaguccuuguuu

SEQ ID NO: 20061 - RNA, 21 nt, RNAi
uuauccagauagucaggaaca

SEQ ID NO: 20062 - DNA, 21 bp, homo sapiens
aataatgatggccactgttgt

SEQ ID NO: 20063 - RNA, 21 nt, RNAi
uaaugauggccacuguuguuu

SEQ ID NO: 20064 - RNA, 21 nt, RNAi
uuauuacuaccggugacaaca

SEQ ID NO: 20065 - DNA, 21 bp, homo sapiens
aatgatggccactgttgtgac

SEQ ID NO: 20066 - RNA, 21 nt, RNAi
ugauggccacuguugugacuu

SEQ ID NO: 20067 - RNA, 21 nt, RNAi
uuacuaccggugacaacacug

SEQ ID NO: 20068 - DNA, 21 bp, homo sapiens
aactatcacaggattgtctac

SEQ ID NO: 20069 - RNA, 21 nt, RNAi
cuaucacaggauugucuacuu

SEQ ID NO: 20070 - RNA, 21 nt, RNAi
uugauaguguccuaacagaug

SEQ ID NO: 20071 - DNA, 21 bp, homo sapiens
aactaatggatttgtaagagg

SEQ ID NO: 20072 - RNA, 21 nt, RNAi
cuaauggauuuguaagagguu

SEQ ID NO: 20073 - RNA, 21 nt, RNAi
uugauuaccuaaacauucucc

SEQ ID NO: 20074 - DNA, 21 bp, homo sapiens
aatggatttgtaagaggagga

SEQ ID NO: 20075 - RNA, 21 nt, RNAi
uggauuuguaagaggaggauu

SEQ ID NO: 20076 - RNA, 21 nt, RNAi
uuaccuaaacauucuccuccu

SEQ ID NO: 20077 - DNA, 21 bp, homo sapiens
aagaggaggaggagcatatta

SEQ ID NO: 20078 - RNA, 21 nt, RNAi
gaggaggaggagcauauuauu

SEQ ID NO: 20079 - RNA, 21 nt, RNAi
uucuccuccuccucguauaau

SEQ ID NO: 20080 - DNA, 21 bp, homo sapiens
aatttggtggtgcaattggtc

SEQ ID NO: 20081 - RNA, 21 nt, RNAi
uuugguggugcaauuggucuu

SEQ ID NO: 20082 - RNA, 21 nt, RNAi
uuaaaccaccacguuaaccag

SEQ ID NO: 20083 - DNA, 21 bp, homo sapiens
aattggtctaatcttcgcctt

SEQ ID NO: 20084 - RNA, 21 nt, RNAi
uuggucuaaucuucgccuuuu

SEQ ID NO: 20085 - RNA, 21 nt, RNAi
uuaaccagauuagaagcggaa

SEQ ID NO: 20086 - DNA, 21 bp, homo sapiens
aatcttcgcctttgccaacgc

SEQ ID NO: 20087 - RNA, 21 nt, RNAi
ucuucgccuuugccaacgcuu

SEQ ID NO: 20088 - RNA, 21 nt, RNAi
uuagaagcggaaacgguugcg

SEQ ID NO: 20089 - DNA, 21 bp, homo sapiens
aacgctgttgcagttgctatg

SEQ ID NO: 20090 - RNA, 21 nt, RNAi
cgcuguugcaguugcuauguu

SEQ ID NO: 20091 - RNA, 21 nt, RNAi
uugcgacaacgucaacgauac

SEQ ID NO: 20092 - DNA, 21 bp, homo sapiens
aaaccgtggtggagttgctta

SEQ ID NO: 20093 - RNA, 21 nt, RNAi
accgugguggaguugcuuauu

SEQ ID NO: 20094 - RNA, 21 nt, RNAi
uuuggcaccaccucaacgaau

SEQ ID NO: 20095 - DNA, 21 bp, homo sapiens
aaccgtggtggagttgcttaa

SEQ ID NO: 20096 - RNA, 21 nt, RNAi
ccgugguggaguugcuuaauu

SEQ ID NO: 20097 - RNA, 21 nt, RNAi
uuggcaccaccucaacgaauu

SEQ ID NO: 20098 - DNA, 21 bp, homo sapiens
aaggaacattccatacttatg

SEQ ID NO: 20099 - RNA, 21 nt, RNAi
ggaacauuccauacuuauguu

SEQ ID NO: 20100 - RNA, 21 nt, RNAi
uuccuuguaagguaugaauac

SEQ ID NO: 20101 - DNA, 21 bp, homo sapiens
aattattggagccattacagt

SEQ ID NO: 20102 - RNA, 21 nt, RNAi
uuauuggagccauuacaguuu

SEQ ID NO: 20103 - RNA, 21 nt, RNAi
uuaauaaccucgguaauguca

SEQ ID NO: 20104 - DNA, 21 bp, homo sapiens
aactggtattctggctggagc

SEQ ID NO: 20105 - RNA, 21 nt, RNAi
cugguauucuggcuggagcuu

SEQ ID NO: 20106 - RNA, 21 nt, RNAi
uugaccauaagaccgaccucg

SEQ ID NO: 20107 - DNA, 21 bp, homo sapiens
aaatatctcaggtgatcttgc

SEQ ID NO: 20108 - RNA, 21 nt, RNAi
auaucucaggugaucuugcuu

SEQ ID NO: 20109 - RNA, 21 nt, RNAi
uuuauagaguccacuagaacg

SEQ ID NO: 20110 - DNA, 21 bp, homo sapiens
aatatctcaggtgatcttgca

SEQ ID NO: 20111 - RNA, 21 nt, RNAi
uaucucaggugaucuugcauu

SEQ ID NO: 20112 - RNA, 21 nt, RNAi
uuauagaguccacuagaacgu

SEQ ID NO: 20113 - DNA, 21 bp, homo sapiens
aaaggaacactcctagccatt

SEQ ID NO: 20114 - RNA, 21 nt, RNAi
aggaacacuccuagccauuuu

SEQ ID NO: 20115 - RNA, 21 nt, RNAi
uuuccuugugaggaucgguaa

SEQ ID NO: 20116 - DNA, 21 bp, homo sapiens
aaggaacactcctagccattt

SEQ ID NO: 20117 - RNA, 21 nt, RNAi
ggaacacuccuagccauuuuu

SEQ ID NO: 20118 - RNA, 21 nt, RNAi
uuccuugugaggaucgguaaa

SEQ ID NO: 20119 - DNA, 21 bp, homo sapiens
aattgcagtatctgtaggttc

SEQ ID NO: 20120 - RNA, 21 nt, RNAi
uugcaguaucuguagguucuu

SEQ ID NO: 20121 - RNA, 21 nt, RNAi
uuaacgucauagacauccaag

SEQ ID NO: 20122 - DNA, 21 bp, homo sapiens
aaacgttaatgacactatcgt

SEQ ID NO: 20123 - RNA, 21 nt, RNAi
acguuaaugacacuaucguuu

SEQ ID NO: 20124 - RNA, 21 nt, RNAi
uuugcaauuacugugauagca

SEQ ID NO: 20125 - DNA, 21 bp, homo sapiens
aacgttaatgacactatcgta

SEQ ID NO: 20126 - RNA, 21 nt, RNAi
cguuaaugacacuaucguauu

SEQ ID NO: 20127 - RNA, 21 nt, RNAi
uugcaauuacugugauagcau

SEQ ID NO: 20128 - DNA, 21 bp, homo sapiens
aatgacactatcgtaacagag

SEQ ID NO: 20129 - RNA, 21 nt, RNAi
ugacacuaucguaacagaguu

SEQ ID NO: 20130 - RNA, 21 nt, RNAi
uuacugugauagcauugucuc

SEQ ID NO: 20131 - DNA, 21 bp, homo sapiens
aacagagctaacaaactgtac

SEQ ID NO: 20132 - RNA, 21 nt, RNAi
cagagcuaacaaacuguacuu

SEQ ID NO: 20133 - RNA, 21 nt, RNAi
uugucucgauuguuugacaug

SEQ ID NO: 20134 - DNA, 21 bp, homo sapiens
aacaaactgtacttctgcagc

SEQ ID NO: 20135 - RNA, 21 nt, RNAi
caaacuguacuucugcagcuu

SEQ ID NO: 20136 - RNA, 21 nt, RNAi
uuguuugacaugaagacgucg

SEQ ID NO: 20137 - DNA, 21 bp, homo sapiens
aaactgtacttctgcagcctg

SEQ ID NO: 20138 - RNA, 21 nt, RNAi
acuguacuucugcagccuguu

SEQ ID NO: 20139 - RNA, 21 nt, RNAi
uuugacaugaagacgucggac

SEQ ID NO: 20140 - DNA, 21 bp, homo sapiens
aactgtacttctgcagcctgc

SEQ ID NO: 20141 - RNA, 21 nt, RNAi
cuguacuucugcagccugcuu

SEQ ID NO: 20142 - RNA, 21 nt, RNAi
uugacaugaagacgucggacg

SEQ ID NO: 20143 - DNA, 21 bp, homo sapiens
aaagcagtccttgttcctatg

SEQ ID NO: 20144 - RNA, 21 nt, RNAi
agcaguccuuguuccuauguu

SEQ ID NO: 20145 - RNA, 21 nt, RNAi
uuucgucaggaacaaggauac

SEQ ID NO: 20146 - DNA, 21 bp, homo sapiens
aagcagtccttgttcctatgg

SEQ ID NO: 20147 - RNA, 21 nt, RNAi
gcaguccuuguuccuaugguu

SEQ ID NO: 20148 - RNA, 21 nt, RNAi
uucgucaggaacaaggauacc

SEQ ID NO: 20149 - DNA, 21 bp, homo sapiens
aatgaacaacttccaggtaat

SEQ ID NO: 20150 - RNA, 21 nt, RNAi
ugaacaacuuccagguaauuu

SEQ ID NO: 20151 - RNA, 21 nt, RNAi
uuacuuguugaagguccauua

SEQ ID NO: 20152 - DNA, 21 bp, homo sapiens
aacaacttccaggtaatgagt

SEQ ID NO: 20153 - RNA, 21 nt, RNAi
caacuuccagguaaugaguuu

SEQ ID NO: 20154 - RNA, 21 nt, RNAi
uuguugaagguccauuacuca

SEQ ID NO: 20155 - DNA, 21 bp, homo sapiens
aacttccaggtaatgagtatg

SEQ ID NO: 20156 - RNA, 21 nt, RNAi
cuuccagguaaugaguauguu

SEQ ID NO: 20157 - RNA, 21 nt, RNAi
uugaagguccauuacucauac

SEQ ID NO: 20158 - DNA, 21 bp, homo sapiens
aatgagtatggtgtcaggatt

SEQ ID NO: 20159 - RNA, 21 nt, RNAi
ugaguauggugucaggauuuu

SEQ ID NO: 20160 - RNA, 21 nt, RNAi
uuacucauaccacaguccuaa

SEQ ID NO: 20161 - DNA, 21 bp, homo sapiens
aaataatgaacctcttcgtgg

SEQ ID NO: 20162 - RNA, 21 nt, RNAi
auaaugaaccucuucgugguu

SEQ ID NO: 20163 - RNA, 21 nt, RNAi
uuuauuacuuggagaagcacc

SEQ ID NO: 20164 - DNA, 21 bp, homo sapiens
aataatgaacctcttcgtggc

SEQ ID NO: 20165 - RNA, 21 nt, RNAi
uaaugaaccucuucguggcuu

SEQ ID NO: 20166 - RNA, 21 nt, RNAi
uuauuacuuggagaagcaccg

SEQ ID NO: 20167 - DNA, 21 bp, homo sapiens
aatgaacctcttcgtggctac

SEQ ID NO: 20168 - RNA, 21 nt, RNAi
ugaaccucuucguggcuacuu

SEQ ID NO: 20169 - RNA, 21 nt, RNAi
uuacuuggagaagcaccgaug

SEQ ID NO: 20170 - DNA, 21 bp, homo sapiens
aacctcttcgtggctacatct

SEQ ID NO: 20171 - RNA, 21 nt, RNAi
ccucuucguggcuacaucuuu

SEQ ID NO: 20172 - RNA, 21 nt, RNAi
uuggagaagcaccgauguaga

SEQ ID NO: 20173 - DNA, 21 bp, homo sapiens
aacattcttaattgcacttgg

SEQ ID NO: 20174 - RNA, 21 nt, RNAi
cauucuuaauugcacuugguu

SEQ ID NO: 20175 - RNA, 21 nt, RNAi
uuguaagaauuaacgugaacc

SEQ ID NO: 20176 - DNA, 21 bp, homo sapiens
aattgcacttggattcatctt

SEQ ID NO: 20177 - RNA, 21 nt, RNAi
uugcacuuggauucaucuuuu

SEQ ID NO: 20178 - RNA, 21 nt, RNAi
uuaacgugaaccuaaguagaa

SEQ ID NO: 20179 - DNA, 21 bp, homo sapiens
aactgaatgttattgcaccaa

SEQ ID NO: 20180 - RNA, 21 nt, RNAi
cugaauguuauugcaccaauu

SEQ ID NO: 20181 - RNA, 21 nt, RNAi
uugacuuacaauaacgugguu

SEQ ID NO: 20182 - DNA, 21 bp, homo sapiens
aaacttcttccttgcatcata

SEQ ID NO: 20183 - RNA, 21 nt, RNAi
acuucuuccuugcaucauauu

SEQ ID NO: 20184 - RNA, 21 nt, RNAi
uuugaagaaggaacguaguau

SEQ ID NO: 20185 - DNA, 21 bp, homo sapiens
aacttcttccttgcatcatat

SEQ ID NO: 20186 - RNA, 21 nt, RNAi
cuucuuccuugcaucauauuu

SEQ ID NO: 20187 - RNA, 21 nt, RNAi
uugaagaaggaacguaguaua

SEQ ID NO: 20188 - DNA, 21 bp, homo sapiens
aaatctccaggatggcgtcct

SEQ ID NO: 20189 - RNA, 21 nt, RNAi
aucuccaggauggcguccuuu

SEQ ID NO: 20190 - RNA, 21 nt, RNAi
uuuagagguccuaccgcagga

SEQ ID NO: 20191 - DNA, 21 bp, homo sapiens
aatctccaggatggcgtcctg

SEQ ID NO: 20192 - RNA, 21 nt, RNAi
ucuccaggauggcguccuguu

SEQ ID NO: 20193 - RNA, 21 nt, RNAi
uuagagguccuaccgcaggac

SEQ ID NO: 20194 - DNA, 21 bp, homo sapiens
aacatgtggatatcacttctt

SEQ ID NO: 20195 - RNA, 21 nt, RNAi
cauguggauaucacuucuuuu

SEQ ID NO: 20196 - RNA, 21 nt, RNAi
uuguacaccuauagugaagaa

SEQ ID NO: 20197 - DNA, 21 bp, homo sapiens
aatgttcgtcattaactggtg

SEQ ID NO: 20198 - RNA, 21 nt, RNAi
uguucgucauuaacugguguu

SEQ ID NO: 20199 - RNA, 21 nt, RNAi
uuacaagcaguaauugaccac

SEQ ID NO: 20200 - DNA, 21 bp, homo sapiens
aacatatgtgatagtccttgg

SEQ ID NO: 20201 - RNA, 21 nt, RNAi
cauaugugauaguccuugguu

SEQ ID NO: 20202 - RNA, 21 nt, RNAi
uuguauacacuaucaggaacc

SEQ ID NO: 20203 - DNA, 21 bp, homo sapiens
aatgcactgcagcattcaatt

SEQ ID NO: 20204 - RNA, 21 nt, RNAi
ugcacugcagcauucaauuuu

SEQ ID NO: 20205 - RNA, 21 nt, RNAi
uuacgugacgucguaaguuaa

SEQ ID NO: 20206 - DNA, 21 bp, homo sapiens
aattcgtctttctggagtgga

SEQ ID NO: 20207 - RNA, 21 nt, RNAi
uucgucuuucuggaguggauu

SEQ ID NO: 20208 - RNA, 21 nt, RNAi
uuaagcagaaagaccucaccu

SEQ ID NO: 20209 - DNA, 21 bp, homo sapiens
aaactttaggccacagtgtct

SEQ ID NO: 20210 - RNA, 21 nt, RNAi
acuuuaggccacagugucuuu

SEQ ID NO: 20211 - RNA, 21 nt, RNAi
uuugaaauccggugucacaga

SEQ ID NO: 20212 - DNA, 21 bp, homo sapiens
aactttaggccacagtgtctt

SEQ ID NO: 20213 - RNA, 21 nt, RNAi
cuuuaggccacagugucuuuu

SEQ ID NO: 20214 - RNA, 21 nt, RNAi
uugaaauccggugucacagaa

SEQ ID NO: 20215 - DNA, 21 bp, homo sapiens
aaactcacgtccagctttact

SEQ ID NO: 20216 - RNA, 21 nt, RNAi
acucacguccagcuuuacuuu

SEQ ID NO: 20217 - RNA, 21 nt, RNAi
uuugagugcaggucgaaauga

SEQ ID NO: 20218 - DNA, 21 bp, homo sapiens
aactcacgtccagctttactt

SEQ ID NO: 20219 - RNA, 21 nt, RNAi
cucacguccagcuuuacuuuu

SEQ ID NO: 20220 - RNA, 21 nt, RNAi
uugagugcaggucgaaaugaa

SEQ ID NO: 20221 - DNA, 21 bp, homo sapiens
aaatgttggtttgatgatctg

SEQ ID NO: 20222 - RNA, 21 nt, RNAi
auguugguuugaugaucuguu

SEQ ID NO: 20223 - RNA, 21 nt, RNAi
uuuacaaccaaacuacuagac

SEQ ID NO: 20224 - DNA, 21 bp, homo sapiens
aatgttggtttgatgatctgt

SEQ ID NO: 20225 - RNA, 21 nt, RNAi
uguugguuugaugaucuguuu

SEQ ID NO: 20226 - RNA, 21 nt, RNAi
uuacaaccaaacuacuagaca

SEQ ID NO: 20227 - DNA, 21 bp, homo sapiens
aagacaagccatgaaagagat

SEQ ID NO: 20228 - RNA, 21 nt, RNAi
gacaagccaugaaagagauuu

SEQ ID NO: 20229 - RNA, 21 nt, RNAi
uucuguucgguacuuucucua

SEQ ID NO: 20230 - DNA, 21 bp, homo sapiens
aagccatgaaagagatgtcca

SEQ ID NO: 20231 - RNA, 21 nt, RNAi
gccaugaaagagauguccauu

SEQ ID NO: 20232 - RNA, 21 nt, RNAi
uucgguacuuucucuacaggu

SEQ ID NO: 20233 - DNA, 21 bp, homo sapiens
aaagagatgtccatcgatcaa

SEQ ID NO: 20234 - RNA, 21 nt, RNAi
agagauguccaucgaucaauu

SEQ ID NO: 20235 - RNA, 21 nt, RNAi
uuucucuacagguagcuaguu

SEQ ID NO: 20236 - DNA, 21 bp, homo sapiens
aagagatgtccatcgatcaag

SEQ ID NO: 20237 - RNA, 21 nt, RNAi
gagauguccaucgaucaaguu

SEQ ID NO: 20238 - RNA, 21 nt, RNAi
uucucuacagguagcuaguuc

SEQ ID NO: 20239 - DNA, 21 bp, homo sapiens
aagccaaatatcagcgatggc

SEQ ID NO: 20240 - RNA, 21 nt, RNAi
gccaaauaucagcgauggcuu

SEQ ID NO: 20241 - RNA, 21 nt, RNAi
uucgguuuauagucgcuaccg

SEQ ID NO: 20242 - DNA, 21 bp, homo sapiens
aaatatcagcgatggcttatt

SEQ ID NO: 20243 - RNA, 21 nt, RNAi
auaucagcgauggcuuauuuu

SEQ ID NO: 20244 - RNA, 21 nt, RNAi
uuuauagucgcuaccgaauaa

SEQ ID NO: 20245 - DNA, 21 bp, homo sapiens
aatatcagcgatggcttatta

SEQ ID NO: 20246 - RNA, 21 nt, RNAi
uaucagcgauggcuuauuauu

SEQ ID NO: 20247 - RNA, 21 nt, RNAi
uuauagucgcuaccgaauaau

SEQ ID NO: 20248 - DNA, 21 bp, homo sapiens
aaggtgcacagtatttgatgc

SEQ ID NO: 20249 - RNA, 21 nt, RNAi
ggugcacaguauuugaugcuu

SEQ ID NO: 20250 - RNA, 21 nt, RNAi
uuccacgugucauaaacuacg

SEQ ID NO: 20251 - DNA, 21 bp, homo sapiens
aagccaaacacacttgtcctt

SEQ ID NO: 20252 - RNA, 21 nt, RNAi
gccaaacacacuuguccuuuu

SEQ ID NO: 20253 - RNA, 21 nt, RNAi
uucgguuugugugaacaggaa

SEQ ID NO: 20254 - DNA, 21 bp, homo sapiens
aaacacacttgtccttggatt

SEQ ID NO: 20255 - RNA, 21 nt, RNAi
acacacuuguccuuggauuuu

SEQ ID NO: 20256 - RNA, 21 nt, RNAi
uuugugugaacaggaaccuaa

SEQ ID NO: 20257 - DNA, 21 bp, homo sapiens
aacacacttgtccttggattt

SEQ ID NO: 20258 - RNA, 21 nt, RNAi
cacacuuguccuuggauuuuu

SEQ ID NO: 20259 - RNA, 21 nt, RNAi
uugugugaacaggaaccuaaa

SEQ ID NO: 20260 - DNA, 21 bp, homo sapiens
aagaaagattggttgcaagca

SEQ ID NO: 20261 - RNA, 21 nt, RNAi
gaaagauugguugcaagcauu

SEQ ID NO: 20262 - RNA, 21 nt, RNAi
uucuuucuaaccaacguucgu

SEQ ID NO: 20263 - DNA, 21 bp, homo sapiens
aaagattggttgcaagcagat

SEQ ID NO: 20264 - RNA, 21 nt, RNAi
agauugguugcaagcagauuu

SEQ ID NO: 20265 - RNA, 21 nt, RNAi
uuucuaaccaacguucgucua

SEQ ID NO: 20266 - DNA, 21 bp, homo sapiens
aagattggttgcaagcagata

SEQ ID NO: 20267 - RNA, 21 nt, RNAi
gauugguugcaagcagauauu

SEQ ID NO: 20268 - RNA, 21 nt, RNAi
uucuaaccaacguucgucuau

SEQ ID NO: 20269 - DNA, 21 bp, homo sapiens
aatatggagtagtggttattc

SEQ ID NO: 20270 - RNA, 21 nt, RNAi
uauggaguagugguuauucuu

SEQ ID NO: 20271 - RNA, 21 nt, RNAi
uuauaccucaucaccaauaag

SEQ ID NO: 20272 - DNA, 21 bp, homo sapiens
aaagaaggtctggatatatct

SEQ ID NO: 20273 - RNA, 21 nt, RNAi
agaaggucuggauauaucuuu

SEQ ID NO: 20274 - RNA, 21 nt, RNAi
uuucuuccagaccuauauaga

SEQ ID NO: 20275 - DNA, 21 bp, homo sapiens
aagaaggtctggatatatctc

SEQ ID NO: 20276 - RNA, 21 nt, RNAi
gaaggucuggauauaucucuu

SEQ ID NO: 20277 - RNA, 21 nt, RNAi
uucuuccagaccuauauagag

SEQ ID NO: 20278 - DNA, 21 bp, homo sapiens
aaggtctggatatatctcatc

SEQ ID NO: 20279 - RNA, 21 nt, RNAi
ggucuggauauaucucaucuu

SEQ ID NO: 20280 - RNA, 21 nt, RNAi
uuccagaccuauauagaguag

SEQ ID NO: 20281 - DNA, 21 bp, homo sapiens
aagagaaatctcctggcacca

SEQ ID NO: 20282 - RNA, 21 nt, RNAi
gagaaaucuccuggcaccauu

SEQ ID NO: 20283 - RNA, 21 nt, RNAi
uucucuuuagaggaccguggu

SEQ ID NO: 20284 - DNA, 21 bp, homo sapiens
aaatctcctggcaccaaggat

SEQ ID NO: 20285 - RNA, 21 nt, RNAi
aucuccuggcaccaaggauuu

SEQ ID NO: 20286 - RNA, 21 nt, RNAi
uuuagaggaccgugguuccua

SEQ ID NO: 20287 - DNA, 21 bp, homo sapiens
aatctcctggcaccaaggatg

SEQ ID NO: 20288 - RNA, 21 nt, RNAi
ucuccuggcaccaaggauguu

SEQ ID NO: 20289 - RNA, 21 nt, RNAi
uuagaggaccgugguuccuac

SEQ ID NO: 20290 - DNA, 21 bp, homo sapiens
aaggatgtggtagtaagtgtg

SEQ ID NO: 20291 - RNA, 21 nt, RNAi
ggaugugguaguaaguguguu

SEQ ID NO: 20292 - RNA, 21 nt, RNAi
uuccuacaccaucauucacac

SEQ ID NO: 20293 - DNA, 21 bp, homo sapiens
aaagtccgatttagatacttc

SEQ ID NO: 20294 - RNA, 21 nt, RNAi
aguccgauuuagauacuucuu

SEQ ID NO: 20295 - RNA, 21 nt, RNAi
uuucaggcuaaaucuaugaag

SEQ ID NO: 20296 - DNA, 21 bp, homo sapiens
aagtccgatttagatacttcc

SEQ ID NO: 20297 - RNA, 21 nt, RNAi
guccgauuuagauacuuccuu

SEQ ID NO: 20298 - RNA, 21 nt, RNAi
uucaggcuaaaucuaugaagg

SEQ ID NO: 20299 - DNA, 21 bp, homo sapiens
aaccaattacacacaaagttg

SEQ ID NO: 20300 - RNA, 21 nt, RNAi
ccaauuacacacaaaguuguu

SEQ ID NO: 20301 - RNA, 21 nt, RNAi
uugguuaauguguguuucaac

SEQ ID NO: 20302 - DNA, 21 bp, homo sapiens
aattacacacaaagttgagga

SEQ ID NO: 20303 - RNA, 21 nt, RNAi
uuacacacaaaguugaggauu

SEQ ID NO: 20304 - RNA, 21 nt, RNAi
uuaauguguguuucaacuccu

SEQ ID NO: 20305 - DNA, 21 bp, homo sapiens
aaagttgaggaagaggatggc

SEQ ID NO: 20306 - RNA, 21 nt, RNAi
aguugaggaagaggauggcuu

SEQ ID NO: 20307 - RNA, 21 nt, RNAi
uuucaacuccuucuccuaccg

SEQ ID NO: 20308 - DNA, 21 bp, homo sapiens
aagttgaggaagaggatggca

SEQ ID NO: 20309 - RNA, 21 nt, RNAi
guugaggaagaggauggcauu

SEQ ID NO: 20310 - RNA, 21 nt, RNAi
uucaacuccuucuccuaccgu

SEQ ID NO: 20311 - DNA, 21 bp, homo sapiens
aagaggatggcaagactgcaa

SEQ ID NO: 20312 - RNA, 21 nt, RNAi
gaggauggcaagacugcaauu

SEQ ID NO: 20313 - RNA, 21 nt, RNAi
uucuccuaccguucugacguu

SEQ ID NO: 20314 - DNA, 21 bp, homo sapiens
aagactgcaactcaaccactg

SEQ ID NO: 20315 - RNA, 21 nt, RNAi
gacugcaacucaaccacuguu

SEQ ID NO: 20316 - RNA, 21 nt, RNAi
uucugacguugaguuggugac

SEQ ID NO: 20317 - DNA, 21 bp, homo sapiens
aaagcttcttgaagctagtac

SEQ ID NO: 20318 - RNA, 21 nt, RNAi
agcuucuugaagcuaguacuu

SEQ ID NO: 20319 - RNA, 21 nt, RNAi
uuucgaagaacuucgaucaug

SEQ ID NO: 20320 - DNA, 21 bp, homo sapiens
aagcttcttgaagctagtaca

SEQ ID NO: 20321 - RNA, 21 nt, RNAi
gcuucuugaagcuaguacauu

SEQ ID NO: 20322 - RNA, 21 nt, RNAi
uucgaagaacuucgaucaugu

SEQ ID NO: 20323 - DNA, 21 bp, homo sapiens
aagctagtacacagtttcaga

SEQ ID NO: 20324 - RNA, 21 nt, RNAi
gcuaguacacaguuucagauu

SEQ ID NO: 20325 - RNA, 21 nt, RNAi
uucgaucaugugucaaagucu

SEQ ID NO: 20326 - DNA, 21 bp, homo sapiens
aagaatactattgatgtctgg

SEQ ID NO: 20327 - RNA, 21 nt, RNAi
gaauacuauugaugucugguu

SEQ ID NO: 20328 - RNA, 21 nt, RNAi
uucuuaugauaacuacagacc

SEQ ID NO: 20329 - DNA, 21 bp, homo sapiens
aatactattgatgtctggtgg

SEQ ID NO: 20330 - RNA, 21 nt, RNAi
uacuauugaugucuggugguu

SEQ ID NO: 20331 - RNA, 21 nt, RNAi
uuaugauaacuacagaccacc

SEQ ID NO: 20332 - DNA, 21 bp, homo sapiens
aaatggaaagactgtaagatc

SEQ ID NO: 20333 - RNA, 21 nt, RNAi
auggaaagacuguaagaucuu

SEQ ID NO: 20334 - RNA, 21 nt, RNAi
uuuaccuuucugacauucuag

SEQ ID NO: 20335 - DNA, 21 bp, homo sapiens
aatggaaagactgtaagatca

SEQ ID NO: 20336 - RNA, 21 nt, RNAi
uggaaagacuguaagaucauu

SEQ ID NO: 20337 - RNA, 21 nt, RNAi
uuaccuuucugacauucuagu

SEQ ID NO: 20338 - DNA, 21 bp, homo sapiens
aaagactgtaagatcagagta

SEQ ID NO: 20339 - RNA, 21 nt, RNAi
agacuguaagaucagaguauu

SEQ ID NO: 20340 - RNA, 21 nt, RNAi
uuucugacauucuagucucau

SEQ ID NO: 20341 - DNA, 21 bp, homo sapiens
aagactgtaagatcagagtat

SEQ ID NO: 20342 - RNA, 21 nt, RNAi
gacuguaagaucagaguauuu

SEQ ID NO: 20343 - RNA, 21 nt, RNAi
uucugacauucuagucucaua

SEQ ID NO: 20344 - DNA, 21 bp, homo sapiens
aagatcagagtattcattggt

SEQ ID NO: 20345 - RNA, 21 nt, RNAi
gaucagaguauucauugguuu

SEQ ID NO: 20346 - RNA, 21 nt, RNAi
uucuagucucauaaguaacca

SEQ ID NO: 20347 - DNA, 21 bp, homo sapiens
aaacagaatagaccatgaccg

SEQ ID NO: 20348 - RNA, 21 nt, RNAi
acagaauagaccaugaccguu

SEQ ID NO: 20349 - RNA, 21 nt, RNAi
uuugucuuaucugguacuggc

SEQ ID NO: 20350 - DNA, 21 bp, homo sapiens
aacagaatagaccatgaccgg

SEQ ID NO: 20351 - RNA, 21 nt, RNAi
cagaauagaccaugaccgguu

SEQ ID NO: 20352 - RNA, 21 nt, RNAi
uugucuuaucugguacuggcc

SEQ ID NO: 20353 - DNA, 21 bp, homo sapiens
aatagaccatgaccggagagc

SEQ ID NO: 20354 - RNA, 21 nt, RNAi
uagaccaugaccggagagcuu

SEQ ID NO: 20355 - RNA, 21 nt, RNAi
uuaucugguacuggccucucg

SEQ ID NO: 20356 - DNA, 21 bp, homo sapiens
aaatcattgagccatacagac

SEQ ID NO: 20357 - RNA, 21 nt, RNAi
aucauugagccauacagacuu

SEQ ID NO: 20358 - RNA, 21 nt, RNAi
uuuaguaacucgguaugucug

SEQ ID NO: 20359 - DNA, 21 bp, homo sapiens
aatcattgagccatacagact

SEQ ID NO: 20360 - RNA, 21 nt, RNAi
ucauugagccauacagacuuu

SEQ ID NO: 20361 - RNA, 21 nt, RNAi
uuaguaacucgguaugucuga

SEQ ID NO: 20362 - DNA, 21 bp, homo sapiens
aaagagcaagatattgcagat

SEQ ID NO: 20363 - RNA, 21 nt, RNAi
agagcaagauauugcagauuu

SEQ ID NO: 20364 - RNA, 21 nt, RNAi
uuucucguucuauaacgucua

SEQ ID NO: 20365 - DNA, 21 bp, homo sapiens
aagagcaagatattgcagata

SEQ ID NO: 20366 - RNA, 21 nt, RNAi
gagcaagauauugcagauauu

SEQ ID NO: 20367 - RNA, 21 nt, RNAi
uucucguucuauaacgucuau

SEQ ID NO: 20368 - DNA, 21 bp, homo sapiens
aatgaaagaagatgaaccatg

SEQ ID NO: 20369 - RNA, 21 nt, RNAi
ugaaagaagaugaaccauguu

SEQ ID NO: 20370 - RNA, 21 nt, RNAi
uuacuuucuucuacuugguac

SEQ ID NO: 20371 - DNA, 21 bp, homo sapiens
aaagaagatgaaccatggcga

SEQ ID NO: 20372 - RNA, 21 nt, RNAi
agaagaugaaccauggcgauu

SEQ ID NO: 20373 - RNA, 21 nt, RNAi
uuucuucuacuugguaccgcu

SEQ ID NO: 20374 - DNA, 21 bp, homo sapiens
aagaagatgaaccatggcgaa

SEQ ID NO: 20375 - RNA, 21 nt, RNAi
gaagaugaaccauggcgaauu

SEQ ID NO: 20376 - RNA, 21 nt, RNAi
uucuucuacuugguaccgcuu

SEQ ID NO: 20377 - DNA, 21 bp, homo sapiens
aagatgaaccatggcgaataa

SEQ ID NO: 20378 - RNA, 21 nt, RNAi
gaugaaccauggcgaauaauu

SEQ ID NO: 20379 - RNA, 21 nt, RNAi
uucuacuugguaccgcuuauu

SEQ ID NO: 20380 - DNA, 21 bp, homo sapiens
aaccatggcgaataacagata

SEQ ID NO: 20381 - RNA, 21 nt, RNAi
ccauggcgaauaacagauauu

SEQ ID NO: 20382 - RNA, 21 nt, RNAi
uugguaccgcuuauugucuau

SEQ ID NO: 20383 - DNA, 21 bp, homo sapiens
aacagataatgagcttgaact

SEQ ID NO: 20384 - RNA, 21 nt, RNAi
cagauaaugagcuugaacuuu

SEQ ID NO: 20385 - RNA, 21 nt, RNAi
uugucuauuacucgaacuuga

SEQ ID NO: 20386 - DNA, 21 bp, homo sapiens
aagaccaagacataccggcag

SEQ ID NO: 20387 - RNA, 21 nt, RNAi
gaccaagacauaccggcaguu

SEQ ID NO: 20388 - RNA, 21 nt, RNAi
uucugguucuguauggccguc

SEQ ID NO: 20389 - DNA, 21 bp, homo sapiens
aagacataccggcagatcagg

SEQ ID NO: 20390 - RNA, 21 nt, RNAi
gacauaccggcagaucagguu

SEQ ID NO: 20391 - RNA, 21 nt, RNAi
uucuguauggccgucuagucc

SEQ ID NO: 20392 - DNA, 21 bp, homo sapiens
aaaggaacattcaagcacagc

SEQ ID NO: 20393 - RNA, 21 nt, RNAi
aggaacauucaagcacagcuu

SEQ ID NO: 20394 - RNA, 21 nt, RNAi
uuuccuuguaaguucgugucg

SEQ ID NO: 20395 - DNA, 21 bp, homo sapiens
aaggaacattcaagcacagct

SEQ ID NO: 20396 - RNA, 21 nt, RNAi
ggaacauucaagcacagcuuu

SEQ ID NO: 20397 - RNA, 21 nt, RNAi
uuccuuguaaguucgugucga

SEQ ID NO: 20398 - DNA, 21 bp, homo sapiens
aacattcaagcacagctaata

SEQ ID NO: 20399 - RNA, 21 nt, RNAi
cauucaagcacagcuaauauu

SEQ ID NO: 20400 - RNA, 21 nt, RNAi
uuguaaguucgugucgauuau

SEQ ID NO: 20401 - DNA, 21 bp, homo sapiens
aaaggtgctgtgtctagtgct

SEQ ID NO: 20402 - RNA, 21 nt, RNAi
aggugcugugucuagugcuuu

SEQ ID NO: 20403 - RNA, 21 nt, RNAi
uuuccacgacacagaucacga

SEQ ID NO: 20404 - DNA, 21 bp, homo sapiens
aaggtgctgtgtctagtgctc

SEQ ID NO: 20405 - RNA, 21 nt, RNAi
ggugcugugucuagugcucuu

SEQ ID NO: 20406 - RNA, 21 nt, RNAi
uuccacgacacagaucacgag

SEQ ID NO: 20407 - DNA, 21 bp, homo sapiens
aagctctatctaaggacctac

SEQ ID NO: 20408 - RNA, 21 nt, RNAi
gcucuaucuaaggaccuacuu

SEQ ID NO: 20409 - RNA, 21 nt, RNAi
uucgagauagauuccuggaug

SEQ ID NO: 20410 - DNA, 21 bp, homo sapiens
aaggacctaccaccaatcctc

SEQ ID NO: 20411 - RNA, 21 nt, RNAi
ggaccuaccaccaauccucuu

SEQ ID NO: 20412 - RNA, 21 nt, RNAi
uuccuggauggugguuaggag

SEQ ID NO: 20413 - DNA, 21 bp, homo sapiens
aatcatcagagtgtccttacc

SEQ ID NO: 20414 - RNA, 21 nt, RNAi
ucaucagaguguccuuaccuu

SEQ ID NO: 20415 - RNA, 21 nt, RNAi
uuaguagucucacaggaaugg

SEQ ID NO: 20416 - DNA, 21 bp, homo sapiens
aaatgttctatacagtggaca

SEQ ID NO: 20417 - RNA, 21 nt, RNAi
auguucuauacaguggacauu

SEQ ID NO: 20418 - RNA, 21 nt, RNAi
uuuacaagauaugucaccugu

SEQ ID NO: 20419 - DNA, 21 bp, homo sapiens
aatgttctatacagtggacag

SEQ ID NO: 20420 - RNA, 21 nt, RNAi
uguucuauacaguggacaguu

SEQ ID NO: 20421 - RNA, 21 nt, RNAi
uuacaagauaugucaccuguc

SEQ ID NO: 20422 - DNA, 21 bp, homo sapiens
aatggtacttcagtgcctagt

SEQ ID NO: 20423 - RNA, 21 nt, RNAi
ugguacuucagugccuaguuu

SEQ ID NO: 20424 - RNA, 21 nt, RNAi
uuaccaugaagucacggauca

SEQ ID NO: 20425 - DNA, 21 bp, homo sapiens
aacctgaaatcttcaatgaca

SEQ ID NO: 20426 - RNA, 21 nt, RNAi
ccugaaaucuucaaugacauu

SEQ ID NO: 20427 - RNA, 21 nt, RNAi
uuggacuuuagaaguuacugu

SEQ ID NO: 20428 - DNA, 21 bp, homo sapiens
aacatcacaatggcgaatggt

SEQ ID NO: 20429 - RNA, 21 nt, RNAi
caucacaauggcgaaugguuu

SEQ ID NO: 20430 - RNA, 21 nt, RNAi
uuguaguguuaccgcuuacca

SEQ ID NO: 20431 - DNA, 21 bp, homo sapiens
aatttgaaagcacacaggaaa

SEQ ID NO: 20432 - RNA, 21 nt, RNAi
uuugaaagcacacaggaaauu

SEQ ID NO: 20433 - RNA, 21 nt, RNAi
uuaaacuuucguguguccuuu

SEQ ID NO: 20434 - DNA, 21 bp, homo sapiens
aaagcacacaggaaagcttgc

SEQ ID NO: 20435 - RNA, 21 nt, RNAi
agcacacaggaaagcuugcuu

SEQ ID NO: 20436 - RNA, 21 nt, RNAi
uuucguguguccuuucgaacg

SEQ ID NO: 20437 - DNA, 21 bp, homo sapiens
aagcacacaggaaagcttgct

SEQ ID NO: 20438 - RNA, 21 nt, RNAi
gcacacaggaaagcuugcuuu

SEQ ID NO: 20439 - RNA, 21 nt, RNAi
uucguguguccuuucgaacga

SEQ ID NO: 20440 - DNA, 21 bp, homo sapiens
aaagcttgctccattgataac

SEQ ID NO: 20441 - RNA, 21 nt, RNAi
agcuugcuccauugauaacuu

SEQ ID NO: 20442 - RNA, 21 nt, RNAi
uuucgaacgagguaacuauug

SEQ ID NO: 20443 - DNA, 21 bp, homo sapiens
aagcttgctccattgataacg

SEQ ID NO: 20444 - RNA, 21 nt, RNAi
gcuugcuccauugauaacguu

SEQ ID NO: 20445 - RNA, 21 nt, RNAi
uucgaacgagguaacuauugc

SEQ ID NO: 20446 - DNA, 21 bp, homo sapiens
aacgtgtatggagacttcggt

SEQ ID NO: 20447 - RNA, 21 nt, RNAi
cguguauggagacuucgguuu

SEQ ID NO: 20448 - RNA, 21 nt, RNAi
uugcacauaccucugaagcca

SEQ ID NO: 20449 - DNA, 21 bp, homo sapiens
aatggtgattcttctctgttg

SEQ ID NO: 20450 - RNA, 21 nt, RNAi
uggugauucuucucuguuguu

SEQ ID NO: 20451 - RNA, 21 nt, RNAi
uuaccacuaagaagagacaac

SEQ ID NO: 20452 - DNA, 21 bp, homo sapiens
aactgaagtttgtgagagtag

SEQ ID NO: 20453 - RNA, 21 nt, RNAi
cugaaguuugugagaguaguu

SEQ ID NO: 20454 - RNA, 21 nt, RNAi
uugacuucaaacacucucauc

SEQ ID NO: 20455 - DNA, 21 bp, homo sapiens
cagagccgtttccaggtggac

SEQ ID NO: 20456 - RNA, 21 nt, RNAi
gagccguuuccagguggacuu

SEQ ID NO: 20457 - RNA, 21 nt, RNAi
uucucggcaaagguccaccug

SEQ ID NO: 20458 - DNA, 21 bp, homo sapiens
caggtggacctggtttccgag

SEQ ID NO: 20459 - RNA, 21 nt, RNAi
gguggaccugguuuccgaguu

SEQ ID NO: 20460 - RNA, 21 nt, RNAi
uuccaccuggaccaaaggcuc

SEQ ID NO: 20461 - DNA, 21 bp, homo sapiens
cagctaaaggcagcgaggaag

SEQ ID NO: 20462 - RNA, 21 nt, RNAi
gcuaaaggcagcgaggaaguu

SEQ ID NO: 20463 - RNA, 21 nt, RNAi
uucgauuuccgucgcuccuuc

SEQ ID NO: 20464 - DNA, 21 bp, homo sapiens
caacgtgagcttccagaacgg

SEQ ID NO: 20465 - RNA, 21 nt, RNAi
acgugagcuuccagaacgguu

SEQ ID NO: 20466 - RNA, 21 nt, RNAi
uuugcacucgaaggucuugcc

SEQ ID NO: 20467 - DNA, 21 bp, homo sapiens
caccaccagcactactattat

SEQ ID NO: 20468 - RNA, 21 nt, RNAi
ccaccagcacuacuauuauuu

SEQ ID NO: 20469 - RNA, 21 nt, RNAi
uugguggucgugaugauaaua

SEQ ID NO: 20470 - DNA, 21 bp, homo sapiens
caccagcactactattatgat

SEQ ID NO: 20471 - RNA, 21 nt, RNAi
ccagcacuacuauuaugauuu

SEQ ID NO: 20472 - RNA, 21 nt, RNAi
uuggucgugaugauaauacua

SEQ ID NO: 20473 - DNA, 21 bp, homo sapiens
cagcactactattatgatacc

SEQ ID NO: 20474 - RNA, 21 nt, RNAi
gcacuacuauuaugauaccuu

SEQ ID NO: 20475 - RNA, 21 nt, RNAi
uucgugaugauaauacuaugg

SEQ ID NO: 20476 - DNA, 21 bp, homo sapiens
cacaccaacacctactacctg

SEQ ID NO: 20477 - RNA, 21 nt, RNAi
caccaacaccuacuaccuguu

SEQ ID NO: 20478 - RNA, 21 nt, RNAi
uugugguuguggaugauggac

SEQ ID NO: 20479 - DNA, 21 bp, homo sapiens
caccaacacctactacctgcg

SEQ ID NO: 20480 - RNA, 21 nt, RNAi
ccaacaccuacuaccugcguu

SEQ ID NO: 20481 - RNA, 21 nt, RNAi
uugguuguggaugauggacgc

SEQ ID NO: 20482 - DNA, 21 bp, homo sapiens
caacacctactacctgcgcac

SEQ ID NO: 20483 - RNA, 21 nt, RNAi
acaccuacuaccugcgcacuu

SEQ ID NO: 20484 - RNA, 21 nt, RNAi
uuuguggaugauggacgcgug

SEQ ID NO: 20485 - DNA, 21 bp, homo sapiens
cacctactacctgcgcacctt

SEQ ID NO: 20486 - RNA, 21 nt, RNAi
ccuacuaccugcgcaccuuuu

SEQ ID NO: 20487 - RNA, 21 nt, RNAi
uuggaugauggacgcguggaa

SEQ ID NO: 20488 - DNA, 21 bp, homo sapiens
caccttcggccacaacaccat

SEQ ID NO: 20489 - RNA, 21 nt, RNAi
ccuucggccacaacaccauuu

SEQ ID NO: 20490 - RNA, 21 nt, RNAi
uuggaagccgguguuguggua

SEQ ID NO: 20491 - DNA, 21 bp, homo sapiens
cacaacaccatggacgctgtg

SEQ ID NO: 20492 - RNA, 21 nt, RNAi
caacaccauggacgcuguguu

SEQ ID NO: 20493 - RNA, 21 nt, RNAi
uuguugugguaccugcgacac

SEQ ID NO: 20494 - DNA, 21 bp, homo sapiens
caacaccatggacgctgtgcc

SEQ ID NO: 20495 - RNA, 21 nt, RNAi
acaccauggacgcugugccuu

SEQ ID NO: 20496 - RNA, 21 nt, RNAi
uuugugguaccugcgacacgg

SEQ ID NO: 20497 - DNA, 21 bp, homo sapiens
caggatcgatcactaccggca

SEQ ID NO: 20498 - RNA, 21 nt, RNAi
ggaucgaucacuaccggcauu

SEQ ID NO: 20499 - RNA, 21 nt, RNAi
uuccuagcuagugauggccgu

SEQ ID NO: 20500 - DNA, 21 bp, homo sapiens
caaccagagatgctgtggtca

SEQ ID NO: 20501 - RNA, 21 nt, RNAi
accagagaugcuguggucauu

SEQ ID NO: 20502 - RNA, 21 nt, RNAi
uuuggucucuacgacaccagu

SEQ ID NO: 20503 - DNA, 21 bp, homo sapiens
cagagatgctgtggtcacgta

SEQ ID NO: 20504 - RNA, 21 nt, RNAi
gagaugcuguggucacguauu

SEQ ID NO: 20505 - RNA, 21 nt, RNAi
uucucuacgacaccagugcau

SEQ ID NO: 20506 - DNA, 21 bp, homo sapiens
cacgtatactgcagaaagtaa

SEQ ID NO: 20507 - RNA, 21 nt, RNAi
cguauacugcagaaaguaauu

SEQ ID NO: 20508 - RNA, 21 nt, RNAi
uugcauaugacgucuuucauu

SEQ ID NO: 20509 - DNA, 21 bp, homo sapiens
cagaaagtaaaggagtcgtga

SEQ ID NO: 20510 - RNA, 21 nt, RNAi
gaaaguaaaggagucgugauu

SEQ ID NO: 20511 - RNA, 21 nt, RNAi
uucuuucauuuccucagcacu

SEQ ID NO: 20512 - DNA, 21 bp, homo sapiens
cattagattgtcatggattgt

SEQ ID NO: 20513 - RNA, 21 nt, RNAi
uuagauugucauggauuguuu

SEQ ID NO: 20514 - RNA, 21 nt, RNAi
uuaaucuaacaguaccuaaca

SEQ ID NO: 20515 - DNA, 21 bp, homo sapiens
caagctggaataggtctatca

SEQ ID NO: 20516 - RNA, 21 nt, RNAi
agcuggaauaggucuaucauu

SEQ ID NO: 20517 - RNA, 21 nt, RNAi
uuucgaccuuauccagauagu

SEQ ID NO: 20518 - DNA, 21 bp, homo sapiens
cagtccttgtaataatgatgg

SEQ ID NO: 20519 - RNA, 21 nt, RNAi
guccuuguaauaaugaugguu

SEQ ID NO: 20520 - RNA, 21 nt, RNAi
uucaggaacauuauuacuacc

SEQ ID NO: 20521 - DNA, 21 bp, homo sapiens
cactgttgtgacaactatcac

SEQ ID NO: 20522 - RNA, 21 nt, RNAi
cuguugugacaacuaucacuu

SEQ ID NO: 20523 - RNA, 21 nt, RNAi
uugacaacacuguugauagug

SEQ ID NO: 20524 - DNA, 21 bp, homo sapiens
caactatcacaggattgtcta

SEQ ID NO: 20525 - RNA, 21 nt, RNAi
acuaucacaggauugucuauu

SEQ ID NO: 20526 - RNA, 21 nt, RNAi
uuugauaguguccuaacagau

SEQ ID NO: 20527 - DNA, 21 bp, homo sapiens
cacaggattgtctacttcagc

SEQ ID NO: 20528 - RNA, 21 nt, RNAi
caggauugucuacuucagcuu

SEQ ID NO: 20529 - RNA, 21 nt, RNAi
uuguccuaacagaugaagucg

SEQ ID NO: 20530 - DNA, 21 bp, homo sapiens
caggattgtctacttcagcaa

SEQ ID NO: 20531 - RNA, 21 nt, RNAi
ggauugucuacuucagcaauu

SEQ ID NO: 20532 - RNA, 21 nt, RNAi
uuccuaacagaugaagucguu

SEQ ID NO: 20533 - DNA, 21 bp, homo sapiens
cagcaatagcaactaatggat

SEQ ID NO: 20534 - RNA, 21 nt, RNAi
gcaauagcaacuaauggauuu

SEQ ID NO: 20535 - RNA, 21 nt, RNAi
uucguuaucguugauuaccua

SEQ ID NO: 20536 - DNA, 21 bp, homo sapiens
caatagcaactaatggatttg

SEQ ID NO: 20537 - RNA, 21 nt, RNAi
auagcaacuaauggauuuguu

SEQ ID NO: 20538 - RNA, 21 nt, RNAi
uuuaucguugauuaccuaaac

SEQ ID NO: 20539 - DNA, 21 bp, homo sapiens
caactaatggatttgtaagag

SEQ ID NO: 20540 - RNA, 21 nt, RNAi
acuaauggauuuguaagaguu

SEQ ID NO: 20541 - RNA, 21 nt, RNAi
uuugauuaccuaaacauucuc

SEQ ID NO: 20542 - DNA, 21 bp, homo sapiens
cagaatttggtggtgcaattg

SEQ ID NO: 20543 - RNA, 21 nt, RNAi
gaauuugguggugcaauuguu

SEQ ID NO: 20544 - RNA, 21 nt, RNAi
uucuuaaaccaccacguuaac

SEQ ID NO: 20545 - DNA, 21 bp, homo sapiens
caattggtctaatcttcgcct

SEQ ID NO: 20546 - RNA, 21 nt, RNAi
auuggucuaaucuucgccuuu

SEQ ID NO: 20547 - RNA, 21 nt, RNAi
uuuaaccagauuagaagcgga

SEQ ID NO: 20548 - DNA, 21 bp, homo sapiens
caacgctgttgcagttgctat

SEQ ID NO: 20549 - RNA, 21 nt, RNAi
acgcuguugcaguugcuauuu

SEQ ID NO: 20550 - RNA, 21 nt, RNAi
uuugcgacaacgucaacgaua

SEQ ID NO: 20551 - DNA, 21 bp, homo sapiens
cagttgctatgtatgtggttg

SEQ ID NO: 20552 - RNA, 21 nt, RNAi
guugcuauguaugugguuguu

SEQ ID NO: 20553 - RNA, 21 nt, RNAi
uucaacgauacauacaccaac

SEQ ID NO: 20554 - DNA, 21 bp, homo sapiens
cagaaaccgtggtggagttgc

SEQ ID NO: 20555 - RNA, 21 nt, RNAi
gaaaccgugguggaguugcuu

SEQ ID NO: 20556 - RNA, 21 nt, RNAi
uucuuuggcaccaccucaacg

SEQ ID NO: 20557 - DNA, 21 bp, homo sapiens
caatgatatccgaattattgg

SEQ ID NO: 20558 - RNA, 21 nt, RNAi
augauauccgaauuauugguu

SEQ ID NO: 20559 - RNA, 21 nt, RNAi
uuuacuauaggcuuaauaacc

SEQ ID NO: 20560 - DNA, 21 bp, homo sapiens
cactggagagcaagaagccaa

SEQ ID NO: 20561 - RNA, 21 nt, RNAi
cuggagagcaagaagccaauu

SEQ ID NO: 20562 - RNA, 21 nt, RNAi
uugaccucucguucuucgguu

SEQ ID NO: 20563 - DNA, 21 bp, homo sapiens
caactggtattctggctggag

SEQ ID NO: 20564 - RNA, 21 nt, RNAi
acugguauucuggcuggaguu

SEQ ID NO: 20565 - RNA, 21 nt, RNAi
uuugaccauaagaccgaccuc

SEQ ID NO: 20566 - DNA, 21 bp, homo sapiens
caaatatctcaggtgatcttg

SEQ ID NO: 20567 - RNA, 21 nt, RNAi
aauaucucaggugaucuuguu

SEQ ID NO: 20568 - RNA, 21 nt, RNAi
uuuuauagaguccacuagaac

SEQ ID NO: 20569 - DNA, 21 bp, homo sapiens
caggtgatcttgcagatcctc

SEQ ID NO: 20570 - RNA, 21 nt, RNAi
ggugaucuugcagauccucuu

SEQ ID NO: 20571 - RNA, 21 nt, RNAi
uuccacuagaacgucuaggag

SEQ ID NO: 20572 - DNA, 21 bp, homo sapiens
cagatcctcagtcagccatac

SEQ ID NO: 20573 - RNA, 21 nt, RNAi
gauccucagucagccauacuu

SEQ ID NO: 20574 - RNA, 21 nt, RNAi
uucuaggagucagucgguaug

SEQ ID NO: 20575 - DNA, 21 bp, homo sapiens
caaaggaacactcctagccat

SEQ ID NO: 20576 - RNA, 21 nt, RNAi
aaggaacacuccuagccauuu

SEQ ID NO: 20577 - RNA, 21 nt, RNAi
uuuuccuugugaggaucggua

SEQ ID NO: 20578 - DNA, 21 bp, homo sapiens
cattggtttacgtaggaattg

SEQ ID NO: 20579 - RNA, 21 nt, RNAi
uugguuuacguaggaauuguu

SEQ ID NO: 20580 - RNA, 21 nt, RNAi
uuaaccaaaugcauccuuaac

SEQ ID NO: 20581 - DNA, 21 bp, homo sapiens
cagtatctgtaggttcttgtg

SEQ ID NO: 20582 - RNA, 21 nt, RNAi
guaucuguagguucuuguguu

SEQ ID NO: 20583 - RNA, 21 nt, RNAi
uucauagacauccaagaacac

SEQ ID NO: 20584 - DNA, 21 bp, homo sapiens
cactggaaacgttaatgacac

SEQ ID NO: 20585 - RNA, 21 nt, RNAi
cuggaaacguuaaugacacuu

SEQ ID NO: 20586 - RNA, 21 nt, RNAi
uugaccuuugcaauuacugug

SEQ ID NO: 20587 - DNA, 21 bp, homo sapiens
cactatcgtaacagagctaac

SEQ ID NO: 20588 - RNA, 21 nt, RNAi
cuaucguaacagagcuaacuu

SEQ ID NO: 20589 - RNA, 21 nt, RNAi
uugauagcauugucucgauug

SEQ ID NO: 20590 - DNA, 21 bp, homo sapiens
cagagctaacaaactgtactt

SEQ ID NO: 20591 - RNA, 21 nt, RNAi
gagcuaacaaacuguacuuuu

SEQ ID NO: 20592 - RNA, 21 nt, RNAi
uucucgauuguuugacaugaa

SEQ ID NO: 20593 - DNA, 21 bp, homo sapiens
caaactgtacttctgcagcct

SEQ ID NO: 20594 - RNA, 21 nt, RNAi
aacuguacuucugcagccuuu

SEQ ID NO: 20595 - RNA, 21 nt, RNAi
uuuugacaugaagacgucgga

SEQ ID NO: 20596 - DNA, 21 bp, homo sapiens
cagcctgcaaattaaactttg

SEQ ID NO: 20597 - RNA, 21 nt, RNAi
gccugcaaauuaaacuuuguu

SEQ ID NO: 20598 - RNA, 21 nt, RNAi
uucggacguuuaauuugaaac

SEQ ID NO: 20599 - DNA, 21 bp, homo sapiens
catcttgtgaaagcagtcctt

SEQ ID NO: 20600 - RNA, 21 nt, RNAi
ucuugugaaagcaguccuuuu

SEQ ID NO: 20601 - RNA, 21 nt, RNAi
uuagaacacuuucgucaggaa

SEQ ID NO: 20602 - DNA, 21 bp, homo sapiens
cagtccttgttcctatggcct

SEQ ID NO: 20603 - RNA, 21 nt, RNAi
guccuuguuccuauggccuuu

SEQ ID NO: 20604 - RNA, 21 nt, RNAi
uucaggaacaaggauaccgga

SEQ ID NO: 20605 - DNA, 21 bp, homo sapiens
caacttccaggtaatgagtat

SEQ ID NO: 20606 - RNA, 21 nt, RNAi
acuuccagguaaugaguauuu

SEQ ID NO: 20607 - RNA, 21 nt, RNAi
uuugaagguccauuacucaua

SEQ ID NO: 20608 - DNA, 21 bp, homo sapiens
caggtaatgagtatggtgtca

SEQ ID NO: 20609 - RNA, 21 nt, RNAi
gguaaugaguauggugucauu

SEQ ID NO: 20610 - RNA, 21 nt, RNAi
uuccauuacucauaccacagu

SEQ ID NO: 20611 - DNA, 21 bp, homo sapiens
caggatttacaccactaattt

SEQ ID NO: 20612 - RNA, 21 nt, RNAi
ggauuuacaccacuaauuuuu

SEQ ID NO: 20613 - RNA, 21 nt, RNAi
uuccuaaauguggugauuaaa

SEQ ID NO: 20614 - DNA, 21 bp, homo sapiens
caccactaatttctgcaggta

SEQ ID NO: 20615 - RNA, 21 nt, RNAi
ccacuaauuucugcagguauu

SEQ ID NO: 20616 - RNA, 21 nt, RNAi
uuggugauuaaagacguccau

SEQ ID NO: 20617 - DNA, 21 bp, homo sapiens
cactaatttctgcaggtatat

SEQ ID NO: 20618 - RNA, 21 nt, RNAi
cuaauuucugcagguauauuu

SEQ ID NO: 20619 - RNA, 21 nt, RNAi
uugauuaaagacguccauaua

SEQ ID NO: 20620 - DNA, 21 bp, homo sapiens
cagccactctttcttcagcat

SEQ ID NO: 20621 - RNA, 21 nt, RNAi
gccacucuuucuucagcauuu

SEQ ID NO: 20622 - RNA, 21 nt, RNAi
uucggugagaaagaagucgua

SEQ ID NO: 20623 - DNA, 21 bp, homo sapiens
cactctttcttcagcattagc

SEQ ID NO: 20624 - RNA, 21 nt, RNAi
cucuuucuucagcauuagcuu

SEQ ID NO: 20625 - RNA, 21 nt, RNAi
uugagaaagaagucguaaucg

SEQ ID NO: 20626 - DNA, 21 bp, homo sapiens
caggctctatgtaaggacaac

SEQ ID NO: 20627 - RNA, 21 nt, RNAi
ggcucuauguaaggacaacuu

SEQ ID NO: 20628 - RNA, 21 nt, RNAi
uuccgagauacauuccuguug

SEQ ID NO: 20629 - DNA, 21 bp, homo sapiens
cagctttccagatgtttgcta

SEQ ID NO: 20630 - RNA, 21 nt, RNAi
gcuuuccagauguuugcuauu

SEQ ID NO: 20631 - RNA, 21 nt, RNAi
uucgaaaggucuacaaacgau

SEQ ID NO: 20632 - DNA, 21 bp, homo sapiens
cagatgtttgctaaaggttat

SEQ ID NO: 20633 - RNA, 21 nt, RNAi
gauguuugcuaaagguuauuu

SEQ ID NO: 20634 - RNA, 21 nt, RNAi
uucuacaaacgauuuccaaua

SEQ ID NO: 20635 - DNA, 21 bp, homo sapiens
cattcttaattgcacttggat

SEQ ID NO: 20636 - RNA, 21 nt, RNAi
uucuuaauugcacuuggauuu

SEQ ID NO: 20637 - RNA, 21 nt, RNAi
uuaagaauuaacgugaaccua

SEQ ID NO: 20638 - DNA, 21 bp, homo sapiens
cacttggattcatcttaattg

SEQ ID NO: 20639 - RNA, 21 nt, RNAi
cuuggauucaucuuaauuguu

SEQ ID NO: 20640 - RNA, 21 nt, RNAi
uugaaccuaaguagaauuaac

SEQ ID NO: 20641 - DNA, 21 bp, homo sapiens
catcttaattgctgaactgaa

SEQ ID NO: 20642 - RNA, 21 nt, RNAi
ucuuaauugcugaacugaauu

SEQ ID NO: 20643 - RNA, 21 nt, RNAi
uuagaauuaacgacuugacuu

SEQ ID NO: 20644 - DNA, 21 bp, homo sapiens
caccaattatctcaaacttct

SEQ ID NO: 20645 - RNA, 21 nt, RNAi
ccaauuaucucaaacuucuuu

SEQ ID NO: 20646 - RNA, 21 nt, RNAi
uugguuaauagaguuugaaga

SEQ ID NO: 20647 - DNA, 21 bp, homo sapiens
caattatctcaaacttcttcc

SEQ ID NO: 20648 - RNA, 21 nt, RNAi
auuaucucaaacuucuuccuu

SEQ ID NO: 20649 - RNA, 21 nt, RNAi
uuuaauagaguuugaagaagg

SEQ ID NO: 20650 - DNA, 21 bp, homo sapiens
caaacttcttccttgcatcat

SEQ ID NO: 20651 - RNA, 21 nt, RNAi
aacuucuuccuugcaucauuu

SEQ ID NO: 20652 - RNA, 21 nt, RNAi
uuuugaagaaggaacguagua

SEQ ID NO: 20653 - DNA, 21 bp, homo sapiens
cagtattccatgcatcacttg

SEQ ID NO: 20654 - RNA, 21 nt, RNAi
guauuccaugcaucacuuguu

SEQ ID NO: 20655 - RNA, 21 nt, RNAi
uucauaagguacguagugaac

SEQ ID NO: 20656 - DNA, 21 bp, homo sapiens
caggatggcgtcctgcattca

SEQ ID NO: 20657 - RNA, 21 nt, RNAi
ggauggcguccugcauucauu

SEQ ID NO: 20658 - RNA, 21 nt, RNAi
uuccuaccgcaggacguaagu

SEQ ID NO: 20659 - DNA, 21 bp, homo sapiens
caaatactacaacatgtggat

SEQ ID NO: 20660 - RNA, 21 nt, RNAi
aauacuacaacauguggauuu

SEQ ID NO: 20661 - RNA, 21 nt, RNAi
uuuuaugauguuguacaccua

SEQ ID NO: 20662 - DNA, 21 bp, homo sapiens
caacatgtggatatcacttct

SEQ ID NO: 20663 - RNA, 21 nt, RNAi
acauguggauaucacuucuuu

SEQ ID NO: 20664 - RNA, 21 nt, RNAi
uuuguacaccuauagugaaga

SEQ ID NO: 20665 - DNA, 21 bp, homo sapiens
catgtggatatcacttcttgg

SEQ ID NO: 20666 - RNA, 21 nt, RNAi
uguggauaucacuucuugguu

SEQ ID NO: 20667 - RNA, 21 nt, RNAi
uuacaccuauagugaagaacc

SEQ ID NO: 20668 - DNA, 21 bp, homo sapiens
cacttcttggagcaattcttt

SEQ ID NO: 20669 - RNA, 21 nt, RNAi
cuucuuggagcaauucuuuuu

SEQ ID NO: 20670 - RNA, 21 nt, RNAi
uugaagaaccucguuaagaaa

SEQ ID NO: 20671 - DNA, 21 bp, homo sapiens
cattgctaacatatgtgatag

SEQ ID NO: 20672 - RNA, 21 nt, RNAi
uugcuaacauaugugauaguu

SEQ ID NO: 20673 - RNA, 21 nt, RNAi
uuaacgauuguauacacuauc

SEQ ID NO: 20674 - DNA, 21 bp, homo sapiens
cactgcagcattcaattcgtc

SEQ ID NO: 20675 - RNA, 21 nt, RNAi
cugcagcauucaauucgucuu

SEQ ID NO: 20676 - RNA, 21 nt, RNAi
uugacgucguaaguuaagcag

SEQ ID NO: 20677 - DNA, 21 bp, homo sapiens
cagcattcaattcgtctttct

SEQ ID NO: 20678 - RNA, 21 nt, RNAi
gcauucaauucgucuuucuuu

SEQ ID NO: 20679 - RNA, 21 nt, RNAi
uucguaaguuaagcagaaaga

SEQ ID NO: 20680 - DNA, 21 bp, homo sapiens
cattcaattcgtctttctgga

SEQ ID NO: 20681 - RNA, 21 nt, RNAi
uucaauucgucuuucuggauu

SEQ ID NO: 20682 - RNA, 21 nt, RNAi
uuaaguuaagcagaaagaccu

SEQ ID NO: 20683 - DNA, 21 bp, homo sapiens
caattcgtctttctggagtgg

SEQ ID NO: 20684 - RNA, 21 nt, RNAi
auucgucuuucuggagugguu

SEQ ID NO: 20685 - RNA, 21 nt, RNAi
uuuaagcagaaagaccucacc

SEQ ID NO: 20686 - DNA, 21 bp, homo sapiens
cacagtgtcttgttatgacag

SEQ ID NO: 20687 - RNA, 21 nt, RNAi
cagugucuuguuaugacaguu

SEQ ID NO: 20688 - RNA, 21 nt, RNAi
uugucacagaacaauacuguc

SEQ ID NO: 20689 - DNA, 21 bp, homo sapiens
cagtgtcttgttatgacaggt

SEQ ID NO: 20690 - RNA, 21 nt, RNAi
gugucuuguuaugacagguuu

SEQ ID NO: 20691 - RNA, 21 nt, RNAi
uucacagaacaauacugucca

SEQ ID NO: 20692 - DNA, 21 bp, homo sapiens
caggtgctccaaactcacgtc

SEQ ID NO: 20693 - RNA, 21 nt, RNAi
ggugcuccaaacucacgucuu

SEQ ID NO: 20694 - RNA, 21 nt, RNAi
uuccacgagguuugagugcag

SEQ ID NO: 20695 - DNA, 21 bp, homo sapiens
caaactcacgtccagctttac

SEQ ID NO: 20696 - RNA, 21 nt, RNAi
aacucacguccagcuuuacuu

SEQ ID NO: 20697 - RNA, 21 nt, RNAi
uuuugagugcaggucgaaaug

SEQ ID NO: 20698 - DNA, 21 bp, homo sapiens
cacgtccagctttacttcatc

SEQ ID NO: 20699 - RNA, 21 nt, RNAi
cguccagcuuuacuucaucuu

SEQ ID NO: 20700 - RNA, 21 nt, RNAi
uugcaggucgaaaugaaguag

SEQ ID NO: 20701 - DNA, 21 bp, homo sapiens
cagctttacttcatcttgttc

SEQ ID NO: 20702 - RNA, 21 nt, RNAi
gcuuuacuucaucuuguucuu

SEQ ID NO: 20703 - RNA, 21 nt, RNAi
uucgaaaugaaguagaacaag

SEQ ID NO: 20704 - DNA, 21 bp, homo sapiens
catcttgttcatgatttcaca

SEQ ID NO: 20705 - RNA, 21 nt, RNAi
ucuuguucaugauuucacauu

SEQ ID NO: 20706 - RNA, 21 nt, RNAi
uuagaacaaguacuaaagugu

SEQ ID NO: 20707 - DNA, 21 bp, homo sapiens
caagccatgaaagagatgtcc

SEQ ID NO: 20708 - RNA, 21 nt, RNAi
agccaugaaagagauguccuu

SEQ ID NO: 20709 - RNA, 21 nt, RNAi
uuucgguacuuucucuacagg

SEQ ID NO: 20710 - DNA, 21 bp, homo sapiens
catgaaagagatgtccatcga

SEQ ID NO: 20711 - RNA, 21 nt, RNAi
ugaaagagauguccaucgauu

SEQ ID NO: 20712 - RNA, 21 nt, RNAi
uuacuuucucuacagguagcu

SEQ ID NO: 20713 - DNA, 21 bp, homo sapiens
catcgatcaagccaaatatca

SEQ ID NO: 20714 - RNA, 21 nt, RNAi
ucgaucaagccaaauaucauu

SEQ ID NO: 20715 - RNA, 21 nt, RNAi
uuagcuaguucgguuuauagu

SEQ ID NO: 20716 - DNA, 21 bp, homo sapiens
caagccaaatatcagcgatgg

SEQ ID NO: 20717 - RNA, 21 nt, RNAi
agccaaauaucagcgaugguu

SEQ ID NO: 20718 - RNA, 21 nt, RNAi
uuucgguuuauagucgcuacc

SEQ ID NO: 20719 - DNA, 21 bp, homo sapiens
caaatatcagcgatggcttat

SEQ ID NO: 20720 - RNA, 21 nt, RNAi
aauaucagcgauggcuuauuu

SEQ ID NO: 20721 - RNA, 21 nt, RNAi
uuuuauagucgcuaccgaaua

SEQ ID NO: 20722 - DNA, 21 bp, homo sapiens
cagcgatggcttattaagaac

SEQ ID NO: 20723 - RNA, 21 nt, RNAi
gcgauggcuuauuaagaacuu

SEQ ID NO: 20724 - RNA, 21 nt, RNAi
uucgcuaccgaauaauucuug

SEQ ID NO: 20725 - DNA, 21 bp, homo sapiens
cagtacatgcagatgacttga

SEQ ID NO: 20726 - RNA, 21 nt, RNAi
guacaugcagaugacuugauu

SEQ ID NO: 20727 - RNA, 21 nt, RNAi
uucauguacgucuacugaacu

SEQ ID NO: 20728 - DNA, 21 bp, homo sapiens
catgcagatgacttgagagaa

SEQ ID NO: 20729 - RNA, 21 nt, RNAi
ugcagaugacuugagagaauu

SEQ ID NO: 20730 - RNA, 21 nt, RNAi
uuacgucuacugaacucucuu

SEQ ID NO: 20731 - DNA, 21 bp, homo sapiens
cagatgacttgagagaaggtg

SEQ ID NO: 20732 - RNA, 21 nt, RNAi
gaugacuugagagaagguguu

SEQ ID NO: 20733 - RNA, 21 nt, RNAi
uucuacugaacucucuuccac

SEQ ID NO: 20734 - DNA, 21 bp, homo sapiens
cacagtatttgatgcaggctg

SEQ ID NO: 20735 - RNA, 21 nt, RNAi
caguauuugaugcaggcuguu

SEQ ID NO: 20736 - RNA, 21 nt, RNAi
uugucauaaacuacguccgac

SEQ ID NO: 20737 - DNA, 21 bp, homo sapiens
cagtatttgatgcaggctgct

SEQ ID NO: 20738 - RNA, 21 nt, RNAi
guauuugaugcaggcugcuuu

SEQ ID NO: 20739 - RNA, 21 nt, RNAi
uucauaaacuacguccgacga

SEQ ID NO: 20740 - DNA, 21 bp, homo sapiens
caggctgctggtcttggtcgt

SEQ ID NO: 20741 - RNA, 21 nt, RNAi
ggcugcuggucuuggucguuu

SEQ ID NO: 20742 - RNA, 21 nt, RNAi
uuccgacgaccagaaccagca

SEQ ID NO: 20743 - DNA, 21 bp, homo sapiens
caaacacacttgtccttggat

SEQ ID NO: 20744 - RNA, 21 nt, RNAi
aacacacuuguccuuggauuu

SEQ ID NO: 20745 - RNA, 21 nt, RNAi
uuuugugugaacaggaaccua

SEQ ID NO: 20746 - DNA, 21 bp, homo sapiens
cacacttgtccttggatttaa

SEQ ID NO: 20747 - RNA, 21 nt, RNAi
cacuuguccuuggauuuaauu

SEQ ID NO: 20748 - RNA, 21 nt, RNAi
uugugaacaggaaccuaaauu

SEQ ID NO: 20749 - DNA, 21 bp, homo sapiens
cacttgtccttggatttaaga

SEQ ID NO: 20750 - RNA, 21 nt, RNAi
cuuguccuuggauuuaagauu

SEQ ID NO: 20751 - RNA, 21 nt, RNAi
uugaacaggaaccuaaauucu

SEQ ID NO: 20752 - DNA, 21 bp, homo sapiens
catacaatatggagtagtggt

SEQ ID NO: 20753 - RNA, 21 nt, RNAi
uacaauauggaguagugguuu

SEQ ID NO: 20754 - RNA, 21 nt, RNAi
uuauguuauaccucaucacca

SEQ ID NO: 20755 - DNA, 21 bp, homo sapiens
caatatggagtagtggttatt

SEQ ID NO: 20756 - RNA, 21 nt, RNAi
auauggaguagugguuauuuu

SEQ ID NO: 20757 - RNA, 21 nt, RNAi
uuuauaccucaucaccaauaa

SEQ ID NO: 20758 - DNA, 21 bp, homo sapiens
catcttcaaggacaagaagaa

SEQ ID NO: 20759 - RNA, 21 nt, RNAi
ucuucaaggacaagaagaauu

SEQ ID NO: 20760 - RNA, 21 nt, RNAi
uuagaaguuccuguucuucuu

SEQ ID NO: 20761 - DNA, 21 bp, homo sapiens
caaggacaagaagaattattg

SEQ ID NO: 20762 - RNA, 21 nt, RNAi
aggacaagaagaauuauuguu

SEQ ID NO: 20763 - RNA, 21 nt, RNAi
uuuccuguucuucuuaauaac

SEQ ID NO: 20764 - DNA, 21 bp, homo sapiens
catcacaagagaaatctcctg

SEQ ID NO: 20765 - RNA, 21 nt, RNAi
ucacaagagaaaucuccuguu

SEQ ID NO: 20766 - RNA, 21 nt, RNAi
uuaguguucucuuuagaggac

SEQ ID NO: 20767 - DNA, 21 bp, homo sapiens
cacaagagaaatctcctggca

SEQ ID NO: 20768 - RNA, 21 nt, RNAi
caagagaaaucuccuggcauu

SEQ ID NO: 20769 - RNA, 21 nt, RNAi
uuguucucuuuagaggaccgu

SEQ ID NO: 20770 - DNA, 21 bp, homo sapiens
caagagaaatctcctggcacc

SEQ ID NO: 20771 - RNA, 21 nt, RNAi
agagaaaucuccuggcaccuu

SEQ ID NO: 20772 - RNA, 21 nt, RNAi
uuucucuuuagaggaccgugg

SEQ ID NO: 20773 - DNA, 21 bp, homo sapiens
caccaaggatgtggtagtaag

SEQ ID NO: 20774 - RNA, 21 nt, RNAi
ccaaggaugugguaguaaguu

SEQ ID NO: 20775 - RNA, 21 nt, RNAi
uugguuccuacaccaucauuc

SEQ ID NO: 20776 - DNA, 21 bp, homo sapiens
caaggatgtggtagtaagtgt

SEQ ID NO: 20777 - RNA, 21 nt, RNAi
aggaugugguaguaaguguuu

SEQ ID NO: 20778 - RNA, 21 nt, RNAi
uuuccuacaccaucauucaca

SEQ ID NO: 20779 - DNA, 21 bp, homo sapiens
caattacacacaaagttgagg

SEQ ID NO: 20780 - RNA, 21 nt, RNAi
auuacacacaaaguugagguu

SEQ ID NO: 20781 - RNA, 21 nt, RNAi
uuuaauguguguuucaacucc

SEQ ID NO: 20782 - DNA, 21 bp, homo sapiens
cacacaaagttgaggaagagg

SEQ ID NO: 20783 - RNA, 21 nt, RNAi
cacaaaguugaggaagagguu

SEQ ID NO: 20784 - RNA, 21 nt, RNAi
uuguguuucaacuccuucucc

SEQ ID NO: 20785 - DNA, 21 bp, homo sapiens
cacaaagttgaggaagaggat

SEQ ID NO: 20786 - RNA, 21 nt, RNAi
caaaguugaggaagaggauuu

SEQ ID NO: 20787 - RNA, 21 nt, RNAi
uuguuucaacuccuucuccua

SEQ ID NO: 20788 - DNA, 21 bp, homo sapiens
caaagttgaggaagaggatgg

SEQ ID NO: 20789 - RNA, 21 nt, RNAi
aaguugaggaagaggaugguu

SEQ ID NO: 20790 - RNA, 21 nt, RNAi
uuuucaacuccuucuccuacc

SEQ ID NO: 20791 - DNA, 21 bp, homo sapiens
caagactgcaactcaaccact

SEQ ID NO: 20792 - RNA, 21 nt, RNAi
agacugcaacucaaccacuuu

SEQ ID NO: 20793 - RNA, 21 nt, RNAi
uuucugacguugaguugguga

SEQ ID NO: 20794 - DNA, 21 bp, homo sapiens
cagagtattcattggtggaaa

SEQ ID NO: 20795 - RNA, 21 nt, RNAi
gaguauucauugguggaaauu

SEQ ID NO: 20796 - RNA, 21 nt, RNAi
uucucauaaguaaccaccuuu

SEQ ID NO: 20797 - DNA, 21 bp, homo sapiens
cattggtggaaagataaacag

SEQ ID NO: 20798 - RNA, 21 nt, RNAi
uugguggaaagauaaacaguu

SEQ ID NO: 20799 - RNA, 21 nt, RNAi
uuaaccaccuuucuauuuguc

SEQ ID NO: 20800 - DNA, 21 bp, homo sapiens
cagaatagaccatgaccggag

SEQ ID NO: 20801 - RNA, 21 nt, RNAi
gaauagaccaugaccggaguu

SEQ ID NO: 20802 - RNA, 21 nt, RNAi
uucuuaucugguacuggccuc

SEQ ID NO: 20803 - DNA, 21 bp, homo sapiens
catgaccggagagcgatggct

SEQ ID NO: 20804 - RNA, 21 nt, RNAi
ugaccggagagcgauggcuuu

SEQ ID NO: 20805 - RNA, 21 nt, RNAi
uuacuggccucucgcuaccga

SEQ ID NO: 20806 - DNA, 21 bp, homo sapiens
catggttctaggagatatcaa

SEQ ID NO: 20807 - RNA, 21 nt, RNAi
ugguucuaggagauaucaauu

SEQ ID NO: 20808 - RNA, 21 nt, RNAi
uuaccaagauccucuauaguu

SEQ ID NO: 20809 - DNA, 21 bp, homo sapiens
caataccaaaccaaagaaaga

SEQ ID NO: 20810 - RNA, 21 nt, RNAi
auaccaaaccaaagaaagauu

SEQ ID NO: 20811 - RNA, 21 nt, RNAi
uuuaugguuugguuucuuucu

SEQ ID NO: 20812 - DNA, 21 bp, homo sapiens
cattgagccatacagacttca

SEQ ID NO: 20813 - RNA, 21 nt, RNAi
uugagccauacagacuucauu

SEQ ID NO: 20814 - RNA, 21 nt, RNAi
uuaacucgguaugucugaagu

SEQ ID NO: 20815 - DNA, 21 bp, homo sapiens
catacagacttcatgaagatg

SEQ ID NO: 20816 - RNA, 21 nt, RNAi
uacagacuucaugaagauguu

SEQ ID NO: 20817 - RNA, 21 nt, RNAi
uuaugucugaaguacuucuac

SEQ ID NO: 20818 - DNA, 21 bp, homo sapiens
cagacttcatgaagatgataa

SEQ ID NO: 20819 - RNA, 21 nt, RNAi
gacuucaugaagaugauaauu

SEQ ID NO: 20820 - RNA, 21 nt, RNAi
uucugaaguacuucuacuauu

SEQ ID NO: 20821 - DNA, 21 bp, homo sapiens
catgaagatgataaagagcaa

SEQ ID NO: 20822 - RNA, 21 nt, RNAi
ugaagaugauaaagagcaauu

SEQ ID NO: 20823 - RNA, 21 nt, RNAi
uuacuucuacuauuucucguu

SEQ ID NO: 20824 - DNA, 21 bp, homo sapiens
catggcgaataacagataatg

SEQ ID NO: 20825 - RNA, 21 nt, RNAi
uggcgaauaacagauaauguu

SEQ ID NO: 20826 - RNA, 21 nt, RNAi
uuaccgcuuauugucuauuac

SEQ ID NO: 20827 - DNA, 21 bp, homo sapiens
cagataatgagcttgaacttt

SEQ ID NO: 20828 - RNA, 21 nt, RNAi
gauaaugagcuugaacuuuuu

SEQ ID NO: 20829 - RNA, 21 nt, RNAi
uucuauuacucgaacuugaaa

SEQ ID NO: 20830 - DNA, 21 bp, homo sapiens
caagacataccggcagatcag

SEQ ID NO: 20831 - RNA, 21 nt, RNAi
agacauaccggcagaucaguu

SEQ ID NO: 20832 - RNA, 21 nt, RNAi
uuucuguauggccgucuaguc

SEQ ID NO: 20833 - DNA, 21 bp, homo sapiens
cataccggcagatcaggttaa

SEQ ID NO: 20834 - RNA, 21 nt, RNAi
uaccggcagaucagguuaauu

SEQ ID NO: 20835 - RNA, 21 nt, RNAi
uuauggccgucuaguccaauu

SEQ ID NO: 20836 - DNA, 21 bp, homo sapiens
cagatcaggttaaatgagtta

SEQ ID NO: 20837 - RNA, 21 nt, RNAi
gaucagguuaaaugaguuauu

SEQ ID NO: 20838 - RNA, 21 nt, RNAi
uucuaguccaauuuacucaau

SEQ ID NO: 20839 - DNA, 21 bp, homo sapiens
cattcaagcacagctaatatt

SEQ ID NO: 20840 - RNA, 21 nt, RNAi
uucaagcacagcuaauauuuu

SEQ ID NO: 20841 - RNA, 21 nt, RNAi
uuaaguucgugucgauuauaa

SEQ ID NO: 20842 - DNA, 21 bp, homo sapiens
caagcacagctaatattattg

SEQ ID NO: 20843 - RNA, 21 nt, RNAi
agcacagcuaauauuauuguu

SEQ ID NO: 20844 - RNA, 21 nt, RNAi
uuucgugucgauuauaauaac

SEQ ID NO: 20845 - DNA, 21 bp, homo sapiens
catggcatggttagaagctct

SEQ ID NO: 20846 - RNA, 21 nt, RNAi
uggcaugguuagaagcucuuu

SEQ ID NO: 20847 - RNA, 21 nt, RNAi
uuaccguaccaaucuucgaga

SEQ ID NO: 20848 - DNA, 21 bp, homo sapiens
catggttagaagctctatcta

SEQ ID NO: 20849 - RNA, 21 nt, RNAi
ugguuagaagcucuaucuauu

SEQ ID NO: 20850 - RNA, 21 nt, RNAi
uuaccaaucuucgagauagau

SEQ ID NO: 20851 - DNA, 21 bp, homo sapiens
caccaatcctcctagttcgtg

SEQ ID NO: 20852 - RNA, 21 nt, RNAi
ccaauccuccuaguucguguu

SEQ ID NO: 20853 - RNA, 21 nt, RNAi
uugguuaggaggaucaagcac

SEQ ID NO: 20854 - DNA, 21 bp, homo sapiens
catcagagtgtccttaccttc

SEQ ID NO: 20855 - RNA, 21 nt, RNAi
ucagaguguccuuaccuucuu

SEQ ID NO: 20856 - RNA, 21 nt, RNAi
uuagucucacaggaauggaag

SEQ ID NO: 20857 - DNA, 21 bp, homo sapiens
cagagtgtccttaccttctat

SEQ ID NO: 20858 - RNA, 21 nt, RNAi
gaguguccuuaccuucuauuu

SEQ ID NO: 20859 - RNA, 21 nt, RNAi
uucucacaggaauggaagaua

SEQ ID NO: 20860 - DNA, 21 bp, homo sapiens
cataaatgttctatacagtgg

SEQ ID NO: 20861 - RNA, 21 nt, RNAi
uaaauguucuauacagugguu

SEQ ID NO: 20862 - RNA, 21 nt, RNAi
uuauuuacaagauaugucacc

SEQ ID NO: 20863 - DNA, 21 bp, homo sapiens
cagaatggtacttcagtgcct

SEQ ID NO: 20864 - RNA, 21 nt, RNAi
gaaugguacuucagugccuuu

SEQ ID NO: 20865 - RNA, 21 nt, RNAi
uucuuaccaugaagucacgga

SEQ ID NO: 20866 - DNA, 21 bp, homo sapiens
cagtgcctagtgtagtaacct

SEQ ID NO: 20867 - RNA, 21 nt, RNAi
gugccuaguguaguaaccuuu

SEQ ID NO: 20868 - RNA, 21 nt, RNAi
uucacggaucacaucauugga

SEQ ID NO: 20869 - DNA, 21 bp, homo sapiens
caatgacacattaacatcaca

SEQ ID NO: 20870 - RNA, 21 nt, RNAi
augacacauuaacaucacauu

SEQ ID NO: 20871 - RNA, 21 nt, RNAi
uuuacuguguaauuguagugu

SEQ ID NO: 20872 - DNA, 21 bp, homo sapiens
cacattaacatcacaatggcg

SEQ ID NO: 20873 - RNA, 21 nt, RNAi
cauuaacaucacaauggcguu

SEQ ID NO: 20874 - RNA, 21 nt, RNAi
uuguaauuguaguguuaccgc

SEQ ID NO: 20875 - DNA, 21 bp, homo sapiens
cattaacatcacaatggcgaa

SEQ ID NO: 20876 - RNA, 21 nt, RNAi
uuaacaucacaauggcgaauu

SEQ ID NO: 20877 - RNA, 21 nt, RNAi
uuaauuguaguguuaccgcuu

SEQ ID NO: 20878 - DNA, 21 bp, homo sapiens
catcacaatggcgaatggtga

SEQ ID NO: 20879 - RNA, 21 nt, RNAi
ucacaauggcgaauggugauu

SEQ ID NO: 20880 - RNA, 21 nt, RNAi
uuaguguuaccgcuuaccacu

SEQ ID NO: 20881 - DNA, 21 bp, homo sapiens
cacaatggcgaatggtgactt

SEQ ID NO: 20882 - RNA, 21 nt, RNAi
caauggcgaauggugacuuuu

SEQ ID NO: 20883 - RNA, 21 nt, RNAi
uuguuaccgcuuaccacugaa

SEQ ID NO: 20884 - DNA, 21 bp, homo sapiens
cattaatttgaaagcacacag

SEQ ID NO: 20885 - RNA, 21 nt, RNAi
uuaauuugaaagcacacaguu

SEQ ID NO: 20886 - RNA, 21 nt, RNAi
uuaauuaaacuuucguguguc

SEQ ID NO: 20887 - DNA, 21 bp, homo sapiens
cacacaggaaagcttgctcca

SEQ ID NO: 20888 - RNA, 21 nt, RNAi
cacaggaaagcuugcuccauu

SEQ ID NO: 20889 - RNA, 21 nt, RNAi
uuguguccuuucgaacgaggu

SEQ ID NO: 20890 - DNA, 21 bp, homo sapiens
cacaggaaagcttgctccatt

SEQ ID NO: 20891 - RNA, 21 nt, RNAi
caggaaagcuugcuccauuuu

SEQ ID NO: 20892 - RNA, 21 nt, RNAi
uuguccuuucgaacgagguaa

SEQ ID NO: 20893 - DNA, 21 bp, homo sapiens
caggaaagcttgctccattga

SEQ ID NO: 20894 - RNA, 21 nt, RNAi
ggaaagcuugcuccauugauu

SEQ ID NO: 20895 - RNA, 21 nt, RNAi
uuccuuucgaacgagguaacu

SEQ ID NO: 20896 - DNA, 21 bp, homo sapiens
cattgataacgtgtatggaga

SEQ ID NO: 20897 - RNA, 21 nt, RNAi
uugauaacguguauggagauu

SEQ ID NO: 20898 - RNA, 21 nt, RNAi
uuaacuauugcacauaccucu

SEQ ID NO: 20899 - DNA, 21 bp, homo sapiens
catatctcaatcttaatggtg

SEQ ID NO: 20900 - RNA, 21 nt, RNAi
uaucucaaucuuaaugguguu

SEQ ID NO: 20901 - RNA, 21 nt, RNAi
uuauagaguuagaauuaccac

SEQ ID NO: 20902 - DNA, 21 bp, homo sapiens
caatcttaatggtgattcttc

SEQ ID NO: 20903 - RNA, 21 nt, RNAi
aucuuaauggugauucuucuu

SEQ ID NO: 20904 - RNA, 21 nt, RNAi
uuuagaauuaccacuaagaag

SEQ ID NO: 20905 - DNA, 21 bp, homo sapiens
gagccagagccgtttccaggt

SEQ ID NO: 20906 - RNA, 21 nt, RNAi
gccagagccguuuccagguuu

SEQ ID NO: 20907 - RNA, 21 nt, RNAi
uucggucucggcaaaggucca

SEQ ID NO: 20908 - DNA, 21 bp, homo sapiens
gagccgtttccaggtggacct

SEQ ID NO: 20909 - RNA, 21 nt, RNAi
gccguuuccagguggaccuuu

SEQ ID NO: 20910 - RNA, 21 nt, RNAi
uucggcaaagguccaccugga

SEQ ID NO: 20911 - DNA, 21 bp, homo sapiens
gacctggtttccgagaacgcc

SEQ ID NO: 20912 - RNA, 21 nt, RNAi
ccugguuuccgagaacgccuu

SEQ ID NO: 20913 - RNA, 21 nt, RNAi
uuggaccaaaggcucuugcgg

SEQ ID NO: 20914 - DNA, 21 bp, homo sapiens
gagagcgagccagctaaaggc

SEQ ID NO: 20915 - RNA, 21 nt, RNAi
gagcgagccagcuaaaggcuu

SEQ ID NO: 20916 - RNA, 21 nt, RNAi
uucucgcucggucgauuuccg

SEQ ID NO: 20917 - DNA, 21 bp, homo sapiens
gagcgagccagctaaaggcag

SEQ ID NO: 20918 - RNA, 21 nt, RNAi
gcgagccagcuaaaggcaguu

SEQ ID NO: 20919 - RNA, 21 nt, RNAi
uucgcucggucgauuuccguc

SEQ ID NO: 20920 - DNA, 21 bp, homo sapiens
gagccagctaaaggcagcgag

SEQ ID NO: 20921 - RNA, 21 nt, RNAi
gccagcuaaaggcagcgaguu

SEQ ID NO: 20922 - RNA, 21 nt, RNAi
uucggucgauuuccgucgcuc

SEQ ID NO: 20923 - DNA, 21 bp, homo sapiens
gaagacagcctgtcagatgct

SEQ ID NO: 20924 - RNA, 21 nt, RNAi
agacagccugucagaugcuuu

SEQ ID NO: 20925 - RNA, 21 nt, RNAi
uuucugucggacagucuacga

SEQ ID NO: 20926 - DNA, 21 bp, homo sapiens
gacagcctgtcagatgctgcc

SEQ ID NO: 20927 - RNA, 21 nt, RNAi
cagccugucagaugcugccuu

SEQ ID NO: 20928 - RNA, 21 nt, RNAi
uugucggacagucuacgacgg

SEQ ID NO: 20929 - DNA, 21 bp, homo sapiens
gatcgatcactaccggcacac

SEQ ID NO: 20930 - RNA, 21 nt, RNAi
ucgaucacuaccggcacacuu

SEQ ID NO: 20931 - RNA, 21 nt, RNAi
uuagcuagugauggccgugug

SEQ ID NO: 20932 - DNA, 21 bp, homo sapiens
gatcactaccggcacacagcc

SEQ ID NO: 20933 - RNA, 21 nt, RNAi
ucacuaccggcacacagccuu

SEQ ID NO: 20934 - RNA, 21 nt, RNAi
uuagugauggccgugugucgg

SEQ ID NO: 20935 - DNA, 21 bp, homo sapiens
gagctccacgacgagctggaa

SEQ ID NO: 20936 - RNA, 21 nt, RNAi
gcuccacgacgagcuggaauu

SEQ ID NO: 20937 - RNA, 21 nt, RNAi
uucgaggugcugcucgaccuu

SEQ ID NO: 20938 - DNA, 21 bp, homo sapiens
gaagaaagtactccaaccaga

SEQ ID NO: 20939 - RNA, 21 nt, RNAi
agaaaguacuccaaccagauu

SEQ ID NO: 20940 - RNA, 21 nt, RNAi
uuucuuucaugagguuggucu

SEQ ID NO: 20941 - DNA, 21 bp, homo sapiens
gaaagtactccaaccagagat

SEQ ID NO: 20942 - RNA, 21 nt, RNAi
aaguacuccaaccagagauuu

SEQ ID NO: 20943 - RNA, 21 nt, RNAi
uuuucaugagguuggucucua

SEQ ID NO: 20944 - DNA, 21 bp, homo sapiens
gagatgctgtggtcacgtata

SEQ ID NO: 20945 - RNA, 21 nt, RNAi
gaugcuguggucacguauauu

SEQ ID NO: 20946 - RNA, 21 nt, RNAi
uucuacgacaccagugcauau

SEQ ID NO: 20947 - DNA, 21 bp, homo sapiens
gatgctgtggtcacgtatact

SEQ ID NO: 20948 - RNA, 21 nt, RNAi
ugcuguggucacguauacuuu

SEQ ID NO: 20949 - RNA, 21 nt, RNAi
uuacgacaccagugcauauga

SEQ ID NO: 20950 - DNA, 21 bp, homo sapiens
gaaagtaaaggagtcgtgaag

SEQ ID NO: 20951 - RNA, 21 nt, RNAi
aaguaaaggagucgugaaguu

SEQ ID NO: 20952 - RNA, 21 nt, RNAi
uuuucauuuccucagcacuuc

SEQ ID NO: 20953 - DNA, 21 bp, homo sapiens
gagtcgtgaagtttggctgga

SEQ ID NO: 20954 - RNA, 21 nt, RNAi
gucgugaaguuuggcuggauu

SEQ ID NO: 20955 - RNA, 21 nt, RNAi
uucagcacuucaaaccgaccu

SEQ ID NO: 20956 - DNA, 21 bp, homo sapiens
gaataggtctatcagtccttg

SEQ ID NO: 20957 - RNA, 21 nt, RNAi
auaggucuaucaguccuuguu

SEQ ID NO: 20958 - RNA, 21 nt, RNAi
uuuauccagauagucaggaac

SEQ ID NO: 20959 - DNA, 21 bp, homo sapiens
gatggccactgttgtgacaac

SEQ ID NO: 20960 - RNA, 21 nt, RNAi
uggccacuguugugacaacuu

SEQ ID NO: 20961 - RNA, 21 nt, RNAi
uuaccggugacaacacuguug

SEQ ID NO: 20962 - DNA, 21 bp, homo sapiens
gacaactatcacaggattgtc

SEQ ID NO: 20963 - RNA, 21 nt, RNAi
caacuaucacaggauugucuu

SEQ ID NO: 20964 - RNA, 21 nt, RNAi
uuguugauaguguccuaacag

SEQ ID NO: 20965 - DNA, 21 bp, homo sapiens
gattgtctacttcagcaatag

SEQ ID NO: 20966 - RNA, 21 nt, RNAi
uugucuacuucagcaauaguu

SEQ ID NO: 20967 - RNA, 21 nt, RNAi
uuaacagaugaagucguuauc

SEQ ID NO: 20968 - DNA, 21 bp, homo sapiens
gatttgtaagaggaggaggag

SEQ ID NO: 20969 - RNA, 21 nt, RNAi
uuuguaagaggaggaggaguu

SEQ ID NO: 20970 - RNA, 21 nt, RNAi
uuaaacauucuccuccuccuc

SEQ ID NO: 20971 - DNA, 21 bp, homo sapiens
gaggaggaggagcatattatt

SEQ ID NO: 20972 - RNA, 21 nt, RNAi
ggaggaggagcauauuauuuu

SEQ ID NO: 20973 - RNA, 21 nt, RNAi
uuccuccuccucguauaauaa

SEQ ID NO: 20974 - DNA, 21 bp, homo sapiens
gaggaggagcatattatttaa

SEQ ID NO: 20975 - RNA, 21 nt, RNAi
ggaggagcauauuauuuaauu

SEQ ID NO: 20976 - RNA, 21 nt, RNAi
uuccuccucguauaauaaauu

SEQ ID NO: 20977 - DNA, 21 bp, homo sapiens
gaatttggtggtgcaattggt

SEQ ID NO: 20978 - RNA, 21 nt, RNAi
auuugguggugcaauugguuu

SEQ ID NO: 20979 - RNA, 21 nt, RNAi
uuuaaaccaccacguuaacca

SEQ ID NO: 20980 - DNA, 21 bp, homo sapiens
gatttgcagaaaccgtggtgg

SEQ ID NO: 20981 - RNA, 21 nt, RNAi
uuugcagaaaccguggugguu

SEQ ID NO: 20982 - RNA, 21 nt, RNAi
uuaaacgucuuuggcaccacc

SEQ ID NO: 20983 - DNA, 21 bp, homo sapiens
gaaaccgtggtggagttgctt

SEQ ID NO: 20984 - RNA, 21 nt, RNAi
aaccgugguggaguugcuuuu

SEQ ID NO: 20985 - RNA, 21 nt, RNAi
uuuuggcaccaccucaacgaa

SEQ ID NO: 20986 - DNA, 21 bp, homo sapiens
gagttgcttaaggaacattcc

SEQ ID NO: 20987 - RNA, 21 nt, RNAi
guugcuuaaggaacauuccuu

SEQ ID NO: 20988 - RNA, 21 nt, RNAi
uucaacgaauuccuuguaagg

SEQ ID NO: 20989 - DNA, 21 bp, homo sapiens
gatgaaatcaatgatatccga

SEQ ID NO: 20990 - RNA, 21 nt, RNAi
ugaaaucaaugauauccgauu

SEQ ID NO: 20991 - RNA, 21 nt, RNAi
uuacuuuaguuacuauaggcu

SEQ ID NO: 20992 - DNA, 21 bp, homo sapiens
gatatccgaattattggagcc

SEQ ID NO: 20993 - RNA, 21 nt, RNAi
uauccgaauuauuggagccuu

SEQ ID NO: 20994 - RNA, 21 nt, RNAi
uuauaggcuuaauaaccucgg

SEQ ID NO: 20995 - DNA, 21 bp, homo sapiens
gaattattggagccattacag

SEQ ID NO: 20996 - RNA, 21 nt, RNAi
auuauuggagccauuacaguu

SEQ ID NO: 20997 - RNA, 21 nt, RNAi
uuuaauaaccucgguaauguc

SEQ ID NO: 20998 - DNA, 21 bp, homo sapiens
gagccattacagtcgtgattc

SEQ ID NO: 20999 - RNA, 21 nt, RNAi
gccauuacagucgugauucuu

SEQ ID NO: 21000 - RNA, 21 nt, RNAi
uucgguaaugucagcacuaag

SEQ ID NO: 21001 - DNA, 21 bp, homo sapiens
gatcctacttcttgctattgg

SEQ ID NO: 21002 - RNA, 21 nt, RNAi
uccuacuucuugcuauugguu

SEQ ID NO: 21003 - RNA, 21 nt, RNAi
uuaggaugaagaacgauaacc

SEQ ID NO: 21004 - DNA, 21 bp, homo sapiens
gatttcgtcataggaacattt

SEQ ID NO: 21005 - RNA, 21 nt, RNAi
uuucgucauaggaacauuuuu

SEQ ID NO: 21006 - RNA, 21 nt, RNAi
uuaaagcaguauccuuguaaa

SEQ ID NO: 21007 - DNA, 21 bp, homo sapiens
gagcaaatatctcaggtgatc

SEQ ID NO: 21008 - RNA, 21 nt, RNAi
gcaaauaucucaggugaucuu

SEQ ID NO: 21009 - RNA, 21 nt, RNAi
uucguuuauagaguccacuag

SEQ ID NO: 21010 - DNA, 21 bp, homo sapiens
gatcttgcagatcctcagtca

SEQ ID NO: 21011 - RNA, 21 nt, RNAi
ucuugcagauccucagucauu

SEQ ID NO: 21012 - RNA, 21 nt, RNAi
uuagaacgucuaggagucagu

SEQ ID NO: 21013 - DNA, 21 bp, homo sapiens
gaattgcagtatctgtaggtt

SEQ ID NO: 21014 - RNA, 21 nt, RNAi
auugcaguaucuguagguuuu

SEQ ID NO: 21015 - RNA, 21 nt, RNAi
uuuaacgucauagacauccaa

SEQ ID NO: 21016 - DNA, 21 bp, homo sapiens
gagatgccactggaaacgtta

SEQ ID NO: 21017 - RNA, 21 nt, RNAi
gaugccacuggaaacguuauu

SEQ ID NO: 21018 - RNA, 21 nt, RNAi
uucuacggugaccuuugcaau

SEQ ID NO: 21019 - DNA, 21 bp, homo sapiens
gatgccactggaaacgttaat

SEQ ID NO: 21020 - RNA, 21 nt, RNAi
ugccacuggaaacguuaauuu

SEQ ID NO: 21021 - RNA, 21 nt, RNAi
uuacggugaccuuugcaauua

SEQ ID NO: 21022 - DNA, 21 bp, homo sapiens
gaaacgttaatgacactatcg

SEQ ID NO: 21023 - RNA, 21 nt, RNAi
aacguuaaugacacuaucguu

SEQ ID NO: 21024 - RNA, 21 nt, RNAi
uuuugcaauuacugugauagc

SEQ ID NO: 21025 - DNA, 21 bp, homo sapiens
gacactatcgtaacagagcta

SEQ ID NO: 21026 - RNA, 21 nt, RNAi
cacuaucguaacagagcuauu

SEQ ID NO: 21027 - RNA, 21 nt, RNAi
uugugauagcauugucucgau

SEQ ID NO: 21028 - DNA, 21 bp, homo sapiens
gagctaacaaactgtacttct

SEQ ID NO: 21029 - RNA, 21 nt, RNAi
gcuaacaaacuguacuucuuu

SEQ ID NO: 21030 - RNA, 21 nt, RNAi
uucgauuguuugacaugaaga

SEQ ID NO: 21031 - DNA, 21 bp, homo sapiens
gaaagcagtccttgttcctat

SEQ ID NO: 21032 - RNA, 21 nt, RNAi
aagcaguccuuguuccuauuu

SEQ ID NO: 21033 - RNA, 21 nt, RNAi
uuuucgucaggaacaaggaua

SEQ ID NO: 21034 - DNA, 21 bp, homo sapiens
gaacaacttccaggtaatgag

SEQ ID NO: 21035 - RNA, 21 nt, RNAi
acaacuuccagguaaugaguu

SEQ ID NO: 21036 - RNA, 21 nt, RNAi
uuuguugaagguccauuacuc

SEQ ID NO: 21037 - DNA, 21 bp, homo sapiens
gagtatggtgtcaggatttac

SEQ ID NO: 21038 - RNA, 21 nt, RNAi
guauggugucaggauuuacuu

SEQ ID NO: 21039 - RNA, 21 nt, RNAi
uucauaccacaguccuaaaug

SEQ ID NO: 21040 - DNA, 21 bp, homo sapiens
gatttacaccactaatttctg

SEQ ID NO: 21041 - RNA, 21 nt, RNAi
uuuacaccacuaauuucuguu

SEQ ID NO: 21042 - RNA, 21 nt, RNAi
uuaaauguggugauuaaagac

SEQ ID NO: 21043 - DNA, 21 bp, homo sapiens
gatgtttgctaaaggttatgg

SEQ ID NO: 21044 - RNA, 21 nt, RNAi
uguuugcuaaagguuaugguu

SEQ ID NO: 21045 - RNA, 21 nt, RNAi
uuacaaacgauuuccaauacc

SEQ ID NO: 21046 - DNA, 21 bp, homo sapiens
gaacctcttcgtggctacatc

SEQ ID NO: 21047 - RNA, 21 nt, RNAi
accucuucguggcuacaucuu

SEQ ID NO: 21048 - RNA, 21 nt, RNAi
uuuggagaagcaccgauguag

SEQ ID NO: 21049 - DNA, 21 bp, homo sapiens
gattcatcttaattgctgaac

SEQ ID NO: 21050 - RNA, 21 nt, RNAi
uucaucuuaauugcugaacuu

SEQ ID NO: 21051 - RNA, 21 nt, RNAi
uuaaguagaauuaacgacuug

SEQ ID NO: 21052 - DNA, 21 bp, homo sapiens
gaactgaatgttattgcacca

SEQ ID NO: 21053 - RNA, 21 nt, RNAi
acugaauguuauugcaccauu

SEQ ID NO: 21054 - RNA, 21 nt, RNAi
uuugacuuacaauaacguggu

SEQ ID NO: 21055 - DNA, 21 bp, homo sapiens
gatggcgtcctgcattcaaat

SEQ ID NO: 21056 - RNA, 21 nt, RNAi
uggcguccugcauucaaauuu

SEQ ID NO: 21057 - RNA, 21 nt, RNAi
uuaccgcaggacguaaguuua

SEQ ID NO: 21058 - DNA, 21 bp, homo sapiens
gatatcacttcttggagcaat

SEQ ID NO: 21059 - RNA, 21 nt, RNAi
uaucacuucuuggagcaauuu

SEQ ID NO: 21060 - RNA, 21 nt, RNAi
uuauagugaagaaccucguua

SEQ ID NO: 21061 - DNA, 21 bp, homo sapiens
gagcaattctttgttgcatag

SEQ ID NO: 21062 - RNA, 21 nt, RNAi
gcaauucuuuguugcauaguu

SEQ ID NO: 21063 - RNA, 21 nt, RNAi
uucguuaagaaacaacguauc

SEQ ID NO: 21064 - DNA, 21 bp, homo sapiens
gacttacctgaatgcactgca

SEQ ID NO: 21065 - RNA, 21 nt, RNAi
cuuaccugaaugcacugcauu

SEQ ID NO: 21066 - RNA, 21 nt, RNAi
uugaauggacuuacgugacgu

SEQ ID NO: 21067 - DNA, 21 bp, homo sapiens
gaatgcactgcagcattcaat

SEQ ID NO: 21068 - RNA, 21 nt, RNAi
augcacugcagcauucaauuu

SEQ ID NO: 21069 - RNA, 21 nt, RNAi
uuuacgugacgucguaaguua

SEQ ID NO: 21070 - DNA, 21 bp, homo sapiens
gacaggtgctccaaactcacg

SEQ ID NO: 21071 - RNA, 21 nt, RNAi
caggugcuccaaacucacguu

SEQ ID NO: 21072 - RNA, 21 nt, RNAi
uuguccacgagguuugagugc

SEQ ID NO: 21073 - DNA, 21 bp, homo sapiens
gatgatctgtggccatgtaca

SEQ ID NO: 21074 - RNA, 21 nt, RNAi
ugaucuguggccauguacauu

SEQ ID NO: 21075 - RNA, 21 nt, RNAi
uuacuagacaccgguacaugu

SEQ ID NO: 21076 - DNA, 21 bp, homo sapiens
gatctgtggccatgtacatat

SEQ ID NO: 21077 - RNA, 21 nt, RNAi
ucuguggccauguacauauuu

SEQ ID NO: 21078 - RNA, 21 nt, RNAi
uuagacaccgguacauguaua

SEQ ID NO: 21079 - DNA, 21 bp, homo sapiens
gaagacaagccatgaaagaga

SEQ ID NO: 21080 - RNA, 21 nt, RNAi
agacaagccaugaaagagauu

SEQ ID NO: 21081 - RNA, 21 nt, RNAi
uuucuguucgguacuuucucu

SEQ ID NO: 21082 - DNA, 21 bp, homo sapiens
gacaagccatgaaagagatgt

SEQ ID NO: 21083 - RNA, 21 nt, RNAi
caagccaugaaagagauguuu

SEQ ID NO: 21084 - RNA, 21 nt, RNAi
uuguucgguacuuucucuaca

SEQ ID NO: 21085 - DNA, 21 bp, homo sapiens
gaaagagatgtccatcgatca

SEQ ID NO: 21086 - RNA, 21 nt, RNAi
aagagauguccaucgaucauu

SEQ ID NO: 21087 - RNA, 21 nt, RNAi
uuuucucuacagguagcuagu

SEQ ID NO: 21088 - DNA, 21 bp, homo sapiens
gagatgtccatcgatcaagcc

SEQ ID NO: 21089 - RNA, 21 nt, RNAi
gauguccaucgaucaagccuu

SEQ ID NO: 21090 - RNA, 21 nt, RNAi
uucuacagguagcuaguucgg

SEQ ID NO: 21091 - DNA, 21 bp, homo sapiens
gatgtccatcgatcaagccaa

SEQ ID NO: 21092 - RNA, 21 nt, RNAi
uguccaucgaucaagccaauu

SEQ ID NO: 21093 - RNA, 21 nt, RNAi
uuacagguagcuaguucgguu

SEQ ID NO: 21094 - DNA, 21 bp, homo sapiens
gatcaagccaaatatcagcga

SEQ ID NO: 21095 - RNA, 21 nt, RNAi
ucaagccaaauaucagcgauu

SEQ ID NO: 21096 - RNA, 21 nt, RNAi
uuaguucgguuuauagucgcu

SEQ ID NO: 21097 - DNA, 21 bp, homo sapiens
gatgacttgagagaaggtgca

SEQ ID NO: 21098 - RNA, 21 nt, RNAi
ugacuugagagaaggugcauu

SEQ ID NO: 21099 - RNA, 21 nt, RNAi
uuacugaacucucuuccacgu

SEQ ID NO: 21100 - DNA, 21 bp, homo sapiens
gacttgagagaaggtgcacag

SEQ ID NO: 21101 - RNA, 21 nt, RNAi
cuugagagaaggugcacaguu

SEQ ID NO: 21102 - RNA, 21 nt, RNAi
uugaacucucuuccacguguc

SEQ ID NO: 21103 - DNA, 21 bp, homo sapiens
gagagaaggtgcacagtattt

SEQ ID NO: 21104 - RNA, 21 nt, RNAi
gagaaggugcacaguauuuuu

SEQ ID NO: 21105 - RNA, 21 nt, RNAi
uucucuuccacgugucauaaa

SEQ ID NO: 21106 - DNA, 21 bp, homo sapiens
gagaaggtgcacagtatttga

SEQ ID NO: 21107 - RNA, 21 nt, RNAi
gaaggugcacaguauuugauu

SEQ ID NO: 21108 - RNA, 21 nt, RNAi
uucuuccacgugucauaaacu

SEQ ID NO: 21109 - DNA, 21 bp, homo sapiens
gaaggtgcacagtatttgatg

SEQ ID NO: 21110 - RNA, 21 nt, RNAi
aggugcacaguauuugauguu

SEQ ID NO: 21111 - RNA, 21 nt, RNAi
uuuccacgugucauaaacuac

SEQ ID NO: 21112 - DNA, 21 bp, homo sapiens
gatgcaggctgctggtcttgg

SEQ ID NO: 21113 - RNA, 21 nt, RNAi
ugcaggcugcuggucuugguu

SEQ ID NO: 21114 - RNA, 21 nt, RNAi
uuacguccgacgaccagaacc

SEQ ID NO: 21115 - DNA, 21 bp, homo sapiens
gaagccaaacacacttgtcct

SEQ ID NO: 21116 - RNA, 21 nt, RNAi
agccaaacacacuuguccuuu

SEQ ID NO: 21117 - RNA, 21 nt, RNAi
uuucgguuugugugaacagga

SEQ ID NO: 21118 - DNA, 21 bp, homo sapiens
gatttaagaaagattggttgc

SEQ ID NO: 21119 - RNA, 21 nt, RNAi
uuuaagaaagauugguugcuu

SEQ ID NO: 21120 - RNA, 21 nt, RNAi
uuaaauucuuucuaaccaacg

SEQ ID NO: 21121 - DNA, 21 bp, homo sapiens
gaaagattggttgcaagcaga

SEQ ID NO: 21122 - RNA, 21 nt, RNAi
aagauugguugcaagcagauu

SEQ ID NO: 21123 - RNA, 21 nt, RNAi
uuuucuaaccaacguucgucu

SEQ ID NO: 21124 - DNA, 21 bp, homo sapiens
gattggttgcaagcagatatg

SEQ ID NO: 21125 - RNA, 21 nt, RNAi
uugguugcaagcagauauguu

SEQ ID NO: 21126 - RNA, 21 nt, RNAi
uuaaccaacguucgucuauac

SEQ ID NO: 21127 - DNA, 21 bp, homo sapiens
gacatacaatatggagtagtg

SEQ ID NO: 21128 - RNA, 21 nt, RNAi
cauacaauauggaguaguguu

SEQ ID NO: 21129 - RNA, 21 nt, RNAi
uuguauguuauaccucaucac

SEQ ID NO: 21130 - DNA, 21 bp, homo sapiens
gagtagtggttattcgcctaa

SEQ ID NO: 21131 - RNA, 21 nt, RNAi
guagugguuauucgccuaauu

SEQ ID NO: 21132 - RNA, 21 nt, RNAi
uucaucaccaauaagcggauu

SEQ ID NO: 21133 - DNA, 21 bp, homo sapiens
gaaggtctggatatatctcat

SEQ ID NO: 21134 - RNA, 21 nt, RNAi
aggucuggauauaucucauuu

SEQ ID NO: 21135 - RNA, 21 nt, RNAi
uuuccagaccuauauagagua

SEQ ID NO: 21136 - DNA, 21 bp, homo sapiens
gatatatctcatcttcaagga

SEQ ID NO: 21137 - RNA, 21 nt, RNAi
uauaucucaucuucaaggauu

SEQ ID NO: 21138 - RNA, 21 nt, RNAi
uuauauagaguagaaguuccu

SEQ ID NO: 21139 - DNA, 21 bp, homo sapiens
gaattattgtcatcacaagag

SEQ ID NO: 21140 - RNA, 21 nt, RNAi
auuauugucaucacaagaguu

SEQ ID NO: 21141 - RNA, 21 nt, RNAi
uuuaauaacaguaguguucuc

SEQ ID NO: 21142 - DNA, 21 bp, homo sapiens
gagaaatctcctggcaccaag

SEQ ID NO: 21143 - RNA, 21 nt, RNAi
gaaaucuccuggcaccaaguu

SEQ ID NO: 21144 - RNA, 21 nt, RNAi
uucuuuagaggaccgugguuc

SEQ ID NO: 21145 - DNA, 21 bp, homo sapiens
gaaatctcctggcaccaagga

SEQ ID NO: 21146 - RNA, 21 nt, RNAi
aaucuccuggcaccaaggauu

SEQ ID NO: 21147 - RNA, 21 nt, RNAi
uuuuagaggaccgugguuccu

SEQ ID NO: 21148 - DNA, 21 bp, homo sapiens
gatgtggtagtaagtgtggaa

SEQ ID NO: 21149 - RNA, 21 nt, RNAi
ugugguaguaaguguggaauu

SEQ ID NO: 21150 - RNA, 21 nt, RNAi
uuacaccaucauucacaccuu

SEQ ID NO: 21151 - DNA, 21 bp, homo sapiens
gatttagatacttccaaacca

SEQ ID NO: 21152 - RNA, 21 nt, RNAi
uuuagauacuuccaaaccauu

SEQ ID NO: 21153 - RNA, 21 nt, RNAi
uuaaaucuaugaagguuuggu

SEQ ID NO: 21154 - DNA, 21 bp, homo sapiens
gatacttccaaaccactcagt

SEQ ID NO: 21155 - RNA, 21 nt, RNAi
uacuuccaaaccacucaguuu

SEQ ID NO: 21156 - RNA, 21 nt, RNAi
uuaugaagguuuggugaguca

SEQ ID NO: 21157 - DNA, 21 bp, homo sapiens
gaggaagaggatggcaagact

SEQ ID NO: 21158 - RNA, 21 nt, RNAi
ggaagaggauggcaagacuuu

SEQ ID NO: 21159 - RNA, 21 nt, RNAi
uuccuucuccuaccguucuga

SEQ ID NO: 21160 - DNA, 21 bp, homo sapiens
gaagaggatggcaagactgca

SEQ ID NO: 21161 - RNA, 21 nt, RNAi
agaggauggcaagacugcauu

SEQ ID NO: 21162 - RNA, 21 nt, RNAi
uuucuccuaccguucugacgu

SEQ ID NO: 21163 - DNA, 21 bp, homo sapiens
gaggatggcaagactgcaact

SEQ ID NO: 21164 - RNA, 21 nt, RNAi
ggauggcaagacugcaacuuu

SEQ ID NO: 21165 - RNA, 21 nt, RNAi
uuccuaccguucugacguuga

SEQ ID NO: 21166 - DNA, 21 bp, homo sapiens
gatggcaagactgcaactcaa

SEQ ID NO: 21167 - RNA, 21 nt, RNAi
uggcaagacugcaacucaauu

SEQ ID NO: 21168 - RNA, 21 nt, RNAi
uuaccguucugacguugaguu

SEQ ID NO: 21169 - DNA, 21 bp, homo sapiens
gactgcaactcaaccactgtt

SEQ ID NO: 21170 - RNA, 21 nt, RNAi
cugcaacucaaccacuguuuu

SEQ ID NO: 21171 - RNA, 21 nt, RNAi
uugacguugaguuggugacaa

SEQ ID NO: 21172 - DNA, 21 bp, homo sapiens
gaagctagtacacagtttcag

SEQ ID NO: 21173 - RNA, 21 nt, RNAi
agcuaguacacaguuucaguu

SEQ ID NO: 21174 - RNA, 21 nt, RNAi
uuucgaucaugugucaaaguc

SEQ ID NO: 21175 - DNA, 21 bp, homo sapiens
gaatactattgatgtctggtg

SEQ ID NO: 21176 - RNA, 21 nt, RNAi
auacuauugaugucugguguu

SEQ ID NO: 21177 - RNA, 21 nt, RNAi
uuuaugauaacuacagaccac

SEQ ID NO: 21178 - DNA, 21 bp, homo sapiens
gatgatggaggtttgacctta

SEQ ID NO: 21179 - RNA, 21 nt, RNAi
ugauggagguuugaccuuauu

SEQ ID NO: 21180 - RNA, 21 nt, RNAi
uuacuaccuccaaacuggaau

SEQ ID NO: 21181 - DNA, 21 bp, homo sapiens
gatggaggtttgaccttattg

SEQ ID NO: 21182 - RNA, 21 nt, RNAi
uggagguuugaccuuauuguu

SEQ ID NO: 21183 - RNA, 21 nt, RNAi
uuaccuccaaacuggaauaac

SEQ ID NO: 21184 - DNA, 21 bp, homo sapiens
gaggtttgaccttattgatac

SEQ ID NO: 21185 - RNA, 21 nt, RNAi
gguuugaccuuauugauacuu

SEQ ID NO: 21186 - RNA, 21 nt, RNAi
uuccaaacuggaauaacuaug

SEQ ID NO: 21187 - DNA, 21 bp, homo sapiens
gaccttattgataccttacct

SEQ ID NO: 21188 - RNA, 21 nt, RNAi
ccuuauugauaccuuaccuuu

SEQ ID NO: 21189 - RNA, 21 nt, RNAi
uuggaauaacuauggaaugga

SEQ ID NO: 21190 - DNA, 21 bp, homo sapiens
gataccttaccttctgacgac

SEQ ID NO: 21191 - RNA, 21 nt, RNAi
uaccuuaccuucugacgacuu

SEQ ID NO: 21192 - RNA, 21 nt, RNAi
uuauggaauggaagacugcug

SEQ ID NO: 21193 - DNA, 21 bp, homo sapiens
gaaagactgtaagatcagagt

SEQ ID NO: 21194 - RNA, 21 nt, RNAi
aagacuguaagaucagaguuu

SEQ ID NO: 21195 - RNA, 21 nt, RNAi
uuuucugacauucuagucuca

SEQ ID NO: 21196 - DNA, 21 bp, homo sapiens
gactgtaagatcagagtattc

SEQ ID NO: 21197 - RNA, 21 nt, RNAi
cuguaagaucagaguauucuu

SEQ ID NO: 21198 - RNA, 21 nt, RNAi
uugacauucuagucucauaag

SEQ ID NO: 21199 - DNA, 21 bp, homo sapiens
gatcagagtattcattggtgg

SEQ ID NO: 21200 - RNA, 21 nt, RNAi
ucagaguauucauuggugguu

SEQ ID NO: 21201 - RNA, 21 nt, RNAi
uuagucucauaaguaaccacc

SEQ ID NO: 21202 - DNA, 21 bp, homo sapiens
gagtattcattggtggaaaga

SEQ ID NO: 21203 - RNA, 21 nt, RNAi
guauucauugguggaaagauu

SEQ ID NO: 21204 - RNA, 21 nt, RNAi
uucauaaguaaccaccuuucu

SEQ ID NO: 21205 - DNA, 21 bp, homo sapiens
gaaagataaacagaatagacc

SEQ ID NO: 21206 - RNA, 21 nt, RNAi
aagauaaacagaauagaccuu

SEQ ID NO: 21207 - RNA, 21 nt, RNAi
uuuucuauuugucuuaucugg

SEQ ID NO: 21208 - DNA, 21 bp, homo sapiens
gataaacagaatagaccatga

SEQ ID NO: 21209 - RNA, 21 nt, RNAi
uaaacagaauagaccaugauu

SEQ ID NO: 21210 - RNA, 21 nt, RNAi
uuauuugucuuaucugguacu

SEQ ID NO: 21211 - DNA, 21 bp, homo sapiens
gaatagaccatgaccggagag

SEQ ID NO: 21212 - RNA, 21 nt, RNAi
auagaccaugaccggagaguu

SEQ ID NO: 21213 - RNA, 21 nt, RNAi
uuuaucugguacuggccucuc

SEQ ID NO: 21214 - DNA, 21 bp, homo sapiens
gaccatgaccggagagcgatg

SEQ ID NO: 21215 - RNA, 21 nt, RNAi
ccaugaccggagagcgauguu

SEQ ID NO: 21216 - RNA, 21 nt, RNAi
uugguacuggccucucgcuac

SEQ ID NO: 21217 - DNA, 21 bp, homo sapiens
gaccggagagcgatggctact

SEQ ID NO: 21218 - RNA, 21 nt, RNAi
ccggagagcgauggcuacuuu

SEQ ID NO: 21219 - RNA, 21 nt, RNAi
uuggccucucgcuaccgauga

SEQ ID NO: 21220 - DNA, 21 bp, homo sapiens
gagagcgatggctactttgct

SEQ ID NO: 21221 - RNA, 21 nt, RNAi
gagcgauggcuacuuugcuuu

SEQ ID NO: 21222 - RNA, 21 nt, RNAi
uucucgcuaccgaugaaacga

SEQ ID NO: 21223 - DNA, 21 bp, homo sapiens
gagcgatggctactttgctta

SEQ ID NO: 21224 - RNA, 21 nt, RNAi
gcgauggcuacuuugcuuauu

SEQ ID NO: 21225 - RNA, 21 nt, RNAi
uucgcuaccgaugaaacgaau

SEQ ID NO: 21226 - DNA, 21 bp, homo sapiens
gatggctactttgcttagcaa

SEQ ID NO: 21227 - RNA, 21 nt, RNAi
uggcuacuuugcuuagcaauu

SEQ ID NO: 21228 - RNA, 21 nt, RNAi
uuaccgaugaaacgaaucguu

SEQ ID NO: 21229 - DNA, 21 bp, homo sapiens
gatatcatggttctaggagat

SEQ ID NO: 21230 - RNA, 21 nt, RNAi
uaucaugguucuaggagauuu

SEQ ID NO: 21231 - RNA, 21 nt, RNAi
uuauaguaccaagauccucua

SEQ ID NO: 21232 - DNA, 21 bp, homo sapiens
gagatatcaataccaaaccaa

SEQ ID NO: 21233 - RNA, 21 nt, RNAi
gauaucaauaccaaaccaauu

SEQ ID NO: 21234 - RNA, 21 nt, RNAi
uucuauaguuaugguuugguu

SEQ ID NO: 21235 - DNA, 21 bp, homo sapiens
gatatcaataccaaaccaaag

SEQ ID NO: 21236 - RNA, 21 nt, RNAi
uaucaauaccaaaccaaaguu

SEQ ID NO: 21237 - RNA, 21 nt, RNAi
uuauaguuaugguuugguuuc

SEQ ID NO: 21238 - DNA, 21 bp, homo sapiens
gaggaaatcattgagccatac

SEQ ID NO: 21239 - RNA, 21 nt, RNAi
ggaaaucauugagccauacuu

SEQ ID NO: 21240 - RNA, 21 nt, RNAi
uuccuuuaguaacucgguaug

SEQ ID NO: 21241 - DNA, 21 bp, homo sapiens
gaaatcattgagccatacaga

SEQ ID NO: 21242 - RNA, 21 nt, RNAi
aaucauugagccauacagauu

SEQ ID NO: 21243 - RNA, 21 nt, RNAi
uuuuaguaacucgguaugucu

SEQ ID NO: 21244 - DNA, 21 bp, homo sapiens
gagccatacagacttcatgaa

SEQ ID NO: 21245 - RNA, 21 nt, RNAi
gccauacagacuucaugaauu

SEQ ID NO: 21246 - RNA, 21 nt, RNAi
uucgguaugucugaaguacuu

SEQ ID NO: 21247 - DNA, 21 bp, homo sapiens
gacttcatgaagatgataaag

SEQ ID NO: 21248 - RNA, 21 nt, RNAi
cuucaugaagaugauaaaguu

SEQ ID NO: 21249 - RNA, 21 nt, RNAi
uugaaguacuucuacuauuuc

SEQ ID NO: 21250 - DNA, 21 bp, homo sapiens
gaagatgataaagagcaagat

SEQ ID NO: 21251 - RNA, 21 nt, RNAi
agaugauaaagagcaagauuu

SEQ ID NO: 21252 - RNA, 21 nt, RNAi
uuucuacuauuucucguucua

SEQ ID NO: 21253 - DNA, 21 bp, homo sapiens
gataaagagcaagatattgca

SEQ ID NO: 21254 - RNA, 21 nt, RNAi
uaaagagcaagauauugcauu

SEQ ID NO: 21255 - RNA, 21 nt, RNAi
uuauuucucguucuauaacgu

SEQ ID NO: 21256 - DNA, 21 bp, homo sapiens
gagcaagatattgcagataaa

SEQ ID NO: 21257 - RNA, 21 nt, RNAi
gcaagauauugcagauaaauu

SEQ ID NO: 21258 - RNA, 21 nt, RNAi
uucguucuauaacgucuauuu

SEQ ID NO: 21259 - DNA, 21 bp, homo sapiens
gaaagaagatgaaccatggcg

SEQ ID NO: 21260 - RNA, 21 nt, RNAi
aagaagaugaaccauggcguu

SEQ ID NO: 21261 - RNA, 21 nt, RNAi
uuuucuucuacuugguaccgc

SEQ ID NO: 21262 - DNA, 21 bp, homo sapiens
gaagatgaaccatggcgaata

SEQ ID NO: 21263 - RNA, 21 nt, RNAi
agaugaaccauggcgaauauu

SEQ ID NO: 21264 - RNA, 21 nt, RNAi
uuucuacuugguaccgcuuau

SEQ ID NO: 21265 - DNA, 21 bp, homo sapiens
gatgaaccatggcgaataaca

SEQ ID NO: 21266 - RNA, 21 nt, RNAi
ugaaccauggcgaauaacauu

SEQ ID NO: 21267 - RNA, 21 nt, RNAi
uuacuugguaccgcuuauugu

SEQ ID NO: 21268 - DNA, 21 bp, homo sapiens
gaaccatggcgaataacagat

SEQ ID NO: 21269 - RNA, 21 nt, RNAi
accauggcgaauaacagauuu

SEQ ID NO: 21270 - RNA, 21 nt, RNAi
uuugguaccgcuuauugucua

SEQ ID NO: 21271 - DNA, 21 bp, homo sapiens
gaataacagataatgagcttg

SEQ ID NO: 21272 - RNA, 21 nt, RNAi
auaacagauaaugagcuuguu

SEQ ID NO: 21273 - RNA, 21 nt, RNAi
uuuauugucuauuacucgaac

SEQ ID NO: 21274 - DNA, 21 bp, homo sapiens
gagcttgaactttataagacc

SEQ ID NO: 21275 - RNA, 21 nt, RNAi
gcuugaacuuuauaagaccuu

SEQ ID NO: 21276 - RNA, 21 nt, RNAi
uucgaacuugaaauauucugg

SEQ ID NO: 21277 - DNA, 21 bp, homo sapiens
gaactttataagaccaagaca

SEQ ID NO: 21278 - RNA, 21 nt, RNAi
acuuuauaagaccaagacauu

SEQ ID NO: 21279 - RNA, 21 nt, RNAi
uuugaaauauucugguucugu

SEQ ID NO: 21280 - DNA, 21 bp, homo sapiens
gaccaagacataccggcagat

SEQ ID NO: 21281 - RNA, 21 nt, RNAi
ccaagacauaccggcagauuu

SEQ ID NO: 21282 - RNA, 21 nt, RNAi
uugguucuguauggccgucua

SEQ ID NO: 21283 - DNA, 21 bp, homo sapiens
gacataccggcagatcaggtt

SEQ ID NO: 21284 - RNA, 21 nt, RNAi
cauaccggcagaucagguuuu

SEQ ID NO: 21285 - RNA, 21 nt, RNAi
uuguauggccgucuaguccaa

SEQ ID NO: 21286 - DNA, 21 bp, homo sapiens
gaacattcaagcacagctaat

SEQ ID NO: 21287 - RNA, 21 nt, RNAi
acauucaagcacagcuaauuu

SEQ ID NO: 21288 - RNA, 21 nt, RNAi
uuuguaaguucgugucgauua

SEQ ID NO: 21289 - DNA, 21 bp, homo sapiens
gaagctctatctaaggaccta

SEQ ID NO: 21290 - RNA, 21 nt, RNAi
agcucuaucuaaggaccuauu

SEQ ID NO: 21291 - RNA, 21 nt, RNAi
uuucgagauagauuccuggau

SEQ ID NO: 21292 - DNA, 21 bp, homo sapiens
gacctaccaccaatcctccta

SEQ ID NO: 21293 - RNA, 21 nt, RNAi
ccuaccaccaauccuccuauu

SEQ ID NO: 21294 - RNA, 21 nt, RNAi
uuggauggugguuaggaggau

SEQ ID NO: 21295 - DNA, 21 bp, homo sapiens
gaatcatcagagtgtccttac

SEQ ID NO: 21296 - RNA, 21 nt, RNAi
aucaucagaguguccuuacuu

SEQ ID NO: 21297 - RNA, 21 nt, RNAi
uuuaguagucucacaggaaug

SEQ ID NO: 21298 - DNA, 21 bp, homo sapiens
gagtgtccttaccttctattc

SEQ ID NO: 21299 - RNA, 21 nt, RNAi
guguccuuaccuucuauucuu

SEQ ID NO: 21300 - RNA, 21 nt, RNAi
uucacaggaauggaagauaag

SEQ ID NO: 21301 - DNA, 21 bp, homo sapiens
gaatggtacttcagtgcctag

SEQ ID NO: 21302 - RNA, 21 nt, RNAi
augguacuucagugccuaguu

SEQ ID NO: 21303 - RNA, 21 nt, RNAi
uuuaccaugaagucacggauc

SEQ ID NO: 21304 - DNA, 21 bp, homo sapiens
gacacattaacatcacaatgg

SEQ ID NO: 21305 - RNA, 21 nt, RNAi
cacauuaacaucacaaugguu

SEQ ID NO: 21306 - RNA, 21 nt, RNAi
uuguguaauuguaguguuacc

SEQ ID NO: 21307 - DNA, 21 bp, homo sapiens
gaaagcacacaggaaagcttg

SEQ ID NO: 21308 - RNA, 21 nt, RNAi
aagcacacaggaaagcuuguu

SEQ ID NO: 21309 - RNA, 21 nt, RNAi
uuuucguguguccuuucgaac

SEQ ID NO: 21310 - DNA, 21 bp, homo sapiens
gaaagcttgctccattgataa

SEQ ID NO: 21311 - RNA, 21 nt, RNAi
aagcuugcuccauugauaauu

SEQ ID NO: 21312 - RNA, 21 nt, RNAi
uuuucgaacgagguaacuauu

SEQ ID NO: 21313 - DNA, 21 bp, homo sapiens
gataacgtgtatggagacttc

SEQ ID NO: 21314 - RNA, 21 nt, RNAi
uaacguguauggagacuucuu

SEQ ID NO: 21315 - RNA, 21 nt, RNAi
uuauugcacauaccucugaag

SEQ ID NO: 21316 - DNA, 21 bp, homo sapiens
gattcttctctgttgaactga

SEQ ID NO: 21317 - RNA, 21 nt, RNAi
uucuucucuguugaacugauu

SEQ ID NO: 21318 - RNA, 21 nt, RNAi
uuaagaagagacaacuugacu

SEQ ID NO: 21319 - DNA, 21 bp, homo sapiens
gaactgaagtttgtgagagta

SEQ ID NO: 21320 - RNA, 21 nt, RNAi
acugaaguuugugagaguauu

SEQ ID NO: 21321 - RNA, 21 nt, RNAi
uuugacuucaaacacucucau

SEQ ID NO: 21322 - DNA, 21 bp, homo sapiens
taaaggcagcgaggaagccaa

SEQ ID NO: 21323 - RNA, 21 nt, RNAi
aaggcagcgaggaagccaauu

SEQ ID NO: 21324 - RNA, 21 nt, RNAi
uuuuccgucgcuccuucgguu

SEQ ID NO: 21325 - DNA, 21 bp, homo sapiens
tactacctgcgcaccttcggc

SEQ ID NO: 21326 - RNA, 21 nt, RNAi
cuaccugcgcaccuucggcuu

SEQ ID NO: 21327 - RNA, 21 nt, RNAi
uugauggacgcguggaagccg

SEQ ID NO: 21328 - DNA, 21 bp, homo sapiens
tactccaaccagagatgctgt

SEQ ID NO: 21329 - RNA, 21 nt, RNAi
cuccaaccagagaugcuguuu

SEQ ID NO: 21330 - RNA, 21 nt, RNAi
uugagguuggucucuacgaca

SEQ ID NO: 21331 - DNA, 21 bp, homo sapiens
tatactgcagaaagtaaagga

SEQ ID NO: 21332 - RNA, 21 nt, RNAi
uacugcagaaaguaaaggauu

SEQ ID NO: 21333 - RNA, 21 nt, RNAi
uuaugacgucuuucauuuccu

SEQ ID NO: 21334 - DNA, 21 bp, homo sapiens
tactgcagaaagtaaaggagt

SEQ ID NO: 21335 - RNA, 21 nt, RNAi
cugcagaaaguaaaggaguuu

SEQ ID NO: 21336 - RNA, 21 nt, RNAi
uugacgucuuucauuuccuca

SEQ ID NO: 21337 - DNA, 21 bp, homo sapiens
taaaggagtcgtgaagtttgg

SEQ ID NO: 21338 - RNA, 21 nt, RNAi
aaggagucgugaaguuugguu

SEQ ID NO: 21339 - RNA, 21 nt, RNAi
uuuuccucagcacuucaaacc

SEQ ID NO: 21340 - DNA, 21 bp, homo sapiens
taggtctatcagtccttgtaa

SEQ ID NO: 21341 - RNA, 21 nt, RNAi
ggucuaucaguccuuguaauu

SEQ ID NO: 21342 - RNA, 21 nt, RNAi
uuccagauagucaggaacauu

SEQ ID NO: 21343 - DNA, 21 bp, homo sapiens
taataatgatggccactgttg

SEQ ID NO: 21344 - RNA, 21 nt, RNAi
auaaugauggccacuguuguu

SEQ ID NO: 21345 - RNA, 21 nt, RNAi
uuuauuacuaccggugacaac

SEQ ID NO: 21346 - DNA, 21 bp, homo sapiens
taatgatggccactgttgtga

SEQ ID NO: 21347 - RNA, 21 nt, RNAi
augauggccacuguugugauu

SEQ ID NO: 21348 - RNA, 21 nt, RNAi
uuuacuaccggugacaacacu

SEQ ID NO: 21349 - DNA, 21 bp, homo sapiens
tatcacaggattgtctacttc

SEQ ID NO: 21350 - RNA, 21 nt, RNAi
ucacaggauugucuacuucuu

SEQ ID NO: 21351 - RNA, 21 nt, RNAi
uuaguguccuaacagaugaag

SEQ ID NO: 21352 - DNA, 21 bp, homo sapiens
tacttcagcaatagcaactaa

SEQ ID NO: 21353 - RNA, 21 nt, RNAi
cuucagcaauagcaacuaauu

SEQ ID NO: 21354 - RNA, 21 nt, RNAi
uugaagucguuaucguugauu

SEQ ID NO: 21355 - DNA, 21 bp, homo sapiens
taatggatttgtaagaggagg

SEQ ID NO: 21356 - RNA, 21 nt, RNAi
auggauuuguaagaggagguu

SEQ ID NO: 21357 - RNA, 21 nt, RNAi
uuuaccuaaacauucuccucc

SEQ ID NO: 21358 - DNA, 21 bp, homo sapiens
taagaggaggaggagcatatt

SEQ ID NO: 21359 - RNA, 21 nt, RNAi
agaggaggaggagcauauuuu

SEQ ID NO: 21360 - RNA, 21 nt, RNAi
uuucuccuccuccucguauaa

SEQ ID NO: 21361 - DNA, 21 bp, homo sapiens
taatcttcgcctttgccaacg

SEQ ID NO: 21362 - RNA, 21 nt, RNAi
aucuucgccuuugccaacguu

SEQ ID NO: 21363 - RNA, 21 nt, RNAi
uuuagaagcggaaacgguugc

SEQ ID NO: 21364 - DNA, 21 bp, homo sapiens
tatgtatgtggttggatttgc

SEQ ID NO: 21365 - RNA, 21 nt, RNAi
uguaugugguuggauuugcuu

SEQ ID NO: 21366 - RNA, 21 nt, RNAi
uuacauacaccaaccuaaacg

SEQ ID NO: 21367 - DNA, 21 bp, homo sapiens
tatgtggttggatttgcagaa

SEQ ID NO: 21368 - RNA, 21 nt, RNAi
ugugguuggauuugcagaauu

SEQ ID NO: 21369 - RNA, 21 nt, RNAi
uuacaccaaccuaaacgucuu

SEQ ID NO: 21370 - DNA, 21 bp, homo sapiens
tatccgaattattggagccat

SEQ ID NO: 21371 - RNA, 21 nt, RNAi
uccgaauuauuggagccauuu

SEQ ID NO: 21372 - RNA, 21 nt, RNAi
uuaggcuuaauaaccucggua

SEQ ID NO: 21373 - DNA, 21 bp, homo sapiens
tattggagccattacagtcgt

SEQ ID NO: 21374 - RNA, 21 nt, RNAi
uuggagccauuacagucguuu

SEQ ID NO: 21375 - RNA, 21 nt, RNAi
uuaaccucgguaaugucagca

SEQ ID NO: 21376 - DNA, 21 bp, homo sapiens
taggtatctcagtagctggaa

SEQ ID NO: 21377 - RNA, 21 nt, RNAi
gguaucucaguagcuggaauu

SEQ ID NO: 21378 - RNA, 21 nt, RNAi
uuccauagagucaucgaccuu

SEQ ID NO: 21379 - DNA, 21 bp, homo sapiens
tatctcagtagctggaatgga

SEQ ID NO: 21380 - RNA, 21 nt, RNAi
ucucaguagcuggaauggauu

SEQ ID NO: 21381 - RNA, 21 nt, RNAi
uuagagucaucgaccuuaccu

SEQ ID NO: 21382 - DNA, 21 bp, homo sapiens
tacttcttgctattggtgatt

SEQ ID NO: 21383 - RNA, 21 nt, RNAi
cuucuugcuauuggugauuuu

SEQ ID NO: 21384 - RNA, 21 nt, RNAi
uugaagaacgauaaccacuaa

SEQ ID NO: 21385 - DNA, 21 bp, homo sapiens
tattggtgatttcgtcatagg

SEQ ID NO: 21386 - RNA, 21 nt, RNAi
uuggugauuucgucauagguu

SEQ ID NO: 21387 - RNA, 21 nt, RNAi
uuaaccacuaaagcaguaucc

SEQ ID NO: 21388 - DNA, 21 bp, homo sapiens
tattctggctggagcaaatat

SEQ ID NO: 21389 - RNA, 21 nt, RNAi
uucuggcuggagcaaauauuu

SEQ ID NO: 21390 - RNA, 21 nt, RNAi
uuaagaccgaccucguuuaua

SEQ ID NO: 21391 - DNA, 21 bp, homo sapiens
tatctcaggtgatcttgcaga

SEQ ID NO: 21392 - RNA, 21 nt, RNAi
ucucaggugaucuugcagauu

SEQ ID NO: 21393 - RNA, 21 nt, RNAi
uuagaguccacuagaacgucu

SEQ ID NO: 21394 - DNA, 21 bp, homo sapiens
tactacattggtttacgtagg

SEQ ID NO: 21395 - RNA, 21 nt, RNAi
cuacauugguuuacguagguu

SEQ ID NO: 21396 - RNA, 21 nt, RNAi
uugauguaaccaaaugcaucc

SEQ ID NO: 21397 - DNA, 21 bp, homo sapiens
tacattggtttacgtaggaat

SEQ ID NO: 21398 - RNA, 21 nt, RNAi
cauugguuuacguaggaauuu

SEQ ID NO: 21399 - RNA, 21 nt, RNAi
uuguaaccaaaugcauccuua

SEQ ID NO: 21400 - DNA, 21 bp, homo sapiens
tacgtaggaattgcagtatct

SEQ ID NO: 21401 - RNA, 21 nt, RNAi
cguaggaauugcaguaucuuu

SEQ ID NO: 21402 - RNA, 21 nt, RNAi
uugcauccuuaacgucauaga

SEQ ID NO: 21403 - DNA, 21 bp, homo sapiens
taggaattgcagtatctgtag

SEQ ID NO: 21404 - RNA, 21 nt, RNAi
ggaauugcaguaucuguaguu

SEQ ID NO: 21405 - RNA, 21 nt, RNAi
uuccuuaacgucauagacauc

SEQ ID NO: 21406 - DNA, 21 bp, homo sapiens
tatctgtaggttcttgtgttg

SEQ ID NO: 21407 - RNA, 21 nt, RNAi
ucuguagguucuuguguuguu

SEQ ID NO: 21408 - RNA, 21 nt, RNAi
uuagacauccaagaacacaac

SEQ ID NO: 21409 - DNA, 21 bp, homo sapiens
taggttcttgtgttgttcgag

SEQ ID NO: 21410 - RNA, 21 nt, RNAi
gguucuuguguuguucgaguu

SEQ ID NO: 21411 - RNA, 21 nt, RNAi
uuccaagaacacaacaagcuc

SEQ ID NO: 21412 - DNA, 21 bp, homo sapiens
taatgacactatcgtaacaga

SEQ ID NO: 21413 - RNA, 21 nt, RNAi
augacacuaucguaacagauu

SEQ ID NO: 21414 - RNA, 21 nt, RNAi
uuuacugugauagcauugucu

SEQ ID NO: 21415 - DNA, 21 bp, homo sapiens
tatcgtaacagagctaacaaa

SEQ ID NO: 21416 - RNA, 21 nt, RNAi
ucguaacagagcuaacaaauu

SEQ ID NO: 21417 - RNA, 21 nt, RNAi
uuagcauugucucgauuguuu

SEQ ID NO: 21418 - DNA, 21 bp, homo sapiens
taacagagctaacaaactgta

SEQ ID NO: 21419 - RNA, 21 nt, RNAi
acagagcuaacaaacuguauu

SEQ ID NO: 21420 - RNA, 21 nt, RNAi
uuugucucgauuguuugacau

SEQ ID NO: 21421 - DNA, 21 bp, homo sapiens
taacaaactgtacttctgcag

SEQ ID NO: 21422 - RNA, 21 nt, RNAi
acaaacuguacuucugcaguu

SEQ ID NO: 21423 - RNA, 21 nt, RNAi
uuuguuugacaugaagacguc

SEQ ID NO: 21424 - DNA, 21 bp, homo sapiens
tacttctgcagcctgcaaatt

SEQ ID NO: 21425 - RNA, 21 nt, RNAi
cuucugcagccugcaaauuuu

SEQ ID NO: 21426 - RNA, 21 nt, RNAi
uugaagacgucggacguuuaa

SEQ ID NO: 21427 - DNA, 21 bp, homo sapiens
tatggcctaatgaacaacttc

SEQ ID NO: 21428 - RNA, 21 nt, RNAi
uggccuaaugaacaacuucuu

SEQ ID NO: 21429 - RNA, 21 nt, RNAi
uuaccggauuacuuguugaag

SEQ ID NO: 21430 - DNA, 21 bp, homo sapiens
taatgaacaacttccaggtaa

SEQ ID NO: 21431 - RNA, 21 nt, RNAi
augaacaacuuccagguaauu

SEQ ID NO: 21432 - RNA, 21 nt, RNAi
uuuacuuguugaagguccauu

SEQ ID NO: 21433 - DNA, 21 bp, homo sapiens
taatgagtatggtgtcaggat

SEQ ID NO: 21434 - RNA, 21 nt, RNAi
augaguauggugucaggauuu

SEQ ID NO: 21435 - RNA, 21 nt, RNAi
uuuacucauaccacaguccua

SEQ ID NO: 21436 - DNA, 21 bp, homo sapiens
tatggtgtcaggatttacacc

SEQ ID NO: 21437 - RNA, 21 nt, RNAi
uggugucaggauuuacaccuu

SEQ ID NO: 21438 - RNA, 21 nt, RNAi
uuaccacaguccuaaaugugg

SEQ ID NO: 21439 - DNA, 21 bp, homo sapiens
tacaccactaatttctgcagg

SEQ ID NO: 21440 - RNA, 21 nt, RNAi
caccacuaauuucugcagguu

SEQ ID NO: 21441 - RNA, 21 nt, RNAi
uuguggugauuaaagacgucc

SEQ ID NO: 21442 - DNA, 21 bp, homo sapiens
tatttcaggctctatgtaagg

SEQ ID NO: 21443 - RNA, 21 nt, RNAi
uuucaggcucuauguaagguu

SEQ ID NO: 21444 - RNA, 21 nt, RNAi
uuaaaguccgagauacauucc

SEQ ID NO: 21445 - DNA, 21 bp, homo sapiens
tatgtaaggacaacatctacc

SEQ ID NO: 21446 - RNA, 21 nt, RNAi
uguaaggacaacaucuaccuu

SEQ ID NO: 21447 - RNA, 21 nt, RNAi
uuacauuccuguuguagaugg

SEQ ID NO: 21448 - DNA, 21 bp, homo sapiens
taatgaacctcttcgtggcta

SEQ ID NO: 21449 - RNA, 21 nt, RNAi
augaaccucuucguggcuauu

SEQ ID NO: 21450 - RNA, 21 nt, RNAi
uuuacuuggagaagcaccgau

SEQ ID NO: 21451 - DNA, 21 bp, homo sapiens
taattgcacttggattcatct

SEQ ID NO: 21452 - RNA, 21 nt, RNAi
auugcacuuggauucaucuuu

SEQ ID NO: 21453 - RNA, 21 nt, RNAi
uuuaacgugaaccuaaguaga

SEQ ID NO: 21454 - DNA, 21 bp, homo sapiens
tatctcaaacttcttccttgc

SEQ ID NO: 21455 - RNA, 21 nt, RNAi
ucucaaacuucuuccuugcuu

SEQ ID NO: 21456 - RNA, 21 nt, RNAi
uuagaguuugaagaaggaacg

SEQ ID NO: 21457 - DNA, 21 bp, homo sapiens
tattccatgcatcacttgcaa

SEQ ID NO: 21458 - RNA, 21 nt, RNAi
uuccaugcaucacuugcaauu

SEQ ID NO: 21459 - RNA, 21 nt, RNAi
uuaagguacguagugaacguu

SEQ ID NO: 21460 - DNA, 21 bp, homo sapiens
tactacaacatgtggatatca

SEQ ID NO: 21461 - RNA, 21 nt, RNAi
cuacaacauguggauaucauu

SEQ ID NO: 21462 - RNA, 21 nt, RNAi
uugauguuguacaccuauagu

SEQ ID NO: 21463 - DNA, 21 bp, homo sapiens
tacaacatgtggatatcactt

SEQ ID NO: 21464 - RNA, 21 nt, RNAi
caacauguggauaucacuuuu

SEQ ID NO: 21465 - RNA, 21 nt, RNAi
uuguuguacaccuauagugaa

SEQ ID NO: 21466 - DNA, 21 bp, homo sapiens
tatcacttcttggagcaattc

SEQ ID NO: 21467 - RNA, 21 nt, RNAi
ucacuucuuggagcaauucuu

SEQ ID NO: 21468 - RNA, 21 nt, RNAi
uuagugaagaaccucguuaag

SEQ ID NO: 21469 - DNA, 21 bp, homo sapiens
taatgttcgtcattaactggt

SEQ ID NO: 21470 - RNA, 21 nt, RNAi
auguucgucauuaacugguuu

SEQ ID NO: 21471 - RNA, 21 nt, RNAi
uuuacaagcaguaauugacca

SEQ ID NO: 21472 - DNA, 21 bp, homo sapiens
taacatatgtgatagtccttg

SEQ ID NO: 21473 - RNA, 21 nt, RNAi
acauaugugauaguccuuguu

SEQ ID NO: 21474 - RNA, 21 nt, RNAi
uuuguauacacuaucaggaac

SEQ ID NO: 21475 - DNA, 21 bp, homo sapiens
tacctgaatgcactgcagcat

SEQ ID NO: 21476 - RNA, 21 nt, RNAi
ccugaaugcacugcagcauuu

SEQ ID NO: 21477 - RNA, 21 nt, RNAi
uuggacuuacgugacgucgua

SEQ ID NO: 21478 - DNA, 21 bp, homo sapiens
taggccacagtgtcttgttat

SEQ ID NO: 21479 - RNA, 21 nt, RNAi
ggccacagugucuuguuauuu

SEQ ID NO: 21480 - RNA, 21 nt, RNAi
uuccggugucacagaacaaua

SEQ ID NO: 21481 - DNA, 21 bp, homo sapiens
tatgacaggtgctccaaactc

SEQ ID NO: 21482 - RNA, 21 nt, RNAi
ugacaggugcuccaaacucuu

SEQ ID NO: 21483 - RNA, 21 nt, RNAi
uuacuguccacgagguuugag

SEQ ID NO: 21484 - DNA, 21 bp, homo sapiens
tatcagcgatggcttattaag

SEQ ID NO: 21485 - RNA, 21 nt, RNAi
ucagcgauggcuuauuaaguu

SEQ ID NO: 21486 - RNA, 21 nt, RNAi
uuagucgcuaccgaauaauuc

SEQ ID NO: 21487 - DNA, 21 bp, homo sapiens
tatgctccagtacatgcagat

SEQ ID NO: 21488 - RNA, 21 nt, RNAi
ugcuccaguacaugcagauuu

SEQ ID NO: 21489 - RNA, 21 nt, RNAi
uuacgaggucauguacgucua

SEQ ID NO: 21490 - DNA, 21 bp, homo sapiens
tacatgcagatgacttgagag

SEQ ID NO: 21491 - RNA, 21 nt, RNAi
caugcagaugacuugagaguu

SEQ ID NO: 21492 - RNA, 21 nt, RNAi
uuguacgucuacugaacucuc

SEQ ID NO: 21493 - DNA, 21 bp, homo sapiens
tatttgatgcaggctgctggt

SEQ ID NO: 21494 - RNA, 21 nt, RNAi
uuugaugcaggcugcugguuu

SEQ ID NO: 21495 - RNA, 21 nt, RNAi
uuaaacuacguccgacgacca

SEQ ID NO: 21496 - DNA, 21 bp, homo sapiens
tatgaagccaaacacacttgt

SEQ ID NO: 21497 - RNA, 21 nt, RNAi
ugaagccaaacacacuuguuu

SEQ ID NO: 21498 - RNA, 21 nt, RNAi
uuacuucgguuugugugaaca

SEQ ID NO: 21499 - DNA, 21 bp, homo sapiens
taagaaagattggttgcaagc

SEQ ID NO: 21500 - RNA, 21 nt, RNAi
agaaagauugguugcaagcuu

SEQ ID NO: 21501 - RNA, 21 nt, RNAi
uuucuuucuaaccaacguucg

SEQ ID NO: 21502 - DNA, 21 bp, homo sapiens
tacaatatggagtagtggtta

SEQ ID NO: 21503 - RNA, 21 nt, RNAi
caauauggaguagugguuauu

SEQ ID NO: 21504 - RNA, 21 nt, RNAi
uuguuauaccucaucaccaau

SEQ ID NO: 21505 - DNA, 21 bp, homo sapiens
tatggagtagtggttattcgc

SEQ ID NO: 21506 - RNA, 21 nt, RNAi
uggaguagugguuauucgcuu

SEQ ID NO: 21507 - RNA, 21 nt, RNAi
uuaccucaucaccaauaagcg

SEQ ID NO: 21508 - DNA, 21 bp, homo sapiens
tatatctcatcttcaaggaca

SEQ ID NO: 21509 - RNA, 21 nt, RNAi
uaucucaucuucaaggacauu

SEQ ID NO: 21510 - RNA, 21 nt, RNAi
uuauagaguagaaguuccugu

SEQ ID NO: 21511 - DNA, 21 bp, homo sapiens
tatctcatcttcaaggacaag

SEQ ID NO: 21512 - RNA, 21 nt, RNAi
ucucaucuucaaggacaaguu

SEQ ID NO: 21513 - RNA, 21 nt, RNAi
uuagaguagaaguuccuguuc

SEQ ID NO: 21514 - DNA, 21 bp, homo sapiens
tagatacttccaaaccactca

SEQ ID NO: 21515 - RNA, 21 nt, RNAi
gauacuuccaaaccacucauu

SEQ ID NO: 21516 - RNA, 21 nt, RNAi
uucuaugaagguuuggugagu

SEQ ID NO: 21517 - DNA, 21 bp, homo sapiens
tacttccaaaccactcagtga

SEQ ID NO: 21518 - RNA, 21 nt, RNAi
cuuccaaaccacucagugauu

SEQ ID NO: 21519 - RNA, 21 nt, RNAi
uugaagguuuggugagucacu

SEQ ID NO: 21520 - DNA, 21 bp, homo sapiens
tacacacaaagttgaggaaga

SEQ ID NO: 21521 - RNA, 21 nt, RNAi
cacacaaaguugaggaagauu

SEQ ID NO: 21522 - RNA, 21 nt, RNAi
uuguguguuucaacuccuucu

SEQ ID NO: 21523 - DNA, 21 bp, homo sapiens
tattgtgcctttaaatgtagc

SEQ ID NO: 21524 - RNA, 21 nt, RNAi
uugugccuuuaaauguagcuu

SEQ ID NO: 21525 - RNA, 21 nt, RNAi
uuaacacggaaauuuacaucg

SEQ ID NO: 21526 - DNA, 21 bp, homo sapiens
tactattgatgtctggtggct

SEQ ID NO: 21527 - RNA, 21 nt, RNAi
cuauugaugucugguggcuuu

SEQ ID NO: 21528 - RNA, 21 nt, RNAi
uugauaacuacagaccaccga

SEQ ID NO: 21529 - DNA, 21 bp, homo sapiens
tattgataccttaccttctga

SEQ ID NO: 21530 - RNA, 21 nt, RNAi
uugauaccuuaccuucugauu

SEQ ID NO: 21531 - RNA, 21 nt, RNAi
uuaacuauggaauggaagacu

SEQ ID NO: 21532 - DNA, 21 bp, homo sapiens
taccttaccttctgacgacca

SEQ ID NO: 21533 - RNA, 21 nt, RNAi
ccuuaccuucugacgaccauu

SEQ ID NO: 21534 - RNA, 21 nt, RNAi
uuggaauggaagacugcuggu

SEQ ID NO: 21535 - DNA, 21 bp, homo sapiens
taccttctgacgaccaagaaa

SEQ ID NO: 21536 - RNA, 21 nt, RNAi
ccuucugacgaccaagaaauu

SEQ ID NO: 21537 - RNA, 21 nt, RNAi
uuggaagacugcugguucuuu

SEQ ID NO: 21538 - DNA, 21 bp, homo sapiens
taagatcagagtattcattgg

SEQ ID NO: 21539 - RNA, 21 nt, RNAi
agaucagaguauucauugguu

SEQ ID NO: 21540 - RNA, 21 nt, RNAi
uuucuagucucauaaguaacc

SEQ ID NO: 21541 - DNA, 21 bp, homo sapiens
taaacagaatagaccatgacc

SEQ ID NO: 21542 - RNA, 21 nt, RNAi
aacagaauagaccaugaccuu

SEQ ID NO: 21543 - RNA, 21 nt, RNAi
uuuugucuuaucugguacugg

SEQ ID NO: 21544 - DNA, 21 bp, homo sapiens
tagaccatgaccggagagcga

SEQ ID NO: 21545 - RNA, 21 nt, RNAi
gaccaugaccggagagcgauu

SEQ ID NO: 21546 - RNA, 21 nt, RNAi
uucugguacuggccucucgcu

SEQ ID NO: 21547 - DNA, 21 bp, homo sapiens
tactttgcttagcaagttccg

SEQ ID NO: 21548 - RNA, 21 nt, RNAi
cuuugcuuagcaaguuccguu

SEQ ID NO: 21549 - RNA, 21 nt, RNAi
uugaaacgaaucguucaaggc

SEQ ID NO: 21550 - DNA, 21 bp, homo sapiens
tagcaagttccggatagactt

SEQ ID NO: 21551 - RNA, 21 nt, RNAi
gcaaguuccggauagacuuuu

SEQ ID NO: 21552 - RNA, 21 nt, RNAi
uucguucaaggccuaucugaa

SEQ ID NO: 21553 - DNA, 21 bp, homo sapiens
tatcatggttctaggagatat

SEQ ID NO: 21554 - RNA, 21 nt, RNAi
ucaugguucuaggagauauuu

SEQ ID NO: 21555 - RNA, 21 nt, RNAi
uuaguaccaagauccucuaua

SEQ ID NO: 21556 - DNA, 21 bp, homo sapiens
taggagatatcaataccaaac

SEQ ID NO: 21557 - RNA, 21 nt, RNAi
ggagauaucaauaccaaacuu

SEQ ID NO: 21558 - RNA, 21 nt, RNAi
uuccucuauaguuaugguuug

SEQ ID NO: 21559 - DNA, 21 bp, homo sapiens
tacagacttcatgaagatgat

SEQ ID NO: 21560 - RNA, 21 nt, RNAi
cagacuucaugaagaugauuu

SEQ ID NO: 21561 - RNA, 21 nt, RNAi
uugucugaaguacuucuacua

SEQ ID NO: 21562 - DNA, 21 bp, homo sapiens
taaagagcaagatattgcaga

SEQ ID NO: 21563 - RNA, 21 nt, RNAi
aagagcaagauauugcagauu

SEQ ID NO: 21564 - RNA, 21 nt, RNAi
uuuucucguucuauaacgucu

SEQ ID NO: 21565 - DNA, 21 bp, homo sapiens
taacagataatgagcttgaac

SEQ ID NO: 21566 - RNA, 21 nt, RNAi
acagauaaugagcuugaacuu

SEQ ID NO: 21567 - RNA, 21 nt, RNAi
uuugucuauuacucgaacuug

SEQ ID NO: 21568 - DNA, 21 bp, homo sapiens
tataagaccaagacataccgg

SEQ ID NO: 21569 - RNA, 21 nt, RNAi
uaagaccaagacauaccgguu

SEQ ID NO: 21570 - RNA, 21 nt, RNAi
uuauucugguucuguauggcc

SEQ ID NO: 21571 - DNA, 21 bp, homo sapiens
taagaccaagacataccggca

SEQ ID NO: 21572 - RNA, 21 nt, RNAi
agaccaagacauaccggcauu

SEQ ID NO: 21573 - RNA, 21 nt, RNAi
uuucugguucuguauggccgu

SEQ ID NO: 21574 - DNA, 21 bp, homo sapiens
taccggcagatcaggttaaat

SEQ ID NO: 21575 - RNA, 21 nt, RNAi
ccggcagaucagguuaaauuu

SEQ ID NO: 21576 - RNA, 21 nt, RNAi
uuggccgucuaguccaauuua

SEQ ID NO: 21577 - DNA, 21 bp, homo sapiens
taaaggaacattcaagcacag

SEQ ID NO: 21578 - RNA, 21 nt, RNAi
aaggaacauucaagcacaguu

SEQ ID NO: 21579 - RNA, 21 nt, RNAi
uuuuccuuguaaguucguguc

SEQ ID NO: 21580 - DNA, 21 bp, homo sapiens
tagtgctctctacatggcatg

SEQ ID NO: 21581 - RNA, 21 nt, RNAi
gugcucucuacauggcauguu

SEQ ID NO: 21582 - RNA, 21 nt, RNAi
uucacgagagauguaccguac

SEQ ID NO: 21583 - DNA, 21 bp, homo sapiens
tacatggcatggttagaagct

SEQ ID NO: 21584 - RNA, 21 nt, RNAi
cauggcaugguuagaagcuuu

SEQ ID NO: 21585 - RNA, 21 nt, RNAi
uuguaccguaccaaucuucga

SEQ ID NO: 21586 - DNA, 21 bp, homo sapiens
tagaagctctatctaaggacc

SEQ ID NO: 21587 - RNA, 21 nt, RNAi
gaagcucuaucuaaggaccuu

SEQ ID NO: 21588 - RNA, 21 nt, RNAi
uucuucgagauagauuccugg

SEQ ID NO: 21589 - DNA, 21 bp, homo sapiens
tatctaaggacctaccaccaa

SEQ ID NO: 21590 - RNA, 21 nt, RNAi
ucuaaggaccuaccaccaauu

SEQ ID NO: 21591 - RNA, 21 nt, RNAi
uuagauuccuggauggugguu

SEQ ID NO: 21592 - DNA, 21 bp, homo sapiens
taaggacctaccaccaatcct

SEQ ID NO: 21593 - RNA, 21 nt, RNAi
aggaccuaccaccaauccuuu

SEQ ID NO: 21594 - RNA, 21 nt, RNAi
uuuccuggauggugguuagga

SEQ ID NO: 21595 - DNA, 21 bp, homo sapiens
taccaccaatcctcctagttc

SEQ ID NO: 21596 - RNA, 21 nt, RNAi
ccaccaauccuccuaguucuu

SEQ ID NO: 21597 - RNA, 21 nt, RNAi
uuggugguuaggaggaucaag

SEQ ID NO: 21598 - DNA, 21 bp, homo sapiens
taaatgttctatacagtggac

SEQ ID NO: 21599 - RNA, 21 nt, RNAi
aauguucuauacaguggacuu

SEQ ID NO: 21600 - RNA, 21 nt, RNAi
uuuuacaagauaugucaccug

SEQ ID NO: 21601 - DNA, 21 bp, homo sapiens
tacttcagtgcctagtgtagt

SEQ ID NO: 21602 - RNA, 21 nt, RNAi
cuucagugccuaguguaguuu

SEQ ID NO: 21603 - RNA, 21 nt, RNAi
uugaagucacggaucacauca

SEQ ID NO: 21604 - DNA, 21 bp, homo sapiens
tagtgtagtaacctgaaatct

SEQ ID NO: 21605 - RNA, 21 nt, RNAi
guguaguaaccugaaaucuuu

SEQ ID NO: 21606 - RNA, 21 nt, RNAi
uucacaucauuggacuuuaga

SEQ ID NO: 21607 - DNA, 21 bp, homo sapiens
taacctgaaatcttcaatgac

SEQ ID NO: 21608 - RNA, 21 nt, RNAi
accugaaaucuucaaugacuu

SEQ ID NO: 21609 - RNA, 21 nt, RNAi
uuuggacuuuagaaguuacug

SEQ ID NO: 21610 - DNA, 21 bp, homo sapiens
taacatcacaatggcgaatgg

SEQ ID NO: 21611 - RNA, 21 nt, RNAi
acaucacaauggcgaaugguu

SEQ ID NO: 21612 - RNA, 21 nt, RNAi
uuuguaguguuaccgcuuacc

SEQ ID NO: 21613 - DNA, 21 bp, homo sapiens
taatttgaaagcacacaggaa

SEQ ID NO: 21614 - RNA, 21 nt, RNAi
auuugaaagcacacaggaauu

SEQ ID NO: 21615 - RNA, 21 nt, RNAi
uuuaaacuuucguguguccuu

SEQ ID NO: 21616 - DNA, 21 bp, homo sapiens
taacgtgtatggagacttcgg

SEQ ID NO: 21617 - RNA, 21 nt, RNAi
acguguauggagacuucgguu

SEQ ID NO: 21618 - RNA, 21 nt, RNAi
uuugcacauaccucugaagcc

SEQ ID NO: 21619 - DNA, 21 bp, homo sapiens
taatggtgattcttctctgtt

SEQ ID NO: 21620 - RNA, 21 nt, RNAi
auggugauucuucucuguuuu

SEQ ID NO: 21621 - RNA, 21 nt, RNAi
uuuaccacuaagaagagacaa

SEQ ID NO: 21622 - DNA, 21 bp, homo sapiens
aagaaagtactccaaccagag

SEQ ID NO: 21623 - RNA, 21 nt, RNAi
gaaaguacuccaaccagaguu

SEQ ID NO: 21624 - RNA, 21 nt, RNAi
uucuuucaugagguuggucuc

SEQ ID NO: 21625 - DNA, 21 bp, homo sapiens
aaagtactccaaccagagatg

SEQ ID NO: 21626 - RNA, 21 nt, RNAi
aguacuccaaccagagauguu

SEQ ID NO: 21627 - RNA, 21 nt, RNAi
uuucaugagguuggucucuac

SEQ ID NO: 21628 - DNA, 21 bp, homo sapiens
aagtactccaaccagagatgc

SEQ ID NO: 21629 - RNA, 21 nt, RNAi
guacuccaaccagagaugcuu

SEQ ID NO: 21630 - RNA, 21 nt, RNAi
uucaugagguuggucucuacg

SEQ ID NO: 21631 - DNA, 21 bp, homo sapiens
aaagtaaaggagtcgtgaagt

SEQ ID NO: 21632 - RNA, 21 nt, RNAi
aguaaaggagucgugaaguuu

SEQ ID NO: 21633 - RNA, 21 nt, RNAi
uuucauuuccucagcacuuca

SEQ ID NO: 21634 - DNA, 21 bp, homo sapiens
aagtaaaggagtcgtgaagtt

SEQ ID NO: 21635 - RNA, 21 nt, RNAi
guaaaggagucgugaaguuuu

SEQ ID NO: 21636 - RNA, 21 nt, RNAi
uucauuuccucagcacuucaa

SEQ ID NO: 21637 - DNA, 21 bp, homo sapiens
aaaggagtcgtgaagtttggc

SEQ ID NO: 21638 - RNA, 21 nt, RNAi
aggagucgugaaguuuggcuu

SEQ ID NO: 21639 - RNA, 21 nt, RNAi
uuuccucagcacuucaaaccg

SEQ ID NO: 21640 - DNA, 21 bp, homo sapiens
aaggagtcgtgaagtttggct

SEQ ID NO: 21641 - RNA, 21 nt, RNAi
ggagucgugaaguuuggcuuu

SEQ ID NO: 21642 - RNA, 21 nt, RNAi
uuccucagcacuucaaaccga

SEQ ID NO: 21643 - DNA, 21 bp, homo sapiens
aagctggaataggtctatcag

SEQ ID NO: 21644 - RNA, 21 nt, RNAi
gcuggaauaggucuaucaguu

SEQ ID NO: 21645 - RNA, 21 nt, RNAi
uucgaccuuauccagauaguc

SEQ ID NO: 21646 - DNA, 21 bp, homo sapiens
aataggtctatcagtccttgt

SEQ ID NO: 21647 - RNA, 21 nt, RNAi
uaggucuaucaguccuuguuu

SEQ ID NO: 21648 - RNA, 21 nt, RNAi
uuauccagauagucaggaaca

SEQ ID NO: 21649 - DNA, 21 bp, homo sapiens
aactatcacaggattgtctac

SEQ ID NO: 21650 - RNA, 21 nt, RNAi
cuaucacaggauugucuacuu

SEQ ID NO: 21651 - RNA, 21 nt, RNAi
uugauaguguccuaacagaug

SEQ ID NO: 21652 - DNA, 21 bp, homo sapiens
aatttggtggtgcaattggtc

SEQ ID NO: 21653 - RNA, 21 nt, RNAi
uuugguggugcaauuggucuu

SEQ ID NO: 21654 - RNA, 21 nt, RNAi
uuaaaccaccacguuaaccag

SEQ ID NO: 21655 - DNA, 21 bp, homo sapiens
aattggtctaatcttcgcctt

SEQ ID NO: 21656 - RNA, 21 nt, RNAi
uuggucuaaucuucgccuuuu

SEQ ID NO: 21657 - RNA, 21 nt, RNAi
uuaaccagauuagaagcggaa

SEQ ID NO: 21658 - DNA, 21 bp, homo sapiens
aaaccgtggtggagttgctta

SEQ ID NO: 21659 - RNA, 21 nt, RNAi
accgugguggaguugcuuauu

SEQ ID NO: 21660 - RNA, 21 nt, RNAi
uuuggcaccaccucaacgaau

SEQ ID NO: 21661 - DNA, 21 bp, homo sapiens
aaccgtggtggagttgcttaa

SEQ ID NO: 21662 - RNA, 21 nt, RNAi
ccgugguggaguugcuuaauu

SEQ ID NO: 21663 - RNA, 21 nt, RNAi
uuggcaccaccucaacgaauu

SEQ ID NO: 21664 - DNA, 21 bp, homo sapiens
aaaggaacactcctagccatt

SEQ ID NO: 21665 - RNA, 21 nt, RNAi
aggaacacuccuagccauuuu

SEQ ID NO: 21666 - RNA, 21 nt, RNAi
uuuccuugugaggaucgguaa

SEQ ID NO: 21667 - DNA, 21 bp, homo sapiens
aaggaacactcctagccattt

SEQ ID NO: 21668 - RNA, 21 nt, RNAi
ggaacacuccuagccauuuuu

SEQ ID NO: 21669 - RNA, 21 nt, RNAi
uuccuugugaggaucgguaaa

SEQ ID NO: 21670 - DNA, 21 bp, homo sapiens
aaacgttaatgacactatcgt

SEQ ID NO: 21671 - RNA, 21 nt, RNAi
acguuaaugacacuaucguuu

SEQ ID NO: 21672 - RNA, 21 nt, RNAi
uuugcaauuacugugauagca

SEQ ID NO: 21673 - DNA, 21 bp, homo sapiens
aacgttaatgacactatcgta

SEQ ID NO: 21674 - RNA, 21 nt, RNAi
cguuaaugacacuaucguauu

SEQ ID NO: 21675 - RNA, 21 nt, RNAi
uugcaauuacugugauagcau

SEQ ID NO: 21676 - DNA, 21 bp, homo sapiens
aatgacactatcgtaacagag

SEQ ID NO: 21677 - RNA, 21 nt, RNAi
ugacacuaucguaacagaguu

SEQ ID NO: 21678 - RNA, 21 nt, RNAi
uuacugugauagcauugucuc

SEQ ID NO: 21679 - DNA, 21 bp, homo sapiens
aacagagctaacaaactgtac

SEQ ID NO: 21680 - RNA, 21 nt, RNAi
cagagcuaacaaacuguacuu

SEQ ID NO: 21681 - RNA, 21 nt, RNAi
uugucucgauuguuugacaug

SEQ ID NO: 21682 - DNA, 21 bp, homo sapiens
aacaaactgtacttctgcagc

SEQ ID NO: 21683 - RNA, 21 nt, RNAi
caaacuguacuucugcagcuu

SEQ ID NO: 21684 - RNA, 21 nt, RNAi
uuguuugacaugaagacgucg

SEQ ID NO: 21685 - DNA, 21 bp, homo sapiens
aacctcttcgtggctacatct

SEQ ID NO: 21686 - RNA, 21 nt, RNAi
ccucuucguggcuacaucuuu

SEQ ID NO: 21687 - RNA, 21 nt, RNAi
uuggagaagcaccgauguaga

SEQ ID NO: 21688 - DNA, 21 bp, homo sapiens
aatgttcgtcattaactggtg

SEQ ID NO: 21689 - RNA, 21 nt, RNAi
uguucgucauuaacugguguu

SEQ ID NO: 21690 - RNA, 21 nt, RNAi
uuacaagcaguaauugaccac

SEQ ID NO: 21691 - DNA, 21 bp, homo sapiens
aacatatgtgatagtccttgg

SEQ ID NO: 21692 - RNA, 21 nt, RNAi
cauaugugauaguccuugguu

SEQ ID NO: 21693 - RNA, 21 nt, RNAi
uuguauacacuaucaggaacc

SEQ ID NO: 21694 - DNA, 21 bp, homo sapiens
aatgcactgcagcattcaatt

SEQ ID NO: 21695 - RNA, 21 nt, RNAi
ugcacugcagcauucaauuuu

SEQ ID NO: 21696 - RNA, 21 nt, RNAi
uuacgugacgucguaaguuaa

SEQ ID NO: 21697 - DNA, 21 bp, homo sapiens
aactttaggccacagtgtctt

SEQ ID NO: 21698 - RNA, 21 nt, RNAi
cuuuaggccacagugucuuuu

SEQ ID NO: 21699 - RNA, 21 nt, RNAi
uugaaauccggugucacagaa

SEQ ID NO: 21700 - DNA, 21 bp, homo sapiens
aatgttggtttgatgatctgt

SEQ ID NO: 21701 - RNA, 21 nt, RNAi
uguugguuugaugaucuguuu

SEQ ID NO: 21702 - RNA, 21 nt, RNAi
uuacaaccaaacuacuagaca

SEQ ID NO: 21703 - DNA, 21 bp, homo sapiens
aagacaagccatgaaagagat

SEQ ID NO: 21704 - RNA, 21 nt, RNAi
gacaagccaugaaagagauuu

SEQ ID NO: 21705 - RNA, 21 nt, RNAi
uucuguucgguacuuucucua

SEQ ID NO: 21706 - DNA, 21 bp, homo sapiens
aaatatcagcgatggcttatt

SEQ ID NO: 21707 - RNA, 21 nt, RNAi
auaucagcgauggcuuauuuu

SEQ ID NO: 21708 - RNA, 21 nt, RNAi
uuuauagucgcuaccgaauaa

SEQ ID NO: 21709 - DNA, 21 bp, homo sapiens
aagccaaacacacttgtcctt

SEQ ID NO: 21710 - RNA, 21 nt, RNAi
gccaaacacacuuguccuuuu

SEQ ID NO: 21711 - RNA, 21 nt, RNAi
uucgguuugugugaacaggaa

SEQ ID NO: 21712 - DNA, 21 bp, homo sapiens
aaacacacttgtccttggatt

SEQ ID NO: 21713 - RNA, 21 nt, RNAi
acacacuuguccuuggauuuu

SEQ ID NO: 21714 - RNA, 21 nt, RNAi
uuugugugaacaggaaccuaa

SEQ ID NO: 21715 - DNA, 21 bp, homo sapiens
aagaaagattggttgcaagca

SEQ ID NO: 21716 - RNA, 21 nt, RNAi
gaaagauugguugcaagcauu

SEQ ID NO: 21717 - RNA, 21 nt, RNAi
uucuuucuaaccaacguucgu

SEQ ID NO: 21718 - DNA, 21 bp, homo sapiens
aaagattggttgcaagcagat

SEQ ID NO: 21719 - RNA, 21 nt, RNAi
agauugguugcaagcagauuu

SEQ ID NO: 21720 - RNA, 21 nt, RNAi
uuucuaaccaacguucgucua

SEQ ID NO: 21721 - DNA, 21 bp, homo sapiens
aatatggagtagtggttattc

SEQ ID NO: 21722 - RNA, 21 nt, RNAi
uauggaguagugguuauucuu

SEQ ID NO: 21723 - RNA, 21 nt, RNAi
uuauaccucaucaccaauaag

SEQ ID NO: 21724 - DNA, 21 bp, homo sapiens
aaggatgtggtagtaagtgtg

SEQ ID NO: 21725 - RNA, 21 nt, RNAi
ggaugugguaguaaguguguu

SEQ ID NO: 21726 - RNA, 21 nt, RNAi
uuccuacaccaucauucacac

SEQ ID NO: 21727 - DNA, 21 bp, homo sapiens
aaagtccgatttagatacttc

SEQ ID NO: 21728 - RNA, 21 nt, RNAi
aguccgauuuagauacuucuu

SEQ ID NO: 21729 - RNA, 21 nt, RNAi
uuucaggcuaaaucuaugaag

SEQ ID NO: 21730 - DNA, 21 bp, homo sapiens
aagtccgatttagatacttcc

SEQ ID NO: 21731 - RNA, 21 nt, RNAi
guccgauuuagauacuuccuu

SEQ ID NO: 21732 - RNA, 21 nt, RNAi
uucaggcuaaaucuaugaagg

SEQ ID NO: 21733 - DNA, 21 bp, homo sapiens
aagaggatggcaagactgcaa

SEQ ID NO: 21734 - RNA, 21 nt, RNAi
gaggauggcaagacugcaauu

SEQ ID NO: 21735 - RNA, 21 nt, RNAi
uucuccuaccguucugacguu

SEQ ID NO: 21736 - DNA, 21 bp, homo sapiens
aaacagaatagaccatgaccg

SEQ ID NO: 21737 - RNA, 21 nt, RNAi
acagaauagaccaugaccguu

SEQ ID NO: 21738 - RNA, 21 nt, RNAi
uuugucuuaucugguacuggc

SEQ ID NO: 21739 - DNA, 21 bp, homo sapiens
aacagaatagaccatgaccgg

SEQ ID NO: 21740 - RNA, 21 nt, RNAi
cagaauagaccaugaccgguu

SEQ ID NO: 21741 - RNA, 21 nt, RNAi
uugucuuaucugguacuggcc

SEQ ID NO: 21742 - DNA, 21 bp, homo sapiens
aaatcattgagccatacagac

SEQ ID NO: 21743 - RNA, 21 nt, RNAi
aucauugagccauacagacuu

SEQ ID NO: 21744 - RNA, 21 nt, RNAi
uuuaguaacucgguaugucug

SEQ ID NO: 21745 - DNA, 21 bp, homo sapiens
aatcattgagccatacagact

SEQ ID NO: 21746 - RNA, 21 nt, RNAi
ucauugagccauacagacuuu

SEQ ID NO: 21747 - RNA, 21 nt, RNAi
uuaguaacucgguaugucuga

SEQ ID NO: 21748 - DNA, 21 bp, homo sapiens
aagatgaaccatggcgaataa

SEQ ID NO: 21749 - RNA, 21 nt, RNAi
gaugaaccauggcgaauaauu

SEQ ID NO: 21750 - RNA, 21 nt, RNAi
uucuacuugguaccgcuuauu

SEQ ID NO: 21751 - DNA, 21 bp, homo sapiens
aaccatggcgaataacagata

SEQ ID NO: 21752 - RNA, 21 nt, RNAi
ccauggcgaauaacagauauu

SEQ ID NO: 21753 - RNA, 21 nt, RNAi
uugguaccgcuuauugucuau

SEQ ID NO: 21754 - DNA, 21 bp, homo sapiens
aacagataatgagcttgaact

SEQ ID NO: 21755 - RNA, 21 nt, RNAi
cagauaaugagcuugaacuuu

SEQ ID NO: 21756 - RNA, 21 nt, RNAi
uugucuauuacucgaacuuga

SEQ ID NO: 21757 - DNA, 21 bp, homo sapiens
caccaccagcactactattat

SEQ ID NO: 21758 - RNA, 21 nt, RNAi
ccaccagcacuacuauuauuu

SEQ ID NO: 21759 - RNA, 21 nt, RNAi
uugguggucgugaugauaaua

SEQ ID NO: 21760 - DNA, 21 bp, homo sapiens
caccagcactactattatgat

SEQ ID NO: 21761 - RNA, 21 nt, RNAi
ccagcacuacuauuaugauuu

SEQ ID NO: 21762 - RNA, 21 nt, RNAi
uuggucgugaugauaauacua

SEQ ID NO: 21763 - DNA, 21 bp, homo sapiens
cagcactactattatgatacc

SEQ ID NO: 21764 - RNA, 21 nt, RNAi
gcacuacuauuaugauaccuu

SEQ ID NO: 21765 - RNA, 21 nt, RNAi
uucgugaugauaauacuaugg

SEQ ID NO: 21766 - DNA, 21 bp, homo sapiens
cacgtatactgcagaaagtaa

SEQ ID NO: 21767 - RNA, 21 nt, RNAi
cguauacugcagaaaguaauu

SEQ ID NO: 21768 - RNA, 21 nt, RNAi
uugcauaugacgucuuucauu

SEQ ID NO: 21769 - DNA, 21 bp, homo sapiens
cagaaagtaaaggagtcgtga

SEQ ID NO: 21770 - RNA, 21 nt, RNAi
gaaaguaaaggagucgugauu

SEQ ID NO: 21771 - RNA, 21 nt, RNAi
uucuuucauuuccucagcacu

SEQ ID NO: 21772 - DNA, 21 bp, homo sapiens
caagctggaataggtctatca

SEQ ID NO: 21773 - RNA, 21 nt, RNAi
agcuggaauaggucuaucauu

SEQ ID NO: 21774 - RNA, 21 nt, RNAi
uuucgaccuuauccagauagu

SEQ ID NO: 21775 - DNA, 21 bp, homo sapiens
caattggtctaatcttcgcct

SEQ ID NO: 21776 - RNA, 21 nt, RNAi
auuggucuaaucuucgccuuu

SEQ ID NO: 21777 - RNA, 21 nt, RNAi
uuuaaccagauuagaagcgga

SEQ ID NO: 21778 - DNA, 21 bp, homo sapiens
caaaggaacactcctagccat

SEQ ID NO: 21779 - RNA, 21 nt, RNAi
aaggaacacuccuagccauuu

SEQ ID NO: 21780 - RNA, 21 nt, RNAi
uuuuccuugugaggaucggua

SEQ ID NO: 21781 - DNA, 21 bp, homo sapiens
cactatcgtaacagagctaac

SEQ ID NO: 21782 - RNA, 21 nt, RNAi
cuaucguaacagagcuaacuu

SEQ ID NO: 21783 - RNA, 21 nt, RNAi
uugauagcauugucucgauug

SEQ ID NO: 21784 - DNA, 21 bp, homo sapiens
caaactgtacttctgcagcct

SEQ ID NO: 21785 - RNA, 21 nt, RNAi
aacuguacuucugcagccuuu

SEQ ID NO: 21786 - RNA, 21 nt, RNAi
uuuugacaugaagacgucgga

SEQ ID NO: 21787 - DNA, 21 bp, homo sapiens
catcttgtgaaagcagtcctt

SEQ ID NO: 21788 - RNA, 21 nt, RNAi
ucuugugaaagcaguccuuuu

SEQ ID NO: 21789 - RNA, 21 nt, RNAi
uuagaacacuuucgucaggaa

SEQ ID NO: 21790 - DNA, 21 bp, homo sapiens
cagtccttgttcctatggcct

SEQ ID NO: 21791 - RNA, 21 nt, RNAi
guccuuguuccuauggccuuu

SEQ ID NO: 21792 - RNA, 21 nt, RNAi
uucaggaacaaggauaccgga

SEQ ID NO: 21793 - DNA, 21 bp, homo sapiens
catgtggatatcacttcttgg

SEQ ID NO: 21794 - RNA, 21 nt, RNAi
uguggauaucacuucuugguu

SEQ ID NO: 21795 - RNA, 21 nt, RNAi
uuacaccuauagugaagaacc

SEQ ID NO: 21796 - DNA, 21 bp, homo sapiens
cattcaattcgtctttctgga

SEQ ID NO: 21797 - RNA, 21 nt, RNAi
uucaauucgucuuucuggauu

SEQ ID NO: 21798 - RNA, 21 nt, RNAi
uuaaguuaagcagaaagaccu

SEQ ID NO: 21799 - DNA, 21 bp, homo sapiens
cacgtccagctttacttcatc

SEQ ID NO: 21800 - RNA, 21 nt, RNAi
cguccagcuuuacuucaucuu

SEQ ID NO: 21801 - RNA, 21 nt, RNAi
uugcaggucgaaaugaaguag

SEQ ID NO: 21802 - DNA, 21 bp, homo sapiens
caaatatcagcgatggcttat

SEQ ID NO: 21803 - RNA, 21 nt, RNAi
aauaucagcgauggcuuauuu

SEQ ID NO: 21804 - RNA, 21 nt, RNAi
uuuuauagucgcuaccgaaua

SEQ ID NO: 21805 - DNA, 21 bp, homo sapiens
cagtatttgatgcaggctgct

SEQ ID NO: 21806 - RNA, 21 nt, RNAi
guauuugaugcaggcugcuuu

SEQ ID NO: 21807 - RNA, 21 nt, RNAi
uucauaaacuacguccgacga

SEQ ID NO: 21808 - DNA, 21 bp, homo sapiens
caaacacacttgtccttggat

SEQ ID NO: 21809 - RNA, 21 nt, RNAi
aacacacuuguccuuggauuu

SEQ ID NO: 21810 - RNA, 21 nt, RNAi
uuuugugugaacaggaaccua

SEQ ID NO: 21811 - DNA, 21 bp, homo sapiens
catacaatatggagtagtggt

SEQ ID NO: 21812 - RNA, 21 nt, RNAi
uacaauauggaguagugguuu

SEQ ID NO: 21813 - RNA, 21 nt, RNAi
uuauguuauaccucaucacca

SEQ ID NO: 21814 - DNA, 21 bp, homo sapiens
caaggatgtggtagtaagtgt

SEQ ID NO: 21815 - RNA, 21 nt, RNAi
aggaugugguaguaaguguuu

SEQ ID NO: 21816 - RNA, 21 nt, RNAi
uuuccuacaccaucauucaca

SEQ ID NO: 21817 - DNA, 21 bp, homo sapiens
cagaatagaccatgaccggag

SEQ ID NO: 21818 - RNA, 21 nt, RNAi
gaauagaccaugaccggaguu

SEQ ID NO: 21819 - RNA, 21 nt, RNAi
uucuuaucugguacuggccuc

SEQ ID NO: 21820 - DNA, 21 bp, homo sapiens
catggttctaggagatatcaa

SEQ ID NO: 21821 - RNA, 21 nt, RNAi
ugguucuaggagauaucaauu

SEQ ID NO: 21822 - RNA, 21 nt, RNAi
uuaccaagauccucuauaguu

SEQ ID NO: 21823 - DNA, 21 bp, homo sapiens
cattgagccatacagacttca

SEQ ID NO: 21824 - RNA, 21 nt, RNAi
uugagccauacagacuucauu

SEQ ID NO: 21825 - RNA, 21 nt, RNAi
uuaacucgguaugucugaagu

SEQ ID NO: 21826 - DNA, 21 bp, homo sapiens
catggcgaataacagataatg

SEQ ID NO: 21827 - RNA, 21 nt, RNAi
uggcgaauaacagauaauguu

SEQ ID NO: 21828 - RNA, 21 nt, RNAi
uuaccgcuuauugucuauuac

SEQ ID NO: 21829 - DNA, 21 bp, homo sapiens
caagacataccggcagatcag

SEQ ID NO: 21830 - RNA, 21 nt, RNAi
agacauaccggcagaucaguu

SEQ ID NO: 21831 - RNA, 21 nt, RNAi
uuucuguauggccgucuaguc

SEQ ID NO: 21832 - DNA, 21 bp, homo sapiens
gaaagtactccaaccagagat

SEQ ID NO: 21833 - RNA, 21 nt, RNAi
aaguacuccaaccagagauuu

SEQ ID NO: 21834 - RNA, 21 nt, RNAi
uuuucaugagguuggucucua

SEQ ID NO: 21835 - DNA, 21 bp, homo sapiens
gaaagtaaaggagtcgtgaag

SEQ ID NO: 21836 - RNA, 21 nt, RNAi
aaguaaaggagucgugaaguu

SEQ ID NO: 21837 - RNA, 21 nt, RNAi
uuuucauuuccucagcacuuc

SEQ ID NO: 21838 - DNA, 21 bp, homo sapiens
gaataggtctatcagtccttg

SEQ ID NO: 21839 - RNA, 21 nt, RNAi
auaggucuaucaguccuuguu

SEQ ID NO: 21840 - RNA, 21 nt, RNAi
uuuauccagauagucaggaac

SEQ ID NO: 21841 - DNA, 21 bp, homo sapiens
gaatttggtggtgcaattggt

SEQ ID NO: 21842 - RNA, 21 nt, RNAi
auuugguggugcaauugguuu

SEQ ID NO: 21843 - RNA, 21 nt, RNAi
uuuaaaccaccacguuaacca

SEQ ID NO: 21844 - DNA, 21 bp, homo sapiens
gaaaccgtggtggagttgctt

SEQ ID NO: 21845 - RNA, 21 nt, RNAi
aaccgugguggaguugcuuuu

SEQ ID NO: 21846 - RNA, 21 nt, RNAi
uuuuggcaccaccucaacgaa

SEQ ID NO: 21847 - DNA, 21 bp, homo sapiens
gatatccgaattattggagcc

SEQ ID NO: 21848 - RNA, 21 nt, RNAi
uauccgaauuauuggagccuu

SEQ ID NO: 21849 - RNA, 21 nt, RNAi
uuauaggcuuaauaaccucgg

SEQ ID NO: 21850 - DNA, 21 bp, homo sapiens
gagccattacagtcgtgattc

SEQ ID NO: 21851 - RNA, 21 nt, RNAi
gccauuacagucgugauucuu

SEQ ID NO: 21852 - RNA, 21 nt, RNAi
uucgguaaugucagcacuaag

SEQ ID NO: 21853 - DNA, 21 bp, homo sapiens
gatcttgcagatcctcagtca

SEQ ID NO: 21854 - RNA, 21 nt, RNAi
ucuugcagauccucagucauu

SEQ ID NO: 21855 - RNA, 21 nt, RNAi
uuagaacgucuaggagucagu

SEQ ID NO: 21856 - DNA, 21 bp, homo sapiens
gagatgccactggaaacgtta

SEQ ID NO: 21857 - RNA, 21 nt, RNAi
gaugccacuggaaacguuauu

SEQ ID NO: 21858 - RNA, 21 nt, RNAi
uucuacggugaccuuugcaau

SEQ ID NO: 21859 - DNA, 21 bp, homo sapiens
gatgccactggaaacgttaat

SEQ ID NO: 21860 - RNA, 21 nt, RNAi
ugccacuggaaacguuaauuu

SEQ ID NO: 21861 - RNA, 21 nt, RNAi
uuacggugaccuuugcaauua

SEQ ID NO: 21862 - DNA, 21 bp, homo sapiens
gaaacgttaatgacactatcg

SEQ ID NO: 21863 - RNA, 21 nt, RNAi
aacguuaaugacacuaucguu

SEQ ID NO: 21864 - RNA, 21 nt, RNAi
uuuugcaauuacugugauagc

SEQ ID NO: 21865 - DNA, 21 bp, homo sapiens
gacactatcgtaacagagcta

SEQ ID NO: 21866 - RNA, 21 nt, RNAi
cacuaucguaacagagcuauu

SEQ ID NO: 21867 - RNA, 21 nt, RNAi
uugugauagcauugucucgau

SEQ ID NO: 21868 - DNA, 21 bp, homo sapiens
gatgtttgctaaaggttatgg

SEQ ID NO: 21869 - RNA, 21 nt, RNAi
uguuugcuaaagguuaugguu

SEQ ID NO: 21870 - RNA, 21 nt, RNAi
uuacaaacgauuuccaauacc

SEQ ID NO: 21871 - DNA, 21 bp, homo sapiens
gaacctcttcgtggctacatc

SEQ ID NO: 21872 - RNA, 21 nt, RNAi
accucuucguggcuacaucuu

SEQ ID NO: 21873 - RNA, 21 nt, RNAi
uuuggagaagcaccgauguag

SEQ ID NO: 21874 - DNA, 21 bp, homo sapiens
gatggcgtcctgcattcaaat

SEQ ID NO: 21875 - RNA, 21 nt, RNAi
uggcguccugcauucaaauuu

SEQ ID NO: 21876 - RNA, 21 nt, RNAi
uuaccgcaggacguaaguuua

SEQ ID NO: 21877 - DNA, 21 bp, homo sapiens
gaatgcactgcagcattcaat

SEQ ID NO: 21878 - RNA, 21 nt, RNAi
augcacugcagcauucaauuu

SEQ ID NO: 21879 - RNA, 21 nt, RNAi
uuuacgugacgucguaaguua

SEQ ID NO: 21880 - DNA, 21 bp, homo sapiens
gaagacaagccatgaaagaga

SEQ ID NO: 21881 - RNA, 21 nt, RNAi
agacaagccaugaaagagauu

SEQ ID NO: 21882 - RNA, 21 nt, RNAi
uuucuguucgguacuuucucu

SEQ ID NO: 21883 - DNA, 21 bp, homo sapiens
gagatgtccatcgatcaagcc

SEQ ID NO: 21884 - RNA, 21 nt, RNAi
gauguccaucgaucaagccuu

SEQ ID NO: 21885 - RNA, 21 nt, RNAi
uucuacagguagcuaguucgg

SEQ ID NO: 21886 - DNA, 21 bp, homo sapiens
gatgtccatcgatcaagccaa

SEQ ID NO: 21887 - RNA, 21 nt, RNAi
uguccaucgaucaagccaauu

SEQ ID NO: 21888 - RNA, 21 nt, RNAi
uuacagguagcuaguucgguu

SEQ ID NO: 21889 - DNA, 21 bp, homo sapiens
gaagccaaacacacttgtcct

SEQ ID NO: 21890 - RNA, 21 nt, RNAi
agccaaacacacuuguccuuu

SEQ ID NO: 21891 - RNA, 21 nt, RNAi
uuucgguuugugugaacagga

SEQ ID NO: 21892 - DNA, 21 bp, homo sapiens
gaaagattggttgcaagcaga

SEQ ID NO: 21893 - RNA, 21 nt, RNAi
aagauugguugcaagcagauu

SEQ ID NO: 21894 - RNA, 21 nt, RNAi
uuuucuaaccaacguucgucu

SEQ ID NO: 21895 - DNA, 21 bp, homo sapiens
gagtagtggttattcgcctaa

SEQ ID NO: 21896 - RNA, 21 nt, RNAi
guagugguuauucgccuaauu

SEQ ID NO: 21897 - RNA, 21 nt, RNAi
uucaucaccaauaagcggauu

SEQ ID NO: 21898 - DNA, 21 bp, homo sapiens
gaagaggatggcaagactgca

SEQ ID NO: 21899 - RNA, 21 nt, RNAi
agaggauggcaagacugcauu

SEQ ID NO: 21900 - RNA, 21 nt, RNAi
uuucuccuaccguucugacgu

SEQ ID NO: 21901 - DNA, 21 bp, homo sapiens
gatgatggaggtttgacctta

SEQ ID NO: 21902 - RNA, 21 nt, RNAi
ugauggagguuugaccuuauu

SEQ ID NO: 21903 - RNA, 21 nt, RNAi
uuacuaccuccaaacuggaau

SEQ ID NO: 21904 - DNA, 21 bp, homo sapiens
gatggaggtttgaccttattg

SEQ ID NO: 21905 - RNA, 21 nt, RNAi
uggagguuugaccuuauuguu

SEQ ID NO: 21906 - RNA, 21 nt, RNAi
uuaccuccaaacuggaauaac

SEQ ID NO: 21907 - DNA, 21 bp, homo sapiens
gaatagaccatgaccggagag

SEQ ID NO: 21908 - RNA, 21 nt, RNAi
auagaccaugaccggagaguu

SEQ ID NO: 21909 - RNA, 21 nt, RNAi
uuuaucugguacuggccucuc

SEQ ID NO: 21910 - DNA, 21 bp, homo sapiens
gatatcatggttctaggagat

SEQ ID NO: 21911 - RNA, 21 nt, RNAi
uaucaugguucuaggagauuu

SEQ ID NO: 21912 - RNA, 21 nt, RNAi
uuauaguaccaagauccucua

SEQ ID NO: 21913 - DNA, 21 bp, homo sapiens
gaggaaatcattgagccatac

SEQ ID NO: 21914 - RNA, 21 nt, RNAi
ggaaaucauugagccauacuu

SEQ ID NO: 21915 - RNA, 21 nt, RNAi
uuccuuuaguaacucgguaug

SEQ ID NO: 21916 - DNA, 21 bp, homo sapiens
gaaatcattgagccatacaga

SEQ ID NO: 21917 - RNA, 21 nt, RNAi
aaucauugagccauacagauu

SEQ ID NO: 21918 - RNA, 21 nt, RNAi
uuuuaguaacucgguaugucu

SEQ ID NO: 21919 - DNA, 21 bp, homo sapiens
gaagatgaaccatggcgaata

SEQ ID NO: 21920 - RNA, 21 nt, RNAi
agaugaaccauggcgaauauu

SEQ ID NO: 21921 - RNA, 21 nt, RNAi
uuucuacuugguaccgcuuau

SEQ ID NO: 21922 - DNA, 21 bp, homo sapiens
gatgaaccatggcgaataaca

SEQ ID NO: 21923 - RNA, 21 nt, RNAi
ugaaccauggcgaauaacauu

SEQ ID NO: 21924 - RNA, 21 nt, RNAi
uuacuugguaccgcuuauugu

SEQ ID NO: 21925 - DNA, 21 bp, homo sapiens
gaaccatggcgaataacagat

SEQ ID NO: 21926 - RNA, 21 nt, RNAi
accauggcgaauaacagauuu

SEQ ID NO: 21927 - RNA, 21 nt, RNAi
uuugguaccgcuuauugucua

SEQ ID NO: 21928 - DNA, 21 bp, homo sapiens
gaccaagacataccggcagat

SEQ ID NO: 21929 - RNA, 21 nt, RNAi
ccaagacauaccggcagauuu

SEQ ID NO: 21930 - RNA, 21 nt, RNAi
uugguucuguauggccgucua

SEQ ID NO: 21931 - DNA, 21 bp, homo sapiens
gacataccggcagatcaggtt

SEQ ID NO: 21932 - RNA, 21 nt, RNAi
cauaccggcagaucagguuuu

SEQ ID NO: 21933 - RNA, 21 nt, RNAi
uuguauggccgucuaguccaa

SEQ ID NO: 21934 - DNA, 21 bp, homo sapiens
tactccaaccagagatgctgt

SEQ ID NO: 21935 - RNA, 21 nt, RNAi
cuccaaccagagaugcuguuu

SEQ ID NO: 21936 - RNA, 21 nt, RNAi
uugagguuggucucuacgaca

SEQ ID NO: 21937 - DNA, 21 bp, homo sapiens
tatactgcagaaagtaaagga

SEQ ID NO: 21938 - RNA, 21 nt, RNAi
uacugcagaaaguaaaggauu

SEQ ID NO: 21939 - RNA, 21 nt, RNAi
uuaugacgucuuucauuuccu

SEQ ID NO: 21940 - DNA, 21 bp, homo sapiens
taaaggagtcgtgaagtttgg

SEQ ID NO: 21941 - RNA, 21 nt, RNAi
aaggagucgugaaguuugguu

SEQ ID NO: 21942 - RNA, 21 nt, RNAi
uuuuccucagcacuucaaacc

SEQ ID NO: 21943 - DNA, 21 bp, homo sapiens
taggtctatcagtccttgtaa

SEQ ID NO: 21944 - RNA, 21 nt, RNAi
ggucuaucaguccuuguaauu

SEQ ID NO: 21945 - RNA, 21 nt, RNAi
uuccagauagucaggaacauu

SEQ ID NO: 21946 - DNA, 21 bp, homo sapiens
tatcacaggattgtctacttc

SEQ ID NO: 21947 - RNA, 21 nt, RNAi
ucacaggauugucuacuucuu

SEQ ID NO: 21948 - RNA, 21 nt, RNAi
uuaguguccuaacagaugaag

SEQ ID NO: 21949 - DNA, 21 bp, homo sapiens
tatccgaattattggagccat

SEQ ID NO: 21950 - RNA, 21 nt, RNAi
uccgaauuauuggagccauuu

SEQ ID NO: 21951 - RNA, 21 nt, RNAi
uuaggcuuaauaaccucggua

SEQ ID NO: 21952 - DNA, 21 bp, homo sapiens
tattggagccattacagtcgt

SEQ ID NO: 21953 - RNA, 21 nt, RNAi
uuggagccauuacagucguuu

SEQ ID NO: 21954 - RNA, 21 nt, RNAi
uuaaccucgguaaugucagca

SEQ ID NO: 21955 - DNA, 21 bp, homo sapiens
tattggtgatttcgtcatagg

SEQ ID NO: 21956 - RNA, 21 nt, RNAi
uuggugauuucgucauagguu

SEQ ID NO: 21957 - RNA, 21 nt, RNAi
uuaaccacuaaagcaguaucc

SEQ ID NO: 21958 - DNA, 21 bp, homo sapiens
tactacattggtttacgtagg

SEQ ID NO: 21959 - RNA, 21 nt, RNAi
cuacauugguuuacguagguu

SEQ ID NO: 21960 - RNA, 21 nt, RNAi
uugauguaaccaaaugcaucc

SEQ ID NO: 21961 - DNA, 21 bp, homo sapiens
taggttcttgtgttgttcgag

SEQ ID NO: 21962 - RNA, 21 nt, RNAi
gguucuuguguuguucgaguu

SEQ ID NO: 21963 - RNA, 21 nt, RNAi
uuccaagaacacaacaagcuc

SEQ ID NO: 21964 - DNA, 21 bp, homo sapiens
taatgacactatcgtaacaga

SEQ ID NO: 21965 - RNA, 21 nt, RNAi
augacacuaucguaacagauu

SEQ ID NO: 21966 - RNA, 21 nt, RNAi
uuuacugugauagcauugucu

SEQ ID NO: 21967 - DNA, 21 bp, homo sapiens
taacagagctaacaaactgta

SEQ ID NO: 21968 - RNA, 21 nt, RNAi
acagagcuaacaaacuguauu

SEQ ID NO: 21969 - RNA, 21 nt, RNAi
uuugucucgauuguuugacau

SEQ ID NO: 21970 - DNA, 21 bp, homo sapiens
taacaaactgtacttctgcag

SEQ ID NO: 21971 - RNA, 21 nt, RNAi
acaaacuguacuucugcaguu

SEQ ID NO: 21972 - RNA, 21 nt, RNAi
uuuguuugacaugaagacguc

SEQ ID NO: 21973 - DNA, 21 bp, homo sapiens
tatggcctaatgaacaacttc

SEQ ID NO: 21974 - RNA, 21 nt, RNAi
uggccuaaugaacaacuucuu

SEQ ID NO: 21975 - RNA, 21 nt, RNAi
uuaccggauuacuuguugaag

SEQ ID NO: 21976 - DNA, 21 bp, homo sapiens
tatttcaggctctatgtaagg

SEQ ID NO: 21977 - RNA, 21 nt, RNAi
uuucaggcucuauguaagguu

SEQ ID NO: 21978 - RNA, 21 nt, RNAi
uuaaaguccgagauacauucc

SEQ ID NO: 21979 - DNA, 21 bp, homo sapiens
taattgcacttggattcatct

SEQ ID NO: 21980 - RNA, 21 nt, RNAi
auugcacuuggauucaucuuu

SEQ ID NO: 21981 - RNA, 21 nt, RNAi
uuuaacgugaaccuaaguaga

SEQ ID NO: 21982 - DNA, 21 bp, homo sapiens
taatgttcgtcattaactggt

SEQ ID NO: 21983 - RNA, 21 nt, RNAi
auguucgucauuaacugguuu

SEQ ID NO: 21984 - RNA, 21 nt, RNAi
uuuacaagcaguaauugacca

SEQ ID NO: 21985 - DNA, 21 bp, homo sapiens
tatgctccagtacatgcagat

SEQ ID NO: 21986 - RNA, 21 nt, RNAi
ugcuccaguacaugcagauuu

SEQ ID NO: 21987 - RNA, 21 nt, RNAi
uuacgaggucauguacgucua

SEQ ID NO: 21988 - DNA, 21 bp, homo sapiens
taagaaagattggttgcaagc

SEQ ID NO: 21989 - RNA, 21 nt, RNAi
agaaagauugguugcaagcuu

SEQ ID NO: 21990 - RNA, 21 nt, RNAi
uuucuuucuaaccaacguucg

SEQ ID NO: 21991 - DNA, 21 bp, homo sapiens
tacaatatggagtagtggtta

SEQ ID NO: 21992 - RNA, 21 nt, RNAi
caauauggaguagugguuauu

SEQ ID NO: 21993 - RNA, 21 nt, RNAi
uuguuauaccucaucaccaau

SEQ ID NO: 21994 - DNA, 21 bp, homo sapiens
tatggagtagtggttattcgc

SEQ ID NO: 21995 - RNA, 21 nt, RNAi
uggaguagugguuauucgcuu

SEQ ID NO: 21996 - RNA, 21 nt, RNAi
uuaccucaucaccaauaagcg

SEQ ID NO: 21997 - DNA, 21 bp, homo sapiens
tattgtgcctttaaatgtagc

SEQ ID NO: 21998 - RNA, 21 nt, RNAi
uugugccuuuaaauguagcuu

SEQ ID NO: 21999 - RNA, 21 nt, RNAi
uuaacacggaaauuuacaucg

SEQ ID NO: 22000 - DNA, 21 bp, homo sapiens
taccttctgacgaccaagaaa

SEQ ID NO: 22001 - RNA, 21 nt, RNAi
ccuucugacgaccaagaaauu

SEQ ID NO: 22002 - RNA, 21 nt, RNAi
uuggaagacugcugguucuuu

SEQ ID NO: 22003 - DNA, 21 bp, homo sapiens
taaacagaatagaccatgacc

SEQ ID NO: 22004 - RNA, 21 nt, RNAi
aacagaauagaccaugaccuu

SEQ ID NO: 22005 - RNA, 21 nt, RNAi
uuuugucuuaucugguacugg

SEQ ID NO: 22006 - DNA, 21 bp, homo sapiens
tagcaagttccggatagactt

SEQ ID NO: 22007 - RNA, 21 nt, RNAi
gcaaguuccggauagacuuuu

SEQ ID NO: 22008 - RNA, 21 nt, RNAi
uucguucaaggccuaucugaa

SEQ ID NO: 22009 - DNA, 21 bp, homo sapiens
tatcatggttctaggagatat

SEQ ID NO: 22010 - RNA, 21 nt, RNAi
ucaugguucuaggagauauuu

SEQ ID NO: 22011 - RNA, 21 nt, RNAi
uuaguaccaagauccucuaua

SEQ ID NO: 22012 - DNA, 21 bp, homo sapiens
taagaccaagacataccggca

SEQ ID NO: 22013 - RNA, 21 nt, RNAi
agaccaagacauaccggcauu

SEQ ID NO: 22014 - RNA, 21 nt, RNAi
uuucugguucuguauggccgu

SEQ ID NO: 22015 - DNA, 21 bp, homo sapiens
aatggcttcatcaacacagtc

SEQ ID NO: 22016 - RNA, 21 nt, RNAi
uggcuucaucaacacagucuu

SEQ ID NO: 22017 - RNA, 21 nt, RNAi
uuaccgaaguaguugugucag

SEQ ID NO: 22018 - DNA, 21 bp, homo sapiens
aacgtcaagtccagctgctcg

SEQ ID NO: 22019 - RNA, 21 nt, RNAi
cgucaaguccagcugcucguu

SEQ ID NO: 22020 - RNA, 21 nt, RNAi
uugcaguucaggucgacgagc

SEQ ID NO: 22021 - DNA, 21 bp, homo sapiens
aaatgcaccagttgaaggaca

SEQ ID NO: 22022 - RNA, 21 nt, RNAi
augcaccaguugaaggacauu

SEQ ID NO: 22023 - RNA, 21 nt, RNAi
uuuacguggucaacuuccugu

SEQ ID NO: 22024 - DNA, 21 bp, homo sapiens
aatgcaccagttgaaggacag

SEQ ID NO: 22025 - RNA, 21 nt, RNAi
ugcaccaguugaaggacaguu

SEQ ID NO: 22026 - RNA, 21 nt, RNAi
uuacguggucaacuuccuguc

SEQ ID NO: 22027 - DNA, 21 bp, homo sapiens
aaaccatcagagacctgcctc

SEQ ID NO: 22028 - RNA, 21 nt, RNAi
accaucagagaccugccucuu

SEQ ID NO: 22029 - RNA, 21 nt, RNAi
uuugguagucucuggacggag

SEQ ID NO: 22030 - DNA, 21 bp, homo sapiens
aaccatcagagacctgcctct

SEQ ID NO: 22031 - RNA, 21 nt, RNAi
ccaucagagaccugccucuuu

SEQ ID NO: 22032 - RNA, 21 nt, RNAi
uugguagucucuggacggaga

SEQ ID NO: 22033 - DNA, 21 bp, homo sapiens
aagttctgcctgttctgcacc

SEQ ID NO: 22034 - RNA, 21 nt, RNAi
guucugccuguucugcaccuu

SEQ ID NO: 22035 - RNA, 21 nt, RNAi
uucaagacggacaagacgugg

SEQ ID NO: 22036 - DNA, 21 bp, homo sapiens
aaggccacctgaacctaacgg

SEQ ID NO: 22037 - RNA, 21 nt, RNAi
ggccaccugaaccuaacgguu

SEQ ID NO: 22038 - RNA, 21 nt, RNAi
uuccgguggacuuggauugcc

SEQ ID NO: 22039 - DNA, 21 bp, homo sapiens
aatgtggacggccagaaggtg

SEQ ID NO: 22040 - RNA, 21 nt, RNAi
uguggacggccagaagguguu

SEQ ID NO: 22041 - RNA, 21 nt, RNAi
uuacaccugccggucuuccac

SEQ ID NO: 22042 - DNA, 21 bp, homo sapiens
aaggtgtaccgagactgtagc

SEQ ID NO: 22043 - RNA, 21 nt, RNAi
gguguaccgagacuguagcuu

SEQ ID NO: 22044 - RNA, 21 nt, RNAi
uuccacauggcucugacaucg

SEQ ID NO: 22045 - DNA, 21 bp, homo sapiens
aaatgcacttcaacttgtcag

SEQ ID NO: 22046 - RNA, 21 nt, RNAi
augcacuucaacuugucaguu

SEQ ID NO: 22047 - RNA, 21 nt, RNAi
uuuacgugaaguugaacaguc

SEQ ID NO: 22048 - DNA, 21 bp, homo sapiens
aatgcacttcaacttgtcaga

SEQ ID NO: 22049 - RNA, 21 nt, RNAi
ugcacuucaacuugucagauu

SEQ ID NO: 22050 - RNA, 21 nt, RNAi
uuacgugaaguugaacagucu

SEQ ID NO: 22051 - DNA, 21 bp, homo sapiens
aacggcaactctacgatgtgt

SEQ ID NO: 22052 - RNA, 21 nt, RNAi
cggcaacucuacgauguguuu

SEQ ID NO: 22053 - RNA, 21 nt, RNAi
uugccguugagaugcuacaca

SEQ ID NO: 22054 - DNA, 21 bp, homo sapiens
aactctacgatgtgtccgtga

SEQ ID NO: 22055 - RNA, 21 nt, RNAi
cucuacgauguguccgugauu

SEQ ID NO: 22056 - RNA, 21 nt, RNAi
uugagaugcuacacaggcacu

SEQ ID NO: 22057 - DNA, 21 bp, homo sapiens
aatccagtggattgtagttag

SEQ ID NO: 22058 - RNA, 21 nt, RNAi
uccaguggauuguaguuaguu

SEQ ID NO: 22059 - RNA, 21 nt, RNAi
uuaggucaccuaacaucaauc

SEQ ID NO: 22060 - DNA, 21 bp, homo sapiens
aaggcctgtctgctgtggcag

SEQ ID NO: 22061 - RNA, 21 nt, RNAi
ggccugucugcuguggcaguu

SEQ ID NO: 22062 - RNA, 21 nt, RNAi
uuccggacagacgacaccguc

SEQ ID NO: 22063 - DNA, 21 bp, homo sapiens
aattcggccatgagccgctac

SEQ ID NO: 22064 - RNA, 21 nt, RNAi
uucggccaugagccgcuacuu

SEQ ID NO: 22065 - RNA, 21 nt, RNAi
uuaagccgguacucggcgaug

SEQ ID NO: 22066 - DNA, 21 bp, homo sapiens
aacttctatttgacctgcaac

SEQ ID NO: 22067 - RNA, 21 nt, RNAi
cuucuauuugaccugcaacuu

SEQ ID NO: 22068 - RNA, 21 nt, RNAi
uugaagauaaacuggacguug

SEQ ID NO: 22069 - DNA, 21 bp, homo sapiens
aaccttctacttaacctgtgg

SEQ ID NO: 22070 - RNA, 21 nt, RNAi
ccuucuacuuaaccugugguu

SEQ ID NO: 22071 - RNA, 21 nt, RNAi
uuggaagaugaauuggacacc

SEQ ID NO: 22072 - DNA, 21 bp, homo sapiens
aacctgtggtttaaagtcggc

SEQ ID NO: 22073 - RNA, 21 nt, RNAi
ccugugguuuaaagucggcuu

SEQ ID NO: 22074 - RNA, 21 nt, RNAi
uuggacaccaaauuucagccg

SEQ ID NO: 22075 - DNA, 21 bp, homo sapiens
aaagtcggctgtgacctcctg

SEQ ID NO: 22076 - RNA, 21 nt, RNAi
agucggcugugaccuccuguu

SEQ ID NO: 22077 - RNA, 21 nt, RNAi
uuucagccgacacuggaggac

SEQ ID NO: 22078 - DNA, 21 bp, homo sapiens
aagtcggctgtgacctcctgt

SEQ ID NO: 22079 - RNA, 21 nt, RNAi
gucggcugugaccuccuguuu

SEQ ID NO: 22080 - RNA, 21 nt, RNAi
uucagccgacacuggaggaca

SEQ ID NO: 22081 - DNA, 21 bp, homo sapiens
aaggcttgtgtgtcctcagtt

SEQ ID NO: 22082 - RNA, 21 nt, RNAi
ggcuuguguguccucaguuuu

SEQ ID NO: 22083 - RNA, 21 nt, RNAi
uuccgaacacacaggagucaa

SEQ ID NO: 22084 - DNA, 21 bp, homo sapiens
catgaggtgcggtacgtctcg

SEQ ID NO: 22085 - RNA, 21 nt, RNAi
ugaggugcgguacgucucguu

SEQ ID NO: 22086 - RNA, 21 nt, RNAi
uuacuccacgccaugcagagc

SEQ ID NO: 22087 - DNA, 21 bp, homo sapiens
catcctgttcttcctgtgtgc

SEQ ID NO: 22088 - RNA, 21 nt, RNAi
uccuguucuuccugugugcuu

SEQ ID NO: 22089 - RNA, 21 nt, RNAi
uuaggacaagaaggacacacg

SEQ ID NO: 22090 - DNA, 21 bp, homo sapiens
catcaacacagtcatcacctc

SEQ ID NO: 22091 - RNA, 21 nt, RNAi
ucaacacagucaucaccucuu

SEQ ID NO: 22092 - RNA, 21 nt, RNAi
uuaguugugucaguaguggag

SEQ ID NO: 22093 - DNA, 21 bp, homo sapiens
catcgccagctcctacgacat

SEQ ID NO: 22094 - RNA, 21 nt, RNAi
ucgccagcuccuacgacauuu

SEQ ID NO: 22095 - RNA, 21 nt, RNAi
uuagcggucgaggaugcugua

SEQ ID NO: 22096 - DNA, 21 bp, homo sapiens
cagctcctacgacattgccgc

SEQ ID NO: 22097 - RNA, 21 nt, RNAi
gcuccuacgacauugccgcuu

SEQ ID NO: 22098 - RNA, 21 nt, RNAi
uucgaggaugcuguaacggcg

SEQ ID NO: 22099 - DNA, 21 bp, homo sapiens
caccttcgtcagctacttcgg

SEQ ID NO: 22100 - RNA, 21 nt, RNAi
ccuucgucagcuacuucgguu

SEQ ID NO: 22101 - RNA, 21 nt, RNAi
uuggaagcagucgaugaagcc

SEQ ID NO: 22102 - DNA, 21 bp, homo sapiens
cacttcacggctggccgctat

SEQ ID NO: 22103 - RNA, 21 nt, RNAi
cuucacggcuggccgcuauuu

SEQ ID NO: 22104 - RNA, 21 nt, RNAi
uugaagugccgaccggcgaua

SEQ ID NO: 22105 - DNA, 21 bp, homo sapiens
cacctacctggatgagaacgt

SEQ ID NO: 22106 - RNA, 21 nt, RNAi
ccuaccuggaugagaacguuu

SEQ ID NO: 22107 - RNA, 21 nt, RNAi
uuggauggaccuacucuugca

SEQ ID NO: 22108 - DNA, 21 bp, homo sapiens
cattgccatcttctacacagc

SEQ ID NO: 22109 - RNA, 21 nt, RNAi
uugccaucuucuacacagcuu

SEQ ID NO: 22110 - RNA, 21 nt, RNAi
uuaacgguagaagaugugucg

SEQ ID NO: 22111 - DNA, 21 bp, homo sapiens
catcttctacacagcggccat

SEQ ID NO: 22112 - RNA, 21 nt, RNAi
ucuucuacacagcggccauuu

SEQ ID NO: 22113 - RNA, 21 nt, RNAi
uuagaagaugugucgccggua

SEQ ID NO: 22114 - DNA, 21 bp, homo sapiens
cagctgccggctacctgattg

SEQ ID NO: 22115 - RNA, 21 nt, RNAi
gcugccggcuaccugauuguu

SEQ ID NO: 22116 - RNA, 21 nt, RNAi
uucgacggccgauggacuaac

SEQ ID NO: 22117 - DNA, 21 bp, homo sapiens
cagcgctacgcggtcatgaga

SEQ ID NO: 22118 - RNA, 21 nt, RNAi
gcgcuacgcggucaugagauu

SEQ ID NO: 22119 - RNA, 21 nt, RNAi
uucgcgaugcgccaguacucu

SEQ ID NO: 22120 - DNA, 21 bp, homo sapiens
caccagttgaaggacagcagc

SEQ ID NO: 22121 - RNA, 21 nt, RNAi
ccaguugaaggacagcagcuu

SEQ ID NO: 22122 - RNA, 21 nt, RNAi
uuggucaacuuccugucgucg

SEQ ID NO: 22123 - DNA, 21 bp, homo sapiens
cagttgaaggacagcagccgt

SEQ ID NO: 22124 - RNA, 21 nt, RNAi
guugaaggacagcagccguuu

SEQ ID NO: 22125 - RNA, 21 nt, RNAi
uucaacuuccugucgucggca

SEQ ID NO: 22126 - DNA, 21 bp, homo sapiens
catcagagacctgcctctctc

SEQ ID NO: 22127 - RNA, 21 nt, RNAi
ucagagaccugccucucucuu

SEQ ID NO: 22128 - RNA, 21 nt, RNAi
uuagucucuggacggagagag

SEQ ID NO: 22129 - DNA, 21 bp, homo sapiens
cagagacctgcctctctccat

SEQ ID NO: 22130 - RNA, 21 nt, RNAi
gagaccugccucucuccauuu

SEQ ID NO: 22131 - RNA, 21 nt, RNAi
uucucuggacggagagaggua

SEQ ID NO: 22132 - DNA, 21 bp, homo sapiens
catctggctcctgctgaagaa

SEQ ID NO: 22133 - RNA, 21 nt, RNAi
ucuggcuccugcugaagaauu

SEQ ID NO: 22134 - RNA, 21 nt, RNAi
uuagaccgaggacgacuucuu

SEQ ID NO: 22135 - DNA, 21 bp, homo sapiens
cacgttcatcctgctctgcct

SEQ ID NO: 22136 - RNA, 21 nt, RNAi
cguucauccugcucugccuuu

SEQ ID NO: 22137 - RNA, 21 nt, RNAi
uugcaaguaggacgagacgga

SEQ ID NO: 22138 - DNA, 21 bp, homo sapiens
caccgaggccactctcatcac

SEQ ID NO: 22139 - RNA, 21 nt, RNAi
ccgaggccacucucaucacuu

SEQ ID NO: 22140 - RNA, 21 nt, RNAi
uuggcuccggugagaguagug

SEQ ID NO: 22141 - DNA, 21 bp, homo sapiens
cactctcatcaccggcatgtc

SEQ ID NO: 22142 - RNA, 21 nt, RNAi
cucucaucaccggcaugucuu

SEQ ID NO: 22143 - RNA, 21 nt, RNAi
uugagaguaguggccguacag

SEQ ID NO: 22144 - DNA, 21 bp, homo sapiens
catcaccggcatgtccacgtt

SEQ ID NO: 22145 - RNA, 21 nt, RNAi
ucaccggcauguccacguuuu

SEQ ID NO: 22146 - RNA, 21 nt, RNAi
uuaguggccguacaggugcaa

SEQ ID NO: 22147 - DNA, 21 bp, homo sapiens
caccggcatgtccacgttcag

SEQ ID NO: 22148 - RNA, 21 nt, RNAi
ccggcauguccacguucaguu

SEQ ID NO: 22149 - RNA, 21 nt, RNAi
uuggccguacaggugcaaguc

SEQ ID NO: 22150 - DNA, 21 bp, homo sapiens
cagttcagcctgagtgcctca

SEQ ID NO: 22151 - RNA, 21 nt, RNAi
guucagccugagugccucauu

SEQ ID NO: 22152 - RNA, 21 nt, RNAi
uucaagucggacucacggagu

SEQ ID NO: 22153 - DNA, 21 bp, homo sapiens
cagcctgagtgcctcagaagc

SEQ ID NO: 22154 - RNA, 21 nt, RNAi
gccugagugccucagaagcuu

SEQ ID NO: 22155 - RNA, 21 nt, RNAi
uucggacucacggagucuucg

SEQ ID NO: 22156 - DNA, 21 bp, homo sapiens
cagaagctgccaccttgtttg

SEQ ID NO: 22157 - RNA, 21 nt, RNAi
gaagcugccaccuuguuuguu

SEQ ID NO: 22158 - RNA, 21 nt, RNAi
uucuucgacgguggaacaaac

SEQ ID NO: 22159 - DNA, 21 bp, homo sapiens
catcaagttctgcctgttctg

SEQ ID NO: 22160 - RNA, 21 nt, RNAi
ucaaguucugccuguucuguu

SEQ ID NO: 22161 - RNA, 21 nt, RNAi
uuaguucaagacggacaagac

SEQ ID NO: 22162 - DNA, 21 bp, homo sapiens
caagttctgcctgttctgcac

SEQ ID NO: 22163 - RNA, 21 nt, RNAi
aguucugccuguucugcacuu

SEQ ID NO: 22164 - RNA, 21 nt, RNAi
uuucaagacggacaagacgug

SEQ ID NO: 22165 - DNA, 21 bp, homo sapiens
catcctcgtcttctcactgca

SEQ ID NO: 22166 - RNA, 21 nt, RNAi
uccucgucuucucacugcauu

SEQ ID NO: 22167 - RNA, 21 nt, RNAi
uuaggagcagaagagugacgu

SEQ ID NO: 22168 - DNA, 21 bp, homo sapiens
cagctgccagccagaacacta

SEQ ID NO: 22169 - RNA, 21 nt, RNAi
gcugccagccagaacacuauu

SEQ ID NO: 22170 - RNA, 21 nt, RNAi
uucgacggucggucuugugau

SEQ ID NO: 22171 - DNA, 21 bp, homo sapiens
catgtacttctcactgtgcca

SEQ ID NO: 22172 - RNA, 21 nt, RNAi
uguacuucucacugugccauu

SEQ ID NO: 22173 - RNA, 21 nt, RNAi
uuacaugaagagugacacggu

SEQ ID NO: 22174 - DNA, 21 bp, homo sapiens
cagccacggagacgaatgtgg

SEQ ID NO: 22175 - RNA, 21 nt, RNAi
gccacggagacgaaugugguu

SEQ ID NO: 22176 - RNA, 21 nt, RNAi
uucggugccucugcuuacacc

SEQ ID NO: 22177 - DNA, 21 bp, homo sapiens
cacggagacgaatgtggacgg

SEQ ID NO: 22178 - RNA, 21 nt, RNAi
cggagacgaauguggacgguu

SEQ ID NO: 22179 - RNA, 21 nt, RNAi
uugccucugcuuacaccugcc

SEQ ID NO: 22180 - DNA, 21 bp, homo sapiens
cagaaggtgtaccgagactgt

SEQ ID NO: 22181 - RNA, 21 nt, RNAi
gaagguguaccgagacuguuu

SEQ ID NO: 22182 - RNA, 21 nt, RNAi
uucuuccacauggcucugaca

SEQ ID NO: 22183 - DNA, 21 bp, homo sapiens
cacttcaacttgtcagagaaa

SEQ ID NO: 22184 - RNA, 21 nt, RNAi
cuucaacuugucagagaaauu

SEQ ID NO: 22185 - RNA, 21 nt, RNAi
uugaaguugaacagucucuuu

SEQ ID NO: 22186 - DNA, 21 bp, homo sapiens
cattcctcagcagcattcctg

SEQ ID NO: 22187 - RNA, 21 nt, RNAi
uuccucagcagcauuccuguu

SEQ ID NO: 22188 - RNA, 21 nt, RNAi
uuaaggagucgucguaaggac

SEQ ID NO: 22189 - DNA, 21 bp, homo sapiens
cagcagcattcctgcactaac

SEQ ID NO: 22190 - RNA, 21 nt, RNAi
gcagcauuccugcacuaacuu

SEQ ID NO: 22191 - RNA, 21 nt, RNAi
uucgucguaaggacgugauug

SEQ ID NO: 22192 - DNA, 21 bp, homo sapiens
cagcattcctgcactaacggc

SEQ ID NO: 22193 - RNA, 21 nt, RNAi
gcauuccugcacuaacggcuu

SEQ ID NO: 22194 - RNA, 21 nt, RNAi
uucguaaggacgugauugccg

SEQ ID NO: 22195 - DNA, 21 bp, homo sapiens
cattcctgcactaacggcaac

SEQ ID NO: 22196 - RNA, 21 nt, RNAi
uuccugcacuaacggcaacuu

SEQ ID NO: 22197 - RNA, 21 nt, RNAi
uuaaggacgugauugccguug

SEQ ID NO: 22198 - DNA, 21 bp, homo sapiens
cactaacggcaactctacgat

SEQ ID NO: 22199 - RNA, 21 nt, RNAi
cuaacggcaacucuacgauuu

SEQ ID NO: 22200 - RNA, 21 nt, RNAi
uugauugccguugagaugcua

SEQ ID NO: 22201 - DNA, 21 bp, homo sapiens
caactctacgatgtgtccgtg

SEQ ID NO: 22202 - RNA, 21 nt, RNAi
acucuacgauguguccguguu

SEQ ID NO: 22203 - RNA, 21 nt, RNAi
uuugagaugcuacacaggcac

SEQ ID NO: 22204 - DNA, 21 bp, homo sapiens
cagtggattgtagttagaata

SEQ ID NO: 22205 - RNA, 21 nt, RNAi
guggauuguaguuagaauauu

SEQ ID NO: 22206 - RNA, 21 nt, RNAi
uucaccuaacaucaaucuuau

SEQ ID NO: 22207 - DNA, 21 bp, homo sapiens
caaggcctgtctgctgtggca

SEQ ID NO: 22208 - RNA, 21 nt, RNAi
aggccugucugcuguggcauu

SEQ ID NO: 22209 - RNA, 21 nt, RNAi
uuuccggacagacgacaccgu

SEQ ID NO: 22210 - DNA, 21 bp, homo sapiens
cagaattcggccatgagccgc

SEQ ID NO: 22211 - RNA, 21 nt, RNAi
gaauucggccaugagccgcuu

SEQ ID NO: 22212 - RNA, 21 nt, RNAi
uucuuaagccgguacucggcg

SEQ ID NO: 22213 - DNA, 21 bp, homo sapiens
catgagccgctacatactcat

SEQ ID NO: 22214 - RNA, 21 nt, RNAi
ugagccgcuacauacucauuu

SEQ ID NO: 22215 - RNA, 21 nt, RNAi
uuacucggcgauguaugagua

SEQ ID NO: 22216 - DNA, 21 bp, homo sapiens
catagcctgcttcttatacaa

SEQ ID NO: 22217 - RNA, 21 nt, RNAi
uagccugcuucuuauacaauu

SEQ ID NO: 22218 - RNA, 21 nt, RNAi
uuaucggacgaagaauauguu

SEQ ID NO: 22219 - DNA, 21 bp, homo sapiens
cagatggcctggaaacttgtc

SEQ ID NO: 22220 - RNA, 21 nt, RNAi
gauggccuggaaacuugucuu

SEQ ID NO: 22221 - RNA, 21 nt, RNAi
uucuaccggaccuuugaacag

SEQ ID NO: 22222 - DNA, 21 bp, homo sapiens
cagtgccacagatagccagct

SEQ ID NO: 22223 - RNA, 21 nt, RNAi
gugccacagauagccagcuuu

SEQ ID NO: 22224 - RNA, 21 nt, RNAi
uucacggugucuaucggucga

SEQ ID NO: 22225 - DNA, 21 bp, homo sapiens
cacagatagccagctccagag

SEQ ID NO: 22226 - RNA, 21 nt, RNAi
cagauagccagcuccagaguu

SEQ ID NO: 22227 - RNA, 21 nt, RNAi
uugucuaucggucgaggucuc

SEQ ID NO: 22228 - DNA, 21 bp, homo sapiens
cagatagccagctccagagca

SEQ ID NO: 22229 - RNA, 21 nt, RNAi
gauagccagcuccagagcauu

SEQ ID NO: 22230 - RNA, 21 nt, RNAi
uucuaucggucgaggucucgu

SEQ ID NO: 22231 - DNA, 21 bp, homo sapiens
cagctccagagcagcgtctga

SEQ ID NO: 22232 - RNA, 21 nt, RNAi
gcuccagagcagcgucugauu

SEQ ID NO: 22233 - RNA, 21 nt, RNAi
uucgaggucucgucgcagacu

SEQ ID NO: 22234 - DNA, 21 bp, homo sapiens
cactcagcatttcctgatgac

SEQ ID NO: 22235 - RNA, 21 nt, RNAi
cucagcauuuccugaugacuu

SEQ ID NO: 22236 - RNA, 21 nt, RNAi
uugagucguaaaggacuacug

SEQ ID NO: 22237 - DNA, 21 bp, homo sapiens
cagcatttcctgatgacagaa

SEQ ID NO: 22238 - RNA, 21 nt, RNAi
gcauuuccugaugacagaauu

SEQ ID NO: 22239 - RNA, 21 nt, RNAi
uucguaaaggacuacugucuu

SEQ ID NO: 22240 - DNA, 21 bp, homo sapiens
catttcctgatgacagaacag

SEQ ID NO: 22241 - RNA, 21 nt, RNAi
uuuccugaugacagaacaguu

SEQ ID NO: 22242 - RNA, 21 nt, RNAi
uuaaaggacuacugucuuguc

SEQ ID NO: 22243 - DNA, 21 bp, homo sapiens
caaccttctacttaacctgtg

SEQ ID NO: 22244 - RNA, 21 nt, RNAi
accuucuacuuaaccuguguu

SEQ ID NO: 22245 - RNA, 21 nt, RNAi
uuuggaagaugaauuggacac

SEQ ID NO: 22246 - DNA, 21 bp, homo sapiens
cacacagtttgcatcagaacg

SEQ ID NO: 22247 - RNA, 21 nt, RNAi
cacaguuugcaucagaacguu

SEQ ID NO: 22248 - RNA, 21 nt, RNAi
uugugucaaacguagucuugc

SEQ ID NO: 22249 - DNA, 21 bp, homo sapiens
cacagtttgcatcagaacgtg

SEQ ID NO: 22250 - RNA, 21 nt, RNAi
caguuugcaucagaacguguu

SEQ ID NO: 22251 - RNA, 21 nt, RNAi
uugucaaacguagucuugcac

SEQ ID NO: 22252 - DNA, 21 bp, homo sapiens
cagtttgcatcagaacgtgtt

SEQ ID NO: 22253 - RNA, 21 nt, RNAi
guuugcaucagaacguguuuu

SEQ ID NO: 22254 - RNA, 21 nt, RNAi
uucaaacguagucuugcacaa

SEQ ID NO: 22255 - DNA, 21 bp, homo sapiens
catcagaacgtgtttatagaa

SEQ ID NO: 22256 - RNA, 21 nt, RNAi
ucagaacguguuuauagaauu

SEQ ID NO: 22257 - RNA, 21 nt, RNAi
uuagucuugcacaaauaucuu

SEQ ID NO: 22258 - DNA, 21 bp, homo sapiens
cagaacgtgtttatagaatgt

SEQ ID NO: 22259 - RNA, 21 nt, RNAi
gaacguguuuauagaauguuu

SEQ ID NO: 22260 - RNA, 21 nt, RNAi
uucuugcacaaauaucuuaca

SEQ ID NO: 22261 - DNA, 21 bp, homo sapiens
gatgactgtgaatggcttcat

SEQ ID NO: 22262 - RNA, 21 nt, RNAi
ugacugugaauggcuucauuu

SEQ ID NO: 22263 - RNA, 21 nt, RNAi
uuacugacacuuaccgaagua

SEQ ID NO: 22264 - DNA, 21 bp, homo sapiens
gactgtgaatggcttcatcaa

SEQ ID NO: 22265 - RNA, 21 nt, RNAi
cugugaauggcuucaucaauu

SEQ ID NO: 22266 - RNA, 21 nt, RNAi
uugacacuuaccgaaguaguu

SEQ ID NO: 22267 - DNA, 21 bp, homo sapiens
gaatggcttcatcaacacagt

SEQ ID NO: 22268 - RNA, 21 nt, RNAi
auggcuucaucaacacaguuu

SEQ ID NO: 22269 - RNA, 21 nt, RNAi
uuuaccgaaguaguuguguca

SEQ ID NO: 22270 - DNA, 21 bp, homo sapiens
gacctgcacagctaccagagc

SEQ ID NO: 22271 - RNA, 21 nt, RNAi
ccugcacagcuaccagagcuu

SEQ ID NO: 22272 - RNA, 21 nt, RNAi
uuggacgugucgauggucucg

SEQ ID NO: 22273 - DNA, 21 bp, homo sapiens
gatgagaacgtcaagtccagc

SEQ ID NO: 22274 - RNA, 21 nt, RNAi
ugagaacgucaaguccagcuu

SEQ ID NO: 22275 - RNA, 21 nt, RNAi
uuacucuugcaguucaggucg

SEQ ID NO: 22276 - DNA, 21 bp, homo sapiens
gagaacgtcaagtccagctgc

SEQ ID NO: 22277 - RNA, 21 nt, RNAi
gaacgucaaguccagcugcuu

SEQ ID NO: 22278 - RNA, 21 nt, RNAi
uucuugcaguucaggucgacg

SEQ ID NO: 22279 - DNA, 21 bp, homo sapiens
gaacgtcaagtccagctgctc

SEQ ID NO: 22280 - RNA, 21 nt, RNAi
acgucaaguccagcugcucuu

SEQ ID NO: 22281 - RNA, 21 nt, RNAi
uuugcaguucaggucgacgag

SEQ ID NO: 22282 - DNA, 21 bp, homo sapiens
gaaatgcaccagttgaaggac

SEQ ID NO: 22283 - RNA, 21 nt, RNAi
aaugcaccaguugaaggacuu

SEQ ID NO: 22284 - RNA, 21 nt, RNAi
uuuuacguggucaacuuccug

SEQ ID NO: 22285 - DNA, 21 bp, homo sapiens
gagacctgcctctctccatct

SEQ ID NO: 22286 - RNA, 21 nt, RNAi
gaccugccucucuccaucuuu

SEQ ID NO: 22287 - RNA, 21 nt, RNAi
uucuggacggagagagguaga

SEQ ID NO: 22288 - DNA, 21 bp, homo sapiens
gacctgcctctctccatctgg

SEQ ID NO: 22289 - RNA, 21 nt, RNAi
ccugccucucuccaucugguu

SEQ ID NO: 22290 - RNA, 21 nt, RNAi
uuggacggagagagguagacc

SEQ ID NO: 22291 - DNA, 21 bp, homo sapiens
gagtgcctcagaagctgccac

SEQ ID NO: 22292 - RNA, 21 nt, RNAi
gugccucagaagcugccacuu

SEQ ID NO: 22293 - RNA, 21 nt, RNAi
uucacggagucuucgacggug

SEQ ID NO: 22294 - DNA, 21 bp, homo sapiens
gaaggccacctgaacctaacg

SEQ ID NO: 22295 - RNA, 21 nt, RNAi
aggccaccugaaccuaacguu

SEQ ID NO: 22296 - RNA, 21 nt, RNAi
uuuccgguggacuuggauugc

SEQ ID NO: 22297 - DNA, 21 bp, homo sapiens
gacggcctcatgtacttctca

SEQ ID NO: 22298 - RNA, 21 nt, RNAi
cggccucauguacuucucauu

SEQ ID NO: 22299 - RNA, 21 nt, RNAi
uugccggaguacaugaagagu

SEQ ID NO: 22300 - DNA, 21 bp, homo sapiens
gagacgaatgtggacggccag

SEQ ID NO: 22301 - RNA, 21 nt, RNAi
gacgaauguggacggccaguu

SEQ ID NO: 22302 - RNA, 21 nt, RNAi
uucugcuuacaccugccgguc

SEQ ID NO: 22303 - DNA, 21 bp, homo sapiens
gacgaatgtggacggccagaa

SEQ ID NO: 22304 - RNA, 21 nt, RNAi
cgaauguggacggccagaauu

SEQ ID NO: 22305 - RNA, 21 nt, RNAi
uugcuuacaccugccggucuu

SEQ ID NO: 22306 - DNA, 21 bp, homo sapiens
gaatgtggacggccagaaggt

SEQ ID NO: 22307 - RNA, 21 nt, RNAi
auguggacggccagaagguuu

SEQ ID NO: 22308 - RNA, 21 nt, RNAi
uuuacaccugccggucuucca

SEQ ID NO: 22309 - DNA, 21 bp, homo sapiens
gacggccagaaggtgtaccga

SEQ ID NO: 22310 - RNA, 21 nt, RNAi
cggccagaagguguaccgauu

SEQ ID NO: 22311 - RNA, 21 nt, RNAi
uugccggucuuccacauggcu

SEQ ID NO: 22312 - DNA, 21 bp, homo sapiens
gaaggtgtaccgagactgtag

SEQ ID NO: 22313 - RNA, 21 nt, RNAi
agguguaccgagacuguaguu

SEQ ID NO: 22314 - RNA, 21 nt, RNAi
uuuccacauggcucugacauc

SEQ ID NO: 22315 - DNA, 21 bp, homo sapiens
gaaatgcacttcaacttgtca

SEQ ID NO: 22316 - RNA, 21 nt, RNAi
aaugcacuucaacuugucauu

SEQ ID NO: 22317 - RNA, 21 nt, RNAi
uuuuacgugaaguugaacagu

SEQ ID NO: 22318 - DNA, 21 bp, homo sapiens
gaatccagtggattgtagtta

SEQ ID NO: 22319 - RNA, 21 nt, RNAi
auccaguggauuguaguuauu

SEQ ID NO: 22320 - RNA, 21 nt, RNAi
uuuaggucaccuaacaucaau

SEQ ID NO: 22321 - DNA, 21 bp, homo sapiens
gattgtagttagaatactagg

SEQ ID NO: 22322 - RNA, 21 nt, RNAi
uuguaguuagaauacuagguu

SEQ ID NO: 22323 - RNA, 21 nt, RNAi
uuaacaucaaucuuaugaucc

SEQ ID NO: 22324 - DNA, 21 bp, homo sapiens
gatcgacaaggcctgtctgct

SEQ ID NO: 22325 - RNA, 21 nt, RNAi
ucgacaaggccugucugcuuu

SEQ ID NO: 22326 - RNA, 21 nt, RNAi
uuagcuguuccggacagacga

SEQ ID NO: 22327 - DNA, 21 bp, homo sapiens
gacaaggcctgtctgctgtgg

SEQ ID NO: 22328 - RNA, 21 nt, RNAi
caaggccugucugcugugguu

SEQ ID NO: 22329 - RNA, 21 nt, RNAi
uuguuccggacagacgacacc

SEQ ID NO: 22330 - DNA, 21 bp, homo sapiens
gaattcggccatgagccgcta

SEQ ID NO: 22331 - RNA, 21 nt, RNAi
auucggccaugagccgcuauu

SEQ ID NO: 22332 - RNA, 21 nt, RNAi
uuuaagccgguacucggcgau

SEQ ID NO: 22333 - DNA, 21 bp, homo sapiens
gagccgctacatactcatcat

SEQ ID NO: 22334 - RNA, 21 nt, RNAi
gccgcuacauacucaucauuu

SEQ ID NO: 22335 - RNA, 21 nt, RNAi
uucggcgauguaugaguagua

SEQ ID NO: 22336 - DNA, 21 bp, homo sapiens
gagtcttcagatggcctggaa

SEQ ID NO: 22337 - RNA, 21 nt, RNAi
gucuucagauggccuggaauu

SEQ ID NO: 22338 - RNA, 21 nt, RNAi
uucagaagucuaccggaccuu

SEQ ID NO: 22339 - DNA, 21 bp, homo sapiens
gatggcctggaaacttgtctg

SEQ ID NO: 22340 - RNA, 21 nt, RNAi
uggccuggaaacuugucuguu

SEQ ID NO: 22341 - RNA, 21 nt, RNAi
uuaccggaccuuugaacagac

SEQ ID NO: 22342 - DNA, 21 bp, homo sapiens
gacagtgccacagatagccag

SEQ ID NO: 22343 - RNA, 21 nt, RNAi
cagugccacagauagccaguu

SEQ ID NO: 22344 - RNA, 21 nt, RNAi
uugucacggugucuaucgguc

SEQ ID NO: 22345 - DNA, 21 bp, homo sapiens
gatagccagctccagagcagc

SEQ ID NO: 22346 - RNA, 21 nt, RNAi
uagccagcuccagagcagcuu

SEQ ID NO: 22347 - RNA, 21 nt, RNAi
uuaucggucgaggucucgucg

SEQ ID NO: 22348 - DNA, 21 bp, homo sapiens
gatgacagaacagtgccgttg

SEQ ID NO: 22349 - RNA, 21 nt, RNAi
ugacagaacagugccguuguu

SEQ ID NO: 22350 - RNA, 21 nt, RNAi
uuacugucuugucacggcaac

SEQ ID NO: 22351 - DNA, 21 bp, homo sapiens
gaacttctatttgacctgcaa

SEQ ID NO: 22352 - RNA, 21 nt, RNAi
acuucuauuugaccugcaauu

SEQ ID NO: 22353 - RNA, 21 nt, RNAi
uuugaagauaaacuggacguu

SEQ ID NO: 22354 - DNA, 21 bp, homo sapiens
gacctgcaaccttctacttaa

SEQ ID NO: 22355 - RNA, 21 nt, RNAi
ccugcaaccuucuacuuaauu

SEQ ID NO: 22356 - RNA, 21 nt, RNAi
uuggacguuggaagaugaauu

SEQ ID NO: 22357 - DNA, 21 bp, homo sapiens
gacacacagtttgcatcagaa

SEQ ID NO: 22358 - RNA, 21 nt, RNAi
cacacaguuugcaucagaauu

SEQ ID NO: 22359 - RNA, 21 nt, RNAi
uugugugucaaacguagucuu

SEQ ID NO: 22360 - DNA, 21 bp, homo sapiens
gaacgtgtttatagaatgtgt

SEQ ID NO: 22361 - RNA, 21 nt, RNAi
acguguuuauagaauguguuu

SEQ ID NO: 22362 - RNA, 21 nt, RNAi
uuugcacaaauaucuuacaca

SEQ ID NO: 22363 - DNA, 21 bp, homo sapiens
gatcgtgtgtggtgtgcgtga

SEQ ID NO: 22364 - RNA, 21 nt, RNAi
ucguguguggugugcgugauu

SEQ ID NO: 22365 - RNA, 21 nt, RNAi
uuagcacacaccacacgcacu

SEQ ID NO: 22366 - DNA, 21 bp, homo sapiens
gaggaaggcttgtgtgtcctc

SEQ ID NO: 22367 - RNA, 21 nt, RNAi
ggaaggcuuguguguccucuu

SEQ ID NO: 22368 - RNA, 21 nt, RNAi
uuccuuccgaacacacaggag

SEQ ID NO: 22369 - DNA, 21 bp, homo sapiens
gaaggcttgtgtgtcctcagt

SEQ ID NO: 22370 - RNA, 21 nt, RNAi
aggcuuguguguccucaguuu

SEQ ID NO: 22371 - RNA, 21 nt, RNAi
uuuccgaacacacaggaguca

SEQ ID NO: 22372 - DNA, 21 bp, homo sapiens
tatgacctgcacagctaccag

SEQ ID NO: 22373 - RNA, 21 nt, RNAi
ugaccugcacagcuaccaguu

SEQ ID NO: 22374 - RNA, 21 nt, RNAi
uuacuggacgugucgaugguc

SEQ ID NO: 22375 - DNA, 21 bp, homo sapiens
tacgacattgccgcctgcctc

SEQ ID NO: 22376 - RNA, 21 nt, RNAi
cgacauugccgccugccucuu

SEQ ID NO: 22377 - RNA, 21 nt, RNAi
uugcuguaacggcggacggag

SEQ ID NO: 22378 - DNA, 21 bp, homo sapiens
tatgaggtggagttggacgcg

SEQ ID NO: 22379 - RNA, 21 nt, RNAi
ugagguggaguuggacgcguu

SEQ ID NO: 22380 - RNA, 21 nt, RNAi
uuacuccaccucaaccugcgc

SEQ ID NO: 22381 - DNA, 21 bp, homo sapiens
taccagctggtcttcatgctg

SEQ ID NO: 22382 - RNA, 21 nt, RNAi
ccagcuggucuucaugcuguu

SEQ ID NO: 22383 - RNA, 21 nt, RNAi
uuggucgaccagaaguacgac

SEQ ID NO: 22384 - DNA, 21 bp, homo sapiens
tacctggatgagaacgtcaag

SEQ ID NO: 22385 - RNA, 21 nt, RNAi
ccuggaugagaacgucaaguu

SEQ ID NO: 22386 - RNA, 21 nt, RNAi
uuggaccuacucuugcaguuc

SEQ ID NO: 22387 - DNA, 21 bp, homo sapiens
tacattgccatcttctacaca

SEQ ID NO: 22388 - RNA, 21 nt, RNAi
cauugccaucuucuacacauu

SEQ ID NO: 22389 - RNA, 21 nt, RNAi
uuguaacgguagaagaugugu

SEQ ID NO: 22390 - DNA, 21 bp, homo sapiens
tacttctcactgtgccacgca

SEQ ID NO: 22391 - RNA, 21 nt, RNAi
cuucucacugugccacgcauu

SEQ ID NO: 22392 - RNA, 21 nt, RNAi
uugaagagugacacggugcgu

SEQ ID NO: 22393 - DNA, 21 bp, homo sapiens
taccgagactgtagctgtatc

SEQ ID NO: 22394 - RNA, 21 nt, RNAi
ccgagacuguagcuguaucuu

SEQ ID NO: 22395 - RNA, 21 nt, RNAi
uuggcucugacaucgacauag

SEQ ID NO: 22396 - DNA, 21 bp, homo sapiens
tacattcctcagcagcattcc

SEQ ID NO: 22397 - RNA, 21 nt, RNAi
cauuccucagcagcauuccuu

SEQ ID NO: 22398 - RNA, 21 nt, RNAi
uuguaaggagucgucguaagg

SEQ ID NO: 22399 - DNA, 21 bp, homo sapiens
taacggcaactctacgatgtg

SEQ ID NO: 22400 - RNA, 21 nt, RNAi
acggcaacucuacgauguguu

SEQ ID NO: 22401 - RNA, 21 nt, RNAi
uuugccguugagaugcuacac

SEQ ID NO: 22402 - DNA, 21 bp, homo sapiens
taccagaattcggccatgagc

SEQ ID NO: 22403 - RNA, 21 nt, RNAi
ccagaauucggccaugagcuu

SEQ ID NO: 22404 - RNA, 21 nt, RNAi
uuggucuuaagccgguacucg

SEQ ID NO: 22405 - DNA, 21 bp, homo sapiens
tagcctgcttcttatacaagc

SEQ ID NO: 22406 - RNA, 21 nt, RNAi
gccugcuucuuauacaagcuu

SEQ ID NO: 22407 - RNA, 21 nt, RNAi
uucggacgaagaauauguucg

SEQ ID NO: 22408 - DNA, 21 bp, homo sapiens
tagccagctccagagcagcgt

SEQ ID NO: 22409 - RNA, 21 nt, RNAi
gccagcuccagagcagcguuu

SEQ ID NO: 22410 - RNA, 21 nt, RNAi
uucggucgaggucucgucgca

SEQ ID NO: 22411 - DNA, 21 bp, homo sapiens
tatttgacctgcaaccttcta

SEQ ID NO: 22412 - RNA, 21 nt, RNAi
uuugaccugcaaccuucuauu

SEQ ID NO: 22413 - RNA, 21 nt, RNAi
uuaaacuggacguuggaagau

SEQ ID NO: 22414 - DNA, 21 bp, homo sapiens
tacttaacctgtggtttaaag

SEQ ID NO: 22415 - RNA, 21 nt, RNAi
cuuaaccugugguuuaaaguu

SEQ ID NO: 22416 - RNA, 21 nt, RNAi
uugaauuggacaccaaauuuc

SEQ ID NO: 22417 - DNA, 21 bp, homo sapiens
taacctgtggtttaaagtcgg

SEQ ID NO: 22418 - RNA, 21 nt, RNAi
accugugguuuaaagucgguu

SEQ ID NO: 22419 - RNA, 21 nt, RNAi
uuuggacaccaaauuucagcc

SEQ ID NO: 22420 - DNA, 21 bp, homo sapiens
taaagtcggctgtgacctcct

SEQ ID NO: 22421 - RNA, 21 nt, RNAi
aagucggcugugaccuccuuu

SEQ ID NO: 22422 - RNA, 21 nt, RNAi
uuuucagccgacacuggagga

SEQ ID NO: 22423 - DNA, 21 bp, homo sapiens
tatttatggacacacagtttg

SEQ ID NO: 22424 - RNA, 21 nt, RNAi
uuuauggacacacaguuuguu

SEQ ID NO: 22425 - RNA, 21 nt, RNAi
uuaaauaccugugugucaaac

SEQ ID NO: 22426 - DNA, 21 bp, homo sapiens
tatggacacacagtttgcatc

SEQ ID NO: 22427 - RNA, 21 nt, RNAi
uggacacacaguuugcaucuu

SEQ ID NO: 22428 - RNA, 21 nt, RNAi
uuaccugugugucaaacguag

SEQ ID NO: 22429 - DNA, 21 bp, homo sapiens
aatggcttcatcaacacagtc

SEQ ID NO: 22430 - RNA, 21 nt, RNAi
uggcuucaucaacacagucuu

SEQ ID NO: 22431 - RNA, 21 nt, RNAi
uuaccgaaguaguugugucag

SEQ ID NO: 22432 - DNA, 21 bp, homo sapiens
aatccagtggattgtagttag

SEQ ID NO: 22433 - RNA, 21 nt, RNAi
uccaguggauuguaguuaguu

SEQ ID NO: 22434 - RNA, 21 nt, RNAi
uuaggucaccuaacaucaauc

SEQ ID NO: 22435 - DNA, 21 bp, homo sapiens
cagaaggtgtaccgagactgt

SEQ ID NO: 22436 - RNA, 21 nt, RNAi
gaagguguaccgagacuguuu

SEQ ID NO: 22437 - RNA, 21 nt, RNAi
uucuuccacauggcucugaca

SEQ ID NO: 22438 - DNA, 21 bp, homo sapiens
cattcctgcactaacggcaac

SEQ ID NO: 22439 - RNA, 21 nt, RNAi
uuccugcacuaacggcaacuu

SEQ ID NO: 22440 - RNA, 21 nt, RNAi
uuaaggacgugauugccguug

SEQ ID NO: 22441 - DNA, 21 bp, homo sapiens
cactaacggcaactctacgat

SEQ ID NO: 22442 - RNA, 21 nt, RNAi
cuaacggcaacucuacgauuu

SEQ ID NO: 22443 - RNA, 21 nt, RNAi
uugauugccguugagaugcua

SEQ ID NO: 22444 - DNA, 21 bp, homo sapiens
catgagccgctacatactcat

SEQ ID NO: 22445 - RNA, 21 nt, RNAi
ugagccgcuacauacucauuu

SEQ ID NO: 22446 - RNA, 21 nt, RNAi
uuacucggcgauguaugagua

SEQ ID NO: 22447 - DNA, 21 bp, homo sapiens
catagcctgcttcttatacaa

SEQ ID NO: 22448 - RNA, 21 nt, RNAi
uagccugcuucuuauacaauu

SEQ ID NO: 22449 - RNA, 21 nt, RNAi
uuaucggacgaagaauauguu

SEQ ID NO: 22450 - DNA, 21 bp, homo sapiens
gactgtgaatggcttcatcaa

SEQ ID NO: 22451 - RNA, 21 nt, RNAi
cugugaauggcuucaucaauu

SEQ ID NO: 22452 - RNA, 21 nt, RNAi
uugacacuuaccgaaguaguu

SEQ ID NO: 22453 - DNA, 21 bp, homo sapiens
gaaggtgtaccgagactgtag

SEQ ID NO: 22454 - RNA, 21 nt, RNAi
agguguaccgagacuguaguu

SEQ ID NO: 22455 - RNA, 21 nt, RNAi
uuuccacauggcucugacauc

SEQ ID NO: 22456 - DNA, 21 bp, homo sapiens
taacggcaactctacgatgtg

SEQ ID NO: 22457 - RNA, 21 nt, RNAi
acggcaacucuacgauguguu

SEQ ID NO: 22458 - RNA, 21 nt, RNAi
uuugccguugagaugcuacac

SEQ ID NO: 22459 - DNA, 21 bp, homo sapiens
tagcctgcttcttatacaagc

SEQ ID NO: 22460 - RNA, 21 nt, RNAi
gccugcuucuuauacaagcuu

SEQ ID NO: 22461 - RNA, 21 nt, RNAi
uucggacgaagaauauguucg

SEQ ID NO: 22462 - DNA, 21 bp, homo sapiens
aacatcacgctgctcaacggc

SEQ ID NO: 22463 - RNA, 21 nt, RNAi
caucacgcugcucaacggcuu

SEQ ID NO: 22464 - RNA, 21 nt, RNAi
uuguagugcgacgaguugccg

SEQ ID NO: 22465 - DNA, 21 bp, homo sapiens
aacggcgtggccatcatcgtg

SEQ ID NO: 22466 - RNA, 21 nt, RNAi
cggcguggccaucaucguguu

SEQ ID NO: 22467 - RNA, 21 nt, RNAi
uugccgcaccgguaguagcac

SEQ ID NO: 22468 - DNA, 21 bp, homo sapiens
aagctctggatcgagctgctc

SEQ ID NO: 22469 - RNA, 21 nt, RNAi
gcucuggaucgagcugcucuu

SEQ ID NO: 22470 - RNA, 21 nt, RNAi
uucgagaccuagcucgacgag

SEQ ID NO: 22471 - DNA, 21 bp, homo sapiens
aactgctacagcgtgaaggcc

SEQ ID NO: 22472 - RNA, 21 nt, RNAi
cugcuacagcgugaaggccuu

SEQ ID NO: 22473 - RNA, 21 nt, RNAi
uugacgaugucgcacuuccgg

SEQ ID NO: 22474 - DNA, 21 bp, homo sapiens
aacttctcatttgaaggcacc

SEQ ID NO: 22475 - RNA, 21 nt, RNAi
cuucucauuugaaggcaccuu

SEQ ID NO: 22476 - RNA, 21 nt, RNAi
uugaagaguaaacuuccgugg

SEQ ID NO: 22477 - DNA, 21 bp, homo sapiens
aaggcaccaaactggatgtgg

SEQ ID NO: 22478 - RNA, 21 nt, RNAi
ggcaccaaacuggaugugguu

SEQ ID NO: 22479 - RNA, 21 nt, RNAi
uuccgugguuugaccuacacc

SEQ ID NO: 22480 - DNA, 21 bp, homo sapiens
aacattgtgctggcattatac

SEQ ID NO: 22481 - RNA, 21 nt, RNAi
cauugugcuggcauuauacuu

SEQ ID NO: 22482 - RNA, 21 nt, RNAi
uuguaacacgaccguaauaug

SEQ ID NO: 22483 - DNA, 21 bp, homo sapiens
aatttcgtcacagaggaaatg

SEQ ID NO: 22484 - RNA, 21 nt, RNAi
uuucgucacagaggaaauguu

SEQ ID NO: 22485 - RNA, 21 nt, RNAi
uuaaagcagugucuccuuuac

SEQ ID NO: 22486 - DNA, 21 bp, homo sapiens
aacctggcctacttcaccacc

SEQ ID NO: 22487 - RNA, 21 nt, RNAi
ccuggccuacuucaccaccuu

SEQ ID NO: 22488 - RNA, 21 nt, RNAi
uuggaccggaugaaguggugg

SEQ ID NO: 22489 - DNA, 21 bp, homo sapiens
aaggacatcttctccgtcatc

SEQ ID NO: 22490 - RNA, 21 nt, RNAi
ggacaucuucuccgucaucuu

SEQ ID NO: 22491 - RNA, 21 nt, RNAi
uuccuguagaagaggcaguag

SEQ ID NO: 22492 - DNA, 21 bp, homo sapiens
aacttcttcagcttcttcaac

SEQ ID NO: 22493 - RNA, 21 nt, RNAi
cuucuucagcuucuucaacuu

SEQ ID NO: 22494 - RNA, 21 nt, RNAi
uugaagaagucgaagaaguug

SEQ ID NO: 22495 - DNA, 21 bp, homo sapiens
aaagcctgagcttgagcggcc

SEQ ID NO: 22496 - RNA, 21 nt, RNAi
agccugagcuugagcggccuu

SEQ ID NO: 22497 - RNA, 21 nt, RNAi
uuucggacucgaacucgccgg

SEQ ID NO: 22498 - DNA, 21 bp, homo sapiens
aaagtagatcacctcctcgaa

SEQ ID NO: 22499 - RNA, 21 nt, RNAi
aguagaucaccuccucgaauu

SEQ ID NO: 22500 - RNA, 21 nt, RNAi
uuucaucuaguggaggagcuu

SEQ ID NO: 22501 - DNA, 21 bp, homo sapiens
aagtagatcacctcctcgaac

SEQ ID NO: 22502 - RNA, 21 nt, RNAi
guagaucaccuccucgaacuu

SEQ ID NO: 22503 - RNA, 21 nt, RNAi
uucaucuaguggaggagcuug

SEQ ID NO: 22504 - DNA, 21 bp, homo sapiens
aaactctggtacgaatctcat

SEQ ID NO: 22505 - RNA, 21 nt, RNAi
acucugguacgaaucucauuu

SEQ ID NO: 22506 - RNA, 21 nt, RNAi
uuugagaccaugcuuagagua

SEQ ID NO: 22507 - DNA, 21 bp, homo sapiens
aactctggtacgaatctcatc

SEQ ID NO: 22508 - RNA, 21 nt, RNAi
cucugguacgaaucucaucuu

SEQ ID NO: 22509 - RNA, 21 nt, RNAi
uugagaccaugcuuagaguag

SEQ ID NO: 22510 - DNA, 21 bp, homo sapiens
aacttgacaccactaagatga

SEQ ID NO: 22511 - RNA, 21 nt, RNAi
cuugacaccacuaagaugauu

SEQ ID NO: 22512 - RNA, 21 nt, RNAi
uugaacuguggugauucuacu

SEQ ID NO: 22513 - DNA, 21 bp, homo sapiens
aaggcaggagccttcctttct

SEQ ID NO: 22514 - RNA, 21 nt, RNAi
ggcaggagccuuccuuucuuu

SEQ ID NO: 22515 - RNA, 21 nt, RNAi
uuccguccucggaaggaaaga

SEQ ID NO: 22516 - DNA, 21 bp, homo sapiens
aaacagagctactgagacttg

SEQ ID NO: 22517 - RNA, 21 nt, RNAi
acagagcuacugagacuuguu

SEQ ID NO: 22518 - RNA, 21 nt, RNAi
uuugucucgaugacucugaac

SEQ ID NO: 22519 - DNA, 21 bp, homo sapiens
aacagagctactgagacttgg

SEQ ID NO: 22520 - RNA, 21 nt, RNAi
cagagcuacugagacuugguu

SEQ ID NO: 22521 - RNA, 21 nt, RNAi
uugucucgaugacucugaacc

SEQ ID NO: 22522 - DNA, 21 bp, homo sapiens
aacctcattgctacgacagac

SEQ ID NO: 22523 - RNA, 21 nt, RNAi
ccucauugcuacgacagacuu

SEQ ID NO: 22524 - RNA, 21 nt, RNAi
uuggaguaacgaugcugucug

SEQ ID NO: 22525 - DNA, 21 bp, homo sapiens
aaacagagacaagaaaggcag

SEQ ID NO: 22526 - RNA, 21 nt, RNAi
acagagacaagaaaggcaguu

SEQ ID NO: 22527 - RNA, 21 nt, RNAi
uuugucucuguucuuuccguc

SEQ ID NO: 22528 - DNA, 21 bp, homo sapiens
aacagagacaagaaaggcaga

SEQ ID NO: 22529 - RNA, 21 nt, RNAi
cagagacaagaaaggcagauu

SEQ ID NO: 22530 - RNA, 21 nt, RNAi
uugucucuguucuuuccgucu

SEQ ID NO: 22531 - DNA, 21 bp, homo sapiens
aagaaaggcagacacaccgcg

SEQ ID NO: 22532 - RNA, 21 nt, RNAi
gaaaggcagacacaccgcguu

SEQ ID NO: 22533 - RNA, 21 nt, RNAi
uucuuuccgucuguguggcgc

SEQ ID NO: 22534 - DNA, 21 bp, homo sapiens
aatgcattggcctctgtaccg

SEQ ID NO: 22535 - RNA, 21 nt, RNAi
ugcauuggccucuguaccguu

SEQ ID NO: 22536 - RNA, 21 nt, RNAi
uuacguaaccggagacauggc

SEQ ID NO: 22537 - DNA, 21 bp, homo sapiens
aagcactgctcacgtctctgc

SEQ ID NO: 22538 - RNA, 21 nt, RNAi
gcacugcucacgucucugcuu

SEQ ID NO: 22539 - RNA, 21 nt, RNAi
uucgugacgagugcagagacg

SEQ ID NO: 22540 - DNA, 21 bp, homo sapiens
aagtggtccagcgtcactcca

SEQ ID NO: 22541 - RNA, 21 nt, RNAi
gugguccagcgucacuccauu

SEQ ID NO: 22542 - RNA, 21 nt, RNAi
uucaccaggucgcagugaggu

SEQ ID NO: 22543 - DNA, 21 bp, homo sapiens
aacgaagccggacacggcttc

SEQ ID NO: 22544 - RNA, 21 nt, RNAi
cgaagccggacacggcuucuu

SEQ ID NO: 22545 - RNA, 21 nt, RNAi
uugcuucggccugugccgaag

SEQ ID NO: 22546 - DNA, 21 bp, homo sapiens
aagccggacacggcttcactg

SEQ ID NO: 22547 - RNA, 21 nt, RNAi
gccggacacggcuucacuguu

SEQ ID NO: 22548 - RNA, 21 nt, RNAi
uucggccugugccgaagugac

SEQ ID NO: 22549 - DNA, 21 bp, homo sapiens
aagccgcaagctctcagcaag

SEQ ID NO: 22550 - RNA, 21 nt, RNAi
gccgcaagcucucagcaaguu

SEQ ID NO: 22551 - RNA, 21 nt, RNAi
uucggcguucgagagucguuc

SEQ ID NO: 22552 - DNA, 21 bp, homo sapiens
aaataaggacagcagctggtg

SEQ ID NO: 22553 - RNA, 21 nt, RNAi
auaaggacagcagcugguguu

SEQ ID NO: 22554 - RNA, 21 nt, RNAi
uuuauuccugucgucgaccac

SEQ ID NO: 22555 - DNA, 21 bp, homo sapiens
aataaggacagcagctggtgc

SEQ ID NO: 22556 - RNA, 21 nt, RNAi
uaaggacagcagcuggugcuu

SEQ ID NO: 22557 - RNA, 21 nt, RNAi
uuauuccugucgucgaccacg

SEQ ID NO: 22558 - DNA, 21 bp, homo sapiens
aatccaggaggcagtggacat

SEQ ID NO: 22559 - RNA, 21 nt, RNAi
uccaggaggcaguggacauuu

SEQ ID NO: 22560 - RNA, 21 nt, RNAi
uuagguccuccgucaccugua

SEQ ID NO: 22561 - DNA, 21 bp, homo sapiens
aaagtagctgctagtgaaatg

SEQ ID NO: 22562 - RNA, 21 nt, RNAi
aguagcugcuagugaaauguu

SEQ ID NO: 22563 - RNA, 21 nt, RNAi
uuucaucgacgaucacuuuac

SEQ ID NO: 22564 - DNA, 21 bp, homo sapiens
aagtagctgctagtgaaatgg

SEQ ID NO: 22565 - RNA, 21 nt, RNAi
guagcugcuagugaaaugguu

SEQ ID NO: 22566 - RNA, 21 nt, RNAi
uucaucgacgaucacuuuacc

SEQ ID NO: 22567 - DNA, 21 bp, homo sapiens
aatttaaagatgctgtcggca

SEQ ID NO: 22568 - RNA, 21 nt, RNAi
uuuaaagaugcugucggcauu

SEQ ID NO: 22569 - RNA, 21 nt, RNAi
uuaaauuucuacgacagccgu

SEQ ID NO: 22570 - DNA, 21 bp, homo sapiens
aaagatgctgtcggcaccatg

SEQ ID NO: 22571 - RNA, 21 nt, RNAi
agaugcugucggcaccauguu

SEQ ID NO: 22572 - RNA, 21 nt, RNAi
uuucuacgacagccgugguac

SEQ ID NO: 22573 - DNA, 21 bp, homo sapiens
aagatgctgtcggcaccatgt

SEQ ID NO: 22574 - RNA, 21 nt, RNAi
gaugcugucggcaccauguuu

SEQ ID NO: 22575 - RNA, 21 nt, RNAi
uucuacgacagccgugguaca

SEQ ID NO: 22576 - DNA, 21 bp, homo sapiens
aatggctaacctgttacactg

SEQ ID NO: 22577 - RNA, 21 nt, RNAi
uggcuaaccuguuacacuguu

SEQ ID NO: 22578 - RNA, 21 nt, RNAi
uuaccgauuggacaaugugac

SEQ ID NO: 22579 - DNA, 21 bp, homo sapiens
aaagaaacactcaatcatcct

SEQ ID NO: 22580 - RNA, 21 nt, RNAi
agaaacacucaaucauccuuu

SEQ ID NO: 22581 - RNA, 21 nt, RNAi
uuucuuugugaguuaguagga

SEQ ID NO: 22582 - DNA, 21 bp, homo sapiens
cagcggaacatcacgctgctc

SEQ ID NO: 22583 - RNA, 21 nt, RNAi
gcggaacaucacgcugcucuu

SEQ ID NO: 22584 - RNA, 21 nt, RNAi
uucgccuuguagugcgacgag

SEQ ID NO: 22585 - DNA, 21 bp, homo sapiens
catcacgctgctcaacggcgt

SEQ ID NO: 22586 - RNA, 21 nt, RNAi
ucacgcugcucaacggcguuu

SEQ ID NO: 22587 - RNA, 21 nt, RNAi
uuagugcgacgaguugccgca

SEQ ID NO: 22588 - DNA, 21 bp, homo sapiens
caacggcgtggccatcatcgt

SEQ ID NO: 22589 - RNA, 21 nt, RNAi
acggcguggccaucaucguuu

SEQ ID NO: 22590 - RNA, 21 nt, RNAi
uuugccgcaccgguaguagca

SEQ ID NO: 22591 - DNA, 21 bp, homo sapiens
catgctggaggtctacggctc

SEQ ID NO: 22592 - RNA, 21 nt, RNAi
ugcuggaggucuacggcucuu

SEQ ID NO: 22593 - RNA, 21 nt, RNAi
uuacgaccuccagaugccgag

SEQ ID NO: 22594 - DNA, 21 bp, homo sapiens
caagctctggatcgagctgct

SEQ ID NO: 22595 - RNA, 21 nt, RNAi
agcucuggaucgagcugcuuu

SEQ ID NO: 22596 - RNA, 21 nt, RNAi
uuucgagaccuagcucgacga

SEQ ID NO: 22597 - DNA, 21 bp, homo sapiens
catcatccggccttcatcgca

SEQ ID NO: 22598 - RNA, 21 nt, RNAi
ucauccggccuucaucgcauu

SEQ ID NO: 22599 - RNA, 21 nt, RNAi
uuaguaggccggaaguagcgu

SEQ ID NO: 22600 - DNA, 21 bp, homo sapiens
catccggccttcatcgcagta

SEQ ID NO: 22601 - RNA, 21 nt, RNAi
uccggccuucaucgcaguauu

SEQ ID NO: 22602 - RNA, 21 nt, RNAi
uuaggccggaaguagcgucau

SEQ ID NO: 22603 - DNA, 21 bp, homo sapiens
cacctacctgctcaagccgct

SEQ ID NO: 22604 - RNA, 21 nt, RNAi
ccuaccugcucaagccgcuuu

SEQ ID NO: 22605 - RNA, 21 nt, RNAi
uuggauggacgaguucggcga

SEQ ID NO: 22606 - DNA, 21 bp, homo sapiens
cacggccgtgaactgctacag

SEQ ID NO: 22607 - RNA, 21 nt, RNAi
cggccgugaacugcuacaguu

SEQ ID NO: 22608 - RNA, 21 nt, RNAi
uugccggcacuugacgauguc

SEQ ID NO: 22609 - DNA, 21 bp, homo sapiens
caacttctcatttgaaggcac

SEQ ID NO: 22610 - RNA, 21 nt, RNAi
acuucucauuugaaggcacuu

SEQ ID NO: 22611 - RNA, 21 nt, RNAi
uuugaagaguaaacuuccgug

SEQ ID NO: 22612 - DNA, 21 bp, homo sapiens
catttgaaggcaccaaactgg

SEQ ID NO: 22613 - RNA, 21 nt, RNAi
uuugaaggcaccaaacugguu

SEQ ID NO: 22614 - RNA, 21 nt, RNAi
uuaaacuuccgugguuugacc

SEQ ID NO: 22615 - DNA, 21 bp, homo sapiens
cattgtgctggcattatacag

SEQ ID NO: 22616 - RNA, 21 nt, RNAi
uugugcuggcauuauacaguu

SEQ ID NO: 22617 - RNA, 21 nt, RNAi
uuaacacgaccguaauauguc

SEQ ID NO: 22618 - DNA, 21 bp, homo sapiens
cattatacagcggcctctttg

SEQ ID NO: 22619 - RNA, 21 nt, RNAi
uuauacagcggccucuuuguu

SEQ ID NO: 22620 - RNA, 21 nt, RNAi
uuaauaugucgccggagaaac

SEQ ID NO: 22621 - DNA, 21 bp, homo sapiens
cagcggcctctttgcctatgg

SEQ ID NO: 22622 - RNA, 21 nt, RNAi
gcggccucuuugccuaugguu

SEQ ID NO: 22623 - RNA, 21 nt, RNAi
uucgccggagaaacggauacc

SEQ ID NO: 22624 - DNA, 21 bp, homo sapiens
catcgtgacgctggtgtacgt

SEQ ID NO: 22625 - RNA, 21 nt, RNAi
ucgugacgcugguguacguuu

SEQ ID NO: 22626 - RNA, 21 nt, RNAi
uuagcacugcgaccacaugca

SEQ ID NO: 22627 - DNA, 21 bp, homo sapiens
caacctggcctacttcaccac

SEQ ID NO: 22628 - RNA, 21 nt, RNAi
accuggccuacuucaccacuu

SEQ ID NO: 22629 - RNA, 21 nt, RNAi
uuuggaccggaugaaguggug

SEQ ID NO: 22630 - DNA, 21 bp, homo sapiens
caccgagcagatgctgtcgtc

SEQ ID NO: 22631 - RNA, 21 nt, RNAi
ccgagcagaugcugucgucuu

SEQ ID NO: 22632 - RNA, 21 nt, RNAi
uuggcucgucuacgacagcag

SEQ ID NO: 22633 - DNA, 21 bp, homo sapiens
cacatcctccaggctcttctt

SEQ ID NO: 22634 - RNA, 21 nt, RNAi
cauccuccaggcucuucuuuu

SEQ ID NO: 22635 - RNA, 21 nt, RNAi
uuguaggagguccgagaagaa

SEQ ID NO: 22636 - DNA, 21 bp, homo sapiens
catcctccaggctcttcttcg

SEQ ID NO: 22637 - RNA, 21 nt, RNAi
uccuccaggcucuucuucguu

SEQ ID NO: 22638 - RNA, 21 nt, RNAi
uuaggagguccgagaagaagc

SEQ ID NO: 22639 - DNA, 21 bp, homo sapiens
cacgtgtgtgatgacgctgct

SEQ ID NO: 22640 - RNA, 21 nt, RNAi
cgugugugaugacgcugcuuu

SEQ ID NO: 22641 - RNA, 21 nt, RNAi
uugcacacacuacugcgacga

SEQ ID NO: 22642 - DNA, 21 bp, homo sapiens
caaggacatcttctccgtcat

SEQ ID NO: 22643 - RNA, 21 nt, RNAi
aggacaucuucuccgucauuu

SEQ ID NO: 22644 - RNA, 21 nt, RNAi
uuuccuguagaagaggcagua

SEQ ID NO: 22645 - DNA, 21 bp, homo sapiens
catcttctccgtcatcaactt

SEQ ID NO: 22646 - RNA, 21 nt, RNAi
ucuucuccgucaucaacuuuu

SEQ ID NO: 22647 - RNA, 21 nt, RNAi
uuagaagaggcaguaguugaa

SEQ ID NO: 22648 - DNA, 21 bp, homo sapiens
catcaacttcttcagcttctt

SEQ ID NO: 22649 - RNA, 21 nt, RNAi
ucaacuucuucagcuucuuuu

SEQ ID NO: 22650 - RNA, 21 nt, RNAi
uuaguugaagaagucgaagaa

SEQ ID NO: 22651 - DNA, 21 bp, homo sapiens
caacttcttcagcttcttcaa

SEQ ID NO: 22652 - RNA, 21 nt, RNAi
acuucuucagcuucuucaauu

SEQ ID NO: 22653 - RNA, 21 nt, RNAi
uuugaagaagucgaagaaguu

SEQ ID NO: 22654 - DNA, 21 bp, homo sapiens
cagcttcttcaactggctctg

SEQ ID NO: 22655 - RNA, 21 nt, RNAi
gcuucuucaacuggcucuguu

SEQ ID NO: 22656 - RNA, 21 nt, RNAi
uucgaagaaguugaccgagac

SEQ ID NO: 22657 - DNA, 21 bp, homo sapiens
catcatcggcatgatctggct

SEQ ID NO: 22658 - RNA, 21 nt, RNAi
ucaucggcaugaucuggcuuu

SEQ ID NO: 22659 - RNA, 21 nt, RNAi
uuaguagccguacuagaccga

SEQ ID NO: 22660 - DNA, 21 bp, homo sapiens
catcggcatgatctggctgcg

SEQ ID NO: 22661 - RNA, 21 nt, RNAi
ucggcaugaucuggcugcguu

SEQ ID NO: 22662 - RNA, 21 nt, RNAi
uuagccguacuagaccgacgc

SEQ ID NO: 22663 - DNA, 21 bp, homo sapiens
catgatctggctgcgccacag

SEQ ID NO: 22664 - RNA, 21 nt, RNAi
ugaucuggcugcgccacaguu

SEQ ID NO: 22665 - RNA, 21 nt, RNAi
uuacuagaccgacgcgguguc

SEQ ID NO: 22666 - DNA, 21 bp, homo sapiens
cacagaaagcctgagcttgag

SEQ ID NO: 22667 - RNA, 21 nt, RNAi
cagaaagccugagcuugaguu

SEQ ID NO: 22668 - RNA, 21 nt, RNAi
uugucuuucggacucgaacuc

SEQ ID NO: 22669 - DNA, 21 bp, homo sapiens
cagaaagcctgagcttgagcg

SEQ ID NO: 22670 - RNA, 21 nt, RNAi
gaaagccugagcuugagcguu

SEQ ID NO: 22671 - RNA, 21 nt, RNAi
uucuuucggacucgaacucgc

SEQ ID NO: 22672 - DNA, 21 bp, homo sapiens
catcctggcctgcctcttcct

SEQ ID NO: 22673 - RNA, 21 nt, RNAi
uccuggccugccucuuccuuu

SEQ ID NO: 22674 - RNA, 21 nt, RNAi
uuaggaccggacggagaagga

SEQ ID NO: 22675 - DNA, 21 bp, homo sapiens
catcggcttcaccatcatcct

SEQ ID NO: 22676 - RNA, 21 nt, RNAi
ucggcuucaccaucauccuuu

SEQ ID NO: 22677 - RNA, 21 nt, RNAi
uuagccgaagugguaguagga

SEQ ID NO: 22678 - DNA, 21 bp, homo sapiens
catcttctccacgaccgtcct

SEQ ID NO: 22679 - RNA, 21 nt, RNAi
ucuucuccacgaccguccuuu

SEQ ID NO: 22680 - RNA, 21 nt, RNAi
uuagaagaggugcuggcagga

SEQ ID NO: 22681 - DNA, 21 bp, homo sapiens
cacgaccgtcctgtgtcagaa

SEQ ID NO: 22682 - RNA, 21 nt, RNAi
cgaccguccugugucagaauu

SEQ ID NO: 22683 - RNA, 21 nt, RNAi
uugcuggcaggacacagucuu

SEQ ID NO: 22684 - DNA, 21 bp, homo sapiens
cagaagctcatgcaggtggtc

SEQ ID NO: 22685 - RNA, 21 nt, RNAi
gaagcucaugcagguggucuu

SEQ ID NO: 22686 - RNA, 21 nt, RNAi
uucuucgaguacguccaccag

SEQ ID NO: 22687 - DNA, 21 bp, homo sapiens
caggagacatagccaggaggc

SEQ ID NO: 22688 - RNA, 21 nt, RNAi
ggagacauagccaggaggcuu

SEQ ID NO: 22689 - RNA, 21 nt, RNAi
uuccucuguaucgguccuccg

SEQ ID NO: 22690 - DNA, 21 bp, homo sapiens
catgcgcagaggccagttaaa

SEQ ID NO: 22691 - RNA, 21 nt, RNAi
ugcgcagaggccaguuaaauu

SEQ ID NO: 22692 - RNA, 21 nt, RNAi
uuacgcgucuccggucaauuu

SEQ ID NO: 22693 - DNA, 21 bp, homo sapiens
cagaggccagttaaagtagat

SEQ ID NO: 22694 - RNA, 21 nt, RNAi
gaggccaguuaaaguagauuu

SEQ ID NO: 22695 - RNA, 21 nt, RNAi
uucuccggucaauuucaucua

SEQ ID NO: 22696 - DNA, 21 bp, homo sapiens
cagttaaagtagatcacctcc

SEQ ID NO: 22697 - RNA, 21 nt, RNAi
guuaaaguagaucaccuccuu

SEQ ID NO: 22698 - RNA, 21 nt, RNAi
uucaauuucaucuaguggagg

SEQ ID NO: 22699 - DNA, 21 bp, homo sapiens
caacttgacaccactaagatg

SEQ ID NO: 22700 - RNA, 21 nt, RNAi
acuugacaccacuaagauguu

SEQ ID NO: 22701 - RNA, 21 nt, RNAi
uuugaacuguggugauucuac

SEQ ID NO: 22702 - DNA, 21 bp, homo sapiens
caggagccttcctttctcctg

SEQ ID NO: 22703 - RNA, 21 nt, RNAi
ggagccuuccuuucuccuguu

SEQ ID NO: 22704 - RNA, 21 nt, RNAi
uuccucggaaggaaagaggac

SEQ ID NO: 22705 - DNA, 21 bp, homo sapiens
caaacagagctactgagactt

SEQ ID NO: 22706 - RNA, 21 nt, RNAi
aacagagcuacugagacuuuu

SEQ ID NO: 22707 - RNA, 21 nt, RNAi
uuuugucucgaugacucugaa

SEQ ID NO: 22708 - DNA, 21 bp, homo sapiens
cagagctactgagacttggaa

SEQ ID NO: 22709 - RNA, 21 nt, RNAi
gagcuacugagacuuggaauu

SEQ ID NO: 22710 - RNA, 21 nt, RNAi
uucucgaugacucugaaccuu

SEQ ID NO: 22711 - DNA, 21 bp, homo sapiens
cattgctacgacagacttgca

SEQ ID NO: 22712 - RNA, 21 nt, RNAi
uugcuacgacagacuugcauu

SEQ ID NO: 22713 - RNA, 21 nt, RNAi
uuaacgaugcugucugaacgu

SEQ ID NO: 22714 - DNA, 21 bp, homo sapiens
cagacttgcactgaagccgga

SEQ ID NO: 22715 - RNA, 21 nt, RNAi
gacuugcacugaagccggauu

SEQ ID NO: 22716 - RNA, 21 nt, RNAi
uucugaacgugacuucggccu

SEQ ID NO: 22717 - DNA, 21 bp, homo sapiens
cagagtggaaactcagccgta

SEQ ID NO: 22718 - RNA, 21 nt, RNAi
gaguggaaacucagccguauu

SEQ ID NO: 22719 - RNA, 21 nt, RNAi
uucucaccuuugagucggcau

SEQ ID NO: 22720 - DNA, 21 bp, homo sapiens
cagtgtggcctcttggctatt

SEQ ID NO: 22721 - RNA, 21 nt, RNAi
guguggccucuuggcuauuuu

SEQ ID NO: 22722 - RNA, 21 nt, RNAi
uucacaccggagaaccgauaa

SEQ ID NO: 22723 - DNA, 21 bp, homo sapiens
cagtcttctagaaacagagac

SEQ ID NO: 22724 - RNA, 21 nt, RNAi
gucuucuagaaacagagacuu

SEQ ID NO: 22725 - RNA, 21 nt, RNAi
uucagaagaucuuugucucug

SEQ ID NO: 22726 - DNA, 21 bp, homo sapiens
cagagacaagaaaggcagaca

SEQ ID NO: 22727 - RNA, 21 nt, RNAi
gagacaagaaaggcagacauu

SEQ ID NO: 22728 - RNA, 21 nt, RNAi
uucucuguucuuuccgucugu

SEQ ID NO: 22729 - DNA, 21 bp, homo sapiens
caagaaaggcagacacaccgc

SEQ ID NO: 22730 - RNA, 21 nt, RNAi
agaaaggcagacacaccgcuu

SEQ ID NO: 22731 - RNA, 21 nt, RNAi
uuucuuuccgucuguguggcg

SEQ ID NO: 22732 - DNA, 21 bp, homo sapiens
cagcctccaatgcattggcct

SEQ ID NO: 22733 - RNA, 21 nt, RNAi
gccuccaaugcauuggccuuu

SEQ ID NO: 22734 - RNA, 21 nt, RNAi
uucggagguuacguaaccgga

SEQ ID NO: 22735 - DNA, 21 bp, homo sapiens
caatgcattggcctctgtacc

SEQ ID NO: 22736 - RNA, 21 nt, RNAi
augcauuggccucuguaccuu

SEQ ID NO: 22737 - RNA, 21 nt, RNAi
uuuacguaaccggagacaugg

SEQ ID NO: 22738 - DNA, 21 bp, homo sapiens
cacgctcatgtcctgtcctgg

SEQ ID NO: 22739 - RNA, 21 nt, RNAi
cgcucauguccuguccugguu

SEQ ID NO: 22740 - RNA, 21 nt, RNAi
uugcgaguacaggacaggacc

SEQ ID NO: 22741 - DNA, 21 bp, homo sapiens
catgtcctgtcctggtcctga

SEQ ID NO: 22742 - RNA, 21 nt, RNAi
uguccuguccugguccugauu

SEQ ID NO: 22743 - RNA, 21 nt, RNAi
uuacaggacaggaccaggacu

SEQ ID NO: 22744 - DNA, 21 bp, homo sapiens
cagagccaagcactgctcacg

SEQ ID NO: 22745 - RNA, 21 nt, RNAi
gagccaagcacugcucacguu

SEQ ID NO: 22746 - RNA, 21 nt, RNAi
uucucgguucgugacgagugc

SEQ ID NO: 22747 - DNA, 21 bp, homo sapiens
caagcactgctcacgtctctg

SEQ ID NO: 22748 - RNA, 21 nt, RNAi
agcacugcucacgucucuguu

SEQ ID NO: 22749 - RNA, 21 nt, RNAi
uuucgugacgagugcagagac

SEQ ID NO: 22750 - DNA, 21 bp, homo sapiens
cactttcctgagctgtcgctg

SEQ ID NO: 22751 - RNA, 21 nt, RNAi
cuuuccugagcugucgcuguu

SEQ ID NO: 22752 - RNA, 21 nt, RNAi
uugaaaggacucgacagcgac

SEQ ID NO: 22753 - DNA, 21 bp, homo sapiens
cagccagaggtggagccaagt

SEQ ID NO: 22754 - RNA, 21 nt, RNAi
gccagagguggagccaaguuu

SEQ ID NO: 22755 - RNA, 21 nt, RNAi
uucggucuccaccucgguuca

SEQ ID NO: 22756 - DNA, 21 bp, homo sapiens
cagaggtggagccaagtggtc

SEQ ID NO: 22757 - RNA, 21 nt, RNAi
gagguggagccaaguggucuu

SEQ ID NO: 22758 - RNA, 21 nt, RNAi
uucuccaccucgguucaccag

SEQ ID NO: 22759 - DNA, 21 bp, homo sapiens
caagtggtccagcgtcactcc

SEQ ID NO: 22760 - RNA, 21 nt, RNAi
agugguccagcgucacuccuu

SEQ ID NO: 22761 - RNA, 21 nt, RNAi
uuucaccaggucgcagugagg

SEQ ID NO: 22762 - DNA, 21 bp, homo sapiens
cagcgtcactccagtgctcag

SEQ ID NO: 22763 - RNA, 21 nt, RNAi
gcgucacuccagugcucaguu

SEQ ID NO: 22764 - RNA, 21 nt, RNAi
uucgcagugaggucacgaguc

SEQ ID NO: 22765 - DNA, 21 bp, homo sapiens
cactccagtgctcagctgtgg

SEQ ID NO: 22766 - RNA, 21 nt, RNAi
cuccagugcucagcugugguu

SEQ ID NO: 22767 - RNA, 21 nt, RNAi
uugaggucacgagucgacacc

SEQ ID NO: 22768 - DNA, 21 bp, homo sapiens
cagtgctcagctgtggctgga

SEQ ID NO: 22769 - RNA, 21 nt, RNAi
gugcucagcuguggcuggauu

SEQ ID NO: 22770 - RNA, 21 nt, RNAi
uucacgagucgacaccgaccu

SEQ ID NO: 22771 - DNA, 21 bp, homo sapiens
caacgaagccggacacggctt

SEQ ID NO: 22772 - RNA, 21 nt, RNAi
acgaagccggacacggcuuuu

SEQ ID NO: 22773 - RNA, 21 nt, RNAi
uuugcuucggccugugccgaa

SEQ ID NO: 22774 - DNA, 21 bp, homo sapiens
cactgaccagcggctgctcaa

SEQ ID NO: 22775 - RNA, 21 nt, RNAi
cugaccagcggcugcucaauu

SEQ ID NO: 22776 - RNA, 21 nt, RNAi
uugacuggucgccgacgaguu

SEQ ID NO: 22777 - DNA, 21 bp, homo sapiens
caagccgcaagctctcagcaa

SEQ ID NO: 22778 - RNA, 21 nt, RNAi
agccgcaagcucucagcaauu

SEQ ID NO: 22779 - RNA, 21 nt, RNAi
uuucggcguucgagagucguu

SEQ ID NO: 22780 - DNA, 21 bp, homo sapiens
caggaccagatgtccgtctct

SEQ ID NO: 22781 - RNA, 21 nt, RNAi
ggaccagauguccgucucuuu

SEQ ID NO: 22782 - RNA, 21 nt, RNAi
uuccuggucuacaggcagaga

SEQ ID NO: 22783 - DNA, 21 bp, homo sapiens
cagatgtccgtctctcttgct

SEQ ID NO: 22784 - RNA, 21 nt, RNAi
gauguccgucucucuugcuuu

SEQ ID NO: 22785 - RNA, 21 nt, RNAi
uucuacaggcagagagaacga

SEQ ID NO: 22786 - DNA, 21 bp, homo sapiens
cacatggacagacttcacagc

SEQ ID NO: 22787 - RNA, 21 nt, RNAi
cauggacagacuucacagcuu

SEQ ID NO: 22788 - RNA, 21 nt, RNAi
uuguaccugucugaagugucg

SEQ ID NO: 22789 - DNA, 21 bp, homo sapiens
catggacagacttcacagcgt

SEQ ID NO: 22790 - RNA, 21 nt, RNAi
uggacagacuucacagcguuu

SEQ ID NO: 22791 - RNA, 21 nt, RNAi
uuaccugucugaagugucgca

SEQ ID NO: 22792 - DNA, 21 bp, homo sapiens
cagacttcacagcgtctgctc

SEQ ID NO: 22793 - RNA, 21 nt, RNAi
gacuucacagcgucugcucuu

SEQ ID NO: 22794 - RNA, 21 nt, RNAi
uucugaagugucgcagacgag

SEQ ID NO: 22795 - DNA, 21 bp, homo sapiens
cacagcgtctgctcataggac

SEQ ID NO: 22796 - RNA, 21 nt, RNAi
cagcgucugcucauaggacuu

SEQ ID NO: 22797 - RNA, 21 nt, RNAi
uugucgcagacgaguauccug

SEQ ID NO: 22798 - DNA, 21 bp, homo sapiens
cagcgtctgctcataggacct

SEQ ID NO: 22799 - RNA, 21 nt, RNAi
gcgucugcucauaggaccuuu

SEQ ID NO: 22800 - RNA, 21 nt, RNAi
uucgcagacgaguauccugga

SEQ ID NO: 22801 - DNA, 21 bp, homo sapiens
cataggacctgcatccttcct

SEQ ID NO: 22802 - RNA, 21 nt, RNAi
uaggaccugcauccuuccuuu

SEQ ID NO: 22803 - RNA, 21 nt, RNAi
uuauccuggacguaggaagga

SEQ ID NO: 22804 - DNA, 21 bp, homo sapiens
cagcaggcaggtggactgact

SEQ ID NO: 22805 - RNA, 21 nt, RNAi
gcaggcagguggacugacuuu

SEQ ID NO: 22806 - RNA, 21 nt, RNAi
uucguccguccaccugacuga

SEQ ID NO: 22807 - DNA, 21 bp, homo sapiens
caggcaggtggactgactgtg

SEQ ID NO: 22808 - RNA, 21 nt, RNAi
ggcagguggacugacuguguu

SEQ ID NO: 22809 - RNA, 21 nt, RNAi
uuccguccaccugacugacac

SEQ ID NO: 22810 - DNA, 21 bp, homo sapiens
caggtggactgactgtgttgg

SEQ ID NO: 22811 - RNA, 21 nt, RNAi
gguggacugacuguguugguu

SEQ ID NO: 22812 - RNA, 21 nt, RNAi
uuccaccugacugacacaacc

SEQ ID NO: 22813 - DNA, 21 bp, homo sapiens
caaataaggacagcagctggt

SEQ ID NO: 22814 - RNA, 21 nt, RNAi
aauaaggacagcagcugguuu

SEQ ID NO: 22815 - RNA, 21 nt, RNAi
uuuuauuccugucgucgacca

SEQ ID NO: 22816 - DNA, 21 bp, homo sapiens
cacctgcctggtgcattgctg

SEQ ID NO: 22817 - RNA, 21 nt, RNAi
ccugccuggugcauugcuguu

SEQ ID NO: 22818 - RNA, 21 nt, RNAi
uuggacggaccacguaacgac

SEQ ID NO: 22819 - DNA, 21 bp, homo sapiens
cattgctgtgtgaatccagga

SEQ ID NO: 22820 - RNA, 21 nt, RNAi
uugcugugugaauccaggauu

SEQ ID NO: 22821 - RNA, 21 nt, RNAi
uuaacgacacacuuagguccu

SEQ ID NO: 22822 - DNA, 21 bp, homo sapiens
caggaggcagtggacatcgta

SEQ ID NO: 22823 - RNA, 21 nt, RNAi
ggaggcaguggacaucguauu

SEQ ID NO: 22824 - RNA, 21 nt, RNAi
uuccuccgucaccuguagcau

SEQ ID NO: 22825 - DNA, 21 bp, homo sapiens
cagtggacatcgtaggcagcc

SEQ ID NO: 22826 - RNA, 21 nt, RNAi
guggacaucguaggcagccuu

SEQ ID NO: 22827 - RNA, 21 nt, RNAi
uucaccuguagcauccgucgg

SEQ ID NO: 22828 - DNA, 21 bp, homo sapiens
cacgcacgacgtcagcctctt

SEQ ID NO: 22829 - RNA, 21 nt, RNAi
cgcacgacgucagccucuuuu

SEQ ID NO: 22830 - RNA, 21 nt, RNAi
uugcgugcugcagucggagaa

SEQ ID NO: 22831 - DNA, 21 bp, homo sapiens
cacgacgtcagcctcttacct

SEQ ID NO: 22832 - RNA, 21 nt, RNAi
cgacgucagccucuuaccuuu

SEQ ID NO: 22833 - RNA, 21 nt, RNAi
uugcugcagucggagaaugga

SEQ ID NO: 22834 - DNA, 21 bp, homo sapiens
cacgcacttgcctgttggctg

SEQ ID NO: 22835 - RNA, 21 nt, RNAi
cgcacuugccuguuggcuguu

SEQ ID NO: 22836 - RNA, 21 nt, RNAi
uugcgugaacggacaaccgac

SEQ ID NO: 22837 - DNA, 21 bp, homo sapiens
cacttgcctgttggctgctgc

SEQ ID NO: 22838 - RNA, 21 nt, RNAi
cuugccuguuggcugcugcuu

SEQ ID NO: 22839 - RNA, 21 nt, RNAi
uugaacggacaaccgacgacg

SEQ ID NO: 22840 - DNA, 21 bp, homo sapiens
cagcgtctgttgtggaaagta

SEQ ID NO: 22841 - RNA, 21 nt, RNAi
gcgucuguuguggaaaguauu

SEQ ID NO: 22842 - RNA, 21 nt, RNAi
uucgcagacaacaccuuucau

SEQ ID NO: 22843 - DNA, 21 bp, homo sapiens
cacactgcgcaggtctcttct

SEQ ID NO: 22844 - RNA, 21 nt, RNAi
cacugcgcaggucucuucuuu

SEQ ID NO: 22845 - RNA, 21 nt, RNAi
uugugacgcguccagagaaga

SEQ ID NO: 22846 - DNA, 21 bp, homo sapiens
cactgcgcaggtctcttctgg

SEQ ID NO: 22847 - RNA, 21 nt, RNAi
cugcgcaggucucuucugguu

SEQ ID NO: 22848 - RNA, 21 nt, RNAi
uugacgcguccagagaagacc

SEQ ID NO: 22849 - DNA, 21 bp, homo sapiens
cagtctgtgatccttggtgct

SEQ ID NO: 22850 - RNA, 21 nt, RNAi
gucugugauccuuggugcuuu

SEQ ID NO: 22851 - RNA, 21 nt, RNAi
uucagacacuaggaaccacga

SEQ ID NO: 22852 - DNA, 21 bp, homo sapiens
cacactccactgacaaacgtc

SEQ ID NO: 22853 - RNA, 21 nt, RNAi
cacuccacugacaaacgucuu

SEQ ID NO: 22854 - RNA, 21 nt, RNAi
uugugaggugacuguuugcag

SEQ ID NO: 22855 - DNA, 21 bp, homo sapiens
caccacaacaagcaagtgcat

SEQ ID NO: 22856 - RNA, 21 nt, RNAi
ccacaacaagcaagugcauuu

SEQ ID NO: 22857 - RNA, 21 nt, RNAi
uugguguuguucguucacgua

SEQ ID NO: 22858 - DNA, 21 bp, homo sapiens
cagtggtcatgctcagccttg

SEQ ID NO: 22859 - RNA, 21 nt, RNAi
guggucaugcucagccuuguu

SEQ ID NO: 22860 - RNA, 21 nt, RNAi
uucaccaguacgagucggaac

SEQ ID NO: 22861 - DNA, 21 bp, homo sapiens
catgctcagccttgctgctct

SEQ ID NO: 22862 - RNA, 21 nt, RNAi
ugcucagccuugcugcucuuu

SEQ ID NO: 22863 - RNA, 21 nt, RNAi
uuacgagucggaacgacgaga

SEQ ID NO: 22864 - DNA, 21 bp, homo sapiens
gaacatcacgctgctcaacgg

SEQ ID NO: 22865 - RNA, 21 nt, RNAi
acaucacgcugcucaacgguu

SEQ ID NO: 22866 - RNA, 21 nt, RNAi
uuuguagugcgacgaguugcc

SEQ ID NO: 22867 - DNA, 21 bp, homo sapiens
gactacgcctacatgctggag

SEQ ID NO: 22868 - RNA, 21 nt, RNAi
cuacgccuacaugcuggaguu

SEQ ID NO: 22869 - RNA, 21 nt, RNAi
uugaugcggauguacgaccuc

SEQ ID NO: 22870 - DNA, 21 bp, homo sapiens
gatcgagctgctcatcatccg

SEQ ID NO: 22871 - RNA, 21 nt, RNAi
ucgagcugcucaucauccguu

SEQ ID NO: 22872 - RNA, 21 nt, RNAi
uuagcucgacgaguaguaggc

SEQ ID NO: 22873 - DNA, 21 bp, homo sapiens
gagctgctcatcatccggcct

SEQ ID NO: 22874 - RNA, 21 nt, RNAi
gcugcucaucauccggccuuu

SEQ ID NO: 22875 - RNA, 21 nt, RNAi
uucgacgaguaguaggccgga

SEQ ID NO: 22876 - DNA, 21 bp, homo sapiens
gaactgctacagcgtgaaggc

SEQ ID NO: 22877 - RNA, 21 nt, RNAi
acugcuacagcgugaaggcuu

SEQ ID NO: 22878 - RNA, 21 nt, RNAi
uuugacgaugucgcacuuccg

SEQ ID NO: 22879 - DNA, 21 bp, homo sapiens
gaaggcaccaaactggatgtg

SEQ ID NO: 22880 - RNA, 21 nt, RNAi
aggcaccaaacuggauguguu

SEQ ID NO: 22881 - RNA, 21 nt, RNAi
uuuccgugguuugaccuacac

SEQ ID NO: 22882 - DNA, 21 bp, homo sapiens
gaacattgtgctggcattata

SEQ ID NO: 22883 - RNA, 21 nt, RNAi
acauugugcuggcauuauauu

SEQ ID NO: 22884 - RNA, 21 nt, RNAi
uuuguaacacgaccguaauau

SEQ ID NO: 22885 - DNA, 21 bp, homo sapiens
gaggatggaattacttgaatt

SEQ ID NO: 22886 - RNA, 21 nt, RNAi
ggauggaauuacuugaauuuu

SEQ ID NO: 22887 - RNA, 21 nt, RNAi
uuccuaccuuaaugaacuuaa

SEQ ID NO: 22888 - DNA, 21 bp, homo sapiens
gatggaattacttgaatttcg

SEQ ID NO: 22889 - RNA, 21 nt, RNAi
uggaauuacuugaauuucguu

SEQ ID NO: 22890 - RNA, 21 nt, RNAi
uuaccuuaaugaacuuaaagc

SEQ ID NO: 22891 - DNA, 21 bp, homo sapiens
gaattacttgaatttcgtcac

SEQ ID NO: 22892 - RNA, 21 nt, RNAi
auuacuugaauuucgucacuu

SEQ ID NO: 22893 - RNA, 21 nt, RNAi
uuuaaugaacuuaaagcagug

SEQ ID NO: 22894 - DNA, 21 bp, homo sapiens
gaatttcgtcacagaggaaat

SEQ ID NO: 22895 - RNA, 21 nt, RNAi
auuucgucacagaggaaauuu

SEQ ID NO: 22896 - RNA, 21 nt, RNAi
uuuaaagcagugucuccuuua

SEQ ID NO: 22897 - DNA, 21 bp, homo sapiens
gacgctggtgtacgtgctgac

SEQ ID NO: 22898 - RNA, 21 nt, RNAi
cgcugguguacgugcugacuu

SEQ ID NO: 22899 - RNA, 21 nt, RNAi
uugcgaccacaugcacgacug

SEQ ID NO: 22900 - DNA, 21 bp, homo sapiens
gaccaacctggcctacttcac

SEQ ID NO: 22901 - RNA, 21 nt, RNAi
ccaaccuggccuacuucacuu

SEQ ID NO: 22902 - RNA, 21 nt, RNAi
uugguuggaccggaugaagug

SEQ ID NO: 22903 - DNA, 21 bp, homo sapiens
gagcagatgctgtcgtccgag

SEQ ID NO: 22904 - RNA, 21 nt, RNAi
gcagaugcugucguccgaguu

SEQ ID NO: 22905 - RNA, 21 nt, RNAi
uucgucuacgacagcaggcuc

SEQ ID NO: 22906 - DNA, 21 bp, homo sapiens
gatgacgctgctctacgcctt

SEQ ID NO: 22907 - RNA, 21 nt, RNAi
ugacgcugcucuacgccuuuu

SEQ ID NO: 22908 - RNA, 21 nt, RNAi
uuacugcgacgagaugcggaa

SEQ ID NO: 22909 - DNA, 21 bp, homo sapiens
gacgctgctctacgccttctc

SEQ ID NO: 22910 - RNA, 21 nt, RNAi
cgcugcucuacgccuucucuu

SEQ ID NO: 22911 - RNA, 21 nt, RNAi
uugcgacgagaugcggaagag

SEQ ID NO: 22912 - DNA, 21 bp, homo sapiens
gacatcttctccgtcatcaac

SEQ ID NO: 22913 - RNA, 21 nt, RNAi
caucuucuccgucaucaacuu

SEQ ID NO: 22914 - RNA, 21 nt, RNAi
uuguagaagaggcaguaguug

SEQ ID NO: 22915 - DNA, 21 bp, homo sapiens
gatctggctgcgccacagaaa

SEQ ID NO: 22916 - RNA, 21 nt, RNAi
ucuggcugcgccacagaaauu

SEQ ID NO: 22917 - RNA, 21 nt, RNAi
uuagaccgacgcggugucuuu

SEQ ID NO: 22918 - DNA, 21 bp, homo sapiens
gaaagcctgagcttgagcggc

SEQ ID NO: 22919 - RNA, 21 nt, RNAi
aagccugagcuugagcggcuu

SEQ ID NO: 22920 - RNA, 21 nt, RNAi
uuuucggacucgaacucgccg

SEQ ID NO: 22921 - DNA, 21 bp, homo sapiens
gatcgccgtctccttctggaa

SEQ ID NO: 22922 - RNA, 21 nt, RNAi
ucgccgucuccuucuggaauu

SEQ ID NO: 22923 - RNA, 21 nt, RNAi
uuagcggcagaggaagaccuu

SEQ ID NO: 22924 - DNA, 21 bp, homo sapiens
gagtgtggcatcggcttcacc

SEQ ID NO: 22925 - RNA, 21 nt, RNAi
guguggcaucggcuucaccuu

SEQ ID NO: 22926 - RNA, 21 nt, RNAi
uucacaccguagccgaagugg

SEQ ID NO: 22927 - DNA, 21 bp, homo sapiens
gaccgtcctgtgtcagaagct

SEQ ID NO: 22928 - RNA, 21 nt, RNAi
ccguccugugucagaagcuuu

SEQ ID NO: 22929 - RNA, 21 nt, RNAi
uuggcaggacacagucuucga

SEQ ID NO: 22930 - DNA, 21 bp, homo sapiens
gagacatagccaggaggccga

SEQ ID NO: 22931 - RNA, 21 nt, RNAi
gacauagccaggaggccgauu

SEQ ID NO: 22932 - RNA, 21 nt, RNAi
uucuguaucgguccuccggcu

SEQ ID NO: 22933 - DNA, 21 bp, homo sapiens
gacatagccaggaggccgagt

SEQ ID NO: 22934 - RNA, 21 nt, RNAi
cauagccaggaggccgaguuu

SEQ ID NO: 22935 - RNA, 21 nt, RNAi
uuguaucgguccuccggcuca

SEQ ID NO: 22936 - DNA, 21 bp, homo sapiens
gagcatgcgcagaggccagtt

SEQ ID NO: 22937 - RNA, 21 nt, RNAi
gcaugcgcagaggccaguuuu

SEQ ID NO: 22938 - RNA, 21 nt, RNAi
uucguacgcgucuccggucaa

SEQ ID NO: 22939 - DNA, 21 bp, homo sapiens
gaggccagttaaagtagatca

SEQ ID NO: 22940 - RNA, 21 nt, RNAi
ggccaguuaaaguagaucauu

SEQ ID NO: 22941 - RNA, 21 nt, RNAi
uuccggucaauuucaucuagu

SEQ ID NO: 22942 - DNA, 21 bp, homo sapiens
gaaggcaggagccttcctttc

SEQ ID NO: 22943 - RNA, 21 nt, RNAi
aggcaggagccuuccuuucuu

SEQ ID NO: 22944 - RNA, 21 nt, RNAi
uuuccguccucggaaggaaag

SEQ ID NO: 22945 - DNA, 21 bp, homo sapiens
gagctactgagacttggaacc

SEQ ID NO: 22946 - RNA, 21 nt, RNAi
gcuacugagacuuggaaccuu

SEQ ID NO: 22947 - RNA, 21 nt, RNAi
uucgaugacucugaaccuugg

SEQ ID NO: 22948 - DNA, 21 bp, homo sapiens
gagacttggaacctcattgct

SEQ ID NO: 22949 - RNA, 21 nt, RNAi
gacuuggaaccucauugcuuu

SEQ ID NO: 22950 - RNA, 21 nt, RNAi
uucugaaccuuggaguaacga

SEQ ID NO: 22951 - DNA, 21 bp, homo sapiens
gacttggaacctcattgctac

SEQ ID NO: 22952 - RNA, 21 nt, RNAi
cuuggaaccucauugcuacuu

SEQ ID NO: 22953 - RNA, 21 nt, RNAi
uugaaccuuggaguaacgaug

SEQ ID NO: 22954 - DNA, 21 bp, homo sapiens
gaacctcattgctacgacaga

SEQ ID NO: 22955 - RNA, 21 nt, RNAi
accucauugcuacgacagauu

SEQ ID NO: 22956 - RNA, 21 nt, RNAi
uuuggaguaacgaugcugucu

SEQ ID NO: 22957 - DNA, 21 bp, homo sapiens
gacagacttgcactgaagccg

SEQ ID NO: 22958 - RNA, 21 nt, RNAi
cagacuugcacugaagccguu

SEQ ID NO: 22959 - RNA, 21 nt, RNAi
uugucugaacgugacuucggc

SEQ ID NO: 22960 - DNA, 21 bp, homo sapiens
gacttgcactgaagccggaca

SEQ ID NO: 22961 - RNA, 21 nt, RNAi
cuugcacugaagccggacauu

SEQ ID NO: 22962 - RNA, 21 nt, RNAi
uugaacgugacuucggccugu

SEQ ID NO: 22963 - DNA, 21 bp, homo sapiens
gagtggaaactcagccgtagg

SEQ ID NO: 22964 - RNA, 21 nt, RNAi
guggaaacucagccguagguu

SEQ ID NO: 22965 - RNA, 21 nt, RNAi
uucaccuuugagucggcaucc

SEQ ID NO: 22966 - DNA, 21 bp, homo sapiens
gatggactcctgaccataatc

SEQ ID NO: 22967 - RNA, 21 nt, RNAi
uggacuccugaccauaaucuu

SEQ ID NO: 22968 - RNA, 21 nt, RNAi
uuaccugaggacugguauuag

SEQ ID NO: 22969 - DNA, 21 bp, homo sapiens
gactcctgaccataatcctag

SEQ ID NO: 22970 - RNA, 21 nt, RNAi
cuccugaccauaauccuaguu

SEQ ID NO: 22971 - RNA, 21 nt, RNAi
uugaggacugguauuaggauc

SEQ ID NO: 22972 - DNA, 21 bp, homo sapiens
gagacaccatcctgagccagg

SEQ ID NO: 22973 - RNA, 21 nt, RNAi
gacaccauccugagccagguu

SEQ ID NO: 22974 - RNA, 21 nt, RNAi
uucugugguaggacucggucc

SEQ ID NO: 22975 - DNA, 21 bp, homo sapiens
gaggctgagttctggttcatg

SEQ ID NO: 22976 - RNA, 21 nt, RNAi
ggcugaguucugguucauguu

SEQ ID NO: 22977 - RNA, 21 nt, RNAi
uuccgacucaagaccaaguac

SEQ ID NO: 22978 - DNA, 21 bp, homo sapiens
gagttctggttcatgcagaca

SEQ ID NO: 22979 - RNA, 21 nt, RNAi
guucugguucaugcagacauu

SEQ ID NO: 22980 - RNA, 21 nt, RNAi
uucaagaccaaguacgucugu

SEQ ID NO: 22981 - DNA, 21 bp, homo sapiens
gaaacagagacaagaaaggca

SEQ ID NO: 22982 - RNA, 21 nt, RNAi
aacagagacaagaaaggcauu

SEQ ID NO: 22983 - RNA, 21 nt, RNAi
uuuugucucuguucuuuccgu

SEQ ID NO: 22984 - DNA, 21 bp, homo sapiens
gagacaagaaaggcagacaca

SEQ ID NO: 22985 - RNA, 21 nt, RNAi
gacaagaaaggcagacacauu

SEQ ID NO: 22986 - RNA, 21 nt, RNAi
uucuguucuuuccgucugugu

SEQ ID NO: 22987 - DNA, 21 bp, homo sapiens
gacaagaaaggcagacacacc

SEQ ID NO: 22988 - RNA, 21 nt, RNAi
caagaaaggcagacacaccuu

SEQ ID NO: 22989 - RNA, 21 nt, RNAi
uuguucuuuccgucugugugg

SEQ ID NO: 22990 - DNA, 21 bp, homo sapiens
gagacagagccaagcactgct

SEQ ID NO: 22991 - RNA, 21 nt, RNAi
gacagagccaagcacugcuuu

SEQ ID NO: 22992 - RNA, 21 nt, RNAi
uucugucucgguucgugacga

SEQ ID NO: 22993 - DNA, 21 bp, homo sapiens
gacagagccaagcactgctca

SEQ ID NO: 22994 - RNA, 21 nt, RNAi
cagagccaagcacugcucauu

SEQ ID NO: 22995 - RNA, 21 nt, RNAi
uugucucgguucgugacgagu

SEQ ID NO: 22996 - DNA, 21 bp, homo sapiens
gagccaagcactgctcacgtc

SEQ ID NO: 22997 - RNA, 21 nt, RNAi
gccaagcacugcucacgucuu

SEQ ID NO: 22998 - RNA, 21 nt, RNAi
uucgguucgugacgagugcag

SEQ ID NO: 22999 - DNA, 21 bp, homo sapiens
gaggtggagccaagtggtcca

SEQ ID NO: 23000 - RNA, 21 nt, RNAi
gguggagccaagugguccauu

SEQ ID NO: 23001 - RNA, 21 nt, RNAi
uuccaccucgguucaccaggu

SEQ ID NO: 23002 - DNA, 21 bp, homo sapiens
gagccaagtggtccagcgtca

SEQ ID NO: 23003 - RNA, 21 nt, RNAi
gccaagugguccagcgucauu

SEQ ID NO: 23004 - RNA, 21 nt, RNAi
uucgguucaccaggucgcagu

SEQ ID NO: 23005 - DNA, 21 bp, homo sapiens
gaagccggacacggcttcact

SEQ ID NO: 23006 - RNA, 21 nt, RNAi
agccggacacggcuucacuuu

SEQ ID NO: 23007 - RNA, 21 nt, RNAi
uuucggccugugccgaaguga

SEQ ID NO: 23008 - DNA, 21 bp, homo sapiens
gacacggcttcactgaccagc

SEQ ID NO: 23009 - RNA, 21 nt, RNAi
cacggcuucacugaccagcuu

SEQ ID NO: 23010 - RNA, 21 nt, RNAi
uugugccgaagugacuggucg

SEQ ID NO: 23011 - DNA, 21 bp, homo sapiens
gagaaacctgatgaacagttt

SEQ ID NO: 23012 - RNA, 21 nt, RNAi
gaaaccugaugaacaguuuuu

SEQ ID NO: 23013 - RNA, 21 nt, RNAi
uucuuuggacuacuugucaaa

SEQ ID NO: 23014 - DNA, 21 bp, homo sapiens
gaaacctgatgaacagtttgg

SEQ ID NO: 23015 - RNA, 21 nt, RNAi
aaccugaugaacaguuugguu

SEQ ID NO: 23016 - RNA, 21 nt, RNAi
uuuuggacuacuugucaaacc

SEQ ID NO: 23017 - DNA, 21 bp, homo sapiens
gactcaggaccagatgtccgt

SEQ ID NO: 23018 - RNA, 21 nt, RNAi
cucaggaccagauguccguuu

SEQ ID NO: 23019 - RNA, 21 nt, RNAi
uugaguccuggucuacaggca

SEQ ID NO: 23020 - DNA, 21 bp, homo sapiens
gaccagatgtccgtctctctt

SEQ ID NO: 23021 - RNA, 21 nt, RNAi
ccagauguccgucucucuuuu

SEQ ID NO: 23022 - RNA, 21 nt, RNAi
uuggucuacaggcagagagaa

SEQ ID NO: 23023 - DNA, 21 bp, homo sapiens
gatgtccgtctctcttgcttg

SEQ ID NO: 23024 - RNA, 21 nt, RNAi
uguccgucucucuugcuuguu

SEQ ID NO: 23025 - RNA, 21 nt, RNAi
uuacaggcagagagaacgaac

SEQ ID NO: 23026 - DNA, 21 bp, homo sapiens
gaggaatgaagacctttattc

SEQ ID NO: 23027 - RNA, 21 nt, RNAi
ggaaugaagaccuuuauucuu

SEQ ID NO: 23028 - RNA, 21 nt, RNAi
uuccuuacuucuggaaauaag

SEQ ID NO: 23029 - DNA, 21 bp, homo sapiens
gaatgaagacctttattcacc

SEQ ID NO: 23030 - RNA, 21 nt, RNAi
augaagaccuuuauucaccuu

SEQ ID NO: 23031 - RNA, 21 nt, RNAi
uuuacuucuggaaauaagugg

SEQ ID NO: 23032 - DNA, 21 bp, homo sapiens
gacagacttcacagcgtctgc

SEQ ID NO: 23033 - RNA, 21 nt, RNAi
cagacuucacagcgucugcuu

SEQ ID NO: 23034 - RNA, 21 nt, RNAi
uugucugaagugucgcagacg

SEQ ID NO: 23035 - DNA, 21 bp, homo sapiens
gacttcacagcgtctgctcat

SEQ ID NO: 23036 - RNA, 21 nt, RNAi
cuucacagcgucugcucauuu

SEQ ID NO: 23037 - RNA, 21 nt, RNAi
uugaagugucgcagacgagua

SEQ ID NO: 23038 - DNA, 21 bp, homo sapiens
gacgaattccactcgtccaag

SEQ ID NO: 23039 - RNA, 21 nt, RNAi
cgaauuccacucguccaaguu

SEQ ID NO: 23040 - RNA, 21 nt, RNAi
uugcuuaaggugagcagguuc

SEQ ID NO: 23041 - DNA, 21 bp, homo sapiens
gaatccaggaggcagtggaca

SEQ ID NO: 23042 - RNA, 21 nt, RNAi
auccaggaggcaguggacauu

SEQ ID NO: 23043 - RNA, 21 nt, RNAi
uuuagguccuccgucaccugu

SEQ ID NO: 23044 - DNA, 21 bp, homo sapiens
gaggcagtggacatcgtaggc

SEQ ID NO: 23045 - RNA, 21 nt, RNAi
ggcaguggacaucguaggcuu

SEQ ID NO: 23046 - RNA, 21 nt, RNAi
uuccgucaccuguagcauccg

SEQ ID NO: 23047 - DNA, 21 bp, homo sapiens
gacgtcagcctcttaccttcc

SEQ ID NO: 23048 - RNA, 21 nt, RNAi
cgucagccucuuaccuuccuu

SEQ ID NO: 23049 - RNA, 21 nt, RNAi
uugcagucggagaauggaagg

SEQ ID NO: 23050 - DNA, 21 bp, homo sapiens
gatgccgttctgttccaacct

SEQ ID NO: 23051 - RNA, 21 nt, RNAi
ugccguucuguuccaaccuuu

SEQ ID NO: 23052 - RNA, 21 nt, RNAi
uuacggcaagacaagguugga

SEQ ID NO: 23053 - DNA, 21 bp, homo sapiens
gaggtggacatgcctcaagga

SEQ ID NO: 23054 - RNA, 21 nt, RNAi
gguggacaugccucaaggauu

SEQ ID NO: 23055 - RNA, 21 nt, RNAi
uuccaccuguacggaguuccu

SEQ ID NO: 23056 - DNA, 21 bp, homo sapiens
gacatgcctcaaggatacagg

SEQ ID NO: 23057 - RNA, 21 nt, RNAi
caugccucaaggauacagguu

SEQ ID NO: 23058 - RNA, 21 nt, RNAi
uuguacggaguuccuaugucc

SEQ ID NO: 23059 - DNA, 21 bp, homo sapiens
gacggcacgcacttgcctgtt

SEQ ID NO: 23060 - RNA, 21 nt, RNAi
cggcacgcacuugccuguuuu

SEQ ID NO: 23061 - RNA, 21 nt, RNAi
uugccgugcgugaacggacaa

SEQ ID NO: 23062 - DNA, 21 bp, homo sapiens
gaaagtagctgctagtgaaat

SEQ ID NO: 23063 - RNA, 21 nt, RNAi
aaguagcugcuagugaaauuu

SEQ ID NO: 23064 - RNA, 21 nt, RNAi
uuuucaucgacgaucacuuua

SEQ ID NO: 23065 - DNA, 21 bp, homo sapiens
gagctcctccgcagaaggttg

SEQ ID NO: 23066 - RNA, 21 nt, RNAi
gcuccuccgcagaagguuguu

SEQ ID NO: 23067 - RNA, 21 nt, RNAi
uucgaggaggcgucuuccaac

SEQ ID NO: 23068 - DNA, 21 bp, homo sapiens
gactgtctcagaagacttgat

SEQ ID NO: 23069 - RNA, 21 nt, RNAi
cugucucagaagacuugauuu

SEQ ID NO: 23070 - RNA, 21 nt, RNAi
uugacagagucuucugaacua

SEQ ID NO: 23071 - DNA, 21 bp, homo sapiens
gatgctgtcggcaccatgttt

SEQ ID NO: 23072 - RNA, 21 nt, RNAi
ugcugucggcaccauguuuuu

SEQ ID NO: 23073 - RNA, 21 nt, RNAi
uuacgacagccgugguacaaa

SEQ ID NO: 23074 - DNA, 21 bp, homo sapiens
gagtaatgacgtgtgtggctg

SEQ ID NO: 23075 - RNA, 21 nt, RNAi
guaaugacguguguggcuguu

SEQ ID NO: 23076 - RNA, 21 nt, RNAi
uucauuacugcacacaccgac

SEQ ID NO: 23077 - DNA, 21 bp, homo sapiens
gaccttctttattctgtgtta

SEQ ID NO: 23078 - RNA, 21 nt, RNAi
ccuucuuuauucuguguuauu

SEQ ID NO: 23079 - RNA, 21 nt, RNAi
uuggaagaaauaagacacaau

SEQ ID NO: 23080 - DNA, 21 bp, homo sapiens
tacgcctacatgctggaggtc

SEQ ID NO: 23081 - RNA, 21 nt, RNAi
cgccuacaugcuggaggucuu

SEQ ID NO: 23082 - RNA, 21 nt, RNAi
uugcggauguacgaccuccag

SEQ ID NO: 23083 - DNA, 21 bp, homo sapiens
tacatgctggaggtctacggc

SEQ ID NO: 23084 - RNA, 21 nt, RNAi
caugcuggaggucuacggcuu

SEQ ID NO: 23085 - RNA, 21 nt, RNAi
uuguacgaccuccagaugccg

SEQ ID NO: 23086 - DNA, 21 bp, homo sapiens
tacctgctcaagccgctcttc

SEQ ID NO: 23087 - RNA, 21 nt, RNAi
ccugcucaagccgcucuucuu

SEQ ID NO: 23088 - RNA, 21 nt, RNAi
uuggacgaguucggcgagaag

SEQ ID NO: 23089 - DNA, 21 bp, homo sapiens
tatacagcggcctctttgcct

SEQ ID NO: 23090 - RNA, 21 nt, RNAi
uacagcggccucuuugccuuu

SEQ ID NO: 23091 - RNA, 21 nt, RNAi
uuaugucgccggagaaacgga

SEQ ID NO: 23092 - DNA, 21 bp, homo sapiens
tacagcggcctctttgcctat

SEQ ID NO: 23093 - RNA, 21 nt, RNAi
cagcggccucuuugccuauuu

SEQ ID NO: 23094 - RNA, 21 nt, RNAi
uugucgccggagaaacggaua

SEQ ID NO: 23095 - DNA, 21 bp, homo sapiens
tatggaggatggaattacttg

SEQ ID NO: 23096 - RNA, 21 nt, RNAi
uggaggauggaauuacuuguu

SEQ ID NO: 23097 - RNA, 21 nt, RNAi
uuaccuccuaccuuaaugaac

SEQ ID NO: 23098 - DNA, 21 bp, homo sapiens
tacttgaatttcgtcacagag

SEQ ID NO: 23099 - RNA, 21 nt, RNAi
cuugaauuucgucacagaguu

SEQ ID NO: 23100 - RNA, 21 nt, RNAi
uugaacuuaaagcagugucuc

SEQ ID NO: 23101 - DNA, 21 bp, homo sapiens
tacgtgctgaccaacctggcc

SEQ ID NO: 23102 - RNA, 21 nt, RNAi
cgugcugaccaaccuggccuu

SEQ ID NO: 23103 - RNA, 21 nt, RNAi
uugcacgacugguuggaccgg

SEQ ID NO: 23104 - DNA, 21 bp, homo sapiens
tacgccttctccaaggacatc

SEQ ID NO: 23105 - RNA, 21 nt, RNAi
cgccuucuccaaggacaucuu

SEQ ID NO: 23106 - RNA, 21 nt, RNAi
uugcggaagagguuccuguag

SEQ ID NO: 23107 - DNA, 21 bp, homo sapiens
taaagtagatcacctcctcga

SEQ ID NO: 23108 - RNA, 21 nt, RNAi
aaguagaucaccuccucgauu

SEQ ID NO: 23109 - RNA, 21 nt, RNAi
uuuucaucuaguggaggagcu

SEQ ID NO: 23110 - DNA, 21 bp, homo sapiens
tactgagacttggaacctcat

SEQ ID NO: 23111 - RNA, 21 nt, RNAi
cugagacuuggaaccucauuu

SEQ ID NO: 23112 - RNA, 21 nt, RNAi
uugacucugaaccuuggagua

SEQ ID NO: 23113 - DNA, 21 bp, homo sapiens
tacgacagacttgcactgaag

SEQ ID NO: 23114 - RNA, 21 nt, RNAi
cgacagacuugcacugaaguu

SEQ ID NO: 23115 - RNA, 21 nt, RNAi
uugcugucugaacgugacuuc

SEQ ID NO: 23116 - DNA, 21 bp, homo sapiens
tagaaacagagacaagaaagg

SEQ ID NO: 23117 - RNA, 21 nt, RNAi
gaaacagagacaagaaagguu

SEQ ID NO: 23118 - RNA, 21 nt, RNAi
uucuuugucucuguucuuucc

SEQ ID NO: 23119 - DNA, 21 bp, homo sapiens
taggagacagagccaagcact

SEQ ID NO: 23120 - RNA, 21 nt, RNAi
ggagacagagccaagcacuuu

SEQ ID NO: 23121 - RNA, 21 nt, RNAi
uuccucugucucgguucguga

SEQ ID NO: 23122 - DNA, 21 bp, homo sapiens
taggacctgcatccttcctgg

SEQ ID NO: 23123 - RNA, 21 nt, RNAi
ggaccugcauccuuccugguu

SEQ ID NO: 23124 - RNA, 21 nt, RNAi
uuccuggacguaggaaggacc

SEQ ID NO: 23125 - DNA, 21 bp, homo sapiens
tagctgctagtgaaatggctg

SEQ ID NO: 23126 - RNA, 21 nt, RNAi
gcugcuagugaaauggcuguu

SEQ ID NO: 23127 - RNA, 21 nt, RNAi
uucgacgaucacuuuaccgac

SEQ ID NO: 23128 - DNA, 21 bp, homo sapiens
taatttaaagatgctgtcggc

SEQ ID NO: 23129 - RNA, 21 nt, RNAi
auuuaaagaugcugucggcuu

SEQ ID NO: 23130 - RNA, 21 nt, RNAi
uuuaaauuucuacgacagccg

SEQ ID NO: 23131 - DNA, 21 bp, homo sapiens
taaagatgctgtcggcaccat

SEQ ID NO: 23132 - RNA, 21 nt, RNAi
aagaugcugucggcaccauuu

SEQ ID NO: 23133 - RNA, 21 nt, RNAi
uuuucuacgacagccguggua

SEQ ID NO: 23134 - DNA, 21 bp, homo sapiens
tatttatttccagtggtcatg

SEQ ID NO: 23135 - RNA, 21 nt, RNAi
uuuauuuccaguggucauguu

SEQ ID NO: 23136 - RNA, 21 nt, RNAi
uuaaauaaaggucaccaguac

SEQ ID NO: 23137 - DNA, 21 bp, homo sapiens
tatttccagtggtcatgctca

SEQ ID NO: 23138 - RNA, 21 nt, RNAi
uuuccaguggucaugcucauu

SEQ ID NO: 23139 - RNA, 21 nt, RNAi
uuaaaggucaccaguacgagu

SEQ ID NO: 23140 - DNA, 21 bp, homo sapiens
tattctgtgttaatggctaac

SEQ ID NO: 23141 - RNA, 21 nt, RNAi
uucuguguuaauggcuaacuu

SEQ ID NO: 23142 - RNA, 21 nt, RNAi
uuaagacacaauuaccgauug

SEQ ID NO: 23143 - DNA, 21 bp, homo sapiens
taatggctaacctgttacact

SEQ ID NO: 23144 - RNA, 21 nt, RNAi
auggcuaaccuguuacacuuu

SEQ ID NO: 23145 - RNA, 21 nt, RNAi
uuuaccgauuggacaauguga

SEQ ID NO: 23146 - DNA, 21 bp, homo sapiens
taaagaaacactcaatcatcc

SEQ ID NO: 23147 - RNA, 21 nt, RNAi
aagaaacacucaaucauccuu

SEQ ID NO: 23148 - RNA, 21 nt, RNAi
uuuucuuugugaguuaguagg

SEQ ID NO: 23149 - DNA, 21 bp, homo sapiens
gaaggcaccaaactggatgtg

SEQ ID NO: 23150 - RNA, 21 nt, RNAi
aggcaccaaacuggauguguu

SEQ ID NO: 23151 - RNA, 21 nt, RNAi
uuuccgugguuugaccuacac

SEQ ID NO: 23152 - DNA, 21 bp, homo sapiens
aaccgcgtgaagctggtgaac

SEQ ID NO: 23153 - RNA, 21 nt, RNAi
ccgcgugaagcuggugaacuu

SEQ ID NO: 23154 - RNA, 21 nt, RNAi
uuggcgcacuucgaccacuug

SEQ ID NO: 23155 - DNA, 21 bp, homo sapiens
aagaagctgagcaaggtggag

SEQ ID NO: 23156 - RNA, 21 nt, RNAi
gaagcugagcaagguggaguu

SEQ ID NO: 23157 - RNA, 21 nt, RNAi
uucuucgacucguuccaccuc

SEQ ID NO: 23158 - DNA, 21 bp, homo sapiens
aagctgagcaaggtggagacg

SEQ ID NO: 23159 - RNA, 21 nt, RNAi
gcugagcaagguggagacguu

SEQ ID NO: 23160 - RNA, 21 nt, RNAi
uucgacucguuccaccucugc

SEQ ID NO: 23161 - DNA, 21 bp, homo sapiens
aaggtggagacgctgcgctca

SEQ ID NO: 23162 - RNA, 21 nt, RNAi
gguggagacgcugcgcucauu

SEQ ID NO: 23163 - RNA, 21 nt, RNAi
uuccaccucugcgacgcgagu

SEQ ID NO: 23164 - DNA, 21 bp, homo sapiens
caaccgcgtgaagctggtgaa

SEQ ID NO: 23165 - RNA, 21 nt, RNAi
accgcgugaagcuggugaauu

SEQ ID NO: 23166 - RNA, 21 nt, RNAi
uuuggcgcacuucgaccacuu

SEQ ID NO: 23167 - DNA, 21 bp, homo sapiens
cagcaagaagctgagcaaggt

SEQ ID NO: 23168 - RNA, 21 nt, RNAi
gcaagaagcugagcaagguuu

SEQ ID NO: 23169 - RNA, 21 nt, RNAi
uucguucuucgacucguucca

SEQ ID NO: 23170 - DNA, 21 bp, homo sapiens
caagaagctgagcaaggtgga

SEQ ID NO: 23171 - RNA, 21 nt, RNAi
agaagcugagcaagguggauu

SEQ ID NO: 23172 - RNA, 21 nt, RNAi
uuucuucgacucguuccaccu

SEQ ID NO: 23173 - DNA, 21 bp, homo sapiens
gaagctgagcaaggtggagac

SEQ ID NO: 23174 - RNA, 21 nt, RNAi
agcugagcaagguggagacuu

SEQ ID NO: 23175 - RNA, 21 nt, RNAi
uuucgacucguuccaccucug

SEQ ID NO: 23176 - DNA, 21 bp, homo sapiens
gagcgcgagctactcgacttc

SEQ ID NO: 23177 - RNA, 21 nt, RNAi
gcgcgagcuacucgacuucuu

SEQ ID NO: 23178 - RNA, 21 nt, RNAi
uucgcgcucgaugagcugaag

SEQ ID NO: 23179 - DNA, 21 bp, homo sapiens
gagctactcgacttctccagc

SEQ ID NO: 23180 - RNA, 21 nt, RNAi
gcuacucgacuucuccagcuu

SEQ ID NO: 23181 - RNA, 21 nt, RNAi
uucgaugagcugaagaggucg

SEQ ID NO: 23182 - DNA, 21 bp, homo sapiens
tacagaatgtgatcgcgcgag

SEQ ID NO: 23183 - RNA, 21 nt, RNAi
cagaaugugaucgcgcgaguu

SEQ ID NO: 23184 - RNA, 21 nt, RNAi
uugucuuacacuagcgcgcuc

SEQ ID NO: 23185 - DNA, 21 bp, homo sapiens
tactcgacttctccagctggt

SEQ ID NO: 23186 - RNA, 21 nt, RNAi
cucgacuucuccagcugguuu

SEQ ID NO: 23187 - RNA, 21 nt, RNAi
uugagcugaagaggucgacca

SEQ ID NO: 23188 - DNA, 21 bp, homo sapiens
aaacaaagttgaagacatcac

SEQ ID NO: 23189 - RNA, 21 nt, RNAi
acaaaguugaagacaucacuu

SEQ ID NO: 23190 - RNA, 21 nt, RNAi
uuuguuucaacuucuguagug

SEQ ID NO: 23191 - DNA, 21 bp, homo sapiens
aacaaagttgaagacatcaca

SEQ ID NO: 23192 - RNA, 21 nt, RNAi
caaaguugaagacaucacauu

SEQ ID NO: 23193 - RNA, 21 nt, RNAi
uuguuucaacuucuguagugu

SEQ ID NO: 23194 - DNA, 21 bp, homo sapiens
aagttgaagacatcacaattc

SEQ ID NO: 23195 - RNA, 21 nt, RNAi
guugaagacaucacaauucuu

SEQ ID NO: 23196 - RNA, 21 nt, RNAi
uucaacuucuguaguguuaag

SEQ ID NO: 23197 - DNA, 21 bp, homo sapiens
aagacatcacaattcctggtt

SEQ ID NO: 23198 - RNA, 21 nt, RNAi
gacaucacaauuccugguuuu

SEQ ID NO: 23199 - RNA, 21 nt, RNAi
uucuguaguguuaaggaccaa

SEQ ID NO: 23200 - DNA, 21 bp, homo sapiens
aaaccagacacataccagtga

SEQ ID NO: 23201 - RNA, 21 nt, RNAi
accagacacauaccagugauu

SEQ ID NO: 23202 - RNA, 21 nt, RNAi
uuuggucuguguauggucacu

SEQ ID NO: 23203 - DNA, 21 bp, homo sapiens
aaccagacacataccagtgaa

SEQ ID NO: 23204 - RNA, 21 nt, RNAi
ccagacacauaccagugaauu

SEQ ID NO: 23205 - RNA, 21 nt, RNAi
uuggucuguguauggucacuu

SEQ ID NO: 23206 - DNA, 21 bp, homo sapiens
aaattgagagtccagaaacac

SEQ ID NO: 23207 - RNA, 21 nt, RNAi
auugagaguccagaaacacuu

SEQ ID NO: 23208 - RNA, 21 nt, RNAi
uuuaacucucaggucuuugug

SEQ ID NO: 23209 - DNA, 21 bp, homo sapiens
aattgagagtccagaaacaca

SEQ ID NO: 23210 - RNA, 21 nt, RNAi
uugagaguccagaaacacauu

SEQ ID NO: 23211 - RNA, 21 nt, RNAi
uuaacucucaggucuuugugu

SEQ ID NO: 23212 - DNA, 21 bp, homo sapiens
aaacacatcgaaacacatatg

SEQ ID NO: 23213 - RNA, 21 nt, RNAi
acacaucgaaacacauauguu

SEQ ID NO: 23214 - RNA, 21 nt, RNAi
uuuguguagcuuuguguauac

SEQ ID NO: 23215 - DNA, 21 bp, homo sapiens
aacacatcgaaacacatatgg

SEQ ID NO: 23216 - RNA, 21 nt, RNAi
cacaucgaaacacauaugguu

SEQ ID NO: 23217 - RNA, 21 nt, RNAi
uuguguagcuuuguguauacc

SEQ ID NO: 23218 - DNA, 21 bp, homo sapiens
aaacacatatggtcaagtaac

SEQ ID NO: 23219 - RNA, 21 nt, RNAi
acacauauggucaaguaacuu

SEQ ID NO: 23220 - RNA, 21 nt, RNAi
uuuguguauaccaguucauug

SEQ ID NO: 23221 - DNA, 21 bp, homo sapiens
aacacatatggtcaagtaact

SEQ ID NO: 23222 - RNA, 21 nt, RNAi
cacauauggucaaguaacuuu

SEQ ID NO: 23223 - RNA, 21 nt, RNAi
uuguguauaccaguucauuga

SEQ ID NO: 23224 - DNA, 21 bp, homo sapiens
aatggcatgaagaagacacaa

SEQ ID NO: 23225 - RNA, 21 nt, RNAi
uggcaugaagaagacacaauu

SEQ ID NO: 23226 - RNA, 21 nt, RNAi
uuaccguacuucuucuguguu

SEQ ID NO: 23227 - DNA, 21 bp, homo sapiens
aaatacctgatagaagaccag

SEQ ID NO: 23228 - RNA, 21 nt, RNAi
auaccugauagaagaccaguu

SEQ ID NO: 23229 - RNA, 21 nt, RNAi
uuuauggacuaucuucugguc

SEQ ID NO: 23230 - DNA, 21 bp, homo sapiens
aatacctgatagaagaccaga

SEQ ID NO: 23231 - RNA, 21 nt, RNAi
uaccugauagaagaccagauu

SEQ ID NO: 23232 - RNA, 21 nt, RNAi
uuauggacuaucuucuggucu

SEQ ID NO: 23233 - DNA, 21 bp, homo sapiens
aagaccagaaacaagagacta

SEQ ID NO: 23234 - RNA, 21 nt, RNAi
gaccagaaacaagagacuauu

SEQ ID NO: 23235 - RNA, 21 nt, RNAi
uucuggucuuuguucucugau

SEQ ID NO: 23236 - DNA, 21 bp, homo sapiens
aaacaaagcacaaaccaatgt

SEQ ID NO: 23237 - RNA, 21 nt, RNAi
acaaagcacaaaccaauguuu

SEQ ID NO: 23238 - RNA, 21 nt, RNAi
uuuguuucguguuugguuaca

SEQ ID NO: 23239 - DNA, 21 bp, homo sapiens
aacaaagcacaaaccaatgtt

SEQ ID NO: 23240 - RNA, 21 nt, RNAi
caaagcacaaaccaauguuuu

SEQ ID NO: 23241 - RNA, 21 nt, RNAi
uuguuucguguuugguuacaa

SEQ ID NO: 23242 - DNA, 21 bp, homo sapiens
aagtggagatttcctggagca

SEQ ID NO: 23243 - RNA, 21 nt, RNAi
guggagauuuccuggagcauu

SEQ ID NO: 23244 - RNA, 21 nt, RNAi
uucaccucuaaaggaccucgu

SEQ ID NO: 23245 - DNA, 21 bp, homo sapiens
aaggatggaggctcattactc

SEQ ID NO: 23246 - RNA, 21 nt, RNAi
ggauggaggcucauuacucuu

SEQ ID NO: 23247 - RNA, 21 nt, RNAi
uuccuaccuccgaguaaugag

SEQ ID NO: 23248 - DNA, 21 bp, homo sapiens
aaagtggagagaaatacctag

SEQ ID NO: 23249 - RNA, 21 nt, RNAi
aguggagagaaauaccuaguu

SEQ ID NO: 23250 - RNA, 21 nt, RNAi
uuucaccucucuuuauggauc

SEQ ID NO: 23251 - DNA, 21 bp, homo sapiens
aagtggagagaaatacctagt

SEQ ID NO: 23252 - RNA, 21 nt, RNAi
guggagagaaauaccuaguuu

SEQ ID NO: 23253 - RNA, 21 nt, RNAi
uucaccucucuuuauggauca

SEQ ID NO: 23254 - DNA, 21 bp, homo sapiens
aaggtcattatcttctccaca

SEQ ID NO: 23255 - RNA, 21 nt, RNAi
ggucauuaucuucuccacauu

SEQ ID NO: 23256 - RNA, 21 nt, RNAi
uuccaguaauagaagaggugu

SEQ ID NO: 23257 - DNA, 21 bp, homo sapiens
aatctcaaagcctccttcatg

SEQ ID NO: 23258 - RNA, 21 nt, RNAi
ucucaaagccuccuucauguu

SEQ ID NO: 23259 - RNA, 21 nt, RNAi
uuagaguuucggaggaaguac

SEQ ID NO: 23260 - DNA, 21 bp, homo sapiens
aatcctgcaatgaattaactc

SEQ ID NO: 23261 - RNA, 21 nt, RNAi
uccugcaaugaauuaacucuu

SEQ ID NO: 23262 - RNA, 21 nt, RNAi
uuaggacguuacuuaauugag

SEQ ID NO: 23263 - DNA, 21 bp, homo sapiens
aattaactctctactctagcg

SEQ ID NO: 23264 - RNA, 21 nt, RNAi
uuaacucucuacucuagcguu

SEQ ID NO: 23265 - RNA, 21 nt, RNAi
uuaauugagagaugagaucgc

SEQ ID NO: 23266 - DNA, 21 bp, homo sapiens
aaggtctacacctccagagag

SEQ ID NO: 23267 - RNA, 21 nt, RNAi
ggucuacaccuccagagaguu

SEQ ID NO: 23268 - RNA, 21 nt, RNAi
uuccagauguggaggucucuc

SEQ ID NO: 23269 - DNA, 21 bp, homo sapiens
aaataagaggcatttgattcc

SEQ ID NO: 23270 - RNA, 21 nt, RNAi
auaagaggcauuugauuccuu

SEQ ID NO: 23271 - RNA, 21 nt, RNAi
uuuauucuccguaaacuaagg

SEQ ID NO: 23272 - DNA, 21 bp, homo sapiens
aataagaggcatttgattcct

SEQ ID NO: 23273 - RNA, 21 nt, RNAi
uaagaggcauuugauuccuuu

SEQ ID NO: 23274 - RNA, 21 nt, RNAi
uuauucuccguaaacuaagga

SEQ ID NO: 23275 - DNA, 21 bp, homo sapiens
aagaggcatttgattcctgaa

SEQ ID NO: 23276 - RNA, 21 nt, RNAi
gaggcauuugauuccugaauu

SEQ ID NO: 23277 - RNA, 21 nt, RNAi
uucuccguaaacuaaggacuu

SEQ ID NO: 23278 - DNA, 21 bp, homo sapiens
aacaagtaaatattccagcag

SEQ ID NO: 23279 - RNA, 21 nt, RNAi
caaguaaauauuccagcaguu

SEQ ID NO: 23280 - RNA, 21 nt, RNAi
uuguucauuuauaaggucguc

SEQ ID NO: 23281 - DNA, 21 bp, homo sapiens
aagtaaatattccagcagatg

SEQ ID NO: 23282 - RNA, 21 nt, RNAi
guaaauauuccagcagauguu

SEQ ID NO: 23283 - RNA, 21 nt, RNAi
uucauuuauaaggucgucuac

SEQ ID NO: 23284 - DNA, 21 bp, homo sapiens
aaatattccagcagatggaaa

SEQ ID NO: 23285 - RNA, 21 nt, RNAi
auauuccagcagauggaaauu

SEQ ID NO: 23286 - RNA, 21 nt, RNAi
uuuauaaggucgucuaccuuu

SEQ ID NO: 23287 - DNA, 21 bp, homo sapiens
aaacaggacaatgtaacactg

SEQ ID NO: 23288 - RNA, 21 nt, RNAi
acaggacaauguaacacuguu

SEQ ID NO: 23289 - RNA, 21 nt, RNAi
uuuguccuguuacauugugac

SEQ ID NO: 23290 - DNA, 21 bp, homo sapiens
aacaggacaatgtaacactgt

SEQ ID NO: 23291 - RNA, 21 nt, RNAi
caggacaauguaacacuguuu

SEQ ID NO: 23292 - RNA, 21 nt, RNAi
uuguccuguuacauugugaca

SEQ ID NO: 23293 - DNA, 21 bp, homo sapiens
aacactgttcttatcatcact

SEQ ID NO: 23294 - RNA, 21 nt, RNAi
cacuguucuuaucaucacuuu

SEQ ID NO: 23295 - RNA, 21 nt, RNAi
uugugacaagaauaguaguga

SEQ ID NO: 23296 - DNA, 21 bp, homo sapiens
aacagacactcaataaacagc

SEQ ID NO: 23297 - RNA, 21 nt, RNAi
cagacacucaauaaacagcuu

SEQ ID NO: 23298 - RNA, 21 nt, RNAi
uugucugugaguuauuugucg

SEQ ID NO: 23299 - DNA, 21 bp, homo sapiens
aataaacagcctcacactaca

SEQ ID NO: 23300 - RNA, 21 nt, RNAi
uaaacagccucacacuacauu

SEQ ID NO: 23301 - RNA, 21 nt, RNAi
uuauuugucggagugugaugu

SEQ ID NO: 23302 - DNA, 21 bp, homo sapiens
aaacagcctcacactacaatg

SEQ ID NO: 23303 - RNA, 21 nt, RNAi
acagccucacacuacaauguu

SEQ ID NO: 23304 - RNA, 21 nt, RNAi
uuugucggagugugauguuac

SEQ ID NO: 23305 - DNA, 21 bp, homo sapiens
aacagcctcacactacaatga

SEQ ID NO: 23306 - RNA, 21 nt, RNAi
cagccucacacuacaaugauu

SEQ ID NO: 23307 - RNA, 21 nt, RNAi
uugucggagugugauguuacu

SEQ ID NO: 23308 - DNA, 21 bp, homo sapiens
aatgaagcttggagaacaaag

SEQ ID NO: 23309 - RNA, 21 nt, RNAi
ugaagcuuggagaacaaaguu

SEQ ID NO: 23310 - RNA, 21 nt, RNAi
uuacuucgaaccucuuguuuc

SEQ ID NO: 23311 - DNA, 21 bp, homo sapiens
aagcttggagaacaaaggagc

SEQ ID NO: 23312 - RNA, 21 nt, RNAi
gcuuggagaacaaaggagcuu

SEQ ID NO: 23313 - RNA, 21 nt, RNAi
uucgaaccucuuguuuccucg

SEQ ID NO: 23314 - DNA, 21 bp, homo sapiens
aagcagacctataaatccagg

SEQ ID NO: 23315 - RNA, 21 nt, RNAi
gcagaccuauaaauccagguu

SEQ ID NO: 23316 - RNA, 21 nt, RNAi
uucgucuggauauuuaggucc

SEQ ID NO: 23317 - DNA, 21 bp, homo sapiens
aaatccaggctggctcctcac

SEQ ID NO: 23318 - RNA, 21 nt, RNAi
auccaggcuggcuccucacuu

SEQ ID NO: 23319 - RNA, 21 nt, RNAi
uuuagguccgaccgaggagug

SEQ ID NO: 23320 - DNA, 21 bp, homo sapiens
aatccaggctggctcctcact

SEQ ID NO: 23321 - RNA, 21 nt, RNAi
uccaggcuggcuccucacuuu

SEQ ID NO: 23322 - RNA, 21 nt, RNAi
uuagguccgaccgaggaguga

SEQ ID NO: 23323 - DNA, 21 bp, homo sapiens
aaggctgagccactccaagct

SEQ ID NO: 23324 - RNA, 21 nt, RNAi
ggcugagccacuccaagcuuu

SEQ ID NO: 23325 - RNA, 21 nt, RNAi
uuccgacucggugagguucga

SEQ ID NO: 23326 - DNA, 21 bp, homo sapiens
aagctgaggatgatccactgc

SEQ ID NO: 23327 - RNA, 21 nt, RNAi
gcugaggaugauccacugcuu

SEQ ID NO: 23328 - RNA, 21 nt, RNAi
uucgacuccuacuaggugacg

SEQ ID NO: 23329 - DNA, 21 bp, homo sapiens
aaagcttatgaggctgatgcc

SEQ ID NO: 23330 - RNA, 21 nt, RNAi
agcuuaugaggcugaugccuu

SEQ ID NO: 23331 - RNA, 21 nt, RNAi
uuucgaauacuccgacuacgg

SEQ ID NO: 23332 - DNA, 21 bp, homo sapiens
aaatgaccaggactttgccgt

SEQ ID NO: 23333 - RNA, 21 nt, RNAi
augaccaggacuuugccguuu

SEQ ID NO: 23334 - RNA, 21 nt, RNAi
uuuacugguccugaaacggca

SEQ ID NO: 23335 - DNA, 21 bp, homo sapiens
aatgaccaggactttgccgtc

SEQ ID NO: 23336 - RNA, 21 nt, RNAi
ugaccaggacuuugccgucuu

SEQ ID NO: 23337 - RNA, 21 nt, RNAi
uuacugguccugaaacggcag

SEQ ID NO: 23338 - DNA, 21 bp, homo sapiens
aagctcaagtcttagagcttt

SEQ ID NO: 23339 - RNA, 21 nt, RNAi
gcucaagucuuagagcuuuuu

SEQ ID NO: 23340 - RNA, 21 nt, RNAi
uucgaguucagaaucucgaaa

SEQ ID NO: 23341 - DNA, 21 bp, homo sapiens
aagagacaccagcattgcaga

SEQ ID NO: 23342 - RNA, 21 nt, RNAi
gagacaccagcauugcagauu

SEQ ID NO: 23343 - RNA, 21 nt, RNAi
uucucuguggucguaacgucu

SEQ ID NO: 23344 - DNA, 21 bp, homo sapiens
aaaccaagcacttctagaatt

SEQ ID NO: 23345 - RNA, 21 nt, RNAi
accaagcacuucuagaauuuu

SEQ ID NO: 23346 - RNA, 21 nt, RNAi
uuugguucgugaagaucuuaa

SEQ ID NO: 23347 - DNA, 21 bp, homo sapiens
aaccaagcacttctagaatta

SEQ ID NO: 23348 - RNA, 21 nt, RNAi
ccaagcacuucuagaauuauu

SEQ ID NO: 23349 - RNA, 21 nt, RNAi
uugguucgugaagaucuuaau

SEQ ID NO: 23350 - DNA, 21 bp, homo sapiens
aagcacttctagaattagatc

SEQ ID NO: 23351 - RNA, 21 nt, RNAi
gcacuucuagaauuagaucuu

SEQ ID NO: 23352 - RNA, 21 nt, RNAi
uucgugaagaucuuaaucuag

SEQ ID NO: 23353 - DNA, 21 bp, homo sapiens
aattagatccaacagctggct

SEQ ID NO: 23354 - RNA, 21 nt, RNAi
uuagauccaacagcuggcuuu

SEQ ID NO: 23355 - RNA, 21 nt, RNAi
uuaaucuagguugucgaccga

SEQ ID NO: 23356 - DNA, 21 bp, homo sapiens
aacagctggctctttctctta

SEQ ID NO: 23357 - RNA, 21 nt, RNAi
cagcuggcucuuucucuuauu

SEQ ID NO: 23358 - RNA, 21 nt, RNAi
uugucgaccgagaaagagaau

SEQ ID NO: 23359 - DNA, 21 bp, homo sapiens
aaggaagaatcagtgatattc

SEQ ID NO: 23360 - RNA, 21 nt, RNAi
ggaagaaucagugauauucuu

SEQ ID NO: 23361 - RNA, 21 nt, RNAi
uuccuucuuagucacuauaag

SEQ ID NO: 23362 - DNA, 21 bp, homo sapiens
aagaatcagtgatattcaagg

SEQ ID NO: 23363 - RNA, 21 nt, RNAi
gaaucagugauauucaagguu

SEQ ID NO: 23364 - RNA, 21 nt, RNAi
uucuuagucacuauaaguucc

SEQ ID NO: 23365 - DNA, 21 bp, homo sapiens
aatcagtgatattcaaggcat

SEQ ID NO: 23366 - RNA, 21 nt, RNAi
ucagugauauucaaggcauuu

SEQ ID NO: 23367 - RNA, 21 nt, RNAi
uuagucacuauaaguuccgua

SEQ ID NO: 23368 - DNA, 21 bp, homo sapiens
aaatgtattgaggagtctcta

SEQ ID NO: 23369 - RNA, 21 nt, RNAi
auguauugaggagucucuauu

SEQ ID NO: 23370 - RNA, 21 nt, RNAi
uuuacauaacuccucagagau

SEQ ID NO: 23371 - DNA, 21 bp, homo sapiens
aatgtattgaggagtctctac

SEQ ID NO: 23372 - RNA, 21 nt, RNAi
uguauugaggagucucuacuu

SEQ ID NO: 23373 - RNA, 21 nt, RNAi
uuacauaacuccucagagaug

SEQ ID NO: 23374 - DNA, 21 bp, homo sapiens
aagtcactaggattacaggca

SEQ ID NO: 23375 - RNA, 21 nt, RNAi
gucacuaggauuacaggcauu

SEQ ID NO: 23376 - RNA, 21 nt, RNAi
uucagugauccuaauguccgu

SEQ ID NO: 23377 - DNA, 21 bp, homo sapiens
aactcctgaccttgtgataaa

SEQ ID NO: 23378 - RNA, 21 nt, RNAi
cuccugaccuugugauaaauu

SEQ ID NO: 23379 - RNA, 21 nt, RNAi
uugaggacuggaacacuauuu

SEQ ID NO: 23380 - DNA, 21 bp, homo sapiens
aagccaccacatccagctgct

SEQ ID NO: 23381 - RNA, 21 nt, RNAi
gccaccacauccagcugcuuu

SEQ ID NO: 23382 - RNA, 21 nt, RNAi
uucggugguguaggucgacga

SEQ ID NO: 23383 - DNA, 21 bp, homo sapiens
aaccgttggaaactggagaca

SEQ ID NO: 23384 - RNA, 21 nt, RNAi
ccguuggaaacuggagacauu

SEQ ID NO: 23385 - RNA, 21 nt, RNAi
uuggcaaccuuugaccucugu

SEQ ID NO: 23386 - DNA, 21 bp, homo sapiens
aaactggagacagtcatatgg

SEQ ID NO: 23387 - RNA, 21 nt, RNAi
acuggagacagucauaugguu

SEQ ID NO: 23388 - RNA, 21 nt, RNAi
uuugaccucugucaguauacc

SEQ ID NO: 23389 - DNA, 21 bp, homo sapiens
aaggagcagataagtacagca

SEQ ID NO: 23390 - RNA, 21 nt, RNAi
ggagcagauaaguacagcauu

SEQ ID NO: 23391 - RNA, 21 nt, RNAi
uuccucgucuauucaugucgu

SEQ ID NO: 23392 - DNA, 21 bp, homo sapiens
aagtacagcatatcagaatgg

SEQ ID NO: 23393 - RNA, 21 nt, RNAi
guacagcauaucagaaugguu

SEQ ID NO: 23394 - RNA, 21 nt, RNAi
uucaugucguauagucuuacc

SEQ ID NO: 23395 - DNA, 21 bp, homo sapiens
aatcctgtgtgtgaccaacac

SEQ ID NO: 23396 - RNA, 21 nt, RNAi
uccugugugugaccaacacuu

SEQ ID NO: 23397 - RNA, 21 nt, RNAi
uuaggacacacacugguugug

SEQ ID NO: 23398 - DNA, 21 bp, homo sapiens
aacactgctctgcgtatttat

SEQ ID NO: 23399 - RNA, 21 nt, RNAi
cacugcucugcguauuuauuu

SEQ ID NO: 23400 - RNA, 21 nt, RNAi
uugugacgagacgcauaaaua

SEQ ID NO: 23401 - DNA, 21 bp, homo sapiens
aatgcagccagcattacatgt

SEQ ID NO: 23402 - RNA, 21 nt, RNAi
ugcagccagcauuacauguuu

SEQ ID NO: 23403 - RNA, 21 nt, RNAi
uuacgucggucguaauguaca

SEQ ID NO: 23404 - DNA, 21 bp, homo sapiens
aagcatgcaacttcctgaaga

SEQ ID NO: 23405 - RNA, 21 nt, RNAi
gcaugcaacuuccugaagauu

SEQ ID NO: 23406 - RNA, 21 nt, RNAi
uucguacguugaaggacuucu

SEQ ID NO: 23407 - DNA, 21 bp, homo sapiens
aacttcctgaagattctcttt

SEQ ID NO: 23408 - RNA, 21 nt, RNAi
cuuccugaagauucucuuuuu

SEQ ID NO: 23409 - RNA, 21 nt, RNAi
uugaaggacuucuaagagaaa

SEQ ID NO: 23410 - DNA, 21 bp, homo sapiens
aatttctgatgctctctctct

SEQ ID NO: 23411 - RNA, 21 nt, RNAi
uuucugaugcucucucucuuu

SEQ ID NO: 23412 - RNA, 21 nt, RNAi
uuaaagacuacgagagagaga

SEQ ID NO: 23413 - DNA, 21 bp, homo sapiens
aaggtcctgttattcaacaga

SEQ ID NO: 23414 - RNA, 21 nt, RNAi
gguccuguuauucaacagauu

SEQ ID NO: 23415 - RNA, 21 nt, RNAi
uuccaggacaauaaguugucu

SEQ ID NO: 23416 - DNA, 21 bp, homo sapiens
aaccacagattctgctgcctc

SEQ ID NO: 23417 - RNA, 21 nt, RNAi
ccacagauucugcugccucuu

SEQ ID NO: 23418 - RNA, 21 nt, RNAi
uuggugucuaagacgacggag

SEQ ID NO: 23419 - DNA, 21 bp, homo sapiens
aaggaaactgtcgtgtgtcct

SEQ ID NO: 23420 - RNA, 21 nt, RNAi
ggaaacugucguguguccuuu

SEQ ID NO: 23421 - RNA, 21 nt, RNAi
uuccuuugacagcacacagga

SEQ ID NO: 23422 - DNA, 21 bp, homo sapiens
aaactgtcgtgtgtcctatac

SEQ ID NO: 23423 - RNA, 21 nt, RNAi
acugucguguguccuauacuu

SEQ ID NO: 23424 - RNA, 21 nt, RNAi
uuugacagcacacaggauaug

SEQ ID NO: 23425 - DNA, 21 bp, homo sapiens
aactgtcgtgtgtcctataca

SEQ ID NO: 23426 - RNA, 21 nt, RNAi
cugucguguguccuauacauu

SEQ ID NO: 23427 - RNA, 21 nt, RNAi
uugacagcacacaggauaugu

SEQ ID NO: 23428 - DNA, 21 bp, homo sapiens
aactttgtttcctcatctcaa

SEQ ID NO: 23429 - RNA, 21 nt, RNAi
cuuuguuuccucaucucaauu

SEQ ID NO: 23430 - RNA, 21 nt, RNAi
uugaaacaaaggaguagaguu

SEQ ID NO: 23431 - DNA, 21 bp, homo sapiens
aaataaagtcctttcagcaag

SEQ ID NO: 23432 - RNA, 21 nt, RNAi
auaaaguccuuucagcaaguu

SEQ ID NO: 23433 - RNA, 21 nt, RNAi
uuuauuucaggaaagucguuc

SEQ ID NO: 23434 - DNA, 21 bp, homo sapiens
aataaagtcctttcagcaagt

SEQ ID NO: 23435 - RNA, 21 nt, RNAi
uaaaguccuuucagcaaguuu

SEQ ID NO: 23436 - RNA, 21 nt, RNAi
uuauuucaggaaagucguuca

SEQ ID NO: 23437 - DNA, 21 bp, homo sapiens
aaagtcctttcagcaagttct

SEQ ID NO: 23438 - RNA, 21 nt, RNAi
aguccuuucagcaaguucuuu

SEQ ID NO: 23439 - RNA, 21 nt, RNAi
uuucaggaaagucguucaaga

SEQ ID NO: 23440 - DNA, 21 bp, homo sapiens
aagtcctttcagcaagttctt

SEQ ID NO: 23441 - RNA, 21 nt, RNAi
guccuuucagcaaguucuuuu

SEQ ID NO: 23442 - RNA, 21 nt, RNAi
uucaggaaagucguucaagaa

SEQ ID NO: 23443 - DNA, 21 bp, homo sapiens
aattcaggattcttcagatgc

SEQ ID NO: 23444 - RNA, 21 nt, RNAi
uucaggauucuucagaugcuu

SEQ ID NO: 23445 - RNA, 21 nt, RNAi
uuaaguccuaagaagucuacg

SEQ ID NO: 23446 - DNA, 21 bp, homo sapiens
aagtcgtatctcagaacacta

SEQ ID NO: 23447 - RNA, 21 nt, RNAi
gucguaucucagaacacuauu

SEQ ID NO: 23448 - RNA, 21 nt, RNAi
uucagcauagagucuugugau

SEQ ID NO: 23449 - DNA, 21 bp, homo sapiens
aacactagctcttcgaaagag

SEQ ID NO: 23450 - RNA, 21 nt, RNAi
cacuagcucuucgaaagaguu

SEQ ID NO: 23451 - RNA, 21 nt, RNAi
uugugaucgagaagcuuucuc

SEQ ID NO: 23452 - DNA, 21 bp, homo sapiens
aagtggtagagaggatgttga

SEQ ID NO: 23453 - RNA, 21 nt, RNAi
gugguagagaggauguugauu

SEQ ID NO: 23454 - RNA, 21 nt, RNAi
uucaccaucucuccuacaacu

SEQ ID NO: 23455 - DNA, 21 bp, homo sapiens
aatcttggctcactgaaacct

SEQ ID NO: 23456 - RNA, 21 nt, RNAi
ucuuggcucacugaaaccuuu

SEQ ID NO: 23457 - RNA, 21 nt, RNAi
uuagaaccgagugacuuugga

SEQ ID NO: 23458 - DNA, 21 bp, homo sapiens
aagtgattctcctgcctcagc

SEQ ID NO: 23459 - RNA, 21 nt, RNAi
gugauucuccugccucagcuu

SEQ ID NO: 23460 - RNA, 21 nt, RNAi
uucacuaagaggacggagucg

SEQ ID NO: 23461 - DNA, 21 bp, homo sapiens
catggcattctttacagaaat

SEQ ID NO: 23462 - RNA, 21 nt, RNAi
uggcauucuuuacagaaauuu

SEQ ID NO: 23463 - RNA, 21 nt, RNAi
uuaccguaagaaaugucuuua

SEQ ID NO: 23464 - DNA, 21 bp, homo sapiens
caaagttgaagacatcacaat

SEQ ID NO: 23465 - RNA, 21 nt, RNAi
aaguugaagacaucacaauuu

SEQ ID NO: 23466 - RNA, 21 nt, RNAi
uuuucaacuucuguaguguua

SEQ ID NO: 23467 - DNA, 21 bp, homo sapiens
cagacacataccagtgaaata

SEQ ID NO: 23468 - RNA, 21 nt, RNAi
gacacauaccagugaaauauu

SEQ ID NO: 23469 - RNA, 21 nt, RNAi
uucuguguauggucacuuuau

SEQ ID NO: 23470 - DNA, 21 bp, homo sapiens
cagaaacacatcgaaacacat

SEQ ID NO: 23471 - RNA, 21 nt, RNAi
gaaacacaucgaaacacauuu

SEQ ID NO: 23472 - RNA, 21 nt, RNAi
uucuuuguguagcuuugugua

SEQ ID NO: 23473 - DNA, 21 bp, homo sapiens
cacatcgaaacacatatggtc

SEQ ID NO: 23474 - RNA, 21 nt, RNAi
caucgaaacacauauggucuu

SEQ ID NO: 23475 - RNA, 21 nt, RNAi
uuguagcuuuguguauaccag

SEQ ID NO: 23476 - DNA, 21 bp, homo sapiens
catcgaaacacatatggtcaa

SEQ ID NO: 23477 - RNA, 21 nt, RNAi
ucgaaacacauauggucaauu

SEQ ID NO: 23478 - RNA, 21 nt, RNAi
uuagcuuuguguauaccaguu

SEQ ID NO: 23479 - DNA, 21 bp, homo sapiens
cacatatggtcaagtaacttt

SEQ ID NO: 23480 - RNA, 21 nt, RNAi
cauauggucaaguaacuuuuu

SEQ ID NO: 23481 - RNA, 21 nt, RNAi
uuguauaccaguucauugaaa

SEQ ID NO: 23482 - DNA, 21 bp, homo sapiens
caatggcatgaagaagacaca

SEQ ID NO: 23483 - RNA, 21 nt, RNAi
auggcaugaagaagacacauu

SEQ ID NO: 23484 - RNA, 21 nt, RNAi
uuuaccguacuucuucugugu

SEQ ID NO: 23485 - DNA, 21 bp, homo sapiens
caggagagtctcttcaataaa

SEQ ID NO: 23486 - RNA, 21 nt, RNAi
ggagagucucuucaauaaauu

SEQ ID NO: 23487 - RNA, 21 nt, RNAi
uuccucucagagaaguuauuu

SEQ ID NO: 23488 - DNA, 21 bp, homo sapiens
cagaaacaagagactatgaaa

SEQ ID NO: 23489 - RNA, 21 nt, RNAi
gaaacaagagacuaugaaauu

SEQ ID NO: 23490 - RNA, 21 nt, RNAi
uucuuuguucucugauacuuu

SEQ ID NO: 23491 - DNA, 21 bp, homo sapiens
caaagcacaaaccaatgttta

SEQ ID NO: 23492 - RNA, 21 nt, RNAi
aagcacaaaccaauguuuauu

SEQ ID NO: 23493 - RNA, 21 nt, RNAi
uuuucguguuugguuacaaau

SEQ ID NO: 23494 - DNA, 21 bp, homo sapiens
caaggatggaggctcattact

SEQ ID NO: 23495 - RNA, 21 nt, RNAi
aggauggaggcucauuacuuu

SEQ ID NO: 23496 - RNA, 21 nt, RNAi
uuuccuaccuccgaguaauga

SEQ ID NO: 23497 - DNA, 21 bp, homo sapiens
caaagtggagagaaataccta

SEQ ID NO: 23498 - RNA, 21 nt, RNAi
aaguggagagaaauaccuauu

SEQ ID NO: 23499 - RNA, 21 nt, RNAi
uuuucaccucucuuuauggau

SEQ ID NO: 23500 - DNA, 21 bp, homo sapiens
cattatcttctccacactgtg

SEQ ID NO: 23501 - RNA, 21 nt, RNAi
uuaucuucuccacacuguguu

SEQ ID NO: 23502 - RNA, 21 nt, RNAi
uuaauagaagaggugugacac

SEQ ID NO: 23503 - DNA, 21 bp, homo sapiens
cataatctcaaagcctccttc

SEQ ID NO: 23504 - RNA, 21 nt, RNAi
uaaucucaaagccuccuucuu

SEQ ID NO: 23505 - RNA, 21 nt, RNAi
uuauuagaguuucggaggaag

SEQ ID NO: 23506 - DNA, 21 bp, homo sapiens
caatgaattaactctctactc

SEQ ID NO: 23507 - RNA, 21 nt, RNAi
augaauuaacucucuacucuu

SEQ ID NO: 23508 - RNA, 21 nt, RNAi
uuuacuuaauugagagaugag

SEQ ID NO: 23509 - DNA, 21 bp, homo sapiens
cagctctggcctcaaggtcta

SEQ ID NO: 23510 - RNA, 21 nt, RNAi
gcucuggccucaaggucuauu

SEQ ID NO: 23511 - RNA, 21 nt, RNAi
uucgagaccggaguuccagau

SEQ ID NO: 23512 - DNA, 21 bp, homo sapiens
caaggtctacacctccagaga

SEQ ID NO: 23513 - RNA, 21 nt, RNAi
aggucuacaccuccagagauu

SEQ ID NO: 23514 - RNA, 21 nt, RNAi
uuuccagauguggaggucucu

SEQ ID NO: 23515 - DNA, 21 bp, homo sapiens
caagtaaatattccagcagat

SEQ ID NO: 23516 - RNA, 21 nt, RNAi
aguaaauauuccagcagauuu

SEQ ID NO: 23517 - RNA, 21 nt, RNAi
uuucauuuauaaggucgucua

SEQ ID NO: 23518 - DNA, 21 bp, homo sapiens
caggacaatgtaacactgttc

SEQ ID NO: 23519 - RNA, 21 nt, RNAi
ggacaauguaacacuguucuu

SEQ ID NO: 23520 - RNA, 21 nt, RNAi
uuccuguuacauugugacaag

SEQ ID NO: 23521 - DNA, 21 bp, homo sapiens
caatgtaacactgttcttatc

SEQ ID NO: 23522 - RNA, 21 nt, RNAi
auguaacacuguucuuaucuu

SEQ ID NO: 23523 - RNA, 21 nt, RNAi
uuuacauugugacaagaauag

SEQ ID NO: 23524 - DNA, 21 bp, homo sapiens
cactgttcttatcatcactat

SEQ ID NO: 23525 - RNA, 21 nt, RNAi
cuguucuuaucaucacuauuu

SEQ ID NO: 23526 - RNA, 21 nt, RNAi
uugacaagaauaguagugaua

SEQ ID NO: 23527 - DNA, 21 bp, homo sapiens
cagaacagacactcaataaac

SEQ ID NO: 23528 - RNA, 21 nt, RNAi
gaacagacacucaauaaacuu

SEQ ID NO: 23529 - RNA, 21 nt, RNAi
uucuugucugugaguuauuug

SEQ ID NO: 23530 - DNA, 21 bp, homo sapiens
cagacactcaataaacagcct

SEQ ID NO: 23531 - RNA, 21 nt, RNAi
gacacucaauaaacagccuuu

SEQ ID NO: 23532 - RNA, 21 nt, RNAi
uucugugaguuauuugucgga

SEQ ID NO: 23533 - DNA, 21 bp, homo sapiens
cactcaataaacagcctcaca

SEQ ID NO: 23534 - RNA, 21 nt, RNAi
cucaauaaacagccucacauu

SEQ ID NO: 23535 - RNA, 21 nt, RNAi
uugaguuauuugucggagugu

SEQ ID NO: 23536 - DNA, 21 bp, homo sapiens
caataaacagcctcacactac

SEQ ID NO: 23537 - RNA, 21 nt, RNAi
auaaacagccucacacuacuu

SEQ ID NO: 23538 - RNA, 21 nt, RNAi
uuuauuugucggagugugaug

SEQ ID NO: 23539 - DNA, 21 bp, homo sapiens
cagcctcacactacaatgaag

SEQ ID NO: 23540 - RNA, 21 nt, RNAi
gccucacacuacaaugaaguu

SEQ ID NO: 23541 - RNA, 21 nt, RNAi
uucggagugugauguuacuuc

SEQ ID NO: 23542 - DNA, 21 bp, homo sapiens
cacactacaatgaagcttgga

SEQ ID NO: 23543 - RNA, 21 nt, RNAi
cacuacaaugaagcuuggauu

SEQ ID NO: 23544 - RNA, 21 nt, RNAi
uugugauguuacuucgaaccu

SEQ ID NO: 23545 - DNA, 21 bp, homo sapiens
cactacaatgaagcttggaga

SEQ ID NO: 23546 - RNA, 21 nt, RNAi
cuacaaugaagcuuggagauu

SEQ ID NO: 23547 - RNA, 21 nt, RNAi
uugauguuacuucgaaccucu

SEQ ID NO: 23548 - DNA, 21 bp, homo sapiens
caatgaagcttggagaacaaa

SEQ ID NO: 23549 - RNA, 21 nt, RNAi
augaagcuuggagaacaaauu

SEQ ID NO: 23550 - RNA, 21 nt, RNAi
uuuacuucgaaccucuuguuu

SEQ ID NO: 23551 - DNA, 21 bp, homo sapiens
caagcagacctataaatccag

SEQ ID NO: 23552 - RNA, 21 nt, RNAi
agcagaccuauaaauccaguu

SEQ ID NO: 23553 - RNA, 21 nt, RNAi
uuucgucuggauauuuagguc

SEQ ID NO: 23554 - DNA, 21 bp, homo sapiens
cagacctataaatccaggctg

SEQ ID NO: 23555 - RNA, 21 nt, RNAi
gaccuauaaauccaggcuguu

SEQ ID NO: 23556 - RNA, 21 nt, RNAi
uucuggauauuuagguccgac

SEQ ID NO: 23557 - DNA, 21 bp, homo sapiens
cacacatctgctcctgctctc

SEQ ID NO: 23558 - RNA, 21 nt, RNAi
cacaucugcuccugcucucuu

SEQ ID NO: 23559 - RNA, 21 nt, RNAi
uuguguagacgaggacgagag

SEQ ID NO: 23560 - DNA, 21 bp, homo sapiens
cacatctgctcctgctctctc

SEQ ID NO: 23561 - RNA, 21 nt, RNAi
caucugcuccugcucucucuu

SEQ ID NO: 23562 - RNA, 21 nt, RNAi
uuguagacgaggacgagagag

SEQ ID NO: 23563 - DNA, 21 bp, homo sapiens
catctgctcctgctctctctc

SEQ ID NO: 23564 - RNA, 21 nt, RNAi
ucugcuccugcucucucucuu

SEQ ID NO: 23565 - RNA, 21 nt, RNAi
uuagacgaggacgagagagag

SEQ ID NO: 23566 - DNA, 21 bp, homo sapiens
caccatcctcactgctgttct

SEQ ID NO: 23567 - RNA, 21 nt, RNAi
ccauccucacugcuguucuuu

SEQ ID NO: 23568 - RNA, 21 nt, RNAi
uugguaggagugacgacaaga

SEQ ID NO: 23569 - DNA, 21 bp, homo sapiens
catcctcactgctgttctcct

SEQ ID NO: 23570 - RNA, 21 nt, RNAi
uccucacugcuguucuccuuu

SEQ ID NO: 23571 - RNA, 21 nt, RNAi
uuaggagugacgacaagagga

SEQ ID NO: 23572 - DNA, 21 bp, homo sapiens
cactgctgttctcctcgtggc

SEQ ID NO: 23573 - RNA, 21 nt, RNAi
cugcuguucuccucguggcuu

SEQ ID NO: 23574 - RNA, 21 nt, RNAi
uugacgacaagaggagcaccg

SEQ ID NO: 23575 - DNA, 21 bp, homo sapiens
caaggctgagccactccaagc

SEQ ID NO: 23576 - RNA, 21 nt, RNAi
aggcugagccacuccaagcuu

SEQ ID NO: 23577 - RNA, 21 nt, RNAi
uuuccgacucggugagguucg

SEQ ID NO: 23578 - DNA, 21 bp, homo sapiens
cactccaagctgaggatgatc

SEQ ID NO: 23579 - RNA, 21 nt, RNAi
cuccaagcugaggaugaucuu

SEQ ID NO: 23580 - RNA, 21 nt, RNAi
uugagguucgacuccuacuag

SEQ ID NO: 23581 - DNA, 21 bp, homo sapiens
caagctgaggatgatccactg

SEQ ID NO: 23582 - RNA, 21 nt, RNAi
agcugaggaugauccacuguu

SEQ ID NO: 23583 - RNA, 21 nt, RNAi
uuucgacuccuacuaggugac

SEQ ID NO: 23584 - DNA, 21 bp, homo sapiens
caaatgaccaggactttgccg

SEQ ID NO: 23585 - RNA, 21 nt, RNAi
aaugaccaggacuuugccguu

SEQ ID NO: 23586 - RNA, 21 nt, RNAi
uuuuacugguccugaaacggc

SEQ ID NO: 23587 - DNA, 21 bp, homo sapiens
caggactttgccgtctccttt

SEQ ID NO: 23588 - RNA, 21 nt, RNAi
ggacuuugccgucuccuuuuu

SEQ ID NO: 23589 - RNA, 21 nt, RNAi
uuccugaaacggcagaggaaa

SEQ ID NO: 23590 - DNA, 21 bp, homo sapiens
cagaggatgcaagctcaagtc

SEQ ID NO: 23591 - RNA, 21 nt, RNAi
gaggaugcaagcucaagucuu

SEQ ID NO: 23592 - RNA, 21 nt, RNAi
uucuccuacguucgaguucag

SEQ ID NO: 23593 - DNA, 21 bp, homo sapiens
caagctcaagtcttagagctt

SEQ ID NO: 23594 - RNA, 21 nt, RNAi
agcucaagucuuagagcuuuu

SEQ ID NO: 23595 - RNA, 21 nt, RNAi
uuucgaguucagaaucucgaa

SEQ ID NO: 23596 - DNA, 21 bp, homo sapiens
caccagcattgcagagctagg

SEQ ID NO: 23597 - RNA, 21 nt, RNAi
ccagcauugcagagcuagguu

SEQ ID NO: 23598 - RNA, 21 nt, RNAi
uuggucguaacgucucgaucc

SEQ ID NO: 23599 - DNA, 21 bp, homo sapiens
cagcattgcagagctaggagt

SEQ ID NO: 23600 - RNA, 21 nt, RNAi
gcauugcagagcuaggaguuu

SEQ ID NO: 23601 - RNA, 21 nt, RNAi
uucguaacgucucgauccuca

SEQ ID NO: 23602 - DNA, 21 bp, homo sapiens
cattgcagagctaggagtgta

SEQ ID NO: 23603 - RNA, 21 nt, RNAi
uugcagagcuaggaguguauu

SEQ ID NO: 23604 - RNA, 21 nt, RNAi
uuaacgucucgauccucacau

SEQ ID NO: 23605 - DNA, 21 bp, homo sapiens
cagagctaggagtgtagagag

SEQ ID NO: 23606 - RNA, 21 nt, RNAi
gagcuaggaguguagagaguu

SEQ ID NO: 23607 - RNA, 21 nt, RNAi
uucucgauccucacaucucuc

SEQ ID NO: 23608 - DNA, 21 bp, homo sapiens
caagcacttctagaattagat

SEQ ID NO: 23609 - RNA, 21 nt, RNAi
agcacuucuagaauuagauuu

SEQ ID NO: 23610 - RNA, 21 nt, RNAi
uuucgugaagaucuuaaucua

SEQ ID NO: 23611 - DNA, 21 bp, homo sapiens
cacttctagaattagatccaa

SEQ ID NO: 23612 - RNA, 21 nt, RNAi
cuucuagaauuagauccaauu

SEQ ID NO: 23613 - RNA, 21 nt, RNAi
uugaagaucuuaaucuagguu

SEQ ID NO: 23614 - DNA, 21 bp, homo sapiens
caacagctggctctttctctt

SEQ ID NO: 23615 - RNA, 21 nt, RNAi
acagcuggcucuuucucuuuu

SEQ ID NO: 23616 - RNA, 21 nt, RNAi
uuugucgaccgagaaagagaa

SEQ ID NO: 23617 - DNA, 21 bp, homo sapiens
cagctggctctttctcttagg

SEQ ID NO: 23618 - RNA, 21 nt, RNAi
gcuggcucuuucucuuagguu

SEQ ID NO: 23619 - RNA, 21 nt, RNAi
uucgaccgagaaagagaaucc

SEQ ID NO: 23620 - DNA, 21 bp, homo sapiens
caggcctcaattactttatgt

SEQ ID NO: 23621 - RNA, 21 nt, RNAi
ggccucaauuacuuuauguuu

SEQ ID NO: 23622 - RNA, 21 nt, RNAi
uuccggaguuaaugaaauaca

SEQ ID NO: 23623 - DNA, 21 bp, homo sapiens
cagtgatattcaaggcatgac

SEQ ID NO: 23624 - RNA, 21 nt, RNAi
gugauauucaaggcaugacuu

SEQ ID NO: 23625 - RNA, 21 nt, RNAi
uucacuauaaguuccguacug

SEQ ID NO: 23626 - DNA, 21 bp, homo sapiens
catgtagaaatgtattgagga

SEQ ID NO: 23627 - RNA, 21 nt, RNAi
uguagaaauguauugaggauu

SEQ ID NO: 23628 - RNA, 21 nt, RNAi
uuacaucuuuacauaacuccu

SEQ ID NO: 23629 - DNA, 21 bp, homo sapiens
cagtggcactatctcagatca

SEQ ID NO: 23630 - RNA, 21 nt, RNAi
guggcacuaucucagaucauu

SEQ ID NO: 23631 - RNA, 21 nt, RNAi
uucaccgugauagagucuagu

SEQ ID NO: 23632 - DNA, 21 bp, homo sapiens
cactatctcagatcactgcaa

SEQ ID NO: 23633 - RNA, 21 nt, RNAi
cuaucucagaucacugcaauu

SEQ ID NO: 23634 - RNA, 21 nt, RNAi
uugauagagucuagugacguu

SEQ ID NO: 23635 - DNA, 21 bp, homo sapiens
cagatcactgcaacctctgcc

SEQ ID NO: 23636 - RNA, 21 nt, RNAi
gaucacugcaaccucugccuu

SEQ ID NO: 23637 - RNA, 21 nt, RNAi
uucuagugacguuggagacgg

SEQ ID NO: 23638 - DNA, 21 bp, homo sapiens
cactgcaacctctgcctcctg

SEQ ID NO: 23639 - RNA, 21 nt, RNAi
cugcaaccucugccuccuguu

SEQ ID NO: 23640 - RNA, 21 nt, RNAi
uugacguuggagacggaggac

SEQ ID NO: 23641 - DNA, 21 bp, homo sapiens
caagtcactaggattacaggc

SEQ ID NO: 23642 - RNA, 21 nt, RNAi
agucacuaggauuacaggcuu

SEQ ID NO: 23643 - RNA, 21 nt, RNAi
uuucagugauccuaauguccg

SEQ ID NO: 23644 - DNA, 21 bp, homo sapiens
cactaggattacaggcaccag

SEQ ID NO: 23645 - RNA, 21 nt, RNAi
cuaggauuacaggcaccaguu

SEQ ID NO: 23646 - RNA, 21 nt, RNAi
uugauccuaauguccgugguc

SEQ ID NO: 23647 - DNA, 21 bp, homo sapiens
caggcaccagacaccaagcct

SEQ ID NO: 23648 - RNA, 21 nt, RNAi
ggcaccagacaccaagccuuu

SEQ ID NO: 23649 - RNA, 21 nt, RNAi
uuccguggucugugguucgga

SEQ ID NO: 23650 - DNA, 21 bp, homo sapiens
caccagacaccaagcctggct

SEQ ID NO: 23651 - RNA, 21 nt, RNAi
ccagacaccaagccuggcuuu

SEQ ID NO: 23652 - RNA, 21 nt, RNAi
uuggucugugguucggaccga

SEQ ID NO: 23653 - DNA, 21 bp, homo sapiens
cagacaccaagcctggctaaa

SEQ ID NO: 23654 - RNA, 21 nt, RNAi
gacaccaagccuggcuaaauu

SEQ ID NO: 23655 - RNA, 21 nt, RNAi
uucugugguucggaccgauuu

SEQ ID NO: 23656 - DNA, 21 bp, homo sapiens
caccatcttggccaggctagt

SEQ ID NO: 23657 - RNA, 21 nt, RNAi
ccaucuuggccaggcuaguuu

SEQ ID NO: 23658 - RNA, 21 nt, RNAi
uugguagaaccgguccgauca

SEQ ID NO: 23659 - DNA, 21 bp, homo sapiens
catcttggccaggctagtctt

SEQ ID NO: 23660 - RNA, 21 nt, RNAi
ucuuggccaggcuagucuuuu

SEQ ID NO: 23661 - RNA, 21 nt, RNAi
uuagaaccgguccgaucagaa

SEQ ID NO: 23662 - DNA, 21 bp, homo sapiens
caggctagtcttgaactcctg

SEQ ID NO: 23663 - RNA, 21 nt, RNAi
ggcuagucuugaacuccuguu

SEQ ID NO: 23664 - RNA, 21 nt, RNAi
uuccgaucagaacuugaggac

SEQ ID NO: 23665 - DNA, 21 bp, homo sapiens
caggcgtaagccaccacatcc

SEQ ID NO: 23666 - RNA, 21 nt, RNAi
ggcguaagccaccacauccuu

SEQ ID NO: 23667 - RNA, 21 nt, RNAi
uuccgcauucggugguguagg

SEQ ID NO: 23668 - DNA, 21 bp, homo sapiens
caccacatccagctgctaaag

SEQ ID NO: 23669 - RNA, 21 nt, RNAi
ccacauccagcugcuaaaguu

SEQ ID NO: 23670 - RNA, 21 nt, RNAi
uugguguaggucgacgauuuc

SEQ ID NO: 23671 - DNA, 21 bp, homo sapiens
cacatccagctgctaaaggaa

SEQ ID NO: 23672 - RNA, 21 nt, RNAi
cauccagcugcuaaaggaauu

SEQ ID NO: 23673 - RNA, 21 nt, RNAi
uuguaggucgacgauuuccuu

SEQ ID NO: 23674 - DNA, 21 bp, homo sapiens
catccagctgctaaaggaatg

SEQ ID NO: 23675 - RNA, 21 nt, RNAi
uccagcugcuaaaggaauguu

SEQ ID NO: 23676 - RNA, 21 nt, RNAi
uuaggucgacgauuuccuuac

SEQ ID NO: 23677 - DNA, 21 bp, homo sapiens
cattcagatgtgtgtgtgaca

SEQ ID NO: 23678 - RNA, 21 nt, RNAi
uucagaugugugugugacauu

SEQ ID NO: 23679 - RNA, 21 nt, RNAi
uuaagucuacacacacacugu

SEQ ID NO: 23680 - DNA, 21 bp, homo sapiens
cagataagtacagcatatcag

SEQ ID NO: 23681 - RNA, 21 nt, RNAi
gauaaguacagcauaucaguu

SEQ ID NO: 23682 - RNA, 21 nt, RNAi
uucuauucaugucguauaguc

SEQ ID NO: 23683 - DNA, 21 bp, homo sapiens
caacactgctctgcgtattta

SEQ ID NO: 23684 - RNA, 21 nt, RNAi
acacugcucugcguauuuauu

SEQ ID NO: 23685 - RNA, 21 nt, RNAi
uuugugacgagacgcauaaau

SEQ ID NO: 23686 - DNA, 21 bp, homo sapiens
cactgctctgcgtatttattc

SEQ ID NO: 23687 - RNA, 21 nt, RNAi
cugcucugcguauuuauucuu

SEQ ID NO: 23688 - RNA, 21 nt, RNAi
uugacgagacgcauaaauaag

SEQ ID NO: 23689 - DNA, 21 bp, homo sapiens
catgctattggctgtaatgca

SEQ ID NO: 23690 - RNA, 21 nt, RNAi
ugcuauuggcuguaaugcauu

SEQ ID NO: 23691 - RNA, 21 nt, RNAi
uuacgauaaccgacauuacgu

SEQ ID NO: 23692 - DNA, 21 bp, homo sapiens
cagccagcattacatgtcagc

SEQ ID NO: 23693 - RNA, 21 nt, RNAi
gccagcauuacaugucagcuu

SEQ ID NO: 23694 - RNA, 21 nt, RNAi
uucggucguaauguacagucg

SEQ ID NO: 23695 - DNA, 21 bp, homo sapiens
cagcattacatgtcagcaagc

SEQ ID NO: 23696 - RNA, 21 nt, RNAi
gcauuacaugucagcaagcuu

SEQ ID NO: 23697 - RNA, 21 nt, RNAi
uucguaauguacagucguucg

SEQ ID NO: 23698 - DNA, 21 bp, homo sapiens
cattacatgtcagcaagcatg

SEQ ID NO: 23699 - RNA, 21 nt, RNAi
uuacaugucagcaagcauguu

SEQ ID NO: 23700 - RNA, 21 nt, RNAi
uuaauguacagucguucguac

SEQ ID NO: 23701 - DNA, 21 bp, homo sapiens
catgtcagcaagcatgcaact

SEQ ID NO: 23702 - RNA, 21 nt, RNAi
ugucagcaagcaugcaacuuu

SEQ ID NO: 23703 - RNA, 21 nt, RNAi
uuacagucguucguacguuga

SEQ ID NO: 23704 - DNA, 21 bp, homo sapiens
cagcaagcatgcaacttcctg

SEQ ID NO: 23705 - RNA, 21 nt, RNAi
gcaagcaugcaacuuccuguu

SEQ ID NO: 23706 - RNA, 21 nt, RNAi
uucguucguacguugaaggac

SEQ ID NO: 23707 - DNA, 21 bp, homo sapiens
caagcatgcaacttcctgaag

SEQ ID NO: 23708 - RNA, 21 nt, RNAi
agcaugcaacuuccugaaguu

SEQ ID NO: 23709 - RNA, 21 nt, RNAi
uuucguacguugaaggacuuc

SEQ ID NO: 23710 - DNA, 21 bp, homo sapiens
catgcaacttcctgaagattc

SEQ ID NO: 23711 - RNA, 21 nt, RNAi
ugcaacuuccugaagauucuu

SEQ ID NO: 23712 - RNA, 21 nt, RNAi
uuacguugaaggacuucuaag

SEQ ID NO: 23713 - DNA, 21 bp, homo sapiens
caacttcctgaagattctctt

SEQ ID NO: 23714 - RNA, 21 nt, RNAi
acuuccugaagauucucuuuu

SEQ ID NO: 23715 - RNA, 21 nt, RNAi
uuugaaggacuucuaagagaa

SEQ ID NO: 23716 - DNA, 21 bp, homo sapiens
caatttctgatgctctctctc

SEQ ID NO: 23717 - RNA, 21 nt, RNAi
auuucugaugcucucucucuu

SEQ ID NO: 23718 - RNA, 21 nt, RNAi
uuuaaagacuacgagagagag

SEQ ID NO: 23719 - DNA, 21 bp, homo sapiens
cacttgccattgcagaaggtc

SEQ ID NO: 23720 - RNA, 21 nt, RNAi
cuugccauugcagaaggucuu

SEQ ID NO: 23721 - RNA, 21 nt, RNAi
uugaacgguaacgucuuccag

SEQ ID NO: 23722 - DNA, 21 bp, homo sapiens
cattgcagaaggtcctgttat

SEQ ID NO: 23723 - RNA, 21 nt, RNAi
uugcagaagguccuguuauuu

SEQ ID NO: 23724 - RNA, 21 nt, RNAi
uuaacgucuuccaggacaaua

SEQ ID NO: 23725 - DNA, 21 bp, homo sapiens
cagaaggtcctgttattcaac

SEQ ID NO: 23726 - RNA, 21 nt, RNAi
gaagguccuguuauucaacuu

SEQ ID NO: 23727 - RNA, 21 nt, RNAi
uucuuccaggacaauaaguug

SEQ ID NO: 23728 - DNA, 21 bp, homo sapiens
cacagattctgctgcctctga

SEQ ID NO: 23729 - RNA, 21 nt, RNAi
cagauucugcugccucugauu

SEQ ID NO: 23730 - RNA, 21 nt, RNAi
uugucuaagacgacggagacu

SEQ ID NO: 23731 - DNA, 21 bp, homo sapiens
cagattctgctgcctctgagg

SEQ ID NO: 23732 - RNA, 21 nt, RNAi
gauucugcugccucugagguu

SEQ ID NO: 23733 - RNA, 21 nt, RNAi
uucuaagacgacggagacucc

SEQ ID NO: 23734 - DNA, 21 bp, homo sapiens
cattgccatcaactttgtttc

SEQ ID NO: 23735 - RNA, 21 nt, RNAi
uugccaucaacuuuguuucuu

SEQ ID NO: 23736 - RNA, 21 nt, RNAi
uuaacgguaguugaaacaaag

SEQ ID NO: 23737 - DNA, 21 bp, homo sapiens
catcaactttgtttcctcatc

SEQ ID NO: 23738 - RNA, 21 nt, RNAi
ucaacuuuguuuccucaucuu

SEQ ID NO: 23739 - RNA, 21 nt, RNAi
uuaguugaaacaaaggaguag

SEQ ID NO: 23740 - DNA, 21 bp, homo sapiens
caactttgtttcctcatctca

SEQ ID NO: 23741 - RNA, 21 nt, RNAi
acuuuguuuccucaucucauu

SEQ ID NO: 23742 - RNA, 21 nt, RNAi
uuugaaacaaaggaguagagu

SEQ ID NO: 23743 - DNA, 21 bp, homo sapiens
catctcaaataaagtcctttc

SEQ ID NO: 23744 - RNA, 21 nt, RNAi
ucucaaauaaaguccuuucuu

SEQ ID NO: 23745 - RNA, 21 nt, RNAi
uuagaguuuauuucaggaaag

SEQ ID NO: 23746 - DNA, 21 bp, homo sapiens
caaataaagtcctttcagcaa

SEQ ID NO: 23747 - RNA, 21 nt, RNAi
aauaaaguccuuucagcaauu

SEQ ID NO: 23748 - RNA, 21 nt, RNAi
uuuuauuucaggaaagucguu

SEQ ID NO: 23749 - DNA, 21 bp, homo sapiens
caagtcgtatctcagaacact

SEQ ID NO: 23750 - RNA, 21 nt, RNAi
agucguaucucagaacacuuu

SEQ ID NO: 23751 - RNA, 21 nt, RNAi
uuucagcauagagucuuguga

SEQ ID NO: 23752 - DNA, 21 bp, homo sapiens
cagaacactagctcttcgaaa

SEQ ID NO: 23753 - RNA, 21 nt, RNAi
gaacacuagcucuucgaaauu

SEQ ID NO: 23754 - RNA, 21 nt, RNAi
uucuugugaucgagaagcuuu

SEQ ID NO: 23755 - DNA, 21 bp, homo sapiens
cactagctcttcgaaagagtt

SEQ ID NO: 23756 - RNA, 21 nt, RNAi
cuagcucuucgaaagaguuuu

SEQ ID NO: 23757 - RNA, 21 nt, RNAi
uugaucgagaagcuuucucaa

SEQ ID NO: 23758 - DNA, 21 bp, homo sapiens
cagagaagtggtagagaggat

SEQ ID NO: 23759 - RNA, 21 nt, RNAi
gagaagugguagagaggauuu

SEQ ID NO: 23760 - RNA, 21 nt, RNAi
uucucuucaccaucucuccua

SEQ ID NO: 23761 - DNA, 21 bp, homo sapiens
cagtgcagtggcacaatcttg

SEQ ID NO: 23762 - RNA, 21 nt, RNAi
gugcaguggcacaaucuuguu

SEQ ID NO: 23763 - RNA, 21 nt, RNAi
uucacgucaccguguuagaac

SEQ ID NO: 23764 - DNA, 21 bp, homo sapiens
cagtggcacaatcttggctca

SEQ ID NO: 23765 - RNA, 21 nt, RNAi
guggcacaaucuuggcucauu

SEQ ID NO: 23766 - RNA, 21 nt, RNAi
uucaccguguuagaaccgagu

SEQ ID NO: 23767 - DNA, 21 bp, homo sapiens
cacaatcttggctcactgaaa

SEQ ID NO: 23768 - RNA, 21 nt, RNAi
caaucuuggcucacugaaauu

SEQ ID NO: 23769 - RNA, 21 nt, RNAi
uuguuagaaccgagugacuuu

SEQ ID NO: 23770 - DNA, 21 bp, homo sapiens
caatcttggctcactgaaacc

SEQ ID NO: 23771 - RNA, 21 nt, RNAi
aucuuggcucacugaaaccuu

SEQ ID NO: 23772 - RNA, 21 nt, RNAi
uuuagaaccgagugacuuugg

SEQ ID NO: 23773 - DNA, 21 bp, homo sapiens
cactgaaacctttacctcctg

SEQ ID NO: 23774 - RNA, 21 nt, RNAi
cugaaaccuuuaccuccuguu

SEQ ID NO: 23775 - RNA, 21 nt, RNAi
uugacuuuggaaauggaggac

SEQ ID NO: 23776 - DNA, 21 bp, homo sapiens
caagtgattctcctgcctcag

SEQ ID NO: 23777 - RNA, 21 nt, RNAi
agugauucuccugccucaguu

SEQ ID NO: 23778 - RNA, 21 nt, RNAi
uuucacuaagaggacggaguc

SEQ ID NO: 23779 - DNA, 21 bp, homo sapiens
gaagacatcacaattcctggt

SEQ ID NO: 23780 - RNA, 21 nt, RNAi
agacaucacaauuccugguuu

SEQ ID NO: 23781 - RNA, 21 nt, RNAi
uuucuguaguguuaaggacca

SEQ ID NO: 23782 - DNA, 21 bp, homo sapiens
gacacataccagtgaaataaa

SEQ ID NO: 23783 - RNA, 21 nt, RNAi
cacauaccagugaaauaaauu

SEQ ID NO: 23784 - RNA, 21 nt, RNAi
uuguguauggucacuuuauuu

SEQ ID NO: 23785 - DNA, 21 bp, homo sapiens
gagagtccagaaacacatcga

SEQ ID NO: 23786 - RNA, 21 nt, RNAi
gaguccagaaacacaucgauu

SEQ ID NO: 23787 - RNA, 21 nt, RNAi
uucucaggucuuuguguagcu

SEQ ID NO: 23788 - DNA, 21 bp, homo sapiens
gagtccagaaacacatcgaaa

SEQ ID NO: 23789 - RNA, 21 nt, RNAi
guccagaaacacaucgaaauu

SEQ ID NO: 23790 - RNA, 21 nt, RNAi
uucaggucuuuguguagcuuu

SEQ ID NO: 23791 - DNA, 21 bp, homo sapiens
gaaacacatcgaaacacatat

SEQ ID NO: 23792 - RNA, 21 nt, RNAi
aacacaucgaaacacauauuu

SEQ ID NO: 23793 - RNA, 21 nt, RNAi
uuuuguguagcuuuguguaua

SEQ ID NO: 23794 - DNA, 21 bp, homo sapiens
gaaacacatatggtcaagtaa

SEQ ID NO: 23795 - RNA, 21 nt, RNAi
aacacauauggucaaguaauu

SEQ ID NO: 23796 - RNA, 21 nt, RNAi
uuuuguguauaccaguucauu

SEQ ID NO: 23797 - DNA, 21 bp, homo sapiens
gacaatggcatgaagaagaca

SEQ ID NO: 23798 - RNA, 21 nt, RNAi
caauggcaugaagaagacauu

SEQ ID NO: 23799 - RNA, 21 nt, RNAi
uuguuaccguacuucuucugu

SEQ ID NO: 23800 - DNA, 21 bp, homo sapiens
gacaggagagtctcttcaata

SEQ ID NO: 23801 - RNA, 21 nt, RNAi
caggagagucucuucaauauu

SEQ ID NO: 23802 - RNA, 21 nt, RNAi
uuguccucucagagaaguuau

SEQ ID NO: 23803 - DNA, 21 bp, homo sapiens
gagagtctcttcaataaatgg

SEQ ID NO: 23804 - RNA, 21 nt, RNAi
gagucucuucaauaaaugguu

SEQ ID NO: 23805 - RNA, 21 nt, RNAi
uucucagagaaguuauuuacc

SEQ ID NO: 23806 - DNA, 21 bp, homo sapiens
gagtctcttcaataaatggtg

SEQ ID NO: 23807 - RNA, 21 nt, RNAi
gucucuucaauaaaugguguu

SEQ ID NO: 23808 - RNA, 21 nt, RNAi
uucagagaaguuauuuaccac

SEQ ID NO: 23809 - DNA, 21 bp, homo sapiens
gatagaagaccagaaacaaga

SEQ ID NO: 23810 - RNA, 21 nt, RNAi
uagaagaccagaaacaagauu

SEQ ID NO: 23811 - RNA, 21 nt, RNAi
uuaucuucuggucuuuguucu

SEQ ID NO: 23812 - DNA, 21 bp, homo sapiens
gaagaccagaaacaagagact

SEQ ID NO: 23813 - RNA, 21 nt, RNAi
agaccagaaacaagagacuuu

SEQ ID NO: 23814 - RNA, 21 nt, RNAi
uuucuggucuuuguucucuga

SEQ ID NO: 23815 - DNA, 21 bp, homo sapiens
gaccagaaacaagagactatg

SEQ ID NO: 23816 - RNA, 21 nt, RNAi
ccagaaacaagagacuauguu

SEQ ID NO: 23817 - RNA, 21 nt, RNAi
uuggucuuuguucucugauac

SEQ ID NO: 23818 - DNA, 21 bp, homo sapiens
gagatttcctggagcagagct

SEQ ID NO: 23819 - RNA, 21 nt, RNAi
gauuuccuggagcagagcuuu

SEQ ID NO: 23820 - RNA, 21 nt, RNAi
uucuaaaggaccucgucucga

SEQ ID NO: 23821 - DNA, 21 bp, homo sapiens
gatttcctggagcagagctgc

SEQ ID NO: 23822 - RNA, 21 nt, RNAi
uuuccuggagcagagcugcuu

SEQ ID NO: 23823 - RNA, 21 nt, RNAi
uuaaaggaccucgucucgacg

SEQ ID NO: 23824 - DNA, 21 bp, homo sapiens
gatggaggctcattactcctt

SEQ ID NO: 23825 - RNA, 21 nt, RNAi
uggaggcucauuacuccuuuu

SEQ ID NO: 23826 - RNA, 21 nt, RNAi
uuaccuccgaguaaugaggaa

SEQ ID NO: 23827 - DNA, 21 bp, homo sapiens
gatatttctcaaagtggagag

SEQ ID NO: 23828 - RNA, 21 nt, RNAi
uauuucucaaaguggagaguu

SEQ ID NO: 23829 - RNA, 21 nt, RNAi
uuauaaagaguuucaccucuc

SEQ ID NO: 23830 - DNA, 21 bp, homo sapiens
gagagaaatacctagtacata

SEQ ID NO: 23831 - RNA, 21 nt, RNAi
gagaaauaccuaguacauauu

SEQ ID NO: 23832 - RNA, 21 nt, RNAi
uucucuuuauggaucauguau

SEQ ID NO: 23833 - DNA, 21 bp, homo sapiens
gataaggtcattatcttctcc

SEQ ID NO: 23834 - RNA, 21 nt, RNAi
uaaggucauuaucuucuccuu

SEQ ID NO: 23835 - RNA, 21 nt, RNAi
uuauuccaguaauagaagagg

SEQ ID NO: 23836 - DNA, 21 bp, homo sapiens
gaatcctgcaatgaattaact

SEQ ID NO: 23837 - RNA, 21 nt, RNAi
auccugcaaugaauuaacuuu

SEQ ID NO: 23838 - RNA, 21 nt, RNAi
uuuaggacguuacuuaauuga

SEQ ID NO: 23839 - DNA, 21 bp, homo sapiens
gaattaactctctactctagc

SEQ ID NO: 23840 - RNA, 21 nt, RNAi
auuaacucucuacucuagcuu

SEQ ID NO: 23841 - RNA, 21 nt, RNAi
uuuaauugagagaugagaucg

SEQ ID NO: 23842 - DNA, 21 bp, homo sapiens
gatccagctctggcctcaagg

SEQ ID NO: 23843 - RNA, 21 nt, RNAi
uccagcucuggccucaagguu

SEQ ID NO: 23844 - RNA, 21 nt, RNAi
uuaggucgagaccggaguucc

SEQ ID NO: 23845 - DNA, 21 bp, homo sapiens
gaggcatttgattcctgaaat

SEQ ID NO: 23846 - RNA, 21 nt, RNAi
ggcauuugauuccugaaauuu

SEQ ID NO: 23847 - RNA, 21 nt, RNAi
uuccguaaacuaaggacuuua

SEQ ID NO: 23848 - DNA, 21 bp, homo sapiens
gacaatgtaacactgttctta

SEQ ID NO: 23849 - RNA, 21 nt, RNAi
caauguaacacuguucuuauu

SEQ ID NO: 23850 - RNA, 21 nt, RNAi
uuguuacauugugacaagaau

SEQ ID NO: 23851 - DNA, 21 bp, homo sapiens
gaccagaacagacactcaata

SEQ ID NO: 23852 - RNA, 21 nt, RNAi
ccagaacagacacucaauauu

SEQ ID NO: 23853 - RNA, 21 nt, RNAi
uuggucuugucugugaguuau

SEQ ID NO: 23854 - DNA, 21 bp, homo sapiens
gaacagacactcaataaacag

SEQ ID NO: 23855 - RNA, 21 nt, RNAi
acagacacucaauaaacaguu

SEQ ID NO: 23856 - RNA, 21 nt, RNAi
uuugucugugaguuauuuguc

SEQ ID NO: 23857 - DNA, 21 bp, homo sapiens
gacactcaataaacagcctca

SEQ ID NO: 23858 - RNA, 21 nt, RNAi
cacucaauaaacagccucauu

SEQ ID NO: 23859 - RNA, 21 nt, RNAi
uugugaguuauuugucggagu

SEQ ID NO: 23860 - DNA, 21 bp, homo sapiens
gaagcttggagaacaaaggag

SEQ ID NO: 23861 - RNA, 21 nt, RNAi
agcuuggagaacaaaggaguu

SEQ ID NO: 23862 - RNA, 21 nt, RNAi
uuucgaaccucuuguuuccuc

SEQ ID NO: 23863 - DNA, 21 bp, homo sapiens
gagaacaaaggagcatcaaag

SEQ ID NO: 23864 - RNA, 21 nt, RNAi
gaacaaaggagcaucaaaguu

SEQ ID NO: 23865 - RNA, 21 nt, RNAi
uucuuguuuccucguaguuuc

SEQ ID NO: 23866 - DNA, 21 bp, homo sapiens
gagccttctccaagcagacct

SEQ ID NO: 23867 - RNA, 21 nt, RNAi
gccuucuccaagcagaccuuu

SEQ ID NO: 23868 - RNA, 21 nt, RNAi
uucggaagagguucgucugga

SEQ ID NO: 23869 - DNA, 21 bp, homo sapiens
gacctataaatccaggctggc

SEQ ID NO: 23870 - RNA, 21 nt, RNAi
ccuauaaauccaggcuggcuu

SEQ ID NO: 23871 - RNA, 21 nt, RNAi
uuggauauuuagguccgaccg

SEQ ID NO: 23872 - DNA, 21 bp, homo sapiens
gagccactccaagctgaggat

SEQ ID NO: 23873 - RNA, 21 nt, RNAi
gccacuccaagcugaggauuu

SEQ ID NO: 23874 - RNA, 21 nt, RNAi
uucggugagguucgacuccua

SEQ ID NO: 23875 - DNA, 21 bp, homo sapiens
gaggatgatccactgcaggca

SEQ ID NO: 23876 - RNA, 21 nt, RNAi
ggaugauccacugcaggcauu

SEQ ID NO: 23877 - RNA, 21 nt, RNAi
uuccuacuaggugacguccgu

SEQ ID NO: 23878 - DNA, 21 bp, homo sapiens
gaccaggactttgccgtctcc

SEQ ID NO: 23879 - RNA, 21 nt, RNAi
ccaggacuuugccgucuccuu

SEQ ID NO: 23880 - RNA, 21 nt, RNAi
uugguccugaaacggcagagg

SEQ ID NO: 23881 - DNA, 21 bp, homo sapiens
gactttgccgtctcctttgca

SEQ ID NO: 23882 - RNA, 21 nt, RNAi
cuuugccgucuccuuugcauu

SEQ ID NO: 23883 - RNA, 21 nt, RNAi
uugaaacggcagaggaaacgu

SEQ ID NO: 23884 - DNA, 21 bp, homo sapiens
gaggatgcaagctcaagtctt

SEQ ID NO: 23885 - RNA, 21 nt, RNAi
ggaugcaagcucaagucuuuu

SEQ ID NO: 23886 - RNA, 21 nt, RNAi
uuccuacguucgaguucagaa

SEQ ID NO: 23887 - DNA, 21 bp, homo sapiens
gatgcaagctcaagtcttaga

SEQ ID NO: 23888 - RNA, 21 nt, RNAi
ugcaagcucaagucuuagauu

SEQ ID NO: 23889 - RNA, 21 nt, RNAi
uuacguucgaguucagaaucu

SEQ ID NO: 23890 - DNA, 21 bp, homo sapiens
gagacaccagcattgcagagc

SEQ ID NO: 23891 - RNA, 21 nt, RNAi
gacaccagcauugcagagcuu

SEQ ID NO: 23892 - RNA, 21 nt, RNAi
uucuguggucguaacgucucg

SEQ ID NO: 23893 - DNA, 21 bp, homo sapiens
gacaccagcattgcagagcta

SEQ ID NO: 23894 - RNA, 21 nt, RNAi
caccagcauugcagagcuauu

SEQ ID NO: 23895 - RNA, 21 nt, RNAi
uuguggucguaacgucucgau

SEQ ID NO: 23896 - DNA, 21 bp, homo sapiens
gagctaggagtgtagagagga

SEQ ID NO: 23897 - RNA, 21 nt, RNAi
gcuaggaguguagagaggauu

SEQ ID NO: 23898 - RNA, 21 nt, RNAi
uucgauccucacaucucuccu

SEQ ID NO: 23899 - DNA, 21 bp, homo sapiens
gaattagatccaacagctggc

SEQ ID NO: 23900 - RNA, 21 nt, RNAi
auuagauccaacagcuggcuu

SEQ ID NO: 23901 - RNA, 21 nt, RNAi
uuuaaucuagguugucgaccg

SEQ ID NO: 23902 - DNA, 21 bp, homo sapiens
gatccaacagctggctctttc

SEQ ID NO: 23903 - RNA, 21 nt, RNAi
uccaacagcuggcucuuucuu

SEQ ID NO: 23904 - RNA, 21 nt, RNAi
uuagguugucgaccgagaaag

SEQ ID NO: 23905 - DNA, 21 bp, homo sapiens
gaagaatcagtgatattcaag

SEQ ID NO: 23906 - RNA, 21 nt, RNAi
agaaucagugauauucaaguu

SEQ ID NO: 23907 - RNA, 21 nt, RNAi
uuucuuagucacuauaaguuc

SEQ ID NO: 23908 - DNA, 21 bp, homo sapiens
gaatcagtgatattcaaggca

SEQ ID NO: 23909 - RNA, 21 nt, RNAi
aucagugauauucaaggcauu

SEQ ID NO: 23910 - RNA, 21 nt, RNAi
uuuagucacuauaaguuccgu

SEQ ID NO: 23911 - DNA, 21 bp, homo sapiens
gaaatgtattgaggagtctct

SEQ ID NO: 23912 - RNA, 21 nt, RNAi
aauguauugaggagucucuuu

SEQ ID NO: 23913 - RNA, 21 nt, RNAi
uuuuacauaacuccucagaga

SEQ ID NO: 23914 - DNA, 21 bp, homo sapiens
gaggagtctctacttcaagga

SEQ ID NO: 23915 - RNA, 21 nt, RNAi
ggagucucuacuucaaggauu

SEQ ID NO: 23916 - RNA, 21 nt, RNAi
uuccucagagaugaaguuccu

SEQ ID NO: 23917 - DNA, 21 bp, homo sapiens
gagtctctacttcaaggaaga

SEQ ID NO: 23918 - RNA, 21 nt, RNAi
gucucuacuucaaggaagauu

SEQ ID NO: 23919 - RNA, 21 nt, RNAi
uucagagaugaaguuccuucu

SEQ ID NO: 23920 - DNA, 21 bp, homo sapiens
gatggagtctcgctctgtcac

SEQ ID NO: 23921 - RNA, 21 nt, RNAi
uggagucucgcucugucacuu

SEQ ID NO: 23922 - RNA, 21 nt, RNAi
uuaccucagagcgagacagug

SEQ ID NO: 23923 - DNA, 21 bp, homo sapiens
gagtgcagtggcactatctca

SEQ ID NO: 23924 - RNA, 21 nt, RNAi
gugcaguggcacuaucucauu

SEQ ID NO: 23925 - RNA, 21 nt, RNAi
uucacgucaccgugauagagu

SEQ ID NO: 23926 - DNA, 21 bp, homo sapiens
gatcactgcaacctctgcctc

SEQ ID NO: 23927 - RNA, 21 nt, RNAi
ucacugcaaccucugccucuu

SEQ ID NO: 23928 - RNA, 21 nt, RNAi
uuagugacguuggagacggag

SEQ ID NO: 23929 - DNA, 21 bp, homo sapiens
gattacaggcaccagacacca

SEQ ID NO: 23930 - RNA, 21 nt, RNAi
uuacaggcaccagacaccauu

SEQ ID NO: 23931 - RNA, 21 nt, RNAi
uuaauguccguggucuguggu

SEQ ID NO: 23932 - DNA, 21 bp, homo sapiens
gacaccaagcctggctaaatt

SEQ ID NO: 23933 - RNA, 21 nt, RNAi
caccaagccuggcuaaauuuu

SEQ ID NO: 23934 - RNA, 21 nt, RNAi
uugugguucggaccgauuuaa

SEQ ID NO: 23935 - DNA, 21 bp, homo sapiens
gaactcctgaccttgtgataa

SEQ ID NO: 23936 - RNA, 21 nt, RNAi
acuccugaccuugugauaauu

SEQ ID NO: 23937 - RNA, 21 nt, RNAi
uuugaggacuggaacacuauu

SEQ ID NO: 23938 - DNA, 21 bp, homo sapiens
gattacaggcgtaagccacca

SEQ ID NO: 23939 - RNA, 21 nt, RNAi
uuacaggcguaagccaccauu

SEQ ID NO: 23940 - RNA, 21 nt, RNAi
uuaauguccgcauucgguggu

SEQ ID NO: 23941 - DNA, 21 bp, homo sapiens
gaaccgttggaaactggagac

SEQ ID NO: 23942 - RNA, 21 nt, RNAi
accguuggaaacuggagacuu

SEQ ID NO: 23943 - RNA, 21 nt, RNAi
uuuggcaaccuuugaccucug

SEQ ID NO: 23944 - DNA, 21 bp, homo sapiens
gaaactggagacagtcatatg

SEQ ID NO: 23945 - RNA, 21 nt, RNAi
aacuggagacagucauauguu

SEQ ID NO: 23946 - RNA, 21 nt, RNAi
uuuugaccucugucaguauac

SEQ ID NO: 23947 - DNA, 21 bp, homo sapiens
gaaggagcagataagtacagc

SEQ ID NO: 23948 - RNA, 21 nt, RNAi
aggagcagauaaguacagcuu

SEQ ID NO: 23949 - RNA, 21 nt, RNAi
uuuccucgucuauucaugucg

SEQ ID NO: 23950 - DNA, 21 bp, homo sapiens
gagcagataagtacagcatat

SEQ ID NO: 23951 - RNA, 21 nt, RNAi
gcagauaaguacagcauauuu

SEQ ID NO: 23952 - RNA, 21 nt, RNAi
uucgucuauucaugucguaua

SEQ ID NO: 23953 - DNA, 21 bp, homo sapiens
gataagtacagcatatcagaa

SEQ ID NO: 23954 - RNA, 21 nt, RNAi
uaaguacagcauaucagaauu

SEQ ID NO: 23955 - RNA, 21 nt, RNAi
uuauucaugucguauagucuu

SEQ ID NO: 23956 - DNA, 21 bp, homo sapiens
gaccaacactgctctgcgtat

SEQ ID NO: 23957 - RNA, 21 nt, RNAi
ccaacacugcucugcguauuu

SEQ ID NO: 23958 - RNA, 21 nt, RNAi
uugguugugacgagacgcaua

SEQ ID NO: 23959 - DNA, 21 bp, homo sapiens
gatggtgtgatcatgctattg

SEQ ID NO: 23960 - RNA, 21 nt, RNAi
uggugugaucaugcuauuguu

SEQ ID NO: 23961 - RNA, 21 nt, RNAi
uuaccacacuaguacgauaac

SEQ ID NO: 23962 - DNA, 21 bp, homo sapiens
gatcatgctattggctgtaat

SEQ ID NO: 23963 - RNA, 21 nt, RNAi
ucaugcuauuggcuguaauuu

SEQ ID NO: 23964 - RNA, 21 nt, RNAi
uuaguacgauaaccgacauua

SEQ ID NO: 23965 - DNA, 21 bp, homo sapiens
gaaggtcctgttattcaacag

SEQ ID NO: 23966 - RNA, 21 nt, RNAi
agguccuguuauucaacaguu

SEQ ID NO: 23967 - RNA, 21 nt, RNAi
uuuccaggacaauaaguuguc

SEQ ID NO: 23968 - DNA, 21 bp, homo sapiens
gatgagaacagagagaaatat

SEQ ID NO: 23969 - RNA, 21 nt, RNAi
ugagaacagagagaaauauuu

SEQ ID NO: 23970 - RNA, 21 nt, RNAi
uuacucuugucucucuuuaua

SEQ ID NO: 23971 - DNA, 21 bp, homo sapiens
gacctagaaggaaactgtcgt

SEQ ID NO: 23972 - RNA, 21 nt, RNAi
ccuagaaggaaacugucguuu

SEQ ID NO: 23973 - RNA, 21 nt, RNAi
uuggaucuuccuuugacagca

SEQ ID NO: 23974 - DNA, 21 bp, homo sapiens
gaaggaaactgtcgtgtgtcc

SEQ ID NO: 23975 - RNA, 21 nt, RNAi
aggaaacugucguguguccuu

SEQ ID NO: 23976 - RNA, 21 nt, RNAi
uuuccuuugacagcacacagg

SEQ ID NO: 23977 - DNA, 21 bp, homo sapiens
gaaactgtcgtgtgtcctata

SEQ ID NO: 23978 - RNA, 21 nt, RNAi
aacugucguguguccuauauu

SEQ ID NO: 23979 - RNA, 21 nt, RNAi
uuuugacagcacacaggauau

SEQ ID NO: 23980 - DNA, 21 bp, homo sapiens
gataattcaggattcttcaga

SEQ ID NO: 23981 - RNA, 21 nt, RNAi
uaauucaggauucuucagauu

SEQ ID NO: 23982 - RNA, 21 nt, RNAi
uuauuaaguccuaagaagucu

SEQ ID NO: 23983 - DNA, 21 bp, homo sapiens
gaacactagctcttcgaaaga

SEQ ID NO: 23984 - RNA, 21 nt, RNAi
acacuagcucuucgaaagauu

SEQ ID NO: 23985 - RNA, 21 nt, RNAi
uuugugaucgagaagcuuucu

SEQ ID NO: 23986 - DNA, 21 bp, homo sapiens
gaccagagaagtggtagagag

SEQ ID NO: 23987 - RNA, 21 nt, RNAi
ccagagaagugguagagaguu

SEQ ID NO: 23988 - RNA, 21 nt, RNAi
uuggucucuucaccaucucuc

SEQ ID NO: 23989 - DNA, 21 bp, homo sapiens
gagaagtggtagagaggatgt

SEQ ID NO: 23990 - RNA, 21 nt, RNAi
gaagugguagagaggauguuu

SEQ ID NO: 23991 - RNA, 21 nt, RNAi
uucuucaccaucucuccuaca

SEQ ID NO: 23992 - DNA, 21 bp, homo sapiens
gaagtggtagagaggatgttg

SEQ ID NO: 23993 - RNA, 21 nt, RNAi
agugguagagaggauguuguu

SEQ ID NO: 23994 - RNA, 21 nt, RNAi
uuucaccaucucuccuacaac

SEQ ID NO: 23995 - DNA, 21 bp, homo sapiens
gagaggatgttgagagaagag

SEQ ID NO: 23996 - RNA, 21 nt, RNAi
gaggauguugagagaagaguu

SEQ ID NO: 23997 - RNA, 21 nt, RNAi
uucuccuacaacucucuucuc

SEQ ID NO: 23998 - DNA, 21 bp, homo sapiens
gaggatgttgagagaagagag

SEQ ID NO: 23999 - RNA, 21 nt, RNAi
ggauguugagagaagagaguu

SEQ ID NO: 24000 - RNA, 21 nt, RNAi
uuccuacaacucucuucucuc

SEQ ID NO: 24001 - DNA, 21 bp, homo sapiens
gatgttgagagaagagaggat

SEQ ID NO: 24002 - RNA, 21 nt, RNAi
uguugagagaagagaggauuu

SEQ ID NO: 24003 - RNA, 21 nt, RNAi
uuacaacucucuucucuccua

SEQ ID NO: 24004 - DNA, 21 bp, homo sapiens
gagatggagtctcgctctgtt

SEQ ID NO: 24005 - RNA, 21 nt, RNAi
gauggagucucgcucuguuuu

SEQ ID NO: 24006 - RNA, 21 nt, RNAi
uucuaccucagagcgagacaa

SEQ ID NO: 24007 - DNA, 21 bp, homo sapiens
gatggagtctcgctctgttgc

SEQ ID NO: 24008 - RNA, 21 nt, RNAi
uggagucucgcucuguugcuu

SEQ ID NO: 24009 - RNA, 21 nt, RNAi
uuaccucagagcgagacaacg

SEQ ID NO: 24010 - DNA, 21 bp, homo sapiens
gattctcctgcctcagcctcc

SEQ ID NO: 24011 - RNA, 21 nt, RNAi
uucuccugccucagccuccuu

SEQ ID NO: 24012 - RNA, 21 nt, RNAi
uuaagaggacggagucggagg

SEQ ID NO: 24013 - DNA, 21 bp, homo sapiens
tattacaaagctacggtaatc

SEQ ID NO: 24014 - RNA, 21 nt, RNAi
uuacaaagcuacgguaaucuu

SEQ ID NO: 24015 - RNA, 21 nt, RNAi
uuaauguuucgaugccauuag

SEQ ID NO: 24016 - DNA, 21 bp, homo sapiens
tacaaagctacggtaatcaaa

SEQ ID NO: 24017 - RNA, 21 nt, RNAi
caaagcuacgguaaucaaauu

SEQ ID NO: 24018 - RNA, 21 nt, RNAi
uuguuucgaugccauuaguuu

SEQ ID NO: 24019 - DNA, 21 bp, homo sapiens
tacctgatagaagaccagaaa

SEQ ID NO: 24020 - RNA, 21 nt, RNAi
ccugauagaagaccagaaauu

SEQ ID NO: 24021 - RNA, 21 nt, RNAi
uuggacuaucuucuggucuuu

SEQ ID NO: 24022 - DNA, 21 bp, homo sapiens
tagaagaccagaaacaagaga

SEQ ID NO: 24023 - RNA, 21 nt, RNAi
gaagaccagaaacaagagauu

SEQ ID NO: 24024 - RNA, 21 nt, RNAi
uucuucuggucuuuguucucu

SEQ ID NO: 24025 - DNA, 21 bp, homo sapiens
taagtggagatttcctggagc

SEQ ID NO: 24026 - RNA, 21 nt, RNAi
aguggagauuuccuggagcuu

SEQ ID NO: 24027 - RNA, 21 nt, RNAi
uuucaccucuaaaggaccucg

SEQ ID NO: 24028 - DNA, 21 bp, homo sapiens
tatttctcaaagtggagagaa

SEQ ID NO: 24029 - RNA, 21 nt, RNAi
uuucucaaaguggagagaauu

SEQ ID NO: 24030 - RNA, 21 nt, RNAi
uuaaagaguuucaccucucuu

SEQ ID NO: 24031 - DNA, 21 bp, homo sapiens
tacttgatacattcagatcac

SEQ ID NO: 24032 - RNA, 21 nt, RNAi
cuugauacauucagaucacuu

SEQ ID NO: 24033 - RNA, 21 nt, RNAi
uugaacuauguaagucuagug

SEQ ID NO: 24034 - DNA, 21 bp, homo sapiens
tataggctgataaggtcatta

SEQ ID NO: 24035 - RNA, 21 nt, RNAi
uaggcugauaaggucauuauu

SEQ ID NO: 24036 - RNA, 21 nt, RNAi
uuauccgacuauuccaguaau

SEQ ID NO: 24037 - DNA, 21 bp, homo sapiens
taggctgataaggtcattatc

SEQ ID NO: 24038 - RNA, 21 nt, RNAi
ggcugauaaggucauuaucuu

SEQ ID NO: 24039 - RNA, 21 nt, RNAi
uuccgacuauuccaguaauag

SEQ ID NO: 24040 - DNA, 21 bp, homo sapiens
taaggtcattatcttctccac

SEQ ID NO: 24041 - RNA, 21 nt, RNAi
aggucauuaucuucuccacuu

SEQ ID NO: 24042 - RNA, 21 nt, RNAi
uuuccaguaauagaagaggug

SEQ ID NO: 24043 - DNA, 21 bp, homo sapiens
taatctcaaagcctccttcat

SEQ ID NO: 24044 - RNA, 21 nt, RNAi
aucucaaagccuccuucauuu

SEQ ID NO: 24045 - RNA, 21 nt, RNAi
uuuagaguuucggaggaagua

SEQ ID NO: 24046 - DNA, 21 bp, homo sapiens
tacacctccagagagtggcca

SEQ ID NO: 24047 - RNA, 21 nt, RNAi
caccuccagagaguggccauu

SEQ ID NO: 24048 - RNA, 21 nt, RNAi
uuguggaggucucucaccggu

SEQ ID NO: 24049 - DNA, 21 bp, homo sapiens
taagaggcatttgattcctga

SEQ ID NO: 24050 - RNA, 21 nt, RNAi
agaggcauuugauuccugauu

SEQ ID NO: 24051 - RNA, 21 nt, RNAi
uuucuccguaaacuaaggacu

SEQ ID NO: 24052 - DNA, 21 bp, homo sapiens
tattcattgaaagcactgttc

SEQ ID NO: 24053 - RNA, 21 nt, RNAi
uucauugaaagcacuguucuu

SEQ ID NO: 24054 - RNA, 21 nt, RNAi
uuaaguaacuuucgugacaag

SEQ ID NO: 24055 - DNA, 21 bp, homo sapiens
taaatattccagcagatggaa

SEQ ID NO: 24056 - RNA, 21 nt, RNAi
aauauuccagcagauggaauu

SEQ ID NO: 24057 - RNA, 21 nt, RNAi
uuuuauaaggucgucuaccuu

SEQ ID NO: 24058 - DNA, 21 bp, homo sapiens
taacactgttcttatcatcac

SEQ ID NO: 24059 - RNA, 21 nt, RNAi
acacuguucuuaucaucacuu

SEQ ID NO: 24060 - RNA, 21 nt, RNAi
uuugugacaagaauaguagug

SEQ ID NO: 24061 - DNA, 21 bp, homo sapiens
taaacagcctcacactacaat

SEQ ID NO: 24062 - RNA, 21 nt, RNAi
aacagccucacacuacaauuu

SEQ ID NO: 24063 - RNA, 21 nt, RNAi
uuuugucggagugugauguua

SEQ ID NO: 24064 - DNA, 21 bp, homo sapiens
tacaatgaagcttggagaaca

SEQ ID NO: 24065 - RNA, 21 nt, RNAi
caaugaagcuuggagaacauu

SEQ ID NO: 24066 - RNA, 21 nt, RNAi
uuguuacuucgaaccucuugu

SEQ ID NO: 24067 - DNA, 21 bp, homo sapiens
tataaatccaggctggctcct

SEQ ID NO: 24068 - RNA, 21 nt, RNAi
uaaauccaggcuggcuccuuu

SEQ ID NO: 24069 - RNA, 21 nt, RNAi
uuauuuagguccgaccgagga

SEQ ID NO: 24070 - DNA, 21 bp, homo sapiens
taaatccaggctggctcctca

SEQ ID NO: 24071 - RNA, 21 nt, RNAi
aauccaggcuggcuccucauu

SEQ ID NO: 24072 - RNA, 21 nt, RNAi
uuuuagguccgaccgaggagu

SEQ ID NO: 24073 - DNA, 21 bp, homo sapiens
taagagacaccagcattgcag

SEQ ID NO: 24074 - RNA, 21 nt, RNAi
agagacaccagcauugcaguu

SEQ ID NO: 24075 - RNA, 21 nt, RNAi
uuucucuguggucguaacguc

SEQ ID NO: 24076 - DNA, 21 bp, homo sapiens
tagaattagatccaacagctg

SEQ ID NO: 24077 - RNA, 21 nt, RNAi
gaauuagauccaacagcuguu

SEQ ID NO: 24078 - RNA, 21 nt, RNAi
uucuuaaucuagguugucgac

SEQ ID NO: 24079 - DNA, 21 bp, homo sapiens
tagatccaacagctggctctt

SEQ ID NO: 24080 - RNA, 21 nt, RNAi
gauccaacagcuggcucuuuu

SEQ ID NO: 24081 - RNA, 21 nt, RNAi
uucuagguugucgaccgagaa

SEQ ID NO: 24082 - DNA, 21 bp, homo sapiens
tagaaatgtattgaggagtct

SEQ ID NO: 24083 - RNA, 21 nt, RNAi
gaaauguauugaggagucuuu

SEQ ID NO: 24084 - RNA, 21 nt, RNAi
uucuuuacauaacuccucaga

SEQ ID NO: 24085 - DNA, 21 bp, homo sapiens
tattgaggagtctctacttca

SEQ ID NO: 24086 - RNA, 21 nt, RNAi
uugaggagucucuacuucauu

SEQ ID NO: 24087 - RNA, 21 nt, RNAi
uuaacuccucagagaugaagu

SEQ ID NO: 24088 - DNA, 21 bp, homo sapiens
tacttcaaggaagagagccta

SEQ ID NO: 24089 - RNA, 21 nt, RNAi
cuucaaggaagagagccuauu

SEQ ID NO: 24090 - RNA, 21 nt, RNAi
uugaaguuccuucucucggau

SEQ ID NO: 24091 - DNA, 21 bp, homo sapiens
tatctcagatcactgcaacct

SEQ ID NO: 24092 - RNA, 21 nt, RNAi
ucucagaucacugcaaccuuu

SEQ ID NO: 24093 - RNA, 21 nt, RNAi
uuagagucuagugacguugga

SEQ ID NO: 24094 - DNA, 21 bp, homo sapiens
taggattacaggcaccagaca

SEQ ID NO: 24095 - RNA, 21 nt, RNAi
ggauuacaggcaccagacauu

SEQ ID NO: 24096 - RNA, 21 nt, RNAi
uuccuaauguccguggucugu

SEQ ID NO: 24097 - DNA, 21 bp, homo sapiens
tacaggcaccagacaccaagc

SEQ ID NO: 24098 - RNA, 21 nt, RNAi
caggcaccagacaccaagcuu

SEQ ID NO: 24099 - RNA, 21 nt, RNAi
uuguccguggucugugguucg

SEQ ID NO: 24100 - DNA, 21 bp, homo sapiens
tagtcttgaactcctgacctt

SEQ ID NO: 24101 - RNA, 21 nt, RNAi
gucuugaacuccugaccuuuu

SEQ ID NO: 24102 - RNA, 21 nt, RNAi
uucagaacuugaggacuggaa

SEQ ID NO: 24103 - DNA, 21 bp, homo sapiens
tacaggcgtaagccaccacat

SEQ ID NO: 24104 - RNA, 21 nt, RNAi
caggcguaagccaccacauuu

SEQ ID NO: 24105 - RNA, 21 nt, RNAi
uuguccgcauucgguggugua

SEQ ID NO: 24106 - DNA, 21 bp, homo sapiens
taagccaccacatccagctgc

SEQ ID NO: 24107 - RNA, 21 nt, RNAi
agccaccacauccagcugcuu

SEQ ID NO: 24108 - RNA, 21 nt, RNAi
uuucggugguguaggucgacg

SEQ ID NO: 24109 - DNA, 21 bp, homo sapiens
tataggaaccgttggaaactg

SEQ ID NO: 24110 - RNA, 21 nt, RNAi
uaggaaccguuggaaacuguu

SEQ ID NO: 24111 - RNA, 21 nt, RNAi
uuauccuuggcaaccuuugac

SEQ ID NO: 24112 - DNA, 21 bp, homo sapiens
taggaaccgttggaaactgga

SEQ ID NO: 24113 - RNA, 21 nt, RNAi
ggaaccguuggaaacuggauu

SEQ ID NO: 24114 - RNA, 21 nt, RNAi
uuccuuggcaaccuuugaccu

SEQ ID NO: 24115 - DNA, 21 bp, homo sapiens
taagtacagcatatcagaatg

SEQ ID NO: 24116 - RNA, 21 nt, RNAi
aguacagcauaucagaauguu

SEQ ID NO: 24117 - RNA, 21 nt, RNAi
uuucaugucguauagucuuac

SEQ ID NO: 24118 - DNA, 21 bp, homo sapiens
taatcctgtgtgtgaccaaca

SEQ ID NO: 24119 - RNA, 21 nt, RNAi
auccugugugugaccaacauu

SEQ ID NO: 24120 - RNA, 21 nt, RNAi
uuuaggacacacacugguugu

SEQ ID NO: 24121 - DNA, 21 bp, homo sapiens
tattcctattgatggtgtgat

SEQ ID NO: 24122 - RNA, 21 nt, RNAi
uuccuauugauggugugauuu

SEQ ID NO: 24123 - RNA, 21 nt, RNAi
uuaaggauaacuaccacacua

SEQ ID NO: 24124 - DNA, 21 bp, homo sapiens
tattgatggtgtgatcatgct

SEQ ID NO: 24125 - RNA, 21 nt, RNAi
uugauggugugaucaugcuuu

SEQ ID NO: 24126 - RNA, 21 nt, RNAi
uuaacuaccacacuaguacga

SEQ ID NO: 24127 - DNA, 21 bp, homo sapiens
tattggctgtaatgcagccag

SEQ ID NO: 24128 - RNA, 21 nt, RNAi
uuggcuguaaugcagccaguu

SEQ ID NO: 24129 - RNA, 21 nt, RNAi
uuaaccgacauuacgucgguc

SEQ ID NO: 24130 - DNA, 21 bp, homo sapiens
taatgcagccagcattacatg

SEQ ID NO: 24131 - RNA, 21 nt, RNAi
augcagccagcauuacauguu

SEQ ID NO: 24132 - RNA, 21 nt, RNAi
uuuacgucggucguaauguac

SEQ ID NO: 24133 - DNA, 21 bp, homo sapiens
tacatgtcagcaagcatgcaa

SEQ ID NO: 24134 - RNA, 21 nt, RNAi
caugucagcaagcaugcaauu

SEQ ID NO: 24135 - RNA, 21 nt, RNAi
uuguacagucguucguacguu

SEQ ID NO: 24136 - DNA, 21 bp, homo sapiens
tattaaccacagattctgctg

SEQ ID NO: 24137 - RNA, 21 nt, RNAi
uuaaccacagauucugcuguu

SEQ ID NO: 24138 - RNA, 21 nt, RNAi
uuaauuggugucuaagacgac

SEQ ID NO: 24139 - DNA, 21 bp, homo sapiens
taaccacagattctgctgcct

SEQ ID NO: 24140 - RNA, 21 nt, RNAi
accacagauucugcugccuuu

SEQ ID NO: 24141 - RNA, 21 nt, RNAi
uuuggugucuaagacgacgga

SEQ ID NO: 24142 - DNA, 21 bp, homo sapiens
tactttatgacctagaaggaa

SEQ ID NO: 24143 - RNA, 21 nt, RNAi
cuuuaugaccuagaaggaauu

SEQ ID NO: 24144 - RNA, 21 nt, RNAi
uugaaauacuggaucuuccuu

SEQ ID NO: 24145 - DNA, 21 bp, homo sapiens
tatgacctagaaggaaactgt

SEQ ID NO: 24146 - RNA, 21 nt, RNAi
ugaccuagaaggaaacuguuu

SEQ ID NO: 24147 - RNA, 21 nt, RNAi
uuacuggaucuuccuuugaca

SEQ ID NO: 24148 - DNA, 21 bp, homo sapiens
tagaaggaaactgtcgtgtgt

SEQ ID NO: 24149 - RNA, 21 nt, RNAi
gaaggaaacugucguguguuu

SEQ ID NO: 24150 - RNA, 21 nt, RNAi
uucuuccuuugacagcacaca

SEQ ID NO: 24151 - DNA, 21 bp, homo sapiens
tatacattgccatcaactttg

SEQ ID NO: 24152 - RNA, 21 nt, RNAi
uacauugccaucaacuuuguu

SEQ ID NO: 24153 - RNA, 21 nt, RNAi
uuauguaacgguaguugaaac

SEQ ID NO: 24154 - DNA, 21 bp, homo sapiens
tacattgccatcaactttgtt

SEQ ID NO: 24155 - RNA, 21 nt, RNAi
cauugccaucaacuuuguuuu

SEQ ID NO: 24156 - RNA, 21 nt, RNAi
uuguaacgguaguugaaacaa

SEQ ID NO: 24157 - DNA, 21 bp, homo sapiens
taaagtcctttcagcaagttc

SEQ ID NO: 24158 - RNA, 21 nt, RNAi
aaguccuuucagcaaguucuu

SEQ ID NO: 24159 - RNA, 21 nt, RNAi
uuuucaggaaagucguucaag

SEQ ID NO: 24160 - DNA, 21 bp, homo sapiens
taattcaggattcttcagatg

SEQ ID NO: 24161 - RNA, 21 nt, RNAi
auucaggauucuucagauguu

SEQ ID NO: 24162 - RNA, 21 nt, RNAi
uuuaaguccuaagaagucuac

SEQ ID NO: 24163 - DNA, 21 bp, homo sapiens
tatctcagaacactagctctt

SEQ ID NO: 24164 - RNA, 21 nt, RNAi
ucucagaacacuagcucuuuu

SEQ ID NO: 24165 - RNA, 21 nt, RNAi
uuagagucuugugaucgagaa

SEQ ID NO: 24166 - DNA, 21 bp, homo sapiens
tatgtagaccagagaagtggt

SEQ ID NO: 24167 - RNA, 21 nt, RNAi
uguagaccagagaagugguuu

SEQ ID NO: 24168 - RNA, 21 nt, RNAi
uuacaucuggucucuucacca

SEQ ID NO: 24169 - DNA, 21 bp, homo sapiens
tagaccagagaagtggtagag

SEQ ID NO: 24170 - RNA, 21 nt, RNAi
gaccagagaagugguagaguu

SEQ ID NO: 24171 - RNA, 21 nt, RNAi
uucuggucucuucaccaucuc

SEQ ID NO: 24172 - DNA, 21 bp, homo sapiens
tagagaggatgttgagagaag

SEQ ID NO: 24173 - RNA, 21 nt, RNAi
gagaggauguugagagaaguu

SEQ ID NO: 24174 - RNA, 21 nt, RNAi
uucucuccuacaacucucuuc

SEQ ID NO: 24175 - DNA, 21 bp, homo sapiens
caaatgaccaggactttgccg

SEQ ID NO: 24176 - RNA, 21 nt, RNAi
aaugaccaggacuuugccguu

SEQ ID NO: 24177 - RNA, 21 nt, RNAi
uuuuacugguccugaaacggc

SEQ ID NO: 24178 - DNA, 21 bp, homo sapiens
caggactttgccgtctccttt

SEQ ID NO: 24179 - RNA, 21 nt, RNAi
ggacuuugccgucuccuuuuu

SEQ ID NO: 24180 - RNA, 21 nt, RNAi
uuccugaaacggcagaggaaa

SEQ ID NO: 24181 - DNA, 21 bp, homo sapiens
aagttcgagatggagagtgag

SEQ ID NO: 24182 - RNA, 21 nt, RNAi
guucgagauggagagugaguu

SEQ ID NO: 24183 - RNA, 21 nt, RNAi
uucaagcucuaccucucacuc

SEQ ID NO: 24184 - DNA, 21 bp, homo sapiens
aacttcaagatcgtcacggag

SEQ ID NO: 24185 - RNA, 21 nt, RNAi
cuucaagaucgucacggaguu

SEQ ID NO: 24186 - RNA, 21 nt, RNAi
uugaaguucuagcagugccuc

SEQ ID NO: 24187 - DNA, 21 bp, homo sapiens
aagatcgtcacggaggtgcag

SEQ ID NO: 24188 - RNA, 21 nt, RNAi
gaucgucacggaggugcaguu

SEQ ID NO: 24189 - RNA, 21 nt, RNAi
uucuagcagugccuccacguc

SEQ ID NO: 24190 - DNA, 21 bp, homo sapiens
aacaagttcactgttggcaag

SEQ ID NO: 24191 - RNA, 21 nt, RNAi
caaguucacuguuggcaaguu

SEQ ID NO: 24192 - RNA, 21 nt, RNAi
uuguucaagugacaaccguuc

SEQ ID NO: 24193 - DNA, 21 bp, homo sapiens
aagttcactgttggcaaggaa

SEQ ID NO: 24194 - RNA, 21 nt, RNAi
guucacuguuggcaaggaauu

SEQ ID NO: 24195 - RNA, 21 nt, RNAi
uucaagugacaaccguuccuu

SEQ ID NO: 24196 - DNA, 21 bp, homo sapiens
aaggaaagcaacatacagaca

SEQ ID NO: 24197 - RNA, 21 nt, RNAi
ggaaagcaacauacagacauu

SEQ ID NO: 24198 - RNA, 21 nt, RNAi
uuccuuucguuguaugucugu

SEQ ID NO: 24199 - DNA, 21 bp, homo sapiens
aaagcaacatacagacaatgg

SEQ ID NO: 24200 - RNA, 21 nt, RNAi
agcaacauacagacaaugguu

SEQ ID NO: 24201 - RNA, 21 nt, RNAi
uuucguuguaugucuguuacc

SEQ ID NO: 24202 - DNA, 21 bp, homo sapiens
aagacgttcaaggccactgtg

SEQ ID NO: 24203 - RNA, 21 nt, RNAi
gacguucaaggccacuguguu

SEQ ID NO: 24204 - RNA, 21 nt, RNAi
uucugcaaguuccggugacac

SEQ ID NO: 24205 - DNA, 21 bp, homo sapiens
aaggccactgtgcagatggag

SEQ ID NO: 24206 - RNA, 21 nt, RNAi
ggccacugugcagauggaguu

SEQ ID NO: 24207 - RNA, 21 nt, RNAi
uuccggugacacgucuaccuc

SEQ ID NO: 24208 - DNA, 21 bp, homo sapiens
aactatcaccagacctcagag

SEQ ID NO: 24209 - RNA, 21 nt, RNAi
cuaucaccagaccucagaguu

SEQ ID NO: 24210 - RNA, 21 nt, RNAi
uugauaguggucuggagucuc

SEQ ID NO: 24211 - DNA, 21 bp, homo sapiens
aagctggtggaggtctccacc

SEQ ID NO: 24212 - RNA, 21 nt, RNAi
gcugguggaggucuccaccuu

SEQ ID NO: 24213 - RNA, 21 nt, RNAi
uucgaccaccuccagaggugg

SEQ ID NO: 24214 - DNA, 21 bp, homo sapiens
aagagactggcctaagcagcc

SEQ ID NO: 24215 - RNA, 21 nt, RNAi
gagacuggccuaagcagccuu

SEQ ID NO: 24216 - RNA, 21 nt, RNAi
uucucugaccggauucgucgg

SEQ ID NO: 24217 - DNA, 21 bp, homo sapiens
cagcagcatggctttcaccgg

SEQ ID NO: 24218 - RNA, 21 nt, RNAi
gcagcauggcuuucaccgguu

SEQ ID NO: 24219 - RNA, 21 nt, RNAi
uucgucguaccgaaaguggcc

SEQ ID NO: 24220 - DNA, 21 bp, homo sapiens
cagcatggctttcaccggcaa

SEQ ID NO: 24221 - RNA, 21 nt, RNAi
gcauggcuuucaccggcaauu

SEQ ID NO: 24222 - RNA, 21 nt, RNAi
uucguaccgaaaguggccguu

SEQ ID NO: 24223 - DNA, 21 bp, homo sapiens
catggctttcaccggcaagtt

SEQ ID NO: 24224 - RNA, 21 nt, RNAi
uggcuuucaccggcaaguuuu

SEQ ID NO: 24225 - RNA, 21 nt, RNAi
uuaccgaaaguggccguucaa

SEQ ID NO: 24226 - DNA, 21 bp, homo sapiens
caccggcaagttcgagatgga

SEQ ID NO: 24227 - RNA, 21 nt, RNAi
ccggcaaguucgagauggauu

SEQ ID NO: 24228 - RNA, 21 nt, RNAi
uuggccguucaagcucuaccu

SEQ ID NO: 24229 - DNA, 21 bp, homo sapiens
caagttcgagatggagagtga

SEQ ID NO: 24230 - RNA, 21 nt, RNAi
aguucgagauggagagugauu

SEQ ID NO: 24231 - RNA, 21 nt, RNAi
uuucaagcucuaccucucacu

SEQ ID NO: 24232 - DNA, 21 bp, homo sapiens
caacttcaagatcgtcacgga

SEQ ID NO: 24233 - RNA, 21 nt, RNAi
acuucaagaucgucacggauu

SEQ ID NO: 24234 - RNA, 21 nt, RNAi
uuugaaguucuagcagugccu

SEQ ID NO: 24235 - DNA, 21 bp, homo sapiens
caagatcgtcacggaggtgca

SEQ ID NO: 24236 - RNA, 21 nt, RNAi
agaucgucacggaggugcauu

SEQ ID NO: 24237 - RNA, 21 nt, RNAi
uuucuagcagugccuccacgu

SEQ ID NO: 24238 - DNA, 21 bp, homo sapiens
cacaccatgaccaacaagttc

SEQ ID NO: 24239 - RNA, 21 nt, RNAi
caccaugaccaacaaguucuu

SEQ ID NO: 24240 - RNA, 21 nt, RNAi
uugugguacugguuguucaag

SEQ ID NO: 24241 - DNA, 21 bp, homo sapiens
caccatgaccaacaagttcac

SEQ ID NO: 24242 - RNA, 21 nt, RNAi
ccaugaccaacaaguucacuu

SEQ ID NO: 24243 - RNA, 21 nt, RNAi
uugguacugguuguucaagug

SEQ ID NO: 24244 - DNA, 21 bp, homo sapiens
catgaccaacaagttcactgt

SEQ ID NO: 24245 - RNA, 21 nt, RNAi
ugaccaacaaguucacuguuu

SEQ ID NO: 24246 - RNA, 21 nt, RNAi
uuacugguuguucaagugaca

SEQ ID NO: 24247 - DNA, 21 bp, homo sapiens
caacaagttcactgttggcaa

SEQ ID NO: 24248 - RNA, 21 nt, RNAi
acaaguucacuguuggcaauu

SEQ ID NO: 24249 - RNA, 21 nt, RNAi
uuuguucaagugacaaccguu

SEQ ID NO: 24250 - DNA, 21 bp, homo sapiens
caagttcactgttggcaagga

SEQ ID NO: 24251 - RNA, 21 nt, RNAi
aguucacuguuggcaaggauu

SEQ ID NO: 24252 - RNA, 21 nt, RNAi
uuucaagugacaaccguuccu

SEQ ID NO: 24253 - DNA, 21 bp, homo sapiens
cactgttggcaaggaaagcaa

SEQ ID NO: 24254 - RNA, 21 nt, RNAi
cuguuggcaaggaaagcaauu

SEQ ID NO: 24255 - RNA, 21 nt, RNAi
uugacaaccguuccuuucguu

SEQ ID NO: 24256 - DNA, 21 bp, homo sapiens
caaggaaagcaacatacagac

SEQ ID NO: 24257 - RNA, 21 nt, RNAi
aggaaagcaacauacagacuu

SEQ ID NO: 24258 - RNA, 21 nt, RNAi
uuuccuuucguuguaugucug

SEQ ID NO: 24259 - DNA, 21 bp, homo sapiens
caagacgttcaaggccactgt

SEQ ID NO: 24260 - RNA, 21 nt, RNAi
agacguucaaggccacuguuu

SEQ ID NO: 24261 - RNA, 21 nt, RNAi
uuucugcaaguuccggugaca

SEQ ID NO: 24262 - DNA, 21 bp, homo sapiens
caaggccactgtgcagatgga

SEQ ID NO: 24263 - RNA, 21 nt, RNAi
aggccacugugcagauggauu

SEQ ID NO: 24264 - RNA, 21 nt, RNAi
uuuccggugacacgucuaccu

SEQ ID NO: 24265 - DNA, 21 bp, homo sapiens
caactatcaccagacctcaga

SEQ ID NO: 24266 - RNA, 21 nt, RNAi
acuaucaccagaccucagauu

SEQ ID NO: 24267 - RNA, 21 nt, RNAi
uuugauaguggucuggagucu

SEQ ID NO: 24268 - DNA, 21 bp, homo sapiens
caccagacctcagagatcgtg

SEQ ID NO: 24269 - RNA, 21 nt, RNAi
ccagaccucagagaucguguu

SEQ ID NO: 24270 - RNA, 21 nt, RNAi
uuggucuggagucucuagcac

SEQ ID NO: 24271 - DNA, 21 bp, homo sapiens
caagctggtggaggtctccac

SEQ ID NO: 24272 - RNA, 21 nt, RNAi
agcugguggaggucuccacuu

SEQ ID NO: 24273 - RNA, 21 nt, RNAi
uuucgaccaccuccagaggug

SEQ ID NO: 24274 - DNA, 21 bp, homo sapiens
caccatcggaggcgtgaccta

SEQ ID NO: 24275 - RNA, 21 nt, RNAi
ccaucggaggcgugaccuauu

SEQ ID NO: 24276 - RNA, 21 nt, RNAi
uugguagccuccgcacuggau

SEQ ID NO: 24277 - DNA, 21 bp, homo sapiens
catcggaggcgtgacctatga

SEQ ID NO: 24278 - RNA, 21 nt, RNAi
ucggaggcgugaccuaugauu

SEQ ID NO: 24279 - RNA, 21 nt, RNAi
uuagccuccgcacuggauacu

SEQ ID NO: 24280 - DNA, 21 bp, homo sapiens
caagagactggcctaagcagc

SEQ ID NO: 24281 - RNA, 21 nt, RNAi
agagacuggccuaagcagcuu

SEQ ID NO: 24282 - RNA, 21 nt, RNAi
uuucucugaccggauucgucg

SEQ ID NO: 24283 - DNA, 21 bp, homo sapiens
gagatggagagtgagaagaat

SEQ ID NO: 24284 - RNA, 21 nt, RNAi
gauggagagugagaagaauuu

SEQ ID NO: 24285 - RNA, 21 nt, RNAi
uucuaccucucacucuucuua

SEQ ID NO: 24286 - DNA, 21 bp, homo sapiens
gatggagagtgagaagaatta

SEQ ID NO: 24287 - RNA, 21 nt, RNAi
uggagagugagaagaauuauu

SEQ ID NO: 24288 - RNA, 21 nt, RNAi
uuaccucucacucuucuuaau

SEQ ID NO: 24289 - DNA, 21 bp, homo sapiens
gagagtgagaagaattatgat

SEQ ID NO: 24290 - RNA, 21 nt, RNAi
gagugagaagaauuaugauuu

SEQ ID NO: 24291 - RNA, 21 nt, RNAi
uucucacucuucuuaauacua

SEQ ID NO: 24292 - DNA, 21 bp, homo sapiens
gagtgagaagaattatgatga

SEQ ID NO: 24293 - RNA, 21 nt, RNAi
gugagaagaauuaugaugauu

SEQ ID NO: 24294 - RNA, 21 nt, RNAi
uucacucuucuuaauacuacu

SEQ ID NO: 24295 - DNA, 21 bp, homo sapiens
gagaagaattatgatgagttc

SEQ ID NO: 24296 - RNA, 21 nt, RNAi
gaagaauuaugaugaguucuu

SEQ ID NO: 24297 - RNA, 21 nt, RNAi
uucuucuuaauacuacucaag

SEQ ID NO: 24298 - DNA, 21 bp, homo sapiens
gatgagttcatgaagctcctt

SEQ ID NO: 24299 - RNA, 21 nt, RNAi
ugaguucaugaagcuccuuuu

SEQ ID NO: 24300 - RNA, 21 nt, RNAi
uuacucaaguacuucgaggaa

SEQ ID NO: 24301 - DNA, 21 bp, homo sapiens
gatctccagcgatgtaatcga

SEQ ID NO: 24302 - RNA, 21 nt, RNAi
ucuccagcgauguaaucgauu

SEQ ID NO: 24303 - RNA, 21 nt, RNAi
uuagaggucgcuacauuagcu

SEQ ID NO: 24304 - DNA, 21 bp, homo sapiens
gatcgtcacggaggtgcagca

SEQ ID NO: 24305 - RNA, 21 nt, RNAi
ucgucacggaggugcagcauu

SEQ ID NO: 24306 - RNA, 21 nt, RNAi
uuagcagugccuccacgucgu

SEQ ID NO: 24307 - DNA, 21 bp, homo sapiens
gaccaacaagttcactgttgg

SEQ ID NO: 24308 - RNA, 21 nt, RNAi
ccaacaaguucacuguugguu

SEQ ID NO: 24309 - RNA, 21 nt, RNAi
uugguuguucaagugacaacc

SEQ ID NO: 24310 - DNA, 21 bp, homo sapiens
gaaagcaacatacagacaatg

SEQ ID NO: 24311 - RNA, 21 nt, RNAi
aagcaacauacagacaauguu

SEQ ID NO: 24312 - RNA, 21 nt, RNAi
uuuucguuguaugucuguuac

SEQ ID NO: 24313 - DNA, 21 bp, homo sapiens
gacgttcaaggccactgtgca

SEQ ID NO: 24314 - RNA, 21 nt, RNAi
cguucaaggccacugugcauu

SEQ ID NO: 24315 - RNA, 21 nt, RNAi
uugcaaguuccggugacacgu

SEQ ID NO: 24316 - DNA, 21 bp, homo sapiens
gacaagctggtggaggtctcc

SEQ ID NO: 24317 - RNA, 21 nt, RNAi
caagcugguggaggucuccuu

SEQ ID NO: 24318 - RNA, 21 nt, RNAi
uuguucgaccaccuccagagg

SEQ ID NO: 24319 - DNA, 21 bp, homo sapiens
gacctatgagcgcgtgagcaa

SEQ ID NO: 24320 - RNA, 21 nt, RNAi
ccuaugagcgcgugagcaauu

SEQ ID NO: 24321 - RNA, 21 nt, RNAi
uuggauacucgcgcacucguu

SEQ ID NO: 24322 - DNA, 21 bp, homo sapiens
gagcgcgtgagcaagagactg

SEQ ID NO: 24323 - RNA, 21 nt, RNAi
gcgcgugagcaagagacuguu

SEQ ID NO: 24324 - RNA, 21 nt, RNAi
uucgcgcacucguucucugac

SEQ ID NO: 24325 - DNA, 21 bp, homo sapiens
gagcaagagactggcctaagc

SEQ ID NO: 24326 - RNA, 21 nt, RNAi
gcaagagacuggccuaagcuu

SEQ ID NO: 24327 - RNA, 21 nt, RNAi
uucguucucugaccggauucg

SEQ ID NO: 24328 - DNA, 21 bp, homo sapiens
gagactggcctaagcagccag

SEQ ID NO: 24329 - RNA, 21 nt, RNAi
gacuggccuaagcagccaguu

SEQ ID NO: 24330 - RNA, 21 nt, RNAi
uucugaccggauucgucgguc

SEQ ID NO: 24331 - DNA, 21 bp, homo sapiens
tatgatgagttcatgaagctc

SEQ ID NO: 24332 - RNA, 21 nt, RNAi
ugaugaguucaugaagcucuu

SEQ ID NO: 24333 - RNA, 21 nt, RNAi
uuacuacucaaguacuucgag

SEQ ID NO: 24334 - DNA, 21 bp, homo sapiens
tatcaccagacctcagagatc

SEQ ID NO: 24335 - RNA, 21 nt, RNAi
ucaccagaccucagagaucuu

SEQ ID NO: 24336 - RNA, 21 nt, RNAi
uuaguggucuggagucucuag

SEQ ID NO: 24337 - DNA, 21 bp, homo sapiens
tatgagcgcgtgagcaagaga

SEQ ID NO: 24338 - RNA, 21 nt, RNAi
ugagcgcgugagcaagagauu

SEQ ID NO: 24339 - RNA, 21 nt, RNAi
uuacucgcgcacucguucucu

SEQ ID NO: 24340 - DNA, 21 bp, homo sapiens
aacttcaagatcgtcacggag

SEQ ID NO: 24341 - RNA, 21 nt, RNAi
cuucaagaucgucacggaguu

SEQ ID NO: 24342 - RNA, 21 nt, RNAi
uugaaguucuagcagugccuc

SEQ ID NO: 24343 - DNA, 21 bp, homo sapiens
aacaagttcactgttggcaag

SEQ ID NO: 24344 - RNA, 21 nt, RNAi
caaguucacuguuggcaaguu

SEQ ID NO: 24345 - RNA, 21 nt, RNAi
uuguucaagugacaaccguuc

SEQ ID NO: 24346 - DNA, 21 bp, homo sapiens
aaggaaagcaacatacagaca

SEQ ID NO: 24347 - RNA, 21 nt, RNAi
ggaaagcaacauacagacauu

SEQ ID NO: 24348 - RNA, 21 nt, RNAi
uuccuuucguuguaugucugu

SEQ ID NO: 24349 - DNA, 21 bp, homo sapiens
aaagcaacatacagacaatgg

SEQ ID NO: 24350 - RNA, 21 nt, RNAi
agcaacauacagacaaugguu

SEQ ID NO: 24351 - RNA, 21 nt, RNAi
uuucguuguaugucuguuacc

SEQ ID NO: 24352 - DNA, 21 bp, homo sapiens
caacaagttcactgttggcaa

SEQ ID NO: 24353 - RNA, 21 nt, RNAi
acaaguucacuguuggcaauu

SEQ ID NO: 24354 - RNA, 21 nt, RNAi
uuuguucaagugacaaccguu

SEQ ID NO: 24355 - DNA, 21 bp, homo sapiens
caaggaaagcaacatacagac

SEQ ID NO: 24356 - RNA, 21 nt, RNAi
aggaaagcaacauacagacuu

SEQ ID NO: 24357 - RNA, 21 nt, RNAi
uuuccuuucguuguaugucug

SEQ ID NO: 24358 - DNA, 21 bp, homo sapiens
caagacgttcaaggccactgt

SEQ ID NO: 24359 - RNA, 21 nt, RNAi
agacguucaaggccacuguuu

SEQ ID NO: 24360 - RNA, 21 nt, RNAi
uuucugcaaguuccggugaca

SEQ ID NO: 24361 - DNA, 21 bp, homo sapiens
caactatcaccagacctcaga

SEQ ID NO: 24362 - RNA, 21 nt, RNAi
acuaucaccagaccucagauu

SEQ ID NO: 24363 - RNA, 21 nt, RNAi
uuugauaguggucuggagucu

SEQ ID NO: 24364 - DNA, 21 bp, homo sapiens
gaaagcaacatacagacaatg

SEQ ID NO: 24365 - RNA, 21 nt, RNAi
aagcaacauacagacaauguu

SEQ ID NO: 24366 - RNA, 21 nt, RNAi
uuuucguuguaugucuguuac

SEQ ID NO: 24367 - DNA, 21 bp, homo sapiens
aacactgagcagatctgttct

SEQ ID NO: 24368 - RNA, 21 nt, RNAi
cacugagcagaucuguucuuu

SEQ ID NO: 24369 - RNA, 21 nt, RNAi
uugugacucgucuagacaaga

SEQ ID NO: 24370 - DNA, 21 bp, homo sapiens
aaaccatgtgctgtaccaaga

SEQ ID NO: 24371 - RNA, 21 nt, RNAi
accaugugcuguaccaagauu

SEQ ID NO: 24372 - RNA, 21 nt, RNAi
uuugguacacgacaugguucu

SEQ ID NO: 24373 - DNA, 21 bp, homo sapiens
aaccatgtgctgtaccaagag

SEQ ID NO: 24374 - RNA, 21 nt, RNAi
ccaugugcuguaccaagaguu

SEQ ID NO: 24375 - RNA, 21 nt, RNAi
uugguacacgacaugguucuc

SEQ ID NO: 24376 - DNA, 21 bp, homo sapiens
aagagtttgctcctggctgct

SEQ ID NO: 24377 - RNA, 21 nt, RNAi
gaguuugcuccuggcugcuuu

SEQ ID NO: 24378 - RNA, 21 nt, RNAi
uucucaaacgaggaccgacga

SEQ ID NO: 24379 - DNA, 21 bp, homo sapiens
aatcagaagcaagcaactttg

SEQ ID NO: 24380 - RNA, 21 nt, RNAi
ucagaagcaagcaacuuuguu

SEQ ID NO: 24381 - RNA, 21 nt, RNAi
uuagucuucguucguugaaac

SEQ ID NO: 24382 - DNA, 21 bp, homo sapiens
aagcaagcaactttgactgct

SEQ ID NO: 24383 - RNA, 21 nt, RNAi
gcaagcaacuuugacugcuuu

SEQ ID NO: 24384 - RNA, 21 nt, RNAi
uucguucguugaaacugacga

SEQ ID NO: 24385 - DNA, 21 bp, homo sapiens
aagcaactttgactgctgtct

SEQ ID NO: 24386 - RNA, 21 nt, RNAi
gcaacuuugacugcugucuuu

SEQ ID NO: 24387 - RNA, 21 nt, RNAi
uucguugaaacugacgacaga

SEQ ID NO: 24388 - DNA, 21 bp, homo sapiens
aactttgactgctgtcttgga

SEQ ID NO: 24389 - RNA, 21 nt, RNAi
cuuugacugcugucuuggauu

SEQ ID NO: 24390 - RNA, 21 nt, RNAi
uugaaacugacgacagaaccu

SEQ ID NO: 24391 - DNA, 21 bp, homo sapiens
aatgaaggctgtgacatcaat

SEQ ID NO: 24392 - RNA, 21 nt, RNAi
ugaaggcugugacaucaauuu

SEQ ID NO: 24393 - RNA, 21 nt, RNAi
uuacuuccgacacuguaguua

SEQ ID NO: 24394 - DNA, 21 bp, homo sapiens
aaggctgtgacatcaatgcta

SEQ ID NO: 24395 - RNA, 21 nt, RNAi
ggcugugacaucaaugcuauu

SEQ ID NO: 24396 - RNA, 21 nt, RNAi
uuccgacacuguaguuacgau

SEQ ID NO: 24397 - DNA, 21 bp, homo sapiens
aatgctatcatctttcacaca

SEQ ID NO: 24398 - RNA, 21 nt, RNAi
ugcuaucaucuuucacacauu

SEQ ID NO: 24399 - RNA, 21 nt, RNAi
uuacgauaguagaaagugugu

SEQ ID NO: 24400 - DNA, 21 bp, homo sapiens
aaagttgtctgtgtgcgcaaa

SEQ ID NO: 24401 - RNA, 21 nt, RNAi
aguugucugugugcgcaaauu

SEQ ID NO: 24402 - RNA, 21 nt, RNAi
uuucaacagacacacgcguuu

SEQ ID NO: 24403 - DNA, 21 bp, homo sapiens
aagttgtctgtgtgcgcaaat

SEQ ID NO: 24404 - RNA, 21 nt, RNAi
guugucugugugcgcaaauuu

SEQ ID NO: 24405 - RNA, 21 nt, RNAi
uucaacagacacacgcguuua

SEQ ID NO: 24406 - DNA, 21 bp, homo sapiens
aaatatattgtgcgtctcctc

SEQ ID NO: 24407 - RNA, 21 nt, RNAi
auauauugugcgucuccucuu

SEQ ID NO: 24408 - RNA, 21 nt, RNAi
uuuauauaacacgcagaggag

SEQ ID NO: 24409 - DNA, 21 bp, homo sapiens
aatatattgtgcgtctcctca

SEQ ID NO: 24410 - RNA, 21 nt, RNAi
uauauugugcgucuccucauu

SEQ ID NO: 24411 - RNA, 21 nt, RNAi
uuauauaacacgcagaggagu

SEQ ID NO: 24412 - DNA, 21 bp, homo sapiens
aagaacagaaagaaccttgct

SEQ ID NO: 24413 - RNA, 21 nt, RNAi
gaacagaaagaaccuugcuuu

SEQ ID NO: 24414 - RNA, 21 nt, RNAi
uucuugucuuucuuggaacga

SEQ ID NO: 24415 - DNA, 21 bp, homo sapiens
aatttgtgcctcactggactt

SEQ ID NO: 24416 - RNA, 21 nt, RNAi
uuugugccucacuggacuuuu

SEQ ID NO: 24417 - RNA, 21 nt, RNAi
uuaaacacggagugaccugaa

SEQ ID NO: 24418 - DNA, 21 bp, homo sapiens
caacactgagcagatctgttc

SEQ ID NO: 24419 - RNA, 21 nt, RNAi
acacugagcagaucuguucuu

SEQ ID NO: 24420 - RNA, 21 nt, RNAi
uuugugacucgucuagacaag

SEQ ID NO: 24421 - DNA, 21 bp, homo sapiens
cactgagcagatctgttcttt

SEQ ID NO: 24422 - RNA, 21 nt, RNAi
cugagcagaucuguucuuuuu

SEQ ID NO: 24423 - RNA, 21 nt, RNAi
uugacucgucuagacaagaaa

SEQ ID NO: 24424 - DNA, 21 bp, homo sapiens
cagatctgttctttgagctaa

SEQ ID NO: 24425 - RNA, 21 nt, RNAi
gaucuguucuuugagcuaauu

SEQ ID NO: 24426 - RNA, 21 nt, RNAi
uucuagacaagaaacucgauu

SEQ ID NO: 24427 - DNA, 21 bp, homo sapiens
catgtgctgtaccaagagttt

SEQ ID NO: 24428 - RNA, 21 nt, RNAi
ugugcuguaccaagaguuuuu

SEQ ID NO: 24429 - RNA, 21 nt, RNAi
uuacacgacaugguucucaaa

SEQ ID NO: 24430 - DNA, 21 bp, homo sapiens
caagagtttgctcctggctgc

SEQ ID NO: 24431 - RNA, 21 nt, RNAi
agaguuugcuccuggcugcuu

SEQ ID NO: 24432 - RNA, 21 nt, RNAi
uuucucaaacgaggaccgacg

SEQ ID NO: 24433 - DNA, 21 bp, homo sapiens
cagtgctgctactccacctct

SEQ ID NO: 24434 - RNA, 21 nt, RNAi
gugcugcuacuccaccucuuu

SEQ ID NO: 24435 - RNA, 21 nt, RNAi
uucacgacgaugagguggaga

SEQ ID NO: 24436 - DNA, 21 bp, homo sapiens
cacctctgcggcgaatcagaa

SEQ ID NO: 24437 - RNA, 21 nt, RNAi
ccucugcggcgaaucagaauu

SEQ ID NO: 24438 - RNA, 21 nt, RNAi
uuggagacgccgcuuagucuu

SEQ ID NO: 24439 - DNA, 21 bp, homo sapiens
cagaagcaagcaactttgact

SEQ ID NO: 24440 - RNA, 21 nt, RNAi
gaagcaagcaacuuugacuuu

SEQ ID NO: 24441 - RNA, 21 nt, RNAi
uucuucguucguugaaacuga

SEQ ID NO: 24442 - DNA, 21 bp, homo sapiens
caagcaactttgactgctgtc

SEQ ID NO: 24443 - RNA, 21 nt, RNAi
agcaacuuugacugcugucuu

SEQ ID NO: 24444 - RNA, 21 nt, RNAi
uuucguugaaacugacgacag

SEQ ID NO: 24445 - DNA, 21 bp, homo sapiens
caactttgactgctgtcttgg

SEQ ID NO: 24446 - RNA, 21 nt, RNAi
acuuugacugcugucuugguu

SEQ ID NO: 24447 - RNA, 21 nt, RNAi
uuugaaacugacgacagaacc

SEQ ID NO: 24448 - DNA, 21 bp, homo sapiens
cacagaccgtattcttcatcc

SEQ ID NO: 24449 - RNA, 21 nt, RNAi
cagaccguauucuucauccuu

SEQ ID NO: 24450 - RNA, 21 nt, RNAi
uugucuggcauaagaaguagg

SEQ ID NO: 24451 - DNA, 21 bp, homo sapiens
cagaccgtattcttcatccta

SEQ ID NO: 24452 - RNA, 21 nt, RNAi
gaccguauucuucauccuauu

SEQ ID NO: 24453 - RNA, 21 nt, RNAi
uucuggcauaagaaguaggau

SEQ ID NO: 24454 - DNA, 21 bp, homo sapiens
cacacggcagctggccaatga

SEQ ID NO: 24455 - RNA, 21 nt, RNAi
cacggcagcuggccaaugauu

SEQ ID NO: 24456 - RNA, 21 nt, RNAi
uugugccgucgaccgguuacu

SEQ ID NO: 24457 - DNA, 21 bp, homo sapiens
cacggcagctggccaatgaag

SEQ ID NO: 24458 - RNA, 21 nt, RNAi
cggcagcuggccaaugaaguu

SEQ ID NO: 24459 - RNA, 21 nt, RNAi
uugccgucgaccgguuacuuc

SEQ ID NO: 24460 - DNA, 21 bp, homo sapiens
cagctggccaatgaaggctgt

SEQ ID NO: 24461 - RNA, 21 nt, RNAi
gcuggccaaugaaggcuguuu

SEQ ID NO: 24462 - RNA, 21 nt, RNAi
uucgaccgguuacuuccgaca

SEQ ID NO: 24463 - DNA, 21 bp, homo sapiens
caatgaaggctgtgacatcaa

SEQ ID NO: 24464 - RNA, 21 nt, RNAi
augaaggcugugacaucaauu

SEQ ID NO: 24465 - RNA, 21 nt, RNAi
uuuacuuccgacacuguaguu

SEQ ID NO: 24466 - DNA, 21 bp, homo sapiens
catcaatgctatcatctttca

SEQ ID NO: 24467 - RNA, 21 nt, RNAi
ucaaugcuaucaucuuucauu

SEQ ID NO: 24468 - RNA, 21 nt, RNAi
uuaguuacgauaguagaaagu

SEQ ID NO: 24469 - DNA, 21 bp, homo sapiens
caatgctatcatctttcacac

SEQ ID NO: 24470 - RNA, 21 nt, RNAi
augcuaucaucuuucacacuu

SEQ ID NO: 24471 - RNA, 21 nt, RNAi
uuuacgauaguagaaagugug

SEQ ID NO: 24472 - DNA, 21 bp, homo sapiens
caagaacagaaagaaccttgc

SEQ ID NO: 24473 - RNA, 21 nt, RNAi
agaacagaaagaaccuugcuu

SEQ ID NO: 24474 - RNA, 21 nt, RNAi
uuucuugucuuucuuggaacg

SEQ ID NO: 24475 - DNA, 21 bp, homo sapiens
cactggacttgtccaattaat

SEQ ID NO: 24476 - RNA, 21 nt, RNAi
cuggacuuguccaauuaauuu

SEQ ID NO: 24477 - RNA, 21 nt, RNAi
uugaccugaacagguuaauua

SEQ ID NO: 24478 - DNA, 21 bp, homo sapiens
catattgcatcatagtttgct

SEQ ID NO: 24479 - RNA, 21 nt, RNAi
uauugcaucauaguuugcuuu

SEQ ID NO: 24480 - RNA, 21 nt, RNAi
uuauaacguaguaucaaacga

SEQ ID NO: 24481 - DNA, 21 bp, homo sapiens
catagtttgctttgtttaagc

SEQ ID NO: 24482 - RNA, 21 nt, RNAi
uaguuugcuuuguuuaagcuu

SEQ ID NO: 24483 - RNA, 21 nt, RNAi
uuaucaaacgaaacaaauucg

SEQ ID NO: 24484 - DNA, 21 bp, homo sapiens
gagcagatctgttctttgagc

SEQ ID NO: 24485 - RNA, 21 nt, RNAi
gcagaucuguucuuugagcuu

SEQ ID NO: 24486 - RNA, 21 nt, RNAi
uucgucuagacaagaaacucg

SEQ ID NO: 24487 - DNA, 21 bp, homo sapiens
gagtttgctcctggctgcttt

SEQ ID NO: 24488 - RNA, 21 nt, RNAi
guuugcuccuggcugcuuuuu

SEQ ID NO: 24489 - RNA, 21 nt, RNAi
uucaaacgaggaccgacgaaa

SEQ ID NO: 24490 - DNA, 21 bp, homo sapiens
gatgtcagtgctgctactcca

SEQ ID NO: 24491 - RNA, 21 nt, RNAi
ugucagugcugcuacuccauu

SEQ ID NO: 24492 - RNA, 21 nt, RNAi
uuacagucacgacgaugaggu

SEQ ID NO: 24493 - DNA, 21 bp, homo sapiens
gaatcagaagcaagcaacttt

SEQ ID NO: 24494 - RNA, 21 nt, RNAi
aucagaagcaagcaacuuuuu

SEQ ID NO: 24495 - RNA, 21 nt, RNAi
uuuagucuucguucguugaaa

SEQ ID NO: 24496 - DNA, 21 bp, homo sapiens
gaagcaagcaactttgactgc

SEQ ID NO: 24497 - RNA, 21 nt, RNAi
agcaagcaacuuugacugcuu

SEQ ID NO: 24498 - RNA, 21 nt, RNAi
uuucguucguugaaacugacg

SEQ ID NO: 24499 - DNA, 21 bp, homo sapiens
gactgctgtcttggatacaca

SEQ ID NO: 24500 - RNA, 21 nt, RNAi
cugcugucuuggauacacauu

SEQ ID NO: 24501 - RNA, 21 nt, RNAi
uugacgacagaaccuaugugu

SEQ ID NO: 24502 - DNA, 21 bp, homo sapiens
gatacacagaccgtattcttc

SEQ ID NO: 24503 - RNA, 21 nt, RNAi
uacacagaccguauucuucuu

SEQ ID NO: 24504 - RNA, 21 nt, RNAi
uuaugugucuggcauaagaag

SEQ ID NO: 24505 - DNA, 21 bp, homo sapiens
gaccgtattcttcatcctaaa

SEQ ID NO: 24506 - RNA, 21 nt, RNAi
ccguauucuucauccuaaauu

SEQ ID NO: 24507 - RNA, 21 nt, RNAi
uuggcauaagaaguaggauuu

SEQ ID NO: 24508 - DNA, 21 bp, homo sapiens
gaaggctgtgacatcaatgct

SEQ ID NO: 24509 - RNA, 21 nt, RNAi
aggcugugacaucaaugcuuu

SEQ ID NO: 24510 - RNA, 21 nt, RNAi
uuuccgacacuguaguuacga

SEQ ID NO: 24511 - DNA, 21 bp, homo sapiens
gacatcaatgctatcatcttt

SEQ ID NO: 24512 - RNA, 21 nt, RNAi
caucaaugcuaucaucuuuuu

SEQ ID NO: 24513 - RNA, 21 nt, RNAi
uuguaguuacgauaguagaaa

SEQ ID NO: 24514 - DNA, 21 bp, homo sapiens
gaaatatattgtgcgtctcct

SEQ ID NO: 24515 - RNA, 21 nt, RNAi
aauauauugugcgucuccuuu

SEQ ID NO: 24516 - RNA, 21 nt, RNAi
uuuuauauaacacgcagagga

SEQ ID NO: 24517 - DNA, 21 bp, homo sapiens
gaacagaaagaaccttgctgg

SEQ ID NO: 24518 - RNA, 21 nt, RNAi
acagaaagaaccuugcugguu

SEQ ID NO: 24519 - RNA, 21 nt, RNAi
uuugucuuucuuggaacgacc

SEQ ID NO: 24520 - DNA, 21 bp, homo sapiens
gaggtttcacttgcacatcat

SEQ ID NO: 24521 - RNA, 21 nt, RNAi
gguuucacuugcacaucauuu

SEQ ID NO: 24522 - RNA, 21 nt, RNAi
uuccaaagugaacguguagua

SEQ ID NO: 24523 - DNA, 21 bp, homo sapiens
gacttgtccaattaatgaagt

SEQ ID NO: 24524 - RNA, 21 nt, RNAi
cuuguccaauuaaugaaguuu

SEQ ID NO: 24525 - RNA, 21 nt, RNAi
uugaacagguuaauuacuuca

SEQ ID NO: 24526 - DNA, 21 bp, homo sapiens
gaagttgattcatattgcatc

SEQ ID NO: 24527 - RNA, 21 nt, RNAi
aguugauucauauugcaucuu

SEQ ID NO: 24528 - RNA, 21 nt, RNAi
uuucaacuaaguauaacguag

SEQ ID NO: 24529 - DNA, 21 bp, homo sapiens
gattatatggactttcttgca

SEQ ID NO: 24530 - RNA, 21 nt, RNAi
uuauauggacuuucuugcauu

SEQ ID NO: 24531 - RNA, 21 nt, RNAi
uuaauauaccugaaagaacgu

SEQ ID NO: 24532 - DNA, 21 bp, homo sapiens
gactttcttgcaagcaacaag

SEQ ID NO: 24533 - RNA, 21 nt, RNAi
cuuucuugcaagcaacaaguu

SEQ ID NO: 24534 - RNA, 21 nt, RNAi
uugaaagaacguucguuguuc

SEQ ID NO: 24535 - DNA, 21 bp, homo sapiens
tactcaacactgagcagatct

SEQ ID NO: 24536 - RNA, 21 nt, RNAi
cucaacacugagcagaucuuu

SEQ ID NO: 24537 - RNA, 21 nt, RNAi
uugaguugugacucgucuaga

SEQ ID NO: 24538 - DNA, 21 bp, homo sapiens
taccaagagtttgctcctggc

SEQ ID NO: 24539 - RNA, 21 nt, RNAi
ccaagaguuugcuccuggcuu

SEQ ID NO: 24540 - RNA, 21 nt, RNAi
uugguucucaaacgaggaccg

SEQ ID NO: 24541 - DNA, 21 bp, homo sapiens
tactccacctctgcggcgaat

SEQ ID NO: 24542 - RNA, 21 nt, RNAi
cuccaccucugcggcgaauuu

SEQ ID NO: 24543 - RNA, 21 nt, RNAi
uugagguggagacgccgcuua

SEQ ID NO: 24544 - DNA, 21 bp, homo sapiens
tacacagaccgtattcttcat

SEQ ID NO: 24545 - RNA, 21 nt, RNAi
cacagaccguauucuucauuu

SEQ ID NO: 24546 - RNA, 21 nt, RNAi
uugugucuggcauaagaagua

SEQ ID NO: 24547 - DNA, 21 bp, homo sapiens
tatattgtgcgtctcctcagt

SEQ ID NO: 24548 - RNA, 21 nt, RNAi
uauugugcgucuccucaguuu

SEQ ID NO: 24549 - RNA, 21 nt, RNAi
uuauaacacgcagaggaguca

SEQ ID NO: 24550 - DNA, 21 bp, homo sapiens
tattgtgcgtctcctcagtaa

SEQ ID NO: 24551 - RNA, 21 nt, RNAi
uugugcgucuccucaguaauu

SEQ ID NO: 24552 - RNA, 21 nt, RNAi
uuaacacgcagaggagucauu

SEQ ID NO: 24553 - DNA, 21 bp, homo sapiens
tagtgcttatctaatttgtgc

SEQ ID NO: 24554 - RNA, 21 nt, RNAi
gugcuuaucuaauuugugcuu

SEQ ID NO: 24555 - RNA, 21 nt, RNAi
uucacgaauagauuaaacacg

SEQ ID NO: 24556 - DNA, 21 bp, homo sapiens
tatctaatttgtgcctcactg

SEQ ID NO: 24557 - RNA, 21 nt, RNAi
ucuaauuugugccucacuguu

SEQ ID NO: 24558 - RNA, 21 nt, RNAi
uuagauuaaacacggagugac

SEQ ID NO: 24559 - DNA, 21 bp, homo sapiens
taatttgtgcctcactggact

SEQ ID NO: 24560 - RNA, 21 nt, RNAi
auuugugccucacuggacuuu

SEQ ID NO: 24561 - RNA, 21 nt, RNAi
uuuaaacacggagugaccuga

SEQ ID NO: 24562 - DNA, 21 bp, homo sapiens
tatatggactttcttgcaagc

SEQ ID NO: 24563 - RNA, 21 nt, RNAi
uauggacuuucuugcaagcuu

SEQ ID NO: 24564 - RNA, 21 nt, RNAi
uuauaccugaaagaacguucg

SEQ ID NO: 24565 - DNA, 21 bp, homo sapiens
tatggactttcttgcaagcaa

SEQ ID NO: 24566 - RNA, 21 nt, RNAi
uggacuuucuugcaagcaauu

SEQ ID NO: 24567 - RNA, 21 nt, RNAi
uuaccugaaagaacguucguu

SEQ ID NO: 24568 - DNA, 21 bp, homo sapiens
aaggctgtgacatcaatgcta

SEQ ID NO: 24569 - RNA, 21 nt, RNAi
ggcugugacaucaaugcuauu

SEQ ID NO: 24570 - RNA, 21 nt, RNAi
uuccgacacuguaguuacgau

SEQ ID NO: 24571 - DNA, 21 bp, homo sapiens
cacagaccgtattcttcatcc

SEQ ID NO: 24572 - RNA, 21 nt, RNAi
cagaccguauucuucauccuu

SEQ ID NO: 24573 - RNA, 21 nt, RNAi
uugucuggcauaagaaguagg

SEQ ID NO: 24574 - DNA, 21 bp, homo sapiens
gactgctgtcttggatacaca

SEQ ID NO: 24575 - RNA, 21 nt, RNAi
cugcugucuuggauacacauu

SEQ ID NO: 24576 - RNA, 21 nt, RNAi
uugacgacagaaccuaugugu

SEQ ID NO: 24577 - DNA, 21 bp, homo sapiens
gatacacagaccgtattcttc

SEQ ID NO: 24578 - RNA, 21 nt, RNAi
uacacagaccguauucuucuu

SEQ ID NO: 24579 - RNA, 21 nt, RNAi
uuaugugucuggcauaagaag

SEQ ID NO: 24580 - DNA, 21 bp, homo sapiens
tacacagaccgtattcttcat

SEQ ID NO: 24581 - RNA, 21 nt, RNAi
cacagaccguauucuucauuu

SEQ ID NO: 24582 - RNA, 21 nt, RNAi
uugugucuggcauaagaagua

SEQ ID NO: 24583 - DNA, 21 bp, homo sapiens
aaataatctttgctggcagga

SEQ ID NO: 24584 - RNA, 21 nt, RNAi
auaaucuuugcuggcaggauu

SEQ ID NO: 24585 - RNA, 21 nt, RNAi
uuuauuagaaacgaccguccu

SEQ ID NO: 24586 - DNA, 21 bp, homo sapiens
aataatctttgctggcaggac

SEQ ID NO: 24587 - RNA, 21 nt, RNAi
uaaucuuugcuggcaggacuu

SEQ ID NO: 24588 - RNA, 21 nt, RNAi
uuauuagaaacgaccguccug

SEQ ID NO: 24589 - DNA, 21 bp, homo sapiens
aatctttgctggcaggactat

SEQ ID NO: 24590 - RNA, 21 nt, RNAi
ucuuugcuggcaggacuauuu

SEQ ID NO: 24591 - RNA, 21 nt, RNAi
uuagaaacgaccguccugaua

SEQ ID NO: 24592 - DNA, 21 bp, homo sapiens
aatctccttaggcactctcta

SEQ ID NO: 24593 - RNA, 21 nt, RNAi
ucuccuuaggcacucucuauu

SEQ ID NO: 24594 - RNA, 21 nt, RNAi
uuagaggaauccgugagagau

SEQ ID NO: 24595 - DNA, 21 bp, homo sapiens
aattagatgtcctaggtcctc

SEQ ID NO: 24596 - RNA, 21 nt, RNAi
uuagauguccuagguccucuu

SEQ ID NO: 24597 - RNA, 21 nt, RNAi
uuaaucuacaggauccaggag

SEQ ID NO: 24598 - DNA, 21 bp, homo sapiens
aaactgtatccaggccatcac

SEQ ID NO: 24599 - RNA, 21 nt, RNAi
acuguauccaggccaucacuu

SEQ ID NO: 24600 - RNA, 21 nt, RNAi
uuugacauagguccgguagug

SEQ ID NO: 24601 - DNA, 21 bp, homo sapiens
aactgtatccaggccatcacc

SEQ ID NO: 24602 - RNA, 21 nt, RNAi
cuguauccaggccaucaccuu

SEQ ID NO: 24603 - RNA, 21 nt, RNAi
uugacauagguccgguagugg

SEQ ID NO: 24604 - DNA, 21 bp, homo sapiens
aatataagaaggcaggcatgt

SEQ ID NO: 24605 - RNA, 21 nt, RNAi
uauaagaaggcaggcauguuu

SEQ ID NO: 24606 - RNA, 21 nt, RNAi
uuauauucuuccguccguaca

SEQ ID NO: 24607 - DNA, 21 bp, homo sapiens
aagaaggcaggcatgtcaggc

SEQ ID NO: 24608 - RNA, 21 nt, RNAi
gaaggcaggcaugucaggcuu

SEQ ID NO: 24609 - RNA, 21 nt, RNAi
uucuuccguccguacaguccg

SEQ ID NO: 24610 - DNA, 21 bp, homo sapiens
aaggcaggcatgtcaggcctc

SEQ ID NO: 24611 - RNA, 21 nt, RNAi
ggcaggcaugucaggccucuu

SEQ ID NO: 24612 - RNA, 21 nt, RNAi
uuccguccguacaguccggag

SEQ ID NO: 24613 - DNA, 21 bp, homo sapiens
aaagaagtgaatatgccttgc

SEQ ID NO: 24614 - RNA, 21 nt, RNAi
agaagugaauaugccuugcuu

SEQ ID NO: 24615 - RNA, 21 nt, RNAi
uuucuucacuuauacggaacg

SEQ ID NO: 24616 - DNA, 21 bp, homo sapiens
aagaagtgaatatgccttgcc

SEQ ID NO: 24617 - RNA, 21 nt, RNAi
gaagugaauaugccuugccuu

SEQ ID NO: 24618 - RNA, 21 nt, RNAi
uucuucacuuauacggaacgg

SEQ ID NO: 24619 - DNA, 21 bp, homo sapiens
aactgatgacattccaccaca

SEQ ID NO: 24620 - RNA, 21 nt, RNAi
cugaugacauuccaccacauu

SEQ ID NO: 24621 - RNA, 21 nt, RNAi
uugacuacuguaagguggugu

SEQ ID NO: 24622 - DNA, 21 bp, homo sapiens
aaagaagtgtaaatggccggt

SEQ ID NO: 24623 - RNA, 21 nt, RNAi
agaaguguaaauggccgguuu

SEQ ID NO: 24624 - RNA, 21 nt, RNAi
uuucuucacauuuaccggcca

SEQ ID NO: 24625 - DNA, 21 bp, homo sapiens
aagaagtgtaaatggccggtc

SEQ ID NO: 24626 - RNA, 21 nt, RNAi
gaaguguaaauggccggucuu

SEQ ID NO: 24627 - RNA, 21 nt, RNAi
uucuucacauuuaccggccag

SEQ ID NO: 24628 - DNA, 21 bp, homo sapiens
aagtgtaaatggccggtcctt

SEQ ID NO: 24629 - RNA, 21 nt, RNAi
guguaaauggccgguccuuuu

SEQ ID NO: 24630 - RNA, 21 nt, RNAi
uucacauuuaccggccaggaa

SEQ ID NO: 24631 - DNA, 21 bp, homo sapiens
aaatggccggtccttgcctta

SEQ ID NO: 24632 - RNA, 21 nt, RNAi
auggccgguccuugccuuauu

SEQ ID NO: 24633 - RNA, 21 nt, RNAi
uuuaccggccaggaacggaau

SEQ ID NO: 24634 - DNA, 21 bp, homo sapiens
aatggccggtccttgccttaa

SEQ ID NO: 24635 - RNA, 21 nt, RNAi
uggccgguccuugccuuaauu

SEQ ID NO: 24636 - RNA, 21 nt, RNAi
uuaccggccaggaacggaauu

SEQ ID NO: 24637 - DNA, 21 bp, homo sapiens
aactgatgacattaccttgtg

SEQ ID NO: 24638 - RNA, 21 nt, RNAi
cugaugacauuaccuuguguu

SEQ ID NO: 24639 - RNA, 21 nt, RNAi
uugacuacuguaauggaacac

SEQ ID NO: 24640 - DNA, 21 bp, homo sapiens
aaagtcctcttcctggctcat

SEQ ID NO: 24641 - RNA, 21 nt, RNAi
aguccucuuccuggcucauuu

SEQ ID NO: 24642 - RNA, 21 nt, RNAi
uuucaggagaaggaccgagua

SEQ ID NO: 24643 - DNA, 21 bp, homo sapiens
aagtcctcttcctggctcatc

SEQ ID NO: 24644 - RNA, 21 nt, RNAi
guccucuuccuggcucaucuu

SEQ ID NO: 24645 - RNA, 21 nt, RNAi
uucaggagaaggaccgaguag

SEQ ID NO: 24646 - DNA, 21 bp, homo sapiens
aaacagctttattgctcacac

SEQ ID NO: 24647 - RNA, 21 nt, RNAi
acagcuuuauugcucacacuu

SEQ ID NO: 24648 - RNA, 21 nt, RNAi
uuugucgaaauaacgagugug

SEQ ID NO: 24649 - DNA, 21 bp, homo sapiens
aacagctttattgctcacaca

SEQ ID NO: 24650 - RNA, 21 nt, RNAi
cagcuuuauugcucacacauu

SEQ ID NO: 24651 - RNA, 21 nt, RNAi
uugucgaaauaacgagugugu

SEQ ID NO: 24652 - DNA, 21 bp, homo sapiens
aaagcctgtttggtggtctct

SEQ ID NO: 24653 - RNA, 21 nt, RNAi
agccuguuugguggucucuuu

SEQ ID NO: 24654 - RNA, 21 nt, RNAi
uuucggacaaaccaccagaga

SEQ ID NO: 24655 - DNA, 21 bp, homo sapiens
aagcctgtttggtggtctctt

SEQ ID NO: 24656 - RNA, 21 nt, RNAi
gccuguuugguggucucuuuu

SEQ ID NO: 24657 - RNA, 21 nt, RNAi
uucggacaaaccaccagagaa

SEQ ID NO: 24658 - DNA, 21 bp, homo sapiens
aaggcatatggaggagactaa

SEQ ID NO: 24659 - RNA, 21 nt, RNAi
ggcauauggaggagacuaauu

SEQ ID NO: 24660 - RNA, 21 nt, RNAi
uuccguauaccuccucugauu

SEQ ID NO: 24661 - DNA, 21 bp, homo sapiens
aattcctcttccaaagacatg

SEQ ID NO: 24662 - RNA, 21 nt, RNAi
uuccucuuccaaagacauguu

SEQ ID NO: 24663 - RNA, 21 nt, RNAi
uuaaggagaagguuucuguac

SEQ ID NO: 24664 - DNA, 21 bp, homo sapiens
aaagacatgtaccagagtcct

SEQ ID NO: 24665 - RNA, 21 nt, RNAi
agacauguaccagaguccuuu

SEQ ID NO: 24666 - RNA, 21 nt, RNAi
uuucuguacauggucucagga

SEQ ID NO: 24667 - DNA, 21 bp, homo sapiens
aagacatgtaccagagtcctg

SEQ ID NO: 24668 - RNA, 21 nt, RNAi
gacauguaccagaguccuguu

SEQ ID NO: 24669 - RNA, 21 nt, RNAi
uucuguacauggucucaggac

SEQ ID NO: 24670 - DNA, 21 bp, homo sapiens
aatctgttcaggaaacatagc

SEQ ID NO: 24671 - RNA, 21 nt, RNAi
ucuguucaggaaacauagcuu

SEQ ID NO: 24672 - RNA, 21 nt, RNAi
uuagacaaguccuuuguaucg

SEQ ID NO: 24673 - DNA, 21 bp, homo sapiens
aaacatagcaaatgcctgata

SEQ ID NO: 24674 - RNA, 21 nt, RNAi
acauagcaaaugccugauauu

SEQ ID NO: 24675 - RNA, 21 nt, RNAi
uuuguaucguuuacggacuau

SEQ ID NO: 24676 - DNA, 21 bp, homo sapiens
aacatagcaaatgcctgatac

SEQ ID NO: 24677 - RNA, 21 nt, RNAi
cauagcaaaugccugauacuu

SEQ ID NO: 24678 - RNA, 21 nt, RNAi
uuguaucguuuacggacuaug

SEQ ID NO: 24679 - DNA, 21 bp, homo sapiens
aaaggtttgaatctccacatt

SEQ ID NO: 24680 - RNA, 21 nt, RNAi
agguuugaaucuccacauuuu

SEQ ID NO: 24681 - RNA, 21 nt, RNAi
uuuccaaacuuagagguguaa

SEQ ID NO: 24682 - DNA, 21 bp, homo sapiens
aaggtttgaatctccacattc

SEQ ID NO: 24683 - RNA, 21 nt, RNAi
gguuugaaucuccacauucuu

SEQ ID NO: 24684 - RNA, 21 nt, RNAi
uuccaaacuuagagguguaag

SEQ ID NO: 24685 - DNA, 21 bp, homo sapiens
aaagtgtcaagcatgttaatg

SEQ ID NO: 24686 - RNA, 21 nt, RNAi
agugucaagcauguuaauguu

SEQ ID NO: 24687 - RNA, 21 nt, RNAi
uuucacaguucguacaauuac

SEQ ID NO: 24688 - DNA, 21 bp, homo sapiens
aagtgtcaagcatgttaatgt

SEQ ID NO: 24689 - RNA, 21 nt, RNAi
gugucaagcauguuaauguuu

SEQ ID NO: 24690 - RNA, 21 nt, RNAi
uucacaguucguacaauuaca

SEQ ID NO: 24691 - DNA, 21 bp, homo sapiens
aatgttaccattgactgcctc

SEQ ID NO: 24692 - RNA, 21 nt, RNAi
uguuaccauugacugccucuu

SEQ ID NO: 24693 - RNA, 21 nt, RNAi
uuacaaugguaacugacggag

SEQ ID NO: 24694 - DNA, 21 bp, homo sapiens
aactgccaggacttcaaagcc

SEQ ID NO: 24695 - RNA, 21 nt, RNAi
cugccaggacuucaaagccuu

SEQ ID NO: 24696 - RNA, 21 nt, RNAi
uugacgguccugaaguuucgg

SEQ ID NO: 24697 - DNA, 21 bp, homo sapiens
aaacactaccaagtacaagcc

SEQ ID NO: 24698 - RNA, 21 nt, RNAi
acacuaccaaguacaagccuu

SEQ ID NO: 24699 - RNA, 21 nt, RNAi
uuugugaugguucauguucgg

SEQ ID NO: 24700 - DNA, 21 bp, homo sapiens
aacacaggcaggcctcctgag

SEQ ID NO: 24701 - RNA, 21 nt, RNAi
cacaggcaggccuccugaguu

SEQ ID NO: 24702 - RNA, 21 nt, RNAi
uuguguccguccggaggacuc

SEQ ID NO: 24703 - DNA, 21 bp, homo sapiens
aactcagtggttgacagctga

SEQ ID NO: 24704 - RNA, 21 nt, RNAi
cucagugguugacagcugauu

SEQ ID NO: 24705 - RNA, 21 nt, RNAi
uugagucaccaacugucgacu

SEQ ID NO: 24706 - DNA, 21 bp, homo sapiens
aagccatgaacactacaagcc

SEQ ID NO: 24707 - RNA, 21 nt, RNAi
gccaugaacacuacaagccuu

SEQ ID NO: 24708 - RNA, 21 nt, RNAi
uucgguacuugugauguucgg

SEQ ID NO: 24709 - DNA, 21 bp, homo sapiens
aaacaggtgatctctctgcag

SEQ ID NO: 24710 - RNA, 21 nt, RNAi
acaggugaucucucugcaguu

SEQ ID NO: 24711 - RNA, 21 nt, RNAi
uuuguccacuagagagacguc

SEQ ID NO: 24712 - DNA, 21 bp, homo sapiens
aacaggtgatctctctgcaga

SEQ ID NO: 24713 - RNA, 21 nt, RNAi
caggugaucucucugcagauu

SEQ ID NO: 24714 - RNA, 21 nt, RNAi
uuguccacuagagagacgucu

SEQ ID NO: 24715 - DNA, 21 bp, homo sapiens
aagtttcaaggtgtcctcagc

SEQ ID NO: 24716 - RNA, 21 nt, RNAi
guuucaagguguccucagcuu

SEQ ID NO: 24717 - RNA, 21 nt, RNAi
uucaaaguuccacaggagucg

SEQ ID NO: 24718 - DNA, 21 bp, homo sapiens
aaggtgtcctcagccactctt

SEQ ID NO: 24719 - RNA, 21 nt, RNAi
gguguccucagccacucuuuu

SEQ ID NO: 24720 - RNA, 21 nt, RNAi
uuccacaggagucggugagaa

SEQ ID NO: 24721 - DNA, 21 bp, homo sapiens
aattcttccagcaatgcctct

SEQ ID NO: 24722 - RNA, 21 nt, RNAi
uucuuccagcaaugccucuuu

SEQ ID NO: 24723 - RNA, 21 nt, RNAi
uuaagaaggucguuacggaga

SEQ ID NO: 24724 - DNA, 21 bp, homo sapiens
aatgcctctgcatgagccaga

SEQ ID NO: 24725 - RNA, 21 nt, RNAi
ugccucugcaugagccagauu

SEQ ID NO: 24726 - RNA, 21 nt, RNAi
uuacggagacguacucggucu

SEQ ID NO: 24727 - DNA, 21 bp, homo sapiens
aatactattcctggtttctga

SEQ ID NO: 24728 - RNA, 21 nt, RNAi
uacuauuccugguuucugauu

SEQ ID NO: 24729 - RNA, 21 nt, RNAi
uuaugauaaggaccaaagacu

SEQ ID NO: 24730 - DNA, 21 bp, homo sapiens
aatgcaacatatatctgtcag

SEQ ID NO: 24731 - RNA, 21 nt, RNAi
ugcaacauauaucugucaguu

SEQ ID NO: 24732 - RNA, 21 nt, RNAi
uuacguuguauauagacaguc

SEQ ID NO: 24733 - DNA, 21 bp, homo sapiens
aaagtgccttgagaatatctg

SEQ ID NO: 24734 - RNA, 21 nt, RNAi
agugccuugagaauaucuguu

SEQ ID NO: 24735 - RNA, 21 nt, RNAi
uuucacggaacucuuauagac

SEQ ID NO: 24736 - DNA, 21 bp, homo sapiens
aagtgccttgagaatatctgc

SEQ ID NO: 24737 - RNA, 21 nt, RNAi
gugccuugagaauaucugcuu

SEQ ID NO: 24738 - RNA, 21 nt, RNAi
uucacggaacucuuauagacg

SEQ ID NO: 24739 - DNA, 21 bp, homo sapiens
aatatctgcaagtctgtgtga

SEQ ID NO: 24740 - RNA, 21 nt, RNAi
uaucugcaagucugugugauu

SEQ ID NO: 24741 - RNA, 21 nt, RNAi
uuauagacguucagacacacu

SEQ ID NO: 24742 - DNA, 21 bp, homo sapiens
aagtctgtgtgaggccttgaa

SEQ ID NO: 24743 - RNA, 21 nt, RNAi
gucugugugaggccuugaauu

SEQ ID NO: 24744 - RNA, 21 nt, RNAi
uucagacacacuccggaacuu

SEQ ID NO: 24745 - DNA, 21 bp, homo sapiens
aaagtggttattcttggaagt

SEQ ID NO: 24746 - RNA, 21 nt, RNAi
agugguuauucuuggaaguuu

SEQ ID NO: 24747 - RNA, 21 nt, RNAi
uuucaccaauaagaaccuuca

SEQ ID NO: 24748 - DNA, 21 bp, homo sapiens
aagtggttattcttggaagta

SEQ ID NO: 24749 - RNA, 21 nt, RNAi
gugguuauucuuggaaguauu

SEQ ID NO: 24750 - RNA, 21 nt, RNAi
uucaccaauaagaaccuucau

SEQ ID NO: 24751 - DNA, 21 bp, homo sapiens
caggactatgctgaatctcct

SEQ ID NO: 24752 - RNA, 21 nt, RNAi
ggacuaugcugaaucuccuuu

SEQ ID NO: 24753 - RNA, 21 nt, RNAi
uuccugauacgacuuagagga

SEQ ID NO: 24754 - DNA, 21 bp, homo sapiens
cactctctaattagatgtcct

SEQ ID NO: 24755 - RNA, 21 nt, RNAi
cucucuaauuagauguccuuu

SEQ ID NO: 24756 - RNA, 21 nt, RNAi
uugagagauuaaucuacagga

SEQ ID NO: 24757 - DNA, 21 bp, homo sapiens
caggccatcacctatcattct

SEQ ID NO: 24758 - RNA, 21 nt, RNAi
ggccaucaccuaucauucuuu

SEQ ID NO: 24759 - RNA, 21 nt, RNAi
uuccgguaguggauaguaaga

SEQ ID NO: 24760 - DNA, 21 bp, homo sapiens
catcacctatcattctataca

SEQ ID NO: 24761 - RNA, 21 nt, RNAi
ucaccuaucauucuauacauu

SEQ ID NO: 24762 - RNA, 21 nt, RNAi
uuaguggauaguaagauaugu

SEQ ID NO: 24763 - DNA, 21 bp, homo sapiens
cacctatcattctatacaaca

SEQ ID NO: 24764 - RNA, 21 nt, RNAi
ccuaucauucuauacaacauu

SEQ ID NO: 24765 - RNA, 21 nt, RNAi
uuggauaguaagauauguugu

SEQ ID NO: 24766 - DNA, 21 bp, homo sapiens
caaatgtttcttctaacatcc

SEQ ID NO: 24767 - RNA, 21 nt, RNAi
aauguuucuucuaacauccuu

SEQ ID NO: 24768 - RNA, 21 nt, RNAi
uuuuacaaagaagauuguagg

SEQ ID NO: 24769 - DNA, 21 bp, homo sapiens
caggcatgtcaggcctctgag

SEQ ID NO: 24770 - RNA, 21 nt, RNAi
ggcaugucaggccucugaguu

SEQ ID NO: 24771 - RNA, 21 nt, RNAi
uuccguacaguccggagacuc

SEQ ID NO: 24772 - DNA, 21 bp, homo sapiens
cagatggcctgaagtaactga

SEQ ID NO: 24773 - RNA, 21 nt, RNAi
gauggccugaaguaacugauu

SEQ ID NO: 24774 - RNA, 21 nt, RNAi
uucuaccggacuucauugacu

SEQ ID NO: 24775 - DNA, 21 bp, homo sapiens
caccttaactgatgacattcc

SEQ ID NO: 24776 - RNA, 21 nt, RNAi
ccuuaacugaugacauuccuu

SEQ ID NO: 24777 - RNA, 21 nt, RNAi
uuggaauugacuacuguaagg

SEQ ID NO: 24778 - DNA, 21 bp, homo sapiens
cattaccttgtgaaagtcctc

SEQ ID NO: 24779 - RNA, 21 nt, RNAi
uuaccuugugaaaguccucuu

SEQ ID NO: 24780 - RNA, 21 nt, RNAi
uuaauggaacacuuucaggag

SEQ ID NO: 24781 - DNA, 21 bp, homo sapiens
caggtgaaataaacagcttta

SEQ ID NO: 24782 - RNA, 21 nt, RNAi
ggugaaauaaacagcuuuauu

SEQ ID NO: 24783 - RNA, 21 nt, RNAi
uuccacuuuauuugucgaaau

SEQ ID NO: 24784 - DNA, 21 bp, homo sapiens
cagctttattgctcacacaaa

SEQ ID NO: 24785 - RNA, 21 nt, RNAi
gcuuuauugcucacacaaauu

SEQ ID NO: 24786 - RNA, 21 nt, RNAi
uucgaaauaacgaguguguuu

SEQ ID NO: 24787 - DNA, 21 bp, homo sapiens
cacacaaagcctgtttggtgg

SEQ ID NO: 24788 - RNA, 21 nt, RNAi
cacaaagccuguuuggugguu

SEQ ID NO: 24789 - RNA, 21 nt, RNAi
uuguguuucggacaaaccacc

SEQ ID NO: 24790 - DNA, 21 bp, homo sapiens
cacaaagcctgtttggtggtc

SEQ ID NO: 24791 - RNA, 21 nt, RNAi
caaagccuguuugguggucuu

SEQ ID NO: 24792 - RNA, 21 nt, RNAi
uuguuucggacaaaccaccag

SEQ ID NO: 24793 - DNA, 21 bp, homo sapiens
caaagcctgtttggtggtctc

SEQ ID NO: 24794 - RNA, 21 nt, RNAi
aagccuguuugguggucucuu

SEQ ID NO: 24795 - RNA, 21 nt, RNAi
uuuucggacaaaccaccagag

SEQ ID NO: 24796 - DNA, 21 bp, homo sapiens
cacacggacgcacatgaaatt

SEQ ID NO: 24797 - RNA, 21 nt, RNAi
cacggacgcacaugaaauuuu

SEQ ID NO: 24798 - RNA, 21 nt, RNAi
uugugccugcguguacuuuaa

SEQ ID NO: 24799 - DNA, 21 bp, homo sapiens
cacggacgcacatgaaattta

SEQ ID NO: 24800 - RNA, 21 nt, RNAi
cggacgcacaugaaauuuauu

SEQ ID NO: 24801 - RNA, 21 nt, RNAi
uugccugcguguacuuuaaau

SEQ ID NO: 24802 - DNA, 21 bp, homo sapiens
cataaggcatatggaggagac

SEQ ID NO: 24803 - RNA, 21 nt, RNAi
uaaggcauauggaggagacuu

SEQ ID NO: 24804 - RNA, 21 nt, RNAi
uuauuccguauaccuccucug

SEQ ID NO: 24805 - DNA, 21 bp, homo sapiens
catatggaggagactaattcc

SEQ ID NO: 24806 - RNA, 21 nt, RNAi
uauggaggagacuaauuccuu

SEQ ID NO: 24807 - RNA, 21 nt, RNAi
uuauaccuccucugauuaagg

SEQ ID NO: 24808 - DNA, 21 bp, homo sapiens
caaagacatgtaccagagtcc

SEQ ID NO: 24809 - RNA, 21 nt, RNAi
aagacauguaccagaguccuu

SEQ ID NO: 24810 - RNA, 21 nt, RNAi
uuuucuguacauggucucagg

SEQ ID NO: 24811 - DNA, 21 bp, homo sapiens
catgtaccagagtcctggaga

SEQ ID NO: 24812 - RNA, 21 nt, RNAi
uguaccagaguccuggagauu

SEQ ID NO: 24813 - RNA, 21 nt, RNAi
uuacauggucucaggaccucu

SEQ ID NO: 24814 - DNA, 21 bp, homo sapiens
cagagtcctggagaggctgag

SEQ ID NO: 24815 - RNA, 21 nt, RNAi
gaguccuggagaggcugaguu

SEQ ID NO: 24816 - RNA, 21 nt, RNAi
uucucaggaccucuccgacuc

SEQ ID NO: 24817 - DNA, 21 bp, homo sapiens
cagaatctgttcaggaaacat

SEQ ID NO: 24818 - RNA, 21 nt, RNAi
gaaucuguucaggaaacauuu

SEQ ID NO: 24819 - RNA, 21 nt, RNAi
uucuuagacaaguccuuugua

SEQ ID NO: 24820 - DNA, 21 bp, homo sapiens
caggaaacatagcaaatgcct

SEQ ID NO: 24821 - RNA, 21 nt, RNAi
ggaaacauagcaaaugccuuu

SEQ ID NO: 24822 - RNA, 21 nt, RNAi
uuccuuuguaucguuuacgga

SEQ ID NO: 24823 - DNA, 21 bp, homo sapiens
catagcaaatgcctgatactt

SEQ ID NO: 24824 - RNA, 21 nt, RNAi
uagcaaaugccugauacuuuu

SEQ ID NO: 24825 - RNA, 21 nt, RNAi
uuaucguuuacggacuaugaa

SEQ ID NO: 24826 - DNA, 21 bp, homo sapiens
cacattcatatatttgcagtc

SEQ ID NO: 24827 - RNA, 21 nt, RNAi
cauucauauauuugcagucuu

SEQ ID NO: 24828 - RNA, 21 nt, RNAi
uuguaaguauauaaacgucag

SEQ ID NO: 24829 - DNA, 21 bp, homo sapiens
cattcatatatttgcagtcca

SEQ ID NO: 24830 - RNA, 21 nt, RNAi
uucauauauuugcaguccauu

SEQ ID NO: 24831 - RNA, 21 nt, RNAi
uuaaguauauaaacgucaggu

SEQ ID NO: 24832 - DNA, 21 bp, homo sapiens
catatatttgcagtccagtga

SEQ ID NO: 24833 - RNA, 21 nt, RNAi
uauauuugcaguccagugauu

SEQ ID NO: 24834 - RNA, 21 nt, RNAi
uuauauaaacgucaggucacu

SEQ ID NO: 24835 - DNA, 21 bp, homo sapiens
cagtccagtgacctttcagtt

SEQ ID NO: 24836 - RNA, 21 nt, RNAi
guccagugaccuuucaguuuu

SEQ ID NO: 24837 - RNA, 21 nt, RNAi
uucaggucacuggaaagucaa

SEQ ID NO: 24838 - DNA, 21 bp, homo sapiens
caaagtgtcaagcatgttaat

SEQ ID NO: 24839 - RNA, 21 nt, RNAi
aagugucaagcauguuaauuu

SEQ ID NO: 24840 - RNA, 21 nt, RNAi
uuuucacaguucguacaauua

SEQ ID NO: 24841 - DNA, 21 bp, homo sapiens
caagcatgttaatgttaccat

SEQ ID NO: 24842 - RNA, 21 nt, RNAi
agcauguuaauguuaccauuu

SEQ ID NO: 24843 - RNA, 21 nt, RNAi
uuucguacaauuacaauggua

SEQ ID NO: 24844 - DNA, 21 bp, homo sapiens
catgttaatgttaccattgac

SEQ ID NO: 24845 - RNA, 21 nt, RNAi
uguuaauguuaccauugacuu

SEQ ID NO: 24846 - RNA, 21 nt, RNAi
uuacaauuacaaugguaacug

SEQ ID NO: 24847 - DNA, 21 bp, homo sapiens
catctgctctgagatcctctc

SEQ ID NO: 24848 - RNA, 21 nt, RNAi
ucugcucugagauccucucuu

SEQ ID NO: 24849 - RNA, 21 nt, RNAi
uuagacgagacucuaggagag

SEQ ID NO: 24850 - DNA, 21 bp, homo sapiens
cagagacagctgctccttcag

SEQ ID NO: 24851 - RNA, 21 nt, RNAi
gagacagcugcuccuucaguu

SEQ ID NO: 24852 - RNA, 21 nt, RNAi
uucucugucgacgaggaaguc

SEQ ID NO: 24853 - DNA, 21 bp, homo sapiens
cagctgctccttcagaaacag

SEQ ID NO: 24854 - RNA, 21 nt, RNAi
gcugcuccuucagaaacaguu

SEQ ID NO: 24855 - RNA, 21 nt, RNAi
uucgacgaggaagucuuuguc

SEQ ID NO: 24856 - DNA, 21 bp, homo sapiens
cacagccacatggttcagtgc

SEQ ID NO: 24857 - RNA, 21 nt, RNAi
cagccacaugguucagugcuu

SEQ ID NO: 24858 - RNA, 21 nt, RNAi
uugucgguguaccaagucacg

SEQ ID NO: 24859 - DNA, 21 bp, homo sapiens
cagccacatggttcagtgcct

SEQ ID NO: 24860 - RNA, 21 nt, RNAi
gccacaugguucagugccuuu

SEQ ID NO: 24861 - RNA, 21 nt, RNAi
uucgguguaccaagucacgga

SEQ ID NO: 24862 - DNA, 21 bp, homo sapiens
cagaactcagtggttgacagc

SEQ ID NO: 24863 - RNA, 21 nt, RNAi
gaacucagugguugacagcuu

SEQ ID NO: 24864 - RNA, 21 nt, RNAi
uucuugagucaccaacugucg

SEQ ID NO: 24865 - DNA, 21 bp, homo sapiens
cagtggttgacagctgacaga

SEQ ID NO: 24866 - RNA, 21 nt, RNAi
gugguugacagcugacagauu

SEQ ID NO: 24867 - RNA, 21 nt, RNAi
uucaccaacugucgacugucu

SEQ ID NO: 24868 - DNA, 21 bp, homo sapiens
catggcacacagactccgagt

SEQ ID NO: 24869 - RNA, 21 nt, RNAi
uggcacacagacuccgaguuu

SEQ ID NO: 24870 - RNA, 21 nt, RNAi
uuaccgugugucugaggcuca

SEQ ID NO: 24871 - DNA, 21 bp, homo sapiens
cacacagactccgagtccaac

SEQ ID NO: 24872 - RNA, 21 nt, RNAi
cacagacuccgaguccaacuu

SEQ ID NO: 24873 - RNA, 21 nt, RNAi
uugugucugaggcucagguug

SEQ ID NO: 24874 - DNA, 21 bp, homo sapiens
cacagactccgagtccaacca

SEQ ID NO: 24875 - RNA, 21 nt, RNAi
cagacuccgaguccaaccauu

SEQ ID NO: 24876 - RNA, 21 nt, RNAi
uugucugaggcucagguuggu

SEQ ID NO: 24877 - DNA, 21 bp, homo sapiens
cagactccgagtccaaccaag

SEQ ID NO: 24878 - RNA, 21 nt, RNAi
gacuccgaguccaaccaaguu

SEQ ID NO: 24879 - RNA, 21 nt, RNAi
uucugaggcucagguugguuc

SEQ ID NO: 24880 - DNA, 21 bp, homo sapiens
cagatatccacaaacaggtga

SEQ ID NO: 24881 - RNA, 21 nt, RNAi
gauauccacaaacaggugauu

SEQ ID NO: 24882 - RNA, 21 nt, RNAi
uucuauagguguuuguccacu

SEQ ID NO: 24883 - DNA, 21 bp, homo sapiens
cacaaacaggtgatctctctg

SEQ ID NO: 24884 - RNA, 21 nt, RNAi
caaacaggugaucucucuguu

SEQ ID NO: 24885 - RNA, 21 nt, RNAi
uuguuuguccacuagagagac

SEQ ID NO: 24886 - DNA, 21 bp, homo sapiens
caaacaggtgatctctctgca

SEQ ID NO: 24887 - RNA, 21 nt, RNAi
aacaggugaucucucugcauu

SEQ ID NO: 24888 - RNA, 21 nt, RNAi
uuuuguccacuagagagacgu

SEQ ID NO: 24889 - DNA, 21 bp, homo sapiens
caggtgatctctctgcagagt

SEQ ID NO: 24890 - RNA, 21 nt, RNAi
ggugaucucucugcagaguuu

SEQ ID NO: 24891 - RNA, 21 nt, RNAi
uuccacuagagagacgucuca

SEQ ID NO: 24892 - DNA, 21 bp, homo sapiens
cagagtggccattcactgctg

SEQ ID NO: 24893 - RNA, 21 nt, RNAi
gaguggccauucacugcuguu

SEQ ID NO: 24894 - RNA, 21 nt, RNAi
uucucaccgguaagugacgac

SEQ ID NO: 24895 - DNA, 21 bp, homo sapiens
cattcactgctggtgaagagc

SEQ ID NO: 24896 - RNA, 21 nt, RNAi
uucacugcuggugaagagcuu

SEQ ID NO: 24897 - RNA, 21 nt, RNAi
uuaagugacgaccacuucucg

SEQ ID NO: 24898 - DNA, 21 bp, homo sapiens
cactgctggtgaagagccagt

SEQ ID NO: 24899 - RNA, 21 nt, RNAi
cugcuggugaagagccaguuu

SEQ ID NO: 24900 - RNA, 21 nt, RNAi
uugacgaccacuucucgguca

SEQ ID NO: 24901 - DNA, 21 bp, homo sapiens
catcaagtttcaaggtgtcct

SEQ ID NO: 24902 - RNA, 21 nt, RNAi
ucaaguuucaagguguccuuu

SEQ ID NO: 24903 - RNA, 21 nt, RNAi
uuaguucaaaguuccacagga

SEQ ID NO: 24904 - DNA, 21 bp, homo sapiens
caagtttcaaggtgtcctcag

SEQ ID NO: 24905 - RNA, 21 nt, RNAi
aguuucaagguguccucaguu

SEQ ID NO: 24906 - RNA, 21 nt, RNAi
uuucaaaguuccacaggaguc

SEQ ID NO: 24907 - DNA, 21 bp, homo sapiens
caaggtgtcctcagccactct

SEQ ID NO: 24908 - RNA, 21 nt, RNAi
agguguccucagccacucuuu

SEQ ID NO: 24909 - RNA, 21 nt, RNAi
uuuccacaggagucggugaga

SEQ ID NO: 24910 - DNA, 21 bp, homo sapiens
catgcctgatggagctgtgcc

SEQ ID NO: 24911 - RNA, 21 nt, RNAi
ugccugauggagcugugccuu

SEQ ID NO: 24912 - RNA, 21 nt, RNAi
uuacggacuaccucgacacgg

SEQ ID NO: 24913 - DNA, 21 bp, homo sapiens
caattcttccagcaatgcctc

SEQ ID NO: 24914 - RNA, 21 nt, RNAi
auucuuccagcaaugccucuu

SEQ ID NO: 24915 - RNA, 21 nt, RNAi
uuuaagaaggucguuacggag

SEQ ID NO: 24916 - DNA, 21 bp, homo sapiens
cagcaatgcctctgcatgagc

SEQ ID NO: 24917 - RNA, 21 nt, RNAi
gcaaugccucugcaugagcuu

SEQ ID NO: 24918 - RNA, 21 nt, RNAi
uucguuacggagacguacucg

SEQ ID NO: 24919 - DNA, 21 bp, homo sapiens
caatgcctctgcatgagccag

SEQ ID NO: 24920 - RNA, 21 nt, RNAi
augccucugcaugagccaguu

SEQ ID NO: 24921 - RNA, 21 nt, RNAi
uuuacggagacguacucgguc

SEQ ID NO: 24922 - DNA, 21 bp, homo sapiens
caggacagaggacatgagata

SEQ ID NO: 24923 - RNA, 21 nt, RNAi
ggacagaggacaugagauauu

SEQ ID NO: 24924 - RNA, 21 nt, RNAi
uuccugucuccuguacucuau

SEQ ID NO: 24925 - DNA, 21 bp, homo sapiens
cagaggacatgagatactgtc

SEQ ID NO: 24926 - RNA, 21 nt, RNAi
gaggacaugagauacugucuu

SEQ ID NO: 24927 - RNA, 21 nt, RNAi
uucuccuguacucuaugacag

SEQ ID NO: 24928 - DNA, 21 bp, homo sapiens
catgagatactgtcttgaata

SEQ ID NO: 24929 - RNA, 21 nt, RNAi
ugagauacugucuugaauauu

SEQ ID NO: 24930 - RNA, 21 nt, RNAi
uuacucuaugacagaacuuau

SEQ ID NO: 24931 - DNA, 21 bp, homo sapiens
cactcgcacaccttaaagcaa

SEQ ID NO: 24932 - RNA, 21 nt, RNAi
cucgcacaccuuaaagcaauu

SEQ ID NO: 24933 - RNA, 21 nt, RNAi
uugagcguguggaauuucguu

SEQ ID NO: 24934 - DNA, 21 bp, homo sapiens
caagtctgtgtgaggccttga

SEQ ID NO: 24935 - RNA, 21 nt, RNAi
agucugugugaggccuugauu

SEQ ID NO: 24936 - RNA, 21 nt, RNAi
uuucagacacacuccggaacu

SEQ ID NO: 24937 - DNA, 21 bp, homo sapiens
caggctccagctagatcatca

SEQ ID NO: 24938 - RNA, 21 nt, RNAi
ggcuccagcuagaucaucauu

SEQ ID NO: 24939 - RNA, 21 nt, RNAi
uuccgaggucgaucuaguagu

SEQ ID NO: 24940 - DNA, 21 bp, homo sapiens
cagctagatcatcagttaatt

SEQ ID NO: 24941 - RNA, 21 nt, RNAi
gcuagaucaucaguuaauuuu

SEQ ID NO: 24942 - RNA, 21 nt, RNAi
uucgaucuaguagucaauuaa

SEQ ID NO: 24943 - DNA, 21 bp, homo sapiens
gactatgctgaatctccttag

SEQ ID NO: 24944 - RNA, 21 nt, RNAi
cuaugcugaaucuccuuaguu

SEQ ID NO: 24945 - RNA, 21 nt, RNAi
uugauacgacuuagaggaauc

SEQ ID NO: 24946 - DNA, 21 bp, homo sapiens
gaatctccttaggcactctct

SEQ ID NO: 24947 - RNA, 21 nt, RNAi
aucuccuuaggcacucucuuu

SEQ ID NO: 24948 - RNA, 21 nt, RNAi
uuuagaggaauccgugagaga

SEQ ID NO: 24949 - DNA, 21 bp, homo sapiens
gaaggcaggcatgtcaggcct

SEQ ID NO: 24950 - RNA, 21 nt, RNAi
aggcaggcaugucaggccuuu

SEQ ID NO: 24951 - RNA, 21 nt, RNAi
uuuccguccguacaguccgga

SEQ ID NO: 24952 - DNA, 21 bp, homo sapiens
gatggcctgaagtaactgaag

SEQ ID NO: 24953 - RNA, 21 nt, RNAi
uggccugaaguaacugaaguu

SEQ ID NO: 24954 - RNA, 21 nt, RNAi
uuaccggacuucauugacuuc

SEQ ID NO: 24955 - DNA, 21 bp, homo sapiens
gaagtaactgaagaatcacaa

SEQ ID NO: 24956 - RNA, 21 nt, RNAi
aguaacugaagaaucacaauu

SEQ ID NO: 24957 - RNA, 21 nt, RNAi
uuucauugacuucuuaguguu

SEQ ID NO: 24958 - DNA, 21 bp, homo sapiens
gaagtgtaaatggccggtcct

SEQ ID NO: 24959 - RNA, 21 nt, RNAi
aguguaaauggccgguccuuu

SEQ ID NO: 24960 - RNA, 21 nt, RNAi
uuucacauuuaccggccagga

SEQ ID NO: 24961 - DNA, 21 bp, homo sapiens
gatgacattaccttgtgaaag

SEQ ID NO: 24962 - RNA, 21 nt, RNAi
ugacauuaccuugugaaaguu

SEQ ID NO: 24963 - RNA, 21 nt, RNAi
uuacuguaauggaacacuuuc

SEQ ID NO: 24964 - DNA, 21 bp, homo sapiens
gacattaccttgtgaaagtcc

SEQ ID NO: 24965 - RNA, 21 nt, RNAi
cauuaccuugugaaaguccuu

SEQ ID NO: 24966 - RNA, 21 nt, RNAi
uuguaauggaacacuuucagg

SEQ ID NO: 24967 - DNA, 21 bp, homo sapiens
gaaagtcctcttcctggctca

SEQ ID NO: 24968 - RNA, 21 nt, RNAi
aaguccucuuccuggcucauu

SEQ ID NO: 24969 - RNA, 21 nt, RNAi
uuuucaggagaaggaccgagu

SEQ ID NO: 24970 - DNA, 21 bp, homo sapiens
gacgcacatgaaatttagttg

SEQ ID NO: 24971 - RNA, 21 nt, RNAi
cgcacaugaaauuuaguuguu

SEQ ID NO: 24972 - RNA, 21 nt, RNAi
uugcguguacuuuaaaucaac

SEQ ID NO: 24973 - DNA, 21 bp, homo sapiens
gaggagactaattcctcttcc

SEQ ID NO: 24974 - RNA, 21 nt, RNAi
ggagacuaauuccucuuccuu

SEQ ID NO: 24975 - RNA, 21 nt, RNAi
uuccucugauuaaggagaagg

SEQ ID NO: 24976 - DNA, 21 bp, homo sapiens
gagactaattcctcttccaaa

SEQ ID NO: 24977 - RNA, 21 nt, RNAi
gacuaauuccucuuccaaauu

SEQ ID NO: 24978 - RNA, 21 nt, RNAi
uucugauuaaggagaagguuu

SEQ ID NO: 24979 - DNA, 21 bp, homo sapiens
gactaattcctcttccaaaga

SEQ ID NO: 24980 - RNA, 21 nt, RNAi
cuaauuccucuuccaaagauu

SEQ ID NO: 24981 - RNA, 21 nt, RNAi
uugauuaaggagaagguuucu

SEQ ID NO: 24982 - DNA, 21 bp, homo sapiens
gacatgtaccagagtcctgga

SEQ ID NO: 24983 - RNA, 21 nt, RNAi
cauguaccagaguccuggauu

SEQ ID NO: 24984 - RNA, 21 nt, RNAi
uuguacauggucucaggaccu

SEQ ID NO: 24985 - DNA, 21 bp, homo sapiens
gaggtggaagaaaggctctga

SEQ ID NO: 24986 - RNA, 21 nt, RNAi
gguggaagaaaggcucugauu

SEQ ID NO: 24987 - RNA, 21 nt, RNAi
uuccaccuucuuuccgagacu

SEQ ID NO: 24988 - DNA, 21 bp, homo sapiens
gaatctgttcaggaaacatag

SEQ ID NO: 24989 - RNA, 21 nt, RNAi
aucuguucaggaaacauaguu

SEQ ID NO: 24990 - RNA, 21 nt, RNAi
uuuagacaaguccuuuguauc

SEQ ID NO: 24991 - DNA, 21 bp, homo sapiens
gaaacatagcaaatgcctgat

SEQ ID NO: 24992 - RNA, 21 nt, RNAi
aacauagcaaaugccugauuu

SEQ ID NO: 24993 - RNA, 21 nt, RNAi
uuuuguaucguuuacggacua

SEQ ID NO: 24994 - DNA, 21 bp, homo sapiens
gagaaaggtttgaatctccac

SEQ ID NO: 24995 - RNA, 21 nt, RNAi
gaaagguuugaaucuccacuu

SEQ ID NO: 24996 - RNA, 21 nt, RNAi
uucuuuccaaacuuagaggug

SEQ ID NO: 24997 - DNA, 21 bp, homo sapiens
gaaaggtttgaatctccacat

SEQ ID NO: 24998 - RNA, 21 nt, RNAi
aagguuugaaucuccacauuu

SEQ ID NO: 24999 - RNA, 21 nt, RNAi
uuuuccaaacuuagaggugua

SEQ ID NO: 25000 - DNA, 21 bp, homo sapiens
gaactgccaggacttcaaagc

SEQ ID NO: 25001 - RNA, 21 nt, RNAi
acugccaggacuucaaagcuu

SEQ ID NO: 25002 - RNA, 21 nt, RNAi
uuugacgguccugaaguuucg

SEQ ID NO: 25003 - DNA, 21 bp, homo sapiens
gacagagacagctgctccttc

SEQ ID NO: 25004 - RNA, 21 nt, RNAi
cagagacagcugcuccuucuu

SEQ ID NO: 25005 - RNA, 21 nt, RNAi
uugucucugucgacgaggaag

SEQ ID NO: 25006 - DNA, 21 bp, homo sapiens
gagacagctgctccttcagaa

SEQ ID NO: 25007 - RNA, 21 nt, RNAi
gacagcugcuccuucagaauu

SEQ ID NO: 25008 - RNA, 21 nt, RNAi
uucugucgacgaggaagucuu

SEQ ID NO: 25009 - DNA, 21 bp, homo sapiens
gacagctgctccttcagaaac

SEQ ID NO: 25010 - RNA, 21 nt, RNAi
cagcugcuccuucagaaacuu

SEQ ID NO: 25011 - RNA, 21 nt, RNAi
uugucgacgaggaagucuuug

SEQ ID NO: 25012 - DNA, 21 bp, homo sapiens
gaacacaggcaggcctcctga

SEQ ID NO: 25013 - RNA, 21 nt, RNAi
acacaggcaggccuccugauu

SEQ ID NO: 25014 - RNA, 21 nt, RNAi
uuuguguccguccggaggacu

SEQ ID NO: 25015 - DNA, 21 bp, homo sapiens
gaactcagtggttgacagctg

SEQ ID NO: 25016 - RNA, 21 nt, RNAi
acucagugguugacagcuguu

SEQ ID NO: 25017 - RNA, 21 nt, RNAi
uuugagucaccaacugucgac

SEQ ID NO: 25018 - DNA, 21 bp, homo sapiens
gacagctgacagacagacgtg

SEQ ID NO: 25019 - RNA, 21 nt, RNAi
cagcugacagacagacguguu

SEQ ID NO: 25020 - RNA, 21 nt, RNAi
uugucgacugucugucugcac

SEQ ID NO: 25021 - DNA, 21 bp, homo sapiens
gaccgaggaagccatgaacac

SEQ ID NO: 25022 - RNA, 21 nt, RNAi
ccgaggaagccaugaacacuu

SEQ ID NO: 25023 - RNA, 21 nt, RNAi
uuggcuccuucgguacuugug

SEQ ID NO: 25024 - DNA, 21 bp, homo sapiens
gaggaagccatgaacactaca

SEQ ID NO: 25025 - RNA, 21 nt, RNAi
ggaagccaugaacacuacauu

SEQ ID NO: 25026 - RNA, 21 nt, RNAi
uuccuucgguacuugugaugu

SEQ ID NO: 25027 - DNA, 21 bp, homo sapiens
gaagccatgaacactacaagc

SEQ ID NO: 25028 - RNA, 21 nt, RNAi
agccaugaacacuacaagcuu

SEQ ID NO: 25029 - RNA, 21 nt, RNAi
uuucgguacuugugauguucg

SEQ ID NO: 25030 - DNA, 21 bp, homo sapiens
gagataatggccacacctggc

SEQ ID NO: 25031 - RNA, 21 nt, RNAi
gauaauggccacaccuggcuu

SEQ ID NO: 25032 - RNA, 21 nt, RNAi
uucuauuaccgguguggaccg

SEQ ID NO: 25033 - DNA, 21 bp, homo sapiens
gataatggccacacctggcag

SEQ ID NO: 25034 - RNA, 21 nt, RNAi
uaauggccacaccuggcaguu

SEQ ID NO: 25035 - RNA, 21 nt, RNAi
uuauuaccgguguggaccguc

SEQ ID NO: 25036 - DNA, 21 bp, homo sapiens
gactccgagtccaaccaaggc

SEQ ID NO: 25037 - RNA, 21 nt, RNAi
cuccgaguccaaccaaggcuu

SEQ ID NO: 25038 - RNA, 21 nt, RNAi
uugaggcucagguugguuccg

SEQ ID NO: 25039 - DNA, 21 bp, homo sapiens
gagtccaaccaaggcaacagc

SEQ ID NO: 25040 - RNA, 21 nt, RNAi
guccaaccaaggcaacagcuu

SEQ ID NO: 25041 - RNA, 21 nt, RNAi
uucagguugguuccguugucg

SEQ ID NO: 25042 - DNA, 21 bp, homo sapiens
gatatccacaaacaggtgatc

SEQ ID NO: 25043 - RNA, 21 nt, RNAi
uauccacaaacaggugaucuu

SEQ ID NO: 25044 - RNA, 21 nt, RNAi
uuauagguguuuguccacuag

SEQ ID NO: 25045 - DNA, 21 bp, homo sapiens
gatctctctgcagagtggcca

SEQ ID NO: 25046 - RNA, 21 nt, RNAi
ucucucugcagaguggccauu

SEQ ID NO: 25047 - RNA, 21 nt, RNAi
uuagagagacgucucaccggu

SEQ ID NO: 25048 - DNA, 21 bp, homo sapiens
gagtggccattcactgctggt

SEQ ID NO: 25049 - RNA, 21 nt, RNAi
guggccauucacugcugguuu

SEQ ID NO: 25050 - RNA, 21 nt, RNAi
uucaccgguaagugacgacca

SEQ ID NO: 25051 - DNA, 21 bp, homo sapiens
gagctatggcagctgctcctc

SEQ ID NO: 25052 - RNA, 21 nt, RNAi
gcuauggcagcugcuccucuu

SEQ ID NO: 25053 - RNA, 21 nt, RNAi
uucgauaccgucgacgaggag

SEQ ID NO: 25054 - DNA, 21 bp, homo sapiens
gatggagctgtgccaattctt

SEQ ID NO: 25055 - RNA, 21 nt, RNAi
uggagcugugccaauucuuuu

SEQ ID NO: 25056 - RNA, 21 nt, RNAi
uuaccucgacacgguuaagaa

SEQ ID NO: 25057 - DNA, 21 bp, homo sapiens
gagctgtgccaattcttccag

SEQ ID NO: 25058 - RNA, 21 nt, RNAi
gcugugccaauucuuccaguu

SEQ ID NO: 25059 - RNA, 21 nt, RNAi
uucgacacgguuaagaagguc

SEQ ID NO: 25060 - DNA, 21 bp, homo sapiens
gacagaggacatgagatactg

SEQ ID NO: 25061 - RNA, 21 nt, RNAi
cagaggacaugagauacuguu

SEQ ID NO: 25062 - RNA, 21 nt, RNAi
uugucuccuguacucuaugac

SEQ ID NO: 25063 - DNA, 21 bp, homo sapiens
gaggacatgagatactgtctt

SEQ ID NO: 25064 - RNA, 21 nt, RNAi
ggacaugagauacugucuuuu

SEQ ID NO: 25065 - RNA, 21 nt, RNAi
uuccuguacucuaugacagaa

SEQ ID NO: 25066 - DNA, 21 bp, homo sapiens
gacatgagatactgtcttgaa

SEQ ID NO: 25067 - RNA, 21 nt, RNAi
caugagauacugucuugaauu

SEQ ID NO: 25068 - RNA, 21 nt, RNAi
uuguacucuaugacagaacuu

SEQ ID NO: 25069 - DNA, 21 bp, homo sapiens
gagatactgtcttgaatacta

SEQ ID NO: 25070 - RNA, 21 nt, RNAi
gauacugucuugaauacuauu

SEQ ID NO: 25071 - RNA, 21 nt, RNAi
uucuaugacagaacuuaugau

SEQ ID NO: 25072 - DNA, 21 bp, homo sapiens
gaatactattcctggtttctg

SEQ ID NO: 25073 - RNA, 21 nt, RNAi
auacuauuccugguuucuguu

SEQ ID NO: 25074 - RNA, 21 nt, RNAi
uuuaugauaaggaccaaagac

SEQ ID NO: 25075 - DNA, 21 bp, homo sapiens
gaagaatgcaacatatatctg

SEQ ID NO: 25076 - RNA, 21 nt, RNAi
agaaugcaacauauaucuguu

SEQ ID NO: 25077 - RNA, 21 nt, RNAi
uuucuuacguuguauauagac

SEQ ID NO: 25078 - DNA, 21 bp, homo sapiens
gaatgcaacatatatctgtca

SEQ ID NO: 25079 - RNA, 21 nt, RNAi
augcaacauauaucugucauu

SEQ ID NO: 25080 - RNA, 21 nt, RNAi
uuuacguuguauauagacagu

SEQ ID NO: 25081 - DNA, 21 bp, homo sapiens
gagaatatctgcaagtctgtg

SEQ ID NO: 25082 - RNA, 21 nt, RNAi
gaauaucugcaagucuguguu

SEQ ID NO: 25083 - RNA, 21 nt, RNAi
uucuuauagacguucagacac

SEQ ID NO: 25084 - DNA, 21 bp, homo sapiens
gaatatctgcaagtctgtgtg

SEQ ID NO: 25085 - RNA, 21 nt, RNAi
auaucugcaagucuguguguu

SEQ ID NO: 25086 - RNA, 21 nt, RNAi
uuuauagacguucagacacac

SEQ ID NO: 25087 - DNA, 21 bp, homo sapiens
taaataatctttgctggcagg

SEQ ID NO: 25088 - RNA, 21 nt, RNAi
aauaaucuuugcuggcagguu

SEQ ID NO: 25089 - RNA, 21 nt, RNAi
uuuuauuagaaacgaccgucc

SEQ ID NO: 25090 - DNA, 21 bp, homo sapiens
taatctttgctggcaggacta

SEQ ID NO: 25091 - RNA, 21 nt, RNAi
aucuuugcuggcaggacuauu

SEQ ID NO: 25092 - RNA, 21 nt, RNAi
uuuagaaacgaccguccugau

SEQ ID NO: 25093 - DNA, 21 bp, homo sapiens
tatgctgaatctccttaggca

SEQ ID NO: 25094 - RNA, 21 nt, RNAi
ugcugaaucuccuuaggcauu

SEQ ID NO: 25095 - RNA, 21 nt, RNAi
uuacgacuuagaggaauccgu

SEQ ID NO: 25096 - DNA, 21 bp, homo sapiens
taggcactctctaattagatg

SEQ ID NO: 25097 - RNA, 21 nt, RNAi
ggcacucucuaauuagauguu

SEQ ID NO: 25098 - RNA, 21 nt, RNAi
uuccgugagagauuaaucuac

SEQ ID NO: 25099 - DNA, 21 bp, homo sapiens
taattagatgtcctaggtcct

SEQ ID NO: 25100 - RNA, 21 nt, RNAi
auuagauguccuagguccuuu

SEQ ID NO: 25101 - RNA, 21 nt, RNAi
uuuaaucuacaggauccagga

SEQ ID NO: 25102 - DNA, 21 bp, homo sapiens
tatccaggccatcacctatca

SEQ ID NO: 25103 - RNA, 21 nt, RNAi
uccaggccaucaccuaucauu

SEQ ID NO: 25104 - RNA, 21 nt, RNAi
uuagguccgguaguggauagu

SEQ ID NO: 25105 - DNA, 21 bp, homo sapiens
tattaatataagaaggcaggc

SEQ ID NO: 25106 - RNA, 21 nt, RNAi
uuaauauaagaaggcaggcuu

SEQ ID NO: 25107 - RNA, 21 nt, RNAi
uuaauuauauucuuccguccg

SEQ ID NO: 25108 - DNA, 21 bp, homo sapiens
taatataagaaggcaggcatg

SEQ ID NO: 25109 - RNA, 21 nt, RNAi
auauaagaaggcaggcauguu

SEQ ID NO: 25110 - RNA, 21 nt, RNAi
uuuauauucuuccguccguac

SEQ ID NO: 25111 - DNA, 21 bp, homo sapiens
tataagaaggcaggcatgtca

SEQ ID NO: 25112 - RNA, 21 nt, RNAi
uaagaaggcaggcaugucauu

SEQ ID NO: 25113 - RNA, 21 nt, RNAi
uuauucuuccguccguacagu

SEQ ID NO: 25114 - DNA, 21 bp, homo sapiens
taagaaggcaggcatgtcagg

SEQ ID NO: 25115 - RNA, 21 nt, RNAi
agaaggcaggcaugucagguu

SEQ ID NO: 25116 - RNA, 21 nt, RNAi
uuucuuccguccguacagucc

SEQ ID NO: 25117 - DNA, 21 bp, homo sapiens
taactgatgacattccaccac

SEQ ID NO: 25118 - RNA, 21 nt, RNAi
acugaugacauuccaccacuu

SEQ ID NO: 25119 - RNA, 21 nt, RNAi
uuugacuacuguaagguggug

SEQ ID NO: 25120 - DNA, 21 bp, homo sapiens
taaatggccggtccttgcctt

SEQ ID NO: 25121 - RNA, 21 nt, RNAi
aauggccgguccuugccuuuu

SEQ ID NO: 25122 - RNA, 21 nt, RNAi
uuuuaccggccaggaacggaa

SEQ ID NO: 25123 - DNA, 21 bp, homo sapiens
taactgatgacattaccttgt

SEQ ID NO: 25124 - RNA, 21 nt, RNAi
acugaugacauuaccuuguuu

SEQ ID NO: 25125 - RNA, 21 nt, RNAi
uuugacuacuguaauggaaca

SEQ ID NO: 25126 - DNA, 21 bp, homo sapiens
taccttgtgaaagtcctcttc

SEQ ID NO: 25127 - RNA, 21 nt, RNAi
ccuugugaaaguccucuucuu

SEQ ID NO: 25128 - RNA, 21 nt, RNAi
uuggaacacuuucaggagaag

SEQ ID NO: 25129 - DNA, 21 bp, homo sapiens
taaacagctttattgctcaca

SEQ ID NO: 25130 - RNA, 21 nt, RNAi
aacagcuuuauugcucacauu

SEQ ID NO: 25131 - RNA, 21 nt, RNAi
uuuugucgaaauaacgagugu

SEQ ID NO: 25132 - DNA, 21 bp, homo sapiens
tattgctcacacaaagcctgt

SEQ ID NO: 25133 - RNA, 21 nt, RNAi
uugcucacacaaagccuguuu

SEQ ID NO: 25134 - RNA, 21 nt, RNAi
uuaacgaguguguuucggaca

SEQ ID NO: 25135 - DNA, 21 bp, homo sapiens
tagttgtatccataaggcata

SEQ ID NO: 25136 - RNA, 21 nt, RNAi
guuguauccauaaggcauauu

SEQ ID NO: 25137 - RNA, 21 nt, RNAi
uucaacauagguauuccguau

SEQ ID NO: 25138 - DNA, 21 bp, homo sapiens
tatccataaggcatatggagg

SEQ ID NO: 25139 - RNA, 21 nt, RNAi
uccauaaggcauauggagguu

SEQ ID NO: 25140 - RNA, 21 nt, RNAi
uuagguauuccguauaccucc

SEQ ID NO: 25141 - DNA, 21 bp, homo sapiens
taaggcatatggaggagacta

SEQ ID NO: 25142 - RNA, 21 nt, RNAi
aggcauauggaggagacuauu

SEQ ID NO: 25143 - RNA, 21 nt, RNAi
uuuccguauaccuccucugau

SEQ ID NO: 25144 - DNA, 21 bp, homo sapiens
tatggaggagactaattcctc

SEQ ID NO: 25145 - RNA, 21 nt, RNAi
uggaggagacuaauuccucuu

SEQ ID NO: 25146 - RNA, 21 nt, RNAi
uuaccuccucugauuaaggag

SEQ ID NO: 25147 - DNA, 21 bp, homo sapiens
taattcctcttccaaagacat

SEQ ID NO: 25148 - RNA, 21 nt, RNAi
auuccucuuccaaagacauuu

SEQ ID NO: 25149 - RNA, 21 nt, RNAi
uuuaaggagaagguuucugua

SEQ ID NO: 25150 - DNA, 21 bp, homo sapiens
taccagagtcctggagaggct

SEQ ID NO: 25151 - RNA, 21 nt, RNAi
ccagaguccuggagaggcuuu

SEQ ID NO: 25152 - RNA, 21 nt, RNAi
uuggucucaggaccucuccga

SEQ ID NO: 25153 - DNA, 21 bp, homo sapiens
tagagaaaggtttgaatctcc

SEQ ID NO: 25154 - RNA, 21 nt, RNAi
gagaaagguuugaaucuccuu

SEQ ID NO: 25155 - RNA, 21 nt, RNAi
uucucuuuccaaacuuagagg

SEQ ID NO: 25156 - DNA, 21 bp, homo sapiens
tatatttgcagtccagtgacc

SEQ ID NO: 25157 - RNA, 21 nt, RNAi
uauuugcaguccagugaccuu

SEQ ID NO: 25158 - RNA, 21 nt, RNAi
uuauaaacgucaggucacugg

SEQ ID NO: 25159 - DNA, 21 bp, homo sapiens
tatttgcagtccagtgacctt

SEQ ID NO: 25160 - RNA, 21 nt, RNAi
uuugcaguccagugaccuuuu

SEQ ID NO: 25161 - RNA, 21 nt, RNAi
uuaaacgucaggucacuggaa

SEQ ID NO: 25162 - DNA, 21 bp, homo sapiens
taatgttaccattgactgcct

SEQ ID NO: 25163 - RNA, 21 nt, RNAi
auguuaccauugacugccuuu

SEQ ID NO: 25164 - RNA, 21 nt, RNAi
uuuacaaugguaacugacgga

SEQ ID NO: 25165 - DNA, 21 bp, homo sapiens
taatggccacacctggcagcc

SEQ ID NO: 25166 - RNA, 21 nt, RNAi
auggccacaccuggcagccuu

SEQ ID NO: 25167 - RNA, 21 nt, RNAi
uuuaccgguguggaccgucgg

SEQ ID NO: 25168 - DNA, 21 bp, homo sapiens
tatccacaaacaggtgatctc

SEQ ID NO: 25169 - RNA, 21 nt, RNAi
uccacaaacaggugaucucuu

SEQ ID NO: 25170 - RNA, 21 nt, RNAi
uuagguguuuguccacuagag

SEQ ID NO: 25171 - DNA, 21 bp, homo sapiens
tatggcagctgctcctctcac

SEQ ID NO: 25172 - RNA, 21 nt, RNAi
uggcagcugcuccucucacuu

SEQ ID NO: 25173 - RNA, 21 nt, RNAi
uuaccgucgacgaggagagug

SEQ ID NO: 25174 - DNA, 21 bp, homo sapiens
tactgtcttgaatactattcc

SEQ ID NO: 25175 - RNA, 21 nt, RNAi
cugucuugaauacuauuccuu

SEQ ID NO: 25176 - RNA, 21 nt, RNAi
uugacagaacuuaugauaagg

SEQ ID NO: 25177 - DNA, 21 bp, homo sapiens
tactattcctggtttctgaag

SEQ ID NO: 25178 - RNA, 21 nt, RNAi
cuauuccugguuucugaaguu

SEQ ID NO: 25179 - RNA, 21 nt, RNAi
uugauaaggaccaaagacuuc

SEQ ID NO: 25180 - DNA, 21 bp, homo sapiens
tattcctggtttctgaagaat

SEQ ID NO: 25181 - RNA, 21 nt, RNAi
uuccugguuucugaagaauuu

SEQ ID NO: 25182 - RNA, 21 nt, RNAi
uuaaggaccaaagacuucuua

SEQ ID NO: 25183 - DNA, 21 bp, homo sapiens
tatctgcaagtctgtgtgagg

SEQ ID NO: 25184 - RNA, 21 nt, RNAi
ucugcaagucugugugagguu

SEQ ID NO: 25185 - RNA, 21 nt, RNAi
uuagacguucagacacacucc

SEQ ID NO: 25186 - DNA, 21 bp, homo sapiens
taaagtggttattcttggaag

SEQ ID NO: 25187 - RNA, 21 nt, RNAi
aagugguuauucuuggaaguu

SEQ ID NO: 25188 - RNA, 21 nt, RNAi
uuuucaccaauaagaaccuuc

SEQ ID NO: 25189 - DNA, 21 bp, homo sapiens
aaacactaccaagtacaagcc

SEQ ID NO: 25190 - RNA, 21 nt, RNAi
acacuaccaaguacaagccuu

SEQ ID NO: 25191 - RNA, 21 nt, RNAi
uuugugaugguucauguucgg

SEQ ID NO: 25192 - DNA, 21 bp, homo sapiens
cagatatccacaaacaggtga

SEQ ID NO: 25193 - RNA, 21 nt, RNAi
gauauccacaaacaggugauu

SEQ ID NO: 25194 - RNA, 21 nt, RNAi
uucuauagguguuuguccacu

SEQ ID NO: 25195 - DNA, 21 bp, homo sapiens
cagaggacatgagatactgtc

SEQ ID NO: 25196 - RNA, 21 nt, RNAi
gaggacaugagauacugucuu

SEQ ID NO: 25197 - RNA, 21 nt, RNAi
uucuccuguacucuaugacag

SEQ ID NO: 25198 - DNA, 21 bp, homo sapiens
gatatccacaaacaggtgatc

SEQ ID NO: 25199 - RNA, 21 nt, RNAi
uauccacaaacaggugaucuu

SEQ ID NO: 25200 - RNA, 21 nt, RNAi
uuauagguguuuguccacuag

SEQ ID NO: 25201 - DNA, 21 bp, homo sapiens
gaggacatgagatactgtctt

SEQ ID NO: 25202 - RNA, 21 nt, RNAi
ggacaugagauacugucuuuu

SEQ ID NO: 25203 - RNA, 21 nt, RNAi
uuccuguacucuaugacagaa

SEQ ID NO: 25204 - DNA, 21 bp, homo sapiens
taatgttaccattgactgcct

SEQ ID NO: 25205 - RNA, 21 nt, RNAi
auguuaccauugacugccuuu

SEQ ID NO: 25206 - RNA, 21 nt, RNAi
uuuacaaugguaacugacgga

SEQ ID NO: 25207 - DNA, 21 bp, homo sapiens
aacagagattgttgatttgcc

SEQ ID NO: 25208 - RNA, 21 nt, RNAi
cagagauuguugauuugccuu

SEQ ID NO: 25209 - RNA, 21 nt, RNAi
uugucucuaacaacuaaacgg

SEQ ID NO: 25210 - DNA, 21 bp, homo sapiens
aagcaagagattcattgcagc

SEQ ID NO: 25211 - RNA, 21 nt, RNAi
gcaagagauucauugcagcuu

SEQ ID NO: 25212 - RNA, 21 nt, RNAi
uucguucucuaaguaacgucg

SEQ ID NO: 25213 - DNA, 21 bp, homo sapiens
aagagattcattgcagctcag

SEQ ID NO: 25214 - RNA, 21 nt, RNAi
gagauucauugcagcucaguu

SEQ ID NO: 25215 - RNA, 21 nt, RNAi
uucucuaaguaacgucgaguc

SEQ ID NO: 25216 - DNA, 21 bp, homo sapiens
aaggcaccaatgcctatcgct

SEQ ID NO: 25217 - RNA, 21 nt, RNAi
ggcaccaaugccuaucgcuuu

SEQ ID NO: 25218 - RNA, 21 nt, RNAi
uuccgugguuacggauagcga

SEQ ID NO: 25219 - DNA, 21 bp, homo sapiens
aatgcctatcgctcctactgc

SEQ ID NO: 25220 - RNA, 21 nt, RNAi
ugccuaucgcuccuacugcuu

SEQ ID NO: 25221 - RNA, 21 nt, RNAi
uuacggauagcgaggaugacg

SEQ ID NO: 25222 - DNA, 21 bp, homo sapiens
aatgaagaccgtgagacctgg

SEQ ID NO: 25223 - RNA, 21 nt, RNAi
ugaagaccgugagaccugguu

SEQ ID NO: 25224 - RNA, 21 nt, RNAi
uuacuucuggcacucuggacc

SEQ ID NO: 25225 - DNA, 21 bp, homo sapiens
aacctggtgtctgtgctcacc

SEQ ID NO: 25226 - RNA, 21 nt, RNAi
ccuggugucugugcucaccuu

SEQ ID NO: 25227 - RNA, 21 nt, RNAi
uuggaccacagacacgagugg

SEQ ID NO: 25228 - DNA, 21 bp, homo sapiens
aaggagagtggcactgatgac

SEQ ID NO: 25229 - RNA, 21 nt, RNAi
ggagaguggcacugaugacuu

SEQ ID NO: 25230 - RNA, 21 nt, RNAi
uuccucucaccgugacuacug

SEQ ID NO: 25231 - DNA, 21 bp, homo sapiens
aatgtctggattggcctccat

SEQ ID NO: 25232 - RNA, 21 nt, RNAi
ugucuggauuggccuccauuu

SEQ ID NO: 25233 - RNA, 21 nt, RNAi
uuacagaccuaaccggaggua

SEQ ID NO: 25234 - DNA, 21 bp, homo sapiens
aagcagtgttaatcctggcta

SEQ ID NO: 25235 - RNA, 21 nt, RNAi
gcaguguuaauccuggcuauu

SEQ ID NO: 25236 - RNA, 21 nt, RNAi
uucgucacaauuaggaccgau

SEQ ID NO: 25237 - DNA, 21 bp, homo sapiens
aatcctggctactgtgtgagc

SEQ ID NO: 25238 - RNA, 21 nt, RNAi
uccuggcuacugugugagcuu

SEQ ID NO: 25239 - RNA, 21 nt, RNAi
uuaggaccgaugacacacucg

SEQ ID NO: 25240 - DNA, 21 bp, homo sapiens
aagcacaggattccagaaatg

SEQ ID NO: 25241 - RNA, 21 nt, RNAi
gcacaggauuccagaaauguu

SEQ ID NO: 25242 - RNA, 21 nt, RNAi
uucguguccuaaggucuuuac

SEQ ID NO: 25243 - DNA, 21 bp, homo sapiens
aaatggaaggatgtgccttgt

SEQ ID NO: 25244 - RNA, 21 nt, RNAi
auggaaggaugugccuuguuu

SEQ ID NO: 25245 - RNA, 21 nt, RNAi
uuuaccuuccuacacggaaca

SEQ ID NO: 25246 - DNA, 21 bp, homo sapiens
aatggaaggatgtgccttgtg

SEQ ID NO: 25247 - RNA, 21 nt, RNAi
uggaaggaugugccuuguguu

SEQ ID NO: 25248 - RNA, 21 nt, RNAi
uuaccuuccuacacggaacac

SEQ ID NO: 25249 - DNA, 21 bp, homo sapiens
aaggatgtgccttgtgaagac

SEQ ID NO: 25250 - RNA, 21 nt, RNAi
ggaugugccuugugaagacuu

SEQ ID NO: 25251 - RNA, 21 nt, RNAi
uuccuacacggaacacuucug

SEQ ID NO: 25252 - DNA, 21 bp, homo sapiens
aagacaagttctcctttgtct

SEQ ID NO: 25253 - RNA, 21 nt, RNAi
gacaaguucuccuuugucuuu

SEQ ID NO: 25254 - RNA, 21 nt, RNAi
uucuguucaagaggaaacaga

SEQ ID NO: 25255 - DNA, 21 bp, homo sapiens
aagttctcctttgtctgcaag

SEQ ID NO: 25256 - RNA, 21 nt, RNAi
guucuccuuugucugcaaguu

SEQ ID NO: 25257 - RNA, 21 nt, RNAi
uucaagaggaaacagacguuc

SEQ ID NO: 25258 - DNA, 21 bp, homo sapiens
aatacatgtctagaactgatc

SEQ ID NO: 25259 - RNA, 21 nt, RNAi
uacaugucuagaacugaucuu

SEQ ID NO: 25260 - RNA, 21 nt, RNAi
uuauguacagaucuugacuag

SEQ ID NO: 25261 - DNA, 21 bp, homo sapiens
aactgatccagcaattacaac

SEQ ID NO: 25262 - RNA, 21 nt, RNAi
cugauccagcaauuacaacuu

SEQ ID NO: 25263 - RNA, 21 nt, RNAi
uugacuaggucguuaauguug

SEQ ID NO: 25264 - DNA, 21 bp, homo sapiens
aaattaaaccggaccatctct

SEQ ID NO: 25265 - RNA, 21 nt, RNAi
auuaaaccggaccaucucuuu

SEQ ID NO: 25266 - RNA, 21 nt, RNAi
uuuaauuuggccugguagaga

SEQ ID NO: 25267 - DNA, 21 bp, homo sapiens
aattaaaccggaccatctctc

SEQ ID NO: 25268 - RNA, 21 nt, RNAi
uuaaaccggaccaucucucuu

SEQ ID NO: 25269 - RNA, 21 nt, RNAi
uuaauuuggccugguagagag

SEQ ID NO: 25270 - DNA, 21 bp, homo sapiens
aaaccggaccatctctccaac

SEQ ID NO: 25271 - RNA, 21 nt, RNAi
accggaccaucucuccaacuu

SEQ ID NO: 25272 - RNA, 21 nt, RNAi
uuuggccugguagagagguug

SEQ ID NO: 25273 - DNA, 21 bp, homo sapiens
aaccggaccatctctccaact

SEQ ID NO: 25274 - RNA, 21 nt, RNAi
ccggaccaucucuccaacuuu

SEQ ID NO: 25275 - RNA, 21 nt, RNAi
uuggccugguagagagguuga

SEQ ID NO: 25276 - DNA, 21 bp, homo sapiens
aactcaactcaacctggacac

SEQ ID NO: 25277 - RNA, 21 nt, RNAi
cucaacucaaccuggacacuu

SEQ ID NO: 25278 - RNA, 21 nt, RNAi
uugaguugaguuggaccugug

SEQ ID NO: 25279 - DNA, 21 bp, homo sapiens
aactcaacctggacactctct

SEQ ID NO: 25280 - RNA, 21 nt, RNAi
cucaaccuggacacucucuuu

SEQ ID NO: 25281 - RNA, 21 nt, RNAi
uugaguuggaccugugagaga

SEQ ID NO: 25282 - DNA, 21 bp, homo sapiens
aacctggacactctcttctct

SEQ ID NO: 25283 - RNA, 21 nt, RNAi
ccuggacacucucuucucuuu

SEQ ID NO: 25284 - RNA, 21 nt, RNAi
uuggaccugugagagaagaga

SEQ ID NO: 25285 - DNA, 21 bp, homo sapiens
cagccaacagagattgttgat

SEQ ID NO: 25286 - RNA, 21 nt, RNAi
gccaacagagauuguugauuu

SEQ ID NO: 25287 - RNA, 21 nt, RNAi
uucgguugucucuaacaacua

SEQ ID NO: 25288 - DNA, 21 bp, homo sapiens
caacagagattgttgatttgc

SEQ ID NO: 25289 - RNA, 21 nt, RNAi
acagagauuguugauuugcuu

SEQ ID NO: 25290 - RNA, 21 nt, RNAi
uuugucucuaacaacuaaacg

SEQ ID NO: 25291 - DNA, 21 bp, homo sapiens
cagagattgttgatttgcctc

SEQ ID NO: 25292 - RNA, 21 nt, RNAi
gagauuguugauuugccucuu

SEQ ID NO: 25293 - RNA, 21 nt, RNAi
uucucuaacaacuaaacggag

SEQ ID NO: 25294 - DNA, 21 bp, homo sapiens
caagagattcattgcagctca

SEQ ID NO: 25295 - RNA, 21 nt, RNAi
agagauucauugcagcucauu

SEQ ID NO: 25296 - RNA, 21 nt, RNAi
uuucucuaaguaacgucgagu

SEQ ID NO: 25297 - DNA, 21 bp, homo sapiens
cattgcagctcagcatggctc

SEQ ID NO: 25298 - RNA, 21 nt, RNAi
uugcagcucagcauggcucuu

SEQ ID NO: 25299 - RNA, 21 nt, RNAi
uuaacgucgagucguaccgag

SEQ ID NO: 25300 - DNA, 21 bp, homo sapiens
cagctcagcatggctcagacc

SEQ ID NO: 25301 - RNA, 21 nt, RNAi
gcucagcauggcucagaccuu

SEQ ID NO: 25302 - RNA, 21 nt, RNAi
uucgagucguaccgagucugg

SEQ ID NO: 25303 - DNA, 21 bp, homo sapiens
cagcatggctcagaccagctc

SEQ ID NO: 25304 - RNA, 21 nt, RNAi
gcauggcucagaccagcucuu

SEQ ID NO: 25305 - RNA, 21 nt, RNAi
uucguaccgagucuggucgag

SEQ ID NO: 25306 - DNA, 21 bp, homo sapiens
catggctcagaccagctcata

SEQ ID NO: 25307 - RNA, 21 nt, RNAi
uggcucagaccagcucauauu

SEQ ID NO: 25308 - RNA, 21 nt, RNAi
uuaccgagucuggucgaguau

SEQ ID NO: 25309 - DNA, 21 bp, homo sapiens
cagaccagctcatacttcatg

SEQ ID NO: 25310 - RNA, 21 nt, RNAi
gaccagcucauacuucauguu

SEQ ID NO: 25311 - RNA, 21 nt, RNAi
uucuggucgaguaugaaguac

SEQ ID NO: 25312 - DNA, 21 bp, homo sapiens
cagctcatacttcatgctgat

SEQ ID NO: 25313 - RNA, 21 nt, RNAi
gcucauacuucaugcugauuu

SEQ ID NO: 25314 - RNA, 21 nt, RNAi
uucgaguaugaaguacgacua

SEQ ID NO: 25315 - DNA, 21 bp, homo sapiens
catacttcatgctgatctcct

SEQ ID NO: 25316 - RNA, 21 nt, RNAi
uacuucaugcugaucuccuuu

SEQ ID NO: 25317 - RNA, 21 nt, RNAi
uuaugaaguacgacuagagga

SEQ ID NO: 25318 - DNA, 21 bp, homo sapiens
catgctgatctcctgcctgat

SEQ ID NO: 25319 - RNA, 21 nt, RNAi
ugcugaucuccugccugauuu

SEQ ID NO: 25320 - RNA, 21 nt, RNAi
uuacgacuagaggacggacua

SEQ ID NO: 25321 - DNA, 21 bp, homo sapiens
cagaaggcaccaatgcctatc

SEQ ID NO: 25322 - RNA, 21 nt, RNAi
gaaggcaccaaugccuaucuu

SEQ ID NO: 25323 - RNA, 21 nt, RNAi
uucuuccgugguuacggauag

SEQ ID NO: 25324 - DNA, 21 bp, homo sapiens
caccaatgcctatcgctccta

SEQ ID NO: 25325 - RNA, 21 nt, RNAi
ccaaugccuaucgcuccuauu

SEQ ID NO: 25326 - RNA, 21 nt, RNAi
uugguuacggauagcgaggau

SEQ ID NO: 25327 - DNA, 21 bp, homo sapiens
caatgcctatcgctcctactg

SEQ ID NO: 25328 - RNA, 21 nt, RNAi
augccuaucgcuccuacuguu

SEQ ID NO: 25329 - RNA, 21 nt, RNAi
uuuacggauagcgaggaugac

SEQ ID NO: 25330 - DNA, 21 bp, homo sapiens
cagatctctattgccagaaca

SEQ ID NO: 25331 - RNA, 21 nt, RNAi
gaucucuauugccagaacauu

SEQ ID NO: 25332 - RNA, 21 nt, RNAi
uucuagagauaacggucuugu

SEQ ID NO: 25333 - DNA, 21 bp, homo sapiens
caacctggtgtctgtgctcac

SEQ ID NO: 25334 - RNA, 21 nt, RNAi
accuggugucugugcucacuu

SEQ ID NO: 25335 - RNA, 21 nt, RNAi
uuuggaccacagacacgagug

SEQ ID NO: 25336 - DNA, 21 bp, homo sapiens
cactgattaaggagagtggca

SEQ ID NO: 25337 - RNA, 21 nt, RNAi
cugauuaaggagaguggcauu

SEQ ID NO: 25338 - RNA, 21 nt, RNAi
uugacuaauuccucucaccgu

SEQ ID NO: 25339 - DNA, 21 bp, homo sapiens
cactgatgacttcaatgtctg

SEQ ID NO: 25340 - RNA, 21 nt, RNAi
cugaugacuucaaugucuguu

SEQ ID NO: 25341 - RNA, 21 nt, RNAi
uugacuacugaaguuacagac

SEQ ID NO: 25342 - DNA, 21 bp, homo sapiens
caatgtctggattggcctcca

SEQ ID NO: 25343 - RNA, 21 nt, RNAi
augucuggauuggccuccauu

SEQ ID NO: 25344 - RNA, 21 nt, RNAi
uuuacagaccuaaccggaggu

SEQ ID NO: 25345 - DNA, 21 bp, homo sapiens
caagcagtgttaatcctggct

SEQ ID NO: 25346 - RNA, 21 nt, RNAi
agcaguguuaauccuggcuuu

SEQ ID NO: 25347 - RNA, 21 nt, RNAi
uuucgucacaauuaggaccga

SEQ ID NO: 25348 - DNA, 21 bp, homo sapiens
cagtgttaatcctggctactg

SEQ ID NO: 25349 - RNA, 21 nt, RNAi
guguuaauccuggcuacuguu

SEQ ID NO: 25350 - RNA, 21 nt, RNAi
uucacaauuaggaccgaugac

SEQ ID NO: 25351 - DNA, 21 bp, homo sapiens
caagcacaggattccagaaat

SEQ ID NO: 25352 - RNA, 21 nt, RNAi
agcacaggauuccagaaauuu

SEQ ID NO: 25353 - RNA, 21 nt, RNAi
uuucguguccuaaggucuuua

SEQ ID NO: 25354 - DNA, 21 bp, homo sapiens
cacaggattccagaaatggaa

SEQ ID NO: 25355 - RNA, 21 nt, RNAi
caggauuccagaaauggaauu

SEQ ID NO: 25356 - RNA, 21 nt, RNAi
uuguccuaaggucuuuaccuu

SEQ ID NO: 25357 - DNA, 21 bp, homo sapiens
caggattccagaaatggaagg

SEQ ID NO: 25358 - RNA, 21 nt, RNAi
ggauuccagaaauggaagguu

SEQ ID NO: 25359 - RNA, 21 nt, RNAi
uuccuaaggucuuuaccuucc

SEQ ID NO: 25360 - DNA, 21 bp, homo sapiens
cagaaatggaaggatgtgcct

SEQ ID NO: 25361 - RNA, 21 nt, RNAi
gaaauggaaggaugugccuuu

SEQ ID NO: 25362 - RNA, 21 nt, RNAi
uucuuuaccuuccuacacgga

SEQ ID NO: 25363 - DNA, 21 bp, homo sapiens
caagttctcctttgtctgcaa

SEQ ID NO: 25364 - RNA, 21 nt, RNAi
aguucuccuuugucugcaauu

SEQ ID NO: 25365 - RNA, 21 nt, RNAi
uuucaagaggaaacagacguu

SEQ ID NO: 25366 - DNA, 21 bp, homo sapiens
catgtctagaactgatccagc

SEQ ID NO: 25367 - RNA, 21 nt, RNAi
ugucuagaacugauccagcuu

SEQ ID NO: 25368 - RNA, 21 nt, RNAi
uuacagaucuugacuaggucg

SEQ ID NO: 25369 - DNA, 21 bp, homo sapiens
cagcaattacaacggagtcaa

SEQ ID NO: 25370 - RNA, 21 nt, RNAi
gcaauuacaacggagucaauu

SEQ ID NO: 25371 - RNA, 21 nt, RNAi
uucguuaauguugccucaguu

SEQ ID NO: 25372 - DNA, 21 bp, homo sapiens
catctctccaactcaactcaa

SEQ ID NO: 25373 - RNA, 21 nt, RNAi
ucucuccaacucaacucaauu

SEQ ID NO: 25374 - RNA, 21 nt, RNAi
uuagagagguugaguugaguu

SEQ ID NO: 25375 - DNA, 21 bp, homo sapiens
caactcaactcaacctggaca

SEQ ID NO: 25376 - RNA, 21 nt, RNAi
acucaacucaaccuggacauu

SEQ ID NO: 25377 - RNA, 21 nt, RNAi
uuugaguugaguuggaccugu

SEQ ID NO: 25378 - DNA, 21 bp, homo sapiens
caactcaacctggacactctc

SEQ ID NO: 25379 - RNA, 21 nt, RNAi
acucaaccuggacacucucuu

SEQ ID NO: 25380 - RNA, 21 nt, RNAi
uuugaguuggaccugugagag

SEQ ID NO: 25381 - DNA, 21 bp, homo sapiens
caacctggacactctcttctc

SEQ ID NO: 25382 - RNA, 21 nt, RNAi
accuggacacucucuucucuu

SEQ ID NO: 25383 - RNA, 21 nt, RNAi
uuuggaccugugagagaagag

SEQ ID NO: 25384 - DNA, 21 bp, homo sapiens
cactctcttctctgctgagtt

SEQ ID NO: 25385 - RNA, 21 nt, RNAi
cucucuucucugcugaguuuu

SEQ ID NO: 25386 - RNA, 21 nt, RNAi
uugagagaagagacgacucaa

SEQ ID NO: 25387 - DNA, 21 bp, homo sapiens
gactcagccaacagagattgt

SEQ ID NO: 25388 - RNA, 21 nt, RNAi
cucagccaacagagauuguuu

SEQ ID NO: 25389 - RNA, 21 nt, RNAi
uugagucgguugucucuaaca

SEQ ID NO: 25390 - DNA, 21 bp, homo sapiens
gagattgttgatttgcctctt

SEQ ID NO: 25391 - RNA, 21 nt, RNAi
gauuguugauuugccucuuuu

SEQ ID NO: 25392 - RNA, 21 nt, RNAi
uucuaacaacuaaacggagaa

SEQ ID NO: 25393 - DNA, 21 bp, homo sapiens
gattgttgatttgcctcttaa

SEQ ID NO: 25394 - RNA, 21 nt, RNAi
uuguugauuugccucuuaauu

SEQ ID NO: 25395 - RNA, 21 nt, RNAi
uuaacaacuaaacggagaauu

SEQ ID NO: 25396 - DNA, 21 bp, homo sapiens
gatttgcctcttaagcaagag

SEQ ID NO: 25397 - RNA, 21 nt, RNAi
uuugccucuuaagcaagaguu

SEQ ID NO: 25398 - RNA, 21 nt, RNAi
uuaaacggagaauucguucuc

SEQ ID NO: 25399 - DNA, 21 bp, homo sapiens
gagattcattgcagctcagca

SEQ ID NO: 25400 - RNA, 21 nt, RNAi
gauucauugcagcucagcauu

SEQ ID NO: 25401 - RNA, 21 nt, RNAi
uucuaaguaacgucgagucgu

SEQ ID NO: 25402 - DNA, 21 bp, homo sapiens
gattcattgcagctcagcatg

SEQ ID NO: 25403 - RNA, 21 nt, RNAi
uucauugcagcucagcauguu

SEQ ID NO: 25404 - RNA, 21 nt, RNAi
uuaaguaacgucgagucguac

SEQ ID NO: 25405 - DNA, 21 bp, homo sapiens
gaccagctcatacttcatgct

SEQ ID NO: 25406 - RNA, 21 nt, RNAi
ccagcucauacuucaugcuuu

SEQ ID NO: 25407 - RNA, 21 nt, RNAi
uuggucgaguaugaaguacga

SEQ ID NO: 25408 - DNA, 21 bp, homo sapiens
gatctcctgcctgatgtttct

SEQ ID NO: 25409 - RNA, 21 nt, RNAi
ucuccugccugauguuucuuu

SEQ ID NO: 25410 - RNA, 21 nt, RNAi
uuagaggacggacuacaaaga

SEQ ID NO: 25411 - DNA, 21 bp, homo sapiens
gatgtttctgtctcagagcca

SEQ ID NO: 25412 - RNA, 21 nt, RNAi
uguuucugucucagagccauu

SEQ ID NO: 25413 - RNA, 21 nt, RNAi
uuacaaagacagagucucggu

SEQ ID NO: 25414 - DNA, 21 bp, homo sapiens
gaaggcaccaatgcctatcgc

SEQ ID NO: 25415 - RNA, 21 nt, RNAi
aggcaccaaugccuaucgcuu

SEQ ID NO: 25416 - RNA, 21 nt, RNAi
uuuccgugguuacggauagcg

SEQ ID NO: 25417 - DNA, 21 bp, homo sapiens
gatgcagatctctattgccag

SEQ ID NO: 25418 - RNA, 21 nt, RNAi
ugcagaucucuauugccaguu

SEQ ID NO: 25419 - RNA, 21 nt, RNAi
uuacgucuagagauaacgguc

SEQ ID NO: 25420 - DNA, 21 bp, homo sapiens
gatctctattgccagaacatg

SEQ ID NO: 25421 - RNA, 21 nt, RNAi
ucucuauugccagaacauguu

SEQ ID NO: 25422 - RNA, 21 nt, RNAi
uuagagauaacggucuuguac

SEQ ID NO: 25423 - DNA, 21 bp, homo sapiens
gattaaggagagtggcactga

SEQ ID NO: 25424 - RNA, 21 nt, RNAi
uuaaggagaguggcacugauu

SEQ ID NO: 25425 - RNA, 21 nt, RNAi
uuaauuccucucaccgugacu

SEQ ID NO: 25426 - DNA, 21 bp, homo sapiens
gagagtggcactgatgacttc

SEQ ID NO: 25427 - RNA, 21 nt, RNAi
gaguggcacugaugacuucuu

SEQ ID NO: 25428 - RNA, 21 nt, RNAi
uucucaccgugacuacugaag

SEQ ID NO: 25429 - DNA, 21 bp, homo sapiens
gagtggcactgatgacttcaa

SEQ ID NO: 25430 - RNA, 21 nt, RNAi
guggcacugaugacuucaauu

SEQ ID NO: 25431 - RNA, 21 nt, RNAi
uucaccgugacuacugaaguu

SEQ ID NO: 25432 - DNA, 21 bp, homo sapiens
gatgacttcaatgtctggatt

SEQ ID NO: 25433 - RNA, 21 nt, RNAi
ugacuucaaugucuggauuuu

SEQ ID NO: 25434 - RNA, 21 nt, RNAi
uuacugaaguuacagaccuaa

SEQ ID NO: 25435 - DNA, 21 bp, homo sapiens
gacttcaatgtctggattggc

SEQ ID NO: 25436 - RNA, 21 nt, RNAi
cuucaaugucuggauuggcuu

SEQ ID NO: 25437 - RNA, 21 nt, RNAi
uugaaguuacagaccuaaccg

SEQ ID NO: 25438 - DNA, 21 bp, homo sapiens
gagcctgacctcaagcacagg

SEQ ID NO: 25439 - RNA, 21 nt, RNAi
gccugaccucaagcacagguu

SEQ ID NO: 25440 - RNA, 21 nt, RNAi
uucggacuggaguucgugucc

SEQ ID NO: 25441 - DNA, 21 bp, homo sapiens
gacctcaagcacaggattcca

SEQ ID NO: 25442 - RNA, 21 nt, RNAi
ccucaagcacaggauuccauu

SEQ ID NO: 25443 - RNA, 21 nt, RNAi
uuggaguucguguccuaaggu

SEQ ID NO: 25444 - DNA, 21 bp, homo sapiens
gattccagaaatggaaggatg

SEQ ID NO: 25445 - RNA, 21 nt, RNAi
uuccagaaauggaaggauguu

SEQ ID NO: 25446 - RNA, 21 nt, RNAi
uuaaggucuuuaccuuccuac

SEQ ID NO: 25447 - DNA, 21 bp, homo sapiens
gaaatggaaggatgtgccttg

SEQ ID NO: 25448 - RNA, 21 nt, RNAi
aauggaaggaugugccuuguu

SEQ ID NO: 25449 - RNA, 21 nt, RNAi
uuuuaccuuccuacacggaac

SEQ ID NO: 25450 - DNA, 21 bp, homo sapiens
gaaggatgtgccttgtgaaga

SEQ ID NO: 25451 - RNA, 21 nt, RNAi
aggaugugccuugugaagauu

SEQ ID NO: 25452 - RNA, 21 nt, RNAi
uuuccuacacggaacacuucu

SEQ ID NO: 25453 - DNA, 21 bp, homo sapiens
gatgtgccttgtgaagacaag

SEQ ID NO: 25454 - RNA, 21 nt, RNAi
ugugccuugugaagacaaguu

SEQ ID NO: 25455 - RNA, 21 nt, RNAi
uuacacggaacacuucuguuc

SEQ ID NO: 25456 - DNA, 21 bp, homo sapiens
gaagacaagttctcctttgtc

SEQ ID NO: 25457 - RNA, 21 nt, RNAi
agacaaguucuccuuugucuu

SEQ ID NO: 25458 - RNA, 21 nt, RNAi
uuucuguucaagaggaaacag

SEQ ID NO: 25459 - DNA, 21 bp, homo sapiens
gacaagttctcctttgtctgc

SEQ ID NO: 25460 - RNA, 21 nt, RNAi
caaguucuccuuugucugcuu

SEQ ID NO: 25461 - RNA, 21 nt, RNAi
uuguucaagaggaaacagacg

SEQ ID NO: 25462 - DNA, 21 bp, homo sapiens
gaactgatccagcaattacaa

SEQ ID NO: 25463 - RNA, 21 nt, RNAi
acugauccagcaauuacaauu

SEQ ID NO: 25464 - RNA, 21 nt, RNAi
uuugacuaggucguuaauguu

SEQ ID NO: 25465 - DNA, 21 bp, homo sapiens
gatccagcaattacaacggag

SEQ ID NO: 25466 - RNA, 21 nt, RNAi
uccagcaauuacaacggaguu

SEQ ID NO: 25467 - RNA, 21 nt, RNAi
uuaggucguuaauguugccuc

SEQ ID NO: 25468 - DNA, 21 bp, homo sapiens
gaccatctctccaactcaact

SEQ ID NO: 25469 - RNA, 21 nt, RNAi
ccaucucuccaacucaacuuu

SEQ ID NO: 25470 - RNA, 21 nt, RNAi
uugguagagagguugaguuga

SEQ ID NO: 25471 - DNA, 21 bp, homo sapiens
gacactctcttctctgctgag

SEQ ID NO: 25472 - RNA, 21 nt, RNAi
cacucucuucucugcugaguu

SEQ ID NO: 25473 - RNA, 21 nt, RNAi
uugugagagaagagacgacuc

SEQ ID NO: 25474 - DNA, 21 bp, homo sapiens
gagtttgccttgttaatcttc

SEQ ID NO: 25475 - RNA, 21 nt, RNAi
guuugccuuguuaaucuucuu

SEQ ID NO: 25476 - RNA, 21 nt, RNAi
uucaaacggaacaauuagaag

SEQ ID NO: 25477 - DNA, 21 bp, homo sapiens
taagcaagagattcattgcag

SEQ ID NO: 25478 - RNA, 21 nt, RNAi
agcaagagauucauugcaguu

SEQ ID NO: 25479 - RNA, 21 nt, RNAi
uuucguucucuaaguaacguc

SEQ ID NO: 25480 - DNA, 21 bp, homo sapiens
tacttcatgctgatctcctgc

SEQ ID NO: 25481 - RNA, 21 nt, RNAi
cuucaugcugaucuccugcuu

SEQ ID NO: 25482 - RNA, 21 nt, RNAi
uugaaguacgacuagaggacg

SEQ ID NO: 25483 - DNA, 21 bp, homo sapiens
tatcgctcctactgctactac

SEQ ID NO: 25484 - RNA, 21 nt, RNAi
ucgcuccuacugcuacuacuu

SEQ ID NO: 25485 - RNA, 21 nt, RNAi
uuagcgaggaugacgaugaug

SEQ ID NO: 25486 - DNA, 21 bp, homo sapiens
tactactttaatgaagaccgt

SEQ ID NO: 25487 - RNA, 21 nt, RNAi
cuacuuuaaugaagaccguuu

SEQ ID NO: 25488 - RNA, 21 nt, RNAi
uugaugaaauuacuucuggca

SEQ ID NO: 25489 - DNA, 21 bp, homo sapiens
tactttaatgaagaccgtgag

SEQ ID NO: 25490 - RNA, 21 nt, RNAi
cuuuaaugaagaccgugaguu

SEQ ID NO: 25491 - RNA, 21 nt, RNAi
uugaaauuacuucuggcacuc

SEQ ID NO: 25492 - DNA, 21 bp, homo sapiens
taatgaagaccgtgagacctg

SEQ ID NO: 25493 - RNA, 21 nt, RNAi
augaagaccgugagaccuguu

SEQ ID NO: 25494 - RNA, 21 nt, RNAi
uuuacuucuggcacucuggac

SEQ ID NO: 25495 - DNA, 21 bp, homo sapiens
tattgccagaacatgaattcg

SEQ ID NO: 25496 - RNA, 21 nt, RNAi
uugccagaacaugaauucguu

SEQ ID NO: 25497 - RNA, 21 nt, RNAi
uuaacggucuuguacuuaagc

SEQ ID NO: 25498 - DNA, 21 bp, homo sapiens
taaggagagtggcactgatga

SEQ ID NO: 25499 - RNA, 21 nt, RNAi
aggagaguggcacugaugauu

SEQ ID NO: 25500 - RNA, 21 nt, RNAi
uuuccucucaccgugacuacu

SEQ ID NO: 25501 - DNA, 21 bp, homo sapiens
taatcctggctactgtgtgag

SEQ ID NO: 25502 - RNA, 21 nt, RNAi
auccuggcuacugugugaguu

SEQ ID NO: 25503 - RNA, 21 nt, RNAi
uuuaggaccgaugacacacuc

SEQ ID NO: 25504 - DNA, 21 bp, homo sapiens
tactgtgtgagcctgacctca

SEQ ID NO: 25505 - RNA, 21 nt, RNAi
cugugugagccugaccucauu

SEQ ID NO: 25506 - RNA, 21 nt, RNAi
uugacacacucggacuggagu

SEQ ID NO: 25507 - DNA, 21 bp, homo sapiens
tacatgtctagaactgatcca

SEQ ID NO: 25508 - RNA, 21 nt, RNAi
caugucuagaacugauccauu

SEQ ID NO: 25509 - RNA, 21 nt, RNAi
uuguacagaucuugacuaggu

SEQ ID NO: 25510 - DNA, 21 bp, homo sapiens
tagaactgatccagcaattac

SEQ ID NO: 25511 - RNA, 21 nt, RNAi
gaacugauccagcaauuacuu

SEQ ID NO: 25512 - RNA, 21 nt, RNAi
uucuugacuaggucguuaaug

SEQ ID NO: 25513 - DNA, 21 bp, homo sapiens
taaaccggaccatctctccaa

SEQ ID NO: 25514 - RNA, 21 nt, RNAi
aaccggaccaucucuccaauu

SEQ ID NO: 25515 - RNA, 21 nt, RNAi
uuuuggccugguagagagguu

SEQ ID NO: 25516 - DNA, 21 bp, Homo sapiens
taatgaagaccgtgagacctg

SEQ ID NO: 25517 - RNA, 21 nt, RNAi
augaagaccgugagaccuguu

SEQ ID NO: 25518 - RNA, 21 nt, RNAi
uuuacuucuggcacucuggac

SEQ ID NO: 25519 - DNA, 21 bp, homo sapiens
aagccacctcaagtggacaag

SEQ ID NO: 25520 - RNA, 21 nt, RNAi
gccaccucaaguggacaaguu

SEQ ID NO: 25521 - RNA, 21 nt, RNAi
uucgguggaguucaccuguuc

SEQ ID NO: 25522 - DNA, 21 bp, homo sapiens
aagtggacaaggcacttacca

SEQ ID NO: 25523 - RNA, 21 nt, RNAi
guggacaaggcacuuaccauu

SEQ ID NO: 25524 - RNA, 21 nt, RNAi
uucaccuguuccgugaauggu

SEQ ID NO: 25525 - DNA, 21 bp, homo sapiens
aaggcacttaccaacagagat

SEQ ID NO: 25526 - RNA, 21 nt, RNAi
ggcacuuaccaacagagauuu

SEQ ID NO: 25527 - RNA, 21 nt, RNAi
uuccgugaaugguugucucua

SEQ ID NO: 25528 - DNA, 21 bp, homo sapiens
aacagagattgctgatttgct

SEQ ID NO: 25529 - RNA, 21 nt, RNAi
cagagauugcugauuugcuuu

SEQ ID NO: 25530 - RNA, 21 nt, RNAi
uugucucuaacgacuaaacga

SEQ ID NO: 25531 - DNA, 21 bp, homo sapiens
aagcaagagattcactgccgc

SEQ ID NO: 25532 - RNA, 21 nt, RNAi
gcaagagauucacugccgcuu

SEQ ID NO: 25533 - RNA, 21 nt, RNAi
uucguucucuaagugacggcg

SEQ ID NO: 25534 - DNA, 21 bp, homo sapiens
aagagattcactgccgctaag

SEQ ID NO: 25535 - RNA, 21 nt, RNAi
gagauucacugccgcuaaguu

SEQ ID NO: 25536 - RNA, 21 nt, RNAi
uucucuaagugacggcgauuc

SEQ ID NO: 25537 - DNA, 21 bp, homo sapiens
aagcatggctcagaccaactc

SEQ ID NO: 25538 - RNA, 21 nt, RNAi
gcauggcucagaccaacucuu

SEQ ID NO: 25539 - RNA, 21 nt, RNAi
uucguaccgagucugguugag

SEQ ID NO: 25540 - DNA, 21 bp, homo sapiens
aactcgttcttcatgctgatc

SEQ ID NO: 25541 - RNA, 21 nt, RNAi
cucguucuucaugcugaucuu

SEQ ID NO: 25542 - RNA, 21 nt, RNAi
uugagcaagaaguacgacuag

SEQ ID NO: 25543 - DNA, 21 bp, homo sapiens
aaggcaccaatgcctatcgct

SEQ ID NO: 25544 - RNA, 21 nt, RNAi
ggcaccaaugccuaucgcuuu

SEQ ID NO: 25545 - RNA, 21 nt, RNAi
uuccgugguuacggauagcga

SEQ ID NO: 25546 - DNA, 21 bp, homo sapiens
aatgcctatcgctcctactgc

SEQ ID NO: 25547 - RNA, 21 nt, RNAi
ugccuaucgcuccuacugcuu

SEQ ID NO: 25548 - RNA, 21 nt, RNAi
uuacggauagcgaggaugacg

SEQ ID NO: 25549 - DNA, 21 bp, homo sapiens
aacatgaattcaggcaacctg

SEQ ID NO: 25550 - RNA, 21 nt, RNAi
caugaauucaggcaaccuguu

SEQ ID NO: 25551 - RNA, 21 nt, RNAi
uuguacuuaaguccguuggac

SEQ ID NO: 25552 - DNA, 21 bp, homo sapiens
aattcaggcaacctggtgtct

SEQ ID NO: 25553 - RNA, 21 nt, RNAi
uucaggcaaccuggugucuuu

SEQ ID NO: 25554 - RNA, 21 nt, RNAi
uuaaguccguuggaccacaga

SEQ ID NO: 25555 - DNA, 21 bp, homo sapiens
aacctggtgtctgtgctcacc

SEQ ID NO: 25556 - RNA, 21 nt, RNAi
ccuggugucugugcucaccuu

SEQ ID NO: 25557 - RNA, 21 nt, RNAi
uuggaccacagacacgagugg

SEQ ID NO: 25558 - DNA, 21 bp, homo sapiens
aaggagagtagcactgatgac

SEQ ID NO: 25559 - RNA, 21 nt, RNAi
ggagaguagcacugaugacuu

SEQ ID NO: 25560 - RNA, 21 nt, RNAi
uuccucucaucgugacuacug

SEQ ID NO: 25561 - DNA, 21 bp, homo sapiens
aatgtctggattggcctccat

SEQ ID NO: 25562 - RNA, 21 nt, RNAi
ugucuggauuggccuccauuu

SEQ ID NO: 25563 - RNA, 21 nt, RNAi
uuacagaccuaaccggaggua

SEQ ID NO: 25564 - DNA, 21 bp, homo sapiens
aatgctggctactgtgcaagc

SEQ ID NO: 25565 - RNA, 21 nt, RNAi
ugcuggcuacugugcaagcuu

SEQ ID NO: 25566 - RNA, 21 nt, RNAi
uuacgaccgaugacacguucg

SEQ ID NO: 25567 - DNA, 21 bp, homo sapiens
aagcctgacttcatgctcagg

SEQ ID NO: 25568 - RNA, 21 nt, RNAi
gccugacuucaugcucagguu

SEQ ID NO: 25569 - RNA, 21 nt, RNAi
uucggacugaaguacgagucc

SEQ ID NO: 25570 - DNA, 21 bp, homo sapiens
aagaaatggaaggatgaatct

SEQ ID NO: 25571 - RNA, 21 nt, RNAi
gaaauggaaggaugaaucuuu

SEQ ID NO: 25572 - RNA, 21 nt, RNAi
uucuuuaccuuccuacuuaga

SEQ ID NO: 25573 - DNA, 21 bp, homo sapiens
aaatggaaggatgaatcttgt

SEQ ID NO: 25574 - RNA, 21 nt, RNAi
auggaaggaugaaucuuguuu

SEQ ID NO: 25575 - RNA, 21 nt, RNAi
uuuaccuuccuacuuagaaca

SEQ ID NO: 25576 - DNA, 21 bp, homo sapiens
aatggaaggatgaatcttgtg

SEQ ID NO: 25577 - RNA, 21 nt, RNAi
uggaaggaugaaucuuguguu

SEQ ID NO: 25578 - RNA, 21 nt, RNAi
uuaccuuccuacuuagaacac

SEQ ID NO: 25579 - DNA, 21 bp, homo sapiens
aaggatgaatcttgtgagaag

SEQ ID NO: 25580 - RNA, 21 nt, RNAi
ggaugaaucuugugagaaguu

SEQ ID NO: 25581 - RNA, 21 nt, RNAi
uuccuacuuagaacacucuuc

SEQ ID NO: 25582 - DNA, 21 bp, homo sapiens
aatcttgtgagaagaagttct

SEQ ID NO: 25583 - RNA, 21 nt, RNAi
ucuugugagaagaaguucuuu

SEQ ID NO: 25584 - RNA, 21 nt, RNAi
uuagaacacucuucuucaaga

SEQ ID NO: 25585 - DNA, 21 bp, homo sapiens
aagaagttctcctttgtttgc

SEQ ID NO: 25586 - RNA, 21 nt, RNAi
gaaguucuccuuuguuugcuu

SEQ ID NO: 25587 - RNA, 21 nt, RNAi
uucuucaagaggaaacaaacg

SEQ ID NO: 25588 - DNA, 21 bp, homo sapiens
aagttctcctttgtttgcaag

SEQ ID NO: 25589 - RNA, 21 nt, RNAi
guucuccuuuguuugcaaguu

SEQ ID NO: 25590 - RNA, 21 nt, RNAi
uucaagaggaaacaaacguuc

SEQ ID NO: 25591 - DNA, 21 bp, homo sapiens
aaatggatgtctagaactggt

SEQ ID NO: 25592 - RNA, 21 nt, RNAi
auggaugucuagaacugguuu

SEQ ID NO: 25593 - RNA, 21 nt, RNAi
uuuaccuacagaucuugacca

SEQ ID NO: 25594 - DNA, 21 bp, homo sapiens
aatggatgtctagaactggtc

SEQ ID NO: 25595 - RNA, 21 nt, RNAi
uggaugucuagaacuggucuu

SEQ ID NO: 25596 - RNA, 21 nt, RNAi
uuaccuacagaucuugaccag

SEQ ID NO: 25597 - DNA, 21 bp, homo sapiens
aactggtcctgcaattactat

SEQ ID NO: 25598 - RNA, 21 nt, RNAi
cugguccugcaauuacuauuu

SEQ ID NO: 25599 - RNA, 21 nt, RNAi
uugaccaggacguuaaugaua

SEQ ID NO: 25600 - DNA, 21 bp, homo sapiens
aaactagactatgtctccaac

SEQ ID NO: 25601 - RNA, 21 nt, RNAi
acuagacuaugucuccaacuu

SEQ ID NO: 25602 - RNA, 21 nt, RNAi
uuugaucugauacagagguug

SEQ ID NO: 25603 - DNA, 21 bp, homo sapiens
aactagactatgtctccaact

SEQ ID NO: 25604 - RNA, 21 nt, RNAi
cuagacuaugucuccaacuuu

SEQ ID NO: 25605 - RNA, 21 nt, RNAi
uugaucugauacagagguuga

SEQ ID NO: 25606 - DNA, 21 bp, homo sapiens
aactcagttcagaccatctcc

SEQ ID NO: 25607 - RNA, 21 nt, RNAi
cucaguucagaccaucuccuu

SEQ ID NO: 25608 - RNA, 21 nt, RNAi
uugagucaagucugguagagg

SEQ ID NO: 25609 - DNA, 21 bp, homo sapiens
aatgagtttgcatcgctgatc

SEQ ID NO: 25610 - RNA, 21 nt, RNAi
ugaguuugcaucgcugaucuu

SEQ ID NO: 25611 - RNA, 21 nt, RNAi
uuacucaaacguagcgacuag

SEQ ID NO: 25612 - DNA, 21 bp, homo sapiens
cacctcaagtggacaaggcac

SEQ ID NO: 25613 - RNA, 21 nt, RNAi
ccucaaguggacaaggcacuu

SEQ ID NO: 25614 - RNA, 21 nt, RNAi
uuggaguucaccuguuccgug

SEQ ID NO: 25615 - DNA, 21 bp, homo sapiens
caagtggacaaggcacttacc

SEQ ID NO: 25616 - RNA, 21 nt, RNAi
aguggacaaggcacuuaccuu

SEQ ID NO: 25617 - RNA, 21 nt, RNAi
uuucaccuguuccgugaaugg

SEQ ID NO: 25618 - DNA, 21 bp, homo sapiens
caaggcacttaccaacagaga

SEQ ID NO: 25619 - RNA, 21 nt, RNAi
aggcacuuaccaacagagauu

SEQ ID NO: 25620 - RNA, 21 nt, RNAi
uuuccgugaaugguugucucu

SEQ ID NO: 25621 - DNA, 21 bp, homo sapiens
cacttaccaacagagattgct

SEQ ID NO: 25622 - RNA, 21 nt, RNAi
cuuaccaacagagauugcuuu

SEQ ID NO: 25623 - RNA, 21 nt, RNAi
uugaaugguugucucuaacga

SEQ ID NO: 25624 - DNA, 21 bp, homo sapiens
caacagagattgctgatttgc

SEQ ID NO: 25625 - RNA, 21 nt, RNAi
acagagauugcugauuugcuu

SEQ ID NO: 25626 - RNA, 21 nt, RNAi
uuugucucuaacgacuaaacg

SEQ ID NO: 25627 - DNA, 21 bp, homo sapiens
cagagattgctgatttgctcc

SEQ ID NO: 25628 - RNA, 21 nt, RNAi
gagauugcugauuugcuccuu

SEQ ID NO: 25629 - RNA, 21 nt, RNAi
uucucuaacgacuaaacgagg

SEQ ID NO: 25630 - DNA, 21 bp, homo sapiens
caagagattcactgccgctaa

SEQ ID NO: 25631 - RNA, 21 nt, RNAi
agagauucacugccgcuaauu

SEQ ID NO: 25632 - RNA, 21 nt, RNAi
uuucucuaagugacggcgauu

SEQ ID NO: 25633 - DNA, 21 bp, homo sapiens
cactgccgctaagcatggctc

SEQ ID NO: 25634 - RNA, 21 nt, RNAi
cugccgcuaagcauggcucuu

SEQ ID NO: 25635 - RNA, 21 nt, RNAi
uugacggcgauucguaccgag

SEQ ID NO: 25636 - DNA, 21 bp, homo sapiens
catggctcagaccaactcgtt

SEQ ID NO: 25637 - RNA, 21 nt, RNAi
uggcucagaccaacucguuuu

SEQ ID NO: 25638 - RNA, 21 nt, RNAi
uuaccgagucugguugagcaa

SEQ ID NO: 25639 - DNA, 21 bp, homo sapiens
cagaccaactcgttcttcatg

SEQ ID NO: 25640 - RNA, 21 nt, RNAi
gaccaacucguucuucauguu

SEQ ID NO: 25641 - RNA, 21 nt, RNAi
uucugguugagcaagaaguac

SEQ ID NO: 25642 - DNA, 21 bp, homo sapiens
caactcgttcttcatgctgat

SEQ ID NO: 25643 - RNA, 21 nt, RNAi
acucguucuucaugcugauuu

SEQ ID NO: 25644 - RNA, 21 nt, RNAi
uuugagcaagaaguacgacua

SEQ ID NO: 25645 - DNA, 21 bp, homo sapiens
cagaaggcaccaatgcctatc

SEQ ID NO: 25646 - RNA, 21 nt, RNAi
gaaggcaccaaugccuaucuu

SEQ ID NO: 25647 - RNA, 21 nt, RNAi
uucuuccgugguuacggauag

SEQ ID NO: 25648 - DNA, 21 bp, homo sapiens
caccaatgcctatcgctccta

SEQ ID NO: 25649 - RNA, 21 nt, RNAi
ccaaugccuaucgcuccuauu

SEQ ID NO: 25650 - RNA, 21 nt, RNAi
uugguuacggauagcgaggau

SEQ ID NO: 25651 - DNA, 21 bp, homo sapiens
caatgcctatcgctcctactg

SEQ ID NO: 25652 - RNA, 21 nt, RNAi
augccuaucgcuccuacuguu

SEQ ID NO: 25653 - RNA, 21 nt, RNAi
uuuacggauagcgaggaugac

SEQ ID NO: 25654 - DNA, 21 bp, homo sapiens
cagatctctattgccagaaca

SEQ ID NO: 25655 - RNA, 21 nt, RNAi
gaucucuauugccagaacauu

SEQ ID NO: 25656 - RNA, 21 nt, RNAi
uucuagagauaacggucuugu

SEQ ID NO: 25657 - DNA, 21 bp, homo sapiens
cagaacatgaattcaggcaac

SEQ ID NO: 25658 - RNA, 21 nt, RNAi
gaacaugaauucaggcaacuu

SEQ ID NO: 25659 - RNA, 21 nt, RNAi
uucuuguacuuaaguccguug

SEQ ID NO: 25660 - DNA, 21 bp, homo sapiens
catgaattcaggcaacctggt

SEQ ID NO: 25661 - RNA, 21 nt, RNAi
ugaauucaggcaaccugguuu

SEQ ID NO: 25662 - RNA, 21 nt, RNAi
uuacuuaaguccguuggacca

SEQ ID NO: 25663 - DNA, 21 bp, homo sapiens
caggcaacctggtgtctgtgc

SEQ ID NO: 25664 - RNA, 21 nt, RNAi
ggcaaccuggugucugugcuu

SEQ ID NO: 25665 - RNA, 21 nt, RNAi
uuccguuggaccacagacacg

SEQ ID NO: 25666 - DNA, 21 bp, homo sapiens
caacctggtgtctgtgctcac

SEQ ID NO: 25667 - RNA, 21 nt, RNAi
accuggugucugugcucacuu

SEQ ID NO: 25668 - RNA, 21 nt, RNAi
uuuggaccacagacacgagug

SEQ ID NO: 25669 - DNA, 21 bp, homo sapiens
cactgattaaggagagtagca

SEQ ID NO: 25670 - RNA, 21 nt, RNAi
cugauuaaggagaguagcauu

SEQ ID NO: 25671 - RNA, 21 nt, RNAi
uugacuaauuccucucaucgu

SEQ ID NO: 25672 - DNA, 21 bp, homo sapiens
cactgatgacagcaatgtctg

SEQ ID NO: 25673 - RNA, 21 nt, RNAi
cugaugacagcaaugucuguu

SEQ ID NO: 25674 - RNA, 21 nt, RNAi
uugacuacugucguuacagac

SEQ ID NO: 25675 - DNA, 21 bp, homo sapiens
cagcaatgtctggattggcct

SEQ ID NO: 25676 - RNA, 21 nt, RNAi
gcaaugucuggauuggccuuu

SEQ ID NO: 25677 - RNA, 21 nt, RNAi
uucguuacagaccuaaccgga

SEQ ID NO: 25678 - DNA, 21 bp, homo sapiens
caatgtctggattggcctcca

SEQ ID NO: 25679 - RNA, 21 nt, RNAi
augucuggauuggccuccauu

SEQ ID NO: 25680 - RNA, 21 nt, RNAi
uuuacagaccuaaccggaggu

SEQ ID NO: 25681 - DNA, 21 bp, homo sapiens
cagtgctaatgctggctactg

SEQ ID NO: 25682 - RNA, 21 nt, RNAi
gugcuaaugcuggcuacuguu

SEQ ID NO: 25683 - RNA, 21 nt, RNAi
uucacgauuacgaccgaugac

SEQ ID NO: 25684 - DNA, 21 bp, homo sapiens
caagcctgacttcatgctcag

SEQ ID NO: 25685 - RNA, 21 nt, RNAi
agccugacuucaugcucaguu

SEQ ID NO: 25686 - RNA, 21 nt, RNAi
uuucggacugaaguacgaguc

SEQ ID NO: 25687 - DNA, 21 bp, homo sapiens
catgctcaggattcaagaaat

SEQ ID NO: 25688 - RNA, 21 nt, RNAi
ugcucaggauucaagaaauuu

SEQ ID NO: 25689 - RNA, 21 nt, RNAi
uuacgaguccuaaguucuuua

SEQ ID NO: 25690 - DNA, 21 bp, homo sapiens
caggattcaagaaatggaagg

SEQ ID NO: 25691 - RNA, 21 nt, RNAi
ggauucaagaaauggaagguu

SEQ ID NO: 25692 - RNA, 21 nt, RNAi
uuccuaaguucuuuaccuucc

SEQ ID NO: 25693 - DNA, 21 bp, homo sapiens
caagaaatggaaggatgaatc

SEQ ID NO: 25694 - RNA, 21 nt, RNAi
agaaauggaaggaugaaucuu

SEQ ID NO: 25695 - RNA, 21 nt, RNAi
uuucuuuaccuuccuacuuag

SEQ ID NO: 25696 - DNA, 21 bp, homo sapiens
caactcagttcagaccatctc

SEQ ID NO: 25697 - RNA, 21 nt, RNAi
acucaguucagaccaucucuu

SEQ ID NO: 25698 - RNA, 21 nt, RNAi
uuugagucaagucugguagag

SEQ ID NO: 25699 - DNA, 21 bp, homo sapiens
catcgctgatcttcagtacct

SEQ ID NO: 25700 - RNA, 21 nt, RNAi
ucgcugaucuucaguaccuuu

SEQ ID NO: 25701 - RNA, 21 nt, RNAi
uuagcgacuagaagucaugga

SEQ ID NO: 25702 - DNA, 21 bp, homo sapiens
cagtaccttcacctgtctcag

SEQ ID NO: 25703 - RNA, 21 nt, RNAi
guaccuucaccugucucaguu

SEQ ID NO: 25704 - RNA, 21 nt, RNAi
uucauggaaguggacagaguc

SEQ ID NO: 25705 - DNA, 21 bp, homo sapiens
cacctgtctcagtctctagag

SEQ ID NO: 25706 - RNA, 21 nt, RNAi
ccugucucagucucuagaguu

SEQ ID NO: 25707 - RNA, 21 nt, RNAi
uuggacagagucagagaucuc

SEQ ID NO: 25708 - DNA, 21 bp, homo sapiens
gacaaggcacttaccaacaga

SEQ ID NO: 25709 - RNA, 21 nt, RNAi
caaggcacuuaccaacagauu

SEQ ID NO: 25710 - RNA, 21 nt, RNAi
uuguuccgugaaugguugucu

SEQ ID NO: 25711 - DNA, 21 bp, homo sapiens
gagattgctgatttgctcctt

SEQ ID NO: 25712 - RNA, 21 nt, RNAi
gauugcugauuugcuccuuuu

SEQ ID NO: 25713 - RNA, 21 nt, RNAi
uucuaacgacuaaacgaggaa

SEQ ID NO: 25714 - DNA, 21 bp, homo sapiens
gattgctgatttgctccttaa

SEQ ID NO: 25715 - RNA, 21 nt, RNAi
uugcugauuugcuccuuaauu

SEQ ID NO: 25716 - RNA, 21 nt, RNAi
uuaacgacuaaacgaggaauu

SEQ ID NO: 25717 - DNA, 21 bp, homo sapiens
gatttgctccttaagcaagag

SEQ ID NO: 25718 - RNA, 21 nt, RNAi
uuugcuccuuaagcaagaguu

SEQ ID NO: 25719 - RNA, 21 nt, RNAi
uuaaacgaggaauucguucuc

SEQ ID NO: 25720 - DNA, 21 bp, homo sapiens
gagattcactgccgctaagca

SEQ ID NO: 25721 - RNA, 21 nt, RNAi
gauucacugccgcuaagcauu

SEQ ID NO: 25722 - RNA, 21 nt, RNAi
uucuaagugacggcgauucgu

SEQ ID NO: 25723 - DNA, 21 bp, homo sapiens
gattcactgccgctaagcatg

SEQ ID NO: 25724 - RNA, 21 nt, RNAi
uucacugccgcuaagcauguu

SEQ ID NO: 25725 - RNA, 21 nt, RNAi
uuaagugacggcgauucguac

SEQ ID NO: 25726 - DNA, 21 bp, homo sapiens
gaccaactcgttcttcatgct

SEQ ID NO: 25727 - RNA, 21 nt, RNAi
ccaacucguucuucaugcuuu

SEQ ID NO: 25728 - RNA, 21 nt, RNAi
uugguugagcaagaaguacga

SEQ ID NO: 25729 - DNA, 21 bp, homo sapiens
gatgttcctgtctctgagcca

SEQ ID NO: 25730 - RNA, 21 nt, RNAi
uguuccugucucugagccauu

SEQ ID NO: 25731 - RNA, 21 nt, RNAi
uuacaaggacagagacucggu

SEQ ID NO: 25732 - DNA, 21 bp, homo sapiens
gaaggcaccaatgcctatcgc

SEQ ID NO: 25733 - RNA, 21 nt, RNAi
aggcaccaaugccuaucgcuu

SEQ ID NO: 25734 - RNA, 21 nt, RNAi
uuuccgugguuacggauagcg

SEQ ID NO: 25735 - DNA, 21 bp, homo sapiens
gatgcagatctctattgccag

SEQ ID NO: 25736 - RNA, 21 nt, RNAi
ugcagaucucuauugccaguu

SEQ ID NO: 25737 - RNA, 21 nt, RNAi
uuacgucuagagauaacgguc

SEQ ID NO: 25738 - DNA, 21 bp, homo sapiens
gatctctattgccagaacatg

SEQ ID NO: 25739 - RNA, 21 nt, RNAi
ucucuauugccagaacauguu

SEQ ID NO: 25740 - RNA, 21 nt, RNAi
uuagagauaacggucuuguac

SEQ ID NO: 25741 - DNA, 21 bp, homo sapiens
gaacatgaattcaggcaacct

SEQ ID NO: 25742 - RNA, 21 nt, RNAi
acaugaauucaggcaaccuuu

SEQ ID NO: 25743 - RNA, 21 nt, RNAi
uuuguacuuaaguccguugga

SEQ ID NO: 25744 - DNA, 21 bp, homo sapiens
gaattcaggcaacctggtgtc

SEQ ID NO: 25745 - RNA, 21 nt, RNAi
auucaggcaaccuggugucuu

SEQ ID NO: 25746 - RNA, 21 nt, RNAi
uuuaaguccguuggaccacag

SEQ ID NO: 25747 - DNA, 21 bp, homo sapiens
gattaaggagagtagcactga

SEQ ID NO: 25748 - RNA, 21 nt, RNAi
uuaaggagaguagcacugauu

SEQ ID NO: 25749 - RNA, 21 nt, RNAi
uuaauuccucucaucgugacu

SEQ ID NO: 25750 - DNA, 21 bp, homo sapiens
gagagtagcactgatgacagc

SEQ ID NO: 25751 - RNA, 21 nt, RNAi
gaguagcacugaugacagcuu

SEQ ID NO: 25752 - RNA, 21 nt, RNAi
uucucaucgugacuacugucg

SEQ ID NO: 25753 - DNA, 21 bp, homo sapiens
gagtagcactgatgacagcaa

SEQ ID NO: 25754 - RNA, 21 nt, RNAi
guagcacugaugacagcaauu

SEQ ID NO: 25755 - RNA, 21 nt, RNAi
uucaucgugacuacugucguu

SEQ ID NO: 25756 - DNA, 21 bp, homo sapiens
gatgacagcaatgtctggatt

SEQ ID NO: 25757 - RNA, 21 nt, RNAi
ugacagcaaugucuggauuuu

SEQ ID NO: 25758 - RNA, 21 nt, RNAi
uuacugucguuacagaccuaa

SEQ ID NO: 25759 - DNA, 21 bp, homo sapiens
gacagcaatgtctggattggc

SEQ ID NO: 25760 - RNA, 21 nt, RNAi
cagcaaugucuggauuggcuu

SEQ ID NO: 25761 - RNA, 21 nt, RNAi
uugucguuacagaccuaaccg

SEQ ID NO: 25762 - DNA, 21 bp, homo sapiens
gagcagtgctaatgctggcta

SEQ ID NO: 25763 - RNA, 21 nt, RNAi
gcagugcuaaugcuggcuauu

SEQ ID NO: 25764 - RNA, 21 nt, RNAi
uucgucacgauuacgaccgau

SEQ ID NO: 25765 - DNA, 21 bp, homo sapiens
gacttcatgctcaggattcaa

SEQ ID NO: 25766 - RNA, 21 nt, RNAi
cuucaugcucaggauucaauu

SEQ ID NO: 25767 - RNA, 21 nt, RNAi
uugaaguacgaguccuaaguu

SEQ ID NO: 25768 - DNA, 21 bp, homo sapiens
gattcaagaaatggaaggatg

SEQ ID NO: 25769 - RNA, 21 nt, RNAi
uucaagaaauggaaggauguu

SEQ ID NO: 25770 - RNA, 21 nt, RNAi
uuaaguucuuuaccuuccuac

SEQ ID NO: 25771 - DNA, 21 bp, homo sapiens
gaaatggaaggatgaatcttg

SEQ ID NO: 25772 - RNA, 21 nt, RNAi
aauggaaggaugaaucuuguu

SEQ ID NO: 25773 - RNA, 21 nt, RNAi
uuuuaccuuccuacuuagaac

SEQ ID NO: 25774 - DNA, 21 bp, homo sapiens
gaaggatgaatcttgtgagaa

SEQ ID NO: 25775 - RNA, 21 nt, RNAi
aggaugaaucuugugagaauu

SEQ ID NO: 25776 - RNA, 21 nt, RNAi
uuuccuacuuagaacacucuu

SEQ ID NO: 25777 - DNA, 21 bp, homo sapiens
gatgaatcttgtgagaagaag

SEQ ID NO: 25778 - RNA, 21 nt, RNAi
ugaaucuugugagaagaaguu

SEQ ID NO: 25779 - RNA, 21 nt, RNAi
uuacuuagaacacucuucuuc

SEQ ID NO: 25780 - DNA, 21 bp, homo sapiens
gaatcttgtgagaagaagttc

SEQ ID NO: 25781 - RNA, 21 nt, RNAi
aucuugugagaagaaguucuu

SEQ ID NO: 25782 - RNA, 21 nt, RNAi
uuuagaacacucuucuucaag

SEQ ID NO: 25783 - DNA, 21 bp, homo sapiens
gagaagaagttctcctttgtt

SEQ ID NO: 25784 - RNA, 21 nt, RNAi
gaagaaguucuccuuuguuuu

SEQ ID NO: 25785 - RNA, 21 nt, RNAi
uucuucuucaagaggaaacaa

SEQ ID NO: 25786 - DNA, 21 bp, homo sapiens
gaagaagttctcctttgtttg

SEQ ID NO: 25787 - RNA, 21 nt, RNAi
agaaguucuccuuuguuuguu

SEQ ID NO: 25788 - RNA, 21 nt, RNAi
uuucuucaagaggaaacaaac

SEQ ID NO: 25789 - DNA, 21 bp, homo sapiens
gaagttctcctttgtttgcaa

SEQ ID NO: 25790 - RNA, 21 nt, RNAi
aguucuccuuuguuugcaauu

SEQ ID NO: 25791 - RNA, 21 nt, RNAi
uuucaagaggaaacaaacguu

SEQ ID NO: 25792 - DNA, 21 bp, homo sapiens
gatgtctagaactggtcctgc

SEQ ID NO: 25793 - RNA, 21 nt, RNAi
ugucuagaacugguccugcuu

SEQ ID NO: 25794 - RNA, 21 nt, RNAi
uuacagaucuugaccaggacg

SEQ ID NO: 25795 - DNA, 21 bp, homo sapiens
gaactggtcctgcaattacta

SEQ ID NO: 25796 - RNA, 21 nt, RNAi
acugguccugcaauuacuauu

SEQ ID NO: 25797 - RNA, 21 nt, RNAi
uuugaccaggacguuaaugau

SEQ ID NO: 25798 - DNA, 21 bp, homo sapiens
gactatgtctccaactcagtt

SEQ ID NO: 25799 - RNA, 21 nt, RNAi
cuaugucuccaacucaguuuu

SEQ ID NO: 25800 - RNA, 21 nt, RNAi
uugauacagagguugagucaa

SEQ ID NO: 25801 - DNA, 21 bp, homo sapiens
gagtttgcatcgctgatcttc

SEQ ID NO: 25802 - RNA, 21 nt, RNAi
guuugcaucgcugaucuucuu

SEQ ID NO: 25803 - RNA, 21 nt, RNAi
uucaaacguagcgacuagaag

SEQ ID NO: 25804 - DNA, 21 bp, homo sapiens
gatcttcagtaccttcacctg

SEQ ID NO: 25805 - RNA, 21 nt, RNAi
ucuucaguaccuucaccuguu

SEQ ID NO: 25806 - RNA, 21 nt, RNAi
uuagaagucauggaaguggac

SEQ ID NO: 25807 - DNA, 21 bp, homo sapiens
taccaacagagattgctgatt

SEQ ID NO: 25808 - RNA, 21 nt, RNAi
ccaacagagauugcugauuuu

SEQ ID NO: 25809 - RNA, 21 nt, RNAi
uugguugucucuaacgacuaa

SEQ ID NO: 25810 - DNA, 21 bp, homo sapiens
taagcaagagattcactgccg

SEQ ID NO: 25811 - RNA, 21 nt, RNAi
agcaagagauucacugccguu

SEQ ID NO: 25812 - RNA, 21 nt, RNAi
uuucguucucuaagugacggc

SEQ ID NO: 25813 - DNA, 21 bp, homo sapiens
taagcatggctcagaccaact

SEQ ID NO: 25814 - RNA, 21 nt, RNAi
agcauggcucagaccaacuuu

SEQ ID NO: 25815 - RNA, 21 nt, RNAi
uuucguaccgagucugguuga

SEQ ID NO: 25816 - DNA, 21 bp, homo sapiens
tatcgctcctactgctactac

SEQ ID NO: 25817 - RNA, 21 nt, RNAi
ucgcuccuacugcuacuacuu

SEQ ID NO: 25818 - RNA, 21 nt, RNAi
uuagcgaggaugacgaugaug

SEQ ID NO: 25819 - DNA, 21 bp, homo sapiens
tattgccagaacatgaattca

SEQ ID NO: 25820 - RNA, 21 nt, RNAi
uugccagaacaugaauucauu

SEQ ID NO: 25821 - RNA, 21 nt, RNAi
uuaacggucuuguacuuaagu

SEQ ID NO: 25822 - DNA, 21 bp, homo sapiens
taaggagagtagcactgatga

SEQ ID NO: 25823 - RNA, 21 nt, RNAi
aggagaguagcacugaugauu

SEQ ID NO: 25824 - RNA, 21 nt, RNAi
uuuccucucaucgugacuacu

SEQ ID NO: 25825 - DNA, 21 bp, homo sapiens
tagcactgatgacagcaatgt

SEQ ID NO: 25826 - RNA, 21 nt, RNAi
gcacugaugacagcaauguuu

SEQ ID NO: 25827 - RNA, 21 nt, RNAi
uucgugacuacugucguuaca

SEQ ID NO: 25828 - DNA, 21 bp, homo sapiens
taatgctggctactgtgcaag

SEQ ID NO: 25829 - RNA, 21 nt, RNAi
augcuggcuacugugcaaguu

SEQ ID NO: 25830 - RNA, 21 nt, RNAi
uuuacgaccgaugacacguuc

SEQ ID NO: 25831 - DNA, 21 bp, homo sapiens
tactgtgcaagcctgacttca

SEQ ID NO: 25832 - RNA, 21 nt, RNAi
cugugcaagccugacuucauu

SEQ ID NO: 25833 - RNA, 21 nt, RNAi
uugacacguucggacugaagu

SEQ ID NO: 25834 - DNA, 21 bp, homo sapiens
tagaactggtcctgcaattac

SEQ ID NO: 25835 - RNA, 21 nt, RNAi
gaacugguccugcaauuacuu

SEQ ID NO: 25836 - RNA, 21 nt, RNAi
uucuugaccaggacguuaaug

SEQ ID NO: 25837 - DNA, 21 bp, homo sapiens
taaactagactatgtctccaa

SEQ ID NO: 25838 - RNA, 21 nt, RNAi
aacuagacuaugucuccaauu

SEQ ID NO: 25839 - RNA, 21 nt, RNAi
uuuugaucugauacagagguu

SEQ ID NO: 25840 - DNA, 21 bp, homo sapiens
tagactatgtctccaactcag

SEQ ID NO: 25841 - RNA, 21 nt, RNAi
gacuaugucuccaacucaguu

SEQ ID NO: 25842 - RNA, 21 nt, RNAi
uucugauacagagguugaguc

SEQ ID NO: 25843 - DNA, 21 bp, homo sapiens
tatgtctccaactcagttcag

SEQ ID NO: 25844 - RNA, 21 nt, RNAi
ugucuccaacucaguucaguu

SEQ ID NO: 25845 - RNA, 21 nt, RNAi
uuacagagguugagucaaguc

SEQ ID NO: 25846 - DNA, 21 bp, homo sapiens
taatgagtttgcatcgctgat

SEQ ID NO: 25847 - RNA, 21 nt, RNAi
augaguuugcaucgcugauuu

SEQ ID NO: 25848 - RNA, 21 nt, RNAi
uuuacucaaacguagcgacua

SEQ ID NO: 25849 - DNA, 21 bp, homo sapiens
taccttcacctgtctcagtct

SEQ ID NO: 25850 - RNA, 21 nt, RNAi
ccuucaccugucucagucuuu

SEQ ID NO: 25851 - RNA, 21 nt, RNAi
uuggaaguggacagagucaga

SEQ ID NO: 25852 - DNA, 21 bp, homo sapiens
gagagtagcactgatgacagc

SEQ ID NO: 25853 - RNA, 21 nt, RNAi
gaguagcacugaugacagcuu

SEQ ID NO: 25854 - RNA, 21 nt, RNAi
uucucaucgugacuacugucg

SEQ ID NO: 25855 - DNA, 21 bp, homo sapiens
taaggagagtagcactgatga

SEQ ID NO: 25856 - RNA, 21 nt, RNAi
aggagaguagcacugaugauu

SEQ ID NO: 25857 - RNA, 21 nt, RNAi
uuuccucucaucgugacuacu

SEQ ID NO: 25858 - DNA, 21 bp, homo sapiens
aacttccaggacaaccaattc

SEQ ID NO: 25859 - RNA, 21 nt, RNAi
cuuccaggacaaccaauucuu

SEQ ID NO: 25860 - RNA, 21 nt, RNAi
uugaagguccuguugguuaag

SEQ ID NO: 25861 - DNA, 21 bp, homo sapiens
aagtggtatgtggtaggcctg

SEQ ID NO: 25862 - RNA, 21 nt, RNAi
gugguaugugguaggccuguu

SEQ ID NO: 25863 - RNA, 21 nt, RNAi
uucaccauacaccauccggac

SEQ ID NO: 25864 - DNA, 21 bp, homo sapiens
aatgcaattctcagagaagac

SEQ ID NO: 25865 - RNA, 21 nt, RNAi
ugcaauucucagagaagacuu

SEQ ID NO: 25866 - RNA, 21 nt, RNAi
uuacguuaagagucucuucug

SEQ ID NO: 25867 - DNA, 21 bp, homo sapiens
aattctcagagaagacaaaga

SEQ ID NO: 25868 - RNA, 21 nt, RNAi
uucucagagaagacaaagauu

SEQ ID NO: 25869 - RNA, 21 nt, RNAi
uuaagagucucuucuguuucu

SEQ ID NO: 25870 - DNA, 21 bp, homo sapiens
aaagatgtatgccaccatcta

SEQ ID NO: 25871 - RNA, 21 nt, RNAi
agauguaugccaccaucuauu

SEQ ID NO: 25872 - RNA, 21 nt, RNAi
uuucuacauacggugguagau

SEQ ID NO: 25873 - DNA, 21 bp, homo sapiens
aagatgtatgccaccatctat

SEQ ID NO: 25874 - RNA, 21 nt, RNAi
gauguaugccaccaucuauuu

SEQ ID NO: 25875 - RNA, 21 nt, RNAi
uucuacauacggugguagaua

SEQ ID NO: 25876 - DNA, 21 bp, homo sapiens
aaagaagacaagagctacaat

SEQ ID NO: 25877 - RNA, 21 nt, RNAi
agaagacaagagcuacaauuu

SEQ ID NO: 25878 - RNA, 21 nt, RNAi
uuucuucuguucucgauguua

SEQ ID NO: 25879 - DNA, 21 bp, homo sapiens
aagaagacaagagctacaatg

SEQ ID NO: 25880 - RNA, 21 nt, RNAi
gaagacaagagcuacaauguu

SEQ ID NO: 25881 - RNA, 21 nt, RNAi
uucuucuguucucgauguuac

SEQ ID NO: 25882 - DNA, 21 bp, homo sapiens
aagacaagagctacaatgtca

SEQ ID NO: 25883 - RNA, 21 nt, RNAi
gacaagagcuacaaugucauu

SEQ ID NO: 25884 - RNA, 21 nt, RNAi
uucuguucucgauguuacagu

SEQ ID NO: 25885 - DNA, 21 bp, homo sapiens
aagagctacaatgtcacctcc

SEQ ID NO: 25886 - RNA, 21 nt, RNAi
gagcuacaaugucaccuccuu

SEQ ID NO: 25887 - RNA, 21 nt, RNAi
uucucgauguuacaguggagg

SEQ ID NO: 25888 - DNA, 21 bp, homo sapiens
aatgtcacctccgtcctgttt

SEQ ID NO: 25889 - RNA, 21 nt, RNAi
ugucaccuccguccuguuuuu

SEQ ID NO: 25890 - RNA, 21 nt, RNAi
uuacaguggaggcaggacaaa

SEQ ID NO: 25891 - DNA, 21 bp, homo sapiens
aaagaagtgtgactactggat

SEQ ID NO: 25892 - RNA, 21 nt, RNAi
agaagugugacuacuggauuu

SEQ ID NO: 25893 - RNA, 21 nt, RNAi
uuucuucacacugaugaccua

SEQ ID NO: 25894 - DNA, 21 bp, homo sapiens
aagaagtgtgactactggatc

SEQ ID NO: 25895 - RNA, 21 nt, RNAi
gaagugugacuacuggaucuu

SEQ ID NO: 25896 - RNA, 21 nt, RNAi
uucuucacacugaugaccuag

SEQ ID NO: 25897 - DNA, 21 bp, homo sapiens
aagtgtgactactggatcagg

SEQ ID NO: 25898 - RNA, 21 nt, RNAi
gugugacuacuggaucagguu

SEQ ID NO: 25899 - RNA, 21 nt, RNAi
uucacacugaugaccuagucc

SEQ ID NO: 25900 - DNA, 21 bp, homo sapiens
aacgagttacctcgtccgagt

SEQ ID NO: 25901 - RNA, 21 nt, RNAi
cgaguuaccucguccgaguuu

SEQ ID NO: 25902 - RNA, 21 nt, RNAi
uugcucaauggagcaggcuca

SEQ ID NO: 25903 - DNA, 21 bp, homo sapiens
aactacaaccagcatgctatg

SEQ ID NO: 25904 - RNA, 21 nt, RNAi
cuacaaccagcaugcuauguu

SEQ ID NO: 25905 - RNA, 21 nt, RNAi
uugauguuggucguacgauac

SEQ ID NO: 25906 - DNA, 21 bp, homo sapiens
aaccagcatgctatggtgttc

SEQ ID NO: 25907 - RNA, 21 nt, RNAi
ccagcaugcuaugguguucuu

SEQ ID NO: 25908 - RNA, 21 nt, RNAi
uuggucguacgauaccacaag

SEQ ID NO: 25909 - DNA, 21 bp, homo sapiens
aaccaaggagctgacttcgga

SEQ ID NO: 25910 - RNA, 21 nt, RNAi
ccaaggagcugacuucggauu

SEQ ID NO: 25911 - RNA, 21 nt, RNAi
uugguuccucgacugaagccu

SEQ ID NO: 25912 - DNA, 21 bp, homo sapiens
aaggagctgacttcggaacta

SEQ ID NO: 25913 - RNA, 21 nt, RNAi
ggagcugacuucggaacuauu

SEQ ID NO: 25914 - RNA, 21 nt, RNAi
uuccucgacugaagccuugau

SEQ ID NO: 25915 - DNA, 21 bp, homo sapiens
aactaaaggagaacttcatcc

SEQ ID NO: 25916 - RNA, 21 nt, RNAi
cuaaaggagaacuucauccuu

SEQ ID NO: 25917 - RNA, 21 nt, RNAi
uugauuuccucuugaaguagg

SEQ ID NO: 25918 - DNA, 21 bp, homo sapiens
aaaggagaacttcatccgctt

SEQ ID NO: 25919 - RNA, 21 nt, RNAi
aggagaacuucauccgcuuuu

SEQ ID NO: 25920 - RNA, 21 nt, RNAi
uuuccucuugaaguaggcgaa

SEQ ID NO: 25921 - DNA, 21 bp, homo sapiens
aaggagaacttcatccgcttc

SEQ ID NO: 25922 - RNA, 21 nt, RNAi
ggagaacuucauccgcuucuu

SEQ ID NO: 25923 - RNA, 21 nt, RNAi
uuccucuugaaguaggcgaag

SEQ ID NO: 25924 - DNA, 21 bp, homo sapiens
aacttcatccgcttctccaaa

SEQ ID NO: 25925 - RNA, 21 nt, RNAi
cuucauccgcuucuccaaauu

SEQ ID NO: 25926 - RNA, 21 nt, RNAi
uugaaguaggcgaagagguuu

SEQ ID NO: 25927 - DNA, 21 bp, homo sapiens
aatcgaccagtgtatcgacgg

SEQ ID NO: 25928 - RNA, 21 nt, RNAi
ucgaccaguguaucgacgguu

SEQ ID NO: 25929 - RNA, 21 nt, RNAi
uuagcuggucacauagcugcc

SEQ ID NO: 25930 - DNA, 21 bp, homo sapiens
caggactccacctcagacctg

SEQ ID NO: 25931 - RNA, 21 nt, RNAi
ggacuccaccucagaccuguu

SEQ ID NO: 25932 - RNA, 21 nt, RNAi
uuccugagguggagucuggac

SEQ ID NO: 25933 - DNA, 21 bp, homo sapiens
cagcagaacttccaggacaac

SEQ ID NO: 25934 - RNA, 21 nt, RNAi
gcagaacuuccaggacaacuu

SEQ ID NO: 25935 - RNA, 21 nt, RNAi
uucgucuugaagguccuguug

SEQ ID NO: 25936 - DNA, 21 bp, homo sapiens
cagaacttccaggacaaccaa

SEQ ID NO: 25937 - RNA, 21 nt, RNAi
gaacuuccaggacaaccaauu

SEQ ID NO: 25938 - RNA, 21 nt, RNAi
uucuugaagguccuguugguu

SEQ ID NO: 25939 - DNA, 21 bp, homo sapiens
caattctcagagaagacaaag

SEQ ID NO: 25940 - RNA, 21 nt, RNAi
auucucagagaagacaaaguu

SEQ ID NO: 25941 - RNA, 21 nt, RNAi
uuuaagagucucuucuguuuc

SEQ ID NO: 25942 - DNA, 21 bp, homo sapiens
caccatctatgagctgaaaga

SEQ ID NO: 25943 - RNA, 21 nt, RNAi
ccaucuaugagcugaaagauu

SEQ ID NO: 25944 - RNA, 21 nt, RNAi
uugguagauacucgacuuucu

SEQ ID NO: 25945 - DNA, 21 bp, homo sapiens
catctatgagctgaaagaaga

SEQ ID NO: 25946 - RNA, 21 nt, RNAi
ucuaugagcugaaagaagauu

SEQ ID NO: 25947 - RNA, 21 nt, RNAi
uuagauacucgacuuucuucu

SEQ ID NO: 25948 - DNA, 21 bp, homo sapiens
caagagctacaatgtcacctc

SEQ ID NO: 25949 - RNA, 21 nt, RNAi
agagcuacaaugucaccucuu

SEQ ID NO: 25950 - RNA, 21 nt, RNAi
uuucucgauguuacaguggag

SEQ ID NO: 25951 - DNA, 21 bp, homo sapiens
caatgtcacctccgtcctgtt

SEQ ID NO: 25952 - RNA, 21 nt, RNAi
augucaccuccguccuguuuu

SEQ ID NO: 25953 - RNA, 21 nt, RNAi
uuuacaguggaggcaggacaa

SEQ ID NO: 25954 - DNA, 21 bp, homo sapiens
cacctccgtcctgtttaggaa

SEQ ID NO: 25955 - RNA, 21 nt, RNAi
ccuccguccuguuuaggaauu

SEQ ID NO: 25956 - RNA, 21 nt, RNAi
uuggaggcaggacaaauccuu

SEQ ID NO: 25957 - DNA, 21 bp, homo sapiens
caccaactacaaccagcatgc

SEQ ID NO: 25958 - RNA, 21 nt, RNAi
ccaacuacaaccagcaugcuu

SEQ ID NO: 25959 - RNA, 21 nt, RNAi
uugguugauguuggucguacg

SEQ ID NO: 25960 - DNA, 21 bp, homo sapiens
caactacaaccagcatgctat

SEQ ID NO: 25961 - RNA, 21 nt, RNAi
acuacaaccagcaugcuauuu

SEQ ID NO: 25962 - RNA, 21 nt, RNAi
uuugauguuggucguacgaua

SEQ ID NO: 25963 - DNA, 21 bp, homo sapiens
caaccagcatgctatggtgtt

SEQ ID NO: 25964 - RNA, 21 nt, RNAi
accagcaugcuaugguguuuu

SEQ ID NO: 25965 - RNA, 21 nt, RNAi
uuuggucguacgauaccacaa

SEQ ID NO: 25966 - DNA, 21 bp, homo sapiens
cagcatgctatggtgttcttt

SEQ ID NO: 25967 - RNA, 21 nt, RNAi
gcaugcuaugguguucuuuuu

SEQ ID NO: 25968 - RNA, 21 nt, RNAi
uucguacgauaccacaagaaa

SEQ ID NO: 25969 - DNA, 21 bp, homo sapiens
catgctatggtgttctttaag

SEQ ID NO: 25970 - RNA, 21 nt, RNAi
ugcuaugguguucuuuaaguu

SEQ ID NO: 25971 - RNA, 21 nt, RNAi
uuacgauaccacaagaaauuc

SEQ ID NO: 25972 - DNA, 21 bp, homo sapiens
caaggagctgacttcggaact

SEQ ID NO: 25973 - RNA, 21 nt, RNAi
aggagcugacuucggaacuuu

SEQ ID NO: 25974 - RNA, 21 nt, RNAi
uuuccucgacugaagccuuga

SEQ ID NO: 25975 - DNA, 21 bp, homo sapiens
catccgcttctccaaatctct

SEQ ID NO: 25976 - RNA, 21 nt, RNAi
uccgcuucuccaaaucucuuu

SEQ ID NO: 25977 - RNA, 21 nt, RNAi
uuaggcgaagagguuuagaga

SEQ ID NO: 25978 - DNA, 21 bp, homo sapiens
caatcgaccagtgtatcgacg

SEQ ID NO: 25979 - RNA, 21 nt, RNAi
aucgaccaguguaucgacguu

SEQ ID NO: 25980 - RNA, 21 nt, RNAi
uuuagcuggucacauagcugc

SEQ ID NO: 25981 - DNA, 21 bp, homo sapiens
gactccacctcagacctgatc

SEQ ID NO: 25982 - RNA, 21 nt, RNAi
cuccaccucagaccugaucuu

SEQ ID NO: 25983 - RNA, 21 nt, RNAi
uugagguggagucuggacuag

SEQ ID NO: 25984 - DNA, 21 bp, homo sapiens
gaacttccaggacaaccaatt

SEQ ID NO: 25985 - RNA, 21 nt, RNAi
acuuccaggacaaccaauuuu

SEQ ID NO: 25986 - RNA, 21 nt, RNAi
uuugaagguccuguugguuaa

SEQ ID NO: 25987 - DNA, 21 bp, homo sapiens
gaagtggtatgtggtaggcct

SEQ ID NO: 25988 - RNA, 21 nt, RNAi
agugguaugugguaggccuuu

SEQ ID NO: 25989 - RNA, 21 nt, RNAi
uuucaccauacaccauccgga

SEQ ID NO: 25990 - DNA, 21 bp, homo sapiens
gaatgcaattctcagagaaga

SEQ ID NO: 25991 - RNA, 21 nt, RNAi
augcaauucucagagaagauu

SEQ ID NO: 25992 - RNA, 21 nt, RNAi
uuuacguuaagagucucuucu

SEQ ID NO: 25993 - DNA, 21 bp, homo sapiens
gatgtatgccaccatctatga

SEQ ID NO: 25994 - RNA, 21 nt, RNAi
uguaugccaccaucuaugauu

SEQ ID NO: 25995 - RNA, 21 nt, RNAi
uuacauacggugguagauacu

SEQ ID NO: 25996 - DNA, 21 bp, homo sapiens
gagctgaaagaagacaagagc

SEQ ID NO: 25997 - RNA, 21 nt, RNAi
gcugaaagaagacaagagcuu

SEQ ID NO: 25998 - RNA, 21 nt, RNAi
uucgacuuucuucuguucucg

SEQ ID NO: 25999 - DNA, 21 bp, homo sapiens
gaaagaagacaagagctacaa

SEQ ID NO: 26000 - RNA, 21 nt, RNAi
aagaagacaagagcuacaauu

SEQ ID NO: 26001 - RNA, 21 nt, RNAi
uuuucuucuguucucgauguu

SEQ ID NO: 26002 - DNA, 21 bp, homo sapiens
gaagacaagagctacaatgtc

SEQ ID NO: 26003 - RNA, 21 nt, RNAi
agacaagagcuacaaugucuu

SEQ ID NO: 26004 - RNA, 21 nt, RNAi
uuucuguucucgauguuacag

SEQ ID NO: 26005 - DNA, 21 bp, homo sapiens
gacaagagctacaatgtcacc

SEQ ID NO: 26006 - RNA, 21 nt, RNAi
caagagcuacaaugucaccuu

SEQ ID NO: 26007 - RNA, 21 nt, RNAi
uuguucucgauguuacagugg

SEQ ID NO: 26008 - DNA, 21 bp, homo sapiens
gagctacaatgtcacctccgt

SEQ ID NO: 26009 - RNA, 21 nt, RNAi
gcuacaaugucaccuccguuu

SEQ ID NO: 26010 - RNA, 21 nt, RNAi
uucgauguuacaguggaggca

SEQ ID NO: 26011 - DNA, 21 bp, homo sapiens
gaagtgtgactactggatcag

SEQ ID NO: 26012 - RNA, 21 nt, RNAi
agugugacuacuggaucaguu

SEQ ID NO: 26013 - RNA, 21 nt, RNAi
uuucacacugaugaccuaguc

SEQ ID NO: 26014 - DNA, 21 bp, homo sapiens
gattaacgagttacctcgtcc

SEQ ID NO: 26015 - RNA, 21 nt, RNAi
uuaacgaguuaccucguccuu

SEQ ID NO: 26016 - RNA, 21 nt, RNAi
uuaauugcucaauggagcagg

SEQ ID NO: 26017 - DNA, 21 bp, homo sapiens
gagttacctcgtccgagtggt

SEQ ID NO: 26018 - RNA, 21 nt, RNAi
guuaccucguccgagugguuu

SEQ ID NO: 26019 - RNA, 21 nt, RNAi
uucaauggagcaggcucacca

SEQ ID NO: 26020 - DNA, 21 bp, homo sapiens
gagtggtgagcaccaactaca

SEQ ID NO: 26021 - RNA, 21 nt, RNAi
guggugagcaccaacuacauu

SEQ ID NO: 26022 - RNA, 21 nt, RNAi
uucaccacucgugguugaugu

SEQ ID NO: 26023 - DNA, 21 bp, homo sapiens
gagcaccaactacaaccagca

SEQ ID NO: 26024 - RNA, 21 nt, RNAi
gcaccaacuacaaccagcauu

SEQ ID NO: 26025 - RNA, 21 nt, RNAi
uucgugguugauguuggucgu

SEQ ID NO: 26026 - DNA, 21 bp, homo sapiens
gagaaccaaggagctgacttc

SEQ ID NO: 26027 - RNA, 21 nt, RNAi
gaaccaaggagcugacuucuu

SEQ ID NO: 26028 - RNA, 21 nt, RNAi
uucuugguuccucgacugaag

SEQ ID NO: 26029 - DNA, 21 bp, homo sapiens
gaaccaaggagctgacttcgg

SEQ ID NO: 26030 - RNA, 21 nt, RNAi
accaaggagcugacuucgguu

SEQ ID NO: 26031 - RNA, 21 nt, RNAi
uuugguuccucgacugaagcc

SEQ ID NO: 26032 - DNA, 21 bp, homo sapiens
gagctgacttcggaactaaag

SEQ ID NO: 26033 - RNA, 21 nt, RNAi
gcugacuucggaacuaaaguu

SEQ ID NO: 26034 - RNA, 21 nt, RNAi
uucgacugaagccuugauuuc

SEQ ID NO: 26035 - DNA, 21 bp, homo sapiens
gacttcggaactaaaggagaa

SEQ ID NO: 26036 - RNA, 21 nt, RNAi
cuucggaacuaaaggagaauu

SEQ ID NO: 26037 - RNA, 21 nt, RNAi
uugaagccuugauuuccucuu

SEQ ID NO: 26038 - DNA, 21 bp, homo sapiens
gaactaaaggagaacttcatc

SEQ ID NO: 26039 - RNA, 21 nt, RNAi
acuaaaggagaacuucaucuu

SEQ ID NO: 26040 - RNA, 21 nt, RNAi
uuugauuuccucuugaaguag

SEQ ID NO: 26041 - DNA, 21 bp, homo sapiens
gagaacttcatccgcttctcc

SEQ ID NO: 26042 - RNA, 21 nt, RNAi
gaacuucauccgcuucuccuu

SEQ ID NO: 26043 - RNA, 21 nt, RNAi
uucuugaaguaggcgaagagg

SEQ ID NO: 26044 - DNA, 21 bp, homo sapiens
gaacttcatccgcttctccaa

SEQ ID NO: 26045 - RNA, 21 nt, RNAi
acuucauccgcuucuccaauu

SEQ ID NO: 26046 - RNA, 21 nt, RNAi
uuugaaguaggcgaagagguu

SEQ ID NO: 26047 - DNA, 21 bp, homo sapiens
gaccagtgtatcgacggctga

SEQ ID NO: 26048 - RNA, 21 nt, RNAi
ccaguguaucgacggcugauu

SEQ ID NO: 26049 - RNA, 21 nt, RNAi
uuggucacauagcugccgacu

SEQ ID NO: 26050 - DNA, 21 bp, homo sapiens
tatgccaccatctatgagctg

SEQ ID NO: 26051 - RNA, 21 nt, RNAi
ugccaccaucuaugagcuguu

SEQ ID NO: 26052 - RNA, 21 nt, RNAi
uuacggugguagauacucgac

SEQ ID NO: 26053 - DNA, 21 bp, homo sapiens
tatgagctgaaagaagacaag

SEQ ID NO: 26054 - RNA, 21 nt, RNAi
ugagcugaaagaagacaaguu

SEQ ID NO: 26055 - RNA, 21 nt, RNAi
uuacucgacuuucuucuguuc

SEQ ID NO: 26056 - DNA, 21 bp, homo sapiens
tacaatgtcacctccgtcctg

SEQ ID NO: 26057 - RNA, 21 nt, RNAi
caaugucaccuccguccuguu

SEQ ID NO: 26058 - RNA, 21 nt, RNAi
uuguuacaguggaggcaggac

SEQ ID NO: 26059 - DNA, 21 bp, homo sapiens
taacgagttacctcgtccgag

SEQ ID NO: 26060 - RNA, 21 nt, RNAi
acgaguuaccucguccgaguu

SEQ ID NO: 26061 - RNA, 21 nt, RNAi
uuugcucaauggagcaggcuc

SEQ ID NO: 26062 - DNA, 21 bp, homo sapiens
tacctcgtccgagtggtgagc

SEQ ID NO: 26063 - RNA, 21 nt, RNAi
ccucguccgaguggugagcuu

SEQ ID NO: 26064 - RNA, 21 nt, RNAi
uuggagcaggcucaccacucg

SEQ ID NO: 26065 - DNA, 21 bp, homo sapiens
tacaaccagcatgctatggtg

SEQ ID NO: 26066 - RNA, 21 nt, RNAi
caaccagcaugcuaugguguu

SEQ ID NO: 26067 - RNA, 21 nt, RNAi
uuguuggucguacgauaccac

SEQ ID NO: 26068 - DNA, 21 bp, homo sapiens
taaaggagaacttcatccgct

SEQ ID NO: 26069 - RNA, 21 nt, RNAi
aaggagaacuucauccgcuuu

SEQ ID NO: 26070 - RNA, 21 nt, RNAi
uuuuccucuugaaguaggcga

SEQ ID NO: 26071 - DNA, 21 bp, homo sapiens
aacttccaggacaaccaattc

SEQ ID NO: 26072 - RNA, 21 nt, RNAi
cuuccaggacaaccaauucuu

SEQ ID NO: 26073 - RNA, 21 nt, RNAi
uugaagguccuguugguuaag

SEQ ID NO: 26074 - DNA, 21 bp, homo sapiens
aaagaagacaagagctacaat

SEQ ID NO: 26075 - RNA, 21 nt, RNAi
agaagacaagagcuacaauuu

SEQ ID NO: 26076 - RNA, 21 nt, RNAi
uuucuucuguucucgauguua

SEQ ID NO: 26077 - DNA, 21 bp, homo sapiens
aagaagacaagagctacaatg

SEQ ID NO: 26078 - RNA, 21 nt, RNAi
gaagacaagagcuacaauguu

SEQ ID NO: 26079 - RNA, 21 nt, RNAi
uucuucuguucucgauguuac

SEQ ID NO: 26080 - DNA, 21 bp, homo sapiens
aagagctacaatgtcacctcc

SEQ ID NO: 26081 - RNA, 21 nt, RNAi
gagcuacaaugucaccuccuu

SEQ ID NO: 26082 - RNA, 21 nt, RNAi
uucucgauguuacaguggagg

SEQ ID NO: 26083 - DNA, 21 bp, homo sapiens
aatgtcacctccgtcctgttt

SEQ ID NO: 26084 - RNA, 21 nt, RNAi
ugucaccuccguccuguuuuu

SEQ ID NO: 26085 - RNA, 21 nt, RNAi
uuacaguggaggcaggacaaa

SEQ ID NO: 26086 - DNA, 21 bp, homo sapiens
aaagaagtgtgactactggat

SEQ ID NO: 26087 - RNA, 21 nt, RNAi
agaagugugacuacuggauuu

SEQ ID NO: 26088 - RNA, 21 nt, RNAi
uuucuucacacugaugaccua

SEQ ID NO: 26089 - DNA, 21 bp, homo sapiens
aagaagtgtgactactggatc

SEQ ID NO: 26090 - RNA, 21 nt, RNAi
gaagugugacuacuggaucuu

SEQ ID NO: 26091 - RNA, 21 nt, RNAi
uucuucacacugaugaccuag

SEQ ID NO: 26092 - DNA, 21 bp, homo sapiens
aagtgtgactactggatcagg

SEQ ID NO: 26093 - RNA, 21 nt, RNAi
gugugacuacuggaucagguu

SEQ ID NO: 26094 - RNA, 21 nt, RNAi
uucacacugaugaccuagucc

SEQ ID NO: 26095 - DNA, 21 bp, homo sapiens
aactacaaccagcatgctatg

SEQ ID NO: 26096 - RNA, 21 nt, RNAi
cuacaaccagcaugcuauguu

SEQ ID NO: 26097 - RNA, 21 nt, RNAi
uugauguuggucguacgauac

SEQ ID NO: 26098 - DNA, 21 bp, homo sapiens
aaccagcatgctatggtgttc

SEQ ID NO: 26099 - RNA, 21 nt, RNAi
ccagcaugcuaugguguucuu

SEQ ID NO: 26100 - RNA, 21 nt, RNAi
uuggucguacgauaccacaag

SEQ ID NO: 26101 - DNA, 21 bp, homo sapiens
aaggagctgacttcggaacta

SEQ ID NO: 26102 - RNA, 21 nt, RNAi
ggagcugacuucggaacuauu

SEQ ID NO: 26103 - RNA, 21 nt, RNAi
uuccucgacugaagccuugau

SEQ ID NO: 26104 - DNA, 21 bp, homo sapiens
aactaaaggagaacttcatcc

SEQ ID NO: 26105 - RNA, 21 nt, RNAi
cuaaaggagaacuucauccuu

SEQ ID NO: 26106 - RNA, 21 nt, RNAi
uugauuuccucuugaaguagg

SEQ ID NO: 26107 - DNA, 21 bp, homo sapiens
caagagctacaatgtcacctc

SEQ ID NO: 26108 - RNA, 21 nt, RNAi
agagcuacaaugucaccucuu

SEQ ID NO: 26109 - RNA, 21 nt, RNAi
uuucucgauguuacaguggag

SEQ ID NO: 26110 - DNA, 21 bp, homo sapiens
caatgtcacctccgtcctgtt

SEQ ID NO: 26111 - RNA, 21 nt, RNAi
augucaccuccguccuguuuu

SEQ ID NO: 26112 - RNA, 21 nt, RNAi
uuuacaguggaggcaggacaa

SEQ ID NO: 26113 - DNA, 21 bp, homo sapiens
cacctccgtcctgtttaggaa

SEQ ID NO: 26114 - RNA, 21 nt, RNAi
ccuccguccuguuuaggaauu

SEQ ID NO: 26115 - RNA, 21 nt, RNAi
uuggaggcaggacaaauccuu

SEQ ID NO: 26116 - DNA, 21 bp, homo sapiens
caactacaaccagcatgctat

SEQ ID NO: 26117 - RNA, 21 nt, RNAi
acuacaaccagcaugcuauuu

SEQ ID NO: 26118 - RNA, 21 nt, RNAi
uuugauguuggucguacgaua

SEQ ID NO: 26119 - DNA, 21 bp, homo sapiens
caaccagcatgctatggtgtt

SEQ ID NO: 26120 - RNA, 21 nt, RNAi
accagcaugcuaugguguuuu

SEQ ID NO: 26121 - RNA, 21 nt, RNAi
uuuggucguacgauaccacaa

SEQ ID NO: 26122 - DNA, 21 bp, homo sapiens
cagcatgctatggtgttcttt

SEQ ID NO: 26123 - RNA, 21 nt, RNAi
gcaugcuaugguguucuuuuu

SEQ ID NO: 26124 - RNA, 21 nt, RNAi
uucguacgauaccacaagaaa

SEQ ID NO: 26125 - DNA, 21 bp, homo sapiens
catgctatggtgttctttaag

SEQ ID NO: 26126 - RNA, 21 nt, RNAi
ugcuaugguguucuuuaaguu

SEQ ID NO: 26127 - RNA, 21 nt, RNAi
uuacgauaccacaagaaauuc

SEQ ID NO: 26128 - DNA, 21 bp, homo sapiens
caaggagctgacttcggaact

SEQ ID NO: 26129 - RNA, 21 nt, RNAi
aggagcugacuucggaacuuu

SEQ ID NO: 26130 - RNA, 21 nt, RNAi
uuuccucgacugaagccuuga

SEQ ID NO: 26131 - DNA, 21 bp, homo sapiens
gaaagaagacaagagctacaa

SEQ ID NO: 26132 - RNA, 21 nt, RNAi
aagaagacaagagcuacaauu

SEQ ID NO: 26133 - RNA, 21 nt, RNAi
uuuucuucuguucucgauguu

SEQ ID NO: 26134 - DNA, 21 bp, homo sapiens
gagctacaatgtcacctccgt

SEQ ID NO: 26135 - RNA, 21 nt, RNAi
gcuacaaugucaccuccguuu

SEQ ID NO: 26136 - RNA, 21 nt, RNAi
uucgauguuacaguggaggca

SEQ ID NO: 26137 - DNA, 21 bp, homo sapiens
gaagtgtgactactggatcag

SEQ ID NO: 26138 - RNA, 21 nt, RNAi
agugugacuacuggaucaguu

SEQ ID NO: 26139 - RNA, 21 nt, RNAi
uuucacacugaugaccuaguc

SEQ ID NO: 26140 - DNA, 21 bp, homo sapiens
gagctgacttcggaactaaag

SEQ ID NO: 26141 - RNA, 21 nt, RNAi
gcugacuucggaacuaaaguu

SEQ ID NO: 26142 - RNA, 21 nt, RNAi
uucgacugaagccuugauuuc

SEQ ID NO: 26143 - DNA, 21 bp, homo sapiens
gaactaaaggagaacttcatc

SEQ ID NO: 26144 - RNA, 21 nt, RNAi
acuaaaggagaacuucaucuu

SEQ ID NO: 26145 - RNA, 21 nt, RNAi
uuugauuuccucuugaaguag

SEQ ID NO: 26146 - DNA, 21 bp, homo sapiens
tacaaccagcatgctatggtg

SEQ ID NO: 26147 - RNA, 21 nt, RNAi
caaccagcaugcuaugguguu

SEQ ID NO: 26148 - RNA, 21 nt, RNAi
uuguuggucguacgauaccac

SEQ ID NO: 26149 - DNA, 21 bp, homo sapiens
aattacagcaaagcctggaag

SEQ ID NO: 26150 - RNA, 21 nt, RNAi
uuacagcaaagccuggaaguu

SEQ ID NO: 26151 - RNA, 21 nt, RNAi
uuaaugucguuucggaccuuc

SEQ ID NO: 26152 - DNA, 21 bp, homo sapiens
aaagcctggaagcttgacgcg

SEQ ID NO: 26153 - RNA, 21 nt, RNAi
agccuggaagcuugacgcguu

SEQ ID NO: 26154 - RNA, 21 nt, RNAi
uuucggaccuucgaacugcgc

SEQ ID NO: 26155 - DNA, 21 bp, homo sapiens
aagcctggaagcttgacgcgc

SEQ ID NO: 26156 - RNA, 21 nt, RNAi
gccuggaagcuugacgcgcuu

SEQ ID NO: 26157 - RNA, 21 nt, RNAi
uucggaccuucgaacugcgcg

SEQ ID NO: 26158 - DNA, 21 bp, homo sapiens
aagcttgacgcgcacctgtgc

SEQ ID NO: 26159 - RNA, 21 nt, RNAi
gcuugacgcgcaccugugcuu

SEQ ID NO: 26160 - RNA, 21 nt, RNAi
uucgaacugcgcguggacacg

SEQ ID NO: 26161 - DNA, 21 bp, homo sapiens
aaagccgtttgtttgtgcagc

SEQ ID NO: 26162 - RNA, 21 nt, RNAi
agccguuuguuugugcagcuu

SEQ ID NO: 26163 - RNA, 21 nt, RNAi
uuucggcaaacaaacacgucg

SEQ ID NO: 26164 - DNA, 21 bp, homo sapiens
aagccgtttgtttgtgcagcc

SEQ ID NO: 26165 - RNA, 21 nt, RNAi
gccguuuguuugugcagccuu

SEQ ID NO: 26166 - RNA, 21 nt, RNAi
uucggcaaacaaacacgucgg

SEQ ID NO: 26167 - DNA, 21 bp, homo sapiens
aagactgtaagaagaccttta

SEQ ID NO: 26168 - RNA, 21 nt, RNAi
gacuguaagaagaccuuuauu

SEQ ID NO: 26169 - RNA, 21 nt, RNAi
uucugacauucuucuggaaau

SEQ ID NO: 26170 - DNA, 21 bp, homo sapiens
aagacctttaagaaacatcag

SEQ ID NO: 26171 - RNA, 21 nt, RNAi
gaccuuuaagaaacaucaguu

SEQ ID NO: 26172 - RNA, 21 nt, RNAi
uucuggaaauucuuuguaguc

SEQ ID NO: 26173 - DNA, 21 bp, homo sapiens
aagaaacatcagcagctgaaa

SEQ ID NO: 26174 - RNA, 21 nt, RNAi
gaaacaucagcagcugaaauu

SEQ ID NO: 26175 - RNA, 21 nt, RNAi
uucuuuguagucgucgacuuu

SEQ ID NO: 26176 - DNA, 21 bp, homo sapiens
aaatccatcagtgccagaata

SEQ ID NO: 26177 - RNA, 21 nt, RNAi
auccaucagugccagaauauu

SEQ ID NO: 26178 - RNA, 21 nt, RNAi
uuuagguagucacggucuuau

SEQ ID NO: 26179 - DNA, 21 bp, homo sapiens
aatccatcagtgccagaatac

SEQ ID NO: 26180 - RNA, 21 nt, RNAi
uccaucagugccagaauacuu

SEQ ID NO: 26181 - RNA, 21 nt, RNAi
uuagguagucacggucuuaug

SEQ ID NO: 26182 - DNA, 21 bp, homo sapiens
aataccaatgaacctctattc

SEQ ID NO: 26183 - RNA, 21 nt, RNAi
uaccaaugaaccucuauucuu

SEQ ID NO: 26184 - RNA, 21 nt, RNAi
uuaugguuacuuggagauaag

SEQ ID NO: 26185 - DNA, 21 bp, homo sapiens
aatgaacctctattcaagtgt

SEQ ID NO: 26186 - RNA, 21 nt, RNAi
ugaaccucuauucaaguguuu

SEQ ID NO: 26187 - RNA, 21 nt, RNAi
uuacuuggagauaaguucaca

SEQ ID NO: 26188 - DNA, 21 bp, homo sapiens
aagctgaaacgacatgccaag

SEQ ID NO: 26189 - RNA, 21 nt, RNAi
gcugaaacgacaugccaaguu

SEQ ID NO: 26190 - RNA, 21 nt, RNAi
uucgacuuugcuguacgguuc

SEQ ID NO: 26191 - DNA, 21 bp, homo sapiens
aaaggatgttcctttgtggca

SEQ ID NO: 26192 - RNA, 21 nt, RNAi
aggauguuccuuuguggcauu

SEQ ID NO: 26193 - RNA, 21 nt, RNAi
uuuccuacaaggaaacaccgu

SEQ ID NO: 26194 - DNA, 21 bp, homo sapiens
aaggatgttcctttgtggcaa

SEQ ID NO: 26195 - RNA, 21 nt, RNAi
ggauguuccuuuguggcaauu

SEQ ID NO: 26196 - RNA, 21 nt, RNAi
uuccuacaaggaaacaccguu

SEQ ID NO: 26197 - DNA, 21 bp, homo sapiens
aaacatggacggaacttctga

SEQ ID NO: 26198 - RNA, 21 nt, RNAi
acauggacggaacuucugauu

SEQ ID NO: 26199 - RNA, 21 nt, RNAi
uuuguaccugccuugaagacu

SEQ ID NO: 26200 - DNA, 21 bp, homo sapiens
aacatggacggaacttctgaa

SEQ ID NO: 26201 - RNA, 21 nt, RNAi
cauggacggaacuucugaauu

SEQ ID NO: 26202 - RNA, 21 nt, RNAi
uuguaccugccuugaagacuu

SEQ ID NO: 26203 - DNA, 21 bp, homo sapiens
aacttctgaaacatgtgagag

SEQ ID NO: 26204 - RNA, 21 nt, RNAi
cuucugaaacaugugagaguu

SEQ ID NO: 26205 - RNA, 21 nt, RNAi
uugaagacuuuguacacucuc

SEQ ID NO: 26206 - DNA, 21 bp, homo sapiens
aagaggaaatactatgtgaag

SEQ ID NO: 26207 - RNA, 21 nt, RNAi
gaggaaauacuaugugaaguu

SEQ ID NO: 26208 - RNA, 21 nt, RNAi
uucuccuuuaugauacacuuc

SEQ ID NO: 26209 - DNA, 21 bp, homo sapiens
aaatactatgtgaagtatgcc

SEQ ID NO: 26210 - RNA, 21 nt, RNAi
auacuaugugaaguaugccuu

SEQ ID NO: 26211 - RNA, 21 nt, RNAi
uuuaugauacacuucauacgg

SEQ ID NO: 26212 - DNA, 21 bp, homo sapiens
aatactatgtgaagtatgccg

SEQ ID NO: 26213 - RNA, 21 nt, RNAi
uacuaugugaaguaugccguu

SEQ ID NO: 26214 - RNA, 21 nt, RNAi
uuaugauacacuucauacggc

SEQ ID NO: 26215 - DNA, 21 bp, homo sapiens
aaacgcaaagattaccttaag

SEQ ID NO: 26216 - RNA, 21 nt, RNAi
acgcaaagauuaccuuaaguu

SEQ ID NO: 26217 - RNA, 21 nt, RNAi
uuugcguuucuaauggaauuc

SEQ ID NO: 26218 - DNA, 21 bp, homo sapiens
aacgcaaagattaccttaagc

SEQ ID NO: 26219 - RNA, 21 nt, RNAi
cgcaaagauuaccuuaagcuu

SEQ ID NO: 26220 - RNA, 21 nt, RNAi
uugcguuucuaauggaauucg

SEQ ID NO: 26221 - DNA, 21 bp, homo sapiens
aaagattaccttaagcaacac

SEQ ID NO: 26222 - RNA, 21 nt, RNAi
agauuaccuuaagcaacacuu

SEQ ID NO: 26223 - RNA, 21 nt, RNAi
uuucuaauggaauucguugug

SEQ ID NO: 26224 - DNA, 21 bp, homo sapiens
aagattaccttaagcaacaca

SEQ ID NO: 26225 - RNA, 21 nt, RNAi
gauuaccuuaagcaacacauu

SEQ ID NO: 26226 - RNA, 21 nt, RNAi
uucuaauggaauucguugugu

SEQ ID NO: 26227 - DNA, 21 bp, homo sapiens
aagagaaggctgtggaagaac

SEQ ID NO: 26228 - RNA, 21 nt, RNAi
gagaaggcuguggaagaacuu

SEQ ID NO: 26229 - RNA, 21 nt, RNAi
uucucuuccgacaccuucuug

SEQ ID NO: 26230 - DNA, 21 bp, homo sapiens
aaggctgtggaagaacctata

SEQ ID NO: 26231 - RNA, 21 nt, RNAi
ggcuguggaagaaccuauauu

SEQ ID NO: 26232 - RNA, 21 nt, RNAi
uuccgacaccuucuuggauau

SEQ ID NO: 26233 - DNA, 21 bp, homo sapiens
aagaacctatacaactgtgtt

SEQ ID NO: 26234 - RNA, 21 nt, RNAi
gaaccuauacaacuguguuuu

SEQ ID NO: 26235 - RNA, 21 nt, RNAi
uucuuggauauguugacacaa

SEQ ID NO: 26236 - DNA, 21 bp, homo sapiens
aactgtgtttaatctccaaag

SEQ ID NO: 26237 - RNA, 21 nt, RNAi
cuguguuuaaucuccaaaguu

SEQ ID NO: 26238 - RNA, 21 nt, RNAi
uugacacaaauuagagguuuc

SEQ ID NO: 26239 - DNA, 21 bp, homo sapiens
aatctccaaagccatatcctc

SEQ ID NO: 26240 - RNA, 21 nt, RNAi
ucuccaaagccauauccucuu

SEQ ID NO: 26241 - RNA, 21 nt, RNAi
uuagagguuucgguauaggag

SEQ ID NO: 26242 - DNA, 21 bp, homo sapiens
aaagccatatcctctccttcc

SEQ ID NO: 26243 - RNA, 21 nt, RNAi
agccauauccucuccuuccuu

SEQ ID NO: 26244 - RNA, 21 nt, RNAi
uuucgguauaggagaggaagg

SEQ ID NO: 26245 - DNA, 21 bp, homo sapiens
aagccatatcctctccttcca

SEQ ID NO: 26246 - RNA, 21 nt, RNAi
gccauauccucuccuuccauu

SEQ ID NO: 26247 - RNA, 21 nt, RNAi
uucgguauaggagaggaaggu

SEQ ID NO: 26248 - DNA, 21 bp, homo sapiens
aatgaaacaaagtctcactag

SEQ ID NO: 26249 - RNA, 21 nt, RNAi
ugaaacaaagucucacuaguu

SEQ ID NO: 26250 - RNA, 21 nt, RNAi
uuacuuuguuucagagugauc

SEQ ID NO: 26251 - DNA, 21 bp, homo sapiens
aaacaaagtctcactaggcat

SEQ ID NO: 26252 - RNA, 21 nt, RNAi
acaaagucucacuaggcauuu

SEQ ID NO: 26253 - RNA, 21 nt, RNAi
uuuguuucagagugauccgua

SEQ ID NO: 26254 - DNA, 21 bp, homo sapiens
aacaaagtctcactaggcatg

SEQ ID NO: 26255 - RNA, 21 nt, RNAi
caaagucucacuaggcauguu

SEQ ID NO: 26256 - RNA, 21 nt, RNAi
uuguuucagagugauccguac

SEQ ID NO: 26257 - DNA, 21 bp, homo sapiens
aaagtctcactaggcatgctg

SEQ ID NO: 26258 - RNA, 21 nt, RNAi
agucucacuaggcaugcuguu

SEQ ID NO: 26259 - RNA, 21 nt, RNAi
uuucagagugauccguacgac

SEQ ID NO: 26260 - DNA, 21 bp, homo sapiens
aagtctcactaggcatgctgt

SEQ ID NO: 26261 - RNA, 21 nt, RNAi
gucucacuaggcaugcuguuu

SEQ ID NO: 26262 - RNA, 21 nt, RNAi
uucagagugauccguacgaca

SEQ ID NO: 26263 - DNA, 21 bp, homo sapiens
aaggcttatctttgtgtcaaa

SEQ ID NO: 26264 - RNA, 21 nt, RNAi
ggcuuaucuuugugucaaauu

SEQ ID NO: 26265 - RNA, 21 nt, RNAi
uuccgaauagaaacacaguuu

SEQ ID NO: 26266 - DNA, 21 bp, homo sapiens
aactgtgtggaagacaagatg

SEQ ID NO: 26267 - RNA, 21 nt, RNAi
cuguguggaagacaagauguu

SEQ ID NO: 26268 - RNA, 21 nt, RNAi
uugacacaccuucuguucuac

SEQ ID NO: 26269 - DNA, 21 bp, homo sapiens
aagacaagatgctctcgacag

SEQ ID NO: 26270 - RNA, 21 nt, RNAi
gacaagaugcucucgacaguu

SEQ ID NO: 26271 - RNA, 21 nt, RNAi
uucuguucuacgagagcuguc

SEQ ID NO: 26272 - DNA, 21 bp, homo sapiens
aagatgctctcgacagttgca

SEQ ID NO: 26273 - RNA, 21 nt, RNAi
gaugcucucgacaguugcauu

SEQ ID NO: 26274 - RNA, 21 nt, RNAi
uucuacgagagcugucaacgu

SEQ ID NO: 26275 - DNA, 21 bp, homo sapiens
aagaactgcactgctttgttt

SEQ ID NO: 26276 - RNA, 21 nt, RNAi
gaacugcacugcuuuguuuuu

SEQ ID NO: 26277 - RNA, 21 nt, RNAi
uucuugacgugacgaaacaaa

SEQ ID NO: 26278 - DNA, 21 bp, homo sapiens
aactgcactgctttgtttaaa

SEQ ID NO: 26279 - RNA, 21 nt, RNAi
cugcacugcuuuguuuaaauu

SEQ ID NO: 26280 - RNA, 21 nt, RNAi
uugacgugacgaaacaaauuu

SEQ ID NO: 26281 - DNA, 21 bp, homo sapiens
aaaggactgcagaccaaggag

SEQ ID NO: 26282 - RNA, 21 nt, RNAi
aggacugcagaccaaggaguu

SEQ ID NO: 26283 - RNA, 21 nt, RNAi
uuuccugacgucugguuccuc

SEQ ID NO: 26284 - DNA, 21 bp, homo sapiens
aaggactgcagaccaaggagt

SEQ ID NO: 26285 - RNA, 21 nt, RNAi
ggacugcagaccaaggaguuu

SEQ ID NO: 26286 - RNA, 21 nt, RNAi
uuccugacgucugguuccuca

SEQ ID NO: 26287 - DNA, 21 bp, homo sapiens
aaggagtcgagctttctctca

SEQ ID NO: 26288 - RNA, 21 nt, RNAi
ggagucgagcuuucucucauu

SEQ ID NO: 26289 - RNA, 21 nt, RNAi
uuccucagcucgaaagagagu

SEQ ID NO: 26290 - DNA, 21 bp, homo sapiens
catcgccgacgcgttcattgc

SEQ ID NO: 26291 - RNA, 21 nt, RNAi
ucgccgacgcguucauugcuu

SEQ ID NO: 26292 - RNA, 21 nt, RNAi
uuagcggcugcgcaaguaacg

SEQ ID NO: 26293 - DNA, 21 bp, homo sapiens
caggaggttcatctgctcctt

SEQ ID NO: 26294 - RNA, 21 nt, RNAi
ggagguucaucugcuccuuuu

SEQ ID NO: 26295 - RNA, 21 nt, RNAi
uuccuccaaguagacgaggaa

SEQ ID NO: 26296 - DNA, 21 bp, homo sapiens
cagcgccaattacagcaaagc

SEQ ID NO: 26297 - RNA, 21 nt, RNAi
gcgccaauuacagcaaagcuu

SEQ ID NO: 26298 - RNA, 21 nt, RNAi
uucgcgguuaaugucguuucg

SEQ ID NO: 26299 - DNA, 21 bp, homo sapiens
caattacagcaaagcctggaa

SEQ ID NO: 26300 - RNA, 21 nt, RNAi
auuacagcaaagccuggaauu

SEQ ID NO: 26301 - RNA, 21 nt, RNAi
uuuaaugucguuucggaccuu

SEQ ID NO: 26302 - DNA, 21 bp, homo sapiens
cagcaaagcctggaagcttga

SEQ ID NO: 26303 - RNA, 21 nt, RNAi
gcaaagccuggaagcuugauu

SEQ ID NO: 26304 - RNA, 21 nt, RNAi
uucguuucggaccuucgaacu

SEQ ID NO: 26305 - DNA, 21 bp, homo sapiens
caaagcctggaagcttgacgc

SEQ ID NO: 26306 - RNA, 21 nt, RNAi
aagccuggaagcuugacgcuu

SEQ ID NO: 26307 - RNA, 21 nt, RNAi
uuuucggaccuucgaacugcg

SEQ ID NO: 26308 - DNA, 21 bp, homo sapiens
catttgtttgtgactatgaag

SEQ ID NO: 26309 - RNA, 21 nt, RNAi
uuuguuugugacuaugaaguu

SEQ ID NO: 26310 - RNA, 21 nt, RNAi
uuaaacaaacacugauacuuc

SEQ ID NO: 26311 - DNA, 21 bp, homo sapiens
catctgagccgccacattctg

SEQ ID NO: 26312 - RNA, 21 nt, RNAi
ucugagccgccacauucuguu

SEQ ID NO: 26313 - RNA, 21 nt, RNAi
uuagacucggcgguguaagac

SEQ ID NO: 26314 - DNA, 21 bp, homo sapiens
cacattctgactcacacagga

SEQ ID NO: 26315 - RNA, 21 nt, RNAi
cauucugacucacacaggauu

SEQ ID NO: 26316 - RNA, 21 nt, RNAi
uuguaagacugaguguguccu

SEQ ID NO: 26317 - DNA, 21 bp, homo sapiens
cattctgactcacacaggaga

SEQ ID NO: 26318 - RNA, 21 nt, RNAi
uucugacucacacaggagauu

SEQ ID NO: 26319 - RNA, 21 nt, RNAi
uuaagacugaguguguccucu

SEQ ID NO: 26320 - DNA, 21 bp, homo sapiens
cagccaatggctgtgatcaaa

SEQ ID NO: 26321 - RNA, 21 nt, RNAi
gccaauggcugugaucaaauu

SEQ ID NO: 26322 - RNA, 21 nt, RNAi
uucgguuaccgacacuaguuu

SEQ ID NO: 26323 - DNA, 21 bp, homo sapiens
catcagtgccagaataccaat

SEQ ID NO: 26324 - RNA, 21 nt, RNAi
ucagugccagaauaccaauuu

SEQ ID NO: 26325 - RNA, 21 nt, RNAi
uuagucacggucuuaugguua

SEQ ID NO: 26326 - DNA, 21 bp, homo sapiens
cagtgccagaataccaatgaa

SEQ ID NO: 26327 - RNA, 21 nt, RNAi
gugccagaauaccaaugaauu

SEQ ID NO: 26328 - RNA, 21 nt, RNAi
uucacggucuuaugguuacuu

SEQ ID NO: 26329 - DNA, 21 bp, homo sapiens
cagaataccaatgaacctcta

SEQ ID NO: 26330 - RNA, 21 nt, RNAi
gaauaccaaugaaccucuauu

SEQ ID NO: 26331 - RNA, 21 nt, RNAi
uucuuaugguuacuuggagau

SEQ ID NO: 26332 - DNA, 21 bp, homo sapiens
caatgaacctctattcaagtg

SEQ ID NO: 26333 - RNA, 21 nt, RNAi
augaaccucuauucaaguguu

SEQ ID NO: 26334 - RNA, 21 nt, RNAi
uuuacuuggagauaaguucac

SEQ ID NO: 26335 - DNA, 21 bp, homo sapiens
cagcaagctgaaacgacatgc

SEQ ID NO: 26336 - RNA, 21 nt, RNAi
gcaagcugaaacgacaugcuu

SEQ ID NO: 26337 - RNA, 21 nt, RNAi
uucguucgacuuugcuguacg

SEQ ID NO: 26338 - DNA, 21 bp, homo sapiens
caagctgaaacgacatgccaa

SEQ ID NO: 26339 - RNA, 21 nt, RNAi
agcugaaacgacaugccaauu

SEQ ID NO: 26340 - RNA, 21 nt, RNAi
uuucgacuuugcuguacgguu

SEQ ID NO: 26341 - DNA, 21 bp, homo sapiens
catggacggaacttctgaaac

SEQ ID NO: 26342 - RNA, 21 nt, RNAi
uggacggaacuucugaaacuu

SEQ ID NO: 26343 - RNA, 21 nt, RNAi
uuaccugccuugaagacuuug

SEQ ID NO: 26344 - DNA, 21 bp, homo sapiens
catttaaacgcaaagattacc

SEQ ID NO: 26345 - RNA, 21 nt, RNAi
uuuaaacgcaaagauuaccuu

SEQ ID NO: 26346 - RNA, 21 nt, RNAi
uuaaauuugcguuucuaaugg

SEQ ID NO: 26347 - DNA, 21 bp, homo sapiens
caaagattaccttaagcaaca

SEQ ID NO: 26348 - RNA, 21 nt, RNAi
aagauuaccuuaagcaacauu

SEQ ID NO: 26349 - RNA, 21 nt, RNAi
uuuucuaauggaauucguugu

SEQ ID NO: 26350 - DNA, 21 bp, homo sapiens
caagagaaggctgtggaagaa

SEQ ID NO: 26351 - RNA, 21 nt, RNAi
agagaaggcuguggaagaauu

SEQ ID NO: 26352 - RNA, 21 nt, RNAi
uuucucuuccgacaccuucuu

SEQ ID NO: 26353 - DNA, 21 bp, homo sapiens
caactgtgtttaatctccaaa

SEQ ID NO: 26354 - RNA, 21 nt, RNAi
acuguguuuaaucuccaaauu

SEQ ID NO: 26355 - RNA, 21 nt, RNAi
uuugacacaaauuagagguuu

SEQ ID NO: 26356 - DNA, 21 bp, homo sapiens
caaagccatatcctctccttc

SEQ ID NO: 26357 - RNA, 21 nt, RNAi
aagccauauccucuccuucuu

SEQ ID NO: 26358 - RNA, 21 nt, RNAi
uuuucgguauaggagaggaag

SEQ ID NO: 26359 - DNA, 21 bp, homo sapiens
catatcctctccttccatgag

SEQ ID NO: 26360 - RNA, 21 nt, RNAi
uauccucuccuuccaugaguu

SEQ ID NO: 26361 - RNA, 21 nt, RNAi
uuauaggagaggaagguacuc

SEQ ID NO: 26362 - DNA, 21 bp, homo sapiens
catttgcaatgaaacaaagtc

SEQ ID NO: 26363 - RNA, 21 nt, RNAi
uuugcaaugaaacaaagucuu

SEQ ID NO: 26364 - RNA, 21 nt, RNAi
uuaaacguuacuuuguuucag

SEQ ID NO: 26365 - DNA, 21 bp, homo sapiens
caatgaaacaaagtctcacta

SEQ ID NO: 26366 - RNA, 21 nt, RNAi
augaaacaaagucucacuauu

SEQ ID NO: 26367 - RNA, 21 nt, RNAi
uuuacuuuguuucagagugau

SEQ ID NO: 26368 - DNA, 21 bp, homo sapiens
caaagtctcactaggcatgct

SEQ ID NO: 26369 - RNA, 21 nt, RNAi
aagucucacuaggcaugcuuu

SEQ ID NO: 26370 - RNA, 21 nt, RNAi
uuuucagagugauccguacga

SEQ ID NO: 26371 - DNA, 21 bp, homo sapiens
cactaggcatgctgttgtaca

SEQ ID NO: 26372 - RNA, 21 nt, RNAi
cuaggcaugcuguuguacauu

SEQ ID NO: 26373 - RNA, 21 nt, RNAi
uugauccguacgacaacaugu

SEQ ID NO: 26374 - DNA, 21 bp, homo sapiens
catgctgttgtacatgatcct

SEQ ID NO: 26375 - RNA, 21 nt, RNAi
ugcuguuguacaugauccuuu

SEQ ID NO: 26376 - RNA, 21 nt, RNAi
uuacgacaacauguacuagga

SEQ ID NO: 26377 - DNA, 21 bp, homo sapiens
catgatcctgacaagaagaaa

SEQ ID NO: 26378 - RNA, 21 nt, RNAi
ugauccugacaagaagaaauu

SEQ ID NO: 26379 - RNA, 21 nt, RNAi
uuacuaggacuguucuucuuu

SEQ ID NO: 26380 - DNA, 21 bp, homo sapiens
catctcagtggatatatcctc

SEQ ID NO: 26381 - RNA, 21 nt, RNAi
ucucaguggauauauccucuu

SEQ ID NO: 26382 - RNA, 21 nt, RNAi
uuagagucaccuauauaggag

SEQ ID NO: 26383 - DNA, 21 bp, homo sapiens
caaggcttatctttgtgtcaa

SEQ ID NO: 26384 - RNA, 21 nt, RNAi
aggcuuaucuuugugucaauu

SEQ ID NO: 26385 - RNA, 21 nt, RNAi
uuuccgaauagaaacacaguu

SEQ ID NO: 26386 - DNA, 21 bp, homo sapiens
caactgtgtggaagacaagat

SEQ ID NO: 26387 - RNA, 21 nt, RNAi
acuguguggaagacaagauuu

SEQ ID NO: 26388 - RNA, 21 nt, RNAi
uuugacacaccuucuguucua

SEQ ID NO: 26389 - DNA, 21 bp, homo sapiens
caagatgctctcgacagttgc

SEQ ID NO: 26390 - RNA, 21 nt, RNAi
agaugcucucgacaguugcuu

SEQ ID NO: 26391 - RNA, 21 nt, RNAi
uuucuacgagagcugucaacg

SEQ ID NO: 26392 - DNA, 21 bp, homo sapiens
cactgctttgtttaaaggact

SEQ ID NO: 26393 - RNA, 21 nt, RNAi
cugcuuuguuuaaaggacuuu

SEQ ID NO: 26394 - RNA, 21 nt, RNAi
uugacgaaacaaauuuccuga

SEQ ID NO: 26395 - DNA, 21 bp, homo sapiens
cagaccaaggagtcgagcttt

SEQ ID NO: 26396 - RNA, 21 nt, RNAi
gaccaaggagucgagcuuuuu

SEQ ID NO: 26397 - RNA, 21 nt, RNAi
uucugguuccucagcucgaaa

SEQ ID NO: 26398 - DNA, 21 bp, homo sapiens
caaggagtcgagctttctctc

SEQ ID NO: 26399 - RNA, 21 nt, RNAi
aggagucgagcuuucucucuu

SEQ ID NO: 26400 - RNA, 21 nt, RNAi
uuuccucagcucgaaagagag

SEQ ID NO: 26401 - DNA, 21 bp, homo sapiens
gagtcggtgtcgtccttgacc

SEQ ID NO: 26402 - RNA, 21 nt, RNAi
gucggugucguccuugaccuu

SEQ ID NO: 26403 - RNA, 21 nt, RNAi
uucagccacagcaggaacugg

SEQ ID NO: 26404 - DNA, 21 bp, homo sapiens
gaccatcgccgacgcgttcat

SEQ ID NO: 26405 - RNA, 21 nt, RNAi
ccaucgccgacgcguucauuu

SEQ ID NO: 26406 - RNA, 21 nt, RNAi
uugguagcggcugcgcaagua

SEQ ID NO: 26407 - DNA, 21 bp, homo sapiens
gactgcagcgccaattacagc

SEQ ID NO: 26408 - RNA, 21 nt, RNAi
cugcagcgccaauuacagcuu

SEQ ID NO: 26409 - RNA, 21 nt, RNAi
uugacgucgcgguuaaugucg

SEQ ID NO: 26410 - DNA, 21 bp, homo sapiens
gaagcttgacgcgcacctgtg

SEQ ID NO: 26411 - RNA, 21 nt, RNAi
agcuugacgcgcaccuguguu

SEQ ID NO: 26412 - RNA, 21 nt, RNAi
uuucgaacugcgcguggacac

SEQ ID NO: 26413 - DNA, 21 bp, homo sapiens
gagagaccatttgtttgtgac

SEQ ID NO: 26414 - RNA, 21 nt, RNAi
gagaccauuuguuugugacuu

SEQ ID NO: 26415 - RNA, 21 nt, RNAi
uucucugguaaacaaacacug

SEQ ID NO: 26416 - DNA, 21 bp, homo sapiens
gagaccatttgtttgtgacta

SEQ ID NO: 26417 - RNA, 21 nt, RNAi
gaccauuuguuugugacuauu

SEQ ID NO: 26418 - RNA, 21 nt, RNAi
uucugguaaacaaacacugau

SEQ ID NO: 26419 - DNA, 21 bp, homo sapiens
gaccatttgtttgtgactatg

SEQ ID NO: 26420 - RNA, 21 nt, RNAi
ccauuuguuugugacuauguu

SEQ ID NO: 26421 - RNA, 21 nt, RNAi
uugguaaacaaacacugauac

SEQ ID NO: 26422 - DNA, 21 bp, homo sapiens
gactaccatctgagccgccac

SEQ ID NO: 26423 - RNA, 21 nt, RNAi
cuaccaucugagccgccacuu

SEQ ID NO: 26424 - RNA, 21 nt, RNAi
uugaugguagacucggcggug

SEQ ID NO: 26425 - DNA, 21 bp, homo sapiens
gagccgccacattctgactca

SEQ ID NO: 26426 - RNA, 21 nt, RNAi
gccgccacauucugacucauu

SEQ ID NO: 26427 - RNA, 21 nt, RNAi
uucggcgguguaagacugagu

SEQ ID NO: 26428 - DNA, 21 bp, homo sapiens
gaagactgtaagaagaccttt

SEQ ID NO: 26429 - RNA, 21 nt, RNAi
agacuguaagaagaccuuuuu

SEQ ID NO: 26430 - RNA, 21 nt, RNAi
uuucugacauucuucuggaaa

SEQ ID NO: 26431 - DNA, 21 bp, homo sapiens
gactgtaagaagacctttaag

SEQ ID NO: 26432 - RNA, 21 nt, RNAi
cuguaagaagaccuuuaaguu

SEQ ID NO: 26433 - RNA, 21 nt, RNAi
uugacauucuucuggaaauuc

SEQ ID NO: 26434 - DNA, 21 bp, homo sapiens
gaagacctttaagaaacatca

SEQ ID NO: 26435 - RNA, 21 nt, RNAi
agaccuuuaagaaacaucauu

SEQ ID NO: 26436 - RNA, 21 nt, RNAi
uuucuggaaauucuuuguagu

SEQ ID NO: 26437 - DNA, 21 bp, homo sapiens
gacctttaagaaacatcagca

SEQ ID NO: 26438 - RNA, 21 nt, RNAi
ccuuuaagaaacaucagcauu

SEQ ID NO: 26439 - RNA, 21 nt, RNAi
uuggaaauucuuuguagucgu

SEQ ID NO: 26440 - DNA, 21 bp, homo sapiens
gaataccaatgaacctctatt

SEQ ID NO: 26441 - RNA, 21 nt, RNAi
auaccaaugaaccucuauuuu

SEQ ID NO: 26442 - RNA, 21 nt, RNAi
uuuaugguuacuuggagauaa

SEQ ID NO: 26443 - DNA, 21 bp, homo sapiens
gaacctctattcaagtgtacc

SEQ ID NO: 26444 - RNA, 21 nt, RNAi
accucuauucaaguguaccuu

SEQ ID NO: 26445 - RNA, 21 nt, RNAi
uuuggagauaaguucacaugg

SEQ ID NO: 26446 - DNA, 21 bp, homo sapiens
gacggaacttctgaaacatgt

SEQ ID NO: 26447 - RNA, 21 nt, RNAi
cggaacuucugaaacauguuu

SEQ ID NO: 26448 - RNA, 21 nt, RNAi
uugccuugaagacuuuguaca

SEQ ID NO: 26449 - DNA, 21 bp, homo sapiens
gaacttctgaaacatgtgaga

SEQ ID NO: 26450 - RNA, 21 nt, RNAi
acuucugaaacaugugagauu

SEQ ID NO: 26451 - RNA, 21 nt, RNAi
uuugaagacuuuguacacucu

SEQ ID NO: 26452 - DNA, 21 bp, homo sapiens
gaggaaatactatgtgaagta

SEQ ID NO: 26453 - RNA, 21 nt, RNAi
ggaaauacuaugugaaguauu

SEQ ID NO: 26454 - RNA, 21 nt, RNAi
uuccuuuaugauacacuucau

SEQ ID NO: 26455 - DNA, 21 bp, homo sapiens
gaaatactatgtgaagtatgc

SEQ ID NO: 26456 - RNA, 21 nt, RNAi
aauacuaugugaaguaugcuu

SEQ ID NO: 26457 - RNA, 21 nt, RNAi
uuuuaugauacacuucauacg

SEQ ID NO: 26458 - DNA, 21 bp, homo sapiens
gattaccttaagcaacacatg

SEQ ID NO: 26459 - RNA, 21 nt, RNAi
uuaccuuaagcaacacauguu

SEQ ID NO: 26460 - RNA, 21 nt, RNAi
uuaauggaauucguuguguac

SEQ ID NO: 26461 - DNA, 21 bp, homo sapiens
gatgtatgtcgctgtccaaga

SEQ ID NO: 26462 - RNA, 21 nt, RNAi
uguaugucgcuguccaagauu

SEQ ID NO: 26463 - RNA, 21 nt, RNAi
uuacauacagcgacagguucu

SEQ ID NO: 26464 - DNA, 21 bp, homo sapiens
gagaaggctgtggaagaacct

SEQ ID NO: 26465 - RNA, 21 nt, RNAi
gaaggcuguggaagaaccuuu

SEQ ID NO: 26466 - RNA, 21 nt, RNAi
uucuuccgacaccuucuugga

SEQ ID NO: 26467 - DNA, 21 bp, homo sapiens
gaaggctgtggaagaacctat

SEQ ID NO: 26468 - RNA, 21 nt, RNAi
aggcuguggaagaaccuauuu

SEQ ID NO: 26469 - RNA, 21 nt, RNAi
uuuccgacaccuucuuggaua

SEQ ID NO: 26470 - DNA, 21 bp, homo sapiens
gaagaacctatacaactgtgt

SEQ ID NO: 26471 - RNA, 21 nt, RNAi
agaaccuauacaacuguguuu

SEQ ID NO: 26472 - RNA, 21 nt, RNAi
uuucuuggauauguugacaca

SEQ ID NO: 26473 - DNA, 21 bp, homo sapiens
gaacctatacaactgtgttta

SEQ ID NO: 26474 - RNA, 21 nt, RNAi
accuauacaacuguguuuauu

SEQ ID NO: 26475 - RNA, 21 nt, RNAi
uuuggauauguugacacaaau

SEQ ID NO: 26476 - DNA, 21 bp, homo sapiens
gaacatgctggctgtggcaaa

SEQ ID NO: 26477 - RNA, 21 nt, RNAi
acaugcuggcuguggcaaauu

SEQ ID NO: 26478 - RNA, 21 nt, RNAi
uuuguacgaccgacaccguuu

SEQ ID NO: 26479 - DNA, 21 bp, homo sapiens
gaaacaaagtctcactaggca

SEQ ID NO: 26480 - RNA, 21 nt, RNAi
aacaaagucucacuaggcauu

SEQ ID NO: 26481 - RNA, 21 nt, RNAi
uuuuguuucagagugauccgu

SEQ ID NO: 26482 - DNA, 21 bp, homo sapiens
gagtttggcctctcatctcag

SEQ ID NO: 26483 - RNA, 21 nt, RNAi
guuuggccucucaucucaguu

SEQ ID NO: 26484 - RNA, 21 nt, RNAi
uucaaaccggagaguagaguc

SEQ ID NO: 26485 - DNA, 21 bp, homo sapiens
gaagacaagatgctctcgaca

SEQ ID NO: 26486 - RNA, 21 nt, RNAi
agacaagaugcucucgacauu

SEQ ID NO: 26487 - RNA, 21 nt, RNAi
uuucuguucuacgagagcugu

SEQ ID NO: 26488 - DNA, 21 bp, homo sapiens
gacaagatgctctcgacagtt

SEQ ID NO: 26489 - RNA, 21 nt, RNAi
caagaugcucucgacaguuuu

SEQ ID NO: 26490 - RNA, 21 nt, RNAi
uuguucuacgagagcugucaa

SEQ ID NO: 26491 - DNA, 21 bp, homo sapiens
gatgctctcgacagttgcagt

SEQ ID NO: 26492 - RNA, 21 nt, RNAi
ugcucucgacaguugcaguuu

SEQ ID NO: 26493 - RNA, 21 nt, RNAi
uuacgagagcugucaacguca

SEQ ID NO: 26494 - DNA, 21 bp, homo sapiens
gaactgcactgctttgtttaa

SEQ ID NO: 26495 - RNA, 21 nt, RNAi
acugcacugcuuuguuuaauu

SEQ ID NO: 26496 - RNA, 21 nt, RNAi
uuugacgugacgaaacaaauu

SEQ ID NO: 26497 - DNA, 21 bp, homo sapiens
gactgcagaccaaggagtcga

SEQ ID NO: 26498 - RNA, 21 nt, RNAi
cugcagaccaaggagucgauu

SEQ ID NO: 26499 - RNA, 21 nt, RNAi
uugacgucugguuccucagcu

SEQ ID NO: 26500 - DNA, 21 bp, homo sapiens
gaccaaggagtcgagctttct

SEQ ID NO: 26501 - RNA, 21 nt, RNAi
ccaaggagucgagcuuucuuu

SEQ ID NO: 26502 - RNA, 21 nt, RNAi
uugguuccucagcucgaaaga

SEQ ID NO: 26503 - DNA, 21 bp, homo sapiens
gagtcgagctttctctcagag

SEQ ID NO: 26504 - RNA, 21 nt, RNAi
gucgagcuuucucucagaguu

SEQ ID NO: 26505 - RNA, 21 nt, RNAi
uucagcucgaaagagagucuc

SEQ ID NO: 26506 - DNA, 21 bp, homo sapiens
gagctttctctcagagcatgc

SEQ ID NO: 26507 - RNA, 21 nt, RNAi
gcuuucucucagagcaugcuu

SEQ ID NO: 26508 - RNA, 21 nt, RNAi
uucgaaagagagucucguacg

SEQ ID NO: 26509 - DNA, 21 bp, homo sapiens
tacagcaaagcctggaagctt

SEQ ID NO: 26510 - RNA, 21 nt, RNAi
cagcaaagccuggaagcuuuu

SEQ ID NO: 26511 - RNA, 21 nt, RNAi
uugucguuucggaccuucgaa

SEQ ID NO: 26512 - DNA, 21 bp, homo sapiens
taccatctgagccgccacatt

SEQ ID NO: 26513 - RNA, 21 nt, RNAi
ccaucugagccgccacauuuu

SEQ ID NO: 26514 - RNA, 21 nt, RNAi
uugguagacucggcgguguaa

SEQ ID NO: 26515 - DNA, 21 bp, homo sapiens
taagaaacatcagcagctgaa

SEQ ID NO: 26516 - RNA, 21 nt, RNAi
agaaacaucagcagcugaauu

SEQ ID NO: 26517 - RNA, 21 nt, RNAi
uuucuuuguagucgucgacuu

SEQ ID NO: 26518 - DNA, 21 bp, homo sapiens
taccaatgaacctctattcaa

SEQ ID NO: 26519 - RNA, 21 nt, RNAi
ccaaugaaccucuauucaauu

SEQ ID NO: 26520 - RNA, 21 nt, RNAi
uugguuacuuggagauaaguu

SEQ ID NO: 26521 - DNA, 21 bp, homo sapiens
tactatgtgaagtatgccgga

SEQ ID NO: 26522 - RNA, 21 nt, RNAi
cuaugugaaguaugccggauu

SEQ ID NO: 26523 - RNA, 21 nt, RNAi
uugauacacuucauacggccu

SEQ ID NO: 26524 - DNA, 21 bp, homo sapiens
taccttaagcaacacatgaaa

SEQ ID NO: 26525 - RNA, 21 nt, RNAi
ccuuaagcaacacaugaaauu

SEQ ID NO: 26526 - RNA, 21 nt, RNAi
uuggaauucguuguguacuuu

SEQ ID NO: 26527 - DNA, 21 bp, homo sapiens
tatgtcgctgtccaagagaag

SEQ ID NO: 26528 - RNA, 21 nt, RNAi
ugucgcuguccaagagaaguu

SEQ ID NO: 26529 - RNA, 21 nt, RNAi
uuacagcgacagguucucuuc

SEQ ID NO: 26530 - DNA, 21 bp, homo sapiens
tacaactgtgtttaatctcca

SEQ ID NO: 26531 - RNA, 21 nt, RNAi
caacuguguuuaaucuccauu

SEQ ID NO: 26532 - RNA, 21 nt, RNAi
uuguugacacaaauuagaggu

SEQ ID NO: 26533 - DNA, 21 bp, homo sapiens
taatctccaaagccatatcct

SEQ ID NO: 26534 - RNA, 21 nt, RNAi
aucuccaaagccauauccuuu

SEQ ID NO: 26535 - RNA, 21 nt, RNAi
uuuagagguuucgguauagga

SEQ ID NO: 26536 - DNA, 21 bp, homo sapiens
tatcctctccttccatgagga

SEQ ID NO: 26537 - RNA, 21 nt, RNAi
uccucuccuuccaugaggauu

SEQ ID NO: 26538 - RNA, 21 nt, RNAi
uuaggagaggaagguacuccu

SEQ ID NO: 26539 - DNA, 21 bp, homo sapiens
taggcatgctgttgtacatga

SEQ ID NO: 26540 - RNA, 21 nt, RNAi
ggcaugcuguuguacaugauu

SEQ ID NO: 26541 - RNA, 21 nt, RNAi
uuccguacgacaacauguacu

SEQ ID NO: 26542 - DNA, 21 bp, homo sapiens
tacatgatcctgacaagaaga

SEQ ID NO: 26543 - RNA, 21 nt, RNAi
caugauccugacaagaagauu

SEQ ID NO: 26544 - RNA, 21 nt, RNAi
uuguacuaggacuguucuucu

SEQ ID NO: 26545 - DNA, 21 bp, homo sapiens
taagaactgcactgctttgtt

SEQ ID NO: 26546 - RNA, 21 nt, RNAi
agaacugcacugcuuuguuuu

SEQ ID NO: 26547 - RNA, 21 nt, RNAi
uuucuugacgugacgaaacaa

SEQ ID NO: 26548 - DNA, 21 bp, homo sapiens
taaaggactgcagaccaagga

SEQ ID NO: 26549 - RNA, 21 nt, RNAi
aaggacugcagaccaaggauu

SEQ ID NO: 26550 - RNA, 21 nt, RNAi
uuuuccugacgucugguuccu

SEQ ID NO: 26551 - DNA, 21 bp, homo sapiens
aaactggtctcggattagtgt

SEQ ID NO: 26552 - RNA, 21 nt, RNAi
acuggucucggauuaguguuu

SEQ ID NO: 26553 - RNA, 21 nt, RNAi
uuugaccagagccuaaucaca

SEQ ID NO: 26554 - DNA, 21 bp, homo sapiens
aactggtctcggattagtgtc

SEQ ID NO: 26555 - RNA, 21 nt, RNAi
cuggucucggauuagugucuu

SEQ ID NO: 26556 - RNA, 21 nt, RNAi
uugaccagagccuaaucacag

SEQ ID NO: 26557 - DNA, 21 bp, homo sapiens
aaagaattggagatgactagt

SEQ ID NO: 26558 - RNA, 21 nt, RNAi
agaauuggagaugacuaguuu

SEQ ID NO: 26559 - RNA, 21 nt, RNAi
uuucuuaaccucuacugauca

SEQ ID NO: 26560 - DNA, 21 bp, homo sapiens
aagaattggagatgactagtt

SEQ ID NO: 26561 - RNA, 21 nt, RNAi
gaauuggagaugacuaguuuu

SEQ ID NO: 26562 - RNA, 21 nt, RNAi
uucuuaaccucuacugaucaa

SEQ ID NO: 26563 - DNA, 21 bp, homo sapiens
aaattcaagagcttgaaggac

SEQ ID NO: 26564 - RNA, 21 nt, RNAi
auucaagagcuugaaggacuu

SEQ ID NO: 26565 - RNA, 21 nt, RNAi
uuuaaguucucgaacuuccug

SEQ ID NO: 26566 - DNA, 21 bp, homo sapiens
aattcaagagcttgaaggaca

SEQ ID NO: 26567 - RNA, 21 nt, RNAi
uucaagagcuugaaggacauu

SEQ ID NO: 26568 - RNA, 21 nt, RNAi
uuaaguucucgaacuuccugu

SEQ ID NO: 26569 - DNA, 21 bp, homo sapiens
aagagcttgaaggacagcttg

SEQ ID NO: 26570 - RNA, 21 nt, RNAi
gagcuugaaggacagcuuguu

SEQ ID NO: 26571 - RNA, 21 nt, RNAi
uucucgaacuuccugucgaac

SEQ ID NO: 26572 - DNA, 21 bp, homo sapiens
aaggacagcttgacaaactga

SEQ ID NO: 26573 - RNA, 21 nt, RNAi
ggacagcuugacaaacugauu

SEQ ID NO: 26574 - RNA, 21 nt, RNAi
uuccugucgaacuguuugacu

SEQ ID NO: 26575 - DNA, 21 bp, homo sapiens
aaagcagcaaaggcagtttca

SEQ ID NO: 26576 - RNA, 21 nt, RNAi
agcagcaaaggcaguuucauu

SEQ ID NO: 26577 - RNA, 21 nt, RNAi
uuucgucguuuccgucaaagu

SEQ ID NO: 26578 - DNA, 21 bp, homo sapiens
aagcagcaaaggcagtttcag

SEQ ID NO: 26579 - RNA, 21 nt, RNAi
gcagcaaaggcaguuucaguu

SEQ ID NO: 26580 - RNA, 21 nt, RNAi
uucgucguuuccgucaaaguc

SEQ ID NO: 26581 - DNA, 21 bp, homo sapiens
aaaggcagtttcagcttgaca

SEQ ID NO: 26582 - RNA, 21 nt, RNAi
aggcaguuucagcuugacauu

SEQ ID NO: 26583 - RNA, 21 nt, RNAi
uuuccgucaaagucgaacugu

SEQ ID NO: 26584 - DNA, 21 bp, homo sapiens
aaggcagtttcagcttgacag

SEQ ID NO: 26585 - RNA, 21 nt, RNAi
ggcaguuucagcuugacaguu

SEQ ID NO: 26586 - RNA, 21 nt, RNAi
uuccgucaaagucgaacuguc

SEQ ID NO: 26587 - DNA, 21 bp, homo sapiens
aaatatgtgaaagtctggaga

SEQ ID NO: 26588 - RNA, 21 nt, RNAi
auaugugaaagucuggagauu

SEQ ID NO: 26589 - RNA, 21 nt, RNAi
uuuauacacuuucagaccucu

SEQ ID NO: 26590 - DNA, 21 bp, homo sapiens
aatatgtgaaagtctggagaa

SEQ ID NO: 26591 - RNA, 21 nt, RNAi
uaugugaaagucuggagaauu

SEQ ID NO: 26592 - RNA, 21 nt, RNAi
uuauacacuuucagaccucuu

SEQ ID NO: 26593 - DNA, 21 bp, homo sapiens
aaactaagcagaagatttctc

SEQ ID NO: 26594 - RNA, 21 nt, RNAi
acuaagcagaagauuucucuu

SEQ ID NO: 26595 - RNA, 21 nt, RNAi
uuugauucgucuucuaaagag

SEQ ID NO: 26596 - DNA, 21 bp, homo sapiens
aactaagcagaagatttctca

SEQ ID NO: 26597 - RNA, 21 nt, RNAi
cuaagcagaagauuucucauu

SEQ ID NO: 26598 - RNA, 21 nt, RNAi
uugauucgucuucuaaagagu

SEQ ID NO: 26599 - DNA, 21 bp, homo sapiens
aagcagaagatttctcatgaa

SEQ ID NO: 26600 - RNA, 21 nt, RNAi
gcagaagauuucucaugaauu

SEQ ID NO: 26601 - RNA, 21 nt, RNAi
uucgucuucuaaagaguacuu

SEQ ID NO: 26602 - DNA, 21 bp, homo sapiens
aacttcaagtcaaggagtcac

SEQ ID NO: 26603 - RNA, 21 nt, RNAi
cuucaagucaaggagucacuu

SEQ ID NO: 26604 - RNA, 21 nt, RNAi
uugaaguucaguuccucagug

SEQ ID NO: 26605 - DNA, 21 bp, homo sapiens
aagtcaaggagtcacaagtga

SEQ ID NO: 26606 - RNA, 21 nt, RNAi
gucaaggagucacaagugauu

SEQ ID NO: 26607 - RNA, 21 nt, RNAi
uucaguuccucaguguucacu

SEQ ID NO: 26608 - DNA, 21 bp, homo sapiens
aaggagtcacaagtgaatttc

SEQ ID NO: 26609 - RNA, 21 nt, RNAi
ggagucacaagugaauuucuu

SEQ ID NO: 26610 - RNA, 21 nt, RNAi
uuccucaguguucacuuaaag

SEQ ID NO: 26611 - DNA, 21 bp, homo sapiens
aagtgaatttccaggaaggac

SEQ ID NO: 26612 - RNA, 21 nt, RNAi
gugaauuuccaggaaggacuu

SEQ ID NO: 26613 - RNA, 21 nt, RNAi
uucacuuaaagguccuuccug

SEQ ID NO: 26614 - DNA, 21 bp, homo sapiens
aatttccaggaaggacaactg

SEQ ID NO: 26615 - RNA, 21 nt, RNAi
uuuccaggaaggacaacuguu

SEQ ID NO: 26616 - RNA, 21 nt, RNAi
uuaaagguccuuccuguugac

SEQ ID NO: 26617 - DNA, 21 bp, homo sapiens
aaggacaactgaattcaggca

SEQ ID NO: 26618 - RNA, 21 nt, RNAi
ggacaacugaauucaggcauu

SEQ ID NO: 26619 - RNA, 21 nt, RNAi
uuccuguugacuuaaguccgu

SEQ ID NO: 26620 - DNA, 21 bp, homo sapiens
aaactggaacaggaacttaaa

SEQ ID NO: 26621 - RNA, 21 nt, RNAi
acuggaacaggaacuuaaauu

SEQ ID NO: 26622 - RNA, 21 nt, RNAi
uuugaccuuguccuugaauuu

SEQ ID NO: 26623 - DNA, 21 bp, homo sapiens
aaaggtgtaaatctgagcttg

SEQ ID NO: 26624 - RNA, 21 nt, RNAi
agguguaaaucugagcuuguu

SEQ ID NO: 26625 - RNA, 21 nt, RNAi
uuuccacauuuagacucgaac

SEQ ID NO: 26626 - DNA, 21 bp, homo sapiens
aaggtgtaaatctgagcttga

SEQ ID NO: 26627 - RNA, 21 nt, RNAi
gguguaaaucugagcuugauu

SEQ ID NO: 26628 - RNA, 21 nt, RNAi
uuccacauuuagacucgaacu

SEQ ID NO: 26629 - DNA, 21 bp, homo sapiens
aaatctgagcttgaaagaagc

SEQ ID NO: 26630 - RNA, 21 nt, RNAi
aucugagcuugaaagaagcuu

SEQ ID NO: 26631 - RNA, 21 nt, RNAi
uuuagacucgaacuuucuucg

SEQ ID NO: 26632 - DNA, 21 bp, homo sapiens
aatctgagcttgaaagaagcc

SEQ ID NO: 26633 - RNA, 21 nt, RNAi
ucugagcuugaaagaagccuu

SEQ ID NO: 26634 - RNA, 21 nt, RNAi
uuagacucgaacuuucuucgg

SEQ ID NO: 26635 - DNA, 21 bp, homo sapiens
aaagaagccaacaagctgcgc

SEQ ID NO: 26636 - RNA, 21 nt, RNAi
agaagccaacaagcugcgcuu

SEQ ID NO: 26637 - RNA, 21 nt, RNAi
uuucuucgguuguucgacgcg

SEQ ID NO: 26638 - DNA, 21 bp, homo sapiens
aagaagccaacaagctgcgca

SEQ ID NO: 26639 - RNA, 21 nt, RNAi
gaagccaacaagcugcgcauu

SEQ ID NO: 26640 - RNA, 21 nt, RNAi
uucuucgguuguucgacgcgu

SEQ ID NO: 26641 - DNA, 21 bp, homo sapiens
aagccaacaagctgcgcagtc

SEQ ID NO: 26642 - RNA, 21 nt, RNAi
gccaacaagcugcgcagucuu

SEQ ID NO: 26643 - RNA, 21 nt, RNAi
uucgguuguucgacgcgucag

SEQ ID NO: 26644 - DNA, 21 bp, homo sapiens
aacaagctgcgcagtctgcag

SEQ ID NO: 26645 - RNA, 21 nt, RNAi
caagcugcgcagucugcaguu

SEQ ID NO: 26646 - RNA, 21 nt, RNAi
uuguucgacgcgucagacguc

SEQ ID NO: 26647 - DNA, 21 bp, homo sapiens
aagctgcgcagtctgcagatg

SEQ ID NO: 26648 - RNA, 21 nt, RNAi
gcugcgcagucugcagauguu

SEQ ID NO: 26649 - RNA, 21 nt, RNAi
uucgacgcgucagacgucuac

SEQ ID NO: 26650 - DNA, 21 bp, homo sapiens
aatccatgcaatacaccacaa

SEQ ID NO: 26651 - RNA, 21 nt, RNAi
uccaugcaauacaccacaauu

SEQ ID NO: 26652 - RNA, 21 nt, RNAi
uuagguacguuaugugguguu

SEQ ID NO: 26653 - DNA, 21 bp, homo sapiens
aactccactaacaccaagtca

SEQ ID NO: 26654 - RNA, 21 nt, RNAi
cuccacuaacaccaagucauu

SEQ ID NO: 26655 - RNA, 21 nt, RNAi
uugaggugauugugguucagu

SEQ ID NO: 26656 - DNA, 21 bp, homo sapiens
aataaagaggttgaagaacga

SEQ ID NO: 26657 - RNA, 21 nt, RNAi
uaaagagguugaagaacgauu

SEQ ID NO: 26658 - RNA, 21 nt, RNAi
uuauuucuccaacuucuugcu

SEQ ID NO: 26659 - DNA, 21 bp, homo sapiens
aaagattagaggcagaggtta

SEQ ID NO: 26660 - RNA, 21 nt, RNAi
agauuagaggcagagguuauu

SEQ ID NO: 26661 - RNA, 21 nt, RNAi
uuucuaaucuccgucuccaau

SEQ ID NO: 26662 - DNA, 21 bp, homo sapiens
aagattagaggcagaggttaa

SEQ ID NO: 26663 - RNA, 21 nt, RNAi
gauuagaggcagagguuaauu

SEQ ID NO: 26664 - RNA, 21 nt, RNAi
uucuaaucuccgucuccaauu

SEQ ID NO: 26665 - DNA, 21 bp, homo sapiens
aaagcaagccagactcttcca

SEQ ID NO: 26666 - RNA, 21 nt, RNAi
agcaagccagacucuuccauu

SEQ ID NO: 26667 - RNA, 21 nt, RNAi
uuucguucggucugagaaggu

SEQ ID NO: 26668 - DNA, 21 bp, homo sapiens
aagcaagccagactcttccac

SEQ ID NO: 26669 - RNA, 21 nt, RNAi
gcaagccagacucuuccacuu

SEQ ID NO: 26670 - RNA, 21 nt, RNAi
uucguucggucugagaaggug

SEQ ID NO: 26671 - DNA, 21 bp, homo sapiens
aagccagactcttccacaagc

SEQ ID NO: 26672 - RNA, 21 nt, RNAi
gccagacucuuccacaagcuu

SEQ ID NO: 26673 - RNA, 21 nt, RNAi
uucggucugagaagguguucg

SEQ ID NO: 26674 - DNA, 21 bp, homo sapiens
aagccaccatgaatcaccgcg

SEQ ID NO: 26675 - RNA, 21 nt, RNAi
gccaccaugaaucaccgcguu

SEQ ID NO: 26676 - RNA, 21 nt, RNAi
uucggugguacuuaguggcgc

SEQ ID NO: 26677 - DNA, 21 bp, homo sapiens
aaagaactccaattaggagag

SEQ ID NO: 26678 - RNA, 21 nt, RNAi
agaacuccaauuaggagaguu

SEQ ID NO: 26679 - RNA, 21 nt, RNAi
uuucuugagguuaauccucuc

SEQ ID NO: 26680 - DNA, 21 bp, homo sapiens
aagaactccaattaggagaga

SEQ ID NO: 26681 - RNA, 21 nt, RNAi
gaacuccaauuaggagagauu

SEQ ID NO: 26682 - RNA, 21 nt, RNAi
uucuugagguuaauccucucu

SEQ ID NO: 26683 - DNA, 21 bp, homo sapiens
aactccaattaggagagattt

SEQ ID NO: 26684 - RNA, 21 nt, RNAi
cuccaauuaggagagauuuuu

SEQ ID NO: 26685 - RNA, 21 nt, RNAi
uugagguuaauccucucuaaa

SEQ ID NO: 26686 - DNA, 21 bp, homo sapiens
aattaggagagatttctctgc

SEQ ID NO: 26687 - RNA, 21 nt, RNAi
uuaggagagauuucucugcuu

SEQ ID NO: 26688 - RNA, 21 nt, RNAi
uuaauccucucuaaagagacg

SEQ ID NO: 26689 - DNA, 21 bp, homo sapiens
aacaagaggtgactccaagtc

SEQ ID NO: 26690 - RNA, 21 nt, RNAi
caagaggugacuccaagucuu

SEQ ID NO: 26691 - RNA, 21 nt, RNAi
uuguucuccacugagguucag

SEQ ID NO: 26692 - DNA, 21 bp, homo sapiens
aagaggtgactccaagtcgat

SEQ ID NO: 26693 - RNA, 21 nt, RNAi
gaggugacuccaagucgauuu

SEQ ID NO: 26694 - RNA, 21 nt, RNAi
uucuccacugagguucagcua

SEQ ID NO: 26695 - DNA, 21 bp, homo sapiens
aagtcgatcaactttgcaaat

SEQ ID NO: 26696 - RNA, 21 nt, RNAi
gucgaucaacuuugcaaauuu

SEQ ID NO: 26697 - RNA, 21 nt, RNAi
uucagcuaguugaaacguuua

SEQ ID NO: 26698 - DNA, 21 bp, homo sapiens
aaagagatgctaatagcagtt

SEQ ID NO: 26699 - RNA, 21 nt, RNAi
agagaugcuaauagcaguuuu

SEQ ID NO: 26700 - RNA, 21 nt, RNAi
uuucucuacgauuaucgucaa

SEQ ID NO: 26701 - DNA, 21 bp, homo sapiens
aagagatgctaatagcagttt

SEQ ID NO: 26702 - RNA, 21 nt, RNAi
gagaugcuaauagcaguuuuu

SEQ ID NO: 26703 - RNA, 21 nt, RNAi
uucucuacgauuaucgucaaa

SEQ ID NO: 26704 - DNA, 21 bp, homo sapiens
aattctagcagtcctcatctt

SEQ ID NO: 26705 - RNA, 21 nt, RNAi
uucuagcaguccucaucuuuu

SEQ ID NO: 26706 - RNA, 21 nt, RNAi
uuaagaucgucaggaguagaa

SEQ ID NO: 26707 - DNA, 21 bp, homo sapiens
aaagcgcagaatcaagagcta

SEQ ID NO: 26708 - RNA, 21 nt, RNAi
agcgcagaaucaagagcuauu

SEQ ID NO: 26709 - RNA, 21 nt, RNAi
uuucgcgucuuaguucucgau

SEQ ID NO: 26710 - DNA, 21 bp, homo sapiens
aagcgcagaatcaagagctaa

SEQ ID NO: 26711 - RNA, 21 nt, RNAi
gcgcagaaucaagagcuaauu

SEQ ID NO: 26712 - RNA, 21 nt, RNAi
uucgcgucuuaguucucgauu

SEQ ID NO: 26713 - DNA, 21 bp, homo sapiens
aatcaagagctaagaaacaag

SEQ ID NO: 26714 - RNA, 21 nt, RNAi
ucaagagcuaagaaacaaguu

SEQ ID NO: 26715 - RNA, 21 nt, RNAi
uuaguucucgauucuuuguuc

SEQ ID NO: 26716 - DNA, 21 bp, homo sapiens
aatgagttggaactacgcctg

SEQ ID NO: 26717 - RNA, 21 nt, RNAi
ugaguuggaacuacgccuguu

SEQ ID NO: 26718 - RNA, 21 nt, RNAi
uuacucaaccuugaugcggac

SEQ ID NO: 26719 - DNA, 21 bp, homo sapiens
aactacgcctgcaaggacatg

SEQ ID NO: 26720 - RNA, 21 nt, RNAi
cuacgccugcaaggacauguu

SEQ ID NO: 26721 - RNA, 21 nt, RNAi
uugaugcggacguuccuguac

SEQ ID NO: 26722 - DNA, 21 bp, homo sapiens
aaagaaatgaaaggccaagtg

SEQ ID NO: 26723 - RNA, 21 nt, RNAi
agaaaugaaaggccaaguguu

SEQ ID NO: 26724 - RNA, 21 nt, RNAi
uuucuuuacuuuccgguucac

SEQ ID NO: 26725 - DNA, 21 bp, homo sapiens
aagaaatgaaaggccaagtga

SEQ ID NO: 26726 - RNA, 21 nt, RNAi
gaaaugaaaggccaagugauu

SEQ ID NO: 26727 - RNA, 21 nt, RNAi
uucuuuacuuuccgguucacu

SEQ ID NO: 26728 - DNA, 21 bp, homo sapiens
aaatgaaaggccaagtgaata

SEQ ID NO: 26729 - RNA, 21 nt, RNAi
augaaaggccaagugaauauu

SEQ ID NO: 26730 - RNA, 21 nt, RNAi
uuuacuuuccgguucacuuau

SEQ ID NO: 26731 - DNA, 21 bp, homo sapiens
aatgaaaggccaagtgaataa

SEQ ID NO: 26732 - RNA, 21 nt, RNAi
ugaaaggccaagugaauaauu

SEQ ID NO: 26733 - RNA, 21 nt, RNAi
uuacuuuccgguucacuuauu

SEQ ID NO: 26734 - DNA, 21 bp, homo sapiens
aaaggccaagtgaataagttt

SEQ ID NO: 26735 - RNA, 21 nt, RNAi
aggccaagugaauaaguuuuu

SEQ ID NO: 26736 - RNA, 21 nt, RNAi
uuuccgguucacuuauucaaa

SEQ ID NO: 26737 - DNA, 21 bp, homo sapiens
aaggccaagtgaataagtttc

SEQ ID NO: 26738 - RNA, 21 nt, RNAi
ggccaagugaauaaguuucuu

SEQ ID NO: 26739 - RNA, 21 nt, RNAi
uuccgguucacuuauucaaag

SEQ ID NO: 26740 - DNA, 21 bp, homo sapiens
aagtttcaagaactccaactc

SEQ ID NO: 26741 - RNA, 21 nt, RNAi
guuucaagaacuccaacucuu

SEQ ID NO: 26742 - RNA, 21 nt, RNAi
uucaaaguucuugagguugag

SEQ ID NO: 26743 - DNA, 21 bp, homo sapiens
aagaactccaactccaactgg

SEQ ID NO: 26744 - RNA, 21 nt, RNAi
gaacuccaacuccaacugguu

SEQ ID NO: 26745 - RNA, 21 nt, RNAi
uucuugagguugagguugacc

SEQ ID NO: 26746 - DNA, 21 bp, homo sapiens
aactccaactccaactggaga

SEQ ID NO: 26747 - RNA, 21 nt, RNAi
cuccaacuccaacuggagauu

SEQ ID NO: 26748 - RNA, 21 nt, RNAi
uugagguugagguugaccucu

SEQ ID NO: 26749 - DNA, 21 bp, homo sapiens
aactccaactggagaaagcaa

SEQ ID NO: 26750 - RNA, 21 nt, RNAi
cuccaacuggagaaagcaauu

SEQ ID NO: 26751 - RNA, 21 nt, RNAi
uugagguugaccucuuucguu

SEQ ID NO: 26752 - DNA, 21 bp, homo sapiens
aactagtgagaacaacagcac

SEQ ID NO: 26753 - RNA, 21 nt, RNAi
cuagugagaacaacagcacuu

SEQ ID NO: 26754 - RNA, 21 nt, RNAi
uugaucacucuuguugucgug

SEQ ID NO: 26755 - DNA, 21 bp, homo sapiens
aacaacagcacaatacgacca

SEQ ID NO: 26756 - RNA, 21 nt, RNAi
caacagcacaauacgaccauu

SEQ ID NO: 26757 - RNA, 21 nt, RNAi
uuguugucguguuaugcuggu

SEQ ID NO: 26758 - DNA, 21 bp, homo sapiens
aacagcacaatacgaccaggc

SEQ ID NO: 26759 - RNA, 21 nt, RNAi
cagcacaauacgaccaggcuu

SEQ ID NO: 26760 - RNA, 21 nt, RNAi
uugucguguuaugcugguccg

SEQ ID NO: 26761 - DNA, 21 bp, homo sapiens
aatacgaccaggcgtcaacca

SEQ ID NO: 26762 - RNA, 21 nt, RNAi
uacgaccaggcgucaaccauu

SEQ ID NO: 26763 - RNA, 21 nt, RNAi
uuaugcugguccgcaguuggu

SEQ ID NO: 26764 - DNA, 21 bp, homo sapiens
aaccaagtatactgcattgga

SEQ ID NO: 26765 - RNA, 21 nt, RNAi
ccaaguauacugcauuggauu

SEQ ID NO: 26766 - RNA, 21 nt, RNAi
uugguucauaugacguaaccu

SEQ ID NO: 26767 - DNA, 21 bp, homo sapiens
aagtatactgcattggaacaa

SEQ ID NO: 26768 - RNA, 21 nt, RNAi
guauacugcauuggaacaauu

SEQ ID NO: 26769 - RNA, 21 nt, RNAi
uucauaugacguaaccuuguu

SEQ ID NO: 26770 - DNA, 21 bp, homo sapiens
aaattgacggaagatttgagt

SEQ ID NO: 26771 - RNA, 21 nt, RNAi
auugacggaagauuugaguuu

SEQ ID NO: 26772 - RNA, 21 nt, RNAi
uuuaacugccuucuaaacuca

SEQ ID NO: 26773 - DNA, 21 bp, homo sapiens
aattgacggaagatttgagtt

SEQ ID NO: 26774 - RNA, 21 nt, RNAi
uugacggaagauuugaguuuu

SEQ ID NO: 26775 - RNA, 21 nt, RNAi
uuaacugccuucuaaacucaa

SEQ ID NO: 26776 - DNA, 21 bp, homo sapiens
aagatttgagttgtcagcgac

SEQ ID NO: 26777 - RNA, 21 nt, RNAi
gauuugaguugucagcgacuu

SEQ ID NO: 26778 - RNA, 21 nt, RNAi
uucuaaacucaacagucgcug

SEQ ID NO: 26779 - DNA, 21 bp, homo sapiens
aaatgcagaaagtgccagatg

SEQ ID NO: 26780 - RNA, 21 nt, RNAi
augcagaaagugccagauguu

SEQ ID NO: 26781 - RNA, 21 nt, RNAi
uuuacgucuuucacggucuac

SEQ ID NO: 26782 - DNA, 21 bp, homo sapiens
aatgcagaaagtgccagatgt

SEQ ID NO: 26783 - RNA, 21 nt, RNAi
ugcagaaagugccagauguuu

SEQ ID NO: 26784 - RNA, 21 nt, RNAi
uuacgucuuucacggucuaca

SEQ ID NO: 26785 - DNA, 21 bp, homo sapiens
aaagtgccagatgttctctgg

SEQ ID NO: 26786 - RNA, 21 nt, RNAi
agugccagauguucucugguu

SEQ ID NO: 26787 - RNA, 21 nt, RNAi
uuucacggucuacaagagacc

SEQ ID NO: 26788 - DNA, 21 bp, homo sapiens
aagtgccagatgttctctgga

SEQ ID NO: 26789 - RNA, 21 nt, RNAi
gugccagauguucucuggauu

SEQ ID NO: 26790 - RNA, 21 nt, RNAi
uucacggucuacaagagaccu

SEQ ID NO: 26791 - DNA, 21 bp, homo sapiens
aaaggagtttcaagaggagct

SEQ ID NO: 26792 - RNA, 21 nt, RNAi
aggaguuucaagaggagcuuu

SEQ ID NO: 26793 - RNA, 21 nt, RNAi
uuuccucaaaguucuccucga

SEQ ID NO: 26794 - DNA, 21 bp, homo sapiens
aaggagtttcaagaggagctc

SEQ ID NO: 26795 - RNA, 21 nt, RNAi
ggaguuucaagaggagcucuu

SEQ ID NO: 26796 - RNA, 21 nt, RNAi
uuccucaaaguucuccucgag

SEQ ID NO: 26797 - DNA, 21 bp, homo sapiens
aacagcgttctttccaaacac

SEQ ID NO: 26798 - RNA, 21 nt, RNAi
cagcguucuuuccaaacacuu

SEQ ID NO: 26799 - RNA, 21 nt, RNAi
uugucgcaagaaagguuugug

SEQ ID NO: 26800 - DNA, 21 bp, homo sapiens
aaacactggaccaggagtgca

SEQ ID NO: 26801 - RNA, 21 nt, RNAi
acacuggaccaggagugcauu

SEQ ID NO: 26802 - RNA, 21 nt, RNAi
uuugugaccugguccucacgu

SEQ ID NO: 26803 - DNA, 21 bp, homo sapiens
aacactggaccaggagtgcat

SEQ ID NO: 26804 - RNA, 21 nt, RNAi
cacuggaccaggagugcauuu

SEQ ID NO: 26805 - RNA, 21 nt, RNAi
uugugaccugguccucacgua

SEQ ID NO: 26806 - DNA, 21 bp, homo sapiens
aagccaagaatatgcacaacg

SEQ ID NO: 26807 - RNA, 21 nt, RNAi
gccaagaauaugcacaacguu

SEQ ID NO: 26808 - RNA, 21 nt, RNAi
uucgguucuuauacguguugc

SEQ ID NO: 26809 - DNA, 21 bp, homo sapiens
aagaatatgcacaacgtcctg

SEQ ID NO: 26810 - RNA, 21 nt, RNAi
gaauaugcacaacguccuguu

SEQ ID NO: 26811 - RNA, 21 nt, RNAi
uucuuauacguguugcaggac

SEQ ID NO: 26812 - DNA, 21 bp, homo sapiens
aatatgcacaacgtcctgcag

SEQ ID NO: 26813 - RNA, 21 nt, RNAi
uaugcacaacguccugcaguu

SEQ ID NO: 26814 - RNA, 21 nt, RNAi
uuauacguguugcaggacguc

SEQ ID NO: 26815 - DNA, 21 bp, homo sapiens
aacgtcctgcaggctgaactg

SEQ ID NO: 26816 - RNA, 21 nt, RNAi
cguccugcaggcugaacuguu

SEQ ID NO: 26817 - RNA, 21 nt, RNAi
uugcaggacguccgacuugac

SEQ ID NO: 26818 - DNA, 21 bp, homo sapiens
aactggataaactcacatcag

SEQ ID NO: 26819 - RNA, 21 nt, RNAi
cuggauaaacucacaucaguu

SEQ ID NO: 26820 - RNA, 21 nt, RNAi
uugaccuauuugaguguaguc

SEQ ID NO: 26821 - DNA, 21 bp, homo sapiens
aaactcacatcagtaaagcaa

SEQ ID NO: 26822 - RNA, 21 nt, RNAi
acucacaucaguaaagcaauu

SEQ ID NO: 26823 - RNA, 21 nt, RNAi
uuugaguguagucauuucguu

SEQ ID NO: 26824 - DNA, 21 bp, homo sapiens
aactcacatcagtaaagcaac

SEQ ID NO: 26825 - RNA, 21 nt, RNAi
cucacaucaguaaagcaacuu

SEQ ID NO: 26826 - RNA, 21 nt, RNAi
uugaguguagucauuucguug

SEQ ID NO: 26827 - DNA, 21 bp, homo sapiens
aaagttgtgcagagctgaaca

SEQ ID NO: 26828 - RNA, 21 nt, RNAi
aguugugcagagcugaacauu

SEQ ID NO: 26829 - RNA, 21 nt, RNAi
uuucaacacgucucgacuugu

SEQ ID NO: 26830 - DNA, 21 bp, homo sapiens
aagttgtgcagagctgaacag

SEQ ID NO: 26831 - RNA, 21 nt, RNAi
guugugcagagcugaacaguu

SEQ ID NO: 26832 - RNA, 21 nt, RNAi
uucaacacgucucgacuuguc

SEQ ID NO: 26833 - DNA, 21 bp, homo sapiens
aacaggcgttccaggcgagtc

SEQ ID NO: 26834 - RNA, 21 nt, RNAi
caggcguuccaggcgagucuu

SEQ ID NO: 26835 - RNA, 21 nt, RNAi
uuguccgcaagguccgcucag

SEQ ID NO: 26836 - DNA, 21 bp, homo sapiens
aaggagaatgagctgaggaga

SEQ ID NO: 26837 - RNA, 21 nt, RNAi
ggagaaugagcugaggagauu

SEQ ID NO: 26838 - RNA, 21 nt, RNAi
uuccucuuacucgacuccucu

SEQ ID NO: 26839 - DNA, 21 bp, homo sapiens
aatgagctgaggagaagcatg

SEQ ID NO: 26840 - RNA, 21 nt, RNAi
ugagcugaggagaagcauguu

SEQ ID NO: 26841 - RNA, 21 nt, RNAi
uuacucgacuccucuucguac

SEQ ID NO: 26842 - DNA, 21 bp, homo sapiens
aagcatggaggaaatgaagaa

SEQ ID NO: 26843 - RNA, 21 nt, RNAi
gcauggaggaaaugaagaauu

SEQ ID NO: 26844 - RNA, 21 nt, RNAi
uucguaccuccuuuacuucuu

SEQ ID NO: 26845 - DNA, 21 bp, homo sapiens
aaacaacctccttaagagtca

SEQ ID NO: 26846 - RNA, 21 nt, RNAi
acaaccuccuuaagagucauu

SEQ ID NO: 26847 - RNA, 21 nt, RNAi
uuuguuggaggaauucucagu

SEQ ID NO: 26848 - DNA, 21 bp, homo sapiens
aacaacctccttaagagtcac

SEQ ID NO: 26849 - RNA, 21 nt, RNAi
caaccuccuuaagagucacuu

SEQ ID NO: 26850 - RNA, 21 nt, RNAi
uuguuggaggaauucucagug

SEQ ID NO: 26851 - DNA, 21 bp, homo sapiens
aacctccttaagagtcactct

SEQ ID NO: 26852 - RNA, 21 nt, RNAi
ccuccuuaagagucacucuuu

SEQ ID NO: 26853 - RNA, 21 nt, RNAi
uuggaggaauucucagugaga

SEQ ID NO: 26854 - DNA, 21 bp, homo sapiens
aaaggccagagaagtctgcca

SEQ ID NO: 26855 - RNA, 21 nt, RNAi
aggccagagaagucugccauu

SEQ ID NO: 26856 - RNA, 21 nt, RNAi
uuuccggucucuucagacggu

SEQ ID NO: 26857 - DNA, 21 bp, homo sapiens
aaggccagagaagtctgccac

SEQ ID NO: 26858 - RNA, 21 nt, RNAi
ggccagagaagucugccacuu

SEQ ID NO: 26859 - RNA, 21 nt, RNAi
uuccggucucuucagacggug

SEQ ID NO: 26860 - DNA, 21 bp, homo sapiens
aagtctgccacctggaggcag

SEQ ID NO: 26861 - RNA, 21 nt, RNAi
gucugccaccuggaggcaguu

SEQ ID NO: 26862 - RNA, 21 nt, RNAi
uucagacgguggaccuccguc

SEQ ID NO: 26863 - DNA, 21 bp, homo sapiens
aactcaagaacatcaaacagt

SEQ ID NO: 26864 - RNA, 21 nt, RNAi
cucaagaacaucaaacaguuu

SEQ ID NO: 26865 - RNA, 21 nt, RNAi
uugaguucuuguaguuuguca

SEQ ID NO: 26866 - DNA, 21 bp, homo sapiens
aaacagtgtttaaatcagagc

SEQ ID NO: 26867 - RNA, 21 nt, RNAi
acaguguuuaaaucagagcuu

SEQ ID NO: 26868 - RNA, 21 nt, RNAi
uuugucacaaauuuagucucg

SEQ ID NO: 26869 - DNA, 21 bp, homo sapiens
aacagtgtttaaatcagagcc

SEQ ID NO: 26870 - RNA, 21 nt, RNAi
caguguuuaaaucagagccuu

SEQ ID NO: 26871 - RNA, 21 nt, RNAi
uugucacaaauuuagucucgg

SEQ ID NO: 26872 - DNA, 21 bp, homo sapiens
aaatgaaagcgaagaatacct

SEQ ID NO: 26873 - RNA, 21 nt, RNAi
augaaagcgaagaauaccuuu

SEQ ID NO: 26874 - RNA, 21 nt, RNAi
uuuacuuucgcuucuuaugga

SEQ ID NO: 26875 - DNA, 21 bp, homo sapiens
aatgaaagcgaagaatacctc

SEQ ID NO: 26876 - RNA, 21 nt, RNAi
ugaaagcgaagaauaccucuu

SEQ ID NO: 26877 - RNA, 21 nt, RNAi
uuacuuucgcuucuuauggag

SEQ ID NO: 26878 - DNA, 21 bp, homo sapiens
aaagcgaagaatacctctcag

SEQ ID NO: 26879 - RNA, 21 nt, RNAi
agcgaagaauaccucucaguu

SEQ ID NO: 26880 - RNA, 21 nt, RNAi
uuucgcuucuuauggagaguc

SEQ ID NO: 26881 - DNA, 21 bp, homo sapiens
aagcgaagaatacctctcagg

SEQ ID NO: 26882 - RNA, 21 nt, RNAi
gcgaagaauaccucucagguu

SEQ ID NO: 26883 - RNA, 21 nt, RNAi
uucgcuucuuauggagagucc

SEQ ID NO: 26884 - DNA, 21 bp, homo sapiens
aagaatacctctcaggaaacc

SEQ ID NO: 26885 - RNA, 21 nt, RNAi
gaauaccucucaggaaaccuu

SEQ ID NO: 26886 - RNA, 21 nt, RNAi
uucuuauggagaguccuuugg

SEQ ID NO: 26887 - DNA, 21 bp, homo sapiens
aatacctctcaggaaaccatg

SEQ ID NO: 26888 - RNA, 21 nt, RNAi
uaccucucaggaaaccauguu

SEQ ID NO: 26889 - RNA, 21 nt, RNAi
uuauggagaguccuuugguac

SEQ ID NO: 26890 - DNA, 21 bp, homo sapiens
aaaccatgttaagagatcttc

SEQ ID NO: 26891 - RNA, 21 nt, RNAi
accauguuaagagaucuucuu

SEQ ID NO: 26892 - RNA, 21 nt, RNAi
uuugguacaauucucuagaag

SEQ ID NO: 26893 - DNA, 21 bp, homo sapiens
aaccatgttaagagatcttca

SEQ ID NO: 26894 - RNA, 21 nt, RNAi
ccauguuaagagaucuucauu

SEQ ID NO: 26895 - RNA, 21 nt, RNAi
uugguacaauucucuagaagu

SEQ ID NO: 26896 - DNA, 21 bp, homo sapiens
aaactgaagcttgctgtggct

SEQ ID NO: 26897 - RNA, 21 nt, RNAi
acugaagcuugcuguggcuuu

SEQ ID NO: 26898 - RNA, 21 nt, RNAi
uuugacuucgaacgacaccga

SEQ ID NO: 26899 - DNA, 21 bp, homo sapiens
aactgaagcttgctgtggctg

SEQ ID NO: 26900 - RNA, 21 nt, RNAi
cugaagcuugcuguggcuguu

SEQ ID NO: 26901 - RNA, 21 nt, RNAi
uugacuucgaacgacaccgac

SEQ ID NO: 26902 - DNA, 21 bp, homo sapiens
aagcttgctgtggctgatctg

SEQ ID NO: 26903 - RNA, 21 nt, RNAi
gcuugcuguggcugaucuguu

SEQ ID NO: 26904 - RNA, 21 nt, RNAi
uucgaacgacaccgacuagac

SEQ ID NO: 26905 - DNA, 21 bp, homo sapiens
aaagcagcgagattgttctca

SEQ ID NO: 26906 - RNA, 21 nt, RNAi
agcagcgagauuguucucauu

SEQ ID NO: 26907 - RNA, 21 nt, RNAi
uuucgucgcucuaacaagagu

SEQ ID NO: 26908 - DNA, 21 bp, homo sapiens
aagcagcgagattgttctcaa

SEQ ID NO: 26909 - RNA, 21 nt, RNAi
gcagcgagauuguucucaauu

SEQ ID NO: 26910 - RNA, 21 nt, RNAi
uucgucgcucuaacaagaguu

SEQ ID NO: 26911 - DNA, 21 bp, homo sapiens
aaagagaacatcacattgaac

SEQ ID NO: 26912 - RNA, 21 nt, RNAi
agagaacaucacauugaacuu

SEQ ID NO: 26913 - RNA, 21 nt, RNAi
uuucucuuguaguguaacuug

SEQ ID NO: 26914 - DNA, 21 bp, homo sapiens
aagagaacatcacattgaaca

SEQ ID NO: 26915 - RNA, 21 nt, RNAi
gagaacaucacauugaacauu

SEQ ID NO: 26916 - RNA, 21 nt, RNAi
uucucuuguaguguaacuugu

SEQ ID NO: 26917 - DNA, 21 bp, homo sapiens
aagttaagcaagacagagaaa

SEQ ID NO: 26918 - RNA, 21 nt, RNAi
guuaagcaagacagagaaauu

SEQ ID NO: 26919 - RNA, 21 nt, RNAi
uucaauucguucugucucuuu

SEQ ID NO: 26920 - DNA, 21 bp, homo sapiens
aagcaagacagagaaagagtc

SEQ ID NO: 26921 - RNA, 21 nt, RNAi
gcaagacagagaaagagucuu

SEQ ID NO: 26922 - RNA, 21 nt, RNAi
uucguucugucucuuucucag

SEQ ID NO: 26923 - DNA, 21 bp, homo sapiens
aagacagagaaagagtccaaa

SEQ ID NO: 26924 - RNA, 21 nt, RNAi
gacagagaaagaguccaaauu

SEQ ID NO: 26925 - RNA, 21 nt, RNAi
uucugucucuuucucagguuu

SEQ ID NO: 26926 - DNA, 21 bp, homo sapiens
aaagagtccaaagccttgctg

SEQ ID NO: 26927 - RNA, 21 nt, RNAi
agaguccaaagccuugcuguu

SEQ ID NO: 26928 - RNA, 21 nt, RNAi
uuucucagguuucggaacgac

SEQ ID NO: 26929 - DNA, 21 bp, homo sapiens
aagagtccaaagccttgctga

SEQ ID NO: 26930 - RNA, 21 nt, RNAi
gaguccaaagccuugcugauu

SEQ ID NO: 26931 - RNA, 21 nt, RNAi
uucucagguuucggaacgacu

SEQ ID NO: 26932 - DNA, 21 bp, homo sapiens
aaagccttgctgagtgcttta

SEQ ID NO: 26933 - RNA, 21 nt, RNAi
agccuugcugagugcuuuauu

SEQ ID NO: 26934 - RNA, 21 nt, RNAi
uuucggaacgacucacgaaau

SEQ ID NO: 26935 - DNA, 21 bp, homo sapiens
aagccttgctgagtgctttag

SEQ ID NO: 26936 - RNA, 21 nt, RNAi
gccuugcugagugcuuuaguu

SEQ ID NO: 26937 - RNA, 21 nt, RNAi
uucggaacgacucacgaaauc

SEQ ID NO: 26938 - DNA, 21 bp, homo sapiens
aatcacttggaaacttgtctg

SEQ ID NO: 26939 - RNA, 21 nt, RNAi
ucacuuggaaacuugucuguu

SEQ ID NO: 26940 - RNA, 21 nt, RNAi
uuagugaaccuuugaacagac

SEQ ID NO: 26941 - DNA, 21 bp, homo sapiens
aaacttgtctgaagacacagc

SEQ ID NO: 26942 - RNA, 21 nt, RNAi
acuugucugaagacacagcuu

SEQ ID NO: 26943 - RNA, 21 nt, RNAi
uuugaacagacuucugugucg

SEQ ID NO: 26944 - DNA, 21 bp, homo sapiens
aacttgtctgaagacacagca

SEQ ID NO: 26945 - RNA, 21 nt, RNAi
cuugucugaagacacagcauu

SEQ ID NO: 26946 - RNA, 21 nt, RNAi
uugaacagacuucugugucgu

SEQ ID NO: 26947 - DNA, 21 bp, homo sapiens
aaagtcatgaatacaacgaga

SEQ ID NO: 26948 - RNA, 21 nt, RNAi
agucaugaauacaacgagauu

SEQ ID NO: 26949 - RNA, 21 nt, RNAi
uuucaguacuuauguugcucu

SEQ ID NO: 26950 - DNA, 21 bp, homo sapiens
aagtcatgaatacaacgagag

SEQ ID NO: 26951 - RNA, 21 nt, RNAi
gucaugaauacaacgagaguu

SEQ ID NO: 26952 - RNA, 21 nt, RNAi
uucaguacuuauguugcucuc

SEQ ID NO: 26953 - DNA, 21 bp, homo sapiens
aatacaacgagagagtaagaa

SEQ ID NO: 26954 - RNA, 21 nt, RNAi
uacaacgagagaguaagaauu

SEQ ID NO: 26955 - RNA, 21 nt, RNAi
uuauguugcucucucauucuu

SEQ ID NO: 26956 - DNA, 21 bp, homo sapiens
aacgagagagtaagaacgctg

SEQ ID NO: 26957 - RNA, 21 nt, RNAi
cgagagaguaagaacgcuguu

SEQ ID NO: 26958 - RNA, 21 nt, RNAi
uugcucucucauucuugcgac

SEQ ID NO: 26959 - DNA, 21 bp, homo sapiens
aagaacgctggagatggacag

SEQ ID NO: 26960 - RNA, 21 nt, RNAi
gaacgcuggagauggacaguu

SEQ ID NO: 26961 - RNA, 21 nt, RNAi
uucuugcgaccucuaccuguc

SEQ ID NO: 26962 - DNA, 21 bp, homo sapiens
aacgctggagatggacagaga

SEQ ID NO: 26963 - RNA, 21 nt, RNAi
cgcuggagauggacagagauu

SEQ ID NO: 26964 - RNA, 21 nt, RNAi
uugcgaccucuaccugucucu

SEQ ID NO: 26965 - DNA, 21 bp, homo sapiens
aaacctaagtgtcgagatcag

SEQ ID NO: 26966 - RNA, 21 nt, RNAi
accuaagugucgagaucaguu

SEQ ID NO: 26967 - RNA, 21 nt, RNAi
uuuggauucacagcucuaguc

SEQ ID NO: 26968 - DNA, 21 bp, homo sapiens
aacctaagtgtcgagatcaga

SEQ ID NO: 26969 - RNA, 21 nt, RNAi
ccuaagugucgagaucagauu

SEQ ID NO: 26970 - RNA, 21 nt, RNAi
uuggauucacagcucuagucu

SEQ ID NO: 26971 - DNA, 21 bp, homo sapiens
aagtgtcgagatcagaaacct

SEQ ID NO: 26972 - RNA, 21 nt, RNAi
gugucgagaucagaaaccuuu

SEQ ID NO: 26973 - RNA, 21 nt, RNAi
uucacagcucuagucuuugga

SEQ ID NO: 26974 - DNA, 21 bp, homo sapiens
aaaccttcacaacgtgttaga

SEQ ID NO: 26975 - RNA, 21 nt, RNAi
accuucacaacguguuagauu

SEQ ID NO: 26976 - RNA, 21 nt, RNAi
uuuggaaguguugcacaaucu

SEQ ID NO: 26977 - DNA, 21 bp, homo sapiens
aaccttcacaacgtgttagac

SEQ ID NO: 26978 - RNA, 21 nt, RNAi
ccuucacaacguguuagacuu

SEQ ID NO: 26979 - RNA, 21 nt, RNAi
uuggaaguguugcacaaucug

SEQ ID NO: 26980 - DNA, 21 bp, homo sapiens
aacgtgttagacagtaagtca

SEQ ID NO: 26981 - RNA, 21 nt, RNAi
cguguuagacaguaagucauu

SEQ ID NO: 26982 - RNA, 21 nt, RNAi
uugcacaaucugucauucagu

SEQ ID NO: 26983 - DNA, 21 bp, homo sapiens
aagtcagtggaggtagagacc

SEQ ID NO: 26984 - RNA, 21 nt, RNAi
gucaguggagguagagaccuu

SEQ ID NO: 26985 - RNA, 21 nt, RNAi
uucagucaccuccaucucugg

SEQ ID NO: 26986 - DNA, 21 bp, homo sapiens
aaactagcttatatggagcta

SEQ ID NO: 26987 - RNA, 21 nt, RNAi
acuagcuuauauggagcuauu

SEQ ID NO: 26988 - RNA, 21 nt, RNAi
uuugaucgaauauaccucgau

SEQ ID NO: 26989 - DNA, 21 bp, homo sapiens
aactagcttatatggagctac

SEQ ID NO: 26990 - RNA, 21 nt, RNAi
cuagcuuauauggagcuacuu

SEQ ID NO: 26991 - RNA, 21 nt, RNAi
uugaucgaauauaccucgaug

SEQ ID NO: 26992 - DNA, 21 bp, homo sapiens
aaagctgagttctcagatcag

SEQ ID NO: 26993 - RNA, 21 nt, RNAi
agcugaguucucagaucaguu

SEQ ID NO: 26994 - RNA, 21 nt, RNAi
uuucgacucaagagucuaguc

SEQ ID NO: 26995 - DNA, 21 bp, homo sapiens
aagctgagttctcagatcaga

SEQ ID NO: 26996 - RNA, 21 nt, RNAi
gcugaguucucagaucagauu

SEQ ID NO: 26997 - RNA, 21 nt, RNAi
uucgacucaagagucuagucu

SEQ ID NO: 26998 - DNA, 21 bp, homo sapiens
aagttgaagatctagaacaca

SEQ ID NO: 26999 - RNA, 21 nt, RNAi
guugaagaucuagaacacauu

SEQ ID NO: 27000 - RNA, 21 nt, RNAi
uucaacuucuagaucuugugu

SEQ ID NO: 27001 - DNA, 21 bp, homo sapiens
aagatctagaacacaagcttc

SEQ ID NO: 27002 - RNA, 21 nt, RNAi
gaucuagaacacaagcuucuu

SEQ ID NO: 27003 - RNA, 21 nt, RNAi
uucuagaucuuguguucgaag

SEQ ID NO: 27004 - DNA, 21 bp, homo sapiens
aacacaagcttcagttactgt

SEQ ID NO: 27005 - RNA, 21 nt, RNAi
cacaagcuucaguuacuguuu

SEQ ID NO: 27006 - RNA, 21 nt, RNAi
uuguguucgaagucaaugaca

SEQ ID NO: 27007 - DNA, 21 bp, homo sapiens
aagcttcagttactgtcaaat

SEQ ID NO: 27008 - RNA, 21 nt, RNAi
gcuucaguuacugucaaauuu

SEQ ID NO: 27009 - RNA, 21 nt, RNAi
uucgaagucaaugacaguuua

SEQ ID NO: 27010 - DNA, 21 bp, homo sapiens
aaataatggacaaagaccggt

SEQ ID NO: 27011 - RNA, 21 nt, RNAi
auaauggacaaagaccgguuu

SEQ ID NO: 27012 - RNA, 21 nt, RNAi
uuuauuaccuguuucuggcca

SEQ ID NO: 27013 - DNA, 21 bp, homo sapiens
aataatggacaaagaccggtg

SEQ ID NO: 27014 - RNA, 21 nt, RNAi
uaauggacaaagaccgguguu

SEQ ID NO: 27015 - RNA, 21 nt, RNAi
uuauuaccuguuucuggccac

SEQ ID NO: 27016 - DNA, 21 bp, homo sapiens
aatggacaaagaccggtgtta

SEQ ID NO: 27017 - RNA, 21 nt, RNAi
uggacaaagaccgguguuauu

SEQ ID NO: 27018 - RNA, 21 nt, RNAi
uuaccuguuucuggccacaau

SEQ ID NO: 27019 - DNA, 21 bp, homo sapiens
aaagaccggtgttaccaagac

SEQ ID NO: 27020 - RNA, 21 nt, RNAi
agaccgguguuaccaagacuu

SEQ ID NO: 27021 - RNA, 21 nt, RNAi
uuucuggccacaaugguucug

SEQ ID NO: 27022 - DNA, 21 bp, homo sapiens
aagaccggtgttaccaagact

SEQ ID NO: 27023 - RNA, 21 nt, RNAi
gaccgguguuaccaagacuuu

SEQ ID NO: 27024 - RNA, 21 nt, RNAi
uucuggccacaaugguucuga

SEQ ID NO: 27025 - DNA, 21 bp, homo sapiens
aagacttgcatgccgaatatg

SEQ ID NO: 27026 - RNA, 21 nt, RNAi
gacuugcaugccgaauauguu

SEQ ID NO: 27027 - RNA, 21 nt, RNAi
uucugaacguacggcuuauac

SEQ ID NO: 27028 - DNA, 21 bp, homo sapiens
aaatccaaagatgcttctctg

SEQ ID NO: 27029 - RNA, 21 nt, RNAi
auccaaagaugcuucucuguu

SEQ ID NO: 27030 - RNA, 21 nt, RNAi
uuuagguuucuacgaagagac

SEQ ID NO: 27031 - DNA, 21 bp, homo sapiens
aatccaaagatgcttctctgg

SEQ ID NO: 27032 - RNA, 21 nt, RNAi
uccaaagaugcuucucugguu

SEQ ID NO: 27033 - RNA, 21 nt, RNAi
uuagguuucuacgaagagacc

SEQ ID NO: 27034 - DNA, 21 bp, homo sapiens
aaagatgcttctctggtgaca

SEQ ID NO: 27035 - RNA, 21 nt, RNAi
agaugcuucucuggugacauu

SEQ ID NO: 27036 - RNA, 21 nt, RNAi
uuucuacgaagagaccacugu

SEQ ID NO: 27037 - DNA, 21 bp, homo sapiens
aagatgcttctctggtgacaa

SEQ ID NO: 27038 - RNA, 21 nt, RNAi
gaugcuucucuggugacaauu

SEQ ID NO: 27039 - RNA, 21 nt, RNAi
uucuacgaagagaccacuguu

SEQ ID NO: 27040 - DNA, 21 bp, homo sapiens
aaatgaagatcatcagagaag

SEQ ID NO: 27041 - RNA, 21 nt, RNAi
augaagaucaucagagaaguu

SEQ ID NO: 27042 - RNA, 21 nt, RNAi
uuuacuucuaguagucucuuc

SEQ ID NO: 27043 - DNA, 21 bp, homo sapiens
aatgaagatcatcagagaagt

SEQ ID NO: 27044 - RNA, 21 nt, RNAi
ugaagaucaucagagaaguuu

SEQ ID NO: 27045 - RNA, 21 nt, RNAi
uuacuucuaguagucucuuca

SEQ ID NO: 27046 - DNA, 21 bp, homo sapiens
aagatcatcagagaagtcttt

SEQ ID NO: 27047 - RNA, 21 nt, RNAi
gaucaucagagaagucuuuuu

SEQ ID NO: 27048 - RNA, 21 nt, RNAi
uucuaguagucucuucagaaa

SEQ ID NO: 27049 - DNA, 21 bp, homo sapiens
aattggagaacaaggaagcat

SEQ ID NO: 27050 - RNA, 21 nt, RNAi
uuggagaacaaggaagcauuu

SEQ ID NO: 27051 - RNA, 21 nt, RNAi
uuaaccucuuguuccuucgua

SEQ ID NO: 27052 - DNA, 21 bp, homo sapiens
aacaaggaagcatgccttcag

SEQ ID NO: 27053 - RNA, 21 nt, RNAi
caaggaagcaugccuucaguu

SEQ ID NO: 27054 - RNA, 21 nt, RNAi
uuguuccuucguacggaaguc

SEQ ID NO: 27055 - DNA, 21 bp, homo sapiens
aaggaagcatgccttcagaga

SEQ ID NO: 27056 - RNA, 21 nt, RNAi
ggaagcaugccuucagagauu

SEQ ID NO: 27057 - RNA, 21 nt, RNAi
uuccuucguacggaagucucu

SEQ ID NO: 27058 - DNA, 21 bp, homo sapiens
aagcatgccttcagagaggag

SEQ ID NO: 27059 - RNA, 21 nt, RNAi
gcaugccuucagagaggaguu

SEQ ID NO: 27060 - RNA, 21 nt, RNAi
uucguacggaagucucuccuc

SEQ ID NO: 27061 - DNA, 21 bp, homo sapiens
aatgtcgtttagaagcagacc

SEQ ID NO: 27062 - RNA, 21 nt, RNAi
ugucguuuagaagcagaccuu

SEQ ID NO: 27063 - RNA, 21 nt, RNAi
uuacagcaaaucuucgucugg

SEQ ID NO: 27064 - DNA, 21 bp, homo sapiens
aaacagatgaactcagacctg

SEQ ID NO: 27065 - RNA, 21 nt, RNAi
acagaugaacucagaccuguu

SEQ ID NO: 27066 - RNA, 21 nt, RNAi
uuugucuacuugagucuggac

SEQ ID NO: 27067 - DNA, 21 bp, homo sapiens
aacagatgaactcagacctgc

SEQ ID NO: 27068 - RNA, 21 nt, RNAi
cagaugaacucagaccugcuu

SEQ ID NO: 27069 - RNA, 21 nt, RNAi
uugucuacuugagucuggacg

SEQ ID NO: 27070 - DNA, 21 bp, homo sapiens
aaagcagtgtgaagagttggt

SEQ ID NO: 27071 - RNA, 21 nt, RNAi
agcagugugaagaguugguuu

SEQ ID NO: 27072 - RNA, 21 nt, RNAi
uuucgucacacuucucaacca

SEQ ID NO: 27073 - DNA, 21 bp, homo sapiens
aagcagtgtgaagagttggtg

SEQ ID NO: 27074 - RNA, 21 nt, RNAi
gcagugugaagaguugguguu

SEQ ID NO: 27075 - RNA, 21 nt, RNAi
uucgucacacuucucaaccac

SEQ ID NO: 27076 - DNA, 21 bp, homo sapiens
aagagttggtgcaaatcaaag

SEQ ID NO: 27077 - RNA, 21 nt, RNAi
gaguuggugcaaaucaaaguu

SEQ ID NO: 27078 - RNA, 21 nt, RNAi
uucucaaccacguuuaguuuc

SEQ ID NO: 27079 - DNA, 21 bp, homo sapiens
aaatctcatgaaagcagaaca

SEQ ID NO: 27080 - RNA, 21 nt, RNAi
aucucaugaaagcagaacauu

SEQ ID NO: 27081 - RNA, 21 nt, RNAi
uuuagaguacuuucgucuugu

SEQ ID NO: 27082 - DNA, 21 bp, homo sapiens
aatctcatgaaagcagaacag

SEQ ID NO: 27083 - RNA, 21 nt, RNAi
ucucaugaaagcagaacaguu

SEQ ID NO: 27084 - RNA, 21 nt, RNAi
uuagaguacuuucgucuuguc

SEQ ID NO: 27085 - DNA, 21 bp, homo sapiens
aaagcagaacagatgcatcaa

SEQ ID NO: 27086 - RNA, 21 nt, RNAi
agcagaacagaugcaucaauu

SEQ ID NO: 27087 - RNA, 21 nt, RNAi
uuucgucuugucuacguaguu

SEQ ID NO: 27088 - DNA, 21 bp, homo sapiens
aagcagaacagatgcatcaaa

SEQ ID NO: 27089 - RNA, 21 nt, RNAi
gcagaacagaugcaucaaauu

SEQ ID NO: 27090 - RNA, 21 nt, RNAi
uucgucuugucuacguaguuu

SEQ ID NO: 27091 - DNA, 21 bp, homo sapiens
aaacaagtcagcgcattagta

SEQ ID NO: 27092 - RNA, 21 nt, RNAi
acaagucagcgcauuaguauu

SEQ ID NO: 27093 - RNA, 21 nt, RNAi
uuuguucagucgcguaaucau

SEQ ID NO: 27094 - DNA, 21 bp, homo sapiens
aacaagtcagcgcattagtaa

SEQ ID NO: 27095 - RNA, 21 nt, RNAi
caagucagcgcauuaguaauu

SEQ ID NO: 27096 - RNA, 21 nt, RNAi
uuguucagucgcguaaucauu

SEQ ID NO: 27097 - DNA, 21 bp, homo sapiens
aagtcagcgcattagtaagtt

SEQ ID NO: 27098 - RNA, 21 nt, RNAi
gucagcgcauuaguaaguuuu

SEQ ID NO: 27099 - RNA, 21 nt, RNAi
uucagucgcguaaucauucaa

SEQ ID NO: 27100 - DNA, 21 bp, homo sapiens
aagttacaggaagacacttct

SEQ ID NO: 27101 - RNA, 21 nt, RNAi
guuacaggaagacacuucuuu

SEQ ID NO: 27102 - RNA, 21 nt, RNAi
uucaauguccuucugugaaga

SEQ ID NO: 27103 - DNA, 21 bp, homo sapiens
aagacacttctgctcaccaga

SEQ ID NO: 27104 - RNA, 21 nt, RNAi
gacacuucugcucaccagauu

SEQ ID NO: 27105 - RNA, 21 nt, RNAi
uucugugaagacgaguggucu

SEQ ID NO: 27106 - DNA, 21 bp, homo sapiens
aatgttgttgctgaaacctta

SEQ ID NO: 27107 - RNA, 21 nt, RNAi
uguuguugcugaaaccuuauu

SEQ ID NO: 27108 - RNA, 21 nt, RNAi
uuacaacaacgacuuuggaau

SEQ ID NO: 27109 - DNA, 21 bp, homo sapiens
aatgataaggtagaaactgag

SEQ ID NO: 27110 - RNA, 21 nt, RNAi
ugauaagguagaaacugaguu

SEQ ID NO: 27111 - RNA, 21 nt, RNAi
uuacuauuccaucuuugacuc

SEQ ID NO: 27112 - DNA, 21 bp, homo sapiens
aaggtagaaactgagcaggca

SEQ ID NO: 27113 - RNA, 21 nt, RNAi
gguagaaacugagcaggcauu

SEQ ID NO: 27114 - RNA, 21 nt, RNAi
uuccaucuuugacucguccgu

SEQ ID NO: 27115 - DNA, 21 bp, homo sapiens
aaactgagcaggcagagattc

SEQ ID NO: 27116 - RNA, 21 nt, RNAi
acugagcaggcagagauucuu

SEQ ID NO: 27117 - RNA, 21 nt, RNAi
uuugacucguccgucucuaag

SEQ ID NO: 27118 - DNA, 21 bp, homo sapiens
aactgagcaggcagagattca

SEQ ID NO: 27119 - RNA, 21 nt, RNAi
cugagcaggcagagauucauu

SEQ ID NO: 27120 - RNA, 21 nt, RNAi
uugacucguccgucucuaagu

SEQ ID NO: 27121 - DNA, 21 bp, homo sapiens
aaagagcaaccatctacttga

SEQ ID NO: 27122 - RNA, 21 nt, RNAi
agagcaaccaucuacuugauu

SEQ ID NO: 27123 - RNA, 21 nt, RNAi
uuucucguugguagaugaacu

SEQ ID NO: 27124 - DNA, 21 bp, homo sapiens
aagagcaaccatctacttgaa

SEQ ID NO: 27125 - RNA, 21 nt, RNAi
gagcaaccaucuacuugaauu

SEQ ID NO: 27126 - RNA, 21 nt, RNAi
uucucguugguagaugaacuu

SEQ ID NO: 27127 - DNA, 21 bp, homo sapiens
aaccatctacttgaagactct

SEQ ID NO: 27128 - RNA, 21 nt, RNAi
ccaucuacuugaagacucuuu

SEQ ID NO: 27129 - RNA, 21 nt, RNAi
uugguagaugaacuucugaga

SEQ ID NO: 27130 - DNA, 21 bp, homo sapiens
aagactctctaaaggagctac

SEQ ID NO: 27131 - RNA, 21 nt, RNAi
gacucucuaaaggagcuacuu

SEQ ID NO: 27132 - RNA, 21 nt, RNAi
uucugagagauuuccucgaug

SEQ ID NO: 27133 - DNA, 21 bp, homo sapiens
aagcttggagaagaaagaaat

SEQ ID NO: 27134 - RNA, 21 nt, RNAi
gcuuggagaagaaagaaauuu

SEQ ID NO: 27135 - RNA, 21 nt, RNAi
uucgaaccucuucuuucuuua

SEQ ID NO: 27136 - DNA, 21 bp, homo sapiens
aagaaagaaatgagttccatc

SEQ ID NO: 27137 - RNA, 21 nt, RNAi
gaaagaaaugaguuccaucuu

SEQ ID NO: 27138 - RNA, 21 nt, RNAi
uucuuucuuuacucaagguag

SEQ ID NO: 27139 - DNA, 21 bp, homo sapiens
aaatgagttccatcatttctc

SEQ ID NO: 27140 - RNA, 21 nt, RNAi
augaguuccaucauuucucuu

SEQ ID NO: 27141 - RNA, 21 nt, RNAi
uuuacucaagguaguaaagag

SEQ ID NO: 27142 - DNA, 21 bp, homo sapiens
aatgagttccatcatttctct

SEQ ID NO: 27143 - RNA, 21 nt, RNAi
ugaguuccaucauuucucuuu

SEQ ID NO: 27144 - RNA, 21 nt, RNAi
uuacucaagguaguaaagaga

SEQ ID NO: 27145 - DNA, 21 bp, homo sapiens
aatgcatccttaaatcaagag

SEQ ID NO: 27146 - RNA, 21 nt, RNAi
ugcauccuuaaaucaagaguu

SEQ ID NO: 27147 - RNA, 21 nt, RNAi
uuacguaggaauuuaguucuc

SEQ ID NO: 27148 - DNA, 21 bp, homo sapiens
aagagaagatgaacttaatcc

SEQ ID NO: 27149 - RNA, 21 nt, RNAi
gagaagaugaacuuaauccuu

SEQ ID NO: 27150 - RNA, 21 nt, RNAi
uucucuucuacuugaauuagg

SEQ ID NO: 27151 - DNA, 21 bp, homo sapiens
aaagcatttcagagttatctg

SEQ ID NO: 27152 - RNA, 21 nt, RNAi
agcauuucagaguuaucuguu

SEQ ID NO: 27153 - RNA, 21 nt, RNAi
uuucguaaagucucaauagac

SEQ ID NO: 27154 - DNA, 21 bp, homo sapiens
aagcatttcagagttatctga

SEQ ID NO: 27155 - RNA, 21 nt, RNAi
gcauuucagaguuaucugauu

SEQ ID NO: 27156 - RNA, 21 nt, RNAi
uucguaaagucucaauagacu

SEQ ID NO: 27157 - DNA, 21 bp, homo sapiens
aaagatgtgaagaaaccggaa

SEQ ID NO: 27158 - RNA, 21 nt, RNAi
agaugugaagaaaccggaauu

SEQ ID NO: 27159 - RNA, 21 nt, RNAi
uuucuacacuucuuuggccuu

SEQ ID NO: 27160 - DNA, 21 bp, homo sapiens
aagatgtgaagaaaccggaaa

SEQ ID NO: 27161 - RNA, 21 nt, RNAi
gaugugaagaaaccggaaauu

SEQ ID NO: 27162 - RNA, 21 nt, RNAi
uucuacacuucuuuggccuuu

SEQ ID NO: 27163 - DNA, 21 bp, homo sapiens
aagaaaccggaaatgcatatg

SEQ ID NO: 27164 - RNA, 21 nt, RNAi
gaaaccggaaaugcauauguu

SEQ ID NO: 27165 - RNA, 21 nt, RNAi
uucuuuggccuuuacguauac

SEQ ID NO: 27166 - DNA, 21 bp, homo sapiens
aaaccggaaatgcatatgagg

SEQ ID NO: 27167 - RNA, 21 nt, RNAi
accggaaaugcauaugagguu

SEQ ID NO: 27168 - RNA, 21 nt, RNAi
uuuggccuuuacguauacucc

SEQ ID NO: 27169 - DNA, 21 bp, homo sapiens
aaccggaaatgcatatgagga

SEQ ID NO: 27170 - RNA, 21 nt, RNAi
ccggaaaugcauaugaggauu

SEQ ID NO: 27171 - RNA, 21 nt, RNAi
uuggccuuuacguauacuccu

SEQ ID NO: 27172 - DNA, 21 bp, homo sapiens
aaatgcatatgaggatcttag

SEQ ID NO: 27173 - RNA, 21 nt, RNAi
augcauaugaggaucuuaguu

SEQ ID NO: 27174 - RNA, 21 nt, RNAi
uuuacguauacuccuagaauc

SEQ ID NO: 27175 - DNA, 21 bp, homo sapiens
aatgcatatgaggatcttagt

SEQ ID NO: 27176 - RNA, 21 nt, RNAi
ugcauaugaggaucuuaguuu

SEQ ID NO: 27177 - RNA, 21 nt, RNAi
uuacguauacuccuagaauca

SEQ ID NO: 27178 - DNA, 21 bp, homo sapiens
aaatacaaagcagcacaggaa

SEQ ID NO: 27179 - RNA, 21 nt, RNAi
auacaaagcagcacaggaauu

SEQ ID NO: 27180 - RNA, 21 nt, RNAi
uuuauguuucgucguguccuu

SEQ ID NO: 27181 - DNA, 21 bp, homo sapiens
aatacaaagcagcacaggaaa

SEQ ID NO: 27182 - RNA, 21 nt, RNAi
uacaaagcagcacaggaaauu

SEQ ID NO: 27183 - RNA, 21 nt, RNAi
uuauguuucgucguguccuuu

SEQ ID NO: 27184 - DNA, 21 bp, homo sapiens
aatgcttgctaaatgaatgca

SEQ ID NO: 27185 - RNA, 21 nt, RNAi
ugcuugcuaaaugaaugcauu

SEQ ID NO: 27186 - RNA, 21 nt, RNAi
uuacgaacgauuuacuuacgu

SEQ ID NO: 27187 - DNA, 21 bp, homo sapiens
aaatgaatgcactagtctttg

SEQ ID NO: 27188 - RNA, 21 nt, RNAi
augaaugcacuagucuuuguu

SEQ ID NO: 27189 - RNA, 21 nt, RNAi
uuuacuuacgugaucagaaac

SEQ ID NO: 27190 - DNA, 21 bp, homo sapiens
aatgaatgcactagtctttgt

SEQ ID NO: 27191 - RNA, 21 nt, RNAi
ugaaugcacuagucuuuguuu

SEQ ID NO: 27192 - RNA, 21 nt, RNAi
uuacuuacgugaucagaaaca

SEQ ID NO: 27193 - DNA, 21 bp, homo sapiens
aatgcactagtctttgtgaaa

SEQ ID NO: 27194 - RNA, 21 nt, RNAi
ugcacuagucuuugugaaauu

SEQ ID NO: 27195 - RNA, 21 nt, RNAi
uuacgugaucagaaacacuuu

SEQ ID NO: 27196 - DNA, 21 bp, homo sapiens
aaatgagttggaacagctaaa

SEQ ID NO: 27197 - RNA, 21 nt, RNAi
augaguuggaacagcuaaauu

SEQ ID NO: 27198 - RNA, 21 nt, RNAi
uuuacucaaccuugucgauuu

SEQ ID NO: 27199 - DNA, 21 bp, homo sapiens
aatgagttggaacagctaaag

SEQ ID NO: 27200 - RNA, 21 nt, RNAi
ugaguuggaacagcuaaaguu

SEQ ID NO: 27201 - RNA, 21 nt, RNAi
uuacucaaccuugucgauuuc

SEQ ID NO: 27202 - DNA, 21 bp, homo sapiens
aacagctaaaggaagcatttg

SEQ ID NO: 27203 - RNA, 21 nt, RNAi
cagcuaaaggaagcauuuguu

SEQ ID NO: 27204 - RNA, 21 nt, RNAi
uugucgauuuccuucguaaac

SEQ ID NO: 27205 - DNA, 21 bp, homo sapiens
aaaggaagcatttgcaaagga

SEQ ID NO: 27206 - RNA, 21 nt, RNAi
aggaagcauuugcaaaggauu

SEQ ID NO: 27207 - RNA, 21 nt, RNAi
uuuccuucguaaacguuuccu

SEQ ID NO: 27208 - DNA, 21 bp, homo sapiens
aaggaagcatttgcaaaggaa

SEQ ID NO: 27209 - RNA, 21 nt, RNAi
ggaagcauuugcaaaggaauu

SEQ ID NO: 27210 - RNA, 21 nt, RNAi
uuccuucguaaacguuuccuu

SEQ ID NO: 27211 - DNA, 21 bp, homo sapiens
aagcatttgcaaaggaacacc

SEQ ID NO: 27212 - RNA, 21 nt, RNAi
gcauuugcaaaggaacaccuu

SEQ ID NO: 27213 - RNA, 21 nt, RNAi
uucguaaacguuuccuugugg

SEQ ID NO: 27214 - DNA, 21 bp, homo sapiens
aaaggaacaccaagaattctt

SEQ ID NO: 27215 - RNA, 21 nt, RNAi
aggaacaccaagaauucuuuu

SEQ ID NO: 27216 - RNA, 21 nt, RNAi
uuuccuugugguucuuaagaa

SEQ ID NO: 27217 - DNA, 21 bp, homo sapiens
aaggaacaccaagaattctta

SEQ ID NO: 27218 - RNA, 21 nt, RNAi
ggaacaccaagaauucuuauu

SEQ ID NO: 27219 - RNA, 21 nt, RNAi
uuccuugugguucuuaagaau

SEQ ID NO: 27220 - DNA, 21 bp, homo sapiens
aaagaaatcagaatctgatgc

SEQ ID NO: 27221 - RNA, 21 nt, RNAi
agaaaucagaaucugaugcuu

SEQ ID NO: 27222 - RNA, 21 nt, RNAi
uuucuuuagucuuagacuacg

SEQ ID NO: 27223 - DNA, 21 bp, homo sapiens
aagaaatcagaatctgatgct

SEQ ID NO: 27224 - RNA, 21 nt, RNAi
gaaaucagaaucugaugcuuu

SEQ ID NO: 27225 - RNA, 21 nt, RNAi
uucuuuagucuuagacuacga

SEQ ID NO: 27226 - DNA, 21 bp, homo sapiens
aaatcagaatctgatgctaga

SEQ ID NO: 27227 - RNA, 21 nt, RNAi
aucagaaucugaugcuagauu

SEQ ID NO: 27228 - RNA, 21 nt, RNAi
uuuagucuuagacuacgaucu

SEQ ID NO: 27229 - DNA, 21 bp, homo sapiens
aatcagaatctgatgctagag

SEQ ID NO: 27230 - RNA, 21 nt, RNAi
ucagaaucugaugcuagaguu

SEQ ID NO: 27231 - RNA, 21 nt, RNAi
uuagucuuagacuacgaucuc

SEQ ID NO: 27232 - DNA, 21 bp, homo sapiens
aatctgatgctagagttggag

SEQ ID NO: 27233 - RNA, 21 nt, RNAi
ucugaugcuagaguuggaguu

SEQ ID NO: 27234 - RNA, 21 nt, RNAi
uuagacuacgaucucaaccuc

SEQ ID NO: 27235 - DNA, 21 bp, homo sapiens
aagctctgagatctgagatga

SEQ ID NO: 27236 - RNA, 21 nt, RNAi
gcucugagaucugagaugauu

SEQ ID NO: 27237 - RNA, 21 nt, RNAi
uucgagacucuagacucuacu

SEQ ID NO: 27238 - DNA, 21 bp, homo sapiens
aaacaattctaagagcgaggc

SEQ ID NO: 27239 - RNA, 21 nt, RNAi
acaauucuaagagcgaggcuu

SEQ ID NO: 27240 - RNA, 21 nt, RNAi
uuuguuaagauucucgcuccg

SEQ ID NO: 27241 - DNA, 21 bp, homo sapiens
aacaattctaagagcgaggct

SEQ ID NO: 27242 - RNA, 21 nt, RNAi
caauucuaagagcgaggcuuu

SEQ ID NO: 27243 - RNA, 21 nt, RNAi
uuguuaagauucucgcuccga

SEQ ID NO: 27244 - DNA, 21 bp, homo sapiens
aattctaagagcgaggctggt

SEQ ID NO: 27245 - RNA, 21 nt, RNAi
uucuaagagcgaggcugguuu

SEQ ID NO: 27246 - RNA, 21 nt, RNAi
uuaagauucucgcuccgacca

SEQ ID NO: 27247 - DNA, 21 bp, homo sapiens
aagagcgaggctggtggttta

SEQ ID NO: 27248 - RNA, 21 nt, RNAi
gagcgaggcuggugguuuauu

SEQ ID NO: 27249 - RNA, 21 nt, RNAi
uucucgcuccgaccaccaaau

SEQ ID NO: 27250 - DNA, 21 bp, homo sapiens
aagagaatgaacagctgatga

SEQ ID NO: 27251 - RNA, 21 nt, RNAi
gagaaugaacagcugaugauu

SEQ ID NO: 27252 - RNA, 21 nt, RNAi
uucucuuacuugucgacuacu

SEQ ID NO: 27253 - DNA, 21 bp, homo sapiens
aatgaacagctgatgaaggta

SEQ ID NO: 27254 - RNA, 21 nt, RNAi
ugaacagcugaugaagguauu

SEQ ID NO: 27255 - RNA, 21 nt, RNAi
uuacuugucgacuacuuccau

SEQ ID NO: 27256 - DNA, 21 bp, homo sapiens
aacagctgatgaaggtaatga

SEQ ID NO: 27257 - RNA, 21 nt, RNAi
cagcugaugaagguaaugauu

SEQ ID NO: 27258 - RNA, 21 nt, RNAi
uugucgacuacuuccauuacu

SEQ ID NO: 27259 - DNA, 21 bp, homo sapiens
aatcagaaccaattaggaact

SEQ ID NO: 27260 - RNA, 21 nt, RNAi
ucagaaccaauuaggaacuuu

SEQ ID NO: 27261 - RNA, 21 nt, RNAi
uuagucuugguuaauccuuga

SEQ ID NO: 27262 - DNA, 21 bp, homo sapiens
aaccaattaggaactctgtga

SEQ ID NO: 27263 - RNA, 21 nt, RNAi
ccaauuaggaacucugugauu

SEQ ID NO: 27264 - RNA, 21 nt, RNAi
uugguuaauccuugagacacu

SEQ ID NO: 27265 - DNA, 21 bp, homo sapiens
aattaggaactctgtgaaaga

SEQ ID NO: 27266 - RNA, 21 nt, RNAi
uuaggaacucugugaaagauu

SEQ ID NO: 27267 - RNA, 21 nt, RNAi
uuaauccuugagacacuuucu

SEQ ID NO: 27268 - DNA, 21 bp, homo sapiens
aactctgtgaaagaaagagag

SEQ ID NO: 27269 - RNA, 21 nt, RNAi
cucugugaaagaaagagaguu

SEQ ID NO: 27270 - RNA, 21 nt, RNAi
uugagacacuuucuuucucuc

SEQ ID NO: 27271 - DNA, 21 bp, homo sapiens
aaagaaagagagagtgagaga

SEQ ID NO: 27272 - RNA, 21 nt, RNAi
agaaagagagagugagagauu

SEQ ID NO: 27273 - RNA, 21 nt, RNAi
uuucuuucucucucacucucu

SEQ ID NO: 27274 - DNA, 21 bp, homo sapiens
aagaaagagagagtgagagaa

SEQ ID NO: 27275 - RNA, 21 nt, RNAi
gaaagagagagugagagaauu

SEQ ID NO: 27276 - RNA, 21 nt, RNAi
uucuuucucucucacucucuu

SEQ ID NO: 27277 - DNA, 21 bp, homo sapiens
aaagagagagtgagagaaatc

SEQ ID NO: 27278 - RNA, 21 nt, RNAi
agagagagugagagaaaucuu

SEQ ID NO: 27279 - RNA, 21 nt, RNAi
uuucucucucacucucuuuag

SEQ ID NO: 27280 - DNA, 21 bp, homo sapiens
aagagagagtgagagaaatca

SEQ ID NO: 27281 - RNA, 21 nt, RNAi
gagagagugagagaaaucauu

SEQ ID NO: 27282 - RNA, 21 nt, RNAi
uucucucucacucucuuuagu

SEQ ID NO: 27283 - DNA, 21 bp, homo sapiens
aaacctcagatggatcttgaa

SEQ ID NO: 27284 - RNA, 21 nt, RNAi
accucagauggaucuugaauu

SEQ ID NO: 27285 - RNA, 21 nt, RNAi
uuuggagucuaccuagaacuu

SEQ ID NO: 27286 - DNA, 21 bp, homo sapiens
aacctcagatggatcttgaag

SEQ ID NO: 27287 - RNA, 21 nt, RNAi
ccucagauggaucuugaaguu

SEQ ID NO: 27288 - RNA, 21 nt, RNAi
uuggagucuaccuagaacuuc

SEQ ID NO: 27289 - DNA, 21 bp, homo sapiens
aatgcgcagttggtgcaatta

SEQ ID NO: 27290 - RNA, 21 nt, RNAi
ugcgcaguuggugcaauuauu

SEQ ID NO: 27291 - RNA, 21 nt, RNAi
uuacgcgucaaccacguuaau

SEQ ID NO: 27292 - DNA, 21 bp, homo sapiens
aagctatgctaagaaataagg

SEQ ID NO: 27293 - RNA, 21 nt, RNAi
gcuaugcuaagaaauaagguu

SEQ ID NO: 27294 - RNA, 21 nt, RNAi
uucgauacgauucuuuauucc

SEQ ID NO: 27295 - DNA, 21 bp, homo sapiens
aaacttcaggaaagtgagaag

SEQ ID NO: 27296 - RNA, 21 nt, RNAi
acuucaggaaagugagaaguu

SEQ ID NO: 27297 - RNA, 21 nt, RNAi
uuugaaguccuuucacucuuc

SEQ ID NO: 27298 - DNA, 21 bp, homo sapiens
aacttcaggaaagtgagaagg

SEQ ID NO: 27299 - RNA, 21 nt, RNAi
cuucaggaaagugagaagguu

SEQ ID NO: 27300 - RNA, 21 nt, RNAi
uugaaguccuuucacucuucc

SEQ ID NO: 27301 - DNA, 21 bp, homo sapiens
aaagtgagaaggagaaggagt

SEQ ID NO: 27302 - RNA, 21 nt, RNAi
agugagaaggagaaggaguuu

SEQ ID NO: 27303 - RNA, 21 nt, RNAi
uuucacucuuccucuuccuca

SEQ ID NO: 27304 - DNA, 21 bp, homo sapiens
aagtgagaaggagaaggagtg

SEQ ID NO: 27305 - RNA, 21 nt, RNAi
gugagaaggagaaggaguguu

SEQ ID NO: 27306 - RNA, 21 nt, RNAi
uucacucuuccucuuccucac

SEQ ID NO: 27307 - DNA, 21 bp, homo sapiens
aaggagaaggagtgcctgcag

SEQ ID NO: 27308 - RNA, 21 nt, RNAi
ggagaaggagugccugcaguu

SEQ ID NO: 27309 - RNA, 21 nt, RNAi
uuccucuuccucacggacguc

SEQ ID NO: 27310 - DNA, 21 bp, homo sapiens
aaggagtgcctgcagcatgaa

SEQ ID NO: 27311 - RNA, 21 nt, RNAi
ggagugccugcagcaugaauu

SEQ ID NO: 27312 - RNA, 21 nt, RNAi
uuccucacggacgucguacuu

SEQ ID NO: 27313 - DNA, 21 bp, homo sapiens
aattacagacaattagaggag

SEQ ID NO: 27314 - RNA, 21 nt, RNAi
uuacagacaauuagaggaguu

SEQ ID NO: 27315 - RNA, 21 nt, RNAi
uuaaugucuguuaaucuccuc

SEQ ID NO: 27316 - DNA, 21 bp, homo sapiens
aattagaggagatcttgaaac

SEQ ID NO: 27317 - RNA, 21 nt, RNAi
uuagaggagaucuugaaacuu

SEQ ID NO: 27318 - RNA, 21 nt, RNAi
uuaaucuccucuagaacuuug

SEQ ID NO: 27319 - DNA, 21 bp, homo sapiens
aaaccagcaatttgcaagaca

SEQ ID NO: 27320 - RNA, 21 nt, RNAi
accagcaauuugcaagacauu

SEQ ID NO: 27321 - RNA, 21 nt, RNAi
uuuggucguuaaacguucugu

SEQ ID NO: 27322 - DNA, 21 bp, homo sapiens
aaccagcaatttgcaagacat

SEQ ID NO: 27323 - RNA, 21 nt, RNAi
ccagcaauuugcaagacauuu

SEQ ID NO: 27324 - RNA, 21 nt, RNAi
uuggucguuaaacguucugua

SEQ ID NO: 27325 - DNA, 21 bp, homo sapiens
aatttgcaagacatgcagtca

SEQ ID NO: 27326 - RNA, 21 nt, RNAi
uuugcaagacaugcagucauu

SEQ ID NO: 27327 - RNA, 21 nt, RNAi
uuaaacguucuguacgucagu

SEQ ID NO: 27328 - DNA, 21 bp, homo sapiens
aagacatgcagtcacaagaaa

SEQ ID NO: 27329 - RNA, 21 nt, RNAi
gacaugcagucacaagaaauu

SEQ ID NO: 27330 - RNA, 21 nt, RNAi
uucuguacgucaguguucuuu

SEQ ID NO: 27331 - DNA, 21 bp, homo sapiens
aagaaattagtggccttaaag

SEQ ID NO: 27332 - RNA, 21 nt, RNAi
gaaauuaguggccuuaaaguu

SEQ ID NO: 27333 - RNA, 21 nt, RNAi
uucuuuaaucaccggaauuuc

SEQ ID NO: 27334 - DNA, 21 bp, homo sapiens
aaattagtggccttaaagact

SEQ ID NO: 27335 - RNA, 21 nt, RNAi
auuaguggccuuaaagacuuu

SEQ ID NO: 27336 - RNA, 21 nt, RNAi
uuuaaucaccggaauuucuga

SEQ ID NO: 27337 - DNA, 21 bp, homo sapiens
aattagtggccttaaagactg

SEQ ID NO: 27338 - RNA, 21 nt, RNAi
uuaguggccuuaaagacuguu

SEQ ID NO: 27339 - RNA, 21 nt, RNAi
uuaaucaccggaauuucugac

SEQ ID NO: 27340 - DNA, 21 bp, homo sapiens
aaagactgtgaaatagatgcg

SEQ ID NO: 27341 - RNA, 21 nt, RNAi
agacugugaaauagaugcguu

SEQ ID NO: 27342 - RNA, 21 nt, RNAi
uuucugacacuuuaucuacgc

SEQ ID NO: 27343 - DNA, 21 bp, homo sapiens
aagactgtgaaatagatgcgg

SEQ ID NO: 27344 - RNA, 21 nt, RNAi
gacugugaaauagaugcgguu

SEQ ID NO: 27345 - RNA, 21 nt, RNAi
uucugacacuuuaucuacgcc

SEQ ID NO: 27346 - DNA, 21 bp, homo sapiens
aaacgacaatgcacaccttca

SEQ ID NO: 27347 - RNA, 21 nt, RNAi
acgacaaugcacaccuucauu

SEQ ID NO: 27348 - RNA, 21 nt, RNAi
uuugcuguuacguguggaagu

SEQ ID NO: 27349 - DNA, 21 bp, homo sapiens
aacgacaatgcacaccttcag

SEQ ID NO: 27350 - RNA, 21 nt, RNAi
cgacaaugcacaccuucaguu

SEQ ID NO: 27351 - RNA, 21 nt, RNAi
uugcuguuacguguggaaguc

SEQ ID NO: 27352 - DNA, 21 bp, homo sapiens
aatgcacaccttcagtgctct

SEQ ID NO: 27353 - RNA, 21 nt, RNAi
ugcacaccuucagugcucuuu

SEQ ID NO: 27354 - RNA, 21 nt, RNAi
uuacguguggaagucacgaga

SEQ ID NO: 27355 - DNA, 21 bp, homo sapiens
aaacaacaatgaacaagctga

SEQ ID NO: 27356 - RNA, 21 nt, RNAi
acaacaaugaacaagcugauu

SEQ ID NO: 27357 - RNA, 21 nt, RNAi
uuuguuguuacuuguucgacu

SEQ ID NO: 27358 - DNA, 21 bp, homo sapiens
aacaacaatgaacaagctgaa

SEQ ID NO: 27359 - RNA, 21 nt, RNAi
caacaaugaacaagcugaauu

SEQ ID NO: 27360 - RNA, 21 nt, RNAi
uuguuguuacuuguucgacuu

SEQ ID NO: 27361 - DNA, 21 bp, homo sapiens
aacaatgaacaagctgaatga

SEQ ID NO: 27362 - RNA, 21 nt, RNAi
caaugaacaagcugaaugauu

SEQ ID NO: 27363 - RNA, 21 nt, RNAi
uuguuacuuguucgacuuacu

SEQ ID NO: 27364 - DNA, 21 bp, homo sapiens
aatgaacaagctgaatgagct

SEQ ID NO: 27365 - RNA, 21 nt, RNAi
ugaacaagcugaaugagcuuu

SEQ ID NO: 27366 - RNA, 21 nt, RNAi
uuacuuguucgacuuacucga

SEQ ID NO: 27367 - DNA, 21 bp, homo sapiens
aacaagctgaatgagctagag

SEQ ID NO: 27368 - RNA, 21 nt, RNAi
caagcugaaugagcuagaguu

SEQ ID NO: 27369 - RNA, 21 nt, RNAi
uuguucgacuuacucgaucuc

SEQ ID NO: 27370 - DNA, 21 bp, homo sapiens
aagctgaatgagctagagaaa

SEQ ID NO: 27371 - RNA, 21 nt, RNAi
gcugaaugagcuagagaaauu

SEQ ID NO: 27372 - RNA, 21 nt, RNAi
uucgacuuacucgaucucuuu

SEQ ID NO: 27373 - DNA, 21 bp, homo sapiens
aaatatgtgaaatactgcagg

SEQ ID NO: 27374 - RNA, 21 nt, RNAi
auaugugaaauacugcagguu

SEQ ID NO: 27375 - RNA, 21 nt, RNAi
uuuauacacuuuaugacgucc

SEQ ID NO: 27376 - DNA, 21 bp, homo sapiens
aatatgtgaaatactgcaggc

SEQ ID NO: 27377 - RNA, 21 nt, RNAi
uaugugaaauacugcaggcuu

SEQ ID NO: 27378 - RNA, 21 nt, RNAi
uuauacacuuuaugacguccg

SEQ ID NO: 27379 - DNA, 21 bp, homo sapiens
aaagtatgaactcgtaactga

SEQ ID NO: 27380 - RNA, 21 nt, RNAi
aguaugaacucguaacugauu

SEQ ID NO: 27381 - RNA, 21 nt, RNAi
uuucauacuugagcauugacu

SEQ ID NO: 27382 - DNA, 21 bp, homo sapiens
aagtatgaactcgtaactgag

SEQ ID NO: 27383 - RNA, 21 nt, RNAi
guaugaacucguaacugaguu

SEQ ID NO: 27384 - RNA, 21 nt, RNAi
uucauacuugagcauugacuc

SEQ ID NO: 27385 - DNA, 21 bp, homo sapiens
aactcgtaactgagctgaatg

SEQ ID NO: 27386 - RNA, 21 nt, RNAi
cucguaacugagcugaauguu

SEQ ID NO: 27387 - RNA, 21 nt, RNAi
uugagcauugacucgacuuac

SEQ ID NO: 27388 - DNA, 21 bp, homo sapiens
aactgagctgaatgattcaag

SEQ ID NO: 27389 - RNA, 21 nt, RNAi
cugagcugaaugauucaaguu

SEQ ID NO: 27390 - RNA, 21 nt, RNAi
uugacucgacuuacuaaguuc

SEQ ID NO: 27391 - DNA, 21 bp, homo sapiens
aatgattcaaggtcagaatgt

SEQ ID NO: 27392 - RNA, 21 nt, RNAi
ugauucaaggucagaauguuu

SEQ ID NO: 27393 - RNA, 21 nt, RNAi
uuacuaaguuccagucuuaca

SEQ ID NO: 27394 - DNA, 21 bp, homo sapiens
aaggtcagaatgtatcacagc

SEQ ID NO: 27395 - RNA, 21 nt, RNAi
ggucagaauguaucacagcuu

SEQ ID NO: 27396 - RNA, 21 nt, RNAi
uuccagucuuacauagugucg

SEQ ID NO: 27397 - DNA, 21 bp, homo sapiens
aatgtatcacagcaactagga

SEQ ID NO: 27398 - RNA, 21 nt, RNAi
uguaucacagcaacuaggauu

SEQ ID NO: 27399 - RNA, 21 nt, RNAi
uuacauagugucguugauccu

SEQ ID NO: 27400 - DNA, 21 bp, homo sapiens
aaatgatgacagtggtcttct

SEQ ID NO: 27401 - RNA, 21 nt, RNAi
augaugacaguggucuucuuu

SEQ ID NO: 27402 - RNA, 21 nt, RNAi
uuuacuacugucaccagaaga

SEQ ID NO: 27403 - DNA, 21 bp, homo sapiens
aatgatgacagtggtcttctc

SEQ ID NO: 27404 - RNA, 21 nt, RNAi
ugaugacaguggucuucucuu

SEQ ID NO: 27405 - RNA, 21 nt, RNAi
uuacuacugucaccagaagag

SEQ ID NO: 27406 - DNA, 21 bp, homo sapiens
aagacataccaggaggtgaat

SEQ ID NO: 27407 - RNA, 21 nt, RNAi
gacauaccaggaggugaauuu

SEQ ID NO: 27408 - RNA, 21 nt, RNAi
uucuguaugguccuccacuua

SEQ ID NO: 27409 - DNA, 21 bp, homo sapiens
aatttggtgaacaaccaaatg

SEQ ID NO: 27410 - RNA, 21 nt, RNAi
uuuggugaacaaccaaauguu

SEQ ID NO: 27411 - RNA, 21 nt, RNAi
uuaaaccacuuguugguuuac

SEQ ID NO: 27412 - DNA, 21 bp, homo sapiens
aacaaccaaatgaacagcacc

SEQ ID NO: 27413 - RNA, 21 nt, RNAi
caaccaaaugaacagcaccuu

SEQ ID NO: 27414 - RNA, 21 nt, RNAi
uuguugguuuacuugucgugg

SEQ ID NO: 27415 - DNA, 21 bp, homo sapiens
aattcctacgagcacttgaca

SEQ ID NO: 27416 - RNA, 21 nt, RNAi
uuccuacgagcacuugacauu

SEQ ID NO: 27417 - RNA, 21 nt, RNAi
uuaaggaugcucgugaacugu

SEQ ID NO: 27418 - DNA, 21 bp, homo sapiens
aagaagttcaaatgcactttg

SEQ ID NO: 27419 - RNA, 21 nt, RNAi
gaaguucaaaugcacuuuguu

SEQ ID NO: 27420 - RNA, 21 nt, RNAi
uucuucaaguuuacgugaaac

SEQ ID NO: 27421 - DNA, 21 bp, homo sapiens
aagttcaaatgcactttgccg

SEQ ID NO: 27422 - RNA, 21 nt, RNAi
guucaaaugcacuuugccguu

SEQ ID NO: 27423 - RNA, 21 nt, RNAi
uucaaguuuacgugaaacggc

SEQ ID NO: 27424 - DNA, 21 bp, homo sapiens
aaatgcactttgccgaattgc

SEQ ID NO: 27425 - RNA, 21 nt, RNAi
augcacuuugccgaauugcuu

SEQ ID NO: 27426 - RNA, 21 nt, RNAi
uuuacgugaaacggcuuaacg

SEQ ID NO: 27427 - DNA, 21 bp, homo sapiens
aatgcactttgccgaattgca

SEQ ID NO: 27428 - RNA, 21 nt, RNAi
ugcacuuugccgaauugcauu

SEQ ID NO: 27429 - RNA, 21 nt, RNAi
uuacgugaaacggcuuaacgu

SEQ ID NO: 27430 - DNA, 21 bp, homo sapiens
aaatgtcagagctgcagacct

SEQ ID NO: 27431 - RNA, 21 nt, RNAi
augucagagcugcagaccuuu

SEQ ID NO: 27432 - RNA, 21 nt, RNAi
uuuacagucucgacgucugga

SEQ ID NO: 27433 - DNA, 21 bp, homo sapiens
aatgtcagagctgcagaccta

SEQ ID NO: 27434 - RNA, 21 nt, RNAi
ugucagagcugcagaccuauu

SEQ ID NO: 27435 - RNA, 21 nt, RNAi
uuacagucucgacgucuggau

SEQ ID NO: 27436 - DNA, 21 bp, homo sapiens
aaatttggtcttgtcaacgaa

SEQ ID NO: 27437 - RNA, 21 nt, RNAi
auuuggucuugucaacgaauu

SEQ ID NO: 27438 - RNA, 21 nt, RNAi
uuuaaaccagaacaguugcuu

SEQ ID NO: 27439 - DNA, 21 bp, homo sapiens
aatttggtcttgtcaacgaat

SEQ ID NO: 27440 - RNA, 21 nt, RNAi
uuuggucuugucaacgaauuu

SEQ ID NO: 27441 - RNA, 21 nt, RNAi
uuaaaccagaacaguugcuua

SEQ ID NO: 27442 - DNA, 21 bp, homo sapiens
aacgaatctgagaaactttca

SEQ ID NO: 27443 - RNA, 21 nt, RNAi
cgaaucugagaaacuuucauu

SEQ ID NO: 27444 - RNA, 21 nt, RNAi
uugcuuagacucuuugaaagu

SEQ ID NO: 27445 - DNA, 21 bp, homo sapiens
aatctgagaaactttcaaggt

SEQ ID NO: 27446 - RNA, 21 nt, RNAi
ucugagaaacuuucaagguuu

SEQ ID NO: 27447 - RNA, 21 nt, RNAi
uuagacucuuugaaaguucca

SEQ ID NO: 27448 - DNA, 21 bp, homo sapiens
aaactttcaaggtgacttggt

SEQ ID NO: 27449 - RNA, 21 nt, RNAi
acuuucaaggugacuugguuu

SEQ ID NO: 27450 - RNA, 21 nt, RNAi
uuugaaaguuccacugaacca

SEQ ID NO: 27451 - DNA, 21 bp, homo sapiens
aactttcaaggtgacttggtg

SEQ ID NO: 27452 - RNA, 21 nt, RNAi
cuuucaaggugacuugguguu

SEQ ID NO: 27453 - RNA, 21 nt, RNAi
uugaaaguuccacugaaccac

SEQ ID NO: 27454 - DNA, 21 bp, homo sapiens
aaggtgacttggtgaaggaga

SEQ ID NO: 27455 - RNA, 21 nt, RNAi
ggugacuuggugaaggagauu

SEQ ID NO: 27456 - RNA, 21 nt, RNAi
uuccacugaaccacuuccucu

SEQ ID NO: 27457 - DNA, 21 bp, homo sapiens
aacagacaggagatatgtctc

SEQ ID NO: 27458 - RNA, 21 nt, RNAi
cagacaggagauaugucucuu

SEQ ID NO: 27459 - RNA, 21 nt, RNAi
uugucuguccucuauacagag

SEQ ID NO: 27460 - DNA, 21 bp, homo sapiens
aaaccagtgcagtgtagatga

SEQ ID NO: 27461 - RNA, 21 nt, RNAi
accagugcaguguagaugauu

SEQ ID NO: 27462 - RNA, 21 nt, RNAi
uuuggucacgucacaucuacu

SEQ ID NO: 27463 - DNA, 21 bp, homo sapiens
aaccagtgcagtgtagatgaa

SEQ ID NO: 27464 - RNA, 21 nt, RNAi
ccagugcaguguagaugaauu

SEQ ID NO: 27465 - RNA, 21 nt, RNAi
uuggucacgucacaucuacuu

SEQ ID NO: 27466 - DNA, 21 bp, homo sapiens
aatctgaccaggaaagaaacc

SEQ ID NO: 27467 - RNA, 21 nt, RNAi
ucugaccaggaaagaaaccuu

SEQ ID NO: 27468 - RNA, 21 nt, RNAi
uuagacugguccuuucuuugg

SEQ ID NO: 27469 - DNA, 21 bp, homo sapiens
aataaggaaattcaagagctc

SEQ ID NO: 27470 - RNA, 21 nt, RNAi
uaaggaaauucaagagcucuu

SEQ ID NO: 27471 - RNA, 21 nt, RNAi
uuauuccuuuaaguucucgag

SEQ ID NO: 27472 - DNA, 21 bp, homo sapiens
aaggaaattcaagagctcgag

SEQ ID NO: 27473 - RNA, 21 nt, RNAi
ggaaauucaagagcucgaguu

SEQ ID NO: 27474 - RNA, 21 nt, RNAi
uuccuuuaaguucucgagcuc

SEQ ID NO: 27475 - DNA, 21 bp, homo sapiens
aaattcaagagctcgagcagt

SEQ ID NO: 27476 - RNA, 21 nt, RNAi
auucaagagcucgagcaguuu

SEQ ID NO: 27477 - RNA, 21 nt, RNAi
uuuaaguucucgagcucguca

SEQ ID NO: 27478 - DNA, 21 bp, homo sapiens
aattcaagagctcgagcagtt

SEQ ID NO: 27479 - RNA, 21 nt, RNAi
uucaagagcucgagcaguuuu

SEQ ID NO: 27480 - RNA, 21 nt, RNAi
uuaaguucucgagcucgucaa

SEQ ID NO: 27481 - DNA, 21 bp, homo sapiens
aagagctcgagcagttattaa

SEQ ID NO: 27482 - RNA, 21 nt, RNAi
gagcucgagcaguuauuaauu

SEQ ID NO: 27483 - RNA, 21 nt, RNAi
uucucgagcucgucaauaauu

SEQ ID NO: 27484 - DNA, 21 bp, homo sapiens
aagttctgaaaggcaagagct

SEQ ID NO: 27485 - RNA, 21 nt, RNAi
guucugaaaggcaagagcuuu

SEQ ID NO: 27486 - RNA, 21 nt, RNAi
uucaagacuuuccguucucga

SEQ ID NO: 27487 - DNA, 21 bp, homo sapiens
aaaggcaagagcttgactgcc

SEQ ID NO: 27488 - RNA, 21 nt, RNAi
aggcaagagcuugacugccuu

SEQ ID NO: 27489 - RNA, 21 nt, RNAi
uuuccguucucgaacugacgg

SEQ ID NO: 27490 - DNA, 21 bp, homo sapiens
aaggcaagagcttgactgcct

SEQ ID NO: 27491 - RNA, 21 nt, RNAi
ggcaagagcuugacugccuuu

SEQ ID NO: 27492 - RNA, 21 nt, RNAi
uuccguucucgaacugacgga

SEQ ID NO: 27493 - DNA, 21 bp, homo sapiens
aagagcttgactgccttagga

SEQ ID NO: 27494 - RNA, 21 nt, RNAi
gagcuugacugccuuaggauu

SEQ ID NO: 27495 - RNA, 21 nt, RNAi
uucucgaacugacggaauccu

SEQ ID NO: 27496 - DNA, 21 bp, homo sapiens
aaatgaacagtggcaacagaa

SEQ ID NO: 27497 - RNA, 21 nt, RNAi
augaacaguggcaacagaauu

SEQ ID NO: 27498 - RNA, 21 nt, RNAi
uuuacuugucaccguugucuu

SEQ ID NO: 27499 - DNA, 21 bp, homo sapiens
aatgaacagtggcaacagaag

SEQ ID NO: 27500 - RNA, 21 nt, RNAi
ugaacaguggcaacagaaguu

SEQ ID NO: 27501 - RNA, 21 nt, RNAi
uuacuugucaccguugucuuc

SEQ ID NO: 27502 - DNA, 21 bp, homo sapiens
aacagtggcaacagaagctga

SEQ ID NO: 27503 - RNA, 21 nt, RNAi
caguggcaacagaagcugauu

SEQ ID NO: 27504 - RNA, 21 nt, RNAi
uugucaccguugucuucgacu

SEQ ID NO: 27505 - DNA, 21 bp, homo sapiens
aacagaagctgacaagcgtga

SEQ ID NO: 27506 - RNA, 21 nt, RNAi
cagaagcugacaagcgugauu

SEQ ID NO: 27507 - RNA, 21 nt, RNAi
uugucuucgacuguucgcacu

SEQ ID NO: 27508 - DNA, 21 bp, homo sapiens
aagctgacaagcgtgactctg

SEQ ID NO: 27509 - RNA, 21 nt, RNAi
gcugacaagcgugacucuguu

SEQ ID NO: 27510 - RNA, 21 nt, RNAi
uucgacuguucgcacugagac

SEQ ID NO: 27511 - DNA, 21 bp, homo sapiens
aagcgtgactctggagatgga

SEQ ID NO: 27512 - RNA, 21 nt, RNAi
gcgugacucuggagauggauu

SEQ ID NO: 27513 - RNA, 21 nt, RNAi
uucgcacugagaccucuaccu

SEQ ID NO: 27514 - DNA, 21 bp, homo sapiens
aaagaaacagacggaacaact

SEQ ID NO: 27515 - RNA, 21 nt, RNAi
agaaacagacggaacaacuuu

SEQ ID NO: 27516 - RNA, 21 nt, RNAi
uuucuuugucugccuuguuga

SEQ ID NO: 27517 - DNA, 21 bp, homo sapiens
aagaaacagacggaacaactg

SEQ ID NO: 27518 - RNA, 21 nt, RNAi
gaaacagacggaacaacuguu

SEQ ID NO: 27519 - RNA, 21 nt, RNAi
uucuuugucugccuuguugac

SEQ ID NO: 27520 - DNA, 21 bp, homo sapiens
aaacagacggaacaactgtca

SEQ ID NO: 27521 - RNA, 21 nt, RNAi
acagacggaacaacugucauu

SEQ ID NO: 27522 - RNA, 21 nt, RNAi
uuugucugccuuguugacagu

SEQ ID NO: 27523 - DNA, 21 bp, homo sapiens
aacagacggaacaactgtcac

SEQ ID NO: 27524 - RNA, 21 nt, RNAi
cagacggaacaacugucacuu

SEQ ID NO: 27525 - RNA, 21 nt, RNAi
uugucugccuuguugacagug

SEQ ID NO: 27526 - DNA, 21 bp, homo sapiens
aacaactgtcacttgagctgg

SEQ ID NO: 27527 - RNA, 21 nt, RNAi
caacugucacuugagcugguu

SEQ ID NO: 27528 - RNA, 21 nt, RNAi
uuguugacagugaacucgacc

SEQ ID NO: 27529 - DNA, 21 bp, homo sapiens
aactgtcacttgagctggaag

SEQ ID NO: 27530 - RNA, 21 nt, RNAi
cugucacuugagcuggaaguu

SEQ ID NO: 27531 - RNA, 21 nt, RNAi
uugacagugaacucgaccuuc

SEQ ID NO: 27532 - DNA, 21 bp, homo sapiens
aagtagcacgactccagctac

SEQ ID NO: 27533 - RNA, 21 nt, RNAi
guagcacgacuccagcuacuu

SEQ ID NO: 27534 - RNA, 21 nt, RNAi
uucaucgugcugaggucgaug

SEQ ID NO: 27535 - DNA, 21 bp, homo sapiens
aaggtctggacttaagttctc

SEQ ID NO: 27536 - RNA, 21 nt, RNAi
ggucuggacuuaaguucucuu

SEQ ID NO: 27537 - RNA, 21 nt, RNAi
uuccagaccugaauucaagag

SEQ ID NO: 27538 - DNA, 21 bp, homo sapiens
aagttctcggtctttgcttgg

SEQ ID NO: 27539 - RNA, 21 nt, RNAi
guucucggucuuugcuugguu

SEQ ID NO: 27540 - RNA, 21 nt, RNAi
uucaagagccagaaacgaacc

SEQ ID NO: 27541 - DNA, 21 bp, homo sapiens
aagatgctattcaaggccgaa

SEQ ID NO: 27542 - RNA, 21 nt, RNAi
gaugcuauucaaggccgaauu

SEQ ID NO: 27543 - RNA, 21 nt, RNAi
uucuacgauaaguuccggcuu

SEQ ID NO: 27544 - DNA, 21 bp, homo sapiens
aaggccgaaatgagagctgtg

SEQ ID NO: 27545 - RNA, 21 nt, RNAi
ggccgaaaugagagcuguguu

SEQ ID NO: 27546 - RNA, 21 nt, RNAi
uuccggcuuuacucucgacac

SEQ ID NO: 27547 - DNA, 21 bp, homo sapiens
aaatgagagctgtgacatatc

SEQ ID NO: 27548 - RNA, 21 nt, RNAi
augagagcugugacauaucuu

SEQ ID NO: 27549 - RNA, 21 nt, RNAi
uuuacucucgacacuguauag

SEQ ID NO: 27550 - DNA, 21 bp, homo sapiens
aatgagagctgtgacatatca

SEQ ID NO: 27551 - RNA, 21 nt, RNAi
ugagagcugugacauaucauu

SEQ ID NO: 27552 - RNA, 21 nt, RNAi
uuacucucgacacuguauagu

SEQ ID NO: 27553 - DNA, 21 bp, homo sapiens
aacatacttcagaaactacag

SEQ ID NO: 27554 - RNA, 21 nt, RNAi
cauacuucagaaacuacaguu

SEQ ID NO: 27555 - RNA, 21 nt, RNAi
uuguaugaagucuuugauguc

SEQ ID NO: 27556 - DNA, 21 bp, homo sapiens
aaactacagaaagaacaccaa

SEQ ID NO: 27557 - RNA, 21 nt, RNAi
acuacagaaagaacaccaauu

SEQ ID NO: 27558 - RNA, 21 nt, RNAi
uuugaugucuuucuugugguu

SEQ ID NO: 27559 - DNA, 21 bp, homo sapiens
aactacagaaagaacaccaaa

SEQ ID NO: 27560 - RNA, 21 nt, RNAi
cuacagaaagaacaccaaauu

SEQ ID NO: 27561 - RNA, 21 nt, RNAi
uugaugucuuucuugugguuu

SEQ ID NO: 27562 - DNA, 21 bp, homo sapiens
aaagaacaccaaagcatgatg

SEQ ID NO: 27563 - RNA, 21 nt, RNAi
agaacaccaaagcaugauguu

SEQ ID NO: 27564 - RNA, 21 nt, RNAi
uuucuugugguuucguacuac

SEQ ID NO: 27565 - DNA, 21 bp, homo sapiens
aagaacaccaaagcatgatgt

SEQ ID NO: 27566 - RNA, 21 nt, RNAi
gaacaccaaagcaugauguuu

SEQ ID NO: 27567 - RNA, 21 nt, RNAi
uucuugugguuucguacuaca

SEQ ID NO: 27568 - DNA, 21 bp, homo sapiens
aacaccaaagcatgatgttca

SEQ ID NO: 27569 - RNA, 21 nt, RNAi
caccaaagcaugauguucauu

SEQ ID NO: 27570 - RNA, 21 nt, RNAi
uugugguuucguacuacaagu

SEQ ID NO: 27571 - DNA, 21 bp, homo sapiens
aaagcatgatgttcatcagat

SEQ ID NO: 27572 - RNA, 21 nt, RNAi
agcaugauguucaucagauuu

SEQ ID NO: 27573 - RNA, 21 nt, RNAi
uuucguacuacaaguagucua

SEQ ID NO: 27574 - DNA, 21 bp, homo sapiens
aagcatgatgttcatcagatt

SEQ ID NO: 27575 - RNA, 21 nt, RNAi
gcaugauguucaucagauuuu

SEQ ID NO: 27576 - RNA, 21 nt, RNAi
uucguacuacaaguagucuaa

SEQ ID NO: 27577 - DNA, 21 bp, homo sapiens
aaagatgctcagcaggacctc

SEQ ID NO: 27578 - RNA, 21 nt, RNAi
agaugcucagcaggaccucuu

SEQ ID NO: 27579 - RNA, 21 nt, RNAi
uuucuacgagucguccuggag

SEQ ID NO: 27580 - DNA, 21 bp, homo sapiens
aagatgctcagcaggacctca

SEQ ID NO: 27581 - RNA, 21 nt, RNAi
gaugcucagcaggaccucauu

SEQ ID NO: 27582 - RNA, 21 nt, RNAi
uucuacgagucguccuggagu

SEQ ID NO: 27583 - DNA, 21 bp, homo sapiens
aaataactgagactggtgcag

SEQ ID NO: 27584 - RNA, 21 nt, RNAi
auaacugagacuggugcaguu

SEQ ID NO: 27585 - RNA, 21 nt, RNAi
uuuauugacucugaccacguc

SEQ ID NO: 27586 - DNA, 21 bp, homo sapiens
aataactgagactggtgcagt

SEQ ID NO: 27587 - RNA, 21 nt, RNAi
uaacugagacuggugcaguuu

SEQ ID NO: 27588 - RNA, 21 nt, RNAi
uuauugacucugaccacguca

SEQ ID NO: 27589 - DNA, 21 bp, homo sapiens
aactgagactggtgcagtgaa

SEQ ID NO: 27590 - RNA, 21 nt, RNAi
cugagacuggugcagugaauu

SEQ ID NO: 27591 - RNA, 21 nt, RNAi
uugacucugaccacgucacuu

SEQ ID NO: 27592 - DNA, 21 bp, homo sapiens
aatgctttggtacctatggat

SEQ ID NO: 27593 - RNA, 21 nt, RNAi
ugcuuugguaccuauggauuu

SEQ ID NO: 27594 - RNA, 21 nt, RNAi
uuacgaaaccauggauaccua

SEQ ID NO: 27595 - DNA, 21 bp, homo sapiens
aaactccatttacaggaggta

SEQ ID NO: 27596 - RNA, 21 nt, RNAi
acuccauuuacaggagguauu

SEQ ID NO: 27597 - RNA, 21 nt, RNAi
uuugagguaaauguccuccau

SEQ ID NO: 27598 - DNA, 21 bp, homo sapiens
aactccatttacaggaggtac

SEQ ID NO: 27599 - RNA, 21 nt, RNAi
cuccauuuacaggagguacuu

SEQ ID NO: 27600 - RNA, 21 nt, RNAi
uugagguaaauguccuccaug

SEQ ID NO: 27601 - DNA, 21 bp, homo sapiens
aagcatgcatagaattggaaa

SEQ ID NO: 27602 - RNA, 21 nt, RNAi
gcaugcauagaauuggaaauu

SEQ ID NO: 27603 - RNA, 21 nt, RNAi
uucguacguaucuuaaccuuu

SEQ ID NO: 27604 - DNA, 21 bp, homo sapiens
aaacttctgaaggcctcaatt

SEQ ID NO: 27605 - RNA, 21 nt, RNAi
acuucugaaggccucaauuuu

SEQ ID NO: 27606 - RNA, 21 nt, RNAi
uuugaagacuuccggaguuaa

SEQ ID NO: 27607 - DNA, 21 bp, homo sapiens
aacttctgaaggcctcaattc

SEQ ID NO: 27608 - RNA, 21 nt, RNAi
cuucugaaggccucaauucuu

SEQ ID NO: 27609 - RNA, 21 nt, RNAi
uugaagacuuccggaguuaag

SEQ ID NO: 27610 - DNA, 21 bp, homo sapiens
aaggcctcaattctgatttag

SEQ ID NO: 27611 - RNA, 21 nt, RNAi
ggccucaauucugauuuaguu

SEQ ID NO: 27612 - RNA, 21 nt, RNAi
uuccggaguuaagacuaaauc

SEQ ID NO: 27613 - DNA, 21 bp, homo sapiens
aatgcatgcagataaatcatc

SEQ ID NO: 27614 - RNA, 21 nt, RNAi
ugcaugcagauaaaucaucuu

SEQ ID NO: 27615 - RNA, 21 nt, RNAi
uuacguacgucuauuuaguag

SEQ ID NO: 27616 - DNA, 21 bp, homo sapiens
aatcatcacgtgaagatattg

SEQ ID NO: 27617 - RNA, 21 nt, RNAi
ucaucacgugaagauauuguu

SEQ ID NO: 27618 - RNA, 21 nt, RNAi
uuaguagugcacuucuauaac

SEQ ID NO: 27619 - DNA, 21 bp, homo sapiens
aagatattggagataatgtgg

SEQ ID NO: 27620 - RNA, 21 nt, RNAi
gauauuggagauaaugugguu

SEQ ID NO: 27621 - RNA, 21 nt, RNAi
uucuauaaccucuauuacacc

SEQ ID NO: 27622 - DNA, 21 bp, homo sapiens
aatgtggccaaggtgaatgac

SEQ ID NO: 27623 - RNA, 21 nt, RNAi
uguggccaaggugaaugacuu

SEQ ID NO: 27624 - RNA, 21 nt, RNAi
uuacaccgguuccacuuacug

SEQ ID NO: 27625 - DNA, 21 bp, homo sapiens
aaggtgaatgacagctggaag

SEQ ID NO: 27626 - RNA, 21 nt, RNAi
ggugaaugacagcuggaaguu

SEQ ID NO: 27627 - RNA, 21 nt, RNAi
uuccacuuacugucgaccuuc

SEQ ID NO: 27628 - DNA, 21 bp, homo sapiens
aatgacagctggaaggagaga

SEQ ID NO: 27629 - RNA, 21 nt, RNAi
ugacagcuggaaggagagauu

SEQ ID NO: 27630 - RNA, 21 nt, RNAi
uuacugucgaccuuccucucu

SEQ ID NO: 27631 - DNA, 21 bp, homo sapiens
aaggagagatttcttgatgtg

SEQ ID NO: 27632 - RNA, 21 nt, RNAi
ggagagauuucuugauguguu

SEQ ID NO: 27633 - RNA, 21 nt, RNAi
uuccucucuaaagaacuacac

SEQ ID NO: 27634 - DNA, 21 bp, homo sapiens
aaatgagctgagtaggatcag

SEQ ID NO: 27635 - RNA, 21 nt, RNAi
augagcugaguaggaucaguu

SEQ ID NO: 27636 - RNA, 21 nt, RNAi
uuuacucgacucauccuaguc

SEQ ID NO: 27637 - DNA, 21 bp, homo sapiens
aatgagctgagtaggatcaga

SEQ ID NO: 27638 - RNA, 21 nt, RNAi
ugagcugaguaggaucagauu

SEQ ID NO: 27639 - RNA, 21 nt, RNAi
uuacucgacucauccuagucu

SEQ ID NO: 27640 - DNA, 21 bp, homo sapiens
aaagctagcattgagcatgaa

SEQ ID NO: 27641 - RNA, 21 nt, RNAi
agcuagcauugagcaugaauu

SEQ ID NO: 27642 - RNA, 21 nt, RNAi
uuucgaucguaacucguacuu

SEQ ID NO: 27643 - DNA, 21 bp, homo sapiens
aagctagcattgagcatgaag

SEQ ID NO: 27644 - RNA, 21 nt, RNAi
gcuagcauugagcaugaaguu

SEQ ID NO: 27645 - RNA, 21 nt, RNAi
uucgaucguaacucguacuuc

SEQ ID NO: 27646 - DNA, 21 bp, homo sapiens
aaacagagaagctatgtttag

SEQ ID NO: 27647 - RNA, 21 nt, RNAi
acagagaagcuauguuuaguu

SEQ ID NO: 27648 - RNA, 21 nt, RNAi
uuugucucuucgauacaaauc

SEQ ID NO: 27649 - DNA, 21 bp, homo sapiens
aacagagaagctatgtttaga

SEQ ID NO: 27650 - RNA, 21 nt, RNAi
cagagaagcuauguuuagauu

SEQ ID NO: 27651 - RNA, 21 nt, RNAi
uugucucuucgauacaaaucu

SEQ ID NO: 27652 - DNA, 21 bp, homo sapiens
aataagcagaaggttattgtc

SEQ ID NO: 27653 - RNA, 21 nt, RNAi
uaagcagaagguuauugucuu

SEQ ID NO: 27654 - RNA, 21 nt, RNAi
uuauucgucuuccaauaacag

SEQ ID NO: 27655 - DNA, 21 bp, homo sapiens
aagcagaaggttattgtctgc

SEQ ID NO: 27656 - RNA, 21 nt, RNAi
gcagaagguuauugucugcuu

SEQ ID NO: 27657 - RNA, 21 nt, RNAi
uucgucuuccaauaacagacg

SEQ ID NO: 27658 - DNA, 21 bp, homo sapiens
aaggttattgtctgccttgaa

SEQ ID NO: 27659 - RNA, 21 nt, RNAi
gguuauugucugccuugaauu

SEQ ID NO: 27660 - RNA, 21 nt, RNAi
uuccaauaacagacggaacuu

SEQ ID NO: 27661 - DNA, 21 bp, homo sapiens
aagaagaactctcagtggtca

SEQ ID NO: 27662 - RNA, 21 nt, RNAi
gaagaacucucaguggucauu

SEQ ID NO: 27663 - RNA, 21 nt, RNAi
uucuucuugagagucaccagu

SEQ ID NO: 27664 - DNA, 21 bp, homo sapiens
aagaactctcagtggtcacaa

SEQ ID NO: 27665 - RNA, 21 nt, RNAi
gaacucucaguggucacaauu

SEQ ID NO: 27666 - RNA, 21 nt, RNAi
uucuugagagucaccaguguu

SEQ ID NO: 27667 - DNA, 21 bp, homo sapiens
aactctcagtggtcacaagtg

SEQ ID NO: 27668 - RNA, 21 nt, RNAi
cucucaguggucacaaguguu

SEQ ID NO: 27669 - RNA, 21 nt, RNAi
uugagagucaccaguguucac

SEQ ID NO: 27670 - DNA, 21 bp, homo sapiens
aagtgagagaaaccagcttcg

SEQ ID NO: 27671 - RNA, 21 nt, RNAi
gugagagaaaccagcuucguu

SEQ ID NO: 27672 - RNA, 21 nt, RNAi
uucacucucuuuggucgaagc

SEQ ID NO: 27673 - DNA, 21 bp, homo sapiens
aaaccagcttcgtggagaatt

SEQ ID NO: 27674 - RNA, 21 nt, RNAi
accagcuucguggagaauuuu

SEQ ID NO: 27675 - RNA, 21 nt, RNAi
uuuggucgaagcaccucuuaa

SEQ ID NO: 27676 - DNA, 21 bp, homo sapiens
aaccagcttcgtggagaatta

SEQ ID NO: 27677 - RNA, 21 nt, RNAi
ccagcuucguggagaauuauu

SEQ ID NO: 27678 - RNA, 21 nt, RNAi
uuggucgaagcaccucuuaau

SEQ ID NO: 27679 - DNA, 21 bp, homo sapiens
aaaccacggcactggatcagt

SEQ ID NO: 27680 - RNA, 21 nt, RNAi
accacggcacuggaucaguuu

SEQ ID NO: 27681 - RNA, 21 nt, RNAi
uuuggugccgugaccuaguca

SEQ ID NO: 27682 - DNA, 21 bp, homo sapiens
aaccacggcactggatcagtt

SEQ ID NO: 27683 - RNA, 21 nt, RNAi
ccacggcacuggaucaguuuu

SEQ ID NO: 27684 - RNA, 21 nt, RNAi
uuggugccgugaccuagucaa

SEQ ID NO: 27685 - DNA, 21 bp, homo sapiens
aaacacaagagcttgagtctc

SEQ ID NO: 27686 - RNA, 21 nt, RNAi
acacaagagcuugagucucuu

SEQ ID NO: 27687 - RNA, 21 nt, RNAi
uuuguguucucgaacucagag

SEQ ID NO: 27688 - DNA, 21 bp, homo sapiens
aacacaagagcttgagtctca

SEQ ID NO: 27689 - RNA, 21 nt, RNAi
cacaagagcuugagucucauu

SEQ ID NO: 27690 - RNA, 21 nt, RNAi
uuguguucucgaacucagagu

SEQ ID NO: 27691 - DNA, 21 bp, homo sapiens
aagagcttgagtctcatcaaa

SEQ ID NO: 27692 - RNA, 21 nt, RNAi
gagcuugagucucaucaaauu

SEQ ID NO: 27693 - RNA, 21 nt, RNAi
uucucgaacucagaguaguuu

SEQ ID NO: 27694 - DNA, 21 bp, homo sapiens
aaagtgagtgtctccattgca

SEQ ID NO: 27695 - RNA, 21 nt, RNAi
agugagugucuccauugcauu

SEQ ID NO: 27696 - RNA, 21 nt, RNAi
uuucacucacagagguaacgu

SEQ ID NO: 27697 - DNA, 21 bp, homo sapiens
aagtgagtgtctccattgcat

SEQ ID NO: 27698 - RNA, 21 nt, RNAi
gugagugucuccauugcauuu

SEQ ID NO: 27699 - RNA, 21 nt, RNAi
uucacucacagagguaacgua

SEQ ID NO: 27700 - DNA, 21 bp, homo sapiens
aaagacggaactccttcagac

SEQ ID NO: 27701 - RNA, 21 nt, RNAi
agacggaacuccuucagacuu

SEQ ID NO: 27702 - RNA, 21 nt, RNAi
uuucugccuugaggaagucug

SEQ ID NO: 27703 - DNA, 21 bp, homo sapiens
aagacggaactccttcagact

SEQ ID NO: 27704 - RNA, 21 nt, RNAi
gacggaacuccuucagacuuu

SEQ ID NO: 27705 - RNA, 21 nt, RNAi
uucugccuugaggaagucuga

SEQ ID NO: 27706 - DNA, 21 bp, homo sapiens
aactccttcagactttgtcct

SEQ ID NO: 27707 - RNA, 21 nt, RNAi
cuccuucagacuuuguccuuu

SEQ ID NO: 27708 - RNA, 21 nt, RNAi
uugaggaagucugaaacagga

SEQ ID NO: 27709 - DNA, 21 bp, homo sapiens
aaaggactcacaggcactgtc

SEQ ID NO: 27710 - RNA, 21 nt, RNAi
aggacucacaggcacugucuu

SEQ ID NO: 27711 - RNA, 21 nt, RNAi
uuuccugaguguccgugacag

SEQ ID NO: 27712 - DNA, 21 bp, homo sapiens
aaggactcacaggcactgtct

SEQ ID NO: 27713 - RNA, 21 nt, RNAi
ggacucacaggcacugucuuu

SEQ ID NO: 27714 - RNA, 21 nt, RNAi
uuccugaguguccgugacaga

SEQ ID NO: 27715 - DNA, 21 bp, homo sapiens
aaaccaaattgcacaactgaa

SEQ ID NO: 27716 - RNA, 21 nt, RNAi
accaaauugcacaacugaauu

SEQ ID NO: 27717 - RNA, 21 nt, RNAi
uuugguuuaacguguugacuu

SEQ ID NO: 27718 - DNA, 21 bp, homo sapiens
aaccaaattgcacaactgaat

SEQ ID NO: 27719 - RNA, 21 nt, RNAi
ccaaauugcacaacugaauuu

SEQ ID NO: 27720 - RNA, 21 nt, RNAi
uugguuuaacguguugacuua

SEQ ID NO: 27721 - DNA, 21 bp, homo sapiens
aaagagaaagaattgcttgtc

SEQ ID NO: 27722 - RNA, 21 nt, RNAi
agagaaagaauugcuugucuu

SEQ ID NO: 27723 - RNA, 21 nt, RNAi
uuucucuuucuuaacgaacag

SEQ ID NO: 27724 - DNA, 21 bp, homo sapiens
aagagaaagaattgcttgtca

SEQ ID NO: 27725 - RNA, 21 nt, RNAi
gagaaagaauugcuugucauu

SEQ ID NO: 27726 - RNA, 21 nt, RNAi
uucucuuucuuaacgaacagu

SEQ ID NO: 27727 - DNA, 21 bp, homo sapiens
aaagaattgcttgtcaaggaa

SEQ ID NO: 27728 - RNA, 21 nt, RNAi
agaauugcuugucaaggaauu

SEQ ID NO: 27729 - RNA, 21 nt, RNAi
uuucuuaacgaacaguuccuu

SEQ ID NO: 27730 - DNA, 21 bp, homo sapiens
aagaattgcttgtcaaggaat

SEQ ID NO: 27731 - RNA, 21 nt, RNAi
gaauugcuugucaaggaauuu

SEQ ID NO: 27732 - RNA, 21 nt, RNAi
uucuuaacgaacaguuccuua

SEQ ID NO: 27733 - DNA, 21 bp, homo sapiens
aattgcttgtcaaggaatctg

SEQ ID NO: 27734 - RNA, 21 nt, RNAi
uugcuugucaaggaaucuguu

SEQ ID NO: 27735 - RNA, 21 nt, RNAi
uuaacgaacaguuccuuagac

SEQ ID NO: 27736 - DNA, 21 bp, homo sapiens
aaggaatctgaaagcctgcag

SEQ ID NO: 27737 - RNA, 21 nt, RNAi
ggaaucugaaagccugcaguu

SEQ ID NO: 27738 - RNA, 21 nt, RNAi
uuccuuagacuuucggacguc

SEQ ID NO: 27739 - DNA, 21 bp, homo sapiens
aatctgaaagcctgcaggcca

SEQ ID NO: 27740 - RNA, 21 nt, RNAi
ucugaaagccugcaggccauu

SEQ ID NO: 27741 - RNA, 21 nt, RNAi
uuagacuuucggacguccggu

SEQ ID NO: 27742 - DNA, 21 bp, homo sapiens
aaagcctgcaggccagactga

SEQ ID NO: 27743 - RNA, 21 nt, RNAi
agccugcaggccagacugauu

SEQ ID NO: 27744 - RNA, 21 nt, RNAi
uuucggacguccggucugacu

SEQ ID NO: 27745 - DNA, 21 bp, homo sapiens
aagcctgcaggccagactgag

SEQ ID NO: 27746 - RNA, 21 nt, RNAi
gccugcaggccagacugaguu

SEQ ID NO: 27747 - RNA, 21 nt, RNAi
uucggacguccggucugacuc

SEQ ID NO: 27748 - DNA, 21 bp, homo sapiens
aaagctgaatgtctccaaggc

SEQ ID NO: 27749 - RNA, 21 nt, RNAi
agcugaaugucuccaaggcuu

SEQ ID NO: 27750 - RNA, 21 nt, RNAi
uuucgacuuacagagguuccg

SEQ ID NO: 27751 - DNA, 21 bp, homo sapiens
aagctgaatgtctccaaggcc

SEQ ID NO: 27752 - RNA, 21 nt, RNAi
gcugaaugucuccaaggccuu

SEQ ID NO: 27753 - RNA, 21 nt, RNAi
uucgacuuacagagguuccgg

SEQ ID NO: 27754 - DNA, 21 bp, homo sapiens
aatgtctccaaggccttggag

SEQ ID NO: 27755 - RNA, 21 nt, RNAi
ugucuccaaggccuuggaguu

SEQ ID NO: 27756 - RNA, 21 nt, RNAi
uuacagagguuccggaaccuc

SEQ ID NO: 27757 - DNA, 21 bp, homo sapiens
aaaggtgagttcgcattgagg

SEQ ID NO: 27758 - RNA, 21 nt, RNAi
aggugaguucgcauugagguu

SEQ ID NO: 27759 - RNA, 21 nt, RNAi
uuuccacucaagcguaacucc

SEQ ID NO: 27760 - DNA, 21 bp, homo sapiens
aaggtgagttcgcattgaggc

SEQ ID NO: 27761 - RNA, 21 nt, RNAi
ggugaguucgcauugaggcuu

SEQ ID NO: 27762 - RNA, 21 nt, RNAi
uuccacucaagcguaacuccg

SEQ ID NO: 27763 - DNA, 21 bp, homo sapiens
aacacaggaggaagtgcatca

SEQ ID NO: 27764 - RNA, 21 nt, RNAi
cacaggaggaagugcaucauu

SEQ ID NO: 27765 - RNA, 21 nt, RNAi
uuguguccuccuucacguagu

SEQ ID NO: 27766 - DNA, 21 bp, homo sapiens
aagtgcatcagctgagaagag

SEQ ID NO: 27767 - RNA, 21 nt, RNAi
gugcaucagcugagaagaguu

SEQ ID NO: 27768 - RNA, 21 nt, RNAi
uucacguagucgacucuucuc

SEQ ID NO: 27769 - DNA, 21 bp, homo sapiens
aagaggcatcgagaaactgag

SEQ ID NO: 27770 - RNA, 21 nt, RNAi
gaggcaucgagaaacugaguu

SEQ ID NO: 27771 - RNA, 21 nt, RNAi
uucuccguagcucuuugacuc

SEQ ID NO: 27772 - DNA, 21 bp, homo sapiens
aaactgagagttcgcattgag

SEQ ID NO: 27773 - RNA, 21 nt, RNAi
acugagaguucgcauugaguu

SEQ ID NO: 27774 - RNA, 21 nt, RNAi
uuugacucucaagcguaacuc

SEQ ID NO: 27775 - DNA, 21 bp, homo sapiens
aactgagagttcgcattgagg

SEQ ID NO: 27776 - RNA, 21 nt, RNAi
cugagaguucgcauugagguu

SEQ ID NO: 27777 - RNA, 21 nt, RNAi
uugacucucaagcguaacucc

SEQ ID NO: 27778 - DNA, 21 bp, homo sapiens
aaagaagcagctgcacatcgc

SEQ ID NO: 27779 - RNA, 21 nt, RNAi
agaagcagcugcacaucgcuu

SEQ ID NO: 27780 - RNA, 21 nt, RNAi
uuucuucgucgacguguagcg

SEQ ID NO: 27781 - DNA, 21 bp, homo sapiens
aagaagcagctgcacatcgca

SEQ ID NO: 27782 - RNA, 21 nt, RNAi
gaagcagcugcacaucgcauu

SEQ ID NO: 27783 - RNA, 21 nt, RNAi
uucuucgucgacguguagcgu

SEQ ID NO: 27784 - DNA, 21 bp, homo sapiens
aagcagctgcacatcgcagag

SEQ ID NO: 27785 - RNA, 21 nt, RNAi
gcagcugcacaucgcagaguu

SEQ ID NO: 27786 - RNA, 21 nt, RNAi
uucgucgacguguagcgucuc

SEQ ID NO: 27787 - DNA, 21 bp, homo sapiens
aaactgaaagaacgcgagcgg

SEQ ID NO: 27788 - RNA, 21 nt, RNAi
acugaaagaacgcgagcgguu

SEQ ID NO: 27789 - RNA, 21 nt, RNAi
uuugacuuucuugcgcucgcc

SEQ ID NO: 27790 - DNA, 21 bp, homo sapiens
aaggataaagttgagaacctt

SEQ ID NO: 27791 - RNA, 21 nt, RNAi
ggauaaaguugagaaccuuuu

SEQ ID NO: 27792 - RNA, 21 nt, RNAi
uuccuauuucaacucuuggaa

SEQ ID NO: 27793 - DNA, 21 bp, homo sapiens
aaagttgagaaccttgaaagg

SEQ ID NO: 27794 - RNA, 21 nt, RNAi
aguugagaaccuugaaagguu

SEQ ID NO: 27795 - RNA, 21 nt, RNAi
uuucaacucuuggaacuuucc

SEQ ID NO: 27796 - DNA, 21 bp, homo sapiens
aattgcagatgtcagaagaaa

SEQ ID NO: 27797 - RNA, 21 nt, RNAi
uugcagaugucagaagaaauu

SEQ ID NO: 27798 - RNA, 21 nt, RNAi
uuaacgucuacagucuucuuu

SEQ ID NO: 27799 - DNA, 21 bp, homo sapiens
aaaccaggagctagtgattct

SEQ ID NO: 27800 - RNA, 21 nt, RNAi
accaggagcuagugauucuuu

SEQ ID NO: 27801 - RNA, 21 nt, RNAi
uuugguccucgaucacuaaga

SEQ ID NO: 27802 - DNA, 21 bp, homo sapiens
aaccaggagctagtgattctt

SEQ ID NO: 27803 - RNA, 21 nt, RNAi
ccaggagcuagugauucuuuu

SEQ ID NO: 27804 - RNA, 21 nt, RNAi
uugguccucgaucacuaagaa

SEQ ID NO: 27805 - DNA, 21 bp, homo sapiens
aattccaaagcagaagtagag

SEQ ID NO: 27806 - RNA, 21 nt, RNAi
uuccaaagcagaaguagaguu

SEQ ID NO: 27807 - RNA, 21 nt, RNAi
uuaagguuucgucuucaucuc

SEQ ID NO: 27808 - DNA, 21 bp, homo sapiens
aaagcagaagtagagactcta

SEQ ID NO: 27809 - RNA, 21 nt, RNAi
agcagaaguagagacucuauu

SEQ ID NO: 27810 - RNA, 21 nt, RNAi
uuucgucuucaucucugagau

SEQ ID NO: 27811 - DNA, 21 bp, homo sapiens
aagcagaagtagagactctaa

SEQ ID NO: 27812 - RNA, 21 nt, RNAi
gcagaaguagagacucuaauu

SEQ ID NO: 27813 - RNA, 21 nt, RNAi
uucgucuucaucucugagauu

SEQ ID NO: 27814 - DNA, 21 bp, homo sapiens
aaacacaaatagaagagatgg

SEQ ID NO: 27815 - RNA, 21 nt, RNAi
acacaaauagaagagaugguu

SEQ ID NO: 27816 - RNA, 21 nt, RNAi
uuuguguuuaucuucucuacc

SEQ ID NO: 27817 - DNA, 21 bp, homo sapiens
aacacaaatagaagagatggc

SEQ ID NO: 27818 - RNA, 21 nt, RNAi
cacaaauagaagagauggcuu

SEQ ID NO: 27819 - RNA, 21 nt, RNAi
uuguguuuaucuucucuaccg

SEQ ID NO: 27820 - DNA, 21 bp, homo sapiens
aaatagaagagatggccagaa

SEQ ID NO: 27821 - RNA, 21 nt, RNAi
auagaagagauggccagaauu

SEQ ID NO: 27822 - RNA, 21 nt, RNAi
uuuaucuucucuaccggucuu

SEQ ID NO: 27823 - DNA, 21 bp, homo sapiens
aatagaagagatggccagaag

SEQ ID NO: 27824 - RNA, 21 nt, RNAi
uagaagagauggccagaaguu

SEQ ID NO: 27825 - RNA, 21 nt, RNAi
uuaucuucucuaccggucuuc

SEQ ID NO: 27826 - DNA, 21 bp, homo sapiens
aagagatggccagaagcctga

SEQ ID NO: 27827 - RNA, 21 nt, RNAi
gagauggccagaagccugauu

SEQ ID NO: 27828 - RNA, 21 nt, RNAi
uucucuaccggucuucggacu

SEQ ID NO: 27829 - DNA, 21 bp, homo sapiens
aattagaccttgtcacgttaa

SEQ ID NO: 27830 - RNA, 21 nt, RNAi
uuagaccuugucacguuaauu

SEQ ID NO: 27831 - RNA, 21 nt, RNAi
uuaaucuggaacagugcaauu

SEQ ID NO: 27832 - DNA, 21 bp, homo sapiens
aaacaaggtcagttgtcagaa

SEQ ID NO: 27833 - RNA, 21 nt, RNAi
acaaggucaguugucagaauu

SEQ ID NO: 27834 - RNA, 21 nt, RNAi
uuuguuccagucaacagucuu

SEQ ID NO: 27835 - DNA, 21 bp, homo sapiens
aacaaggtcagttgtcagaac

SEQ ID NO: 27836 - RNA, 21 nt, RNAi
caaggucaguugucagaacuu

SEQ ID NO: 27837 - RNA, 21 nt, RNAi
uuguuccagucaacagucuug

SEQ ID NO: 27838 - DNA, 21 bp, homo sapiens
aaggtcagttgtcagaactag

SEQ ID NO: 27839 - RNA, 21 nt, RNAi
ggucaguugucagaacuaguu

SEQ ID NO: 27840 - RNA, 21 nt, RNAi
uuccagucaacagucuugauc

SEQ ID NO: 27841 - DNA, 21 bp, homo sapiens
aactagacaagttactctctt

SEQ ID NO: 27842 - RNA, 21 nt, RNAi
cuagacaaguuacucucuuuu

SEQ ID NO: 27843 - RNA, 21 nt, RNAi
uugaucuguucaaugagagaa

SEQ ID NO: 27844 - DNA, 21 bp, homo sapiens
aaaggagcaagcagagataca

SEQ ID NO: 27845 - RNA, 21 nt, RNAi
aggagcaagcagagauacauu

SEQ ID NO: 27846 - RNA, 21 nt, RNAi
uuuccucguucgucucuaugu

SEQ ID NO: 27847 - DNA, 21 bp, homo sapiens
aaggagcaagcagagatacag

SEQ ID NO: 27848 - RNA, 21 nt, RNAi
ggagcaagcagagauacaguu

SEQ ID NO: 27849 - RNA, 21 nt, RNAi
uuccucguucgucucuauguc

SEQ ID NO: 27850 - DNA, 21 bp, homo sapiens
aagcagagatacagatcaaag

SEQ ID NO: 27851 - RNA, 21 nt, RNAi
gcagagauacagaucaaaguu

SEQ ID NO: 27852 - RNA, 21 nt, RNAi
uucgucucuaugucuaguuuc

SEQ ID NO: 27853 - DNA, 21 bp, homo sapiens
aaactgcagtggagatgcttc

SEQ ID NO: 27854 - RNA, 21 nt, RNAi
acugcaguggagaugcuucuu

SEQ ID NO: 27855 - RNA, 21 nt, RNAi
uuugacgucaccucuacgaag

SEQ ID NO: 27856 - DNA, 21 bp, homo sapiens
aactgcagtggagatgcttca

SEQ ID NO: 27857 - RNA, 21 nt, RNAi
cugcaguggagaugcuucauu

SEQ ID NO: 27858 - RNA, 21 nt, RNAi
uugacgucaccucuacgaagu

SEQ ID NO: 27859 - DNA, 21 bp, homo sapiens
aaaggagctaaatgaggcagt

SEQ ID NO: 27860 - RNA, 21 nt, RNAi
aggagcuaaaugaggcaguuu

SEQ ID NO: 27861 - RNA, 21 nt, RNAi
uuuccucgauuuacuccguca

SEQ ID NO: 27862 - DNA, 21 bp, homo sapiens
aaggagctaaatgaggcagta

SEQ ID NO: 27863 - RNA, 21 nt, RNAi
ggagcuaaaugaggcaguauu

SEQ ID NO: 27864 - RNA, 21 nt, RNAi
uuccucgauuuacuccgucau

SEQ ID NO: 27865 - DNA, 21 bp, homo sapiens
aaatgaggcagtagcagcctt

SEQ ID NO: 27866 - RNA, 21 nt, RNAi
augaggcaguagcagccuuuu

SEQ ID NO: 27867 - RNA, 21 nt, RNAi
uuuacuccgucaucgucggaa

SEQ ID NO: 27868 - DNA, 21 bp, homo sapiens
aatgaggcagtagcagccttg

SEQ ID NO: 27869 - RNA, 21 nt, RNAi
ugaggcaguagcagccuuguu

SEQ ID NO: 27870 - RNA, 21 nt, RNAi
uuacuccgucaucgucggaac

SEQ ID NO: 27871 - DNA, 21 bp, homo sapiens
aagaaattatgaaggccacag

SEQ ID NO: 27872 - RNA, 21 nt, RNAi
gaaauuaugaaggccacaguu

SEQ ID NO: 27873 - RNA, 21 nt, RNAi
uucuuuaauacuuccgguguc

SEQ ID NO: 27874 - DNA, 21 bp, homo sapiens
aaattatgaaggccacagaac

SEQ ID NO: 27875 - RNA, 21 nt, RNAi
auuaugaaggccacagaacuu

SEQ ID NO: 27876 - RNA, 21 nt, RNAi
uuuaauacuuccggugucuug

SEQ ID NO: 27877 - DNA, 21 bp, homo sapiens
aattatgaaggccacagaaca

SEQ ID NO: 27878 - RNA, 21 nt, RNAi
uuaugaaggccacagaacauu

SEQ ID NO: 27879 - RNA, 21 nt, RNAi
uuaauacuuccggugucuugu

SEQ ID NO: 27880 - DNA, 21 bp, homo sapiens
aaggccacagaacagagtcta

SEQ ID NO: 27881 - RNA, 21 nt, RNAi
ggccacagaacagagucuauu

SEQ ID NO: 27882 - RNA, 21 nt, RNAi
uuccggugucuugucucagau

SEQ ID NO: 27883 - DNA, 21 bp, homo sapiens
aatagaggaagagcatcagct

SEQ ID NO: 27884 - RNA, 21 nt, RNAi
uagaggaagagcaucagcuuu

SEQ ID NO: 27885 - RNA, 21 nt, RNAi
uuaucuccuucucguagucga

SEQ ID NO: 27886 - DNA, 21 bp, homo sapiens
aagagcatcagctgagaaata

SEQ ID NO: 27887 - RNA, 21 nt, RNAi
gagcaucagcugagaaauauu

SEQ ID NO: 27888 - RNA, 21 nt, RNAi
uucucguagucgacucuuuau

SEQ ID NO: 27889 - DNA, 21 bp, homo sapiens
aaagaagcagctctgtgtctt

SEQ ID NO: 27890 - RNA, 21 nt, RNAi
agaagcagcucugugucuuuu

SEQ ID NO: 27891 - RNA, 21 nt, RNAi
uuucuucgucgagacacagaa

SEQ ID NO: 27892 - DNA, 21 bp, homo sapiens
aagaagcagctctgtgtctta

SEQ ID NO: 27893 - RNA, 21 nt, RNAi
gaagcagcucugugucuuauu

SEQ ID NO: 27894 - RNA, 21 nt, RNAi
uucuucgucgagacacagaau

SEQ ID NO: 27895 - DNA, 21 bp, homo sapiens
aagcagctctgtgtcttacaa

SEQ ID NO: 27896 - RNA, 21 nt, RNAi
gcagcucugugucuuacaauu

SEQ ID NO: 27897 - RNA, 21 nt, RNAi
uucgucgagacacagaauguu

SEQ ID NO: 27898 - DNA, 21 bp, homo sapiens
aacaactgaaggaaagtgagc

SEQ ID NO: 27899 - RNA, 21 nt, RNAi
caacugaaggaaagugagcuu

SEQ ID NO: 27900 - RNA, 21 nt, RNAi
uuguugacuuccuuucacucg

SEQ ID NO: 27901 - DNA, 21 bp, homo sapiens
aactgaaggaaagtgagcatc

SEQ ID NO: 27902 - RNA, 21 nt, RNAi
cugaaggaaagugagcaucuu

SEQ ID NO: 27903 - RNA, 21 nt, RNAi
uugacuuccuuucacucguag

SEQ ID NO: 27904 - DNA, 21 bp, homo sapiens
aaggaaagtgagcatcatgca

SEQ ID NO: 27905 - RNA, 21 nt, RNAi
ggaaagugagcaucaugcauu

SEQ ID NO: 27906 - RNA, 21 nt, RNAi
uuccuuucacucguaguacgu

SEQ ID NO: 27907 - DNA, 21 bp, homo sapiens
aaagtgagcatcatgcagatt

SEQ ID NO: 27908 - RNA, 21 nt, RNAi
agugagcaucaugcagauuuu

SEQ ID NO: 27909 - RNA, 21 nt, RNAi
uuucacucguaguacgucuaa

SEQ ID NO: 27910 - DNA, 21 bp, homo sapiens
aagtgagcatcatgcagattt

SEQ ID NO: 27911 - RNA, 21 nt, RNAi
gugagcaucaugcagauuuuu

SEQ ID NO: 27912 - RNA, 21 nt, RNAi
uucacucguaguacgucuaaa

SEQ ID NO: 27913 - DNA, 21 bp, homo sapiens
aaccttgaaagagagctagag

SEQ ID NO: 27914 - RNA, 21 nt, RNAi
ccuugaaagagagcuagaguu

SEQ ID NO: 27915 - RNA, 21 nt, RNAi
uuggaacuuucucucgaucuc

SEQ ID NO: 27916 - DNA, 21 bp, homo sapiens
aaagagagctagagatagcca

SEQ ID NO: 27917 - RNA, 21 nt, RNAi
agagagcuagagauagccauu

SEQ ID NO: 27918 - RNA, 21 nt, RNAi
uuucucucgaucucuaucggu

SEQ ID NO: 27919 - DNA, 21 bp, homo sapiens
aagagagctagagatagccag

SEQ ID NO: 27920 - RNA, 21 nt, RNAi
gagagcuagagauagccaguu

SEQ ID NO: 27921 - RNA, 21 nt, RNAi
uucucucgaucucuaucgguc

SEQ ID NO: 27922 - DNA, 21 bp, homo sapiens
aaaccaagagcatgcagctct

SEQ ID NO: 27923 - RNA, 21 nt, RNAi
accaagagcaugcagcucuuu

SEQ ID NO: 27924 - RNA, 21 nt, RNAi
uuugguucucguacgucgaga

SEQ ID NO: 27925 - DNA, 21 bp, homo sapiens
aaccaagagcatgcagctctt

SEQ ID NO: 27926 - RNA, 21 nt, RNAi
ccaagagcaugcagcucuuuu

SEQ ID NO: 27927 - RNA, 21 nt, RNAi
uugguucucguacgucgagaa

SEQ ID NO: 27928 - DNA, 21 bp, homo sapiens
aagagcatgcagctcttgagg

SEQ ID NO: 27929 - RNA, 21 nt, RNAi
gagcaugcagcucuugagguu

SEQ ID NO: 27930 - RNA, 21 nt, RNAi
uucucguacgucgagaacucc

SEQ ID NO: 27931 - DNA, 21 bp, homo sapiens
aattccaaaggagaggtagag

SEQ ID NO: 27932 - RNA, 21 nt, RNAi
uuccaaaggagagguagaguu

SEQ ID NO: 27933 - RNA, 21 nt, RNAi
uuaagguuuccucuccaucuc

SEQ ID NO: 27934 - DNA, 21 bp, homo sapiens
aaagtctgagaggtctggaat

SEQ ID NO: 27935 - RNA, 21 nt, RNAi
agucugagaggucuggaauuu

SEQ ID NO: 27936 - RNA, 21 nt, RNAi
uuucagacucuccagaccuua

SEQ ID NO: 27937 - DNA, 21 bp, homo sapiens
aagtctgagaggtctggaatt

SEQ ID NO: 27938 - RNA, 21 nt, RNAi
gucugagaggucuggaauuuu

SEQ ID NO: 27939 - RNA, 21 nt, RNAi
uucagacucuccagaccuuaa

SEQ ID NO: 27940 - DNA, 21 bp, homo sapiens
aaagagcaagagcgaatatct

SEQ ID NO: 27941 - RNA, 21 nt, RNAi
agagcaagagcgaauaucuuu

SEQ ID NO: 27942 - RNA, 21 nt, RNAi
uuucucguucucgcuuauaga

SEQ ID NO: 27943 - DNA, 21 bp, homo sapiens
aagagcaagagcgaatatctg

SEQ ID NO: 27944 - RNA, 21 nt, RNAi
gagcaagagcgaauaucuguu

SEQ ID NO: 27945 - RNA, 21 nt, RNAi
uucucguucucgcuuauagac

SEQ ID NO: 27946 - DNA, 21 bp, homo sapiens
aagagcgaatatctgaattag

SEQ ID NO: 27947 - RNA, 21 nt, RNAi
gagcgaauaucugaauuaguu

SEQ ID NO: 27948 - RNA, 21 nt, RNAi
uucucgcuuauagacuuaauc

SEQ ID NO: 27949 - DNA, 21 bp, homo sapiens
aaagagcaagagaaagtacag

SEQ ID NO: 27950 - RNA, 21 nt, RNAi
agagcaagagaaaguacaguu

SEQ ID NO: 27951 - RNA, 21 nt, RNAi
uuucucguucucuuucauguc

SEQ ID NO: 27952 - DNA, 21 bp, homo sapiens
aagagcaagagaaagtacaga

SEQ ID NO: 27953 - RNA, 21 nt, RNAi
gagcaagagaaaguacagauu

SEQ ID NO: 27954 - RNA, 21 nt, RNAi
uucucguucucuuucaugucu

SEQ ID NO: 27955 - DNA, 21 bp, homo sapiens
aagagaaagtacagatgaaag

SEQ ID NO: 27956 - RNA, 21 nt, RNAi
gagaaaguacagaugaaaguu

SEQ ID NO: 27957 - RNA, 21 nt, RNAi
uucucuuucaugucuacuuuc

SEQ ID NO: 27958 - DNA, 21 bp, homo sapiens
aaatcaagcactgccatggag

SEQ ID NO: 27959 - RNA, 21 nt, RNAi
aucaagcacugccauggaguu

SEQ ID NO: 27960 - RNA, 21 nt, RNAi
uuuaguucgugacgguaccuc

SEQ ID NO: 27961 - DNA, 21 bp, homo sapiens
aatcaagcactgccatggaga

SEQ ID NO: 27962 - RNA, 21 nt, RNAi
ucaagcacugccauggagauu

SEQ ID NO: 27963 - RNA, 21 nt, RNAi
uuaguucgugacgguaccucu

SEQ ID NO: 27964 - DNA, 21 bp, homo sapiens
aagcactgccatggagatgct

SEQ ID NO: 27965 - RNA, 21 nt, RNAi
gcacugccauggagaugcuuu

SEQ ID NO: 27966 - RNA, 21 nt, RNAi
uucgugacgguaccucuacga

SEQ ID NO: 27967 - DNA, 21 bp, homo sapiens
aaagagctcaatgagagagtg

SEQ ID NO: 27968 - RNA, 21 nt, RNAi
agagcucaaugagagaguguu

SEQ ID NO: 27969 - RNA, 21 nt, RNAi
uuucucgaguuacucucucac

SEQ ID NO: 27970 - DNA, 21 bp, homo sapiens
aagagctcaatgagagagtgg

SEQ ID NO: 27971 - RNA, 21 nt, RNAi
gagcucaaugagagagugguu

SEQ ID NO: 27972 - RNA, 21 nt, RNAi
uucucgaguuacucucucacc

SEQ ID NO: 27973 - DNA, 21 bp, homo sapiens
aatgaccaagaagcctgtaag

SEQ ID NO: 27974 - RNA, 21 nt, RNAi
ugaccaagaagccuguaaguu

SEQ ID NO: 27975 - RNA, 21 nt, RNAi
uuacugguucuucggacauuc

SEQ ID NO: 27976 - DNA, 21 bp, homo sapiens
aagaagcctgtaaggccaaag

SEQ ID NO: 27977 - RNA, 21 nt, RNAi
gaagccuguaaggccaaaguu

SEQ ID NO: 27978 - RNA, 21 nt, RNAi
uucuucggacauuccgguuuc

SEQ ID NO: 27979 - DNA, 21 bp, homo sapiens
aagcctgtaaggccaaagagc

SEQ ID NO: 27980 - RNA, 21 nt, RNAi
gccuguaaggccaaagagcuu

SEQ ID NO: 27981 - RNA, 21 nt, RNAi
uucggacauuccgguuucucg

SEQ ID NO: 27982 - DNA, 21 bp, homo sapiens
aaggccaaagagcagaatctt

SEQ ID NO: 27983 - RNA, 21 nt, RNAi
ggccaaagagcagaaucuuuu

SEQ ID NO: 27984 - RNA, 21 nt, RNAi
uuccgguuucucgucuuagaa

SEQ ID NO: 27985 - DNA, 21 bp, homo sapiens
aaagagcagaatcttagtagt

SEQ ID NO: 27986 - RNA, 21 nt, RNAi
agagcagaaucuuaguaguuu

SEQ ID NO: 27987 - RNA, 21 nt, RNAi
uuucucgucuuagaaucauca

SEQ ID NO: 27988 - DNA, 21 bp, homo sapiens
aagagcagaatcttagtagtc

SEQ ID NO: 27989 - RNA, 21 nt, RNAi
gagcagaaucuuaguagucuu

SEQ ID NO: 27990 - RNA, 21 nt, RNAi
uucucgucuuagaaucaucag

SEQ ID NO: 27991 - DNA, 21 bp, homo sapiens
aatcttagtagtcaagtagag

SEQ ID NO: 27992 - RNA, 21 nt, RNAi
ucuuaguagucaaguagaguu

SEQ ID NO: 27993 - RNA, 21 nt, RNAi
uuagaaucaucaguucaucuc

SEQ ID NO: 27994 - DNA, 21 bp, homo sapiens
aagtagagtgtcttgaacttg

SEQ ID NO: 27995 - RNA, 21 nt, RNAi
guagagugucuugaacuuguu

SEQ ID NO: 27996 - RNA, 21 nt, RNAi
uucaucucacagaacuugaac

SEQ ID NO: 27997 - DNA, 21 bp, homo sapiens
aacttgagaaggctcagttgc

SEQ ID NO: 27998 - RNA, 21 nt, RNAi
cuugagaaggcucaguugcuu

SEQ ID NO: 27999 - RNA, 21 nt, RNAi
uugaacucuuccgagucaacg

SEQ ID NO: 28000 - DNA, 21 bp, homo sapiens
aaggctcagttgctacaaggc

SEQ ID NO: 28001 - RNA, 21 nt, RNAi
ggcucaguugcuacaaggcuu

SEQ ID NO: 28002 - RNA, 21 nt, RNAi
uuccgagucaacgauguuccg

SEQ ID NO: 28003 - DNA, 21 bp, homo sapiens
aatcttcagtgaatggcctca

SEQ ID NO: 28004 - RNA, 21 nt, RNAi
ucuucagugaauggccucauu

SEQ ID NO: 28005 - RNA, 21 nt, RNAi
uuagaagucacuuaccggagu

SEQ ID NO: 28006 - DNA, 21 bp, homo sapiens
aatggcctcattcaagaagta

SEQ ID NO: 28007 - RNA, 21 nt, RNAi
uggccucauucaagaaguauu

SEQ ID NO: 28008 - RNA, 21 nt, RNAi
uuaccggaguaaguucuucau

SEQ ID NO: 28009 - DNA, 21 bp, homo sapiens
aagaagtagaagatggcaagc

SEQ ID NO: 28010 - RNA, 21 nt, RNAi
gaaguagaagauggcaagcuu

SEQ ID NO: 28011 - RNA, 21 nt, RNAi
uucuucaucuucuaccguucg

SEQ ID NO: 28012 - DNA, 21 bp, homo sapiens
aagtagaagatggcaagcaga

SEQ ID NO: 28013 - RNA, 21 nt, RNAi
guagaagauggcaagcagauu

SEQ ID NO: 28014 - RNA, 21 nt, RNAi
uucaucuucuaccguucgucu

SEQ ID NO: 28015 - DNA, 21 bp, homo sapiens
aagatggcaagcagaaactgg

SEQ ID NO: 28016 - RNA, 21 nt, RNAi
gauggcaagcagaaacugguu

SEQ ID NO: 28017 - RNA, 21 nt, RNAi
uucuaccguucgucuuugacc

SEQ ID NO: 28018 - DNA, 21 bp, homo sapiens
aagcagaaactggagaagaag

SEQ ID NO: 28019 - RNA, 21 nt, RNAi
gcagaaacuggagaagaaguu

SEQ ID NO: 28020 - RNA, 21 nt, RNAi
uucgucuuugaccucuucuuc

SEQ ID NO: 28021 - DNA, 21 bp, homo sapiens
aaactggagaagaaggatgaa

SEQ ID NO: 28022 - RNA, 21 nt, RNAi
acuggagaagaaggaugaauu

SEQ ID NO: 28023 - RNA, 21 nt, RNAi
uuugaccucuucuuccuacuu

SEQ ID NO: 28024 - DNA, 21 bp, homo sapiens
aactggagaagaaggatgaag

SEQ ID NO: 28025 - RNA, 21 nt, RNAi
cuggagaagaaggaugaaguu

SEQ ID NO: 28026 - RNA, 21 nt, RNAi
uugaccucuucuuccuacuuc

SEQ ID NO: 28027 - DNA, 21 bp, homo sapiens
aagaaggatgaagaaatcagt

SEQ ID NO: 28028 - RNA, 21 nt, RNAi
gaaggaugaagaaaucaguuu

SEQ ID NO: 28029 - RNA, 21 nt, RNAi
uucuuccuacuucuuuaguca

SEQ ID NO: 28030 - DNA, 21 bp, homo sapiens
aaggatgaagaaatcagtaga

SEQ ID NO: 28031 - RNA, 21 nt, RNAi
ggaugaagaaaucaguagauu

SEQ ID NO: 28032 - RNA, 21 nt, RNAi
uuccuacuucuuuagucaucu

SEQ ID NO: 28033 - DNA, 21 bp, homo sapiens
aatcaaattcaagaccaagag

SEQ ID NO: 28034 - RNA, 21 nt, RNAi
ucaaauucaagaccaagaguu

SEQ ID NO: 28035 - RNA, 21 nt, RNAi
uuaguuuaaguucugguucuc

SEQ ID NO: 28036 - DNA, 21 bp, homo sapiens
aaattcaagaccaagagcagc

SEQ ID NO: 28037 - RNA, 21 nt, RNAi
auucaagaccaagagcagcuu

SEQ ID NO: 28038 - RNA, 21 nt, RNAi
uuuaaguucugguucucgucg

SEQ ID NO: 28039 - DNA, 21 bp, homo sapiens
aattcaagaccaagagcagct

SEQ ID NO: 28040 - RNA, 21 nt, RNAi
uucaagaccaagagcagcuuu

SEQ ID NO: 28041 - RNA, 21 nt, RNAi
uuaaguucugguucucgucga

SEQ ID NO: 28042 - DNA, 21 bp, homo sapiens
aagaccaagagcagcttgtct

SEQ ID NO: 28043 - RNA, 21 nt, RNAi
gaccaagagcagcuugucuuu

SEQ ID NO: 28044 - RNA, 21 nt, RNAi
uucugguucucgucgaacaga

SEQ ID NO: 28045 - DNA, 21 bp, homo sapiens
aagagcagcttgtctctaaac

SEQ ID NO: 28046 - RNA, 21 nt, RNAi
gagcagcuugucucuaaacuu

SEQ ID NO: 28047 - RNA, 21 nt, RNAi
uucucgucgaacagagauuug

SEQ ID NO: 28048 - DNA, 21 bp, homo sapiens
aaggagagcaccaactttgga

SEQ ID NO: 28049 - RNA, 21 nt, RNAi
ggagagcaccaacuuuggauu

SEQ ID NO: 28050 - RNA, 21 nt, RNAi
uuccucucgugguugaaaccu

SEQ ID NO: 28051 - DNA, 21 bp, homo sapiens
aacttagaactgagaaatctg

SEQ ID NO: 28052 - RNA, 21 nt, RNAi
cuuagaacugagaaaucuguu

SEQ ID NO: 28053 - RNA, 21 nt, RNAi
uugaaucuugacucuuuagac

SEQ ID NO: 28054 - DNA, 21 bp, homo sapiens
aactgagaaatctgacagtgg

SEQ ID NO: 28055 - RNA, 21 nt, RNAi
cugagaaaucugacagugguu

SEQ ID NO: 28056 - RNA, 21 nt, RNAi
uugacucuuuagacugucacc

SEQ ID NO: 28057 - DNA, 21 bp, homo sapiens
aaatctgacagtggaattgga

SEQ ID NO: 28058 - RNA, 21 nt, RNAi
aucugacaguggaauuggauu

SEQ ID NO: 28059 - RNA, 21 nt, RNAi
uuuagacugucaccuuaaccu

SEQ ID NO: 28060 - DNA, 21 bp, homo sapiens
aatctgacagtggaattggag

SEQ ID NO: 28061 - RNA, 21 nt, RNAi
ucugacaguggaauuggaguu

SEQ ID NO: 28062 - RNA, 21 nt, RNAi
uuagacugucaccuuaaccuc

SEQ ID NO: 28063 - DNA, 21 bp, homo sapiens
aattggagcagaagatccaag

SEQ ID NO: 28064 - RNA, 21 nt, RNAi
uuggagcagaagauccaaguu

SEQ ID NO: 28065 - RNA, 21 nt, RNAi
uuaaccucgucuucuagguuc

SEQ ID NO: 28066 - DNA, 21 bp, homo sapiens
aagatccaagtgctacaatcc

SEQ ID NO: 28067 - RNA, 21 nt, RNAi
gauccaagugcuacaauccuu

SEQ ID NO: 28068 - RNA, 21 nt, RNAi
uucuagguucacgauguuagg

SEQ ID NO: 28069 - DNA, 21 bp, homo sapiens
aaatgcctctttgcaggacac

SEQ ID NO: 28070 - RNA, 21 nt, RNAi
augccucuuugcaggacacuu

SEQ ID NO: 28071 - RNA, 21 nt, RNAi
uuuacggagaaacguccugug

SEQ ID NO: 28072 - DNA, 21 bp, homo sapiens
aatgcctctttgcaggacaca

SEQ ID NO: 28073 - RNA, 21 nt, RNAi
ugccucuuugcaggacacauu

SEQ ID NO: 28074 - RNA, 21 nt, RNAi
uuacggagaaacguccugugu

SEQ ID NO: 28075 - DNA, 21 bp, homo sapiens
aagtgctgcagagttcttaca

SEQ ID NO: 28076 - RNA, 21 nt, RNAi
gugcugcagaguucuuacauu

SEQ ID NO: 28077 - RNA, 21 nt, RNAi
uucacgacgucucaagaaugu

SEQ ID NO: 28078 - DNA, 21 bp, homo sapiens
aagaatctagagaatgagctt

SEQ ID NO: 28079 - RNA, 21 nt, RNAi
gaaucuagagaaugagcuuuu

SEQ ID NO: 28080 - RNA, 21 nt, RNAi
uucuuagaucucuuacucgaa

SEQ ID NO: 28081 - DNA, 21 bp, homo sapiens
aatctagagaatgagcttgaa

SEQ ID NO: 28082 - RNA, 21 nt, RNAi
ucuagagaaugagcuugaauu

SEQ ID NO: 28083 - RNA, 21 nt, RNAi
uuagaucucuuacucgaacuu

SEQ ID NO: 28084 - DNA, 21 bp, homo sapiens
aaatgactgcaaaggaaactg

SEQ ID NO: 28085 - RNA, 21 nt, RNAi
augacugcaaaggaaacuguu

SEQ ID NO: 28086 - RNA, 21 nt, RNAi
uuuacugacguuuccuuugac

SEQ ID NO: 28087 - DNA, 21 bp, homo sapiens
aatgactgcaaaggaaactga

SEQ ID NO: 28088 - RNA, 21 nt, RNAi
ugacugcaaaggaaacugauu

SEQ ID NO: 28089 - RNA, 21 nt, RNAi
uuacugacguuuccuuugacu

SEQ ID NO: 28090 - DNA, 21 bp, homo sapiens
aaaggaaactgagctgcagag

SEQ ID NO: 28091 - RNA, 21 nt, RNAi
aggaaacugagcugcagaguu

SEQ ID NO: 28092 - RNA, 21 nt, RNAi
uuuccuuugacucgacgucuc

SEQ ID NO: 28093 - DNA, 21 bp, homo sapiens
aaggaaactgagctgcagagg

SEQ ID NO: 28094 - RNA, 21 nt, RNAi
ggaaacugagcugcagagguu

SEQ ID NO: 28095 - RNA, 21 nt, RNAi
uuccuuugacucgacgucucc

SEQ ID NO: 28096 - DNA, 21 bp, homo sapiens
aaatgcatgagatggcacaga

SEQ ID NO: 28097 - RNA, 21 nt, RNAi
augcaugagauggcacagauu

SEQ ID NO: 28098 - RNA, 21 nt, RNAi
uuuacguacucuaccgugucu

SEQ ID NO: 28099 - DNA, 21 bp, homo sapiens
aatgcatgagatggcacagaa

SEQ ID NO: 28100 - RNA, 21 nt, RNAi
ugcaugagauggcacagaauu

SEQ ID NO: 28101 - RNA, 21 nt, RNAi
uuacguacucuaccgugucuu

SEQ ID NO: 28102 - DNA, 21 bp, homo sapiens
aaacagcagagctgcaagaag

SEQ ID NO: 28103 - RNA, 21 nt, RNAi
acagcagagcugcaagaaguu

SEQ ID NO: 28104 - RNA, 21 nt, RNAi
uuugucgucucgacguucuuc

SEQ ID NO: 28105 - DNA, 21 bp, homo sapiens
aacagcagagctgcaagaaga

SEQ ID NO: 28106 - RNA, 21 nt, RNAi
cagcagagcugcaagaagauu

SEQ ID NO: 28107 - RNA, 21 nt, RNAi
uugucgucucgacguucuucu

SEQ ID NO: 28108 - DNA, 21 bp, homo sapiens
aagaagaactcagtggagaga

SEQ ID NO: 28109 - RNA, 21 nt, RNAi
gaagaacucaguggagagauu

SEQ ID NO: 28110 - RNA, 21 nt, RNAi
uucuucuugagucaccucucu

SEQ ID NO: 28111 - DNA, 21 bp, homo sapiens
aaataggctagctggagagtt

SEQ ID NO: 28112 - RNA, 21 nt, RNAi
auaggcuagcuggagaguuuu

SEQ ID NO: 28113 - RNA, 21 nt, RNAi
uuuauccgaucgaccucucaa

SEQ ID NO: 28114 - DNA, 21 bp, homo sapiens
aataggctagctggagagttg

SEQ ID NO: 28115 - RNA, 21 nt, RNAi
uaggcuagcuggagaguuguu

SEQ ID NO: 28116 - RNA, 21 nt, RNAi
uuauccgaucgaccucucaac

SEQ ID NO: 28117 - DNA, 21 bp, homo sapiens
aagaaataaagagcagcaaag

SEQ ID NO: 28118 - RNA, 21 nt, RNAi
gaaauaaagagcagcaaaguu

SEQ ID NO: 28119 - RNA, 21 nt, RNAi
uucuuuauuucucgucguuuc

SEQ ID NO: 28120 - DNA, 21 bp, homo sapiens
aaataaagagcagcaaagatc

SEQ ID NO: 28121 - RNA, 21 nt, RNAi
auaaagagcagcaaagaucuu

SEQ ID NO: 28122 - RNA, 21 nt, RNAi
uuuauuucucgucguuucuag

SEQ ID NO: 28123 - DNA, 21 bp, homo sapiens
aataaagagcagcaaagatca

SEQ ID NO: 28124 - RNA, 21 nt, RNAi
uaaagagcagcaaagaucauu

SEQ ID NO: 28125 - RNA, 21 nt, RNAi
uuauuucucgucguuucuagu

SEQ ID NO: 28126 - DNA, 21 bp, homo sapiens
aaagagcagcaaagatcaatt

SEQ ID NO: 28127 - RNA, 21 nt, RNAi
agagcagcaaagaucaauuuu

SEQ ID NO: 28128 - RNA, 21 nt, RNAi
uuucucgucguuucuaguuaa

SEQ ID NO: 28129 - DNA, 21 bp, homo sapiens
aagagcagcaaagatcaattg

SEQ ID NO: 28130 - RNA, 21 nt, RNAi
gagcagcaaagaucaauuguu

SEQ ID NO: 28131 - RNA, 21 nt, RNAi
uucucgucguuucuaguuaac

SEQ ID NO: 28132 - DNA, 21 bp, homo sapiens
aaagatcaattgaaggagctc

SEQ ID NO: 28133 - RNA, 21 nt, RNAi
agaucaauugaaggagcucuu

SEQ ID NO: 28134 - RNA, 21 nt, RNAi
uuucuaguuaacuuccucgag

SEQ ID NO: 28135 - DNA, 21 bp, homo sapiens
aagatcaattgaaggagctca

SEQ ID NO: 28136 - RNA, 21 nt, RNAi
gaucaauugaaggagcucauu

SEQ ID NO: 28137 - RNA, 21 nt, RNAi
uucuaguuaacuuccucgagu

SEQ ID NO: 28138 - DNA, 21 bp, homo sapiens
aattgaaggagctcacactag

SEQ ID NO: 28139 - RNA, 21 nt, RNAi
uugaaggagcucacacuaguu

SEQ ID NO: 28140 - RNA, 21 nt, RNAi
uuaacuuccucgagugugauc

SEQ ID NO: 28141 - DNA, 21 bp, homo sapiens
aatagtgaattgaagaagagc

SEQ ID NO: 28142 - RNA, 21 nt, RNAi
uagugaauugaagaagagcuu

SEQ ID NO: 28143 - RNA, 21 nt, RNAi
uuaucacuuaacuucuucucg

SEQ ID NO: 28144 - DNA, 21 bp, homo sapiens
aattgaagaagagcctagatt

SEQ ID NO: 28145 - RNA, 21 nt, RNAi
uugaagaagagccuagauuuu

SEQ ID NO: 28146 - RNA, 21 nt, RNAi
uuaacuucuucucggaucuaa

SEQ ID NO: 28147 - DNA, 21 bp, homo sapiens
aagaagagcctagattgcatg

SEQ ID NO: 28148 - RNA, 21 nt, RNAi
gaagagccuagauugcauguu

SEQ ID NO: 28149 - RNA, 21 nt, RNAi
uucuucucggaucuaacguac

SEQ ID NO: 28150 - DNA, 21 bp, homo sapiens
aagagcctagattgcatgcac

SEQ ID NO: 28151 - RNA, 21 nt, RNAi
gagccuagauugcaugcacuu

SEQ ID NO: 28152 - RNA, 21 nt, RNAi
uucucggaucuaacguacgug

SEQ ID NO: 28153 - DNA, 21 bp, homo sapiens
aaagtgagagaggaaatagct

SEQ ID NO: 28154 - RNA, 21 nt, RNAi
agugagagaggaaauagcuuu

SEQ ID NO: 28155 - RNA, 21 nt, RNAi
uuucacucucuccuuuaucga

SEQ ID NO: 28156 - DNA, 21 bp, homo sapiens
aagtgagagaggaaatagctg

SEQ ID NO: 28157 - RNA, 21 nt, RNAi
gugagagaggaaauagcuguu

SEQ ID NO: 28158 - RNA, 21 nt, RNAi
uucacucucuccuuuaucgac

SEQ ID NO: 28159 - DNA, 21 bp, homo sapiens
aaatagctgaatatcagctac

SEQ ID NO: 28160 - RNA, 21 nt, RNAi
auagcugaauaucagcuacuu

SEQ ID NO: 28161 - RNA, 21 nt, RNAi
uuuaucgacuuauagucgaug

SEQ ID NO: 28162 - DNA, 21 bp, homo sapiens
aatagctgaatatcagctacg

SEQ ID NO: 28163 - RNA, 21 nt, RNAi
uagcugaauaucagcuacguu

SEQ ID NO: 28164 - RNA, 21 nt, RNAi
uuaucgacuuauagucgaugc

SEQ ID NO: 28165 - DNA, 21 bp, homo sapiens
aatatcagctacggcttcatg

SEQ ID NO: 28166 - RNA, 21 nt, RNAi
uaucagcuacggcuucauguu

SEQ ID NO: 28167 - RNA, 21 nt, RNAi
uuauagucgaugccgaaguac

SEQ ID NO: 28168 - DNA, 21 bp, homo sapiens
aaagaaacaccaggctttgct

SEQ ID NO: 28169 - RNA, 21 nt, RNAi
agaaacaccaggcuuugcuuu

SEQ ID NO: 28170 - RNA, 21 nt, RNAi
uuucuuugugguccgaaacga

SEQ ID NO: 28171 - DNA, 21 bp, homo sapiens
aagaaacaccaggctttgctt

SEQ ID NO: 28172 - RNA, 21 nt, RNAi
gaaacaccaggcuuugcuuuu

SEQ ID NO: 28173 - RNA, 21 nt, RNAi
uucuuugugguccgaaacgaa

SEQ ID NO: 28174 - DNA, 21 bp, homo sapiens
aacagtatgaagtagaaatcc

SEQ ID NO: 28175 - RNA, 21 nt, RNAi
caguaugaaguagaaauccuu

SEQ ID NO: 28176 - RNA, 21 nt, RNAi
uugucauacuucaucuuuagg

SEQ ID NO: 28177 - DNA, 21 bp, homo sapiens
aagtagaaatccagacatacc

SEQ ID NO: 28178 - RNA, 21 nt, RNAi
guagaaauccagacauaccuu

SEQ ID NO: 28179 - RNA, 21 nt, RNAi
uucaucuuuaggucuguaugg

SEQ ID NO: 28180 - DNA, 21 bp, homo sapiens
aaatccagacataccaagaga

SEQ ID NO: 28181 - RNA, 21 nt, RNAi
auccagacauaccaagagauu

SEQ ID NO: 28182 - RNA, 21 nt, RNAi
uuuaggucuguaugguucucu

SEQ ID NO: 28183 - DNA, 21 bp, homo sapiens
aatccagacataccaagagaa

SEQ ID NO: 28184 - RNA, 21 nt, RNAi
uccagacauaccaagagaauu

SEQ ID NO: 28185 - RNA, 21 nt, RNAi
uuaggucuguaugguucucuu

SEQ ID NO: 28186 - DNA, 21 bp, homo sapiens
aaagaagaatgtctcagttca

SEQ ID NO: 28187 - RNA, 21 nt, RNAi
agaagaaugucucaguucauu

SEQ ID NO: 28188 - RNA, 21 nt, RNAi
uuucuucuuacagagucaagu

SEQ ID NO: 28189 - DNA, 21 bp, homo sapiens
aagaagaatgtctcagttcac

SEQ ID NO: 28190 - RNA, 21 nt, RNAi
gaagaaugucucaguucacuu

SEQ ID NO: 28191 - RNA, 21 nt, RNAi
uucuucuuacagagucaagug

SEQ ID NO: 28192 - DNA, 21 bp, homo sapiens
aagaatgtctcagttcacaga

SEQ ID NO: 28193 - RNA, 21 nt, RNAi
gaaugucucaguucacagauu

SEQ ID NO: 28194 - RNA, 21 nt, RNAi
uucuuacagagucaagugucu

SEQ ID NO: 28195 - DNA, 21 bp, homo sapiens
aatgtctcagttcacagaagc

SEQ ID NO: 28196 - RNA, 21 nt, RNAi
ugucucaguucacagaagcuu

SEQ ID NO: 28197 - RNA, 21 nt, RNAi
uuacagagucaagugucuucg

SEQ ID NO: 28198 - DNA, 21 bp, homo sapiens
aaagtctagtaaagaagagct

SEQ ID NO: 28199 - RNA, 21 nt, RNAi
agucuaguaaagaagagcuuu

SEQ ID NO: 28200 - RNA, 21 nt, RNAi
uuucagaucauuucuucucga

SEQ ID NO: 28201 - DNA, 21 bp, homo sapiens
aagtctagtaaagaagagctc

SEQ ID NO: 28202 - RNA, 21 nt, RNAi
gucuaguaaagaagagcucuu

SEQ ID NO: 28203 - RNA, 21 nt, RNAi
uucagaucauuucuucucgag

SEQ ID NO: 28204 - DNA, 21 bp, homo sapiens
aaaccaagatggacaatctaa

SEQ ID NO: 28205 - RNA, 21 nt, RNAi
accaagauggacaaucuaauu

SEQ ID NO: 28206 - RNA, 21 nt, RNAi
uuugguucuaccuguuagauu

SEQ ID NO: 28207 - DNA, 21 bp, homo sapiens
aaccaagatggacaatctaaa

SEQ ID NO: 28208 - RNA, 21 nt, RNAi
ccaagauggacaaucuaaauu

SEQ ID NO: 28209 - RNA, 21 nt, RNAi
uugguucuaccuguuagauuu

SEQ ID NO: 28210 - DNA, 21 bp, homo sapiens
aagttgttgatcaaatcctgt

SEQ ID NO: 28211 - RNA, 21 nt, RNAi
guuguugaucaaauccuguuu

SEQ ID NO: 28212 - RNA, 21 nt, RNAi
uucaacaacuaguuuaggaca

SEQ ID NO: 28213 - DNA, 21 bp, homo sapiens
aaatcctgtaaacagctggaa

SEQ ID NO: 28214 - RNA, 21 nt, RNAi
auccuguaaacagcuggaauu

SEQ ID NO: 28215 - RNA, 21 nt, RNAi
uuuaggacauuugucgaccuu

SEQ ID NO: 28216 - DNA, 21 bp, homo sapiens
aatcctgtaaacagctggaag

SEQ ID NO: 28217 - RNA, 21 nt, RNAi
uccuguaaacagcuggaaguu

SEQ ID NO: 28218 - RNA, 21 nt, RNAi
uuaggacauuugucgaccuuc

SEQ ID NO: 28219 - DNA, 21 bp, homo sapiens
aaaggagatactgcagaaaga

SEQ ID NO: 28220 - RNA, 21 nt, RNAi
aggagauacugcagaaagauu

SEQ ID NO: 28221 - RNA, 21 nt, RNAi
uuuccucuaugacgucuuucu

SEQ ID NO: 28222 - DNA, 21 bp, homo sapiens
aaggagatactgcagaaagaa

SEQ ID NO: 28223 - RNA, 21 nt, RNAi
ggagauacugcagaaagaauu

SEQ ID NO: 28224 - RNA, 21 nt, RNAi
uuccucuaugacgucuuucuu

SEQ ID NO: 28225 - DNA, 21 bp, homo sapiens
aaagaactctctcaacttcaa

SEQ ID NO: 28226 - RNA, 21 nt, RNAi
agaacucucucaacuucaauu

SEQ ID NO: 28227 - RNA, 21 nt, RNAi
uuucuugagagaguugaaguu

SEQ ID NO: 28228 - DNA, 21 bp, homo sapiens
aagaactctctcaacttcaag

SEQ ID NO: 28229 - RNA, 21 nt, RNAi
gaacucucucaacuucaaguu

SEQ ID NO: 28230 - RNA, 21 nt, RNAi
uucuugagagaguugaaguuc

SEQ ID NO: 28231 - DNA, 21 bp, homo sapiens
aactctctcaacttcaagctg

SEQ ID NO: 28232 - RNA, 21 nt, RNAi
cucucucaacuucaagcuguu

SEQ ID NO: 28233 - RNA, 21 nt, RNAi
uugagagaguugaaguucgac

SEQ ID NO: 28234 - DNA, 21 bp, homo sapiens
aacttcaagctgcacaggaga

SEQ ID NO: 28235 - RNA, 21 nt, RNAi
cuucaagcugcacaggagauu

SEQ ID NO: 28236 - RNA, 21 nt, RNAi
uugaaguucgacguguccucu

SEQ ID NO: 28237 - DNA, 21 bp, homo sapiens
aagctgcacaggagaagcaga

SEQ ID NO: 28238 - RNA, 21 nt, RNAi
gcugcacaggagaagcagauu

SEQ ID NO: 28239 - RNA, 21 nt, RNAi
uucgacguguccucuucgucu

SEQ ID NO: 28240 - DNA, 21 bp, homo sapiens
aaacaggtactgttatggata

SEQ ID NO: 28241 - RNA, 21 nt, RNAi
acagguacuguuauggauauu

SEQ ID NO: 28242 - RNA, 21 nt, RNAi
uuuguccaugacaauaccuau

SEQ ID NO: 28243 - DNA, 21 bp, homo sapiens
aacaggtactgttatggatac

SEQ ID NO: 28244 - RNA, 21 nt, RNAi
cagguacuguuauggauacuu

SEQ ID NO: 28245 - RNA, 21 nt, RNAi
uuguccaugacaauaccuaug

SEQ ID NO: 28246 - DNA, 21 bp, homo sapiens
aaggtcgatgaattaacaact

SEQ ID NO: 28247 - RNA, 21 nt, RNAi
ggucgaugaauuaacaacuuu

SEQ ID NO: 28248 - RNA, 21 nt, RNAi
uuccagcuacuuaauuguuga

SEQ ID NO: 28249 - DNA, 21 bp, homo sapiens
aacaactgagatcaaagaact

SEQ ID NO: 28250 - RNA, 21 nt, RNAi
caacugagaucaaagaacuuu

SEQ ID NO: 28251 - RNA, 21 nt, RNAi
uuguugacucuaguuucuuga

SEQ ID NO: 28252 - DNA, 21 bp, homo sapiens
aactgagatcaaagaactgaa

SEQ ID NO: 28253 - RNA, 21 nt, RNAi
cugagaucaaagaacugaauu

SEQ ID NO: 28254 - RNA, 21 nt, RNAi
uugacucuaguuucuugacuu

SEQ ID NO: 28255 - DNA, 21 bp, homo sapiens
aagaactgaaagaaactcttg

SEQ ID NO: 28256 - RNA, 21 nt, RNAi
gaacugaaagaaacucuuguu

SEQ ID NO: 28257 - RNA, 21 nt, RNAi
uucuugacuuucuuugagaac

SEQ ID NO: 28258 - DNA, 21 bp, homo sapiens
aactgaaagaaactcttgaag

SEQ ID NO: 28259 - RNA, 21 nt, RNAi
cugaaagaaacucuugaaguu

SEQ ID NO: 28260 - RNA, 21 nt, RNAi
uugacuuucuuugagaacuuc

SEQ ID NO: 28261 - DNA, 21 bp, homo sapiens
aaaccaaggaggcagatgaat

SEQ ID NO: 28262 - RNA, 21 nt, RNAi
accaaggaggcagaugaauuu

SEQ ID NO: 28263 - RNA, 21 nt, RNAi
uuugguuccuccgucuacuua

SEQ ID NO: 28264 - DNA, 21 bp, homo sapiens
aaccaaggaggcagatgaata

SEQ ID NO: 28265 - RNA, 21 nt, RNAi
ccaaggaggcagaugaauauu

SEQ ID NO: 28266 - RNA, 21 nt, RNAi
uugguuccuccgucuacuuau

SEQ ID NO: 28267 - DNA, 21 bp, homo sapiens
aaggaggcagatgaatacttg

SEQ ID NO: 28268 - RNA, 21 nt, RNAi
ggaggcagaugaauacuuguu

SEQ ID NO: 28269 - RNA, 21 nt, RNAi
uuccuccgucuacuuaugaac

SEQ ID NO: 28270 - DNA, 21 bp, homo sapiens
aagtactgttccttgcttata

SEQ ID NO: 28271 - RNA, 21 nt, RNAi
guacuguuccuugcuuauauu

SEQ ID NO: 28272 - RNA, 21 nt, RNAi
uucaugacaaggaacgaauau

SEQ ID NO: 28273 - DNA, 21 bp, homo sapiens
aagttagagaaagctaaagag

SEQ ID NO: 28274 - RNA, 21 nt, RNAi
guuagagaaagcuaaagaguu

SEQ ID NO: 28275 - RNA, 21 nt, RNAi
uucaaucucuuucgauuucuc

SEQ ID NO: 28276 - DNA, 21 bp, homo sapiens
aaagctaaagagatgttagag

SEQ ID NO: 28277 - RNA, 21 nt, RNAi
agcuaaagagauguuagaguu

SEQ ID NO: 28278 - RNA, 21 nt, RNAi
uuucgauuucucuacaaucuc

SEQ ID NO: 28279 - DNA, 21 bp, homo sapiens
aagctaaagagatgttagaga

SEQ ID NO: 28280 - RNA, 21 nt, RNAi
gcuaaagagauguuagagauu

SEQ ID NO: 28281 - RNA, 21 nt, RNAi
uucgauuucucuacaaucucu

SEQ ID NO: 28282 - DNA, 21 bp, homo sapiens
aaagagatgttagagacacaa

SEQ ID NO: 28283 - RNA, 21 nt, RNAi
agagauguuagagacacaauu

SEQ ID NO: 28284 - RNA, 21 nt, RNAi
uuucucuacaaucucuguguu

SEQ ID NO: 28285 - DNA, 21 bp, homo sapiens
aagagatgttagagacacaag

SEQ ID NO: 28286 - RNA, 21 nt, RNAi
gagauguuagagacacaaguu

SEQ ID NO: 28287 - RNA, 21 nt, RNAi
uucucuacaaucucuguguuc

SEQ ID NO: 28288 - DNA, 21 bp, homo sapiens
aaagaggttatcatctggcca

SEQ ID NO: 28289 - RNA, 21 nt, RNAi
agagguuaucaucuggccauu

SEQ ID NO: 28290 - RNA, 21 nt, RNAi
uuucuccaauaguagaccggu

SEQ ID NO: 28291 - DNA, 21 bp, homo sapiens
aagaggttatcatctggccaa

SEQ ID NO: 28292 - RNA, 21 nt, RNAi
gagguuaucaucuggccaauu

SEQ ID NO: 28293 - RNA, 21 nt, RNAi
uucuccaauaguagaccgguu

SEQ ID NO: 28294 - DNA, 21 bp, homo sapiens
aaataaagcttcaggcaagag

SEQ ID NO: 28295 - RNA, 21 nt, RNAi
auaaagcuucaggcaagaguu

SEQ ID NO: 28296 - RNA, 21 nt, RNAi
uuuauuucgaaguccguucuc

SEQ ID NO: 28297 - DNA, 21 bp, homo sapiens
aataaagcttcaggcaagagg

SEQ ID NO: 28298 - RNA, 21 nt, RNAi
uaaagcuucaggcaagagguu

SEQ ID NO: 28299 - RNA, 21 nt, RNAi
uuauuucgaaguccguucucc

SEQ ID NO: 28300 - DNA, 21 bp, homo sapiens
aaagcttcaggcaagaggcaa

SEQ ID NO: 28301 - RNA, 21 nt, RNAi
agcuucaggcaagaggcaauu

SEQ ID NO: 28302 - RNA, 21 nt, RNAi
uuucgaaguccguucuccguu

SEQ ID NO: 28303 - DNA, 21 bp, homo sapiens
aagcttcaggcaagaggcaaa

SEQ ID NO: 28304 - RNA, 21 nt, RNAi
gcuucaggcaagaggcaaauu

SEQ ID NO: 28305 - RNA, 21 nt, RNAi
uucgaaguccguucuccguuu

SEQ ID NO: 28306 - DNA, 21 bp, homo sapiens
aagaggcaaagatccagtgga

SEQ ID NO: 28307 - RNA, 21 nt, RNAi
gaggcaaagauccaguggauu

SEQ ID NO: 28308 - RNA, 21 nt, RNAi
uucuccguuucuaggucaccu

SEQ ID NO: 28309 - DNA, 21 bp, homo sapiens
aatggtagaggaccaacacct

SEQ ID NO: 28310 - RNA, 21 nt, RNAi
ugguagaggaccaacaccuuu

SEQ ID NO: 28311 - RNA, 21 nt, RNAi
uuaccaucuccugguugugga

SEQ ID NO: 28312 - DNA, 21 bp, homo sapiens
aaagcaagaaagcagtcatga

SEQ ID NO: 28313 - RNA, 21 nt, RNAi
agcaagaaagcagucaugauu

SEQ ID NO: 28314 - RNA, 21 nt, RNAi
uuucguucuuucgucaguacu

SEQ ID NO: 28315 - DNA, 21 bp, homo sapiens
aagcaagaaagcagtcatgag

SEQ ID NO: 28316 - RNA, 21 nt, RNAi
gcaagaaagcagucaugaguu

SEQ ID NO: 28317 - RNA, 21 nt, RNAi
uucguucuuucgucaguacuc

SEQ ID NO: 28318 - DNA, 21 bp, homo sapiens
aagaaagcagtcatgagtggt

SEQ ID NO: 28319 - RNA, 21 nt, RNAi
gaaagcagucaugagugguuu

SEQ ID NO: 28320 - RNA, 21 nt, RNAi
uucuuucgucaguacucacca

SEQ ID NO: 28321 - DNA, 21 bp, homo sapiens
aaagcagtcatgagtggtatt

SEQ ID NO: 28322 - RNA, 21 nt, RNAi
agcagucaugagugguauuuu

SEQ ID NO: 28323 - RNA, 21 nt, RNAi
uuucgucaguacucaccauaa

SEQ ID NO: 28324 - DNA, 21 bp, homo sapiens
aagcagtcatgagtggtattc

SEQ ID NO: 28325 - RNA, 21 nt, RNAi
gcagucaugagugguauucuu

SEQ ID NO: 28326 - RNA, 21 nt, RNAi
uucgucaguacucaccauaag

SEQ ID NO: 28327 - DNA, 21 bp, homo sapiens
aagacacggaaggtactgagt

SEQ ID NO: 28328 - RNA, 21 nt, RNAi
gacacggaagguacugaguuu

SEQ ID NO: 28329 - RNA, 21 nt, RNAi
uucugugccuuccaugacuca

SEQ ID NO: 28330 - DNA, 21 bp, homo sapiens
aaggtactgagtttgagccag

SEQ ID NO: 28331 - RNA, 21 nt, RNAi
gguacugaguuugagccaguu

SEQ ID NO: 28332 - RNA, 21 nt, RNAi
uuccaugacucaaacucgguc

SEQ ID NO: 28333 - DNA, 21 bp, homo sapiens
aagaacaaccatggcaactcg

SEQ ID NO: 28334 - RNA, 21 nt, RNAi
gaacaaccauggcaacucguu

SEQ ID NO: 28335 - RNA, 21 nt, RNAi
uucuuguugguaccguugagc

SEQ ID NO: 28336 - DNA, 21 bp, homo sapiens
aacaaccatggcaactcggac

SEQ ID NO: 28337 - RNA, 21 nt, RNAi
caaccauggcaacucggacuu

SEQ ID NO: 28338 - RNA, 21 nt, RNAi
uuguugguaccguugagccug

SEQ ID NO: 28339 - DNA, 21 bp, homo sapiens
aaccatggcaactcggaccag

SEQ ID NO: 28340 - RNA, 21 nt, RNAi
ccauggcaacucggaccaguu

SEQ ID NO: 28341 - RNA, 21 nt, RNAi
uugguaccguugagccugguc

SEQ ID NO: 28342 - DNA, 21 bp, homo sapiens
aaatcttgcagagtcctccaa

SEQ ID NO: 28343 - RNA, 21 nt, RNAi
aucuugcagaguccuccaauu

SEQ ID NO: 28344 - RNA, 21 nt, RNAi
uuuagaacgucucaggagguu

SEQ ID NO: 28345 - DNA, 21 bp, homo sapiens
aatcttgcagagtcctccaaa

SEQ ID NO: 28346 - RNA, 21 nt, RNAi
ucuugcagaguccuccaaauu

SEQ ID NO: 28347 - RNA, 21 nt, RNAi
uuagaacgucucaggagguuu

SEQ ID NO: 28348 - DNA, 21 bp, homo sapiens
aaaccaacagctggtggcagc

SEQ ID NO: 28349 - RNA, 21 nt, RNAi
accaacagcugguggcagcuu

SEQ ID NO: 28350 - RNA, 21 nt, RNAi
uuugguugucgaccaccgucg

SEQ ID NO: 28351 - DNA, 21 bp, homo sapiens
aaccaacagctggtggcagca

SEQ ID NO: 28352 - RNA, 21 nt, RNAi
ccaacagcugguggcagcauu

SEQ ID NO: 28353 - RNA, 21 nt, RNAi
uugguugucgaccaccgucgu

SEQ ID NO: 28354 - DNA, 21 bp, homo sapiens
aacagctggtggcagcagatc

SEQ ID NO: 28355 - RNA, 21 nt, RNAi
cagcugguggcagcagaucuu

SEQ ID NO: 28356 - RNA, 21 nt, RNAi
uugucgaccaccgucgucuag

SEQ ID NO: 28357 - DNA, 21 bp, homo sapiens
aaaggtcaaagttgctcagcg

SEQ ID NO: 28358 - RNA, 21 nt, RNAi
aggucaaaguugcucagcguu

SEQ ID NO: 28359 - RNA, 21 nt, RNAi
uuuccaguuucaacgagucgc

SEQ ID NO: 28360 - DNA, 21 bp, homo sapiens
aaggtcaaagttgctcagcgg

SEQ ID NO: 28361 - RNA, 21 nt, RNAi
ggucaaaguugcucagcgguu

SEQ ID NO: 28362 - RNA, 21 nt, RNAi
uuccaguuucaacgagucgcc

SEQ ID NO: 28363 - DNA, 21 bp, homo sapiens
aataatcttcctgagagaagt

SEQ ID NO: 28364 - RNA, 21 nt, RNAi
uaaucuuccugagagaaguuu

SEQ ID NO: 28365 - RNA, 21 nt, RNAi
uuauuagaaggacucucuuca

SEQ ID NO: 28366 - DNA, 21 bp, homo sapiens
aatcttcctgagagaagtccg

SEQ ID NO: 28367 - RNA, 21 nt, RNAi
ucuuccugagagaaguccguu

SEQ ID NO: 28368 - RNA, 21 nt, RNAi
uuagaaggacucucuucaggc

SEQ ID NO: 28369 - DNA, 21 bp, homo sapiens
aaagctggactggagtccaac

SEQ ID NO: 28370 - RNA, 21 nt, RNAi
agcuggacuggaguccaacuu

SEQ ID NO: 28371 - RNA, 21 nt, RNAi
uuucgaccugaccucagguug

SEQ ID NO: 28372 - DNA, 21 bp, homo sapiens
aagctggactggagtccaacg

SEQ ID NO: 28373 - RNA, 21 nt, RNAi
gcuggacuggaguccaacguu

SEQ ID NO: 28374 - RNA, 21 nt, RNAi
uucgaccugaccucagguugc

SEQ ID NO: 28375 - DNA, 21 bp, homo sapiens
aacggcagtgagaactgtaag

SEQ ID NO: 28376 - RNA, 21 nt, RNAi
cggcagugagaacuguaaguu

SEQ ID NO: 28377 - RNA, 21 nt, RNAi
uugccgucacucuugacauuc

SEQ ID NO: 28378 - DNA, 21 bp, homo sapiens
aactgtaaggtccagtgaagg

SEQ ID NO: 28379 - RNA, 21 nt, RNAi
cuguaagguccagugaagguu

SEQ ID NO: 28380 - RNA, 21 nt, RNAi
uugacauuccaggucacuucc

SEQ ID NO: 28381 - DNA, 21 bp, homo sapiens
aaggtccagtgaaggcacttt

SEQ ID NO: 28382 - RNA, 21 nt, RNAi
gguccagugaaggcacuuuuu

SEQ ID NO: 28383 - RNA, 21 nt, RNAi
uuccaggucacuuccgugaaa

SEQ ID NO: 28384 - DNA, 21 bp, homo sapiens
aaggcactttgtgtgtcagta

SEQ ID NO: 28385 - RNA, 21 nt, RNAi
ggcacuuugugugucaguauu

SEQ ID NO: 28386 - RNA, 21 nt, RNAi
uuccgugaaacacacagucau

SEQ ID NO: 28387 - DNA, 21 bp, homo sapiens
aatagataaggctgtgcctac

SEQ ID NO: 28388 - RNA, 21 nt, RNAi
uagauaaggcugugccuacuu

SEQ ID NO: 28389 - RNA, 21 nt, RNAi
uuaucuauuccgacacggaug

SEQ ID NO: 28390 - DNA, 21 bp, homo sapiens
aaggctgtgcctacaggactt

SEQ ID NO: 28391 - RNA, 21 nt, RNAi
ggcugugccuacaggacuuuu

SEQ ID NO: 28392 - RNA, 21 nt, RNAi
uuccgacacggauguccugaa

SEQ ID NO: 28393 - DNA, 21 bp, homo sapiens
aaagtttggaagcactgatca

SEQ ID NO: 28394 - RNA, 21 nt, RNAi
aguuuggaagcacugaucauu

SEQ ID NO: 28395 - RNA, 21 nt, RNAi
uuucaaaccuucgugacuagu

SEQ ID NO: 28396 - DNA, 21 bp, homo sapiens
aagtttggaagcactgatcac

SEQ ID NO: 28397 - RNA, 21 nt, RNAi
guuuggaagcacugaucacuu

SEQ ID NO: 28398 - RNA, 21 nt, RNAi
uucaaaccuucgugacuagug

SEQ ID NO: 28399 - DNA, 21 bp, homo sapiens
aagcactgatcacctgttagc

SEQ ID NO: 28400 - RNA, 21 nt, RNAi
gcacugaucaccuguuagcuu

SEQ ID NO: 28401 - RNA, 21 nt, RNAi
uucgugacuaguggacaaucg

SEQ ID NO: 28402 - DNA, 21 bp, homo sapiens
aaatgacaagcactatatcac

SEQ ID NO: 28403 - RNA, 21 nt, RNAi
augacaagcacuauaucacuu

SEQ ID NO: 28404 - RNA, 21 nt, RNAi
uuuacuguucgugauauagug

SEQ ID NO: 28405 - DNA, 21 bp, homo sapiens
aatgacaagcactatatcaca

SEQ ID NO: 28406 - RNA, 21 nt, RNAi
ugacaagcacuauaucacauu

SEQ ID NO: 28407 - RNA, 21 nt, RNAi
uuacuguucgugauauagugu

SEQ ID NO: 28408 - DNA, 21 bp, homo sapiens
aagcactatatcacaatctct

SEQ ID NO: 28409 - RNA, 21 nt, RNAi
gcacuauaucacaaucucuuu

SEQ ID NO: 28410 - RNA, 21 nt, RNAi
uucgugauauaguguuagaga

SEQ ID NO: 28411 - DNA, 21 bp, homo sapiens
aatttctcagagctgagtaaa

SEQ ID NO: 28412 - RNA, 21 nt, RNAi
uuucucagagcugaguaaauu

SEQ ID NO: 28413 - RNA, 21 nt, RNAi
uuaaagagucucgacucauuu

SEQ ID NO: 28414 - DNA, 21 bp, homo sapiens
aaatgtgcacacatatacatg

SEQ ID NO: 28415 - RNA, 21 nt, RNAi
augugcacacauauacauguu

SEQ ID NO: 28416 - RNA, 21 nt, RNAi
uuuacacguguguauauguac

SEQ ID NO: 28417 - DNA, 21 bp, homo sapiens
aatgtgcacacatatacatgt

SEQ ID NO: 28418 - RNA, 21 nt, RNAi
ugugcacacauauacauguuu

SEQ ID NO: 28419 - RNA, 21 nt, RNAi
uuacacguguguauauguaca

SEQ ID NO: 28420 - DNA, 21 bp, homo sapiens
aaacctgtacatatgtgtgtg

SEQ ID NO: 28421 - RNA, 21 nt, RNAi
accuguacauauguguguguu

SEQ ID NO: 28422 - RNA, 21 nt, RNAi
uuuggacauguauacacacac

SEQ ID NO: 28423 - DNA, 21 bp, homo sapiens
aacctgtacatatgtgtgtgt

SEQ ID NO: 28424 - RNA, 21 nt, RNAi
ccuguacauauguguguguuu

SEQ ID NO: 28425 - RNA, 21 nt, RNAi
uuggacauguauacacacaca

SEQ ID NO: 28426 - DNA, 21 bp, homo sapiens
aagcattgtcgtatctggtga

SEQ ID NO: 28427 - RNA, 21 nt, RNAi
gcauugucguaucuggugauu

SEQ ID NO: 28428 - RNA, 21 nt, RNAi
uucguaacagcauagaccacu

SEQ ID NO: 28429 - DNA, 21 bp, homo sapiens
caaactggtctcggattagtg

SEQ ID NO: 28430 - RNA, 21 nt, RNAi
aacuggucucggauuaguguu

SEQ ID NO: 28431 - RNA, 21 nt, RNAi
uuuugaccagagccuaaucac

SEQ ID NO: 28432 - DNA, 21 bp, homo sapiens
caagagcttgaaggacagctt

SEQ ID NO: 28433 - RNA, 21 nt, RNAi
agagcuugaaggacagcuuuu

SEQ ID NO: 28434 - RNA, 21 nt, RNAi
uuucucgaacuuccugucgaa

SEQ ID NO: 28435 - DNA, 21 bp, homo sapiens
cagcttgacaaactgaagaag

SEQ ID NO: 28436 - RNA, 21 nt, RNAi
gcuugacaaacugaagaaguu

SEQ ID NO: 28437 - RNA, 21 nt, RNAi
uucgaacuguuugacuucuuc

SEQ ID NO: 28438 - DNA, 21 bp, homo sapiens
cagcaaaggcagtttcagctt

SEQ ID NO: 28439 - RNA, 21 nt, RNAi
gcaaaggcaguuucagcuuuu

SEQ ID NO: 28440 - RNA, 21 nt, RNAi
uucguuuccgucaaagucgaa

SEQ ID NO: 28441 - DNA, 21 bp, homo sapiens
caaaggcagtttcagcttgac

SEQ ID NO: 28442 - RNA, 21 nt, RNAi
aaggcaguuucagcuugacuu

SEQ ID NO: 28443 - RNA, 21 nt, RNAi
uuuuccgucaaagucgaacug

SEQ ID NO: 28444 - DNA, 21 bp, homo sapiens
cagtttcagcttgacagtctc

SEQ ID NO: 28445 - RNA, 21 nt, RNAi
guuucagcuugacagucucuu

SEQ ID NO: 28446 - RNA, 21 nt, RNAi
uucaaagucgaacugucagag

SEQ ID NO: 28447 - DNA, 21 bp, homo sapiens
cagcttgacagtctcgaggct

SEQ ID NO: 28448 - RNA, 21 nt, RNAi
gcuugacagucucgaggcuuu

SEQ ID NO: 28449 - RNA, 21 nt, RNAi
uucgaacugucagagcuccga

SEQ ID NO: 28450 - DNA, 21 bp, homo sapiens
cagaagatttctcatgaactt

SEQ ID NO: 28451 - RNA, 21 nt, RNAi
gaagauuucucaugaacuuuu

SEQ ID NO: 28452 - RNA, 21 nt, RNAi
uucuucuaaagaguacuugaa

SEQ ID NO: 28453 - DNA, 21 bp, homo sapiens
catgaacttcaagtcaaggag

SEQ ID NO: 28454 - RNA, 21 nt, RNAi
ugaacuucaagucaaggaguu

SEQ ID NO: 28455 - RNA, 21 nt, RNAi
uuacuugaaguucaguuccuc

SEQ ID NO: 28456 - DNA, 21 bp, homo sapiens
caagtcaaggagtcacaagtg

SEQ ID NO: 28457 - RNA, 21 nt, RNAi
agucaaggagucacaaguguu

SEQ ID NO: 28458 - RNA, 21 nt, RNAi
uuucaguuccucaguguucac

SEQ ID NO: 28459 - DNA, 21 bp, homo sapiens
caaggagtcacaagtgaattt

SEQ ID NO: 28460 - RNA, 21 nt, RNAi
aggagucacaagugaauuuuu

SEQ ID NO: 28461 - RNA, 21 nt, RNAi
uuuccucaguguucacuuaaa

SEQ ID NO: 28462 - DNA, 21 bp, homo sapiens
cacaagtgaatttccaggaag

SEQ ID NO: 28463 - RNA, 21 nt, RNAi
caagugaauuuccaggaaguu

SEQ ID NO: 28464 - RNA, 21 nt, RNAi
uuguucacuuaaagguccuuc

SEQ ID NO: 28465 - DNA, 21 bp, homo sapiens
caagtgaatttccaggaagga

SEQ ID NO: 28466 - RNA, 21 nt, RNAi
agugaauuuccaggaaggauu

SEQ ID NO: 28467 - RNA, 21 nt, RNAi
uuucacuuaaagguccuuccu

SEQ ID NO: 28468 - DNA, 21 bp, homo sapiens
caggaaggacaactgaattca

SEQ ID NO: 28469 - RNA, 21 nt, RNAi
ggaaggacaacugaauucauu

SEQ ID NO: 28470 - RNA, 21 nt, RNAi
uuccuuccuguugacuuaagu

SEQ ID NO: 28471 - DNA, 21 bp, homo sapiens
caacaagctgcgcagtctgca

SEQ ID NO: 28472 - RNA, 21 nt, RNAi
acaagcugcgcagucugcauu

SEQ ID NO: 28473 - RNA, 21 nt, RNAi
uuuguucgacgcgucagacgu

SEQ ID NO: 28474 - DNA, 21 bp, homo sapiens
caagctgcgcagtctgcagat

SEQ ID NO: 28475 - RNA, 21 nt, RNAi
agcugcgcagucugcagauuu

SEQ ID NO: 28476 - RNA, 21 nt, RNAi
uuucgacgcgucagacgucua

SEQ ID NO: 28477 - DNA, 21 bp, homo sapiens
cagtctgcagatgtctctctg

SEQ ID NO: 28478 - RNA, 21 nt, RNAi
gucugcagaugucucucuguu

SEQ ID NO: 28479 - RNA, 21 nt, RNAi
uucagacgucuacagagagac

SEQ ID NO: 28480 - DNA, 21 bp, homo sapiens
cagatgtctctctgaatccat

SEQ ID NO: 28481 - RNA, 21 nt, RNAi
gaugucucucugaauccauuu

SEQ ID NO: 28482 - RNA, 21 nt, RNAi
uucuacagagagacuuaggua

SEQ ID NO: 28483 - DNA, 21 bp, homo sapiens
caactccactaacaccaagtc

SEQ ID NO: 28484 - RNA, 21 nt, RNAi
acuccacuaacaccaagucuu

SEQ ID NO: 28485 - RNA, 21 nt, RNAi
uuugaggugauugugguucag

SEQ ID NO: 28486 - DNA, 21 bp, homo sapiens
cactaacaccaagtcaatatt

SEQ ID NO: 28487 - RNA, 21 nt, RNAi
cuaacaccaagucaauauuuu

SEQ ID NO: 28488 - RNA, 21 nt, RNAi
uugauugugguucaguuauaa

SEQ ID NO: 28489 - DNA, 21 bp, homo sapiens
caccaagtcaatattatagtg

SEQ ID NO: 28490 - RNA, 21 nt, RNAi
ccaagucaauauuauaguguu

SEQ ID NO: 28491 - RNA, 21 nt, RNAi
uugguucaguuauaauaucac

SEQ ID NO: 28492 - DNA, 21 bp, homo sapiens
caatattatagtggttccaag

SEQ ID NO: 28493 - RNA, 21 nt, RNAi
auauuauagugguuccaaguu

SEQ ID NO: 28494 - RNA, 21 nt, RNAi
uuuauaauaucaccaagguuc

SEQ ID NO: 28495 - DNA, 21 bp, homo sapiens
cagaggttaaagccttgcagg

SEQ ID NO: 28496 - RNA, 21 nt, RNAi
gagguuaaagccuugcagguu

SEQ ID NO: 28497 - RNA, 21 nt, RNAi
uucuccaauuucggaacgucc

SEQ ID NO: 28498 - DNA, 21 bp, homo sapiens
caagccagactcttccacaag

SEQ ID NO: 28499 - RNA, 21 nt, RNAi
agccagacucuuccacaaguu

SEQ ID NO: 28500 - RNA, 21 nt, RNAi
uuucggucugagaagguguuc

SEQ ID NO: 28501 - DNA, 21 bp, homo sapiens
cagactcttccacaagccacc

SEQ ID NO: 28502 - RNA, 21 nt, RNAi
gacucuuccacaagccaccuu

SEQ ID NO: 28503 - RNA, 21 nt, RNAi
uucugagaagguguucggugg

SEQ ID NO: 28504 - DNA, 21 bp, homo sapiens
cacaagccaccatgaatcacc

SEQ ID NO: 28505 - RNA, 21 nt, RNAi
caagccaccaugaaucaccuu

SEQ ID NO: 28506 - RNA, 21 nt, RNAi
uuguucggugguacuuagugg

SEQ ID NO: 28507 - DNA, 21 bp, homo sapiens
caagccaccatgaatcaccgc

SEQ ID NO: 28508 - RNA, 21 nt, RNAi
agccaccaugaaucaccgcuu

SEQ ID NO: 28509 - RNA, 21 nt, RNAi
uuucggugguacuuaguggcg

SEQ ID NO: 28510 - DNA, 21 bp, homo sapiens
caccatgaatcaccgcgacat

SEQ ID NO: 28511 - RNA, 21 nt, RNAi
ccaugaaucaccgcgacauuu

SEQ ID NO: 28512 - RNA, 21 nt, RNAi
uugguacuuaguggcgcugua

SEQ ID NO: 28513 - DNA, 21 bp, homo sapiens
catgaatcaccgcgacattgc

SEQ ID NO: 28514 - RNA, 21 nt, RNAi
ugaaucaccgcgacauugcuu

SEQ ID NO: 28515 - RNA, 21 nt, RNAi
uuacuuaguggcgcuguaacg

SEQ ID NO: 28516 - DNA, 21 bp, homo sapiens
catcaggcttcatcatctgtg

SEQ ID NO: 28517 - RNA, 21 nt, RNAi
ucaggcuucaucaucuguguu

SEQ ID NO: 28518 - RNA, 21 nt, RNAi
uuaguccgaaguaguagacac

SEQ ID NO: 28519 - DNA, 21 bp, homo sapiens
caggcttcatcatctgtgttc

SEQ ID NO: 28520 - RNA, 21 nt, RNAi
ggcuucaucaucuguguucuu

SEQ ID NO: 28521 - RNA, 21 nt, RNAi
uuccgaaguaguagacacaag

SEQ ID NO: 28522 - DNA, 21 bp, homo sapiens
catcatctgtgttctcatggc

SEQ ID NO: 28523 - RNA, 21 nt, RNAi
ucaucuguguucucauggcuu

SEQ ID NO: 28524 - RNA, 21 nt, RNAi
uuaguagacacaagaguaccg

SEQ ID NO: 28525 - DNA, 21 bp, homo sapiens
catctgtgttctcatggcagc

SEQ ID NO: 28526 - RNA, 21 nt, RNAi
ucuguguucucauggcagcuu

SEQ ID NO: 28527 - RNA, 21 nt, RNAi
uuagacacaagaguaccgucg

SEQ ID NO: 28528 - DNA, 21 bp, homo sapiens
catctaattctcaaagaactc

SEQ ID NO: 28529 - RNA, 21 nt, RNAi
ucuaauucucaaagaacucuu

SEQ ID NO: 28530 - RNA, 21 nt, RNAi
uuagauuaagaguuucuugag

SEQ ID NO: 28531 - DNA, 21 bp, homo sapiens
caaagaactccaattaggaga

SEQ ID NO: 28532 - RNA, 21 nt, RNAi
aagaacuccaauuaggagauu

SEQ ID NO: 28533 - RNA, 21 nt, RNAi
uuuucuugagguuaauccucu

SEQ ID NO: 28534 - DNA, 21 bp, homo sapiens
caattaggagagatttctctg

SEQ ID NO: 28535 - RNA, 21 nt, RNAi
auuaggagagauuucucuguu

SEQ ID NO: 28536 - RNA, 21 nt, RNAi
uuuaauccucucuaaagagac

SEQ ID NO: 28537 - DNA, 21 bp, homo sapiens
caagaggtgactccaagtcga

SEQ ID NO: 28538 - RNA, 21 nt, RNAi
agaggugacuccaagucgauu

SEQ ID NO: 28539 - RNA, 21 nt, RNAi
uuucuccacugagguucagcu

SEQ ID NO: 28540 - DNA, 21 bp, homo sapiens
caagtcgatcaactttgcaaa

SEQ ID NO: 28541 - RNA, 21 nt, RNAi
agucgaucaacuuugcaaauu

SEQ ID NO: 28542 - RNA, 21 nt, RNAi
uuucagcuaguugaaacguuu

SEQ ID NO: 28543 - DNA, 21 bp, homo sapiens
cagtttctttgacaattctag

SEQ ID NO: 28544 - RNA, 21 nt, RNAi
guuucuuugacaauucuaguu

SEQ ID NO: 28545 - RNA, 21 nt, RNAi
uucaaagaaacuguuaagauc

SEQ ID NO: 28546 - DNA, 21 bp, homo sapiens
caattctagcagtcctcatct

SEQ ID NO: 28547 - RNA, 21 nt, RNAi
auucuagcaguccucaucuuu

SEQ ID NO: 28548 - RNA, 21 nt, RNAi
uuuaagaucgucaggaguaga

SEQ ID NO: 28549 - DNA, 21 bp, homo sapiens
cagaatcaagagctaagaaac

SEQ ID NO: 28550 - RNA, 21 nt, RNAi
gaaucaagagcuaagaaacuu

SEQ ID NO: 28551 - RNA, 21 nt, RNAi
uucuuaguucucgauucuuug

SEQ ID NO: 28552 - DNA, 21 bp, homo sapiens
caagagctaagaaacaagatt

SEQ ID NO: 28553 - RNA, 21 nt, RNAi
agagcuaagaaacaagauuuu

SEQ ID NO: 28554 - RNA, 21 nt, RNAi
uuucucgauucuuuguucuaa

SEQ ID NO: 28555 - DNA, 21 bp, homo sapiens
caagattaatgagttggaact

SEQ ID NO: 28556 - RNA, 21 nt, RNAi
agauuaaugaguuggaacuuu

SEQ ID NO: 28557 - RNA, 21 nt, RNAi
uuucuaauuacucaaccuuga

SEQ ID NO: 28558 - DNA, 21 bp, homo sapiens
caagaactccaactccaactg

SEQ ID NO: 28559 - RNA, 21 nt, RNAi
agaacuccaacuccaacuguu

SEQ ID NO: 28560 - RNA, 21 nt, RNAi
uuucuugagguugagguugac

SEQ ID NO: 28561 - DNA, 21 bp, homo sapiens
caactccaactggagaaagca

SEQ ID NO: 28562 - RNA, 21 nt, RNAi
acuccaacuggagaaagcauu

SEQ ID NO: 28563 - RNA, 21 nt, RNAi
uuugagguugaccucuuucgu

SEQ ID NO: 28564 - DNA, 21 bp, homo sapiens
caacagcacaatacgaccagg

SEQ ID NO: 28565 - RNA, 21 nt, RNAi
acagcacaauacgaccagguu

SEQ ID NO: 28566 - RNA, 21 nt, RNAi
uuugucguguuaugcuggucc

SEQ ID NO: 28567 - DNA, 21 bp, homo sapiens
cagcacaatacgaccaggcgt

SEQ ID NO: 28568 - RNA, 21 nt, RNAi
gcacaauacgaccaggcguuu

SEQ ID NO: 28569 - RNA, 21 nt, RNAi
uucguguuaugcugguccgca

SEQ ID NO: 28570 - DNA, 21 bp, homo sapiens
cacaatacgaccaggcgtcaa

SEQ ID NO: 28571 - RNA, 21 nt, RNAi
caauacgaccaggcgucaauu

SEQ ID NO: 28572 - RNA, 21 nt, RNAi
uuguuaugcugguccgcaguu

SEQ ID NO: 28573 - DNA, 21 bp, homo sapiens
caatacgaccaggcgtcaacc

SEQ ID NO: 28574 - RNA, 21 nt, RNAi
auacgaccaggcgucaaccuu

SEQ ID NO: 28575 - RNA, 21 nt, RNAi
uuuaugcugguccgcaguugg

SEQ ID NO: 28576 - DNA, 21 bp, homo sapiens
caggcgtcaaccaagtatact

SEQ ID NO: 28577 - RNA, 21 nt, RNAi
ggcgucaaccaaguauacuuu

SEQ ID NO: 28578 - RNA, 21 nt, RNAi
uuccgcaguugguucauauga

SEQ ID NO: 28579 - DNA, 21 bp, homo sapiens
caaccaagtatactgcattgg

SEQ ID NO: 28580 - RNA, 21 nt, RNAi
accaaguauacugcauugguu

SEQ ID NO: 28581 - RNA, 21 nt, RNAi
uuugguucauaugacguaacc

SEQ ID NO: 28582 - DNA, 21 bp, homo sapiens
caagtatactgcattggaaca

SEQ ID NO: 28583 - RNA, 21 nt, RNAi
aguauacugcauuggaacauu

SEQ ID NO: 28584 - RNA, 21 nt, RNAi
uuucauaugacguaaccuugu

SEQ ID NO: 28585 - DNA, 21 bp, homo sapiens
cagaaagtgccagatgttctc

SEQ ID NO: 28586 - RNA, 21 nt, RNAi
gaaagugccagauguucucuu

SEQ ID NO: 28587 - RNA, 21 nt, RNAi
uucuuucacggucuacaagag

SEQ ID NO: 28588 - DNA, 21 bp, homo sapiens
cagatgttctctggaacagaa

SEQ ID NO: 28589 - RNA, 21 nt, RNAi
gauguucucuggaacagaauu

SEQ ID NO: 28590 - RNA, 21 nt, RNAi
uucuacaagagaccuugucuu

SEQ ID NO: 28591 - DNA, 21 bp, homo sapiens
caacagcgttctttccaaaca

SEQ ID NO: 28592 - RNA, 21 nt, RNAi
acagcguucuuuccaaacauu

SEQ ID NO: 28593 - RNA, 21 nt, RNAi
uuugucgcaagaaagguuugu

SEQ ID NO: 28594 - DNA, 21 bp, homo sapiens
cagcgttctttccaaacactg

SEQ ID NO: 28595 - RNA, 21 nt, RNAi
gcguucuuuccaaacacuguu

SEQ ID NO: 28596 - RNA, 21 nt, RNAi
uucgcaagaaagguuugugac

SEQ ID NO: 28597 - DNA, 21 bp, homo sapiens
caaacactggaccaggagtgc

SEQ ID NO: 28598 - RNA, 21 nt, RNAi
aacacuggaccaggagugcuu

SEQ ID NO: 28599 - RNA, 21 nt, RNAi
uuuugugaccugguccucacg

SEQ ID NO: 28600 - DNA, 21 bp, homo sapiens
cactggaccaggagtgcatcc

SEQ ID NO: 28601 - RNA, 21 nt, RNAi
cuggaccaggagugcauccuu

SEQ ID NO: 28602 - RNA, 21 nt, RNAi
uugaccugguccucacguagg

SEQ ID NO: 28603 - DNA, 21 bp, homo sapiens
caggagtgcatccagatgaag

SEQ ID NO: 28604 - RNA, 21 nt, RNAi
ggagugcauccagaugaaguu

SEQ ID NO: 28605 - RNA, 21 nt, RNAi
uuccucacguaggucuacuuc

SEQ ID NO: 28606 - DNA, 21 bp, homo sapiens
catccagatgaaggccagact

SEQ ID NO: 28607 - RNA, 21 nt, RNAi
uccagaugaaggccagacuuu

SEQ ID NO: 28608 - RNA, 21 nt, RNAi
uuaggucuacuuccggucuga

SEQ ID NO: 28609 - DNA, 21 bp, homo sapiens
cagatgaaggccagactcacc

SEQ ID NO: 28610 - RNA, 21 nt, RNAi
gaugaaggccagacucaccuu

SEQ ID NO: 28611 - RNA, 21 nt, RNAi
uucuacuuccggucugagugg

SEQ ID NO: 28612 - DNA, 21 bp, homo sapiens
caggagttacagcaagccaag

SEQ ID NO: 28613 - RNA, 21 nt, RNAi
ggaguuacagcaagccaaguu

SEQ ID NO: 28614 - RNA, 21 nt, RNAi
uuccucaaugucguucgguuc

SEQ ID NO: 28615 - DNA, 21 bp, homo sapiens
cagcaagccaagaatatgcac

SEQ ID NO: 28616 - RNA, 21 nt, RNAi
gcaagccaagaauaugcacuu

SEQ ID NO: 28617 - RNA, 21 nt, RNAi
uucguucgguucuuauacgug

SEQ ID NO: 28618 - DNA, 21 bp, homo sapiens
caagccaagaatatgcacaac

SEQ ID NO: 28619 - RNA, 21 nt, RNAi
agccaagaauaugcacaacuu

SEQ ID NO: 28620 - RNA, 21 nt, RNAi
uuucgguucuuauacguguug

SEQ ID NO: 28621 - DNA, 21 bp, homo sapiens
caagaatatgcacaacgtcct

SEQ ID NO: 28622 - RNA, 21 nt, RNAi
agaauaugcacaacguccuuu

SEQ ID NO: 28623 - RNA, 21 nt, RNAi
uuucuuauacguguugcagga

SEQ ID NO: 28624 - DNA, 21 bp, homo sapiens
cacaacgtcctgcaggctgaa

SEQ ID NO: 28625 - RNA, 21 nt, RNAi
caacguccugcaggcugaauu

SEQ ID NO: 28626 - RNA, 21 nt, RNAi
uuguugcaggacguccgacuu

SEQ ID NO: 28627 - DNA, 21 bp, homo sapiens
caacgtcctgcaggctgaact

SEQ ID NO: 28628 - RNA, 21 nt, RNAi
acguccugcaggcugaacuuu

SEQ ID NO: 28629 - RNA, 21 nt, RNAi
uuugcaggacguccgacuuga

SEQ ID NO: 28630 - DNA, 21 bp, homo sapiens
caggctgaactggataaactc

SEQ ID NO: 28631 - RNA, 21 nt, RNAi
ggcugaacuggauaaacucuu

SEQ ID NO: 28632 - RNA, 21 nt, RNAi
uuccgacuugaccuauuugag

SEQ ID NO: 28633 - DNA, 21 bp, homo sapiens
cacatcagtaaagcaacagct

SEQ ID NO: 28634 - RNA, 21 nt, RNAi
caucaguaaagcaacagcuuu

SEQ ID NO: 28635 - RNA, 21 nt, RNAi
uuguagucauuucguugucga

SEQ ID NO: 28636 - DNA, 21 bp, homo sapiens
catcagtaaagcaacagctag

SEQ ID NO: 28637 - RNA, 21 nt, RNAi
ucaguaaagcaacagcuaguu

SEQ ID NO: 28638 - RNA, 21 nt, RNAi
uuagucauuucguugucgauc

SEQ ID NO: 28639 - DNA, 21 bp, homo sapiens
cagtaaagcaacagctagaaa

SEQ ID NO: 28640 - RNA, 21 nt, RNAi
guaaagcaacagcuagaaauu

SEQ ID NO: 28641 - RNA, 21 nt, RNAi
uucauuucguugucgaucuuu

SEQ ID NO: 28642 - DNA, 21 bp, homo sapiens
caatttggaagagtttaagca

SEQ ID NO: 28643 - RNA, 21 nt, RNAi
auuuggaagaguuuaagcauu

SEQ ID NO: 28644 - RNA, 21 nt, RNAi
uuuaaaccuucucaaauucgu

SEQ ID NO: 28645 - DNA, 21 bp, homo sapiens
cagagctgaacaggcgttcca

SEQ ID NO: 28646 - RNA, 21 nt, RNAi
gagcugaacaggcguuccauu

SEQ ID NO: 28647 - RNA, 21 nt, RNAi
uucucgacuuguccgcaaggu

SEQ ID NO: 28648 - DNA, 21 bp, homo sapiens
caggcgagtcagatcaaggag

SEQ ID NO: 28649 - RNA, 21 nt, RNAi
ggcgagucagaucaaggaguu

SEQ ID NO: 28650 - RNA, 21 nt, RNAi
uuccgcucagucuaguuccuc

SEQ ID NO: 28651 - DNA, 21 bp, homo sapiens
cagatcaaggagaatgagctg

SEQ ID NO: 28652 - RNA, 21 nt, RNAi
gaucaaggagaaugagcuguu

SEQ ID NO: 28653 - RNA, 21 nt, RNAi
uucuaguuccucuuacucgac

SEQ ID NO: 28654 - DNA, 21 bp, homo sapiens
caaggagaatgagctgaggag

SEQ ID NO: 28655 - RNA, 21 nt, RNAi
aggagaaugagcugaggaguu

SEQ ID NO: 28656 - RNA, 21 nt, RNAi
uuuccucuuacucgacuccuc

SEQ ID NO: 28657 - DNA, 21 bp, homo sapiens
catggaggaaatgaagaagga

SEQ ID NO: 28658 - RNA, 21 nt, RNAi
uggaggaaaugaagaaggauu

SEQ ID NO: 28659 - RNA, 21 nt, RNAi
uuaccuccuuuacuucuuccu

SEQ ID NO: 28660 - DNA, 21 bp, homo sapiens
caacctccttaagagtcactc

SEQ ID NO: 28661 - RNA, 21 nt, RNAi
accuccuuaagagucacucuu

SEQ ID NO: 28662 - RNA, 21 nt, RNAi
uuuggaggaauucucagugag

SEQ ID NO: 28663 - DNA, 21 bp, homo sapiens
cagagaagtctgccacctgga

SEQ ID NO: 28664 - RNA, 21 nt, RNAi
gagaagucugccaccuggauu

SEQ ID NO: 28665 - RNA, 21 nt, RNAi
uucucuucagacgguggaccu

SEQ ID NO: 28666 - DNA, 21 bp, homo sapiens
cacctggaggcagaactcaag

SEQ ID NO: 28667 - RNA, 21 nt, RNAi
ccuggaggcagaacucaaguu

SEQ ID NO: 28668 - RNA, 21 nt, RNAi
uuggaccuccgucuugaguuc

SEQ ID NO: 28669 - DNA, 21 bp, homo sapiens
cagaactcaagaacatcaaac

SEQ ID NO: 28670 - RNA, 21 nt, RNAi
gaacucaagaacaucaaacuu

SEQ ID NO: 28671 - RNA, 21 nt, RNAi
uucuugaguucuuguaguuug

SEQ ID NO: 28672 - DNA, 21 bp, homo sapiens
caagaacatcaaacagtgttt

SEQ ID NO: 28673 - RNA, 21 nt, RNAi
agaacaucaaacaguguuuuu

SEQ ID NO: 28674 - RNA, 21 nt, RNAi
uuucuuguaguuugucacaaa

SEQ ID NO: 28675 - DNA, 21 bp, homo sapiens
caaacagtgtttaaatcagag

SEQ ID NO: 28676 - RNA, 21 nt, RNAi
aacaguguuuaaaucagaguu

SEQ ID NO: 28677 - RNA, 21 nt, RNAi
uuuugucacaaauuuagucuc

SEQ ID NO: 28678 - DNA, 21 bp, homo sapiens
cagtgtttaaatcagagccag

SEQ ID NO: 28679 - RNA, 21 nt, RNAi
guguuuaaaucagagccaguu

SEQ ID NO: 28680 - RNA, 21 nt, RNAi
uucacaaauuuagucucgguc

SEQ ID NO: 28681 - DNA, 21 bp, homo sapiens
cagaagaaatgaaagcgaaga

SEQ ID NO: 28682 - RNA, 21 nt, RNAi
gaagaaaugaaagcgaagauu

SEQ ID NO: 28683 - RNA, 21 nt, RNAi
uucuucuuuacuuucgcuucu

SEQ ID NO: 28684 - DNA, 21 bp, homo sapiens
caggaaaccatgttaagagat

SEQ ID NO: 28685 - RNA, 21 nt, RNAi
ggaaaccauguuaagagauuu

SEQ ID NO: 28686 - RNA, 21 nt, RNAi
uuccuuugguacaauucucua

SEQ ID NO: 28687 - DNA, 21 bp, homo sapiens
catgttaagagatcttcaaga

SEQ ID NO: 28688 - RNA, 21 nt, RNAi
uguuaagagaucuucaagauu

SEQ ID NO: 28689 - RNA, 21 nt, RNAi
uuacaauucucuagaaguucu

SEQ ID NO: 28690 - DNA, 21 bp, homo sapiens
cagcgagattgttctcaagac

SEQ ID NO: 28691 - RNA, 21 nt, RNAi
gcgagauuguucucaagacuu

SEQ ID NO: 28692 - RNA, 21 nt, RNAi
uucgcucuaacaagaguucug

SEQ ID NO: 28693 - DNA, 21 bp, homo sapiens
caagacagagaaagagtccaa

SEQ ID NO: 28694 - RNA, 21 nt, RNAi
agacagagaaagaguccaauu

SEQ ID NO: 28695 - RNA, 21 nt, RNAi
uuucugucucuuucucagguu

SEQ ID NO: 28696 - DNA, 21 bp, homo sapiens
cagagaaagagtccaaagcct

SEQ ID NO: 28697 - RNA, 21 nt, RNAi
gagaaagaguccaaagccuuu

SEQ ID NO: 28698 - RNA, 21 nt, RNAi
uucucuuucucagguuucgga

SEQ ID NO: 28699 - DNA, 21 bp, homo sapiens
caaagccttgctgagtgcttt

SEQ ID NO: 28700 - RNA, 21 nt, RNAi
aagccuugcugagugcuuuuu

SEQ ID NO: 28701 - RNA, 21 nt, RNAi
uuuucggaacgacucacgaaa

SEQ ID NO: 28702 - DNA, 21 bp, homo sapiens
cacttggaaacttgtctgaag

SEQ ID NO: 28703 - RNA, 21 nt, RNAi
cuuggaaacuugucugaaguu

SEQ ID NO: 28704 - RNA, 21 nt, RNAi
uugaaccuuugaacagacuuc

SEQ ID NO: 28705 - DNA, 21 bp, homo sapiens
catgaatacaacgagagagta

SEQ ID NO: 28706 - RNA, 21 nt, RNAi
ugaauacaacgagagaguauu

SEQ ID NO: 28707 - RNA, 21 nt, RNAi
uuacuuauguugcucucucau

SEQ ID NO: 28708 - DNA, 21 bp, homo sapiens
caacgagagagtaagaacgct

SEQ ID NO: 28709 - RNA, 21 nt, RNAi
acgagagaguaagaacgcuuu

SEQ ID NO: 28710 - RNA, 21 nt, RNAi
uuugcucucucauucuugcga

SEQ ID NO: 28711 - DNA, 21 bp, homo sapiens
cagaaaccttcacaacgtgtt

SEQ ID NO: 28712 - RNA, 21 nt, RNAi
gaaaccuucacaacguguuuu

SEQ ID NO: 28713 - RNA, 21 nt, RNAi
uucuuuggaaguguugcacaa

SEQ ID NO: 28714 - DNA, 21 bp, homo sapiens
cacaacgtgttagacagtaag

SEQ ID NO: 28715 - RNA, 21 nt, RNAi
caacguguuagacaguaaguu

SEQ ID NO: 28716 - RNA, 21 nt, RNAi
uuguugcacaaucugucauuc

SEQ ID NO: 28717 - DNA, 21 bp, homo sapiens
caacgtgttagacagtaagtc

SEQ ID NO: 28718 - RNA, 21 nt, RNAi
acguguuagacaguaagucuu

SEQ ID NO: 28719 - RNA, 21 nt, RNAi
uuugcacaaucugucauucag

SEQ ID NO: 28720 - DNA, 21 bp, homo sapiens
cagtaagtcagtggaggtaga

SEQ ID NO: 28721 - RNA, 21 nt, RNAi
guaagucaguggagguagauu

SEQ ID NO: 28722 - RNA, 21 nt, RNAi
uucauucagucaccuccaucu

SEQ ID NO: 28723 - DNA, 21 bp, homo sapiens
cagaaactagcttatatggag

SEQ ID NO: 28724 - RNA, 21 nt, RNAi
gaaacuagcuuauauggaguu

SEQ ID NO: 28725 - RNA, 21 nt, RNAi
uucuuugaucgaauauaccuc

SEQ ID NO: 28726 - DNA, 21 bp, homo sapiens
cagcagaaagctgagttctca

SEQ ID NO: 28727 - RNA, 21 nt, RNAi
gcagaaagcugaguucucauu

SEQ ID NO: 28728 - RNA, 21 nt, RNAi
uucgucuuucgacucaagagu

SEQ ID NO: 28729 - DNA, 21 bp, homo sapiens
cagaaagctgagttctcagat

SEQ ID NO: 28730 - RNA, 21 nt, RNAi
gaaagcugaguucucagauuu

SEQ ID NO: 28731 - RNA, 21 nt, RNAi
uucuuucgacucaagagucua

SEQ ID NO: 28732 - DNA, 21 bp, homo sapiens
cagatcagaaacatcagaagg

SEQ ID NO: 28733 - RNA, 21 nt, RNAi
gaucagaaacaucagaagguu

SEQ ID NO: 28734 - RNA, 21 nt, RNAi
uucuagucuuuguagucuucc

SEQ ID NO: 28735 - DNA, 21 bp, homo sapiens
cagaaacatcagaaggaaata

SEQ ID NO: 28736 - RNA, 21 nt, RNAi
gaaacaucagaaggaaauauu

SEQ ID NO: 28737 - RNA, 21 nt, RNAi
uucuuuguagucuuccuuuau

SEQ ID NO: 28738 - DNA, 21 bp, homo sapiens
caagttgaagatctagaacac

SEQ ID NO: 28739 - RNA, 21 nt, RNAi
aguugaagaucuagaacacuu

SEQ ID NO: 28740 - RNA, 21 nt, RNAi
uuucaacuucuagaucuugug

SEQ ID NO: 28741 - DNA, 21 bp, homo sapiens
cacaagcttcagttactgtca

SEQ ID NO: 28742 - RNA, 21 nt, RNAi
caagcuucaguuacugucauu

SEQ ID NO: 28743 - RNA, 21 nt, RNAi
uuguucgaagucaaugacagu

SEQ ID NO: 28744 - DNA, 21 bp, homo sapiens
caagcttcagttactgtcaaa

SEQ ID NO: 28745 - RNA, 21 nt, RNAi
agcuucaguuacugucaaauu

SEQ ID NO: 28746 - RNA, 21 nt, RNAi
uuucgaagucaaugacaguuu

SEQ ID NO: 28747 - DNA, 21 bp, homo sapiens
caaagaccggtgttaccaaga

SEQ ID NO: 28748 - RNA, 21 nt, RNAi
aagaccgguguuaccaagauu

SEQ ID NO: 28749 - RNA, 21 nt, RNAi
uuuucuggccacaaugguucu

SEQ ID NO: 28750 - DNA, 21 bp, homo sapiens
caagacttgcatgccgaatat

SEQ ID NO: 28751 - RNA, 21 nt, RNAi
agacuugcaugccgaauauuu

SEQ ID NO: 28752 - RNA, 21 nt, RNAi
uuucugaacguacggcuuaua

SEQ ID NO: 28753 - DNA, 21 bp, homo sapiens
catgccgaatatgagagcctc

SEQ ID NO: 28754 - RNA, 21 nt, RNAi
ugccgaauaugagagccucuu

SEQ ID NO: 28755 - RNA, 21 nt, RNAi
uuacggcuuauacucucggag

SEQ ID NO: 28756 - DNA, 21 bp, homo sapiens
caaagatgcttctctggtgac

SEQ ID NO: 28757 - RNA, 21 nt, RNAi
aagaugcuucucuggugacuu

SEQ ID NO: 28758 - RNA, 21 nt, RNAi
uuuucuacgaagagaccacug

SEQ ID NO: 28759 - DNA, 21 bp, homo sapiens
caaatgaagatcatcagagaa

SEQ ID NO: 28760 - RNA, 21 nt, RNAi
aaugaagaucaucagagaauu

SEQ ID NO: 28761 - RNA, 21 nt, RNAi
uuuuacuucuaguagucucuu

SEQ ID NO: 28762 - DNA, 21 bp, homo sapiens
cagcagcctgccatgcatcat

SEQ ID NO: 28763 - RNA, 21 nt, RNAi
gcagccugccaugcaucauuu

SEQ ID NO: 28764 - RNA, 21 nt, RNAi
uucgucggacgguacguagua

SEQ ID NO: 28765 - DNA, 21 bp, homo sapiens
cagcctgccatgcatcattcc

SEQ ID NO: 28766 - RNA, 21 nt, RNAi
gccugccaugcaucauuccuu

SEQ ID NO: 28767 - RNA, 21 nt, RNAi
uucggacgguacguaguaagg

SEQ ID NO: 28768 - DNA, 21 bp, homo sapiens
catgcatcattcctttgcaaa

SEQ ID NO: 28769 - RNA, 21 nt, RNAi
ugcaucauuccuuugcaaauu

SEQ ID NO: 28770 - RNA, 21 nt, RNAi
uuacguaguaaggaaacguuu

SEQ ID NO: 28771 - DNA, 21 bp, homo sapiens
caaggaagcatgccttcagag

SEQ ID NO: 28772 - RNA, 21 nt, RNAi
aggaagcaugccuucagaguu

SEQ ID NO: 28773 - RNA, 21 nt, RNAi
uuuccuucguacggaagucuc

SEQ ID NO: 28774 - DNA, 21 bp, homo sapiens
catgccttcagagaggagtga

SEQ ID NO: 28775 - RNA, 21 nt, RNAi
ugccuucagagaggagugauu

SEQ ID NO: 28776 - RNA, 21 nt, RNAi
uuacggaagucucuccucacu

SEQ ID NO: 28777 - DNA, 21 bp, homo sapiens
cagagaggagtgaatgtcgtt

SEQ ID NO: 28778 - RNA, 21 nt, RNAi
gagaggagugaaugucguuuu

SEQ ID NO: 28779 - RNA, 21 nt, RNAi
uucucuccucacuuacagcaa

SEQ ID NO: 28780 - DNA, 21 bp, homo sapiens
cagatgaactcagacctgcaa

SEQ ID NO: 28781 - RNA, 21 nt, RNAi
gaugaacucagaccugcaauu

SEQ ID NO: 28782 - RNA, 21 nt, RNAi
uucuacuugagucuggacguu

SEQ ID NO: 28783 - DNA, 21 bp, homo sapiens
cagtgtgaagagttggtgcaa

SEQ ID NO: 28784 - RNA, 21 nt, RNAi
gugugaagaguuggugcaauu

SEQ ID NO: 28785 - RNA, 21 nt, RNAi
uucacacuucucaaccacguu

SEQ ID NO: 28786 - DNA, 21 bp, homo sapiens
catgaaagcagaacagatgca

SEQ ID NO: 28787 - RNA, 21 nt, RNAi
ugaaagcagaacagaugcauu

SEQ ID NO: 28788 - RNA, 21 nt, RNAi
uuacuuucgucuugucuacgu

SEQ ID NO: 28789 - DNA, 21 bp, homo sapiens
cagaacagatgcatcaaagtt

SEQ ID NO: 28790 - RNA, 21 nt, RNAi
gaacagaugcaucaaaguuuu

SEQ ID NO: 28791 - RNA, 21 nt, RNAi
uucuugucuacguaguuucaa

SEQ ID NO: 28792 - DNA, 21 bp, homo sapiens
caagtcagcgcattagtaagt

SEQ ID NO: 28793 - RNA, 21 nt, RNAi
agucagcgcauuaguaaguuu

SEQ ID NO: 28794 - RNA, 21 nt, RNAi
uuucagucgcguaaucauuca

SEQ ID NO: 28795 - DNA, 21 bp, homo sapiens
cagcgcattagtaagttacag

SEQ ID NO: 28796 - RNA, 21 nt, RNAi
gcgcauuaguaaguuacaguu

SEQ ID NO: 28797 - RNA, 21 nt, RNAi
uucgcguaaucauucaauguc

SEQ ID NO: 28798 - DNA, 21 bp, homo sapiens
cattagtaagttacaggaaga

SEQ ID NO: 28799 - RNA, 21 nt, RNAi
uuaguaaguuacaggaagauu

SEQ ID NO: 28800 - RNA, 21 nt, RNAi
uuaaucauucaauguccuucu

SEQ ID NO: 28801 - DNA, 21 bp, homo sapiens
caggaagacacttctgctcac

SEQ ID NO: 28802 - RNA, 21 nt, RNAi
ggaagacacuucugcucacuu

SEQ ID NO: 28803 - RNA, 21 nt, RNAi
uuccuucugugaagacgagug

SEQ ID NO: 28804 - DNA, 21 bp, homo sapiens
cacttctgctcaccagaatgt

SEQ ID NO: 28805 - RNA, 21 nt, RNAi
cuucugcucaccagaauguuu

SEQ ID NO: 28806 - RNA, 21 nt, RNAi
uugaagacgaguggucuuaca

SEQ ID NO: 28807 - DNA, 21 bp, homo sapiens
caccagaatgttgttgctgaa

SEQ ID NO: 28808 - RNA, 21 nt, RNAi
ccagaauguuguugcugaauu

SEQ ID NO: 28809 - RNA, 21 nt, RNAi
uuggucuuacaacaacgacuu

SEQ ID NO: 28810 - DNA, 21 bp, homo sapiens
cagaatgttgttgctgaaacc

SEQ ID NO: 28811 - RNA, 21 nt, RNAi
gaauguuguugcugaaaccuu

SEQ ID NO: 28812 - RNA, 21 nt, RNAi
uucuuacaacaacgacuuugg

SEQ ID NO: 28813 - DNA, 21 bp, homo sapiens
caggcagagattcaagaatta

SEQ ID NO: 28814 - RNA, 21 nt, RNAi
ggcagagauucaagaauuauu

SEQ ID NO: 28815 - RNA, 21 nt, RNAi
uuccgucucuaaguucuuaau

SEQ ID NO: 28816 - DNA, 21 bp, homo sapiens
caaccatctacttgaagactc

SEQ ID NO: 28817 - RNA, 21 nt, RNAi
accaucuacuugaagacucuu

SEQ ID NO: 28818 - RNA, 21 nt, RNAi
uuugguagaugaacuucugag

SEQ ID NO: 28819 - DNA, 21 bp, homo sapiens
catctacttgaagactctcta

SEQ ID NO: 28820 - RNA, 21 nt, RNAi
ucuacuugaagacucucuauu

SEQ ID NO: 28821 - RNA, 21 nt, RNAi
uuagaugaacuucugagagau

SEQ ID NO: 28822 - DNA, 21 bp, homo sapiens
catccttaaatcaagagaaga

SEQ ID NO: 28823 - RNA, 21 nt, RNAi
uccuuaaaucaagagaagauu

SEQ ID NO: 28824 - RNA, 21 nt, RNAi
uuaggaauuuaguucucuucu

SEQ ID NO: 28825 - DNA, 21 bp, homo sapiens
caagagaagatgaacttaatc

SEQ ID NO: 28826 - RNA, 21 nt, RNAi
agagaagaugaacuuaaucuu

SEQ ID NO: 28827 - RNA, 21 nt, RNAi
uuucucuucuacuugaauuag

SEQ ID NO: 28828 - DNA, 21 bp, homo sapiens
catttcagagttatctgatca

SEQ ID NO: 28829 - RNA, 21 nt, RNAi
uuucagaguuaucugaucauu

SEQ ID NO: 28830 - RNA, 21 nt, RNAi
uuaaagucucaauagacuagu

SEQ ID NO: 28831 - DNA, 21 bp, homo sapiens
cagagttatctgatcagtaca

SEQ ID NO: 28832 - RNA, 21 nt, RNAi
gaguuaucugaucaguacauu

SEQ ID NO: 28833 - RNA, 21 nt, RNAi
uucucaauagacuagucaugu

SEQ ID NO: 28834 - DNA, 21 bp, homo sapiens
caaagatgtgaagaaaccgga

SEQ ID NO: 28835 - RNA, 21 nt, RNAi
aagaugugaagaaaccggauu

SEQ ID NO: 28836 - RNA, 21 nt, RNAi
uuuucuacacuucuuuggccu

SEQ ID NO: 28837 - DNA, 21 bp, homo sapiens
catatgaggatcttagtcaaa

SEQ ID NO: 28838 - RNA, 21 nt, RNAi
uaugaggaucuuagucaaauu

SEQ ID NO: 28839 - RNA, 21 nt, RNAi
uuauacuccuagaaucaguuu

SEQ ID NO: 28840 - DNA, 21 bp, homo sapiens
cagctaaaggaagcatttgca

SEQ ID NO: 28841 - RNA, 21 nt, RNAi
gcuaaaggaagcauuugcauu

SEQ ID NO: 28842 - RNA, 21 nt, RNAi
uucgauuuccuucguaaacgu

SEQ ID NO: 28843 - DNA, 21 bp, homo sapiens
catttgcaaaggaacaccaag

SEQ ID NO: 28844 - RNA, 21 nt, RNAi
uuugcaaaggaacaccaaguu

SEQ ID NO: 28845 - RNA, 21 nt, RNAi
uuaaacguuuccuugugguuc

SEQ ID NO: 28846 - DNA, 21 bp, homo sapiens
caaaggaacaccaagaattct

SEQ ID NO: 28847 - RNA, 21 nt, RNAi
aaggaacaccaagaauucuuu

SEQ ID NO: 28848 - RNA, 21 nt, RNAi
uuuuccuugugguucuuaaga

SEQ ID NO: 28849 - DNA, 21 bp, homo sapiens
catttgctgaagaaagaaatc

SEQ ID NO: 28850 - RNA, 21 nt, RNAi
uuugcugaagaaagaaaucuu

SEQ ID NO: 28851 - RNA, 21 nt, RNAi
uuaaacgacuucuuucuuuag

SEQ ID NO: 28852 - DNA, 21 bp, homo sapiens
cagaatctgatgctagagttg

SEQ ID NO: 28853 - RNA, 21 nt, RNAi
gaaucugaugcuagaguuguu

SEQ ID NO: 28854 - RNA, 21 nt, RNAi
uucuuagacuacgaucucaac

SEQ ID NO: 28855 - DNA, 21 bp, homo sapiens
cagtgcagcaagctctgagat

SEQ ID NO: 28856 - RNA, 21 nt, RNAi
gugcagcaagcucugagauuu

SEQ ID NO: 28857 - RNA, 21 nt, RNAi
uucacgucguucgagacucua

SEQ ID NO: 28858 - DNA, 21 bp, homo sapiens
cagcaagctctgagatctgag

SEQ ID NO: 28859 - RNA, 21 nt, RNAi
gcaagcucugagaucugaguu

SEQ ID NO: 28860 - RNA, 21 nt, RNAi
uucguucgagacucuagacuc

SEQ ID NO: 28861 - DNA, 21 bp, homo sapiens
caagctctgagatctgagatg

SEQ ID NO: 28862 - RNA, 21 nt, RNAi
agcucugagaucugagauguu

SEQ ID NO: 28863 - RNA, 21 nt, RNAi
uuucgagacucuagacucuac

SEQ ID NO: 28864 - DNA, 21 bp, homo sapiens
caattctaagagcgaggctgg

SEQ ID NO: 28865 - RNA, 21 nt, RNAi
auucuaagagcgaggcugguu

SEQ ID NO: 28866 - RNA, 21 nt, RNAi
uuuaagauucucgcuccgacc

SEQ ID NO: 28867 - DNA, 21 bp, homo sapiens
catgactttaaaggaagaaca

SEQ ID NO: 28868 - RNA, 21 nt, RNAi
ugacuuuaaaggaagaacauu

SEQ ID NO: 28869 - RNA, 21 nt, RNAi
uuacugaaauuuccuucuugu

SEQ ID NO: 28870 - DNA, 21 bp, homo sapiens
caagagaatgaacagctgatg

SEQ ID NO: 28871 - RNA, 21 nt, RNAi
agagaaugaacagcugauguu

SEQ ID NO: 28872 - RNA, 21 nt, RNAi
uuucucuuacuugucgacuac

SEQ ID NO: 28873 - DNA, 21 bp, homo sapiens
cagctgatgaaggtaatgaag

SEQ ID NO: 28874 - RNA, 21 nt, RNAi
gcugaugaagguaaugaaguu

SEQ ID NO: 28875 - RNA, 21 nt, RNAi
uucgacuacuuccauuacuuc

SEQ ID NO: 28876 - DNA, 21 bp, homo sapiens
cagaaccaattaggaactctg

SEQ ID NO: 28877 - RNA, 21 nt, RNAi
gaaccaauuaggaacucuguu

SEQ ID NO: 28878 - RNA, 21 nt, RNAi
uucuugguuaauccuugagac

SEQ ID NO: 28879 - DNA, 21 bp, homo sapiens
caattaggaactctgtgaaag

SEQ ID NO: 28880 - RNA, 21 nt, RNAi
auuaggaacucugugaaaguu

SEQ ID NO: 28881 - RNA, 21 nt, RNAi
uuuaauccuugagacacuuuc

SEQ ID NO: 28882 - DNA, 21 bp, homo sapiens
cagatggatcttgaagttaaa

SEQ ID NO: 28883 - RNA, 21 nt, RNAi
gauggaucuugaaguuaaauu

SEQ ID NO: 28884 - RNA, 21 nt, RNAi
uucuaccuagaacuucaauuu

SEQ ID NO: 28885 - DNA, 21 bp, homo sapiens
cagttggtgcaattagaagct

SEQ ID NO: 28886 - RNA, 21 nt, RNAi
guuggugcaauuagaagcuuu

SEQ ID NO: 28887 - RNA, 21 nt, RNAi
uucaaccacguuaaucuucga

SEQ ID NO: 28888 - DNA, 21 bp, homo sapiens
caattagaagctatgctaaga

SEQ ID NO: 28889 - RNA, 21 nt, RNAi
auuagaagcuaugcuaagauu

SEQ ID NO: 28890 - RNA, 21 nt, RNAi
uuuaaucuucgauacgauucu

SEQ ID NO: 28891 - DNA, 21 bp, homo sapiens
caggaaagtgagaaggagaag

SEQ ID NO: 28892 - RNA, 21 nt, RNAi
ggaaagugagaaggagaaguu

SEQ ID NO: 28893 - RNA, 21 nt, RNAi
uuccuuucacucuuccucuuc

SEQ ID NO: 28894 - DNA, 21 bp, homo sapiens
cagcatgaattacagacaatt

SEQ ID NO: 28895 - RNA, 21 nt, RNAi
gcaugaauuacagacaauuuu

SEQ ID NO: 28896 - RNA, 21 nt, RNAi
uucguacuuaaugucuguuaa

SEQ ID NO: 28897 - DNA, 21 bp, homo sapiens
cagacaattagaggagatctt

SEQ ID NO: 28898 - RNA, 21 nt, RNAi
gacaauuagaggagaucuuuu

SEQ ID NO: 28899 - RNA, 21 nt, RNAi
uucuguuaaucuccucuagaa

SEQ ID NO: 28900 - DNA, 21 bp, homo sapiens
caattagaggagatcttgaaa

SEQ ID NO: 28901 - RNA, 21 nt, RNAi
auuagaggagaucuugaaauu

SEQ ID NO: 28902 - RNA, 21 nt, RNAi
uuuaaucuccucuagaacuuu

SEQ ID NO: 28903 - DNA, 21 bp, homo sapiens
cagcaatttgcaagacatgca

SEQ ID NO: 28904 - RNA, 21 nt, RNAi
gcaauuugcaagacaugcauu

SEQ ID NO: 28905 - RNA, 21 nt, RNAi
uucguuaaacguucuguacgu

SEQ ID NO: 28906 - DNA, 21 bp, homo sapiens
caatttgcaagacatgcagtc

SEQ ID NO: 28907 - RNA, 21 nt, RNAi
auuugcaagacaugcagucuu

SEQ ID NO: 28908 - RNA, 21 nt, RNAi
uuuaaacguucuguacgucag

SEQ ID NO: 28909 - DNA, 21 bp, homo sapiens
caagacatgcagtcacaagaa

SEQ ID NO: 28910 - RNA, 21 nt, RNAi
agacaugcagucacaagaauu

SEQ ID NO: 28911 - RNA, 21 nt, RNAi
uuucuguacgucaguguucuu

SEQ ID NO: 28912 - DNA, 21 bp, homo sapiens
catgcagtcacaagaaattag

SEQ ID NO: 28913 - RNA, 21 nt, RNAi
ugcagucacaagaaauuaguu

SEQ ID NO: 28914 - RNA, 21 nt, RNAi
uuacgucaguguucuuuaauc

SEQ ID NO: 28915 - DNA, 21 bp, homo sapiens
cagtcacaagaaattagtggc

SEQ ID NO: 28916 - RNA, 21 nt, RNAi
gucacaagaaauuaguggcuu

SEQ ID NO: 28917 - RNA, 21 nt, RNAi
uucaguguucuuuaaucaccg

SEQ ID NO: 28918 - DNA, 21 bp, homo sapiens
cacaagaaattagtggcctta

SEQ ID NO: 28919 - RNA, 21 nt, RNAi
caagaaauuaguggccuuauu

SEQ ID NO: 28920 - RNA, 21 nt, RNAi
uuguucuuuaaucaccggaau

SEQ ID NO: 28921 - DNA, 21 bp, homo sapiens
caagaaattagtggccttaaa

SEQ ID NO: 28922 - RNA, 21 nt, RNAi
agaaauuaguggccuuaaauu

SEQ ID NO: 28923 - RNA, 21 nt, RNAi
uuucuuuaaucaccggaauuu

SEQ ID NO: 28924 - DNA, 21 bp, homo sapiens
catgagttgtcaacaagtcaa

SEQ ID NO: 28925 - RNA, 21 nt, RNAi
ugaguugucaacaagucaauu

SEQ ID NO: 28926 - RNA, 21 nt, RNAi
uuacucaacaguuguucaguu

SEQ ID NO: 28927 - DNA, 21 bp, homo sapiens
caatgcacaccttcagtgctc

SEQ ID NO: 28928 - RNA, 21 nt, RNAi
augcacaccuucagugcucuu

SEQ ID NO: 28929 - RNA, 21 nt, RNAi
uuuacguguggaagucacgag

SEQ ID NO: 28930 - DNA, 21 bp, homo sapiens
cacaccttcagtgctctctgc

SEQ ID NO: 28931 - RNA, 21 nt, RNAi
caccuucagugcucucugcuu

SEQ ID NO: 28932 - RNA, 21 nt, RNAi
uuguggaagucacgagagacg

SEQ ID NO: 28933 - DNA, 21 bp, homo sapiens
caccttcagtgctctctgcaa

SEQ ID NO: 28934 - RNA, 21 nt, RNAi
ccuucagugcucucugcaauu

SEQ ID NO: 28935 - RNA, 21 nt, RNAi
uuggaagucacgagagacguu

SEQ ID NO: 28936 - DNA, 21 bp, homo sapiens
cagtgctctctgcaaacaaca

SEQ ID NO: 28937 - RNA, 21 nt, RNAi
gugcucucugcaaacaacauu

SEQ ID NO: 28938 - RNA, 21 nt, RNAi
uucacgagagacguuuguugu

SEQ ID NO: 28939 - DNA, 21 bp, homo sapiens
caaacaacaatgaacaagctg

SEQ ID NO: 28940 - RNA, 21 nt, RNAi
aacaacaaugaacaagcuguu

SEQ ID NO: 28941 - RNA, 21 nt, RNAi
uuuuguuguuacuuguucgac

SEQ ID NO: 28942 - DNA, 21 bp, homo sapiens
caacaatgaacaagctgaatg

SEQ ID NO: 28943 - RNA, 21 nt, RNAi
acaaugaacaagcugaauguu

SEQ ID NO: 28944 - RNA, 21 nt, RNAi
uuuguuacuuguucgacuuac

SEQ ID NO: 28945 - DNA, 21 bp, homo sapiens
caatgaacaagctgaatgagc

SEQ ID NO: 28946 - RNA, 21 nt, RNAi
augaacaagcugaaugagcuu

SEQ ID NO: 28947 - RNA, 21 nt, RNAi
uuuacuuguucgacuuacucg

SEQ ID NO: 28948 - DNA, 21 bp, homo sapiens
caagctgaatgagctagagaa

SEQ ID NO: 28949 - RNA, 21 nt, RNAi
agcugaaugagcuagagaauu

SEQ ID NO: 28950 - RNA, 21 nt, RNAi
uuucgacuuacucgaucucuu

SEQ ID NO: 28951 - DNA, 21 bp, homo sapiens
caaggtcagaatgtatcacag

SEQ ID NO: 28952 - RNA, 21 nt, RNAi
aggucagaauguaucacaguu

SEQ ID NO: 28953 - RNA, 21 nt, RNAi
uuuccagucuuacauaguguc

SEQ ID NO: 28954 - DNA, 21 bp, homo sapiens
cagaatgtatcacagcaacta

SEQ ID NO: 28955 - RNA, 21 nt, RNAi
gaauguaucacagcaacuauu

SEQ ID NO: 28956 - RNA, 21 nt, RNAi
uucuuacauagugucguugau

SEQ ID NO: 28957 - DNA, 21 bp, homo sapiens
cagtggtcttctccatggtga

SEQ ID NO: 28958 - RNA, 21 nt, RNAi
guggucuucuccauggugauu

SEQ ID NO: 28959 - RNA, 21 nt, RNAi
uucaccagaagagguaccacu

SEQ ID NO: 28960 - DNA, 21 bp, homo sapiens
catggtgagttagtggaagac

SEQ ID NO: 28961 - RNA, 21 nt, RNAi
uggugaguuaguggaagacuu

SEQ ID NO: 28962 - RNA, 21 nt, RNAi
uuaccacucaaucaccuucug

SEQ ID NO: 28963 - DNA, 21 bp, homo sapiens
cataccaggaggtgaatttgg

SEQ ID NO: 28964 - RNA, 21 nt, RNAi
uaccaggaggugaauuugguu

SEQ ID NO: 28965 - RNA, 21 nt, RNAi
uuaugguccuccacuuaaacc

SEQ ID NO: 28966 - DNA, 21 bp, homo sapiens
caggaggtgaatttggtgaac

SEQ ID NO: 28967 - RNA, 21 nt, RNAi
ggaggugaauuuggugaacuu

SEQ ID NO: 28968 - RNA, 21 nt, RNAi
uuccuccacuuaaaccacuug

SEQ ID NO: 28969 - DNA, 21 bp, homo sapiens
cattggacgagagtaattcct

SEQ ID NO: 28970 - RNA, 21 nt, RNAi
uuggacgagaguaauuccuuu

SEQ ID NO: 28971 - RNA, 21 nt, RNAi
uuaaccugcucucauuaagga

SEQ ID NO: 28972 - DNA, 21 bp, homo sapiens
cacttgacattgtcagacaaa

SEQ ID NO: 28973 - RNA, 21 nt, RNAi
cuugacauugucagacaaauu

SEQ ID NO: 28974 - RNA, 21 nt, RNAi
uugaacuguaacagucuguuu

SEQ ID NO: 28975 - DNA, 21 bp, homo sapiens
cattgtcagacaaagaagttc

SEQ ID NO: 28976 - RNA, 21 nt, RNAi
uugucagacaaagaaguucuu

SEQ ID NO: 28977 - RNA, 21 nt, RNAi
uuaacagucuguuucuucaag

SEQ ID NO: 28978 - DNA, 21 bp, homo sapiens
cagacaaagaagttcaaatgc

SEQ ID NO: 28979 - RNA, 21 nt, RNAi
gacaaagaaguucaaaugcuu

SEQ ID NO: 28980 - RNA, 21 nt, RNAi
uucuguuucuucaaguuuacg

SEQ ID NO: 28981 - DNA, 21 bp, homo sapiens
caaagaagttcaaatgcactt

SEQ ID NO: 28982 - RNA, 21 nt, RNAi
aagaaguucaaaugcacuuuu

SEQ ID NO: 28983 - RNA, 21 nt, RNAi
uuuucuucaaguuuacgugaa

SEQ ID NO: 28984 - DNA, 21 bp, homo sapiens
caaatgcactttgccgaattg

SEQ ID NO: 28985 - RNA, 21 nt, RNAi
aaugcacuuugccgaauuguu

SEQ ID NO: 28986 - RNA, 21 nt, RNAi
uuuuacgugaaacggcuuaac

SEQ ID NO: 28987 - DNA, 21 bp, homo sapiens
cactttgccgaattgcaagag

SEQ ID NO: 28988 - RNA, 21 nt, RNAi
cuuugccgaauugcaagaguu

SEQ ID NO: 28989 - RNA, 21 nt, RNAi
uugaaacggcuuaacguucuc

SEQ ID NO: 28990 - DNA, 21 bp, homo sapiens
catgatcagcactgtcagatg

SEQ ID NO: 28991 - RNA, 21 nt, RNAi
ugaucagcacugucagauguu

SEQ ID NO: 28992 - RNA, 21 nt, RNAi
uuacuagucgugacagucuac

SEQ ID NO: 28993 - DNA, 21 bp, homo sapiens
cagcactgtcagatgagctct

SEQ ID NO: 28994 - RNA, 21 nt, RNAi
gcacugucagaugagcucuuu

SEQ ID NO: 28995 - RNA, 21 nt, RNAi
uucgugacagucuacucgaga

SEQ ID NO: 28996 - DNA, 21 bp, homo sapiens
cactgtcagatgagctctaaa

SEQ ID NO: 28997 - RNA, 21 nt, RNAi
cugucagaugagcucuaaauu

SEQ ID NO: 28998 - RNA, 21 nt, RNAi
uugacagucuacucgagauuu

SEQ ID NO: 28999 - DNA, 21 bp, homo sapiens
cagagctgcagacctatgttg

SEQ ID NO: 29000 - RNA, 21 nt, RNAi
gagcugcagaccuauguuguu

SEQ ID NO: 29001 - RNA, 21 nt, RNAi
uucucgacgucuggauacaac

SEQ ID NO: 29002 - DNA, 21 bp, homo sapiens
cagacctatgttgactcatta

SEQ ID NO: 29003 - RNA, 21 nt, RNAi
gaccuauguugacucauuauu

SEQ ID NO: 29004 - RNA, 21 nt, RNAi
uucuggauacaacugaguaau

SEQ ID NO: 29005 - DNA, 21 bp, homo sapiens
caacgaatctgagaaactttc

SEQ ID NO: 29006 - RNA, 21 nt, RNAi
acgaaucugagaaacuuucuu

SEQ ID NO: 29007 - RNA, 21 nt, RNAi
uuugcuuagacucuuugaaag

SEQ ID NO: 29008 - DNA, 21 bp, homo sapiens
caaggtgacttggtgaaggag

SEQ ID NO: 29009 - RNA, 21 nt, RNAi
aggugacuuggugaaggaguu

SEQ ID NO: 29010 - RNA, 21 nt, RNAi
uuuccacugaaccacuuccuc

SEQ ID NO: 29011 - DNA, 21 bp, homo sapiens
catcctcttgtgtgcctgaca

SEQ ID NO: 29012 - RNA, 21 nt, RNAi
uccucuugugugccugacauu

SEQ ID NO: 29013 - RNA, 21 nt, RNAi
uuaggagaacacacggacugu

SEQ ID NO: 29014 - DNA, 21 bp, homo sapiens
cagctctagtcttagcagttt

SEQ ID NO: 29015 - RNA, 21 nt, RNAi
gcucuagucuuagcaguuuuu

SEQ ID NO: 29016 - RNA, 21 nt, RNAi
uucgagaucagaaucgucaaa

SEQ ID NO: 29017 - DNA, 21 bp, homo sapiens
cagacaggagatatgtctctt

SEQ ID NO: 29018 - RNA, 21 nt, RNAi
gacaggagauaugucucuuuu

SEQ ID NO: 29019 - RNA, 21 nt, RNAi
uucuguccucuauacagagaa

SEQ ID NO: 29020 - DNA, 21 bp, homo sapiens
cagcaaaccagtgcagtgtag

SEQ ID NO: 29021 - RNA, 21 nt, RNAi
gcaaaccagugcaguguaguu

SEQ ID NO: 29022 - RNA, 21 nt, RNAi
uucguuuggucacgucacauc

SEQ ID NO: 29023 - DNA, 21 bp, homo sapiens
caaaccagtgcagtgtagatg

SEQ ID NO: 29024 - RNA, 21 nt, RNAi
aaccagugcaguguagauguu

SEQ ID NO: 29025 - RNA, 21 nt, RNAi
uuuuggucacgucacaucuac

SEQ ID NO: 29026 - DNA, 21 bp, homo sapiens
cagtgcagtgtagatgaagta

SEQ ID NO: 29027 - RNA, 21 nt, RNAi
gugcaguguagaugaaguauu

SEQ ID NO: 29028 - RNA, 21 nt, RNAi
uucacgucacaucuacuucau

SEQ ID NO: 29029 - DNA, 21 bp, homo sapiens
cagcagtctgcaggaggagaa

SEQ ID NO: 29030 - RNA, 21 nt, RNAi
gcagucugcaggaggagaauu

SEQ ID NO: 29031 - RNA, 21 nt, RNAi
uucgucagacguccuccucuu

SEQ ID NO: 29032 - DNA, 21 bp, homo sapiens
cagtctgcaggaggagaatct

SEQ ID NO: 29033 - RNA, 21 nt, RNAi
gucugcaggaggagaaucuuu

SEQ ID NO: 29034 - RNA, 21 nt, RNAi
uucagacguccuccucuuaga

SEQ ID NO: 29035 - DNA, 21 bp, homo sapiens
caggaggagaatctgaccagg

SEQ ID NO: 29036 - RNA, 21 nt, RNAi
ggaggagaaucugaccagguu

SEQ ID NO: 29037 - RNA, 21 nt, RNAi
uuccuccucuuagacuggucc

SEQ ID NO: 29038 - DNA, 21 bp, homo sapiens
caagagctcgagcagttatta

SEQ ID NO: 29039 - RNA, 21 nt, RNAi
agagcucgagcaguuauuauu

SEQ ID NO: 29040 - RNA, 21 nt, RNAi
uuucucgagcucgucaauaau

SEQ ID NO: 29041 - DNA, 21 bp, homo sapiens
cagttattaagttctgaaagg

SEQ ID NO: 29042 - RNA, 21 nt, RNAi
guuauuaaguucugaaagguu

SEQ ID NO: 29043 - RNA, 21 nt, RNAi
uucaauaauucaagacuuucc

SEQ ID NO: 29044 - DNA, 21 bp, homo sapiens
caagagcttgactgccttagg

SEQ ID NO: 29045 - RNA, 21 nt, RNAi
agagcuugacugccuuagguu

SEQ ID NO: 29046 - RNA, 21 nt, RNAi
uuucucgaacugacggaaucc

SEQ ID NO: 29047 - DNA, 21 bp, homo sapiens
cagtggcaacagaagctgaca

SEQ ID NO: 29048 - RNA, 21 nt, RNAi
guggcaacagaagcugacauu

SEQ ID NO: 29049 - RNA, 21 nt, RNAi
uucaccguugucuucgacugu

SEQ ID NO: 29050 - DNA, 21 bp, homo sapiens
caacagaagctgacaagcgtg

SEQ ID NO: 29051 - RNA, 21 nt, RNAi
acagaagcugacaagcguguu

SEQ ID NO: 29052 - RNA, 21 nt, RNAi
uuugucuucgacuguucgcac

SEQ ID NO: 29053 - DNA, 21 bp, homo sapiens
cagaagctgacaagcgtgact

SEQ ID NO: 29054 - RNA, 21 nt, RNAi
gaagcugacaagcgugacuuu

SEQ ID NO: 29055 - RNA, 21 nt, RNAi
uucuucgacuguucgcacuga

SEQ ID NO: 29056 - DNA, 21 bp, homo sapiens
caagcgtgactctggagatgg

SEQ ID NO: 29057 - RNA, 21 nt, RNAi
agcgugacucuggagaugguu

SEQ ID NO: 29058 - RNA, 21 nt, RNAi
uuucgcacugagaccucuacc

SEQ ID NO: 29059 - DNA, 21 bp, homo sapiens
cagacggaacaactgtcactt

SEQ ID NO: 29060 - RNA, 21 nt, RNAi
gacggaacaacugucacuuuu

SEQ ID NO: 29061 - RNA, 21 nt, RNAi
uucugccuuguugacagugaa

SEQ ID NO: 29062 - DNA, 21 bp, homo sapiens
caactgtcacttgagctggaa

SEQ ID NO: 29063 - RNA, 21 nt, RNAi
acugucacuugagcuggaauu

SEQ ID NO: 29064 - RNA, 21 nt, RNAi
uuugacagugaacucgaccuu

SEQ ID NO: 29065 - DNA, 21 bp, homo sapiens
cacttgagctggaagtagcac

SEQ ID NO: 29066 - RNA, 21 nt, RNAi
cuugagcuggaaguagcacuu

SEQ ID NO: 29067 - RNA, 21 nt, RNAi
uugaacucgaccuucaucgug

SEQ ID NO: 29068 - DNA, 21 bp, homo sapiens
cacgactccagctacaaggtc

SEQ ID NO: 29069 - RNA, 21 nt, RNAi
cgacuccagcuacaaggucuu

SEQ ID NO: 29070 - RNA, 21 nt, RNAi
uugcugaggucgauguuccag

SEQ ID NO: 29071 - DNA, 21 bp, homo sapiens
cagctacaaggtctggactta

SEQ ID NO: 29072 - RNA, 21 nt, RNAi
gcuacaaggucuggacuuauu

SEQ ID NO: 29073 - RNA, 21 nt, RNAi
uucgauguuccagaccugaau

SEQ ID NO: 29074 - DNA, 21 bp, homo sapiens
caaggtctggacttaagttct

SEQ ID NO: 29075 - RNA, 21 nt, RNAi
aggucuggacuuaaguucuuu

SEQ ID NO: 29076 - RNA, 21 nt, RNAi
uuuccagaccugaauucaaga

SEQ ID NO: 29077 - DNA, 21 bp, homo sapiens
catcgacacagaagatgctat

SEQ ID NO: 29078 - RNA, 21 nt, RNAi
ucgacacagaagaugcuauuu

SEQ ID NO: 29079 - RNA, 21 nt, RNAi
uuagcugugucuucuacgaua

SEQ ID NO: 29080 - DNA, 21 bp, homo sapiens
cacagaagatgctattcaagg

SEQ ID NO: 29081 - RNA, 21 nt, RNAi
cagaagaugcuauucaagguu

SEQ ID NO: 29082 - RNA, 21 nt, RNAi
uugucuucuacgauaaguucc

SEQ ID NO: 29083 - DNA, 21 bp, homo sapiens
cagaagatgctattcaaggcc

SEQ ID NO: 29084 - RNA, 21 nt, RNAi
gaagaugcuauucaaggccuu

SEQ ID NO: 29085 - RNA, 21 nt, RNAi
uucuucuacgauaaguuccgg

SEQ ID NO: 29086 - DNA, 21 bp, homo sapiens
caaggccgaaatgagagctgt

SEQ ID NO: 29087 - RNA, 21 nt, RNAi
aggccgaaaugagagcuguuu

SEQ ID NO: 29088 - RNA, 21 nt, RNAi
uuuccggcuuuacucucgaca

SEQ ID NO: 29089 - DNA, 21 bp, homo sapiens
catacttcagaaactacagaa

SEQ ID NO: 29090 - RNA, 21 nt, RNAi
uacuucagaaacuacagaauu

SEQ ID NO: 29091 - RNA, 21 nt, RNAi
uuaugaagucuuugaugucuu

SEQ ID NO: 29092 - DNA, 21 bp, homo sapiens
cagaaactacagaaagaacac

SEQ ID NO: 29093 - RNA, 21 nt, RNAi
gaaacuacagaaagaacacuu

SEQ ID NO: 29094 - RNA, 21 nt, RNAi
uucuuugaugucuuucuugug

SEQ ID NO: 29095 - DNA, 21 bp, homo sapiens
cagaaagaacaccaaagcatg

SEQ ID NO: 29096 - RNA, 21 nt, RNAi
gaaagaacaccaaagcauguu

SEQ ID NO: 29097 - RNA, 21 nt, RNAi
uucuuucuugugguuucguac

SEQ ID NO: 29098 - DNA, 21 bp, homo sapiens
caccaaagcatgatgttcatc

SEQ ID NO: 29099 - RNA, 21 nt, RNAi
ccaaagcaugauguucaucuu

SEQ ID NO: 29100 - RNA, 21 nt, RNAi
uugguuucguacuacaaguag

SEQ ID NO: 29101 - DNA, 21 bp, homo sapiens
caaagcatgatgttcatcaga

SEQ ID NO: 29102 - RNA, 21 nt, RNAi
aagcaugauguucaucagauu

SEQ ID NO: 29103 - RNA, 21 nt, RNAi
uuuucguacuacaaguagucu

SEQ ID NO: 29104 - DNA, 21 bp, homo sapiens
catgatgttcatcagatttgt

SEQ ID NO: 29105 - RNA, 21 nt, RNAi
ugauguucaucagauuuguuu

SEQ ID NO: 29106 - RNA, 21 nt, RNAi
uuacuacaaguagucuaaaca

SEQ ID NO: 29107 - DNA, 21 bp, homo sapiens
cagatttgtgataaagatgct

SEQ ID NO: 29108 - RNA, 21 nt, RNAi
gauuugugauaaagaugcuuu

SEQ ID NO: 29109 - RNA, 21 nt, RNAi
uucuaaacacuauuucuacga

SEQ ID NO: 29110 - DNA, 21 bp, homo sapiens
cagcaggacctcaatctagac

SEQ ID NO: 29111 - RNA, 21 nt, RNAi
gcaggaccucaaucuagacuu

SEQ ID NO: 29112 - RNA, 21 nt, RNAi
uucguccuggaguuagaucug

SEQ ID NO: 29113 - DNA, 21 bp, homo sapiens
caggacctcaatctagacatt

SEQ ID NO: 29114 - RNA, 21 nt, RNAi
ggaccucaaucuagacauuuu

SEQ ID NO: 29115 - RNA, 21 nt, RNAi
uuccuggaguuagaucuguaa

SEQ ID NO: 29116 - DNA, 21 bp, homo sapiens
cagataccaattatgagcctc

SEQ ID NO: 29117 - RNA, 21 nt, RNAi
gauaccaauuaugagccucuu

SEQ ID NO: 29118 - RNA, 21 nt, RNAi
uucuaugguuaauacucggag

SEQ ID NO: 29119 - DNA, 21 bp, homo sapiens
cagaatgcatttctgaattgt

SEQ ID NO: 29120 - RNA, 21 nt, RNAi
gaaugcauuucugaauuguuu

SEQ ID NO: 29121 - RNA, 21 nt, RNAi
uucuuacguaaagacuuaaca

SEQ ID NO: 29122 - DNA, 21 bp, homo sapiens
caggaagatatccataatctt

SEQ ID NO: 29123 - RNA, 21 nt, RNAi
ggaagauauccauaaucuuuu

SEQ ID NO: 29124 - RNA, 21 nt, RNAi
uuccuucuauagguauuagaa

SEQ ID NO: 29125 - DNA, 21 bp, homo sapiens
catgtgatagaggaccgtgac

SEQ ID NO: 29126 - RNA, 21 nt, RNAi
ugugauagaggaccgugacuu

SEQ ID NO: 29127 - RNA, 21 nt, RNAi
uuacacuaucuccuggcacug

SEQ ID NO: 29128 - DNA, 21 bp, homo sapiens
catttacaggaggtacaacta

SEQ ID NO: 29129 - RNA, 21 nt, RNAi
uuuacaggagguacaacuauu

SEQ ID NO: 29130 - RNA, 21 nt, RNAi
uuaaauguccuccauguugau

SEQ ID NO: 29131 - DNA, 21 bp, homo sapiens
caggaggtacaactaatgacc

SEQ ID NO: 29132 - RNA, 21 nt, RNAi
ggagguacaacuaaugaccuu

SEQ ID NO: 29133 - RNA, 21 nt, RNAi
uuccuccauguugauuacugg

SEQ ID NO: 29134 - DNA, 21 bp, homo sapiens
caccaggagttactccagaga

SEQ ID NO: 29135 - RNA, 21 nt, RNAi
ccaggaguuacuccagagauu

SEQ ID NO: 29136 - RNA, 21 nt, RNAi
uugguccucaaugaggucucu

SEQ ID NO: 29137 - DNA, 21 bp, homo sapiens
caggagttactccagagagta

SEQ ID NO: 29138 - RNA, 21 nt, RNAi
ggaguuacuccagagaguauu

SEQ ID NO: 29139 - RNA, 21 nt, RNAi
uuccucaaugaggucucucau

SEQ ID NO: 29140 - DNA, 21 bp, homo sapiens
cagagagtagaaacttctgaa

SEQ ID NO: 29141 - RNA, 21 nt, RNAi
gagaguagaaacuucugaauu

SEQ ID NO: 29142 - RNA, 21 nt, RNAi
uucucucaucuuugaagacuu

SEQ ID NO: 29143 - DNA, 21 bp, homo sapiens
catgcagataaatcatcacgt

SEQ ID NO: 29144 - RNA, 21 nt, RNAi
ugcagauaaaucaucacguuu

SEQ ID NO: 29145 - RNA, 21 nt, RNAi
uuacgucuauuuaguagugca

SEQ ID NO: 29146 - DNA, 21 bp, homo sapiens
cagataaatcatcacgtgaag

SEQ ID NO: 29147 - RNA, 21 nt, RNAi
gauaaaucaucacgugaaguu

SEQ ID NO: 29148 - RNA, 21 nt, RNAi
uucuauuuaguagugcacuuc

SEQ ID NO: 29149 - DNA, 21 bp, homo sapiens
catcacgtgaagatattggag

SEQ ID NO: 29150 - RNA, 21 nt, RNAi
ucacgugaagauauuggaguu

SEQ ID NO: 29151 - RNA, 21 nt, RNAi
uuagugcacuucuauaaccuc

SEQ ID NO: 29152 - DNA, 21 bp, homo sapiens
cacgtgaagatattggagata

SEQ ID NO: 29153 - RNA, 21 nt, RNAi
cgugaagauauuggagauauu

SEQ ID NO: 29154 - RNA, 21 nt, RNAi
uugcacuucuauaaccucuau

SEQ ID NO: 29155 - DNA, 21 bp, homo sapiens
caaggtgaatgacagctggaa

SEQ ID NO: 29156 - RNA, 21 nt, RNAi
aggugaaugacagcuggaauu

SEQ ID NO: 29157 - RNA, 21 nt, RNAi
uuuccacuuacugucgaccuu

SEQ ID NO: 29158 - DNA, 21 bp, homo sapiens
cagctggaaggagagatttct

SEQ ID NO: 29159 - RNA, 21 nt, RNAi
gcuggaaggagagauuucuuu

SEQ ID NO: 29160 - RNA, 21 nt, RNAi
uucgaccuuccucucuaaaga

SEQ ID NO: 29161 - DNA, 21 bp, homo sapiens
cagatcggagaaagctagcat

SEQ ID NO: 29162 - RNA, 21 nt, RNAi
gaucggagaaagcuagcauuu

SEQ ID NO: 29163 - RNA, 21 nt, RNAi
uucuagccucuuucgaucgua

SEQ ID NO: 29164 - DNA, 21 bp, homo sapiens
caaacagagaagctatgttta

SEQ ID NO: 29165 - RNA, 21 nt, RNAi
aacagagaagcuauguuuauu

SEQ ID NO: 29166 - RNA, 21 nt, RNAi
uuuugucucuucgauacaaau

SEQ ID NO: 29167 - DNA, 21 bp, homo sapiens
cagagaagctatgtttagaaa

SEQ ID NO: 29168 - RNA, 21 nt, RNAi
gagaagcuauguuuagaaauu

SEQ ID NO: 29169 - RNA, 21 nt, RNAi
uucucuucgauacaaaucuuu

SEQ ID NO: 29170 - DNA, 21 bp, homo sapiens
cagaaggttattgtctgcctt

SEQ ID NO: 29171 - RNA, 21 nt, RNAi
gaagguuauugucugccuuuu

SEQ ID NO: 29172 - RNA, 21 nt, RNAi
uucuuccaauaacagacggaa

SEQ ID NO: 29173 - DNA, 21 bp, homo sapiens
cagtggtcacaagtgagagaa

SEQ ID NO: 29174 - RNA, 21 nt, RNAi
guggucacaagugagagaauu

SEQ ID NO: 29175 - RNA, 21 nt, RNAi
uucaccaguguucacucucuu

SEQ ID NO: 29176 - DNA, 21 bp, homo sapiens
cacaagtgagagaaaccagct

SEQ ID NO: 29177 - RNA, 21 nt, RNAi
caagugagagaaaccagcuuu

SEQ ID NO: 29178 - RNA, 21 nt, RNAi
uuguucacucucuuuggucga

SEQ ID NO: 29179 - DNA, 21 bp, homo sapiens
caagtgagagaaaccagcttc

SEQ ID NO: 29180 - RNA, 21 nt, RNAi
agugagagaaaccagcuucuu

SEQ ID NO: 29181 - RNA, 21 nt, RNAi
uuucacucucuuuggucgaag

SEQ ID NO: 29182 - DNA, 21 bp, homo sapiens
cagcttcgtggagaattagat

SEQ ID NO: 29183 - RNA, 21 nt, RNAi
gcuucguggagaauuagauuu

SEQ ID NO: 29184 - RNA, 21 nt, RNAi
uucgaagcaccucuuaaucua

SEQ ID NO: 29185 - DNA, 21 bp, homo sapiens
cacggcactggatcagttgtc

SEQ ID NO: 29186 - RNA, 21 nt, RNAi
cggcacuggaucaguugucuu

SEQ ID NO: 29187 - RNA, 21 nt, RNAi
uugccgugaccuagucaacag

SEQ ID NO: 29188 - DNA, 21 bp, homo sapiens
cactggatcagttgtctgaaa

SEQ ID NO: 29189 - RNA, 21 nt, RNAi
cuggaucaguugucugaaauu

SEQ ID NO: 29190 - RNA, 21 nt, RNAi
uugaccuagucaacagacuuu

SEQ ID NO: 29191 - DNA, 21 bp, homo sapiens
cacaagagcttgagtctcatc

SEQ ID NO: 29192 - RNA, 21 nt, RNAi
caagagcuugagucucaucuu

SEQ ID NO: 29193 - RNA, 21 nt, RNAi
uuguucucgaacucagaguag

SEQ ID NO: 29194 - DNA, 21 bp, homo sapiens
caagagcttgagtctcatcaa

SEQ ID NO: 29195 - RNA, 21 nt, RNAi
agagcuugagucucaucaauu

SEQ ID NO: 29196 - RNA, 21 nt, RNAi
uuucucgaacucagaguaguu

SEQ ID NO: 29197 - DNA, 21 bp, homo sapiens
catcaaagtgagtgtctccat

SEQ ID NO: 29198 - RNA, 21 nt, RNAi
ucaaagugagugucuccauuu

SEQ ID NO: 29199 - RNA, 21 nt, RNAi
uuaguuucacucacagaggua

SEQ ID NO: 29200 - DNA, 21 bp, homo sapiens
caaagtgagtgtctccattgc

SEQ ID NO: 29201 - RNA, 21 nt, RNAi
aagugagugucuccauugcuu

SEQ ID NO: 29202 - RNA, 21 nt, RNAi
uuuucacucacagagguaacg

SEQ ID NO: 29203 - DNA, 21 bp, homo sapiens
cattgcattcaggtggcagag

SEQ ID NO: 29204 - RNA, 21 nt, RNAi
uugcauucagguggcagaguu

SEQ ID NO: 29205 - RNA, 21 nt, RNAi
uuaacguaaguccaccgucuc

SEQ ID NO: 29206 - DNA, 21 bp, homo sapiens
cattcaggtggcagaggcaga

SEQ ID NO: 29207 - RNA, 21 nt, RNAi
uucagguggcagaggcagauu

SEQ ID NO: 29208 - RNA, 21 nt, RNAi
uuaaguccaccgucuccgucu

SEQ ID NO: 29209 - DNA, 21 bp, homo sapiens
cagaggcagaggtgaaggaaa

SEQ ID NO: 29210 - RNA, 21 nt, RNAi
gaggcagaggugaaggaaauu

SEQ ID NO: 29211 - RNA, 21 nt, RNAi
uucuccgucuccacuuccuuu

SEQ ID NO: 29212 - DNA, 21 bp, homo sapiens
cagactttgtcctctgatgtg

SEQ ID NO: 29213 - RNA, 21 nt, RNAi
gacuuuguccucugauguguu

SEQ ID NO: 29214 - RNA, 21 nt, RNAi
uucugaaacaggagacuacac

SEQ ID NO: 29215 - DNA, 21 bp, homo sapiens
cacaggcactgtctttgacaa

SEQ ID NO: 29216 - RNA, 21 nt, RNAi
caggcacugucuuugacaauu

SEQ ID NO: 29217 - RNA, 21 nt, RNAi
uuguccgugacagaaacuguu

SEQ ID NO: 29218 - DNA, 21 bp, homo sapiens
cacaactgaataaagagaaag

SEQ ID NO: 29219 - RNA, 21 nt, RNAi
caacugaauaaagagaaaguu

SEQ ID NO: 29220 - RNA, 21 nt, RNAi
uuguugacuuauuucucuuuc

SEQ ID NO: 29221 - DNA, 21 bp, homo sapiens
caaggaatctgaaagcctgca

SEQ ID NO: 29222 - RNA, 21 nt, RNAi
aggaaucugaaagccugcauu

SEQ ID NO: 29223 - RNA, 21 nt, RNAi
uuuccuuagacuuucggacgu

SEQ ID NO: 29224 - DNA, 21 bp, homo sapiens
caggccagactgagtgaatca

SEQ ID NO: 29225 - RNA, 21 nt, RNAi
ggccagacugagugaaucauu

SEQ ID NO: 29226 - RNA, 21 nt, RNAi
uuccggucugacucacuuagu

SEQ ID NO: 29227 - DNA, 21 bp, homo sapiens
cagactgagtgaatcagatta

SEQ ID NO: 29228 - RNA, 21 nt, RNAi
gacugagugaaucagauuauu

SEQ ID NO: 29229 - RNA, 21 nt, RNAi
uucugacucacuuagucuaau

SEQ ID NO: 29230 - DNA, 21 bp, homo sapiens
cactggtggagaaaggtgagt

SEQ ID NO: 29231 - RNA, 21 nt, RNAi
cugguggagaaaggugaguuu

SEQ ID NO: 29232 - RNA, 21 nt, RNAi
uugaccaccucuuuccacuca

SEQ ID NO: 29233 - DNA, 21 bp, homo sapiens
cattgaggctgagctcaacac

SEQ ID NO: 29234 - RNA, 21 nt, RNAi
uugaggcugagcucaacacuu

SEQ ID NO: 29235 - RNA, 21 nt, RNAi
uuaacuccgacucgaguugug

SEQ ID NO: 29236 - DNA, 21 bp, homo sapiens
caacacaggaggaagtgcatc

SEQ ID NO: 29237 - RNA, 21 nt, RNAi
acacaggaggaagugcaucuu

SEQ ID NO: 29238 - RNA, 21 nt, RNAi
uuuguguccuccuucacguag

SEQ ID NO: 29239 - DNA, 21 bp, homo sapiens
cacaggaggaagtgcatcagc

SEQ ID NO: 29240 - RNA, 21 nt, RNAi
caggaggaagugcaucagcuu

SEQ ID NO: 29241 - RNA, 21 nt, RNAi
uuguccuccuucacguagucg

SEQ ID NO: 29242 - DNA, 21 bp, homo sapiens
caggaggaagtgcatcagctg

SEQ ID NO: 29243 - RNA, 21 nt, RNAi
ggaggaagugcaucagcuguu

SEQ ID NO: 29244 - RNA, 21 nt, RNAi
uuccuccuucacguagucgac

SEQ ID NO: 29245 - DNA, 21 bp, homo sapiens
catcagctgagaagaggcatc

SEQ ID NO: 29246 - RNA, 21 nt, RNAi
ucagcugagaagaggcaucuu

SEQ ID NO: 29247 - RNA, 21 nt, RNAi
uuagucgacucuucuccguag

SEQ ID NO: 29248 - DNA, 21 bp, homo sapiens
cagctgagaagaggcatcgag

SEQ ID NO: 29249 - RNA, 21 nt, RNAi
gcugagaagaggcaucgaguu

SEQ ID NO: 29250 - RNA, 21 nt, RNAi
uucgacucuucuccguagcuc

SEQ ID NO: 29251 - DNA, 21 bp, homo sapiens
catcgagaaactgagagttcg

SEQ ID NO: 29252 - RNA, 21 nt, RNAi
ucgagaaacugagaguucguu

SEQ ID NO: 29253 - RNA, 21 nt, RNAi
uuagcucuuugacucucaagc

SEQ ID NO: 29254 - DNA, 21 bp, homo sapiens
cagctgcacatcgcagagaaa

SEQ ID NO: 29255 - RNA, 21 nt, RNAi
gcugcacaucgcagagaaauu

SEQ ID NO: 29256 - RNA, 21 nt, RNAi
uucgacguguagcgucucuuu

SEQ ID NO: 29257 - DNA, 21 bp, homo sapiens
cacatcgcagagaaactgaaa

SEQ ID NO: 29258 - RNA, 21 nt, RNAi
caucgcagagaaacugaaauu

SEQ ID NO: 29259 - RNA, 21 nt, RNAi
uuguagcgucucuuugacuuu

SEQ ID NO: 29260 - DNA, 21 bp, homo sapiens
catcgcagagaaactgaaaga

SEQ ID NO: 29261 - RNA, 21 nt, RNAi
ucgcagagaaacugaaagauu

SEQ ID NO: 29262 - RNA, 21 nt, RNAi
uuagcgucucuuugacuuucu

SEQ ID NO: 29263 - DNA, 21 bp, homo sapiens
cagagaaactgaaagaacgcg

SEQ ID NO: 29264 - RNA, 21 nt, RNAi
gagaaacugaaagaacgcguu

SEQ ID NO: 29265 - RNA, 21 nt, RNAi
uucucuuugacuuucuugcgc

SEQ ID NO: 29266 - DNA, 21 bp, homo sapiens
cacttaaggataaagttgaga

SEQ ID NO: 29267 - RNA, 21 nt, RNAi
cuuaaggauaaaguugagauu

SEQ ID NO: 29268 - RNA, 21 nt, RNAi
uugaauuccuauuucaacucu

SEQ ID NO: 29269 - DNA, 21 bp, homo sapiens
caggagctagtgattcttgat

SEQ ID NO: 29270 - RNA, 21 nt, RNAi
ggagcuagugauucuugauuu

SEQ ID NO: 29271 - RNA, 21 nt, RNAi
uuccucgaucacuaagaacua

SEQ ID NO: 29272 - DNA, 21 bp, homo sapiens
caaagcagaagtagagactct

SEQ ID NO: 29273 - RNA, 21 nt, RNAi
aagcagaaguagagacucuuu

SEQ ID NO: 29274 - RNA, 21 nt, RNAi
uuuucgucuucaucucugaga

SEQ ID NO: 29275 - DNA, 21 bp, homo sapiens
cacaaatagaagagatggcca

SEQ ID NO: 29276 - RNA, 21 nt, RNAi
caaauagaagagauggccauu

SEQ ID NO: 29277 - RNA, 21 nt, RNAi
uuguuuaucuucucuaccggu

SEQ ID NO: 29278 - DNA, 21 bp, homo sapiens
caaatagaagagatggccaga

SEQ ID NO: 29279 - RNA, 21 nt, RNAi
aauagaagagauggccagauu

SEQ ID NO: 29280 - RNA, 21 nt, RNAi
uuuuaucuucucuaccggucu

SEQ ID NO: 29281 - DNA, 21 bp, homo sapiens
caaggtcagttgtcagaacta

SEQ ID NO: 29282 - RNA, 21 nt, RNAi
aggucaguugucagaacuauu

SEQ ID NO: 29283 - RNA, 21 nt, RNAi
uuuccagucaacagucuugau

SEQ ID NO: 29284 - DNA, 21 bp, homo sapiens
cagttgtcagaactagacaag

SEQ ID NO: 29285 - RNA, 21 nt, RNAi
guugucagaacuagacaaguu

SEQ ID NO: 29286 - RNA, 21 nt, RNAi
uucaacagucuugaucuguuc

SEQ ID NO: 29287 - DNA, 21 bp, homo sapiens
cagaactagacaagttactct

SEQ ID NO: 29288 - RNA, 21 nt, RNAi
gaacuagacaaguuacucuuu

SEQ ID NO: 29289 - RNA, 21 nt, RNAi
uucuugaucuguucaaugaga

SEQ ID NO: 29290 - DNA, 21 bp, homo sapiens
caagcagagatacagatcaaa

SEQ ID NO: 29291 - RNA, 21 nt, RNAi
agcagagauacagaucaaauu

SEQ ID NO: 29292 - RNA, 21 nt, RNAi
uuucgucucuaugucuaguuu

SEQ ID NO: 29293 - DNA, 21 bp, homo sapiens
cagagatacagatcaaagaag

SEQ ID NO: 29294 - RNA, 21 nt, RNAi
gagauacagaucaaagaaguu

SEQ ID NO: 29295 - RNA, 21 nt, RNAi
uucucuaugucuaguuucuuc

SEQ ID NO: 29296 - DNA, 21 bp, homo sapiens
cagtggagatgcttcagaatc

SEQ ID NO: 29297 - RNA, 21 nt, RNAi
guggagaugcuucagaaucuu

SEQ ID NO: 29298 - RNA, 21 nt, RNAi
uucaccucuacgaagucuuag

SEQ ID NO: 29299 - DNA, 21 bp, homo sapiens
cagaatcagttaaaggagcta

SEQ ID NO: 29300 - RNA, 21 nt, RNAi
gaaucaguuaaaggagcuauu

SEQ ID NO: 29301 - RNA, 21 nt, RNAi
uucuuagucaauuuccucgau

SEQ ID NO: 29302 - DNA, 21 bp, homo sapiens
cagttaaaggagctaaatgag

SEQ ID NO: 29303 - RNA, 21 nt, RNAi
guuaaaggagcuaaaugaguu

SEQ ID NO: 29304 - RNA, 21 nt, RNAi
uucaauuuccucgauuuacuc

SEQ ID NO: 29305 - DNA, 21 bp, homo sapiens
cagtagcagccttgtgtggtg

SEQ ID NO: 29306 - RNA, 21 nt, RNAi
guagcagccuugugugguguu

SEQ ID NO: 29307 - RNA, 21 nt, RNAi
uucaucgucggaacacaccac

SEQ ID NO: 29308 - DNA, 21 bp, homo sapiens
cagccttgtgtggtgaccaag

SEQ ID NO: 29309 - RNA, 21 nt, RNAi
gccuuguguggugaccaaguu

SEQ ID NO: 29310 - RNA, 21 nt, RNAi
uucggaacacaccacugguuc

SEQ ID NO: 29311 - DNA, 21 bp, homo sapiens
caagaaattatgaaggccaca

SEQ ID NO: 29312 - RNA, 21 nt, RNAi
agaaauuaugaaggccacauu

SEQ ID NO: 29313 - RNA, 21 nt, RNAi
uuucuuuaauacuuccggugu

SEQ ID NO: 29314 - DNA, 21 bp, homo sapiens
caccaatagaggaagagcatc

SEQ ID NO: 29315 - RNA, 21 nt, RNAi
ccaauagaggaagagcaucuu

SEQ ID NO: 29316 - RNA, 21 nt, RNAi
uugguuaucuccuucucguag

SEQ ID NO: 29317 - DNA, 21 bp, homo sapiens
caatagaggaagagcatcagc

SEQ ID NO: 29318 - RNA, 21 nt, RNAi
auagaggaagagcaucagcuu

SEQ ID NO: 29319 - RNA, 21 nt, RNAi
uuuaucuccuucucguagucg

SEQ ID NO: 29320 - DNA, 21 bp, homo sapiens
catcagctgagaaatagcatt

SEQ ID NO: 29321 - RNA, 21 nt, RNAi
ucagcugagaaauagcauuuu

SEQ ID NO: 29322 - RNA, 21 nt, RNAi
uuagucgacucuuuaucguaa

SEQ ID NO: 29323 - DNA, 21 bp, homo sapiens
cagctgagaaatagcattgaa

SEQ ID NO: 29324 - RNA, 21 nt, RNAi
gcugagaaauagcauugaauu

SEQ ID NO: 29325 - RNA, 21 nt, RNAi
uucgacucuuuaucguaacuu

SEQ ID NO: 29326 - DNA, 21 bp, homo sapiens
cagctctgtgtcttacaacaa

SEQ ID NO: 29327 - RNA, 21 nt, RNAi
gcucugugucuuacaacaauu

SEQ ID NO: 29328 - RNA, 21 nt, RNAi
uucgagacacagaauguuguu

SEQ ID NO: 29329 - DNA, 21 bp, homo sapiens
caacaactgaaggaaagtgag

SEQ ID NO: 29330 - RNA, 21 nt, RNAi
acaacugaaggaaagugaguu

SEQ ID NO: 29331 - RNA, 21 nt, RNAi
uuuguugacuuccuuucacuc

SEQ ID NO: 29332 - DNA, 21 bp, homo sapiens
caactgaaggaaagtgagcat

SEQ ID NO: 29333 - RNA, 21 nt, RNAi
acugaaggaaagugagcauuu

SEQ ID NO: 29334 - RNA, 21 nt, RNAi
uuugacuuccuuucacucgua

SEQ ID NO: 29335 - DNA, 21 bp, homo sapiens
catcatgcagatttacttaag

SEQ ID NO: 29336 - RNA, 21 nt, RNAi
ucaugcagauuuacuuaaguu

SEQ ID NO: 29337 - RNA, 21 nt, RNAi
uuaguacgucuaaaugaauuc

SEQ ID NO: 29338 - DNA, 21 bp, homo sapiens
caggacaaaccaagagcatgc

SEQ ID NO: 29339 - RNA, 21 nt, RNAi
ggacaaaccaagagcaugcuu

SEQ ID NO: 29340 - RNA, 21 nt, RNAi
uuccuguuugguucucguacg

SEQ ID NO: 29341 - DNA, 21 bp, homo sapiens
caaaccaagagcatgcagctc

SEQ ID NO: 29342 - RNA, 21 nt, RNAi
aaccaagagcaugcagcucuu

SEQ ID NO: 29343 - RNA, 21 nt, RNAi
uuuugguucucguacgucgag

SEQ ID NO: 29344 - DNA, 21 bp, homo sapiens
caagagcatgcagctcttgag

SEQ ID NO: 29345 - RNA, 21 nt, RNAi
agagcaugcagcucuugaguu

SEQ ID NO: 29346 - RNA, 21 nt, RNAi
uuucucguacgucgagaacuc

SEQ ID NO: 29347 - DNA, 21 bp, homo sapiens
catgcagctcttgaggcagag

SEQ ID NO: 29348 - RNA, 21 nt, RNAi
ugcagcucuugaggcagaguu

SEQ ID NO: 29349 - RNA, 21 nt, RNAi
uuacgucgagaacuccgucuc

SEQ ID NO: 29350 - DNA, 21 bp, homo sapiens
cagctcttgaggcagagaatt

SEQ ID NO: 29351 - RNA, 21 nt, RNAi
gcucuugaggcagagaauuuu

SEQ ID NO: 29352 - RNA, 21 nt, RNAi
uucgagaacuccgucucuuaa

SEQ ID NO: 29353 - DNA, 21 bp, homo sapiens
cagagaattccaaaggagagg

SEQ ID NO: 29354 - RNA, 21 nt, RNAi
gagaauuccaaaggagagguu

SEQ ID NO: 29355 - RNA, 21 nt, RNAi
uucucuuaagguuuccucucc

SEQ ID NO: 29356 - DNA, 21 bp, homo sapiens
caaagtctgagaggtctggaa

SEQ ID NO: 29357 - RNA, 21 nt, RNAi
aagucugagaggucuggaauu

SEQ ID NO: 29358 - RNA, 21 nt, RNAi
uuuucagacucuccagaccuu

SEQ ID NO: 29359 - DNA, 21 bp, homo sapiens
caagagcgaatatctgaatta

SEQ ID NO: 29360 - RNA, 21 nt, RNAi
agagcgaauaucugaauuauu

SEQ ID NO: 29361 - RNA, 21 nt, RNAi
uuucucgcuuauagacuuaau

SEQ ID NO: 29362 - DNA, 21 bp, homo sapiens
caagagaaagtacagatgaaa

SEQ ID NO: 29363 - RNA, 21 nt, RNAi
agagaaaguacagaugaaauu

SEQ ID NO: 29364 - RNA, 21 nt, RNAi
uuucucuuucaugucuacuuu

SEQ ID NO: 29365 - DNA, 21 bp, homo sapiens
caagcactgccatggagatgc

SEQ ID NO: 29366 - RNA, 21 nt, RNAi
agcacugccauggagaugcuu

SEQ ID NO: 29367 - RNA, 21 nt, RNAi
uuucgugacgguaccucuacg

SEQ ID NO: 29368 - DNA, 21 bp, homo sapiens
cactgccatggagatgcttca

SEQ ID NO: 29369 - RNA, 21 nt, RNAi
cugccauggagaugcuucauu

SEQ ID NO: 29370 - RNA, 21 nt, RNAi
uugacgguaccucuacgaagu

SEQ ID NO: 29371 - DNA, 21 bp, homo sapiens
catggagatgcttcaaacaca

SEQ ID NO: 29372 - RNA, 21 nt, RNAi
uggagaugcuucaaacacauu

SEQ ID NO: 29373 - RNA, 21 nt, RNAi
uuaccucuacgaaguuugugu

SEQ ID NO: 29374 - DNA, 21 bp, homo sapiens
cataatgaccaagaagcctgt

SEQ ID NO: 29375 - RNA, 21 nt, RNAi
uaaugaccaagaagccuguuu

SEQ ID NO: 29376 - RNA, 21 nt, RNAi
uuauuacugguucuucggaca

SEQ ID NO: 29377 - DNA, 21 bp, homo sapiens
caagaagcctgtaaggccaaa

SEQ ID NO: 29378 - RNA, 21 nt, RNAi
agaagccuguaaggccaaauu

SEQ ID NO: 29379 - RNA, 21 nt, RNAi
uuucuucggacauuccgguuu

SEQ ID NO: 29380 - DNA, 21 bp, homo sapiens
caaagagcagaatcttagtag

SEQ ID NO: 29381 - RNA, 21 nt, RNAi
aagagcagaaucuuaguaguu

SEQ ID NO: 29382 - RNA, 21 nt, RNAi
uuuucucgucuuagaaucauc

SEQ ID NO: 29383 - DNA, 21 bp, homo sapiens
cagaatcttagtagtcaagta

SEQ ID NO: 29384 - RNA, 21 nt, RNAi
gaaucuuaguagucaaguauu

SEQ ID NO: 29385 - RNA, 21 nt, RNAi
uucuuagaaucaucaguucau

SEQ ID NO: 29386 - DNA, 21 bp, homo sapiens
caagtagagtgtcttgaactt

SEQ ID NO: 29387 - RNA, 21 nt, RNAi
aguagagugucuugaacuuuu

SEQ ID NO: 29388 - RNA, 21 nt, RNAi
uuucaucucacagaacuugaa

SEQ ID NO: 29389 - DNA, 21 bp, homo sapiens
cagttgctacaaggccttgat

SEQ ID NO: 29390 - RNA, 21 nt, RNAi
guugcuacaaggccuugauuu

SEQ ID NO: 29391 - RNA, 21 nt, RNAi
uucaacgauguuccggaacua

SEQ ID NO: 29392 - DNA, 21 bp, homo sapiens
caaggccttgatgaggccaaa

SEQ ID NO: 29393 - RNA, 21 nt, RNAi
aggccuugaugaggccaaauu

SEQ ID NO: 29394 - RNA, 21 nt, RNAi
uuuccggaacuacuccgguuu

SEQ ID NO: 29395 - DNA, 21 bp, homo sapiens
caatcttcagtgaatggcctc

SEQ ID NO: 29396 - RNA, 21 nt, RNAi
aucuucagugaauggccucuu

SEQ ID NO: 29397 - RNA, 21 nt, RNAi
uuuagaagucacuuaccggag

SEQ ID NO: 29398 - DNA, 21 bp, homo sapiens
cagtgaatggcctcattcaag

SEQ ID NO: 29399 - RNA, 21 nt, RNAi
gugaauggccucauucaaguu

SEQ ID NO: 29400 - RNA, 21 nt, RNAi
uucacuuaccggaguaaguuc

SEQ ID NO: 29401 - DNA, 21 bp, homo sapiens
cattcaagaagtagaagatgg

SEQ ID NO: 29402 - RNA, 21 nt, RNAi
uucaagaaguagaagaugguu

SEQ ID NO: 29403 - RNA, 21 nt, RNAi
uuaaguucuucaucuucuacc

SEQ ID NO: 29404 - DNA, 21 bp, homo sapiens
caagaagtagaagatggcaag

SEQ ID NO: 29405 - RNA, 21 nt, RNAi
agaaguagaagauggcaaguu

SEQ ID NO: 29406 - RNA, 21 nt, RNAi
uuucuucaucuucuaccguuc

SEQ ID NO: 29407 - DNA, 21 bp, homo sapiens
caagcagaaactggagaagaa

SEQ ID NO: 29408 - RNA, 21 nt, RNAi
agcagaaacuggagaagaauu

SEQ ID NO: 29409 - RNA, 21 nt, RNAi
uuucgucuuugaccucuucuu

SEQ ID NO: 29410 - DNA, 21 bp, homo sapiens
cagaaactggagaagaaggat

SEQ ID NO: 29411 - RNA, 21 nt, RNAi
gaaacuggagaagaaggauuu

SEQ ID NO: 29412 - RNA, 21 nt, RNAi
uucuuugaccucuucuuccua

SEQ ID NO: 29413 - DNA, 21 bp, homo sapiens
caaattcaagaccaagagcag

SEQ ID NO: 29414 - RNA, 21 nt, RNAi
aauucaagaccaagagcaguu

SEQ ID NO: 29415 - RNA, 21 nt, RNAi
uuuuaaguucugguucucguc

SEQ ID NO: 29416 - DNA, 21 bp, homo sapiens
caagaccaagagcagcttgtc

SEQ ID NO: 29417 - RNA, 21 nt, RNAi
agaccaagagcagcuugucuu

SEQ ID NO: 29418 - RNA, 21 nt, RNAi
uuucugguucucgucgaacag

SEQ ID NO: 29419 - DNA, 21 bp, homo sapiens
caagagcagcttgtctctaaa

SEQ ID NO: 29420 - RNA, 21 nt, RNAi
agagcagcuugucucuaaauu

SEQ ID NO: 29421 - RNA, 21 nt, RNAi
uuucucgucgaacagagauuu

SEQ ID NO: 29422 - DNA, 21 bp, homo sapiens
cagcttgtctctaaactgtcc

SEQ ID NO: 29423 - RNA, 21 nt, RNAi
gcuugucucuaaacuguccuu

SEQ ID NO: 29424 - RNA, 21 nt, RNAi
uucgaacagagauuugacagg

SEQ ID NO: 29425 - DNA, 21 bp, homo sapiens
caggtggaaggagagcaccaa

SEQ ID NO: 29426 - RNA, 21 nt, RNAi
gguggaaggagagcaccaauu

SEQ ID NO: 29427 - RNA, 21 nt, RNAi
uuccaccuuccucucgugguu

SEQ ID NO: 29428 - DNA, 21 bp, homo sapiens
caccaactttggaaggagcaa

SEQ ID NO: 29429 - RNA, 21 nt, RNAi
ccaacuuuggaaggagcaauu

SEQ ID NO: 29430 - RNA, 21 nt, RNAi
uugguugaaaccuuccucguu

SEQ ID NO: 29431 - DNA, 21 bp, homo sapiens
cagtggaattggagcagaaga

SEQ ID NO: 29432 - RNA, 21 nt, RNAi
guggaauuggagcagaagauu

SEQ ID NO: 29433 - RNA, 21 nt, RNAi
uucaccuuaaccucgucuucu

SEQ ID NO: 29434 - DNA, 21 bp, homo sapiens
cagaagatccaagtgctacaa

SEQ ID NO: 29435 - RNA, 21 nt, RNAi
gaagauccaagugcuacaauu

SEQ ID NO: 29436 - RNA, 21 nt, RNAi
uucuucuagguucacgauguu

SEQ ID NO: 29437 - DNA, 21 bp, homo sapiens
caggacacattagaagtgctg

SEQ ID NO: 29438 - RNA, 21 nt, RNAi
ggacacauuagaagugcuguu

SEQ ID NO: 29439 - RNA, 21 nt, RNAi
uuccuguguaaucuucacgac

SEQ ID NO: 29440 - DNA, 21 bp, homo sapiens
cacattagaagtgctgcagag

SEQ ID NO: 29441 - RNA, 21 nt, RNAi
cauuagaagugcugcagaguu

SEQ ID NO: 29442 - RNA, 21 nt, RNAi
uuguaaucuucacgacgucuc

SEQ ID NO: 29443 - DNA, 21 bp, homo sapiens
cattagaagtgctgcagagtt

SEQ ID NO: 29444 - RNA, 21 nt, RNAi
uuagaagugcugcagaguuuu

SEQ ID NO: 29445 - RNA, 21 nt, RNAi
uuaaucuucacgacgucucaa

SEQ ID NO: 29446 - DNA, 21 bp, homo sapiens
cagagttcttacaagaatcta

SEQ ID NO: 29447 - RNA, 21 nt, RNAi
gaguucuuacaagaaucuauu

SEQ ID NO: 29448 - RNA, 21 nt, RNAi
uucucaagaauguucuuagau

SEQ ID NO: 29449 - DNA, 21 bp, homo sapiens
caagaatctagagaatgagct

SEQ ID NO: 29450 - RNA, 21 nt, RNAi
agaaucuagagaaugagcuuu

SEQ ID NO: 29451 - RNA, 21 nt, RNAi
uuucuuagaucucuuacucga

SEQ ID NO: 29452 - DNA, 21 bp, homo sapiens
caaaggaaactgagctgcaga

SEQ ID NO: 29453 - RNA, 21 nt, RNAi
aaggaaacugagcugcagauu

SEQ ID NO: 29454 - RNA, 21 nt, RNAi
uuuuccuuugacucgacgucu

SEQ ID NO: 29455 - DNA, 21 bp, homo sapiens
cagcagagctgcaagaagaac

SEQ ID NO: 29456 - RNA, 21 nt, RNAi
gcagagcugcaagaagaacuu

SEQ ID NO: 29457 - RNA, 21 nt, RNAi
uucgucucgacguucuucuug

SEQ ID NO: 29458 - DNA, 21 bp, homo sapiens
cagagctgcaagaagaactca

SEQ ID NO: 29459 - RNA, 21 nt, RNAi
gagcugcaagaagaacucauu

SEQ ID NO: 29460 - RNA, 21 nt, RNAi
uucucgacguucuucuugagu

SEQ ID NO: 29461 - DNA, 21 bp, homo sapiens
caagaagaactcagtggagag

SEQ ID NO: 29462 - RNA, 21 nt, RNAi
agaagaacucaguggagaguu

SEQ ID NO: 29463 - RNA, 21 nt, RNAi
uuucuucuugagucaccucuc

SEQ ID NO: 29464 - DNA, 21 bp, homo sapiens
cagttactgttggaagaaata

SEQ ID NO: 29465 - RNA, 21 nt, RNAi
guuacuguuggaagaaauauu

SEQ ID NO: 29466 - RNA, 21 nt, RNAi
uucaaugacaaccuucuuuau

SEQ ID NO: 29467 - DNA, 21 bp, homo sapiens
cagcaaagatcaattgaagga

SEQ ID NO: 29468 - RNA, 21 nt, RNAi
gcaaagaucaauugaaggauu

SEQ ID NO: 29469 - RNA, 21 nt, RNAi
uucguuucuaguuaacuuccu

SEQ ID NO: 29470 - DNA, 21 bp, homo sapiens
caaagatcaattgaaggagct

SEQ ID NO: 29471 - RNA, 21 nt, RNAi
aagaucaauugaaggagcuuu

SEQ ID NO: 29472 - RNA, 21 nt, RNAi
uuuucuaguuaacuuccucga

SEQ ID NO: 29473 - DNA, 21 bp, homo sapiens
caattgaaggagctcacacta

SEQ ID NO: 29474 - RNA, 21 nt, RNAi
auugaaggagcucacacuauu

SEQ ID NO: 29475 - RNA, 21 nt, RNAi
uuuaacuuccucgagugugau

SEQ ID NO: 29476 - DNA, 21 bp, homo sapiens
catgcacaaagaccaggtgga

SEQ ID NO: 29477 - RNA, 21 nt, RNAi
ugcacaaagaccagguggauu

SEQ ID NO: 29478 - RNA, 21 nt, RNAi
uuacguguuucugguccaccu

SEQ ID NO: 29479 - DNA, 21 bp, homo sapiens
cagctacggcttcatgaagct

SEQ ID NO: 29480 - RNA, 21 nt, RNAi
gcuacggcuucaugaagcuuu

SEQ ID NO: 29481 - RNA, 21 nt, RNAi
uucgaugccgaaguacuucga

SEQ ID NO: 29482 - DNA, 21 bp, homo sapiens
cacaaacaaacagtatgaagt

SEQ ID NO: 29483 - RNA, 21 nt, RNAi
caaacaaacaguaugaaguuu

SEQ ID NO: 29484 - RNA, 21 nt, RNAi
uuguuuguuugucauacuuca

SEQ ID NO: 29485 - DNA, 21 bp, homo sapiens
caaacaaacagtatgaagtag

SEQ ID NO: 29486 - RNA, 21 nt, RNAi
aacaaacaguaugaaguaguu

SEQ ID NO: 29487 - RNA, 21 nt, RNAi
uuuuguuugucauacuucauc

SEQ ID NO: 29488 - DNA, 21 bp, homo sapiens
cagtatgaagtagaaatccag

SEQ ID NO: 29489 - RNA, 21 nt, RNAi
guaugaaguagaaauccaguu

SEQ ID NO: 29490 - RNA, 21 nt, RNAi
uucauacuucaucuuuagguc

SEQ ID NO: 29491 - DNA, 21 bp, homo sapiens
cagacataccaagagaaattg

SEQ ID NO: 29492 - RNA, 21 nt, RNAi
gacauaccaagagaaauuguu

SEQ ID NO: 29493 - RNA, 21 nt, RNAi
uucuguaugguucucuuuaac

SEQ ID NO: 29494 - DNA, 21 bp, homo sapiens
cataccaagagaaattgactt

SEQ ID NO: 29495 - RNA, 21 nt, RNAi
uaccaagagaaauugacuuuu

SEQ ID NO: 29496 - RNA, 21 nt, RNAi
uuaugguucucuuuaacugaa

SEQ ID NO: 29497 - DNA, 21 bp, homo sapiens
cagttcacagaagctggagat

SEQ ID NO: 29498 - RNA, 21 nt, RNAi
guucacagaagcuggagauuu

SEQ ID NO: 29499 - RNA, 21 nt, RNAi
uucaagugucuucgaccucua

SEQ ID NO: 29500 - DNA, 21 bp, homo sapiens
cacagaagctggagatagacc

SEQ ID NO: 29501 - RNA, 21 nt, RNAi
cagaagcuggagauagaccuu

SEQ ID NO: 29502 - RNA, 21 nt, RNAi
uugucuucgaccucuaucugg

SEQ ID NO: 29503 - DNA, 21 bp, homo sapiens
cagaagctggagatagacctt

SEQ ID NO: 29504 - RNA, 21 nt, RNAi
gaagcuggagauagaccuuuu

SEQ ID NO: 29505 - RNA, 21 nt, RNAi
uucuucgaccucuaucuggaa

SEQ ID NO: 29506 - DNA, 21 bp, homo sapiens
cattgaaagctactactcaga

SEQ ID NO: 29507 - RNA, 21 nt, RNAi
uugaaagcuacuacucagauu

SEQ ID NO: 29508 - RNA, 21 nt, RNAi
uuaacuuucgaugaugagucu

SEQ ID NO: 29509 - DNA, 21 bp, homo sapiens
caaatcctgtaaacagctgga

SEQ ID NO: 29510 - RNA, 21 nt, RNAi
aauccuguaaacagcuggauu

SEQ ID NO: 29511 - RNA, 21 nt, RNAi
uuuuaggacauuugucgaccu

SEQ ID NO: 29512 - DNA, 21 bp, homo sapiens
cagaaagaactctctcaactt

SEQ ID NO: 29513 - RNA, 21 nt, RNAi
gaaagaacucucucaacuuuu

SEQ ID NO: 29514 - RNA, 21 nt, RNAi
uucuuucuugagagaguugaa

SEQ ID NO: 29515 - DNA, 21 bp, homo sapiens
caacttcaagctgcacaggag

SEQ ID NO: 29516 - RNA, 21 nt, RNAi
acuucaagcugcacaggaguu

SEQ ID NO: 29517 - RNA, 21 nt, RNAi
uuugaaguucgacguguccuc

SEQ ID NO: 29518 - DNA, 21 bp, homo sapiens
caagctgcacaggagaagcag

SEQ ID NO: 29519 - RNA, 21 nt, RNAi
agcugcacaggagaagcaguu

SEQ ID NO: 29520 - RNA, 21 nt, RNAi
uuucgacguguccucuucguc

SEQ ID NO: 29521 - DNA, 21 bp, homo sapiens
caggtactgttatggatacca

SEQ ID NO: 29522 - RNA, 21 nt, RNAi
gguacuguuauggauaccauu

SEQ ID NO: 29523 - RNA, 21 nt, RNAi
uuccaugacaauaccuauggu

SEQ ID NO: 29524 - DNA, 21 bp, homo sapiens
caaggtcgatgaattaacaac

SEQ ID NO: 29525 - RNA, 21 nt, RNAi
aggucgaugaauuaacaacuu

SEQ ID NO: 29526 - RNA, 21 nt, RNAi
uuuccagcuacuuaauuguug

SEQ ID NO: 29527 - DNA, 21 bp, homo sapiens
caactgagatcaaagaactga

SEQ ID NO: 29528 - RNA, 21 nt, RNAi
acugagaucaaagaacugauu

SEQ ID NO: 29529 - RNA, 21 nt, RNAi
uuugacucuaguuucuugacu

SEQ ID NO: 29530 - DNA, 21 bp, homo sapiens
caaagaactgaaagaaactct

SEQ ID NO: 29531 - RNA, 21 nt, RNAi
aagaacugaaagaaacucuuu

SEQ ID NO: 29532 - RNA, 21 nt, RNAi
uuuucuugacuuucuuugaga

SEQ ID NO: 29533 - DNA, 21 bp, homo sapiens
caaggaggcagatgaatactt

SEQ ID NO: 29534 - RNA, 21 nt, RNAi
aggaggcagaugaauacuuuu

SEQ ID NO: 29535 - RNA, 21 nt, RNAi
uuuccuccgucuacuuaugaa

SEQ ID NO: 29536 - DNA, 21 bp, homo sapiens
cagatgaatacttggataagt

SEQ ID NO: 29537 - RNA, 21 nt, RNAi
gaugaauacuuggauaaguuu

SEQ ID NO: 29538 - RNA, 21 nt, RNAi
uucuacuuaugaaccuauuca

SEQ ID NO: 29539 - DNA, 21 bp, homo sapiens
catctgtgttcacagcaatct

SEQ ID NO: 29540 - RNA, 21 nt, RNAi
ucuguguucacagcaaucuuu

SEQ ID NO: 29541 - RNA, 21 nt, RNAi
uuagacacaagugucguuaga

SEQ ID NO: 29542 - DNA, 21 bp, homo sapiens
cacagcaatctaaacaagatt

SEQ ID NO: 29543 - RNA, 21 nt, RNAi
cagcaaucuaaacaagauuuu

SEQ ID NO: 29544 - RNA, 21 nt, RNAi
uugucguuagauuuguucuaa

SEQ ID NO: 29545 - DNA, 21 bp, homo sapiens
cagcaatctaaacaagattcc

SEQ ID NO: 29546 - RNA, 21 nt, RNAi
gcaaucuaaacaagauuccuu

SEQ ID NO: 29547 - RNA, 21 nt, RNAi
uucguuagauuuguucuaagg

SEQ ID NO: 29548 - DNA, 21 bp, homo sapiens
cagttgttccaggaccatctc

SEQ ID NO: 29549 - RNA, 21 nt, RNAi
guuguuccaggaccaucucuu

SEQ ID NO: 29550 - RNA, 21 nt, RNAi
uucaacaagguccugguagag

SEQ ID NO: 29551 - DNA, 21 bp, homo sapiens
caggcaagaggcaaagatcca

SEQ ID NO: 29552 - RNA, 21 nt, RNAi
ggcaagaggcaaagauccauu

SEQ ID NO: 29553 - RNA, 21 nt, RNAi
uuccguucuccguuucuaggu

SEQ ID NO: 29554 - DNA, 21 bp, homo sapiens
caagaggcaaagatccagtgg

SEQ ID NO: 29555 - RNA, 21 nt, RNAi
agaggcaaagauccagugguu

SEQ ID NO: 29556 - RNA, 21 nt, RNAi
uuucuccguuucuaggucacc

SEQ ID NO: 29557 - DNA, 21 bp, homo sapiens
caaagatccagtggaatatgg

SEQ ID NO: 29558 - RNA, 21 nt, RNAi
aagauccaguggaauaugguu

SEQ ID NO: 29559 - RNA, 21 nt, RNAi
uuuucuaggucaccuuauacc

SEQ ID NO: 29560 - DNA, 21 bp, homo sapiens
caagaaagcagtcatgagtgg

SEQ ID NO: 29561 - RNA, 21 nt, RNAi
agaaagcagucaugagugguu

SEQ ID NO: 29562 - RNA, 21 nt, RNAi
uuucuuucgucaguacucacc

SEQ ID NO: 29563 - DNA, 21 bp, homo sapiens
cagtcatgagtggtattcacc

SEQ ID NO: 29564 - RNA, 21 nt, RNAi
gucaugagugguauucaccuu

SEQ ID NO: 29565 - RNA, 21 nt, RNAi
uucaguacucaccauaagugg

SEQ ID NO: 29566 - DNA, 21 bp, homo sapiens
cagaagacacggaaggtactg

SEQ ID NO: 29567 - RNA, 21 nt, RNAi
gaagacacggaagguacuguu

SEQ ID NO: 29568 - RNA, 21 nt, RNAi
uucuucugugccuuccaugac

SEQ ID NO: 29569 - DNA, 21 bp, homo sapiens
cacggaaggtactgagtttga

SEQ ID NO: 29570 - RNA, 21 nt, RNAi
cggaagguacugaguuugauu

SEQ ID NO: 29571 - RNA, 21 nt, RNAi
uugccuuccaugacucaaacu

SEQ ID NO: 29572 - DNA, 21 bp, homo sapiens
catatatcctgcgaagaacaa

SEQ ID NO: 29573 - RNA, 21 nt, RNAi
uauauccugcgaagaacaauu

SEQ ID NO: 29574 - RNA, 21 nt, RNAi
uuauauaggacgcuucuuguu

SEQ ID NO: 29575 - DNA, 21 bp, homo sapiens
caaccatggcaactcggacca

SEQ ID NO: 29576 - RNA, 21 nt, RNAi
accauggcaacucggaccauu

SEQ ID NO: 29577 - RNA, 21 nt, RNAi
uuugguaccguugagccuggu

SEQ ID NO: 29578 - DNA, 21 bp, homo sapiens
cactgagtctcggcaaagaaa

SEQ ID NO: 29579 - RNA, 21 nt, RNAi
cugagucucggcaaagaaauu

SEQ ID NO: 29580 - RNA, 21 nt, RNAi
uugacucagagccguuucuuu

SEQ ID NO: 29581 - DNA, 21 bp, homo sapiens
cagagtcctccaaaccaacag

SEQ ID NO: 29582 - RNA, 21 nt, RNAi
gaguccuccaaaccaacaguu

SEQ ID NO: 29583 - RNA, 21 nt, RNAi
uucucaggagguuugguuguc

SEQ ID NO: 29584 - DNA, 21 bp, homo sapiens
caaaccaacagctggtggcag

SEQ ID NO: 29585 - RNA, 21 nt, RNAi
aaccaacagcugguggcaguu

SEQ ID NO: 29586 - RNA, 21 nt, RNAi
uuuugguugucgaccaccguc

SEQ ID NO: 29587 - DNA, 21 bp, homo sapiens
caacagctggtggcagcagat

SEQ ID NO: 29588 - RNA, 21 nt, RNAi
acagcugguggcagcagauuu

SEQ ID NO: 29589 - RNA, 21 nt, RNAi
uuugucgaccaccgucgucua

SEQ ID NO: 29590 - DNA, 21 bp, homo sapiens
cagctggtggcagcagatcac

SEQ ID NO: 29591 - RNA, 21 nt, RNAi
gcugguggcagcagaucacuu

SEQ ID NO: 29592 - RNA, 21 nt, RNAi
uucgaccaccgucgucuagug

SEQ ID NO: 29593 - DNA, 21 bp, homo sapiens
cagtagattcaggcaccatcc

SEQ ID NO: 29594 - RNA, 21 nt, RNAi
guagauucaggcaccauccuu

SEQ ID NO: 29595 - RNA, 21 nt, RNAi
uucaucuaaguccgugguagg

SEQ ID NO: 29596 - DNA, 21 bp, homo sapiens
caggcaccatcctccgagaac

SEQ ID NO: 29597 - RNA, 21 nt, RNAi
ggcaccauccuccgagaacuu

SEQ ID NO: 29598 - RNA, 21 nt, RNAi
uuccgugguaggaggcucuug

SEQ ID NO: 29599 - DNA, 21 bp, homo sapiens
cagtcaataatcttcctgaga

SEQ ID NO: 29600 - RNA, 21 nt, RNAi
gucaauaaucuuccugagauu

SEQ ID NO: 29601 - RNA, 21 nt, RNAi
uucaguuauuagaaggacucu

SEQ ID NO: 29602 - DNA, 21 bp, homo sapiens
caataatcttcctgagagaag

SEQ ID NO: 29603 - RNA, 21 nt, RNAi
auaaucuuccugagagaaguu

SEQ ID NO: 29604 - RNA, 21 nt, RNAi
uuuauuagaaggacucucuuc

SEQ ID NO: 29605 - DNA, 21 bp, homo sapiens
caaagctggactggagtccaa

SEQ ID NO: 29606 - RNA, 21 nt, RNAi
aagcuggacuggaguccaauu

SEQ ID NO: 29607 - RNA, 21 nt, RNAi
uuuucgaccugaccucagguu

SEQ ID NO: 29608 - DNA, 21 bp, homo sapiens
caacggcagtgagaactgtaa

SEQ ID NO: 29609 - RNA, 21 nt, RNAi
acggcagugagaacuguaauu

SEQ ID NO: 29610 - RNA, 21 nt, RNAi
uuugccgucacucuugacauu

SEQ ID NO: 29611 - DNA, 21 bp, homo sapiens
cagtgagaactgtaaggtcca

SEQ ID NO: 29612 - RNA, 21 nt, RNAi
gugagaacuguaagguccauu

SEQ ID NO: 29613 - RNA, 21 nt, RNAi
uucacucuugacauuccaggu

SEQ ID NO: 29614 - DNA, 21 bp, homo sapiens
cagtgaaggcactttgtgtgt

SEQ ID NO: 29615 - RNA, 21 nt, RNAi
gugaaggcacuuuguguguuu

SEQ ID NO: 29616 - RNA, 21 nt, RNAi
uucacuuccgugaaacacaca

SEQ ID NO: 29617 - DNA, 21 bp, homo sapiens
cagtcattgaatagataaggc

SEQ ID NO: 29618 - RNA, 21 nt, RNAi
gucauugaauagauaaggcuu

SEQ ID NO: 29619 - RNA, 21 nt, RNAi
uucaguaacuuaucuauuccg

SEQ ID NO: 29620 - DNA, 21 bp, homo sapiens
cattgaatagataaggctgtg

SEQ ID NO: 29621 - RNA, 21 nt, RNAi
uugaauagauaaggcuguguu

SEQ ID NO: 29622 - RNA, 21 nt, RNAi
uuaacuuaucuauuccgacac

SEQ ID NO: 29623 - DNA, 21 bp, homo sapiens
caggacttctctttagtcagg

SEQ ID NO: 29624 - RNA, 21 nt, RNAi
ggacuucucuuuagucagguu

SEQ ID NO: 29625 - RNA, 21 nt, RNAi
uuccugaagagaaaucagucc

SEQ ID NO: 29626 - DNA, 21 bp, homo sapiens
catgctttattagtgaggaga

SEQ ID NO: 29627 - RNA, 21 nt, RNAi
ugcuuuauuagugaggagauu

SEQ ID NO: 29628 - RNA, 21 nt, RNAi
uuacgaaauaaucacuccucu

SEQ ID NO: 29629 - DNA, 21 bp, homo sapiens
cactgatcacctgttagcatt

SEQ ID NO: 29630 - RNA, 21 nt, RNAi
cugaucaccuguuagcauuuu

SEQ ID NO: 29631 - RNA, 21 nt, RNAi
uugacuaguggacaaucguaa

SEQ ID NO: 29632 - DNA, 21 bp, homo sapiens
cacctgttagcattgccattc

SEQ ID NO: 29633 - RNA, 21 nt, RNAi
ccuguuagcauugccauucuu

SEQ ID NO: 29634 - RNA, 21 nt, RNAi
uuggacaaucguaacgguaag

SEQ ID NO: 29635 - DNA, 21 bp, homo sapiens
cattgccattcctctactgca

SEQ ID NO: 29636 - RNA, 21 nt, RNAi
uugccauuccucuacugcauu

SEQ ID NO: 29637 - RNA, 21 nt, RNAi
uuaacgguaaggagaugacgu

SEQ ID NO: 29638 - DNA, 21 bp, homo sapiens
cattcctctactgcaatgtaa

SEQ ID NO: 29639 - RNA, 21 nt, RNAi
uuccucuacugcaauguaauu

SEQ ID NO: 29640 - RNA, 21 nt, RNAi
uuaaggagaugacguuacauu

SEQ ID NO: 29641 - DNA, 21 bp, homo sapiens
caagcactatatcacaatctc

SEQ ID NO: 29642 - RNA, 21 nt, RNAi
agcacuauaucacaaucucuu

SEQ ID NO: 29643 - RNA, 21 nt, RNAi
uuucgugauauaguguuagag

SEQ ID NO: 29644 - DNA, 21 bp, homo sapiens
cactatatcacaatctctgtt

SEQ ID NO: 29645 - RNA, 21 nt, RNAi
cuauaucacaaucucuguuuu

SEQ ID NO: 29646 - RNA, 21 nt, RNAi
uugauauaguguuagagacaa

SEQ ID NO: 29647 - DNA, 21 bp, homo sapiens
cacaatctctgtttgtatgtg

SEQ ID NO: 29648 - RNA, 21 nt, RNAi
caaucucuguuuguauguguu

SEQ ID NO: 29649 - RNA, 21 nt, RNAi
uuguuagagacaaacauacac

SEQ ID NO: 29650 - DNA, 21 bp, homo sapiens
cacacatatacatgtaggagt

SEQ ID NO: 29651 - RNA, 21 nt, RNAi
cacauauacauguaggaguuu

SEQ ID NO: 29652 - RNA, 21 nt, RNAi
uuguguauauguacauccuca

SEQ ID NO: 29653 - DNA, 21 bp, homo sapiens
cacatatacatgtaggagtgt

SEQ ID NO: 29654 - RNA, 21 nt, RNAi
cauauacauguaggaguguuu

SEQ ID NO: 29655 - RNA, 21 nt, RNAi
uuguauauguacauccucaca

SEQ ID NO: 29656 - DNA, 21 bp, homo sapiens
catatacatgtaggagtgttt

SEQ ID NO: 29657 - RNA, 21 nt, RNAi
uauacauguaggaguguuuuu

SEQ ID NO: 29658 - RNA, 21 nt, RNAi
uuauauguacauccucacaaa

SEQ ID NO: 29659 - DNA, 21 bp, homo sapiens
catgtaggagtgtttatcttt

SEQ ID NO: 29660 - RNA, 21 nt, RNAi
uguaggaguguuuaucuuuuu

SEQ ID NO: 29661 - RNA, 21 nt, RNAi
uuacauccucacaaauagaaa

SEQ ID NO: 29662 - DNA, 21 bp, homo sapiens
catctttgcttatgaaacctg

SEQ ID NO: 29663 - RNA, 21 nt, RNAi
ucuuugcuuaugaaaccuguu

SEQ ID NO: 29664 - RNA, 21 nt, RNAi
uuagaaacgaauacuuuggac

SEQ ID NO: 29665 - DNA, 21 bp, homo sapiens
caggcttcctagaggtgtgct

SEQ ID NO: 29666 - RNA, 21 nt, RNAi
ggcuuccuagaggugugcuuu

SEQ ID NO: 29667 - RNA, 21 nt, RNAi
uuccgaaggaucuccacacga

SEQ ID NO: 29668 - DNA, 21 bp, homo sapiens
catgcgtctgtcgttgtgctt

SEQ ID NO: 29669 - RNA, 21 nt, RNAi
ugcgucugucguugugcuuuu

SEQ ID NO: 29670 - RNA, 21 nt, RNAi
uuacgcagacagcaacacgaa

SEQ ID NO: 29671 - DNA, 21 bp, homo sapiens
cagttctttggtaagcattgt

SEQ ID NO: 29672 - RNA, 21 nt, RNAi
guucuuugguaagcauuguuu

SEQ ID NO: 29673 - RNA, 21 nt, RNAi
uucaagaaaccauucguaaca

SEQ ID NO: 29674 - DNA, 21 bp, homo sapiens
cattgtcgtatctggtgatgg

SEQ ID NO: 29675 - RNA, 21 nt, RNAi
uugucguaucuggugaugguu

SEQ ID NO: 29676 - RNA, 21 nt, RNAi
uuaacagcauagaccacuacc

SEQ ID NO: 29677 - DNA, 21 bp, homo sapiens
gaccgaactggagaatccgcc

SEQ ID NO: 29678 - RNA, 21 nt, RNAi
ccgaacuggagaauccgccuu

SEQ ID NO: 29679 - RNA, 21 nt, RNAi
uuggcuugaccucuuaggcgg

SEQ ID NO: 29680 - DNA, 21 bp, homo sapiens
gaattggagatgactagttta

SEQ ID NO: 29681 - RNA, 21 nt, RNAi
auuggagaugacuaguuuauu

SEQ ID NO: 29682 - RNA, 21 nt, RNAi
uuuaaccucuacugaucaaau

SEQ ID NO: 29683 - DNA, 21 bp, homo sapiens
gagtaataaagaaggcagaac

SEQ ID NO: 29684 - RNA, 21 nt, RNAi
guaauaaagaaggcagaacuu

SEQ ID NO: 29685 - RNA, 21 nt, RNAi
uucauuauuucuuccgucuug

SEQ ID NO: 29686 - DNA, 21 bp, homo sapiens
gagcttgaaggacagcttgac

SEQ ID NO: 29687 - RNA, 21 nt, RNAi
gcuugaaggacagcuugacuu

SEQ ID NO: 29688 - RNA, 21 nt, RNAi
uucgaacuuccugucgaacug

SEQ ID NO: 29689 - DNA, 21 bp, homo sapiens
gaaggacagcttgacaaactg

SEQ ID NO: 29690 - RNA, 21 nt, RNAi
aggacagcuugacaaacuguu

SEQ ID NO: 29691 - RNA, 21 nt, RNAi
uuuccugucgaacuguuugac

SEQ ID NO: 29692 - DNA, 21 bp, homo sapiens
gacagcttgacaaactgaaga

SEQ ID NO: 29693 - RNA, 21 nt, RNAi
cagcuugacaaacugaagauu

SEQ ID NO: 29694 - RNA, 21 nt, RNAi
uugucgaacuguuugacuucu

SEQ ID NO: 29695 - DNA, 21 bp, homo sapiens
gaggctgcgctgcagaagcaa

SEQ ID NO: 29696 - RNA, 21 nt, RNAi
ggcugcgcugcagaagcaauu

SEQ ID NO: 29697 - RNA, 21 nt, RNAi
uuccgacgcgacgucuucguu

SEQ ID NO: 29698 - DNA, 21 bp, homo sapiens
gagaatcaaagattgatggaa

SEQ ID NO: 29699 - RNA, 21 nt, RNAi
gaaucaaagauugauggaauu

SEQ ID NO: 29700 - RNA, 21 nt, RNAi
uucuuaguuucuaacuaccuu

SEQ ID NO: 29701 - DNA, 21 bp, homo sapiens
gatggaaatatgtgaaagtct

SEQ ID NO: 29702 - RNA, 21 nt, RNAi
uggaaauaugugaaagucuuu

SEQ ID NO: 29703 - RNA, 21 nt, RNAi
uuaccuuuauacacuuucaga

SEQ ID NO: 29704 - DNA, 21 bp, homo sapiens
gaaatatgtgaaagtctggag

SEQ ID NO: 29705 - RNA, 21 nt, RNAi
aauaugugaaagucuggaguu

SEQ ID NO: 29706 - RNA, 21 nt, RNAi
uuuuauacacuuucagaccuc

SEQ ID NO: 29707 - DNA, 21 bp, homo sapiens
gaagatttctcatgaacttca

SEQ ID NO: 29708 - RNA, 21 nt, RNAi
agauuucucaugaacuucauu

SEQ ID NO: 29709 - RNA, 21 nt, RNAi
uuucuaaagaguacuugaagu

SEQ ID NO: 29710 - DNA, 21 bp, homo sapiens
gatttctcatgaacttcaagt

SEQ ID NO: 29711 - RNA, 21 nt, RNAi
uuucucaugaacuucaaguuu

SEQ ID NO: 29712 - RNA, 21 nt, RNAi
uuaaagaguacuugaaguuca

SEQ ID NO: 29713 - DNA, 21 bp, homo sapiens
gaacttcaagtcaaggagtca

SEQ ID NO: 29714 - RNA, 21 nt, RNAi
acuucaagucaaggagucauu

SEQ ID NO: 29715 - RNA, 21 nt, RNAi
uuugaaguucaguuccucagu

SEQ ID NO: 29716 - DNA, 21 bp, homo sapiens
gagtcacaagtgaatttccag

SEQ ID NO: 29717 - RNA, 21 nt, RNAi
gucacaagugaauuuccaguu

SEQ ID NO: 29718 - RNA, 21 nt, RNAi
uucaguguucacuuaaagguc

SEQ ID NO: 29719 - DNA, 21 bp, homo sapiens
gaatttccaggaaggacaact

SEQ ID NO: 29720 - RNA, 21 nt, RNAi
auuuccaggaaggacaacuuu

SEQ ID NO: 29721 - RNA, 21 nt, RNAi
uuuaaagguccuuccuguuga

SEQ ID NO: 29722 - DNA, 21 bp, homo sapiens
gaaggacaactgaattcaggc

SEQ ID NO: 29723 - RNA, 21 nt, RNAi
aggacaacugaauucaggcuu

SEQ ID NO: 29724 - RNA, 21 nt, RNAi
uuuccuguugacuuaaguccg

SEQ ID NO: 29725 - DNA, 21 bp, homo sapiens
gagcttgaaagaagccaacaa

SEQ ID NO: 29726 - RNA, 21 nt, RNAi
gcuugaaagaagccaacaauu

SEQ ID NO: 29727 - RNA, 21 nt, RNAi
uucgaacuuucuucgguuguu

SEQ ID NO: 29728 - DNA, 21 bp, homo sapiens
gaaagaagccaacaagctgcg

SEQ ID NO: 29729 - RNA, 21 nt, RNAi
aagaagccaacaagcugcguu

SEQ ID NO: 29730 - RNA, 21 nt, RNAi
uuuucuucgguuguucgacgc

SEQ ID NO: 29731 - DNA, 21 bp, homo sapiens
gaagccaacaagctgcgcagt

SEQ ID NO: 29732 - RNA, 21 nt, RNAi
agccaacaagcugcgcaguuu

SEQ ID NO: 29733 - RNA, 21 nt, RNAi
uuucgguuguucgacgcguca

SEQ ID NO: 29734 - DNA, 21 bp, homo sapiens
gatgtctctctgaatccatgc

SEQ ID NO: 29735 - RNA, 21 nt, RNAi
ugucucucugaauccaugcuu

SEQ ID NO: 29736 - RNA, 21 nt, RNAi
uuacagagagacuuagguacg

SEQ ID NO: 29737 - DNA, 21 bp, homo sapiens
gaatccatgcaatacaccaca

SEQ ID NO: 29738 - RNA, 21 nt, RNAi
auccaugcaauacaccacauu

SEQ ID NO: 29739 - RNA, 21 nt, RNAi
uuuagguacguuauguggugu

SEQ ID NO: 29740 - DNA, 21 bp, homo sapiens
gattagaggcagaggttaaag

SEQ ID NO: 29741 - RNA, 21 nt, RNAi
uuagaggcagagguuaaaguu

SEQ ID NO: 29742 - RNA, 21 nt, RNAi
uuaaucuccgucuccaauuuc

SEQ ID NO: 29743 - DNA, 21 bp, homo sapiens
gaggcagaggttaaagccttg

SEQ ID NO: 29744 - RNA, 21 nt, RNAi
ggcagagguuaaagccuuguu

SEQ ID NO: 29745 - RNA, 21 nt, RNAi
uuccgucuccaauuucggaac

SEQ ID NO: 29746 - DNA, 21 bp, homo sapiens
gaggttaaagccttgcaggct

SEQ ID NO: 29747 - RNA, 21 nt, RNAi
gguuaaagccuugcaggcuuu

SEQ ID NO: 29748 - RNA, 21 nt, RNAi
uuccaauuucggaacguccga

SEQ ID NO: 29749 - DNA, 21 bp, homo sapiens
gactcttccacaagccaccat

SEQ ID NO: 29750 - RNA, 21 nt, RNAi
cucuuccacaagccaccauuu

SEQ ID NO: 29751 - RNA, 21 nt, RNAi
uugagaagguguucgguggua

SEQ ID NO: 29752 - DNA, 21 bp, homo sapiens
gaactccaattaggagagatt

SEQ ID NO: 29753 - RNA, 21 nt, RNAi
acuccaauuaggagagauuuu

SEQ ID NO: 29754 - RNA, 21 nt, RNAi
uuugagguuaauccucucuaa

SEQ ID NO: 29755 - DNA, 21 bp, homo sapiens
gagagatttctctgcatctta

SEQ ID NO: 29756 - RNA, 21 nt, RNAi
gagauuucucugcaucuuauu

SEQ ID NO: 29757 - RNA, 21 nt, RNAi
uucucuaaagagacguagaau

SEQ ID NO: 29758 - DNA, 21 bp, homo sapiens
gagatttctctgcatcttact

SEQ ID NO: 29759 - RNA, 21 nt, RNAi
gauuucucugcaucuuacuuu

SEQ ID NO: 29760 - RNA, 21 nt, RNAi
uucuaaagagacguagaauga

SEQ ID NO: 29761 - DNA, 21 bp, homo sapiens
gatttctctgcatcttacttt

SEQ ID NO: 29762 - RNA, 21 nt, RNAi
uuucucugcaucuuacuuuuu

SEQ ID NO: 29763 - RNA, 21 nt, RNAi
uuaaagagacguagaaugaaa

SEQ ID NO: 29764 - DNA, 21 bp, homo sapiens
gaacaagaggtgactccaagt

SEQ ID NO: 29765 - RNA, 21 nt, RNAi
acaagaggugacuccaaguuu

SEQ ID NO: 29766 - RNA, 21 nt, RNAi
uuuguucuccacugagguuca

SEQ ID NO: 29767 - DNA, 21 bp, homo sapiens
gaggtgactccaagtcgatca

SEQ ID NO: 29768 - RNA, 21 nt, RNAi
ggugacuccaagucgaucauu

SEQ ID NO: 29769 - RNA, 21 nt, RNAi
uuccacugagguucagcuagu

SEQ ID NO: 29770 - DNA, 21 bp, homo sapiens
gactccaagtcgatcaacttt

SEQ ID NO: 29771 - RNA, 21 nt, RNAi
cuccaagucgaucaacuuuuu

SEQ ID NO: 29772 - RNA, 21 nt, RNAi
uugagguucagcuaguugaaa

SEQ ID NO: 29773 - DNA, 21 bp, homo sapiens
gagatgctaatagcagtttct

SEQ ID NO: 29774 - RNA, 21 nt, RNAi
gaugcuaauagcaguuucuuu

SEQ ID NO: 29775 - RNA, 21 nt, RNAi
uucuacgauuaucgucaaaga

SEQ ID NO: 29776 - DNA, 21 bp, homo sapiens
gatgctaatagcagtttcttt

SEQ ID NO: 29777 - RNA, 21 nt, RNAi
ugcuaauagcaguuucuuuuu

SEQ ID NO: 29778 - RNA, 21 nt, RNAi
uuacgauuaucgucaaagaaa

SEQ ID NO: 29779 - DNA, 21 bp, homo sapiens
gacaattctagcagtcctcat

SEQ ID NO: 29780 - RNA, 21 nt, RNAi
caauucuagcaguccucauuu

SEQ ID NO: 29781 - RNA, 21 nt, RNAi
uuguuaagaucgucaggagua

SEQ ID NO: 29782 - DNA, 21 bp, homo sapiens
gaatcaagagctaagaaacaa

SEQ ID NO: 29783 - RNA, 21 nt, RNAi
aucaagagcuaagaaacaauu

SEQ ID NO: 29784 - RNA, 21 nt, RNAi
uuuaguucucgauucuuuguu

SEQ ID NO: 29785 - DNA, 21 bp, homo sapiens
gaaacaagattaatgagttgg

SEQ ID NO: 29786 - RNA, 21 nt, RNAi
aacaagauuaaugaguugguu

SEQ ID NO: 29787 - RNA, 21 nt, RNAi
uuuuguucuaauuacucaacc

SEQ ID NO: 29788 - DNA, 21 bp, homo sapiens
gattaatgagttggaactacg

SEQ ID NO: 29789 - RNA, 21 nt, RNAi
uuaaugaguuggaacuacguu

SEQ ID NO: 29790 - RNA, 21 nt, RNAi
uuaauuacucaaccuugaugc

SEQ ID NO: 29791 - DNA, 21 bp, homo sapiens
gagttggaactacgcctgcaa

SEQ ID NO: 29792 - RNA, 21 nt, RNAi
guuggaacuacgccugcaauu

SEQ ID NO: 29793 - RNA, 21 nt, RNAi
uucaaccuugaugcggacguu

SEQ ID NO: 29794 - DNA, 21 bp, homo sapiens
gaactacgcctgcaaggacat

SEQ ID NO: 29795 - RNA, 21 nt, RNAi
acuacgccugcaaggacauuu

SEQ ID NO: 29796 - RNA, 21 nt, RNAi
uuugaugcggacguuccugua

SEQ ID NO: 29797 - DNA, 21 bp, homo sapiens
gaaatgaaaggccaagtgaat

SEQ ID NO: 29798 - RNA, 21 nt, RNAi
aaugaaaggccaagugaauuu

SEQ ID NO: 29799 - RNA, 21 nt, RNAi
uuuuacuuuccgguucacuua

SEQ ID NO: 29800 - DNA, 21 bp, homo sapiens
gaaaggccaagtgaataagtt

SEQ ID NO: 29801 - RNA, 21 nt, RNAi
aaggccaagugaauaaguuuu

SEQ ID NO: 29802 - RNA, 21 nt, RNAi
uuuuccgguucacuuauucaa

SEQ ID NO: 29803 - DNA, 21 bp, homo sapiens
gaataagtttcaagaactcca

SEQ ID NO: 29804 - RNA, 21 nt, RNAi
auaaguuucaagaacuccauu

SEQ ID NO: 29805 - RNA, 21 nt, RNAi
uuuauucaaaguucuugaggu

SEQ ID NO: 29806 - DNA, 21 bp, homo sapiens
gaactccaactccaactggag

SEQ ID NO: 29807 - RNA, 21 nt, RNAi
acuccaacuccaacuggaguu

SEQ ID NO: 29808 - RNA, 21 nt, RNAi
uuugagguugagguugaccuc

SEQ ID NO: 29809 - DNA, 21 bp, homo sapiens
gatgaactagtgagaacaaca

SEQ ID NO: 29810 - RNA, 21 nt, RNAi
ugaacuagugagaacaacauu

SEQ ID NO: 29811 - RNA, 21 nt, RNAi
uuacuugaucacucuuguugu

SEQ ID NO: 29812 - DNA, 21 bp, homo sapiens
gaactagtgagaacaacagca

SEQ ID NO: 29813 - RNA, 21 nt, RNAi
acuagugagaacaacagcauu

SEQ ID NO: 29814 - RNA, 21 nt, RNAi
uuugaucacucuuguugucgu

SEQ ID NO: 29815 - DNA, 21 bp, homo sapiens
gagaacaacagcacaatacga

SEQ ID NO: 29816 - RNA, 21 nt, RNAi
gaacaacagcacaauacgauu

SEQ ID NO: 29817 - RNA, 21 nt, RNAi
uucuuguugucguguuaugcu

SEQ ID NO: 29818 - DNA, 21 bp, homo sapiens
gaacaacagcacaatacgacc

SEQ ID NO: 29819 - RNA, 21 nt, RNAi
acaacagcacaauacgaccuu

SEQ ID NO: 29820 - RNA, 21 nt, RNAi
uuuguugucguguuaugcugg

SEQ ID NO: 29821 - DNA, 21 bp, homo sapiens
gaccaggcgtcaaccaagtat

SEQ ID NO: 29822 - RNA, 21 nt, RNAi
ccaggcgucaaccaaguauuu

SEQ ID NO: 29823 - RNA, 21 nt, RNAi
uugguccgcaguugguucaua

SEQ ID NO: 29824 - DNA, 21 bp, homo sapiens
gacggaagatttgagttgtca

SEQ ID NO: 29825 - RNA, 21 nt, RNAi
cggaagauuugaguugucauu

SEQ ID NO: 29826 - RNA, 21 nt, RNAi
uugccuucuaaacucaacagu

SEQ ID NO: 29827 - DNA, 21 bp, homo sapiens
gaagatttgagttgtcagcga

SEQ ID NO: 29828 - RNA, 21 nt, RNAi
agauuugaguugucagcgauu

SEQ ID NO: 29829 - RNA, 21 nt, RNAi
uuucuaaacucaacagucgcu

SEQ ID NO: 29830 - DNA, 21 bp, homo sapiens
gatttgagttgtcagcgacaa

SEQ ID NO: 29831 - RNA, 21 nt, RNAi
uuugaguugucagcgacaauu

SEQ ID NO: 29832 - RNA, 21 nt, RNAi
uuaaacucaacagucgcuguu

SEQ ID NO: 29833 - DNA, 21 bp, homo sapiens
gaaagtgccagatgttctctg

SEQ ID NO: 29834 - RNA, 21 nt, RNAi
aagugccagauguucucuguu

SEQ ID NO: 29835 - RNA, 21 nt, RNAi
uuuucacggucuacaagagac

SEQ ID NO: 29836 - DNA, 21 bp, homo sapiens
gagtttcaagaggagctctcc

SEQ ID NO: 29837 - RNA, 21 nt, RNAi
guuucaagaggagcucuccuu

SEQ ID NO: 29838 - RNA, 21 nt, RNAi
uucaaaguucuccucgagagg

SEQ ID NO: 29839 - DNA, 21 bp, homo sapiens
gaccaggagtgcatccagatg

SEQ ID NO: 29840 - RNA, 21 nt, RNAi
ccaggagugcauccagauguu

SEQ ID NO: 29841 - RNA, 21 nt, RNAi
uugguccucacguaggucuac

SEQ ID NO: 29842 - DNA, 21 bp, homo sapiens
gagtgcatccagatgaaggcc

SEQ ID NO: 29843 - RNA, 21 nt, RNAi
gugcauccagaugaaggccuu

SEQ ID NO: 29844 - RNA, 21 nt, RNAi
uucacguaggucuacuuccgg

SEQ ID NO: 29845 - DNA, 21 bp, homo sapiens
gagttacagcaagccaagaat

SEQ ID NO: 29846 - RNA, 21 nt, RNAi
guuacagcaagccaagaauuu

SEQ ID NO: 29847 - RNA, 21 nt, RNAi
uucaaugucguucgguucuua

SEQ ID NO: 29848 - DNA, 21 bp, homo sapiens
gaatatgcacaacgtcctgca

SEQ ID NO: 29849 - RNA, 21 nt, RNAi
auaugcacaacguccugcauu

SEQ ID NO: 29850 - RNA, 21 nt, RNAi
uuuauacguguugcaggacgu

SEQ ID NO: 29851 - DNA, 21 bp, homo sapiens
gaactggataaactcacatca

SEQ ID NO: 29852 - RNA, 21 nt, RNAi
acuggauaaacucacaucauu

SEQ ID NO: 29853 - RNA, 21 nt, RNAi
uuugaccuauuugaguguagu

SEQ ID NO: 29854 - DNA, 21 bp, homo sapiens
gataaactcacatcagtaaag

SEQ ID NO: 29855 - RNA, 21 nt, RNAi
uaaacucacaucaguaaaguu

SEQ ID NO: 29856 - RNA, 21 nt, RNAi
uuauuugaguguagucauuuc

SEQ ID NO: 29857 - DNA, 21 bp, homo sapiens
gagctgaacaggcgttccagg

SEQ ID NO: 29858 - RNA, 21 nt, RNAi
gcugaacaggcguuccagguu

SEQ ID NO: 29859 - RNA, 21 nt, RNAi
uucgacuuguccgcaaggucc

SEQ ID NO: 29860 - DNA, 21 bp, homo sapiens
gaacaggcgttccaggcgagt

SEQ ID NO: 29861 - RNA, 21 nt, RNAi
acaggcguuccaggcgaguuu

SEQ ID NO: 29862 - RNA, 21 nt, RNAi
uuuguccgcaagguccgcuca

SEQ ID NO: 29863 - DNA, 21 bp, homo sapiens
gagtcagatcaaggagaatga

SEQ ID NO: 29864 - RNA, 21 nt, RNAi
gucagaucaaggagaaugauu

SEQ ID NO: 29865 - RNA, 21 nt, RNAi
uucagucuaguuccucuuacu

SEQ ID NO: 29866 - DNA, 21 bp, homo sapiens
gatcaaggagaatgagctgag

SEQ ID NO: 29867 - RNA, 21 nt, RNAi
ucaaggagaaugagcugaguu

SEQ ID NO: 29868 - RNA, 21 nt, RNAi
uuaguuccucuuacucgacuc

SEQ ID NO: 29869 - DNA, 21 bp, homo sapiens
gagaatgagctgaggagaagc

SEQ ID NO: 29870 - RNA, 21 nt, RNAi
gaaugagcugaggagaagcuu

SEQ ID NO: 29871 - RNA, 21 nt, RNAi
uucuuacucgacuccucuucg

SEQ ID NO: 29872 - DNA, 21 bp, homo sapiens
gaatgagctgaggagaagcat

SEQ ID NO: 29873 - RNA, 21 nt, RNAi
augagcugaggagaagcauuu

SEQ ID NO: 29874 - RNA, 21 nt, RNAi
uuuacucgacuccucuucgua

SEQ ID NO: 29875 - DNA, 21 bp, homo sapiens
gagctgaggagaagcatggag

SEQ ID NO: 29876 - RNA, 21 nt, RNAi
gcugaggagaagcauggaguu

SEQ ID NO: 29877 - RNA, 21 nt, RNAi
uucgacuccucuucguaccuc

SEQ ID NO: 29878 - DNA, 21 bp, homo sapiens
gaggagaagcatggaggaaat

SEQ ID NO: 29879 - RNA, 21 nt, RNAi
ggagaagcauggaggaaauuu

SEQ ID NO: 29880 - RNA, 21 nt, RNAi
uuccucuucguaccuccuuua

SEQ ID NO: 29881 - DNA, 21 bp, homo sapiens
gagaagcatggaggaaatgaa

SEQ ID NO: 29882 - RNA, 21 nt, RNAi
gaagcauggaggaaaugaauu

SEQ ID NO: 29883 - RNA, 21 nt, RNAi
uucuucguaccuccuuuacuu

SEQ ID NO: 29884 - DNA, 21 bp, homo sapiens
gaagcatggaggaaatgaaga

SEQ ID NO: 29885 - RNA, 21 nt, RNAi
agcauggaggaaaugaagauu

SEQ ID NO: 29886 - RNA, 21 nt, RNAi
uuucguaccuccuuuacuucu

SEQ ID NO: 29887 - DNA, 21 bp, homo sapiens
gagaagtctgccacctggagg

SEQ ID NO: 29888 - RNA, 21 nt, RNAi
gaagucugccaccuggagguu

SEQ ID NO: 29889 - RNA, 21 nt, RNAi
uucuucagacgguggaccucc

SEQ ID NO: 29890 - DNA, 21 bp, homo sapiens
gaagtctgccacctggaggca

SEQ ID NO: 29891 - RNA, 21 nt, RNAi
agucugccaccuggaggcauu

SEQ ID NO: 29892 - RNA, 21 nt, RNAi
uuucagacgguggaccuccgu

SEQ ID NO: 29893 - DNA, 21 bp, homo sapiens
gaggcagaactcaagaacatc

SEQ ID NO: 29894 - RNA, 21 nt, RNAi
ggcagaacucaagaacaucuu

SEQ ID NO: 29895 - RNA, 21 nt, RNAi
uuccgucuugaguucuuguag

SEQ ID NO: 29896 - DNA, 21 bp, homo sapiens
gaactcaagaacatcaaacag

SEQ ID NO: 29897 - RNA, 21 nt, RNAi
acucaagaacaucaaacaguu

SEQ ID NO: 29898 - RNA, 21 nt, RNAi
uuugaguucuuguaguuuguc

SEQ ID NO: 29899 - DNA, 21 bp, homo sapiens
gaagaaatgaaagcgaagaat

SEQ ID NO: 29900 - RNA, 21 nt, RNAi
agaaaugaaagcgaagaauuu

SEQ ID NO: 29901 - RNA, 21 nt, RNAi
uuucuuuacuuucgcuucuua

SEQ ID NO: 29902 - DNA, 21 bp, homo sapiens
gaaatgaaagcgaagaatacc

SEQ ID NO: 29903 - RNA, 21 nt, RNAi
aaugaaagcgaagaauaccuu

SEQ ID NO: 29904 - RNA, 21 nt, RNAi
uuuuacuuucgcuucuuaugg

SEQ ID NO: 29905 - DNA, 21 bp, homo sapiens
gaaagcgaagaatacctctca

SEQ ID NO: 29906 - RNA, 21 nt, RNAi
aagcgaagaauaccucucauu

SEQ ID NO: 29907 - RNA, 21 nt, RNAi
uuuucgcuucuuauggagagu

SEQ ID NO: 29908 - DNA, 21 bp, homo sapiens
gaagaatacctctcaggaaac

SEQ ID NO: 29909 - RNA, 21 nt, RNAi
agaauaccucucaggaaacuu

SEQ ID NO: 29910 - RNA, 21 nt, RNAi
uuucuuauggagaguccuuug

SEQ ID NO: 29911 - DNA, 21 bp, homo sapiens
gaatacctctcaggaaaccat

SEQ ID NO: 29912 - RNA, 21 nt, RNAi
auaccucucaggaaaccauuu

SEQ ID NO: 29913 - RNA, 21 nt, RNAi
uuuauggagaguccuuuggua

SEQ ID NO: 29914 - DNA, 21 bp, homo sapiens
gaaaccatgttaagagatctt

SEQ ID NO: 29915 - RNA, 21 nt, RNAi
aaccauguuaagagaucuuuu

SEQ ID NO: 29916 - RNA, 21 nt, RNAi
uuuugguacaauucucuagaa

SEQ ID NO: 29917 - DNA, 21 bp, homo sapiens
gaagcttgctgtggctgatct

SEQ ID NO: 29918 - RNA, 21 nt, RNAi
agcuugcuguggcugaucuuu

SEQ ID NO: 29919 - RNA, 21 nt, RNAi
uuucgaacgacaccgacuaga

SEQ ID NO: 29920 - DNA, 21 bp, homo sapiens
gagattgttctcaagaccttt

SEQ ID NO: 29921 - RNA, 21 nt, RNAi
gauuguucucaagaccuuuuu

SEQ ID NO: 29922 - RNA, 21 nt, RNAi
uucuaacaagaguucuggaaa

SEQ ID NO: 29923 - DNA, 21 bp, homo sapiens
gagaacatcacattgaacaac

SEQ ID NO: 29924 - RNA, 21 nt, RNAi
gaacaucacauugaacaacuu

SEQ ID NO: 29925 - RNA, 21 nt, RNAi
uucuuguaguguaacuuguug

SEQ ID NO: 29926 - DNA, 21 bp, homo sapiens
gaacatcacattgaacaactt

SEQ ID NO: 29927 - RNA, 21 nt, RNAi
acaucacauugaacaacuuuu

SEQ ID NO: 29928 - RNA, 21 nt, RNAi
uuuguaguguaacuuguugaa

SEQ ID NO: 29929 - DNA, 21 bp, homo sapiens
gataagttaagcaagacagag

SEQ ID NO: 29930 - RNA, 21 nt, RNAi
uaaguuaagcaagacagaguu

SEQ ID NO: 29931 - RNA, 21 nt, RNAi
uuauucaauucguucugucuc

SEQ ID NO: 29932 - DNA, 21 bp, homo sapiens
gacagagaaagagtccaaagc

SEQ ID NO: 29933 - RNA, 21 nt, RNAi
cagagaaagaguccaaagcuu

SEQ ID NO: 29934 - RNA, 21 nt, RNAi
uugucucuuucucagguuucg

SEQ ID NO: 29935 - DNA, 21 bp, homo sapiens
gagaaagagtccaaagccttg

SEQ ID NO: 29936 - RNA, 21 nt, RNAi
gaaagaguccaaagccuuguu

SEQ ID NO: 29937 - RNA, 21 nt, RNAi
uucuuucucagguuucggaac

SEQ ID NO: 29938 - DNA, 21 bp, homo sapiens
gaaagagtccaaagccttgct

SEQ ID NO: 29939 - RNA, 21 nt, RNAi
aagaguccaaagccuugcuuu

SEQ ID NO: 29940 - RNA, 21 nt, RNAi
uuuucucagguuucggaacga

SEQ ID NO: 29941 - DNA, 21 bp, homo sapiens
gagtccaaagccttgctgagt

SEQ ID NO: 29942 - RNA, 21 nt, RNAi
guccaaagccuugcugaguuu

SEQ ID NO: 29943 - RNA, 21 nt, RNAi
uucagguuucggaacgacuca

SEQ ID NO: 29944 - DNA, 21 bp, homo sapiens
gaaacttgtctgaagacacag

SEQ ID NO: 29945 - RNA, 21 nt, RNAi
aacuugucugaagacacaguu

SEQ ID NO: 29946 - RNA, 21 nt, RNAi
uuuugaacagacuucuguguc

SEQ ID NO: 29947 - DNA, 21 bp, homo sapiens
gaatacaacgagagagtaaga

SEQ ID NO: 29948 - RNA, 21 nt, RNAi
auacaacgagagaguaagauu

SEQ ID NO: 29949 - RNA, 21 nt, RNAi
uuuauguugcucucucauucu

SEQ ID NO: 29950 - DNA, 21 bp, homo sapiens
gagagagtaagaacgctggag

SEQ ID NO: 29951 - RNA, 21 nt, RNAi
gagaguaagaacgcuggaguu

SEQ ID NO: 29952 - RNA, 21 nt, RNAi
uucucucauucuugcgaccuc

SEQ ID NO: 29953 - DNA, 21 bp, homo sapiens
gagagtaagaacgctggagat

SEQ ID NO: 29954 - RNA, 21 nt, RNAi
gaguaagaacgcuggagauuu

SEQ ID NO: 29955 - RNA, 21 nt, RNAi
uucucauucuugcgaccucua

SEQ ID NO: 29956 - DNA, 21 bp, homo sapiens
gagtaagaacgctggagatgg

SEQ ID NO: 29957 - RNA, 21 nt, RNAi
guaagaacgcuggagaugguu

SEQ ID NO: 29958 - RNA, 21 nt, RNAi
uucauucuugcgaccucuacc

SEQ ID NO: 29959 - DNA, 21 bp, homo sapiens
gaacgctggagatggacagag

SEQ ID NO: 29960 - RNA, 21 nt, RNAi
acgcuggagauggacagaguu

SEQ ID NO: 29961 - RNA, 21 nt, RNAi
uuugcgaccucuaccugucuc

SEQ ID NO: 29962 - DNA, 21 bp, homo sapiens
gagatcagaaaccttcacaac

SEQ ID NO: 29963 - RNA, 21 nt, RNAi
gaucagaaaccuucacaacuu

SEQ ID NO: 29964 - RNA, 21 nt, RNAi
uucuagucuuuggaaguguug

SEQ ID NO: 29965 - DNA, 21 bp, homo sapiens
gatcagaaaccttcacaacgt

SEQ ID NO: 29966 - RNA, 21 nt, RNAi
ucagaaaccuucacaacguuu

SEQ ID NO: 29967 - RNA, 21 nt, RNAi
uuagucuuuggaaguguugca

SEQ ID NO: 29968 - DNA, 21 bp, homo sapiens
gaaaccttcacaacgtgttag

SEQ ID NO: 29969 - RNA, 21 nt, RNAi
aaccuucacaacguguuaguu

SEQ ID NO: 29970 - RNA, 21 nt, RNAi
uuuuggaaguguugcacaauc

SEQ ID NO: 29971 - DNA, 21 bp, homo sapiens
gacagtaagtcagtggaggta

SEQ ID NO: 29972 - RNA, 21 nt, RNAi
caguaagucaguggagguauu

SEQ ID NO: 29973 - RNA, 21 nt, RNAi
uugucauucagucaccuccau

SEQ ID NO: 29974 - DNA, 21 bp, homo sapiens
gaaactagcttatatggagct

SEQ ID NO: 29975 - RNA, 21 nt, RNAi
aacuagcuuauauggagcuuu

SEQ ID NO: 29976 - RNA, 21 nt, RNAi
uuuugaucgaauauaccucga

SEQ ID NO: 29977 - DNA, 21 bp, homo sapiens
gagctacagcagaaagctgag

SEQ ID NO: 29978 - RNA, 21 nt, RNAi
gcuacagcagaaagcugaguu

SEQ ID NO: 29979 - RNA, 21 nt, RNAi
uucgaugucgucuuucgacuc

SEQ ID NO: 29980 - DNA, 21 bp, homo sapiens
gaaagctgagttctcagatca

SEQ ID NO: 29981 - RNA, 21 nt, RNAi
aagcugaguucucagaucauu

SEQ ID NO: 29982 - RNA, 21 nt, RNAi
uuuucgacucaagagucuagu

SEQ ID NO: 29983 - DNA, 21 bp, homo sapiens
gagttctcagatcagaaacat

SEQ ID NO: 29984 - RNA, 21 nt, RNAi
guucucagaucagaaacauuu

SEQ ID NO: 29985 - RNA, 21 nt, RNAi
uucaagagucuagucuuugua

SEQ ID NO: 29986 - DNA, 21 bp, homo sapiens
gatcagaaacatcagaaggaa

SEQ ID NO: 29987 - RNA, 21 nt, RNAi
ucagaaacaucagaaggaauu

SEQ ID NO: 29988 - RNA, 21 nt, RNAi
uuagucuuuguagucuuccuu

SEQ ID NO: 29989 - DNA, 21 bp, homo sapiens
gaaacatcagaaggaaataga

SEQ ID NO: 29990 - RNA, 21 nt, RNAi
aacaucagaaggaaauagauu

SEQ ID NO: 29991 - RNA, 21 nt, RNAi
uuuuguagucuuccuuuaucu

SEQ ID NO: 29992 - DNA, 21 bp, homo sapiens
gaagacttctcagcttactgg

SEQ ID NO: 29993 - RNA, 21 nt, RNAi
agacuucucagcuuacugguu

SEQ ID NO: 29994 - RNA, 21 nt, RNAi
uuucugaagagucgaaugacc

SEQ ID NO: 29995 - DNA, 21 bp, homo sapiens
gaagatctagaacacaagctt

SEQ ID NO: 29996 - RNA, 21 nt, RNAi
agaucuagaacacaagcuuuu

SEQ ID NO: 29997 - RNA, 21 nt, RNAi
uuucuagaucuuguguucgaa

SEQ ID NO: 29998 - DNA, 21 bp, homo sapiens
gatctagaacacaagcttcag

SEQ ID NO: 29999 - RNA, 21 nt, RNAi
ucuagaacacaagcuucaguu

SEQ ID NO: 30000 - RNA, 21 nt, RNAi
uuagaucuuguguucgaaguc

SEQ ID NO: 30001 - DNA, 21 bp, homo sapiens
gaacacaagcttcagttactg

SEQ ID NO: 30002 - RNA, 21 nt, RNAi
acacaagcuucaguuacuguu

SEQ ID NO: 30003 - RNA, 21 nt, RNAi
uuuguguucgaagucaaugac

SEQ ID NO: 30004 - DNA, 21 bp, homo sapiens
gaaataatggacaaagaccgg

SEQ ID NO: 30005 - RNA, 21 nt, RNAi
aauaauggacaaagaccgguu

SEQ ID NO: 30006 - RNA, 21 nt, RNAi
uuuuauuaccuguuucuggcc

SEQ ID NO: 30007 - DNA, 21 bp, homo sapiens
gacaaagaccggtgttaccaa

SEQ ID NO: 30008 - RNA, 21 nt, RNAi
caaagaccgguguuaccaauu

SEQ ID NO: 30009 - RNA, 21 nt, RNAi
uuguuucuggccacaaugguu

SEQ ID NO: 30010 - DNA, 21 bp, homo sapiens
gaccggtgttaccaagacttg

SEQ ID NO: 30011 - RNA, 21 nt, RNAi
ccgguguuaccaagacuuguu

SEQ ID NO: 30012 - RNA, 21 nt, RNAi
uuggccacaaugguucugaac

SEQ ID NO: 30013 - DNA, 21 bp, homo sapiens
gacttgcatgccgaatatgag

SEQ ID NO: 30014 - RNA, 21 nt, RNAi
cuugcaugccgaauaugaguu

SEQ ID NO: 30015 - RNA, 21 nt, RNAi
uugaacguacggcuuauacuc

SEQ ID NO: 30016 - DNA, 21 bp, homo sapiens
gatgcttctctggtgacaaat

SEQ ID NO: 30017 - RNA, 21 nt, RNAi
ugcuucucuggugacaaauuu

SEQ ID NO: 30018 - RNA, 21 nt, RNAi
uuacgaagagaccacuguuua

SEQ ID NO: 30019 - DNA, 21 bp, homo sapiens
gacaaatgaagatcatcagag

SEQ ID NO: 30020 - RNA, 21 nt, RNAi
caaaugaagaucaucagaguu

SEQ ID NO: 30021 - RNA, 21 nt, RNAi
uuguuuacuucuaguagucuc

SEQ ID NO: 30022 - DNA, 21 bp, homo sapiens
gaagatcatcagagaagtctt

SEQ ID NO: 30023 - RNA, 21 nt, RNAi
agaucaucagagaagucuuuu

SEQ ID NO: 30024 - RNA, 21 nt, RNAi
uuucuaguagucucuucagaa

SEQ ID NO: 30025 - DNA, 21 bp, homo sapiens
gatcagcagcctgccatgcat

SEQ ID NO: 30026 - RNA, 21 nt, RNAi
ucagcagccugccaugcauuu

SEQ ID NO: 30027 - RNA, 21 nt, RNAi
uuagucgucggacgguacgua

SEQ ID NO: 30028 - DNA, 21 bp, homo sapiens
gagaacaaggaagcatgcctt

SEQ ID NO: 30029 - RNA, 21 nt, RNAi
gaacaaggaagcaugccuuuu

SEQ ID NO: 30030 - RNA, 21 nt, RNAi
uucuuguuccuucguacggaa

SEQ ID NO: 30031 - DNA, 21 bp, homo sapiens
gaacaaggaagcatgccttca

SEQ ID NO: 30032 - RNA, 21 nt, RNAi
acaaggaagcaugccuucauu

SEQ ID NO: 30033 - RNA, 21 nt, RNAi
uuuguuccuucguacggaagu

SEQ ID NO: 30034 - DNA, 21 bp, homo sapiens
gaagcatgccttcagagagga

SEQ ID NO: 30035 - RNA, 21 nt, RNAi
agcaugccuucagagaggauu

SEQ ID NO: 30036 - RNA, 21 nt, RNAi
uuucguacggaagucucuccu

SEQ ID NO: 30037 - DNA, 21 bp, homo sapiens
gagaggagtgaatgtcgttta

SEQ ID NO: 30038 - RNA, 21 nt, RNAi
gaggagugaaugucguuuauu

SEQ ID NO: 30039 - RNA, 21 nt, RNAi
uucuccucacuuacagcaaau

SEQ ID NO: 30040 - DNA, 21 bp, homo sapiens
gaggagtgaatgtcgtttaga

SEQ ID NO: 30041 - RNA, 21 nt, RNAi
ggagugaaugucguuuagauu

SEQ ID NO: 30042 - RNA, 21 nt, RNAi
uuccucacuuacagcaaaucu

SEQ ID NO: 30043 - DNA, 21 bp, homo sapiens
gagtgaatgtcgtttagaagc

SEQ ID NO: 30044 - RNA, 21 nt, RNAi
gugaaugucguuuagaagcuu

SEQ ID NO: 30045 - RNA, 21 nt, RNAi
uucacuuacagcaaaucuucg

SEQ ID NO: 30046 - DNA, 21 bp, homo sapiens
gaatgtcgtttagaagcagac

SEQ ID NO: 30047 - RNA, 21 nt, RNAi
augucguuuagaagcagacuu

SEQ ID NO: 30048 - RNA, 21 nt, RNAi
uuuacagcaaaucuucgucug

SEQ ID NO: 30049 - DNA, 21 bp, homo sapiens
gaagcagaccaaagtccgaaa

SEQ ID NO: 30050 - RNA, 21 nt, RNAi
agcagaccaaaguccgaaauu

SEQ ID NO: 30051 - RNA, 21 nt, RNAi
uuucgucugguuucaggcuuu

SEQ ID NO: 30052 - DNA, 21 bp, homo sapiens
gaagagttggtgcaaatcaaa

SEQ ID NO: 30053 - RNA, 21 nt, RNAi
agaguuggugcaaaucaaauu

SEQ ID NO: 30054 - RNA, 21 nt, RNAi
uuucucaaccacguuuaguuu

SEQ ID NO: 30055 - DNA, 21 bp, homo sapiens
gagttggtgcaaatcaaagga

SEQ ID NO: 30056 - RNA, 21 nt, RNAi
guuggugcaaaucaaaggauu

SEQ ID NO: 30057 - RNA, 21 nt, RNAi
uucaaccacguuuaguuuccu

SEQ ID NO: 30058 - DNA, 21 bp, homo sapiens
gaaagcagaacagatgcatca

SEQ ID NO: 30059 - RNA, 21 nt, RNAi
aagcagaacagaugcaucauu

SEQ ID NO: 30060 - RNA, 21 nt, RNAi
uuuucgucuugucuacguagu

SEQ ID NO: 30061 - DNA, 21 bp, homo sapiens
gaaacaagtcagcgcattagt

SEQ ID NO: 30062 - RNA, 21 nt, RNAi
aacaagucagcgcauuaguuu

SEQ ID NO: 30063 - RNA, 21 nt, RNAi
uuuuguucagucgcguaauca

SEQ ID NO: 30064 - DNA, 21 bp, homo sapiens
gaagacacttctgctcaccag

SEQ ID NO: 30065 - RNA, 21 nt, RNAi
agacacuucugcucaccaguu

SEQ ID NO: 30066 - RNA, 21 nt, RNAi
uuucugugaagacgagugguc

SEQ ID NO: 30067 - DNA, 21 bp, homo sapiens
gacacttctgctcaccagaat

SEQ ID NO: 30068 - RNA, 21 nt, RNAi
cacuucugcucaccagaauuu

SEQ ID NO: 30069 - RNA, 21 nt, RNAi
uugugaagacgaguggucuua

SEQ ID NO: 30070 - DNA, 21 bp, homo sapiens
gaatgttgttgctgaaacctt

SEQ ID NO: 30071 - RNA, 21 nt, RNAi
auguuguugcugaaaccuuuu

SEQ ID NO: 30072 - RNA, 21 nt, RNAi
uuuacaacaacgacuuuggaa

SEQ ID NO: 30073 - DNA, 21 bp, homo sapiens
gataaggtagaaactgagcag

SEQ ID NO: 30074 - RNA, 21 nt, RNAi
uaagguagaaacugagcaguu

SEQ ID NO: 30075 - RNA, 21 nt, RNAi
uuauuccaucuuugacucguc

SEQ ID NO: 30076 - DNA, 21 bp, homo sapiens
gaaactgagcaggcagagatt

SEQ ID NO: 30077 - RNA, 21 nt, RNAi
aacugagcaggcagagauuuu

SEQ ID NO: 30078 - RNA, 21 nt, RNAi
uuuugacucguccgucucuaa

SEQ ID NO: 30079 - DNA, 21 bp, homo sapiens
gagcaggcagagattcaagaa

SEQ ID NO: 30080 - RNA, 21 nt, RNAi
gcaggcagagauucaagaauu

SEQ ID NO: 30081 - RNA, 21 nt, RNAi
uucguccgucucuaaguucuu

SEQ ID NO: 30082 - DNA, 21 bp, homo sapiens
gagcaaccatctacttgaaga

SEQ ID NO: 30083 - RNA, 21 nt, RNAi
gcaaccaucuacuugaagauu

SEQ ID NO: 30084 - RNA, 21 nt, RNAi
uucguugguagaugaacuucu

SEQ ID NO: 30085 - DNA, 21 bp, homo sapiens
gaagactctctaaaggagcta

SEQ ID NO: 30086 - RNA, 21 nt, RNAi
agacucucuaaaggagcuauu

SEQ ID NO: 30087 - RNA, 21 nt, RNAi
uuucugagagauuuccucgau

SEQ ID NO: 30088 - DNA, 21 bp, homo sapiens
gactctctaaaggagctacaa

SEQ ID NO: 30089 - RNA, 21 nt, RNAi
cucucuaaaggagcuacaauu

SEQ ID NO: 30090 - RNA, 21 nt, RNAi
uugagagauuuccucgauguu

SEQ ID NO: 30091 - DNA, 21 bp, homo sapiens
gagaagaaagaaatgagttcc

SEQ ID NO: 30092 - RNA, 21 nt, RNAi
gaagaaagaaaugaguuccuu

SEQ ID NO: 30093 - RNA, 21 nt, RNAi
uucuucuuucuuuacucaagg

SEQ ID NO: 30094 - DNA, 21 bp, homo sapiens
gaagaaagaaatgagttccat

SEQ ID NO: 30095 - RNA, 21 nt, RNAi
agaaagaaaugaguuccauuu

SEQ ID NO: 30096 - RNA, 21 nt, RNAi
uuucuuucuuuacucaaggua

SEQ ID NO: 30097 - DNA, 21 bp, homo sapiens
gaaagaaatgagttccatcat

SEQ ID NO: 30098 - RNA, 21 nt, RNAi
aagaaaugaguuccaucauuu

SEQ ID NO: 30099 - RNA, 21 nt, RNAi
uuuucuuuacucaagguagua

SEQ ID NO: 30100 - DNA, 21 bp, homo sapiens
gaaatgagttccatcatttct

SEQ ID NO: 30101 - RNA, 21 nt, RNAi
aaugaguuccaucauuucuuu

SEQ ID NO: 30102 - RNA, 21 nt, RNAi
uuuuacucaagguaguaaaga

SEQ ID NO: 30103 - DNA, 21 bp, homo sapiens
gagttccatcatttctctaaa

SEQ ID NO: 30104 - RNA, 21 nt, RNAi
guuccaucauuucucuaaauu

SEQ ID NO: 30105 - RNA, 21 nt, RNAi
uucaagguaguaaagagauuu

SEQ ID NO: 30106 - DNA, 21 bp, homo sapiens
gactcttaaggaaattaatgc

SEQ ID NO: 30107 - RNA, 21 nt, RNAi
cucuuaaggaaauuaaugcuu

SEQ ID NO: 30108 - RNA, 21 nt, RNAi
uugagaauuccuuuaauuacg

SEQ ID NO: 30109 - DNA, 21 bp, homo sapiens
gagaagatgaacttaatccag

SEQ ID NO: 30110 - RNA, 21 nt, RNAi
gaagaugaacuuaauccaguu

SEQ ID NO: 30111 - RNA, 21 nt, RNAi
uucuucuacuugaauuagguc

SEQ ID NO: 30112 - DNA, 21 bp, homo sapiens
gaagatgaacttaatccagaa

SEQ ID NO: 30113 - RNA, 21 nt, RNAi
agaugaacuuaauccagaauu

SEQ ID NO: 30114 - RNA, 21 nt, RNAi
uuucuacuugaauuaggucuu

SEQ ID NO: 30115 - DNA, 21 bp, homo sapiens
gagttatctgatcagtacaag

SEQ ID NO: 30116 - RNA, 21 nt, RNAi
guuaucugaucaguacaaguu

SEQ ID NO: 30117 - RNA, 21 nt, RNAi
uucaauagacuagucauguuc

SEQ ID NO: 30118 - DNA, 21 bp, homo sapiens
gatgtgaagaaaccggaaatg

SEQ ID NO: 30119 - RNA, 21 nt, RNAi
ugugaagaaaccggaaauguu

SEQ ID NO: 30120 - RNA, 21 nt, RNAi
uuacacuucuuuggccuuuac

SEQ ID NO: 30121 - DNA, 21 bp, homo sapiens
gaagaaaccggaaatgcatat

SEQ ID NO: 30122 - RNA, 21 nt, RNAi
agaaaccggaaaugcauauuu

SEQ ID NO: 30123 - RNA, 21 nt, RNAi
uuucuuuggccuuuacguaua

SEQ ID NO: 30124 - DNA, 21 bp, homo sapiens
gaaaccggaaatgcatatgag

SEQ ID NO: 30125 - RNA, 21 nt, RNAi
aaccggaaaugcauaugaguu

SEQ ID NO: 30126 - RNA, 21 nt, RNAi
uuuuggccuuuacguauacuc

SEQ ID NO: 30127 - DNA, 21 bp, homo sapiens
gaaatgcatatgaggatctta

SEQ ID NO: 30128 - RNA, 21 nt, RNAi
aaugcauaugaggaucuuauu

SEQ ID NO: 30129 - RNA, 21 nt, RNAi
uuuuacguauacuccuagaau

SEQ ID NO: 30130 - DNA, 21 bp, homo sapiens
gaatgcttgctaaatgaatgc

SEQ ID NO: 30131 - RNA, 21 nt, RNAi
augcuugcuaaaugaaugcuu

SEQ ID NO: 30132 - RNA, 21 nt, RNAi
uuuacgaacgauuuacuuacg

SEQ ID NO: 30133 - DNA, 21 bp, homo sapiens
gaatgcactagtctttgtgaa

SEQ ID NO: 30134 - RNA, 21 nt, RNAi
augcacuagucuuugugaauu

SEQ ID NO: 30135 - RNA, 21 nt, RNAi
uuuacgugaucagaaacacuu

SEQ ID NO: 30136 - DNA, 21 bp, homo sapiens
gagttggaacagctaaaggaa

SEQ ID NO: 30137 - RNA, 21 nt, RNAi
guuggaacagcuaaaggaauu

SEQ ID NO: 30138 - RNA, 21 nt, RNAi
uucaaccuugucgauuuccuu

SEQ ID NO: 30139 - DNA, 21 bp, homo sapiens
gaacagctaaaggaagcattt

SEQ ID NO: 30140 - RNA, 21 nt, RNAi
acagcuaaaggaagcauuuuu

SEQ ID NO: 30141 - RNA, 21 nt, RNAi
uuugucgauuuccuucguaaa

SEQ ID NO: 30142 - DNA, 21 bp, homo sapiens
gaagcatttgcaaaggaacac

SEQ ID NO: 30143 - RNA, 21 nt, RNAi
agcauuugcaaaggaacacuu

SEQ ID NO: 30144 - RNA, 21 nt, RNAi
uuucguaaacguuuccuugug

SEQ ID NO: 30145 - DNA, 21 bp, homo sapiens
gaacaccaagaattcttaaca

SEQ ID NO: 30146 - RNA, 21 nt, RNAi
acaccaagaauucuuaacauu

SEQ ID NO: 30147 - RNA, 21 nt, RNAi
uuugugguucuuaagaauugu

SEQ ID NO: 30148 - DNA, 21 bp, homo sapiens
gaagaaagaaatcagaatctg

SEQ ID NO: 30149 - RNA, 21 nt, RNAi
agaaagaaaucagaaucuguu

SEQ ID NO: 30150 - RNA, 21 nt, RNAi
uuucuuucuuuagucuuagac

SEQ ID NO: 30151 - DNA, 21 bp, homo sapiens
gaaagaaatcagaatctgatg

SEQ ID NO: 30152 - RNA, 21 nt, RNAi
aagaaaucagaaucugauguu

SEQ ID NO: 30153 - RNA, 21 nt, RNAi
uuuucuuuagucuuagacuac

SEQ ID NO: 30154 - DNA, 21 bp, homo sapiens
gaaatcagaatctgatgctag

SEQ ID NO: 30155 - RNA, 21 nt, RNAi
aaucagaaucugaugcuaguu

SEQ ID NO: 30156 - RNA, 21 nt, RNAi
uuuuagucuuagacuacgauc

SEQ ID NO: 30157 - DNA, 21 bp, homo sapiens
gaatctgatgctagagttgga

SEQ ID NO: 30158 - RNA, 21 nt, RNAi
aucugaugcuagaguuggauu

SEQ ID NO: 30159 - RNA, 21 nt, RNAi
uuuagacuacgaucucaaccu

SEQ ID NO: 30160 - DNA, 21 bp, homo sapiens
gatgctagagttggagacagt

SEQ ID NO: 30161 - RNA, 21 nt, RNAi
ugcuagaguuggagacaguuu

SEQ ID NO: 30162 - RNA, 21 nt, RNAi
uuacgaucucaaccucuguca

SEQ ID NO: 30163 - DNA, 21 bp, homo sapiens
gagttggagacagtgcagcaa

SEQ ID NO: 30164 - RNA, 21 nt, RNAi
guuggagacagugcagcaauu

SEQ ID NO: 30165 - RNA, 21 nt, RNAi
uucaaccucugucacgucguu

SEQ ID NO: 30166 - DNA, 21 bp, homo sapiens
gagacagtgcagcaagctctg

SEQ ID NO: 30167 - RNA, 21 nt, RNAi
gacagugcagcaagcucuguu

SEQ ID NO: 30168 - RNA, 21 nt, RNAi
uucugucacgucguucgagac

SEQ ID NO: 30169 - DNA, 21 bp, homo sapiens
gacagtgcagcaagctctgag

SEQ ID NO: 30170 - RNA, 21 nt, RNAi
cagugcagcaagcucugaguu

SEQ ID NO: 30171 - RNA, 21 nt, RNAi
uugucacgucguucgagacuc

SEQ ID NO: 30172 - DNA, 21 bp, homo sapiens
gagatctgagatgacagataa

SEQ ID NO: 30173 - RNA, 21 nt, RNAi
gaucugagaugacagauaauu

SEQ ID NO: 30174 - RNA, 21 nt, RNAi
uucuagacucuacugucuauu

SEQ ID NO: 30175 - DNA, 21 bp, homo sapiens
gatctgagatgacagataacc

SEQ ID NO: 30176 - RNA, 21 nt, RNAi
ucugagaugacagauaaccuu

SEQ ID NO: 30177 - RNA, 21 nt, RNAi
uuagacucuacugucuauugg

SEQ ID NO: 30178 - DNA, 21 bp, homo sapiens
gagcgaggctggtggtttaaa

SEQ ID NO: 30179 - RNA, 21 nt, RNAi
gcgaggcuggugguuuaaauu

SEQ ID NO: 30180 - RNA, 21 nt, RNAi
uucgcuccgaccaccaaauuu

SEQ ID NO: 30181 - DNA, 21 bp, homo sapiens
gaggctggtggtttaaagcaa

SEQ ID NO: 30182 - RNA, 21 nt, RNAi
ggcuggugguuuaaagcaauu

SEQ ID NO: 30183 - RNA, 21 nt, RNAi
uuccgaccaccaaauuucguu

SEQ ID NO: 30184 - DNA, 21 bp, homo sapiens
gagaatgaacagctgatgaag

SEQ ID NO: 30185 - RNA, 21 nt, RNAi
gaaugaacagcugaugaaguu

SEQ ID NO: 30186 - RNA, 21 nt, RNAi
uucuuacuugucgacuacuuc

SEQ ID NO: 30187 - DNA, 21 bp, homo sapiens
gaatgaacagctgatgaaggt

SEQ ID NO: 30188 - RNA, 21 nt, RNAi
augaacagcugaugaagguuu

SEQ ID NO: 30189 - RNA, 21 nt, RNAi
uuuacuugucgacuacuucca

SEQ ID NO: 30190 - DNA, 21 bp, homo sapiens
gaacagctgatgaaggtaatg

SEQ ID NO: 30191 - RNA, 21 nt, RNAi
acagcugaugaagguaauguu

SEQ ID NO: 30192 - RNA, 21 nt, RNAi
uuugucgacuacuuccauuac

SEQ ID NO: 30193 - DNA, 21 bp, homo sapiens
gatgaaggtaatgaagactaa

SEQ ID NO: 30194 - RNA, 21 nt, RNAi
ugaagguaaugaagacuaauu

SEQ ID NO: 30195 - RNA, 21 nt, RNAi
uuacuuccauuacuucugauu

SEQ ID NO: 30196 - DNA, 21 bp, homo sapiens
gaaggtaatgaagactaaaca

SEQ ID NO: 30197 - RNA, 21 nt, RNAi
agguaaugaagacuaaacauu

SEQ ID NO: 30198 - RNA, 21 nt, RNAi
uuuccauuacuucugauuugu

SEQ ID NO: 30199 - DNA, 21 bp, homo sapiens
gaagactaaacatgaatgtca

SEQ ID NO: 30200 - RNA, 21 nt, RNAi
agacuaaacaugaaugucauu

SEQ ID NO: 30201 - RNA, 21 nt, RNAi
uuucugauuuguacuuacagu

SEQ ID NO: 30202 - DNA, 21 bp, homo sapiens
gaatcagaaccaattaggaac

SEQ ID NO: 30203 - RNA, 21 nt, RNAi
aucagaaccaauuaggaacuu

SEQ ID NO: 30204 - RNA, 21 nt, RNAi
uuuagucuugguuaauccuug

SEQ ID NO: 30205 - DNA, 21 bp, homo sapiens
gaaccaattaggaactctgtg

SEQ ID NO: 30206 - RNA, 21 nt, RNAi
accaauuaggaacucuguguu

SEQ ID NO: 30207 - RNA, 21 nt, RNAi
uuugguuaauccuugagacac

SEQ ID NO: 30208 - DNA, 21 bp, homo sapiens
gaactctgtgaaagaaagaga

SEQ ID NO: 30209 - RNA, 21 nt, RNAi
acucugugaaagaaagagauu

SEQ ID NO: 30210 - RNA, 21 nt, RNAi
uuugagacacuuucuuucucu

SEQ ID NO: 30211 - DNA, 21 bp, homo sapiens
gaaagaaagagagagtgagag

SEQ ID NO: 30212 - RNA, 21 nt, RNAi
aagaaagagagagugagaguu

SEQ ID NO: 30213 - RNA, 21 nt, RNAi
uuuucuuucucucucacucuc

SEQ ID NO: 30214 - DNA, 21 bp, homo sapiens
gaaagagagagtgagagaaat

SEQ ID NO: 30215 - RNA, 21 nt, RNAi
aagagagagugagagaaauuu

SEQ ID NO: 30216 - RNA, 21 nt, RNAi
uuuucucucucacucucuuua

SEQ ID NO: 30217 - DNA, 21 bp, homo sapiens
gagagagtgagagaaatcaat

SEQ ID NO: 30218 - RNA, 21 nt, RNAi
gagagugagagaaaucaauuu

SEQ ID NO: 30219 - RNA, 21 nt, RNAi
uucucucacucucuuuaguua

SEQ ID NO: 30220 - DNA, 21 bp, homo sapiens
gagagtgagagaaatcaatgt

SEQ ID NO: 30221 - RNA, 21 nt, RNAi
gagugagagaaaucaauguuu

SEQ ID NO: 30222 - RNA, 21 nt, RNAi
uucucacucucuuuaguuaca

SEQ ID NO: 30223 - DNA, 21 bp, homo sapiens
gagtgagagaaatcaatgtaa

SEQ ID NO: 30224 - RNA, 21 nt, RNAi
gugagagaaaucaauguaauu

SEQ ID NO: 30225 - RNA, 21 nt, RNAi
uucacucucuuuaguuacauu

SEQ ID NO: 30226 - DNA, 21 bp, homo sapiens
gatggatcttgaagttaaaga

SEQ ID NO: 30227 - RNA, 21 nt, RNAi
uggaucuugaaguuaaagauu

SEQ ID NO: 30228 - RNA, 21 nt, RNAi
uuaccuagaacuucaauuucu

SEQ ID NO: 30229 - DNA, 21 bp, homo sapiens
gatagttataatgcgcagttg

SEQ ID NO: 30230 - RNA, 21 nt, RNAi
uaguuauaaugcgcaguuguu

SEQ ID NO: 30231 - RNA, 21 nt, RNAi
uuaucaauauuacgcgucaac

SEQ ID NO: 30232 - DNA, 21 bp, homo sapiens
gaagctatgctaagaaataag

SEQ ID NO: 30233 - RNA, 21 nt, RNAi
agcuaugcuaagaaauaaguu

SEQ ID NO: 30234 - RNA, 21 nt, RNAi
uuucgauacgauucuuuauuc

SEQ ID NO: 30235 - DNA, 21 bp, homo sapiens
gaaagtgagaaggagaaggag

SEQ ID NO: 30236 - RNA, 21 nt, RNAi
aagugagaaggagaaggaguu

SEQ ID NO: 30237 - RNA, 21 nt, RNAi
uuuucacucuuccucuuccuc

SEQ ID NO: 30238 - DNA, 21 bp, homo sapiens
gagaaggagaaggagtgcctg

SEQ ID NO: 30239 - RNA, 21 nt, RNAi
gaaggagaaggagugccuguu

SEQ ID NO: 30240 - RNA, 21 nt, RNAi
uucuuccucuuccucacggac

SEQ ID NO: 30241 - DNA, 21 bp, homo sapiens
gaaggagaaggagtgcctgca

SEQ ID NO: 30242 - RNA, 21 nt, RNAi
aggagaaggagugccugcauu

SEQ ID NO: 30243 - RNA, 21 nt, RNAi
uuuccucuuccucacggacgu

SEQ ID NO: 30244 - DNA, 21 bp, homo sapiens
gagaaggagtgcctgcagcat

SEQ ID NO: 30245 - RNA, 21 nt, RNAi
gaaggagugccugcagcauuu

SEQ ID NO: 30246 - RNA, 21 nt, RNAi
uucuuccucacggacgucgua

SEQ ID NO: 30247 - DNA, 21 bp, homo sapiens
gaaggagtgcctgcagcatga

SEQ ID NO: 30248 - RNA, 21 nt, RNAi
aggagugccugcagcaugauu

SEQ ID NO: 30249 - RNA, 21 nt, RNAi
uuuccucacggacgucguacu

SEQ ID NO: 30250 - DNA, 21 bp, homo sapiens
gagtgcctgcagcatgaatta

SEQ ID NO: 30251 - RNA, 21 nt, RNAi
gugccugcagcaugaauuauu

SEQ ID NO: 30252 - RNA, 21 nt, RNAi
uucacggacgucguacuuaau

SEQ ID NO: 30253 - DNA, 21 bp, homo sapiens
gaattacagacaattagagga

SEQ ID NO: 30254 - RNA, 21 nt, RNAi
auuacagacaauuagaggauu

SEQ ID NO: 30255 - RNA, 21 nt, RNAi
uuuaaugucuguuaaucuccu

SEQ ID NO: 30256 - DNA, 21 bp, homo sapiens
gacaattagaggagatcttga

SEQ ID NO: 30257 - RNA, 21 nt, RNAi
caauuagaggagaucuugauu

SEQ ID NO: 30258 - RNA, 21 nt, RNAi
uuguuaaucuccucuagaacu

SEQ ID NO: 30259 - DNA, 21 bp, homo sapiens
gaggagatcttgaaaccagca

SEQ ID NO: 30260 - RNA, 21 nt, RNAi
ggagaucuugaaaccagcauu

SEQ ID NO: 30261 - RNA, 21 nt, RNAi
uuccucuagaacuuuggucgu

SEQ ID NO: 30262 - DNA, 21 bp, homo sapiens
gagatcttgaaaccagcaatt

SEQ ID NO: 30263 - RNA, 21 nt, RNAi
gaucuugaaaccagcaauuuu

SEQ ID NO: 30264 - RNA, 21 nt, RNAi
uucuagaacuuuggucguuaa

SEQ ID NO: 30265 - DNA, 21 bp, homo sapiens
gatcttgaaaccagcaatttg

SEQ ID NO: 30266 - RNA, 21 nt, RNAi
ucuugaaaccagcaauuuguu

SEQ ID NO: 30267 - RNA, 21 nt, RNAi
uuagaacuuuggucguuaaac

SEQ ID NO: 30268 - DNA, 21 bp, homo sapiens
gaaaccagcaatttgcaagac

SEQ ID NO: 30269 - RNA, 21 nt, RNAi
aaccagcaauuugcaagacuu

SEQ ID NO: 30270 - RNA, 21 nt, RNAi
uuuuggucguuaaacguucug

SEQ ID NO: 30271 - DNA, 21 bp, homo sapiens
gacatgcagtcacaagaaatt

SEQ ID NO: 30272 - RNA, 21 nt, RNAi
caugcagucacaagaaauuuu

SEQ ID NO: 30273 - RNA, 21 nt, RNAi
uuguacgucaguguucuuuaa

SEQ ID NO: 30274 - DNA, 21 bp, homo sapiens
gaaattagtggccttaaagac

SEQ ID NO: 30275 - RNA, 21 nt, RNAi
aauuaguggccuuaaagacuu

SEQ ID NO: 30276 - RNA, 21 nt, RNAi
uuuuaaucaccggaauuucug

SEQ ID NO: 30277 - DNA, 21 bp, homo sapiens
gactgtgaaatagatgcggaa

SEQ ID NO: 30278 - RNA, 21 nt, RNAi
cugugaaauagaugcggaauu

SEQ ID NO: 30279 - RNA, 21 nt, RNAi
uugacacuuuaucuacgccuu

SEQ ID NO: 30280 - DNA, 21 bp, homo sapiens
gacaatgcacaccttcagtgc

SEQ ID NO: 30281 - RNA, 21 nt, RNAi
caaugcacaccuucagugcuu

SEQ ID NO: 30282 - RNA, 21 nt, RNAi
uuguuacguguggaagucacg

SEQ ID NO: 30283 - DNA, 21 bp, homo sapiens
gaacaagctgaatgagctaga

SEQ ID NO: 30284 - RNA, 21 nt, RNAi
acaagcugaaugagcuagauu

SEQ ID NO: 30285 - RNA, 21 nt, RNAi
uuuguucgacuuacucgaucu

SEQ ID NO: 30286 - DNA, 21 bp, homo sapiens
gaactcgtaactgagctgaat

SEQ ID NO: 30287 - RNA, 21 nt, RNAi
acucguaacugagcugaauuu

SEQ ID NO: 30288 - RNA, 21 nt, RNAi
uuugagcauugacucgacuua

SEQ ID NO: 30289 - DNA, 21 bp, homo sapiens
gagctgaatgattcaaggtca

SEQ ID NO: 30290 - RNA, 21 nt, RNAi
gcugaaugauucaaggucauu

SEQ ID NO: 30291 - RNA, 21 nt, RNAi
uucgacuuacuaaguuccagu

SEQ ID NO: 30292 - DNA, 21 bp, homo sapiens
gaatgattcaaggtcagaatg

SEQ ID NO: 30293 - RNA, 21 nt, RNAi
augauucaaggucagaauguu

SEQ ID NO: 30294 - RNA, 21 nt, RNAi
uuuacuaaguuccagucuuac

SEQ ID NO: 30295 - DNA, 21 bp, homo sapiens
gattcaaggtcagaatgtatc

SEQ ID NO: 30296 - RNA, 21 nt, RNAi
uucaaggucagaauguaucuu

SEQ ID NO: 30297 - RNA, 21 nt, RNAi
uuaaguuccagucuuacauag

SEQ ID NO: 30298 - DNA, 21 bp, homo sapiens
gaatgtatcacagcaactagg

SEQ ID NO: 30299 - RNA, 21 nt, RNAi
auguaucacagcaacuagguu

SEQ ID NO: 30300 - RNA, 21 nt, RNAi
uuuacauagugucguugaucc

SEQ ID NO: 30301 - DNA, 21 bp, homo sapiens
gatgacagtggtcttctccat

SEQ ID NO: 30302 - RNA, 21 nt, RNAi
ugacaguggucuucuccauuu

SEQ ID NO: 30303 - RNA, 21 nt, RNAi
uuacugucaccagaagaggua

SEQ ID NO: 30304 - DNA, 21 bp, homo sapiens
gacagtggtcttctccatggt

SEQ ID NO: 30305 - RNA, 21 nt, RNAi
caguggucuucuccaugguuu

SEQ ID NO: 30306 - RNA, 21 nt, RNAi
uugucaccagaagagguacca

SEQ ID NO: 30307 - DNA, 21 bp, homo sapiens
gagttagtggaagacatacca

SEQ ID NO: 30308 - RNA, 21 nt, RNAi
guuaguggaagacauaccauu

SEQ ID NO: 30309 - RNA, 21 nt, RNAi
uucaaucaccuucuguauggu

SEQ ID NO: 30310 - DNA, 21 bp, homo sapiens
gaagacataccaggaggtgaa

SEQ ID NO: 30311 - RNA, 21 nt, RNAi
agacauaccaggaggugaauu

SEQ ID NO: 30312 - RNA, 21 nt, RNAi
uuucuguaugguccuccacuu

SEQ ID NO: 30313 - DNA, 21 bp, homo sapiens
gacataccaggaggtgaattt

SEQ ID NO: 30314 - RNA, 21 nt, RNAi
cauaccaggaggugaauuuuu

SEQ ID NO: 30315 - RNA, 21 nt, RNAi
uuguaugguccuccacuuaaa

SEQ ID NO: 30316 - DNA, 21 bp, homo sapiens
gaggtgaatttggtgaacaac

SEQ ID NO: 30317 - RNA, 21 nt, RNAi
ggugaauuuggugaacaacuu

SEQ ID NO: 30318 - RNA, 21 nt, RNAi
uuccacuuaaaccacuuguug

SEQ ID NO: 30319 - DNA, 21 bp, homo sapiens
gaatttggtgaacaaccaaat

SEQ ID NO: 30320 - RNA, 21 nt, RNAi
auuuggugaacaaccaaauuu

SEQ ID NO: 30321 - RNA, 21 nt, RNAi
uuuaaaccacuuguugguuua

SEQ ID NO: 30322 - DNA, 21 bp, homo sapiens
gaacaaccaaatgaacagcac

SEQ ID NO: 30323 - RNA, 21 nt, RNAi
acaaccaaaugaacagcacuu

SEQ ID NO: 30324 - RNA, 21 nt, RNAi
uuuguugguuuacuugucgug

SEQ ID NO: 30325 - DNA, 21 bp, homo sapiens
gacgagagtaattcctacgag

SEQ ID NO: 30326 - RNA, 21 nt, RNAi
cgagaguaauuccuacgaguu

SEQ ID NO: 30327 - RNA, 21 nt, RNAi
uugcucucauuaaggaugcuc

SEQ ID NO: 30328 - DNA, 21 bp, homo sapiens
gagagtaattcctacgagcac

SEQ ID NO: 30329 - RNA, 21 nt, RNAi
gaguaauuccuacgagcacuu

SEQ ID NO: 30330 - RNA, 21 nt, RNAi
uucucauuaaggaugcucgug

SEQ ID NO: 30331 - DNA, 21 bp, homo sapiens
gagtaattcctacgagcactt

SEQ ID NO: 30332 - RNA, 21 nt, RNAi
guaauuccuacgagcacuuuu

SEQ ID NO: 30333 - RNA, 21 nt, RNAi
uucauuaaggaugcucgugaa

SEQ ID NO: 30334 - DNA, 21 bp, homo sapiens
gagcacttgacattgtcagac

SEQ ID NO: 30335 - RNA, 21 nt, RNAi
gcacuugacauugucagacuu

SEQ ID NO: 30336 - RNA, 21 nt, RNAi
uucgugaacuguaacagucug

SEQ ID NO: 30337 - DNA, 21 bp, homo sapiens
gacattgtcagacaaagaagt

SEQ ID NO: 30338 - RNA, 21 nt, RNAi
cauugucagacaaagaaguuu

SEQ ID NO: 30339 - RNA, 21 nt, RNAi
uuguaacagucuguuucuuca

SEQ ID NO: 30340 - DNA, 21 bp, homo sapiens
gacaaagaagttcaaatgcac

SEQ ID NO: 30341 - RNA, 21 nt, RNAi
caaagaaguucaaaugcacuu

SEQ ID NO: 30342 - RNA, 21 nt, RNAi
uuguuucuucaaguuuacgug

SEQ ID NO: 30343 - DNA, 21 bp, homo sapiens
gaagttcaaatgcactttgcc

SEQ ID NO: 30344 - RNA, 21 nt, RNAi
aguucaaaugcacuuugccuu

SEQ ID NO: 30345 - RNA, 21 nt, RNAi
uuucaaguuuacgugaaacgg

SEQ ID NO: 30346 - DNA, 21 bp, homo sapiens
gatcagcactgtcagatgagc

SEQ ID NO: 30347 - RNA, 21 nt, RNAi
ucagcacugucagaugagcuu

SEQ ID NO: 30348 - RNA, 21 nt, RNAi
uuagucgugacagucuacucg

SEQ ID NO: 30349 - DNA, 21 bp, homo sapiens
gagctgcagacctatgttgac

SEQ ID NO: 30350 - RNA, 21 nt, RNAi
gcugcagaccuauguugacuu

SEQ ID NO: 30351 - RNA, 21 nt, RNAi
uucgacgucuggauacaacug

SEQ ID NO: 30352 - DNA, 21 bp, homo sapiens
gacctatgttgactcattaaa

SEQ ID NO: 30353 - RNA, 21 nt, RNAi
ccuauguugacucauuaaauu

SEQ ID NO: 30354 - RNA, 21 nt, RNAi
uuggauacaacugaguaauuu

SEQ ID NO: 30355 - DNA, 21 bp, homo sapiens
gaatctgagaaactttcaagg

SEQ ID NO: 30356 - RNA, 21 nt, RNAi
aucugagaaacuuucaagguu

SEQ ID NO: 30357 - RNA, 21 nt, RNAi
uuuagacucuuugaaaguucc

SEQ ID NO: 30358 - DNA, 21 bp, homo sapiens
gagaaactttcaaggtgactt

SEQ ID NO: 30359 - RNA, 21 nt, RNAi
gaaacuuucaaggugacuuuu

SEQ ID NO: 30360 - RNA, 21 nt, RNAi
uucuuugaaaguuccacugaa

SEQ ID NO: 30361 - DNA, 21 bp, homo sapiens
gaaactttcaaggtgacttgg

SEQ ID NO: 30362 - RNA, 21 nt, RNAi
aacuuucaaggugacuugguu

SEQ ID NO: 30363 - RNA, 21 nt, RNAi
uuuugaaaguuccacugaacc

SEQ ID NO: 30364 - DNA, 21 bp, homo sapiens
gacttggtgaaggagatgcag

SEQ ID NO: 30365 - RNA, 21 nt, RNAi
cuuggugaaggagaugcaguu

SEQ ID NO: 30366 - RNA, 21 nt, RNAi
uugaaccacuuccucuacguc

SEQ ID NO: 30367 - DNA, 21 bp, homo sapiens
gacagctctagtcttagcagt

SEQ ID NO: 30368 - RNA, 21 nt, RNAi
cagcucuagucuuagcaguuu

SEQ ID NO: 30369 - RNA, 21 nt, RNAi
uugucgagaucagaaucguca

SEQ ID NO: 30370 - DNA, 21 bp, homo sapiens
gaacagacaggagatatgtct

SEQ ID NO: 30371 - RNA, 21 nt, RNAi
acagacaggagauaugucuuu

SEQ ID NO: 30372 - RNA, 21 nt, RNAi
uuugucuguccucuauacaga

SEQ ID NO: 30373 - DNA, 21 bp, homo sapiens
gaggagaatctgaccaggaaa

SEQ ID NO: 30374 - RNA, 21 nt, RNAi
ggagaaucugaccaggaaauu

SEQ ID NO: 30375 - RNA, 21 nt, RNAi
uuccucuuagacugguccuuu

SEQ ID NO: 30376 - DNA, 21 bp, homo sapiens
gagaatctgaccaggaaagaa

SEQ ID NO: 30377 - RNA, 21 nt, RNAi
gaaucugaccaggaaagaauu

SEQ ID NO: 30378 - RNA, 21 nt, RNAi
uucuuagacugguccuuucuu

SEQ ID NO: 30379 - DNA, 21 bp, homo sapiens
gaatctgaccaggaaagaaac

SEQ ID NO: 30380 - RNA, 21 nt, RNAi
aucugaccaggaaagaaacuu

SEQ ID NO: 30381 - RNA, 21 nt, RNAi
uuuagacugguccuuucuuug

SEQ ID NO: 30382 - DNA, 21 bp, homo sapiens
gaaattcaagagctcgagcag

SEQ ID NO: 30383 - RNA, 21 nt, RNAi
aauucaagagcucgagcaguu

SEQ ID NO: 30384 - RNA, 21 nt, RNAi
uuuuaaguucucgagcucguc

SEQ ID NO: 30385 - DNA, 21 bp, homo sapiens
gagctcgagcagttattaagt

SEQ ID NO: 30386 - RNA, 21 nt, RNAi
gcucgagcaguuauuaaguuu

SEQ ID NO: 30387 - RNA, 21 nt, RNAi
uucgagcucgucaauaauuca

SEQ ID NO: 30388 - DNA, 21 bp, homo sapiens
gagcagttattaagttctgaa

SEQ ID NO: 30389 - RNA, 21 nt, RNAi
gcaguuauuaaguucugaauu

SEQ ID NO: 30390 - RNA, 21 nt, RNAi
uucgucaauaauucaagacuu

SEQ ID NO: 30391 - DNA, 21 bp, homo sapiens
gaaaggcaagagcttgactgc

SEQ ID NO: 30392 - RNA, 21 nt, RNAi
aaggcaagagcuugacugcuu

SEQ ID NO: 30393 - RNA, 21 nt, RNAi
uuuuccguucucgaacugacg

SEQ ID NO: 30394 - DNA, 21 bp, homo sapiens
gagcttgactgccttaggaag

SEQ ID NO: 30395 - RNA, 21 nt, RNAi
gcuugacugccuuaggaaguu

SEQ ID NO: 30396 - RNA, 21 nt, RNAi
uucgaacugacggaauccuuc

SEQ ID NO: 30397 - DNA, 21 bp, homo sapiens
gactgccttaggaagcagtat

SEQ ID NO: 30398 - RNA, 21 nt, RNAi
cugccuuaggaagcaguauuu

SEQ ID NO: 30399 - RNA, 21 nt, RNAi
uugacggaauccuucgucaua

SEQ ID NO: 30400 - DNA, 21 bp, homo sapiens
gaacagtggcaacagaagctg

SEQ ID NO: 30401 - RNA, 21 nt, RNAi
acaguggcaacagaagcuguu

SEQ ID NO: 30402 - RNA, 21 nt, RNAi
uuugucaccguugucuucgac

SEQ ID NO: 30403 - DNA, 21 bp, homo sapiens
gaagctgacaagcgtgactct

SEQ ID NO: 30404 - RNA, 21 nt, RNAi
agcugacaagcgugacucuuu

SEQ ID NO: 30405 - RNA, 21 nt, RNAi
uuucgacuguucgcacugaga

SEQ ID NO: 30406 - DNA, 21 bp, homo sapiens
gacaagcgtgactctggagat

SEQ ID NO: 30407 - RNA, 21 nt, RNAi
caagcgugacucuggagauuu

SEQ ID NO: 30408 - RNA, 21 nt, RNAi
uuguucgcacugagaccucua

SEQ ID NO: 30409 - DNA, 21 bp, homo sapiens
gactctggagatggagtccaa

SEQ ID NO: 30410 - RNA, 21 nt, RNAi
cucuggagauggaguccaauu

SEQ ID NO: 30411 - RNA, 21 nt, RNAi
uugagaccucuaccucagguu

SEQ ID NO: 30412 - DNA, 21 bp, homo sapiens
gagatggagtccaagttggcg

SEQ ID NO: 30413 - RNA, 21 nt, RNAi
gauggaguccaaguuggcguu

SEQ ID NO: 30414 - RNA, 21 nt, RNAi
uucuaccucagguucaaccgc

SEQ ID NO: 30415 - DNA, 21 bp, homo sapiens
gatggagtccaagttggcggc

SEQ ID NO: 30416 - RNA, 21 nt, RNAi
uggaguccaaguuggcggcuu

SEQ ID NO: 30417 - RNA, 21 nt, RNAi
uuaccucagguucaaccgccg

SEQ ID NO: 30418 - DNA, 21 bp, homo sapiens
gagtccaagttggcggcagaa

SEQ ID NO: 30419 - RNA, 21 nt, RNAi
guccaaguuggcggcagaauu

SEQ ID NO: 30420 - RNA, 21 nt, RNAi
uucagguucaaccgccgucuu

SEQ ID NO: 30421 - DNA, 21 bp, homo sapiens
gaaacagacggaacaactgtc

SEQ ID NO: 30422 - RNA, 21 nt, RNAi
aacagacggaacaacugucuu

SEQ ID NO: 30423 - RNA, 21 nt, RNAi
uuuugucugccuuguugacag

SEQ ID NO: 30424 - DNA, 21 bp, homo sapiens
gacggaacaactgtcacttga

SEQ ID NO: 30425 - RNA, 21 nt, RNAi
cggaacaacugucacuugauu

SEQ ID NO: 30426 - RNA, 21 nt, RNAi
uugccuuguugacagugaacu

SEQ ID NO: 30427 - DNA, 21 bp, homo sapiens
gaacaactgtcacttgagctg

SEQ ID NO: 30428 - RNA, 21 nt, RNAi
acaacugucacuugagcuguu

SEQ ID NO: 30429 - RNA, 21 nt, RNAi
uuuguugacagugaacucgac

SEQ ID NO: 30430 - DNA, 21 bp, homo sapiens
gagctggaagtagcacgactc

SEQ ID NO: 30431 - RNA, 21 nt, RNAi
gcuggaaguagcacgacucuu

SEQ ID NO: 30432 - RNA, 21 nt, RNAi
uucgaccuucaucgugcugag

SEQ ID NO: 30433 - DNA, 21 bp, homo sapiens
gaagtagcacgactccagcta

SEQ ID NO: 30434 - RNA, 21 nt, RNAi
aguagcacgacuccagcuauu

SEQ ID NO: 30435 - RNA, 21 nt, RNAi
uuucaucgugcugaggucgau

SEQ ID NO: 30436 - DNA, 21 bp, homo sapiens
gactccagctacaaggtctgg

SEQ ID NO: 30437 - RNA, 21 nt, RNAi
cuccagcuacaaggucugguu

SEQ ID NO: 30438 - RNA, 21 nt, RNAi
uugaggucgauguuccagacc

SEQ ID NO: 30439 - DNA, 21 bp, homo sapiens
gacttaagttctcggtctttg

SEQ ID NO: 30440 - RNA, 21 nt, RNAi
cuuaaguucucggucuuuguu

SEQ ID NO: 30441 - RNA, 21 nt, RNAi
uugaauucaagagccagaaac

SEQ ID NO: 30442 - DNA, 21 bp, homo sapiens
gacacagaagatgctattcaa

SEQ ID NO: 30443 - RNA, 21 nt, RNAi
cacagaagaugcuauucaauu

SEQ ID NO: 30444 - RNA, 21 nt, RNAi
uugugucuucuacgauaaguu

SEQ ID NO: 30445 - DNA, 21 bp, homo sapiens
gaagatgctattcaaggccga

SEQ ID NO: 30446 - RNA, 21 nt, RNAi
agaugcuauucaaggccgauu

SEQ ID NO: 30447 - RNA, 21 nt, RNAi
uuucuacgauaaguuccggcu

SEQ ID NO: 30448 - DNA, 21 bp, homo sapiens
gatgctattcaaggccgaaat

SEQ ID NO: 30449 - RNA, 21 nt, RNAi
ugcuauucaaggccgaaauuu

SEQ ID NO: 30450 - RNA, 21 nt, RNAi
uuacgauaaguuccggcuuua

SEQ ID NO: 30451 - DNA, 21 bp, homo sapiens
gaaatgagagctgtgacatat

SEQ ID NO: 30452 - RNA, 21 nt, RNAi
aaugagagcugugacauauuu

SEQ ID NO: 30453 - RNA, 21 nt, RNAi
uuuuacucucgacacuguaua

SEQ ID NO: 30454 - DNA, 21 bp, homo sapiens
gaacatacttcagaaactaca

SEQ ID NO: 30455 - RNA, 21 nt, RNAi
acauacuucagaaacuacauu

SEQ ID NO: 30456 - RNA, 21 nt, RNAi
uuuguaugaagucuuugaugu

SEQ ID NO: 30457 - DNA, 21 bp, homo sapiens
gaaactacagaaagaacacca

SEQ ID NO: 30458 - RNA, 21 nt, RNAi
aacuacagaaagaacaccauu

SEQ ID NO: 30459 - RNA, 21 nt, RNAi
uuuugaugucuuucuuguggu

SEQ ID NO: 30460 - DNA, 21 bp, homo sapiens
gaaagaacaccaaagcatgat

SEQ ID NO: 30461 - RNA, 21 nt, RNAi
aagaacaccaaagcaugauuu

SEQ ID NO: 30462 - RNA, 21 nt, RNAi
uuuucuugugguuucguacua

SEQ ID NO: 30463 - DNA, 21 bp, homo sapiens
gaacaccaaagcatgatgttc

SEQ ID NO: 30464 - RNA, 21 nt, RNAi
acaccaaagcaugauguucuu

SEQ ID NO: 30465 - RNA, 21 nt, RNAi
uuugugguuucguacuacaag

SEQ ID NO: 30466 - DNA, 21 bp, homo sapiens
gatgttcatcagatttgtgat

SEQ ID NO: 30467 - RNA, 21 nt, RNAi
uguucaucagauuugugauuu

SEQ ID NO: 30468 - RNA, 21 nt, RNAi
uuacaaguagucuaaacacua

SEQ ID NO: 30469 - DNA, 21 bp, homo sapiens
gatttgtgataaagatgctca

SEQ ID NO: 30470 - RNA, 21 nt, RNAi
uuugugauaaagaugcucauu

SEQ ID NO: 30471 - RNA, 21 nt, RNAi
uuaaacacuauuucuacgagu

SEQ ID NO: 30472 - DNA, 21 bp, homo sapiens
gataaagatgctcagcaggac

SEQ ID NO: 30473 - RNA, 21 nt, RNAi
uaaagaugcucagcaggacuu

SEQ ID NO: 30474 - RNA, 21 nt, RNAi
uuauuucuacgagucguccug

SEQ ID NO: 30475 - DNA, 21 bp, homo sapiens
gatgctcagcaggacctcaat

SEQ ID NO: 30476 - RNA, 21 nt, RNAi
ugcucagcaggaccucaauuu

SEQ ID NO: 30477 - RNA, 21 nt, RNAi
uuacgagucguccuggaguua

SEQ ID NO: 30478 - DNA, 21 bp, homo sapiens
gacctcaatctagacattgag

SEQ ID NO: 30479 - RNA, 21 nt, RNAi
ccucaaucuagacauugaguu

SEQ ID NO: 30480 - RNA, 21 nt, RNAi
uuggaguuagaucuguaacuc

SEQ ID NO: 30481 - DNA, 21 bp, homo sapiens
gataccaattatgagcctcca

SEQ ID NO: 30482 - RNA, 21 nt, RNAi
uaccaauuaugagccuccauu

SEQ ID NO: 30483 - RNA, 21 nt, RNAi
uuaugguuaauacucggaggu

SEQ ID NO: 30484 - DNA, 21 bp, homo sapiens
gaatgcatttctgaattgtca

SEQ ID NO: 30485 - RNA, 21 nt, RNAi
augcauuucugaauugucauu

SEQ ID NO: 30486 - RNA, 21 nt, RNAi
uuuacguaaagacuuaacagu

SEQ ID NO: 30487 - DNA, 21 bp, homo sapiens
gaatcaggaagatatccataa

SEQ ID NO: 30488 - RNA, 21 nt, RNAi
aucaggaagauauccauaauu

SEQ ID NO: 30489 - RNA, 21 nt, RNAi
uuuaguccuucuauagguauu

SEQ ID NO: 30490 - DNA, 21 bp, homo sapiens
gatatccataatcttcaactg

SEQ ID NO: 30491 - RNA, 21 nt, RNAi
uauccauaaucuucaacuguu

SEQ ID NO: 30492 - RNA, 21 nt, RNAi
uuauagguauuagaaguugac

SEQ ID NO: 30493 - DNA, 21 bp, homo sapiens
gagacatcaaatgagaatttg

SEQ ID NO: 30494 - RNA, 21 nt, RNAi
gacaucaaaugagaauuuguu

SEQ ID NO: 30495 - RNA, 21 nt, RNAi
uucuguaguuuacucuuaaac

SEQ ID NO: 30496 - DNA, 21 bp, homo sapiens
gacatcaaatgagaatttgag

SEQ ID NO: 30497 - RNA, 21 nt, RNAi
caucaaaugagaauuugaguu

SEQ ID NO: 30498 - RNA, 21 nt, RNAi
uuguaguuuacucuuaaacuc

SEQ ID NO: 30499 - DNA, 21 bp, homo sapiens
gagattacttcatgtgataga

SEQ ID NO: 30500 - RNA, 21 nt, RNAi
gauuacuucaugugauagauu

SEQ ID NO: 30501 - RNA, 21 nt, RNAi
uucuaaugaaguacacuaucu

SEQ ID NO: 30502 - DNA, 21 bp, homo sapiens
gattacttcatgtgatagagg

SEQ ID NO: 30503 - RNA, 21 nt, RNAi
uuacuucaugugauagagguu

SEQ ID NO: 30504 - RNA, 21 nt, RNAi
uuaaugaaguacacuaucucc

SEQ ID NO: 30505 - DNA, 21 bp, homo sapiens
gatagaggaccgtgacagaaa

SEQ ID NO: 30506 - RNA, 21 nt, RNAi
uagaggaccgugacagaaauu

SEQ ID NO: 30507 - RNA, 21 nt, RNAi
uuaucuccuggcacugucuuu

SEQ ID NO: 30508 - DNA, 21 bp, homo sapiens
gaggtacaactaatgaccaaa

SEQ ID NO: 30509 - RNA, 21 nt, RNAi
gguacaacuaaugaccaaauu

SEQ ID NO: 30510 - RNA, 21 nt, RNAi
uuccauguugauuacugguuu

SEQ ID NO: 30511 - DNA, 21 bp, homo sapiens
gaagcatgcatagaattggaa

SEQ ID NO: 30512 - RNA, 21 nt, RNAi
agcaugcauagaauuggaauu

SEQ ID NO: 30513 - RNA, 21 nt, RNAi
uuucguacguaucuuaaccuu

SEQ ID NO: 30514 - DNA, 21 bp, homo sapiens
gatcaccaggagttactccag

SEQ ID NO: 30515 - RNA, 21 nt, RNAi
ucaccaggaguuacuccaguu

SEQ ID NO: 30516 - RNA, 21 nt, RNAi
uuagugguccucaaugagguc

SEQ ID NO: 30517 - DNA, 21 bp, homo sapiens
gagttactccagagagtagaa

SEQ ID NO: 30518 - RNA, 21 nt, RNAi
guuacuccagagaguagaauu

SEQ ID NO: 30519 - RNA, 21 nt, RNAi
uucaaugaggucucucaucuu

SEQ ID NO: 30520 - DNA, 21 bp, homo sapiens
gagagtagaaacttctgaagg

SEQ ID NO: 30521 - RNA, 21 nt, RNAi
gaguagaaacuucugaagguu

SEQ ID NO: 30522 - RNA, 21 nt, RNAi
uucucaucuuugaagacuucc

SEQ ID NO: 30523 - DNA, 21 bp, homo sapiens
gagtagaaacttctgaaggcc

SEQ ID NO: 30524 - RNA, 21 nt, RNAi
guagaaacuucugaaggccuu

SEQ ID NO: 30525 - RNA, 21 nt, RNAi
uucaucuuugaagacuuccgg

SEQ ID NO: 30526 - DNA, 21 bp, homo sapiens
gaaacttctgaaggcctcaat

SEQ ID NO: 30527 - RNA, 21 nt, RNAi
aacuucugaaggccucaauuu

SEQ ID NO: 30528 - RNA, 21 nt, RNAi
uuuugaagacuuccggaguua

SEQ ID NO: 30529 - DNA, 21 bp, homo sapiens
gaaggcctcaattctgattta

SEQ ID NO: 30530 - RNA, 21 nt, RNAi
aggccucaauucugauuuauu

SEQ ID NO: 30531 - RNA, 21 nt, RNAi
uuuccggaguuaagacuaaau

SEQ ID NO: 30532 - DNA, 21 bp, homo sapiens
gatttagaaatgcatgcagat

SEQ ID NO: 30533 - RNA, 21 nt, RNAi
uuuagaaaugcaugcagauuu

SEQ ID NO: 30534 - RNA, 21 nt, RNAi
uuaaaucuuuacguacgucua

SEQ ID NO: 30535 - DNA, 21 bp, homo sapiens
gaaatgcatgcagataaatca

SEQ ID NO: 30536 - RNA, 21 nt, RNAi
aaugcaugcagauaaaucauu

SEQ ID NO: 30537 - RNA, 21 nt, RNAi
uuuuacguacgucuauuuagu

SEQ ID NO: 30538 - DNA, 21 bp, homo sapiens
gataaatcatcacgtgaagat

SEQ ID NO: 30539 - RNA, 21 nt, RNAi
uaaaucaucacgugaagauuu

SEQ ID NO: 30540 - RNA, 21 nt, RNAi
uuauuuaguagugcacuucua

SEQ ID NO: 30541 - DNA, 21 bp, homo sapiens
gaagatattggagataatgtg

SEQ ID NO: 30542 - RNA, 21 nt, RNAi
agauauuggagauaauguguu

SEQ ID NO: 30543 - RNA, 21 nt, RNAi
uuucuauaaccucuauuacac

SEQ ID NO: 30544 - DNA, 21 bp, homo sapiens
gatattggagataatgtggcc

SEQ ID NO: 30545 - RNA, 21 nt, RNAi
uauuggagauaauguggccuu

SEQ ID NO: 30546 - RNA, 21 nt, RNAi
uuauaaccucuauuacaccgg

SEQ ID NO: 30547 - DNA, 21 bp, homo sapiens
gagataatgtggccaaggtga

SEQ ID NO: 30548 - RNA, 21 nt, RNAi
gauaauguggccaaggugauu

SEQ ID NO: 30549 - RNA, 21 nt, RNAi
uucuauuacaccgguuccacu

SEQ ID NO: 30550 - DNA, 21 bp, homo sapiens
gataatgtggccaaggtgaat

SEQ ID NO: 30551 - RNA, 21 nt, RNAi
uaauguggccaaggugaauuu

SEQ ID NO: 30552 - RNA, 21 nt, RNAi
uuauuacaccgguuccacuua

SEQ ID NO: 30553 - DNA, 21 bp, homo sapiens
gaatgacagctggaaggagag

SEQ ID NO: 30554 - RNA, 21 nt, RNAi
augacagcuggaaggagaguu

SEQ ID NO: 30555 - RNA, 21 nt, RNAi
uuuacugucgaccuuccucuc

SEQ ID NO: 30556 - DNA, 21 bp, homo sapiens
gacagctggaaggagagattt

SEQ ID NO: 30557 - RNA, 21 nt, RNAi
cagcuggaaggagagauuuuu

SEQ ID NO: 30558 - RNA, 21 nt, RNAi
uugucgaccuuccucucuaaa

SEQ ID NO: 30559 - DNA, 21 bp, homo sapiens
gaaggagagatttcttgatgt

SEQ ID NO: 30560 - RNA, 21 nt, RNAi
aggagagauuucuugauguuu

SEQ ID NO: 30561 - RNA, 21 nt, RNAi
uuuccucucuaaagaacuaca

SEQ ID NO: 30562 - DNA, 21 bp, homo sapiens
gagagatttcttgatgtggaa

SEQ ID NO: 30563 - RNA, 21 nt, RNAi
gagauuucuugauguggaauu

SEQ ID NO: 30564 - RNA, 21 nt, RNAi
uucucuaaagaacuacaccuu

SEQ ID NO: 30565 - DNA, 21 bp, homo sapiens
gagctgagtaggatcagatcg

SEQ ID NO: 30566 - RNA, 21 nt, RNAi
gcugaguaggaucagaucguu

SEQ ID NO: 30567 - RNA, 21 nt, RNAi
uucgacucauccuagucuagc

SEQ ID NO: 30568 - DNA, 21 bp, homo sapiens
gagtaggatcagatcggagaa

SEQ ID NO: 30569 - RNA, 21 nt, RNAi
guaggaucagaucggagaauu

SEQ ID NO: 30570 - RNA, 21 nt, RNAi
uucauccuagucuagccucuu

SEQ ID NO: 30571 - DNA, 21 bp, homo sapiens
gatcagatcggagaaagctag

SEQ ID NO: 30572 - RNA, 21 nt, RNAi
ucagaucggagaaagcuaguu

SEQ ID NO: 30573 - RNA, 21 nt, RNAi
uuagucuagccucuuucgauc

SEQ ID NO: 30574 - DNA, 21 bp, homo sapiens
gatcggagaaagctagcattg

SEQ ID NO: 30575 - RNA, 21 nt, RNAi
ucggagaaagcuagcauuguu

SEQ ID NO: 30576 - RNA, 21 nt, RNAi
uuagccucuuucgaucguaac

SEQ ID NO: 30577 - DNA, 21 bp, homo sapiens
gagaaagctagcattgagcat

SEQ ID NO: 30578 - RNA, 21 nt, RNAi
gaaagcuagcauugagcauuu

SEQ ID NO: 30579 - RNA, 21 nt, RNAi
uucuuucgaucguaacucgua

SEQ ID NO: 30580 - DNA, 21 bp, homo sapiens
gaaagctagcattgagcatga

SEQ ID NO: 30581 - RNA, 21 nt, RNAi
aagcuagcauugagcaugauu

SEQ ID NO: 30582 - RNA, 21 nt, RNAi
uuuucgaucguaacucguacu

SEQ ID NO: 30583 - DNA, 21 bp, homo sapiens
gaggctgacttagaggtagtt

SEQ ID NO: 30584 - RNA, 21 nt, RNAi
ggcugacuuagagguaguuuu

SEQ ID NO: 30585 - RNA, 21 nt, RNAi
uuccgacugaaucuccaucaa

SEQ ID NO: 30586 - DNA, 21 bp, homo sapiens
gacttagaggtagttcaaaca

SEQ ID NO: 30587 - RNA, 21 nt, RNAi
cuuagagguaguucaaacauu

SEQ ID NO: 30588 - RNA, 21 nt, RNAi
uugaaucuccaucaaguuugu

SEQ ID NO: 30589 - DNA, 21 bp, homo sapiens
gaggtagttcaaacagagaag

SEQ ID NO: 30590 - RNA, 21 nt, RNAi
gguaguucaaacagagaaguu

SEQ ID NO: 30591 - RNA, 21 nt, RNAi
uuccaucaaguuugucucuuc

SEQ ID NO: 30592 - DNA, 21 bp, homo sapiens
gaaggttattgtctgccttga

SEQ ID NO: 30593 - RNA, 21 nt, RNAi
agguuauugucugccuugauu

SEQ ID NO: 30594 - RNA, 21 nt, RNAi
uuuccaauaacagacggaacu

SEQ ID NO: 30595 - DNA, 21 bp, homo sapiens
gaagaagaactctcagtggtc

SEQ ID NO: 30596 - RNA, 21 nt, RNAi
agaagaacucucaguggucuu

SEQ ID NO: 30597 - RNA, 21 nt, RNAi
uuucuucuugagagucaccag

SEQ ID NO: 30598 - DNA, 21 bp, homo sapiens
gaagaactctcagtggtcaca

SEQ ID NO: 30599 - RNA, 21 nt, RNAi
agaacucucaguggucacauu

SEQ ID NO: 30600 - RNA, 21 nt, RNAi
uuucuugagagucaccagugu

SEQ ID NO: 30601 - DNA, 21 bp, homo sapiens
gaactctcagtggtcacaagt

SEQ ID NO: 30602 - RNA, 21 nt, RNAi
acucucaguggucacaaguuu

SEQ ID NO: 30603 - RNA, 21 nt, RNAi
uuugagagucaccaguguuca

SEQ ID NO: 30604 - DNA, 21 bp, homo sapiens
gagagaaaccagcttcgtgga

SEQ ID NO: 30605 - RNA, 21 nt, RNAi
gagaaaccagcuucguggauu

SEQ ID NO: 30606 - RNA, 21 nt, RNAi
uucucuuuggucgaagcaccu

SEQ ID NO: 30607 - DNA, 21 bp, homo sapiens
gagaaaccagcttcgtggaga

SEQ ID NO: 30608 - RNA, 21 nt, RNAi
gaaaccagcuucguggagauu

SEQ ID NO: 30609 - RNA, 21 nt, RNAi
uucuuuggucgaagcaccucu

SEQ ID NO: 30610 - DNA, 21 bp, homo sapiens
gaaaccagcttcgtggagaat

SEQ ID NO: 30611 - RNA, 21 nt, RNAi
aaccagcuucguggagaauuu

SEQ ID NO: 30612 - RNA, 21 nt, RNAi
uuuuggucgaagcaccucuua

SEQ ID NO: 30613 - DNA, 21 bp, homo sapiens
gagcttgagtctcatcaaagt

SEQ ID NO: 30614 - RNA, 21 nt, RNAi
gcuugagucucaucaaaguuu

SEQ ID NO: 30615 - RNA, 21 nt, RNAi
uucgaacucagaguaguuuca

SEQ ID NO: 30616 - DNA, 21 bp, homo sapiens
gagtctcatcaaagtgagtgt

SEQ ID NO: 30617 - RNA, 21 nt, RNAi
gucucaucaaagugaguguuu

SEQ ID NO: 30618 - RNA, 21 nt, RNAi
uucagaguaguuucacucaca

SEQ ID NO: 30619 - DNA, 21 bp, homo sapiens
gagtgtctccattgcattcag

SEQ ID NO: 30620 - RNA, 21 nt, RNAi
gugucuccauugcauucaguu

SEQ ID NO: 30621 - RNA, 21 nt, RNAi
uucacagagguaacguaaguc

SEQ ID NO: 30622 - DNA, 21 bp, homo sapiens
gacggaactccttcagacttt

SEQ ID NO: 30623 - RNA, 21 nt, RNAi
cggaacuccuucagacuuuuu

SEQ ID NO: 30624 - RNA, 21 nt, RNAi
uugccuugaggaagucugaaa

SEQ ID NO: 30625 - DNA, 21 bp, homo sapiens
gaactccttcagactttgtcc

SEQ ID NO: 30626 - RNA, 21 nt, RNAi
acuccuucagacuuuguccuu

SEQ ID NO: 30627 - RNA, 21 nt, RNAi
uuugaggaagucugaaacagg

SEQ ID NO: 30628 - DNA, 21 bp, homo sapiens
gactttgtcctctgatgtgag

SEQ ID NO: 30629 - RNA, 21 nt, RNAi
cuuuguccucugaugugaguu

SEQ ID NO: 30630 - RNA, 21 nt, RNAi
uugaaacaggagacuacacuc

SEQ ID NO: 30631 - DNA, 21 bp, homo sapiens
gactcacaggcactgtctttg

SEQ ID NO: 30632 - RNA, 21 nt, RNAi
cucacaggcacugucuuuguu

SEQ ID NO: 30633 - RNA, 21 nt, RNAi
uugaguguccgugacagaaac

SEQ ID NO: 30634 - DNA, 21 bp, homo sapiens
gagaaagaattgcttgtcaag

SEQ ID NO: 30635 - RNA, 21 nt, RNAi
gaaagaauugcuugucaaguu

SEQ ID NO: 30636 - RNA, 21 nt, RNAi
uucuuucuuaacgaacaguuc

SEQ ID NO: 30637 - DNA, 21 bp, homo sapiens
gaaagaattgcttgtcaagga

SEQ ID NO: 30638 - RNA, 21 nt, RNAi
aagaauugcuugucaaggauu

SEQ ID NO: 30639 - RNA, 21 nt, RNAi
uuuucuuaacgaacaguuccu

SEQ ID NO: 30640 - DNA, 21 bp, homo sapiens
gaattgcttgtcaaggaatct

SEQ ID NO: 30641 - RNA, 21 nt, RNAi
auugcuugucaaggaaucuuu

SEQ ID NO: 30642 - RNA, 21 nt, RNAi
uuuaacgaacaguuccuuaga

SEQ ID NO: 30643 - DNA, 21 bp, homo sapiens
gaatctgaaagcctgcaggcc

SEQ ID NO: 30644 - RNA, 21 nt, RNAi
aucugaaagccugcaggccuu

SEQ ID NO: 30645 - RNA, 21 nt, RNAi
uuuagacuuucggacguccgg

SEQ ID NO: 30646 - DNA, 21 bp, homo sapiens
gaaagcctgcaggccagactg

SEQ ID NO: 30647 - RNA, 21 nt, RNAi
aagccugcaggccagacuguu

SEQ ID NO: 30648 - RNA, 21 nt, RNAi
uuuucggacguccggucugac

SEQ ID NO: 30649 - DNA, 21 bp, homo sapiens
gactgagtgaatcagattatg

SEQ ID NO: 30650 - RNA, 21 nt, RNAi
cugagugaaucagauuauguu

SEQ ID NO: 30651 - RNA, 21 nt, RNAi
uugacucacuuagucuaauac

SEQ ID NO: 30652 - DNA, 21 bp, homo sapiens
gaatgtctccaaggccttgga

SEQ ID NO: 30653 - RNA, 21 nt, RNAi
augucuccaaggccuuggauu

SEQ ID NO: 30654 - RNA, 21 nt, RNAi
uuuacagagguuccggaaccu

SEQ ID NO: 30655 - DNA, 21 bp, homo sapiens
gaggccgcactggtggagaaa

SEQ ID NO: 30656 - RNA, 21 nt, RNAi
ggccgcacugguggagaaauu

SEQ ID NO: 30657 - RNA, 21 nt, RNAi
uuccggcgugaccaccucuuu

SEQ ID NO: 30658 - DNA, 21 bp, homo sapiens
gagaaaggtgagttcgcattg

SEQ ID NO: 30659 - RNA, 21 nt, RNAi
gaaaggugaguucgcauuguu

SEQ ID NO: 30660 - RNA, 21 nt, RNAi
uucuuuccacucaagcguaac

SEQ ID NO: 30661 - DNA, 21 bp, homo sapiens
gaaaggtgagttcgcattgag

SEQ ID NO: 30662 - RNA, 21 nt, RNAi
aaggugaguucgcauugaguu

SEQ ID NO: 30663 - RNA, 21 nt, RNAi
uuuuccacucaagcguaacuc

SEQ ID NO: 30664 - DNA, 21 bp, homo sapiens
gagttcgcattgaggctgagc

SEQ ID NO: 30665 - RNA, 21 nt, RNAi
guucgcauugaggcugagcuu

SEQ ID NO: 30666 - RNA, 21 nt, RNAi
uucaagcguaacuccgacucg

SEQ ID NO: 30667 - DNA, 21 bp, homo sapiens
gaggctgagctcaacacagga

SEQ ID NO: 30668 - RNA, 21 nt, RNAi
ggcugagcucaacacaggauu

SEQ ID NO: 30669 - RNA, 21 nt, RNAi
uuccgacucgaguuguguccu

SEQ ID NO: 30670 - DNA, 21 bp, homo sapiens
gagctcaacacaggaggaagt

SEQ ID NO: 30671 - RNA, 21 nt, RNAi
gcucaacacaggaggaaguuu

SEQ ID NO: 30672 - RNA, 21 nt, RNAi
uucgaguuguguccuccuuca

SEQ ID NO: 30673 - DNA, 21 bp, homo sapiens
gaggaagtgcatcagctgaga

SEQ ID NO: 30674 - RNA, 21 nt, RNAi
ggaagugcaucagcugagauu

SEQ ID NO: 30675 - RNA, 21 nt, RNAi
uuccuucacguagucgacucu

SEQ ID NO: 30676 - DNA, 21 bp, homo sapiens
gaagtgcatcagctgagaaga

SEQ ID NO: 30677 - RNA, 21 nt, RNAi
agugcaucagcugagaagauu

SEQ ID NO: 30678 - RNA, 21 nt, RNAi
uuucacguagucgacucuucu

SEQ ID NO: 30679 - DNA, 21 bp, homo sapiens
gagaagaggcatcgagaaact

SEQ ID NO: 30680 - RNA, 21 nt, RNAi
gaagaggcaucgagaaacuuu

SEQ ID NO: 30681 - RNA, 21 nt, RNAi
uucuucuccguagcucuuuga

SEQ ID NO: 30682 - DNA, 21 bp, homo sapiens
gaagaggcatcgagaaactga

SEQ ID NO: 30683 - RNA, 21 nt, RNAi
agaggcaucgagaaacugauu

SEQ ID NO: 30684 - RNA, 21 nt, RNAi
uuucuccguagcucuuugacu

SEQ ID NO: 30685 - DNA, 21 bp, homo sapiens
gaggcatcgagaaactgagag

SEQ ID NO: 30686 - RNA, 21 nt, RNAi
ggcaucgagaaacugagaguu

SEQ ID NO: 30687 - RNA, 21 nt, RNAi
uuccguagcucuuugacucuc

SEQ ID NO: 30688 - DNA, 21 bp, homo sapiens
gagaaactgagagttcgcatt

SEQ ID NO: 30689 - RNA, 21 nt, RNAi
gaaacugagaguucgcauuuu

SEQ ID NO: 30690 - RNA, 21 nt, RNAi
uucuuugacucucaagcguaa

SEQ ID NO: 30691 - DNA, 21 bp, homo sapiens
gaaactgagagttcgcattga

SEQ ID NO: 30692 - RNA, 21 nt, RNAi
aacugagaguucgcauugauu

SEQ ID NO: 30693 - RNA, 21 nt, RNAi
uuuugacucucaagcguaacu

SEQ ID NO: 30694 - DNA, 21 bp, homo sapiens
gagagttcgcattgaggccga

SEQ ID NO: 30695 - RNA, 21 nt, RNAi
gaguucgcauugaggccgauu

SEQ ID NO: 30696 - RNA, 21 nt, RNAi
uucucaagcguaacuccggcu

SEQ ID NO: 30697 - DNA, 21 bp, homo sapiens
gagttcgcattgaggccgatg

SEQ ID NO: 30698 - RNA, 21 nt, RNAi
guucgcauugaggccgauguu

SEQ ID NO: 30699 - RNA, 21 nt, RNAi
uucaagcguaacuccggcuac

SEQ ID NO: 30700 - DNA, 21 bp, homo sapiens
gaagcagctgcacatcgcaga

SEQ ID NO: 30701 - RNA, 21 nt, RNAi
agcagcugcacaucgcagauu

SEQ ID NO: 30702 - RNA, 21 nt, RNAi
uuucgucgacguguagcgucu

SEQ ID NO: 30703 - DNA, 21 bp, homo sapiens
gagaaactgaaagaacgcgag

SEQ ID NO: 30704 - RNA, 21 nt, RNAi
gaaacugaaagaacgcgaguu

SEQ ID NO: 30705 - RNA, 21 nt, RNAi
uucuuugacuuucuugcgcuc

SEQ ID NO: 30706 - DNA, 21 bp, homo sapiens
gaaactgaaagaacgcgagcg

SEQ ID NO: 30707 - RNA, 21 nt, RNAi
aacugaaagaacgcgagcguu

SEQ ID NO: 30708 - RNA, 21 nt, RNAi
uuuugacuuucuugcgcucgc

SEQ ID NO: 30709 - DNA, 21 bp, homo sapiens
gagaatgattcacttaaggat

SEQ ID NO: 30710 - RNA, 21 nt, RNAi
gaaugauucacuuaaggauuu

SEQ ID NO: 30711 - RNA, 21 nt, RNAi
uucuuacuaagugaauuccua

SEQ ID NO: 30712 - DNA, 21 bp, homo sapiens
gataaagttgagaaccttgaa

SEQ ID NO: 30713 - RNA, 21 nt, RNAi
uaaaguugagaaccuugaauu

SEQ ID NO: 30714 - RNA, 21 nt, RNAi
uuauuucaacucuuggaacuu

SEQ ID NO: 30715 - DNA, 21 bp, homo sapiens
gaattgcagatgtcagaagaa

SEQ ID NO: 30716 - RNA, 21 nt, RNAi
auugcagaugucagaagaauu

SEQ ID NO: 30717 - RNA, 21 nt, RNAi
uuuaacgucuacagucuucuu

SEQ ID NO: 30718 - DNA, 21 bp, homo sapiens
gagctagtgattcttgatgcc

SEQ ID NO: 30719 - RNA, 21 nt, RNAi
gcuagugauucuugaugccuu

SEQ ID NO: 30720 - RNA, 21 nt, RNAi
uucgaucacuaagaacuacgg

SEQ ID NO: 30721 - DNA, 21 bp, homo sapiens
gattcttgatgccgagaattc

SEQ ID NO: 30722 - RNA, 21 nt, RNAi
uucuugaugccgagaauucuu

SEQ ID NO: 30723 - RNA, 21 nt, RNAi
uuaagaacuacggcucuuaag

SEQ ID NO: 30724 - DNA, 21 bp, homo sapiens
gatgccgagaattccaaagca

SEQ ID NO: 30725 - RNA, 21 nt, RNAi
ugccgagaauuccaaagcauu

SEQ ID NO: 30726 - RNA, 21 nt, RNAi
uuacggcucuuaagguuucgu

SEQ ID NO: 30727 - DNA, 21 bp, homo sapiens
gagaattccaaagcagaagta

SEQ ID NO: 30728 - RNA, 21 nt, RNAi
gaauuccaaagcagaaguauu

SEQ ID NO: 30729 - RNA, 21 nt, RNAi
uucuuaagguuucgucuucau

SEQ ID NO: 30730 - DNA, 21 bp, homo sapiens
gaattccaaagcagaagtaga

SEQ ID NO: 30731 - RNA, 21 nt, RNAi
auuccaaagcagaaguagauu

SEQ ID NO: 30732 - RNA, 21 nt, RNAi
uuuaagguuucgucuucaucu

SEQ ID NO: 30733 - DNA, 21 bp, homo sapiens
gaagagatggccagaagcctg

SEQ ID NO: 30734 - RNA, 21 nt, RNAi
agagauggccagaagccuguu

SEQ ID NO: 30735 - RNA, 21 nt, RNAi
uuucucuaccggucuucggac

SEQ ID NO: 30736 - DNA, 21 bp, homo sapiens
gagatggccagaagcctgaaa

SEQ ID NO: 30737 - RNA, 21 nt, RNAi
gauggccagaagccugaaauu

SEQ ID NO: 30738 - RNA, 21 nt, RNAi
uucuaccggucuucggacuuu

SEQ ID NO: 30739 - DNA, 21 bp, homo sapiens
gatggccagaagcctgaaagt

SEQ ID NO: 30740 - RNA, 21 nt, RNAi
uggccagaagccugaaaguuu

SEQ ID NO: 30741 - RNA, 21 nt, RNAi
uuaccggucuucggacuuuca

SEQ ID NO: 30742 - DNA, 21 bp, homo sapiens
gaattagaccttgtcacgtta

SEQ ID NO: 30743 - RNA, 21 nt, RNAi
auuagaccuugucacguuauu

SEQ ID NO: 30744 - RNA, 21 nt, RNAi
uuuaaucuggaacagugcaau

SEQ ID NO: 30745 - DNA, 21 bp, homo sapiens
gaccttgtcacgttaaggtct

SEQ ID NO: 30746 - RNA, 21 nt, RNAi
ccuugucacguuaaggucuuu

SEQ ID NO: 30747 - RNA, 21 nt, RNAi
uuggaacagugcaauuccaga

SEQ ID NO: 30748 - DNA, 21 bp, homo sapiens
gaactagacaagttactctct

SEQ ID NO: 30749 - RNA, 21 nt, RNAi
acuagacaaguuacucucuuu

SEQ ID NO: 30750 - RNA, 21 nt, RNAi
uuugaucuguucaaugagaga

SEQ ID NO: 30751 - DNA, 21 bp, homo sapiens
gacaagttactctcttcattt

SEQ ID NO: 30752 - RNA, 21 nt, RNAi
caaguuacucucuucauuuuu

SEQ ID NO: 30753 - RNA, 21 nt, RNAi
uuguucaaugagagaaguaaa

SEQ ID NO: 30754 - DNA, 21 bp, homo sapiens
gagcaagcagagatacagatc

SEQ ID NO: 30755 - RNA, 21 nt, RNAi
gcaagcagagauacagaucuu

SEQ ID NO: 30756 - RNA, 21 nt, RNAi
uucguucgucucuaugucuag

SEQ ID NO: 30757 - DNA, 21 bp, homo sapiens
gagatacagatcaaagaagaa

SEQ ID NO: 30758 - RNA, 21 nt, RNAi
gauacagaucaaagaagaauu

SEQ ID NO: 30759 - RNA, 21 nt, RNAi
uucuaugucuaguuucuucuu

SEQ ID NO: 30760 - DNA, 21 bp, homo sapiens
gatacagatcaaagaagaatc

SEQ ID NO: 30761 - RNA, 21 nt, RNAi
uacagaucaaagaagaaucuu

SEQ ID NO: 30762 - RNA, 21 nt, RNAi
uuaugucuaguuucuucuuag

SEQ ID NO: 30763 - DNA, 21 bp, homo sapiens
gagatgcttcagaatcagtta

SEQ ID NO: 30764 - RNA, 21 nt, RNAi
gaugcuucagaaucaguuauu

SEQ ID NO: 30765 - RNA, 21 nt, RNAi
uucuacgaagucuuagucaau

SEQ ID NO: 30766 - DNA, 21 bp, homo sapiens
gatgcttcagaatcagttaaa

SEQ ID NO: 30767 - RNA, 21 nt, RNAi
ugcuucagaaucaguuaaauu

SEQ ID NO: 30768 - RNA, 21 nt, RNAi
uuacgaagucuuagucaauuu

SEQ ID NO: 30769 - DNA, 21 bp, homo sapiens
gaatcagttaaaggagctaaa

SEQ ID NO: 30770 - RNA, 21 nt, RNAi
aucaguuaaaggagcuaaauu

SEQ ID NO: 30771 - RNA, 21 nt, RNAi
uuuagucaauuuccucgauuu

SEQ ID NO: 30772 - DNA, 21 bp, homo sapiens
gagctaaatgaggcagtagca

SEQ ID NO: 30773 - RNA, 21 nt, RNAi
gcuaaaugaggcaguagcauu

SEQ ID NO: 30774 - RNA, 21 nt, RNAi
uucgauuuacuccgucaucgu

SEQ ID NO: 30775 - DNA, 21 bp, homo sapiens
gaggcagtagcagccttgtgt

SEQ ID NO: 30776 - RNA, 21 nt, RNAi
ggcaguagcagccuuguguuu

SEQ ID NO: 30777 - RNA, 21 nt, RNAi
uuccgucaucgucggaacaca

SEQ ID NO: 30778 - DNA, 21 bp, homo sapiens
gaccaagaaattatgaaggcc

SEQ ID NO: 30779 - RNA, 21 nt, RNAi
ccaagaaauuaugaaggccuu

SEQ ID NO: 30780 - RNA, 21 nt, RNAi
uugguucuuuaauacuuccgg

SEQ ID NO: 30781 - DNA, 21 bp, homo sapiens
gaaattatgaaggccacagaa

SEQ ID NO: 30782 - RNA, 21 nt, RNAi
aauuaugaaggccacagaauu

SEQ ID NO: 30783 - RNA, 21 nt, RNAi
uuuuaauacuuccggugucuu

SEQ ID NO: 30784 - DNA, 21 bp, homo sapiens
gaaggccacagaacagagtct

SEQ ID NO: 30785 - RNA, 21 nt, RNAi
aggccacagaacagagucuuu

SEQ ID NO: 30786 - RNA, 21 nt, RNAi
uuuccggugucuugucucaga

SEQ ID NO: 30787 - DNA, 21 bp, homo sapiens
gaggaagagcatcagctgaga

SEQ ID NO: 30788 - RNA, 21 nt, RNAi
ggaagagcaucagcugagauu

SEQ ID NO: 30789 - RNA, 21 nt, RNAi
uuccuucucguagucgacucu

SEQ ID NO: 30790 - DNA, 21 bp, homo sapiens
gaagagcatcagctgagaaat

SEQ ID NO: 30791 - RNA, 21 nt, RNAi
agagcaucagcugagaaauuu

SEQ ID NO: 30792 - RNA, 21 nt, RNAi
uuucucguagucgacucuuua

SEQ ID NO: 30793 - DNA, 21 bp, homo sapiens
gagcatcagctgagaaatagc

SEQ ID NO: 30794 - RNA, 21 nt, RNAi
gcaucagcugagaaauagcuu

SEQ ID NO: 30795 - RNA, 21 nt, RNAi
uucguagucgacucuuuaucg

SEQ ID NO: 30796 - DNA, 21 bp, homo sapiens
gaagcagctctgtgtcttaca

SEQ ID NO: 30797 - RNA, 21 nt, RNAi
agcagcucugugucuuacauu

SEQ ID NO: 30798 - RNA, 21 nt, RNAi
uuucgucgagacacagaaugu

SEQ ID NO: 30799 - DNA, 21 bp, homo sapiens
gaaggaaagtgagcatcatgc

SEQ ID NO: 30800 - RNA, 21 nt, RNAi
aggaaagugagcaucaugcuu

SEQ ID NO: 30801 - RNA, 21 nt, RNAi
uuuccuuucacucguaguacg

SEQ ID NO: 30802 - DNA, 21 bp, homo sapiens
gaaagtgagcatcatgcagat

SEQ ID NO: 30803 - RNA, 21 nt, RNAi
aagugagcaucaugcagauuu

SEQ ID NO: 30804 - RNA, 21 nt, RNAi
uuuucacucguaguacgucua

SEQ ID NO: 30805 - DNA, 21 bp, homo sapiens
gagcatcatgcagatttactt

SEQ ID NO: 30806 - RNA, 21 nt, RNAi
gcaucaugcagauuuacuuuu

SEQ ID NO: 30807 - RNA, 21 nt, RNAi
uucguaguacgucuaaaugaa

SEQ ID NO: 30808 - DNA, 21 bp, homo sapiens
gagtggagaaccttgaaagag

SEQ ID NO: 30809 - RNA, 21 nt, RNAi
guggagaaccuugaaagaguu

SEQ ID NO: 30810 - RNA, 21 nt, RNAi
uucaccucuuggaacuuucuc

SEQ ID NO: 30811 - DNA, 21 bp, homo sapiens
gagaaccttgaaagagagcta

SEQ ID NO: 30812 - RNA, 21 nt, RNAi
gaaccuugaaagagagcuauu

SEQ ID NO: 30813 - RNA, 21 nt, RNAi
uucuuggaacuuucucucgau

SEQ ID NO: 30814 - DNA, 21 bp, homo sapiens
gaaccttgaaagagagctaga

SEQ ID NO: 30815 - RNA, 21 nt, RNAi
accuugaaagagagcuagauu

SEQ ID NO: 30816 - RNA, 21 nt, RNAi
uuuggaacuuucucucgaucu

SEQ ID NO: 30817 - DNA, 21 bp, homo sapiens
gaaagagagctagagatagcc

SEQ ID NO: 30818 - RNA, 21 nt, RNAi
aagagagcuagagauagccuu

SEQ ID NO: 30819 - RNA, 21 nt, RNAi
uuuucucucgaucucuaucgg

SEQ ID NO: 30820 - DNA, 21 bp, homo sapiens
gagagctagagatagccagga

SEQ ID NO: 30821 - RNA, 21 nt, RNAi
gagcuagagauagccaggauu

SEQ ID NO: 30822 - RNA, 21 nt, RNAi
uucucgaucucuaucgguccu

SEQ ID NO: 30823 - DNA, 21 bp, homo sapiens
gagctagagatagccaggaca

SEQ ID NO: 30824 - RNA, 21 nt, RNAi
gcuagagauagccaggacauu

SEQ ID NO: 30825 - RNA, 21 nt, RNAi
uucgaucucuaucgguccugu

SEQ ID NO: 30826 - DNA, 21 bp, homo sapiens
gagatagccaggacaaaccaa

SEQ ID NO: 30827 - RNA, 21 nt, RNAi
gauagccaggacaaaccaauu

SEQ ID NO: 30828 - RNA, 21 nt, RNAi
uucuaucgguccuguuugguu

SEQ ID NO: 30829 - DNA, 21 bp, homo sapiens
gatagccaggacaaaccaaga

SEQ ID NO: 30830 - RNA, 21 nt, RNAi
uagccaggacaaaccaagauu

SEQ ID NO: 30831 - RNA, 21 nt, RNAi
uuaucgguccuguuugguucu

SEQ ID NO: 30832 - DNA, 21 bp, homo sapiens
gacaaaccaagagcatgcagc

SEQ ID NO: 30833 - RNA, 21 nt, RNAi
caaaccaagagcaugcagcuu

SEQ ID NO: 30834 - RNA, 21 nt, RNAi
uuguuugguucucguacgucg

SEQ ID NO: 30835 - DNA, 21 bp, homo sapiens
gagcatgcagctcttgaggca

SEQ ID NO: 30836 - RNA, 21 nt, RNAi
gcaugcagcucuugaggcauu

SEQ ID NO: 30837 - RNA, 21 nt, RNAi
uucguacgucgagaacuccgu

SEQ ID NO: 30838 - DNA, 21 bp, homo sapiens
gaggcagagaattccaaagga

SEQ ID NO: 30839 - RNA, 21 nt, RNAi
ggcagagaauuccaaaggauu

SEQ ID NO: 30840 - RNA, 21 nt, RNAi
uuccgucucuuaagguuuccu

SEQ ID NO: 30841 - DNA, 21 bp, homo sapiens
gagaattccaaaggagaggta

SEQ ID NO: 30842 - RNA, 21 nt, RNAi
gaauuccaaaggagagguauu

SEQ ID NO: 30843 - RNA, 21 nt, RNAi
uucuuaagguuuccucuccau

SEQ ID NO: 30844 - DNA, 21 bp, homo sapiens
gaattccaaaggagaggtaga

SEQ ID NO: 30845 - RNA, 21 nt, RNAi
auuccaaaggagagguagauu

SEQ ID NO: 30846 - RNA, 21 nt, RNAi
uuuaagguuuccucuccaucu

SEQ ID NO: 30847 - DNA, 21 bp, homo sapiens
gagaggtctggaattagatgt

SEQ ID NO: 30848 - RNA, 21 nt, RNAi
gaggucuggaauuagauguuu

SEQ ID NO: 30849 - RNA, 21 nt, RNAi
uucuccagaccuuaaucuaca

SEQ ID NO: 30850 - DNA, 21 bp, homo sapiens
gaggtctggaattagatgttg

SEQ ID NO: 30851 - RNA, 21 nt, RNAi
ggucuggaauuagauguuguu

SEQ ID NO: 30852 - RNA, 21 nt, RNAi
uuccagaccuuaaucuacaac

SEQ ID NO: 30853 - DNA, 21 bp, homo sapiens
gatgttgttactataaggtca

SEQ ID NO: 30854 - RNA, 21 nt, RNAi
uguuguuacuauaaggucauu

SEQ ID NO: 30855 - RNA, 21 nt, RNAi
uuacaacaaugauauuccagu

SEQ ID NO: 30856 - DNA, 21 bp, homo sapiens
gagcaagagcgaatatctgaa

SEQ ID NO: 30857 - RNA, 21 nt, RNAi
gcaagagcgaauaucugaauu

SEQ ID NO: 30858 - RNA, 21 nt, RNAi
uucguucucgcuuauagacuu

SEQ ID NO: 30859 - DNA, 21 bp, homo sapiens
gagcgaatatctgaattagaa

SEQ ID NO: 30860 - RNA, 21 nt, RNAi
gcgaauaucugaauuagaauu

SEQ ID NO: 30861 - RNA, 21 nt, RNAi
uucgcuuauagacuuaaucuu

SEQ ID NO: 30862 - DNA, 21 bp, homo sapiens
gagcaagagaaagtacagatg

SEQ ID NO: 30863 - RNA, 21 nt, RNAi
gcaagagaaaguacagauguu

SEQ ID NO: 30864 - RNA, 21 nt, RNAi
uucguucucuuucaugucuac

SEQ ID NO: 30865 - DNA, 21 bp, homo sapiens
gagaaagtacagatgaaagaa

SEQ ID NO: 30866 - RNA, 21 nt, RNAi
gaaaguacagaugaaagaauu

SEQ ID NO: 30867 - RNA, 21 nt, RNAi
uucuuucaugucuacuuucuu

SEQ ID NO: 30868 - DNA, 21 bp, homo sapiens
gagatgcttcaaacacaatta

SEQ ID NO: 30869 - RNA, 21 nt, RNAi
gaugcuucaaacacaauuauu

SEQ ID NO: 30870 - RNA, 21 nt, RNAi
uucuacgaaguuuguguuaau

SEQ ID NO: 30871 - DNA, 21 bp, homo sapiens
gagctcaatgagagagtggca

SEQ ID NO: 30872 - RNA, 21 nt, RNAi
gcucaaugagagaguggcauu

SEQ ID NO: 30873 - RNA, 21 nt, RNAi
uucgaguuacucucucaccgu

SEQ ID NO: 30874 - DNA, 21 bp, homo sapiens
gaccaagaagcctgtaaggcc

SEQ ID NO: 30875 - RNA, 21 nt, RNAi
ccaagaagccuguaaggccuu

SEQ ID NO: 30876 - RNA, 21 nt, RNAi
uugguucuucggacauuccgg

SEQ ID NO: 30877 - DNA, 21 bp, homo sapiens
gaagcctgtaaggccaaagag

SEQ ID NO: 30878 - RNA, 21 nt, RNAi
agccuguaaggccaaagaguu

SEQ ID NO: 30879 - RNA, 21 nt, RNAi
uuucggacauuccgguuucuc

SEQ ID NO: 30880 - DNA, 21 bp, homo sapiens
gagcagaatcttagtagtcaa

SEQ ID NO: 30881 - RNA, 21 nt, RNAi
gcagaaucuuaguagucaauu

SEQ ID NO: 30882 - RNA, 21 nt, RNAi
uucgucuuagaaucaucaguu

SEQ ID NO: 30883 - DNA, 21 bp, homo sapiens
gaatcttagtagtcaagtaga

SEQ ID NO: 30884 - RNA, 21 nt, RNAi
aucuuaguagucaaguagauu

SEQ ID NO: 30885 - RNA, 21 nt, RNAi
uuuagaaucaucaguucaucu

SEQ ID NO: 30886 - DNA, 21 bp, homo sapiens
gagtgtcttgaacttgagaag

SEQ ID NO: 30887 - RNA, 21 nt, RNAi
gugucuugaacuugagaaguu

SEQ ID NO: 30888 - RNA, 21 nt, RNAi
uucacagaacuugaacucuuc

SEQ ID NO: 30889 - DNA, 21 bp, homo sapiens
gaacttgagaaggctcagttg

SEQ ID NO: 30890 - RNA, 21 nt, RNAi
acuugagaaggcucaguuguu

SEQ ID NO: 30891 - RNA, 21 nt, RNAi
uuugaacucuuccgagucaac

SEQ ID NO: 30892 - DNA, 21 bp, homo sapiens
gagaaggctcagttgctacaa

SEQ ID NO: 30893 - RNA, 21 nt, RNAi
gaaggcucaguugcuacaauu

SEQ ID NO: 30894 - RNA, 21 nt, RNAi
uucuuccgagucaacgauguu

SEQ ID NO: 30895 - DNA, 21 bp, homo sapiens
gaaggctcagttgctacaagg

SEQ ID NO: 30896 - RNA, 21 nt, RNAi
aggcucaguugcuacaagguu

SEQ ID NO: 30897 - RNA, 21 nt, RNAi
uuuccgagucaacgauguucc

SEQ ID NO: 30898 - DNA, 21 bp, homo sapiens
gaatggcctcattcaagaagt

SEQ ID NO: 30899 - RNA, 21 nt, RNAi
auggccucauucaagaaguuu

SEQ ID NO: 30900 - RNA, 21 nt, RNAi
uuuaccggaguaaguucuuca

SEQ ID NO: 30901 - DNA, 21 bp, homo sapiens
gaagtagaagatggcaagcag

SEQ ID NO: 30902 - RNA, 21 nt, RNAi
aguagaagauggcaagcaguu

SEQ ID NO: 30903 - RNA, 21 nt, RNAi
uuucaucuucuaccguucguc

SEQ ID NO: 30904 - DNA, 21 bp, homo sapiens
gaagatggcaagcagaaactg

SEQ ID NO: 30905 - RNA, 21 nt, RNAi
agauggcaagcagaaacuguu

SEQ ID NO: 30906 - RNA, 21 nt, RNAi
uuucuaccguucgucuuugac

SEQ ID NO: 30907 - DNA, 21 bp, homo sapiens
gatggcaagcagaaactggag

SEQ ID NO: 30908 - RNA, 21 nt, RNAi
uggcaagcagaaacuggaguu

SEQ ID NO: 30909 - RNA, 21 nt, RNAi
uuaccguucgucuuugaccuc

SEQ ID NO: 30910 - DNA, 21 bp, homo sapiens
gaaactggagaagaaggatga

SEQ ID NO: 30911 - RNA, 21 nt, RNAi
aacuggagaagaaggaugauu

SEQ ID NO: 30912 - RNA, 21 nt, RNAi
uuuugaccucuucuuccuacu

SEQ ID NO: 30913 - DNA, 21 bp, homo sapiens
gagaagaaggatgaagaaatc

SEQ ID NO: 30914 - RNA, 21 nt, RNAi
gaagaaggaugaagaaaucuu

SEQ ID NO: 30915 - RNA, 21 nt, RNAi
uucuucuuccuacuucuuuag

SEQ ID NO: 30916 - DNA, 21 bp, homo sapiens
gaagaaggatgaagaaatcag

SEQ ID NO: 30917 - RNA, 21 nt, RNAi
agaaggaugaagaaaucaguu

SEQ ID NO: 30918 - RNA, 21 nt, RNAi
uuucuuccuacuucuuuaguc

SEQ ID NO: 30919 - DNA, 21 bp, homo sapiens
gaaggatgaagaaatcagtag

SEQ ID NO: 30920 - RNA, 21 nt, RNAi
aggaugaagaaaucaguaguu

SEQ ID NO: 30921 - RNA, 21 nt, RNAi
uuuccuacuucuuuagucauc

SEQ ID NO: 30922 - DNA, 21 bp, homo sapiens
gatgaagaaatcagtagactg

SEQ ID NO: 30923 - RNA, 21 nt, RNAi
ugaagaaaucaguagacuguu

SEQ ID NO: 30924 - RNA, 21 nt, RNAi
uuacuucuuuagucaucugac

SEQ ID NO: 30925 - DNA, 21 bp, homo sapiens
gaagaaatcagtagactgaaa

SEQ ID NO: 30926 - RNA, 21 nt, RNAi
agaaaucaguagacugaaauu

SEQ ID NO: 30927 - RNA, 21 nt, RNAi
uuucuuuagucaucugacuuu

SEQ ID NO: 30928 - DNA, 21 bp, homo sapiens
gaccaagagcagcttgtctct

SEQ ID NO: 30929 - RNA, 21 nt, RNAi
ccaagagcagcuugucucuuu

SEQ ID NO: 30930 - RNA, 21 nt, RNAi
uugguucucgucgaacagaga

SEQ ID NO: 30931 - DNA, 21 bp, homo sapiens
gagcagcttgtctctaaactg

SEQ ID NO: 30932 - RNA, 21 nt, RNAi
gcagcuugucucuaaacuguu

SEQ ID NO: 30933 - RNA, 21 nt, RNAi
uucgucgaacagagauuugac

SEQ ID NO: 30934 - DNA, 21 bp, homo sapiens
gaaggagagcaccaactttgg

SEQ ID NO: 30935 - RNA, 21 nt, RNAi
aggagagcaccaacuuugguu

SEQ ID NO: 30936 - RNA, 21 nt, RNAi
uuuccucucgugguugaaacc

SEQ ID NO: 30937 - DNA, 21 bp, homo sapiens
gagagcaccaactttggaagg

SEQ ID NO: 30938 - RNA, 21 nt, RNAi
gagcaccaacuuuggaagguu

SEQ ID NO: 30939 - RNA, 21 nt, RNAi
uucucgugguugaaaccuucc

SEQ ID NO: 30940 - DNA, 21 bp, homo sapiens
gagcaccaactttggaaggag

SEQ ID NO: 30941 - RNA, 21 nt, RNAi
gcaccaacuuuggaaggaguu

SEQ ID NO: 30942 - RNA, 21 nt, RNAi
uucgugguugaaaccuuccuc

SEQ ID NO: 30943 - DNA, 21 bp, homo sapiens
gaactgagaaatctgacagtg

SEQ ID NO: 30944 - RNA, 21 nt, RNAi
acugagaaaucugacaguguu

SEQ ID NO: 30945 - RNA, 21 nt, RNAi
uuugacucuuuagacugucac

SEQ ID NO: 30946 - DNA, 21 bp, homo sapiens
gagaaatctgacagtggaatt

SEQ ID NO: 30947 - RNA, 21 nt, RNAi
gaaaucugacaguggaauuuu

SEQ ID NO: 30948 - RNA, 21 nt, RNAi
uucuuuagacugucaccuuaa

SEQ ID NO: 30949 - DNA, 21 bp, homo sapiens
gaaatctgacagtggaattgg

SEQ ID NO: 30950 - RNA, 21 nt, RNAi
aaucugacaguggaauugguu

SEQ ID NO: 30951 - RNA, 21 nt, RNAi
uuuuagacugucaccuuaacc

SEQ ID NO: 30952 - DNA, 21 bp, homo sapiens
gacagtggaattggagcagaa

SEQ ID NO: 30953 - RNA, 21 nt, RNAi
caguggaauuggagcagaauu

SEQ ID NO: 30954 - RNA, 21 nt, RNAi
uugucaccuuaaccucgucuu

SEQ ID NO: 30955 - DNA, 21 bp, homo sapiens
gaattggagcagaagatccaa

SEQ ID NO: 30956 - RNA, 21 nt, RNAi
auuggagcagaagauccaauu

SEQ ID NO: 30957 - RNA, 21 nt, RNAi
uuuaaccucgucuucuagguu

SEQ ID NO: 30958 - DNA, 21 bp, homo sapiens
gagcagaagatccaagtgcta

SEQ ID NO: 30959 - RNA, 21 nt, RNAi
gcagaagauccaagugcuauu

SEQ ID NO: 30960 - RNA, 21 nt, RNAi
uucgucuucuagguucacgau

SEQ ID NO: 30961 - DNA, 21 bp, homo sapiens
gaagatccaagtgctacaatc

SEQ ID NO: 30962 - RNA, 21 nt, RNAi
agauccaagugcuacaaucuu

SEQ ID NO: 30963 - RNA, 21 nt, RNAi
uuucuagguucacgauguuag

SEQ ID NO: 30964 - DNA, 21 bp, homo sapiens
gatccaagtgctacaatccaa

SEQ ID NO: 30965 - RNA, 21 nt, RNAi
uccaagugcuacaauccaauu

SEQ ID NO: 30966 - RNA, 21 nt, RNAi
uuagguucacgauguuagguu

SEQ ID NO: 30967 - DNA, 21 bp, homo sapiens
gacacattagaagtgctgcag

SEQ ID NO: 30968 - RNA, 21 nt, RNAi
cacauuagaagugcugcaguu

SEQ ID NO: 30969 - RNA, 21 nt, RNAi
uuguguaaucuucacgacguc

SEQ ID NO: 30970 - DNA, 21 bp, homo sapiens
gaagtgctgcagagttcttac

SEQ ID NO: 30971 - RNA, 21 nt, RNAi
agugcugcagaguucuuacuu

SEQ ID NO: 30972 - RNA, 21 nt, RNAi
uuucacgacgucucaagaaug

SEQ ID NO: 30973 - DNA, 21 bp, homo sapiens
gagttcttacaagaatctaga

SEQ ID NO: 30974 - RNA, 21 nt, RNAi
guucuuacaagaaucuagauu

SEQ ID NO: 30975 - RNA, 21 nt, RNAi
uucaagaauguucuuagaucu

SEQ ID NO: 30976 - DNA, 21 bp, homo sapiens
gaatctagagaatgagcttga

SEQ ID NO: 30977 - RNA, 21 nt, RNAi
aucuagagaaugagcuugauu

SEQ ID NO: 30978 - RNA, 21 nt, RNAi
uuuagaucucuuacucgaacu

SEQ ID NO: 30979 - DNA, 21 bp, homo sapiens
gagaatgagcttgaattgaca

SEQ ID NO: 30980 - RNA, 21 nt, RNAi
gaaugagcuugaauugacauu

SEQ ID NO: 30981 - RNA, 21 nt, RNAi
uucuuacucgaacuuaacugu

SEQ ID NO: 30982 - DNA, 21 bp, homo sapiens
gaatgagcttgaattgacaaa

SEQ ID NO: 30983 - RNA, 21 nt, RNAi
augagcuugaauugacaaauu

SEQ ID NO: 30984 - RNA, 21 nt, RNAi
uuuacucgaacuuaacuguuu

SEQ ID NO: 30985 - DNA, 21 bp, homo sapiens
gactgcaaaggaaactgagct

SEQ ID NO: 30986 - RNA, 21 nt, RNAi
cugcaaaggaaacugagcuuu

SEQ ID NO: 30987 - RNA, 21 nt, RNAi
uugacguuuccuuugacucga

SEQ ID NO: 30988 - DNA, 21 bp, homo sapiens
gaaatgcatgagatggcacag

SEQ ID NO: 30989 - RNA, 21 nt, RNAi
aaugcaugagauggcacaguu

SEQ ID NO: 30990 - RNA, 21 nt, RNAi
uuuuacguacucuaccguguc

SEQ ID NO: 30991 - DNA, 21 bp, homo sapiens
gagctgcaagaagaactcagt

SEQ ID NO: 30992 - RNA, 21 nt, RNAi
gcugcaagaagaacucaguuu

SEQ ID NO: 30993 - RNA, 21 nt, RNAi
uucgacguucuucuugaguca

SEQ ID NO: 30994 - DNA, 21 bp, homo sapiens
gaagaactcagtggagagaaa

SEQ ID NO: 30995 - RNA, 21 nt, RNAi
agaacucaguggagagaaauu

SEQ ID NO: 30996 - RNA, 21 nt, RNAi
uuucuugagucaccucucuuu

SEQ ID NO: 30997 - DNA, 21 bp, homo sapiens
gagagttgcagttactgttgg

SEQ ID NO: 30998 - RNA, 21 nt, RNAi
gaguugcaguuacuguugguu

SEQ ID NO: 30999 - RNA, 21 nt, RNAi
uucucaacgucaaugacaacc

SEQ ID NO: 31000 - DNA, 21 bp, homo sapiens
gagttgcagttactgttggaa

SEQ ID NO: 31001 - RNA, 21 nt, RNAi
guugcaguuacuguuggaauu

SEQ ID NO: 31002 - RNA, 21 nt, RNAi
uucaacgucaaugacaaccuu

SEQ ID NO: 31003 - DNA, 21 bp, homo sapiens
gaagaaataaagagcagcaaa

SEQ ID NO: 31004 - RNA, 21 nt, RNAi
agaaauaaagagcagcaaauu

SEQ ID NO: 31005 - RNA, 21 nt, RNAi
uuucuuuauuucucgucguuu

SEQ ID NO: 31006 - DNA, 21 bp, homo sapiens
gaaataaagagcagcaaagat

SEQ ID NO: 31007 - RNA, 21 nt, RNAi
aauaaagagcagcaaagauuu

SEQ ID NO: 31008 - RNA, 21 nt, RNAi
uuuuauuucucgucguuucua

SEQ ID NO: 31009 - DNA, 21 bp, homo sapiens
gagcagcaaagatcaattgaa

SEQ ID NO: 31010 - RNA, 21 nt, RNAi
gcagcaaagaucaauugaauu

SEQ ID NO: 31011 - RNA, 21 nt, RNAi
uucgucguuucuaguuaacuu

SEQ ID NO: 31012 - DNA, 21 bp, homo sapiens
gatcaattgaaggagctcaca

SEQ ID NO: 31013 - RNA, 21 nt, RNAi
ucaauugaaggagcucacauu

SEQ ID NO: 31014 - RNA, 21 nt, RNAi
uuaguuaacuuccucgagugu

SEQ ID NO: 31015 - DNA, 21 bp, homo sapiens
gaattgaagaagagcctagat

SEQ ID NO: 31016 - RNA, 21 nt, RNAi
auugaagaagagccuagauuu

SEQ ID NO: 31017 - RNA, 21 nt, RNAi
uuuaacuucuucucggaucua

SEQ ID NO: 31018 - DNA, 21 bp, homo sapiens
gaagaagagcctagattgcat

SEQ ID NO: 31019 - RNA, 21 nt, RNAi
agaagagccuagauugcauuu

SEQ ID NO: 31020 - RNA, 21 nt, RNAi
uuucuucucggaucuaacgua

SEQ ID NO: 31021 - DNA, 21 bp, homo sapiens
gaagagcctagattgcatgca

SEQ ID NO: 31022 - RNA, 21 nt, RNAi
agagccuagauugcaugcauu

SEQ ID NO: 31023 - RNA, 21 nt, RNAi
uuucucggaucuaacguacgu

SEQ ID NO: 31024 - DNA, 21 bp, homo sapiens
gagcctagattgcatgcacaa

SEQ ID NO: 31025 - RNA, 21 nt, RNAi
gccuagauugcaugcacaauu

SEQ ID NO: 31026 - RNA, 21 nt, RNAi
uucggaucuaacguacguguu

SEQ ID NO: 31027 - DNA, 21 bp, homo sapiens
gattgcatgcacaaagaccag

SEQ ID NO: 31028 - RNA, 21 nt, RNAi
uugcaugcacaaagaccaguu

SEQ ID NO: 31029 - RNA, 21 nt, RNAi
uuaacguacguguuucugguc

SEQ ID NO: 31030 - DNA, 21 bp, homo sapiens
gaaagtgagagaggaaatagc

SEQ ID NO: 31031 - RNA, 21 nt, RNAi
aagugagagaggaaauagcuu

SEQ ID NO: 31032 - RNA, 21 nt, RNAi
uuuucacucucuccuuuaucg

SEQ ID NO: 31033 - DNA, 21 bp, homo sapiens
gagagaggaaatagctgaata

SEQ ID NO: 31034 - RNA, 21 nt, RNAi
gagaggaaauagcugaauauu

SEQ ID NO: 31035 - RNA, 21 nt, RNAi
uucucuccuuuaucgacuuau

SEQ ID NO: 31036 - DNA, 21 bp, homo sapiens
gagaggaaatagctgaatatc

SEQ ID NO: 31037 - RNA, 21 nt, RNAi
gaggaaauagcugaauaucuu

SEQ ID NO: 31038 - RNA, 21 nt, RNAi
uucuccuuuaucgacuuauag

SEQ ID NO: 31039 - DNA, 21 bp, homo sapiens
gaggaaatagctgaatatcag

SEQ ID NO: 31040 - RNA, 21 nt, RNAi
ggaaauagcugaauaucaguu

SEQ ID NO: 31041 - RNA, 21 nt, RNAi
uuccuuuaucgacuuauaguc

SEQ ID NO: 31042 - DNA, 21 bp, homo sapiens
gaaatagctgaatatcagcta

SEQ ID NO: 31043 - RNA, 21 nt, RNAi
aauagcugaauaucagcuauu

SEQ ID NO: 31044 - RNA, 21 nt, RNAi
uuuuaucgacuuauagucgau

SEQ ID NO: 31045 - DNA, 21 bp, homo sapiens
gaatatcagctacggcttcat

SEQ ID NO: 31046 - RNA, 21 nt, RNAi
auaucagcuacggcuucauuu

SEQ ID NO: 31047 - RNA, 21 nt, RNAi
uuuauagucgaugccgaagua

SEQ ID NO: 31048 - DNA, 21 bp, homo sapiens
gacacaaacaaacagtatgaa

SEQ ID NO: 31049 - RNA, 21 nt, RNAi
cacaaacaaacaguaugaauu

SEQ ID NO: 31050 - RNA, 21 nt, RNAi
uuguguuuguuugucauacuu

SEQ ID NO: 31051 - DNA, 21 bp, homo sapiens
gaagtagaaatccagacatac

SEQ ID NO: 31052 - RNA, 21 nt, RNAi
aguagaaauccagacauacuu

SEQ ID NO: 31053 - RNA, 21 nt, RNAi
uuucaucuuuaggucuguaug

SEQ ID NO: 31054 - DNA, 21 bp, homo sapiens
gaaatccagacataccaagag

SEQ ID NO: 31055 - RNA, 21 nt, RNAi
aauccagacauaccaagaguu

SEQ ID NO: 31056 - RNA, 21 nt, RNAi
uuuuaggucuguaugguucuc

SEQ ID NO: 31057 - DNA, 21 bp, homo sapiens
gacataccaagagaaattgac

SEQ ID NO: 31058 - RNA, 21 nt, RNAi
cauaccaagagaaauugacuu

SEQ ID NO: 31059 - RNA, 21 nt, RNAi
uuguaugguucucuuuaacug

SEQ ID NO: 31060 - DNA, 21 bp, homo sapiens
gacttctaaagaagaatgtct

SEQ ID NO: 31061 - RNA, 21 nt, RNAi
cuucuaaagaagaaugucuuu

SEQ ID NO: 31062 - RNA, 21 nt, RNAi
uugaagauuucuucuuacaga

SEQ ID NO: 31063 - DNA, 21 bp, homo sapiens
gaagaatgtctcagttcacag

SEQ ID NO: 31064 - RNA, 21 nt, RNAi
agaaugucucaguucacaguu

SEQ ID NO: 31065 - RNA, 21 nt, RNAi
uuucuuacagagucaaguguc

SEQ ID NO: 31066 - DNA, 21 bp, homo sapiens
gaatgtctcagttcacagaag

SEQ ID NO: 31067 - RNA, 21 nt, RNAi
augucucaguucacagaaguu

SEQ ID NO: 31068 - RNA, 21 nt, RNAi
uuuacagagucaagugucuuc

SEQ ID NO: 31069 - DNA, 21 bp, homo sapiens
gaagagctcaataattcattg

SEQ ID NO: 31070 - RNA, 21 nt, RNAi
agagcucaauaauucauuguu

SEQ ID NO: 31071 - RNA, 21 nt, RNAi
uuucucgaguuauuaaguaac

SEQ ID NO: 31072 - DNA, 21 bp, homo sapiens
gaagttgttgatcaaatcctg

SEQ ID NO: 31073 - RNA, 21 nt, RNAi
aguuguugaucaaauccuguu

SEQ ID NO: 31074 - RNA, 21 nt, RNAi
uuucaacaacuaguuuaggac

SEQ ID NO: 31075 - DNA, 21 bp, homo sapiens
gatcaaatcctgtaaacagct

SEQ ID NO: 31076 - RNA, 21 nt, RNAi
ucaaauccuguaaacagcuuu

SEQ ID NO: 31077 - RNA, 21 nt, RNAi
uuaguuuaggacauuugucga

SEQ ID NO: 31078 - DNA, 21 bp, homo sapiens
gagatactgcagaaagaactc

SEQ ID NO: 31079 - RNA, 21 nt, RNAi
gauacugcagaaagaacucuu

SEQ ID NO: 31080 - RNA, 21 nt, RNAi
uucuaugacgucuuucuugag

SEQ ID NO: 31081 - DNA, 21 bp, homo sapiens
gatactgcagaaagaactctc

SEQ ID NO: 31082 - RNA, 21 nt, RNAi
uacugcagaaagaacucucuu

SEQ ID NO: 31083 - RNA, 21 nt, RNAi
uuaugacgucuuucuugagag

SEQ ID NO: 31084 - DNA, 21 bp, homo sapiens
gaaagaactctctcaacttca

SEQ ID NO: 31085 - RNA, 21 nt, RNAi
aagaacucucucaacuucauu

SEQ ID NO: 31086 - RNA, 21 nt, RNAi
uuuucuugagagaguugaagu

SEQ ID NO: 31087 - DNA, 21 bp, homo sapiens
gaactctctcaacttcaagct

SEQ ID NO: 31088 - RNA, 21 nt, RNAi
acucucucaacuucaagcuuu

SEQ ID NO: 31089 - RNA, 21 nt, RNAi
uuugagagaguugaaguucga

SEQ ID NO: 31090 - DNA, 21 bp, homo sapiens
gataccaaggtcgatgaatta

SEQ ID NO: 31091 - RNA, 21 nt, RNAi
uaccaaggucgaugaauuauu

SEQ ID NO: 31092 - RNA, 21 nt, RNAi
uuaugguuccagcuacuuaau

SEQ ID NO: 31093 - DNA, 21 bp, homo sapiens
gatgaattaacaactgagatc

SEQ ID NO: 31094 - RNA, 21 nt, RNAi
ugaauuaacaacugagaucuu

SEQ ID NO: 31095 - RNA, 21 nt, RNAi
uuacuuaauuguugacucuag

SEQ ID NO: 31096 - DNA, 21 bp, homo sapiens
gagatcaaagaactgaaagaa

SEQ ID NO: 31097 - RNA, 21 nt, RNAi
gaucaaagaacugaaagaauu

SEQ ID NO: 31098 - RNA, 21 nt, RNAi
uucuaguuucuugacuuucuu

SEQ ID NO: 31099 - DNA, 21 bp, homo sapiens
gatcaaagaactgaaagaaac

SEQ ID NO: 31100 - RNA, 21 nt, RNAi
ucaaagaacugaaagaaacuu

SEQ ID NO: 31101 - RNA, 21 nt, RNAi
uuaguuucuugacuuucuuug

SEQ ID NO: 31102 - DNA, 21 bp, homo sapiens
gaactgaaagaaactcttgaa

SEQ ID NO: 31103 - RNA, 21 nt, RNAi
acugaaagaaacucuugaauu

SEQ ID NO: 31104 - RNA, 21 nt, RNAi
uuugacuuucuuugagaacuu

SEQ ID NO: 31105 - DNA, 21 bp, homo sapiens
gaggcagatgaatacttggat

SEQ ID NO: 31106 - RNA, 21 nt, RNAi
ggcagaugaauacuuggauuu

SEQ ID NO: 31107 - RNA, 21 nt, RNAi
uuccgucuacuuaugaaccua

SEQ ID NO: 31108 - DNA, 21 bp, homo sapiens
gatgaatacttggataagtac

SEQ ID NO: 31109 - RNA, 21 nt, RNAi
ugaauacuuggauaaguacuu

SEQ ID NO: 31110 - RNA, 21 nt, RNAi
uuacuuaugaaccuauucaug

SEQ ID NO: 31111 - DNA, 21 bp, homo sapiens
gaatacttggataagtactgt

SEQ ID NO: 31112 - RNA, 21 nt, RNAi
auacuuggauaaguacuguuu

SEQ ID NO: 31113 - RNA, 21 nt, RNAi
uuuaugaaccuauucaugaca

SEQ ID NO: 31114 - DNA, 21 bp, homo sapiens
gataagtactgttccttgctt

SEQ ID NO: 31115 - RNA, 21 nt, RNAi
uaaguacuguuccuugcuuuu

SEQ ID NO: 31116 - RNA, 21 nt, RNAi
uuauucaugacaaggaacgaa

SEQ ID NO: 31117 - DNA, 21 bp, homo sapiens
gagaaagctaaagagatgtta

SEQ ID NO: 31118 - RNA, 21 nt, RNAi
gaaagcuaaagagauguuauu

SEQ ID NO: 31119 - RNA, 21 nt, RNAi
uucuuucgauuucucuacaau

SEQ ID NO: 31120 - DNA, 21 bp, homo sapiens
gaaagctaaagagatgttaga

SEQ ID NO: 31121 - RNA, 21 nt, RNAi
aagcuaaagagauguuagauu

SEQ ID NO: 31122 - RNA, 21 nt, RNAi
uuuucgauuucucuacaaucu

SEQ ID NO: 31123 - DNA, 21 bp, homo sapiens
gagatgttagagacacaagtg

SEQ ID NO: 31124 - RNA, 21 nt, RNAi
gauguuagagacacaaguguu

SEQ ID NO: 31125 - RNA, 21 nt, RNAi
uucuacaaucucuguguucac

SEQ ID NO: 31126 - DNA, 21 bp, homo sapiens
gatgttagagacacaagtggc

SEQ ID NO: 31127 - RNA, 21 nt, RNAi
uguuagagacacaaguggcuu

SEQ ID NO: 31128 - RNA, 21 nt, RNAi
uuacaaucucuguguucaccg

SEQ ID NO: 31129 - DNA, 21 bp, homo sapiens
gaggcaaagatccagtggaat

SEQ ID NO: 31130 - RNA, 21 nt, RNAi
ggcaaagauccaguggaauuu

SEQ ID NO: 31131 - RNA, 21 nt, RNAi
uuccguuucuaggucaccuua

SEQ ID NO: 31132 - DNA, 21 bp, homo sapiens
gagaatggtagaggaccaaca

SEQ ID NO: 31133 - RNA, 21 nt, RNAi
gaaugguagaggaccaacauu

SEQ ID NO: 31134 - RNA, 21 nt, RNAi
uucuuaccaucuccugguugu

SEQ ID NO: 31135 - DNA, 21 bp, homo sapiens
gaatggtagaggaccaacacc

SEQ ID NO: 31136 - RNA, 21 nt, RNAi
augguagaggaccaacaccuu

SEQ ID NO: 31137 - RNA, 21 nt, RNAi
uuuaccaucuccugguugugg

SEQ ID NO: 31138 - DNA, 21 bp, homo sapiens
gaaagcagtcatgagtggtat

SEQ ID NO: 31139 - RNA, 21 nt, RNAi
aagcagucaugagugguauuu

SEQ ID NO: 31140 - RNA, 21 nt, RNAi
uuuucgucaguacucaccaua

SEQ ID NO: 31141 - DNA, 21 bp, homo sapiens
gaagacacggaaggtactgag

SEQ ID NO: 31142 - RNA, 21 nt, RNAi
agacacggaagguacugaguu

SEQ ID NO: 31143 - RNA, 21 nt, RNAi
uuucugugccuuccaugacuc

SEQ ID NO: 31144 - DNA, 21 bp, homo sapiens
gacacggaaggtactgagttt

SEQ ID NO: 31145 - RNA, 21 nt, RNAi
cacggaagguacugaguuuuu

SEQ ID NO: 31146 - RNA, 21 nt, RNAi
uugugccuuccaugacucaaa

SEQ ID NO: 31147 - DNA, 21 bp, homo sapiens
gaaggtactgagtttgagcca

SEQ ID NO: 31148 - RNA, 21 nt, RNAi
agguacugaguuugagccauu

SEQ ID NO: 31149 - RNA, 21 nt, RNAi
uuuccaugacucaaacucggu

SEQ ID NO: 31150 - DNA, 21 bp, homo sapiens
gacttccagaagttgtaaaga

SEQ ID NO: 31151 - RNA, 21 nt, RNAi
cuuccagaaguuguaaagauu

SEQ ID NO: 31152 - RNA, 21 nt, RNAi
uugaaggucuucaacauuucu

SEQ ID NO: 31153 - DNA, 21 bp, homo sapiens
gaagaacaaccatggcaactc

SEQ ID NO: 31154 - RNA, 21 nt, RNAi
agaacaaccauggcaacucuu

SEQ ID NO: 31155 - RNA, 21 nt, RNAi
uuucuuguugguaccguugag

SEQ ID NO: 31156 - DNA, 21 bp, homo sapiens
gaacaaccatggcaactcgga

SEQ ID NO: 31157 - RNA, 21 nt, RNAi
acaaccauggcaacucggauu

SEQ ID NO: 31158 - RNA, 21 nt, RNAi
uuuguugguaccguugagccu

SEQ ID NO: 31159 - DNA, 21 bp, homo sapiens
gagtcctccaaaccaacagct

SEQ ID NO: 31160 - RNA, 21 nt, RNAi
guccuccaaaccaacagcuuu

SEQ ID NO: 31161 - RNA, 21 nt, RNAi
uucaggagguuugguugucga

SEQ ID NO: 31162 - DNA, 21 bp, homo sapiens
gattcaggcaccatcctccga

SEQ ID NO: 31163 - RNA, 21 nt, RNAi
uucaggcaccauccuccgauu

SEQ ID NO: 31164 - RNA, 21 nt, RNAi
uuaaguccgugguaggaggcu

SEQ ID NO: 31165 - DNA, 21 bp, homo sapiens
gagagaagtccgactgacagc

SEQ ID NO: 31166 - RNA, 21 nt, RNAi
gagaaguccgacugacagcuu

SEQ ID NO: 31167 - RNA, 21 nt, RNAi
uucucuucaggcugacugucg

SEQ ID NO: 31168 - DNA, 21 bp, homo sapiens
gactggagtccaacggcagtg

SEQ ID NO: 31169 - RNA, 21 nt, RNAi
cuggaguccaacggcaguguu

SEQ ID NO: 31170 - RNA, 21 nt, RNAi
uugaccucagguugccgucac

SEQ ID NO: 31171 - DNA, 21 bp, homo sapiens
gagtccaacggcagtgagaac

SEQ ID NO: 31172 - RNA, 21 nt, RNAi
guccaacggcagugagaacuu

SEQ ID NO: 31173 - RNA, 21 nt, RNAi
uucagguugccgucacucuug

SEQ ID NO: 31174 - DNA, 21 bp, homo sapiens
gagaactgtaaggtccagtga

SEQ ID NO: 31175 - RNA, 21 nt, RNAi
gaacuguaagguccagugauu

SEQ ID NO: 31176 - RNA, 21 nt, RNAi
uucuugacauuccaggucacu

SEQ ID NO: 31177 - DNA, 21 bp, homo sapiens
gaactgtaaggtccagtgaag

SEQ ID NO: 31178 - RNA, 21 nt, RNAi
acuguaagguccagugaaguu

SEQ ID NO: 31179 - RNA, 21 nt, RNAi
uuugacauuccaggucacuuc

SEQ ID NO: 31180 - DNA, 21 bp, homo sapiens
gaaggcactttgtgtgtcagt

SEQ ID NO: 31181 - RNA, 21 nt, RNAi
aggcacuuugugugucaguuu

SEQ ID NO: 31182 - RNA, 21 nt, RNAi
uuuccgugaaacacacaguca

SEQ ID NO: 31183 - DNA, 21 bp, homo sapiens
gaggtgccagtcattgaatag

SEQ ID NO: 31184 - RNA, 21 nt, RNAi
ggugccagucauugaauaguu

SEQ ID NO: 31185 - RNA, 21 nt, RNAi
uuccacggucaguaacuuauc

SEQ ID NO: 31186 - DNA, 21 bp, homo sapiens
gaatagataaggctgtgccta

SEQ ID NO: 31187 - RNA, 21 nt, RNAi
auagauaaggcugugccuauu

SEQ ID NO: 31188 - RNA, 21 nt, RNAi
uuuaucuauuccgacacggau

SEQ ID NO: 31189 - DNA, 21 bp, homo sapiens
gataaggctgtgcctacagga

SEQ ID NO: 31190 - RNA, 21 nt, RNAi
uaaggcugugccuacaggauu

SEQ ID NO: 31191 - RNA, 21 nt, RNAi
uuauuccgacacggauguccu

SEQ ID NO: 31192 - DNA, 21 bp, homo sapiens
gaagcactgatcacctgttag

SEQ ID NO: 31193 - RNA, 21 nt, RNAi
agcacugaucaccuguuaguu

SEQ ID NO: 31194 - RNA, 21 nt, RNAi
uuucgugacuaguggacaauc

SEQ ID NO: 31195 - DNA, 21 bp, homo sapiens
gatcacctgttagcattgcca

SEQ ID NO: 31196 - RNA, 21 nt, RNAi
ucaccuguuagcauugccauu

SEQ ID NO: 31197 - RNA, 21 nt, RNAi
uuaguggacaaucguaacggu

SEQ ID NO: 31198 - DNA, 21 bp, homo sapiens
gacaagcactatatcacaatc

SEQ ID NO: 31199 - RNA, 21 nt, RNAi
caagcacuauaucacaaucuu

SEQ ID NO: 31200 - RNA, 21 nt, RNAi
uuguucgugauauaguguuag

SEQ ID NO: 31201 - DNA, 21 bp, homo sapiens
gaatttctcagagctgagtaa

SEQ ID NO: 31202 - RNA, 21 nt, RNAi
auuucucagagcugaguaauu

SEQ ID NO: 31203 - RNA, 21 nt, RNAi
uuuaaagagucucgacucauu

SEQ ID NO: 31204 - DNA, 21 bp, homo sapiens
gagtgtttatctttctcttac

SEQ ID NO: 31205 - RNA, 21 nt, RNAi
guguuuaucuuucucuuacuu

SEQ ID NO: 31206 - RNA, 21 nt, RNAi
uucacaaauagaaagagaaug

SEQ ID NO: 31207 - DNA, 21 bp, homo sapiens
gacatctttgcttatgaaacc

SEQ ID NO: 31208 - RNA, 21 nt, RNAi
caucuuugcuuaugaaaccuu

SEQ ID NO: 31209 - RNA, 21 nt, RNAi
uuguagaaacgaauacuuugg

SEQ ID NO: 31210 - DNA, 21 bp, homo sapiens
gaaacctgtacatatgtgtgt

SEQ ID NO: 31211 - RNA, 21 nt, RNAi
aaccuguacauauguguguuu

SEQ ID NO: 31212 - RNA, 21 nt, RNAi
uuuuggacauguauacacaca

SEQ ID NO: 31213 - DNA, 21 bp, homo sapiens
gaggtgtgctataccatgcgt

SEQ ID NO: 31214 - RNA, 21 nt, RNAi
ggugugcuauaccaugcguuu

SEQ ID NO: 31215 - RNA, 21 nt, RNAi
uuccacacgauaugguacgca

SEQ ID NO: 31216 - DNA, 21 bp, homo sapiens
gatggattaacatatagcctt

SEQ ID NO: 31217 - RNA, 21 nt, RNAi
uggauuaacauauagccuuuu

SEQ ID NO: 31218 - RNA, 21 nt, RNAi
uuaccuaauuguauaucggaa

SEQ ID NO: 31219 - DNA, 21 bp, homo sapiens
tactcggtcacggactcacac

SEQ ID NO: 31220 - RNA, 21 nt, RNAi
cucggucacggacucacacuu

SEQ ID NO: 31221 - RNA, 21 nt, RNAi
uugagccagugccugagugug

SEQ ID NO: 31222 - DNA, 21 bp, homo sapiens
taagcagaagatttctcatga

SEQ ID NO: 31223 - RNA, 21 nt, RNAi
agcagaagauuucucaugauu

SEQ ID NO: 31224 - RNA, 21 nt, RNAi
uuucgucuucuaaagaguacu

SEQ ID NO: 31225 - DNA, 21 bp, homo sapiens
taaatctgagcttgaaagaag

SEQ ID NO: 31226 - RNA, 21 nt, RNAi
aaucugagcuugaaagaaguu

SEQ ID NO: 31227 - RNA, 21 nt, RNAi
uuuuagacucgaacuuucuuc

SEQ ID NO: 31228 - DNA, 21 bp, homo sapiens
tacaactccactaacaccaag

SEQ ID NO: 31229 - RNA, 21 nt, RNAi
caacuccacuaacaccaaguu

SEQ ID NO: 31230 - RNA, 21 nt, RNAi
uuguugaggugauugugguuc

SEQ ID NO: 31231 - DNA, 21 bp, homo sapiens
tatagtggttccaagtatgaa

SEQ ID NO: 31232 - RNA, 21 nt, RNAi
uagugguuccaaguaugaauu

SEQ ID NO: 31233 - RNA, 21 nt, RNAi
uuaucaccaagguucauacuu

SEQ ID NO: 31234 - DNA, 21 bp, homo sapiens
tagtggttccaagtatgaaga

SEQ ID NO: 31235 - RNA, 21 nt, RNAi
gugguuccaaguaugaagauu

SEQ ID NO: 31236 - RNA, 21 nt, RNAi
uucaccaagguucauacuucu

SEQ ID NO: 31237 - DNA, 21 bp, homo sapiens
taataaagaggttgaagaacg

SEQ ID NO: 31238 - RNA, 21 nt, RNAi
auaaagagguugaagaacguu

SEQ ID NO: 31239 - RNA, 21 nt, RNAi
uuuauuucuccaacuucuugc

SEQ ID NO: 31240 - DNA, 21 bp, homo sapiens
taaagaggttgaagaacgaaa

SEQ ID NO: 31241 - RNA, 21 nt, RNAi
aagagguugaagaacgaaauu

SEQ ID NO: 31242 - RNA, 21 nt, RNAi
uuuucuccaacuucuugcuuu

SEQ ID NO: 31243 - DNA, 21 bp, homo sapiens
tagaggcagaggttaaagcct

SEQ ID NO: 31244 - RNA, 21 nt, RNAi
gaggcagagguuaaagccuuu

SEQ ID NO: 31245 - RNA, 21 nt, RNAi
uucuccgucuccaauuucgga

SEQ ID NO: 31246 - DNA, 21 bp, homo sapiens
taggagagatttctctgcatc

SEQ ID NO: 31247 - RNA, 21 nt, RNAi
ggagagauuucucugcaucuu

SEQ ID NO: 31248 - RNA, 21 nt, RNAi
uuccucucuaaagagacguag

SEQ ID NO: 31249 - DNA, 21 bp, homo sapiens
tagcagtttctttgacaattc

SEQ ID NO: 31250 - RNA, 21 nt, RNAi
gcaguuucuuugacaauucuu

SEQ ID NO: 31251 - RNA, 21 nt, RNAi
uucgucaaagaaacuguuaag

SEQ ID NO: 31252 - DNA, 21 bp, homo sapiens
taatgagttggaactacgcct

SEQ ID NO: 31253 - RNA, 21 nt, RNAi
augaguuggaacuacgccuuu

SEQ ID NO: 31254 - RNA, 21 nt, RNAi
uuuacucaaccuugaugcgga

SEQ ID NO: 31255 - DNA, 21 bp, homo sapiens
tacgcctgcaaggacatgaaa

SEQ ID NO: 31256 - RNA, 21 nt, RNAi
cgccugcaaggacaugaaauu

SEQ ID NO: 31257 - RNA, 21 nt, RNAi
uugcggacguuccuguacuuu

SEQ ID NO: 31258 - DNA, 21 bp, homo sapiens
taagtttcaagaactccaact

SEQ ID NO: 31259 - RNA, 21 nt, RNAi
aguuucaagaacuccaacuuu

SEQ ID NO: 31260 - RNA, 21 nt, RNAi
uuucaaaguucuugagguuga

SEQ ID NO: 31261 - DNA, 21 bp, homo sapiens
tagtgagaacaacagcacaat

SEQ ID NO: 31262 - RNA, 21 nt, RNAi
gugagaacaacagcacaauuu

SEQ ID NO: 31263 - RNA, 21 nt, RNAi
uucacucuuguugucguguua

SEQ ID NO: 31264 - DNA, 21 bp, homo sapiens
tacgaccaggcgtcaaccaag

SEQ ID NO: 31265 - RNA, 21 nt, RNAi
cgaccaggcgucaaccaaguu

SEQ ID NO: 31266 - RNA, 21 nt, RNAi
uugcugguccgcaguugguuc

SEQ ID NO: 31267 - DNA, 21 bp, homo sapiens
tacagcaagccaagaatatgc

SEQ ID NO: 31268 - RNA, 21 nt, RNAi
cagcaagccaagaauaugcuu

SEQ ID NO: 31269 - RNA, 21 nt, RNAi
uugucguucgguucuuauacg

SEQ ID NO: 31270 - DNA, 21 bp, homo sapiens
tatgcacaacgtcctgcaggc

SEQ ID NO: 31271 - RNA, 21 nt, RNAi
ugcacaacguccugcaggcuu

SEQ ID NO: 31272 - RNA, 21 nt, RNAi
uuacguguugcaggacguccg

SEQ ID NO: 31273 - DNA, 21 bp, homo sapiens
taaactcacatcagtaaagca

SEQ ID NO: 31274 - RNA, 21 nt, RNAi
aacucacaucaguaaagcauu

SEQ ID NO: 31275 - RNA, 21 nt, RNAi
uuuugaguguagucauuucgu

SEQ ID NO: 31276 - DNA, 21 bp, homo sapiens
tacctctcaggaaaccatgtt

SEQ ID NO: 31277 - RNA, 21 nt, RNAi
ccucucaggaaaccauguuuu

SEQ ID NO: 31278 - RNA, 21 nt, RNAi
uuggagaguccuuugguacaa

SEQ ID NO: 31279 - DNA, 21 bp, homo sapiens
taagttaagcaagacagagaa

SEQ ID NO: 31280 - RNA, 21 nt, RNAi
aguuaagcaagacagagaauu

SEQ ID NO: 31281 - RNA, 21 nt, RNAi
uuucaauucguucugucucuu

SEQ ID NO: 31282 - DNA, 21 bp, homo sapiens
taagcaagacagagaaagagt

SEQ ID NO: 31283 - RNA, 21 nt, RNAi
agcaagacagagaaagaguuu

SEQ ID NO: 31284 - RNA, 21 nt, RNAi
uuucguucugucucuuucuca

SEQ ID NO: 31285 - DNA, 21 bp, homo sapiens
taactcagatggaatcagaaa

SEQ ID NO: 31286 - RNA, 21 nt, RNAi
acucagauggaaucagaaauu

SEQ ID NO: 31287 - RNA, 21 nt, RNAi
uuugagucuaccuuagucuuu

SEQ ID NO: 31288 - DNA, 21 bp, homo sapiens
taatcacttggaaacttgtct

SEQ ID NO: 31289 - RNA, 21 nt, RNAi
aucacuuggaaacuugucuuu

SEQ ID NO: 31290 - RNA, 21 nt, RNAi
uuuagugaaccuuugaacaga

SEQ ID NO: 31291 - DNA, 21 bp, homo sapiens
tacaacgagagagtaagaacg

SEQ ID NO: 31292 - RNA, 21 nt, RNAi
caacgagagaguaagaacguu

SEQ ID NO: 31293 - RNA, 21 nt, RNAi
uuguugcucucucauucuugc

SEQ ID NO: 31294 - DNA, 21 bp, homo sapiens
taagaacgctggagatggaca

SEQ ID NO: 31295 - RNA, 21 nt, RNAi
agaacgcuggagauggacauu

SEQ ID NO: 31296 - RNA, 21 nt, RNAi
uuucuugcgaccucuaccugu

SEQ ID NO: 31297 - DNA, 21 bp, homo sapiens
taagtgtcgagatcagaaacc

SEQ ID NO: 31298 - RNA, 21 nt, RNAi
agugucgagaucagaaaccuu

SEQ ID NO: 31299 - RNA, 21 nt, RNAi
uuucacagcucuagucuuugg

SEQ ID NO: 31300 - DNA, 21 bp, homo sapiens
tagacagtaagtcagtggagg

SEQ ID NO: 31301 - RNA, 21 nt, RNAi
gacaguaagucaguggagguu

SEQ ID NO: 31302 - RNA, 21 nt, RNAi
uucugucauucagucaccucc

SEQ ID NO: 31303 - DNA, 21 bp, homo sapiens
taagtcagtggaggtagagac

SEQ ID NO: 31304 - RNA, 21 nt, RNAi
agucaguggagguagagacuu

SEQ ID NO: 31305 - RNA, 21 nt, RNAi
uuucagucaccuccaucucug

SEQ ID NO: 31306 - DNA, 21 bp, homo sapiens
tagcttatatggagctacagc

SEQ ID NO: 31307 - RNA, 21 nt, RNAi
gcuuauauggagcuacagcuu

SEQ ID NO: 31308 - RNA, 21 nt, RNAi
uucgaauauaccucgaugucg

SEQ ID NO: 31309 - DNA, 21 bp, homo sapiens
tatatggagctacagcagaaa

SEQ ID NO: 31310 - RNA, 21 nt, RNAi
uauggagcuacagcagaaauu

SEQ ID NO: 31311 - RNA, 21 nt, RNAi
uuauaccucgaugucgucuuu

SEQ ID NO: 31312 - DNA, 21 bp, homo sapiens
tatggagctacagcagaaagc

SEQ ID NO: 31313 - RNA, 21 nt, RNAi
uggagcuacagcagaaagcuu

SEQ ID NO: 31314 - RNA, 21 nt, RNAi
uuaccucgaugucgucuuucg

SEQ ID NO: 31315 - DNA, 21 bp, homo sapiens
tacagcagaaagctgagttct

SEQ ID NO: 31316 - RNA, 21 nt, RNAi
cagcagaaagcugaguucuuu

SEQ ID NO: 31317 - RNA, 21 nt, RNAi
uugucgucuuucgacucaaga

SEQ ID NO: 31318 - DNA, 21 bp, homo sapiens
tatgtgtttgaagacttctca

SEQ ID NO: 31319 - RNA, 21 nt, RNAi
uguguuugaagacuucucauu

SEQ ID NO: 31320 - RNA, 21 nt, RNAi
uuacacaaacuucugaagagu

SEQ ID NO: 31321 - DNA, 21 bp, homo sapiens
tagaacacaagcttcagttac

SEQ ID NO: 31322 - RNA, 21 nt, RNAi
gaacacaagcuucaguuacuu

SEQ ID NO: 31323 - RNA, 21 nt, RNAi
uucuuguguucgaagucaaug

SEQ ID NO: 31324 - DNA, 21 bp, homo sapiens
taatggacaaagaccggtgtt

SEQ ID NO: 31325 - RNA, 21 nt, RNAi
auggacaaagaccgguguuuu

SEQ ID NO: 31326 - RNA, 21 nt, RNAi
uuuaccuguuucuggccacaa

SEQ ID NO: 31327 - DNA, 21 bp, homo sapiens
taccaagacttgcatgccgaa

SEQ ID NO: 31328 - RNA, 21 nt, RNAi
ccaagacuugcaugccgaauu

SEQ ID NO: 31329 - RNA, 21 nt, RNAi
uugguucugaacguacggcuu

SEQ ID NO: 31330 - DNA, 21 bp, homo sapiens
tataattggagaacaaggaag

SEQ ID NO: 31331 - RNA, 21 nt, RNAi
uaauuggagaacaaggaaguu

SEQ ID NO: 31332 - RNA, 21 nt, RNAi
uuauuaaccucuuguuccuuc

SEQ ID NO: 31333 - DNA, 21 bp, homo sapiens
taattggagaacaaggaagca

SEQ ID NO: 31334 - RNA, 21 nt, RNAi
auuggagaacaaggaagcauu

SEQ ID NO: 31335 - RNA, 21 nt, RNAi
uuuaaccucuuguuccuucgu

SEQ ID NO: 31336 - DNA, 21 bp, homo sapiens
tagaagcagaccaaagtccga

SEQ ID NO: 31337 - RNA, 21 nt, RNAi
gaagcagaccaaaguccgauu

SEQ ID NO: 31338 - RNA, 21 nt, RNAi
uucuucgucugguuucaggcu

SEQ ID NO: 31339 - DNA, 21 bp, homo sapiens
tagtaagttacaggaagacac

SEQ ID NO: 31340 - RNA, 21 nt, RNAi
guaaguuacaggaagacacuu

SEQ ID NO: 31341 - RNA, 21 nt, RNAi
uucauucaauguccuucugug

SEQ ID NO: 31342 - DNA, 21 bp, homo sapiens
taagttacaggaagacacttc

SEQ ID NO: 31343 - RNA, 21 nt, RNAi
aguuacaggaagacacuucuu

SEQ ID NO: 31344 - RNA, 21 nt, RNAi
uuucaauguccuucugugaag

SEQ ID NO: 31345 - DNA, 21 bp, homo sapiens
tacaggaagacacttctgctc

SEQ ID NO: 31346 - RNA, 21 nt, RNAi
caggaagacacuucugcucuu

SEQ ID NO: 31347 - RNA, 21 nt, RNAi
uuguccuucugugaagacgag

SEQ ID NO: 31348 - DNA, 21 bp, homo sapiens
taaggtagaaactgagcaggc

SEQ ID NO: 31349 - RNA, 21 nt, RNAi
agguagaaacugagcaggcuu

SEQ ID NO: 31350 - RNA, 21 nt, RNAi
uuuccaucuuugacucguccg

SEQ ID NO: 31351 - DNA, 21 bp, homo sapiens
tagaaactgagcaggcagaga

SEQ ID NO: 31352 - RNA, 21 nt, RNAi
gaaacugagcaggcagagauu

SEQ ID NO: 31353 - RNA, 21 nt, RNAi
uucuuugacucguccgucucu

SEQ ID NO: 31354 - DNA, 21 bp, homo sapiens
tacttgaagactctctaaagg

SEQ ID NO: 31355 - RNA, 21 nt, RNAi
cuugaagacucucuaaagguu

SEQ ID NO: 31356 - RNA, 21 nt, RNAi
uugaacuucugagagauuucc

SEQ ID NO: 31357 - DNA, 21 bp, homo sapiens
taagcttggagaagaaagaaa

SEQ ID NO: 31358 - RNA, 21 nt, RNAi
agcuuggagaagaaagaaauu

SEQ ID NO: 31359 - RNA, 21 nt, RNAi
uuucgaaccucuucuuucuuu

SEQ ID NO: 31360 - DNA, 21 bp, homo sapiens
tatctgatcagtacaagcaag

SEQ ID NO: 31361 - RNA, 21 nt, RNAi
ucugaucaguacaagcaaguu

SEQ ID NO: 31362 - RNA, 21 nt, RNAi
uuagacuagucauguucguuc

SEQ ID NO: 31363 - DNA, 21 bp, homo sapiens
tacaaagatgtgaagaaaccg

SEQ ID NO: 31364 - RNA, 21 nt, RNAi
caaagaugugaagaaaccguu

SEQ ID NO: 31365 - RNA, 21 nt, RNAi
uuguuucuacacuucuuuggc

SEQ ID NO: 31366 - DNA, 21 bp, homo sapiens
taaaggaagcatttgcaaagg

SEQ ID NO: 31367 - RNA, 21 nt, RNAi
aaggaagcauuugcaaagguu

SEQ ID NO: 31368 - RNA, 21 nt, RNAi
uuuuccuucguaaacguuucc

SEQ ID NO: 31369 - DNA, 21 bp, homo sapiens
tagcatttgctgaagaaagaa

SEQ ID NO: 31370 - RNA, 21 nt, RNAi
gcauuugcugaagaaagaauu

SEQ ID NO: 31371 - RNA, 21 nt, RNAi
uucguaaacgacuucuuucuu

SEQ ID NO: 31372 - DNA, 21 bp, homo sapiens
tagagttggagacagtgcagc

SEQ ID NO: 31373 - RNA, 21 nt, RNAi
gaguuggagacagugcagcuu

SEQ ID NO: 31374 - RNA, 21 nt, RNAi
uucucaaccucugucacgucg

SEQ ID NO: 31375 - DNA, 21 bp, homo sapiens
taagagcgaggctggtggttt

SEQ ID NO: 31376 - RNA, 21 nt, RNAi
agagcgaggcuggugguuuuu

SEQ ID NO: 31377 - RNA, 21 nt, RNAi
uuucucgcuccgaccaccaaa

SEQ ID NO: 31378 - DNA, 21 bp, homo sapiens
tattacaagagaatgaacagc

SEQ ID NO: 31379 - RNA, 21 nt, RNAi
uuacaagagaaugaacagcuu

SEQ ID NO: 31380 - RNA, 21 nt, RNAi
uuaauguucucuuacuugucg

SEQ ID NO: 31381 - DNA, 21 bp, homo sapiens
tacaagagaatgaacagctga

SEQ ID NO: 31382 - RNA, 21 nt, RNAi
caagagaaugaacagcugauu

SEQ ID NO: 31383 - RNA, 21 nt, RNAi
uuguucucuuacuugucgacu

SEQ ID NO: 31384 - DNA, 21 bp, homo sapiens
tagaatcagaaccaattagga

SEQ ID NO: 31385 - RNA, 21 nt, RNAi
gaaucagaaccaauuaggauu

SEQ ID NO: 31386 - RNA, 21 nt, RNAi
uucuuagucuugguuaauccu

SEQ ID NO: 31387 - DNA, 21 bp, homo sapiens
taggaactctgtgaaagaaag

SEQ ID NO: 31388 - RNA, 21 nt, RNAi
ggaacucugugaaagaaaguu

SEQ ID NO: 31389 - RNA, 21 nt, RNAi
uuccuugagacacuuucuuuc

SEQ ID NO: 31390 - DNA, 21 bp, homo sapiens
taaacctcagatggatcttga

SEQ ID NO: 31391 - RNA, 21 nt, RNAi
aaccucagauggaucuugauu

SEQ ID NO: 31392 - RNA, 21 nt, RNAi
uuuuggagucuaccuagaacu

SEQ ID NO: 31393 - DNA, 21 bp, homo sapiens
tagatagttataatgcgcagt

SEQ ID NO: 31394 - RNA, 21 nt, RNAi
gauaguuauaaugcgcaguuu

SEQ ID NO: 31395 - RNA, 21 nt, RNAi
uucuaucaauauuacgcguca

SEQ ID NO: 31396 - DNA, 21 bp, homo sapiens
tagttataatgcgcagttggt

SEQ ID NO: 31397 - RNA, 21 nt, RNAi
guuauaaugcgcaguugguuu

SEQ ID NO: 31398 - RNA, 21 nt, RNAi
uucaauauuacgcgucaacca

SEQ ID NO: 31399 - DNA, 21 bp, homo sapiens
tataatgcgcagttggtgcaa

SEQ ID NO: 31400 - RNA, 21 nt, RNAi
uaaugcgcaguuggugcaauu

SEQ ID NO: 31401 - RNA, 21 nt, RNAi
uuauuacgcgucaaccacguu

SEQ ID NO: 31402 - DNA, 21 bp, homo sapiens
taatgcgcagttggtgcaatt

SEQ ID NO: 31403 - RNA, 21 nt, RNAi
augcgcaguuggugcaauuuu

SEQ ID NO: 31404 - RNA, 21 nt, RNAi
uuuacgcgucaaccacguuaa

SEQ ID NO: 31405 - DNA, 21 bp, homo sapiens
tacagacaattagaggagatc

SEQ ID NO: 31406 - RNA, 21 nt, RNAi
cagacaauuagaggagaucuu

SEQ ID NO: 31407 - RNA, 21 nt, RNAi
uugucuguuaaucuccucuag

SEQ ID NO: 31408 - DNA, 21 bp, homo sapiens
tagaggagatcttgaaaccag

SEQ ID NO: 31409 - RNA, 21 nt, RNAi
gaggagaucuugaaaccaguu

SEQ ID NO: 31410 - RNA, 21 nt, RNAi
uucuccucuagaacuuugguc

SEQ ID NO: 31411 - DNA, 21 bp, homo sapiens
tagtggccttaaagactgtga

SEQ ID NO: 31412 - RNA, 21 nt, RNAi
guggccuuaaagacugugauu

SEQ ID NO: 31413 - RNA, 21 nt, RNAi
uucaccggaauuucugacacu

SEQ ID NO: 31414 - DNA, 21 bp, homo sapiens
taaagactgtgaaatagatgc

SEQ ID NO: 31415 - RNA, 21 nt, RNAi
aagacugugaaauagaugcuu

SEQ ID NO: 31416 - RNA, 21 nt, RNAi
uuuucugacacuuuaucuacg

SEQ ID NO: 31417 - DNA, 21 bp, homo sapiens
tatgtgaaatactgcaggctg

SEQ ID NO: 31418 - RNA, 21 nt, RNAi
ugugaaauacugcaggcuguu

SEQ ID NO: 31419 - RNA, 21 nt, RNAi
uuacacuuuaugacguccgac

SEQ ID NO: 31420 - DNA, 21 bp, homo sapiens
tatgaactcgtaactgagctg

SEQ ID NO: 31421 - RNA, 21 nt, RNAi
ugaacucguaacugagcuguu

SEQ ID NO: 31422 - RNA, 21 nt, RNAi
uuacuugagcauugacucgac

SEQ ID NO: 31423 - DNA, 21 bp, homo sapiens
taactgagctgaatgattcaa

SEQ ID NO: 31424 - RNA, 21 nt, RNAi
acugagcugaaugauucaauu

SEQ ID NO: 31425 - RNA, 21 nt, RNAi
uuugacucgacuuacuaaguu

SEQ ID NO: 31426 - DNA, 21 bp, homo sapiens
tattaaatgatgacagtggtc

SEQ ID NO: 31427 - RNA, 21 nt, RNAi
uuaaaugaugacaguggucuu

SEQ ID NO: 31428 - RNA, 21 nt, RNAi
uuaauuuacuacugucaccag

SEQ ID NO: 31429 - DNA, 21 bp, homo sapiens
taaatgatgacagtggtcttc

SEQ ID NO: 31430 - RNA, 21 nt, RNAi
aaugaugacaguggucuucuu

SEQ ID NO: 31431 - RNA, 21 nt, RNAi
uuuuacuacugucaccagaag

SEQ ID NO: 31432 - DNA, 21 bp, homo sapiens
tagtggaagacataccaggag

SEQ ID NO: 31433 - RNA, 21 nt, RNAi
guggaagacauaccaggaguu

SEQ ID NO: 31434 - RNA, 21 nt, RNAi
uucaccuucuguaugguccuc

SEQ ID NO: 31435 - DNA, 21 bp, homo sapiens
taccaggaggtgaatttggtg

SEQ ID NO: 31436 - RNA, 21 nt, RNAi
ccaggaggugaauuugguguu

SEQ ID NO: 31437 - RNA, 21 nt, RNAi
uugguccuccacuuaaaccac

SEQ ID NO: 31438 - DNA, 21 bp, homo sapiens
taattcctacgagcacttgac

SEQ ID NO: 31439 - RNA, 21 nt, RNAi
auuccuacgagcacuugacuu

SEQ ID NO: 31440 - RNA, 21 nt, RNAi
uuuaaggaugcucgugaacug

SEQ ID NO: 31441 - DNA, 21 bp, homo sapiens
tacgagcacttgacattgtca

SEQ ID NO: 31442 - RNA, 21 nt, RNAi
cgagcacuugacauugucauu

SEQ ID NO: 31443 - RNA, 21 nt, RNAi
uugcucgugaacuguaacagu

SEQ ID NO: 31444 - DNA, 21 bp, homo sapiens
tacatgatcagcactgtcaga

SEQ ID NO: 31445 - RNA, 21 nt, RNAi
caugaucagcacugucagauu

SEQ ID NO: 31446 - RNA, 21 nt, RNAi
uuguacuagucgugacagucu

SEQ ID NO: 31447 - DNA, 21 bp, homo sapiens
tatgttgactcattaaaggcc

SEQ ID NO: 31448 - RNA, 21 nt, RNAi
uguugacucauuaaaggccuu

SEQ ID NO: 31449 - RNA, 21 nt, RNAi
uuacaacugaguaauuuccgg

SEQ ID NO: 31450 - DNA, 21 bp, homo sapiens
tagaacagacaggagatatgt

SEQ ID NO: 31451 - RNA, 21 nt, RNAi
gaacagacaggagauauguuu

SEQ ID NO: 31452 - RNA, 21 nt, RNAi
uucuugucuguccucuauaca

SEQ ID NO: 31453 - DNA, 21 bp, homo sapiens
taaggaaattcaagagctcga

SEQ ID NO: 31454 - RNA, 21 nt, RNAi
aggaaauucaagagcucgauu

SEQ ID NO: 31455 - RNA, 21 nt, RNAi
uuuccuuuaaguucucgagcu

SEQ ID NO: 31456 - DNA, 21 bp, homo sapiens
tattaagttctgaaaggcaag

SEQ ID NO: 31457 - RNA, 21 nt, RNAi
uuaaguucugaaaggcaaguu

SEQ ID NO: 31458 - RNA, 21 nt, RNAi
uuaauucaagacuuuccguuc

SEQ ID NO: 31459 - DNA, 21 bp, homo sapiens
taagttctgaaaggcaagagc

SEQ ID NO: 31460 - RNA, 21 nt, RNAi
aguucugaaaggcaagagcuu

SEQ ID NO: 31461 - RNA, 21 nt, RNAi
uuucaagacuuuccguucucg

SEQ ID NO: 31462 - DNA, 21 bp, homo sapiens
taggaagcagtatttgtcaga

SEQ ID NO: 31463 - RNA, 21 nt, RNAi
ggaagcaguauuugucagauu

SEQ ID NO: 31464 - RNA, 21 nt, RNAi
uuccuucgucauaaacagucu

SEQ ID NO: 31465 - DNA, 21 bp, homo sapiens
tagcacgactccagctacaag

SEQ ID NO: 31466 - RNA, 21 nt, RNAi
gcacgacuccagcuacaaguu

SEQ ID NO: 31467 - RNA, 21 nt, RNAi
uucgugcugaggucgauguuc

SEQ ID NO: 31468 - DNA, 21 bp, homo sapiens
tacaaggtctggacttaagtt

SEQ ID NO: 31469 - RNA, 21 nt, RNAi
caaggucuggacuuaaguuuu

SEQ ID NO: 31470 - RNA, 21 nt, RNAi
uuguuccagaccugaauucaa

SEQ ID NO: 31471 - DNA, 21 bp, homo sapiens
taagttctcggtctttgcttg

SEQ ID NO: 31472 - RNA, 21 nt, RNAi
aguucucggucuuugcuuguu

SEQ ID NO: 31473 - RNA, 21 nt, RNAi
uuucaagagccagaaacgaac

SEQ ID NO: 31474 - DNA, 21 bp, homo sapiens
tattcaaggccgaaatgagag

SEQ ID NO: 31475 - RNA, 21 nt, RNAi
uucaaggccgaaaugagaguu

SEQ ID NO: 31476 - RNA, 21 nt, RNAi
uuaaguuccggcuuuacucuc

SEQ ID NO: 31477 - DNA, 21 bp, homo sapiens
tacttcagaaactacagaaag

SEQ ID NO: 31478 - RNA, 21 nt, RNAi
cuucagaaacuacagaaaguu

SEQ ID NO: 31479 - RNA, 21 nt, RNAi
uugaagucuuugaugucuuuc

SEQ ID NO: 31480 - DNA, 21 bp, homo sapiens
tacagaaagaacaccaaagca

SEQ ID NO: 31481 - RNA, 21 nt, RNAi
cagaaagaacaccaaagcauu

SEQ ID NO: 31482 - RNA, 21 nt, RNAi
uugucuuucuugugguuucgu

SEQ ID NO: 31483 - DNA, 21 bp, homo sapiens
taaagatgctcagcaggacct

SEQ ID NO: 31484 - RNA, 21 nt, RNAi
aagaugcucagcaggaccuuu

SEQ ID NO: 31485 - RNA, 21 nt, RNAi
uuuucuacgagucguccugga

SEQ ID NO: 31486 - DNA, 21 bp, homo sapiens
taactgagactggtgcagtga

SEQ ID NO: 31487 - RNA, 21 nt, RNAi
acugagacuggugcagugauu

SEQ ID NO: 31488 - RNA, 21 nt, RNAi
uuugacucugaccacgucacu

SEQ ID NO: 31489 - DNA, 21 bp, homo sapiens
taccaattatgagcctccagg

SEQ ID NO: 31490 - RNA, 21 nt, RNAi
ccaauuaugagccuccagguu

SEQ ID NO: 31491 - RNA, 21 nt, RNAi
uugguuaauacucggaggucc

SEQ ID NO: 31492 - DNA, 21 bp, homo sapiens
taatgctttggtacctatgga

SEQ ID NO: 31493 - RNA, 21 nt, RNAi
augcuuugguaccuauggauu

SEQ ID NO: 31494 - RNA, 21 nt, RNAi
uuuacgaaaccauggauaccu

SEQ ID NO: 31495 - DNA, 21 bp, homo sapiens
tatccataatcttcaactgcg

SEQ ID NO: 31496 - RNA, 21 nt, RNAi
uccauaaucuucaacugcguu

SEQ ID NO: 31497 - RNA, 21 nt, RNAi
uuagguauuagaaguugacgc

SEQ ID NO: 31498 - DNA, 21 bp, homo sapiens
tacttcatgtgatagaggacc

SEQ ID NO: 31499 - RNA, 21 nt, RNAi
cuucaugugauagaggaccuu

SEQ ID NO: 31500 - RNA, 21 nt, RNAi
uugaaguacacuaucuccugg

SEQ ID NO: 31501 - DNA, 21 bp, homo sapiens
tacaggaggtacaactaatga

SEQ ID NO: 31502 - RNA, 21 nt, RNAi
caggagguacaacuaaugauu

SEQ ID NO: 31503 - RNA, 21 nt, RNAi
uuguccuccauguugauuacu

SEQ ID NO: 31504 - DNA, 21 bp, homo sapiens
tactccagagagtagaaactt

SEQ ID NO: 31505 - RNA, 21 nt, RNAi
cuccagagaguagaaacuuuu

SEQ ID NO: 31506 - RNA, 21 nt, RNAi
uugaggucucucaucuuugaa

SEQ ID NO: 31507 - DNA, 21 bp, homo sapiens
tagaaacttctgaaggcctca

SEQ ID NO: 31508 - RNA, 21 nt, RNAi
gaaacuucugaaggccucauu

SEQ ID NO: 31509 - RNA, 21 nt, RNAi
uucuuugaagacuuccggagu

SEQ ID NO: 31510 - DNA, 21 bp, homo sapiens
tattggagataatgtggccaa

SEQ ID NO: 31511 - RNA, 21 nt, RNAi
uuggagauaauguggccaauu

SEQ ID NO: 31512 - RNA, 21 nt, RNAi
uuaaccucuauuacaccgguu

SEQ ID NO: 31513 - DNA, 21 bp, homo sapiens
taatgtggccaaggtgaatga

SEQ ID NO: 31514 - RNA, 21 nt, RNAi
auguggccaaggugaaugauu

SEQ ID NO: 31515 - RNA, 21 nt, RNAi
uuuacaccgguuccacuuacu

SEQ ID NO: 31516 - DNA, 21 bp, homo sapiens
taggatcagatcggagaaagc

SEQ ID NO: 31517 - RNA, 21 nt, RNAi
ggaucagaucggagaaagcuu

SEQ ID NO: 31518 - RNA, 21 nt, RNAi
uuccuagucuagccucuuucg

SEQ ID NO: 31519 - DNA, 21 bp, homo sapiens
tacctggaggctgacttagag

SEQ ID NO: 31520 - RNA, 21 nt, RNAi
ccuggaggcugacuuagaguu

SEQ ID NO: 31521 - RNA, 21 nt, RNAi
uuggaccuccgacugaaucuc

SEQ ID NO: 31522 - DNA, 21 bp, homo sapiens
tagaggtagttcaaacagaga

SEQ ID NO: 31523 - RNA, 21 nt, RNAi
gagguaguucaaacagagauu

SEQ ID NO: 31524 - RNA, 21 nt, RNAi
uucuccaucaaguuugucucu

SEQ ID NO: 31525 - DNA, 21 bp, homo sapiens
tagttcaaacagagaagctat

SEQ ID NO: 31526 - RNA, 21 nt, RNAi
guucaaacagagaagcuauuu

SEQ ID NO: 31527 - RNA, 21 nt, RNAi
uucaaguuugucucuucgaua

SEQ ID NO: 31528 - DNA, 21 bp, homo sapiens
taagcagaaggttattgtctg

SEQ ID NO: 31529 - RNA, 21 nt, RNAi
agcagaagguuauugucuguu

SEQ ID NO: 31530 - RNA, 21 nt, RNAi
uuucgucuuccaauaacagac

SEQ ID NO: 31531 - DNA, 21 bp, homo sapiens
tattgtctgccttgaagaaga

SEQ ID NO: 31532 - RNA, 21 nt, RNAi
uugucugccuugaagaagauu

SEQ ID NO: 31533 - RNA, 21 nt, RNAi
uuaacagacggaacuucuucu

SEQ ID NO: 31534 - DNA, 21 bp, homo sapiens
taaggataaagttgagaacct

SEQ ID NO: 31535 - RNA, 21 nt, RNAi
aggauaaaguugagaaccuuu

SEQ ID NO: 31536 - RNA, 21 nt, RNAi
uuuccuauuucaacucuugga

SEQ ID NO: 31537 - DNA, 21 bp, homo sapiens
taaagttgagaaccttgaaag

SEQ ID NO: 31538 - RNA, 21 nt, RNAi
aaguugagaaccuugaaaguu

SEQ ID NO: 31539 - RNA, 21 nt, RNAi
uuuucaacucuuggaacuuuc

SEQ ID NO: 31540 - DNA, 21 bp, homo sapiens
tagtgattcttgatgccgaga

SEQ ID NO: 31541 - RNA, 21 nt, RNAi
gugauucuugaugccgagauu

SEQ ID NO: 31542 - RNA, 21 nt, RNAi
uucacuaagaacuacggcucu

SEQ ID NO: 31543 - DNA, 21 bp, homo sapiens
tagaagagatggccagaagcc

SEQ ID NO: 31544 - RNA, 21 nt, RNAi
gaagagauggccagaagccuu

SEQ ID NO: 31545 - RNA, 21 nt, RNAi
uucuucucuaccggucuucgg

SEQ ID NO: 31546 - DNA, 21 bp, homo sapiens
tagaccttgtcacgttaaggt

SEQ ID NO: 31547 - RNA, 21 nt, RNAi
gaccuugucacguuaagguuu

SEQ ID NO: 31548 - RNA, 21 nt, RNAi
uucuggaacagugcaauucca

SEQ ID NO: 31549 - DNA, 21 bp, homo sapiens
tagacaagttactctcttcat

SEQ ID NO: 31550 - RNA, 21 nt, RNAi
gacaaguuacucucuucauuu

SEQ ID NO: 31551 - RNA, 21 nt, RNAi
uucuguucaaugagagaagua

SEQ ID NO: 31552 - DNA, 21 bp, homo sapiens
taaaggagctaaatgaggcag

SEQ ID NO: 31553 - RNA, 21 nt, RNAi
aaggagcuaaaugaggcaguu

SEQ ID NO: 31554 - RNA, 21 nt, RNAi
uuuuccucgauuuacuccguc

SEQ ID NO: 31555 - DNA, 21 bp, homo sapiens
taaatgaggcagtagcagcct

SEQ ID NO: 31556 - RNA, 21 nt, RNAi
aaugaggcaguagcagccuuu

SEQ ID NO: 31557 - RNA, 21 nt, RNAi
uuuuacuccgucaucgucgga

SEQ ID NO: 31558 - DNA, 21 bp, homo sapiens
tagcagccttgtgtggtgacc

SEQ ID NO: 31559 - RNA, 21 nt, RNAi
gcagccuuguguggugaccuu

SEQ ID NO: 31560 - RNA, 21 nt, RNAi
uucgucggaacacaccacugg

SEQ ID NO: 31561 - DNA, 21 bp, homo sapiens
tatgaaggccacagaacagag

SEQ ID NO: 31562 - RNA, 21 nt, RNAi
ugaaggccacagaacagaguu

SEQ ID NO: 31563 - RNA, 21 nt, RNAi
uuacuuccggugucuugucuc

SEQ ID NO: 31564 - DNA, 21 bp, homo sapiens
tagaggaagagcatcagctga

SEQ ID NO: 31565 - RNA, 21 nt, RNAi
gaggaagagcaucagcugauu

SEQ ID NO: 31566 - RNA, 21 nt, RNAi
uucuccuucucguagucgacu

SEQ ID NO: 31567 - DNA, 21 bp, homo sapiens
tacaacaactgaaggaaagtg

SEQ ID NO: 31568 - RNA, 21 nt, RNAi
caacaacugaaggaaaguguu

SEQ ID NO: 31569 - RNA, 21 nt, RNAi
uuguuguugacuuccuuucac

SEQ ID NO: 31570 - DNA, 21 bp, homo sapiens
tagagtggagaaccttgaaag

SEQ ID NO: 31571 - RNA, 21 nt, RNAi
gaguggagaaccuugaaaguu

SEQ ID NO: 31572 - RNA, 21 nt, RNAi
uucucaccucuuggaacuuuc

SEQ ID NO: 31573 - DNA, 21 bp, homo sapiens
tagagatagccaggacaaacc

SEQ ID NO: 31574 - RNA, 21 nt, RNAi
gagauagccaggacaaaccuu

SEQ ID NO: 31575 - RNA, 21 nt, RNAi
uucucuaucgguccuguuugg

SEQ ID NO: 31576 - DNA, 21 bp, homo sapiens
tagccaggacaaaccaagagc

SEQ ID NO: 31577 - RNA, 21 nt, RNAi
gccaggacaaaccaagagcuu

SEQ ID NO: 31578 - RNA, 21 nt, RNAi
uucgguccuguuugguucucg

SEQ ID NO: 31579 - DNA, 21 bp, homo sapiens
taatgaccaagaagcctgtaa

SEQ ID NO: 31580 - RNA, 21 nt, RNAi
augaccaagaagccuguaauu

SEQ ID NO: 31581 - RNA, 21 nt, RNAi
uuuacugguucuucggacauu

SEQ ID NO: 31582 - DNA, 21 bp, homo sapiens
taaggccaaagagcagaatct

SEQ ID NO: 31583 - RNA, 21 nt, RNAi
aggccaaagagcagaaucuuu

SEQ ID NO: 31584 - RNA, 21 nt, RNAi
uuuccgguuucucgucuuaga

SEQ ID NO: 31585 - DNA, 21 bp, homo sapiens
tagtagtcaagtagagtgtct

SEQ ID NO: 31586 - RNA, 21 nt, RNAi
guagucaaguagagugucuuu

SEQ ID NO: 31587 - RNA, 21 nt, RNAi
uucaucaguucaucucacaga

SEQ ID NO: 31588 - DNA, 21 bp, homo sapiens
tagtcaagtagagtgtcttga

SEQ ID NO: 31589 - RNA, 21 nt, RNAi
gucaaguagagugucuugauu

SEQ ID NO: 31590 - RNA, 21 nt, RNAi
uucaguucaucucacagaacu

SEQ ID NO: 31591 - DNA, 21 bp, homo sapiens
tagagtgtcttgaacttgaga

SEQ ID NO: 31592 - RNA, 21 nt, RNAi
gagugucuugaacuugagauu

SEQ ID NO: 31593 - RNA, 21 nt, RNAi
uucucacagaacuugaacucu

SEQ ID NO: 31594 - DNA, 21 bp, homo sapiens
tacaaggccttgatgaggcca

SEQ ID NO: 31595 - RNA, 21 nt, RNAi
caaggccuugaugaggccauu

SEQ ID NO: 31596 - RNA, 21 nt, RNAi
uuguuccggaacuacuccggu

SEQ ID NO: 31597 - DNA, 21 bp, homo sapiens
tagaagatggcaagcagaaac

SEQ ID NO: 31598 - RNA, 21 nt, RNAi
gaagauggcaagcagaaacuu

SEQ ID NO: 31599 - RNA, 21 nt, RNAi
uucuucuaccguucgucuuug

SEQ ID NO: 31600 - DNA, 21 bp, homo sapiens
tagaactgagaaatctgacag

SEQ ID NO: 31601 - RNA, 21 nt, RNAi
gaacugagaaaucugacaguu

SEQ ID NO: 31602 - RNA, 21 nt, RNAi
uucuugacucuuuagacuguc

SEQ ID NO: 31603 - DNA, 21 bp, homo sapiens
tagaagtgctgcagagttctt

SEQ ID NO: 31604 - RNA, 21 nt, RNAi
gaagugcugcagaguucuuuu

SEQ ID NO: 31605 - RNA, 21 nt, RNAi
uucuucacgacgucucaagaa

SEQ ID NO: 31606 - DNA, 21 bp, homo sapiens
tacaagaatctagagaatgag

SEQ ID NO: 31607 - RNA, 21 nt, RNAi
caagaaucuagagaaugaguu

SEQ ID NO: 31608 - RNA, 21 nt, RNAi
uuguucuuagaucucuuacuc

SEQ ID NO: 31609 - DNA, 21 bp, homo sapiens
tagagaatgagcttgaattga

SEQ ID NO: 31610 - RNA, 21 nt, RNAi
gagaaugagcuugaauugauu

SEQ ID NO: 31611 - RNA, 21 nt, RNAi
uucucuuacucgaacuuaacu

SEQ ID NO: 31612 - DNA, 21 bp, homo sapiens
taggctagctggagagttgca

SEQ ID NO: 31613 - RNA, 21 nt, RNAi
ggcuagcuggagaguugcauu

SEQ ID NO: 31614 - RNA, 21 nt, RNAi
uuccgaucgaccucucaacgu

SEQ ID NO: 31615 - DNA, 21 bp, homo sapiens
tagctggagagttgcagttac

SEQ ID NO: 31616 - RNA, 21 nt, RNAi
gcuggagaguugcaguuacuu

SEQ ID NO: 31617 - RNA, 21 nt, RNAi
uucgaccucucaacgucaaug

SEQ ID NO: 31618 - DNA, 21 bp, homo sapiens
taaagagcagcaaagatcaat

SEQ ID NO: 31619 - RNA, 21 nt, RNAi
aagagcagcaaagaucaauuu

SEQ ID NO: 31620 - RNA, 21 nt, RNAi
uuuucucgucguuucuaguua

SEQ ID NO: 31621 - DNA, 21 bp, homo sapiens
tagtgaattgaagaagagcct

SEQ ID NO: 31622 - RNA, 21 nt, RNAi
gugaauugaagaagagccuuu

SEQ ID NO: 31623 - RNA, 21 nt, RNAi
uucacuuaacuucuucucgga

SEQ ID NO: 31624 - DNA, 21 bp, homo sapiens
tagattgcatgcacaaagacc

SEQ ID NO: 31625 - RNA, 21 nt, RNAi
gauugcaugcacaaagaccuu

SEQ ID NO: 31626 - RNA, 21 nt, RNAi
uucuaacguacguguuucugg

SEQ ID NO: 31627 - DNA, 21 bp, homo sapiens
tagctgaatatcagctacggc

SEQ ID NO: 31628 - RNA, 21 nt, RNAi
gcugaauaucagcuacggcuu

SEQ ID NO: 31629 - RNA, 21 nt, RNAi
uucgacuuauagucgaugccg

SEQ ID NO: 31630 - DNA, 21 bp, homo sapiens
tatcagctacggcttcatgaa

SEQ ID NO: 31631 - RNA, 21 nt, RNAi
ucagcuacggcuucaugaauu

SEQ ID NO: 31632 - RNA, 21 nt, RNAi
uuagucgaugccgaaguacuu

SEQ ID NO: 31633 - DNA, 21 bp, homo sapiens
tacggcttcatgaagctgaaa

SEQ ID NO: 31634 - RNA, 21 nt, RNAi
cggcuucaugaagcugaaauu

SEQ ID NO: 31635 - RNA, 21 nt, RNAi
uugccgaaguacuucgacuuu

SEQ ID NO: 31636 - DNA, 21 bp, homo sapiens
tatgaagtagaaatccagaca

SEQ ID NO: 31637 - RNA, 21 nt, RNAi
ugaaguagaaauccagacauu

SEQ ID NO: 31638 - RNA, 21 nt, RNAi
uuacuucaucuuuaggucugu

SEQ ID NO: 31639 - DNA, 21 bp, homo sapiens
tagaaatccagacataccaag

SEQ ID NO: 31640 - RNA, 21 nt, RNAi
gaaauccagacauaccaaguu

SEQ ID NO: 31641 - RNA, 21 nt, RNAi
uucuuuaggucuguaugguuc

SEQ ID NO: 31642 - DNA, 21 bp, homo sapiens
taccaagagaaattgacttct

SEQ ID NO: 31643 - RNA, 21 nt, RNAi
ccaagagaaauugacuucuuu

SEQ ID NO: 31644 - RNA, 21 nt, RNAi
uugguucucuuuaacugaaga

SEQ ID NO: 31645 - DNA, 21 bp, homo sapiens
taaagaagaatgtctcagttc

SEQ ID NO: 31646 - RNA, 21 nt, RNAi
aagaagaaugucucaguucuu

SEQ ID NO: 31647 - RNA, 21 nt, RNAi
uuuucuucuuacagagucaag

SEQ ID NO: 31648 - DNA, 21 bp, homo sapiens
taaagtctagtaaagaagagc

SEQ ID NO: 31649 - RNA, 21 nt, RNAi
aagucuaguaaagaagagcuu

SEQ ID NO: 31650 - RNA, 21 nt, RNAi
uuuucagaucauuucuucucg

SEQ ID NO: 31651 - DNA, 21 bp, homo sapiens
tactgcagaaagaactctctc

SEQ ID NO: 31652 - RNA, 21 nt, RNAi
cugcagaaagaacucucucuu

SEQ ID NO: 31653 - RNA, 21 nt, RNAi
uugacgucuuucuugagagag

SEQ ID NO: 31654 - DNA, 21 bp, homo sapiens
tactgttatggataccaaggt

SEQ ID NO: 31655 - RNA, 21 nt, RNAi
cuguuauggauaccaagguuu

SEQ ID NO: 31656 - RNA, 21 nt, RNAi
uugacaauaccuaugguucca

SEQ ID NO: 31657 - DNA, 21 bp, homo sapiens
tatggataccaaggtcgatga

SEQ ID NO: 31658 - RNA, 21 nt, RNAi
uggauaccaaggucgaugauu

SEQ ID NO: 31659 - RNA, 21 nt, RNAi
uuaccuaugguuccagcuacu

SEQ ID NO: 31660 - DNA, 21 bp, homo sapiens
taccaaggtcgatgaattaac

SEQ ID NO: 31661 - RNA, 21 nt, RNAi
ccaaggucgaugaauuaacuu

SEQ ID NO: 31662 - RNA, 21 nt, RNAi
uugguuccagcuacuuaauug

SEQ ID NO: 31663 - DNA, 21 bp, homo sapiens
taacaactgagatcaaagaac

SEQ ID NO: 31664 - RNA, 21 nt, RNAi
acaacugagaucaaagaacuu

SEQ ID NO: 31665 - RNA, 21 nt, RNAi
uuuguugacucuaguuucuug

SEQ ID NO: 31666 - DNA, 21 bp, homo sapiens
tacttggataagtactgttcc

SEQ ID NO: 31667 - RNA, 21 nt, RNAi
cuuggauaaguacuguuccuu

SEQ ID NO: 31668 - RNA, 21 nt, RNAi
uugaaccuauucaugacaagg

SEQ ID NO: 31669 - DNA, 21 bp, homo sapiens
taagtactgttccttgcttat

SEQ ID NO: 31670 - RNA, 21 nt, RNAi
aguacuguuccuugcuuauuu

SEQ ID NO: 31671 - RNA, 21 nt, RNAi
uuucaugacaaggaacgaaua

SEQ ID NO: 31672 - DNA, 21 bp, homo sapiens
tactgttccttgcttataagc

SEQ ID NO: 31673 - RNA, 21 nt, RNAi
cuguuccuugcuuauaagcuu

SEQ ID NO: 31674 - RNA, 21 nt, RNAi
uugacaaggaacgaauauucg

SEQ ID NO: 31675 - DNA, 21 bp, homo sapiens
tagagaaagctaaagagatgt

SEQ ID NO: 31676 - RNA, 21 nt, RNAi
gagaaagcuaaagagauguuu

SEQ ID NO: 31677 - RNA, 21 nt, RNAi
uucucuuucgauuucucuaca

SEQ ID NO: 31678 - DNA, 21 bp, homo sapiens
taaagagatgttagagacaca

SEQ ID NO: 31679 - RNA, 21 nt, RNAi
aagagauguuagagacacauu

SEQ ID NO: 31680 - RNA, 21 nt, RNAi
uuuucucuacaaucucugugu

SEQ ID NO: 31681 - DNA, 21 bp, homo sapiens
taggtccagttgttccaggac

SEQ ID NO: 31682 - RNA, 21 nt, RNAi
gguccaguuguuccaggacuu

SEQ ID NO: 31683 - RNA, 21 nt, RNAi
uuccaggucaacaagguccug

SEQ ID NO: 31684 - DNA, 21 bp, homo sapiens
taaagcttcaggcaagaggca

SEQ ID NO: 31685 - RNA, 21 nt, RNAi
aagcuucaggcaagaggcauu

SEQ ID NO: 31686 - RNA, 21 nt, RNAi
uuuucgaaguccguucuccgu

SEQ ID NO: 31687 - DNA, 21 bp, homo sapiens
tagaggaccaacacctgctac

SEQ ID NO: 31688 - RNA, 21 nt, RNAi
gaggaccaacaccugcuacuu

SEQ ID NO: 31689 - RNA, 21 nt, RNAi
uucuccugguuguggacgaug

SEQ ID NO: 31690 - DNA, 21 bp, homo sapiens
tatatcctgcgaagaacaacc

SEQ ID NO: 31691 - RNA, 21 nt, RNAi
uauccugcgaagaacaaccuu

SEQ ID NO: 31692 - RNA, 21 nt, RNAi
uuauaggacgcuucuuguugg

SEQ ID NO: 31693 - DNA, 21 bp, homo sapiens
tatcctgcgaagaacaaccat

SEQ ID NO: 31694 - RNA, 21 nt, RNAi
uccugcgaagaacaaccauuu

SEQ ID NO: 31695 - RNA, 21 nt, RNAi
uuaggacgcuucuuguuggua

SEQ ID NO: 31696 - DNA, 21 bp, homo sapiens
tagattcaggcaccatcctcc

SEQ ID NO: 31697 - RNA, 21 nt, RNAi
gauucaggcaccauccuccuu

SEQ ID NO: 31698 - RNA, 21 nt, RNAi
uucuaaguccgugguaggagg

SEQ ID NO: 31699 - DNA, 21 bp, homo sapiens
taatcttcctgagagaagtcc

SEQ ID NO: 31700 - RNA, 21 nt, RNAi
aucuuccugagagaaguccuu

SEQ ID NO: 31701 - RNA, 21 nt, RNAi
uuuagaaggacucucuucagg

SEQ ID NO: 31702 - DNA, 21 bp, homo sapiens
taaggtccagtgaaggcactt

SEQ ID NO: 31703 - RNA, 21 nt, RNAi
agguccagugaaggcacuuuu

SEQ ID NO: 31704 - RNA, 21 nt, RNAi
uuuccaggucacuuccgugaa

SEQ ID NO: 31705 - DNA, 21 bp, homo sapiens
tagataaggctgtgcctacag

SEQ ID NO: 31706 - RNA, 21 nt, RNAi
gauaaggcugugccuacaguu

SEQ ID NO: 31707 - RNA, 21 nt, RNAi
uucuauuccgacacggauguc

SEQ ID NO: 31708 - DNA, 21 bp, homo sapiens
taaggctgtgcctacaggact

SEQ ID NO: 31709 - RNA, 21 nt, RNAi
aggcugugccuacaggacuuu

SEQ ID NO: 31710 - RNA, 21 nt, RNAi
uuuccgacacggauguccuga

SEQ ID NO: 31711 - DNA, 21 bp, homo sapiens
tacaggacttctctttagtca

SEQ ID NO: 31712 - RNA, 21 nt, RNAi
caggacuucucuuuagucauu

SEQ ID NO: 31713 - RNA, 21 nt, RNAi
uuguccugaagagaaaucagu

SEQ ID NO: 31714 - DNA, 21 bp, homo sapiens
tattgtactctttagatctcc

SEQ ID NO: 31715 - RNA, 21 nt, RNAi
uuguacucuuuagaucuccuu

SEQ ID NO: 31716 - RNA, 21 nt, RNAi
uuaacaugagaaaucuagagg

SEQ ID NO: 31717 - DNA, 21 bp, homo sapiens
tagcattgccattcctctact

SEQ ID NO: 31718 - RNA, 21 nt, RNAi
gcauugccauuccucuacuuu

SEQ ID NO: 31719 - RNA, 21 nt, RNAi
uucguaacgguaaggagauga

SEQ ID NO: 31720 - DNA, 21 bp, homo sapiens
taattaacagctcctaggaaa

SEQ ID NO: 31721 - RNA, 21 nt, RNAi
auuaacagcuccuaggaaauu

SEQ ID NO: 31722 - RNA, 21 nt, RNAi
uuuaauugucgaggauccuuu

SEQ ID NO: 31723 - DNA, 21 bp, homo sapiens
tattctatctgtagtatgagg

SEQ ID NO: 31724 - RNA, 21 nt, RNAi
uucuaucuguaguaugagguu

SEQ ID NO: 31725 - RNA, 21 nt, RNAi
uuaagauagacaucauacucc

SEQ ID NO: 31726 - DNA, 21 bp, homo sapiens
tatctgtagtatgaggcatgg

SEQ ID NO: 31727 - RNA, 21 nt, RNAi
ucuguaguaugaggcaugguu

SEQ ID NO: 31728 - RNA, 21 nt, RNAi
uuagacaucauacuccguacc

SEQ ID NO: 31729 - DNA, 21 bp, homo sapiens
tagtatgaggcatggaatagt

SEQ ID NO: 31730 - RNA, 21 nt, RNAi
guaugaggcauggaauaguuu

SEQ ID NO: 31731 - RNA, 21 nt, RNAi
uucauacuccguaccuuauca

SEQ ID NO: 31732 - DNA, 21 bp, homo sapiens
tacatgtaggagtgtttatct

SEQ ID NO: 31733 - RNA, 21 nt, RNAi
cauguaggaguguuuaucuuu

SEQ ID NO: 31734 - RNA, 21 nt, RNAi
uuguacauccucacaaauaga

SEQ ID NO: 31735 - DNA, 21 bp, homo sapiens
taggagtgtttatctttctct

SEQ ID NO: 31736 - RNA, 21 nt, RNAi
ggaguguuuaucuuucucuuu

SEQ ID NO: 31737 - RNA, 21 nt, RNAi
uuccucacaaauagaaagaga

SEQ ID NO: 31738 - DNA, 21 bp, homo sapiens
tatgaaacctgtacatatgtg

SEQ ID NO: 31739 - RNA, 21 nt, RNAi
ugaaaccuguacauauguguu

SEQ ID NO: 31740 - RNA, 21 nt, RNAi
uuacuuuggacauguauacac

SEQ ID NO: 31741 - DNA, 21 bp, homo sapiens
tatgtgtttatttccagtgag

SEQ ID NO: 31742 - RNA, 21 nt, RNAi
uguguuuauuuccagugaguu

SEQ ID NO: 31743 - RNA, 21 nt, RNAi
uuacacaaauaaaggucacuc

SEQ ID NO: 31744 - DNA, 21 bp, homo sapiens
tagaggtgtgctataccatgc

SEQ ID NO: 31745 - RNA, 21 nt, RNAi
gaggugugcuauaccaugcuu

SEQ ID NO: 31746 - RNA, 21 nt, RNAi
uucuccacacgauaugguacg

SEQ ID NO: 31747 - DNA, 21 bp, homo sapiens
tataccatgcgtctgtcgttg

SEQ ID NO: 31748 - RNA, 21 nt, RNAi
uaccaugcgucugucguuguu

SEQ ID NO: 31749 - RNA, 21 nt, RNAi
uuaugguacgcagacagcaac

SEQ ID NO: 31750 - DNA, 21 bp, homo sapiens
taccatgcgtctgtcgttgtg

SEQ ID NO: 31751 - RNA, 21 nt, RNAi
ccaugcgucugucguuguguu

SEQ ID NO: 31752 - RNA, 21 nt, RNAi
uugguacgcagacagcaacac

SEQ ID NO: 31753 - DNA, 21 bp, homo sapiens
tacagttctttggtaagcatt

SEQ ID NO: 31754 - RNA, 21 nt, RNAi
caguucuuugguaagcauuuu

SEQ ID NO: 31755 - RNA, 21 nt, RNAi
uugucaagaaaccauucguaa

SEQ ID NO: 31756 - DNA, 21 bp, homo sapiens
taagcattgtcgtatctggtg

SEQ ID NO: 31757 - RNA, 21 nt, RNAi
agcauugucguaucugguguu

SEQ ID NO: 31758 - RNA, 21 nt, RNAi
uuucguaacagcauagaccac

SEQ ID NO: 31759 - DNA, 21 bp, homo sapiens
tatctggtgatggattaacat

SEQ ID NO: 31760 - RNA, 21 nt, RNAi
ucuggugauggauuaacauuu

SEQ ID NO: 31761 - RNA, 21 nt, RNAi
uuagaccacuaccuaauugua

SEQ ID NO: 31762 - DNA, 21 bp, homo sapiens
aaactggaacaggaacttaaa

SEQ ID NO: 31763 - RNA, 21 nt, RNAi
acuggaacaggaacuuaaauu

SEQ ID NO: 31764 - RNA, 21 nt, RNAi
uuugaccuuguccuugaauuu

SEQ ID NO: 31765 - DNA, 21 bp, homo sapiens
aatccatgcaatacaccacaa

SEQ ID NO: 31766 - RNA, 21 nt, RNAi
uccaugcaauacaccacaauu

SEQ ID NO: 31767 - RNA, 21 nt, RNAi
uuagguacguuaugugguguu

SEQ ID NO: 31768 - DNA, 21 bp, homo sapiens
aaagaactccaattaggagag

SEQ ID NO: 31769 - RNA, 21 nt, RNAi
agaacuccaauuaggagaguu

SEQ ID NO: 31770 - RNA, 21 nt, RNAi
uuucuugagguuaauccucuc

SEQ ID NO: 31771 - DNA, 21 bp, homo sapiens
aagaactccaattaggagaga

SEQ ID NO: 31772 - RNA, 21 nt, RNAi
gaacuccaauuaggagagauu

SEQ ID NO: 31773 - RNA, 21 nt, RNAi
uucuugagguuaauccucucu

SEQ ID NO: 31774 - DNA, 21 bp, homo sapiens
aactccaattaggagagattt

SEQ ID NO: 31775 - RNA, 21 nt, RNAi
cuccaauuaggagagauuuuu

SEQ ID NO: 31776 - RNA, 21 nt, RNAi
uugagguuaauccucucuaaa

SEQ ID NO: 31777 - DNA, 21 bp, homo sapiens
aagaggtgactccaagtcgat

SEQ ID NO: 31778 - RNA, 21 nt, RNAi
gaggugacuccaagucgauuu

SEQ ID NO: 31779 - RNA, 21 nt, RNAi
uucuccacugagguucagcua

SEQ ID NO: 31780 - DNA, 21 bp, homo sapiens
aagtcgatcaactttgcaaat

SEQ ID NO: 31781 - RNA, 21 nt, RNAi
gucgaucaacuuugcaaauuu

SEQ ID NO: 31782 - RNA, 21 nt, RNAi
uucagcuaguugaaacguuua

SEQ ID NO: 31783 - DNA, 21 bp, homo sapiens
aattctagcagtcctcatctt

SEQ ID NO: 31784 - RNA, 21 nt, RNAi
uucuagcaguccucaucuuuu

SEQ ID NO: 31785 - RNA, 21 nt, RNAi
uuaagaucgucaggaguagaa

SEQ ID NO: 31786 - DNA, 21 bp, homo sapiens
aatgagttggaactacgcctg

SEQ ID NO: 31787 - RNA, 21 nt, RNAi
ugaguuggaacuacgccuguu

SEQ ID NO: 31788 - RNA, 21 nt, RNAi
uuacucaaccuugaugcggac

SEQ ID NO: 31789 - DNA, 21 bp, homo sapiens
aaaggccaagtgaataagttt

SEQ ID NO: 31790 - RNA, 21 nt, RNAi
aggccaagugaauaaguuuuu

SEQ ID NO: 31791 - RNA, 21 nt, RNAi
uuuccgguucacuuauucaaa

SEQ ID NO: 31792 - DNA, 21 bp, homo sapiens
aacaacagcacaatacgacca

SEQ ID NO: 31793 - RNA, 21 nt, RNAi
caacagcacaauacgaccauu

SEQ ID NO: 31794 - RNA, 21 nt, RNAi
uuguugucguguuaugcuggu

SEQ ID NO: 31795 - DNA, 21 bp, homo sapiens
aaattgacggaagatttgagt

SEQ ID NO: 31796 - RNA, 21 nt, RNAi
auugacggaagauuugaguuu

SEQ ID NO: 31797 - RNA, 21 nt, RNAi
uuuaacugccuucuaaacuca

SEQ ID NO: 31798 - DNA, 21 bp, homo sapiens
aattgacggaagatttgagtt

SEQ ID NO: 31799 - RNA, 21 nt, RNAi
uugacggaagauuugaguuuu

SEQ ID NO: 31800 - RNA, 21 nt, RNAi
uuaacugccuucuaaacucaa

SEQ ID NO: 31801 - DNA, 21 bp, homo sapiens
aagatttgagttgtcagcgac

SEQ ID NO: 31802 - RNA, 21 nt, RNAi
gauuugaguugucagcgacuu

SEQ ID NO: 31803 - RNA, 21 nt, RNAi
uucuaaacucaacagucgcug

SEQ ID NO: 31804 - DNA, 21 bp, homo sapiens
aagaatatgcacaacgtcctg

SEQ ID NO: 31805 - RNA, 21 nt, RNAi
gaauaugcacaacguccuguu

SEQ ID NO: 31806 - RNA, 21 nt, RNAi
uucuuauacguguugcaggac

SEQ ID NO: 31807 - DNA, 21 bp, homo sapiens
aatatgcacaacgtcctgcag

SEQ ID NO: 31808 - RNA, 21 nt, RNAi
uaugcacaacguccugcaguu

SEQ ID NO: 31809 - RNA, 21 nt, RNAi
uuauacguguugcaggacguc

SEQ ID NO: 31810 - DNA, 21 bp, homo sapiens
aaacaacctccttaagagtca

SEQ ID NO: 31811 - RNA, 21 nt, RNAi
acaaccuccuuaagagucauu

SEQ ID NO: 31812 - RNA, 21 nt, RNAi
uuuguuggaggaauucucagu

SEQ ID NO: 31813 - DNA, 21 bp, homo sapiens
aacaacctccttaagagtcac

SEQ ID NO: 31814 - RNA, 21 nt, RNAi
caaccuccuuaagagucacuu

SEQ ID NO: 31815 - RNA, 21 nt, RNAi
uuguuggaggaauucucagug

SEQ ID NO: 31816 - DNA, 21 bp, homo sapiens
aaagcgaagaatacctctcag

SEQ ID NO: 31817 - RNA, 21 nt, RNAi
agcgaagaauaccucucaguu

SEQ ID NO: 31818 - RNA, 21 nt, RNAi
uuucgcuucuuauggagaguc

SEQ ID NO: 31819 - DNA, 21 bp, homo sapiens
aagcgaagaatacctctcagg

SEQ ID NO: 31820 - RNA, 21 nt, RNAi
gcgaagaauaccucucagguu

SEQ ID NO: 31821 - RNA, 21 nt, RNAi
uucgcuucuuauggagagucc

SEQ ID NO: 31822 - DNA, 21 bp, homo sapiens
aagaatacctctcaggaaacc

SEQ ID NO: 31823 - RNA, 21 nt, RNAi
gaauaccucucaggaaaccuu

SEQ ID NO: 31824 - RNA, 21 nt, RNAi
uucuuauggagaguccuuugg

SEQ ID NO: 31825 - DNA, 21 bp, homo sapiens
aaccatgttaagagatcttca

SEQ ID NO: 31826 - RNA, 21 nt, RNAi
ccauguuaagagaucuucauu

SEQ ID NO: 31827 - RNA, 21 nt, RNAi
uugguacaauucucuagaagu

SEQ ID NO: 31828 - DNA, 21 bp, homo sapiens
aaagcagcgagattgttctca

SEQ ID NO: 31829 - RNA, 21 nt, RNAi
agcagcgagauuguucucauu

SEQ ID NO: 31830 - RNA, 21 nt, RNAi
uuucgucgcucuaacaagagu

SEQ ID NO: 31831 - DNA, 21 bp, homo sapiens
aagcagcgagattgttctcaa

SEQ ID NO: 31832 - RNA, 21 nt, RNAi
gcagcgagauuguucucaauu

SEQ ID NO: 31833 - RNA, 21 nt, RNAi
uucgucgcucuaacaagaguu

SEQ ID NO: 31834 - DNA, 21 bp, homo sapiens
aatacaacgagagagtaagaa

SEQ ID NO: 31835 - RNA, 21 nt, RNAi
uacaacgagagaguaagaauu

SEQ ID NO: 31836 - RNA, 21 nt, RNAi
uuauguugcucucucauucuu

SEQ ID NO: 31837 - DNA, 21 bp, homo sapiens
aacgagagagtaagaacgctg

SEQ ID NO: 31838 - RNA, 21 nt, RNAi
cgagagaguaagaacgcuguu

SEQ ID NO: 31839 - RNA, 21 nt, RNAi
uugcucucucauucuugcgac

SEQ ID NO: 31840 - DNA, 21 bp, homo sapiens
aaacctaagtgtcgagatcag

SEQ ID NO: 31841 - RNA, 21 nt, RNAi
accuaagugucgagaucaguu

SEQ ID NO: 31842 - RNA, 21 nt, RNAi
uuuggauucacagcucuaguc

SEQ ID NO: 31843 - DNA, 21 bp, homo sapiens
aacctaagtgtcgagatcaga

SEQ ID NO: 31844 - RNA, 21 nt, RNAi
ccuaagugucgagaucagauu

SEQ ID NO: 31845 - RNA, 21 nt, RNAi
uuggauucacagcucuagucu

SEQ ID NO: 31846 - DNA, 21 bp, homo sapiens
aagtgtcgagatcagaaacct

SEQ ID NO: 31847 - RNA, 21 nt, RNAi
gugucgagaucagaaaccuuu

SEQ ID NO: 31848 - RNA, 21 nt, RNAi
uucacagcucuagucuuugga

SEQ ID NO: 31849 - DNA, 21 bp, homo sapiens
aacgtgttagacagtaagtca

SEQ ID NO: 31850 - RNA, 21 nt, RNAi
cguguuagacaguaagucauu

SEQ ID NO: 31851 - RNA, 21 nt, RNAi
uugcacaaucugucauucagu

SEQ ID NO: 31852 - DNA, 21 bp, homo sapiens
aagcttcagttactgtcaaat

SEQ ID NO: 31853 - RNA, 21 nt, RNAi
gcuucaguuacugucaaauuu

SEQ ID NO: 31854 - RNA, 21 nt, RNAi
uucgaagucaaugacaguuua

SEQ ID NO: 31855 - DNA, 21 bp, homo sapiens
aatggacaaagaccggtgtta

SEQ ID NO: 31856 - RNA, 21 nt, RNAi
uggacaaagaccgguguuauu

SEQ ID NO: 31857 - RNA, 21 nt, RNAi
uuaccuguuucuggccacaau

SEQ ID NO: 31858 - DNA, 21 bp, homo sapiens
aagacttgcatgccgaatatg

SEQ ID NO: 31859 - RNA, 21 nt, RNAi
gacuugcaugccgaauauguu

SEQ ID NO: 31860 - RNA, 21 nt, RNAi
uucugaacguacggcuuauac

SEQ ID NO: 31861 - DNA, 21 bp, homo sapiens
aacaaggaagcatgccttcag

SEQ ID NO: 31862 - RNA, 21 nt, RNAi
caaggaagcaugccuucaguu

SEQ ID NO: 31863 - RNA, 21 nt, RNAi
uuguuccuucguacggaaguc

SEQ ID NO: 31864 - DNA, 21 bp, homo sapiens
aatgtcgtttagaagcagacc

SEQ ID NO: 31865 - RNA, 21 nt, RNAi
ugucguuuagaagcagaccuu

SEQ ID NO: 31866 - RNA, 21 nt, RNAi
uuacagcaaaucuucgucugg

SEQ ID NO: 31867 - DNA, 21 bp, homo sapiens
aagcagtgtgaagagttggtg

SEQ ID NO: 31868 - RNA, 21 nt, RNAi
gcagugugaagaguugguguu

SEQ ID NO: 31869 - RNA, 21 nt, RNAi
uucgucacacuucucaaccac

SEQ ID NO: 31870 - DNA, 21 bp, homo sapiens
aagtcagcgcattagtaagtt

SEQ ID NO: 31871 - RNA, 21 nt, RNAi
gucagcgcauuaguaaguuuu

SEQ ID NO: 31872 - RNA, 21 nt, RNAi
uucagucgcguaaucauucaa

SEQ ID NO: 31873 - DNA, 21 bp, homo sapiens
aatgcatccttaaatcaagag

SEQ ID NO: 31874 - RNA, 21 nt, RNAi
ugcauccuuaaaucaagaguu

SEQ ID NO: 31875 - RNA, 21 nt, RNAi
uuacguaggaauuuaguucuc

SEQ ID NO: 31876 - DNA, 21 bp, homo sapiens
aaccggaaatgcatatgagga

SEQ ID NO: 31877 - RNA, 21 nt, RNAi
ccggaaaugcauaugaggauu

SEQ ID NO: 31878 - RNA, 21 nt, RNAi
uuggccuuuacguauacuccu

SEQ ID NO: 31879 - DNA, 21 bp, homo sapiens
aatgcatatgaggatcttagt

SEQ ID NO: 31880 - RNA, 21 nt, RNAi
ugcauaugaggaucuuaguuu

SEQ ID NO: 31881 - RNA, 21 nt, RNAi
uuacguauacuccuagaauca

SEQ ID NO: 31882 - DNA, 21 bp, homo sapiens
aatgcttgctaaatgaatgca

SEQ ID NO: 31883 - RNA, 21 nt, RNAi
ugcuugcuaaaugaaugcauu

SEQ ID NO: 31884 - RNA, 21 nt, RNAi
uuacgaacgauuuacuuacgu

SEQ ID NO: 31885 - DNA, 21 bp, homo sapiens
aaacaattctaagagcgaggc

SEQ ID NO: 31886 - RNA, 21 nt, RNAi
acaauucuaagagcgaggcuu

SEQ ID NO: 31887 - RNA, 21 nt, RNAi
uuuguuaagauucucgcuccg

SEQ ID NO: 31888 - DNA, 21 bp, homo sapiens
aacaattctaagagcgaggct

SEQ ID NO: 31889 - RNA, 21 nt, RNAi
caauucuaagagcgaggcuuu

SEQ ID NO: 31890 - RNA, 21 nt, RNAi
uuguuaagauucucgcuccga

SEQ ID NO: 31891 - DNA, 21 bp, homo sapiens
aattctaagagcgaggctggt

SEQ ID NO: 31892 - RNA, 21 nt, RNAi
uucuaagagcgaggcugguuu

SEQ ID NO: 31893 - RNA, 21 nt, RNAi
uuaagauucucgcuccgacca

SEQ ID NO: 31894 - DNA, 21 bp, homo sapiens
aagagaatgaacagctgatga

SEQ ID NO: 31895 - RNA, 21 nt, RNAi
gagaaugaacagcugaugauu

SEQ ID NO: 31896 - RNA, 21 nt, RNAi
uucucuuacuugucgacuacu

SEQ ID NO: 31897 - DNA, 21 bp, homo sapiens
aatgcgcagttggtgcaatta

SEQ ID NO: 31898 - RNA, 21 nt, RNAi
ugcgcaguuggugcaauuauu

SEQ ID NO: 31899 - RNA, 21 nt, RNAi
uuacgcgucaaccacguuaau

SEQ ID NO: 31900 - DNA, 21 bp, homo sapiens
aaacgacaatgcacaccttca

SEQ ID NO: 31901 - RNA, 21 nt, RNAi
acgacaaugcacaccuucauu

SEQ ID NO: 31902 - RNA, 21 nt, RNAi
uuugcuguuacguguggaagu

SEQ ID NO: 31903 - DNA, 21 bp, homo sapiens
aacgacaatgcacaccttcag

SEQ ID NO: 31904 - RNA, 21 nt, RNAi
cgacaaugcacaccuucaguu

SEQ ID NO: 31905 - RNA, 21 nt, RNAi
uugcuguuacguguggaaguc

SEQ ID NO: 31906 - DNA, 21 bp, homo sapiens
aagtatgaactcgtaactgag

SEQ ID NO: 31907 - RNA, 21 nt, RNAi
guaugaacucguaacugaguu

SEQ ID NO: 31908 - RNA, 21 nt, RNAi
uucauacuugagcauugacuc

SEQ ID NO: 31909 - DNA, 21 bp, homo sapiens
aactcgtaactgagctgaatg

SEQ ID NO: 31910 - RNA, 21 nt, RNAi
cucguaacugagcugaauguu

SEQ ID NO: 31911 - RNA, 21 nt, RNAi
uugagcauugacucgacuuac

SEQ ID NO: 31912 - DNA, 21 bp, homo sapiens
aaggtcagaatgtatcacagc

SEQ ID NO: 31913 - RNA, 21 nt, RNAi
ggucagaauguaucacagcuu

SEQ ID NO: 31914 - RNA, 21 nt, RNAi
uuccagucuuacauagugucg

SEQ ID NO: 31915 - DNA, 21 bp, homo sapiens
aatgtatcacagcaactagga

SEQ ID NO: 31916 - RNA, 21 nt, RNAi
uguaucacagcaacuaggauu

SEQ ID NO: 31917 - RNA, 21 nt, RNAi
uuacauagugucguugauccu

SEQ ID NO: 31918 - DNA, 21 bp, homo sapiens
aattcctacgagcacttgaca

SEQ ID NO: 31919 - RNA, 21 nt, RNAi
uuccuacgagcacuugacauu

SEQ ID NO: 31920 - RNA, 21 nt, RNAi
uuaaggaugcucgugaacugu

SEQ ID NO: 31921 - DNA, 21 bp, homo sapiens
aagttcaaatgcactttgccg

SEQ ID NO: 31922 - RNA, 21 nt, RNAi
guucaaaugcacuuugccguu

SEQ ID NO: 31923 - RNA, 21 nt, RNAi
uucaaguuuacgugaaacggc

SEQ ID NO: 31924 - DNA, 21 bp, homo sapiens
aaatgcactttgccgaattgc

SEQ ID NO: 31925 - RNA, 21 nt, RNAi
augcacuuugccgaauugcuu

SEQ ID NO: 31926 - RNA, 21 nt, RNAi
uuuacgugaaacggcuuaacg

SEQ ID NO: 31927 - DNA, 21 bp, homo sapiens
aatgcactttgccgaattgca

SEQ ID NO: 31928 - RNA, 21 nt, RNAi
ugcacuuugccgaauugcauu

SEQ ID NO: 31929 - RNA, 21 nt, RNAi
uuacgugaaacggcuuaacgu

SEQ ID NO: 31930 - DNA, 21 bp, homo sapiens
aaatttggtcttgtcaacgaa

SEQ ID NO: 31931 - RNA, 21 nt, RNAi
auuuggucuugucaacgaauu

SEQ ID NO: 31932 - RNA, 21 nt, RNAi
uuuaaaccagaacaguugcuu

SEQ ID NO: 31933 - DNA, 21 bp, homo sapiens
aatttggtcttgtcaacgaat

SEQ ID NO: 31934 - RNA, 21 nt, RNAi
uuuggucuugucaacgaauuu

SEQ ID NO: 31935 - RNA, 21 nt, RNAi
uuaaaccagaacaguugcuua

SEQ ID NO: 31936 - DNA, 21 bp, homo sapiens
aacgaatctgagaaactttca

SEQ ID NO: 31937 - RNA, 21 nt, RNAi
cgaaucugagaaacuuucauu

SEQ ID NO: 31938 - RNA, 21 nt, RNAi
uugcuuagacucuuugaaagu

SEQ ID NO: 31939 - DNA, 21 bp, homo sapiens
aaggaaattcaagagctcgag

SEQ ID NO: 31940 - RNA, 21 nt, RNAi
ggaaauucaagagcucgaguu

SEQ ID NO: 31941 - RNA, 21 nt, RNAi
uuccuuuaaguucucgagcuc

SEQ ID NO: 31942 - DNA, 21 bp, homo sapiens
aaattcaagagctcgagcagt

SEQ ID NO: 31943 - RNA, 21 nt, RNAi
auucaagagcucgagcaguuu

SEQ ID NO: 31944 - RNA, 21 nt, RNAi
uuuaaguucucgagcucguca

SEQ ID NO: 31945 - DNA, 21 bp, homo sapiens
aattcaagagctcgagcagtt

SEQ ID NO: 31946 - RNA, 21 nt, RNAi
uucaagagcucgagcaguuuu

SEQ ID NO: 31947 - RNA, 21 nt, RNAi
uuaaguucucgagcucgucaa

SEQ ID NO: 31948 - DNA, 21 bp, homo sapiens
aagagctcgagcagttattaa

SEQ ID NO: 31949 - RNA, 21 nt, RNAi
gagcucgagcaguuauuaauu

SEQ ID NO: 31950 - RNA, 21 nt, RNAi
uucucgagcucgucaauaauu

SEQ ID NO: 31951 - DNA, 21 bp, homo sapiens
aaagaaacagacggaacaact

SEQ ID NO: 31952 - RNA, 21 nt, RNAi
agaaacagacggaacaacuuu

SEQ ID NO: 31953 - RNA, 21 nt, RNAi
uuucuuugucugccuuguuga

SEQ ID NO: 31954 - DNA, 21 bp, homo sapiens
aagaaacagacggaacaactg

SEQ ID NO: 31955 - RNA, 21 nt, RNAi
gaaacagacggaacaacuguu

SEQ ID NO: 31956 - RNA, 21 nt, RNAi
uucuuugucugccuuguugac

SEQ ID NO: 31957 - DNA, 21 bp, homo sapiens
aacaactgtcacttgagctgg

SEQ ID NO: 31958 - RNA, 21 nt, RNAi
caacugucacuugagcugguu

SEQ ID NO: 31959 - RNA, 21 nt, RNAi
uuguugacagugaacucgacc

SEQ ID NO: 31960 - DNA, 21 bp, homo sapiens
aactgtcacttgagctggaag

SEQ ID NO: 31961 - RNA, 21 nt, RNAi
cugucacuugagcuggaaguu

SEQ ID NO: 31962 - RNA, 21 nt, RNAi
uugacagugaacucgaccuuc

SEQ ID NO: 31963 - DNA, 21 bp, homo sapiens
aaggtctggacttaagttctc

SEQ ID NO: 31964 - RNA, 21 nt, RNAi
ggucuggacuuaaguucucuu

SEQ ID NO: 31965 - RNA, 21 nt, RNAi
uuccagaccugaauucaagag

SEQ ID NO: 31966 - DNA, 21 bp, homo sapiens
aagttctcggtctttgcttgg

SEQ ID NO: 31967 - RNA, 21 nt, RNAi
guucucggucuuugcuugguu

SEQ ID NO: 31968 - RNA, 21 nt, RNAi
uucaagagccagaaacgaacc

SEQ ID NO: 31969 - DNA, 21 bp, homo sapiens
aagatgctattcaaggccgaa

SEQ ID NO: 31970 - RNA, 21 nt, RNAi
gaugcuauucaaggccgaauu

SEQ ID NO: 31971 - RNA, 21 nt, RNAi
uucuacgauaaguuccggcuu

SEQ ID NO: 31972 - DNA, 21 bp, homo sapiens
aatcatcacgtgaagatattg

SEQ ID NO: 31973 - RNA, 21 nt, RNAi
ucaucacgugaagauauuguu

SEQ ID NO: 31974 - RNA, 21 nt, RNAi
uuaguagugcacuucuauaac

SEQ ID NO: 31975 - DNA, 21 bp, homo sapiens
aaagctagcattgagcatgaa

SEQ ID NO: 31976 - RNA, 21 nt, RNAi
agcuagcauugagcaugaauu

SEQ ID NO: 31977 - RNA, 21 nt, RNAi
uuucgaucguaacucguacuu

SEQ ID NO: 31978 - DNA, 21 bp, homo sapiens
aagctagcattgagcatgaag

SEQ ID NO: 31979 - RNA, 21 nt, RNAi
gcuagcauugagcaugaaguu

SEQ ID NO: 31980 - RNA, 21 nt, RNAi
uucgaucguaacucguacuuc

SEQ ID NO: 31981 - DNA, 21 bp, homo sapiens
aaaccagcttcgtggagaatt

SEQ ID NO: 31982 - RNA, 21 nt, RNAi
accagcuucguggagaauuuu

SEQ ID NO: 31983 - RNA, 21 nt, RNAi
uuuggucgaagcaccucuuaa

SEQ ID NO: 31984 - DNA, 21 bp, homo sapiens
aagagcttgagtctcatcaaa

SEQ ID NO: 31985 - RNA, 21 nt, RNAi
gagcuugagucucaucaaauu

SEQ ID NO: 31986 - RNA, 21 nt, RNAi
uucucgaacucagaguaguuu

SEQ ID NO: 31987 - DNA, 21 bp, homo sapiens
aaagacggaactccttcagac

SEQ ID NO: 31988 - RNA, 21 nt, RNAi
agacggaacuccuucagacuu

SEQ ID NO: 31989 - RNA, 21 nt, RNAi
uuucugccuugaggaagucug

SEQ ID NO: 31990 - DNA, 21 bp, homo sapiens
aagacggaactccttcagact

SEQ ID NO: 31991 - RNA, 21 nt, RNAi
gacggaacuccuucagacuuu

SEQ ID NO: 31992 - RNA, 21 nt, RNAi
uucugccuugaggaagucuga

SEQ ID NO: 31993 - DNA, 21 bp, homo sapiens
aaaggtgagttcgcattgagg

SEQ ID NO: 31994 - RNA, 21 nt, RNAi
aggugaguucgcauugagguu

SEQ ID NO: 31995 - RNA, 21 nt, RNAi
uuuccacucaagcguaacucc

SEQ ID NO: 31996 - DNA, 21 bp, homo sapiens
aagaggcatcgagaaactgag

SEQ ID NO: 31997 - RNA, 21 nt, RNAi
gaggcaucgagaaacugaguu

SEQ ID NO: 31998 - RNA, 21 nt, RNAi
uucuccguagcucuuugacuc

SEQ ID NO: 31999 - DNA, 21 bp, homo sapiens
aaactgagagttcgcattgag

SEQ ID NO: 32000 - RNA, 21 nt, RNAi
acugagaguucgcauugaguu

SEQ ID NO: 32001 - RNA, 21 nt, RNAi
uuugacucucaagcguaacuc

SEQ ID NO: 32002 - DNA, 21 bp, homo sapiens
aactgagagttcgcattgagg

SEQ ID NO: 32003 - RNA, 21 nt, RNAi
cugagaguucgcauugagguu

SEQ ID NO: 32004 - RNA, 21 nt, RNAi
uugacucucaagcguaacucc

SEQ ID NO: 32005 - DNA, 21 bp, homo sapiens
aattagaccttgtcacgttaa

SEQ ID NO: 32006 - RNA, 21 nt, RNAi
uuagaccuugucacguuaauu

SEQ ID NO: 32007 - RNA, 21 nt, RNAi
uuaaucuggaacagugcaauu

SEQ ID NO: 32008 - DNA, 21 bp, homo sapiens
aaggtcagttgtcagaactag

SEQ ID NO: 32009 - RNA, 21 nt, RNAi
ggucaguugucagaacuaguu

SEQ ID NO: 32010 - RNA, 21 nt, RNAi
uuccagucaacagucuugauc

SEQ ID NO: 32011 - DNA, 21 bp, homo sapiens
aaggagctaaatgaggcagta

SEQ ID NO: 32012 - RNA, 21 nt, RNAi
ggagcuaaaugaggcaguauu

SEQ ID NO: 32013 - RNA, 21 nt, RNAi
uuccucgauuuacuccgucau

SEQ ID NO: 32014 - DNA, 21 bp, homo sapiens
aagtgagcatcatgcagattt

SEQ ID NO: 32015 - RNA, 21 nt, RNAi
gugagcaucaugcagauuuuu

SEQ ID NO: 32016 - RNA, 21 nt, RNAi
uucacucguaguacgucuaaa

SEQ ID NO: 32017 - DNA, 21 bp, homo sapiens
aagagagctagagatagccag

SEQ ID NO: 32018 - RNA, 21 nt, RNAi
gagagcuagagauagccaguu

SEQ ID NO: 32019 - RNA, 21 nt, RNAi
uucucucgaucucuaucgguc

SEQ ID NO: 32020 - DNA, 21 bp, homo sapiens
aaagagcaagagcgaatatct

SEQ ID NO: 32021 - RNA, 21 nt, RNAi
agagcaagagcgaauaucuuu

SEQ ID NO: 32022 - RNA, 21 nt, RNAi
uuucucguucucgcuuauaga

SEQ ID NO: 32023 - DNA, 21 bp, homo sapiens
aagagcaagagcgaatatctg

SEQ ID NO: 32024 - RNA, 21 nt, RNAi
gagcaagagcgaauaucuguu

SEQ ID NO: 32025 - RNA, 21 nt, RNAi
uucucguucucgcuuauagac

SEQ ID NO: 32026 - DNA, 21 bp, homo sapiens
aagagcgaatatctgaattag

SEQ ID NO: 32027 - RNA, 21 nt, RNAi
gagcgaauaucugaauuaguu

SEQ ID NO: 32028 - RNA, 21 nt, RNAi
uucucgcuuauagacuuaauc

SEQ ID NO: 32029 - DNA, 21 bp, homo sapiens
aaagagctcaatgagagagtg

SEQ ID NO: 32030 - RNA, 21 nt, RNAi
agagcucaaugagagaguguu

SEQ ID NO: 32031 - RNA, 21 nt, RNAi
uuucucgaguuacucucucac

SEQ ID NO: 32032 - DNA, 21 bp, homo sapiens
aagagctcaatgagagagtgg

SEQ ID NO: 32033 - RNA, 21 nt, RNAi
gagcucaaugagagagugguu

SEQ ID NO: 32034 - RNA, 21 nt, RNAi
uucucgaguuacucucucacc

SEQ ID NO: 32035 - DNA, 21 bp, homo sapiens
aatgaccaagaagcctgtaag

SEQ ID NO: 32036 - RNA, 21 nt, RNAi
ugaccaagaagccuguaaguu

SEQ ID NO: 32037 - RNA, 21 nt, RNAi
uuacugguucuucggacauuc

SEQ ID NO: 32038 - DNA, 21 bp, homo sapiens
aagagcagaatcttagtagtc

SEQ ID NO: 32039 - RNA, 21 nt, RNAi
gagcagaaucuuaguagucuu

SEQ ID NO: 32040 - RNA, 21 nt, RNAi
uucucgucuuagaaucaucag

SEQ ID NO: 32041 - DNA, 21 bp, homo sapiens
aacttgagaaggctcagttgc

SEQ ID NO: 32042 - RNA, 21 nt, RNAi
cuugagaaggcucaguugcuu

SEQ ID NO: 32043 - RNA, 21 nt, RNAi
uugaacucuuccgagucaacg

SEQ ID NO: 32044 - DNA, 21 bp, homo sapiens
aaataggctagctggagagtt

SEQ ID NO: 32045 - RNA, 21 nt, RNAi
auaggcuagcuggagaguuuu

SEQ ID NO: 32046 - RNA, 21 nt, RNAi
uuuauccgaucgaccucucaa

SEQ ID NO: 32047 - DNA, 21 bp, homo sapiens
aataggctagctggagagttg

SEQ ID NO: 32048 - RNA, 21 nt, RNAi
uaggcuagcuggagaguuguu

SEQ ID NO: 32049 - RNA, 21 nt, RNAi
uuauccgaucgaccucucaac

SEQ ID NO: 32050 - DNA, 21 bp, homo sapiens
aaagatcaattgaaggagctc

SEQ ID NO: 32051 - RNA, 21 nt, RNAi
agaucaauugaaggagcucuu

SEQ ID NO: 32052 - RNA, 21 nt, RNAi
uuucuaguuaacuuccucgag

SEQ ID NO: 32053 - DNA, 21 bp, homo sapiens
aagatcaattgaaggagctca

SEQ ID NO: 32054 - RNA, 21 nt, RNAi
gaucaauugaaggagcucauu

SEQ ID NO: 32055 - RNA, 21 nt, RNAi
uucuaguuaacuuccucgagu

SEQ ID NO: 32056 - DNA, 21 bp, homo sapiens
aaagtctagtaaagaagagct

SEQ ID NO: 32057 - RNA, 21 nt, RNAi
agucuaguaaagaagagcuuu

SEQ ID NO: 32058 - RNA, 21 nt, RNAi
uuucagaucauuucuucucga

SEQ ID NO: 32059 - DNA, 21 bp, homo sapiens
aagtctagtaaagaagagctc

SEQ ID NO: 32060 - RNA, 21 nt, RNAi
gucuaguaaagaagagcucuu

SEQ ID NO: 32061 - RNA, 21 nt, RNAi
uucagaucauuucuucucgag

SEQ ID NO: 32062 - DNA, 21 bp, homo sapiens
aagttgttgatcaaatcctgt

SEQ ID NO: 32063 - RNA, 21 nt, RNAi
guuguugaucaaauccuguuu

SEQ ID NO: 32064 - RNA, 21 nt, RNAi
uucaacaacuaguuuaggaca

SEQ ID NO: 32065 - DNA, 21 bp, homo sapiens
aaacaggtactgttatggata

SEQ ID NO: 32066 - RNA, 21 nt, RNAi
acagguacuguuauggauauu

SEQ ID NO: 32067 - RNA, 21 nt, RNAi
uuuguccaugacaauaccuau

SEQ ID NO: 32068 - DNA, 21 bp, homo sapiens
aacaggtactgttatggatac

SEQ ID NO: 32069 - RNA, 21 nt, RNAi
cagguacuguuauggauacuu

SEQ ID NO: 32070 - RNA, 21 nt, RNAi
uuguccaugacaauaccuaug

SEQ ID NO: 32071 - DNA, 21 bp, homo sapiens
aaggtcgatgaattaacaact

SEQ ID NO: 32072 - RNA, 21 nt, RNAi
ggucgaugaauuaacaacuuu

SEQ ID NO: 32073 - RNA, 21 nt, RNAi
uuccagcuacuuaauuguuga

SEQ ID NO: 32074 - DNA, 21 bp, homo sapiens
aaggaggcagatgaatacttg

SEQ ID NO: 32075 - RNA, 21 nt, RNAi
ggaggcagaugaauacuuguu

SEQ ID NO: 32076 - RNA, 21 nt, RNAi
uuccuccgucuacuuaugaac

SEQ ID NO: 32077 - DNA, 21 bp, homo sapiens
aagtactgttccttgcttata

SEQ ID NO: 32078 - RNA, 21 nt, RNAi
guacuguuccuugcuuauauu

SEQ ID NO: 32079 - RNA, 21 nt, RNAi
uucaugacaaggaacgaauau

SEQ ID NO: 32080 - DNA, 21 bp, homo sapiens
aaagcagtcatgagtggtatt

SEQ ID NO: 32081 - RNA, 21 nt, RNAi
agcagucaugagugguauuuu

SEQ ID NO: 32082 - RNA, 21 nt, RNAi
uuucgucaguacucaccauaa

SEQ ID NO: 32083 - DNA, 21 bp, homo sapiens
aagcagtcatgagtggtattc

SEQ ID NO: 32084 - RNA, 21 nt, RNAi
gcagucaugagugguauucuu

SEQ ID NO: 32085 - RNA, 21 nt, RNAi
uucgucaguacucaccauaag

SEQ ID NO: 32086 - DNA, 21 bp, homo sapiens
aagacacggaaggtactgagt

SEQ ID NO: 32087 - RNA, 21 nt, RNAi
gacacggaagguacugaguuu

SEQ ID NO: 32088 - RNA, 21 nt, RNAi
uucugugccuuccaugacuca

SEQ ID NO: 32089 - DNA, 21 bp, homo sapiens
aaaggtcaaagttgctcagcg

SEQ ID NO: 32090 - RNA, 21 nt, RNAi
aggucaaaguugcucagcguu

SEQ ID NO: 32091 - RNA, 21 nt, RNAi
uuuccaguuucaacgagucgc

SEQ ID NO: 32092 - DNA, 21 bp, homo sapiens
caggaaggacaactgaattca

SEQ ID NO: 32093 - RNA, 21 nt, RNAi
ggaaggacaacugaauucauu

SEQ ID NO: 32094 - RNA, 21 nt, RNAi
uuccuuccuguugacuuaagu

SEQ ID NO: 32095 - DNA, 21 bp, homo sapiens
caccatgaatcaccgcgacat

SEQ ID NO: 32096 - RNA, 21 nt, RNAi
ccaugaaucaccgcgacauuu

SEQ ID NO: 32097 - RNA, 21 nt, RNAi
uugguacuuaguggcgcugua

SEQ ID NO: 32098 - DNA, 21 bp, homo sapiens
catgaatcaccgcgacattgc

SEQ ID NO: 32099 - RNA, 21 nt, RNAi
ugaaucaccgcgacauugcuu

SEQ ID NO: 32100 - RNA, 21 nt, RNAi
uuacuuaguggcgcuguaacg

SEQ ID NO: 32101 - DNA, 21 bp, homo sapiens
caaagaactccaattaggaga

SEQ ID NO: 32102 - RNA, 21 nt, RNAi
aagaacuccaauuaggagauu

SEQ ID NO: 32103 - RNA, 21 nt, RNAi
uuuucuugagguuaauccucu

SEQ ID NO: 32104 - DNA, 21 bp, homo sapiens
caagaggtgactccaagtcga

SEQ ID NO: 32105 - RNA, 21 nt, RNAi
agaggugacuccaagucgauu

SEQ ID NO: 32106 - RNA, 21 nt, RNAi
uuucuccacugagguucagcu

SEQ ID NO: 32107 - DNA, 21 bp, homo sapiens
caagtcgatcaactttgcaaa

SEQ ID NO: 32108 - RNA, 21 nt, RNAi
agucgaucaacuuugcaaauu

SEQ ID NO: 32109 - RNA, 21 nt, RNAi
uuucagcuaguugaaacguuu

SEQ ID NO: 32110 - DNA, 21 bp, homo sapiens
caacagcacaatacgaccagg

SEQ ID NO: 32111 - RNA, 21 nt, RNAi
acagcacaauacgaccagguu

SEQ ID NO: 32112 - RNA, 21 nt, RNAi
uuugucguguuaugcuggucc

SEQ ID NO: 32113 - DNA, 21 bp, homo sapiens
cacaatacgaccaggcgtcaa

SEQ ID NO: 32114 - RNA, 21 nt, RNAi
caauacgaccaggcgucaauu

SEQ ID NO: 32115 - RNA, 21 nt, RNAi
uuguuaugcugguccgcaguu

SEQ ID NO: 32116 - DNA, 21 bp, homo sapiens
caagtatactgcattggaaca

SEQ ID NO: 32117 - RNA, 21 nt, RNAi
aguauacugcauuggaacauu

SEQ ID NO: 32118 - RNA, 21 nt, RNAi
uuucauaugacguaaccuugu

SEQ ID NO: 32119 - DNA, 21 bp, homo sapiens
cagaaagtgccagatgttctc

SEQ ID NO: 32120 - RNA, 21 nt, RNAi
gaaagugccagauguucucuu

SEQ ID NO: 32121 - RNA, 21 nt, RNAi
uucuuucacggucuacaagag

SEQ ID NO: 32122 - DNA, 21 bp, homo sapiens
caacagcgttctttccaaaca

SEQ ID NO: 32123 - RNA, 21 nt, RNAi
acagcguucuuuccaaacauu

SEQ ID NO: 32124 - RNA, 21 nt, RNAi
uuugucgcaagaaagguuugu

SEQ ID NO: 32125 - DNA, 21 bp, homo sapiens
caggagttacagcaagccaag

SEQ ID NO: 32126 - RNA, 21 nt, RNAi
ggaguuacagcaagccaaguu

SEQ ID NO: 32127 - RNA, 21 nt, RNAi
uuccucaaugucguucgguuc

SEQ ID NO: 32128 - DNA, 21 bp, homo sapiens
cagcaagccaagaatatgcac

SEQ ID NO: 32129 - RNA, 21 nt, RNAi
gcaagccaagaauaugcacuu

SEQ ID NO: 32130 - RNA, 21 nt, RNAi
uucguucgguucuuauacgug

SEQ ID NO: 32131 - DNA, 21 bp, homo sapiens
caagaatatgcacaacgtcct

SEQ ID NO: 32132 - RNA, 21 nt, RNAi
agaauaugcacaacguccuuu

SEQ ID NO: 32133 - RNA, 21 nt, RNAi
uuucuuauacguguugcagga

SEQ ID NO: 32134 - DNA, 21 bp, homo sapiens
cagtaaagcaacagctagaaa

SEQ ID NO: 32135 - RNA, 21 nt, RNAi
guaaagcaacagcuagaaauu

SEQ ID NO: 32136 - RNA, 21 nt, RNAi
uucauuucguugucgaucuuu

SEQ ID NO: 32137 - DNA, 21 bp, homo sapiens
caacctccttaagagtcactc

SEQ ID NO: 32138 - RNA, 21 nt, RNAi
accuccuuaagagucacucuu

SEQ ID NO: 32139 - RNA, 21 nt, RNAi
uuuggaggaauucucagugag

SEQ ID NO: 32140 - DNA, 21 bp, homo sapiens
catgaatacaacgagagagta

SEQ ID NO: 32141 - RNA, 21 nt, RNAi
ugaauacaacgagagaguauu

SEQ ID NO: 32142 - RNA, 21 nt, RNAi
uuacuuauguugcucucucau

SEQ ID NO: 32143 - DNA, 21 bp, homo sapiens
caacgagagagtaagaacgct

SEQ ID NO: 32144 - RNA, 21 nt, RNAi
acgagagaguaagaacgcuuu

SEQ ID NO: 32145 - RNA, 21 nt, RNAi
uuugcucucucauucuugcga

SEQ ID NO: 32146 - DNA, 21 bp, homo sapiens
cagaaaccttcacaacgtgtt

SEQ ID NO: 32147 - RNA, 21 nt, RNAi
gaaaccuucacaacguguuuu

SEQ ID NO: 32148 - RNA, 21 nt, RNAi
uucuuuggaaguguugcacaa

SEQ ID NO: 32149 - DNA, 21 bp, homo sapiens
cacaacgtgttagacagtaag

SEQ ID NO: 32150 - RNA, 21 nt, RNAi
caacguguuagacaguaaguu

SEQ ID NO: 32151 - RNA, 21 nt, RNAi
uuguugcacaaucugucauuc

SEQ ID NO: 32152 - DNA, 21 bp, homo sapiens
caacgtgttagacagtaagtc

SEQ ID NO: 32153 - RNA, 21 nt, RNAi
acguguuagacaguaagucuu

SEQ ID NO: 32154 - RNA, 21 nt, RNAi
uuugcacaaucugucauucag

SEQ ID NO: 32155 - DNA, 21 bp, homo sapiens
cagaaactagcttatatggag

SEQ ID NO: 32156 - RNA, 21 nt, RNAi
gaaacuagcuuauauggaguu

SEQ ID NO: 32157 - RNA, 21 nt, RNAi
uucuuugaucgaauauaccuc

SEQ ID NO: 32158 - DNA, 21 bp, homo sapiens
caaagaccggtgttaccaaga

SEQ ID NO: 32159 - RNA, 21 nt, RNAi
aagaccgguguuaccaagauu

SEQ ID NO: 32160 - RNA, 21 nt, RNAi
uuuucuggccacaaugguucu

SEQ ID NO: 32161 - DNA, 21 bp, homo sapiens
caagacttgcatgccgaatat

SEQ ID NO: 32162 - RNA, 21 nt, RNAi
agacuugcaugccgaauauuu

SEQ ID NO: 32163 - RNA, 21 nt, RNAi
uuucugaacguacggcuuaua

SEQ ID NO: 32164 - DNA, 21 bp, homo sapiens
catgccgaatatgagagcctc

SEQ ID NO: 32165 - RNA, 21 nt, RNAi
ugccgaauaugagagccucuu

SEQ ID NO: 32166 - RNA, 21 nt, RNAi
uuacggcuuauacucucggag

SEQ ID NO: 32167 - DNA, 21 bp, homo sapiens
cagtgtgaagagttggtgcaa

SEQ ID NO: 32168 - RNA, 21 nt, RNAi
gugugaagaguuggugcaauu

SEQ ID NO: 32169 - RNA, 21 nt, RNAi
uucacacuucucaaccacguu

SEQ ID NO: 32170 - DNA, 21 bp, homo sapiens
caagtcagcgcattagtaagt

SEQ ID NO: 32171 - RNA, 21 nt, RNAi
agucagcgcauuaguaaguuu

SEQ ID NO: 32172 - RNA, 21 nt, RNAi
uuucagucgcguaaucauuca

SEQ ID NO: 32173 - DNA, 21 bp, homo sapiens
caggaagacacttctgctcac

SEQ ID NO: 32174 - RNA, 21 nt, RNAi
ggaagacacuucugcucacuu

SEQ ID NO: 32175 - RNA, 21 nt, RNAi
uuccuucugugaagacgagug

SEQ ID NO: 32176 - DNA, 21 bp, homo sapiens
cagagttatctgatcagtaca

SEQ ID NO: 32177 - RNA, 21 nt, RNAi
gaguuaucugaucaguacauu

SEQ ID NO: 32178 - RNA, 21 nt, RNAi
uucucaauagacuagucaugu

SEQ ID NO: 32179 - DNA, 21 bp, homo sapiens
caattctaagagcgaggctgg

SEQ ID NO: 32180 - RNA, 21 nt, RNAi
auucuaagagcgaggcugguu

SEQ ID NO: 32181 - RNA, 21 nt, RNAi
uuuaagauucucgcuccgacc

SEQ ID NO: 32182 - DNA, 21 bp, homo sapiens
cagacaattagaggagatctt

SEQ ID NO: 32183 - RNA, 21 nt, RNAi
gacaauuagaggagaucuuuu

SEQ ID NO: 32184 - RNA, 21 nt, RNAi
uucuguuaaucuccucuagaa

SEQ ID NO: 32185 - DNA, 21 bp, homo sapiens
caaggtcagaatgtatcacag

SEQ ID NO: 32186 - RNA, 21 nt, RNAi
aggucagaauguaucacaguu

SEQ ID NO: 32187 - RNA, 21 nt, RNAi
uuuccagucuuacauaguguc

SEQ ID NO: 32188 - DNA, 21 bp, homo sapiens
cagaatgtatcacagcaacta

SEQ ID NO: 32189 - RNA, 21 nt, RNAi
gaauguaucacagcaacuauu

SEQ ID NO: 32190 - RNA, 21 nt, RNAi
uucuuacauagugucguugau

SEQ ID NO: 32191 - DNA, 21 bp, homo sapiens
catggtgagttagtggaagac

SEQ ID NO: 32192 - RNA, 21 nt, RNAi
uggugaguuaguggaagacuu

SEQ ID NO: 32193 - RNA, 21 nt, RNAi
uuaccacucaaucaccuucug

SEQ ID NO: 32194 - DNA, 21 bp, homo sapiens
cattggacgagagtaattcct

SEQ ID NO: 32195 - RNA, 21 nt, RNAi
uuggacgagaguaauuccuuu

SEQ ID NO: 32196 - RNA, 21 nt, RNAi
uuaaccugcucucauuaagga

SEQ ID NO: 32197 - DNA, 21 bp, homo sapiens
caaatgcactttgccgaattg

SEQ ID NO: 32198 - RNA, 21 nt, RNAi
aaugcacuuugccgaauuguu

SEQ ID NO: 32199 - RNA, 21 nt, RNAi
uuuuacgugaaacggcuuaac

SEQ ID NO: 32200 - DNA, 21 bp, homo sapiens
cagagctgcagacctatgttg

SEQ ID NO: 32201 - RNA, 21 nt, RNAi
gagcugcagaccuauguuguu

SEQ ID NO: 32202 - RNA, 21 nt, RNAi
uucucgacgucuggauacaac

SEQ ID NO: 32203 - DNA, 21 bp, homo sapiens
caacgaatctgagaaactttc

SEQ ID NO: 32204 - RNA, 21 nt, RNAi
acgaaucugagaaacuuucuu

SEQ ID NO: 32205 - RNA, 21 nt, RNAi
uuugcuuagacucuuugaaag

SEQ ID NO: 32206 - DNA, 21 bp, homo sapiens
catcctcttgtgtgcctgaca

SEQ ID NO: 32207 - RNA, 21 nt, RNAi
uccucuugugugccugacauu

SEQ ID NO: 32208 - RNA, 21 nt, RNAi
uuaggagaacacacggacugu

SEQ ID NO: 32209 - DNA, 21 bp, homo sapiens
caagagctcgagcagttatta

SEQ ID NO: 32210 - RNA, 21 nt, RNAi
agagcucgagcaguuauuauu

SEQ ID NO: 32211 - RNA, 21 nt, RNAi
uuucucgagcucgucaauaau

SEQ ID NO: 32212 - DNA, 21 bp, homo sapiens
cagaagctgacaagcgtgact

SEQ ID NO: 32213 - RNA, 21 nt, RNAi
gaagcugacaagcgugacuuu

SEQ ID NO: 32214 - RNA, 21 nt, RNAi
uucuucgacuguucgcacuga

SEQ ID NO: 32215 - DNA, 21 bp, homo sapiens
caactgtcacttgagctggaa

SEQ ID NO: 32216 - RNA, 21 nt, RNAi
acugucacuugagcuggaauu

SEQ ID NO: 32217 - RNA, 21 nt, RNAi
uuugacagugaacucgaccuu

SEQ ID NO: 32218 - DNA, 21 bp, homo sapiens
cagctacaaggtctggactta

SEQ ID NO: 32219 - RNA, 21 nt, RNAi
gcuacaaggucuggacuuauu

SEQ ID NO: 32220 - RNA, 21 nt, RNAi
uucgauguuccagaccugaau

SEQ ID NO: 32221 - DNA, 21 bp, homo sapiens
caaggtctggacttaagttct

SEQ ID NO: 32222 - RNA, 21 nt, RNAi
aggucuggacuuaaguucuuu

SEQ ID NO: 32223 - RNA, 21 nt, RNAi
uuuccagaccugaauucaaga

SEQ ID NO: 32224 - DNA, 21 bp, homo sapiens
cagaagatgctattcaaggcc

SEQ ID NO: 32225 - RNA, 21 nt, RNAi
gaagaugcuauucaaggccuu

SEQ ID NO: 32226 - RNA, 21 nt, RNAi
uucuucuacgauaaguuccgg

SEQ ID NO: 32227 - DNA, 21 bp, homo sapiens
cagcaggacctcaatctagac

SEQ ID NO: 32228 - RNA, 21 nt, RNAi
gcaggaccucaaucuagacuu

SEQ ID NO: 32229 - RNA, 21 nt, RNAi
uucguccuggaguuagaucug

SEQ ID NO: 32230 - DNA, 21 bp, homo sapiens
catgtgatagaggaccgtgac

SEQ ID NO: 32231 - RNA, 21 nt, RNAi
ugugauagaggaccgugacuu

SEQ ID NO: 32232 - RNA, 21 nt, RNAi
uuacacuaucuccuggcacug

SEQ ID NO: 32233 - DNA, 21 bp, homo sapiens
caggaggtacaactaatgacc

SEQ ID NO: 32234 - RNA, 21 nt, RNAi
ggagguacaacuaaugaccuu

SEQ ID NO: 32235 - RNA, 21 nt, RNAi
uuccuccauguugauuacugg

SEQ ID NO: 32236 - DNA, 21 bp, homo sapiens
catgcagataaatcatcacgt

SEQ ID NO: 32237 - RNA, 21 nt, RNAi
ugcagauaaaucaucacguuu

SEQ ID NO: 32238 - RNA, 21 nt, RNAi
uuacgucuauuuaguagugca

SEQ ID NO: 32239 - DNA, 21 bp, homo sapiens
cagataaatcatcacgtgaag

SEQ ID NO: 32240 - RNA, 21 nt, RNAi
gauaaaucaucacgugaaguu

SEQ ID NO: 32241 - RNA, 21 nt, RNAi
uucuauuuaguagugcacuuc

SEQ ID NO: 32242 - DNA, 21 bp, homo sapiens
catcacgtgaagatattggag

SEQ ID NO: 32243 - RNA, 21 nt, RNAi
ucacgugaagauauuggaguu

SEQ ID NO: 32244 - RNA, 21 nt, RNAi
uuagugcacuucuauaaccuc

SEQ ID NO: 32245 - DNA, 21 bp, homo sapiens
cagatcggagaaagctagcat

SEQ ID NO: 32246 - RNA, 21 nt, RNAi
gaucggagaaagcuagcauuu

SEQ ID NO: 32247 - RNA, 21 nt, RNAi
uucuagccucuuucgaucgua

SEQ ID NO: 32248 - DNA, 21 bp, homo sapiens
catcaaagtgagtgtctccat

SEQ ID NO: 32249 - RNA, 21 nt, RNAi
ucaaagugagugucuccauuu

SEQ ID NO: 32250 - RNA, 21 nt, RNAi
uuaguuucacucacagaggua

SEQ ID NO: 32251 - DNA, 21 bp, homo sapiens
cagactgagtgaatcagatta

SEQ ID NO: 32252 - RNA, 21 nt, RNAi
gacugagugaaucagauuauu

SEQ ID NO: 32253 - RNA, 21 nt, RNAi
uucugacucacuuagucuaau

SEQ ID NO: 32254 - DNA, 21 bp, homo sapiens
cagctgcacatcgcagagaaa

SEQ ID NO: 32255 - RNA, 21 nt, RNAi
gcugcacaucgcagagaaauu

SEQ ID NO: 32256 - RNA, 21 nt, RNAi
uucgacguguagcgucucuuu

SEQ ID NO: 32257 - DNA, 21 bp, homo sapiens
caaggtcagttgtcagaacta

SEQ ID NO: 32258 - RNA, 21 nt, RNAi
aggucaguugucagaacuauu

SEQ ID NO: 32259 - RNA, 21 nt, RNAi
uuuccagucaacagucuugau

SEQ ID NO: 32260 - DNA, 21 bp, homo sapiens
caagaaattatgaaggccaca

SEQ ID NO: 32261 - RNA, 21 nt, RNAi
agaaauuaugaaggccacauu

SEQ ID NO: 32262 - RNA, 21 nt, RNAi
uuucuuuaauacuuccggugu

SEQ ID NO: 32263 - DNA, 21 bp, homo sapiens
caggacaaaccaagagcatgc

SEQ ID NO: 32264 - RNA, 21 nt, RNAi
ggacaaaccaagagcaugcuu

SEQ ID NO: 32265 - RNA, 21 nt, RNAi
uuccuguuugguucucguacg

SEQ ID NO: 32266 - DNA, 21 bp, homo sapiens
cataatgaccaagaagcctgt

SEQ ID NO: 32267 - RNA, 21 nt, RNAi
uaaugaccaagaagccuguuu

SEQ ID NO: 32268 - RNA, 21 nt, RNAi
uuauuacugguucuucggaca

SEQ ID NO: 32269 - DNA, 21 bp, homo sapiens
cagcttgtctctaaactgtcc

SEQ ID NO: 32270 - RNA, 21 nt, RNAi
gcuugucucuaaacuguccuu

SEQ ID NO: 32271 - RNA, 21 nt, RNAi
uucgaacagagauuugacagg

SEQ ID NO: 32272 - DNA, 21 bp, homo sapiens
cagcaaagatcaattgaagga

SEQ ID NO: 32273 - RNA, 21 nt, RNAi
gcaaagaucaauugaaggauu

SEQ ID NO: 32274 - RNA, 21 nt, RNAi
uucguuucuaguuaacuuccu

SEQ ID NO: 32275 - DNA, 21 bp, homo sapiens
caaagatcaattgaaggagct

SEQ ID NO: 32276 - RNA, 21 nt, RNAi
aagaucaauugaaggagcuuu

SEQ ID NO: 32277 - RNA, 21 nt, RNAi
uuuucuaguuaacuuccucga

SEQ ID NO: 32278 - DNA, 21 bp, homo sapiens
caggtactgttatggatacca

SEQ ID NO: 32279 - RNA, 21 nt, RNAi
gguacuguuauggauaccauu

SEQ ID NO: 32280 - RNA, 21 nt, RNAi
uuccaugacaauaccuauggu

SEQ ID NO: 32281 - DNA, 21 bp, homo sapiens
caaggtcgatgaattaacaac

SEQ ID NO: 32282 - RNA, 21 nt, RNAi
aggucgaugaauuaacaacuu

SEQ ID NO: 32283 - RNA, 21 nt, RNAi
uuuccagcuacuuaauuguug

SEQ ID NO: 32284 - DNA, 21 bp, homo sapiens
cagtcatgagtggtattcacc

SEQ ID NO: 32285 - RNA, 21 nt, RNAi
gucaugagugguauucaccuu

SEQ ID NO: 32286 - RNA, 21 nt, RNAi
uucaguacucaccauaagugg

SEQ ID NO: 32287 - DNA, 21 bp, homo sapiens
cagaagacacggaaggtactg

SEQ ID NO: 32288 - RNA, 21 nt, RNAi
gaagacacggaagguacuguu

SEQ ID NO: 32289 - RNA, 21 nt, RNAi
uucuucugugccuuccaugac

SEQ ID NO: 32290 - DNA, 21 bp, homo sapiens
catatatcctgcgaagaacaa

SEQ ID NO: 32291 - RNA, 21 nt, RNAi
uauauccugcgaagaacaauu

SEQ ID NO: 32292 - RNA, 21 nt, RNAi
uuauauaggacgcuucuuguu

SEQ ID NO: 32293 - DNA, 21 bp, homo sapiens
cagtcaataatcttcctgaga

SEQ ID NO: 32294 - RNA, 21 nt, RNAi
gucaauaaucuuccugagauu

SEQ ID NO: 32295 - RNA, 21 nt, RNAi
uucaguuauuagaaggacucu

SEQ ID NO: 32296 - DNA, 21 bp, homo sapiens
gaatccatgcaatacaccaca

SEQ ID NO: 32297 - RNA, 21 nt, RNAi
auccaugcaauacaccacauu

SEQ ID NO: 32298 - RNA, 21 nt, RNAi
uuuagguacguuauguggugu

SEQ ID NO: 32299 - DNA, 21 bp, homo sapiens
gaactccaattaggagagatt

SEQ ID NO: 32300 - RNA, 21 nt, RNAi
acuccaauuaggagagauuuu

SEQ ID NO: 32301 - RNA, 21 nt, RNAi
uuugagguuaauccucucuaa

SEQ ID NO: 32302 - DNA, 21 bp, homo sapiens
gaggtgactccaagtcgatca

SEQ ID NO: 32303 - RNA, 21 nt, RNAi
ggugacuccaagucgaucauu

SEQ ID NO: 32304 - RNA, 21 nt, RNAi
uuccacugagguucagcuagu

SEQ ID NO: 32305 - DNA, 21 bp, homo sapiens
gactccaagtcgatcaacttt

SEQ ID NO: 32306 - RNA, 21 nt, RNAi
cuccaagucgaucaacuuuuu

SEQ ID NO: 32307 - RNA, 21 nt, RNAi
uugagguucagcuaguugaaa

SEQ ID NO: 32308 - DNA, 21 bp, homo sapiens
gattaatgagttggaactacg

SEQ ID NO: 32309 - RNA, 21 nt, RNAi
uuaaugaguuggaacuacguu

SEQ ID NO: 32310 - RNA, 21 nt, RNAi
uuaauuacucaaccuugaugc

SEQ ID NO: 32311 - DNA, 21 bp, homo sapiens
gaaaggccaagtgaataagtt

SEQ ID NO: 32312 - RNA, 21 nt, RNAi
aaggccaagugaauaaguuuu

SEQ ID NO: 32313 - RNA, 21 nt, RNAi
uuuuccgguucacuuauucaa

SEQ ID NO: 32314 - DNA, 21 bp, homo sapiens
gatgaactagtgagaacaaca

SEQ ID NO: 32315 - RNA, 21 nt, RNAi
ugaacuagugagaacaacauu

SEQ ID NO: 32316 - RNA, 21 nt, RNAi
uuacuugaucacucuuguugu

SEQ ID NO: 32317 - DNA, 21 bp, homo sapiens
gaacaacagcacaatacgacc

SEQ ID NO: 32318 - RNA, 21 nt, RNAi
acaacagcacaauacgaccuu

SEQ ID NO: 32319 - RNA, 21 nt, RNAi
uuuguugucguguuaugcugg

SEQ ID NO: 32320 - DNA, 21 bp, homo sapiens
gaccaggcgtcaaccaagtat

SEQ ID NO: 32321 - RNA, 21 nt, RNAi
ccaggcgucaaccaaguauuu

SEQ ID NO: 32322 - RNA, 21 nt, RNAi
uugguccgcaguugguucaua

SEQ ID NO: 32323 - DNA, 21 bp, homo sapiens
gaatatgcacaacgtcctgca

SEQ ID NO: 32324 - RNA, 21 nt, RNAi
auaugcacaacguccugcauu

SEQ ID NO: 32325 - RNA, 21 nt, RNAi
uuuauacguguugcaggacgu

SEQ ID NO: 32326 - DNA, 21 bp, homo sapiens
gaaagcgaagaatacctctca

SEQ ID NO: 32327 - RNA, 21 nt, RNAi
aagcgaagaauaccucucauu

SEQ ID NO: 32328 - RNA, 21 nt, RNAi
uuuucgcuucuuauggagagu

SEQ ID NO: 32329 - DNA, 21 bp, homo sapiens
gaagaatacctctcaggaaac

SEQ ID NO: 32330 - RNA, 21 nt, RNAi
agaauaccucucaggaaacuu

SEQ ID NO: 32331 - RNA, 21 nt, RNAi
uuucuuauggagaguccuuug

SEQ ID NO: 32332 - DNA, 21 bp, homo sapiens
gaatacaacgagagagtaaga

SEQ ID NO: 32333 - RNA, 21 nt, RNAi
auacaacgagagaguaagauu

SEQ ID NO: 32334 - RNA, 21 nt, RNAi
uuuauguugcucucucauucu

SEQ ID NO: 32335 - DNA, 21 bp, homo sapiens
gagagagtaagaacgctggag

SEQ ID NO: 32336 - RNA, 21 nt, RNAi
gagaguaagaacgcuggaguu

SEQ ID NO: 32337 - RNA, 21 nt, RNAi
uucucucauucuugcgaccuc

SEQ ID NO: 32338 - DNA, 21 bp, homo sapiens
gagagtaagaacgctggagat

SEQ ID NO: 32339 - RNA, 21 nt, RNAi
gaguaagaacgcuggagauuu

SEQ ID NO: 32340 - RNA, 21 nt, RNAi
uucucauucuugcgaccucua

SEQ ID NO: 32341 - DNA, 21 bp, homo sapiens
gaaactagcttatatggagct

SEQ ID NO: 32342 - RNA, 21 nt, RNAi
aacuagcuuauauggagcuuu

SEQ ID NO: 32343 - RNA, 21 nt, RNAi
uuuugaucgaauauaccucga

SEQ ID NO: 32344 - DNA, 21 bp, homo sapiens
gaagatctagaacacaagctt

SEQ ID NO: 32345 - RNA, 21 nt, RNAi
agaucuagaacacaagcuuuu

SEQ ID NO: 32346 - RNA, 21 nt, RNAi
uuucuagaucuuguguucgaa

SEQ ID NO: 32347 - DNA, 21 bp, homo sapiens
gacaaagaccggtgttaccaa

SEQ ID NO: 32348 - RNA, 21 nt, RNAi
caaagaccgguguuaccaauu

SEQ ID NO: 32349 - RNA, 21 nt, RNAi
uuguuucuggccacaaugguu

SEQ ID NO: 32350 - DNA, 21 bp, homo sapiens
gacttgcatgccgaatatgag

SEQ ID NO: 32351 - RNA, 21 nt, RNAi
cuugcaugccgaauaugaguu

SEQ ID NO: 32352 - RNA, 21 nt, RNAi
uugaacguacggcuuauacuc

SEQ ID NO: 32353 - DNA, 21 bp, homo sapiens
gagaacaaggaagcatgcctt

SEQ ID NO: 32354 - RNA, 21 nt, RNAi
gaacaaggaagcaugccuuuu

SEQ ID NO: 32355 - RNA, 21 nt, RNAi
uucuuguuccuucguacggaa

SEQ ID NO: 32356 - DNA, 21 bp, homo sapiens
gaacaaggaagcatgccttca

SEQ ID NO: 32357 - RNA, 21 nt, RNAi
acaaggaagcaugccuucauu

SEQ ID NO: 32358 - RNA, 21 nt, RNAi
uuuguuccuucguacggaagu

SEQ ID NO: 32359 - DNA, 21 bp, homo sapiens
gagtgaatgtcgtttagaagc

SEQ ID NO: 32360 - RNA, 21 nt, RNAi
gugaaugucguuuagaagcuu

SEQ ID NO: 32361 - RNA, 21 nt, RNAi
uucacuuacagcaaaucuucg

SEQ ID NO: 32362 - DNA, 21 bp, homo sapiens
gaatgtcgtttagaagcagac

SEQ ID NO: 32363 - RNA, 21 nt, RNAi
augucguuuagaagcagacuu

SEQ ID NO: 32364 - RNA, 21 nt, RNAi
uuuacagcaaaucuucgucug

SEQ ID NO: 32365 - DNA, 21 bp, homo sapiens
gaagcagaccaaagtccgaaa

SEQ ID NO: 32366 - RNA, 21 nt, RNAi
agcagaccaaaguccgaaauu

SEQ ID NO: 32367 - RNA, 21 nt, RNAi
uuucgucugguuucaggcuuu

SEQ ID NO: 32368 - DNA, 21 bp, homo sapiens
gagcaaccatctacttgaaga

SEQ ID NO: 32369 - RNA, 21 nt, RNAi
gcaaccaucuacuugaagauu

SEQ ID NO: 32370 - RNA, 21 nt, RNAi
uucguugguagaugaacuucu

SEQ ID NO: 32371 - DNA, 21 bp, homo sapiens
gactctctaaaggagctacaa

SEQ ID NO: 32372 - RNA, 21 nt, RNAi
cucucuaaaggagcuacaauu

SEQ ID NO: 32373 - RNA, 21 nt, RNAi
uugagagauuuccucgauguu

SEQ ID NO: 32374 - DNA, 21 bp, homo sapiens
gaatgcttgctaaatgaatgc

SEQ ID NO: 32375 - RNA, 21 nt, RNAi
augcuugcuaaaugaaugcuu

SEQ ID NO: 32376 - RNA, 21 nt, RNAi
uuuacgaacgauuuacuuacg

SEQ ID NO: 32377 - DNA, 21 bp, homo sapiens
gagaatgaacagctgatgaag

SEQ ID NO: 32378 - RNA, 21 nt, RNAi
gaaugaacagcugaugaaguu

SEQ ID NO: 32379 - RNA, 21 nt, RNAi
uucuuacuugucgacuacuuc

SEQ ID NO: 32380 - DNA, 21 bp, homo sapiens
gatagttataatgcgcagttg

SEQ ID NO: 32381 - RNA, 21 nt, RNAi
uaguuauaaugcgcaguuguu

SEQ ID NO: 32382 - RNA, 21 nt, RNAi
uuaucaauauuacgcgucaac

SEQ ID NO: 32383 - DNA, 21 bp, homo sapiens
gacaattagaggagatcttga

SEQ ID NO: 32384 - RNA, 21 nt, RNAi
caauuagaggagaucuugauu

SEQ ID NO: 32385 - RNA, 21 nt, RNAi
uuguuaaucuccucuagaacu

SEQ ID NO: 32386 - DNA, 21 bp, homo sapiens
gaactcgtaactgagctgaat

SEQ ID NO: 32387 - RNA, 21 nt, RNAi
acucguaacugagcugaauuu

SEQ ID NO: 32388 - RNA, 21 nt, RNAi
uuugagcauugacucgacuua

SEQ ID NO: 32389 - DNA, 21 bp, homo sapiens
gaatgtatcacagcaactagg

SEQ ID NO: 32390 - RNA, 21 nt, RNAi
auguaucacagcaacuagguu

SEQ ID NO: 32391 - RNA, 21 nt, RNAi
uuuacauagugucguugaucc

SEQ ID NO: 32392 - DNA, 21 bp, homo sapiens
gacataccaggaggtgaattt

SEQ ID NO: 32393 - RNA, 21 nt, RNAi
cauaccaggaggugaauuuuu

SEQ ID NO: 32394 - RNA, 21 nt, RNAi
uuguaugguccuccacuuaaa

SEQ ID NO: 32395 - DNA, 21 bp, homo sapiens
gacgagagtaattcctacgag

SEQ ID NO: 32396 - RNA, 21 nt, RNAi
cgagaguaauuccuacgaguu

SEQ ID NO: 32397 - RNA, 21 nt, RNAi
uugcucucauuaaggaugcuc

SEQ ID NO: 32398 - DNA, 21 bp, homo sapiens
gagagtaattcctacgagcac

SEQ ID NO: 32399 - RNA, 21 nt, RNAi
gaguaauuccuacgagcacuu

SEQ ID NO: 32400 - RNA, 21 nt, RNAi
uucucauuaaggaugcucgug

SEQ ID NO: 32401 - DNA, 21 bp, homo sapiens
gagtaattcctacgagcactt

SEQ ID NO: 32402 - RNA, 21 nt, RNAi
guaauuccuacgagcacuuuu

SEQ ID NO: 32403 - RNA, 21 nt, RNAi
uucauuaaggaugcucgugaa

SEQ ID NO: 32404 - DNA, 21 bp, homo sapiens
gaagttcaaatgcactttgcc

SEQ ID NO: 32405 - RNA, 21 nt, RNAi
aguucaaaugcacuuugccuu

SEQ ID NO: 32406 - RNA, 21 nt, RNAi
uuucaaguuuacgugaaacgg

SEQ ID NO: 32407 - DNA, 21 bp, homo sapiens
gagctgcagacctatgttgac

SEQ ID NO: 32408 - RNA, 21 nt, RNAi
gcugcagaccuauguugacuu

SEQ ID NO: 32409 - RNA, 21 nt, RNAi
uucgacgucuggauacaacug

SEQ ID NO: 32410 - DNA, 21 bp, homo sapiens
gaaattcaagagctcgagcag

SEQ ID NO: 32411 - RNA, 21 nt, RNAi
aauucaagagcucgagcaguu

SEQ ID NO: 32412 - RNA, 21 nt, RNAi
uuuuaaguucucgagcucguc

SEQ ID NO: 32413 - DNA, 21 bp, homo sapiens
gagctcgagcagttattaagt

SEQ ID NO: 32414 - RNA, 21 nt, RNAi
gcucgagcaguuauuaaguuu

SEQ ID NO: 32415 - RNA, 21 nt, RNAi
uucgagcucgucaauaauuca

SEQ ID NO: 32416 - DNA, 21 bp, homo sapiens
gaagctgacaagcgtgactct

SEQ ID NO: 32417 - RNA, 21 nt, RNAi
agcugacaagcgugacucuuu

SEQ ID NO: 32418 - RNA, 21 nt, RNAi
uuucgacuguucgcacugaga

SEQ ID NO: 32419 - DNA, 21 bp, homo sapiens
gacaagcgtgactctggagat

SEQ ID NO: 32420 - RNA, 21 nt, RNAi
caagcgugacucuggagauuu

SEQ ID NO: 32421 - RNA, 21 nt, RNAi
uuguucgcacugagaccucua

SEQ ID NO: 32422 - DNA, 21 bp, homo sapiens
gaaacagacggaacaactgtc

SEQ ID NO: 32423 - RNA, 21 nt, RNAi
aacagacggaacaacugucuu

SEQ ID NO: 32424 - RNA, 21 nt, RNAi
uuuugucugccuuguugacag

SEQ ID NO: 32425 - DNA, 21 bp, homo sapiens
gaacaactgtcacttgagctg

SEQ ID NO: 32426 - RNA, 21 nt, RNAi
acaacugucacuugagcuguu

SEQ ID NO: 32427 - RNA, 21 nt, RNAi
uuuguugacagugaacucgac

SEQ ID NO: 32428 - DNA, 21 bp, homo sapiens
gaagtagcacgactccagcta

SEQ ID NO: 32429 - RNA, 21 nt, RNAi
aguagcacgacuccagcuauu

SEQ ID NO: 32430 - RNA, 21 nt, RNAi
uuucaucgugcugaggucgau

SEQ ID NO: 32431 - DNA, 21 bp, homo sapiens
gaagatgctattcaaggccga

SEQ ID NO: 32432 - RNA, 21 nt, RNAi
agaugcuauucaaggccgauu

SEQ ID NO: 32433 - RNA, 21 nt, RNAi
uuucuacgauaaguuccggcu

SEQ ID NO: 32434 - DNA, 21 bp, homo sapiens
gatgctattcaaggccgaaat

SEQ ID NO: 32435 - RNA, 21 nt, RNAi
ugcuauucaaggccgaaauuu

SEQ ID NO: 32436 - RNA, 21 nt, RNAi
uuacgauaaguuccggcuuua

SEQ ID NO: 32437 - DNA, 21 bp, homo sapiens
gaaactacagaaagaacacca

SEQ ID NO: 32438 - RNA, 21 nt, RNAi
aacuacagaaagaacaccauu

SEQ ID NO: 32439 - RNA, 21 nt, RNAi
uuuugaugucuuucuuguggu

SEQ ID NO: 32440 - DNA, 21 bp, homo sapiens
gaacaccaaagcatgatgttc

SEQ ID NO: 32441 - RNA, 21 nt, RNAi
acaccaaagcaugauguucuu

SEQ ID NO: 32442 - RNA, 21 nt, RNAi
uuugugguuucguacuacaag

SEQ ID NO: 32443 - DNA, 21 bp, homo sapiens
gaaggagagatttcttgatgt

SEQ ID NO: 32444 - RNA, 21 nt, RNAi
aggagagauuucuugauguuu

SEQ ID NO: 32445 - RNA, 21 nt, RNAi
uuuccucucuaaagaacuaca

SEQ ID NO: 32446 - DNA, 21 bp, homo sapiens
gagctgagtaggatcagatcg

SEQ ID NO: 32447 - RNA, 21 nt, RNAi
gcugaguaggaucagaucguu

SEQ ID NO: 32448 - RNA, 21 nt, RNAi
uucgacucauccuagucuagc

SEQ ID NO: 32449 - DNA, 21 bp, homo sapiens
gagtaggatcagatcggagaa

SEQ ID NO: 32450 - RNA, 21 nt, RNAi
guaggaucagaucggagaauu

SEQ ID NO: 32451 - RNA, 21 nt, RNAi
uucauccuagucuagccucuu

SEQ ID NO: 32452 - DNA, 21 bp, homo sapiens
gatcagatcggagaaagctag

SEQ ID NO: 32453 - RNA, 21 nt, RNAi
ucagaucggagaaagcuaguu

SEQ ID NO: 32454 - RNA, 21 nt, RNAi
uuagucuagccucuuucgauc

SEQ ID NO: 32455 - DNA, 21 bp, homo sapiens
gatcggagaaagctagcattg

SEQ ID NO: 32456 - RNA, 21 nt, RNAi
ucggagaaagcuagcauuguu

SEQ ID NO: 32457 - RNA, 21 nt, RNAi
uuagccucuuucgaucguaac

SEQ ID NO: 32458 - DNA, 21 bp, homo sapiens
gagaaagctagcattgagcat

SEQ ID NO: 32459 - RNA, 21 nt, RNAi
gaaagcuagcauugagcauuu

SEQ ID NO: 32460 - RNA, 21 nt, RNAi
uucuuucgaucguaacucgua

SEQ ID NO: 32461 - DNA, 21 bp, homo sapiens
gaaagctagcattgagcatga

SEQ ID NO: 32462 - RNA, 21 nt, RNAi
aagcuagcauugagcaugauu

SEQ ID NO: 32463 - RNA, 21 nt, RNAi
uuuucgaucguaacucguacu

SEQ ID NO: 32464 - DNA, 21 bp, homo sapiens
gaggctgacttagaggtagtt

SEQ ID NO: 32465 - RNA, 21 nt, RNAi
ggcugacuuagagguaguuuu

SEQ ID NO: 32466 - RNA, 21 nt, RNAi
uuccgacugaaucuccaucaa

SEQ ID NO: 32467 - DNA, 21 bp, homo sapiens
gacttagaggtagttcaaaca

SEQ ID NO: 32468 - RNA, 21 nt, RNAi
cuuagagguaguucaaacauu

SEQ ID NO: 32469 - RNA, 21 nt, RNAi
uugaaucuccaucaaguuugu

SEQ ID NO: 32470 - DNA, 21 bp, homo sapiens
gagagaaaccagcttcgtgga

SEQ ID NO: 32471 - RNA, 21 nt, RNAi
gagaaaccagcuucguggauu

SEQ ID NO: 32472 - RNA, 21 nt, RNAi
uucucuuuggucgaagcaccu

SEQ ID NO: 32473 - DNA, 21 bp, homo sapiens
gagaaaccagcttcgtggaga

SEQ ID NO: 32474 - RNA, 21 nt, RNAi
gaaaccagcuucguggagauu

SEQ ID NO: 32475 - RNA, 21 nt, RNAi
uucuuuggucgaagcaccucu

SEQ ID NO: 32476 - DNA, 21 bp, homo sapiens
gaaaccagcttcgtggagaat

SEQ ID NO: 32477 - RNA, 21 nt, RNAi
aaccagcuucguggagaauuu

SEQ ID NO: 32478 - RNA, 21 nt, RNAi
uuuuggucgaagcaccucuua

SEQ ID NO: 32479 - DNA, 21 bp, homo sapiens
gactgagtgaatcagattatg

SEQ ID NO: 32480 - RNA, 21 nt, RNAi
cugagugaaucagauuauguu

SEQ ID NO: 32481 - RNA, 21 nt, RNAi
uugacucacuuagucuaauac

SEQ ID NO: 32482 - DNA, 21 bp, homo sapiens
gagaaaggtgagttcgcattg

SEQ ID NO: 32483 - RNA, 21 nt, RNAi
gaaaggugaguucgcauuguu

SEQ ID NO: 32484 - RNA, 21 nt, RNAi
uucuuuccacucaagcguaac

SEQ ID NO: 32485 - DNA, 21 bp, homo sapiens
gaaaggtgagttcgcattgag

SEQ ID NO: 32486 - RNA, 21 nt, RNAi
aaggugaguucgcauugaguu

SEQ ID NO: 32487 - RNA, 21 nt, RNAi
uuuuccacucaagcguaacuc

SEQ ID NO: 32488 - DNA, 21 bp, homo sapiens
gagaagaggcatcgagaaact

SEQ ID NO: 32489 - RNA, 21 nt, RNAi
gaagaggcaucgagaaacuuu

SEQ ID NO: 32490 - RNA, 21 nt, RNAi
uucuucuccguagcucuuuga

SEQ ID NO: 32491 - DNA, 21 bp, homo sapiens
gaagaggcatcgagaaactga

SEQ ID NO: 32492 - RNA, 21 nt, RNAi
agaggcaucgagaaacugauu

SEQ ID NO: 32493 - RNA, 21 nt, RNAi
uuucuccguagcucuuugacu

SEQ ID NO: 32494 - DNA, 21 bp, homo sapiens
gagaaactgaaagaacgcgag

SEQ ID NO: 32495 - RNA, 21 nt, RNAi
gaaacugaaagaacgcgaguu

SEQ ID NO: 32496 - RNA, 21 nt, RNAi
uucuuugacuuucuugcgcuc

SEQ ID NO: 32497 - DNA, 21 bp, homo sapiens
gaaactgaaagaacgcgagcg

SEQ ID NO: 32498 - RNA, 21 nt, RNAi
aacugaaagaacgcgagcguu

SEQ ID NO: 32499 - RNA, 21 nt, RNAi
uuuugacuuucuugcgcucgc

SEQ ID NO: 32500 - DNA, 21 bp, homo sapiens
gaattgcagatgtcagaagaa

SEQ ID NO: 32501 - RNA, 21 nt, RNAi
auugcagaugucagaagaauu

SEQ ID NO: 32502 - RNA, 21 nt, RNAi
uuuaacgucuacagucuucuu

SEQ ID NO: 32503 - DNA, 21 bp, homo sapiens
gagctagtgattcttgatgcc

SEQ ID NO: 32504 - RNA, 21 nt, RNAi
gcuagugauucuugaugccuu

SEQ ID NO: 32505 - RNA, 21 nt, RNAi
uucgaucacuaagaacuacgg

SEQ ID NO: 32506 - DNA, 21 bp, homo sapiens
gattcttgatgccgagaattc

SEQ ID NO: 32507 - RNA, 21 nt, RNAi
uucuugaugccgagaauucuu

SEQ ID NO: 32508 - RNA, 21 nt, RNAi
uuaagaacuacggcucuuaag

SEQ ID NO: 32509 - DNA, 21 bp, homo sapiens
gaattagaccttgtcacgtta

SEQ ID NO: 32510 - RNA, 21 nt, RNAi
auuagaccuugucacguuauu

SEQ ID NO: 32511 - RNA, 21 nt, RNAi
uuuaaucuggaacagugcaau

SEQ ID NO: 32512 - DNA, 21 bp, homo sapiens
gaccttgtcacgttaaggtct

SEQ ID NO: 32513 - RNA, 21 nt, RNAi
ccuugucacguuaaggucuuu

SEQ ID NO: 32514 - RNA, 21 nt, RNAi
uuggaacagugcaauuccaga

SEQ ID NO: 32515 - DNA, 21 bp, homo sapiens
gaactagacaagttactctct

SEQ ID NO: 32516 - RNA, 21 nt, RNAi
acuagacaaguuacucucuuu

SEQ ID NO: 32517 - RNA, 21 nt, RNAi
uuugaucuguucaaugagaga

SEQ ID NO: 32518 - DNA, 21 bp, homo sapiens
gaaggaaagtgagcatcatgc

SEQ ID NO: 32519 - RNA, 21 nt, RNAi
aggaaagugagcaucaugcuu

SEQ ID NO: 32520 - RNA, 21 nt, RNAi
uuuccuuucacucguaguacg

SEQ ID NO: 32521 - DNA, 21 bp, homo sapiens
gagtggagaaccttgaaagag

SEQ ID NO: 32522 - RNA, 21 nt, RNAi
guggagaaccuugaaagaguu

SEQ ID NO: 32523 - RNA, 21 nt, RNAi
uucaccucuuggaacuuucuc

SEQ ID NO: 32524 - DNA, 21 bp, homo sapiens
gagagctagagatagccagga

SEQ ID NO: 32525 - RNA, 21 nt, RNAi
gagcuagagauagccaggauu

SEQ ID NO: 32526 - RNA, 21 nt, RNAi
uucucgaucucuaucgguccu

SEQ ID NO: 32527 - DNA, 21 bp, homo sapiens
gagctagagatagccaggaca

SEQ ID NO: 32528 - RNA, 21 nt, RNAi
gcuagagauagccaggacauu

SEQ ID NO: 32529 - RNA, 21 nt, RNAi
uucgaucucuaucgguccugu

SEQ ID NO: 32530 - DNA, 21 bp, homo sapiens
gaggtctggaattagatgttg

SEQ ID NO: 32531 - RNA, 21 nt, RNAi
ggucuggaauuagauguuguu

SEQ ID NO: 32532 - RNA, 21 nt, RNAi
uuccagaccuuaaucuacaac

SEQ ID NO: 32533 - DNA, 21 bp, homo sapiens
gagcaagagcgaatatctgaa

SEQ ID NO: 32534 - RNA, 21 nt, RNAi
gcaagagcgaauaucugaauu

SEQ ID NO: 32535 - RNA, 21 nt, RNAi
uucguucucgcuuauagacuu

SEQ ID NO: 32536 - DNA, 21 bp, homo sapiens
gagcagaatcttagtagtcaa

SEQ ID NO: 32537 - RNA, 21 nt, RNAi
gcagaaucuuaguagucaauu

SEQ ID NO: 32538 - RNA, 21 nt, RNAi
uucgucuuagaaucaucaguu

SEQ ID NO: 32539 - DNA, 21 bp, homo sapiens
gaacttgagaaggctcagttg

SEQ ID NO: 32540 - RNA, 21 nt, RNAi
acuugagaaggcucaguuguu

SEQ ID NO: 32541 - RNA, 21 nt, RNAi
uuugaacucuuccgagucaac

SEQ ID NO: 32542 - DNA, 21 bp, homo sapiens
gaatggcctcattcaagaagt

SEQ ID NO: 32543 - RNA, 21 nt, RNAi
auggccucauucaagaaguuu

SEQ ID NO: 32544 - RNA, 21 nt, RNAi
uuuaccggaguaaguucuuca

SEQ ID NO: 32545 - DNA, 21 bp, homo sapiens
gagaatgagcttgaattgaca

SEQ ID NO: 32546 - RNA, 21 nt, RNAi
gaaugagcuugaauugacauu

SEQ ID NO: 32547 - RNA, 21 nt, RNAi
uucuuacucgaacuuaacugu

SEQ ID NO: 32548 - DNA, 21 bp, homo sapiens
gaagttgttgatcaaatcctg

SEQ ID NO: 32549 - RNA, 21 nt, RNAi
aguuguugaucaaauccuguu

SEQ ID NO: 32550 - RNA, 21 nt, RNAi
uuucaacaacuaguuuaggac

SEQ ID NO: 32551 - DNA, 21 bp, homo sapiens
gataagtactgttccttgctt

SEQ ID NO: 32552 - RNA, 21 nt, RNAi
uaaguacuguuccuugcuuuu

SEQ ID NO: 32553 - RNA, 21 nt, RNAi
uuauucaugacaaggaacgaa

SEQ ID NO: 32554 - DNA, 21 bp, homo sapiens
gaaagcagtcatgagtggtat

SEQ ID NO: 32555 - RNA, 21 nt, RNAi
aagcagucaugagugguauuu

SEQ ID NO: 32556 - RNA, 21 nt, RNAi
uuuucgucaguacucaccaua

SEQ ID NO: 32557 - DNA, 21 bp, homo sapiens
gaagacacggaaggtactgag

SEQ ID NO: 32558 - RNA, 21 nt, RNAi
agacacggaagguacugaguu

SEQ ID NO: 32559 - RNA, 21 nt, RNAi
uuucugugccuuccaugacuc

SEQ ID NO: 32560 - DNA, 21 bp, homo sapiens
gacacggaaggtactgagttt

SEQ ID NO: 32561 - RNA, 21 nt, RNAi
cacggaagguacugaguuuuu

SEQ ID NO: 32562 - RNA, 21 nt, RNAi
uugugccuuccaugacucaaa

SEQ ID NO: 32563 - DNA, 21 bp, homo sapiens
taatgagttggaactacgcct

SEQ ID NO: 32564 - RNA, 21 nt, RNAi
augaguuggaacuacgccuuu

SEQ ID NO: 32565 - RNA, 21 nt, RNAi
uuuacucaaccuugaugcgga

SEQ ID NO: 32566 - DNA, 21 bp, homo sapiens
tacagcaagccaagaatatgc

SEQ ID NO: 32567 - RNA, 21 nt, RNAi
cagcaagccaagaauaugcuu

SEQ ID NO: 32568 - RNA, 21 nt, RNAi
uugucguucgguucuuauacg

SEQ ID NO: 32569 - DNA, 21 bp, homo sapiens
tacaacgagagagtaagaacg

SEQ ID NO: 32570 - RNA, 21 nt, RNAi
caacgagagaguaagaacguu

SEQ ID NO: 32571 - RNA, 21 nt, RNAi
uuguugcucucucauucuugc

SEQ ID NO: 32572 - DNA, 21 bp, homo sapiens
taagtgtcgagatcagaaacc

SEQ ID NO: 32573 - RNA, 21 nt, RNAi
agugucgagaucagaaaccuu

SEQ ID NO: 32574 - RNA, 21 nt, RNAi
uuucacagcucuagucuuugg

SEQ ID NO: 32575 - DNA, 21 bp, homo sapiens
tagcttatatggagctacagc

SEQ ID NO: 32576 - RNA, 21 nt, RNAi
gcuuauauggagcuacagcuu

SEQ ID NO: 32577 - RNA, 21 nt, RNAi
uucgaauauaccucgaugucg

SEQ ID NO: 32578 - DNA, 21 bp, homo sapiens
taccaagacttgcatgccgaa

SEQ ID NO: 32579 - RNA, 21 nt, RNAi
ccaagacuugcaugccgaauu

SEQ ID NO: 32580 - RNA, 21 nt, RNAi
uugguucugaacguacggcuu

SEQ ID NO: 32581 - DNA, 21 bp, homo sapiens
tagaatcagaaccaattagga

SEQ ID NO: 32582 - RNA, 21 nt, RNAi
gaaucagaaccaauuaggauu

SEQ ID NO: 32583 - RNA, 21 nt, RNAi
uucuuagucuugguuaauccu

SEQ ID NO: 32584 - DNA, 21 bp, homo sapiens
tagatagttataatgcgcagt

SEQ ID NO: 32585 - RNA, 21 nt, RNAi
gauaguuauaaugcgcaguuu

SEQ ID NO: 32586 - RNA, 21 nt, RNAi
uucuaucaauauuacgcguca

SEQ ID NO: 32587 - DNA, 21 bp, homo sapiens
tagttataatgcgcagttggt

SEQ ID NO: 32588 - RNA, 21 nt, RNAi
guuauaaugcgcaguugguuu

SEQ ID NO: 32589 - RNA, 21 nt, RNAi
uucaauauuacgcgucaacca

SEQ ID NO: 32590 - DNA, 21 bp, homo sapiens
tataatgcgcagttggtgcaa

SEQ ID NO: 32591 - RNA, 21 nt, RNAi
uaaugcgcaguuggugcaauu

SEQ ID NO: 32592 - RNA, 21 nt, RNAi
uuauuacgcgucaaccacguu

SEQ ID NO: 32593 - DNA, 21 bp, homo sapiens
taatgcgcagttggtgcaatt

SEQ ID NO: 32594 - RNA, 21 nt, RNAi
augcgcaguuggugcaauuuu

SEQ ID NO: 32595 - RNA, 21 nt, RNAi
uuuacgcgucaaccacguuaa

SEQ ID NO: 32596 - DNA, 21 bp, homo sapiens
tacagacaattagaggagatc

SEQ ID NO: 32597 - RNA, 21 nt, RNAi
cagacaauuagaggagaucuu

SEQ ID NO: 32598 - RNA, 21 nt, RNAi
uugucuguuaaucuccucuag

SEQ ID NO: 32599 - DNA, 21 bp, homo sapiens
tatgaactcgtaactgagctg

SEQ ID NO: 32600 - RNA, 21 nt, RNAi
ugaacucguaacugagcuguu

SEQ ID NO: 32601 - RNA, 21 nt, RNAi
uuacuugagcauugacucgac

SEQ ID NO: 32602 - DNA, 21 bp, homo sapiens
tagtggaagacataccaggag

SEQ ID NO: 32603 - RNA, 21 nt, RNAi
guggaagacauaccaggaguu

SEQ ID NO: 32604 - RNA, 21 nt, RNAi
uucaccuucuguaugguccuc

SEQ ID NO: 32605 - DNA, 21 bp, homo sapiens
taattcctacgagcacttgac

SEQ ID NO: 32606 - RNA, 21 nt, RNAi
auuccuacgagcacuugacuu

SEQ ID NO: 32607 - RNA, 21 nt, RNAi
uuuaaggaugcucgugaacug

SEQ ID NO: 32608 - DNA, 21 bp, homo sapiens
tacatgatcagcactgtcaga

SEQ ID NO: 32609 - RNA, 21 nt, RNAi
caugaucagcacugucagauu

SEQ ID NO: 32610 - RNA, 21 nt, RNAi
uuguacuagucgugacagucu

SEQ ID NO: 32611 - DNA, 21 bp, homo sapiens
tacaaggtctggacttaagtt

SEQ ID NO: 32612 - RNA, 21 nt, RNAi
caaggucuggacuuaaguuuu

SEQ ID NO: 32613 - RNA, 21 nt, RNAi
uuguuccagaccugaauucaa

SEQ ID NO: 32614 - DNA, 21 bp, homo sapiens
taagttctcggtctttgcttg

SEQ ID NO: 32615 - RNA, 21 nt, RNAi
aguucucggucuuugcuuguu

SEQ ID NO: 32616 - RNA, 21 nt, RNAi
uuucaagagccagaaacgaac

SEQ ID NO: 32617 - DNA, 21 bp, homo sapiens
tacaggaggtacaactaatga

SEQ ID NO: 32618 - RNA, 21 nt, RNAi
caggagguacaacuaaugauu

SEQ ID NO: 32619 - RNA, 21 nt, RNAi
uuguccuccauguugauuacu

SEQ ID NO: 32620 - DNA, 21 bp, homo sapiens
tattggagataatgtggccaa

SEQ ID NO: 32621 - RNA, 21 nt, RNAi
uuggagauaauguggccaauu

SEQ ID NO: 32622 - RNA, 21 nt, RNAi
uuaaccucuauuacaccgguu

SEQ ID NO: 32623 - DNA, 21 bp, homo sapiens
taggatcagatcggagaaagc

SEQ ID NO: 32624 - RNA, 21 nt, RNAi
ggaucagaucggagaaagcuu

SEQ ID NO: 32625 - RNA, 21 nt, RNAi
uuccuagucuagccucuuucg

SEQ ID NO: 32626 - DNA, 21 bp, homo sapiens
tagtgattcttgatgccgaga

SEQ ID NO: 32627 - RNA, 21 nt, RNAi
gugauucuugaugccgagauu

SEQ ID NO: 32628 - RNA, 21 nt, RNAi
uucacuaagaacuacggcucu

SEQ ID NO: 32629 - DNA, 21 bp, homo sapiens
tagagtggagaaccttgaaag

SEQ ID NO: 32630 - RNA, 21 nt, RNAi
gaguggagaaccuugaaaguu

SEQ ID NO: 32631 - RNA, 21 nt, RNAi
uucucaccucuuggaacuuuc

SEQ ID NO: 32632 - DNA, 21 bp, homo sapiens
tagagatagccaggacaaacc

SEQ ID NO: 32633 - RNA, 21 nt, RNAi
gagauagccaggacaaaccuu

SEQ ID NO: 32634 - RNA, 21 nt, RNAi
uucucuaucgguccuguuugg

SEQ ID NO: 32635 - DNA, 21 bp, homo sapiens
taatgaccaagaagcctgtaa

SEQ ID NO: 32636 - RNA, 21 nt, RNAi
augaccaagaagccuguaauu

SEQ ID NO: 32637 - RNA, 21 nt, RNAi
uuuacugguucuucggacauu

SEQ ID NO: 32638 - DNA, 21 bp, homo sapiens
tagtagtcaagtagagtgtct

SEQ ID NO: 32639 - RNA, 21 nt, RNAi
guagucaaguagagugucuuu

SEQ ID NO: 32640 - RNA, 21 nt, RNAi
uucaucaguucaucucacaga

SEQ ID NO: 32641 - DNA, 21 bp, homo sapiens
taaagtctagtaaagaagagc

SEQ ID NO: 32642 - RNA, 21 nt, RNAi
aagucuaguaaagaagagcuu

SEQ ID NO: 32643 - RNA, 21 nt, RNAi
uuuucagaucauuucuucucg

SEQ ID NO: 32644 - DNA, 21 bp, homo sapiens
taccaaggtcgatgaattaac

SEQ ID NO: 32645 - RNA, 21 nt, RNAi
ccaaggucgaugaauuaacuu

SEQ ID NO: 32646 - RNA, 21 nt, RNAi
uugguuccagcuacuuaauug

SEQ ID NO: 32647 - DNA, 21 bp, homo sapiens
taagtactgttccttgcttat

SEQ ID NO: 32648 - RNA, 21 nt, RNAi
aguacuguuccuugcuuauuu

SEQ ID NO: 32649 - RNA, 21 nt, RNAi
uuucaugacaaggaacgaaua

SEQ ID NO: 32650 - DNA, 21 bp, homo sapiens
taaagagatgttagagacaca

SEQ ID NO: 32651 - RNA, 21 nt, RNAi
aagagauguuagagacacauu

SEQ ID NO: 32652 - RNA, 21 nt, RNAi
uuuucucuacaaucucugugu

SEQ ID NO: 32653 - DNA, 21 bp, homo sapiens
tatatcctgcgaagaacaacc

SEQ ID NO: 32654 - RNA, 21 nt, RNAi
uauccugcgaagaacaaccuu

SEQ ID NO: 32655 - RNA, 21 nt, RNAi
uuauaggacgcuucuuguugg

SEQ ID NO: 32656 - DNA, 21 bp, homo sapiens
tatcctgcgaagaacaaccat

SEQ ID NO: 32657 - RNA, 21 nt, RNAi
uccugcgaagaacaaccauuu

SEQ ID NO: 32658 - RNA, 21 nt, RNAi
uuaggacgcuucuuguuggua

SEQ ID NO: 32659 - DNA, 21 bp, homo sapiens
aatggaactcagcgatgcaaa

SEQ ID NO: 32660 - RNA, 21 nt, RNAi
uggaacucagcgaugcaaauu

SEQ ID NO: 32661 - RNA, 21 nt, RNAi
uuaccuugagucgcuacguuu

SEQ ID NO: 32662 - DNA, 21 bp, homo sapiens
aactcagcgatgcaaatctgc

SEQ ID NO: 32663 - RNA, 21 nt, RNAi
cucagcgaugcaaaucugcuu

SEQ ID NO: 32664 - RNA, 21 nt, RNAi
uugagucgcuacguuuagacg

SEQ ID NO: 32665 - DNA, 21 bp, homo sapiens
aaatctgcaaacactaacaga

SEQ ID NO: 32666 - RNA, 21 nt, RNAi
aucugcaaacacuaacagauu

SEQ ID NO: 32667 - RNA, 21 nt, RNAi
uuuagacguuugugauugucu

SEQ ID NO: 32668 - DNA, 21 bp, homo sapiens
aatctgcaaacactaacagaa

SEQ ID NO: 32669 - RNA, 21 nt, RNAi
ucugcaaacacuaacagaauu

SEQ ID NO: 32670 - RNA, 21 nt, RNAi
uuagacguuugugauugucuu

SEQ ID NO: 32671 - DNA, 21 bp, homo sapiens
aaacacttgatcctgatcctg

SEQ ID NO: 32672 - RNA, 21 nt, RNAi
acacuugauccugauccuguu

SEQ ID NO: 32673 - RNA, 21 nt, RNAi
uuugugaacuaggacuaggac

SEQ ID NO: 32674 - DNA, 21 bp, homo sapiens
aacacttgatcctgatcctgc

SEQ ID NO: 32675 - RNA, 21 nt, RNAi
cacuugauccugauccugcuu

SEQ ID NO: 32676 - RNA, 21 nt, RNAi
uugugaacuaggacuaggacg

SEQ ID NO: 32677 - DNA, 21 bp, homo sapiens
aatctgttgaaggaaatcaga

SEQ ID NO: 32678 - RNA, 21 nt, RNAi
ucuguugaaggaaaucagauu

SEQ ID NO: 32679 - RNA, 21 nt, RNAi
uuagacaacuuccuuuagucu

SEQ ID NO: 32680 - DNA, 21 bp, homo sapiens
aaggaaatcagaattatccac

SEQ ID NO: 32681 - RNA, 21 nt, RNAi
ggaaaucagaauuauccacuu

SEQ ID NO: 32682 - RNA, 21 nt, RNAi
uuccuuuagucuuaauaggug

SEQ ID NO: 32683 - DNA, 21 bp, homo sapiens
aatcagaattatccactgttg

SEQ ID NO: 32684 - RNA, 21 nt, RNAi
ucagaauuauccacuguuguu

SEQ ID NO: 32685 - RNA, 21 nt, RNAi
uuagucuuaauaggugacaac

SEQ ID NO: 32686 - DNA, 21 bp, homo sapiens
aaagtatgtgcttcagtaaca

SEQ ID NO: 32687 - RNA, 21 nt, RNAi
aguaugugcuucaguaacauu

SEQ ID NO: 32688 - RNA, 21 nt, RNAi
uuucauacacgaagucauugu

SEQ ID NO: 32689 - DNA, 21 bp, homo sapiens
aagtatgtgcttcagtaacat

SEQ ID NO: 32690 - RNA, 21 nt, RNAi
guaugugcuucaguaacauuu

SEQ ID NO: 32691 - RNA, 21 nt, RNAi
uucauacacgaagucauugua

SEQ ID NO: 32692 - DNA, 21 bp, homo sapiens
aaaggaactggagaattgttg

SEQ ID NO: 32693 - RNA, 21 nt, RNAi
aggaacuggagaauuguuguu

SEQ ID NO: 32694 - RNA, 21 nt, RNAi
uuuccuugaccucuuaacaac

SEQ ID NO: 32695 - DNA, 21 bp, homo sapiens
aaggaactggagaattgttga

SEQ ID NO: 32696 - RNA, 21 nt, RNAi
ggaacuggagaauuguugauu

SEQ ID NO: 32697 - RNA, 21 nt, RNAi
uuccuugaccucuuaacaacu

SEQ ID NO: 32698 - DNA, 21 bp, homo sapiens
aactggagaattgttgaagat

SEQ ID NO: 32699 - RNA, 21 nt, RNAi
cuggagaauuguugaagauuu

SEQ ID NO: 32700 - RNA, 21 nt, RNAi
uugaccucuuaacaacuucua

SEQ ID NO: 32701 - DNA, 21 bp, homo sapiens
aaatttgtgaagccgatcgag

SEQ ID NO: 32702 - RNA, 21 nt, RNAi
auuugugaagccgaucgaguu

SEQ ID NO: 32703 - RNA, 21 nt, RNAi
uuuaaacacuucggcuagcuc

SEQ ID NO: 32704 - DNA, 21 bp, homo sapiens
aatttgtgaagccgatcgagt

SEQ ID NO: 32705 - RNA, 21 nt, RNAi
uuugugaagccgaucgaguuu

SEQ ID NO: 32706 - RNA, 21 nt, RNAi
uuaaacacuucggcuagcuca

SEQ ID NO: 32707 - DNA, 21 bp, homo sapiens
aagccgatcgagtggccatta

SEQ ID NO: 32708 - RNA, 21 nt, RNAi
gccgaucgaguggccauuauu

SEQ ID NO: 32709 - RNA, 21 nt, RNAi
uucggcuagcucaccgguaau

SEQ ID NO: 32710 - DNA, 21 bp, homo sapiens
aaagccaacatagtgcacttg

SEQ ID NO: 32711 - RNA, 21 nt, RNAi
agccaacauagugcacuuguu

SEQ ID NO: 32712 - RNA, 21 nt, RNAi
uuucgguuguaucacgugaac

SEQ ID NO: 32713 - DNA, 21 bp, homo sapiens
aagccaacatagtgcacttga

SEQ ID NO: 32714 - RNA, 21 nt, RNAi
gccaacauagugcacuugauu

SEQ ID NO: 32715 - RNA, 21 nt, RNAi
uucgguuguaucacgugaacu

SEQ ID NO: 32716 - DNA, 21 bp, homo sapiens
aacatagtgcacttgatgctt

SEQ ID NO: 32717 - RNA, 21 nt, RNAi
cauagugcacuugaugcuuuu

SEQ ID NO: 32718 - RNA, 21 nt, RNAi
uuguaucacgugaacuacgaa

SEQ ID NO: 32719 - DNA, 21 bp, homo sapiens
aaattcagaagcagttaagtg

SEQ ID NO: 32720 - RNA, 21 nt, RNAi
auucagaagcaguuaaguguu

SEQ ID NO: 32721 - RNA, 21 nt, RNAi
uuuaagucuucgucaauucac

SEQ ID NO: 32722 - DNA, 21 bp, homo sapiens
aattcagaagcagttaagtga

SEQ ID NO: 32723 - RNA, 21 nt, RNAi
uucagaagcaguuaagugauu

SEQ ID NO: 32724 - RNA, 21 nt, RNAi
uuaagucuucgucaauucacu

SEQ ID NO: 32725 - DNA, 21 bp, homo sapiens
aagcagttaagtgatgcaatt

SEQ ID NO: 32726 - RNA, 21 nt, RNAi
gcaguuaagugaugcaauuuu

SEQ ID NO: 32727 - RNA, 21 nt, RNAi
uucgucaauucacuacguuaa

SEQ ID NO: 32728 - DNA, 21 bp, homo sapiens
aattagcattattggcagaga

SEQ ID NO: 32729 - RNA, 21 nt, RNAi
uuagcauuauuggcagagauu

SEQ ID NO: 32730 - RNA, 21 nt, RNAi
uuaaucguaauaaccgucucu

SEQ ID NO: 32731 - DNA, 21 bp, homo sapiens
aaatggcctgacttgctgaca

SEQ ID NO: 32732 - RNA, 21 nt, RNAi
auggccugacuugcugacauu

SEQ ID NO: 32733 - RNA, 21 nt, RNAi
uuuaccggacugaacgacugu

SEQ ID NO: 32734 - DNA, 21 bp, homo sapiens
aatggcctgacttgctgacag

SEQ ID NO: 32735 - RNA, 21 nt, RNAi
uggccugacuugcugacaguu

SEQ ID NO: 32736 - RNA, 21 nt, RNAi
uuaccggacugaacgacuguc

SEQ ID NO: 32737 - DNA, 21 bp, homo sapiens
aaatggtgaatcgctttcaga

SEQ ID NO: 32738 - RNA, 21 nt, RNAi
auggugaaucgcuuucagauu

SEQ ID NO: 32739 - RNA, 21 nt, RNAi
uuuaccacuuagcgaaagucu

SEQ ID NO: 32740 - DNA, 21 bp, homo sapiens
aatggtgaatcgctttcagag

SEQ ID NO: 32741 - RNA, 21 nt, RNAi
uggugaaucgcuuucagaguu

SEQ ID NO: 32742 - RNA, 21 nt, RNAi
uuaccacuuagcgaaagucuc

SEQ ID NO: 32743 - DNA, 21 bp, homo sapiens
aatcgctttcagagtggagat

SEQ ID NO: 32744 - RNA, 21 nt, RNAi
ucgcuuucagaguggagauuu

SEQ ID NO: 32745 - RNA, 21 nt, RNAi
uuagcgaaagucucaccucua

SEQ ID NO: 32746 - DNA, 21 bp, homo sapiens
aatggagtcctccgtacagca

SEQ ID NO: 32747 - RNA, 21 nt, RNAi
uggaguccuccguacagcauu

SEQ ID NO: 32748 - RNA, 21 nt, RNAi
uuaccucaggaggcaugucgu

SEQ ID NO: 32749 - DNA, 21 bp, homo sapiens
aagtcaaacgagttatggact

SEQ ID NO: 32750 - RNA, 21 nt, RNAi
gucaaacgaguuauggacuuu

SEQ ID NO: 32751 - RNA, 21 nt, RNAi
uucaguuugcucaauaccuga

SEQ ID NO: 32752 - DNA, 21 bp, homo sapiens
aaacgagttatggactgaaat

SEQ ID NO: 32753 - RNA, 21 nt, RNAi
acgaguuauggacugaaauuu

SEQ ID NO: 32754 - RNA, 21 nt, RNAi
uuugcucaauaccugacuuua

SEQ ID NO: 32755 - DNA, 21 bp, homo sapiens
aacgagttatggactgaaatt

SEQ ID NO: 32756 - RNA, 21 nt, RNAi
cgaguuauggacugaaauuuu

SEQ ID NO: 32757 - RNA, 21 nt, RNAi
uugcucaauaccugacuuuaa

SEQ ID NO: 32758 - DNA, 21 bp, homo sapiens
aaattaagcttgttctggatg

SEQ ID NO: 32759 - RNA, 21 nt, RNAi
auuaagcuuguucuggauguu

SEQ ID NO: 32760 - RNA, 21 nt, RNAi
uuuaauucgaacaagaccuac

SEQ ID NO: 32761 - DNA, 21 bp, homo sapiens
aattaagcttgttctggatgc

SEQ ID NO: 32762 - RNA, 21 nt, RNAi
uuaagcuuguucuggaugcuu

SEQ ID NO: 32763 - RNA, 21 nt, RNAi
uuaauucgaacaagaccuacg

SEQ ID NO: 32764 - DNA, 21 bp, homo sapiens
aagcttgttctggatgccttt

SEQ ID NO: 32765 - RNA, 21 nt, RNAi
gcuuguucuggaugccuuuuu

SEQ ID NO: 32766 - RNA, 21 nt, RNAi
uucgaacaagaccuacggaaa

SEQ ID NO: 32767 - DNA, 21 bp, homo sapiens
aaggccactattgaactctgc

SEQ ID NO: 32768 - RNA, 21 nt, RNAi
ggccacuauugaacucugcuu

SEQ ID NO: 32769 - RNA, 21 nt, RNAi
uuccggugauaacuugagacg

SEQ ID NO: 32770 - DNA, 21 bp, homo sapiens
aaggtaatatggaaacttgga

SEQ ID NO: 32771 - RNA, 21 nt, RNAi
gguaauauggaaacuuggauu

SEQ ID NO: 32772 - RNA, 21 nt, RNAi
uuccauuauaccuuugaaccu

SEQ ID NO: 32773 - DNA, 21 bp, homo sapiens
aaactgatgatgaagaggaag

SEQ ID NO: 32774 - RNA, 21 nt, RNAi
acugaugaugaagaggaaguu

SEQ ID NO: 32775 - RNA, 21 nt, RNAi
uuugacuacuacuucuccuuc

SEQ ID NO: 32776 - DNA, 21 bp, homo sapiens
aactgatgatgaagaggaagc

SEQ ID NO: 32777 - RNA, 21 nt, RNAi
cugaugaugaagaggaagcuu

SEQ ID NO: 32778 - RNA, 21 nt, RNAi
uugacuacuacuucuccuucg

SEQ ID NO: 32779 - DNA, 21 bp, homo sapiens
aagaggaagccggcttattgg

SEQ ID NO: 32780 - RNA, 21 nt, RNAi
gaggaagccggcuuauugguu

SEQ ID NO: 32781 - RNA, 21 nt, RNAi
uucuccuucggccgaauaacc

SEQ ID NO: 32782 - DNA, 21 bp, homo sapiens
aagccggcttattggagctct

SEQ ID NO: 32783 - RNA, 21 nt, RNAi
gccggcuuauuggagcucuuu

SEQ ID NO: 32784 - RNA, 21 nt, RNAi
uucggccgaauaaccucgaga

SEQ ID NO: 32785 - DNA, 21 bp, homo sapiens
aatgccgcactctatgcacaa

SEQ ID NO: 32786 - RNA, 21 nt, RNAi
ugccgcacucuaugcacaauu

SEQ ID NO: 32787 - RNA, 21 nt, RNAi
uuacggcgugagauacguguu

SEQ ID NO: 32788 - DNA, 21 bp, homo sapiens
aaagtacgatgaagaattcca

SEQ ID NO: 32789 - RNA, 21 nt, RNAi
aguacgaugaagaauuccauu

SEQ ID NO: 32790 - RNA, 21 nt, RNAi
uuucaugcuacuucuuaaggu

SEQ ID NO: 32791 - DNA, 21 bp, homo sapiens
aagtacgatgaagaattccag

SEQ ID NO: 32792 - RNA, 21 nt, RNAi
guacgaugaagaauuccaguu

SEQ ID NO: 32793 - RNA, 21 nt, RNAi
uucaugcuacuucuuaagguc

SEQ ID NO: 32794 - DNA, 21 bp, homo sapiens
aagaattccagcgatacctgc

SEQ ID NO: 32795 - RNA, 21 nt, RNAi
gaauuccagcgauaccugcuu

SEQ ID NO: 32796 - RNA, 21 nt, RNAi
uucuuaaggucgcuauggacg

SEQ ID NO: 32797 - DNA, 21 bp, homo sapiens
aattccagcgatacctgcctc

SEQ ID NO: 32798 - RNA, 21 nt, RNAi
uuccagcgauaccugccucuu

SEQ ID NO: 32799 - RNA, 21 nt, RNAi
uuaaggucgcuauggacggag

SEQ ID NO: 32800 - DNA, 21 bp, homo sapiens
aatgcaattcaatttctggct

SEQ ID NO: 32801 - RNA, 21 nt, RNAi
ugcaauucaauuucuggcuuu

SEQ ID NO: 32802 - RNA, 21 nt, RNAi
uuacguuaaguuaaagaccga

SEQ ID NO: 32803 - DNA, 21 bp, homo sapiens
aattcaatttctggcttcagt

SEQ ID NO: 32804 - RNA, 21 nt, RNAi
uucaauuucuggcuucaguuu

SEQ ID NO: 32805 - RNA, 21 nt, RNAi
uuaaguuaaagaccgaaguca

SEQ ID NO: 32806 - DNA, 21 bp, homo sapiens
aatttctggcttcagtttgtg

SEQ ID NO: 32807 - RNA, 21 nt, RNAi
uuucuggcuucaguuuguguu

SEQ ID NO: 32808 - RNA, 21 nt, RNAi
uuaaagaccgaagucaaacac

SEQ ID NO: 32809 - DNA, 21 bp, homo sapiens
aagaatctatttgaggaccag

SEQ ID NO: 32810 - RNA, 21 nt, RNAi
gaaucuauuugaggaccaguu

SEQ ID NO: 32811 - RNA, 21 nt, RNAi
uucuuagauaaacuccugguc

SEQ ID NO: 32812 - DNA, 21 bp, homo sapiens
aatctatttgaggaccagaac

SEQ ID NO: 32813 - RNA, 21 nt, RNAi
ucuauuugaggaccagaacuu

SEQ ID NO: 32814 - RNA, 21 nt, RNAi
uuagauaaacuccuggucuug

SEQ ID NO: 32815 - DNA, 21 bp, homo sapiens
aacacgctgacaagtatctgt

SEQ ID NO: 32816 - RNA, 21 nt, RNAi
cacgcugacaaguaucuguuu

SEQ ID NO: 32817 - RNA, 21 nt, RNAi
uugugcgacuguucauagaca

SEQ ID NO: 32818 - DNA, 21 bp, homo sapiens
aaaggttattgtgcctaacat

SEQ ID NO: 32819 - RNA, 21 nt, RNAi
agguuauugugccuaacauuu

SEQ ID NO: 32820 - RNA, 21 nt, RNAi
uuuccaauaacacggauugua

SEQ ID NO: 32821 - DNA, 21 bp, homo sapiens
aaggttattgtgcctaacatg

SEQ ID NO: 32822 - RNA, 21 nt, RNAi
gguuauugugccuaacauguu

SEQ ID NO: 32823 - RNA, 21 nt, RNAi
uuccaauaacacggauuguac

SEQ ID NO: 32824 - DNA, 21 bp, homo sapiens
aacatggaatttagagctgct

SEQ ID NO: 32825 - RNA, 21 nt, RNAi
cauggaauuuagagcugcuuu

SEQ ID NO: 32826 - RNA, 21 nt, RNAi
uuguaccuuaaaucucgacga

SEQ ID NO: 32827 - DNA, 21 bp, homo sapiens
aatttagagctgctgatgaag

SEQ ID NO: 32828 - RNA, 21 nt, RNAi
uuuagagcugcugaugaaguu

SEQ ID NO: 32829 - RNA, 21 nt, RNAi
uuaaaucucgacgacuacuuc

SEQ ID NO: 32830 - DNA, 21 bp, homo sapiens
aagataattctgaggagtaca

SEQ ID NO: 32831 - RNA, 21 nt, RNAi
gauaauucugaggaguacauu

SEQ ID NO: 32832 - RNA, 21 nt, RNAi
uucuauuaagacuccucaugu

SEQ ID NO: 32833 - DNA, 21 bp, homo sapiens
aattctgaggagtacataagg

SEQ ID NO: 32834 - RNA, 21 nt, RNAi
uucugaggaguacauaagguu

SEQ ID NO: 32835 - RNA, 21 nt, RNAi
uuaagacuccucauguauucc

SEQ ID NO: 32836 - DNA, 21 bp, homo sapiens
aaggagagatttggaaggatc

SEQ ID NO: 32837 - RNA, 21 nt, RNAi
ggagagauuuggaaggaucuu

SEQ ID NO: 32838 - RNA, 21 nt, RNAi
uuccucucuaaaccuuccuag

SEQ ID NO: 32839 - DNA, 21 bp, homo sapiens
aattccatgctgcaggaatac

SEQ ID NO: 32840 - RNA, 21 nt, RNAi
uuccaugcugcaggaauacuu

SEQ ID NO: 32841 - RNA, 21 nt, RNAi
uuaagguacgacguccuuaug

SEQ ID NO: 32842 - DNA, 21 bp, homo sapiens
aaatccatctgtcaactggaa

SEQ ID NO: 32843 - RNA, 21 nt, RNAi
auccaucugucaacuggaauu

SEQ ID NO: 32844 - RNA, 21 nt, RNAi
uuuagguagacaguugaccuu

SEQ ID NO: 32845 - DNA, 21 bp, homo sapiens
aatccatctgtcaactggaaa

SEQ ID NO: 32846 - RNA, 21 nt, RNAi
uccaucugucaacuggaaauu

SEQ ID NO: 32847 - RNA, 21 nt, RNAi
uuagguagacaguugaccuuu

SEQ ID NO: 32848 - DNA, 21 bp, homo sapiens
aactggaaacacaaagatgca

SEQ ID NO: 32849 - RNA, 21 nt, RNAi
cuggaaacacaaagaugcauu

SEQ ID NO: 32850 - RNA, 21 nt, RNAi
uugaccuuuguguuucuacgu

SEQ ID NO: 32851 - DNA, 21 bp, homo sapiens
aaacacaaagatgcagccatc

SEQ ID NO: 32852 - RNA, 21 nt, RNAi
acacaaagaugcagccaucuu

SEQ ID NO: 32853 - RNA, 21 nt, RNAi
uuuguguuucuacgucgguag

SEQ ID NO: 32854 - DNA, 21 bp, homo sapiens
aacacaaagatgcagccatct

SEQ ID NO: 32855 - RNA, 21 nt, RNAi
cacaaagaugcagccaucuuu

SEQ ID NO: 32856 - RNA, 21 nt, RNAi
uuguguuucuacgucgguaga

SEQ ID NO: 32857 - DNA, 21 bp, homo sapiens
aaagatgcagccatctaccta

SEQ ID NO: 32858 - RNA, 21 nt, RNAi
agaugcagccaucuaccuauu

SEQ ID NO: 32859 - RNA, 21 nt, RNAi
uuucuacgucgguagauggau

SEQ ID NO: 32860 - DNA, 21 bp, homo sapiens
aagatgcagccatctacctag

SEQ ID NO: 32861 - RNA, 21 nt, RNAi
gaugcagccaucuaccuaguu

SEQ ID NO: 32862 - RNA, 21 nt, RNAi
uucuacgucgguagauggauc

SEQ ID NO: 32863 - DNA, 21 bp, homo sapiens
aaacacagaagcatggaatta

SEQ ID NO: 32864 - RNA, 21 nt, RNAi
acacagaagcauggaauuauu

SEQ ID NO: 32865 - RNA, 21 nt, RNAi
uuugugucuucguaccuuaau

SEQ ID NO: 32866 - DNA, 21 bp, homo sapiens
aacacagaagcatggaattac

SEQ ID NO: 32867 - RNA, 21 nt, RNAi
cacagaagcauggaauuacuu

SEQ ID NO: 32868 - RNA, 21 nt, RNAi
uugugucuucguaccuuaaug

SEQ ID NO: 32869 - DNA, 21 bp, homo sapiens
aagcatggaattacacaagca

SEQ ID NO: 32870 - RNA, 21 nt, RNAi
gcauggaauuacacaagcauu

SEQ ID NO: 32871 - RNA, 21 nt, RNAi
uucguaccuuaauguguucgu

SEQ ID NO: 32872 - DNA, 21 bp, homo sapiens
aagcaaatgaacttgtaaacc

SEQ ID NO: 32873 - RNA, 21 nt, RNAi
gcaaaugaacuuguaaaccuu

SEQ ID NO: 32874 - RNA, 21 nt, RNAi
uucguuuacuugaacauuugg

SEQ ID NO: 32875 - DNA, 21 bp, homo sapiens
aacttgtaaacctaactgagt

SEQ ID NO: 32876 - RNA, 21 nt, RNAi
cuuguaaaccuaacugaguuu

SEQ ID NO: 32877 - RNA, 21 nt, RNAi
uugaacauuuggauugacuca

SEQ ID NO: 32878 - DNA, 21 bp, homo sapiens
aaacctaactgagttctttgt

SEQ ID NO: 32879 - RNA, 21 nt, RNAi
accuaacugaguucuuuguuu

SEQ ID NO: 32880 - RNA, 21 nt, RNAi
uuuggauugacucaagaaaca

SEQ ID NO: 32881 - DNA, 21 bp, homo sapiens
aacctaactgagttctttgtg

SEQ ID NO: 32882 - RNA, 21 nt, RNAi
ccuaacugaguucuuuguguu

SEQ ID NO: 32883 - RNA, 21 nt, RNAi
uuggauugacucaagaaacac

SEQ ID NO: 32884 - DNA, 21 bp, homo sapiens
aactgagttctttgtgaatca

SEQ ID NO: 32885 - RNA, 21 nt, RNAi
cugaguucuuugugaaucauu

SEQ ID NO: 32886 - RNA, 21 nt, RNAi
uugacucaagaaacacuuagu

SEQ ID NO: 32887 - DNA, 21 bp, homo sapiens
aatgtgaatgaatttcctgtc

SEQ ID NO: 32888 - RNA, 21 nt, RNAi
ugugaaugaauuuccugucuu

SEQ ID NO: 32889 - RNA, 21 nt, RNAi
uuacacuuacuuaaaggacag

SEQ ID NO: 32890 - DNA, 21 bp, homo sapiens
aatttcctgtccttaaagctg

SEQ ID NO: 32891 - RNA, 21 nt, RNAi
uuuccuguccuuaaagcuguu

SEQ ID NO: 32892 - RNA, 21 nt, RNAi
uuaaaggacaggaauuucgac

SEQ ID NO: 32893 - DNA, 21 bp, homo sapiens
aaagctgacggtatcaaatat

SEQ ID NO: 32894 - RNA, 21 nt, RNAi
agcugacgguaucaaauauuu

SEQ ID NO: 32895 - RNA, 21 nt, RNAi
uuucgacugccauaguuuaua

SEQ ID NO: 32896 - DNA, 21 bp, homo sapiens
aagctgacggtatcaaatata

SEQ ID NO: 32897 - RNA, 21 nt, RNAi
gcugacgguaucaaauauauu

SEQ ID NO: 32898 - RNA, 21 nt, RNAi
uucgacugccauaguuuauau

SEQ ID NO: 32899 - DNA, 21 bp, homo sapiens
aatcatcttcaagctggaagt

SEQ ID NO: 32900 - RNA, 21 nt, RNAi
ucaucuucaagcuggaaguuu

SEQ ID NO: 32901 - RNA, 21 nt, RNAi
uuaguagaaguucgaccuuca

SEQ ID NO: 32902 - DNA, 21 bp, homo sapiens
aagctggaagtattgttgttc

SEQ ID NO: 32903 - RNA, 21 nt, RNAi
gcuggaaguauuguuguucuu

SEQ ID NO: 32904 - RNA, 21 nt, RNAi
uucgaccuucauaacaacaag

SEQ ID NO: 32905 - DNA, 21 bp, homo sapiens
aacggctctttactatgcgag

SEQ ID NO: 32906 - RNA, 21 nt, RNAi
cggcucuuuacuaugcgaguu

SEQ ID NO: 32907 - RNA, 21 nt, RNAi
uugccgagaaaugauacgcuc

SEQ ID NO: 32908 - DNA, 21 bp, homo sapiens
aacaatgccactctctttaca

SEQ ID NO: 32909 - RNA, 21 nt, RNAi
caaugccacucucuuuacauu

SEQ ID NO: 32910 - RNA, 21 nt, RNAi
uuguuacggugagagaaaugu

SEQ ID NO: 32911 - DNA, 21 bp, homo sapiens
aatgccactctctttacagct

SEQ ID NO: 32912 - RNA, 21 nt, RNAi
ugccacucucuuuacagcuuu

SEQ ID NO: 32913 - RNA, 21 nt, RNAi
uuacggugagagaaaugucga

SEQ ID NO: 32914 - DNA, 21 bp, homo sapiens
aaatcgcaccgtttgttgaga

SEQ ID NO: 32915 - RNA, 21 nt, RNAi
aucgcaccguuuguugagauu

SEQ ID NO: 32916 - RNA, 21 nt, RNAi
uuuagcguggcaaacaacucu

SEQ ID NO: 32917 - DNA, 21 bp, homo sapiens
aatcgcaccgtttgttgagat

SEQ ID NO: 32918 - RNA, 21 nt, RNAi
ucgcaccguuuguugagauuu

SEQ ID NO: 32919 - RNA, 21 nt, RNAi
uuagcguggcaaacaacucua

SEQ ID NO: 32920 - DNA, 21 bp, homo sapiens
aaagctctcacacttcctggc

SEQ ID NO: 32921 - RNA, 21 nt, RNAi
agcucucacacuuccuggcuu

SEQ ID NO: 32922 - RNA, 21 nt, RNAi
uuucgagagugugaaggaccg

SEQ ID NO: 32923 - DNA, 21 bp, homo sapiens
aagctctcacacttcctggct

SEQ ID NO: 32924 - RNA, 21 nt, RNAi
gcucucacacuuccuggcuuu

SEQ ID NO: 32925 - RNA, 21 nt, RNAi
uucgagagugugaaggaccga

SEQ ID NO: 32926 - DNA, 21 bp, homo sapiens
aagctattagctgttagtaag

SEQ ID NO: 32927 - RNA, 21 nt, RNAi
gcuauuagcuguuaguaaguu

SEQ ID NO: 32928 - RNA, 21 nt, RNAi
uucgauaaucgacaaucauuc

SEQ ID NO: 32929 - DNA, 21 bp, homo sapiens
aagcaaacctcactttaatca

SEQ ID NO: 32930 - RNA, 21 nt, RNAi
gcaaaccucacuuuaaucauu

SEQ ID NO: 32931 - RNA, 21 nt, RNAi
uucguuuggagugaaauuagu

SEQ ID NO: 32932 - DNA, 21 bp, homo sapiens
aaacctcactttaatcactac

SEQ ID NO: 32933 - RNA, 21 nt, RNAi
accucacuuuaaucacuacuu

SEQ ID NO: 32934 - RNA, 21 nt, RNAi
uuuggagugaaauuagugaug

SEQ ID NO: 32935 - DNA, 21 bp, homo sapiens
aacctcactttaatcactaca

SEQ ID NO: 32936 - RNA, 21 nt, RNAi
ccucacuuuaaucacuacauu

SEQ ID NO: 32937 - RNA, 21 nt, RNAi
uuggagugaaauuagugaugu

SEQ ID NO: 32938 - DNA, 21 bp, homo sapiens
aatcactacatgtttgaagca

SEQ ID NO: 32939 - RNA, 21 nt, RNAi
ucacuacauguuugaagcauu

SEQ ID NO: 32940 - RNA, 21 nt, RNAi
uuagugauguacaaacuucgu

SEQ ID NO: 32941 - DNA, 21 bp, homo sapiens
aagtgatgtctttgcttctgg

SEQ ID NO: 32942 - RNA, 21 nt, RNAi
gugaugucuuugcuucugguu

SEQ ID NO: 32943 - RNA, 21 nt, RNAi
uucacuacagaaacgaagacc

SEQ ID NO: 32944 - DNA, 21 bp, homo sapiens
aaagaacaggaaatattcctg

SEQ ID NO: 32945 - RNA, 21 nt, RNAi
agaacaggaaauauuccuguu

SEQ ID NO: 32946 - RNA, 21 nt, RNAi
uuucuuguccuuuauaaggac

SEQ ID NO: 32947 - DNA, 21 bp, homo sapiens
aagaacaggaaatattcctgc

SEQ ID NO: 32948 - RNA, 21 nt, RNAi
gaacaggaaauauuccugcuu

SEQ ID NO: 32949 - RNA, 21 nt, RNAi
uucuuguccuuuauaaggacg

SEQ ID NO: 32950 - DNA, 21 bp, homo sapiens
aacaggaaatattcctgctct

SEQ ID NO: 32951 - RNA, 21 nt, RNAi
caggaaauauuccugcucuuu

SEQ ID NO: 32952 - RNA, 21 nt, RNAi
uuguccuuuauaaggacgaga

SEQ ID NO: 32953 - DNA, 21 bp, homo sapiens
aaatattcctgctctagtgag

SEQ ID NO: 32954 - RNA, 21 nt, RNAi
auauuccugcucuagugaguu

SEQ ID NO: 32955 - RNA, 21 nt, RNAi
uuuauaaggacgagaucacuc

SEQ ID NO: 32956 - DNA, 21 bp, homo sapiens
aatattcctgctctagtgagg

SEQ ID NO: 32957 - RNA, 21 nt, RNAi
uauuccugcucuagugagguu

SEQ ID NO: 32958 - RNA, 21 nt, RNAi
uuauaaggacgagaucacucc

SEQ ID NO: 32959 - DNA, 21 bp, homo sapiens
aagcattcttagaacgcggtt

SEQ ID NO: 32960 - RNA, 21 nt, RNAi
gcauucuuagaacgcgguuuu

SEQ ID NO: 32961 - RNA, 21 nt, RNAi
uucguaagaaucuugcgccaa

SEQ ID NO: 32962 - DNA, 21 bp, homo sapiens
aacgcggttcaaacacaatag

SEQ ID NO: 32963 - RNA, 21 nt, RNAi
cgcgguucaaacacaauaguu

SEQ ID NO: 32964 - RNA, 21 nt, RNAi
uugcgccaaguuuguguuauc

SEQ ID NO: 32965 - DNA, 21 bp, homo sapiens
aaacacaatagcaagtgctgc

SEQ ID NO: 32966 - RNA, 21 nt, RNAi
acacaauagcaagugcugcuu

SEQ ID NO: 32967 - RNA, 21 nt, RNAi
uuuguguuaucguucacgacg

SEQ ID NO: 32968 - DNA, 21 bp, homo sapiens
aacacaatagcaagtgctgca

SEQ ID NO: 32969 - RNA, 21 nt, RNAi
cacaauagcaagugcugcauu

SEQ ID NO: 32970 - RNA, 21 nt, RNAi
uuguguuaucguucacgacgu

SEQ ID NO: 32971 - DNA, 21 bp, homo sapiens
aatagcaagtgctgcagctga

SEQ ID NO: 32972 - RNA, 21 nt, RNAi
uagcaagugcugcagcugauu

SEQ ID NO: 32973 - RNA, 21 nt, RNAi
uuaucguucacgacgucgacu

SEQ ID NO: 32974 - DNA, 21 bp, homo sapiens
aagctgattgcatccaaagca

SEQ ID NO: 32975 - RNA, 21 nt, RNAi
gcugauugcauccaaagcauu

SEQ ID NO: 32976 - RNA, 21 nt, RNAi
uucgacuaacguagguuucgu

SEQ ID NO: 32977 - DNA, 21 bp, homo sapiens
aaagcaaatgaccaccaaggt

SEQ ID NO: 32978 - RNA, 21 nt, RNAi
agcaaaugaccaccaagguuu

SEQ ID NO: 32979 - RNA, 21 nt, RNAi
uuucguuuacuggugguucca

SEQ ID NO: 32980 - DNA, 21 bp, homo sapiens
aagcaaatgaccaccaaggtt

SEQ ID NO: 32981 - RNA, 21 nt, RNAi
gcaaaugaccaccaagguuuu

SEQ ID NO: 32982 - RNA, 21 nt, RNAi
uucguuuacuggugguuccaa

SEQ ID NO: 32983 - DNA, 21 bp, homo sapiens
aacagtataatagagcacatg

SEQ ID NO: 32984 - RNA, 21 nt, RNAi
caguauaauagagcacauguu

SEQ ID NO: 32985 - RNA, 21 nt, RNAi
uugucauauuaucucguguac

SEQ ID NO: 32986 - DNA, 21 bp, homo sapiens
aatagagcacatgcctcctga

SEQ ID NO: 32987 - RNA, 21 nt, RNAi
uagagcacaugccuccugauu

SEQ ID NO: 32988 - RNA, 21 nt, RNAi
uuaucucguguacggaggacu

SEQ ID NO: 32989 - DNA, 21 bp, homo sapiens
aatcagttgaccaatatagga

SEQ ID NO: 32990 - RNA, 21 nt, RNAi
ucaguugaccaauauaggauu

SEQ ID NO: 32991 - RNA, 21 nt, RNAi
uuagucaacugguuauauccu

SEQ ID NO: 32992 - DNA, 21 bp, homo sapiens
aaatcttcattctgctattcc

SEQ ID NO: 32993 - RNA, 21 nt, RNAi
aucuucauucugcuauuccuu

SEQ ID NO: 32994 - RNA, 21 nt, RNAi
uuuagaaguaagacgauaagg

SEQ ID NO: 32995 - DNA, 21 bp, homo sapiens
aatcttcattctgctattcca

SEQ ID NO: 32996 - RNA, 21 nt, RNAi
ucuucauucugcuauuccauu

SEQ ID NO: 32997 - RNA, 21 nt, RNAi
uuagaaguaagacgauaaggu

SEQ ID NO: 32998 - DNA, 21 bp, homo sapiens
aacaaccaagtttatcaagag

SEQ ID NO: 32999 - RNA, 21 nt, RNAi
caaccaaguuuaucaagaguu

SEQ ID NO: 33000 - RNA, 21 nt, RNAi
uuguugguucaaauaguucuc

SEQ ID NO: 33001 - DNA, 21 bp, homo sapiens
aaattcagaaggtatctggaa

SEQ ID NO: 33002 - RNA, 21 nt, RNAi
auucagaagguaucuggaauu

SEQ ID NO: 33003 - RNA, 21 nt, RNAi
uuuaagucuuccauagaccuu

SEQ ID NO: 33004 - DNA, 21 bp, homo sapiens
aattcagaaggtatctggaaa

SEQ ID NO: 33005 - RNA, 21 nt, RNAi
uucagaagguaucuggaaauu

SEQ ID NO: 33006 - RNA, 21 nt, RNAi
uuaagucuuccauagaccuuu

SEQ ID NO: 33007 - DNA, 21 bp, homo sapiens
aaggtatctggaaatgtagag

SEQ ID NO: 33008 - RNA, 21 nt, RNAi
gguaucuggaaauguagaguu

SEQ ID NO: 33009 - RNA, 21 nt, RNAi
uuccauagaccuuuacaucuc

SEQ ID NO: 33010 - DNA, 21 bp, homo sapiens
aaagatctgtgcggttggcat

SEQ ID NO: 33011 - RNA, 21 nt, RNAi
agaucugugcgguuggcauuu

SEQ ID NO: 33012 - RNA, 21 nt, RNAi
uuucuagacacgccaaccgua

SEQ ID NO: 33013 - DNA, 21 bp, homo sapiens
aagatctgtgcggttggcata

SEQ ID NO: 33014 - RNA, 21 nt, RNAi
gaucugugcgguuggcauauu

SEQ ID NO: 33015 - RNA, 21 nt, RNAi
uucuagacacgccaaccguau

SEQ ID NO: 33016 - DNA, 21 bp, homo sapiens
aaccaacttactaacagaatg

SEQ ID NO: 33017 - RNA, 21 nt, RNAi
ccaacuuacuaacagaauguu

SEQ ID NO: 33018 - RNA, 21 nt, RNAi
uugguugaaugauugucuuac

SEQ ID NO: 33019 - DNA, 21 bp, homo sapiens
aatgatggacactgagtatac

SEQ ID NO: 33020 - RNA, 21 nt, RNAi
ugauggacacugaguauacuu

SEQ ID NO: 33021 - RNA, 21 nt, RNAi
uuacuaccugugacucauaug

SEQ ID NO: 33022 - DNA, 21 bp, homo sapiens
aaactgtggactccattatta

SEQ ID NO: 33023 - RNA, 21 nt, RNAi
acuguggacuccauuauuauu

SEQ ID NO: 33024 - RNA, 21 nt, RNAi
uuugacaccugagguaauaau

SEQ ID NO: 33025 - DNA, 21 bp, homo sapiens
aactgtggactccattattac

SEQ ID NO: 33026 - RNA, 21 nt, RNAi
cuguggacuccauuauuacuu

SEQ ID NO: 33027 - RNA, 21 nt, RNAi
uugacaccugagguaauaaug

SEQ ID NO: 33028 - DNA, 21 bp, homo sapiens
aagatgataccattcctgatg

SEQ ID NO: 33029 - RNA, 21 nt, RNAi
gaugauaccauuccugauguu

SEQ ID NO: 33030 - RNA, 21 nt, RNAi
uucuacuaugguaaggacuac

SEQ ID NO: 33031 - DNA, 21 bp, homo sapiens
aagatacaccaggatatcaga

SEQ ID NO: 33032 - RNA, 21 nt, RNAi
gauacaccaggauaucagauu

SEQ ID NO: 33033 - RNA, 21 nt, RNAi
uucuaugugguccuauagucu

SEQ ID NO: 33034 - DNA, 21 bp, homo sapiens
aaagagcatgatcctgtaggt

SEQ ID NO: 33035 - RNA, 21 nt, RNAi
agagcaugauccuguagguuu

SEQ ID NO: 33036 - RNA, 21 nt, RNAi
uuucucguacuaggacaucca

SEQ ID NO: 33037 - DNA, 21 bp, homo sapiens
aagagcatgatcctgtaggtc

SEQ ID NO: 33038 - RNA, 21 nt, RNAi
gagcaugauccuguaggucuu

SEQ ID NO: 33039 - RNA, 21 nt, RNAi
uucucguacuaggacauccag

SEQ ID NO: 33040 - DNA, 21 bp, homo sapiens
aaattcacctggcacagtcac

SEQ ID NO: 33041 - RNA, 21 nt, RNAi
auucaccuggcacagucacuu

SEQ ID NO: 33042 - RNA, 21 nt, RNAi
uuuaaguggaccgugucagug

SEQ ID NO: 33043 - DNA, 21 bp, homo sapiens
aattcacctggcacagtcact

SEQ ID NO: 33044 - RNA, 21 nt, RNAi
uucaccuggcacagucacuuu

SEQ ID NO: 33045 - RNA, 21 nt, RNAi
uuaaguggaccgugucaguga

SEQ ID NO: 33046 - DNA, 21 bp, homo sapiens
aatggtgagcaccagcctgaa

SEQ ID NO: 33047 - RNA, 21 nt, RNAi
uggugagcaccagccugaauu

SEQ ID NO: 33048 - RNA, 21 nt, RNAi
uuaccacucguggucggacuu

SEQ ID NO: 33049 - DNA, 21 bp, homo sapiens
aatgcagaagcgctccagtat

SEQ ID NO: 33050 - RNA, 21 nt, RNAi
ugcagaagcgcuccaguauuu

SEQ ID NO: 33051 - RNA, 21 nt, RNAi
uuacgucuucgcgaggucaua

SEQ ID NO: 33052 - DNA, 21 bp, homo sapiens
aagcgctccagtatctccaag

SEQ ID NO: 33053 - RNA, 21 nt, RNAi
gcgcuccaguaucuccaaguu

SEQ ID NO: 33054 - RNA, 21 nt, RNAi
uucgcgaggucauagagguuc

SEQ ID NO: 33055 - DNA, 21 bp, homo sapiens
aaatcacaggcttctgagcac

SEQ ID NO: 33056 - RNA, 21 nt, RNAi
aucacaggcuucugagcacuu

SEQ ID NO: 33057 - RNA, 21 nt, RNAi
uuuaguguccgaagacucgug

SEQ ID NO: 33058 - DNA, 21 bp, homo sapiens
aatcacaggcttctgagcaca

SEQ ID NO: 33059 - RNA, 21 nt, RNAi
ucacaggcuucugagcacauu

SEQ ID NO: 33060 - RNA, 21 nt, RNAi
uuaguguccgaagacucgugu

SEQ ID NO: 33061 - DNA, 21 bp, homo sapiens
caggagcggatagtgccagct

SEQ ID NO: 33062 - RNA, 21 nt, RNAi
ggagcggauagugccagcuuu

SEQ ID NO: 33063 - RNA, 21 nt, RNAi
uuccucgccuaucacggucga

SEQ ID NO: 33064 - DNA, 21 bp, homo sapiens
cacgagatcctatagcaatgg

SEQ ID NO: 33065 - RNA, 21 nt, RNAi
cgagauccuauagcaaugguu

SEQ ID NO: 33066 - RNA, 21 nt, RNAi
uugcucuaggauaucguuacc

SEQ ID NO: 33067 - DNA, 21 bp, homo sapiens
caatggaactcagcgatgcaa

SEQ ID NO: 33068 - RNA, 21 nt, RNAi
auggaacucagcgaugcaauu

SEQ ID NO: 33069 - RNA, 21 nt, RNAi
uuuaccuugagucgcuacguu

SEQ ID NO: 33070 - DNA, 21 bp, homo sapiens
cagcgatgcaaatctgcaaac

SEQ ID NO: 33071 - RNA, 21 nt, RNAi
gcgaugcaaaucugcaaacuu

SEQ ID NO: 33072 - RNA, 21 nt, RNAi
uucgcuacguuuagacguuug

SEQ ID NO: 33073 - DNA, 21 bp, homo sapiens
caaatctgcaaacactaacag

SEQ ID NO: 33074 - RNA, 21 nt, RNAi
aaucugcaaacacuaacaguu

SEQ ID NO: 33075 - RNA, 21 nt, RNAi
uuuuagacguuugugauuguc

SEQ ID NO: 33076 - DNA, 21 bp, homo sapiens
cacttgatcctgatcctgcca

SEQ ID NO: 33077 - RNA, 21 nt, RNAi
cuugauccugauccugccauu

SEQ ID NO: 33078 - RNA, 21 nt, RNAi
uugaacuaggacuaggacggu

SEQ ID NO: 33079 - DNA, 21 bp, homo sapiens
catccgacgtccagctgagaa

SEQ ID NO: 33080 - RNA, 21 nt, RNAi
uccgacguccagcugagaauu

SEQ ID NO: 33081 - RNA, 21 nt, RNAi
uuaggcugcaggucgacucuu

SEQ ID NO: 33082 - DNA, 21 bp, homo sapiens
cagctgagaaatttcttgaat

SEQ ID NO: 33083 - RNA, 21 nt, RNAi
gcugagaaauuucuugaauuu

SEQ ID NO: 33084 - RNA, 21 nt, RNAi
uucgacucuuuaaagaacuua

SEQ ID NO: 33085 - DNA, 21 bp, homo sapiens
cagaattatccactgttgctt

SEQ ID NO: 33086 - RNA, 21 nt, RNAi
gaauuauccacuguugcuuuu

SEQ ID NO: 33087 - RNA, 21 nt, RNAi
uucuuaauaggugacaacgaa

SEQ ID NO: 33088 - DNA, 21 bp, homo sapiens
caaagtatgtgcttcagtaac

SEQ ID NO: 33089 - RNA, 21 nt, RNAi
aaguaugugcuucaguaacuu

SEQ ID NO: 33090 - RNA, 21 nt, RNAi
uuuucauacacgaagucauug

SEQ ID NO: 33091 - DNA, 21 bp, homo sapiens
cattaaagccaacatagtgca

SEQ ID NO: 33092 - RNA, 21 nt, RNAi
uuaaagccaacauagugcauu

SEQ ID NO: 33093 - RNA, 21 nt, RNAi
uuaauuucgguuguaucacgu

SEQ ID NO: 33094 - DNA, 21 bp, homo sapiens
caacatagtgcacttgatgct

SEQ ID NO: 33095 - RNA, 21 nt, RNAi
acauagugcacuugaugcuuu

SEQ ID NO: 33096 - RNA, 21 nt, RNAi
uuuguaucacgugaacuacga

SEQ ID NO: 33097 - DNA, 21 bp, homo sapiens
catagtgcacttgatgcttag

SEQ ID NO: 33098 - RNA, 21 nt, RNAi
uagugcacuugaugcuuaguu

SEQ ID NO: 33099 - RNA, 21 nt, RNAi
uuaucacgugaacuacgaauc

SEQ ID NO: 33100 - DNA, 21 bp, homo sapiens
cagagcaaattcagaagcagt

SEQ ID NO: 33101 - RNA, 21 nt, RNAi
gagcaaauucagaagcaguuu

SEQ ID NO: 33102 - RNA, 21 nt, RNAi
uucucguuuaagucuucguca

SEQ ID NO: 33103 - DNA, 21 bp, homo sapiens
caaattcagaagcagttaagt

SEQ ID NO: 33104 - RNA, 21 nt, RNAi
aauucagaagcaguuaaguuu

SEQ ID NO: 33105 - RNA, 21 nt, RNAi
uuuuaagucuucgucaauuca

SEQ ID NO: 33106 - DNA, 21 bp, homo sapiens
cagaagcagttaagtgatgca

SEQ ID NO: 33107 - RNA, 21 nt, RNAi
gaagcaguuaagugaugcauu

SEQ ID NO: 33108 - RNA, 21 nt, RNAi
uucuucgucaauucacuacgu

SEQ ID NO: 33109 - DNA, 21 bp, homo sapiens
cagttaagtgatgcaattagc

SEQ ID NO: 33110 - RNA, 21 nt, RNAi
guuaagugaugcaauuagcuu

SEQ ID NO: 33111 - RNA, 21 nt, RNAi
uucaauucacuacguuaaucg

SEQ ID NO: 33112 - DNA, 21 bp, homo sapiens
caattagcattattggcagag

SEQ ID NO: 33113 - RNA, 21 nt, RNAi
auuagcauuauuggcagaguu

SEQ ID NO: 33114 - RNA, 21 nt, RNAi
uuuaaucguaauaaccgucuc

SEQ ID NO: 33115 - DNA, 21 bp, homo sapiens
cattattggcagagaagattt

SEQ ID NO: 33116 - RNA, 21 nt, RNAi
uuauuggcagagaagauuuuu

SEQ ID NO: 33117 - RNA, 21 nt, RNAi
uuaauaaccgucucuucuaaa

SEQ ID NO: 33118 - DNA, 21 bp, homo sapiens
cacagaaatggcctgacttgc

SEQ ID NO: 33119 - RNA, 21 nt, RNAi
cagaaauggccugacuugcuu

SEQ ID NO: 33120 - RNA, 21 nt, RNAi
uugucuuuaccggacugaacg

SEQ ID NO: 33121 - DNA, 21 bp, homo sapiens
cagaaatggcctgacttgctg

SEQ ID NO: 33122 - RNA, 21 nt, RNAi
gaaauggccugacuugcuguu

SEQ ID NO: 33123 - RNA, 21 nt, RNAi
uucuuuaccggacugaacgac

SEQ ID NO: 33124 - DNA, 21 bp, homo sapiens
cagaaatggtgaatcgctttc

SEQ ID NO: 33125 - RNA, 21 nt, RNAi
gaaauggugaaucgcuuucuu

SEQ ID NO: 33126 - RNA, 21 nt, RNAi
uucuuuaccacuuagcgaaag

SEQ ID NO: 33127 - DNA, 21 bp, homo sapiens
cagagtggagatttccatgtt

SEQ ID NO: 33128 - RNA, 21 nt, RNAi
gaguggagauuuccauguuuu

SEQ ID NO: 33129 - RNA, 21 nt, RNAi
uucucaccucuaaagguacaa

SEQ ID NO: 33130 - DNA, 21 bp, homo sapiens
catgttattaatggagtcctc

SEQ ID NO: 33131 - RNA, 21 nt, RNAi
uguuauuaauggaguccucuu

SEQ ID NO: 33132 - RNA, 21 nt, RNAi
uuacaauaauuaccucaggag

SEQ ID NO: 33133 - DNA, 21 bp, homo sapiens
catgaatttaagtcaaacgag

SEQ ID NO: 33134 - RNA, 21 nt, RNAi
ugaauuuaagucaaacgaguu

SEQ ID NO: 33135 - RNA, 21 nt, RNAi
uuacuuaaauucaguuugcuc

SEQ ID NO: 33136 - DNA, 21 bp, homo sapiens
caaacgagttatggactgaaa

SEQ ID NO: 33137 - RNA, 21 nt, RNAi
aacgaguuauggacugaaauu

SEQ ID NO: 33138 - RNA, 21 nt, RNAi
uuuugcucaauaccugacuuu

SEQ ID NO: 33139 - DNA, 21 bp, homo sapiens
cactattgaactctgcagtac

SEQ ID NO: 33140 - RNA, 21 nt, RNAi
cuauugaacucugcaguacuu

SEQ ID NO: 33141 - RNA, 21 nt, RNAi
uugauaacuugagacgucaug

SEQ ID NO: 33142 - DNA, 21 bp, homo sapiens
catgcaaatgatgcctctgcc

SEQ ID NO: 33143 - RNA, 21 nt, RNAi
ugcaaaugaugccucugccuu

SEQ ID NO: 33144 - RNA, 21 nt, RNAi
uuacguuuacuacggagacgg

SEQ ID NO: 33145 - DNA, 21 bp, homo sapiens
catactctcttaacattggat

SEQ ID NO: 33146 - RNA, 21 nt, RNAi
uacucucuuaacauuggauuu

SEQ ID NO: 33147 - RNA, 21 nt, RNAi
uuaugagagaauuguaaccua

SEQ ID NO: 33148 - DNA, 21 bp, homo sapiens
caaactgatgatgaagaggaa

SEQ ID NO: 33149 - RNA, 21 nt, RNAi
aacugaugaugaagaggaauu

SEQ ID NO: 33150 - RNA, 21 nt, RNAi
uuuugacuacuacuucuccuu

SEQ ID NO: 33151 - DNA, 21 bp, homo sapiens
cagatttgtgataatgccgca

SEQ ID NO: 33152 - RNA, 21 nt, RNAi
gauuugugauaaugccgcauu

SEQ ID NO: 33153 - RNA, 21 nt, RNAi
uucuaaacacuauuacggcgu

SEQ ID NO: 33154 - DNA, 21 bp, homo sapiens
cagccatctggaatttactag

SEQ ID NO: 33155 - RNA, 21 nt, RNAi
gccaucuggaauuuacuaguu

SEQ ID NO: 33156 - RNA, 21 nt, RNAi
uucgguagaccuuaaaugauc

SEQ ID NO: 33157 - DNA, 21 bp, homo sapiens
catctggaatttactagttac

SEQ ID NO: 33158 - RNA, 21 nt, RNAi
ucuggaauuuacuaguuacuu

SEQ ID NO: 33159 - RNA, 21 nt, RNAi
uuagaccuuaaaugaucaaug

SEQ ID NO: 33160 - DNA, 21 bp, homo sapiens
caattcaatttctggcttcag

SEQ ID NO: 33161 - RNA, 21 nt, RNAi
auucaauuucuggcuucaguu

SEQ ID NO: 33162 - RNA, 21 nt, RNAi
uuuaaguuaaagaccgaaguc

SEQ ID NO: 33163 - DNA, 21 bp, homo sapiens
caatttctggcttcagtttgt

SEQ ID NO: 33164 - RNA, 21 nt, RNAi
auuucuggcuucaguuuguuu

SEQ ID NO: 33165 - RNA, 21 nt, RNAi
uuuaaagaccgaagucaaaca

SEQ ID NO: 33166 - DNA, 21 bp, homo sapiens
cagtttgtgagagacctcatt

SEQ ID NO: 33167 - RNA, 21 nt, RNAi
guuugugagagaccucauuuu

SEQ ID NO: 33168 - RNA, 21 nt, RNAi
uucaaacacucucuggaguaa

SEQ ID NO: 33169 - DNA, 21 bp, homo sapiens
cagaacacgctgacaagtatc

SEQ ID NO: 33170 - RNA, 21 nt, RNAi
gaacacgcugacaaguaucuu

SEQ ID NO: 33171 - RNA, 21 nt, RNAi
uucuugugcgacuguucauag

SEQ ID NO: 33172 - DNA, 21 bp, homo sapiens
cacgctgacaagtatctgtga

SEQ ID NO: 33173 - RNA, 21 nt, RNAi
cgcugacaaguaucugugauu

SEQ ID NO: 33174 - RNA, 21 nt, RNAi
uugcgacuguucauagacacu

SEQ ID NO: 33175 - DNA, 21 bp, homo sapiens
catggaatttagagctgctga

SEQ ID NO: 33176 - RNA, 21 nt, RNAi
uggaauuuagagcugcugauu

SEQ ID NO: 33177 - RNA, 21 nt, RNAi
uuaccuuaaaucucgacgacu

SEQ ID NO: 33178 - DNA, 21 bp, homo sapiens
catttgaagataattctgagg

SEQ ID NO: 33179 - RNA, 21 nt, RNAi
uuugaagauaauucugagguu

SEQ ID NO: 33180 - RNA, 21 nt, RNAi
uuaaacuucuauuaagacucc

SEQ ID NO: 33181 - DNA, 21 bp, homo sapiens
cataaggagagatttggaagg

SEQ ID NO: 33182 - RNA, 21 nt, RNAi
uaaggagagauuuggaagguu

SEQ ID NO: 33183 - RNA, 21 nt, RNAi
uuauuccucucuaaaccuucc

SEQ ID NO: 33184 - DNA, 21 bp, homo sapiens
caggaatcttctctggttatg

SEQ ID NO: 33185 - RNA, 21 nt, RNAi
ggaaucuucucugguuauguu

SEQ ID NO: 33186 - RNA, 21 nt, RNAi
uuccuuagaagagaccaauac

SEQ ID NO: 33187 - DNA, 21 bp, homo sapiens
catgctgcaggaatacgcaaa

SEQ ID NO: 33188 - RNA, 21 nt, RNAi
ugcugcaggaauacgcaaauu

SEQ ID NO: 33189 - RNA, 21 nt, RNAi
uuacgacguccuuaugcguuu

SEQ ID NO: 33190 - DNA, 21 bp, homo sapiens
catctgtcaactggaaacaca

SEQ ID NO: 33191 - RNA, 21 nt, RNAi
ucugucaacuggaaacacauu

SEQ ID NO: 33192 - RNA, 21 nt, RNAi
uuagacaguugaccuuugugu

SEQ ID NO: 33193 - DNA, 21 bp, homo sapiens
caactggaaacacaaagatgc

SEQ ID NO: 33194 - RNA, 21 nt, RNAi
acuggaaacacaaagaugcuu

SEQ ID NO: 33195 - RNA, 21 nt, RNAi
uuugaccuuuguguuucuacg

SEQ ID NO: 33196 - DNA, 21 bp, homo sapiens
cacaaagatgcagccatctac

SEQ ID NO: 33197 - RNA, 21 nt, RNAi
caaagaugcagccaucuacuu

SEQ ID NO: 33198 - RNA, 21 nt, RNAi
uuguuucuacgucgguagaug

SEQ ID NO: 33199 - DNA, 21 bp, homo sapiens
caaagatgcagccatctacct

SEQ ID NO: 33200 - RNA, 21 nt, RNAi
aagaugcagccaucuaccuuu

SEQ ID NO: 33201 - RNA, 21 nt, RNAi
uuuucuacgucgguagaugga

SEQ ID NO: 33202 - DNA, 21 bp, homo sapiens
cagccatctacctagtgacat

SEQ ID NO: 33203 - RNA, 21 nt, RNAi
gccaucuaccuagugacauuu

SEQ ID NO: 33204 - RNA, 21 nt, RNAi
uucgguagauggaucacugua

SEQ ID NO: 33205 - DNA, 21 bp, homo sapiens
catctacctagtgacatcttt

SEQ ID NO: 33206 - RNA, 21 nt, RNAi
ucuaccuagugacaucuuuuu

SEQ ID NO: 33207 - RNA, 21 nt, RNAi
uuagauggaucacuguagaaa

SEQ ID NO: 33208 - DNA, 21 bp, homo sapiens
caaacacagaagcatggaatt

SEQ ID NO: 33209 - RNA, 21 nt, RNAi
aacacagaagcauggaauuuu

SEQ ID NO: 33210 - RNA, 21 nt, RNAi
uuuugugucuucguaccuuaa

SEQ ID NO: 33211 - DNA, 21 bp, homo sapiens
cacagaagcatggaattacac

SEQ ID NO: 33212 - RNA, 21 nt, RNAi
cagaagcauggaauuacacuu

SEQ ID NO: 33213 - RNA, 21 nt, RNAi
uugucuucguaccuuaaugug

SEQ ID NO: 33214 - DNA, 21 bp, homo sapiens
cagaagcatggaattacacaa

SEQ ID NO: 33215 - RNA, 21 nt, RNAi
gaagcauggaauuacacaauu

SEQ ID NO: 33216 - RNA, 21 nt, RNAi
uucuucguaccuuaauguguu

SEQ ID NO: 33217 - DNA, 21 bp, homo sapiens
catggaattacacaagcaaat

SEQ ID NO: 33218 - RNA, 21 nt, RNAi
uggaauuacacaagcaaauuu

SEQ ID NO: 33219 - RNA, 21 nt, RNAi
uuaccuuaauguguucguuua

SEQ ID NO: 33220 - DNA, 21 bp, homo sapiens
cacaagcaaatgaacttgtaa

SEQ ID NO: 33221 - RNA, 21 nt, RNAi
caagcaaaugaacuuguaauu

SEQ ID NO: 33222 - RNA, 21 nt, RNAi
uuguucguuuacuugaacauu

SEQ ID NO: 33223 - DNA, 21 bp, homo sapiens
caagcaaatgaacttgtaaac

SEQ ID NO: 33224 - RNA, 21 nt, RNAi
agcaaaugaacuuguaaacuu

SEQ ID NO: 33225 - RNA, 21 nt, RNAi
uuucguuuacuugaacauuug

SEQ ID NO: 33226 - DNA, 21 bp, homo sapiens
cagctaatgtgaatgaatttc

SEQ ID NO: 33227 - RNA, 21 nt, RNAi
gcuaaugugaaugaauuucuu

SEQ ID NO: 33228 - RNA, 21 nt, RNAi
uucgauuacacuuacuuaaag

SEQ ID NO: 33229 - DNA, 21 bp, homo sapiens
catcttcaagctggaagtatt

SEQ ID NO: 33230 - RNA, 21 nt, RNAi
ucuucaagcuggaaguauuuu

SEQ ID NO: 33231 - RNA, 21 nt, RNAi
uuagaaguucgaccuucauaa

SEQ ID NO: 33232 - DNA, 21 bp, homo sapiens
caagctggaagtattgttgtt

SEQ ID NO: 33233 - RNA, 21 nt, RNAi
agcuggaaguauuguuguuuu

SEQ ID NO: 33234 - RNA, 21 nt, RNAi
uuucgaccuucauaacaacaa

SEQ ID NO: 33235 - DNA, 21 bp, homo sapiens
catacttacgcagctcatgct

SEQ ID NO: 33236 - RNA, 21 nt, RNAi
uacuuacgcagcucaugcuuu

SEQ ID NO: 33237 - RNA, 21 nt, RNAi
uuaugaaugcgucgaguacga

SEQ ID NO: 33238 - DNA, 21 bp, homo sapiens
cagctcatgctcttgaacggc

SEQ ID NO: 33239 - RNA, 21 nt, RNAi
gcucaugcucuugaacggcuu

SEQ ID NO: 33240 - RNA, 21 nt, RNAi
uucgaguacgagaacuugccg

SEQ ID NO: 33241 - DNA, 21 bp, homo sapiens
catgctcttgaacggctcttt

SEQ ID NO: 33242 - RNA, 21 nt, RNAi
ugcucuugaacggcucuuuuu

SEQ ID NO: 33243 - RNA, 21 nt, RNAi
uuacgagaacuugccgagaaa

SEQ ID NO: 33244 - DNA, 21 bp, homo sapiens
caatgccactctctttacagc

SEQ ID NO: 33245 - RNA, 21 nt, RNAi
augccacucucuuuacagcuu

SEQ ID NO: 33246 - RNA, 21 nt, RNAi
uuuacggugagagaaaugucg

SEQ ID NO: 33247 - DNA, 21 bp, homo sapiens
cactctctttacagctgcaga

SEQ ID NO: 33248 - RNA, 21 nt, RNAi
cucucuuuacagcugcagauu

SEQ ID NO: 33249 - RNA, 21 nt, RNAi
uugagagaaaugucgacgucu

SEQ ID NO: 33250 - DNA, 21 bp, homo sapiens
cagctgcagaaatcgcaccgt

SEQ ID NO: 33251 - RNA, 21 nt, RNAi
gcugcagaaaucgcaccguuu

SEQ ID NO: 33252 - RNA, 21 nt, RNAi
uucgacgucuuuagcguggca

SEQ ID NO: 33253 - DNA, 21 bp, homo sapiens
cagaaatcgcaccgtttgttg

SEQ ID NO: 33254 - RNA, 21 nt, RNAi
gaaaucgcaccguuuguuguu

SEQ ID NO: 33255 - RNA, 21 nt, RNAi
uucuuuagcguggcaaacaac

SEQ ID NO: 33256 - DNA, 21 bp, homo sapiens
caccgtttgttgagattctgc

SEQ ID NO: 33257 - RNA, 21 nt, RNAi
ccguuuguugagauucugcuu

SEQ ID NO: 33258 - RNA, 21 nt, RNAi
uuggcaaacaacucuaagacg

SEQ ID NO: 33259 - DNA, 21 bp, homo sapiens
caaagctctcacacttcctgg

SEQ ID NO: 33260 - RNA, 21 nt, RNAi
aagcucucacacuuccugguu

SEQ ID NO: 33261 - RNA, 21 nt, RNAi
uuuucgagagugugaaggacc

SEQ ID NO: 33262 - DNA, 21 bp, homo sapiens
cacacttcctggctcttcaga

SEQ ID NO: 33263 - RNA, 21 nt, RNAi
cacuuccuggcucuucagauu

SEQ ID NO: 33264 - RNA, 21 nt, RNAi
uugugaaggaccgagaagucu

SEQ ID NO: 33265 - DNA, 21 bp, homo sapiens
cacttcctggctcttcagaaa

SEQ ID NO: 33266 - RNA, 21 nt, RNAi
cuuccuggcucuucagaaauu

SEQ ID NO: 33267 - RNA, 21 nt, RNAi
uugaaggaccgagaagucuuu

SEQ ID NO: 33268 - DNA, 21 bp, homo sapiens
catcactcagcttacacagaa

SEQ ID NO: 33269 - RNA, 21 nt, RNAi
ucacucagcuuacacagaauu

SEQ ID NO: 33270 - RNA, 21 nt, RNAi
uuagugagucgaaugugucuu

SEQ ID NO: 33271 - DNA, 21 bp, homo sapiens
cactcagcttacacagaagct

SEQ ID NO: 33272 - RNA, 21 nt, RNAi
cucagcuuacacagaagcuuu

SEQ ID NO: 33273 - RNA, 21 nt, RNAi
uugagucgaaugugucuucga

SEQ ID NO: 33274 - DNA, 21 bp, homo sapiens
cagcttacacagaagctatta

SEQ ID NO: 33275 - RNA, 21 nt, RNAi
gcuuacacagaagcuauuauu

SEQ ID NO: 33276 - RNA, 21 nt, RNAi
uucgaaugugucuucgauaau

SEQ ID NO: 33277 - DNA, 21 bp, homo sapiens
cacagaagctattagctgtta

SEQ ID NO: 33278 - RNA, 21 nt, RNAi
cagaagcuauuagcuguuauu

SEQ ID NO: 33279 - RNA, 21 nt, RNAi
uugucuucgauaaucgacaau

SEQ ID NO: 33280 - DNA, 21 bp, homo sapiens
cagaagctattagctgttagt

SEQ ID NO: 33281 - RNA, 21 nt, RNAi
gaagcuauuagcuguuaguuu

SEQ ID NO: 33282 - RNA, 21 nt, RNAi
uucuucgauaaucgacaauca

SEQ ID NO: 33283 - DNA, 21 bp, homo sapiens
caagcaaacctcactttaatc

SEQ ID NO: 33284 - RNA, 21 nt, RNAi
agcaaaccucacuuuaaucuu

SEQ ID NO: 33285 - RNA, 21 nt, RNAi
uuucguuuggagugaaauuag

SEQ ID NO: 33286 - DNA, 21 bp, homo sapiens
caaacctcactttaatcacta

SEQ ID NO: 33287 - RNA, 21 nt, RNAi
aaccucacuuuaaucacuauu

SEQ ID NO: 33288 - RNA, 21 nt, RNAi
uuuuggagugaaauuagugau

SEQ ID NO: 33289 - DNA, 21 bp, homo sapiens
cactacatgtttgaagcaata

SEQ ID NO: 33290 - RNA, 21 nt, RNAi
cuacauguuugaagcaauauu

SEQ ID NO: 33291 - RNA, 21 nt, RNAi
uugauguacaaacuucguuau

SEQ ID NO: 33292 - DNA, 21 bp, homo sapiens
cataagaataacttgcaaagc

SEQ ID NO: 33293 - RNA, 21 nt, RNAi
uaagaauaacuugcaaagcuu

SEQ ID NO: 33294 - RNA, 21 nt, RNAi
uuauucuuauugaacguuucg

SEQ ID NO: 33295 - DNA, 21 bp, homo sapiens
caagaatttattccatacgtc

SEQ ID NO: 33296 - RNA, 21 nt, RNAi
agaauuuauuccauacgucuu

SEQ ID NO: 33297 - RNA, 21 nt, RNAi
uuucuuaaauaagguaugcag

SEQ ID NO: 33298 - DNA, 21 bp, homo sapiens
catacgtctttcaagtgatgt

SEQ ID NO: 33299 - RNA, 21 nt, RNAi
uacgucuuucaagugauguuu

SEQ ID NO: 33300 - RNA, 21 nt, RNAi
uuaugcagaaaguucacuaca

SEQ ID NO: 33301 - DNA, 21 bp, homo sapiens
caagtgatgtctttgcttctg

SEQ ID NO: 33302 - RNA, 21 nt, RNAi
agugaugucuuugcuucuguu

SEQ ID NO: 33303 - RNA, 21 nt, RNAi
uuucacuacagaaacgaagac

SEQ ID NO: 33304 - DNA, 21 bp, homo sapiens
catctccttcagccagtgctt

SEQ ID NO: 33305 - RNA, 21 nt, RNAi
ucuccuucagccagugcuuuu

SEQ ID NO: 33306 - RNA, 21 nt, RNAi
uuagaggaagucggucacgaa

SEQ ID NO: 33307 - DNA, 21 bp, homo sapiens
caggaaatattcctgctctag

SEQ ID NO: 33308 - RNA, 21 nt, RNAi
ggaaauauuccugcucuaguu

SEQ ID NO: 33309 - RNA, 21 nt, RNAi
uuccuuuauaaggacgagauc

SEQ ID NO: 33310 - DNA, 21 bp, homo sapiens
caagcattcttagaacgcggt

SEQ ID NO: 33311 - RNA, 21 nt, RNAi
agcauucuuagaacgcgguuu

SEQ ID NO: 33312 - RNA, 21 nt, RNAi
uuucguaagaaucuugcgcca

SEQ ID NO: 33313 - DNA, 21 bp, homo sapiens
cattcttagaacgcggttcaa

SEQ ID NO: 33314 - RNA, 21 nt, RNAi
uucuuagaacgcgguucaauu

SEQ ID NO: 33315 - RNA, 21 nt, RNAi
uuaagaaucuugcgccaaguu

SEQ ID NO: 33316 - DNA, 21 bp, homo sapiens
caaacacaatagcaagtgctg

SEQ ID NO: 33317 - RNA, 21 nt, RNAi
aacacaauagcaagugcuguu

SEQ ID NO: 33318 - RNA, 21 nt, RNAi
uuuuguguuaucguucacgac

SEQ ID NO: 33319 - DNA, 21 bp, homo sapiens
cacaatagcaagtgctgcagc

SEQ ID NO: 33320 - RNA, 21 nt, RNAi
caauagcaagugcugcagcuu

SEQ ID NO: 33321 - RNA, 21 nt, RNAi
uuguuaucguucacgacgucg

SEQ ID NO: 33322 - DNA, 21 bp, homo sapiens
caatagcaagtgctgcagctg

SEQ ID NO: 33323 - RNA, 21 nt, RNAi
auagcaagugcugcagcuguu

SEQ ID NO: 33324 - RNA, 21 nt, RNAi
uuuaucguucacgacgucgac

SEQ ID NO: 33325 - DNA, 21 bp, homo sapiens
cagaagctgattgcatccaaa

SEQ ID NO: 33326 - RNA, 21 nt, RNAi
gaagcugauugcauccaaauu

SEQ ID NO: 33327 - RNA, 21 nt, RNAi
uucuucgacuaacguagguuu

SEQ ID NO: 33328 - DNA, 21 bp, homo sapiens
catccaaagcaaatgaccacc

SEQ ID NO: 33329 - RNA, 21 nt, RNAi
uccaaagcaaaugaccaccuu

SEQ ID NO: 33330 - RNA, 21 nt, RNAi
uuagguuucguuuacuggugg

SEQ ID NO: 33331 - DNA, 21 bp, homo sapiens
caaagcaaatgaccaccaagg

SEQ ID NO: 33332 - RNA, 21 nt, RNAi
aagcaaaugaccaccaagguu

SEQ ID NO: 33333 - RNA, 21 nt, RNAi
uuuucguuuacuggugguucc

SEQ ID NO: 33334 - DNA, 21 bp, homo sapiens
cagtataatagagcacatgcc

SEQ ID NO: 33335 - RNA, 21 nt, RNAi
guauaauagagcacaugccuu

SEQ ID NO: 33336 - RNA, 21 nt, RNAi
uucauauuaucucguguacgg

SEQ ID NO: 33337 - DNA, 21 bp, homo sapiens
cacatgcctcctgaatcagtt

SEQ ID NO: 33338 - RNA, 21 nt, RNAi
caugccuccugaaucaguuuu

SEQ ID NO: 33339 - RNA, 21 nt, RNAi
uuguacggaggacuuagucaa

SEQ ID NO: 33340 - DNA, 21 bp, homo sapiens
catgcctcctgaatcagttga

SEQ ID NO: 33341 - RNA, 21 nt, RNAi
ugccuccugaaucaguugauu

SEQ ID NO: 33342 - RNA, 21 nt, RNAi
uuacggaggacuuagucaacu

SEQ ID NO: 33343 - DNA, 21 bp, homo sapiens
cagttgaccaatataggaaac

SEQ ID NO: 33344 - RNA, 21 nt, RNAi
guugaccaauauaggaaacuu

SEQ ID NO: 33345 - RNA, 21 nt, RNAi
uucaacugguuauauccuuug

SEQ ID NO: 33346 - DNA, 21 bp, homo sapiens
caaatcttcattctgctattc

SEQ ID NO: 33347 - RNA, 21 nt, RNAi
aaucuucauucugcuauucuu

SEQ ID NO: 33348 - RNA, 21 nt, RNAi
uuuuagaaguaagacgauaag

SEQ ID NO: 33349 - DNA, 21 bp, homo sapiens
cattctgctattccagagact

SEQ ID NO: 33350 - RNA, 21 nt, RNAi
uucugcuauuccagagacuuu

SEQ ID NO: 33351 - RNA, 21 nt, RNAi
uuaagacgauaaggucucuga

SEQ ID NO: 33352 - DNA, 21 bp, homo sapiens
cagagacttcagaattccaaa

SEQ ID NO: 33353 - RNA, 21 nt, RNAi
gagacuucagaauuccaaauu

SEQ ID NO: 33354 - RNA, 21 nt, RNAi
uucucugaagucuuaagguuu

SEQ ID NO: 33355 - DNA, 21 bp, homo sapiens
caaccaagtttatcaagagtt

SEQ ID NO: 33356 - RNA, 21 nt, RNAi
accaaguuuaucaagaguuuu

SEQ ID NO: 33357 - RNA, 21 nt, RNAi
uuugguucaaauaguucucaa

SEQ ID NO: 33358 - DNA, 21 bp, homo sapiens
cactagcactacaagaaatat

SEQ ID NO: 33359 - RNA, 21 nt, RNAi
cuagcacuacaagaaauauuu

SEQ ID NO: 33360 - RNA, 21 nt, RNAi
uugaucgugauguucuuuaua

SEQ ID NO: 33361 - DNA, 21 bp, homo sapiens
cagaaggtatctggaaatgta

SEQ ID NO: 33362 - RNA, 21 nt, RNAi
gaagguaucuggaaauguauu

SEQ ID NO: 33363 - RNA, 21 nt, RNAi
uucuuccauagaccuuuacau

SEQ ID NO: 33364 - DNA, 21 bp, homo sapiens
cataaccaacttactaacaga

SEQ ID NO: 33365 - RNA, 21 nt, RNAi
uaaccaacuuacuaacagauu

SEQ ID NO: 33366 - RNA, 21 nt, RNAi
uuauugguugaaugauugucu

SEQ ID NO: 33367 - DNA, 21 bp, homo sapiens
caacttactaacagaatgtcc

SEQ ID NO: 33368 - RNA, 21 nt, RNAi
acuuacuaacagaauguccuu

SEQ ID NO: 33369 - RNA, 21 nt, RNAi
uuugaaugauugucuuacagg

SEQ ID NO: 33370 - DNA, 21 bp, homo sapiens
caatgatggacactgagtata

SEQ ID NO: 33371 - RNA, 21 nt, RNAi
augauggacacugaguauauu

SEQ ID NO: 33372 - RNA, 21 nt, RNAi
uuuacuaccugugacucauau

SEQ ID NO: 33373 - DNA, 21 bp, homo sapiens
cactgagtataccaaactgtg

SEQ ID NO: 33374 - RNA, 21 nt, RNAi
cugaguauaccaaacuguguu

SEQ ID NO: 33375 - RNA, 21 nt, RNAi
uugacucauaugguuugacac

SEQ ID NO: 33376 - DNA, 21 bp, homo sapiens
caaactgtggactccattatt

SEQ ID NO: 33377 - RNA, 21 nt, RNAi
aacuguggacuccauuauuuu

SEQ ID NO: 33378 - RNA, 21 nt, RNAi
uuuugacaccugagguaauaa

SEQ ID NO: 33379 - DNA, 21 bp, homo sapiens
cattcctgatgaggaacattt

SEQ ID NO: 33380 - RNA, 21 nt, RNAi
uuccugaugaggaacauuuuu

SEQ ID NO: 33381 - RNA, 21 nt, RNAi
uuaaggacuacuccuuguaaa

SEQ ID NO: 33382 - DNA, 21 bp, homo sapiens
catagaagatacaccaggata

SEQ ID NO: 33383 - RNA, 21 nt, RNAi
uagaagauacaccaggauauu

SEQ ID NO: 33384 - RNA, 21 nt, RNAi
uuaucuucuaugugguccuau

SEQ ID NO: 33385 - DNA, 21 bp, homo sapiens
caccaggatatcagactgcct

SEQ ID NO: 33386 - RNA, 21 nt, RNAi
ccaggauaucagacugccuuu

SEQ ID NO: 33387 - RNA, 21 nt, RNAi
uugguccuauagucugacgga

SEQ ID NO: 33388 - DNA, 21 bp, homo sapiens
caggatatcagactgccttct

SEQ ID NO: 33389 - RNA, 21 nt, RNAi
ggauaucagacugccuucuuu

SEQ ID NO: 33390 - RNA, 21 nt, RNAi
uuccuauagucugacggaaga

SEQ ID NO: 33391 - DNA, 21 bp, homo sapiens
cagactgccttctcacagttg

SEQ ID NO: 33392 - RNA, 21 nt, RNAi
gacugccuucucacaguuguu

SEQ ID NO: 33393 - RNA, 21 nt, RNAi
uucugacggaagagugucaac

SEQ ID NO: 33394 - DNA, 21 bp, homo sapiens
catgatcctgtaggtcaaatg

SEQ ID NO: 33395 - RNA, 21 nt, RNAi
ugauccuguaggucaaauguu

SEQ ID NO: 33396 - RNA, 21 nt, RNAi
uuacuaggacauccaguuuac

SEQ ID NO: 33397 - DNA, 21 bp, homo sapiens
cacctggcacagtcacttcac

SEQ ID NO: 33398 - RNA, 21 nt, RNAi
ccuggcacagucacuucacuu

SEQ ID NO: 33399 - RNA, 21 nt, RNAi
uuggaccgugucagugaagug

SEQ ID NO: 33400 - DNA, 21 bp, homo sapiens
cacagtcacttcacatgttgt

SEQ ID NO: 33401 - RNA, 21 nt, RNAi
cagucacuucacauguuguuu

SEQ ID NO: 33402 - RNA, 21 nt, RNAi
uugucagugaaguguacaaca

SEQ ID NO: 33403 - DNA, 21 bp, homo sapiens
cagtcacttcacatgttgtct

SEQ ID NO: 33404 - RNA, 21 nt, RNAi
gucacuucacauguugucuuu

SEQ ID NO: 33405 - RNA, 21 nt, RNAi
uucagugaaguguacaacaga

SEQ ID NO: 33406 - DNA, 21 bp, homo sapiens
cacttcacatgttgtctaccg

SEQ ID NO: 33407 - RNA, 21 nt, RNAi
cuucacauguugucuaccguu

SEQ ID NO: 33408 - RNA, 21 nt, RNAi
uugaaguguacaacagauggc

SEQ ID NO: 33409 - DNA, 21 bp, homo sapiens
cacatgttgtctaccgcctgt

SEQ ID NO: 33410 - RNA, 21 nt, RNAi
cauguugucuaccgccuguuu

SEQ ID NO: 33411 - RNA, 21 nt, RNAi
uuguacaacagauggcggaca

SEQ ID NO: 33412 - DNA, 21 bp, homo sapiens
catgttgtctaccgcctgtcc

SEQ ID NO: 33413 - RNA, 21 nt, RNAi
uguugucuaccgccuguccuu

SEQ ID NO: 33414 - RNA, 21 nt, RNAi
uuacaacagauggcggacagg

SEQ ID NO: 33415 - DNA, 21 bp, homo sapiens
catcaatggtgagcaccagcc

SEQ ID NO: 33416 - RNA, 21 nt, RNAi
ucaauggugagcaccagccuu

SEQ ID NO: 33417 - RNA, 21 nt, RNAi
uuaguuaccacucguggucgg

SEQ ID NO: 33418 - DNA, 21 bp, homo sapiens
caatggtgagcaccagcctga

SEQ ID NO: 33419 - RNA, 21 nt, RNAi
auggugagcaccagccugauu

SEQ ID NO: 33420 - RNA, 21 nt, RNAi
uuuaccacucguggucggacu

SEQ ID NO: 33421 - DNA, 21 bp, homo sapiens
caccagcctgaatgcagaagc

SEQ ID NO: 33422 - RNA, 21 nt, RNAi
ccagccugaaugcagaagcuu

SEQ ID NO: 33423 - RNA, 21 nt, RNAi
uuggucggacuuacgucuucg

SEQ ID NO: 33424 - DNA, 21 bp, homo sapiens
cagcctgaatgcagaagcgct

SEQ ID NO: 33425 - RNA, 21 nt, RNAi
gccugaaugcagaagcgcuuu

SEQ ID NO: 33426 - RNA, 21 nt, RNAi
uucggacuuacgucuucgcga

SEQ ID NO: 33427 - DNA, 21 bp, homo sapiens
cagaagcgctccagtatctcc

SEQ ID NO: 33428 - RNA, 21 nt, RNAi
gaagcgcuccaguaucuccuu

SEQ ID NO: 33429 - RNA, 21 nt, RNAi
uucuucgcgaggucauagagg

SEQ ID NO: 33430 - DNA, 21 bp, homo sapiens
caggcagccagtgtgacactg

SEQ ID NO: 33431 - RNA, 21 nt, RNAi
ggcagccagugugacacuguu

SEQ ID NO: 33432 - RNA, 21 nt, RNAi
uuccgucggucacacugugac

SEQ ID NO: 33433 - DNA, 21 bp, homo sapiens
cagccagtgtgacactgcttt

SEQ ID NO: 33434 - RNA, 21 nt, RNAi
gccagugugacacugcuuuuu

SEQ ID NO: 33435 - RNA, 21 nt, RNAi
uucggucacacugugacgaaa

SEQ ID NO: 33436 - DNA, 21 bp, homo sapiens
cagtgtgacactgctttaaac

SEQ ID NO: 33437 - RNA, 21 nt, RNAi
gugugacacugcuuuaaacuu

SEQ ID NO: 33438 - RNA, 21 nt, RNAi
uucacacugugacgaaauuug

SEQ ID NO: 33439 - DNA, 21 bp, homo sapiens
cagatggtttcctaggaaatc

SEQ ID NO: 33440 - RNA, 21 nt, RNAi
gaugguuuccuaggaaaucuu

SEQ ID NO: 33441 - RNA, 21 nt, RNAi
uucuaccaaaggauccuuuag

SEQ ID NO: 33442 - DNA, 21 bp, homo sapiens
cacaggcttctgagcacagct

SEQ ID NO: 33443 - RNA, 21 nt, RNAi
caggcuucugagcacagcuuu

SEQ ID NO: 33444 - RNA, 21 nt, RNAi
uuguccgaagacucgugucga

SEQ ID NO: 33445 - DNA, 21 bp, homo sapiens
caggcttctgagcacagctgc

SEQ ID NO: 33446 - RNA, 21 nt, RNAi
ggcuucugagcacagcugcuu

SEQ ID NO: 33447 - RNA, 21 nt, RNAi
uuccgaagacucgugucgacg

SEQ ID NO: 33448 - DNA, 21 bp, homo sapiens
gagcggatagtgccagctacg

SEQ ID NO: 33449 - RNA, 21 nt, RNAi
gcggauagugccagcuacguu

SEQ ID NO: 33450 - RNA, 21 nt, RNAi
uucgccuaucacggucgaugc

SEQ ID NO: 33451 - DNA, 21 bp, homo sapiens
gatagtgccagctacggtccg

SEQ ID NO: 33452 - RNA, 21 nt, RNAi
uagugccagcuacgguccguu

SEQ ID NO: 33453 - RNA, 21 nt, RNAi
uuaucacggucgaugccaggc

SEQ ID NO: 33454 - DNA, 21 bp, homo sapiens
gagatcctatagcaatggaac

SEQ ID NO: 33455 - RNA, 21 nt, RNAi
gauccuauagcaauggaacuu

SEQ ID NO: 33456 - RNA, 21 nt, RNAi
uucuaggauaucguuaccuug

SEQ ID NO: 33457 - DNA, 21 bp, homo sapiens
gatcctatagcaatggaactc

SEQ ID NO: 33458 - RNA, 21 nt, RNAi
uccuauagcaauggaacucuu

SEQ ID NO: 33459 - RNA, 21 nt, RNAi
uuaggauaucguuaccuugag

SEQ ID NO: 33460 - DNA, 21 bp, homo sapiens
gaactcagcgatgcaaatctg

SEQ ID NO: 33461 - RNA, 21 nt, RNAi
acucagcgaugcaaaucuguu

SEQ ID NO: 33462 - RNA, 21 nt, RNAi
uuugagucgcuacguuuagac

SEQ ID NO: 33463 - DNA, 21 bp, homo sapiens
gatgcaaatctgcaaacacta

SEQ ID NO: 33464 - RNA, 21 nt, RNAi
ugcaaaucugcaaacacuauu

SEQ ID NO: 33465 - RNA, 21 nt, RNAi
uuacguuuagacguuugugau

SEQ ID NO: 33466 - DNA, 21 bp, homo sapiens
gatcctgatcctgccatccga

SEQ ID NO: 33467 - RNA, 21 nt, RNAi
uccugauccugccauccgauu

SEQ ID NO: 33468 - RNA, 21 nt, RNAi
uuaggacuaggacgguaggcu

SEQ ID NO: 33469 - DNA, 21 bp, homo sapiens
gatcctgccatccgacgtcca

SEQ ID NO: 33470 - RNA, 21 nt, RNAi
uccugccauccgacguccauu

SEQ ID NO: 33471 - RNA, 21 nt, RNAi
uuaggacgguaggcugcaggu

SEQ ID NO: 33472 - DNA, 21 bp, homo sapiens
gacgtccagctgagaaatttc

SEQ ID NO: 33473 - RNA, 21 nt, RNAi
cguccagcugagaaauuucuu

SEQ ID NO: 33474 - RNA, 21 nt, RNAi
uugcaggucgacucuuuaaag

SEQ ID NO: 33475 - DNA, 21 bp, homo sapiens
gaatctgttgaaggaaatcag

SEQ ID NO: 33476 - RNA, 21 nt, RNAi
aucuguugaaggaaaucaguu

SEQ ID NO: 33477 - RNA, 21 nt, RNAi
uuuagacaacuuccuuuaguc

SEQ ID NO: 33478 - DNA, 21 bp, homo sapiens
gaaggaaatcagaattatcca

SEQ ID NO: 33479 - RNA, 21 nt, RNAi
aggaaaucagaauuauccauu

SEQ ID NO: 33480 - RNA, 21 nt, RNAi
uuuccuuuagucuuaauaggu

SEQ ID NO: 33481 - DNA, 21 bp, homo sapiens
gaaatcagaattatccactgt

SEQ ID NO: 33482 - RNA, 21 nt, RNAi
aaucagaauuauccacuguuu

SEQ ID NO: 33483 - RNA, 21 nt, RNAi
uuuuagucuuaauaggugaca

SEQ ID NO: 33484 - DNA, 21 bp, homo sapiens
gaactggagaattgttgaaga

SEQ ID NO: 33485 - RNA, 21 nt, RNAi
acuggagaauuguugaagauu

SEQ ID NO: 33486 - RNA, 21 nt, RNAi
uuugaccucuuaacaacuucu

SEQ ID NO: 33487 - DNA, 21 bp, homo sapiens
gagaattgttgaagatgaacc

SEQ ID NO: 33488 - RNA, 21 nt, RNAi
gaauuguugaagaugaaccuu

SEQ ID NO: 33489 - RNA, 21 nt, RNAi
uucuuaacaacuucuacuugg

SEQ ID NO: 33490 - DNA, 21 bp, homo sapiens
gaattgttgaagatgaaccaa

SEQ ID NO: 33491 - RNA, 21 nt, RNAi
auuguugaagaugaaccaauu

SEQ ID NO: 33492 - RNA, 21 nt, RNAi
uuuaacaacuucuacuugguu

SEQ ID NO: 33493 - DNA, 21 bp, homo sapiens
gaagccgatcgagtggccatt

SEQ ID NO: 33494 - RNA, 21 nt, RNAi
agccgaucgaguggccauuuu

SEQ ID NO: 33495 - RNA, 21 nt, RNAi
uuucggcuagcucaccgguaa

SEQ ID NO: 33496 - DNA, 21 bp, homo sapiens
gatcgagtggccattaaagcc

SEQ ID NO: 33497 - RNA, 21 nt, RNAi
ucgaguggccauuaaagccuu

SEQ ID NO: 33498 - RNA, 21 nt, RNAi
uuagcucaccgguaauuucgg

SEQ ID NO: 33499 - DNA, 21 bp, homo sapiens
gagtggccattaaagccaaca

SEQ ID NO: 33500 - RNA, 21 nt, RNAi
guggccauuaaagccaacauu

SEQ ID NO: 33501 - RNA, 21 nt, RNAi
uucaccgguaauuucgguugu

SEQ ID NO: 33502 - DNA, 21 bp, homo sapiens
gagcaaattcagaagcagtta

SEQ ID NO: 33503 - RNA, 21 nt, RNAi
gcaaauucagaagcaguuauu

SEQ ID NO: 33504 - RNA, 21 nt, RNAi
uucguuuaagucuucgucaau

SEQ ID NO: 33505 - DNA, 21 bp, homo sapiens
gaagcagttaagtgatgcaat

SEQ ID NO: 33506 - RNA, 21 nt, RNAi
agcaguuaagugaugcaauuu

SEQ ID NO: 33507 - RNA, 21 nt, RNAi
uuucgucaauucacuacguua

SEQ ID NO: 33508 - DNA, 21 bp, homo sapiens
gatgcaattagcattattggc

SEQ ID NO: 33509 - RNA, 21 nt, RNAi
ugcaauuagcauuauuggcuu

SEQ ID NO: 33510 - RNA, 21 nt, RNAi
uuacguuaaucguaauaaccg

SEQ ID NO: 33511 - DNA, 21 bp, homo sapiens
gaaatggcctgacttgctgac

SEQ ID NO: 33512 - RNA, 21 nt, RNAi
aauggccugacuugcugacuu

SEQ ID NO: 33513 - RNA, 21 nt, RNAi
uuuuaccggacugaacgacug

SEQ ID NO: 33514 - DNA, 21 bp, homo sapiens
gacttgctgacagaaatggtg

SEQ ID NO: 33515 - RNA, 21 nt, RNAi
cuugcugacagaaaugguguu

SEQ ID NO: 33516 - RNA, 21 nt, RNAi
uugaacgacugucuuuaccac

SEQ ID NO: 33517 - DNA, 21 bp, homo sapiens
gacagaaatggtgaatcgctt

SEQ ID NO: 33518 - RNA, 21 nt, RNAi
cagaaauggugaaucgcuuuu

SEQ ID NO: 33519 - RNA, 21 nt, RNAi
uugucuuuaccacuuagcgaa

SEQ ID NO: 33520 - DNA, 21 bp, homo sapiens
gaaatggtgaatcgctttcag

SEQ ID NO: 33521 - RNA, 21 nt, RNAi
aauggugaaucgcuuucaguu

SEQ ID NO: 33522 - RNA, 21 nt, RNAi
uuuuaccacuuagcgaaaguc

SEQ ID NO: 33523 - DNA, 21 bp, homo sapiens
gaatcgctttcagagtggaga

SEQ ID NO: 33524 - RNA, 21 nt, RNAi
aucgcuuucagaguggagauu

SEQ ID NO: 33525 - RNA, 21 nt, RNAi
uuuagcgaaagucucaccucu

SEQ ID NO: 33526 - DNA, 21 bp, homo sapiens
gagtggagatttccatgttat

SEQ ID NO: 33527 - RNA, 21 nt, RNAi
guggagauuuccauguuauuu

SEQ ID NO: 33528 - RNA, 21 nt, RNAi
uucaccucuaaagguacaaua

SEQ ID NO: 33529 - DNA, 21 bp, homo sapiens
gagtcctccgtacagcacatt

SEQ ID NO: 33530 - RNA, 21 nt, RNAi
guccuccguacagcacauuuu

SEQ ID NO: 33531 - RNA, 21 nt, RNAi
uucaggaggcaugucguguaa

SEQ ID NO: 33532 - DNA, 21 bp, homo sapiens
gataccgtcatgaatttaagt

SEQ ID NO: 33533 - RNA, 21 nt, RNAi
uaccgucaugaauuuaaguuu

SEQ ID NO: 33534 - RNA, 21 nt, RNAi
uuauggcaguacuuaaauuca

SEQ ID NO: 33535 - DNA, 21 bp, homo sapiens
gagttatggactgaaattaag

SEQ ID NO: 33536 - RNA, 21 nt, RNAi
guuauggacugaaauuaaguu

SEQ ID NO: 33537 - RNA, 21 nt, RNAi
uucaauaccugacuuuaauuc

SEQ ID NO: 33538 - DNA, 21 bp, homo sapiens
gactgaaattaagcttgttct

SEQ ID NO: 33539 - RNA, 21 nt, RNAi
cugaaauuaagcuuguucuuu

SEQ ID NO: 33540 - RNA, 21 nt, RNAi
uugacuuuaauucgaacaaga

SEQ ID NO: 33541 - DNA, 21 bp, homo sapiens
gaaattaagcttgttctggat

SEQ ID NO: 33542 - RNA, 21 nt, RNAi
aauuaagcuuguucuggauuu

SEQ ID NO: 33543 - RNA, 21 nt, RNAi
uuuuaauucgaacaagaccua

SEQ ID NO: 33544 - DNA, 21 bp, homo sapiens
gatgcctttgctttgcctttg

SEQ ID NO: 33545 - RNA, 21 nt, RNAi
ugccuuugcuuugccuuuguu

SEQ ID NO: 33546 - RNA, 21 nt, RNAi
uuacggaaacgaaacggaaac

SEQ ID NO: 33547 - DNA, 21 bp, homo sapiens
gaaggtaatatggaaacttgg

SEQ ID NO: 33548 - RNA, 21 nt, RNAi
agguaauauggaaacuugguu

SEQ ID NO: 33549 - RNA, 21 nt, RNAi
uuuccauuauaccuuugaacc

SEQ ID NO: 33550 - DNA, 21 bp, homo sapiens
gatgatgaagaggaagccggc

SEQ ID NO: 33551 - RNA, 21 nt, RNAi
ugaugaagaggaagccggcuu

SEQ ID NO: 33552 - RNA, 21 nt, RNAi
uuacuacuucuccuucggccg

SEQ ID NO: 33553 - DNA, 21 bp, homo sapiens
gatgaagaggaagccggctta

SEQ ID NO: 33554 - RNA, 21 nt, RNAi
ugaagaggaagccggcuuauu

SEQ ID NO: 33555 - RNA, 21 nt, RNAi
uuacuucuccuucggccgaau

SEQ ID NO: 33556 - DNA, 21 bp, homo sapiens
gaagaggaagccggcttattg

SEQ ID NO: 33557 - RNA, 21 nt, RNAi
agaggaagccggcuuauuguu

SEQ ID NO: 33558 - RNA, 21 nt, RNAi
uuucuccuucggccgaauaac

SEQ ID NO: 33559 - DNA, 21 bp, homo sapiens
gaggaagccggcttattggag

SEQ ID NO: 33560 - RNA, 21 nt, RNAi
ggaagccggcuuauuggaguu

SEQ ID NO: 33561 - RNA, 21 nt, RNAi
uuccuucggccgaauaaccuc

SEQ ID NO: 33562 - DNA, 21 bp, homo sapiens
gaagccggcttattggagctc

SEQ ID NO: 33563 - RNA, 21 nt, RNAi
agccggcuuauuggagcucuu

SEQ ID NO: 33564 - RNA, 21 nt, RNAi
uuucggccgaauaaccucgag

SEQ ID NO: 33565 - DNA, 21 bp, homo sapiens
gatttgtgataatgccgcact

SEQ ID NO: 33566 - RNA, 21 nt, RNAi
uuugugauaaugccgcacuuu

SEQ ID NO: 33567 - RNA, 21 nt, RNAi
uuaaacacuauuacggcguga

SEQ ID NO: 33568 - DNA, 21 bp, homo sapiens
gataatgccgcactctatgca

SEQ ID NO: 33569 - RNA, 21 nt, RNAi
uaaugccgcacucuaugcauu

SEQ ID NO: 33570 - RNA, 21 nt, RNAi
uuauuacggcgugagauacgu

SEQ ID NO: 33571 - DNA, 21 bp, homo sapiens
gatgaagaattccagcgatac

SEQ ID NO: 33572 - RNA, 21 nt, RNAi
ugaagaauuccagcgauacuu

SEQ ID NO: 33573 - RNA, 21 nt, RNAi
uuacuucuuaaggucgcuaug

SEQ ID NO: 33574 - DNA, 21 bp, homo sapiens
gaagaattccagcgatacctg

SEQ ID NO: 33575 - RNA, 21 nt, RNAi
agaauuccagcgauaccuguu

SEQ ID NO: 33576 - RNA, 21 nt, RNAi
uuucuuaaggucgcuauggac

SEQ ID NO: 33577 - DNA, 21 bp, homo sapiens
gaattccagcgatacctgcct

SEQ ID NO: 33578 - RNA, 21 nt, RNAi
auuccagcgauaccugccuuu

SEQ ID NO: 33579 - RNA, 21 nt, RNAi
uuuaaggucgcuauggacgga

SEQ ID NO: 33580 - DNA, 21 bp, homo sapiens
gatttgttggtaagtaatgca

SEQ ID NO: 33581 - RNA, 21 nt, RNAi
uuuguugguaaguaaugcauu

SEQ ID NO: 33582 - RNA, 21 nt, RNAi
uuaaacaaccauucauuacgu

SEQ ID NO: 33583 - DNA, 21 bp, homo sapiens
gagagacctcattataagaat

SEQ ID NO: 33584 - RNA, 21 nt, RNAi
gagaccucauuauaagaauuu

SEQ ID NO: 33585 - RNA, 21 nt, RNAi
uucucuggaguaauauucuua

SEQ ID NO: 33586 - DNA, 21 bp, homo sapiens
gagacctcattataagaatct

SEQ ID NO: 33587 - RNA, 21 nt, RNAi
gaccucauuauaagaaucuuu

SEQ ID NO: 33588 - RNA, 21 nt, RNAi
uucuggaguaauauucuuaga

SEQ ID NO: 33589 - DNA, 21 bp, homo sapiens
gaatctatttgaggaccagaa

SEQ ID NO: 33590 - RNA, 21 nt, RNAi
aucuauuugaggaccagaauu

SEQ ID NO: 33591 - RNA, 21 nt, RNAi
uuuagauaaacuccuggucuu

SEQ ID NO: 33592 - DNA, 21 bp, homo sapiens
gaggaccagaacacgctgaca

SEQ ID NO: 33593 - RNA, 21 nt, RNAi
ggaccagaacacgcugacauu

SEQ ID NO: 33594 - RNA, 21 nt, RNAi
uuccuggucuugugcgacugu

SEQ ID NO: 33595 - DNA, 21 bp, homo sapiens
gaccagaacacgctgacaagt

SEQ ID NO: 33596 - RNA, 21 nt, RNAi
ccagaacacgcugacaaguuu

SEQ ID NO: 33597 - RNA, 21 nt, RNAi
uuggucuugugcgacuguuca

SEQ ID NO: 33598 - DNA, 21 bp, homo sapiens
gaacacgctgacaagtatctg

SEQ ID NO: 33599 - RNA, 21 nt, RNAi
acacgcugacaaguaucuguu

SEQ ID NO: 33600 - RNA, 21 nt, RNAi
uuugugcgacuguucauagac

SEQ ID NO: 33601 - DNA, 21 bp, homo sapiens
gaatttagagctgctgatgaa

SEQ ID NO: 33602 - RNA, 21 nt, RNAi
auuuagagcugcugaugaauu

SEQ ID NO: 33603 - RNA, 21 nt, RNAi
uuuaaaucucgacgacuacuu

SEQ ID NO: 33604 - DNA, 21 bp, homo sapiens
gagctgctgatgaagaagcat

SEQ ID NO: 33605 - RNA, 21 nt, RNAi
gcugcugaugaagaagcauuu

SEQ ID NO: 33606 - RNA, 21 nt, RNAi
uucgacgacuacuucuucgua

SEQ ID NO: 33607 - DNA, 21 bp, homo sapiens
gatgaagaagcatttgaagat

SEQ ID NO: 33608 - RNA, 21 nt, RNAi
ugaagaagcauuugaagauuu

SEQ ID NO: 33609 - RNA, 21 nt, RNAi
uuacuucuucguaaacuucua

SEQ ID NO: 33610 - DNA, 21 bp, homo sapiens
gaagataattctgaggagtac

SEQ ID NO: 33611 - RNA, 21 nt, RNAi
agauaauucugaggaguacuu

SEQ ID NO: 33612 - RNA, 21 nt, RNAi
uuucuauuaagacuccucaug

SEQ ID NO: 33613 - DNA, 21 bp, homo sapiens
gataattctgaggagtacata

SEQ ID NO: 33614 - RNA, 21 nt, RNAi
uaauucugaggaguacauauu

SEQ ID NO: 33615 - RNA, 21 nt, RNAi
uuauuaagacuccucauguau

SEQ ID NO: 33616 - DNA, 21 bp, homo sapiens
gaggagtacataaggagagat

SEQ ID NO: 33617 - RNA, 21 nt, RNAi
ggaguacauaaggagagauuu

SEQ ID NO: 33618 - RNA, 21 nt, RNAi
uuccucauguauuccucucua

SEQ ID NO: 33619 - DNA, 21 bp, homo sapiens
gagtacataaggagagatttg

SEQ ID NO: 33620 - RNA, 21 nt, RNAi
guacauaaggagagauuuguu

SEQ ID NO: 33621 - RNA, 21 nt, RNAi
uucauguauuccucucuaaac

SEQ ID NO: 33622 - DNA, 21 bp, homo sapiens
gagagatttggaaggatctga

SEQ ID NO: 33623 - RNA, 21 nt, RNAi
gagauuuggaaggaucugauu

SEQ ID NO: 33624 - RNA, 21 nt, RNAi
uucucuaaaccuuccuagacu

SEQ ID NO: 33625 - DNA, 21 bp, homo sapiens
gagatttggaaggatctgata

SEQ ID NO: 33626 - RNA, 21 nt, RNAi
gauuuggaaggaucugauauu

SEQ ID NO: 33627 - RNA, 21 nt, RNAi
uucuaaaccuuccuagacuau

SEQ ID NO: 33628 - DNA, 21 bp, homo sapiens
gatttggaaggatctgatatt

SEQ ID NO: 33629 - RNA, 21 nt, RNAi
uuuggaaggaucugauauuuu

SEQ ID NO: 33630 - RNA, 21 nt, RNAi
uuaaaccuuccuagacuauaa

SEQ ID NO: 33631 - DNA, 21 bp, homo sapiens
gaaggatctgatattgatact

SEQ ID NO: 33632 - RNA, 21 nt, RNAi
aggaucugauauugauacuuu

SEQ ID NO: 33633 - RNA, 21 nt, RNAi
uuuccuagacuauaacuauga

SEQ ID NO: 33634 - DNA, 21 bp, homo sapiens
gatctgatattgatactagac

SEQ ID NO: 33635 - RNA, 21 nt, RNAi
ucugauauugauacuagacuu

SEQ ID NO: 33636 - RNA, 21 nt, RNAi
uuagacuauaacuaugaucug

SEQ ID NO: 33637 - DNA, 21 bp, homo sapiens
gatattgatactagacgcagg

SEQ ID NO: 33638 - RNA, 21 nt, RNAi
uauugauacuagacgcagguu

SEQ ID NO: 33639 - RNA, 21 nt, RNAi
uuauaacuaugaucugcgucc

SEQ ID NO: 33640 - DNA, 21 bp, homo sapiens
gatctggtacgaggattatgc

SEQ ID NO: 33641 - RNA, 21 nt, RNAi
ucugguacgaggauuaugcuu

SEQ ID NO: 33642 - RNA, 21 nt, RNAi
uuagaccaugcuccuaauacg

SEQ ID NO: 33643 - DNA, 21 bp, homo sapiens
gacctgtgacaggaatcttct

SEQ ID NO: 33644 - RNA, 21 nt, RNAi
ccugugacaggaaucuucuuu

SEQ ID NO: 33645 - RNA, 21 nt, RNAi
uuggacacuguccuuagaaga

SEQ ID NO: 33646 - DNA, 21 bp, homo sapiens
gacaggaatcttctctggtta

SEQ ID NO: 33647 - RNA, 21 nt, RNAi
caggaaucuucucugguuauu

SEQ ID NO: 33648 - RNA, 21 nt, RNAi
uuguccuuagaagagaccaau

SEQ ID NO: 33649 - DNA, 21 bp, homo sapiens
gaatcttctctggttatgtta

SEQ ID NO: 33650 - RNA, 21 nt, RNAi
aucuucucugguuauguuauu

SEQ ID NO: 33651 - RNA, 21 nt, RNAi
uuuagaagagaccaauacaau

SEQ ID NO: 33652 - DNA, 21 bp, homo sapiens
gaaacacaaagatgcagccat

SEQ ID NO: 33653 - RNA, 21 nt, RNAi
aacacaaagaugcagccauuu

SEQ ID NO: 33654 - RNA, 21 nt, RNAi
uuuuguguuucuacgucggua

SEQ ID NO: 33655 - DNA, 21 bp, homo sapiens
gatgcagccatctacctagtg

SEQ ID NO: 33656 - RNA, 21 nt, RNAi
ugcagccaucuaccuaguguu

SEQ ID NO: 33657 - RNA, 21 nt, RNAi
uuacgucgguagauggaucac

SEQ ID NO: 33658 - DNA, 21 bp, homo sapiens
gaagcatggaattacacaagc

SEQ ID NO: 33659 - RNA, 21 nt, RNAi
agcauggaauuacacaagcuu

SEQ ID NO: 33660 - RNA, 21 nt, RNAi
uuucguaccuuaauguguucg

SEQ ID NO: 33661 - DNA, 21 bp, homo sapiens
gaattacacaagcaaatgaac

SEQ ID NO: 33662 - RNA, 21 nt, RNAi
auuacacaagcaaaugaacuu

SEQ ID NO: 33663 - RNA, 21 nt, RNAi
uuuaauguguucguuuacuug

SEQ ID NO: 33664 - DNA, 21 bp, homo sapiens
gaacttgtaaacctaactgag

SEQ ID NO: 33665 - RNA, 21 nt, RNAi
acuuguaaaccuaacugaguu

SEQ ID NO: 33666 - RNA, 21 nt, RNAi
uuugaacauuuggauugacuc

SEQ ID NO: 33667 - DNA, 21 bp, homo sapiens
gagttctttgtgaatcacatc

SEQ ID NO: 33668 - RNA, 21 nt, RNAi
guucuuugugaaucacaucuu

SEQ ID NO: 33669 - RNA, 21 nt, RNAi
uucaagaaacacuuaguguag

SEQ ID NO: 33670 - DNA, 21 bp, homo sapiens
gaatgaatttcctgtccttaa

SEQ ID NO: 33671 - RNA, 21 nt, RNAi
augaauuuccuguccuuaauu

SEQ ID NO: 33672 - RNA, 21 nt, RNAi
uuuacuuaaaggacaggaauu

SEQ ID NO: 33673 - DNA, 21 bp, homo sapiens
gaatttcctgtccttaaagct

SEQ ID NO: 33674 - RNA, 21 nt, RNAi
auuuccuguccuuaaagcuuu

SEQ ID NO: 33675 - RNA, 21 nt, RNAi
uuuaaaggacaggaauuucga

SEQ ID NO: 33676 - DNA, 21 bp, homo sapiens
gattcctctcttgattaatca

SEQ ID NO: 33677 - RNA, 21 nt, RNAi
uuccucucuugauuaaucauu

SEQ ID NO: 33678 - RNA, 21 nt, RNAi
uuaaggagagaacuaauuagu

SEQ ID NO: 33679 - DNA, 21 bp, homo sapiens
gattaatcatcttcaagctgg

SEQ ID NO: 33680 - RNA, 21 nt, RNAi
uuaaucaucuucaagcugguu

SEQ ID NO: 33681 - RNA, 21 nt, RNAi
uuaauuaguagaaguucgacc

SEQ ID NO: 33682 - DNA, 21 bp, homo sapiens
gaacggctctttactatgcga

SEQ ID NO: 33683 - RNA, 21 nt, RNAi
acggcucuuuacuaugcgauu

SEQ ID NO: 33684 - RNA, 21 nt, RNAi
uuugccgagaaaugauacgcu

SEQ ID NO: 33685 - DNA, 21 bp, homo sapiens
gaaatcgcaccgtttgttgag

SEQ ID NO: 33686 - RNA, 21 nt, RNAi
aaucgcaccguuuguugaguu

SEQ ID NO: 33687 - RNA, 21 nt, RNAi
uuuuagcguggcaaacaacuc

SEQ ID NO: 33688 - DNA, 21 bp, homo sapiens
gagattctgctaacaaacctt

SEQ ID NO: 33689 - RNA, 21 nt, RNAi
gauucugcuaacaaaccuuuu

SEQ ID NO: 33690 - RNA, 21 nt, RNAi
uucuaagacgauuguuuggaa

SEQ ID NO: 33691 - DNA, 21 bp, homo sapiens
gaaagctatcatgagaagttt

SEQ ID NO: 33692 - RNA, 21 nt, RNAi
aagcuaucaugagaaguuuuu

SEQ ID NO: 33693 - RNA, 21 nt, RNAi
uuuucgauaguacucuucaaa

SEQ ID NO: 33694 - DNA, 21 bp, homo sapiens
gaagctattagctgttagtaa

SEQ ID NO: 33695 - RNA, 21 nt, RNAi
agcuauuagcuguuaguaauu

SEQ ID NO: 33696 - RNA, 21 nt, RNAi
uuucgauaaucgacaaucauu

SEQ ID NO: 33697 - DNA, 21 bp, homo sapiens
gaataacttgcaaagctaacc

SEQ ID NO: 33698 - RNA, 21 nt, RNAi
auaacuugcaaagcuaaccuu

SEQ ID NO: 33699 - RNA, 21 nt, RNAi
uuuauugaacguuucgauugg

SEQ ID NO: 33700 - DNA, 21 bp, homo sapiens
gatgtgcaagaatttattcca

SEQ ID NO: 33701 - RNA, 21 nt, RNAi
ugugcaagaauuuauuccauu

SEQ ID NO: 33702 - RNA, 21 nt, RNAi
uuacacguucuuaaauaaggu

SEQ ID NO: 33703 - DNA, 21 bp, homo sapiens
gatgtctttgcttctggaaac

SEQ ID NO: 33704 - RNA, 21 nt, RNAi
ugucuuugcuucuggaaacuu

SEQ ID NO: 33705 - RNA, 21 nt, RNAi
uuacagaaacgaagaccuuug

SEQ ID NO: 33706 - DNA, 21 bp, homo sapiens
gaaagaacaggaaatattcct

SEQ ID NO: 33707 - RNA, 21 nt, RNAi
aagaacaggaaauauuccuuu

SEQ ID NO: 33708 - RNA, 21 nt, RNAi
uuuucuuguccuuuauaagga

SEQ ID NO: 33709 - DNA, 21 bp, homo sapiens
gaacaggaaatattcctgctc

SEQ ID NO: 33710 - RNA, 21 nt, RNAi
acaggaaauauuccugcucuu

SEQ ID NO: 33711 - RNA, 21 nt, RNAi
uuuguccuuuauaaggacgag

SEQ ID NO: 33712 - DNA, 21 bp, homo sapiens
gaaatattcctgctctagtga

SEQ ID NO: 33713 - RNA, 21 nt, RNAi
aauauuccugcucuagugauu

SEQ ID NO: 33714 - RNA, 21 nt, RNAi
uuuuauaaggacgagaucacu

SEQ ID NO: 33715 - DNA, 21 bp, homo sapiens
gaggcttcttcaagcattctt

SEQ ID NO: 33716 - RNA, 21 nt, RNAi
ggcuucuucaagcauucuuuu

SEQ ID NO: 33717 - RNA, 21 nt, RNAi
uuccgaagaaguucguaagaa

SEQ ID NO: 33718 - DNA, 21 bp, homo sapiens
gaacgcggttcaaacacaata

SEQ ID NO: 33719 - RNA, 21 nt, RNAi
acgcgguucaaacacaauauu

SEQ ID NO: 33720 - RNA, 21 nt, RNAi
uuugcgccaaguuuguguuau

SEQ ID NO: 33721 - DNA, 21 bp, homo sapiens
gaagctgattgcatccaaagc

SEQ ID NO: 33722 - RNA, 21 nt, RNAi
agcugauugcauccaaagcuu

SEQ ID NO: 33723 - RNA, 21 nt, RNAi
uuucgacuaacguagguuucg

SEQ ID NO: 33724 - DNA, 21 bp, homo sapiens
gattgcatccaaagcaaatga

SEQ ID NO: 33725 - RNA, 21 nt, RNAi
uugcauccaaagcaaaugauu

SEQ ID NO: 33726 - RNA, 21 nt, RNAi
uuaacguagguuucguuuacu

SEQ ID NO: 33727 - DNA, 21 bp, homo sapiens
gagcacatgcctcctgaatca

SEQ ID NO: 33728 - RNA, 21 nt, RNAi
gcacaugccuccugaaucauu

SEQ ID NO: 33729 - RNA, 21 nt, RNAi
uucguguacggaggacuuagu

SEQ ID NO: 33730 - DNA, 21 bp, homo sapiens
gaatcagttgaccaatatagg

SEQ ID NO: 33731 - RNA, 21 nt, RNAi
aucaguugaccaauauagguu

SEQ ID NO: 33732 - RNA, 21 nt, RNAi
uuuagucaacugguuauaucc

SEQ ID NO: 33733 - DNA, 21 bp, homo sapiens
gaccaatataggaaacaaatc

SEQ ID NO: 33734 - RNA, 21 nt, RNAi
ccaauauaggaaacaaaucuu

SEQ ID NO: 33735 - RNA, 21 nt, RNAi
uugguuauauccuuuguuuag

SEQ ID NO: 33736 - DNA, 21 bp, homo sapiens
gaaacaaatcttcattctgct

SEQ ID NO: 33737 - RNA, 21 nt, RNAi
aacaaaucuucauucugcuuu

SEQ ID NO: 33738 - RNA, 21 nt, RNAi
uuuuguuuagaaguaagacga

SEQ ID NO: 33739 - DNA, 21 bp, homo sapiens
gaaattcagaaggtatctgga

SEQ ID NO: 33740 - RNA, 21 nt, RNAi
aauucagaagguaucuggauu

SEQ ID NO: 33741 - RNA, 21 nt, RNAi
uuuuaagucuuccauagaccu

SEQ ID NO: 33742 - DNA, 21 bp, homo sapiens
gaaggtatctggaaatgtaga

SEQ ID NO: 33743 - RNA, 21 nt, RNAi
agguaucuggaaauguagauu

SEQ ID NO: 33744 - RNA, 21 nt, RNAi
uuuccauagaccuuuacaucu

SEQ ID NO: 33745 - DNA, 21 bp, homo sapiens
gatctgtgcggttggcataac

SEQ ID NO: 33746 - RNA, 21 nt, RNAi
ucugugcgguuggcauaacuu

SEQ ID NO: 33747 - RNA, 21 nt, RNAi
uuagacacgccaaccguauug

SEQ ID NO: 33748 - DNA, 21 bp, homo sapiens
gatggacactgagtataccaa

SEQ ID NO: 33749 - RNA, 21 nt, RNAi
uggacacugaguauaccaauu

SEQ ID NO: 33750 - RNA, 21 nt, RNAi
uuaccugugacucauaugguu

SEQ ID NO: 33751 - DNA, 21 bp, homo sapiens
gacactgagtataccaaactg

SEQ ID NO: 33752 - RNA, 21 nt, RNAi
cacugaguauaccaaacuguu

SEQ ID NO: 33753 - RNA, 21 nt, RNAi
uugugacucauaugguuugac

SEQ ID NO: 33754 - DNA, 21 bp, homo sapiens
gagtataccaaactgtggact

SEQ ID NO: 33755 - RNA, 21 nt, RNAi
guauaccaaacuguggacuuu

SEQ ID NO: 33756 - RNA, 21 nt, RNAi
uucauaugguuugacaccuga

SEQ ID NO: 33757 - DNA, 21 bp, homo sapiens
gactccattattacagtcttt

SEQ ID NO: 33758 - RNA, 21 nt, RNAi
cuccauuauuacagucuuuuu

SEQ ID NO: 33759 - RNA, 21 nt, RNAi
uugagguaauaaugucagaaa

SEQ ID NO: 33760 - DNA, 21 bp, homo sapiens
gaagatgataccattcctgat

SEQ ID NO: 33761 - RNA, 21 nt, RNAi
agaugauaccauuccugauuu

SEQ ID NO: 33762 - RNA, 21 nt, RNAi
uuucuacuaugguaaggacua

SEQ ID NO: 33763 - DNA, 21 bp, homo sapiens
gatgataccattcctgatgag

SEQ ID NO: 33764 - RNA, 21 nt, RNAi
ugauaccauuccugaugaguu

SEQ ID NO: 33765 - RNA, 21 nt, RNAi
uuacuaugguaaggacuacuc

SEQ ID NO: 33766 - DNA, 21 bp, homo sapiens
gataccattcctgatgaggaa

SEQ ID NO: 33767 - RNA, 21 nt, RNAi
uaccauuccugaugaggaauu

SEQ ID NO: 33768 - RNA, 21 nt, RNAi
uuaugguaaggacuacuccuu

SEQ ID NO: 33769 - DNA, 21 bp, homo sapiens
gacatagaagatacaccagga

SEQ ID NO: 33770 - RNA, 21 nt, RNAi
cauagaagauacaccaggauu

SEQ ID NO: 33771 - RNA, 21 nt, RNAi
uuguaucuucuaugugguccu

SEQ ID NO: 33772 - DNA, 21 bp, homo sapiens
gaagatacaccaggatatcag

SEQ ID NO: 33773 - RNA, 21 nt, RNAi
agauacaccaggauaucaguu

SEQ ID NO: 33774 - RNA, 21 nt, RNAi
uuucuaugugguccuauaguc

SEQ ID NO: 33775 - DNA, 21 bp, homo sapiens
gatacaccaggatatcagact

SEQ ID NO: 33776 - RNA, 21 nt, RNAi
uacaccaggauaucagacuuu

SEQ ID NO: 33777 - RNA, 21 nt, RNAi
uuaugugguccuauagucuga

SEQ ID NO: 33778 - DNA, 21 bp, homo sapiens
gatatcagactgccttctcac

SEQ ID NO: 33779 - RNA, 21 nt, RNAi
uaucagacugccuucucacuu

SEQ ID NO: 33780 - RNA, 21 nt, RNAi
uuauagucugacggaagagug

SEQ ID NO: 33781 - DNA, 21 bp, homo sapiens
gactgccttctcacagttggc

SEQ ID NO: 33782 - RNA, 21 nt, RNAi
cugccuucucacaguuggcuu

SEQ ID NO: 33783 - RNA, 21 nt, RNAi
uugacggaagagugucaaccg

SEQ ID NO: 33784 - DNA, 21 bp, homo sapiens
gagcatgatcctgtaggtcaa

SEQ ID NO: 33785 - RNA, 21 nt, RNAi
gcaugauccuguaggucaauu

SEQ ID NO: 33786 - RNA, 21 nt, RNAi
uucguacuaggacauccaguu

SEQ ID NO: 33787 - DNA, 21 bp, homo sapiens
gatcctgtaggtcaaatggtg

SEQ ID NO: 33788 - RNA, 21 nt, RNAi
uccuguaggucaaaugguguu

SEQ ID NO: 33789 - RNA, 21 nt, RNAi
uuaggacauccaguuuaccac

SEQ ID NO: 33790 - DNA, 21 bp, homo sapiens
gagcaccagcctgaatgcaga

SEQ ID NO: 33791 - RNA, 21 nt, RNAi
gcaccagccugaaugcagauu

SEQ ID NO: 33792 - RNA, 21 nt, RNAi
uucguggucggacuuacgucu

SEQ ID NO: 33793 - DNA, 21 bp, homo sapiens
gaatgcagaagcgctccagta

SEQ ID NO: 33794 - RNA, 21 nt, RNAi
augcagaagcgcuccaguauu

SEQ ID NO: 33795 - RNA, 21 nt, RNAi
uuuacgucuucgcgaggucau

SEQ ID NO: 33796 - DNA, 21 bp, homo sapiens
gaagcgctccagtatctccaa

SEQ ID NO: 33797 - RNA, 21 nt, RNAi
agcgcuccaguaucuccaauu

SEQ ID NO: 33798 - RNA, 21 nt, RNAi
uuucgcgaggucauagagguu

SEQ ID NO: 33799 - DNA, 21 bp, homo sapiens
gacactgctttaaactgcatt

SEQ ID NO: 33800 - RNA, 21 nt, RNAi
cacugcuuuaaacugcauuuu

SEQ ID NO: 33801 - RNA, 21 nt, RNAi
uugugacgaaauuugacguaa

SEQ ID NO: 33802 - DNA, 21 bp, homo sapiens
gatggtttcctaggaaatcac

SEQ ID NO: 33803 - RNA, 21 nt, RNAi
ugguuuccuaggaaaucacuu

SEQ ID NO: 33804 - RNA, 21 nt, RNAi
uuaccaaaggauccuuuagug

SEQ ID NO: 33805 - DNA, 21 bp, homo sapiens
gaaatcacaggcttctgagca

SEQ ID NO: 33806 - RNA, 21 nt, RNAi
aaucacaggcuucugagcauu

SEQ ID NO: 33807 - RNA, 21 nt, RNAi
uuuuaguguccgaagacucgu

SEQ ID NO: 33808 - DNA, 21 bp, homo sapiens
tatagcaatggaactcagcga

SEQ ID NO: 33809 - RNA, 21 nt, RNAi
uagcaauggaacucagcgauu

SEQ ID NO: 33810 - RNA, 21 nt, RNAi
uuaucguuaccuugagucgcu

SEQ ID NO: 33811 - DNA, 21 bp, homo sapiens
tagcaatggaactcagcgatg

SEQ ID NO: 33812 - RNA, 21 nt, RNAi
gcaauggaacucagcgauguu

SEQ ID NO: 33813 - RNA, 21 nt, RNAi
uucguuaccuugagucgcuac

SEQ ID NO: 33814 - DNA, 21 bp, homo sapiens
tatcaaagtatgtgcttcagt

SEQ ID NO: 33815 - RNA, 21 nt, RNAi
ucaaaguaugugcuucaguuu

SEQ ID NO: 33816 - RNA, 21 nt, RNAi
uuaguuucauacacgaaguca

SEQ ID NO: 33817 - DNA, 21 bp, homo sapiens
tatgtgcttcagtaacattca

SEQ ID NO: 33818 - RNA, 21 nt, RNAi
ugugcuucaguaacauucauu

SEQ ID NO: 33819 - RNA, 21 nt, RNAi
uuacacgaagucauuguaagu

SEQ ID NO: 33820 - DNA, 21 bp, homo sapiens
taaagccaacatagtgcactt

SEQ ID NO: 33821 - RNA, 21 nt, RNAi
aagccaacauagugcacuuuu

SEQ ID NO: 33822 - RNA, 21 nt, RNAi
uuuucgguuguaucacgugaa

SEQ ID NO: 33823 - DNA, 21 bp, homo sapiens
tagtgcacttgatgcttagca

SEQ ID NO: 33824 - RNA, 21 nt, RNAi
gugcacuugaugcuuagcauu

SEQ ID NO: 33825 - RNA, 21 nt, RNAi
uucacgugaacuacgaaucgu

SEQ ID NO: 33826 - DNA, 21 bp, homo sapiens
tagcattattggcagagaaga

SEQ ID NO: 33827 - RNA, 21 nt, RNAi
gcauuauuggcagagaagauu

SEQ ID NO: 33828 - RNA, 21 nt, RNAi
uucguaauaaccgucucuucu

SEQ ID NO: 33829 - DNA, 21 bp, homo sapiens
tattaatggagtcctccgtac

SEQ ID NO: 33830 - RNA, 21 nt, RNAi
uuaauggaguccuccguacuu

SEQ ID NO: 33831 - RNA, 21 nt, RNAi
uuaauuaccucaggaggcaug

SEQ ID NO: 33832 - DNA, 21 bp, homo sapiens
taatggagtcctccgtacagc

SEQ ID NO: 33833 - RNA, 21 nt, RNAi
auggaguccuccguacagcuu

SEQ ID NO: 33834 - RNA, 21 nt, RNAi
uuuaccucaggaggcaugucg

SEQ ID NO: 33835 - DNA, 21 bp, homo sapiens
taccgtcatgaatttaagtca

SEQ ID NO: 33836 - RNA, 21 nt, RNAi
ccgucaugaauuuaagucauu

SEQ ID NO: 33837 - RNA, 21 nt, RNAi
uuggcaguacuuaaauucagu

SEQ ID NO: 33838 - DNA, 21 bp, homo sapiens
taagtcaaacgagttatggac

SEQ ID NO: 33839 - RNA, 21 nt, RNAi
agucaaacgaguuauggacuu

SEQ ID NO: 33840 - RNA, 21 nt, RNAi
uuucaguuugcucaauaccug

SEQ ID NO: 33841 - DNA, 21 bp, homo sapiens
tatggactgaaattaagcttg

SEQ ID NO: 33842 - RNA, 21 nt, RNAi
uggacugaaauuaagcuuguu

SEQ ID NO: 33843 - RNA, 21 nt, RNAi
uuaccugacuuuaauucgaac

SEQ ID NO: 33844 - DNA, 21 bp, homo sapiens
taagcttgttctggatgcctt

SEQ ID NO: 33845 - RNA, 21 nt, RNAi
agcuuguucuggaugccuuuu

SEQ ID NO: 33846 - RNA, 21 nt, RNAi
uuucgaacaagaccuacggaa

SEQ ID NO: 33847 - DNA, 21 bp, homo sapiens
taaggccactattgaactctg

SEQ ID NO: 33848 - RNA, 21 nt, RNAi
aggccacuauugaacucuguu

SEQ ID NO: 33849 - RNA, 21 nt, RNAi
uuuccggugauaacuugagac

SEQ ID NO: 33850 - DNA, 21 bp, homo sapiens
tacaaactgatgatgaagagg

SEQ ID NO: 33851 - RNA, 21 nt, RNAi
caaacugaugaugaagagguu

SEQ ID NO: 33852 - RNA, 21 nt, RNAi
uuguuugacuacuacuucucc

SEQ ID NO: 33853 - DNA, 21 bp, homo sapiens
taatgccgcactctatgcaca

SEQ ID NO: 33854 - RNA, 21 nt, RNAi
augccgcacucuaugcacauu

SEQ ID NO: 33855 - RNA, 21 nt, RNAi
uuuacggcgugagauacgugu

SEQ ID NO: 33856 - DNA, 21 bp, homo sapiens
tacgatgaagaattccagcga

SEQ ID NO: 33857 - RNA, 21 nt, RNAi
cgaugaagaauuccagcgauu

SEQ ID NO: 33858 - RNA, 21 nt, RNAi
uugcuacuucuuaaggucgcu

SEQ ID NO: 33859 - DNA, 21 bp, homo sapiens
tacagccatctggaatttact

SEQ ID NO: 33860 - RNA, 21 nt, RNAi
cagccaucuggaauuuacuuu

SEQ ID NO: 33861 - RNA, 21 nt, RNAi
uugucgguagaccuuaaauga

SEQ ID NO: 33862 - DNA, 21 bp, homo sapiens
taatgcaattcaatttctggc

SEQ ID NO: 33863 - RNA, 21 nt, RNAi
augcaauucaauuucuggcuu

SEQ ID NO: 33864 - RNA, 21 nt, RNAi
uuuacguuaaguuaaagaccg

SEQ ID NO: 33865 - DNA, 21 bp, homo sapiens
taagaatctatttgaggacca

SEQ ID NO: 33866 - RNA, 21 nt, RNAi
agaaucuauuugaggaccauu

SEQ ID NO: 33867 - RNA, 21 nt, RNAi
uuucuuagauaaacuccuggu

SEQ ID NO: 33868 - DNA, 21 bp, homo sapiens
tatttgaggaccagaacacgc

SEQ ID NO: 33869 - RNA, 21 nt, RNAi
uuugaggaccagaacacgcuu

SEQ ID NO: 33870 - RNA, 21 nt, RNAi
uuaaacuccuggucuugugcg

SEQ ID NO: 33871 - DNA, 21 bp, homo sapiens
tattgtgcctaacatggaatt

SEQ ID NO: 33872 - RNA, 21 nt, RNAi
uugugccuaacauggaauuuu

SEQ ID NO: 33873 - RNA, 21 nt, RNAi
uuaacacggauuguaccuuaa

SEQ ID NO: 33874 - DNA, 21 bp, homo sapiens
taacatggaatttagagctgc

SEQ ID NO: 33875 - RNA, 21 nt, RNAi
acauggaauuuagagcugcuu

SEQ ID NO: 33876 - RNA, 21 nt, RNAi
uuuguaccuuaaaucucgacg

SEQ ID NO: 33877 - DNA, 21 bp, homo sapiens
tagagctgctgatgaagaagc

SEQ ID NO: 33878 - RNA, 21 nt, RNAi
gagcugcugaugaagaagcuu

SEQ ID NO: 33879 - RNA, 21 nt, RNAi
uucucgacgacuacuucuucg

SEQ ID NO: 33880 - DNA, 21 bp, homo sapiens
taattctgaggagtacataag

SEQ ID NO: 33881 - RNA, 21 nt, RNAi
auucugaggaguacauaaguu

SEQ ID NO: 33882 - RNA, 21 nt, RNAi
uuuaagacuccucauguauuc

SEQ ID NO: 33883 - DNA, 21 bp, homo sapiens
tacataaggagagatttggaa

SEQ ID NO: 33884 - RNA, 21 nt, RNAi
cauaaggagagauuuggaauu

SEQ ID NO: 33885 - RNA, 21 nt, RNAi
uuguauuccucucuaaaccuu

SEQ ID NO: 33886 - DNA, 21 bp, homo sapiens
taaggagagatttggaaggat

SEQ ID NO: 33887 - RNA, 21 nt, RNAi
aggagagauuuggaaggauuu

SEQ ID NO: 33888 - RNA, 21 nt, RNAi
uuuccucucuaaaccuuccua

SEQ ID NO: 33889 - DNA, 21 bp, homo sapiens
tatgttaattccatgctgcag

SEQ ID NO: 33890 - RNA, 21 nt, RNAi
uguuaauuccaugcugcaguu

SEQ ID NO: 33891 - RNA, 21 nt, RNAi
uuacaauuaagguacgacguc

SEQ ID NO: 33892 - DNA, 21 bp, homo sapiens
taattccatgctgcaggaata

SEQ ID NO: 33893 - RNA, 21 nt, RNAi
auuccaugcugcaggaauauu

SEQ ID NO: 33894 - RNA, 21 nt, RNAi
uuuaagguacgacguccuuau

SEQ ID NO: 33895 - DNA, 21 bp, homo sapiens
tacctagtgacatctttggca

SEQ ID NO: 33896 - RNA, 21 nt, RNAi
ccuagugacaucuuuggcauu

SEQ ID NO: 33897 - RNA, 21 nt, RNAi
uuggaucacuguagaaaccgu

SEQ ID NO: 33898 - DNA, 21 bp, homo sapiens
tagtgacatctttggcatcaa

SEQ ID NO: 33899 - RNA, 21 nt, RNAi
gugacaucuuuggcaucaauu

SEQ ID NO: 33900 - RNA, 21 nt, RNAi
uucacuguagaaaccguaguu

SEQ ID NO: 33901 - DNA, 21 bp, homo sapiens
tacacaagcaaatgaacttgt

SEQ ID NO: 33902 - RNA, 21 nt, RNAi
cacaagcaaaugaacuuguuu

SEQ ID NO: 33903 - RNA, 21 nt, RNAi
uuguguucguuuacuugaaca

SEQ ID NO: 33904 - DNA, 21 bp, homo sapiens
taaacctaactgagttctttg

SEQ ID NO: 33905 - RNA, 21 nt, RNAi
aaccuaacugaguucuuuguu

SEQ ID NO: 33906 - RNA, 21 nt, RNAi
uuuuggauugacucaagaaac

SEQ ID NO: 33907 - DNA, 21 bp, homo sapiens
taactgagttctttgtgaatc

SEQ ID NO: 33908 - RNA, 21 nt, RNAi
acugaguucuuugugaaucuu

SEQ ID NO: 33909 - RNA, 21 nt, RNAi
uuugacucaagaaacacuuag

SEQ ID NO: 33910 - DNA, 21 bp, homo sapiens
taaagctgacggtatcaaata

SEQ ID NO: 33911 - RNA, 21 nt, RNAi
aagcugacgguaucaaauauu

SEQ ID NO: 33912 - RNA, 21 nt, RNAi
uuuucgacugccauaguuuau

SEQ ID NO: 33913 - DNA, 21 bp, homo sapiens
tagtctcgattcctctcttga

SEQ ID NO: 33914 - RNA, 21 nt, RNAi
gucucgauuccucucuugauu

SEQ ID NO: 33915 - RNA, 21 nt, RNAi
uucagagcuaaggagagaacu

SEQ ID NO: 33916 - DNA, 21 bp, homo sapiens
taatcatcttcaagctggaag

SEQ ID NO: 33917 - RNA, 21 nt, RNAi
aucaucuucaagcuggaaguu

SEQ ID NO: 33918 - RNA, 21 nt, RNAi
uuuaguagaaguucgaccuuc

SEQ ID NO: 33919 - DNA, 21 bp, homo sapiens
tattgttgttcatacttacgc

SEQ ID NO: 33920 - RNA, 21 nt, RNAi
uuguuguucauacuuacgcuu

SEQ ID NO: 33921 - RNA, 21 nt, RNAi
uuaacaacaaguaugaaugcg

SEQ ID NO: 33922 - DNA, 21 bp, homo sapiens
tacttacgcagctcatgctct

SEQ ID NO: 33923 - RNA, 21 nt, RNAi
cuuacgcagcucaugcucuuu

SEQ ID NO: 33924 - RNA, 21 nt, RNAi
uugaaugcgucgaguacgaga

SEQ ID NO: 33925 - DNA, 21 bp, homo sapiens
tacgcagctcatgctcttgaa

SEQ ID NO: 33926 - RNA, 21 nt, RNAi
cgcagcucaugcucuugaauu

SEQ ID NO: 33927 - RNA, 21 nt, RNAi
uugcgucgaguacgagaacuu

SEQ ID NO: 33928 - DNA, 21 bp, homo sapiens
taacaatgccactctctttac

SEQ ID NO: 33929 - RNA, 21 nt, RNAi
acaaugccacucucuuuacuu

SEQ ID NO: 33930 - RNA, 21 nt, RNAi
uuuguuacggugagagaaaug

SEQ ID NO: 33931 - DNA, 21 bp, homo sapiens
tacagctgcagaaatcgcacc

SEQ ID NO: 33932 - RNA, 21 nt, RNAi
cagcugcagaaaucgcaccuu

SEQ ID NO: 33933 - RNA, 21 nt, RNAi
uugucgacgucuuuagcgugg

SEQ ID NO: 33934 - DNA, 21 bp, homo sapiens
tatgaaagctatcatgagaag

SEQ ID NO: 33935 - RNA, 21 nt, RNAi
ugaaagcuaucaugagaaguu

SEQ ID NO: 33936 - RNA, 21 nt, RNAi
uuacuuucgauaguacucuuc

SEQ ID NO: 33937 - DNA, 21 bp, homo sapiens
tactctcatcactcagcttac

SEQ ID NO: 33938 - RNA, 21 nt, RNAi
cucucaucacucagcuuacuu

SEQ ID NO: 33939 - RNA, 21 nt, RNAi
uugagaguagugagucgaaug

SEQ ID NO: 33940 - DNA, 21 bp, homo sapiens
tacacagaagctattagctgt

SEQ ID NO: 33941 - RNA, 21 nt, RNAi
cacagaagcuauuagcuguuu

SEQ ID NO: 33942 - RNA, 21 nt, RNAi
uugugucuucgauaaucgaca

SEQ ID NO: 33943 - DNA, 21 bp, homo sapiens
tattagctgttagtaagaacc

SEQ ID NO: 33944 - RNA, 21 nt, RNAi
uuagcuguuaguaagaaccuu

SEQ ID NO: 33945 - RNA, 21 nt, RNAi
uuaaucgacaaucauucuugg

SEQ ID NO: 33946 - DNA, 21 bp, homo sapiens
taatcactacatgtttgaagc

SEQ ID NO: 33947 - RNA, 21 nt, RNAi
aucacuacauguuugaagcuu

SEQ ID NO: 33948 - RNA, 21 nt, RNAi
uuuagugauguacaaacuucg

SEQ ID NO: 33949 - DNA, 21 bp, homo sapiens
tattccatacgtctttcaagt

SEQ ID NO: 33950 - RNA, 21 nt, RNAi
uuccauacgucuuucaaguuu

SEQ ID NO: 33951 - RNA, 21 nt, RNAi
uuaagguaugcagaaaguuca

SEQ ID NO: 33952 - DNA, 21 bp, homo sapiens
tacgtctttcaagtgatgtct

SEQ ID NO: 33953 - RNA, 21 nt, RNAi
cgucuuucaagugaugucuuu

SEQ ID NO: 33954 - RNA, 21 nt, RNAi
uugcagaaaguucacuacaga

SEQ ID NO: 33955 - DNA, 21 bp, homo sapiens
tatatggccttatttcctcat

SEQ ID NO: 33956 - RNA, 21 nt, RNAi
uauggccuuauuuccucauuu

SEQ ID NO: 33957 - RNA, 21 nt, RNAi
uuauaccggaauaaaggagua

SEQ ID NO: 33958 - DNA, 21 bp, homo sapiens
tatggccttatttcctcatct

SEQ ID NO: 33959 - RNA, 21 nt, RNAi
uggccuuauuuccucaucuuu

SEQ ID NO: 33960 - RNA, 21 nt, RNAi
uuaccggaauaaaggaguaga

SEQ ID NO: 33961 - DNA, 21 bp, homo sapiens
tatttcctcatctccttcagc

SEQ ID NO: 33962 - RNA, 21 nt, RNAi
uuuccucaucuccuucagcuu

SEQ ID NO: 33963 - RNA, 21 nt, RNAi
uuaaaggaguagaggaagucg

SEQ ID NO: 33964 - DNA, 21 bp, homo sapiens
tattcctgctctagtgaggct

SEQ ID NO: 33965 - RNA, 21 nt, RNAi
uuccugcucuagugaggcuuu

SEQ ID NO: 33966 - RNA, 21 nt, RNAi
uuaaggacgagaucacuccga

SEQ ID NO: 33967 - DNA, 21 bp, homo sapiens
tagtgaggcttcttcaagcat

SEQ ID NO: 33968 - RNA, 21 nt, RNAi
gugaggcuucuucaagcauuu

SEQ ID NO: 33969 - RNA, 21 nt, RNAi
uucacuccgaagaaguucgua

SEQ ID NO: 33970 - DNA, 21 bp, homo sapiens
tagaacgcggttcaaacacaa

SEQ ID NO: 33971 - RNA, 21 nt, RNAi
gaacgcgguucaaacacaauu

SEQ ID NO: 33972 - RNA, 21 nt, RNAi
uucuugcgccaaguuuguguu

SEQ ID NO: 33973 - DNA, 21 bp, homo sapiens
tagcaagtgctgcagctgaca

SEQ ID NO: 33974 - RNA, 21 nt, RNAi
gcaagugcugcagcugacauu

SEQ ID NO: 33975 - RNA, 21 nt, RNAi
uucguucacgacgucgacugu

SEQ ID NO: 33976 - DNA, 21 bp, homo sapiens
tactaggtgtctttcagaagc

SEQ ID NO: 33977 - RNA, 21 nt, RNAi
cuaggugucuuucagaagcuu

SEQ ID NO: 33978 - RNA, 21 nt, RNAi
uugauccacagaaagucuucg

SEQ ID NO: 33979 - DNA, 21 bp, homo sapiens
taggtgtctttcagaagctga

SEQ ID NO: 33980 - RNA, 21 nt, RNAi
ggugucuuucagaagcugauu

SEQ ID NO: 33981 - RNA, 21 nt, RNAi
uuccacagaaagucuucgacu

SEQ ID NO: 33982 - DNA, 21 bp, homo sapiens
tataatagagcacatgcctcc

SEQ ID NO: 33983 - RNA, 21 nt, RNAi
uaauagagcacaugccuccuu

SEQ ID NO: 33984 - RNA, 21 nt, RNAi
uuauuaucucguguacggagg

SEQ ID NO: 33985 - DNA, 21 bp, homo sapiens
taatagagcacatgcctcctg

SEQ ID NO: 33986 - RNA, 21 nt, RNAi
auagagcacaugccuccuguu

SEQ ID NO: 33987 - RNA, 21 nt, RNAi
uuuaucucguguacggaggac

SEQ ID NO: 33988 - DNA, 21 bp, homo sapiens
tagagcacatgcctcctgaat

SEQ ID NO: 33989 - RNA, 21 nt, RNAi
gagcacaugccuccugaauuu

SEQ ID NO: 33990 - RNA, 21 nt, RNAi
uucucguguacggaggacuua

SEQ ID NO: 33991 - DNA, 21 bp, homo sapiens
tattccagagacttcagaatt

SEQ ID NO: 33992 - RNA, 21 nt, RNAi
uuccagagacuucagaauuuu

SEQ ID NO: 33993 - RNA, 21 nt, RNAi
uuaaggucucugaagucuuaa

SEQ ID NO: 33994 - DNA, 21 bp, homo sapiens
tattcctgaaattcagaaggt

SEQ ID NO: 33995 - RNA, 21 nt, RNAi
uuccugaaauucagaagguuu

SEQ ID NO: 33996 - RNA, 21 nt, RNAi
uuaaggacuuuaagucuucca

SEQ ID NO: 33997 - DNA, 21 bp, homo sapiens
tataccaaactgtggactcca

SEQ ID NO: 33998 - RNA, 21 nt, RNAi
uaccaaacuguggacuccauu

SEQ ID NO: 33999 - RNA, 21 nt, RNAi
uuaugguuugacaccugaggu

SEQ ID NO: 34000 - DNA, 21 bp, homo sapiens
taccaaactgtggactccatt

SEQ ID NO: 34001 - RNA, 21 nt, RNAi
ccaaacuguggacuccauuuu

SEQ ID NO: 34002 - RNA, 21 nt, RNAi
uugguuugacaccugagguaa

SEQ ID NO: 34003 - DNA, 21 bp, homo sapiens
tattacagtctttgattggtc

SEQ ID NO: 34004 - RNA, 21 nt, RNAi
uuacagucuuugauuggucuu

SEQ ID NO: 34005 - RNA, 21 nt, RNAi
uuaaugucagaaacuaaccag

SEQ ID NO: 34006 - DNA, 21 bp, homo sapiens
tacagtctttgattggtcttt

SEQ ID NO: 34007 - RNA, 21 nt, RNAi
cagucuuugauuggucuuuuu

SEQ ID NO: 34008 - RNA, 21 nt, RNAi
uugucagaaacuaaccagaaa

SEQ ID NO: 34009 - DNA, 21 bp, homo sapiens
taccattcctgatgaggaaca

SEQ ID NO: 34010 - RNA, 21 nt, RNAi
ccauuccugaugaggaacauu

SEQ ID NO: 34011 - RNA, 21 nt, RNAi
uugguaaggacuacuccuugu

SEQ ID NO: 34012 - DNA, 21 bp, homo sapiens
tattgacatagaagatacacc

SEQ ID NO: 34013 - RNA, 21 nt, RNAi
uugacauagaagauacaccuu

SEQ ID NO: 34014 - RNA, 21 nt, RNAi
uuaacuguaucuucuaugugg

SEQ ID NO: 34015 - DNA, 21 bp, homo sapiens
tagaagatacaccaggatatc

SEQ ID NO: 34016 - RNA, 21 nt, RNAi
gaagauacaccaggauaucuu

SEQ ID NO: 34017 - RNA, 21 nt, RNAi
uucuucuaugugguccuauag

SEQ ID NO: 34018 - DNA, 21 bp, homo sapiens
tacaccaggatatcagactgc

SEQ ID NO: 34019 - RNA, 21 nt, RNAi
caccaggauaucagacugcuu

SEQ ID NO: 34020 - RNA, 21 nt, RNAi
uugugguccuauagucugacg

SEQ ID NO: 34021 - DNA, 21 bp, homo sapiens
tatcagactgccttctcacag

SEQ ID NO: 34022 - RNA, 21 nt, RNAi
ucagacugccuucucacaguu

SEQ ID NO: 34023 - RNA, 21 nt, RNAi
uuagucugacggaagaguguc

SEQ ID NO: 34024 - DNA, 21 bp, homo sapiens
taggtcaaatggtgaataacc

SEQ ID NO: 34025 - RNA, 21 nt, RNAi
ggucaaauggugaauaaccuu

SEQ ID NO: 34026 - RNA, 21 nt, RNAi
uuccaguuuaccacuuauugg

SEQ ID NO: 34027 - DNA, 21 bp, homo sapiens
taccttcaggcagccagtgtg

SEQ ID NO: 34028 - RNA, 21 nt, RNAi
ccuucaggcagccaguguguu

SEQ ID NO: 34029 - RNA, 21 nt, RNAi
uuggaaguccgucggucacac

SEQ ID NO: 34030 - DNA, 21 bp, homo sapiens
taggaaatcacaggcttctga

SEQ ID NO: 34031 - RNA, 21 nt, RNAi
ggaaaucacaggcuucugauu

SEQ ID NO: 34032 - RNA, 21 nt, RNAi
uuccuuuaguguccgaagacu

SEQ ID NO: 34033 - DNA, 21 bp, homo sapiens
aatcagaattatccactgttg

SEQ ID NO: 34034 - RNA, 21 nt, RNAi
ucagaauuauccacuguuguu

SEQ ID NO: 34035 - RNA, 21 nt, RNAi
uuagucuuaauaggugacaac

SEQ ID NO: 34036 - DNA, 21 bp, homo sapiens
aaatttgtgaagccgatcgag

SEQ ID NO: 34037 - RNA, 21 nt, RNAi
auuugugaagccgaucgaguu

SEQ ID NO: 34038 - RNA, 21 nt, RNAi
uuuaaacacuucggcuagcuc

SEQ ID NO: 34039 - DNA, 21 bp, homo sapiens
aatttgtgaagccgatcgagt

SEQ ID NO: 34040 - RNA, 21 nt, RNAi
uuugugaagccgaucgaguuu

SEQ ID NO: 34041 - RNA, 21 nt, RNAi
uuaaacacuucggcuagcuca

SEQ ID NO: 34042 - DNA, 21 bp, homo sapiens
aaagccaacatagtgcacttg

SEQ ID NO: 34043 - RNA, 21 nt, RNAi
agccaacauagugcacuuguu

SEQ ID NO: 34044 - RNA, 21 nt, RNAi
uuucgguuguaucacgugaac

SEQ ID NO: 34045 - DNA, 21 bp, homo sapiens
aagccaacatagtgcacttga

SEQ ID NO: 34046 - RNA, 21 nt, RNAi
gccaacauagugcacuugauu

SEQ ID NO: 34047 - RNA, 21 nt, RNAi
uucgguuguaucacgugaacu

SEQ ID NO: 34048 - DNA, 21 bp, homo sapiens
aagcagttaagtgatgcaatt

SEQ ID NO: 34049 - RNA, 21 nt, RNAi
gcaguuaagugaugcaauuuu

SEQ ID NO: 34050 - RNA, 21 nt, RNAi
uucgucaauucacuacguuaa

SEQ ID NO: 34051 - DNA, 21 bp, homo sapiens
aatcgctttcagagtggagat

SEQ ID NO: 34052 - RNA, 21 nt, RNAi
ucgcuuucagaguggagauuu

SEQ ID NO: 34053 - RNA, 21 nt, RNAi
uuagcgaaagucucaccucua

SEQ ID NO: 34054 - DNA, 21 bp, homo sapiens
aaacgagttatggactgaaat

SEQ ID NO: 34055 - RNA, 21 nt, RNAi
acgaguuauggacugaaauuu

SEQ ID NO: 34056 - RNA, 21 nt, RNAi
uuugcucaauaccugacuuua

SEQ ID NO: 34057 - DNA, 21 bp, homo sapiens
aacgagttatggactgaaatt

SEQ ID NO: 34058 - RNA, 21 nt, RNAi
cgaguuauggacugaaauuuu

SEQ ID NO: 34059 - RNA, 21 nt, RNAi
uugcucaauaccugacuuuaa

SEQ ID NO: 34060 - DNA, 21 bp, homo sapiens
aaggtaatatggaaacttgga

SEQ ID NO: 34061 - RNA, 21 nt, RNAi
gguaauauggaaacuuggauu

SEQ ID NO: 34062 - RNA, 21 nt, RNAi
uuccauuauaccuuugaaccu

SEQ ID NO: 34063 - DNA, 21 bp, homo sapiens
aacacgctgacaagtatctgt

SEQ ID NO: 34064 - RNA, 21 nt, RNAi
cacgcugacaaguaucuguuu

SEQ ID NO: 34065 - RNA, 21 nt, RNAi
uugugcgacuguucauagaca

SEQ ID NO: 34066 - DNA, 21 bp, homo sapiens
aaaggttattgtgcctaacat

SEQ ID NO: 34067 - RNA, 21 nt, RNAi
agguuauugugccuaacauuu

SEQ ID NO: 34068 - RNA, 21 nt, RNAi
uuuccaauaacacggauugua

SEQ ID NO: 34069 - DNA, 21 bp, homo sapiens
aaggttattgtgcctaacatg

SEQ ID NO: 34070 - RNA, 21 nt, RNAi
gguuauugugccuaacauguu

SEQ ID NO: 34071 - RNA, 21 nt, RNAi
uuccaauaacacggauuguac

SEQ ID NO: 34072 - DNA, 21 bp, homo sapiens
aacatggaatttagagctgct

SEQ ID NO: 34073 - RNA, 21 nt, RNAi
cauggaauuuagagcugcuuu

SEQ ID NO: 34074 - RNA, 21 nt, RNAi
uuguaccuuaaaucucgacga

SEQ ID NO: 34075 - DNA, 21 bp, homo sapiens
aagataattctgaggagtaca

SEQ ID NO: 34076 - RNA, 21 nt, RNAi
gauaauucugaggaguacauu

SEQ ID NO: 34077 - RNA, 21 nt, RNAi
uucuauuaagacuccucaugu

SEQ ID NO: 34078 - DNA, 21 bp, homo sapiens
aattctgaggagtacataagg

SEQ ID NO: 34079 - RNA, 21 nt, RNAi
uucugaggaguacauaagguu

SEQ ID NO: 34080 - RNA, 21 nt, RNAi
uuaagacuccucauguauucc

SEQ ID NO: 34081 - DNA, 21 bp, homo sapiens
aagatgcagccatctacctag

SEQ ID NO: 34082 - RNA, 21 nt, RNAi
gaugcagccaucuaccuaguu

SEQ ID NO: 34083 - RNA, 21 nt, RNAi
uucuacgucgguagauggauc

SEQ ID NO: 34084 - DNA, 21 bp, homo sapiens
aacttgtaaacctaactgagt

SEQ ID NO: 34085 - RNA, 21 nt, RNAi
cuuguaaaccuaacugaguuu

SEQ ID NO: 34086 - RNA, 21 nt, RNAi
uugaacauuuggauugacuca

SEQ ID NO: 34087 - DNA, 21 bp, homo sapiens
aacggctctttactatgcgag

SEQ ID NO: 34088 - RNA, 21 nt, RNAi
cggcucuuuacuaugcgaguu

SEQ ID NO: 34089 - RNA, 21 nt, RNAi
uugccgagaaaugauacgcuc

SEQ ID NO: 34090 - DNA, 21 bp, homo sapiens
aaatcgcaccgtttgttgaga

SEQ ID NO: 34091 - RNA, 21 nt, RNAi
aucgcaccguuuguugagauu

SEQ ID NO: 34092 - RNA, 21 nt, RNAi
uuuagcguggcaaacaacucu

SEQ ID NO: 34093 - DNA, 21 bp, homo sapiens
aatcgcaccgtttgttgagat

SEQ ID NO: 34094 - RNA, 21 nt, RNAi
ucgcaccguuuguugagauuu

SEQ ID NO: 34095 - RNA, 21 nt, RNAi
uuagcguggcaaacaacucua

SEQ ID NO: 34096 - DNA, 21 bp, homo sapiens
aagctattagctgttagtaag

SEQ ID NO: 34097 - RNA, 21 nt, RNAi
gcuauuagcuguuaguaaguu

SEQ ID NO: 34098 - RNA, 21 nt, RNAi
uucgauaaucgacaaucauuc

SEQ ID NO: 34099 - DNA, 21 bp, homo sapiens
aatcactacatgtttgaagca

SEQ ID NO: 34100 - RNA, 21 nt, RNAi
ucacuacauguuugaagcauu

SEQ ID NO: 34101 - RNA, 21 nt, RNAi
uuagugauguacaaacuucgu

SEQ ID NO: 34102 - DNA, 21 bp, homo sapiens
aagcattcttagaacgcggtt

SEQ ID NO: 34103 - RNA, 21 nt, RNAi
gcauucuuagaacgcgguuuu

SEQ ID NO: 34104 - RNA, 21 nt, RNAi
uucguaagaaucuugcgccaa

SEQ ID NO: 34105 - DNA, 21 bp, homo sapiens
aacgcggttcaaacacaatag

SEQ ID NO: 34106 - RNA, 21 nt, RNAi
cgcgguucaaacacaauaguu

SEQ ID NO: 34107 - RNA, 21 nt, RNAi
uugcgccaaguuuguguuauc

SEQ ID NO: 34108 - DNA, 21 bp, homo sapiens
aagctgattgcatccaaagca

SEQ ID NO: 34109 - RNA, 21 nt, RNAi
gcugauugcauccaaagcauu

SEQ ID NO: 34110 - RNA, 21 nt, RNAi
uucgacuaacguagguuucgu

SEQ ID NO: 34111 - DNA, 21 bp, homo sapiens
aatcagttgaccaatatagga

SEQ ID NO: 34112 - RNA, 21 nt, RNAi
ucaguugaccaauauaggauu

SEQ ID NO: 34113 - RNA, 21 nt, RNAi
uuagucaacugguuauauccu

SEQ ID NO: 34114 - DNA, 21 bp, homo sapiens
aaatcttcattctgctattcc

SEQ ID NO: 34115 - RNA, 21 nt, RNAi
aucuucauucugcuauuccuu

SEQ ID NO: 34116 - RNA, 21 nt, RNAi
uuuagaaguaagacgauaagg

SEQ ID NO: 34117 - DNA, 21 bp, homo sapiens
aatcttcattctgctattcca

SEQ ID NO: 34118 - RNA, 21 nt, RNAi
ucuucauucugcuauuccauu

SEQ ID NO: 34119 - RNA, 21 nt, RNAi
uuagaaguaagacgauaaggu

SEQ ID NO: 34120 - DNA, 21 bp, homo sapiens
aaagatctgtgcggttggcat

SEQ ID NO: 34121 - RNA, 21 nt, RNAi
agaucugugcgguuggcauuu

SEQ ID NO: 34122 - RNA, 21 nt, RNAi
uuucuagacacgccaaccgua

SEQ ID NO: 34123 - DNA, 21 bp, homo sapiens
aagatctgtgcggttggcata

SEQ ID NO: 34124 - RNA, 21 nt, RNAi
gaucugugcgguuggcauauu

SEQ ID NO: 34125 - RNA, 21 nt, RNAi
uucuagacacgccaaccguau

SEQ ID NO: 34126 - DNA, 21 bp, homo sapiens
aaccaacttactaacagaatg

SEQ ID NO: 34127 - RNA, 21 nt, RNAi
ccaacuuacuaacagaauguu

SEQ ID NO: 34128 - RNA, 21 nt, RNAi
uugguugaaugauugucuuac

SEQ ID NO: 34129 - DNA, 21 bp, homo sapiens
cattaaagccaacatagtgca

SEQ ID NO: 34130 - RNA, 21 nt, RNAi
uuaaagccaacauagugcauu

SEQ ID NO: 34131 - RNA, 21 nt, RNAi
uuaauuucgguuguaucacgu

SEQ ID NO: 34132 - DNA, 21 bp, homo sapiens
cagagcaaattcagaagcagt

SEQ ID NO: 34133 - RNA, 21 nt, RNAi
gagcaaauucagaagcaguuu

SEQ ID NO: 34134 - RNA, 21 nt, RNAi
uucucguuuaagucuucguca

SEQ ID NO: 34135 - DNA, 21 bp, homo sapiens
cacagaaatggcctgacttgc

SEQ ID NO: 34136 - RNA, 21 nt, RNAi
cagaaauggccugacuugcuu

SEQ ID NO: 34137 - RNA, 21 nt, RNAi
uugucuuuaccggacugaacg

SEQ ID NO: 34138 - DNA, 21 bp, homo sapiens
cagaaatggcctgacttgctg

SEQ ID NO: 34139 - RNA, 21 nt, RNAi
gaaauggccugacuugcuguu

SEQ ID NO: 34140 - RNA, 21 nt, RNAi
uucuuuaccggacugaacgac

SEQ ID NO: 34141 - DNA, 21 bp, homo sapiens
cagaaatggtgaatcgctttc

SEQ ID NO: 34142 - RNA, 21 nt, RNAi
gaaauggugaaucgcuuucuu

SEQ ID NO: 34143 - RNA, 21 nt, RNAi
uucuuuaccacuuagcgaaag

SEQ ID NO: 34144 - DNA, 21 bp, homo sapiens
caaacgagttatggactgaaa

SEQ ID NO: 34145 - RNA, 21 nt, RNAi
aacgaguuauggacugaaauu

SEQ ID NO: 34146 - RNA, 21 nt, RNAi
uuuugcucaauaccugacuuu

SEQ ID NO: 34147 - DNA, 21 bp, homo sapiens
cagaacacgctgacaagtatc

SEQ ID NO: 34148 - RNA, 21 nt, RNAi
gaacacgcugacaaguaucuu

SEQ ID NO: 34149 - RNA, 21 nt, RNAi
uucuugugcgacuguucauag

SEQ ID NO: 34150 - DNA, 21 bp, homo sapiens
cagccatctacctagtgacat

SEQ ID NO: 34151 - RNA, 21 nt, RNAi
gccaucuaccuagugacauuu

SEQ ID NO: 34152 - RNA, 21 nt, RNAi
uucgguagauggaucacugua

SEQ ID NO: 34153 - DNA, 21 bp, homo sapiens
catacttacgcagctcatgct

SEQ ID NO: 34154 - RNA, 21 nt, RNAi
uacuuacgcagcucaugcuuu

SEQ ID NO: 34155 - RNA, 21 nt, RNAi
uuaugaaugcgucgaguacga

SEQ ID NO: 34156 - DNA, 21 bp, homo sapiens
catgctcttgaacggctcttt

SEQ ID NO: 34157 - RNA, 21 nt, RNAi
ugcucuugaacggcucuuuuu

SEQ ID NO: 34158 - RNA, 21 nt, RNAi
uuacgagaacuugccgagaaa

SEQ ID NO: 34159 - DNA, 21 bp, homo sapiens
catcactcagcttacacagaa

SEQ ID NO: 34160 - RNA, 21 nt, RNAi
ucacucagcuuacacagaauu

SEQ ID NO: 34161 - RNA, 21 nt, RNAi
uuagugagucgaaugugucuu

SEQ ID NO: 34162 - DNA, 21 bp, homo sapiens
caagcattcttagaacgcggt

SEQ ID NO: 34163 - RNA, 21 nt, RNAi
agcauucuuagaacgcgguuu

SEQ ID NO: 34164 - RNA, 21 nt, RNAi
uuucguaagaaucuugcgcca

SEQ ID NO: 34165 - DNA, 21 bp, homo sapiens
cattcttagaacgcggttcaa

SEQ ID NO: 34166 - RNA, 21 nt, RNAi
uucuuagaacgcgguucaauu

SEQ ID NO: 34167 - RNA, 21 nt, RNAi
uuaagaaucuugcgccaaguu

SEQ ID NO: 34168 - DNA, 21 bp, homo sapiens
cagaagctgattgcatccaaa

SEQ ID NO: 34169 - RNA, 21 nt, RNAi
gaagcugauugcauccaaauu

SEQ ID NO: 34170 - RNA, 21 nt, RNAi
uucuucgacuaacguagguuu

SEQ ID NO: 34171 - DNA, 21 bp, homo sapiens
cagttgaccaatataggaaac

SEQ ID NO: 34172 - RNA, 21 nt, RNAi
guugaccaauauaggaaacuu

SEQ ID NO: 34173 - RNA, 21 nt, RNAi
uucaacugguuauauccuuug

SEQ ID NO: 34174 - DNA, 21 bp, homo sapiens
cattctgctattccagagact

SEQ ID NO: 34175 - RNA, 21 nt, RNAi
uucugcuauuccagagacuuu

SEQ ID NO: 34176 - RNA, 21 nt, RNAi
uuaagacgauaaggucucuga

SEQ ID NO: 34177 - DNA, 21 bp, homo sapiens
caccaggatatcagactgcct

SEQ ID NO: 34178 - RNA, 21 nt, RNAi
ccaggauaucagacugccuuu

SEQ ID NO: 34179 - RNA, 21 nt, RNAi
uugguccuauagucugacgga

SEQ ID NO: 34180 - DNA, 21 bp, homo sapiens
caggatatcagactgccttct

SEQ ID NO: 34181 - RNA, 21 nt, RNAi
ggauaucagacugccuucuuu

SEQ ID NO: 34182 - RNA, 21 nt, RNAi
uuccuauagucugacggaaga

SEQ ID NO: 34183 - DNA, 21 bp, homo sapiens
catgatcctgtaggtcaaatg

SEQ ID NO: 34184 - RNA, 21 nt, RNAi
ugauccuguaggucaaauguu

SEQ ID NO: 34185 - RNA, 21 nt, RNAi
uuacuaggacauccaguuuac

SEQ ID NO: 34186 - DNA, 21 bp, homo sapiens
cacatgttgtctaccgcctgt

SEQ ID NO: 34187 - RNA, 21 nt, RNAi
cauguugucuaccgccuguuu

SEQ ID NO: 34188 - RNA, 21 nt, RNAi
uuguacaacagauggcggaca

SEQ ID NO: 34189 - DNA, 21 bp, homo sapiens
gacgtccagctgagaaatttc

SEQ ID NO: 34190 - RNA, 21 nt, RNAi
cguccagcugagaaauuucuu

SEQ ID NO: 34191 - RNA, 21 nt, RNAi
uugcaggucgacucuuuaaag

SEQ ID NO: 34192 - DNA, 21 bp, homo sapiens
gatcgagtggccattaaagcc

SEQ ID NO: 34193 - RNA, 21 nt, RNAi
ucgaguggccauuaaagccuu

SEQ ID NO: 34194 - RNA, 21 nt, RNAi
uuagcucaccgguaauuucgg

SEQ ID NO: 34195 - DNA, 21 bp, homo sapiens
gagtggccattaaagccaaca

SEQ ID NO: 34196 - RNA, 21 nt, RNAi
guggccauuaaagccaacauu

SEQ ID NO: 34197 - RNA, 21 nt, RNAi
uucaccgguaauuucgguugu

SEQ ID NO: 34198 - DNA, 21 bp, homo sapiens
gaagcagttaagtgatgcaat

SEQ ID NO: 34199 - RNA, 21 nt, RNAi
agcaguuaagugaugcaauuu

SEQ ID NO: 34200 - RNA, 21 nt, RNAi
uuucgucaauucacuacguua

SEQ ID NO: 34201 - DNA, 21 bp, homo sapiens
gaaatggcctgacttgctgac

SEQ ID NO: 34202 - RNA, 21 nt, RNAi
aauggccugacuugcugacuu

SEQ ID NO: 34203 - RNA, 21 nt, RNAi
uuuuaccggacugaacgacug

SEQ ID NO: 34204 - DNA, 21 bp, homo sapiens
gacttgctgacagaaatggtg

SEQ ID NO: 34205 - RNA, 21 nt, RNAi
cuugcugacagaaaugguguu

SEQ ID NO: 34206 - RNA, 21 nt, RNAi
uugaacgacugucuuuaccac

SEQ ID NO: 34207 - DNA, 21 bp, homo sapiens
gaaatggtgaatcgctttcag

SEQ ID NO: 34208 - RNA, 21 nt, RNAi
aauggugaaucgcuuucaguu

SEQ ID NO: 34209 - RNA, 21 nt, RNAi
uuuuaccacuuagcgaaaguc

SEQ ID NO: 34210 - DNA, 21 bp, homo sapiens
gaatcgctttcagagtggaga

SEQ ID NO: 34211 - RNA, 21 nt, RNAi
aucgcuuucagaguggagauu

SEQ ID NO: 34212 - RNA, 21 nt, RNAi
uuuagcgaaagucucaccucu

SEQ ID NO: 34213 - DNA, 21 bp, homo sapiens
gagtcctccgtacagcacatt

SEQ ID NO: 34214 - RNA, 21 nt, RNAi
guccuccguacagcacauuuu

SEQ ID NO: 34215 - RNA, 21 nt, RNAi
uucaggaggcaugucguguaa

SEQ ID NO: 34216 - DNA, 21 bp, homo sapiens
gaaggtaatatggaaacttgg

SEQ ID NO: 34217 - RNA, 21 nt, RNAi
agguaauauggaaacuugguu

SEQ ID NO: 34218 - RNA, 21 nt, RNAi
uuuccauuauaccuuugaacc

SEQ ID NO: 34219 - DNA, 21 bp, homo sapiens
gaccagaacacgctgacaagt

SEQ ID NO: 34220 - RNA, 21 nt, RNAi
ccagaacacgcugacaaguuu

SEQ ID NO: 34221 - RNA, 21 nt, RNAi
uuggucuugugcgacuguuca

SEQ ID NO: 34222 - DNA, 21 bp, homo sapiens
gaacacgctgacaagtatctg

SEQ ID NO: 34223 - RNA, 21 nt, RNAi
acacgcugacaaguaucuguu

SEQ ID NO: 34224 - RNA, 21 nt, RNAi
uuugugcgacuguucauagac

SEQ ID NO: 34225 - DNA, 21 bp, homo sapiens
gaagataattctgaggagtac

SEQ ID NO: 34226 - RNA, 21 nt, RNAi
agauaauucugaggaguacuu

SEQ ID NO: 34227 - RNA, 21 nt, RNAi
uuucuauuaagacuccucaug

SEQ ID NO: 34228 - DNA, 21 bp, homo sapiens
gaggagtacataaggagagat

SEQ ID NO: 34229 - RNA, 21 nt, RNAi
ggaguacauaaggagagauuu

SEQ ID NO: 34230 - RNA, 21 nt, RNAi
uuccucauguauuccucucua

SEQ ID NO: 34231 - DNA, 21 bp, homo sapiens
gagtacataaggagagatttg

SEQ ID NO: 34232 - RNA, 21 nt, RNAi
guacauaaggagagauuuguu

SEQ ID NO: 34233 - RNA, 21 nt, RNAi
uucauguauuccucucuaaac

SEQ ID NO: 34234 - DNA, 21 bp, homo sapiens
gatattgatactagacgcagg

SEQ ID NO: 34235 - RNA, 21 nt, RNAi
uauugauacuagacgcagguu

SEQ ID NO: 34236 - RNA, 21 nt, RNAi
uuauaacuaugaucugcgucc

SEQ ID NO: 34237 - DNA, 21 bp, homo sapiens
gatctggtacgaggattatgc

SEQ ID NO: 34238 - RNA, 21 nt, RNAi
ucugguacgaggauuaugcuu

SEQ ID NO: 34239 - RNA, 21 nt, RNAi
uuagaccaugcuccuaauacg

SEQ ID NO: 34240 - DNA, 21 bp, homo sapiens
gatgcagccatctacctagtg

SEQ ID NO: 34241 - RNA, 21 nt, RNAi
ugcagccaucuaccuaguguu

SEQ ID NO: 34242 - RNA, 21 nt, RNAi
uuacgucgguagauggaucac

SEQ ID NO: 34243 - DNA, 21 bp, homo sapiens
gaacttgtaaacctaactgag

SEQ ID NO: 34244 - RNA, 21 nt, RNAi
acuuguaaaccuaacugaguu

SEQ ID NO: 34245 - RNA, 21 nt, RNAi
uuugaacauuuggauugacuc

SEQ ID NO: 34246 - DNA, 21 bp, homo sapiens
gaacggctctttactatgcga

SEQ ID NO: 34247 - RNA, 21 nt, RNAi
acggcucuuuacuaugcgauu

SEQ ID NO: 34248 - RNA, 21 nt, RNAi
uuugccgagaaaugauacgcu

SEQ ID NO: 34249 - DNA, 21 bp, homo sapiens
gaaatcgcaccgtttgttgag

SEQ ID NO: 34250 - RNA, 21 nt, RNAi
aaucgcaccguuuguugaguu

SEQ ID NO: 34251 - RNA, 21 nt, RNAi
uuuuagcguggcaaacaacuc

SEQ ID NO: 34252 - DNA, 21 bp, homo sapiens
gagattctgctaacaaacctt

SEQ ID NO: 34253 - RNA, 21 nt, RNAi
gauucugcuaacaaaccuuuu

SEQ ID NO: 34254 - RNA, 21 nt, RNAi
uucuaagacgauuguuuggaa

SEQ ID NO: 34255 - DNA, 21 bp, homo sapiens
gaacgcggttcaaacacaata

SEQ ID NO: 34256 - RNA, 21 nt, RNAi
acgcgguucaaacacaauauu

SEQ ID NO: 34257 - RNA, 21 nt, RNAi
uuugcgccaaguuuguguuau

SEQ ID NO: 34258 - DNA, 21 bp, homo sapiens
gaagctgattgcatccaaagc

SEQ ID NO: 34259 - RNA, 21 nt, RNAi
agcugauugcauccaaagcuu

SEQ ID NO: 34260 - RNA, 21 nt, RNAi
uuucgacuaacguagguuucg

SEQ ID NO: 34261 - DNA, 21 bp, homo sapiens
gaatcagttgaccaatatagg

SEQ ID NO: 34262 - RNA, 21 nt, RNAi
aucaguugaccaauauagguu

SEQ ID NO: 34263 - RNA, 21 nt, RNAi
uuuagucaacugguuauaucc

SEQ ID NO: 34264 - DNA, 21 bp, homo sapiens
gaaggtatctggaaatgtaga

SEQ ID NO: 34265 - RNA, 21 nt, RNAi
agguaucuggaaauguagauu

SEQ ID NO: 34266 - RNA, 21 nt, RNAi
uuuccauagaccuuuacaucu

SEQ ID NO: 34267 - DNA, 21 bp, homo sapiens
gatctgtgcggttggcataac

SEQ ID NO: 34268 - RNA, 21 nt, RNAi
ucugugcgguuggcauaacuu

SEQ ID NO: 34269 - RNA, 21 nt, RNAi
uuagacacgccaaccguauug

SEQ ID NO: 34270 - DNA, 21 bp, homo sapiens
gatggacactgagtataccaa

SEQ ID NO: 34271 - RNA, 21 nt, RNAi
uggacacugaguauaccaauu

SEQ ID NO: 34272 - RNA, 21 nt, RNAi
uuaccugugacucauaugguu

SEQ ID NO: 34273 - DNA, 21 bp, homo sapiens
gagtataccaaactgtggact

SEQ ID NO: 34274 - RNA, 21 nt, RNAi
guauaccaaacuguggacuuu

SEQ ID NO: 34275 - RNA, 21 nt, RNAi
uucauaugguuugacaccuga

SEQ ID NO: 34276 - DNA, 21 bp, homo sapiens
gacatagaagatacaccagga

SEQ ID NO: 34277 - RNA, 21 nt, RNAi
cauagaagauacaccaggauu

SEQ ID NO: 34278 - RNA, 21 nt, RNAi
uuguaucuucuaugugguccu

SEQ ID NO: 34279 - DNA, 21 bp, homo sapiens
gatatcagactgccttctcac

SEQ ID NO: 34280 - RNA, 21 nt, RNAi
uaucagacugccuucucacuu

SEQ ID NO: 34281 - RNA, 21 nt, RNAi
uuauagucugacggaagagug

SEQ ID NO: 34282 - DNA, 21 bp, homo sapiens
taaagccaacatagtgcactt

SEQ ID NO: 34283 - RNA, 21 nt, RNAi
aagccaacauagugcacuuuu

SEQ ID NO: 34284 - RNA, 21 nt, RNAi
uuuucgguuguaucacgugaa

SEQ ID NO: 34285 - DNA, 21 bp, homo sapiens
tagtgcacttgatgcttagca

SEQ ID NO: 34286 - RNA, 21 nt, RNAi
gugcacuugaugcuuagcauu

SEQ ID NO: 34287 - RNA, 21 nt, RNAi
uucacgugaacuacgaaucgu

SEQ ID NO: 34288 - DNA, 21 bp, homo sapiens
tattaatggagtcctccgtac

SEQ ID NO: 34289 - RNA, 21 nt, RNAi
uuaauggaguccuccguacuu

SEQ ID NO: 34290 - RNA, 21 nt, RNAi
uuaauuaccucaggaggcaug

SEQ ID NO: 34291 - DNA, 21 bp, homo sapiens
tattgtgcctaacatggaatt

SEQ ID NO: 34292 - RNA, 21 nt, RNAi
uugugccuaacauggaauuuu

SEQ ID NO: 34293 - RNA, 21 nt, RNAi
uuaacacggauuguaccuuaa

SEQ ID NO: 34294 - DNA, 21 bp, homo sapiens
taattctgaggagtacataag

SEQ ID NO: 34295 - RNA, 21 nt, RNAi
auucugaggaguacauaaguu

SEQ ID NO: 34296 - RNA, 21 nt, RNAi
uuuaagacuccucauguauuc

SEQ ID NO: 34297 - DNA, 21 bp, homo sapiens
tagtctcgattcctctcttga

SEQ ID NO: 34298 - RNA, 21 nt, RNAi
gucucgauuccucucuugauu

SEQ ID NO: 34299 - RNA, 21 nt, RNAi
uucagagcuaaggagagaacu

SEQ ID NO: 34300 - DNA, 21 bp, homo sapiens
tattgttgttcatacttacgc

SEQ ID NO: 34301 - RNA, 21 nt, RNAi
uuguuguucauacuuacgcuu

SEQ ID NO: 34302 - RNA, 21 nt, RNAi
uuaacaacaaguaugaaugcg

SEQ ID NO: 34303 - DNA, 21 bp, homo sapiens
tacttacgcagctcatgctct

SEQ ID NO: 34304 - RNA, 21 nt, RNAi
cuuacgcagcucaugcucuuu

SEQ ID NO: 34305 - RNA, 21 nt, RNAi
uugaaugcgucgaguacgaga

SEQ ID NO: 34306 - DNA, 21 bp, homo sapiens
tattagctgttagtaagaacc

SEQ ID NO: 34307 - RNA, 21 nt, RNAi
uuagcuguuaguaagaaccuu

SEQ ID NO: 34308 - RNA, 21 nt, RNAi
uuaaucgacaaucauucuugg

SEQ ID NO: 34309 - DNA, 21 bp, homo sapiens
tattccatacgtctttcaagt

SEQ ID NO: 34310 - RNA, 21 nt, RNAi
uuccauacgucuuucaaguuu

SEQ ID NO: 34311 - RNA, 21 nt, RNAi
uuaagguaugcagaaaguuca

SEQ ID NO: 34312 - DNA, 21 bp, homo sapiens
tagaacgcggttcaaacacaa

SEQ ID NO: 34313 - RNA, 21 nt, RNAi
gaacgcgguucaaacacaauu

SEQ ID NO: 34314 - RNA, 21 nt, RNAi
uucuugcgccaaguuuguguu

SEQ ID NO: 34315 - DNA, 21 bp, homo sapiens
taatagagcacatgcctcctg

SEQ ID NO: 34316 - RNA, 21 nt, RNAi
auagagcacaugccuccuguu

SEQ ID NO: 34317 - RNA, 21 nt, RNAi
uuuaucucguguacggaggac

SEQ ID NO: 34318 - DNA, 21 bp, homo sapiens
tataccaaactgtggactcca

SEQ ID NO: 34319 - RNA, 21 nt, RNAi
uaccaaacuguggacuccauu

SEQ ID NO: 34320 - RNA, 21 nt, RNAi
uuaugguuugacaccugaggu

SEQ ID NO: 34321 - DNA, 21 bp, homo sapiens
tacagtctttgattggtcttt

SEQ ID NO: 34322 - RNA, 21 nt, RNAi
cagucuuugauuggucuuuuu

SEQ ID NO: 34323 - RNA, 21 nt, RNAi
uugucagaaacuaaccagaaa

SEQ ID NO: 34324 - DNA, 21 bp, homo sapiens
aacggctgaagttcaccttcc

SEQ ID NO: 34325 - RNA, 21 nt, RNAi
cggcugaaguucaccuuccuu

SEQ ID NO: 34326 - RNA, 21 nt, RNAi
uugccgacuucaaguggaagg

SEQ ID NO: 34327 - DNA, 21 bp, homo sapiens
aaagagaagattgcaactttg

SEQ ID NO: 34328 - RNA, 21 nt, RNAi
agagaagauugcaacuuuguu

SEQ ID NO: 34329 - RNA, 21 nt, RNAi
uuucucuucuaacguugaaac

SEQ ID NO: 34330 - DNA, 21 bp, homo sapiens
aagagaagattgcaactttga

SEQ ID NO: 34331 - RNA, 21 nt, RNAi
gagaagauugcaacuuugauu

SEQ ID NO: 34332 - RNA, 21 nt, RNAi
uucucuucuaacguugaaacu

SEQ ID NO: 34333 - DNA, 21 bp, homo sapiens
aagattgcaactttgagtcag

SEQ ID NO: 34334 - RNA, 21 nt, RNAi
gauugcaacuuugagucaguu

SEQ ID NO: 34335 - RNA, 21 nt, RNAi
uucuaacguugaaacucaguc

SEQ ID NO: 34336 - DNA, 21 bp, homo sapiens
aactttgagtcagacctgtag

SEQ ID NO: 34337 - RNA, 21 nt, RNAi
cuuugagucagaccuguaguu

SEQ ID NO: 34338 - RNA, 21 nt, RNAi
uugaaacucagucuggacauc

SEQ ID NO: 34339 - DNA, 21 bp, homo sapiens
aaaccacagaaggtgacctgc

SEQ ID NO: 34340 - RNA, 21 nt, RNAi
accacagaaggugaccugcuu

SEQ ID NO: 34341 - RNA, 21 nt, RNAi
uuuggugucuuccacuggacg

SEQ ID NO: 34342 - DNA, 21 bp, homo sapiens
aaccacagaaggtgacctgct

SEQ ID NO: 34343 - RNA, 21 nt, RNAi
ccacagaaggugaccugcuuu

SEQ ID NO: 34344 - RNA, 21 nt, RNAi
uuggugucuuccacuggacga

SEQ ID NO: 34345 - DNA, 21 bp, homo sapiens
aaacctgctcttctgcgttaa

SEQ ID NO: 34346 - RNA, 21 nt, RNAi
accugcucuucugcguuaauu

SEQ ID NO: 34347 - RNA, 21 nt, RNAi
uuuggacgagaagacgcaauu

SEQ ID NO: 34348 - DNA, 21 bp, homo sapiens
aacctgctcttctgcgttaag

SEQ ID NO: 34349 - RNA, 21 nt, RNAi
ccugcucuucugcguuaaguu

SEQ ID NO: 34350 - RNA, 21 nt, RNAi
uuggacgagaagacgcaauuc

SEQ ID NO: 34351 - DNA, 21 bp, homo sapiens
aaagctcttattcctatgatg

SEQ ID NO: 34352 - RNA, 21 nt, RNAi
agcucuuauuccuaugauguu

SEQ ID NO: 34353 - RNA, 21 nt, RNAi
uuucgagaauaaggauacuac

SEQ ID NO: 34354 - DNA, 21 bp, homo sapiens
aagctcttattcctatgatgc

SEQ ID NO: 34355 - RNA, 21 nt, RNAi
gcucuuauuccuaugaugcuu

SEQ ID NO: 34356 - RNA, 21 nt, RNAi
uucgagaauaaggauacuacg

SEQ ID NO: 34357 - DNA, 21 bp, homo sapiens
aacatagattcatggtttgag

SEQ ID NO: 34358 - RNA, 21 nt, RNAi
cauagauucaugguuugaguu

SEQ ID NO: 34359 - RNA, 21 nt, RNAi
uuguaucuaaguaccaaacuc

SEQ ID NO: 34360 - DNA, 21 bp, homo sapiens
aaggccaatttggagaataag

SEQ ID NO: 34361 - RNA, 21 nt, RNAi
ggccaauuuggagaauaaguu

SEQ ID NO: 34362 - RNA, 21 nt, RNAi
uuccgguuaaaccucuuauuc

SEQ ID NO: 34363 - DNA, 21 bp, homo sapiens
aaactcctttgagaaaggcta

SEQ ID NO: 34364 - RNA, 21 nt, RNAi
acuccuuugagaaaggcuauu

SEQ ID NO: 34365 - RNA, 21 nt, RNAi
uuugaggaaacucuuuccgau

SEQ ID NO: 34366 - DNA, 21 bp, homo sapiens
aactcctttgagaaaggctaa

SEQ ID NO: 34367 - RNA, 21 nt, RNAi
cuccuuugagaaaggcuaauu

SEQ ID NO: 34368 - RNA, 21 nt, RNAi
uugaggaaacucuuuccgauu

SEQ ID NO: 34369 - DNA, 21 bp, homo sapiens
aaaggctaatcttcagcaagc

SEQ ID NO: 34370 - RNA, 21 nt, RNAi
aggcuaaucuucagcaagcuu

SEQ ID NO: 34371 - RNA, 21 nt, RNAi
uuuccgauuagaagucguucg

SEQ ID NO: 34372 - DNA, 21 bp, homo sapiens
aaggctaatcttcagcaagct

SEQ ID NO: 34373 - RNA, 21 nt, RNAi
ggcuaaucuucagcaagcuuu

SEQ ID NO: 34374 - RNA, 21 nt, RNAi
uuccgauuagaagucguucga

SEQ ID NO: 34375 - DNA, 21 bp, homo sapiens
aatcttcagcaagctattgtc

SEQ ID NO: 34376 - RNA, 21 nt, RNAi
ucuucagcaagcuauugucuu

SEQ ID NO: 34377 - RNA, 21 nt, RNAi
uuagaagucguucgauaacag

SEQ ID NO: 34378 - DNA, 21 bp, homo sapiens
aagctattgtcacacctttga

SEQ ID NO: 34379 - RNA, 21 nt, RNAi
gcuauugucacaccuuugauu

SEQ ID NO: 34380 - RNA, 21 nt, RNAi
uucgauaacaguguggaaacu

SEQ ID NO: 34381 - DNA, 21 bp, homo sapiens
aaaccagttgacaacacttac

SEQ ID NO: 34382 - RNA, 21 nt, RNAi
accaguugacaacacuuacuu

SEQ ID NO: 34383 - RNA, 21 nt, RNAi
uuuggucaacuguugugaaug

SEQ ID NO: 34384 - DNA, 21 bp, homo sapiens
aaccagttgacaacacttact

SEQ ID NO: 34385 - RNA, 21 nt, RNAi
ccaguugacaacacuuacuuu

SEQ ID NO: 34386 - RNA, 21 nt, RNAi
uuggucaacuguugugaauga

SEQ ID NO: 34387 - DNA, 21 bp, homo sapiens
aacacttactacaaagaggca

SEQ ID NO: 34388 - RNA, 21 nt, RNAi
cacuuacuacaaagaggcauu

SEQ ID NO: 34389 - RNA, 21 nt, RNAi
uugugaaugauguuucuccgu

SEQ ID NO: 34390 - DNA, 21 bp, homo sapiens
aaatcttgtggaacaatccat

SEQ ID NO: 34391 - RNA, 21 nt, RNAi
aucuuguggaacaauccauuu

SEQ ID NO: 34392 - RNA, 21 nt, RNAi
uuuagaacaccuuguuaggua

SEQ ID NO: 34393 - DNA, 21 bp, homo sapiens
aatcttgtggaacaatccatt

SEQ ID NO: 34394 - RNA, 21 nt, RNAi
ucuuguggaacaauccauuuu

SEQ ID NO: 34395 - RNA, 21 nt, RNAi
uuagaacaccuuguuagguaa

SEQ ID NO: 34396 - DNA, 21 bp, homo sapiens
aacaatccattccgtcaaatg

SEQ ID NO: 34397 - RNA, 21 nt, RNAi
caauccauuccgucaaauguu

SEQ ID NO: 34398 - RNA, 21 nt, RNAi
uuguuagguaaggcaguuuac

SEQ ID NO: 34399 - DNA, 21 bp, homo sapiens
aatccattccgtcaaatgctt

SEQ ID NO: 34400 - RNA, 21 nt, RNAi
uccauuccgucaaaugcuuuu

SEQ ID NO: 34401 - RNA, 21 nt, RNAi
uuagguaaggcaguuuacgaa

SEQ ID NO: 34402 - DNA, 21 bp, homo sapiens
aagttgaggcagccatatcaa

SEQ ID NO: 34403 - RNA, 21 nt, RNAi
guugaggcagccauaucaauu

SEQ ID NO: 34404 - RNA, 21 nt, RNAi
uucaacuccgucgguauaguu

SEQ ID NO: 34405 - DNA, 21 bp, homo sapiens
aagatctcttaggctttctgc

SEQ ID NO: 34406 - RNA, 21 nt, RNAi
gaucucuuaggcuuucugcuu

SEQ ID NO: 34407 - RNA, 21 nt, RNAi
uucuagagaauccgaaagacg

SEQ ID NO: 34408 - DNA, 21 bp, homo sapiens
aaggatttggaacagaaagaa

SEQ ID NO: 34409 - RNA, 21 nt, RNAi
ggauuuggaacagaaagaauu

SEQ ID NO: 34410 - RNA, 21 nt, RNAi
uuccuaaaccuugucuuucuu

SEQ ID NO: 34411 - DNA, 21 bp, homo sapiens
aaatgaaagccaagagatgtg

SEQ ID NO: 34412 - RNA, 21 nt, RNAi
augaaagccaagagauguguu

SEQ ID NO: 34413 - RNA, 21 nt, RNAi
uuuacuuucgguucucuacac

SEQ ID NO: 34414 - DNA, 21 bp, homo sapiens
aatgaaagccaagagatgtgc

SEQ ID NO: 34415 - RNA, 21 nt, RNAi
ugaaagccaagagaugugcuu

SEQ ID NO: 34416 - RNA, 21 nt, RNAi
uuacuuucgguucucuacacg

SEQ ID NO: 34417 - DNA, 21 bp, homo sapiens
aaagccaagagatgtgccact

SEQ ID NO: 34418 - RNA, 21 nt, RNAi
agccaagagaugugccacuuu

SEQ ID NO: 34419 - RNA, 21 nt, RNAi
uuucgguucucuacacgguga

SEQ ID NO: 34420 - DNA, 21 bp, homo sapiens
aagccaagagatgtgccactc

SEQ ID NO: 34421 - RNA, 21 nt, RNAi
gccaagagaugugccacucuu

SEQ ID NO: 34422 - RNA, 21 nt, RNAi
uucgguucucuacacggugag

SEQ ID NO: 34423 - DNA, 21 bp, homo sapiens
aagagatgtgccactcctgta

SEQ ID NO: 34424 - RNA, 21 nt, RNAi
gagaugugccacuccuguauu

SEQ ID NO: 34425 - RNA, 21 nt, RNAi
uucucuacacggugaggacau

SEQ ID NO: 34426 - DNA, 21 bp, homo sapiens
aatcatcgatgaaattctacc

SEQ ID NO: 34427 - RNA, 21 nt, RNAi
ucaucgaugaaauucuaccuu

SEQ ID NO: 34428 - RNA, 21 nt, RNAi
uuaguagcuacuuuaagaugg

SEQ ID NO: 34429 - DNA, 21 bp, homo sapiens
aaagaagccagaggaagaagg

SEQ ID NO: 34430 - RNA, 21 nt, RNAi
agaagccagaggaagaagguu

SEQ ID NO: 34431 - RNA, 21 nt, RNAi
uuucuucggucuccuucuucc

SEQ ID NO: 34432 - DNA, 21 bp, homo sapiens
aagaagccagaggaagaaggc

SEQ ID NO: 34433 - RNA, 21 nt, RNAi
gaagccagaggaagaaggcuu

SEQ ID NO: 34434 - RNA, 21 nt, RNAi
uucuucggucuccuucuuccg

SEQ ID NO: 34435 - DNA, 21 bp, homo sapiens
aagccagaggaagaaggcagt

SEQ ID NO: 34436 - RNA, 21 nt, RNAi
gccagaggaagaaggcaguuu

SEQ ID NO: 34437 - RNA, 21 nt, RNAi
uucggucuccuucuuccguca

SEQ ID NO: 34438 - DNA, 21 bp, homo sapiens
aagaaggcagtgctcatcaag

SEQ ID NO: 34439 - RNA, 21 nt, RNAi
gaaggcagugcucaucaaguu

SEQ ID NO: 34440 - RNA, 21 nt, RNAi
uucuuccgucacgaguaguuc

SEQ ID NO: 34441 - DNA, 21 bp, homo sapiens
aaggcagtgctcatcaagata

SEQ ID NO: 34442 - RNA, 21 nt, RNAi
ggcagugcucaucaagauauu

SEQ ID NO: 34443 - RNA, 21 nt, RNAi
uuccgucacgaguaguucuau

SEQ ID NO: 34444 - DNA, 21 bp, homo sapiens
aaagtactgaggagcaagagc

SEQ ID NO: 34445 - RNA, 21 nt, RNAi
aguacugaggagcaagagcuu

SEQ ID NO: 34446 - RNA, 21 nt, RNAi
uuucaugacuccucguucucg

SEQ ID NO: 34447 - DNA, 21 bp, homo sapiens
aagtactgaggagcaagagct

SEQ ID NO: 34448 - RNA, 21 nt, RNAi
guacugaggagcaagagcuuu

SEQ ID NO: 34449 - RNA, 21 nt, RNAi
uucaugacuccucguucucga

SEQ ID NO: 34450 - DNA, 21 bp, homo sapiens
aagagctggagaagagtatga

SEQ ID NO: 34451 - RNA, 21 nt, RNAi
gagcuggagaagaguaugauu

SEQ ID NO: 34452 - RNA, 21 nt, RNAi
uucucgaccucuucucauacu

SEQ ID NO: 34453 - DNA, 21 bp, homo sapiens
aaatgcagcaagaggtggtgg

SEQ ID NO: 34454 - RNA, 21 nt, RNAi
augcagcaagagguggugguu

SEQ ID NO: 34455 - RNA, 21 nt, RNAi
uuuacgucguucuccaccacc

SEQ ID NO: 34456 - DNA, 21 bp, homo sapiens
aatgcagcaagaggtggtgga

SEQ ID NO: 34457 - RNA, 21 nt, RNAi
ugcagcaagaggugguggauu

SEQ ID NO: 34458 - RNA, 21 nt, RNAi
uuacgucguucuccaccaccu

SEQ ID NO: 34459 - DNA, 21 bp, homo sapiens
aagaggtggtggagatgcgga

SEQ ID NO: 34460 - RNA, 21 nt, RNAi
gaggugguggagaugcggauu

SEQ ID NO: 34461 - RNA, 21 nt, RNAi
uucuccaccaccucuacgccu

SEQ ID NO: 34462 - DNA, 21 bp, homo sapiens
aagaattcaagaaacttgctc

SEQ ID NO: 34463 - RNA, 21 nt, RNAi
gaauucaagaaacuugcucuu

SEQ ID NO: 34464 - RNA, 21 nt, RNAi
uucuuaaguucuuugaacgag

SEQ ID NO: 34465 - DNA, 21 bp, homo sapiens
aattcaagaaacttgctctgg

SEQ ID NO: 34466 - RNA, 21 nt, RNAi
uucaagaaacuugcucugguu

SEQ ID NO: 34467 - RNA, 21 nt, RNAi
uuaaguucuuugaacgagacc

SEQ ID NO: 34468 - DNA, 21 bp, homo sapiens
aagaaacttgctctggctgga

SEQ ID NO: 34469 - RNA, 21 nt, RNAi
gaaacuugcucuggcuggauu

SEQ ID NO: 34470 - RNA, 21 nt, RNAi
uucuuugaacgagaccgaccu

SEQ ID NO: 34471 - DNA, 21 bp, homo sapiens
aaacttgctctggctggaata

SEQ ID NO: 34472 - RNA, 21 nt, RNAi
acuugcucuggcuggaauauu

SEQ ID NO: 34473 - RNA, 21 nt, RNAi
uuugaacgagaccgaccuuau

SEQ ID NO: 34474 - DNA, 21 bp, homo sapiens
aacttgctctggctggaatag

SEQ ID NO: 34475 - RNA, 21 nt, RNAi
cuugcucuggcuggaauaguu

SEQ ID NO: 34476 - RNA, 21 nt, RNAi
uugaacgagaccgaccuuauc

SEQ ID NO: 34477 - DNA, 21 bp, homo sapiens
aacctgtgaagaaatcagtga

SEQ ID NO: 34478 - RNA, 21 nt, RNAi
ccugugaagaaaucagugauu

SEQ ID NO: 34479 - RNA, 21 nt, RNAi
uuggacacuucuuuagucacu

SEQ ID NO: 34480 - DNA, 21 bp, homo sapiens
aagaaatcagtgagccaggtc

SEQ ID NO: 34481 - RNA, 21 nt, RNAi
gaaaucagugagccaggucuu

SEQ ID NO: 34482 - RNA, 21 nt, RNAi
uucuuuagucacucgguccag

SEQ ID NO: 34483 - DNA, 21 bp, homo sapiens
aaatcagtgagccaggtcacc

SEQ ID NO: 34484 - RNA, 21 nt, RNAi
aucagugagccaggucaccuu

SEQ ID NO: 34485 - RNA, 21 nt, RNAi
uuuagucacucgguccagugg

SEQ ID NO: 34486 - DNA, 21 bp, homo sapiens
aatcagtgagccaggtcacca

SEQ ID NO: 34487 - RNA, 21 nt, RNAi
ucagugagccaggucaccauu

SEQ ID NO: 34488 - RNA, 21 nt, RNAi
uuagucacucgguccaguggu

SEQ ID NO: 34489 - DNA, 21 bp, homo sapiens
aaatcagttgacttccacttc

SEQ ID NO: 34490 - RNA, 21 nt, RNAi
aucaguugacuuccacuucuu

SEQ ID NO: 34491 - RNA, 21 nt, RNAi
uuuagucaacugaaggugaag

SEQ ID NO: 34492 - DNA, 21 bp, homo sapiens
aatcagttgacttccacttcc

SEQ ID NO: 34493 - RNA, 21 nt, RNAi
ucaguugacuuccacuuccuu

SEQ ID NO: 34494 - RNA, 21 nt, RNAi
uuagucaacugaaggugaagg

SEQ ID NO: 34495 - DNA, 21 bp, homo sapiens
aaacaacatcctaagaaccag

SEQ ID NO: 34496 - RNA, 21 nt, RNAi
acaacauccuaagaaccaguu

SEQ ID NO: 34497 - RNA, 21 nt, RNAi
uuuguuguaggauucuugguc

SEQ ID NO: 34498 - DNA, 21 bp, homo sapiens
aacaacatcctaagaaccagg

SEQ ID NO: 34499 - RNA, 21 nt, RNAi
caacauccuaagaaccagguu

SEQ ID NO: 34500 - RNA, 21 nt, RNAi
uuguuguaggauucuuggucc

SEQ ID NO: 34501 - DNA, 21 bp, homo sapiens
aacatcctaagaaccaggagg

SEQ ID NO: 34502 - RNA, 21 nt, RNAi
cauccuaagaaccaggagguu

SEQ ID NO: 34503 - RNA, 21 nt, RNAi
uuguaggauucuugguccucc

SEQ ID NO: 34504 - DNA, 21 bp, homo sapiens
aagaaccaggaggaatataag

SEQ ID NO: 34505 - RNA, 21 nt, RNAi
gaaccaggaggaauauaaguu

SEQ ID NO: 34506 - RNA, 21 nt, RNAi
uucuugguccuccuuauauuc

SEQ ID NO: 34507 - DNA, 21 bp, homo sapiens
aaccaggaggaatataaggaa

SEQ ID NO: 34508 - RNA, 21 nt, RNAi
ccaggaggaauauaaggaauu

SEQ ID NO: 34509 - RNA, 21 nt, RNAi
uugguccuccuuauauuccuu

SEQ ID NO: 34510 - DNA, 21 bp, homo sapiens
aaggaagtgaactttacatct

SEQ ID NO: 34511 - RNA, 21 nt, RNAi
ggaagugaacuuuacaucuuu

SEQ ID NO: 34512 - RNA, 21 nt, RNAi
uuccuucacuugaaauguaga

SEQ ID NO: 34513 - DNA, 21 bp, homo sapiens
aagtgaactttacatctgaac

SEQ ID NO: 34514 - RNA, 21 nt, RNAi
gugaacuuuacaucugaacuu

SEQ ID NO: 34515 - RNA, 21 nt, RNAi
uucacuugaaauguagacuug

SEQ ID NO: 34516 - DNA, 21 bp, homo sapiens
aactttacatctgaactacga

SEQ ID NO: 34517 - RNA, 21 nt, RNAi
cuuuacaucugaacuacgauu

SEQ ID NO: 34518 - RNA, 21 nt, RNAi
uugaaauguagacuugaugcu

SEQ ID NO: 34519 - DNA, 21 bp, homo sapiens
aactacgaaagcatccttcat

SEQ ID NO: 34520 - RNA, 21 nt, RNAi
cuacgaaagcauccuucauuu

SEQ ID NO: 34521 - RNA, 21 nt, RNAi
uugaugcuuucguaggaagua

SEQ ID NO: 34522 - DNA, 21 bp, homo sapiens
aaagcatccttcatctcctgc

SEQ ID NO: 34523 - RNA, 21 nt, RNAi
agcauccuucaucuccugcuu

SEQ ID NO: 34524 - RNA, 21 nt, RNAi
uuucguaggaaguagaggacg

SEQ ID NO: 34525 - DNA, 21 bp, homo sapiens
aagcatccttcatctcctgcc

SEQ ID NO: 34526 - RNA, 21 nt, RNAi
gcauccuucaucuccugccuu

SEQ ID NO: 34527 - RNA, 21 nt, RNAi
uucguaggaaguagaggacgg

SEQ ID NO: 34528 - DNA, 21 bp, homo sapiens
aaacagtttctacatatgtgc

SEQ ID NO: 34529 - RNA, 21 nt, RNAi
acaguuucuacauaugugcuu

SEQ ID NO: 34530 - RNA, 21 nt, RNAi
uuugucaaagauguauacacg

SEQ ID NO: 34531 - DNA, 21 bp, homo sapiens
aacagtttctacatatgtgcc

SEQ ID NO: 34532 - RNA, 21 nt, RNAi
caguuucuacauaugugccuu

SEQ ID NO: 34533 - RNA, 21 nt, RNAi
uugucaaagauguauacacgg

SEQ ID NO: 34534 - DNA, 21 bp, homo sapiens
aagttgaagacttccataaac

SEQ ID NO: 34535 - RNA, 21 nt, RNAi
guugaagacuuccauaaacuu

SEQ ID NO: 34536 - RNA, 21 nt, RNAi
uucaacuucugaagguauuug

SEQ ID NO: 34537 - DNA, 21 bp, homo sapiens
aacagatatcatttgaggagc

SEQ ID NO: 34538 - RNA, 21 nt, RNAi
cagauaucauuugaggagcuu

SEQ ID NO: 34539 - RNA, 21 nt, RNAi
uugucuauaguaaacuccucg

SEQ ID NO: 34540 - DNA, 21 bp, homo sapiens
aagaaggatgatattaacctg

SEQ ID NO: 34541 - RNA, 21 nt, RNAi
gaaggaugauauuaaccuguu

SEQ ID NO: 34542 - RNA, 21 nt, RNAi
uucuuccuacuauaauuggac

SEQ ID NO: 34543 - DNA, 21 bp, homo sapiens
aaatcttctgtgaccaagatt

SEQ ID NO: 34544 - RNA, 21 nt, RNAi
aucuucugugaccaagauuuu

SEQ ID NO: 34545 - RNA, 21 nt, RNAi
uuuagaagacacugguucuaa

SEQ ID NO: 34546 - DNA, 21 bp, homo sapiens
aatcttctgtgaccaagattt

SEQ ID NO: 34547 - RNA, 21 nt, RNAi
ucuucugugaccaagauuuuu

SEQ ID NO: 34548 - RNA, 21 nt, RNAi
uuagaagacacugguucuaaa

SEQ ID NO: 34549 - DNA, 21 bp, homo sapiens
aaagtacagcagagctggagg

SEQ ID NO: 34550 - RNA, 21 nt, RNAi
aguacagcagagcuggagguu

SEQ ID NO: 34551 - RNA, 21 nt, RNAi
uuucaugucgucucgaccucc

SEQ ID NO: 34552 - DNA, 21 bp, homo sapiens
aagtacagcagagctggaggc

SEQ ID NO: 34553 - RNA, 21 nt, RNAi
guacagcagagcuggaggcuu

SEQ ID NO: 34554 - RNA, 21 nt, RNAi
uucaugucgucucgaccuccg

SEQ ID NO: 34555 - DNA, 21 bp, homo sapiens
aatacaaattcaaagcacgtg

SEQ ID NO: 34556 - RNA, 21 nt, RNAi
uacaaauucaaagcacguguu

SEQ ID NO: 34557 - RNA, 21 nt, RNAi
uuauguuuaaguuucgugcac

SEQ ID NO: 34558 - DNA, 21 bp, homo sapiens
aaattcaaagcacgtgaactt

SEQ ID NO: 34559 - RNA, 21 nt, RNAi
auucaaagcacgugaacuuuu

SEQ ID NO: 34560 - RNA, 21 nt, RNAi
uuuaaguuucgugcacuugaa

SEQ ID NO: 34561 - DNA, 21 bp, homo sapiens
aattcaaagcacgtgaacttg

SEQ ID NO: 34562 - RNA, 21 nt, RNAi
uucaaagcacgugaacuuguu

SEQ ID NO: 34563 - RNA, 21 nt, RNAi
uuaaguuucgugcacuugaac

SEQ ID NO: 34564 - DNA, 21 bp, homo sapiens
aagaaaccacctgtgaaacca

SEQ ID NO: 34565 - RNA, 21 nt, RNAi
gaaaccaccugugaaaccauu

SEQ ID NO: 34566 - RNA, 21 nt, RNAi
uucuuugguggacacuuuggu

SEQ ID NO: 34567 - DNA, 21 bp, homo sapiens
aaagaatccaggagcgagaat

SEQ ID NO: 34568 - RNA, 21 nt, RNAi
agaauccaggagcgagaauuu

SEQ ID NO: 34569 - RNA, 21 nt, RNAi
uuucuuagguccucgcucuua

SEQ ID NO: 34570 - DNA, 21 bp, homo sapiens
aagaatccaggagcgagaatc

SEQ ID NO: 34571 - RNA, 21 nt, RNAi
gaauccaggagcgagaaucuu

SEQ ID NO: 34572 - RNA, 21 nt, RNAi
uucuuagguccucgcucuuag

SEQ ID NO: 34573 - DNA, 21 bp, homo sapiens
aatccaggagcgagaatcaaa

SEQ ID NO: 34574 - RNA, 21 nt, RNAi
uccaggagcgagaaucaaauu

SEQ ID NO: 34575 - RNA, 21 nt, RNAi
uuagguccucgcucuuaguuu

SEQ ID NO: 34576 - DNA, 21 bp, homo sapiens
aaacagaggatgaacactttg

SEQ ID NO: 34577 - RNA, 21 nt, RNAi
acagaggaugaacacuuuguu

SEQ ID NO: 34578 - RNA, 21 nt, RNAi
uuugucuccuacuugugaaac

SEQ ID NO: 34579 - DNA, 21 bp, homo sapiens
aacagaggatgaacactttga

SEQ ID NO: 34580 - RNA, 21 nt, RNAi
cagaggaugaacacuuugauu

SEQ ID NO: 34581 - RNA, 21 nt, RNAi
uugucuccuacuugugaaacu

SEQ ID NO: 34582 - DNA, 21 bp, homo sapiens
aatttcattccagaccttgcc

SEQ ID NO: 34583 - RNA, 21 nt, RNAi
uuucauuccagaccuugccuu

SEQ ID NO: 34584 - RNA, 21 nt, RNAi
uuaaaguaaggucuggaacgg

SEQ ID NO: 34585 - DNA, 21 bp, homo sapiens
aaagaaggtacttccaatcac

SEQ ID NO: 34586 - RNA, 21 nt, RNAi
agaagguacuuccaaucacuu

SEQ ID NO: 34587 - RNA, 21 nt, RNAi
uuucuuccaugaagguuagug

SEQ ID NO: 34588 - DNA, 21 bp, homo sapiens
aagaaggtacttccaatcacc

SEQ ID NO: 34589 - RNA, 21 nt, RNAi
gaagguacuuccaaucaccuu

SEQ ID NO: 34590 - RNA, 21 nt, RNAi
uucuuccaugaagguuagugg

SEQ ID NO: 34591 - DNA, 21 bp, homo sapiens
aaggtacttccaatcaccgtc

SEQ ID NO: 34592 - RNA, 21 nt, RNAi
gguacuuccaaucaccgucuu

SEQ ID NO: 34593 - RNA, 21 nt, RNAi
uuccaugaagguuaguggcag

SEQ ID NO: 34594 - DNA, 21 bp, homo sapiens
aagtcaccagcctttgcattg

SEQ ID NO: 34595 - RNA, 21 nt, RNAi
gucaccagccuuugcauuguu

SEQ ID NO: 34596 - RNA, 21 nt, RNAi
uucaguggucggaaacguaac

SEQ ID NO: 34597 - DNA, 21 bp, homo sapiens
aaagaagatgaggaagaggac

SEQ ID NO: 34598 - RNA, 21 nt, RNAi
agaagaugaggaagaggacuu

SEQ ID NO: 34599 - RNA, 21 nt, RNAi
uuucuucuacuccuucuccug

SEQ ID NO: 34600 - DNA, 21 bp, homo sapiens
aagaagatgaggaagaggacg

SEQ ID NO: 34601 - RNA, 21 nt, RNAi
gaagaugaggaagaggacguu

SEQ ID NO: 34602 - RNA, 21 nt, RNAi
uucuucuacuccuucuccugc

SEQ ID NO: 34603 - DNA, 21 bp, homo sapiens
aagatgaggaagaggacgaac

SEQ ID NO: 34604 - RNA, 21 nt, RNAi
gaugaggaagaggacgaacuu

SEQ ID NO: 34605 - RNA, 21 nt, RNAi
uucuacuccuucuccugcuug

SEQ ID NO: 34606 - DNA, 21 bp, homo sapiens
aagaggacgaaccggtagtga

SEQ ID NO: 34607 - RNA, 21 nt, RNAi
gaggacgaaccgguagugauu

SEQ ID NO: 34608 - RNA, 21 nt, RNAi
uucuccugcuuggccaucacu

SEQ ID NO: 34609 - DNA, 21 bp, homo sapiens
aaagctcaacctgtgccacat

SEQ ID NO: 34610 - RNA, 21 nt, RNAi
agcucaaccugugccacauuu

SEQ ID NO: 34611 - RNA, 21 nt, RNAi
uuucgaguuggacacggugua

SEQ ID NO: 34612 - DNA, 21 bp, homo sapiens
aagctcaacctgtgccacatt

SEQ ID NO: 34613 - RNA, 21 nt, RNAi
gcucaaccugugccacauuuu

SEQ ID NO: 34614 - RNA, 21 nt, RNAi
uucgaguuggacacgguguaa

SEQ ID NO: 34615 - DNA, 21 bp, homo sapiens
aaagaacgtcagttacagaag

SEQ ID NO: 34616 - RNA, 21 nt, RNAi
agaacgucaguuacagaaguu

SEQ ID NO: 34617 - RNA, 21 nt, RNAi
uuucuugcagucaaugucuuc

SEQ ID NO: 34618 - DNA, 21 bp, homo sapiens
aagaacgtcagttacagaagg

SEQ ID NO: 34619 - RNA, 21 nt, RNAi
gaacgucaguuacagaagguu

SEQ ID NO: 34620 - RNA, 21 nt, RNAi
uucuugcagucaaugucuucc

SEQ ID NO: 34621 - DNA, 21 bp, homo sapiens
aacgtcagttacagaaggaga

SEQ ID NO: 34622 - RNA, 21 nt, RNAi
cgucaguuacagaaggagauu

SEQ ID NO: 34623 - RNA, 21 nt, RNAi
uugcagucaaugucuuccucu

SEQ ID NO: 34624 - DNA, 21 bp, homo sapiens
aacctgccagagaagaaggta

SEQ ID NO: 34625 - RNA, 21 nt, RNAi
ccugccagagaagaagguauu

SEQ ID NO: 34626 - RNA, 21 nt, RNAi
uuggacggucucuucuuccau

SEQ ID NO: 34627 - DNA, 21 bp, homo sapiens
aagaaggtaaagaatgtgacc

SEQ ID NO: 34628 - RNA, 21 nt, RNAi
gaagguaaagaaugugaccuu

SEQ ID NO: 34629 - RNA, 21 nt, RNAi
uucuuccauuucuuacacugg

SEQ ID NO: 34630 - DNA, 21 bp, homo sapiens
aacctttctgcttggagactg

SEQ ID NO: 34631 - RNA, 21 nt, RNAi
ccuuucugcuuggagacuguu

SEQ ID NO: 34632 - RNA, 21 nt, RNAi
uuggaaagacgaaccucugac

SEQ ID NO: 34633 - DNA, 21 bp, homo sapiens
aagaggtgctctgaaggcaca

SEQ ID NO: 34634 - RNA, 21 nt, RNAi
gaggugcucugaaggcacauu

SEQ ID NO: 34635 - RNA, 21 nt, RNAi
uucuccacgagacuuccgugu

SEQ ID NO: 34636 - DNA, 21 bp, homo sapiens
aaggcacagacttggaagcac

SEQ ID NO: 34637 - RNA, 21 nt, RNAi
ggcacagacuuggaagcacuu

SEQ ID NO: 34638 - RNA, 21 nt, RNAi
uuccgugucugaaccuucgug

SEQ ID NO: 34639 - DNA, 21 bp, homo sapiens
aagcaccagctggaagaagaa

SEQ ID NO: 34640 - RNA, 21 nt, RNAi
gcaccagcuggaagaagaauu

SEQ ID NO: 34641 - RNA, 21 nt, RNAi
uucguggucgaccuucuucuu

SEQ ID NO: 34642 - DNA, 21 bp, homo sapiens
aagaagaactgagacagcaga

SEQ ID NO: 34643 - RNA, 21 nt, RNAi
gaagaacugagacagcagauu

SEQ ID NO: 34644 - RNA, 21 nt, RNAi
uucuucuugacucugucgucu

SEQ ID NO: 34645 - DNA, 21 bp, homo sapiens
aagaactgagacagcagaaag

SEQ ID NO: 34646 - RNA, 21 nt, RNAi
gaacugagacagcagaaaguu

SEQ ID NO: 34647 - RNA, 21 nt, RNAi
uucuugacucugucgucuuuc

SEQ ID NO: 34648 - DNA, 21 bp, homo sapiens
aactgagacagcagaaagaag

SEQ ID NO: 34649 - RNA, 21 nt, RNAi
cugagacagcagaaagaaguu

SEQ ID NO: 34650 - RNA, 21 nt, RNAi
uugacucugucgucuuucuuc

SEQ ID NO: 34651 - DNA, 21 bp, homo sapiens
aaagaagcagcttgtttcaag

SEQ ID NO: 34652 - RNA, 21 nt, RNAi
agaagcagcuuguuucaaguu

SEQ ID NO: 34653 - RNA, 21 nt, RNAi
uuucuucgucgaacaaaguuc

SEQ ID NO: 34654 - DNA, 21 bp, homo sapiens
aagaagcagcttgtttcaagg

SEQ ID NO: 34655 - RNA, 21 nt, RNAi
gaagcagcuuguuucaagguu

SEQ ID NO: 34656 - RNA, 21 nt, RNAi
uucuucgucgaacaaaguucc

SEQ ID NO: 34657 - DNA, 21 bp, homo sapiens
aagcagcttgtttcaaggctc

SEQ ID NO: 34658 - RNA, 21 nt, RNAi
gcagcuuguuucaaggcucuu

SEQ ID NO: 34659 - RNA, 21 nt, RNAi
uucgucgaacaaaguuccgag

SEQ ID NO: 34660 - DNA, 21 bp, homo sapiens
aaggctcgtccaaacaccgtc

SEQ ID NO: 34661 - RNA, 21 nt, RNAi
ggcucguccaaacaccgucuu

SEQ ID NO: 34662 - RNA, 21 nt, RNAi
uuccgagcagguuuguggcag

SEQ ID NO: 34663 - DNA, 21 bp, homo sapiens
aaacaccgtcatctctcagga

SEQ ID NO: 34664 - RNA, 21 nt, RNAi
acaccgucaucucucaggauu

SEQ ID NO: 34665 - RNA, 21 nt, RNAi
uuuguggcaguagagaguccu

SEQ ID NO: 34666 - DNA, 21 bp, homo sapiens
aacaccgtcatctctcaggag

SEQ ID NO: 34667 - RNA, 21 nt, RNAi
caccgucaucucucaggaguu

SEQ ID NO: 34668 - RNA, 21 nt, RNAi
uuguggcaguagagaguccuc

SEQ ID NO: 34669 - DNA, 21 bp, homo sapiens
aaagagaagaaatcagttgct

SEQ ID NO: 34670 - RNA, 21 nt, RNAi
agagaagaaaucaguugcuuu

SEQ ID NO: 34671 - RNA, 21 nt, RNAi
uuucucuucuuuagucaacga

SEQ ID NO: 34672 - DNA, 21 bp, homo sapiens
aagagaagaaatcagttgctg

SEQ ID NO: 34673 - RNA, 21 nt, RNAi
gagaagaaaucaguugcuguu

SEQ ID NO: 34674 - RNA, 21 nt, RNAi
uucucuucuuuagucaacgac

SEQ ID NO: 34675 - DNA, 21 bp, homo sapiens
aagagagccaaagagcggcag

SEQ ID NO: 34676 - RNA, 21 nt, RNAi
gagagccaaagagcggcaguu

SEQ ID NO: 34677 - RNA, 21 nt, RNAi
uucucucgguuucucgccguc

SEQ ID NO: 34678 - DNA, 21 bp, homo sapiens
aaagagcggcaggagctggag

SEQ ID NO: 34679 - RNA, 21 nt, RNAi
agagcggcaggagcuggaguu

SEQ ID NO: 34680 - RNA, 21 nt, RNAi
uuucucgccguccucgaccuc

SEQ ID NO: 34681 - DNA, 21 bp, homo sapiens
aagagcggcaggagctggaga

SEQ ID NO: 34682 - RNA, 21 nt, RNAi
gagcggcaggagcuggagauu

SEQ ID NO: 34683 - RNA, 21 nt, RNAi
uucucgccguccucgaccucu

SEQ ID NO: 34684 - DNA, 21 bp, homo sapiens
aagagaatggctgaggtagaa

SEQ ID NO: 34685 - RNA, 21 nt, RNAi
gagaauggcugagguagaauu

SEQ ID NO: 34686 - RNA, 21 nt, RNAi
uucucuuaccgacuccaucuu

SEQ ID NO: 34687 - DNA, 21 bp, homo sapiens
aaagaggagctggccaggcta

SEQ ID NO: 34688 - RNA, 21 nt, RNAi
agaggagcuggccaggcuauu

SEQ ID NO: 34689 - RNA, 21 nt, RNAi
uuucuccucgaccgguccgau

SEQ ID NO: 34690 - DNA, 21 bp, homo sapiens
aagaggagctggccaggctac

SEQ ID NO: 34691 - RNA, 21 nt, RNAi
gaggagcuggccaggcuacuu

SEQ ID NO: 34692 - RNA, 21 nt, RNAi
uucuccucgaccgguccgaug

SEQ ID NO: 34693 - DNA, 21 bp, homo sapiens
aactggtgcataaggcaaatc

SEQ ID NO: 34694 - RNA, 21 nt, RNAi
cuggugcauaaggcaaaucuu

SEQ ID NO: 34695 - RNA, 21 nt, RNAi
uugaccacguauuccguuuag

SEQ ID NO: 34696 - DNA, 21 bp, homo sapiens
aaggcaaatccaatacgcaag

SEQ ID NO: 34697 - RNA, 21 nt, RNAi
ggcaaauccaauacgcaaguu

SEQ ID NO: 34698 - RNA, 21 nt, RNAi
uuccguuuagguuaugcguuc

SEQ ID NO: 34699 - DNA, 21 bp, homo sapiens
aaatccaatacgcaagtacca

SEQ ID NO: 34700 - RNA, 21 nt, RNAi
auccaauacgcaaguaccauu

SEQ ID NO: 34701 - RNA, 21 nt, RNAi
uuuagguuaugcguucauggu

SEQ ID NO: 34702 - DNA, 21 bp, homo sapiens
aatccaatacgcaagtaccag

SEQ ID NO: 34703 - RNA, 21 nt, RNAi
uccaauacgcaaguaccaguu

SEQ ID NO: 34704 - RNA, 21 nt, RNAi
uuagguuaugcguucaugguc

SEQ ID NO: 34705 - DNA, 21 bp, homo sapiens
aaagtcaagtgaccagcctct

SEQ ID NO: 34706 - RNA, 21 nt, RNAi
agucaagugaccagccucuuu

SEQ ID NO: 34707 - RNA, 21 nt, RNAi
uuucaguucacuggucggaga

SEQ ID NO: 34708 - DNA, 21 bp, homo sapiens
aagtcaagtgaccagcctctg

SEQ ID NO: 34709 - RNA, 21 nt, RNAi
gucaagugaccagccucuguu

SEQ ID NO: 34710 - RNA, 21 nt, RNAi
uucaguucacuggucggagac

SEQ ID NO: 34711 - DNA, 21 bp, homo sapiens
aagtgaccagcctctgactgt

SEQ ID NO: 34712 - RNA, 21 nt, RNAi
gugaccagccucugacuguuu

SEQ ID NO: 34713 - RNA, 21 nt, RNAi
uucacuggucggagacugaca

SEQ ID NO: 34714 - DNA, 21 bp, homo sapiens
aaattctccactcgattccac

SEQ ID NO: 34715 - RNA, 21 nt, RNAi
auucuccacucgauuccacuu

SEQ ID NO: 34716 - RNA, 21 nt, RNAi
uuuaagaggugagcuaaggug

SEQ ID NO: 34717 - DNA, 21 bp, homo sapiens
aattctccactcgattccact

SEQ ID NO: 34718 - RNA, 21 nt, RNAi
uucuccacucgauuccacuuu

SEQ ID NO: 34719 - RNA, 21 nt, RNAi
uuaagaggugagcuaagguga

SEQ ID NO: 34720 - DNA, 21 bp, homo sapiens
aaactcagctgtgagctgcgg

SEQ ID NO: 34721 - RNA, 21 nt, RNAi
acucagcugugagcugcgguu

SEQ ID NO: 34722 - RNA, 21 nt, RNAi
uuugagucgacacucgacgcc

SEQ ID NO: 34723 - DNA, 21 bp, homo sapiens
aactcagctgtgagctgcgga

SEQ ID NO: 34724 - RNA, 21 nt, RNAi
cucagcugugagcugcggauu

SEQ ID NO: 34725 - RNA, 21 nt, RNAi
uugagucgacacucgacgccu

SEQ ID NO: 34726 - DNA, 21 bp, homo sapiens
aacctcaaacctaggaccgtc

SEQ ID NO: 34727 - RNA, 21 nt, RNAi
ccucaaaccuaggaccgucuu

SEQ ID NO: 34728 - RNA, 21 nt, RNAi
uuggaguuuggauccuggcag

SEQ ID NO: 34729 - DNA, 21 bp, homo sapiens
aaacctaggaccgtcttgctt

SEQ ID NO: 34730 - RNA, 21 nt, RNAi
accuaggaccgucuugcuuuu

SEQ ID NO: 34731 - RNA, 21 nt, RNAi
uuuggauccuggcagaacgaa

SEQ ID NO: 34732 - DNA, 21 bp, homo sapiens
aacctaggaccgtcttgcttt

SEQ ID NO: 34733 - RNA, 21 nt, RNAi
ccuaggaccgucuugcuuuuu

SEQ ID NO: 34734 - RNA, 21 nt, RNAi
uuggauccuggcagaacgaaa

SEQ ID NO: 34735 - DNA, 21 bp, homo sapiens
aaagcatacttgacaactgtg

SEQ ID NO: 34736 - RNA, 21 nt, RNAi
agcauacuugacaacuguguu

SEQ ID NO: 34737 - RNA, 21 nt, RNAi
uuucguaugaacuguugacac

SEQ ID NO: 34738 - DNA, 21 bp, homo sapiens
aagcatacttgacaactgtgg

SEQ ID NO: 34739 - RNA, 21 nt, RNAi
gcauacuugacaacugugguu

SEQ ID NO: 34740 - RNA, 21 nt, RNAi
uucguaugaacuguugacacc

SEQ ID NO: 34741 - DNA, 21 bp, homo sapiens
aactcatgaatgtctcgatta

SEQ ID NO: 34742 - RNA, 21 nt, RNAi
cucaugaaugucucgauuauu

SEQ ID NO: 34743 - RNA, 21 nt, RNAi
uugaguacuuacagagcuaau

SEQ ID NO: 34744 - DNA, 21 bp, homo sapiens
aatgtctcgattagactccat

SEQ ID NO: 34745 - RNA, 21 nt, RNAi
ugucucgauuagacuccauuu

SEQ ID NO: 34746 - RNA, 21 nt, RNAi
uuacagagcuaaucugaggua

SEQ ID NO: 34747 - DNA, 21 bp, homo sapiens
aatttagtctctgtgtcagca

SEQ ID NO: 34748 - RNA, 21 nt, RNAi
uuuagucucugugucagcauu

SEQ ID NO: 34749 - RNA, 21 nt, RNAi
uuaaaucagagacacagucgu

SEQ ID NO: 34750 - DNA, 21 bp, homo sapiens
aagatagagattaagtcatgg

SEQ ID NO: 34751 - RNA, 21 nt, RNAi
gauagagauuaagucaugguu

SEQ ID NO: 34752 - RNA, 21 nt, RNAi
uucuaucucuaauucaguacc

SEQ ID NO: 34753 - DNA, 21 bp, homo sapiens
aagtcatggtttaaatgagga

SEQ ID NO: 34754 - RNA, 21 nt, RNAi
gucaugguuuaaaugaggauu

SEQ ID NO: 34755 - RNA, 21 nt, RNAi
uucaguaccaaauuuacuccu

SEQ ID NO: 34756 - DNA, 21 bp, homo sapiens
aaatcagattctgtcctcttc

SEQ ID NO: 34757 - RNA, 21 nt, RNAi
aucagauucuguccucuucuu

SEQ ID NO: 34758 - RNA, 21 nt, RNAi
uuuagucuaagacaggagaag

SEQ ID NO: 34759 - DNA, 21 bp, homo sapiens
aatcagattctgtcctcttct

SEQ ID NO: 34760 - RNA, 21 nt, RNAi
ucagauucuguccucuucuuu

SEQ ID NO: 34761 - RNA, 21 nt, RNAi
uuagucuaagacaggagaaga

SEQ ID NO: 34762 - DNA, 21 bp, homo sapiens
aaacctcaccaactgcaccag

SEQ ID NO: 34763 - RNA, 21 nt, RNAi
accucaccaacugcaccaguu

SEQ ID NO: 34764 - RNA, 21 nt, RNAi
uuuggagugguugacgugguc

SEQ ID NO: 34765 - DNA, 21 bp, homo sapiens
aacctcaccaactgcaccagt

SEQ ID NO: 34766 - RNA, 21 nt, RNAi
ccucaccaacugcaccaguuu

SEQ ID NO: 34767 - RNA, 21 nt, RNAi
uuggagugguugacgugguca

SEQ ID NO: 34768 - DNA, 21 bp, homo sapiens
aactgcaccagtgaggaagaa

SEQ ID NO: 34769 - RNA, 21 nt, RNAi
cugcaccagugaggaagaauu

SEQ ID NO: 34770 - RNA, 21 nt, RNAi
uugacguggucacuccuucuu

SEQ ID NO: 34771 - DNA, 21 bp, homo sapiens
aagaagactgcgtggattcat

SEQ ID NO: 34772 - RNA, 21 nt, RNAi
gaagacugcguggauucauuu

SEQ ID NO: 34773 - RNA, 21 nt, RNAi
uucuucugacgcaccuaagua

SEQ ID NO: 34774 - DNA, 21 bp, homo sapiens
aaggcacgttctttccttact

SEQ ID NO: 34775 - RNA, 21 nt, RNAi
ggcacguucuuuccuuacuuu

SEQ ID NO: 34776 - RNA, 21 nt, RNAi
uuccgugcaagaaaggaauga

SEQ ID NO: 34777 - DNA, 21 bp, homo sapiens
aagacctggcctggaataaat

SEQ ID NO: 34778 - RNA, 21 nt, RNAi
gaccuggccuggaauaaauuu

SEQ ID NO: 34779 - RNA, 21 nt, RNAi
uucuggaccggaccuuauuua

SEQ ID NO: 34780 - DNA, 21 bp, homo sapiens
cacgcttctcttggcgacagg

SEQ ID NO: 34781 - RNA, 21 nt, RNAi
cgcuucucuuggcgacagguu

SEQ ID NO: 34782 - RNA, 21 nt, RNAi
uugcgaagagaaccgcugucc

SEQ ID NO: 34783 - DNA, 21 bp, homo sapiens
catatttgccagacttcaaga

SEQ ID NO: 34784 - RNA, 21 nt, RNAi
uauuugccagacuucaagauu

SEQ ID NO: 34785 - RNA, 21 nt, RNAi
uuauaaacggucugaaguucu

SEQ ID NO: 34786 - DNA, 21 bp, homo sapiens
cagacttcaagatttcagaaa

SEQ ID NO: 34787 - RNA, 21 nt, RNAi
gacuucaagauuucagaaauu

SEQ ID NO: 34788 - RNA, 21 nt, RNAi
uucugaaguucuaaagucuuu

SEQ ID NO: 34789 - DNA, 21 bp, homo sapiens
caactttgagtcagacctgta

SEQ ID NO: 34790 - RNA, 21 nt, RNAi
acuuugagucagaccuguauu

SEQ ID NO: 34791 - RNA, 21 nt, RNAi
uuugaaacucagucuggacau

SEQ ID NO: 34792 - DNA, 21 bp, homo sapiens
cagacctgtaggcctgataga

SEQ ID NO: 34793 - RNA, 21 nt, RNAi
gaccuguaggccugauagauu

SEQ ID NO: 34794 - RNA, 21 nt, RNAi
uucuggacauccggacuaucu

SEQ ID NO: 34795 - DNA, 21 bp, homo sapiens
cacagaaggtgacctgctgag

SEQ ID NO: 34796 - RNA, 21 nt, RNAi
cagaaggugaccugcugaguu

SEQ ID NO: 34797 - RNA, 21 nt, RNAi
uugucuuccacuggacgacuc

SEQ ID NO: 34798 - DNA, 21 bp, homo sapiens
cagaaggtgacctgctgagaa

SEQ ID NO: 34799 - RNA, 21 nt, RNAi
gaaggugaccugcugagaauu

SEQ ID NO: 34800 - RNA, 21 nt, RNAi
uucuuccacuggacgacucuu

SEQ ID NO: 34801 - DNA, 21 bp, homo sapiens
catccttggatgatgaaggag

SEQ ID NO: 34802 - RNA, 21 nt, RNAi
uccuuggaugaugaaggaguu

SEQ ID NO: 34803 - RNA, 21 nt, RNAi
uuaggaaccuacuacuuccuc

SEQ ID NO: 34804 - DNA, 21 bp, homo sapiens
catagattcatggtttgagga

SEQ ID NO: 34805 - RNA, 21 nt, RNAi
uagauucaugguuugaggauu

SEQ ID NO: 34806 - RNA, 21 nt, RNAi
uuaucuaaguaccaaacuccu

SEQ ID NO: 34807 - DNA, 21 bp, homo sapiens
catggtttgaggagaaggcca

SEQ ID NO: 34808 - RNA, 21 nt, RNAi
ugguuugaggagaaggccauu

SEQ ID NO: 34809 - RNA, 21 nt, RNAi
uuaccaaacuccucuuccggu

SEQ ID NO: 34810 - DNA, 21 bp, homo sapiens
cagcaagctattgtcacacct

SEQ ID NO: 34811 - RNA, 21 nt, RNAi
gcaagcuauugucacaccuuu

SEQ ID NO: 34812 - RNA, 21 nt, RNAi
uucguucgauaacagugugga

SEQ ID NO: 34813 - DNA, 21 bp, homo sapiens
caagctattgtcacacctttg

SEQ ID NO: 34814 - RNA, 21 nt, RNAi
agcuauugucacaccuuuguu

SEQ ID NO: 34815 - RNA, 21 nt, RNAi
uuucgauaacaguguggaaac

SEQ ID NO: 34816 - DNA, 21 bp, homo sapiens
cacacctttgaaaccagttga

SEQ ID NO: 34817 - RNA, 21 nt, RNAi
caccuuugaaaccaguugauu

SEQ ID NO: 34818 - RNA, 21 nt, RNAi
uuguggaaacuuuggucaacu

SEQ ID NO: 34819 - DNA, 21 bp, homo sapiens
cacctttgaaaccagttgaca

SEQ ID NO: 34820 - RNA, 21 nt, RNAi
ccuuugaaaccaguugacauu

SEQ ID NO: 34821 - RNA, 21 nt, RNAi
uuggaaacuuuggucaacugu

SEQ ID NO: 34822 - DNA, 21 bp, homo sapiens
cagttgacaacacttactaca

SEQ ID NO: 34823 - RNA, 21 nt, RNAi
guugacaacacuuacuacauu

SEQ ID NO: 34824 - RNA, 21 nt, RNAi
uucaacuguugugaaugaugu

SEQ ID NO: 34825 - DNA, 21 bp, homo sapiens
caacacttactacaaagaggc

SEQ ID NO: 34826 - RNA, 21 nt, RNAi
acacuuacuacaaagaggcuu

SEQ ID NO: 34827 - RNA, 21 nt, RNAi
uuugugaaugauguuucuccg

SEQ ID NO: 34828 - DNA, 21 bp, homo sapiens
cacttactacaaagaggcaga

SEQ ID NO: 34829 - RNA, 21 nt, RNAi
cuuacuacaaagaggcagauu

SEQ ID NO: 34830 - RNA, 21 nt, RNAi
uugaaugauguuucuccgucu

SEQ ID NO: 34831 - DNA, 21 bp, homo sapiens
caatccattccgtcaaatgct

SEQ ID NO: 34832 - RNA, 21 nt, RNAi
auccauuccgucaaaugcuuu

SEQ ID NO: 34833 - RNA, 21 nt, RNAi
uuuagguaaggcaguuuacga

SEQ ID NO: 34834 - DNA, 21 bp, homo sapiens
cattccgtcaaatgcttgttc

SEQ ID NO: 34835 - RNA, 21 nt, RNAi
uuccgucaaaugcuuguucuu

SEQ ID NO: 34836 - RNA, 21 nt, RNAi
uuaaggcaguuuacgaacaag

SEQ ID NO: 34837 - DNA, 21 bp, homo sapiens
cagcctcagagaagatctctt

SEQ ID NO: 34838 - RNA, 21 nt, RNAi
gccucagagaagaucucuuuu

SEQ ID NO: 34839 - RNA, 21 nt, RNAi
uucggagucucuucuagagaa

SEQ ID NO: 34840 - DNA, 21 bp, homo sapiens
cagagaagatctcttaggctt

SEQ ID NO: 34841 - RNA, 21 nt, RNAi
gagaagaucucuuaggcuuuu

SEQ ID NO: 34842 - RNA, 21 nt, RNAi
uucucuucuagagaauccgaa

SEQ ID NO: 34843 - DNA, 21 bp, homo sapiens
cagaaggatttggaacagaaa

SEQ ID NO: 34844 - RNA, 21 nt, RNAi
gaaggauuuggaacagaaauu

SEQ ID NO: 34845 - RNA, 21 nt, RNAi
uucuuccuaaaccuugucuuu

SEQ ID NO: 34846 - DNA, 21 bp, homo sapiens
caagagatgtgccactcctgt

SEQ ID NO: 34847 - RNA, 21 nt, RNAi
agagaugugccacuccuguuu

SEQ ID NO: 34848 - RNA, 21 nt, RNAi
uuucucuacacggugaggaca

SEQ ID NO: 34849 - DNA, 21 bp, homo sapiens
cactcctgtaatcatcgatga

SEQ ID NO: 34850 - RNA, 21 nt, RNAi
cuccuguaaucaucgaugauu

SEQ ID NO: 34851 - RNA, 21 nt, RNAi
uugaggacauuaguagcuacu

SEQ ID NO: 34852 - DNA, 21 bp, homo sapiens
cagaggaagaaggcagtgctc

SEQ ID NO: 34853 - RNA, 21 nt, RNAi
gaggaagaaggcagugcucuu

SEQ ID NO: 34854 - RNA, 21 nt, RNAi
uucuccuucuuccgucacgag

SEQ ID NO: 34855 - DNA, 21 bp, homo sapiens
cagtgctcatcaagatactgc

SEQ ID NO: 34856 - RNA, 21 nt, RNAi
gugcucaucaagauacugcuu

SEQ ID NO: 34857 - RNA, 21 nt, RNAi
uucacgaguaguucuaugacg

SEQ ID NO: 34858 - DNA, 21 bp, homo sapiens
catactgtgccttgtatgcca

SEQ ID NO: 34859 - RNA, 21 nt, RNAi
uacugugccuuguaugccauu

SEQ ID NO: 34860 - RNA, 21 nt, RNAi
uuaugacacggaacauacggu

SEQ ID NO: 34861 - DNA, 21 bp, homo sapiens
cacctgcaaagcagaagtttc

SEQ ID NO: 34862 - RNA, 21 nt, RNAi
ccugcaaagcagaaguuucuu

SEQ ID NO: 34863 - RNA, 21 nt, RNAi
uuggacguuucgucuucaaag

SEQ ID NO: 34864 - DNA, 21 bp, homo sapiens
caagagctggagaagagtatg

SEQ ID NO: 34865 - RNA, 21 nt, RNAi
agagcuggagaagaguauguu

SEQ ID NO: 34866 - RNA, 21 nt, RNAi
uuucucgaccucuucucauac

SEQ ID NO: 34867 - DNA, 21 bp, homo sapiens
cagcaagaggtggtggagatg

SEQ ID NO: 34868 - RNA, 21 nt, RNAi
gcaagaggugguggagauguu

SEQ ID NO: 34869 - RNA, 21 nt, RNAi
uucguucuccaccaccucuac

SEQ ID NO: 34870 - DNA, 21 bp, homo sapiens
caagaggtggtggagatgcgg

SEQ ID NO: 34871 - RNA, 21 nt, RNAi
agaggugguggagaugcgguu

SEQ ID NO: 34872 - RNA, 21 nt, RNAi
uuucuccaccaccucuacgcc

SEQ ID NO: 34873 - DNA, 21 bp, homo sapiens
caagaaacttgctctggctgg

SEQ ID NO: 34874 - RNA, 21 nt, RNAi
agaaacuugcucuggcugguu

SEQ ID NO: 34875 - RNA, 21 nt, RNAi
uuucuuugaacgagaccgacc

SEQ ID NO: 34876 - DNA, 21 bp, homo sapiens
caacctgtgaagaaatcagtg

SEQ ID NO: 34877 - RNA, 21 nt, RNAi
accugugaagaaaucaguguu

SEQ ID NO: 34878 - RNA, 21 nt, RNAi
uuuggacacuucuuuagucac

SEQ ID NO: 34879 - DNA, 21 bp, homo sapiens
cagtgagccaggtcaccaaat

SEQ ID NO: 34880 - RNA, 21 nt, RNAi
gugagccaggucaccaaauuu

SEQ ID NO: 34881 - RNA, 21 nt, RNAi
uucacucgguccagugguuua

SEQ ID NO: 34882 - DNA, 21 bp, homo sapiens
caggtcaccaaatcagttgac

SEQ ID NO: 34883 - RNA, 21 nt, RNAi
ggucaccaaaucaguugacuu

SEQ ID NO: 34884 - RNA, 21 nt, RNAi
uuccagugguuuagucaacug

SEQ ID NO: 34885 - DNA, 21 bp, homo sapiens
caccaaatcagttgacttcca

SEQ ID NO: 34886 - RNA, 21 nt, RNAi
ccaaaucaguugacuuccauu

SEQ ID NO: 34887 - RNA, 21 nt, RNAi
uugguuuagucaacugaaggu

SEQ ID NO: 34888 - DNA, 21 bp, homo sapiens
caaatcagttgacttccactt

SEQ ID NO: 34889 - RNA, 21 nt, RNAi
aaucaguugacuuccacuuuu

SEQ ID NO: 34890 - RNA, 21 nt, RNAi
uuuuagucaacugaaggugaa

SEQ ID NO: 34891 - DNA, 21 bp, homo sapiens
cagttgacttccacttccgca

SEQ ID NO: 34892 - RNA, 21 nt, RNAi
guugacuuccacuuccgcauu

SEQ ID NO: 34893 - RNA, 21 nt, RNAi
uucaacugaaggugaaggcgu

SEQ ID NO: 34894 - DNA, 21 bp, homo sapiens
cacttccgcacagatgagcga

SEQ ID NO: 34895 - RNA, 21 nt, RNAi
cuuccgcacagaugagcgauu

SEQ ID NO: 34896 - RNA, 21 nt, RNAi
uugaaggcgugucuacucgcu

SEQ ID NO: 34897 - DNA, 21 bp, homo sapiens
cacagatgagcgaatcaaaca

SEQ ID NO: 34898 - RNA, 21 nt, RNAi
cagaugagcgaaucaaacauu

SEQ ID NO: 34899 - RNA, 21 nt, RNAi
uugucuacucgcuuaguuugu

SEQ ID NO: 34900 - DNA, 21 bp, homo sapiens
cagatgagcgaatcaaacaac

SEQ ID NO: 34901 - RNA, 21 nt, RNAi
gaugagcgaaucaaacaacuu

SEQ ID NO: 34902 - RNA, 21 nt, RNAi
uucuacucgcuuaguuuguug

SEQ ID NO: 34903 - DNA, 21 bp, homo sapiens
caaacaacatcctaagaacca

SEQ ID NO: 34904 - RNA, 21 nt, RNAi
aacaacauccuaagaaccauu

SEQ ID NO: 34905 - RNA, 21 nt, RNAi
uuuuguuguaggauucuuggu

SEQ ID NO: 34906 - DNA, 21 bp, homo sapiens
caacatcctaagaaccaggag

SEQ ID NO: 34907 - RNA, 21 nt, RNAi
acauccuaagaaccaggaguu

SEQ ID NO: 34908 - RNA, 21 nt, RNAi
uuuguaggauucuugguccuc

SEQ ID NO: 34909 - DNA, 21 bp, homo sapiens
catcctaagaaccaggaggaa

SEQ ID NO: 34910 - RNA, 21 nt, RNAi
uccuaagaaccaggaggaauu

SEQ ID NO: 34911 - RNA, 21 nt, RNAi
uuaggauucuugguccuccuu

SEQ ID NO: 34912 - DNA, 21 bp, homo sapiens
caggaggaatataaggaagtg

SEQ ID NO: 34913 - RNA, 21 nt, RNAi
ggaggaauauaaggaaguguu

SEQ ID NO: 34914 - RNA, 21 nt, RNAi
uuccuccuuauauuccuucac

SEQ ID NO: 34915 - DNA, 21 bp, homo sapiens
catctgaactacgaaagcatc

SEQ ID NO: 34916 - RNA, 21 nt, RNAi
ucugaacuacgaaagcaucuu

SEQ ID NO: 34917 - RNA, 21 nt, RNAi
uuagacuugaugcuuucguag

SEQ ID NO: 34918 - DNA, 21 bp, homo sapiens
cattgttaagcctttcaacct

SEQ ID NO: 34919 - RNA, 21 nt, RNAi
uuguuaagccuuucaaccuuu

SEQ ID NO: 34920 - RNA, 21 nt, RNAi
uuaacaauucggaaaguugga

SEQ ID NO: 34921 - DNA, 21 bp, homo sapiens
cacagcaagttgaagacttcc

SEQ ID NO: 34922 - RNA, 21 nt, RNAi
cagcaaguugaagacuuccuu

SEQ ID NO: 34923 - RNA, 21 nt, RNAi
uugucguucaacuucugaagg

SEQ ID NO: 34924 - DNA, 21 bp, homo sapiens
cagcaagttgaagacttccat

SEQ ID NO: 34925 - RNA, 21 nt, RNAi
gcaaguugaagacuuccauuu

SEQ ID NO: 34926 - RNA, 21 nt, RNAi
uucguucaacuucugaaggua

SEQ ID NO: 34927 - DNA, 21 bp, homo sapiens
caagttgaagacttccataaa

SEQ ID NO: 34928 - RNA, 21 nt, RNAi
aguugaagacuuccauaaauu

SEQ ID NO: 34929 - RNA, 21 nt, RNAi
uuucaacuucugaagguauuu

SEQ ID NO: 34930 - DNA, 21 bp, homo sapiens
cagatatcatttgaggagcaa

SEQ ID NO: 34931 - RNA, 21 nt, RNAi
gauaucauuugaggagcaauu

SEQ ID NO: 34932 - RNA, 21 nt, RNAi
uucuauaguaaacuccucguu

SEQ ID NO: 34933 - DNA, 21 bp, homo sapiens
catttgaggagcaagaaggat

SEQ ID NO: 34934 - RNA, 21 nt, RNAi
uuugaggagcaagaaggauuu

SEQ ID NO: 34935 - RNA, 21 nt, RNAi
uuaaacuccucguucuuccua

SEQ ID NO: 34936 - DNA, 21 bp, homo sapiens
caagaaggatgatattaacct

SEQ ID NO: 34937 - RNA, 21 nt, RNAi
agaaggaugauauuaaccuuu

SEQ ID NO: 34938 - RNA, 21 nt, RNAi
uuucuuccuacuauaauugga

SEQ ID NO: 34939 - DNA, 21 bp, homo sapiens
caaatcttctgtgaccaagat

SEQ ID NO: 34940 - RNA, 21 nt, RNAi
aaucuucugugaccaagauuu

SEQ ID NO: 34941 - RNA, 21 nt, RNAi
uuuuagaagacacugguucua

SEQ ID NO: 34942 - DNA, 21 bp, homo sapiens
cacagactcctgtactgcaaa

SEQ ID NO: 34943 - RNA, 21 nt, RNAi
cagacuccuguacugcaaauu

SEQ ID NO: 34944 - RNA, 21 nt, RNAi
uugucugaggacaugacguuu

SEQ ID NO: 34945 - DNA, 21 bp, homo sapiens
cagactcctgtactgcaaacc

SEQ ID NO: 34946 - RNA, 21 nt, RNAi
gacuccuguacugcaaaccuu

SEQ ID NO: 34947 - RNA, 21 nt, RNAi
uucugaggacaugacguuugg

SEQ ID NO: 34948 - DNA, 21 bp, homo sapiens
caaaccaaacaccgtgcacgg

SEQ ID NO: 34949 - RNA, 21 nt, RNAi
aaccaaacaccgugcacgguu

SEQ ID NO: 34950 - RNA, 21 nt, RNAi
uuuugguuuguggcacgugcc

SEQ ID NO: 34951 - DNA, 21 bp, homo sapiens
caatacaaattcaaagcacgt

SEQ ID NO: 34952 - RNA, 21 nt, RNAi
auacaaauucaaagcacguuu

SEQ ID NO: 34953 - RNA, 21 nt, RNAi
uuuauguuuaaguuucgugca

SEQ ID NO: 34954 - DNA, 21 bp, homo sapiens
caaattcaaagcacgtgaact

SEQ ID NO: 34955 - RNA, 21 nt, RNAi
aauucaaagcacgugaacuuu

SEQ ID NO: 34956 - RNA, 21 nt, RNAi
uuuuaaguuucgugcacuuga

SEQ ID NO: 34957 - DNA, 21 bp, homo sapiens
caaagcacgtgaacttgatcc

SEQ ID NO: 34958 - RNA, 21 nt, RNAi
aagcacgugaacuugauccuu

SEQ ID NO: 34959 - RNA, 21 nt, RNAi
uuuucgugcacuugaacuagg

SEQ ID NO: 34960 - DNA, 21 bp, homo sapiens
caagaaaccacctgtgaaacc

SEQ ID NO: 34961 - RNA, 21 nt, RNAi
agaaaccaccugugaaaccuu

SEQ ID NO: 34962 - RNA, 21 nt, RNAi
uuucuuugguggacacuuugg

SEQ ID NO: 34963 - DNA, 21 bp, homo sapiens
caccgagcctattggctttga

SEQ ID NO: 34964 - RNA, 21 nt, RNAi
ccgagccuauuggcuuugauu

SEQ ID NO: 34965 - RNA, 21 nt, RNAi
uuggcucggauaaccgaaacu

SEQ ID NO: 34966 - DNA, 21 bp, homo sapiens
caggagcgagaatcaaagaag

SEQ ID NO: 34967 - RNA, 21 nt, RNAi
ggagcgagaaucaaagaaguu

SEQ ID NO: 34968 - RNA, 21 nt, RNAi
uuccucgcucuuaguuucuuc

SEQ ID NO: 34969 - DNA, 21 bp, homo sapiens
cagaggatgaacactttgaat

SEQ ID NO: 34970 - RNA, 21 nt, RNAi
gaggaugaacacuuugaauuu

SEQ ID NO: 34971 - RNA, 21 nt, RNAi
uucuccuacuugugaaacuua

SEQ ID NO: 34972 - DNA, 21 bp, homo sapiens
cactttgaatttcattccaga

SEQ ID NO: 34973 - RNA, 21 nt, RNAi
cuuugaauuucauuccagauu

SEQ ID NO: 34974 - RNA, 21 nt, RNAi
uugaaacuuaaaguaaggucu

SEQ ID NO: 34975 - DNA, 21 bp, homo sapiens
caagtcaccagcctttgcatt

SEQ ID NO: 34976 - RNA, 21 nt, RNAi
agucaccagccuuugcauuuu

SEQ ID NO: 34977 - RNA, 21 nt, RNAi
uuucaguggucggaaacguaa

SEQ ID NO: 34978 - DNA, 21 bp, homo sapiens
caccagcctttgcattgaaga

SEQ ID NO: 34979 - RNA, 21 nt, RNAi
ccagccuuugcauugaagauu

SEQ ID NO: 34980 - RNA, 21 nt, RNAi
uuggucggaaacguaacuucu

SEQ ID NO: 34981 - DNA, 21 bp, homo sapiens
cagcctttgcattgaagaaca

SEQ ID NO: 34982 - RNA, 21 nt, RNAi
gccuuugcauugaagaacauu

SEQ ID NO: 34983 - RNA, 21 nt, RNAi
uucggaaacguaacuucuugu

SEQ ID NO: 34984 - DNA, 21 bp, homo sapiens
cattgaagaacagaattcgaa

SEQ ID NO: 34985 - RNA, 21 nt, RNAi
uugaagaacagaauucgaauu

SEQ ID NO: 34986 - RNA, 21 nt, RNAi
uuaacuucuugucuuaagcuu

SEQ ID NO: 34987 - DNA, 21 bp, homo sapiens
caccaaagaagatgaggaaga

SEQ ID NO: 34988 - RNA, 21 nt, RNAi
ccaaagaagaugaggaagauu

SEQ ID NO: 34989 - RNA, 21 nt, RNAi
uugguuucuucuacuccuucu

SEQ ID NO: 34990 - DNA, 21 bp, homo sapiens
caaagaagatgaggaagagga

SEQ ID NO: 34991 - RNA, 21 nt, RNAi
aagaagaugaggaagaggauu

SEQ ID NO: 34992 - RNA, 21 nt, RNAi
uuuucuucuacuccuucuccu

SEQ ID NO: 34993 - DNA, 21 bp, homo sapiens
cagaggcaagaactgtggaaa

SEQ ID NO: 34994 - RNA, 21 nt, RNAi
gaggcaagaacuguggaaauu

SEQ ID NO: 34995 - RNA, 21 nt, RNAi
uucuccguucuugacaccuuu

SEQ ID NO: 34996 - DNA, 21 bp, homo sapiens
caagaactgtggaaatatgcc

SEQ ID NO: 34997 - RNA, 21 nt, RNAi
agaacuguggaaauaugccuu

SEQ ID NO: 34998 - RNA, 21 nt, RNAi
uuucuugacaccuuuauacgg

SEQ ID NO: 34999 - DNA, 21 bp, homo sapiens
caaagaacgtcagttacagaa

SEQ ID NO: 35000 - RNA, 21 nt, RNAi
aagaacgucaguuacagaauu

SEQ ID NO: 35001 - RNA, 21 nt, RNAi
uuuucuugcagucaaugucuu

SEQ ID NO: 35002 - DNA, 21 bp, homo sapiens
cagttacagaaggagaagaaa

SEQ ID NO: 35003 - RNA, 21 nt, RNAi
guuacagaaggagaagaaauu

SEQ ID NO: 35004 - RNA, 21 nt, RNAi
uucaaugucuuccucuucuuu

SEQ ID NO: 35005 - DNA, 21 bp, homo sapiens
caccattaacctgccagagaa

SEQ ID NO: 35006 - RNA, 21 nt, RNAi
ccauuaaccugccagagaauu

SEQ ID NO: 35007 - RNA, 21 nt, RNAi
uugguaauuggacggucucuu

SEQ ID NO: 35008 - DNA, 21 bp, homo sapiens
cattaacctgccagagaagaa

SEQ ID NO: 35009 - RNA, 21 nt, RNAi
uuaaccugccagagaagaauu

SEQ ID NO: 35010 - RNA, 21 nt, RNAi
uuaauuggacggucucuucuu

SEQ ID NO: 35011 - DNA, 21 bp, homo sapiens
cagagaagaaggtaaagaatg

SEQ ID NO: 35012 - RNA, 21 nt, RNAi
gagaagaagguaaagaauguu

SEQ ID NO: 35013 - RNA, 21 nt, RNAi
uucucuucuuccauuucuuac

SEQ ID NO: 35014 - DNA, 21 bp, homo sapiens
cagattgaacctttctgcttg

SEQ ID NO: 35015 - RNA, 21 nt, RNAi
gauugaaccuuucugcuuguu

SEQ ID NO: 35016 - RNA, 21 nt, RNAi
uucuaacuuggaaagacgaac

SEQ ID NO: 35017 - DNA, 21 bp, homo sapiens
cagaagaggtgctctgaaggc

SEQ ID NO: 35018 - RNA, 21 nt, RNAi
gaagaggugcucugaaggcuu

SEQ ID NO: 35019 - RNA, 21 nt, RNAi
uucuucuccacgagacuuccg

SEQ ID NO: 35020 - DNA, 21 bp, homo sapiens
cacagacttggaagcaccagc

SEQ ID NO: 35021 - RNA, 21 nt, RNAi
cagacuuggaagcaccagcuu

SEQ ID NO: 35022 - RNA, 21 nt, RNAi
uugucugaaccuucguggucg

SEQ ID NO: 35023 - DNA, 21 bp, homo sapiens
cagacttggaagcaccagctg

SEQ ID NO: 35024 - RNA, 21 nt, RNAi
gacuuggaagcaccagcuguu

SEQ ID NO: 35025 - RNA, 21 nt, RNAi
uucugaaccuucguggucgac

SEQ ID NO: 35026 - DNA, 21 bp, homo sapiens
caccagctggaagaagaactg

SEQ ID NO: 35027 - RNA, 21 nt, RNAi
ccagcuggaagaagaacuguu

SEQ ID NO: 35028 - RNA, 21 nt, RNAi
uuggucgaccuucuucuugac

SEQ ID NO: 35029 - DNA, 21 bp, homo sapiens
cagctggaagaagaactgaga

SEQ ID NO: 35030 - RNA, 21 nt, RNAi
gcuggaagaagaacugagauu

SEQ ID NO: 35031 - RNA, 21 nt, RNAi
uucgaccuucuucuugacucu

SEQ ID NO: 35032 - DNA, 21 bp, homo sapiens
cagcagaaagaagcagcttgt

SEQ ID NO: 35033 - RNA, 21 nt, RNAi
gcagaaagaagcagcuuguuu

SEQ ID NO: 35034 - RNA, 21 nt, RNAi
uucgucuuucuucgucgaaca

SEQ ID NO: 35035 - DNA, 21 bp, homo sapiens
cagaaagaagcagcttgtttc

SEQ ID NO: 35036 - RNA, 21 nt, RNAi
gaaagaagcagcuuguuucuu

SEQ ID NO: 35037 - RNA, 21 nt, RNAi
uucuuucuucgucgaacaaag

SEQ ID NO: 35038 - DNA, 21 bp, homo sapiens
cagcttgtttcaaggctcgtc

SEQ ID NO: 35039 - RNA, 21 nt, RNAi
gcuuguuucaaggcucgucuu

SEQ ID NO: 35040 - RNA, 21 nt, RNAi
uucgaacaaaguuccgagcag

SEQ ID NO: 35041 - DNA, 21 bp, homo sapiens
caaggctcgtccaaacaccgt

SEQ ID NO: 35042 - RNA, 21 nt, RNAi
aggcucguccaaacaccguuu

SEQ ID NO: 35043 - RNA, 21 nt, RNAi
uuuccgagcagguuuguggca

SEQ ID NO: 35044 - DNA, 21 bp, homo sapiens
caaacaccgtcatctctcagg

SEQ ID NO: 35045 - RNA, 21 nt, RNAi
aacaccgucaucucucagguu

SEQ ID NO: 35046 - RNA, 21 nt, RNAi
uuuuguggcaguagagagucc

SEQ ID NO: 35047 - DNA, 21 bp, homo sapiens
caccgtcatctctcaggagcc

SEQ ID NO: 35048 - RNA, 21 nt, RNAi
ccgucaucucucaggagccuu

SEQ ID NO: 35049 - RNA, 21 nt, RNAi
uuggcaguagagaguccucgg

SEQ ID NO: 35050 - DNA, 21 bp, homo sapiens
caagaaagagaagaaatcagt

SEQ ID NO: 35051 - RNA, 21 nt, RNAi
agaaagagaagaaaucaguuu

SEQ ID NO: 35052 - RNA, 21 nt, RNAi
uuucuuucucuucuuuaguca

SEQ ID NO: 35053 - DNA, 21 bp, homo sapiens
cagctggctactgagaagaga

SEQ ID NO: 35054 - RNA, 21 nt, RNAi
gcuggcuacugagaagagauu

SEQ ID NO: 35055 - RNA, 21 nt, RNAi
uucgaccgaugacucuucucu

SEQ ID NO: 35056 - DNA, 21 bp, homo sapiens
caaagagcggcaggagctgga

SEQ ID NO: 35057 - RNA, 21 nt, RNAi
aagagcggcaggagcuggauu

SEQ ID NO: 35058 - RNA, 21 nt, RNAi
uuuucucgccguccucgaccu

SEQ ID NO: 35059 - DNA, 21 bp, homo sapiens
caggagctggagaagagaatg

SEQ ID NO: 35060 - RNA, 21 nt, RNAi
ggagcuggagaagagaauguu

SEQ ID NO: 35061 - RNA, 21 nt, RNAi
uuccucgaccucuucucuuac

SEQ ID NO: 35062 - DNA, 21 bp, homo sapiens
cagcagttggaggaggccaga

SEQ ID NO: 35063 - RNA, 21 nt, RNAi
gcaguuggaggaggccagauu

SEQ ID NO: 35064 - RNA, 21 nt, RNAi
uucgucaaccuccuccggucu

SEQ ID NO: 35065 - DNA, 21 bp, homo sapiens
cagttggaggaggccagacta

SEQ ID NO: 35066 - RNA, 21 nt, RNAi
guuggaggaggccagacuauu

SEQ ID NO: 35067 - RNA, 21 nt, RNAi
uucaaccuccuccggucugau

SEQ ID NO: 35068 - DNA, 21 bp, homo sapiens
cagactacaggaggaagagca

SEQ ID NO: 35069 - RNA, 21 nt, RNAi
gacuacaggaggaagagcauu

SEQ ID NO: 35070 - RNA, 21 nt, RNAi
uucugauguccuccuucucgu

SEQ ID NO: 35071 - DNA, 21 bp, homo sapiens
caggctacggagagaactggt

SEQ ID NO: 35072 - RNA, 21 nt, RNAi
ggcuacggagagaacugguuu

SEQ ID NO: 35073 - RNA, 21 nt, RNAi
uuccgaugccucucuugacca

SEQ ID NO: 35074 - DNA, 21 bp, homo sapiens
cataaggcaaatccaatacgc

SEQ ID NO: 35075 - RNA, 21 nt, RNAi
uaaggcaaauccaauacgcuu

SEQ ID NO: 35076 - RNA, 21 nt, RNAi
uuauuccguuuagguuaugcg

SEQ ID NO: 35077 - DNA, 21 bp, homo sapiens
caaatccaatacgcaagtacc

SEQ ID NO: 35078 - RNA, 21 nt, RNAi
aauccaauacgcaaguaccuu

SEQ ID NO: 35079 - RNA, 21 nt, RNAi
uuuuagguuaugcguucaugg

SEQ ID NO: 35080 - DNA, 21 bp, homo sapiens
caagtgaccagcctctgactg

SEQ ID NO: 35081 - RNA, 21 nt, RNAi
agugaccagccucugacuguu

SEQ ID NO: 35082 - RNA, 21 nt, RNAi
uuucacuggucggagacugac

SEQ ID NO: 35083 - DNA, 21 bp, homo sapiens
cagcctctgactgtgcctgta

SEQ ID NO: 35084 - RNA, 21 nt, RNAi
gccucugacugugccuguauu

SEQ ID NO: 35085 - RNA, 21 nt, RNAi
uucggagacugacacggacau

SEQ ID NO: 35086 - DNA, 21 bp, homo sapiens
caaattctccactcgattcca

SEQ ID NO: 35087 - RNA, 21 nt, RNAi
aauucuccacucgauuccauu

SEQ ID NO: 35088 - RNA, 21 nt, RNAi
uuuuaagaggugagcuaaggu

SEQ ID NO: 35089 - DNA, 21 bp, homo sapiens
cactcgattccactgctaaac

SEQ ID NO: 35090 - RNA, 21 nt, RNAi
cucgauuccacugcuaaacuu

SEQ ID NO: 35091 - RNA, 21 nt, RNAi
uugagcuaaggugacgauuug

SEQ ID NO: 35092 - DNA, 21 bp, homo sapiens
cactgctaaactcagctgtga

SEQ ID NO: 35093 - RNA, 21 nt, RNAi
cugcuaaacucagcugugauu

SEQ ID NO: 35094 - RNA, 21 nt, RNAi
uugacgauuugagucgacacu

SEQ ID NO: 35095 - DNA, 21 bp, homo sapiens
cagctgtgagctgcggatacc

SEQ ID NO: 35096 - RNA, 21 nt, RNAi
gcugugagcugcggauaccuu

SEQ ID NO: 35097 - RNA, 21 nt, RNAi
uucgacacucgacgccuaugg

SEQ ID NO: 35098 - DNA, 21 bp, homo sapiens
caaacctaggaccgtcttgct

SEQ ID NO: 35099 - RNA, 21 nt, RNAi
aaccuaggaccgucuugcuuu

SEQ ID NO: 35100 - RNA, 21 nt, RNAi
uuuuggauccuggcagaacga

SEQ ID NO: 35101 - DNA, 21 bp, homo sapiens
catacttgacaactgtggact

SEQ ID NO: 35102 - RNA, 21 nt, RNAi
uacuugacaacuguggacuuu

SEQ ID NO: 35103 - RNA, 21 nt, RNAi
uuaugaacuguugacaccuga

SEQ ID NO: 35104 - DNA, 21 bp, homo sapiens
catgaatgtctcgattagact

SEQ ID NO: 35105 - RNA, 21 nt, RNAi
ugaaugucucgauuagacuuu

SEQ ID NO: 35106 - RNA, 21 nt, RNAi
uuacuuacagagcuaaucuga

SEQ ID NO: 35107 - DNA, 21 bp, homo sapiens
cactctgactagaatttagtc

SEQ ID NO: 35108 - RNA, 21 nt, RNAi
cucugacuagaauuuagucuu

SEQ ID NO: 35109 - RNA, 21 nt, RNAi
uugagacugaucuuaaaucag

SEQ ID NO: 35110 - DNA, 21 bp, homo sapiens
cagcacagtgtaatctctatt

SEQ ID NO: 35111 - RNA, 21 nt, RNAi
gcacaguguaaucucuauuuu

SEQ ID NO: 35112 - RNA, 21 nt, RNAi
uucgugucacauuagagauaa

SEQ ID NO: 35113 - DNA, 21 bp, homo sapiens
cacagtgtaatctctattgct

SEQ ID NO: 35114 - RNA, 21 nt, RNAi
caguguaaucucuauugcuuu

SEQ ID NO: 35115 - RNA, 21 nt, RNAi
uugucacauuagagauaacga

SEQ ID NO: 35116 - DNA, 21 bp, homo sapiens
cagtgtaatctctattgctat

SEQ ID NO: 35117 - RNA, 21 nt, RNAi
guguaaucucuauugcuauuu

SEQ ID NO: 35118 - RNA, 21 nt, RNAi
uucacauuagagauaacgaua

SEQ ID NO: 35119 - DNA, 21 bp, homo sapiens
catggtttaaatgaggaacaa

SEQ ID NO: 35120 - RNA, 21 nt, RNAi
ugguuuaaaugaggaacaauu

SEQ ID NO: 35121 - RNA, 21 nt, RNAi
uuaccaaauuuacuccuuguu

SEQ ID NO: 35122 - DNA, 21 bp, homo sapiens
caatcagtaaatcagattctg

SEQ ID NO: 35123 - RNA, 21 nt, RNAi
aucaguaaaucagauucuguu

SEQ ID NO: 35124 - RNA, 21 nt, RNAi
uuuagucauuuagucuaagac

SEQ ID NO: 35125 - DNA, 21 bp, homo sapiens
cagtaaatcagattctgtcct

SEQ ID NO: 35126 - RNA, 21 nt, RNAi
guaaaucagauucuguccuuu

SEQ ID NO: 35127 - RNA, 21 nt, RNAi
uucauuuagucuaagacagga

SEQ ID NO: 35128 - DNA, 21 bp, homo sapiens
cagattctgtcctcttctctg

SEQ ID NO: 35129 - RNA, 21 nt, RNAi
gauucuguccucuucucuguu

SEQ ID NO: 35130 - RNA, 21 nt, RNAi
uucuaagacaggagaagagac

SEQ ID NO: 35131 - DNA, 21 bp, homo sapiens
caccaactgcaccagtgagga

SEQ ID NO: 35132 - RNA, 21 nt, RNAi
ccaacugcaccagugaggauu

SEQ ID NO: 35133 - RNA, 21 nt, RNAi
uugguugacguggucacuccu

SEQ ID NO: 35134 - DNA, 21 bp, homo sapiens
caactgcaccagtgaggaaga

SEQ ID NO: 35135 - RNA, 21 nt, RNAi
acugcaccagugaggaagauu

SEQ ID NO: 35136 - RNA, 21 nt, RNAi
uuugacguggucacuccuucu

SEQ ID NO: 35137 - DNA, 21 bp, homo sapiens
caccagtgaggaagaagactg

SEQ ID NO: 35138 - RNA, 21 nt, RNAi
ccagugaggaagaagacuguu

SEQ ID NO: 35139 - RNA, 21 nt, RNAi
uuggucacuccuucuucugac

SEQ ID NO: 35140 - DNA, 21 bp, homo sapiens
cagtgaggaagaagactgcgt

SEQ ID NO: 35141 - RNA, 21 nt, RNAi
gugaggaagaagacugcguuu

SEQ ID NO: 35142 - RNA, 21 nt, RNAi
uucacuccuucuucugacgca

SEQ ID NO: 35143 - DNA, 21 bp, homo sapiens
cacgttctttccttactggtg

SEQ ID NO: 35144 - RNA, 21 nt, RNAi
cguucuuuccuuacugguguu

SEQ ID NO: 35145 - RNA, 21 nt, RNAi
uugcaagaaaggaaugaccac

SEQ ID NO: 35146 - DNA, 21 bp, homo sapiens
gagtttggaacggctgaagtt

SEQ ID NO: 35147 - RNA, 21 nt, RNAi
guuuggaacggcugaaguuuu

SEQ ID NO: 35148 - RNA, 21 nt, RNAi
uucaaaccuugccgacuucaa

SEQ ID NO: 35149 - DNA, 21 bp, homo sapiens
gaacggctgaagttcaccttc

SEQ ID NO: 35150 - RNA, 21 nt, RNAi
acggcugaaguucaccuucuu

SEQ ID NO: 35151 - RNA, 21 nt, RNAi
uuugccgacuucaaguggaag

SEQ ID NO: 35152 - DNA, 21 bp, homo sapiens
gaggctgtcggctaataacgg

SEQ ID NO: 35153 - RNA, 21 nt, RNAi
ggcugucggcuaauaacgguu

SEQ ID NO: 35154 - RNA, 21 nt, RNAi
uuccgacagccgauuauugcc

SEQ ID NO: 35155 - DNA, 21 bp, homo sapiens
gatacatatttgccagacttc

SEQ ID NO: 35156 - RNA, 21 nt, RNAi
uacauauuugccagacuucuu

SEQ ID NO: 35157 - RNA, 21 nt, RNAi
uuauguauaaacggucugaag

SEQ ID NO: 35158 - DNA, 21 bp, homo sapiens
gaaagagaagattgcaacttt

SEQ ID NO: 35159 - RNA, 21 nt, RNAi
aagagaagauugcaacuuuuu

SEQ ID NO: 35160 - RNA, 21 nt, RNAi
uuuucucuucuaacguugaaa

SEQ ID NO: 35161 - DNA, 21 bp, homo sapiens
gagaagattgcaactttgagt

SEQ ID NO: 35162 - RNA, 21 nt, RNAi
gaagauugcaacuuugaguuu

SEQ ID NO: 35163 - RNA, 21 nt, RNAi
uucuucuaacguugaaacuca

SEQ ID NO: 35164 - DNA, 21 bp, homo sapiens
gaagattgcaactttgagtca

SEQ ID NO: 35165 - RNA, 21 nt, RNAi
agauugcaacuuugagucauu

SEQ ID NO: 35166 - RNA, 21 nt, RNAi
uuucuaacguugaaacucagu

SEQ ID NO: 35167 - DNA, 21 bp, homo sapiens
gattgcaactttgagtcagac

SEQ ID NO: 35168 - RNA, 21 nt, RNAi
uugcaacuuugagucagacuu

SEQ ID NO: 35169 - RNA, 21 nt, RNAi
uuaacguugaaacucagucug

SEQ ID NO: 35170 - DNA, 21 bp, homo sapiens
gagtcagacctgtaggcctga

SEQ ID NO: 35171 - RNA, 21 nt, RNAi
gucagaccuguaggccugauu

SEQ ID NO: 35172 - RNA, 21 nt, RNAi
uucagucuggacauccggacu

SEQ ID NO: 35173 - DNA, 21 bp, homo sapiens
gacctgtaggcctgatagact

SEQ ID NO: 35174 - RNA, 21 nt, RNAi
ccuguaggccugauagacuuu

SEQ ID NO: 35175 - RNA, 21 nt, RNAi
uuggacauccggacuaucuga

SEQ ID NO: 35176 - DNA, 21 bp, homo sapiens
gatagactgattaaaccacag

SEQ ID NO: 35177 - RNA, 21 nt, RNAi
uagacugauuaaaccacaguu

SEQ ID NO: 35178 - RNA, 21 nt, RNAi
uuaucugacuaauuugguguc

SEQ ID NO: 35179 - DNA, 21 bp, homo sapiens
gactgattaaaccacagaagg

SEQ ID NO: 35180 - RNA, 21 nt, RNAi
cugauuaaaccacagaagguu

SEQ ID NO: 35181 - RNA, 21 nt, RNAi
uugacuaauuuggugucuucc

SEQ ID NO: 35182 - DNA, 21 bp, homo sapiens
gattaaaccacagaaggtgac

SEQ ID NO: 35183 - RNA, 21 nt, RNAi
uuaaaccacagaaggugacuu

SEQ ID NO: 35184 - RNA, 21 nt, RNAi
uuaauuuggugucuuccacug

SEQ ID NO: 35185 - DNA, 21 bp, homo sapiens
gagacaatgtcacaagttaaa

SEQ ID NO: 35186 - RNA, 21 nt, RNAi
gacaaugucacaaguuaaauu

SEQ ID NO: 35187 - RNA, 21 nt, RNAi
uucuguuacaguguucaauuu

SEQ ID NO: 35188 - DNA, 21 bp, homo sapiens
gatgatgaaggagatactcaa

SEQ ID NO: 35189 - RNA, 21 nt, RNAi
ugaugaaggagauacucaauu

SEQ ID NO: 35190 - RNA, 21 nt, RNAi
uuacuacuuccucuaugaguu

SEQ ID NO: 35191 - DNA, 21 bp, homo sapiens
gattcatggtttgaggagaag

SEQ ID NO: 35192 - RNA, 21 nt, RNAi
uucaugguuugaggagaaguu

SEQ ID NO: 35193 - RNA, 21 nt, RNAi
uuaaguaccaaacuccucuuc

SEQ ID NO: 35194 - DNA, 21 bp, homo sapiens
gaggagaaggccaatttggag

SEQ ID NO: 35195 - RNA, 21 nt, RNAi
ggagaaggccaauuuggaguu

SEQ ID NO: 35196 - RNA, 21 nt, RNAi
uuccucuuccgguuaaaccuc

SEQ ID NO: 35197 - DNA, 21 bp, homo sapiens
gagaaggccaatttggagaat

SEQ ID NO: 35198 - RNA, 21 nt, RNAi
gaaggccaauuuggagaauuu

SEQ ID NO: 35199 - RNA, 21 nt, RNAi
uucuuccgguuaaaccucuua

SEQ ID NO: 35200 - DNA, 21 bp, homo sapiens
gaaggccaatttggagaataa

SEQ ID NO: 35201 - RNA, 21 nt, RNAi
aggccaauuuggagaauaauu

SEQ ID NO: 35202 - RNA, 21 nt, RNAi
uuuccgguuaaaccucuuauu

SEQ ID NO: 35203 - DNA, 21 bp, homo sapiens
gagaaaggctaatcttcagca

SEQ ID NO: 35204 - RNA, 21 nt, RNAi
gaaaggcuaaucuucagcauu

SEQ ID NO: 35205 - RNA, 21 nt, RNAi
uucuuuccgauuagaagucgu

SEQ ID NO: 35206 - DNA, 21 bp, homo sapiens
gaaaggctaatcttcagcaag

SEQ ID NO: 35207 - RNA, 21 nt, RNAi
aaggcuaaucuucagcaaguu

SEQ ID NO: 35208 - RNA, 21 nt, RNAi
uuuuccgauuagaagucguuc

SEQ ID NO: 35209 - DNA, 21 bp, homo sapiens
gaaaccagttgacaacactta

SEQ ID NO: 35210 - RNA, 21 nt, RNAi
aaccaguugacaacacuuauu

SEQ ID NO: 35211 - RNA, 21 nt, RNAi
uuuuggucaacuguugugaau

SEQ ID NO: 35212 - DNA, 21 bp, homo sapiens
gacaacacttactacaaagag

SEQ ID NO: 35213 - RNA, 21 nt, RNAi
caacacuuacuacaaagaguu

SEQ ID NO: 35214 - RNA, 21 nt, RNAi
uuguugugaaugauguuucuc

SEQ ID NO: 35215 - DNA, 21 bp, homo sapiens
gaacaatccattccgtcaaat

SEQ ID NO: 35216 - RNA, 21 nt, RNAi
acaauccauuccgucaaauuu

SEQ ID NO: 35217 - RNA, 21 nt, RNAi
uuuguuagguaaggcaguuua

SEQ ID NO: 35218 - DNA, 21 bp, homo sapiens
gaagttgaggcagccatatca

SEQ ID NO: 35219 - RNA, 21 nt, RNAi
aguugaggcagccauaucauu

SEQ ID NO: 35220 - RNA, 21 nt, RNAi
uuucaacuccgucgguauagu

SEQ ID NO: 35221 - DNA, 21 bp, homo sapiens
gagaagatctcttaggctttc

SEQ ID NO: 35222 - RNA, 21 nt, RNAi
gaagaucucuuaggcuuucuu

SEQ ID NO: 35223 - RNA, 21 nt, RNAi
uucuucuagagaauccgaaag

SEQ ID NO: 35224 - DNA, 21 bp, homo sapiens
gaagatctcttaggctttctg

SEQ ID NO: 35225 - RNA, 21 nt, RNAi
agaucucuuaggcuuucuguu

SEQ ID NO: 35226 - RNA, 21 nt, RNAi
uuucuagagaauccgaaagac

SEQ ID NO: 35227 - DNA, 21 bp, homo sapiens
gatctcttaggctttctgctc

SEQ ID NO: 35228 - RNA, 21 nt, RNAi
ucucuuaggcuuucugcucuu

SEQ ID NO: 35229 - RNA, 21 nt, RNAi
uuagagaauccgaaagacgag

SEQ ID NO: 35230 - DNA, 21 bp, homo sapiens
gaaggatttggaacagaaaga

SEQ ID NO: 35231 - RNA, 21 nt, RNAi
aggauuuggaacagaaagauu

SEQ ID NO: 35232 - RNA, 21 nt, RNAi
uuuccuaaaccuugucuuucu

SEQ ID NO: 35233 - DNA, 21 bp, homo sapiens
gaaagccaagagatgtgccac

SEQ ID NO: 35234 - RNA, 21 nt, RNAi
aagccaagagaugugccacuu

SEQ ID NO: 35235 - RNA, 21 nt, RNAi
uuuucgguucucuacacggug

SEQ ID NO: 35236 - DNA, 21 bp, homo sapiens
gagatgtgccactcctgtaat

SEQ ID NO: 35237 - RNA, 21 nt, RNAi
gaugugccacuccuguaauuu

SEQ ID NO: 35238 - RNA, 21 nt, RNAi
uucuacacggugaggacauua

SEQ ID NO: 35239 - DNA, 21 bp, homo sapiens
gatgtgccactcctgtaatca

SEQ ID NO: 35240 - RNA, 21 nt, RNAi
ugugccacuccuguaaucauu

SEQ ID NO: 35241 - RNA, 21 nt, RNAi
uuacacggugaggacauuagu

SEQ ID NO: 35242 - DNA, 21 bp, homo sapiens
gaagccagaggaagaaggcag

SEQ ID NO: 35243 - RNA, 21 nt, RNAi
agccagaggaagaaggcaguu

SEQ ID NO: 35244 - RNA, 21 nt, RNAi
uuucggucuccuucuuccguc

SEQ ID NO: 35245 - DNA, 21 bp, homo sapiens
gaggaagaaggcagtgctcat

SEQ ID NO: 35246 - RNA, 21 nt, RNAi
ggaagaaggcagugcucauuu

SEQ ID NO: 35247 - RNA, 21 nt, RNAi
uuccuucuuccgucacgagua

SEQ ID NO: 35248 - DNA, 21 bp, homo sapiens
gaagaaggcagtgctcatcaa

SEQ ID NO: 35249 - RNA, 21 nt, RNAi
agaaggcagugcucaucaauu

SEQ ID NO: 35250 - RNA, 21 nt, RNAi
uuucuuccgucacgaguaguu

SEQ ID NO: 35251 - DNA, 21 bp, homo sapiens
gaaggcagtgctcatcaagat

SEQ ID NO: 35252 - RNA, 21 nt, RNAi
aggcagugcucaucaagauuu

SEQ ID NO: 35253 - RNA, 21 nt, RNAi
uuuccgucacgaguaguucua

SEQ ID NO: 35254 - DNA, 21 bp, homo sapiens
gacatactgtgccttgtatgc

SEQ ID NO: 35255 - RNA, 21 nt, RNAi
cauacugugccuuguaugcuu

SEQ ID NO: 35256 - RNA, 21 nt, RNAi
uuguaugacacggaacauacg

SEQ ID NO: 35257 - DNA, 21 bp, homo sapiens
gaggagcaagagctggagaag

SEQ ID NO: 35258 - RNA, 21 nt, RNAi
ggagcaagagcuggagaaguu

SEQ ID NO: 35259 - RNA, 21 nt, RNAi
uuccucguucucgaccucuuc

SEQ ID NO: 35260 - DNA, 21 bp, homo sapiens
gagcaagagctggagaagagt

SEQ ID NO: 35261 - RNA, 21 nt, RNAi
gcaagagcuggagaagaguuu

SEQ ID NO: 35262 - RNA, 21 nt, RNAi
uucguucucgaccucuucuca

SEQ ID NO: 35263 - DNA, 21 bp, homo sapiens
gagctggagaagagtatgaaa

SEQ ID NO: 35264 - RNA, 21 nt, RNAi
gcuggagaagaguaugaaauu

SEQ ID NO: 35265 - RNA, 21 nt, RNAi
uucgaccucuucucauacuuu

SEQ ID NO: 35266 - DNA, 21 bp, homo sapiens
gaggtggtggagatgcggaaa

SEQ ID NO: 35267 - RNA, 21 nt, RNAi
ggugguggagaugcggaaauu

SEQ ID NO: 35268 - RNA, 21 nt, RNAi
uuccaccaccucuacgccuuu

SEQ ID NO: 35269 - DNA, 21 bp, homo sapiens
gaagaattcaagaaacttgct

SEQ ID NO: 35270 - RNA, 21 nt, RNAi
agaauucaagaaacuugcuuu

SEQ ID NO: 35271 - RNA, 21 nt, RNAi
uuucuuaaguucuuugaacga

SEQ ID NO: 35272 - DNA, 21 bp, homo sapiens
gaattcaagaaacttgctctg

SEQ ID NO: 35273 - RNA, 21 nt, RNAi
auucaagaaacuugcucuguu

SEQ ID NO: 35274 - RNA, 21 nt, RNAi
uuuaaguucuuugaacgagac

SEQ ID NO: 35275 - DNA, 21 bp, homo sapiens
gaaacttgctctggctggaat

SEQ ID NO: 35276 - RNA, 21 nt, RNAi
aacuugcucuggcuggaauuu

SEQ ID NO: 35277 - RNA, 21 nt, RNAi
uuuugaacgagaccgaccuua

SEQ ID NO: 35278 - DNA, 21 bp, homo sapiens
gaagaaatcagtgagccaggt

SEQ ID NO: 35279 - RNA, 21 nt, RNAi
agaaaucagugagccagguuu

SEQ ID NO: 35280 - RNA, 21 nt, RNAi
uuucuuuagucacucggucca

SEQ ID NO: 35281 - DNA, 21 bp, homo sapiens
gaaatcagtgagccaggtcac

SEQ ID NO: 35282 - RNA, 21 nt, RNAi
aaucagugagccaggucacuu

SEQ ID NO: 35283 - RNA, 21 nt, RNAi
uuuuagucacucgguccagug

SEQ ID NO: 35284 - DNA, 21 bp, homo sapiens
gagccaggtcaccaaatcagt

SEQ ID NO: 35285 - RNA, 21 nt, RNAi
gccaggucaccaaaucaguuu

SEQ ID NO: 35286 - RNA, 21 nt, RNAi
uucgguccagugguuuaguca

SEQ ID NO: 35287 - DNA, 21 bp, homo sapiens
gacttccacttccgcacagat

SEQ ID NO: 35288 - RNA, 21 nt, RNAi
cuuccacuuccgcacagauuu

SEQ ID NO: 35289 - RNA, 21 nt, RNAi
uugaaggugaaggcgugucua

SEQ ID NO: 35290 - DNA, 21 bp, homo sapiens
gatgagcgaatcaaacaacat

SEQ ID NO: 35291 - RNA, 21 nt, RNAi
ugagcgaaucaaacaacauuu

SEQ ID NO: 35292 - RNA, 21 nt, RNAi
uuacucgcuuaguuuguugua

SEQ ID NO: 35293 - DNA, 21 bp, homo sapiens
gagcgaatcaaacaacatcct

SEQ ID NO: 35294 - RNA, 21 nt, RNAi
gcgaaucaaacaacauccuuu

SEQ ID NO: 35295 - RNA, 21 nt, RNAi
uucgcuuaguuuguuguagga

SEQ ID NO: 35296 - DNA, 21 bp, homo sapiens
gaatcaaacaacatcctaaga

SEQ ID NO: 35297 - RNA, 21 nt, RNAi
aucaaacaacauccuaagauu

SEQ ID NO: 35298 - RNA, 21 nt, RNAi
uuuaguuuguuguaggauucu

SEQ ID NO: 35299 - DNA, 21 bp, homo sapiens
gaaccaggaggaatataagga

SEQ ID NO: 35300 - RNA, 21 nt, RNAi
accaggaggaauauaaggauu

SEQ ID NO: 35301 - RNA, 21 nt, RNAi
uuugguccuccuuauauuccu

SEQ ID NO: 35302 - DNA, 21 bp, homo sapiens
gaggaatataaggaagtgaac

SEQ ID NO: 35303 - RNA, 21 nt, RNAi
ggaauauaaggaagugaacuu

SEQ ID NO: 35304 - RNA, 21 nt, RNAi
uuccuuauauuccuucacuug

SEQ ID NO: 35305 - DNA, 21 bp, homo sapiens
gaagtgaactttacatctgaa

SEQ ID NO: 35306 - RNA, 21 nt, RNAi
agugaacuuuacaucugaauu

SEQ ID NO: 35307 - RNA, 21 nt, RNAi
uuucacuugaaauguagacuu

SEQ ID NO: 35308 - DNA, 21 bp, homo sapiens
gaactttacatctgaactacg

SEQ ID NO: 35309 - RNA, 21 nt, RNAi
acuuuacaucugaacuacguu

SEQ ID NO: 35310 - RNA, 21 nt, RNAi
uuugaaauguagacuugaugc

SEQ ID NO: 35311 - DNA, 21 bp, homo sapiens
gaactacgaaagcatccttca

SEQ ID NO: 35312 - RNA, 21 nt, RNAi
acuacgaaagcauccuucauu

SEQ ID NO: 35313 - RNA, 21 nt, RNAi
uuugaugcuuucguaggaagu

SEQ ID NO: 35314 - DNA, 21 bp, homo sapiens
gaaagcatccttcatctcctg

SEQ ID NO: 35315 - RNA, 21 nt, RNAi
aagcauccuucaucuccuguu

SEQ ID NO: 35316 - RNA, 21 nt, RNAi
uuuucguaggaaguagaggac

SEQ ID NO: 35317 - DNA, 21 bp, homo sapiens
gatgtaccattgttaagcctt

SEQ ID NO: 35318 - RNA, 21 nt, RNAi
uguaccauuguuaagccuuuu

SEQ ID NO: 35319 - RNA, 21 nt, RNAi
uuacaugguaacaauucggaa

SEQ ID NO: 35320 - DNA, 21 bp, homo sapiens
gaaacagtttctacatatgtg

SEQ ID NO: 35321 - RNA, 21 nt, RNAi
aacaguuucuacauauguguu

SEQ ID NO: 35322 - RNA, 21 nt, RNAi
uuuugucaaagauguauacac

SEQ ID NO: 35323 - DNA, 21 bp, homo sapiens
gaagacttccataaacgaacc

SEQ ID NO: 35324 - RNA, 21 nt, RNAi
agacuuccauaaacgaaccuu

SEQ ID NO: 35325 - RNA, 21 nt, RNAi
uuucugaagguauuugcuugg

SEQ ID NO: 35326 - DNA, 21 bp, homo sapiens
gatatcatttgaggagcaaga

SEQ ID NO: 35327 - RNA, 21 nt, RNAi
uaucauuugaggagcaagauu

SEQ ID NO: 35328 - RNA, 21 nt, RNAi
uuauaguaaacuccucguucu

SEQ ID NO: 35329 - DNA, 21 bp, homo sapiens
gaggagcaagaaggatgatat

SEQ ID NO: 35330 - RNA, 21 nt, RNAi
ggagcaagaaggaugauauuu

SEQ ID NO: 35331 - RNA, 21 nt, RNAi
uuccucguucuuccuacuaua

SEQ ID NO: 35332 - DNA, 21 bp, homo sapiens
gagcaagaaggatgatattaa

SEQ ID NO: 35333 - RNA, 21 nt, RNAi
gcaagaaggaugauauuaauu

SEQ ID NO: 35334 - RNA, 21 nt, RNAi
uucguucuuccuacuauaauu

SEQ ID NO: 35335 - DNA, 21 bp, homo sapiens
gaaggatgatattaacctgtt

SEQ ID NO: 35336 - RNA, 21 nt, RNAi
aggaugauauuaaccuguuuu

SEQ ID NO: 35337 - RNA, 21 nt, RNAi
uuuccuacuauaauuggacaa

SEQ ID NO: 35338 - DNA, 21 bp, homo sapiens
gactcctgtactgcaaaccaa

SEQ ID NO: 35339 - RNA, 21 nt, RNAi
cuccuguacugcaaaccaauu

SEQ ID NO: 35340 - RNA, 21 nt, RNAi
uugaggacaugacguuugguu

SEQ ID NO: 35341 - DNA, 21 bp, homo sapiens
gaggctgaggagctcgagaaa

SEQ ID NO: 35342 - RNA, 21 nt, RNAi
ggcugaggagcucgagaaauu

SEQ ID NO: 35343 - RNA, 21 nt, RNAi
uuccgacuccucgagcucuuu

SEQ ID NO: 35344 - DNA, 21 bp, homo sapiens
gaggagctcgagaaattgcaa

SEQ ID NO: 35345 - RNA, 21 nt, RNAi
ggagcucgagaaauugcaauu

SEQ ID NO: 35346 - RNA, 21 nt, RNAi
uuccucgagcucuuuaacguu

SEQ ID NO: 35347 - DNA, 21 bp, homo sapiens
gagctcgagaaattgcaacaa

SEQ ID NO: 35348 - RNA, 21 nt, RNAi
gcucgagaaauugcaacaauu

SEQ ID NO: 35349 - RNA, 21 nt, RNAi
uucgagcucuuuaacguuguu

SEQ ID NO: 35350 - DNA, 21 bp, homo sapiens
gaaaccacctgtgaaaccacc

SEQ ID NO: 35351 - RNA, 21 nt, RNAi
aaccaccugugaaaccaccuu

SEQ ID NO: 35352 - RNA, 21 nt, RNAi
uuuugguggacacuuuggugg

SEQ ID NO: 35353 - DNA, 21 bp, homo sapiens
gagcctattggctttgatttg

SEQ ID NO: 35354 - RNA, 21 nt, RNAi
gccuauuggcuuugauuuguu

SEQ ID NO: 35355 - RNA, 21 nt, RNAi
uucggauaaccgaaacuaaac

SEQ ID NO: 35356 - DNA, 21 bp, homo sapiens
gaatccaggagcgagaatcaa

SEQ ID NO: 35357 - RNA, 21 nt, RNAi
auccaggagcgagaaucaauu

SEQ ID NO: 35358 - RNA, 21 nt, RNAi
uuuagguccucgcucuuaguu

SEQ ID NO: 35359 - DNA, 21 bp, homo sapiens
gagcgagaatcaaagaagaaa

SEQ ID NO: 35360 - RNA, 21 nt, RNAi
gcgagaaucaaagaagaaauu

SEQ ID NO: 35361 - RNA, 21 nt, RNAi
uucgcucuuaguuucuucuuu

SEQ ID NO: 35362 - DNA, 21 bp, homo sapiens
gaggatgaacactttgaattt

SEQ ID NO: 35363 - RNA, 21 nt, RNAi
ggaugaacacuuugaauuuuu

SEQ ID NO: 35364 - RNA, 21 nt, RNAi
uuccuacuugugaaacuuaaa

SEQ ID NO: 35365 - DNA, 21 bp, homo sapiens
gaacactttgaatttcattcc

SEQ ID NO: 35366 - RNA, 21 nt, RNAi
acacuuugaauuucauuccuu

SEQ ID NO: 35367 - RNA, 21 nt, RNAi
uuugugaaacuuaaaguaagg

SEQ ID NO: 35368 - DNA, 21 bp, homo sapiens
gaatttcattccagaccttgc

SEQ ID NO: 35369 - RNA, 21 nt, RNAi
auuucauuccagaccuugcuu

SEQ ID NO: 35370 - RNA, 21 nt, RNAi
uuuaaaguaaggucuggaacg

SEQ ID NO: 35371 - DNA, 21 bp, homo sapiens
gaaggtacttccaatcaccgt

SEQ ID NO: 35372 - RNA, 21 nt, RNAi
agguacuuccaaucaccguuu

SEQ ID NO: 35373 - RNA, 21 nt, RNAi
uuuccaugaagguuaguggca

SEQ ID NO: 35374 - DNA, 21 bp, homo sapiens
gaagaacagaattcgaatgcc

SEQ ID NO: 35375 - RNA, 21 nt, RNAi
agaacagaauucgaaugccuu

SEQ ID NO: 35376 - RNA, 21 nt, RNAi
uuucuugucuuaagcuuacgg

SEQ ID NO: 35377 - DNA, 21 bp, homo sapiens
gaagatgaggaagaggacgaa

SEQ ID NO: 35378 - RNA, 21 nt, RNAi
agaugaggaagaggacgaauu

SEQ ID NO: 35379 - RNA, 21 nt, RNAi
uuucuacuccuucuccugcuu

SEQ ID NO: 35380 - DNA, 21 bp, homo sapiens
gatgaggaagaggacgaaccg

SEQ ID NO: 35381 - RNA, 21 nt, RNAi
ugaggaagaggacgaaccguu

SEQ ID NO: 35382 - RNA, 21 nt, RNAi
uuacuccuucuccugcuuggc

SEQ ID NO: 35383 - DNA, 21 bp, homo sapiens
gaggaagaggacgaaccggta

SEQ ID NO: 35384 - RNA, 21 nt, RNAi
ggaagaggacgaaccgguauu

SEQ ID NO: 35385 - RNA, 21 nt, RNAi
uuccuucuccugcuuggccau

SEQ ID NO: 35386 - DNA, 21 bp, homo sapiens
gaagaggacgaaccggtagtg

SEQ ID NO: 35387 - RNA, 21 nt, RNAi
agaggacgaaccgguaguguu

SEQ ID NO: 35388 - RNA, 21 nt, RNAi
uuucuccugcuuggccaucac

SEQ ID NO: 35389 - DNA, 21 bp, homo sapiens
gaggacgaaccggtagtgata

SEQ ID NO: 35390 - RNA, 21 nt, RNAi
ggacgaaccgguagugauauu

SEQ ID NO: 35391 - RNA, 21 nt, RNAi
uuccugcuuggccaucacuau

SEQ ID NO: 35392 - DNA, 21 bp, homo sapiens
gaggcaagaactgtggaaata

SEQ ID NO: 35393 - RNA, 21 nt, RNAi
ggcaagaacuguggaaauauu

SEQ ID NO: 35394 - RNA, 21 nt, RNAi
uuccguucuugacaccuuuau

SEQ ID NO: 35395 - DNA, 21 bp, homo sapiens
gattctcgagacaaagaacgt

SEQ ID NO: 35396 - RNA, 21 nt, RNAi
uucucgagacaaagaacguuu

SEQ ID NO: 35397 - RNA, 21 nt, RNAi
uuaagagcucuguuucuugca

SEQ ID NO: 35398 - DNA, 21 bp, homo sapiens
gagacaaagaacgtcagttac

SEQ ID NO: 35399 - RNA, 21 nt, RNAi
gacaaagaacgucaguuacuu

SEQ ID NO: 35400 - RNA, 21 nt, RNAi
uucuguuucuugcagucaaug

SEQ ID NO: 35401 - DNA, 21 bp, homo sapiens
gacaaagaacgtcagttacag

SEQ ID NO: 35402 - RNA, 21 nt, RNAi
caaagaacgucaguuacaguu

SEQ ID NO: 35403 - RNA, 21 nt, RNAi
uuguuucuugcagucaauguc

SEQ ID NO: 35404 - DNA, 21 bp, homo sapiens
gaacgtcagttacagaaggag

SEQ ID NO: 35405 - RNA, 21 nt, RNAi
acgucaguuacagaaggaguu

SEQ ID NO: 35406 - RNA, 21 nt, RNAi
uuugcagucaaugucuuccuc

SEQ ID NO: 35407 - DNA, 21 bp, homo sapiens
gacaccattaacctgccagag

SEQ ID NO: 35408 - RNA, 21 nt, RNAi
caccauuaaccugccagaguu

SEQ ID NO: 35409 - RNA, 21 nt, RNAi
uugugguaauuggacggucuc

SEQ ID NO: 35410 - DNA, 21 bp, homo sapiens
gagaagaaggtaaagaatgtg

SEQ ID NO: 35411 - RNA, 21 nt, RNAi
gaagaagguaaagaauguguu

SEQ ID NO: 35412 - RNA, 21 nt, RNAi
uucuucuuccauuucuuacac

SEQ ID NO: 35413 - DNA, 21 bp, homo sapiens
gaagaaggtaaagaatgtgac

SEQ ID NO: 35414 - RNA, 21 nt, RNAi
agaagguaaagaaugugacuu

SEQ ID NO: 35415 - RNA, 21 nt, RNAi
uuucuuccauuucuuacacug

SEQ ID NO: 35416 - DNA, 21 bp, homo sapiens
gattgaacctttctgcttgga

SEQ ID NO: 35417 - RNA, 21 nt, RNAi
uugaaccuuucugcuuggauu

SEQ ID NO: 35418 - RNA, 21 nt, RNAi
uuaacuuggaaagacgaaccu

SEQ ID NO: 35419 - DNA, 21 bp, homo sapiens
gaacctttctgcttggagact

SEQ ID NO: 35420 - RNA, 21 nt, RNAi
accuuucugcuuggagacuuu

SEQ ID NO: 35421 - RNA, 21 nt, RNAi
uuuggaaagacgaaccucuga

SEQ ID NO: 35422 - DNA, 21 bp, homo sapiens
gagactgacagaagaggtgct

SEQ ID NO: 35423 - RNA, 21 nt, RNAi
gacugacagaagaggugcuuu

SEQ ID NO: 35424 - RNA, 21 nt, RNAi
uucugacugucuucuccacga

SEQ ID NO: 35425 - DNA, 21 bp, homo sapiens
gactgacagaagaggtgctct

SEQ ID NO: 35426 - RNA, 21 nt, RNAi
cugacagaagaggugcucuuu

SEQ ID NO: 35427 - RNA, 21 nt, RNAi
uugacugucuucuccacgaga

SEQ ID NO: 35428 - DNA, 21 bp, homo sapiens
gacagaagaggtgctctgaag

SEQ ID NO: 35429 - RNA, 21 nt, RNAi
cagaagaggugcucugaaguu

SEQ ID NO: 35430 - RNA, 21 nt, RNAi
uugucuucuccacgagacuuc

SEQ ID NO: 35431 - DNA, 21 bp, homo sapiens
gaagaggtgctctgaaggcac

SEQ ID NO: 35432 - RNA, 21 nt, RNAi
agaggugcucugaaggcacuu

SEQ ID NO: 35433 - RNA, 21 nt, RNAi
uuucuccacgagacuuccgug

SEQ ID NO: 35434 - DNA, 21 bp, homo sapiens
gaggtgctctgaaggcacaga

SEQ ID NO: 35435 - RNA, 21 nt, RNAi
ggugcucugaaggcacagauu

SEQ ID NO: 35436 - RNA, 21 nt, RNAi
uuccacgagacuuccgugucu

SEQ ID NO: 35437 - DNA, 21 bp, homo sapiens
gaaggcacagacttggaagca

SEQ ID NO: 35438 - RNA, 21 nt, RNAi
aggcacagacuuggaagcauu

SEQ ID NO: 35439 - RNA, 21 nt, RNAi
uuuccgugucugaaccuucgu

SEQ ID NO: 35440 - DNA, 21 bp, homo sapiens
gacttggaagcaccagctgga

SEQ ID NO: 35441 - RNA, 21 nt, RNAi
cuuggaagcaccagcuggauu

SEQ ID NO: 35442 - RNA, 21 nt, RNAi
uugaaccuucguggucgaccu

SEQ ID NO: 35443 - DNA, 21 bp, homo sapiens
gaagcaccagctggaagaaga

SEQ ID NO: 35444 - RNA, 21 nt, RNAi
agcaccagcuggaagaagauu

SEQ ID NO: 35445 - RNA, 21 nt, RNAi
uuucguggucgaccuucuucu

SEQ ID NO: 35446 - DNA, 21 bp, homo sapiens
gaagaagaactgagacagcag

SEQ ID NO: 35447 - RNA, 21 nt, RNAi
agaagaacugagacagcaguu

SEQ ID NO: 35448 - RNA, 21 nt, RNAi
uuucuucuugacucugucguc

SEQ ID NO: 35449 - DNA, 21 bp, homo sapiens
gaagaactgagacagcagaaa

SEQ ID NO: 35450 - RNA, 21 nt, RNAi
agaacugagacagcagaaauu

SEQ ID NO: 35451 - RNA, 21 nt, RNAi
uuucuugacucugucgucuuu

SEQ ID NO: 35452 - DNA, 21 bp, homo sapiens
gaactgagacagcagaaagaa

SEQ ID NO: 35453 - RNA, 21 nt, RNAi
acugagacagcagaaagaauu

SEQ ID NO: 35454 - RNA, 21 nt, RNAi
uuugacucugucgucuuucuu

SEQ ID NO: 35455 - DNA, 21 bp, homo sapiens
gagacagcagaaagaagcagc

SEQ ID NO: 35456 - RNA, 21 nt, RNAi
gacagcagaaagaagcagcuu

SEQ ID NO: 35457 - RNA, 21 nt, RNAi
uucugucgucuuucuucgucg

SEQ ID NO: 35458 - DNA, 21 bp, homo sapiens
gacagcagaaagaagcagctt

SEQ ID NO: 35459 - RNA, 21 nt, RNAi
cagcagaaagaagcagcuuuu

SEQ ID NO: 35460 - RNA, 21 nt, RNAi
uugucgucuuucuucgucgaa

SEQ ID NO: 35461 - DNA, 21 bp, homo sapiens
gaaagaagcagcttgtttcaa

SEQ ID NO: 35462 - RNA, 21 nt, RNAi
aagaagcagcuuguuucaauu

SEQ ID NO: 35463 - RNA, 21 nt, RNAi
uuuucuucgucgaacaaaguu

SEQ ID NO: 35464 - DNA, 21 bp, homo sapiens
gaagcagcttgtttcaaggct

SEQ ID NO: 35465 - RNA, 21 nt, RNAi
agcagcuuguuucaaggcuuu

SEQ ID NO: 35466 - RNA, 21 nt, RNAi
uuucgucgaacaaaguuccga

SEQ ID NO: 35467 - DNA, 21 bp, homo sapiens
gaaagagaagaaatcagttgc

SEQ ID NO: 35468 - RNA, 21 nt, RNAi
aagagaagaaaucaguugcuu

SEQ ID NO: 35469 - RNA, 21 nt, RNAi
uuuucucuucuuuagucaacg

SEQ ID NO: 35470 - DNA, 21 bp, homo sapiens
gagaagaaatcagttgctgag

SEQ ID NO: 35471 - RNA, 21 nt, RNAi
gaagaaaucaguugcugaguu

SEQ ID NO: 35472 - RNA, 21 nt, RNAi
uucuucuuuagucaacgacuc

SEQ ID NO: 35473 - DNA, 21 bp, homo sapiens
gagaagagagccaaagagcgg

SEQ ID NO: 35474 - RNA, 21 nt, RNAi
gaagagagccaaagagcgguu

SEQ ID NO: 35475 - RNA, 21 nt, RNAi
uucuucucucgguuucucgcc

SEQ ID NO: 35476 - DNA, 21 bp, homo sapiens
gaagagagccaaagagcggca

SEQ ID NO: 35477 - RNA, 21 nt, RNAi
agagagccaaagagcggcauu

SEQ ID NO: 35478 - RNA, 21 nt, RNAi
uuucucucgguuucucgccgu

SEQ ID NO: 35479 - DNA, 21 bp, homo sapiens
gagagccaaagagcggcagga

SEQ ID NO: 35480 - RNA, 21 nt, RNAi
gagccaaagagcggcaggauu

SEQ ID NO: 35481 - RNA, 21 nt, RNAi
uucucgguuucucgccguccu

SEQ ID NO: 35482 - DNA, 21 bp, homo sapiens
gagctggagaagagaatggct

SEQ ID NO: 35483 - RNA, 21 nt, RNAi
gcuggagaagagaauggcuuu

SEQ ID NO: 35484 - RNA, 21 nt, RNAi
uucgaccucuucucuuaccga

SEQ ID NO: 35485 - DNA, 21 bp, homo sapiens
gagaagagaatggctgaggta

SEQ ID NO: 35486 - RNA, 21 nt, RNAi
gaagagaauggcugagguauu

SEQ ID NO: 35487 - RNA, 21 nt, RNAi
uucuucucuuaccgacuccau

SEQ ID NO: 35488 - DNA, 21 bp, homo sapiens
gaagagaatggctgaggtaga

SEQ ID NO: 35489 - RNA, 21 nt, RNAi
agagaauggcugagguagauu

SEQ ID NO: 35490 - RNA, 21 nt, RNAi
uuucucuuaccgacuccaucu

SEQ ID NO: 35491 - DNA, 21 bp, homo sapiens
gagaatggctgaggtagaagc

SEQ ID NO: 35492 - RNA, 21 nt, RNAi
gaauggcugagguagaagcuu

SEQ ID NO: 35493 - RNA, 21 nt, RNAi
uucuuaccgacuccaucuucg

SEQ ID NO: 35494 - DNA, 21 bp, homo sapiens
gaggaggccagactacaggag

SEQ ID NO: 35495 - RNA, 21 nt, RNAi
ggaggccagacuacaggaguu

SEQ ID NO: 35496 - RNA, 21 nt, RNAi
uuccuccggucugauguccuc

SEQ ID NO: 35497 - DNA, 21 bp, homo sapiens
gaggccagactacaggaggaa

SEQ ID NO: 35498 - RNA, 21 nt, RNAi
ggccagacuacaggaggaauu

SEQ ID NO: 35499 - RNA, 21 nt, RNAi
uuccggucugauguccuccuu

SEQ ID NO: 35500 - DNA, 21 bp, homo sapiens
gactacaggaggaagagcaga

SEQ ID NO: 35501 - RNA, 21 nt, RNAi
cuacaggaggaagagcagauu

SEQ ID NO: 35502 - RNA, 21 nt, RNAi
uugauguccuccuucucgucu

SEQ ID NO: 35503 - DNA, 21 bp, homo sapiens
gagagaactggtgcataaggc

SEQ ID NO: 35504 - RNA, 21 nt, RNAi
gagaacuggugcauaaggcuu

SEQ ID NO: 35505 - RNA, 21 nt, RNAi
uucucuugaccacguauuccg

SEQ ID NO: 35506 - DNA, 21 bp, homo sapiens
gagaactggtgcataaggcaa

SEQ ID NO: 35507 - RNA, 21 nt, RNAi
gaacuggugcauaaggcaauu

SEQ ID NO: 35508 - RNA, 21 nt, RNAi
uucuugaccacguauuccguu

SEQ ID NO: 35509 - DNA, 21 bp, homo sapiens
gaactggtgcataaggcaaat

SEQ ID NO: 35510 - RNA, 21 nt, RNAi
acuggugcauaaggcaaauuu

SEQ ID NO: 35511 - RNA, 21 nt, RNAi
uuugaccacguauuccguuua

SEQ ID NO: 35512 - DNA, 21 bp, homo sapiens
gagataaagtcaagtgaccag

SEQ ID NO: 35513 - RNA, 21 nt, RNAi
gauaaagucaagugaccaguu

SEQ ID NO: 35514 - RNA, 21 nt, RNAi
uucuauuucaguucacugguc

SEQ ID NO: 35515 - DNA, 21 bp, homo sapiens
gataaagtcaagtgaccagcc

SEQ ID NO: 35516 - RNA, 21 nt, RNAi
uaaagucaagugaccagccuu

SEQ ID NO: 35517 - RNA, 21 nt, RNAi
uuauuucaguucacuggucgg

SEQ ID NO: 35518 - DNA, 21 bp, homo sapiens
gaccagcctctgactgtgcct

SEQ ID NO: 35519 - RNA, 21 nt, RNAi
ccagccucugacugugccuuu

SEQ ID NO: 35520 - RNA, 21 nt, RNAi
uuggucggagacugacacgga

SEQ ID NO: 35521 - DNA, 21 bp, homo sapiens
gattccactgctaaactcagc

SEQ ID NO: 35522 - RNA, 21 nt, RNAi
uuccacugcuaaacucagcuu

SEQ ID NO: 35523 - RNA, 21 nt, RNAi
uuaaggugacgauuugagucg

SEQ ID NO: 35524 - DNA, 21 bp, homo sapiens
gacctgctcttaacctcaaac

SEQ ID NO: 35525 - RNA, 21 nt, RNAi
ccugcucuuaaccucaaacuu

SEQ ID NO: 35526 - RNA, 21 nt, RNAi
uuggacgagaauuggaguuug

SEQ ID NO: 35527 - DNA, 21 bp, homo sapiens
gaccgtcttgctttgtcattg

SEQ ID NO: 35528 - RNA, 21 nt, RNAi
ccgucuugcuuugucauuguu

SEQ ID NO: 35529 - RNA, 21 nt, RNAi
uuggcagaacgaaacaguaac

SEQ ID NO: 35530 - DNA, 21 bp, homo sapiens
gagaaagcatacttgacaact

SEQ ID NO: 35531 - RNA, 21 nt, RNAi
gaaagcauacuugacaacuuu

SEQ ID NO: 35532 - RNA, 21 nt, RNAi
uucuuucguaugaacuguuga

SEQ ID NO: 35533 - DNA, 21 bp, homo sapiens
gaaagcatacttgacaactgt

SEQ ID NO: 35534 - RNA, 21 nt, RNAi
aagcauacuugacaacuguuu

SEQ ID NO: 35535 - RNA, 21 nt, RNAi
uuuucguaugaacuguugaca

SEQ ID NO: 35536 - DNA, 21 bp, homo sapiens
gacaactgtggactccagttt

SEQ ID NO: 35537 - RNA, 21 nt, RNAi
caacuguggacuccaguuuuu

SEQ ID NO: 35538 - RNA, 21 nt, RNAi
uuguugacaccugaggucaaa

SEQ ID NO: 35539 - DNA, 21 bp, homo sapiens
gagatgtaactcatgaatgtc

SEQ ID NO: 35540 - RNA, 21 nt, RNAi
gauguaacucaugaaugucuu

SEQ ID NO: 35541 - RNA, 21 nt, RNAi
uucuacauugaguacuuacag

SEQ ID NO: 35542 - DNA, 21 bp, homo sapiens
gatgtaactcatgaatgtctc

SEQ ID NO: 35543 - RNA, 21 nt, RNAi
uguaacucaugaaugucucuu

SEQ ID NO: 35544 - RNA, 21 nt, RNAi
uuacauugaguacuuacagag

SEQ ID NO: 35545 - DNA, 21 bp, homo sapiens
gaatgtctcgattagactcca

SEQ ID NO: 35546 - RNA, 21 nt, RNAi
augucucgauuagacuccauu

SEQ ID NO: 35547 - RNA, 21 nt, RNAi
uuuacagagcuaaucugaggu

SEQ ID NO: 35548 - DNA, 21 bp, homo sapiens
gattagactccatgtagttac

SEQ ID NO: 35549 - RNA, 21 nt, RNAi
uuagacuccauguaguuacuu

SEQ ID NO: 35550 - RNA, 21 nt, RNAi
uuaaucugagguacaucaaug

SEQ ID NO: 35551 - DNA, 21 bp, homo sapiens
gactccatgtagttacttcct

SEQ ID NO: 35552 - RNA, 21 nt, RNAi
cuccauguaguuacuuccuuu

SEQ ID NO: 35553 - RNA, 21 nt, RNAi
uugagguacaucaaugaagga

SEQ ID NO: 35554 - DNA, 21 bp, homo sapiens
gactagaatttagtctctgtg

SEQ ID NO: 35555 - RNA, 21 nt, RNAi
cuagaauuuagucucuguguu

SEQ ID NO: 35556 - RNA, 21 nt, RNAi
uugaucuuaaaucagagacac

SEQ ID NO: 35557 - DNA, 21 bp, homo sapiens
gaatttagtctctgtgtcagc

SEQ ID NO: 35558 - RNA, 21 nt, RNAi
auuuagucucugugucagcuu

SEQ ID NO: 35559 - RNA, 21 nt, RNAi
uuuaaaucagagacacagucg

SEQ ID NO: 35560 - DNA, 21 bp, homo sapiens
gatagagattaagtcatggtt

SEQ ID NO: 35561 - RNA, 21 nt, RNAi
uagagauuaagucaugguuuu

SEQ ID NO: 35562 - RNA, 21 nt, RNAi
uuaucucuaauucaguaccaa

SEQ ID NO: 35563 - DNA, 21 bp, homo sapiens
gaggaacaatcagtaaatcag

SEQ ID NO: 35564 - RNA, 21 nt, RNAi
ggaacaaucaguaaaucaguu

SEQ ID NO: 35565 - RNA, 21 nt, RNAi
uuccuuguuagucauuuaguc

SEQ ID NO: 35566 - DNA, 21 bp, homo sapiens
gattctgtcctcttctctgca

SEQ ID NO: 35567 - RNA, 21 nt, RNAi
uucuguccucuucucugcauu

SEQ ID NO: 35568 - RNA, 21 nt, RNAi
uuaagacaggagaagagacgu

SEQ ID NO: 35569 - DNA, 21 bp, homo sapiens
gaggaagaagactgcgtggat

SEQ ID NO: 35570 - RNA, 21 nt, RNAi
ggaagaagacugcguggauuu

SEQ ID NO: 35571 - RNA, 21 nt, RNAi
uuccuucuucugacgcaccua

SEQ ID NO: 35572 - DNA, 21 bp, homo sapiens
gaagaagactgcgtggattca

SEQ ID NO: 35573 - RNA, 21 nt, RNAi
agaagacugcguggauucauu

SEQ ID NO: 35574 - RNA, 21 nt, RNAi
uuucuucugacgcaccuaagu

SEQ ID NO: 35575 - DNA, 21 bp, homo sapiens
gaagactgcgtggattcatgg

SEQ ID NO: 35576 - RNA, 21 nt, RNAi
agacugcguggauucaugguu

SEQ ID NO: 35577 - RNA, 21 nt, RNAi
uuucugacgcaccuaaguacc

SEQ ID NO: 35578 - DNA, 21 bp, homo sapiens
gacctggcctggaataaatac

SEQ ID NO: 35579 - RNA, 21 nt, RNAi
ccuggccuggaauaaauacuu

SEQ ID NO: 35580 - RNA, 21 nt, RNAi
uuggaccggaccuuauuuaug

SEQ ID NO: 35581 - DNA, 21 bp, homo sapiens
tacatatttgccagacttcaa

SEQ ID NO: 35582 - RNA, 21 nt, RNAi
cauauuugccagacuucaauu

SEQ ID NO: 35583 - RNA, 21 nt, RNAi
uuguauaaacggucugaaguu

SEQ ID NO: 35584 - DNA, 21 bp, homo sapiens
tatttgccagacttcaagatt

SEQ ID NO: 35585 - RNA, 21 nt, RNAi
uuugccagacuucaagauuuu

SEQ ID NO: 35586 - RNA, 21 nt, RNAi
uuaaacggucugaaguucuaa

SEQ ID NO: 35587 - DNA, 21 bp, homo sapiens
taggcctgatagactgattaa

SEQ ID NO: 35588 - RNA, 21 nt, RNAi
ggccugauagacugauuaauu

SEQ ID NO: 35589 - RNA, 21 nt, RNAi
uuccggacuaucugacuaauu

SEQ ID NO: 35590 - DNA, 21 bp, homo sapiens
tagactgattaaaccacagaa

SEQ ID NO: 35591 - RNA, 21 nt, RNAi
gacugauuaaaccacagaauu

SEQ ID NO: 35592 - RNA, 21 nt, RNAi
uucugacuaauuuggugucuu

SEQ ID NO: 35593 - DNA, 21 bp, homo sapiens
taaaccacagaaggtgacctg

SEQ ID NO: 35594 - RNA, 21 nt, RNAi
aaccacagaaggugaccuguu

SEQ ID NO: 35595 - RNA, 21 nt, RNAi
uuuuggugucuuccacuggac

SEQ ID NO: 35596 - DNA, 21 bp, homo sapiens
tagattcatggtttgaggaga

SEQ ID NO: 35597 - RNA, 21 nt, RNAi
gauucaugguuugaggagauu

SEQ ID NO: 35598 - RNA, 21 nt, RNAi
uucuaaguaccaaacuccucu

SEQ ID NO: 35599 - DNA, 21 bp, homo sapiens
taatcttcagcaagctattgt

SEQ ID NO: 35600 - RNA, 21 nt, RNAi
aucuucagcaagcuauuguuu

SEQ ID NO: 35601 - RNA, 21 nt, RNAi
uuuagaagucguucgauaaca

SEQ ID NO: 35602 - DNA, 21 bp, homo sapiens
tattgtcacacctttgaaacc

SEQ ID NO: 35603 - RNA, 21 nt, RNAi
uugucacaccuuugaaaccuu

SEQ ID NO: 35604 - RNA, 21 nt, RNAi
uuaacaguguggaaacuuugg

SEQ ID NO: 35605 - DNA, 21 bp, homo sapiens
taggctttctgctcagaagga

SEQ ID NO: 35606 - RNA, 21 nt, RNAi
ggcuuucugcucagaaggauu

SEQ ID NO: 35607 - RNA, 21 nt, RNAi
uuccgaaagacgagucuuccu

SEQ ID NO: 35608 - DNA, 21 bp, homo sapiens
tagacatactgtgccttgtat

SEQ ID NO: 35609 - RNA, 21 nt, RNAi
gacauacugugccuuguauuu

SEQ ID NO: 35610 - RNA, 21 nt, RNAi
uucuguaugacacggaacaua

SEQ ID NO: 35611 - DNA, 21 bp, homo sapiens
tactgtgccttgtatgccacc

SEQ ID NO: 35612 - RNA, 21 nt, RNAi
cugugccuuguaugccaccuu

SEQ ID NO: 35613 - RNA, 21 nt, RNAi
uugacacggaacauacggugg

SEQ ID NO: 35614 - DNA, 21 bp, homo sapiens
tatgccacctgcaaagcagaa

SEQ ID NO: 35615 - RNA, 21 nt, RNAi
ugccaccugcaaagcagaauu

SEQ ID NO: 35616 - RNA, 21 nt, RNAi
uuacgguggacguuucgucuu

SEQ ID NO: 35617 - DNA, 21 bp, homo sapiens
tactgaggagcaagagctgga

SEQ ID NO: 35618 - RNA, 21 nt, RNAi
cugaggagcaagagcuggauu

SEQ ID NO: 35619 - RNA, 21 nt, RNAi
uugacuccucguucucgaccu

SEQ ID NO: 35620 - DNA, 21 bp, homo sapiens
taagaaccaggaggaatataa

SEQ ID NO: 35621 - RNA, 21 nt, RNAi
agaaccaggaggaauauaauu

SEQ ID NO: 35622 - RNA, 21 nt, RNAi
uuucuugguccuccuuauauu

SEQ ID NO: 35623 - DNA, 21 bp, homo sapiens
taaggaagtgaactttacatc

SEQ ID NO: 35624 - RNA, 21 nt, RNAi
aggaagugaacuuuacaucuu

SEQ ID NO: 35625 - RNA, 21 nt, RNAi
uuuccuucacuugaaauguag

SEQ ID NO: 35626 - DNA, 21 bp, homo sapiens
tacatctgaactacgaaagca

SEQ ID NO: 35627 - RNA, 21 nt, RNAi
caucugaacuacgaaagcauu

SEQ ID NO: 35628 - RNA, 21 nt, RNAi
uuguagacuugaugcuuucgu

SEQ ID NO: 35629 - DNA, 21 bp, homo sapiens
tacgaaagcatccttcatctc

SEQ ID NO: 35630 - RNA, 21 nt, RNAi
cgaaagcauccuucaucucuu

SEQ ID NO: 35631 - RNA, 21 nt, RNAi
uugcuuucguaggaaguagag

SEQ ID NO: 35632 - DNA, 21 bp, homo sapiens
taccattgttaagcctttcaa

SEQ ID NO: 35633 - RNA, 21 nt, RNAi
ccauuguuaagccuuucaauu

SEQ ID NO: 35634 - RNA, 21 nt, RNAi
uugguaacaauucggaaaguu

SEQ ID NO: 35635 - DNA, 21 bp, homo sapiens
taacagatatcatttgaggag

SEQ ID NO: 35636 - RNA, 21 nt, RNAi
acagauaucauuugaggaguu

SEQ ID NO: 35637 - RNA, 21 nt, RNAi
uuugucuauaguaaacuccuc

SEQ ID NO: 35638 - DNA, 21 bp, homo sapiens
tatcatttgaggagcaagaag

SEQ ID NO: 35639 - RNA, 21 nt, RNAi
ucauuugaggagcaagaaguu

SEQ ID NO: 35640 - RNA, 21 nt, RNAi
uuaguaaacuccucguucuuc

SEQ ID NO: 35641 - DNA, 21 bp, homo sapiens
tactgcaaaccaaacaccgtg

SEQ ID NO: 35642 - RNA, 21 nt, RNAi
cugcaaaccaaacaccguguu

SEQ ID NO: 35643 - RNA, 21 nt, RNAi
uugacguuugguuuguggcac

SEQ ID NO: 35644 - DNA, 21 bp, homo sapiens
tacagcagagctggaggctga

SEQ ID NO: 35645 - RNA, 21 nt, RNAi
cagcagagcuggaggcugauu

SEQ ID NO: 35646 - RNA, 21 nt, RNAi
uugucgucucgaccuccgacu

SEQ ID NO: 35647 - DNA, 21 bp, homo sapiens
tacaaattcaaagcacgtgaa

SEQ ID NO: 35648 - RNA, 21 nt, RNAi
caaauucaaagcacgugaauu

SEQ ID NO: 35649 - RNA, 21 nt, RNAi
uuguuuaaguuucgugcacuu

SEQ ID NO: 35650 - DNA, 21 bp, homo sapiens
taacctgccagagaagaaggt

SEQ ID NO: 35651 - RNA, 21 nt, RNAi
accugccagagaagaagguuu

SEQ ID NO: 35652 - RNA, 21 nt, RNAi
uuuggacggucucuucuucca

SEQ ID NO: 35653 - DNA, 21 bp, homo sapiens
tactgagaagagagccaaaga

SEQ ID NO: 35654 - RNA, 21 nt, RNAi
cugagaagagagccaaagauu

SEQ ID NO: 35655 - RNA, 21 nt, RNAi
uugacucuucucucgguuucu

SEQ ID NO: 35656 - DNA, 21 bp, homo sapiens
tacggagagaactggtgcata

SEQ ID NO: 35657 - RNA, 21 nt, RNAi
cggagagaacuggugcauauu

SEQ ID NO: 35658 - RNA, 21 nt, RNAi
uugccucucuugaccacguau

SEQ ID NO: 35659 - DNA, 21 bp, homo sapiens
taaggcaaatccaatacgcaa

SEQ ID NO: 35660 - RNA, 21 nt, RNAi
aggcaaauccaauacgcaauu

SEQ ID NO: 35661 - RNA, 21 nt, RNAi
uuuccguuuagguuaugcguu

SEQ ID NO: 35662 - DNA, 21 bp, homo sapiens
taaagtcaagtgaccagcctc

SEQ ID NO: 35663 - RNA, 21 nt, RNAi
aagucaagugaccagccucuu

SEQ ID NO: 35664 - RNA, 21 nt, RNAi
uuuucaguucacuggucggag

SEQ ID NO: 35665 - DNA, 21 bp, homo sapiens
taaactcagctgtgagctgcg

SEQ ID NO: 35666 - RNA, 21 nt, RNAi
aacucagcugugagcugcguu

SEQ ID NO: 35667 - RNA, 21 nt, RNAi
uuuugagucgacacucgacgc

SEQ ID NO: 35668 - DNA, 21 bp, homo sapiens
taacctcaaacctaggaccgt

SEQ ID NO: 35669 - RNA, 21 nt, RNAi
accucaaaccuaggaccguuu

SEQ ID NO: 35670 - RNA, 21 nt, RNAi
uuuggaguuuggauccuggca

SEQ ID NO: 35671 - DNA, 21 bp, homo sapiens
taggaccgtcttgctttgtca

SEQ ID NO: 35672 - RNA, 21 nt, RNAi
ggaccgucuugcuuugucauu

SEQ ID NO: 35673 - RNA, 21 nt, RNAi
uuccuggcagaacgaaacagu

SEQ ID NO: 35674 - DNA, 21 bp, homo sapiens
tacttgacaactgtggactcc

SEQ ID NO: 35675 - RNA, 21 nt, RNAi
cuugacaacuguggacuccuu

SEQ ID NO: 35676 - RNA, 21 nt, RNAi
uugaacuguugacaccugagg

SEQ ID NO: 35677 - DNA, 21 bp, homo sapiens
taactcatgaatgtctcgatt

SEQ ID NO: 35678 - RNA, 21 nt, RNAi
acucaugaaugucucgauuuu

SEQ ID NO: 35679 - RNA, 21 nt, RNAi
uuugaguacuuacagagcuaa

SEQ ID NO: 35680 - DNA, 21 bp, homo sapiens
tagactccatgtagttacttc

SEQ ID NO: 35681 - RNA, 21 nt, RNAi
gacuccauguaguuacuucuu

SEQ ID NO: 35682 - RNA, 21 nt, RNAi
uucugagguacaucaaugaag

SEQ ID NO: 35683 - DNA, 21 bp, homo sapiens
tacttcctttaaaccatcagc

SEQ ID NO: 35684 - RNA, 21 nt, RNAi
cuuccuuuaaaccaucagcuu

SEQ ID NO: 35685 - RNA, 21 nt, RNAi
uugaaggaaauuugguagucg

SEQ ID NO: 35686 - DNA, 21 bp, homo sapiens
tagaatttagtctctgtgtca

SEQ ID NO: 35687 - RNA, 21 nt, RNAi
gaauuuagucucugugucauu

SEQ ID NO: 35688 - RNA, 21 nt, RNAi
uucuuaaaucagagacacagu

SEQ ID NO: 35689 - DNA, 21 bp, homo sapiens
tagtctctgtgtcagcacagt

SEQ ID NO: 35690 - RNA, 21 nt, RNAi
gucucugugucagcacaguuu

SEQ ID NO: 35691 - RNA, 21 nt, RNAi
uucagagacacagucguguca

SEQ ID NO: 35692 - DNA, 21 bp, homo sapiens
taagtcatggtttaaatgagg

SEQ ID NO: 35693 - RNA, 21 nt, RNAi
agucaugguuuaaaugagguu

SEQ ID NO: 35694 - RNA, 21 nt, RNAi
uuucaguaccaaauuuacucc

SEQ ID NO: 35695 - DNA, 21 bp, homo sapiens
taaatcagattctgtcctctt

SEQ ID NO: 35696 - RNA, 21 nt, RNAi
aaucagauucuguccucuuuu

SEQ ID NO: 35697 - RNA, 21 nt, RNAi
uuuuagucuaagacaggagaa

SEQ ID NO: 35698 - DNA, 21 bp, homo sapiens
taaggcacgttctttccttac

SEQ ID NO: 35699 - RNA, 21 nt, RNAi
aggcacguucuuuccuuacuu

SEQ ID NO: 35700 - RNA, 21 nt, RNAi
uuuccgugcaagaaaggaaug

SEQ ID NO: 35701 - DNA, 21 bp, homo sapiens
tactggtgctgataacaacag

SEQ ID NO: 35702 - RNA, 21 nt, RNAi
cuggugcugauaacaacaguu

SEQ ID NO: 35703 - RNA, 21 nt, RNAi
uugaccacgacuauuguuguc

SEQ ID NO: 35704 - DNA, 21 bp, homo sapiens
taagacctggcctggaataaa

SEQ ID NO: 35705 - RNA, 21 nt, RNAi
agaccuggccuggaauaaauu

SEQ ID NO: 35706 - RNA, 21 nt, RNAi
uuucuggaccggaccuuauuu

SEQ ID NO: 35707 - DNA, 21 bp, homo sapiens
aagctattgtcacacctttga

SEQ ID NO: 35708 - RNA, 21 nt, RNAi
gcuauugucacaccuuugauu

SEQ ID NO: 35709 - RNA, 21 nt, RNAi
uucgauaacaguguggaaacu

SEQ ID NO: 35710 - DNA, 21 bp, homo sapiens
aaccagttgacaacacttact

SEQ ID NO: 35711 - RNA, 21 nt, RNAi
ccaguugacaacacuuacuuu

SEQ ID NO: 35712 - RNA, 21 nt, RNAi
uuggucaacuguugugaauga

SEQ ID NO: 35713 - DNA, 21 bp, homo sapiens
aacacttactacaaagaggca

SEQ ID NO: 35714 - RNA, 21 nt, RNAi
cacuuacuacaaagaggcauu

SEQ ID NO: 35715 - RNA, 21 nt, RNAi
uugugaaugauguuucuccgu

SEQ ID NO: 35716 - DNA, 21 bp, homo sapiens
aacaatccattccgtcaaatg

SEQ ID NO: 35717 - RNA, 21 nt, RNAi
caauccauuccgucaaauguu

SEQ ID NO: 35718 - RNA, 21 nt, RNAi
uuguuagguaaggcaguuuac

SEQ ID NO: 35719 - DNA, 21 bp, homo sapiens
aatccattccgtcaaatgctt

SEQ ID NO: 35720 - RNA, 21 nt, RNAi
uccauuccgucaaaugcuuuu

SEQ ID NO: 35721 - RNA, 21 nt, RNAi
uuagguaaggcaguuuacgaa

SEQ ID NO: 35722 - DNA, 21 bp, homo sapiens
aagttgaggcagccatatcaa

SEQ ID NO: 35723 - RNA, 21 nt, RNAi
guugaggcagccauaucaauu

SEQ ID NO: 35724 - RNA, 21 nt, RNAi
uucaacuccgucgguauaguu

SEQ ID NO: 35725 - DNA, 21 bp, homo sapiens
aagagatgtgccactcctgta

SEQ ID NO: 35726 - RNA, 21 nt, RNAi
gagaugugccacuccuguauu

SEQ ID NO: 35727 - RNA, 21 nt, RNAi
uucucuacacggugaggacau

SEQ ID NO: 35728 - DNA, 21 bp, homo sapiens
aaggaagtgaactttacatct

SEQ ID NO: 35729 - RNA, 21 nt, RNAi
ggaagugaacuuuacaucuuu

SEQ ID NO: 35730 - RNA, 21 nt, RNAi
uuccuucacuugaaauguaga

SEQ ID NO: 35731 - DNA, 21 bp, homo sapiens
aagtgaactttacatctgaac

SEQ ID NO: 35732 - RNA, 21 nt, RNAi
gugaacuuuacaucugaacuu

SEQ ID NO: 35733 - RNA, 21 nt, RNAi
uucacuugaaauguagacuug

SEQ ID NO: 35734 - DNA, 21 bp, homo sapiens
aaacagtttctacatatgtgc

SEQ ID NO: 35735 - RNA, 21 nt, RNAi
acaguuucuacauaugugcuu

SEQ ID NO: 35736 - RNA, 21 nt, RNAi
uuugucaaagauguauacacg

SEQ ID NO: 35737 - DNA, 21 bp, homo sapiens
aacagtttctacatatgtgcc

SEQ ID NO: 35738 - RNA, 21 nt, RNAi
caguuucuacauaugugccuu

SEQ ID NO: 35739 - RNA, 21 nt, RNAi
uugucaaagauguauacacgg

SEQ ID NO: 35740 - DNA, 21 bp, homo sapiens
aagttgaagacttccataaac

SEQ ID NO: 35741 - RNA, 21 nt, RNAi
guugaagacuuccauaaacuu

SEQ ID NO: 35742 - RNA, 21 nt, RNAi
uucaacuucugaagguauuug

SEQ ID NO: 35743 - DNA, 21 bp, homo sapiens
aaattcaaagcacgtgaactt

SEQ ID NO: 35744 - RNA, 21 nt, RNAi
auucaaagcacgugaacuuuu

SEQ ID NO: 35745 - RNA, 21 nt, RNAi
uuuaaguuucgugcacuugaa

SEQ ID NO: 35746 - DNA, 21 bp, homo sapiens
aattcaaagcacgtgaacttg

SEQ ID NO: 35747 - RNA, 21 nt, RNAi
uucaaagcacgugaacuuguu

SEQ ID NO: 35748 - RNA, 21 nt, RNAi
uuaaguuucgugcacuugaac

SEQ ID NO: 35749 - DNA, 21 bp, homo sapiens
aatccaggagcgagaatcaaa

SEQ ID NO: 35750 - RNA, 21 nt, RNAi
uccaggagcgagaaucaaauu

SEQ ID NO: 35751 - RNA, 21 nt, RNAi
uuagguccucgcucuuaguuu

SEQ ID NO: 35752 - DNA, 21 bp, homo sapiens
aaacagaggatgaacactttg

SEQ ID NO: 35753 - RNA, 21 nt, RNAi
acagaggaugaacacuuuguu

SEQ ID NO: 35754 - RNA, 21 nt, RNAi
uuugucuccuacuugugaaac

SEQ ID NO: 35755 - DNA, 21 bp, homo sapiens
aacagaggatgaacactttga

SEQ ID NO: 35756 - RNA, 21 nt, RNAi
cagaggaugaacacuuugauu

SEQ ID NO: 35757 - RNA, 21 nt, RNAi
uugucuccuacuugugaaacu

SEQ ID NO: 35758 - DNA, 21 bp, homo sapiens
aaagaaggtacttccaatcac

SEQ ID NO: 35759 - RNA, 21 nt, RNAi
agaagguacuuccaaucacuu

SEQ ID NO: 35760 - RNA, 21 nt, RNAi
uuucuuccaugaagguuagug

SEQ ID NO: 35761 - DNA, 21 bp, homo sapiens
aagaaggtacttccaatcacc

SEQ ID NO: 35762 - RNA, 21 nt, RNAi
gaagguacuuccaaucaccuu

SEQ ID NO: 35763 - RNA, 21 nt, RNAi
uucuuccaugaagguuagugg

SEQ ID NO: 35764 - DNA, 21 bp, homo sapiens
aaagctcaacctgtgccacat

SEQ ID NO: 35765 - RNA, 21 nt, RNAi
agcucaaccugugccacauuu

SEQ ID NO: 35766 - RNA, 21 nt, RNAi
uuucgaguuggacacggugua

SEQ ID NO: 35767 - DNA, 21 bp, homo sapiens
aagctcaacctgtgccacatt

SEQ ID NO: 35768 - RNA, 21 nt, RNAi
gcucaaccugugccacauuuu

SEQ ID NO: 35769 - RNA, 21 nt, RNAi
uucgaguuggacacgguguaa

SEQ ID NO: 35770 - DNA, 21 bp, homo sapiens
aaagaacgtcagttacagaag

SEQ ID NO: 35771 - RNA, 21 nt, RNAi
agaacgucaguuacagaaguu

SEQ ID NO: 35772 - RNA, 21 nt, RNAi
uuucuugcagucaaugucuuc

SEQ ID NO: 35773 - DNA, 21 bp, homo sapiens
aactggtgcataaggcaaatc

SEQ ID NO: 35774 - RNA, 21 nt, RNAi
cuggugcauaaggcaaaucuu

SEQ ID NO: 35775 - RNA, 21 nt, RNAi
uugaccacguauuccguuuag

SEQ ID NO: 35776 - DNA, 21 bp, homo sapiens
aaggcaaatccaatacgcaag

SEQ ID NO: 35777 - RNA, 21 nt, RNAi
ggcaaauccaauacgcaaguu

SEQ ID NO: 35778 - RNA, 21 nt, RNAi
uuccguuuagguuaugcguuc

SEQ ID NO: 35779 - DNA, 21 bp, homo sapiens
aaatccaatacgcaagtacca

SEQ ID NO: 35780 - RNA, 21 nt, RNAi
auccaauacgcaaguaccauu

SEQ ID NO: 35781 - RNA, 21 nt, RNAi
uuuagguuaugcguucauggu

SEQ ID NO: 35782 - DNA, 21 bp, homo sapiens
aatccaatacgcaagtaccag

SEQ ID NO: 35783 - RNA, 21 nt, RNAi
uccaauacgcaaguaccaguu

SEQ ID NO: 35784 - RNA, 21 nt, RNAi
uuagguuaugcguucaugguc

SEQ ID NO: 35785 - DNA, 21 bp, homo sapiens
cagcaagctattgtcacacct

SEQ ID NO: 35786 - RNA, 21 nt, RNAi
gcaagcuauugucacaccuuu

SEQ ID NO: 35787 - RNA, 21 nt, RNAi
uucguucgauaacagugugga

SEQ ID NO: 35788 - DNA, 21 bp, homo sapiens
caagctattgtcacacctttg

SEQ ID NO: 35789 - RNA, 21 nt, RNAi
agcuauugucacaccuuuguu

SEQ ID NO: 35790 - RNA, 21 nt, RNAi
uuucgauaacaguguggaaac

SEQ ID NO: 35791 - DNA, 21 bp, homo sapiens
cacacctttgaaaccagttga

SEQ ID NO: 35792 - RNA, 21 nt, RNAi
caccuuugaaaccaguugauu

SEQ ID NO: 35793 - RNA, 21 nt, RNAi
uuguggaaacuuuggucaacu

SEQ ID NO: 35794 - DNA, 21 bp, homo sapiens
cagttgacaacacttactaca

SEQ ID NO: 35795 - RNA, 21 nt, RNAi
guugacaacacuuacuacauu

SEQ ID NO: 35796 - RNA, 21 nt, RNAi
uucaacuguugugaaugaugu

SEQ ID NO: 35797 - DNA, 21 bp, homo sapiens
caatccattccgtcaaatgct

SEQ ID NO: 35798 - RNA, 21 nt, RNAi
auccauuccgucaaaugcuuu

SEQ ID NO: 35799 - RNA, 21 nt, RNAi
uuuagguaaggcaguuuacga

SEQ ID NO: 35800 - DNA, 21 bp, homo sapiens
cattccgtcaaatgcttgttc

SEQ ID NO: 35801 - RNA, 21 nt, RNAi
uuccgucaaaugcuuguucuu

SEQ ID NO: 35802 - RNA, 21 nt, RNAi
uuaaggcaguuuacgaacaag

SEQ ID NO: 35803 - DNA, 21 bp, homo sapiens
cacagatgagcgaatcaaaca

SEQ ID NO: 35804 - RNA, 21 nt, RNAi
cagaugagcgaaucaaacauu

SEQ ID NO: 35805 - RNA, 21 nt, RNAi
uugucuacucgcuuaguuugu

SEQ ID NO: 35806 - DNA, 21 bp, homo sapiens
cagatgagcgaatcaaacaac

SEQ ID NO: 35807 - RNA, 21 nt, RNAi
gaugagcgaaucaaacaacuu

SEQ ID NO: 35808 - RNA, 21 nt, RNAi
uucuacucgcuuaguuuguug

SEQ ID NO: 35809 - DNA, 21 bp, homo sapiens
caaattcaaagcacgtgaact

SEQ ID NO: 35810 - RNA, 21 nt, RNAi
aauucaaagcacgugaacuuu

SEQ ID NO: 35811 - RNA, 21 nt, RNAi
uuuuaaguuucgugcacuuga

SEQ ID NO: 35812 - DNA, 21 bp, homo sapiens
caaagcacgtgaacttgatcc

SEQ ID NO: 35813 - RNA, 21 nt, RNAi
aagcacgugaacuugauccuu

SEQ ID NO: 35814 - RNA, 21 nt, RNAi
uuuucgugcacuugaacuagg

SEQ ID NO: 35815 - DNA, 21 bp, homo sapiens
caggagcgagaatcaaagaag

SEQ ID NO: 35816 - RNA, 21 nt, RNAi
ggagcgagaaucaaagaaguu

SEQ ID NO: 35817 - RNA, 21 nt, RNAi
uuccucgcucuuaguuucuuc

SEQ ID NO: 35818 - DNA, 21 bp, homo sapiens
cagaggatgaacactttgaat

SEQ ID NO: 35819 - RNA, 21 nt, RNAi
gaggaugaacacuuugaauuu

SEQ ID NO: 35820 - RNA, 21 nt, RNAi
uucuccuacuugugaaacuua

SEQ ID NO: 35821 - DNA, 21 bp, homo sapiens
caaagaacgtcagttacagaa

SEQ ID NO: 35822 - RNA, 21 nt, RNAi
aagaacgucaguuacagaauu

SEQ ID NO: 35823 - RNA, 21 nt, RNAi
uuuucuugcagucaaugucuu

SEQ ID NO: 35824 - DNA, 21 bp, homo sapiens
caaatccaatacgcaagtacc

SEQ ID NO: 35825 - RNA, 21 nt, RNAi
aauccaauacgcaaguaccuu

SEQ ID NO: 35826 - RNA, 21 nt, RNAi
uuuuagguuaugcguucaugg

SEQ ID NO: 35827 - DNA, 21 bp, homo sapiens
gagaaaggctaatcttcagca

SEQ ID NO: 35828 - RNA, 21 nt, RNAi
gaaaggcuaaucuucagcauu

SEQ ID NO: 35829 - RNA, 21 nt, RNAi
uucuuuccgauuagaagucgu

SEQ ID NO: 35830 - DNA, 21 bp, homo sapiens
gacaacacttactacaaagag

SEQ ID NO: 35831 - RNA, 21 nt, RNAi
caacacuuacuacaaagaguu

SEQ ID NO: 35832 - RNA, 21 nt, RNAi
uuguugugaaugauguuucuc

SEQ ID NO: 35833 - DNA, 21 bp, homo sapiens
gaacaatccattccgtcaaat

SEQ ID NO: 35834 - RNA, 21 nt, RNAi
acaauccauuccgucaaauuu

SEQ ID NO: 35835 - RNA, 21 nt, RNAi
uuuguuagguaaggcaguuua

SEQ ID NO: 35836 - DNA, 21 bp, homo sapiens
gagatgtgccactcctgtaat

SEQ ID NO: 35837 - RNA, 21 nt, RNAi
gaugugccacuccuguaauuu

SEQ ID NO: 35838 - RNA, 21 nt, RNAi
uucuacacggugaggacauua

SEQ ID NO: 35839 - DNA, 21 bp, homo sapiens
gatgtgccactcctgtaatca

SEQ ID NO: 35840 - RNA, 21 nt, RNAi
ugugccacuccuguaaucauu

SEQ ID NO: 35841 - RNA, 21 nt, RNAi
uuacacggugaggacauuagu

SEQ ID NO: 35842 - DNA, 21 bp, homo sapiens
gatgagcgaatcaaacaacat

SEQ ID NO: 35843 - RNA, 21 nt, RNAi
ugagcgaaucaaacaacauuu

SEQ ID NO: 35844 - RNA, 21 nt, RNAi
uuacucgcuuaguuuguugua

SEQ ID NO: 35845 - DNA, 21 bp, homo sapiens
gaactacgaaagcatccttca

SEQ ID NO: 35846 - RNA, 21 nt, RNAi
acuacgaaagcauccuucauu

SEQ ID NO: 35847 - RNA, 21 nt, RNAi
uuugaugcuuucguaggaagu

SEQ ID NO: 35848 - DNA, 21 bp, homo sapiens
gaagacttccataaacgaacc

SEQ ID NO: 35849 - RNA, 21 nt, RNAi
agacuuccauaaacgaaccuu

SEQ ID NO: 35850 - RNA, 21 nt, RNAi
uuucugaagguauuugcuugg

SEQ ID NO: 35851 - DNA, 21 bp, homo sapiens
gaggagctcgagaaattgcaa

SEQ ID NO: 35852 - RNA, 21 nt, RNAi
ggagcucgagaaauugcaauu

SEQ ID NO: 35853 - RNA, 21 nt, RNAi
uuccucgagcucuuuaacguu

SEQ ID NO: 35854 - DNA, 21 bp, homo sapiens
gaagaacagaattcgaatgcc

SEQ ID NO: 35855 - RNA, 21 nt, RNAi
agaacagaauucgaaugccuu

SEQ ID NO: 35856 - RNA, 21 nt, RNAi
uuucuugucuuaagcuuacgg

SEQ ID NO: 35857 - DNA, 21 bp, homo sapiens
gaggacgaaccggtagtgata

SEQ ID NO: 35858 - RNA, 21 nt, RNAi
ggacgaaccgguagugauauu

SEQ ID NO: 35859 - RNA, 21 nt, RNAi
uuccugcuuggccaucacuau

SEQ ID NO: 35860 - DNA, 21 bp, homo sapiens
gattctcgagacaaagaacgt

SEQ ID NO: 35861 - RNA, 21 nt, RNAi
uucucgagacaaagaacguuu

SEQ ID NO: 35862 - RNA, 21 nt, RNAi
uuaagagcucuguuucuugca

SEQ ID NO: 35863 - DNA, 21 bp, homo sapiens
gagacaaagaacgtcagttac

SEQ ID NO: 35864 - RNA, 21 nt, RNAi
gacaaagaacgucaguuacuu

SEQ ID NO: 35865 - RNA, 21 nt, RNAi
uucuguuucuugcagucaaug

SEQ ID NO: 35866 - DNA, 21 bp, homo sapiens
gacaaagaacgtcagttacag

SEQ ID NO: 35867 - RNA, 21 nt, RNAi
caaagaacgucaguuacaguu

SEQ ID NO: 35868 - RNA, 21 nt, RNAi
uuguuucuugcagucaauguc

SEQ ID NO: 35869 - DNA, 21 bp, homo sapiens
gagagaactggtgcataaggc

SEQ ID NO: 35870 - RNA, 21 nt, RNAi
gagaacuggugcauaaggcuu

SEQ ID NO: 35871 - RNA, 21 nt, RNAi
uucucuugaccacguauuccg

SEQ ID NO: 35872 - DNA, 21 bp, homo sapiens
gagaactggtgcataaggcaa

SEQ ID NO: 35873 - RNA, 21 nt, RNAi
gaacuggugcauaaggcaauu

SEQ ID NO: 35874 - RNA, 21 nt, RNAi
uucuugaccacguauuccguu

SEQ ID NO: 35875 - DNA, 21 bp, homo sapiens
gaactggtgcataaggcaaat

SEQ ID NO: 35876 - RNA, 21 nt, RNAi
acuggugcauaaggcaaauuu

SEQ ID NO: 35877 - RNA, 21 nt, RNAi
uuugaccacguauuccguuua

SEQ ID NO: 35878 - DNA, 21 bp, homo sapiens
tagattcatggtttgaggaga

SEQ ID NO: 35879 - RNA, 21 nt, RNAi
gauucaugguuugaggagauu

SEQ ID NO: 35880 - RNA, 21 nt, RNAi
uucuaaguaccaaacuccucu

SEQ ID NO: 35881 - DNA, 21 bp, homo sapiens
tagacatactgtgccttgtat

SEQ ID NO: 35882 - RNA, 21 nt, RNAi
gacauacugugccuuguauuu

SEQ ID NO: 35883 - RNA, 21 nt, RNAi
uucuguaugacacggaacaua

SEQ ID NO: 35884 - DNA, 21 bp, homo sapiens
tacatctgaactacgaaagca

SEQ ID NO: 35885 - RNA, 21 nt, RNAi
caucugaacuacgaaagcauu

SEQ ID NO: 35886 - RNA, 21 nt, RNAi
uuguagacuugaugcuuucgu

SEQ ID NO: 35887 - DNA, 21 bp, homo sapiens
tacaaattcaaagcacgtgaa

SEQ ID NO: 35888 - RNA, 21 nt, RNAi
caaauucaaagcacgugaauu

SEQ ID NO: 35889 - RNA, 21 nt, RNAi
uuguuuaaguuucgugcacuu

SEQ ID NO: 35890 - DNA, 21 bp, homo sapiens
taaggcaaatccaatacgcaa

SEQ ID NO: 35891 - RNA, 21 nt, RNAi
aggcaaauccaauacgcaauu

SEQ ID NO: 35892 - RNA, 21 nt, RNAi
uuuccguuuagguuaugcguu

SEQ ID NO: 35893 - DNA, 21 bp, homo sapiens
aaagccggatacttggaccag

SEQ ID NO: 35894 - RNA, 21 nt, RNAi
agccggauacuuggaccaguu

SEQ ID NO: 35895 - RNA, 21 nt, RNAi
uuucggccuaugaaccugguc

SEQ ID NO: 35896 - DNA, 21 bp, homo sapiens
aagccggatacttggaccagc

SEQ ID NO: 35897 - RNA, 21 nt, RNAi
gccggauacuuggaccagcuu

SEQ ID NO: 35898 - RNA, 21 nt, RNAi
uucggccuaugaaccuggucg

SEQ ID NO: 35899 - DNA, 21 bp, homo sapiens
aagatctcttccaggatctaa

SEQ ID NO: 35900 - RNA, 21 nt, RNAi
gaucucuuccaggaucuaauu

SEQ ID NO: 35901 - RNA, 21 nt, RNAi
uucuagagaagguccuagauu

SEQ ID NO: 35902 - DNA, 21 bp, homo sapiens
aagtcacttccaggagacgtg

SEQ ID NO: 35903 - RNA, 21 nt, RNAi
gucacuuccaggagacguguu

SEQ ID NO: 35904 - RNA, 21 nt, RNAi
uucagugaagguccucugcac

SEQ ID NO: 35905 - DNA, 21 bp, homo sapiens
aagctcaggtaccagacagtg

SEQ ID NO: 35906 - RNA, 21 nt, RNAi
gcucagguaccagacaguguu

SEQ ID NO: 35907 - RNA, 21 nt, RNAi
uucgaguccauggucugucac

SEQ ID NO: 35908 - DNA, 21 bp, homo sapiens
aacggaatttcctgagatcct

SEQ ID NO: 35909 - RNA, 21 nt, RNAi
cggaauuuccugagauccuuu

SEQ ID NO: 35910 - RNA, 21 nt, RNAi
uugccuuaaaggacucuagga

SEQ ID NO: 35911 - DNA, 21 bp, homo sapiens
aatttcctgagatcctctggc

SEQ ID NO: 35912 - RNA, 21 nt, RNAi
uuuccugagauccucuggcuu

SEQ ID NO: 35913 - RNA, 21 nt, RNAi
uuaaaggacucuaggagaccg

SEQ ID NO: 35914 - DNA, 21 bp, homo sapiens
aacatagctccgtcttccagc

SEQ ID NO: 35915 - RNA, 21 nt, RNAi
cauagcuccgucuuccagcuu

SEQ ID NO: 35916 - RNA, 21 nt, RNAi
uuguaucgaggcagaaggucg

SEQ ID NO: 35917 - DNA, 21 bp, homo sapiens
aaacaggaacagacggacttc

SEQ ID NO: 35918 - RNA, 21 nt, RNAi
acaggaacagacggacuucuu

SEQ ID NO: 35919 - RNA, 21 nt, RNAi
uuuguccuugucugccugaag

SEQ ID NO: 35920 - DNA, 21 bp, homo sapiens
aacaggaacagacggacttcg

SEQ ID NO: 35921 - RNA, 21 nt, RNAi
caggaacagacggacuucguu

SEQ ID NO: 35922 - RNA, 21 nt, RNAi
uuguccuugucugccugaagc

SEQ ID NO: 35923 - DNA, 21 bp, homo sapiens
aacagacggacttcgcctacg

SEQ ID NO: 35924 - RNA, 21 nt, RNAi
cagacggacuucgccuacguu

SEQ ID NO: 35925 - RNA, 21 nt, RNAi
uugucugccugaagcggaugc

SEQ ID NO: 35926 - DNA, 21 bp, homo sapiens
aaatttgaaggagacatcaag

SEQ ID NO: 35927 - RNA, 21 nt, RNAi
auuugaaggagacaucaaguu

SEQ ID NO: 35928 - RNA, 21 nt, RNAi
uuuaaacuuccucuguaguuc

SEQ ID NO: 35929 - DNA, 21 bp, homo sapiens
aatttgaaggagacatcaagc

SEQ ID NO: 35930 - RNA, 21 nt, RNAi
uuugaaggagacaucaagcuu

SEQ ID NO: 35931 - RNA, 21 nt, RNAi
uuaaacuuccucuguaguucg

SEQ ID NO: 35932 - DNA, 21 bp, homo sapiens
aaggagacatcaagcaggaag

SEQ ID NO: 35933 - RNA, 21 nt, RNAi
ggagacaucaagcaggaaguu

SEQ ID NO: 35934 - RNA, 21 nt, RNAi
uuccucuguaguucguccuuc

SEQ ID NO: 35935 - DNA, 21 bp, homo sapiens
aatttctggtggccttgctgg

SEQ ID NO: 35936 - RNA, 21 nt, RNAi
uuucugguggccuugcugguu

SEQ ID NO: 35937 - RNA, 21 nt, RNAi
uuaaagaccaccggaacgacc

SEQ ID NO: 35938 - DNA, 21 bp, homo sapiens
aatggagttcaagctcattga

SEQ ID NO: 35939 - RNA, 21 nt, RNAi
uggaguucaagcucauugauu

SEQ ID NO: 35940 - RNA, 21 nt, RNAi
uuaccucaaguucgaguaacu

SEQ ID NO: 35941 - DNA, 21 bp, homo sapiens
aagctcattgagcctgaggag

SEQ ID NO: 35942 - RNA, 21 nt, RNAi
gcucauugagccugaggaguu

SEQ ID NO: 35943 - RNA, 21 nt, RNAi
uucgaguaacucggacuccuc

SEQ ID NO: 35944 - DNA, 21 bp, homo sapiens
aagaaccggccagccatgaat

SEQ ID NO: 35945 - RNA, 21 nt, RNAi
gaaccggccagccaugaauuu

SEQ ID NO: 35946 - RNA, 21 nt, RNAi
uucuuggccggucgguacuua

SEQ ID NO: 35947 - DNA, 21 bp, homo sapiens
aaccggccagccatgaattac

SEQ ID NO: 35948 - RNA, 21 nt, RNAi
ccggccagccaugaauuacuu

SEQ ID NO: 35949 - RNA, 21 nt, RNAi
uuggccggucgguacuuaaug

SEQ ID NO: 35950 - DNA, 21 bp, homo sapiens
aattacgacaagctgagccgc

SEQ ID NO: 35951 - RNA, 21 nt, RNAi
uuacgacaagcugagccgcuu

SEQ ID NO: 35952 - RNA, 21 nt, RNAi
uuaaugcuguucgacucggcg

SEQ ID NO: 35953 - DNA, 21 bp, homo sapiens
aaaggcatcatgcagaaggtg

SEQ ID NO: 35954 - RNA, 21 nt, RNAi
aggcaucaugcagaagguguu

SEQ ID NO: 35955 - RNA, 21 nt, RNAi
uuuccguaguacgucuuccac

SEQ ID NO: 35956 - DNA, 21 bp, homo sapiens
aaggcatcatgcagaaggtgg

SEQ ID NO: 35957 - RNA, 21 nt, RNAi
ggcaucaugcagaaggugguu

SEQ ID NO: 35958 - RNA, 21 nt, RNAi
uuccguaguacgucuuccacc

SEQ ID NO: 35959 - DNA, 21 bp, homo sapiens
aaggtggctggtgagcgttac

SEQ ID NO: 35960 - RNA, 21 nt, RNAi
gguggcuggugagcguuacuu

SEQ ID NO: 35961 - RNA, 21 nt, RNAi
uuccaccgaccacucgcaaug

SEQ ID NO: 35962 - DNA, 21 bp, homo sapiens
aatcagcgtccagctctcaag

SEQ ID NO: 35963 - RNA, 21 nt, RNAi
ucagcguccagcucucaaguu

SEQ ID NO: 35964 - RNA, 21 nt, RNAi
uuagucgcaggucgagaguuc

SEQ ID NO: 35965 - DNA, 21 bp, homo sapiens
aaggctgagtttgaccggcct

SEQ ID NO: 35966 - RNA, 21 nt, RNAi
ggcugaguuugaccggccuuu

SEQ ID NO: 35967 - RNA, 21 nt, RNAi
uuccgacucaaacuggccgga

SEQ ID NO: 35968 - DNA, 21 bp, homo sapiens
aaagtggagaaatggcaagtc

SEQ ID NO: 35969 - RNA, 21 nt, RNAi
aguggagaaauggcaagucuu

SEQ ID NO: 35970 - RNA, 21 nt, RNAi
uuucaccucuuuaccguucag

SEQ ID NO: 35971 - DNA, 21 bp, homo sapiens
aagtggagaaatggcaagtct

SEQ ID NO: 35972 - RNA, 21 nt, RNAi
guggagaaauggcaagucuuu

SEQ ID NO: 35973 - RNA, 21 nt, RNAi
uucaccucuuuaccguucaga

SEQ ID NO: 35974 - DNA, 21 bp, homo sapiens
aaatggcaagtctagagtctc

SEQ ID NO: 35975 - RNA, 21 nt, RNAi
auggcaagucuagagucucuu

SEQ ID NO: 35976 - RNA, 21 nt, RNAi
uuuaccguucagaucucagag

SEQ ID NO: 35977 - DNA, 21 bp, homo sapiens
aatggcaagtctagagtctca

SEQ ID NO: 35978 - RNA, 21 nt, RNAi
uggcaagucuagagucucauu

SEQ ID NO: 35979 - RNA, 21 nt, RNAi
uuaccguucagaucucagagu

SEQ ID NO: 35980 - DNA, 21 bp, homo sapiens
aagtctagagtctcagaaact

SEQ ID NO: 35981 - RNA, 21 nt, RNAi
gucuagagucucagaaacuuu

SEQ ID NO: 35982 - RNA, 21 nt, RNAi
uucagaucucagagucuuuga

SEQ ID NO: 35983 - DNA, 21 bp, homo sapiens
aattcagctcagcttcttcct

SEQ ID NO: 35984 - RNA, 21 nt, RNAi
uucagcucagcuucuuccuuu

SEQ ID NO: 35985 - RNA, 21 nt, RNAi
uuaagucgagucgaagaagga

SEQ ID NO: 35986 - DNA, 21 bp, homo sapiens
aaccacagagaacaagagttt

SEQ ID NO: 35987 - RNA, 21 nt, RNAi
ccacagagaacaagaguuuuu

SEQ ID NO: 35988 - RNA, 21 nt, RNAi
uuggugucucuuguucucaaa

SEQ ID NO: 35989 - DNA, 21 bp, homo sapiens
aacaagagtttgttctgttct

SEQ ID NO: 35990 - RNA, 21 nt, RNAi
caagaguuuguucuguucuuu

SEQ ID NO: 35991 - RNA, 21 nt, RNAi
uuguucucaaacaagacaaga

SEQ ID NO: 35992 - DNA, 21 bp, homo sapiens
caccttcagcagcaaatcgcc

SEQ ID NO: 35993 - RNA, 21 nt, RNAi
ccuucagcagcaaaucgccuu

SEQ ID NO: 35994 - RNA, 21 nt, RNAi
uuggaagucgucguuuagcgg

SEQ ID NO: 35995 - DNA, 21 bp, homo sapiens
caggatctaagtcacttccag

SEQ ID NO: 35996 - RNA, 21 nt, RNAi
ggaucuaagucacuuccaguu

SEQ ID NO: 35997 - RNA, 21 nt, RNAi
uuccuagauucagugaagguc

SEQ ID NO: 35998 - DNA, 21 bp, homo sapiens
cacttccaggagacgtggctc

SEQ ID NO: 35999 - RNA, 21 nt, RNAi
cuuccaggagacguggcucuu

SEQ ID NO: 36000 - RNA, 21 nt, RNAi
uugaagguccucugcaccgag

SEQ ID NO: 36001 - DNA, 21 bp, homo sapiens
caggagacgtggctcgctgaa

SEQ ID NO: 36002 - RNA, 21 nt, RNAi
ggagacguggcucgcugaauu

SEQ ID NO: 36003 - RNA, 21 nt, RNAi
uuccucugcaccgagcgacuu

SEQ ID NO: 36004 - DNA, 21 bp, homo sapiens
caggtaccagacagtgatgag

SEQ ID NO: 36005 - RNA, 21 nt, RNAi
gguaccagacagugaugaguu

SEQ ID NO: 36006 - RNA, 21 nt, RNAi
uuccauggucugucacuacuc

SEQ ID NO: 36007 - DNA, 21 bp, homo sapiens
cagacagtgatgagcagtttg

SEQ ID NO: 36008 - RNA, 21 nt, RNAi
gacagugaugagcaguuuguu

SEQ ID NO: 36009 - RNA, 21 nt, RNAi
uucugucacuacucgucaaac

SEQ ID NO: 36010 - DNA, 21 bp, homo sapiens
cagtgatgagcagtttgttcc

SEQ ID NO: 36011 - RNA, 21 nt, RNAi
gugaugagcaguuuguuccuu

SEQ ID NO: 36012 - RNA, 21 nt, RNAi
uucacuacucgucaaacaagg

SEQ ID NO: 36013 - DNA, 21 bp, homo sapiens
cagtttgttcctgatttccat

SEQ ID NO: 36014 - RNA, 21 nt, RNAi
guuuguuccugauuuccauuu

SEQ ID NO: 36015 - RNA, 21 nt, RNAi
uucaaacaaggacuaaaggua

SEQ ID NO: 36016 - DNA, 21 bp, homo sapiens
caccaccaggatcaagaagga

SEQ ID NO: 36017 - RNA, 21 nt, RNAi
ccaccaggaucaagaaggauu

SEQ ID NO: 36018 - RNA, 21 nt, RNAi
uuggugguccuaguucuuccu

SEQ ID NO: 36019 - DNA, 21 bp, homo sapiens
caccaggatcaagaaggagcc

SEQ ID NO: 36020 - RNA, 21 nt, RNAi
ccaggaucaagaaggagccuu

SEQ ID NO: 36021 - RNA, 21 nt, RNAi
uugguccuaguucuuccucgg

SEQ ID NO: 36022 - DNA, 21 bp, homo sapiens
caccatggcgagcagtgcctt

SEQ ID NO: 36023 - RNA, 21 nt, RNAi
ccauggcgagcagugccuuuu

SEQ ID NO: 36024 - RNA, 21 nt, RNAi
uugguaccgcucgucacggaa

SEQ ID NO: 36025 - DNA, 21 bp, homo sapiens
catggcgagcagtgcctttac

SEQ ID NO: 36026 - RNA, 21 nt, RNAi
uggcgagcagugccuuuacuu

SEQ ID NO: 36027 - RNA, 21 nt, RNAi
uuaccgcucgucacggaaaug

SEQ ID NO: 36028 - DNA, 21 bp, homo sapiens
cagtgcctttactccagtgcc

SEQ ID NO: 36029 - RNA, 21 nt, RNAi
gugccuuuacuccagugccuu

SEQ ID NO: 36030 - RNA, 21 nt, RNAi
uucacggaaaugaggucacgg

SEQ ID NO: 36031 - DNA, 21 bp, homo sapiens
cagacaaatcgccatcaagtc

SEQ ID NO: 36032 - RNA, 21 nt, RNAi
gacaaaucgccaucaagucuu

SEQ ID NO: 36033 - RNA, 21 nt, RNAi
uucuguuuagcgguaguucag

SEQ ID NO: 36034 - DNA, 21 bp, homo sapiens
cagagcaacggaatttcctga

SEQ ID NO: 36035 - RNA, 21 nt, RNAi
gagcaacggaauuuccugauu

SEQ ID NO: 36036 - RNA, 21 nt, RNAi
uucucguugccuuaaaggacu

SEQ ID NO: 36037 - DNA, 21 bp, homo sapiens
caacggaatttcctgagatcc

SEQ ID NO: 36038 - RNA, 21 nt, RNAi
acggaauuuccugagauccuu

SEQ ID NO: 36039 - RNA, 21 nt, RNAi
uuugccuuaaaggacucuagg

SEQ ID NO: 36040 - DNA, 21 bp, homo sapiens
catagctccgtcttccagcag

SEQ ID NO: 36041 - RNA, 21 nt, RNAi
uagcuccgucuuccagcaguu

SEQ ID NO: 36042 - RNA, 21 nt, RNAi
uuaucgaggcagaaggucguc

SEQ ID NO: 36043 - DNA, 21 bp, homo sapiens
catttgccactccttcacatc

SEQ ID NO: 36044 - RNA, 21 nt, RNAi
uuugccacuccuucacaucuu

SEQ ID NO: 36045 - RNA, 21 nt, RNAi
uuaaacggugaggaaguguag

SEQ ID NO: 36046 - DNA, 21 bp, homo sapiens
cagcagagctttaagcaagaa

SEQ ID NO: 36047 - RNA, 21 nt, RNAi
gcagagcuuuaagcaagaauu

SEQ ID NO: 36048 - RNA, 21 nt, RNAi
uucgucucgaaauucguucuu

SEQ ID NO: 36049 - DNA, 21 bp, homo sapiens
cagagctttaagcaagaatac

SEQ ID NO: 36050 - RNA, 21 nt, RNAi
gagcuuuaagcaagaauacuu

SEQ ID NO: 36051 - RNA, 21 nt, RNAi
uucucgaaauucguucuuaug

SEQ ID NO: 36052 - DNA, 21 bp, homo sapiens
caaacaggaacagacggactt

SEQ ID NO: 36053 - RNA, 21 nt, RNAi
aacaggaacagacggacuuuu

SEQ ID NO: 36054 - RNA, 21 nt, RNAi
uuuuguccuugucugccugaa

SEQ ID NO: 36055 - DNA, 21 bp, homo sapiens
caggaacagacggacttcgcc

SEQ ID NO: 36056 - RNA, 21 nt, RNAi
ggaacagacggacuucgccuu

SEQ ID NO: 36057 - RNA, 21 nt, RNAi
uuccuugucugccugaagcgg

SEQ ID NO: 36058 - DNA, 21 bp, homo sapiens
cagacggacttcgcctacgac

SEQ ID NO: 36059 - RNA, 21 nt, RNAi
gacggacuucgccuacgacuu

SEQ ID NO: 36060 - RNA, 21 nt, RNAi
uucugccugaagcggaugcug

SEQ ID NO: 36061 - DNA, 21 bp, homo sapiens
catcaatgtacctccacacag

SEQ ID NO: 36062 - RNA, 21 nt, RNAi
ucaauguaccuccacacaguu

SEQ ID NO: 36063 - RNA, 21 nt, RNAi
uuaguuacauggagguguguc

SEQ ID NO: 36064 - DNA, 21 bp, homo sapiens
caatgtacctccacacagagg

SEQ ID NO: 36065 - RNA, 21 nt, RNAi
auguaccuccacacagagguu

SEQ ID NO: 36066 - RNA, 21 nt, RNAi
uuuacauggaggugugucucc

SEQ ID NO: 36067 - DNA, 21 bp, homo sapiens
cagatgatgtctgcgttgtcc

SEQ ID NO: 36068 - RNA, 21 nt, RNAi
gaugaugucugcguuguccuu

SEQ ID NO: 36069 - RNA, 21 nt, RNAi
uucuacuacagacgcaacagg

SEQ ID NO: 36070 - DNA, 21 bp, homo sapiens
cagctgtggcaatttctggtg

SEQ ID NO: 36071 - RNA, 21 nt, RNAi
gcuguggcaauuucugguguu

SEQ ID NO: 36072 - RNA, 21 nt, RNAi
uucgacaccguuaaagaccac

SEQ ID NO: 36073 - DNA, 21 bp, homo sapiens
caatttctggtggccttgctg

SEQ ID NO: 36074 - RNA, 21 nt, RNAi
auuucugguggccuugcuguu

SEQ ID NO: 36075 - RNA, 21 nt, RNAi
uuuaaagaccaccggaacgac

SEQ ID NO: 36076 - DNA, 21 bp, homo sapiens
caagctcattgagcctgagga

SEQ ID NO: 36077 - RNA, 21 nt, RNAi
agcucauugagccugaggauu

SEQ ID NO: 36078 - RNA, 21 nt, RNAi
uuucgaguaacucggacuccu

SEQ ID NO: 36079 - DNA, 21 bp, homo sapiens
cattgagcctgaggaggtcgc

SEQ ID NO: 36080 - RNA, 21 nt, RNAi
uugagccugaggaggucgcuu

SEQ ID NO: 36081 - RNA, 21 nt, RNAi
uuaacucggacuccuccagcg

SEQ ID NO: 36082 - DNA, 21 bp, homo sapiens
catccagaagaaccggccagc

SEQ ID NO: 36083 - RNA, 21 nt, RNAi
uccagaagaaccggccagcuu

SEQ ID NO: 36084 - RNA, 21 nt, RNAi
uuaggucuucuuggccggucg

SEQ ID NO: 36085 - DNA, 21 bp, homo sapiens
cagaagaaccggccagccatg

SEQ ID NO: 36086 - RNA, 21 nt, RNAi
gaagaaccggccagccauguu

SEQ ID NO: 36087 - RNA, 21 nt, RNAi
uucuucuuggccggucgguac

SEQ ID NO: 36088 - DNA, 21 bp, homo sapiens
cagccatgaattacgacaagc

SEQ ID NO: 36089 - RNA, 21 nt, RNAi
gccaugaauuacgacaagcuu

SEQ ID NO: 36090 - RNA, 21 nt, RNAi
uucgguacuuaaugcuguucg

SEQ ID NO: 36091 - DNA, 21 bp, homo sapiens
catgaattacgacaagctgag

SEQ ID NO: 36092 - RNA, 21 nt, RNAi
ugaauuacgacaagcugaguu

SEQ ID NO: 36093 - RNA, 21 nt, RNAi
uuacuuaaugcuguucgacuc

SEQ ID NO: 36094 - DNA, 21 bp, homo sapiens
catcatgcagaaggtggctgg

SEQ ID NO: 36095 - RNA, 21 nt, RNAi
ucaugcagaagguggcugguu

SEQ ID NO: 36096 - RNA, 21 nt, RNAi
uuaguacgucuuccaccgacc

SEQ ID NO: 36097 - DNA, 21 bp, homo sapiens
catgcagaaggtggctggtga

SEQ ID NO: 36098 - RNA, 21 nt, RNAi
ugcagaagguggcuggugauu

SEQ ID NO: 36099 - RNA, 21 nt, RNAi
uuacgucuuccaccgaccacu

SEQ ID NO: 36100 - DNA, 21 bp, homo sapiens
cagaaggtggctggtgagcgt

SEQ ID NO: 36101 - RNA, 21 nt, RNAi
gaagguggcuggugagcguuu

SEQ ID NO: 36102 - RNA, 21 nt, RNAi
uucuuccaccgaccacucgca

SEQ ID NO: 36103 - DNA, 21 bp, homo sapiens
caatcagcgtccagctctcaa

SEQ ID NO: 36104 - RNA, 21 nt, RNAi
aucagcguccagcucucaauu

SEQ ID NO: 36105 - RNA, 21 nt, RNAi
uuuagucgcaggucgagaguu

SEQ ID NO: 36106 - DNA, 21 bp, homo sapiens
cagcgtccagctctcaaggct

SEQ ID NO: 36107 - RNA, 21 nt, RNAi
gcguccagcucucaaggcuuu

SEQ ID NO: 36108 - RNA, 21 nt, RNAi
uucgcaggucgagaguuccga

SEQ ID NO: 36109 - DNA, 21 bp, homo sapiens
cagctctcaaggctgagtttg

SEQ ID NO: 36110 - RNA, 21 nt, RNAi
gcucucaaggcugaguuuguu

SEQ ID NO: 36111 - RNA, 21 nt, RNAi
uucgagaguuccgacucaaac

SEQ ID NO: 36112 - DNA, 21 bp, homo sapiens
caaggctgagtttgaccggcc

SEQ ID NO: 36113 - RNA, 21 nt, RNAi
aggcugaguuugaccggccuu

SEQ ID NO: 36114 - RNA, 21 nt, RNAi
uuuccgacucaaacuggccgg

SEQ ID NO: 36115 - DNA, 21 bp, homo sapiens
cagactctgagctgctcaccg

SEQ ID NO: 36116 - RNA, 21 nt, RNAi
gacucugagcugcucaccguu

SEQ ID NO: 36117 - RNA, 21 nt, RNAi
uucugagacucgacgaguggc

SEQ ID NO: 36118 - DNA, 21 bp, homo sapiens
caagtctagagtctcagaaac

SEQ ID NO: 36119 - RNA, 21 nt, RNAi
agucuagagucucagaaacuu

SEQ ID NO: 36120 - RNA, 21 nt, RNAi
uuucagaucucagagucuuug

SEQ ID NO: 36121 - DNA, 21 bp, homo sapiens
cagctcagcttcttcctaggt

SEQ ID NO: 36122 - RNA, 21 nt, RNAi
gcucagcuucuuccuagguuu

SEQ ID NO: 36123 - RNA, 21 nt, RNAi
uucgagucgaagaaggaucca

SEQ ID NO: 36124 - DNA, 21 bp, homo sapiens
cagcttcttcctaggtccaag

SEQ ID NO: 36125 - RNA, 21 nt, RNAi
gcuucuuccuagguccaaguu

SEQ ID NO: 36126 - RNA, 21 nt, RNAi
uucgaagaaggauccagguuc

SEQ ID NO: 36127 - DNA, 21 bp, homo sapiens
caaccacagagaacaagagtt

SEQ ID NO: 36128 - RNA, 21 nt, RNAi
accacagagaacaagaguuuu

SEQ ID NO: 36129 - RNA, 21 nt, RNAi
uuuggugucucuuguucucaa

SEQ ID NO: 36130 - DNA, 21 bp, homo sapiens
cacagagaacaagagtttgtt

SEQ ID NO: 36131 - RNA, 21 nt, RNAi
cagagaacaagaguuuguuuu

SEQ ID NO: 36132 - RNA, 21 nt, RNAi
uugucucuuguucucaaacaa

SEQ ID NO: 36133 - DNA, 21 bp, homo sapiens
cagagaacaagagtttgttct

SEQ ID NO: 36134 - RNA, 21 nt, RNAi
gagaacaagaguuuguucuuu

SEQ ID NO: 36135 - RNA, 21 nt, RNAi
uucucuuguucucaaacaaga

SEQ ID NO: 36136 - DNA, 21 bp, homo sapiens
caagagtttgttctgttctgg

SEQ ID NO: 36137 - RNA, 21 nt, RNAi
agaguuuguucuguucugguu

SEQ ID NO: 36138 - RNA, 21 nt, RNAi
uuucucaaacaagacaagacc

SEQ ID NO: 36139 - DNA, 21 bp, homo sapiens
caacttcatactggcaggagg

SEQ ID NO: 36140 - RNA, 21 nt, RNAi
acuucauacuggcaggagguu

SEQ ID NO: 36141 - RNA, 21 nt, RNAi
uuugaaguaugaccguccucc

SEQ ID NO: 36142 - DNA, 21 bp, homo sapiens
cagttcttggtgctctgtgtt

SEQ ID NO: 36143 - RNA, 21 nt, RNAi
guucuuggugcucuguguuuu

SEQ ID NO: 36144 - RNA, 21 nt, RNAi
uucaagaaccacgagacacaa

SEQ ID NO: 36145 - DNA, 21 bp, homo sapiens
cagaggcaggcggaggttgaa

SEQ ID NO: 36146 - RNA, 21 nt, RNAi
gaggcaggcggagguugaauu

SEQ ID NO: 36147 - RNA, 21 nt, RNAi
uucuccguccgccuccaacuu

SEQ ID NO: 36148 - DNA, 21 bp, homo sapiens
caggcggaggttgaagaaagg

SEQ ID NO: 36149 - RNA, 21 nt, RNAi
ggcggagguugaagaaagguu

SEQ ID NO: 36150 - RNA, 21 nt, RNAi
uuccgccuccaacuucuuucc

SEQ ID NO: 36151 - DNA, 21 bp, homo sapiens
cacctccaccacatctgccag

SEQ ID NO: 36152 - RNA, 21 nt, RNAi
ccuccaccacaucugccaguu

SEQ ID NO: 36153 - RNA, 21 nt, RNAi
uuggaggugguguagacgguc

SEQ ID NO: 36154 - DNA, 21 bp, homo sapiens
caccacatctgccagacctta

SEQ ID NO: 36155 - RNA, 21 nt, RNAi
ccacaucugccagaccuuauu

SEQ ID NO: 36156 - RNA, 21 nt, RNAi
uugguguagacggucuggaau

SEQ ID NO: 36157 - DNA, 21 bp, homo sapiens
cacatctgccagaccttaata

SEQ ID NO: 36158 - RNA, 21 nt, RNAi
caucugccagaccuuaauauu

SEQ ID NO: 36159 - RNA, 21 nt, RNAi
uuguagacggucuggaauuau

SEQ ID NO: 36160 - DNA, 21 bp, homo sapiens
catctgccagaccttaataaa

SEQ ID NO: 36161 - RNA, 21 nt, RNAi
ucugccagaccuuaauaaauu

SEQ ID NO: 36162 - RNA, 21 nt, RNAi
uuagacggucuggaauuauuu

SEQ ID NO: 36163 - DNA, 21 bp, homo sapiens
gatggagcggaggatgaaagc

SEQ ID NO: 36164 - RNA, 21 nt, RNAi
uggagcggaggaugaaagcuu

SEQ ID NO: 36165 - RNA, 21 nt, RNAi
uuaccucgccuccuacuuucg

SEQ ID NO: 36166 - DNA, 21 bp, homo sapiens
gagcggaggatgaaagccgga

SEQ ID NO: 36167 - RNA, 21 nt, RNAi
gcggaggaugaaagccggauu

SEQ ID NO: 36168 - RNA, 21 nt, RNAi
uucgccuccuacuuucggccu

SEQ ID NO: 36169 - DNA, 21 bp, homo sapiens
gaggatgaaagccggatactt

SEQ ID NO: 36170 - RNA, 21 nt, RNAi
ggaugaaagccggauacuuuu

SEQ ID NO: 36171 - RNA, 21 nt, RNAi
uuccuacuuucggccuaugaa

SEQ ID NO: 36172 - DNA, 21 bp, homo sapiens
gatgaaagccggatacttgga

SEQ ID NO: 36173 - RNA, 21 nt, RNAi
ugaaagccggauacuuggauu

SEQ ID NO: 36174 - RNA, 21 nt, RNAi
uuacuuucggccuaugaaccu

SEQ ID NO: 36175 - DNA, 21 bp, homo sapiens
gaaagccggatacttggacca

SEQ ID NO: 36176 - RNA, 21 nt, RNAi
aagccggauacuuggaccauu

SEQ ID NO: 36177 - RNA, 21 nt, RNAi
uuuucggccuaugaaccuggu

SEQ ID NO: 36178 - DNA, 21 bp, homo sapiens
gatacttggaccagcaagtgc

SEQ ID NO: 36179 - RNA, 21 nt, RNAi
uacuuggaccagcaagugcuu

SEQ ID NO: 36180 - RNA, 21 nt, RNAi
uuaugaaccuggucguucacg

SEQ ID NO: 36181 - DNA, 21 bp, homo sapiens
gagcttgcgcgaagcgctgat

SEQ ID NO: 36182 - RNA, 21 nt, RNAi
gcuugcgcgaagcgcugauuu

SEQ ID NO: 36183 - RNA, 21 nt, RNAi
uucgaacgcgcuucgcgacua

SEQ ID NO: 36184 - DNA, 21 bp, homo sapiens
gactctgaagatctcttccag

SEQ ID NO: 36185 - RNA, 21 nt, RNAi
cucugaagaucucuuccaguu

SEQ ID NO: 36186 - RNA, 21 nt, RNAi
uugagacuucuagagaagguc

SEQ ID NO: 36187 - DNA, 21 bp, homo sapiens
gaagatctcttccaggatcta

SEQ ID NO: 36188 - RNA, 21 nt, RNAi
agaucucuuccaggaucuauu

SEQ ID NO: 36189 - RNA, 21 nt, RNAi
uuucuagagaagguccuagau

SEQ ID NO: 36190 - DNA, 21 bp, homo sapiens
gatctcttccaggatctaagt

SEQ ID NO: 36191 - RNA, 21 nt, RNAi
ucucuuccaggaucuaaguuu

SEQ ID NO: 36192 - RNA, 21 nt, RNAi
uuagagaagguccuagauuca

SEQ ID NO: 36193 - DNA, 21 bp, homo sapiens
gatctaagtcacttccaggag

SEQ ID NO: 36194 - RNA, 21 nt, RNAi
ucuaagucacuuccaggaguu

SEQ ID NO: 36195 - RNA, 21 nt, RNAi
uuagauucagugaagguccuc

SEQ ID NO: 36196 - DNA, 21 bp, homo sapiens
gagacgtggctcgctgaagct

SEQ ID NO: 36197 - RNA, 21 nt, RNAi
gacguggcucgcugaagcuuu

SEQ ID NO: 36198 - RNA, 21 nt, RNAi
uucugcaccgagcgacuucga

SEQ ID NO: 36199 - DNA, 21 bp, homo sapiens
gacgtggctcgctgaagctca

SEQ ID NO: 36200 - RNA, 21 nt, RNAi
cguggcucgcugaagcucauu

SEQ ID NO: 36201 - RNA, 21 nt, RNAi
uugcaccgagcgacuucgagu

SEQ ID NO: 36202 - DNA, 21 bp, homo sapiens
gaagctcaggtaccagacagt

SEQ ID NO: 36203 - RNA, 21 nt, RNAi
agcucagguaccagacaguuu

SEQ ID NO: 36204 - RNA, 21 nt, RNAi
uuucgaguccauggucuguca

SEQ ID NO: 36205 - DNA, 21 bp, homo sapiens
gacagtgatgagcagtttgtt

SEQ ID NO: 36206 - RNA, 21 nt, RNAi
cagugaugagcaguuuguuuu

SEQ ID NO: 36207 - RNA, 21 nt, RNAi
uugucacuacucgucaaacaa

SEQ ID NO: 36208 - DNA, 21 bp, homo sapiens
gatgagcagtttgttcctgat

SEQ ID NO: 36209 - RNA, 21 nt, RNAi
ugagcaguuuguuccugauuu

SEQ ID NO: 36210 - RNA, 21 nt, RNAi
uuacucgucaaacaaggacua

SEQ ID NO: 36211 - DNA, 21 bp, homo sapiens
gagcagtttgttcctgatttc

SEQ ID NO: 36212 - RNA, 21 nt, RNAi
gcaguuuguuccugauuucuu

SEQ ID NO: 36213 - RNA, 21 nt, RNAi
uucgucaaacaaggacuaaag

SEQ ID NO: 36214 - DNA, 21 bp, homo sapiens
gagcagtgcctttactccagt

SEQ ID NO: 36215 - RNA, 21 nt, RNAi
gcagugccuuuacuccaguuu

SEQ ID NO: 36216 - RNA, 21 nt, RNAi
uucgucacggaaaugagguca

SEQ ID NO: 36217 - DNA, 21 bp, homo sapiens
gagcaacggaatttcctgaga

SEQ ID NO: 36218 - RNA, 21 nt, RNAi
gcaacggaauuuccugagauu

SEQ ID NO: 36219 - RNA, 21 nt, RNAi
uucguugccuuaaaggacucu

SEQ ID NO: 36220 - DNA, 21 bp, homo sapiens
gaatttcctgagatcctctgg

SEQ ID NO: 36221 - RNA, 21 nt, RNAi
auuuccugagauccucugguu

SEQ ID NO: 36222 - RNA, 21 nt, RNAi
uuuaaaggacucuaggagacc

SEQ ID NO: 36223 - DNA, 21 bp, homo sapiens
gaacatagctccgtcttccag

SEQ ID NO: 36224 - RNA, 21 nt, RNAi
acauagcuccgucuuccaguu

SEQ ID NO: 36225 - RNA, 21 nt, RNAi
uuuguaucgaggcagaagguc

SEQ ID NO: 36226 - DNA, 21 bp, homo sapiens
gacatttgccactccttcaca

SEQ ID NO: 36227 - RNA, 21 nt, RNAi
cauuugccacuccuucacauu

SEQ ID NO: 36228 - RNA, 21 nt, RNAi
uuguaaacggugaggaagugu

SEQ ID NO: 36229 - DNA, 21 bp, homo sapiens
gagctttaagcaagaatacca

SEQ ID NO: 36230 - RNA, 21 nt, RNAi
gcuuuaagcaagaauaccauu

SEQ ID NO: 36231 - RNA, 21 nt, RNAi
uucgaaauucguucuuauggu

SEQ ID NO: 36232 - DNA, 21 bp, homo sapiens
gatcaaacaggaacagacgga

SEQ ID NO: 36233 - RNA, 21 nt, RNAi
ucaaacaggaacagacggauu

SEQ ID NO: 36234 - RNA, 21 nt, RNAi
uuaguuuguccuugucugccu

SEQ ID NO: 36235 - DNA, 21 bp, homo sapiens
gaacagacggacttcgcctac

SEQ ID NO: 36236 - RNA, 21 nt, RNAi
acagacggacuucgccuacuu

SEQ ID NO: 36237 - RNA, 21 nt, RNAi
uuugucugccugaagcggaug

SEQ ID NO: 36238 - DNA, 21 bp, homo sapiens
gacggacttcgcctacgactc

SEQ ID NO: 36239 - RNA, 21 nt, RNAi
cggacuucgccuacgacucuu

SEQ ID NO: 36240 - RNA, 21 nt, RNAi
uugccugaagcggaugcugag

SEQ ID NO: 36241 - DNA, 21 bp, homo sapiens
gacttcgcctacgactcagat

SEQ ID NO: 36242 - RNA, 21 nt, RNAi
cuucgccuacgacucagauuu

SEQ ID NO: 36243 - RNA, 21 nt, RNAi
uugaagcggaugcugagucua

SEQ ID NO: 36244 - DNA, 21 bp, homo sapiens
gagaaacctctgcgaccattc

SEQ ID NO: 36245 - RNA, 21 nt, RNAi
gaaaccucugcgaccauucuu

SEQ ID NO: 36246 - RNA, 21 nt, RNAi
uucuuuggagacgcugguaag

SEQ ID NO: 36247 - DNA, 21 bp, homo sapiens
gagaaatttgaaggagacatc

SEQ ID NO: 36248 - RNA, 21 nt, RNAi
gaaauuugaaggagacaucuu

SEQ ID NO: 36249 - RNA, 21 nt, RNAi
uucuuuaaacuuccucuguag

SEQ ID NO: 36250 - DNA, 21 bp, homo sapiens
gaaatttgaaggagacatcaa

SEQ ID NO: 36251 - RNA, 21 nt, RNAi
aauuugaaggagacaucaauu

SEQ ID NO: 36252 - RNA, 21 nt, RNAi
uuuuaaacuuccucuguaguu

SEQ ID NO: 36253 - DNA, 21 bp, homo sapiens
gaaggagacatcaagcaggaa

SEQ ID NO: 36254 - RNA, 21 nt, RNAi
aggagacaucaagcaggaauu

SEQ ID NO: 36255 - RNA, 21 nt, RNAi
uuuccucuguaguucguccuu

SEQ ID NO: 36256 - DNA, 21 bp, homo sapiens
gaatggagttcaagctcattg

SEQ ID NO: 36257 - RNA, 21 nt, RNAi
auggaguucaagcucauuguu

SEQ ID NO: 36258 - RNA, 21 nt, RNAi
uuuaccucaaguucgaguaac

SEQ ID NO: 36259 - DNA, 21 bp, homo sapiens
gagttcaagctcattgagcct

SEQ ID NO: 36260 - RNA, 21 nt, RNAi
guucaagcucauugagccuuu

SEQ ID NO: 36261 - RNA, 21 nt, RNAi
uucaaguucgaguaacucgga

SEQ ID NO: 36262 - DNA, 21 bp, homo sapiens
gaagaaccggccagccatgaa

SEQ ID NO: 36263 - RNA, 21 nt, RNAi
agaaccggccagccaugaauu

SEQ ID NO: 36264 - RNA, 21 nt, RNAi
uuucuuggccggucgguacuu

SEQ ID NO: 36265 - DNA, 21 bp, homo sapiens
gaaccggccagccatgaatta

SEQ ID NO: 36266 - RNA, 21 nt, RNAi
accggccagccaugaauuauu

SEQ ID NO: 36267 - RNA, 21 nt, RNAi
uuuggccggucgguacuuaau

SEQ ID NO: 36268 - DNA, 21 bp, homo sapiens
gaattacgacaagctgagccg

SEQ ID NO: 36269 - RNA, 21 nt, RNAi
auuacgacaagcugagccguu

SEQ ID NO: 36270 - RNA, 21 nt, RNAi
uuuaaugcuguucgacucggc

SEQ ID NO: 36271 - DNA, 21 bp, homo sapiens
gagccgctcgctccgatacta

SEQ ID NO: 36272 - RNA, 21 nt, RNAi
gccgcucgcuccgauacuauu

SEQ ID NO: 36273 - RNA, 21 nt, RNAi
uucggcgagcgaggcuaugau

SEQ ID NO: 36274 - DNA, 21 bp, homo sapiens
gatactattatgagaaaggca

SEQ ID NO: 36275 - RNA, 21 nt, RNAi
uacuauuaugagaaaggcauu

SEQ ID NO: 36276 - RNA, 21 nt, RNAi
uuaugauaauacucuuuccgu

SEQ ID NO: 36277 - DNA, 21 bp, homo sapiens
gagaaaggcatcatgcagaag

SEQ ID NO: 36278 - RNA, 21 nt, RNAi
gaaaggcaucaugcagaaguu

SEQ ID NO: 36279 - RNA, 21 nt, RNAi
uucuuuccguaguacgucuuc

SEQ ID NO: 36280 - DNA, 21 bp, homo sapiens
gaaaggcatcatgcagaaggt

SEQ ID NO: 36281 - RNA, 21 nt, RNAi
aaggcaucaugcagaagguuu

SEQ ID NO: 36282 - RNA, 21 nt, RNAi
uuuuccguaguacgucuucca

SEQ ID NO: 36283 - DNA, 21 bp, homo sapiens
gaaggtggctggtgagcgtta

SEQ ID NO: 36284 - RNA, 21 nt, RNAi
agguggcuggugagcguuauu

SEQ ID NO: 36285 - RNA, 21 nt, RNAi
uuuccaccgaccacucgcaau

SEQ ID NO: 36286 - DNA, 21 bp, homo sapiens
gagcgttacgtgtacaagttt

SEQ ID NO: 36287 - RNA, 21 nt, RNAi
gcguuacguguacaaguuuuu

SEQ ID NO: 36288 - RNA, 21 nt, RNAi
uucgcaaugcacauguucaaa

SEQ ID NO: 36289 - DNA, 21 bp, homo sapiens
gacaatcagcgtccagctctc

SEQ ID NO: 36290 - RNA, 21 nt, RNAi
caaucagcguccagcucucuu

SEQ ID NO: 36291 - RNA, 21 nt, RNAi
uuguuagucgcaggucgagag

SEQ ID NO: 36292 - DNA, 21 bp, homo sapiens
gagtttgaccggcctgtcagt

SEQ ID NO: 36293 - RNA, 21 nt, RNAi
guuugaccggccugucaguuu

SEQ ID NO: 36294 - RNA, 21 nt, RNAi
uucaaacuggccggacaguca

SEQ ID NO: 36295 - DNA, 21 bp, homo sapiens
gactctgagctgctcaccgga

SEQ ID NO: 36296 - RNA, 21 nt, RNAi
cucugagcugcucaccggauu

SEQ ID NO: 36297 - RNA, 21 nt, RNAi
uugagacucgacgaguggccu

SEQ ID NO: 36298 - DNA, 21 bp, homo sapiens
gagctgctcaccggagtcatt

SEQ ID NO: 36299 - RNA, 21 nt, RNAi
gcugcucaccggagucauuuu

SEQ ID NO: 36300 - RNA, 21 nt, RNAi
uucgacgaguggccucaguaa

SEQ ID NO: 36301 - DNA, 21 bp, homo sapiens
gagaaatggcaagtctagagt

SEQ ID NO: 36302 - RNA, 21 nt, RNAi
gaaauggcaagucuagaguuu

SEQ ID NO: 36303 - RNA, 21 nt, RNAi
uucuuuaccguucagaucuca

SEQ ID NO: 36304 - DNA, 21 bp, homo sapiens
gaaatggcaagtctagagtct

SEQ ID NO: 36305 - RNA, 21 nt, RNAi
aauggcaagucuagagucuuu

SEQ ID NO: 36306 - RNA, 21 nt, RNAi
uuuuaccguucagaucucaga

SEQ ID NO: 36307 - DNA, 21 bp, homo sapiens
gaggaattcagctcagcttct

SEQ ID NO: 36308 - RNA, 21 nt, RNAi
ggaauucagcucagcuucuuu

SEQ ID NO: 36309 - RNA, 21 nt, RNAi
uuccuuaagucgagucgaaga

SEQ ID NO: 36310 - DNA, 21 bp, homo sapiens
gaattcagctcagcttcttcc

SEQ ID NO: 36311 - RNA, 21 nt, RNAi
auucagcucagcuucuuccuu

SEQ ID NO: 36312 - RNA, 21 nt, RNAi
uuuaagucgagucgaagaagg

SEQ ID NO: 36313 - DNA, 21 bp, homo sapiens
gagaacaagagtttgttctgt

SEQ ID NO: 36314 - RNA, 21 nt, RNAi
gaacaagaguuuguucuguuu

SEQ ID NO: 36315 - RNA, 21 nt, RNAi
uucuuguucucaaacaagaca

SEQ ID NO: 36316 - DNA, 21 bp, homo sapiens
gaacaagagtttgttctgttc

SEQ ID NO: 36317 - RNA, 21 nt, RNAi
acaagaguuuguucuguucuu

SEQ ID NO: 36318 - RNA, 21 nt, RNAi
uuuguucucaaacaagacaag

SEQ ID NO: 36319 - DNA, 21 bp, homo sapiens
gagacagaagcctggactctg

SEQ ID NO: 36320 - RNA, 21 nt, RNAi
gacagaagccuggacucuguu

SEQ ID NO: 36321 - RNA, 21 nt, RNAi
uucugucuucggaccugagac

SEQ ID NO: 36322 - DNA, 21 bp, homo sapiens
gacagaagcctggactctgcc

SEQ ID NO: 36323 - RNA, 21 nt, RNAi
cagaagccuggacucugccuu

SEQ ID NO: 36324 - RNA, 21 nt, RNAi
uugucuucggaccugagacgg

SEQ ID NO: 36325 - DNA, 21 bp, homo sapiens
gaggcaggcggaggttgaaga

SEQ ID NO: 36326 - RNA, 21 nt, RNAi
ggcaggcggagguugaagauu

SEQ ID NO: 36327 - RNA, 21 nt, RNAi
uuccguccgccuccaacuucu

SEQ ID NO: 36328 - DNA, 21 bp, homo sapiens
gaggttgaagaaaggaacctg

SEQ ID NO: 36329 - RNA, 21 nt, RNAi
gguugaagaaaggaaccuguu

SEQ ID NO: 36330 - RNA, 21 nt, RNAi
uuccaacuucuuuccuuggac

SEQ ID NO: 36331 - DNA, 21 bp, homo sapiens
tacaccttcagcagcaaatcg

SEQ ID NO: 36332 - RNA, 21 nt, RNAi
caccuucagcagcaaaucguu

SEQ ID NO: 36333 - RNA, 21 nt, RNAi
uuguggaagucgucguuuagc

SEQ ID NO: 36334 - DNA, 21 bp, homo sapiens
taagtcacttccaggagacgt

SEQ ID NO: 36335 - RNA, 21 nt, RNAi
agucacuuccaggagacguuu

SEQ ID NO: 36336 - RNA, 21 nt, RNAi
uuucagugaagguccucugca

SEQ ID NO: 36337 - DNA, 21 bp, homo sapiens
taccagacagtgatgagcagt

SEQ ID NO: 36338 - RNA, 21 nt, RNAi
ccagacagugaugagcaguuu

SEQ ID NO: 36339 - RNA, 21 nt, RNAi
uuggucugucacuacucguca

SEQ ID NO: 36340 - DNA, 21 bp, homo sapiens
taccaccatggcgagcagtgc

SEQ ID NO: 36341 - RNA, 21 nt, RNAi
ccaccauggcgagcagugcuu

SEQ ID NO: 36342 - RNA, 21 nt, RNAi
uuggugguaccgcucgucacg

SEQ ID NO: 36343 - DNA, 21 bp, homo sapiens
tagctccgtcttccagcagcc

SEQ ID NO: 36344 - RNA, 21 nt, RNAi
gcuccgucuuccagcagccuu

SEQ ID NO: 36345 - RNA, 21 nt, RNAi
uucgaggcagaaggucgucgg

SEQ ID NO: 36346 - DNA, 21 bp, homo sapiens
taccaacaccagctgtcggag

SEQ ID NO: 36347 - RNA, 21 nt, RNAi
ccaacaccagcugucggaguu

SEQ ID NO: 36348 - RNA, 21 nt, RNAi
uugguuguggucgacagccuc

SEQ ID NO: 36349 - DNA, 21 bp, homo sapiens
taagcaagaataccatgatcc

SEQ ID NO: 36350 - RNA, 21 nt, RNAi
agcaagaauaccaugauccuu

SEQ ID NO: 36351 - RNA, 21 nt, RNAi
uuucguucuuaugguacuagg

SEQ ID NO: 36352 - DNA, 21 bp, homo sapiens
tatggctatgagaaacctctg

SEQ ID NO: 36353 - RNA, 21 nt, RNAi
uggcuaugagaaaccucuguu

SEQ ID NO: 36354 - RNA, 21 nt, RNAi
uuaccgauacucuuuggagac

SEQ ID NO: 36355 - DNA, 21 bp, homo sapiens
tatgagaaacctctgcgacca

SEQ ID NO: 36356 - RNA, 21 nt, RNAi
ugagaaaccucugcgaccauu

SEQ ID NO: 36357 - RNA, 21 nt, RNAi
uuacucuuuggagacgcuggu

SEQ ID NO: 36358 - DNA, 21 bp, homo sapiens
tacgacaagctgagccgctcg

SEQ ID NO: 36359 - RNA, 21 nt, RNAi
cgacaagcugagccgcucguu

SEQ ID NO: 36360 - RNA, 21 nt, RNAi
uugcuguucgacucggcgagc

SEQ ID NO: 36361 - DNA, 21 bp, homo sapiens
tactattatgagaaaggcatc

SEQ ID NO: 36362 - RNA, 21 nt, RNAi
cuauuaugagaaaggcaucuu

SEQ ID NO: 36363 - RNA, 21 nt, RNAi
uugauaauacucuuuccguag

SEQ ID NO: 36364 - DNA, 21 bp, homo sapiens
tattatgagaaaggcatcatg

SEQ ID NO: 36365 - RNA, 21 nt, RNAi
uuaugagaaaggcaucauguu

SEQ ID NO: 36366 - RNA, 21 nt, RNAi
uuaauacucuuuccguaguac

SEQ ID NO: 36367 - DNA, 21 bp, homo sapiens
tatgagaaaggcatcatgcag

SEQ ID NO: 36368 - RNA, 21 nt, RNAi
ugagaaaggcaucaugcaguu

SEQ ID NO: 36369 - RNA, 21 nt, RNAi
uuacucuuuccguaguacguc

SEQ ID NO: 36370 - DNA, 21 bp, homo sapiens
tacgtgtacaagtttgtgtgt

SEQ ID NO: 36371 - RNA, 21 nt, RNAi
cguguacaaguuuguguguuu

SEQ ID NO: 36372 - RNA, 21 nt, RNAi
uugcacauguucaaacacaca

SEQ ID NO: 36373 - DNA, 21 bp, homo sapiens
tataaatgaatctggtgttgg

SEQ ID NO: 36374 - RNA, 21 nt, RNAi
uaaaugaaucugguguugguu

SEQ ID NO: 36375 - RNA, 21 nt, RNAi
uuauuuacuuagaccacaacc

SEQ ID NO: 36376 - DNA, 21 bp, homo sapiens
taccggtttgtcagttcttgg

SEQ ID NO: 36377 - RNA, 21 nt, RNAi
ccgguuugucaguucuugguu

SEQ ID NO: 36378 - RNA, 21 nt, RNAi
uuggccaaacagucaagaacc

SEQ ID NO: 36379 - DNA, 21 bp, homo sapiens
tacttccacctccaccacatc

SEQ ID NO: 36380 - RNA, 21 nt, RNAi
cuuccaccuccaccacaucuu

SEQ ID NO: 36381 - RNA, 21 nt, RNAi
uugaagguggaggugguguag

SEQ ID NO: 36382 - DNA, 21 bp, homo sapiens
aacggaatttcctgagatcct

SEQ ID NO: 36383 - RNA, 21 nt, RNAi
cggaauuuccugagauccuuu

SEQ ID NO: 36384 - RNA, 21 nt, RNAi
uugccuuaaaggacucuagga

SEQ ID NO: 36385 - DNA, 21 bp, homo sapiens
aaacaggaacagacggacttc

SEQ ID NO: 36386 - RNA, 21 nt, RNAi
acaggaacagacggacuucuu

SEQ ID NO: 36387 - RNA, 21 nt, RNAi
uuuguccuugucugccugaag

SEQ ID NO: 36388 - DNA, 21 bp, homo sapiens
aatggagttcaagctcattga

SEQ ID NO: 36389 - RNA, 21 nt, RNAi
uggaguucaagcucauugauu

SEQ ID NO: 36390 - RNA, 21 nt, RNAi
uuaccucaaguucgaguaacu

SEQ ID NO: 36391 - DNA, 21 bp, homo sapiens
caggatctaagtcacttccag

SEQ ID NO: 36392 - RNA, 21 nt, RNAi
ggaucuaagucacuuccaguu

SEQ ID NO: 36393 - RNA, 21 nt, RNAi
uuccuagauucagugaagguc

SEQ ID NO: 36394 - DNA, 21 bp, homo sapiens
cagacaaatcgccatcaagtc

SEQ ID NO: 36395 - RNA, 21 nt, RNAi
gacaaaucgccaucaagucuu

SEQ ID NO: 36396 - RNA, 21 nt, RNAi
uucuguuuagcgguaguucag

SEQ ID NO: 36397 - DNA, 21 bp, homo sapiens
caacggaatttcctgagatcc

SEQ ID NO: 36398 - RNA, 21 nt, RNAi
acggaauuuccugagauccuu

SEQ ID NO: 36399 - RNA, 21 nt, RNAi
uuugccuuaaaggacucuagg

SEQ ID NO: 36400 - DNA, 21 bp, homo sapiens
caaacaggaacagacggactt

SEQ ID NO: 36401 - RNA, 21 nt, RNAi
aacaggaacagacggacuuuu

SEQ ID NO: 36402 - RNA, 21 nt, RNAi
uuuuguccuugucugccugaa

SEQ ID NO: 36403 - DNA, 21 bp, homo sapiens
cagatgatgtctgcgttgtcc

SEQ ID NO: 36404 - RNA, 21 nt, RNAi
gaugaugucugcguuguccuu

SEQ ID NO: 36405 - RNA, 21 nt, RNAi
uucuacuacagacgcaacagg

SEQ ID NO: 36406 - DNA, 21 bp, homo sapiens
caatcagcgtccagctctcaa

SEQ ID NO: 36407 - RNA, 21 nt, RNAi
aucagcguccagcucucaauu

SEQ ID NO: 36408 - RNA, 21 nt, RNAi
uuuagucgcaggucgagaguu

SEQ ID NO: 36409 - DNA, 21 bp, homo sapiens
gaagctcaggtaccagacagt

SEQ ID NO: 36410 - RNA, 21 nt, RNAi
agcucagguaccagacaguuu

SEQ ID NO: 36411 - RNA, 21 nt, RNAi
uuucgaguccauggucuguca

SEQ ID NO: 36412 - DNA, 21 bp, homo sapiens
gagcagtgcctttactccagt

SEQ ID NO: 36413 - RNA, 21 nt, RNAi
gcagugccuuuacuccaguuu

SEQ ID NO: 36414 - RNA, 21 nt, RNAi
uucgucacggaaaugagguca

SEQ ID NO: 36415 - DNA, 21 bp, homo sapiens
gaacatagctccgtcttccag

SEQ ID NO: 36416 - RNA, 21 nt, RNAi
acauagcuccgucuuccaguu

SEQ ID NO: 36417 - RNA, 21 nt, RNAi
uuuguaucgaggcagaagguc

SEQ ID NO: 36418 - DNA, 21 bp, homo sapiens
gacttcgcctacgactcagat

SEQ ID NO: 36419 - RNA, 21 nt, RNAi
cuucgccuacgacucagauuu

SEQ ID NO: 36420 - RNA, 21 nt, RNAi
uugaagcggaugcugagucua

SEQ ID NO: 36421 - DNA, 21 bp, homo sapiens
gagaaacctctgcgaccattc

SEQ ID NO: 36422 - RNA, 21 nt, RNAi
gaaaccucugcgaccauucuu

SEQ ID NO: 36423 - RNA, 21 nt, RNAi
uucuuuggagacgcugguaag

SEQ ID NO: 36424 - DNA, 21 bp, homo sapiens
taagcaagaataccatgatcc

SEQ ID NO: 36425 - RNA, 21 nt, RNAi
agcaagaauaccaugauccuu

SEQ ID NO: 36426 - RNA, 21 nt, RNAi
uuucguucuuaugguacuagg

SEQ ID NO: 36427 - DNA, 21 bp, homo sapiens
tatgagaaacctctgcgacca

SEQ ID NO: 36428 - RNA, 21 nt, RNAi
ugagaaaccucugcgaccauu

SEQ ID NO: 36429 - RNA, 21 nt, RNAi
uuacucuuuggagacgcuggu

SEQ ID NO: 36430 - DNA, 21 bp, Homo sapiens
aagtgcaaggtcaaatggacc

SEQ ID NO: 36431 - RNA, 21 nt, RNAi
gugcaaggucaaauggaccuu

SEQ ID NO: 36432 - RNA, 21 nt, RNAi
uucacguuccaguuuaccugg

SEQ ID NO: 36433 - DNA, 21 bp, Homo sapiens
aagttcctggccagccacttc

SEQ ID NO: 36434 - RNA, 21 nt, RNAi
guuccuggccagccacuucuu

SEQ ID NO: 36435 - RNA, 21 nt, RNAi
uucaaggaccggucggugaag

SEQ ID NO: 36436 - DNA, 21 bp, Homo sapiens
aaccgcactgaccagcaatgc

SEQ ID NO: 36437 - RNA, 21 nt, RNAi
ccgcacugaccagcaaugcuu

SEQ ID NO: 36438 - RNA, 21 nt, RNAi
uuggcgugacuggucguuacg

SEQ ID NO: 36439 - DNA, 21 bp, Homo sapiens
aatgccagtacaggtggctga

SEQ ID NO: 36440 - RNA, 21 nt, RNAi
ugccaguacagguggcugauu

SEQ ID NO: 36441 - RNA, 21 nt, RNAi
uuacggucauguccaccgacu

SEQ ID NO: 36442 - DNA, 21 bp, Homo sapiens
aaagtcatcgagctggttaag

SEQ ID NO: 36443 - RNA, 21 nt, RNAi
agucaucgagcugguuaaguu

SEQ ID NO: 36444 - RNA, 21 nt, RNAi
uuucaguagcucgaccaauuc

SEQ ID NO: 36445 - DNA, 21 bp, Homo sapiens
aagtcatcgagctggttaaga

SEQ ID NO: 36446 - RNA, 21 nt, RNAi
gucaucgagcugguuaagauu

SEQ ID NO: 36447 - RNA, 21 nt, RNAi
uucaguagcucgaccaauucu

SEQ ID NO: 36448 - DNA, 21 bp, Homo sapiens
aagaagtatggcacaaagcag

SEQ ID NO: 36449 - RNA, 21 nt, RNAi
gaaguauggcacaaagcaguu

SEQ ID NO: 36450 - RNA, 21 nt, RNAi
uucuucauaccguguuucguc

SEQ ID NO: 36451 - DNA, 21 bp, Homo sapiens
aagtatggcacaaagcagtgg

SEQ ID NO: 36452 - RNA, 21 nt, RNAi
guauggcacaaagcagugguu

SEQ ID NO: 36453 - RNA, 21 nt, RNAi
uucauaccguguuucgucacc

SEQ ID NO: 36454 - DNA, 21 bp, Homo sapiens
aaagcagtggacactgattgc

SEQ ID NO: 36455 - RNA, 21 nt, RNAi
agcaguggacacugauugcuu

SEQ ID NO: 36456 - RNA, 21 nt, RNAi
uuucgucaccugugacuaacg

SEQ ID NO: 36457 - DNA, 21 bp, homo sapiens
aagcagtggacactgattgcc

SEQ ID NO: 36458 - RNA, 21 nt, RNAi
gcaguggacacugauugccuu

SEQ ID NO: 36459 - RNA, 21 nt, RNAi
uucgucaccugugacuaacgg

SEQ ID NO: 36460 - DNA, 21 bp, homo sapiens
aagcagtgccgtgaacgctgg

SEQ ID NO: 36461 - RNA, 21 nt, RNAi
gcagugccgugaacgcugguu

SEQ ID NO: 36462 - RNA, 21 nt, RNAi
uucgucacggcacuugcgacc

SEQ ID NO: 36463 - DNA, 21 bp, homo sapiens
aacgctggcacaaccacctca

SEQ ID NO: 36464 - RNA, 21 nt, RNAi
cgcuggcacaaccaccucauu

SEQ ID NO: 36465 - RNA, 21 nt, RNAi
uugcgaccguguugguggagu

SEQ ID NO: 36466 - DNA, 21 bp, homo sapiens
aagaagtcttgctggaccgag

SEQ ID NO: 36467 - RNA, 21 nt, RNAi
gaagucuugcuggaccgaguu

SEQ ID NO: 36468 - RNA, 21 nt, RNAi
uucuucagaacgaccuggcuc

SEQ ID NO: 36469 - DNA, 21 bp, homo sapiens
aagtcttgctggaccgaggag

SEQ ID NO: 36470 - RNA, 21 nt, RNAi
gucuugcuggaccgaggaguu

SEQ ID NO: 36471 - RNA, 21 nt, RNAi
uucagaacgaccuggcuccuc

SEQ ID NO: 36472 - DNA, 21 bp, homo sapiens
aatgctgtgaagaatcactgg

SEQ ID NO: 36473 - RNA, 21 nt, RNAi
ugcugugaagaaucacugguu

SEQ ID NO: 36474 - RNA, 21 nt, RNAi
uuacgacacuucuuagugacc

SEQ ID NO: 36475 - DNA, 21 bp, homo sapiens
aagaatcactggaactctacc

SEQ ID NO: 36476 - RNA, 21 nt, RNAi
gaaucacuggaacucuaccuu

SEQ ID NO: 36477 - RNA, 21 nt, RNAi
uucuuagugaccuugagaugg

SEQ ID NO: 36478 - DNA, 21 bp, homo sapiens
aatcactggaactctaccatc

SEQ ID NO: 36479 - RNA, 21 nt, RNAi
ucacuggaacucuaccaucuu

SEQ ID NO: 36480 - RNA, 21 nt, RNAi
uuagugaccuugagaugguag

SEQ ID NO: 36481 - DNA, 21 bp, homo sapiens
aaaggaaggtggacacaggag

SEQ ID NO: 36482 - RNA, 21 nt, RNAi
aggaagguggacacaggaguu

SEQ ID NO: 36483 - RNA, 21 nt, RNAi
uuuccuuccaccuguguccuc

SEQ ID NO: 36484 - DNA, 21 bp, homo sapiens
aaggaaggtggacacaggagg

SEQ ID NO: 36485 - RNA, 21 nt, RNAi
ggaagguggacacaggagguu

SEQ ID NO: 36486 - RNA, 21 nt, RNAi
uuccuuccaccuguguccucc

SEQ ID NO: 36487 - DNA, 21 bp, homo sapiens
aaggtggacacaggaggcttc

SEQ ID NO: 36488 - RNA, 21 nt, RNAi
gguggacacaggaggcuucuu

SEQ ID NO: 36489 - RNA, 21 nt, RNAi
uuccaccuguguccuccgaag

SEQ ID NO: 36490 - DNA, 21 bp, homo sapiens
aagtcttctgaccaactggcc

SEQ ID NO: 36491 - RNA, 21 nt, RNAi
gucuucugaccaacuggccuu

SEQ ID NO: 36492 - RNA, 21 nt, RNAi
uucagaagacugguugaccgg

SEQ ID NO: 36493 - DNA, 21 bp, homo sapiens
aaacagtgaggaggaacttgc

SEQ ID NO: 36494 - RNA, 21 nt, RNAi
acagugaggaggaacuugcuu

SEQ ID NO: 36495 - RNA, 21 nt, RNAi
uuugucacuccuccuugaacg

SEQ ID NO: 36496 - DNA, 21 bp, homo sapiens
aacagtgaggaggaacttgca

SEQ ID NO: 36497 - RNA, 21 nt, RNAi
cagugaggaggaacuugcauu

SEQ ID NO: 36498 - RNA, 21 nt, RNAi
uugucacuccuccuugaacgu

SEQ ID NO: 36499 - DNA, 21 bp, homo sapiens
aacttgcagcagccaccacat

SEQ ID NO: 36500 - RNA, 21 nt, RNAi
cuugcagcagccaccacauuu

SEQ ID NO: 36501 - RNA, 21 nt, RNAi
uugaacgucgucgguggugua

SEQ ID NO: 36502 - DNA, 21 bp, homo sapiens
aagcgtgaggaccaggaaggc

SEQ ID NO: 36503 - RNA, 21 nt, RNAi
gcgugaggaccaggaaggcuu

SEQ ID NO: 36504 - RNA, 21 nt, RNAi
uucgcacuccugguccuuccg

SEQ ID NO: 36505 - DNA, 21 bp, homo sapiens
aaacgagcctgccttacaagt

SEQ ID NO: 36506 - RNA, 21 nt, RNAi
acgagccugccuuacaaguuu

SEQ ID NO: 36507 - RNA, 21 nt, RNAi
uuugcucggacggaauguuca

SEQ ID NO: 36508 - DNA, 21 bp, homo sapiens
aacgagcctgccttacaagtg

SEQ ID NO: 36509 - RNA, 21 nt, RNAi
cgagccugccuuacaaguguu

SEQ ID NO: 36510 - RNA, 21 nt, RNAi
uugcucggacggaauguucac

SEQ ID NO: 36511 - DNA, 21 bp, homo sapiens
aaccatctgcagaggacagta

SEQ ID NO: 36512 - RNA, 21 nt, RNAi
ccaucugcagaggacaguauu

SEQ ID NO: 36513 - RNA, 21 nt, RNAi
uugguagacgucuccugucau

SEQ ID NO: 36514 - DNA, 21 bp, homo sapiens
aacaacagcctagtgcagctg

SEQ ID NO: 36515 - RNA, 21 nt, RNAi
caacagccuagugcagcuguu

SEQ ID NO: 36516 - RNA, 21 nt, RNAi
uuguugucggaucacgucgac

SEQ ID NO: 36517 - DNA, 21 bp, homo sapiens
aacagcctagtgcagctgcaa

SEQ ID NO: 36518 - RNA, 21 nt, RNAi
cagccuagugcagcugcaauu

SEQ ID NO: 36519 - RNA, 21 nt, RNAi
uugucggaucacgucgacguu

SEQ ID NO: 36520 - DNA, 21 bp, homo sapiens
aagcgtcacatcagcagcaag

SEQ ID NO: 36521 - RNA, 21 nt, RNAi
gcgucacaucagcagcaaguu

SEQ ID NO: 36522 - RNA, 21 nt, RNAi
uucgcaguguagucgucguuc

SEQ ID NO: 36523 - DNA, 21 bp, homo sapiens
aagcggcagaggaagaggcgt

SEQ ID NO: 36524 - RNA, 21 nt, RNAi
gcggcagaggaagaggcguuu

SEQ ID NO: 36525 - RNA, 21 nt, RNAi
uucgccgucuccuucuccgca

SEQ ID NO: 36526 - DNA, 21 bp, homo sapiens
aagaggcgtgtggctctgtcc

SEQ ID NO: 36527 - RNA, 21 nt, RNAi
gaggcguguggcucuguccuu

SEQ ID NO: 36528 - RNA, 21 nt, RNAi
uucuccgcacaccgagacagg

SEQ ID NO: 36529 - DNA, 21 bp, homo sapiens
aatagcaccagtctgtccttc

SEQ ID NO: 36530 - RNA, 21 nt, RNAi
uagcaccagucuguccuucuu

SEQ ID NO: 36531 - RNA, 21 nt, RNAi
uuaucguggucagacaggaag

SEQ ID NO: 36532 - DNA, 21 bp, homo sapiens
aagagcacacctgttaagacc

SEQ ID NO: 36533 - RNA, 21 nt, RNAi
gagcacaccuguuaagaccuu

SEQ ID NO: 36534 - RNA, 21 nt, RNAi
uucucguguggacaauucugg

SEQ ID NO: 36535 - DNA, 21 bp, homo sapiens
aacttctggaacaaacaggac

SEQ ID NO: 36536 - RNA, 21 nt, RNAi
cuucuggaacaaacaggacuu

SEQ ID NO: 36537 - RNA, 21 nt, RNAi
uugaagaccuuguuuguccug

SEQ ID NO: 36538 - DNA, 21 bp, homo sapiens
aacaaacaggacacattggag

SEQ ID NO: 36539 - RNA, 21 nt, RNAi
caaacaggacacauuggaguu

SEQ ID NO: 36540 - RNA, 21 nt, RNAi
uuguuuguccuguguaaccuc

SEQ ID NO: 36541 - DNA, 21 bp, homo sapiens
aaacaggacacattggagctg

SEQ ID NO: 36542 - RNA, 21 nt, RNAi
acaggacacauuggagcuguu

SEQ ID NO: 36543 - RNA, 21 nt, RNAi
uuuguccuguguaaccucgac

SEQ ID NO: 36544 - DNA, 21 bp, homo sapiens
aacaggacacattggagctgg

SEQ ID NO: 36545 - RNA, 21 nt, RNAi
caggacacauuggagcugguu

SEQ ID NO: 36546 - RNA, 21 nt, RNAi
uuguccuguguaaccucgacc

SEQ ID NO: 36547 - DNA, 21 bp, homo sapiens
aaggtggtggtcaccacacca

SEQ ID NO: 36548 - RNA, 21 nt, RNAi
ggugguggucaccacaccauu

SEQ ID NO: 36549 - RNA, 21 nt, RNAi
uuccaccaccagugguguggu

SEQ ID NO: 36550 - DNA, 21 bp, homo sapiens
aaacatgctgcgtttgtaacc

SEQ ID NO: 36551 - RNA, 21 nt, RNAi
acaugcugcguuuguaaccuu

SEQ ID NO: 36552 - RNA, 21 nt, RNAi
uuuguacgacgcaaacauugg

SEQ ID NO: 36553 - DNA, 21 bp, homo sapiens
aagtactccatggacaacact

SEQ ID NO: 36554 - RNA, 21 nt, RNAi
guacuccauggacaacacuuu

SEQ ID NO: 36555 - RNA, 21 nt, RNAi
uucaugagguaccuguuguga

SEQ ID NO: 36556 - DNA, 21 bp, homo sapiens
aaggaggtgctgcgttctgag

SEQ ID NO: 36557 - RNA, 21 nt, RNAi
ggaggugcugcguucugaguu

SEQ ID NO: 36558 - RNA, 21 nt, RNAi
uuccuccacgacgcaagacuc

SEQ ID NO: 36559 - DNA, 21 bp, homo sapiens
aactcatcatcgaggacgaca

SEQ ID NO: 36560 - RNA, 21 nt, RNAi
cucaucaucgaggacgacauu

SEQ ID NO: 36561 - RNA, 21 nt, RNAi
uugaguaguagcuccugcugu

SEQ ID NO: 36562 - DNA, 21 bp, homo sapiens
aagaaagtccggaagtctctg

SEQ ID NO: 36563 - RNA, 21 nt, RNAi
gaaaguccggaagucucuguu

SEQ ID NO: 36564 - RNA, 21 nt, RNAi
uucuuucaggccuucagagac

SEQ ID NO: 36565 - DNA, 21 bp, homo sapiens
aaagtccggaagtctctggct

SEQ ID NO: 36566 - RNA, 21 nt, RNAi
aguccggaagucucuggcuuu

SEQ ID NO: 36567 - RNA, 21 nt, RNAi
uuucaggccuucagagaccga

SEQ ID NO: 36568 - DNA, 21 bp, homo sapiens
aagtccggaagtctctggctc

SEQ ID NO: 36569 - RNA, 21 nt, RNAi
guccggaagucucuggcucuu

SEQ ID NO: 36570 - RNA, 21 nt, RNAi
uucaggccuucagagaccgag

SEQ ID NO: 36571 - DNA, 21 bp, homo sapiens
aagtctctggctcttgacatt

SEQ ID NO: 36572 - RNA, 21 nt, RNAi
gucucuggcucuugacauuuu

SEQ ID NO: 36573 - RNA, 21 nt, RNAi
uucagagaccgagaacuguaa

SEQ ID NO: 36574 - DNA, 21 bp, homo sapiens
aagctgatgatgtccacactg

SEQ ID NO: 36575 - RNA, 21 nt, RNAi
gcugaugauguccacacuguu

SEQ ID NO: 36576 - RNA, 21 nt, RNAi
uucgacuacuacaggugugac

SEQ ID NO: 36577 - DNA, 21 bp, homo sapiens
aagtctctatccttgccgaca

SEQ ID NO: 36578 - RNA, 21 nt, RNAi
gucucuauccuugccgacauu

SEQ ID NO: 36579 - RNA, 21 nt, RNAi
uucagagauaggaacggcugu

SEQ ID NO: 36580 - DNA, 21 bp, homo sapiens
aaagaagacaacagcttgctc

SEQ ID NO: 36581 - RNA, 21 nt, RNAi
agaagacaacagcuugcucuu

SEQ ID NO: 36582 - RNA, 21 nt, RNAi
uuucuucuguugucgaacgag

SEQ ID NO: 36583 - DNA, 21 bp, homo sapiens
aagaagacaacagcttgctca

SEQ ID NO: 36584 - RNA, 21 nt, RNAi
gaagacaacagcuugcucauu

SEQ ID NO: 36585 - RNA, 21 nt, RNAi
uucuucuguugucgaacgagu

SEQ ID NO: 36586 - DNA, 21 bp, homo sapiens
aagacaacagcttgctcaacc

SEQ ID NO: 36587 - RNA, 21 nt, RNAi
gacaacagcuugcucaaccuu

SEQ ID NO: 36588 - RNA, 21 nt, RNAi
uucuguugucgaacgaguugg

SEQ ID NO: 36589 - DNA, 21 bp, homo sapiens
aagccacttcacgacacctgc

SEQ ID NO: 36590 - RNA, 21 nt, RNAi
gccacuucacgacaccugcuu

SEQ ID NO: 36591 - RNA, 21 nt, RNAi
uucggugaagugcuguggacg

SEQ ID NO: 36592 - DNA, 21 bp, homo sapiens
aatctgagagtcattcaggtg

SEQ ID NO: 36593 - RNA, 21 nt, RNAi
ucugagagucauucagguguu

SEQ ID NO: 36594 - RNA, 21 nt, RNAi
uuagacucucaguaaguccac

SEQ ID NO: 36595 - DNA, 21 bp, homo sapiens
aacaacaaagttccacttcca

SEQ ID NO: 36596 - RNA, 21 nt, RNAi
caacaaaguuccacuuccauu

SEQ ID NO: 36597 - RNA, 21 nt, RNAi
uuguuguuucaaggugaaggu

SEQ ID NO: 36598 - DNA, 21 bp, Homo sapiens
aacaaagttccacttccaggt

SEQ ID NO: 36599 - RNA, 21 nt, RNAi
caaaguuccacuuccagguuu

SEQ ID NO: 36600 - RNA, 21 nt, RNAi
uuguuucaaggugaaggucca

SEQ ID NO: 36601 - DNA, 21 bp, homo sapiens
aaagttccacttccaggtctg

SEQ ID NO: 36602 - RNA, 21 nt, RNAi
aguuccacuuccaggucuguu

SEQ ID NO: 36603 - RNA, 21 nt, RNAi
uuucaaggugaagguccagac

SEQ ID NO: 36604 - DNA, 21 bp, homo sapiens
aagttccacttccaggtctgc

SEQ ID NO: 36605 - RNA, 21 nt, RNAi
guuccacuuccaggucugcuu

SEQ ID NO: 36606 - RNA, 21 nt, RNAi
uucaaggugaagguccagacg

SEQ ID NO: 36607 - DNA, 21 bp, homo sapiens
cactaccaggacacagattca

SEQ ID NO: 36608 - RNA, 21 nt, RNAi
cuaccaggacacagauucauu

SEQ ID NO: 36609 - RNA, 21 nt, RNAi
uugaugguccugugucuaagu

SEQ ID NO: 36610 - DNA, 21 bp, homo sapiens
caggacacagattcagatgtg

SEQ ID NO: 36611 - RNA, 21 nt, RNAi
ggacacagauucagauguguu

SEQ ID NO: 36612 - RNA, 21 nt, RNAi
uuccugugucuaagucuacac

SEQ ID NO: 36613 - DNA, 21 bp, homo sapiens
cacagattcagatgtgccgga

SEQ ID NO: 36614 - RNA, 21 nt, RNAi
cagauucagaugugccggauu

SEQ ID NO: 36615 - RNA, 21 nt, RNAi
uugucuaagucuacacggccu

SEQ ID NO: 36616 - DNA, 21 bp, homo sapiens
cagattcagatgtgccggagc

SEQ ID NO: 36617 - RNA, 21 nt, RNAi
gauucagaugugccggagcuu

SEQ ID NO: 36618 - RNA, 21 nt, RNAi
uucuaagucuacacggccucg

SEQ ID NO: 36619 - DNA, 21 bp, homo sapiens
caagtgcaaggtcaaatggac

SEQ ID NO: 36620 - RNA, 21 nt, RNAi
agugcaaggucaaauggacuu

SEQ ID NO: 36621 - RNA, 21 nt, RNAi
uuucacguuccaguuuaccug

SEQ ID NO: 36622 - DNA, 21 bp, homo sapiens
catgaggaggacgagcagctg

SEQ ID NO: 36623 - RNA, 21 nt, RNAi
ugaggaggacgagcagcuguu

SEQ ID NO: 36624 - RNA, 21 nt, RNAi
uuacuccuccugcucgucgac

SEQ ID NO: 36625 - DNA, 21 bp, homo sapiens
cagtttggacagcaggactgg

SEQ ID NO: 36626 - RNA, 21 nt, RNAi
guuuggacagcaggacugguu

SEQ ID NO: 36627 - RNA, 21 nt, RNAi
uucaaaccugucguccugacc

SEQ ID NO: 36628 - DNA, 21 bp, homo sapiens
cagcaggactggaagttcctg

SEQ ID NO: 36629 - RNA, 21 nt, RNAi
gcaggacuggaaguuccuguu

SEQ ID NO: 36630 - RNA, 21 nt, RNAi
uucguccugaccuucaaggac

SEQ ID NO: 36631 - DNA, 21 bp, homo sapiens
caggactggaagttcctggcc

SEQ ID NO: 36632 - RNA, 21 nt, RNAi
ggacuggaaguuccuggccuu

SEQ ID NO: 36633 - RNA, 21 nt, RNAi
uuccugaccuucaaggaccgg

SEQ ID NO: 36634 - DNA, 21 bp, homo sapiens
cactgaccagcaatgccagta

SEQ ID NO: 36635 - RNA, 21 nt, RNAi
cugaccagcaaugccaguauu

SEQ ID NO: 36636 - RNA, 21 nt, RNAi
uugacuggucguuacggucau

SEQ ID NO: 36637 - DNA, 21 bp, homo sapiens
cagcaatgccagtacaggtgg

SEQ ID NO: 36638 - RNA, 21 nt, RNAi
gcaaugccaguacaggugguu

SEQ ID NO: 36639 - RNA, 21 nt, RNAi
uucguuacggucauguccacc

SEQ ID NO: 36640 - DNA, 21 bp, homo sapiens
caatgccagtacaggtggctg

SEQ ID NO: 36641 - RNA, 21 nt, RNAi
augccaguacagguggcuguu

SEQ ID NO: 36642 - RNA, 21 nt, RNAi
uuuacggucauguccaccgac

SEQ ID NO: 36643 - DNA, 21 bp, homo sapiens
cagtacaggtggctgagagtt

SEQ ID NO: 36644 - RNA, 21 nt, RNAi
guacagguggcugagaguuuu

SEQ ID NO: 36645 - RNA, 21 nt, RNAi
uucauguccaccgacucucaa

SEQ ID NO: 36646 - DNA, 21 bp, homo sapiens
catggaccaaagaggaagacc

SEQ ID NO: 36647 - RNA, 21 nt, RNAi
uggaccaaagaggaagaccuu

SEQ ID NO: 36648 - RNA, 21 nt, RNAi
uuaccugguuucuccuucugg

SEQ ID NO: 36649 - DNA, 21 bp, homo sapiens
catcgagctggttaagaagta

SEQ ID NO: 36650 - RNA, 21 nt, RNAi
ucgagcugguuaagaaguauu

SEQ ID NO: 36651 - RNA, 21 nt, RNAi
uuagcucgaccaauucuucau

SEQ ID NO: 36652 - DNA, 21 bp, homo sapiens
cacaaagcagtggacactgat

SEQ ID NO: 36653 - RNA, 21 nt, RNAi
caaagcaguggacacugauuu

SEQ ID NO: 36654 - RNA, 21 nt, RNAi
uuguuucgucaccugugacua

SEQ ID NO: 36655 - DNA, 21 bp, homo sapiens
caaagcagtggacactgattg

SEQ ID NO: 36656 - RNA, 21 nt, RNAi
aagcaguggacacugauuguu

SEQ ID NO: 36657 - RNA, 21 nt, RNAi
uuuucgucaccugugacuaac

SEQ ID NO: 36658 - DNA, 21 bp, homo sapiens
cagtggacactgattgccaag

SEQ ID NO: 36659 - RNA, 21 nt, RNAi
guggacacugauugccaaguu

SEQ ID NO: 36660 - RNA, 21 nt, RNAi
uucaccugugacuaacgguuc

SEQ ID NO: 36661 - DNA, 21 bp, homo sapiens
cactgattgccaagcacctga

SEQ ID NO: 36662 - RNA, 21 nt, RNAi
cugauugccaagcaccugauu

SEQ ID NO: 36663 - RNA, 21 nt, RNAi
uugacuaacgguucguggacu

SEQ ID NO: 36664 - DNA, 21 bp, homo sapiens
cagacaatgctgtgaagaatc

SEQ ID NO: 36665 - RNA, 21 nt, RNAi
gacaaugcugugaagaaucuu

SEQ ID NO: 36666 - RNA, 21 nt, RNAi
uucuguuacgacacuucuuag

SEQ ID NO: 36667 - DNA, 21 bp, homo sapiens
caatgctgtgaagaatcactg

SEQ ID NO: 36668 - RNA, 21 nt, RNAi
augcugugaagaaucacuguu

SEQ ID NO: 36669 - RNA, 21 nt, RNAi
uuuacgacacuucuuagugac

SEQ ID NO: 36670 - DNA, 21 bp, homo sapiens
cactggaactctaccatcaaa

SEQ ID NO: 36671 - RNA, 21 nt, RNAi
cuggaacucuaccaucaaauu

SEQ ID NO: 36672 - RNA, 21 nt, RNAi
uugaccuugagaugguaguuu

SEQ ID NO: 36673 - DNA, 21 bp, homo sapiens
cacaggaggcttcttgagcga

SEQ ID NO: 36674 - RNA, 21 nt, RNAi
caggaggcuucuugagcgauu

SEQ ID NO: 36675 - RNA, 21 nt, RNAi
uuguccuccgaagaacucgcu

SEQ ID NO: 36676 - DNA, 21 bp, homo sapiens
caggaggcttcttgagcgagt

SEQ ID NO: 36677 - RNA, 21 nt, RNAi
ggaggcuucuugagcgaguuu

SEQ ID NO: 36678 - RNA, 21 nt, RNAi
uuccuccgaagaacucgcuca

SEQ ID NO: 36679 - DNA, 21 bp, homo sapiens
cagtgtacttgctgctggagc

SEQ ID NO: 36680 - RNA, 21 nt, RNAi
guguacuugcugcuggagcuu

SEQ ID NO: 36681 - RNA, 21 nt, RNAi
uucacaugaacgacgaccucg

SEQ ID NO: 36682 - DNA, 21 bp, homo sapiens
cagtgaggaggaacttgcagc

SEQ ID NO: 36683 - RNA, 21 nt, RNAi
gugaggaggaacuugcagcuu

SEQ ID NO: 36684 - RNA, 21 nt, RNAi
uucacuccuccuugaacgucg

SEQ ID NO: 36685 - DNA, 21 bp, homo sapiens
cagcagccaccacatcgaagg

SEQ ID NO: 36686 - RNA, 21 nt, RNAi
gcagccaccacaucgaagguu

SEQ ID NO: 36687 - RNA, 21 nt, RNAi
uucgucggugguguagcuucc

SEQ ID NO: 36688 - DNA, 21 bp, homo sapiens
cagccaccacatcgaaggaac

SEQ ID NO: 36689 - RNA, 21 nt, RNAi
gccaccacaucgaaggaacuu

SEQ ID NO: 36690 - RNA, 21 nt, RNAi
uucggugguguagcuuccuug

SEQ ID NO: 36691 - DNA, 21 bp, homo sapiens
caccacatcgaaggaacagga

SEQ ID NO: 36692 - RNA, 21 nt, RNAi
ccacaucgaaggaacaggauu

SEQ ID NO: 36693 - RNA, 21 nt, RNAi
uugguguagcuuccuuguccu

SEQ ID NO: 36694 - DNA, 21 bp, homo sapiens
cacatcgaaggaacaggagcc

SEQ ID NO: 36695 - RNA, 21 nt, RNAi
caucgaaggaacaggagccuu

SEQ ID NO: 36696 - RNA, 21 nt, RNAi
uuguagcuuccuuguccucgg

SEQ ID NO: 36697 - DNA, 21 bp, homo sapiens
catcggtacagatctggacgc

SEQ ID NO: 36698 - RNA, 21 nt, RNAi
ucgguacagaucuggacgcuu

SEQ ID NO: 36699 - RNA, 21 nt, RNAi
uuagccaugucuagaccugcg

SEQ ID NO: 36700 - DNA, 21 bp, homo sapiens
cagatctggacgcagtgcgaa

SEQ ID NO: 36701 - RNA, 21 nt, RNAi
gaucuggacgcagugcgaauu

SEQ ID NO: 36702 - RNA, 21 nt, RNAi
uucuagaccugcgucacgcuu

SEQ ID NO: 36703 - DNA, 21 bp, homo sapiens
caccagaaacgagcctgcctt

SEQ ID NO: 36704 - RNA, 21 nt, RNAi
ccagaaacgagccugccuuuu

SEQ ID NO: 36705 - RNA, 21 nt, RNAi
uuggucuuugcucggacggaa

SEQ ID NO: 36706 - DNA, 21 bp, homo sapiens
cagaaacgagcctgccttaca

SEQ ID NO: 36707 - RNA, 21 nt, RNAi
gaaacgagccugccuuacauu

SEQ ID NO: 36708 - RNA, 21 nt, RNAi
uucuuugcucggacggaaugu

SEQ ID NO: 36709 - DNA, 21 bp, homo sapiens
catctgcagaggacagtatca

SEQ ID NO: 36710 - RNA, 21 nt, RNAi
ucugcagaggacaguaucauu

SEQ ID NO: 36711 - RNA, 21 nt, RNAi
uuagacgucuccugucauagu

SEQ ID NO: 36712 - DNA, 21 bp, homo sapiens
cagaggacagtatcaacaaca

SEQ ID NO: 36713 - RNA, 21 nt, RNAi
gaggacaguaucaacaacauu

SEQ ID NO: 36714 - RNA, 21 nt, RNAi
uucuccugucauaguuguugu

SEQ ID NO: 36715 - DNA, 21 bp, homo sapiens
cagtatcaacaacagcctagt

SEQ ID NO: 36716 - RNA, 21 nt, RNAi
guaucaacaacagccuaguuu

SEQ ID NO: 36717 - RNA, 21 nt, RNAi
uucauaguuguugucggauca

SEQ ID NO: 36718 - DNA, 21 bp, homo sapiens
caacaacagcctagtgcagct

SEQ ID NO: 36719 - RNA, 21 nt, RNAi
acaacagccuagugcagcuuu

SEQ ID NO: 36720 - RNA, 21 nt, RNAi
uuuguugucggaucacgucga

SEQ ID NO: 36721 - DNA, 21 bp, homo sapiens
caacagcctagtgcagctgca

SEQ ID NO: 36722 - RNA, 21 nt, RNAi
acagccuagugcagcugcauu

SEQ ID NO: 36723 - RNA, 21 nt, RNAi
uuugucggaucacgucgacgu

SEQ ID NO: 36724 - DNA, 21 bp, homo sapiens
cagcctagtgcagctgcaagc

SEQ ID NO: 36725 - RNA, 21 nt, RNAi
gccuagugcagcugcaagcuu

SEQ ID NO: 36726 - RNA, 21 nt, RNAi
uucggaucacgucgacguucg

SEQ ID NO: 36727 - DNA, 21 bp, homo sapiens
cagctgcaagcgtcacatcag

SEQ ID NO: 36728 - RNA, 21 nt, RNAi
gcugcaagcgucacaucaguu

SEQ ID NO: 36729 - RNA, 21 nt, RNAi
uucgacguucgcaguguaguc

SEQ ID NO: 36730 - DNA, 21 bp, homo sapiens
caagcgtcacatcagcagcaa

SEQ ID NO: 36731 - RNA, 21 nt, RNAi
agcgucacaucagcagcaauu

SEQ ID NO: 36732 - RNA, 21 nt, RNAi
uuucgcaguguagucgucguu

SEQ ID NO: 36733 - DNA, 21 bp, homo sapiens
cacatcagcagcaagtcctgc

SEQ ID NO: 36734 - RNA, 21 nt, RNAi
caucagcagcaaguccugcuu

SEQ ID NO: 36735 - RNA, 21 nt, RNAi
uuguagucgucguucaggacg

SEQ ID NO: 36736 - DNA, 21 bp, homo sapiens
catcagcagcaagtcctgcca

SEQ ID NO: 36737 - RNA, 21 nt, RNAi
ucagcagcaaguccugccauu

SEQ ID NO: 36738 - RNA, 21 nt, RNAi
uuagucgucguucaggacggu

SEQ ID NO: 36739 - DNA, 21 bp, homo sapiens
cagtgtgaccgagtaccgcct

SEQ ID NO: 36740 - RNA, 21 nt, RNAi
gugugaccgaguaccgccuuu

SEQ ID NO: 36741 - RNA, 21 nt, RNAi
uucacacuggcucauggcgga

SEQ ID NO: 36742 - DNA, 21 bp, homo sapiens
cacaccatctcagacctgagc

SEQ ID NO: 36743 - RNA, 21 nt, RNAi
caccaucucagaccugagcuu

SEQ ID NO: 36744 - RNA, 21 nt, RNAi
uugugguagagucuggacucg

SEQ ID NO: 36745 - DNA, 21 bp, homo sapiens
caccatctcagacctgagccg

SEQ ID NO: 36746 - RNA, 21 nt, RNAi
ccaucucagaccugagccguu

SEQ ID NO: 36747 - RNA, 21 nt, RNAi
uugguagagucuggacucggc

SEQ ID NO: 36748 - DNA, 21 bp, homo sapiens
catctcagacctgagccggag

SEQ ID NO: 36749 - RNA, 21 nt, RNAi
ucucagaccugagccggaguu

SEQ ID NO: 36750 - RNA, 21 nt, RNAi
uuagagucuggacucggccuc

SEQ ID NO: 36751 - DNA, 21 bp, homo sapiens
cagaggaagaggcgtgtggct

SEQ ID NO: 36752 - RNA, 21 nt, RNAi
gaggaagaggcguguggcuuu

SEQ ID NO: 36753 - RNA, 21 nt, RNAi
uucuccuucuccgcacaccga

SEQ ID NO: 36754 - DNA, 21 bp, homo sapiens
cactgagaatagcaccagtct

SEQ ID NO: 36755 - RNA, 21 nt, RNAi
cugagaauagcaccagucuuu

SEQ ID NO: 36756 - RNA, 21 nt, RNAi
uugacucuuaucguggucaga

SEQ ID NO: 36757 - DNA, 21 bp, homo sapiens
caccagtctgtccttcctgga

SEQ ID NO: 36758 - RNA, 21 nt, RNAi
ccagucuguccuuccuggauu

SEQ ID NO: 36759 - RNA, 21 nt, RNAi
uuggucagacaggaaggaccu

SEQ ID NO: 36760 - DNA, 21 bp, homo sapiens
cagtctgtccttcctggattc

SEQ ID NO: 36761 - RNA, 21 nt, RNAi
gucuguccuuccuggauucuu

SEQ ID NO: 36762 - RNA, 21 nt, RNAi
uucagacaggaaggaccuaag

SEQ ID NO: 36763 - DNA, 21 bp, homo sapiens
caagagcacacctgttaagac

SEQ ID NO: 36764 - RNA, 21 nt, RNAi
agagcacaccuguuaagacuu

SEQ ID NO: 36765 - RNA, 21 nt, RNAi
uuucucguguggacaauucug

SEQ ID NO: 36766 - DNA, 21 bp, homo sapiens
cagtttctgaacttctggaac

SEQ ID NO: 36767 - RNA, 21 nt, RNAi
guuucugaacuucuggaacuu

SEQ ID NO: 36768 - RNA, 21 nt, RNAi
uucaaagacuugaagaccuug

SEQ ID NO: 36769 - DNA, 21 bp, homo sapiens
caaacaggacacattggagct

SEQ ID NO: 36770 - RNA, 21 nt, RNAi
aacaggacacauuggagcuuu

SEQ ID NO: 36771 - RNA, 21 nt, RNAi
uuuuguccuguguaaccucga

SEQ ID NO: 36772 - DNA, 21 bp, homo sapiens
caggacacattggagctggag

SEQ ID NO: 36773 - RNA, 21 nt, RNAi
ggacacauuggagcuggaguu

SEQ ID NO: 36774 - RNA, 21 nt, RNAi
uuccuguguaaccucgaccuc

SEQ ID NO: 36775 - DNA, 21 bp, homo sapiens
cagtgtgcagccagaaggtgg

SEQ ID NO: 36776 - RNA, 21 nt, RNAi
gugugcagccagaaggugguu

SEQ ID NO: 36777 - RNA, 21 nt, RNAi
uucacacgucggucuuccacc

SEQ ID NO: 36778 - DNA, 21 bp, homo sapiens
cagccagaaggtggtggtcac

SEQ ID NO: 36779 - RNA, 21 nt, RNAi
gccagaaggugguggucacuu

SEQ ID NO: 36780 - RNA, 21 nt, RNAi
uucggucuuccaccaccagug

SEQ ID NO: 36781 - DNA, 21 bp, homo sapiens
cagaaggtggtggtcaccaca

SEQ ID NO: 36782 - RNA, 21 nt, RNAi
gaaggugguggucaccacauu

SEQ ID NO: 36783 - RNA, 21 nt, RNAi
uucuuccaccaccaguggugu

SEQ ID NO: 36784 - DNA, 21 bp, homo sapiens
caccagaaacatgctgcgttt

SEQ ID NO: 36785 - RNA, 21 nt, RNAi
ccagaaacaugcugcguuuuu

SEQ ID NO: 36786 - RNA, 21 nt, RNAi
uuggucuuuguacgacgcaaa

SEQ ID NO: 36787 - DNA, 21 bp, homo sapiens
cagaaacatgctgcgtttgta

SEQ ID NO: 36788 - RNA, 21 nt, RNAi
gaaacaugcugcguuuguauu

SEQ ID NO: 36789 - RNA, 21 nt, RNAi
uucuuuguacgacgcaaacau

SEQ ID NO: 36790 - DNA, 21 bp, homo sapiens
cagatcagaagtactccatgg

SEQ ID NO: 36791 - RNA, 21 nt, RNAi
gaucagaaguacuccaugguu

SEQ ID NO: 36792 - RNA, 21 nt, RNAi
uucuagucuucaugagguacc

SEQ ID NO: 36793 - DNA, 21 bp, homo sapiens
cagaagtactccatggacaac

SEQ ID NO: 36794 - RNA, 21 nt, RNAi
gaaguacuccauggacaacuu

SEQ ID NO: 36795 - RNA, 21 nt, RNAi
uucuucaugagguaccuguug

SEQ ID NO: 36796 - DNA, 21 bp, homo sapiens
cacctggaggaggacttgaag

SEQ ID NO: 36797 - RNA, 21 nt, RNAi
ccuggaggaggacuugaaguu

SEQ ID NO: 36798 - RNA, 21 nt, RNAi
uuggaccuccuccugaacuuc

SEQ ID NO: 36799 - DNA, 21 bp, homo sapiens
catcgaactcatcatcgagga

SEQ ID NO: 36800 - RNA, 21 nt, RNAi
ucgaacucaucaucgaggauu

SEQ ID NO: 36801 - RNA, 21 nt, RNAi
uuagcuugaguaguagcuccu

SEQ ID NO: 36802 - DNA, 21 bp, homo sapiens
catcatcgaggacgacatcag

SEQ ID NO: 36803 - RNA, 21 nt, RNAi
ucaucgaggacgacaucaguu

SEQ ID NO: 36804 - RNA, 21 nt, RNAi
uuaguagcuccugcuguaguc

SEQ ID NO: 36805 - DNA, 21 bp, homo sapiens
catcgaggacgacatcaggcc

SEQ ID NO: 36806 - RNA, 21 nt, RNAi
ucgaggacgacaucaggccuu

SEQ ID NO: 36807 - RNA, 21 nt, RNAi
uuagcuccugcuguaguccgg

SEQ ID NO: 36808 - DNA, 21 bp, homo sapiens
catcaagaaagtccggaagtc

SEQ ID NO: 36809 - RNA, 21 nt, RNAi
ucaagaaaguccggaagucuu

SEQ ID NO: 36810 - RNA, 21 nt, RNAi
uuaguucuuucaggccuucag

SEQ ID NO: 36811 - DNA, 21 bp, homo sapiens
caagaaagtccggaagtctct

SEQ ID NO: 36812 - RNA, 21 nt, RNAi
agaaaguccggaagucucuuu

SEQ ID NO: 36813 - RNA, 21 nt, RNAi
uuucuuucaggccuucagaga

SEQ ID NO: 36814 - DNA, 21 bp, homo sapiens
cattgtggatgaggatgtgaa

SEQ ID NO: 36815 - RNA, 21 nt, RNAi
uuguggaugaggaugugaauu

SEQ ID NO: 36816 - RNA, 21 nt, RNAi
uuaacaccuacuccuacacuu

SEQ ID NO: 36817 - DNA, 21 bp, homo sapiens
caagtctctatccttgccgac

SEQ ID NO: 36818 - RNA, 21 nt, RNAi
agucucuauccuugccgacuu

SEQ ID NO: 36819 - RNA, 21 nt, RNAi
uuucagagauaggaacggcug

SEQ ID NO: 36820 - DNA, 21 bp, homo sapiens
caggtatcaaagaagacaaca

SEQ ID NO: 36821 - RNA, 21 nt, RNAi
gguaucaaagaagacaacauu

SEQ ID NO: 36822 - RNA, 21 nt, RNAi
uuccauaguuucuucuguugu

SEQ ID NO: 36823 - DNA, 21 bp, homo sapiens
caaagaagacaacagcttgct

SEQ ID NO: 36824 - RNA, 21 nt, RNAi
aagaagacaacagcuugcuuu

SEQ ID NO: 36825 - RNA, 21 nt, RNAi
uuuucuucuguugucgaacga

SEQ ID NO: 36826 - DNA, 21 bp, homo sapiens
catcttgtcctgaggtgttga

SEQ ID NO: 36827 - RNA, 21 nt, RNAi
ucuuguccugagguguugauu

SEQ ID NO: 36828 - RNA, 21 nt, RNAi
uuagaacaggacuccacaacu

SEQ ID NO: 36829 - DNA, 21 bp, homo sapiens
cattcaggtgacctcctgcag

SEQ ID NO: 36830 - RNA, 21 nt, RNAi
uucaggugaccuccugcaguu

SEQ ID NO: 36831 - RNA, 21 nt, RNAi
uuaaguccacuggaggacguc

SEQ ID NO: 36832 - DNA, 21 bp, homo sapiens
cagactctcaggtggaggcaa

SEQ ID NO: 36833 - RNA, 21 nt, RNAi
gacucucagguggaggcaauu

SEQ ID NO: 36834 - RNA, 21 nt, RNAi
uucugagaguccaccuccguu

SEQ ID NO: 36835 - DNA, 21 bp, homo sapiens
caacaaagttccacttccagg

SEQ ID NO: 36836 - RNA, 21 nt, RNAi
acaaaguuccacuuccagguu

SEQ ID NO: 36837 - RNA, 21 nt, RNAi
uuuguuucaaggugaaggucc

SEQ ID NO: 36838 - DNA, 21 bp, homo sapiens
caaagttccacttccaggtct

SEQ ID NO: 36839 - RNA, 21 nt, RNAi
aaguuccacuuccaggucuuu

SEQ ID NO: 36840 - RNA, 21 nt, RNAi
uuuucaaggugaagguccaga

SEQ ID NO: 36841 - DNA, 21 bp, homo sapiens
cacttccaggtctgcctggtt

SEQ ID NO: 36842 - RNA, 21 nt, RNAi
cuuccaggucugccugguuuu

SEQ ID NO: 36843 - RNA, 21 nt, RNAi
uugaagguccagacggaccaa

SEQ ID NO: 36844 - DNA, 21 bp, homo sapiens
caggcctggcctcatctcaga

SEQ ID NO: 36845 - RNA, 21 nt, RNAi
ggccuggccucaucucagauu

SEQ ID NO: 36846 - RNA, 21 nt, RNAi
uuccggaccggaguagagucu

SEQ ID NO: 36847 - DNA, 21 bp, homo sapiens
gactgcagttcctgcgagcga

SEQ ID NO: 36848 - RNA, 21 nt, RNAi
cugcaguuccugcgagcgauu

SEQ ID NO: 36849 - RNA, 21 nt, RNAi
uugacgucaaggacgcucgcu

SEQ ID NO: 36850 - DNA, 21 bp, homo sapiens
gaggatctggatgagctgcac

SEQ ID NO: 36851 - RNA, 21 nt, RNAi
ggaucuggaugagcugcacuu

SEQ ID NO: 36852 - RNA, 21 nt, RNAi
uuccuagaccuacucgacgug

SEQ ID NO: 36853 - DNA, 21 bp, homo sapiens
gatctggatgagctgcactac

SEQ ID NO: 36854 - RNA, 21 nt, RNAi
ucuggaugagcugcacuacuu

SEQ ID NO: 36855 - RNA, 21 nt, RNAi
uuagaccuacucgacgugaug

SEQ ID NO: 36856 - DNA, 21 bp, homo sapiens
gatgagctgcactaccaggac

SEQ ID NO: 36857 - RNA, 21 nt, RNAi
ugagcugcacuaccaggacuu

SEQ ID NO: 36858 - RNA, 21 nt, RNAi
uuacucgacgugaugguccug

SEQ ID NO: 36859 - DNA, 21 bp, homo sapiens
gagctgcactaccaggacaca

SEQ ID NO: 36860 - RNA, 21 nt, RNAi
gcugcacuaccaggacacauu

SEQ ID NO: 36861 - RNA, 21 nt, RNAi
uucgacgugaugguccugugu

SEQ ID NO: 36862 - DNA, 21 bp, homo sapiens
gacacagattcagatgtgccg

SEQ ID NO: 36863 - RNA, 21 nt, RNAi
cacagauucagaugugccguu

SEQ ID NO: 36864 - RNA, 21 nt, RNAi
uugugucuaagucuacacggc

SEQ ID NO: 36865 - DNA, 21 bp, homo sapiens
gattcagatgtgccggagcag

SEQ ID NO: 36866 - RNA, 21 nt, RNAi
uucagaugugccggagcaguu

SEQ ID NO: 36867 - RNA, 21 nt, RNAi
uuaagucuacacggccucguc

SEQ ID NO: 36868 - DNA, 21 bp, homo sapiens
gatagcaagtgcaaggtcaaa

SEQ ID NO: 36869 - RNA, 21 nt, RNAi
uagcaagugcaaggucaaauu

SEQ ID NO: 36870 - RNA, 21 nt, RNAi
uuaucguucacguuccaguuu

SEQ ID NO: 36871 - DNA, 21 bp, homo sapiens
gaggcagtttggacagcagga

SEQ ID NO: 36872 - RNA, 21 nt, RNAi
ggcaguuuggacagcaggauu

SEQ ID NO: 36873 - RNA, 21 nt, RNAi
uuccgucaaaccugucguccu

SEQ ID NO: 36874 - DNA, 21 bp, homo sapiens
gacagcaggactggaagttcc

SEQ ID NO: 36875 - RNA, 21 nt, RNAi
cagcaggacuggaaguuccuu

SEQ ID NO: 36876 - RNA, 21 nt, RNAi
uugucguccugaccuucaagg

SEQ ID NO: 36877 - DNA, 21 bp, homo sapiens
gactggaagttcctggccagc

SEQ ID NO: 36878 - RNA, 21 nt, RNAi
cuggaaguuccuggccagcuu

SEQ ID NO: 36879 - RNA, 21 nt, RNAi
uugaccuucaaggaccggucg

SEQ ID NO: 36880 - DNA, 21 bp, homo sapiens
gaagttcctggccagccactt

SEQ ID NO: 36881 - RNA, 21 nt, RNAi
aguuccuggccagccacuuuu

SEQ ID NO: 36882 - RNA, 21 nt, RNAi
uuucaaggaccggucggugaa

SEQ ID NO: 36883 - DNA, 21 bp, homo sapiens
gaccagcaatgccagtacagg

SEQ ID NO: 36884 - RNA, 21 nt, RNAi
ccagcaaugccaguacagguu

SEQ ID NO: 36885 - RNA, 21 nt, RNAi
uuggucguuacggucaugucc

SEQ ID NO: 36886 - DNA, 21 bp, homo sapiens
gagctggttaagaagtatggc

SEQ ID NO: 36887 - RNA, 21 nt, RNAi
gcugguuaagaaguauggcuu

SEQ ID NO: 36888 - RNA, 21 nt, RNAi
uucgaccaauucuucauaccg

SEQ ID NO: 36889 - DNA, 21 bp, homo sapiens
gaagtatggcacaaagcagtg

SEQ ID NO: 36890 - RNA, 21 nt, RNAi
aguauggcacaaagcaguguu

SEQ ID NO: 36891 - RNA, 21 nt, RNAi
uuucauaccguguuucgucac

SEQ ID NO: 36892 - DNA, 21 bp, homo sapiens
gacactgattgccaagcacct

SEQ ID NO: 36893 - RNA, 21 nt, RNAi
cacugauugccaagcaccuuu

SEQ ID NO: 36894 - RNA, 21 nt, RNAi
uugugacuaacgguucgugga

SEQ ID NO: 36895 - DNA, 21 bp, homo sapiens
gaagcagtgccgtgaacgctg

SEQ ID NO: 36896 - RNA, 21 nt, RNAi
agcagugccgugaacgcuguu

SEQ ID NO: 36897 - RNA, 21 nt, RNAi
uuucgucacggcacuugcgac

SEQ ID NO: 36898 - DNA, 21 bp, homo sapiens
gaacgctggcacaaccacctc

SEQ ID NO: 36899 - RNA, 21 nt, RNAi
acgcuggcacaaccaccucuu

SEQ ID NO: 36900 - RNA, 21 nt, RNAi
uuugcgaccguguugguggag

SEQ ID NO: 36901 - DNA, 21 bp, homo sapiens
gaggtgaagaagtcttgctgg

SEQ ID NO: 36902 - RNA, 21 nt, RNAi
ggugaagaagucuugcugguu

SEQ ID NO: 36903 - RNA, 21 nt, RNAi
uuccacuucuucagaacgacc

SEQ ID NO: 36904 - DNA, 21 bp, homo sapiens
gaagaagtcttgctggaccga

SEQ ID NO: 36905 - RNA, 21 nt, RNAi
agaagucuugcuggaccgauu

SEQ ID NO: 36906 - RNA, 21 nt, RNAi
uuucuucagaacgaccuggcu

SEQ ID NO: 36907 - DNA, 21 bp, homo sapiens
gaagtcttgctggaccgagga

SEQ ID NO: 36908 - RNA, 21 nt, RNAi
agucuugcuggaccgaggauu

SEQ ID NO: 36909 - RNA, 21 nt, RNAi
uuucagaacgaccuggcuccu

SEQ ID NO: 36910 - DNA, 21 bp, homo sapiens
gaggaggaggaccgcatcatc

SEQ ID NO: 36911 - RNA, 21 nt, RNAi
ggaggaggaccgcaucaucuu

SEQ ID NO: 36912 - RNA, 21 nt, RNAi
uuccuccuccuggcguaguag

SEQ ID NO: 36913 - DNA, 21 bp, homo sapiens
gaggaggaccgcatcatctgc

SEQ ID NO: 36914 - RNA, 21 nt, RNAi
ggaggaccgcaucaucugcuu

SEQ ID NO: 36915 - RNA, 21 nt, RNAi
uuccuccuggcguaguagacg

SEQ ID NO: 36916 - DNA, 21 bp, homo sapiens
gaggaccgcatcatctgcgag

SEQ ID NO: 36917 - RNA, 21 nt, RNAi
ggaccgcaucaucugcgaguu

SEQ ID NO: 36918 - RNA, 21 nt, RNAi
uuccuggcguaguagacgcuc

SEQ ID NO: 36919 - DNA, 21 bp, homo sapiens
gagatcgccaagatgttgcca

SEQ ID NO: 36920 - RNA, 21 nt, RNAi
gaucgccaagauguugccauu

SEQ ID NO: 36921 - RNA, 21 nt, RNAi
uucuagcgguucuacaacggu

SEQ ID NO: 36922 - DNA, 21 bp, homo sapiens
gatcgccaagatgttgccagg

SEQ ID NO: 36923 - RNA, 21 nt, RNAi
ucgccaagauguugccagguu

SEQ ID NO: 36924 - RNA, 21 nt, RNAi
uuagcgguucuacaacggucc

SEQ ID NO: 36925 - DNA, 21 bp, homo sapiens
gaggacagacaatgctgtgaa

SEQ ID NO: 36926 - RNA, 21 nt, RNAi
ggacagacaaugcugugaauu

SEQ ID NO: 36927 - RNA, 21 nt, RNAi
uuccugucuguuacgacacuu

SEQ ID NO: 36928 - DNA, 21 bp, homo sapiens
gacagacaatgctgtgaagaa

SEQ ID NO: 36929 - RNA, 21 nt, RNAi
cagacaaugcugugaagaauu

SEQ ID NO: 36930 - RNA, 21 nt, RNAi
uugucuguuacgacacuucuu

SEQ ID NO: 36931 - DNA, 21 bp, homo sapiens
gacaatgctgtgaagaatcac

SEQ ID NO: 36932 - RNA, 21 nt, RNAi
caaugcugugaagaaucacuu

SEQ ID NO: 36933 - RNA, 21 nt, RNAi
uuguuacgacacuucuuagug

SEQ ID NO: 36934 - DNA, 21 bp, homo sapiens
gaagaatcactggaactctac

SEQ ID NO: 36935 - RNA, 21 nt, RNAi
agaaucacuggaacucuacuu

SEQ ID NO: 36936 - RNA, 21 nt, RNAi
uuucuuagugaccuugagaug

SEQ ID NO: 36937 - DNA, 21 bp, homo sapiens
gaatcactggaactctaccat

SEQ ID NO: 36938 - RNA, 21 nt, RNAi
aucacuggaacucuaccauuu

SEQ ID NO: 36939 - RNA, 21 nt, RNAi
uuuagugaccuugagauggua

SEQ ID NO: 36940 - DNA, 21 bp, homo sapiens
gaaggtggacacaggaggctt

SEQ ID NO: 36941 - RNA, 21 nt, RNAi
agguggacacaggaggcuuuu

SEQ ID NO: 36942 - RNA, 21 nt, RNAi
uuuccaccuguguccuccgaa

SEQ ID NO: 36943 - DNA, 21 bp, homo sapiens
gacacaggaggcttcttgagc

SEQ ID NO: 36944 - RNA, 21 nt, RNAi
cacaggaggcuucuugagcuu

SEQ ID NO: 36945 - RNA, 21 nt, RNAi
uuguguccuccgaagaacucg

SEQ ID NO: 36946 - DNA, 21 bp, homo sapiens
gaggcttcttgagcgagtcca

SEQ ID NO: 36947 - RNA, 21 nt, RNAi
ggcuucuugagcgaguccauu

SEQ ID NO: 36948 - RNA, 21 nt, RNAi
uuccgaagaacucgcucaggu

SEQ ID NO: 36949 - DNA, 21 bp, homo sapiens
gagcgagtccaaagactgcaa

SEQ ID NO: 36950 - RNA, 21 nt, RNAi
gcgaguccaaagacugcaauu

SEQ ID NO: 36951 - RNA, 21 nt, RNAi
uucgcucagguuucugacguu

SEQ ID NO: 36952 - DNA, 21 bp, homo sapiens
gacaaggacggcctccagagt

SEQ ID NO: 36953 - RNA, 21 nt, RNAi
caaggacggccuccagaguuu

SEQ ID NO: 36954 - RNA, 21 nt, RNAi
uuguuccugccggaggucuca

SEQ ID NO: 36955 - DNA, 21 bp, homo sapiens
gaagtcttctgaccaactggc

SEQ ID NO: 36956 - RNA, 21 nt, RNAi
agucuucugaccaacuggcuu

SEQ ID NO: 36957 - RNA, 21 nt, RNAi
uuucagaagacugguugaccg

SEQ ID NO: 36958 - DNA, 21 bp, homo sapiens
gaggaggaacttgcagcagcc

SEQ ID NO: 36959 - RNA, 21 nt, RNAi
ggaggaacuugcagcagccuu

SEQ ID NO: 36960 - RNA, 21 nt, RNAi
uuccuccuugaacgucgucgg

SEQ ID NO: 36961 - DNA, 21 bp, homo sapiens
gaggaacttgcagcagccacc

SEQ ID NO: 36962 - RNA, 21 nt, RNAi
ggaacuugcagcagccaccuu

SEQ ID NO: 36963 - RNA, 21 nt, RNAi
uuccuugaacgucgucggugg

SEQ ID NO: 36964 - DNA, 21 bp, homo sapiens
gaacttgcagcagccaccaca

SEQ ID NO: 36965 - RNA, 21 nt, RNAi
acuugcagcagccaccacauu

SEQ ID NO: 36966 - RNA, 21 nt, RNAi
uuugaacgucgucgguggugu

SEQ ID NO: 36967 - DNA, 21 bp, homo sapiens
gatctggacgcagtgcgaaca

SEQ ID NO: 36968 - RNA, 21 nt, RNAi
ucuggacgcagugcgaacauu

SEQ ID NO: 36969 - RNA, 21 nt, RNAi
uuagaccugcgucacgcuugu

SEQ ID NO: 36970 - DNA, 21 bp, homo sapiens
gacgcagtgcgaacaccagag

SEQ ID NO: 36971 - RNA, 21 nt, RNAi
cgcagugcgaacaccagaguu

SEQ ID NO: 36972 - RNA, 21 nt, RNAi
uugcgucacgcuuguggucuc

SEQ ID NO: 36973 - DNA, 21 bp, homo sapiens
gaagcgtgaggaccaggaagg

SEQ ID NO: 36974 - RNA, 21 nt, RNAi
agcgugaggaccaggaagguu

SEQ ID NO: 36975 - RNA, 21 nt, RNAi
uuucgcacuccugguccuucc

SEQ ID NO: 36976 - DNA, 21 bp, homo sapiens
gaaacgagcctgccttacaag

SEQ ID NO: 36977 - RNA, 21 nt, RNAi
aacgagccugccuuacaaguu

SEQ ID NO: 36978 - RNA, 21 nt, RNAi
uuuugcucggacggaauguuc

SEQ ID NO: 36979 - DNA, 21 bp, homo sapiens
gaggcagctaacctcctcatc

SEQ ID NO: 36980 - RNA, 21 nt, RNAi
ggcagcuaaccuccucaucuu

SEQ ID NO: 36981 - RNA, 21 nt, RNAi
uuccgucgauuggaggaguag

SEQ ID NO: 36982 - DNA, 21 bp, homo sapiens
gatgcttggtgtgacctgagt

SEQ ID NO: 36983 - RNA, 21 nt, RNAi
ugcuuggugugaccugaguuu

SEQ ID NO: 36984 - RNA, 21 nt, RNAi
uuacgaaccacacuggacuca

SEQ ID NO: 36985 - DNA, 21 bp, homo sapiens
gacctgagtaaatttgacctc

SEQ ID NO: 36986 - RNA, 21 nt, RNAi
ccugaguaaauuugaccucuu

SEQ ID NO: 36987 - RNA, 21 nt, RNAi
uuggacucauuuaaacuggag

SEQ ID NO: 36988 - DNA, 21 bp, homo sapiens
gaggaaccatctgcagaggac

SEQ ID NO: 36989 - RNA, 21 nt, RNAi
ggaaccaucugcagaggacuu

SEQ ID NO: 36990 - RNA, 21 nt, RNAi
uuccuugguagacgucuccug

SEQ ID NO: 36991 - DNA, 21 bp, homo sapiens
gaaccatctgcagaggacagt

SEQ ID NO: 36992 - RNA, 21 nt, RNAi
accaucugcagaggacaguuu

SEQ ID NO: 36993 - RNA, 21 nt, RNAi
uuugguagacgucuccuguca

SEQ ID NO: 36994 - DNA, 21 bp, homo sapiens
gaggacagtatcaacaacagc

SEQ ID NO: 36995 - RNA, 21 nt, RNAi
ggacaguaucaacaacagcuu

SEQ ID NO: 36996 - RNA, 21 nt, RNAi
uuccugucauaguuguugucg

SEQ ID NO: 36997 - DNA, 21 bp, homo sapiens
gacagtatcaacaacagccta

SEQ ID NO: 36998 - RNA, 21 nt, RNAi
caguaucaacaacagccuauu

SEQ ID NO: 36999 - RNA, 21 nt, RNAi
uugucauaguuguugucggau

SEQ ID NO: 37000 - DNA, 21 bp, homo sapiens
gatggccacaccatctcagac

SEQ ID NO: 37001 - RNA, 21 nt, RNAi
uggccacaccaucucagacuu

SEQ ID NO: 37002 - RNA, 21 nt, RNAi
uuaccggugugguagagucug

SEQ ID NO: 37003 - DNA, 21 bp, homo sapiens
gaggaagaggcgtgtggctct

SEQ ID NO: 37004 - RNA, 21 nt, RNAi
ggaagaggcguguggcucuuu

SEQ ID NO: 37005 - RNA, 21 nt, RNAi
uuccuucuccgcacaccgaga

SEQ ID NO: 37006 - DNA, 21 bp, homo sapiens
gaagaggcgtgtggctctgtc

SEQ ID NO: 37007 - RNA, 21 nt, RNAi
agaggcguguggcucugucuu

SEQ ID NO: 37008 - RNA, 21 nt, RNAi
uuucuccgcacaccgagacag

SEQ ID NO: 37009 - DNA, 21 bp, homo sapiens
gagaatagcaccagtctgtcc

SEQ ID NO: 37010 - RNA, 21 nt, RNAi
gaauagcaccagucuguccuu

SEQ ID NO: 37011 - RNA, 21 nt, RNAi
uucuuaucguggucagacagg

SEQ ID NO: 37012 - DNA, 21 bp, homo sapiens
gaatagcaccagtctgtcctt

SEQ ID NO: 37013 - RNA, 21 nt, RNAi
auagcaccagucuguccuuuu

SEQ ID NO: 37014 - RNA, 21 nt, RNAi
uuuaucguggucagacaggaa

SEQ ID NO: 37015 - DNA, 21 bp, homo sapiens
gattcctgtaacagcctcacg

SEQ ID NO: 37016 - RNA, 21 nt, RNAi
uuccuguaacagccucacguu

SEQ ID NO: 37017 - RNA, 21 nt, RNAi
uuaaggacauugucggagugc

SEQ ID NO: 37018 - DNA, 21 bp, homo sapiens
gaacttctggaacaaacagga

SEQ ID NO: 37019 - RNA, 21 nt, RNAi
acuucuggaacaaacaggauu

SEQ ID NO: 37020 - RNA, 21 nt, RNAi
uuugaagaccuuguuuguccu

SEQ ID NO: 37021 - DNA, 21 bp, homo sapiens
gaacaaacaggacacattgga

SEQ ID NO: 37022 - RNA, 21 nt, RNAi
acaaacaggacacauuggauu

SEQ ID NO: 37023 - RNA, 21 nt, RNAi
uuuguuuguccuguguaaccu

SEQ ID NO: 37024 - DNA, 21 bp, homo sapiens
gacacattggagctggagagc

SEQ ID NO: 37025 - RNA, 21 nt, RNAi
cacauuggagcuggagagcuu

SEQ ID NO: 37026 - RNA, 21 nt, RNAi
uuguguaaccucgaccucucg

SEQ ID NO: 37027 - DNA, 21 bp, homo sapiens
gaaggtggtggtcaccacacc

SEQ ID NO: 37028 - RNA, 21 nt, RNAi
aggugguggucaccacaccuu

SEQ ID NO: 37029 - RNA, 21 nt, RNAi
uuuccaccaccaguggugugg

SEQ ID NO: 37030 - DNA, 21 bp, homo sapiens
gaaacatgctgcgtttgtaac

SEQ ID NO: 37031 - RNA, 21 nt, RNAi
aacaugcugcguuuguaacuu

SEQ ID NO: 37032 - RNA, 21 nt, RNAi
uuuuguacgacgcaaacauug

SEQ ID NO: 37033 - DNA, 21 bp, homo sapiens
gatcagaagtactccatggac

SEQ ID NO: 37034 - RNA, 21 nt, RNAi
ucagaaguacuccauggacuu

SEQ ID NO: 37035 - RNA, 21 nt, RNAi
uuagucuucaugagguaccug

SEQ ID NO: 37036 - DNA, 21 bp, homo sapiens
gaagtactccatggacaacac

SEQ ID NO: 37037 - RNA, 21 nt, RNAi
aguacuccauggacaacacuu

SEQ ID NO: 37038 - RNA, 21 nt, RNAi
uuucaugagguaccuguugug

SEQ ID NO: 37039 - DNA, 21 bp, homo sapiens
gaggaggacttgaaggaggtg

SEQ ID NO: 37040 - RNA, 21 nt, RNAi
ggaggacuugaaggagguguu

SEQ ID NO: 37041 - RNA, 21 nt, RNAi
uuccuccugaacuuccuccac

SEQ ID NO: 37042 - DNA, 21 bp, homo sapiens
gaggacttgaaggaggtgctg

SEQ ID NO: 37043 - RNA, 21 nt, RNAi
ggacuugaaggaggugcuguu

SEQ ID NO: 37044 - RNA, 21 nt, RNAi
uuccugaacuuccuccacgac

SEQ ID NO: 37045 - DNA, 21 bp, homo sapiens
gacttgaaggaggtgctgcgt

SEQ ID NO: 37046 - RNA, 21 nt, RNAi
cuugaaggaggugcugcguuu

SEQ ID NO: 37047 - RNA, 21 nt, RNAi
uugaacuuccuccacgacgca

SEQ ID NO: 37048 - DNA, 21 bp, homo sapiens
gaaggaggtgctgcgttctga

SEQ ID NO: 37049 - RNA, 21 nt, RNAi
aggaggugcugcguucugauu

SEQ ID NO: 37050 - RNA, 21 nt, RNAi
uuuccuccacgacgcaagacu

SEQ ID NO: 37051 - DNA, 21 bp, homo sapiens
gaggtgctgcgttctgaggct

SEQ ID NO: 37052 - RNA, 21 nt, RNAi
ggugcugcguucugaggcuuu

SEQ ID NO: 37053 - RNA, 21 nt, RNAi
uuccacgacgcaagacuccga

SEQ ID NO: 37054 - DNA, 21 bp, homo sapiens
gaggctggcatcgaactcatc

SEQ ID NO: 37055 - RNA, 21 nt, RNAi
ggcuggcaucgaacucaucuu

SEQ ID NO: 37056 - RNA, 21 nt, RNAi
uuccgaccguagcuugaguag

SEQ ID NO: 37057 - DNA, 21 bp, homo sapiens
gaactcatcatcgaggacgac

SEQ ID NO: 37058 - RNA, 21 nt, RNAi
acucaucaucgaggacgacuu

SEQ ID NO: 37059 - RNA, 21 nt, RNAi
uuugaguaguagcuccugcug

SEQ ID NO: 37060 - DNA, 21 bp, homo sapiens
gagaagcagaagaggaagcct

SEQ ID NO: 37061 - RNA, 21 nt, RNAi
gaagcagaagaggaagccuuu

SEQ ID NO: 37062 - RNA, 21 nt, RNAi
uucuucgucuucuccuucgga

SEQ ID NO: 37063 - DNA, 21 bp, homo sapiens
gaagcagaagaggaagcctgg

SEQ ID NO: 37064 - RNA, 21 nt, RNAi
agcagaagaggaagccugguu

SEQ ID NO: 37065 - RNA, 21 nt, RNAi
uuucgucuucuccuucggacc

SEQ ID NO: 37066 - DNA, 21 bp, homo sapiens
gaaagtccggaagtctctggc

SEQ ID NO: 37067 - RNA, 21 nt, RNAi
aaguccggaagucucuggcuu

SEQ ID NO: 37068 - RNA, 21 nt, RNAi
uuuucaggccuucagagaccg

SEQ ID NO: 37069 - DNA, 21 bp, homo sapiens
gaagtctctggctcttgacat

SEQ ID NO: 37070 - RNA, 21 nt, RNAi
agucucuggcucuugacauuu

SEQ ID NO: 37071 - RNA, 21 nt, RNAi
uuucagagaccgagaacugua

SEQ ID NO: 37072 - DNA, 21 bp, homo sapiens
gacattgtggatgaggatgtg

SEQ ID NO: 37073 - RNA, 21 nt, RNAi
cauuguggaugaggauguguu

SEQ ID NO: 37074 - RNA, 21 nt, RNAi
uuguaacaccuacuccuacac

SEQ ID NO: 37075 - DNA, 21 bp, homo sapiens
gatgaggatgtgaagctgatg

SEQ ID NO: 37076 - RNA, 21 nt, RNAi
ugaggaugugaagcugauguu

SEQ ID NO: 37077 - RNA, 21 nt, RNAi
uuacuccuacacuucgacuac

SEQ ID NO: 37078 - DNA, 21 bp, homo sapiens
gaggatgtgaagctgatgatg

SEQ ID NO: 37079 - RNA, 21 nt, RNAi
ggaugugaagcugaugauguu

SEQ ID NO: 37080 - RNA, 21 nt, RNAi
uuccuacacuucgacuacuac

SEQ ID NO: 37081 - DNA, 21 bp, homo sapiens
gatgtgaagctgatgatgtcc

SEQ ID NO: 37082 - RNA, 21 nt, RNAi
ugugaagcugaugauguccuu

SEQ ID NO: 37083 - RNA, 21 nt, RNAi
uuacacuucgacuacuacagg

SEQ ID NO: 37084 - DNA, 21 bp, homo sapiens
gaagctgatgatgtccacact

SEQ ID NO: 37085 - RNA, 21 nt, RNAi
agcugaugauguccacacuuu

SEQ ID NO: 37086 - RNA, 21 nt, RNAi
uuucgacuacuacagguguga

SEQ ID NO: 37087 - DNA, 21 bp, homo sapiens
gaagacaacagcttgctcaac

SEQ ID NO: 37088 - RNA, 21 nt, RNAi
agacaacagcuugcucaacuu

SEQ ID NO: 37089 - RNA, 21 nt, RNAi
uuucuguugucgaacgaguug

SEQ ID NO: 37090 - DNA, 21 bp, homo sapiens
gacaacagcttgctcaaccag

SEQ ID NO: 37091 - RNA, 21 nt, RNAi
caacagcuugcucaaccaguu

SEQ ID NO: 37092 - RNA, 21 nt, RNAi
uuguugucgaacgaguugguc

SEQ ID NO: 37093 - DNA, 21 bp, homo sapiens
gaagccacttcacgacacctg

SEQ ID NO: 37094 - RNA, 21 nt, RNAi
agccacuucacgacaccuguu

SEQ ID NO: 37095 - RNA, 21 nt, RNAi
uuucggugaagugcuguggac

SEQ ID NO: 37096 - DNA, 21 bp, homo sapiens
gaatctgagagtcattcaggt

SEQ ID NO: 37097 - RNA, 21 nt, RNAi
aucugagagucauucagguuu

SEQ ID NO: 37098 - RNA, 21 nt, RNAi
uuuagacucucaguaagucca

SEQ ID NO: 37099 - DNA, 21 bp, homo sapiens
gagagtcattcaggtgacctc

SEQ ID NO: 37100 - RNA, 21 nt, RNAi
gagucauucaggugaccucuu

SEQ ID NO: 37101 - RNA, 21 nt, RNAi
uucucaguaaguccacuggag

SEQ ID NO: 37102 - DNA, 21 bp, homo sapiens
gagtcattcaggtgacctcct

SEQ ID NO: 37103 - RNA, 21 nt, RNAi
gucauucaggugaccuccuuu

SEQ ID NO: 37104 - RNA, 21 nt, RNAi
uucaguaaguccacuggagga

SEQ ID NO: 37105 - DNA, 21 bp, homo sapiens
gactctcaggtggaggcaaca

SEQ ID NO: 37106 - RNA, 21 nt, RNAi
cucucagguggaggcaacauu

SEQ ID NO: 37107 - RNA, 21 nt, RNAi
uugagaguccaccuccguugu

SEQ ID NO: 37108 - DNA, 21 bp, homo sapiens
taccaggacacagattcagat

SEQ ID NO: 37109 - RNA, 21 nt, RNAi
ccaggacacagauucagauuu

SEQ ID NO: 37110 - RNA, 21 nt, RNAi
uugguccugugucuaagucua

SEQ ID NO: 37111 - DNA, 21 bp, homo sapiens
tagcaagtgcaaggtcaaatg

SEQ ID NO: 37112 - RNA, 21 nt, RNAi
gcaagugcaaggucaaauguu

SEQ ID NO: 37113 - RNA, 21 nt, RNAi
uucguucacguuccaguuuac

SEQ ID NO: 37114 - DNA, 21 bp, homo sapiens
taaccgcactgaccagcaatg

SEQ ID NO: 37115 - RNA, 21 nt, RNAi
accgcacugaccagcaauguu

SEQ ID NO: 37116 - RNA, 21 nt, RNAi
uuuggcgugacuggucguuac

SEQ ID NO: 37117 - DNA, 21 bp, homo sapiens
taagaagtatggcacaaagca

SEQ ID NO: 37118 - RNA, 21 nt, RNAi
agaaguauggcacaaagcauu

SEQ ID NO: 37119 - RNA, 21 nt, RNAi
uuucuucauaccguguuucgu

SEQ ID NO: 37120 - DNA, 21 bp, homo sapiens
tatggcacaaagcagtggaca

SEQ ID NO: 37121 - RNA, 21 nt, RNAi
uggcacaaagcaguggacauu

SEQ ID NO: 37122 - RNA, 21 nt, RNAi
uuaccguguuucgucaccugu

SEQ ID NO: 37123 - DNA, 21 bp, homo sapiens
tacttgctgctggagctcgag

SEQ ID NO: 37124 - RNA, 21 nt, RNAi
cuugcugcuggagcucgaguu

SEQ ID NO: 37125 - RNA, 21 nt, RNAi
uugaacgacgaccucgagcuc

SEQ ID NO: 37126 - DNA, 21 bp, homo sapiens
tacagatctggacgcagtgcg

SEQ ID NO: 37127 - RNA, 21 nt, RNAi
cagaucuggacgcagugcguu

SEQ ID NO: 37128 - RNA, 21 nt, RNAi
uugucuagaccugcgucacgc

SEQ ID NO: 37129 - DNA, 21 bp, homo sapiens
tatcaacaacagcctagtgca

SEQ ID NO: 37130 - RNA, 21 nt, RNAi
ucaacaacagccuagugcauu

SEQ ID NO: 37131 - RNA, 21 nt, RNAi
uuaguuguugucggaucacgu

SEQ ID NO: 37132 - DNA, 21 bp, homo sapiens
tagtgcagctgcaagcgtcac

SEQ ID NO: 37133 - RNA, 21 nt, RNAi
gugcagcugcaagcgucacuu

SEQ ID NO: 37134 - RNA, 21 nt, RNAi
uucacgucgacguucgcagug

SEQ ID NO: 37135 - DNA, 21 bp, homo sapiens
tagcaccagtctgtccttcct

SEQ ID NO: 37136 - RNA, 21 nt, RNAi
gcaccagucuguccuuccuuu

SEQ ID NO: 37137 - RNA, 21 nt, RNAi
uucguggucagacaggaagga

SEQ ID NO: 37138 - DNA, 21 bp, homo sapiens
tatcaaagaagacaacagctt

SEQ ID NO: 37139 - RNA, 21 nt, RNAi
ucaaagaagacaacagcuuuu

SEQ ID NO: 37140 - RNA, 21 nt, RNAi
uuaguuucuucuguugucgaa

SEQ ID NO: 37141 - DNA, 21 bp, homo sapiens
tatgtccagtgcctggaagac

SEQ ID NO: 37142 - RNA, 21 nt, RNAi
uguccagugccuggaagacuu

SEQ ID NO: 37143 - RNA, 21 nt, RNAi
uuacaggucacggaccuucug

SEQ ID NO: 37144 - DNA, 21 bp, homo sapiens
taacaacaaagttccacttcc

SEQ ID NO: 37145 - RNA, 21 nt, RNAi
acaacaaaguuccacuuccuu

SEQ ID NO: 37146 - RNA, 21 nt, RNAi
uuuguuguuucaaggugaagg

SEQ ID NO: 37147 - DNA, 21 bp, homo sapiens
aagtgcaaggtcaaatggacc

SEQ ID NO: 37148 - RNA, 21 nt, RNAi
gugcaaggucaaauggaccuu

SEQ ID NO: 37149 - RNA, 21 nt, RNAi
uucacguuccaguuuaccugg

SEQ ID NO: 37150 - DNA, 21 bp, homo sapiens
aagtcatcgagctggttaaga

SEQ ID NO: 37151 - RNA, 21 nt, RNAi
gucaucgagcugguuaagauu

SEQ ID NO: 37152 - RNA, 21 nt, RNAi
uucaguagcucgaccaauucu

SEQ ID NO: 37153 - DNA, 21 bp, homo sapiens
aagaagtatggcacaaagcag

SEQ ID NO: 37154 - RNA, 21 nt, RNAi
gaaguauggcacaaagcaguu

SEQ ID NO: 37155 - RNA, 21 nt, RNAi
uucuucauaccguguuucguc

SEQ ID NO: 37156 - DNA, 21 bp, homo sapiens
aatgctgtgaagaatcactgg

SEQ ID NO: 37157 - RNA, 21 nt, RNAi
ugcugugaagaaucacugguu

SEQ ID NO: 37158 - RNA, 21 nt, RNAi
uuacgacacuucuuagugacc

SEQ ID NO: 37159 - DNA, 21 bp, homo sapiens
aaacgagcctgccttacaagt

SEQ ID NO: 37160 - RNA, 21 nt, RNAi
acgagccugccuuacaaguuu

SEQ ID NO: 37161 - RNA, 21 nt, RNAi
uuugcucggacggaauguuca

SEQ ID NO: 37162 - DNA, 21 bp, homo sapiens
aaacatgctgcgtttgtaacc

SEQ ID NO: 37163 - RNA, 21 nt, RNAi
acaugcugcguuuguaaccuu

SEQ ID NO: 37164 - RNA, 21 nt, RNAi
uuuguacgacgcaaacauugg

SEQ ID NO: 37165 - DNA, 21 bp, homo sapiens
aagtctctatccttgccgaca

SEQ ID NO: 37166 - RNA, 21 nt, RNAi
gucucuauccuugccgacauu

SEQ ID NO: 37167 - RNA, 21 nt, RNAi
uucagagauaggaacggcugu

SEQ ID NO: 37168 - DNA, 21 bp, homo sapiens
caagtgcaaggtcaaatggac

SEQ ID NO: 37169 - RNA, 21 nt, RNAi
agugcaaggucaaauggacuu

SEQ ID NO: 37170 - RNA, 21 nt, RNAi
uuucacguuccaguuuaccug

SEQ ID NO: 37171 - DNA, 21 bp, homo sapiens
cactgaccagcaatgccagta

SEQ ID NO: 37172 - RNA, 21 nt, RNAi
cugaccagcaaugccaguauu

SEQ ID NO: 37173 - RNA, 21 nt, RNAi
uugacuggucguuacggucau

SEQ ID NO: 37174 - DNA, 21 bp, homo sapiens
cactgattgccaagcacctga

SEQ ID NO: 37175 - RNA, 21 nt, RNAi
cugauugccaagcaccugauu

SEQ ID NO: 37176 - RNA, 21 nt, RNAi
uugacuaacgguucguggacu

SEQ ID NO: 37177 - DNA, 21 bp, homo sapiens
caatgctgtgaagaatcactg

SEQ ID NO: 37178 - RNA, 21 nt, RNAi
augcugugaagaaucacuguu

SEQ ID NO: 37179 - RNA, 21 nt, RNAi
uuuacgacacuucuuagugac

SEQ ID NO: 37180 - DNA, 21 bp, homo sapiens
caccacatcgaaggaacagga

SEQ ID NO: 37181 - RNA, 21 nt, RNAi
ccacaucgaaggaacaggauu

SEQ ID NO: 37182 - RNA, 21 nt, RNAi
uugguguagcuuccuuguccu

SEQ ID NO: 37183 - DNA, 21 bp, homo sapiens
cagaaacgagcctgccttaca

SEQ ID NO: 37184 - RNA, 21 nt, RNAi
gaaacgagccugccuuacauu

SEQ ID NO: 37185 - RNA, 21 nt, RNAi
uucuuugcucggacggaaugu

SEQ ID NO: 37186 - DNA, 21 bp, homo sapiens
cagtatcaacaacagcctagt

SEQ ID NO: 37187 - RNA, 21 nt, RNAi
guaucaacaacagccuaguuu

SEQ ID NO: 37188 - RNA, 21 nt, RNAi
uucauaguuguugucggauca

SEQ ID NO: 37189 - DNA, 21 bp, homo sapiens
caacaacagcctagtgcagct

SEQ ID NO: 37190 - RNA, 21 nt, RNAi
acaacagccuagugcagcuuu

SEQ ID NO: 37191 - RNA, 21 nt, RNAi
uuuguugucggaucacgucga

SEQ ID NO: 37192 - DNA, 21 bp, homo sapiens
cactgagaatagcaccagtct

SEQ ID NO: 37193 - RNA, 21 nt, RNAi
cugagaauagcaccagucuuu

SEQ ID NO: 37194 - RNA, 21 nt, RNAi
uugacucuuaucguggucaga

SEQ ID NO: 37195 - DNA, 21 bp, homo sapiens
cagaaacatgctgcgtttgta

SEQ ID NO: 37196 - RNA, 21 nt, RNAi
gaaacaugcugcguuuguauu

SEQ ID NO: 37197 - RNA, 21 nt, RNAi
uucuuuguacgacgcaaacau

SEQ ID NO: 37198 - DNA, 21 bp, homo sapiens
catcgaactcatcatcgagga

SEQ ID NO: 37199 - RNA, 21 nt, RNAi
ucgaacucaucaucgaggauu

SEQ ID NO: 37200 - RNA, 21 nt, RNAi
uuagcuugaguaguagcuccu

SEQ ID NO: 37201 - DNA, 21 bp, homo sapiens
caagtctctatccttgccgac

SEQ ID NO: 37202 - RNA, 21 nt, RNAi
agucucuauccuugccgacuu

SEQ ID NO: 37203 - RNA, 21 nt, RNAi
uuucagagauaggaacggcug

SEQ ID NO: 37204 - DNA, 21 bp, homo sapiens
gacactgattgccaagcacct

SEQ ID NO: 37205 - RNA, 21 nt, RNAi
cacugauugccaagcaccuuu

SEQ ID NO: 37206 - RNA, 21 nt, RNAi
uugugacuaacgguucgugga

SEQ ID NO: 37207 - DNA, 21 bp, homo sapiens
gaatcactggaactctaccat

SEQ ID NO: 37208 - RNA, 21 nt, RNAi
aucacuggaacucuaccauuu

SEQ ID NO: 37209 - RNA, 21 nt, RNAi
uuuagugaccuugagauggua

SEQ ID NO: 37210 - DNA, 21 bp, homo sapiens
gagcgagtccaaagactgcaa

SEQ ID NO: 37211 - RNA, 21 nt, RNAi
gcgaguccaaagacugcaauu

SEQ ID NO: 37212 - RNA, 21 nt, RNAi
uucgcucagguuucugacguu

SEQ ID NO: 37213 - DNA, 21 bp, homo sapiens
gaaacgagcctgccttacaag

SEQ ID NO: 37214 - RNA, 21 nt, RNAi
aacgagccugccuuacaaguu

SEQ ID NO: 37215 - RNA, 21 nt, RNAi
uuuugcucggacggaauguuc

SEQ ID NO: 37216 - DNA, 21 bp, homo sapiens
gacctgagtaaatttgacctc

SEQ ID NO: 37217 - RNA, 21 nt, RNAi
ccugaguaaauuugaccucuu

SEQ ID NO: 37218 - RNA, 21 nt, RNAi
uuggacucauuuaaacuggag

SEQ ID NO: 37219 - DNA, 21 bp, homo sapiens
gacagtatcaacaacagccta

SEQ ID NO: 37220 - RNA, 21 nt, RNAi
caguaucaacaacagccuauu

SEQ ID NO: 37221 - RNA, 21 nt, RNAi
uugucauaguuguugucggau

SEQ ID NO: 37222 - DNA, 21 bp, homo sapiens
gattcctgtaacagcctcacg

SEQ ID NO: 37223 - RNA, 21 nt, RNAi
uuccuguaacagccucacguu

SEQ ID NO: 37224 - RNA, 21 nt, RNAi
uuaaggacauugucggagugc

SEQ ID NO: 37225 - DNA, 21 bp, homo sapiens
gaaacatgctgcgtttgtaac

SEQ ID NO: 37226 - RNA, 21 nt, RNAi
aacaugcugcguuuguaacuu

SEQ ID NO: 37227 - RNA, 21 nt, RNAi
uuuuguacgacgcaaacauug

SEQ ID NO: 37228 - DNA, 21 bp, homo sapiens
gaactcatcatcgaggacgac

SEQ ID NO: 37229 - RNA, 21 nt, RNAi
acucaucaucgaggacgacuu

SEQ ID NO: 37230 - RNA, 21 nt, RNAi
uuugaguaguagcuccugcug

SEQ ID NO: 37231 - DNA, 21 bp, homo sapiens
tagcaagtgcaaggtcaaatg

SEQ ID NO: 37232 - RNA, 21 nt, RNAi
gcaagugcaaggucaaauguu

SEQ ID NO: 37233 - RNA, 21 nt, RNAi
uucguucacguuccaguuuac

SEQ ID NO: 37234 - DNA, 21 bp, homo sapiens
taagaagtatggcacaaagca

SEQ ID NO: 37235 - RNA, 21 nt, RNAi
agaaguauggcacaaagcauu

SEQ ID NO: 37236 - RNA, 21 nt, RNAi
uuucuucauaccguguuucgu

SEQ ID NO: 37237 - DNA, 21 bp, homo sapiens
tatcaacaacagcctagtgca

SEQ ID NO: 37238 - RNA, 21 nt, RNAi
ucaacaacagccuagugcauu

SEQ ID NO: 37239 - RNA, 21 nt, RNAi
uuaguuguugucggaucacgu

SEQ ID NO: 37240 - DNA, 21 bp, homo sapiens
aagccgaaaccagctagactt

SEQ ID NO: 37241 - RNA, 21 nt, RNAi
gccgaaaccagcuagacuuuu

SEQ ID NO: 37242 - RNA, 21 nt, RNAi
uucggcuuuggucgaucugaa

SEQ ID NO: 37243 - DNA, 21 bp, homo sapiens
aaaccagctagactttcctcc

SEQ ID NO: 37244 - RNA, 21 nt, RNAi
accagcuagacuuuccuccuu

SEQ ID NO: 37245 - RNA, 21 nt, RNAi
uuuggucgaucugaaaggagg

SEQ ID NO: 37246 - DNA, 21 bp, homo sapiens
aaccagctagactttcctcct

SEQ ID NO: 37247 - RNA, 21 nt, RNAi
ccagcuagacuuuccuccuuu

SEQ ID NO: 37248 - RNA, 21 nt, RNAi
uuggucgaucugaaaggagga

SEQ ID NO: 37249 - DNA, 21 bp, homo sapiens
aagaaggtgttggaggcactc

SEQ ID NO: 37250 - RNA, 21 nt, RNAi
gaagguguuggaggcacucuu

SEQ ID NO: 37251 - RNA, 21 nt, RNAi
uucuuccacaaccuccgugag

SEQ ID NO: 37252 - DNA, 21 bp, homo sapiens
aaggtgttggaggcactcaag

SEQ ID NO: 37253 - RNA, 21 nt, RNAi
gguguuggaggcacucaaguu

SEQ ID NO: 37254 - RNA, 21 nt, RNAi
uuccacaaccuccgugaguuc

SEQ ID NO: 37255 - DNA, 21 bp, homo sapiens
aaggacctcatcaacgaggcc

SEQ ID NO: 37256 - RNA, 21 nt, RNAi
ggaccucaucaacgaggccuu

SEQ ID NO: 37257 - RNA, 21 nt, RNAi
uuccuggaguaguugcuccgg

SEQ ID NO: 37258 - DNA, 21 bp, homo sapiens
aaacctgcagagcatggactc

SEQ ID NO: 37259 - RNA, 21 nt, RNAi
accugcagagcauggacucuu

SEQ ID NO: 37260 - RNA, 21 nt, RNAi
uuuggacgucucguaccugag

SEQ ID NO: 37261 - DNA, 21 bp, homo sapiens
aacctgcagagcatggactcg

SEQ ID NO: 37262 - RNA, 21 nt, RNAi
ccugcagagcauggacucguu

SEQ ID NO: 37263 - RNA, 21 nt, RNAi
uuggacgucucguaccugagc

SEQ ID NO: 37264 - DNA, 21 bp, homo sapiens
aacctcaccagtatgtccaaa

SEQ ID NO: 37265 - RNA, 21 nt, RNAi
ccucaccaguauguccaaauu

SEQ ID NO: 37266 - RNA, 21 nt, RNAi
uuggaguggucauacagguuu

SEQ ID NO: 37267 - DNA, 21 bp, homo sapiens
aagataacgcggataccttgg

SEQ ID NO: 37268 - RNA, 21 nt, RNAi
gauaacgcggauaccuugguu

SEQ ID NO: 37269 - RNA, 21 nt, RNAi
uucuauugcgccuauggaacc

SEQ ID NO: 37270 - DNA, 21 bp, homo sapiens
aacgcggataccttggcgcta

SEQ ID NO: 37271 - RNA, 21 nt, RNAi
cgcggauaccuuggcgcuauu

SEQ ID NO: 37272 - RNA, 21 nt, RNAi
uugcgccuauggaaccgcgau

SEQ ID NO: 37273 - DNA, 21 bp, homo sapiens
aagcaccaaaccaggagaaag

SEQ ID NO: 37274 - RNA, 21 nt, RNAi
gcaccaaaccaggagaaaguu

SEQ ID NO: 37275 - RNA, 21 nt, RNAi
uucgugguuugguccucuuuc

SEQ ID NO: 37276 - DNA, 21 bp, homo sapiens
aaaccaggagaaagtttcaga

SEQ ID NO: 37277 - RNA, 21 nt, RNAi
accaggagaaaguuucagauu

SEQ ID NO: 37278 - RNA, 21 nt, RNAi
uuugguccucuuucaaagucu

SEQ ID NO: 37279 - DNA, 21 bp, homo sapiens
aaccaggagaaagtttcagac

SEQ ID NO: 37280 - RNA, 21 nt, RNAi
ccaggagaaaguuucagacuu

SEQ ID NO: 37281 - RNA, 21 nt, RNAi
uugguccucuuucaaagucug

SEQ ID NO: 37282 - DNA, 21 bp, homo sapiens
aacaacttggaattccagaac

SEQ ID NO: 37283 - RNA, 21 nt, RNAi
caacuuggaauuccagaacuu

SEQ ID NO: 37284 - RNA, 21 nt, RNAi
uuguugaaccuuaaggucuug

SEQ ID NO: 37285 - DNA, 21 bp, homo sapiens
aacttggaattccagaacagg

SEQ ID NO: 37286 - RNA, 21 nt, RNAi
cuuggaauuccagaacagguu

SEQ ID NO: 37287 - RNA, 21 nt, RNAi
uugaaccuuaaggucuugucc

SEQ ID NO: 37288 - DNA, 21 bp, homo sapiens
aattccagaacaggagtacag

SEQ ID NO: 37289 - RNA, 21 nt, RNAi
uuccagaacaggaguacaguu

SEQ ID NO: 37290 - RNA, 21 nt, RNAi
uuaaggucuuguccucauguc

SEQ ID NO: 37291 - DNA, 21 bp, homo sapiens
aacaggagtacagctgtgtag

SEQ ID NO: 37292 - RNA, 21 nt, RNAi
caggaguacagcuguguaguu

SEQ ID NO: 37293 - RNA, 21 nt, RNAi
uuguccucaugucgacacauc

SEQ ID NO: 37294 - DNA, 21 bp, homo sapiens
aaagatgccttctggtgaatt

SEQ ID NO: 37295 - RNA, 21 nt, RNAi
agaugccuucuggugaauuuu

SEQ ID NO: 37296 - RNA, 21 nt, RNAi
uuucuacggaagaccacuuaa

SEQ ID NO: 37297 - DNA, 21 bp, homo sapiens
aagatgccttctggtgaattt

SEQ ID NO: 37298 - RNA, 21 nt, RNAi
gaugccuucuggugaauuuuu

SEQ ID NO: 37299 - RNA, 21 nt, RNAi
uucuacggaagaccacuuaaa

SEQ ID NO: 37300 - DNA, 21 bp, homo sapiens
aatttgcacgtatatgccgag

SEQ ID NO: 37301 - RNA, 21 nt, RNAi
uuugcacguauaugccgaguu

SEQ ID NO: 37302 - RNA, 21 nt, RNAi
uuaaacgugcauauacggcuc

SEQ ID NO: 37303 - DNA, 21 bp, homo sapiens
aagtggagaacttggaaatgg

SEQ ID NO: 37304 - RNA, 21 nt, RNAi
guggagaacuuggaaaugguu

SEQ ID NO: 37305 - RNA, 21 nt, RNAi
uucaccucuugaaccuuuacc

SEQ ID NO: 37306 - DNA, 21 bp, homo sapiens
aattgtcacagacaagtaatg

SEQ ID NO: 37307 - RNA, 21 nt, RNAi
uugucacagacaaguaauguu

SEQ ID NO: 37308 - RNA, 21 nt, RNAi
uuaacagugucuguucauuac

SEQ ID NO: 37309 - DNA, 21 bp, homo sapiens
aagtaatgtcgataaagagga

SEQ ID NO: 37310 - RNA, 21 nt, RNAi
guaaugucgauaaagaggauu

SEQ ID NO: 37311 - RNA, 21 nt, RNAi
uucauuacagcuauuucuccu

SEQ ID NO: 37312 - DNA, 21 bp, homo sapiens
aatgtcgataaagaggaggaa

SEQ ID NO: 37313 - RNA, 21 nt, RNAi
ugucgauaaagaggaggaauu

SEQ ID NO: 37314 - RNA, 21 nt, RNAi
uuacagcuauuucuccuccuu

SEQ ID NO: 37315 - DNA, 21 bp, homo sapiens
aaagaggaggaagctgttacc

SEQ ID NO: 37316 - RNA, 21 nt, RNAi
agaggaggaagcuguuaccuu

SEQ ID NO: 37317 - RNA, 21 nt, RNAi
uuucuccuccuucgacaaugg

SEQ ID NO: 37318 - DNA, 21 bp, homo sapiens
aagaggaggaagctgttacca

SEQ ID NO: 37319 - RNA, 21 nt, RNAi
gaggaggaagcuguuaccauu

SEQ ID NO: 37320 - RNA, 21 nt, RNAi
uucuccuccuucgacaauggu

SEQ ID NO: 37321 - DNA, 21 bp, homo sapiens
aagctgttaccatagagatga

SEQ ID NO: 37322 - RNA, 21 nt, RNAi
gcuguuaccauagagaugauu

SEQ ID NO: 37323 - RNA, 21 nt, RNAi
uucgacaaugguaucucuacu

SEQ ID NO: 37324 - DNA, 21 bp, homo sapiens
aatgaaccagttcaactaact

SEQ ID NO: 37325 - RNA, 21 nt, RNAi
ugaaccaguucaacuaacuuu

SEQ ID NO: 37326 - RNA, 21 nt, RNAi
uuacuuggucaaguugauuga

SEQ ID NO: 37327 - DNA, 21 bp, homo sapiens
aaagccactccactctcttca

SEQ ID NO: 37328 - RNA, 21 nt, RNAi
agccacuccacucucuucauu

SEQ ID NO: 37329 - RNA, 21 nt, RNAi
uuucggugaggugagagaagu

SEQ ID NO: 37330 - DNA, 21 bp, homo sapiens
aagccactccactctcttcaa

SEQ ID NO: 37331 - RNA, 21 nt, RNAi
gccacuccacucucuucaauu

SEQ ID NO: 37332 - RNA, 21 nt, RNAi
uucggugaggugagagaaguu

SEQ ID NO: 37333 - DNA, 21 bp, homo sapiens
aacggtgacactcagtatgtc

SEQ ID NO: 37334 - RNA, 21 nt, RNAi
cggugacacucaguaugucuu

SEQ ID NO: 37335 - RNA, 21 nt, RNAi
uugccacugugagucauacag

SEQ ID NO: 37336 - DNA, 21 bp, homo sapiens
aagatcgaggatgaagaagga

SEQ ID NO: 37337 - RNA, 21 nt, RNAi
gaucgaggaugaagaaggauu

SEQ ID NO: 37338 - RNA, 21 nt, RNAi
uucuagcuccuacuucuuccu

SEQ ID NO: 37339 - DNA, 21 bp, homo sapiens
aagaaggatcttaggcattct

SEQ ID NO: 37340 - RNA, 21 nt, RNAi
gaaggaucuuaggcauucuuu

SEQ ID NO: 37341 - RNA, 21 nt, RNAi
uucuuccuagaauccguaaga

SEQ ID NO: 37342 - DNA, 21 bp, homo sapiens
aaggatcttaggcattcttaa

SEQ ID NO: 37343 - RNA, 21 nt, RNAi
ggaucuuaggcauucuuaauu

SEQ ID NO: 37344 - RNA, 21 nt, RNAi
uuccuagaauccguaagaauu

SEQ ID NO: 37345 - DNA, 21 bp, homo sapiens
aaactaagctctttgagaact

SEQ ID NO: 37346 - RNA, 21 nt, RNAi
acuaagcucuuugagaacuuu

SEQ ID NO: 37347 - RNA, 21 nt, RNAi
uuugauucgagaaacucuuga

SEQ ID NO: 37348 - DNA, 21 bp, homo sapiens
aactaagctctttgagaactg

SEQ ID NO: 37349 - RNA, 21 nt, RNAi
cuaagcucuuugagaacuguu

SEQ ID NO: 37350 - RNA, 21 nt, RNAi
uugauucgagaaacucuugac

SEQ ID NO: 37351 - DNA, 21 bp, homo sapiens
aagctctttgagaactgcttc

SEQ ID NO: 37352 - RNA, 21 nt, RNAi
gcucuuugagaacugcuucuu

SEQ ID NO: 37353 - RNA, 21 nt, RNAi
uucgagaaacucuugacgaag

SEQ ID NO: 37354 - DNA, 21 bp, homo sapiens
aactgcttctaagatgccagc

SEQ ID NO: 37355 - RNA, 21 nt, RNAi
cugcuucuaagaugccagcuu

SEQ ID NO: 37356 - RNA, 21 nt, RNAi
uugacgaagauucuacggucg

SEQ ID NO: 37357 - DNA, 21 bp, homo sapiens
aagatgccagcatatactgaa

SEQ ID NO: 37358 - RNA, 21 nt, RNAi
gaugccagcauauacugaauu

SEQ ID NO: 37359 - RNA, 21 nt, RNAi
uucuacggucguauaugacuu

SEQ ID NO: 37360 - DNA, 21 bp, homo sapiens
aagaataaagtccaaagtcag

SEQ ID NO: 37361 - RNA, 21 nt, RNAi
gaauaaaguccaaagucaguu

SEQ ID NO: 37362 - RNA, 21 nt, RNAi
uucuuauuucagguuucaguc

SEQ ID NO: 37363 - DNA, 21 bp, homo sapiens
aataaagtccaaagtcagatc

SEQ ID NO: 37364 - RNA, 21 nt, RNAi
uaaaguccaaagucagaucuu

SEQ ID NO: 37365 - RNA, 21 nt, RNAi
uuauuucagguuucagucuag

SEQ ID NO: 37366 - DNA, 21 bp, homo sapiens
aaagtccaaagtcagatctgg

SEQ ID NO: 37367 - RNA, 21 nt, RNAi
aguccaaagucagaucugguu

SEQ ID NO: 37368 - RNA, 21 nt, RNAi
uuucagguuucagucuagacc

SEQ ID NO: 37369 - DNA, 21 bp, homo sapiens
aagtccaaagtcagatctggt

SEQ ID NO: 37370 - RNA, 21 nt, RNAi
guccaaagucagaucugguuu

SEQ ID NO: 37371 - RNA, 21 nt, RNAi
uucagguuucagucuagacca

SEQ ID NO: 37372 - DNA, 21 bp, homo sapiens
aaagtcagatctggtctagtt

SEQ ID NO: 37373 - RNA, 21 nt, RNAi
agucagaucuggucuaguuuu

SEQ ID NO: 37374 - RNA, 21 nt, RNAi
uuucagucuagaccagaucaa

SEQ ID NO: 37375 - DNA, 21 bp, homo sapiens
aagtcagatctggtctagtta

SEQ ID NO: 37376 - RNA, 21 nt, RNAi
gucagaucuggucuaguuauu

SEQ ID NO: 37377 - RNA, 21 nt, RNAi
uucagucuagaccagaucaau

SEQ ID NO: 37378 - DNA, 21 bp, homo sapiens
cagagtggtcgttgtctttct

SEQ ID NO: 37379 - RNA, 21 nt, RNAi
gaguggucguugucuuucuuu

SEQ ID NO: 37380 - RNA, 21 nt, RNAi
uucucaccagcaacagaaaga

SEQ ID NO: 37381 - DNA, 21 bp, homo sapiens
cagctagactttcctccttcc

SEQ ID NO: 37382 - RNA, 21 nt, RNAi
gcuagacuuuccuccuuccuu

SEQ ID NO: 37383 - RNA, 21 nt, RNAi
uucgaucugaaaggaggaagg

SEQ ID NO: 37384 - DNA, 21 bp, homo sapiens
cactccgccaccatgttcgag

SEQ ID NO: 37385 - RNA, 21 nt, RNAi
cuccgccaccauguucgaguu

SEQ ID NO: 37386 - RNA, 21 nt, RNAi
uugaggcggugguacaagcuc

SEQ ID NO: 37387 - DNA, 21 bp, homo sapiens
catcctcaagaaggtgttgga

SEQ ID NO: 37388 - RNA, 21 nt, RNAi
uccucaagaagguguuggauu

SEQ ID NO: 37389 - RNA, 21 nt, RNAi
uuaggaguucuuccacaaccu

SEQ ID NO: 37390 - DNA, 21 bp, homo sapiens
caagaaggtgttggaggcact

SEQ ID NO: 37391 - RNA, 21 nt, RNAi
agaagguguuggaggcacuuu

SEQ ID NO: 37392 - RNA, 21 nt, RNAi
uuucuuccacaaccuccguga

SEQ ID NO: 37393 - DNA, 21 bp, homo sapiens
cactcaaggacctcatcaacg

SEQ ID NO: 37394 - RNA, 21 nt, RNAi
cucaaggaccucaucaacguu

SEQ ID NO: 37395 - RNA, 21 nt, RNAi
uugaguuccuggaguaguugc

SEQ ID NO: 37396 - DNA, 21 bp, homo sapiens
caaggacctcatcaacgaggc

SEQ ID NO: 37397 - RNA, 21 nt, RNAi
aggaccucaucaacgaggcuu

SEQ ID NO: 37398 - RNA, 21 nt, RNAi
uuuccuggaguaguugcuccg

SEQ ID NO: 37399 - DNA, 21 bp, homo sapiens
cagcggtgtaaacctgcagag

SEQ ID NO: 37400 - RNA, 21 nt, RNAi
gcgguguaaaccugcagaguu

SEQ ID NO: 37401 - RNA, 21 nt, RNAi
uucgccacauuuggacgucuc

SEQ ID NO: 37402 - DNA, 21 bp, homo sapiens
cacgtctctttggtgcagctc

SEQ ID NO: 37403 - RNA, 21 nt, RNAi
cgucucuuuggugcagcucuu

SEQ ID NO: 37404 - RNA, 21 nt, RNAi
uugcagagaaaccacgucgag

SEQ ID NO: 37405 - DNA, 21 bp, homo sapiens
caccaaaccaggagaaagttt

SEQ ID NO: 37406 - RNA, 21 nt, RNAi
ccaaaccaggagaaaguuuuu

SEQ ID NO: 37407 - RNA, 21 nt, RNAi
uugguuugguccucuuucaaa

SEQ ID NO: 37408 - DNA, 21 bp, homo sapiens
caaaccaggagaaagtttcag

SEQ ID NO: 37409 - RNA, 21 nt, RNAi
aaccaggagaaaguuucaguu

SEQ ID NO: 37410 - RNA, 21 nt, RNAi
uuuugguccucuuucaaaguc

SEQ ID NO: 37411 - DNA, 21 bp, homo sapiens
caggagaaagtttcagactat

SEQ ID NO: 37412 - RNA, 21 nt, RNAi
ggagaaaguuucagacuauuu

SEQ ID NO: 37413 - RNA, 21 nt, RNAi
uuccucuuucaaagucugaua

SEQ ID NO: 37414 - DNA, 21 bp, homo sapiens
cagactatgaaatgaagttga

SEQ ID NO: 37415 - RNA, 21 nt, RNAi
gacuaugaaaugaaguugauu

SEQ ID NO: 37416 - RNA, 21 nt, RNAi
uucugauacuuuacuucaacu

SEQ ID NO: 37417 - DNA, 21 bp, homo sapiens
caacttggaattccagaacag

SEQ ID NO: 37418 - RNA, 21 nt, RNAi
acuuggaauuccagaacaguu

SEQ ID NO: 37419 - RNA, 21 nt, RNAi
uuugaaccuuaaggucuuguc

SEQ ID NO: 37420 - DNA, 21 bp, homo sapiens
cagaacaggagtacagctgtg

SEQ ID NO: 37421 - RNA, 21 nt, RNAi
gaacaggaguacagcuguguu

SEQ ID NO: 37422 - RNA, 21 nt, RNAi
uucuuguccucaugucgacac

SEQ ID NO: 37423 - DNA, 21 bp, homo sapiens
caggagtacagctgtgtagta

SEQ ID NO: 37424 - RNA, 21 nt, RNAi
ggaguacagcuguguaguauu

SEQ ID NO: 37425 - RNA, 21 nt, RNAi
uuccucaugucgacacaucau

SEQ ID NO: 37426 - DNA, 21 bp, homo sapiens
cagctgtgtagtaaagatgcc

SEQ ID NO: 37427 - RNA, 21 nt, RNAi
gcuguguaguaaagaugccuu

SEQ ID NO: 37428 - RNA, 21 nt, RNAi
uucgacacaucauuucuacgg

SEQ ID NO: 37429 - DNA, 21 bp, homo sapiens
cacgtatatgccgagatctca

SEQ ID NO: 37430 - RNA, 21 nt, RNAi
cguauaugccgagaucucauu

SEQ ID NO: 37431 - RNA, 21 nt, RNAi
uugcauauacggcucuagagu

SEQ ID NO: 37432 - DNA, 21 bp, homo sapiens
cagccatattggagatgctgt

SEQ ID NO: 37433 - RNA, 21 nt, RNAi
gccauauuggagaugcuguuu

SEQ ID NO: 37434 - RNA, 21 nt, RNAi
uucgguauaaccucuacgaca

SEQ ID NO: 37435 - DNA, 21 bp, homo sapiens
catattggagatgctgttgta

SEQ ID NO: 37436 - RNA, 21 nt, RNAi
uauuggagaugcuguuguauu

SEQ ID NO: 37437 - RNA, 21 nt, RNAi
uuauaaccucuacgacaacau

SEQ ID NO: 37438 - DNA, 21 bp, homo sapiens
caagtggagaacttggaaatg

SEQ ID NO: 37439 - RNA, 21 nt, RNAi
aguggagaacuuggaaauguu

SEQ ID NO: 37440 - RNA, 21 nt, RNAi
uuucaccucuugaaccuuuac

SEQ ID NO: 37441 - DNA, 21 bp, homo sapiens
cattaaattgtcacagacaag

SEQ ID NO: 37442 - RNA, 21 nt, RNAi
uuaaauugucacagacaaguu

SEQ ID NO: 37443 - RNA, 21 nt, RNAi
uuaauuuaacagugucuguuc

SEQ ID NO: 37444 - DNA, 21 bp, homo sapiens
cacagacaagtaatgtcgata

SEQ ID NO: 37445 - RNA, 21 nt, RNAi
cagacaaguaaugucgauauu

SEQ ID NO: 37446 - RNA, 21 nt, RNAi
uugucuguucauuacagcuau

SEQ ID NO: 37447 - DNA, 21 bp, homo sapiens
cagacaagtaatgtcgataaa

SEQ ID NO: 37448 - RNA, 21 nt, RNAi
gacaaguaaugucgauaaauu

SEQ ID NO: 37449 - RNA, 21 nt, RNAi
uucuguucauuacagcuauuu

SEQ ID NO: 37450 - DNA, 21 bp, homo sapiens
caagtaatgtcgataaagagg

SEQ ID NO: 37451 - RNA, 21 nt, RNAi
aguaaugucgauaaagagguu

SEQ ID NO: 37452 - RNA, 21 nt, RNAi
uuucauuacagcuauuucucc

SEQ ID NO: 37453 - DNA, 21 bp, homo sapiens
catagagatgaatgaaccagt

SEQ ID NO: 37454 - RNA, 21 nt, RNAi
uagagaugaaugaaccaguuu

SEQ ID NO: 37455 - RNA, 21 nt, RNAi
uuaucucuacuuacuugguca

SEQ ID NO: 37456 - DNA, 21 bp, homo sapiens
cactgaggtacctgaacttct

SEQ ID NO: 37457 - RNA, 21 nt, RNAi
cugagguaccugaacuucuuu

SEQ ID NO: 37458 - RNA, 21 nt, RNAi
uugacuccauggacuugaaga

SEQ ID NO: 37459 - DNA, 21 bp, homo sapiens
cactccactctcttcaacggt

SEQ ID NO: 37460 - RNA, 21 nt, RNAi
cuccacucucuucaacgguuu

SEQ ID NO: 37461 - RNA, 21 nt, RNAi
uugaggugagagaaguugcca

SEQ ID NO: 37462 - DNA, 21 bp, homo sapiens
cactctcttcaacggtgacac

SEQ ID NO: 37463 - RNA, 21 nt, RNAi
cucucuucaacggugacacuu

SEQ ID NO: 37464 - RNA, 21 nt, RNAi
uugagagaaguugccacugug

SEQ ID NO: 37465 - DNA, 21 bp, homo sapiens
caacggtgacactcagtatgt

SEQ ID NO: 37466 - RNA, 21 nt, RNAi
acggugacacucaguauguuu

SEQ ID NO: 37467 - RNA, 21 nt, RNAi
uuugccacugugagucauaca

SEQ ID NO: 37468 - DNA, 21 bp, homo sapiens
cactcagtatgtctgcagatg

SEQ ID NO: 37469 - RNA, 21 nt, RNAi
cucaguaugucugcagauguu

SEQ ID NO: 37470 - RNA, 21 nt, RNAi
uugagucauacagacgucuac

SEQ ID NO: 37471 - DNA, 21 bp, homo sapiens
cagtatgtctgcagatgtacc

SEQ ID NO: 37472 - RNA, 21 nt, RNAi
guaugucugcagauguaccuu

SEQ ID NO: 37473 - RNA, 21 nt, RNAi
uucauacagacgucuacaugg

SEQ ID NO: 37474 - DNA, 21 bp, homo sapiens
caagatcgaggatgaagaagg

SEQ ID NO: 37475 - RNA, 21 nt, RNAi
agaucgaggaugaagaagguu

SEQ ID NO: 37476 - RNA, 21 nt, RNAi
uuucuagcuccuacuucuucc

SEQ ID NO: 37477 - DNA, 21 bp, homo sapiens
caccaaatttgtacctctaag

SEQ ID NO: 37478 - RNA, 21 nt, RNAi
ccaaauuuguaccucuaaguu

SEQ ID NO: 37479 - RNA, 21 nt, RNAi
uugguuuaaacauggagauuc

SEQ ID NO: 37480 - DNA, 21 bp, homo sapiens
caaatttgtacctctaagtac

SEQ ID NO: 37481 - RNA, 21 nt, RNAi
aauuuguaccucuaaguacuu

SEQ ID NO: 37482 - RNA, 21 nt, RNAi
uuuuaaacauggagauucaug

SEQ ID NO: 37483 - DNA, 21 bp, homo sapiens
caaagtcagatctggtctagt

SEQ ID NO: 37484 - RNA, 21 nt, RNAi
aagucagaucuggucuaguuu

SEQ ID NO: 37485 - RNA, 21 nt, RNAi
uuuucagucuagaccagauca

SEQ ID NO: 37486 - DNA, 21 bp, homo sapiens
cagatctggtctagttaacct

SEQ ID NO: 37487 - RNA, 21 nt, RNAi
gaucuggucuaguuaaccuuu

SEQ ID NO: 37488 - RNA, 21 nt, RNAi
uucuagaccagaucaauugga

SEQ ID NO: 37489 - DNA, 21 bp, homo sapiens
gagtggtcgttgtctttctag

SEQ ID NO: 37490 - RNA, 21 nt, RNAi
guggucguugucuuucuaguu

SEQ ID NO: 37491 - RNA, 21 nt, RNAi
uucaccagcaacagaaagauc

SEQ ID NO: 37492 - DNA, 21 bp, homo sapiens
gaggctcctgaagccgaaacc

SEQ ID NO: 37493 - RNA, 21 nt, RNAi
ggcuccugaagccgaaaccuu

SEQ ID NO: 37494 - RNA, 21 nt, RNAi
uuccgaggacuucggcuuugg

SEQ ID NO: 37495 - DNA, 21 bp, homo sapiens
gaagccgaaaccagctagact

SEQ ID NO: 37496 - RNA, 21 nt, RNAi
agccgaaaccagcuagacuuu

SEQ ID NO: 37497 - RNA, 21 nt, RNAi
uuucggcuuuggucgaucuga

SEQ ID NO: 37498 - DNA, 21 bp, homo sapiens
gaaaccagctagactttcctc

SEQ ID NO: 37499 - RNA, 21 nt, RNAi
aaccagcuagacuuuccucuu

SEQ ID NO: 37500 - RNA, 21 nt, RNAi
uuuuggucgaucugaaaggag

SEQ ID NO: 37501 - DNA, 21 bp, homo sapiens
gaaggtgttggaggcactcaa

SEQ ID NO: 37502 - RNA, 21 nt, RNAi
agguguuggaggcacucaauu

SEQ ID NO: 37503 - RNA, 21 nt, RNAi
uuuccacaaccuccgugaguu

SEQ ID NO: 37504 - DNA, 21 bp, homo sapiens
gaggcactcaaggacctcatc

SEQ ID NO: 37505 - RNA, 21 nt, RNAi
ggcacucaaggaccucaucuu

SEQ ID NO: 37506 - RNA, 21 nt, RNAi
uuccgugaguuccuggaguag

SEQ ID NO: 37507 - DNA, 21 bp, homo sapiens
gacctcatcaacgaggcctgc

SEQ ID NO: 37508 - RNA, 21 nt, RNAi
ccucaucaacgaggccugcuu

SEQ ID NO: 37509 - RNA, 21 nt, RNAi
uuggaguaguugcuccggacg

SEQ ID NO: 37510 - DNA, 21 bp, homo sapiens
gatattagctccagcggtgta

SEQ ID NO: 37511 - RNA, 21 nt, RNAi
uauuagcuccagcgguguauu

SEQ ID NO: 37512 - RNA, 21 nt, RNAi
uuauaaucgaggucgccacau

SEQ ID NO: 37513 - DNA, 21 bp, homo sapiens
gaacctcaccagtatgtccaa

SEQ ID NO: 37514 - RNA, 21 nt, RNAi
accucaccaguauguccaauu

SEQ ID NO: 37515 - RNA, 21 nt, RNAi
uuuggaguggucauacagguu

SEQ ID NO: 37516 - DNA, 21 bp, homo sapiens
gaagatatcattacactaagg

SEQ ID NO: 37517 - RNA, 21 nt, RNAi
agauaucauuacacuaagguu

SEQ ID NO: 37518 - RNA, 21 nt, RNAi
uuucuauaguaaugugauucc

SEQ ID NO: 37519 - DNA, 21 bp, homo sapiens
gaagataacgcggataccttg

SEQ ID NO: 37520 - RNA, 21 nt, RNAi
agauaacgcggauaccuuguu

SEQ ID NO: 37521 - RNA, 21 nt, RNAi
uuucuauugcgccuauggaac

SEQ ID NO: 37522 - DNA, 21 bp, homo sapiens
gataacgcggataccttggcg

SEQ ID NO: 37523 - RNA, 21 nt, RNAi
uaacgcggauaccuuggcguu

SEQ ID NO: 37524 - RNA, 21 nt, RNAi
uuauugcgccuauggaaccgc

SEQ ID NO: 37525 - DNA, 21 bp, homo sapiens
gataccttggcgctagtattt

SEQ ID NO: 37526 - RNA, 21 nt, RNAi
uaccuuggcgcuaguauuuuu

SEQ ID NO: 37527 - RNA, 21 nt, RNAi
uuauggaaccgcgaucauaaa

SEQ ID NO: 37528 - DNA, 21 bp, homo sapiens
gaagcaccaaaccaggagaaa

SEQ ID NO: 37529 - RNA, 21 nt, RNAi
agcaccaaaccaggagaaauu

SEQ ID NO: 37530 - RNA, 21 nt, RNAi
uuucgugguuugguccucuuu

SEQ ID NO: 37531 - DNA, 21 bp, homo sapiens
gagaaagtttcagactatgaa

SEQ ID NO: 37532 - RNA, 21 nt, RNAi
gaaaguuucagacuaugaauu

SEQ ID NO: 37533 - RNA, 21 nt, RNAi
uucuuucaaagucugauacuu

SEQ ID NO: 37534 - DNA, 21 bp, homo sapiens
gactatgaaatgaagttgatg

SEQ ID NO: 37535 - RNA, 21 nt, RNAi
cuaugaaaugaaguugauguu

SEQ ID NO: 37536 - RNA, 21 nt, RNAi
uugauacuuuacuucaacuac

SEQ ID NO: 37537 - DNA, 21 bp, homo sapiens
gaagttgatggatttagatgt

SEQ ID NO: 37538 - RNA, 21 nt, RNAi
aguugauggauuuagauguuu

SEQ ID NO: 37539 - RNA, 21 nt, RNAi
uuucaacuaccuaaaucuaca

SEQ ID NO: 37540 - DNA, 21 bp, homo sapiens
gatggatttagatgttgaaca

SEQ ID NO: 37541 - RNA, 21 nt, RNAi
uggauuuagauguugaacauu

SEQ ID NO: 37542 - RNA, 21 nt, RNAi
uuaccuaaaucuacaacuugu

SEQ ID NO: 37543 - DNA, 21 bp, homo sapiens
gatgttgaacaacttggaatt

SEQ ID NO: 37544 - RNA, 21 nt, RNAi
uguugaacaacuuggaauuuu

SEQ ID NO: 37545 - RNA, 21 nt, RNAi
uuacaacuuguugaaccuuaa

SEQ ID NO: 37546 - DNA, 21 bp, homo sapiens
gaacaacttggaattccagaa

SEQ ID NO: 37547 - RNA, 21 nt, RNAi
acaacuuggaauuccagaauu

SEQ ID NO: 37548 - RNA, 21 nt, RNAi
uuuguugaaccuuaaggucuu

SEQ ID NO: 37549 - DNA, 21 bp, homo sapiens
gaattccagaacaggagtaca

SEQ ID NO: 37550 - RNA, 21 nt, RNAi
auuccagaacaggaguacauu

SEQ ID NO: 37551 - RNA, 21 nt, RNAi
uuuaaggucuuguccucaugu

SEQ ID NO: 37552 - DNA, 21 bp, homo sapiens
gaacaggagtacagctgtgta

SEQ ID NO: 37553 - RNA, 21 nt, RNAi
acaggaguacagcuguguauu

SEQ ID NO: 37554 - RNA, 21 nt, RNAi
uuuguccucaugucgacacau

SEQ ID NO: 37555 - DNA, 21 bp, homo sapiens
gagtacagctgtgtagtaaag

SEQ ID NO: 37556 - RNA, 21 nt, RNAi
guacagcuguguaguaaaguu

SEQ ID NO: 37557 - RNA, 21 nt, RNAi
uucaugucgacacaucauuuc

SEQ ID NO: 37558 - DNA, 21 bp, homo sapiens
gatgccttctggtgaatttgc

SEQ ID NO: 37559 - RNA, 21 nt, RNAi
ugccuucuggugaauuugcuu

SEQ ID NO: 37560 - RNA, 21 nt, RNAi
uuacggaagaccacuuaaacg

SEQ ID NO: 37561 - DNA, 21 bp, homo sapiens
gaatttgcacgtatatgccga

SEQ ID NO: 37562 - RNA, 21 nt, RNAi
auuugcacguauaugccgauu

SEQ ID NO: 37563 - RNA, 21 nt, RNAi
uuuaaacgugcauauacggcu

SEQ ID NO: 37564 - DNA, 21 bp, homo sapiens
gagatctcagccatattggag

SEQ ID NO: 37565 - RNA, 21 nt, RNAi
gaucucagccauauuggaguu

SEQ ID NO: 37566 - RNA, 21 nt, RNAi
uucuagagucgguauaaccuc

SEQ ID NO: 37567 - DNA, 21 bp, homo sapiens
gatctcagccatattggagat

SEQ ID NO: 37568 - RNA, 21 nt, RNAi
ucucagccauauuggagauuu

SEQ ID NO: 37569 - RNA, 21 nt, RNAi
uuagagucgguauaaccucua

SEQ ID NO: 37570 - DNA, 21 bp, homo sapiens
gagatgctgttgtaatttcct

SEQ ID NO: 37571 - RNA, 21 nt, RNAi
gaugcuguuguaauuuccuuu

SEQ ID NO: 37572 - RNA, 21 nt, RNAi
uucuacgacaacauuaaagga

SEQ ID NO: 37573 - DNA, 21 bp, homo sapiens
gatgctgttgtaatttcctgt

SEQ ID NO: 37574 - RNA, 21 nt, RNAi
ugcuguuguaauuuccuguuu

SEQ ID NO: 37575 - RNA, 21 nt, RNAi
uuacgacaacauuaaaggaca

SEQ ID NO: 37576 - DNA, 21 bp, homo sapiens
gagaacttggaaatggaaaca

SEQ ID NO: 37577 - RNA, 21 nt, RNAi
gaacuuggaaauggaaacauu

SEQ ID NO: 37578 - RNA, 21 nt, RNAi
uucuugaaccuuuaccuuugu

SEQ ID NO: 37579 - DNA, 21 bp, homo sapiens
gaacttggaaatggaaacatt

SEQ ID NO: 37580 - RNA, 21 nt, RNAi
acuuggaaauggaaacauuuu

SEQ ID NO: 37581 - RNA, 21 nt, RNAi
uuugaaccuuuaccuuuguaa

SEQ ID NO: 37582 - DNA, 21 bp, homo sapiens
gacaagtaatgtcgataaaga

SEQ ID NO: 37583 - RNA, 21 nt, RNAi
caaguaaugucgauaaagauu

SEQ ID NO: 37584 - RNA, 21 nt, RNAi
uuguucauuacagcuauuucu

SEQ ID NO: 37585 - DNA, 21 bp, homo sapiens
gataaagaggaggaagctgtt

SEQ ID NO: 37586 - RNA, 21 nt, RNAi
uaaagaggaggaagcuguuuu

SEQ ID NO: 37587 - RNA, 21 nt, RNAi
uuauuucuccuccuucgacaa

SEQ ID NO: 37588 - DNA, 21 bp, homo sapiens
gaggaggaagctgttaccata

SEQ ID NO: 37589 - RNA, 21 nt, RNAi
ggaggaagcuguuaccauauu

SEQ ID NO: 37590 - RNA, 21 nt, RNAi
uuccuccuucgacaaugguau

SEQ ID NO: 37591 - DNA, 21 bp, homo sapiens
gaggaagctgttaccatagag

SEQ ID NO: 37592 - RNA, 21 nt, RNAi
ggaagcuguuaccauagaguu

SEQ ID NO: 37593 - RNA, 21 nt, RNAi
uuccuucgacaaugguaucuc

SEQ ID NO: 37594 - DNA, 21 bp, homo sapiens
gaagctgttaccatagagatg

SEQ ID NO: 37595 - RNA, 21 nt, RNAi
agcuguuaccauagagauguu

SEQ ID NO: 37596 - RNA, 21 nt, RNAi
uuucgacaaugguaucucuac

SEQ ID NO: 37597 - DNA, 21 bp, homo sapiens
gagatgaatgaaccagttcaa

SEQ ID NO: 37598 - RNA, 21 nt, RNAi
gaugaaugaaccaguucaauu

SEQ ID NO: 37599 - RNA, 21 nt, RNAi
uucuacuuacuuggucaaguu

SEQ ID NO: 37600 - DNA, 21 bp, homo sapiens
gatgaatgaaccagttcaact

SEQ ID NO: 37601 - RNA, 21 nt, RNAi
ugaaugaaccaguucaacuuu

SEQ ID NO: 37602 - RNA, 21 nt, RNAi
uuacuuacuuggucaaguuga

SEQ ID NO: 37603 - DNA, 21 bp, homo sapiens
gaatgaaccagttcaactaac

SEQ ID NO: 37604 - RNA, 21 nt, RNAi
augaaccaguucaacuaacuu

SEQ ID NO: 37605 - RNA, 21 nt, RNAi
uuuacuuggucaaguugauug

SEQ ID NO: 37606 - DNA, 21 bp, homo sapiens
gaggtacctgaacttctttac

SEQ ID NO: 37607 - RNA, 21 nt, RNAi
gguaccugaacuucuuuacuu

SEQ ID NO: 37608 - RNA, 21 nt, RNAi
uuccauggacuugaagaaaug

SEQ ID NO: 37609 - DNA, 21 bp, homo sapiens
gacactcagtatgtctgcaga

SEQ ID NO: 37610 - RNA, 21 nt, RNAi
cacucaguaugucugcagauu

SEQ ID NO: 37611 - RNA, 21 nt, RNAi
uugugagucauacagacgucu

SEQ ID NO: 37612 - DNA, 21 bp, homo sapiens
gatcgaggatgaagaaggatc

SEQ ID NO: 37613 - RNA, 21 nt, RNAi
ucgaggaugaagaaggaucuu

SEQ ID NO: 37614 - RNA, 21 nt, RNAi
uuagcuccuacuucuuccuag

SEQ ID NO: 37615 - DNA, 21 bp, homo sapiens
gaggatgaagaaggatcttag

SEQ ID NO: 37616 - RNA, 21 nt, RNAi
ggaugaagaaggaucuuaguu

SEQ ID NO: 37617 - RNA, 21 nt, RNAi
uuccuacuucuuccuagaauc

SEQ ID NO: 37618 - DNA, 21 bp, homo sapiens
gatgaagaaggatcttaggca

SEQ ID NO: 37619 - RNA, 21 nt, RNAi
ugaagaaggaucuuaggcauu

SEQ ID NO: 37620 - RNA, 21 nt, RNAi
uuacuucuuccuagaauccgu

SEQ ID NO: 37621 - DNA, 21 bp, homo sapiens
gaagaaggatcttaggcattc

SEQ ID NO: 37622 - RNA, 21 nt, RNAi
agaaggaucuuaggcauucuu

SEQ ID NO: 37623 - RNA, 21 nt, RNAi
uuucuuccuagaauccguaag

SEQ ID NO: 37624 - DNA, 21 bp, homo sapiens
gaaggatcttaggcattctta

SEQ ID NO: 37625 - RNA, 21 nt, RNAi
aggaucuuaggcauucuuauu

SEQ ID NO: 37626 - RNA, 21 nt, RNAi
uuuccuagaauccguaagaau

SEQ ID NO: 37627 - DNA, 21 bp, homo sapiens
gagaactgcttctaagatgcc

SEQ ID NO: 37628 - RNA, 21 nt, RNAi
gaacugcuucuaagaugccuu

SEQ ID NO: 37629 - RNA, 21 nt, RNAi
uucuugacgaagauucuacgg

SEQ ID NO: 37630 - DNA, 21 bp, homo sapiens
gaactgcttctaagatgccag

SEQ ID NO: 37631 - RNA, 21 nt, RNAi
acugcuucuaagaugccaguu

SEQ ID NO: 37632 - RNA, 21 nt, RNAi
uuugacgaagauucuacgguc

SEQ ID NO: 37633 - DNA, 21 bp, homo sapiens
gatgccagcatatactgaagt

SEQ ID NO: 37634 - RNA, 21 nt, RNAi
ugccagcauauacugaaguuu

SEQ ID NO: 37635 - RNA, 21 nt, RNAi
uuacggucguauaugacuuca

SEQ ID NO: 37636 - DNA, 21 bp, homo sapiens
gaataaagtccaaagtcagat

SEQ ID NO: 37637 - RNA, 21 nt, RNAi
auaaaguccaaagucagauuu

SEQ ID NO: 37638 - RNA, 21 nt, RNAi
uuuauuucagguuucagucua

SEQ ID NO: 37639 - DNA, 21 bp, homo sapiens
gatctggtctagttaacctag

SEQ ID NO: 37640 - RNA, 21 nt, RNAi
ucuggucuaguuaaccuaguu

SEQ ID NO: 37641 - RNA, 21 nt, RNAi
uuagaccagaucaauuggauc

SEQ ID NO: 37642 - DNA, 21 bp, homo sapiens
tagcagagtggtcgttgtctt

SEQ ID NO: 37643 - RNA, 21 nt, RNAi
gcagaguggucguugucuuuu

SEQ ID NO: 37644 - RNA, 21 nt, RNAi
uucgucucaccagcaacagaa

SEQ ID NO: 37645 - DNA, 21 bp, homo sapiens
tagcggcgttgttgccactcc

SEQ ID NO: 37646 - RNA, 21 nt, RNAi
gcggcguuguugccacuccuu

SEQ ID NO: 37647 - RNA, 21 nt, RNAi
uucgccgcaacaacggugagg

SEQ ID NO: 37648 - DNA, 21 bp, homo sapiens
tattagctccagcggtgtaaa

SEQ ID NO: 37649 - RNA, 21 nt, RNAi
uuagcuccagcgguguaaauu

SEQ ID NO: 37650 - RNA, 21 nt, RNAi
uuaaucgaggucgccacauuu

SEQ ID NO: 37651 - DNA, 21 bp, homo sapiens
tagctccagcggtgtaaacct

SEQ ID NO: 37652 - RNA, 21 nt, RNAi
gcuccagcgguguaaaccuuu

SEQ ID NO: 37653 - RNA, 21 nt, RNAi
uucgaggucgccacauuugga

SEQ ID NO: 37654 - DNA, 21 bp, homo sapiens
taaacctgcagagcatggact

SEQ ID NO: 37655 - RNA, 21 nt, RNAi
aaccugcagagcauggacuuu

SEQ ID NO: 37656 - RNA, 21 nt, RNAi
uuuuggacgucucguaccuga

SEQ ID NO: 37657 - DNA, 21 bp, homo sapiens
taacgcggataccttggcgct

SEQ ID NO: 37658 - RNA, 21 nt, RNAi
acgcggauaccuuggcgcuuu

SEQ ID NO: 37659 - RNA, 21 nt, RNAi
uuugcgccuauggaaccgcga

SEQ ID NO: 37660 - DNA, 21 bp, homo sapiens
taccttggcgctagtatttga

SEQ ID NO: 37661 - RNA, 21 nt, RNAi
ccuuggcgcuaguauuugauu

SEQ ID NO: 37662 - RNA, 21 nt, RNAi
uuggaaccgcgaucauaaacu

SEQ ID NO: 37663 - DNA, 21 bp, homo sapiens
tagtatttgaagcaccaaacc

SEQ ID NO: 37664 - RNA, 21 nt, RNAi
guauuugaagcaccaaaccuu

SEQ ID NO: 37665 - RNA, 21 nt, RNAi
uucauaaacuucgugguuugg

SEQ ID NO: 37666 - DNA, 21 bp, homo sapiens
tatttgaagcaccaaaccagg

SEQ ID NO: 37667 - RNA, 21 nt, RNAi
uuugaagcaccaaaccagguu

SEQ ID NO: 37668 - RNA, 21 nt, RNAi
uuaaacuucgugguuuggucc

SEQ ID NO: 37669 - DNA, 21 bp, homo sapiens
tagatgttgaacaacttggaa

SEQ ID NO: 37670 - RNA, 21 nt, RNAi
gauguugaacaacuuggaauu

SEQ ID NO: 37671 - RNA, 21 nt, RNAi
uucuacaacuuguugaaccuu

SEQ ID NO: 37672 - DNA, 21 bp, homo sapiens
tacagctgtgtagtaaagatg

SEQ ID NO: 37673 - RNA, 21 nt, RNAi
cagcuguguaguaaagauguu

SEQ ID NO: 37674 - RNA, 21 nt, RNAi
uugucgacacaucauuucuac

SEQ ID NO: 37675 - DNA, 21 bp, homo sapiens
tagtaaagatgccttctggtg

SEQ ID NO: 37676 - RNA, 21 nt, RNAi
guaaagaugccuucugguguu

SEQ ID NO: 37677 - RNA, 21 nt, RNAi
uucauuucuacggaagaccac

SEQ ID NO: 37678 - DNA, 21 bp, homo sapiens
taaagatgccttctggtgaat

SEQ ID NO: 37679 - RNA, 21 nt, RNAi
aagaugccuucuggugaauuu

SEQ ID NO: 37680 - RNA, 21 nt, RNAi
uuuucuacggaagaccacuua

SEQ ID NO: 37681 - DNA, 21 bp, homo sapiens
tatatgccgagatctcagcca

SEQ ID NO: 37682 - RNA, 21 nt, RNAi
uaugccgagaucucagccauu

SEQ ID NO: 37683 - RNA, 21 nt, RNAi
uuauacggcucuagagucggu

SEQ ID NO: 37684 - DNA, 21 bp, homo sapiens
tatgccgagatctcagccata

SEQ ID NO: 37685 - RNA, 21 nt, RNAi
ugccgagaucucagccauauu

SEQ ID NO: 37686 - RNA, 21 nt, RNAi
uuacggcucuagagucgguau

SEQ ID NO: 37687 - DNA, 21 bp, homo sapiens
tattggagatgctgttgtaat

SEQ ID NO: 37688 - RNA, 21 nt, RNAi
uuggagaugcuguuguaauuu

SEQ ID NO: 37689 - RNA, 21 nt, RNAi
uuaaccucuacgacaacauua

SEQ ID NO: 37690 - DNA, 21 bp, homo sapiens
taatgtcgataaagaggagga

SEQ ID NO: 37691 - RNA, 21 nt, RNAi
augucgauaaagaggaggauu

SEQ ID NO: 37692 - RNA, 21 nt, RNAi
uuuacagcuauuucuccuccu

SEQ ID NO: 37693 - DNA, 21 bp, homo sapiens
taaagaggaggaagctgttac

SEQ ID NO: 37694 - RNA, 21 nt, RNAi
aagaggaggaagcuguuacuu

SEQ ID NO: 37695 - RNA, 21 nt, RNAi
uuuucuccuccuucgacaaug

SEQ ID NO: 37696 - DNA, 21 bp, homo sapiens
taccatagagatgaatgaacc

SEQ ID NO: 37697 - RNA, 21 nt, RNAi
ccauagagaugaaugaaccuu

SEQ ID NO: 37698 - RNA, 21 nt, RNAi
uugguaucucuacuuacuugg

SEQ ID NO: 37699 - DNA, 21 bp, homo sapiens
tagagatgaatgaaccagttc

SEQ ID NO: 37700 - RNA, 21 nt, RNAi
gagaugaaugaaccaguucuu

SEQ ID NO: 37701 - RNA, 21 nt, RNAi
uucucuacuuacuuggucaag

SEQ ID NO: 37702 - DNA, 21 bp, homo sapiens
taagctctttgagaactgctt

SEQ ID NO: 37703 - RNA, 21 nt, RNAi
agcucuuugagaacugcuuuu

SEQ ID NO: 37704 - RNA, 21 nt, RNAi
uuucgagaaacucuugacgaa

SEQ ID NO: 37705 - DNA, 21 bp, homo sapiens
taagatgccagcatatactga

SEQ ID NO: 37706 - RNA, 21 nt, RNAi
agaugccagcauauacugauu

SEQ ID NO: 37707 - RNA, 21 nt, RNAi
uuucuacggucguauaugacu

SEQ ID NO: 37708 - DNA, 21 bp, homo sapiens
tacctctaagtacatatgtag

SEQ ID NO: 37709 - RNA, 21 nt, RNAi
ccucuaaguacauauguaguu

SEQ ID NO: 37710 - RNA, 21 nt, RNAi
uuggagauucauguauacauc

SEQ ID NO: 37711 - DNA, 21 bp, homo sapiens
taaagtccaaagtcagatctg

SEQ ID NO: 37712 - RNA, 21 nt, RNAi
aaguccaaagucagaucuguu

SEQ ID NO: 37713 - RNA, 21 nt, RNAi
uuuucagguuucagucuagac

SEQ ID NO: 37714 - DNA, 21 bp, homo sapiens
aagataacgcggataccttgg

SEQ ID NO: 37715 - RNA, 21 nt, RNAi
gauaacgcggauaccuugguu

SEQ ID NO: 37716 - RNA, 21 nt, RNAi
uucuauugcgccuauggaacc

SEQ ID NO: 37717 - DNA, 21 bp, homo sapiens
aagatgccttctggtgaattt

SEQ ID NO: 37718 - RNA, 21 nt, RNAi
gaugccuucuggugaauuuuu

SEQ ID NO: 37719 - RNA, 21 nt, RNAi
uucuacggaagaccacuuaaa

SEQ ID NO: 37720 - DNA, 21 bp, homo sapiens
aacggtgacactcagtatgtc

SEQ ID NO: 37721 - RNA, 21 nt, RNAi
cggugacacucaguaugucuu

SEQ ID NO: 37722 - RNA, 21 nt, RNAi
uugccacugugagucauacag

SEQ ID NO: 37723 - DNA, 21 bp, homo sapiens
cacgtatatgccgagatctca

SEQ ID NO: 37724 - RNA, 21 nt, RNAi
cguauaugccgagaucucauu

SEQ ID NO: 37725 - RNA, 21 nt, RNAi
uugcauauacggcucuagagu

SEQ ID NO: 37726 - DNA, 21 bp, homo sapiens
cagccatattggagatgctgt

SEQ ID NO: 37727 - RNA, 21 nt, RNAi
gccauauuggagaugcuguuu

SEQ ID NO: 37728 - RNA, 21 nt, RNAi
uucgguauaaccucuacgaca

SEQ ID NO: 37729 - DNA, 21 bp, homo sapiens
cacagacaagtaatgtcgata

SEQ ID NO: 37730 - RNA, 21 nt, RNAi
cagacaaguaaugucgauauu

SEQ ID NO: 37731 - RNA, 21 nt, RNAi
uugucuguucauuacagcuau

SEQ ID NO: 37732 - DNA, 21 bp, homo sapiens
cactctcttcaacggtgacac

SEQ ID NO: 37733 - RNA, 21 nt, RNAi
cucucuucaacggugacacuu

SEQ ID NO: 37734 - RNA, 21 nt, RNAi
uugagagaaguugccacugug

SEQ ID NO: 37735 - DNA, 21 bp, homo sapiens
caacggtgacactcagtatgt

SEQ ID NO: 37736 - RNA, 21 nt, RNAi
acggugacacucaguauguuu

SEQ ID NO: 37737 - RNA, 21 nt, RNAi
uuugccacugugagucauaca

SEQ ID NO: 37738 - DNA, 21 bp, homo sapiens
gatattagctccagcggtgta

SEQ ID NO: 37739 - RNA, 21 nt, RNAi
uauuagcuccagcgguguauu

SEQ ID NO: 37740 - RNA, 21 nt, RNAi
uuauaaucgaggucgccacau

SEQ ID NO: 37741 - DNA, 21 bp, homo sapiens
gaagataacgcggataccttg

SEQ ID NO: 37742 - RNA, 21 nt, RNAi
agauaacgcggauaccuuguu

SEQ ID NO: 37743 - RNA, 21 nt, RNAi
uuucuauugcgccuauggaac

SEQ ID NO: 37744 - DNA, 21 bp, homo sapiens
tattagctccagcggtgtaaa

SEQ ID NO: 37745 - RNA, 21 nt, RNAi
uuagcuccagcgguguaaauu

SEQ ID NO: 37746 - RNA, 21 nt, RNAi
uuaaucgaggucgccacauuu

SEQ ID NO: 37747 - DNA, 21 bp, homo sapiens
tagtatttgaagcaccaaacc

SEQ ID NO: 37748 - RNA, 21 nt, RNAi
guauuugaagcaccaaaccuu

SEQ ID NO: 37749 - RNA, 21 nt, RNAi
uucauaaacuucgugguuugg

SEQ ID NO: 37750 - DNA, 21 bp, homo sapiens
tatttgaagcaccaaaccagg

SEQ ID NO: 37751 - RNA, 21 nt, RNAi
uuugaagcaccaaaccagguu

SEQ ID NO: 37752 - RNA, 21 nt, RNAi
uuaaacuucgugguuuggucc

SEQ ID NO: 37753 - DNA, 21 bp, homo sapiens
aaggatcgctttgagatctga

SEQ ID NO: 37754 - RNA, 21 nt, RNAi
ggaucgcuuugagaucugauu

SEQ ID NO: 37755 - RNA, 21 nt, RNAi
uuccuagcgaaacucuagacu

SEQ ID NO: 37756 - DNA, 21 bp, homo sapiens
aaggagctccagaaacagcag

SEQ ID NO: 37757 - RNA, 21 nt, RNAi
ggagcuccagaaacagcaguu

SEQ ID NO: 37758 - RNA, 21 nt, RNAi
uuccucgaggucuuugucguc

SEQ ID NO: 37759 - DNA, 21 bp, homo sapiens
aaacagcagtcttaggcgctg

SEQ ID NO: 37760 - RNA, 21 nt, RNAi
acagcagucuuaggcgcuguu

SEQ ID NO: 37761 - RNA, 21 nt, RNAi
uuugucgucagaauccgcgac

SEQ ID NO: 37762 - DNA, 21 bp, homo sapiens
aacagcagtcttaggcgctga

SEQ ID NO: 37763 - RNA, 21 nt, RNAi
cagcagucuuaggcgcugauu

SEQ ID NO: 37764 - RNA, 21 nt, RNAi
uugucgucagaauccgcgacu

SEQ ID NO: 37765 - DNA, 21 bp, homo sapiens
aaagagtgtgtctacttctgc

SEQ ID NO: 37766 - RNA, 21 nt, RNAi
agagugugucuacuucugcuu

SEQ ID NO: 37767 - RNA, 21 nt, RNAi
uuucucacacagaugaagacg

SEQ ID NO: 37768 - DNA, 21 bp, homo sapiens
aagagtgtgtctacttctgcc

SEQ ID NO: 37769 - RNA, 21 nt, RNAi
gagugugucuacuucugccuu

SEQ ID NO: 37770 - RNA, 21 nt, RNAi
uucucacacagaugaagacgg

SEQ ID NO: 37771 - DNA, 21 bp, homo sapiens
aagagagccttggagaattta

SEQ ID NO: 37772 - RNA, 21 nt, RNAi
gagagccuuggagaauuuauu

SEQ ID NO: 37773 - RNA, 21 nt, RNAi
uucucucggaaccucuuaaau

SEQ ID NO: 37774 - DNA, 21 bp, homo sapiens
aaaggcaacagaccgtgagaa

SEQ ID NO: 37775 - RNA, 21 nt, RNAi
aggcaacagaccgugagaauu

SEQ ID NO: 37776 - RNA, 21 nt, RNAi
uuuccguugucuggcacucuu

SEQ ID NO: 37777 - DNA, 21 bp, homo sapiens
aaggcaacagaccgtgagaat

SEQ ID NO: 37778 - RNA, 21 nt, RNAi
ggcaacagaccgugagaauuu

SEQ ID NO: 37779 - RNA, 21 nt, RNAi
uuccguugucuggcacucuua

SEQ ID NO: 37780 - DNA, 21 bp, homo sapiens
aacagaccgtgagaatagatg

SEQ ID NO: 37781 - RNA, 21 nt, RNAi
cagaccgugagaauagauguu

SEQ ID NO: 37782 - RNA, 21 nt, RNAi
uugucuggcacucuuaucuac

SEQ ID NO: 37783 - DNA, 21 bp, homo sapiens
aatagatgccaatgtgctagc

SEQ ID NO: 37784 - RNA, 21 nt, RNAi
uagaugccaaugugcuagcuu

SEQ ID NO: 37785 - RNA, 21 nt, RNAi
uuaucuacgguuacacgaucg

SEQ ID NO: 37786 - DNA, 21 bp, homo sapiens
aaagacaagaagtgctggaat

SEQ ID NO: 37787 - RNA, 21 nt, RNAi
agacaagaagugcuggaauuu

SEQ ID NO: 37788 - RNA, 21 nt, RNAi
uuucuguucuucacgaccuua

SEQ ID NO: 37789 - DNA, 21 bp, homo sapiens
aagacaagaagtgctggaatt

SEQ ID NO: 37790 - RNA, 21 nt, RNAi
gacaagaagugcuggaauuuu

SEQ ID NO: 37791 - RNA, 21 nt, RNAi
uucuguucuucacgaccuuaa

SEQ ID NO: 37792 - DNA, 21 bp, homo sapiens
aagacattatggagaaagact

SEQ ID NO: 37793 - RNA, 21 nt, RNAi
gacauuauggagaaagacuuu

SEQ ID NO: 37794 - RNA, 21 nt, RNAi
uucuguaauaccucuuucuga

SEQ ID NO: 37795 - DNA, 21 bp, homo sapiens
aaatcagaagaagttcagagg

SEQ ID NO: 37796 - RNA, 21 nt, RNAi
aucagaagaaguucagagguu

SEQ ID NO: 37797 - RNA, 21 nt, RNAi
uuuagucuucuucaagucucc

SEQ ID NO: 37798 - DNA, 21 bp, homo sapiens
aatcagaagaagttcagagga

SEQ ID NO: 37799 - RNA, 21 nt, RNAi
ucagaagaaguucagaggauu

SEQ ID NO: 37800 - RNA, 21 nt, RNAi
uuagucuucuucaagucuccu

SEQ ID NO: 37801 - DNA, 21 bp, homo sapiens
aagaagttcagaggaacacct

SEQ ID NO: 37802 - RNA, 21 nt, RNAi
gaaguucagaggaacaccuuu

SEQ ID NO: 37803 - RNA, 21 nt, RNAi
uucuucaagucuccuugugga

SEQ ID NO: 37804 - DNA, 21 bp, homo sapiens
aagttcagaggaacacctaag

SEQ ID NO: 37805 - RNA, 21 nt, RNAi
guucagaggaacaccuaaguu

SEQ ID NO: 37806 - RNA, 21 nt, RNAi
uucaagucuccuuguggauuc

SEQ ID NO: 37807 - DNA, 21 bp, homo sapiens
aacacctaagacaaaccaggt

SEQ ID NO: 37808 - RNA, 21 nt, RNAi
caccuaagacaaaccagguuu

SEQ ID NO: 37809 - RNA, 21 nt, RNAi
uuguggauucuguuuggucca

SEQ ID NO: 37810 - DNA, 21 bp, homo sapiens
aagacaaaccaggtcggagac

SEQ ID NO: 37811 - RNA, 21 nt, RNAi
gacaaaccaggucggagacuu

SEQ ID NO: 37812 - RNA, 21 nt, RNAi
uucuguuugguccagccucug

SEQ ID NO: 37813 - DNA, 21 bp, homo sapiens
aaaccaggtcggagaccatga

SEQ ID NO: 37814 - RNA, 21 nt, RNAi
accaggucggagaccaugauu

SEQ ID NO: 37815 - RNA, 21 nt, RNAi
uuugguccagccucugguacu

SEQ ID NO: 37816 - DNA, 21 bp, homo sapiens
aaccaggtcggagaccatgag

SEQ ID NO: 37817 - RNA, 21 nt, RNAi
ccaggucggagaccaugaguu

SEQ ID NO: 37818 - RNA, 21 nt, RNAi
uugguccagccucugguacuc

SEQ ID NO: 37819 - DNA, 21 bp, homo sapiens
aaacagcgtcaaatcatcttt

SEQ ID NO: 37820 - RNA, 21 nt, RNAi
acagcgucaaaucaucuuuuu

SEQ ID NO: 37821 - RNA, 21 nt, RNAi
uuugucgcaguuuaguagaaa

SEQ ID NO: 37822 - DNA, 21 bp, homo sapiens
aaccgagcacattggtgacag

SEQ ID NO: 37823 - RNA, 21 nt, RNAi
ccgagcacauuggugacaguu

SEQ ID NO: 37824 - RNA, 21 nt, RNAi
uuggcucguguaaccacuguc

SEQ ID NO: 37825 - DNA, 21 bp, homo sapiens
aagccatagcctccacggaga

SEQ ID NO: 37826 - RNA, 21 nt, RNAi
gccauagccuccacggagauu

SEQ ID NO: 37827 - RNA, 21 nt, RNAi
uucgguaucggaggugccucu

SEQ ID NO: 37828 - DNA, 21 bp, homo sapiens
aaaggaccagcgtcctcgttc

SEQ ID NO: 37829 - RNA, 21 nt, RNAi
aggaccagcguccucguucuu

SEQ ID NO: 37830 - RNA, 21 nt, RNAi
uuuccuggucgcaggagcaag

SEQ ID NO: 37831 - DNA, 21 bp, homo sapiens
aaggaccagcgtcctcgttca

SEQ ID NO: 37832 - RNA, 21 nt, RNAi
ggaccagcguccucguucauu

SEQ ID NO: 37833 - RNA, 21 nt, RNAi
uuccuggucgcaggagcaagu

SEQ ID NO: 37834 - DNA, 21 bp, homo sapiens
aacattccaagaaaggttaag

SEQ ID NO: 37835 - RNA, 21 nt, RNAi
cauuccaagaaagguuaaguu

SEQ ID NO: 37836 - RNA, 21 nt, RNAi
uuguaagguucuuuccaauuc

SEQ ID NO: 37837 - DNA, 21 bp, homo sapiens
aaccatcttcactggcttcca

SEQ ID NO: 37838 - RNA, 21 nt, RNAi
ccaucuucacuggcuuccauu

SEQ ID NO: 37839 - RNA, 21 nt, RNAi
uugguagaagugaccgaaggu

SEQ ID NO: 37840 - DNA, 21 bp, homo sapiens
aactgctttggtctcttcttt

SEQ ID NO: 37841 - RNA, 21 nt, RNAi
cugcuuuggucucuucuuuuu

SEQ ID NO: 37842 - RNA, 21 nt, RNAi
uugacgaaaccagagaagaaa

SEQ ID NO: 37843 - DNA, 21 bp, homo sapiens
aatggacctctcagcagaaac

SEQ ID NO: 37844 - RNA, 21 nt, RNAi
uggaccucucagcagaaacuu

SEQ ID NO: 37845 - RNA, 21 nt, RNAi
uuaccuggagagucgucuuug

SEQ ID NO: 37846 - DNA, 21 bp, homo sapiens
aaacacacagtcacattcgaa

SEQ ID NO: 37847 - RNA, 21 nt, RNAi
acacacagucacauucgaauu

SEQ ID NO: 37848 - RNA, 21 nt, RNAi
uuugugugucaguguaagcuu

SEQ ID NO: 37849 - DNA, 21 bp, homo sapiens
aacacacagtcacattcgaat

SEQ ID NO: 37850 - RNA, 21 nt, RNAi
cacacagucacauucgaauuu

SEQ ID NO: 37851 - RNA, 21 nt, RNAi
uugugugucaguguaagcuua

SEQ ID NO: 37852 - DNA, 21 bp, homo sapiens
aaactccaaagtccacacaaa

SEQ ID NO: 37853 - RNA, 21 nt, RNAi
acuccaaaguccacacaaauu

SEQ ID NO: 37854 - RNA, 21 nt, RNAi
uuugagguuucagguguguuu

SEQ ID NO: 37855 - DNA, 21 bp, homo sapiens
aactccaaagtccacacaaag

SEQ ID NO: 37856 - RNA, 21 nt, RNAi
cuccaaaguccacacaaaguu

SEQ ID NO: 37857 - RNA, 21 nt, RNAi
uugagguuucagguguguuuc

SEQ ID NO: 37858 - DNA, 21 bp, homo sapiens
aagacaaacatgcaagtaaag

SEQ ID NO: 37859 - RNA, 21 nt, RNAi
gacaaacaugcaaguaaaguu

SEQ ID NO: 37860 - RNA, 21 nt, RNAi
uucuguuuguacguucauuuc

SEQ ID NO: 37861 - DNA, 21 bp, homo sapiens
cagaatggattatttgctcat

SEQ ID NO: 37862 - RNA, 21 nt, RNAi
gaauggauuauuugcucauuu

SEQ ID NO: 37863 - RNA, 21 nt, RNAi
uucuuaccuaauaaacgagua

SEQ ID NO: 37864 - DNA, 21 bp, homo sapiens
caaggagctccagaaacagca

SEQ ID NO: 37865 - RNA, 21 nt, RNAi
aggagcuccagaaacagcauu

SEQ ID NO: 37866 - RNA, 21 nt, RNAi
uuuccucgaggucuuugucgu

SEQ ID NO: 37867 - DNA, 21 bp, homo sapiens
cagaaacagcagtcttaggcg

SEQ ID NO: 37868 - RNA, 21 nt, RNAi
gaaacagcagucuuaggcguu

SEQ ID NO: 37869 - RNA, 21 nt, RNAi
uucuuugucgucagaauccgc

SEQ ID NO: 37870 - DNA, 21 bp, homo sapiens
cagcagtcttaggcgctgagc

SEQ ID NO: 37871 - RNA, 21 nt, RNAi
gcagucuuaggcgcugagcuu

SEQ ID NO: 37872 - RNA, 21 nt, RNAi
uucgucagaauccgcgacucg

SEQ ID NO: 37873 - DNA, 21 bp, homo sapiens
cagtcttaggcgctgagctca

SEQ ID NO: 37874 - RNA, 21 nt, RNAi
gucuuaggcgcugagcucauu

SEQ ID NO: 37875 - RNA, 21 nt, RNAi
uucagaauccgcgacucgagu

SEQ ID NO: 37876 - DNA, 21 bp, homo sapiens
cacgttgttccgtatggactt

SEQ ID NO: 37877 - RNA, 21 nt, RNAi
cguuguuccguauggacuuuu

SEQ ID NO: 37878 - RNA, 21 nt, RNAi
uugcaacaaggcauaccugaa

SEQ ID NO: 37879 - DNA, 21 bp, homo sapiens
caagagagccttggagaattt

SEQ ID NO: 37880 - RNA, 21 nt, RNAi
agagagccuuggagaauuuuu

SEQ ID NO: 37881 - RNA, 21 nt, RNAi
uuucucucggaaccucuuaaa

SEQ ID NO: 37882 - DNA, 21 bp, homo sapiens
cacaaaggcaacagaccgtga

SEQ ID NO: 37883 - RNA, 21 nt, RNAi
caaaggcaacagaccgugauu

SEQ ID NO: 37884 - RNA, 21 nt, RNAi
uuguuuccguugucuggcacu

SEQ ID NO: 37885 - DNA, 21 bp, homo sapiens
caaaggcaacagaccgtgaga

SEQ ID NO: 37886 - RNA, 21 nt, RNAi
aaggcaacagaccgugagauu

SEQ ID NO: 37887 - RNA, 21 nt, RNAi
uuuuccguugucuggcacucu

SEQ ID NO: 37888 - DNA, 21 bp, homo sapiens
caacagaccgtgagaatagat

SEQ ID NO: 37889 - RNA, 21 nt, RNAi
acagaccgugagaauagauuu

SEQ ID NO: 37890 - RNA, 21 nt, RNAi
uuugucuggcacucuuaucua

SEQ ID NO: 37891 - DNA, 21 bp, homo sapiens
cagaccgtgagaatagatgcc

SEQ ID NO: 37892 - RNA, 21 nt, RNAi
gaccgugagaauagaugccuu

SEQ ID NO: 37893 - RNA, 21 nt, RNAi
uucuggcacucuuaucuacgg

SEQ ID NO: 37894 - DNA, 21 bp, homo sapiens
cattatggagaaagactggaa

SEQ ID NO: 37895 - RNA, 21 nt, RNAi
uuauggagaaagacuggaauu

SEQ ID NO: 37896 - RNA, 21 nt, RNAi
uuaauaccucuuucugaccuu

SEQ ID NO: 37897 - DNA, 21 bp, homo sapiens
cagcagttagtgagaggaaga

SEQ ID NO: 37898 - RNA, 21 nt, RNAi
gcaguuagugagaggaagauu

SEQ ID NO: 37899 - RNA, 21 nt, RNAi
uucgucaaucacucuccuucu

SEQ ID NO: 37900 - DNA, 21 bp, homo sapiens
cagaagaagttcagaggaaca

SEQ ID NO: 37901 - RNA, 21 nt, RNAi
gaagaaguucagaggaacauu

SEQ ID NO: 37902 - RNA, 21 nt, RNAi
uucuucuucaagucuccuugu

SEQ ID NO: 37903 - DNA, 21 bp, homo sapiens
cagaggaacacctaagacaaa

SEQ ID NO: 37904 - RNA, 21 nt, RNAi
gaggaacaccuaagacaaauu

SEQ ID NO: 37905 - RNA, 21 nt, RNAi
uucuccuuguggauucuguuu

SEQ ID NO: 37906 - DNA, 21 bp, homo sapiens
cacctaagacaaaccaggtcg

SEQ ID NO: 37907 - RNA, 21 nt, RNAi
ccuaagacaaaccaggucguu

SEQ ID NO: 37908 - RNA, 21 nt, RNAi
uuggauucuguuugguccagc

SEQ ID NO: 37909 - DNA, 21 bp, homo sapiens
caaaccaggtcggagaccatg

SEQ ID NO: 37910 - RNA, 21 nt, RNAi
aaccaggucggagaccauguu

SEQ ID NO: 37911 - RNA, 21 nt, RNAi
uuuugguccagccucugguac

SEQ ID NO: 37912 - DNA, 21 bp, homo sapiens
caggtcggagaccatgagaaa

SEQ ID NO: 37913 - RNA, 21 nt, RNAi
ggucggagaccaugagaaauu

SEQ ID NO: 37914 - RNA, 21 nt, RNAi
uuccagccucugguacucuuu

SEQ ID NO: 37915 - DNA, 21 bp, homo sapiens
catgagaaacagcgtcaaatc

SEQ ID NO: 37916 - RNA, 21 nt, RNAi
ugagaaacagcgucaaaucuu

SEQ ID NO: 37917 - RNA, 21 nt, RNAi
uuacucuuugucgcaguuuag

SEQ ID NO: 37918 - DNA, 21 bp, homo sapiens
cacaaccgagcacattggtga

SEQ ID NO: 37919 - RNA, 21 nt, RNAi
caaccgagcacauuggugauu

SEQ ID NO: 37920 - RNA, 21 nt, RNAi
uuguuggcucguguaaccacu

SEQ ID NO: 37921 - DNA, 21 bp, homo sapiens
caaccgagcacattggtgaca

SEQ ID NO: 37922 - RNA, 21 nt, RNAi
accgagcacauuggugacauu

SEQ ID NO: 37923 - RNA, 21 nt, RNAi
uuuggcucguguaaccacugu

SEQ ID NO: 37924 - DNA, 21 bp, homo sapiens
cacattggtgacagaccttcg

SEQ ID NO: 37925 - RNA, 21 nt, RNAi
cauuggugacagaccuucguu

SEQ ID NO: 37926 - RNA, 21 nt, RNAi
uuguaaccacugucuggaagc

SEQ ID NO: 37927 - DNA, 21 bp, homo sapiens
cagagcaggagcatcctctgc

SEQ ID NO: 37928 - RNA, 21 nt, RNAi
gagcaggagcauccucugcuu

SEQ ID NO: 37929 - RNA, 21 nt, RNAi
uucucguccucguaggagacg

SEQ ID NO: 37930 - DNA, 21 bp, homo sapiens
caggagcatcctctgctggtt

SEQ ID NO: 37931 - RNA, 21 nt, RNAi
ggagcauccucugcugguuuu

SEQ ID NO: 37932 - RNA, 21 nt, RNAi
uuccucguaggagacgaccaa

SEQ ID NO: 37933 - DNA, 21 bp, homo sapiens
catcctctgctggttcctgac

SEQ ID NO: 37934 - RNA, 21 nt, RNAi
uccucugcugguuccugacuu

SEQ ID NO: 37935 - RNA, 21 nt, RNAi
uuaggagacgaccaaggacug

SEQ ID NO: 37936 - DNA, 21 bp, homo sapiens
caaaggaccagcgtcctcgtt

SEQ ID NO: 37937 - RNA, 21 nt, RNAi
aaggaccagcguccucguuuu

SEQ ID NO: 37938 - RNA, 21 nt, RNAi
uuuuccuggucgcaggagcaa

SEQ ID NO: 37939 - DNA, 21 bp, homo sapiens
cattccaagaaaggttaagga

SEQ ID NO: 37940 - RNA, 21 nt, RNAi
uuccaagaaagguuaaggauu

SEQ ID NO: 37941 - RNA, 21 nt, RNAi
uuaagguucuuuccaauuccu

SEQ ID NO: 37942 - DNA, 21 bp, homo sapiens
caagaaaggttaaggagttcc

SEQ ID NO: 37943 - RNA, 21 nt, RNAi
agaaagguuaaggaguuccuu

SEQ ID NO: 37944 - RNA, 21 nt, RNAi
uuucuuuccaauuccucaagg

SEQ ID NO: 37945 - DNA, 21 bp, homo sapiens
caaccatcttcactggcttcc

SEQ ID NO: 37946 - RNA, 21 nt, RNAi
accaucuucacuggcuuccuu

SEQ ID NO: 37947 - RNA, 21 nt, RNAi
uuugguagaagugaccgaagg

SEQ ID NO: 37948 - DNA, 21 bp, homo sapiens
catcttcactggcttccatca

SEQ ID NO: 37949 - RNA, 21 nt, RNAi
ucuucacuggcuuccaucauu

SEQ ID NO: 37950 - RNA, 21 nt, RNAi
uuagaagugaccgaagguagu

SEQ ID NO: 37951 - DNA, 21 bp, homo sapiens
cactggcttccatcagtggta

SEQ ID NO: 37952 - RNA, 21 nt, RNAi
cuggcuuccaucagugguauu

SEQ ID NO: 37953 - RNA, 21 nt, RNAi
uugaccgaagguagucaccau

SEQ ID NO: 37954 - DNA, 21 bp, homo sapiens
catcagtggtaactgctttgg

SEQ ID NO: 37955 - RNA, 21 nt, RNAi
ucagugguaacugcuuugguu

SEQ ID NO: 37956 - RNA, 21 nt, RNAi
uuagucaccauugacgaaacc

SEQ ID NO: 37957 - DNA, 21 bp, homo sapiens
cagtggtaactgctttggtct

SEQ ID NO: 37958 - RNA, 21 nt, RNAi
gugguaacugcuuuggucuuu

SEQ ID NO: 37959 - RNA, 21 nt, RNAi
uucaccauugacgaaaccaga

SEQ ID NO: 37960 - DNA, 21 bp, homo sapiens
caatggacctctcagcagaaa

SEQ ID NO: 37961 - RNA, 21 nt, RNAi
auggaccucucagcagaaauu

SEQ ID NO: 37962 - RNA, 21 nt, RNAi
uuuaccuggagagucgucuuu

SEQ ID NO: 37963 - DNA, 21 bp, homo sapiens
cagcagaaacacacagtcaca

SEQ ID NO: 37964 - RNA, 21 nt, RNAi
gcagaaacacacagucacauu

SEQ ID NO: 37965 - RNA, 21 nt, RNAi
uucgucuuugugugucagugu

SEQ ID NO: 37966 - DNA, 21 bp, homo sapiens
cagaaacacacagtcacattc

SEQ ID NO: 37967 - RNA, 21 nt, RNAi
gaaacacacagucacauucuu

SEQ ID NO: 37968 - RNA, 21 nt, RNAi
uucuuugugugucaguguaag

SEQ ID NO: 37969 - DNA, 21 bp, homo sapiens
cacacagtcacattcgaattc

SEQ ID NO: 37970 - RNA, 21 nt, RNAi
cacagucacauucgaauucuu

SEQ ID NO: 37971 - RNA, 21 nt, RNAi
uugugucaguguaagcuuaag

SEQ ID NO: 37972 - DNA, 21 bp, homo sapiens
cacagtcacattcgaattcgg

SEQ ID NO: 37973 - RNA, 21 nt, RNAi
cagucacauucgaauucgguu

SEQ ID NO: 37974 - RNA, 21 nt, RNAi
uugucaguguaagcuuaagcc

SEQ ID NO: 37975 - DNA, 21 bp, homo sapiens
catcctccggagagagagaga

SEQ ID NO: 37976 - RNA, 21 nt, RNAi
uccuccggagagagagagauu

SEQ ID NO: 37977 - RNA, 21 nt, RNAi
uuaggaggccucucucucucu

SEQ ID NO: 37978 - DNA, 21 bp, homo sapiens
caggcgcctggcacatttcag

SEQ ID NO: 37979 - RNA, 21 nt, RNAi
ggcgccuggcacauuucaguu

SEQ ID NO: 37980 - RNA, 21 nt, RNAi
uuccgcggaccguguaaaguc

SEQ ID NO: 37981 - DNA, 21 bp, homo sapiens
gaaggatcgctttgagatctg

SEQ ID NO: 37982 - RNA, 21 nt, RNAi
aggaucgcuuugagaucuguu

SEQ ID NO: 37983 - RNA, 21 nt, RNAi
uuuccuagcgaaacucuagac

SEQ ID NO: 37984 - DNA, 21 bp, homo sapiens
gatcgctttgagatctgagga

SEQ ID NO: 37985 - RNA, 21 nt, RNAi
ucgcuuugagaucugaggauu

SEQ ID NO: 37986 - RNA, 21 nt, RNAi
uuagcgaaacucuagacuccu

SEQ ID NO: 37987 - DNA, 21 bp, homo sapiens
gaatggattatttgctcatga

SEQ ID NO: 37988 - RNA, 21 nt, RNAi
auggauuauuugcucaugauu

SEQ ID NO: 37989 - RNA, 21 nt, RNAi
uuuaccuaauaaacgaguacu

SEQ ID NO: 37990 - DNA, 21 bp, homo sapiens
gagctccagaaacagcagtct

SEQ ID NO: 37991 - RNA, 21 nt, RNAi
gcuccagaaacagcagucuuu

SEQ ID NO: 37992 - RNA, 21 nt, RNAi
uucgaggucuuugucgucaga

SEQ ID NO: 37993 - DNA, 21 bp, homo sapiens
gaaacagcagtcttaggcgct

SEQ ID NO: 37994 - RNA, 21 nt, RNAi
aacagcagucuuaggcgcuuu

SEQ ID NO: 37995 - RNA, 21 nt, RNAi
uuuugucgucagaauccgcga

SEQ ID NO: 37996 - DNA, 21 bp, homo sapiens
gatggataaagagtgtgtcta

SEQ ID NO: 37997 - RNA, 21 nt, RNAi
uggauaaagagugugucuauu

SEQ ID NO: 37998 - RNA, 21 nt, RNAi
uuaccuauuucucacacagau

SEQ ID NO: 37999 - DNA, 21 bp, homo sapiens
gataaagagtgtgtctacttc

SEQ ID NO: 38000 - RNA, 21 nt, RNAi
uaaagagugugucuacuucuu

SEQ ID NO: 38001 - RNA, 21 nt, RNAi
uuauuucucacacagaugaag

SEQ ID NO: 38002 - DNA, 21 bp, homo sapiens
gagtgtgtctacttctgccac

SEQ ID NO: 38003 - RNA, 21 nt, RNAi
gugugucuacuucugccacuu

SEQ ID NO: 38004 - RNA, 21 nt, RNAi
uucacacagaugaagacggug

SEQ ID NO: 38005 - DNA, 21 bp, homo sapiens
gagcacgttgttccgtatgga

SEQ ID NO: 38006 - RNA, 21 nt, RNAi
gcacguuguuccguauggauu

SEQ ID NO: 38007 - RNA, 21 nt, RNAi
uucgugcaacaaggcauaccu

SEQ ID NO: 38008 - DNA, 21 bp, homo sapiens
gagagccttggagaatttact

SEQ ID NO: 38009 - RNA, 21 nt, RNAi
gagccuuggagaauuuacuuu

SEQ ID NO: 38010 - RNA, 21 nt, RNAi
uucucggaaccucuuaaauga

SEQ ID NO: 38011 - DNA, 21 bp, homo sapiens
gagccttggagaatttacttc

SEQ ID NO: 38012 - RNA, 21 nt, RNAi
gccuuggagaauuuacuucuu

SEQ ID NO: 38013 - RNA, 21 nt, RNAi
uucggaaccucuuaaaugaag

SEQ ID NO: 38014 - DNA, 21 bp, homo sapiens
gaccgtgagaatagatgccaa

SEQ ID NO: 38015 - RNA, 21 nt, RNAi
ccgugagaauagaugccaauu

SEQ ID NO: 38016 - RNA, 21 nt, RNAi
uuggcacucuuaucuacgguu

SEQ ID NO: 38017 - DNA, 21 bp, homo sapiens
gagaatagatgccaatgtgct

SEQ ID NO: 38018 - RNA, 21 nt, RNAi
gaauagaugccaaugugcuuu

SEQ ID NO: 38019 - RNA, 21 nt, RNAi
uucuuaucuacgguuacacga

SEQ ID NO: 38020 - DNA, 21 bp, homo sapiens
gaatagatgccaatgtgctag

SEQ ID NO: 38021 - RNA, 21 nt, RNAi
auagaugccaaugugcuaguu

SEQ ID NO: 38022 - RNA, 21 nt, RNAi
uuuaucuacgguuacacgauc

SEQ ID NO: 38023 - DNA, 21 bp, homo sapiens
gatgccaatgtgctagccaaa

SEQ ID NO: 38024 - RNA, 21 nt, RNAi
ugccaaugugcuagccaaauu

SEQ ID NO: 38025 - RNA, 21 nt, RNAi
uuacgguuacacgaucgguuu

SEQ ID NO: 38026 - DNA, 21 bp, homo sapiens
gaagacattatggagaaagac

SEQ ID NO: 38027 - RNA, 21 nt, RNAi
agacauuauggagaaagacuu

SEQ ID NO: 38028 - RNA, 21 nt, RNAi
uuucuguaauaccucuuucug

SEQ ID NO: 38029 - DNA, 21 bp, homo sapiens
gacattatggagaaagactgg

SEQ ID NO: 38030 - RNA, 21 nt, RNAi
cauuauggagaaagacugguu

SEQ ID NO: 38031 - RNA, 21 nt, RNAi
uuguaauaccucuuucugacc

SEQ ID NO: 38032 - DNA, 21 bp, homo sapiens
gagaaagactggaataatcat

SEQ ID NO: 38033 - RNA, 21 nt, RNAi
gaaagacuggaauaaucauuu

SEQ ID NO: 38034 - RNA, 21 nt, RNAi
uucuuucugaccuuauuagua

SEQ ID NO: 38035 - DNA, 21 bp, homo sapiens
gaagaagttcagaggaacacc

SEQ ID NO: 38036 - RNA, 21 nt, RNAi
agaaguucagaggaacaccuu

SEQ ID NO: 38037 - RNA, 21 nt, RNAi
uuucuucaagucuccuugugg

SEQ ID NO: 38038 - DNA, 21 bp, homo sapiens
gaagttcagaggaacacctaa

SEQ ID NO: 38039 - RNA, 21 nt, RNAi
aguucagaggaacaccuaauu

SEQ ID NO: 38040 - RNA, 21 nt, RNAi
uuucaagucuccuuguggauu

SEQ ID NO: 38041 - DNA, 21 bp, homo sapiens
gaggaacacctaagacaaacc

SEQ ID NO: 38042 - RNA, 21 nt, RNAi
ggaacaccuaagacaaaccuu

SEQ ID NO: 38043 - RNA, 21 nt, RNAi
uuccuuguggauucuguuugg

SEQ ID NO: 38044 - DNA, 21 bp, homo sapiens
gaacacctaagacaaaccagg

SEQ ID NO: 38045 - RNA, 21 nt, RNAi
acaccuaagacaaaccagguu

SEQ ID NO: 38046 - RNA, 21 nt, RNAi
uuuguggauucuguuuggucc

SEQ ID NO: 38047 - DNA, 21 bp, homo sapiens
gacaaaccaggtcggagacca

SEQ ID NO: 38048 - RNA, 21 nt, RNAi
caaaccaggucggagaccauu

SEQ ID NO: 38049 - RNA, 21 nt, RNAi
uuguuugguccagccucuggu

SEQ ID NO: 38050 - DNA, 21 bp, homo sapiens
gagaccatgagaaacagcgtc

SEQ ID NO: 38051 - RNA, 21 nt, RNAi
gaccaugagaaacagcgucuu

SEQ ID NO: 38052 - RNA, 21 nt, RNAi
uucugguacucuuugucgcag

SEQ ID NO: 38053 - DNA, 21 bp, homo sapiens
gaccatgagaaacagcgtcaa

SEQ ID NO: 38054 - RNA, 21 nt, RNAi
ccaugagaaacagcgucaauu

SEQ ID NO: 38055 - RNA, 21 nt, RNAi
uugguacucuuugucgcaguu

SEQ ID NO: 38056 - DNA, 21 bp, homo sapiens
gagaaacagcgtcaaatcatc

SEQ ID NO: 38057 - RNA, 21 nt, RNAi
gaaacagcgucaaaucaucuu

SEQ ID NO: 38058 - RNA, 21 nt, RNAi
uucuuugucgcaguuuaguag

SEQ ID NO: 38059 - DNA, 21 bp, homo sapiens
gaaacagcgtcaaatcatctt

SEQ ID NO: 38060 - RNA, 21 nt, RNAi
aacagcgucaaaucaucuuuu

SEQ ID NO: 38061 - RNA, 21 nt, RNAi
uuuugucgcaguuuaguagaa

SEQ ID NO: 38062 - DNA, 21 bp, homo sapiens
gagcacattggtgacagacct

SEQ ID NO: 38063 - RNA, 21 nt, RNAi
gcacauuggugacagaccuuu

SEQ ID NO: 38064 - RNA, 21 nt, RNAi
uucguguaaccacugucugga

SEQ ID NO: 38065 - DNA, 21 bp, homo sapiens
gaagccatagcctccacggag

SEQ ID NO: 38066 - RNA, 21 nt, RNAi
agccauagccuccacggaguu

SEQ ID NO: 38067 - RNA, 21 nt, RNAi
uuucgguaucggaggugccuc

SEQ ID NO: 38068 - DNA, 21 bp, homo sapiens
gatcagagcaggagcatcctc

SEQ ID NO: 38069 - RNA, 21 nt, RNAi
ucagagcaggagcauccucuu

SEQ ID NO: 38070 - RNA, 21 nt, RNAi
uuagucucguccucguaggag

SEQ ID NO: 38071 - DNA, 21 bp, homo sapiens
gagcaggagcatcctctgctg

SEQ ID NO: 38072 - RNA, 21 nt, RNAi
gcaggagcauccucugcuguu

SEQ ID NO: 38073 - RNA, 21 nt, RNAi
uucguccucguaggagacgac

SEQ ID NO: 38074 - DNA, 21 bp, homo sapiens
gagcatcctctgctggttcct

SEQ ID NO: 38075 - RNA, 21 nt, RNAi
gcauccucugcugguuccuuu

SEQ ID NO: 38076 - RNA, 21 nt, RNAi
uucguaggagacgaccaagga

SEQ ID NO: 38077 - DNA, 21 bp, homo sapiens
gactggcaaaggaccagcgtc

SEQ ID NO: 38078 - RNA, 21 nt, RNAi
cuggcaaaggaccagcgucuu

SEQ ID NO: 38079 - RNA, 21 nt, RNAi
uugaccguuuccuggucgcag

SEQ ID NO: 38080 - DNA, 21 bp, homo sapiens
gatgacaatggacctctcagc

SEQ ID NO: 38081 - RNA, 21 nt, RNAi
ugacaauggaccucucagcuu

SEQ ID NO: 38082 - RNA, 21 nt, RNAi
uuacuguuaccuggagagucg

SEQ ID NO: 38083 - DNA, 21 bp, homo sapiens
gacaatggacctctcagcaga

SEQ ID NO: 38084 - RNA, 21 nt, RNAi
caauggaccucucagcagauu

SEQ ID NO: 38085 - RNA, 21 nt, RNAi
uuguuaccuggagagucgucu

SEQ ID NO: 38086 - DNA, 21 bp, homo sapiens
gacctctcagcagaaacacac

SEQ ID NO: 38087 - RNA, 21 nt, RNAi
ccucucagcagaaacacacuu

SEQ ID NO: 38088 - RNA, 21 nt, RNAi
uuggagagucgucuuugugug

SEQ ID NO: 38089 - DNA, 21 bp, homo sapiens
gaaacacacagtcacattcga

SEQ ID NO: 38090 - RNA, 21 nt, RNAi
aacacacagucacauucgauu

SEQ ID NO: 38091 - RNA, 21 nt, RNAi
uuuugugugucaguguaagcu

SEQ ID NO: 38092 - DNA, 21 bp, homo sapiens
gagagagagagaggaaggaga

SEQ ID NO: 38093 - RNA, 21 nt, RNAi
gagagagagaggaaggagauu

SEQ ID NO: 38094 - RNA, 21 nt, RNAi
uucucucucucuccuuccucu

SEQ ID NO: 38095 - DNA, 21 bp, homo sapiens
gagagagagaggaaggagatt

SEQ ID NO: 38096 - RNA, 21 nt, RNAi
gagagagaggaaggagauuuu

SEQ ID NO: 38097 - RNA, 21 nt, RNAi
uucucucucuccuuccucuaa

SEQ ID NO: 38098 - DNA, 21 bp, homo sapiens
gagagagaggaaggagattcc

SEQ ID NO: 38099 - RNA, 21 nt, RNAi
gagagaggaaggagauuccuu

SEQ ID NO: 38100 - RNA, 21 nt, RNAi
uucucucuccuuccucuaagg

SEQ ID NO: 38101 - DNA, 21 bp, homo sapiens
gagagaggaaggagattccac

SEQ ID NO: 38102 - RNA, 21 nt, RNAi
gagaggaaggagauuccacuu

SEQ ID NO: 38103 - RNA, 21 nt, RNAi
uucucuccuuccucuaaggug

SEQ ID NO: 38104 - DNA, 21 bp, homo sapiens
gagaggaaggagattccacac

SEQ ID NO: 38105 - RNA, 21 nt, RNAi
gaggaaggagauuccacacuu

SEQ ID NO: 38106 - RNA, 21 nt, RNAi
uucuccuuccucuaaggugug

SEQ ID NO: 38107 - DNA, 21 bp, homo sapiens
gaggaaggagattccacacag

SEQ ID NO: 38108 - RNA, 21 nt, RNAi
ggaaggagauuccacacaguu

SEQ ID NO: 38109 - RNA, 21 nt, RNAi
uuccuuccucuaagguguguc

SEQ ID NO: 38110 - DNA, 21 bp, homo sapiens
gagtttctgacgaaggtccta

SEQ ID NO: 38111 - RNA, 21 nt, RNAi
guuucugacgaagguccuauu

SEQ ID NO: 38112 - RNA, 21 nt, RNAi
uucaaagacugcuuccaggau

SEQ ID NO: 38113 - DNA, 21 bp, homo sapiens
gagtgtttgtgtctgactcag

SEQ ID NO: 38114 - RNA, 21 nt, RNAi
guguuugugucugacucaguu

SEQ ID NO: 38115 - RNA, 21 nt, RNAi
uucacaaacacagacugaguc

SEQ ID NO: 38116 - DNA, 21 bp, homo sapiens
gactcaggcgcctggcacatt

SEQ ID NO: 38117 - RNA, 21 nt, RNAi
cucaggcgccuggcacauuuu

SEQ ID NO: 38118 - RNA, 21 nt, RNAi
uugaguccgcggaccguguaa

SEQ ID NO: 38119 - DNA, 21 bp, homo sapiens
gagaaactccaaagtccacac

SEQ ID NO: 38120 - RNA, 21 nt, RNAi
gaaacuccaaaguccacacuu

SEQ ID NO: 38121 - RNA, 21 nt, RNAi
uucuuugagguuucaggugug

SEQ ID NO: 38122 - DNA, 21 bp, homo sapiens
gaaactccaaagtccacacaa

SEQ ID NO: 38123 - RNA, 21 nt, RNAi
aacuccaaaguccacacaauu

SEQ ID NO: 38124 - RNA, 21 nt, RNAi
uuuugagguuucagguguguu

SEQ ID NO: 38125 - DNA, 21 bp, homo sapiens
gacaaacatgcaagtaaagaa

SEQ ID NO: 38126 - RNA, 21 nt, RNAi
caaacaugcaaguaaagaauu

SEQ ID NO: 38127 - RNA, 21 nt, RNAi
uuguuuguacguucauuucuu

SEQ ID NO: 38128 - DNA, 21 bp, homo sapiens
taaagagtgtgtctacttctg

SEQ ID NO: 38129 - RNA, 21 nt, RNAi
aagagugugucuacuucuguu

SEQ ID NO: 38130 - RNA, 21 nt, RNAi
uuuucucacacagaugaagac

SEQ ID NO: 38131 - DNA, 21 bp, homo sapiens
tacttctgccacctggacatc

SEQ ID NO: 38132 - RNA, 21 nt, RNAi
cuucugccaccuggacaucuu

SEQ ID NO: 38133 - RNA, 21 nt, RNAi
uugaagacgguggaccuguag

SEQ ID NO: 38134 - DNA, 21 bp, homo sapiens
taggtccaagagagccttgga

SEQ ID NO: 38135 - RNA, 21 nt, RNAi
gguccaagagagccuuggauu

SEQ ID NO: 38136 - RNA, 21 nt, RNAi
uuccagguucucucggaaccu

SEQ ID NO: 38137 - DNA, 21 bp, homo sapiens
tagatgccaatgtgctagcca

SEQ ID NO: 38138 - RNA, 21 nt, RNAi
gaugccaaugugcuagccauu

SEQ ID NO: 38139 - RNA, 21 nt, RNAi
uucuacgguuacacgaucggu

SEQ ID NO: 38140 - DNA, 21 bp, homo sapiens
tatggagaaagactggaataa

SEQ ID NO: 38141 - RNA, 21 nt, RNAi
uggagaaagacuggaauaauu

SEQ ID NO: 38142 - RNA, 21 nt, RNAi
uuaccucuuucugaccuuauu

SEQ ID NO: 38143 - DNA, 21 bp, homo sapiens
tatttatcagcagttagtgag

SEQ ID NO: 38144 - RNA, 21 nt, RNAi
uuuaucagcaguuagugaguu

SEQ ID NO: 38145 - RNA, 21 nt, RNAi
uuaaauagucgucaaucacuc

SEQ ID NO: 38146 - DNA, 21 bp, homo sapiens
tatcagcagttagtgagagga

SEQ ID NO: 38147 - RNA, 21 nt, RNAi
ucagcaguuagugagaggauu

SEQ ID NO: 38148 - RNA, 21 nt, RNAi
uuagucgucaaucacucuccu

SEQ ID NO: 38149 - DNA, 21 bp, homo sapiens
taagacaaaccaggtcggaga

SEQ ID NO: 38150 - RNA, 21 nt, RNAi
agacaaaccaggucggagauu

SEQ ID NO: 38151 - RNA, 21 nt, RNAi
uuucuguuugguccagccucu

SEQ ID NO: 38152 - DNA, 21 bp, homo sapiens
taactgctttggtctcttctt

SEQ ID NO: 38153 - RNA, 21 nt, RNAi
acugcuuuggucucuucuuuu

SEQ ID NO: 38154 - RNA, 21 nt, RNAi
uuugacgaaaccagagaagaa

SEQ ID NO: 38155 - DNA, 21 bp, homo sapiens
aaagagtgtgtctacttctgc

SEQ ID NO: 38156 - RNA, 21 nt, RNAi
agagugugucuacuucugcuu

SEQ ID NO: 38157 - RNA, 21 nt, RNAi
uuucucacacagaugaagacg

SEQ ID NO: 38158 - DNA, 21 bp, homo sapiens
aaggcaacagaccgtgagaat

SEQ ID NO: 38159 - RNA, 21 nt, RNAi
ggcaacagaccgugagaauuu

SEQ ID NO: 38160 - RNA, 21 nt, RNAi
uuccguugucuggcacucuua

SEQ ID NO: 38161 - DNA, 21 bp, homo sapiens
aacagaccgtgagaatagatg

SEQ ID NO: 38162 - RNA, 21 nt, RNAi
cagaccgugagaauagauguu

SEQ ID NO: 38163 - RNA, 21 nt, RNAi
uugucuggcacucuuaucuac

SEQ ID NO: 38164 - DNA, 21 bp, homo sapiens
aatagatgccaatgtgctagc

SEQ ID NO: 38165 - RNA, 21 nt, RNAi
uagaugccaaugugcuagcuu

SEQ ID NO: 38166 - RNA, 21 nt, RNAi
uuaucuacgguuacacgaucg

SEQ ID NO: 38167 - DNA, 21 bp, homo sapiens
aagttcagaggaacacctaag

SEQ ID NO: 38168 - RNA, 21 nt, RNAi
guucagaggaacaccuaaguu

SEQ ID NO: 38169 - RNA, 21 nt, RNAi
uucaagucuccuuguggauuc

SEQ ID NO: 38170 - DNA, 21 bp, homo sapiens
aacacctaagacaaaccaggt

SEQ ID NO: 38171 - RNA, 21 nt, RNAi
caccuaagacaaaccagguuu

SEQ ID NO: 38172 - RNA, 21 nt, RNAi
uuguggauucuguuuggucca

SEQ ID NO: 38173 - DNA, 21 bp, homo sapiens
cacgttgttccgtatggactt

SEQ ID NO: 38174 - RNA, 21 nt, RNAi
cguuguuccguauggacuuuu

SEQ ID NO: 38175 - RNA, 21 nt, RNAi
uugcaacaaggcauaccugaa

SEQ ID NO: 38176 - DNA, 21 bp, homo sapiens
caacagaccgtgagaatagat

SEQ ID NO: 38177 - RNA, 21 nt, RNAi
acagaccgugagaauagauuu

SEQ ID NO: 38178 - RNA, 21 nt, RNAi
uuugucuggcacucuuaucua

SEQ ID NO: 38179 - DNA, 21 bp, homo sapiens
cagaccgtgagaatagatgcc

SEQ ID NO: 38180 - RNA, 21 nt, RNAi
gaccgugagaauagaugccuu

SEQ ID NO: 38181 - RNA, 21 nt, RNAi
uucuggcacucuuaucuacgg

SEQ ID NO: 38182 - DNA, 21 bp, homo sapiens
cagcagttagtgagaggaaga

SEQ ID NO: 38183 - RNA, 21 nt, RNAi
gcaguuagugagaggaagauu

SEQ ID NO: 38184 - RNA, 21 nt, RNAi
uucgucaaucacucuccuucu

SEQ ID NO: 38185 - DNA, 21 bp, homo sapiens
gataaagagtgtgtctacttc

SEQ ID NO: 38186 - RNA, 21 nt, RNAi
uaaagagugugucuacuucuu

SEQ ID NO: 38187 - RNA, 21 nt, RNAi
uuauuucucacacagaugaag

SEQ ID NO: 38188 - DNA, 21 bp, homo sapiens
gagcacgttgttccgtatgga

SEQ ID NO: 38189 - RNA, 21 nt, RNAi
gcacguuguuccguauggauu

SEQ ID NO: 38190 - RNA, 21 nt, RNAi
uucgugcaacaaggcauaccu

SEQ ID NO: 38191 - DNA, 21 bp, homo sapiens
gaccgtgagaatagatgccaa

SEQ ID NO: 38192 - RNA, 21 nt, RNAi
ccgugagaauagaugccaauu

SEQ ID NO: 38193 - RNA, 21 nt, RNAi
uuggcacucuuaucuacgguu

SEQ ID NO: 38194 - DNA, 21 bp, homo sapiens
gaatagatgccaatgtgctag

SEQ ID NO: 38195 - RNA, 21 nt, RNAi
auagaugccaaugugcuaguu

SEQ ID NO: 38196 - RNA, 21 nt, RNAi
uuuaucuacgguuacacgauc

SEQ ID NO: 38197 - DNA, 21 bp, homo sapiens
gaagttcagaggaacacctaa

SEQ ID NO: 38198 - RNA, 21 nt, RNAi
aguucagaggaacaccuaauu

SEQ ID NO: 38199 - RNA, 21 nt, RNAi
uuucaagucuccuuguggauu

SEQ ID NO: 38200 - DNA, 21 bp, homo sapiens
gaacacctaagacaaaccagg

SEQ ID NO: 38201 - RNA, 21 nt, RNAi
acaccuaagacaaaccagguu

SEQ ID NO: 38202 - RNA, 21 nt, RNAi
uuuguggauucuguuuggucc

SEQ ID NO: 38203 - DNA, 21 bp, homo sapiens
taaagagtgtgtctacttctg

SEQ ID NO: 38204 - RNA, 21 nt, RNAi
aagagugugucuacuucuguu

SEQ ID NO: 38205 - RNA, 21 nt, RNAi
uuuucucacacagaugaagac

SEQ ID NO: 38206 - DNA, 21 bp, homo sapiens
tatggagaaagactggaataa

SEQ ID NO: 38207 - RNA, 21 nt, RNAi
uggagaaagacuggaauaauu

SEQ ID NO: 38208 - RNA, 21 nt, RNAi
uuaccucuuucugaccuuauu

SEQ ID NO: 38209 - DNA, 21 bp, homo sapiens
aacatagaactgaagagacct

SEQ ID NO: 38210 - RNA, 21 nt, RNAi
cauagaacugaagagaccuuu

SEQ ID NO: 38211 - RNA, 21 nt, RNAi
uuguaucuugacuucucugga

SEQ ID NO: 38212 - DNA, 21 bp, homo sapiens
aactgaagagacctctgatta

SEQ ID NO: 38213 - RNA, 21 nt, RNAi
cugaagagaccucugauuauu

SEQ ID NO: 38214 - RNA, 21 nt, RNAi
uugacuucucuggagacuaau

SEQ ID NO: 38215 - DNA, 21 bp, homo sapiens
aagagacctctgattaaggcc

SEQ ID NO: 38216 - RNA, 21 nt, RNAi
gagaccucugauuaaggccuu

SEQ ID NO: 38217 - RNA, 21 nt, RNAi
uucucuggagacuaauuccgg

SEQ ID NO: 38218 - DNA, 21 bp, homo sapiens
aagcagactcaagaggaggcc

SEQ ID NO: 38219 - RNA, 21 nt, RNAi
gcagacucaagaggaggccuu

SEQ ID NO: 38220 - RNA, 21 nt, RNAi
uucgucugaguucuccuccgg

SEQ ID NO: 38221 - DNA, 21 bp, homo sapiens
aagaggaggcctgaccagatg

SEQ ID NO: 38222 - RNA, 21 nt, RNAi
gaggaggccugaccagauguu

SEQ ID NO: 38223 - RNA, 21 nt, RNAi
uucuccuccggacuggucuac

SEQ ID NO: 38224 - DNA, 21 bp, homo sapiens
aagatggcctggagcctgaga

SEQ ID NO: 38225 - RNA, 21 nt, RNAi
gauggccuggagccugagauu

SEQ ID NO: 38226 - RNA, 21 nt, RNAi
uucuaccggaccucggacucu

SEQ ID NO: 38227 - DNA, 21 bp, homo sapiens
aagaaacggacaagaggcctg

SEQ ID NO: 38228 - RNA, 21 nt, RNAi
gaaacggacaagaggccuguu

SEQ ID NO: 38229 - RNA, 21 nt, RNAi
uucuuugccuguucuccggac

SEQ ID NO: 38230 - DNA, 21 bp, homo sapiens
aaggccagaccacagctcaaa

SEQ ID NO: 38231 - RNA, 21 nt, RNAi
ggccagaccacagcucaaauu

SEQ ID NO: 38232 - RNA, 21 nt, RNAi
uuccggucuggugucgaguuu

SEQ ID NO: 38233 - DNA, 21 bp, homo sapiens
aaagtttccaagaagacagga

SEQ ID NO: 38234 - RNA, 21 nt, RNAi
aguuuccaagaagacaggauu

SEQ ID NO: 38235 - RNA, 21 nt, RNAi
uuucaaagguucuucuguccu

SEQ ID NO: 38236 - DNA, 21 bp, homo sapiens
aagtttccaagaagacaggac

SEQ ID NO: 38237 - RNA, 21 nt, RNAi
guuuccaagaagacaggacuu

SEQ ID NO: 38238 - RNA, 21 nt, RNAi
uucaaagguucuucuguccug

SEQ ID NO: 38239 - DNA, 21 bp, homo sapiens
aagaaccagaagccagttcct

SEQ ID NO: 38240 - RNA, 21 nt, RNAi
gaaccagaagccaguuccuuu

SEQ ID NO: 38241 - RNA, 21 nt, RNAi
uucuuggucuucggucaagga

SEQ ID NO: 38242 - DNA, 21 bp, homo sapiens
aaccagaagccagttcctgct

SEQ ID NO: 38243 - RNA, 21 nt, RNAi
ccagaagccaguuccugcuuu

SEQ ID NO: 38244 - RNA, 21 nt, RNAi
uuggucuucggucaaggacga

SEQ ID NO: 38245 - DNA, 21 bp, homo sapiens
aagccagttcctgctgttcct

SEQ ID NO: 38246 - RNA, 21 nt, RNAi
gccaguuccugcuguuccuuu

SEQ ID NO: 38247 - RNA, 21 nt, RNAi
uucggucaaggacgacaagga

SEQ ID NO: 38248 - DNA, 21 bp, homo sapiens
aagtctggcacatcaggtgtt

SEQ ID NO: 38249 - RNA, 21 nt, RNAi
gucuggcacaucagguguuuu

SEQ ID NO: 38250 - RNA, 21 nt, RNAi
uucagaccguguaguccacaa

SEQ ID NO: 38251 - DNA, 21 bp, homo sapiens
aaacggtgccgtgagaggact

SEQ ID NO: 38252 - RNA, 21 nt, RNAi
acggugccgugagaggacuuu

SEQ ID NO: 38253 - RNA, 21 nt, RNAi
uuugccacggcacucuccuga

SEQ ID NO: 38254 - DNA, 21 bp, homo sapiens
aacggtgccgtgagaggactc

SEQ ID NO: 38255 - RNA, 21 nt, RNAi
cggugccgugagaggacucuu

SEQ ID NO: 38256 - RNA, 21 nt, RNAi
uugccacggcacucuccugag

SEQ ID NO: 38257 - DNA, 21 bp, homo sapiens
aaacgttggaccaagagaacc

SEQ ID NO: 38258 - RNA, 21 nt, RNAi
acguuggaccaagagaaccuu

SEQ ID NO: 38259 - RNA, 21 nt, RNAi
uuugcaaccugguucucuugg

SEQ ID NO: 38260 - DNA, 21 bp, homo sapiens
aacgttggaccaagagaacca

SEQ ID NO: 38261 - RNA, 21 nt, RNAi
cguuggaccaagagaaccauu

SEQ ID NO: 38262 - RNA, 21 nt, RNAi
uugcaaccugguucucuuggu

SEQ ID NO: 38263 - DNA, 21 bp, homo sapiens
aagagaaccagcagcttcagg

SEQ ID NO: 38264 - RNA, 21 nt, RNAi
gagaaccagcagcuucagguu

SEQ ID NO: 38265 - RNA, 21 nt, RNAi
uucucuuggucgucgaagucc

SEQ ID NO: 38266 - DNA, 21 bp, homo sapiens
aaccagcagcttcaggaccag

SEQ ID NO: 38267 - RNA, 21 nt, RNAi
ccagcagcuucaggaccaguu

SEQ ID NO: 38268 - RNA, 21 nt, RNAi
uuggucgucgaaguccugguc

SEQ ID NO: 38269 - DNA, 21 bp, homo sapiens
aacaggagctgaagaacttgc

SEQ ID NO: 38270 - RNA, 21 nt, RNAi
caggagcugaagaacuugcuu

SEQ ID NO: 38271 - RNA, 21 nt, RNAi
uuguccucgacuucuugaacg

SEQ ID NO: 38272 - DNA, 21 bp, homo sapiens
aagaacttgcgtgcttgtgtc

SEQ ID NO: 38273 - RNA, 21 nt, RNAi
gaacuugcgugcuugugucuu

SEQ ID NO: 38274 - RNA, 21 nt, RNAi
uucuugaacgcacgaacacag

SEQ ID NO: 38275 - DNA, 21 bp, homo sapiens
aacttgcgtgcttgtgtcctg

SEQ ID NO: 38276 - RNA, 21 nt, RNAi
cuugcgugcuuguguccuguu

SEQ ID NO: 38277 - RNA, 21 nt, RNAi
uugaacgcacgaacacaggac

SEQ ID NO: 38278 - DNA, 21 bp, homo sapiens
aaacaggtggaattgcaggaa

SEQ ID NO: 38279 - RNA, 21 nt, RNAi
acagguggaauugcaggaauu

SEQ ID NO: 38280 - RNA, 21 nt, RNAi
uuuguccaccuuaacguccuu

SEQ ID NO: 38281 - DNA, 21 bp, homo sapiens
aacaggtggaattgcaggaag

SEQ ID NO: 38282 - RNA, 21 nt, RNAi
cagguggaauugcaggaaguu

SEQ ID NO: 38283 - RNA, 21 nt, RNAi
uuguccaccuuaacguccuuc

SEQ ID NO: 38284 - DNA, 21 bp, homo sapiens
aactagaggagaaggagagga

SEQ ID NO: 38285 - RNA, 21 nt, RNAi
cuagaggagaaggagaggauu

SEQ ID NO: 38286 - RNA, 21 nt, RNAi
uugaucuccucuuccucuccu

SEQ ID NO: 38287 - DNA, 21 bp, homo sapiens
aaggagaggaggctgcagaca

SEQ ID NO: 38288 - RNA, 21 nt, RNAi
ggagaggaggcugcagacauu

SEQ ID NO: 38289 - RNA, 21 nt, RNAi
uuccucuccuccgacgucugu

SEQ ID NO: 38290 - DNA, 21 bp, homo sapiens
aagcagccaagcagaggtggc

SEQ ID NO: 38291 - RNA, 21 nt, RNAi
gcagccaagcagagguggcuu

SEQ ID NO: 38292 - RNA, 21 nt, RNAi
uucgucgguucgucuccaccg

SEQ ID NO: 38293 - DNA, 21 bp, homo sapiens
aagcagaggtggcatctctgc

SEQ ID NO: 38294 - RNA, 21 nt, RNAi
gcagagguggcaucucugcuu

SEQ ID NO: 38295 - RNA, 21 nt, RNAi
uucgucuccaccguagagacg

SEQ ID NO: 38296 - DNA, 21 bp, homo sapiens
aaccagctgcaggaactcaag

SEQ ID NO: 38297 - RNA, 21 nt, RNAi
ccagcugcaggaacucaaguu

SEQ ID NO: 38298 - RNA, 21 nt, RNAi
uuggucgacguccuugaguuc

SEQ ID NO: 38299 - DNA, 21 bp, homo sapiens
aacatccgtgtattctgccgg

SEQ ID NO: 38300 - RNA, 21 nt, RNAi
cauccguguauucugccgguu

SEQ ID NO: 38301 - RNA, 21 nt, RNAi
uuguaggcacauaagacggcc

SEQ ID NO: 38302 - DNA, 21 bp, homo sapiens
aagtggacaggatgaagtgtt

SEQ ID NO: 38303 - RNA, 21 nt, RNAi
guggacaggaugaaguguuuu

SEQ ID NO: 38304 - RNA, 21 nt, RNAi
uucaccuguccuacuucacaa

SEQ ID NO: 38305 - DNA, 21 bp, homo sapiens
aagtgtttgaagagattgcca

SEQ ID NO: 38306 - RNA, 21 nt, RNAi
guguuugaagagauugccauu

SEQ ID NO: 38307 - RNA, 21 nt, RNAi
uucacaaacuucucuaacggu

SEQ ID NO: 38308 - DNA, 21 bp, homo sapiens
aagagattgccatgcttgtcc

SEQ ID NO: 38309 - RNA, 21 nt, RNAi
gagauugccaugcuuguccuu

SEQ ID NO: 38310 - RNA, 21 nt, RNAi
uucucuaacgguacgaacagg

SEQ ID NO: 38311 - DNA, 21 bp, homo sapiens
aagctacgtagagatctacaa

SEQ ID NO: 38312 - RNA, 21 nt, RNAi
gcuacguagagaucuacaauu

SEQ ID NO: 38313 - RNA, 21 nt, RNAi
uucgaugcaucucuagauguu

SEQ ID NO: 38314 - DNA, 21 bp, homo sapiens
aatgaacggtcatcacgcagc

SEQ ID NO: 38315 - RNA, 21 nt, RNAi
ugaacggucaucacgcagcuu

SEQ ID NO: 38316 - RNA, 21 nt, RNAi
uuacuugccaguagugcgucg

SEQ ID NO: 38317 - DNA, 21 bp, homo sapiens
aacggtcatcacgcagccaca

SEQ ID NO: 38318 - RNA, 21 nt, RNAi
cggucaucacgcagccacauu

SEQ ID NO: 38319 - RNA, 21 nt, RNAi
uugccaguagugcgucggugu

SEQ ID NO: 38320 - DNA, 21 bp, homo sapiens
aaacacaggccattaacagca

SEQ ID NO: 38321 - RNA, 21 nt, RNAi
acacaggccauuaacagcauu

SEQ ID NO: 38322 - RNA, 21 nt, RNAi
uuuguguccgguaauugucgu

SEQ ID NO: 38323 - DNA, 21 bp, homo sapiens
aacacaggccattaacagcag

SEQ ID NO: 38324 - RNA, 21 nt, RNAi
cacaggccauuaacagcaguu

SEQ ID NO: 38325 - RNA, 21 nt, RNAi
uuguguccgguaauugucguc

SEQ ID NO: 38326 - DNA, 21 bp, homo sapiens
aacagcagcctgtccacgctg

SEQ ID NO: 38327 - RNA, 21 nt, RNAi
cagcagccuguccacgcuguu

SEQ ID NO: 38328 - RNA, 21 nt, RNAi
uugucgucggacaggugcgac

SEQ ID NO: 38329 - DNA, 21 bp, homo sapiens
aacagcaaactgacctacctg

SEQ ID NO: 38330 - RNA, 21 nt, RNAi
cagcaaacugaccuaccuguu

SEQ ID NO: 38331 - RNA, 21 nt, RNAi
uugucguuugacuggauggac

SEQ ID NO: 38332 - DNA, 21 bp, homo sapiens
aaactgacctacctgctgcag

SEQ ID NO: 38333 - RNA, 21 nt, RNAi
acugaccuaccugcugcaguu

SEQ ID NO: 38334 - RNA, 21 nt, RNAi
uuugacuggauggacgacguc

SEQ ID NO: 38335 - DNA, 21 bp, homo sapiens
aactgacctacctgctgcaga

SEQ ID NO: 38336 - RNA, 21 nt, RNAi
cugaccuaccugcugcagauu

SEQ ID NO: 38337 - RNA, 21 nt, RNAi
uugacuggauggacgacgucu

SEQ ID NO: 38338 - DNA, 21 bp, homo sapiens
aagatgctcatgtttgtgaac

SEQ ID NO: 38339 - RNA, 21 nt, RNAi
gaugcucauguuugugaacuu

SEQ ID NO: 38340 - RNA, 21 nt, RNAi
uucuacgaguacaaacacuug

SEQ ID NO: 38341 - DNA, 21 bp, homo sapiens
aacatttctccactggaagag

SEQ ID NO: 38342 - RNA, 21 nt, RNAi
cauuucuccacuggaagaguu

SEQ ID NO: 38343 - RNA, 21 nt, RNAi
uuguaaagaggugaccuucuc

SEQ ID NO: 38344 - DNA, 21 bp, homo sapiens
aactctctacgctttgcctcc

SEQ ID NO: 38345 - RNA, 21 nt, RNAi
cucucuacgcuuugccuccuu

SEQ ID NO: 38346 - RNA, 21 nt, RNAi
uugagagaugcgaaacggagg

SEQ ID NO: 38347 - DNA, 21 bp, homo sapiens
aaggtgaaccagtgtgttatt

SEQ ID NO: 38348 - RNA, 21 nt, RNAi
ggugaaccaguguguuauuuu

SEQ ID NO: 38349 - RNA, 21 nt, RNAi
uuccacuuggucacacaauaa

SEQ ID NO: 38350 - DNA, 21 bp, homo sapiens
aaccagtgtgttattggtact

SEQ ID NO: 38351 - RNA, 21 nt, RNAi
ccaguguguuauugguacuuu

SEQ ID NO: 38352 - RNA, 21 nt, RNAi
uuggucacacaauaaccauga

SEQ ID NO: 38353 - DNA, 21 bp, homo sapiens
aacaggaagtgaagacggatc

SEQ ID NO: 38354 - RNA, 21 nt, RNAi
caggaagugaagacggaucuu

SEQ ID NO: 38355 - RNA, 21 nt, RNAi
uuguccuucacuucugccuag

SEQ ID NO: 38356 - DNA, 21 bp, homo sapiens
aagtgaagacggatccagatc

SEQ ID NO: 38357 - RNA, 21 nt, RNAi
gugaagacggauccagaucuu

SEQ ID NO: 38358 - RNA, 21 nt, RNAi
uucacuucugccuaggucuag

SEQ ID NO: 38359 - DNA, 21 bp, homo sapiens
aagacggatccagatctgtgt

SEQ ID NO: 38360 - RNA, 21 nt, RNAi
gacggauccagaucuguguuu

SEQ ID NO: 38361 - RNA, 21 nt, RNAi
uucugccuaggucuagacaca

SEQ ID NO: 38362 - DNA, 21 bp, homo sapiens
cagttctcttccactgcattc

SEQ ID NO: 38363 - RNA, 21 nt, RNAi
guucucuuccacugcauucuu

SEQ ID NO: 38364 - RNA, 21 nt, RNAi
uucaagagaaggugacguaag

SEQ ID NO: 38365 - DNA, 21 bp, homo sapiens
catagaactgaagagacctct

SEQ ID NO: 38366 - RNA, 21 nt, RNAi
uagaacugaagagaccucuuu

SEQ ID NO: 38367 - RNA, 21 nt, RNAi
uuaucuugacuucucuggaga

SEQ ID NO: 38368 - DNA, 21 bp, homo sapiens
cagctgcctctctcaggaagc

SEQ ID NO: 38369 - RNA, 21 nt, RNAi
gcugccucucucaggaagcuu

SEQ ID NO: 38370 - RNA, 21 nt, RNAi
uucgacggagagaguccuucg

SEQ ID NO: 38371 - DNA, 21 bp, homo sapiens
caggaagcagactcaagagga

SEQ ID NO: 38372 - RNA, 21 nt, RNAi
ggaagcagacucaagaggauu

SEQ ID NO: 38373 - RNA, 21 nt, RNAi
uuccuucgucugaguucuccu

SEQ ID NO: 38374 - DNA, 21 bp, homo sapiens
cagactcaagaggaggcctga

SEQ ID NO: 38375 - RNA, 21 nt, RNAi
gacucaagaggaggccugauu

SEQ ID NO: 38376 - RNA, 21 nt, RNAi
uucugaguucuccuccggacu

SEQ ID NO: 38377 - DNA, 21 bp, homo sapiens
caagaggaggcctgaccagat

SEQ ID NO: 38378 - RNA, 21 nt, RNAi
agaggaggccugaccagauuu

SEQ ID NO: 38379 - RNA, 21 nt, RNAi
uuucuccuccggacuggucua

SEQ ID NO: 38380 - DNA, 21 bp, homo sapiens
cagatggaagatggcctggag

SEQ ID NO: 38381 - RNA, 21 nt, RNAi
gauggaagauggccuggaguu

SEQ ID NO: 38382 - RNA, 21 nt, RNAi
uucuaccuucuaccggaccuc

SEQ ID NO: 38383 - DNA, 21 bp, homo sapiens
cactacagtgccacagacaca

SEQ ID NO: 38384 - RNA, 21 nt, RNAi
cuacagugccacagacacauu

SEQ ID NO: 38385 - RNA, 21 nt, RNAi
uugaugucacggugucugugu

SEQ ID NO: 38386 - DNA, 21 bp, homo sapiens
cagtgccacagacacaaggcc

SEQ ID NO: 38387 - RNA, 21 nt, RNAi
gugccacagacacaaggccuu

SEQ ID NO: 38388 - RNA, 21 nt, RNAi
uucacggugucuguguuccgg

SEQ ID NO: 38389 - DNA, 21 bp, homo sapiens
cacagacacaaggccagacca

SEQ ID NO: 38390 - RNA, 21 nt, RNAi
cagacacaaggccagaccauu

SEQ ID NO: 38391 - RNA, 21 nt, RNAi
uugucuguguuccggucuggu

SEQ ID NO: 38392 - DNA, 21 bp, homo sapiens
cagacacaaggccagaccaca

SEQ ID NO: 38393 - RNA, 21 nt, RNAi
gacacaaggccagaccacauu

SEQ ID NO: 38394 - RNA, 21 nt, RNAi
uucuguguuccggucuggugu

SEQ ID NO: 38395 - DNA, 21 bp, homo sapiens
cacaaggccagaccacagctc

SEQ ID NO: 38396 - RNA, 21 nt, RNAi
caaggccagaccacagcucuu

SEQ ID NO: 38397 - RNA, 21 nt, RNAi
uuguuccggucuggugucgag

SEQ ID NO: 38398 - DNA, 21 bp, homo sapiens
caaggccagaccacagctcaa

SEQ ID NO: 38399 - RNA, 21 nt, RNAi
aggccagaccacagcucaauu

SEQ ID NO: 38400 - RNA, 21 nt, RNAi
uuuccggucuggugucgaguu

SEQ ID NO: 38401 - DNA, 21 bp, homo sapiens
cagaagccagttcctgctgtt

SEQ ID NO: 38402 - RNA, 21 nt, RNAi
gaagccaguuccugcuguuuu

SEQ ID NO: 38403 - RNA, 21 nt, RNAi
uucuucggucaaggacgacaa

(The sequence listing continues in the following parts.)

What is claimed is:

1. A method, comprising the steps of:
detecting a level of a polypeptide encoded by a colon cancer gene in a biological sample of a subject; and
comparing said level to a control level of said polypeptide, wherein the colon cancer gene is differentially expressed in colon cancer tissues as compared to disease-free colon tissues.

2. The method according to claim 1, wherein the biological sample is a colon tissue sample, a blood sample, or a bodily waste sample, and the control level is an average level of said polypeptide in control samples of disease-free subjects.

3. The method according to claim 2, wherein the colon cancer gene is selected from the group consisting of a kinase gene, a phosphatase gene, a protease gene, a metabolic enzyme gene, a G-protein coupled receptor gene, an ion channel gene, and a transcription factor gene.

4. The method according to claim 2, wherein the colon cancer gene is selected from Tables 1-5.

5. The method according to claim 4, wherein the subject has colon cancer.

6. The method according to claim 5, wherein the subject is subject to a therapeutic treatment of said cancer.

7. A method, comprising the steps of:
detecting an expression profile of one or more colon cancer genes in a biological sample of a subject; and
comparing the expression profile to a control expression profile of said one or more colon cancer genes, wherein each of said one or more colon cancer genes is differentially expressed in colon cancer tissues as compared to disease-free colon tissues.

8. The method according to claim 7, wherein said one or more colon cancer genes comprise at least one gene selected from Tables 1-5.

9. A method, comprising the steps of:
detecting in a biological sample the level of T cells that are activated by one or more polypeptides encoded by at least one colon cancer gene; and
comparing the level to a control level of said T cells, wherein said colon cancer gene is over-expressed in colon cancer tissues relative to disease-free colon tissues.

10. A pharmaceutical composition comprising a pharmaceutically acceptable carrier and at least one component selected from the group consisting of:
a polypeptide encoded by a colon cancer gene;
a variant of said polypeptide; and
a polynucleotide encoding said polypeptide or variant, wherein said colon cancer gene is over-expressed in colon cancer tissues relative to disease-free colon tissues.

11. The pharmaceutical composition according to claim 10, wherein the pharmaceutical composition is a vaccine formulation capable of eliciting an immune response against a colon cancer cell or a component thereof, and wherein said colon cancer gene is selected from Tables 1-5.

12. A method comprising administering an immunoeffective amount of the pharmaceutical composition of claim 11 to a subject.

13. A pharmaceutical composition comprising a pharmaceutically acceptable carrier and at least one component selected from the group consisting of:
an agent capable of modulating the expression of a colon cancer gene which is over-expressed in colon cancer tissues relative to disease-free colon tissues;
an agent capable of binding to, or modulating an activity of, a polypeptide encoded by said colon cancer gene; and
a T cell activated by said polypeptide.

14. The pharmaceutical composition according to claim 13, wherein said component is selected from the group consisting of:
a polynucleotide comprising or encoding an RNA that is capable of inhibiting or decreasing the expression of said colon cancer gene by RNA interference or an antisense mechanism;
an antibody specific for said polypeptide encoded by said colon cancer gene; and
an inhibitor of a biological activity of said polypeptide, wherein said colon cancer gene is selected from Tables 1-5.

15. A method comprising administering the pharmaceutical composition of claim 14 to a subject who has colon cancer.

16. The pharmaceutical composition according to claim 13, wherein said component is a polynucleotide comprising or encoding a siRNA sense or antisense sequence selected from Table 7.

17. A diagnostic kit comprising at least one of:
(a) a polynucleotide capable of hybridizing under reduced stringent, stringent, or highly stringent conditions to a sequence selected from SEQ ID NOS:1-63, or a complement thereof; and
(b) an antibody capable of specifically binding to a polypeptide selected from SEQ ID NOS:64-126.

18. A nucleic acid array comprising one or more substrate supports which are stably associated with polynucleotide probes, wherein a substantial portion of all polynucleotide probes that are stably associated with said one or more substrate supports are capable of hybridizing under reduced stringent, stringent, or highly stringent conditions to RNA transcripts of colon cancer genes, or the complements thereof, wherein said colon cancer genes are differentially expressed in colon cancer tissues as compared to disease-free colon tissues.

19. A polypeptide array comprising one or more substrate supports which are stably associated with a plurality of polypeptides, wherein a substantial portion of all polynucleotides that are stably associated with said one or more substrate supports are selected from the group consisting of:
polypeptides encoded by colon cancer genes;
variants of said encoded polypeptides;
antibodies specific for said encoded polypeptides or said variants;
polypeptides comprising said encoded polypeptides or said variants; and
any combination thereof,
wherein said colon cancer genes are differentially expressed in colon cancer tissues as compared to disease-free colon tissues.

20. A method for identifying an agent capable of modulating gene expression in a colon cancer cell, comprising the steps of:
contacting said agent with colon cancer cells; and
comparing gene expression profile or profiles of one or more colon cancer genes in said cells before and after said contacting to determine if said agent can modulate said gene expression profile or profiles, wherein each of said one or more colon cancer genes is differentially expressed in colon cancer tissues as compared to disease-free colon tissues.
